United States Patent Application Publication US 2019/0224279 A1 - sequence listing, part 4

SEQ ID NO: 34618 - protein, 40 aa, Artificial Sequence
  Non-cyclic GFR-binding peptide
  MOD_RES (4), (5), (39): Xaa is C or S
  MOD_RES (19), (20), (21), (22), (23): Xaa is A or G
  MOD_RES (24), (25), (26), (27): Xaa is A or G or is absent
PPTXXVPTRLEPISILYLXXXXXXXXXKFKYEDMVVESXG

SEQ ID NO: 34619 - protein, 37 aa, Artificial Sequence
  Non-cyclic GFR-binding peptide
  MOD_RES (5), (6): Xaa is C or S
SAGPXXTPTKMSPISMLYKNDKQQIILKYHYGMVVDR

SEQ ID NO: 34620 - protein, 40 aa, Artificial Sequence
  Non-cyclic GFR-binding peptide
  MOD_RES (6), (7), (39): Xaa is C or S
STPPTXXVPTRLEPISILYLDSANNVVKFKYEDMVVESXG

SEQ ID NO: 34621 - protein, 34 aa, Artificial Sequence
  Non-cyclic GFR-binding peptide
  MOD_RES (32), (34): Xaa is C or S
VPARLSATSILYYDAANNVVLRKHRDMVVEAXGX

SEQ ID NO: 34622 - protein, 40 aa, Artificial Sequence
  Non-cyclic GFR-binding peptide
  MOD_RES (3), (4), (38), (40): Xaa is C or S
  MOD_RES (18), (19), (20), (21), (22): Xaa is A or G
  MOD_RES (23), (24), (25), (26): Xaa is A or G or is absent
EPXXVPEKMSPINILYFXXXXXXXXXYGKIPNMTVESXAX

SEQ ID NO: 34623 - protein, 41 aa, Artificial Sequence
  Non-cyclic GFR-binding peptide
  MOD_RES (6), (7), (38), (40): Xaa is C or S
RVPSTXXAPVKTEPISMLYLDNGRVLLKFKYEMIVEEXGXL

SEQ ID NO: 34624 - protein, 40 aa, Artificial Sequence
  Non-cyclic GFR-binding peptide
  MOD_RES (6), (7), (39): Xaa is C or S
HVPKPXXAPTKLSATSVLYYDDSSNVILRKHRNMVVRSXG

SEQ ID NO: 34625 - protein, 42 aa, Artificial Sequence
  Non-cyclic GFR-binding peptide
  MOD_RES (5), (6), (40), (42): Xaa is C or S
  MOD_RES (20), (21), (22), (23), (24): Xaa is A or G
  MOD_RES (25), (26), (27), (28): Xaa is A or G or is absent
SAGPXXTPTKMSPISMLYKXXXXXXXXXLKYHYGMVVDRXGX

SEQ ID NO: 34626 - protein, 35 aa, Artificial Sequence
  Non-cyclic GFR-binding peptide
  MOD_RES (4), (5): Xaa is C or S
PASXXVPARLSATSILYYDAANNVVLRKHRDMVVE

SEQ ID NO: 34627 - protein, 33 aa, Artificial Sequence
  Non-cyclic GFR-binding peptide
  MOD_RES (14), (15), (16), (17), (18): Xaa is A or G
  MOD_RES (19), (20), (21), (22): Xaa is A or G or is absent
TPTKMEPISMLYLXXXXXXXXXKFKYEGMVVDR

SEQ ID NO: 34628 - protein, 38 aa, Artificial Sequence
  Non-cyclic GFR-binding peptide
  MOD_RES (4), (5), (36), (38): Xaa is C or S
AAPXXVPQALSPINILYFVGRKPKVYGKIPMIVRSXKX

SEQ ID NO: 34629 - protein, 41 aa, Artificial Sequence
  Non-cyclic GFR-binding peptide
  MOD_RES (4), (5), (39), (41): Xaa is C or S
  MOD_RES (19), (20), (21), (22), (23): Xaa is A or G
  MOD_RES (24), (25), (26), (27): Xaa is A or G or is absent
PEPXXVPEKMNAISILYFXXXXXXXXXLKKYRNMTVESXAX

SEQ ID NO: 34630 - protein, 35 aa, Artificial Sequence
  Non-cyclic GFR-binding peptide
  MOD_RES (34), (34): Xaa is C or S
  MOD_RES (14), (15), (16), (17), (18): Xaa is A or G
  MOD_RES (19), (20), (21), (22): Xaa is A or G or is absent
VPEKMEPISILYLXXXXXXXXXKFKYENMTVESXA

SEQ ID NO: 34631 - protein, 40 aa, Artificial Sequence
  Non-cyclic GFR-binding peptide
  MOD_RES (6), (7), (39): Xaa is C or S
STPPTXXVPTRLSATSILYYDSANNVVLRKHRDMVVESXG

SEQ ID NO: 34632 - protein, 33 aa, Artificial Sequence
  Non-cyclic GFR-binding peptide
  MOD_RES (1), (1): Xaa is C or S
  MOD_RES (15), (16), (17), (18), (19): Xaa is A or G
  MOD_RES (20), (21), (22), (23): Xaa is A or G or is absent
XTPTKMEPISMLYLXXXXXXXXXKFKYEGMVVD

SEQ ID NO: 34633 - protein, 41 aa, Artificial Sequence
  Non-cyclic GFR-binding peptide
  MOD_RES (4), (5), (38), (40): Xaa is C or S
  MOD_RES (19), (20), (21), (22), (23): Xaa is A or G
  MOD_RES (24), (25), (26), (27): Xaa is A or G or is absent
PSTXXAPVKTSATSMLYYXXXXXXXXXLRKHRMIVEEXGXL

SEQ ID NO: 34634 - protein, 34 aa, Artificial Sequence
  Non-cyclic GFR-binding peptide
  MOD_RES (32), (34): Xaa is C or S
VPEKMSPINILYFDENKNVVYGKIPNMTVESXAX

SEQ ID NO: 34635 - protein, 34 aa, Artificial Sequence
  Non-cyclic GFR-binding peptide
  MOD_RES (1), (2): Xaa is C or S
  MOD_RES (16), (17), (18), (19), (20): Xaa is A or G
  MOD_RES (21), (22), (23), (24): Xaa is A or G or is absent
XXVPEKMSPISILYKXXXXXXXXXLKYHYNMTVE

SEQ ID NO: 34636 - protein, 42 aa, Artificial Sequence
  Non-cyclic GFR-binding peptide
  MOD_RES (4), (5), (39), (41): Xaa is C or S
  MOD_RES (19), (20), (21), (22), (23): Xaa is A or G
  MOD_RES (24), (25), (26), (27): Xaa is A or G or is absent
PPTXXVPTRLSATSILYYXXXXXXXXXLRKHRDMVVESXGXR

SEQ ID NO: 34637 - protein, 38 aa, Artificial Sequence
  Non-cyclic GFR-binding peptide
  MOD_RES (6), (7): Xaa is C or S
STPPTXXVPTRLSPISILYKDSANNVVLKYHYDMVVES

SEQ ID NO: 34638 - protein, 34 aa, Artificial Sequence
  Non-cyclic GFR-binding peptide
  MOD_RES (1), (2): Xaa is C or S
  MOD_RES (16), (17), (18), (19), (20): Xaa is A or G
  MOD_RES (21), (22), (23), (24): Xaa is A or G or is absent
XXVPEKMEPISILYLXXXXXXXXXKFKYENMTVE

SEQ ID NO: 34639 - protein, 39 aa, Artificial Sequence
  Non-cyclic GFR-binding peptide
  MOD_RES (5), (6): Xaa is C or S
  MOD_RES (20), (21), (22), (23), (24): Xaa is A or G
  MOD_RES (25), (26), (27), (28): Xaa is A or G or is absent
IPEPXXVPEKMSPINILYFXXXXXXXXXYGKIPNMTVES

SEQ ID NO: 34640 - protein, 33 aa, Artificial Sequence
  Non-cyclic GFR-binding peptide
  MOD_RES (33), (33): Xaa is C or S
  MOD_RES (14), (15), (16), (17), (18): Xaa is A or G
  MOD_RES (19), (20), (21), (22): Xaa is A or G or is absent
APVKTSATSMLYYXXXXXXXXXLRKHRMIVEEX

SEQ ID NO: 34641 - protein, 37 aa, Artificial Sequence
  Non-cyclic GFR-binding peptide
  MOD_RES (2), (3), (36): Xaa is C or S
  MOD_RES (17), (18), (19), (20), (21): Xaa is A or G
  MOD_RES (22), (23), (24), (25): Xaa is A or G or is absent
PXXVPQDLSPINILYFXXXXXXXXXYGKIPMVVKSXK

SEQ ID NO: 34642 - protein, 41 aa, Artificial Sequence
  Non-cyclic GFR-binding peptide
  MOD_RES (4), (5), (39), (41): Xaa is C or S
  MOD_RES (19), (20), (21), (22), (23): Xaa is A or G
  MOD_RES (24), (25), (26), (27): Xaa is A or G or is absent
AGPXXTPTKMSATSMLYYXXXXXXXXXLRKHRGMVVDRXGX

SEQ ID NO: 34643 - protein, 42 aa, Artificial Sequence
  Non-cyclic GFR-binding peptide
  MOD_RES (6), (7), (41): Xaa is C or S
  MOD_RES (21), (22), (23), (24), (25): Xaa is A or G
  MOD_RES (26), (27), (28), (29): Xaa is A or G or is absent
AAPASXXVPARLSATSILYYXXXXXXXXXLRKHRDMVVEAXG

SEQ ID NO: 34644 - protein, 44 aa, Artificial Sequence
  Non-cyclic GFR-binding peptide
  MOD_RES (6), (7), (41), (43): Xaa is C or S
  MOD_RES (21), (22), (23), (24), (25): Xaa is A or G
  MOD_RES (26), (27), (28), (29): Xaa is A or G or is absent
STPPTXXVPTRLSATSILYYXXXXXXXXXLRKHRDMVVESXGXR

SEQ ID NO: 34645 - protein, 41 aa, Artificial Sequence
  Non-cyclic GFR-binding peptide
  MOD_RES (4), (5), (39), (41): Xaa is C or S
  MOD_RES (19), (20), (21), (22), (23): Xaa is A or G
  MOD_RES (24), (25), (26), (27): Xaa is A or G or is absent
SKAXXVPTKLSATSILYYXXXXXXXXXLRKHRGMAVSEXGX

SEQ ID NO: 34646 - protein, 36 aa, Artificial Sequence
  Non-cyclic GFR-binding peptide
  MOD_RES (1), (35): Xaa is C or S
  MOD_RES (15), (16), (17), (18), (19): Xaa is A or G
  MOD_RES (20), (21), (22), (23): Xaa is A or G or is absent
XVPTRLEPISILYLXXXXXXXXXKFKYEDMVVESXG

SEQ ID NO: 34647 - protein, 38 aa, Artificial Sequence
  Non-cyclic GFR-binding peptide
  MOD_RES (4), (5), (38): Xaa is C or S
  MOD_RES (19), (20), (21), (22), (23): Xaa is A or G
  MOD_RES (24), (25), (26), (27): Xaa is A or G or is absent
PSTXXAPVKTEPISMLYLXXXXXXXXXKFKYEMIVEEX

SEQ ID NO: 34648 - protein, 36 aa, Artificial Sequence
  Non-cyclic GFR-binding peptide
  MOD_RES (5), (6): Xaa is C or S
TPPTXXVPTRLSATSILYYDSANNVVLRKHRDMVVE

SEQ ID NO: 34649 - protein, 37 aa, Artificial Sequence
  Non-cyclic GFR-binding peptide
  MOD_RES (6), (7): Xaa is C or S
ASAAPXXVPQALSPINILYFVGRKPKVYGKIPMIVRS

SEQ ID NO: 34650 - protein, 37 aa, Artificial Sequence
  Non-cyclic GFR-binding peptide
  MOD_RES (3), (4): Xaa is C or S
  MOD_RES (18), (19), (20), (21), (22): Xaa is A or G
  MOD_RES (23), (24), (25), (26): Xaa is A or G or is absent
PTXXVPTRLSATSILYYXXXXXXXXXLRKHRDMVVES

SEQ ID NO: 34651 - protein, 41 aa, Artificial Sequence
  Non-cyclic GFR-binding peptide
  MOD_RES (4), (5), (39), (41): Xaa is C or S
  MOD_RES (19), (20), (21), (22), (23): Xaa is A or G
  MOD_RES (24), (25), (26), (27): Xaa is A or G or is absent
PEPXXVPEKMSPINILYFXXXXXXXXXYGKIPNMTVESXAX

SEQ ID NO: 34652 - protein, 41 aa, Artificial Sequence
  Non-cyclic GFR-binding peptide
  MOD_RES (6), (7), (38), (40): Xaa is C or S
RVPSTXXAPVKTSATSMLYYDNGRVLLLRKHRMIVEEXGXL

SEQ ID NO: 34653 - protein, 40 aa, Artificial Sequence
  Non-cyclic GFR-binding peptide
  MOD_RES (4), (5), (37), (39): Xaa is C or S
AGPXXTPTKMSATSMLYYNDKQQIILRKHRGMVVDRXGXS

SEQ ID NO: 34654 - protein, 36 aa, Artificial Sequence
  Non-cyclic GFR-binding peptide
  MOD_RES (1), (34), (36): Xaa is C or S
  MOD_RES (15), (16), (17), (18), (19): Xaa is A or G
  MOD_RES (20), (21), (22), (23): Xaa is A or G or is absent
XAPVKTSPISMLYKXXXXXXXXXLKYHYMIVEEXGX

SEQ ID NO: 34655 - protein, 36 aa, Artificial Sequence
  Non-cyclic GFR-binding peptide
  MOD_RES (2), (3): Xaa is C or S
  MOD_RES (17), (18), (19), (20), (21): Xaa is A or G
  MOD_RES (22), (23), (24), (25): Xaa is A or G or is absent
PXXTPTKMSATSMLYYXXXXXXXXXLRKHRGMVVDR

SEQ ID NO: 34656 - protein, 35 aa, Artificial Sequence
  Non-cyclic GFR-binding peptide
  MOD_RES (4), (5): Xaa is C or S
AGPXXTPTKMSATSMLYYNDKQQIILRKHRGMVVD

SEQ ID NO: 34657 - protein, 38 aa, Artificial Sequence
  Non-cyclic GFR-binding peptide
  MOD_RES (2), (3), (36), (38): Xaa is C or S
  MOD_RES (17), (18), (19), (20), (21): Xaa is A or G
  MOD_RES (22), (23), (24), (25): Xaa is A or G or is absent
TXXAPVKTSPISMLYKXXXXXXXXXLKYHYMIVEEXGX

SEQ ID NO: 34658 - protein, 35 aa, Artificial Sequence
  Non-cyclic GFR-binding peptide
  MOD_RES (34), (34): Xaa is C or S
  MOD_RES (14), (15), (16), (17), (18): Xaa is A or G
  MOD_RES (19), (20), (21), (22): Xaa is A or G or is absent
VPEKMSPISILYKXXXXXXXXXLKYHYNMTVESXA

SEQ ID NO: 34659 - protein, 35 aa, Artificial Sequence
  Non-cyclic GFR-binding peptide
  MOD_RES (1), (33), (35): Xaa is C or S
XVPEKMSATSILYYDENKNVVLRKHRNMTVESXAX

SEQ ID NO: 34660 - protein, 37 aa, Artificial Sequence
  Non-cyclic GFR-binding peptide
  MOD_RES (4), (5): Xaa is C or S
  MOD_RES (19), (20), (21), (22), (23): Xaa is A or G
  MOD_RES (24), (25), (26), (27): Xaa is A or G or is absent
PSTXXAPVKTSPISMLYKXXXXXXXXXLKYHYMIVEE

SEQ ID NO: 34661 - protein, 35 aa, Artificial Sequence
  Non-cyclic GFR-binding peptide
  MOD_RES (1), (2), (34): Xaa is C or S
XXVPEKMNAISILYFDENKNVVLKKYRNMTVESXA

SEQ ID NO: 34662 - protein, 38 aa, Artificial Sequence
  Non-cyclic GFR-binding peptide
  MOD_RES (3), (4), (36), (38): Xaa is C or S
EPXXVPEKMSPINILYFDENKNVVYGKIPNMTVESXAX

SEQ ID NO: 34663 - protein, 40 aa, Artificial Sequence
  Non-cyclic GFR-binding peptide
  MOD_RES (5), (6), (38), (40): Xaa is C or S
TPPTXXVPTRLSPISILYKDSANNVVLKYHYDMVVESXGX

SEQ ID NO: 34664 - protein, 39 aa, Artificial Sequence
  Non-cyclic GFR-binding peptide
  MOD_RES (4), (5), (39): Xaa is C or S
  MOD_RES (19), (20), (21), (22), (23): Xaa is A or G
  MOD_RES (24), (25), (26), (27): Xaa is A or G or is absent
PPTXXVPTRLSATSILYYXXXXXXXXXLRKHRDMVVESX

SEQ ID NO: 34665 - protein, 39 aa, Artificial Sequence
  Non-cyclic GFR-binding peptide
  MOD_RES (6), (7), (39): Xaa is C or S
HVPKPXXAPTKLEPISVLYLDDSSNVIKFKYENMVVRSX

SEQ ID NO: 34666 - protein, 40 aa, Artificial Sequence
  Non-cyclic GFR-binding peptide
  MOD_RES (6), (7): Xaa is C or S
  MOD_RES (21), (22), (23), (24), (25): Xaa is A or G
  MOD_RES (26), (27), (28), (29): Xaa is A or G or is absent
GIPEPXXVPEKMEPISILYLXXXXXXXXXKFKYENMTVES

SEQ ID NO: 34667 - protein, 35 aa, Artificial Sequence
  Non-cyclic GFR-binding peptide
  MOD_RES (3), (4), (35): Xaa is C or S
STXXAPVKTEPISMLYLDNGRVLLKFKYEMIVEEX

SEQ ID NO: 34668 - protein, 38 aa, Artificial Sequence
  Non-cyclic GFR-binding peptide
  MOD_RES (3), (4), (35), (37): Xaa is C or S
STXXAPVKTEPISMLYLDNGRVLLKFKYEMIVEEXGXL

SEQ ID NO: 34669 - protein, 33 aa, Artificial Sequence
  Non-cyclic GFR-binding peptide
  MOD_RES (2), (3): Xaa is C or S
PXXVPEKMSPINILYFDENKNVVYGKIPNMTVE

SEQ ID NO: 34670 - protein, 37 aa, Artificial Sequence
  Non-cyclic GFR-binding peptide
  MOD_RES (2), (3), (37): Xaa is C or S
  MOD_RES (17), (18), (19), (20), (21): Xaa is A or G
  MOD_RES (22), (23), (24), (25): Xaa is A or G or is absent
PXXVPEKMSATSILYYXXXXXXXXXLRKHRNMTVESX

SEQ ID NO: 34671 - protein, 37 aa, Artificial Sequence
  Non-cyclic GFR-binding peptide
  MOD_RES (34), (36): Xaa is C or S
  MOD_RES (14), (15), (16), (17), (18): Xaa is A or G
  MOD_RES (19), (20), (21), (22): Xaa is A or G or is absent
VPEKMSPINILYFXXXXXXXXXYGKIPNMTVESXAXR

SEQ ID NO: 34672 - protein, 36 aa, Artificial Sequence
  Non-cyclic GFR-binding peptide
  MOD_RES (34), (36): Xaa is C or S
  MOD_RES (14), (15), (16), (17), (18): Xaa is A or G
  MOD_RES (19), (20), (21), (22): Xaa is A or G or is absent
VPEKMNAISILYFXXXXXXXXXLKKYRNMTVESXAX

SEQ ID NO: 34673 - protein, 37 aa, Artificial Sequence
  Non-cyclic GFR-binding peptide
  MOD_RES (2), (3), (35), (37): Xaa is C or S
PXXTPTKMSATSMLYYNDKQQIILRKHRGMVVDRXGX

SEQ ID NO: 34674 - protein, 39 aa, Artificial Sequence
  Non-cyclic GFR-binding peptide
  MOD_RES (3), (4), (38): Xaa is C or S
  MOD_RES (18), (19), (20), (21), (22): Xaa is A or G
  MOD_RES (23), (24), (25), (26): Xaa is A or G or is absent
EPXXVPEKMSPISILYKXXXXXXXXXLKYHYNMTVESXA

SEQ ID NO: 34675 - protein, 35 aa, Artificial Sequence
  Non-cyclic GFR-binding peptide
  MOD_RES (2), (3), (34): Xaa is C or S
PXXVPQALSPINILYFVGRKPKVYGKIPMIVRSXK

SEQ ID NO: 34676 - protein, 39 aa, Artificial Sequence
  Non-cyclic GFR-binding peptide
  MOD_RES (5), (6), (38): Xaa is C or S
APASXXVPARLSATSILYYDAANNVVLRKHRDMVVEAXG

SEQ ID NO: 34677 - protein, 39 aa, Artificial Sequence
  Non-cyclic GFR-binding peptide
  MOD_RES (6), (7), (38): Xaa is C or S
RVPSTXXAPVKTSATSMLYYDNGRVLLLRKHRMIVEEXG

SEQ ID NO: 34678 - protein, 40 aa, Artificial Sequence
  Non-cyclic GFR-binding peptide
  MOD_RES (3), (4), (37), (39): Xaa is C or S
  MOD_RES (18), (19), (20), (21), (22): Xaa is A or G
  MOD_RES (23), (24), (25), (26): Xaa is A or G or is absent
SPXXVPQDLSPINILYFXXXXXXXXXYGKIPMVVKSXKXS

SEQ ID NO: 34679 - protein, 36 aa, Artificial Sequence
  Non-cyclic GFR-binding peptide
  MOD_RES (2), (3): Xaa is C or S
  MOD_RES (17), (18), (19), (20), (21): Xaa is A or G
  MOD_RES (22), (23), (24), (25): Xaa is A or G or is absent
SXXVPARLSATSILYYXXXXXXXXXLRKHRDMVVEA

SEQ ID NO: 34680 - protein, 40 aa, Artificial Sequence
  Non-cyclic GFR-binding peptide
  MOD_RES (5), (6), (38), (40): Xaa is C or S
IPEPXXVPEKMEPISILYLDENKNVVKFKYENMTVESXAX

SEQ ID NO: 34681 - protein, 39 aa, Artificial Sequence
  Non-cyclic GFR-binding peptide
  MOD_RES (6), (7): Xaa is C or S
  MOD_RES (21), (22), (23), (24), (25): Xaa is A or G
  MOD_RES (26), (27), (28), (29): Xaa is A or G or is absent
GIPEPXXVPEKMSPINILYFXXXXXXXXXYGKIPNMTVE

SEQ ID NO: 34682 - protein, 38 aa, Artificial Sequence
  Non-cyclic GFR-binding peptide
  MOD_RES (5), (6), (38): Xaa is C or S
SAGPXXTPTKMSATSMLYYNDKQQIILRKHRGMVVDRX

SEQ ID NO: 34683 - protein, 40 aa, Artificial Sequence
  Non-cyclic GFR-binding peptide
  MOD_RES (3), (4), (38), (40): Xaa is C or S
  MOD_RES (18), (19), (20), (21), (22): Xaa is A or G
  MOD_RES (23), (24), (25), (26): Xaa is A or G or is absent
EPXXVPEKMEPISILYLXXXXXXXXXKFKYENMTVESXAX

SEQ ID NO: 34684 - protein, 37 aa, Artificial Sequence
  Non-cyclic GFR-binding peptide
  MOD_RES (1), (2), (36): Xaa is C or S
  MOD_RES (16), (17), (18), (19), (20): Xaa is A or G
  MOD_RES (21), (22), (23), (24): Xaa is A or G or is absent
XXTPTKMSATSMLYYXXXXXXXXXLRKHRGMVVDRXG

SEQ ID NO: 34685 - protein, 36 aa, Artificial Sequence
  Non-cyclic GFR-binding peptide
  MOD_RES (3), (4), (35): Xaa is C or S
STXXAPVKTEPISMLYLDNGRVLLKFKYEMIVEEXG

SEQ ID NO: 34686 - protein, 37 aa, Artificial Sequence
  Non-cyclic GFR-binding peptide
  MOD_RES (6), (7): Xaa is C or S
ASASPXXVPQDLSPINILYFVGRTPKVYGKIPMVVKS

SEQ ID NO: 34687 - protein, 38 aa, Artificial Sequence
  Non-cyclic GFR-binding peptide
  MOD_RES (1), (2), (36), (38): Xaa is C or S
  MOD_RES (16), (17), (18), (19), (20): Xaa is A or G
  MOD_RES (21), (22), (23), (24): Xaa is A or G or is absent
XXTPTKMSATSMLYYXXXXXXXXXLRKHRGMVVDRXGX

SEQ ID NO: 34688 - protein, 39 aa, Artificial Sequence
  Non-cyclic GFR-binding peptide
  MOD_RES (4), (5), (37), (39): Xaa is C or S
PPTXXVPTRLSPISILYKDSANNVVLKYHYDMVVESXGX

SEQ ID NO: 34689 - protein, 35 aa, Artificial Sequence
  Non-cyclic GFR-binding peptide
  MOD_RES (1), (32), (34): Xaa is C or S
XAPVKTEPISMLYLDNGRVLLKFKYEMIVEEXGXL

SEQ ID NO: 34690 - protein, 42 aa, Artificial Sequence
  Non-cyclic GFR-binding peptide
  MOD_RES (6), (7), (41): Xaa is C or S
  MOD_RES (21), (22), (23), (24), (25): Xaa is A or G
  MOD_RES (26), (27), (28), (29): Xaa is A or G or is absent
GIPEPXXVPEKMEPISILYLXXXXXXXXXKFKYENMTVESXA

SEQ ID NO: 34691 - protein, 36 aa, Artificial Sequence
  Non-cyclic GFR-binding peptide
  MOD_RES (1), (2), (34), (36): Xaa is C or S
XXVPEKMEPISILYLDENKNVVKFKYENMTVESXAX

SEQ ID NO: 34692 - protein, 31 aa, Artificial Sequence
  Non-cyclic GFR-binding peptide
  MOD_RES (1), (1): Xaa is C or S
XAPVKTEPISMLYLDNGRVLLKFKYEMIVEE

SEQ ID NO: 34693 - protein, 34 aa, Artificial Sequence
  Non-cyclic GFR-binding peptide
  MOD_RES (2), (3): Xaa is C or S
PXXTPTKMSPISMLYKNDKQQIILKYHYGMVVDR

SEQ ID NO: 34694 - protein, 40 aa, Artificial Sequence
  Non-cyclic GFR-binding peptide
  MOD_RES (6), (7): Xaa is C or S
  MOD_RES (21), (22), (23), (24), (25): Xaa is A or G
  MOD_RES (26), (27), (28), (29): Xaa is A or G or is absent
AAPASXXVPARLSATSILYYXXXXXXXXXLRKHRDMVVEA

SEQ ID NO: 34695 - protein, 35 aa, Artificial Sequence
  Non-cyclic GFR-binding peptide
  MOD_RES (2), (3), (35): Xaa is C or S
TXXVPTRLSPISILYKDSANNVVLKYHYDMVVESX

SEQ ID NO: 34696 - protein, 42 aa, Artificial Sequence
  Non-cyclic GFR-binding peptide
  MOD_RES (5), (6), (40), (42): Xaa is C or S
  MOD_RES (20), (21), (22), (23), (24): Xaa is A or G
  MOD_RES (25), (26), (27), (28): Xaa is A or G or is absent
ASKAXXVPTKLSATSILYYXXXXXXXXXLRKHRGMAVSEXGX

SEQ ID NO: 34697 - protein, 40 aa, Artificial Sequence
  Non-cyclic GFR-binding peptide
  MOD_RES (3), (4), (38), (40): Xaa is C or S
  MOD_RES (18), (19), (20), (21), (22): Xaa is A or G
  MOD_RES (23), (24), (25), (26): Xaa is A or G or is absent
EPXXVPEKMSATSILYYXXXXXXXXXLRKHRNMTVESXAX

SEQ ID NO: 34698 - protein, 32 aa, Artificial Sequence
  Non-cyclic GFR-binding peptide
  MOD_RES (14), (15), (16), (17), (18): Xaa is A or G
  MOD_RES (19), (20), (21), (22): Xaa is A or G or is absent
APVKTEPISMLYLXXXXXXXXXKFKYEMIVEE

SEQ ID NO: 34699 - protein, 39 aa, Artificial Sequence
  Non-cyclic GFR-binding peptide
  MOD_RES (5), (6), (37), (39): Xaa is C or S
SAAPXXVPQALSPINILYFVGRKPKVYGKIPMIVRSXKX

SEQ ID NO: 34700 - protein, 39 aa, Artificial Sequence
  Non-cyclic GFR-binding peptide
  MOD_RES (6), (7): Xaa is C or S
  MOD_RES (21), (22), (23), (24), (25): Xaa is A or G
  MOD_RES (26), (27), (28), (29): Xaa is A or G or is absent
RVPSTXXAPVKTSPISMLYKXXXXXXXXXLKYHYMIVEE

SEQ ID NO: 34701 - protein, 42 aa, Artificial Sequence
  Non-cyclic GFR-binding peptide
  MOD_RES (4), (5), (39), (41): Xaa is C or S
  MOD_RES (19), (20), (21), (22), (23): Xaa is A or G
  MOD_RES (24), (25), (26), (27): Xaa is A or G or is absent
AGPXXTPTKMEPISMLYLXXXXXXXXXKFKYEGMVVDRXGXS

SEQ ID NO: 34702 - protein, 41 aa, Artificial Sequence
  Non-cyclic GFR-binding peptide
  MOD_RES (5), (6), (38), (40): Xaa is C or S
IPEPXXVPEKMNAISILYFDENKNVVLKKYRNMTVESXAXR

SEQ ID NO: 34703 - protein, 36 aa, Artificial Sequence
  Non-cyclic GFR-binding peptide
  MOD_RES (34), (36): Xaa is C or S
  MOD_RES (14), (15), (16), (17), (18): Xaa is A or G
  MOD_RES (19), (20), (21), (22): Xaa is A or G or is absent
TPTKMEPISMLYLXXXXXXXXXKFKYEGMVVDRXGX

SEQ ID NO: 34704 - protein, 38 aa, Artificial Sequence
  Non-cyclic GFR-binding peptide
  MOD_RES (1), (2), (36), (38): Xaa is C or S
  MOD_RES (16), (17), (18), (19), (20): Xaa is A or G
  MOD_RES (21), (22), (23), (24): Xaa is A or G or is absent
XXVPEKMNAISILYFXXXXXXXXXLKKYRNMTVESXAX

SEQ ID NO: 34705 - protein, 39 aa, Artificial Sequence
  Non-cyclic GFR-binding peptide
  MOD_RES (5), (6), (38): Xaa is C or S
SAGPXXTPTKMEPISMLYLNDKQQIIKFKYEGMVVDRXG

SEQ ID NO: 34706 - protein, 37 aa, Artificial Sequence
  Non-cyclic GFR-binding peptide
  MOD_RES (2), (3), (37): Xaa is C or S
  MOD_RES (17), (18), (19), (20), (21): Xaa is A or G
  MOD_RES (22), (23), (24), (25): Xaa is A or G or is absent
PXXTPTKMEPISMLYLXXXXXXXXXKFKYEGMVVDRX

SEQ ID NO: 34707 - protein, 35 aa, Artificial Sequence
  Non-cyclic GFR-binding peptide
  MOD_RES (1), (33), (35): Xaa is C or S
XVPTRLEPISILYLDSANNVVKFKYEDMVVESXGX

SEQ ID NO: 34708 - protein, 38 aa, Artificial Sequence
  Non-cyclic GFR-binding peptide
  MOD_RES (2), (3), (37): Xaa is C or S
  MOD_RES (17), (18), (19), (20), (21): Xaa is A or G
  MOD_RES (22), (23), (24), (25): Xaa is A or G or is absent
PXXVPEKMSPINILYFXXXXXXXXXYGKIPNMTVESXA

SEQ ID NO: 34709 - protein, 33 aa, Artificial Sequence
  Non-cyclic GFR-binding peptide
  MOD_RES (32), (32): Xaa is C or S
VPEKMSPISILYKDENKNVVLKYHYNMTVESXA

SEQ ID NO: 34710 - protein, 37 aa, Artificial Sequence
  Non-cyclic GFR-binding peptide
  MOD_RES (2), (3), (34), (36): Xaa is C or S
PXXVSQDLSPINILYFIGKTPKIYGKIPMIVKSXKXS

SEQ ID NO: 34711 - protein, 36 aa, Artificial Sequence
  Non-cyclic GFR-binding peptide
  MOD_RES (34), (36): Xaa is C or S
  MOD_RES (14), (15), (16), (17), (18): Xaa is A or G
  MOD_RES (19), (20), (21), (22): Xaa is A or G or is absent
TPTKMSATSMLYYXXXXXXXXXLRKHRGMVVDRXGX

SEQ ID NO: 34712 - protein, 34 aa, Artificial Sequence
  Non-cyclic GFR-binding peptide
  MOD_RES (2), (3): Xaa is C or S
PXXVPEKMEPISILYLDENKNVVKFKYENMTVES

SEQ ID NO: 34713 - protein, 36 aa, Artificial Sequence
  Non-cyclic GFR-binding peptide
  MOD_RES (2), (3), (36): Xaa is C or S
  MOD_RES (17), (18), (19), (20), (21): Xaa is A or G
  MOD_RES (22), (23), (24), (25): Xaa is A or G or is absent
PXXVPQALSPINILYFXXXXXXXXXYGKIPMIVRSX

SEQ ID NO: 34714 - protein, 41 aa, Artificial Sequence
  Non-cyclic GFR-binding peptide
  MOD_RES (5), (6), (38), (40): Xaa is C or S
TPPTXXVPTRLEPISILYLDSANNVVKFKYEDMVVESXGXR

SEQ ID NO: 34715 - protein, 36 aa, Artificial Sequence
  Non-cyclic GFR-binding peptide
  MOD_RES (33), (35): Xaa is C or S
  MOD_RES (14), (15), (16), (17), (18): Xaa is A or G
  MOD_RES (19), (20), (21), (22): Xaa is A or G or is absent
VSQDLSPINILYFXXXXXXXXXYGKIPMIVKSXKXS

SEQ ID NO: 34716 - protein, 33 aa, Artificial Sequence
  Non-cyclic GFR-binding peptide
  MOD_RES (2), (3): Xaa is C or S
PXXVSQDLSPINILYFIGKTPKIYGKIPMIVKS

SEQ ID NO: 34717 - protein, 40 aa, Artificial Sequence
  Non-cyclic GFR-binding peptide
  MOD_RES (4), (5), (37), (39): Xaa is C or S
PEPXXVPEKMNAISILYFDENKNVVLKKYRNMTVESXAXR

SEQ ID NO: 34718 - protein, 39 aa, Artificial Sequence
  Non-cyclic GFR-binding peptide
  MOD_RES (6), (7): Xaa is C or S
  MOD_RES (21), (22), (23), (24), (25): Xaa is A or G
  MOD_RES (26), (27), (28), (29): Xaa is A or G or is absent
HVPKPXXAPTKLSPISVLYKXXXXXXXXXLKYHYNMVVR

SEQ ID NO: 34719 - protein, 44 aa, Artificial Sequence
  Non-cyclic GFR-binding peptide
  MOD_RES (6), (7), (41), (43): Xaa is C or S
  MOD_RES (21), (22), (23), (24), (25): Xaa is A or G
  MOD_RES (26), (27), (28), (29): Xaa is A or G or is absent
STPPTXXVPTRLSPISILYKXXXXXXXXXLKYHYDMVVESXGXR

SEQ ID NO: 34720 - protein, 35 aa, Artificial Sequence
  Non-cyclic GFR-binding peptide
  MOD_RES (3), (4), (35): Xaa is C or S
SPXXVSQDLSPINILYFIGKTPKIYGKIPMIVKSX

SEQ ID NO: 34721 - protein, 38 aa, Artificial Sequence
  Non-cyclic GFR-binding peptide
  MOD_RES (5), (6), (38): Xaa is C or S
SAGPXXTPTKMEPISMLYLNDKQQIIKFKYEGMVVDRX

SEQ ID NO: 34722 - protein, 41 aa, Artificial Sequence
  Non-cyclic GFR-binding peptide
  MOD_RES (5), (6), (40): Xaa is C or S
  MOD_RES (20), (21), (22), (23), (24): Xaa is A or G
  MOD_RES (25), (26), (27), (28): Xaa is A or G or is absent
SAGPXXTPTKMSPISMLYKXXXXXXXXXLKYHYGMVVDRXG

SEQ ID NO: 34723 - protein, 35 aa, Artificial Sequence
  Non-cyclic GFR-binding peptide
  MOD_RES (3), (4): Xaa is C or S
GPXXTPTKMSATSMLYYNDKQQIILRKHRGMVVDR

SEQ ID NO: 34724 - protein, 37 aa, Artificial Sequence
  Non-cyclic GFR-binding peptide
  MOD_RES (4), (5): Xaa is C or S
  MOD_RES (19), (20), (21), (22), (23): Xaa is A or G
  MOD_RES (24), (25), (26), (27): Xaa is A or G or is absent
PEPXXVPEKMEPISILYLXXXXXXXXXKFKYENMTVE

SEQ ID NO: 34725 - protein, 41 aa, Artificial Sequence
  Non-cyclic GFR-binding peptide
  MOD_RES (6), (7), (39), (41): Xaa is C or S
GIPEPXXVPEKMSPINILYFDENKNVVYGKIPNMTVESXAX

SEQ ID NO: 34726 - protein, 34 aa, Artificial Sequence
  Non-cyclic GFR-binding peptide
  MOD_RES (1), (1): Xaa is C or S
  MOD_RES (15), (16), (17), (18), (19): Xaa is A or G
  MOD_RES (20), (21), (22), (23): Xaa is A or G or is absent
XVPEKMEPISILYLXXXXXXXXXKFKYENMTVES

SEQ ID NO: 34727 - protein, 33 aa, Artificial Sequence
  Non-cyclic GFR-binding peptide
  MOD_RES (1), (33): Xaa is C or S
XTPTKMSATSMLYYNDKQQIILRKHRGMVVDRX

SEQ ID NO: 34728 - protein, 37 aa, Artificial Sequence
  Non-cyclic GFR-binding peptide
  MOD_RES (3), (4), (36): Xaa is C or S
KAXXVPTKLSATSILYYDKGVVTYLRKHRGMAVSEXG

SEQ ID NO: 34729 - protein, 38 aa, Artificial Sequence
  Non-cyclic GFR-binding peptide
  MOD_RES (6), (7), (38): Xaa is C or S
ASAAPXXVPQALSPINILYFVGRKPKVYGKIPMIVRSX

SEQ ID NO: 34730 - protein, 41 aa, Artificial Sequence
  Non-cyclic GFR-binding peptide
  MOD_RES (6), (7), (39), (41): Xaa is C or S
GSAGPXXTPTKMSATSMLYYNDKQQIILRKHRGMVVDRXGX

SEQ ID NO: 34731 - protein, 39 aa, Artificial Sequence
  Non-cyclic GFR-binding peptide
  MOD_RES (3), (4), (36), (38): Xaa is C or S
GPXXTPTKMSATSMLYYNDKQQIILRKHRGMVVDRXGXS

SEQ ID NO: 34732 - protein, 41 aa, Artificial Sequence
  Non-cyclic GFR-binding peptide
  MOD_RES (6), (7), (39), (41): Xaa is C or S
HVPKPXXAPTKLSATSVLYYDDSSNVILRKHRNMVVRSXGX

SEQ ID NO: 34733 - protein, 34 aa, Artificial Sequence
  Non-cyclic GFR-binding peptide
  MOD_RES (1), (1): Xaa is C or S
  MOD_RES (15), (16), (17), (18), (19): Xaa is A or G
  MOD_RES (20), (21), (22), (23): Xaa is A or G or is absent
XVPEKMSATSILYYXXXXXXXXXLRKHRNMTVES

SEQ ID NO: 34734 - protein, 34 aa, Artificial Sequence
  Non-cyclic GFR-binding peptide
  MOD_RES (1), (2), (34): Xaa is C or S
XXTPTKMSATSMLYYNDKQQIILRKHRGMVVDRX

SEQ ID NO: 34735 - protein, 31 aa, Artificial Sequence
  Non-cyclic GFR-binding peptide
  MOD_RES (1), (1): Xaa is C or S
XVPEKMEPISILYLDENKNVVKFKYENMTVE

SEQ ID NO: 34736 - protein, 40 aa, Artificial Sequence
  Non-cyclic GFR-binding peptide
  MOD_RES (3), (4), (38), (40): Xaa is C or S
  MOD_RES (18), (19), (20), (21), (22): Xaa is A or G
  MOD_RES (23), (24), (25), (26): Xaa is A or G or is absent
GPXXTPTKMSATSMLYYXXXXXXXXXLRKHRGMVVDRXGX

SEQ ID NO: 34737 - protein, 43 aa, Artificial Sequence
  Non-cyclic GFR-binding peptide
  MOD_RES (5), (6), (40), (42): Xaa is C or S
  MOD_RES (20), (21), (22), (23), (24): Xaa is A or G
  MOD_RES (25), (26), (27), (28): Xaa is A or G or is absent
TPPTXXVPTRLSPISILYKXXXXXXXXXLKYHYDMVVESXGXR

SEQ ID NO: 34738 - protein, 32 aa, Artificial Sequence
  Non-cyclic GFR-binding peptide
  MOD_RES (32), (32): Xaa is C or S
TPTKMEPISMLYLNDKQQIIKFKYEGMVVDRX

SEQ ID NO: 34739 - protein, 34 aa, Artificial Sequence
  Non-cyclic GFR-binding peptide
  MOD_RES (3), (4): Xaa is C or S
EPXXVPEKMSPINILYFDENKNVVYGKIPNMTVE

SEQ ID NO: 34740 - protein, 36 aa, Artificial Sequence
  Non-cyclic GFR-binding peptide
  MOD_RES (5), (6): Xaa is C or S
TPPTXXVPTRLSPISILYKDSANNVVLKYHYDMVVE

SEQ ID NO: 34741 - protein, 35 aa, Artificial Sequence
  Non-cyclic GFR-binding peptide
  MOD_RES (1), (33), (35): Xaa is C or S
XVPTKLSATSILYYDKGVVTYLRKHRGMAVSEXGX

SEQ ID NO: 34742 - protein, 38 aa, Artificial Sequence
  Non-cyclic GFR-binding peptide
  MOD_RES (2), (3), (37): Xaa is C or S
  MOD_RES (17), (18), (19), (20), (21): Xaa is A or G
  MOD_RES (22), (23), (24), (25): Xaa is A or G or is absent
AXXVPTKLSATSILYYXXXXXXXXXLRKHRGMAVSEXG

SEQ ID NO: 34743 - protein, 38 aa, Artificial Sequence
  Non-cyclic GFR-binding peptide
  MOD_RES (5), (6): Xaa is C or S
  MOD_RES (20), (21), (22), (23), (24): Xaa is A or G
  MOD_RES (25), (26), (27), (28): Xaa is A or G or is absent
IPEPXXVPEKMNAISILYFXXXXXXXXXLKKYRNMTVE

SEQ ID NO: 34744 - protein, 35 aa, Artificial Sequence
  Non-cyclic GFR-binding peptide
  MOD_RES (1), (2): Xaa is C or S
  MOD_RES (16), (17), (18), (19), (20): Xaa is A or G
  MOD_RES (21), (22), (23), (24): Xaa is A or G or is absent
XXVPEKMSATSILYYXXXXXXXXXLRKHRNMTVES

SEQ ID NO: 34745 - protein, 42 aa, Artificial Sequence
  Non-cyclic GFR-binding peptide
  MOD_RES (6), (7), (39), (41): Xaa is C or S
GIPEPXXVPEKMEPISILYLDENKNVVKFKYENMTVESXAXR

SEQ ID NO: 34746 - protein, 36 aa, Artificial Sequence
  Non-cyclic GFR-binding peptide
  MOD_RES (1), (2), (33), (35): Xaa is C or S
XXVPQDLSPINILYFVGRTPKVYGKIPMVVKSXKXS

SEQ ID NO: 34747 - protein, 36 aa, Artificial Sequence
  Non-cyclic GFR-binding peptide
  MOD_RES (1), (33), (35): Xaa is C or S
XVPTKLSATSILYYDKGVVTYLRKHRGMAVSEXGXR

SEQ ID NO: 34748 - protein, 37 aa, Artificial Sequence
  Non-cyclic GFR-binding peptide
  MOD_RES (6), (7): Xaa is C or S
RVPSTXXAPVKTSATSMLYYDNGRVLLLRKHRMIVEE

SEQ ID NO: 34749 - protein, 36 aa, Artificial Sequence
  Non-cyclic GFR-binding peptide
  MOD_RES (3), (4): Xaa is C or S
  MOD_RES (18), (19), (20), (21), (22): Xaa is A or G
  MOD_RES (23), (24), (25), (26): Xaa is A or G or is absent
PTXXVPTRLSPISILYKXXXXXXXXXLKYHYDMVVE

SEQ ID NO: 34750 - protein, 38 aa, Artificial Sequence
  Non-cyclic GFR-binding peptide
  MOD_RES (5), (6), (38): Xaa is C or S
IPEPXXVPEKMSPINILYFDENKNVVYGKIPNMTVESX

SEQ ID NO: 34751 - protein, 40 aa, Artificial Sequence
  Non-cyclic GFR-binding peptide
  MOD_RES (2), (3), (37), (39): Xaa is C or S
  MOD_RES (17), (18), (19), (20), (21): Xaa is A or G
  MOD_RES (22), (23), (24), (25): Xaa is A or G or is absent
PXXTPTKMSPISMLYKXXXXXXXXXLKYHYGMVVDRXGXS

SEQ ID NO: 34752 - protein, 32 aa, Artificial Sequence
  Non-cyclic GFR-binding peptide
  MOD_RES (32), (32): Xaa is C or S
TPTKMSATSMLYYNDKQQIILRKHRGMVVDRX

SEQ ID NO: 34753 - protein, 34 aa, Artificial Sequence
  Non-cyclic GFR-binding peptide
  MOD_RES (1), (2), (34): Xaa is C or S
XXVPEKMSPISILYKDENKNVVLKYHYNMTVESX

SEQ ID NO: 34754 - protein, 41 aa, Artificial Sequence
  Non-cyclic GFR-binding peptide
  MOD_RES (5), (6), (38), (40): Xaa is C or S
APASXXVPARLSATSILYYDAANNVVLRKHRDMVVEAXGXR

SEQ ID NO: 34755 - protein, 31 aa, Artificial Sequence
  Non-cyclic GFR-binding peptide
  MOD_RES (1), (1): Xaa is C or S
XAPVKTSATSMLYYDNGRVLLLRKHRMIVEE

SEQ ID NO: 34756 - protein, 33 aa, Artificial Sequence
  Non-cyclic GFR-binding peptide
  MOD_RES (1), (2): Xaa is C or S
XXVPEKMSPINILYFDENKNVVYGKIPNMTVES

SEQ ID NO: 34757 - protein, 37 aa, Artificial Sequence
  Non-cyclic GFR-binding peptide
  MOD_RES (2), (3), (37): Xaa is C or S
  MOD_RES (17), (18), (19), (20), (21): Xaa is A or G
  MOD_RES (22), (23), (24), (25): Xaa is A or G or is absent
PXXTPTKMSPISMLYKXXXXXXXXXLKYHYGMVVDRX

SEQ ID NO: 34758 - protein, 37 aa, Artificial Sequence
  Non-cyclic GFR-binding peptide
  MOD_RES (3), (4): Xaa is C or S
  MOD_RES (18), (19), (20), (21), (22): Xaa is A or G
  MOD_RES (23), (24), (25), (26): Xaa is A or G or is absent
EPXXVPEKMSPISILYKXXXXXXXXXLKYHYNMTVES

SEQ ID NO: 34759 - protein, 37 aa, Artificial Sequence
  Non-cyclic GFR-binding peptide
  MOD_RES (3), (4), (36): Xaa is C or S
EPXXVPEKMEPISILYLDENKNVVKFKYENMTVESXA

SEQ ID NO: 34760 - protein, 34 aa, Artificial Sequence
  Non-cyclic GFR-binding peptide
  MOD_RES (2), (3), (34): Xaa is C or S
PXXVPQALSPINILYFVGRKPKVYGKIPMIVRSX

SEQ ID NO: 34761 - protein, 41 aa, Artificial Sequence
  Non-cyclic GFR-binding peptide
  MOD_RES (6), (7), (39), (41): Xaa is C or S
STPPTXXVPTRLEPISILYLDSANNVVKFKYEDMVVESXGX

SEQ ID NO: 34762 - protein, 38 aa, Artificial Sequence
  Non-cyclic GFR-binding peptide
  MOD_RES (5), (6), (38): Xaa is C or S
IPEPXXVPEKMEPISILYLDENKNVVKFKYENMTVESX

SEQ ID NO: 34763 - protein, 36 aa, Artificial Sequence
  Non-cyclic GFR-binding peptide
  MOD_RES (3), (4): Xaa is C or S
  MOD_RES (18), (19), (20), (21), (22): Xaa is A or G
  MOD_RES (23), (24), (25), (26): Xaa is A or G or is absent
GPXXTPTKMSATSMLYYXXXXXXXXXLRKHRGMVVD

SEQ ID NO: 34764 - protein, 36 aa, Artificial Sequence
  Non-cyclic GFR-binding peptide
  MOD_RES (3), (4), (36): Xaa is C or S
PTXXVPTRLSATSILYYDSANNVVLRKHRDMVVESX

SEQ ID NO: 34765 - protein, 35 aa, Artificial Sequence
  Non-cyclic GFR-binding peptide
  MOD_RES (1), (2): Xaa is C or S
  MOD_RES (16), (17), (18), (19), (20): Xaa is A or G
  MOD_RES (21), (22), (23), (24): Xaa is A or G or is absent
XXVPEKMEPISILYLXXXXXXXXXKFKYENMTVES

SEQ ID NO: 34766 - protein, 41 aa, Artificial Sequence
  Non-cyclic GFR-binding peptide
  MOD_RES (6), (7), (39), (41): Xaa is C or S
GIPEPXXVPEKMSATSILYYDENKNVVLRKHRNMTVESXAX

SEQ ID NO: 34767 - protein, 39 aa, Artificial Sequence
  Non-cyclic GFR-binding peptide
  MOD_RES (4), (5), (39): Xaa is C or S
  MOD_RES (19), (20), (21), (22), (23): Xaa is A or G
  MOD_RES (24), (25), (26), (27): Xaa is A or G or is absent
PPTXXVPTRLSPISILYKXXXXXXXXXLKYHYDMVVESX

SEQ ID NO: 34768 - protein, 35 aa, Artificial Sequence
  Non-cyclic GFR-binding peptide
  MOD_RES (3), (4): Xaa is C or S
EPXXVPEKMSPINILYFDENKNVVYGKIPNMTVES

SEQ ID NO: 34769 - protein, 40 aa, Artificial Sequence
  Non-cyclic GFR-binding peptide
  MOD_RES (6), (7), (39): Xaa is C or S
GIPEPXXVPEKMSPISILYKDENKNVVLKYHYNMTVESXA

SEQ ID NO: 34770 - protein, 34 aa, Artificial Sequence
  Non-cyclic GFR-binding peptide
  MOD_RES (1), (2): Xaa is C or S
  MOD_RES (16), (17), (18), (19), (20): Xaa is A or G
  MOD_RES (21), (22), (23), (24): Xaa is A or G or is absent
XXVPTKLSATSILYYXXXXXXXXXLRKHRGMAVS

SEQ ID NO: 34771 - protein, 37 aa, Artificial Sequence
  Non-cyclic GFR-binding peptide
  MOD_RES (34), (36): Xaa is C or S
  MOD_RES (14), (15), (16), (17), (18): Xaa is A or G
  MOD_RES (19), (20), (21), (22): Xaa is A or G or is absent
VPTRLSATSILYYXXXXXXXXXLRKHRDMVVESXGXR

SEQ ID NO: 34772 - protein, 39 aa, Artificial Sequence
  Non-cyclic GFR-binding peptide
  MOD_RES (3), (4), (37), (39): Xaa is C or S
  MOD_RES (18), (19), (20), (21), (22): Xaa is A or G
  MOD_RES (23), (24), (25), (26): Xaa is A or G or is absent
STXXAPVKTSATSMLYYXXXXXXXXXLRKHRMIVEEXGX

SEQ ID NO: 34773 - protein, 36 aa, Artificial Sequence
  Non-cyclic GFR-binding peptide
  MOD_RES (5), (6): Xaa is C or S
SASPXXVSQDLSPINILYFIGKTPKIYGKIPMIVKS

SEQ ID NO: 34774 - protein, 34 aa, Artificial Sequence
  Non-cyclic GFR-binding peptide
  MOD_RES (1), (33): Xaa is C or S
XVPTRLSATSILYYDSANNVVLRKHRDMVVESXG

SEQ ID NO: 34775 - protein, 33 aa, Artificial Sequence
  Non-cyclic GFR-binding peptide
  MOD_RES (2), (3): Xaa is C or S
AXXVPTKLSATSILYYDKGVVTYLRKHRGMAVS

SEQ ID NO: 34776 - protein, 38 aa, Artificial Sequence
  Non-cyclic GFR-binding peptide
  MOD_RES (2), (3), (37): Xaa is C or S
  MOD_RES (17), (18), (19), (20), (21): Xaa is A or G
  MOD_RES (22), (23), (24), (25): Xaa is A or G or is absent
PXXVPEKMSATSILYYXXXXXXXXXLRKHRNMTVESXA

SEQ ID NO: 34777 - protein, 37 aa, Artificial Sequence
  Non-cyclic GFR-binding peptide
  MOD_RES (2), (3), (34), (36): Xaa is C or S
TXXAPVKTSATSMLYYDNGRVLLLRKHRMIVEEXGXL

SEQ ID NO: 34778 - protein, 39 aa, Artificial Sequence
  Non-cyclic GFR-binding peptide
  MOD_RES (6), (7), (38): Xaa is C or S
ASAAPXXVPQALSPINILYFVGRKPKVYGKIPMIVRSXK

SEQ ID NO: 34779 - protein, 36 aa, Artificial Sequence
  Non-cyclic GFR-binding peptide
  MOD_RES (1), (2), (34), (36): Xaa is C or S
XXTPTKMSPISMLYKNDKQQIILKYHYGMVVDRXGX

SEQ ID NO: 34780 - protein, 41 aa, Artificial Sequence
  Non-cyclic GFR-binding peptide
  MOD_RES (4), (5), (39), (41): Xaa is C or S
  MOD_RES (19), (20), (21), (22), (23): Xaa is A or G
  MOD_RES (24), (25), (26), (27): Xaa is A or G or is absent
AGPXXTPTKMEPISMLYLXXXXXXXXXKFKYEGMVVDRXGX

SEQ ID NO: 34781 - protein, 32 aa, Artificial Sequence
  Non-cyclic GFR-binding peptide
  MOD_RES (31), (31): Xaa is C or S
APVKTSATSMLYYDNGRVLLLRKHRMIVEEXG

SEQ ID NO: 34782 - protein, 38 aa, Artificial Sequence
  Non-cyclic GFR-binding peptide
  MOD_RES (2), (3), (35), (37): Xaa is C or S
PXXTPTKMSATSMLYYNDKQQIILRKHRGMVVDRXGXS

SEQ ID NO: 34783 - protein, 37 aa, Artificial Sequence
  Non-cyclic GFR-binding peptide
  MOD_RES (1), (2), (36): Xaa is C or S
  MOD_RES (16), (17), (18), (19), (20): Xaa is A or G
  MOD_RES (21), (22), (23), (24): Xaa is A or G or is absent
XXVPTRLSATSILYYXXXXXXXXXLRKHRDMVVESXG

SEQ ID NO: 34784 - protein, 34 aa, Artificial Sequence
  Non-cyclic GFR-binding peptide
  MOD_RES (3), (4): Xaa is C or S
EPXXVPEKMNAISILYFDENKNVVLKKYRNMTVE

SEQ ID NO: 34785 - protein, 38 aa, Artificial Sequence
  Non-cyclic GFR-binding peptide
  MOD_RES (2), (3), (37): Xaa is C or S
  MOD_RES (17), (18), (19), (20), (21): Xaa is A or G
  MOD_RES (22), (23), (24), (25): Xaa is A or G or is absent
TXXVPTRLSATSILYYXXXXXXXXXLRKHRDMVVESXG

SEQ ID NO: 34786 - protein, 37 aa, Artificial Sequence
  Non-cyclic GFR-binding peptide
  MOD_RES (1), (35), (37): Xaa is C or S
  MOD_RES (15), (16), (17), (18), (19): Xaa is A or G
  MOD_RES (20), (21), (22), (23): Xaa is A or G or is absent
XVPTKLSATSILYYXXXXXXXXXLRKHRGMAVSEXGX

SEQ ID NO: 34787 - protein, 37 aa, Artificial Sequence
  Non-cyclic GFR-binding peptide
  MOD_RES (3), (4), (36): Xaa is C or S
ASXXVPARLSATSILYYDAANNVVLRKHRDMVVEAXG

SEQ ID NO: 34788 - protein, 38 aa, Artificial Sequence
  Non-cyclic GFR-binding peptide
  MOD_RES (1), (2), (36), (38): Xaa is C or S
  MOD_RES (16), (17), (18), (19), (20): Xaa is A or G
  MOD_RES (21), (22), (23), (24): Xaa is A or G or is absent
XXTPTKMEPISMLYLXXXXXXXXXKFKYEGMVVDRXGX

SEQ ID NO: 34789 - protein, 41 aa, Artificial Sequence
  Non-cyclic GFR-binding peptide
  MOD_RES (4), (5), (38), (40): Xaa is C or S
  MOD_RES (19), (20), (21), (22), (23): Xaa is A or G
  MOD_RES (24), (25), (26), (27): Xaa is A or G or is absent
PSTXXAPVKTEPISMLYLXXXXXXXXXKFKYEMIVEEXGXL

SEQ ID NO: 34790 - protein, 32 aa, Artificial Sequence
  Non-cyclic GFR-binding peptide
  MOD_RES (14), (15), (16), (17), (18): Xaa is A or G
  MOD_RES (19), (20), (21), (22): Xaa is A or G or is absent
VPEKMSPISILYKXXXXXXXXXLKYHYNMTVE

SEQ ID NO: 34791 - protein, 36 aa, Artificial Sequence
  Non-cyclic GFR-binding peptide
  MOD_RES (1), (2), (36): Xaa is C or S
  MOD_RES (16), (17), (18), (19), (20): Xaa is A or G
  MOD_RES (21), (22), (23), (24): Xaa is A or G or is absent
XXVPTRLEPISILYLXXXXXXXXXKFKYEDMVVESX

SEQ ID NO: 34792 - protein, 41 aa, Artificial Sequence
  Non-cyclic GFR-binding peptide
  MOD_RES (6), (7), (41): Xaa is C or S
  MOD_RES (21), (22), (23), (24), (25): Xaa is A or G
  MOD_RES (26), (27), (28), (29): Xaa is A or G or is absent
GIPEPXXVPEKMNAISILYFXXXXXXXXXLKKYRNMTVESX

SEQ ID NO: 34793 - protein, 34 aa, Artificial Sequence
  Non-cyclic GFR-binding peptide
  MOD_RES (1), (33): Xaa is C or S
XTPTKMEPISMLYLNDKQQIIKFKYEGMVVDRXG

SEQ ID NO: 34794 - protein, 33 aa, Artificial Sequence
  Non-cyclic GFR-binding peptide
  MOD_RES (1), (1): Xaa is C or S
  MOD_RES (15), (16), (17), (18), (19): Xaa is A or G
  MOD_RES (20), (21), (22), (23): Xaa is A or G or is absent
XVPTRLSATSILYYXXXXXXXXXLRKHRDMVVE

SEQ ID NO: 34795 - protein, 30 aa, Artificial Sequence
  Non-cyclic GFR-binding peptide
VPTRLSPISILYKDSANNVVLKYHYDMVVE

SEQ ID NO: 34796 - protein, 39 aa, Artificial Sequence
  Non-cyclic GFR-binding peptide
  MOD_RES (4), (5), (38): Xaa is C or S
  MOD_RES (19), (20), (21), (22), (23): Xaa is A or G
  MOD_RES (24), (25), (26), (27): Xaa is A or G or is absent
PSTXXAPVKTSATSMLYYXXXXXXXXXLRKHRMIVEEXG

SEQ ID NO: 34797 - protein, 32 aa, Artificial Sequence
  Non-cyclic GFR-binding peptide
  MOD_RES (14), (15), (16), (17), (18): Xaa is A or G
  MOD_RES (19), (20), (21), (22): Xaa is A or G or is absent
APVKTSPISMLYKXXXXXXXXXLKYHYMIVEE

SEQ ID NO: 34798 - protein, 33 aa, Artificial Sequence
  Non-cyclic GFR-binding peptide
  MOD_RES (14), (15), (16), (17), (18): Xaa is A or G
  MOD_RES (19), (20), (21), (22): Xaa is A or G or is absent
VPEKMSATSILYYXXXXXXXXXLRKHRNMTVES

SEQ ID NO: 34799 - protein, 42 aa, Artificial Sequence
  Non-cyclic GFR-binding peptide
  MOD_RES (6), (7), (39), (41): Xaa is C or S
GSAGPXXTPTKMSPISMLYKNDKQQIILKYHYGMVVDRXGXS

SEQ ID NO: 34800 - protein, 34 aa, Artificial Sequence
  Non-cyclic GFR-binding peptide
  MOD_RES (34), (34): Xaa is C or S
  MOD_RES (14), (15), (16), (17), (18): Xaa is A or G
  MOD_RES (19), (20), (21), (22): Xaa is A or G or is absent
VPEKMSPINILYFXXXXXXXXXYGKIPNMTVESX

SEQ ID NO: 34801 - protein, 37 aa, Artificial Sequence
  Non-cyclic GFR-binding peptide
  MOD_RES (3), (4), (36): Xaa is C or S
EPXXVPEKMNAISILYFDENKNVVLKKYRNMTVESXA

SEQ ID NO: 34802 - protein, 36 aa, Artificial Sequence
  Non-cyclic GFR-binding peptide
  MOD_RES (3), (4), (36): Xaa is C or S
EPXXVPEKMSPISILYKDENKNVVLKYHYNMTVESX

SEQ ID NO: 34803 - protein, 42 aa, Artificial Sequence
  Non-cyclic GFR-binding peptide
  MOD_RES (5), (6), (40), (42): Xaa is C or S
  MOD_RES (20), (21), (22), (23), (24): Xaa is A or G
  MOD_RES (25), (26), (27), (28): Xaa is A or G or is absent
SAGPXXTPTKMEPISMLYLXXXXXXXXXKFKYEGMVVDRXGX

SEQ ID NO: 34804 - protein, 34 aa, Artificial Sequence
  Non-cyclic GFR-binding peptide
  MOD_RES (32), (34): Xaa is C or S
VPEKMSATSILYYDENKNVVLRKHRNMTVESXAX

SEQ ID NO: 34805 - protein, 37 aa, Artificial Sequence
  Non-cyclic GFR-binding peptide
  MOD_RES (1), (2), (34), (36): Xaa is C or S
XXVPEKMSATSILYYDENKNVVLRKHRNMTVESXAXR

SEQ ID NO: 34806 - protein, 38 aa, Artificial Sequence
  Non-cyclic GFR-binding peptide
  MOD_RES (3), (4), (38): Xaa is C or S
  MOD_RES (18), (19), (20), (21), (22): Xaa is A or G
  MOD_RES (23), (24), (25), (26): Xaa is A or G or is absent
KAXXVPTKLSATSILYYXXXXXXXXXLRKHRGMAVSEX

SEQ ID NO: 34807 - protein, 36 aa, Artificial Sequence
  Non-cyclic GFR-binding peptide
  MOD_RES (5), (6): Xaa is C or S
SAAPXXVPQALSPINILYFVGRKPKVYGKIPMIVRS

SEQ ID NO: 34808 - protein, 38 aa, Artificial Sequence
  Non-cyclic GFR-binding peptide
  MOD_RES (2), (3), (36), (38): Xaa is C or S
  MOD_RES (17), (18), (19), (20), (21): Xaa is A or G
  MOD_RES (22), (23), (24), (25): Xaa is A or G or is absent
TXXAPVKTEPISMLYLXXXXXXXXXKFKYEMIVEEXGX

SEQ ID NO: 34809 - protein, 37 aa, Artificial Sequence
  Non-cyclic GFR-binding peptide
  MOD_RES (3), (4): Xaa is C or S
  MOD_RES (18), (19), (20), (21), (22): Xaa is A or G
  MOD_RES (23), (24), (25), (26): Xaa is A or G or is absent
EPXXVPEKMSATSILYYXXXXXXXXXLRKHRNMTVES

SEQ ID NO: 34810 - protein, 38 aa, Artificial Sequence
  Non-cyclic GFR-binding peptide
  MOD_RES (2), (3), (36), (38): Xaa is C or S
  MOD_RES (17), (18), (19), (20), (21): Xaa is A or G
  MOD_RES (22), (23), (24), (25): Xaa is A or G or is absent
PXXVPQDLSPINILYFXXXXXXXXXYGKIPMVVKSXKX

SEQ ID NO: 34811 - protein, 43 aa, Artificial Sequence
  Non-cyclic GFR-binding peptide
  MOD_RES (5), (6), (40), (42): Xaa is C or S
  MOD_RES (20), (21), (22), (23), (24): Xaa is A or G
  MOD_RES (25), (26), (27), (28): Xaa is A or G or is absent
SAGPXXTPTKMSATSMLYYXXXXXXXXXLRKHRGMVVDRXGXS

SEQ ID NO: 34812 - protein, 36 aa, Artificial Sequence
  Non-cyclic GFR-binding peptide
  MOD_RES (33), (35): Xaa is C or S
  MOD_RES (14), (15), (16), (17), (18): Xaa is A or G
  MOD_RES (19), (20), (21), (22): Xaa is A or G or is absent
APVKTSPISMLYKXXXXXXXXXLKYHYMIVEEXGXL

SEQ ID NO: 34813 - protein, 44 aa, Artificial Sequence
  Non-cyclic GFR-binding peptide
  MOD_RES (6), (7), (41), (43): Xaa is C or S
  MOD_RES (21), (22), (23), (24), (25): Xaa is A or G
  MOD_RES (26), (27), (28), (29): Xaa is A or G or is absent
GIPEPXXVPEKMNAISILYFXXXXXXXXXLKKYRNMTVESXAXR

SEQ ID NO: 34814 - protein, 40 aa, Artificial Sequence
  Non-cyclic GFR-binding peptide
  MOD_RES (6), (7): Xaa is C or S
  MOD_RES (21), (22), (23), (24), (25): Xaa is A or G
  MOD_RES (26), (27), (28), (29): Xaa is A or G or is absent
HVPKPXXAPTKLEPISVLYLXXXXXXXXXKFKYENMVVRS

SEQ ID NO: 34815 - protein, 34 aa, Artificial Sequence
  Non-cyclic GFR-binding peptide
  MOD_RES (2), (3): Xaa is C or S
TXXVPTRLSPISILYKDSANNVVLKYHYDMVVES

SEQ ID NO: 34816 - protein, 35 aa, Artificial Sequence
  Non-cyclic GFR-binding peptide
  MOD_RES (33), (35): Xaa is C or S
  MOD_RES (14), (15), (16), (17), (18): Xaa is A or G
  MOD_RES (19), (20), (21), (22): Xaa is A or G or is absent
VPQDLSPINILYFXXXXXXXXXYGKIPMVVKSXKX

SEQ ID NO: 34817 - protein, 40 aa, Artificial Sequence
  Non-cyclic GFR-binding peptide
  MOD_RES (4), (5), (39): Xaa is C or S
  MOD_RES (19), (20), (21), (22), (23): Xaa is A or G
  MOD_RES (24), (25), (26), (27): Xaa is A or G or is absent
PEPXXVPEKMSATSILYYXXXXXXXXXLRKHRNMTVESXA

SEQ ID NO: 34818 - protein, 33 aa, Artificial Sequence
  Non-cyclic GFR-binding peptide
  MOD_RES (1), (1): Xaa is C or S
  MOD_RES (15), (16), (17), (18), (19): Xaa is A or G
  MOD_RES (20), (21), (22), (23): Xaa is A or G or is absent
XVPQALSPINILYFXXXXXXXXXYGKIPMIVRS

SEQ ID NO: 34819 - protein, 31 aa, Artificial Sequence
  Non-cyclic GFR-binding peptide
VPTRLSATSILYYDSANNVVLRKHRDMVVES

SEQ ID NO: 34820 - protein, 39 aa, Artificial Sequence
  Non-cyclic GFR-binding peptide
  MOD_RES (4), (5), (39): Xaa is C or S
  MOD_RES (19), (20), (21), (22), (23): Xaa is A or G
  MOD_RES (24), (25), (26), (27): Xaa is A or G or is absent
PEPXXVPEKMNAISILYFXXXXXXXXXLKKYRNMTVESX

SEQ ID NO: 34821 - protein, 36 aa, Artificial Sequence
  Non-cyclic GFR-binding peptide
  MOD_RES (1), (35): Xaa is C or S
  MOD_RES (15), (16), (17), (18), (19): Xaa is A or G
  MOD_RES (20), (21), (22), (23): Xaa is A or G or is absent
XTPTKMEPISMLYLXXXXXXXXXKFKYEGMVVDRXG

SEQ ID NO: 34822 - protein, 43 aa, Artificial Sequence
  Non-cyclic GFR-binding peptide
  MOD_RES (6), (7), (40), (42): Xaa is C or S
  MOD_RES (21), (22), (23), (24), (25): Xaa is A or G
  MOD_RES (26), (27), (28), (29): Xaa is A or G or is absent
RVPSTXXAPVKTEPISMLYLXXXXXXXXXKFKYEMIVEEXGXL

SEQ ID NO: 34823 - protein, 32 aa, Artificial Sequence
  Non-cyclic GFR-binding peptide
  MOD_RES (14), (15), (16), (17), (18): Xaa is A or G
  MOD_RES (19), (20), (21), (22): Xaa is A or G or is absent
VPEKMSPINILYFXXXXXXXXXYGKIPNMTVE

SEQ ID NO: 34824 - protein, 39 aa, Artificial Sequence
  Non-cyclic GFR-binding peptide
  MOD_RES (6), (7), (38): Xaa is C or S
RVPSTXXAPVKTEPISMLYLDNGRVLLKFKYEMIVEEXG

SEQ ID NO: 34825 - protein, 38 aa, Artificial Sequence
  Non-cyclic GFR-binding peptide
  MOD_RES (5), (6), (38): Xaa is C or S
IPEPXXVPEKMSATSILYYDENKNVVLRKHRNMTVESX

SEQ ID NO: 34826 - protein, 38 aa, Artificial Sequence
  Non-cyclic GFR-binding peptide
  MOD_RES (2), (3), (35), (37): Xaa is C or S
PXXVPEKMEPISILYLDENKNVVKFKYENMTVESXAXR

SEQ ID NO: 34827 - protein, 38 aa, Artificial Sequence
  Non-cyclic GFR-binding peptide
  MOD_RES (1), (2), (35), (37): Xaa is C or S
  MOD_RES (16), (17), (18), (19), (20): Xaa is A or G
  MOD_RES (21), (22), (23), (24): Xaa is A or G or is absent
XXAPVKTSPISMLYKXXXXXXXXXLKYHYMIVEEXGXL

SEQ ID NO: 34828 - protein, 32 aa, Artificial Sequence
  Non-cyclic GFR-binding peptide
  MOD_RES (14), (15), (16), (17), (18): Xaa is A or G
  MOD_RES (19), (20), (21), (22): Xaa is A or G or is absent
VPEKMEPISILYLXXXXXXXXXKFKYENMTVE

SEQ ID NO: 34829 - protein, 37 aa, Artificial Sequence
  Non-cyclic GFR-binding peptide
  MOD_RES (3), (4): Xaa is C or S
  MOD_RES (18), (19), (20), (21), (22): Xaa is A or G
  MOD_RES (23), (24), (25), (26): Xaa is A or G or is absent
ASXXVPARLSATSILYYXXXXXXXXXLRKHRDMVVEA

SEQ ID NO: 34830 - protein, 33 aa, Artificial Sequence
  Non-cyclic GFR-binding peptide
  MOD_RES (1), (1): Xaa is C or S
  MOD_RES (15), (16), (17), (18), (19): Xaa is A or G
  MOD_RES (20), (21), (22), (23): Xaa is A or G or is absent
XVPQDLSPINILYFXXXXXXXXXYGKIPMVVKS

SEQ ID NO: 34831 - protein, 38 aa, Artificial Sequence
  Non-cyclic GFR-binding peptide
  MOD_RES (4), (5), (37): Xaa is C or S
PPTXXVPTRLEPISILYLDSANNVVKFKYEDMVVESXG

SEQ ID NO: 34832 - protein, 35 aa, Artificial Sequence
  Non-cyclic GFR-binding peptide
  MOD_RES (1), (2), (34): Xaa is C or S
XXVPEKMEPISILYLDENKNVVKFKYENMTVESXA

SEQ ID NO: 34833 - protein, 32 aa, Artificial Sequence
  Non-cyclic GFR-binding peptide
  MOD_RES (1), (1): Xaa is C or S
XTPTKMEPISMLYLNDKQQIIKFKYEGMVVDR

SEQ ID NO: 34834 - protein, 32 aa, Artificial Sequence
  Non-cyclic GFR-binding peptide
  MOD_RES (14), (15), (16), (17), (18): Xaa is A or G
  MOD_RES (19), (20), (21), (22): Xaa is A or G or is absent
VSQDLSPINILYFXXXXXXXXXYGKIPMIVKS

SEQ ID NO: 34835 - protein, 38 aa, Artificial Sequence
  Non-cyclic GFR-binding peptide
  MOD_RES (4), (5): Xaa is C or S
  MOD_RES (19), (20), (21), (22), (23): Xaa is A or G
  MOD_RES (24), (25), (26), (27): Xaa is A or G or is absent
AGPXXTPTKMEPISMLYLXXXXXXXXXKFKYEGMVVDR

SEQ ID NO: 34836 - protein, 34 aa, Artificial Sequence
  Non-cyclic GFR-binding peptide
  MOD_RES (2), (3), (34): Xaa is C or S
PXXVSQDLSPINILYFIGKTPKIYGKIPMIVKSX

SEQ ID NO: 34837 - protein, 38 aa, Artificial Sequence
  Non-cyclic GFR-binding peptide
  MOD_RES (6), (7): Xaa is C or S
GIPEPXXVPEKMSPISILYKDENKNVVLKYHYNMTVES

SEQ ID NO: 34838 - protein, 33 aa, Artificial Sequence
  Non-cyclic GFR-binding peptide
  MOD_RES (1), (33): Xaa is C or S
XVPEKMSPISILYKDENKNVVLKYHYNMTVESX

SEQ ID NO: 34839 - protein, 38 aa, Artificial Sequence
  Non-cyclic GFR-binding peptide
  MOD_RES (3), (4), (37): Xaa is C or S
  MOD_RES (18), (19), (20), (21), (22): Xaa is A or G
  MOD_RES (23), (24), (25), (26): Xaa is A or G or is absent
STXXAPVKTEPISMLYLXXXXXXXXXKFKYEMIVEEXG

SEQ ID NO: 34840 - protein, 40 aa, Artificial Sequence
  Non-cyclic GFR-binding peptide
  MOD_RES (6), (7), (39): Xaa is C or S
KASKAXXVPTKLSATSILYYDKGVVTYLRKHRGMAVSEXG

SEQ ID NO: 34841 - protein, 36 aa, Artificial Sequence
  Non-cyclic GFR-binding peptide
  MOD_RES (4), (5): Xaa is C or S
PEPXXVPEKMNAISILYFDENKNVVLKKYRNMTVES

SEQ ID NO: 34842 - protein, 31 aa, Artificial Sequence
  Non-cyclic GFR-binding peptide
VPEKMSATSILYYDENKNVVLRKHRNMTVES

SEQ ID NO: 34843 - protein, 39 aa, Artificial Sequence
  Non-cyclic GFR-binding peptide
  MOD_RES (6), (7), (39): Xaa is C or S
HVPKPXXAPTKLSATSVLYYDDSSNVILRKHRNMVVRSX

SEQ ID NO: 34844 - protein, 36 aa, Artificial Sequence
  Non-cyclic GFR-binding peptide
  MOD_RES (1), (33), (35): Xaa is C or S
XVPEKMSPINILYFDENKNVVYGKIPNMTVESXAXR

SEQ ID NO: 34845 - protein, 39 aa, Artificial Sequence
  Non-cyclic GFR-binding peptide
  MOD_RES (4), (5), (37), (39): Xaa is C or S
AGPXXTPTKMEPISMLYLNDKQQIIKFKYEGMVVDRXGX

SEQ ID NO: 34846 - protein, 37 aa, Artificial Sequence
  Non-cyclic GFR-binding peptide
  MOD_RES (4), (5): Xaa is C or S
  MOD_RES (19), (20), (21), (22), (23): Xaa is A or G
  MOD_RES (24), (25), (26), (27): Xaa is A or G or is absent
PEPXXVPEKMSPISILYKXXXXXXXXXLKYHYNMTVE

SEQ ID NO: 34847 - protein, 33 aa, Artificial Sequence
  Non-cyclic GFR-binding peptide
  MOD_RES (1), (1): Xaa is C or S
  MOD_RES (15), (16), (17), (18), (19): Xaa is A or G
  MOD_RES (20), (21), (22), (23): Xaa is A or G or is absent
XVPEKMSPINILYFXXXXXXXXXYGKIPNMTVE

SEQ ID NO: 34848 - protein, 40 aa, Artificial Sequence
  Non-cyclic GFR-binding peptide
  MOD_RES (5), (6), (37), (39): Xaa is C or S
SAAPXXVPQALSPINILYFVGRKPKVYGKIPMIVRSXKXS

SEQ ID NO: 34849 - protein, 39 aa, Artificial Sequence
  Non-cyclic GFR-binding peptide
  MOD_RES (6), (7): Xaa is C or S
  MOD_RES (21), (22), (23), (24), (25): Xaa is A or G
  MOD_RES (26), (27), (28), (29): Xaa is A or G or is absent
HVPKPXXAPTKLEPISVLYLXXXXXXXXXKFKYENMVVR

SEQ ID NO: 34850 - protein, 37 aa, Artificial Sequence
  Non-cyclic GFR-binding peptide
  MOD_RES (3), (4), (35), (37): Xaa is C or S
SPXXVPQDLSPINILYFVGRTPKVYGKIPMVVKSXKX

SEQ ID NO: 34851 - protein, 36 aa, Artificial Sequence
  Non-cyclic GFR-binding peptide
  MOD_RES (5), (6): Xaa is C or S
ASKAXXVPTKLSATSILYYDKGVVTYLRKHRGMAVS

SEQ ID NO: 34852 - protein, 35 aa, Artificial Sequence
  Non-cyclic GFR-binding peptide
  MOD_RES (33), (35): Xaa is C or S
  MOD_RES (14), (15), (16), (17), (18): Xaa is A or G
  MOD_RES (19), (20), (21), (22): Xaa is A or G or is absent
APVKTSATSMLYYXXXXXXXXXLRKHRMIVEEXGX

SEQ ID NO: 34853 - protein, 38 aa, Artificial Sequence
  Non-cyclic GFR-binding peptide
  MOD_RES (4), (5), (38): Xaa is C or S
  MOD_RES (19), (20), (21), (22), (23): Xaa is A or G
  MOD_RES (24), (25), (26), (27): Xaa is A or G or is absent
ASPXXVPQDLSPINILYFXXXXXXXXXYGKIPMVVKSX

SEQ ID NO: 34854 - protein, 36 aa, Artificial Sequence
  Non-cyclic GFR-binding peptide
  MOD_RES (4), (5): Xaa is C or S
PEPXXVPEKMSATSILYYDENKNVVLRKHRNMTVES

SEQ ID NO: 34855 - protein, 36 aa, Artificial Sequence
  Non-cyclic GFR-binding peptide
  MOD_RES (2), (3): Xaa is C or S
  MOD_RES (17), (18), (19), (20), (21): Xaa is A or G
  MOD_RES (22), (23), (24), (25): Xaa is A or G or is absent
TXXVPTRLEPISILYLXXXXXXXXXKFKYEDMVVES

SEQ ID NO: 34856 - protein, 34 aa, Artificial Sequence
  Non-cyclic GFR-binding peptide
  MOD_RES (32), (34): Xaa is C or S
VPTRLSPISILYKDSANNVVLKYHYDMVVESXGX

SEQ ID NO: 34857 - protein, 35 aa, Artificial Sequence
  Non-cyclic GFR-binding peptide
  MOD_RES (1), (35): Xaa is C or S
  MOD_RES (15), (16), (17), (18), (19): Xaa is A or G
  MOD_RES (20), (21), (22), (23): Xaa is A or G or is absent
XVPEKMSPINILYFXXXXXXXXXYGKIPNMTVESX

SEQ ID NO: 34858 - protein, 36 aa, Artificial Sequence
  Non-cyclic GFR-binding peptide
  MOD_RES (4), (5), (36): Xaa is C or S
ASPXXVPQDLSPINILYFVGRTPKVYGKIPMVVKSX

SEQ ID NO: 34859 - protein, 38 aa, Artificial Sequence
  Non-cyclic GFR-binding peptide
  MOD_RES (5), (6): Xaa is C or S
  MOD_RES (20), (21), (22), (23), (24): Xaa is A or G
  MOD_RES (25), (26), (27), (28): Xaa is A or G or is absent
VPSTXXAPVKTSATSMLYYXXXXXXXXXLRKHRMIVEE

SEQ ID NO: 34860 - protein, 36 aa, Artificial Sequence
  Non-cyclic GFR-binding peptide
  MOD_RES (1), (2), (34), (36): Xaa is C or S
XXVPEKMNAISILYFDENKNVVLKKYRNMTVESXAX

SEQ ID NO: 34861 - protein, 37 aa, Artificial Sequence
  Non-cyclic GFR-binding peptide
  MOD_RES (6), (7): Xaa is C or S
HVPKPXXAPTKLSPISVLYKDDSSNVILKYHYNMVVR

SEQ ID NO: 34862 - protein, 34 aa, Artificial Sequence
  Non-cyclic GFR-binding peptide
  MOD_RES (32), (34): Xaa is C or S
VPTRLEPISILYLDSANNVVKFKYEDMVVESXGX

SEQ ID NO: 34863 - protein, 37 aa, Artificial Sequence
  Non-cyclic GFR-binding peptide
  MOD_RES (34), (36): Xaa is C or S
  MOD_RES (14), (15), (16), (17), (18): Xaa is A or G
  MOD_RES (19), (20), (21), (22): Xaa is A or G or is absent
VPTKLSATSILYYXXXXXXXXXLRKHRGMAVSEXGXR

SEQ ID NO: 34864 - protein, 30 aa, Artificial Sequence
  Non-cyclic GFR-binding peptide
VPEKMNAISILYFDENKNVVLKKYRNMTVE

SEQ ID NO: 34865 - protein, 36 aa, Artificial Sequence
  Non-cyclic GFR-binding peptide
  MOD_RES (2), (3), (36): Xaa is C or S
  MOD_RES (17), (18), (19), (20), (21): Xaa is A or G
  MOD_RES (22), (23), (24), (25): Xaa is A or G or is absent
TXXAPVKTEPISMLYLXXXXXXXXXKFKYEMIVEEX

SEQ ID NO: 34866 - protein, 35 aa, Artificial Sequence
  Non-cyclic GFR-binding peptide
  MOD_RES (2), (3), (34): Xaa is C or S
PXXVSQDLSPINILYFIGKTPKIYGKIPMIVKSXK

SEQ ID NO: 34867 - protein, 42 aa, Artificial Sequence
  Non-cyclic GFR-binding peptide
  MOD_RES (6), (7), (41): Xaa is C or S
  MOD_RES (21), (22), (23), (24), (25): Xaa is A or G
  MOD_RES (26), (27), (28), (29): Xaa is A or G or is absent
KASKAXXVPTKLSATSILYYXXXXXXXXXLRKHRGMAVSEXG

SEQ ID NO: 34868 - protein, 31 aa, Artificial Sequence
  Non-cyclic GFR-binding peptide
  MOD_RES (1), (1): Xaa is C or S
XVSQDLSPINILYFIGKTPKIYGKIPMIVKS

SEQ ID NO: 34869 - protein, 33 aa, Artificial Sequence
  Non-cyclic GFR-binding peptide
  MOD_RES (32), (32): Xaa is C or S
VPTRLEPISILYLDSANNVVKFKYEDMVVESXG

SEQ ID NO: 34870 - protein, 34 aa, Artificial Sequence
  Non-cyclic GFR-binding peptide
  MOD_RES (1), (2), (34): Xaa is C or S
XXVPTKLSATSILYYDKGVVTYLRKHRGMAVSEX

SEQ ID NO: 34871 - protein, 33 aa, Artificial Sequence
  Non-cyclic GFR-binding peptide
  MOD_RES (14), (15), (16), (17), (18): Xaa is A or G
  MOD_RES (19), (20), (21), (22): Xaa is A or G or is absent
VPEKMSPINILYFXXXXXXXXXYGKIPNMTVES

SEQ ID NO: 34872 - protein, 38 aa, Artificial Sequence
  Non-cyclic GFR-binding peptide
  MOD_RES (5), (6), (38): Xaa is C or S
TPPTXXVPTRLSATSILYYDSANNVVLRKHRDMVVESX

SEQ ID NO: 34873 - protein, 35 aa, Artificial Sequence
  Non-cyclic GFR-binding peptide
  MOD_RES (32), (34): Xaa is C or S
TPTKMEPISMLYLNDKQQIIKFKYEGMVVDRXGXS

SEQ ID NO: 34874 - protein, 40 aa, Artificial Sequence
  Non-cyclic GFR-binding peptide
  MOD_RES (5), (6), (40): Xaa is C or S
  MOD_RES (20), (21), (22), (23), (24): Xaa is A or G
  MOD_RES (25), (26), (27), (28): Xaa is A or G or is absent
APASXXVPARLSATSILYYXXXXXXXXXLRKHRDMVVEAX

SEQ ID NO: 34875 - protein, 40 aa, Artificial Sequence
  Non-cyclic GFR-binding peptide
  MOD_RES (4), (5), (39): Xaa is C or S
  MOD_RES (19), (20), (21), (22), (23): Xaa is A or G
  MOD_RES (24), (25), (26), (27): Xaa is A or G or is absent
PEPXXVPEKMSPISILYKXXXXXXXXXLKYHYNMTVESXA

SEQ ID NO: 34876 - protein, 41 aa, Artificial Sequence
  Non-cyclic GFR-binding peptide
  MOD_RES (5), (6), (38), (40): Xaa is C or S
TPPTXXVPTRLSATSILYYDSANNVVLRKHRDMVVESXGXR

SEQ ID NO: 34877 - protein, 35 aa, Artificial Sequence
  Non-cyclic GFR-binding peptide
  MOD_RES (32), (34): Xaa is C or S
TPTKMSPISMLYKNDKQQIILKYHYGMVVDRXGXS

SEQ ID NO: 34878 - protein, 39 aa, Artificial Sequence
  Non-cyclic GFR-binding peptide
  MOD_RES (3), (4), (37), (39): Xaa is C or S
  MOD_RES (18), (19), (20), (21), (22): Xaa is A or G
  MOD_RES (23), (24), (25), (26): Xaa is A or G or is absent
APXXVPQALSPINILYFXXXXXXXXXYGKIPMIVRSXKX

SEQ ID NO: 34879 - protein, 39 aa, Artificial Sequence
  Non-cyclic GFR-binding peptide
  MOD_RES (5), (6), (37), (39): Xaa is C or S
VPSTXXAPVKTSPISMLYKDNGRVLLLKYHYMIVEEXGX

SEQ ID NO: 34880 - protein, 31 aa, Artificial Sequence
  Non-cyclic GFR-binding peptide
  MOD_RES (1), (1): Xaa is C or S
XVPARLSATSILYYDAANNVVLRKHRDMVVE

SEQ ID NO: 34881 - protein, 42 aa, Artificial Sequence
  Non-cyclic GFR-binding peptide
  MOD_RES (4), (5), (39), (41): Xaa is C or S
  MOD_RES (19), (20), (21), (22), (23): Xaa is A or G
  MOD_RES (24), (25), (26), (27): Xaa is A or G or is absent
PPTXXVPTRLEPISILYLXXXXXXXXXKFKYEDMVVESXGXR

SEQ ID NO: 34882 - protein, 38 aa, Artificial Sequence
  Non-cyclic GFR-binding peptide
  MOD_RES (3), (4), (36), (38): Xaa is C or S
PTXXVPTRLEPISILYLDSANNVVKFKYEDMVVESXGX

SEQ ID NO: 34883 - protein, 36 aa, Artificial Sequence
  Non-cyclic GFR-binding peptide
  MOD_RES (1), (34), (36): Xaa is C or S
  MOD_RES (15), (16), (17), (18), (19): Xaa is A or G
  MOD_RES (20), (21), (22), (23): Xaa is A or G or is absent
XVPQDLSPINILYFXXXXXXXXXYGKIPMVVKSXKX

SEQ ID NO: 34884 - protein, 35 aa, Artificial Sequence
  Non-cyclic GFR-binding peptide
  MOD_RES (2), (3), (35): Xaa is C or S
AXXVPTKLSATSILYYDKGVVTYLRKHRGMAVSEX

SEQ ID NO: 34885 - protein, 42 aa, Artificial Sequence
  Non-cyclic GFR-binding peptide
  MOD_RES (5), (6), (40), (42): Xaa is C or S
  MOD_RES (20), (21), (22), (23), (24): Xaa is A or G
  MOD_RES (25), (26), (27), (28): Xaa is A or G or is absent
SAGPXXTPTKMSATSMLYYXXXXXXXXXLRKHRGMVVDRXGX

SEQ ID NO: 34886 - protein, 38 aa, Artificial Sequence
  Non-cyclic GFR-binding peptide
  MOD_RES (4), (5): Xaa is C or S
  MOD_RES (19), (20), (21), (22), (23): Xaa is A or G
  MOD_RES (24), (25), (26), (27): Xaa is A or G or is absent
SKAXXVPTKLSATSILYYXXXXXXXXXLRKHRGMAVSE

SEQ ID NO: 34887 - protein, 37 aa, Artificial Sequence
  Non-cyclic GFR-binding peptide
  MOD_RES (2), (3), (34), (36): Xaa is C or S
PXXVPQALSPINILYFVGRKPKVYGKIPMIVRSXKXS

SEQ ID NO: 34888 - protein, 34 aa, Artificial Sequence
  Non-cyclic GFR-binding peptide
  MOD_RES (31), (33): Xaa is C or S
APVKTSPISMLYKDNGRVLLLKYHYMIVEEXGXL

SEQ ID NO: 34889 - protein, 39 aa, Artificial Sequence
  Non-cyclic GFR-binding peptide
  MOD_RES (4), (5), (37), (39): Xaa is C or S
PEPXXVPEKMSPINILYFDENKNVVYGKIPNMTVESXAX

SEQ ID NO: 34890 - protein, 38 aa, Artificial Sequence
  Non-cyclic GFR-binding peptide
  MOD_RES (3), (4), (36), (38): Xaa is C or S
EPXXVPEKMSATSILYYDENKNVVLRKHRNMTVESXAX

SEQ ID NO: 34891 - protein, 41 aa, Artificial Sequence
  Non-cyclic GFR-binding peptide
  MOD_RES (5), (6), (40): Xaa is C or S
  MOD_RES (20), (21), (22), (23), (24): Xaa is A or G
  MOD_RES (25), (26), (27), (28): Xaa is A or G or is absent
ASKAXXVPTKLSATSILYYXXXXXXXXXLRKHRGMAVSEXG

SEQ ID NO: 34892 - protein, 37 aa, Artificial Sequence
  Non-cyclic GFR-binding peptide
  MOD_RES (6), (7): Xaa is C or S
RVPSTXXAPVKTSPISMLYKDNGRVLLLKYHYMIVEE

SEQ ID NO: 34893 - protein, 33 aa, Artificial Sequence
  Non-cyclic GFR-binding peptide
  MOD_RES (1), (33): Xaa is C or S
XTPTKMEPISMLYLNDKQQIIKFKYEGMVVDRX

SEQ ID NO: 34894 - protein, 32 aa, Artificial Sequence
  Non-cyclic GFR-binding peptide
  MOD_RES (32), (32): Xaa is C or S
VPEKMSPISILYKDENKNVVLKYHYNMTVESX

SEQ ID NO: 34895 - protein, 35 aa, Artificial Sequence
  Non-cyclic GFR-binding peptide
  MOD_RES (4), (5): Xaa is C or S
PPTXXVPTRLEPISILYLDSANNVVKFKYEDMVVE

SEQ ID NO: 34896 - protein, 37 aa, Artificial Sequence
  Non-cyclic GFR-binding peptide
  MOD_RES (4), (5): Xaa is C or S
  MOD_RES (19), (20), (21), (22), (23): Xaa is A or G
  MOD_RES (24), (25), (26), (27): Xaa is A or G or is absent
PPTXXVPTRLSATSILYYXXXXXXXXXLRKHRDMVVE

SEQ ID NO: 34897 - protein, 43 aa, Artificial Sequence
  Non-cyclic GFR-binding peptide
  MOD_RES (5), (6), (40), (42): Xaa is C or S
  MOD_RES (20), (21), (22), (23), (24): Xaa is A or G
  MOD_RES (25), (26), (27), (28): Xaa is A or G or is absent
ASKAXXVPTKLSATSILYYXXXXXXXXXLRKHRGMAVSEXGXR

SEQ ID NO: 34898 - protein, 36 aa, Artificial Sequence
  Non-cyclic GFR-binding peptide
  MOD_RES (34), (36): Xaa is C or S
  MOD_RES (14), (15), (16), (17), (18): Xaa is A or G
  MOD_RES (19), (20), (21), (22): Xaa is A or G or is absent
VPTKLSATSILYYXXXXXXXXXLRKHRGMAVSEXGX

SEQ ID NO: 34899 - protein, 41 aa, Artificial Sequence
  Non-cyclic GFR-binding peptide
  MOD_RES (5), (6), (38), (40): Xaa is C or S
IPEPXXVPEKMSATSILYYDENKNVVLRKHRNMTVESXAXR

SEQ ID NO: 34900 - protein, 39 aa, Artificial Sequence
  Non-cyclic GFR-binding peptide
  MOD_RES (4), (5), (39): Xaa is C or S
  MOD_RES (19), (20), (21), (22), (23): Xaa is A or G
  MOD_RES (24), (25), (26), (27): Xaa is A or G or is absent
AGPXXTPTKMEPISMLYLXXXXXXXXXKFKYEGMVVDRX

SEQ ID NO: 34901 - protein, 38 aa, Artificial Sequence
  Non-cyclic GFR-binding peptide
  MOD_RES (6), (7): Xaa is C or S
AAPASXXVPARLSATSILYYDAANNVVLRKHRDMVVEA

SEQ ID NO: 34902 - protein, 37 aa, Artificial Sequence
  Non-cyclic GFR-binding peptide
  MOD_RES (2), (3), (37): Xaa is C or S
  MOD_RES (17), (18), (19), (20), (21): Xaa is A or G
  MOD_RES (22), (23), (24), (25): Xaa is A or G or is absent
TXXVPTRLSATSILYYXXXXXXXXXLRKHRDMVVESX

SEQ ID NO: 34903 - protein, 36 aa, Artificial Sequence
  Non-cyclic GFR-binding peptide
  MOD_RES (1), (34), (36): Xaa is C or S
  MOD_RES (15), (16), (17), (18), (19): Xaa is A or G
  MOD_RES (20), (21), (22), (23): Xaa is A or G or is absent
XAPVKTSATSMLYYXXXXXXXXXLRKHRMIVEEXGX

SEQ ID NO: 34904 - protein, 38 aa, Artificial Sequence
  Non-cyclic GFR-binding peptide
  MOD_RES (4), (5): Xaa is C or S
  MOD_RES (19), (20), (21), (22), (23): Xaa is A or G
  MOD_RES (24), (25), (26), (27): Xaa is A or G or is absent
PPTXXVPTRLSPISILYKXXXXXXXXXLKYHYDMVVES

SEQ ID NO: 34905 - protein, 39 aa, Artificial Sequence
  Non-cyclic GFR-binding peptide
  MOD_RES (3), (4), (37), (39): Xaa is C or S
  MOD_RES (18), (19), (20), (21), (22): Xaa is A or G
  MOD_RES (23), (24), (25), (26): Xaa is A or G or is absent
SPXXVPQDLSPINILYFXXXXXXXXXYGKIPMVVKSXKX

SEQ ID NO: 34906 - protein, 39 aa, Artificial Sequence
  Non-cyclic GFR-binding peptide
  MOD_RES (4), (5), (38): Xaa is C or S
  MOD_RES (19), (20), (21), (22), (23): Xaa is A or G
  MOD_RES (24), (25), (26), (27): Xaa is A or G or is absent
ASPXXVSQDLSPINILYFXXXXXXXXXYGKIPMIVKSXK

SEQ ID NO: 34907 - protein, 36 aa, Artificial Sequence
  Non-cyclic GFR-binding peptide
  MOD_RES (2), (3), (36): Xaa is C or S
  MOD_RES (17), (18), (19), (20), (21): Xaa is A or G
  MOD_RES (22), (23), (24), (25): Xaa is A or G or is absent
PXXVPQDLSPINILYFXXXXXXXXXYGKIPMVVKSX

SEQ ID NO: 34908 - protein, 39 aa, Artificial Sequence
  Non-cyclic GFR-binding peptide
  MOD_RES (6), (7), (39): Xaa is C or S
KASKAXXVPTKLSATSILYYDKGVVTYLRKHRGMAVSEX

SEQ ID NO: 34909 - protein, 40 aa, Artificial Sequence
  Non-cyclic GFR-binding peptide
  MOD_RES (2), (3), (37), (39): Xaa is C or S
  MOD_RES (17), (18), (19), (20), (21): Xaa is A or G
  MOD_RES (22), (23), (24), (25): Xaa is A or G or is absent
PXXVPEKMSPINILYFXXXXXXXXXYGKIPNMTVESXAXR

SEQ ID NO: 34910 - protein, 39 aa, Artificial Sequence
  Non-cyclic GFR-binding peptide
  MOD_RES (4), (5), (36), (38): Xaa is C or S
PSTXXAPVKTEPISMLYLDNGRVLLKFKYEMIVEEXGXL

SEQ ID NO: 34911 - protein, 40 aa, Artificial Sequence
  Non-cyclic GFR-binding peptide
  MOD_RES (4), (5), (37), (39): Xaa is C or S
PPTXXVPTRLEPISILYLDSANNVVKFKYEDMVVESXGXR

SEQ ID NO: 34912 - protein, 32 aa, Artificial Sequence
  Non-cyclic GFR-binding peptide
  MOD_RES (32), (32): Xaa is C or S
VPEKMNAISILYFDENKNVVLKKYRNMTVESX

SEQ ID NO: 34913 - protein, 34 aa, Artificial Sequence
  Non-cyclic GFR-binding peptide
  MOD_RES (1), (32), (34): Xaa is C or S
XVPQDLSPINILYFVGRTPKVYGKIPMVVKSXKX

SEQ ID NO: 34914 - protein, 39 aa, Artificial Sequence
  Non-cyclic GFR-binding peptide
  MOD_RES (6), (7), (38): Xaa is C or S
ASASPXXVSQDLSPINILYFIGKTPKIYGKIPMIVKSXK

SEQ ID NO: 34915 - protein, 37 aa, Artificial Sequence
  Non-cyclic GFR-binding peptide
  MOD_RES (1), (2), (34), (36): Xaa is C or S
XXVPTRLSATSILYYDSANNVVLRKHRDMVVESXGXR

SEQ ID NO: 34916 - protein, 42 aa, Artificial Sequence
  Non-cyclic GFR-binding peptide
  MOD_RES (4), (5), (39), (41): Xaa is C or S
  MOD_RES (19), (20), (21), (22), (23): Xaa is A or G
  MOD_RES (24), (25), (26), (27): Xaa is A or G or is absent
AGPXXTPTKMSATSMLYYXXXXXXXXXLRKHRGMVVDRXGXS

SEQ ID NO: 34917 - protein, 38 aa, Artificial Sequence
  Non-cyclic GFR-binding peptide
  MOD_RES (2), (3), (35), (37): Xaa is C or S
PXXVPEKMSPISILYKDENKNVVLKYHYNMTVESXAXR

SEQ ID NO: 34918 - protein, 39 aa, Artificial Sequence
  Non-cyclic GFR-binding peptide
  MOD_RES (2), (3), (37), (39): Xaa is C or S
  MOD_RES (17), (18), (19), (20), (21): Xaa is A or G
  MOD_RES (22), (23), (24), (25): Xaa is A or G or is absent
PXXVPEKMNAISILYFXXXXXXXXXLKKYRNMTVESXAX

SEQ ID NO: 34919 - protein, 33 aa, Artificial Sequence
  Non-cyclic GFR-binding peptide
  MOD_RES (32), (32): Xaa is C or S
VPEKMSPINILYFDENKNVVYGKIPNMTVESXA

SEQ ID NO: 34920 - protein, 37 aa, Artificial Sequence
  Non-cyclic GFR-binding peptide
  MOD_RES (5), (6), (37): Xaa is C or S
VPSTXXAPVKTEPISMLYLDNGRVLLKFKYEMIVEEX

SEQ ID NO: 34921 - protein, 40 aa, Artificial Sequence
  Non-cyclic GFR-binding peptide
  MOD_RES (4), (5), (38), (40): Xaa is C or S
  MOD_RES (19), (20), (21), (22), (23): Xaa is A or G
  MOD_RES (24), (25), (26), (27): Xaa is A or G or is absent
ASPXXVPQDLSPINILYFXXXXXXXXXYGKIPMVVKSXKX

SEQ ID NO: 34922 - protein, 36 aa, Artificial Sequence
  Non-cyclic GFR-binding peptide
  MOD_RES (1), (34), (36): Xaa is C or S
  MOD_RES (15), (16), (17), (18), (19): Xaa is A or G
  MOD_RES (20), (21), (22), (23): Xaa is A or G or is absent
XAPVKTEPISMLYLXXXXXXXXXKFKYEMIVEEXGX

SEQ ID NO: 34923 - protein, 40 aa, Artificial Sequence
  Non-cyclic GFR-binding peptide
  MOD_RES (4), (5), (39): Xaa is C or S
  MOD_RES (19), (20), (21), (22), (23): Xaa is A or G
  MOD_RES (24), (25), (26), (27): Xaa is A or G or is absent
SKAXXVPTKLSATSILYYXXXXXXXXXLRKHRGMAVSEXG

SEQ ID NO: 34924 - protein, 34 aa, Artificial Sequence
  Non-cyclic GFR-binding peptide
  MOD_RES (1), (34): Xaa is C or S
  MOD_RES (15), (16), (17), (18), (19): Xaa is A or G
  MOD_RES (20), (21), (22), (23): Xaa is A or G or is absent
XVSQDLSPINILYFXXXXXXXXXYGKIPMIVKSX

SEQ ID NO: 34925 - protein, 32 aa, Artificial Sequence
  Non-cyclic GFR-binding peptide
  MOD_RES (1), (2): Xaa is C or S
XXVPARLSATSILYYDAANNVVLRKHRDMVVE

SEQ ID NO: 34926 - protein, 31 aa, Artificial Sequence
  Non-cyclic GFR-binding peptide
  MOD_RES (1), (1): Xaa is C or S
XAPVKTSPISMLYKDNGRVLLLKYHYMIVEE

SEQ ID NO: 34927 - protein, 37 aa, Artificial Sequence
  Non-cyclic GFR-binding peptide
  MOD_RES (3), (4), (36): Xaa is C or S
EPXXVPEKMSPINILYFDENKNVVYGKIPNMTVESXA

SEQ ID NO: 34928 - protein, 41 aa, Artificial Sequence
  Non-cyclic GFR-binding peptide
  MOD_RES (4), (5), (39), (41): Xaa is C or S
  MOD_RES (19), (20), (21), (22), (23): Xaa is A or G
  MOD_RES (24), (25), (26), (27): Xaa is A or G or is absent
AGPXXTPTKMSPISMLYKXXXXXXXXXLKYHYGMVVDRXGX

SEQ ID NO: 34929 - protein, 36 aa, Artificial Sequence
  Non-cyclic GFR-binding peptide
  MOD_RES (3), (4): Xaa is C or S
  MOD_RES (18), (19), (20), (21), (22): Xaa is A or G
  MOD_RES (23), (24), (25), (26): Xaa is A or G or is absent
SPXXVSQDLSPINILYFXXXXXXXXXYGKIPMIVKS

SEQ ID NO: 34930 - protein, 37 aa, Artificial Sequence
  Non-cyclic GFR-binding peptide
  MOD_RES (4), (5): Xaa is C or S
  MOD_RES (19), (20), (21), (22), (23): Xaa is A or G
  MOD_RES (24), (25), (26), (27): Xaa is A or G or is absent
PEPXXVPEKMSPINILYFXXXXXXXXXYGKIPNMTVE

SEQ ID NO: 34931 - protein, 38 aa, Artificial Sequence
  Non-cyclic GFR-binding peptide
  MOD_RES (1), (2), (36), (38): Xaa is C or S
  MOD_RES (16), (17), (18), (19), (20): Xaa is A or G
  MOD_RES (21), (22), (23), (24): Xaa is A or G or is absent
XXVPTKLSATSILYYXXXXXXXXXLRKHRGMAVSEXGX

SEQ ID NO: 34932 - protein, 38 aa, Artificial Sequence
  Non-cyclic GFR-binding peptide
  MOD_RES (3), (4), (36), (38): Xaa is C or S
PTXXVPTRLSPISILYKDSANNVVLKYHYDMVVESXGX

SEQ ID NO: 34933 - protein, 35 aa, Artificial Sequence
  Non-cyclic GFR-binding peptide
  MOD_RES (1), (2): Xaa is C or S
  MOD_RES (16), (17), (18), (19), (20): Xaa is A or G
  MOD_RES (21), (22), (23), (24): Xaa is A or G or is absent
XXVPEKMSPINILYFXXXXXXXXXYGKIPNMTVES

SEQ ID NO: 34934 - protein, 38 aa, Artificial Sequence
  Non-cyclic GFR-binding peptide
  MOD_RES (3), (4), (38): Xaa is C or S
  MOD_RES (18), (19), (20), (21), (22): Xaa is A or G
  MOD_RES (23), (24), (25), (26): Xaa is A or G or is absent
GPXXTPTKMSATSMLYYXXXXXXXXXLRKHRGMVVDRX

SEQ ID NO: 34935 - protein, 39 aa, Artificial Sequence
  Non-cyclic GFR-binding peptide
  MOD_RES (2), (3), (37), (39): Xaa is C or S
  MOD_RES (17), (18), (19), (20), (21): Xaa is A or G
  MOD_RES (22), (23), (24), (25): Xaa is A or G or is absent
PXXTPTKMSATSMLYYXXXXXXXXXLRKHRGMVVDRXGX

SEQ ID NO: 34936 - protein, 35 aa, Artificial Sequence
  Non-cyclic GFR-binding peptide
  MOD_RES (1), (2), (35): Xaa is C or S
  MOD_RES (16), (17), (18), (19), (20): Xaa is A or G
  MOD_RES (21), (22), (23), (24): Xaa is A or G or is absent
XXAPVKTSATSMLYYXXXXXXXXXLRKHRMIVEEX

SEQ ID NO: 34937 - protein, 32 aa, Artificial Sequence
  Non-cyclic GFR-binding peptide
  MOD_RES (1), (2): Xaa is C or S
XXVSQDLSPINILYFIGKTPKIYGKIPMIVKS

SEQ ID NO: 34938 - protein, 34 aa, Artificial Sequence
  Non-cyclic GFR-binding peptide
  MOD_RES (3), (4): Xaa is C or S
SPXXVSQDLSPINILYFIGKTPKIYGKIPMIVKS

SEQ ID NO: 34939 - protein, 32 aa, Artificial Sequence
  Non-cyclic GFR-binding peptide
  MOD_RES (32), (32): Xaa is C or S
VPTKLSATSILYYDKGVVTYLRKHRGMAVSEX

SEQ ID NO: 34940 - protein, 30 aa, Artificial Sequence
  Non-cyclic GFR-binding peptide
TPTKMSPISMLYKNDKQQIILKYHYGMVVD

SEQ ID NO: 34941 - protein, 39 aa, Artificial Sequence
  Non-cyclic GFR-binding peptide
  MOD_RES (1), (2), (36), (38): Xaa is C or S
  MOD_RES (16), (17), (18), (19), (20): Xaa is A or G
  MOD_RES (21), (22), (23), (24): Xaa is A or G or is absent
XXTPTKMSATSMLYYXXXXXXXXXLRKHRGMVVDRXGXS

SEQ ID NO: 34942 - protein, 35 aa, Artificial Sequence
  Non-cyclic GFR-binding peptide
  MOD_RES (3), (4): Xaa is C or S
PTXXVPTRLEPISILYLDSANNVVKFKYEDMVVES

SEQ ID NO: 34943 - protein, 36 aa, Artificial Sequence
  Non-cyclic GFR-binding peptide
  MOD_RES (1), (35): Xaa is C or S
  MOD_RES (15), (16), (17), (18), (19): Xaa is A or G
  MOD_RES (20), (21), (22), (23): Xaa is A or G or is absent
XVPEKMSPISILYKXXXXXXXXXLKYHYNMTVESXA

SEQ ID NO: 34944 - protein, 33 aa, Artificial Sequence
  Non-cyclic GFR-binding peptide
  MOD_RES (32), (32): Xaa is C or S
TPTKMEPISMLYLNDKQQIIKFKYEGMVVDRXG

SEQ ID NO: 34945 - protein, 37 aa, Artificial Sequence
  Non-cyclic GFR-binding peptide
  MOD_RES (2), (3), (36): Xaa is C or S
  MOD_RES (17), (18), (19), (20), (21): Xaa is A or G
  MOD_RES (22), (23), (24), (25): Xaa is A or G or is absent
TXXAPVKTSATSMLYYXXXXXXXXXLRKHRMIVEEXG

SEQ ID NO: 34946 - protein, 35 aa, Artificial Sequence
  Non-cyclic GFR-binding peptide
  MOD_RES (2), (3): Xaa is C or S
  MOD_RES (17), (18), (19), (20), (21): Xaa is A or G
  MOD_RES (22), (23), (24), (25): Xaa is A or G or is absent
AXXVPTKLSATSILYYXXXXXXXXXLRKHRGMAVS

SEQ ID NO: 34947 - protein, 41 aa, Artificial Sequence
  Non-cyclic GFR-binding peptide
  MOD_RES (5), (6), (38), (40): Xaa is C or S
SAGPXXTPTKMEPISMLYLNDKQQIIKFKYEGMVVDRXGXS

SEQ ID NO: 34948 - protein, 35 aa, Artificial Sequence
  Non-cyclic GFR-binding peptide
  MOD_RES (2), (3), (34): Xaa is C or S
PXXVPQDLSPINILYFVGRTPKVYGKIPMVVKSXK

SEQ ID NO: 34949 - protein, 33 aa, Artificial Sequence
  Non-cyclic GFR-binding peptide
  MOD_RES (32), (32): Xaa is C or S
TPTKMSATSMLYYNDKQQIILRKHRGMVVDRXG

SEQ ID NO: 34950 - protein, 37 aa, Artificial Sequence
  Non-cyclic GFR-binding peptide
  MOD_RES (1), (2), (36): Xaa is C or S
  MOD_RES (16), (17), (18), (19), (20): Xaa is A or G
  MOD_RES (21), (22), (23), (24): Xaa is A or G or is absent
XXVPTRLEPISILYLXXXXXXXXXKFKYEDMVVESXG

SEQ ID NO: 34951 - protein, 37 aa, Artificial Sequence
  Non-cyclic GFR-binding peptide
  MOD_RES (1), (2), (35), (37): Xaa is C or S
  MOD_RES (16), (17), (18), (19), (20): Xaa is A or G
  MOD_RES (21), (22), (23), (24): Xaa is A or G or is absent
XXVSQDLSPINILYFXXXXXXXXXYGKIPMIVKSXKX

SEQ ID NO: 34952 - protein, 38 aa, Artificial Sequence
  Non-cyclic GFR-binding peptide
  MOD_RES (4), (5): Xaa is C or S
  MOD_RES (19), (20), (21), (22), (23): Xaa is A or G
  MOD_RES (24), (25), (26), (27): Xaa is A or G or is absent
PEPXXVPEKMSPISILYKXXXXXXXXXLKYHYNMTVES

SEQ ID NO: 34953 - protein, 40 aa, Artificial Sequence
  Non-cyclic GFR-binding peptide
  MOD_RES (4), (5), (37), (39): Xaa is C or S
PPTXXVPTRLSPISILYKDSANNVVLKYHYDMVVESXGXR

SEQ ID NO: 34954 - protein, 42 aa, Artificial Sequence
  Non-cyclic GFR-binding peptide
  MOD_RES (6), (7), (40), (42): Xaa is C or S
  MOD_RES (21), (22), (23), (24), (25): Xaa is A or G
  MOD_RES (26), (27), (28), (29): Xaa is A or G or is absent
ASASPXXVPQDLSPINILYFXXXXXXXXXYGKIPMVVKSXKX

SEQ ID NO: 34955 - protein, 37 aa, Artificial Sequence
  Non-cyclic GFR-binding peptide
  MOD_RES (6), (7): Xaa is C or S
HVPKPXXAPTKLSATSVLYYDDSSNVILRKHRNMVVR

SEQ ID NO: 34956 - protein, 38 aa, Artificial Sequence
  Non-cyclic GFR-binding peptide
  MOD_RES (5), (6): Xaa is C or S
  MOD_RES (20), (21), (22), (23), (24): Xaa is A or G
  MOD_RES (25), (26), (27), (28): Xaa is A or G or is absent
IPEPXXVPEKMEPISILYLXXXXXXXXXKFKYENMTVE

SEQ ID NO: 34957 - protein, 39 aa, Artificial Sequence
  Non-cyclic GFR-binding peptide
  MOD_RES (4), (5), (36), (38): Xaa is C or S
PSTXXAPVKTSPISMLYKDNGRVLLLKYHYMIVEEXGXL

SEQ ID NO: 34958 - protein, 40 aa, Artificial Sequence
  Non-cyclic GFR-binding peptide
  MOD_RES (4), (5), (39): Xaa is C or S
  MOD_RES (19), (20), (21), (22), (23): Xaa is A or G
  MOD_RES (24), (25), (26), (27): Xaa is A or G or is absent
AGPXXTPTKMEPISMLYLXXXXXXXXXKFKYEGMVVDRXG

SEQ ID NO: 34959 - protein, 34 aa, Artificial Sequence
  Non-cyclic GFR-binding peptide
  MOD_RES (31), (33): Xaa is C or S
APVKTEPISMLYLDNGRVLLKFKYEMIVEEXGXL

SEQ ID NO: 34960 - protein, 35 aa, Artificial Sequence
  Non-cyclic GFR-binding peptide
  MOD_RES (1), (32), (34): Xaa is C or S
XVPQDLSPINILYFVGRTPKVYGKIPMVVKSXKXS

SEQ ID NO: 34961 - protein, 40 aa, Artificial Sequence
  Non-cyclic GFR-binding peptide
  MOD_RES (6), (7), (40): Xaa is C or S
  MOD_RES (21), (22), (23), (24), (25): Xaa is A or G
  MOD_RES (26), (27), (28), (29): Xaa is A or G or is absent
ASASPXXVSQDLSPINILYFXXXXXXXXXYGKIPMIVKSX

SEQ ID NO: 34962 - protein, 37 aa, Artificial Sequence
  Non-cyclic GFR-binding peptide
  MOD_RES (1), (2), (34), (36): Xaa is C or S
XXVPARLSATSILYYDAANNVVLRKHRDMVVEAXGXR

SEQ ID NO: 34963 - protein, 38 aa, Artificial Sequence
  Non-cyclic GFR-binding peptide
  MOD_RES (2), (3), (36), (38): Xaa is C or S
  MOD_RES (17), (18), (19), (20), (21): Xaa is A or G
  MOD_RES (22), (23), (24), (25): Xaa is A or G or is absent
TXXAPVKTSATSMLYYXXXXXXXXXLRKHRMIVEEXGX

SEQ ID NO: 34964 - protein, 41 aa, Artificial Sequence
  Non-cyclic GFR-binding peptide
  MOD_RES (6), (7), (41): Xaa is C or S
  MOD_RES (21), (22), (23), (24), (25): Xaa is A or G
  MOD_RES (26), (27), (28), (29): Xaa is A or G or is absent
AAPASXXVPARLSATSILYYXXXXXXXXXLRKHRDMVVEAX

SEQ ID NO: 34965 - protein, 34 aa, Artificial Sequence
  Non-cyclic GFR-binding peptide
  MOD_RES (3), (4): Xaa is C or S
PTXXVPTRLSPISILYKDSANNVVLKYHYDMVVE

SEQ ID NO: 34966 - protein, 36 aa, Artificial Sequence
  Non-cyclic GFR-binding peptide
  MOD_RES (3), (4): Xaa is C or S
  MOD_RES (18), (19), (20), (21), (22): Xaa is A or G
  MOD_RES (23), (24), (25), (26): Xaa is A or G or is absent
PTXXVPTRLEPISILYLXXXXXXXXXKFKYEDMVVE

SEQ ID NO: 34967 - protein, 40 aa, Artificial Sequence
  Non-cyclic GFR-binding peptide
  MOD_RES (5), (6), (40): Xaa is C or S
  MOD_RES (20), (21), (22), (23), (24): Xaa is A or G
  MOD_RES (25), (26), (27), (28): Xaa is A or G or is absent
SAGPXXTPTKMEPISMLYLXXXXXXXXXKFKYEGMVVDRX

SEQ ID NO: 34968 - protein, 38 aa, Artificial Sequence
  Non-cyclic GFR-binding peptide
  MOD_RES (2), (3), (35), (37): Xaa is C or S
PXXVPEKMNAISILYFDENKNVVLKKYRNMTVESXAXR

SEQ ID NO: 34969 - protein, 33 aa, Artificial Sequence
  Non-cyclic GFR-binding peptide
  MOD_RES (1), (33): Xaa is C or S
XVPTKLSATSILYYDKGVVTYLRKHRGMAVSEX

SEQ ID NO: 34970 - protein, 41 aa, Artificial Sequence
  Non-cyclic GFR-binding peptide
  MOD_RES (5), (6), (38), (40): Xaa is C or S
SAGPXXTPTKMSPISMLYKNDKQQIILKYHYGMVVDRXGXS

SEQ ID NO: 34971 - protein, 43 aa, Artificial Sequence
  Non-cyclic GFR-binding peptide
  MOD_RES (6), (7), (40), (42): Xaa is C or S
  MOD_RES (21), (22), (23), (24), (25): Xaa is A or G
  MOD_RES (26), (27), (28), (29): Xaa is A or G or is absent
ASASPXXVPQDLSPINILYFXXXXXXXXXYGKIPMVVKSXKXS

SEQ ID NO: 34972 - protein, 35 aa, Artificial Sequence
  Non-cyclic GFR-binding peptide
  MOD_RES (4), (5): Xaa is C or S
SKAXXVPTKLSATSILYYDKGVVTYLRKHRGMAVS

SEQ ID NO: 34973 - protein, 40 aa, Artificial Sequence
  Non-cyclic GFR-binding peptide
  MOD_RES (6), (7): Xaa is C or S
  MOD_RES (21), (22), (23), (24), (25): Xaa is A or G
  MOD_RES (26), (27), (28), (29): Xaa is A or G or is absent
GSAGPXXTPTKMSPISMLYKXXXXXXXXXLKYHYGMVVDR

SEQ ID NO: 34974 - protein, 38 aa, Artificial Sequence
  Non-cyclic GFR-binding peptide
  MOD_RES (6), (7): Xaa is C or S
GIPEPXXVPEKMNAISILYFDENKNVVLKKYRNMTVES

SEQ ID NO: 34975 - protein, 38 aa, Artificial Sequence
  Non-cyclic GFR-binding peptide
  MOD_RES (5), (6), (38): Xaa is C or S
ASKAXXVPTKLSATSILYYDKGVVTYLRKHRGMAVSEX

SEQ ID NO: 34976 - protein, 38 aa, Artificial Sequence
  Non-cyclic GFR-binding peptide
  MOD_RES (4), (5), (38): Xaa is C or S
  MOD_RES (19), (20), (21), (22), (23): Xaa is A or G
  MOD_RES (24), (25), (26), (27): Xaa is A or G or is absent
PSTXXAPVKTSPISMLYKXXXXXXXXXLKYHYMIVEEX

SEQ ID NO: 34977 - protein, 36 aa, Artificial Sequence
  Non-cyclic GFR-binding peptide
  MOD_RES (33), (35): Xaa is C or S
  MOD_RES (14), (15), (16), (17), (18): Xaa is A or G
  MOD_RES (19), (20), (21), (22): Xaa is A or G or is absent
APVKTEPISMLYLXXXXXXXXXKFKYEMIVEEXGXL

SEQ ID NO: 34978 - protein, 38 aa, Artificial Sequence
  Non-cyclic GFR-binding peptide
  MOD_RES (6), (7): Xaa is C or S
STPPTXXVPTRLEPISILYLDSANNVVKFKYEDMVVES

SEQ ID NO: 34979 - protein, 31 aa, Artificial Sequence
  Non-cyclic GFR-binding peptide
  MOD_RES (31), (31): Xaa is C or S
VSQDLSPINILYFIGKTPKIYGKIPMIVKSX

SEQ ID NO: 34980 - protein, 39 aa, Artificial Sequence
  Non-cyclic GFR-binding peptide
  MOD_RES (1), (2), (36), (38): Xaa is C or S
  MOD_RES (16), (17), (18), (19), (20): Xaa is A or G
  MOD_RES (21), (22), (23), (24): Xaa is A or G or is absent
XXVPEKMEPISILYLXXXXXXXXXKFKYENMTVESXAXR

SEQ ID NO: 34981 - protein, 40 aa, Artificial Sequence
  Non-cyclic GFR-binding peptide
  MOD_RES (6), (7), (40): Xaa is C or S
  MOD_RES (21), (22), (23), (24), (25): Xaa is A or G
  MOD_RES (26), (27), (28), (29): Xaa is A or G or is absent
RVPSTXXAPVKTSPISMLYKXXXXXXXXXLKYHYMIVEEX

SEQ ID NO: 34982 - protein, 42 aa, Artificial Sequence
  Non-cyclic GFR-binding peptide
  MOD_RES (6), (7), (41): Xaa is C or S
  MOD_RES (21), (22), (23), (24), (25): Xaa is A or G
  MOD_RES (26), (27), (28), (29): Xaa is A or G or is absent
GIPEPXXVPEKMSATSILYYXXXXXXXXXLRKHRNMTVESXA

SEQ ID NO: 34983 - protein, 38 aa, Artificial Sequence
  Non-cyclic GFR-binding peptide
  MOD_RES (1), (2), (36), (38): Xaa is C or S
  MOD_RES (16), (17), (18), (19), (20): Xaa is A or G
  MOD_RES (21), (22), (23), (24): Xaa is A or G or is absent
XXVPEKMSPINILYFXXXXXXXXXYGKIPNMTVESXAX

SEQ ID NO: 34984 - protein, 37 aa, Artificial Sequence
  Non-cyclic GFR-binding peptide
  MOD_RES (1), (2), (35), (37): Xaa is C or S
  MOD_RES (16), (17), (18), (19), (20): Xaa is A or G
  MOD_RES (21), (22), (23), (24): Xaa is A or G or is absent
XXVPQALSPINILYFXXXXXXXXXYGKIPMIVRSXKX

SEQ ID NO: 34985 - protein, 42 aa, Artificial Sequence
  Non-cyclic GFR-binding peptide
  MOD_RES (5), (6), (40), (42): Xaa is C or S
  MOD_RES (20), (21), (22), (23), (24): Xaa is A or G
  MOD_RES (25), (26), (27), (28): Xaa is A or G or is absent
APASXXVPARLSATSILYYXXXXXXXXXLRKHRDMVVEAXGX

SEQ ID NO: 34986 - protein, 33 aa, Artificial Sequence
  Non-cyclic GFR-binding peptide
  MOD_RES (32), (32): Xaa is C or S
VPTRLSATSILYYDSANNVVLRKHRDMVVESXG

SEQ ID NO: 34987 - protein, 30 aa, Artificial Sequence
  Non-cyclic GFR-binding peptide
VPQDLSPINILYFVGRTPKVYGKIPMVVKS

SEQ ID NO: 34988 - protein, 39 aa, Artificial Sequence
  Non-cyclic GFR-binding peptide
  MOD_RES (6), (7): Xaa is C or S
  MOD_RES (21), (22), (23), (24), (25): Xaa is A or G
  MOD_RES (26), (27), (28), (29): Xaa is A or G or is absent
STPPTXXVPTRLSPISILYKXXXXXXXXXLKYHYDMVVE

SEQ ID NO: 34989 - protein, 39 aa, Artificial Sequence
  Non-cyclic GFR-binding peptide
  MOD_RES (3), (4), (36), (38): Xaa is C or S
EPXXVPEKMSPINILYFDENKNVVYGKIPNMTVESXAXR

SEQ ID NO: 34990 - protein, 38 aa, Artificial Sequence
  Non-cyclic GFR-binding peptide
  MOD_RES (5), (6): Xaa is C or S
  MOD_RES (20), (21), (22), (23), (24): Xaa is A or G
  MOD_RES (25), (26), (27), (28): Xaa is A or G or is absent
IPEPXXVPEKMSPISILYKXXXXXXXXXLKYHYNMTVE

SEQ ID NO: 34991 - protein, 39 aa, Artificial Sequence
  Non-cyclic GFR-binding peptide
  MOD_RES (6), (7), (39): Xaa is C or S
AAPASXXVPARLSATSILYYDAANNVVLRKHRDMVVEAX

SEQ ID NO: 34992 - protein, 39 aa, Artificial Sequence
  Non-cyclic GFR-binding peptide
  MOD_RES (1), (2), (36), (38): Xaa is C or S
  MOD_RES (16), (17), (18), (19), (20): Xaa is A or G
  MOD_RES (21), (22), (23), (24): Xaa is A or G or is absent
XXVPEKMSATSILYYXXXXXXXXXLRKHRNMTVESXAXR

SEQ ID NO: 34993 - protein, 30 aa, Artificial Sequence
  Non-cyclic GFR-binding peptide
VPTRLSATSILYYDSANNVVLRKHRDMVVE

SEQ ID NO: 34994 - protein, 39 aa, Artificial Sequence
  Non-cyclic GFR-binding peptide
  MOD_RES (3), (4), (37), (39): Xaa is C or S
  MOD_RES (18), (19), (20), (21), (22): Xaa is A or G
  MOD_RES (23), (24), (25), (26): Xaa is A or G or is absent
STXXAPVKTSPISMLYKXXXXXXXXXLKYHYMIVEEXGX

SEQ ID NO: 34995 - protein, 39 aa, Artificial Sequence
  Non-cyclic GFR-binding peptide
  MOD_RES (6), (7), (39): Xaa is C or S
GSAGPXXTPTKMSATSMLYYNDKQQIILRKHRGMVVDRX

SEQ ID NO: 34996 - protein, 42 aa, Artificial Sequence
  Non-cyclic GFR-binding peptide
  MOD_RES (6), (7), (39), (41): Xaa is C or S
GIPEPXXVPEKMNAISILYFDENKNVVLKKYRNMTVESXAXR

SEQ ID NO: 34997 - protein, 34 aa, Artificial Sequence
  Non-cyclic GFR-binding peptide
  MOD_RES (3), (4): Xaa is C or S
PTXXVPTRLEPISILYLDSANNVVKFKYEDMVVE

SEQ ID NO: 34998 - protein, 32 aa, Artificial Sequence
  Non-cyclic GFR-binding peptide
  MOD_RES (1), (2): Xaa is C or S
XXVPEKMSPISILYKDENKNVVLKYHYNMTVE

SEQ ID NO: 34999 - protein, 38 aa, Artificial Sequence
  Non-cyclic GFR-binding peptide
  MOD_RES (4), (5), (37): Xaa is C or S
AGPXXTPTKMSPISMLYKNDKQQIILKYHYGMVVDRXG

SEQ ID NO: 35000 - protein, 42 aa, Artificial Sequence
  Non-cyclic GFR-binding peptide
  MOD_RES (6), (7), (41): Xaa is C or S
  MOD_RES (21), (22), (23), (24), (25): Xaa is A or G
  MOD_RES (26), (27), (28), (29): Xaa is A or G or is absent
HVPKPXXAPTKLSATSVLYYXXXXXXXXXLRKHRNMVVRSXG

SEQ ID NO: 35001 - protein, 31 aa, Artificial Sequence
  Non-cyclic GFR-binding peptide
  MOD_RES (1), (1): Xaa is C or S
XVPEKMSPISILYKDENKNVVLKYHYNMTVE

SEQ ID NO: 35002 - protein, 34 aa, Artificial Sequence
  Non-cyclic GFR-binding peptide
  MOD_RES (1), (2): Xaa is C or S
  MOD_RES (16), (17), (18), (19), (20): Xaa is A or G
  MOD_RES (21), (22), (23), (24): Xaa is A or G or is absent
XXVPQDLSPINILYFXXXXXXXXXYGKIPMVVKS

SEQ ID NO: 35003 - protein, 35 aa, Artificial Sequence
  Non-cyclic GFR-binding peptide
  MOD_RES (32), (34): Xaa is C or S
VPEKMNAISILYFDENKNVVLKKYRNMTVESXAXR

SEQ ID NO: 35004 - protein, 41 aa, Artificial Sequence
  Non-cyclic GFR-binding peptide
  MOD_RES (5), (6), (38), (40): Xaa is C or S
IPEPXXVPEKMEPISILYLDENKNVVKFKYENMTVESXAXR

SEQ ID NO: 35005 - protein, 33 aa, Artificial Sequence
  Non-cyclic GFR-binding peptide
  MOD_RES (31), (33): Xaa is C or S
VPQDLSPINILYFVGRTPKVYGKIPMVVKSXKX

SEQ ID NO: 35006 - protein, 34 aa, Artificial Sequence
  Non-cyclic GFR-binding peptide
  MOD_RES (2), (3), (34): Xaa is C or S
TXXAPVKTSPISMLYKDNGRVLLLKYHYMIVEEX

SEQ ID NO: 35007 - protein, 37 aa, Artificial Sequence
  Non-cyclic GFR-binding peptide
  MOD_RES (1), (34), (36): Xaa is C or S
  MOD_RES (15), (16), (17), (18), (19): Xaa is A or G
  MOD_RES (20), (21), (22), (23): Xaa is A or G or is absent
XAPVKTSATSMLYYXXXXXXXXXLRKHRMIVEEXGXL

SEQ ID NO: 35008 - protein, 43 aa, Artificial Sequence
  Non-cyclic GFR-binding peptide
  MOD_RES (5), (6), (40), (42): Xaa is C or S
  MOD_RES (20), (21), (22), (23), (24): Xaa is A or G
  MOD_RES (25), (26), (27), (28): Xaa is A or G or is absent
IPEPXXVPEKMSPISILYKXXXXXXXXXLKYHYNMTVESXAXR

SEQ ID NO: 35009 - protein, 37 aa, Artificial Sequence
  Non-cyclic GFR-binding peptide
  MOD_RES (5), (6): Xaa is C or S
APASXXVPARLSATSILYYDAANNVVLRKHRDMVVEA

SEQ ID NO: 35010 - protein, 40 aa, Artificial Sequence
  Non-cyclic GFR-binding peptide
  MOD_RES (3), (4), (38), (40): Xaa is C or S
  MOD_RES (18), (19), (20), (21), (22): Xaa is A or G
  MOD_RES (23), (24), (25), (26): Xaa is A or G or is absent
PTXXVPTRLSPISILYKXXXXXXXXXLKYHYDMVVESXGX

SEQ ID NO: 35011 - protein, 40 aa, Artificial Sequence
  Non-cyclic GFR-binding peptide
  MOD_RES (5), (6), (40): Xaa is C or S
  MOD_RES (20), (21), (22), (23), (24): Xaa is A or G
  MOD_RES (25), (26), (27), (28): Xaa is A or G or is absent
IPEPXXVPEKMEPISILYLXXXXXXXXXKFKYENMTVESX

SEQ ID NO: 35012 - protein, 33 aa, Artificial Sequence
  Non-cyclic GFR-binding peptide
  MOD_RES (1), (33): Xaa is C or S
XVPEKMSPINILYFDENKNVVYGKIPNMTVESX

SEQ ID NO: 35013 - protein, 36 aa, Artificial Sequence
  Non-cyclic GFR-binding peptide
  MOD_RES (3), (4), (36): Xaa is C or S
ASXXVPARLSATSILYYDAANNVVLRKHRDMVVEAX

SEQ ID NO: 35014 - protein, 38 aa, Artificial Sequence
  Non-cyclic GFR-binding peptide
  MOD_RES (6), (7): Xaa is C or S
HVPKPXXAPTKLSATSVLYYDDSSNVILRKHRNMVVRS

SEQ ID NO: 35015 - protein, 34 aa, Artificial Sequence
  Non-cyclic GFR-binding peptide
  MOD_RES (1), (2), (34): Xaa is C or S
XXTPTKMEPISMLYLNDKQQIIKFKYEGMVVDRX

SEQ ID NO: 35016 - protein, 38 aa, Artificial Sequence
  Non-cyclic GFR-binding peptide
  MOD_RES (3), (4), (36), (38): Xaa is C or S
GPXXTPTKMSATSMLYYNDKQQIILRKHRGMVVDRXGX

SEQ ID NO: 35017 - protein, 34 aa, Artificial Sequence
  Non-cyclic GFR-binding peptide
  MOD_RES (1), (2): Xaa is C or S
  MOD_RES (16), (17), (18), (19), (20): Xaa is A or G
  MOD_RES (21), (22), (23), (24): Xaa is A or G or is absent
XXVPEKMSPINILYFXXXXXXXXXYGKIPNMTVE

SEQ ID NO: 35018 - protein, 35 aa, Artificial Sequence
  Non-cyclic GFR-binding peptide
  MOD_RES (1), (2), (34): Xaa is C or S
XXVPTRLSATSILYYDSANNVVLRKHRDMVVESXG

SEQ ID NO: 35019 - protein, 37 aa, Artificial Sequence
  Non-cyclic GFR-binding peptide
  MOD_RES (3), (4), (35), (37): Xaa is C or S
STXXAPVKTSATSMLYYDNGRVLLLRKHRMIVEEXGX

SEQ ID NO: 35020 - protein, 33 aa, Artificial Sequence
  Non-cyclic GFR-binding peptide
  MOD_RES (33), (33): Xaa is C or S
  MOD_RES (14), (15), (16), (17), (18): Xaa is A or G
  MOD_RES (19), (20), (21), (22): Xaa is A or G or is absent
VSQDLSPINILYFXXXXXXXXXYGKIPMIVKSX

SEQ ID NO: 35021 - protein, 35 aa, Artificial Sequence
  Non-cyclic GFR-binding peptide
  MOD_RES (2), (3): Xaa is C or S
  MOD_RES (17), (18), (19), (20), (21): Xaa is A or G
  MOD_RES (22), (23), (24), (25): Xaa is A or G or is absent
PXXVPEKMSPINILYFXXXXXXXXXYGKIPNMTVE

SEQ ID NO: 35022 - protein, 35 aa, Artificial Sequence
  Non-cyclic GFR-binding peptide
  MOD_RES (4), (5): Xaa is C or S
AGPXXTPTKMSPISMLYKNDKQQIILKYHYGMVVD

SEQ ID NO: 35023 - protein, 30 aa, Artificial Sequence
  Non-cyclic GFR-binding peptide
TPTKMSATSMLYYNDKQQIILRKHRGMVVD

SEQ ID NO: 35024 - protein, 35 aa, Artificial Sequence
  Non-cyclic GFR-binding peptide
  MOD_RES (1), (2): Xaa is C or S
  MOD_RES (16), (17), (18), (19), (20): Xaa is A or G
  MOD_RES (21), (22), (23), (24): Xaa is A or G or is absent
XXVPEKMNAISILYFXXXXXXXXXLKKYRNMTVES

SEQ ID NO: 35025 - protein, 38 aa, Artificial Sequence
  Non-cyclic GFR-binding peptide
  MOD_RES (5), (6): Xaa is C or S
  MOD_RES (20), (21), (22), (23), (24): Xaa is A or G
  MOD_RES (25), (26), (27), (28): Xaa is A or G or is absent
SAGPXXTPTKMSPISMLYKXXXXXXXXXLKYHYGMVVD

SEQ ID NO: 35026 - protein, 39 aa, Artificial Sequence
  Non-cyclic GFR-binding peptide
  MOD_RES (3), (4), (38): Xaa is C or S
  MOD_RES (18), (19), (20), (21), (22): Xaa is A or G
  MOD_RES (23), (24), (25), (26): Xaa is A or G or is absent
KAXXVPTKLSATSILYYXXXXXXXXXLRKHRGMAVSEXG

SEQ ID NO: 35027 - protein, 42 aa, Artificial Sequence
  Non-cyclic GFR-binding peptide
  MOD_RES (6), (7), (39), (41): Xaa is C or S
AAPASXXVPARLSATSILYYDAANNVVLRKHRDMVVEAXGXR

SEQ ID NO: 35028 - protein, 35 aa, Artificial Sequence
  Non-cyclic GFR-binding peptide
  MOD_RES (1), (2), (34): Xaa is C or S
XXVPTRLEPISILYLDSANNVVKFKYEDMVVESXG

SEQ ID NO: 35029 - protein, 37 aa, Artificial Sequence
  Non-cyclic GFR-binding peptide
  MOD_RES (1), (34), (36): Xaa is C or S
  MOD_RES (15), (16), (17), (18), (19): Xaa is A or G
  MOD_RES (20), (21), (22), (23): Xaa is A or G or is absent
XVSQDLSPINILYFXXXXXXXXXYGKIPMIVKSXKXS

SEQ ID NO: 35030 - protein, 41 aa, Artificial Sequence
  Non-cyclic GFR-binding peptide
  MOD_RES (4), (5), (38), (40): Xaa is C or S
  MOD_RES (19), (20), (21), (22), (23): Xaa is A or G
  MOD_RES (24), (25), (26), (27): Xaa is A or G or is absent
AAPXXVPQALSPINILYFXXXXXXXXXYGKIPMIVRSXKXS

SEQ ID NO: 35031 - protein, 37 aa, Artificial Sequence
  Non-cyclic GFR-binding peptide
  MOD_RES (6), (7): Xaa is C or S
RVPSTXXAPVKTEPISMLYLDNGRVLLKFKYEMIVEE

SEQ ID NO: 35032 - protein, 35 aa, Artificial Sequence
  Non-cyclic GFR-binding peptide
  MOD_RES (4), (5): Xaa is C or S
AGPXXTPTKMEPISMLYLNDKQQIIKFKYEGMVVD

SEQ ID NO: 35033 - protein, 39 aa, Artificial Sequence
  Non-cyclic GFR-binding peptide
  MOD_RES (6), (7), (39): Xaa is C or S
GIPEPXXVPEKMSATSILYYDENKNVVLRKHRNMTVESX

SEQ ID NO: 35034 - protein, 34 aa, Artificial Sequence
  Non-cyclic GFR-binding peptide
  MOD_RES (1), (1): Xaa is C or S
  MOD_RES (15), (16), (17), (18), (19): Xaa is A or G
  MOD_RES (20), (21), (22), (23): Xaa is A or G or is absent
XVPEKMNAISILYFXXXXXXXXXLKKYRNMTVES

SEQ ID NO: 35035 - protein, 42 aa, Artificial Sequence
  Non-cyclic GFR-binding peptide
  MOD_RES (6), (7), (39), (41): Xaa is C or S
KASKAXXVPTKLSATSILYYDKGVVTYLRKHRGMAVSEXGXR

SEQ ID NO: 35036 - protein, 34 aa, Artificial Sequence
  Non-cyclic GFR-binding peptide
  MOD_RES (31), (33): Xaa is C or S
VPQALSPINILYFVGRKPKVYGKIPMIVRSXKXS

SEQ ID NO: 35037 - protein, 38 aa, Artificial Sequence
  Non-cyclic GFR-binding peptide
  MOD_RES (5), (6): Xaa is C or S
  MOD_RES (20), (21), (22), (23), (24): Xaa is A or G
  MOD_RES (25), (26), (27), (28): Xaa is A or G or is absent
ASKAXXVPTKLSATSILYYXXXXXXXXXLRKHRGMAVS

SEQ ID NO: 35038 - protein, 42 aa, Artificial Sequence
  Non-cyclic GFR-binding peptide
  MOD_RES (6), (7), (40), (42): Xaa is C or S
  MOD_RES (21), (22), (23), (24), (25): Xaa is A or G
  MOD_RES (26), (27), (28), (29): Xaa is A or G or is absent
ASAAPXXVPQALSPINILYFXXXXXXXXXYGKIPMIVRSXKX

SEQ ID NO: 35039 - protein, 38 aa, Artificial Sequence
  Non-cyclic GFR-binding peptide
  MOD_RES (2), (3), (35), (37): Xaa is C or S
PXXTPTKMEPISMLYLNDKQQIIKFKYEGMVVDRXGXS

SEQ ID NO: 35040 - protein, 35 aa, Artificial Sequence
  Non-cyclic GFR-binding peptide
  MOD_RES (2), (3): Xaa is C or S
  MOD_RES (17), (18), (19), (20), (21): Xaa is A or G
  MOD_RES (22), (23), (24), (25): Xaa is A or G or is absent
PXXVPQDLSPINILYFXXXXXXXXXYGKIPMVVKS

SEQ ID NO: 35041 - protein, 36 aa, Artificial Sequence
  Non-cyclic GFR-binding peptide
  MOD_RES (3), (4): Xaa is C or S
  MOD_RES (18), (19), (20), (21), (22): Xaa is A or G
  MOD_RES (23), (24), (25), (26): Xaa is A or G or is absent
STXXAPVKTSATSMLYYXXXXXXXXXLRKHRMIVEE

SEQ ID NO: 35042 - protein, 43 aa, Artificial Sequence
  Non-cyclic GFR-binding peptide
  MOD_RES (6), (7), (41), (43): Xaa is C or S
  MOD_RES (21), (22), (23), (24), (25): Xaa is A or G
  MOD_RES (26), (27), (28), (29): Xaa is A or G or is absent
GSAGPXXTPTKMSPISMLYKXXXXXXXXXLKYHYGMVVDRXGX

SEQ ID NO: 35043 - protein, 31 aa, Artificial Sequence
  Non-cyclic GFR-binding peptide
  MOD_RES (1), (1): Xaa is C or S
XVPEKMSATSILYYDENKNVVLRKHRNMTVE

SEQ ID NO: 35044 - protein, 37 aa, Artificial Sequence
  Non-cyclic GFR-binding peptide
  MOD_RES (2), (3), (36): Xaa is C or S
  MOD_RES (17), (18), (19), (20), (21): Xaa is A or G
  MOD_RES (22), (23), (24), (25): Xaa is A or G or is absent
TXXAPVKTSPISMLYKXXXXXXXXXLKYHYMIVEEXG

SEQ ID NO: 35045 - protein, 41 aa, Artificial Sequence
  Non-cyclic GFR-binding peptide
  MOD_RES (5), (6), (40): Xaa is C or S
  MOD_RES (20), (21), (22), (23), (24): Xaa is A or G
  MOD_RES (25), (26), (27), (28): Xaa is A or G or is absent
IPEPXXVPEKMNAISILYFXXXXXXXXXLKKYRNMTVESXA

SEQ ID NO: 35046 - protein, 39 aa, Artificial Sequence
  Non-cyclic GFR-binding peptide
  MOD_RES (6), (7), (39): Xaa is C or S
STPPTXXVPTRLSPISILYKDSANNVVLKYHYDMVVESX

SEQ ID NO: 35047 - protein, 37 aa, Artificial Sequence
  Non-cyclic GFR-binding peptide
  MOD_RES (3), (4): Xaa is C or S
  MOD_RES (18), (19), (20), (21), (22): Xaa is A or G
  MOD_RES (23), (24), (25), (26): Xaa is A or G or is absent
PTXXVPTRLSPISILYKXXXXXXXXXLKYHYDMVVES

SEQ ID NO: 35048 - protein, 37 aa, Artificial Sequence
  Non-cyclic GFR-binding peptide
  MOD_RES (4), (5), (37): Xaa is C or S
PASXXVPARLSATSILYYDAANNVVLRKHRDMVVEAX

SEQ ID NO: 35049 - protein, 35 aa, Artificial Sequence
  Non-cyclic GFR-binding peptide
  MOD_RES (34), (34): Xaa is C or S
  MOD_RES (14), (15), (16), (17), (18): Xaa is A or G
  MOD_RES (19), (20), (21), (22): Xaa is A or G or is absent
VPEKMSATSILYYXXXXXXXXXLRKHRNMTVESXA

SEQ ID NO: 35050 - protein, 34 aa, Artificial Sequence
  Non-cyclic GFR-binding peptide
  MOD_RES (2), (3), (34): Xaa is C or S
TXXAPVKTSATSMLYYDNGRVLLLRKHRMIVEEX

SEQ ID NO: 35051 - protein, 32 aa, Artificial Sequence
  Non-cyclic GFR-binding peptide
  MOD_RES (1), (32): Xaa is C or S
XVSQDLSPINILYFIGKTPKIYGKIPMIVKSX

SEQ ID NO: 35052 - protein, 39 aa, Artificial Sequence
  Non-cyclic GFR-binding peptide
  MOD_RES (5), (6): Xaa is C or S
  MOD_RES (20), (21), (22), (23), (24): Xaa is A or G
  MOD_RES (25), (26), (27), (28): Xaa is A or G or is absent
TPPTXXVPTRLSPISILYKXXXXXXXXXLKYHYDMVVES

SEQ ID NO: 35053 - protein, 33 aa, Artificial Sequence
  Non-cyclic GFR-binding peptide
  MOD_RES (2), (3): Xaa is C or S
SXXVPARLSATSILYYDAANNVVLRKHRDMVVE

SEQ ID NO: 35054 - protein, 43 aa, Artificial Sequence
  Non-cyclic GFR-binding peptide
  MOD_RES (6), (7), (41), (43): Xaa is C or S
  MOD_RES (21), (22), (23), (24), (25): Xaa is A or G
  MOD_RES (26), (27), (28), (29): Xaa is A or G or is absent
GIPEPXXVPEKMSPINILYFXXXXXXXXXYGKIPNMTVESXAX

SEQ ID NO: 35055 - protein, 44 aa, Artificial Sequence
  Non-cyclic GFR-binding peptide
  MOD_RES (6), (7), (41), (43): Xaa is C or S
  MOD_RES (21), (22), (23), (24), (25): Xaa is A or G
  MOD_RES (26), (27), (28), (29): Xaa is A or G or is absent
GIPEPXXVPEKMSATSILYYXXXXXXXXXLRKHRNMTVESXAXR

SEQ ID NO: 35056 - protein, 42 aa, Artificial Sequence
  Non-cyclic GFR-binding peptide
  MOD_RES (6), (7), (39), (41): Xaa is C or S
GIPEPXXVPEKMSPISILYKDENKNVVLKYHYNMTVESXAXR

SEQ ID NO: 35057 - protein, 35 aa, Artificial Sequence
  Non-cyclic GFR-binding peptide
  MOD_RES (1), (33), (35): Xaa is C or S
XVPEKMSPINILYFDENKNVVYGKIPNMTVESXAX

SEQ ID NO: 35058 - protein, 43 aa, Artificial Sequence
  Non-cyclic GFR-binding peptide
  MOD_RES (6), (7), (40), (42): Xaa is C or S
  MOD_RES (21), (22), (23), (24), (25): Xaa is A or G
  MOD_RES (26), (27), (28), (29): Xaa is A or G or is absent
RVPSTXXAPVKTSATSMLYYXXXXXXXXXLRKHRMIVEEXGXL

SEQ ID NO: 35059 - protein, 44 aa, Artificial Sequence
  Non-cyclic GFR-binding peptide
  MOD_RES (6), (7), (41), (43): Xaa is C or S
  MOD_RES (21), (22), (23), (24), (25): Xaa is A or G
  MOD_RES (26), (27), (28), (29): Xaa is A or G or is absent
GIPEPXXVPEKMEPISILYLXXXXXXXXXKFKYENMTVESXAXR

SEQ ID NO: 35060 - protein, 37 aa, Artificial Sequence
  Non-cyclic GFR-binding peptide
  MOD_RES (5), (6): Xaa is C or S
IPEPXXVPEKMSPISILYKDENKNVVLKYHYNMTVES

SEQ ID NO: 35061 - protein, 39 aa, Artificial Sequence
  Non-cyclic GFR-binding peptide
  MOD_RES (4), (5), (37), (39): Xaa is C or S
PEPXXVPEKMSATSILYYDENKNVVLRKHRNMTVESXAX

SEQ ID NO: 35062 - protein, 32 aa, Artificial Sequence
  Non-cyclic GFR-binding peptide
  MOD_RES (32), (32): Xaa is C or S
VPEKMSPINILYFDENKNVVYGKIPNMTVESX

SEQ ID NO: 35063 - protein, 35 aa, Artificial Sequence
  Non-cyclic GFR-binding peptide
  MOD_RES (1), (2), (34): Xaa is C or S
XXTPTKMSATSMLYYNDKQQIILRKHRGMVVDRXG

SEQ ID NO: 35064 - protein, 39 aa, Artificial Sequence
  Non-cyclic GFR-binding peptide
  MOD_RES (2), (3), (37), (39): Xaa is C or S
  MOD_RES (17), (18), (19), (20), (21): Xaa is A or G
  MOD_RES (22), (23), (24), (25): Xaa is A or G or is absent
PXXVPEKMSPINILYFXXXXXXXXXYGKIPNMTVESXAX

SEQ ID NO: 35065 - protein, 37 aa, Artificial Sequence
  Non-cyclic GFR-binding peptide
  MOD_RES (3), (4): Xaa is C or S
  MOD_RES (18), (19), (20), (21), (22): Xaa is A or G
  MOD_RES (23), (24), (25), (26): Xaa is A or G or is absent
GPXXTPTKMEPISMLYLXXXXXXXXXKFKYEGMVVDR

SEQ ID NO: 35066 - protein, 40 aa, Artificial Sequence
  Non-cyclic GFR-binding peptide
  MOD_RES (4), (5), (38), (40): Xaa is C or S
  MOD_RES (19), (20), (21), (22), (23): Xaa is A or G
  MOD_RES (24), (25), (26), (27): Xaa is A or G or is absent
AAPXXVPQALSPINILYFXXXXXXXXXYGKIPMIVRSXKX

SEQ ID NO: 35067 - protein, 36 aa, Artificial Sequence
  Non-cyclic GFR-binding peptide
  MOD_RES (34), (36): Xaa is C or S
  MOD_RES (14), (15), (16), (17), (18): Xaa is A or G
  MOD_RES (19), (20), (21), (22): Xaa is A or G or is absent
VPEKMSPINILYFXXXXXXXXXYGKIPNMTVESXAX

SEQ ID NO: 35068 - protein, 39 aa, Artificial Sequence
  Non-cyclic GFR-binding peptide
  MOD_RES (6), (7): Xaa is C or S
  MOD_RES (21), (22), (23), (24), (25): Xaa is A or G
  MOD_RES (26), (27), (28), (29): Xaa is A or G or is absent
STPPTXXVPTRLEPISILYLXXXXXXXXXKFKYEDMVVE

SEQ ID NO: 35069 - protein, 39 aa, Artificial Sequence
  Non-cyclic GFR-binding peptide
  MOD_RES (6), (7), (38): Xaa is C or S
ASASPXXVPQDLSPINILYFVGRTPKVYGKIPMVVKSXK

SEQ ID NO: 35070 - protein, 35 aa, Artificial Sequence
  Non-cyclic GFR-binding peptide
  MOD_RES (1), (2), (34): Xaa is C or S
XXTPTKMEPISMLYLNDKQQIIKFKYEGMVVDRXG

SEQ ID NO: 35071 - protein, 36 aa, Artificial Sequence
  Non-cyclic GFR-binding peptide
  MOD_RES (5), (6): Xaa is C or S
IPEPXXVPEKMSPISILYKDENKNVVLKYHYNMTVE

SEQ ID NO: 35072 - protein, 38 aa, Artificial Sequence
  Non-cyclic GFR-binding peptide
  MOD_RES (3), (4), (37): Xaa is C or S
  MOD_RES (18), (19), (20), (21), (22): Xaa is A or G
  MOD_RES (23), (24), (25), (26): Xaa is A or G or is absent
APXXVPQALSPINILYFXXXXXXXXXYGKIPMIVRSXK

SEQ ID NO: 35073 - protein, 36 aa, Artificial Sequence
  Non-cyclic GFR-binding peptide
  MOD_RES (1), (3), (36): Xaa is C or S
  MOD_RES (14), (15), (16), (17), (18): Xaa is A or G
  MOD_RES (19), (20), (21), (22): Xaa is A or G or is absent
XKXSKVIMSMEGLXXXXXXXXXMIQITINSLDQSVX

SEQ ID NO: 35074 - protein, 35 aa, Artificial Sequence
  Non-cyclic GFR-binding peptide
  MOD_RES (31), (32): Xaa is C or S
EVVMDSMEGIVVNNASDMIQITINSLRTPVXXTPP

SEQ ID NO: 35075 - protein, 40 aa, Artificial Sequence
  Non-cyclic GFR-binding peptide
  MOD_RES (1), (3), (36), (37): Xaa is C or S
  MOD_RES (14), (15), (16), (17), (18): Xaa is A or G
  MOD_RES (19), (20), (21), (22): Xaa is A or G or is absent
XKXSKVVMSMEGLXXXXXXXXXMIQITINSLDQPVXXPSA

SEQ ID NO: 35076 - protein, 37 aa, Artificial Sequence
  Non-cyclic GFR-binding peptide
  MOD_RES (32), (33): Xaa is C or S
AEVVMDSMEGLVVNNAADMIQITINSLRAPVXXSAPA

SEQ ID NO: 35077 - protein, 40 aa, Artificial Sequence
  Non-cyclic GFR-binding peptide
  MOD_RES (2), (4), (37), (38): Xaa is C or S
  MOD_RES (15), (16), (17), (18), (19): Xaa is A or G
  MOD_RES (20), (21), (22), (23): Xaa is A or G or is absent
SXKXSKVVMSMEGLXXXXXXXXXMIQITINSLDQPVXXPS

SEQ ID NO: 35078 - protein, 38 aa, Artificial Sequence
  Non-cyclic GFR-binding peptide
  MOD_RES (1), (3), (37), (38): Xaa is C or S
  MOD_RES (15), (16), (17), (18), (19): Xaa is A or G
  MOD_RES (20), (21), (22), (23): Xaa is A or G or is absent
XGXAEVVMDSMEGLXXXXXXXXXMIQITINSLRAPVXX

SEQ ID NO: 35079 - protein, 37 aa, Artificial Sequence
  Non-cyclic GFR-binding peptide
  MOD_RES (31), (32): Xaa is C or S
EEVIMSMEGLLLVRGNDMIQMTINSTKVPAXXTSPVR

SEQ ID NO: 35080 - protein, 43 aa, Artificial Sequence
  Non-cyclic GFR-binding peptide
  MOD_RES (2), (4), (38), (39): Xaa is C or S
  MOD_RES (16), (17), (18), (19), (20): Xaa is A or G
  MOD_RES (21), (22), (23), (24): Xaa is A or G or is absent
RXGXAEVVMDSMEGIXXXXXXXXXMIQITINSLRAPVXXSAPA

SEQ ID NO: 35081 - protein, 41 aa, Artificial Sequence
  Non-cyclic GFR-binding peptide
  MOD_RES (2), (4), (37), (38): Xaa is C or S
  MOD_RES (15), (16), (17), (18), (19): Xaa is A or G
  MOD_RES (20), (21), (22), (23): Xaa is A or G or is absent
SXKXSKVVMSMEGLXXXXXXXXXMIQITINSLDQPVXXPSA

SEQ ID NO: 35082 - protein, 34 aa, Artificial Sequence
  Non-cyclic GFR-binding peptide
  MOD_RES (31), (32): Xaa is C or S
EEVIMSMEGLLLVRGNDMIQMTINSTKVPAXXTS

SEQ ID NO: 35083 - protein, 38 aa, Artificial Sequence
  Non-cyclic GFR-binding peptide
  MOD_RES (33), (34): Xaa is C or S
  MOD_RES (11), (12), (13), (14), (15): Xaa is A or G
  MOD_RES (16), (17), (18), (19): Xaa is A or G or is absent
EVVMDSMEGIXXXXXXXXXMIQITINSLRTPVXXTPPT

SEQ ID NO: 35084 - protein, 38 aa, Artificial Sequence
  Non-cyclic GFR-binding peptide
  MOD_RES (2), (35), (36): Xaa is C or S
  MOD_RES (13), (14), (15), (16), (17): Xaa is A or G
  MOD_RES (18), (19), (20), (21): Xaa is A or G or is absent
KXSKVVMSMEGLXXXXXXXXXMIQITINSLDQPVXXPS

SEQ ID NO: 35085 - protein, 43 aa, Artificial Sequence
  Non-cyclic GFR-binding peptide
  MOD_RES (1), (3), (37), (38): Xaa is C or S
  MOD_RES (15), (16), (17), (18), (19): Xaa is A or G
  MOD_RES (20), (21), (22), (23): Xaa is A or G or is absent
XGXSEVVMDSMEGLXXXXXXXXXMIQITINSLRTPVXXTPPTS

SEQ ID NO: 35086 - protein, 39 aa, Artificial Sequence
  Non-cyclic GFR-binding peptide
  MOD_RES (33), (34): Xaa is C or S
  MOD_RES (11), (12), (13), (14), (15): Xaa is A or G
  MOD_RES (16), (17), (18), (19): Xaa is A or G or is absent
EVVMDSMEGLXXXXXXXXXMIQITINSLRTPVXXTPPTS

SEQ ID NO: 35087 - protein, 35 aa, Artificial Sequence
  Non-cyclic GFR-binding peptide
  MOD_RES (32), (33): Xaa is C or S
AEVVMDSMEGIVVNNAADMIQITINSLRAPVXXSA

SEQ ID NO: 35088 - protein, 31 aa, Artificial Sequence
  Non-cyclic GFR-binding peptide
AEVVMDSMEGLVVNNAADMIQITINSLRAPV

SEQ ID NO: 35089 - protein, 39 aa, Artificial Sequence
  Non-cyclic GFR-binding peptide
  MOD_RES (2), (36), (37): Xaa is C or S
  MOD_RES (14), (15), (16), (17), (18): Xaa is A or G
  MOD_RES (19), (20), (21), (22): Xaa is A or G or is absent
GXRDVVMGSMEGIXXXXXXXXXMIQMTINSMKTPTXXPG

SEQ ID NO: 35090 - protein, 31 aa, Artificial Sequence
  Non-cyclic GFR-binding peptide
  MOD_RES (31), (31): Xaa is C or S
EEVIMSMEGLLLVRGNDMIQMTINSTKVPAX

SEQ ID NO: 35091 - protein, 39 aa, Artificial Sequence
  Non-cyclic GFR-binding peptide
  MOD_RES (2), (4), (35), (36): Xaa is C or S
SXKXSKVVMSMEGLVKPTRGVMIQITINSLDQPVXXPSA

SEQ ID NO: 35092 - protein, 30 aa, Artificial Sequence
  Non-cyclic GFR-binding peptide
EVVMDSMEGIVVNNASDMIQITINSLRTPV

SEQ ID NO: 35093 - protein, 36 aa, Artificial Sequence
  Non-cyclic GFR-binding peptide
  MOD_RES (2), (4), (35), (36): Xaa is C or S
LXGXEEVIMSMEGLLLVRGNDMIQMTINSTKVPAXX

SEQ ID NO: 35094 - protein, 35 aa, Artificial Sequence
  Non-cyclic GFR-binding peptide
  MOD_RES (1), (32), (33): Xaa is C or S
XSKVVMSMEGLVKPTRGVMIQITINSLDQPVXXPS

SEQ ID NO: 35095 - protein, 34 aa, Artificial Sequence
  Non-cyclic GFR-binding peptide
  MOD_RES (1), (3): Xaa is C or S
XGXRDVVMGSMEGIIIQQKDNMIQMTINSMKTPT

SEQ ID NO: 35096 - protein, 42 aa, Artificial Sequence
  Non-cyclic GFR-binding peptide
  MOD_RES (2), (4), (38), (39): Xaa is C or S
  MOD_RES (16), (17), (18), (19), (20): Xaa is A or G
  MOD_RES (21), (22), (23), (24): Xaa is A or G or is absent
HXGXSRVVMNSMEGLXXXXXXXXXMIQVTINSLKTPAXXPKP

SEQ ID NO: 35097 - protein, 37 aa, Artificial Sequence
  Non-cyclic GFR-binding peptide
  MOD_RES (34), (35): Xaa is C or S
  MOD_RES (12), (13), (14), (15), (16): Xaa is A or G
  MOD_RES (17), (18), (19), (20): Xaa is A or G or is absent
RDVVMGSMEGLXXXXXXXXXMIQMTINSMKTPTXXPG

SEQ ID NO: 35098 - protein, 32 aa, Artificial Sequence
  Non-cyclic GFR-binding peptide
  MOD_RES (1), (1): Xaa is C or S
XRDVVMGSMEGIIIQQKDNMIQMTINSMKTPT

SEQ ID NO: 35099 - protein, 35 aa, Artificial Sequence
  Non-cyclic GFR-binding peptide
  MOD_RES (1), (3), (34), (35): Xaa is C or S
XGXEEVIMSMEGLLLVRGNDMIQMTINSTKVPAXX

SEQ ID NO: 35100 - protein, 41 aa, Artificial Sequence
  Non-cyclic GFR-binding peptide
  MOD_RES (1), (3), (35), (36): Xaa is C or S
XGXRDVVMGSMEGLIIQQKDNMIQMTINSMKTPTXXPGASG

SEQ ID NO: 35101 - protein, 36 aa, Artificial Sequence
  Non-cyclic GFR-binding peptide
  MOD_RES (1), (3), (35), (36): Xaa is C or S
XGXSEVVMDSMEGLVVNNASDMIQITINSLRTPVXX

SEQ ID NO: 35102 - protein, 39 aa, Artificial Sequence
  Non-cyclic GFR-binding peptide
  MOD_RES (1), (3), (37), (38): Xaa is C or S
  MOD_RES (15), (16), (17), (18), (19): Xaa is A or G
  MOD_RES (20), (21), (22), (23): Xaa is A or G or is absent
XGXAEVVMDSMEGIXXXXXXXXXMIQITINSLRAPVXXS

SEQ ID NO: 35103 - protein, 42 aa, Artificial Sequence
  Non-cyclic GFR-binding peptide
  MOD_RES (2), (36), (37): Xaa is C or S
  MOD_RES (14), (15), (16), (17), (18): Xaa is A or G
  MOD_RES (19), (20), (21), (22): Xaa is A or G or is absent
GXRDVVMGSMEGIXXXXXXXXXMIQMTINSMKTPTXXPGASG

SEQ ID NO: 35104 - protein, 37 aa, Artificial Sequence
  Non-cyclic GFR-binding peptide
  MOD_RES (2), (4), (35), (36): Xaa is C or S
SXKXSRVIMSMEGLVKPKRGVMIQITINSLAQPVXXP

SEQ ID NO: 35105 - protein, 40 aa, Artificial Sequence
  Non-cyclic GFR-binding peptide
  MOD_RES (34), (35): Xaa is C or S
  MOD_RES (12), (13), (14), (15), (16): Xaa is A or G
  MOD_RES (17), (18), (19), (20): Xaa is A or G or is absent
SRVVMNSMEGIXXXXXXXXXMIQVTINSLKTPAXXPKPVH

SEQ ID NO: 35106 - protein, 38 aa, Artificial Sequence
  Non-cyclic GFR-binding peptide
  MOD_RES (2), (33), (34): Xaa is C or S
KXSKVIMSMEGLIKPTKGIMIQITINSLDQSVXXPSAS

SEQ ID NO: 35107 - protein, 33 aa, Artificial Sequence
  Non-cyclic GFR-binding peptide
  MOD_RES (12), (13), (14), (15), (16): Xaa is A or G
  MOD_RES (17), (18), (19), (20): Xaa is A or G or is absent
AEVVMDSMEGLXXXXXXXXXMIQITINSLRAPV

SEQ ID NO: 35108 - protein, 41 aa, Artificial Sequence
  Non-cyclic GFR-binding peptide
  MOD_RES (2), (35), (36): Xaa is C or S
  MOD_RES (13), (14), (15), (16), (17): Xaa is A or G
  MOD_RES (18), (19), (20), (21): Xaa is A or G or is absent
GXEEVIMSMEGIXXXXXXXXXMIQMTINSTKVPAXXTSPVR

SEQ ID NO: 35109 - protein, 34 aa, Artificial Sequence
  Non-cyclic GFR-binding peptide
  MOD_RES (33), (34): Xaa is C or S
  MOD_RES (11), (12), (13), (14), (15): Xaa is A or G
  MOD_RES (16), (17), (18), (19): Xaa is A or G or is absent
DVVMGSMEGLXXXXXXXXXMIQMTINSMKTPTXX

SEQ ID NO: 35110 - protein, 35 aa, Artificial Sequence
  Non-cyclic GFR-binding peptide
  MOD_RES (2), (35): Xaa is C or S
  MOD_RES (13), (14), (15), (16), (17): Xaa is A or G
  MOD_RES (18), (19), (20), (21): Xaa is A or G or is absent
GXEEVIMSMEGLXXXXXXXXXMIQMTINSTKVPAX

SEQ ID NO: 35111 - protein, 40 aa, Artificial Sequence
  Non-cyclic GFR-binding peptide
  MOD_RES (2), (36), (37): Xaa is C or S
  MOD_RES (14), (15), (16), (17), (18): Xaa is A or G
  MOD_RES (19), (20), (21), (22): Xaa is A or G or is absent
GXRDVVMGSMEGLXXXXXXXXXMIQMTINSMKTPTXXPGA

SEQ ID NO: 35112 - protein, 34 aa, Artificial Sequence
  Non-cyclic GFR-binding peptide
  MOD_RES (1), (3), (34): Xaa is C or S
XGXEEVIMSMEGILLVRGNDMIQMTINSTKVPAX

SEQ ID NO: 35113 - protein, 35 aa, Artificial Sequence
  Non-cyclic GFR-binding peptide
  MOD_RES (1), (3): Xaa is C or S
  MOD_RES (14), (15), (16), (17), (18): Xaa is A or G
  MOD_RES (19), (20), (21), (22): Xaa is A or G or is absent
XKXSKVVMSMEGLXXXXXXXXXMIQITINSLDQPV

SEQ ID NO: 35114 - protein, 41 aa, Artificial Sequence
  Non-cyclic GFR-binding peptide
  MOD_RES (2), (4), (36), (37): Xaa is C or S
SXGXRDVVMGSMEGIIIQQKDNMIQMTINSMKTPTXXPGAS

SEQ ID NO: 35115 - protein, 35 aa, Artificial Sequence
  Non-cyclic GFR-binding peptide
  MOD_RES (1), (3), (34), (35): Xaa is C or S
XGXEEVIMSMEGILLVRGNDMIQMTINSTKVPAXX

SEQ ID NO: 35116 - protein, 36 aa, Artificial Sequence
  Non-cyclic GFR-binding peptide
  MOD_RES (31), (32): Xaa is C or S
EEVIMSMEGLLLVRGNDMIQMTINSTKVPAXXTSPV

SEQ ID NO: 35117 - protein, 35 aa, Artificial Sequence
  Non-cyclic GFR-binding peptide
  MOD_RES (1), (32), (33): Xaa is C or S
XEEVIMSMEGLLLVRGNDMIQMTINSTKVPAXXTS

SEQ ID NO: 35118 - protein, 32 aa, Artificial Sequence
  Non-cyclic GFR-binding peptide
  MOD_RES (11), (12), (13), (14), (15): Xaa is A or G
  MOD_RES (16), (17), (18), (19): Xaa is A or G or is absent
EVVMDSMEGIXXXXXXXXXMIQITINSLRAPV

SEQ ID NO: 35119 - protein, 35 aa, Artificial Sequence
  Non-cyclic GFR-binding peptide
  MOD_RES (1), (3), (35): Xaa is C or S
XGXRDVVMGSMEGLIIQQKDNMIQMTINSMKTPTX

SEQ ID NO: 35120 - protein, 40 aa, Artificial Sequence
  Non-cyclic GFR-binding peptide
  MOD_RES (34), (35): Xaa is C or S
  MOD_RES (12), (13), (14), (15), (16): Xaa is A or G
  MOD_RES (17), (18), (19), (20): Xaa is A or G or is absent
AEVVMDSMEGIXXXXXXXXXMIQITINSLRAPVXXSAPAA

SEQ ID NO: 35121 - protein, 33 aa, Artificial Sequence
  Non-cyclic GFR-binding peptide
  MOD_RES (33), (33): Xaa is C or S
  MOD_RES (11), (12), (13), (14), (15): Xaa is A or G
  MOD_RES (16), (17), (18), (19): Xaa is A or G or is absent
DVVMGSMEGLXXXXXXXXXMIQMTINSMKTPTX

SEQ ID NO: 35122 - protein, 36 aa, Artificial Sequence
  Non-cyclic GFR-binding peptide
  MOD_RES (1), (35), (36): Xaa is C or S
  MOD_RES (13), (14), (15), (16), (17): Xaa is A or G
  MOD_RES (18), (19), (20), (21): Xaa is A or G or is absent
XAEVVMDSMEGLXXXXXXXXXMIQITINSLRAPVXX

SEQ ID NO: 35123 - protein, 34 aa, Artificial Sequence
  Non-cyclic GFR-binding peptide
  MOD_RES (33), (34): Xaa is C or S
  MOD_RES (11), (12), (13), (14), (15): Xaa is A or G
  MOD_RES (16), (17), (18), (19): Xaa is A or G or is absent
SKVVMSMEGLXXXXXXXXXMIQITINSLDQPVXX

SEQ ID NO: 35124 - protein, 41 aa, Artificial Sequence
  Non-cyclic GFR-binding peptide
  MOD_RES (2), (36), (37): Xaa is C or S
  MOD_RES (14), (15), (16), (17), (18): Xaa is A or G
  MOD_RES (19), (20), (21), (22): Xaa is A or G or is absent
GXRDVVMGSMEGIXXXXXXXXXMIQMTINSMKTPTXXPGAS

SEQ ID NO: 35125 - protein, 32 aa, Artificial Sequence
  Non-cyclic GFR-binding peptide
  MOD_RES (11), (12), (13), (14), (15): Xaa is A or G
  MOD_RES (16), (17), (18), (19): Xaa is A or G or is absent
EVVMDSMEGIXXXXXXXXXMIQITINSLRTPV

SEQ ID NO: 35126 - protein, 37 aa, Artificial Sequence
  Non-cyclic GFR-binding peptide
  MOD_RES (1), (3), (36), (37): Xaa is C or S
  MOD_RES (14), (15), (16), (17), (18): Xaa is A or G
  MOD_RES (19), (20), (21), (22): Xaa is A or G or is absent
XKXSKVIMSMEGLXXXXXXXXXMIQITINSLDQSVXX

SEQ ID NO: 35127 - protein, 36 aa, Artificial Sequence
  Non-cyclic GFR-binding peptide
  MOD_RES (2), (35), (36): Xaa is C or S
  MOD_RES (13), (14), (15), (16), (17): Xaa is A or G
  MOD_RES (18), (19), (20), (21): Xaa is A or G or is absent
GXEEVIMSMEGLXXXXXXXXXMIQMTINSTKVPAXX

SEQ ID NO: 35128 - protein, 35 aa, Artificial Sequence
  Non-cyclic GFR-binding peptide
  MOD_RES (1), (35): Xaa is C or S
  MOD_RES (13), (14), (15), (16), (17): Xaa is A or G
  MOD_RES (18), (19), (20), (21): Xaa is A or G or is absent
XAEVVMDSMEGLXXXXXXXXXMIQITINSLRAPVX

SEQ ID NO: 35129 - protein, 33 aa, Artificial Sequence
  Non-cyclic GFR-binding peptide
  MOD_RES (33), (33): Xaa is C or S
  MOD_RES (11), (12), (13), (14), (15): Xaa is A or G
  MOD_RES (16), (17), (18), (19): Xaa is A or G or is absent
SKVVMSMEGLXXXXXXXXXMIQITINSLDQPVX

SEQ ID NO: 35130 - protein, 36 aa, Artificial Sequence
  Non-cyclic GFR-binding peptide
  MOD_RES (2), (36): Xaa is C or S
  MOD_RES (14), (15), (16), (17), (18): Xaa is A or G
  MOD_RES (19), (20), (21), (22): Xaa is A or G or is absent
GXSEVVMDSMEGIXXXXXXXXXMIQITINSLRTPVX

SEQ ID NO: 35131 - protein, 36 aa, Artificial Sequence
  Non-cyclic GFR-binding peptide
  MOD_RES (2), (34), (35): Xaa is C or S
GXRDVVMGSMEGLIIQQKDNMIQMTINSMKTPTXXP

SEQ ID NO: 35132 - protein, 39 aa, Artificial Sequence
  Non-cyclic GFR-binding peptide
  MOD_RES (34), (35): Xaa is C or S
  MOD_RES (12), (13), (14), (15), (16): Xaa is A or G
  MOD_RES (17), (18), (19), (20): Xaa is A or G or is absent
SEVVMDSMEGLXXXXXXXXXMIQITINSLRTPVXXTPPT

SEQ ID NO: 35133 - protein, 36 aa, Artificial Sequence
  Non-cyclic GFR-binding peptide
  MOD_RES (2), (4): Xaa is C or S
  MOD_RES (15), (16), (17), (18), (19): Xaa is A or G
  MOD_RES (20), (21), (22), (23): Xaa is A or G or is absent
LXGXEEVIMSMEGLXXXXXXXXXMIQMTINSTKVPA

SEQ ID NO: 35134 - protein, 39 aa, Artificial Sequence
  Non-cyclic GFR-binding peptide
  MOD_RES (2), (34), (35): Xaa is C or S
GXSEVVMDSMEGIVVNNASDMIQITINSLRTPVXXTPPT

SEQ ID NO: 35135 - protein, 35 aa, Artificial Sequence
  Non-cyclic GFR-binding peptide
  MOD_RES (1), (3), (35): Xaa is C or S
XGXAEVVMDSMEGLVVNNAADMIQITINSLRAPVX

SEQ ID NO: 35136 - protein, 39 aa, Artificial Sequence
  Non-cyclic GFR-binding peptide
  MOD_RES (2), (34), (35): Xaa is C or S
GXRDVVMGSMEGLIIQQKDNMIQMTINSMKTPTXXPGAS

SEQ ID NO: 35137 - protein, 33 aa, Artificial Sequence
  Non-cyclic GFR-binding peptide
  MOD_RES (31), (32): Xaa is C or S
EVVMDSMEGIVVNNAADMIQITINSLRAPVXXS

SEQ ID NO: 35138 - protein, 40 aa, Artificial Sequence
  Non-cyclic GFR-binding peptide
  MOD_RES (1), (3), (35), (36): Xaa is C or S
XGXAEVVMDSMEGIVVNNAADMIQITINSLRAPVXXSAPA

SEQ ID NO: 35139 - protein, 30 aa, Artificial Sequence
  Non-cyclic GFR-binding peptide
SKVVMSMEGLVKPTRGVMIQITINSLDQPV

SEQ ID NO: 35140 - protein, 34 aa, Artificial Sequence
  Non-cyclic GFR-binding peptide
  MOD_RES (2), (2): Xaa is C or S
  MOD_RES (13), (14), (15), (16), (17): Xaa is A or G
  MOD_RES (18), (19), (20), (21): Xaa is A or G or is absent
KXSKVIMSMEGLXXXXXXXXXMIQITINSLDQSV

SEQ ID NO: 35141 - protein, 35 aa, Artificial Sequence
  Non-cyclic GFR-binding peptide
  MOD_RES (2), (34), (35): Xaa is C or S
GXSEVVMDSMEGLVVNNASDMIQITINSLRTPVXX

SEQ ID NO: 35142 - protein, 38 aa, Artificial Sequence
  Non-cyclic GFR-binding peptide
  MOD_RES (2), (4), (37), (38): Xaa is C or S
  MOD_RES (15), (16), (17), (18), (19): Xaa is A or G
  MOD_RES (20), (21), (22), (23): Xaa is A or G or is absent
SXKXSKVVMSMEGLXXXXXXXXXMIQITINSLDQPVXX

SEQ ID NO: 35143 - protein, 35 aa, Artificial Sequence
  Non-cyclic GFR-binding peptide
  MOD_RES (1), (35): Xaa is C or S
  MOD_RES (13), (14), (15), (16), (17): Xaa is A or G
  MOD_RES (18), (19), (20), (21): Xaa is A or G or is absent
XRDVVMGSMEGIXXXXXXXXXMIQMTINSMKTPTX

SEQ ID NO: 35144 - protein, 37 aa, Artificial Sequence
  Non-cyclic GFR-binding peptide
  MOD_RES (1), (34), (35): Xaa is C or S
  MOD_RES (12), (13), (14), (15), (16): Xaa is A or G
  MOD_RES (17), (18), (19), (20): Xaa is A or G or is absent
XSKVVMSMEGLXXXXXXXXXMIQITINSLDQPVXXPS

SEQ ID NO: 35145 - protein, 35 aa, Artificial Sequence
  Non-cyclic GFR-binding peptide
  MOD_RES (33), (34): Xaa is C or S
  MOD_RES (11), (12), (13), (14), (15): Xaa is A or G
  MOD_RES (16), (17), (18), (19): Xaa is A or G or is absent
EVVMDSMEGIXXXXXXXXXMIQITINSLRTPVXXT

SEQ ID NO: 35146 - protein, 32 aa, Artificial Sequence
  Non-cyclic GFR-binding peptide
  MOD_RES (31), (32): Xaa is C or S
SRVIMSMEGLVKPKRGVMIQITINSLAQPVXX

SEQ ID NO: 35147 - protein, 33 aa, Artificial Sequence
  Non-cyclic GFR-binding peptide
  MOD_RES (12), (13), (14), (15), (16): Xaa is A or G
  MOD_RES (17), (18), (19), (20): Xaa is A or G or is absent
SEVVMDSMEGLXXXXXXXXXMIQITINSLRTPV

SEQ ID NO: 35148 - protein, 38 aa, Artificial Sequence
  Non-cyclic GFR-binding peptide
  MOD_RES (2), (4), (36), (37): Xaa is C or S
RXGXAEVVMDSMEGIVVNNAADMIQITINSLRAPVXXS

SEQ ID NO: 35149 - protein, 38 aa, Artificial Sequence
  Non-cyclic GFR-binding peptide
  MOD_RES (32), (33): Xaa is C or S
SEVVMDSMEGLVVNNASDMIQITINSLRTPVXXTPPTS

SEQ ID NO: 35150 - protein, 41 aa, Artificial Sequence
  Non-cyclic GFR-binding peptide
  MOD_RES (1), (3), (35), (36): Xaa is C or S
XGXSRVVMNSMEGLIVNSSDDMIQVTINSLKTPAXXPKPVH

SEQ ID NO: 35151 - protein, 38 aa, Artificial Sequence
  Non-cyclic GFR-binding peptide
  MOD_RES (33), (34): Xaa is C or S
  MOD_RES (11), (12), (13), (14), (15): Xaa is A or G
  MOD_RES (16), (17), (18), (19): Xaa is A or G or is absent
RVVMNSMEGLXXXXXXXXXMIQVTINSLKTPAXXPKPV

SEQ ID NO: 35152 - protein, 34 aa, Artificial Sequence
  Non-cyclic GFR-binding peptide
  MOD_RES (1), (3), (34): Xaa is C or S
XGXEEVIMSMEGLLLVRGNDMIQMTINSTKVPAX

SEQ ID NO: 35153 - protein, 40 aa, Artificial Sequence
  Non-cyclic GFR-binding peptide
  MOD_RES (1), (3), (36), (37): Xaa is C or S
  MOD_RES (14), (15), (16), (17), (18): Xaa is A or G
  MOD_RES (19), (20), (21), (22): Xaa is A or G or is absent
XGXEEVIMSMEGIXXXXXXXXXMIQMTINSTKVPAXXTSP

SEQ ID NO: 35154 - protein, 37 aa, Artificial Sequence
  Non-cyclic GFR-binding peptide
  MOD_RES (2), (36), (37): Xaa is C or S
  MOD_RES (14), (15), (16), (17), (18): Xaa is A or G
  MOD_RES (19), (20), (21), (22): Xaa is A or G or is absent
GXAEVVMDSMEGIXXXXXXXXXMIQITINSLRAPVXX

SEQ ID NO: 35155 - protein, 34 aa, Artificial Sequence
  Non-cyclic GFR-binding peptide
  MOD_RES (1), (1): Xaa is C or S
  MOD_RES (13), (14), (15), (16), (17): Xaa is A or G
  MOD_RES (18), (19), (20), (21): Xaa is A or G or is absent
XSRVVMNSMEGLXXXXXXXXXMIQVTINSLKTPA

SEQ ID NO: 35156 - protein, 34 aa, Artificial Sequence
  Non-cyclic GFR-binding peptide
  MOD_RES (1), (3): Xaa is C or S
XGXSEVVMDSMEGLVVNNASDMIQITINSLRTPV

SEQ ID NO: 35157 - protein, 37 aa, Artificial Sequence
  Non-cyclic GFR-binding peptide
  MOD_RES (2), (35), (36): Xaa is C or S
  MOD_RES (13), (14), (15), (16), (17): Xaa is A or G
  MOD_RES (18), (19), (20), (21): Xaa is A or G or is absent
KXSRVIMSMEGLXXXXXXXXXMIQITINSLAQPVXXP

SEQ ID NO: 35158 - protein, 32 aa, Artificial Sequence
  Non-cyclic GFR-binding peptide
  MOD_RES (1), (1): Xaa is C or S
XSRVVMNSMEGLIVNSSDDMIQVTINSLKTPA

SEQ ID NO: 35159 - protein, 36 aa, Artificial Sequence
  Non-cyclic GFR-binding peptide
  MOD_RES (1), (33), (34): Xaa is C or S
XSEVVMDSMEGLVVNNASDMIQITINSLRTPVXXTP

SEQ ID NO: 35160 - protein, 38 aa, Artificial Sequence
  Non-cyclic GFR-binding peptide
  MOD_RES (1), (3), (35), (36): Xaa is C or S
XGXRDVVMGSMEGLIIQQKDNMIQMTINSMKTPTXXPG

SEQ ID NO: 35161 - protein, 40 aa, Artificial Sequence
  Non-cyclic GFR-binding peptide
  MOD_RES (1), (3), (35), (36): Xaa is C or S
XGXRDVVMGSMEGLIIQQKDNMIQMTINSMKTPTXXPGAS

SEQ ID NO: 35162 - protein, 38 aa, Artificial Sequence
  Non-cyclic GFR-binding peptide
  MOD_RES (2), (34), (35): Xaa is C or S
GXSEVVMDSMEGIVVNNASDMIQITINSLRTPVXXTPP

SEQ ID NO: 35163 - protein, 35 aa, Artificial Sequence
  Non-cyclic GFR-binding peptide
  MOD_RES (1), (3), (35): Xaa is C or S
XGXSRVVMNSMEGLIVNSSDDMIQVTINSLKTPAX

SEQ ID NO: 35164 - protein, 36 aa, Artificial Sequence
  Non-cyclic GFR-binding peptide
  MOD_RES (2), (4), (36): Xaa is C or S
RXGXSEVVMDSMEGLVVNNASDMIQITINSLRTPVX

SEQ ID NO: 35165 - protein, 35 aa, Artificial Sequence
  Non-cyclic GFR-binding peptide
  MOD_RES (33), (34): Xaa is C or S
  MOD_RES (11), (12), (13), (14), (15): Xaa is A or G
  MOD_RES (16), (17), (18), (19): Xaa is A or G or is absent
EVVMDSMEGIXXXXXXXXXMIQITINSLRAPVXXS

SEQ ID NO: 35166 - protein, 41 aa, Artificial Sequence
  Non-cyclic GFR-binding peptide
  MOD_RES (1), (3), (36), (37): Xaa is C or S
  MOD_RES (14), (15), (16), (17), (18): Xaa is A or G
  MOD_RES (19), (20), (21), (22): Xaa is A or G or is absent
XKXSRVIMSMEGLXXXXXXXXXMIQITINSLAQPVXXPAAS

SEQ ID NO: 35167 - protein, 35 aa, Artificial Sequence
  Non-cyclic GFR-binding peptide
  MOD_RES (2), (4): Xaa is C or S
RXGXAEVVMDSMEGIVVNNAADMIQITINSLRAPV

SEQ ID NO: 35168 - protein, 42 aa, Artificial Sequence
  Non-cyclic GFR-binding peptide
  MOD_RES (2), (36), (37): Xaa is C or S
  MOD_RES (14), (15), (16), (17), (18): Xaa is A or G
  MOD_RES (19), (20), (21), (22): Xaa is A or G or is absent
GXAEVVMDSMEGIXXXXXXXXXMIQITINSLRAPVXXSAPAA

SEQ ID NO: 35169 - protein, 36 aa, Artificial Sequence
  Non-cyclic GFR-binding peptide
  MOD_RES (33), (34): Xaa is C or S
  MOD_RES (11), (12), (13), (14), (15): Xaa is A or G
  MOD_RES (16), (17), (18), (19): Xaa is A or G or is absent
SKVIMSMEGLXXXXXXXXXMIQITINSLDQSVXXPS

SEQ ID NO: 35170 - protein, 41 aa, Artificial Sequence
  Non-cyclic GFR-binding peptide
  MOD_RES (1), (3), (35), (36): Xaa is C or S
XGXAEVVMDSMEGIVVNNAADMIQITINSLRAPVXXSAPAA

SEQ ID NO: 35171 - protein, 37 aa, Artificial Sequence
  Non-cyclic GFR-binding peptide
  MOD_RES (2), (4), (37): Xaa is C or S
  MOD_RES (15), (16), (17), (18), (19): Xaa is A or G
  MOD_RES (20), (21), (22), (23): Xaa is A or G or is absent
SXKXSKVIMSMEGLXXXXXXXXXMIQITINSLDQSVX

SEQ ID NO: 35172 - protein, 40 aa, Artificial Sequence
  Non-cyclic GFR-binding peptide
  MOD_RES (2), (35), (36): Xaa is C or S
  MOD_RES (13), (14), (15), (16), (17): Xaa is A or G
  MOD_RES (18), (19), (20), (21): Xaa is A or G or is absent
GXEEVIMSMEGIXXXXXXXXXMIQMTINSTKVPAXXTSPV

SEQ ID NO: 35173 - protein, 39 aa, Artificial Sequence
  Non-cyclic GFR-binding peptide
  MOD_RES (1), (33), (34): Xaa is C or S
XSEVVMDSMEGIVVNNASDMIQITINSLRTPVXXTPPTS

SEQ ID NO: 35174 - protein, 36 aa, Artificial Sequence
  Non-cyclic GFR-binding peptide
  MOD_RES (1), (35), (36): Xaa is C or S
  MOD_RES (13), (14), (15), (16), (17): Xaa is A or G
  MOD_RES (18), (19), (20), (21): Xaa is A or G or is absent
XSEVVMDSMEGLXXXXXXXXXMIQITINSLRTPVXX

SEQ ID NO: 35175 - protein, 36 aa, Artificial Sequence
  Non-cyclic GFR-binding peptide
  MOD_RES (1), (33), (34): Xaa is C or S
XRDVVMGSMEGIIIQQKDNMIQMTINSMKTPTXXPG

SEQ ID NO: 35176 - protein, 37 aa, Artificial Sequence
  Non-cyclic GFR-binding peptide
  MOD_RES (1), (32), (33): Xaa is C or S
XEEVIMSMEGILLVRGNDMIQMTINSTKVPAXXTSPV

SEQ ID NO: 35177 - protein, 35 aa, Artificial Sequence
  Non-cyclic GFR-binding peptide
  MOD_RES (2), (2): Xaa is C or S
  MOD_RES (14), (15), (16), (17), (18): Xaa is A or G
  MOD_RES (19), (20), (21), (22): Xaa is A or G or is absent
GXSRVVMNSMEGLXXXXXXXXXMIQVTINSLKTPA

SEQ ID NO: 35178 - protein, 41 aa, Artificial Sequence
  Non-cyclic GFR-binding peptide
  MOD_RES (1), (3), (36), (37): Xaa is C or S
  MOD_RES (14), (15), (16), (17), (18): Xaa is A or G
  MOD_RES (19), (20), (21), (22): Xaa is A or G or is absent
XKXSKVIMSMEGLXXXXXXXXXMIQITINSLDQSVXXPSAS

SEQ ID NO: 35179 - protein, 35 aa, Artificial Sequence
  Non-cyclic GFR-binding peptide
  MOD_RES (32), (33): Xaa is C or S
SEVVMDSMEGLVVNNASDMIQITINSLRTPVXXTP

SEQ ID NO: 35180 - protein, 37 aa, Artificial Sequence
  Non-cyclic GFR-binding peptide
  MOD_RES (31), (32): Xaa is C or S
RVVMNSMEGLIVNSSDDMIQVTINSLKTPAXXPKPVH

SEQ ID NO: 35181 - protein, 39 aa, Artificial Sequence
  Non-cyclic GFR-binding peptide
  MOD_RES (2), (4), (38), (39): Xaa is C or S
  MOD_RES (16), (17), (18), (19), (20): Xaa is A or G
  MOD_RES (21), (22), (23), (24): Xaa is A or G or is absent
HXGXSRVVMNSMEGLXXXXXXXXXMIQVTINSLKTPAXX

SEQ ID NO: 35182 - protein, 35 aa, Artificial Sequence
  Non-cyclic GFR-binding peptide
  MOD_RES (1), (3): Xaa is C or S
  MOD_RES (14), (15), (16), (17), (18): Xaa is A or G
  MOD_RES (19), (20), (21), (22): Xaa is A or G or is absent
XKXSKVIMSMEGLXXXXXXXXXMIQITINSLDQSV

SEQ ID NO: 35183 - protein, 34 aa, Artificial Sequence
  Non-cyclic GFR-binding peptide
  MOD_RES (34), (34): Xaa is C or S
  MOD_RES (12), (13), (14), (15), (16): Xaa is A or G
  MOD_RES (17), (18), (19), (20): Xaa is A or G or is absent
RDVVMGSMEGIXXXXXXXXXMIQMTINSMKTPTX

SEQ ID NO: 35184 - protein, 33 aa, Artificial Sequence
  Non-cyclic GFR-binding peptide
  MOD_RES (33), (33): Xaa is C or S
  MOD_RES (11), (12), (13), (14), (15): Xaa is A or G
  MOD_RES (16), (17), (18), (19): Xaa is A or G or is absent
SKVIMSMEGLXXXXXXXXXMIQITINSLDQSVX

SEQ ID NO: 35185 - protein, 37 aa, Artificial Sequence
  Non-cyclic GFR-binding peptide
  MOD_RES (1), (34), (35): Xaa is C or S
  MOD_RES (12), (13), (14), (15), (16): Xaa is A or G
  MOD_RES (17), (18), (19), (20): Xaa is A or G or is absent
XSKVIMSMEGLXXXXXXXXXMIQITINSLDQSVXXPS

SEQ ID NO: 35186 - protein, 39 aa, Artificial Sequence
  Non-cyclic GFR-binding peptide
  MOD_RES (2), (4), (36), (37): Xaa is C or S
SXGXRDVVMGSMEGIIIQQKDNMIQMTINSMKTPTXXPG

SEQ ID NO: 35187 - protein, 40 aa, Artificial Sequence
  Non-cyclic GFR-binding peptide
  MOD_RES (2), (35), (36): Xaa is C or S
  MOD_RES (13), (14), (15), (16), (17): Xaa is A or G
  MOD_RES (18), (19), (20), (21): Xaa is A or G or is absent
KXSKVVMSMEGLXXXXXXXXXMIQITINSLDQPVXXPSAS

SEQ ID NO: 35188 - protein, 42 aa, Artificial Sequence
  Non-cyclic GFR-binding peptide
  MOD_RES (1), (3), (37), (38): Xaa is C or S
  MOD_RES (15), (16), (17), (18), (19): Xaa is A or G
  MOD_RES (20), (21), (22), (23): Xaa is A or G or is absent
XGXRDVVMGSMEGLXXXXXXXXXMIQMTINSMKTPTXXPGAS

SEQ ID NO: 35189 - protein, 38 aa, Artificial Sequence
  Non-cyclic GFR-binding peptide
  MOD_RES (33), (34): Xaa is C or S
  MOD_RES (11), (12), (13), (14), (15): Xaa is A or G
  MOD_RES (16), (17), (18), (19): Xaa is A or G or is absent
SRVIMSMEGLXXXXXXXXXMIQITINSLAQPVXXPAAS

SEQ ID NO: 35190 - protein, 40 aa, Artificial Sequence
  Non-cyclic GFR-binding peptide
  MOD_RES (2), (34), (35): Xaa is C or S
GXAEVVMDSMEGLVVNNAADMIQITINSLRAPVXXSAPAA

SEQ ID NO: 35191 - protein, 39 aa, Artificial Sequence
  Non-cyclic GFR-binding peptide
  MOD_RES (1), (33), (34): Xaa is C or S
XAEVVMDSMEGLVVNNAADMIQITINSLRAPVXXSAPAA

SEQ ID NO: 35192 - protein, 38 aa, Artificial Sequence
  Non-cyclic GFR-binding peptide
  MOD_RES (1), (35), (36): Xaa is C or S
  MOD_RES (13), (14), (15), (16), (17): Xaa is A or G
  MOD_RES (18), (19), (20), (21): Xaa is A or G or is absent
XAEVVMDSMEGLXXXXXXXXXMIQITINSLRAPVXXSA

SEQ ID NO: 35193 - protein, 38 aa, Artificial Sequence
  Non-cyclic GFR-binding peptide
  MOD_RES (1), (3), (34), (35): Xaa is C or S
XKXSKVIMSMEGLIKPTKGIMIQITINSLDQSVXXPSA

SEQ ID NO: 35194 - protein, 36 aa, Artificial Sequence
  Non-cyclic GFR-binding peptide
  MOD_RES (1), (3), (35), (36): Xaa is C or S
XGXAEVVMDSMEGIVVNNAADMIQITINSLRAPVXX

SEQ ID NO: 35195 - protein, 36 aa, Artificial Sequence
  Non-cyclic GFR-binding peptide
  MOD_RES (1), (33), (34): Xaa is C or S
XAEVVMDSMEGLVVNNAADMIQITINSLRAPVXXSA

SEQ ID NO: 35196 - protein, 35 aa, Artificial Sequence
  Non-cyclic GFR-binding peptide
  MOD_RES (31), (32): Xaa is C or S
SKVIMSMEGLIKPTKGIMIQITINSLDQSVXXPSA

SEQ ID NO: 35197 - protein, 37 aa, Artificial Sequence
  Non-cyclic GFR-binding peptide
  MOD_RES (1), (3), (35), (36): Xaa is C or S
XGXAEVVMDSMEGLVVNNAADMIQITINSLRAPVXXS

SEQ ID NO: 35198 - protein, 42 aa, Artificial Sequence
  Non-cyclic GFR-binding peptide
  MOD_RES (2), (4), (38), (39): Xaa is C or S
  MOD_RES (16), (17), (18), (19), (20): Xaa is A or G
  MOD_RES (21), (22), (23), (24): Xaa is A or G or is absent
RXGXSEVVMDSMEGLXXXXXXXXXMIQITINSLRTPVXXTPP

SEQ ID NO: 35199 - protein, 35 aa, Artificial Sequence
  Non-cyclic GFR-binding peptide
  MOD_RES (31), (32): Xaa is C or S
EVVMDSMEGIVVNNAADMIQITINSLRAPVXXSAP

SEQ ID NO: 35200 - protein, 38 aa, Artificial Sequence
  Non-cyclic GFR-binding peptide
  MOD_RES (2), (4), (36), (37): Xaa is C or S
HXGXSRVVMNSMEGLIVNSSDDMIQVTINSLKTPAXXP

SEQ ID NO: 35201 - protein, 38 aa, Artificial Sequence
  Non-cyclic GFR-binding peptide
  MOD_RES (1), (32), (33): Xaa is C or S
XSKVVMSMEGLVKPTRGVMIQITINSLDQPVXXPSASA

SEQ ID NO: 35202 - protein, 36 aa, Artificial Sequence
  Non-cyclic GFR-binding peptide
  MOD_RES (33), (34): Xaa is C or S
  MOD_RES (11), (12), (13), (14), (15): Xaa is A or G
  MOD_RES (16), (17), (18), (19): Xaa is A or G or is absent
EVVMDSMEGLXXXXXXXXXMIQITINSLRTPVXXTP

SEQ ID NO: 35203 - protein, 44 aa, Artificial Sequence
  Non-cyclic GFR-binding peptide
  MOD_RES (2), (4), (38), (39): Xaa is C or S
  MOD_RES (16), (17), (18), (19), (20): Xaa is A or G
  MOD_RES (21), (22), (23), (24): Xaa is A or G or is absent
HXGXSRVVMNSMEGIXXXXXXXXXMIQVTINSLKTPAXXPKPVH

SEQ ID NO: 35204 - protein, 40 aa, Artificial Sequence
  Non-cyclic GFR-binding peptide
  MOD_RES (2), (36), (37): Xaa is C or S
  MOD_RES (14), (15), (16), (17), (18): Xaa is A or G
  MOD_RES (19), (20), (21), (22): Xaa is A or G or is absent
GXAEVVMDSMEGIXXXXXXXXXMIQITINSLRAPVXXSAP

SEQ ID NO: 35205 - protein, 41 aa, Artificial Sequence
  Non-cyclic GFR-binding peptide
  MOD_RES (1), (3), (35), (36): Xaa is C or S
XGXSEVVMDSMEGIVVNNASDMIQITINSLRTPVXXTPPTS

SEQ ID NO: 35206 - protein, 34 aa, Artificial Sequence
  Non-cyclic GFR-binding peptide
  MOD_RES (1), (3), (34): Xaa is C or S
XKXSKVIMSMEGLIKPTKGIMIQITINSLDQSVX

SEQ ID NO: 35207 - protein, 36 aa, Artificial Sequence
  Non-cyclic GFR-binding peptide
  MOD_RES (33), (34): Xaa is C or S
  MOD_RES (11), (12), (13), (14), (15): Xaa is A or G
  MOD_RES (16), (17), (18), (19): Xaa is A or G or is absent
EEVIMSMEGIXXXXXXXXXMIQMTINSTKVPAXXTS

SEQ ID NO: 35208 - protein, 34 aa, Artificial Sequence
  Non-cyclic GFR-binding peptide
  MOD_RES (2), (4): Xaa is C or S
LXGXEEVIMSMEGLLLVRGNDMIQMTINSTKVPA

SEQ ID NO: 35209 - protein, 42 aa, Artificial Sequence
  Non-cyclic GFR-binding peptide
  MOD_RES (1), (3), (37), (38): Xaa is C or S
  MOD_RES (15), (16), (17), (18), (19): Xaa is A or G
  MOD_RES (20), (21), (22), (23): Xaa is A or G or is absent
XGXSEVVMDSMEGLXXXXXXXXXMIQITINSLRTPVXXTPPT

SEQ ID NO: 35210 - protein, 37 aa, Artificial Sequence
  Non-cyclic GFR-binding peptide
  MOD_RES (32), (33): Xaa is C or S
RDVVMGSMEGLIIQQKDNMIQMTINSMKTPTXXPGAS

SEQ ID NO: 35211 - protein, 38 aa, Artificial Sequence
  Non-cyclic GFR-binding peptide
  MOD_RES (2), (36), (37): Xaa is C or S
  MOD_RES (14), (15), (16), (17), (18): Xaa is A or G
  MOD_RES (19), (20), (21), (22): Xaa is A or G or is absent
GXAEVVMDSMEGLXXXXXXXXXMIQITINSLRAPVXXS

SEQ ID NO: 35212 - protein, 42 aa, Artificial Sequence
  Non-cyclic GFR-binding peptide
  MOD_RES (2), (4), (36), (37): Xaa is C or S
SXGXRDVVMGSMEGLIIQQKDNMIQMTINSMKTPTXXPGASG

SEQ ID NO: 35213 - protein, 38 aa, Artificial Sequence
  Non-cyclic GFR-binding peptide
  MOD_RES (1), (35), (36): Xaa is C or S
  MOD_RES (13), (14), (15), (16), (17): Xaa is A or G
  MOD_RES (18), (19), (20), (21): Xaa is A or G or is absent
XSRVVMNSMEGLXXXXXXXXXMIQVTINSLKTPAXXPK

SEQ ID NO: 35214 - protein, 32 aa, Artificial Sequence
  Non-cyclic GFR-binding peptide
  MOD_RES (31), (32): Xaa is C or S
RVVMNSMEGLIVNSSDDMIQVTINSLKTPAXX

SEQ ID NO: 35215 - protein, 36 aa, Artificial Sequence
  Non-cyclic GFR-binding peptide
  MOD_RES (34), (35): Xaa is C or S
  MOD_RES (12), (13), (14), (15), (16): Xaa is A or G
  MOD_RES (17), (18), (19), (20): Xaa is A or G or is absent
SEVVMDSMEGIXXXXXXXXXMIQITINSLRTPVXXT

SEQ ID NO: 35216 - protein, 37 aa, Artificial Sequence
  Non-cyclic GFR-binding peptide
  MOD_RES (1), (3), (35), (36): Xaa is C or S
XGXSRVVMNSMEGLIVNSSDDMIQVTINSLKTPAXXP

SEQ ID NO: 35217 - protein, 37 aa, Artificial Sequence
  Non-cyclic GFR-binding peptide
  MOD_RES (1), (34), (35): Xaa is C or S
  MOD_RES (12), (13), (14), (15), (16): Xaa is A or G
  MOD_RES (17), (18), (19), (20): Xaa is A or G or is absent
XEEVIMSMEGIXXXXXXXXXMIQMTINSTKVPAXXTS

SEQ ID NO: 35218 - protein, 37 aa, Artificial Sequence
  Non-cyclic GFR-binding peptide
  MOD_RES (1), (32), (33): Xaa is C or S
XSKVIMSMEGLIKPTKGIMIQITINSLDQSVXXPSAS

SEQ ID NO: 35219 - protein, 39 aa, Artificial Sequence
  Non-cyclic GFR-binding peptide
  MOD_RES (1), (35), (36): Xaa is C or S
  MOD_RES (13), (14), (15), (16), (17): Xaa is A or G
  MOD_RES (18), (19), (20), (21): Xaa is A or G or is absent
XRDVVMGSMEGLXXXXXXXXXMIQMTINSMKTPTXXPGA

SEQ ID NO: 35220 - protein, 41 aa, Artificial Sequence
  Non-cyclic GFR-binding peptide
  MOD_RES (2), (4), (36), (37): Xaa is C or S
RXGXAEVVMDSMEGIVVNNAADMIQITINSLRAPVXXSAPA

SEQ ID NO: 35221 - protein, 37 aa, Artificial Sequence
  Non-cyclic GFR-binding peptide
  MOD_RES (1), (35), (36): Xaa is C or S
  MOD_RES (13), (14), (15), (16), (17): Xaa is A or G
  MOD_RES (18), (19), (20), (21): Xaa is A or G or is absent
XAEVVMDSMEGIXXXXXXXXXMIQITINSLRAPVXXS

SEQ ID NO: 35222 - protein, 36 aa, Artificial Sequence
  Non-cyclic GFR-binding peptide
  MOD_RES (1), (3): Xaa is C or S
  MOD_RES (15), (16), (17), (18), (19): Xaa is A or G
  MOD_RES (20), (21), (22), (23): Xaa is A or G or is absent
XGXSEVVMDSMEGLXXXXXXXXXMIQITINSLRTPV

SEQ ID NO: 35223 - protein, 39 aa, Artificial Sequence
  Non-cyclic GFR-binding peptide
  MOD_RES (1), (3), (35), (36): Xaa is C or S
XGXAEVVMDSMEGIVVNNAADMIQITINSLRAPVXXSAP

SEQ ID NO: 35224 - protein, 44 aa, Artificial Sequence
  Non-cyclic GFR-binding peptide
  MOD_RES (2), (4), (38), (39): Xaa is C or S
  MOD_RES (16), (17), (18), (19), (20): Xaa is A or G
  MOD_RES (21), (22), (23), (24): Xaa is A or G or is absent
SXGXRDVVMGSMEGIXXXXXXXXXMIQMTINSMKTPTXXPGASG

SEQ ID NO: 35225 - protein, 39 aa, Artificial Sequence
  Non-cyclic GFR-binding peptide
  MOD_RES (1), (3), (36), (37): Xaa is C or S
  MOD_RES (14), (15), (16), (17), (18): Xaa is A or G
  MOD_RES (19), (20), (21), (22): Xaa is A or G or is absent
XKXSRVIMSMEGLXXXXXXXXXMIQITINSLAQPVXXPA

SEQ ID NO: 35226 - protein, 34 aa, Artificial Sequence
  Non-cyclic GFR-binding peptide
  MOD_RES (1), (33), (34): Xaa is C or S
XSEVVMDSMEGIVVNNASDMIQITINSLRTPVXX

SEQ ID NO: 35227 - protein, 35 aa, Artificial Sequence
  Non-cyclic GFR-binding peptide
  MOD_RES (1), (34), (35): Xaa is C or S
  MOD_RES (12), (13), (14), (15), (16): Xaa is A or G
  MOD_RES (17), (18), (19), (20): Xaa is A or G or is absent
XSRVIMSMEGLXXXXXXXXXMIQITINSLAQPVXX

SEQ ID NO: 35228 - protein, 40 aa, Artificial Sequence
  Non-cyclic GFR-binding peptide
  MOD_RES (2), (4), (36), (37): Xaa is C or S
RXGXAEVVMDSMEGIVVNNAADMIQITINSLRAPVXXSAP

SEQ ID NO: 35229 - protein, 32 aa, Artificial Sequence
  Non-cyclic GFR-binding peptide
  MOD_RES (32), (32): Xaa is C or S
SEVVMDSMEGIVVNNASDMIQITINSLRTPVX

SEQ ID NO: 35230 - protein, 37 aa, Artificial Sequence
  Non-cyclic GFR-binding peptide
  MOD_RES (1), (33), (34): Xaa is C or S
XAEVVMDSMEGLVVNNAADMIQITINSLRAPVXXSAP

SEQ ID NO: 35231 - protein, 38 aa, Artificial Sequence
  Non-cyclic GFR-binding peptide
  MOD_RES (1), (3), (37), (38): Xaa is C or S
  MOD_RES (15), (16), (17), (18), (19): Xaa is A or G
  MOD_RES (20), (21), (22), (23): Xaa is A or G or is absent
XGXSRVVMNSMEGLXXXXXXXXXMIQVTINSLKTPAXX

SEQ ID NO: 35232 - protein, 41 aa, Artificial Sequence
  Non-cyclic GFR-binding peptide
  MOD_RES (2), (4), (35), (36): Xaa is C or S
LXGXEEVIMSMEGILLVRGNDMIQMTINSTKVPAXXTSPVR

SEQ ID NO: 35233 - protein, 34 aa, Artificial Sequence
  Non-cyclic GFR-binding peptide
  MOD_RES (2), (2): Xaa is C or S
  MOD_RES (13), (14), (15), (16), (17): Xaa is A or G
  MOD_RES (18), (19), (20), (21): Xaa is A or G or is absent
KXSKVVMSMEGLXXXXXXXXXMIQITINSLDQPV

SEQ ID NO: 35234 - protein, 39 aa, Artificial Sequence
  Non-cyclic GFR-binding peptide
  MOD_RES (2), (4), (38), (39): Xaa is C or S
  MOD_RES (16), (17), (18), (19), (20): Xaa is A or G
  MOD_RES (21), (22), (23), (24): Xaa is A or G or is absent
RXGXSEVVMDSMEGLXXXXXXXXXMIQITINSLRTPVXX

SEQ ID NO: 35235 - protein, 38 aa, Artificial Sequence
  Non-cyclic GFR-binding peptide
  MOD_RES (2), (4), (38): Xaa is C or S
  MOD_RES (16), (17), (18), (19), (20): Xaa is A or G
  MOD_RES (21), (22), (23), (24): Xaa is A or G or is absent
SXGXRDVVMGSMEGIXXXXXXXXXMIQMTINSMKTPTX

SEQ ID NO: 35236 - protein, 37 aa, Artificial Sequence
  Non-cyclic GFR-binding peptide
  MOD_RES (1), (3), (35), (36): Xaa is C or S
XGXRDVVMGSMEGLIIQQKDNMIQMTINSMKTPTXXP

SEQ ID NO: 35237 - protein, 35 aa, Artificial Sequence
  Non-cyclic GFR-binding peptide
  MOD_RES (2), (34), (35): Xaa is C or S
GXAEVVMDSMEGIVVNNAADMIQITINSLRAPVXX

SEQ ID NO: 35238 - protein, 38 aa, Artificial Sequence
  Non-cyclic GFR-binding peptide
  MOD_RES (2), (4), (38): Xaa is C or S
  MOD_RES (16), (17), (18), (19), (20): Xaa is A or G
  MOD_RES (21), (22), (23), (24): Xaa is A or G or is absent
RXGXAEVVMDSMEGLXXXXXXXXXMIQITINSLRAPVX

SEQ ID NO: 35239 - protein, 35 aa, Artificial Sequence
  Non-cyclic GFR-binding peptide
  MOD_RES (2), (4), (35): Xaa is C or S
SXKXSRVIMSMEGLVKPKRGVMIQITINSLAQPVX

SEQ ID NO: 35240 - protein, 33 aa, Artificial Sequence
  Non-cyclic GFR-binding peptide
  MOD_RES (33), (33): Xaa is C or S
  MOD_RES (11), (12), (13), (14), (15): Xaa is A or G
  MOD_RES (16), (17), (18), (19): Xaa is A or G or is absent
EVVMDSMEGIXXXXXXXXXMIQITINSLRAPVX

SEQ ID NO: 35241 - protein, 33 aa, Artificial Sequence
  Non-cyclic GFR-binding peptide
  MOD_RES (32), (33): Xaa is C or S
SEVVMDSMEGLVVNNASDMIQITINSLRTPVXX

SEQ ID NO: 35242 - protein, 34 aa, Artificial Sequence
  Non-cyclic GFR-binding peptide
  MOD_RES (31), (32): Xaa is C or S
EVVMDSMEGLVVNNAADMIQITINSLRAPVXXSA

SEQ ID NO: 35243 - protein, 40 aa, Artificial Sequence
  Non-cyclic GFR-binding peptide
  MOD_RES (34), (35): Xaa is C or S
  MOD_RES (12), (13), (14), (15), (16): Xaa is A or G
  MOD_RES (17), (18), (19), (20): Xaa is A or G or is absent
RDVVMGSMEGLXXXXXXXXXMIQMTINSMKTPTXXPGASG

SEQ ID NO: 35244 - protein, 39 aa, Artificial Sequence
  Non-cyclic GFR-binding peptide
  MOD_RES (2), (4), (35), (36): Xaa is C or S
LXGXEEVIMSMEGILLVRGNDMIQMTINSTKVPAXXTSP

SEQ ID NO: 35245 - protein, 32 aa, Artificial Sequence
  Non-cyclic GFR-binding peptide
  MOD_RES (11), (12), (13), (14), (15): Xaa is A or G
  MOD_RES (16), (17), (18), (19): Xaa is A or G or is absent
EEVIMSMEGLXXXXXXXXXMIQMTINSTKVPA

SEQ ID NO: 35246 - protein, 36 aa, Artificial Sequence
  Non-cyclic GFR-binding peptide
  MOD_RES (1), (34), (35): Xaa is C or S
  MOD_RES (12), (13), (14), (15), (16): Xaa is A or G
  MOD_RES (17), (18), (19), (20): Xaa is A or G or is absent
XEEVIMSMEGLXXXXXXXXXMIQMTINSTKVPAXXT

SEQ ID NO: 35247 - protein, 39 aa, Artificial Sequence
  Non-cyclic GFR-binding peptide
  MOD_RES (33), (34): Xaa is C or S
  MOD_RES (11), (12), (13), (14), (15): Xaa is A or G
  MOD_RES (16), (17), (18), (19): Xaa is A or G or is absent
EEVIMSMEGLXXXXXXXXXMIQMTINSTKVPAXXTSPVR

SEQ ID NO: 35248 - protein, 33 aa, Artificial Sequence
  Non-cyclic GFR-binding peptide
  MOD_RES (2), (2): Xaa is C or S
GXSEVVMDSMEGIVVNNASDMIQITINSLRTPV

SEQ ID NO: 35249 - protein, 36 aa, Artificial Sequence
  Non-cyclic GFR-binding peptide
  MOD_RES (2), (4), (36): Xaa is C or S
RXGXAEVVMDSMEGIVVNNAADMIQITINSLRAPVX

SEQ ID NO: 35250 - protein, 32 aa, Artificial Sequence
  Non-cyclic GFR-binding peptide
  MOD_RES (31), (32): Xaa is C or S
EVVMDSMEGLVVNNAADMIQITINSLRAPVXX

SEQ ID NO: 35251 - protein, 42 aa, Artificial Sequence
  Non-cyclic GFR-binding peptide
  MOD_RES (2), (4), (37), (38): Xaa is C or S
  MOD_RES (15), (16), (17), (18), (19): Xaa is A or G
  MOD_RES (20), (21), (22), (23): Xaa is A or G or is absent
SXKXSKVIMSMEGLXXXXXXXXXMIQITINSLDQSVXXPSAS

SEQ ID NO: 35252 - protein, 38 aa, Artificial Sequence
  Non-cyclic GFR-binding peptide
  MOD_RES (1), (35), (36): Xaa is C or S
  MOD_RES (13), (14), (15), (16), (17): Xaa is A or G
  MOD_RES (18), (19), (20), (21): Xaa is A or G or is absent
XSEVVMDSMEGLXXXXXXXXXMIQITINSLRTPVXXTP

SEQ ID NO: 35253 - protein, 37 aa, Artificial Sequence
  Non-cyclic GFR-binding peptide
  MOD_RES (31), (32): Xaa is C or S
EVVMDSMEGLVVNNAADMIQITINSLRAPVXXSAPAA

SEQ ID NO: 35254 - protein, 43 aa, Artificial Sequence
  Non-cyclic GFR-binding peptide
  MOD_RES (1), (3), (37), (38): Xaa is C or S
  MOD_RES (15), (16), (17), (18), (19): Xaa is A or G
  MOD_RES (20), (21), (22), (23): Xaa is A or G or is absent
XGXRDVVMGSMEGIXXXXXXXXXMIQMTINSMKTPTXXPGASG

SEQ ID NO: 35255 - protein, 36 aa, Artificial Sequence
  Non-cyclic GFR-binding peptide
  MOD_RES (31), (32): Xaa is C or S
DVVMGSMEGIIIQQKDNMIQMTINSMKTPTXXPGAS

SEQ ID NO: 35256 - protein, 36 aa, Artificial Sequence
  Non-cyclic GFR-binding peptide
  MOD_RES (1), (32), (33): Xaa is C or S
XSKVVMSMEGLVKPTRGVMIQITINSLDQPVXXPSA

SEQ ID NO: 35257 - protein, 41 aa, Artificial Sequence
  Non-cyclic GFR-binding peptide
  MOD_RES (2), (4), (37), (38): Xaa is C or S
  MOD_RES (15), (16), (17), (18), (19): Xaa is A or G
  MOD_RES (20), (21), (22), (23): Xaa is A or G or is absent
LXGXEEVIMSMEGIXXXXXXXXXMIQMTINSTKVPAXXTSP

SEQ ID NO: 35258 - protein, 37 aa, Artificial Sequence
  Non-cyclic GFR-binding peptide
  MOD_RES (1), (3), (37): Xaa is C or S
  MOD_RES (15), (16), (17), (18), (19): Xaa is A or G
  MOD_RES (20), (21), (22), (23): Xaa is A or G or is absent
XGXRDVVMGSMEGLXXXXXXXXXMIQMTINSMKTPTX

SEQ ID NO: 35259 - protein, 36 aa, Artificial Sequence
  Non-cyclic GFR-binding peptide
  MOD_RES (32), (33): Xaa is C or S
AEVVMDSMEGLVVNNAADMIQITINSLRAPVXXSAP

SEQ ID NO: 35260 - protein, 41 aa, Artificial Sequence
  Non-cyclic GFR-binding peptide
  MOD_RES (1), (3), (36), (37): Xaa is C or S
  MOD_RES (14), (15), (16), (17), (18): Xaa is A or G
  MOD_RES (19), (20), (21), (22): Xaa is A or G or is absent
XKXSKVVMSMEGLXXXXXXXXXMIQITINSLDQPVXXPSAS

SEQ ID NO: 35261 - protein, 33 aa, Artificial Sequence
  Non-cyclic GFR-binding peptide
  MOD_RES (2), (2): Xaa is C or S
GXRDVVMGSMEGLIIQQKDNMIQMTINSMKTPT

SEQ ID NO: 35262 - protein, 32 aa, Artificial Sequence
  Non-cyclic GFR-binding peptide
  MOD_RES (2), (2): Xaa is C or S
GXEEVIMSMEGLLLVRGNDMIQMTINSTKVPA

SEQ ID NO: 35263 - protein, 34 aa, Artificial Sequence
  Non-cyclic GFR-binding peptide
  MOD_RES (31), (32): Xaa is C or S
EVVMDSMEGLVVNNASDMIQITINSLRTPVXXTP

SEQ ID NO: 35264 - protein, 41 aa, Artificial Sequence
  Non-cyclic GFR-binding peptide
  MOD_RES (2), (4), (37), (38): Xaa is C or S
  MOD_RES (15), (16), (17), (18), (19): Xaa is A or G
  MOD_RES (20), (21), (22), (23): Xaa is A or G or is absent
SXKXSRVIMSMEGLXXXXXXXXXMIQITINSLAQPVXXPAA

SEQ ID NO: 35265 - protein, 35 aa, Artificial Sequence
  Non-cyclic GFR-binding peptide
  MOD_RES (2), (34), (35): Xaa is C or S
GXSRVVMNSMEGLIVNSSDDMIQVTINSLKTPAXX

SEQ ID NO: 35266 - protein, 38 aa, Artificial Sequence
  Non-cyclic GFR-binding peptide
  MOD_RES (34), (35): Xaa is C or S
  MOD_RES (12), (13), (14), (15), (16): Xaa is A or G
  MOD_RES (17), (18), (19), (20): Xaa is A or G or is absent
AEVVMDSMEGIXXXXXXXXXMIQITINSLRAPVXXSAP

SEQ ID NO: 35267 - protein, 32 aa, Artificial Sequence
  Non-cyclic GFR-binding peptide
  MOD_RES (11), (12), (13), (14), (15): Xaa is A or G
  MOD_RES (16), (17), (18), (19): Xaa is A or G or is absent
SKVVMSMEGLXXXXXXXXXMIQITINSLDQPV

SEQ ID NO: 35268 - protein, 39 aa, Artificial Sequence
  Non-cyclic GFR-binding peptide
  MOD_RES (1), (34), (35): Xaa is C or S
  MOD_RES (12), (13), (14), (15), (16): Xaa is A or G
  MOD_RES (17), (18), (19), (20): Xaa is A or G or is absent
XEEVIMSMEGLXXXXXXXXXMIQMTINSTKVPAXXTSPV

SEQ ID NO: 35269 - protein, 33 aa, Artificial Sequence
  Non-cyclic GFR-binding peptide
  MOD_RES (1), (1): Xaa is C or S
  MOD_RES (12), (13), (14), (15), (16): Xaa is A or G
  MOD_RES (17), (18), (19), (20): Xaa is A or G or is absent
XEEVIMSMEGIXXXXXXXXXMIQMTINSTKVPA

SEQ ID NO: 35270 - protein, 38 aa, Artificial Sequence
  Non-cyclic GFR-binding peptide
  MOD_RES (2), (4), (36), (37): Xaa is C or S
SXGXRDVVMGSMEGIIIQQKDNMIQMTINSMKTPTXXP

SEQ ID NO: 35271 - protein, 31 aa, Artificial Sequence
  Non-cyclic GFR-binding peptide
SRVVMNSMEGLIVNSSDDMIQVTINSLKTPA

SEQ ID NO: 35272 - protein, 36 aa, Artificial Sequence
  Non-cyclic GFR-binding peptide
  MOD_RES (32), (33): Xaa is C or S
SEVVMDSMEGIVVNNASDMIQITINSLRTPVXXTPP

SEQ ID NO: 35273 - protein, 40 aa, Artificial Sequence
  Non-cyclic GFR-binding peptide
  MOD_RES (1), (3), (36), (37): Xaa is C or S
  MOD_RES (14), (15), (16), (17), (18): Xaa is A or G
  MOD_RES (19), (20), (21), (22): Xaa is A or G or is absent
XGXEEVIMSMEGLXXXXXXXXXMIQMTINSTKVPAXXTSP

SEQ ID NO: 35274 - protein, 37 aa, Artificial Sequence
  Non-cyclic GFR-binding peptide
  MOD_RES (1), (32), (33): Xaa is C or S
XSRVIMSMEGLVKPKRGVMIQITINSLAQPVXXPAAS

SEQ ID NO: 35275 - protein, 41 aa, Artificial Sequence
  Non-cyclic GFR-binding peptide
  MOD_RES (2), (4), (38), (39): Xaa is C or S
  MOD_RES (16), (17), (18), (19), (20): Xaa is A or G
  MOD_RES (21), (22), (23), (24): Xaa is A or G or is absent
RXGXSEVVMDSMEGIXXXXXXXXXMIQITINSLRTPVXXTP

SEQ ID NO: 35276 - protein, 36 aa, Artificial Sequence
  Non-cyclic GFR-binding peptide
  MOD_RES (1), (3): Xaa is C or S
  MOD_RES (15), (16), (17), (18), (19): Xaa is A or G
  MOD_RES (20), (21), (22), (23): Xaa is A or G or is absent
XGXAEVVMDSMEGIXXXXXXXXXMIQITINSLRAPV

SEQ ID NO: 35277 - protein, 38 aa, Artificial Sequence
  Non-cyclic GFR-binding peptide
  MOD_RES (1), (3), (35), (36): Xaa is C or S
XGXSEVVMDSMEGLVVNNASDMIQITINSLRTPVXXTP

SEQ ID NO: 35278 - protein, 34 aa, Artificial Sequence
  Non-cyclic GFR-binding peptide
  MOD_RES (2), (2): Xaa is C or S
  MOD_RES (13), (14), (15), (16), (17): Xaa is A or G
  MOD_RES (18), (19), (20), (21): Xaa is A or G or is absent
GXEEVIMSMEGLXXXXXXXXXMIQMTINSTKVPA

SEQ ID NO: 35279 - protein, 31 aa, Artificial Sequence
  Non-cyclic GFR-binding peptide
  MOD_RES (31), (31): Xaa is C or S
EVVMDSMEGIVVNNAADMIQITINSLRAPVX

SEQ ID NO: 35280 - protein, 37 aa, Artificial Sequence
  Non-cyclic GFR-binding peptide
  MOD_RES (31), (32): Xaa is C or S
DVVMGSMEGIIIQQKDNMIQMTINSMKTPTXXPGASG

SEQ ID NO: 35281 - protein, 39 aa, Artificial Sequence
  Non-cyclic GFR-binding peptide
  MOD_RES (1), (33), (34): Xaa is C or S
XSRVVMNSMEGIIVNSSDDMIQVTINSLKTPAXXPKPVH

SEQ ID NO: 35282 - protein, 32 aa, Artificial Sequence
  Non-cyclic GFR-binding peptide
  MOD_RES (11), (12), (13), (14), (15): Xaa is A or G
  MOD_RES (16), (17), (18), (19): Xaa is A or G or is absent
DVVMGSMEGLXXXXXXXXXMIQMTINSMKTPT

SEQ ID NO: 35283 - protein, 35 aa, Artificial Sequence
  Non-cyclic GFR-binding peptide
  MOD_RES (34), (35): Xaa is C or S
  MOD_RES (12), (13), (14), (15), (16): Xaa is A or G
  MOD_RES (17), (18), (19), (20): Xaa is A or G or is absent
AEVVMDSMEGLXXXXXXXXXMIQITINSLRAPVXX

SEQ ID NO: 35284 - protein, 39 aa, Artificial Sequence
  Non-cyclic GFR-binding peptide
  MOD_RES (1), (3), (36), (37): Xaa is C or S
  MOD_RES (14), (15), (16), (17), (18): Xaa is A or G
  MOD_RES (19), (20), (21), (22): Xaa is A or G or is absent
XKXSKVIMSMEGLXXXXXXXXXMIQITINSLDQSVXXPS

SEQ ID NO: 35285 - protein, 41 aa, Artificial Sequence
  Non-cyclic GFR-binding peptide
  MOD_RES (2), (36), (37): Xaa is C or S
  MOD_RES (14), (15), (16), (17), (18): Xaa is A or G
  MOD_RES (19), (20), (21), (22): Xaa is A or G or is absent
GXAEVVMDSMEGIXXXXXXXXXMIQITINSLRAPVXXSAPA

SEQ ID NO: 35286 - protein, 41 aa, Artificial Sequence
  Non-cyclic GFR-binding peptide
  MOD_RES (1), (35), (36): Xaa is C or S
  MOD_RES (13), (14), (15), (16), (17): Xaa is A or G
  MOD_RES (18), (19), (20), (21): Xaa is A or G or is absent
XSRVVMNSMEGIXXXXXXXXXMIQVTINSLKTPAXXPKPVH

SEQ ID NO: 35287 - protein, 40 aa, Artificial Sequence
  Non-cyclic GFR-binding peptide
  MOD_RES (2), (35), (36): Xaa is C or S
  MOD_RES (13), (14), (15), (16), (17): Xaa is A or G
  MOD_RES (18), (19), (20), (21): Xaa is A or G or is absent
KXSKVIMSMEGLXXXXXXXXXMIQITINSLDQSVXXPSAS

SEQ ID NO: 35288 - protein, 37 aa, Artificial Sequence
  Non-cyclic GFR-binding peptide
  MOD_RES (2), (36), (37): Xaa is C or S
  MOD_RES (14), (15), (16), (17), (18): Xaa is A or G
  MOD_RES (19), (20), (21), (22): Xaa is A or G or is absent
GXRDVVMGSMEGIXXXXXXXXXMIQMTINSMKTPTXX

SEQ ID NO: 35289 - protein, 32 aa, Artificial Sequence
  Non-cyclic GFR-binding peptide
  MOD_RES (32), (32): Xaa is C or S
RDVVMGSMEGIIIQQKDNMIQMTINSMKTPTX

SEQ ID NO: 35290 - protein, 36 aa, Artificial Sequence
  Non-cyclic GFR-binding peptide
  MOD_RES (34), (35): Xaa is C or S
  MOD_RES (12), (13), (14), (15), (16): Xaa is A or G
  MOD_RES (17), (18), (19), (20): Xaa is A or G or is absent
AEVVMDSMEGIXXXXXXXXXMIQITINSLRAPVXXS

SEQ ID NO: 35291 - protein, 34 aa, Artificial Sequence
  Non-cyclic GFR-binding peptide
  MOD_RES (33), (34): Xaa is C or S
  MOD_RES (11), (12), (13), (14), (15): Xaa is A or G
  MOD_RES (16), (17), (18), (19): Xaa is A or G or is absent
SKVIMSMEGLXXXXXXXXXMIQITINSLDQSVXX

SEQ ID NO: 35292 - protein, 32 aa, Artificial Sequence
  Non-cyclic GFR-binding peptide
  MOD_RES (2), (2): Xaa is C or S
KXSKVIMSMEGLIKPTKGIMIQITINSLDQSV

SEQ ID NO: 35293 - protein, 37 aa, Artificial Sequence
  Non-cyclic GFR-binding peptide
  MOD_RES (2), (4): Xaa is C or S
  MOD_RES (16), (17), (18), (19), (20): Xaa is A or G
  MOD_RES (21), (22), (23), (24): Xaa is A or G or is absent
SXGXRDVVMGSMEGIXXXXXXXXXMIQMTINSMKTPT

SEQ ID NO: 35294 - protein, 36 aa, Artificial Sequence
  Non-cyclic GFR-binding peptide
  MOD_RES (1), (3): Xaa is C or S
  MOD_RES (15), (16), (17), (18), (19): Xaa is A or G
  MOD_RES (20), (21), (22), (23): Xaa is A or G or is absent
XGXSRVVMNSMEGLXXXXXXXXXMIQVTINSLKTPA

SEQ ID NO: 35295 - protein, 35 aa, Artificial Sequence
  Non-cyclic GFR-binding peptide
  MOD_RES (2), (33), (34): Xaa is C or S
GXEEVIMSMEGILLVRGNDMIQMTINSTKVPAXXT

SEQ ID NO: 35296 - protein, 33 aa, Artificial Sequence
  Non-cyclic GFR-binding peptide
  MOD_RES (31), (32): Xaa is C or S
EEVIMSMEGILLVRGNDMIQMTINSTKVPAXXT

SEQ ID NO: 35297 - protein, 38 aa, Artificial Sequence
  Non-cyclic GFR-binding peptide
  MOD_RES (34), (35): Xaa is C or S
  MOD_RES (12), (13), (14), (15), (16): Xaa is A or G
  MOD_RES (17), (18), (19), (20): Xaa is A or G or is absent
RDVVMGSMEGIXXXXXXXXXMIQMTINSMKTPTXXPGA

SEQ ID NO: 35298 - protein, 37 aa, Artificial Sequence
  Non-cyclic GFR-binding peptide
  MOD_RES (1), (33), (34): Xaa is C or S
XRDVVMGSMEGLIIQQKDNMIQMTINSMKTPTXXPGA

SEQ ID NO: 35299 - protein, 34 aa, Artificial Sequence
  Non-cyclic GFR-binding peptide
  MOD_RES (2), (34): Xaa is C or S
GXSEVVMDSMEGIVVNNASDMIQITINSLRTPVX

SEQ ID NO: 35300 - protein, 36 aa, Artificial Sequence
  Non-cyclic GFR-binding peptide
  MOD_RES (1), (3): Xaa is C or S
  MOD_RES (15), (16), (17), (18), (19): Xaa is A or G
  MOD_RES (20), (21), (22), (23): Xaa is A or G or is absent
XGXAEVVMDSMEGLXXXXXXXXXMIQITINSLRAPV

SEQ ID NO: 35301 - protein, 37 aa, Artificial Sequence
  Non-cyclic GFR-binding peptide
  MOD_RES (2), (34), (35): Xaa is C or S
GXSEVVMDSMEGIVVNNASDMIQITINSLRTPVXXTP

SEQ ID NO: 35302 - protein, 42 aa, Artificial Sequence
  Non-cyclic GFR-binding peptide
  MOD_RES (2), (36), (37): Xaa is C or S
  MOD_RES (14), (15), (16), (17), (18): Xaa is A or G
  MOD_RES (19), (20), (21), (22): Xaa is A or G or is absent
GXSEVVMDSMEGLXXXXXXXXXMIQITINSLRTPVXXTPPTS

SEQ ID NO: 35303 - protein, 33 aa, Artificial Sequence
  Non-cyclic GFR-binding peptide
  MOD_RES (2), (33): Xaa is C or S
KXSRVIMSMEGLVKPKRGVMIQITINSLAQPVX

SEQ ID NO: 35304 - protein, 35 aa, Artificial Sequence
  Non-cyclic GFR-binding peptide
  MOD_RES (1), (33), (34): Xaa is C or S
XRDVVMGSMEGLIIQQKDNMIQMTINSMKTPTXXP

SEQ ID NO: 35305 - protein, 36 aa, Artificial Sequence
  Non-cyclic GFR-binding peptide
  MOD_RES (1), (3), (36): Xaa is C or S
  MOD_RES (14), (15), (16), (17), (18): Xaa is A or G
  MOD_RES (19), (20), (21), (22): Xaa is A or G or is absent
XKXSKVVMSMEGLXXXXXXXXXMIQITINSLDQPVX

SEQ ID NO: 35306 - protein, 34 aa, Artificial Sequence
  Non-cyclic GFR-binding peptide
  MOD_RES (1), (32), (33): Xaa is C or S
XEEVIMSMEGILLVRGNDMIQMTINSTKVPAXXT

SEQ ID NO: 35307 - protein, 33 aa, Artificial Sequence
  Non-cyclic GFR-binding peptide
  MOD_RES (32), (33): Xaa is C or S
RDVVMGSMEGLIIQQKDNMIQMTINSMKTPTXX

SEQ ID NO: 35308 - protein, 39 aa, Artificial Sequence
  Non-cyclic GFR-binding peptide
  MOD_RES (2), (4), (36), (37): Xaa is C or S
RXGXSEVVMDSMEGIVVNNASDMIQITINSLRTPVXXTP

SEQ ID NO: 35309 - protein, 40 aa, Artificial Sequence
  Non-cyclic GFR-binding peptide
  MOD_RES (2), (4), (38), (39): Xaa is C or S
  MOD_RES (16), (17), (18), (19), (20): Xaa is A or G
  MOD_RES (21), (22), (23), (24): Xaa is A or G or is absent
RXGXSEVVMDSMEGLXXXXXXXXXMIQITINSLRTPVXXT

SEQ ID NO: 35310 - protein, 36 aa, Artificial Sequence
  Non-cyclic GFR-binding peptide
  MOD_RES (32), (33): Xaa is C or S
RDVVMGSMEGLIIQQKDNMIQMTINSMKTPTXXPGA

SEQ ID NO: 35311 - protein, 37 aa, Artificial Sequence
  Non-cyclic GFR-binding peptide
  MOD_RES (2), (4), (36), (37): Xaa is C or S
SXGXRDVVMGSMEGIIIQQKDNMIQMTINSMKTPTXX

SEQ ID NO: 35312 - protein, 38 aa, Artificial Sequence
  Non-cyclic GFR-binding peptide
  MOD_RES (2), (33), (34): Xaa is C or S
KXSKVVMSMEGLVKPTRGVMIQITINSLDQPVXXPSAS

SEQ ID NO: 35313 - protein, 33 aa, Artificial Sequence
  Non-cyclic GFR-binding peptide
  MOD_RES (12), (13), (14), (15), (16): Xaa is A or G
  MOD_RES (17), (18), (19), (20): Xaa is A or G or is absent
RDVVMGSMEGLXXXXXXXXXMIQMTINSMKTPT

SEQ ID NO: 35314 - protein, 40 aa, Artificial Sequence
  Non-cyclic GFR-binding peptide
  MOD_RES (1), (34), (35): Xaa is C or S
  MOD_RES (12), (13), (14), (15), (16): Xaa is A or G
  MOD_RES (17), (18), (19), (20): Xaa is A or G or is absent
XSRVIMSMEGLXXXXXXXXXMIQITINSLAQPVXXPAASA

SEQ ID NO: 35315 - protein, 40 aa, Artificial Sequence
  Non-cyclic GFR-binding peptide
  MOD_RES (1), (3), (36), (37): Xaa is C or S
  MOD_RES (14), (15), (16), (17), (18): Xaa is A or G
  MOD_RES (19), (20), (21), (22): Xaa is A or G or is absent
XKXSRVIMSMEGLXXXXXXXXXMIQITINSLAQPVXXPAA

SEQ ID NO: 35316 - protein, 41 aa, Artificial Sequence
  Non-cyclic GFR-binding peptide
  MOD_RES (2), (4), (36), (37): Xaa is C or S
HXGXSRVVMNSMEGLIVNSSDDMIQVTINSLKTPAXXPKPV

SEQ ID NO: 35317 - protein, 33 aa, Artificial Sequence
  Non-cyclic GFR-binding peptide
  MOD_RES (1), (33): Xaa is C or S
XSEVVMDSMEGIVVNNASDMIQITINSLRTPVX

SEQ ID NO: 35318 - protein, 39 aa, Artificial Sequence
  Non-cyclic GFR-binding peptide
  MOD_RES (2), (4), (35), (36): Xaa is C or S
LXGXEEVIMSMEGLLLVRGNDMIQMTINSTKVPAXXTSP

SEQ ID NO: 35319 - protein, 35 aa, Artificial Sequence
  Non-cyclic GFR-binding peptide
  MOD_RES (1), (33), (34): Xaa is C or S
XSRVVMNSMEGLIVNSSDDMIQVTINSLKTPAXXP

SEQ ID NO: 35320 - protein, 39 aa, Artificial Sequence
  Non-cyclic GFR-binding peptide
  MOD_RES (1), (3), (36), (37): Xaa is C or S
  MOD_RES (14), (15), (16), (17), (18): Xaa is A or G
  MOD_RES (19), (20), (21), (22): Xaa is A or G or is absent
XGXEEVIMSMEGLXXXXXXXXXMIQMTINSTKVPAXXTS

SEQ ID NO: 35321 - protein, 39 aa, Artificial Sequence
  Non-cyclic GFR-binding peptide
  MOD_RES (1), (35), (36): Xaa is C or S
  MOD_RES (13), (14), (15), (16), (17): Xaa is A or G
  MOD_RES (18), (19), (20), (21): Xaa is A or G or is absent
XAEVVMDSMEGIXXXXXXXXXMIQITINSLRAPVXXSAP

SEQ ID NO: 35322 - protein, 37 aa, Artificial Sequence
  Non-cyclic GFR-binding peptide
  MOD_RES (2), (4), (36), (37): Xaa is C or S
RXGXSEVVMDSMEGLVVNNASDMIQITINSLRTPVXX

SEQ ID NO: 35323 - protein, 37 aa, Artificial Sequence
  Non-cyclic GFR-binding peptide
  MOD_RES (1), (3), (36), (37): Xaa is C or S
  MOD_RES (14), (15), (16), (17), (18): Xaa is A or G
  MOD_RES (19), (20), (21), (22): Xaa is A or G or is absent
XKXSKVVMSMEGLXXXXXXXXXMIQITINSLDQPVXX

SEQ ID NO: 35324 - protein, 39 aa, Artificial Sequence
  Non-cyclic GFR-binding peptide
  MOD_RES (1), (35), (36): Xaa is C or S
  MOD_RES (13), (14), (15), (16), (17): Xaa is A or G
  MOD_RES (18), (19), (20), (21): Xaa is A or G or is absent
XSEVVMDSMEGLXXXXXXXXXMIQITINSLRTPVXXTPP

SEQ ID NO: 35325 - protein, 37 aa, Artificial Sequence
  Non-cyclic GFR-binding peptide
  MOD_RES (2), (4): Xaa is C or S
  MOD_RES (16), (17), (18), (19), (20): Xaa is A or G
  MOD_RES (21), (22), (23), (24): Xaa is A or G or is absent
RXGXAEVVMDSMEGLXXXXXXXXXMIQITINSLRAPV

SEQ ID NO: 35326 - protein, 40 aa, Artificial Sequence
  Non-cyclic GFR-binding peptide
  MOD_RES (1), (3), (37), (38): Xaa is C or S
  MOD_RES (15), (16), (17), (18), (19): Xaa is A or G
  MOD_RES (20), (21), (22), (23): Xaa is A or G or is absent
XGXSEVVMDSMEGLXXXXXXXXXMIQITINSLRTPVXXTP

SEQ ID NO: 35327 - protein, 40 aa, Artificial Sequence
  Non-cyclic GFR-binding peptide
  MOD_RES (2), (4), (38), (39): Xaa is C or S
  MOD_RES (16), (17), (18), (19), (20): Xaa is A or G
  MOD_RES (21), (22), (23), (24): Xaa is A or G or is absent
SXGXRDVVMGSMEGLXXXXXXXXXMIQMTINSMKTPTXXP

SEQ ID NO: 35328 - protein, 36 aa, Artificial Sequence
  Non-cyclic GFR-binding peptide
  MOD_RES (31), (32): Xaa is C or S
RVVMNSMEGLIVNSSDDMIQVTINSLKTPAXXPKPV

SEQ ID NO: 35329 - protein, 39 aa, Artificial Sequence
  Non-cyclic GFR-binding peptide
  MOD_RES (2), (36), (37): Xaa is C or S
  MOD_RES (14), (15), (16), (17), (18): Xaa is A or G
  MOD_RES (19), (20), (21), (22): Xaa is A or G or is absent
GXSRVVMNSMEGLXXXXXXXXXMIQVTINSLKTPAXXPK

SEQ ID NO: 35330 - protein, 38 aa, Artificial Sequence
  Non-cyclic GFR-binding peptide
  MOD_RES (32), (33): Xaa is C or S
AEVVMDSMEGIVVNNAADMIQITINSLRAPVXXSAPAA

SEQ ID NO: 35331 - protein, 36 aa, Artificial Sequence
  Non-cyclic GFR-binding peptide
  MOD_RES (31), (32): Xaa is C or S
EVVMDSMEGIVVNNAADMIQITINSLRAPVXXSAPA

SEQ ID NO: 35332 - protein, 33 aa, Artificial Sequence
  Non-cyclic GFR-binding peptide
  MOD_RES (32), (33): Xaa is C or S
SRVVMNSMEGLIVNSSDDMIQVTINSLKTPAXX

SEQ ID NO: 35333 - protein, 40 aa, Artificial Sequence
  Non-cyclic GFR-binding peptide
  MOD_RES (1), (3), (34), (35): Xaa is C or S
XKXSRVIMSMEGLVKPKRGVMIQITINSLAQPVXXPAASA

SEQ ID NO: 35334 - protein, 35 aa, Artificial Sequence
  Non-cyclic GFR-binding peptide
  MOD_RES (2), (4): Xaa is C or S
RXGXSEVVMDSMEGLVVNNASDMIQITINSLRTPV

SEQ ID NO: 35335 - protein, 33 aa, Artificial Sequence
  Non-cyclic GFR-binding peptide
  MOD_RES (31), (32): Xaa is C or S
DVVMGSMEGLIIQQKDNMIQMTINSMKTPTXXP

SEQ ID NO: 35336 - protein, 37 aa, Artificial Sequence
  Non-cyclic GFR-binding peptide
  MOD_RES (34), (35): Xaa is C or S
  MOD_RES (12), (13), (14), (15), (16): Xaa is A or G
  MOD_RES (17), (18), (19), (20): Xaa is A or G or is absent
AEVVMDSMEGIXXXXXXXXXMIQITINSLRAPVXXSA

SEQ ID NO: 35337 - protein, 36 aa, Artificial Sequence
  Non-cyclic GFR-binding peptide
  MOD_RES (33), (34): Xaa is C or S
  MOD_RES (11), (12), (13), (14), (15): Xaa is A or G
  MOD_RES (16), (17), (18), (19): Xaa is A or G or is absent
EVVMDSMEGIXXXXXXXXXMIQITINSLRAPVXXSA

SEQ ID NO: 35338 - protein, 39 aa, Artificial Sequence
  Non-cyclic GFR-binding peptide
  MOD_RES (1), (3), (35), (36): Xaa is C or S
XGXAEVVMDSMEGLVVNNAADMIQITINSLRAPVXXSAP

SEQ ID NO: 35339 - protein, 34 aa, Artificial Sequence
  Non-cyclic GFR-binding peptide
  MOD_RES (31), (32): Xaa is C or S
DVVMGSMEGIIIQQKDNMIQMTINSMKTPTXXPG

SEQ ID NO: 35340 - protein, 36 aa, Artificial Sequence
  Non-cyclic GFR-binding peptide
  MOD_RES (34), (35): Xaa is C or S
  MOD_RES (12), (13), (14), (15), (16): Xaa is A or G
  MOD_RES (17), (18), (19), (20): Xaa is A or G or is absent
SRVVMNSMEGLXXXXXXXXXMIQVTINSLKTPAXXP

SEQ ID NO: 35341 - protein, 40 aa, Artificial Sequence
  Non-cyclic GFR-binding peptide
  MOD_RES (1), (3), (36), (37): Xaa is C or S
  MOD_RES (14), (15), (16), (17), (18): Xaa is A or G
  MOD_RES (19), (20), (21), (22): Xaa is A or G or is absent
XKXSKVIMSMEGLXXXXXXXXXMIQITINSLDQSVXXPSA

SEQ ID NO: 35342 - protein, 40 aa, Artificial Sequence
  Non-cyclic GFR-binding peptide
  MOD_RES (1), (34), (35): Xaa is C or S
  MOD_RES (12), (13), (14), (15), (16): Xaa is A or G
  MOD_RES (17), (18), (19), (20): Xaa is A or G or is absent
XEEVIMSMEGLXXXXXXXXXMIQMTINSTKVPAXXTSPVR

SEQ ID NO: 35343 - protein, 39 aa, Artificial Sequence
  Non-cyclic GFR-binding peptide
  MOD_RES (34), (35): Xaa is C or S
  MOD_RES (12), (13), (14), (15), (16): Xaa is A or G
  MOD_RES (17), (18), (19), (20): Xaa is A or G or is absent
RDVVMGSMEGLXXXXXXXXXMIQMTINSMKTPTXXPGAS

SEQ ID NO: 35344 - protein, 32 aa, Artificial Sequence
  Non-cyclic GFR-binding peptide
  MOD_RES (31), (32): Xaa is C or S
DVVMGSMEGIIIQQKDNMIQMTINSMKTPTXX

SEQ ID NO: 35345 - protein, 34 aa, Artificial Sequence
  Non-cyclic GFR-binding peptide
  MOD_RES (2), (33), (34): Xaa is C or S
KXSRVIMSMEGLVKPKRGVMIQITINSLAQPVXX

SEQ ID NO: 35346 - protein, 36 aa, Artificial Sequence
  Non-cyclic GFR-binding peptide
  MOD_RES (1), (3), (35), (36): Xaa is C or S
XGXRDVVMGSMEGIIIQQKDNMIQMTINSMKTPTXX

SEQ ID NO: 35347 - protein, 31 aa, Artificial Sequence
  Non-cyclic GFR-binding peptide
  MOD_RES (31), (31): Xaa is C or S
DVVMGSMEGIIIQQKDNMIQMTINSMKTPTX

SEQ ID NO: 35348 - protein, 35 aa, Artificial Sequence
  Non-cyclic GFR-binding peptide
  MOD_RES (2), (4), (35): Xaa is C or S
SXKXSKVVMSMEGLVKPTRGVMIQITINSLDQPVX

SEQ ID NO: 35349 - protein, 36 aa, Artificial Sequence
  Non-cyclic GFR-binding peptide
  MOD_RES (1), (35), (36): Xaa is C or S
  MOD_RES (13), (14), (15), (16), (17): Xaa is A or G
  MOD_RES (18), (19), (20), (21): Xaa is A or G or is absent
XRDVVMGSMEGIXXXXXXXXXMIQMTINSMKTPTXX

SEQ ID NO: 35350 - protein, 41 aa, Artificial Sequence
  Non-cyclic GFR-binding peptide
  MOD_RES (1), (3), (35), (36): Xaa is C or S
XGXSRVVMNSMEGIIVNSSDDMIQVTINSLKTPAXXPKPVH

SEQ ID NO: 35351 - protein, 36 aa, Artificial Sequence
  Non-cyclic GFR-binding peptide
  MOD_RES (2), (4): Xaa is C or S
  MOD_RES (15), (16), (17), (18), (19): Xaa is A or G
  MOD_RES (20), (21), (22), (23): Xaa is A or G or is absent
SXKXSKVVMSMEGLXXXXXXXXXMIQITINSLDQPV

SEQ ID NO: 35352 - protein, 36 aa, Artificial Sequence
  Non-cyclic GFR-binding peptide
  MOD_RES (2), (4), (36): Xaa is C or S
SXGXRDVVMGSMEGLIIQQKDNMIQMTINSMKTPTX

SEQ ID NO: 35353 - protein, 36 aa, Artificial Sequence
  Non-cyclic GFR-binding peptide
  MOD_RES (1), (3), (35), (36): Xaa is C or S
XGXRDVVMGSMEGLIIQQKDNMIQMTINSMKTPTXX

SEQ ID NO: 35354 - protein, 36 aa, Artificial Sequence
  Non-cyclic GFR-binding peptide
  MOD_RES (2), (33), (34): Xaa is C or S
KXSRVIMSMEGLVKPKRGVMIQITINSLAQPVXXPA

SEQ ID NO: 35355 - protein, 38 aa, Artificial Sequence
  Non-cyclic GFR-binding peptide
  MOD_RES (33), (34): Xaa is C or S
  MOD_RES (11), (12), (13), (14), (15): Xaa is A or G
  MOD_RES (16), (17), (18), (19): Xaa is A or G or is absent
EVVMDSMEGLXXXXXXXXXMIQITINSLRAPVXXSAPA

SEQ ID NO: 35356 - protein, 36 aa, Artificial Sequence
  Non-cyclic GFR-binding peptide
  MOD_RES (1), (3): Xaa is C or S
  MOD_RES (15), (16), (17), (18), (19): Xaa is A or G
  MOD_RES (20), (21), (22), (23): Xaa is A or G or is absent
XGXRDVVMGSMEGIXXXXXXXXXMIQMTINSMKTPT

SEQ ID NO: 35357 - protein, 35 aa, Artificial Sequence
  Non-cyclic GFR-binding peptide
  MOD_RES (1), (3), (35): Xaa is C or S
XGXSEVVMDSMEGLVVNNASDMIQITINSLRTPVX

SEQ ID NO: 35358 - protein, 35 aa, Artificial Sequence
  Non-cyclic GFR-binding peptide
  MOD_RES (1), (34), (35): Xaa is C or S
  MOD_RES (12), (13), (14), (15), (16): Xaa is A or G
  MOD_RES (17), (18), (19), (20): Xaa is A or G or is absent
XSKVIMSMEGLXXXXXXXXXMIQITINSLDQSVXX

SEQ ID NO: 35359 - protein, 36 aa, Artificial Sequence
  Non-cyclic GFR-binding peptide
  MOD_RES (1), (3), (34), (35): Xaa is C or S
XKXSKVIMSMEGLIKPTKGIMIQITINSLDQSVXXP

SEQ ID NO: 35360 - protein, 38 aa, Artificial Sequence
  Non-cyclic GFR-binding peptide
  MOD_RES (2), (34), (35): Xaa is C or S
GXAEVVMDSMEGLVVNNAADMIQITINSLRAPVXXSAP

SEQ ID NO: 35361 - protein, 33 aa, Artificial Sequence
  Non-cyclic GFR-binding peptide
  MOD_RES (1), (3): Xaa is C or S
XGXEEVIMSMEGLLLVRGNDMIQMTINSTKVPA

SEQ ID NO: 35362 - protein, 36 aa, Artificial Sequence
  Non-cyclic GFR-binding peptide
  MOD_RES (31), (32): Xaa is C or S
SKVVMSMEGLVKPTRGVMIQITINSLDQPVXXPSAS

SEQ ID NO: 35363 - protein, 32 aa, Artificial Sequence
  Non-cyclic GFR-binding peptide
  MOD_RES (11), (12), (13), (14), (15): Xaa is A or G
  MOD_RES (16), (17), (18), (19): Xaa is A or G or is absent
DVVMGSMEGIXXXXXXXXXMIQMTINSMKTPT

SEQ ID NO: 35364 - protein, 40 aa, Artificial Sequence
  Non-cyclic GFR-binding peptide
  MOD_RES (1), (35), (36): Xaa is C or S
  MOD_RES (13), (14), (15), (16), (17): Xaa is A or G
  MOD_RES (18), (19), (20), (21): Xaa is A or G or is absent
XAEVVMDSMEGLXXXXXXXXXMIQITINSLRAPVXXSAPA

SEQ ID NO: 35365 - protein, 34 aa, Artificial Sequence
  Non-cyclic GFR-binding peptide
  MOD_RES (33), (34): Xaa is C or S
  MOD_RES (11), (12), (13), (14), (15): Xaa is A or G
  MOD_RES (16), (17), (18), (19): Xaa is A or G or is absent
EEVIMSMEGIXXXXXXXXXMIQMTINSTKVPAXX

SEQ ID NO: 35366 - protein, 40 aa, Artificial Sequence
  Non-cyclic GFR-binding peptide
  MOD_RES (1), (35), (36): Xaa is C or S
  MOD_RES (13), (14), (15), (16), (17): Xaa is A or G
  MOD_RES (18), (19), (20), (21): Xaa is A or G or is absent
XAEVVMDSMEGIXXXXXXXXXMIQITINSLRAPVXXSAPA

SEQ ID NO: 35367 - protein, 39 aa, Artificial Sequence
  Non-cyclic GFR-binding peptide
  MOD_RES (33), (34): Xaa is C or S
  MOD_RES (11), (12), (13), (14), (15): Xaa is A or G
  MOD_RES (16), (17), (18), (19): Xaa is A or G or is absent
DVVMGSMEGIXXXXXXXXXMIQMTINSMKTPTXXPGASG

SEQ ID NO: 35368 - protein, 42 aa, Artificial Sequence
  Non-cyclic GFR-binding peptide
  MOD_RES (2), (36), (37): Xaa is C or S
  MOD_RES (14), (15), (16), (17), (18): Xaa is A or G
  MOD_RES (19), (20), (21), (22): Xaa is A or G or is absent
GXSRVVMNSMEGLXXXXXXXXXMIQVTINSLKTPAXXPKPVH

SEQ ID NO: 35369 - protein, 35 aa, Artificial Sequence
  Non-cyclic GFR-binding peptide
  MOD_RES (31), (32): Xaa is C or S
RVVMNSMEGLIVNSSDDMIQVTINSLKTPAXXPKP

SEQ ID NO: 35370 - protein, 40 aa, Artificial Sequence
  Non-cyclic GFR-binding peptide
  MOD_RES (2), (34), (35): Xaa is C or S
GXSEVVMDSMEGLVVNNASDMIQITINSLRTPVXXTPPTS

SEQ ID NO: 35371 - protein, 42 aa, Artificial Sequence
  Non-cyclic GFR-binding peptide
  MOD_RES (2), (4), (38), (39): Xaa is C or S
  MOD_RES (16), (17), (18), (19), (20): Xaa is A or G
  MOD_RES (21), (22), (23), (24): Xaa is A or G or is absent
SXGXRDVVMGSMEGLXXXXXXXXXMIQMTINSMKTPTXXPGA

SEQ ID NO: 35372 - protein, 34 aa, Artificial Sequence
  Non-cyclic GFR-binding peptide
  MOD_RES (34), (34): Xaa is C or S
  MOD_RES (12), (13), (14), (15), (16): Xaa is A or G
  MOD_RES (17), (18), (19), (20): Xaa is A or G or is absent
SRVVMNSMEGLXXXXXXXXXMIQVTINSLKTPAX

SEQ ID NO: 35373 - protein, 39 aa, Artificial Sequence
  Non-cyclic GFR-binding peptide
  MOD_RES (2), (33), (34): Xaa is C or S
GXEEVIMSMEGLLLVRGNDMIQMTINSTKVPAXXTSPVR

SEQ ID NO: 35374 - protein, 37 aa, Artificial Sequence
  Non-cyclic GFR-binding peptide
  MOD_RES (31), (32): Xaa is C or S
SRVIMSMEGLVKPKRGVMIQITINSLAQPVXXPAASA

SEQ ID NO: 35375 - protein, 35 aa, Artificial Sequence
  Non-cyclic GFR-binding peptide
  MOD_RES (33), (34): Xaa is C or S
  MOD_RES (11), (12), (13), (14), (15): Xaa is A or G
  MOD_RES (16), (17), (18), (19): Xaa is A or G or is absent
SKVVMSMEGLXXXXXXXXXMIQITINSLDQPVXXP

SEQ ID NO: 35376 - protein, 36 aa, Artificial Sequence
  Non-cyclic GFR-binding peptide
  MOD_RES (1), (3), (35), (36): Xaa is C or S
XGXSEVVMDSMEGIVVNNASDMIQITINSLRTPVXX

SEQ ID NO: 35377 - protein, 34 aa, Artificial Sequence
  Non-cyclic GFR-binding peptide
  MOD_RES (31), (32): Xaa is C or S
EVVMDSMEGIVVNNASDMIQITINSLRTPVXXTP

SEQ ID NO: 35378 - protein, 42 aa, Artificial Sequence
  Non-cyclic GFR-binding peptide
  MOD_RES (2), (4), (36), (37): Xaa is C or S
RXGXAEVVMDSMEGIVVNNAADMIQITINSLRAPVXXSAPAA

SEQ ID NO: 35379 - protein, 39 aa, Artificial Sequence
  Non-cyclic GFR-binding peptide
  MOD_RES (2), (33), (34): Xaa is C or S
GXEEVIMSMEGILLVRGNDMIQMTINSTKVPAXXTSPVR

SEQ ID NO: 35380 - protein, 39 aa, Artificial Sequence
  Non-cyclic GFR-binding peptide
  MOD_RES (33), (34): Xaa is C or S
  MOD_RES (11), (12), (13), (14), (15): Xaa is A or G
  MOD_RES (16), (17), (18), (19): Xaa is A or G or is absent
SKVVMSMEGLXXXXXXXXXMIQITINSLDQPVXXPSASA

SEQ ID NO: 35381 - protein, 37 aa, Artificial Sequence
  Non-cyclic GFR-binding peptide
  MOD_RES (32), (33): Xaa is C or S
SEVVMDSMEGIVVNNASDMIQITINSLRTPVXXTPPT

SEQ ID NO: 35382 - protein, 37 aa, Artificial Sequence
  Non-cyclic GFR-binding peptide
  MOD_RES (2), (4), (37): Xaa is C or S
  MOD_RES (15), (16), (17), (18), (19): Xaa is A or G
  MOD_RES (20), (21), (22), (23): Xaa is A or G or is absent
LXGXEEVIMSMEGLXXXXXXXXXMIQMTINSTKVPAX

SEQ ID NO: 35383 - protein, 36 aa, Artificial Sequence
  Non-cyclic GFR-binding peptide
  MOD_RES (2), (34), (35): Xaa is C or S
GXAEVVMDSMEGLVVNNAADMIQITINSLRAPVXXS

SEQ ID NO: 35384 - protein, 35 aa, Artificial Sequence
  Non-cyclic GFR-binding peptide
  MOD_RES (1), (35): Xaa is C or S
  MOD_RES (13), (14), (15), (16), (17): Xaa is A or G
  MOD_RES (18), (19), (20), (21): Xaa is A or G or is absent
XSRVVMNSMEGLXXXXXXXXXMIQVTINSLKTPAX

SEQ ID NO: 35385 - protein, 38 aa, Artificial Sequence
  Non-cyclic GFR-binding peptide
  MOD_RES (1), (34), (35): Xaa is C or S
  MOD_RES (12), (13), (14), (15), (16): Xaa is A or G
  MOD_RES (17), (18), (19), (20): Xaa is A or G or is absent
XEEVIMSMEGIXXXXXXXXXMIQMTINSTKVPAXXTSP

SEQ ID NO: 35386 - protein, 42 aa, Artificial Sequence
  Non-cyclic GFR-binding peptide
  MOD_RES (2), (4), (38), (39): Xaa is C or S
  MOD_RES (16), (17), (18), (19), (20): Xaa is A or G
  MOD_RES (21), (22), (23), (24): Xaa is A or G or is absent
SXGXRDVVMGSMEGIXXXXXXXXXMIQMTINSMKTPTXXPGA

SEQ ID NO: 35387 - protein, 31 aa, Artificial Sequence
  Non-cyclic GFR-binding peptide
  MOD_RES (31), (31): Xaa is C or S
RVVMNSMEGLIVNSSDDMIQVTINSLKTPAX

SEQ ID NO: 35388 - protein, 38 aa, Artificial Sequence
  Non-cyclic GFR-binding peptide
  MOD_RES (33), (34): Xaa is C or S
  MOD_RES (11), (12), (13), (14), (15): Xaa is A or G
  MOD_RES (16), (17), (18), (19): Xaa is A or G or is absent
EEVIMSMEGIXXXXXXXXXMIQMTINSTKVPAXXTSPV

SEQ ID NO: 35389 - protein, 39 aa, Artificial Sequence
  Non-cyclic GFR-binding peptide
  MOD_RES (33), (34): Xaa is C or S
  MOD_RES (11), (12), (13), (14), (15): Xaa is A or G
  MOD_RES (16), (17), (18), (19): Xaa is A or G or is absent
EVVMDSMEGIXXXXXXXXXMIQITINSLRAPVXXSAPAA

SEQ ID NO: 35390 - protein, 35 aa, Artificial Sequence
  Non-cyclic GFR-binding peptide
  MOD_RES (2), (2): Xaa is C or S
  MOD_RES (14), (15), (16), (17), (18): Xaa is A or G
  MOD_RES (19), (20), (21), (22): Xaa is A or G or is absent
GXRDVVMGSMEGIXXXXXXXXXMIQMTINSMKTPT

SEQ ID NO: 35391 - protein, 42 aa, Artificial Sequence
  Non-cyclic GFR-binding peptide
  MOD_RES (1), (3), (36), (37): Xaa is C or S
  MOD_RES (14), (15), (16), (17), (18): Xaa is A or G
  MOD_RES (19), (20), (21), (22): Xaa is A or G or is absent
XKXSKVIMSMEGLXXXXXXXXXMIQITINSLDQSVXXPSASA

SEQ ID NO: 35392 - protein, 36 aa, Artificial Sequence
  Non-cyclic GFR-binding peptide
  MOD_RES (31), (32): Xaa is C or S
EVVMDSMEGLVVNNASDMIQITINSLRTPVXXTPPT

SEQ ID NO: 35393 - protein, 32 aa, Artificial Sequence
  Non-cyclic GFR-binding peptide
  MOD_RES (32), (32): Xaa is C or S
RDVVMGSMEGLIIQQKDNMIQMTINSMKTPTX

SEQ ID NO: 35394 - protein, 34 aa, Artificial Sequence
  Non-cyclic GFR-binding peptide
  MOD_RES (1), (3): Xaa is C or S
XGXRDVVMGSMEGLIIQQKDNMIQMTINSMKTPT

SEQ ID NO: 35395 - protein, 41 aa, Artificial Sequence
  Non-cyclic GFR-binding peptide
  MOD_RES (2), (35), (36): Xaa is C or S
  MOD_RES (13), (14), (15), (16), (17): Xaa is A or G
  MOD_RES (18), (19), (20), (21): Xaa is A or G or is absent
KXSRVIMSMEGLXXXXXXXXXMIQITINSLAQPVXXPAASA

SEQ ID NO: 35396 - protein, 42 aa, Artificial Sequence
  Non-cyclic GFR-binding peptide
  MOD_RES (1), (3), (37), (38): Xaa is C or S
  MOD_RES (15), (16), (17), (18), (19): Xaa is A or G
  MOD_RES (20), (21), (22), (23): Xaa is A or G or is absent
XGXAEVVMDSMEGLXXXXXXXXXMIQITINSLRAPVXXSAPA

SEQ ID NO: 35397 - protein, 37 aa, Artificial Sequence
  Non-cyclic GFR-binding peptide
  MOD_RES (1), (3), (35), (36): Xaa is C or S
XGXSEVVMDSMEGIVVNNASDMIQITINSLRTPVXXT

SEQ ID NO: 35398 - protein, 38 aa, Artificial Sequence
  Non-cyclic GFR-binding peptide
  MOD_RES (1), (33), (34): Xaa is C or S
XAEVVMDSMEGLVVNNAADMIQITINSLRAPVXXSAPA

SEQ ID NO: 35399 - protein, 34 aa, Artificial Sequence
  Non-cyclic GFR-binding peptide
  MOD_RES (31), (32): Xaa is C or S
EVVMDSMEGIVVNNAADMIQITINSLRAPVXXSA

SEQ ID NO: 35400 - protein, 38 aa, Artificial Sequence
  Non-cyclic GFR-binding peptide
  MOD_RES (1), (33), (34): Xaa is C or S
XSEVVMDSMEGLVVNNASDMIQITINSLRTPVXXTPPT

SEQ ID NO: 35401 - protein, 36 aa, Artificial Sequence
  Non-cyclic GFR-binding peptide
  MOD_RES (2), (36): Xaa is C or S
  MOD_RES (14), (15), (16), (17), (18): Xaa is A or G
  MOD_RES (19), (20), (21), (22): Xaa is A or G or is absent
GXAEVVMDSMEGIXXXXXXXXXMIQITINSLRAPVX

SEQ ID NO: 35402 - protein, 40 aa, Artificial Sequence
  Non-cyclic GFR-binding peptide
  MOD_RES (2), (4), (37), (38): Xaa is C or S
  MOD_RES (15), (16), (17), (18), (19): Xaa is A or G
  MOD_RES (20), (21), (22), (23): Xaa is A or G or is absent
LXGXEEVIMSMEGIXXXXXXXXXMIQMTINSTKVPAXXTS

SEQ ID NO: 35403 - protein, 41 aa, Artificial Sequence
  Non-cyclic GFR-binding peptide
  MOD_RES (2), (35), (36): Xaa is C or S
  MOD_RES (13), (14), (15), (16), (17): Xaa is A or G
  MOD_RES (18), (19), (20), (21): Xaa is A or G or is absent
KXSKVVMSMEGLXXXXXXXXXMIQITINSLDQPVXXPSASA

SEQ ID NO: 35404 - protein, 39 aa, Artificial Sequence
  Non-cyclic GFR-binding peptide
  MOD_RES (2), (4), (35), (36): Xaa is C or S
SXKXSKVIMSMEGLIKPTKGIMIQITINSLDQSVXXPSA

SEQ ID NO: 35405 - protein, 40 aa, Artificial Sequence
  Non-cyclic GFR-binding peptide
  MOD_RES (1), (34), (35): Xaa is C or S
  MOD_RES (12), (13), (14), (15), (16): Xaa is A or G
  MOD_RES (17), (18), (19), (20): Xaa is A or G or is absent
XEEVIMSMEGIXXXXXXXXXMIQMTINSTKVPAXXTSPVR

SEQ ID NO: 35406 - protein, 36 aa, Artificial Sequence
  Non-cyclic GFR-binding peptide
  MOD_RES (2), (35), (36): Xaa is C or S
  MOD_RES (13), (14), (15), (16), (17): Xaa is A or G
  MOD_RES (18), (19), (20), (21): Xaa is A or G or is absent
KXSKVIMSMEGLXXXXXXXXXMIQITINSLDQSVXX

SEQ ID NO: 35407 - protein, 30 aa, Artificial Sequence
  Non-cyclic GFR-binding peptide
RVVMNSMEGLIVNSSDDMIQVTINSLKTPA

SEQ ID NO: 35408 - protein, 37 aa, Artificial Sequence
  Non-cyclic GFR-binding peptide
  MOD_RES (1), (33), (34): Xaa is C or S
XSEVVMDSMEGIVVNNASDMIQITINSLRTPVXXTPP

SEQ ID NO: 35409 - protein, 37 aa, Artificial Sequence
  Non-cyclic GFR-binding peptide
  MOD_RES (33), (34): Xaa is C or S
  MOD_RES (11), (12), (13), (14), (15): Xaa is A or G
  MOD_RES (16), (17), (18), (19): Xaa is A or G or is absent
EEVIMSMEGLXXXXXXXXXMIQMTINSTKVPAXXTSP

SEQ ID NO: 35410 - protein, 41 aa, Artificial Sequence
  Non-cyclic GFR-binding peptide
  MOD_RES (2), (4), (35), (36): Xaa is C or S
SXKXSKVIMSMEGLIKPTKGIMIQITINSLDQSVXXPSASA

SEQ ID NO: 35411 - protein, 43 aa, Artificial Sequence
  Non-cyclic GFR-binding peptide
  MOD_RES (2), (4), (37), (38): Xaa is C or S
  MOD_RES (15), (16), (17), (18), (19): Xaa is A or G
  MOD_RES (20), (21), (22), (23): Xaa is A or G or is absent
LXGXEEVIMSMEGLXXXXXXXXXMIQMTINSTKVPAXXTSPVR

SEQ ID NO: 35412 - protein, 39 aa, Artificial Sequence
  Non-cyclic GFR-binding peptide
  MOD_RES (1), (3), (34), (35): Xaa is C or S
XKXSRVIMSMEGLVKPKRGVMIQITINSLAQPVXXPAAS

SEQ ID NO: 35413 - protein, 35 aa, Artificial Sequence
  Non-cyclic GFR-binding peptide
  MOD_RES (1), (33), (34): Xaa is C or S
XSEVVMDSMEGIVVNNASDMIQITINSLRTPVXXT

SEQ ID NO: 35414 - protein, 39 aa, Artificial Sequence
  Non-cyclic GFR-binding peptide
  MOD_RES (34), (35): Xaa is C or S
  MOD_RES (12), (13), (14), (15), (16): Xaa is A or G
  MOD_RES (17), (18), (19), (20): Xaa is A or G or is absent
AEVVMDSMEGIXXXXXXXXXMIQITINSLRAPVXXSAPA

SEQ ID NO: 35415 - protein, 40 aa, Artificial Sequence
  Non-cyclic GFR-binding peptide
  MOD_RES (2), (4), (35), (36): Xaa is C or S
SXKXSKVIMSMEGLIKPTKGIMIQITINSLDQSVXXPSAS

SEQ ID NO: 35416 - protein, 43 aa, Artificial Sequence
  Non-cyclic GFR-binding peptide
  MOD_RES (2), (4), (38), (39): Xaa is C or S
  MOD_RES (16), (17), (18), (19), (20): Xaa is A or G
  MOD_RES (21), (22), (23), (24): Xaa is A or G or is absent
SXGXRDVVMGSMEGIXXXXXXXXXMIQMTINSMKTPTXXPGAS

SEQ ID NO: 35417 - protein, 36 aa, Artificial Sequence
  Non-cyclic GFR-binding peptide
  MOD_RES (2), (4): Xaa is C or S
  MOD_RES (15), (16), (17), (18), (19): Xaa is A or G
  MOD_RES (20), (21), (22), (23): Xaa is A or G or is absent
SXKXSKVIMSMEGLXXXXXXXXXMIQITINSLDQSV

SEQ ID NO: 35418 - protein, 34 aa, Artificial Sequence
  Non-cyclic GFR-binding peptide
  MOD_RES (2), (34): Xaa is C or S
GXSRVVMNSMEGLIVNSSDDMIQVTINSLKTPAX

SEQ ID NO: 35419 - protein, 36 aa, Artificial Sequence
  Non-cyclic GFR-binding peptide
  MOD_RES (1), (3), (34), (35): Xaa is C or S
XKXSRVIMSMEGLVKPKRGVMIQITINSLAQPVXXP

SEQ ID NO: 35420 - protein, 34 aa, Artificial Sequence
  Non-cyclic GFR-binding peptide
  MOD_RES (32), (33): Xaa is C or S
RDVVMGSMEGIIIQQKDNMIQMTINSMKTPTXXP

SEQ ID NO: 35421 - protein, 35 aa, Artificial Sequence
  Non-cyclic GFR-binding peptide
  MOD_RES (2), (4): Xaa is C or S
SXGXRDVVMGSMEGIIIQQKDNMIQMTINSMKTPT

SEQ ID NO: 35422 - protein, 35 aa, Artificial Sequence
  Non-cyclic GFR-binding peptide
  MOD_RES (2), (4): Xaa is C or S
SXGXRDVVMGSMEGLIIQQKDNMIQMTINSMKTPT

SEQ ID NO: 35423 - protein, 34 aa, Artificial Sequence
  Non-cyclic GFR-binding peptide
  MOD_RES (1), (33), (34): Xaa is C or S
XSRVVMNSMEGLIVNSSDDMIQVTINSLKTPAXX

SEQ ID NO: 35424 - protein, 39 aa, Artificial Sequence
  Non-cyclic GFR-binding peptide
  MOD_RES (1), (34), (35): Xaa is C or S
  MOD_RES (12), (13), (14), (15), (16): Xaa is A or G
  MOD_RES (17), (18), (19), (20): Xaa is A or G or is absent
XSKVIMSMEGLXXXXXXXXXMIQITINSLDQSVXXPSAS

SEQ ID NO: 35425 - protein, 31 aa, Artificial Sequence
  Non-cyclic GFR-binding peptide
  MOD_RES (31), (31): Xaa is C or S
SKVIMSMEGLIKPTKGIMIQITINSLDQSVX

SEQ ID NO: 35426 - protein, 35 aa, Artificial Sequence
  Non-cyclic GFR-binding peptide
  MOD_RES (1), (33), (34): Xaa is C or S
XAEVVMDSMEGLVVNNAADMIQITINSLRAPVXXS

SEQ ID NO: 35427 - protein, 38 aa, Artificial Sequence
  Non-cyclic GFR-binding peptide
  MOD_RES (1), (3), (35), (36): Xaa is C or S
XGXRDVVMGSMEGIIIQQKDNMIQMTINSMKTPTXXPG

SEQ ID NO: 35428 - protein, 34 aa, Artificial Sequence
  Non-cyclic GFR-binding peptide
  MOD_RES (1), (32), (33): Xaa is C or S
XSRVIMSMEGLVKPKRGVMIQITINSLAQPVXXP

SEQ ID NO: 35429 - protein, 34 aa, Artificial Sequence
  Non-cyclic GFR-binding peptide
  MOD_RES (33), (34): Xaa is C or S
  MOD_RES (11), (12), (13), (14), (15): Xaa is A or G
  MOD_RES (16), (17), (18), (19): Xaa is A or G or is absent
EVVMDSMEGLXXXXXXXXXMIQITINSLRTPVXX

SEQ ID NO: 35430 - protein, 33 aa, Artificial Sequence
  Non-cyclic GFR-binding peptide
  MOD_RES (12), (13), (14), (15), (16): Xaa is A or G
  MOD_RES (17), (18), (19), (20): Xaa is A or G or is absent
SRVVMNSMEGLXXXXXXXXXMIQVTINSLKTPA

SEQ ID NO: 35431 - protein, 41 aa, Artificial Sequence
  Non-cyclic GFR-binding peptide
  MOD_RES (2), (36), (37): Xaa is C or S
  MOD_RES (14), (15), (16), (17), (18): Xaa is A or G
  MOD_RES (19), (20), (21), (22): Xaa is A or G or is absent
GXSRVVMNSMEGLXXXXXXXXXMIQVTINSLKTPAXXPKPV

SEQ ID NO: 35432 - protein, 36 aa, Artificial Sequence
  Non-cyclic GFR-binding peptide
  MOD_RES (31), (32): Xaa is C or S
EVVMDSMEGIVVNNASDMIQITINSLRTPVXXTPPT

SEQ ID NO: 35433 - protein, 37 aa, Artificial Sequence
  Non-cyclic GFR-binding peptide
  MOD_RES (31), (32): Xaa is C or S
RVVMNSMEGIIVNSSDDMIQVTINSLKTPAXXPKPVH

SEQ ID NO: 35434 - protein, 34 aa, Artificial Sequence
  Non-cyclic GFR-binding peptide
  MOD_RES (32), (33): Xaa is C or S
SEVVMDSMEGIVVNNASDMIQITINSLRTPVXXT

SEQ ID NO: 35435 - protein, 35 aa, Artificial Sequence
  Non-cyclic GFR-binding peptide
  MOD_RES (2), (34), (35): Xaa is C or S
GXAEVVMDSMEGLVVNNAADMIQITINSLRAPVXX

SEQ ID NO: 35436 - protein, 42 aa, Artificial Sequence
  Non-cyclic GFR-binding peptide
  MOD_RES (1), (3), (36), (37): Xaa is C or S
  MOD_RES (14), (15), (16), (17), (18): Xaa is A or G
  MOD_RES (19), (20), (21), (22): Xaa is A or G or is absent
XGXEEVIMSMEGIXXXXXXXXXMIQMTINSTKVPAXXTSPVR

SEQ ID NO: 35437 - protein, 34 aa, Artificial Sequence
  Non-cyclic GFR-binding peptide
  MOD_RES (2), (2): Xaa is C or S
  MOD_RES (13), (14), (15), (16), (17): Xaa is A or G
  MOD_RES (18), (19), (20), (21): Xaa is A or G or is absent
GXEEVIMSMEGIXXXXXXXXXMIQMTINSTKVPA

SEQ ID NO: 35438 - protein, 32 aa, Artificial Sequence
  Non-cyclic GFR-binding peptide
  MOD_RES (32), (32): Xaa is C or S
AEVVMDSMEGIVVNNAADMIQITINSLRAPVX

SEQ ID NO: 35439 - protein, 34 aa, Artificial Sequence
  Non-cyclic GFR-binding peptide
  MOD_RES (1), (3), (34): Xaa is C or S
XKXSKVVMSMEGLVKPTRGVMIQITINSLDQPVX

SEQ ID NO: 35440 - protein, 39 aa, Artificial Sequence
  Non-cyclic GFR-binding peptide
  MOD_RES (33), (34): Xaa is C or S
  MOD_RES (11), (12), (13), (14), (15): Xaa is A or G
  MOD_RES (16), (17), (18), (19): Xaa is A or G or is absent
SKVIMSMEGLXXXXXXXXXMIQITINSLDQSVXXPSASA

SEQ ID NO: 35441 - protein, 36 aa, Artificial Sequence
  Non-cyclic GFR-binding peptide
  MOD_RES (34), (35): Xaa is C or S
  MOD_RES (12), (13), (14), (15), (16): Xaa is A or G
  MOD_RES (17), (18), (19), (20): Xaa is A or G or is absent
RDVVMGSMEGIXXXXXXXXXMIQMTINSMKTPTXXP

SEQ ID NO: 35442 - protein, 35 aa, Artificial Sequence
  Non-cyclic GFR-binding peptide
  MOD_RES (2), (2): Xaa is C or S
  MOD_RES (14), (15), (16), (17), (18): Xaa is A or G
  MOD_RES (19), (20), (21), (22): Xaa is A or G or is absent
GXRDVVMGSMEGLXXXXXXXXXMIQMTINSMKTPT

SEQ ID NO: 35443 - protein, 38 aa, Artificial Sequence
  Non-cyclic GFR-binding peptide
  MOD_RES (33), (34): Xaa is C or S
  MOD_RES (11), (12), (13), (14), (15): Xaa is A or G
  MOD_RES (16), (17), (18), (19): Xaa is A or G or is absent
SKVVMSMEGLXXXXXXXXXMIQITINSLDQPVXXPSAS

SEQ ID NO: 35444 - protein, 34 aa, Artificial Sequence
  Non-cyclic GFR-binding peptide
  MOD_RES (1), (34): Xaa is C or S
  MOD_RES (12), (13), (14), (15), (16): Xaa is A or G
  MOD_RES (17), (18), (19), (20): Xaa is A or G or is absent
XSRVIMSMEGLXXXXXXXXXMIQITINSLAQPVX

SEQ ID NO: 35445 - protein, 35 aa, Artificial Sequence
  Non-cyclic GFR-binding peptide
  MOD_RES (2), (35): Xaa is C or S
  MOD_RES (13), (14), (15), (16), (17): Xaa is A or G
  MOD_RES (18), (19), (20), (21): Xaa is A or G or is absent
KXSKVVMSMEGLXXXXXXXXXMIQITINSLDQPVX

SEQ ID NO: 35446 - protein, 41 aa, Artificial Sequence
  Non-cyclic GFR-binding peptide
  MOD_RES (2), (4), (35), (36): Xaa is C or S
SXKXSRVIMSMEGLVKPKRGVMIQITINSLAQPVXXPAASA

SEQ ID NO: 35447 - protein, 44 aa, Artificial Sequence
  Non-cyclic GFR-binding peptide
  MOD_RES (2), (4), (38), (39): Xaa is C or S
  MOD_RES (16), (17), (18), (19), (20): Xaa is A or G
  MOD_RES (21), (22), (23), (24): Xaa is A or G or is absent
RXGXAEVVMDSMEGLXXXXXXXXXMIQITINSLRAPVXXSAPAA

SEQ ID NO: 35448 - protein, 38 aa, Artificial Sequence
  Non-cyclic GFR-binding peptide
  MOD_RES (2), (4), (38): Xaa is C or S
  MOD_RES (16), (17), (18), (19), (20): Xaa is A or G
  MOD_RES (21), (22), (23), (24): Xaa is A or G or is absent
RXGXSEVVMDSMEGLXXXXXXXXXMIQITINSLRTPVX

SEQ ID NO: 35449 - protein, 38 aa, Artificial Sequence
  Non-cyclic GFR-binding peptide
  MOD_RES (2), (4), (38): Xaa is C or S
  MOD_RES (16), (17), (18), (19), (20): Xaa is A or G
  MOD_RES (21), (22), (23), (24): Xaa is A or G or is absent
RXGXSEVVMDSMEGIXXXXXXXXXMIQITINSLRTPVX

SEQ ID NO: 35450 - protein, 42 aa, Artificial Sequence
  Non-cyclic GFR-binding peptide
  MOD_RES (2), (36), (37): Xaa is C or S
  MOD_RES (14), (15), (16), (17), (18): Xaa is A or G
  MOD_RES (19), (20), (21), (22): Xaa is A or G or is absent
GXSRVVMNSMEGIXXXXXXXXXMIQVTINSLKTPAXXPKPVH

SEQ ID NO: 35451 - protein, 35 aa, Artificial Sequence
  Non-cyclic GFR-binding peptide
  MOD_RES (34), (35): Xaa is C or S
  MOD_RES (12), (13), (14), (15), (16): Xaa is A or G
  MOD_RES (17), (18), (19), (20): Xaa is A or G or is absent
RDVVMGSMEGLXXXXXXXXXMIQMTINSMKTPTXX

SEQ ID NO: 35452 - protein, 33 aa, Artificial Sequence
  Non-cyclic GFR-binding peptide
  MOD_RES (2), (2): Xaa is C or S
GXSEVVMDSMEGLVVNNASDMIQITINSLRTPV

SEQ ID NO: 35453 - protein, 40 aa, Artificial Sequence
  Non-cyclic GFR-binding peptide
  MOD_RES (1), (34), (35): Xaa is C or S
  MOD_RES (12), (13), (14), (15), (16): Xaa is A or G
  MOD_RES (17), (18), (19), (20): Xaa is A or G or is absent
XSKVIMSMEGLXXXXXXXXXMIQITINSLDQSVXXPSASA

SEQ ID NO: 35454 - protein, 40 aa, Artificial Sequence
  Non-cyclic GFR-binding peptide
  MOD_RES (2), (4), (38), (39): Xaa is C or S
  MOD_RES (16), (17), (18), (19), (20): Xaa is A or G
  MOD_RES (21), (22), (23), (24): Xaa is A or G or is absent
HXGXSRVVMNSMEGLXXXXXXXXXMIQVTINSLKTPAXXP

SEQ ID NO: 35455 - protein, 32 aa, Artificial Sequence
  Non-cyclic GFR-binding peptide
  MOD_RES (31), (32): Xaa is C or S
EEVIMSMEGLLLVRGNDMIQMTINSTKVPAXX

SEQ ID NO: 35456 - protein, 37 aa, Artificial Sequence
  Non-cyclic GFR-binding peptide
  MOD_RES (33), (34): Xaa is C or S
  MOD_RES (11), (12), (13), (14), (15): Xaa is A or G
  MOD_RES (16), (17), (18), (19): Xaa is A or G or is absent
EEVIMSMEGIXXXXXXXXXMIQMTINSTKVPAXXTSP

SEQ ID NO: 35457 - protein, 34 aa, Artificial Sequence
  Non-cyclic GFR-binding peptide
  MOD_RES (2), (4): Xaa is C or S
SXKXSRVIMSMEGLVKPKRGVMIQITINSLAQPV

SEQ ID NO: 35458 - protein, 33 aa, Artificial Sequence
  Non-cyclic GFR-binding peptide
  MOD_RES (31), (32): Xaa is C or S
RVVMNSMEGLIVNSSDDMIQVTINSLKTPAXXP

SEQ ID NO: 35459 - protein, 43 aa, Artificial Sequence
  Non-cyclic GFR-binding peptide
  MOD_RES (2), (4), (38), (39): Xaa is C or S
  MOD_RES (16), (17), (18), (19), (20): Xaa is A or G
  MOD_RES (21), (22), (23), (24): Xaa is A or G or is absent
HXGXSRVVMNSMEGLXXXXXXXXXMIQVTINSLKTPAXXPKPV

SEQ ID NO: 35460 - protein, 33 aa, Artificial Sequence
  Non-cyclic GFR-binding peptide
  MOD_RES (33), (33): Xaa is C or S
  MOD_RES (11), (12), (13), (14), (15): Xaa is A or G
  MOD_RES (16), (17), (18), (19): Xaa is A or G or is absent
EVVMDSMEGLXXXXXXXXXMIQITINSLRAPVX

SEQ ID NO: 35461 - protein, 38 aa, Artificial Sequence
  Non-cyclic GFR-binding peptide
  MOD_RES (2), (36), (37): Xaa is C or S
  MOD_RES (14), (15), (16), (17), (18): Xaa is A or G
  MOD_RES (19), (20), (21), (22): Xaa is A or G or is absent
GXSRVVMNSMEGLXXXXXXXXXMIQVTINSLKTPAXXP

SEQ ID NO: 35462 - protein, 40 aa, Artificial Sequence
  Non-cyclic GFR-binding peptide
  MOD_RES (2), (34), (35): Xaa is C or S
GXSRVVMNSMEGIIVNSSDDMIQVTINSLKTPAXXPKPVH

SEQ ID NO: 35463 - protein, 40 aa, Artificial Sequence
  Non-cyclic GFR-binding peptide
  MOD_RES (2), (36), (37): Xaa is C or S
  MOD_RES (14), (15), (16), (17), (18): Xaa is A or G
  MOD_RES (19), (20), (21), (22): Xaa is A or G or is absent
GXSEVVMDSMEGLXXXXXXXXXMIQITINSLRTPVXXTPP

SEQ ID NO: 35464 - protein, 38 aa, Artificial Sequence
  Non-cyclic GFR-binding peptide
  MOD_RES (33), (34): Xaa is C or S
  MOD_RES (11), (12), (13), (14), (15): Xaa is A or G
  MOD_RES (16), (17), (18), (19): Xaa is A or G or is absent
EEVIMSMEGLXXXXXXXXXMIQMTINSTKVPAXXTSPV

SEQ ID NO: 35465 - protein, 34 aa, Artificial Sequence
  Non-cyclic GFR-binding peptide
  MOD_RES (34), (34): Xaa is C or S
  MOD_RES (12), (13), (14), (15), (16): Xaa is A or G
  MOD_RES (17), (18), (19), (20): Xaa is A or G or is absent
AEVVMDSMEGIXXXXXXXXXMIQITINSLRAPVX

SEQ ID NO: 35466 - protein, 33 aa, Artificial Sequence
  Non-cyclic GFR-binding peptide
  MOD_RES (1), (3): Xaa is C or S
XKXSRVIMSMEGLVKPKRGVMIQITINSLAQPV

SEQ ID NO: 35467 - protein, 42 aa, Artificial Sequence
  Non-cyclic GFR-binding peptide
  MOD_RES (2), (4), (36), (37): Xaa is C or S
HXGXSRVVMNSMEGLIVNSSDDMIQVTINSLKTPAXXPKPVH

SEQ ID NO: 35468 - protein, 33 aa, Artificial Sequence
  Non-cyclic GFR-binding peptide
  MOD_RES (1), (3): Xaa is C or S
XKXSKVIMSMEGLIKPTKGIMIQITINSLDQSV

SEQ ID NO: 35469 - protein, 37 aa, Artificial Sequence
  Non-cyclic GFR-binding peptide
  MOD_RES (1), (3), (37): Xaa is C or S
  MOD_RES (15), (16), (17), (18), (19): Xaa is A or G
  MOD_RES (20), (21), (22), (23): Xaa is A or G or is absent
XGXSEVVMDSMEGIXXXXXXXXXMIQITINSLRTPVX

SEQ ID NO: 35470 - protein, 39 aa, Artificial Sequence
  Non-cyclic GFR-binding peptide
  MOD_RES (2), (33), (34): Xaa is C or S
KXSRVIMSMEGLVKPKRGVMIQITINSLAQPVXXPAASA

SEQ ID NO: 35471 - protein, 38 aa, Artificial Sequence
  Non-cyclic GFR-binding peptide
  MOD_RES (1), (33), (34): Xaa is C or S
XAEVVMDSMEGIVVNNAADMIQITINSLRAPVXXSAPA

SEQ ID NO: 35472 - protein, 35 aa, Artificial Sequence
  Non-cyclic GFR-binding peptide
  MOD_RES (1), (3): Xaa is C or S
  MOD_RES (14), (15), (16), (17), (18): Xaa is A or G
  MOD_RES (19), (20), (21), (22): Xaa is A or G or is absent
XKXSRVIMSMEGLXXXXXXXXXMIQITINSLAQPV

SEQ ID NO: 35473 - protein, 37 aa, Artificial Sequence
  Non-cyclic GFR-binding peptide
  MOD_RES (2), (35), (36): Xaa is C or S
  MOD_RES (13), (14), (15), (16), (17): Xaa is A or G
  MOD_RES (18), (19), (20), (21): Xaa is A or G or is absent
GXEEVIMSMEGLXXXXXXXXXMIQMTINSTKVPAXXT

SEQ ID NO: 35474 - protein, 32 aa, Artificial Sequence
  Non-cyclic GFR-binding peptide
  MOD_RES (2), (2): Xaa is C or S
KXSRVIMSMEGLVKPKRGVMIQITINSLAQPV

SEQ ID NO: 35475 - protein, 42 aa, Artificial Sequence
  Non-cyclic GFR-binding peptide
  MOD_RES (2), (4), (38), (39): Xaa is C or S
  MOD_RES (16), (17), (18), (19), (20): Xaa is A or G
  MOD_RES (21), (22), (23), (24): Xaa is A or G or is absent
RXGXAEVVMDSMEGLXXXXXXXXXMIQITINSLRAPVXXSAP

SEQ ID NO: 35476 - protein, 31 aa, Artificial Sequence
  Non-cyclic GFR-binding peptide
  MOD_RES (31), (31): Xaa is C or S
SRVIMSMEGLVKPKRGVMIQITINSLAQPVX

SEQ ID NO: 35477 - protein, 35 aa, Artificial Sequence
  Non-cyclic GFR-binding peptide
  MOD_RES (2), (2): Xaa is C or S
  MOD_RES (14), (15), (16), (17), (18): Xaa is A or G
  MOD_RES (19), (20), (21), (22): Xaa is A or G or is absent
GXSEVVMDSMEGLXXXXXXXXXMIQITINSLRTPV

SEQ ID NO: 35478 - protein, 34 aa, Artificial Sequence
  Non-cyclic GFR-binding peptide
  MOD_RES (1), (34): Xaa is C or S
  MOD_RES (12), (13), (14), (15), (16): Xaa is A or G
  MOD_RES (17), (18), (19), (20): Xaa is A or G or is absent
XEEVIMSMEGLXXXXXXXXXMIQMTINSTKVPAX

SEQ ID NO: 35479 - protein, 34 aa, Artificial Sequence
  Non-cyclic GFR-binding peptide
  MOD_RES (32), (33): Xaa is C or S
AEVVMDSMEGLVVNNAADMIQITINSLRAPVXXS

SEQ ID NO: 35480 - protein, 31 aa, Artificial Sequence
  Non-cyclic GFR-binding peptide
RDVVMGSMEGIIIQQKDNMIQMTINSMKTPT

SEQ ID NO: 35481 - protein, 39 aa, Artificial Sequence
  Non-cyclic GFR-binding peptide
  MOD_RES (2), (4), (36), (37): Xaa is C or S
RXGXAEVVMDSMEGLVVNNAADMIQITINSLRAPVXXSA

SEQ ID NO: 35482 - protein, 40 aa, Artificial Sequence
  Non-cyclic GFR-binding peptide
  MOD_RES (2), (34), (35): Xaa is C or S
GXSEVVMDSMEGIVVNNASDMIQITINSLRTPVXXTPPTS

SEQ ID NO: 35483 - protein, 37 aa, Artificial Sequence
  Non-cyclic GFR-binding peptide
  MOD_RES (1), (33), (34): Xaa is C or S
XSEVVMDSMEGLVVNNASDMIQITINSLRTPVXXTPP

SEQ ID NO: 35484 - protein, 35 aa, Artificial Sequence
  Non-cyclic GFR-binding peptide
  MOD_RES (32), (33): Xaa is C or S
RDVVMGSMEGLIIQQKDNMIQMTINSMKTPTXXPG

SEQ ID NO: 35485 - protein, 36 aa, Artificial Sequence
  Non-cyclic GFR-binding peptide
  MOD_RES (1), (3), (34), (35): Xaa is C or S
XGXEEVIMSMEGILLVRGNDMIQMTINSTKVPAXXT

SEQ ID NO: 35486 - protein, 38 aa, Artificial Sequence
  Non-cyclic GFR-binding peptide
  MOD_RES (32), (33): Xaa is C or S
RDVVMGSMEGIIIQQKDNMIQMTINSMKTPTXXPGASG

SEQ ID NO: 35487 - protein, 37 aa, Artificial Sequence
  Non-cyclic GFR-binding peptide
  MOD_RES (2), (4), (36), (37): Xaa is C or S
RXGXAEVVMDSMEGIVVNNAADMIQITINSLRAPVXX

SEQ ID NO: 35488 - protein, 37 aa, Artificial Sequence
  Non-cyclic GFR-binding peptide
  MOD_RES (2), (4), (36), (37): Xaa is C or S
RXGXAEVVMDSMEGLVVNNAADMIQITINSLRAPVXX

SEQ ID NO: 35489 - protein, 35 aa, Artificial Sequence
  Non-cyclic GFR-binding peptide
  MOD_RES (1), (33), (34): Xaa is C or S
XAEVVMDSMEGIVVNNAADMIQITINSLRAPVXXS

SEQ ID NO: 35490 - protein, 38 aa, Artificial Sequence
  Non-cyclic GFR-binding peptide
  MOD_RES (2), (4), (37), (38): Xaa is C or S
  MOD_RES (15), (16), (17), (18), (19): Xaa is A or G
  MOD_RES (20), (21), (22), (23): Xaa is A or G or is absent
LXGXEEVIMSMEGLXXXXXXXXXMIQMTINSTKVPAXX

SEQ ID NO: 35491 - protein, 36 aa, Artificial Sequence
  Non-cyclic GFR-binding peptide
  MOD_RES (1), (32), (33): Xaa is C or S
XEEVIMSMEGLLLVRGNDMIQMTINSTKVPAXXTSP

SEQ ID NO: 35492 - protein, 40 aa, Artificial Sequence
  Non-cyclic GFR-binding peptide
  MOD_RES (1), (35), (36): Xaa is C or S
  MOD_RES (13), (14), (15), (16), (17): Xaa is A or G
  MOD_RES (18), (19), (20), (21): Xaa is A or G or is absent
XRDVVMGSMEGLXXXXXXXXXMIQMTINSMKTPTXXPGAS

SEQ ID NO: 35493 - protein, 42 aa, Artificial Sequence
  Non-cyclic GFR-binding peptide
  MOD_RES (1), (3), (36), (37): Xaa is C or S
  MOD_RES (14), (15), (16), (17), (18): Xaa is A or G
  MOD_RES (19), (20), (21), (22): Xaa is A or G or is absent
XKXSRVIMSMEGLXXXXXXXXXMIQITINSLAQPVXXPAASA

SEQ ID NO: 35494 - protein, 35 aa, Artificial Sequence
  Non-cyclic GFR-binding peptide
  MOD_RES (1), (33), (34): Xaa is C or S
XSEVVMDSMEGLVVNNASDMIQITINSLRTPVXXT

SEQ ID NO: 35495 - protein, 37 aa, Artificial Sequence
  Non-cyclic GFR-binding peptide
  MOD_RES (31), (32): Xaa is C or S
SKVVMSMEGLVKPTRGVMIQITINSLDQPVXXPSASA

SEQ ID NO: 35496 - protein, 35 aa, Artificial Sequence
  Non-cyclic GFR-binding peptide
  MOD_RES (2), (34), (35): Xaa is C or S
GXRDVVMGSMEGIIIQQKDNMIQMTINSMKTPTXX

SEQ ID NO: 35497 - protein, 36 aa, Artificial Sequence
  Non-cyclic GFR-binding peptide
  MOD_RES (1), (3), (34), (35): Xaa is C or S
XGXEEVIMSMEGLLLVRGNDMIQMTINSTKVPAXXT

SEQ ID NO: 35498 - protein, 40 aa, Artificial Sequence
  Non-cyclic GFR-binding peptide
  MOD_RES (1), (3), (34), (35): Xaa is C or S
XKXSKVVMSMEGLVKPTRGVMIQITINSLDQPVXXPSASA

SEQ ID NO: 35499 - protein, 39 aa, Artificial Sequence
  Non-cyclic GFR-binding peptide
  MOD_RES (1), (3), (35), (36): Xaa is C or S
XGXRDVVMGSMEGLIIQQKDNMIQMTINSMKTPTXXPGA

SEQ ID NO: 35500 - protein, 34 aa, Artificial Sequence
  Non-cyclic GFR-binding peptide
  MOD_RES (1), (32), (33): Xaa is C or S
XSKVIMSMEGLIKPTKGIMIQITINSLDQSVXXP

SEQ ID NO: 35501 - protein, 38 aa, Artificial Sequence
  Non-cyclic GFR-binding peptide
  MOD_RES (1), (3), (37), (38): Xaa is C or S
  MOD_RES (15), (16), (17), (18), (19): Xaa is A or G
  MOD_RES (20), (21), (22), (23): Xaa is A or G or is absent
XGXRDVVMGSMEGLXXXXXXXXXMIQMTINSMKTPTXX

SEQ ID NO: 35502 - protein, 33 aa, Artificial Sequence
  Non-cyclic GFR-binding peptide
  MOD_RES (31), (32): Xaa is C or S
SKVIMSMEGLIKPTKGIMIQITINSLDQSVXXP

SEQ ID NO: 35503 - protein, 39 aa, Artificial Sequence
  Non-cyclic GFR-binding peptide
  MOD_RES (2), (35), (36): Xaa is C or S
  MOD_RES (13), (14), (15), (16), (17): Xaa is A or G
  MOD_RES (18), (19), (20), (21): Xaa is A or G or is absent
GXEEVIMSMEGLXXXXXXXXXMIQMTINSTKVPAXXTSP

SEQ ID NO: 35504 - protein, 37 aa, Artificial Sequence
  Non-cyclic GFR-binding peptide
  MOD_RES (34), (35): Xaa is C or S
  MOD_RES (12), (13), (14), (15), (16): Xaa is A or G
  MOD_RES (17), (18), (19), (20): Xaa is A or G or is absent
SEVVMDSMEGIXXXXXXXXXMIQITINSLRTPVXXTP

SEQ ID NO: 35505 - protein, 39 aa, Artificial Sequence
  Non-cyclic GFR-binding peptide
  MOD_RES (34), (35): Xaa is C or S
  MOD_RES (12), (13), (14), (15), (16): Xaa is A or G
  MOD_RES (17), (18), (19), (20): Xaa is A or G or is absent
SEVVMDSMEGIXXXXXXXXXMIQITINSLRTPVXXTPPT

SEQ ID NO: 35506 - protein, 39 aa, Artificial Sequence
  Non-cyclic GFR-binding peptide
  MOD_RES (2), (35), (36): Xaa is C or S
  MOD_RES (13), (14), (15), (16), (17): Xaa is A or G
  MOD_RES (18), (19), (20), (21): Xaa is A or G or is absent
GXEEVIMSMEGIXXXXXXXXXMIQMTINSTKVPAXXTSP

SEQ ID NO: 35507 - protein, 39 aa, Artificial Sequence
  Non-cyclic GFR-binding peptide
  MOD_RES (34), (35): Xaa is C or S
  MOD_RES (12), (13), (14), (15), (16): Xaa is A or G
  MOD_RES (17), (18), (19), (20): Xaa is A or G or is absent
SRVVMNSMEGLXXXXXXXXXMIQVTINSLKTPAXXPKPV

SEQ ID NO: 35508 - protein, 35 aa, Artificial Sequence
  Non-cyclic GFR-binding peptide
  MOD_RES (33), (34): Xaa is C or S
  MOD_RES (11), (12), (13), (14), (15): Xaa is A or G
  MOD_RES (16), (17), (18), (19): Xaa is A or G or is absent
SRVIMSMEGLXXXXXXXXXMIQITINSLAQPVXXP

SEQ ID NO: 35509 - protein, 34 aa, Artificial Sequence
  Non-cyclic GFR-binding peptide
  MOD_RES (1), (3): Xaa is C or S
XGXAEVVMDSMEGLVVNNAADMIQITINSLRAPV

SEQ ID NO: 35510 - protein, 37 aa, Artificial Sequence
  Non-cyclic GFR-binding peptide
  MOD_RES (2), (33), (34): Xaa is C or S
GXEEVIMSMEGLLLVRGNDMIQMTINSTKVPAXXTSP

SEQ ID NO: 35511 - protein, 39 aa, Artificial Sequence
  Non-cyclic GFR-binding peptide
  MOD_RES (1), (3), (37), (38): Xaa is C or S
  MOD_RES (15), (16), (17), (18), (19): Xaa is A or G
  MOD_RES (20), (21), (22), (23): Xaa is A or G or is absent
XGXRDVVMGSMEGLXXXXXXXXXMIQMTINSMKTPTXXP

SEQ ID NO: 35512 - protein, 36 aa, Artificial Sequence
  Non-cyclic GFR-binding peptide
  MOD_RES (1), (34), (35): Xaa is C or S
  MOD_RES (12), (13), (14), (15), (16): Xaa is A or G
  MOD_RES (17), (18), (19), (20): Xaa is A or G or is absent
XSRVIMSMEGLXXXXXXXXXMIQITINSLAQPVXXP

SEQ ID NO: 35513 - protein, 41 aa, Artificial Sequence
  Non-cyclic GFR-binding peptide
  MOD_RES (2), (4), (36), (37): Xaa is C or S
RXGXAEVVMDSMEGLVVNNAADMIQITINSLRAPVXXSAPA

SEQ ID NO: 35514 - protein, 35 aa, Artificial Sequence
  Non-cyclic GFR-binding peptide
  MOD_RES (32), (33): Xaa is C or S
AEVVMDSMEGLVVNNAADMIQITINSLRAPVXXSA

SEQ ID NO: 35515 - protein, 35 aa, Artificial Sequence
  Non-cyclic GFR-binding peptide
  MOD_RES (2), (33), (34): Xaa is C or S
KXSRVIMSMEGLVKPKRGVMIQITINSLAQPVXXP

SEQ ID NO: 35516 - protein, 38 aa, Artificial Sequence
  Non-cyclic GFR-binding peptide
  MOD_RES (2), (4), (38): Xaa is C or S
  MOD_RES (16), (17), (18), (19), (20): Xaa is A or G
  MOD_RES (21), (22), (23), (24): Xaa is A or G or is absent
SXGXRDVVMGSMEGLXXXXXXXXXMIQMTINSMKTPTX

SEQ ID NO: 35517 - protein, 40 aa, Artificial Sequence
  Non-cyclic GFR-binding peptide
  MOD_RES (2), (36), (37): Xaa is C or S
  MOD_RES (14), (15), (16), (17), (18): Xaa is A or G
  MOD_RES (19), (20), (21), (22): Xaa is A or G or is absent
GXSEVVMDSMEGIXXXXXXXXXMIQITINSLRTPVXXTPP

SEQ ID NO: 35518 - protein, 35 aa, Artificial Sequence
  Non-cyclic GFR-binding peptide
  MOD_RES (32), (33): Xaa is C or S
SRVVMNSMEGLIVNSSDDMIQVTINSLKTPAXXPK

SEQ ID NO: 35519 - protein, 41 aa, Artificial Sequence
  Non-cyclic GFR-binding peptide
  MOD_RES (1), (3), (37), (38): Xaa is C or S
  MOD_RES (15), (16), (17), (18), (19): Xaa is A or G
  MOD_RES (20), (21), (22), (23): Xaa is A or G or is absent
XGXAEVVMDSMEGLXXXXXXXXXMIQITINSLRAPVXXSAP

SEQ ID NO: 35520 - protein, 38 aa, Artificial Sequence
  Non-cyclic GFR-binding peptide
  MOD_RES (32), (33): Xaa is C or S
SRVVMNSMEGLIVNSSDDMIQVTINSLKTPAXXPKPVH

SEQ ID NO: 35521 - protein, 41 aa, Artificial Sequence
  Non-cyclic GFR-binding peptide
  MOD_RES (1), (35), (36): Xaa is C or S
  MOD_RES (13), (14), (15), (16), (17): Xaa is A or G
  MOD_RES (18), (19), (20), (21): Xaa is A or G or is absent
XSEVVMDSMEGLXXXXXXXXXMIQITINSLRTPVXXTPPTS

SEQ ID NO: 35522 - protein, 37 aa, Artificial Sequence
  Non-cyclic GFR-binding peptide
  MOD_RES (1), (3), (37): Xaa is C or S
  MOD_RES (15), (16), (17), (18), (19): Xaa is A or G
  MOD_RES (20), (21), (22), (23): Xaa is A or G or is absent
XGXSRVVMNSMEGLXXXXXXXXXMIQVTINSLKTPAX

SEQ ID NO: 35523 - protein, 39 aa, Artificial Sequence
  Non-cyclic GFR-binding peptide
  MOD_RES (2), (4), (37), (38): Xaa is C or S
  MOD_RES (15), (16), (17), (18), (19): Xaa is A or G
  MOD_RES (20), (21), (22), (23): Xaa is A or G or is absent
SXKXSKVIMSMEGLXXXXXXXXXMIQITINSLDQSVXXP

SEQ ID NO: 35524 - protein, 35 aa, Artificial Sequence
  Non-cyclic GFR-binding peptide
  MOD_RES (31), (32): Xaa is C or S
EVVMDSMEGLVVNNASDMIQITINSLRTPVXXTPP

SEQ ID NO: 35525 - protein, 36 aa, Artificial Sequence
  Non-cyclic GFR-binding peptide
  MOD_RES (2), (35), (36): Xaa is C or S
  MOD_RES (13), (14), (15), (16), (17): Xaa is A or G
  MOD_RES (18), (19), (20), (21): Xaa is A or G or is absent
KXSKVVMSMEGLXXXXXXXXXMIQITINSLDQPVXX

SEQ ID NO: 35526 - protein, 38 aa, Artificial Sequence
  Non-cyclic GFR-binding peptide
  MOD_RES (1), (32), (33): Xaa is C or S
XEEVIMSMEGLLLVRGNDMIQMTINSTKVPAXXTSPVR

SEQ ID NO: 35527 - protein, 37 aa, Artificial Sequence
  Non-cyclic GFR-binding peptide
  MOD_RES (1), (3), (35), (36): Xaa is C or S
XGXAEVVMDSMEGIVVNNAADMIQITINSLRAPVXXS

SEQ ID NO: 35528 - protein, 35 aa, Artificial Sequence
  Non-cyclic GFR-binding peptide
  MOD_RES (2), (33), (34): Xaa is C or S
KXSKVIMSMEGLIKPTKGIMIQITINSLDQSVXXP

SEQ ID NO: 35529 - protein, 36 aa, Artificial Sequence
  Non-cyclic GFR-binding peptide
  MOD_RES (1), (33), (34): Xaa is C or S
XAEVVMDSMEGIVVNNAADMIQITINSLRAPVXXSA

SEQ ID NO: 35530 - protein, 31 aa, Artificial Sequence
  Non-cyclic GFR-binding peptide
AEVVMDSMEGIVVNNAADMIQITINSLRAPV

SEQ ID NO: 35531 - protein, 44 aa, Artificial Sequence
  Non-cyclic GFR-binding peptide
  MOD_RES (2), (4), (38), (39): Xaa is C or S
  MOD_RES (16), (17), (18), (19), (20): Xaa is A or G
  MOD_RES (21), (22), (23), (24): Xaa is A or G or is absent
RXGXSEVVMDSMEGLXXXXXXXXXMIQITINSLRTPVXXTPPTS

SEQ ID NO: 35532 - protein, 36 aa, Artificial Sequence
  Non-cyclic GFR-binding peptide
  MOD_RES (2), (34), (35): Xaa is C or S
GXSRVVMNSMEGLIVNSSDDMIQVTINSLKTPAXXP

SEQ ID NO: 35533 - protein, 38 aa, Artificial Sequence
  Non-cyclic GFR-binding peptide
  MOD_RES (33), (34): Xaa is C or S
  MOD_RES (11), (12), (13), (14), (15): Xaa is A or G
  MOD_RES (16), (17), (18), (19): Xaa is A or G or is absent
DVVMGSMEGLXXXXXXXXXMIQMTINSMKTPTXXPGAS

SEQ ID NO: 35534 - protein, 34 aa, Artificial Sequence
  Non-cyclic GFR-binding peptide
  MOD_RES (33), (34): Xaa is C or S
  MOD_RES (11), (12), (13), (14), (15): Xaa is A or G
  MOD_RES (16), (17), (18), (19): Xaa is A or G or is absent
EEVIMSMEGLXXXXXXXXXMIQMTINSTKVPAXX

SEQ ID NO: 35535 - protein, 39 aa, Artificial Sequence
  Non-cyclic GFR-binding peptide
  MOD_RES (2), (36), (37): Xaa is C or S
  MOD_RES (14), (15), (16), (17), (18): Xaa is A or G
  MOD_RES (19), (20), (21), (22): Xaa is A or G or is absent
GXSEVVMDSMEGLXXXXXXXXXMIQITINSLRTPVXXTP

SEQ ID NO: 35536 - protein, 31 aa, Artificial Sequence
  Non-cyclic GFR-binding peptide
  MOD_RES (1), (1): Xaa is C or S
XEEVIMSMEGLLLVRGNDMIQMTINSTKVPA

SEQ ID NO: 35537 - protein, 38 aa, Artificial Sequence
  Non-cyclic GFR-binding peptide
  MOD_RES (2), (33), (34): Xaa is C or S
GXEEVIMSMEGLLLVRGNDMIQMTINSTKVPAXXTSPV

SEQ ID NO: 35538 - protein, 39 aa, Artificial Sequence
  Non-cyclic GFR-binding peptide
  MOD_RES (2), (36), (37): Xaa is C or S
  MOD_RES (14), (15), (16), (17), (18): Xaa is A or G
  MOD_RES (19), (20), (21), (22): Xaa is A or G or is absent
GXSEVVMDSMEGIXXXXXXXXXMIQITINSLRTPVXXTP

SEQ ID NO: 35539 - protein, 33 aa, Artificial Sequence
  Non-cyclic GFR-binding peptide
  MOD_RES (31), (32): Xaa is C or S
SKVVMSMEGLVKPTRGVMIQITINSLDQPVXXP

SEQ ID NO: 35540 - protein, 37 aa, Artificial Sequence
  Non-cyclic GFR-binding peptide
  MOD_RES (1), (33), (34): Xaa is C or S
XSRVVMNSMEGLIVNSSDDMIQVTINSLKTPAXXPKP

SEQ ID NO: 35541 - protein, 38 aa, Artificial Sequence
  Non-cyclic GFR-binding peptide
  MOD_RES (34), (35): Xaa is C or S
  MOD_RES (12), (13), (14), (15), (16): Xaa is A or G
  MOD_RES (17), (18), (19), (20): Xaa is A or G or is absent
SEVVMDSMEGIXXXXXXXXXMIQITINSLRTPVXXTPP

SEQ ID NO: 35542 - protein, 34 aa, Artificial Sequence
  Non-cyclic GFR-binding peptide
  MOD_RES (33), (34): Xaa is C or S
  MOD_RES (11), (12), (13), (14), (15): Xaa is A or G
  MOD_RES (16), (17), (18), (19): Xaa is A or G or is absent
EVVMDSMEGIXXXXXXXXXMIQITINSLRTPVXX

SEQ ID NO: 35543 - protein, 41 aa, Artificial Sequence
  Non-cyclic GFR-binding peptide
  MOD_RES (2), (4), (36), (37): Xaa is C or S
RXGXSEVVMDSMEGLVVNNASDMIQITINSLRTPVXXTPPT

SEQ ID NO: 35544 - protein, 35 aa, Artificial Sequence
  Non-cyclic GFR-binding peptide
  MOD_RES (34), (35): Xaa is C or S
  MOD_RES (12), (13), (14), (15), (16): Xaa is A or G
  MOD_RES (17), (18), (19), (20): Xaa is A or G or is absent
SEVVMDSMEGLXXXXXXXXXMIQITINSLRTPVXX

SEQ ID NO: 35545 - protein, 41 aa, Artificial Sequence
  Non-cyclic GFR-binding peptide
  MOD_RES (2), (4), (38), (39): Xaa is C or S
  MOD_RES (16), (17), (18), (19), (20): Xaa is A or G
  MOD_RES (21), (22), (23), (24): Xaa is A or G or is absent
SXGXRDVVMGSMEGLXXXXXXXXXMIQMTINSMKTPTXXPG

SEQ ID NO: 35546 - protein, 40 aa, Artificial Sequence
  Non-cyclic GFR-binding peptide
  MOD_RES (2), (4), (36), (37): Xaa is C or S
SXGXRDVVMGSMEGIIIQQKDNMIQMTINSMKTPTXXPGA

SEQ ID NO: 35547 - protein, 34 aa, Artificial Sequence
  Non-cyclic GFR-binding peptide
  MOD_RES (34), (34): Xaa is C or S
  MOD_RES (12), (13), (14), (15), (16): Xaa is A or G
  MOD_RES (17), (18), (19), (20): Xaa is A or G or is absent
SEVVMDSMEGLXXXXXXXXXMIQITINSLRTPVX

SEQ ID NO: 35548 - protein, 40 aa, Artificial Sequence
  Non-cyclic GFR-binding peptide
  MOD_RES (2), (4), (37), (38): Xaa is C or S
  MOD_RES (15), (16), (17), (18), (19): Xaa is A or G
  MOD_RES (20), (21), (22), (23): Xaa is A or G or is absent
LXGXEEVIMSMEGLXXXXXXXXXMIQMTINSTKVPAXXTS

SEQ ID NO: 35549 - protein, 41 aa, Artificial Sequence
  Non-cyclic GFR-binding peptide
  MOD_RES (2), (4), (38), (39): Xaa is C or S
  MOD_RES (16), (17), (18), (19), (20): Xaa is A or G
  MOD_RES (21), (22), (23), (24): Xaa is A or G or is absent
RXGXAEVVMDSMEGIXXXXXXXXXMIQITINSLRAPVXXSA

SEQ ID NO: 35550 - protein, 33 aa, Artificial Sequence
  Non-cyclic GFR-binding peptide
  MOD_RES (1), (1): Xaa is C or S
  MOD_RES (12), (13), (14), (15), (16): Xaa is A or G
  MOD_RES (17), (18), (19), (20): Xaa is A or G or is absent
XSKVIMSMEGLXXXXXXXXXMIQITINSLDQSV

SEQ ID NO: 35551 - protein, 33 aa, Artificial Sequence
  Non-cyclic GFR-binding peptide
  MOD_RES (31), (32): Xaa is C or S
EVVMDSMEGIVVNNASDMIQITINSLRTPVXXT

SEQ ID NO: 35552 - protein, 41 aa, Artificial Sequence
  Non-cyclic GFR-binding peptide
  MOD_RES (1), (3), (35), (36): Xaa is C or S
XGXAEVVMDSMEGLVVNNAADMIQITINSLRAPVXXSAPAA

SEQ ID NO: 35553 - protein, 37 aa, Artificial Sequence
  Non-cyclic GFR-binding peptide
  MOD_RES (2), (35), (36): Xaa is C or S
  MOD_RES (13), (14), (15), (16), (17): Xaa is A or G
  MOD_RES (18), (19), (20), (21): Xaa is A or G or is absent
GXEEVIMSMEGIXXXXXXXXXMIQMTINSTKVPAXXT

SEQ ID NO: 35554 - protein, 38 aa, Artificial Sequence
  Non-cyclic GFR-binding peptide
  MOD_RES (1), (33), (34): Xaa is C or S
XSRVVMNSMEGLIVNSSDDMIQVTINSLKTPAXXPKPV

SEQ ID NO: 35555 - protein, 40 aa, Artificial Sequence
  Non-cyclic GFR-binding peptide
  MOD_RES (34), (35): Xaa is C or S
  MOD_RES (12), (13), (14), (15), (16): Xaa is A or G
  MOD_RES (17), (18), (19), (20): Xaa is A or G or is absent
SEVVMDSMEGIXXXXXXXXXMIQITINSLRTPVXXTPPTS

SEQ ID NO: 35556 - protein, 42 aa, Artificial Sequence
  Non-cyclic GFR-binding peptide
  MOD_RES (1), (3), (37), (38): Xaa is C or S
  MOD_RES (15), (16), (17), (18), (19): Xaa is A or G
  MOD_RES (20), (21), (22), (23): Xaa is A or G or is absent
XGXAEVVMDSMEGIXXXXXXXXXMIQITINSLRAPVXXSAPA

SEQ ID NO: 35557 - protein, 32 aa, Artificial Sequence
  Non-cyclic GFR-binding peptide
  MOD_RES (31), (32): Xaa is C or S
SKVIMSMEGLIKPTKGIMIQITINSLDQSVXX

SEQ ID NO: 35558 - protein, 36 aa, Artificial Sequence
  Non-cyclic GFR-binding peptide
  MOD_RES (2), (33), (34): Xaa is C or S
GXEEVIMSMEGILLVRGNDMIQMTINSTKVPAXXTS

SEQ ID NO: 35559 - protein, 38 aa, Artificial Sequence
  Non-cyclic GFR-binding peptide
  MOD_RES (2), (4), (36), (37): Xaa is C or S
SXGXRDVVMGSMEGLIIQQKDNMIQMTINSMKTPTXXP

SEQ ID NO: 35560 - protein, 35 aa, Artificial Sequence
  Non-cyclic GFR-binding peptide
  MOD_RES (1), (3), (35): Xaa is C or S
XGXSEVVMDSMEGIVVNNASDMIQITINSLRTPVX

SEQ ID NO: 35561 - protein, 41 aa, Artificial Sequence
  Non-cyclic GFR-binding peptide
  MOD_RES (1), (35), (36): Xaa is C or S
  MOD_RES (13), (14), (15), (16), (17): Xaa is A or G
  MOD_RES (18), (19), (20), (21): Xaa is A or G or is absent
XAEVVMDSMEGIXXXXXXXXXMIQITINSLRAPVXXSAPAA

SEQ ID NO: 35562 - protein, 36 aa, Artificial Sequence
  Non-cyclic GFR-binding peptide
  MOD_RES (1), (3): Xaa is C or S
  MOD_RES (15), (16), (17), (18), (19): Xaa is A or G
  MOD_RES (20), (21), (22), (23): Xaa is A or G or is absent
XGXRDVVMGSMEGLXXXXXXXXXMIQMTINSMKTPT

SEQ ID NO: 35563 - protein, 34 aa, Artificial Sequence
  Non-cyclic GFR-binding peptide
  MOD_RES (2), (34): Xaa is C or S
GXAEVVMDSMEGIVVNNAADMIQITINSLRAPVX

SEQ ID NO: 35564 - protein, 35 aa, Artificial Sequence
  Non-cyclic GFR-binding peptide
  MOD_RES (2), (4), (35): Xaa is C or S
SXKXSKVIMSMEGLIKPTKGIMIQITINSLDQSVX

SEQ ID NO: 35565 - protein, 34 aa, Artificial Sequence
  Non-cyclic GFR-binding peptide
  MOD_RES (1), (3): Xaa is C or S
XGXAEVVMDSMEGIVVNNAADMIQITINSLRAPV

SEQ ID NO: 35566 - protein, 37 aa, Artificial Sequence
  Non-cyclic GFR-binding peptide
  MOD_RES (2), (36), (37): Xaa is C or S
  MOD_RES (14), (15), (16), (17), (18): Xaa is A or G
  MOD_RES (19), (20), (21), (22): Xaa is A or G or is absent
GXSRVVMNSMEGLXXXXXXXXXMIQVTINSLKTPAXX

SEQ ID NO: 35567 - protein, 40 aa, Artificial Sequence
  Non-cyclic GFR-binding peptide
  MOD_RES (1), (3), (35), (36): Xaa is C or S
XGXSEVVMDSMEGIVVNNASDMIQITINSLRTPVXXTPPT

SEQ ID NO: 35568 - protein, 35 aa, Artificial Sequence
  Non-cyclic GFR-binding peptide
  MOD_RES (32), (33): Xaa is C or S
SEVVMDSMEGIVVNNASDMIQITINSLRTPVXXTP

SEQ ID NO: 35569 - protein, 38 aa, Artificial Sequence
  Non-cyclic GFR-binding peptide
  MOD_RES (33), (34): Xaa is C or S
  MOD_RES (11), (12), (13), (14), (15): Xaa is A or G
  MOD_RES (16), (17), (18), (19): Xaa is A or G or is absent
DVVMGSMEGIXXXXXXXXXMIQMTINSMKTPTXXPGAS

SEQ ID NO: 35570 - protein, 38 aa, Artificial Sequence
  Non-cyclic GFR-binding peptide
  MOD_RES (1), (3), (34), (35): Xaa is C or S
XKXSRVIMSMEGLVKPKRGVMIQITINSLAQPVXXPAA

SEQ ID NO: 35571 - protein, 39 aa, Artificial Sequence
  Non-cyclic GFR-binding peptide
  MOD_RES (2), (4), (37), (38): Xaa is C or S
  MOD_RES (15), (16), (17), (18), (19): Xaa is A or G
  MOD_RES (20), (21), (22), (23): Xaa is A or G or is absent
SXKXSKVVMSMEGLXXXXXXXXXMIQITINSLDQPVXXP

SEQ ID NO: 35572 - protein, 40 aa, Artificial Sequence
  Non-cyclic GFR-binding peptide
  MOD_RES (2), (4), (36), (37): Xaa is C or S
RXGXSEVVMDSMEGLVVNNASDMIQITINSLRTPVXXTPP

SEQ ID NO: 35573 - protein, 38 aa, Artificial Sequence
  Non-cyclic GFR-binding peptide
  MOD_RES (1), (3), (37), (38): Xaa is C or S
  MOD_RES (15), (16), (17), (18), (19): Xaa is A or G
  MOD_RES (20), (21), (22), (23): Xaa is A or G or is absent
XGXRDVVMGSMEGIXXXXXXXXXMIQMTINSMKTPTXX

SEQ ID NO: 35574 - protein, 37 aa, Artificial Sequence
  Non-cyclic GFR-binding peptide
  MOD_RES (2), (4), (37): Xaa is C or S
  MOD_RES (15), (16), (17), (18), (19): Xaa is A or G
  MOD_RES (20), (21), (22), (23): Xaa is A or G or is absent
LXGXEEVIMSMEGIXXXXXXXXXMIQMTINSTKVPAX

SEQ ID NO: 35575 - protein, 35 aa, Artificial Sequence
  Non-cyclic GFR-binding peptide
  MOD_RES (2), (35): Xaa is C or S
  MOD_RES (13), (14), (15), (16), (17): Xaa is A or G
  MOD_RES (18), (19), (20), (21): Xaa is A or G or is absent
KXSKVIMSMEGLXXXXXXXXXMIQITINSLDQSVX

SEQ ID NO: 35576 - protein, 35 aa, Artificial Sequence
  Non-cyclic GFR-binding peptide
  MOD_RES (33), (34): Xaa is C or S
  MOD_RES (11), (12), (13), (14), (15): Xaa is A or G
  MOD_RES (16), (17), (18), (19): Xaa is A or G or is absent
SKVIMSMEGLXXXXXXXXXMIQITINSLDQSVXXP

SEQ ID NO: 35577 - protein, 32 aa, Artificial Sequence
  Non-cyclic GFR-binding peptide
  MOD_RES (31), (32): Xaa is C or S
SKVVMSMEGLVKPTRGVMIQITINSLDQPVXX

SEQ ID NO: 35578 - protein, 35 aa, Artificial Sequence
  Non-cyclic GFR-binding peptide
  MOD_RES (2), (2): Xaa is C or S
  MOD_RES (14), (15), (16), (17), (18): Xaa is A or G
  MOD_RES (19), (20), (21), (22): Xaa is A or G or is absent
GXSEVVMDSMEGIXXXXXXXXXMIQITINSLRTPV

SEQ ID NO: 35579 - protein, 36 aa, Artificial Sequence
  Non-cyclic GFR-binding peptide
  MOD_RES (1), (3), (34), (35): Xaa is C or S
XKXSKVVMSMEGLVKPTRGVMIQITINSLDQPVXXP

SEQ ID NO: 35580 - protein, 37 aa, Artificial Sequence
  Non-cyclic GFR-binding peptide
  MOD_RES (2), (35), (36): Xaa is C or S
  MOD_RES (13), (14), (15), (16), (17): Xaa is A or G
  MOD_RES (18), (19), (20), (21): Xaa is A or G or is absent
KXSKVIMSMEGLXXXXXXXXXMIQITINSLDQSVXXP

SEQ ID NO: 35581 - protein, 36 aa, Artificial Sequence
  Non-cyclic GFR-binding peptide
  MOD_RES (1), (33), (34): Xaa is C or S
XSRVVMNSMEGLIVNSSDDMIQVTINSLKTPAXXPK

SEQ ID NO: 35582 - protein, 39 aa, Artificial Sequence
  Non-cyclic GFR-binding peptide
  MOD_RES (2), (34), (35): Xaa is C or S
GXSRVVMNSMEGLIVNSSDDMIQVTINSLKTPAXXPKPV

SEQ ID NO: 35583 - protein, 32 aa, Artificial Sequence
  Non-cyclic GFR-binding peptide
  MOD_RES (1), (32): Xaa is C or S
XEEVIMSMEGLLLVRGNDMIQMTINSTKVPAX

SEQ ID NO: 35584 - protein, 40 aa, Artificial Sequence
  Non-cyclic GFR-binding peptide
  MOD_RES (2), (4), (38), (39): Xaa is C or S
  MOD_RES (16), (17), (18), (19), (20): Xaa is A or G
  MOD_RES (21), (22), (23), (24): Xaa is A or G or is absent
RXGXSEVVMDSMEGIXXXXXXXXXMIQITINSLRTPVXXT

SEQ ID NO: 35585 - protein, 33 aa, Artificial Sequence
  Non-cyclic GFR-binding peptide
  MOD_RES (1), (32), (33): Xaa is C or S
XSKVVMSMEGLVKPTRGVMIQITINSLDQPVXX

SEQ ID NO: 35586 - protein, 31 aa, Artificial Sequence
  Non-cyclic GFR-binding peptide
SEVVMDSMEGIVVNNASDMIQITINSLRTPV

SEQ ID NO: 35587 - protein, 34 aa, Artificial Sequence
  Non-cyclic GFR-binding peptide
  MOD_RES (2), (4): Xaa is C or S
LXGXEEVIMSMEGILLVRGNDMIQMTINSTKVPA

SEQ ID NO: 35588 - protein, 39 aa, Artificial Sequence
  Non-cyclic GFR-binding peptide
  MOD_RES (1), (33), (34): Xaa is C or S
XRDVVMGSMEGIIIQQKDNMIQMTINSMKTPTXXPGASG

SEQ ID NO: 35589 - protein, 38 aa, Artificial Sequence
  Non-cyclic GFR-binding peptide
  MOD_RES (1), (3), (34), (35): Xaa is C or S
XGXEEVIMSMEGLLLVRGNDMIQMTINSTKVPAXXTSP

SEQ ID NO: 35590 - protein, 36 aa, Artificial Sequence
  Non-cyclic GFR-binding peptide
  MOD_RES (1), (3), (36): Xaa is C or S
  MOD_RES (14), (15), (16), (17), (18): Xaa is A or G
  MOD_RES (19), (20), (21), (22): Xaa is A or G or is absent
XKXSRVIMSMEGLXXXXXXXXXMIQITINSLAQPVX

SEQ ID NO: 35591 - protein, 35 aa, Artificial Sequence
  Non-cyclic GFR-binding peptide
  MOD_RES (2), (34), (35): Xaa is C or S
GXRDVVMGSMEGLIIQQKDNMIQMTINSMKTPTXX

SEQ ID NO: 35592 - protein, 41 aa, Artificial Sequence
  Non-cyclic GFR-binding peptide
  MOD_RES (2), (4), (37), (38): Xaa is C or S
  MOD_RES (15), (16), (17), (18), (19): Xaa is A or G
  MOD_RES (20), (21), (22), (23): Xaa is A or G or is absent
SXKXSKVIMSMEGLXXXXXXXXXMIQITINSLDQSVXXPSA

SEQ ID NO: 35593 - protein, 33 aa, Artificial Sequence
  Non-cyclic GFR-binding peptide
  MOD_RES (1), (3): Xaa is C or S
XGXEEVIMSMEGILLVRGNDMIQMTINSTKVPA

SEQ ID NO: 35594 - protein, 36 aa, Artificial Sequence
  Non-cyclic GFR-binding peptide
  MOD_RES (1), (35), (36): Xaa is C or S
  MOD_RES (13), (14), (15), (16), (17): Xaa is A or G
  MOD_RES (18), (19), (20), (21): Xaa is A or G or is absent
XSRVVMNSMEGLXXXXXXXXXMIQVTINSLKTPAXX

SEQ ID NO: 35595 - protein, 41 aa, Artificial Sequence
  Non-cyclic GFR-binding peptide
  MOD_RES (2), (4), (35), (36): Xaa is C or S
SXKXSKVVMSMEGLVKPTRGVMIQITINSLDQPVXXPSASA

SEQ ID NO: 35596 - protein, 41 aa, Artificial Sequence
  Non-cyclic GFR-binding peptide
  MOD_RES (1), (3), (37), (38): Xaa is C or S
  MOD_RES (15), (16), (17), (18), (19): Xaa is A or G
  MOD_RES (20), (21), (22), (23): Xaa is A or G or is absent
XGXRDVVMGSMEGIXXXXXXXXXMIQMTINSMKTPTXXPGA

SEQ ID NO: 35597 - protein, 42 aa, Artificial Sequence
  Non-cyclic GFR-binding peptide
  MOD_RES (2), (4), (36), (37): Xaa is C or S
RXGXSEVVMDSMEGIVVNNASDMIQITINSLRTPVXXTPPTS

SEQ ID NO: 35598 - protein, 37 aa, Artificial Sequence
  Non-cyclic GFR-binding peptide
  MOD_RES (34), (35): Xaa is C or S
  MOD_RES (12), (13), (14), (15), (16): Xaa is A or G
  MOD_RES (17), (18), (19), (20): Xaa is A or G or is absent
SRVVMNSMEGLXXXXXXXXXMIQVTINSLKTPAXXPK

SEQ ID NO: 35599 - protein, 34 aa, Artificial Sequence
  Non-cyclic GFR-binding peptide
  MOD_RES (33), (34): Xaa is C or S
  MOD_RES (11), (12), (13), (14), (15): Xaa is A or G
  MOD_RES (16), (17), (18), (19): Xaa is A or G or is absent
RVVMNSMEGLXXXXXXXXXMIQVTINSLKTPAXX

SEQ ID NO: 35600 - protein, 35 aa, Artificial Sequence
  Non-cyclic GFR-binding peptide
  MOD_RES (1), (34), (35): Xaa is C or S
  MOD_RES (12), (13), (14), (15), (16): Xaa is A or G
  MOD_RES (17), (18), (19), (20): Xaa is A or G or is absent
XEEVIMSMEGIXXXXXXXXXMIQMTINSTKVPAXX

SEQ ID NO: 35601 - protein, 37 aa, Artificial Sequence
  Non-cyclic GFR-binding peptide
  MOD_RES (31), (32): Xaa is C or S
SKVIMSMEGLIKPTKGIMIQITINSLDQSVXXPSASA

SEQ ID NO: 35602 - protein, 37 aa, Artificial Sequence
  Non-cyclic GFR-binding peptide
  MOD_RES (32), (33): Xaa is C or S
SRVVMNSMEGLIVNSSDDMIQVTINSLKTPAXXPKPV

SEQ ID NO: 35603 - protein, 37 aa, Artificial Sequence
  Non-cyclic GFR-binding peptide
  MOD_RES (2), (4): Xaa is C or S
  MOD_RES (16), (17), (18), (19), (20): Xaa is A or G
  MOD_RES (21), (22), (23), (24): Xaa is A or G or is absent
RXGXAEVVMDSMEGIXXXXXXXXXMIQITINSLRAPV

SEQ ID NO: 35604 - protein, 37 aa, Artificial Sequence
  Non-cyclic GFR-binding peptide
  MOD_RES (2), (4), (36), (37): Xaa is C or S
RXGXSEVVMDSMEGIVVNNASDMIQITINSLRTPVXX

SEQ ID NO: 35605 - protein, 38 aa, Artificial Sequence
  Non-cyclic GFR-binding peptide
  MOD_RES (1), (3), (36), (37): Xaa is C or S
  MOD_RES (14), (15), (16), (17), (18): Xaa is A or G
  MOD_RES (19), (20), (21), (22): Xaa is A or G or is absent
XKXSRVIMSMEGLXXXXXXXXXMIQITINSLAQPVXXP

SEQ ID NO: 35606 - protein, 37 aa, Artificial Sequence
  Non-cyclic GFR-binding peptide
  MOD_RES (1), (3), (37): Xaa is C or S
  MOD_RES (15), (16), (17), (18), (19): Xaa is A or G
  MOD_RES (20), (21), (22), (23): Xaa is A or G or is absent
XGXSEVVMDSMEGLXXXXXXXXXMIQITINSLRTPVX

SEQ ID NO: 35607 - protein, 36 aa, Artificial Sequence
  Non-cyclic GFR-binding peptide
  MOD_RES (2), (34), (35): Xaa is C or S
GXAEVVMDSMEGIVVNNAADMIQITINSLRAPVXXS

SEQ ID NO: 35608 - protein, 38 aa, Artificial Sequence
  Non-cyclic GFR-binding peptide
  MOD_RES (33), (34): Xaa is C or S
  MOD_RES (11), (12), (13), (14), (15): Xaa is A or G
  MOD_RES (16), (17), (18), (19): Xaa is A or G or is absent
EVVMDSMEGIXXXXXXXXXMIQITINSLRAPVXXSAPA

SEQ ID NO: 35609 - protein, 41 aa, Artificial Sequence
  Non-cyclic GFR-binding peptide
  MOD_RES (1), (3), (35), (36): Xaa is C or S
XGXSEVVMDSMEGLVVNNASDMIQITINSLRTPVXXTPPTS

SEQ ID NO: 35610 - protein, 40 aa, Artificial Sequence
  Non-cyclic GFR-binding peptide
  MOD_RES (2), (4), (38), (39): Xaa is C or S
  MOD_RES (16), (17), (18), (19), (20): Xaa is A or G
  MOD_RES (21), (22), (23), (24): Xaa is A or G or is absent
SXGXRDVVMGSMEGIXXXXXXXXXMIQMTINSMKTPTXXP

SEQ ID NO: 35611 - protein, 39 aa, Artificial Sequence
  Non-cyclic GFR-binding peptide
  MOD_RES (33), (34): Xaa is C or S
  MOD_RES (11), (12), (13), (14), (15): Xaa is A or G
  MOD_RES (16), (17), (18), (19): Xaa is A or G or is absent
EVVMDSMEGLXXXXXXXXXMIQITINSLRAPVXXSAPAA

SEQ ID NO: 35612 - protein, 38 aa, Artificial Sequence
  Non-cyclic GFR-binding peptide
  MOD_RES (2), (33), (34): Xaa is C or S
GXEEVIMSMEGILLVRGNDMIQMTINSTKVPAXXTSPV

SEQ ID NO: 35613 - protein, 35 aa, Artificial Sequence
  Non-cyclic GFR-binding peptide
  MOD_RES (31), (32): Xaa is C or S
EEVIMSMEGILLVRGNDMIQMTINSTKVPAXXTSP

SEQ ID NO: 35614 - protein, 35 aa, Artificial Sequence
  Non-cyclic GFR-binding peptide
  MOD_RES (1), (3), (34), (35): Xaa is C or S
XKXSKVVMSMEGLVKPTRGVMIQITINSLDQPVXX

SEQ ID NO: 35615 - protein, 36 aa, Artificial Sequence
  Non-cyclic GFR-binding peptide
  MOD_RES (2), (35), (36): Xaa is C or S
  MOD_RES (13), (14), (15), (16), (17): Xaa is A or G
  MOD_RES (18), (19), (20), (21): Xaa is A or G or is absent
GXEEVIMSMEGIXXXXXXXXXMIQMTINSTKVPAXX

SEQ ID NO: 35616 - protein, 36 aa, Artificial Sequence
  Non-cyclic GFR-binding peptide
  MOD_RES (2), (33), (34): Xaa is C or S
GXEEVIMSMEGLLLVRGNDMIQMTINSTKVPAXXTS

SEQ ID NO: 35617 - protein, 33 aa, Artificial Sequence
  Non-cyclic GFR-binding peptide
  MOD_RES (32), (33): Xaa is C or S
AEVVMDSMEGIVVNNAADMIQITINSLRAPVXX

SEQ ID NO: 35618 - protein, 35 aa, Artificial Sequence
  Non-cyclic GFR-binding peptide
  MOD_RES (1), (3), (34), (35): Xaa is C or S
XKXSKVIMSMEGLIKPTKGIMIQITINSLDQSVXX

SEQ ID NO: 35619 - protein, 35 aa, Artificial Sequence
  Non-cyclic GFR-binding peptide
  MOD_RES (31), (32): Xaa is C or S
EEVIMSMEGLLLVRGNDMIQMTINSTKVPAXXTSP

SEQ ID NO: 35620 - protein, 37 aa, Artificial Sequence
  Non-cyclic GFR-binding peptide
  MOD_RES (2), (33), (34): Xaa is C or S
GXEEVIMSMEGILLVRGNDMIQMTINSTKVPAXXTSP

SEQ ID NO: 35621 - protein, 38 aa, Artificial Sequence
  Non-cyclic GFR-binding peptide
  MOD_RES (2), (4), (38): Xaa is C or S
  MOD_RES (16), (17), (18), (19), (20): Xaa is A or G
  MOD_RES (21), (22), (23), (24): Xaa is A or G or is absent
HXGXSRVVMNSMEGLXXXXXXXXXMIQVTINSLKTPAX

SEQ ID NO: 35622 - protein, 40 aa, Artificial Sequence
  Non-cyclic GFR-binding peptide
  MOD_RES (1), (3), (35), (36): Xaa is C or S
XGXRDVVMGSMEGIIIQQKDNMIQMTINSMKTPTXXPGAS

SEQ ID NO: 35623 - protein, 40 aa, Artificial Sequence
  Non-cyclic GFR-binding peptide
  MOD_RES (2), (34), (35): Xaa is C or S
GXSRVVMNSMEGLIVNSSDDMIQVTINSLKTPAXXPKPVH

SEQ ID NO: 35624 - protein, 36 aa, Artificial Sequence
  Non-cyclic GFR-binding peptide
  MOD_RES (1), (34), (35): Xaa is C or S
  MOD_RES (12), (13), (14), (15), (16): Xaa is A or G
  MOD_RES (17), (18), (19), (20): Xaa is A or G or is absent
XSKVVMSMEGLXXXXXXXXXMIQITINSLDQPVXXP

SEQ ID NO: 35625 - protein, 34 aa, Artificial Sequence
  Non-cyclic GFR-binding peptide
  MOD_RES (31), (32): Xaa is C or S
RVVMNSMEGLIVNSSDDMIQVTINSLKTPAXXPK

SEQ ID NO: 35626 - protein, 37 aa, Artificial Sequence
  Non-cyclic GFR-binding peptide
  MOD_RES (1), (3), (36), (37): Xaa is C or S
  MOD_RES (14), (15), (16), (17), (18): Xaa is A or G
  MOD_RES (19), (20), (21), (22): Xaa is A or G or is absent
XGXEEVIMSMEGIXXXXXXXXXMIQMTINSTKVPAXX

SEQ ID NO: 35627 - protein, 34 aa, Artificial Sequence
  Non-cyclic GFR-binding peptide
  MOD_RES (34), (34): Xaa is C or S
  MOD_RES (12), (13), (14), (15), (16): Xaa is A or G
  MOD_RES (17), (18), (19), (20): Xaa is A or G or is absent
RDVVMGSMEGLXXXXXXXXXMIQMTINSMKTPTX

SEQ ID NO: 35628 - protein, 43 aa, Artificial Sequence
  Non-cyclic GFR-binding peptide
  MOD_RES (2), (4), (38), (39): Xaa is C or S
  MOD_RES (16), (17), (18), (19), (20): Xaa is A or G
  MOD_RES (21), (22), (23), (24): Xaa is A or G or is absent
RXGXAEVVMDSMEGLXXXXXXXXXMIQITINSLRAPVXXSAPA

SEQ ID NO: 35629 - protein, 38 aa, Artificial Sequence
  Non-cyclic GFR-binding peptide
  MOD_RES (34), (35): Xaa is C or S
  MOD_RES (12), (13), (14), (15), (16): Xaa is A or G
  MOD_RES (17), (18), (19), (20): Xaa is A or G or is absent
SEVVMDSMEGLXXXXXXXXXMIQITINSLRTPVXXTPP

SEQ ID NO: 35630 - protein, 36 aa, Artificial Sequence
  Non-cyclic GFR-binding peptide
  MOD_RES (1), (34), (35): Xaa is C or S
  MOD_RES (12), (13), (14), (15), (16): Xaa is A or G
  MOD_RES (17), (18), (19), (20): Xaa is A or G or is absent
XSKVIMSMEGLXXXXXXXXXMIQITINSLDQSVXXP

SEQ ID NO: 35631 - protein, 32 aa, Artificial Sequence
  Non-cyclic GFR-binding peptide
  MOD_RES (31), (32): Xaa is C or S
DVVMGSMEGLIIQQKDNMIQMTINSMKTPTXX

SEQ ID NO: 35632 - protein, 37 aa, Artificial Sequence
  Non-cyclic GFR-binding peptide
  MOD_RES (2), (4), (35), (36): Xaa is C or S
SXKXSKVIMSMEGLIKPTKGIMIQITINSLDQSVXXP

SEQ ID NO: 35633 - protein, 37 aa, Artificial Sequence
  Non-cyclic GFR-binding peptide
  MOD_RES (2), (36), (37): Xaa is C or S
  MOD_RES (14), (15), (16), (17), (18): Xaa is A or G
  MOD_RES (19), (20), (21), (22): Xaa is A or G or is absent
GXAEVVMDSMEGLXXXXXXXXXMIQITINSLRAPVXX

SEQ ID NO: 35634 - protein, 36 aa, Artificial Sequence
  Non-cyclic GFR-binding peptide
  MOD_RES (32), (33): Xaa is C or S
AEVVMDSMEGIVVNNAADMIQITINSLRAPVXXSAP

SEQ ID NO: 35635 - protein, 39 aa, Artificial Sequence
  Non-cyclic GFR-binding peptide
  MOD_RES (2), (34), (35): Xaa is C or S
GXRDVVMGSMEGIIIQQKDNMIQMTINSMKTPTXXPGAS

SEQ ID NO: 35636 - protein, 35 aa, Artificial Sequence
  Non-cyclic GFR-binding peptide
  MOD_RES (2), (34), (35): Xaa is C or S
GXSEVVMDSMEGIVVNNASDMIQITINSLRTPVXX

SEQ ID NO: 35637 - protein, 40 aa, Artificial Sequence
  Non-cyclic GFR-binding peptide
  MOD_RES (2), (35), (36): Xaa is C or S
  MOD_RES (13), (14), (15), (16), (17): Xaa is A or G
  MOD_RES (18), (19), (20), (21): Xaa is A or G or is absent
KXSRVIMSMEGLXXXXXXXXXMIQITINSLAQPVXXPAAS

SEQ ID NO: 35638 - protein, 39 aa, Artificial Sequence
  Non-cyclic GFR-binding peptide
  MOD_RES (2), (34), (35): Xaa is C or S
GXAEVVMDSMEGLVVNNAADMIQITINSLRAPVXXSAPA

SEQ ID NO: 35639 - protein, 32 aa, Artificial Sequence
  Non-cyclic GFR-binding peptide
  MOD_RES (1), (32): Xaa is C or S
XSRVIMSMEGLVKPKRGVMIQITINSLAQPVX

SEQ ID NO: 35640 - protein, 39 aa, Artificial Sequence
  Non-cyclic GFR-binding peptide
  MOD_RES (2), (4), (36), (37): Xaa is C or S
HXGXSRVVMNSMEGLIVNSSDDMIQVTINSLKTPAXXPK

SEQ ID NO: 35641 - protein, 31 aa, Artificial Sequence
  Non-cyclic GFR-binding peptide
  MOD_RES (31), (31): Xaa is C or S
EVVMDSMEGIVVNNASDMIQITINSLRTPVX

SEQ ID NO: 35642 - protein, 32 aa, Artificial Sequence
  Non-cyclic GFR-binding peptide
  MOD_RES (1), (1): Xaa is C or S
XRDVVMGSMEGLIIQQKDNMIQMTINSMKTPT

SEQ ID NO: 35643 - protein, 40 aa, Artificial Sequence
  Non-cyclic GFR-binding peptide
  MOD_RES (1), (3), (35), (36): Xaa is C or S
XGXSEVVMDSMEGLVVNNASDMIQITINSLRTPVXXTPPT

SEQ ID NO: 35644 - protein, 37 aa, Artificial Sequence
  Non-cyclic GFR-binding peptide
  MOD_RES (1), (3), (35), (36): Xaa is C or S
XGXSEVVMDSMEGLVVNNASDMIQITINSLRTPVXXT

SEQ ID NO: 35645 - protein, 39 aa, Artificial Sequence
  Non-cyclic GFR-binding peptide
  MOD_RES (2), (4), (36), (37): Xaa is C or S
SXGXRDVVMGSMEGLIIQQKDNMIQMTINSMKTPTXXPG

SEQ ID NO: 35646 - protein, 34 aa, Artificial Sequence
  Non-cyclic GFR-binding peptide
  MOD_RES (31), (32): Xaa is C or S
SKVIMSMEGLIKPTKGIMIQITINSLDQSVXXPS

SEQ ID NO: 35647 - protein, 35 aa, Artificial Sequence
  Non-cyclic GFR-binding peptide
  MOD_RES (33), (34): Xaa is C or S
  MOD_RES (11), (12), (13), (14), (15): Xaa is A or G
  MOD_RES (16), (17), (18), (19): Xaa is A or G or is absent
EVVMDSMEGLXXXXXXXXXMIQITINSLRAPVXXS

SEQ ID NO: 35648 - protein, 41 aa, Artificial Sequence
  Non-cyclic GFR-binding peptide
  MOD_RES (1), (3), (36), (37): Xaa is C or S
  MOD_RES (14), (15), (16), (17), (18): Xaa is A or G
  MOD_RES (19), (20), (21), (22): Xaa is A or G or is absent
XGXEEVIMSMEGLXXXXXXXXXMIQMTINSTKVPAXXTSPV

SEQ ID NO: 35649 - protein, 33 aa, Artificial Sequence
  Non-cyclic GFR-binding peptide
  MOD_RES (1), (33): Xaa is C or S
XSRVVMNSMEGLIVNSSDDMIQVTINSLKTPAX

SEQ ID NO: 35650 - protein, 39 aa, Artificial Sequence
  Non-cyclic GFR-binding peptide
  MOD_RES (1), (3), (34), (35): Xaa is C or S
XGXEEVIMSMEGLLLVRGNDMIQMTINSTKVPAXXTSPV

SEQ ID NO: 35651 - protein, 39 aa, Artificial Sequence
  Non-cyclic GFR-binding peptide
  MOD_RES (2), (34), (35): Xaa is C or S
GXSEVVMDSMEGLVVNNASDMIQITINSLRTPVXXTPPT

SEQ ID NO: 35652 - protein, 33 aa, Artificial Sequence
  Non-cyclic GFR-binding peptide
  MOD_RES (12), (13), (14), (15), (16): Xaa is A or G
  MOD_RES (17), (18), (19), (20): Xaa is A or G or is absent
RDVVMGSMEGIXXXXXXXXXMIQMTINSMKTPT

SEQ ID NO: 35653 - protein, 36 aa, Artificial Sequence
  Non-cyclic GFR-binding peptide
  MOD_RES (34), (35): Xaa is C or S
  MOD_RES (12), (13), (14), (15), (16): Xaa is A or G
  MOD_RES (17), (18), (19), (20): Xaa is A or G or is absent
SEVVMDSMEGLXXXXXXXXXMIQITINSLRTPVXXT

SEQ ID NO: 35654 - protein, 37 aa, Artificial Sequence
  Non-cyclic GFR-binding peptide
  MOD_RES (1), (35), (36): Xaa is C or S
  MOD_RES (13), (14), (15), (16), (17): Xaa is A or G
  MOD_RES (18), (19), (20), (21): Xaa is A or G or is absent
XSRVVMNSMEGLXXXXXXXXXMIQVTINSLKTPAXXP

SEQ ID NO: 35655 - protein, 37 aa, Artificial Sequence
  Non-cyclic GFR-binding peptide
  MOD_RES (1), (3), (34), (35): Xaa is C or S
XKXSKVVMSMEGLVKPTRGVMIQITINSLDQPVXXPS

SEQ ID NO: 35656 - protein, 38 aa, Artificial Sequence
  Non-cyclic GFR-binding peptide
  MOD_RES (1), (3), (35), (36): Xaa is C or S
XGXSRVVMNSMEGLIVNSSDDMIQVTINSLKTPAXXPK

SEQ ID NO: 35657 - protein, 43 aa, Artificial Sequence
  Non-cyclic GFR-binding peptide
  MOD_RES (1), (3), (37), (38): Xaa is C or S
  MOD_RES (15), (16), (17), (18), (19): Xaa is A or G
  MOD_RES (20), (21), (22), (23): Xaa is A or G or is absent
XGXRDVVMGSMEGLXXXXXXXXXMIQMTINSMKTPTXXPGASG

SEQ ID NO: 35658 - protein, 35 aa, Artificial Sequence
  Non-cyclic GFR-binding peptide
  MOD_RES (34), (35): Xaa is C or S
  MOD_RES (12), (13), (14), (15), (16): Xaa is A or G
  MOD_RES (17), (18), (19), (20): Xaa is A or G or is absent
SRVVMNSMEGLXXXXXXXXXMIQVTINSLKTPAXX

SEQ ID NO: 35659 - protein, 38 aa, Artificial Sequence
  Non-cyclic GFR-binding peptide
  MOD_RES (1), (3), (36), (37): Xaa is C or S
  MOD_RES (14), (15), (16), (17), (18): Xaa is A or G
  MOD_RES (19), (20), (21), (22): Xaa is A or G or is absent
XKXSKVVMSMEGLXXXXXXXXXMIQITINSLDQPVXXP

SEQ ID NO: 35660 - protein, 38 aa, Artificial Sequence
  Non-cyclic GFR-binding peptide
  MOD_RES (1), (34), (35): Xaa is C or S
  MOD_RES (12), (13), (14), (15), (16): Xaa is A or G
  MOD_RES (17), (18), (19), (20): Xaa is A or G or is absent
XSKVVMSMEGLXXXXXXXXXMIQITINSLDQPVXXPSA

SEQ ID NO: 35661 - protein, 33 aa, Artificial Sequence
  Non-cyclic GFR-binding peptide
  MOD_RES (32), (33): Xaa is C or S
SEVVMDSMEGIVVNNASDMIQITINSLRTPVXX

SEQ ID NO: 35662 - protein, 33 aa, Artificial Sequence
  Non-cyclic GFR-binding peptide
  MOD_RES (31), (32): Xaa is C or S
EVVMDSMEGLVVNNASDMIQITINSLRTPVXXT

SEQ ID NO: 35663 - protein, 43 aa, Artificial Sequence
  Non-cyclic GFR-binding peptide
  MOD_RES (2), (4), (37), (38): Xaa is C or S
  MOD_RES (15), (16), (17), (18), (19): Xaa is A or G
  MOD_RES (20), (21), (22), (23): Xaa is A or G or is absent
LXGXEEVIMSMEGIXXXXXXXXXMIQMTINSTKVPAXXTSPVR

SEQ ID NO: 35664 - protein, 37 aa, Artificial Sequence
  Non-cyclic GFR-binding peptide
  MOD_RES (2), (4), (37): Xaa is C or S
  MOD_RES (15), (16), (17), (18), (19): Xaa is A or G
  MOD_RES (20), (21), (22), (23): Xaa is A or G or is absent
SXKXSKVVMSMEGLXXXXXXXXXMIQITINSLDQPVX

SEQ ID NO: 35665 - protein, 31 aa, Artificial Sequence
  Non-cyclic GFR-binding peptide
  MOD_RES (31), (31): Xaa is C or S
SKVVMSMEGLVKPTRGVMIQITINSLDQPVX

SEQ ID NO: 35666 - protein, 40 aa, Artificial Sequence
  Non-cyclic GFR-binding peptide
  MOD_RES (1), (3), (34), (35): Xaa is C or S
XGXEEVIMSMEGILLVRGNDMIQMTINSTKVPAXXTSPVR

SEQ ID NO: 35667 - protein, 39 aa, Artificial Sequence
  Non-cyclic GFR-binding peptide
  MOD_RES (1), (33), (34): Xaa is C or S
XAEVVMDSMEGIVVNNAADMIQITINSLRAPVXXSAPAA

SEQ ID NO: 35668 - protein, 37 aa, Artificial Sequence
  Non-cyclic GFR-binding peptide
  MOD_RES (1), (3), (37): Xaa is C or S
  MOD_RES (15), (16), (17), (18), (19): Xaa is A or G
  MOD_RES (20), (21), (22), (23): Xaa is A or G or is absent
XGXAEVVMDSMEGLXXXXXXXXXMIQITINSLRAPVX

SEQ ID NO: 35669 - protein, 38 aa, Artificial Sequence
  Non-cyclic GFR-binding peptide
  MOD_RES (2), (33), (34): Xaa is C or S
KXSRVIMSMEGLVKPKRGVMIQITINSLAQPVXXPAAS

SEQ ID NO: 35670 - protein, 41 aa, Artificial Sequence
  Non-cyclic GFR-binding peptide
  MOD_RES (2), (36), (37): Xaa is C or S
  MOD_RES (14), (15), (16), (17), (18): Xaa is A or G
  MOD_RES (19), (20), (21), (22): Xaa is A or G or is absent
GXRDVVMGSMEGLXXXXXXXXXMIQMTINSMKTPTXXPGAS

SEQ ID NO: 35671 - protein, 33 aa, Artificial Sequence
  Non-cyclic GFR-binding peptide
  MOD_RES (1), (32), (33): Xaa is C or S
XSKVIMSMEGLIKPTKGIMIQITINSLDQSVXX

SEQ ID NO: 35672 - protein, 41 aa, Artificial Sequence
  Non-cyclic GFR-binding peptide
  MOD_RES (2), (4), (36), (37): Xaa is C or S
SXGXRDVVMGSMEGLIIQQKDNMIQMTINSMKTPTXXPGAS

SEQ ID NO: 35673 - protein, 38 aa, Artificial Sequence
  Non-cyclic GFR-binding peptide
  MOD_RES (1), (35), (36): Xaa is C or S
  MOD_RES (13), (14), (15), (16), (17): Xaa is A or G
  MOD_RES (18), (19), (20), (21): Xaa is A or G or is absent
XAEVVMDSMEGIXXXXXXXXXMIQITINSLRAPVXXSA

SEQ ID NO: 35674 - protein, 36 aa, Artificial Sequence
  Non-cyclic GFR-binding peptide
  MOD_RES (31), (32): Xaa is C or S
SKVIMSMEGLIKPTKGIMIQITINSLDQSVXXPSAS

SEQ ID NO: 35675 - protein, 38 aa, Artificial Sequence
  Non-cyclic GFR-binding peptide
  MOD_RES (2), (35), (36): Xaa is C or S
  MOD_RES (13), (14), (15), (16), (17): Xaa is A or G
  MOD_RES (18), (19), (20), (21): Xaa is A or G or is absent
KXSRVIMSMEGLXXXXXXXXXMIQITINSLAQPVXXPA

SEQ ID NO: 35676 - protein, 32 aa, Artificial Sequence
  Non-cyclic GFR-binding peptide
  MOD_RES (11), (12), (13), (14), (15): Xaa is A or G
  MOD_RES (16), (17), (18), (19): Xaa is A or G or is absent
EVVMDSMEGLXXXXXXXXXMIQITINSLRTPV

SEQ ID NO: 35677 - protein, 42 aa, Artificial Sequence
  Non-cyclic GFR-binding peptide
  MOD_RES (2), (4), (37), (38): Xaa is C or S
  MOD_RES (15), (16), (17), (18), (19): Xaa is A or G
  MOD_RES (20), (21), (22), (23): Xaa is A or G or is absent
LXGXEEVIMSMEGIXXXXXXXXXMIQMTINSTKVPAXXTSPV

SEQ ID NO: 35678 - protein, 38 aa, Artificial Sequence
  Non-cyclic GFR-binding peptide
  MOD_RES (1), (32), (33): Xaa is C or S
XSRVIMSMEGLVKPKRGVMIQITINSLAQPVXXPAASA

SEQ ID NO: 35679 - protein, 40 aa, Artificial Sequence
  Non-cyclic GFR-binding peptide
  MOD_RES (2), (4), (35), (36): Xaa is C or S
LXGXEEVIMSMEGILLVRGNDMIQMTINSTKVPAXXTSPV

SEQ ID NO: 35680 - protein, 42 aa, Artificial Sequence
  Non-cyclic GFR-binding peptide
  MOD_RES (2), (36), (37): Xaa is C or S
  MOD_RES (14), (15), (16), (17), (18): Xaa is A or G
  MOD_RES (19), (20), (21), (22): Xaa is A or G or is absent
GXAEVVMDSMEGLXXXXXXXXXMIQITINSLRAPVXXSAPAA

SEQ ID NO: 35681 - protein, 36 aa, Artificial Sequence
  Non-cyclic GFR-binding peptide
  MOD_RES (1), (35), (36): Xaa is C or S
  MOD_RES (13), (14), (15), (16), (17): Xaa is A or G
  MOD_RES (18), (19), (20), (21): Xaa is A or G or is absent
XRDVVMGSMEGLXXXXXXXXXMIQMTINSMKTPTXX

SEQ ID NO: 35682 - protein, 36 aa, Artificial Sequence
  Non-cyclic GFR-binding peptide
  MOD_RES (31), (32): Xaa is C or S
EEVIMSMEGILLVRGNDMIQMTINSTKVPAXXTSPV

SEQ ID NO: 35683 - protein, 37 aa, Artificial Sequence
  Non-cyclic GFR-binding peptide
  MOD_RES (1), (3), (37): Xaa is C or S
  MOD_RES (15), (16), (17), (18), (19): Xaa is A or G
  MOD_RES (20), (21), (22), (23): Xaa is A or G or is absent
XGXRDVVMGSMEGIXXXXXXXXXMIQMTINSMKTPTX

SEQ ID NO: 35684 - protein, 40 aa, Artificial Sequence
  Non-cyclic GFR-binding peptide
  MOD_RES (2), (4), (37), (38): Xaa is C or S
  MOD_RES (15), (16), (17), (18), (19): Xaa is A or G
  MOD_RES (20), (21), (22), (23): Xaa is A or G or is absent
SXKXSKVIMSMEGLXXXXXXXXXMIQITINSLDQSVXXPS

SEQ ID NO: 35685 - protein, 39 aa, Artificial Sequence
  Non-cyclic GFR-binding peptide
  MOD_RES (1), (3), (34), (35): Xaa is C or S
XKXSKVVMSMEGLVKPTRGVMIQITINSLDQPVXXPSAS

SEQ ID NO: 35686 - protein, 39 aa, Artificial Sequence
  Non-cyclic GFR-binding peptide
  MOD_RES (1), (3), (37), (38): Xaa is C or S
  MOD_RES (15), (16), (17), (18), (19): Xaa is A or G
  MOD_RES (20), (21), (22), (23): Xaa is A or G or is absent
XGXRDVVMGSMEGIXXXXXXXXXMIQMTINSMKTPTXXP

SEQ ID NO: 35687 - protein, 39 aa, Artificial Sequence
  Non-cyclic GFR-binding peptide
  MOD_RES (2), (36), (37): Xaa is C or S
  MOD_RES (14), (15), (16), (17), (18): Xaa is A or G
  MOD_RES (19), (20), (21), (22): Xaa is A or G or is absent
GXRDVVMGSMEGLXXXXXXXXXMIQMTINSMKTPTXXPG

SEQ ID NO: 35688 - protein, 38 aa, Artificial Sequence
  Non-cyclic GFR-binding peptide
  MOD_RES (2), (4), (36), (37): Xaa is C or S
RXGXAEVVMDSMEGLVVNNAADMIQITINSLRAPVXXS

SEQ ID NO: 35689 - protein, 35 aa, Artificial Sequence
  Non-cyclic GFR-binding peptide
  MOD_RES (2), (33), (34): Xaa is C or S
GXEEVIMSMEGLLLVRGNDMIQMTINSTKVPAXXT

SEQ ID NO: 35690 - protein, 39 aa, Artificial Sequence
  Non-cyclic GFR-binding peptide
  MOD_RES (33), (34): Xaa is C or S
  MOD_RES (11), (12), (13), (14), (15): Xaa is A or G
  MOD_RES (16), (17), (18), (19): Xaa is A or G or is absent
SRVIMSMEGLXXXXXXXXXMIQITINSLAQPVXXPAASA

SEQ ID NO: 35691 - protein, 37 aa, Artificial Sequence
  Non-cyclic GFR-binding peptide
  MOD_RES (2), (33), (34): Xaa is C or S
KXSKVIMSMEGLIKPTKGIMIQITINSLDQSVXXPSA

SEQ ID NO: 35692 - protein, 35 aa, Artificial Sequence
  Non-cyclic GFR-binding peptide
  MOD_RES (1), (35): Xaa is C or S
  MOD_RES (13), (14), (15), (16), (17): Xaa is A or G
  MOD_RES (18), (19), (20), (21): Xaa is A or G or is absent
XRDVVMGSMEGLXXXXXXXXXMIQMTINSMKTPTX

SEQ ID NO: 35693 - protein, 32 aa, Artificial Sequence
  Non-cyclic GFR-binding peptide
  MOD_RES (32), (32): Xaa is C or S
SRVVMNSMEGLIVNSSDDMIQVTINSLKTPAX

SEQ ID NO: 35694 - protein, 39 aa, Artificial Sequence
  Non-cyclic GFR-binding peptide
  MOD_RES (1), (3), (34), (35): Xaa is C or S
XGXEEVIMSMEGILLVRGNDMIQMTINSTKVPAXXTSPV

SEQ ID NO: 35695 - protein, 41 aa, Artificial Sequence
  Non-cyclic GFR-binding peptide
  MOD_RES (1), (35), (36): Xaa is C or S
  MOD_RES (13), (14), (15), (16), (17): Xaa is A or G
  MOD_RES (18), (19), (20), (21): Xaa is A or G or is absent
XAEVVMDSMEGLXXXXXXXXXMIQITINSLRAPVXXSAPAA

SEQ ID NO: 35696 - protein, 44 aa, Artificial Sequence
  Non-cyclic GFR-binding peptide
  MOD_RES (2), (4), (38), (39): Xaa is C or S
  MOD_RES (16), (17), (18), (19), (20): Xaa is A or G
  MOD_RES (21), (22), (23), (24): Xaa is A or G or is absent
HXGXSRVVMNSMEGLXXXXXXXXXMIQVTINSLKTPAXXPKPVH

SEQ ID NO: 35697 - protein, 35 aa, Artificial Sequence
  Non-cyclic GFR-binding peptide
  MOD_RES (1), (3): Xaa is C or S
  MOD_RES (14), (15), (16), (17), (18): Xaa is A or G
  MOD_RES (19), (20), (21), (22): Xaa is A or G or is absent
XGXEEVIMSMEGIXXXXXXXXXMIQMTINSTKVPA

SEQ ID NO: 35698 - protein, 32 aa, Artificial Sequence
  Non-cyclic GFR-binding peptide
  MOD_RES (11), (12), (13), (14), (15): Xaa is A or G
  MOD_RES (16), (17), (18), (19): Xaa is A or G or is absent
EEVIMSMEGIXXXXXXXXXMIQMTINSTKVPA

SEQ ID NO: 35699 - protein, 36 aa, Artificial Sequence
  Non-cyclic GFR-binding peptide
  MOD_RES (33), (34): Xaa is C or S
  MOD_RES (11), (12), (13), (14), (15): Xaa is A or G
  MOD_RES (16), (17), (18), (19): Xaa is A or G or is absent
EVVMDSMEGIXXXXXXXXXMIQITINSLRTPVXXTP

SEQ ID NO: 35700 - protein, 37 aa, Artificial Sequence
  Non-cyclic GFR-binding peptide
  MOD_RES (31), (32): Xaa is C or S
DVVMGSMEGLIIQQKDNMIQMTINSMKTPTXXPGASG

SEQ ID NO: 35701 - protein, 39 aa, Artificial Sequence
  Non-cyclic GFR-binding peptide
  MOD_RES (1), (33), (34): Xaa is C or S
XRDVVMGSMEGLIIQQKDNMIQMTINSMKTPTXXPGASG

SEQ ID NO: 35702 - protein, 37 aa, Artificial Sequence
  Non-cyclic GFR-binding peptide
  MOD_RES (1), (33), (34): Xaa is C or S
XRDVVMGSMEGIIIQQKDNMIQMTINSMKTPTXXPGA

SEQ ID NO: 35703 - protein, 42 aa, Artificial Sequence
  Non-cyclic GFR-binding peptide
  MOD_RES (2), (4), (37), (38): Xaa is C or S
  MOD_RES (15), (16), (17), (18), (19): Xaa is A or G
  MOD_RES (20), (21), (22), (23): Xaa is A or G or is absent
SXKXSKVVMSMEGLXXXXXXXXXMIQITINSLDQPVXXPSAS

SEQ ID NO: 35704 - protein, 31 aa, Artificial Sequence
  Non-cyclic GFR-binding peptide
  MOD_RES (31), (31): Xaa is C or S
EEVIMSMEGILLVRGNDMIQMTINSTKVPAX

SEQ ID NO: 35705 - protein, 36 aa, Artificial Sequence
  Non-cyclic GFR-binding peptide
  MOD_RES (32), (33): Xaa is C or S
RDVVMGSMEGIIIQQKDNMIQMTINSMKTPTXXPGA

SEQ ID NO: 35706 - protein, 40 aa, Artificial Sequence
  Non-cyclic GFR-binding peptide
  MOD_RES (34), (35): Xaa is C or S
  MOD_RES (12), (13), (14), (15), (16): Xaa is A or G
  MOD_RES (17), (18), (19), (20): Xaa is A or G or is absent
RDVVMGSMEGIXXXXXXXXXMIQMTINSMKTPTXXPGASG

SEQ ID NO: 35707 - protein, 36 aa, Artificial Sequence
  Non-cyclic GFR-binding peptide
  MOD_RES (2), (4), (36): Xaa is C or S
RXGXSEVVMDSMEGIVVNNASDMIQITINSLRTPVX

SEQ ID NO: 35708 - protein, 40 aa, Artificial Sequence
  Non-cyclic GFR-binding peptide
  MOD_RES (1), (3), (34), (35): Xaa is C or S
XKXSKVIMSMEGLIKPTKGIMIQITINSLDQSVXXPSASA

SEQ ID NO: 35709 - protein, 41 aa, Artificial Sequence
  Non-cyclic GFR-binding peptide
  MOD_RES (2), (4), (37), (38): Xaa is C or S
  MOD_RES (15), (16), (17), (18), (19): Xaa is A or G
  MOD_RES (20), (21), (22), (23): Xaa is A or G or is absent
LXGXEEVIMSMEGLXXXXXXXXXMIQMTINSTKVPAXXTSP

SEQ ID NO: 35710 - protein, 32 aa, Artificial Sequence
  Non-cyclic GFR-binding peptide
  MOD_RES (31), (32): Xaa is C or S
EEVIMSMEGILLVRGNDMIQMTINSTKVPAXX

SEQ ID NO: 35711 - protein, 36 aa, Artificial Sequence
  Non-cyclic GFR-binding peptide
  MOD_RES (1), (33), (34): Xaa is C or S
XRDVVMGSMEGLIIQQKDNMIQMTINSMKTPTXXPG

SEQ ID NO: 35712 - protein, 40 aa, Artificial Sequence
  Non-cyclic GFR-binding peptide
  MOD_RES (1), (3), (34), (35): Xaa is C or S
XGXEEVIMSMEGLLLVRGNDMIQMTINSTKVPAXXTSPVR

SEQ ID NO: 35713 - protein, 40 aa, Artificial Sequence
  Non-cyclic GFR-binding peptide
  MOD_RES (2), (35), (36): Xaa is C or S
  MOD_RES (13), (14), (15), (16), (17): Xaa is A or G
  MOD_RES (18), (19), (20), (21): Xaa is A or G or is absent
GXEEVIMSMEGLXXXXXXXXXMIQMTINSTKVPAXXTSPV

SEQ ID NO: 35714 - protein, 35 aa, Artificial Sequence
  Non-cyclic GFR-binding peptide
  MOD_RES (2), (4): Xaa is C or S
RXGXAEVVMDSMEGLVVNNAADMIQITINSLRAPV

SEQ ID NO: 35715 - protein, 33 aa, Artificial Sequence
  Non-cyclic GFR-binding peptide
  MOD_RES (33), (33): Xaa is C or S
  MOD_RES (11), (12), (13), (14), (15): Xaa is A or G
  MOD_RES (16), (17), (18), (19): Xaa is A or G or is absent
SRVIMSMEGLXXXXXXXXXMIQITINSLAQPVX

SEQ ID NO: 35716 - protein, 34 aa, Artificial Sequence
  Non-cyclic GFR-binding peptide
  MOD_RES (1), (34): Xaa is C or S
  MOD_RES (12), (13), (14), (15), (16): Xaa is A or G
  MOD_RES (17), (18), (19), (20): Xaa is A or G or is absent
XSKVVMSMEGLXXXXXXXXXMIQITINSLDQPVX

SEQ ID NO: 35717 - protein, 36 aa, Artificial Sequence
  Non-cyclic GFR-binding peptide
  MOD_RES (2), (34), (35): Xaa is C or S
GXRDVVMGSMEGIIIQQKDNMIQMTINSMKTPTXXP

SEQ ID NO: 35718 - protein, 33 aa, Artificial Sequence
  Non-cyclic GFR-binding peptide
  MOD_RES (1), (33): Xaa is C or S
XSEVVMDSMEGLVVNNASDMIQITINSLRTPVX

SEQ ID NO: 35719 - protein, 38 aa, Artificial Sequence
  Non-cyclic GFR-binding peptide
  MOD_RES (33), (34): Xaa is C or S
  MOD_RES (11), (12), (13), (14), (15): Xaa is A or G
  MOD_RES (16), (17), (18), (19): Xaa is A or G or is absent
EVVMDSMEGLXXXXXXXXXMIQITINSLRTPVXXTPPT

SEQ ID NO: 35720 - protein, 39 aa, Artificial Sequence
  Non-cyclic GFR-binding peptide
  MOD_RES (1), (33), (34): Xaa is C or S
XSEVVMDSMEGLVVNNASDMIQITINSLRTPVXXTPPTS

SEQ ID NO: 35721 - protein, 43 aa, Artificial Sequence
  Non-cyclic GFR-binding peptide
  MOD_RES (1), (3), (37), (38): Xaa is C or S
  MOD_RES (15), (16), (17), (18), (19): Xaa is A or G
  MOD_RES (20), (21), (22), (23): Xaa is A or G or is absent
XGXAEVVMDSMEGIXXXXXXXXXMIQITINSLRAPVXXSAPAA

SEQ ID NO: 35722 - protein, 38 aa, Artificial Sequence
  Non-cyclic GFR-binding peptide
  MOD_RES (1), (3), (36), (37): Xaa is C or S
  MOD_RES (14), (15), (16), (17), (18): Xaa is A or G
  MOD_RES (19), (20), (21), (22): Xaa is A or G or is absent
XGXEEVIMSMEGIXXXXXXXXXMIQMTINSTKVPAXXT

SEQ ID NO: 35723 - protein, 37 aa, Artificial Sequence
  Non-cyclic GFR-binding peptide
  MOD_RES (2), (35), (36): Xaa is C or S
  MOD_RES (13), (14), (15), (16), (17): Xaa is A or G
  MOD_RES (18), (19), (20), (21): Xaa is A or G or is absent
KXSKVVMSMEGLXXXXXXXXXMIQITINSLDQPVXXP

SEQ ID NO: 35724 - protein, 36 aa, Artificial Sequence
  Non-cyclic GFR-binding peptide
  MOD_RES (1), (3): Xaa is C or S
  MOD_RES (15), (16), (17), (18), (19): Xaa is A or G
  MOD_RES (20), (21), (22), (23): Xaa is A or G or is absent
XGXSEVVMDSMEGIXXXXXXXXXMIQITINSLRTPV

SEQ ID NO: 35725 - protein, 36 aa, Artificial Sequence
  Non-cyclic GFR-binding peptide
  MOD_RES (1), (35), (36): Xaa is C or S
  MOD_RES (13), (14), (15), (16), (17): Xaa is A or G
  MOD_RES (18), (19), (20), (21): Xaa is A or G or is absent
XSEVVMDSMEGIXXXXXXXXXMIQITINSLRTPVXX

SEQ ID NO: 35726 - protein, 32 aa, Artificial Sequence
  Non-cyclic GFR-binding peptide
  MOD_RES (11), (12), (13), (14), (15): Xaa is A or G
  MOD_RES (16), (17), (18), (19): Xaa is A or G or is absent
SRVIMSMEGLXXXXXXXXXMIQITINSLAQPV

SEQ ID NO: 35727 - protein, 38 aa, Artificial Sequence
  Non-cyclic GFR-binding peptide
  MOD_RES (34), (35): Xaa is C or S
  MOD_RES (12), (13), (14), (15), (16): Xaa is A or G
  MOD_RES (17), (18), (19), (20): Xaa is A or G or is absent
SRVVMNSMEGLXXXXXXXXXMIQVTINSLKTPAXXPKP

SEQ ID NO: 35728 - protein, 32 aa, Artificial Sequence
  Non-cyclic GFR-binding peptide
  MOD_RES (11), (12), (13), (14), (15): Xaa is A or G
  MOD_RES (16), (17), (18), (19): Xaa is A or G or is absent
EVVMDSMEGLXXXXXXXXXMIQITINSLRAPV

SEQ ID NO: 35729 - protein, 38 aa, Artificial Sequence
  Non-cyclic GFR-binding peptide
  MOD_RES (2), (36), (37): Xaa is C or S
  MOD_RES (14), (15), (16), (17), (18): Xaa is A or G
  MOD_RES (19), (20), (21), (22): Xaa is A or G or is absent
GXRDVVMGSMEGLXXXXXXXXXMIQMTINSMKTPTXXP

SEQ ID NO: 35730 - protein, 36 aa, Artificial Sequence
  Non-cyclic GFR-binding peptide
  MOD_RES (33), (34): Xaa is C or S
  MOD_RES (11), (12), (13), (14), (15): Xaa is A or G
  MOD_RES (16), (17), (18), (19): Xaa is A or G or is absent
SRVIMSMEGLXXXXXXXXXMIQITINSLAQPVXXPA

SEQ ID NO: 35731 - protein, 40 aa, Artificial Sequence
  Non-cyclic GFR-binding peptide
  MOD_RES (1), (3), (37), (38): Xaa is C or S
  MOD_RES (15), (16), (17), (18), (19): Xaa is A or G
  MOD_RES (20), (21), (22), (23): Xaa is A or G or is absent
XGXAEVVMDSMEGLXXXXXXXXXMIQITINSLRAPVXXSA

SEQ ID NO: 35732 - protein, 33 aa, Artificial Sequence
  Non-cyclic GFR-binding peptide
  MOD_RES (2), (33): Xaa is C or S
KXSKVVMSMEGLVKPTRGVMIQITINSLDQPVX

SEQ ID NO: 35733 - protein, 42 aa, Artificial Sequence
  Non-cyclic GFR-binding peptide
  MOD_RES (2), (36), (37): Xaa is C or S
  MOD_RES (14), (15), (16), (17), (18): Xaa is A or G
  MOD_RES (19), (20), (21), (22): Xaa is A or G or is absent
GXSEVVMDSMEGIXXXXXXXXXMIQITINSLRTPVXXTPPTS

SEQ ID NO: 35734 - protein, 34 aa, Artificial Sequence
  Non-cyclic GFR-binding peptide
  MOD_RES (32), (33): Xaa is C or S
SRVVMNSMEGLIVNSSDDMIQVTINSLKTPAXXP

SEQ ID NO: 35735 - protein, 32 aa, Artificial Sequence
  Non-cyclic GFR-binding peptide
  MOD_RES (2), (2): Xaa is C or S
GXEEVIMSMEGILLVRGNDMIQMTINSTKVPA

SEQ ID NO: 35736 - protein, 35 aa, Artificial Sequence
  Non-cyclic GFR-binding peptide
  MOD_RES (33), (34): Xaa is C or S
  MOD_RES (11), (12), (13), (14), (15): Xaa is A or G
  MOD_RES (16), (17), (18), (19): Xaa is A or G or is absent
EVVMDSMEGLXXXXXXXXXMIQITINSLRTPVXXT

SEQ ID NO: 35737 - protein, 41 aa, Artificial Sequence
  Non-cyclic GFR-binding peptide
  MOD_RES (1), (35), (36): Xaa is C or S
  MOD_RES (13), (14), (15), (16), (17): Xaa is A or G
  MOD_RES (18), (19), (20), (21): Xaa is A or G or is absent
XSEVVMDSMEGIXXXXXXXXXMIQITINSLRTPVXXTPPTS

SEQ ID NO: 35738 - protein, 40 aa, Artificial Sequence
  Non-cyclic GFR-binding peptide
  MOD_RES (1), (3), (37), (38): Xaa is C or S
  MOD_RES (15), (16), (17), (18), (19): Xaa is A or G
  MOD_RES (20), (21), (22), (23): Xaa is A or G or is absent
XGXSRVVMNSMEGLXXXXXXXXXMIQVTINSLKTPAXXPK

SEQ ID NO: 35739 - protein, 35 aa, Artificial Sequence
  Non-cyclic GFR-binding peptide
  MOD_RES (2), (35): Xaa is C or S
  MOD_RES (13), (14), (15), (16), (17): Xaa is A or G
  MOD_RES (18), (19), (20), (21): Xaa is A or G or is absent
GXEEVIMSMEGIXXXXXXXXXMIQMTINSTKVPAX

SEQ ID NO: 35740 - protein, 36 aa, Artificial Sequence
  Non-cyclic GFR-binding peptide
  MOD_RES (33), (34): Xaa is C or S
  MOD_RES (11), (12), (13), (14), (15): Xaa is A or G
  MOD_RES (16), (17), (18), (19): Xaa is A or G or is absent
EEVIMSMEGLXXXXXXXXXMIQMTINSTKVPAXXTS

SEQ ID NO: 35741 - protein, 36 aa, Artificial Sequence
  Non-cyclic GFR-binding peptide
  MOD_RES (32), (33): Xaa is C or S
SEVVMDSMEGLVVNNASDMIQITINSLRTPVXXTPP

SEQ ID NO: 35742 - protein, 41 aa, Artificial Sequence
  Non-cyclic GFR-binding peptide
  MOD_RES (1), (3), (37), (38): Xaa is C or S
  MOD_RES (15), (16), (17), (18), (19): Xaa is A or G
  MOD_RES (20), (21), (22), (23): Xaa is A or G or is absent
XGXRDVVMGSMEGLXXXXXXXXXMIQMTINSMKTPTXXPGA

SEQ ID NO: 35743 - protein, 41 aa, Artificial Sequence
  Non-cyclic GFR-binding peptide
  MOD_RES (2), (35), (36): Xaa is C or S
  MOD_RES (13), (14), (15), (16), (17): Xaa is A or G
  MOD_RES (18), (19), (20), (21): Xaa is A or G or is absent
GXEEVIMSMEGLXXXXXXXXXMIQMTINSTKVPAXXTSPVR

SEQ ID NO: 35744 - protein, 33 aa, Artificial Sequence
  Non-cyclic GFR-binding peptide
  MOD_RES (2), (33): Xaa is C or S
KXSKVIMSMEGLIKPTKGIMIQITINSLDQSVX

SEQ ID NO: 35745 - protein, 41 aa, Artificial Sequence
  Non-cyclic GFR-binding peptide
  MOD_RES (1), (3), (37), (38): Xaa is C or S
  MOD_RES (15), (16), (17), (18), (19): Xaa is A or G
  MOD_RES (20), (21), (22), (23): Xaa is A or G or is absent
XGXAEVVMDSMEGIXXXXXXXXXMIQITINSLRAPVXXSAP

SEQ ID NO: 35746 - protein, 38 aa, Artificial Sequence
  Non-cyclic GFR-binding peptide
  MOD_RES (2), (4), (37), (38): Xaa is C or S
  MOD_RES (15), (16), (17), (18), (19): Xaa is A or G
  MOD_RES (20), (21), (22), (23): Xaa is A or G or is absent
SXKXSKVIMSMEGLXXXXXXXXXMIQITINSLDQSVXX

SEQ ID NO: 35747 - protein, 33 aa, Artificial Sequence
  Non-cyclic GFR-binding peptide
  MOD_RES (31), (32): Xaa is C or S
SRVIMSMEGLVKPKRGVMIQITINSLAQPVXXP

SEQ ID NO: 35748 - protein, 40 aa, Artificial Sequence
  Non-cyclic GFR-binding peptide
  MOD_RES (1), (3), (37), (38): Xaa is C or S
  MOD_RES (15), (16), (17), (18), (19): Xaa is A or G
  MOD_RES (20), (21), (22), (23): Xaa is A or G or is absent
XGXSEVVMDSMEGIXXXXXXXXXMIQITINSLRTPVXXTP

SEQ ID NO: 35749 - protein, 37 aa, Artificial Sequence
  Non-cyclic GFR-binding peptide
  MOD_RES (2), (34), (35): Xaa is C or S
GXSEVVMDSMEGLVVNNASDMIQITINSLRTPVXXTP

SEQ ID NO: 35750 - protein, 36 aa, Artificial Sequence
  Non-cyclic GFR-binding peptide
  MOD_RES (2), (4), (36): Xaa is C or S
HXGXSRVVMNSMEGLIVNSSDDMIQVTINSLKTPAX

SEQ ID NO: 35751 - protein, 37 aa, Artificial Sequence
  Non-cyclic GFR-binding peptide
  MOD_RES (1), (32), (33): Xaa is C or S
XSKVVMSMEGLVKPTRGVMIQITINSLDQPVXXPSAS

SEQ ID NO: 35752 - protein, 38 aa, Artificial Sequence
  Non-cyclic GFR-binding peptide
  MOD_RES (34), (35): Xaa is C or S
  MOD_RES (12), (13), (14), (15), (16): Xaa is A or G
  MOD_RES (17), (18), (19), (20): Xaa is A or G or is absent
AEVVMDSMEGLXXXXXXXXXMIQITINSLRAPVXXSAP

SEQ ID NO: 35753 - protein, 42 aa, Artificial Sequence
  Non-cyclic GFR-binding peptide
  MOD_RES (2), (4), (38), (39): Xaa is C or S
  MOD_RES (16), (17), (18), (19), (20): Xaa is A or G
  MOD_RES (21), (22), (23), (24): Xaa is A or G or is absent
RXGXSEVVMDSMEGIXXXXXXXXXMIQITINSLRTPVXXTPP

SEQ ID NO: 35754 - protein, 34 aa, Artificial Sequence
  Non-cyclic GFR-binding peptide
  MOD_RES (1), (3), (34): Xaa is C or S
XKXSRVIMSMEGLVKPKRGVMIQITINSLAQPVX

SEQ ID NO: 35755 - protein, 38 aa, Artificial Sequence
  Non-cyclic GFR-binding peptide
  MOD_RES (1), (34), (35): Xaa is C or S
  MOD_RES (12), (13), (14), (15), (16): Xaa is A or G
  MOD_RES (17), (18), (19), (20): Xaa is A or G or is absent
XSKVIMSMEGLXXXXXXXXXMIQITINSLDQSVXXPSA

SEQ ID NO: 35756 - protein, 37 aa, Artificial Sequence
  Non-cyclic GFR-binding peptide
  MOD_RES (1), (35), (36): Xaa is C or S
  MOD_RES (13), (14), (15), (16), (17): Xaa is A or G
  MOD_RES (18), (19), (20), (21): Xaa is A or G or is absent
XAEVVMDSMEGLXXXXXXXXXMIQITINSLRAPVXXS

SEQ ID NO: 35757 - protein, 35 aa, Artificial Sequence
  Non-cyclic GFR-binding peptide
  MOD_RES (1), (35): Xaa is C or S
  MOD_RES (13), (14), (15), (16), (17): Xaa is A or G
  MOD_RES (18), (19), (20), (21): Xaa is A or G or is absent
XAEVVMDSMEGIXXXXXXXXXMIQITINSLRAPVX

SEQ ID NO: 35758 - protein, 35 aa, Artificial Sequence
  Non-cyclic GFR-binding peptide
  MOD_RES (34), (35): Xaa is C or S
  MOD_RES (12), (13), (14), (15), (16): Xaa is A or G
  MOD_RES (17), (18), (19), (20): Xaa is A or G or is absent
AEVVMDSMEGIXXXXXXXXXMIQITINSLRAPVXX

SEQ ID NO: 35759 - protein, 40 aa, Artificial Sequence
  Non-cyclic GFR-binding peptide
  MOD_RES (2), (4), (35), (36): Xaa is C or S
SXKXSKVVMSMEGLVKPTRGVMIQITINSLDQPVXXPSAS

SEQ ID NO: 35760 - protein, 33 aa, Artificial Sequence
  Non-cyclic GFR-binding peptide
  MOD_RES (1), (3): Xaa is C or S
XKXSKVVMSMEGLVKPTRGVMIQITINSLDQPV

SEQ ID NO: 35761 - protein, 35 aa, Artificial Sequence
  Non-cyclic GFR-binding peptide
  MOD_RES (1), (32), (33): Xaa is C or S
XEEVIMSMEGILLVRGNDMIQMTINSTKVPAXXTS

SEQ ID NO: 35762 - protein, 41 aa, Artificial Sequence
  Non-cyclic GFR-binding peptide
  MOD_RES (1), (35), (36): Xaa is C or S
  MOD_RES (13), (14), (15), (16), (17): Xaa is A or G
  MOD_RES (18), (19), (20), (21): Xaa is A or G or is absent
XSRVVMNSMEGLXXXXXXXXXMIQVTINSLKTPAXXPKPVH

SEQ ID NO: 35763 - protein, 36 aa, Artificial Sequence
  Non-cyclic GFR-binding peptide
  MOD_RES (33), (34): Xaa is C or S
  MOD_RES (11), (12), (13), (14), (15): Xaa is A or G
  MOD_RES (16), (17), (18), (19): Xaa is A or G or is absent
RVVMNSMEGLXXXXXXXXXMIQVTINSLKTPAXXPK

SEQ ID NO: 35764 - protein, 43 aa, Artificial Sequence
  Non-cyclic GFR-binding peptide
  MOD_RES (2), (4), (37), (38): Xaa is C or S
  MOD_RES (15), (16), (17), (18), (19): Xaa is A or G
  MOD_RES (20), (21), (22), (23): Xaa is A or G or is absent
SXKXSRVIMSMEGLXXXXXXXXXMIQITINSLAQPVXXPAASA

SEQ ID NO: 35765 - protein, 42 aa, Artificial Sequence
  Non-cyclic GFR-binding peptide
  MOD_RES (2), (4), (36), (37): Xaa is C or S
SXGXRDVVMGSMEGIIIQQKDNMIQMTINSMKTPTXXPGASG

SEQ ID NO: 35766 - protein, 34 aa, Artificial Sequence
  Non-cyclic GFR-binding peptide
  MOD_RES (2), (33), (34): Xaa is C or S
KXSKVIMSMEGLIKPTKGIMIQITINSLDQSVXX

SEQ ID NO: 35767 - protein, 37 aa, Artificial Sequence
  Non-cyclic GFR-binding peptide
  MOD_RES (32), (33): Xaa is C or S
RDVVMGSMEGIIIQQKDNMIQMTINSMKTPTXXPGAS

SEQ ID NO: 35768 - protein, 37 aa, Artificial Sequence
  Non-cyclic GFR-binding peptide
  MOD_RES (2), (4), (37): Xaa is C or S
  MOD_RES (15), (16), (17), (18), (19): Xaa is A or G
  MOD_RES (20), (21), (22), (23): Xaa is A or G or is absent
SXKXSRVIMSMEGLXXXXXXXXXMIQITINSLAQPVX

SEQ ID NO: 35769 - protein, 38 aa, Artificial Sequence
  Non-cyclic GFR-binding peptide
  MOD_RES (1), (3), (35), (36): Xaa is C or S
XGXAEVVMDSMEGIVVNNAADMIQITINSLRAPVXXSA

SEQ ID NO: 35770 - protein, 38 aa, Artificial Sequence
  Non-cyclic GFR-binding peptide
  MOD_RES (1), (3), (37), (38): Xaa is C or S
  MOD_RES (15), (16), (17), (18), (19): Xaa is A or G
  MOD_RES (20), (21), (22), (23): Xaa is A or G or is absent
XGXSEVVMDSMEGIXXXXXXXXXMIQITINSLRTPVXX

SEQ ID NO: 35771 - protein, 32 aa, Artificial Sequence
  Non-cyclic GFR-binding peptide
  MOD_RES (1), (1): Xaa is C or S
XAEVVMDSMEGLVVNNAADMIQITINSLRAPV

SEQ ID NO: 35772 - protein, 36 aa, Artificial Sequence
  Non-cyclic GFR-binding peptide
  MOD_RES (33), (34): Xaa is C or S
  MOD_RES (11), (12), (13), (14), (15): Xaa is A or G
  MOD_RES (16), (17), (18), (19): Xaa is A or G or is absent
EVVMDSMEGLXXXXXXXXXMIQITINSLRAPVXXSA

SEQ ID NO: 35773 - protein, 38 aa, Artificial Sequence
  Non-cyclic GFR-binding peptide
  MOD_RES (32), (33): Xaa is C or S
AEVVMDSMEGLVVNNAADMIQITINSLRAPVXXSAPAA

SEQ ID NO: 35774 - protein, 39 aa, Artificial Sequence
  Non-cyclic GFR-binding peptide
  MOD_RES (2), (4), (37), (38): Xaa is C or S
  MOD_RES (15), (16), (17), (18), (19): Xaa is A or G
  MOD_RES (20), (21), (22), (23): Xaa is A or G or is absent
LXGXEEVIMSMEGLXXXXXXXXXMIQMTINSTKVPAXXT

SEQ ID NO: 35775 - protein, 36 aa, Artificial Sequence
  Non-cyclic GFR-binding peptide
  MOD_RES (1), (3), (36): Xaa is C or S
  MOD_RES (14), (15), (16), (17), (18): Xaa is A or G
  MOD_RES (19), (20), (21), (22): Xaa is A or G or is absent
XGXEEVIMSMEGLXXXXXXXXXMIQMTINSTKVPAX

SEQ ID NO: 35776 - protein, 33 aa, Artificial Sequence
  Non-cyclic GFR-binding peptide
  MOD_RES (31), (32): Xaa is C or S
DVVMGSMEGIIIQQKDNMIQMTINSMKTPTXXP

SEQ ID NO: 35777 - protein, 37 aa, Artificial Sequence
  Non-cyclic GFR-binding peptide
  MOD_RES (2), (33), (34): Xaa is C or S
KXSKVVMSMEGLVKPTRGVMIQITINSLDQPVXXPSA

SEQ ID NO: 35778 - protein, 37 aa, Artificial Sequence
  Non-cyclic GFR-binding peptide
  MOD_RES (2), (4): Xaa is C or S
  MOD_RES (16), (17), (18), (19), (20): Xaa is A or G
  MOD_RES (21), (22), (23), (24): Xaa is A or G or is absent
RXGXSEVVMDSMEGIXXXXXXXXXMIQITINSLRTPV

SEQ ID NO: 35779 - protein, 36 aa, Artificial Sequence
  Non-cyclic GFR-binding peptide
  MOD_RES (32), (33): Xaa is C or S
SRVVMNSMEGLIVNSSDDMIQVTINSLKTPAXXPKP

SEQ ID NO: 35780 - protein, 34 aa, Artificial Sequence
  Non-cyclic GFR-binding peptide
  MOD_RES (2), (4): Xaa is C or S
SXKXSKVVMSMEGLVKPTRGVMIQITINSLDQPV

SEQ ID NO: 35781 - protein, 40 aa, Artificial Sequence
  Non-cyclic GFR-binding peptide
  MOD_RES (2), (34), (35): Xaa is C or S
GXRDVVMGSMEGIIIQQKDNMIQMTINSMKTPTXXPGASG

SEQ ID NO: 35782 - protein, 38 aa, Artificial Sequence
  Non-cyclic GFR-binding peptide
  MOD_RES (1), (3), (34), (35): Xaa is C or S
XGXEEVIMSMEGILLVRGNDMIQMTINSTKVPAXXTSP

SEQ ID NO: 35783 - protein, 40 aa, Artificial Sequence
  Non-cyclic GFR-binding peptide
  MOD_RES (1), (3), (35), (36): Xaa is C or S
XGXAEVVMDSMEGLVVNNAADMIQITINSLRAPVXXSAPA

SEQ ID NO: 35784 - protein, 35 aa, Artificial Sequence
  Non-cyclic GFR-binding peptide
  MOD_RES (1), (32), (33): Xaa is C or S
XSKVIMSMEGLIKPTKGIMIQITINSLDQSVXXPS

SEQ ID NO: 35785 - protein, 39 aa, Artificial Sequence
  Non-cyclic GFR-binding peptide
  MOD_RES (2), (4), (38), (39): Xaa is C or S
  MOD_RES (16), (17), (18), (19), (20): Xaa is A or G
  MOD_RES (21), (22), (23), (24): Xaa is A or G or is absent
RXGXAEVVMDSMEGIXXXXXXXXXMIQITINSLRAPVXX

SEQ ID NO: 35786 - protein, 31 aa, Artificial Sequence
  Non-cyclic GFR-binding peptide
RDVVMGSMEGLIIQQKDNMIQMTINSMKTPT

SEQ ID NO: 35787 - protein, 31 aa, Artificial Sequence
  Non-cyclic GFR-binding peptide
  MOD_RES (31), (31): Xaa is C or S
DVVMGSMEGLIIQQKDNMIQMTINSMKTPTX

SEQ ID NO: 35788 - protein, 37 aa, Artificial Sequence
  Non-cyclic GFR-binding peptide
  MOD_RES (1), (33), (34): Xaa is C or S
XAEVVMDSMEGIVVNNAADMIQITINSLRAPVXXSAP

SEQ ID NO: 35789 - protein, 34 aa, Artificial Sequence
  Non-cyclic GFR-binding peptide
  MOD_RES (34), (34): Xaa is C or S
  MOD_RES (12), (13), (14), (15), (16): Xaa is A or G
  MOD_RES (17), (18), (19), (20): Xaa is A or G or is absent
AEVVMDSMEGLXXXXXXXXXMIQITINSLRAPVX

SEQ ID NO: 35790 - protein, 37 aa, Artificial Sequence
  Non-cyclic GFR-binding peptide
  MOD_RES (2), (4), (36), (37): Xaa is C or S
HXGXSRVVMNSMEGLIVNSSDDMIQVTINSLKTPAXX

SEQ ID NO: 35791 - protein, 34 aa, Artificial Sequence
  Non-cyclic GFR-binding peptide
  MOD_RES (33), (34): Xaa is C or S
  MOD_RES (11), (12), (13), (14), (15): Xaa is A or G
  MOD_RES (16), (17), (18), (19): Xaa is A or G or is absent
SRVIMSMEGLXXXXXXXXXMIQITINSLAQPVXX

SEQ ID NO: 35792 - protein, 34 aa, Artificial Sequence
  Non-cyclic GFR-binding peptide
  MOD_RES (2), (34): Xaa is C or S
GXAEVVMDSMEGLVVNNAADMIQITINSLRAPVX

SEQ ID NO: 35793 - protein, 35 aa, Artificial Sequence
  Non-cyclic GFR-binding peptide
  MOD_RES (1), (3): Xaa is C or S
  MOD_RES (14), (15), (16), (17), (18): Xaa is A or G
  MOD_RES (19), (20), (21), (22): Xaa is A or G or is absent
XGXEEVIMSMEGLXXXXXXXXXMIQMTINSTKVPA

SEQ ID NO: 35794 - protein, 39 aa, Artificial Sequence
  Non-cyclic GFR-binding peptide
  MOD_RES (1), (3), (35), (36): Xaa is C or S
XGXSEVVMDSMEGLVVNNASDMIQITINSLRTPVXXTPP

SEQ ID NO: 35795 - protein, 34 aa, Artificial Sequence
  Non-cyclic GFR-binding peptide
  MOD_RES (2), (4): Xaa is C or S
SXKXSKVIMSMEGLIKPTKGIMIQITINSLDQSV

SEQ ID NO: 35796 - protein, 33 aa, Artificial Sequence
  Non-cyclic GFR-binding peptide
  MOD_RES (32), (33): Xaa is C or S
RDVVMGSMEGIIIQQKDNMIQMTINSMKTPTXX

SEQ ID NO: 35797 - protein, 36 aa, Artificial Sequence
  Non-cyclic GFR-binding peptide
  MOD_RES (2), (4): Xaa is C or S
  MOD_RES (15), (16), (17), (18), (19): Xaa is A or G
  MOD_RES (20), (21), (22), (23): Xaa is A or G or is absent
LXGXEEVIMSMEGIXXXXXXXXXMIQMTINSTKVPA

SEQ ID NO: 35798 - protein, 32 aa, Artificial Sequence
  Non-cyclic GFR-binding peptide
  MOD_RES (11), (12), (13), (14), (15): Xaa is A or G
  MOD_RES (16), (17), (18), (19): Xaa is A or G or is absent
RVVMNSMEGLXXXXXXXXXMIQVTINSLKTPA

SEQ ID NO: 35799 - protein, 31 aa, Artificial Sequence
  Non-cyclic GFR-binding peptide
  MOD_RES (1), (1): Xaa is C or S
XSRVIMSMEGLVKPKRGVMIQITINSLAQPV

SEQ ID NO: 35800 - protein, 39 aa, Artificial Sequence
  Non-cyclic GFR-binding peptide
  MOD_RES (2), (4), (35), (36): Xaa is C or S
SXKXSRVIMSMEGLVKPKRGVMIQITINSLAQPVXXPAA

SEQ ID NO: 35801 - protein, 36 aa, Artificial Sequence
  Non-cyclic GFR-binding peptide
  MOD_RES (2), (36): Xaa is C or S
  MOD_RES (14), (15), (16), (17), (18): Xaa is A or G
  MOD_RES (19), (20), (21), (22): Xaa is A or G or is absent
GXRDVVMGSMEGLXXXXXXXXXMIQMTINSMKTPTX

SEQ ID NO: 35802 - protein, 39 aa, Artificial Sequence
  Non-cyclic GFR-binding peptide
  MOD_RES (1), (3), (34), (35): Xaa is C or S
XKXSKVIMSMEGLIKPTKGIMIQITINSLDQSVXXPSAS

SEQ ID NO: 35803 - protein, 39 aa, Artificial Sequence
  Non-cyclic GFR-binding peptide
  MOD_RES (33), (34): Xaa is C or S
  MOD_RES (11), (12), (13), (14), (15): Xaa is A or G
  MOD_RES (16), (17), (18), (19): Xaa is A or G or is absent
EVVMDSMEGIXXXXXXXXXMIQITINSLRTPVXXTPPTS

SEQ ID NO: 35804 - protein, 36 aa, Artificial Sequence
  Non-cyclic GFR-binding peptide
  MOD_RES (2), (36): Xaa is C or S
  MOD_RES (14), (15), (16), (17), (18): Xaa is A or G
  MOD_RES (19), (20), (21), (22): Xaa is A or G or is absent
GXSRVVMNSMEGLXXXXXXXXXMIQVTINSLKTPAX

SEQ ID NO: 35805 - protein, 39 aa, Artificial Sequence
  Non-cyclic GFR-binding peptide
  MOD_RES (1), (3), (37), (38): Xaa is C or S
  MOD_RES (15), (16), (17), (18), (19): Xaa is A or G
  MOD_RES (20), (21), (22), (23): Xaa is A or G or is absent
XGXSRVVMNSMEGLXXXXXXXXXMIQVTINSLKTPAXXP

SEQ ID NO: 35806 - protein, 39 aa, Artificial Sequence
  Non-cyclic GFR-binding peptide
  MOD_RES (1), (35), (36): Xaa is C or S
  MOD_RES (13), (14), (15), (16), (17): Xaa is A or G
  MOD_RES (18), (19), (20), (21): Xaa is A or G or is absent
XAEVVMDSMEGLXXXXXXXXXMIQITINSLRAPVXXSAP

SEQ ID NO: 35807 - protein, 39 aa, Artificial Sequence
  Non-cyclic GFR-binding peptide
  MOD_RES (2), (36), (37): Xaa is C or S
  MOD_RES (14), (15), (16), (17), (18): Xaa is A or G
  MOD_RES (19), (20), (21), (22): Xaa is A or G or is absent
GXAEVVMDSMEGIXXXXXXXXXMIQITINSLRAPVXXSA

SEQ ID NO: 35808 - protein, 38 aa, Artificial Sequence
  Non-cyclic GFR-binding peptide
  MOD_RES (33), (34): Xaa is C or S
  MOD_RES (11), (12), (13), (14), (15): Xaa is A or G
  MOD_RES (16), (17), (18), (19): Xaa is A or G or is absent
SKVIMSMEGLXXXXXXXXXMIQITINSLDQSVXXPSAS

SEQ ID NO: 35809 - protein, 40 aa, Artificial Sequence
  Non-cyclic GFR-binding peptide
  MOD_RES (2), (36), (37): Xaa is C or S
  MOD_RES (14), (15), (16), (17), (18): Xaa is A or G
  MOD_RES (19), (20), (21), (22): Xaa is A or G or is absent
GXSRVVMNSMEGLXXXXXXXXXMIQVTINSLKTPAXXPKP

SEQ ID NO: 35810 - protein, 44 aa, Artificial Sequence
  Non-cyclic GFR-binding peptide
  MOD_RES (2), (4), (38), (39): Xaa is C or S
  MOD_RES (16), (17), (18), (19), (20): Xaa is A or G
  MOD_RES (21), (22), (23), (24): Xaa is A or G or is absent
RXGXSEVVMDSMEGIXXXXXXXXXMIQITINSLRTPVXXTPPTS

SEQ ID NO: 35811 - protein, 36 aa, Artificial Sequence
  Non-cyclic GFR-binding peptide
  MOD_RES (31), (32): Xaa is C or S
SRVIMSMEGLVKPKRGVMIQITINSLAQPVXXPAAS

SEQ ID NO: 35812 - protein, 38 aa, Artificial Sequence
  Non-cyclic GFR-binding peptide
  MOD_RES (34), (35): Xaa is C or S
  MOD_RES (12), (13), (14), (15), (16): Xaa is A or G
  MOD_RES (17), (18), (19), (20): Xaa is A or G or is absent
RDVVMGSMEGLXXXXXXXXXMIQMTINSMKTPTXXPGA

SEQ ID NO: 35813 - protein, 37 aa, Artificial Sequence
  Non-cyclic GFR-binding peptide
  MOD_RES (1), (32), (33): Xaa is C or S
XEEVIMSMEGLLLVRGNDMIQMTINSTKVPAXXTSPV

SEQ ID NO: 35814 - protein, 35 aa, Artificial Sequence
  Non-cyclic GFR-binding peptide
  MOD_RES (1), (32), (33): Xaa is C or S
XSRVIMSMEGLVKPKRGVMIQITINSLAQPVXXPA

SEQ ID NO: 35815 - protein, 30 aa, Artificial Sequence
  Non-cyclic GFR-binding peptide
EVVMDSMEGIVVNNAADMIQITINSLRAPV

SEQ ID NO: 35816 - protein, 33 aa, Artificial Sequence
  Non-cyclic GFR-binding peptide
  MOD_RES (1), (32), (33): Xaa is C or S
XEEVIMSMEGILLVRGNDMIQMTINSTKVPAXX

SEQ ID NO: 35817 - protein, 34 aa, Artificial Sequence
  Non-cyclic GFR-binding peptide
  MOD_RES (31), (32): Xaa is C or S
EEVIMSMEGILLVRGNDMIQMTINSTKVPAXXTS

SEQ ID NO: 35818 - protein, 38 aa, Artificial Sequence
  Non-cyclic GFR-binding peptide
  MOD_RES (2), (4), (35), (36): Xaa is C or S
LXGXEEVIMSMEGLLLVRGNDMIQMTINSTKVPAXXTS

SEQ ID NO: 35819 - protein, 39 aa, Artificial Sequence
  Non-cyclic GFR-binding peptide
  MOD_RES (33), (34): Xaa is C or S
  MOD_RES (11), (12), (13), (14), (15): Xaa is A or G
  MOD_RES (16), (17), (18), (19): Xaa is A or G or is absent
RVVMNSMEGIXXXXXXXXXMIQVTINSLKTPAXXPKPVH

SEQ ID NO: 35820 - protein, 41 aa, Artificial Sequence
  Non-cyclic GFR-binding peptide
  MOD_RES (2), (4), (36), (37): Xaa is C or S
RXGXSEVVMDSMEGIVVNNASDMIQITINSLRTPVXXTPPT

SEQ ID NO: 35821 - protein, 41 aa, Artificial Sequence
  Non-cyclic GFR-binding peptide
  MOD_RES (2), (4), (38), (39): Xaa is C or S
  MOD_RES (16), (17), (18), (19), (20): Xaa is A or G
  MOD_RES (21), (22), (23), (24): Xaa is A or G or is absent
SXGXRDVVMGSMEGIXXXXXXXXXMIQMTINSMKTPTXXPG

SEQ ID NO: 35822 - protein, 40 aa, Artificial Sequence
  Non-cyclic GFR-binding peptide
  MOD_RES (2), (4), (38), (39): Xaa is C or S
  MOD_RES (16), (17), (18), (19), (20): Xaa is A or G
  MOD_RES (21), (22), (23), (24): Xaa is A or G or is absent
RXGXAEVVMDSMEGLXXXXXXXXXMIQITINSLRAPVXXS

SEQ ID NO: 35823 - protein, 33 aa, Artificial Sequence
  Non-cyclic GFR-binding peptide
  MOD_RES (33), (33): Xaa is C or S
  MOD_RES (11), (12), (13), (14), (15): Xaa is A or G
  MOD_RES (16), (17), (18), (19): Xaa is A or G or is absent
DVVMGSMEGIXXXXXXXXXMIQMTINSMKTPTX

SEQ ID NO: 35824 - protein, 39 aa, Artificial Sequence
  Non-cyclic GFR-binding peptide
  MOD_RES (34), (35): Xaa is C or S
  MOD_RES (12), (13), (14), (15), (16): Xaa is A or G
  MOD_RES (17), (18), (19), (20): Xaa is A or G or is absent
RDVVMGSMEGIXXXXXXXXXMIQMTINSMKTPTXXPGAS

SEQ ID NO: 35825 - protein, 40 aa, Artificial Sequence
  Non-cyclic GFR-binding peptide
  MOD_RES (2), (4), (36), (37): Xaa is C or S
SXGXRDVVMGSMEGLIIQQKDNMIQMTINSMKTPTXXPGA

SEQ ID NO: 35826 - protein, 37 aa, Artificial Sequence
  Non-cyclic GFR-binding peptide
  MOD_RES (33), (34): Xaa is C or S
  MOD_RES (11), (12), (13), (14), (15): Xaa is A or G
  MOD_RES (16), (17), (18), (19): Xaa is A or G or is absent
SRVIMSMEGLXXXXXXXXXMIQITINSLAQPVXXPAA

SEQ ID NO: 35827 - protein, 38 aa, Artificial Sequence
  Non-cyclic GFR-binding peptide
  MOD_RES (2), (4), (35), (36): Xaa is C or S
LXGXEEVIMSMEGILLVRGNDMIQMTINSTKVPAXXTS

SEQ ID NO: 35828 - protein, 36 aa, Artificial Sequence
  Non-cyclic GFR-binding peptide
  MOD_RES (2), (4), (35), (36): Xaa is C or S
LXGXEEVIMSMEGILLVRGNDMIQMTINSTKVPAXX

SEQ ID NO: 35829 - protein, 39 aa, Artificial Sequence
  Non-cyclic GFR-binding peptide
  MOD_RES (2), (4), (38), (39): Xaa is C or S
  MOD_RES (16), (17), (18), (19), (20): Xaa is A or G
  MOD_RES (21), (22), (23), (24): Xaa is A or G or is absent
SXGXRDVVMGSMEGLXXXXXXXXXMIQMTINSMKTPTXX

SEQ ID NO: 35830 - protein, 37 aa, Artificial Sequence
  Non-cyclic GFR-binding peptide
  MOD_RES (1), (3), (34), (35): Xaa is C or S
XKXSRVIMSMEGLVKPKRGVMIQITINSLAQPVXXPA

SEQ ID NO: 35831 - protein, 41 aa, Artificial Sequence
  Non-cyclic GFR-binding peptide
  MOD_RES (2), (4), (38), (39): Xaa is C or S
  MOD_RES (16), (17), (18), (19), (20): Xaa is A or G
  MOD_RES (21), (22), (23), (24): Xaa is A or G or is absent
RXGXAEVVMDSMEGLXXXXXXXXXMIQITINSLRAPVXXSA

SEQ ID NO: 35832 - protein, 32 aa, Artificial Sequence
  Non-cyclic GFR-binding peptide
  MOD_RES (32), (32): Xaa is C or S
AEVVMDSMEGLVVNNAADMIQITINSLRAPVX

SEQ ID NO: 35833 - protein, 36 aa, Artificial Sequence
  Non-cyclic GFR-binding peptide
  MOD_RES (2), (4), (35), (36): Xaa is C or S
SXKXSKVIMSMEGLIKPTKGIMIQITINSLDQSVXX

SEQ ID NO: 35834 - protein, 34 aa, Artificial Sequence
  Non-cyclic GFR-binding peptide
  MOD_RES (1), (33), (34): Xaa is C or S
XSEVVMDSMEGLVVNNASDMIQITINSLRTPVXX

SEQ ID NO: 35835 - protein, 40 aa, Artificial Sequence
  Non-cyclic GFR-binding peptide
  MOD_RES (1), (35), (36): Xaa is C or S
  MOD_RES (13), (14), (15), (16), (17): Xaa is A or G
  MOD_RES (18), (19), (20), (21): Xaa is A or G or is absent
XRDVVMGSMEGIXXXXXXXXXMIQMTINSMKTPTXXPGAS

SEQ ID NO: 35836 - protein, 39 aa, Artificial Sequence
  Non-cyclic GFR-binding peptide
  MOD_RES (33), (34): Xaa is C or S
  MOD_RES (11), (12), (13), (14), (15): Xaa is A or G
  MOD_RES (16), (17), (18), (19): Xaa is A or G or is absent
DVVMGSMEGLXXXXXXXXXMIQMTINSMKTPTXXPGASG

SEQ ID NO: 35837 - protein, 36 aa, Artificial Sequence
  Non-cyclic GFR-binding peptide
  MOD_RES (31), (32): Xaa is C or S
DVVMGSMEGLIIQQKDNMIQMTINSMKTPTXXPGAS

SEQ ID NO: 35838 - protein, 34 aa, Artificial Sequence
  Non-cyclic GFR-binding peptide
  MOD_RES (1), (32), (33): Xaa is C or S
XSKVVMSMEGLVKPTRGVMIQITINSLDQPVXXP

SEQ ID NO: 35839 - protein, 41 aa, Artificial Sequence
  Non-cyclic GFR-binding peptide
  MOD_RES (2), (35), (36): Xaa is C or S
  MOD_RES (13), (14), (15), (16), (17): Xaa is A or G
  MOD_RES (18), (19), (20), (21): Xaa is A or G or is absent
KXSKVIMSMEGLXXXXXXXXXMIQITINSLDQSVXXPSASA

SEQ ID NO: 35840 - protein, 40 aa, Artificial Sequence
  Non-cyclic GFR-binding peptide
  MOD_RES (1), (35), (36): Xaa is C or S
  MOD_RES (13), (14), (15), (16), (17): Xaa is A or G
  MOD_RES (18), (19), (20), (21): Xaa is A or G or is absent
XSEVVMDSMEGLXXXXXXXXXMIQITINSLRTPVXXTPPT

SEQ ID NO: 35841 - protein, 37 aa, Artificial Sequence
  Non-cyclic GFR-binding peptide
  MOD_RES (32), (33): Xaa is C or S
AEVVMDSMEGIVVNNAADMIQITINSLRAPVXXSAPA

SEQ ID NO: 35842 - protein, 39 aa, Artificial Sequence
  Non-cyclic GFR-binding peptide
  MOD_RES (33), (34): Xaa is C or S
  MOD_RES (11), (12), (13), (14), (15): Xaa is A or G
  MOD_RES (16), (17), (18), (19): Xaa is A or G or is absent
EEVIMSMEGIXXXXXXXXXMIQMTINSTKVPAXXTSPVR

SEQ ID NO: 35843 - protein, 43 aa, Artificial Sequence
  Non-cyclic GFR-binding peptide
  MOD_RES (2), (4), (38), (39): Xaa is C or S
  MOD_RES (16), (17), (18), (19), (20): Xaa is A or G
  MOD_RES (21), (22), (23), (24): Xaa is A or G or is absent
RXGXSEVVMDSMEGIXXXXXXXXXMIQITINSLRTPVXXTPPT

SEQ ID NO: 35844 - protein, 40 aa, Artificial Sequence
  Non-cyclic GFR-binding peptide
  MOD_RES (1), (35), (36): Xaa is C or S
  MOD_RES (13), (14), (15), (16), (17): Xaa is A or G
  MOD_RES (18), (19), (20), (21): Xaa is A or G or is absent
XSRVVMNSMEGLXXXXXXXXXMIQVTINSLKTPAXXPKPV

SEQ ID NO: 35845 - protein, 40 aa, Artificial Sequence
  Non-cyclic GFR-binding peptide
  MOD_RES (2), (4), (36), (37): Xaa is C or S
RXGXSEVVMDSMEGIVVNNASDMIQITINSLRTPVXXTPP

SEQ ID NO: 35846 - protein, 38 aa, Artificial Sequence
  Non-cyclic GFR-binding peptide
  MOD_RES (1), (3), (35), (36): Xaa is C or S
XGXAEVVMDSMEGLVVNNAADMIQITINSLRAPVXXSA

SEQ ID NO: 35847 - protein, 37 aa, Artificial Sequence
  Non-cyclic GFR-binding peptide
  MOD_RES (1), (34), (35): Xaa is C or S
  MOD_RES (12), (13), (14), (15), (16): Xaa is A or G
  MOD_RES (17), (18), (19), (20): Xaa is A or G or is absent
XEEVIMSMEGLXXXXXXXXXMIQMTINSTKVPAXXTS

SEQ ID NO: 35848 - protein, 37 aa, Artificial Sequence
  Non-cyclic GFR-binding peptide
  MOD_RES (34), (35): Xaa is C or S
  MOD_RES (12), (13), (14), (15), (16): Xaa is A or G
  MOD_RES (17), (18), (19), (20): Xaa is A or G or is absent
AEVVMDSMEGLXXXXXXXXXMIQITINSLRAPVXXSA

SEQ ID NO: 35849 - protein, 35 aa, Artificial Sequence
  Non-cyclic GFR-binding peptide
  MOD_RES (2), (4): Xaa is C or S
HXGXSRVVMNSMEGLIVNSSDDMIQVTINSLKTPA

SEQ ID NO: 35850 - protein, 35 aa, Artificial Sequence
  Non-cyclic GFR-binding peptide
  MOD_RES (1), (33), (34): Xaa is C or S
XRDVVMGSMEGIIIQQKDNMIQMTINSMKTPTXXP

SEQ ID NO: 35851 - protein, 38 aa, Artificial Sequence
  Non-cyclic GFR-binding peptide
  MOD_RES (1), (3), (37), (38): Xaa is C or S
  MOD_RES (15), (16), (17), (18), (19): Xaa is A or G
  MOD_RES (20), (21), (22), (23): Xaa is A or G or is absent
XGXSEVVMDSMEGLXXXXXXXXXMIQITINSLRTPVXX

SEQ ID NO: 35852 - protein, 39 aa, Artificial Sequence
  Non-cyclic GFR-binding peptide
  MOD_RES (2), (4), (37), (38): Xaa is C or S
  MOD_RES (15), (16), (17), (18), (19): Xaa is A or G
  MOD_RES (20), (21), (22), (23): Xaa is A or G or is absent
LXGXEEVIMSMEGIXXXXXXXXXMIQMTINSTKVPAXXT

SEQ ID NO: 35853 - protein, 38 aa, Artificial Sequence
  Non-cyclic GFR-binding peptide
  MOD_RES (1), (3), (37), (38): Xaa is C or S
  MOD_RES (15), (16), (17), (18), (19): Xaa is A or G
  MOD_RES (20), (21), (22), (23): Xaa is A or G or is absent
XGXAEVVMDSMEGIXXXXXXXXXMIQITINSLRAPVXX

SEQ ID NO: 35854 - protein, 33 aa, Artificial Sequence
  Non-cyclic GFR-binding peptide
  MOD_RES (1), (32), (33): Xaa is C or S
XSRVIMSMEGLVKPKRGVMIQITINSLAQPVXX

SEQ ID NO: 35855 - protein, 35 aa, Artificial Sequence
  Non-cyclic GFR-binding peptide
  MOD_RES (2), (2): Xaa is C or S
  MOD_RES (14), (15), (16), (17), (18): Xaa is A or G
  MOD_RES (19), (20), (21), (22): Xaa is A or G or is absent
GXAEVVMDSMEGLXXXXXXXXXMIQITINSLRAPV

SEQ ID NO: 35856 - protein, 36 aa, Artificial Sequence
  Non-cyclic GFR-binding peptide
  MOD_RES (1), (33), (34): Xaa is C or S
XSEVVMDSMEGIVVNNASDMIQITINSLRTPVXXTP

SEQ ID NO: 35857 - protein, 39 aa, Artificial Sequence
  Non-cyclic GFR-binding peptide
  MOD_RES (1), (3), (37), (38): Xaa is C or S
  MOD_RES (15), (16), (17), (18), (19): Xaa is A or G
  MOD_RES (20), (21), (22), (23): Xaa is A or G or is absent
XGXSEVVMDSMEGLXXXXXXXXXMIQITINSLRTPVXXT

SEQ ID NO: 35858 - protein, 37 aa, Artificial Sequence
  Non-cyclic GFR-binding peptide
  MOD_RES (1), (3), (36), (37): Xaa is C or S
  MOD_RES (14), (15), (16), (17), (18): Xaa is A or G
  MOD_RES (19), (20), (21), (22): Xaa is A or G or is absent
XGXEEVIMSMEGLXXXXXXXXXMIQMTINSTKVPAXX

SEQ ID NO: 35859 - protein, 40 aa, Artificial Sequence
  Non-cyclic GFR-binding peptide
  MOD_RES (2), (36), (37): Xaa is C or S
  MOD_RES (14), (15), (16), (17), (18): Xaa is A or G
  MOD_RES (19), (20), (21), (22): Xaa is A or G or is absent
GXRDVVMGSMEGIXXXXXXXXXMIQMTINSMKTPTXXPGA

SEQ ID NO: 35860 - protein, 35 aa, Artificial Sequence
  Non-cyclic GFR-binding peptide
  MOD_RES (32), (33): Xaa is C or S
RDVVMGSMEGIIIQQKDNMIQMTINSMKTPTXXPG

SEQ ID NO: 35861 - protein, 38 aa, Artificial Sequence
  Non-cyclic GFR-binding peptide
  MOD_RES (1), (33), (34): Xaa is C or S
XSEVVMDSMEGIVVNNASDMIQITINSLRTPVXXTPPT

SEQ ID NO: 35862 - protein, 39 aa, Artificial Sequence
  Non-cyclic GFR-binding peptide
  MOD_RES (1), (3), (35), (36): Xaa is C or S
XGXRDVVMGSMEGIIIQQKDNMIQMTINSMKTPTXXPGA

SEQ ID NO: 35863 - protein, 30 aa, Artificial Sequence
  Non-cyclic GFR-binding peptide
EVVMDSMEGLVVNNASDMIQITINSLRTPV

SEQ ID NO: 35864 - protein, 34 aa, Artificial Sequence
  Non-cyclic GFR-binding peptide
  MOD_RES (33), (34): Xaa is C or S
  MOD_RES (11), (12), (13), (14), (15): Xaa is A or G
  MOD_RES (16), (17), (18), (19): Xaa is A or G or is absent
DVVMGSMEGIXXXXXXXXXMIQMTINSMKTPTXX

SEQ ID NO: 35865 - protein, 36 aa, Artificial Sequence
  Non-cyclic GFR-binding peptide
  MOD_RES (1), (3), (35), (36): Xaa is C or S
XGXAEVVMDSMEGLVVNNAADMIQITINSLRAPVXX

SEQ ID NO: 35866 - protein, 36 aa, Artificial Sequence
  Non-cyclic GFR-binding peptide
  MOD_RES (2), (36): Xaa is C or S
  MOD_RES (14), (15), (16), (17), (18): Xaa is A or G
  MOD_RES (19), (20), (21), (22): Xaa is A or G or is absent
GXSEVVMDSMEGLXXXXXXXXXMIQITINSLRTPVX

SEQ ID NO: 35867 - protein, 37 aa, Artificial Sequence
  Non-cyclic GFR-binding peptide
  MOD_RES (34), (35): Xaa is C or S
  MOD_RES (12), (13), (14), (15), (16): Xaa is A or G
  MOD_RES (17), (18), (19), (20): Xaa is A or G or is absent
RDVVMGSMEGIXXXXXXXXXMIQMTINSMKTPTXXPG

SEQ ID NO: 35868 - protein, 38 aa, Artificial Sequence
  Non-cyclic GFR-binding peptide
  MOD_RES (2), (4), (37), (38): Xaa is C or S
  MOD_RES (15), (16), (17), (18), (19): Xaa is A or G
  MOD_RES (20), (21), (22), (23): Xaa is A or G or is absent
LXGXEEVIMSMEGIXXXXXXXXXMIQMTINSTKVPAXX

SEQ ID NO: 35869 - protein, 42 aa, Artificial Sequence
  Non-cyclic GFR-binding peptide
  MOD_RES (1), (3), (37), (38): Xaa is C or S
  MOD_RES (15), (16), (17), (18), (19): Xaa is A or G
  MOD_RES (20), (21), (22), (23): Xaa is A or G or is absent
XGXRDVVMGSMEGIXXXXXXXXXMIQMTINSMKTPTXXPGAS

SEQ ID NO: 35870 - protein, 42 aa, Artificial Sequence
  Non-cyclic GFR-binding peptide
  MOD_RES (2), (4), (36), (37): Xaa is C or S
RXGXSEVVMDSMEGLVVNNASDMIQITINSLRTPVXXTPPTS

SEQ ID NO: 35871 - protein, 38 aa, Artificial Sequence
  Non-cyclic GFR-binding peptide
  MOD_RES (1), (35), (36): Xaa is C or S
  MOD_RES (13), (14), (15), (16), (17): Xaa is A or G
  MOD_RES (18), (19), (20), (21): Xaa is A or G or is absent
XSEVVMDSMEGIXXXXXXXXXMIQITINSLRTPVXXTP

SEQ ID NO: 35872 - protein, 40 aa, Artificial Sequence
  Non-cyclic GFR-binding peptide
  MOD_RES (2), (34), (35): Xaa is C or S
GXAEVVMDSMEGIVVNNAADMIQITINSLRAPVXXSAPAA

SEQ ID NO: 35873 - protein, 34 aa, Artificial Sequence
  Non-cyclic GFR-binding peptide
  MOD_RES (2), (34): Xaa is C or S
GXRDVVMGSMEGIIIQQKDNMIQMTINSMKTPTX

SEQ ID NO: 35874 - protein, 37 aa, Artificial Sequence
  Non-cyclic GFR-binding peptide
  MOD_RES (2), (4), (35), (36): Xaa is C or S
LXGXEEVIMSMEGLLLVRGNDMIQMTINSTKVPAXXT

SEQ ID NO: 35875 - protein, 37 aa, Artificial Sequence
  Non-cyclic GFR-binding peptide
  MOD_RES (31), (32): Xaa is C or S
EEVIMSMEGILLVRGNDMIQMTINSTKVPAXXTSPVR

SEQ ID NO: 35876 - protein, 38 aa, Artificial Sequence
  Non-cyclic GFR-binding peptide
  MOD_RES (2), (4), (36), (37): Xaa is C or S
RXGXSEVVMDSMEGIVVNNASDMIQITINSLRTPVXXT

SEQ ID NO: 35877 - protein, 42 aa, Artificial Sequence
  Non-cyclic GFR-binding peptide
  MOD_RES (1), (3), (37), (38): Xaa is C or S
  MOD_RES (15), (16), (17), (18), (19): Xaa is A or G
  MOD_RES (20), (21), (22), (23): Xaa is A or G or is absent
XGXSEVVMDSMEGIXXXXXXXXXMIQITINSLRTPVXXTPPT

SEQ ID NO: 35878 - protein, 32 aa, Artificial Sequence
  Non-cyclic GFR-binding peptide
  MOD_RES (32), (32): Xaa is C or S
SEVVMDSMEGLVVNNASDMIQITINSLRTPVX

SEQ ID NO: 35879 - protein, 35 aa, Artificial Sequence
  Non-cyclic GFR-binding peptide
  MOD_RES (33), (34): Xaa is C or S
  MOD_RES (11), (12), (13), (14), (15): Xaa is A or G
  MOD_RES (16), (17), (18), (19): Xaa is A or G or is absent
RVVMNSMEGLXXXXXXXXXMIQVTINSLKTPAXXP

SEQ ID NO: 35880 - protein, 36 aa, Artificial Sequence
  Non-cyclic GFR-binding peptide
  MOD_RES (2), (34), (35): Xaa is C or S
GXSEVVMDSMEGIVVNNASDMIQITINSLRTPVXXT

SEQ ID NO: 35881 - protein, 36 aa, Artificial Sequence
  Non-cyclic GFR-binding peptide
  MOD_RES (1), (35), (36): Xaa is C or S
  MOD_RES (13), (14), (15), (16), (17): Xaa is A or G
  MOD_RES (18), (19), (20), (21): Xaa is A or G or is absent
XAEVVMDSMEGIXXXXXXXXXMIQITINSLRAPVXX

SEQ ID NO: 35882 - protein, 37 aa, Artificial Sequence
  Non-cyclic GFR-binding peptide
  MOD_RES (2), (34), (35): Xaa is C or S
GXRDVVMGSMEGLIIQQKDNMIQMTINSMKTPTXXPG

SEQ ID NO: 35883 - protein, 39 aa, Artificial Sequence
  Non-cyclic GFR-binding peptide
  MOD_RES (1), (34), (35): Xaa is C or S
  MOD_RES (12), (13), (14), (15), (16): Xaa is A or G
  MOD_RES (17), (18), (19), (20): Xaa is A or G or is absent
XEEVIMSMEGIXXXXXXXXXMIQMTINSTKVPAXXTSPV

SEQ ID NO: 35884 - protein, 34 aa, Artificial Sequence
  Non-cyclic GFR-binding peptide
  MOD_RES (31), (32): Xaa is C or S
DVVMGSMEGLIIQQKDNMIQMTINSMKTPTXXPG

SEQ ID NO: 35885 - protein, 35 aa, Artificial Sequence
  Non-cyclic GFR-binding peptide
  MOD_RES (1), (3), (34), (35): Xaa is C or S
XKXSRVIMSMEGLVKPKRGVMIQITINSLAQPVXX

SEQ ID NO: 35886 - protein, 40 aa, Artificial Sequence
  Non-cyclic GFR-binding peptide
  MOD_RES (34), (35): Xaa is C or S
  MOD_RES (12), (13), (14), (15), (16): Xaa is A or G
  MOD_RES (17), (18), (19), (20): Xaa is A or G or is absent
SRVVMNSMEGLXXXXXXXXXMIQVTINSLKTPAXXPKPVH

SEQ ID NO: 35887 - protein, 36 aa, Artificial Sequence
  Non-cyclic GFR-binding peptide
  MOD_RES (1), (32), (33): Xaa is C or S
XSRVIMSMEGLVKPKRGVMIQITINSLAQPVXXPAA

SEQ ID NO: 35888 - protein, 38 aa, Artificial Sequence
  Non-cyclic GFR-binding peptide
  MOD_RES (2), (4), (35), (36): Xaa is C or S
SXKXSKVIMSMEGLIKPTKGIMIQITINSLDQSVXXPS

SEQ ID NO: 35889 - protein, 38 aa, Artificial Sequence
  Non-cyclic GFR-binding peptide
  MOD_RES (2), (34), (35): Xaa is C or S
GXRDVVMGSMEGLIIQQKDNMIQMTINSMKTPTXXPGA

SEQ ID NO: 35890 - protein, 39 aa, Artificial Sequence
  Non-cyclic GFR-binding peptide
  MOD_RES (1), (33), (34): Xaa is C or S
XSRVVMNSMEGLIVNSSDDMIQVTINSLKTPAXXPKPVH

SEQ ID NO: 35891 - protein, 41 aa, Artificial Sequence
  Non-cyclic GFR-binding peptide
  MOD_RES (1), (35), (36): Xaa is C or S
  MOD_RES (13), (14), (15), (16), (17): Xaa is A or G
  MOD_RES (18), (19), (20), (21): Xaa is A or G or is absent
XRDVVMGSMEGIXXXXXXXXXMIQMTINSMKTPTXXPGASG

SEQ ID NO: 35892 - protein, 34 aa, Artificial Sequence
  Non-cyclic GFR-binding peptide
  MOD_RES (1), (32), (33): Xaa is C or S
XEEVIMSMEGLLLVRGNDMIQMTINSTKVPAXXT

SEQ ID NO: 35893 - protein, 33 aa, Artificial Sequence
  Non-cyclic GFR-binding peptide
  MOD_RES (31), (32): Xaa is C or S
EEVIMSMEGLLLVRGNDMIQMTINSTKVPAXXT

SEQ ID NO: 35894 - protein, 36 aa, Artificial Sequence
  Non-cyclic GFR-binding peptide
  MOD_RES (1), (32), (33): Xaa is C or S
XSKVIMSMEGLIKPTKGIMIQITINSLDQSVXXPSA

SEQ ID NO: 35895 - protein, 33 aa, Artificial Sequence
  Non-cyclic GFR-binding peptide
  MOD_RES (12), (13), (14), (15), (16): Xaa is A or G
  MOD_RES (17), (18), (19), (20): Xaa is A or G or is absent
AEVVMDSMEGIXXXXXXXXXMIQITINSLRAPV

SEQ ID NO: 35896 - protein, 39 aa, Artificial Sequence
  Non-cyclic GFR-binding peptide
  MOD_RES (1), (35), (36): Xaa is C or S
  MOD_RES (13), (14), (15), (16), (17): Xaa is A or G
  MOD_RES (18), (19), (20), (21): Xaa is A or G or is absent
XSRVVMNSMEGLXXXXXXXXXMIQVTINSLKTPAXXPKP

SEQ ID NO: 35897 - protein, 33 aa, Artificial Sequence
  Non-cyclic GFR-binding peptide
  MOD_RES (1), (1): Xaa is C or S
  MOD_RES (12), (13), (14), (15), (16): Xaa is A or G
  MOD_RES (17), (18), (19), (20): Xaa is A or G or is absent
XEEVIMSMEGLXXXXXXXXXMIQMTINSTKVPA

SEQ ID NO: 35898 - protein, 38 aa, Artificial Sequence
  Non-cyclic GFR-binding peptide
  MOD_RES (2), (35), (36): Xaa is C or S
  MOD_RES (13), (14), (15), (16), (17): Xaa is A or G
  MOD_RES (18), (19), (20), (21): Xaa is A or G or is absent
GXEEVIMSMEGIXXXXXXXXXMIQMTINSTKVPAXXTS

SEQ ID NO: 35899 - protein, 40 aa, Artificial Sequence
  Non-cyclic GFR-binding peptide
  MOD_RES (2), (4), (36), (37): Xaa is C or S
HXGXSRVVMNSMEGLIVNSSDDMIQVTINSLKTPAXXPKP

SEQ ID NO: 35900 - protein, 36 aa, Artificial Sequence
  Non-cyclic GFR-binding peptide
  MOD_RES (2), (34), (35): Xaa is C or S
GXSEVVMDSMEGLVVNNASDMIQITINSLRTPVXXT

SEQ ID NO: 35901 - protein, 32 aa, Artificial Sequence
  Non-cyclic GFR-binding peptide
  MOD_RES (31), (32): Xaa is C or S
EVVMDSMEGIVVNNAADMIQITINSLRAPVXX

SEQ ID NO: 35902 - protein, 32 aa, Artificial Sequence
  Non-cyclic GFR-binding peptide
  MOD_RES (11), (12), (13), (14), (15): Xaa is A or G
  MOD_RES (16), (17), (18), (19): Xaa is A or G or is absent
SKVIMSMEGLXXXXXXXXXMIQITINSLDQSV

SEQ ID NO: 35903 - protein, 37 aa, Artificial Sequence
  Non-cyclic GFR-binding peptide
  MOD_RES (33), (34): Xaa is C or S
  MOD_RES (11), (12), (13), (14), (15): Xaa is A or G
  MOD_RES (16), (17), (18), (19): Xaa is A or G or is absent
DVVMGSMEGLXXXXXXXXXMIQMTINSMKTPTXXPGA

SEQ ID NO: 35904 - protein, 43 aa, Artificial Sequence
  Non-cyclic GFR-binding peptide
  MOD_RES (2), (4), (37), (38): Xaa is C or S
  MOD_RES (15), (16), (17), (18), (19): Xaa is A or G
  MOD_RES (20), (21), (22), (23): Xaa is A or G or is absent
SXKXSKVIMSMEGLXXXXXXXXXMIQITINSLDQSVXXPSASA

SEQ ID NO: 35905 - protein, 36 aa, Artificial Sequence
  Non-cyclic GFR-binding peptide
  MOD_RES (2), (4), (36): Xaa is C or S
SXGXRDVVMGSMEGIIIQQKDNMIQMTINSMKTPTX

SEQ ID NO: 35906 - protein, 38 aa, Artificial Sequence
  Non-cyclic GFR-binding peptide
  MOD_RES (2), (35), (36): Xaa is C or S
  MOD_RES (13), (14), (15), (16), (17): Xaa is A or G
  MOD_RES (18), (19), (20), (21): Xaa is A or G or is absent
GXEEVIMSMEGLXXXXXXXXXMIQMTINSTKVPAXXTS

SEQ ID NO: 35907 - protein, 34 aa, Artificial Sequence
  Non-cyclic GFR-binding peptide
  MOD_RES (31), (32): Xaa is C or S
SKVVMSMEGLVKPTRGVMIQITINSLDQPVXXPS

SEQ ID NO: 35908 - protein, 34 aa, Artificial Sequence
  Non-cyclic GFR-binding peptide
  MOD_RES (1), (1): Xaa is C or S
  MOD_RES (13), (14), (15), (16), (17): Xaa is A or G
  MOD_RES (18), (19), (20), (21): Xaa is A or G or is absent
XAEVVMDSMEGLXXXXXXXXXMIQITINSLRAPV

SEQ ID NO: 35909 - protein, 38 aa, Artificial Sequence
  Non-cyclic GFR-binding peptide
  MOD_RES (32), (33): Xaa is C or S
RDVVMGSMEGLIIQQKDNMIQMTINSMKTPTXXPGASG

SEQ ID NO: 35910 - protein, 30 aa, Artificial Sequence
  Non-cyclic GFR-binding peptide
SKVIMSMEGLIKPTKGIMIQITINSLDQSV

SEQ ID NO: 35911 - protein, 39 aa, Artificial Sequence
  Non-cyclic GFR-binding peptide
  MOD_RES (1), (3), (37), (38): Xaa is C or S
  MOD_RES (15), (16), (17), (18), (19): Xaa is A or G
  MOD_RES (20), (21), (22), (23): Xaa is A or G or is absent
XGXSEVVMDSMEGIXXXXXXXXXMIQITINSLRTPVXXT

SEQ ID NO: 35912 - protein, 34 aa, Artificial Sequence
  Non-cyclic GFR-binding peptide
  MOD_RES (2), (34): Xaa is C or S
GXSEVVMDSMEGLVVNNASDMIQITINSLRTPVX

SEQ ID NO: 35913 - protein, 39 aa, Artificial Sequence
  Non-cyclic GFR-binding peptide
  MOD_RES (2), (35), (36): Xaa is C or S
  MOD_RES (13), (14), (15), (16), (17): Xaa is A or G
  MOD_RES (18), (19), (20), (21): Xaa is A or G or is absent
KXSRVIMSMEGLXXXXXXXXXMIQITINSLAQPVXXPAA

SEQ ID NO: 35914 - protein, 35 aa, Artificial Sequence
  Non-cyclic GFR-binding peptide
  MOD_RES (31), (32): Xaa is C or S
SRVIMSMEGLVKPKRGVMIQITINSLAQPVXXPAA

SEQ ID NO: 35915 - protein, 38 aa, Artificial Sequence
  Non-cyclic GFR-binding peptide
  MOD_RES (32), (33): Xaa is C or S
SRVVMNSMEGIIVNSSDDMIQVTINSLKTPAXXPKPVH

SEQ ID NO: 35916 - protein, 42 aa, Artificial Sequence
  Non-cyclic GFR-binding peptide
  MOD_RES (1), (3), (36), (37): Xaa is C or S
  MOD_RES (14), (15), (16), (17), (18): Xaa is A or G
  MOD_RES (19), (20), (21), (22): Xaa is A or G or is absent
XGXEEVIMSMEGLXXXXXXXXXMIQMTINSTKVPAXXTSPVR

SEQ ID NO: 35917 - protein, 40 aa, Artificial Sequence
  Non-cyclic GFR-binding peptide
  MOD_RES (1), (34), (35): Xaa is C or S
  MOD_RES (12), (13), (14), (15), (16): Xaa is A or G
  MOD_RES (17), (18), (19), (20): Xaa is A or G or is absent
XSKVVMSMEGLXXXXXXXXXMIQITINSLDQPVXXPSASA

SEQ ID NO: 35918 - protein, 39 aa, Artificial Sequence
  Non-cyclic GFR-binding peptide
  MOD_RES (2), (35), (36): Xaa is C or S
  MOD_RES (13), (14), (15), (16), (17): Xaa is A or G
  MOD_RES (18), (19), (20), (21): Xaa is A or G or is absent
KXSKVVMSMEGLXXXXXXXXXMIQITINSLDQPVXXPSA

SEQ ID NO: 35919 - protein, 37 aa, Artificial Sequence
  Non-cyclic GFR-binding peptide
  MOD_RES (1), (35), (36): Xaa is C or S
  MOD_RES (13), (14), (15), (16), (17): Xaa is A or G
  MOD_RES (18), (19), (20), (21): Xaa is A or G or is absent
XSEVVMDSMEGIXXXXXXXXXMIQITINSLRTPVXXT

SEQ ID NO: 35920 - protein, 35 aa, Artificial Sequence
  Non-cyclic GFR-binding peptide
  MOD_RES (1), (3), (35): Xaa is C or S
XGXAEVVMDSMEGIVVNNAADMIQITINSLRAPVX

SEQ ID NO: 35921 - protein, 41 aa, Artificial Sequence
  Non-cyclic GFR-binding peptide
  MOD_RES (2), (36), (37): Xaa is C or S
  MOD_RES (14), (15), (16), (17), (18): Xaa is A or G
  MOD_RES (19), (20), (21), (22): Xaa is A or G or is absent
GXSEVVMDSMEGIXXXXXXXXXMIQITINSLRTPVXXTPPT

SEQ ID NO: 35922 - protein, 34 aa, Artificial Sequence
  Non-cyclic GFR-binding peptide
  MOD_RES (33), (34): Xaa is C or S
  MOD_RES (11), (12), (13), (14), (15): Xaa is A or G
  MOD_RES (16), (17), (18), (19): Xaa is A or G or is absent
EVVMDSMEGLXXXXXXXXXMIQITINSLRAPVXX

SEQ ID NO: 35923 - protein, 37 aa, Artificial Sequence
  Non-cyclic GFR-binding peptide
  MOD_RES (33), (34): Xaa is C or S
  MOD_RES (11), (12), (13), (14), (15): Xaa is A or G
  MOD_RES (16), (17), (18), (19): Xaa is A or G or is absent
SKVVMSMEGLXXXXXXXXXMIQITINSLDQPVXXPSA

SEQ ID NO: 35924 - protein, 33 aa, Artificial Sequence
  Non-cyclic GFR-binding peptide
  MOD_RES (1), (1): Xaa is C or S
  MOD_RES (12), (13), (14), (15), (16): Xaa is A or G
  MOD_RES (17), (18), (19), (20): Xaa is A or G or is absent
XSRVIMSMEGLXXXXXXXXXMIQITINSLAQPV

SEQ ID NO: 35925 - protein, 36 aa, Artificial Sequence
  Non-cyclic GFR-binding peptide
  MOD_RES (31), (32): Xaa is C or S
EVVMDSMEGLVVNNAADMIQITINSLRAPVXXSAPA

SEQ ID NO: 35926 - protein, 42 aa, Artificial Sequence
  Non-cyclic GFR-binding peptide
  MOD_RES (2), (4), (36), (37): Xaa is C or S
RXGXAEVVMDSMEGLVVNNAADMIQITINSLRAPVXXSAPAA

SEQ ID NO: 35927 - protein, 34 aa, Artificial Sequence
  Non-cyclic GFR-binding peptide
  MOD_RES (1), (1): Xaa is C or S
  MOD_RES (13), (14), (15), (16), (17): Xaa is A or G
  MOD_RES (18), (19), (20), (21): Xaa is A or G or is absent
XAEVVMDSMEGIXXXXXXXXXMIQITINSLRAPV

SEQ ID NO: 35928 - protein, 41 aa, Artificial Sequence
  Non-cyclic GFR-binding peptide
  MOD_RES (1), (3), (35), (36): Xaa is C or S
XGXRDVVMGSMEGIIIQQKDNMIQMTINSMKTPTXXPGASG

SEQ ID NO: 35929 - protein, 38 aa, Artificial Sequence
  Non-cyclic GFR-binding peptide
  MOD_RES (2), (36), (37): Xaa is C or S
  MOD_RES (14), (15), (16), (17), (18): Xaa is A or G
  MOD_RES (19), (20), (21), (22): Xaa is A or G or is absent
GXSEVVMDSMEGIXXXXXXXXXMIQITINSLRTPVXXT

SEQ ID NO: 35930 - protein, 42 aa, Artificial Sequence
  Non-cyclic GFR-binding peptide
  MOD_RES (1), (3), (36), (37): Xaa is C or S
  MOD_RES (14), (15), (16), (17), (18): Xaa is A or G
  MOD_RES (19), (20), (21), (22): Xaa is A or G or is absent
XKXSKVVMSMEGLXXXXXXXXXMIQITINSLDQPVXXPSASA

SEQ ID NO: 35931 - protein, 41 aa, Artificial Sequence
  Non-cyclic GFR-binding peptide
  MOD_RES (2), (4), (38), (39): Xaa is C or S
  MOD_RES (16), (17), (18), (19), (20): Xaa is A or G
  MOD_RES (21), (22), (23), (24): Xaa is A or G or is absent
HXGXSRVVMNSMEGLXXXXXXXXXMIQVTINSLKTPAXXPK

SEQ ID NO: 35932 - protein, 37 aa, Artificial Sequence
  Non-cyclic GFR-binding peptide
  MOD_RES (1), (35), (36): Xaa is C or S
  MOD_RES (13), (14), (15), (16), (17): Xaa is A or G
  MOD_RES (18), (19), (20), (21): Xaa is A or G or is absent
XSEVVMDSMEGLXXXXXXXXXMIQITINSLRTPVXXT

SEQ ID NO: 35933 - protein, 34 aa, Artificial Sequence
  Non-cyclic GFR-binding peptide
  MOD_RES (1), (1): Xaa is C or S
  MOD_RES (13), (14), (15), (16), (17): Xaa is A or G
  MOD_RES (18), (19), (20), (21): Xaa is A or G or is absent
XSEVVMDSMEGLXXXXXXXXXMIQITINSLRTPV

SEQ ID NO: 35934 - protein, 39 aa, Artificial Sequence
  Non-cyclic GFR-binding peptide
  MOD_RES (2), (33), (34): Xaa is C or S
KXSKVVMSMEGLVKPTRGVMIQITINSLDQPVXXPSASA

SEQ ID NO: 35935 - protein, 37 aa, Artificial Sequence
  Non-cyclic GFR-binding peptide
  MOD_RES (2), (36), (37): Xaa is C or S
  MOD_RES (14), (15), (16), (17), (18): Xaa is A or G
  MOD_RES (19), (20), (21), (22): Xaa is A or G or is absent
GXSEVVMDSMEGIXXXXXXXXXMIQITINSLRTPVXX

SEQ ID NO: 35936 - protein, 42 aa, Artificial Sequence
  Non-cyclic GFR-binding peptide
  MOD_RES (2), (4), (37), (38): Xaa is C or S
  MOD_RES (15), (16), (17), (18), (19): Xaa is A or G
  MOD_RES (20), (21), (22), (23): Xaa is A or G or is absent
LXGXEEVIMSMEGLXXXXXXXXXMIQMTINSTKVPAXXTSPV

SEQ ID NO: 35937 - protein, 38 aa, Artificial Sequence
  Non-cyclic GFR-binding peptide
  MOD_RES (1), (32), (33): Xaa is C or S
XEEVIMSMEGILLVRGNDMIQMTINSTKVPAXXTSPVR

SEQ ID NO: 35938 - protein, 30 aa, Artificial Sequence
  Non-cyclic GFR-binding peptide
SRVIMSMEGLVKPKRGVMIQITINSLAQPV

SEQ ID NO: 35939 - protein, 35 aa, Artificial Sequence
  Non-cyclic GFR-binding peptide
  MOD_RES (1), (34), (35): Xaa is C or S
  MOD_RES (12), (13), (14), (15), (16): Xaa is A or G
  MOD_RES (17), (18), (19), (20): Xaa is A or G or is absent
XSKVVMSMEGLXXXXXXXXXMIQITINSLDQPVXX

SEQ ID NO: 35940 - protein, 31 aa, Artificial Sequence
  Non-cyclic GFR-binding peptide
  MOD_RES (1), (1): Xaa is C or S
XSKVIMSMEGLIKPTKGIMIQITINSLDQSV

SEQ ID NO: 35941 - protein, 39 aa, Artificial Sequence
  Non-cyclic GFR-binding peptide
  MOD_RES (1), (35), (36): Xaa is C or S
  MOD_RES (13), (14), (15), (16), (17): Xaa is A or G
  MOD_RES (18), (19), (20), (21): Xaa is A or G or is absent
XSEVVMDSMEGIXXXXXXXXXMIQITINSLRTPVXXTPP

SEQ ID NO: 35942 - protein, 39 aa, Artificial Sequence
  Non-cyclic GFR-binding peptide
  MOD_RES (1), (3), (37), (38): Xaa is C or S
  MOD_RES (15), (16), (17), (18), (19): Xaa is A or G
  MOD_RES (20), (21), (22), (23): Xaa is A or G or is absent
XGXAEVVMDSMEGLXXXXXXXXXMIQITINSLRAPVXXS

SEQ ID NO: 35943 - protein, 37 aa, Artificial Sequence
  Non-cyclic GFR-binding peptide
  MOD_RES (34), (35): Xaa is C or S
  MOD_RES (12), (13), (14), (15), (16): Xaa is A or G
  MOD_RES (17), (18), (19), (20): Xaa is A or G or is absent
SEVVMDSMEGLXXXXXXXXXMIQITINSLRTPVXXTP

SEQ ID NO: 35944 - protein, 32 aa, Artificial Sequence
  Non-cyclic GFR-binding peptide
  MOD_RES (31), (32): Xaa is C or S
EVVMDSMEGLVVNNASDMIQITINSLRTPVXX

SEQ ID NO: 35945 - protein, 34 aa, Artificial Sequence
  Non-cyclic GFR-binding peptide
  MOD_RES (1), (34): Xaa is C or S
  MOD_RES (12), (13), (14), (15), (16): Xaa is A or G
  MOD_RES (17), (18), (19), (20): Xaa is A or G or is absent
XEEVIMSMEGIXXXXXXXXXMIQMTINSTKVPAX

SEQ ID NO: 35946 - protein, 38 aa, Artificial Sequence
  Non-cyclic GFR-binding peptide
  MOD_RES (2), (34), (35): Xaa is C or S
GXSRVVMNSMEGLIVNSSDDMIQVTINSLKTPAXXPKP

SEQ ID NO: 35947 - protein, 36 aa, Artificial Sequence
  Non-cyclic GFR-binding peptide
  MOD_RES (2), (36): Xaa is C or S
  MOD_RES (14), (15), (16), (17), (18): Xaa is A or G
  MOD_RES (19), (20), (21), (22): Xaa is A or G or is absent
GXAEVVMDSMEGLXXXXXXXXXMIQITINSLRAPVX

SEQ ID NO: 35948 - protein, 34 aa, Artificial Sequence
  Non-cyclic GFR-binding peptide
  MOD_RES (1), (3): Xaa is C or S
XGXSRVVMNSMEGLIVNSSDDMIQVTINSLKTPA

SEQ ID NO: 35949 - protein, 38 aa, Artificial Sequence
  Non-cyclic GFR-binding peptide
  MOD_RES (2), (4), (35), (36): Xaa is C or S
SXKXSRVIMSMEGLVKPKRGVMIQITINSLAQPVXXPA

SEQ ID NO: 35950 - protein, 34 aa, Artificial Sequence
  Non-cyclic GFR-binding peptide
  MOD_RES (1), (1): Xaa is C or S
  MOD_RES (13), (14), (15), (16), (17): Xaa is A or G
  MOD_RES (18), (19), (20), (21): Xaa is A or G or is absent
XRDVVMGSMEGLXXXXXXXXXMIQMTINSMKTPT

SEQ ID NO: 35951 - protein, 43 aa, Artificial Sequence
  Non-cyclic GFR-binding peptide
  MOD_RES (2), (4), (38), (39): Xaa is C or S
  MOD_RES (16), (17), (18), (19), (20): Xaa is A or G
  MOD_RES (21), (22), (23), (24): Xaa is A or G or is absent
SXGXRDVVMGSMEGLXXXXXXXXXMIQMTINSMKTPTXXPGAS

SEQ ID NO: 35952 - protein, 36 aa, Artificial Sequence
  Non-cyclic GFR-binding peptide
  MOD_RES (34), (35): Xaa is C or S
  MOD_RES (12), (13), (14), (15), (16): Xaa is A or G
  MOD_RES (17), (18), (19), (20): Xaa is A or G or is absent
RDVVMGSMEGLXXXXXXXXXMIQMTINSMKTPTXXP

SEQ ID NO: 35953 - protein, 37 aa, Artificial Sequence
  Non-cyclic GFR-binding peptide
  MOD_RES (2), (36), (37): Xaa is C or S
  MOD_RES (14), (15), (16), (17), (18): Xaa is A or G
  MOD_RES (19), (20), (21), (22): Xaa is A or G or is absent
GXSEVVMDSMEGLXXXXXXXXXMIQITINSLRTPVXX

SEQ ID NO: 35954 - protein, 36 aa, Artificial Sequence
  Non-cyclic GFR-binding peptide
  MOD_RES (2), (33), (34): Xaa is C or S
KXSKVVMSMEGLVKPTRGVMIQITINSLDQPVXXPS

SEQ ID NO: 35955 - protein, 37 aa, Artificial Sequence
  Non-cyclic GFR-binding peptide
  MOD_RES (31), (32): Xaa is C or S
EVVMDSMEGIVVNNAADMIQITINSLRAPVXXSAPAA

SEQ ID NO: 35956 - protein, 33 aa, Artificial Sequence
  Non-cyclic GFR-binding peptide
  MOD_RES (2), (2): Xaa is C or S
GXSRVVMNSMEGLIVNSSDDMIQVTINSLKTPA

SEQ ID NO: 35957 - protein, 30 aa, Artificial Sequence
  Non-cyclic GFR-binding peptide
EVVMDSMEGLVVNNAADMIQITINSLRAPV

SEQ ID NO: 35958 - protein, 41 aa, Artificial Sequence
  Non-cyclic GFR-binding peptide
  MOD_RES (1), (35), (36): Xaa is C or S
  MOD_RES (13), (14), (15), (16), (17): Xaa is A or G
  MOD_RES (18), (19), (20), (21): Xaa is A or G or is absent
XRDVVMGSMEGLXXXXXXXXXMIQMTINSMKTPTXXPGASG

SEQ ID NO: 35959 - protein, 34 aa, Artificial Sequence
  Non-cyclic GFR-binding peptide
  MOD_RES (1), (3): Xaa is C or S
XGXSEVVMDSMEGIVVNNASDMIQITINSLRTPV

SEQ ID NO: 35960 - protein, 39 aa, Artificial Sequence
  Non-cyclic GFR-binding peptide
  MOD_RES (2), (33), (34): Xaa is C or S
KXSKVIMSMEGLIKPTKGIMIQITINSLDQSVXXPSASA

SEQ ID NO: 35961 - protein, 37 aa, Artificial Sequence
  Non-cyclic GFR-binding peptide
  MOD_RES (1), (35), (36): Xaa is C or S
  MOD_RES (13), (14), (15), (16), (17): Xaa is A or G
  MOD_RES (18), (19), (20), (21): Xaa is A or G or is absent
XRDVVMGSMEGIXXXXXXXXXMIQMTINSMKTPTXXP

SEQ ID NO: 35962 - protein, 39 aa, Artificial Sequence
  Non-cyclic GFR-binding peptide
  MOD_RES (33), (34): Xaa is C or S
  MOD_RES (11), (12), (13), (14), (15): Xaa is A or G
  MOD_RES (16), (17), (18), (19): Xaa is A or G or is absent
RVVMNSMEGLXXXXXXXXXMIQVTINSLKTPAXXPKPVH

SEQ ID NO: 35963 - protein, 38 aa, Artificial Sequence
  Non-cyclic GFR-binding peptide
  MOD_RES (1), (32), (33): Xaa is C or S
XSKVIMSMEGLIKPTKGIMIQITINSLDQSVXXPSASA

SEQ ID NO: 35964 - protein, 37 aa, Artificial Sequence
  Non-cyclic GFR-binding peptide
  MOD_RES (1), (3), (34), (35): Xaa is C or S
XGXEEVIMSMEGILLVRGNDMIQMTINSTKVPAXXTS

SEQ ID NO: 35965 - protein, 33 aa, Artificial Sequence
  Non-cyclic GFR-binding peptide
  MOD_RES (2), (2): Xaa is C or S
GXAEVVMDSMEGIVVNNAADMIQITINSLRAPV

SEQ ID NO: 35966 - protein, 35 aa, Artificial Sequence
  Non-cyclic GFR-binding peptide
  MOD_RES (33), (34): Xaa is C or S
  MOD_RES (11), (12), (13), (14), (15): Xaa is A or G
  MOD_RES (16), (17), (18), (19): Xaa is A or G or is absent
DVVMGSMEGIXXXXXXXXXMIQMTINSMKTPTXXP

SEQ ID NO: 35967 - protein, 36 aa, Artificial Sequence
  Non-cyclic GFR-binding peptide
  MOD_RES (2), (33), (34): Xaa is C or S
KXSKVIMSMEGLIKPTKGIMIQITINSLDQSVXXPS

SEQ ID NO: 35968 - protein, 37 aa, Artificial Sequence
  Non-cyclic GFR-binding peptide
  MOD_RES (1), (35), (36): Xaa is C or S
  MOD_RES (13), (14), (15), (16), (17): Xaa is A or G
  MOD_RES (18), (19), (20), (21): Xaa is A or G or is absent
XRDVVMGSMEGLXXXXXXXXXMIQMTINSMKTPTXXP

SEQ ID NO: 35969 - protein, 35 aa, Artificial Sequence
  Non-cyclic GFR-binding peptide
  MOD_RES (31), (32): Xaa is C or S
DVVMGSMEGIIIQQKDNMIQMTINSMKTPTXXPGA

SEQ ID NO: 35970 - protein, 31 aa, Artificial Sequence
  Non-cyclic GFR-binding peptide
SEVVMDSMEGLVVNNASDMIQITINSLRTPV

SEQ ID NO: 35971 - protein, 39 aa, Artificial Sequence
  Non-cyclic GFR-binding peptide
  MOD_RES (1), (3), (36), (37): Xaa is C or S
  MOD_RES (14), (15), (16), (17), (18): Xaa is A or G
  MOD_RES (19), (20), (21), (22): Xaa is A or G or is absent
XKXSKVVMSMEGLXXXXXXXXXMIQITINSLDQPVXXPS

SEQ ID NO: 35972 - protein, 38 aa, Artificial Sequence
  Non-cyclic GFR-binding peptide
  MOD_RES (2), (34), (35): Xaa is C or S
GXAEVVMDSMEGIVVNNAADMIQITINSLRAPVXXSAP

SEQ ID NO: 35973 - protein, 37 aa, Artificial Sequence
  Non-cyclic GFR-binding peptide
  MOD_RES (33), (34): Xaa is C or S
  MOD_RES (11), (12), (13), (14), (15): Xaa is A or G
  MOD_RES (16), (17), (18), (19): Xaa is A or G or is absent
SKVIMSMEGLXXXXXXXXXMIQITINSLDQSVXXPSA

SEQ ID NO: 35974 - protein, 37 aa, Artificial Sequence
  Non-cyclic GFR-binding peptide
  MOD_RES (33), (34): Xaa is C or S
  MOD_RES (11), (12), (13), (14), (15): Xaa is A or G
  MOD_RES (16), (17), (18), (19): Xaa is A or G or is absent
EVVMDSMEGIXXXXXXXXXMIQITINSLRTPVXXTPP

SEQ ID NO: 35975 - protein, 41 aa, Artificial Sequence
  Non-cyclic GFR-binding peptide
  MOD_RES (2), (36), (37): Xaa is C or S
  MOD_RES (14), (15), (16), (17), (18): Xaa is A or G
  MOD_RES (19), (20), (21), (22): Xaa is A or G or is absent
GXSEVVMDSMEGLXXXXXXXXXMIQITINSLRTPVXXTPPT

SEQ ID NO: 35976 - protein, 31 aa, Artificial Sequence
  Non-cyclic GFR-binding peptide
  MOD_RES (31), (31): Xaa is C or S
EVVMDSMEGLVVNNAADMIQITINSLRAPVX

SEQ ID NO: 35977 - protein, 33 aa, Artificial Sequence
  Non-cyclic GFR-binding peptide
  MOD_RES (2), (2): Xaa is C or S
GXRDVVMGSMEGIIIQQKDNMIQMTINSMKTPT

SEQ ID NO: 35978 - protein, 39 aa, Artificial Sequence
  Non-cyclic GFR-binding peptide
  MOD_RES (1), (34), (35): Xaa is C or S
  MOD_RES (12), (13), (14), (15), (16): Xaa is A or G
  MOD_RES (17), (18), (19), (20): Xaa is A or G or is absent
XSKVVMSMEGLXXXXXXXXXMIQITINSLDQPVXXPSAS

SEQ ID NO: 35979 - protein, 36 aa, Artificial Sequence
  Non-cyclic GFR-binding peptide
  MOD_RES (2), (35), (36): Xaa is C or S
  MOD_RES (13), (14), (15), (16), (17): Xaa is A or G
  MOD_RES (18), (19), (20), (21): Xaa is A or G or is absent
KXSRVIMSMEGLXXXXXXXXXMIQITINSLAQPVXX

SEQ ID NO: 35980 - protein, 40 aa, Artificial Sequence
  Non-cyclic GFR-binding peptide
  MOD_RES (2), (4), (35), (36): Xaa is C or S
LXGXEEVIMSMEGLLLVRGNDMIQMTINSTKVPAXXTSPV

SEQ ID NO: 35981 - protein, 32 aa, Artificial Sequence
  Non-cyclic GFR-binding peptide
  MOD_RES (1), (1): Xaa is C or S
XSEVVMDSMEGIVVNNASDMIQITINSLRTPV

SEQ ID NO: 35982 - protein, 33 aa, Artificial Sequence
  Non-cyclic GFR-binding peptide
  MOD_RES (33), (33): Xaa is C or S
  MOD_RES (11), (12), (13), (14), (15): Xaa is A or G
  MOD_RES (16), (17), (18), (19): Xaa is A or G or is absent
EEVIMSMEGLXXXXXXXXXMIQMTINSTKVPAX

SEQ ID NO: 35983 - protein, 35 aa, Artificial Sequence
  Non-cyclic GFR-binding peptide
  MOD_RES (34), (35): Xaa is C or S
  MOD_RES (12), (13), (14), (15), (16): Xaa is A or G
  MOD_RES (17), (18), (19), (20): Xaa is A or G or is absent
RDVVMGSMEGIXXXXXXXXXMIQMTINSMKTPTXX

SEQ ID NO: 35984 - protein, 44 aa, Artificial Sequence
  Non-cyclic GFR-binding peptide
  MOD_RES (2), (4), (38), (39): Xaa is C or S
  MOD_RES (16), (17), (18), (19), (20): Xaa is A or G
  MOD_RES (21), (22), (23), (24): Xaa is A or G or is absent
RXGXAEVVMDSMEGIXXXXXXXXXMIQITINSLRAPVXXSAPAA

SEQ ID NO: 35985 - protein, 37 aa, Artificial Sequence
  Non-cyclic GFR-binding peptide
  MOD_RES (1), (3), (35), (36): Xaa is C or S
XGXRDVVMGSMEGIIIQQKDNMIQMTINSMKTPTXXP

SEQ ID NO: 35986 - protein, 33 aa, Artificial Sequence
  Non-cyclic GFR-binding peptide
  MOD_RES (33), (33): Xaa is C or S
  MOD_RES (11), (12), (13), (14), (15): Xaa is A or G
  MOD_RES (16), (17), (18), (19): Xaa is A or G or is absent
EEVIMSMEGIXXXXXXXXXMIQMTINSTKVPAX

SEQ ID NO: 35987 - protein, 43 aa, Artificial Sequence
  Non-cyclic GFR-binding peptide
  MOD_RES (1), (3), (37), (38): Xaa is C or S
  MOD_RES (15), (16), (17), (18), (19): Xaa is A or G
  MOD_RES (20), (21), (22), (23): Xaa is A or G or is absent
XGXSRVVMNSMEGLXXXXXXXXXMIQVTINSLKTPAXXPKPVH

SEQ ID NO: 35988 - protein, 35 aa, Artificial Sequence
  Non-cyclic GFR-binding peptide
  MOD_RES (2), (33), (34): Xaa is C or S
KXSKVVMSMEGLVKPTRGVMIQITINSLDQPVXXP

SEQ ID NO: 35989 - protein, 36 aa, Artificial Sequence
  Non-cyclic GFR-binding peptide
  MOD_RES (34), (35): Xaa is C or S
  MOD_RES (12), (13), (14), (15), (16): Xaa is A or G
  MOD_RES (17), (18), (19), (20): Xaa is A or G or is absent
AEVVMDSMEGLXXXXXXXXXMIQITINSLRAPVXXS

SEQ ID NO: 35990 - protein, 43 aa, Artificial Sequence
  Non-cyclic GFR-binding peptide
  MOD_RES (1), (3), (37), (38): Xaa is C or S
  MOD_RES (15), (16), (17), (18), (19): Xaa is A or G
  MOD_RES (20), (21), (22), (23): Xaa is A or G or is absent
XGXSEVVMDSMEGIXXXXXXXXXMIQITINSLRTPVXXTPPTS

SEQ ID NO: 35991 - protein, 34 aa, Artificial Sequence
  Non-cyclic GFR-binding peptide
  MOD_RES (32), (33): Xaa is C or S
SEVVMDSMEGLVVNNASDMIQITINSLRTPVXXT

SEQ ID NO: 35992 - protein, 33 aa, Artificial Sequence
  Non-cyclic GFR-binding peptide
  MOD_RES (2), (2): Xaa is C or S
GXAEVVMDSMEGLVVNNAADMIQITINSLRAPV

SEQ ID NO: 35993 - protein, 33 aa, Artificial Sequence
  Non-cyclic GFR-binding peptide
  MOD_RES (1), (32), (33): Xaa is C or S
XEEVIMSMEGLLLVRGNDMIQMTINSTKVPAXX

SEQ ID NO: 35994 - protein, 35 aa, Artificial Sequence
  Non-cyclic GFR-binding peptide
  MOD_RES (31), (32): Xaa is C or S
DVVMGSMEGLIIQQKDNMIQMTINSMKTPTXXPGA

SEQ ID NO: 35995 - protein, 37 aa, Artificial Sequence
  Non-cyclic GFR-binding peptide
  MOD_RES (33), (34): Xaa is C or S
  MOD_RES (11), (12), (13), (14), (15): Xaa is A or G
  MOD_RES (16), (17), (18), (19): Xaa is A or G or is absent
EVVMDSMEGLXXXXXXXXXMIQITINSLRTPVXXTPP

SEQ ID NO: 35996 - protein, 31 aa, Artificial Sequence
  Non-cyclic GFR-binding peptide
  MOD_RES (1), (1): Xaa is C or S
XEEVIMSMEGILLVRGNDMIQMTINSTKVPA

SEQ ID NO: 35997 - protein, 32 aa, Artificial Sequence
  Non-cyclic GFR-binding peptide
  MOD_RES (1), (32): Xaa is C or S
XSKVVMSMEGLVKPTRGVMIQITINSLDQPVX

SEQ ID NO: 35998 - protein, 35 aa, Artificial Sequence
  Non-cyclic GFR-binding peptide
  MOD_RES (33), (34): Xaa is C or S
  MOD_RES (11), (12), (13), (14), (15): Xaa is A or G
  MOD_RES (16), (17), (18), (19): Xaa is A or G or is absent
DVVMGSMEGLXXXXXXXXXMIQMTINSMKTPTXXP

SEQ ID NO: 35999 - protein, 38 aa, Artificial Sequence
  Non-cyclic GFR-binding peptide
  MOD_RES (2), (34), (35): Xaa is C or S
GXRDVVMGSMEGIIIQQKDNMIQMTINSMKTPTXXPGA

SEQ ID NO: 36000 - protein, 37 aa, Artificial Sequence
  Non-cyclic GFR-binding peptide
  MOD_RES (2), (4), (35), (36): Xaa is C or S
LXGXEEVIMSMEGILLVRGNDMIQMTINSTKVPAXXT

SEQ ID NO: 36001 - protein, 33 aa, Artificial Sequence
  Non-cyclic GFR-binding peptide
  MOD_RES (33), (33): Xaa is C or S
  MOD_RES (11), (12), (13), (14), (15): Xaa is A or G
  MOD_RES (16), (17), (18), (19): Xaa is A or G or is absent
RVVMNSMEGLXXXXXXXXXMIQVTINSLKTPAX

SEQ ID NO: 36002 - protein, 36 aa, Artificial Sequence
  Non-cyclic GFR-binding peptide
  MOD_RES (1), (34), (35): Xaa is C or S
  MOD_RES (12), (13), (14), (15), (16): Xaa is A or G
  MOD_RES (17), (18), (19), (20): Xaa is A or G or is absent
XEEVIMSMEGIXXXXXXXXXMIQMTINSTKVPAXXT

SEQ ID NO: 36003 - protein, 42 aa, Artificial Sequence
  Non-cyclic GFR-binding peptide
  MOD_RES (2), (4), (38), (39): Xaa is C or S
  MOD_RES (16), (17), (18), (19), (20): Xaa is A or G
  MOD_RES (21), (22), (23), (24): Xaa is A or G or is absent
RXGXAEVVMDSMEGIXXXXXXXXXMIQITINSLRAPVXXSAP

SEQ ID NO: 36004 - protein, 33 aa, Artificial Sequence
  Non-cyclic GFR-binding peptide
  MOD_RES (12), (13), (14), (15), (16): Xaa is A or G
  MOD_RES (17), (18), (19), (20): Xaa is A or G or is absent
SEVVMDSMEGIXXXXXXXXXMIQITINSLRTPV

SEQ ID NO: 36005 - protein, 37 aa, Artificial Sequence
  Non-cyclic GFR-binding peptide
  MOD_RES (1), (3), (36), (37): Xaa is C or S
  MOD_RES (14), (15), (16), (17), (18): Xaa is A or G
  MOD_RES (19), (20), (21), (22): Xaa is A or G or is absent
XKXSRVIMSMEGLXXXXXXXXXMIQITINSLAQPVXX

SEQ ID NO: 36006 - protein, 42 aa, Artificial Sequence
  Non-cyclic GFR-binding peptide
  MOD_RES (2), (4), (36), (37): Xaa is C or S
HXGXSRVVMNSMEGIIVNSSDDMIQVTINSLKTPAXXPKPVH

SEQ ID NO: 36007 - protein, 40 aa, Artificial Sequence
  Non-cyclic GFR-binding peptide
  MOD_RES (2), (4), (37), (38): Xaa is C or S
  MOD_RES (15), (16), (17), (18), (19): Xaa is A or G
  MOD_RES (20), (21), (22), (23): Xaa is A or G or is absent
SXKXSRVIMSMEGLXXXXXXXXXMIQITINSLAQPVXXPA

SEQ ID NO: 36008 - protein, 39 aa, Artificial Sequence
  Non-cyclic GFR-binding peptide
  MOD_RES (2), (4), (36), (37): Xaa is C or S
RXGXAEVVMDSMEGIVVNNAADMIQITINSLRAPVXXSA

SEQ ID NO: 36009 - protein, 38 aa, Artificial Sequence
  Non-cyclic GFR-binding peptide
  MOD_RES (2), (4), (37), (38): Xaa is C or S
  MOD_RES (15), (16), (17), (18), (19): Xaa is A or G
  MOD_RES (20), (21), (22), (23): Xaa is A or G or is absent
SXKXSRVIMSMEGLXXXXXXXXXMIQITINSLAQPVXX

SEQ ID NO: 36010 - protein, 42 aa, Artificial Sequence
  Non-cyclic GFR-binding peptide
  MOD_RES (1), (3), (37), (38): Xaa is C or S
  MOD_RES (15), (16), (17), (18), (19): Xaa is A or G
  MOD_RES (20), (21), (22), (23): Xaa is A or G or is absent
XGXSRVVMNSMEGLXXXXXXXXXMIQVTINSLKTPAXXPKPV

SEQ ID NO: 36011 - protein, 40 aa, Artificial Sequence
  Non-cyclic GFR-binding peptide
  MOD_RES (1), (3), (37), (38): Xaa is C or S
  MOD_RES (15), (16), (17), (18), (19): Xaa is A or G
  MOD_RES (20), (21), (22), (23): Xaa is A or G or is absent
XGXRDVVMGSMEGIXXXXXXXXXMIQMTINSMKTPTXXPG

SEQ ID NO: 36012 - protein, 34 aa, Artificial Sequence
  Non-cyclic GFR-binding peptide
  MOD_RES (1), (1): Xaa is C or S
  MOD_RES (13), (14), (15), (16), (17): Xaa is A or G
  MOD_RES (18), (19), (20), (21): Xaa is A or G or is absent
XRDVVMGSMEGIXXXXXXXXXMIQMTINSMKTPT

SEQ ID NO: 36013 - protein, 35 aa, Artificial Sequence
  Non-cyclic GFR-binding peptide
  MOD_RES (31), (32): Xaa is C or S
EVVMDSMEGLVVNNAADMIQITINSLRAPVXXSAP

SEQ ID NO: 36014 - protein, 34 aa, Artificial Sequence
  Non-cyclic GFR-binding peptide
  MOD_RES (2), (33), (34): Xaa is C or S
KXSKVVMSMEGLVKPTRGVMIQITINSLDQPVXX

SEQ ID NO: 36015 - protein, 36 aa, Artificial Sequence
  Non-cyclic GFR-binding peptide
  MOD_RES (1), (3), (35), (36): Xaa is C or S
XGXSRVVMNSMEGLIVNSSDDMIQVTINSLKTPAXX

SEQ ID NO: 36016 - protein, 39 aa, Artificial Sequence
  Non-cyclic GFR-binding peptide
  MOD_RES (34), (35): Xaa is C or S
  MOD_RES (12), (13), (14), (15), (16): Xaa is A or G
  MOD_RES (17), (18), (19), (20): Xaa is A or G or is absent
AEVVMDSMEGLXXXXXXXXXMIQITINSLRAPVXXSAPA

SEQ ID NO: 36017 - protein, 40 aa, Artificial Sequence
  Non-cyclic GFR-binding peptide
  MOD_RES (34), (35): Xaa is C or S
  MOD_RES (12), (13), (14), (15), (16): Xaa is A or G
  MOD_RES (17), (18), (19), (20): Xaa is A or G or is absent
SEVVMDSMEGLXXXXXXXXXMIQITINSLRTPVXXTPPTS

SEQ ID NO: 36018 - protein, 38 aa, Artificial Sequence
  Non-cyclic GFR-binding peptide
  MOD_RES (1), (3), (34), (35): Xaa is C or S
XKXSKVVMSMEGLVKPTRGVMIQITINSLDQPVXXPSA

SEQ ID NO: 36019 - protein, 37 aa, Artificial Sequence
  Non-cyclic GFR-binding peptide
  MOD_RES (2), (4), (35), (36): Xaa is C or S
SXKXSKVVMSMEGLVKPTRGVMIQITINSLDQPVXXP

SEQ ID NO: 36020 - protein, 34 aa, Artificial Sequence
  Non-cyclic GFR-binding peptide
  MOD_RES (31), (32): Xaa is C or S
SRVIMSMEGLVKPKRGVMIQITINSLAQPVXXPA

SEQ ID NO: 36021 - protein, 41 aa, Artificial Sequence
  Non-cyclic GFR-binding peptide
  MOD_RES (2), (4), (35), (36): Xaa is C or S
LXGXEEVIMSMEGLLLVRGNDMIQMTINSTKVPAXXTSPVR

SEQ ID NO: 36022 - protein, 40 aa, Artificial Sequence
  Non-cyclic GFR-binding peptide
  MOD_RES (1), (35), (36): Xaa is C or S
  MOD_RES (13), (14), (15), (16), (17): Xaa is A or G
  MOD_RES (18), (19), (20), (21): Xaa is A or G or is absent
XSEVVMDSMEGIXXXXXXXXXMIQITINSLRTPVXXTPPT

SEQ ID NO: 36023 - protein, 34 aa, Artificial Sequence
  Non-cyclic GFR-binding peptide
  MOD_RES (32), (33): Xaa is C or S
RDVVMGSMEGLIIQQKDNMIQMTINSMKTPTXXP

SEQ ID NO: 36024 - protein, 38 aa, Artificial Sequence
  Non-cyclic GFR-binding peptide
  MOD_RES (1), (33), (34): Xaa is C or S
XRDVVMGSMEGLIIQQKDNMIQMTINSMKTPTXXPGAS

SEQ ID NO: 36025 - protein, 37 aa, Artificial Sequence
  Non-cyclic GFR-binding peptide
  MOD_RES (33), (34): Xaa is C or S
  MOD_RES (11), (12), (13), (14), (15): Xaa is A or G
  MOD_RES (16), (17), (18), (19): Xaa is A or G or is absent
EVVMDSMEGLXXXXXXXXXMIQITINSLRAPVXXSAP

SEQ ID NO: 36026 - protein, 40 aa, Artificial Sequence
  Non-cyclic GFR-binding peptide
  MOD_RES (34), (35): Xaa is C or S
  MOD_RES (12), (13), (14), (15), (16): Xaa is A or G
  MOD_RES (17), (18), (19), (20): Xaa is A or G or is absent
AEVVMDSMEGLXXXXXXXXXMIQITINSLRAPVXXSAPAA

SEQ ID NO: 36027 - protein, 39 aa, Artificial Sequence
  Non-cyclic GFR-binding peptide
  MOD_RES (1), (35), (36): Xaa is C or S
  MOD_RES (13), (14), (15), (16), (17): Xaa is A or G
  MOD_RES (18), (19), (20), (21): Xaa is A or G or is absent
XRDVVMGSMEGIXXXXXXXXXMIQMTINSMKTPTXXPGA

SEQ ID NO: 36028 - protein, 39 aa, Artificial Sequence
  Non-cyclic GFR-binding peptide
  MOD_RES (1), (34), (35): Xaa is C or S
  MOD_RES (12), (13), (14), (15), (16): Xaa is A or G
  MOD_RES (17), (18), (19), (20): Xaa is A or G or is absent
XSRVIMSMEGLXXXXXXXXXMIQITINSLAQPVXXPAAS

SEQ ID NO: 36029 - protein, 34 aa, Artificial Sequence
  Non-cyclic GFR-binding peptide
  MOD_RES (2), (33), (34): Xaa is C or S
GXEEVIMSMEGLLLVRGNDMIQMTINSTKVPAXX

SEQ ID NO: 36030 - protein, 32 aa, Artificial Sequence
  Non-cyclic GFR-binding peptide
  MOD_RES (1), (1): Xaa is C or S
XAEVVMDSMEGIVVNNAADMIQITINSLRAPV

SEQ ID NO: 36031 - protein, 32 aa, Artificial Sequence
  Non-cyclic GFR-binding peptide
  MOD_RES (31), (32): Xaa is C or S
EVVMDSMEGIVVNNASDMIQITINSLRTPVXX

SEQ ID NO: 36032 - protein, 34 aa, Artificial Sequence
  Non-cyclic GFR-binding peptide
  MOD_RES (32), (33): Xaa is C or S
AEVVMDSMEGIVVNNAADMIQITINSLRAPVXXS

SEQ ID NO: 36033 - protein, 34 aa, Artificial Sequence
  Non-cyclic GFR-binding peptide
  MOD_RES (2), (33), (34): Xaa is C or S
GXEEVIMSMEGILLVRGNDMIQMTINSTKVPAXX

SEQ ID NO: 36034 - protein, 37 aa, Artificial Sequence
  Non-cyclic GFR-binding peptide
  MOD_RES (2), (4): Xaa is C or S
  MOD_RES (16), (17), (18), (19), (20): Xaa is A or G
  MOD_RES (21), (22), (23), (24): Xaa is A or G or is absent
RXGXSEVVMDSMEGLXXXXXXXXXMIQITINSLRTPV

SEQ ID NO: 36035 - protein, 38 aa, Artificial Sequence
  Non-cyclic GFR-binding peptide
  MOD_RES (1), (3), (36), (37): Xaa is C or S
  MOD_RES (14), (15), (16), (17), (18): Xaa is A or G
  MOD_RES (19), (20), (21), (22): Xaa is A or G or is absent
XGXEEVIMSMEGLXXXXXXXXXMIQMTINSTKVPAXXT

SEQ ID NO: 36036 - protein, 37 aa, Artificial Sequence
  Non-cyclic GFR-binding peptide
  MOD_RES (33), (34): Xaa is C or S
  MOD_RES (11), (12), (13), (14), (15): Xaa is A or G
  MOD_RES (16), (17), (18), (19): Xaa is A or G or is absent
RVVMNSMEGLXXXXXXXXXMIQVTINSLKTPAXXPKP

SEQ ID NO: 36037 - protein, 35 aa, Artificial Sequence
  Non-cyclic GFR-binding peptide
  MOD_RES (33), (34): Xaa is C or S
  MOD_RES (11), (12), (13), (14), (15): Xaa is A or G
  MOD_RES (16), (17), (18), (19): Xaa is A or G or is absent
EEVIMSMEGLXXXXXXXXXMIQMTINSTKVPAXXT

SEQ ID NO: 36038 - protein, 44 aa, Artificial Sequence
  Non-cyclic GFR-binding peptide
  MOD_RES (2), (4), (38), (39): Xaa is C or S
  MOD_RES (16), (17), (18), (19), (20): Xaa is A or G
  MOD_RES (21), (22), (23), (24): Xaa is A or G or is absent
SXGXRDVVMGSMEGLXXXXXXXXXMIQMTINSMKTPTXXPGASG

SEQ ID NO: 36039 - protein, 43 aa, Artificial Sequence
  Non-cyclic GFR-binding peptide
  MOD_RES (1), (3), (37), (38): Xaa is C or S
  MOD_RES (15), (16), (17), (18), (19): Xaa is A or G
  MOD_RES (20), (21), (22), (23): Xaa is A or G or is absent
XGXAEVVMDSMEGLXXXXXXXXXMIQITINSLRAPVXXSAPAA

SEQ ID NO: 36040 - protein, 37 aa, Artificial Sequence
  Non-cyclic GFR-binding peptide
  MOD_RES (2), (34), (35): Xaa is C or S
GXRDVVMGSMEGIIIQQKDNMIQMTINSMKTPTXXPG

SEQ ID NO: 36041 - protein, 33 aa, Artificial Sequence
  Non-cyclic GFR-binding peptide
  MOD_RES (31), (32): Xaa is C or S
EVVMDSMEGLVVNNAADMIQITINSLRAPVXXS

SEQ ID NO: 36042 - protein, 38 aa, Artificial Sequence
  Non-cyclic GFR-binding peptide
  MOD_RES (1), (35), (36): Xaa is C or S
  MOD_RES (13), (14), (15), (16), (17): Xaa is A or G
  MOD_RES (18), (19), (20), (21): Xaa is A or G or is absent
XRDVVMGSMEGIXXXXXXXXXMIQMTINSMKTPTXXPG

SEQ ID NO: 36043 - protein, 37 aa, Artificial Sequence
  Non-cyclic GFR-binding peptide
  MOD_RES (2), (34), (35): Xaa is C or S
GXAEVVMDSMEGLVVNNAADMIQITINSLRAPVXXSA

SEQ ID NO: 36044 - protein, 40 aa, Artificial Sequence
  Non-cyclic GFR-binding peptide
  MOD_RES (2), (4), (36), (37): Xaa is C or S
RXGXAEVVMDSMEGLVVNNAADMIQITINSLRAPVXXSAP

SEQ ID NO: 36045 - protein, 39 aa, Artificial Sequence
  Non-cyclic GFR-binding peptide
  MOD_RES (2), (4), (37), (38): Xaa is C or S
  MOD_RES (15), (16), (17), (18), (19): Xaa is A or G
  MOD_RES (20), (21), (22), (23): Xaa is A or G or is absent
SXKXSRVIMSMEGLXXXXXXXXXMIQITINSLAQPVXXP

SEQ ID NO: 36046 - protein, 32 aa, Artificial Sequence
  Non-cyclic GFR-binding peptide
  MOD_RES (1), (32): Xaa is C or S
XEEVIMSMEGILLVRGNDMIQMTINSTKVPAX

SEQ ID NO: 36047 - protein, 39 aa, Artificial Sequence
  Non-cyclic GFR-binding peptide
  MOD_RES (2), (36), (37): Xaa is C or S
  MOD_RES (14), (15), (16), (17), (18): Xaa is A or G
  MOD_RES (19), (20), (21), (22): Xaa is A or G or is absent
GXAEVVMDSMEGLXXXXXXXXXMIQITINSLRAPVXXSA

SEQ ID NO: 36048 - protein, 41 aa, Artificial Sequence
  Non-cyclic GFR-binding peptide
  MOD_RES (1), (3), (37), (38): Xaa is C or S
  MOD_RES (15), (16), (17), (18), (19): Xaa is A or G
  MOD_RES (20), (21), (22), (23): Xaa is A or G or is absent
XGXSEVVMDSMEGIXXXXXXXXXMIQITINSLRTPVXXTPP

SEQ ID NO: 36049 - protein, 31 aa, Artificial Sequence
  Non-cyclic GFR-binding peptide
  MOD_RES (1), (1): Xaa is C or S
XSKVVMSMEGLVKPTRGVMIQITINSLDQPV

SEQ ID NO: 36050 - protein, 36 aa, Artificial Sequence
  Non-cyclic GFR-binding peptide
  MOD_RES (33), (34): Xaa is C or S
  MOD_RES (11), (12), (13), (14), (15): Xaa is A or G
  MOD_RES (16), (17), (18), (19): Xaa is A or G or is absent
DVVMGSMEGLXXXXXXXXXMIQMTINSMKTPTXXPG

SEQ ID NO: 36051 - protein, 39 aa, Artificial Sequence
  Non-cyclic GFR-binding peptide
  MOD_RES (2), (4), (38), (39): Xaa is C or S
  MOD_RES (16), (17), (18), (19), (20): Xaa is A or G
  MOD_RES (21), (22), (23), (24): Xaa is A or G or is absent
RXGXSEVVMDSMEGIXXXXXXXXXMIQITINSLRTPVXX

SEQ ID NO: 36052 - protein, 40 aa, Artificial Sequence
  Non-cyclic GFR-binding peptide
  MOD_RES (1), (3), (35), (36): Xaa is C or S
XGXSRVVMNSMEGLIVNSSDDMIQVTINSLKTPAXXPKPV

SEQ ID NO: 36053 - protein, 38 aa, Artificial Sequence
  Non-cyclic GFR-binding peptide
  MOD_RES (2), (4), (38): Xaa is C or S
  MOD_RES (16), (17), (18), (19), (20): Xaa is A or G
  MOD_RES (21), (22), (23), (24): Xaa is A or G or is absent
RXGXAEVVMDSMEGIXXXXXXXXXMIQITINSLRAPVX

SEQ ID NO: 36054 - protein, 37 aa, Artificial Sequence
  Non-cyclic GFR-binding peptide
  MOD_RES (2), (34), (35): Xaa is C or S
GXSRVVMNSMEGLIVNSSDDMIQVTINSLKTPAXXPK

SEQ ID NO: 36055 - protein, 34 aa, Artificial Sequence
  Non-cyclic GFR-binding peptide
  MOD_RES (2), (34): Xaa is C or S
GXRDVVMGSMEGLIIQQKDNMIQMTINSMKTPTX

SEQ ID NO: 36056 - protein, 42 aa, Artificial Sequence
  Non-cyclic GFR-binding peptide
  MOD_RES (2), (4), (37), (38): Xaa is C or S
  MOD_RES (15), (16), (17), (18), (19): Xaa is A or G
  MOD_RES (20), (21), (22), (23): Xaa is A or G or is absent
SXKXSRVIMSMEGLXXXXXXXXXMIQITINSLAQPVXXPAAS

SEQ ID NO: 36057 - protein, 38 aa, Artificial Sequence
  Non-cyclic GFR-binding peptide
  MOD_RES (2), (35), (36): Xaa is C or S
  MOD_RES (13), (14), (15), (16), (17): Xaa is A or G
  MOD_RES (18), (19), (20), (21): Xaa is A or G or is absent
KXSKVIMSMEGLXXXXXXXXXMIQITINSLDQSVXXPS

SEQ ID NO: 36058 - protein, 38 aa, Artificial Sequence
  Non-cyclic GFR-binding peptide
  MOD_RES (2), (36), (37): Xaa is C or S
  MOD_RES (14), (15), (16), (17), (18): Xaa is A or G
  MOD_RES (19), (20), (21), (22): Xaa is A or G or is absent
GXAEVVMDSMEGIXXXXXXXXXMIQITINSLRAPVXXS

SEQ ID NO: 36059 - protein, 37 aa, Artificial Sequence
  Non-cyclic GFR-binding peptide
  MOD_RES (2), (33), (34): Xaa is C or S
KXSRVIMSMEGLVKPKRGVMIQITINSLAQPVXXPAA

SEQ ID NO: 36060 - protein, 35 aa, Artificial Sequence
  Non-cyclic GFR-binding peptide
  MOD_RES (2), (4), (35): Xaa is C or S
LXGXEEVIMSMEGILLVRGNDMIQMTINSTKVPAX

SEQ ID NO: 36061 - protein, 33 aa, Artificial Sequence
  Non-cyclic GFR-binding peptide
  MOD_RES (1), (33): Xaa is C or S
XRDVVMGSMEGLIIQQKDNMIQMTINSMKTPTX

SEQ ID NO: 36062 - protein, 35 aa, Artificial Sequence
  Non-cyclic GFR-binding peptide
  MOD_RES (2), (2): Xaa is C or S
  MOD_RES (14), (15), (16), (17), (18): Xaa is A or G
  MOD_RES (19), (20), (21), (22): Xaa is A or G or is absent
GXAEVVMDSMEGIXXXXXXXXXMIQITINSLRAPV

SEQ ID NO: 36063 - protein, 38 aa, Artificial Sequence
  Non-cyclic GFR-binding peptide
  MOD_RES (1), (3), (35), (36): Xaa is C or S
XGXSEVVMDSMEGIVVNNASDMIQITINSLRTPVXXTP

SEQ ID NO: 36064 - protein, 34 aa, Artificial Sequence
  Non-cyclic GFR-binding peptide
  MOD_RES (1), (33), (34): Xaa is C or S
XAEVVMDSMEGIVVNNAADMIQITINSLRAPVXX

SEQ ID NO: 36065 - protein, 36 aa, Artificial Sequence
  Non-cyclic GFR-binding peptide
  MOD_RES (2), (4), (36): Xaa is C or S
RXGXAEVVMDSMEGLVVNNAADMIQITINSLRAPVX

SEQ ID NO: 36066 - protein, 36 aa, Artificial Sequence
  Non-cyclic GFR-binding peptide
  MOD_RES (33), (34): Xaa is C or S
  MOD_RES (11), (12), (13), (14), (15): Xaa is A or G
  MOD_RES (16), (17), (18), (19): Xaa is A or G or is absent
SKVVMSMEGLXXXXXXXXXMIQITINSLDQPVXXPS

SEQ ID NO: 36067 - protein, 41 aa, Artificial Sequence
  Non-cyclic GFR-binding peptide
  MOD_RES (2), (4), (38), (39): Xaa is C or S
  MOD_RES (16), (17), (18), (19), (20): Xaa is A or G
  MOD_RES (21), (22), (23), (24): Xaa is A or G or is absent
RXGXSEVVMDSMEGLXXXXXXXXXMIQITINSLRTPVXXTP

SEQ ID NO: 36068 - protein, 41 aa, Artificial Sequence
  Non-cyclic GFR-binding peptide
  MOD_RES (1), (3), (37), (38): Xaa is C or S
  MOD_RES (15), (16), (17), (18), (19): Xaa is A or G
  MOD_RES (20), (21), (22), (23): Xaa is A or G or is absent
XGXSEVVMDSMEGLXXXXXXXXXMIQITINSLRTPVXXTPP

SEQ ID NO: 36069 - protein, 36 aa, Artificial Sequence
  Non-cyclic GFR-binding peptide
  MOD_RES (1), (32), (33): Xaa is C or S
XEEVIMSMEGILLVRGNDMIQMTINSTKVPAXXTSP

SEQ ID NO: 36070 - protein, 37 aa, Artificial Sequence
  Non-cyclic GFR-binding peptide
  MOD_RES (2), (34), (35): Xaa is C or S
GXAEVVMDSMEGIVVNNAADMIQITINSLRAPVXXSA

SEQ ID NO: 36071 - protein, 40 aa, Artificial Sequence
  Non-cyclic GFR-binding peptide
  MOD_RES (2), (4), (38), (39): Xaa is C or S
  MOD_RES (16), (17), (18), (19), (20): Xaa is A or G
  MOD_RES (21), (22), (23), (24): Xaa is A or G or is absent
RXGXAEVVMDSMEGIXXXXXXXXXMIQITINSLRAPVXXS

SEQ ID NO: 36072 - protein, 38 aa, Artificial Sequence
  Non-cyclic GFR-binding peptide
  MOD_RES (1), (34), (35): Xaa is C or S
  MOD_RES (12), (13), (14), (15), (16): Xaa is A or G
  MOD_RES (17), (18), (19), (20): Xaa is A or G or is absent
XEEVIMSMEGLXXXXXXXXXMIQMTINSTKVPAXXTSP

SEQ ID NO: 36073 - protein, 39 aa, Artificial Sequence
  Non-cyclic GFR-binding peptide
  MOD_RES (1), (3), (36), (37): Xaa is C or S
  MOD_RES (14), (15), (16), (17), (18): Xaa is A or G
  MOD_RES (19), (20), (21), (22): Xaa is A or G or is absent
XGXEEVIMSMEGIXXXXXXXXXMIQMTINSTKVPAXXTS

SEQ ID NO: 36074 - protein, 38 aa, Artificial Sequence
  Non-cyclic GFR-binding peptide
  MOD_RES (2), (36), (37): Xaa is C or S
  MOD_RES (14), (15), (16), (17), (18): Xaa is A or G
  MOD_RES (19), (20), (21), (22): Xaa is A or G or is absent
GXRDVVMGSMEGIXXXXXXXXXMIQMTINSMKTPTXXP

SEQ ID NO: 36075 - protein, 39 aa, Artificial Sequence
  Non-cyclic GFR-binding peptide
  MOD_RES (2), (4), (38), (39): Xaa is C or S
  MOD_RES (16), (17), (18), (19), (20): Xaa is A or G
  MOD_RES (21), (22), (23), (24): Xaa is A or G or is absent
RXGXAEVVMDSMEGLXXXXXXXXXMIQITINSLRAPVXX

SEQ ID NO: 36076 - protein, 39 aa, Artificial Sequence
  Non-cyclic GFR-binding peptide
  MOD_RES (2), (4), (38), (39): Xaa is C or S
  MOD_RES (16), (17), (18), (19), (20): Xaa is A or G
  MOD_RES (21), (22), (23), (24): Xaa is A or G or is absent
SXGXRDVVMGSMEGIXXXXXXXXXMIQMTINSMKTPTXX

SEQ ID NO: 36077 - protein, 37 aa, Artificial Sequence
  Non-cyclic GFR-binding peptide
  MOD_RES (2), (36), (37): Xaa is C or S
  MOD_RES (14), (15), (16), (17), (18): Xaa is A or G
  MOD_RES (19), (20), (21), (22): Xaa is A or G or is absent
GXRDVVMGSMEGLXXXXXXXXXMIQMTINSMKTPTXX

SEQ ID NO: 36078 - protein, 31 aa, Artificial Sequence
  Non-cyclic GFR-binding peptide
  MOD_RES (31), (31): Xaa is C or S
EVVMDSMEGLVVNNASDMIQITINSLRTPVX

SEQ ID NO: 36079 - protein, 34 aa, Artificial Sequence
  Non-cyclic GFR-binding peptide
  MOD_RES (33), (34): Xaa is C or S
  MOD_RES (11), (12), (13), (14), (15): Xaa is A or G
  MOD_RES (16), (17), (18), (19): Xaa is A or G or is absent
EVVMDSMEGIXXXXXXXXXMIQITINSLRAPVXX

SEQ ID NO: 36080 - protein, 33 aa, Artificial Sequence
  Non-cyclic GFR-binding peptide
  MOD_RES (2), (33): Xaa is C or S
GXEEVIMSMEGLLLVRGNDMIQMTINSTKVPAX

SEQ ID NO: 36081 - protein, 36 aa, Artificial Sequence
  Non-cyclic GFR-binding peptide
  MOD_RES (2), (36): Xaa is C or S
  MOD_RES (14), (15), (16), (17), (18): Xaa is A or G
  MOD_RES (19), (20), (21), (22): Xaa is A or G or is absent
GXRDVVMGSMEGIXXXXXXXXXMIQMTINSMKTPTX

SEQ ID NO: 36082 - protein, 39 aa, Artificial Sequence
  Non-cyclic GFR-binding peptide
  MOD_RES (2), (35), (36): Xaa is C or S
  MOD_RES (13), (14), (15), (16), (17): Xaa is A or G
  MOD_RES (18), (19), (20), (21): Xaa is A or G or is absent
KXSKVIMSMEGLXXXXXXXXXMIQITINSLDQSVXXPSA

SEQ ID NO: 36083 - protein, 36 aa, Artificial Sequence
  Non-cyclic GFR-binding peptide
  MOD_RES (2), (4): Xaa is C or S
  MOD_RES (15), (16), (17), (18), (19): Xaa is A or G
  MOD_RES (20), (21), (22), (23): Xaa is A or G or is absent
SXKXSRVIMSMEGLXXXXXXXXXMIQITINSLAQPV

SEQ ID NO: 36084 - protein, 33 aa, Artificial Sequence
  Non-cyclic GFR-binding peptide
  MOD_RES (32), (33): Xaa is C or S
AEVVMDSMEGLVVNNAADMIQITINSLRAPVXX

SEQ ID NO: 36085 - protein, 37 aa, Artificial Sequence
  Non-cyclic GFR-binding peptide
  MOD_RES (2), (4): Xaa is C or S
  MOD_RES (16), (17), (18), (19), (20): Xaa is A or G
  MOD_RES (21), (22), (23), (24): Xaa is A or G or is absent
HXGXSRVVMNSMEGLXXXXXXXXXMIQVTINSLKTPA

SEQ ID NO: 36086 - protein, 38 aa, Artificial Sequence
  Non-cyclic GFR-binding peptide
  MOD_RES (1), (33), (34): Xaa is C or S
XRDVVMGSMEGIIIQQKDNMIQMTINSMKTPTXXPGAS

SEQ ID NO: 36087 - protein, 33 aa, Artificial Sequence
  Non-cyclic GFR-binding peptide
  MOD_RES (33), (33): Xaa is C or S
  MOD_RES (11), (12), (13), (14), (15): Xaa is A or G
  MOD_RES (16), (17), (18), (19): Xaa is A or G or is absent
EVVMDSMEGIXXXXXXXXXMIQITINSLRTPVX

SEQ ID NO: 36088 - protein, 36 aa, Artificial Sequence
  Non-cyclic GFR-binding peptide
  MOD_RES (2), (4), (35), (36): Xaa is C or S
SXKXSRVIMSMEGLVKPKRGVMIQITINSLAQPVXX

SEQ ID NO: 36089 - protein, 35 aa, Artificial Sequence
  Non-cyclic GFR-binding peptide
  MOD_RES (2), (4), (35): Xaa is C or S
LXGXEEVIMSMEGLLLVRGNDMIQMTINSTKVPAX

SEQ ID NO: 36090 - protein, 43 aa, Artificial Sequence
  Non-cyclic GFR-binding peptide
  MOD_RES (2), (4), (38), (39): Xaa is C or S
  MOD_RES (16), (17), (18), (19), (20): Xaa is A or G
  MOD_RES (21), (22), (23), (24): Xaa is A or G or is absent
RXGXSEVVMDSMEGLXXXXXXXXXMIQITINSLRTPVXXTPPT

SEQ ID NO: 36091 - protein, 37 aa, Artificial Sequence
  Non-cyclic GFR-binding peptide
  MOD_RES (2), (4): Xaa is C or S
  MOD_RES (16), (17), (18), (19), (20): Xaa is A or G
  MOD_RES (21), (22), (23), (24): Xaa is A or G or is absent
SXGXRDVVMGSMEGLXXXXXXXXXMIQMTINSMKTPT

SEQ ID NO: 36092 - protein, 32 aa, Artificial Sequence
  Non-cyclic GFR-binding peptide
  MOD_RES (1), (32): Xaa is C or S
XSKVIMSMEGLIKPTKGIMIQITINSLDQSVX

SEQ ID NO: 36093 - protein, 35 aa, Artificial Sequence
  Non-cyclic GFR-binding peptide
  MOD_RES (34), (35): Xaa is C or S
  MOD_RES (12), (13), (14), (15), (16): Xaa is A or G
  MOD_RES (17), (18), (19), (20): Xaa is A or G or is absent
SEVVMDSMEGIXXXXXXXXXMIQITINSLRTPVXX

SEQ ID NO: 36094 - protein, 38 aa, Artificial Sequence
  Non-cyclic GFR-binding peptide
  MOD_RES (2), (4), (35), (36): Xaa is C or S
SXKXSKVVMSMEGLVKPTRGVMIQITINSLDQPVXXPS

SEQ ID NO: 36095 - protein, 33 aa, Artificial Sequence
  Non-cyclic GFR-binding peptide
  MOD_RES (33), (33): Xaa is C or S
  MOD_RES (11), (12), (13), (14), (15): Xaa is A or G
  MOD_RES (16), (17), (18), (19): Xaa is A or G or is absent
EVVMDSMEGLXXXXXXXXXMIQITINSLRTPVX

SEQ ID NO: 36096 - protein, 34 aa, Artificial Sequence
  Non-cyclic GFR-binding peptide
  MOD_RES (1), (34): Xaa is C or S
  MOD_RES (12), (13), (14), (15), (16): Xaa is A or G
  MOD_RES (17), (18), (19), (20): Xaa is A or G or is absent
XSKVIMSMEGLXXXXXXXXXMIQITINSLDQSVX

SEQ ID NO: 36097 - protein, 39 aa, Artificial Sequence
  Non-cyclic GFR-binding peptide
  MOD_RES (2), (34), (35): Xaa is C or S
GXAEVVMDSMEGIVVNNAADMIQITINSLRAPVXXSAPA

SEQ ID NO: 36098 - protein, 34 aa, Artificial Sequence
  Non-cyclic GFR-binding peptide
  MOD_RES (1), (33), (34): Xaa is C or S
XRDVVMGSMEGLIIQQKDNMIQMTINSMKTPTXX

SEQ ID NO: 36099 - protein, 42 aa, Artificial Sequence
  Non-cyclic GFR-binding peptide
  MOD_RES (2), (36), (37): Xaa is C or S
  MOD_RES (14), (15), (16), (17), (18): Xaa is A or G
  MOD_RES (19), (20), (21), (22): Xaa is A or G or is absent
GXRDVVMGSMEGLXXXXXXXXXMIQMTINSMKTPTXXPGASG

SEQ ID NO: 36100 - protein, 34 aa, Artificial Sequence
  Non-cyclic GFR-binding peptide
  MOD_RES (1), (33), (34): Xaa is C or S
XRDVVMGSMEGIIIQQKDNMIQMTINSMKTPTXX

SEQ ID NO: 36101 - protein, 33 aa, Artificial Sequence
  Non-cyclic GFR-binding peptide
  MOD_RES (1), (33): Xaa is C or S
XAEVVMDSMEGIVVNNAADMIQITINSLRAPVX

SEQ ID NO: 36102 - protein, 37 aa, Artificial Sequence
  Non-cyclic GFR-binding peptide
  MOD_RES (2), (4), (36), (37): Xaa is C or S
SXGXRDVVMGSMEGLIIQQKDNMIQMTINSMKTPTXX

SEQ ID NO: 36103 - protein, 37 aa, Artificial Sequence
  Non-cyclic GFR-binding peptide
  MOD_RES (1), (3), (37): Xaa is C or S
  MOD_RES (15), (16), (17), (18), (19): Xaa is A or G
  MOD_RES (20), (21), (22), (23): Xaa is A or G or is absent
XGXAEVVMDSMEGIXXXXXXXXXMIQITINSLRAPVX

SEQ ID NO: 36104 - protein, 35 aa, Artificial Sequence
  Non-cyclic GFR-binding peptide
  MOD_RES (1), (35): Xaa is C or S
  MOD_RES (13), (14), (15), (16), (17): Xaa is A or G
  MOD_RES (18), (19), (20), (21): Xaa is A or G or is absent
XSEVVMDSMEGLXXXXXXXXXMIQITINSLRTPVX

SEQ ID NO: 36105 - protein, 35 aa, Artificial Sequence
  Non-cyclic GFR-binding peptide
  MOD_RES (1), (35): Xaa is C or S
  MOD_RES (13), (14), (15), (16), (17): Xaa is A or G
  MOD_RES (18), (19), (20), (21): Xaa is A or G or is absent
XSEVVMDSMEGIXXXXXXXXXMIQITINSLRTPVX

SEQ ID NO: 36106 - protein, 33 aa, Artificial Sequence
  Non-cyclic GFR-binding peptide
  MOD_RES (1), (33): Xaa is C or S
XAEVVMDSMEGLVVNNAADMIQITINSLRAPVX

SEQ ID NO: 36107 - protein, 37 aa, Artificial Sequence
  Non-cyclic GFR-binding peptide
  MOD_RES (1), (3), (34), (35): Xaa is C or S
XGXEEVIMSMEGLLLVRGNDMIQMTINSTKVPAXXTS

SEQ ID NO: 36108 - protein, 35 aa, Artificial Sequence
  Non-cyclic GFR-binding peptide
  MOD_RES (2), (35): Xaa is C or S
  MOD_RES (13), (14), (15), (16), (17): Xaa is A or G
  MOD_RES (18), (19), (20), (21): Xaa is A or G or is absent
KXSRVIMSMEGLXXXXXXXXXMIQITINSLAQPVX

SEQ ID NO: 36109 - protein, 32 aa, Artificial Sequence
  Non-cyclic GFR-binding peptide
  MOD_RES (1), (1): Xaa is C or S
XSEVVMDSMEGLVVNNASDMIQITINSLRTPV

SEQ ID NO: 36110 - protein, 39 aa, Artificial Sequence
  Non-cyclic GFR-binding peptide
  MOD_RES (1), (3), (35), (36): Xaa is C or S
XGXSEVVMDSMEGIVVNNASDMIQITINSLRTPVXXTPP

SEQ ID NO: 36111 - protein, 39 aa, Artificial Sequence
  Non-cyclic GFR-binding peptide
  MOD_RES (2), (4), (36), (37): Xaa is C or S
RXGXSEVVMDSMEGLVVNNASDMIQITINSLRTPVXXTP

SEQ ID NO: 36112 - protein, 36 aa, Artificial Sequence
  Non-cyclic GFR-binding peptide
  MOD_RES (33), (34): Xaa is C or S
  MOD_RES (11), (12), (13), (14), (15): Xaa is A or G
  MOD_RES (16), (17), (18), (19): Xaa is A or G or is absent
DVVMGSMEGIXXXXXXXXXMIQMTINSMKTPTXXPG

SEQ ID NO: 36113 - protein, 36 aa, Artificial Sequence
  Non-cyclic GFR-binding peptide
  MOD_RES (2), (4), (35), (36): Xaa is C or S
SXKXSKVVMSMEGLVKPTRGVMIQITINSLDQPVXX

SEQ ID NO: 36114 - protein, 33 aa, Artificial Sequence
  Non-cyclic GFR-binding peptide
  MOD_RES (1), (1): Xaa is C or S
  MOD_RES (12), (13), (14), (15), (16): Xaa is A or G
  MOD_RES (17), (18), (19), (20): Xaa is A or G or is absent
XSKVVMSMEGLXXXXXXXXXMIQITINSLDQPV

SEQ ID NO: 36115 - protein, 35 aa, Artificial Sequence
  Non-cyclic GFR-binding peptide
  MOD_RES (33), (34): Xaa is C or S
  MOD_RES (11), (12), (13), (14), (15): Xaa is A or G
  MOD_RES (16), (17), (18), (19): Xaa is A or G or is absent
EEVIMSMEGIXXXXXXXXXMIQMTINSTKVPAXXT

SEQ ID NO: 36116 - protein, 37 aa, Artificial Sequence
  Non-cyclic GFR-binding peptide
  MOD_RES (32), (33): Xaa is C or S
SEVVMDSMEGLVVNNASDMIQITINSLRTPVXXTPPT

SEQ ID NO: 36117 - protein, 41 aa, Artificial Sequence
  Non-cyclic GFR-binding peptide
  MOD_RES (2), (36), (37): Xaa is C or S
  MOD_RES (14), (15), (16), (17), (18): Xaa is A or G
  MOD_RES (19), (20), (21), (22): Xaa is A or G or is absent
GXAEVVMDSMEGLXXXXXXXXXMIQITINSLRAPVXXSAPA

SEQ ID NO: 36118 - protein, 38 aa, Artificial Sequence
  Non-cyclic GFR-binding peptide
  MOD_RES (32), (33): Xaa is C or S
SEVVMDSMEGIVVNNASDMIQITINSLRTPVXXTPPTS

SEQ ID NO: 36119 - protein, 41 aa, Artificial Sequence
  Non-cyclic GFR-binding peptide
  MOD_RES (1), (3), (37), (38): Xaa is C or S
  MOD_RES (15), (16), (17), (18), (19): Xaa is A or G
  MOD_RES (20), (21), (22), (23): Xaa is A or G or is absent
XGXSRVVMNSMEGLXXXXXXXXXMIQVTINSLKTPAXXPKP

SEQ ID NO: 36120 - protein, 35 aa, Artificial Sequence
  Non-cyclic GFR-binding peptide
  MOD_RES (1), (34), (35): Xaa is C or S
  MOD_RES (12), (13), (14), (15), (16): Xaa is A or G
  MOD_RES (17), (18), (19), (20): Xaa is A or G or is absent
XEEVIMSMEGLXXXXXXXXXMIQMTINSTKVPAXX

SEQ ID NO: 36121 - protein, 38 aa, Artificial Sequence
  Non-cyclic GFR-binding peptide
  MOD_RES (2), (4), (36), (37): Xaa is C or S
RXGXSEVVMDSMEGLVVNNASDMIQITINSLRTPVXXT

SEQ ID NO: 36122 - protein, 37 aa, Artificial Sequence
  Non-cyclic GFR-binding peptide
  MOD_RES (33), (34): Xaa is C or S
  MOD_RES (11), (12), (13), (14), (15): Xaa is A or G
  MOD_RES (16), (17), (18), (19): Xaa is A or G or is absent
DVVMGSMEGIXXXXXXXXXMIQMTINSMKTPTXXPGA

SEQ ID NO: 36123 - protein, 41 aa, Artificial Sequence
  Non-cyclic GFR-binding peptide
  MOD_RES (1), (3), (36), (37): Xaa is C or S
  MOD_RES (14), (15), (16), (17), (18): Xaa is A or G
  MOD_RES (19), (20), (21), (22): Xaa is A or G or is absent
XGXEEVIMSMEGIXXXXXXXXXMIQMTINSTKVPAXXTSPV

SEQ ID NO: 36124 - protein, 34 aa, Artificial Sequence
  Non-cyclic GFR-binding peptide
  MOD_RES (1), (33), (34): Xaa is C or S
XAEVVMDSMEGLVVNNAADMIQITINSLRAPVXX

SEQ ID NO: 36125 - protein, 35 aa, Artificial Sequence
  Non-cyclic GFR-binding peptide
  MOD_RES (1), (3), (35): Xaa is C or S
XGXRDVVMGSMEGIIIQQKDNMIQMTINSMKTPTX

SEQ ID NO: 36126 - protein, 40 aa, Artificial Sequence
  Non-cyclic GFR-binding peptide
  MOD_RES (2), (34), (35): Xaa is C or S
GXRDVVMGSMEGLIIQQKDNMIQMTINSMKTPTXXPGASG

SEQ ID NO: 36127 - protein, 38 aa, Artificial Sequence
  Non-cyclic GFR-binding peptide
  MOD_RES (2), (34), (35): Xaa is C or S
GXSEVVMDSMEGLVVNNASDMIQITINSLRTPVXXTPP

SEQ ID NO: 36128 - protein, 37 aa, Artificial Sequence
  Non-cyclic GFR-binding peptide
  MOD_RES (33), (34): Xaa is C or S
  MOD_RES (11), (12), (13), (14), (15): Xaa is A or G
  MOD_RES (16), (17), (18), (19): Xaa is A or G or is absent
EVVMDSMEGIXXXXXXXXXMIQITINSLRAPVXXSAP

SEQ ID NO: 36129 - protein, 33 aa, Artificial Sequence
  Non-cyclic GFR-binding peptide
  MOD_RES (1), (33): Xaa is C or S
XRDVVMGSMEGIIIQQKDNMIQMTINSMKTPTX

SEQ ID NO: 36130 - protein, 37 aa, Artificial Sequence
  Non-cyclic GFR-binding peptide
  MOD_RES (1), (3), (34), (35): Xaa is C or S
XKXSKVIMSMEGLIKPTKGIMIQITINSLDQSVXXPS

SEQ ID NO: 36131 - protein, 40 aa, Artificial Sequence
  Non-cyclic GFR-binding peptide
  MOD_RES (2), (36), (37): Xaa is C or S
  MOD_RES (14), (15), (16), (17), (18): Xaa is A or G
  MOD_RES (19), (20), (21), (22): Xaa is A or G or is absent
GXAEVVMDSMEGLXXXXXXXXXMIQITINSLRAPVXXSAP

SEQ ID NO: 36132 - protein, 38 aa, Artificial Sequence
  Non-cyclic GFR-binding peptide
  MOD_RES (1), (3), (36), (37): Xaa is C or S
  MOD_RES (14), (15), (16), (17), (18): Xaa is A or G
  MOD_RES (19), (20), (21), (22): Xaa is A or G or is absent
XKXSKVIMSMEGLXXXXXXXXXMIQITINSLDQSVXXP

SEQ ID NO: 36133 - protein, 35 aa, Artificial Sequence
  Non-cyclic GFR-binding peptide
  MOD_RES (2), (4): Xaa is C or S
RXGXSEVVMDSMEGIVVNNASDMIQITINSLRTPV

SEQ ID NO: 36134 - protein, 40 aa, Artificial Sequence
  Non-cyclic GFR-binding peptide
  MOD_RES (1), (3), (37), (38): Xaa is C or S
  MOD_RES (15), (16), (17), (18), (19): Xaa is A or G
  MOD_RES (20), (21), (22), (23): Xaa is A or G or is absent
XGXAEVVMDSMEGIXXXXXXXXXMIQITINSLRAPVXXSA

SEQ ID NO: 36135 - protein, 34 aa, Artificial Sequence
  Non-cyclic GFR-binding peptide
  MOD_RES (1), (1): Xaa is C or S
  MOD_RES (13), (14), (15), (16), (17): Xaa is A or G
  MOD_RES (18), (19), (20), (21): Xaa is A or G or is absent
XSEVVMDSMEGIXXXXXXXXXMIQITINSLRTPV

SEQ ID NO: 36136 - protein, 40 aa, Artificial Sequence
  Non-cyclic GFR-binding peptide
  MOD_RES (1), (3), (37), (38): Xaa is C or S
  MOD_RES (15), (16), (17), (18), (19): Xaa is A or G
  MOD_RES (20), (21), (22), (23): Xaa is A or G or is absent
XGXRDVVMGSMEGLXXXXXXXXXMIQMTINSMKTPTXXPG

SEQ ID NO: 36137 - protein, 36 aa, Artificial Sequence
  Non-cyclic GFR-binding peptide
  MOD_RES (1), (3), (36): Xaa is C or S
  MOD_RES (14), (15), (16), (17), (18): Xaa is A or G
  MOD_RES (19), (20), (21), (22): Xaa is A or G or is absent
XGXEEVIMSMEGIXXXXXXXXXMIQMTINSTKVPAX

SEQ ID NO: 36138 - protein, 43 aa, Artificial Sequence
  Non-cyclic GFR-binding peptide
  MOD_RES (2), (4), (37), (38): Xaa is C or S
  MOD_RES (15), (16), (17), (18), (19): Xaa is A or G
  MOD_RES (20), (21), (22), (23): Xaa is A or G or is absent
SXKXSKVVMSMEGLXXXXXXXXXMIQITINSLDQPVXXPSASA

SEQ ID NO: 36139 - protein, 33 aa, Artificial Sequence
  Non-cyclic GFR-binding peptide
  MOD_RES (2), (33): Xaa is C or S
GXEEVIMSMEGILLVRGNDMIQMTINSTKVPAX

SEQ ID NO: 36140 - protein, 40 aa, Artificial Sequence
  Non-cyclic GFR-binding peptide
  MOD_RES (2), (4), (35), (36): Xaa is C or S
SXKXSRVIMSMEGLVKPKRGVMIQITINSLAQPVXXPAAS

SEQ ID NO: 36141 - protein, 37 aa, Artificial Sequence
  Non-cyclic GFR-binding peptide
  MOD_RES (31), (32): Xaa is C or S
EVVMDSMEGLVVNNASDMIQITINSLRTPVXXTPPTS

SEQ ID NO: 36142 - protein, 38 aa, Artificial Sequence
  Non-cyclic GFR-binding peptide
  MOD_RES (1), (35), (36): Xaa is C or S
  MOD_RES (13), (14), (15), (16), (17): Xaa is A or G
  MOD_RES (18), (19), (20), (21): Xaa is A or G or is absent
XRDVVMGSMEGLXXXXXXXXXMIQMTINSMKTPTXXPG

SEQ ID NO: 36143 - protein, 43 aa, Artificial Sequence
  Non-cyclic GFR-binding peptide
  MOD_RES (1), (3), (37), (38): Xaa is C or S
  MOD_RES (15), (16), (17), (18), (19): Xaa is A or G
  MOD_RES (20), (21), (22), (23): Xaa is A or G or is absent
XGXSRVVMNSMEGIXXXXXXXXXMIQVTINSLKTPAXXPKPVH

SEQ ID NO: 36144 - protein, 32 aa, Artificial Sequence
  Non-cyclic GFR-binding peptide
  MOD_RES (2), (2): Xaa is C or S
KXSKVVMSMEGLVKPTRGVMIQITINSLDQPV

SEQ ID NO: 36145 - protein, 37 aa, Artificial Sequence
  Non-cyclic GFR-binding peptide
  MOD_RES (1), (34), (35): Xaa is C or S
  MOD_RES (12), (13), (14), (15), (16): Xaa is A or G
  MOD_RES (17), (18), (19), (20): Xaa is A or G or is absent
XSRVIMSMEGLXXXXXXXXXMIQITINSLAQPVXXPA

SEQ ID NO: 36146 - protein, 39 aa, Artificial Sequence
  Non-cyclic GFR-binding peptide
  MOD_RES (1), (3), (35), (36): Xaa is C or S
XGXSRVVMNSMEGLIVNSSDDMIQVTINSLKTPAXXPKP

SEQ ID NO: 36147 - protein, 38 aa, Artificial Sequence
  Non-cyclic GFR-binding peptide
  MOD_RES (2), (36), (37): Xaa is C or S
  MOD_RES (14), (15), (16), (17), (18): Xaa is A or G
  MOD_RES (19), (20), (21), (22): Xaa is A or G or is absent
GXSEVVMDSMEGLXXXXXXXXXMIQITINSLRTPVXXT

SEQ ID NO: 36148 - protein, 38 aa, Artificial Sequence
  Non-cyclic GFR-binding peptide
  MOD_RES (1), (34), (35): Xaa is C or S
  MOD_RES (12), (13), (14), (15), (16): Xaa is A or G
  MOD_RES (17), (18), (19), (20): Xaa is A or G or is absent
XSRVIMSMEGLXXXXXXXXXMIQITINSLAQPVXXPAA

SEQ ID NO: 36149 - protein, 35 aa, Artificial Sequence
  Non-cyclic GFR-binding peptide
  MOD_RES (31), (32): Xaa is C or S
SKVVMSMEGLVKPTRGVMIQITINSLDQPVXXPSA

SEQ ID NO: 36150 - protein, 34 aa, Artificial Sequence
  Non-cyclic GFR-binding peptide
  MOD_RES (34), (34): Xaa is C or S
  MOD_RES (12), (13), (14), (15), (16): Xaa is A or G
  MOD_RES (17), (18), (19), (20): Xaa is A or G or is absent
SEVVMDSMEGIXXXXXXXXXMIQITINSLRTPVX

SEQ ID NO: 36151 - protein, 37 aa, Artificial Sequence
  Non-cyclic GFR-binding peptide
  MOD_RES (31), (32): Xaa is C or S
EVVMDSMEGIVVNNASDMIQITINSLRTPVXXTPPTS

SEQ ID NO: 36152 - protein, 34 aa, Artificial Sequence
  Non-cyclic GFR-binding peptide
  MOD_RES (2), (2): Xaa is C or S
  MOD_RES (13), (14), (15), (16), (17): Xaa is A or G
  MOD_RES (18), (19), (20), (21): Xaa is A or G or is absent
KXSRVIMSMEGLXXXXXXXXXMIQITINSLAQPV

SEQ ID NO: 36153 - protein, 36 aa, Artificial Sequence
  Non-cyclic GFR-binding peptide
  MOD_RES (1), (34), (36): Xaa is C or S
  MOD_RES (15), (16), (17), (18), (19): Xaa is A or G
  MOD_RES (20), (21), (22), (23): Xaa is A or G or is absent
XVSQDLSNITIQIMXXXXXXXXXLGEMSMIVKSXKX

SEQ ID NO: 36154 - protein, 35 aa, Artificial Sequence
  Non-cyclic GFR-binding peptide
  MOD_RES (4), (5): Xaa is C or S
PPTXXVPTRLSNITIQIMDSANNVVIGEMSDMVVE

SEQ ID NO: 36155 - protein, 40 aa, Artificial Sequence
  Non-cyclic GFR-binding peptide
  MOD_RES (4), (5), (38), (40): Xaa is C or S
  MOD_RES (19), (20), (21), (22), (23): Xaa is A or G
  MOD_RES (24), (25), (26), (27): Xaa is A or G or is absent
ASPXXVPQDLSNITIQIMXXXXXXXXXLGEMSMVVKSXKX

SEQ ID NO: 36156 - protein, 37 aa, Artificial Sequence
  Non-cyclic GFR-binding peptide
  MOD_RES (5), (6): Xaa is C or S
APASXXVPARLSNITIQIMDAANNVVLGEMSDMVVEA

SEQ ID NO: 36157 - protein, 40 aa, Artificial Sequence
  Non-cyclic GFR-binding peptide
  MOD_RES (3), (4), (37), (39): Xaa is C or S
  MOD_RES (18), (19), (20), (21), (22): Xaa is A or G
  MOD_RES (23), (24), (25), (26): Xaa is A or G or is absent
SPXXVPQDLSNITIQIMXXXXXXXXXLGEMSMVVKSXKXS

SEQ ID NO: 36158 - protein, 38 aa, Artificial Sequence
  Non-cyclic GFR-binding peptide
  MOD_RES (1), (2), (36), (38): Xaa is C or S
  MOD_RES (16), (17), (18), (19), (20): Xaa is A or G
  MOD_RES (21), (22), (23), (24): Xaa is A or G or is absent
XXVPARLSNITIQIMXXXXXXXXXLGEMSDMVVEAXGX

SEQ ID NO: 36159 - protein, 37 aa, Artificial Sequence
  Non-cyclic GFR-binding peptide
  MOD_RES (6), (7): Xaa is C or S
RVPSTXXAPVKTSNITMQIMDNGRVLLLGEMSMIVEE

SEQ ID NO: 36160 - protein, 43 aa, Artificial Sequence
  Non-cyclic GFR-binding peptide
  MOD_RES (5), (6), (40), (42): Xaa is C or S
  MOD_RES (20), (21), (22), (23), (24): Xaa is A or G
  MOD_RES (25), (26), (27), (28): Xaa is A or G or is absent
APASXXVPARLSNITIQIMXXXXXXXXXIGEMSDMVVEAXGXR

SEQ ID NO: 36161 - protein, 41 aa, Artificial Sequence
  Non-cyclic GFR-binding peptide
  MOD_RES (4), (5), (38), (40): Xaa is C or S
  MOD_RES (19), (20), (21), (22), (23): Xaa is A or G
  MOD_RES (24), (25), (26), (27): Xaa is A or G or is absent
ASPXXVPQDLSNITIQIMXXXXXXXXXLGEMSMVVKSXKXS

SEQ ID NO: 36162 - protein, 34 aa, Artificial Sequence
  Non-cyclic GFR-binding peptide
  MOD_RES (3), (4): Xaa is C or S
STXXAPVKTSNITMQIMDNGRVLLLGEMSMIVEE

SEQ ID NO: 36163 - protein, 38 aa, Artificial Sequence
  Non-cyclic GFR-binding peptide
  MOD_RES (5), (6): Xaa is C or S
  MOD_RES (20), (21), (22), (23), (24): Xaa is A or G
  MOD_RES (25), (26), (27), (28): Xaa is A or G or is absent
TPPTXXVPTRLSNITIQIMXXXXXXXXXIGEMSDMVVE

SEQ ID NO: 36164 - protein, 38 aa, Artificial Sequence
  Non-cyclic GFR-binding peptide
  MOD_RES (3), (4), (37): Xaa is C or S
  MOD_RES (18), (19), (20), (21), (22): Xaa is A or G
  MOD_RES (23), (24), (25), (26): Xaa is A or G or is absent
SPXXVPQDLSNITIQIMXXXXXXXXXLGEMSMVVKSXK

SEQ ID NO: 36165 - protein, 43 aa, Artificial Sequence
  Non-cyclic GFR-binding peptide
  MOD_RES (6), (7), (41), (43): Xaa is C or S
  MOD_RES (21), (22), (23), (24), (25): Xaa is A or G
  MOD_RES (26), (27), (28), (29): Xaa is A or G or is absent
STPPTXXVPTRLSNITIQIMXXXXXXXXXLGEMSDMVVESXGX

SEQ ID NO: 36166 - protein, 39 aa, Artificial Sequence
  Non-cyclic GFR-binding peptide
  MOD_RES (6), (7): Xaa is C or S
  MOD_RES (21), (22), (23), (24), (25): Xaa is A or G
  MOD_RES (26), (27), (28), (29): Xaa is A or G or is absent
STPPTXXVPTRLSNITIQIMXXXXXXXXXLGEMSDMVVE

SEQ ID NO: 36167 - protein, 35 aa, Artificial Sequence
  Non-cyclic GFR-binding peptide
  MOD_RES (3), (4): Xaa is C or S
ASXXVPARLSNITIQIMDAANNVVIGEMSDMVVEA

SEQ ID NO: 36168 - protein, 31 aa, Artificial Sequence
  Non-cyclic GFR-binding peptide
VPARLSNITIQIMDAANNVVLGEMSDMVVEA

SEQ ID NO: 36169 - protein, 39 aa, Artificial Sequence
  Non-cyclic GFR-binding peptide
  MOD_RES (3), (4), (38): Xaa is C or S
  MOD_RES (18), (19), (20), (21), (22): Xaa is A or G
  MOD_RES (23), (24), (25), (26): Xaa is A or G or is absent
GPXXTPTKMSNITMQIMXXXXXXXXXIGEMSGMVVDRXG

SEQ ID NO: 36170 - protein, 31 aa, Artificial Sequence
  Non-cyclic GFR-binding peptide
  MOD_RES (1), (1): Xaa is C or S
XAPVKTSNITMQIMDNGRVLLLGEMSMIVEE

SEQ ID NO: 36171 - protein, 39 aa, Artificial Sequence
  Non-cyclic GFR-binding peptide
  MOD_RES (4), (5), (36), (38): Xaa is C or S
ASPXXVPQDLSNITIQIMVGRTPKVLGEMSMVVKSXKXS

SEQ ID NO: 36172 - protein, 30 aa, Artificial Sequence
  Non-cyclic GFR-binding peptide
VPTRLSNITIQIMDSANNVVIGEMSDMVVE

SEQ ID NO: 36173 - protein, 36 aa, Artificial Sequence
  Non-cyclic GFR-binding peptide
  MOD_RES (1), (2), (33), (35): Xaa is C or S
XXAPVKTSNITMQIMDNGRVLLLGEMSMIVEEXGXL

SEQ ID NO: 36174 - protein, 35 aa, Artificial Sequence
  Non-cyclic GFR-binding peptide
  MOD_RES (3), (4), (35): Xaa is C or S
SPXXVPQDLSNITIQIMVGRTPKVLGEMSMVVKSX

SEQ ID NO: 36175 - protein, 34 aa, Artificial Sequence
  Non-cyclic GFR-binding peptide
  MOD_RES (32), (34): Xaa is C or S
TPTKMSNITMQIMNDKQQIIIGEMSGMVVDRXGX

SEQ ID NO: 36176 - protein, 42 aa, Artificial Sequence
  Non-cyclic GFR-binding peptide
  MOD_RES (4), (5), (39), (41): Xaa is C or S
  MOD_RES (19), (20), (21), (22), (23): Xaa is A or G
  MOD_RES (24), (25), (26), (27): Xaa is A or G or is absent
PKPXXAPTKLSNITVQIMXXXXXXXXXLGEMSNMVVRSXGXH

SEQ ID NO: 36177 - protein, 37 aa, Artificial Sequence
  Non-cyclic GFR-binding peptide
  MOD_RES (3), (4): Xaa is C or S
  MOD_RES (18), (19), (20), (21), (22): Xaa is A or G
  MOD_RES (23), (24), (25), (26): Xaa is A or G or is absent
GPXXTPTKMSNITMQIMXXXXXXXXXLGEMSGMVVDR

SEQ ID NO: 36178 - protein, 32 aa, Artificial Sequence
  Non-cyclic GFR-binding peptide
  MOD_RES (32), (32): Xaa is C or S
TPTKMSNITMQIMNDKQQIIIGEMSGMVVDRX

SEQ ID NO: 36179 - protein, 35 aa, Artificial Sequence
  Non-cyclic GFR-binding peptide
  MOD_RES (1), (2), (33), (35): Xaa is C or S
XXAPVKTSNITMQIMDNGRVLLLGEMSMIVEEXGX

SEQ ID NO: 36180 - protein, 41 aa, Artificial Sequence
  Non-cyclic GFR-binding peptide
  MOD_RES (6), (7), (39), (41): Xaa is C or S
GSAGPXXTPTKMSNITMQIMNDKQQIILGEMSGMVVDRXGX

SEQ ID NO: 36181 - protein, 36 aa, Artificial Sequence
  Non-cyclic GFR-binding peptide
  MOD_RES (1), (2), (34), (36): Xaa is C or S
XXVPTRLSNITIQIMDSANNVVLGEMSDMVVESXGX

SEQ ID NO: 36182 - protein, 39 aa, Artificial Sequence
  Non-cyclic GFR-binding peptide
  MOD_RES (2), (3), (37), (39): Xaa is C or S
  MOD_RES (17), (18), (19), (20), (21): Xaa is A or G
  MOD_RES (22), (23), (24), (25): Xaa is A or G or is absent
SXXVPARLSNITIQIMXXXXXXXXXIGEMSDMVVEAXGX

SEQ ID NO: 36183 - protein, 42 aa, Artificial Sequence
  Non-cyclic GFR-binding peptide
  MOD_RES (6), (7), (41): Xaa is C or S
  MOD_RES (21), (22), (23), (24), (25): Xaa is A or G
  MOD_RES (26), (27), (28), (29): Xaa is A or G or is absent
GSAGPXXTPTKMSNITMQIMXXXXXXXXXIGEMSGMVVDRXG

SEQ ID NO: 36184 - protein, 37 aa, Artificial Sequence
  Non-cyclic GFR-binding peptide
  MOD_RES (2), (3), (34), (36): Xaa is C or S
PXXVPQALSNITIQIMVGRKPKVLGEMSMIVRSXKXS

SEQ ID NO: 36185 - protein, 40 aa, Artificial Sequence
  Non-cyclic GFR-binding peptide
  MOD_RES (6), (7): Xaa is C or S
  MOD_RES (21), (22), (23), (24), (25): Xaa is A or G
  MOD_RES (26), (27), (28), (29): Xaa is A or G or is absent
HVPKPXXAPTKLSNITVQIMXXXXXXXXXIGEMSNMVVRS

SEQ ID NO: 36186 - protein, 38 aa, Artificial Sequence
  Non-cyclic GFR-binding peptide
  MOD_RES (5), (6), (37): Xaa is C or S
SASPXXVSQDLSNITIQIMIGKTPKILGEMSMIVKSXK

SEQ ID NO: 36187 - protein, 33 aa, Artificial Sequence
  Non-cyclic GFR-binding peptide
  MOD_RES (14), (15), (16), (17), (18): Xaa is A or G
  MOD_RES (19), (20), (21), (22): Xaa is A or G or is absent
VPARLSNITIQIMXXXXXXXXXLGEMSDMVVEA

SEQ ID NO: 36188 - protein, 41 aa, Artificial Sequence
  Non-cyclic GFR-binding peptide
  MOD_RES (6), (7), (40): Xaa is C or S
  MOD_RES (21), (22), (23), (24), (25): Xaa is A or G
  MOD_RES (26), (27), (28), (29): Xaa is A or G or is absent
RVPSTXXAPVKTSNITMQIMXXXXXXXXXIGEMSMIVEEXG

SEQ ID NO: 36189 - protein, 34 aa, Artificial Sequence
  Non-cyclic GFR-binding peptide
  MOD_RES (1), (2): Xaa is C or S
  MOD_RES (16), (17), (18), (19), (20): Xaa is A or G
  MOD_RES (21), (22), (23), (24): Xaa is A or G or is absent
XXTPTKMSNITMQIMXXXXXXXXXLGEMSGMVVD

SEQ ID NO: 36190 - protein, 35 aa, Artificial Sequence
  Non-cyclic GFR-binding peptide
  MOD_RES (1), (34): Xaa is C or S
  MOD_RES (15), (16), (17), (18), (19): Xaa is A or G
  MOD_RES (20), (21), (22), (23): Xaa is A or G or is absent
XAPVKTSNITMQIMXXXXXXXXXLGEMSMIVEEXG

SEQ ID NO: 36191 - protein, 40 aa, Artificial Sequence
  Non-cyclic GFR-binding peptide
  MOD_RES (4), (5), (39): Xaa is C or S
  MOD_RES (19), (20), (21), (22), (23): Xaa is A or G
  MOD_RES (24), (25), (26), (27): Xaa is A or G or is absent
AGPXXTPTKMSNITMQIMXXXXXXXXXLGEMSGMVVDRXG

SEQ ID NO: 36192 - protein, 34 aa, Artificial Sequence
  Non-cyclic GFR-binding peptide
  MOD_RES (1), (32), (34): Xaa is C or S
XAPVKTSNITMQIMDNGRVLLIGEMSMIVEEXGX

SEQ ID NO: 36193 - protein, 35 aa, Artificial Sequence
  Non-cyclic GFR-binding peptide
  MOD_RES (33), (35): Xaa is C or S
  MOD_RES (14), (15), (16), (17), (18): Xaa is A or G
  MOD_RES (19), (20), (21), (22): Xaa is A or G or is absent
VPQDLSNITIQIMXXXXXXXXXLGEMSMVVKSXKX

SEQ ID NO: 36194 - protein, 41 aa, Artificial Sequence
  Non-cyclic GFR-binding peptide
  MOD_RES (5), (6), (38), (40): Xaa is C or S
SAGPXXTPTKMSNITMQIMNDKQQIIIGEMSGMVVDRXGXS

SEQ ID NO: 36195 - protein, 35 aa, Artificial Sequence
  Non-cyclic GFR-binding peptide
  MOD_RES (1), (2), (33), (35): Xaa is C or S
XXAPVKTSNITMQIMDNGRVLLIGEMSMIVEEXGX

SEQ ID NO: 36196 - protein, 36 aa, Artificial Sequence
  Non-cyclic GFR-binding peptide
  MOD_RES (5), (6): Xaa is C or S
VPSTXXAPVKTSNITMQIMDNGRVLLLGEMSMIVEE

SEQ ID NO: 36197 - protein, 35 aa, Artificial Sequence
  Non-cyclic GFR-binding peptide
  MOD_RES (3), (4), (35): Xaa is C or S
STXXAPVKTSNITMQIMDNGRVLLLGEMSMIVEEX

SEQ ID NO: 36198 - protein, 32 aa, Artificial Sequence
  Non-cyclic GFR-binding peptide
  MOD_RES (14), (15), (16), (17), (18): Xaa is A or G
  MOD_RES (19), (20), (21), (22): Xaa is A or G or is absent
VPARLSNITIQIMXXXXXXXXXIGEMSDMVVE

SEQ ID NO: 36199 - protein, 35 aa, Artificial Sequence
  Non-cyclic GFR-binding peptide
  MOD_RES (1), (33), (35): Xaa is C or S
XTPTKMSNITMQIMNDKQQIILGEMSGMVVDRXGX

SEQ ID NO: 36200 - protein, 40 aa, Artificial Sequence
  Non-cyclic GFR-binding peptide
  MOD_RES (6), (7): Xaa is C or S
  MOD_RES (21), (22), (23), (24), (25): Xaa is A or G
  MOD_RES (26), (27), (28), (29): Xaa is A or G or is absent
AAPASXXVPARLSNITIQIMXXXXXXXXXIGEMSDMVVEA

SEQ ID NO: 36201 - protein, 33 aa, Artificial Sequence
  Non-cyclic GFR-binding peptide
  MOD_RES (1), (1): Xaa is C or S
  MOD_RES (15), (16), (17), (18), (19): Xaa is A or G
  MOD_RES (20), (21), (22), (23): Xaa is A or G or is absent
XTPTKMSNITMQIMXXXXXXXXXLGEMSGMVVD

SEQ ID NO: 36202 - protein, 36 aa, Artificial Sequence
  Non-cyclic GFR-binding peptide
  MOD_RES (1), (2), (36): Xaa is C or S
  MOD_RES (16), (17), (18), (19), (20): Xaa is A or G
  MOD_RES (21), (22), (23), (24): Xaa is A or G or is absent
XXVPARLSNITIQIMXXXXXXXXXLGEMSDMVVEAX

SEQ ID NO: 36203 - protein, 34 aa, Artificial Sequence
  Non-cyclic GFR-binding peptide
  MOD_RES (1), (2): Xaa is C or S
  MOD_RES (16), (17), (18), (19), (20): Xaa is A or G
  MOD_RES (21), (22), (23), (24): Xaa is A or G or is absent
XXVPQDLSNITIQIMXXXXXXXXXLGEMSMVVKS

SEQ ID NO: 36204 - protein, 41 aa, Artificial Sequence
  Non-cyclic GFR-binding peptide
  MOD_RES (5), (6), (40): Xaa is C or S
  MOD_RES (20), (21), (22), (23), (24): Xaa is A or G
  MOD_RES (25), (26), (27), (28): Xaa is A or G or is absent
SAGPXXTPTKMSNITMQIMXXXXXXXXXIGEMSGMVVDRXG

SEQ ID NO: 36205 - protein, 32 aa, Artificial Sequence
  Non-cyclic GFR-binding peptide
  MOD_RES (14), (15), (16), (17), (18): Xaa is A or G
  MOD_RES (19), (20), (21), (22): Xaa is A or G or is absent
VPTRLSNITIQIMXXXXXXXXXIGEMSDMVVE

SEQ ID NO: 36206 - protein, 37 aa, Artificial Sequence
  Non-cyclic GFR-binding peptide
  MOD_RES (1), (2), (35), (37): Xaa is C or S
  MOD_RES (16), (17), (18), (19), (20): Xaa is A or G
  MOD_RES (21), (22), (23), (24): Xaa is A or G or is absent
XXVSQDLSNITIQIMXXXXXXXXXLGEMSMIVKSXKX

SEQ ID NO: 36207 - protein, 36 aa, Artificial Sequence
  Non-cyclic GFR-binding peptide
  MOD_RES (1), (2), (35): Xaa is C or S
  MOD_RES (16), (17), (18), (19), (20): Xaa is A or G
  MOD_RES (21), (22), (23), (24): Xaa is A or G or is absent
XXAPVKTSNITMQIMXXXXXXXXXLGEMSMIVEEXG

SEQ ID NO: 36208 - protein, 35 aa, Artificial Sequence
  Non-cyclic GFR-binding peptide
  MOD_RES (1), (35): Xaa is C or S
  MOD_RES (15), (16), (17), (18), (19): Xaa is A or G
  MOD_RES (20), (21), (22), (23): Xaa is A or G or is absent
XVPARLSNITIQIMXXXXXXXXXLGEMSDMVVEAX

SEQ ID NO: 36209 - protein, 33 aa, Artificial Sequence
  Non-cyclic GFR-binding peptide
  MOD_RES (1), (1): Xaa is C or S
  MOD_RES (15), (16), (17), (18), (19): Xaa is A or G
  MOD_RES (20), (21), (22), (23): Xaa is A or G or is absent
XVPQDLSNITIQIMXXXXXXXXXLGEMSMVVKS

SEQ ID NO: 36210 - protein, 36 aa, Artificial Sequence
  Non-cyclic GFR-binding peptide
  MOD_RES (1), (35): Xaa is C or S
  MOD_RES (15), (16), (17), (18), (19): Xaa is A or G
  MOD_RES (20), (21), (22), (23): Xaa is A or G or is absent
XVPTRLSNITIQIMXXXXXXXXXIGEMSDMVVESXG

SEQ ID NO: 36211 - protein, 36 aa, Artificial Sequence
  Non-cyclic GFR-binding peptide
  MOD_RES (2), (3), (35): Xaa is C or S
PXXTPTKMSNITMQIMNDKQQIILGEMSGMVVDRXG

SEQ ID NO: 36212 - protein, 39 aa, Artificial Sequence
  Non-cyclic GFR-binding peptide
  MOD_RES (5), (6): Xaa is C or S
  MOD_RES (20), (21), (22), (23), (24): Xaa is A or G
  MOD_RES (25), (26), (27), (28): Xaa is A or G or is absent
TPPTXXVPTRLSNITIQIMXXXXXXXXXLGEMSDMVVES

SEQ ID NO: 36213 - protein, 36 aa, Artificial Sequence
  Non-cyclic GFR-binding peptide
  MOD_RES (33), (35): Xaa is C or S
  MOD_RES (14), (15), (16), (17), (18): Xaa is A or G
  MOD_RES (19), (20), (21), (22): Xaa is A or G or is absent
APVKTSNITMQIMXXXXXXXXXLGEMSMIVEEXGXL

SEQ ID NO: 36214 - protein, 39 aa, Artificial Sequence
  Non-cyclic GFR-binding peptide
  MOD_RES (5), (6), (38): Xaa is C or S
TPPTXXVPTRLSNITIQIMDSANNVVIGEMSDMVVESXG

SEQ ID NO: 36215 - protein, 35 aa, Artificial Sequence
  Non-cyclic GFR-binding peptide
  MOD_RES (1), (33), (35): Xaa is C or S
XVPARLSNITIQIMDAANNVVLGEMSDMVVEAXGX

SEQ ID NO: 36216 - protein, 39 aa, Artificial Sequence
  Non-cyclic GFR-binding peptide
  MOD_RES (5), (6), (38): Xaa is C or S
SAGPXXTPTKMSNITMQIMNDKQQIILGEMSGMVVDRXG

SEQ ID NO: 36217 - protein, 33 aa, Artificial Sequence
  Non-cyclic GFR-binding peptide
  MOD_RES (2), (3): Xaa is C or S
SXXVPARLSNITIQIMDAANNVVIGEMSDMVVE

SEQ ID NO: 36218 - protein, 40 aa, Artificial Sequence
  Non-cyclic GFR-binding peptide
  MOD_RES (5), (6), (38), (40): Xaa is C or S
APASXXVPARLSNITIQIMDAANNVVIGEMSDMVVEAXGX

SEQ ID NO: 36219 - protein, 30 aa, Artificial Sequence
  Non-cyclic GFR-binding peptide
VPQDLSNITIQIMVGRTPKVLGEMSMVVKS

SEQ ID NO: 36220 - protein, 34 aa, Artificial Sequence
  Non-cyclic GFR-binding peptide
  MOD_RES (33), (33): Xaa is C or S
  MOD_RES (14), (15), (16), (17), (18): Xaa is A or G
  MOD_RES (19), (20), (21), (22): Xaa is A or G or is absent
VSQDLSNITIQIMXXXXXXXXXLGEMSMIVKSXK

SEQ ID NO: 36221 - protein, 35 aa, Artificial Sequence
  Non-cyclic GFR-binding peptide
  MOD_RES (1), (2), (34): Xaa is C or S
XXVPTRLSNITIQIMDSANNVVLGEMSDMVVESXG

SEQ ID NO: 36222 - protein, 38 aa, Artificial Sequence
  Non-cyclic GFR-binding peptide
  MOD_RES (1), (2), (35), (37): Xaa is C or S
  MOD_RES (16), (17), (18), (19), (20): Xaa is A or G
  MOD_RES (21), (22), (23), (24): Xaa is A or G or is absent
XXVPQDLSNITIQIMXXXXXXXXXLGEMSMVVKSXKXS

SEQ ID NO: 36223 - protein, 35 aa, Artificial Sequence
  Non-cyclic GFR-binding peptide
  MOD_RES (1), (35): Xaa is C or S
  MOD_RES (15), (16), (17), (18), (19): Xaa is A or G
  MOD_RES (20), (21), (22), (23): Xaa is A or G or is absent
XTPTKMSNITMQIMXXXXXXXXXIGEMSGMVVDRX

SEQ ID NO: 36224 - protein, 37 aa, Artificial Sequence
  Non-cyclic GFR-binding peptide
  MOD_RES (3), (4), (37): Xaa is C or S
  MOD_RES (18), (19), (20), (21), (22): Xaa is A or G
  MOD_RES (23), (24), (25), (26): Xaa is A or G or is absent
SPXXVPQDLSNITIQIMXXXXXXXXXLGEMSMVVKSX

SEQ ID NO: 36225 - protein, 35 aa, Artificial Sequence
  Non-cyclic GFR-binding peptide
  MOD_RES (2), (3): Xaa is C or S
  MOD_RES (17), (18), (19), (20), (21): Xaa is A or G
  MOD_RES (22), (23), (24), (25): Xaa is A or G or is absent
TXXVPTRLSNITIQIMXXXXXXXXXIGEMSDMVVE

SEQ ID NO: 36226 - protein, 32 aa, Artificial Sequence
  Non-cyclic GFR-binding peptide
  MOD_RES (1), (2): Xaa is C or S
XXVPQALSNITIQIMVGRKPKVLGEMSMIVRS

SEQ ID NO: 36227 - protein, 33 aa, Artificial Sequence
  Non-cyclic GFR-binding peptide
  MOD_RES (14), (15), (16), (17), (18): Xaa is A or G
  MOD_RES (19), (20), (21), (22): Xaa is A or G or is absent
VPTRLSNITIQIMXXXXXXXXXLGEMSDMVVES

SEQ ID NO: 36228 - protein, 38 aa, Artificial Sequence
  Non-cyclic GFR-binding peptide
  MOD_RES (2), (3), (35), (37): Xaa is C or S
SXXVPARLSNITIQIMDAANNVVIGEMSDMVVEAXGXR

SEQ ID NO: 36229 - protein, 38 aa, Artificial Sequence
  Non-cyclic GFR-binding peptide
  MOD_RES (6), (7): Xaa is C or S
STPPTXXVPTRLSNITIQIMDSANNVVLGEMSDMVVES

SEQ ID NO: 36230 - protein, 41 aa, Artificial Sequence
  Non-cyclic GFR-binding peptide
  MOD_RES (6), (7), (39), (41): Xaa is C or S
HVPKPXXAPTKLSNITVQIMDDSSNVILGEMSNMVVRSXGX

SEQ ID NO: 36231 - protein, 38 aa, Artificial Sequence
  Non-cyclic GFR-binding peptide
  MOD_RES (5), (6): Xaa is C or S
  MOD_RES (20), (21), (22), (23), (24): Xaa is A or G
  MOD_RES (25), (26), (27), (28): Xaa is A or G or is absent
VPKPXXAPTKLSNITVQIMXXXXXXXXXLGEMSNMVVR

SEQ ID NO: 36232 - protein, 34 aa, Artificial Sequence
  Non-cyclic GFR-binding peptide
  MOD_RES (1), (32), (34): Xaa is C or S
XAPVKTSNITMQIMDNGRVLLLGEMSMIVEEXGX

SEQ ID NO: 36233 - protein, 40 aa, Artificial Sequence
  Non-cyclic GFR-binding peptide
  MOD_RES (4), (5), (38), (40): Xaa is C or S
  MOD_RES (19), (20), (21), (22), (23): Xaa is A or G
  MOD_RES (24), (25), (26), (27): Xaa is A or G or is absent
PSTXXAPVKTSNITMQIMXXXXXXXXXIGEMSMIVEEXGX

SEQ ID NO: 36234 - protein, 37 aa, Artificial Sequence
  Non-cyclic GFR-binding peptide
  MOD_RES (1), (2), (36): Xaa is C or S
  MOD_RES (16), (17), (18), (19), (20): Xaa is A or G
  MOD_RES (21), (22), (23), (24): Xaa is A or G or is absent
XXVPARLSNITIQIMXXXXXXXXXIGEMSDMVVEAXG

SEQ ID NO: 36235 - protein, 34 aa, Artificial Sequence
  Non-cyclic GFR-binding peptide
  MOD_RES (34), (34): Xaa is C or S
  MOD_RES (14), (15), (16), (17), (18): Xaa is A or G
  MOD_RES (19), (20), (21), (22): Xaa is A or G or is absent
APTKLSNITVQIMXXXXXXXXXLGEMSNMVVRSX

SEQ ID NO: 36236 - protein, 34 aa, Artificial Sequence
  Non-cyclic GFR-binding peptide
  MOD_RES (32), (34): Xaa is C or S
VPTRLSNITIQIMDSANNVVLGEMSDMVVESXGX

SEQ ID NO: 36237 - protein, 37 aa, Artificial Sequence
  Non-cyclic GFR-binding peptide
  MOD_RES (2), (3), (36): Xaa is C or S
  MOD_RES (17), (18), (19), (20), (21): Xaa is A or G
  MOD_RES (22), (23), (24), (25): Xaa is A or G or is absent
PXXVPQALSNITIQIMXXXXXXXXXLGEMSMIVRSXK

SEQ ID NO: 36238 - protein, 32 aa, Artificial Sequence
  Non-cyclic GFR-binding peptide
  MOD_RES (32), (32): Xaa is C or S
APTKLSNITVQIMDDSSNVILGEMSNMVVRSX

SEQ ID NO: 36239 - protein, 36 aa, Artificial Sequence
  Non-cyclic GFR-binding peptide
  MOD_RES (3), (4), (36): Xaa is C or S
PTXXVPTRLSNITIQIMDSANNVVLGEMSDMVVESX

SEQ ID NO: 36240 - protein, 38 aa, Artificial Sequence
  Non-cyclic GFR-binding peptide
  MOD_RES (3), (4), (36), (38): Xaa is C or S
GPXXTPTKMSNITMQIMNDKQQIILGEMSGMVVDRXGX

SEQ ID NO: 36241 - protein, 40 aa, Artificial Sequence
  Non-cyclic GFR-binding peptide
  MOD_RES (5), (6), (38), (40): Xaa is C or S
SAGPXXTPTKMSNITMQIMNDKQQIILGEMSGMVVDRXGX

SEQ ID NO: 36242 - protein, 38 aa, Artificial Sequence
  Non-cyclic GFR-binding peptide
  MOD_RES (4), (5), (37): Xaa is C or S
PPTXXVPTRLSNITIQIMDSANNVVIGEMSDMVVESXG

SEQ ID NO: 36243 - protein, 35 aa, Artificial Sequence
  Non-cyclic GFR-binding peptide
  MOD_RES (1), (33), (35): Xaa is C or S
XAPTKLSNITVQIMDDSSNVILGEMSNMVVRSXGX

SEQ ID NO: 36244 - protein, 36 aa, Artificial Sequence
  Non-cyclic GFR-binding peptide
  MOD_RES (1), (33), (35): Xaa is C or S
XVPTRLSNITIQIMDSANNVVLGEMSDMVVESXGXR

SEQ ID NO: 36245 - protein, 35 aa, Artificial Sequence
  Non-cyclic GFR-binding peptide
  MOD_RES (2), (3): Xaa is C or S
  MOD_RES (17), (18), (19), (20), (21): Xaa is A or G
  MOD_RES (22), (23), (24), (25): Xaa is A or G or is absent
SXXVPARLSNITIQIMXXXXXXXXXIGEMSDMVVE

SEQ ID NO: 36246 - protein, 41 aa, Artificial Sequence
  Non-cyclic GFR-binding peptide
  MOD_RES (5), (6), (39), (41): Xaa is C or S
  MOD_RES (20), (21), (22), (23), (24): Xaa is A or G
  MOD_RES (25), (26), (27), (28): Xaa is A or G or is absent
SAAPXXVPQALSNITIQIMXXXXXXXXXLGEMSMIVRSXKX

SEQ ID NO: 36247 - protein, 35 aa, Artificial Sequence
  Non-cyclic GFR-binding peptide
  MOD_RES (32), (34): Xaa is C or S
VPARLSNITIQIMDAANNVVIGEMSDMVVEAXGXR

SEQ ID NO: 36248 - protein, 42 aa, Artificial Sequence
  Non-cyclic GFR-binding peptide
  MOD_RES (6), (7), (41): Xaa is C or S
  MOD_RES (21), (22), (23), (24), (25): Xaa is A or G
  MOD_RES (26), (27), (28), (29): Xaa is A or G or is absent
AAPASXXVPARLSNITIQIMXXXXXXXXXIGEMSDMVVEAXG

SEQ ID NO: 36249 - protein, 36 aa, Artificial Sequence
  Non-cyclic GFR-binding peptide
  MOD_RES (3), (4): Xaa is C or S
  MOD_RES (18), (19), (20), (21), (22): Xaa is A or G
  MOD_RES (23), (24), (25), (26): Xaa is A or G or is absent
SPXXVSQDLSNITIQIMXXXXXXXXXLGEMSMIVKS

SEQ ID NO: 36250 - protein, 41 aa, Artificial Sequence
  Non-cyclic GFR-binding peptide
  MOD_RES (6), (7), (39), (41): Xaa is C or S
AAPASXXVPARLSNITIQIMDAANNVVIGEMSDMVVEAXGX

SEQ ID NO: 36251 - protein, 37 aa, Artificial Sequence
  Non-cyclic GFR-binding peptide
  MOD_RES (1), (34), (36): Xaa is C or S
  MOD_RES (15), (16), (17), (18), (19): Xaa is A or G
  MOD_RES (20), (21), (22), (23): Xaa is A or G or is absent
XVSQDLSNITIQIMXXXXXXXXXLGEMSMIVKSXKXS

SEQ ID NO: 36252 - protein, 40 aa, Artificial Sequence
  Non-cyclic GFR-binding peptide
  MOD_RES (5), (6), (39): Xaa is C or S
  MOD_RES (20), (21), (22), (23), (24): Xaa is A or G
  MOD_RES (25), (26), (27), (28): Xaa is A or G or is absent
VPSTXXAPVKTSNITMQIMXXXXXXXXXIGEMSMIVEEXG

SEQ ID NO: 36253 - protein, 39 aa, Artificial Sequence
  Non-cyclic GFR-binding peptide
  MOD_RES (6), (7), (39): Xaa is C or S
STPPTXXVPTRLSNITIQIMDSANNVVIGEMSDMVVESX

SEQ ID NO: 36254 - protein, 36 aa, Artificial Sequence
  Non-cyclic GFR-binding peptide
  MOD_RES (1), (2), (36): Xaa is C or S
  MOD_RES (16), (17), (18), (19), (20): Xaa is A or G
  MOD_RES (21), (22), (23), (24): Xaa is A or G or is absent
XXVPTRLSNITIQIMXXXXXXXXXLGEMSDMVVESX

SEQ ID NO: 36255 - protein, 36 aa, Artificial Sequence
  Non-cyclic GFR-binding peptide
  MOD_RES (3), (4), (36): Xaa is C or S
GPXXTPTKMSNITMQIMNDKQQIIIGEMSGMVVDRX

SEQ ID NO: 36256 - protein, 37 aa, Artificial Sequence
  Non-cyclic GFR-binding peptide
  MOD_RES (5), (6), (37): Xaa is C or S
VPSTXXAPVKTSNITMQIMDNGRVLLIGEMSMIVEEX

SEQ ID NO: 36257 - protein, 35 aa, Artificial Sequence
  Non-cyclic GFR-binding peptide
  MOD_RES (34), (34): Xaa is C or S
  MOD_RES (14), (15), (16), (17), (18): Xaa is A or G
  MOD_RES (19), (20), (21), (22): Xaa is A or G or is absent
APTKLSNITVQIMXXXXXXXXXLGEMSNMVVRSXG

SEQ ID NO: 36258 - protein, 41 aa, Artificial Sequence
  Non-cyclic GFR-binding peptide
  MOD_RES (5), (6), (39), (41): Xaa is C or S
  MOD_RES (20), (21), (22), (23), (24): Xaa is A or G
  MOD_RES (25), (26), (27), (28): Xaa is A or G or is absent
SASPXXVSQDLSNITIQIMXXXXXXXXXLGEMSMIVKSXKX

SEQ ID NO: 36259 - protein, 35 aa, Artificial Sequence
  Non-cyclic GFR-binding peptide
  MOD_RES (3), (4): Xaa is C or S
PTXXVPTRLSNITIQIMDSANNVVLGEMSDMVVES

SEQ ID NO: 36260 - protein, 37 aa, Artificial Sequence
  Non-cyclic GFR-binding peptide
  MOD_RES (6), (7): Xaa is C or S
HVPKPXXAPTKLSNITVQIMDDSSNVILGEMSNMVVR

SEQ ID NO: 36261 - protein, 39 aa, Artificial Sequence
  Non-cyclic GFR-binding peptide
  MOD_RES (1), (2), (36), (38): Xaa is C or S
  MOD_RES (16), (17), (18), (19), (20): Xaa is A or G
  MOD_RES (21), (22), (23), (24): Xaa is A or G or is absent
XXAPTKLSNITVQIMXXXXXXXXXLGEMSNMVVRSXGXH

SEQ ID NO: 36262 - protein, 35 aa, Artificial Sequence
  Non-cyclic GFR-binding peptide
  MOD_RES (33), (35): Xaa is C or S
  MOD_RES (14), (15), (16), (17), (18): Xaa is A or G
  MOD_RES (19), (20), (21), (22): Xaa is A or G or is absent
VSQDLSNITIQIMXXXXXXXXXLGEMSMIVKSXKX

SEQ ID NO: 36263 - protein, 34 aa, Artificial Sequence
  Non-cyclic GFR-binding peptide
  MOD_RES (1), (1): Xaa is C or S
  MOD_RES (15), (16), (17), (18), (19): Xaa is A or G
  MOD_RES (20), (21), (22), (23): Xaa is A or G or is absent
XTPTKMSNITMQIMXXXXXXXXXIGEMSGMVVDR

SEQ ID NO: 36264 - protein, 33 aa, Artificial Sequence
  Non-cyclic GFR-binding peptide
  MOD_RES (1), (1): Xaa is C or S
  MOD_RES (15), (16), (17), (18), (19): Xaa is A or G
  MOD_RES (20), (21), (22), (23): Xaa is A or G or is absent
XVSQDLSNITIQIMXXXXXXXXXLGEMSMIVKS

SEQ ID NO: 36265 - protein, 37 aa, Artificial Sequence
  Non-cyclic GFR-binding peptide
  MOD_RES (3), (4), (37): Xaa is C or S
  MOD_RES (18), (19), (20), (21), (22): Xaa is A or G
  MOD_RES (23), (24), (25), (26): Xaa is A or G or is absent
SPXXVSQDLSNITIQIMXXXXXXXXXLGEMSMIVKSX

SEQ ID NO: 36266 - protein, 39 aa, Artificial Sequence
  Non-cyclic GFR-binding peptide
  MOD_RES (3), (4), (36), (38): Xaa is C or S
GPXXTPTKMSNITMQIMNDKQQIIIGEMSGMVVDRXGXS

SEQ ID NO: 36267 - protein, 40 aa, Artificial Sequence
  Non-cyclic GFR-binding peptide
  MOD_RES (5), (6), (39): Xaa is C or S
  MOD_RES (20), (21), (22), (23), (24): Xaa is A or G
  MOD_RES (25), (26), (27), (28): Xaa is A or G or is absent
SASPXXVPQDLSNITIQIMXXXXXXXXXLGEMSMVVKSXK

SEQ ID NO: 36268 - protein, 42 aa, Artificial Sequence
  Non-cyclic GFR-binding peptide
  MOD_RES (5), (6), (40), (42): Xaa is C or S
  MOD_RES (20), (21), (22), (23), (24): Xaa is A or G
  MOD_RES (25), (26), (27), (28): Xaa is A or G or is absent
SAGPXXTPTKMSNITMQIMXXXXXXXXXLGEMSGMVVDRXGX

SEQ ID NO: 36269 - protein, 38 aa, Artificial Sequence
  Non-cyclic GFR-binding peptide
  MOD_RES (5), (6): Xaa is C or S
  MOD_RES (20), (21), (22), (23), (24): Xaa is A or G
  MOD_RES (25), (26), (27), (28): Xaa is A or G or is absent
SAAPXXVPQALSNITIQIMXXXXXXXXXLGEMSMIVRS

SEQ ID NO: 36270 - protein, 40 aa, Artificial Sequence
  Non-cyclic GFR-binding peptide
  MOD_RES (6), (7), (39): Xaa is C or S
AAPASXXVPARLSNITIQIMDAANNVVLGEMSDMVVEAXG

SEQ ID NO: 36271 - protein, 39 aa, Artificial Sequence
  Non-cyclic GFR-binding peptide
  MOD_RES (6), (7), (39): Xaa is C or S
AAPASXXVPARLSNITIQIMDAANNVVLGEMSDMVVEAX

SEQ ID NO: 36272 - protein, 38 aa, Artificial Sequence
  Non-cyclic GFR-binding peptide
  MOD_RES (3), (4), (38): Xaa is C or S
  MOD_RES (18), (19), (20), (21), (22): Xaa is A or G
  MOD_RES (23), (24), (25), (26): Xaa is A or G or is absent
ASXXVPARLSNITIQIMXXXXXXXXXLGEMSDMVVEAX

SEQ ID NO: 36273 - protein, 38 aa, Artificial Sequence
  Non-cyclic GFR-binding peptide
  MOD_RES (4), (5), (36), (38): Xaa is C or S
ASPXXVSQDLSNITIQIMIGKTPKILGEMSMIVKSXKX

SEQ ID NO: 36274 - protein, 36 aa, Artificial Sequence
  Non-cyclic GFR-binding peptide
  MOD_RES (1), (2), (34), (36): Xaa is C or S
XXVPARLSNITIQIMDAANNVVIGEMSDMVVEAXGX

SEQ ID NO: 36275 - protein, 36 aa, Artificial Sequence
  Non-cyclic GFR-binding peptide
  MOD_RES (3), (4), (36): Xaa is C or S
ASXXVPARLSNITIQIMDAANNVVLGEMSDMVVEAX

SEQ ID NO: 36276 - protein, 35 aa, Artificial Sequence
  Non-cyclic GFR-binding peptide
  MOD_RES (4), (5): Xaa is C or S
ASPXXVSQDLSNITIQIMIGKTPKILGEMSMIVKS

SEQ ID NO: 36277 - protein, 37 aa, Artificial Sequence
  Non-cyclic GFR-binding peptide
  MOD_RES (2), (3), (35), (37): Xaa is C or S
SXXVPARLSNITIQIMDAANNVVLGEMSDMVVEAXGX

SEQ ID NO: 36278 - protein, 42 aa, Artificial Sequence
  Non-cyclic GFR-binding peptide
  MOD_RES (4), (5), (39), (41): Xaa is C or S
  MOD_RES (19), (20), (21), (22), (23): Xaa is A or G
  MOD_RES (24), (25), (26), (27): Xaa is A or G or is absent
PPTXXVPTRLSNITIQIMXXXXXXXXXLGEMSDMVVESXGXR

SEQ ID NO: 36279 - protein, 35 aa, Artificial Sequence
  Non-cyclic GFR-binding peptide
  MOD_RES (4), (5): Xaa is C or S
PASXXVPARLSNITIQIMDAANNVVIGEMSDMVVE

SEQ ID NO: 36280 - protein, 38 aa, Artificial Sequence
  Non-cyclic GFR-binding peptide
  MOD_RES (2), (3), (35), (37): Xaa is C or S
PXXAPTKLSNITVQIMDDSSNVILGEMSNMVVRSXGXH

SEQ ID NO: 36281 - protein, 38 aa, Artificial Sequence
  Non-cyclic GFR-binding peptide
  MOD_RES (6), (7), (38): Xaa is C or S
ASASPXXVPQDLSNITIQIMVGRTPKVLGEMSMVVKSX

SEQ ID NO: 36282 - protein, 36 aa, Artificial Sequence
  Non-cyclic GFR-binding peptide
  MOD_RES (3), (4): Xaa is C or S
  MOD_RES (18), (19), (20), (21), (22): Xaa is A or G
  MOD_RES (23), (24), (25), (26): Xaa is A or G or is absent
PTXXVPTRLSNITIQIMXXXXXXXXXLGEMSDMVVE

SEQ ID NO: 36283 - protein, 44 aa, Artificial Sequence
  Non-cyclic GFR-binding peptide
  MOD_RES (6), (7), (41), (43): Xaa is C or S
  MOD_RES (21), (22), (23), (24), (25): Xaa is A or G
  MOD_RES (26), (27), (28), (29): Xaa is A or G or is absent
HVPKPXXAPTKLSNITVQIMXXXXXXXXXIGEMSNMVVRSXGXH

SEQ ID NO: 36284 - protein, 40 aa, Artificial Sequence
  Non-cyclic GFR-binding peptide
  MOD_RES (4), (5), (39): Xaa is C or S
  MOD_RES (19), (20), (21), (22), (23): Xaa is A or G
  MOD_RES (24), (25), (26), (27): Xaa is A or G or is absent
PASXXVPARLSNITIQIMXXXXXXXXXIGEMSDMVVEAXG

SEQ ID NO: 36285 - protein, 41 aa, Artificial Sequence
  Non-cyclic GFR-binding peptide
  MOD_RES (6), (7), (39), (41): Xaa is C or S
STPPTXXVPTRLSNITIQIMDSANNVVIGEMSDMVVESXGX

SEQ ID NO: 36286 - protein, 34 aa, Artificial Sequence
  Non-cyclic GFR-binding peptide
  MOD_RES (1), (32), (34): Xaa is C or S
XVSQDLSNITIQIMIGKTPKILGEMSMIVKSXKX

SEQ ID NO: 36287 - protein, 36 aa, Artificial Sequence
  Non-cyclic GFR-binding peptide
  MOD_RES (3), (4): Xaa is C or S
  MOD_RES (18), (19), (20), (21), (22): Xaa is A or G
  MOD_RES (23), (24), (25), (26): Xaa is A or G or is absent
STXXAPVKTSNITMQIMXXXXXXXXXIGEMSMIVEE

SEQ ID NO: 36288 - protein, 34 aa, Artificial Sequence
  Non-cyclic GFR-binding peptide
  MOD_RES (31), (33): Xaa is C or S
APVKTSNITMQIMDNGRVLLLGEMSMIVEEXGXL

SEQ ID NO: 36289 - protein, 42 aa, Artificial Sequence
  Non-cyclic GFR-binding peptide
  MOD_RES (5), (6), (40), (42): Xaa is C or S
  MOD_RES (20), (21), (22), (23), (24): Xaa is A or G
  MOD_RES (25), (26), (27), (28): Xaa is A or G or is absent
TPPTXXVPTRLSNITIQIMXXXXXXXXXLGEMSDMVVESXGX

SEQ ID NO: 36290 - protein, 37 aa, Artificial Sequence
  Non-cyclic GFR-binding peptide
  MOD_RES (5), (6): Xaa is C or S
SAGPXXTPTKMSNITMQIMNDKQQIILGEMSGMVVDR

SEQ ID NO: 36291 - protein, 38 aa, Artificial Sequence
  Non-cyclic GFR-binding peptide
  MOD_RES (2), (3), (37): Xaa is C or S
  MOD_RES (17), (18), (19), (20), (21): Xaa is A or G
  MOD_RES (22), (23), (24), (25): Xaa is A or G or is absent
SXXVPARLSNITIQIMXXXXXXXXXLGEMSDMVVEAXG

SEQ ID NO: 36292 - protein, 42 aa, Artificial Sequence
  Non-cyclic GFR-binding peptide
  MOD_RES (6), (7), (39), (41): Xaa is C or S
GSAGPXXTPTKMSNITMQIMNDKQQIILGEMSGMVVDRXGXS

SEQ ID NO: 36293 - protein, 38 aa, Artificial Sequence
  Non-cyclic GFR-binding peptide
  MOD_RES (3), (4), (38): Xaa is C or S
  MOD_RES (18), (19), (20), (21), (22): Xaa is A or G
  MOD_RES (23), (24), (25), (26): Xaa is A or G or is absent
KPXXAPTKLSNITVQIMXXXXXXXXXLGEMSNMVVRSX

SEQ ID NO: 36294 - protein, 32 aa, Artificial Sequence
  Non-cyclic GFR-binding peptide
  MOD_RES (1), (2): Xaa is C or S
XXAPTKLSNITVQIMDDSSNVILGEMSNMVVR

SEQ ID NO: 36295 - protein, 36 aa, Artificial Sequence
  Non-cyclic GFR-binding peptide
  MOD_RES (2), (3): Xaa is C or S
  MOD_RES (17), (18), (19), (20), (21): Xaa is A or G
  MOD_RES (22), (23), (24), (25): Xaa is A or G or is absent
TXXVPTRLSNITIQIMXXXXXXXXXIGEMSDMVVES

SEQ ID NO: 36296 - protein, 37 aa, Artificial Sequence
  Non-cyclic GFR-binding peptide
  MOD_RES (2), (3), (35), (37): Xaa is C or S
PXXAPTKLSNITVQIMDDSSNVILGEMSNMVVRSXGX

SEQ ID NO: 36297 - protein, 37 aa, Artificial Sequence
  Non-cyclic GFR-binding peptide
  MOD_RES (3), (4), (37): Xaa is C or S
  MOD_RES (18), (19), (20), (21), (22): Xaa is A or G
  MOD_RES (23), (24), (25), (26): Xaa is A or G or is absent
STXXAPVKTSNITMQIMXXXXXXXXXIGEMSMIVEEX

SEQ ID NO: 36298 - protein, 37 aa, Artificial Sequence
  Non-cyclic GFR-binding peptide
  MOD_RES (5), (6), (37): Xaa is C or S
SASPXXVSQDLSNITIQIMIGKTPKILGEMSMIVKSX

SEQ ID NO: 36299 - protein, 39 aa, Artificial Sequence
  Non-cyclic GFR-binding peptide
  MOD_RES (4), (5), (39): Xaa is C or S
  MOD_RES (19), (20), (21), (22), (23): Xaa is A or G
  MOD_RES (24), (25), (26), (27): Xaa is A or G or is absent
AGPXXTPTKMSNITMQIMXXXXXXXXXLGEMSGMVVDRX

SEQ ID NO: 36300 - protein, 41 aa, Artificial Sequence
  Non-cyclic GFR-binding peptide
  MOD_RES (5), (6), (38), (40): Xaa is C or S
APASXXVPARLSNITIQIMDAANNVVIGEMSDMVVEAXGXR

SEQ ID NO: 36301 - protein, 37 aa, Artificial Sequence
  Non-cyclic GFR-binding peptide
  MOD_RES (2), (3), (37): Xaa is C or S
  MOD_RES (17), (18), (19), (20), (21): Xaa is A or G
  MOD_RES (22), (23), (24), (25): Xaa is A or G or is absent
SXXVPARLSNITIQIMXXXXXXXXXIGEMSDMVVEAX

SEQ ID NO: 36302 - protein, 36 aa, Artificial Sequence
  Non-cyclic GFR-binding peptide
  MOD_RES (34), (36): Xaa is C or S
  MOD_RES (14), (15), (16), (17), (18): Xaa is A or G
  MOD_RES (19), (20), (21), (22): Xaa is A or G or is absent
VPTRLSNITIQIMXXXXXXXXXLGEMSDMVVESXGX

SEQ ID NO: 36303 - protein, 39 aa, Artificial Sequence
  Non-cyclic GFR-binding peptide
  MOD_RES (4), (5), (37), (39): Xaa is C or S
PASXXVPARLSNITIQIMDAANNVVIGEMSDMVVEAXGX

SEQ ID NO: 36304 - protein, 44 aa, Artificial Sequence
  Non-cyclic GFR-binding peptide
  MOD_RES (6), (7), (41), (43): Xaa is C or S
  MOD_RES (21), (22), (23), (24), (25): Xaa is A or G
  MOD_RES (26), (27), (28), (29): Xaa is A or G or is absent
GSAGPXXTPTKMSNITMQIMXXXXXXXXXIGEMSGMVVDRXGXS

SEQ ID NO: 36305 - protein, 39 aa, Artificial Sequence
  Non-cyclic GFR-binding peptide
  MOD_RES (3), (4), (37), (39): Xaa is C or S
  MOD_RES (18), (19), (20), (21), (22): Xaa is A or G
  MOD_RES (23), (24), (25), (26): Xaa is A or G or is absent
APXXVPQALSNITIQIMXXXXXXXXXLGEMSMIVRSXKX

SEQ ID NO: 36306 - protein, 34 aa, Artificial Sequence
  Non-cyclic GFR-binding peptide
  MOD_RES (1), (2), (34): Xaa is C or S
XXVPTRLSNITIQIMDSANNVVIGEMSDMVVESX

SEQ ID NO: 36307 - protein, 35 aa, Artificial Sequence
  Non-cyclic GFR-binding peptide
  MOD_RES (1), (2), (35): Xaa is C or S
  MOD_RES (16), (17), (18), (19), (20): Xaa is A or G
  MOD_RES (21), (22), (23), (24): Xaa is A or G or is absent
XXVPQALSNITIQIMXXXXXXXXXLGEMSMIVRSX

SEQ ID NO: 36308 - protein, 40 aa, Artificial Sequence
  Non-cyclic GFR-binding peptide
  MOD_RES (4), (5), (37), (39): Xaa is C or S
PASXXVPARLSNITIQIMDAANNVVIGEMSDMVVEAXGXR

SEQ ID NO: 36309 - protein, 32 aa, Artificial Sequence
  Non-cyclic GFR-binding peptide
  MOD_RES (1), (1): Xaa is C or S
XVPTRLSNITIQIMDSANNVVIGEMSDMVVES

SEQ ID NO: 36310 - protein, 37 aa, Artificial Sequence
  Non-cyclic GFR-binding peptide
  MOD_RES (4), (5), (37): Xaa is C or S
PASXXVPARLSNITIQIMDAANNVVLGEMSDMVVEAX

SEQ ID NO: 36311 - protein, 38 aa, Artificial Sequence
  Non-cyclic GFR-binding peptide
  MOD_RES (1), (2), (36), (38): Xaa is C or S
  MOD_RES (16), (17), (18), (19), (20): Xaa is A or G
  MOD_RES (21), (22), (23), (24): Xaa is A or G or is absent
XXAPTKLSNITVQIMXXXXXXXXXLGEMSNMVVRSXGX

SEQ ID NO: 36312 - protein, 41 aa, Artificial Sequence
  Non-cyclic GFR-binding peptide
  MOD_RES (6), (7), (38), (40): Xaa is C or S
RVPSTXXAPVKTSNITMQIMDNGRVLLIGEMSMIVEEXGXL

SEQ ID NO: 36313 - protein, 34 aa, Artificial Sequence
  Non-cyclic GFR-binding peptide
  MOD_RES (33), (33): Xaa is C or S
  MOD_RES (14), (15), (16), (17), (18): Xaa is A or G
  MOD_RES (19), (20), (21), (22): Xaa is A or G or is absent
VPQDLSNITIQIMXXXXXXXXXLGEMSMVVKSXK

SEQ ID NO: 36314 - protein, 39 aa, Artificial Sequence
  Non-cyclic GFR-binding peptide
  MOD_RES (1), (2), (36), (38): Xaa is C or S
  MOD_RES (16), (17), (18), (19), (20): Xaa is A or G
  MOD_RES (21), (22), (23), (24): Xaa is A or G or is absent
XXVPTRLSNITIQIMXXXXXXXXXLGEMSDMVVESXGXR

SEQ ID NO: 36315 - protein, 38 aa, Artificial Sequence
  Non-cyclic GFR-binding peptide
  MOD_RES (1), (35), (37): Xaa is C or S
  MOD_RES (15), (16), (17), (18), (19): Xaa is A or G
  MOD_RES (20), (21), (22), (23): Xaa is A or G or is absent
XTPTKMSNITMQIMXXXXXXXXXIGEMSGMVVDRXGXS

SEQ ID NO: 36316 - protein, 37 aa, Artificial Sequence
  Non-cyclic GFR-binding peptide
  MOD_RES (2), (3), (35), (37): Xaa is C or S
PXXTPTKMSNITMQIMNDKQQIILGEMSGMVVDRXGX

SEQ ID NO: 36317 - protein, 35 aa, Artificial Sequence
  Non-cyclic GFR-binding peptide
  MOD_RES (1), (2), (34): Xaa is C or S
XXVPARLSNITIQIMDAANNVVIGEMSDMVVEAXG

SEQ ID NO: 36318 - protein, 38 aa, Artificial Sequence
  Non-cyclic GFR-binding peptide
  MOD_RES (1), (35), (37): Xaa is C or S
  MOD_RES (15), (16), (17), (18), (19): Xaa is A or G
  MOD_RES (20), (21), (22), (23): Xaa is A or G or is absent
XVPARLSNITIQIMXXXXXXXXXLGEMSDMVVEAXGXR

SEQ ID NO: 36319 - protein, 35 aa, Artificial Sequence
  Non-cyclic GFR-binding peptide
  MOD_RES (1), (32), (34): Xaa is C or S
XVPQALSNITIQIMVGRKPKVLGEMSMIVRSXKXS

SEQ ID NO: 36320 - protein, 33 aa, Artificial Sequence
  Non-cyclic GFR-binding peptide
  MOD_RES (1), (1): Xaa is C or S
  MOD_RES (15), (16), (17), (18), (19): Xaa is A or G
  MOD_RES (20), (21), (22), (23): Xaa is A or G or is absent
XVPARLSNITIQIMXXXXXXXXXIGEMSDMVVE

SEQ ID NO: 36321 - protein, 33 aa, Artificial Sequence
  Non-cyclic GFR-binding peptide
  MOD_RES (1), (2): Xaa is C or S
XXVPTRLSNITIQIMDSANNVVLGEMSDMVVES

SEQ ID NO: 36322 - protein, 34 aa, Artificial Sequence
  Non-cyclic GFR-binding peptide
  MOD_RES (3), (4): Xaa is C or S
ASXXVPARLSNITIQIMDAANNVVLGEMSDMVVE

SEQ ID NO: 36323 - protein, 40 aa, Artificial Sequence
  Non-cyclic GFR-binding peptide
  MOD_RES (6), (7): Xaa is C or S
  MOD_RES (21), (22), (23), (24), (25): Xaa is A or G
  MOD_RES (26), (27), (28), (29): Xaa is A or G or is absent
GSAGPXXTPTKMSNITMQIMXXXXXXXXXLGEMSGMVVDR

SEQ ID NO: 36324 - protein, 39 aa, Artificial Sequence
  Non-cyclic GFR-binding peptide
  MOD_RES (4), (5), (36), (38): Xaa is C or S
PSTXXAPVKTSNITMQIMDNGRVLLIGEMSMIVEEXGXL

SEQ ID NO: 36325 - protein, 32 aa, Artificial Sequence
  Non-cyclic GFR-binding peptide
  MOD_RES (14), (15), (16), (17), (18): Xaa is A or G
  MOD_RES (19), (20), (21), (22): Xaa is A or G or is absent
APVKTSNITMQIMXXXXXXXXXLGEMSMIVEE

SEQ ID NO: 36326 - protein, 36 aa, Artificial Sequence
  Non-cyclic GFR-binding peptide
  MOD_RES (2), (3), (36): Xaa is C or S
  MOD_RES (17), (18), (19), (20), (21): Xaa is A or G
  MOD_RES (22), (23), (24), (25): Xaa is A or G or is absent
TXXAPVKTSNITMQIMXXXXXXXXXLGEMSMIVEEX

SEQ ID NO: 36327 - protein, 39 aa, Artificial Sequence
  Non-cyclic GFR-binding peptide
  MOD_RES (6), (7): Xaa is C or S
  MOD_RES (21), (22), (23), (24), (25): Xaa is A or G
  MOD_RES (26), (27), (28), (29): Xaa is A or G or is absent
RVPSTXXAPVKTSNITMQIMXXXXXXXXXLGEMSMIVEE

SEQ ID NO: 36328 - protein, 33 aa, Artificial Sequence
  Non-cyclic GFR-binding peptide
  MOD_RES (32), (32): Xaa is C or S
VPTRLSNITIQIMDSANNVVIGEMSDMVVESXG

SEQ ID NO: 36329 - protein, 36 aa, Artificial Sequence
  Non-cyclic GFR-binding peptide
  MOD_RES (1), (33), (35): Xaa is C or S
XVPARLSNITIQIMDAANNVVIGEMSDMVVEAXGXR

SEQ ID NO: 36330 - protein, 32 aa, Artificial Sequence
  Non-cyclic GFR-binding peptide
  MOD_RES (1), (2): Xaa is C or S
XXVPARLSNITIQIMDAANNVVLGEMSDMVVE

SEQ ID NO: 36331 - protein, 42 aa, Artificial Sequence
  Non-cyclic GFR-binding peptide
  MOD_RES (5), (6), (39), (41): Xaa is C or S
  MOD_RES (20), (21), (22), (23), (24): Xaa is A or G
  MOD_RES (25), (26), (27), (28): Xaa is A or G or is absent
SASPXXVSQDLSNITIQIMXXXXXXXXXLGEMSMIVKSXKXS

SEQ ID NO: 36332 - protein, 38 aa, Artificial Sequence
  Non-cyclic GFR-binding peptide
  MOD_RES (3), (4), (38): Xaa is C or S
  MOD_RES (18), (19), (20), (21), (22): Xaa is A or G
  MOD_RES (23), (24), (25), (26): Xaa is A or G or is absent
PTXXVPTRLSNITIQIMXXXXXXXXXLGEMSDMVVESX

SEQ ID NO: 36333 - protein, 37 aa, Artificial Sequence
  Non-cyclic GFR-binding peptide
  MOD_RES (6), (7): Xaa is C or S
AAPASXXVPARLSNITIQIMDAANNVVLGEMSDMVVE

SEQ ID NO: 36334 - protein, 43 aa, Artificial Sequence
  Non-cyclic GFR-binding peptide
  MOD_RES (6), (7), (41), (43): Xaa is C or S
  MOD_RES (21), (22), (23), (24), (25): Xaa is A or G
  MOD_RES (26), (27), (28), (29): Xaa is A or G or is absent
GSAGPXXTPTKMSNITMQIMXXXXXXXXXIGEMSGMVVDRXGX

SEQ ID NO: 36335 - protein, 36 aa, Artificial Sequence
  Non-cyclic GFR-binding peptide
  MOD_RES (5), (6): Xaa is C or S
SAGPXXTPTKMSNITMQIMNDKQQIIIGEMSGMVVD

SEQ ID NO: 36336 - protein, 36 aa, Artificial Sequence
  Non-cyclic GFR-binding peptide
  MOD_RES (4), (5), (36): Xaa is C or S
ASPXXVPQDLSNITIQIMVGRTPKVLGEMSMVVKSX

SEQ ID NO: 36337 - protein, 41 aa, Artificial Sequence
  Non-cyclic GFR-binding peptide
  MOD_RES (4), (5), (38), (40): Xaa is C or S
  MOD_RES (19), (20), (21), (22), (23): Xaa is A or G
  MOD_RES (24), (25), (26), (27): Xaa is A or G or is absent
PSTXXAPVKTSNITMQIMXXXXXXXXXIGEMSMIVEEXGXL

SEQ ID NO: 36338 - protein, 37 aa, Artificial Sequence
  Non-cyclic GFR-binding peptide
  MOD_RES (1), (35), (37): Xaa is C or S
  MOD_RES (15), (16), (17), (18), (19): Xaa is A or G
  MOD_RES (20), (21), (22), (23): Xaa is A or G or is absent
XTPTKMSNITMQIMXXXXXXXXXLGEMSGMVVDRXGX

SEQ ID NO: 36339 - protein, 36 aa, Artificial Sequence
  Non-cyclic GFR-binding peptide
  MOD_RES (4), (5): Xaa is C or S
PASXXVPARLSNITIQIMDAANNVVLGEMSDMVVEA

SEQ ID NO: 36340 - protein, 41 aa, Artificial Sequence
  Non-cyclic GFR-binding peptide
  MOD_RES (5), (6), (39), (41): Xaa is C or S
  MOD_RES (20), (21), (22), (23), (24): Xaa is A or G
  MOD_RES (25), (26), (27), (28): Xaa is A or G or is absent
SASPXXVPQDLSNITIQIMXXXXXXXXXLGEMSMVVKSXKX

SEQ ID NO: 36341 - protein, 33 aa, Artificial Sequence
  Non-cyclic GFR-binding peptide
  MOD_RES (32), (32): Xaa is C or S
TPTKMSNITMQIMNDKQQIILGEMSGMVVDRXG

SEQ ID NO: 36342 - protein, 32 aa, Artificial Sequence
  Non-cyclic GFR-binding peptide
  MOD_RES (31), (31): Xaa is C or S
APVKTSNITMQIMDNGRVLLLGEMSMIVEEXG

SEQ ID NO: 36343 - protein, 34 aa, Artificial Sequence
  Non-cyclic GFR-binding peptide
  MOD_RES (3), (4): Xaa is C or S
PTXXVPTRLSNITIQIMDSANNVVLGEMSDMVVE

SEQ ID NO: 36344 - protein, 41 aa, Artificial Sequence
  Non-cyclic GFR-binding peptide
  MOD_RES (4), (5), (38), (40): Xaa is C or S
  MOD_RES (19), (20), (21), (22), (23): Xaa is A or G
  MOD_RES (24), (25), (26), (27): Xaa is A or G or is absent
AAPXXVPQALSNITIQIMXXXXXXXXXLGEMSMIVRSXKXS

SEQ ID NO: 36345 - protein, 35 aa, Artificial Sequence
  Non-cyclic GFR-binding peptide
  MOD_RES (1), (2), (34): Xaa is C or S
XXAPTKLSNITVQIMDDSSNVILGEMSNMVVRSXG

SEQ ID NO: 36346 - protein, 38 aa, Artificial Sequence
  Non-cyclic GFR-binding peptide
  MOD_RES (4), (5): Xaa is C or S
  MOD_RES (19), (20), (21), (22), (23): Xaa is A or G
  MOD_RES (24), (25), (26), (27): Xaa is A or G or is absent
PASXXVPARLSNITIQIMXXXXXXXXXIGEMSDMVVEA

SEQ ID NO: 36347 - protein, 32 aa, Artificial Sequence
  Non-cyclic GFR-binding peptide
  MOD_RES (14), (15), (16), (17), (18): Xaa is A or G
  MOD_RES (19), (20), (21), (22): Xaa is A or G or is absent
VPQDLSNITIQIMXXXXXXXXXLGEMSMVVKS

SEQ ID NO: 36348 - protein, 39 aa, Artificial Sequence
  Non-cyclic GFR-binding peptide
  MOD_RES (5), (6), (39): Xaa is C or S
  MOD_RES (20), (21), (22), (23), (24): Xaa is A or G
  MOD_RES (25), (26), (27), (28): Xaa is A or G or is absent
VPSTXXAPVKTSNITMQIMXXXXXXXXXLGEMSMIVEEX

SEQ ID NO: 36349 - protein, 33 aa, Artificial Sequence
  Non-cyclic GFR-binding peptide
  MOD_RES (33), (33): Xaa is C or S
  MOD_RES (14), (15), (16), (17), (18): Xaa is A or G
  MOD_RES (19), (20), (21), (22): Xaa is A or G or is absent
APVKTSNITMQIMXXXXXXXXXIGEMSMIVEEX

SEQ ID NO: 36350 - protein, 38 aa, Artificial Sequence
  Non-cyclic GFR-binding peptide
  MOD_RES (2), (3), (35), (37): Xaa is C or S
PXXTPTKMSNITMQIMNDKQQIIIGEMSGMVVDRXGXS

SEQ ID NO: 36351 - protein, 31 aa, Artificial Sequence
  Non-cyclic GFR-binding peptide
APTKLSNITVQIMDDSSNVILGEMSNMVVRS

SEQ ID NO: 36352 - protein, 36 aa, Artificial Sequence
  Non-cyclic GFR-binding peptide
  MOD_RES (4), (5): Xaa is C or S
PPTXXVPTRLSNITIQIMDSANNVVIGEMSDMVVES

SEQ ID NO: 36353 - protein, 40 aa, Artificial Sequence
  Non-cyclic GFR-binding peptide
  MOD_RES (4), (5), (38), (40): Xaa is C or S
  MOD_RES (19), (20), (21), (22), (23): Xaa is A or G
  MOD_RES (24), (25), (26), (27): Xaa is A or G or is absent
PSTXXAPVKTSNITMQIMXXXXXXXXXLGEMSMIVEEXGX

SEQ ID NO: 36354 - protein, 37 aa, Artificial Sequence
  Non-cyclic GFR-binding peptide
  MOD_RES (5), (6), (37): Xaa is C or S
SAAPXXVPQALSNITIQIMVGRKPKVLGEMSMIVRSX

SEQ ID NO: 36355 - protein, 41 aa, Artificial Sequence
  Non-cyclic GFR-binding peptide
  MOD_RES (3), (4), (38), (40): Xaa is C or S
  MOD_RES (18), (19), (20), (21), (22): Xaa is A or G
  MOD_RES (23), (24), (25), (26): Xaa is A or G or is absent
PTXXVPTRLSNITIQIMXXXXXXXXXIGEMSDMVVESXGXR

SEQ ID NO: 36356 - protein, 36 aa, Artificial Sequence
  Non-cyclic GFR-binding peptide
  MOD_RES (34), (36): Xaa is C or S
  MOD_RES (14), (15), (16), (17), (18): Xaa is A or G
  MOD_RES (19), (20), (21), (22): Xaa is A or G or is absent
VPARLSNITIQIMXXXXXXXXXIGEMSDMVVEAXGX

SEQ ID NO: 36357 - protein, 38 aa, Artificial Sequence
  Non-cyclic GFR-binding peptide
  MOD_RES (3), (4), (36), (38): Xaa is C or S
PTXXVPTRLSNITIQIMDSANNVVLGEMSDMVVESXGX

SEQ ID NO: 36358 - protein, 34 aa, Artificial Sequence
  Non-cyclic GFR-binding peptide
  MOD_RES (33), (33): Xaa is C or S
  MOD_RES (14), (15), (16), (17), (18): Xaa is A or G
  MOD_RES (19), (20), (21), (22): Xaa is A or G or is absent
APVKTSNITMQIMXXXXXXXXXLGEMSMIVEEXG

SEQ ID NO: 36359 - protein, 31 aa, Artificial Sequence
  Non-cyclic GFR-binding peptide
  MOD_RES (1), (1): Xaa is C or S
XVPARLSNITIQIMDAANNVVIGEMSDMVVE

SEQ ID NO: 36360 - protein, 37 aa, Artificial Sequence
  Non-cyclic GFR-binding peptide
  MOD_RES (6), (7): Xaa is C or S
GSAGPXXTPTKMSNITMQIMNDKQQIIIGEMSGMVVD

SEQ ID NO: 36361 - protein, 39 aa, Artificial Sequence
  Non-cyclic GFR-binding peptide
  MOD_RES (6), (7), (39): Xaa is C or S
HVPKPXXAPTKLSNITVQIMDDSSNVIIGEMSNMVVRSX

SEQ ID NO: 36362 - protein, 32 aa, Artificial Sequence
  Non-cyclic GFR-binding peptide
  MOD_RES (14), (15), (16), (17), (18): Xaa is A or G
  MOD_RES (19), (20), (21), (22): Xaa is A or G or is absent
TPTKMSNITMQIMXXXXXXXXXLGEMSGMVVD

SEQ ID NO: 36363 - protein, 35 aa, Artificial Sequence
  Non-cyclic GFR-binding peptide
  MOD_RES (1), (2): Xaa is C or S
  MOD_RES (16), (17), (18), (19), (20): Xaa is A or G
  MOD_RES (21), (22), (23), (24): Xaa is A or G or is absent
XXVPARLSNITIQIMXXXXXXXXXLGEMSDMVVEA

SEQ ID NO: 36364 - protein, 39 aa, Artificial Sequence
  Non-cyclic GFR-binding peptide
  MOD_RES (3), (4), (37), (39): Xaa is C or S
  MOD_RES (18), (19), (20), (21), (22): Xaa is A or G
  MOD_RES (23), (24), (25), (26): Xaa is A or G or is absent
SPXXVSQDLSNITIQIMXXXXXXXXXLGEMSMIVKSXKX

SEQ ID NO: 36365 - protein, 41 aa, Artificial Sequence
  Non-cyclic GFR-binding peptide
  MOD_RES (5), (6), (40): Xaa is C or S
  MOD_RES (20), (21), (22), (23), (24): Xaa is A or G
  MOD_RES (25), (26), (27), (28): Xaa is A or G or is absent
APASXXVPARLSNITIQIMXXXXXXXXXIGEMSDMVVEAXG

SEQ ID NO: 36366 - protein, 41 aa, Artificial Sequence
  Non-cyclic GFR-binding peptide
  MOD_RES (6), (7), (41): Xaa is C or S
  MOD_RES (21), (22), (23), (24), (25): Xaa is A or G
  MOD_RES (26), (27), (28), (29): Xaa is A or G or is absent
HVPKPXXAPTKLSNITVQIMXXXXXXXXXIGEMSNMVVRSX

SEQ ID NO: 36367 - protein, 40 aa, Artificial Sequence
  Non-cyclic GFR-binding peptide
  MOD_RES (5), (6), (39): Xaa is C or S
  MOD_RES (20), (21), (22), (23), (24): Xaa is A or G
  MOD_RES (25), (26), (27), (28): Xaa is A or G or is absent
SASPXXVSQDLSNITIQIMXXXXXXXXXLGEMSMIVKSXK

SEQ ID NO: 36368 - protein, 37 aa, Artificial Sequence
  Non-cyclic GFR-binding peptide
  MOD_RES (1), (2), (36): Xaa is C or S
  MOD_RES (16), (17), (18), (19), (20): Xaa is A or G
  MOD_RES (21), (22), (23), (24): Xaa is A or G or is absent
XXTPTKMSNITMQIMXXXXXXXXXIGEMSGMVVDRXG

SEQ ID NO: 36369 - protein, 32 aa, Artificial Sequence
  Non-cyclic GFR-binding peptide
  MOD_RES (1), (1): Xaa is C or S
XTPTKMSNITMQIMNDKQQIIIGEMSGMVVDR

SEQ ID NO: 36370 - protein, 36 aa, Artificial Sequence
  Non-cyclic GFR-binding peptide
  MOD_RES (2), (3): Xaa is C or S
  MOD_RES (17), (18), (19), (20), (21): Xaa is A or G
  MOD_RES (22), (23), (24), (25): Xaa is A or G or is absent
SXXVPARLSNITIQIMXXXXXXXXXIGEMSDMVVEA

SEQ ID NO: 36371 - protein, 34 aa, Artificial Sequence
  Non-cyclic GFR-binding peptide
  MOD_RES (1), (2): Xaa is C or S
  MOD_RES (16), (17), (18), (19), (20): Xaa is A or G
  MOD_RES (21), (22), (23), (24): Xaa is A or G or is absent
XXVSQDLSNITIQIMXXXXXXXXXLGEMSMIVKS

SEQ ID NO: 36372 - protein, 32 aa, Artificial Sequence
  Non-cyclic GFR-binding peptide
  MOD_RES (31), (31): Xaa is C or S
VSQDLSNITIQIMIGKTPKILGEMSMIVKSXK

SEQ ID NO: 36373 - protein, 37 aa, Artificial Sequence
  Non-cyclic GFR-binding peptide
  MOD_RES (34), (36): Xaa is C or S
  MOD_RES (14), (15), (16), (17), (18): Xaa is A or G
  MOD_RES (19), (20), (21), (22): Xaa is A or G or is absent
TPTKMSNITMQIMXXXXXXXXXIGEMSGMVVDRXGXS

SEQ ID NO: 36374 - protein, 36 aa, Artificial Sequence
  Non-cyclic GFR-binding peptide
  MOD_RES (34), (36): Xaa is C or S
  MOD_RES (14), (15), (16), (17), (18): Xaa is A or G
  MOD_RES (19), (20), (21), (22): Xaa is A or G or is absent
APTKLSNITVQIMXXXXXXXXXLGEMSNMVVRSXGX

SEQ ID NO: 36375 - protein, 35 aa, Artificial Sequence
  Non-cyclic GFR-binding peptide
  MOD_RES (2), (3), (34): Xaa is C or S
TXXAPVKTSNITMQIMDNGRVLLIGEMSMIVEEXG

SEQ ID NO: 36376 - protein, 33 aa, Artificial Sequence
  Non-cyclic GFR-binding peptide
  MOD_RES (2), (3): Xaa is C or S
TXXAPVKTSNITMQIMDNGRVLLIGEMSMIVEE

SEQ ID NO: 36377 - protein, 38 aa, Artificial Sequence
  Non-cyclic GFR-binding peptide
  MOD_RES (4), (5): Xaa is C or S
  MOD_RES (19), (20), (21), (22), (23): Xaa is A or G
  MOD_RES (24), (25), (26), (27): Xaa is A or G or is absent
AGPXXTPTKMSNITMQIMXXXXXXXXXIGEMSGMVVDR

SEQ ID NO: 36378 - protein, 37 aa, Artificial Sequence
  Non-cyclic GFR-binding peptide
  MOD_RES (4), (5), (37): Xaa is C or S
AGPXXTPTKMSNITMQIMNDKQQIILGEMSGMVVDRX

SEQ ID NO: 36379 - protein, 34 aa, Artificial Sequence
  Non-cyclic GFR-binding peptide
  MOD_RES (1), (33): Xaa is C or S
XVPTRLSNITIQIMDSANNVVIGEMSDMVVESXG

SEQ ID NO: 36380 - protein, 36 aa, Artificial Sequence
  Non-cyclic GFR-binding peptide
  MOD_RES (34), (36): Xaa is C or S
  MOD_RES (14), (15), (16), (17), (18): Xaa is A or G
  MOD_RES (19), (20), (21), (22): Xaa is A or G or is absent
VPARLSNITIQIMXXXXXXXXXLGEMSDMVVEAXGX

SEQ ID NO: 36381 - protein, 37 aa, Artificial Sequence
  Non-cyclic GFR-binding peptide
  MOD_RES (3), (4), (36): Xaa is C or S
PTXXVPTRLSNITIQIMDSANNVVIGEMSDMVVESXG

SEQ ID NO: 36382 - protein, 42 aa, Artificial Sequence
  Non-cyclic GFR-binding peptide
  MOD_RES (6), (7), (41): Xaa is C or S
  MOD_RES (21), (22), (23), (24), (25): Xaa is A or G
  MOD_RES (26), (27), (28), (29): Xaa is A or G or is absent
STPPTXXVPTRLSNITIQIMXXXXXXXXXLGEMSDMVVESXG

SEQ ID NO: 36383 - protein, 33 aa, Artificial Sequence
  Non-cyclic GFR-binding peptide
  MOD_RES (1), (32): Xaa is C or S
XVPQALSNITIQIMVGRKPKVLGEMSMIVRSXK

SEQ ID NO: 36384 - protein, 35 aa, Artificial Sequence
  Non-cyclic GFR-binding peptide
  MOD_RES (2), (3), (35): Xaa is C or S
PXXTPTKMSNITMQIMNDKQQIILGEMSGMVVDRX

SEQ ID NO: 36385 - protein, 36 aa, Artificial Sequence
  Non-cyclic GFR-binding peptide
  MOD_RES (1), (34), (36): Xaa is C or S
  MOD_RES (15), (16), (17), (18), (19): Xaa is A or G
  MOD_RES (20), (21), (22), (23): Xaa is A or G or is absent
XVPQDLSNITIQIMXXXXXXXXXLGEMSMVVKSXKX

SEQ ID NO: 36386 - protein, 34 aa, Artificial Sequence
  Non-cyclic GFR-binding peptide
  MOD_RES (2), (3), (34): Xaa is C or S
TXXAPVKTSNITMQIMDNGRVLLIGEMSMIVEEX

SEQ ID NO: 36387 - protein, 33 aa, Artificial Sequence
  Non-cyclic GFR-binding peptide
  MOD_RES (1), (2): Xaa is C or S
XXTPTKMSNITMQIMNDKQQIILGEMSGMVVDR

SEQ ID NO: 36388 - protein, 39 aa, Artificial Sequence
  Non-cyclic GFR-binding peptide
  MOD_RES (3), (4), (36), (38): Xaa is C or S
PTXXVPTRLSNITIQIMDSANNVVIGEMSDMVVESXGXR

SEQ ID NO: 36389 - protein, 40 aa, Artificial Sequence
  Non-cyclic GFR-binding peptide
  MOD_RES (2), (3), (37), (39): Xaa is C or S
  MOD_RES (17), (18), (19), (20), (21): Xaa is A or G
  MOD_RES (22), (23), (24), (25): Xaa is A or G or is absent
TXXVPTRLSNITIQIMXXXXXXXXXLGEMSDMVVESXGXR

SEQ ID NO: 36390 - protein, 36 aa, Artificial Sequence
  Non-cyclic GFR-binding peptide
  MOD_RES (4), (5): Xaa is C or S
AGPXXTPTKMSNITMQIMNDKQQIILGEMSGMVVDR

SEQ ID NO: 36391 - protein, 37 aa, Artificial Sequence
  Non-cyclic GFR-binding peptide
  MOD_RES (1), (2), (34), (36): Xaa is C or S
XXTPTKMSNITMQIMNDKQQIIIGEMSGMVVDRXGXS

SEQ ID NO: 36392 - protein, 38 aa, Artificial Sequence
  Non-cyclic GFR-binding peptide
  MOD_RES (5), (6), (37): Xaa is C or S
SASPXXVPQDLSNITIQIMVGRTPKVLGEMSMVVKSXK

SEQ ID NO: 36393 - protein, 33 aa, Artificial Sequence
  Non-cyclic GFR-binding peptide
  MOD_RES (14), (15), (16), (17), (18): Xaa is A or G
  MOD_RES (19), (20), (21), (22): Xaa is A or G or is absent
TPTKMSNITMQIMXXXXXXXXXLGEMSGMVVDR

SEQ ID NO: 36394 - protein, 40 aa, Artificial Sequence
  Non-cyclic GFR-binding peptide
  MOD_RES (6), (7), (40): Xaa is C or S
  MOD_RES (21), (22), (23), (24), (25): Xaa is A or G
  MOD_RES (26), (27), (28), (29): Xaa is A or G or is absent
ASAAPXXVPQALSNITIQIMXXXXXXXXXLGEMSMIVRSX

SEQ ID NO: 36395 - protein, 40 aa, Artificial Sequence
  Non-cyclic GFR-binding peptide
  MOD_RES (4), (5), (38), (40): Xaa is C or S
  MOD_RES (19), (20), (21), (22), (23): Xaa is A or G
  MOD_RES (24), (25), (26), (27): Xaa is A or G or is absent
AAPXXVPQALSNITIQIMXXXXXXXXXLGEMSMIVRSXKX

SEQ ID NO: 36396 - protein, 41 aa, Artificial Sequence
  Non-cyclic GFR-binding peptide
  MOD_RES (5), (6), (38), (40): Xaa is C or S
VPKPXXAPTKLSNITVQIMDDSSNVILGEMSNMVVRSXGXH

SEQ ID NO: 36397 - protein, 33 aa, Artificial Sequence
  Non-cyclic GFR-binding peptide
  MOD_RES (1), (33): Xaa is C or S
XVPTRLSNITIQIMDSANNVVIGEMSDMVVESX

SEQ ID NO: 36398 - protein, 39 aa, Artificial Sequence
  Non-cyclic GFR-binding peptide
  MOD_RES (4), (5), (36), (38): Xaa is C or S
PSTXXAPVKTSNITMQIMDNGRVLLLGEMSMIVEEXGXL

SEQ ID NO: 36399 - protein, 35 aa, Artificial Sequence
  Non-cyclic GFR-binding peptide
  MOD_RES (2), (3), (35): Xaa is C or S
PXXAPTKLSNITVQIMDDSSNVILGEMSNMVVRSX

SEQ ID NO: 36400 - protein, 39 aa, Artificial Sequence
  Non-cyclic GFR-binding peptide
  MOD_RES (3), (4), (37), (39): Xaa is C or S
  MOD_RES (18), (19), (20), (21), (22): Xaa is A or G
  MOD_RES (23), (24), (25), (26): Xaa is A or G or is absent
STXXAPVKTSNITMQIMXXXXXXXXXLGEMSMIVEEXGX

SEQ ID NO: 36401 - protein, 39 aa, Artificial Sequence
  Non-cyclic GFR-binding peptide
  MOD_RES (4), (5), (39): Xaa is C or S
  MOD_RES (19), (20), (21), (22), (23): Xaa is A or G
  MOD_RES (24), (25), (26), (27): Xaa is A or G or is absent
PASXXVPARLSNITIQIMXXXXXXXXXIGEMSDMVVEAX

SEQ ID NO: 36402 - protein, 37 aa, Artificial Sequence
  Non-cyclic GFR-binding peptide
  MOD_RES (1), (2), (34), (36): Xaa is C or S
XXVPTRLSNITIQIMDSANNVVLGEMSDMVVESXGXR

SEQ ID NO: 36403 - protein, 37 aa, Artificial Sequence
  Non-cyclic GFR-binding peptide
  MOD_RES (1), (2), (35), (37): Xaa is C or S
  MOD_RES (16), (17), (18), (19), (20): Xaa is A or G
  MOD_RES (21), (22), (23), (24): Xaa is A or G or is absent
XXVPQDLSNITIQIMXXXXXXXXXLGEMSMVVKSXKX

SEQ ID NO: 36404 - protein, 39 aa, Artificial Sequence
  Non-cyclic GFR-binding peptide
  MOD_RES (4), (5), (39): Xaa is C or S
  MOD_RES (19), (20), (21), (22), (23): Xaa is A or G
  MOD_RES (24), (25), (26), (27): Xaa is A or G or is absent
PPTXXVPTRLSNITIQIMXXXXXXXXXLGEMSDMVVESX

SEQ ID NO: 36405 - protein, 37 aa, Artificial Sequence
  Non-cyclic GFR-binding peptide
  MOD_RES (34), (36): Xaa is C or S
  MOD_RES (14), (15), (16), (17), (18): Xaa is A or G
  MOD_RES (19), (20), (21), (22): Xaa is A or G or is absent
VPARLSNITIQIMXXXXXXXXXLGEMSDMVVEAXGXR

SEQ ID NO: 36406 - protein, 40 aa, Artificial Sequence
  Non-cyclic GFR-binding peptide
  MOD_RES (3), (4), (38), (40): Xaa is C or S
  MOD_RES (18), (19), (20), (21), (22): Xaa is A or G
  MOD_RES (23), (24), (25), (26): Xaa is A or G or is absent
PTXXVPTRLSNITIQIMXXXXXXXXXLGEMSDMVVESXGX

SEQ ID NO: 36407 - protein, 40 aa, Artificial Sequence
  Non-cyclic GFR-binding peptide
  MOD_RES (2), (3), (37), (39): Xaa is C or S
  MOD_RES (17), (18), (19), (20), (21): Xaa is A or G
  MOD_RES (22), (23), (24), (25): Xaa is A or G or is absent
PXXTPTKMSNITMQIMXXXXXXXXXLGEMSGMVVDRXGXS

SEQ ID NO: 36408 - protein, 36 aa, Artificial Sequence
  Non-cyclic GFR-binding peptide
  MOD_RES (5), (6): Xaa is C or S
VPKPXXAPTKLSNITVQIMDDSSNVILGEMSNMVVR

SEQ ID NO: 36409 - protein, 39 aa, Artificial Sequence
  Non-cyclic GFR-binding peptide
  MOD_RES (3), (4), (38): Xaa is C or S
  MOD_RES (18), (19), (20), (21), (22): Xaa is A or G
  MOD_RES (23), (24), (25), (26): Xaa is A or G or is absent
KPXXAPTKLSNITVQIMXXXXXXXXXLGEMSNMVVRSXG

SEQ ID NO: 36410 - protein, 38 aa, Artificial Sequence
  Non-cyclic GFR-binding peptide
  MOD_RES (6), (7): Xaa is C or S
AAPASXXVPARLSNITIQIMDAANNVVIGEMSDMVVEA

SEQ ID NO: 36411 - protein, 36 aa, Artificial Sequence
  Non-cyclic GFR-binding peptide
  MOD_RES (5), (6): Xaa is C or S
APASXXVPARLSNITIQIMDAANNVVIGEMSDMVVE

SEQ ID NO: 36412 - protein, 33 aa, Artificial Sequence
  Non-cyclic GFR-binding peptide
  MOD_RES (1), (2): Xaa is C or S
XXAPTKLSNITVQIMDDSSNVILGEMSNMVVRS

SEQ ID NO: 36413 - protein, 40 aa, Artificial Sequence
  Non-cyclic GFR-binding peptide
  MOD_RES (6), (7), (38), (40): Xaa is C or S
ASAAPXXVPQALSNITIQIMVGRKPKVLGEMSMIVRSXKX

SEQ ID NO: 36414 - protein, 35 aa, Artificial Sequence
  Non-cyclic GFR-binding peptide
  MOD_RES (32), (34): Xaa is C or S
VPTRLSNITIQIMDSANNVVLGEMSDMVVESXGXR

SEQ ID NO: 36415 - protein, 33 aa, Artificial Sequence
  Non-cyclic GFR-binding peptide
  MOD_RES (2), (3): Xaa is C or S
PXXTPTKMSNITMQIMNDKQQIILGEMSGMVVD

SEQ ID NO: 36416 - protein, 37 aa, Artificial Sequence
  Non-cyclic GFR-binding peptide
  MOD_RES (3), (4): Xaa is C or S
  MOD_RES (18), (19), (20), (21), (22): Xaa is A or G
  MOD_RES (23), (24), (25), (26): Xaa is A or G or is absent
ASXXVPARLSNITIQIMXXXXXXXXXIGEMSDMVVEA

SEQ ID NO: 36417 - protein, 36 aa, Artificial Sequence
  Non-cyclic GFR-binding peptide
  MOD_RES (3), (4): Xaa is C or S
  MOD_RES (18), (19), (20), (21), (22): Xaa is A or G
  MOD_RES (23), (24), (25), (26): Xaa is A or G or is absent
ASXXVPARLSNITIQIMXXXXXXXXXIGEMSDMVVE

SEQ ID NO: 36418 - protein, 39 aa, Artificial Sequence
  Non-cyclic GFR-binding peptide
  MOD_RES (4), (5), (37), (39): Xaa is C or S
PASXXVPARLSNITIQIMDAANNVVLGEMSDMVVEAXGX

SEQ ID NO: 36419 - protein, 34 aa, Artificial Sequence
  Non-cyclic GFR-binding peptide
  MOD_RES (3), (4): Xaa is C or S
GPXXTPTKMSNITMQIMNDKQQIIIGEMSGMVVD

SEQ ID NO: 36420 - protein, 36 aa, Artificial Sequence
  Non-cyclic GFR-binding peptide
  MOD_RES (2), (3): Xaa is C or S
  MOD_RES (17), (18), (19), (20), (21): Xaa is A or G
  MOD_RES (22), (23), (24), (25): Xaa is A or G or is absent
PXXAPTKLSNITVQIMXXXXXXXXXLGEMSNMVVRS

SEQ ID NO: 36421 - protein, 40 aa, Artificial Sequence
  Non-cyclic GFR-binding peptide
  MOD_RES (4), (5), (38), (40): Xaa is C or S
  MOD_RES (19), (20), (21), (22), (23): Xaa is A or G
  MOD_RES (24), (25), (26), (27): Xaa is A or G or is absent
ASPXXVSQDLSNITIQIMXXXXXXXXXLGEMSMIVKSXKX

SEQ ID NO: 36422 - protein, 40 aa, Artificial Sequence
  Non-cyclic GFR-binding peptide
  MOD_RES (6), (7), (40): Xaa is C or S
  MOD_RES (21), (22), (23), (24), (25): Xaa is A or G
  MOD_RES (26), (27), (28), (29): Xaa is A or G or is absent
RVPSTXXAPVKTSNITMQIMXXXXXXXXXLGEMSMIVEEX

SEQ ID NO: 36423 - protein, 39 aa, Artificial Sequence
  Non-cyclic GFR-binding peptide
  MOD_RES (5), (6): Xaa is C or S
  MOD_RES (20), (21), (22), (23), (24): Xaa is A or G
  MOD_RES (25), (26), (27), (28): Xaa is A or G or is absent
SAGPXXTPTKMSNITMQIMXXXXXXXXXLGEMSGMVVDR

SEQ ID NO: 36424 - protein, 32 aa, Artificial Sequence
  Non-cyclic GFR-binding peptide
  MOD_RES (1), (2): Xaa is C or S
XXTPTKMSNITMQIMNDKQQIIIGEMSGMVVD

SEQ ID NO: 36425 - protein, 34 aa, Artificial Sequence
  Non-cyclic GFR-binding peptide
  MOD_RES (1), (2), (33): Xaa is C or S
XXVPQALSNITIQIMVGRKPKVLGEMSMIVRSXK

SEQ ID NO: 36426 - protein, 36 aa, Artificial Sequence
  Non-cyclic GFR-binding peptide
  MOD_RES (1), (2), (34), (36): Xaa is C or S
XXTPTKMSNITMQIMNDKQQIIIGEMSGMVVDRXGX

SEQ ID NO: 36427 - protein, 31 aa, Artificial Sequence
  Non-cyclic GFR-binding peptide
  MOD_RES (1), (1): Xaa is C or S
XTPTKMSNITMQIMNDKQQIIIGEMSGMVVD

SEQ ID NO: 36428 - protein, 35 aa, Artificial Sequence
  Non-cyclic GFR-binding peptide
  MOD_RES (1), (32), (34): Xaa is C or S
XVPQDLSNITIQIMVGRTPKVLGEMSMVVKSXKXS

SEQ ID NO: 36429 - protein, 36 aa, Artificial Sequence
  Non-cyclic GFR-binding peptide
  MOD_RES (1), (2), (36): Xaa is C or S
  MOD_RES (16), (17), (18), (19), (20): Xaa is A or G
  MOD_RES (21), (22), (23), (24): Xaa is A or G or is absent
XXTPTKMSNITMQIMXXXXXXXXXIGEMSGMVVDRX

SEQ ID NO: 36430 - protein, 41 aa, Artificial Sequence
  Non-cyclic GFR-binding peptide
  MOD_RES (6), (7), (39), (41): Xaa is C or S
HVPKPXXAPTKLSNITVQIMDDSSNVIIGEMSNMVVRSXGX

SEQ ID NO: 36431 - protein, 36 aa, Artificial Sequence
  Non-cyclic GFR-binding peptide
  MOD_RES (33), (35): Xaa is C or S
  MOD_RES (14), (15), (16), (17), (18): Xaa is A or G
  MOD_RES (19), (20), (21), (22): Xaa is A or G or is absent
VPQDLSNITIQIMXXXXXXXXXLGEMSMVVKSXKXS

SEQ ID NO: 36432 - protein, 36 aa, Artificial Sequence
  Non-cyclic GFR-binding peptide
  MOD_RES (1), (33), (35): Xaa is C or S
XTPTKMSNITMQIMNDKQQIILGEMSGMVVDRXGXS

SEQ ID NO: 36433 - protein, 36 aa, Artificial Sequence
  Non-cyclic GFR-binding peptide
  MOD_RES (1), (2), (34), (36): Xaa is C or S
XXTPTKMSNITMQIMNDKQQIILGEMSGMVVDRXGX

SEQ ID NO: 36434 - protein, 36 aa, Artificial Sequence
  Non-cyclic GFR-binding peptide
  MOD_RES (3), (4), (35): Xaa is C or S
APXXVPQALSNITIQIMVGRKPKVLGEMSMIVRSXK

SEQ ID NO: 36435 - protein, 38 aa, Artificial Sequence
  Non-cyclic GFR-binding peptide
  MOD_RES (5), (6): Xaa is C or S
  MOD_RES (20), (21), (22), (23), (24): Xaa is A or G
  MOD_RES (25), (26), (27), (28): Xaa is A or G or is absent
APASXXVPARLSNITIQIMXXXXXXXXXLGEMSDMVVE

SEQ ID NO: 36436 - protein, 36 aa, Artificial Sequence
  Non-cyclic GFR-binding peptide
  MOD_RES (34), (36): Xaa is C or S
  MOD_RES (14), (15), (16), (17), (18): Xaa is A or G
  MOD_RES (19), (20), (21), (22): Xaa is A or G or is absent
TPTKMSNITMQIMXXXXXXXXXIGEMSGMVVDRXGX

SEQ ID NO: 36437 - protein, 35 aa, Artificial Sequence
  Non-cyclic GFR-binding peptide
  MOD_RES (1), (33), (35): Xaa is C or S
XVPTRLSNITIQIMDSANNVVLGEMSDMVVESXGX

SEQ ID NO: 36438 - protein, 35 aa, Artificial Sequence
  Non-cyclic GFR-binding peptide
  MOD_RES (1), (2), (35): Xaa is C or S
  MOD_RES (16), (17), (18), (19), (20): Xaa is A or G
  MOD_RES (21), (22), (23), (24): Xaa is A or G or is absent
XXVSQDLSNITIQIMXXXXXXXXXLGEMSMIVKSX

SEQ ID NO: 36439 - protein, 36 aa, Artificial Sequence
  Non-cyclic GFR-binding peptide
  MOD_RES (2), (3), (34), (36): Xaa is C or S
PXXVSQDLSNITIQIMIGKTPKILGEMSMIVKSXKX

SEQ ID NO: 36440 - protein, 38 aa, Artificial Sequence
  Non-cyclic GFR-binding peptide
  MOD_RES (4), (5), (37): Xaa is C or S
PASXXVPARLSNITIQIMDAANNVVLGEMSDMVVEAXG

SEQ ID NO: 36441 - protein, 33 aa, Artificial Sequence
  Non-cyclic GFR-binding peptide
  MOD_RES (31), (33): Xaa is C or S
APVKTSNITMQIMDNGRVLLLGEMSMIVEEXGX

SEQ ID NO: 36442 - protein, 36 aa, Artificial Sequence
  Non-cyclic GFR-binding peptide
  MOD_RES (5), (6): Xaa is C or S
SASPXXVPQDLSNITIQIMVGRTPKVLGEMSMVVKS

SEQ ID NO: 36443 - protein, 32 aa, Artificial Sequence
  Non-cyclic GFR-binding peptide
  MOD_RES (14), (15), (16), (17), (18): Xaa is A or G
  MOD_RES (19), (20), (21), (22): Xaa is A or G or is absent
TPTKMSNITMQIMXXXXXXXXXIGEMSGMVVD

SEQ ID NO: 36444 - protein, 40 aa, Artificial Sequence
  Non-cyclic GFR-binding peptide
  MOD_RES (5), (6), (40): Xaa is C or S
  MOD_RES (20), (21), (22), (23), (24): Xaa is A or G
  MOD_RES (25), (26), (27), (28): Xaa is A or G or is absent
APASXXVPARLSNITIQIMXXXXXXXXXLGEMSDMVVEAX

SEQ ID NO: 36445 - protein, 34 aa, Artificial Sequence
  Non-cyclic GFR-binding peptide
  MOD_RES (1), (2): Xaa is C or S
  MOD_RES (16), (17), (18), (19), (20): Xaa is A or G
  MOD_RES (21), (22), (23), (24): Xaa is A or G or is absent
XXAPVKTSNITMQIMXXXXXXXXXIGEMSMIVEE

SEQ ID NO: 36446 - protein, 40 aa, Artificial Sequence
  Non-cyclic GFR-binding peptide
  MOD_RES (5), (6), (40): Xaa is C or S
  MOD_RES (20), (21), (22), (23), (24): Xaa is A or G
  MOD_RES (25), (26), (27), (28): Xaa is A or G or is absent
APASXXVPARLSNITIQIMXXXXXXXXXIGEMSDMVVEAX

SEQ ID NO: 36447 - protein, 39 aa, Artificial Sequence
  Non-cyclic GFR-binding peptide
  MOD_RES (6), (7): Xaa is C or S
  MOD_RES (21), (22), (23), (24), (25): Xaa is A or G
  MOD_RES (26), (27), (28), (29): Xaa is A or G or is absent
GSAGPXXTPTKMSNITMQIMXXXXXXXXXIGEMSGMVVD

SEQ ID NO: 36448 - protein, 42 aa, Artificial Sequence
  Non-cyclic GFR-binding peptide
  MOD_RES (6), (7), (41): Xaa is C or S
  MOD_RES (21), (22), (23), (24), (25): Xaa is A or G
  MOD_RES (26), (27), (28), (29): Xaa is A or G or is absent
HVPKPXXAPTKLSNITVQIMXXXXXXXXXLGEMSNMVVRSXG

SEQ ID NO: 36449 - protein, 35 aa, Artificial Sequence
  Non-cyclic GFR-binding peptide
  MOD_RES (4), (5): Xaa is C or S
PKPXXAPTKLSNITVQIMDDSSNVILGEMSNMVVR

SEQ ID NO: 36450 - protein, 40 aa, Artificial Sequence
  Non-cyclic GFR-binding peptide
  MOD_RES (6), (7), (39): Xaa is C or S
STPPTXXVPTRLSNITIQIMDSANNVVLGEMSDMVVESXG

SEQ ID NO: 36451 - protein, 42 aa, Artificial Sequence
  Non-cyclic GFR-binding peptide
  MOD_RES (4), (5), (39), (41): Xaa is C or S
  MOD_RES (19), (20), (21), (22), (23): Xaa is A or G
  MOD_RES (24), (25), (26), (27): Xaa is A or G or is absent
AGPXXTPTKMSNITMQIMXXXXXXXXXLGEMSGMVVDRXGXS

SEQ ID NO: 36452 - protein, 34 aa, Artificial Sequence
  Non-cyclic GFR-binding peptide
  MOD_RES (1), (1): Xaa is C or S
  MOD_RES (15), (16), (17), (18), (19): Xaa is A or G
  MOD_RES (20), (21), (22), (23): Xaa is A or G or is absent
XAPTKLSNITVQIMXXXXXXXXXLGEMSNMVVRS

SEQ ID NO: 36453 - protein, 39 aa, Artificial Sequence
  Non-cyclic GFR-binding peptide
  MOD_RES (6), (7), (38): Xaa is C or S
RVPSTXXAPVKTSNITMQIMDNGRVLLLGEMSMIVEEXG

SEQ ID NO: 36454 - protein, 37 aa, Artificial Sequence
  Non-cyclic GFR-binding peptide
  MOD_RES (6), (7): Xaa is C or S
ASAAPXXVPQALSNITIQIMVGRKPKVLGEMSMIVRS

SEQ ID NO: 36455 - protein, 35 aa, Artificial Sequence
  Non-cyclic GFR-binding peptide
  MOD_RES (2), (3): Xaa is C or S
  MOD_RES (17), (18), (19), (20), (21): Xaa is A or G
  MOD_RES (22), (23), (24), (25): Xaa is A or G or is absent
PXXVPQDLSNITIQIMXXXXXXXXXLGEMSMVVKS

SEQ ID NO: 36456 - protein, 36 aa, Artificial Sequence
  Non-cyclic GFR-binding peptide
  MOD_RES (1), (2), (34), (36): Xaa is C or S
XXVPTRLSNITIQIMDSANNVVIGEMSDMVVESXGX

SEQ ID NO: 36457 - protein, 34 aa, Artificial Sequence
  Non-cyclic GFR-binding peptide
  MOD_RES (3), (4): Xaa is C or S
PTXXVPTRLSNITIQIMDSANNVVIGEMSDMVVE

SEQ ID NO: 36458 - protein, 42 aa, Artificial Sequence
  Non-cyclic GFR-binding peptide
  MOD_RES (6), (7), (39), (41): Xaa is C or S
AAPASXXVPARLSNITIQIMDAANNVVIGEMSDMVVEAXGXR

SEQ ID NO: 36459 - protein, 39 aa, Artificial Sequence
  Non-cyclic GFR-binding peptide
  MOD_RES (6), (7), (38): Xaa is C or S
RVPSTXXAPVKTSNITMQIMDNGRVLLIGEMSMIVEEXG

SEQ ID NO: 36460 - protein, 39 aa, Artificial Sequence
  Non-cyclic GFR-binding peptide
  MOD_RES (6), (7): Xaa is C or S
  MOD_RES (21), (22), (23), (24), (25): Xaa is A or G
  MOD_RES (26), (27), (28), (29): Xaa is A or G or is absent
ASASPXXVPQDLSNITIQIMXXXXXXXXXLGEMSMVVKS

SEQ ID NO: 36461 - protein, 37 aa, Artificial Sequence
  Non-cyclic GFR-binding peptide
  MOD_RES (5), (6): Xaa is C or S
TPPTXXVPTRLSNITIQIMDSANNVVIGEMSDMVVES

SEQ ID NO: 36462 - protein, 37 aa, Artificial Sequence
  Non-cyclic GFR-binding peptide
  MOD_RES (1), (34), (36): Xaa is C or S
  MOD_RES (15), (16), (17), (18), (19): Xaa is A or G
  MOD_RES (20), (21), (22), (23): Xaa is A or G or is absent
XAPVKTSNITMQIMXXXXXXXXXLGEMSMIVEEXGXL

SEQ ID NO: 36463 - protein, 36 aa, Artificial Sequence
  Non-cyclic GFR-binding peptide
  MOD_RES (2), (3), (35): Xaa is C or S
SXXVPARLSNITIQIMDAANNVVLGEMSDMVVEAXG

SEQ ID NO: 36464 - protein, 35 aa, Artificial Sequence
  Non-cyclic GFR-binding peptide
  MOD_RES (1), (35): Xaa is C or S
  MOD_RES (15), (16), (17), (18), (19): Xaa is A or G
  MOD_RES (20), (21), (22), (23): Xaa is A or G or is absent
XAPTKLSNITVQIMXXXXXXXXXLGEMSNMVVRSX

SEQ ID NO: 36465 - protein, 38 aa, Artificial Sequence
  Non-cyclic GFR-binding peptide
  MOD_RES (4), (5), (38): Xaa is C or S
  MOD_RES (19), (20), (21), (22), (23): Xaa is A or G
  MOD_RES (24), (25), (26), (27): Xaa is A or G or is absent
PSTXXAPVKTSNITMQIMXXXXXXXXXIGEMSMIVEEX

SEQ ID NO: 36466 - protein, 42 aa, Artificial Sequence
  Non-cyclic GFR-binding peptide
  MOD_RES (4), (5), (39), (41): Xaa is C or S
  MOD_RES (19), (20), (21), (22), (23): Xaa is A or G
  MOD_RES (24), (25), (26), (27): Xaa is A or G or is absent
AGPXXTPTKMSNITMQIMXXXXXXXXXIGEMSGMVVDRXGXS

SEQ ID NO: 36467 - protein, 31 aa, Artificial Sequence
  Non-cyclic GFR-binding peptide
  MOD_RES (1), (1): Xaa is C or S
XAPTKLSNITVQIMDDSSNVILGEMSNMVVR

SEQ ID NO: 36468 - protein, 38 aa, Artificial Sequence
  Non-cyclic GFR-binding peptide
  MOD_RES (5), (6): Xaa is C or S
  MOD_RES (20), (21), (22), (23), (24): Xaa is A or G
  MOD_RES (25), (26), (27), (28): Xaa is A or G or is absent
VPSTXXAPVKTSNITMQIMXXXXXXXXXIGEMSMIVEE

SEQ ID NO: 36469 - protein, 39 aa, Artificial Sequence
  Non-cyclic GFR-binding peptide
  MOD_RES (6), (7): Xaa is C or S
  MOD_RES (21), (22), (23), (24), (25): Xaa is A or G
  MOD_RES (26), (27), (28), (29): Xaa is A or G or is absent
AAPASXXVPARLSNITIQIMXXXXXXXXXIGEMSDMVVE

SEQ ID NO: 36470 - protein, 35 aa, Artificial Sequence
  Non-cyclic GFR-binding peptide
  MOD_RES (34), (34): Xaa is C or S
  MOD_RES (14), (15), (16), (17), (18): Xaa is A or G
  MOD_RES (19), (20), (21), (22): Xaa is A or G or is absent
TPTKMSNITMQIMXXXXXXXXXIGEMSGMVVDRXG

SEQ ID NO: 36471 - protein, 42 aa, Artificial Sequence
  Non-cyclic GFR-binding peptide
  MOD_RES (6), (7), (40), (42): Xaa is C or S
  MOD_RES (21), (22), (23), (24), (25): Xaa is A or G
  MOD_RES (26), (27), (28), (29): Xaa is A or G or is absent
ASASPXXVSQDLSNITIQIMXXXXXXXXXLGEMSMIVKSXKX

SEQ ID NO: 36472 - protein, 36 aa, Artificial Sequence
  Non-cyclic GFR-binding peptide
  MOD_RES (5), (6): Xaa is C or S
TPPTXXVPTRLSNITIQIMDSANNVVLGEMSDMVVE

SEQ ID NO: 36473 - protein, 32 aa, Artificial Sequence
  Non-cyclic GFR-binding peptide
  MOD_RES (1), (1): Xaa is C or S
XTPTKMSNITMQIMNDKQQIILGEMSGMVVDR

SEQ ID NO: 36474 - protein, 34 aa, Artificial Sequence
  Non-cyclic GFR-binding peptide
  MOD_RES (32), (34): Xaa is C or S
TPTKMSNITMQIMNDKQQIILGEMSGMVVDRXGX

SEQ ID NO: 36475 - protein, 41 aa, Artificial Sequence
  Non-cyclic GFR-binding peptide
  MOD_RES (6), (7), (40): Xaa is C or S
  MOD_RES (21), (22), (23), (24), (25): Xaa is A or G
  MOD_RES (26), (27), (28), (29): Xaa is A or G or is absent
ASAAPXXVPQALSNITIQIMXXXXXXXXXLGEMSMIVRSXK

SEQ ID NO: 36476 - protein, 42 aa, Artificial Sequence
  Non-cyclic GFR-binding peptide
  MOD_RES (5), (6), (40), (42): Xaa is C or S
  MOD_RES (20), (21), (22), (23), (24): Xaa is A or G
  MOD_RES (25), (26), (27), (28): Xaa is A or G or is absent
APASXXVPARLSNITIQIMXXXXXXXXXLGEMSDMVVEAXGX

SEQ ID NO: 36477 - protein, 37 aa, Artificial Sequence
  Non-cyclic GFR-binding peptide
  MOD_RES (2), (3), (35), (37): Xaa is C or S
TXXVPTRLSNITIQIMDSANNVVIGEMSDMVVESXGX

SEQ ID NO: 36478 - protein, 38 aa, Artificial Sequence
  Non-cyclic GFR-binding peptide
  MOD_RES (5), (6), (38): Xaa is C or S
APASXXVPARLSNITIQIMDAANNVVLGEMSDMVVEAX

SEQ ID NO: 36479 - protein, 34 aa, Artificial Sequence
  Non-cyclic GFR-binding peptide
  MOD_RES (3), (4): Xaa is C or S
ASXXVPARLSNITIQIMDAANNVVIGEMSDMVVE

SEQ ID NO: 36480 - protein, 38 aa, Artificial Sequence
  Non-cyclic GFR-binding peptide
  MOD_RES (5), (6), (38): Xaa is C or S
TPPTXXVPTRLSNITIQIMDSANNVVLGEMSDMVVESX

SEQ ID NO: 36481 - protein, 36 aa, Artificial Sequence
  Non-cyclic GFR-binding peptide
  MOD_RES (1), (35): Xaa is C or S
  MOD_RES (15), (16), (17), (18), (19): Xaa is A or G
  MOD_RES (20), (21), (22), (23): Xaa is A or G or is absent
XVPARLSNITIQIMXXXXXXXXXIGEMSDMVVEAXG

SEQ ID NO: 36482 - protein, 40 aa, Artificial Sequence
  Non-cyclic GFR-binding peptide
  MOD_RES (3), (4), (37), (39): Xaa is C or S
  MOD_RES (18), (19), (20), (21), (22): Xaa is A or G
  MOD_RES (23), (24), (25), (26): Xaa is A or G or is absent
STXXAPVKTSNITMQIMXXXXXXXXXIGEMSMIVEEXGXL

SEQ ID NO: 36483 - protein, 41 aa, Artificial Sequence
  Non-cyclic GFR-binding peptide
  MOD_RES (6), (7), (40): Xaa is C or S
  MOD_RES (21), (22), (23), (24), (25): Xaa is A or G
  MOD_RES (26), (27), (28), (29): Xaa is A or G or is absent
ASASPXXVPQDLSNITIQIMXXXXXXXXXLGEMSMVVKSXK

SEQ ID NO: 36484 - protein, 39 aa, Artificial Sequence
  Non-cyclic GFR-binding peptide
  MOD_RES (4), (5), (36), (38): Xaa is C or S
ASPXXVSQDLSNITIQIMIGKTPKILGEMSMIVKSXKXS

SEQ ID NO: 36485 - protein, 40 aa, Artificial Sequence
  Non-cyclic GFR-binding peptide
  MOD_RES (6), (7), (40): Xaa is C or S
  MOD_RES (21), (22), (23), (24), (25): Xaa is A or G
  MOD_RES (26), (27), (28), (29): Xaa is A or G or is absent
RVPSTXXAPVKTSNITMQIMXXXXXXXXXIGEMSMIVEEX

SEQ ID NO: 36486 - protein, 36 aa, Artificial Sequence
  Non-cyclic GFR-binding peptide
  MOD_RES (1), (2), (35): Xaa is C or S
  MOD_RES (16), (17), (18), (19), (20): Xaa is A or G
  MOD_RES (21), (22), (23), (24): Xaa is A or G or is absent
XXVSQDLSNITIQIMXXXXXXXXXLGEMSMIVKSXK

SEQ ID NO: 36487 - protein, 30 aa, Artificial Sequence
  Non-cyclic GFR-binding peptide
APTKLSNITVQIMDDSSNVILGEMSNMVVR

SEQ ID NO: 36488 - protein, 37 aa, Artificial Sequence
  Non-cyclic GFR-binding peptide
  MOD_RES (4), (5), (37): Xaa is C or S
PPTXXVPTRLSNITIQIMDSANNVVIGEMSDMVVESX

SEQ ID NO: 36489 - protein, 37 aa, Artificial Sequence
  Non-cyclic GFR-binding peptide
  MOD_RES (4), (5): Xaa is C or S
  MOD_RES (19), (20), (21), (22), (23): Xaa is A or G
  MOD_RES (24), (25), (26), (27): Xaa is A or G or is absent
PSTXXAPVKTSNITMQIMXXXXXXXXXLGEMSMIVEE

SEQ ID NO: 36490 - protein, 41 aa, Artificial Sequence
  Non-cyclic GFR-binding peptide
  MOD_RES (6), (7), (38), (40): Xaa is C or S
ASASPXXVSQDLSNITIQIMIGKTPKILGEMSMIVKSXKXS

SEQ ID NO: 36491 - protein, 43 aa, Artificial Sequence
  Non-cyclic GFR-binding peptide
  MOD_RES (6), (7), (40), (42): Xaa is C or S
  MOD_RES (21), (22), (23), (24), (25): Xaa is A or G
  MOD_RES (26), (27), (28), (29): Xaa is A or G or is absent
RVPSTXXAPVKTSNITMQIMXXXXXXXXXLGEMSMIVEEXGXL

SEQ ID NO: 36492 - protein, 39 aa, Artificial Sequence
  Non-cyclic GFR-binding peptide
  MOD_RES (5), (6), (37), (39): Xaa is C or S
SAAPXXVPQALSNITIQIMVGRKPKVLGEMSMIVRSXKX

SEQ ID NO: 36493 - protein, 35 aa, Artificial Sequence
  Non-cyclic GFR-binding peptide
  MOD_RES (2), (3), (35): Xaa is C or S
TXXVPTRLSNITIQIMDSANNVVIGEMSDMVVESX

SEQ ID NO: 36494 - protein, 39 aa, Artificial Sequence
  Non-cyclic GFR-binding peptide
  MOD_RES (5), (6): Xaa is C or S
  MOD_RES (20), (21), (22), (23), (24): Xaa is A or G
  MOD_RES (25), (26), (27), (28): Xaa is A or G or is absent
APASXXVPARLSNITIQIMXXXXXXXXXIGEMSDMVVEA

SEQ ID NO: 36495 - protein, 40 aa, Artificial Sequence
  Non-cyclic GFR-binding peptide
  MOD_RES (5), (6), (37), (39): Xaa is C or S
SASPXXVSQDLSNITIQIMIGKTPKILGEMSMIVKSXKXS

SEQ ID NO: 36496 - protein, 43 aa, Artificial Sequence
  Non-cyclic GFR-binding peptide
  MOD_RES (5), (6), (40), (42): Xaa is C or S
  MOD_RES (20), (21), (22), (23), (24): Xaa is A or G
  MOD_RES (25), (26), (27), (28): Xaa is A or G or is absent
SAGPXXTPTKMSNITMQIMXXXXXXXXXIGEMSGMVVDRXGXS

SEQ ID NO: 36497 - protein, 36 aa, Artificial Sequence
  Non-cyclic GFR-binding peptide
  MOD_RES (33), (35): Xaa is C or S
  MOD_RES (14), (15), (16), (17), (18): Xaa is A or G
  MOD_RES (19), (20), (21), (22): Xaa is A or G or is absent
VSQDLSNITIQIMXXXXXXXXXLGEMSMIVKSXKXS

SEQ ID NO: 36498 - protein, 34 aa, Artificial Sequence
  Non-cyclic GFR-binding peptide
  MOD_RES (1), (33): Xaa is C or S
XAPTKLSNITVQIMDDSSNVILGEMSNMVVRSXG

SEQ ID NO: 36499 - protein, 36 aa, Artificial Sequence
  Non-cyclic GFR-binding peptide
  MOD_RES (2), (3), (34), (36): Xaa is C or S
PXXVPQALSNITIQIMVGRKPKVLGEMSMIVRSXKX

SEQ ID NO: 36500 - protein, 34 aa, Artificial Sequence
  Non-cyclic GFR-binding peptide
  MOD_RES (2), (3): Xaa is C or S
PXXTPTKMSNITMQIMNDKQQIIIGEMSGMVVDR

SEQ ID NO: 36501 - protein, 35 aa, Artificial Sequence
  Non-cyclic GFR-binding peptide
  MOD_RES (32), (34): Xaa is C or S
TPTKMSNITMQIMNDKQQIIIGEMSGMVVDRXGXS

SEQ ID NO: 36502 - protein, 35 aa, Artificial Sequence
  Non-cyclic GFR-binding peptide
  MOD_RES (32), (34): Xaa is C or S
TPTKMSNITMQIMNDKQQIILGEMSGMVVDRXGXS

SEQ ID NO: 36503 - protein, 34 aa, Artificial Sequence
  Non-cyclic GFR-binding peptide
  MOD_RES (1), (2), (34): Xaa is C or S
XXAPTKLSNITVQIMDDSSNVILGEMSNMVVRSX

SEQ ID NO: 36504 - protein, 39 aa, Artificial Sequence
  Non-cyclic GFR-binding peptide
  MOD_RES (5), (6), (39): Xaa is C or S
  MOD_RES (20), (21), (22), (23), (24): Xaa is A or G
  MOD_RES (25), (26), (27), (28): Xaa is A or G or is absent
SASPXXVSQDLSNITIQIMXXXXXXXXXLGEMSMIVKSX

SEQ ID NO: 36505 - protein, 31 aa, Artificial Sequence
  Non-cyclic GFR-binding peptide
  MOD_RES (1), (1): Xaa is C or S
XVSQDLSNITIQIMIGKTPKILGEMSMIVKS

SEQ ID NO: 36506 - protein, 35 aa, Artificial Sequence
  Non-cyclic GFR-binding peptide
  MOD_RES (2), (3), (35): Xaa is C or S
SXXVPARLSNITIQIMDAANNVVLGEMSDMVVEAX

SEQ ID NO: 36507 - protein, 38 aa, Artificial Sequence
  Non-cyclic GFR-binding peptide
  MOD_RES (3), (4), (36), (38): Xaa is C or S
GPXXTPTKMSNITMQIMNDKQQIIIGEMSGMVVDRXGX

SEQ ID NO: 36508 - protein, 34 aa, Artificial Sequence
  Non-cyclic GFR-binding peptide
  MOD_RES (2), (3), (34): Xaa is C or S
PXXVPQALSNITIQIMVGRKPKVLGEMSMIVRSX

SEQ ID NO: 36509 - protein, 34 aa, Artificial Sequence
  Non-cyclic GFR-binding peptide
  MOD_RES (1), (2): Xaa is C or S
  MOD_RES (16), (17), (18), (19), (20): Xaa is A or G
  MOD_RES (21), (22), (23), (24): Xaa is A or G or is absent
XXVPTRLSNITIQIMXXXXXXXXXLGEMSDMVVE

SEQ ID NO: 36510 - protein, 33 aa, Artificial Sequence
  Non-cyclic GFR-binding peptide
  MOD_RES (14), (15), (16), (17), (18): Xaa is A or G
  MOD_RES (19), (20), (21), (22): Xaa is A or G or is absent
APTKLSNITVQIMXXXXXXXXXLGEMSNMVVRS

SEQ ID NO: 36511 - protein, 41 aa, Artificial Sequence
  Non-cyclic GFR-binding peptide
  MOD_RES (5), (6), (40): Xaa is C or S
  MOD_RES (20), (21), (22), (23), (24): Xaa is A or G
  MOD_RES (25), (26), (27), (28): Xaa is A or G or is absent
VPKPXXAPTKLSNITVQIMXXXXXXXXXLGEMSNMVVRSXG

SEQ ID NO: 36512 - protein, 36 aa, Artificial Sequence
  Non-cyclic GFR-binding peptide
  MOD_RES (5), (6): Xaa is C or S
TPPTXXVPTRLSNITIQIMDSANNVVIGEMSDMVVE

SEQ ID NO: 36513 - protein, 37 aa, Artificial Sequence
  Non-cyclic GFR-binding peptide
  MOD_RES (6), (7): Xaa is C or S
HVPKPXXAPTKLSNITVQIMDDSSNVIIGEMSNMVVR

SEQ ID NO: 36514 - protein, 34 aa, Artificial Sequence
  Non-cyclic GFR-binding peptide
  MOD_RES (2), (3): Xaa is C or S
TXXVPTRLSNITIQIMDSANNVVIGEMSDMVVES

SEQ ID NO: 36515 - protein, 35 aa, Artificial Sequence
  Non-cyclic GFR-binding peptide
  MOD_RES (1), (2), (34): Xaa is C or S
XXVPARLSNITIQIMDAANNVVLGEMSDMVVEAXG

SEQ ID NO: 36516 - protein, 42 aa, Artificial Sequence
  Non-cyclic GFR-binding peptide
  MOD_RES (6), (7), (40), (42): Xaa is C or S
  MOD_RES (21), (22), (23), (24), (25): Xaa is A or G
  MOD_RES (26), (27), (28), (29): Xaa is A or G or is absent
RVPSTXXAPVKTSNITMQIMXXXXXXXXXIGEMSMIVEEXGX

SEQ ID NO: 36517 - protein, 34 aa, Artificial Sequence
  Non-cyclic GFR-binding peptide
  MOD_RES (33), (33): Xaa is C or S
  MOD_RES (14), (15), (16), (17), (18): Xaa is A or G
  MOD_RES (19), (20), (21), (22): Xaa is A or G or is absent
APVKTSNITMQIMXXXXXXXXXIGEMSMIVEEXG

SEQ ID NO: 36518 - protein, 32 aa, Artificial Sequence
  Non-cyclic GFR-binding peptide
  MOD_RES (1), (1): Xaa is C or S
XVPARLSNITIQIMDAANNVVIGEMSDMVVEA

SEQ ID NO: 36519 - protein, 34 aa, Artificial Sequence
  Non-cyclic GFR-binding peptide
  MOD_RES (1), (32), (34): Xaa is C or S
XVPQDLSNITIQIMVGRTPKVLGEMSMVVKSXKX

SEQ ID NO: 36520 - protein, 39 aa, Artificial Sequence
  Non-cyclic GFR-binding peptide
  MOD_RES (6), (7): Xaa is C or S
  MOD_RES (21), (22), (23), (24), (25): Xaa is A or G
  MOD_RES (26), (27), (28), (29): Xaa is A or G or is absent
ASASPXXVSQDLSNITIQIMXXXXXXXXXLGEMSMIVKS

SEQ ID NO: 36521 - protein, 36 aa, Artificial Sequence
  Non-cyclic GFR-binding peptide
  MOD_RES (2), (3): Xaa is C or S
  MOD_RES (17), (18), (19), (20), (21): Xaa is A or G
  MOD_RES (22), (23), (24), (25): Xaa is A or G or is absent
PXXTPTKMSNITMQIMXXXXXXXXXIGEMSGMVVDR

SEQ ID NO: 36522 - protein, 35 aa, Artificial Sequence
  Non-cyclic GFR-binding peptide
  MOD_RES (34), (34): Xaa is C or S
  MOD_RES (14), (15), (16), (17), (18): Xaa is A or G
  MOD_RES (19), (20), (21), (22): Xaa is A or G or is absent
TPTKMSNITMQIMXXXXXXXXXLGEMSGMVVDRXG

SEQ ID NO: 36523 - protein, 38 aa, Artificial Sequence
  Non-cyclic GFR-binding peptide
  MOD_RES (5), (6): Xaa is C or S
  MOD_RES (20), (21), (22), (23), (24): Xaa is A or G
  MOD_RES (25), (26), (27), (28): Xaa is A or G or is absent
SASPXXVPQDLSNITIQIMXXXXXXXXXLGEMSMVVKS

SEQ ID NO: 36524 - protein, 34 aa, Artificial Sequence
  Non-cyclic GFR-binding peptide
  MOD_RES (1), (34): Xaa is C or S
  MOD_RES (15), (16), (17), (18), (19): Xaa is A or G
  MOD_RES (20), (21), (22), (23): Xaa is A or G or is absent
XVPQALSNITIQIMXXXXXXXXXLGEMSMIVRSX

SEQ ID NO: 36525 - protein, 35 aa, Artificial Sequence
  Non-cyclic GFR-binding peptide
  MOD_RES (1), (34): Xaa is C or S
  MOD_RES (15), (16), (17), (18), (19): Xaa is A or G
  MOD_RES (20), (21), (22), (23): Xaa is A or G or is absent
XVPQDLSNITIQIMXXXXXXXXXLGEMSMVVKSXK

SEQ ID NO: 36526 - protein, 41 aa, Artificial Sequence
  Non-cyclic GFR-binding peptide
  MOD_RES (6), (7), (38), (40): Xaa is C or S
ASAAPXXVPQALSNITIQIMVGRKPKVLGEMSMIVRSXKXS

SEQ ID NO: 36527 - protein, 44 aa, Artificial Sequence
  Non-cyclic GFR-binding peptide
  MOD_RES (6), (7), (41), (43): Xaa is C or S
  MOD_RES (21), (22), (23), (24), (25): Xaa is A or G
  MOD_RES (26), (27), (28), (29): Xaa is A or G or is absent
AAPASXXVPARLSNITIQIMXXXXXXXXXLGEMSDMVVEAXGXR

SEQ ID NO: 36528 - protein, 38 aa, Artificial Sequence
  Non-cyclic GFR-binding peptide
  MOD_RES (1), (35), (37): Xaa is C or S
  MOD_RES (15), (16), (17), (18), (19): Xaa is A or G
  MOD_RES (20), (21), (22), (23): Xaa is A or G or is absent
XVPTRLSNITIQIMXXXXXXXXXLGEMSDMVVESXGXR

SEQ ID NO: 36529 - protein, 38 aa, Artificial Sequence
  Non-cyclic GFR-binding peptide
  MOD_RES (1), (35), (37): Xaa is C or S
  MOD_RES (15), (16), (17), (18), (19): Xaa is A or G
  MOD_RES (20), (21), (22), (23): Xaa is A or G or is absent
XVPTRLSNITIQIMXXXXXXXXXIGEMSDMVVESXGXR

SEQ ID NO: 36530 - protein, 42 aa, Artificial Sequence
  Non-cyclic GFR-binding peptide
  MOD_RES (6), (7), (41): Xaa is C or S
  MOD_RES (21), (22), (23), (24), (25): Xaa is A or G
  MOD_RES (26), (27), (28), (29): Xaa is A or G or is absent
HVPKPXXAPTKLSNITVQIMXXXXXXXXXIGEMSNMVVRSXG

SEQ ID NO: 36531 - protein, 35 aa, Artificial Sequence
  Non-cyclic GFR-binding peptide
  MOD_RES (1), (2): Xaa is C or S
  MOD_RES (16), (17), (18), (19), (20): Xaa is A or G
  MOD_RES (21), (22), (23), (24): Xaa is A or G or is absent
XXTPTKMSNITMQIMXXXXXXXXXLGEMSGMVVDR

SEQ ID NO: 36532 - protein, 33 aa, Artificial Sequence
  Non-cyclic GFR-binding peptide
  MOD_RES (32), (32): Xaa is C or S
VPTRLSNITIQIMDSANNVVLGEMSDMVVESXG

SEQ ID NO: 36533 - protein, 40 aa, Artificial Sequence
  Non-cyclic GFR-binding peptide
  MOD_RES (6), (7), (40): Xaa is C or S
  MOD_RES (21), (22), (23), (24), (25): Xaa is A or G
  MOD_RES (26), (27), (28), (29): Xaa is A or G or is absent
ASASPXXVSQDLSNITIQIMXXXXXXXXXLGEMSMIVKSX

SEQ ID NO: 36534 - protein, 40 aa, Artificial Sequence
  Non-cyclic GFR-binding peptide
  MOD_RES (2), (3), (37), (39): Xaa is C or S
  MOD_RES (17), (18), (19), (20), (21): Xaa is A or G
  MOD_RES (22), (23), (24), (25): Xaa is A or G or is absent
PXXAPTKLSNITVQIMXXXXXXXXXLGEMSNMVVRSXGXH

SEQ ID NO: 36535 - protein, 32 aa, Artificial Sequence
  Non-cyclic GFR-binding peptide
  MOD_RES (1), (2): Xaa is C or S
XXAPVKTSNITMQIMDNGRVLLLGEMSMIVEE

SEQ ID NO: 36536 - protein, 37 aa, Artificial Sequence
  Non-cyclic GFR-binding peptide
  MOD_RES (4), (5): Xaa is C or S
  MOD_RES (19), (20), (21), (22), (23): Xaa is A or G
  MOD_RES (24), (25), (26), (27): Xaa is A or G or is absent
PSTXXAPVKTSNITMQIMXXXXXXXXXIGEMSMIVEE

SEQ ID NO: 36537 - protein, 34 aa, Artificial Sequence
  Non-cyclic GFR-binding peptide
  MOD_RES (31), (33): Xaa is C or S
VPQALSNITIQIMVGRKPKVLGEMSMIVRSXKXS

SEQ ID NO: 36538 - protein, 33 aa, Artificial Sequence
  Non-cyclic GFR-binding peptide
  MOD_RES (2), (3): Xaa is C or S
PXXAPTKLSNITVQIMDDSSNVILGEMSNMVVR

SEQ ID NO: 36539 - protein, 43 aa, Artificial Sequence
  Non-cyclic GFR-binding peptide
  MOD_RES (5), (6), (40), (42): Xaa is C or S
  MOD_RES (20), (21), (22), (23), (24): Xaa is A or G
  MOD_RES (25), (26), (27), (28): Xaa is A or G or is absent
VPKPXXAPTKLSNITVQIMXXXXXXXXXLGEMSNMVVRSXGXH

SEQ ID NO: 36540 - protein, 33 aa, Artificial Sequence
  Non-cyclic GFR-binding peptide
  MOD_RES (1), (1): Xaa is C or S
  MOD_RES (15), (16), (17), (18), (19): Xaa is A or G
  MOD_RES (20), (21), (22), (23): Xaa is A or G or is absent
XVPARLSNITIQIMXXXXXXXXXLGEMSDMVVE

SEQ ID NO: 36541 - protein, 38 aa, Artificial Sequence
  Non-cyclic GFR-binding peptide
  MOD_RES (2), (3), (37): Xaa is C or S
  MOD_RES (17), (18), (19), (20), (21): Xaa is A or G
  MOD_RES (22), (23), (24), (25): Xaa is A or G or is absent
PXXAPTKLSNITVQIMXXXXXXXXXLGEMSNMVVRSXG

SEQ ID NO: 36542 - protein, 40 aa, Artificial Sequence
  Non-cyclic GFR-binding peptide
  MOD_RES (6), (7), (39): Xaa is C or S
HVPKPXXAPTKLSNITVQIMDDSSNVIIGEMSNMVVRSXG

SEQ ID NO: 36543 - protein, 40 aa, Artificial Sequence
  Non-cyclic GFR-binding peptide
  MOD_RES (4), (5), (39): Xaa is C or S
  MOD_RES (19), (20), (21), (22), (23): Xaa is A or G
  MOD_RES (24), (25), (26), (27): Xaa is A or G or is absent
PPTXXVPTRLSNITIQIMXXXXXXXXXLGEMSDMVVESXG

SEQ ID NO: 36544 - protein, 38 aa, Artificial Sequence
  Non-cyclic GFR-binding peptide
  MOD_RES (5), (6): Xaa is C or S
  MOD_RES (20), (21), (22), (23), (24): Xaa is A or G
  MOD_RES (25), (26), (27), (28): Xaa is A or G or is absent
VPSTXXAPVKTSNITMQIMXXXXXXXXXLGEMSMIVEE

SEQ ID NO: 36545 - protein, 34 aa, Artificial Sequence
  Non-cyclic GFR-binding peptide
  MOD_RES (1), (1): Xaa is C or S
  MOD_RES (15), (16), (17), (18), (19): Xaa is A or G
  MOD_RES (20), (21), (22), (23): Xaa is A or G or is absent
XVPARLSNITIQIMXXXXXXXXXIGEMSDMVVEA

SEQ ID NO: 36546 - protein, 33 aa, Artificial Sequence
  Non-cyclic GFR-binding peptide
  MOD_RES (31), (33): Xaa is C or S
VPQALSNITIQIMVGRKPKVLGEMSMIVRSXKX

SEQ ID NO: 36547 - protein, 42 aa, Artificial Sequence
  Non-cyclic GFR-binding peptide
  MOD_RES (6), (7), (39), (41): Xaa is C or S
HVPKPXXAPTKLSNITVQIMDDSSNVILGEMSNMVVRSXGXH

SEQ ID NO: 36548 - protein, 33 aa, Artificial Sequence
  Non-cyclic GFR-binding peptide
  MOD_RES (31), (33): Xaa is C or S
VSQDLSNITIQIMIGKTPKILGEMSMIVKSXKX

SEQ ID NO: 36549 - protein, 37 aa, Artificial Sequence
  Non-cyclic GFR-binding peptide
  MOD_RES (1), (35), (37): Xaa is C or S
  MOD_RES (15), (16), (17), (18), (19): Xaa is A or G
  MOD_RES (20), (21), (22), (23): Xaa is A or G or is absent
XVPTRLSNITIQIMXXXXXXXXXIGEMSDMVVESXGX

SEQ ID NO: 36550 - protein, 39 aa, Artificial Sequence
  Non-cyclic GFR-binding peptide
  MOD_RES (6), (7), (38): Xaa is C or S
ASAAPXXVPQALSNITIQIMVGRKPKVLGEMSMIVRSXK

SEQ ID NO: 36551 - protein, 38 aa, Artificial Sequence
  Non-cyclic GFR-binding peptide
  MOD_RES (5), (6), (38): Xaa is C or S
APASXXVPARLSNITIQIMDAANNVVIGEMSDMVVEAX

SEQ ID NO: 36552 - protein, 35 aa, Artificial Sequence
  Non-cyclic GFR-binding peptide
  MOD_RES (33), (35): Xaa is C or S
  MOD_RES (14), (15), (16), (17), (18): Xaa is A or G
  MOD_RES (19), (20), (21), (22): Xaa is A or G or is absent
VPQALSNITIQIMXXXXXXXXXLGEMSMIVRSXKX

SEQ ID NO: 36553 - protein, 37 aa, Artificial Sequence
  Non-cyclic GFR-binding peptide
  MOD_RES (2), (3), (36): Xaa is C or S
  MOD_RES (17), (18), (19), (20), (21): Xaa is A or G
  MOD_RES (22), (23), (24), (25): Xaa is A or G or is absent
TXXAPVKTSNITMQIMXXXXXXXXXLGEMSMIVEEXG

SEQ ID NO: 36554 - protein, 32 aa, Artificial Sequence
  Non-cyclic GFR-binding peptide
  MOD_RES (31), (31): Xaa is C or S
VPQALSNITIQIMVGRKPKVLGEMSMIVRSXK

SEQ ID NO: 36555 - protein, 42 aa, Artificial Sequence
  Non-cyclic GFR-binding peptide
  MOD_RES (4), (5), (39), (41): Xaa is C or S
  MOD_RES (19), (20), (21), (22), (23): Xaa is A or G
  MOD_RES (24), (25), (26), (27): Xaa is A or G or is absent
PASXXVPARLSNITIQIMXXXXXXXXXLGEMSDMVVEAXGXR

SEQ ID NO: 36556 - protein, 31 aa, Artificial Sequence
  Non-cyclic GFR-binding peptide
  MOD_RES (1), (1): Xaa is C or S
XVPQALSNITIQIMVGRKPKVLGEMSMIVRS

SEQ ID NO: 36557 - protein, 35 aa, Artificial Sequence
  Non-cyclic GFR-binding peptide
  MOD_RES (34), (34): Xaa is C or S
  MOD_RES (14), (15), (16), (17), (18): Xaa is A or G
  MOD_RES (19), (20), (21), (22): Xaa is A or G or is absent
VPTRLSNITIQIMXXXXXXXXXLGEMSDMVVESXG

SEQ ID NO: 36558 - protein, 34 aa, Artificial Sequence
  Non-cyclic GFR-binding peptide
  MOD_RES (1), (34): Xaa is C or S
  MOD_RES (15), (16), (17), (18), (19): Xaa is A or G
  MOD_RES (20), (21), (22), (23): Xaa is A or G or is absent
XAPVKTSNITMQIMXXXXXXXXXLGEMSMIVEEX

SEQ ID NO: 36559 - protein, 34 aa, Artificial Sequence
  Non-cyclic GFR-binding peptide
  MOD_RES (2), (3): Xaa is C or S
SXXVPARLSNITIQIMDAANNVVLGEMSDMVVEA

SEQ ID NO: 36560 - protein, 31 aa, Artificial Sequence
  Non-cyclic GFR-binding peptide
TPTKMSNITMQIMNDKQQIIIGEMSGMVVDR

SEQ ID NO: 36561 - protein, 39 aa, Artificial Sequence
  Non-cyclic GFR-binding peptide
  MOD_RES (3), (4), (36), (38): Xaa is C or S
ASXXVPARLSNITIQIMDAANNVVLGEMSDMVVEAXGXR

SEQ ID NO: 36562 - protein, 40 aa, Artificial Sequence
  Non-cyclic GFR-binding peptide
  MOD_RES (6), (7), (39): Xaa is C or S
STPPTXXVPTRLSNITIQIMDSANNVVIGEMSDMVVESXG

SEQ ID NO: 36563 - protein, 37 aa, Artificial Sequence
  Non-cyclic GFR-binding peptide
  MOD_RES (4), (5), (37): Xaa is C or S
PPTXXVPTRLSNITIQIMDSANNVVLGEMSDMVVESX

SEQ ID NO: 36564 - protein, 35 aa, Artificial Sequence
  Non-cyclic GFR-binding peptide
  MOD_RES (3), (4): Xaa is C or S
GPXXTPTKMSNITMQIMNDKQQIILGEMSGMVVDR

SEQ ID NO: 36565 - protein, 36 aa, Artificial Sequence
  Non-cyclic GFR-binding peptide
  MOD_RES (2), (3), (34), (36): Xaa is C or S
TXXAPVKTSNITMQIMDNGRVLLIGEMSMIVEEXGX

SEQ ID NO: 36566 - protein, 38 aa, Artificial Sequence
  Non-cyclic GFR-binding peptide
  MOD_RES (6), (7): Xaa is C or S
GSAGPXXTPTKMSNITMQIMNDKQQIIIGEMSGMVVDR

SEQ ID NO: 36567 - protein, 37 aa, Artificial Sequence
  Non-cyclic GFR-binding peptide
  MOD_RES (1), (2), (34), (36): Xaa is C or S
XXVPARLSNITIQIMDAANNVVIGEMSDMVVEAXGXR

SEQ ID NO: 36568 - protein, 37 aa, Artificial Sequence
  Non-cyclic GFR-binding peptide
  MOD_RES (1), (2), (34), (36): Xaa is C or S
XXVPARLSNITIQIMDAANNVVLGEMSDMVVEAXGXR

SEQ ID NO: 36569 - protein, 35 aa, Artificial Sequence
  Non-cyclic GFR-binding peptide
  MOD_RES (2), (3), (35): Xaa is C or S
SXXVPARLSNITIQIMDAANNVVIGEMSDMVVEAX

SEQ ID NO: 36570 - protein, 38 aa, Artificial Sequence
  Non-cyclic GFR-binding peptide
  MOD_RES (1), (2), (35), (37): Xaa is C or S
  MOD_RES (16), (17), (18), (19), (20): Xaa is A or G
  MOD_RES (21), (22), (23), (24): Xaa is A or G or is absent
XXAPVKTSNITMQIMXXXXXXXXXLGEMSMIVEEXGXL

SEQ ID NO: 36571 - protein, 36 aa, Artificial Sequence
  Non-cyclic GFR-binding peptide
  MOD_RES (4), (5), (36): Xaa is C or S
PSTXXAPVKTSNITMQIMDNGRVLLLGEMSMIVEEX

SEQ ID NO: 36572 - protein, 40 aa, Artificial Sequence
  Non-cyclic GFR-binding peptide
  MOD_RES (5), (6), (40): Xaa is C or S
  MOD_RES (20), (21), (22), (23), (24): Xaa is A or G
  MOD_RES (25), (26), (27), (28): Xaa is A or G or is absent
SAGPXXTPTKMSNITMQIMXXXXXXXXXLGEMSGMVVDRX

SEQ ID NO: 36573 - protein, 42 aa, Artificial Sequence
  Non-cyclic GFR-binding peptide
  MOD_RES (6), (7), (40), (42): Xaa is C or S
  MOD_RES (21), (22), (23), (24), (25): Xaa is A or G
  MOD_RES (26), (27), (28), (29): Xaa is A or G or is absent
ASAAPXXVPQALSNITIQIMXXXXXXXXXLGEMSMIVRSXKX

SEQ ID NO: 36574 - protein, 35 aa, Artificial Sequence
  Non-cyclic GFR-binding peptide
  MOD_RES (2), (3), (35): Xaa is C or S
TXXVPTRLSNITIQIMDSANNVVLGEMSDMVVESX

SEQ ID NO: 36575 - protein, 37 aa, Artificial Sequence
  Non-cyclic GFR-binding peptide
  MOD_RES (6), (7): Xaa is C or S
ASASPXXVPQDLSNITIQIMVGRTPKVLGEMSMVVKS

SEQ ID NO: 36576 - protein, 35 aa, Artificial Sequence
  Non-cyclic GFR-binding peptide
  MOD_RES (1), (2), (34): Xaa is C or S
XXTPTKMSNITMQIMNDKQQIIIGEMSGMVVDRXG

SEQ ID NO: 36577 - protein, 36 aa, Artificial Sequence
  Non-cyclic GFR-binding peptide
  MOD_RES (2), (3), (34), (36): Xaa is C or S
TXXAPVKTSNITMQIMDNGRVLLLGEMSMIVEEXGX

SEQ ID NO: 36578 - protein, 40 aa, Artificial Sequence
  Non-cyclic GFR-binding peptide
  MOD_RES (6), (7), (38), (40): Xaa is C or S
ASASPXXVPQDLSNITIQIMVGRTPKVLGEMSMVVKSXKX

SEQ ID NO: 36579 - protein, 39 aa, Artificial Sequence
  Non-cyclic GFR-binding peptide
  MOD_RES (4), (5), (37), (39): Xaa is C or S
AGPXXTPTKMSNITMQIMNDKQQIILGEMSGMVVDRXGX

SEQ ID NO: 36580 - protein, 34 aa, Artificial Sequence
  Non-cyclic GFR-binding peptide
  MOD_RES (2), (3), (34): Xaa is C or S
PXXVSQDLSNITIQIMIGKTPKILGEMSMIVKSX

SEQ ID NO: 36581 - protein, 38 aa, Artificial Sequence
  Non-cyclic GFR-binding peptide
  MOD_RES (1), (2), (36), (38): Xaa is C or S
  MOD_RES (16), (17), (18), (19), (20): Xaa is A or G
  MOD_RES (21), (22), (23), (24): Xaa is A or G or is absent
XXTPTKMSNITMQIMXXXXXXXXXLGEMSGMVVDRXGX

SEQ ID NO: 36582 - protein, 33 aa, Artificial Sequence
  Non-cyclic GFR-binding peptide
  MOD_RES (2), (3): Xaa is C or S
PXXVSQDLSNITIQIMIGKTPKILGEMSMIVKS

SEQ ID NO: 36583 - protein, 39 aa, Artificial Sequence
  Non-cyclic GFR-binding peptide
  MOD_RES (4), (5), (38): Xaa is C or S
  MOD_RES (19), (20), (21), (22), (23): Xaa is A or G
  MOD_RES (24), (25), (26), (27): Xaa is A or G or is absent
PSTXXAPVKTSNITMQIMXXXXXXXXXLGEMSMIVEEXG

SEQ ID NO: 36584 - protein, 37 aa, Artificial Sequence
  Non-cyclic GFR-binding peptide
  MOD_RES (3), (4): Xaa is C or S
  MOD_RES (18), (19), (20), (21), (22): Xaa is A or G
  MOD_RES (23), (24), (25), (26): Xaa is A or G or is absent
PTXXVPTRLSNITIQIMXXXXXXXXXIGEMSDMVVES

SEQ ID NO: 36585 - protein, 39 aa, Artificial Sequence
  Non-cyclic GFR-binding peptide
  MOD_RES (5), (6): Xaa is C or S
  MOD_RES (20), (21), (22), (23), (24): Xaa is A or G
  MOD_RES (25), (26), (27), (28): Xaa is A or G or is absent
TPPTXXVPTRLSNITIQIMXXXXXXXXXIGEMSDMVVES

SEQ ID NO: 36586 - protein, 39 aa, Artificial Sequence
  Non-cyclic GFR-binding peptide
  MOD_RES (4), (5), (38): Xaa is C or S
  MOD_RES (19), (20), (21), (22), (23): Xaa is A or G
  MOD_RES (24), (25), (26), (27): Xaa is A or G or is absent
PSTXXAPVKTSNITMQIMXXXXXXXXXIGEMSMIVEEXG

SEQ ID NO: 36587 - protein, 39 aa, Artificial Sequence
  Non-cyclic GFR-binding peptide
  MOD_RES (5), (6): Xaa is C or S
  MOD_RES (20), (21), (22), (23), (24): Xaa is A or G
  MOD_RES (25), (26), (27), (28): Xaa is A or G or is absent
VPKPXXAPTKLSNITVQIMXXXXXXXXXLGEMSNMVVRS

SEQ ID NO: 36588 - protein, 35 aa, Artificial Sequence
  Non-cyclic GFR-binding peptide
  MOD_RES (2), (3): Xaa is C or S
  MOD_RES (17), (18), (19), (20), (21): Xaa is A or G
  MOD_RES (22), (23), (24), (25): Xaa is A or G or is absent
PXXVPQALSNITIQIMXXXXXXXXXLGEMSMIVRS

SEQ ID NO: 36589 - protein, 34 aa, Artificial Sequence
  Non-cyclic GFR-binding peptide
  MOD_RES (32), (34): Xaa is C or S
VPARLSNITIQIMDAANNVVLGEMSDMVVEAXGX

SEQ ID NO: 36590 - protein, 37 aa, Artificial Sequence
  Non-cyclic GFR-binding peptide
  MOD_RES (4), (5), (36): Xaa is C or S
PSTXXAPVKTSNITMQIMDNGRVLLLGEMSMIVEEXG

SEQ ID NO: 36591 - protein, 39 aa, Artificial Sequence
  Non-cyclic GFR-binding peptide
  MOD_RES (2), (3), (37), (39): Xaa is C or S
  MOD_RES (17), (18), (19), (20), (21): Xaa is A or G
  MOD_RES (22), (23), (24), (25): Xaa is A or G or is absent
PXXTPTKMSNITMQIMXXXXXXXXXLGEMSGMVVDRXGX

SEQ ID NO: 36592 - protein, 36 aa, Artificial Sequence
  Non-cyclic GFR-binding peptide
  MOD_RES (2), (3), (36): Xaa is C or S
  MOD_RES (17), (18), (19), (20), (21): Xaa is A or G
  MOD_RES (22), (23), (24), (25): Xaa is A or G or is absent
PXXVPQALSNITIQIMXXXXXXXXXLGEMSMIVRSX

SEQ ID NO: 36593 - protein, 41 aa, Artificial Sequence
  Non-cyclic GFR-binding peptide
  MOD_RES (5), (6), (38), (40): Xaa is C or S
APASXXVPARLSNITIQIMDAANNVVLGEMSDMVVEAXGXR

SEQ ID NO: 36594 - protein, 35 aa, Artificial Sequence
  Non-cyclic GFR-binding peptide
  MOD_RES (3), (4): Xaa is C or S
ASXXVPARLSNITIQIMDAANNVVLGEMSDMVVEA

SEQ ID NO: 36595 - protein, 35 aa, Artificial Sequence
  Non-cyclic GFR-binding peptide
  MOD_RES (2), (3), (34): Xaa is C or S
PXXVPQALSNITIQIMVGRKPKVLGEMSMIVRSXK

SEQ ID NO: 36596 - protein, 38 aa, Artificial Sequence
  Non-cyclic GFR-binding peptide
  MOD_RES (1), (35), (37): Xaa is C or S
  MOD_RES (15), (16), (17), (18), (19): Xaa is A or G
  MOD_RES (20), (21), (22), (23): Xaa is A or G or is absent
XTPTKMSNITMQIMXXXXXXXXXLGEMSGMVVDRXGXS

SEQ ID NO: 36597 - protein, 40 aa, Artificial Sequence
  Non-cyclic GFR-binding peptide
  MOD_RES (4), (5), (39): Xaa is C or S
  MOD_RES (19), (20), (21), (22), (23): Xaa is A or G
  MOD_RES (24), (25), (26), (27): Xaa is A or G or is absent
PPTXXVPTRLSNITIQIMXXXXXXXXXIGEMSDMVVESXG

SEQ ID NO: 36598 - protein, 35 aa, Artificial Sequence
  Non-cyclic GFR-binding peptide
  MOD_RES (3), (4): Xaa is C or S
KPXXAPTKLSNITVQIMDDSSNVILGEMSNMVVRS

SEQ ID NO: 36599 - protein, 41 aa, Artificial Sequence
  Non-cyclic GFR-binding peptide
  MOD_RES (4), (5), (39), (41): Xaa is C or S
  MOD_RES (19), (20), (21), (22), (23): Xaa is A or G
  MOD_RES (24), (25), (26), (27): Xaa is A or G or is absent
PASXXVPARLSNITIQIMXXXXXXXXXLGEMSDMVVEAXGX

SEQ ID NO: 36600 - protein, 38 aa, Artificial Sequence
  Non-cyclic GFR-binding peptide
  MOD_RES (6), (7): Xaa is C or S
HVPKPXXAPTKLSNITVQIMDDSSNVILGEMSNMVVRS

SEQ ID NO: 36601 - protein, 41 aa, Artificial Sequence
  Non-cyclic GFR-binding peptide
  MOD_RES (6), (7), (41): Xaa is C or S
  MOD_RES (21), (22), (23), (24), (25): Xaa is A or G
  MOD_RES (26), (27), (28), (29): Xaa is A or G or is absent
STPPTXXVPTRLSNITIQIMXXXXXXXXXLGEMSDMVVESX

SEQ ID NO: 36602 - protein, 37 aa, Artificial Sequence
  Non-cyclic GFR-binding peptide
  MOD_RES (1), (35), (37): Xaa is C or S
  MOD_RES (15), (16), (17), (18), (19): Xaa is A or G
  MOD_RES (20), (21), (22), (23): Xaa is A or G or is absent
XAPTKLSNITVQIMXXXXXXXXXLGEMSNMVVRSXGX

SEQ ID NO: 36603 - protein, 39 aa, Artificial Sequence
  Non-cyclic GFR-binding peptide
  MOD_RES (2), (3), (36), (38): Xaa is C or S
  MOD_RES (17), (18), (19), (20), (21): Xaa is A or G
  MOD_RES (22), (23), (24), (25): Xaa is A or G or is absent
PXXVSQDLSNITIQIMXXXXXXXXXLGEMSMIVKSXKXS

SEQ ID NO: 36604 - protein, 35 aa, Artificial Sequence
  Non-cyclic GFR-binding peptide
  MOD_RES (4), (5): Xaa is C or S
PPTXXVPTRLSNITIQIMDSANNVVLGEMSDMVVE

SEQ ID NO: 36605 - protein, 36 aa, Artificial Sequence
  Non-cyclic GFR-binding peptide
  MOD_RES (1), (2), (35): Xaa is C or S
  MOD_RES (16), (17), (18), (19), (20): Xaa is A or G
  MOD_RES (21), (22), (23), (24): Xaa is A or G or is absent
XXVPQDLSNITIQIMXXXXXXXXXLGEMSMVVKSXK

SEQ ID NO: 36606 - protein, 38 aa, Artificial Sequence
  Non-cyclic GFR-binding peptide
  MOD_RES (6), (7), (38): Xaa is C or S
RVPSTXXAPVKTSNITMQIMDNGRVLLLGEMSMIVEEX

SEQ ID NO: 36607 - protein, 37 aa, Artificial Sequence
  Non-cyclic GFR-binding peptide
  MOD_RES (2), (3), (35), (37): Xaa is C or S
SXXVPARLSNITIQIMDAANNVVIGEMSDMVVEAXGX

SEQ ID NO: 36608 - protein, 35 aa, Artificial Sequence
  Non-cyclic GFR-binding peptide
  MOD_RES (2), (3), (34): Xaa is C or S
PXXVSQDLSNITIQIMIGKTPKILGEMSMIVKSXK

SEQ ID NO: 36609 - protein, 36 aa, Artificial Sequence
  Non-cyclic GFR-binding peptide
  MOD_RES (3), (4), (36): Xaa is C or S
ASXXVPARLSNITIQIMDAANNVVIGEMSDMVVEAX

SEQ ID NO: 36610 - protein, 31 aa, Artificial Sequence
  Non-cyclic GFR-binding peptide
VPARLSNITIQIMDAANNVVIGEMSDMVVEA

SEQ ID NO: 36611 - protein, 44 aa, Artificial Sequence
  Non-cyclic GFR-binding peptide
  MOD_RES (6), (7), (41), (43): Xaa is C or S
  MOD_RES (21), (22), (23), (24), (25): Xaa is A or G
  MOD_RES (26), (27), (28), (29): Xaa is A or G or is absent
STPPTXXVPTRLSNITIQIMXXXXXXXXXLGEMSDMVVESXGXR

SEQ ID NO: 36612 - protein, 36 aa, Artificial Sequence
  Non-cyclic GFR-binding peptide
  MOD_RES (2), (3), (35): Xaa is C or S
PXXAPTKLSNITVQIMDDSSNVILGEMSNMVVRSXG

SEQ ID NO: 36613 - protein, 38 aa, Artificial Sequence
  Non-cyclic GFR-binding peptide
  MOD_RES (5), (6): Xaa is C or S
  MOD_RES (20), (21), (22), (23), (24): Xaa is A or G
  MOD_RES (25), (26), (27), (28): Xaa is A or G or is absent
SAGPXXTPTKMSNITMQIMXXXXXXXXXLGEMSGMVVD

SEQ ID NO: 36614 - protein, 34 aa, Artificial Sequence
  Non-cyclic GFR-binding peptide
  MOD_RES (1), (2): Xaa is C or S
  MOD_RES (16), (17), (18), (19), (20): Xaa is A or G
  MOD_RES (21), (22), (23), (24): Xaa is A or G or is absent
XXAPVKTSNITMQIMXXXXXXXXXLGEMSMIVEE

SEQ ID NO: 36615 - protein, 39 aa, Artificial Sequence
  Non-cyclic GFR-binding peptide
  MOD_RES (3), (4), (38): Xaa is C or S
  MOD_RES (18), (19), (20), (21), (22): Xaa is A or G
  MOD_RES (23), (24), (25), (26): Xaa is A or G or is absent
PTXXVPTRLSNITIQIMXXXXXXXXXLGEMSDMVVESXG

SEQ ID NO: 36616 - protein, 31 aa, Artificial Sequence
  Non-cyclic GFR-binding peptide
  MOD_RES (31), (31): Xaa is C or S
APVKTSNITMQIMDNGRVLLLGEMSMIVEEX

SEQ ID NO: 36617 - protein, 38 aa, Artificial Sequence
  Non-cyclic GFR-binding peptide
  MOD_RES (5), (6), (37): Xaa is C or S
VPSTXXAPVKTSNITMQIMDNGRVLLLGEMSMIVEEXG

SEQ ID NO: 36618 - protein, 39 aa, Artificial Sequence
  Non-cyclic GFR-binding peptide
  MOD_RES (3), (4), (38): Xaa is C or S
  MOD_RES (18), (19), (20), (21), (22): Xaa is A or G
  MOD_RES (23), (24), (25), (26): Xaa is A or G or is absent
PTXXVPTRLSNITIQIMXXXXXXXXXIGEMSDMVVESXG

SEQ ID NO: 36619 - protein, 33 aa, Artificial Sequence
  Non-cyclic GFR-binding peptide
  MOD_RES (2), (3): Xaa is C or S
PXXVPQDLSNITIQIMVGRTPKVLGEMSMVVKS

SEQ ID NO: 36620 - protein, 37 aa, Artificial Sequence
  Non-cyclic GFR-binding peptide
  MOD_RES (4), (5), (37): Xaa is C or S
PKPXXAPTKLSNITVQIMDDSSNVILGEMSNMVVRSX

SEQ ID NO: 36621 - protein, 38 aa, Artificial Sequence
  Non-cyclic GFR-binding peptide
  MOD_RES (4), (5): Xaa is C or S
  MOD_RES (19), (20), (21), (22), (23): Xaa is A or G
  MOD_RES (24), (25), (26), (27): Xaa is A or G or is absent
PPTXXVPTRLSNITIQIMXXXXXXXXXIGEMSDMVVES

SEQ ID NO: 36622 - protein, 34 aa, Artificial Sequence
  Non-cyclic GFR-binding peptide
  MOD_RES (1), (2): Xaa is C or S
  MOD_RES (16), (17), (18), (19), (20): Xaa is A or G
  MOD_RES (21), (22), (23), (24): Xaa is A or G or is absent
XXVPTRLSNITIQIMXXXXXXXXXIGEMSDMVVE

SEQ ID NO: 36623 - protein, 41 aa, Artificial Sequence
  Non-cyclic GFR-binding peptide
  MOD_RES (5), (6), (38), (40): Xaa is C or S
TPPTXXVPTRLSNITIQIMDSANNVVLGEMSDMVVESXGXR

SEQ ID NO: 36624 - protein, 35 aa, Artificial Sequence
  Non-cyclic GFR-binding peptide
  MOD_RES (1), (2): Xaa is C or S
  MOD_RES (16), (17), (18), (19), (20): Xaa is A or G
  MOD_RES (21), (22), (23), (24): Xaa is A or G or is absent
XXVPTRLSNITIQIMXXXXXXXXXLGEMSDMVVES

SEQ ID NO: 36625 - protein, 41 aa, Artificial Sequence
  Non-cyclic GFR-binding peptide
  MOD_RES (3), (4), (38), (40): Xaa is C or S
  MOD_RES (18), (19), (20), (21), (22): Xaa is A or G
  MOD_RES (23), (24), (25), (26): Xaa is A or G or is absent
GPXXTPTKMSNITMQIMXXXXXXXXXLGEMSGMVVDRXGXS

SEQ ID NO: 36626 - protein, 40 aa, Artificial Sequence
  Non-cyclic GFR-binding peptide
  MOD_RES (4), (5), (37), (39): Xaa is C or S
AGPXXTPTKMSNITMQIMNDKQQIIIGEMSGMVVDRXGXS

SEQ ID NO: 36627 - protein, 34 aa, Artificial Sequence
  Non-cyclic GFR-binding peptide
  MOD_RES (1), (1): Xaa is C or S
  MOD_RES (15), (16), (17), (18), (19): Xaa is A or G
  MOD_RES (20), (21), (22), (23): Xaa is A or G or is absent
XVPTRLSNITIQIMXXXXXXXXXLGEMSDMVVES

SEQ ID NO: 36628 - protein, 40 aa, Artificial Sequence
  Non-cyclic GFR-binding peptide
  MOD_RES (3), (4), (37), (39): Xaa is C or S
  MOD_RES (18), (19), (20), (21), (22): Xaa is A or G
  MOD_RES (23), (24), (25), (26): Xaa is A or G or is absent
STXXAPVKTSNITMQIMXXXXXXXXXLGEMSMIVEEXGXL

SEQ ID NO: 36629 - protein, 41 aa, Artificial Sequence
  Non-cyclic GFR-binding peptide
  MOD_RES (3), (4), (38), (40): Xaa is C or S
  MOD_RES (18), (19), (20), (21), (22): Xaa is A or G
  MOD_RES (23), (24), (25), (26): Xaa is A or G or is absent
ASXXVPARLSNITIQIMXXXXXXXXXIGEMSDMVVEAXGXR

SEQ ID NO: 36630 - protein, 33 aa, Artificial Sequence
  Non-cyclic GFR-binding peptide
  MOD_RES (33), (33): Xaa is C or S
  MOD_RES (14), (15), (16), (17), (18): Xaa is A or G
  MOD_RES (19), (20), (21), (22): Xaa is A or G or is absent
VSQDLSNITIQIMXXXXXXXXXLGEMSMIVKSX

SEQ ID NO: 36631 - protein, 33 aa, Artificial Sequence
  Non-cyclic GFR-binding peptide
  MOD_RES (2), (3): Xaa is C or S
TXXVPTRLSNITIQIMDSANNVVIGEMSDMVVE

SEQ ID NO: 36632 - protein, 41 aa, Artificial Sequence
  Non-cyclic GFR-binding peptide
  MOD_RES (6), (7), (39), (41): Xaa is C or S
AAPASXXVPARLSNITIQIMDAANNVVLGEMSDMVVEAXGX

SEQ ID NO: 36633 - protein, 37 aa, Artificial Sequence
  Non-cyclic GFR-binding peptide
  MOD_RES (2), (3), (36): Xaa is C or S
  MOD_RES (17), (18), (19), (20), (21): Xaa is A or G
  MOD_RES (22), (23), (24), (25): Xaa is A or G or is absent
TXXAPVKTSNITMQIMXXXXXXXXXIGEMSMIVEEXG

SEQ ID NO: 36634 - protein, 38 aa, Artificial Sequence
  Non-cyclic GFR-binding peptide
  MOD_RES (5), (6), (38): Xaa is C or S
VPKPXXAPTKLSNITVQIMDDSSNVILGEMSNMVVRSX

SEQ ID NO: 36635 - protein, 40 aa, Artificial Sequence
  Non-cyclic GFR-binding peptide
  MOD_RES (6), (7): Xaa is C or S
  MOD_RES (21), (22), (23), (24), (25): Xaa is A or G
  MOD_RES (26), (27), (28), (29): Xaa is A or G or is absent
STPPTXXVPTRLSNITIQIMXXXXXXXXXIGEMSDMVVES

SEQ ID NO: 36636 - protein, 42 aa, Artificial Sequence
  Non-cyclic GFR-binding peptide
  MOD_RES (5), (6), (40), (42): Xaa is C or S
  MOD_RES (20), (21), (22), (23), (24): Xaa is A or G
  MOD_RES (25), (26), (27), (28): Xaa is A or G or is absent
APASXXVPARLSNITIQIMXXXXXXXXXIGEMSDMVVEAXGX

SEQ ID NO: 36637 - protein, 32 aa, Artificial Sequence
  Non-cyclic GFR-binding peptide
  MOD_RES (1), (2): Xaa is C or S
XXVSQDLSNITIQIMIGKTPKILGEMSMIVKS

SEQ ID NO: 36638 - protein, 36 aa, Artificial Sequence
  Non-cyclic GFR-binding peptide
  MOD_RES (3), (4), (35): Xaa is C or S
STXXAPVKTSNITMQIMDNGRVLLIGEMSMIVEEXG

SEQ ID NO: 36639 - protein, 38 aa, Artificial Sequence
  Non-cyclic GFR-binding peptide
  MOD_RES (2), (3), (35), (37): Xaa is C or S
PXXTPTKMSNITMQIMNDKQQIILGEMSGMVVDRXGXS

SEQ ID NO: 36640 - protein, 35 aa, Artificial Sequence
  Non-cyclic GFR-binding peptide
  MOD_RES (1), (33), (35): Xaa is C or S
XVPTRLSNITIQIMDSANNVVIGEMSDMVVESXGX

SEQ ID NO: 36641 - protein, 41 aa, Artificial Sequence
  Non-cyclic GFR-binding peptide
  MOD_RES (6), (7), (41): Xaa is C or S
  MOD_RES (21), (22), (23), (24), (25): Xaa is A or G
  MOD_RES (26), (27), (28), (29): Xaa is A or G or is absent
AAPASXXVPARLSNITIQIMXXXXXXXXXIGEMSDMVVEAX

SEQ ID NO: 36642 - protein, 36 aa, Artificial Sequence
  Non-cyclic GFR-binding peptide
  MOD_RES (34), (36): Xaa is C or S
  MOD_RES (14), (15), (16), (17), (18): Xaa is A or G
  MOD_RES (19), (20), (21), (22): Xaa is A or G or is absent
TPTKMSNITMQIMXXXXXXXXXLGEMSGMVVDRXGX

SEQ ID NO: 36643 - protein, 34 aa, Artificial Sequence
  Non-cyclic GFR-binding peptide
  MOD_RES (1), (33): Xaa is C or S
XVPARLSNITIQIMDAANNVVIGEMSDMVVEAXG

SEQ ID NO: 36644 - protein, 35 aa, Artificial Sequence
  Non-cyclic GFR-binding peptide
  MOD_RES (1), (32), (34): Xaa is C or S
XVSQDLSNITIQIMIGKTPKILGEMSMIVKSXKXS

SEQ ID NO: 36645 - protein, 34 aa, Artificial Sequence
  Non-cyclic GFR-binding peptide
  MOD_RES (32), (34): Xaa is C or S
VPARLSNITIQIMDAANNVVIGEMSDMVVEAXGX

SEQ ID NO: 36646 - protein, 37 aa, Artificial Sequence
  Non-cyclic GFR-binding peptide
  MOD_RES (1), (2), (36): Xaa is C or S
  MOD_RES (16), (17), (18), (19), (20): Xaa is A or G
  MOD_RES (21), (22), (23), (24): Xaa is A or G or is absent
XXAPTKLSNITVQIMXXXXXXXXXLGEMSNMVVRSXG

SEQ ID NO: 36647 - protein, 40 aa, Artificial Sequence
  Non-cyclic GFR-binding peptide
  MOD_RES (5), (6), (38), (40): Xaa is C or S
TPPTXXVPTRLSNITIQIMDSANNVVIGEMSDMVVESXGX

SEQ ID NO: 36648 - protein, 35 aa, Artificial Sequence
  Non-cyclic GFR-binding peptide
  MOD_RES (3), (4): Xaa is C or S
PTXXVPTRLSNITIQIMDSANNVVIGEMSDMVVES

SEQ ID NO: 36649 - protein, 38 aa, Artificial Sequence
  Non-cyclic GFR-binding peptide
  MOD_RES (5), (6): Xaa is C or S
  MOD_RES (20), (21), (22), (23), (24): Xaa is A or G
  MOD_RES (25), (26), (27), (28): Xaa is A or G or is absent
SAGPXXTPTKMSNITMQIMXXXXXXXXXIGEMSGMVVD

SEQ ID NO: 36650 - protein, 38 aa, Artificial Sequence
  Non-cyclic GFR-binding peptide
  MOD_RES (4), (5), (36), (38): Xaa is C or S
AAPXXVPQALSNITIQIMVGRKPKVLGEMSMIVRSXKX

SEQ ID NO: 36651 - protein, 39 aa, Artificial Sequence
  Non-cyclic GFR-binding peptide
  MOD_RES (2), (3), (36), (38): Xaa is C or S
  MOD_RES (17), (18), (19), (20), (21): Xaa is A or G
  MOD_RES (22), (23), (24), (25): Xaa is A or G or is absent
PXXVPQDLSNITIQIMXXXXXXXXXLGEMSMVVKSXKXS

SEQ ID NO: 36652 - protein, 40 aa, Artificial Sequence
  Non-cyclic GFR-binding peptide
  MOD_RES (4), (5), (37), (39): Xaa is C or S
PPTXXVPTRLSNITIQIMDSANNVVLGEMSDMVVESXGXR

SEQ ID NO: 36653 - protein, 38 aa, Artificial Sequence
  Non-cyclic GFR-binding peptide
  MOD_RES (1), (2), (36), (38): Xaa is C or S
  MOD_RES (16), (17), (18), (19), (20): Xaa is A or G
  MOD_RES (21), (22), (23), (24): Xaa is A or G or is absent
XXTPTKMSNITMQIMXXXXXXXXXIGEMSGMVVDRXGX

SEQ ID NO: 36654 - protein, 37 aa, Artificial Sequence
  Non-cyclic GFR-binding peptide
  MOD_RES (1), (34), (36): Xaa is C or S
  MOD_RES (15), (16), (17), (18), (19): Xaa is A or G
  MOD_RES (20), (21), (22), (23): Xaa is A or G or is absent
XAPVKTSNITMQIMXXXXXXXXXIGEMSMIVEEXGXL

SEQ ID NO: 36655 - protein, 35 aa, Artificial Sequence
  Non-cyclic GFR-binding peptide
  MOD_RES (1), (34): Xaa is C or S
  MOD_RES (15), (16), (17), (18), (19): Xaa is A or G
  MOD_RES (20), (21), (22), (23): Xaa is A or G or is absent
XVSQDLSNITIQIMXXXXXXXXXLGEMSMIVKSXK

SEQ ID NO: 36656 - protein, 35 aa, Artificial Sequence
  Non-cyclic GFR-binding peptide
  MOD_RES (2), (3): Xaa is C or S
  MOD_RES (17), (18), (19), (20), (21): Xaa is A or G
  MOD_RES (22), (23), (24), (25): Xaa is A or G or is absent
PXXVSQDLSNITIQIMXXXXXXXXXLGEMSMIVKS

SEQ ID NO: 36657 - protein, 32 aa, Artificial Sequence
  Non-cyclic GFR-binding peptide
  MOD_RES (1), (2): Xaa is C or S
XXVPQDLSNITIQIMVGRTPKVLGEMSMVVKS

SEQ ID NO: 36658 - protein, 35 aa, Artificial Sequence
  Non-cyclic GFR-binding peptide
  MOD_RES (34), (34): Xaa is C or S
  MOD_RES (14), (15), (16), (17), (18): Xaa is A or G
  MOD_RES (19), (20), (21), (22): Xaa is A or G or is absent
VPTRLSNITIQIMXXXXXXXXXIGEMSDMVVESXG

SEQ ID NO: 36659 - protein, 36 aa, Artificial Sequence
  Non-cyclic GFR-binding peptide
  MOD_RES (2), (3), (34), (36): Xaa is C or S
PXXVPQDLSNITIQIMVGRTPKVLGEMSMVVKSXKX

SEQ ID NO: 36660 - protein, 37 aa, Artificial Sequence
  Non-cyclic GFR-binding peptide
  MOD_RES (2), (3), (36): Xaa is C or S
  MOD_RES (17), (18), (19), (20), (21): Xaa is A or G
  MOD_RES (22), (23), (24), (25): Xaa is A or G or is absent
PXXVSQDLSNITIQIMXXXXXXXXXLGEMSMIVKSXK

SEQ ID NO: 36661 - protein, 36 aa, Artificial Sequence
  Non-cyclic GFR-binding peptide
  MOD_RES (3), (4), (36): Xaa is C or S
KPXXAPTKLSNITVQIMDDSSNVILGEMSNMVVRSX

SEQ ID NO: 36662 - protein, 39 aa, Artificial Sequence
  Non-cyclic GFR-binding peptide
  MOD_RES (5), (6), (38): Xaa is C or S
VPKPXXAPTKLSNITVQIMDDSSNVILGEMSNMVVRSXG

SEQ ID NO: 36663 - protein, 32 aa, Artificial Sequence
  Non-cyclic GFR-binding peptide
  MOD_RES (1), (32): Xaa is C or S
XAPVKTSNITMQIMDNGRVLLLGEMSMIVEEX

SEQ ID NO: 36664 - protein, 40 aa, Artificial Sequence
  Non-cyclic GFR-binding peptide
  MOD_RES (2), (3), (37), (39): Xaa is C or S
  MOD_RES (17), (18), (19), (20), (21): Xaa is A or G
  MOD_RES (22), (23), (24), (25): Xaa is A or G or is absent
TXXVPTRLSNITIQIMXXXXXXXXXIGEMSDMVVESXGXR

SEQ ID NO: 36665 - protein, 33 aa, Artificial Sequence
  Non-cyclic GFR-binding peptide
  MOD_RES (1), (2), (33): Xaa is C or S
XXVPQDLSNITIQIMVGRTPKVLGEMSMVVKSX

SEQ ID NO: 36666 - protein, 31 aa, Artificial Sequence
  Non-cyclic GFR-binding peptide
VPTRLSNITIQIMDSANNVVIGEMSDMVVES

SEQ ID NO: 36667 - protein, 34 aa, Artificial Sequence
  Non-cyclic GFR-binding peptide
  MOD_RES (31), (33): Xaa is C or S
APVKTSNITMQIMDNGRVLLIGEMSMIVEEXGXL

SEQ ID NO: 36668 - protein, 39 aa, Artificial Sequence
  Non-cyclic GFR-binding peptide
  MOD_RES (6), (7), (39): Xaa is C or S
GSAGPXXTPTKMSNITMQIMNDKQQIIIGEMSGMVVDRX

SEQ ID NO: 36669 - protein, 38 aa, Artificial Sequence
  Non-cyclic GFR-binding peptide
  MOD_RES (4), (5), (36), (38): Xaa is C or S
PSTXXAPVKTSNITMQIMDNGRVLLLGEMSMIVEEXGX

SEQ ID NO: 36670 - protein, 36 aa, Artificial Sequence
  Non-cyclic GFR-binding peptide
  MOD_RES (1), (34), (36): Xaa is C or S
  MOD_RES (15), (16), (17), (18), (19): Xaa is A or G
  MOD_RES (20), (21), (22), (23): Xaa is A or G or is absent
XVPQALSNITIQIMXXXXXXXXXLGEMSMIVRSXKX

SEQ ID NO: 36671 - protein, 35 aa, Artificial Sequence
  Non-cyclic GFR-binding peptide
  MOD_RES (1), (2), (34): Xaa is C or S
XXTPTKMSNITMQIMNDKQQIILGEMSGMVVDRXG

SEQ ID NO: 36672 - protein, 41 aa, Artificial Sequence
  Non-cyclic GFR-binding peptide
  MOD_RES (4), (5), (38), (40): Xaa is C or S
  MOD_RES (19), (20), (21), (22), (23): Xaa is A or G
  MOD_RES (24), (25), (26), (27): Xaa is A or G or is absent
ASPXXVSQDLSNITIQIMXXXXXXXXXLGEMSMIVKSXKXS

SEQ ID NO: 36673 - protein, 33 aa, Artificial Sequence
  Non-cyclic GFR-binding peptide
  MOD_RES (31), (33): Xaa is C or S
APVKTSNITMQIMDNGRVLLIGEMSMIVEEXGX

SEQ ID NO: 36674 - protein, 36 aa, Artificial Sequence
  Non-cyclic GFR-binding peptide
  MOD_RES (1), (2), (36): Xaa is C or S
  MOD_RES (16), (17), (18), (19), (20): Xaa is A or G
  MOD_RES (21), (22), (23), (24): Xaa is A or G or is absent
XXAPTKLSNITVQIMXXXXXXXXXLGEMSNMVVRSX

SEQ ID NO: 36675 - protein, 41 aa, Artificial Sequence
  Non-cyclic GFR-binding peptide
  MOD_RES (6), (7), (38), (40): Xaa is C or S
ASASPXXVPQDLSNITIQIMVGRTPKVLGEMSMVVKSXKXS

SEQ ID NO: 36676 - protein, 41 aa, Artificial Sequence
  Non-cyclic GFR-binding peptide
  MOD_RES (4), (5), (39), (41): Xaa is C or S
  MOD_RES (19), (20), (21), (22), (23): Xaa is A or G
  MOD_RES (24), (25), (26), (27): Xaa is A or G or is absent
AGPXXTPTKMSNITMQIMXXXXXXXXXIGEMSGMVVDRXGX

SEQ ID NO: 36677 - protein, 42 aa, Artificial Sequence
  Non-cyclic GFR-binding peptide
  MOD_RES (6), (7), (39), (41): Xaa is C or S
STPPTXXVPTRLSNITIQIMDSANNVVIGEMSDMVVESXGXR

SEQ ID NO: 36678 - protein, 37 aa, Artificial Sequence
  Non-cyclic GFR-binding peptide
  MOD_RES (3), (4): Xaa is C or S
  MOD_RES (18), (19), (20), (21), (22): Xaa is A or G
  MOD_RES (23), (24), (25), (26): Xaa is A or G or is absent
KPXXAPTKLSNITVQIMXXXXXXXXXLGEMSNMVVRS

SEQ ID NO: 36679 - protein, 34 aa, Artificial Sequence
  Non-cyclic GFR-binding peptide
  MOD_RES (1), (2): Xaa is C or S
  MOD_RES (16), (17), (18), (19), (20): Xaa is A or G
  MOD_RES (21), (22), (23), (24): Xaa is A or G or is absent
XXAPTKLSNITVQIMXXXXXXXXXLGEMSNMVVR

SEQ ID NO: 36680 - protein, 35 aa, Artificial Sequence
  Non-cyclic GFR-binding peptide
  MOD_RES (1), (2), (35): Xaa is C or S
  MOD_RES (16), (17), (18), (19), (20): Xaa is A or G
  MOD_RES (21), (22), (23), (24): Xaa is A or G or is absent
XXAPVKTSNITMQIMXXXXXXXXXIGEMSMIVEEX

SEQ ID NO: 36681 - protein, 37 aa, Artificial Sequence
  Non-cyclic GFR-binding peptide
  MOD_RES (6), (7): Xaa is C or S
ASASPXXVSQDLSNITIQIMIGKTPKILGEMSMIVKS

SEQ ID NO: 36682 - protein, 37 aa, Artificial Sequence
  Non-cyclic GFR-binding peptide
  MOD_RES (5), (6): Xaa is C or S
VPKPXXAPTKLSNITVQIMDDSSNVILGEMSNMVVRS

SEQ ID NO: 36683 - protein, 37 aa, Artificial Sequence
  Non-cyclic GFR-binding peptide
  MOD_RES (34), (36): Xaa is C or S
  MOD_RES (14), (15), (16), (17), (18): Xaa is A or G
  MOD_RES (19), (20), (21), (22): Xaa is A or G or is absent
VPARLSNITIQIMXXXXXXXXXIGEMSDMVVEAXGXR

SEQ ID NO: 36684 - protein, 37 aa, Artificial Sequence
  Non-cyclic GFR-binding peptide
  MOD_RES (1), (2), (34), (36): Xaa is C or S
XXVPTRLSNITIQIMDSANNVVIGEMSDMVVESXGXR

SEQ ID NO: 36685 - protein, 38 aa, Artificial Sequence
  Non-cyclic GFR-binding peptide
  MOD_RES (2), (3), (36), (38): Xaa is C or S
  MOD_RES (17), (18), (19), (20), (21): Xaa is A or G
  MOD_RES (22), (23), (24), (25): Xaa is A or G or is absent
PXXVPQALSNITIQIMXXXXXXXXXLGEMSMIVRSXKX

SEQ ID NO: 36686 - protein, 37 aa, Artificial Sequence
  Non-cyclic GFR-binding peptide
  MOD_RES (1), (35), (37): Xaa is C or S
  MOD_RES (15), (16), (17), (18), (19): Xaa is A or G
  MOD_RES (20), (21), (22), (23): Xaa is A or G or is absent
XVPTRLSNITIQIMXXXXXXXXXLGEMSDMVVESXGX

SEQ ID NO: 36687 - protein, 36 aa, Artificial Sequence
  Non-cyclic GFR-binding peptide
  MOD_RES (2), (3), (35): Xaa is C or S
SXXVPARLSNITIQIMDAANNVVIGEMSDMVVEAXG

SEQ ID NO: 36688 - protein, 38 aa, Artificial Sequence
  Non-cyclic GFR-binding peptide
  MOD_RES (5), (6): Xaa is C or S
  MOD_RES (20), (21), (22), (23), (24): Xaa is A or G
  MOD_RES (25), (26), (27), (28): Xaa is A or G or is absent
APASXXVPARLSNITIQIMXXXXXXXXXIGEMSDMVVE

SEQ ID NO: 36689 - protein, 41 aa, Artificial Sequence
  Non-cyclic GFR-binding peptide
  MOD_RES (6), (7), (39), (41): Xaa is C or S
STPPTXXVPTRLSNITIQIMDSANNVVLGEMSDMVVESXGX

SEQ ID NO: 36690 - protein, 40 aa, Artificial Sequence
  Non-cyclic GFR-binding peptide
  MOD_RES (2), (3), (37), (39): Xaa is C or S
  MOD_RES (17), (18), (19), (20), (21): Xaa is A or G
  MOD_RES (22), (23), (24), (25): Xaa is A or G or is absent
PXXTPTKMSNITMQIMXXXXXXXXXIGEMSGMVVDRXGXS

SEQ ID NO: 36691 - protein, 39 aa, Artificial Sequence
  Non-cyclic GFR-binding peptide
  MOD_RES (6), (7): Xaa is C or S
  MOD_RES (21), (22), (23), (24), (25): Xaa is A or G
  MOD_RES (26), (27), (28), (29): Xaa is A or G or is absent
AAPASXXVPARLSNITIQIMXXXXXXXXXLGEMSDMVVE

SEQ ID NO: 36692 - protein, 38 aa, Artificial Sequence
  Non-cyclic GFR-binding peptide
  MOD_RES (5), (6), (37): Xaa is C or S
VPSTXXAPVKTSNITMQIMDNGRVLLIGEMSMIVEEXG

SEQ ID NO: 36693 - protein, 35 aa, Artificial Sequence
  Non-cyclic GFR-binding peptide
  MOD_RES (4), (5): Xaa is C or S
PSTXXAPVKTSNITMQIMDNGRVLLIGEMSMIVEE

SEQ ID NO: 36694 - protein, 35 aa, Artificial Sequence
  Non-cyclic GFR-binding peptide
  MOD_RES (1), (2), (33), (35): Xaa is C or S
XXVPQDLSNITIQIMVGRTPKVLGEMSMVVKSXKX

SEQ ID NO: 36695 - protein, 36 aa, Artificial Sequence
  Non-cyclic GFR-binding peptide
  MOD_RES (1), (2), (35): Xaa is C or S
  MOD_RES (16), (17), (18), (19), (20): Xaa is A or G
  MOD_RES (21), (22), (23), (24): Xaa is A or G or is absent
XXAPVKTSNITMQIMXXXXXXXXXIGEMSMIVEEXG

SEQ ID NO: 36696 - protein, 36 aa, Artificial Sequence
  Non-cyclic GFR-binding peptide
  MOD_RES (3), (4), (35): Xaa is C or S
STXXAPVKTSNITMQIMDNGRVLLLGEMSMIVEEXG

SEQ ID NO: 36697 - protein, 33 aa, Artificial Sequence
  Non-cyclic GFR-binding peptide
  MOD_RES (1), (2): Xaa is C or S
XXVPARLSNITIQIMDAANNVVIGEMSDMVVEA

SEQ ID NO: 36698 - protein, 35 aa, Artificial Sequence
  Non-cyclic GFR-binding peptide
  MOD_RES (1), (2), (33), (35): Xaa is C or S
XXVSQDLSNITIQIMIGKTPKILGEMSMIVKSXKX

SEQ ID NO: 36699 - protein, 35 aa, Artificial Sequence
  Non-cyclic GFR-binding peptide
  MOD_RES (4), (5): Xaa is C or S
PSTXXAPVKTSNITMQIMDNGRVLLLGEMSMIVEE

SEQ ID NO: 36700 - protein, 37 aa, Artificial Sequence
  Non-cyclic GFR-binding peptide
  MOD_RES (4), (5), (36): Xaa is C or S
PSTXXAPVKTSNITMQIMDNGRVLLIGEMSMIVEEXG

SEQ ID NO: 36701 - protein, 38 aa, Artificial Sequence
  Non-cyclic GFR-binding peptide
  MOD_RES (1), (35), (37): Xaa is C or S
  MOD_RES (15), (16), (17), (18), (19): Xaa is A or G
  MOD_RES (20), (21), (22), (23): Xaa is A or G or is absent
XAPTKLSNITVQIMXXXXXXXXXLGEMSNMVVRSXGXH

SEQ ID NO: 36702 - protein, 40 aa, Artificial Sequence
  Non-cyclic GFR-binding peptide
  MOD_RES (5), (6), (38), (40): Xaa is C or S
SAGPXXTPTKMSNITMQIMNDKQQIIIGEMSGMVVDRXGX

SEQ ID NO: 36703 - protein, 40 aa, Artificial Sequence
  Non-cyclic GFR-binding peptide
  MOD_RES (6), (7), (39): Xaa is C or S
HVPKPXXAPTKLSNITVQIMDDSSNVILGEMSNMVVRSXG

SEQ ID NO: 36704 - protein, 36 aa, Artificial Sequence
  Non-cyclic GFR-binding peptide
  MOD_RES (2), (3), (36): Xaa is C or S
  MOD_RES (17), (18), (19), (20), (21): Xaa is A or G
  MOD_RES (22), (23), (24), (25): Xaa is A or G or is absent
PXXVPQDLSNITIQIMXXXXXXXXXLGEMSMVVKSX

SEQ ID NO: 36705 - protein, 34 aa, Artificial Sequence
  Non-cyclic GFR-binding peptide
  MOD_RES (3), (4): Xaa is C or S
KPXXAPTKLSNITVQIMDDSSNVILGEMSNMVVR

SEQ ID NO: 36706 - protein, 37 aa, Artificial Sequence
  Non-cyclic GFR-binding peptide
  MOD_RES (1), (2), (35), (37): Xaa is C or S
  MOD_RES (16), (17), (18), (19), (20): Xaa is A or G
  MOD_RES (21), (22), (23), (24): Xaa is A or G or is absent
XXAPVKTSNITMQIMXXXXXXXXXIGEMSMIVEEXGX

SEQ ID NO: 36707 - protein, 34 aa, Artificial Sequence
  Non-cyclic GFR-binding peptide
  MOD_RES (1), (1): Xaa is C or S
  MOD_RES (15), (16), (17), (18), (19): Xaa is A or G
  MOD_RES (20), (21), (22), (23): Xaa is A or G or is absent
XTPTKMSNITMQIMXXXXXXXXXLGEMSGMVVDR

SEQ ID NO: 36708 - protein, 43 aa, Artificial Sequence
  Non-cyclic GFR-binding peptide
  MOD_RES (5), (6), (40), (42): Xaa is C or S
  MOD_RES (20), (21), (22), (23), (24): Xaa is A or G
  MOD_RES (25), (26), (27), (28): Xaa is A or G or is absent
APASXXVPARLSNITIQIMXXXXXXXXXLGEMSDMVVEAXGXR

SEQ ID NO: 36709 - protein, 38 aa, Artificial Sequence
  Non-cyclic GFR-binding peptide
  MOD_RES (4), (5): Xaa is C or S
  MOD_RES (19), (20), (21), (22), (23): Xaa is A or G
  MOD_RES (24), (25), (26), (27): Xaa is A or G or is absent
PPTXXVPTRLSNITIQIMXXXXXXXXXLGEMSDMVVES

SEQ ID NO: 36710 - protein, 36 aa, Artificial Sequence
  Non-cyclic GFR-binding peptide
  MOD_RES (2), (3), (36): Xaa is C or S
  MOD_RES (17), (18), (19), (20), (21): Xaa is A or G
  MOD_RES (22), (23), (24), (25): Xaa is A or G or is absent
PXXVSQDLSNITIQIMXXXXXXXXXLGEMSMIVKSX

SEQ ID NO: 36711 - protein, 32 aa, Artificial Sequence
  Non-cyclic GFR-binding peptide
  MOD_RES (1), (2): Xaa is C or S
XXTPTKMSNITMQIMNDKQQIILGEMSGMVVD

SEQ ID NO: 36712 - protein, 37 aa, Artificial Sequence
  Non-cyclic GFR-binding peptide
  MOD_RES (2), (3), (34), (36): Xaa is C or S
PXXVSQDLSNITIQIMIGKTPKILGEMSMIVKSXKXS

SEQ ID NO: 36713 - protein, 37 aa, Artificial Sequence
  Non-cyclic GFR-binding peptide
  MOD_RES (1), (2), (36): Xaa is C or S
  MOD_RES (16), (17), (18), (19), (20): Xaa is A or G
  MOD_RES (21), (22), (23), (24): Xaa is A or G or is absent
XXVPARLSNITIQIMXXXXXXXXXLGEMSDMVVEAXG

SEQ ID NO: 36714 - protein, 36 aa, Artificial Sequence
  Non-cyclic GFR-binding peptide
  MOD_RES (4), (5): Xaa is C or S
PASXXVPARLSNITIQIMDAANNVVIGEMSDMVVEA

SEQ ID NO: 36715 - protein, 39 aa, Artificial Sequence
  Non-cyclic GFR-binding peptide
  MOD_RES (5), (6), (38): Xaa is C or S
SAGPXXTPTKMSNITMQIMNDKQQIIIGEMSGMVVDRXG

SEQ ID NO: 36716 - protein, 35 aa, Artificial Sequence
  Non-cyclic GFR-binding peptide
  MOD_RES (1), (2), (34): Xaa is C or S
XXVPTRLSNITIQIMDSANNVVIGEMSDMVVESXG

SEQ ID NO: 36717 - protein, 40 aa, Artificial Sequence
  Non-cyclic GFR-binding peptide
  MOD_RES (5), (6), (39): Xaa is C or S
  MOD_RES (20), (21), (22), (23), (24): Xaa is A or G
  MOD_RES (25), (26), (27), (28): Xaa is A or G or is absent
SAAPXXVPQALSNITIQIMXXXXXXXXXLGEMSMIVRSXK

SEQ ID NO: 36718 - protein, 39 aa, Artificial Sequence
  Non-cyclic GFR-binding peptide
  MOD_RES (5), (6), (38): Xaa is C or S
APASXXVPARLSNITIQIMDAANNVVLGEMSDMVVEAXG

SEQ ID NO: 36719 - protein, 32 aa, Artificial Sequence
  Non-cyclic GFR-binding peptide
  MOD_RES (1), (32): Xaa is C or S
XVPQALSNITIQIMVGRKPKVLGEMSMIVRSX

SEQ ID NO: 36720 - protein, 39 aa, Artificial Sequence
  Non-cyclic GFR-binding peptide
  MOD_RES (3), (4), (36), (38): Xaa is C or S
KPXXAPTKLSNITVQIMDDSSNVILGEMSNMVVRSXGXH

SEQ ID NO: 36721 - protein, 31 aa, Artificial Sequence
  Non-cyclic GFR-binding peptide
  MOD_RES (1), (1): Xaa is C or S
XVPTRLSNITIQIMDSANNVVIGEMSDMVVE

SEQ ID NO: 36722 - protein, 32 aa, Artificial Sequence
  Non-cyclic GFR-binding peptide
  MOD_RES (32), (32): Xaa is C or S
TPTKMSNITMQIMNDKQQIILGEMSGMVVDRX

SEQ ID NO: 36723 - protein, 40 aa, Artificial Sequence
  Non-cyclic GFR-binding peptide
  MOD_RES (5), (6), (38), (40): Xaa is C or S
TPPTXXVPTRLSNITIQIMDSANNVVLGEMSDMVVESXGX

SEQ ID NO: 36724 - protein, 37 aa, Artificial Sequence
  Non-cyclic GFR-binding peptide
  MOD_RES (2), (3), (35), (37): Xaa is C or S
TXXVPTRLSNITIQIMDSANNVVLGEMSDMVVESXGX

SEQ ID NO: 36725 - protein, 39 aa, Artificial Sequence
  Non-cyclic GFR-binding peptide
  MOD_RES (3), (4), (36), (38): Xaa is C or S
GPXXTPTKMSNITMQIMNDKQQIILGEMSGMVVDRXGXS

SEQ ID NO: 36726 - protein, 34 aa, Artificial Sequence
  Non-cyclic GFR-binding peptide
  MOD_RES (3), (4): Xaa is C or S
SPXXVSQDLSNITIQIMIGKTPKILGEMSMIVKS

SEQ ID NO: 36727 - protein, 35 aa, Artificial Sequence
  Non-cyclic GFR-binding peptide
  MOD_RES (2), (3): Xaa is C or S
  MOD_RES (17), (18), (19), (20), (21): Xaa is A or G
  MOD_RES (22), (23), (24), (25): Xaa is A or G or is absent
SXXVPARLSNITIQIMXXXXXXXXXLGEMSDMVVE

SEQ ID NO: 36728 - protein, 41 aa, Artificial Sequence
  Non-cyclic GFR-binding peptide
  MOD_RES (5), (6), (39), (41): Xaa is C or S
  MOD_RES (20), (21), (22), (23), (24): Xaa is A or G
  MOD_RES (25), (26), (27), (28): Xaa is A or G or is absent
VPSTXXAPVKTSNITMQIMXXXXXXXXXLGEMSMIVEEXGX

SEQ ID NO: 36729 - protein, 33 aa, Artificial Sequence
  Non-cyclic GFR-binding peptide
  MOD_RES (1), (33): Xaa is C or S
XAPTKLSNITVQIMDDSSNVILGEMSNMVVRSX

SEQ ID NO: 36730 - protein, 39 aa, Artificial Sequence
  Non-cyclic GFR-binding peptide
  MOD_RES (5), (6), (37), (39): Xaa is C or S
VPSTXXAPVKTSNITMQIMDNGRVLLLGEMSMIVEEXGX

SEQ ID NO: 36731 - protein, 39 aa, Artificial Sequence
  Non-cyclic GFR-binding peptide
  MOD_RES (5), (6), (38): Xaa is C or S
TPPTXXVPTRLSNITIQIMDSANNVVLGEMSDMVVESXG

SEQ ID NO: 36732 - protein, 33 aa, Artificial Sequence
  Non-cyclic GFR-binding peptide
  MOD_RES (14), (15), (16), (17), (18): Xaa is A or G
  MOD_RES (19), (20), (21), (22): Xaa is A or G or is absent
TPTKMSNITMQIMXXXXXXXXXIGEMSGMVVDR

SEQ ID NO: 36733 - protein, 36 aa, Artificial Sequence
  Non-cyclic GFR-binding peptide
  MOD_RES (2), (3): Xaa is C or S
  MOD_RES (17), (18), (19), (20), (21): Xaa is A or G
  MOD_RES (22), (23), (24), (25): Xaa is A or G or is absent
TXXVPTRLSNITIQIMXXXXXXXXXLGEMSDMVVES

SEQ ID NO: 36734 - protein, 37 aa, Artificial Sequence
  Non-cyclic GFR-binding peptide
  MOD_RES (2), (3), (37): Xaa is C or S
  MOD_RES (17), (18), (19), (20), (21): Xaa is A or G
  MOD_RES (22), (23), (24), (25): Xaa is A or G or is absent
PXXAPTKLSNITVQIMXXXXXXXXXLGEMSNMVVRSX

SEQ ID NO: 36735 - protein, 37 aa, Artificial Sequence
  Non-cyclic GFR-binding peptide
  MOD_RES (3), (4), (35), (37): Xaa is C or S
SPXXVPQDLSNITIQIMVGRTPKVLGEMSMVVKSXKX

SEQ ID NO: 36736 - protein, 38 aa, Artificial Sequence
  Non-cyclic GFR-binding peptide
  MOD_RES (3), (4), (36), (38): Xaa is C or S
KPXXAPTKLSNITVQIMDDSSNVILGEMSNMVVRSXGX

SEQ ID NO: 36737 - protein, 43 aa, Artificial Sequence
  Non-cyclic GFR-binding peptide
  MOD_RES (6), (7), (41), (43): Xaa is C or S
  MOD_RES (21), (22), (23), (24), (25): Xaa is A or G
  MOD_RES (26), (27), (28), (29): Xaa is A or G or is absent
GSAGPXXTPTKMSNITMQIMXXXXXXXXXLGEMSGMVVDRXGX

SEQ ID NO: 36738 - protein, 35 aa, Artificial Sequence
  Non-cyclic GFR-binding peptide
  MOD_RES (1), (2): Xaa is C or S
  MOD_RES (16), (17), (18), (19), (20): Xaa is A or G
  MOD_RES (21), (22), (23), (24): Xaa is A or G or is absent
XXAPTKLSNITVQIMXXXXXXXXXLGEMSNMVVRS

SEQ ID NO: 36739 - protein, 38 aa, Artificial Sequence
  Non-cyclic GFR-binding peptide
  MOD_RES (2), (3), (36), (38): Xaa is C or S
  MOD_RES (17), (18), (19), (20), (21): Xaa is A or G
  MOD_RES (22), (23), (24), (25): Xaa is A or G or is absent
PXXVPQDLSNITIQIMXXXXXXXXXLGEMSMVVKSXKX

SEQ ID NO: 36740 - protein, 38 aa, Artificial Sequence
  Non-cyclic GFR-binding peptide
  MOD_RES (4), (5), (38): Xaa is C or S
  MOD_RES (19), (20), (21), (22), (23): Xaa is A or G
  MOD_RES (24), (25), (26), (27): Xaa is A or G or is absent
ASPXXVPQDLSNITIQIMXXXXXXXXXLGEMSMVVKSX

SEQ ID NO: 36741 - protein, 33 aa, Artificial Sequence
  Non-cyclic GFR-binding peptide
  MOD_RES (1), (2): Xaa is C or S
XXVPTRLSNITIQIMDSANNVVIGEMSDMVVES

SEQ ID NO: 36742 - protein, 33 aa, Artificial Sequence
  Non-cyclic GFR-binding peptide
  MOD_RES (2), (3): Xaa is C or S
TXXVPTRLSNITIQIMDSANNVVLGEMSDMVVE

SEQ ID NO: 36743 - protein, 43 aa, Artificial Sequence
  Non-cyclic GFR-binding peptide
  MOD_RES (6), (7), (40), (42): Xaa is C or S
  MOD_RES (21), (22), (23), (24), (25): Xaa is A or G
  MOD_RES (26), (27), (28), (29): Xaa is A or G or is absent
RVPSTXXAPVKTSNITMQIMXXXXXXXXXIGEMSMIVEEXGXL

SEQ ID NO: 36744 - protein, 37 aa, Artificial Sequence
  Non-cyclic GFR-binding peptide
  MOD_RES (1), (34), (36): Xaa is C or S
  MOD_RES (15), (16), (17), (18), (19): Xaa is A or G
  MOD_RES (20), (21), (22), (23): Xaa is A or G or is absent
XVPQDLSNITIQIMXXXXXXXXXLGEMSMVVKSXKXS

SEQ ID NO: 36745 - protein, 31 aa, Artificial Sequence
  Non-cyclic GFR-binding peptide
  MOD_RES (1), (1): Xaa is C or S
XVPQDLSNITIQIMVGRTPKVLGEMSMVVKS

SEQ ID NO: 36746 - protein, 40 aa, Artificial Sequence
  Non-cyclic GFR-binding peptide
  MOD_RES (6), (7), (38), (40): Xaa is C or S
RVPSTXXAPVKTSNITMQIMDNGRVLLIGEMSMIVEEXGX

SEQ ID NO: 36747 - protein, 39 aa, Artificial Sequence
  Non-cyclic GFR-binding peptide
  MOD_RES (6), (7), (39): Xaa is C or S
AAPASXXVPARLSNITIQIMDAANNVVIGEMSDMVVEAX

SEQ ID NO: 36748 - protein, 37 aa, Artificial Sequence
  Non-cyclic GFR-binding peptide
  MOD_RES (1), (35), (37): Xaa is C or S
  MOD_RES (15), (16), (17), (18), (19): Xaa is A or G
  MOD_RES (20), (21), (22), (23): Xaa is A or G or is absent
XVPARLSNITIQIMXXXXXXXXXLGEMSDMVVEAXGX

SEQ ID NO: 36749 - protein, 38 aa, Artificial Sequence
  Non-cyclic GFR-binding peptide
  MOD_RES (5), (6), (37): Xaa is C or S
SAAPXXVPQALSNITIQIMVGRKPKVLGEMSMIVRSXK

SEQ ID NO: 36750 - protein, 41 aa, Artificial Sequence
  Non-cyclic GFR-binding peptide
  MOD_RES (5), (6), (40): Xaa is C or S
  MOD_RES (20), (21), (22), (23), (24): Xaa is A or G
  MOD_RES (25), (26), (27), (28): Xaa is A or G or is absent
SAGPXXTPTKMSNITMQIMXXXXXXXXXLGEMSGMVVDRXG

SEQ ID NO: 36751 - protein, 33 aa, Artificial Sequence
  Non-cyclic GFR-binding peptide
  MOD_RES (1), (2), (33): Xaa is C or S
XXVSQDLSNITIQIMIGKTPKILGEMSMIVKSX

SEQ ID NO: 36752 - protein, 41 aa, Artificial Sequence
  Non-cyclic GFR-binding peptide
  MOD_RES (5), (6), (38), (40): Xaa is C or S
SAGPXXTPTKMSNITMQIMNDKQQIILGEMSGMVVDRXGXS

SEQ ID NO: 36753 - protein, 38 aa, Artificial Sequence
  Non-cyclic GFR-binding peptide
  MOD_RES (3), (4), (38): Xaa is C or S
  MOD_RES (18), (19), (20), (21), (22): Xaa is A or G
  MOD_RES (23), (24), (25), (26): Xaa is A or G or is absent
ASXXVPARLSNITIQIMXXXXXXXXXIGEMSDMVVEAX

SEQ ID NO: 36754 - protein, 36 aa, Artificial Sequence
  Non-cyclic GFR-binding peptide
  MOD_RES (5), (6): Xaa is C or S
SASPXXVSQDLSNITIQIMIGKTPKILGEMSMIVKS

SEQ ID NO: 36755 - protein, 38 aa, Artificial Sequence
  Non-cyclic GFR-binding peptide
  MOD_RES (3), (4), (37): Xaa is C or S
  MOD_RES (18), (19), (20), (21), (22): Xaa is A or G
  MOD_RES (23), (24), (25), (26): Xaa is A or G or is absent
APXXVPQALSNITIQIMXXXXXXXXXLGEMSMIVRSXK

SEQ ID NO: 36756 - protein, 32 aa, Artificial Sequence
  Non-cyclic GFR-binding peptide
  MOD_RES (14), (15), (16), (17), (18): Xaa is A or G
  MOD_RES (19), (20), (21), (22): Xaa is A or G or is absent
VPTRLSNITIQIMXXXXXXXXXLGEMSDMVVE

SEQ ID NO: 36757 - protein, 42 aa, Artificial Sequence
  Non-cyclic GFR-binding peptide
  MOD_RES (5), (6), (39), (41): Xaa is C or S
  MOD_RES (20), (21), (22), (23), (24): Xaa is A or G
  MOD_RES (25), (26), (27), (28): Xaa is A or G or is absent
VPSTXXAPVKTSNITMQIMXXXXXXXXXIGEMSMIVEEXGXL

SEQ ID NO: 36758 - protein, 38 aa, Artificial Sequence
  Non-cyclic GFR-binding peptide
  MOD_RES (6), (7), (38): Xaa is C or S
ASAAPXXVPQALSNITIQIMVGRKPKVLGEMSMIVRSX

SEQ ID NO: 36759 - protein, 40 aa, Artificial Sequence
  Non-cyclic GFR-binding peptide
  MOD_RES (5), (6), (37), (39): Xaa is C or S
VPSTXXAPVKTSNITMQIMDNGRVLLIGEMSMIVEEXGXL

SEQ ID NO: 36760 - protein, 42 aa, Artificial Sequence
  Non-cyclic GFR-binding peptide
  MOD_RES (6), (7), (41): Xaa is C or S
  MOD_RES (21), (22), (23), (24), (25): Xaa is A or G
  MOD_RES (26), (27), (28), (29): Xaa is A or G or is absent
AAPASXXVPARLSNITIQIMXXXXXXXXXLGEMSDMVVEAXG

SEQ ID NO: 36761 - protein, 36 aa, Artificial Sequence
  Non-cyclic GFR-binding peptide
  MOD_RES (1), (2), (36): Xaa is C or S
  MOD_RES (16), (17), (18), (19), (20): Xaa is A or G
  MOD_RES (21), (22), (23), (24): Xaa is A or G or is absent
XXTPTKMSNITMQIMXXXXXXXXXLGEMSGMVVDRX

SEQ ID NO: 36762 - protein, 36 aa, Artificial Sequence
  Non-cyclic GFR-binding peptide
  MOD_RES (5), (6): Xaa is C or S
VPSTXXAPVKTSNITMQIMDNGRVLLIGEMSMIVEE

SEQ ID NO: 36763 - protein, 37 aa, Artificial Sequence
  Non-cyclic GFR-binding peptide
  MOD_RES (1), (35), (37): Xaa is C or S
  MOD_RES (15), (16), (17), (18), (19): Xaa is A or G
  MOD_RES (20), (21), (22), (23): Xaa is A or G or is absent
XTPTKMSNITMQIMXXXXXXXXXIGEMSGMVVDRXGX

SEQ ID NO: 36764 - protein, 40 aa, Artificial Sequence
  Non-cyclic GFR-binding peptide
  MOD_RES (3), (4), (37), (39): Xaa is C or S
  MOD_RES (18), (19), (20), (21), (22): Xaa is A or G
  MOD_RES (23), (24), (25), (26): Xaa is A or G or is absent
SPXXVSQDLSNITIQIMXXXXXXXXXLGEMSMIVKSXKXS

SEQ ID NO: 36765 - protein, 39 aa, Artificial Sequence
  Non-cyclic GFR-binding peptide
  MOD_RES (5), (6), (37), (39): Xaa is C or S
SASPXXVPQDLSNITIQIMVGRTPKVLGEMSMVVKSXKX

SEQ ID NO: 36766 - protein, 39 aa, Artificial Sequence
  Non-cyclic GFR-binding peptide
  MOD_RES (2), (3), (37), (39): Xaa is C or S
  MOD_RES (17), (18), (19), (20), (21): Xaa is A or G
  MOD_RES (22), (23), (24), (25): Xaa is A or G or is absent
PXXTPTKMSNITMQIMXXXXXXXXXIGEMSGMVVDRXGX

SEQ ID NO: 36767 - protein, 39 aa, Artificial Sequence
  Non-cyclic GFR-binding peptide
  MOD_RES (3), (4), (38): Xaa is C or S
  MOD_RES (18), (19), (20), (21), (22): Xaa is A or G
  MOD_RES (23), (24), (25), (26): Xaa is A or G or is absent
GPXXTPTKMSNITMQIMXXXXXXXXXLGEMSGMVVDRXG

SEQ ID NO: 36768 - protein, 38 aa, Artificial Sequence
  Non-cyclic GFR-binding peptide
  MOD_RES (2), (3), (35), (37): Xaa is C or S
SXXVPARLSNITIQIMDAANNVVLGEMSDMVVEAXGXR

SEQ ID NO: 36769 - protein, 35 aa, Artificial Sequence
  Non-cyclic GFR-binding peptide
  MOD_RES (2), (3), (34): Xaa is C or S
TXXAPVKTSNITMQIMDNGRVLLLGEMSMIVEEXG

SEQ ID NO: 36770 - protein, 39 aa, Artificial Sequence
  Non-cyclic GFR-binding peptide
  MOD_RES (6), (7): Xaa is C or S
  MOD_RES (21), (22), (23), (24), (25): Xaa is A or G
  MOD_RES (26), (27), (28), (29): Xaa is A or G or is absent
ASAAPXXVPQALSNITIQIMXXXXXXXXXLGEMSMIVRS

SEQ ID NO: 36771 - protein, 37 aa, Artificial Sequence
  Non-cyclic GFR-binding peptide
  MOD_RES (4), (5), (36): Xaa is C or S
ASPXXVSQDLSNITIQIMIGKTPKILGEMSMIVKSXK

SEQ ID NO: 36772 - protein, 35 aa, Artificial Sequence
  Non-cyclic GFR-binding peptide
  MOD_RES (1), (35): Xaa is C or S
  MOD_RES (15), (16), (17), (18), (19): Xaa is A or G
  MOD_RES (20), (21), (22), (23): Xaa is A or G or is absent
XTPTKMSNITMQIMXXXXXXXXXLGEMSGMVVDRX

SEQ ID NO: 36773 - protein, 32 aa, Artificial Sequence
  Non-cyclic GFR-binding peptide
  MOD_RES (1), (1): Xaa is C or S
XAPTKLSNITVQIMDDSSNVILGEMSNMVVRS

SEQ ID NO: 36774 - protein, 39 aa, Artificial Sequence
  Non-cyclic GFR-binding peptide
  MOD_RES (5), (6), (37), (39): Xaa is C or S
VPSTXXAPVKTSNITMQIMDNGRVLLIGEMSMIVEEXGX

SEQ ID NO: 36775 - protein, 41 aa, Artificial Sequence
  Non-cyclic GFR-binding peptide
  MOD_RES (6), (7), (41): Xaa is C or S
  MOD_RES (21), (22), (23), (24), (25): Xaa is A or G
  MOD_RES (26), (27), (28), (29): Xaa is A or G or is absent
AAPASXXVPARLSNITIQIMXXXXXXXXXLGEMSDMVVEAX

SEQ ID NO: 36776 - protein, 44 aa, Artificial Sequence
  Non-cyclic GFR-binding peptide
  MOD_RES (6), (7), (41), (43): Xaa is C or S
  MOD_RES (21), (22), (23), (24), (25): Xaa is A or G
  MOD_RES (26), (27), (28), (29): Xaa is A or G or is absent
HVPKPXXAPTKLSNITVQIMXXXXXXXXXLGEMSNMVVRSXGXH

SEQ ID NO: 36777 - protein, 35 aa, Artificial Sequence
  Non-cyclic GFR-binding peptide
  MOD_RES (33), (35): Xaa is C or S
  MOD_RES (14), (15), (16), (17), (18): Xaa is A or G
  MOD_RES (19), (20), (21), (22): Xaa is A or G or is absent
APVKTSNITMQIMXXXXXXXXXIGEMSMIVEEXGX

SEQ ID NO: 36778 - protein, 32 aa, Artificial Sequence
  Non-cyclic GFR-binding peptide
  MOD_RES (14), (15), (16), (17), (18): Xaa is A or G
  MOD_RES (19), (20), (21), (22): Xaa is A or G or is absent
APVKTSNITMQIMXXXXXXXXXIGEMSMIVEE

SEQ ID NO: 36779 - protein, 36 aa, Artificial Sequence
  Non-cyclic GFR-binding peptide
  MOD_RES (3), (4): Xaa is C or S
  MOD_RES (18), (19), (20), (21), (22): Xaa is A or G
  MOD_RES (23), (24), (25), (26): Xaa is A or G or is absent
PTXXVPTRLSNITIQIMXXXXXXXXXIGEMSDMVVE

SEQ ID NO: 36780 - protein, 37 aa, Artificial Sequence
  Non-cyclic GFR-binding peptide
  MOD_RES (6), (7): Xaa is C or S
GSAGPXXTPTKMSNITMQIMNDKQQIILGEMSGMVVD

SEQ ID NO: 36781 - protein, 39 aa, Artificial Sequence
  Non-cyclic GFR-binding peptide
  MOD_RES (6), (7), (39): Xaa is C or S
GSAGPXXTPTKMSNITMQIMNDKQQIILGEMSGMVVDRX

SEQ ID NO: 36782 - protein, 37 aa, Artificial Sequence
  Non-cyclic GFR-binding peptide
  MOD_RES (4), (5), (37): Xaa is C or S
AGPXXTPTKMSNITMQIMNDKQQIIIGEMSGMVVDRX

SEQ ID NO: 36783 - protein, 42 aa, Artificial Sequence
  Non-cyclic GFR-binding peptide
  MOD_RES (5), (6), (39), (41): Xaa is C or S
  MOD_RES (20), (21), (22), (23), (24): Xaa is A or G
  MOD_RES (25), (26), (27), (28): Xaa is A or G or is absent
SASPXXVPQDLSNITIQIMXXXXXXXXXLGEMSMVVKSXKXS

SEQ ID NO: 36784 - protein, 31 aa, Artificial Sequence
  Non-cyclic GFR-binding peptide
  MOD_RES (1), (1): Xaa is C or S
XAPVKTSNITMQIMDNGRVLLIGEMSMIVEE

SEQ ID NO: 36785 - protein, 36 aa, Artificial Sequence
  Non-cyclic GFR-binding peptide
  MOD_RES (4), (5): Xaa is C or S
AGPXXTPTKMSNITMQIMNDKQQIIIGEMSGMVVDR

SEQ ID NO: 36786 - protein, 40 aa, Artificial Sequence
  Non-cyclic GFR-binding peptide
  MOD_RES (6), (7): Xaa is C or S
  MOD_RES (21), (22), (23), (24), (25): Xaa is A or G
  MOD_RES (26), (27), (28), (29): Xaa is A or G or is absent
GSAGPXXTPTKMSNITMQIMXXXXXXXXXIGEMSGMVVDR

SEQ ID NO: 36787 - protein, 36 aa, Artificial Sequence
  Non-cyclic GFR-binding peptide
  MOD_RES (1), (33), (35): Xaa is C or S
XVPTRLSNITIQIMDSANNVVIGEMSDMVVESXGXR

SEQ ID NO: 36788 - protein, 40 aa, Artificial Sequence
  Non-cyclic GFR-binding peptide
  MOD_RES (6), (7), (38), (40): Xaa is C or S
ASASPXXVSQDLSNITIQIMIGKTPKILGEMSMIVKSXKX

SEQ ID NO: 36789 - protein, 41 aa, Artificial Sequence
  Non-cyclic GFR-binding peptide
  MOD_RES (4), (5), (38), (40): Xaa is C or S
  MOD_RES (19), (20), (21), (22), (23): Xaa is A or G
  MOD_RES (24), (25), (26), (27): Xaa is A or G or is absent
PSTXXAPVKTSNITMQIMXXXXXXXXXLGEMSMIVEEXGXL

SEQ ID NO: 36790 - protein, 32 aa, Artificial Sequence
  Non-cyclic GFR-binding peptide
  MOD_RES (1), (2): Xaa is C or S
XXAPVKTSNITMQIMDNGRVLLIGEMSMIVEE

SEQ ID NO: 36791 - protein, 36 aa, Artificial Sequence
  Non-cyclic GFR-binding peptide
  MOD_RES (3), (4), (36): Xaa is C or S
GPXXTPTKMSNITMQIMNDKQQIILGEMSGMVVDRX

SEQ ID NO: 36792 - protein, 40 aa, Artificial Sequence
  Non-cyclic GFR-binding peptide
  MOD_RES (6), (7), (38), (40): Xaa is C or S
RVPSTXXAPVKTSNITMQIMDNGRVLLLGEMSMIVEEXGX

SEQ ID NO: 36793 - protein, 40 aa, Artificial Sequence
  Non-cyclic GFR-binding peptide
  MOD_RES (5), (6), (39): Xaa is C or S
  MOD_RES (20), (21), (22), (23), (24): Xaa is A or G
  MOD_RES (25), (26), (27), (28): Xaa is A or G or is absent
VPSTXXAPVKTSNITMQIMXXXXXXXXXLGEMSMIVEEXG

SEQ ID NO: 36794 - protein, 35 aa, Artificial Sequence
  Non-cyclic GFR-binding peptide
  MOD_RES (32), (34): Xaa is C or S
VPARLSNITIQIMDAANNVVLGEMSDMVVEAXGXR

SEQ ID NO: 36795 - protein, 33 aa, Artificial Sequence
  Non-cyclic GFR-binding peptide
  MOD_RES (1), (1): Xaa is C or S
  MOD_RES (15), (16), (17), (18), (19): Xaa is A or G
  MOD_RES (20), (21), (22), (23): Xaa is A or G or is absent
XVPQALSNITIQIMXXXXXXXXXLGEMSMIVRS

SEQ ID NO: 36796 - protein, 34 aa, Artificial Sequence
  Non-cyclic GFR-binding peptide
  MOD_RES (1), (34): Xaa is C or S
  MOD_RES (15), (16), (17), (18), (19): Xaa is A or G
  MOD_RES (20), (21), (22), (23): Xaa is A or G or is absent
XVPQDLSNITIQIMXXXXXXXXXLGEMSMVVKSX

SEQ ID NO: 36797 - protein, 36 aa, Artificial Sequence
  Non-cyclic GFR-binding peptide
  MOD_RES (2), (3), (35): Xaa is C or S
PXXTPTKMSNITMQIMNDKQQIIIGEMSGMVVDRXG

SEQ ID NO: 36798 - protein, 33 aa, Artificial Sequence
  Non-cyclic GFR-binding peptide
  MOD_RES (1), (33): Xaa is C or S
XVPTRLSNITIQIMDSANNVVLGEMSDMVVESX

SEQ ID NO: 36799 - protein, 38 aa, Artificial Sequence
  Non-cyclic GFR-binding peptide
  MOD_RES (5), (6): Xaa is C or S
  MOD_RES (20), (21), (22), (23), (24): Xaa is A or G
  MOD_RES (25), (26), (27), (28): Xaa is A or G or is absent
TPPTXXVPTRLSNITIQIMXXXXXXXXXLGEMSDMVVE

SEQ ID NO: 36800 - protein, 39 aa, Artificial Sequence
  Non-cyclic GFR-binding peptide
  MOD_RES (6), (7), (39): Xaa is C or S
STPPTXXVPTRLSNITIQIMDSANNVVLGEMSDMVVESX

SEQ ID NO: 36801 - protein, 43 aa, Artificial Sequence
  Non-cyclic GFR-binding peptide
  MOD_RES (6), (7), (41), (43): Xaa is C or S
  MOD_RES (21), (22), (23), (24), (25): Xaa is A or G
  MOD_RES (26), (27), (28), (29): Xaa is A or G or is absent
AAPASXXVPARLSNITIQIMXXXXXXXXXIGEMSDMVVEAXGX

SEQ ID NO: 36802 - protein, 38 aa, Artificial Sequence
  Non-cyclic GFR-binding peptide
  MOD_RES (2), (3), (36), (38): Xaa is C or S
  MOD_RES (17), (18), (19), (20), (21): Xaa is A or G
  MOD_RES (22), (23), (24), (25): Xaa is A or G or is absent
TXXAPVKTSNITMQIMXXXXXXXXXIGEMSMIVEEXGX

SEQ ID NO: 36803 - protein, 37 aa, Artificial Sequence
  Non-cyclic GFR-binding peptide
  MOD_RES (2), (3), (36): Xaa is C or S
  MOD_RES (17), (18), (19), (20), (21): Xaa is A or G
  MOD_RES (22), (23), (24), (25): Xaa is A or G or is absent
PXXVPQDLSNITIQIMXXXXXXXXXLGEMSMVVKSXK

SEQ ID NO: 36804 - protein, 36 aa, Artificial Sequence
  Non-cyclic GFR-binding peptide
  MOD_RES (34), (36): Xaa is C or S
  MOD_RES (14), (15), (16), (17), (18): Xaa is A or G
  MOD_RES (19), (20), (21), (22): Xaa is A or G or is absent
VPTRLSNITIQIMXXXXXXXXXIGEMSDMVVESXGX

SEQ ID NO: 36805 - protein, 36 aa, Artificial Sequence
  Non-cyclic GFR-binding peptide
  MOD_RES (1), (2), (36): Xaa is C or S
  MOD_RES (16), (17), (18), (19), (20): Xaa is A or G
  MOD_RES (21), (22), (23), (24): Xaa is A or G or is absent
XXVPTRLSNITIQIMXXXXXXXXXIGEMSDMVVESX

SEQ ID NO: 36806 - protein, 32 aa, Artificial Sequence
  Non-cyclic GFR-binding peptide
  MOD_RES (14), (15), (16), (17), (18): Xaa is A or G
  MOD_RES (19), (20), (21), (22): Xaa is A or G or is absent
VPQALSNITIQIMXXXXXXXXXLGEMSMIVRS

SEQ ID NO: 36807 - protein, 38 aa, Artificial Sequence
  Non-cyclic GFR-binding peptide
  MOD_RES (4), (5): Xaa is C or S
  MOD_RES (19), (20), (21), (22), (23): Xaa is A or G
  MOD_RES (24), (25), (26), (27): Xaa is A or G or is absent
PKPXXAPTKLSNITVQIMXXXXXXXXXLGEMSNMVVRS

SEQ ID NO: 36808 - protein, 32 aa, Artificial Sequence
  Non-cyclic GFR-binding peptide
  MOD_RES (14), (15), (16), (17), (18): Xaa is A or G
  MOD_RES (19), (20), (21), (22): Xaa is A or G or is absent
VPARLSNITIQIMXXXXXXXXXLGEMSDMVVE

SEQ ID NO: 36809 - protein, 38 aa, Artificial Sequence
  Non-cyclic GFR-binding peptide
  MOD_RES (2), (3), (37): Xaa is C or S
  MOD_RES (17), (18), (19), (20), (21): Xaa is A or G
  MOD_RES (22), (23), (24), (25): Xaa is A or G or is absent
PXXTPTKMSNITMQIMXXXXXXXXXLGEMSGMVVDRXG

SEQ ID NO: 36810 - protein, 36 aa, Artificial Sequence
  Non-cyclic GFR-binding peptide
  MOD_RES (3), (4): Xaa is C or S
  MOD_RES (18), (19), (20), (21), (22): Xaa is A or G
  MOD_RES (23), (24), (25), (26): Xaa is A or G or is absent
APXXVPQALSNITIQIMXXXXXXXXXLGEMSMIVRS

SEQ ID NO: 36811 - protein, 40 aa, Artificial Sequence
  Non-cyclic GFR-binding peptide
  MOD_RES (3), (4), (38), (40): Xaa is C or S
  MOD_RES (18), (19), (20), (21), (22): Xaa is A or G
  MOD_RES (23), (24), (25), (26): Xaa is A or G or is absent
ASXXVPARLSNITIQIMXXXXXXXXXLGEMSDMVVEAXGX

SEQ ID NO: 36812 - protein, 33 aa, Artificial Sequence
  Non-cyclic GFR-binding peptide
  MOD_RES (1), (32): Xaa is C or S
XVPQDLSNITIQIMVGRTPKVLGEMSMVVKSXK

SEQ ID NO: 36813 - protein, 42 aa, Artificial Sequence
  Non-cyclic GFR-binding peptide
  MOD_RES (6), (7), (41): Xaa is C or S
  MOD_RES (21), (22), (23), (24), (25): Xaa is A or G
  MOD_RES (26), (27), (28), (29): Xaa is A or G or is absent
STPPTXXVPTRLSNITIQIMXXXXXXXXXIGEMSDMVVESXG

SEQ ID NO: 36814 - protein, 34 aa, Artificial Sequence
  Non-cyclic GFR-binding peptide
  MOD_RES (2), (3): Xaa is C or S
PXXAPTKLSNITVQIMDDSSNVILGEMSNMVVRS

SEQ ID NO: 36815 - protein, 32 aa, Artificial Sequence
  Non-cyclic GFR-binding peptide
  MOD_RES (31), (31): Xaa is C or S
APVKTSNITMQIMDNGRVLLIGEMSMIVEEXG

SEQ ID NO: 36816 - protein, 35 aa, Artificial Sequence
  Non-cyclic GFR-binding peptide
  MOD_RES (2), (3): Xaa is C or S
  MOD_RES (17), (18), (19), (20), (21): Xaa is A or G
  MOD_RES (22), (23), (24), (25): Xaa is A or G or is absent
TXXVPTRLSNITIQIMXXXXXXXXXLGEMSDMVVE

SEQ ID NO: 36817 - protein, 41 aa, Artificial Sequence
  Non-cyclic GFR-binding peptide
  MOD_RES (6), (7), (41): Xaa is C or S
  MOD_RES (21), (22), (23), (24), (25): Xaa is A or G
  MOD_RES (26), (27), (28), (29): Xaa is A or G or is absent
STPPTXXVPTRLSNITIQIMXXXXXXXXXIGEMSDMVVESX

SEQ ID NO: 36818 - protein, 40 aa, Artificial Sequence
  Non-cyclic GFR-binding peptide
  MOD_RES (3), (4), (38), (40): Xaa is C or S
  MOD_RES (18), (19), (20), (21), (22): Xaa is A or G
  MOD_RES (23), (24), (25), (26): Xaa is A or G or is absent
KPXXAPTKLSNITVQIMXXXXXXXXXLGEMSNMVVRSXGX

SEQ ID NO: 36819 - protein, 35 aa, Artificial Sequence
  Non-cyclic GFR-binding peptide
  MOD_RES (1), (34): Xaa is C or S
  MOD_RES (15), (16), (17), (18), (19): Xaa is A or G
  MOD_RES (20), (21), (22), (23): Xaa is A or G or is absent
XAPVKTSNITMQIMXXXXXXXXXIGEMSMIVEEXG

SEQ ID NO: 36820 - protein, 36 aa, Artificial Sequence
  Non-cyclic GFR-binding peptide
  MOD_RES (3), (4): Xaa is C or S
  MOD_RES (18), (19), (20), (21), (22): Xaa is A or G
  MOD_RES (23), (24), (25), (26): Xaa is A or G or is absent
STXXAPVKTSNITMQIMXXXXXXXXXLGEMSMIVEE

SEQ ID NO: 36821 - protein, 36 aa, Artificial Sequence
  Non-cyclic GFR-binding peptide
  MOD_RES (4), (5): Xaa is C or S
PPTXXVPTRLSNITIQIMDSANNVVLGEMSDMVVES

SEQ ID NO: 36822 - protein, 41 aa, Artificial Sequence
  Non-cyclic GFR-binding peptide
  MOD_RES (4), (5), (39), (41): Xaa is C or S
  MOD_RES (19), (20), (21), (22), (23): Xaa is A or G
  MOD_RES (24), (25), (26), (27): Xaa is A or G or is absent
AGPXXTPTKMSNITMQIMXXXXXXXXXLGEMSGMVVDRXGX

SEQ ID NO: 36823 - protein, 41 aa, Artificial Sequence
  Non-cyclic GFR-binding peptide
  MOD_RES (6), (7), (40): Xaa is C or S
  MOD_RES (21), (22), (23), (24), (25): Xaa is A or G
  MOD_RES (26), (27), (28), (29): Xaa is A or G or is absent
RVPSTXXAPVKTSNITMQIMXXXXXXXXXLGEMSMIVEEXG

SEQ ID NO: 36824 - protein, 33 aa, Artificial Sequence
  Non-cyclic GFR-binding peptide
  MOD_RES (1), (32): Xaa is C or S
XVSQDLSNITIQIMIGKTPKILGEMSMIVKSXK

SEQ ID NO: 36825 - protein, 41 aa, Artificial Sequence
  Non-cyclic GFR-binding peptide
  MOD_RES (4), (5), (39), (41): Xaa is C or S
  MOD_RES (19), (20), (21), (22), (23): Xaa is A or G
  MOD_RES (24), (25), (26), (27): Xaa is A or G or is absent
PASXXVPARLSNITIQIMXXXXXXXXXIGEMSDMVVEAXGX

SEQ ID NO: 36826 - protein, 38 aa, Artificial Sequence
  Non-cyclic GFR-binding peptide
  MOD_RES (1), (2), (35), (37): Xaa is C or S
  MOD_RES (16), (17), (18), (19), (20): Xaa is A or G
  MOD_RES (21), (22), (23), (24): Xaa is A or G or is absent
XXVSQDLSNITIQIMXXXXXXXXXLGEMSMIVKSXKXS

SEQ ID NO: 36827 - protein, 33 aa, Artificial Sequence
  Non-cyclic GFR-binding peptide
  MOD_RES (2), (3): Xaa is C or S
PXXVPQALSNITIQIMVGRKPKVLGEMSMIVRS

SEQ ID NO: 36828 - protein, 40 aa, Artificial Sequence
  Non-cyclic GFR-binding peptide
  MOD_RES (3), (4), (38), (40): Xaa is C or S
  MOD_RES (18), (19), (20), (21), (22): Xaa is A or G
  MOD_RES (23), (24), (25), (26): Xaa is A or G or is absent
PTXXVPTRLSNITIQIMXXXXXXXXXIGEMSDMVVESXGX

SEQ ID NO: 36829 - protein, 37 aa, Artificial Sequence
  Non-cyclic GFR-binding peptide
  MOD_RES (3), (4), (36): Xaa is C or S
PTXXVPTRLSNITIQIMDSANNVVLGEMSDMVVESXG

SEQ ID NO: 36830 - protein, 36 aa, Artificial Sequence
  Non-cyclic GFR-binding peptide
  MOD_RES (1), (33), (35): Xaa is C or S
XAPTKLSNITVQIMDDSSNVILGEMSNMVVRSXGXH

SEQ ID NO: 36831 - protein, 37 aa, Artificial Sequence
  Non-cyclic GFR-binding peptide
  MOD_RES (5), (6), (37): Xaa is C or S
SASPXXVPQDLSNITIQIMVGRTPKVLGEMSMVVKSX

SEQ ID NO: 36832 - protein, 38 aa, Artificial Sequence
  Non-cyclic GFR-binding peptide
  MOD_RES (4), (5): Xaa is C or S
  MOD_RES (19), (20), (21), (22), (23): Xaa is A or G
  MOD_RES (24), (25), (26), (27): Xaa is A or G or is absent
PASXXVPARLSNITIQIMXXXXXXXXXLGEMSDMVVEA

SEQ ID NO: 36833 - protein, 42 aa, Artificial Sequence
  Non-cyclic GFR-binding peptide
  MOD_RES (4), (5), (39), (41): Xaa is C or S
  MOD_RES (19), (20), (21), (22), (23): Xaa is A or G
  MOD_RES (24), (25), (26), (27): Xaa is A or G or is absent
PPTXXVPTRLSNITIQIMXXXXXXXXXIGEMSDMVVESXGXR

SEQ ID NO: 36834 - protein, 34 aa, Artificial Sequence
  Non-cyclic GFR-binding peptide
  MOD_RES (1), (32), (34): Xaa is C or S
XVPQALSNITIQIMVGRKPKVLGEMSMIVRSXKX

SEQ ID NO: 36835 - protein, 38 aa, Artificial Sequence
  Non-cyclic GFR-binding peptide
  MOD_RES (4), (5), (38): Xaa is C or S
  MOD_RES (19), (20), (21), (22), (23): Xaa is A or G
  MOD_RES (24), (25), (26), (27): Xaa is A or G or is absent
ASPXXVSQDLSNITIQIMXXXXXXXXXLGEMSMIVKSX

SEQ ID NO: 36836 - protein, 37 aa, Artificial Sequence
  Non-cyclic GFR-binding peptide
  MOD_RES (2), (3), (37): Xaa is C or S
  MOD_RES (17), (18), (19), (20), (21): Xaa is A or G
  MOD_RES (22), (23), (24), (25): Xaa is A or G or is absent
SXXVPARLSNITIQIMXXXXXXXXXLGEMSDMVVEAX

SEQ ID NO: 36837 - protein, 35 aa, Artificial Sequence
  Non-cyclic GFR-binding peptide
  MOD_RES (1), (35): Xaa is C or S
  MOD_RES (15), (16), (17), (18), (19): Xaa is A or G
  MOD_RES (20), (21), (22), (23): Xaa is A or G or is absent
XVPARLSNITIQIMXXXXXXXXXIGEMSDMVVEAX

SEQ ID NO: 36838 - protein, 35 aa, Artificial Sequence
  Non-cyclic GFR-binding peptide
  MOD_RES (1), (2): Xaa is C or S
  MOD_RES (16), (17), (18), (19), (20): Xaa is A or G
  MOD_RES (21), (22), (23), (24): Xaa is A or G or is absent
XXVPARLSNITIQIMXXXXXXXXXIGEMSDMVVEA

SEQ ID NO: 36839 - protein, 40 aa, Artificial Sequence
  Non-cyclic GFR-binding peptide
  MOD_RES (5), (6), (37), (39): Xaa is C or S
SASPXXVPQDLSNITIQIMVGRTPKVLGEMSMVVKSXKXS

SEQ ID NO: 36840 - protein, 33 aa, Artificial Sequence
  Non-cyclic GFR-binding peptide
  MOD_RES (31), (33): Xaa is C or S
VPQDLSNITIQIMVGRTPKVLGEMSMVVKSXKX

SEQ ID NO: 36841 - protein, 35 aa, Artificial Sequence
  Non-cyclic GFR-binding peptide
  MOD_RES (3), (4), (35): Xaa is C or S
STXXAPVKTSNITMQIMDNGRVLLIGEMSMIVEEX

SEQ ID NO: 36842 - protein, 41 aa, Artificial Sequence
  Non-cyclic GFR-binding peptide
  MOD_RES (6), (7), (41): Xaa is C or S
  MOD_RES (21), (22), (23), (24), (25): Xaa is A or G
  MOD_RES (26), (27), (28), (29): Xaa is A or G or is absent
HVPKPXXAPTKLSNITVQIMXXXXXXXXXLGEMSNMVVRSX

SEQ ID NO: 36843 - protein, 36 aa, Artificial Sequence
  Non-cyclic GFR-binding peptide
  MOD_RES (3), (4): Xaa is C or S
  MOD_RES (18), (19), (20), (21), (22): Xaa is A or G
  MOD_RES (23), (24), (25), (26): Xaa is A or G or is absent
KPXXAPTKLSNITVQIMXXXXXXXXXLGEMSNMVVR

SEQ ID NO: 36844 - protein, 43 aa, Artificial Sequence
  Non-cyclic GFR-binding peptide
  MOD_RES (6), (7), (40), (42): Xaa is C or S
  MOD_RES (21), (22), (23), (24), (25): Xaa is A or G
  MOD_RES (26), (27), (28), (29): Xaa is A or G or is absent
ASAAPXXVPQALSNITIQIMXXXXXXXXXLGEMSMIVRSXKXS

SEQ ID NO: 36845 - protein, 42 aa, Artificial Sequence
  Non-cyclic GFR-binding peptide
  MOD_RES (6), (7), (39), (41): Xaa is C or S
GSAGPXXTPTKMSNITMQIMNDKQQIIIGEMSGMVVDRXGXS

SEQ ID NO: 36846 - protein, 34 aa, Artificial Sequence
  Non-cyclic GFR-binding peptide
  MOD_RES (1), (2), (33): Xaa is C or S
XXVSQDLSNITIQIMIGKTPKILGEMSMIVKSXK

SEQ ID NO: 36847 - protein, 37 aa, Artificial Sequence
  Non-cyclic GFR-binding peptide
  MOD_RES (5), (6): Xaa is C or S
SAGPXXTPTKMSNITMQIMNDKQQIIIGEMSGMVVDR

SEQ ID NO: 36848 - protein, 37 aa, Artificial Sequence
  Non-cyclic GFR-binding peptide
  MOD_RES (1), (34), (36): Xaa is C or S
  MOD_RES (15), (16), (17), (18), (19): Xaa is A or G
  MOD_RES (20), (21), (22), (23): Xaa is A or G or is absent
XVPQALSNITIQIMXXXXXXXXXLGEMSMIVRSXKXS

SEQ ID NO: 36849 - protein, 38 aa, Artificial Sequence
  Non-cyclic GFR-binding peptide
  MOD_RES (3), (4), (36), (38): Xaa is C or S
ASXXVPARLSNITIQIMDAANNVVIGEMSDMVVEAXGX

SEQ ID NO: 36850 - protein, 38 aa, Artificial Sequence
  Non-cyclic GFR-binding peptide
  MOD_RES (1), (2), (36), (38): Xaa is C or S
  MOD_RES (16), (17), (18), (19), (20): Xaa is A or G
  MOD_RES (21), (22), (23), (24): Xaa is A or G or is absent
XXVPTRLSNITIQIMXXXXXXXXXIGEMSDMVVESXGX

SEQ ID NO: 36851 - protein, 32 aa, Artificial Sequence
  Non-cyclic GFR-binding peptide
  MOD_RES (32), (32): Xaa is C or S
VPARLSNITIQIMDAANNVVLGEMSDMVVEAX

SEQ ID NO: 36852 - protein, 36 aa, Artificial Sequence
  Non-cyclic GFR-binding peptide
  MOD_RES (3), (4): Xaa is C or S
  MOD_RES (18), (19), (20), (21), (22): Xaa is A or G
  MOD_RES (23), (24), (25), (26): Xaa is A or G or is absent
ASXXVPARLSNITIQIMXXXXXXXXXLGEMSDMVVE

SEQ ID NO: 36853 - protein, 38 aa, Artificial Sequence
  Non-cyclic GFR-binding peptide
  MOD_RES (6), (7): Xaa is C or S
AAPASXXVPARLSNITIQIMDAANNVVLGEMSDMVVEA

SEQ ID NO: 36854 - protein, 39 aa, Artificial Sequence
  Non-cyclic GFR-binding peptide
  MOD_RES (2), (3), (36), (38): Xaa is C or S
  MOD_RES (17), (18), (19), (20), (21): Xaa is A or G
  MOD_RES (22), (23), (24), (25): Xaa is A or G or is absent
TXXAPVKTSNITMQIMXXXXXXXXXLGEMSMIVEEXGXL

SEQ ID NO: 36855 - protein, 36 aa, Artificial Sequence
  Non-cyclic GFR-binding peptide
  MOD_RES (1), (34), (36): Xaa is C or S
  MOD_RES (15), (16), (17), (18), (19): Xaa is A or G
  MOD_RES (20), (21), (22), (23): Xaa is A or G or is absent
XAPVKTSNITMQIMXXXXXXXXXLGEMSMIVEEXGX

SEQ ID NO: 36856 - protein, 33 aa, Artificial Sequence
  Non-cyclic GFR-binding peptide
  MOD_RES (2), (3): Xaa is C or S
PXXTPTKMSNITMQIMNDKQQIIIGEMSGMVVD

SEQ ID NO: 36857 - protein, 37 aa, Artificial Sequence
  Non-cyclic GFR-binding peptide
  MOD_RES (4), (5), (36): Xaa is C or S
ASPXXVPQDLSNITIQIMVGRTPKVLGEMSMVVKSXK

SEQ ID NO: 36858 - protein, 37 aa, Artificial Sequence
  Non-cyclic GFR-binding peptide
  MOD_RES (34), (36): Xaa is C or S
  MOD_RES (14), (15), (16), (17), (18): Xaa is A or G
  MOD_RES (19), (20), (21), (22): Xaa is A or G or is absent
VPTRLSNITIQIMXXXXXXXXXIGEMSDMVVESXGXR

SEQ ID NO: 36859 - protein, 36 aa, Artificial Sequence
  Non-cyclic GFR-binding peptide
  MOD_RES (4), (5): Xaa is C or S
PKPXXAPTKLSNITVQIMDDSSNVILGEMSNMVVRS

SEQ ID NO: 36860 - protein, 34 aa, Artificial Sequence
  Non-cyclic GFR-binding peptide
  MOD_RES (31), (33): Xaa is C or S
VPQDLSNITIQIMVGRTPKVLGEMSMVVKSXKXS

SEQ ID NO: 36861 - protein, 40 aa, Artificial Sequence
  Non-cyclic GFR-binding peptide
  MOD_RES (6), (7), (39): Xaa is C or S
GSAGPXXTPTKMSNITMQIMNDKQQIIIGEMSGMVVDRXG

SEQ ID NO: 36862 - protein, 38 aa, Artificial Sequence
  Non-cyclic GFR-binding peptide
  MOD_RES (4), (5), (36), (38): Xaa is C or S
PSTXXAPVKTSNITMQIMDNGRVLLIGEMSMIVEEXGX

SEQ ID NO: 36863 - protein, 40 aa, Artificial Sequence
  Non-cyclic GFR-binding peptide
  MOD_RES (5), (6), (38), (40): Xaa is C or S
APASXXVPARLSNITIQIMDAANNVVLGEMSDMVVEAXGX

SEQ ID NO: 36864 - protein, 35 aa, Artificial Sequence
  Non-cyclic GFR-binding peptide
  MOD_RES (3), (4), (35): Xaa is C or S
SPXXVSQDLSNITIQIMIGKTPKILGEMSMIVKSX

SEQ ID NO: 36865 - protein, 39 aa, Artificial Sequence
  Non-cyclic GFR-binding peptide
  MOD_RES (1), (2), (36), (38): Xaa is C or S
  MOD_RES (16), (17), (18), (19), (20): Xaa is A or G
  MOD_RES (21), (22), (23), (24): Xaa is A or G or is absent
XXVPARLSNITIQIMXXXXXXXXXIGEMSDMVVEAXGXR

SEQ ID NO: 36866 - protein, 31 aa, Artificial Sequence
  Non-cyclic GFR-binding peptide
TPTKMSNITMQIMNDKQQIILGEMSGMVVDR

SEQ ID NO: 36867 - protein, 31 aa, Artificial Sequence
  Non-cyclic GFR-binding peptide
  MOD_RES (1), (1): Xaa is C or S
XTPTKMSNITMQIMNDKQQIILGEMSGMVVD

SEQ ID NO: 36868 - protein, 37 aa, Artificial Sequence
  Non-cyclic GFR-binding peptide
  MOD_RES (4), (5), (37): Xaa is C or S
PASXXVPARLSNITIQIMDAANNVVIGEMSDMVVEAX

SEQ ID NO: 36869 - protein, 34 aa, Artificial Sequence
  Non-cyclic GFR-binding peptide
  MOD_RES (1), (1): Xaa is C or S
  MOD_RES (15), (16), (17), (18), (19): Xaa is A or G
  MOD_RES (20), (21), (22), (23): Xaa is A or G or is absent
XVPARLSNITIQIMXXXXXXXXXLGEMSDMVVEA

SEQ ID NO: 36870 - protein, 37 aa, Artificial Sequence
  Non-cyclic GFR-binding peptide
  MOD_RES (1), (2), (34), (36): Xaa is C or S
XXAPTKLSNITVQIMDDSSNVILGEMSNMVVRSXGXH

SEQ ID NO: 36871 - protein, 34 aa, Artificial Sequence
  Non-cyclic GFR-binding peptide
  MOD_RES (1), (2): Xaa is C or S
  MOD_RES (16), (17), (18), (19), (20): Xaa is A or G
  MOD_RES (21), (22), (23), (24): Xaa is A or G or is absent
XXVPQALSNITIQIMXXXXXXXXXLGEMSMIVRS

SEQ ID NO: 36872 - protein, 34 aa, Artificial Sequence
  Non-cyclic GFR-binding peptide
  MOD_RES (1), (33): Xaa is C or S
XVPARLSNITIQIMDAANNVVLGEMSDMVVEAXG

SEQ ID NO: 36873 - protein, 35 aa, Artificial Sequence
  Non-cyclic GFR-binding peptide
  MOD_RES (33), (35): Xaa is C or S
  MOD_RES (14), (15), (16), (17), (18): Xaa is A or G
  MOD_RES (19), (20), (21), (22): Xaa is A or G or is absent
APVKTSNITMQIMXXXXXXXXXLGEMSMIVEEXGX

SEQ ID NO: 36874 - protein, 39 aa, Artificial Sequence
  Non-cyclic GFR-binding peptide
  MOD_RES (4), (5), (37), (39): Xaa is C or S
PPTXXVPTRLSNITIQIMDSANNVVLGEMSDMVVESXGX

SEQ ID NO: 36875 - protein, 34 aa, Artificial Sequence
  Non-cyclic GFR-binding peptide
  MOD_RES (31), (33): Xaa is C or S
VSQDLSNITIQIMIGKTPKILGEMSMIVKSXKXS

SEQ ID NO: 36876 - protein, 33 aa, Artificial Sequence
  Non-cyclic GFR-binding peptide
  MOD_RES (1), (2): Xaa is C or S
XXTPTKMSNITMQIMNDKQQIIIGEMSGMVVDR

SEQ ID NO: 36877 - protein, 36 aa, Artificial Sequence
  Non-cyclic GFR-binding peptide
  MOD_RES (33), (35): Xaa is C or S
  MOD_RES (14), (15), (16), (17), (18): Xaa is A or G
  MOD_RES (19), (20), (21), (22): Xaa is A or G or is absent
APVKTSNITMQIMXXXXXXXXXIGEMSMIVEEXGXL

SEQ ID NO: 36878 - protein, 32 aa, Artificial Sequence
  Non-cyclic GFR-binding peptide
  MOD_RES (14), (15), (16), (17), (18): Xaa is A or G
  MOD_RES (19), (20), (21), (22): Xaa is A or G or is absent
APTKLSNITVQIMXXXXXXXXXLGEMSNMVVR

SEQ ID NO: 36879 - protein, 31 aa, Artificial Sequence
  Non-cyclic GFR-binding peptide
  MOD_RES (31), (31): Xaa is C or S
VPQALSNITIQIMVGRKPKVLGEMSMIVRSX

SEQ ID NO: 36880 - protein, 39 aa, Artificial Sequence
  Non-cyclic GFR-binding peptide
  MOD_RES (4), (5), (36), (38): Xaa is C or S
AAPXXVPQALSNITIQIMVGRKPKVLGEMSMIVRSXKXS

SEQ ID NO: 36881 - protein, 36 aa, Artificial Sequence
  Non-cyclic GFR-binding peptide
  MOD_RES (1), (35): Xaa is C or S
  MOD_RES (15), (16), (17), (18), (19): Xaa is A or G
  MOD_RES (20), (21), (22), (23): Xaa is A or G or is absent
XTPTKMSNITMQIMXXXXXXXXXLGEMSGMVVDRXG

SEQ ID NO: 36882 - protein, 39 aa, Artificial Sequence
  Non-cyclic GFR-binding peptide
  MOD_RES (5), (6), (37), (39): Xaa is C or S
SASPXXVSQDLSNITIQIMIGKTPKILGEMSMIVKSXKX

SEQ ID NO: 36883 - protein, 39 aa, Artificial Sequence
  Non-cyclic GFR-binding peptide
  MOD_RES (6), (7): Xaa is C or S
  MOD_RES (21), (22), (23), (24), (25): Xaa is A or G
  MOD_RES (26), (27), (28), (29): Xaa is A or G or is absent
STPPTXXVPTRLSNITIQIMXXXXXXXXXIGEMSDMVVE

SEQ ID NO: 36884 - protein, 36 aa, Artificial Sequence
  Non-cyclic GFR-binding peptide
  MOD_RES (1), (35): Xaa is C or S
  MOD_RES (15), (16), (17), (18), (19): Xaa is A or G
  MOD_RES (20), (21), (22), (23): Xaa is A or G or is absent
XAPTKLSNITVQIMXXXXXXXXXLGEMSNMVVRSXG

SEQ ID NO: 36885 - protein, 39 aa, Artificial Sequence
  Non-cyclic GFR-binding peptide
  MOD_RES (2), (3), (37), (39): Xaa is C or S
  MOD_RES (17), (18), (19), (20), (21): Xaa is A or G
  MOD_RES (22), (23), (24), (25): Xaa is A or G or is absent
PXXAPTKLSNITVQIMXXXXXXXXXLGEMSNMVVRSXGX

SEQ ID NO: 36886 - protein, 39 aa, Artificial Sequence
  Non-cyclic GFR-binding peptide
  MOD_RES (4), (5), (39): Xaa is C or S
  MOD_RES (19), (20), (21), (22), (23): Xaa is A or G
  MOD_RES (24), (25), (26), (27): Xaa is A or G or is absent
PASXXVPARLSNITIQIMXXXXXXXXXLGEMSDMVVEAX

SEQ ID NO: 36887 - protein, 39 aa, Artificial Sequence
  Non-cyclic GFR-binding peptide
  MOD_RES (3), (4), (38): Xaa is C or S
  MOD_RES (18), (19), (20), (21), (22): Xaa is A or G
  MOD_RES (23), (24), (25), (26): Xaa is A or G or is absent
ASXXVPARLSNITIQIMXXXXXXXXXIGEMSDMVVEAXG

SEQ ID NO: 36888 - protein, 38 aa, Artificial Sequence
  Non-cyclic GFR-binding peptide
  MOD_RES (5), (6): Xaa is C or S
  MOD_RES (20), (21), (22), (23), (24): Xaa is A or G
  MOD_RES (25), (26), (27), (28): Xaa is A or G or is absent
SASPXXVSQDLSNITIQIMXXXXXXXXXLGEMSMIVKS

SEQ ID NO: 36889 - protein, 40 aa, Artificial Sequence
  Non-cyclic GFR-binding peptide
  MOD_RES (4), (5), (39): Xaa is C or S
  MOD_RES (19), (20), (21), (22), (23): Xaa is A or G
  MOD_RES (24), (25), (26), (27): Xaa is A or G or is absent
PKPXXAPTKLSNITVQIMXXXXXXXXXLGEMSNMVVRSXG

SEQ ID NO: 36890 - protein, 44 aa, Artificial Sequence
  Non-cyclic GFR-binding peptide
  MOD_RES (6), (7), (41), (43): Xaa is C or S
  MOD_RES (21), (22), (23), (24), (25): Xaa is A or G
  MOD_RES (26), (27), (28), (29): Xaa is A or G or is absent
STPPTXXVPTRLSNITIQIMXXXXXXXXXIGEMSDMVVESXGXR

SEQ ID NO: 36891 - protein, 36 aa, Artificial Sequence
  Non-cyclic GFR-binding peptide
  MOD_RES (5), (6): Xaa is C or S
SAAPXXVPQALSNITIQIMVGRKPKVLGEMSMIVRS

SEQ ID NO: 36892 - protein, 38 aa, Artificial Sequence
  Non-cyclic GFR-binding peptide
  MOD_RES (4), (5): Xaa is C or S
  MOD_RES (19), (20), (21), (22), (23): Xaa is A or G
  MOD_RES (24), (25), (26), (27): Xaa is A or G or is absent
AGPXXTPTKMSNITMQIMXXXXXXXXXLGEMSGMVVDR

SEQ ID NO: 36893 - protein, 37 aa, Artificial Sequence
  Non-cyclic GFR-binding peptide
  MOD_RES (5), (6), (37): Xaa is C or S
VPSTXXAPVKTSNITMQIMDNGRVLLLGEMSMIVEEX

SEQ ID NO: 36894 - protein, 35 aa, Artificial Sequence
  Non-cyclic GFR-binding peptide
  MOD_RES (3), (4), (35): Xaa is C or S
APXXVPQALSNITIQIMVGRKPKVLGEMSMIVRSX

SEQ ID NO: 36895 - protein, 30 aa, Artificial Sequence
  Non-cyclic GFR-binding peptide
VPARLSNITIQIMDAANNVVIGEMSDMVVE

SEQ ID NO: 36896 - protein, 33 aa, Artificial Sequence
  Non-cyclic GFR-binding peptide
  MOD_RES (1), (2), (33): Xaa is C or S
XXAPVKTSNITMQIMDNGRVLLIGEMSMIVEEX

SEQ ID NO: 36897 - protein, 34 aa, Artificial Sequence
  Non-cyclic GFR-binding peptide
  MOD_RES (3), (4): Xaa is C or S
STXXAPVKTSNITMQIMDNGRVLLIGEMSMIVEE

SEQ ID NO: 36898 - protein, 38 aa, Artificial Sequence
  Non-cyclic GFR-binding peptide
  MOD_RES (3), (4), (35), (37): Xaa is C or S
STXXAPVKTSNITMQIMDNGRVLLLGEMSMIVEEXGXL

SEQ ID NO: 36899 - protein, 39 aa, Artificial Sequence
  Non-cyclic GFR-binding peptide
  MOD_RES (6), (7): Xaa is C or S
  MOD_RES (21), (22), (23), (24), (25): Xaa is A or G
  MOD_RES (26), (27), (28), (29): Xaa is A or G or is absent
HVPKPXXAPTKLSNITVQIMXXXXXXXXXIGEMSNMVVR

SEQ ID NO: 36900 - protein, 41 aa, Artificial Sequence
  Non-cyclic GFR-binding peptide
  MOD_RES (5), (6), (38), (40): Xaa is C or S
TPPTXXVPTRLSNITIQIMDSANNVVIGEMSDMVVESXGXR

SEQ ID NO: 36901 - protein, 41 aa, Artificial Sequence
  Non-cyclic GFR-binding peptide
  MOD_RES (3), (4), (38), (40): Xaa is C or S
  MOD_RES (18), (19), (20), (21), (22): Xaa is A or G
  MOD_RES (23), (24), (25), (26): Xaa is A or G or is absent
GPXXTPTKMSNITMQIMXXXXXXXXXIGEMSGMVVDRXGXS

SEQ ID NO: 36902 - protein, 40 aa, Artificial Sequence
  Non-cyclic GFR-binding peptide
  MOD_RES (2), (3), (37), (39): Xaa is C or S
  MOD_RES (17), (18), (19), (20), (21): Xaa is A or G
  MOD_RES (22), (23), (24), (25): Xaa is A or G or is absent
SXXVPARLSNITIQIMXXXXXXXXXLGEMSDMVVEAXGXR

SEQ ID NO: 36903 - protein, 33 aa, Artificial Sequence
  Non-cyclic GFR-binding peptide
  MOD_RES (1), (1): Xaa is C or S
  MOD_RES (15), (16), (17), (18), (19): Xaa is A or G
  MOD_RES (20), (21), (22), (23): Xaa is A or G or is absent
XTPTKMSNITMQIMXXXXXXXXXIGEMSGMVVD

SEQ ID NO: 36904 - protein, 39 aa, Artificial Sequence
  Non-cyclic GFR-binding peptide
  MOD_RES (5), (6): Xaa is C or S
  MOD_RES (20), (21), (22), (23), (24): Xaa is A or G
  MOD_RES (25), (26), (27), (28): Xaa is A or G or is absent
SAGPXXTPTKMSNITMQIMXXXXXXXXXIGEMSGMVVDR

SEQ ID NO: 36905 - protein, 40 aa, Artificial Sequence
  Non-cyclic GFR-binding peptide
  MOD_RES (4), (5), (37), (39): Xaa is C or S
AGPXXTPTKMSNITMQIMNDKQQIILGEMSGMVVDRXGXS

SEQ ID NO: 36906 - protein, 37 aa, Artificial Sequence
  Non-cyclic GFR-binding peptide
  MOD_RES (4), (5): Xaa is C or S
  MOD_RES (19), (20), (21), (22), (23): Xaa is A or G
  MOD_RES (24), (25), (26), (27): Xaa is A or G or is absent
AAPXXVPQALSNITIQIMXXXXXXXXXLGEMSMIVRS

SEQ ID NO: 36907 - protein, 38 aa, Artificial Sequence
  Non-cyclic GFR-binding peptide
  MOD_RES (3), (4), (35), (37): Xaa is C or S
STXXAPVKTSNITMQIMDNGRVLLIGEMSMIVEEXGXL

SEQ ID NO: 36908 - protein, 36 aa, Artificial Sequence
  Non-cyclic GFR-binding peptide
  MOD_RES (1), (2), (33), (35): Xaa is C or S
XXAPVKTSNITMQIMDNGRVLLIGEMSMIVEEXGXL

SEQ ID NO: 36909 - protein, 39 aa, Artificial Sequence
  Non-cyclic GFR-binding peptide
  MOD_RES (1), (2), (36), (38): Xaa is C or S
  MOD_RES (16), (17), (18), (19), (20): Xaa is A or G
  MOD_RES (21), (22), (23), (24): Xaa is A or G or is absent
XXTPTKMSNITMQIMXXXXXXXXXLGEMSGMVVDRXGXS

SEQ ID NO: 36910 - protein, 37 aa, Artificial Sequence
  Non-cyclic GFR-binding peptide
  MOD_RES (3), (4), (35), (37): Xaa is C or S
APXXVPQALSNITIQIMVGRKPKVLGEMSMIVRSXKX

SEQ ID NO: 36911 - protein, 41 aa, Artificial Sequence
  Non-cyclic GFR-binding peptide
  MOD_RES (3), (4), (38), (40): Xaa is C or S
  MOD_RES (18), (19), (20), (21), (22): Xaa is A or G
  MOD_RES (23), (24), (25), (26): Xaa is A or G or is absent
ASXXVPARLSNITIQIMXXXXXXXXXLGEMSDMVVEAXGXR

SEQ ID NO: 36912 - protein, 32 aa, Artificial Sequence
  Non-cyclic GFR-binding peptide
  MOD_RES (1), (1): Xaa is C or S
XVPARLSNITIQIMDAANNVVLGEMSDMVVEA

SEQ ID NO: 36913 - protein, 36 aa, Artificial Sequence
  Non-cyclic GFR-binding peptide
  MOD_RES (1), (2), (33), (35): Xaa is C or S
XXVSQDLSNITIQIMIGKTPKILGEMSMIVKSXKXS

SEQ ID NO: 36914 - protein, 34 aa, Artificial Sequence
  Non-cyclic GFR-binding peptide
  MOD_RES (1), (2), (34): Xaa is C or S
XXVPTRLSNITIQIMDSANNVVLGEMSDMVVESX

SEQ ID NO: 36915 - protein, 40 aa, Artificial Sequence
  Non-cyclic GFR-binding peptide
  MOD_RES (5), (6), (40): Xaa is C or S
  MOD_RES (20), (21), (22), (23), (24): Xaa is A or G
  MOD_RES (25), (26), (27), (28): Xaa is A or G or is absent
SAGPXXTPTKMSNITMQIMXXXXXXXXXIGEMSGMVVDRX

SEQ ID NO: 36916 - protein, 39 aa, Artificial Sequence
  Non-cyclic GFR-binding peptide
  MOD_RES (6), (7): Xaa is C or S
  MOD_RES (21), (22), (23), (24), (25): Xaa is A or G
  MOD_RES (26), (27), (28), (29): Xaa is A or G or is absent
GSAGPXXTPTKMSNITMQIMXXXXXXXXXLGEMSGMVVD

SEQ ID NO: 36917 - protein, 36 aa, Artificial Sequence
  Non-cyclic GFR-binding peptide
  MOD_RES (5), (6): Xaa is C or S
SAGPXXTPTKMSNITMQIMNDKQQIILGEMSGMVVD

SEQ ID NO: 36918 - protein, 34 aa, Artificial Sequence
  Non-cyclic GFR-binding peptide
  MOD_RES (2), (3), (34): Xaa is C or S
PXXVPQDLSNITIQIMVGRTPKVLGEMSMVVKSX

SEQ ID NO: 36919 - protein, 41 aa, Artificial Sequence
  Non-cyclic GFR-binding peptide
  MOD_RES (6), (7), (40): Xaa is C or S
  MOD_RES (21), (22), (23), (24), (25): Xaa is A or G
  MOD_RES (26), (27), (28), (29): Xaa is A or G or is absent
ASASPXXVSQDLSNITIQIMXXXXXXXXXLGEMSMIVKSXK

SEQ ID NO: 36920 - protein, 40 aa, Artificial Sequence
  Non-cyclic GFR-binding peptide
  MOD_RES (5), (6), (40): Xaa is C or S
  MOD_RES (20), (21), (22), (23), (24): Xaa is A or G
  MOD_RES (25), (26), (27), (28): Xaa is A or G or is absent
TPPTXXVPTRLSNITIQIMXXXXXXXXXLGEMSDMVVESX

SEQ ID NO: 36921 - protein, 37 aa, Artificial Sequence
  Non-cyclic GFR-binding peptide
  MOD_RES (5), (6): Xaa is C or S
APASXXVPARLSNITIQIMDAANNVVIGEMSDMVVEA

SEQ ID NO: 36922 - protein, 39 aa, Artificial Sequence
  Non-cyclic GFR-binding peptide
  MOD_RES (6), (7): Xaa is C or S
  MOD_RES (21), (22), (23), (24), (25): Xaa is A or G
  MOD_RES (26), (27), (28), (29): Xaa is A or G or is absent
RVPSTXXAPVKTSNITMQIMXXXXXXXXXIGEMSMIVEE

SEQ ID NO: 36923 - protein, 43 aa, Artificial Sequence
  Non-cyclic GFR-binding peptide
  MOD_RES (5), (6), (40), (42): Xaa is C or S
  MOD_RES (20), (21), (22), (23), (24): Xaa is A or G
  MOD_RES (25), (26), (27), (28): Xaa is A or G or is absent
TPPTXXVPTRLSNITIQIMXXXXXXXXXIGEMSDMVVESXGXR

SEQ ID NO: 36924 - protein, 40 aa, Artificial Sequence
  Non-cyclic GFR-binding peptide
  MOD_RES (5), (6), (40): Xaa is C or S
  MOD_RES (20), (21), (22), (23), (24): Xaa is A or G
  MOD_RES (25), (26), (27), (28): Xaa is A or G or is absent
VPKPXXAPTKLSNITVQIMXXXXXXXXXLGEMSNMVVRSX

SEQ ID NO: 36925 - protein, 40 aa, Artificial Sequence
  Non-cyclic GFR-binding peptide
  MOD_RES (4), (5), (37), (39): Xaa is C or S
PPTXXVPTRLSNITIQIMDSANNVVIGEMSDMVVESXGXR

SEQ ID NO: 36926 - protein, 38 aa, Artificial Sequence
  Non-cyclic GFR-binding peptide
  MOD_RES (3), (4), (36), (38): Xaa is C or S
ASXXVPARLSNITIQIMDAANNVVLGEMSDMVVEAXGX

SEQ ID NO: 36927 - protein, 37 aa, Artificial Sequence
  Non-cyclic GFR-binding peptide
  MOD_RES (3), (4), (37): Xaa is C or S
  MOD_RES (18), (19), (20), (21), (22): Xaa is A or G
  MOD_RES (23), (24), (25), (26): Xaa is A or G or is absent
STXXAPVKTSNITMQIMXXXXXXXXXLGEMSMIVEEX

SEQ ID NO: 36928 - protein, 37 aa, Artificial Sequence
  Non-cyclic GFR-binding peptide
  MOD_RES (3), (4): Xaa is C or S
  MOD_RES (18), (19), (20), (21), (22): Xaa is A or G
  MOD_RES (23), (24), (25), (26): Xaa is A or G or is absent
ASXXVPARLSNITIQIMXXXXXXXXXLGEMSDMVVEA

SEQ ID NO: 36929 - protein, 35 aa, Artificial Sequence
  Non-cyclic GFR-binding peptide
  MOD_RES (32), (34): Xaa is C or S
APTKLSNITVQIMDDSSNVILGEMSNMVVRSXGXH

SEQ ID NO: 36930 - protein, 35 aa, Artificial Sequence
  Non-cyclic GFR-binding peptide
  MOD_RES (2), (3), (35): Xaa is C or S
PXXTPTKMSNITMQIMNDKQQIIIGEMSGMVVDRX

SEQ ID NO: 36931 - protein, 38 aa, Artificial Sequence
  Non-cyclic GFR-binding peptide
  MOD_RES (1), (2), (36), (38): Xaa is C or S
  MOD_RES (16), (17), (18), (19), (20): Xaa is A or G
  MOD_RES (21), (22), (23), (24): Xaa is A or G or is absent
XXVPTRLSNITIQIMXXXXXXXXXLGEMSDMVVESXGX

SEQ ID NO: 36932 - protein, 39 aa, Artificial Sequence
  Non-cyclic GFR-binding peptide
  MOD_RES (2), (3), (36), (38): Xaa is C or S
  MOD_RES (17), (18), (19), (20), (21): Xaa is A or G
  MOD_RES (22), (23), (24), (25): Xaa is A or G or is absent
TXXAPVKTSNITMQIMXXXXXXXXXIGEMSMIVEEXGXL

SEQ ID NO: 36933 - protein, 38 aa, Artificial Sequence
  Non-cyclic GFR-binding peptide
  MOD_RES (1), (2), (36), (38): Xaa is C or S
  MOD_RES (16), (17), (18), (19), (20): Xaa is A or G
  MOD_RES (21), (22), (23), (24): Xaa is A or G or is absent
XXVPARLSNITIQIMXXXXXXXXXIGEMSDMVVEAXGX

SEQ ID NO: 36934 - protein, 33 aa, Artificial Sequence
  Non-cyclic GFR-binding peptide
  MOD_RES (1), (2), (33): Xaa is C or S
XXVPQALSNITIQIMVGRKPKVLGEMSMIVRSX

SEQ ID NO: 36935 - protein, 35 aa, Artificial Sequence
  Non-cyclic GFR-binding peptide
  MOD_RES (34), (34): Xaa is C or S
  MOD_RES (14), (15), (16), (17), (18): Xaa is A or G
  MOD_RES (19), (20), (21), (22): Xaa is A or G or is absent
VPARLSNITIQIMXXXXXXXXXLGEMSDMVVEAXG

SEQ ID NO: 36936 - protein, 36 aa, Artificial Sequence
  Non-cyclic GFR-binding peptide
  MOD_RES (3), (4), (36): Xaa is C or S
PTXXVPTRLSNITIQIMDSANNVVIGEMSDMVVESX

SEQ ID NO: 36937 - protein, 39 aa, Artificial Sequence
  Non-cyclic GFR-binding peptide
  MOD_RES (2), (3), (37), (39): Xaa is C or S
  MOD_RES (17), (18), (19), (20), (21): Xaa is A or G
  MOD_RES (22), (23), (24), (25): Xaa is A or G or is absent
TXXVPTRLSNITIQIMXXXXXXXXXLGEMSDMVVESXGX

SEQ ID NO: 36938 - protein, 37 aa, Artificial Sequence
  Non-cyclic GFR-binding peptide
  MOD_RES (1), (2), (35), (37): Xaa is C or S
  MOD_RES (16), (17), (18), (19), (20): Xaa is A or G
  MOD_RES (21), (22), (23), (24): Xaa is A or G or is absent
XXAPVKTSNITMQIMXXXXXXXXXLGEMSMIVEEXGX

SEQ ID NO: 36939 - protein, 40 aa, Artificial Sequence
  Non-cyclic GFR-binding peptide
  MOD_RES (4), (5), (39): Xaa is C or S
  MOD_RES (19), (20), (21), (22), (23): Xaa is A or G
  MOD_RES (24), (25), (26), (27): Xaa is A or G or is absent
AGPXXTPTKMSNITMQIMXXXXXXXXXIGEMSGMVVDRXG

SEQ ID NO: 36940 - protein, 35 aa, Artificial Sequence
  Non-cyclic GFR-binding peptide
  MOD_RES (3), (4): Xaa is C or S
GPXXTPTKMSNITMQIMNDKQQIIIGEMSGMVVDR

SEQ ID NO: 36941 - protein, 38 aa, Artificial Sequence
  Non-cyclic GFR-binding peptide
  MOD_RES (5), (6), (38): Xaa is C or S
TPPTXXVPTRLSNITIQIMDSANNVVIGEMSDMVVESX

SEQ ID NO: 36942 - protein, 39 aa, Artificial Sequence
  Non-cyclic GFR-binding peptide
  MOD_RES (4), (5), (37), (39): Xaa is C or S
AGPXXTPTKMSNITMQIMNDKQQIIIGEMSGMVVDRXGX

SEQ ID NO: 36943 - protein, 30 aa, Artificial Sequence
  Non-cyclic GFR-binding peptide
VPTRLSNITIQIMDSANNVVLGEMSDMVVE

SEQ ID NO: 36944 - protein, 34 aa, Artificial Sequence
  Non-cyclic GFR-binding peptide
  MOD_RES (1), (2): Xaa is C or S
  MOD_RES (16), (17), (18), (19), (20): Xaa is A or G
  MOD_RES (21), (22), (23), (24): Xaa is A or G or is absent
XXTPTKMSNITMQIMXXXXXXXXXIGEMSGMVVD

SEQ ID NO: 36945 - protein, 36 aa, Artificial Sequence
  Non-cyclic GFR-binding peptide
  MOD_RES (1), (2), (34), (36): Xaa is C or S
XXVPARLSNITIQIMDAANNVVLGEMSDMVVEAXGX

SEQ ID NO: 36946 - protein, 36 aa, Artificial Sequence
  Non-cyclic GFR-binding peptide
  MOD_RES (1), (35): Xaa is C or S
  MOD_RES (15), (16), (17), (18), (19): Xaa is A or G
  MOD_RES (20), (21), (22), (23): Xaa is A or G or is absent
XVPTRLSNITIQIMXXXXXXXXXLGEMSDMVVESXG

SEQ ID NO: 36947 - protein, 37 aa, Artificial Sequence
  Non-cyclic GFR-binding peptide
  MOD_RES (3), (4): Xaa is C or S
  MOD_RES (18), (19), (20), (21), (22): Xaa is A or G
  MOD_RES (23), (24), (25), (26): Xaa is A or G or is absent
GPXXTPTKMSNITMQIMXXXXXXXXXIGEMSGMVVDR

SEQ ID NO: 36948 - protein, 38 aa, Artificial Sequence
  Non-cyclic GFR-binding peptide
  MOD_RES (1), (2), (35), (37): Xaa is C or S
  MOD_RES (16), (17), (18), (19), (20): Xaa is A or G
  MOD_RES (21), (22), (23), (24): Xaa is A or G or is absent
XXAPVKTSNITMQIMXXXXXXXXXIGEMSMIVEEXGXL

SEQ ID NO: 36949 - protein, 42 aa, Artificial Sequence
  Non-cyclic GFR-binding peptide
  MOD_RES (5), (6), (40), (42): Xaa is C or S
  MOD_RES (20), (21), (22), (23), (24): Xaa is A or G
  MOD_RES (25), (26), (27), (28): Xaa is A or G or is absent
SAGPXXTPTKMSNITMQIMXXXXXXXXXIGEMSGMVVDRXGX

SEQ ID NO: 36950 - protein, 42 aa, Artificial Sequence
  Non-cyclic GFR-binding peptide
  MOD_RES (6), (7), (39), (41): Xaa is C or S
STPPTXXVPTRLSNITIQIMDSANNVVLGEMSDMVVESXGXR

SEQ ID NO: 36951 - protein, 38 aa, Artificial Sequence
  Non-cyclic GFR-binding peptide
  MOD_RES (3), (4), (38): Xaa is C or S
  MOD_RES (18), (19), (20), (21), (22): Xaa is A or G
  MOD_RES (23), (24), (25), (26): Xaa is A or G or is absent
PTXXVPTRLSNITIQIMXXXXXXXXXIGEMSDMVVESX

SEQ ID NO: 36952 - protein, 40 aa, Artificial Sequence
  Non-cyclic GFR-binding peptide
  MOD_RES (6), (7), (39): Xaa is C or S
AAPASXXVPARLSNITIQIMDAANNVVIGEMSDMVVEAXG

SEQ ID NO: 36953 - protein, 34 aa, Artificial Sequence
  Non-cyclic GFR-binding peptide
  MOD_RES (1), (33): Xaa is C or S
XTPTKMSNITMQIMNDKQQIIIGEMSGMVVDRXG

SEQ ID NO: 36954 - protein, 37 aa, Artificial Sequence
  Non-cyclic GFR-binding peptide
  MOD_RES (2), (3), (34), (36): Xaa is C or S
TXXAPVKTSNITMQIMDNGRVLLLGEMSMIVEEXGXL

SEQ ID NO: 36955 - protein, 37 aa, Artificial Sequence
  Non-cyclic GFR-binding peptide
  MOD_RES (6), (7): Xaa is C or S
RVPSTXXAPVKTSNITMQIMDNGRVLLIGEMSMIVEE

SEQ ID NO: 36956 - protein, 38 aa, Artificial Sequence
  Non-cyclic GFR-binding peptide
  MOD_RES (2), (3), (35), (37): Xaa is C or S
TXXVPTRLSNITIQIMDSANNVVIGEMSDMVVESXGXR

SEQ ID NO: 36957 - protein, 42 aa, Artificial Sequence
  Non-cyclic GFR-binding peptide
  MOD_RES (5), (6), (40), (42): Xaa is C or S
  MOD_RES (20), (21), (22), (23), (24): Xaa is A or G
  MOD_RES (25), (26), (27), (28): Xaa is A or G or is absent
TPPTXXVPTRLSNITIQIMXXXXXXXXXIGEMSDMVVESXGX

SEQ ID NO: 36958 - protein, 32 aa, Artificial Sequence
  Non-cyclic GFR-binding peptide
  MOD_RES (1), (1): Xaa is C or S
XVPTRLSNITIQIMDSANNVVLGEMSDMVVES

SEQ ID NO: 36959 - protein, 35 aa, Artificial Sequence
  Non-cyclic GFR-binding peptide
  MOD_RES (2), (3): Xaa is C or S
  MOD_RES (17), (18), (19), (20), (21): Xaa is A or G
  MOD_RES (22), (23), (24), (25): Xaa is A or G or is absent
PXXAPTKLSNITVQIMXXXXXXXXXLGEMSNMVVR

SEQ ID NO: 36960 - protein, 36 aa, Artificial Sequence
  Non-cyclic GFR-binding peptide
  MOD_RES (2), (3), (35): Xaa is C or S
TXXVPTRLSNITIQIMDSANNVVIGEMSDMVVESXG

SEQ ID NO: 36961 - protein, 36 aa, Artificial Sequence
  Non-cyclic GFR-binding peptide
  MOD_RES (1), (2), (36): Xaa is C or S
  MOD_RES (16), (17), (18), (19), (20): Xaa is A or G
  MOD_RES (21), (22), (23), (24): Xaa is A or G or is absent
XXVPARLSNITIQIMXXXXXXXXXIGEMSDMVVEAX

SEQ ID NO: 36962 - protein, 37 aa, Artificial Sequence
  Non-cyclic GFR-binding peptide
  MOD_RES (3), (4), (36): Xaa is C or S
GPXXTPTKMSNITMQIMNDKQQIILGEMSGMVVDRXG

SEQ ID NO: 36963 - protein, 39 aa, Artificial Sequence
  Non-cyclic GFR-binding peptide
  MOD_RES (5), (6), (39): Xaa is C or S
  MOD_RES (20), (21), (22), (23), (24): Xaa is A or G
  MOD_RES (25), (26), (27), (28): Xaa is A or G or is absent
VPSTXXAPVKTSNITMQIMXXXXXXXXXIGEMSMIVEEX

SEQ ID NO: 36964 - protein, 34 aa, Artificial Sequence
  Non-cyclic GFR-binding peptide
  MOD_RES (3), (4): Xaa is C or S
GPXXTPTKMSNITMQIMNDKQQIILGEMSGMVVD

SEQ ID NO: 36965 - protein, 35 aa, Artificial Sequence
  Non-cyclic GFR-binding peptide
  MOD_RES (1), (2), (33), (35): Xaa is C or S
XXVPQALSNITIQIMVGRKPKVLGEMSMIVRSXKX

SEQ ID NO: 36966 - protein, 40 aa, Artificial Sequence
  Non-cyclic GFR-binding peptide
  MOD_RES (6), (7): Xaa is C or S
  MOD_RES (21), (22), (23), (24), (25): Xaa is A or G
  MOD_RES (26), (27), (28), (29): Xaa is A or G or is absent
HVPKPXXAPTKLSNITVQIMXXXXXXXXXLGEMSNMVVRS

SEQ ID NO: 36967 - protein, 36 aa, Artificial Sequence
  Non-cyclic GFR-binding peptide
  MOD_RES (4), (5), (36): Xaa is C or S
AAPXXVPQALSNITIQIMVGRKPKVLGEMSMIVRSX

SEQ ID NO: 36968 - protein, 38 aa, Artificial Sequence
  Non-cyclic GFR-binding peptide
  MOD_RES (3), (4), (35), (37): Xaa is C or S
SPXXVSQDLSNITIQIMIGKTPKILGEMSMIVKSXKXS

SEQ ID NO: 36969 - protein, 38 aa, Artificial Sequence
  Non-cyclic GFR-binding peptide
  MOD_RES (4), (5), (37): Xaa is C or S
AGPXXTPTKMSNITMQIMNDKQQIILGEMSGMVVDRXG

SEQ ID NO: 36970 - protein, 39 aa, Artificial Sequence
  Non-cyclic GFR-binding peptide
  MOD_RES (6), (7), (39): Xaa is C or S
HVPKPXXAPTKLSNITVQIMDDSSNVILGEMSNMVVRSX

SEQ ID NO: 36971 - protein, 41 aa, Artificial Sequence
  Non-cyclic GFR-binding peptide
  MOD_RES (6), (7), (41): Xaa is C or S
  MOD_RES (21), (22), (23), (24), (25): Xaa is A or G
  MOD_RES (26), (27), (28), (29): Xaa is A or G or is absent
GSAGPXXTPTKMSNITMQIMXXXXXXXXXIGEMSGMVVDRX

SEQ ID NO: 36972 - protein, 34 aa, Artificial Sequence
  Non-cyclic GFR-binding peptide
  MOD_RES (2), (3), (34): Xaa is C or S
TXXAPVKTSNITMQIMDNGRVLLLGEMSMIVEEX

SEQ ID NO: 36973 - protein, 33 aa, Artificial Sequence
  Non-cyclic GFR-binding peptide
  MOD_RES (2), (3): Xaa is C or S
TXXAPVKTSNITMQIMDNGRVLLLGEMSMIVEE

SEQ ID NO: 36974 - protein, 36 aa, Artificial Sequence
  Non-cyclic GFR-binding peptide
  MOD_RES (4), (5), (36): Xaa is C or S
ASPXXVSQDLSNITIQIMIGKTPKILGEMSMIVKSX

SEQ ID NO: 36975 - protein, 33 aa, Artificial Sequence
  Non-cyclic GFR-binding peptide
  MOD_RES (14), (15), (16), (17), (18): Xaa is A or G
  MOD_RES (19), (20), (21), (22): Xaa is A or G or is absent
VPARLSNITIQIMXXXXXXXXXIGEMSDMVVEA

SEQ ID NO: 36976 - protein, 39 aa, Artificial Sequence
  Non-cyclic GFR-binding peptide
  MOD_RES (4), (5), (39): Xaa is C or S
  MOD_RES (19), (20), (21), (22), (23): Xaa is A or G
  MOD_RES (24), (25), (26), (27): Xaa is A or G or is absent
PKPXXAPTKLSNITVQIMXXXXXXXXXLGEMSNMVVRSX

SEQ ID NO: 36977 - protein, 33 aa, Artificial Sequence
  Non-cyclic GFR-binding peptide
  MOD_RES (33), (33): Xaa is C or S
  MOD_RES (14), (15), (16), (17), (18): Xaa is A or G
  MOD_RES (19), (20), (21), (22): Xaa is A or G or is absent
APVKTSNITMQIMXXXXXXXXXLGEMSMIVEEX

SEQ ID NO: 36978 - protein, 38 aa, Artificial Sequence
  Non-cyclic GFR-binding peptide
  MOD_RES (3), (4), (37): Xaa is C or S
  MOD_RES (18), (19), (20), (21), (22): Xaa is A or G
  MOD_RES (23), (24), (25), (26): Xaa is A or G or is absent
STXXAPVKTSNITMQIMXXXXXXXXXIGEMSMIVEEXG

SEQ ID NO: 36979 - protein, 40 aa, Artificial Sequence
  Non-cyclic GFR-binding peptide
  MOD_RES (4), (5), (37), (39): Xaa is C or S
PKPXXAPTKLSNITVQIMDDSSNVILGEMSNMVVRSXGXH

SEQ ID NO: 36980 - protein, 36 aa, Artificial Sequence
  Non-cyclic GFR-binding peptide
  MOD_RES (2), (3), (35): Xaa is C or S
TXXVPTRLSNITIQIMDSANNVVLGEMSDMVVESXG

SEQ ID NO: 36981 - protein, 32 aa, Artificial Sequence
  Non-cyclic GFR-binding peptide
  MOD_RES (1), (2): Xaa is C or S
XXVPARLSNITIQIMDAANNVVIGEMSDMVVE

SEQ ID NO: 36982 - protein, 32 aa, Artificial Sequence
  Non-cyclic GFR-binding peptide
  MOD_RES (14), (15), (16), (17), (18): Xaa is A or G
  MOD_RES (19), (20), (21), (22): Xaa is A or G or is absent
VSQDLSNITIQIMXXXXXXXXXLGEMSMIVKS

SEQ ID NO: 36983 - protein, 37 aa, Artificial Sequence
  Non-cyclic GFR-binding peptide
  MOD_RES (4), (5): Xaa is C or S
  MOD_RES (19), (20), (21), (22), (23): Xaa is A or G
  MOD_RES (24), (25), (26), (27): Xaa is A or G or is absent
AGPXXTPTKMSNITMQIMXXXXXXXXXLGEMSGMVVD

SEQ ID NO: 36984 - protein, 43 aa, Artificial Sequence
  Non-cyclic GFR-binding peptide
  MOD_RES (6), (7), (40), (42): Xaa is C or S
  MOD_RES (21), (22), (23), (24), (25): Xaa is A or G
  MOD_RES (26), (27), (28), (29): Xaa is A or G or is absent
ASASPXXVSQDLSNITIQIMXXXXXXXXXLGEMSMIVKSXKXS

SEQ ID NO: 36985 - protein, 36 aa, Artificial Sequence
  Non-cyclic GFR-binding peptide
  MOD_RES (1), (33), (35): Xaa is C or S
XTPTKMSNITMQIMNDKQQIIIGEMSGMVVDRXGXS

SEQ ID NO: 36986 - protein, 38 aa, Artificial Sequence
  Non-cyclic GFR-binding peptide
  MOD_RES (3), (4), (37): Xaa is C or S
  MOD_RES (18), (19), (20), (21), (22): Xaa is A or G
  MOD_RES (23), (24), (25), (26): Xaa is A or G or is absent
STXXAPVKTSNITMQIMXXXXXXXXXLGEMSMIVEEXG

SEQ ID NO: 36987 - protein, 34 aa, Artificial Sequence
  Non-cyclic GFR-binding peptide
  MOD_RES (3), (4): Xaa is C or S
SPXXVPQDLSNITIQIMVGRTPKVLGEMSMVVKS

SEQ ID NO: 36988 - protein, 34 aa, Artificial Sequence
  Non-cyclic GFR-binding peptide
  MOD_RES (34), (34): Xaa is C or S
  MOD_RES (14), (15), (16), (17), (18): Xaa is A or G
  MOD_RES (19), (20), (21), (22): Xaa is A or G or is absent
VPARLSNITIQIMXXXXXXXXXLGEMSDMVVEAX

SEQ ID NO: 36989 - protein, 38 aa, Artificial Sequence
  Non-cyclic GFR-binding peptide
  MOD_RES (6), (7): Xaa is C or S
GSAGPXXTPTKMSNITMQIMNDKQQIILGEMSGMVVDR

SEQ ID NO: 36990 - protein, 30 aa, Artificial Sequence
  Non-cyclic GFR-binding peptide
VSQDLSNITIQIMIGKTPKILGEMSMIVKS

SEQ ID NO: 36991 - protein, 39 aa, Artificial Sequence
  Non-cyclic GFR-binding peptide
  MOD_RES (2), (3), (37), (39): Xaa is C or S
  MOD_RES (17), (18), (19), (20), (21): Xaa is A or G
  MOD_RES (22), (23), (24), (25): Xaa is A or G or is absent
TXXVPTRLSNITIQIMXXXXXXXXXIGEMSDMVVESXGX

SEQ ID NO: 36992 - protein, 34 aa, Artificial Sequence
  Non-cyclic GFR-binding peptide
  MOD_RES (1), (33): Xaa is C or S
XVPTRLSNITIQIMDSANNVVLGEMSDMVVESXG

SEQ ID NO: 36993 - protein, 39 aa, Artificial Sequence
  Non-cyclic GFR-binding peptide
  MOD_RES (4), (5), (38): Xaa is C or S
  MOD_RES (19), (20), (21), (22), (23): Xaa is A or G
  MOD_RES (24), (25), (26), (27): Xaa is A or G or is absent
AAPXXVPQALSNITIQIMXXXXXXXXXLGEMSMIVRSXK

SEQ ID NO: 36994 - protein, 35 aa, Artificial Sequence
  Non-cyclic GFR-binding peptide
  MOD_RES (4), (5): Xaa is C or S
AAPXXVPQALSNITIQIMVGRKPKVLGEMSMIVRS

SEQ ID NO: 36995 - protein, 38 aa, Artificial Sequence
  Non-cyclic GFR-binding peptide
  MOD_RES (6), (7): Xaa is C or S
HVPKPXXAPTKLSNITVQIMDDSSNVIIGEMSNMVVRS

SEQ ID NO: 36996 - protein, 42 aa, Artificial Sequence
  Non-cyclic GFR-binding peptide
  MOD_RES (6), (7), (40), (42): Xaa is C or S
  MOD_RES (21), (22), (23), (24), (25): Xaa is A or G
  MOD_RES (26), (27), (28), (29): Xaa is A or G or is absent
RVPSTXXAPVKTSNITMQIMXXXXXXXXXLGEMSMIVEEXGX

SEQ ID NO: 36997 - protein, 40 aa, Artificial Sequence
  Non-cyclic GFR-binding peptide
  MOD_RES (6), (7), (40): Xaa is C or S
  MOD_RES (21), (22), (23), (24), (25): Xaa is A or G
  MOD_RES (26), (27), (28), (29): Xaa is A or G or is absent
ASASPXXVPQDLSNITIQIMXXXXXXXXXLGEMSMVVKSX

SEQ ID NO: 36998 - protein, 39 aa, Artificial Sequence
  Non-cyclic GFR-binding peptide
  MOD_RES (4), (5), (38): Xaa is C or S
  MOD_RES (19), (20), (21), (22), (23): Xaa is A or G
  MOD_RES (24), (25), (26), (27): Xaa is A or G or is absent
ASPXXVPQDLSNITIQIMXXXXXXXXXLGEMSMVVKSXK

SEQ ID NO: 36999 - protein, 37 aa, Artificial Sequence
  Non-cyclic GFR-binding peptide
  MOD_RES (2), (3), (37): Xaa is C or S
  MOD_RES (17), (18), (19), (20), (21): Xaa is A or G
  MOD_RES (22), (23), (24), (25): Xaa is A or G or is absent
TXXVPTRLSNITIQIMXXXXXXXXXIGEMSDMVVESX

SEQ ID NO: 37000 - protein, 35 aa, Artificial Sequence
  Non-cyclic GFR-binding peptide
  MOD_RES (1), (33), (35): Xaa is C or S
XVPARLSNITIQIMDAANNVVIGEMSDMVVEAXGX

SEQ ID NO: 37001 - protein, 41 aa, Artificial Sequence
  Non-cyclic GFR-binding peptide
  MOD_RES (5), (6), (40): Xaa is C or S
  MOD_RES (20), (21), (22), (23), (24): Xaa is A or G
  MOD_RES (25), (26), (27), (28): Xaa is A or G or is absent
TPPTXXVPTRLSNITIQIMXXXXXXXXXIGEMSDMVVESXG

SEQ ID NO: 37002 - protein, 34 aa, Artificial Sequence
  Non-cyclic GFR-binding peptide
  MOD_RES (1), (2): Xaa is C or S
  MOD_RES (16), (17), (18), (19), (20): Xaa is A or G
  MOD_RES (21), (22), (23), (24): Xaa is A or G or is absent
XXVPARLSNITIQIMXXXXXXXXXLGEMSDMVVE

SEQ ID NO: 37003 - protein, 37 aa, Artificial Sequence
  Non-cyclic GFR-binding peptide
  MOD_RES (4), (5): Xaa is C or S
  MOD_RES (19), (20), (21), (22), (23): Xaa is A or G
  MOD_RES (24), (25), (26), (27): Xaa is A or G or is absent
ASPXXVPQDLSNITIQIMXXXXXXXXXLGEMSMVVKS

SEQ ID NO: 37004 - protein, 33 aa, Artificial Sequence
  Non-cyclic GFR-binding peptide
  MOD_RES (33), (33): Xaa is C or S
  MOD_RES (14), (15), (16), (17), (18): Xaa is A or G
  MOD_RES (19), (20), (21), (22): Xaa is A or G or is absent
VPQALSNITIQIMXXXXXXXXXLGEMSMIVRSX

SEQ ID NO: 37005 - protein, 36 aa, Artificial Sequence
  Non-cyclic GFR-binding peptide
  MOD_RES (5), (6): Xaa is C or S
APASXXVPARLSNITIQIMDAANNVVLGEMSDMVVE

SEQ ID NO: 37006 - protein, 42 aa, Artificial Sequence
  Non-cyclic GFR-binding peptide
  MOD_RES (6), (7), (39), (41): Xaa is C or S
AAPASXXVPARLSNITIQIMDAANNVVLGEMSDMVVEAXGXR

SEQ ID NO: 37007 - protein, 34 aa, Artificial Sequence
  Non-cyclic GFR-binding peptide
  MOD_RES (34), (34): Xaa is C or S
  MOD_RES (14), (15), (16), (17), (18): Xaa is A or G
  MOD_RES (19), (20), (21), (22): Xaa is A or G or is absent
VPARLSNITIQIMXXXXXXXXXIGEMSDMVVEAX

SEQ ID NO: 37008 - protein, 41 aa, Artificial Sequence
  Non-cyclic GFR-binding peptide
  MOD_RES (6), (7), (39), (41): Xaa is C or S
GSAGPXXTPTKMSNITMQIMNDKQQIIIGEMSGMVVDRXGX

SEQ ID NO: 37009 - protein, 38 aa, Artificial Sequence
  Non-cyclic GFR-binding peptide
  MOD_RES (2), (3), (37): Xaa is C or S
  MOD_RES (17), (18), (19), (20), (21): Xaa is A or G
  MOD_RES (22), (23), (24), (25): Xaa is A or G or is absent
TXXVPTRLSNITIQIMXXXXXXXXXIGEMSDMVVESXG

SEQ ID NO: 37010 - protein, 42 aa, Artificial Sequence
  Non-cyclic GFR-binding peptide
  MOD_RES (6), (7), (40), (42): Xaa is C or S
  MOD_RES (21), (22), (23), (24), (25): Xaa is A or G
  MOD_RES (26), (27), (28), (29): Xaa is A or G or is absent
ASASPXXVPQDLSNITIQIMXXXXXXXXXLGEMSMVVKSXKX

SEQ ID NO: 37011 - protein, 41 aa, Artificial Sequence
  Non-cyclic GFR-binding peptide
  MOD_RES (3), (4), (38), (40): Xaa is C or S
  MOD_RES (18), (19), (20), (21), (22): Xaa is A or G
  MOD_RES (23), (24), (25), (26): Xaa is A or G or is absent
KPXXAPTKLSNITVQIMXXXXXXXXXLGEMSNMVVRSXGXH

SEQ ID NO: 37012 - protein, 37 aa, Artificial Sequence
  Non-cyclic GFR-binding peptide
  MOD_RES (2), (3), (37): Xaa is C or S
  MOD_RES (17), (18), (19), (20), (21): Xaa is A or G
  MOD_RES (22), (23), (24), (25): Xaa is A or G or is absent
TXXVPTRLSNITIQIMXXXXXXXXXLGEMSDMVVESX

SEQ ID NO: 37013 - protein, 34 aa, Artificial Sequence
  Non-cyclic GFR-binding peptide
  MOD_RES (34), (34): Xaa is C or S
  MOD_RES (14), (15), (16), (17), (18): Xaa is A or G
  MOD_RES (19), (20), (21), (22): Xaa is A or G or is absent
VPTRLSNITIQIMXXXXXXXXXLGEMSDMVVESX

SEQ ID NO: 37014 - protein, 39 aa, Artificial Sequence
  Non-cyclic GFR-binding peptide
  MOD_RES (6), (7), (38): Xaa is C or S
ASASPXXVPQDLSNITIQIMVGRTPKVLGEMSMVVKSXK

SEQ ID NO: 37015 - protein, 37 aa, Artificial Sequence
  Non-cyclic GFR-binding peptide
  MOD_RES (1), (2), (36): Xaa is C or S
  MOD_RES (16), (17), (18), (19), (20): Xaa is A or G
  MOD_RES (21), (22), (23), (24): Xaa is A or G or is absent
XXVPTRLSNITIQIMXXXXXXXXXIGEMSDMVVESXG

SEQ ID NO: 37016 - protein, 42 aa, Artificial Sequence
  Non-cyclic GFR-binding peptide
  MOD_RES (5), (6), (39), (41): Xaa is C or S
  MOD_RES (20), (21), (22), (23), (24): Xaa is A or G
  MOD_RES (25), (26), (27), (28): Xaa is A or G or is absent
VPSTXXAPVKTSNITMQIMXXXXXXXXXLGEMSMIVEEXGXL

SEQ ID NO: 37017 - protein, 38 aa, Artificial Sequence
  Non-cyclic GFR-binding peptide
  MOD_RES (6), (7), (38): Xaa is C or S
RVPSTXXAPVKTSNITMQIMDNGRVLLIGEMSMIVEEX

SEQ ID NO: 37018 - protein, 30 aa, Artificial Sequence
  Non-cyclic GFR-binding peptide
VPQALSNITIQIMVGRKPKVLGEMSMIVRS

SEQ ID NO: 37019 - protein, 35 aa, Artificial Sequence
  Non-cyclic GFR-binding peptide
  MOD_RES (1), (2), (35): Xaa is C or S
  MOD_RES (16), (17), (18), (19), (20): Xaa is A or G
  MOD_RES (21), (22), (23), (24): Xaa is A or G or is absent
XXVPQDLSNITIQIMXXXXXXXXXLGEMSMVVKSX

SEQ ID NO: 37020 - protein, 31 aa, Artificial Sequence
  Non-cyclic GFR-binding peptide
  MOD_RES (31), (31): Xaa is C or S
VSQDLSNITIQIMIGKTPKILGEMSMIVKSX

SEQ ID NO: 37021 - protein, 39 aa, Artificial Sequence
  Non-cyclic GFR-binding peptide
  MOD_RES (4), (5), (39): Xaa is C or S
  MOD_RES (19), (20), (21), (22), (23): Xaa is A or G
  MOD_RES (24), (25), (26), (27): Xaa is A or G or is absent
PPTXXVPTRLSNITIQIMXXXXXXXXXIGEMSDMVVESX

SEQ ID NO: 37022 - protein, 39 aa, Artificial Sequence
  Non-cyclic GFR-binding peptide
  MOD_RES (2), (3), (37), (39): Xaa is C or S
  MOD_RES (17), (18), (19), (20), (21): Xaa is A or G
  MOD_RES (22), (23), (24), (25): Xaa is A or G or is absent
SXXVPARLSNITIQIMXXXXXXXXXLGEMSDMVVEAXGX

SEQ ID NO: 37023 - protein, 37 aa, Artificial Sequence
  Non-cyclic GFR-binding peptide
  MOD_RES (3), (4): Xaa is C or S
  MOD_RES (18), (19), (20), (21), (22): Xaa is A or G
  MOD_RES (23), (24), (25), (26): Xaa is A or G or is absent
PTXXVPTRLSNITIQIMXXXXXXXXXLGEMSDMVVES

SEQ ID NO: 37024 - protein, 32 aa, Artificial Sequence
  Non-cyclic GFR-binding peptide
  MOD_RES (1), (2): Xaa is C or S
XXVPTRLSNITIQIMDSANNVVLGEMSDMVVE

SEQ ID NO: 37025 - protein, 34 aa, Artificial Sequence
  Non-cyclic GFR-binding peptide
  MOD_RES (1), (34): Xaa is C or S
  MOD_RES (15), (16), (17), (18), (19): Xaa is A or G
  MOD_RES (20), (21), (22), (23): Xaa is A or G or is absent
XAPVKTSNITMQIMXXXXXXXXXIGEMSMIVEEX

SEQ ID NO: 37026 - protein, 38 aa, Artificial Sequence
  Non-cyclic GFR-binding peptide
  MOD_RES (4), (5), (37): Xaa is C or S
PKPXXAPTKLSNITVQIMDDSSNVILGEMSNMVVRSXG

SEQ ID NO: 37027 - protein, 36 aa, Artificial Sequence
  Non-cyclic GFR-binding peptide
  MOD_RES (1), (35): Xaa is C or S
  MOD_RES (15), (16), (17), (18), (19): Xaa is A or G
  MOD_RES (20), (21), (22), (23): Xaa is A or G or is absent
XVPARLSNITIQIMXXXXXXXXXLGEMSDMVVEAXG

SEQ ID NO: 37028 - protein, 34 aa, Artificial Sequence
  Non-cyclic GFR-binding peptide
  MOD_RES (32), (34): Xaa is C or S
APTKLSNITVQIMDDSSNVILGEMSNMVVRSXGX

SEQ ID NO: 37029 - protein, 38 aa, Artificial Sequence
  Non-cyclic GFR-binding peptide
  MOD_RES (3), (4), (35), (37): Xaa is C or S
APXXVPQALSNITIQIMVGRKPKVLGEMSMIVRSXKXS

SEQ ID NO: 37030 - protein, 34 aa, Artificial Sequence
  Non-cyclic GFR-binding peptide
  MOD_RES (34), (34): Xaa is C or S
  MOD_RES (14), (15), (16), (17), (18): Xaa is A or G
  MOD_RES (19), (20), (21), (22): Xaa is A or G or is absent
TPTKMSNITMQIMXXXXXXXXXLGEMSGMVVDRX

SEQ ID NO: 37031 - protein, 43 aa, Artificial Sequence
  Non-cyclic GFR-binding peptide
  MOD_RES (5), (6), (40), (42): Xaa is C or S
  MOD_RES (20), (21), (22), (23), (24): Xaa is A or G
  MOD_RES (25), (26), (27), (28): Xaa is A or G or is absent
SAGPXXTPTKMSNITMQIMXXXXXXXXXLGEMSGMVVDRXGXS

SEQ ID NO: 37032 - protein, 36 aa, Artificial Sequence
  Non-cyclic GFR-binding peptide
  MOD_RES (2), (3): Xaa is C or S
  MOD_RES (17), (18), (19), (20), (21): Xaa is A or G
  MOD_RES (22), (23), (24), (25): Xaa is A or G or is absent
PXXTPTKMSNITMQIMXXXXXXXXXLGEMSGMVVDR

SEQ ID NO: 37033 - protein, 37 aa, Artificial Sequence
  Non-cyclic GFR-binding peptide
  MOD_RES (1), (2), (36): Xaa is C or S
  MOD_RES (16), (17), (18), (19), (20): Xaa is A or G
  MOD_RES (21), (22), (23), (24): Xaa is A or G or is absent
XXVPTRLSNITIQIMXXXXXXXXXLGEMSDMVVESXG

SEQ ID NO: 37034 - protein, 36 aa, Artificial Sequence
  Non-cyclic GFR-binding peptide
  MOD_RES (3), (4), (35): Xaa is C or S
SPXXVPQDLSNITIQIMVGRTPKVLGEMSMVVKSXK

SEQ ID NO: 37035 - protein, 37 aa, Artificial Sequence
  Non-cyclic GFR-binding peptide
  MOD_RES (6), (7): Xaa is C or S
AAPASXXVPARLSNITIQIMDAANNVVIGEMSDMVVE

SEQ ID NO: 37036 - protein, 33 aa, Artificial Sequence
  Non-cyclic GFR-binding peptide
  MOD_RES (32), (32): Xaa is C or S
APTKLSNITVQIMDDSSNVILGEMSNMVVRSXG

SEQ ID NO: 37037 - protein, 30 aa, Artificial Sequence
  Non-cyclic GFR-binding peptide
VPARLSNITIQIMDAANNVVLGEMSDMVVE

SEQ ID NO: 37038 - protein, 41 aa, Artificial Sequence
  Non-cyclic GFR-binding peptide
  MOD_RES (6), (7), (41): Xaa is C or S
  MOD_RES (21), (22), (23), (24), (25): Xaa is A or G
  MOD_RES (26), (27), (28), (29): Xaa is A or G or is absent
GSAGPXXTPTKMSNITMQIMXXXXXXXXXLGEMSGMVVDRX

SEQ ID NO: 37039 - protein, 34 aa, Artificial Sequence
  Non-cyclic GFR-binding peptide
  MOD_RES (32), (34): Xaa is C or S
VPTRLSNITIQIMDSANNVVIGEMSDMVVESXGX

SEQ ID NO: 37040 - protein, 39 aa, Artificial Sequence
  Non-cyclic GFR-binding peptide
  MOD_RES (6), (7), (38): Xaa is C or S
ASASPXXVSQDLSNITIQIMIGKTPKILGEMSMIVKSXK

SEQ ID NO: 37041 - protein, 37 aa, Artificial Sequence
  Non-cyclic GFR-binding peptide
  MOD_RES (2), (3), (37): Xaa is C or S
  MOD_RES (17), (18), (19), (20), (21): Xaa is A or G
  MOD_RES (22), (23), (24), (25): Xaa is A or G or is absent
PXXTPTKMSNITMQIMXXXXXXXXXIGEMSGMVVDRX

SEQ ID NO: 37042 - protein, 39 aa, Artificial Sequence
  Non-cyclic GFR-binding peptide
  MOD_RES (6), (7): Xaa is C or S
  MOD_RES (21), (22), (23), (24), (25): Xaa is A or G
  MOD_RES (26), (27), (28), (29): Xaa is A or G or is absent
HVPKPXXAPTKLSNITVQIMXXXXXXXXXLGEMSNMVVR

SEQ ID NO: 37043 - protein, 38 aa, Artificial Sequence
  Non-cyclic GFR-binding peptide
  MOD_RES (6), (7), (38): Xaa is C or S
ASASPXXVSQDLSNITIQIMIGKTPKILGEMSMIVKSX

SEQ ID NO: 37044 - protein, 37 aa, Artificial Sequence
  Non-cyclic GFR-binding peptide
  MOD_RES (3), (4), (35), (37): Xaa is C or S
STXXAPVKTSNITMQIMDNGRVLLIGEMSMIVEEXGX

SEQ ID NO: 37045 - protein, 33 aa, Artificial Sequence
  Non-cyclic GFR-binding peptide
  MOD_RES (32), (32): Xaa is C or S
VPARLSNITIQIMDAANNVVIGEMSDMVVEAXG

SEQ ID NO: 37046 - protein, 35 aa, Artificial Sequence
  Non-cyclic GFR-binding peptide
  MOD_RES (2), (3): Xaa is C or S
  MOD_RES (17), (18), (19), (20), (21): Xaa is A or G
  MOD_RES (22), (23), (24), (25): Xaa is A or G or is absent
PXXTPTKMSNITMQIMXXXXXXXXXIGEMSGMVVD

SEQ ID NO: 37047 - protein, 36 aa, Artificial Sequence
  Non-cyclic GFR-binding peptide
  MOD_RES (3), (4), (35): Xaa is C or S
SPXXVSQDLSNITIQIMIGKTPKILGEMSMIVKSXK

SEQ ID NO: 37048 - protein, 37 aa, Artificial Sequence
  Non-cyclic GFR-binding peptide
  MOD_RES (2), (3), (37): Xaa is C or S
  MOD_RES (17), (18), (19), (20), (21): Xaa is A or G
  MOD_RES (22), (23), (24), (25): Xaa is A or G or is absent
PXXTPTKMSNITMQIMXXXXXXXXXLGEMSGMVVDRX

SEQ ID NO: 37049 - protein, 35 aa, Artificial Sequence
  Non-cyclic GFR-binding peptide
  MOD_RES (4), (5): Xaa is C or S
AGPXXTPTKMSNITMQIMNDKQQIIIGEMSGMVVD

SEQ ID NO: 37050 - protein, 31 aa, Artificial Sequence
  Non-cyclic GFR-binding peptide
VPTRLSNITIQIMDSANNVVLGEMSDMVVES

SEQ ID NO: 37051 - protein, 39 aa, Artificial Sequence
  Non-cyclic GFR-binding peptide
  MOD_RES (3), (4), (37), (39): Xaa is C or S
  MOD_RES (18), (19), (20), (21), (22): Xaa is A or G
  MOD_RES (23), (24), (25), (26): Xaa is A or G or is absent
SPXXVPQDLSNITIQIMXXXXXXXXXLGEMSMVVKSXKX

SEQ ID NO: 37052 - protein, 38 aa, Artificial Sequence
  Non-cyclic GFR-binding peptide
  MOD_RES (4), (5), (37): Xaa is C or S
PASXXVPARLSNITIQIMDAANNVVIGEMSDMVVEAXG

SEQ ID NO: 37053 - protein, 37 aa, Artificial Sequence
  Non-cyclic GFR-binding peptide
  MOD_RES (4), (5): Xaa is C or S
  MOD_RES (19), (20), (21), (22), (23): Xaa is A or G
  MOD_RES (24), (25), (26), (27): Xaa is A or G or is absent
ASPXXVSQDLSNITIQIMXXXXXXXXXLGEMSMIVKS

SEQ ID NO: 37054 - protein, 37 aa, Artificial Sequence
  Non-cyclic GFR-binding peptide
  MOD_RES (4), (5): Xaa is C or S
  MOD_RES (19), (20), (21), (22), (23): Xaa is A or G
  MOD_RES (24), (25), (26), (27): Xaa is A or G or is absent
PPTXXVPTRLSNITIQIMXXXXXXXXXIGEMSDMVVE

SEQ ID NO: 37055 - protein, 41 aa, Artificial Sequence
  Non-cyclic GFR-binding peptide
  MOD_RES (5), (6), (40): Xaa is C or S
  MOD_RES (20), (21), (22), (23), (24): Xaa is A or G
  MOD_RES (25), (26), (27), (28): Xaa is A or G or is absent
TPPTXXVPTRLSNITIQIMXXXXXXXXXLGEMSDMVVESXG

SEQ ID NO: 37056 - protein, 31 aa, Artificial Sequence
  Non-cyclic GFR-binding peptide
  MOD_RES (1), (1): Xaa is C or S
XVPARLSNITIQIMDAANNVVLGEMSDMVVE

SEQ ID NO: 37057 - protein, 33 aa, Artificial Sequence
  Non-cyclic GFR-binding peptide
  MOD_RES (32), (32): Xaa is C or S
TPTKMSNITMQIMNDKQQIIIGEMSGMVVDRXG

SEQ ID NO: 37058 - protein, 39 aa, Artificial Sequence
  Non-cyclic GFR-binding peptide
  MOD_RES (5), (6), (39): Xaa is C or S
  MOD_RES (20), (21), (22), (23), (24): Xaa is A or G
  MOD_RES (25), (26), (27), (28): Xaa is A or G or is absent
SASPXXVPQDLSNITIQIMXXXXXXXXXLGEMSMVVKSX

SEQ ID NO: 37059 - protein, 36 aa, Artificial Sequence
  Non-cyclic GFR-binding peptide
  MOD_RES (1), (2), (35): Xaa is C or S
  MOD_RES (16), (17), (18), (19), (20): Xaa is A or G
  MOD_RES (21), (22), (23), (24): Xaa is A or G or is absent
XXVPQALSNITIQIMXXXXXXXXXLGEMSMIVRSXK

SEQ ID NO: 37060 - protein, 40 aa, Artificial Sequence
  Non-cyclic GFR-binding peptide
  MOD_RES (5), (6), (37), (39): Xaa is C or S
VPSTXXAPVKTSNITMQIMDNGRVLLLGEMSMIVEEXGXL

SEQ ID NO: 37061 - protein, 32 aa, Artificial Sequence
  Non-cyclic GFR-binding peptide
  MOD_RES (32), (32): Xaa is C or S
VPTRLSNITIQIMDSANNVVIGEMSDMVVESX

SEQ ID NO: 37062 - protein, 33 aa, Artificial Sequence
  Non-cyclic GFR-binding peptide
  MOD_RES (1), (1): Xaa is C or S
  MOD_RES (15), (16), (17), (18), (19): Xaa is A or G
  MOD_RES (20), (21), (22), (23): Xaa is A or G or is absent
XAPVKTSNITMQIMXXXXXXXXXLGEMSMIVEE

SEQ ID NO: 37063 - protein, 35 aa, Artificial Sequence
  Non-cyclic GFR-binding peptide
  MOD_RES (1), (2): Xaa is C or S
  MOD_RES (16), (17), (18), (19), (20): Xaa is A or G
  MOD_RES (21), (22), (23), (24): Xaa is A or G or is absent
XXTPTKMSNITMQIMXXXXXXXXXIGEMSGMVVDR

SEQ ID NO: 37064 - protein, 44 aa, Artificial Sequence
  Non-cyclic GFR-binding peptide
  MOD_RES (6), (7), (41), (43): Xaa is C or S
  MOD_RES (21), (22), (23), (24), (25): Xaa is A or G
  MOD_RES (26), (27), (28), (29): Xaa is A or G or is absent
AAPASXXVPARLSNITIQIMXXXXXXXXXIGEMSDMVVEAXGXR

SEQ ID NO: 37065 - protein, 37 aa, Artificial Sequence
  Non-cyclic GFR-binding peptide
  MOD_RES (2), (3), (35), (37): Xaa is C or S
PXXTPTKMSNITMQIMNDKQQIIIGEMSGMVVDRXGX

SEQ ID NO: 37066 - protein, 33 aa, Artificial Sequence
  Non-cyclic GFR-binding peptide
  MOD_RES (1), (1): Xaa is C or S
  MOD_RES (15), (16), (17), (18), (19): Xaa is A or G
  MOD_RES (20), (21), (22), (23): Xaa is A or G or is absent
XAPVKTSNITMQIMXXXXXXXXXIGEMSMIVEE

SEQ ID NO: 37067 - protein, 43 aa, Artificial Sequence
  Non-cyclic GFR-binding peptide
  MOD_RES (6), (7), (41), (43): Xaa is C or S
  MOD_RES (21), (22), (23), (24), (25): Xaa is A or G
  MOD_RES (26), (27), (28), (29): Xaa is A or G or is absent
HVPKPXXAPTKLSNITVQIMXXXXXXXXXLGEMSNMVVRSXGX

SEQ ID NO: 37068 - protein, 35 aa, Artificial Sequence
  Non-cyclic GFR-binding peptide
  MOD_RES (2), (3), (34): Xaa is C or S
PXXVPQDLSNITIQIMVGRTPKVLGEMSMVVKSXK

SEQ ID NO: 37069 - protein, 36 aa, Artificial Sequence
  Non-cyclic GFR-binding peptide
  MOD_RES (2), (3): Xaa is C or S
  MOD_RES (17), (18), (19), (20), (21): Xaa is A or G
  MOD_RES (22), (23), (24), (25): Xaa is A or G or is absent
SXXVPARLSNITIQIMXXXXXXXXXLGEMSDMVVEA

SEQ ID NO: 37070 - protein, 43 aa, Artificial Sequence
  Non-cyclic GFR-binding peptide
  MOD_RES (6), (7), (41), (43): Xaa is C or S
  MOD_RES (21), (22), (23), (24), (25): Xaa is A or G
  MOD_RES (26), (27), (28), (29): Xaa is A or G or is absent
STPPTXXVPTRLSNITIQIMXXXXXXXXXIGEMSDMVVESXGX

SEQ ID NO: 37071 - protein, 34 aa, Artificial Sequence
  Non-cyclic GFR-binding peptide
  MOD_RES (2), (3): Xaa is C or S
TXXVPTRLSNITIQIMDSANNVVLGEMSDMVVES

SEQ ID NO: 37072 - protein, 33 aa, Artificial Sequence
  Non-cyclic GFR-binding peptide
  MOD_RES (32), (32): Xaa is C or S
VPARLSNITIQIMDAANNVVLGEMSDMVVEAXG

SEQ ID NO: 37073 - protein, 33 aa, Artificial Sequence
  Non-cyclic GFR-binding peptide
  MOD_RES (1), (2), (33): Xaa is C or S
XXAPVKTSNITMQIMDNGRVLLLGEMSMIVEEX

SEQ ID NO: 37074 - protein, 35 aa, Artificial Sequence
  Non-cyclic GFR-binding peptide
  MOD_RES (4), (5): Xaa is C or S
AGPXXTPTKMSNITMQIMNDKQQIILGEMSGMVVD

SEQ ID NO: 37075 - protein, 37 aa, Artificial Sequence
  Non-cyclic GFR-binding peptide
  MOD_RES (4), (5): Xaa is C or S
  MOD_RES (19), (20), (21), (22), (23): Xaa is A or G
  MOD_RES (24), (25), (26), (27): Xaa is A or G or is absent
PPTXXVPTRLSNITIQIMXXXXXXXXXLGEMSDMVVE

SEQ ID NO: 37076 - protein, 31 aa, Artificial Sequence
  Non-cyclic GFR-binding peptide
  MOD_RES (31), (31): Xaa is C or S
APVKTSNITMQIMDNGRVLLIGEMSMIVEEX

SEQ ID NO: 37077 - protein, 32 aa, Artificial Sequence
  Non-cyclic GFR-binding peptide
  MOD_RES (1), (32): Xaa is C or S
XVPQDLSNITIQIMVGRTPKVLGEMSMVVKSX

SEQ ID NO: 37078 - protein, 35 aa, Artificial Sequence
  Non-cyclic GFR-binding peptide
  MOD_RES (2), (3): Xaa is C or S
  MOD_RES (17), (18), (19), (20), (21): Xaa is A or G
  MOD_RES (22), (23), (24), (25): Xaa is A or G or is absent
PXXTPTKMSNITMQIMXXXXXXXXXLGEMSGMVVD

SEQ ID NO: 37079 - protein, 38 aa, Artificial Sequence
  Non-cyclic GFR-binding peptide
  MOD_RES (4), (5), (37): Xaa is C or S
AGPXXTPTKMSNITMQIMNDKQQIIIGEMSGMVVDRXG

SEQ ID NO: 37080 - protein, 37 aa, Artificial Sequence
  Non-cyclic GFR-binding peptide
  MOD_RES (2), (3), (34), (36): Xaa is C or S
TXXAPVKTSNITMQIMDNGRVLLIGEMSMIVEEXGXL

SEQ ID NO: 37081 - protein, 33 aa, Artificial Sequence
  Non-cyclic GFR-binding peptide
  MOD_RES (1), (1): Xaa is C or S
  MOD_RES (15), (16), (17), (18), (19): Xaa is A or G
  MOD_RES (20), (21), (22), (23): Xaa is A or G or is absent
XAPTKLSNITVQIMXXXXXXXXXLGEMSNMVVR

SEQ ID NO: 37082 - protein, 36 aa, Artificial Sequence
  Non-cyclic GFR-binding peptide
  MOD_RES (2), (3), (36): Xaa is C or S
  MOD_RES (17), (18), (19), (20), (21): Xaa is A or G
  MOD_RES (22), (23), (24), (25): Xaa is A or G or is absent
TXXAPVKTSNITMQIMXXXXXXXXXIGEMSMIVEEX

SEQ ID NO: 37083 - protein, 42 aa, Artificial Sequence
  Non-cyclic GFR-binding peptide
  MOD_RES (4), (5), (39), (41): Xaa is C or S
  MOD_RES (19), (20), (21), (22), (23): Xaa is A or G
  MOD_RES (24), (25), (26), (27): Xaa is A or G or is absent
PASXXVPARLSNITIQIMXXXXXXXXXIGEMSDMVVEAXGXR

SEQ ID NO: 37084 - protein, 33 aa, Artificial Sequence
  Non-cyclic GFR-binding peptide
  MOD_RES (14), (15), (16), (17), (18): Xaa is A or G
  MOD_RES (19), (20), (21), (22): Xaa is A or G or is absent
VPTRLSNITIQIMXXXXXXXXXIGEMSDMVVES

SEQ ID NO: 37085 - protein, 37 aa, Artificial Sequence
  Non-cyclic GFR-binding peptide
  MOD_RES (1), (2), (35), (37): Xaa is C or S
  MOD_RES (16), (17), (18), (19), (20): Xaa is A or G
  MOD_RES (21), (22), (23), (24): Xaa is A or G or is absent
XXVPQALSNITIQIMXXXXXXXXXLGEMSMIVRSXKX

SEQ ID NO: 37086 - protein, 42 aa, Artificial Sequence
  Non-cyclic GFR-binding peptide
  MOD_RES (6), (7), (39), (41): Xaa is C or S
HVPKPXXAPTKLSNITVQIMDDSSNVIIGEMSNMVVRSXGXH

SEQ ID NO: 37087 - protein, 40 aa, Artificial Sequence
  Non-cyclic GFR-binding peptide
  MOD_RES (3), (4), (37), (39): Xaa is C or S
  MOD_RES (18), (19), (20), (21), (22): Xaa is A or G
  MOD_RES (23), (24), (25), (26): Xaa is A or G or is absent
APXXVPQALSNITIQIMXXXXXXXXXLGEMSMIVRSXKXS

SEQ ID NO: 37088 - protein, 39 aa, Artificial Sequence
  Non-cyclic GFR-binding peptide
  MOD_RES (3), (4), (36), (38): Xaa is C or S
ASXXVPARLSNITIQIMDAANNVVIGEMSDMVVEAXGXR

SEQ ID NO: 37089 - protein, 38 aa, Artificial Sequence
  Non-cyclic GFR-binding peptide
  MOD_RES (1), (2), (35), (37): Xaa is C or S
  MOD_RES (16), (17), (18), (19), (20): Xaa is A or G
  MOD_RES (21), (22), (23), (24): Xaa is A or G or is absent
XXVPQALSNITIQIMXXXXXXXXXLGEMSMIVRSXKXS

SEQ ID NO: 37090 - protein, 42 aa, Artificial Sequence
  Non-cyclic GFR-binding peptide
  MOD_RES (5), (6), (40), (42): Xaa is C or S
  MOD_RES (20), (21), (22), (23), (24): Xaa is A or G
  MOD_RES (25), (26), (27), (28): Xaa is A or G or is absent
VPKPXXAPTKLSNITVQIMXXXXXXXXXLGEMSNMVVRSXGX

SEQ ID NO: 37091 - protein, 40 aa, Artificial Sequence
  Non-cyclic GFR-binding peptide
  MOD_RES (3), (4), (38), (40): Xaa is C or S
  MOD_RES (18), (19), (20), (21), (22): Xaa is A or G
  MOD_RES (23), (24), (25), (26): Xaa is A or G or is absent
GPXXTPTKMSNITMQIMXXXXXXXXXIGEMSGMVVDRXGX

SEQ ID NO: 37092 - protein, 34 aa, Artificial Sequence
  Non-cyclic GFR-binding peptide
  MOD_RES (34), (34): Xaa is C or S
  MOD_RES (14), (15), (16), (17), (18): Xaa is A or G
  MOD_RES (19), (20), (21), (22): Xaa is A or G or is absent
TPTKMSNITMQIMXXXXXXXXXIGEMSGMVVDRX

SEQ ID NO: 37093 - protein, 35 aa, Artificial Sequence
  Non-cyclic GFR-binding peptide
  MOD_RES (4), (5): Xaa is C or S
PASXXVPARLSNITIQIMDAANNVVLGEMSDMVVE

SEQ ID NO: 37094 - protein, 34 aa, Artificial Sequence
  Non-cyclic GFR-binding peptide
  MOD_RES (1), (2), (33): Xaa is C or S
XXVPQDLSNITIQIMVGRTPKVLGEMSMVVKSXK

SEQ ID NO: 37095 - protein, 36 aa, Artificial Sequence
  Non-cyclic GFR-binding peptide
  MOD_RES (1), (2), (34), (36): Xaa is C or S
XXAPTKLSNITVQIMDDSSNVILGEMSNMVVRSXGX

SEQ ID NO: 37096 - protein, 39 aa, Artificial Sequence
  Non-cyclic GFR-binding peptide
  MOD_RES (5), (6): Xaa is C or S
  MOD_RES (20), (21), (22), (23), (24): Xaa is A or G
  MOD_RES (25), (26), (27), (28): Xaa is A or G or is absent
APASXXVPARLSNITIQIMXXXXXXXXXLGEMSDMVVEA

SEQ ID NO: 37097 - protein, 40 aa, Artificial Sequence
  Non-cyclic GFR-binding peptide
  MOD_RES (6), (7): Xaa is C or S
  MOD_RES (21), (22), (23), (24), (25): Xaa is A or G
  MOD_RES (26), (27), (28), (29): Xaa is A or G or is absent
STPPTXXVPTRLSNITIQIMXXXXXXXXXLGEMSDMVVES

SEQ ID NO: 37098 - protein, 38 aa, Artificial Sequence
  Non-cyclic GFR-binding peptide
  MOD_RES (4), (5), (36), (38): Xaa is C or S
ASPXXVPQDLSNITIQIMVGRTPKVLGEMSMVVKSXKX

SEQ ID NO: 37099 - protein, 37 aa, Artificial Sequence
  Non-cyclic GFR-binding peptide
  MOD_RES (2), (3), (34), (36): Xaa is C or S
PXXVPQDLSNITIQIMVGRTPKVLGEMSMVVKSXKXS

SEQ ID NO: 37100 - protein, 34 aa, Artificial Sequence
  Non-cyclic GFR-binding peptide
  MOD_RES (3), (4): Xaa is C or S
APXXVPQALSNITIQIMVGRKPKVLGEMSMIVRS

SEQ ID NO: 37101 - protein, 41 aa, Artificial Sequence
  Non-cyclic GFR-binding peptide
  MOD_RES (6), (7), (38), (40): Xaa is C or S
RVPSTXXAPVKTSNITMQIMDNGRVLLLGEMSMIVEEXGXL

SEQ ID NO: 37102 - protein, 40 aa, Artificial Sequence
  Non-cyclic GFR-binding peptide
  MOD_RES (5), (6), (40): Xaa is C or S
  MOD_RES (20), (21), (22), (23), (24): Xaa is A or G
  MOD_RES (25), (26), (27), (28): Xaa is A or G or is absent
TPPTXXVPTRLSNITIQIMXXXXXXXXXIGEMSDMVVESX

SEQ ID NO: 37103 - protein, 34 aa, Artificial Sequence
  Non-cyclic GFR-binding peptide
  MOD_RES (2), (3): Xaa is C or S
PXXTPTKMSNITMQIMNDKQQIILGEMSGMVVDR

SEQ ID NO: 37104 - protein, 38 aa, Artificial Sequence
  Non-cyclic GFR-binding peptide
  MOD_RES (5), (6), (38): Xaa is C or S
SAGPXXTPTKMSNITMQIMNDKQQIILGEMSGMVVDRX

SEQ ID NO: 37105 - protein, 37 aa, Artificial Sequence
  Non-cyclic GFR-binding peptide
  MOD_RES (4), (5): Xaa is C or S
  MOD_RES (19), (20), (21), (22), (23): Xaa is A or G
  MOD_RES (24), (25), (26), (27): Xaa is A or G or is absent
PASXXVPARLSNITIQIMXXXXXXXXXLGEMSDMVVE

SEQ ID NO: 37106 - protein, 40 aa, Artificial Sequence
  Non-cyclic GFR-binding peptide
  MOD_RES (6), (7): Xaa is C or S
  MOD_RES (21), (22), (23), (24), (25): Xaa is A or G
  MOD_RES (26), (27), (28), (29): Xaa is A or G or is absent
AAPASXXVPARLSNITIQIMXXXXXXXXXLGEMSDMVVEA

SEQ ID NO: 37107 - protein, 39 aa, Artificial Sequence
  Non-cyclic GFR-binding peptide
  MOD_RES (4), (5), (39): Xaa is C or S
  MOD_RES (19), (20), (21), (22), (23): Xaa is A or G
  MOD_RES (24), (25), (26), (27): Xaa is A or G or is absent
AGPXXTPTKMSNITMQIMXXXXXXXXXIGEMSGMVVDRX

SEQ ID NO: 37108 - protein, 39 aa, Artificial Sequence
  Non-cyclic GFR-binding peptide
  MOD_RES (5), (6), (39): Xaa is C or S
  MOD_RES (20), (21), (22), (23), (24): Xaa is A or G
  MOD_RES (25), (26), (27), (28): Xaa is A or G or is absent
SAAPXXVPQALSNITIQIMXXXXXXXXXLGEMSMIVRSX

SEQ ID NO: 37109 - protein, 34 aa, Artificial Sequence
  Non-cyclic GFR-binding peptide
  MOD_RES (1), (2), (33): Xaa is C or S
XXAPVKTSNITMQIMDNGRVLLLGEMSMIVEEXG

SEQ ID NO: 37110 - protein, 32 aa, Artificial Sequence
  Non-cyclic GFR-binding peptide
  MOD_RES (32), (32): Xaa is C or S
VPARLSNITIQIMDAANNVVIGEMSDMVVEAX

SEQ ID NO: 37111 - protein, 32 aa, Artificial Sequence
  Non-cyclic GFR-binding peptide
  MOD_RES (1), (2): Xaa is C or S
XXVPTRLSNITIQIMDSANNVVIGEMSDMVVE

SEQ ID NO: 37112 - protein, 34 aa, Artificial Sequence
  Non-cyclic GFR-binding peptide
  MOD_RES (2), (3): Xaa is C or S
SXXVPARLSNITIQIMDAANNVVIGEMSDMVVEA

SEQ ID NO: 37113 - protein, 34 aa, Artificial Sequence
  Non-cyclic GFR-binding peptide
  MOD_RES (1), (2), (33): Xaa is C or S
XXAPVKTSNITMQIMDNGRVLLIGEMSMIVEEXG

SEQ ID NO: 37114 - protein, 37 aa, Artificial Sequence
  Non-cyclic GFR-binding peptide
  MOD_RES (34), (36): Xaa is C or S
  MOD_RES (14), (15), (16), (17), (18): Xaa is A or G
  MOD_RES (19), (20), (21), (22): Xaa is A or G or is absent
VPTRLSNITIQIMXXXXXXXXXLGEMSDMVVESXGXR

SEQ ID NO: 37115 - protein, 38 aa, Artificial Sequence
  Non-cyclic GFR-binding peptide
  MOD_RES (2), (3), (36), (38): Xaa is C or S
  MOD_RES (17), (18), (19), (20), (21): Xaa is A or G
  MOD_RES (22), (23), (24), (25): Xaa is A or G or is absent
TXXAPVKTSNITMQIMXXXXXXXXXLGEMSMIVEEXGX

SEQ ID NO: 37116 - protein, 37 aa, Artificial Sequence
  Non-cyclic GFR-binding peptide
  MOD_RES (4), (5): Xaa is C or S
  MOD_RES (19), (20), (21), (22), (23): Xaa is A or G
  MOD_RES (24), (25), (26), (27): Xaa is A or G or is absent
PKPXXAPTKLSNITVQIMXXXXXXXXXLGEMSNMVVR

SEQ ID NO: 37117 - protein, 35 aa, Artificial Sequence
  Non-cyclic GFR-binding peptide
  MOD_RES (2), (3): Xaa is C or S
  MOD_RES (17), (18), (19), (20), (21): Xaa is A or G
  MOD_RES (22), (23), (24), (25): Xaa is A or G or is absent
TXXAPVKTSNITMQIMXXXXXXXXXLGEMSMIVEE

SEQ ID NO: 37118 - protein, 44 aa, Artificial Sequence
  Non-cyclic GFR-binding peptide
  MOD_RES (6), (7), (41), (43): Xaa is C or S
  MOD_RES (21), (22), (23), (24), (25): Xaa is A or G
  MOD_RES (26), (27), (28), (29): Xaa is A or G or is absent
GSAGPXXTPTKMSNITMQIMXXXXXXXXXLGEMSGMVVDRXGXS

SEQ ID NO: 37119 - protein, 43 aa, Artificial Sequence
  Non-cyclic GFR-binding peptide
  MOD_RES (6), (7), (41), (43): Xaa is C or S
  MOD_RES (21), (22), (23), (24), (25): Xaa is A or G
  MOD_RES (26), (27), (28), (29): Xaa is A or G or is absent
AAPASXXVPARLSNITIQIMXXXXXXXXXLGEMSDMVVEAXGX

SEQ ID NO: 37120 - protein, 37 aa, Artificial Sequence
  Non-cyclic GFR-binding peptide
  MOD_RES (3), (4), (36): Xaa is C or S
GPXXTPTKMSNITMQIMNDKQQIIIGEMSGMVVDRXG

SEQ ID NO: 37121 - protein, 33 aa, Artificial Sequence
  Non-cyclic GFR-binding peptide
  MOD_RES (2), (3): Xaa is C or S
SXXVPARLSNITIQIMDAANNVVLGEMSDMVVE

SEQ ID NO: 37122 - protein, 38 aa, Artificial Sequence
  Non-cyclic GFR-binding peptide
  MOD_RES (3), (4), (38): Xaa is C or S
  MOD_RES (18), (19), (20), (21), (22): Xaa is A or G
  MOD_RES (23), (24), (25), (26): Xaa is A or G or is absent
GPXXTPTKMSNITMQIMXXXXXXXXXIGEMSGMVVDRX

SEQ ID NO: 37123 - protein, 37 aa, Artificial Sequence
  Non-cyclic GFR-binding peptide
  MOD_RES (3), (4), (36): Xaa is C or S
ASXXVPARLSNITIQIMDAANNVVLGEMSDMVVEAXG

SEQ ID NO: 37124 - protein, 40 aa, Artificial Sequence
  Non-cyclic GFR-binding peptide
  MOD_RES (4), (5), (37), (39): Xaa is C or S
PASXXVPARLSNITIQIMDAANNVVLGEMSDMVVEAXGXR

SEQ ID NO: 37125 - protein, 39 aa, Artificial Sequence
  Non-cyclic GFR-binding peptide
  MOD_RES (2), (3), (36), (38): Xaa is C or S
  MOD_RES (17), (18), (19), (20), (21): Xaa is A or G
  MOD_RES (22), (23), (24), (25): Xaa is A or G or is absent
PXXVPQALSNITIQIMXXXXXXXXXLGEMSMIVRSXKXS

SEQ ID NO: 37126 - protein, 32 aa, Artificial Sequence
  Non-cyclic GFR-binding peptide
  MOD_RES (1), (32): Xaa is C or S
XAPVKTSNITMQIMDNGRVLLIGEMSMIVEEX

SEQ ID NO: 37127 - protein, 39 aa, Artificial Sequence
  Non-cyclic GFR-binding peptide
  MOD_RES (3), (4), (38): Xaa is C or S
  MOD_RES (18), (19), (20), (21), (22): Xaa is A or G
  MOD_RES (23), (24), (25), (26): Xaa is A or G or is absent
ASXXVPARLSNITIQIMXXXXXXXXXLGEMSDMVVEAXG

SEQ ID NO: 37128 - protein, 41 aa, Artificial Sequence
  Non-cyclic GFR-binding peptide
  MOD_RES (4), (5), (39), (41): Xaa is C or S
  MOD_RES (19), (20), (21), (22), (23): Xaa is A or G
  MOD_RES (24), (25), (26), (27): Xaa is A or G or is absent
PPTXXVPTRLSNITIQIMXXXXXXXXXIGEMSDMVVESXGX

SEQ ID NO: 37129 - protein, 31 aa, Artificial Sequence
  Non-cyclic GFR-binding peptide
  MOD_RES (31), (31): Xaa is C or S
VPQDLSNITIQIMVGRTPKVLGEMSMVVKSX

SEQ ID NO: 37130 - protein, 36 aa, Artificial Sequence
  Non-cyclic GFR-binding peptide
  MOD_RES (3), (4): Xaa is C or S
  MOD_RES (18), (19), (20), (21), (22): Xaa is A or G
  MOD_RES (23), (24), (25), (26): Xaa is A or G or is absent
GPXXTPTKMSNITMQIMXXXXXXXXXLGEMSGMVVD

SEQ ID NO: 37131 - protein, 39 aa, Artificial Sequence
  Non-cyclic GFR-binding peptide
  MOD_RES (1), (2), (36), (38): Xaa is C or S
  MOD_RES (16), (17), (18), (19), (20): Xaa is A or G
  MOD_RES (21), (22), (23), (24): Xaa is A or G or is absent
XXVPTRLSNITIQIMXXXXXXXXXIGEMSDMVVESXGXR

SEQ ID NO: 37132 - protein, 40 aa, Artificial Sequence
  Non-cyclic GFR-binding peptide
  MOD_RES (5), (6), (38), (40): Xaa is C or S
VPKPXXAPTKLSNITVQIMDDSSNVILGEMSNMVVRSXGX

SEQ ID NO: 37133 - protein, 38 aa, Artificial Sequence
  Non-cyclic GFR-binding peptide
  MOD_RES (1), (35), (37): Xaa is C or S
  MOD_RES (15), (16), (17), (18), (19): Xaa is A or G
  MOD_RES (20), (21), (22), (23): Xaa is A or G or is absent
XVPARLSNITIQIMXXXXXXXXXIGEMSDMVVEAXGXR

SEQ ID NO: 37134 - protein, 37 aa, Artificial Sequence
  Non-cyclic GFR-binding peptide
  MOD_RES (3), (4), (36): Xaa is C or S
KPXXAPTKLSNITVQIMDDSSNVILGEMSNMVVRSXG

SEQ ID NO: 37135 - protein, 34 aa, Artificial Sequence
  Non-cyclic GFR-binding peptide
  MOD_RES (1), (33): Xaa is C or S
XTPTKMSNITMQIMNDKQQIILGEMSGMVVDRXG

SEQ ID NO: 37136 - protein, 42 aa, Artificial Sequence
  Non-cyclic GFR-binding peptide
  MOD_RES (5), (6), (39), (41): Xaa is C or S
  MOD_RES (20), (21), (22), (23), (24): Xaa is A or G
  MOD_RES (25), (26), (27), (28): Xaa is A or G or is absent
SAAPXXVPQALSNITIQIMXXXXXXXXXLGEMSMIVRSXKXS

SEQ ID NO: 37137 - protein, 38 aa, Artificial Sequence
  Non-cyclic GFR-binding peptide
  MOD_RES (3), (4), (37): Xaa is C or S
  MOD_RES (18), (19), (20), (21), (22): Xaa is A or G
  MOD_RES (23), (24), (25), (26): Xaa is A or G or is absent
SPXXVSQDLSNITIQIMXXXXXXXXXLGEMSMIVKSXK

SEQ ID NO: 37138 - protein, 38 aa, Artificial Sequence
  Non-cyclic GFR-binding peptide
  MOD_RES (2), (3), (37): Xaa is C or S
  MOD_RES (17), (18), (19), (20), (21): Xaa is A or G
  MOD_RES (22), (23), (24), (25): Xaa is A or G or is absent
SXXVPARLSNITIQIMXXXXXXXXXIGEMSDMVVEAXG

SEQ ID NO: 37139 - protein, 37 aa, Artificial Sequence
  Non-cyclic GFR-binding peptide
  MOD_RES (4), (5), (36): Xaa is C or S
AAPXXVPQALSNITIQIMVGRKPKVLGEMSMIVRSXK

SEQ ID NO: 37140 - protein, 35 aa, Artificial Sequence
  Non-cyclic GFR-binding peptide
  MOD_RES (1), (32), (34): Xaa is C or S
XAPVKTSNITMQIMDNGRVLLIGEMSMIVEEXGXL

SEQ ID NO: 37141 - protein, 33 aa, Artificial Sequence
  Non-cyclic GFR-binding peptide
  MOD_RES (1), (33): Xaa is C or S
XTPTKMSNITMQIMNDKQQIILGEMSGMVVDRX

SEQ ID NO: 37142 - protein, 35 aa, Artificial Sequence
  Non-cyclic GFR-binding peptide
  MOD_RES (34), (34): Xaa is C or S
  MOD_RES (14), (15), (16), (17), (18): Xaa is A or G
  MOD_RES (19), (20), (21), (22): Xaa is A or G or is absent
VPARLSNITIQIMXXXXXXXXXIGEMSDMVVEAXG

SEQ ID NO: 37143 - protein, 38 aa, Artificial Sequence
  Non-cyclic GFR-binding peptide
  MOD_RES (3), (4), (36), (38): Xaa is C or S
PTXXVPTRLSNITIQIMDSANNVVIGEMSDMVVESXGX

SEQ ID NO: 37144 - protein, 34 aa, Artificial Sequence
  Non-cyclic GFR-binding peptide
  MOD_RES (1), (2), (34): Xaa is C or S
XXVPARLSNITIQIMDAANNVVIGEMSDMVVEAX

SEQ ID NO: 37145 - protein, 36 aa, Artificial Sequence
  Non-cyclic GFR-binding peptide
  MOD_RES (1), (33), (35): Xaa is C or S
XVPARLSNITIQIMDAANNVVLGEMSDMVVEAXGXR

SEQ ID NO: 37146 - protein, 36 aa, Artificial Sequence
  Non-cyclic GFR-binding peptide
  MOD_RES (3), (4): Xaa is C or S
  MOD_RES (18), (19), (20), (21), (22): Xaa is A or G
  MOD_RES (23), (24), (25), (26): Xaa is A or G or is absent
SPXXVPQDLSNITIQIMXXXXXXXXXLGEMSMVVKS

SEQ ID NO: 37147 - protein, 41 aa, Artificial Sequence
  Non-cyclic GFR-binding peptide
  MOD_RES (3), (4), (38), (40): Xaa is C or S
  MOD_RES (18), (19), (20), (21), (22): Xaa is A or G
  MOD_RES (23), (24), (25), (26): Xaa is A or G or is absent
PTXXVPTRLSNITIQIMXXXXXXXXXLGEMSDMVVESXGXR

SEQ ID NO: 37148 - protein, 41 aa, Artificial Sequence
  Non-cyclic GFR-binding peptide
  MOD_RES (4), (5), (39), (41): Xaa is C or S
  MOD_RES (19), (20), (21), (22), (23): Xaa is A or G
  MOD_RES (24), (25), (26), (27): Xaa is A or G or is absent
PPTXXVPTRLSNITIQIMXXXXXXXXXLGEMSDMVVESXGX

SEQ ID NO: 37149 - protein, 36 aa, Artificial Sequence
  Non-cyclic GFR-binding peptide
  MOD_RES (4), (5), (36): Xaa is C or S
PSTXXAPVKTSNITMQIMDNGRVLLIGEMSMIVEEX

SEQ ID NO: 37150 - protein, 37 aa, Artificial Sequence
  Non-cyclic GFR-binding peptide
  MOD_RES (3), (4), (36): Xaa is C or S
ASXXVPARLSNITIQIMDAANNVVIGEMSDMVVEAXG

SEQ ID NO: 37151 - protein, 40 aa, Artificial Sequence
  Non-cyclic GFR-binding peptide
  MOD_RES (2), (3), (37), (39): Xaa is C or S
  MOD_RES (17), (18), (19), (20), (21): Xaa is A or G
  MOD_RES (22), (23), (24), (25): Xaa is A or G or is absent
SXXVPARLSNITIQIMXXXXXXXXXIGEMSDMVVEAXGXR

SEQ ID NO: 37152 - protein, 38 aa, Artificial Sequence
  Non-cyclic GFR-binding peptide
  MOD_RES (4), (5), (38): Xaa is C or S
  MOD_RES (19), (20), (21), (22), (23): Xaa is A or G
  MOD_RES (24), (25), (26), (27): Xaa is A or G or is absent
PSTXXAPVKTSNITMQIMXXXXXXXXXLGEMSMIVEEX

SEQ ID NO: 37153 - protein, 39 aa, Artificial Sequence
  Non-cyclic GFR-binding peptide
  MOD_RES (3), (4), (37), (39): Xaa is C or S
  MOD_RES (18), (19), (20), (21), (22): Xaa is A or G
  MOD_RES (23), (24), (25), (26): Xaa is A or G or is absent
STXXAPVKTSNITMQIMXXXXXXXXXIGEMSMIVEEXGX

SEQ ID NO: 37154 - protein, 38 aa, Artificial Sequence
  Non-cyclic GFR-binding peptide
  MOD_RES (2), (3), (37): Xaa is C or S
  MOD_RES (17), (18), (19), (20), (21): Xaa is A or G
  MOD_RES (22), (23), (24), (25): Xaa is A or G or is absent
PXXTPTKMSNITMQIMXXXXXXXXXIGEMSGMVVDRXG

SEQ ID NO: 37155 - protein, 39 aa, Artificial Sequence
  Non-cyclic GFR-binding peptide
  MOD_RES (1), (2), (36), (38): Xaa is C or S
  MOD_RES (16), (17), (18), (19), (20): Xaa is A or G
  MOD_RES (21), (22), (23), (24): Xaa is A or G or is absent
XXVPARLSNITIQIMXXXXXXXXXLGEMSDMVVEAXGXR

SEQ ID NO: 37156 - protein, 39 aa, Artificial Sequence
  Non-cyclic GFR-binding peptide
  MOD_RES (1), (2), (36), (38): Xaa is C or S
  MOD_RES (16), (17), (18), (19), (20): Xaa is A or G
  MOD_RES (21), (22), (23), (24): Xaa is A or G or is absent
XXTPTKMSNITMQIMXXXXXXXXXIGEMSGMVVDRXGXS

SEQ ID NO: 37157 - protein, 37 aa, Artificial Sequence
  Non-cyclic GFR-binding peptide
  MOD_RES (1), (2), (36): Xaa is C or S
  MOD_RES (16), (17), (18), (19), (20): Xaa is A or G
  MOD_RES (21), (22), (23), (24): Xaa is A or G or is absent
XXTPTKMSNITMQIMXXXXXXXXXLGEMSGMVVDRXG

SEQ ID NO: 37158 - protein, 31 aa, Artificial Sequence
  Non-cyclic GFR-binding peptide
  MOD_RES (1), (1): Xaa is C or S
XVPTRLSNITIQIMDSANNVVLGEMSDMVVE

SEQ ID NO: 37159 - protein, 34 aa, Artificial Sequence
  Non-cyclic GFR-binding peptide
  MOD_RES (1), (2): Xaa is C or S
  MOD_RES (16), (17), (18), (19), (20): Xaa is A or G
  MOD_RES (21), (22), (23), (24): Xaa is A or G or is absent
XXVPARLSNITIQIMXXXXXXXXXIGEMSDMVVE

SEQ ID NO: 37160 - protein, 33 aa, Artificial Sequence
  Non-cyclic GFR-binding peptide
  MOD_RES (1), (32): Xaa is C or S
XAPVKTSNITMQIMDNGRVLLLGEMSMIVEEXG

SEQ ID NO: 37161 - protein, 36 aa, Artificial Sequence
  Non-cyclic GFR-binding peptide
  MOD_RES (1), (35): Xaa is C or S
  MOD_RES (15), (16), (17), (18), (19): Xaa is A or G
  MOD_RES (20), (21), (22), (23): Xaa is A or G or is absent
XTPTKMSNITMQIMXXXXXXXXXIGEMSGMVVDRXG

SEQ ID NO: 37162 - protein, 39 aa, Artificial Sequence
  Non-cyclic GFR-binding peptide
  MOD_RES (4), (5), (38): Xaa is C or S
  MOD_RES (19), (20), (21), (22), (23): Xaa is A or G
  MOD_RES (24), (25), (26), (27): Xaa is A or G or is absent
ASPXXVSQDLSNITIQIMXXXXXXXXXLGEMSMIVKSXK

SEQ ID NO: 37163 - protein, 36 aa, Artificial Sequence
  Non-cyclic GFR-binding peptide
  MOD_RES (33), (35): Xaa is C or S
  MOD_RES (14), (15), (16), (17), (18): Xaa is A or G
  MOD_RES (19), (20), (21), (22): Xaa is A or G or is absent
VPQALSNITIQIMXXXXXXXXXLGEMSMIVRSXKXS

SEQ ID NO: 37164 - protein, 33 aa, Artificial Sequence
  Non-cyclic GFR-binding peptide
  MOD_RES (1), (2): Xaa is C or S
XXVPARLSNITIQIMDAANNVVLGEMSDMVVEA

SEQ ID NO: 37165 - protein, 37 aa, Artificial Sequence
  Non-cyclic GFR-binding peptide
  MOD_RES (34), (36): Xaa is C or S
  MOD_RES (14), (15), (16), (17), (18): Xaa is A or G
  MOD_RES (19), (20), (21), (22): Xaa is A or G or is absent
APTKLSNITVQIMXXXXXXXXXLGEMSNMVVRSXGXH

SEQ ID NO: 37166 - protein, 38 aa, Artificial Sequence
  Non-cyclic GFR-binding peptide
  MOD_RES (5), (6), (38): Xaa is C or S
SAGPXXTPTKMSNITMQIMNDKQQIIIGEMSGMVVDRX

SEQ ID NO: 37167 - protein, 33 aa, Artificial Sequence
  Non-cyclic GFR-binding peptide
  MOD_RES (1), (1): Xaa is C or S
  MOD_RES (15), (16), (17), (18), (19): Xaa is A or G
  MOD_RES (20), (21), (22), (23): Xaa is A or G or is absent
XVPTRLSNITIQIMXXXXXXXXXIGEMSDMVVE

SEQ ID NO: 37168 - protein, 36 aa, Artificial Sequence
  Non-cyclic GFR-binding peptide
  MOD_RES (1), (2), (33), (35): Xaa is C or S
XXVPQALSNITIQIMVGRKPKVLGEMSMIVRSXKXS

SEQ ID NO: 37169 - protein, 35 aa, Artificial Sequence
  Non-cyclic GFR-binding peptide
  MOD_RES (1), (32), (34): Xaa is C or S
XAPVKTSNITMQIMDNGRVLLLGEMSMIVEEXGXL

SEQ ID NO: 37170 - protein, 43 aa, Artificial Sequence
  Non-cyclic GFR-binding peptide
  MOD_RES (5), (6), (40), (42): Xaa is C or S
  MOD_RES (20), (21), (22), (23), (24): Xaa is A or G
  MOD_RES (25), (26), (27), (28): Xaa is A or G or is absent
TPPTXXVPTRLSNITIQIMXXXXXXXXXLGEMSDMVVESXGXR

SEQ ID NO: 37171 - protein, 37 aa, Artificial Sequence
  Non-cyclic GFR-binding peptide
  MOD_RES (34), (36): Xaa is C or S
  MOD_RES (14), (15), (16), (17), (18): Xaa is A or G
  MOD_RES (19), (20), (21), (22): Xaa is A or G or is absent
TPTKMSNITMQIMXXXXXXXXXLGEMSGMVVDRXGXS

SEQ ID NO: 37172 - protein, 32 aa, Artificial Sequence
  Non-cyclic GFR-binding peptide
  MOD_RES (1), (32): Xaa is C or S
XVSQDLSNITIQIMIGKTPKILGEMSMIVKSX

SEQ ID NO: 37173 - protein, 35 aa, Artificial Sequence
  Non-cyclic GFR-binding peptide
  MOD_RES (1), (2): Xaa is C or S
  MOD_RES (16), (17), (18), (19), (20): Xaa is A or G
  MOD_RES (21), (22), (23), (24): Xaa is A or G or is absent
XXVPTRLSNITIQIMXXXXXXXXXIGEMSDMVVES

SEQ ID NO: 37174 - protein, 38 aa, Artificial Sequence
  Non-cyclic GFR-binding peptide
  MOD_RES (3), (4), (35), (37): Xaa is C or S
SPXXVPQDLSNITIQIMVGRTPKVLGEMSMVVKSXKXS

SEQ ID NO: 37175 - protein, 33 aa, Artificial Sequence
  Non-cyclic GFR-binding peptide
  MOD_RES (1), (1): Xaa is C or S
  MOD_RES (15), (16), (17), (18), (19): Xaa is A or G
  MOD_RES (20), (21), (22), (23): Xaa is A or G or is absent
XVPTRLSNITIQIMXXXXXXXXXLGEMSDMVVE

SEQ ID NO: 37176 - protein, 34 aa, Artificial Sequence
  Non-cyclic GFR-binding peptide
  MOD_RES (1), (34): Xaa is C or S
  MOD_RES (15), (16), (17), (18), (19): Xaa is A or G
  MOD_RES (20), (21), (22), (23): Xaa is A or G or is absent
XVSQDLSNITIQIMXXXXXXXXXLGEMSMIVKSX

SEQ ID NO: 37177 - protein, 39 aa, Artificial Sequence
  Non-cyclic GFR-binding peptide
  MOD_RES (5), (6), (38): Xaa is C or S
APASXXVPARLSNITIQIMDAANNVVIGEMSDMVVEAXG

SEQ ID NO: 37178 - protein, 34 aa, Artificial Sequence
  Non-cyclic GFR-binding peptide
  MOD_RES (1), (2), (34): Xaa is C or S
XXTPTKMSNITMQIMNDKQQIILGEMSGMVVDRX

SEQ ID NO: 37179 - protein, 42 aa, Artificial Sequence
  Non-cyclic GFR-binding peptide
  MOD_RES (6), (7), (41): Xaa is C or S
  MOD_RES (21), (22), (23), (24), (25): Xaa is A or G
  MOD_RES (26), (27), (28), (29): Xaa is A or G or is absent
GSAGPXXTPTKMSNITMQIMXXXXXXXXXLGEMSGMVVDRXG

SEQ ID NO: 37180 - protein, 34 aa, Artificial Sequence
  Non-cyclic GFR-binding peptide
  MOD_RES (1), (2), (34): Xaa is C or S
XXTPTKMSNITMQIMNDKQQIIIGEMSGMVVDRX

SEQ ID NO: 37181 - protein, 33 aa, Artificial Sequence
  Non-cyclic GFR-binding peptide
  MOD_RES (1), (33): Xaa is C or S
XVPARLSNITIQIMDAANNVVIGEMSDMVVEAX

SEQ ID NO: 37182 - protein, 37 aa, Artificial Sequence
  Non-cyclic GFR-binding peptide
  MOD_RES (1), (2), (34), (36): Xaa is C or S
XXTPTKMSNITMQIMNDKQQIILGEMSGMVVDRXGXS

SEQ ID NO: 37183 - protein, 37 aa, Artificial Sequence
  Non-cyclic GFR-binding peptide
  MOD_RES (1), (35), (37): Xaa is C or S
  MOD_RES (15), (16), (17), (18), (19): Xaa is A or G
  MOD_RES (20), (21), (22), (23): Xaa is A or G or is absent
XVPARLSNITIQIMXXXXXXXXXIGEMSDMVVEAXGX

SEQ ID NO: 37184 - protein, 35 aa, Artificial Sequence
  Non-cyclic GFR-binding peptide
  MOD_RES (1), (35): Xaa is C or S
  MOD_RES (15), (16), (17), (18), (19): Xaa is A or G
  MOD_RES (20), (21), (22), (23): Xaa is A or G or is absent
XVPTRLSNITIQIMXXXXXXXXXLGEMSDMVVESX

SEQ ID NO: 37185 - protein, 35 aa, Artificial Sequence
  Non-cyclic GFR-binding peptide
  MOD_RES (1), (35): Xaa is C or S
  MOD_RES (15), (16), (17), (18), (19): Xaa is A or G
  MOD_RES (20), (21), (22), (23): Xaa is A or G or is absent
XVPTRLSNITIQIMXXXXXXXXXIGEMSDMVVESX

SEQ ID NO: 37186 - protein, 33 aa, Artificial Sequence
  Non-cyclic GFR-binding peptide
  MOD_RES (1), (33): Xaa is C or S
XVPARLSNITIQIMDAANNVVLGEMSDMVVEAX

SEQ ID NO: 37187 - protein, 37 aa, Artificial Sequence
  Non-cyclic GFR-binding peptide
  MOD_RES (3), (4), (35), (37): Xaa is C or S
STXXAPVKTSNITMQIMDNGRVLLLGEMSMIVEEXGX

SEQ ID NO: 37188 - protein, 35 aa, Artificial Sequence
  Non-cyclic GFR-binding peptide
  MOD_RES (1), (34): Xaa is C or S
  MOD_RES (15), (16), (17), (18), (19): Xaa is A or G
  MOD_RES (20), (21), (22), (23): Xaa is A or G or is absent
XVPQALSNITIQIMXXXXXXXXXLGEMSMIVRSXK

SEQ ID NO: 37189 - protein, 32 aa, Artificial Sequence
  Non-cyclic GFR-binding peptide
  MOD_RES (32), (32): Xaa is C or S
VPTRLSNITIQIMDSANNVVLGEMSDMVVESX

SEQ ID NO: 37190 - protein, 39 aa, Artificial Sequence
  Non-cyclic GFR-binding peptide
  MOD_RES (4), (5), (37), (39): Xaa is C or S
PPTXXVPTRLSNITIQIMDSANNVVIGEMSDMVVESXGX

SEQ ID NO: 37191 - protein, 39 aa, Artificial Sequence
  Non-cyclic GFR-binding peptide
  MOD_RES (3), (4), (36), (38): Xaa is C or S
PTXXVPTRLSNITIQIMDSANNVVLGEMSDMVVESXGXR

SEQ ID NO: 37192 - protein, 36 aa, Artificial Sequence
  Non-cyclic GFR-binding peptide
  MOD_RES (3), (4): Xaa is C or S
  MOD_RES (18), (19), (20), (21), (22): Xaa is A or G
  MOD_RES (23), (24), (25), (26): Xaa is A or G or is absent
GPXXTPTKMSNITMQIMXXXXXXXXXIGEMSGMVVD

SEQ ID NO: 37193 - protein, 36 aa, Artificial Sequence
  Non-cyclic GFR-binding peptide
  MOD_RES (1), (2), (33), (35): Xaa is C or S
XXVPQDLSNITIQIMVGRTPKVLGEMSMVVKSXKXS

SEQ ID NO: 37194 - protein, 33 aa, Artificial Sequence
  Non-cyclic GFR-binding peptide
  MOD_RES (33), (33): Xaa is C or S
  MOD_RES (14), (15), (16), (17), (18): Xaa is A or G
  MOD_RES (19), (20), (21), (22): Xaa is A or G or is absent
VPQDLSNITIQIMXXXXXXXXXLGEMSMVVKSX

SEQ ID NO: 37195 - protein, 35 aa, Artificial Sequence
  Non-cyclic GFR-binding peptide
  MOD_RES (2), (3): Xaa is C or S
  MOD_RES (17), (18), (19), (20), (21): Xaa is A or G
  MOD_RES (22), (23), (24), (25): Xaa is A or G or is absent
TXXAPVKTSNITMQIMXXXXXXXXXIGEMSMIVEE

SEQ ID NO: 37196 - protein, 37 aa, Artificial Sequence
  Non-cyclic GFR-binding peptide
  MOD_RES (5), (6): Xaa is C or S
TPPTXXVPTRLSNITIQIMDSANNVVLGEMSDMVVES

SEQ ID NO: 37197 - protein, 41 aa, Artificial Sequence
  Non-cyclic GFR-binding peptide
  MOD_RES (5), (6), (40): Xaa is C or S
  MOD_RES (20), (21), (22), (23), (24): Xaa is A or G
  MOD_RES (25), (26), (27), (28): Xaa is A or G or is absent
APASXXVPARLSNITIQIMXXXXXXXXXLGEMSDMVVEAXG

SEQ ID NO: 37198 - protein, 38 aa, Artificial Sequence
  Non-cyclic GFR-binding peptide
  MOD_RES (6), (7): Xaa is C or S
STPPTXXVPTRLSNITIQIMDSANNVVIGEMSDMVVES

SEQ ID NO: 37199 - protein, 41 aa, Artificial Sequence
  Non-cyclic GFR-binding peptide
  MOD_RES (4), (5), (39), (41): Xaa is C or S
  MOD_RES (19), (20), (21), (22), (23): Xaa is A or G
  MOD_RES (24), (25), (26), (27): Xaa is A or G or is absent
PKPXXAPTKLSNITVQIMXXXXXXXXXLGEMSNMVVRSXGX

SEQ ID NO: 37200 - protein, 35 aa, Artificial Sequence
  Non-cyclic GFR-binding peptide
  MOD_RES (1), (2), (35): Xaa is C or S
  MOD_RES (16), (17), (18), (19), (20): Xaa is A or G
  MOD_RES (21), (22), (23), (24): Xaa is A or G or is absent
XXAPVKTSNITMQIMXXXXXXXXXLGEMSMIVEEX

SEQ ID NO: 37201 - protein, 38 aa, Artificial Sequence
  Non-cyclic GFR-binding peptide
  MOD_RES (2), (3), (35), (37): Xaa is C or S
TXXVPTRLSNITIQIMDSANNVVLGEMSDMVVESXGXR

SEQ ID NO: 37202 - protein, 37 aa, Artificial Sequence
  Non-cyclic GFR-binding peptide
  MOD_RES (4), (5): Xaa is C or S
  MOD_RES (19), (20), (21), (22), (23): Xaa is A or G
  MOD_RES (24), (25), (26), (27): Xaa is A or G or is absent
AGPXXTPTKMSNITMQIMXXXXXXXXXIGEMSGMVVD

SEQ ID NO: 37203 - protein, 41 aa, Artificial Sequence
  Non-cyclic GFR-binding peptide
  MOD_RES (5), (6), (39), (41): Xaa is C or S
  MOD_RES (20), (21), (22), (23), (24): Xaa is A or G
  MOD_RES (25), (26), (27), (28): Xaa is A or G or is absent
VPSTXXAPVKTSNITMQIMXXXXXXXXXIGEMSMIVEEXGX

SEQ ID NO: 37204 - protein, 34 aa, Artificial Sequence
  Non-cyclic GFR-binding peptide
  MOD_RES (1), (2), (34): Xaa is C or S
XXVPARLSNITIQIMDAANNVVLGEMSDMVVEAX

SEQ ID NO: 37205 - protein, 35 aa, Artificial Sequence
  Non-cyclic GFR-binding peptide
  MOD_RES (1), (33), (35): Xaa is C or S
XTPTKMSNITMQIMNDKQQIIIGEMSGMVVDRXGX

SEQ ID NO: 37206 - protein, 40 aa, Artificial Sequence
  Non-cyclic GFR-binding peptide
  MOD_RES (6), (7), (39): Xaa is C or S
GSAGPXXTPTKMSNITMQIMNDKQQIILGEMSGMVVDRXG

SEQ ID NO: 37207 - protein, 38 aa, Artificial Sequence
  Non-cyclic GFR-binding peptide
  MOD_RES (4), (5), (37): Xaa is C or S
PPTXXVPTRLSNITIQIMDSANNVVLGEMSDMVVESXG

SEQ ID NO: 37208 - protein, 37 aa, Artificial Sequence
  Non-cyclic GFR-binding peptide
  MOD_RES (4), (5): Xaa is C or S
  MOD_RES (19), (20), (21), (22), (23): Xaa is A or G
  MOD_RES (24), (25), (26), (27): Xaa is A or G or is absent
PASXXVPARLSNITIQIMXXXXXXXXXIGEMSDMVVE

SEQ ID NO: 37209 - protein, 33 aa, Artificial Sequence
  Non-cyclic GFR-binding peptide
  MOD_RES (1), (33): Xaa is C or S
XTPTKMSNITMQIMNDKQQIIIGEMSGMVVDRX

SEQ ID NO: 37210 - protein, 37 aa, Artificial Sequence
  Non-cyclic GFR-binding peptide
  MOD_RES (3), (4), (35), (37): Xaa is C or S
SPXXVSQDLSNITIQIMIGKTPKILGEMSMIVKSXKX

SEQ ID NO: 37211 - protein, 40 aa, Artificial Sequence
  Non-cyclic GFR-binding peptide
  MOD_RES (4), (5), (39): Xaa is C or S
  MOD_RES (19), (20), (21), (22), (23): Xaa is A or G
  MOD_RES (24), (25), (26), (27): Xaa is A or G or is absent
PASXXVPARLSNITIQIMXXXXXXXXXLGEMSDMVVEAXG

SEQ ID NO: 37212 - protein, 38 aa, Artificial Sequence
  Non-cyclic GFR-binding peptide
  MOD_RES (2), (3), (36), (38): Xaa is C or S
  MOD_RES (17), (18), (19), (20), (21): Xaa is A or G
  MOD_RES (22), (23), (24), (25): Xaa is A or G or is absent
PXXVSQDLSNITIQIMXXXXXXXXXLGEMSMIVKSXKX

SEQ ID NO: 37213 - protein, 35 aa, Artificial Sequence
  Non-cyclic GFR-binding peptide
  MOD_RES (32), (34): Xaa is C or S
VPTRLSNITIQIMDSANNVVIGEMSDMVVESXGXR

SEQ ID NO: 37214 - protein, 40 aa, Artificial Sequence
  Non-cyclic GFR-binding peptide
  MOD_RES (3), (4), (38), (40): Xaa is C or S
  MOD_RES (18), (19), (20), (21), (22): Xaa is A or G
  MOD_RES (23), (24), (25), (26): Xaa is A or G or is absent
ASXXVPARLSNITIQIMXXXXXXXXXIGEMSDMVVEAXGX

SEQ ID NO: 37215 - protein, 34 aa, Artificial Sequence
  Non-cyclic GFR-binding peptide
  MOD_RES (34), (34): Xaa is C or S
  MOD_RES (14), (15), (16), (17), (18): Xaa is A or G
  MOD_RES (19), (20), (21), (22): Xaa is A or G or is absent
VPTRLSNITIQIMXXXXXXXXXIGEMSDMVVESX

SEQ ID NO: 37216 - protein, 40 aa, Artificial Sequence
  Non-cyclic GFR-binding peptide
  MOD_RES (3), (4), (38), (40): Xaa is C or S
  MOD_RES (18), (19), (20), (21), (22): Xaa is A or G
  MOD_RES (23), (24), (25), (26): Xaa is A or G or is absent
GPXXTPTKMSNITMQIMXXXXXXXXXLGEMSGMVVDRXGX

SEQ ID NO: 37217 - protein, 36 aa, Artificial Sequence
  Non-cyclic GFR-binding peptide
  MOD_RES (1), (34), (36): Xaa is C or S
  MOD_RES (15), (16), (17), (18), (19): Xaa is A or G
  MOD_RES (20), (21), (22), (23): Xaa is A or G or is absent
XAPVKTSNITMQIMXXXXXXXXXIGEMSMIVEEXGX

SEQ ID NO: 37218 - protein, 43 aa, Artificial Sequence
  Non-cyclic GFR-binding peptide
  MOD_RES (6), (7), (40), (42): Xaa is C or S
  MOD_RES (21), (22), (23), (24), (25): Xaa is A or G
  MOD_RES (26), (27), (28), (29): Xaa is A or G or is absent
ASASPXXVPQDLSNITIQIMXXXXXXXXXLGEMSMVVKSXKXS

SEQ ID NO: 37219 - protein, 33 aa, Artificial Sequence
  Non-cyclic GFR-binding peptide
  MOD_RES (1), (32): Xaa is C or S
XAPVKTSNITMQIMDNGRVLLIGEMSMIVEEXG

SEQ ID NO: 37220 - protein, 40 aa, Artificial Sequence
  Non-cyclic GFR-binding peptide
  MOD_RES (5), (6), (37), (39): Xaa is C or S
SAAPXXVPQALSNITIQIMVGRKPKVLGEMSMIVRSXKXS

SEQ ID NO: 37221 - protein, 37 aa, Artificial Sequence
  Non-cyclic GFR-binding peptide
  MOD_RES (6), (7): Xaa is C or S
STPPTXXVPTRLSNITIQIMDSANNVVLGEMSDMVVE

SEQ ID NO: 37222 - protein, 38 aa, Artificial Sequence
  Non-cyclic GFR-binding peptide
  MOD_RES (3), (4), (38): Xaa is C or S
  MOD_RES (18), (19), (20), (21), (22): Xaa is A or G
  MOD_RES (23), (24), (25), (26): Xaa is A or G or is absent
GPXXTPTKMSNITMQIMXXXXXXXXXLGEMSGMVVDRX

SEQ ID NO: 37223 - protein, 43 aa, Artificial Sequence
  Non-cyclic GFR-binding peptide
  MOD_RES (6), (7), (41), (43): Xaa is C or S
  MOD_RES (21), (22), (23), (24), (25): Xaa is A or G
  MOD_RES (26), (27), (28), (29): Xaa is A or G or is absent
HVPKPXXAPTKLSNITVQIMXXXXXXXXXIGEMSNMVVRSXGX

SEQ ID NO: 37224 - protein, 32 aa, Artificial Sequence
  Non-cyclic GFR-binding peptide
  MOD_RES (31), (31): Xaa is C or S
VPQDLSNITIQIMVGRTPKVLGEMSMVVKSXK

SEQ ID NO: 37225 - protein, 37 aa, Artificial Sequence
  Non-cyclic GFR-binding peptide
  MOD_RES (3), (4), (37): Xaa is C or S
  MOD_RES (18), (19), (20), (21), (22): Xaa is A or G
  MOD_RES (23), (24), (25), (26): Xaa is A or G or is absent
APXXVPQALSNITIQIMXXXXXXXXXLGEMSMIVRSX

SEQ ID NO: 37226 - protein, 39 aa, Artificial Sequence
  Non-cyclic GFR-binding peptide
  MOD_RES (4), (5), (37), (39): Xaa is C or S
PKPXXAPTKLSNITVQIMDDSSNVILGEMSNMVVRSXGX

SEQ ID NO: 37227 - protein, 38 aa, Artificial Sequence
  Non-cyclic GFR-binding peptide
  MOD_RES (2), (3), (37): Xaa is C or S
  MOD_RES (17), (18), (19), (20), (21): Xaa is A or G
  MOD_RES (22), (23), (24), (25): Xaa is A or G or is absent
TXXVPTRLSNITIQIMXXXXXXXXXLGEMSDMVVESXG

SEQ ID NO: 37228 - protein, 38 aa, Artificial Sequence
  Non-cyclic GFR-binding peptide
  MOD_RES (4), (5), (38): Xaa is C or S
  MOD_RES (19), (20), (21), (22), (23): Xaa is A or G
  MOD_RES (24), (25), (26), (27): Xaa is A or G or is absent
AAPXXVPQALSNITIQIMXXXXXXXXXLGEMSMIVRSX

SEQ ID NO: 37229 - protein, 35 aa, Artificial Sequence
  Non-cyclic GFR-binding peptide
  MOD_RES (4), (5): Xaa is C or S
ASPXXVPQDLSNITIQIMVGRTPKVLGEMSMVVKS

SEQ ID NO: 37230 - protein, 34 aa, Artificial Sequence
  Non-cyclic GFR-binding peptide
  MOD_RES (1), (1): Xaa is C or S
  MOD_RES (15), (16), (17), (18), (19): Xaa is A or G
  MOD_RES (20), (21), (22), (23): Xaa is A or G or is absent
XVPTRLSNITIQIMXXXXXXXXXIGEMSDMVVES

SEQ ID NO: 37231 - protein, 37 aa, Artificial Sequence
  Non-cyclic GFR-binding peptide
  MOD_RES (6), (7): Xaa is C or S
STPPTXXVPTRLSNITIQIMDSANNVVIGEMSDMVVE

SEQ ID NO: 37232 - protein, 34 aa, Artificial Sequence
  Non-cyclic GFR-binding peptide
  MOD_RES (33), (33): Xaa is C or S
  MOD_RES (14), (15), (16), (17), (18): Xaa is A or G
  MOD_RES (19), (20), (21), (22): Xaa is A or G or is absent
VPQALSNITIQIMXXXXXXXXXLGEMSMIVRSXK

SEQ ID NO: 37233 - protein, 37 aa, Artificial Sequence
  Non-cyclic GFR-binding peptide
  MOD_RES (31), (32): Xaa is C or S
DVVMGQYNKLIIQQKDNLYLMSIASMKTPTXXPGASG

SEQ ID NO: 37234 - protein, 39 aa, Artificial Sequence
  Non-cyclic GFR-binding peptide
  MOD_RES (1), (3), (37), (38): Xaa is C or S
  MOD_RES (15), (16), (17), (18), (19): Xaa is A or G
  MOD_RES (20), (21), (22), (23): Xaa is A or G or is absent
XGXRDVVMGQYNKLXXXXXXXXXLYLMSIASMKTPTXXP

SEQ ID NO: 37235 - protein, 37 aa, Artificial Sequence
  Non-cyclic GFR-binding peptide
  MOD_RES (33), (34): Xaa is C or S
  MOD_RES (11), (12), (13), (14), (15): Xaa is A or G
  MOD_RES (16), (17), (18), (19): Xaa is A or G or is absent
SVAMGQYNKLXXXXXXXXXLYLISIASLKTPVXXAKS

SEQ ID NO: 37236 - protein, 36 aa, Artificial Sequence
  Non-cyclic GFR-binding peptide
  MOD_RES (1), (35), (36): Xaa is C or S
  MOD_RES (13), (14), (15), (16), (17): Xaa is A or G
  MOD_RES (18), (19), (20), (21): Xaa is A or G or is absent
XSEVTMNQYNKLXXXXXXXXXLYLISIASMKEPVXX

SEQ ID NO: 37237 - protein, 33 aa, Artificial Sequence
  Non-cyclic GFR-binding peptide
  MOD_RES (1), (1): Xaa is C or S
  MOD_RES (12), (13), (14), (15), (16): Xaa is A or G
  MOD_RES (17), (18), (19), (20): Xaa is A or G or is absent
XEEVIMQYNKLXXXXXXXXXLYLMSIASTKVPA

SEQ ID NO: 37238 - protein, 38 aa, Artificial Sequence
  Non-cyclic GFR-binding peptide
  MOD_RES (2), (4), (36), (37): Xaa is C or S
RXAXSEVTMNQYNKLVVNKNEDLYLISIASMKEPVXXP

SEQ ID NO: 37239 - protein, 39 aa, Artificial Sequence
  Non-cyclic GFR-binding peptide
  MOD_RES (33), (34): Xaa is C or S
  MOD_RES (11), (12), (13), (14), (15): Xaa is A or G
  MOD_RES (16), (17), (18), (19): Xaa is A or G or is absent
SVAMGQYNKLXXXXXXXXXLYLISIASLKTPVXXAKSAK

SEQ ID NO: 37240 - protein, 40 aa, Artificial Sequence
  Non-cyclic GFR-binding peptide
  MOD_RES (2), (4), (38), (39): Xaa is C or S
  MOD_RES (16), (17), (18), (19), (20): Xaa is A or G
  MOD_RES (21), (22), (23), (24): Xaa is A or G or is absent
RXGXESVAMGQYNKLXXXXXXXXXLYLISIASLKTPVXXA

SEQ ID NO: 37241 - protein, 40 aa, Artificial Sequence
  Non-cyclic GFR-binding peptide
  MOD_RES (1), (35), (36): Xaa is C or S
  MOD_RES (13), (14), (15), (16), (17): Xaa is A or G
  MOD_RES (18), (19), (20), (21): Xaa is A or G or is absent
XESVAMGQYNKLXXXXXXXXXLYLISIASLKTPVXXAKSA

SEQ ID NO: 37242 - protein, 37 aa, Artificial Sequence
  Non-cyclic GFR-binding peptide
  MOD_RES (1), (3), (37): Xaa is C or S
  MOD_RES (15), (16), (17), (18), (19): Xaa is A or G
  MOD_RES (20), (21), (22), (23): Xaa is A or G or is absent
XGXRDVVMGQYNKLXXXXXXXXXLYLMSIASMKTPTX

SEQ ID NO: 37243 - protein, 41 aa, Artificial Sequence
  Non-cyclic GFR-binding peptide
  MOD_RES (1), (3), (37), (38): Xaa is C or S
  MOD_RES (15), (16), (17), (18), (19): Xaa is A or G
  MOD_RES (20), (21), (22), (23): Xaa is A or G or is absent
XGXAEVVMDQYNKLXXXXXXXXXLYLISIASLRAPVXXSAP

SEQ ID NO: 37244 - protein, 36 aa, Artificial Sequence
  Non-cyclic GFR-binding peptide
  MOD_RES (2), (34), (35): Xaa is C or S
AXSEVTMNQYNKLVVNKNEDLYLISIASMKEPVXXP

SEQ ID NO: 37245 - protein, 33 aa, Artificial Sequence
  Non-cyclic GFR-binding peptide
  MOD_RES (32), (33): Xaa is C or S
RDVVMGQYNKLIIQQKDNLYLMSIASMKTPTXX

SEQ ID NO: 37246 - protein, 34 aa, Artificial Sequence
  Non-cyclic GFR-binding peptide
  MOD_RES (1), (34): Xaa is C or S
  MOD_RES (12), (13), (14), (15), (16): Xaa is A or G
  MOD_RES (17), (18), (19), (20): Xaa is A or G or is absent
XEEVIMQYNKLXXXXXXXXXLYLMSIASTKVPAX

SEQ ID NO: 37247 - protein, 36 aa, Artificial Sequence
  Non-cyclic GFR-binding peptide
  MOD_RES (1), (33), (34): Xaa is C or S
XSEVTMNQYNKLVVNKNEDLYLISIASMKEPVXXPE

SEQ ID NO: 37248 - protein, 35 aa, Artificial Sequence
  Non-cyclic GFR-binding peptide
  MOD_RES (32), (33): Xaa is C or S
SEVTMNQYNKLVVNKNEDLYLISIASMKEPVXXPE

SEQ ID NO: 37249 - protein, 41 aa, Artificial Sequence
  Non-cyclic GFR-binding peptide
  MOD_RES (2), (36), (37): Xaa is C or S
  MOD_RES (14), (15), (16), (17), (18): Xaa is A or G
  MOD_RES (19), (20), (21), (22): Xaa is A or G or is absent
GXAEVVMDQYNKLXXXXXXXXXLYLISIASLRAPVXXSAPA

SEQ ID NO: 37250 - protein, 34 aa, Artificial Sequence
  Non-cyclic GFR-binding peptide
  MOD_RES (1), (32), (33): Xaa is C or S
XEEVIMQYNKLLLVRGNDLYLMSIASTKVPAXXT

SEQ ID NO: 37251 - protein, 34 aa, Artificial Sequence
  Non-cyclic GFR-binding peptide
  MOD_RES (32), (33): Xaa is C or S
AEVVMDQYNKLVVNNAADLYLISIASLRAPVXXS

SEQ ID NO: 37252 - protein, 38 aa, Artificial Sequence
  Non-cyclic GFR-binding peptide
  MOD_RES (33), (34): Xaa is C or S
  MOD_RES (11), (12), (13), (14), (15): Xaa is A or G
  MOD_RES (16), (17), (18), (19): Xaa is A or G or is absent
EEVIMQYNKLXXXXXXXXXLYLMSIASTKVPAXXTSPV

SEQ ID NO: 37253 - protein, 38 aa, Artificial Sequence
  Non-cyclic GFR-binding peptide
  MOD_RES (2), (4), (38): Xaa is C or S
  MOD_RES (16), (17), (18), (19), (20): Xaa is A or G
  MOD_RES (21), (22), (23), (24): Xaa is A or G or is absent
RXAXSEVTMNQYNKLXXXXXXXXXLYLISIASMKEPVX

SEQ ID NO: 37254 - protein, 35 aa, Artificial Sequence
  Non-cyclic GFR-binding peptide
  MOD_RES (2), (2): Xaa is C or S
  MOD_RES (14), (15), (16), (17), (18): Xaa is A or G
  MOD_RES (19), (20), (21), (22): Xaa is A or G or is absent
GXAEVVMDQYNKLXXXXXXXXXLYLISIASLRAPV

SEQ ID NO: 37255 - protein, 38 aa, Artificial Sequence
  Non-cyclic GFR-binding peptide
  MOD_RES (1), (33), (34): Xaa is C or S
XAEVVMDQYNKLVVNNAADLYLISIASLRAPVXXSAPA

SEQ ID NO: 37256 - protein, 42 aa, Artificial Sequence
  Non-cyclic GFR-binding peptide
  MOD_RES (2), (36), (37): Xaa is C or S
  MOD_RES (14), (15), (16), (17), (18): Xaa is A or G
  MOD_RES (19), (20), (21), (22): Xaa is A or G or is absent
GXAEVVMDQYNKLXXXXXXXXXLYLISIASLRAPVXXSAPAA

SEQ ID NO: 37257 - protein, 34 aa, Artificial Sequence
  Non-cyclic GFR-binding peptide
  MOD_RES (1), (33), (34): Xaa is C or S
XESVAMGQYNKLYTVVGKDLYLISIASLKTPVXX

SEQ ID NO: 37258 - protein, 40 aa, Artificial Sequence
  Non-cyclic GFR-binding peptide
  MOD_RES (34), (35): Xaa is C or S
  MOD_RES (12), (13), (14), (15), (16): Xaa is A or G
  MOD_RES (17), (18), (19), (20): Xaa is A or G or is absent
AEVVMDQYNKLXXXXXXXXXLYLISIASLRAPVXXSAPAA

SEQ ID NO: 37259 - protein, 36 aa, Artificial Sequence
  Non-cyclic GFR-binding peptide
  MOD_RES (2), (35), (36): Xaa is C or S
  MOD_RES (13), (14), (15), (16), (17): Xaa is A or G
  MOD_RES (18), (19), (20), (21): Xaa is A or G or is absent
GXEEVIMQYNKLXXXXXXXXXLYLMSIASTKVPAXX

SEQ ID NO: 37260 - protein, 35 aa, Artificial Sequence
  Non-cyclic GFR-binding peptide
  MOD_RES (1), (33), (34): Xaa is C or S
XRDVVMGQYNKLIIQQKDNLYLMSIASMKTPTXXP

SEQ ID NO: 37261 - protein, 39 aa, Artificial Sequence
  Non-cyclic GFR-binding peptide
  MOD_RES (2), (34), (35): Xaa is C or S
GXESVAMGQYNKLYTVVGKDLYLISIASLKTPVXXAKSA

SEQ ID NO: 37262 - protein, 37 aa, Artificial Sequence
  Non-cyclic GFR-binding peptide
  MOD_RES (1), (34), (35): Xaa is C or S
  MOD_RES (12), (13), (14), (15), (16): Xaa is A or G
  MOD_RES (17), (18), (19), (20): Xaa is A or G or is absent
XEEVIMQYNKLXXXXXXXXXLYLMSIASTKVPAXXTS

SEQ ID NO: 37263 - protein, 37 aa, Artificial Sequence
  Non-cyclic GFR-binding peptide
  MOD_RES (2), (36), (37): Xaa is C or S
  MOD_RES (14), (15), (16), (17), (18): Xaa is A or G
  MOD_RES (19), (20), (21), (22): Xaa is A or G or is absent
GXRDVVMGQYNKLXXXXXXXXXLYLMSIASMKTPTXX

SEQ ID NO: 37264 - protein, 33 aa, Artificial Sequence
  Non-cyclic GFR-binding peptide
  MOD_RES (2), (33): Xaa is C or S
GXEEVIMQYNKLLLVRGNDLYLMSIASTKVPAX

SEQ ID NO: 37265 - protein, 35 aa, Artificial Sequence
  Non-cyclic GFR-binding peptide
  MOD_RES (32), (33): Xaa is C or S
RDVVMGQYNKLIIQQKDNLYLMSIASMKTPTXXPG

SEQ ID NO: 37266 - protein, 38 aa, Artificial Sequence
  Non-cyclic GFR-binding peptide
  MOD_RES (1), (3), (37), (38): Xaa is C or S
  MOD_RES (15), (16), (17), (18), (19): Xaa is A or G
  MOD_RES (20), (21), (22), (23): Xaa is A or G or is absent
XGXESVAMGQYNKLXXXXXXXXXLYLISIASLKTPVXX

SEQ ID NO: 37267 - protein, 37 aa, Artificial Sequence
  Non-cyclic GFR-binding peptide
  MOD_RES (2), (36), (37): Xaa is C or S
  MOD_RES (14), (15), (16), (17), (18): Xaa is A or G
  MOD_RES (19), (20), (21), (22): Xaa is A or G or is absent
GXAEVVMDQYNKLXXXXXXXXXLYLISIASLRAPVXX

SEQ ID NO: 37268 - protein, 36 aa, Artificial Sequence
  Non-cyclic GFR-binding peptide
  MOD_RES (33), (34): Xaa is C or S
  MOD_RES (11), (12), (13), (14), (15): Xaa is A or G
  MOD_RES (16), (17), (18), (19): Xaa is A or G or is absent
SVAMGQYNKLXXXXXXXXXLYLISIASLKTPVXXAK

SEQ ID NO: 37269 - protein, 39 aa, Artificial Sequence
  Non-cyclic GFR-binding peptide
  MOD_RES (2), (34), (35): Xaa is C or S
GXRDVVMGQYNKLIIQQKDNLYLMSIASMKTPTXXPGAS

SEQ ID NO: 37270 - protein, 43 aa, Artificial Sequence
  Non-cyclic GFR-binding peptide
  MOD_RES (1), (3), (37), (38): Xaa is C or S
  MOD_RES (15), (16), (17), (18), (19): Xaa is A or G
  MOD_RES (20), (21), (22), (23): Xaa is A or G or is absent
XGXSRVVMNQYNKLXXXXXXXXXLYLVSIASLKTPAXXPKPVH

SEQ ID NO: 37271 - protein, 32 aa, Artificial Sequence
  Non-cyclic GFR-binding peptide
  MOD_RES (11), (12), (13), (14), (15): Xaa is A or G
  MOD_RES (16), (17), (18), (19): Xaa is A or G or is absent
DVVMGQYNKLXXXXXXXXXLYLMSIASMKTPT

SEQ ID NO: 37272 - protein, 34 aa, Artificial Sequence
  Non-cyclic GFR-binding peptide
  MOD_RES (1), (33), (34): Xaa is C or S
XSEVTMNQYNKLVVNKNEDLYLISIASMKEPVXX

SEQ ID NO: 37273 - protein, 40 aa, Artificial Sequence
  Non-cyclic GFR-binding peptide
  MOD_RES (2), (34), (35): Xaa is C or S
GXRDVVMGQYNKLIIQQKDNLYLMSIASMKTPTXXPGASG

SEQ ID NO: 37274 - protein, 41 aa, Artificial Sequence
  Non-cyclic GFR-binding peptide
  MOD_RES (2), (4), (38), (39): Xaa is C or S
  MOD_RES (16), (17), (18), (19), (20): Xaa is A or G
  MOD_RES (21), (22), (23), (24): Xaa is A or G or is absent
RXGXESVAMGQYNKLXXXXXXXXXLYLISIASLKTPVXXAK

SEQ ID NO: 37275 - protein, 35 aa, Artificial Sequence
  Non-cyclic GFR-binding peptide
  MOD_RES (1), (3), (35): Xaa is C or S
XAXSEVTMNQYNKLVVNKNEDLYLISIASMKEPVX

SEQ ID NO: 37276 - protein, 40 aa, Artificial Sequence
  Non-cyclic GFR-binding peptide
  MOD_RES (34), (35): Xaa is C or S
  MOD_RES (12), (13), (14), (15), (16): Xaa is A or G
  MOD_RES (17), (18), (19), (20): Xaa is A or G or is absent
SRVVMNQYNKLXXXXXXXXXLYLVSIASLKTPAXXPKPVH

SEQ ID NO: 37277 - protein, 34 aa, Artificial Sequence
  Non-cyclic GFR-binding peptide
  MOD_RES (32), (33): Xaa is C or S
ESVAMGQYNKLYTVVGKDLYLISIASLKTPVXXA

SEQ ID NO: 37278 - protein, 40 aa, Artificial Sequence
  Non-cyclic GFR-binding peptide
  MOD_RES (2), (4), (38), (39): Xaa is C or S
  MOD_RES (16), (17), (18), (19), (20): Xaa is A or G
  MOD_RES (21), (22), (23), (24): Xaa is A or G or is absent
SXGXRDVVMGQYNKLXXXXXXXXXLYLMSIASMKTPTXXP

SEQ ID NO: 37279 - protein, 36 aa, Artificial Sequence
  Non-cyclic GFR-binding peptide
  MOD_RES (32), (33): Xaa is C or S
AEVVMDQYNKLVVNNAADLYLISIASLRAPVXXSAP

SEQ ID NO: 37280 - protein, 32 aa, Artificial Sequence
  Non-cyclic GFR-binding peptide
  MOD_RES (11), (12), (13), (14), (15): Xaa is A or G
  MOD_RES (16), (17), (18), (19): Xaa is A or G or is absent
SVAMGQYNKLXXXXXXXXXLYLISIASLKTPV

SEQ ID NO: 37281 - protein, 39 aa, Artificial Sequence
  Non-cyclic GFR-binding peptide
  MOD_RES (2), (36), (37): Xaa is C or S
  MOD_RES (14), (15), (16), (17), (18): Xaa is A or G
  MOD_RES (19), (20), (21), (22): Xaa is A or G or is absent
GXESVAMGQYNKLXXXXXXXXXLYLISIASLKTPVXXAK

SEQ ID NO: 37282 - protein, 38 aa, Artificial Sequence
  Non-cyclic GFR-binding peptide
  MOD_RES (1), (32), (33): Xaa is C or S
XEEVIMQYNKLLLVRGNDLYLMSIASTKVPAXXTSPVR

SEQ ID NO: 37283 - protein, 36 aa, Artificial Sequence
  Non-cyclic GFR-binding peptide
  MOD_RES (1), (3), (35), (36): Xaa is C or S
XGXAEVVMDQYNKLVVNNAADLYLISIASLRAPVXX

SEQ ID NO: 37284 - protein, 41 aa, Artificial Sequence
  Non-cyclic GFR-binding peptide
  MOD_RES (1), (3), (35), (36): Xaa is C or S
XGXAEVVMDQYNKLVVNNAADLYLISIASLRAPVXXSAPAA

SEQ ID NO: 37285 - protein, 38 aa, Artificial Sequence
  Non-cyclic GFR-binding peptide
  MOD_RES (2), (4), (37), (38): Xaa is C or S
  MOD_RES (15), (16), (17), (18), (19): Xaa is A or G
  MOD_RES (20), (21), (22), (23): Xaa is A or G or is absent
LXGXEEVIMQYNKLXXXXXXXXXLYLMSIASTKVPAXX

SEQ ID NO: 37286 - protein, 35 aa, Artificial Sequence
  Non-cyclic GFR-binding peptide
  MOD_RES (1), (35): Xaa is C or S
  MOD_RES (13), (14), (15), (16), (17): Xaa is A or G
  MOD_RES (18), (19), (20), (21): Xaa is A or G or is absent
XSEVTMNQYNKLXXXXXXXXXLYLISIASMKEPVX

SEQ ID NO: 37287 - protein, 34 aa, Artificial Sequence
  Non-cyclic GFR-binding peptide
  MOD_RES (1), (3): Xaa is C or S
XGXRDVVMGQYNKLIIQQKDNLYLMSIASMKTPT

SEQ ID NO: 37288 - protein, 38 aa, Artificial Sequence
  Non-cyclic GFR-binding peptide
  MOD_RES (2), (34), (35): Xaa is C or S
AXSEVTMNQYNKLVVNKNEDLYLISIASMKEPVXXPEP

SEQ ID NO: 37289 - protein, 34 aa, Artificial Sequence
  Non-cyclic GFR-binding peptide
  MOD_RES (2), (34): Xaa is C or S
AXSEVTMNQYNKLVVNKNEDLYLISIASMKEPVX

SEQ ID NO: 37290 - protein, 42 aa, Artificial Sequence
  Non-cyclic GFR-binding peptide
  MOD_RES (1), (3), (37), (38): Xaa is C or S
  MOD_RES (15), (16), (17), (18), (19): Xaa is A or G
  MOD_RES (20), (21), (22), (23): Xaa is A or G or is absent
XAXSEVTMNQYNKLXXXXXXXXXLYLISIASMKEPVXXPEPI

SEQ ID NO: 37291 - protein, 37 aa, Artificial Sequence
  Non-cyclic GFR-binding peptide
  MOD_RES (2), (33), (34): Xaa is C or S
GXEEVIMQYNKLLLVRGNDLYLMSIASTKVPAXXTSP

SEQ ID NO: 37292 - protein, 34 aa, Artificial Sequence
  Non-cyclic GFR-binding peptide
  MOD_RES (1), (1): Xaa is C or S
  MOD_RES (13), (14), (15), (16), (17): Xaa is A or G
  MOD_RES (18), (19), (20), (21): Xaa is A or G or is absent
XRDVVMGQYNKLXXXXXXXXXLYLMSIASMKTPT

SEQ ID NO: 37293 - protein, 37 aa, Artificial Sequence
  Non-cyclic GFR-binding peptide
  MOD_RES (1), (3), (37): Xaa is C or S
  MOD_RES (15), (16), (17), (18), (19): Xaa is A or G
  MOD_RES (20), (21), (22), (23): Xaa is A or G or is absent
XAXSEVTMNQYNKLXXXXXXXXXLYLISIASMKEPVX

SEQ ID NO: 37294 - protein, 39 aa, Artificial Sequence
  Non-cyclic GFR-binding peptide
  MOD_RES (2), (36), (37): Xaa is C or S
  MOD_RES (14), (15), (16), (17), (18): Xaa is A or G
  MOD_RES (19), (20), (21), (22): Xaa is A or G or is absent
AXSEVTMNQYNKLXXXXXXXXXLYLISIASMKEPVXXPE

SEQ ID NO: 37295 - protein, 34 aa, Artificial Sequence
  Non-cyclic GFR-binding peptide
  MOD_RES (2), (33), (34): Xaa is C or S
GXEEVIMQYNKLLLVRGNDLYLMSIASTKVPAXX

SEQ ID NO: 37296 - protein, 32 aa, Artificial Sequence
  Non-cyclic GFR-binding peptide
  MOD_RES (1), (1): Xaa is C or S
XAEVVMDQYNKLVVNNAADLYLISIASLRAPV

SEQ ID NO: 37297 - protein, 36 aa, Artificial Sequence
  Non-cyclic GFR-binding peptide
  MOD_RES (1), (35), (36): Xaa is C or S
  MOD_RES (13), (14), (15), (16), (17): Xaa is A or G
  MOD_RES (18), (19), (20), (21): Xaa is A or G or is absent
XAEVVMDQYNKLXXXXXXXXXLYLISIASLRAPVXX

SEQ ID NO: 37298 - protein, 34 aa, Artificial Sequence
  Non-cyclic GFR-binding peptide
  MOD_RES (33), (34): Xaa is C or S
  MOD_RES (11), (12), (13), (14), (15): Xaa is A or G
  MOD_RES (16), (17), (18), (19): Xaa is A or G or is absent
DVVMGQYNKLXXXXXXXXXLYLMSIASMKTPTXX

SEQ ID NO: 37299 - protein, 42 aa, Artificial Sequence
  Non-cyclic GFR-binding peptide
  MOD_RES (1), (3), (37), (38): Xaa is C or S
  MOD_RES (15), (16), (17), (18), (19): Xaa is A or G
  MOD_RES (20), (21), (22), (23): Xaa is A or G or is absent
XGXAEVVMDQYNKLXXXXXXXXXLYLISIASLRAPVXXSAPA

SEQ ID NO: 37300 - protein, 39 aa, Artificial Sequence
  Non-cyclic GFR-binding peptide
  MOD_RES (1), (33), (34): Xaa is C or S
XSRVVMNQYNKLIVNSSDDLYLVSIASLKTPAXXPKPVH

SEQ ID NO: 37301 - protein, 39 aa, Artificial Sequence
  Non-cyclic GFR-binding peptide
  MOD_RES (1), (3), (35), (36): Xaa is C or S
XGXAEVVMDQYNKLVVNNAADLYLISIASLRAPVXXSAP

SEQ ID NO: 37302 - protein, 35 aa, Artificial Sequence
  Non-cyclic GFR-binding peptide
  MOD_RES (2), (4): Xaa is C or S
SXGXRDVVMGQYNKLIIQQKDNLYLMSIASMKTPT

SEQ ID NO: 37303 - protein, 37 aa, Artificial Sequence
  Non-cyclic GFR-binding peptide
  MOD_RES (2), (34), (35): Xaa is C or S
GXAEVVMDQYNKLVVNNAADLYLISIASLRAPVXXSA

SEQ ID NO: 37304 - protein, 30 aa, Artificial Sequence
  Non-cyclic GFR-binding peptide
SVAMGQYNKLYTVVGKDLYLISIASLKTPV

SEQ ID NO: 37305 - protein, 41 aa, Artificial Sequence
  Non-cyclic GFR-binding peptide
  MOD_RES (1), (35), (36): Xaa is C or S
  MOD_RES (13), (14), (15), (16), (17): Xaa is A or G
  MOD_RES (18), (19), (20), (21): Xaa is A or G or is absent
XRDVVMGQYNKLXXXXXXXXXLYLMSIASMKTPTXXPGASG

SEQ ID NO: 37306 - protein, 33 aa, Artificial Sequence
  Non-cyclic GFR-binding peptide
  MOD_RES (33), (33): Xaa is C or S
  MOD_RES (11), (12), (13), (14), (15): Xaa is A or G
  MOD_RES (16), (17), (18), (19): Xaa is A or G or is absent
DVVMGQYNKLXXXXXXXXXLYLMSIASMKTPTX

SEQ ID NO: 37307 - protein, 36 aa, Artificial Sequence
  Non-cyclic GFR-binding peptide
  MOD_RES (1), (3): Xaa is C or S
  MOD_RES (15), (16), (17), (18), (19): Xaa is A or G
  MOD_RES (20), (21), (22), (23): Xaa is A or G or is absent
XGXESVAMGQYNKLXXXXXXXXXLYLISIASLKTPV

SEQ ID NO: 37308 - protein, 37 aa, Artificial Sequence
  Non-cyclic GFR-binding peptide
  MOD_RES (32), (33): Xaa is C or S
ESVAMGQYNKLYTVVGKDLYLISIASLKTPVXXAKSA

SEQ ID NO: 37309 - protein, 37 aa, Artificial Sequence
  Non-cyclic GFR-binding peptide
  MOD_RES (2), (4), (35), (36): Xaa is C or S
LXGXEEVIMQYNKLLLVRGNDLYLMSIASTKVPAXXT

SEQ ID NO: 37310 - protein, 37 aa, Artificial Sequence
  Non-cyclic GFR-binding peptide
  MOD_RES (2), (4): Xaa is C or S
  MOD_RES (16), (17), (18), (19), (20): Xaa is A or G
  MOD_RES (21), (22), (23), (24): Xaa is A or G or is absent
RXGXAEVVMDQYNKLXXXXXXXXXLYLISIASLRAPV

SEQ ID NO: 37311 - protein, 39 aa, Artificial Sequence
  Non-cyclic GFR-binding peptide
  MOD_RES (2), (4), (35), (36): Xaa is C or S
LXGXEEVIMQYNKLLLVRGNDLYLMSIASTKVPAXXTSP

SEQ ID NO: 37312 - protein, 35 aa, Artificial Sequence
  Non-cyclic GFR-binding peptide
  MOD_RES (1), (33), (34): Xaa is C or S
XESVAMGQYNKLYTVVGKDLYLISIASLKTPVXXA

SEQ ID NO: 37313 - protein, 36 aa, Artificial Sequence
  Non-cyclic GFR-binding peptide
  MOD_RES (1), (32), (33): Xaa is C or S
XEEVIMQYNKLLLVRGNDLYLMSIASTKVPAXXTSP

SEQ ID NO: 37314 - protein, 35 aa, Artificial Sequence
  Non-cyclic GFR-binding peptide
  MOD_RES (1), (35): Xaa is C or S
  MOD_RES (13), (14), (15), (16), (17): Xaa is A or G
  MOD_RES (18), (19), (20), (21): Xaa is A or G or is absent
XAEVVMDQYNKLXXXXXXXXXLYLISIASLRAPVX

SEQ ID NO: 37315 - protein, 31 aa, Artificial Sequence
  Non-cyclic GFR-binding peptide
  MOD_RES (31), (31): Xaa is C or S
DVVMGQYNKLIIQQKDNLYLMSIASMKTPTX

SEQ ID NO: 37316 - protein, 41 aa, Artificial Sequence
  Non-cyclic GFR-binding peptide
  MOD_RES (2), (4), (35), (36): Xaa is C or S
LXGXEEVIMQYNKLLLVRGNDLYLMSIASTKVPAXXTSPVR

SEQ ID NO: 37317 - protein, 36 aa, Artificial Sequence
  Non-cyclic GFR-binding peptide
  MOD_RES (31), (32): Xaa is C or S
SVAMGQYNKLYTVVGKDLYLISIASLKTPVXXAKSA

SEQ ID NO: 37318 - protein, 42 aa, Artificial Sequence
  Non-cyclic GFR-binding peptide
  MOD_RES (2), (4), (37), (38): Xaa is C or S
  MOD_RES (15), (16), (17), (18), (19): Xaa is A or G
  MOD_RES (20), (21), (22), (23): Xaa is A or G or is absent
LXGXEEVIMQYNKLXXXXXXXXXLYLMSIASTKVPAXXTSPV

SEQ ID NO: 37319 - protein, 41 aa, Artificial Sequence
  Non-cyclic GFR-binding peptide
  MOD_RES (2), (36), (37): Xaa is C or S
  MOD_RES (14), (15), (16), (17), (18): Xaa is A or G
  MOD_RES (19), (20), (21), (22): Xaa is A or G or is absent
GXRDVVMGQYNKLXXXXXXXXXLYLMSIASMKTPTXXPGAS

SEQ ID NO: 37320 - protein, 34 aa, Artificial Sequence
  Non-cyclic GFR-binding peptide
  MOD_RES (1), (3): Xaa is C or S
XGXESVAMGQYNKLYTVVGKDLYLISIASLKTPV

SEQ ID NO: 37321 - protein, 43 aa, Artificial Sequence
  Non-cyclic GFR-binding peptide
  MOD_RES (2), (4), (37), (38): Xaa is C or S
  MOD_RES (15), (16), (17), (18), (19): Xaa is A or G
  MOD_RES (20), (21), (22), (23): Xaa is A or G or is absent
LXGXEEVIMQYNKLXXXXXXXXXLYLMSIASTKVPAXXTSPVR

SEQ ID NO: 37322 - protein, 41 aa, Artificial Sequence
  Non-cyclic GFR-binding peptide
  MOD_RES (2), (4), (36), (37): Xaa is C or S
RXGXESVAMGQYNKLYTVVGKDLYLISIASLKTPVXXAKSA

SEQ ID NO: 37323 - protein, 38 aa, Artificial Sequence
  Non-cyclic GFR-binding peptide
  MOD_RES (34), (35): Xaa is C or S
  MOD_RES (12), (13), (14), (15), (16): Xaa is A or G
  MOD_RES (17), (18), (19), (20): Xaa is A or G or is absent
SEVTMNQYNKLXXXXXXXXXLYLISIASMKEPVXXPEP

SEQ ID NO: 37324 - protein, 36 aa, Artificial Sequence
  Non-cyclic GFR-binding peptide
  MOD_RES (2), (4): Xaa is C or S
  MOD_RES (15), (16), (17), (18), (19): Xaa is A or G
  MOD_RES (20), (21), (22), (23): Xaa is A or G or is absent
LXGXEEVIMQYNKLXXXXXXXXXLYLMSIASTKVPA

SEQ ID NO: 37325 - protein, 42 aa, Artificial Sequence
  Non-cyclic GFR-binding peptide
  MOD_RES (2), (4), (36), (37): Xaa is C or S
SXGXRDVVMGQYNKLIIQQKDNLYLMSIASMKTPTXXPGASG

SEQ ID NO: 37326 - protein, 33 aa, Artificial Sequence
  Non-cyclic GFR-binding peptide
  MOD_RES (32), (33): Xaa is C or S
SEVTMNQYNKLVVNKNEDLYLISIASMKEPVXX

SEQ ID NO: 37327 - protein, 35 aa, Artificial Sequence
  Non-cyclic GFR-binding peptide
  MOD_RES (1), (33), (34): Xaa is C or S
XAEVVMDQYNKLVVNNAADLYLISIASLRAPVXXS

SEQ ID NO: 37328 - protein, 32 aa, Artificial Sequence
  Non-cyclic GFR-binding peptide
  MOD_RES (31), (32): Xaa is C or S
DVVMGQYNKLIIQQKDNLYLMSIASMKTPTXX

SEQ ID NO: 37329 - protein, 40 aa, Artificial Sequence
  Non-cyclic GFR-binding peptide
  MOD_RES (1), (3), (35), (36): Xaa is C or S
XGXAEVVMDQYNKLVVNNAADLYLISIASLRAPVXXSAPA

SEQ ID NO: 37330 - protein, 33 aa, Artificial Sequence
  Non-cyclic GFR-binding peptide
  MOD_RES (1), (3): Xaa is C or S
XGXEEVIMQYNKLLLVRGNDLYLMSIASTKVPA

SEQ ID NO: 37331 - protein, 33 aa, Artificial Sequence
  Non-cyclic GFR-binding peptide
  MOD_RES (31), (32): Xaa is C or S
EEVIMQYNKLLLVRGNDLYLMSIASTKVPAXXT

SEQ ID NO: 37332 - protein, 35 aa, Artificial Sequence
  Non-cyclic GFR-binding peptide
  MOD_RES (2), (2): Xaa is C or S
  MOD_RES (14), (15), (16), (17), (18): Xaa is A or G
  MOD_RES (19), (20), (21), (22): Xaa is A or G or is absent
AXSEVTMNQYNKLXXXXXXXXXLYLISIASMKEPV

SEQ ID NO: 37333 - protein, 34 aa, Artificial Sequence
  Non-cyclic GFR-binding peptide
  MOD_RES (34), (34): Xaa is C or S
  MOD_RES (12), (13), (14), (15), (16): Xaa is A or G
  MOD_RES (17), (18), (19), (20): Xaa is A or G or is absent
AEVVMDQYNKLXXXXXXXXXLYLISIASLRAPVX

SEQ ID NO: 37334 - protein, 41 aa, Artificial Sequence
  Non-cyclic GFR-binding peptide
  MOD_RES (1), (3), (37), (38): Xaa is C or S
  MOD_RES (15), (16), (17), (18), (19): Xaa is A or G
  MOD_RES (20), (21), (22), (23): Xaa is A or G or is absent
XAXSEVTMNQYNKLXXXXXXXXXLYLISIASMKEPVXXPEP

SEQ ID NO: 37335 - protein, 38 aa, Artificial Sequence
  Non-cyclic GFR-binding peptide
  MOD_RES (2), (36), (37): Xaa is C or S
  MOD_RES (14), (15), (16), (17), (18): Xaa is A or G
  MOD_RES (19), (20), (21), (22): Xaa is A or G or is absent
GXRDVVMGQYNKLXXXXXXXXXLYLMSIASMKTPTXXP

SEQ ID NO: 37336 - protein, 36 aa, Artificial Sequence
  Non-cyclic GFR-binding peptide
  MOD_RES (1), (3), (35), (36): Xaa is C or S
XGXRDVVMGQYNKLIIQQKDNLYLMSIASMKTPTXX

SEQ ID NO: 37337 - protein, 33 aa, Artificial Sequence
  Non-cyclic GFR-binding peptide
  MOD_RES (12), (13), (14), (15), (16): Xaa is A or G
  MOD_RES (17), (18), (19), (20): Xaa is A or G or is absent
SEVTMNQYNKLXXXXXXXXXLYLISIASMKEPV

SEQ ID NO: 37338 - protein, 36 aa, Artificial Sequence
  Non-cyclic GFR-binding peptide
  MOD_RES (32), (33): Xaa is C or S
RDVVMGQYNKLIIQQKDNLYLMSIASMKTPTXXPGA

SEQ ID NO: 37339 - protein, 35 aa, Artificial Sequence
  Non-cyclic GFR-binding peptide
  MOD_RES (2), (2): Xaa is C or S
  MOD_RES (14), (15), (16), (17), (18): Xaa is A or G
  MOD_RES (19), (20), (21), (22): Xaa is A or G or is absent
GXRDVVMGQYNKLXXXXXXXXXLYLMSIASMKTPT

SEQ ID NO: 37340 - protein, 40 aa, Artificial Sequence
  Non-cyclic GFR-binding peptide
  MOD_RES (2), (4), (36), (37): Xaa is C or S
RXAXSEVTMNQYNKLVVNKNEDLYLISIASMKEPVXXPEP

SEQ ID NO: 37341 - protein, 31 aa, Artificial Sequence
  Non-cyclic GFR-binding peptide
RDVVMGQYNKLIIQQKDNLYLMSIASMKTPT

SEQ ID NO: 37342 - protein, 36 aa, Artificial Sequence
  Non-cyclic GFR-binding peptide
  MOD_RES (2), (36): Xaa is C or S
  MOD_RES (14), (15), (16), (17), (18): Xaa is A or G
  MOD_RES (19), (20), (21), (22): Xaa is A or G or is absent
GXESVAMGQYNKLXXXXXXXXXLYLISIASLKTPVX

SEQ ID NO: 37343 - protein, 36 aa, Artificial Sequence
  Non-cyclic GFR-binding peptide
  MOD_RES (32), (33): Xaa is C or S
ESVAMGQYNKLYTVVGKDLYLISIASLKTPVXXAKS

SEQ ID NO: 37344 - protein, 36 aa, Artificial Sequence
  Non-cyclic GFR-binding peptide
  MOD_RES (1), (33), (34): Xaa is C or S
XRDVVMGQYNKLIIQQKDNLYLMSIASMKTPTXXPG

SEQ ID NO: 37345 - protein, 38 aa, Artificial Sequence
  Non-cyclic GFR-binding peptide
  MOD_RES (2), (4), (38): Xaa is C or S
  MOD_RES (16), (17), (18), (19), (20): Xaa is A or G
  MOD_RES (21), (22), (23), (24): Xaa is A or G or is absent
RXGXAEVVMDQYNKLXXXXXXXXXLYLISIASLRAPVX

SEQ ID NO: 37346 - protein, 38 aa, Artificial Sequence
  Non-cyclic GFR-binding peptide
  MOD_RES (1), (35), (36): Xaa is C or S
  MOD_RES (13), (14), (15), (16), (17): Xaa is A or G
  MOD_RES (18), (19), (20), (21): Xaa is A or G or is absent
XAEVVMDQYNKLXXXXXXXXXLYLISIASLRAPVXXSA

SEQ ID NO: 37347 - protein, 32 aa, Artificial Sequence
  Non-cyclic GFR-binding peptide
  MOD_RES (1), (1): Xaa is C or S
XRDVVMGQYNKLIIQQKDNLYLMSIASMKTPT

SEQ ID NO: 37348 - protein, 39 aa, Artificial Sequence
  Non-cyclic GFR-binding peptide
  MOD_RES (2), (36), (37): Xaa is C or S
  MOD_RES (14), (15), (16), (17), (18): Xaa is A or G
  MOD_RES (19), (20), (21), (22): Xaa is A or G or is absent
GXRDVVMGQYNKLXXXXXXXXXLYLMSIASMKTPTXXPG

SEQ ID NO: 37349 - protein, 39 aa, Artificial Sequence
  Non-cyclic GFR-binding peptide
  MOD_RES (33), (34): Xaa is C or S
  MOD_RES (11), (12), (13), (14), (15): Xaa is A or G
  MOD_RES (16), (17), (18), (19): Xaa is A or G or is absent
EVTMNQYNKLXXXXXXXXXLYLISIASMKEPVXXPEPIG

SEQ ID NO: 37350 - protein, 32 aa, Artificial Sequence
  Non-cyclic GFR-binding peptide
  MOD_RES (32), (32): Xaa is C or S
AEVVMDQYNKLVVNNAADLYLISIASLRAPVX

SEQ ID NO: 37351 - protein, 39 aa, Artificial Sequence
  Non-cyclic GFR-binding peptide
  MOD_RES (2), (4), (36), (37): Xaa is C or S
RXAXSEVTMNQYNKLVVNKNEDLYLISIASMKEPVXXPE

SEQ ID NO: 37352 - protein, 34 aa, Artificial Sequence
  Non-cyclic GFR-binding peptide
  MOD_RES (34), (34): Xaa is C or S
  MOD_RES (12), (13), (14), (15), (16): Xaa is A or G
  MOD_RES (17), (18), (19), (20): Xaa is A or G or is absent
RDVVMGQYNKLXXXXXXXXXLYLMSIASMKTPTX

SEQ ID NO: 37353 - protein, 38 aa, Artificial Sequence
  Non-cyclic GFR-binding peptide
  MOD_RES (1), (34), (35): Xaa is C or S
  MOD_RES (12), (13), (14), (15), (16): Xaa is A or G
  MOD_RES (17), (18), (19), (20): Xaa is A or G or is absent
XEEVIMQYNKLXXXXXXXXXLYLMSIASTKVPAXXTSP

SEQ ID NO: 37354 - protein, 37 aa, Artificial Sequence
  Non-cyclic GFR-binding peptide
  MOD_RES (34), (35): Xaa is C or S
  MOD_RES (12), (13), (14), (15), (16): Xaa is A or G
  MOD_RES (17), (18), (19), (20): Xaa is A or G or is absent
SEVTMNQYNKLXXXXXXXXXLYLISIASMKEPVXXPE

SEQ ID NO: 37355 - protein, 36 aa, Artificial Sequence
  Non-cyclic GFR-binding peptide
  MOD_RES (1), (33), (34): Xaa is C or S
XAEVVMDQYNKLVVNNAADLYLISIASLRAPVXXSA

SEQ ID NO: 37356 - protein, 33 aa, Artificial Sequence
  Non-cyclic GFR-binding peptide
  MOD_RES (12), (13), (14), (15), (16): Xaa is A or G
  MOD_RES (17), (18), (19), (20): Xaa is A or G or is absent
ESVAMGQYNKLXXXXXXXXXLYLISIASLKTPV

SEQ ID NO: 37357 - protein, 35 aa, Artificial Sequence
  Non-cyclic GFR-binding peptide
  MOD_RES (1), (3), (35): Xaa is C or S
XGXESVAMGQYNKLYTVVGKDLYLISIASLKTPVX

SEQ ID NO: 37358 - protein, 35 aa, Artificial Sequence
  Non-cyclic GFR-binding peptide
  MOD_RES (31), (32): Xaa is C or S
EVTMNQYNKLVVNKNEDLYLISIASMKEPVXXPEP

SEQ ID NO: 37359 - protein, 35 aa, Artificial Sequence
  Non-cyclic GFR-binding peptide
  MOD_RES (33), (34): Xaa is C or S
  MOD_RES (11), (12), (13), (14), (15): Xaa is A or G
  MOD_RES (16), (17), (18), (19): Xaa is A or G or is absent
EEVIMQYNKLXXXXXXXXXLYLMSIASTKVPAXXT

SEQ ID NO: 37360 - protein, 37 aa, Artificial Sequence
  Non-cyclic GFR-binding peptide
  MOD_RES (1), (32), (33): Xaa is C or S
XEEVIMQYNKLLLVRGNDLYLMSIASTKVPAXXTSPV

SEQ ID NO: 37361 - protein, 40 aa, Artificial Sequence
  Non-cyclic GFR-binding peptide
  MOD_RES (1), (3), (35), (36): Xaa is C or S
XGXRDVVMGQYNKLIIQQKDNLYLMSIASMKTPTXXPGAS

SEQ ID NO: 37362 - protein, 40 aa, Artificial Sequence
  Non-cyclic GFR-binding peptide
  MOD_RES (1), (3), (35), (36): Xaa is C or S
XAXSEVTMNQYNKLVVNKNEDLYLISIASMKEPVXXPEPI

SEQ ID NO: 37363 - protein, 40 aa, Artificial Sequence
  Non-cyclic GFR-binding peptide
  MOD_RES (2), (4), (36), (37): Xaa is C or S
SXGXRDVVMGQYNKLIIQQKDNLYLMSIASMKTPTXXPGA

SEQ ID NO: 37364 - protein, 38 aa, Artificial Sequence
  Non-cyclic GFR-binding peptide
  MOD_RES (1), (3), (35), (36): Xaa is C or S
XGXRDVVMGQYNKLIIQQKDNLYLMSIASMKTPTXXPG

SEQ ID NO: 37365 - protein, 40 aa, Artificial Sequence
  Non-cyclic GFR-binding peptide
  MOD_RES (1), (35), (36): Xaa is C or S
  MOD_RES (13), (14), (15), (16), (17): Xaa is A or G
  MOD_RES (18), (19), (20), (21): Xaa is A or G or is absent
XRDVVMGQYNKLXXXXXXXXXLYLMSIASMKTPTXXPGAS

SEQ ID NO: 37366 - protein, 36 aa, Artificial Sequence
  Non-cyclic GFR-binding peptide
  MOD_RES (2), (36): Xaa is C or S
  MOD_RES (14), (15), (16), (17), (18): Xaa is A or G
  MOD_RES (19), (20), (21), (22): Xaa is A or G or is absent
GXRDVVMGQYNKLXXXXXXXXXLYLMSIASMKTPTX

SEQ ID NO: 37367 - protein, 42 aa, Artificial Sequence
  Non-cyclic GFR-binding peptide
  MOD_RES (2), (36), (37): Xaa is C or S
  MOD_RES (14), (15), (16), (17), (18): Xaa is A or G
  MOD_RES (19), (20), (21), (22): Xaa is A or G or is absent
AXSEVTMNQYNKLXXXXXXXXXLYLISIASMKEPVXXPEPIG

SEQ ID NO: 37368 - protein, 36 aa, Artificial Sequence
  Non-cyclic GFR-binding peptide
  MOD_RES (2), (34), (35): Xaa is C or S
GXAEVVMDQYNKLVVNNAADLYLISIASLRAPVXXS

SEQ ID NO: 37369 - protein, 38 aa, Artificial Sequence
  Non-cyclic GFR-binding peptide
  MOD_RES (1), (35), (36): Xaa is C or S
  MOD_RES (13), (14), (15), (16), (17): Xaa is A or G
  MOD_RES (18), (19), (20), (21): Xaa is A or G or is absent
XSEVTMNQYNKLXXXXXXXXXLYLISIASMKEPVXXPE

SEQ ID NO: 37370 - protein, 32 aa, Artificial Sequence
  Non-cyclic GFR-binding peptide
  MOD_RES (11), (12), (13), (14), (15): Xaa is A or G
  MOD_RES (16), (17), (18), (19): Xaa is A or G or is absent
EEVIMQYNKLXXXXXXXXXLYLMSIASTKVPA

SEQ ID NO: 37371 - protein, 38 aa, Artificial Sequence
  Non-cyclic GFR-binding peptide
  MOD_RES (1), (3), (35), (36): Xaa is C or S
XGXESVAMGQYNKLYTVVGKDLYLISIASLKTPVXXAK

SEQ ID NO: 37372 - protein, 37 aa, Artificial Sequence
  Non-cyclic GFR-binding peptide
  MOD_RES (1), (35), (36): Xaa is C or S
  MOD_RES (13), (14), (15), (16), (17): Xaa is A or G
  MOD_RES (18), (19), (20), (21): Xaa is A or G or is absent
XSEVTMNQYNKLXXXXXXXXXLYLISIASMKEPVXXP

SEQ ID NO: 37373 - protein, 36 aa, Artificial Sequence
  Non-cyclic GFR-binding peptide
  MOD_RES (1), (3), (35), (36): Xaa is C or S
XAXSEVTMNQYNKLVVNKNEDLYLISIASMKEPVXX

SEQ ID NO: 37374 - protein, 40 aa, Artificial Sequence
  Non-cyclic GFR-binding peptide
  MOD_RES (1), (3), (35), (36): Xaa is C or S
XGXESVAMGQYNKLYTVVGKDLYLISIASLKTPVXXAKSA

SEQ ID NO: 37375 - protein, 38 aa, Artificial Sequence
  Non-cyclic GFR-binding peptide
  MOD_RES (1), (35), (36): Xaa is C or S
  MOD_RES (13), (14), (15), (16), (17): Xaa is A or G
  MOD_RES (18), (19), (20), (21): Xaa is A or G or is absent
XESVAMGQYNKLXXXXXXXXXLYLISIASLKTPVXXAK

SEQ ID NO: 37376 - protein, 37 aa, Artificial Sequence
  Non-cyclic GFR-binding peptide
  MOD_RES (33), (34): Xaa is C or S
  MOD_RES (11), (12), (13), (14), (15): Xaa is A or G
  MOD_RES (16), (17), (18), (19): Xaa is A or G or is absent
EVTMNQYNKLXXXXXXXXXLYLISIASMKEPVXXPEP

SEQ ID NO: 37377 - protein, 39 aa, Artificial Sequence
  Non-cyclic GFR-binding peptide
  MOD_RES (1), (33), (34): Xaa is C or S
XRDVVMGQYNKLIIQQKDNLYLMSIASMKTPTXXPGASG

SEQ ID NO: 37378 - protein, 36 aa, Artificial Sequence
  Non-cyclic GFR-binding peptide
  MOD_RES (33), (34): Xaa is C or S
  MOD_RES (11), (12), (13), (14), (15): Xaa is A or G
  MOD_RES (16), (17), (18), (19): Xaa is A or G or is absent
DVVMGQYNKLXXXXXXXXXLYLMSIASMKTPTXXPG

SEQ ID NO: 37379 - protein, 37 aa, Artificial Sequence
  Non-cyclic GFR-binding peptide
  MOD_RES (32), (33): Xaa is C or S
RDVVMGQYNKLIIQQKDNLYLMSIASMKTPTXXPGAS

SEQ ID NO: 37380 - protein, 36 aa, Artificial Sequence
  Non-cyclic GFR-binding peptide
  MOD_RES (34), (35): Xaa is C or S
  MOD_RES (12), (13), (14), (15), (16): Xaa is A or G
  MOD_RES (17), (18), (19), (20): Xaa is A or G or is absent
AEVVMDQYNKLXXXXXXXXXLYLISIASLRAPVXXS

SEQ ID NO: 37381 - protein, 33 aa, Artificial Sequence
  Non-cyclic GFR-binding peptide
  MOD_RES (32), (33): Xaa is C or S
ESVAMGQYNKLYTVVGKDLYLISIASLKTPVXX

SEQ ID NO: 37382 - protein, 36 aa, Artificial Sequence
  Non-cyclic GFR-binding peptide
  MOD_RES (1), (3), (34), (35): Xaa is C or S
XGXEEVIMQYNKLLLVRGNDLYLMSIASTKVPAXXT

SEQ ID NO: 37383 - protein, 43 aa, Artificial Sequence
  Non-cyclic GFR-binding peptide
  MOD_RES (2), (4), (38), (39): Xaa is C or S
  MOD_RES (16), (17), (18), (19), (20): Xaa is A or G
  MOD_RES (21), (22), (23), (24): Xaa is A or G or is absent
RXAXSEVTMNQYNKLXXXXXXXXXLYLISIASMKEPVXXPEPI

SEQ ID NO: 37384 - protein, 37 aa, Artificial Sequence
  Non-cyclic GFR-binding peptide
  MOD_RES (2), (4), (36), (37): Xaa is C or S
SXGXRDVVMGQYNKLIIQQKDNLYLMSIASMKTPTXX

SEQ ID NO: 37385 - protein, 42 aa, Artificial Sequence
  Non-cyclic GFR-binding peptide
  MOD_RES (2), (36), (37): Xaa is C or S
  MOD_RES (14), (15), (16), (17), (18): Xaa is A or G
  MOD_RES (19), (20), (21), (22): Xaa is A or G or is absent
GXSRVVMNQYNKLXXXXXXXXXLYLVSIASLKTPAXXPKPVH

SEQ ID NO: 37386 - protein, 37 aa, Artificial Sequence
  Non-cyclic GFR-binding peptide
  MOD_RES (1), (33), (34): Xaa is C or S
XESVAMGQYNKLYTVVGKDLYLISIASLKTPVXXAKS

SEQ ID NO: 37387 - protein, 39 aa, Artificial Sequence
  Non-cyclic GFR-binding peptide
  MOD_RES (2), (4), (38), (39): Xaa is C or S
  MOD_RES (16), (17), (18), (19), (20): Xaa is A or G
  MOD_RES (21), (22), (23), (24): Xaa is A or G or is absent
RXAXSEVTMNQYNKLXXXXXXXXXLYLISIASMKEPVXX

SEQ ID NO: 37388 - protein, 38 aa, Artificial Sequence
  Non-cyclic GFR-binding peptide
  MOD_RES (1), (33), (34): Xaa is C or S
XESVAMGQYNKLYTVVGKDLYLISIASLKTPVXXAKSA

SEQ ID NO: 37389 - protein, 39 aa, Artificial Sequence
  Non-cyclic GFR-binding peptide
  MOD_RES (34), (35): Xaa is C or S
  MOD_RES (12), (13), (14), (15), (16): Xaa is A or G
  MOD_RES (17), (18), (19), (20): Xaa is A or G or is absent
RDVVMGQYNKLXXXXXXXXXLYLMSIASMKTPTXXPGAS

SEQ ID NO: 37390 - protein, 32 aa, Artificial Sequence
  Non-cyclic GFR-binding peptide
  MOD_RES (31), (32): Xaa is C or S
EEVIMQYNKLLLVRGNDLYLMSIASTKVPAXX

SEQ ID NO: 37391 - protein, 38 aa, Artificial Sequence
  Non-cyclic GFR-binding peptide
  MOD_RES (2), (33), (34): Xaa is C or S
GXEEVIMQYNKLLLVRGNDLYLMSIASTKVPAXXTSPV

SEQ ID NO: 37392 - protein, 38 aa, Artificial Sequence
  Non-cyclic GFR-binding peptide
  MOD_RES (1), (35), (36): Xaa is C or S
  MOD_RES (13), (14), (15), (16), (17): Xaa is A or G
  MOD_RES (18), (19), (20), (21): Xaa is A or G or is absent
XRDVVMGQYNKLXXXXXXXXXLYLMSIASMKTPTXXPG

SEQ ID NO: 37393 - protein, 34 aa, Artificial Sequence
  Non-cyclic GFR-binding peptide
  MOD_RES (1), (1): Xaa is C or S
  MOD_RES (13), (14), (15), (16), (17): Xaa is A or G
  MOD_RES (18), (19), (20), (21): Xaa is A or G or is absent
XSEVTMNQYNKLXXXXXXXXXLYLISIASMKEPV

SEQ ID NO: 37394 - protein, 41 aa, Artificial Sequence
  Non-cyclic GFR-binding peptide
  MOD_RES (2), (36), (37): Xaa is C or S
  MOD_RES (14), (15), (16), (17), (18): Xaa is A or G
  MOD_RES (19), (20), (21), (22): Xaa is A or G or is absent
AXSEVTMNQYNKLXXXXXXXXXLYLISIASMKEPVXXPEPI

SEQ ID NO: 37395 - protein, 38 aa, Artificial Sequence
  Non-cyclic GFR-binding peptide
  MOD_RES (32), (33): Xaa is C or S
SRVVMNQYNKLIVNSSDDLYLVSIASLKTPAXXPKPVH

SEQ ID NO: 37396 - protein, 32 aa, Artificial Sequence
  Non-cyclic GFR-binding peptide
  MOD_RES (11), (12), (13), (14), (15): Xaa is A or G
  MOD_RES (16), (17), (18), (19): Xaa is A or G or is absent
EVTMNQYNKLXXXXXXXXXLYLISIASMKEPV

SEQ ID NO: 37397 - protein, 42 aa, Artificial Sequence
  Non-cyclic GFR-binding peptide
  MOD_RES (1), (3), (37), (38): Xaa is C or S
  MOD_RES (15), (16), (17), (18), (19): Xaa is A or G
  MOD_RES (20), (21), (22), (23): Xaa is A or G or is absent
XGXRDVVMGQYNKLXXXXXXXXXLYLMSIASMKTPTXXPGAS

SEQ ID NO: 37398 - protein, 38 aa, Artificial Sequence
  Non-cyclic GFR-binding peptide
  MOD_RES (2), (4), (36), (37): Xaa is C or S
RXGXESVAMGQYNKLYTVVGKDLYLISIASLKTPVXXA

SEQ ID NO: 37399 - protein, 37 aa, Artificial Sequence
  Non-cyclic GFR-binding peptide
  MOD_RES (34), (35): Xaa is C or S
  MOD_RES (12), (13), (14), (15), (16): Xaa is A or G
  MOD_RES (17), (18), (19), (20): Xaa is A or G or is absent
ESVAMGQYNKLXXXXXXXXXLYLISIASLKTPVXXAK

SEQ ID NO: 37400 - protein, 34 aa, Artificial Sequence
  Non-cyclic GFR-binding peptide
  MOD_RES (2), (34): Xaa is C or S
GXESVAMGQYNKLYTVVGKDLYLISIASLKTPVX

SEQ ID NO: 37401 - protein, 38 aa, Artificial Sequence
  Non-cyclic GFR-binding peptide
  MOD_RES (2), (35), (36): Xaa is C or S
  MOD_RES (13), (14), (15), (16), (17): Xaa is A or G
  MOD_RES (18), (19), (20), (21): Xaa is A or G or is absent
GXEEVIMQYNKLXXXXXXXXXLYLMSIASTKVPAXXTS

SEQ ID NO: 37402 - protein, 32 aa, Artificial Sequence
  Non-cyclic GFR-binding peptide
  MOD_RES (32), (32): Xaa is C or S
SEVTMNQYNKLVVNKNEDLYLISIASMKEPVX

SEQ ID NO: 37403 - protein, 35 aa, Artificial Sequence
  Non-cyclic GFR-binding peptide
  MOD_RES (2), (2): Xaa is C or S
  MOD_RES (14), (15), (16), (17), (18): Xaa is A or G
  MOD_RES (19), (20), (21), (22): Xaa is A or G or is absent
GXESVAMGQYNKLXXXXXXXXXLYLISIASLKTPV

SEQ ID NO: 37404 - protein, 38 aa, Artificial Sequence
  Non-cyclic GFR-binding peptide
  MOD_RES (1), (3), (37), (38): Xaa is C or S
  MOD_RES (15), (16), (17), (18), (19): Xaa is A or G
  MOD_RES (20), (21), (22), (23): Xaa is A or G or is absent
XGXAEVVMDQYNKLXXXXXXXXXLYLISIASLRAPVXX

SEQ ID NO: 37405 - protein, 39 aa, Artificial Sequence
  Non-cyclic GFR-binding peptide
  MOD_RES (2), (4), (38), (39): Xaa is C or S
  MOD_RES (16), (17), (18), (19), (20): Xaa is A or G
  MOD_RES (21), (22), (23), (24): Xaa is A or G or is absent
SXGXRDVVMGQYNKLXXXXXXXXXLYLMSIASMKTPTXX

SEQ ID NO: 37406 - protein, 39 aa, Artificial Sequence
  Non-cyclic GFR-binding peptide
  MOD_RES (2), (4), (38), (39): Xaa is C or S
  MOD_RES (16), (17), (18), (19), (20): Xaa is A or G
  MOD_RES (21), (22), (23), (24): Xaa is A or G or is absent
RXGXAEVVMDQYNKLXXXXXXXXXLYLISIASLRAPVXX

SEQ ID NO: 37407 - protein, 40 aa, Artificial Sequence
  Non-cyclic GFR-binding peptide
  MOD_RES (1), (3), (37), (38): Xaa is C or S
  MOD_RES (15), (16), (17), (18), (19): Xaa is A or G
  MOD_RES (20), (21), (22), (23): Xaa is A or G or is absent
XAXSEVTMNQYNKLXXXXXXXXXLYLISIASMKEPVXXPE

SEQ ID NO: 37408 - protein, 34 aa, Artificial Sequence
  Non-cyclic GFR-binding peptide
  MOD_RES (2), (34): Xaa is C or S
GXAEVVMDQYNKLVVNNAADLYLISIASLRAPVX

SEQ ID NO: 37409 - protein, 37 aa, Artificial Sequence
  Non-cyclic GFR-binding peptide
  MOD_RES (33), (34): Xaa is C or S
  MOD_RES (11), (12), (13), (14), (15): Xaa is A or G
  MOD_RES (16), (17), (18), (19): Xaa is A or G or is absent
DVVMGQYNKLXXXXXXXXXLYLMSIASMKTPTXXPGA

SEQ ID NO: 37410 - protein, 37 aa, Artificial Sequence
  Non-cyclic GFR-binding peptide
  MOD_RES (34), (35): Xaa is C or S
  MOD_RES (12), (13), (14), (15), (16): Xaa is A or G
  MOD_RES (17), (18), (19), (20): Xaa is A or G or is absent
AEVVMDQYNKLXXXXXXXXXLYLISIASLRAPVXXSA

SEQ ID NO: 37411 - protein, 33 aa, Artificial Sequence
  Non-cyclic GFR-binding peptide
  MOD_RES (33), (33): Xaa is C or S
  MOD_RES (11), (12), (13), (14), (15): Xaa is A or G
  MOD_RES (16), (17), (18), (19): Xaa is A or G or is absent
EVTMNQYNKLXXXXXXXXXLYLISIASMKEPVX

SEQ ID NO: 37412 - protein, 44 aa, Artificial Sequence
  Non-cyclic GFR-binding peptide
  MOD_RES (2), (4), (38), (39): Xaa is C or S
  MOD_RES (16), (17), (18), (19), (20): Xaa is A or G
  MOD_RES (21), (22), (23), (24): Xaa is A or G or is absent
SXGXRDVVMGQYNKLXXXXXXXXXLYLMSIASMKTPTXXPGASG

SEQ ID NO: 37413 - protein, 39 aa, Artificial Sequence
  Non-cyclic GFR-binding peptide
  MOD_RES (1), (3), (37), (38): Xaa is C or S
  MOD_RES (15), (16), (17), (18), (19): Xaa is A or G
  MOD_RES (20), (21), (22), (23): Xaa is A or G or is absent
XAXSEVTMNQYNKLXXXXXXXXXLYLISIASMKEPVXXP

SEQ ID NO: 37414 - protein, 35 aa, Artificial Sequence
  Non-cyclic GFR-binding peptide
  MOD_RES (32), (33): Xaa is C or S
ESVAMGQYNKLYTVVGKDLYLISIASLKTPVXXAK

SEQ ID NO: 37415 - protein, 40 aa, Artificial Sequence
  Non-cyclic GFR-binding peptide
  MOD_RES (1), (3), (37), (38): Xaa is C or S
  MOD_RES (15), (16), (17), (18), (19): Xaa is A or G
  MOD_RES (20), (21), (22), (23): Xaa is A or G or is absent
XGXRDVVMGQYNKLXXXXXXXXXLYLMSIASMKTPTXXPG

SEQ ID NO: 37416 - protein, 32 aa, Artificial Sequence
  Non-cyclic GFR-binding peptide
  MOD_RES (32), (32): Xaa is C or S
ESVAMGQYNKLYTVVGKDLYLISIASLKTPVX

SEQ ID NO: 37417 - protein, 43 aa, Artificial Sequence
  Non-cyclic GFR-binding peptide
  MOD_RES (1), (3), (37), (38): Xaa is C or S
  MOD_RES (15), (16), (17), (18), (19): Xaa is A or G
  MOD_RES (20), (21), (22), (23): Xaa is A or G or is absent
XGXESVAMGQYNKLXXXXXXXXXLYLISIASLKTPVXXAKSAK

SEQ ID NO: 37418 - protein, 36 aa, Artificial Sequence
  Non-cyclic GFR-binding peptide
  MOD_RES (2), (33), (34): Xaa is C or S
GXEEVIMQYNKLLLVRGNDLYLMSIASTKVPAXXTS

SEQ ID NO: 37419 - protein, 42 aa, Artificial Sequence
  Non-cyclic GFR-binding peptide
  MOD_RES (2), (4), (36), (37): Xaa is C or S
RXGXESVAMGQYNKLYTVVGKDLYLISIASLKTPVXXAKSAK

SEQ ID NO: 37420 - protein, 35 aa, Artificial Sequence
  Non-cyclic GFR-binding peptide
  MOD_RES (1), (3), (34), (35): Xaa is C or S
XGXEEVIMQYNKLLLVRGNDLYLMSIASTKVPAXX

SEQ ID NO: 37421 - protein, 37 aa, Artificial Sequence
  Non-cyclic GFR-binding peptide
  MOD_RES (1), (3), (35), (36): Xaa is C or S
XAXSEVTMNQYNKLVVNKNEDLYLISIASMKEPVXXP

SEQ ID NO: 37422 - protein, 39 aa, Artificial Sequence
  Non-cyclic GFR-binding peptide
  MOD_RES (1), (3), (37), (38): Xaa is C or S
  MOD_RES (15), (16), (17), (18), (19): Xaa is A or G
  MOD_RES (20), (21), (22), (23): Xaa is A or G or is absent
XGXAEVVMDQYNKLXXXXXXXXXLYLISIASLRAPVXXS

SEQ ID NO: 37423 - protein, 40 aa, Artificial Sequence
  Non-cyclic GFR-binding peptide
  MOD_RES (1), (34), (35): Xaa is C or S
  MOD_RES (12), (13), (14), (15), (16): Xaa is A or G
  MOD_RES (17), (18), (19), (20): Xaa is A or G or is absent
XEEVIMQYNKLXXXXXXXXXLYLMSIASTKVPAXXTSPVR

SEQ ID NO: 37424 - protein, 39 aa, Artificial Sequence
  Non-cyclic GFR-binding peptide
  MOD_RES (1), (3), (36), (37): Xaa is C or S
  MOD_RES (14), (15), (16), (17), (18): Xaa is A or G
  MOD_RES (19), (20), (21), (22): Xaa is A or G or is absent
XGXEEVIMQYNKLXXXXXXXXXLYLMSIASTKVPAXXTS

SEQ ID NO: 37425 - protein, 35 aa, Artificial Sequence
  Non-cyclic GFR-binding peptide
  MOD_RES (32), (33): Xaa is C or S
AEVVMDQYNKLVVNNAADLYLISIASLRAPVXXSA

SEQ ID NO: 37426 - protein, 34 aa, Artificial Sequence
  Non-cyclic GFR-binding peptide
  MOD_RES (2), (34): Xaa is C or S
GXRDVVMGQYNKLIIQQKDNLYLMSIASMKTPTX

SEQ ID NO: 37427 - protein, 34 aa, Artificial Sequence
  Non-cyclic GFR-binding peptide
  MOD_RES (33), (34): Xaa is C or S
  MOD_RES (11), (12), (13), (14), (15): Xaa is A or G
  MOD_RES (16), (17), (18), (19): Xaa is A or G or is absent
EVVMDQYNKLXXXXXXXXXLYLISIASLRAPVXX

SEQ ID NO: 37428 - protein, 40 aa, Artificial Sequence
  Non-cyclic GFR-binding peptide
  MOD_RES (2), (36), (37): Xaa is C or S
  MOD_RES (14), (15), (16), (17), (18): Xaa is A or G
  MOD_RES (19), (20), (21), (22): Xaa is A or G or is absent
GXESVAMGQYNKLXXXXXXXXXLYLISIASLKTPVXXAKS

SEQ ID NO: 37429 - protein, 37 aa, Artificial Sequence
  Non-cyclic GFR-binding peptide
  MOD_RES (1), (35), (36): Xaa is C or S
  MOD_RES (13), (14), (15), (16), (17): Xaa is A or G
  MOD_RES (18), (19), (20), (21): Xaa is A or G or is absent
XESVAMGQYNKLXXXXXXXXXLYLISIASLKTPVXXA

SEQ ID NO: 37430 - protein, 37 aa, Artificial Sequence
  Non-cyclic GFR-binding peptide
  MOD_RES (1), (3), (37): Xaa is C or S
  MOD_RES (15), (16), (17), (18), (19): Xaa is A or G
  MOD_RES (20), (21), (22), (23): Xaa is A or G or is absent
XGXAEVVMDQYNKLXXXXXXXXXLYLISIASLRAPVX

SEQ ID NO: 37431 - protein, 35 aa, Artificial Sequence
  Non-cyclic GFR-binding peptide
  MOD_RES (33), (34): Xaa is C or S
  MOD_RES (11), (12), (13), (14), (15): Xaa is A or G
  MOD_RES (16), (17), (18), (19): Xaa is A or G or is absent
EVVMDQYNKLXXXXXXXXXLYLISIASLRAPVXXS

SEQ ID NO: 37432 - protein, 38 aa, Artificial Sequence
  Non-cyclic GFR-binding peptide
  MOD_RES (34), (35): Xaa is C or S
  MOD_RES (12), (13), (14), (15), (16): Xaa is A or G
  MOD_RES (17), (18), (19), (20): Xaa is A or G or is absent
AEVVMDQYNKLXXXXXXXXXLYLISIASLRAPVXXSAP

SEQ ID NO: 37433 - protein, 42 aa, Artificial Sequence
  Non-cyclic GFR-binding peptide
  MOD_RES (2), (4), (36), (37): Xaa is C or S
RXGXAEVVMDQYNKLVVNNAADLYLISIASLRAPVXXSAPAA

SEQ ID NO: 37434 - protein, 37 aa, Artificial Sequence
  Non-cyclic GFR-binding peptide
  MOD_RES (1), (3), (35), (36): Xaa is C or S
XGXAEVVMDQYNKLVVNNAADLYLISIASLRAPVXXS

SEQ ID NO: 37435 - protein, 38 aa, Artificial Sequence
  Non-cyclic GFR-binding peptide
  MOD_RES (1), (3), (35), (36): Xaa is C or S
XAXSEVTMNQYNKLVVNKNEDLYLISIASMKEPVXXPE

SEQ ID NO: 37436 - protein, 36 aa, Artificial Sequence
  Non-cyclic GFR-binding peptide
  MOD_RES (34), (35): Xaa is C or S
  MOD_RES (12), (13), (14), (15), (16): Xaa is A or G
  MOD_RES (17), (18), (19), (20): Xaa is A or G or is absent
ESVAMGQYNKLXXXXXXXXXLYLISIASLKTPVXXA

SEQ ID NO: 37437 - protein, 38 aa, Artificial Sequence
  Non-cyclic GFR-binding peptide
  MOD_RES (1), (3), (37), (38): Xaa is C or S
  MOD_RES (15), (16), (17), (18), (19): Xaa is A or G
  MOD_RES (20), (21), (22), (23): Xaa is A or G or is absent
XAXSEVTMNQYNKLXXXXXXXXXLYLISIASMKEPVXX

SEQ ID NO: 37438 - protein, 35 aa, Artificial Sequence
  Non-cyclic GFR-binding peptide
  MOD_RES (33), (34): Xaa is C or S
  MOD_RES (11), (12), (13), (14), (15): Xaa is A or G
  MOD_RES (16), (17), (18), (19): Xaa is A or G or is absent
DVVMGQYNKLXXXXXXXXXLYLMSIASMKTPTXXP

SEQ ID NO: 37439 - protein, 35 aa, Artificial Sequence
  Non-cyclic GFR-binding peptide
  MOD_RES (33), (34): Xaa is C or S
  MOD_RES (11), (12), (13), (14), (15): Xaa is A or G
  MOD_RES (16), (17), (18), (19): Xaa is A or G or is absent
SVAMGQYNKLXXXXXXXXXLYLISIASLKTPVXXA

SEQ ID NO: 37440 - protein, 39 aa, Artificial Sequence
  Non-cyclic GFR-binding peptide
  MOD_RES (1), (3), (35), (36): Xaa is C or S
XAXSEVTMNQYNKLVVNKNEDLYLISIASMKEPVXXPEP

SEQ ID NO: 37441 - protein, 36 aa, Artificial Sequence
  Non-cyclic GFR-binding peptide
  MOD_RES (1), (3), (36): Xaa is C or S
  MOD_RES (14), (15), (16), (17), (18): Xaa is A or G
  MOD_RES (19), (20), (21), (22): Xaa is A or G or is absent
XGXEEVIMQYNKLXXXXXXXXXLYLMSIASTKVPAX

SEQ ID NO: 37442 - protein, 34 aa, Artificial Sequence
  Non-cyclic GFR-binding peptide
  MOD_RES (2), (4): Xaa is C or S
LXGXEEVIMQYNKLLLVRGNDLYLMSIASTKVPA

SEQ ID NO: 37443 - protein, 32 aa, Artificial Sequence
  Non-cyclic GFR-binding peptide
  MOD_RES (1), (32): Xaa is C or S
XEEVIMQYNKLLLVRGNDLYLMSIASTKVPAX

SEQ ID NO: 37444 - protein, 37 aa, Artificial Sequence
  Non-cyclic GFR-binding peptide
  MOD_RES (2), (34), (35): Xaa is C or S
AXSEVTMNQYNKLVVNKNEDLYLISIASMKEPVXXPE

SEQ ID NO: 37445 - protein, 39 aa, Artificial Sequence
  Non-cyclic GFR-binding peptide
  MOD_RES (1), (3), (35), (36): Xaa is C or S
XGXESVAMGQYNKLYTVVGKDLYLISIASLKTPVXXAKS

SEQ ID NO: 37446 - protein, 39 aa, Artificial Sequence
  Non-cyclic GFR-binding peptide
  MOD_RES (34), (35): Xaa is C or S
  MOD_RES (12), (13), (14), (15), (16): Xaa is A or G
  MOD_RES (17), (18), (19), (20): Xaa is A or G or is absent
AEVVMDQYNKLXXXXXXXXXLYLISIASLRAPVXXSAPA

SEQ ID NO: 37447 - protein, 36 aa, Artificial Sequence
  Non-cyclic GFR-binding peptide
  MOD_RES (2), (4), (36): Xaa is C or S
RXAXSEVTMNQYNKLVVNKNEDLYLISIASMKEPVX

SEQ ID NO: 37448 - protein, 44 aa, Artificial Sequence
  Non-cyclic GFR-binding peptide
  MOD_RES (2), (4), (38), (39): Xaa is C or S
  MOD_RES (16), (17), (18), (19), (20): Xaa is A or G
  MOD_RES (21), (22), (23), (24): Xaa is A or G or is absent
HXGXSRVVMNQYNKLXXXXXXXXXLYLVSIASLKTPAXXPKPVH

SEQ ID NO: 37449 - protein, 37 aa, Artificial Sequence
  Non-cyclic GFR-binding peptide
  MOD_RES (2), (4), (36), (37): Xaa is C or S
RXGXESVAMGQYNKLYTVVGKDLYLISIASLKTPVXX

SEQ ID NO: 37450 - protein, 34 aa, Artificial Sequence
  Non-cyclic GFR-binding peptide
  MOD_RES (1), (3): Xaa is C or S
XGXAEVVMDQYNKLVVNNAADLYLISIASLRAPV

SEQ ID NO: 37451 - protein, 37 aa, Artificial Sequence
  Non-cyclic GFR-binding peptide
  MOD_RES (2), (4): Xaa is C or S
  MOD_RES (16), (17), (18), (19), (20): Xaa is A or G
  MOD_RES (21), (22), (23), (24): Xaa is A or G or is absent
RXAXSEVTMNQYNKLXXXXXXXXXLYLISIASMKEPV

SEQ ID NO: 37452 - protein, 35 aa, Artificial Sequence
  Non-cyclic GFR-binding peptide
  MOD_RES (31), (32): Xaa is C or S
EEVIMQYNKLLLVRGNDLYLMSIASTKVPAXXTSP

SEQ ID NO: 37453 - protein, 37 aa, Artificial Sequence
  Non-cyclic GFR-binding peptide
  MOD_RES (2), (34), (35): Xaa is C or S
GXESVAMGQYNKLYTVVGKDLYLISIASLKTPVXXAK

SEQ ID NO: 37454 - protein, 36 aa, Artificial Sequence
  Non-cyclic GFR-binding peptide
  MOD_RES (2), (34), (35): Xaa is C or S
GXRDVVMGQYNKLIIQQKDNLYLMSIASMKTPTXXP

SEQ ID NO: 37455 - protein, 38 aa, Artificial Sequence
  Non-cyclic GFR-binding peptide
  MOD_RES (1), (3), (34), (35): Xaa is C or S
XGXEEVIMQYNKLLLVRGNDLYLMSIASTKVPAXXTSP

SEQ ID NO: 37456 - protein, 30 aa, Artificial Sequence
  Non-cyclic GFR-binding peptide
EVTMNQYNKLVVNKNEDLYLISIASMKEPV

SEQ ID NO: 37457 - protein, 40 aa, Artificial Sequence
  Non-cyclic GFR-binding peptide
  MOD_RES (2), (34), (35): Xaa is C or S
AXSEVTMNQYNKLVVNKNEDLYLISIASMKEPVXXPEPIG

SEQ ID NO: 37458 - protein, 34 aa, Artificial Sequence
  Non-cyclic GFR-binding peptide
  MOD_RES (33), (34): Xaa is C or S
  MOD_RES (11), (12), (13), (14), (15): Xaa is A or G
  MOD_RES (16), (17), (18), (19): Xaa is A or G or is absent
SVAMGQYNKLXXXXXXXXXLYLISIASLKTPVXX

SEQ ID NO: 37459 - protein, 33 aa, Artificial Sequence
  Non-cyclic GFR-binding peptide
  MOD_RES (2), (2): Xaa is C or S
AXSEVTMNQYNKLVVNKNEDLYLISIASMKEPV

SEQ ID NO: 37460 - protein, 36 aa, Artificial Sequence
  Non-cyclic GFR-binding peptide
  MOD_RES (34), (35): Xaa is C or S
  MOD_RES (12), (13), (14), (15), (16): Xaa is A or G
  MOD_RES (17), (18), (19), (20): Xaa is A or G or is absent
RDVVMGQYNKLXXXXXXXXXLYLMSIASMKTPTXXP

SEQ ID NO: 37461 - protein, 36 aa, Artificial Sequence
  Non-cyclic GFR-binding peptide
  MOD_RES (31), (32): Xaa is C or S
EEVIMQYNKLLLVRGNDLYLMSIASTKVPAXXTSPV

SEQ ID NO: 37462 - protein, 39 aa, Artificial Sequence
  Non-cyclic GFR-binding peptide
  MOD_RES (1), (35), (36): Xaa is C or S
  MOD_RES (13), (14), (15), (16), (17): Xaa is A or G
  MOD_RES (18), (19), (20), (21): Xaa is A or G or is absent
XRDVVMGQYNKLXXXXXXXXXLYLMSIASMKTPTXXPGA

SEQ ID NO: 37463 - protein, 31 aa, Artificial Sequence
  Non-cyclic GFR-binding peptide
  MOD_RES (1), (1): Xaa is C or S
XEEVIMQYNKLLLVRGNDLYLMSIASTKVPA

SEQ ID NO: 37464 - protein, 41 aa, Artificial Sequence
  Non-cyclic GFR-binding peptide
  MOD_RES (1), (3), (36), (37): Xaa is C or S
  MOD_RES (14), (15), (16), (17), (18): Xaa is A or G
  MOD_RES (19), (20), (21), (22): Xaa is A or G or is absent
XGXEEVIMQYNKLXXXXXXXXXLYLMSIASTKVPAXXTSPV

SEQ ID NO: 37465 - protein, 43 aa, Artificial Sequence
  Non-cyclic GFR-binding peptide
  MOD_RES (1), (3), (37), (38): Xaa is C or S
  MOD_RES (15), (16), (17), (18), (19): Xaa is A or G
  MOD_RES (20), (21), (22), (23): Xaa is A or G or is absent
XGXAEVVMDQYNKLXXXXXXXXXLYLISIASLRAPVXXSAPAA

SEQ ID NO: 37466 - protein, 39 aa, Artificial Sequence
  Non-cyclic GFR-binding peptide
  MOD_RES (34), (35): Xaa is C or S
  MOD_RES (12), (13), (14), (15), (16): Xaa is A or G
  MOD_RES (17), (18), (19), (20): Xaa is A or G or is absent
SEVTMNQYNKLXXXXXXXXXLYLISIASMKEPVXXPEPI

SEQ ID NO: 37467 - protein, 40 aa, Artificial Sequence
  Non-cyclic GFR-binding peptide
  MOD_RES (1), (3), (37), (38): Xaa is C or S
  MOD_RES (15), (16), (17), (18), (19): Xaa is A or G
  MOD_RES (20), (21), (22), (23): Xaa is A or G or is absent
XGXESVAMGQYNKLXXXXXXXXXLYLISIASLKTPVXXAK

SEQ ID NO: 37468 - protein, 37 aa, Artificial Sequence
  Non-cyclic GFR-binding peptide
  MOD_RES (33), (34): Xaa is C or S
  MOD_RES (11), (12), (13), (14), (15): Xaa is A or G
  MOD_RES (16), (17), (18), (19): Xaa is A or G or is absent
EVVMDQYNKLXXXXXXXXXLYLISIASLRAPVXXSAP

SEQ ID NO: 37469 - protein, 43 aa, Artificial Sequence
  Non-cyclic GFR-binding peptide
  MOD_RES (2), (4), (38), (39): Xaa is C or S
  MOD_RES (16), (17), (18), (19), (20): Xaa is A or G
  MOD_RES (21), (22), (23), (24): Xaa is A or G or is absent
RXGXAEVVMDQYNKLXXXXXXXXXLYLISIASLRAPVXXSAPA

SEQ ID NO: 37470 - protein, 39 aa, Artificial Sequence
  Non-cyclic GFR-binding peptide
  MOD_RES (2), (33), (34): Xaa is C or S
GXEEVIMQYNKLLLVRGNDLYLMSIASTKVPAXXTSPVR

SEQ ID NO: 37471 - protein, 38 aa, Artificial Sequence
  Non-cyclic GFR-binding peptide
  MOD_RES (1), (3), (37), (38): Xaa is C or S
  MOD_RES (15), (16), (17), (18), (19): Xaa is A or G
  MOD_RES (20), (21), (22), (23): Xaa is A or G or is absent
XGXRDVVMGQYNKLXXXXXXXXXLYLMSIASMKTPTXX

SEQ ID NO: 37472 - protein, 36 aa, Artificial Sequence
  Non-cyclic GFR-binding peptide
  MOD_RES (2), (4), (36): Xaa is C or S
RXGXESVAMGQYNKLYTVVGKDLYLISIASLKTPVX

SEQ ID NO: 37473 - protein, 36 aa, Artificial Sequence
  Non-cyclic GFR-binding peptide
  MOD_RES (2), (36): Xaa is C or S
  MOD_RES (14), (15), (16), (17), (18): Xaa is A or G
  MOD_RES (19), (20), (21), (22): Xaa is A or G or is absent
AXSEVTMNQYNKLXXXXXXXXXLYLISIASMKEPVX

SEQ ID NO: 37474 - protein, 34 aa, Artificial Sequence
  Non-cyclic GFR-binding peptide
  MOD_RES (31), (32): Xaa is C or S
EVTMNQYNKLVVNKNEDLYLISIASMKEPVXXPE

SEQ ID NO: 37475 - protein, 36 aa, Artificial Sequence
  Non-cyclic GFR-binding peptide
  MOD_RES (32), (33): Xaa is C or S
SEVTMNQYNKLVVNKNEDLYLISIASMKEPVXXPEP

SEQ ID NO: 37476 - protein, 40 aa, Artificial Sequence
  Non-cyclic GFR-binding peptide
  MOD_RES (2), (4), (35), (36): Xaa is C or S
LXGXEEVIMQYNKLLLVRGNDLYLMSIASTKVPAXXTSPV

SEQ ID NO: 37477 - protein, 41 aa, Artificial Sequence
  Non-cyclic GFR-binding peptide
  MOD_RES (2), (4), (36), (37): Xaa is C or S
RXGXAEVVMDQYNKLVVNNAADLYLISIASLRAPVXXSAPA

SEQ ID NO: 37478 - protein, 39 aa, Artificial Sequence
  Non-cyclic GFR-binding peptide
  MOD_RES (2), (34), (35): Xaa is C or S
GXAEVVMDQYNKLVVNNAADLYLISIASLRAPVXXSAPA

SEQ ID NO: 37479 - protein, 35 aa, Artificial Sequence
  Non-cyclic GFR-binding peptide
  MOD_RES (34), (35): Xaa is C or S
  MOD_RES (12), (13), (14), (15), (16): Xaa is A or G
  MOD_RES (17), (18), (19), (20): Xaa is A or G or is absent
ESVAMGQYNKLXXXXXXXXXLYLISIASLKTPVXX

SEQ ID NO: 37480 - protein, 33 aa, Artificial Sequence
  Non-cyclic GFR-binding peptide
  MOD_RES (31), (32): Xaa is C or S
DVVMGQYNKLIIQQKDNLYLMSIASMKTPTXXP

SEQ ID NO: 37481 - protein, 43 aa, Artificial Sequence
  Non-cyclic GFR-binding peptide
  MOD_RES (1), (3), (37), (38): Xaa is C or S
  MOD_RES (15), (16), (17), (18), (19): Xaa is A or G
  MOD_RES (20), (21), (22), (23): Xaa is A or G or is absent
XAXSEVTMNQYNKLXXXXXXXXXLYLISIASMKEPVXXPEPIG

SEQ ID NO: 37482 - protein, 35 aa, Artificial Sequence
  Non-cyclic GFR-binding peptide
  MOD_RES (2), (4): Xaa is C or S
RXGXAEVVMDQYNKLVVNNAADLYLISIASLRAPV

SEQ ID NO: 37483 - protein, 37 aa, Artificial Sequence
  Non-cyclic GFR-binding peptide
  MOD_RES (32), (33): Xaa is C or S
SEVTMNQYNKLVVNKNEDLYLISIASMKEPVXXPEPI

SEQ ID NO: 37484 - protein, 37 aa, Artificial Sequence
  Non-cyclic GFR-binding peptide
  MOD_RES (31), (32): Xaa is C or S
RVVMNQYNKLIVNSSDDLYLVSIASLKTPAXXPKPVH

SEQ ID NO: 37485 - protein, 40 aa, Artificial Sequence
  Non-cyclic GFR-binding peptide
  MOD_RES (2), (4), (38), (39): Xaa is C or S
  MOD_RES (16), (17), (18), (19), (20): Xaa is A or G
  MOD_RES (21), (22), (23), (24): Xaa is A or G or is absent
RXAXSEVTMNQYNKLXXXXXXXXXLYLISIASMKEPVXXP

SEQ ID NO: 37486 - protein, 42 aa, Artificial Sequence
  Non-cyclic GFR-binding peptide
  MOD_RES (2), (36), (37): Xaa is C or S
  MOD_RES (14), (15), (16), (17), (18): Xaa is A or G
  MOD_RES (19), (20), (21), (22): Xaa is A or G or is absent
GXESVAMGQYNKLXXXXXXXXXLYLISIASLKTPVXXAKSAK

SEQ ID NO: 37487 - protein, 42 aa, Artificial Sequence
  Non-cyclic GFR-binding peptide
  MOD_RES (1), (3), (37), (38): Xaa is C or S
  MOD_RES (15), (16), (17), (18), (19): Xaa is A or G
  MOD_RES (20), (21), (22), (23): Xaa is A or G or is absent
XGXESVAMGQYNKLXXXXXXXXXLYLISIASLKTPVXXAKSA

SEQ ID NO: 37488 - protein, 41 aa, Artificial Sequence
  Non-cyclic GFR-binding peptide
  MOD_RES (1), (35), (36): Xaa is C or S
  MOD_RES (13), (14), (15), (16), (17): Xaa is A or G
  MOD_RES (18), (19), (20), (21): Xaa is A or G or is absent
XAEVVMDQYNKLXXXXXXXXXLYLISIASLRAPVXXSAPAA

SEQ ID NO: 37489 - protein, 42 aa, Artificial Sequence
  Non-cyclic GFR-binding peptide
  MOD_RES (2), (4), (38), (39): Xaa is C or S
  MOD_RES (16), (17), (18), (19), (20): Xaa is A or G
  MOD_RES (21), (22), (23), (24): Xaa is A or G or is absent
RXGXESVAMGQYNKLXXXXXXXXXLYLISIASLKTPVXXAKS

SEQ ID NO: 37490 - protein, 34 aa, Artificial Sequence
  Non-cyclic GFR-binding peptide
  MOD_RES (33), (34): Xaa is C or S
  MOD_RES (11), (12), (13), (14), (15): Xaa is A or G
  MOD_RES (16), (17), (18), (19): Xaa is A or G or is absent
EEVIMQYNKLXXXXXXXXXLYLMSIASTKVPAXX

SEQ ID NO: 37491 - protein, 39 aa, Artificial Sequence
  Non-cyclic GFR-binding peptide
  MOD_RES (33), (34): Xaa is C or S
  MOD_RES (11), (12), (13), (14), (15): Xaa is A or G
  MOD_RES (16), (17), (18), (19): Xaa is A or G or is absent
EVVMDQYNKLXXXXXXXXXLYLISIASLRAPVXXSAPAA

SEQ ID NO: 37492 - protein, 39 aa, Artificial Sequence
  Non-cyclic GFR-binding peptide
  MOD_RES (2), (35), (36): Xaa is C or S
  MOD_RES (13), (14), (15), (16), (17): Xaa is A or G
  MOD_RES (18), (19), (20), (21): Xaa is A or G or is absent
GXEEVIMQYNKLXXXXXXXXXLYLMSIASTKVPAXXTSP

SEQ ID NO: 37493 - protein, 40 aa, Artificial Sequence
  Non-cyclic GFR-binding peptide
  MOD_RES (2), (4), (36), (37): Xaa is C or S
RXGXAEVVMDQYNKLVVNNAADLYLISIASLRAPVXXSAP

SEQ ID NO: 37494 - protein, 40 aa, Artificial Sequence
  Non-cyclic GFR-binding peptide
  MOD_RES (2), (34), (35): Xaa is C or S
GXESVAMGQYNKLYTVVGKDLYLISIASLKTPVXXAKSAK

SEQ ID NO: 37495 - protein, 36 aa, Artificial Sequence
  Non-cyclic GFR-binding peptide
  MOD_RES (2), (4), (36): Xaa is C or S
RXGXAEVVMDQYNKLVVNNAADLYLISIASLRAPVX

SEQ ID NO: 37496 - protein, 37 aa, Artificial Sequence
  Non-cyclic GFR-binding peptide
  MOD_RES (1), (3), (36), (37): Xaa is C or S
  MOD_RES (14), (15), (16), (17), (18): Xaa is A or G
  MOD_RES (19), (20), (21), (22): Xaa is A or G or is absent
XGXEEVIMQYNKLXXXXXXXXXLYLMSIASTKVPAXX

SEQ ID NO: 37497 - protein, 41 aa, Artificial Sequence
  Non-cyclic GFR-binding peptide
  MOD_RES (2), (4), (38), (39): Xaa is C or S
  MOD_RES (16), (17), (18), (19), (20): Xaa is A or G
  MOD_RES (21), (22), (23), (24): Xaa is A or G or is absent
RXAXSEVTMNQYNKLXXXXXXXXXLYLISIASMKEPVXXPE

SEQ ID NO: 37498 - protein, 34 aa, Artificial Sequence
  Non-cyclic GFR-binding peptide
  MOD_RES (31), (32): Xaa is C or S
EVVMDQYNKLVVNNAADLYLISIASLRAPVXXSA

SEQ ID NO: 37499 - protein, 37 aa, Artificial Sequence
  Non-cyclic GFR-binding peptide
  MOD_RES (2), (4): Xaa is C or S
  MOD_RES (16), (17), (18), (19), (20): Xaa is A or G
  MOD_RES (21), (22), (23), (24): Xaa is A or G or is absent
SXGXRDVVMGQYNKLXXXXXXXXXLYLMSIASMKTPT

SEQ ID NO: 37500 - protein, 40 aa, Artificial Sequence
  Non-cyclic GFR-binding peptide
  MOD_RES (2), (4), (38), (39): Xaa is C or S
  MOD_RES (16), (17), (18), (19), (20): Xaa is A or G
  MOD_RES (21), (22), (23), (24): Xaa is A or G or is absent
RXGXAEVVMDQYNKLXXXXXXXXXLYLISIASLRAPVXXS

SEQ ID NO: 37501 - protein, 35 aa, Artificial Sequence
  Non-cyclic GFR-binding peptide
  MOD_RES (2), (4): Xaa is C or S
RXAXSEVTMNQYNKLVVNKNEDLYLISIASMKEPV

SEQ ID NO: 37502 - protein, 38 aa, Artificial Sequence
  Non-cyclic GFR-binding peptide
  MOD_RES (2), (4), (36), (37): Xaa is C or S
SXGXRDVVMGQYNKLIIQQKDNLYLMSIASMKTPTXXP

SEQ ID NO: 37503 - protein, 38 aa, Artificial Sequence
  Non-cyclic GFR-binding peptide
  MOD_RES (1), (3), (36), (37): Xaa is C or S
  MOD_RES (14), (15), (16), (17), (18): Xaa is A or G
  MOD_RES (19), (20), (21), (22): Xaa is A or G or is absent
XGXEEVIMQYNKLXXXXXXXXXLYLMSIASTKVPAXXT

SEQ ID NO: 37504 - protein, 32 aa, Artificial Sequence
  Non-cyclic GFR-binding peptide
  MOD_RES (32), (32): Xaa is C or S
RDVVMGQYNKLIIQQKDNLYLMSIASMKTPTX

SEQ ID NO: 37505 - protein, 36 aa, Artificial Sequence
  Non-cyclic GFR-binding peptide
  MOD_RES (1), (34), (35): Xaa is C or S
  MOD_RES (12), (13), (14), (15), (16): Xaa is A or G
  MOD_RES (17), (18), (19), (20): Xaa is A or G or is absent
XEEVIMQYNKLXXXXXXXXXLYLMSIASTKVPAXXT

SEQ ID NO: 37506 - protein, 37 aa, Artificial Sequence
  Non-cyclic GFR-binding peptide
  MOD_RES (31), (32): Xaa is C or S
EVTMNQYNKLVVNKNEDLYLISIASMKEPVXXPEPIG

SEQ ID NO: 37507 - protein, 36 aa, Artificial Sequence
  Non-cyclic GFR-binding peptide
  MOD_RES (33), (34): Xaa is C or S
  MOD_RES (11), (12), (13), (14), (15): Xaa is A or G
  MOD_RES (16), (17), (18), (19): Xaa is A or G or is absent
EVTMNQYNKLXXXXXXXXXLYLISIASMKEPVXXPE

SEQ ID NO: 37508 - protein, 42 aa, Artificial Sequence
  Non-cyclic GFR-binding peptide
  MOD_RES (2), (4), (36), (37): Xaa is C or S
RXAXSEVTMNQYNKLVVNKNEDLYLISIASMKEPVXXPEPIG

SEQ ID NO: 37509 - protein, 37 aa, Artificial Sequence
  Non-cyclic GFR-binding peptide
  MOD_RES (31), (32): Xaa is C or S
EVVMDQYNKLVVNNAADLYLISIASLRAPVXXSAPAA

SEQ ID NO: 37510 - protein, 37 aa, Artificial Sequence
  Non-cyclic GFR-binding peptide
  MOD_RES (2), (4): Xaa is C or S
  MOD_RES (16), (17), (18), (19), (20): Xaa is A or G
  MOD_RES (21), (22), (23), (24): Xaa is A or G or is absent
RXGXESVAMGQYNKLXXXXXXXXXLYLISIASLKTPV

SEQ ID NO: 37511 - protein, 37 aa, Artificial Sequence
  Non-cyclic GFR-binding peptide
  MOD_RES (1), (3), (37): Xaa is C or S
  MOD_RES (15), (16), (17), (18), (19): Xaa is A or G
  MOD_RES (20), (21), (22), (23): Xaa is A or G or is absent
XGXESVAMGQYNKLXXXXXXXXXLYLISIASLKTPVX

SEQ ID NO: 37512 - protein, 37 aa, Artificial Sequence
  Non-cyclic GFR-binding peptide
  MOD_RES (34), (35): Xaa is C or S
  MOD_RES (12), (13), (14), (15), (16): Xaa is A or G
  MOD_RES (17), (18), (19), (20): Xaa is A or G or is absent
RDVVMGQYNKLXXXXXXXXXLYLMSIASMKTPTXXPG

SEQ ID NO: 37513 - protein, 33 aa, Artificial Sequence
  Non-cyclic GFR-binding peptide
  MOD_RES (1), (33): Xaa is C or S
XAEVVMDQYNKLVVNNAADLYLISIASLRAPVX

SEQ ID NO: 37514 - protein, 32 aa, Artificial Sequence
  Non-cyclic GFR-binding peptide
  MOD_RES (31), (32): Xaa is C or S
EVVMDQYNKLVVNNAADLYLISIASLRAPVXX

SEQ ID NO: 37515 - protein, 41 aa, Artificial Sequence
  Non-cyclic GFR-binding peptide
  MOD_RES (2), (4), (37), (38): Xaa is C or S
  MOD_RES (15), (16), (17), (18), (19): Xaa is A or G
  MOD_RES (20), (21), (22), (23): Xaa is A or G or is absent
LXGXEEVIMQYNKLXXXXXXXXXLYLMSIASTKVPAXXTSP

SEQ ID NO: 37516 - protein, 35 aa, Artificial Sequence
  Non-cyclic GFR-binding peptide
  MOD_RES (1), (3): Xaa is C or S
  MOD_RES (14), (15), (16), (17), (18): Xaa is A or G
  MOD_RES (19), (20), (21), (22): Xaa is A or G or is absent
XGXEEVIMQYNKLXXXXXXXXXLYLMSIASTKVPA

SEQ ID NO: 37517 - protein, 39 aa, Artificial Sequence
  Non-cyclic GFR-binding peptide
  MOD_RES (1), (3), (37), (38): Xaa is C or S
  MOD_RES (15), (16), (17), (18), (19): Xaa is A or G
  MOD_RES (20), (21), (22), (23): Xaa is A or G or is absent
XGXESVAMGQYNKLXXXXXXXXXLYLISIASLKTPVXXA

SEQ ID NO: 37518 - protein, 37 aa, Artificial Sequence
  Non-cyclic GFR-binding peptide
  MOD_RES (33), (34): Xaa is C or S
  MOD_RES (11), (12), (13), (14), (15): Xaa is A or G
  MOD_RES (16), (17), (18), (19): Xaa is A or G or is absent
EEVIMQYNKLXXXXXXXXXLYLMSIASTKVPAXXTSP

SEQ ID NO: 37519 - protein, 37 aa, Artificial Sequence
  Non-cyclic GFR-binding peptide
  MOD_RES (2), (4), (36), (37): Xaa is C or S
RXAXSEVTMNQYNKLVVNKNEDLYLISIASMKEPVXX

SEQ ID NO: 37520 - protein, 41 aa, Artificial Sequence
  Non-cyclic GFR-binding peptide
  MOD_RES (2), (36), (37): Xaa is C or S
  MOD_RES (14), (15), (16), (17), (18): Xaa is A or G
  MOD_RES (19), (20), (21), (22): Xaa is A or G or is absent
GXESVAMGQYNKLXXXXXXXXXLYLISIASLKTPVXXAKSA

SEQ ID NO: 37521 - protein, 41 aa, Artificial Sequence
  Non-cyclic GFR-binding peptide
  MOD_RES (1), (3), (37), (38): Xaa is C or S
  MOD_RES (15), (16), (17), (18), (19): Xaa is A or G
  MOD_RES (20), (21), (22), (23): Xaa is A or G or is absent
XGXRDVVMGQYNKLXXXXXXXXXLYLMSIASMKTPTXXPGA

SEQ ID NO: 37522 - protein, 38 aa, Artificial Sequence
  Non-cyclic GFR-binding peptide
  MOD_RES (32), (33): Xaa is C or S
AEVVMDQYNKLVVNNAADLYLISIASLRAPVXXSAPAA

SEQ ID NO: 37523 - protein, 31 aa, Artificial Sequence
  Non-cyclic GFR-binding peptide
  MOD_RES (31), (31): Xaa is C or S
EEVIMQYNKLLLVRGNDLYLMSIASTKVPAX

SEQ ID NO: 37524 - protein, 34 aa, Artificial Sequence
  Non-cyclic GFR-binding peptide
  MOD_RES (1), (33), (34): Xaa is C or S
XRDVVMGQYNKLIIQQKDNLYLMSIASMKTPTXX

SEQ ID NO: 37525 - protein, 33 aa, Artificial Sequence
  Non-cyclic GFR-binding peptide
  MOD_RES (12), (13), (14), (15), (16): Xaa is A or G
  MOD_RES (17), (18), (19), (20): Xaa is A or G or is absent
RDVVMGQYNKLXXXXXXXXXLYLMSIASMKTPT

SEQ ID NO: 37526 - protein, 40 aa, Artificial Sequence
  Non-cyclic GFR-binding peptide
  MOD_RES (1), (3), (37), (38): Xaa is C or S
  MOD_RES (15), (16), (17), (18), (19): Xaa is A or G
  MOD_RES (20), (21), (22), (23): Xaa is A or G or is absent
XGXAEVVMDQYNKLXXXXXXXXXLYLISIASLRAPVXXSA

SEQ ID NO: 37527 - protein, 36 aa, Artificial Sequence
  Non-cyclic GFR-binding peptide
  MOD_RES (1), (3): Xaa is C or S
  MOD_RES (15), (16), (17), (18), (19): Xaa is A or G
  MOD_RES (20), (21), (22), (23): Xaa is A or G or is absent
XAXSEVTMNQYNKLXXXXXXXXXLYLISIASMKEPV

SEQ ID NO: 37528 - protein, 31 aa, Artificial Sequence
  Non-cyclic GFR-binding peptide
ESVAMGQYNKLYTVVGKDLYLISIASLKTPV

SEQ ID NO: 37529 - protein, 41 aa, Artificial Sequence
  Non-cyclic GFR-binding peptide
  MOD_RES (1), (3), (37), (38): Xaa is C or S
  MOD_RES (15), (16), (17), (18), (19): Xaa is A or G
  MOD_RES (20), (21), (22), (23): Xaa is A or G or is absent
XGXESVAMGQYNKLXXXXXXXXXLYLISIASLKTPVXXAKS

SEQ ID NO: 37530 - protein, 41 aa, Artificial Sequence
  Non-cyclic GFR-binding peptide
  MOD_RES (2), (4), (36), (37): Xaa is C or S
SXGXRDVVMGQYNKLIIQQKDNLYLMSIASMKTPTXXPGAS

SEQ ID NO: 37531 - protein, 34 aa, Artificial Sequence
  Non-cyclic GFR-binding peptide
  MOD_RES (1), (3), (34): Xaa is C or S
XGXEEVIMQYNKLLLVRGNDLYLMSIASTKVPAX

SEQ ID NO: 37532 - protein, 40 aa, Artificial Sequence
  Non-cyclic GFR-binding peptide
  MOD_RES (2), (36), (37): Xaa is C or S
  MOD_RES (14), (15), (16), (17), (18): Xaa is A or G
  MOD_RES (19), (20), (21), (22): Xaa is A or G or is absent
AXSEVTMNQYNKLXXXXXXXXXLYLISIASMKEPVXXPEP

SEQ ID NO: 37533 - protein, 38 aa, Artificial Sequence
  Non-cyclic GFR-binding peptide
  MOD_RES (33), (34): Xaa is C or S
  MOD_RES (11), (12), (13), (14), (15): Xaa is A or G
  MOD_RES (16), (17), (18), (19): Xaa is A or G or is absent
SVAMGQYNKLXXXXXXXXXLYLISIASLKTPVXXAKSA

SEQ ID NO: 37534 - protein, 35 aa, Artificial Sequence
  Non-cyclic GFR-binding peptide
  MOD_RES (34), (35): Xaa is C or S
  MOD_RES (12), (13), (14), (15), (16): Xaa is A or G
  MOD_RES (17), (18), (19), (20): Xaa is A or G or is absent
AEVVMDQYNKLXXXXXXXXXLYLISIASLRAPVXX

SEQ ID NO: 37535 - protein, 38 aa, Artificial Sequence
  Non-cyclic GFR-binding peptide
  MOD_RES (1), (33), (34): Xaa is C or S
XRDVVMGQYNKLIIQQKDNLYLMSIASMKTPTXXPGAS

SEQ ID NO: 37536 - protein, 36 aa, Artificial Sequence
  Non-cyclic GFR-binding peptide
  MOD_RES (34), (35): Xaa is C or S
  MOD_RES (12), (13), (14), (15), (16): Xaa is A or G
  MOD_RES (17), (18), (19), (20): Xaa is A or G or is absent
SEVTMNQYNKLXXXXXXXXXLYLISIASMKEPVXXP

SEQ ID NO: 37537 - protein, 36 aa, Artificial Sequence
  Non-cyclic GFR-binding peptide
  MOD_RES (33), (34): Xaa is C or S
  MOD_RES (11), (12), (13), (14), (15): Xaa is A or G
  MOD_RES (16), (17), (18), (19): Xaa is A or G or is absent
EEVIMQYNKLXXXXXXXXXLYLMSIASTKVPAXXTS

SEQ ID NO: 37538 - protein, 39 aa, Artificial Sequence
  Non-cyclic GFR-binding peptide
  MOD_RES (33), (34): Xaa is C or S
  MOD_RES (11), (12), (13), (14), (15): Xaa is A or G
  MOD_RES (16), (17), (18), (19): Xaa is A or G or is absent
RVVMNQYNKLXXXXXXXXXLYLVSIASLKTPAXXPKPVH

SEQ ID NO: 37539 - protein, 38 aa, Artificial Sequence
  Non-cyclic GFR-binding peptide
  MOD_RES (1), (3), (35), (36): Xaa is C or S
XGXAEVVMDQYNKLVVNNAADLYLISIASLRAPVXXSA

SEQ ID NO: 37540 - protein, 36 aa, Artificial Sequence
  Non-cyclic GFR-binding peptide
  MOD_RES (1), (35), (36): Xaa is C or S
  MOD_RES (13), (14), (15), (16), (17): Xaa is A or G
  MOD_RES (18), (19), (20), (21): Xaa is A or G or is absent
XRDVVMGQYNKLXXXXXXXXXLYLMSIASMKTPTXX

SEQ ID NO: 37541 - protein, 32 aa, Artificial Sequence
  Non-cyclic GFR-binding peptide
  MOD_RES (2), (2): Xaa is C or S
GXEEVIMQYNKLLLVRGNDLYLMSIASTKVPA

SEQ ID NO: 37542 - protein, 38 aa, Artificial Sequence
  Non-cyclic GFR-binding peptide
  MOD_RES (1), (33), (34): Xaa is C or S
XSEVTMNQYNKLVVNKNEDLYLISIASMKEPVXXPEPI

SEQ ID NO: 37543 - protein, 38 aa, Artificial Sequence
  Non-cyclic GFR-binding peptide
  MOD_RES (2), (4), (36), (37): Xaa is C or S
RXGXAEVVMDQYNKLVVNNAADLYLISIASLRAPVXXS

SEQ ID NO: 37544 - protein, 43 aa, Artificial Sequence
  Non-cyclic GFR-binding peptide
  MOD_RES (1), (3), (37), (38): Xaa is C or S
  MOD_RES (15), (16), (17), (18), (19): Xaa is A or G
  MOD_RES (20), (21), (22), (23): Xaa is A or G or is absent
XGXRDVVMGQYNKLXXXXXXXXXLYLMSIASMKTPTXXPGASG

SEQ ID NO: 37545 - protein, 36 aa, Artificial Sequence
  Non-cyclic GFR-binding peptide
  MOD_RES (2), (4), (35), (36): Xaa is C or S
LXGXEEVIMQYNKLLLVRGNDLYLMSIASTKVPAXX

SEQ ID NO: 37546 - protein, 42 aa, Artificial Sequence
  Non-cyclic GFR-binding peptide
  MOD_RES (2), (4), (38), (39): Xaa is C or S
  MOD_RES (16), (17), (18), (19), (20): Xaa is A or G
  MOD_RES (21), (22), (23), (24): Xaa is A or G or is absent
RXGXAEVVMDQYNKLXXXXXXXXXLYLISIASLRAPVXXSAP

SEQ ID NO: 37547 - protein, 40 aa, Artificial Sequence
  Non-cyclic GFR-binding peptide
  MOD_RES (34), (35): Xaa is C or S
  MOD_RES (12), (13), (14), (15), (16): Xaa is A or G
  MOD_RES (17), (18), (19), (20): Xaa is A or G or is absent
RDVVMGQYNKLXXXXXXXXXLYLMSIASMKTPTXXPGASG

SEQ ID NO: 37548 - protein, 35 aa, Artificial Sequence
  Non-cyclic GFR-binding peptide
  MOD_RES (1), (33), (34): Xaa is C or S
XSEVTMNQYNKLVVNKNEDLYLISIASMKEPVXXP

SEQ ID NO: 37549 - protein, 33 aa, Artificial Sequence
  Non-cyclic GFR-binding peptide
  MOD_RES (33), (33): Xaa is C or S
  MOD_RES (11), (12), (13), (14), (15): Xaa is A or G
  MOD_RES (16), (17), (18), (19): Xaa is A or G or is absent
EEVIMQYNKLXXXXXXXXXLYLMSIASTKVPAX

SEQ ID NO: 37550 - protein, 34 aa, Artificial Sequence
  Non-cyclic GFR-binding peptide
  MOD_RES (32), (33): Xaa is C or S
SEVTMNQYNKLVVNKNEDLYLISIASMKEPVXXP

SEQ ID NO: 37551 - protein, 35 aa, Artificial Sequence
  Non-cyclic GFR-binding peptide
  MOD_RES (1), (34), (35): Xaa is C or S
  MOD_RES (12), (13), (14), (15), (16): Xaa is A or G
  MOD_RES (17), (18), (19), (20): Xaa is A or G or is absent
XEEVIMQYNKLXXXXXXXXXLYLMSIASTKVPAXX

SEQ ID NO: 37552 - protein, 34 aa, Artificial Sequence
  Non-cyclic GFR-binding peptide
  MOD_RES (32), (33): Xaa is C or S
RDVVMGQYNKLIIQQKDNLYLMSIASMKTPTXXP

SEQ ID NO: 37553 - protein, 32 aa, Artificial Sequence
  Non-cyclic GFR-binding peptide
  MOD_RES (11), (12), (13), (14), (15): Xaa is A or G
  MOD_RES (16), (17), (18), (19): Xaa is A or G or is absent
EVVMDQYNKLXXXXXXXXXLYLISIASLRAPV

SEQ ID NO: 37554 - protein, 37 aa, Artificial Sequence
  Non-cyclic GFR-binding peptide
  MOD_RES (1), (33), (34): Xaa is C or S
XAEVVMDQYNKLVVNNAADLYLISIASLRAPVXXSAP

SEQ ID NO: 37555 - protein, 34 aa, Artificial Sequence
  Non-cyclic GFR-binding peptide
  MOD_RES (1), (1): Xaa is C or S
  MOD_RES (13), (14), (15), (16), (17): Xaa is A or G
  MOD_RES (18), (19), (20), (21): Xaa is A or G or is absent
XAEVVMDQYNKLXXXXXXXXXLYLISIASLRAPV

SEQ ID NO: 37556 - protein, 39 aa, Artificial Sequence
  Non-cyclic GFR-binding peptide
  MOD_RES (1), (33), (34): Xaa is C or S
XSEVTMNQYNKLVVNKNEDLYLISIASMKEPVXXPEPIG

SEQ ID NO: 37557 - protein, 34 aa, Artificial Sequence
  Non-cyclic GFR-binding peptide
  MOD_RES (31), (32): Xaa is C or S
EEVIMQYNKLLLVRGNDLYLMSIASTKVPAXXTS

SEQ ID NO: 37558 - protein, 39 aa, Artificial Sequence
  Non-cyclic GFR-binding peptide
  MOD_RES (1), (3), (35), (36): Xaa is C or S
XGXRDVVMGQYNKLIIQQKDNLYLMSIASMKTPTXXPGA

SEQ ID NO: 37559 - protein, 37 aa, Artificial Sequence
  Non-cyclic GFR-binding peptide
  MOD_RES (31), (32): Xaa is C or S
EEVIMQYNKLLLVRGNDLYLMSIASTKVPAXXTSPVR

SEQ ID NO: 37560 - protein, 39 aa, Artificial Sequence
  Non-cyclic GFR-binding peptide
  MOD_RES (1), (35), (36): Xaa is C or S
  MOD_RES (13), (14), (15), (16), (17): Xaa is A or G
  MOD_RES (18), (19), (20), (21): Xaa is A or G or is absent
XESVAMGQYNKLXXXXXXXXXLYLISIASLKTPVXXAKS

SEQ ID NO: 37561 - protein, 39 aa, Artificial Sequence
  Non-cyclic GFR-binding peptide
  MOD_RES (2), (34), (35): Xaa is C or S
AXSEVTMNQYNKLVVNKNEDLYLISIASMKEPVXXPEPI

SEQ ID NO: 37562 - protein, 39 aa, Artificial Sequence
  Non-cyclic GFR-binding peptide
  MOD_RES (2), (4), (36), (37): Xaa is C or S
SXGXRDVVMGQYNKLIIQQKDNLYLMSIASMKTPTXXPG

SEQ ID NO: 37563 - protein, 44 aa, Artificial Sequence
  Non-cyclic GFR-binding peptide
  MOD_RES (2), (4), (38), (39): Xaa is C or S
  MOD_RES (16), (17), (18), (19), (20): Xaa is A or G
  MOD_RES (21), (22), (23), (24): Xaa is A or G or is absent
RXGXAEVVMDQYNKLXXXXXXXXXLYLISIASLRAPVXXSAPAA

SEQ ID NO: 37564 - protein, 34 aa, Artificial Sequence
  Non-cyclic GFR-binding peptide
  MOD_RES (34), (34): Xaa is C or S
  MOD_RES (12), (13), (14), (15), (16): Xaa is A or G
  MOD_RES (17), (18), (19), (20): Xaa is A or G or is absent
ESVAMGQYNKLXXXXXXXXXLYLISIASLKTPVX

SEQ ID NO: 37565 - protein, 36 aa, Artificial Sequence
  Non-cyclic GFR-binding peptide
  MOD_RES (1), (3): Xaa is C or S
  MOD_RES (15), (16), (17), (18), (19): Xaa is A or G
  MOD_RES (20), (21), (22), (23): Xaa is A or G or is absent
XGXAEVVMDQYNKLXXXXXXXXXLYLISIASLRAPV

SEQ ID NO: 37566 - protein, 38 aa, Artificial Sequence
  Non-cyclic GFR-binding peptide
  MOD_RES (2), (36), (37): Xaa is C or S
  MOD_RES (14), (15), (16), (17), (18): Xaa is A or G
  MOD_RES (19), (20), (21), (22): Xaa is A or G or is absent
AXSEVTMNQYNKLXXXXXXXXXLYLISIASMKEPVXXP

SEQ ID NO: 37567 - protein, 38 aa, Artificial Sequence
  Non-cyclic GFR-binding peptide
  MOD_RES (2), (4), (38): Xaa is C or S
  MOD_RES (16), (17), (18), (19), (20): Xaa is A or G
  MOD_RES (21), (22), (23), (24): Xaa is A or G or is absent
RXGXESVAMGQYNKLXXXXXXXXXLYLISIASLKTPVX

SEQ ID NO: 37568 - protein, 38 aa, Artificial Sequence
  Non-cyclic GFR-binding peptide
  MOD_RES (32), (33): Xaa is C or S
ESVAMGQYNKLYTVVGKDLYLISIASLKTPVXXAKSAK

SEQ ID NO: 37569 - protein, 41 aa, Artificial Sequence
  Non-cyclic GFR-binding peptide
  MOD_RES (1), (35), (36): Xaa is C or S
  MOD_RES (13), (14), (15), (16), (17): Xaa is A or G
  MOD_RES (18), (19), (20), (21): Xaa is A or G or is absent
XSRVVMNQYNKLXXXXXXXXXLYLVSIASLKTPAXXPKPVH

SEQ ID NO: 37570 - protein, 34 aa, Artificial Sequence
  Non-cyclic GFR-binding peptide
  MOD_RES (33), (34): Xaa is C or S
  MOD_RES (11), (12), (13), (14), (15): Xaa is A or G
  MOD_RES (16), (17), (18), (19): Xaa is A or G or is absent
EVTMNQYNKLXXXXXXXXXLYLISIASMKEPVXX

SEQ ID NO: 37571 - protein, 39 aa, Artificial Sequence
  Non-cyclic GFR-binding peptide
  MOD_RES (33), (34): Xaa is C or S
  MOD_RES (11), (12), (13), (14), (15): Xaa is A or G
  MOD_RES (16), (17), (18), (19): Xaa is A or G or is absent
DVVMGQYNKLXXXXXXXXXLYLMSIASMKTPTXXPGASG

SEQ ID NO: 37572 - protein, 35 aa, Artificial Sequence
  Non-cyclic GFR-binding peptide
  MOD_RES (1), (35): Xaa is C or S
  MOD_RES (13), (14), (15), (16), (17): Xaa is A or G
  MOD_RES (18), (19), (20), (21): Xaa is A or G or is absent
XRDVVMGQYNKLXXXXXXXXXLYLMSIASMKTPTX

SEQ ID NO: 37573 - protein, 37 aa, Artificial Sequence
  Non-cyclic GFR-binding peptide
  MOD_RES (1), (35), (36): Xaa is C or S
  MOD_RES (13), (14), (15), (16), (17): Xaa is A or G
  MOD_RES (18), (19), (20), (21): Xaa is A or G or is absent
XRDVVMGQYNKLXXXXXXXXXLYLMSIASMKTPTXXP

SEQ ID NO: 37574 - protein, 41 aa, Artificial Sequence
  Non-cyclic GFR-binding peptide
  MOD_RES (1), (35), (36): Xaa is C or S
  MOD_RES (13), (14), (15), (16), (17): Xaa is A or G
  MOD_RES (18), (19), (20), (21): Xaa is A or G or is absent
XSEVTMNQYNKLXXXXXXXXXLYLISIASMKEPVXXPEPIG

SEQ ID NO: 37575 - protein, 38 aa, Artificial Sequence
  Non-cyclic GFR-binding peptide
  MOD_RES (2), (4), (35), (36): Xaa is C or S
LXGXEEVIMQYNKLLLVRGNDLYLMSIASTKVPAXXTS

SEQ ID NO: 37576 - protein, 33 aa, Artificial Sequence
  Non-cyclic GFR-binding peptide
  MOD_RES (2), (2): Xaa is C or S
GXAEVVMDQYNKLVVNNAADLYLISIASLRAPV

SEQ ID NO: 37577 - protein, 37 aa, Artificial Sequence
  Non-cyclic GFR-binding peptide
  MOD_RES (1), (35), (36): Xaa is C or S
  MOD_RES (13), (14), (15), (16), (17): Xaa is A or G
  MOD_RES (18), (19), (20), (21): Xaa is A or G or is absent
XAEVVMDQYNKLXXXXXXXXXLYLISIASLRAPVXXS

SEQ ID NO: 37578 - protein, 40 aa, Artificial Sequence
  Non-cyclic GFR-binding peptide
  MOD_RES (34), (35): Xaa is C or S
  MOD_RES (12), (13), (14), (15), (16): Xaa is A or G
  MOD_RES (17), (18), (19), (20): Xaa is A or G or is absent
ESVAMGQYNKLXXXXXXXXXLYLISIASLKTPVXXAKSAK

SEQ ID NO: 37579 - protein, 33 aa, Artificial Sequence
  Non-cyclic GFR-binding peptide
  MOD_RES (31), (32): Xaa is C or S
SVAMGQYNKLYTVVGKDLYLISIASLKTPVXXA

SEQ ID NO: 37580 - protein, 38 aa, Artificial Sequence
  Non-cyclic GFR-binding peptide
  MOD_RES (2), (36), (37): Xaa is C or S
  MOD_RES (14), (15), (16), (17), (18): Xaa is A or G
  MOD_RES (19), (20), (21), (22): Xaa is A or G or is absent
GXAEVVMDQYNKLXXXXXXXXXLYLISIASLRAPVXXS

SEQ ID NO: 37581 - protein, 37 aa, Artificial Sequence
  Non-cyclic GFR-binding peptide
  MOD_RES (2), (4), (36), (37): Xaa is C or S
RXGXAEVVMDQYNKLVVNNAADLYLISIASLRAPVXX

SEQ ID NO: 37582 - protein, 44 aa, Artificial Sequence
  Non-cyclic GFR-binding peptide
  MOD_RES (2), (4), (38), (39): Xaa is C or S
  MOD_RES (16), (17), (18), (19), (20): Xaa is A or G
  MOD_RES (21), (22), (23), (24): Xaa is A or G or is absent
RXGXESVAMGQYNKLXXXXXXXXXLYLISIASLKTPVXXAKSAK

SEQ ID NO: 37583 - protein, 41 aa, Artificial Sequence
  Non-cyclic GFR-binding peptide
  MOD_RES (2), (4), (38), (39): Xaa is C or S
  MOD_RES (16), (17), (18), (19), (20): Xaa is A or G
  MOD_RES (21), (22), (23), (24): Xaa is A or G or is absent
RXGXAEVVMDQYNKLXXXXXXXXXLYLISIASLRAPVXXSA

SEQ ID NO: 37584 - protein, 41 aa, Artificial Sequence
  Non-cyclic GFR-binding peptide
  MOD_RES (1), (3), (35), (36): Xaa is C or S
XGXSRVVMNQYNKLIVNSSDDLYLVSIASLKTPAXXPKPVH

SEQ ID NO: 37585 - protein, 40 aa, Artificial Sequence
  Non-cyclic GFR-binding peptide
  MOD_RES (2), (35), (36): Xaa is C or S
  MOD_RES (13), (14), (15), (16), (17): Xaa is A or G
  MOD_RES (18), (19), (20), (21): Xaa is A or G or is absent
GXEEVIMQYNKLXXXXXXXXXLYLMSIASTKVPAXXTSPV

SEQ ID NO: 37586 - protein, 35 aa, Artificial Sequence
  Non-cyclic GFR-binding peptide
  MOD_RES (2), (34), (35): Xaa is C or S
AXSEVTMNQYNKLVVNKNEDLYLISIASMKEPVXX

SEQ ID NO: 37587 - protein, 41 aa, Artificial Sequence
  Non-cyclic GFR-binding peptide
  MOD_RES (1), (3), (35), (36): Xaa is C or S
XGXRDVVMGQYNKLIIQQKDNLYLMSIASMKTPTXXPGASG

SEQ ID NO: 37588 - protein, 33 aa, Artificial Sequence
  Non-cyclic GFR-binding peptide
  MOD_RES (2), (2): Xaa is C or S
GXESVAMGQYNKLYTVVGKDLYLISIASLKTPV

SEQ ID NO: 37589 - protein, 41 aa, Artificial Sequence
  Non-cyclic GFR-binding peptide
  MOD_RES (2), (35), (36): Xaa is C or S
  MOD_RES (13), (14), (15), (16), (17): Xaa is A or G
  MOD_RES (18), (19), (20), (21): Xaa is A or G or is absent
GXEEVIMQYNKLXXXXXXXXXLYLMSIASTKVPAXXTSPVR

SEQ ID NO: 37590 - protein, 31 aa, Artificial Sequence
  Non-cyclic GFR-binding peptide
  MOD_RES (31), (31): Xaa is C or S
EVVMDQYNKLVVNNAADLYLISIASLRAPVX

SEQ ID NO: 37591 - protein, 30 aa, Artificial Sequence
  Non-cyclic GFR-binding peptide
EVVMDQYNKLVVNNAADLYLISIASLRAPV

SEQ ID NO: 37592 - protein, 39 aa, Artificial Sequence
  Non-cyclic GFR-binding peptide
  MOD_RES (2), (4), (37), (38): Xaa is C or S
  MOD_RES (15), (16), (17), (18), (19): Xaa is A or G
  MOD_RES (20), (21), (22), (23): Xaa is A or G or is absent
LXGXEEVIMQYNKLXXXXXXXXXLYLMSIASTKVPAXXT

SEQ ID NO: 37593 - protein, 39 aa, Artificial Sequence
  Non-cyclic GFR-binding peptide
  MOD_RES (2), (4), (36), (37): Xaa is C or S
RXGXAEVVMDQYNKLVVNNAADLYLISIASLRAPVXXSA

SEQ ID NO: 37594 - protein, 38 aa, Artificial Sequence
  Non-cyclic GFR-binding peptide
  MOD_RES (2), (36), (37): Xaa is C or S
  MOD_RES (14), (15), (16), (17), (18): Xaa is A or G
  MOD_RES (19), (20), (21), (22): Xaa is A or G or is absent
GXESVAMGQYNKLXXXXXXXXXLYLISIASLKTPVXXA

SEQ ID NO: 37595 - protein, 35 aa, Artificial Sequence
  Non-cyclic GFR-binding peptide
  MOD_RES (34), (35): Xaa is C or S
  MOD_RES (12), (13), (14), (15), (16): Xaa is A or G
  MOD_RES (17), (18), (19), (20): Xaa is A or G or is absent
RDVVMGQYNKLXXXXXXXXXLYLMSIASMKTPTXX

SEQ ID NO: 37596 - protein, 38 aa, Artificial Sequence
  Non-cyclic GFR-binding peptide
  MOD_RES (34), (35): Xaa is C or S
  MOD_RES (12), (13), (14), (15), (16): Xaa is A or G
  MOD_RES (17), (18), (19), (20): Xaa is A or G or is absent
ESVAMGQYNKLXXXXXXXXXLYLISIASLKTPVXXAKS

SEQ ID NO: 37597 - protein, 40 aa, Artificial Sequence
  Non-cyclic GFR-binding peptide
  MOD_RES (1), (35), (36): Xaa is C or S
  MOD_RES (13), (14), (15), (16), (17): Xaa is A or G
  MOD_RES (18), (19), (20), (21): Xaa is A or G or is absent
XSEVTMNQYNKLXXXXXXXXXLYLISIASMKEPVXXPEPI

SEQ ID NO: 37598 - protein, 39 aa, Artificial Sequence
  Non-cyclic GFR-binding peptide
  MOD_RES (1), (35), (36): Xaa is C or S
  MOD_RES (13), (14), (15), (16), (17): Xaa is A or G
  MOD_RES (18), (19), (20), (21): Xaa is A or G or is absent
XAEVVMDQYNKLXXXXXXXXXLYLISIASLRAPVXXSAP

SEQ ID NO: 37599 - protein, 36 aa, Artificial Sequence
  Non-cyclic GFR-binding peptide
  MOD_RES (33), (34): Xaa is C or S
  MOD_RES (11), (12), (13), (14), (15): Xaa is A or G
  MOD_RES (16), (17), (18), (19): Xaa is A or G or is absent
EVVMDQYNKLXXXXXXXXXLYLISIASLRAPVXXSA

SEQ ID NO: 37600 - protein, 31 aa, Artificial Sequence
  Non-cyclic GFR-binding peptide
SEVTMNQYNKLVVNKNEDLYLISIASMKEPV

SEQ ID NO: 37601 - protein, 36 aa, Artificial Sequence
  Non-cyclic GFR-binding peptide
  MOD_RES (31), (32): Xaa is C or S
DVVMGQYNKLIIQQKDNLYLMSIASMKTPTXXPGAS

SEQ ID NO: 37602 - protein, 39 aa, Artificial Sequence
  Non-cyclic GFR-binding peptide
  MOD_RES (1), (34), (35): Xaa is C or S
  MOD_RES (12), (13), (14), (15), (16): Xaa is A or G
  MOD_RES (17), (18), (19), (20): Xaa is A or G or is absent
XEEVIMQYNKLXXXXXXXXXLYLMSIASTKVPAXXTSPV

SEQ ID NO: 37603 - protein, 35 aa, Artificial Sequence
  Non-cyclic GFR-binding peptide
  MOD_RES (1), (35): Xaa is C or S
  MOD_RES (13), (14), (15), (16), (17): Xaa is A or G
  MOD_RES (18), (19), (20), (21): Xaa is A or G or is absent
XESVAMGQYNKLXXXXXXXXXLYLISIASLKTPVX

SEQ ID NO: 37604 - protein, 41 aa, Artificial Sequence
  Non-cyclic GFR-binding peptide
  MOD_RES (1), (35), (36): Xaa is C or S
  MOD_RES (13), (14), (15), (16), (17): Xaa is A or G
  MOD_RES (18), (19), (20), (21): Xaa is A or G or is absent
XESVAMGQYNKLXXXXXXXXXLYLISIASLKTPVXXAKSAK

SEQ ID NO: 37605 - protein, 43 aa, Artificial Sequence
  Non-cyclic GFR-binding peptide
  MOD_RES (2), (4), (38), (39): Xaa is C or S
  MOD_RES (16), (17), (18), (19), (20): Xaa is A or G
  MOD_RES (21), (22), (23), (24): Xaa is A or G or is absent
SXGXRDVVMGQYNKLXXXXXXXXXLYLMSIASMKTPTXXPGAS

SEQ ID NO: 37606 - protein, 39 aa, Artificial Sequence
  Non-cyclic GFR-binding peptide
  MOD_RES (1), (33), (34): Xaa is C or S
XAEVVMDQYNKLVVNNAADLYLISIASLRAPVXXSAPAA

SEQ ID NO: 37607 - protein, 37 aa, Artificial Sequence
  Non-cyclic GFR-binding peptide
  MOD_RES (2), (35), (36): Xaa is C or S
  MOD_RES (13), (14), (15), (16), (17): Xaa is A or G
  MOD_RES (18), (19), (20), (21): Xaa is A or G or is absent
GXEEVIMQYNKLXXXXXXXXXLYLMSIASTKVPAXXT

SEQ ID NO: 37608 - protein, 39 aa, Artificial Sequence
  Non-cyclic GFR-binding peptide
  MOD_RES (2), (36), (37): Xaa is C or S
  MOD_RES (14), (15), (16), (17), (18): Xaa is A or G
  MOD_RES (19), (20), (21), (22): Xaa is A or G or is absent
GXAEVVMDQYNKLXXXXXXXXXLYLISIASLRAPVXXSA

SEQ ID NO: 37609 - protein, 32 aa, Artificial Sequence
  Non-cyclic GFR-binding peptide
  MOD_RES (1), (1): Xaa is C or S
XESVAMGQYNKLYTVVGKDLYLISIASLKTPV

SEQ ID NO: 37610 - protein, 42 aa, Artificial Sequence
  Non-cyclic GFR-binding peptide
  MOD_RES (2), (4), (38), (39): Xaa is C or S
  MOD_RES (16), (17), (18), (19), (20): Xaa is A or G
  MOD_RES (21), (22), (23), (24): Xaa is A or G or is absent
SXGXRDVVMGQYNKLXXXXXXXXXLYLMSIASMKTPTXXPGA

SEQ ID NO: 37611 - protein, 34 aa, Artificial Sequence
  Non-cyclic GFR-binding peptide
  MOD_RES (2), (2): Xaa is C or S
  MOD_RES (13), (14), (15), (16), (17): Xaa is A or G
  MOD_RES (18), (19), (20), (21): Xaa is A or G or is absent
GXEEVIMQYNKLXXXXXXXXXLYLMSIASTKVPA

SEQ ID NO: 37612 - protein, 34 aa, Artificial Sequence
  Non-cyclic GFR-binding peptide
  MOD_RES (31), (32): Xaa is C or S
DVVMGQYNKLIIQQKDNLYLMSIASMKTPTXXPG

SEQ ID NO: 37613 - protein, 38 aa, Artificial Sequence
  Non-cyclic GFR-binding peptide
  MOD_RES (33), (34): Xaa is C or S
  MOD_RES (11), (12), (13), (14), (15): Xaa is A or G
  MOD_RES (16), (17), (18), (19): Xaa is A or G or is absent
DVVMGQYNKLXXXXXXXXXLYLMSIASMKTPTXXPGAS

SEQ ID NO: 37614 - protein, 39 aa, Artificial Sequence
  Non-cyclic GFR-binding peptide
  MOD_RES (33), (34): Xaa is C or S
  MOD_RES (11), (12), (13), (14), (15): Xaa is A or G
  MOD_RES (16), (17), (18), (19): Xaa is A or G or is absent
EEVIMQYNKLXXXXXXXXXLYLMSIASTKVPAXXTSPVR

SEQ ID NO: 37615 - protein, 40 aa, Artificial Sequence
  Non-cyclic GFR-binding peptide
  MOD_RES (2), (34), (35): Xaa is C or S
GXSRVVMNQYNKLIVNSSDDLYLVSIASLKTPAXXPKPVH

SEQ ID NO: 37616 - protein, 35 aa, Artificial Sequence
  Non-cyclic GFR-binding peptide
  MOD_RES (2), (34), (35): Xaa is C or S
GXRDVVMGQYNKLIIQQKDNLYLMSIASMKTPTXX

SEQ ID NO: 37617 - protein, 37 aa, Artificial Sequence
  Non-cyclic GFR-binding peptide
  MOD_RES (1), (33), (34): Xaa is C or S
XRDVVMGQYNKLIIQQKDNLYLMSIASMKTPTXXPGA

SEQ ID NO: 37618 - protein, 39 aa, Artificial Sequence
  Non-cyclic GFR-binding peptide
  MOD_RES (2), (4), (36), (37): Xaa is C or S
RXGXESVAMGQYNKLYTVVGKDLYLISIASLKTPVXXAK

SEQ ID NO: 37619 - protein, 36 aa, Artificial Sequence
  Non-cyclic GFR-binding peptide
  MOD_RES (31), (32): Xaa is C or S
EVVMDQYNKLVVNNAADLYLISIASLRAPVXXSAPA

SEQ ID NO: 37620 - protein, 33 aa, Artificial Sequence
  Non-cyclic GFR-binding peptide
  MOD_RES (1), (33): Xaa is C or S
XSEVTMNQYNKLVVNKNEDLYLISIASMKEPVX

SEQ ID NO: 37621 - protein, 37 aa, Artificial Sequence
  Non-cyclic GFR-binding peptide
  MOD_RES (32), (33): Xaa is C or S
AEVVMDQYNKLVVNNAADLYLISIASLRAPVXXSAPA

SEQ ID NO: 37622 - protein, 40 aa, Artificial Sequence
  Non-cyclic GFR-binding peptide
  MOD_RES (2), (4), (37), (38): Xaa is C or S
  MOD_RES (15), (16), (17), (18), (19): Xaa is A or G
  MOD_RES (20), (21), (22), (23): Xaa is A or G or is absent
LXGXEEVIMQYNKLXXXXXXXXXLYLMSIASTKVPAXXTS

SEQ ID NO: 37623 - protein, 38 aa, Artificial Sequence
  Non-cyclic GFR-binding peptide
  MOD_RES (2), (34), (35): Xaa is C or S
GXAEVVMDQYNKLVVNNAADLYLISIASLRAPVXXSAP

SEQ ID NO: 37624 - protein, 38 aa, Artificial Sequence
  Non-cyclic GFR-binding peptide
  MOD_RES (2), (34), (35): Xaa is C or S
GXRDVVMGQYNKLIIQQKDNLYLMSIASMKTPTXXPGA

SEQ ID NO: 37625 - protein, 37 aa, Artificial Sequence
  Non-cyclic GFR-binding peptide
  MOD_RES (2), (34), (35): Xaa is C or S
GXRDVVMGQYNKLIIQQKDNLYLMSIASMKTPTXXPG

SEQ ID NO: 37626 - protein, 33 aa, Artificial Sequence
  Non-cyclic GFR-binding peptide
  MOD_RES (33), (33): Xaa is C or S
  MOD_RES (11), (12), (13), (14), (15): Xaa is A or G
  MOD_RES (16), (17), (18), (19): Xaa is A or G or is absent
EVVMDQYNKLXXXXXXXXXLYLISIASLRAPVX

SEQ ID NO: 37627 - protein, 37 aa, Artificial Sequence
  Non-cyclic GFR-binding peptide
  MOD_RES (1), (3), (35), (36): Xaa is C or S
XGXRDVVMGQYNKLIIQQKDNLYLMSIASMKTPTXXP

SEQ ID NO: 37628 - protein, 38 aa, Artificial Sequence
  Non-cyclic GFR-binding peptide
  MOD_RES (33), (34): Xaa is C or S
  MOD_RES (11), (12), (13), (14), (15): Xaa is A or G
  MOD_RES (16), (17), (18), (19): Xaa is A or G or is absent
EVTMNQYNKLXXXXXXXXXLYLISIASMKEPVXXPEPI

SEQ ID NO: 37629 - protein, 37 aa, Artificial Sequence
  Non-cyclic GFR-binding peptide
  MOD_RES (1), (33), (34): Xaa is C or S
XSEVTMNQYNKLVVNKNEDLYLISIASMKEPVXXPEP

SEQ ID NO: 37630 - protein, 41 aa, Artificial Sequence
  Non-cyclic GFR-binding peptide
  MOD_RES (1), (3), (35), (36): Xaa is C or S
XAXSEVTMNQYNKLVVNKNEDLYLISIASMKEPVXXPEPIG

SEQ ID NO: 37631 - protein, 39 aa, Artificial Sequence
  Non-cyclic GFR-binding peptide
  MOD_RES (34), (35): Xaa is C or S
  MOD_RES (12), (13), (14), (15), (16): Xaa is A or G
  MOD_RES (17), (18), (19), (20): Xaa is A or G or is absent
ESVAMGQYNKLXXXXXXXXXLYLISIASLKTPVXXAKSA

SEQ ID NO: 37632 - protein, 33 aa, Artificial Sequence
  Non-cyclic GFR-binding peptide
  MOD_RES (31), (32): Xaa is C or S
EVVMDQYNKLVVNNAADLYLISIASLRAPVXXS

SEQ ID NO: 37633 - protein, 36 aa, Artificial Sequence
  Non-cyclic GFR-binding peptide
  MOD_RES (1), (33), (34): Xaa is C or S
XESVAMGQYNKLYTVVGKDLYLISIASLKTPVXXAK

SEQ ID NO: 37634 - protein, 32 aa, Artificial Sequence
  Non-cyclic GFR-binding peptide
  MOD_RES (31), (32): Xaa is C or S
SVAMGQYNKLYTVVGKDLYLISIASLKTPVXX

SEQ ID NO: 37635 - protein, 36 aa, Artificial Sequence
  Non-cyclic GFR-binding peptide
  MOD_RES (1), (35), (36): Xaa is C or S
  MOD_RES (13), (14), (15), (16), (17): Xaa is A or G
  MOD_RES (18), (19), (20), (21): Xaa is A or G or is absent
XESVAMGQYNKLXXXXXXXXXLYLISIASLKTPVXX

SEQ ID NO: 37636 - protein, 44 aa, Artificial Sequence
  Non-cyclic GFR-binding peptide
  MOD_RES (2), (4), (38), (39): Xaa is C or S
  MOD_RES (16), (17), (18), (19), (20): Xaa is A or G
  MOD_RES (21), (22), (23), (24): Xaa is A or G or is absent
RXAXSEVTMNQYNKLXXXXXXXXXLYLISIASMKEPVXXPEPIG

SEQ ID NO: 37637 - protein, 42 aa, Artificial Sequence
  Non-cyclic GFR-binding peptide
  MOD_RES (1), (3), (36), (37): Xaa is C or S
  MOD_RES (14), (15), (16), (17), (18): Xaa is A or G
  MOD_RES (19), (20), (21), (22): Xaa is A or G or is absent
XGXEEVIMQYNKLXXXXXXXXXLYLMSIASTKVPAXXTSPVR

SEQ ID NO: 37638 - protein, 31 aa, Artificial Sequence
  Non-cyclic GFR-binding peptide
AEVVMDQYNKLVVNNAADLYLISIASLRAPV

SEQ ID NO: 37639 - protein, 35 aa, Artificial Sequence
  Non-cyclic GFR-binding peptide
  MOD_RES (31), (32): Xaa is C or S
EVVMDQYNKLVVNNAADLYLISIASLRAPVXXSAP

SEQ ID NO: 37640 - protein, 39 aa, Artificial Sequence
  Non-cyclic GFR-binding peptide
  MOD_RES (2), (4), (38), (39): Xaa is C or S
  MOD_RES (16), (17), (18), (19), (20): Xaa is A or G
  MOD_RES (21), (22), (23), (24): Xaa is A or G or is absent
RXGXESVAMGQYNKLXXXXXXXXXLYLISIASLKTPVXX

SEQ ID NO: 37641 - protein, 35 aa, Artificial Sequence
  Non-cyclic GFR-binding peptide
  MOD_RES (31), (32): Xaa is C or S
DVVMGQYNKLIIQQKDNLYLMSIASMKTPTXXPGA

SEQ ID NO: 37642 - protein, 36 aa, Artificial Sequence
  Non-cyclic GFR-binding peptide
  MOD_RES (2), (4), (36): Xaa is C or S
SXGXRDVVMGQYNKLIIQQKDNLYLMSIASMKTPTX

SEQ ID NO: 37643 - protein, 31 aa, Artificial Sequence
  Non-cyclic GFR-binding peptide
  MOD_RES (31), (31): Xaa is C or S
EVTMNQYNKLVVNKNEDLYLISIASMKEPVX

SEQ ID NO: 37644 - protein, 42 aa, Artificial Sequence
  Non-cyclic GFR-binding peptide
  MOD_RES (2), (36), (37): Xaa is C or S
  MOD_RES (14), (15), (16), (17), (18): Xaa is A or G
  MOD_RES (19), (20), (21), (22): Xaa is A or G or is absent
GXRDVVMGQYNKLXXXXXXXXXLYLMSIASMKTPTXXPGASG

SEQ ID NO: 37645 - protein, 34 aa, Artificial Sequence
  Non-cyclic GFR-binding peptide
  MOD_RES (34), (34): Xaa is C or S
  MOD_RES (12), (13), (14), (15), (16): Xaa is A or G
  MOD_RES (17), (18), (19), (20): Xaa is A or G or is absent
SEVTMNQYNKLXXXXXXXXXLYLISIASMKEPVX

SEQ ID NO: 37646 - protein, 34 aa, Artificial Sequence
  Non-cyclic GFR-binding peptide
  MOD_RES (31), (32): Xaa is C or S
SVAMGQYNKLYTVVGKDLYLISIASLKTPVXXAK

SEQ ID NO: 37647 - protein, 41 aa, Artificial Sequence
  Non-cyclic GFR-binding peptide
  MOD_RES (2), (4), (36), (37): Xaa is C or S
RXAXSEVTMNQYNKLVVNKNEDLYLISIASMKEPVXXPEPI

SEQ ID NO: 37648 - protein, 33 aa, Artificial Sequence
  Non-cyclic GFR-binding peptide
  MOD_RES (1), (33): Xaa is C or S
XRDVVMGQYNKLIIQQKDNLYLMSIASMKTPTX

SEQ ID NO: 37649 - protein, 35 aa, Artificial Sequence
  Non-cyclic GFR-binding peptide
  MOD_RES (1), (3), (35): Xaa is C or S
XGXAEVVMDQYNKLVVNNAADLYLISIASLRAPVX

SEQ ID NO: 37650 - protein, 40 aa, Artificial Sequence
  Non-cyclic GFR-binding peptide
  MOD_RES (2), (36), (37): Xaa is C or S
  MOD_RES (14), (15), (16), (17), (18): Xaa is A or G
  MOD_RES (19), (20), (21), (22): Xaa is A or G or is absent
GXAEVVMDQYNKLXXXXXXXXXLYLISIASLRAPVXXSAP

SEQ ID NO: 37651 - protein, 33 aa, Artificial Sequence
  Non-cyclic GFR-binding peptide
  MOD_RES (33), (33): Xaa is C or S
  MOD_RES (11), (12), (13), (14), (15): Xaa is A or G
  MOD_RES (16), (17), (18), (19): Xaa is A or G or is absent
SVAMGQYNKLXXXXXXXXXLYLISIASLKTPVX

SEQ ID NO: 37652 - protein, 34 aa, Artificial Sequence
  Non-cyclic GFR-binding peptide
  MOD_RES (1), (33), (34): Xaa is C or S
XAEVVMDQYNKLVVNNAADLYLISIASLRAPVXX

SEQ ID NO: 37653 - protein, 40 aa, Artificial Sequence
  Non-cyclic GFR-binding peptide
  MOD_RES (1), (35), (36): Xaa is C or S
  MOD_RES (13), (14), (15), (16), (17): Xaa is A or G
  MOD_RES (18), (19), (20), (21): Xaa is A or G or is absent
XAEVVMDQYNKLXXXXXXXXXLYLISIASLRAPVXXSAPA

SEQ ID NO: 37654 - protein, 37 aa, Artificial Sequence
  Non-cyclic GFR-binding peptide
  MOD_RES (2), (36), (37): Xaa is C or S
  MOD_RES (14), (15), (16), (17), (18): Xaa is A or G
  MOD_RES (19), (20), (21), (22): Xaa is A or G or is absent
AXSEVTMNQYNKLXXXXXXXXXLYLISIASMKEPVXX

SEQ ID NO: 37655 - protein, 42 aa, Artificial Sequence
  Non-cyclic GFR-binding peptide
  MOD_RES (2), (4), (38), (39): Xaa is C or S
  MOD_RES (16), (17), (18), (19), (20): Xaa is A or G
  MOD_RES (21), (22), (23), (24): Xaa is A or G or is absent
RXAXSEVTMNQYNKLXXXXXXXXXLYLISIASMKEPVXXPEP

SEQ ID NO: 37656 - protein, 32 aa, Artificial Sequence
  Non-cyclic GFR-binding peptide
  MOD_RES (31), (32): Xaa is C or S
EVTMNQYNKLVVNKNEDLYLISIASMKEPVXX

SEQ ID NO: 37657 - protein, 37 aa, Artificial Sequence
  Non-cyclic GFR-binding peptide
  MOD_RES (31), (32): Xaa is C or S
SVAMGQYNKLYTVVGKDLYLISIASLKTPVXXAKSAK

SEQ ID NO: 37658 - protein, 33 aa, Artificial Sequence
  Non-cyclic GFR-binding peptide
  MOD_RES (1), (32), (33): Xaa is C or S
XEEVIMQYNKLLLVRGNDLYLMSIASTKVPAXX

SEQ ID NO: 37659 - protein, 33 aa, Artificial Sequence
  Non-cyclic GFR-binding peptide
  MOD_RES (31), (32): Xaa is C or S
EVTMNQYNKLVVNKNEDLYLISIASMKEPVXXP

SEQ ID NO: 37660 - protein, 33 aa, Artificial Sequence
  Non-cyclic GFR-binding peptide
  MOD_RES (32), (33): Xaa is C or S
AEVVMDQYNKLVVNNAADLYLISIASLRAPVXX

SEQ ID NO: 37661 - protein, 41 aa, Artificial Sequence
  Non-cyclic GFR-binding peptide
  MOD_RES (2), (4), (38), (39): Xaa is C or S
  MOD_RES (16), (17), (18), (19), (20): Xaa is A or G
  MOD_RES (21), (22), (23), (24): Xaa is A or G or is absent
SXGXRDVVMGQYNKLXXXXXXXXXLYLMSIASMKTPTXXPG

SEQ ID NO: 37662 - protein, 32 aa, Artificial Sequence
  Non-cyclic GFR-binding peptide
  MOD_RES (1), (1): Xaa is C or S
XSEVTMNQYNKLVVNKNEDLYLISIASMKEPV

SEQ ID NO: 37663 - protein, 40 aa, Artificial Sequence
  Non-cyclic GFR-binding peptide
  MOD_RES (34), (35): Xaa is C or S
  MOD_RES (12), (13), (14), (15), (16): Xaa is A or G
  MOD_RES (17), (18), (19), (20): Xaa is A or G or is absent
SEVTMNQYNKLXXXXXXXXXLYLISIASMKEPVXXPEPIG

SEQ ID NO: 37664 - protein, 40 aa, Artificial Sequence
  Non-cyclic GFR-binding peptide
  MOD_RES (1), (3), (34), (35): Xaa is C or S
XGXEEVIMQYNKLLLVRGNDLYLMSIASTKVPAXXTSPVR

SEQ ID NO: 37665 - protein, 38 aa, Artificial Sequence
  Non-cyclic GFR-binding peptide
  MOD_RES (33), (34): Xaa is C or S
  MOD_RES (11), (12), (13), (14), (15): Xaa is A or G
  MOD_RES (16), (17), (18), (19): Xaa is A or G or is absent
EVVMDQYNKLXXXXXXXXXLYLISIASLRAPVXXSAPA

SEQ ID NO: 37666 - protein, 35 aa, Artificial Sequence
  Non-cyclic GFR-binding peptide
  MOD_RES (34), (35): Xaa is C or S
  MOD_RES (12), (13), (14), (15), (16): Xaa is A or G
  MOD_RES (17), (18), (19), (20): Xaa is A or G or is absent
SEVTMNQYNKLXXXXXXXXXLYLISIASMKEPVXX

SEQ ID NO: 37667 - protein, 33 aa, Artificial Sequence
  Non-cyclic GFR-binding peptide
  MOD_RES (2), (2): Xaa is C or S
GXRDVVMGQYNKLIIQQKDNLYLMSIASMKTPT

SEQ ID NO: 37668 - protein, 43 aa, Artificial Sequence
  Non-cyclic GFR-binding peptide
  MOD_RES (2), (4), (38), (39): Xaa is C or S
  MOD_RES (16), (17), (18), (19), (20): Xaa is A or G
  MOD_RES (21), (22), (23), (24): Xaa is A or G or is absent
RXGXESVAMGQYNKLXXXXXXXXXLYLISIASLKTPVXXAKSA

SEQ ID NO: 37669 - protein, 37 aa, Artificial Sequence
  Non-cyclic GFR-binding peptide
  MOD_RES (2), (4), (37): Xaa is C or S
  MOD_RES (15), (16), (17), (18), (19): Xaa is A or G
  MOD_RES (20), (21), (22), (23): Xaa is A or G or is absent
LXGXEEVIMQYNKLXXXXXXXXXLYLMSIASTKVPAX

SEQ ID NO: 37670 - protein, 39 aa, Artificial Sequence
  Non-cyclic GFR-binding peptide
  MOD_RES (1), (35), (36): Xaa is C or S
  MOD_RES (13), (14), (15), (16), (17): Xaa is A or G
  MOD_RES (18), (19), (20), (21): Xaa is A or G or is absent
XSEVTMNQYNKLXXXXXXXXXLYLISIASMKEPVXXPEP

SEQ ID NO: 37671 - protein, 42 aa, Artificial Sequence
  Non-cyclic GFR-binding peptide
  MOD_RES (2), (4), (36), (37): Xaa is C or S
HXGXSRVVMNQYNKLIVNSSDDLYLVSIASLKTPAXXPKPVH

SEQ ID NO: 37672 - protein, 36 aa, Artificial Sequence
  Non-cyclic GFR-binding peptide
  MOD_RES (2), (34), (35): Xaa is C or S
GXESVAMGQYNKLYTVVGKDLYLISIASLKTPVXXA

SEQ ID NO: 37673 - protein, 33 aa, Artificial Sequence
  Non-cyclic GFR-binding peptide
  MOD_RES (12), (13), (14), (15), (16): Xaa is A or G
  MOD_RES (17), (18), (19), (20): Xaa is A or G or is absent
AEVVMDQYNKLXXXXXXXXXLYLISIASLRAPV

SEQ ID NO: 37674 - protein, 38 aa, Artificial Sequence
  Non-cyclic GFR-binding peptide
  MOD_RES (34), (35): Xaa is C or S
  MOD_RES (12), (13), (14), (15), (16): Xaa is A or G
  MOD_RES (17), (18), (19), (20): Xaa is A or G or is absent
RDVVMGQYNKLXXXXXXXXXLYLMSIASMKTPTXXPGA

SEQ ID NO: 37675 - protein, 40 aa, Artificial Sequence
  Non-cyclic GFR-binding peptide
  MOD_RES (2), (34), (35): Xaa is C or S
GXAEVVMDQYNKLVVNNAADLYLISIASLRAPVXXSAPAA

SEQ ID NO: 37676 - protein, 37 aa, Artificial Sequence
  Non-cyclic GFR-binding peptide
  MOD_RES (1), (3), (34), (35): Xaa is C or S
XGXEEVIMQYNKLLLVRGNDLYLMSIASTKVPAXXTS

SEQ ID NO: 37677 - protein, 31 aa, Artificial Sequence
  Non-cyclic GFR-binding peptide
  MOD_RES (31), (31): Xaa is C or S
SVAMGQYNKLYTVVGKDLYLISIASLKTPVX

SEQ ID NO: 37678 - protein, 35 aa, Artificial Sequence
  Non-cyclic GFR-binding peptide
  MOD_RES (1), (32), (33): Xaa is C or S
XEEVIMQYNKLLLVRGNDLYLMSIASTKVPAXXTS

SEQ ID NO: 37679 - protein, 40 aa, Artificial Sequence
  Non-cyclic GFR-binding peptide
  MOD_RES (1), (3), (36), (37): Xaa is C or S
  MOD_RES (14), (15), (16), (17), (18): Xaa is A or G
  MOD_RES (19), (20), (21), (22): Xaa is A or G or is absent
XGXEEVIMQYNKLXXXXXXXXXLYLMSIASTKVPAXXTSP

SEQ ID NO: 37680 - protein, 36 aa, Artificial Sequence
  Non-cyclic GFR-binding peptide
  MOD_RES (2), (36): Xaa is C or S
  MOD_RES (14), (15), (16), (17), (18): Xaa is A or G
  MOD_RES (19), (20), (21), (22): Xaa is A or G or is absent
GXAEVVMDQYNKLXXXXXXXXXLYLISIASLRAPVX

SEQ ID NO: 37681 - protein, 38 aa, Artificial Sequence
  Non-cyclic GFR-binding peptide
  MOD_RES (2), (34), (35): Xaa is C or S
GXESVAMGQYNKLYTVVGKDLYLISIASLKTPVXXAKS

SEQ ID NO: 37682 - protein, 35 aa, Artificial Sequence
  Non-cyclic GFR-binding peptide
  MOD_RES (2), (33), (34): Xaa is C or S
GXEEVIMQYNKLLLVRGNDLYLMSIASTKVPAXXT

SEQ ID NO: 37683 - protein, 35 aa, Artificial Sequence
  Non-cyclic GFR-binding peptide
  MOD_RES (2), (4), (35): Xaa is C or S
LXGXEEVIMQYNKLLLVRGNDLYLMSIASTKVPAX

SEQ ID NO: 37684 - protein, 39 aa, Artificial Sequence
  Non-cyclic GFR-binding peptide
  MOD_RES (1), (3), (34), (35): Xaa is C or S
XGXEEVIMQYNKLLLVRGNDLYLMSIASTKVPAXXTSPV

SEQ ID NO: 37685 - protein, 35 aa, Artificial Sequence
  Non-cyclic GFR-binding peptide
  MOD_RES (31), (32): Xaa is C or S
SVAMGQYNKLYTVVGKDLYLISIASLKTPVXXAKS

SEQ ID NO: 37686 - protein, 34 aa, Artificial Sequence
  Non-cyclic GFR-binding peptide
  MOD_RES (1), (1): Xaa is C or S
  MOD_RES (13), (14), (15), (16), (17): Xaa is A or G
  MOD_RES (18), (19), (20), (21): Xaa is A or G or is absent
XESVAMGQYNKLXXXXXXXXXLYLISIASLKTPV

SEQ ID NO: 37687 - protein, 36 aa, Artificial Sequence
  Non-cyclic GFR-binding peptide
  MOD_RES (1), (3): Xaa is C or S
  MOD_RES (15), (16), (17), (18), (19): Xaa is A or G
  MOD_RES (20), (21), (22), (23): Xaa is A or G or is absent
XGXRDVVMGQYNKLXXXXXXXXXLYLMSIASMKTPT

SEQ ID NO: 37688 - protein, 41 aa, Artificial Sequence
  Non-cyclic GFR-binding peptide
  MOD_RES (1), (3), (35), (36): Xaa is C or S
XGXESVAMGQYNKLYTVVGKDLYLISIASLKTPVXXAKSAK

SEQ ID NO: 37689 - protein, 40 aa, Artificial Sequence
  Non-cyclic GFR-binding peptide
  MOD_RES (2), (36), (37): Xaa is C or S
  MOD_RES (14), (15), (16), (17), (18): Xaa is A or G
  MOD_RES (19), (20), (21), (22): Xaa is A or G or is absent
GXRDVVMGQYNKLXXXXXXXXXLYLMSIASMKTPTXXPGA

SEQ ID NO: 37690 - protein, 36 aa, Artificial Sequence
  Non-cyclic GFR-binding peptide
  MOD_RES (31), (32): Xaa is C or S
EVTMNQYNKLVVNKNEDLYLISIASMKEPVXXPEPI

SEQ ID NO: 37691 - protein, 39 aa, Artificial Sequence
  Non-cyclic GFR-binding peptide
  MOD_RES (1), (33), (34): Xaa is C or S
XESVAMGQYNKLYTVVGKDLYLISIASLKTPVXXAKSAK

SEQ ID NO: 37692 - protein, 33 aa, Artificial Sequence
  Non-cyclic GFR-binding peptide
  MOD_RES (1), (33): Xaa is C or S
XESVAMGQYNKLYTVVGKDLYLISIASLKTPVX

SEQ ID NO: 37693 - protein, 36 aa, Artificial Sequence
  Non-cyclic GFR-binding peptide
  MOD_RES (1), (3), (35), (36): Xaa is C or S
XGXESVAMGQYNKLYTVVGKDLYLISIASLKTPVXX

SEQ ID NO: 37694 - protein, 37 aa, Artificial Sequence
  Non-cyclic GFR-binding peptide
  MOD_RES (2), (36), (37): Xaa is C or S
  MOD_RES (14), (15), (16), (17), (18): Xaa is A or G
  MOD_RES (19), (20), (21), (22): Xaa is A or G or is absent
GXESVAMGQYNKLXXXXXXXXXLYLISIASLKTPVXX

SEQ ID NO: 37695 - protein, 35 aa, Artificial Sequence
  Non-cyclic GFR-binding peptide
  MOD_RES (33), (34): Xaa is C or S
  MOD_RES (11), (12), (13), (14), (15): Xaa is A or G
  MOD_RES (16), (17), (18), (19): Xaa is A or G or is absent
EVTMNQYNKLXXXXXXXXXLYLISIASMKEPVXXP

SEQ ID NO: 37696 - protein, 35 aa, Artificial Sequence
  Non-cyclic GFR-binding peptide
  MOD_RES (2), (35): Xaa is C or S
  MOD_RES (13), (14), (15), (16), (17): Xaa is A or G
  MOD_RES (18), (19), (20), (21): Xaa is A or G or is absent
GXEEVIMQYNKLXXXXXXXXXLYLMSIASTKVPAX

SEQ ID NO: 37697 - protein, 40 aa, Artificial Sequence
  Non-cyclic GFR-binding peptide
  MOD_RES (2), (4), (36), (37): Xaa is C or S
RXGXESVAMGQYNKLYTVVGKDLYLISIASLKTPVXXAKS

SEQ ID NO: 37698 - protein, 38 aa, Artificial Sequence
  Non-cyclic GFR-binding peptide
  MOD_RES (32), (33): Xaa is C or S
SEVTMNQYNKLVVNKNEDLYLISIASMKEPVXXPEPIG

SEQ ID NO: 37699 - protein, 34 aa, Artificial Sequence
  Non-cyclic GFR-binding peptide
  MOD_RES (1), (3): Xaa is C or S
XAXSEVTMNQYNKLVVNKNEDLYLISIASMKEPV

SEQ ID NO: 37700 - protein, 37 aa, Artificial Sequence
  Non-cyclic GFR-binding peptide
  MOD_RES (1), (3), (35), (36): Xaa is C or S
XGXESVAMGQYNKLYTVVGKDLYLISIASLKTPVXXA

SEQ ID NO: 37701 - protein, 35 aa, Artificial Sequence
  Non-cyclic GFR-binding peptide
  MOD_RES (2), (34), (35): Xaa is C or S
GXESVAMGQYNKLYTVVGKDLYLISIASLKTPVXX

SEQ ID NO: 37702 - protein, 35 aa, Artificial Sequence
  Non-cyclic GFR-binding peptide
  MOD_RES (1), (3), (35): Xaa is C or S
XGXRDVVMGQYNKLIIQQKDNLYLMSIASMKTPTX

SEQ ID NO: 37703 - protein, 38 aa, Artificial Sequence
  Non-cyclic GFR-binding peptide
  MOD_RES (2), (4), (38): Xaa is C or S
  MOD_RES (16), (17), (18), (19), (20): Xaa is A or G
  MOD_RES (21), (22), (23), (24): Xaa is A or G or is absent
SXGXRDVVMGQYNKLXXXXXXXXXLYLMSIASMKTPTX

SEQ ID NO: 37704 - protein, 38 aa, Artificial Sequence
  Non-cyclic GFR-binding peptide
  MOD_RES (32), (33): Xaa is C or S
RDVVMGQYNKLIIQQKDNLYLMSIASMKTPTXXPGASG

SEQ ID NO: 37705 - protein, 35 aa, Artificial Sequence
  Non-cyclic GFR-binding peptide
  MOD_RES (2), (34), (35): Xaa is C or S
GXAEVVMDQYNKLVVNNAADLYLISIASLRAPVXX

SEQ ID NO: 37706 - protein, 35 aa, Artificial Sequence
  Non-cyclic GFR-binding peptide
  MOD_RES (2), (4): Xaa is C or S
RXGXESVAMGQYNKLYTVVGKDLYLISIASLKTPV

SEQ ID NO: 37707 - protein, 37 aa, Artificial Sequence
  Non-cyclic GFR-binding peptide
  MOD_RES (6), (7): Xaa is C or S
GSAGPXXTPTKMSAISMLYLNDKQQIILKNYQGMVVD

SEQ ID NO: 37708 - protein, 39 aa, Artificial Sequence
  Non-cyclic GFR-binding peptide
  MOD_RES (2), (3), (37), (39): Xaa is C or S
  MOD_RES (17), (18), (19), (20), (21): Xaa is A or G
  MOD_RES (22), (23), (24), (25): Xaa is A or G or is absent
PXXTPTKMSAISMLYLXXXXXXXXXLKNYQGMVVDRXGX

SEQ ID NO: 37709 - protein, 37 aa, Artificial Sequence
  Non-cyclic GFR-binding peptide
  MOD_RES (4), (5): Xaa is C or S
  MOD_RES (19), (20), (21), (22), (23): Xaa is A or G
  MOD_RES (24), (25), (26), (27): Xaa is A or G or is absent
SKAXXVPTKLSAISILYLXXXXXXXXXLKNYQGMAVS

SEQ ID NO: 37710 - protein, 36 aa, Artificial Sequence
  Non-cyclic GFR-binding peptide
  MOD_RES (1), (2), (36): Xaa is C or S
  MOD_RES (16), (17), (18), (19), (20): Xaa is A or G
  MOD_RES (21), (22), (23), (24): Xaa is A or G or is absent
XXVPEKMSAISILYLXXXXXXXXXLKNYQNMTVESX

SEQ ID NO: 37711 - protein, 33 aa, Artificial Sequence
  Non-cyclic GFR-binding peptide
  MOD_RES (33), (33): Xaa is C or S
  MOD_RES (14), (15), (16), (17), (18): Xaa is A or G
  MOD_RES (19), (20), (21), (22): Xaa is A or G or is absent
APVKTSAISMLYLXXXXXXXXXLKNYQMIVEEX

SEQ ID NO: 37712 - protein, 38 aa, Artificial Sequence
  Non-cyclic GFR-binding peptide
  MOD_RES (2), (3), (35), (37): Xaa is C or S
PXXVPEKMSAISILYLDENKNVVLKNYQNMTVESXAXR

SEQ ID NO: 37713 - protein, 39 aa, Artificial Sequence
  Non-cyclic GFR-binding peptide
  MOD_RES (6), (7): Xaa is C or S
  MOD_RES (21), (22), (23), (24), (25): Xaa is A or G
  MOD_RES (26), (27), (28), (29): Xaa is A or G or is absent
KASKAXXVPTKLSAISILYLXXXXXXXXXLKNYQGMAVS

SEQ ID NO: 37714 - protein, 40 aa, Artificial Sequence
  Non-cyclic GFR-binding peptide
  MOD_RES (2), (3), (37), (39): Xaa is C or S
  MOD_RES (17), (18), (19), (20), (21): Xaa is A or G
  MOD_RES (22), (23), (24), (25): Xaa is A or G or is absent
AXXVPTKLSAISILYLXXXXXXXXXLKNYQGMAVSEXGXR

SEQ ID NO: 37715 - protein, 40 aa, Artificial Sequence
  Non-cyclic GFR-binding peptide
  MOD_RES (5), (6), (40): Xaa is C or S
  MOD_RES (20), (21), (22), (23), (24): Xaa is A or G
  MOD_RES (25), (26), (27), (28): Xaa is A or G or is absent
ASKAXXVPTKLSAISILYLXXXXXXXXXLKNYQGMAVSEX

SEQ ID NO: 37716 - protein, 37 aa, Artificial Sequence
  Non-cyclic GFR-binding peptide
  MOD_RES (1), (35), (37): Xaa is C or S
  MOD_RES (15), (16), (17), (18), (19): Xaa is A or G
  MOD_RES (20), (21), (22), (23): Xaa is A or G or is absent
XTPTKMSAISMLYLXXXXXXXXXLKNYQGMVVDRXGX

SEQ ID NO: 37717 - protein, 41 aa, Artificial Sequence
  Non-cyclic GFR-binding peptide
  MOD_RES (4), (5), (39), (41): Xaa is C or S
  MOD_RES (19), (20), (21), (22), (23): Xaa is A or G
  MOD_RES (24), (25), (26), (27): Xaa is A or G or is absent
PASXXVPARLSAISILYLXXXXXXXXXLKNYQDMVVEAXGX

SEQ ID NO: 37718 - protein, 36 aa, Artificial Sequence
  Non-cyclic GFR-binding peptide
  MOD_RES (2), (3), (35): Xaa is C or S
PXXVPEKMSAISILYLDENKNVVLKNYQNMTVESXA

SEQ ID NO: 37719 - protein, 33 aa, Artificial Sequence
  Non-cyclic GFR-binding peptide
  MOD_RES (1), (2): Xaa is C or S
XXTPTKMSAISMLYLNDKQQIILKNYQGMVVDR

SEQ ID NO: 37720 - protein, 34 aa, Artificial Sequence
  Non-cyclic GFR-binding peptide
  MOD_RES (1), (34): Xaa is C or S
  MOD_RES (15), (16), (17), (18), (19): Xaa is A or G
  MOD_RES (20), (21), (22), (23): Xaa is A or G or is absent
XAPVKTSAISMLYLXXXXXXXXXLKNYQMIVEEX

SEQ ID NO: 37721 - protein, 36 aa, Artificial Sequence
  Non-cyclic GFR-binding peptide
  MOD_RES (3), (4), (36): Xaa is C or S
EPXXVPEKMSAISILYLDENKNVVLKNYQNMTVESX

SEQ ID NO: 37722 - protein, 35 aa, Artificial Sequence
  Non-cyclic GFR-binding peptide
  MOD_RES (3), (4): Xaa is C or S
EPXXVPEKMSAISILYLDENKNVVLKNYQNMTVES

SEQ ID NO: 37723 - protein, 41 aa, Artificial Sequence
  Non-cyclic GFR-binding peptide
  MOD_RES (5), (6), (40): Xaa is C or S
  MOD_RES (20), (21), (22), (23), (24): Xaa is A or G
  MOD_RES (25), (26), (27), (28): Xaa is A or G or is absent
APASXXVPARLSAISILYLXXXXXXXXXLKNYQDMVVEAXG

SEQ ID NO: 37724 - protein, 34 aa, Artificial Sequence
  Non-cyclic GFR-binding peptide
  MOD_RES (2), (3), (34): Xaa is C or S
TXXAPVKTSAISMLYLDNGRVLLLKNYQMIVEEX

SEQ ID NO: 37725 - protein, 34 aa, Artificial Sequence
  Non-cyclic GFR-binding peptide
  MOD_RES (2), (3): Xaa is C or S
SXXVPARLSAISILYLDAANNVVLKNYQDMVVEA

SEQ ID NO: 37726 - protein, 38 aa, Artificial Sequence
  Non-cyclic GFR-binding peptide
  MOD_RES (5), (6): Xaa is C or S
  MOD_RES (20), (21), (22), (23), (24): Xaa is A or G
  MOD_RES (25), (26), (27), (28): Xaa is A or G or is absent
VPSTXXAPVKTSAISMLYLXXXXXXXXXLKNYQMIVEE

SEQ ID NO: 37727 - protein, 38 aa, Artificial Sequence
  Non-cyclic GFR-binding peptide
  MOD_RES (1), (35), (37): Xaa is C or S
  MOD_RES (15), (16), (17), (18), (19): Xaa is A or G
  MOD_RES (20), (21), (22), (23): Xaa is A or G or is absent
XVPEKMSAISILYLXXXXXXXXXLKNYQNMTVESXAXR

SEQ ID NO: 37728 - protein, 35 aa, Artificial Sequence
  Non-cyclic GFR-binding peptide
  MOD_RES (34), (34): Xaa is C or S
  MOD_RES (14), (15), (16), (17), (18): Xaa is A or G
  MOD_RES (19), (20), (21), (22): Xaa is A or G or is absent
VPARLSAISILYLXXXXXXXXXLKNYQDMVVEAXG

SEQ ID NO: 37729 - protein, 38 aa, Artificial Sequence
  Non-cyclic GFR-binding peptide
  MOD_RES (5), (6), (38): Xaa is C or S
APASXXVPARLSAISILYLDAANNVVLKNYQDMVVEAX

SEQ ID NO: 37730 - protein, 42 aa, Artificial Sequence
  Non-cyclic GFR-binding peptide
  MOD_RES (6), (7), (41): Xaa is C or S
  MOD_RES (21), (22), (23), (24), (25): Xaa is A or G
  MOD_RES (26), (27), (28), (29): Xaa is A or G or is absent
AAPASXXVPARLSAISILYLXXXXXXXXXLKNYQDMVVEAXG

SEQ ID NO: 37731 - protein, 34 aa, Artificial Sequence
  Non-cyclic GFR-binding peptide
  MOD_RES (1), (2), (34): Xaa is C or S
XXVPTKLSAISILYLDKGVVTYLKNYQGMAVSEX

SEQ ID NO: 37732 - protein, 40 aa, Artificial Sequence
  Non-cyclic GFR-binding peptide
  MOD_RES (6), (7): Xaa is C or S
  MOD_RES (21), (22), (23), (24), (25): Xaa is A or G
  MOD_RES (26), (27), (28), (29): Xaa is A or G or is absent
AAPASXXVPARLSAISILYLXXXXXXXXXLKNYQDMVVEA

SEQ ID NO: 37733 - protein, 36 aa, Artificial Sequence
  Non-cyclic GFR-binding peptide
  MOD_RES (1), (2), (35): Xaa is C or S
  MOD_RES (16), (17), (18), (19), (20): Xaa is A or G
  MOD_RES (21), (22), (23), (24): Xaa is A or G or is absent
XXAPVKTSAISMLYLXXXXXXXXXLKNYQMIVEEXG

SEQ ID NO: 37734 - protein, 35 aa, Artificial Sequence
  Non-cyclic GFR-binding peptide
  MOD_RES (2), (3), (35): Xaa is C or S
PXXTPTKMSAISMLYLNDKQQIILKNYQGMVVDRX

SEQ ID NO: 37735 - protein, 39 aa, Artificial Sequence
  Non-cyclic GFR-binding peptide
  MOD_RES (5), (6), (38): Xaa is C or S
ASKAXXVPTKLSAISILYLDKGVVTYLKNYQGMAVSEXG

SEQ ID NO: 37736 - protein, 37 aa, Artificial Sequence
  Non-cyclic GFR-binding peptide
  MOD_RES (3), (4), (37): Xaa is C or S
  MOD_RES (18), (19), (20), (21), (22): Xaa is A or G
  MOD_RES (23), (24), (25), (26): Xaa is A or G or is absent
STXXAPVKTSAISMLYLXXXXXXXXXLKNYQMIVEEX

SEQ ID NO: 37737 - protein, 37 aa, Artificial Sequence
  Non-cyclic GFR-binding peptide
  MOD_RES (1), (2), (36): Xaa is C or S
  MOD_RES (16), (17), (18), (19), (20): Xaa is A or G
  MOD_RES (21), (22), (23), (24): Xaa is A or G or is absent
XXTPTKMSAISMLYLXXXXXXXXXLKNYQGMVVDRXG

SEQ ID NO: 37738 - protein, 33 aa, Artificial Sequence
  Non-cyclic GFR-binding peptide
  MOD_RES (1), (32): Xaa is C or S
XAPVKTSAISMLYLDNGRVLLLKNYQMIVEEXG

SEQ ID NO: 37739 - protein, 35 aa, Artificial Sequence
  Non-cyclic GFR-binding peptide
  MOD_RES (3), (4): Xaa is C or S
GPXXTPTKMSAISMLYLNDKQQIILKNYQGMVVDR

SEQ ID NO: 37740 - protein, 38 aa, Artificial Sequence
  Non-cyclic GFR-binding peptide
  MOD_RES (1), (2), (36), (38): Xaa is C or S
  MOD_RES (16), (17), (18), (19), (20): Xaa is A or G
  MOD_RES (21), (22), (23), (24): Xaa is A or G or is absent
XXVPTKLSAISILYLXXXXXXXXXLKNYQGMAVSEXGX

SEQ ID NO: 37741 - protein, 37 aa, Artificial Sequence
  Non-cyclic GFR-binding peptide
  MOD_RES (1), (2), (36): Xaa is C or S
  MOD_RES (16), (17), (18), (19), (20): Xaa is A or G
  MOD_RES (21), (22), (23), (24): Xaa is A or G or is absent
XXVPARLSAISILYLXXXXXXXXXLKNYQDMVVEAXG

SEQ ID NO: 37742 - protein, 36 aa, Artificial Sequence
  Non-cyclic GFR-binding peptide
  MOD_RES (3), (4): Xaa is C or S
  MOD_RES (18), (19), (20), (21), (22): Xaa is A or G
  MOD_RES (23), (24), (25), (26): Xaa is A or G or is absent
KAXXVPTKLSAISILYLXXXXXXXXXLKNYQGMAVS

SEQ ID NO: 37743 - protein, 39 aa, Artificial Sequence
  Non-cyclic GFR-binding peptide
  MOD_RES (5), (6), (38): Xaa is C or S
SAGPXXTPTKMSAISMLYLNDKQQIILKNYQGMVVDRXG

SEQ ID NO: 37744 - protein, 43 aa, Artificial Sequence
  Non-cyclic GFR-binding peptide
  MOD_RES (6), (7), (41), (43): Xaa is C or S
  MOD_RES (21), (22), (23), (24), (25): Xaa is A or G
  MOD_RES (26), (27), (28), (29): Xaa is A or G or is absent
HVPKPXXAPTKLSAISVLYLXXXXXXXXXLKNYQNMVVRSXGX

SEQ ID NO: 37745 - protein, 32 aa, Artificial Sequence
  Non-cyclic GFR-binding peptide
  MOD_RES (14), (15), (16), (17), (18): Xaa is A or G
  MOD_RES (19), (20), (21), (22): Xaa is A or G or is absent
TPTKMSAISMLYLXXXXXXXXXLKNYQGMVVD

SEQ ID NO: 37746 - protein, 34 aa, Artificial Sequence
  Non-cyclic GFR-binding peptide
  MOD_RES (1), (2), (34): Xaa is C or S
XXVPEKMSAISILYLDENKNVVLKNYQNMTVESX

SEQ ID NO: 37747 - protein, 40 aa, Artificial Sequence
  Non-cyclic GFR-binding peptide
  MOD_RES (6), (7), (39): Xaa is C or S
GSAGPXXTPTKMSAISMLYLNDKQQIILKNYQGMVVDRXG

SEQ ID NO: 37748 - protein, 41 aa, Artificial Sequence
  Non-cyclic GFR-binding peptide
  MOD_RES (3), (4), (38), (40): Xaa is C or S
  MOD_RES (18), (19), (20), (21), (22): Xaa is A or G
  MOD_RES (23), (24), (25), (26): Xaa is A or G or is absent
KAXXVPTKLSAISILYLXXXXXXXXXLKNYQGMAVSEXGXR

SEQ ID NO: 37749 - protein, 35 aa, Artificial Sequence
  Non-cyclic GFR-binding peptide
  MOD_RES (1), (33), (35): Xaa is C or S
XVPEKMSAISILYLDENKNVVLKNYQNMTVESXAX

SEQ ID NO: 37750 - protein, 40 aa, Artificial Sequence
  Non-cyclic GFR-binding peptide
  MOD_RES (6), (7): Xaa is C or S
  MOD_RES (21), (22), (23), (24), (25): Xaa is A or G
  MOD_RES (26), (27), (28), (29): Xaa is A or G or is absent
HVPKPXXAPTKLSAISVLYLXXXXXXXXXLKNYQNMVVRS

SEQ ID NO: 37751 - protein, 34 aa, Artificial Sequence
  Non-cyclic GFR-binding peptide
  MOD_RES (2), (3): Xaa is C or S
AXXVPTKLSAISILYLDKGVVTYLKNYQGMAVSE

SEQ ID NO: 37752 - protein, 40 aa, Artificial Sequence
  Non-cyclic GFR-binding peptide
  MOD_RES (2), (3), (37), (39): Xaa is C or S
  MOD_RES (17), (18), (19), (20), (21): Xaa is A or G
  MOD_RES (22), (23), (24), (25): Xaa is A or G or is absent
PXXTPTKMSAISMLYLXXXXXXXXXLKNYQGMVVDRXGXS

SEQ ID NO: 37753 - protein, 36 aa, Artificial Sequence
  Non-cyclic GFR-binding peptide
  MOD_RES (4), (5): Xaa is C or S
PASXXVPARLSAISILYLDAANNVVLKNYQDMVVEA

SEQ ID NO: 37754 - protein, 32 aa, Artificial Sequence
  Non-cyclic GFR-binding peptide
  MOD_RES (14), (15), (16), (17), (18): Xaa is A or G
  MOD_RES (19), (20), (21), (22): Xaa is A or G or is absent
VPTKLSAISILYLXXXXXXXXXLKNYQGMAVS

SEQ ID NO: 37755 - protein, 39 aa, Artificial Sequence
  Non-cyclic GFR-binding peptide
  MOD_RES (3), (4), (38): Xaa is C or S
  MOD_RES (18), (19), (20), (21), (22): Xaa is A or G
  MOD_RES (23), (24), (25), (26): Xaa is A or G or is absent
KAXXVPTKLSAISILYLXXXXXXXXXLKNYQGMAVSEXG

SEQ ID NO: 37756 - protein, 38 aa, Artificial Sequence
  Non-cyclic GFR-binding peptide
  MOD_RES (6), (7), (38): Xaa is C or S
RVPSTXXAPVKTSAISMLYLDNGRVLLLKNYQMIVEEX

SEQ ID NO: 37757 - protein, 36 aa, Artificial Sequence
  Non-cyclic GFR-binding peptide
  MOD_RES (1), (2), (34), (36): Xaa is C or S
XXVPARLSAISILYLDAANNVVLKNYQDMVVEAXGX

SEQ ID NO: 37758 - protein, 41 aa, Artificial Sequence
  Non-cyclic GFR-binding peptide
  MOD_RES (6), (7), (39), (41): Xaa is C or S
AAPASXXVPARLSAISILYLDAANNVVLKNYQDMVVEAXGX

SEQ ID NO: 37759 - protein, 38 aa, Artificial Sequence
  Non-cyclic GFR-binding peptide
  MOD_RES (1), (2), (35), (37): Xaa is C or S
  MOD_RES (16), (17), (18), (19), (20): Xaa is A or G
  MOD_RES (21), (22), (23), (24): Xaa is A or G or is absent
XXAPVKTSAISMLYLXXXXXXXXXLKNYQMIVEEXGXL

SEQ ID NO: 37760 - protein, 35 aa, Artificial Sequence
  Non-cyclic GFR-binding peptide
  MOD_RES (1), (35): Xaa is C or S
  MOD_RES (15), (16), (17), (18), (19): Xaa is A or G
  MOD_RES (20), (21), (22), (23): Xaa is A or G or is absent
XVPEKMSAISILYLXXXXXXXXXLKNYQNMTVESX

SEQ ID NO: 37761 - protein, 34 aa, Artificial Sequence
  Non-cyclic GFR-binding peptide
  MOD_RES (32), (34): Xaa is C or S
TPTKMSAISMLYLNDKQQIILKNYQGMVVDRXGX

SEQ ID NO: 37762 - protein, 38 aa, Artificial Sequence
  Non-cyclic GFR-binding peptide
  MOD_RES (4), (5), (37): Xaa is C or S
PEPXXVPEKMSAISILYLDENKNVVLKNYQNMTVESXA

SEQ ID NO: 37763 - protein, 34 aa, Artificial Sequence
  Non-cyclic GFR-binding peptide
  MOD_RES (1), (33): Xaa is C or S
XVPEKMSAISILYLDENKNVVLKNYQNMTVESXA

SEQ ID NO: 37764 - protein, 42 aa, Artificial Sequence
  Non-cyclic GFR-binding peptide
  MOD_RES (5), (6), (40), (42): Xaa is C or S
  MOD_RES (20), (21), (22), (23), (24): Xaa is A or G
  MOD_RES (25), (26), (27), (28): Xaa is A or G or is absent
IPEPXXVPEKMSAISILYLXXXXXXXXXLKNYQNMTVESXAX

SEQ ID NO: 37765 - protein, 37 aa, Artificial Sequence
  Non-cyclic GFR-binding peptide
  MOD_RES (4), (5), (36): Xaa is C or S
PSTXXAPVKTSAISMLYLDNGRVLLLKNYQMIVEEXG

SEQ ID NO: 37766 - protein, 34 aa, Artificial Sequence
  Non-cyclic GFR-binding peptide
  MOD_RES (34), (34): Xaa is C or S
  MOD_RES (14), (15), (16), (17), (18): Xaa is A or G
  MOD_RES (19), (20), (21), (22): Xaa is A or G or is absent
TPTKMSAISMLYLXXXXXXXXXLKNYQGMVVDRX

SEQ ID NO: 37767 - protein, 37 aa, Artificial Sequence
  Non-cyclic GFR-binding peptide
  MOD_RES (1), (35), (37): Xaa is C or S
  MOD_RES (15), (16), (17), (18), (19): Xaa is A or G
  MOD_RES (20), (21), (22), (23): Xaa is A or G or is absent
XVPEKMSAISILYLXXXXXXXXXLKNYQNMTVESXAX

SEQ ID NO: 37768 - protein, 39 aa, Artificial Sequence
  Non-cyclic GFR-binding peptide
  MOD_RES (3), (4), (38): Xaa is C or S
  MOD_RES (18), (19), (20), (21), (22): Xaa is A or G
  MOD_RES (23), (24), (25), (26): Xaa is A or G or is absent
EPXXVPEKMSAISILYLXXXXXXXXXLKNYQNMTVESXA

SEQ ID NO: 37769 - protein, 34 aa, Artificial Sequence
  Non-cyclic GFR-binding peptide
  MOD_RES (1), (2), (33): Xaa is C or S
XXAPVKTSAISMLYLDNGRVLLLKNYQMIVEEXG

SEQ ID NO: 37770 - protein, 32 aa, Artificial Sequence
  Non-cyclic GFR-binding peptide
  MOD_RES (32), (32): Xaa is C or S
VPARLSAISILYLDAANNVVLKNYQDMVVEAX

SEQ ID NO: 37771 - protein, 36 aa, Artificial Sequence
  Non-cyclic GFR-binding peptide
  MOD_RES (1), (2), (36): Xaa is C or S
  MOD_RES (16), (17), (18), (19), (20): Xaa is A or G
  MOD_RES (21), (22), (23), (24): Xaa is A or G or is absent
XXVPARLSAISILYLXXXXXXXXXLKNYQDMVVEAX

SEQ ID NO: 37772 - protein, 34 aa, Artificial Sequence
  Non-cyclic GFR-binding peptide
  MOD_RES (1), (2): Xaa is C or S
  MOD_RES (16), (17), (18), (19), (20): Xaa is A or G
  MOD_RES (21), (22), (23), (24): Xaa is A or G or is absent
XXTPTKMSAISMLYLXXXXXXXXXLKNYQGMVVD

SEQ ID NO: 37773 - protein, 42 aa, Artificial Sequence
  Non-cyclic GFR-binding peptide
  MOD_RES (5), (6), (40), (42): Xaa is C or S
  MOD_RES (20), (21), (22), (23), (24): Xaa is A or G
  MOD_RES (25), (26), (27), (28): Xaa is A or G or is absent
APASXXVPARLSAISILYLXXXXXXXXXLKNYQDMVVEAXGX

SEQ ID NO: 37774 - protein, 39 aa, Artificial Sequence
  Non-cyclic GFR-binding peptide
  MOD_RES (6), (7), (39): Xaa is C or S
HVPKPXXAPTKLSAISVLYLDDSSNVILKNYQNMVVRSX

SEQ ID NO: 37775 - protein, 39 aa, Artificial Sequence
  Non-cyclic GFR-binding peptide
  MOD_RES (4), (5), (37), (39): Xaa is C or S
PASXXVPARLSAISILYLDAANNVVLKNYQDMVVEAXGX

SEQ ID NO: 37776 - protein, 35 aa, Artificial Sequence
  Non-cyclic GFR-binding peptide
  MOD_RES (32), (34): Xaa is C or S
TPTKMSAISMLYLNDKQQIILKNYQGMVVDRXGXS

SEQ ID NO: 37777 - protein, 37 aa, Artificial Sequence
  Non-cyclic GFR-binding peptide
  MOD_RES (3), (4), (36): Xaa is C or S
ASXXVPARLSAISILYLDAANNVVLKNYQDMVVEAXG

SEQ ID NO: 37778 - protein, 30 aa, Artificial Sequence
  Non-cyclic GFR-binding peptide
VPTKLSAISILYLDKGVVTYLKNYQGMAVS

SEQ ID NO: 37779 - protein, 41 aa, Artificial Sequence
  Non-cyclic GFR-binding peptide
  MOD_RES (6), (7), (41): Xaa is C or S
  MOD_RES (21), (22), (23), (24), (25): Xaa is A or G
  MOD_RES (26), (27), (28), (29): Xaa is A or G or is absent
GSAGPXXTPTKMSAISMLYLXXXXXXXXXLKNYQGMVVDRX

SEQ ID NO: 37780 - protein, 33 aa, Artificial Sequence
  Non-cyclic GFR-binding peptide
  MOD_RES (1), (1): Xaa is C or S
  MOD_RES (15), (16), (17), (18), (19): Xaa is A or G
  MOD_RES (20), (21), (22), (23): Xaa is A or G or is absent
XTPTKMSAISMLYLXXXXXXXXXLKNYQGMVVD

SEQ ID NO: 37781 - protein, 36 aa, Artificial Sequence
  Non-cyclic GFR-binding peptide
  MOD_RES (34), (36): Xaa is C or S
  MOD_RES (14), (15), (16), (17), (18): Xaa is A or G
  MOD_RES (19), (20), (21), (22): Xaa is A or G or is absent
VPTKLSAISILYLXXXXXXXXXLKNYQGMAVSEXGX

SEQ ID NO: 37782 - protein, 37 aa, Artificial Sequence
  Non-cyclic GFR-binding peptide
  MOD_RES (5), (6): Xaa is C or S
ASKAXXVPTKLSAISILYLDKGVVTYLKNYQGMAVSE

SEQ ID NO: 37783 - protein, 37 aa, Artificial Sequence
  Non-cyclic GFR-binding peptide
  MOD_RES (2), (3), (34), (36): Xaa is C or S
TXXAPVKTSAISMLYLDNGRVLLLKNYQMIVEEXGXL

SEQ ID NO: 37784 - protein, 37 aa, Artificial Sequence
  Non-cyclic GFR-binding peptide
  MOD_RES (34), (36): Xaa is C or S
  MOD_RES (14), (15), (16), (17), (18): Xaa is A or G
  MOD_RES (19), (20), (21), (22): Xaa is A or G or is absent
VPARLSAISILYLXXXXXXXXXLKNYQDMVVEAXGXR

SEQ ID NO: 37785 - protein, 39 aa, Artificial Sequence
  Non-cyclic GFR-binding peptide
  MOD_RES (4), (5), (36), (38): Xaa is C or S
PSTXXAPVKTSAISMLYLDNGRVLLLKNYQMIVEEXGXL

SEQ ID NO: 37786 - protein, 35 aa, Artificial Sequence
  Non-cyclic GFR-binding peptide
  MOD_RES (2), (3), (35): Xaa is C or S
AXXVPTKLSAISILYLDKGVVTYLKNYQGMAVSEX

SEQ ID NO: 37787 - protein, 36 aa, Artificial Sequence
  Non-cyclic GFR-binding peptide
  MOD_RES (4), (5), (36): Xaa is C or S
PSTXXAPVKTSAISMLYLDNGRVLLLKNYQMIVEEX

SEQ ID NO: 37788 - protein, 35 aa, Artificial Sequence
  Non-cyclic GFR-binding peptide
  MOD_RES (1), (35): Xaa is C or S
  MOD_RES (15), (16), (17), (18), (19): Xaa is A or G
  MOD_RES (20), (21), (22), (23): Xaa is A or G or is absent
XVPARLSAISILYLXXXXXXXXXLKNYQDMVVEAX

SEQ ID NO: 37789 - protein, 31 aa, Artificial Sequence
  Non-cyclic GFR-binding peptide
  MOD_RES (1), (1): Xaa is C or S
XTPTKMSAISMLYLNDKQQIILKNYQGMVVD

SEQ ID NO: 37790 - protein, 41 aa, Artificial Sequence
  Non-cyclic GFR-binding peptide
  MOD_RES (6), (7), (38), (40): Xaa is C or S
RVPSTXXAPVKTSAISMLYLDNGRVLLLKNYQMIVEEXGXL

SEQ ID NO: 37791 - protein, 36 aa, Artificial Sequence
  Non-cyclic GFR-binding peptide
  MOD_RES (5), (6): Xaa is C or S
ASKAXXVPTKLSAISILYLDKGVVTYLKNYQGMAVS

SEQ ID NO: 37792 - protein, 42 aa, Artificial Sequence
  Non-cyclic GFR-binding peptide
  MOD_RES (5), (6), (39), (41): Xaa is C or S
  MOD_RES (20), (21), (22), (23), (24): Xaa is A or G
  MOD_RES (25), (26), (27), (28): Xaa is A or G or is absent
VPSTXXAPVKTSAISMLYLXXXXXXXXXLKNYQMIVEEXGXL

SEQ ID NO: 37793 - protein, 41 aa, Artificial Sequence
  Non-cyclic GFR-binding peptide
  MOD_RES (5), (6), (40): Xaa is C or S
  MOD_RES (20), (21), (22), (23), (24): Xaa is A or G
  MOD_RES (25), (26), (27), (28): Xaa is A or G or is absent
SAGPXXTPTKMSAISMLYLXXXXXXXXXLKNYQGMVVDRXG

SEQ ID NO: 37794 - protein, 34 aa, Artificial Sequence
  Non-cyclic GFR-binding peptide
  MOD_RES (32), (34): Xaa is C or S
VPTKLSAISILYLDKGVVTYLKNYQGMAVSEXGX

SEQ ID NO: 37795 - protein, 43 aa, Artificial Sequence
  Non-cyclic GFR-binding peptide
  MOD_RES (6), (7), (40), (42): Xaa is C or S
  MOD_RES (21), (22), (23), (24), (25): Xaa is A or G
  MOD_RES (26), (27), (28), (29): Xaa is A or G or is absent
RVPSTXXAPVKTSAISMLYLXXXXXXXXXLKNYQMIVEEXGXL

SEQ ID NO: 37796 - protein, 41 aa, Artificial Sequence
  Non-cyclic GFR-binding peptide
  MOD_RES (5), (6), (38), (40): Xaa is C or S
ASKAXXVPTKLSAISILYLDKGVVTYLKNYQGMAVSEXGXR

SEQ ID NO: 37797 - protein, 38 aa, Artificial Sequence
  Non-cyclic GFR-binding peptide
  MOD_RES (4), (5): Xaa is C or S
  MOD_RES (19), (20), (21), (22), (23): Xaa is A or G
  MOD_RES (24), (25), (26), (27): Xaa is A or G or is absent
PEPXXVPEKMSAISILYLXXXXXXXXXLKNYQNMTVES

SEQ ID NO: 37798 - protein, 36 aa, Artificial Sequence
  Non-cyclic GFR-binding peptide
  MOD_RES (33), (35): Xaa is C or S
  MOD_RES (14), (15), (16), (17), (18): Xaa is A or G
  MOD_RES (19), (20), (21), (22): Xaa is A or G or is absent
APVKTSAISMLYLXXXXXXXXXLKNYQMIVEEXGXL

SEQ ID NO: 37799 - protein, 42 aa, Artificial Sequence
  Non-cyclic GFR-binding peptide
  MOD_RES (6), (7), (39), (41): Xaa is C or S
GSAGPXXTPTKMSAISMLYLNDKQQIILKNYQGMVVDRXGXS

SEQ ID NO: 37800 - protein, 33 aa, Artificial Sequence
  Non-cyclic GFR-binding peptide
  MOD_RES (1), (2): Xaa is C or S
XXVPEKMSAISILYLDENKNVVLKNYQNMTVES

SEQ ID NO: 37801 - protein, 35 aa, Artificial Sequence
  Non-cyclic GFR-binding peptide
  MOD_RES (2), (3), (35): Xaa is C or S
SXXVPARLSAISILYLDAANNVVLKNYQDMVVEAX

SEQ ID NO: 37802 - protein, 32 aa, Artificial Sequence
  Non-cyclic GFR-binding peptide
  MOD_RES (1), (2): Xaa is C or S
XXTPTKMSAISMLYLNDKQQIILKNYQGMVVD

SEQ ID NO: 37803 - protein, 40 aa, Artificial Sequence
  Non-cyclic GFR-binding peptide
  MOD_RES (5), (6), (38), (40): Xaa is C or S
APASXXVPARLSAISILYLDAANNVVLKNYQDMVVEAXGX

SEQ ID NO: 37804 - protein, 33 aa, Artificial Sequence
  Non-cyclic GFR-binding peptide
  MOD_RES (31), (33): Xaa is C or S
APVKTSAISMLYLDNGRVLLLKNYQMIVEEXGX

SEQ ID NO: 37805 - protein, 33 aa, Artificial Sequence
  Non-cyclic GFR-binding peptide
  MOD_RES (2), (3): Xaa is C or S
TXXAPVKTSAISMLYLDNGRVLLLKNYQMIVEE

SEQ ID NO: 37806 - protein, 35 aa, Artificial Sequence
  Non-cyclic GFR-binding peptide
  MOD_RES (34), (34): Xaa is C or S
  MOD_RES (14), (15), (16), (17), (18): Xaa is A or G
  MOD_RES (19), (20), (21), (22): Xaa is A or G or is absent
VPEKMSAISILYLXXXXXXXXXLKNYQNMTVESXA

SEQ ID NO: 37807 - protein, 34 aa, Artificial Sequence
  Non-cyclic GFR-binding peptide
  MOD_RES (1), (1): Xaa is C or S
  MOD_RES (15), (16), (17), (18), (19): Xaa is A or G
  MOD_RES (20), (21), (22), (23): Xaa is A or G or is absent
XVPARLSAISILYLXXXXXXXXXLKNYQDMVVEA

SEQ ID NO: 37808 - protein, 41 aa, Artificial Sequence
  Non-cyclic GFR-binding peptide
  MOD_RES (4), (5), (39), (41): Xaa is C or S
  MOD_RES (19), (20), (21), (22), (23): Xaa is A or G
  MOD_RES (24), (25), (26), (27): Xaa is A or G or is absent
PEPXXVPEKMSAISILYLXXXXXXXXXLKNYQNMTVESXAX

SEQ ID NO: 37809 - protein, 38 aa, Artificial Sequence
  Non-cyclic GFR-binding peptide
  MOD_RES (2), (3), (37): Xaa is C or S
  MOD_RES (17), (18), (19), (20), (21): Xaa is A or G
  MOD_RES (22), (23), (24), (25): Xaa is A or G or is absent
PXXTPTKMSAISMLYLXXXXXXXXXLKNYQGMVVDRXG

SEQ ID NO: 37810 - protein, 36 aa, Artificial Sequence
  Non-cyclic GFR-binding peptide
  MOD_RES (1), (2), (34), (36): Xaa is C or S
XXTPTKMSAISMLYLNDKQQIILKNYQGMVVDRXGX

SEQ ID NO: 37811 - protein, 33 aa, Artificial Sequence
  Non-cyclic GFR-binding peptide
  MOD_RES (14), (15), (16), (17), (18): Xaa is A or G
  MOD_RES (19), (20), (21), (22): Xaa is A or G or is absent
VPEKMSAISILYLXXXXXXXXXLKNYQNMTVES

SEQ ID NO: 37812 - protein, 36 aa, Artificial Sequence
  Non-cyclic GFR-binding peptide
  MOD_RES (4), (5): Xaa is C or S
AGPXXTPTKMSAISMLYLNDKQQIILKNYQGMVVDR

SEQ ID NO: 37813 - protein, 35 aa, Artificial Sequence
  Non-cyclic GFR-binding peptide
  MOD_RES (34), (34): Xaa is C or S
  MOD_RES (14), (15), (16), (17), (18): Xaa is A or G
  MOD_RES (19), (20), (21), (22): Xaa is A or G or is absent
TPTKMSAISMLYLXXXXXXXXXLKNYQGMVVDRXG

SEQ ID NO: 37814 - protein, 40 aa, Artificial Sequence
  Non-cyclic GFR-binding peptide
  MOD_RES (4), (5), (37), (39): Xaa is C or S
PEPXXVPEKMSAISILYLDENKNVVLKNYQNMTVESXAXR

SEQ ID NO: 37815 - protein, 31 aa, Artificial Sequence
  Non-cyclic GFR-binding peptide
TPTKMSAISMLYLNDKQQIILKNYQGMVVDR

SEQ ID NO: 37816 - protein, 36 aa, Artificial Sequence
  Non-cyclic GFR-binding peptide
  MOD_RES (1), (35): Xaa is C or S
  MOD_RES (15), (16), (17), (18), (19): Xaa is A or G
  MOD_RES (20), (21), (22), (23): Xaa is A or G or is absent
XVPTKLSAISILYLXXXXXXXXXLKNYQGMAVSEXG

SEQ ID NO: 37817 - protein, 36 aa, Artificial Sequence
  Non-cyclic GFR-binding peptide
  MOD_RES (4), (5): Xaa is C or S
SKAXXVPTKLSAISILYLDKGVVTYLKNYQGMAVSE

SEQ ID NO: 37818 - protein, 36 aa, Artificial Sequence
  Non-cyclic GFR-binding peptide
  MOD_RES (3), (4), (36): Xaa is C or S
GPXXTPTKMSAISMLYLNDKQQIILKNYQGMVVDRX

SEQ ID NO: 37819 - protein, 38 aa, Artificial Sequence
  Non-cyclic GFR-binding peptide
  MOD_RES (1), (35), (37): Xaa is C or S
  MOD_RES (15), (16), (17), (18), (19): Xaa is A or G
  MOD_RES (20), (21), (22), (23): Xaa is A or G or is absent
XVPARLSAISILYLXXXXXXXXXLKNYQDMVVEAXGXR

SEQ ID NO: 37820 - protein, 38 aa, Artificial Sequence
  Non-cyclic GFR-binding peptide
  MOD_RES (3), (4), (38): Xaa is C or S
  MOD_RES (18), (19), (20), (21), (22): Xaa is A or G
  MOD_RES (23), (24), (25), (26): Xaa is A or G or is absent
ASXXVPARLSAISILYLXXXXXXXXXLKNYQDMVVEAX

SEQ ID NO: 37821 - protein, 32 aa, Artificial Sequence
  Non-cyclic GFR-binding peptide
  MOD_RES (32), (32): Xaa is C or S
TPTKMSAISMLYLNDKQQIILKNYQGMVVDRX

SEQ ID NO: 37822 - protein, 39 aa, Artificial Sequence
  Non-cyclic GFR-binding peptide
  MOD_RES (3), (4), (38): Xaa is C or S
  MOD_RES (18), (19), (20), (21), (22): Xaa is A or G
  MOD_RES (23), (24), (25), (26): Xaa is A or G or is absent
GPXXTPTKMSAISMLYLXXXXXXXXXLKNYQGMVVDRXG

SEQ ID NO: 37823 - protein, 39 aa, Artificial Sequence
  Non-cyclic GFR-binding peptide
  MOD_RES (6), (7): Xaa is C or S
  MOD_RES (21), (22), (23), (24), (25): Xaa is A or G
  MOD_RES (26), (27), (28), (29): Xaa is A or G or is absent
GIPEPXXVPEKMSAISILYLXXXXXXXXXLKNYQNMTVE

SEQ ID NO: 37824 - protein, 32 aa, Artificial Sequence
  Non-cyclic GFR-binding peptide
  MOD_RES (1), (1): Xaa is C or S
XVPARLSAISILYLDAANNVVLKNYQDMVVEA

SEQ ID NO: 37825 - protein, 39 aa, Artificial Sequence
  Non-cyclic GFR-binding peptide
  MOD_RES (3), (4), (36), (38): Xaa is C or S
EPXXVPEKMSAISILYLDENKNVVLKNYQNMTVESXAXR

SEQ ID NO: 37826 - protein, 34 aa, Artificial Sequence
  Non-cyclic GFR-binding peptide
  MOD_RES (1), (1): Xaa is C or S
  MOD_RES (15), (16), (17), (18), (19): Xaa is A or G
  MOD_RES (20), (21), (22), (23): Xaa is A or G or is absent
XTPTKMSAISMLYLXXXXXXXXXLKNYQGMVVDR

SEQ ID NO: 37827 - protein, 38 aa, Artificial Sequence
  Non-cyclic GFR-binding peptide
  MOD_RES (4), (5), (38): Xaa is C or S
  MOD_RES (19), (20), (21), (22), (23): Xaa is A or G
  MOD_RES (24), (25), (26), (27): Xaa is A or G or is absent
PSTXXAPVKTSAISMLYLXXXXXXXXXLKNYQMIVEEX

SEQ ID NO: 37828 - protein, 37 aa, Artificial Sequence
  Non-cyclic GFR-binding peptide
  MOD_RES (3), (4): Xaa is C or S
  MOD_RES (18), (19), (20), (21), (22): Xaa is A or G
  MOD_RES (23), (24), (25), (26): Xaa is A or G or is absent
EPXXVPEKMSAISILYLXXXXXXXXXLKNYQNMTVES

SEQ ID NO: 37829 - protein, 36 aa, Artificial Sequence
  Non-cyclic GFR-binding peptide
  MOD_RES (3), (4), (36): Xaa is C or S
ASXXVPARLSAISILYLDAANNVVLKNYQDMVVEAX

SEQ ID NO: 37830 - protein, 33 aa, Artificial Sequence
  Non-cyclic GFR-binding peptide
  MOD_RES (14), (15), (16), (17), (18): Xaa is A or G
  MOD_RES (19), (20), (21), (22): Xaa is A or G or is absent
VPTKLSAISILYLXXXXXXXXXLKNYQGMAVSE

SEQ ID NO: 37831 - protein, 35 aa, Artificial Sequence
  Non-cyclic GFR-binding peptide
  MOD_RES (1), (33), (35): Xaa is C or S
XVPTKLSAISILYLDKGVVTYLKNYQGMAVSEXGX

SEQ ID NO: 37832 - protein, 35 aa, Artificial Sequence
  Non-cyclic GFR-binding peptide
  MOD_RES (4), (5): Xaa is C or S
PEPXXVPEKMSAISILYLDENKNVVLKNYQNMTVE

SEQ ID NO: 37833 - protein, 35 aa, Artificial Sequence
  Non-cyclic GFR-binding peptide
  MOD_RES (2), (3): Xaa is C or S
  MOD_RES (17), (18), (19), (20), (21): Xaa is A or G
  MOD_RES (22), (23), (24), (25): Xaa is A or G or is absent
TXXAPVKTSAISMLYLXXXXXXXXXLKNYQMIVEE

SEQ ID NO: 37834 - protein, 37 aa, Artificial Sequence
  Non-cyclic GFR-binding peptide
  MOD_RES (5), (6), (37): Xaa is C or S
VPSTXXAPVKTSAISMLYLDNGRVLLLKNYQMIVEEX

SEQ ID NO: 37835 - protein, 40 aa, Artificial Sequence
  Non-cyclic GFR-binding peptide
  MOD_RES (5), (6), (38), (40): Xaa is C or S
SAGPXXTPTKMSAISMLYLNDKQQIILKNYQGMVVDRXGX

SEQ ID NO: 37836 - protein, 40 aa, Artificial Sequence
  Non-cyclic GFR-binding peptide
  MOD_RES (5), (6), (38), (40): Xaa is C or S
IPEPXXVPEKMSAISILYLDENKNVVLKNYQNMTVESXAX

SEQ ID NO: 37837 - protein, 40 aa, Artificial Sequence
  Non-cyclic GFR-binding peptide
  MOD_RES (4), (5), (37), (39): Xaa is C or S
AGPXXTPTKMSAISMLYLNDKQQIILKNYQGMVVDRXGXS

SEQ ID NO: 37838 - protein, 38 aa, Artificial Sequence
  Non-cyclic GFR-binding peptide
  MOD_RES (3), (4), (36), (38): Xaa is C or S
GPXXTPTKMSAISMLYLNDKQQIILKNYQGMVVDRXGX

SEQ ID NO: 37839 - protein, 40 aa, Artificial Sequence
  Non-cyclic GFR-binding peptide
  MOD_RES (5), (6), (40): Xaa is C or S
  MOD_RES (20), (21), (22), (23), (24): Xaa is A or G
  MOD_RES (25), (26), (27), (28): Xaa is A or G or is absent
SAGPXXTPTKMSAISMLYLXXXXXXXXXLKNYQGMVVDRX

SEQ ID NO: 37840 - protein, 36 aa, Artificial Sequence
  Non-cyclic GFR-binding peptide
  MOD_RES (1), (35): Xaa is C or S
  MOD_RES (15), (16), (17), (18), (19): Xaa is A or G
  MOD_RES (20), (21), (22), (23): Xaa is A or G or is absent
XTPTKMSAISMLYLXXXXXXXXXLKNYQGMVVDRXG

SEQ ID NO: 37841 - protein, 42 aa, Artificial Sequence
  Non-cyclic GFR-binding peptide
  MOD_RES (6), (7), (41): Xaa is C or S
  MOD_RES (21), (22), (23), (24), (25): Xaa is A or G
  MOD_RES (26), (27), (28), (29): Xaa is A or G or is absent
GIPEPXXVPEKMSAISILYLXXXXXXXXXLKNYQNMTVESXA

SEQ ID NO: 37842 - protein, 36 aa, Artificial Sequence
  Non-cyclic GFR-binding peptide
  MOD_RES (2), (3), (35): Xaa is C or S
SXXVPARLSAISILYLDAANNVVLKNYQDMVVEAXG

SEQ ID NO: 37843 - protein, 38 aa, Artificial Sequence
  Non-cyclic GFR-binding peptide
  MOD_RES (3), (4), (38): Xaa is C or S
  MOD_RES (18), (19), (20), (21), (22): Xaa is A or G
  MOD_RES (23), (24), (25), (26): Xaa is A or G or is absent
EPXXVPEKMSAISILYLXXXXXXXXXLKNYQNMTVESX

SEQ ID NO: 37844 - protein, 32 aa, Artificial Sequence
  Non-cyclic GFR-binding peptide
  MOD_RES (14), (15), (16), (17), (18): Xaa is A or G
  MOD_RES (19), (20), (21), (22): Xaa is A or G or is absent
APVKTSAISMLYLXXXXXXXXXLKNYQMIVEE

SEQ ID NO: 37845 - protein, 38 aa, Artificial Sequence
  Non-cyclic GFR-binding peptide
  MOD_RES (3), (4), (36), (38): Xaa is C or S
KAXXVPTKLSAISILYLDKGVVTYLKNYQGMAVSEXGX

SEQ ID NO: 37846 - protein, 37 aa, Artificial Sequence
  Non-cyclic GFR-binding peptide
  MOD_RES (2), (3), (37): Xaa is C or S
  MOD_RES (17), (18), (19), (20), (21): Xaa is A or G
  MOD_RES (22), (23), (24), (25): Xaa is A or G or is absent
PXXVPEKMSAISILYLXXXXXXXXXLKNYQNMTVESX

SEQ ID NO: 37847 - protein, 36 aa, Artificial Sequence
  Non-cyclic GFR-binding peptide
  MOD_RES (1), (2), (34), (36): Xaa is C or S
XXVPEKMSAISILYLDENKNVVLKNYQNMTVESXAX

SEQ ID NO: 37848 - protein, 40 aa, Artificial Sequence
  Non-cyclic GFR-binding peptide
  MOD_RES (5), (6), (38), (40): Xaa is C or S
ASKAXXVPTKLSAISILYLDKGVVTYLKNYQGMAVSEXGX

SEQ ID NO: 37849 - protein, 38 aa, Artificial Sequence
  Non-cyclic GFR-binding peptide
  MOD_RES (3), (4), (38): Xaa is C or S
  MOD_RES (18), (19), (20), (21), (22): Xaa is A or G
  MOD_RES (23), (24), (25), (26): Xaa is A or G or is absent
KAXXVPTKLSAISILYLXXXXXXXXXLKNYQGMAVSEX

SEQ ID NO: 37850 - protein, 37 aa, Artificial Sequence
  Non-cyclic GFR-binding peptide
  MOD_RES (4), (5): Xaa is C or S
  MOD_RES (19), (20), (21), (22), (23): Xaa is A or G
  MOD_RES (24), (25), (26), (27): Xaa is A or G or is absent
PEPXXVPEKMSAISILYLXXXXXXXXXLKNYQNMTVE

SEQ ID NO: 37851 - protein, 39 aa, Artificial Sequence
  Non-cyclic GFR-binding peptide
  MOD_RES (6), (7), (39): Xaa is C or S
GSAGPXXTPTKMSAISMLYLNDKQQIILKNYQGMVVDRX

SEQ ID NO: 37852 - protein, 36 aa, Artificial Sequence
  Non-cyclic GFR-binding peptide
  MOD_RES (3), (4): Xaa is C or S
  MOD_RES (18), (19), (20), (21), (22): Xaa is A or G
  MOD_RES (23), (24), (25), (26): Xaa is A or G or is absent
GPXXTPTKMSAISMLYLXXXXXXXXXLKNYQGMVVD

SEQ ID NO: 37853 - protein, 37 aa, Artificial Sequence
  Non-cyclic GFR-binding peptide
  MOD_RES (5), (6): Xaa is C or S
SAGPXXTPTKMSAISMLYLNDKQQIILKNYQGMVVDR

SEQ ID NO: 37854 - protein, 36 aa, Artificial Sequence
  Non-cyclic GFR-binding peptide
  MOD_RES (2), (3): Xaa is C or S
  MOD_RES (17), (18), (19), (20), (21): Xaa is A or G
  MOD_RES (22), (23), (24), (25): Xaa is A or G or is absent
SXXVPARLSAISILYLXXXXXXXXXLKNYQDMVVEA

SEQ ID NO: 37855 - protein, 33 aa, Artificial Sequence
  Non-cyclic GFR-binding peptide
  MOD_RES (1), (2): Xaa is C or S
XXVPTKLSAISILYLDKGVVTYLKNYQGMAVSE

SEQ ID NO: 37856 - protein, 36 aa, Artificial Sequence
  Non-cyclic GFR-binding peptide
  MOD_RES (2), (3), (34), (36): Xaa is C or S
TXXAPVKTSAISMLYLDNGRVLLLKNYQMIVEEXGX

SEQ ID NO: 37857 - protein, 43 aa, Artificial Sequence
  Non-cyclic GFR-binding peptide
  MOD_RES (5), (6), (40), (42): Xaa is C or S
  MOD_RES (20), (21), (22), (23), (24): Xaa is A or G
  MOD_RES (25), (26), (27), (28): Xaa is A or G or is absent
IPEPXXVPEKMSAISILYLXXXXXXXXXLKNYQNMTVESXAXR

SEQ ID NO: 37858 - protein, 37 aa, Artificial Sequence
  Non-cyclic GFR-binding peptide
  MOD_RES (1), (2), (34), (36): Xaa is C or S
XXTPTKMSAISMLYLNDKQQIILKNYQGMVVDRXGXS

SEQ ID NO: 37859 - protein, 42 aa, Artificial Sequence
  Non-cyclic GFR-binding peptide
  MOD_RES (6), (7), (41): Xaa is C or S
  MOD_RES (21), (22), (23), (24), (25): Xaa is A or G
  MOD_RES (26), (27), (28), (29): Xaa is A or G or is absent
HVPKPXXAPTKLSAISVLYLXXXXXXXXXLKNYQNMVVRSXG

SEQ ID NO: 37860 - protein, 37 aa, Artificial Sequence
  Non-cyclic GFR-binding peptide
  MOD_RES (4), (5), (37): Xaa is C or S
SKAXXVPTKLSAISILYLDKGVVTYLKNYQGMAVSEX

SEQ ID NO: 37861 - protein, 39 aa, Artificial Sequence
  Non-cyclic GFR-binding peptide
  MOD_RES (1), (2), (36), (38): Xaa is C or S
  MOD_RES (16), (17), (18), (19), (20): Xaa is A or G
  MOD_RES (21), (22), (23), (24): Xaa is A or G or is absent
XXVPEKMSAISILYLXXXXXXXXXLKNYQNMTVESXAXR

SEQ ID NO: 37862 - protein, 38 aa, Artificial Sequence
  Non-cyclic GFR-binding peptide
  MOD_RES (5), (6), (38): Xaa is C or S
ASKAXXVPTKLSAISILYLDKGVVTYLKNYQGMAVSEX

SEQ ID NO: 37863 - protein, 39 aa, Artificial Sequence
  Non-cyclic GFR-binding peptide
  MOD_RES (5), (6): Xaa is C or S
  MOD_RES (20), (21), (22), (23), (24): Xaa is A or G
  MOD_RES (25), (26), (27), (28): Xaa is A or G or is absent
SAGPXXTPTKMSAISMLYLXXXXXXXXXLKNYQGMVVDR

SEQ ID NO: 37864 - protein, 32 aa, Artificial Sequence
  Non-cyclic GFR-binding peptide
  MOD_RES (1), (2): Xaa is C or S
XXAPVKTSAISMLYLDNGRVLLLKNYQMIVEE

SEQ ID NO: 37865 - protein, 38 aa, Artificial Sequence
  Non-cyclic GFR-binding peptide
  MOD_RES (5), (6), (37): Xaa is C or S
VPSTXXAPVKTSAISMLYLDNGRVLLLKNYQMIVEEXG

SEQ ID NO: 37866 - protein, 38 aa, Artificial Sequence
  Non-cyclic GFR-binding peptide
  MOD_RES (3), (4), (38): Xaa is C or S
  MOD_RES (18), (19), (20), (21), (22): Xaa is A or G
  MOD_RES (23), (24), (25), (26): Xaa is A or G or is absent
GPXXTPTKMSAISMLYLXXXXXXXXXLKNYQGMVVDRX

SEQ ID NO: 37867 - protein, 34 aa, Artificial Sequence
  Non-cyclic GFR-binding peptide
  MOD_RES (34), (34): Xaa is C or S
  MOD_RES (14), (15), (16), (17), (18): Xaa is A or G
  MOD_RES (19), (20), (21), (22): Xaa is A or G or is absent
VPEKMSAISILYLXXXXXXXXXLKNYQNMTVESX

SEQ ID NO: 37868 - protein, 41 aa, Artificial Sequence
  Non-cyclic GFR-binding peptide
  MOD_RES (5), (6), (40): Xaa is C or S
  MOD_RES (20), (21), (22), (23), (24): Xaa is A or G
  MOD_RES (25), (26), (27), (28): Xaa is A or G or is absent
IPEPXXVPEKMSAISILYLXXXXXXXXXLKNYQNMTVESXA

SEQ ID NO: 37869 - protein, 38 aa, Artificial Sequence
  Non-cyclic GFR-binding peptide
  MOD_RES (6), (7): Xaa is C or S
HVPKPXXAPTKLSAISVLYLDDSSNVILKNYQNMVVRS

SEQ ID NO: 37870 - protein, 32 aa, Artificial Sequence
  Non-cyclic GFR-binding peptide
  MOD_RES (14), (15), (16), (17), (18): Xaa is A or G
  MOD_RES (19), (20), (21), (22): Xaa is A or G or is absent
VPEKMSAISILYLXXXXXXXXXLKNYQNMTVE

SEQ ID NO: 37871 - protein, 42 aa, Artificial Sequence
  Non-cyclic GFR-binding peptide
  MOD_RES (5), (6), (40), (42): Xaa is C or S
  MOD_RES (20), (21), (22), (23), (24): Xaa is A or G
  MOD_RES (25), (26), (27), (28): Xaa is A or G or is absent
SAGPXXTPTKMSAISMLYLXXXXXXXXXLKNYQGMVVDRXGX

SEQ ID NO: 37872 - protein, 38 aa, Artificial Sequence
  Non-cyclic GFR-binding peptide
  MOD_RES (2), (3), (35), (37): Xaa is C or S
AXXVPTKLSAISILYLDKGVVTYLKNYQGMAVSEXGXR

SEQ ID NO: 37873 - protein, 37 aa, Artificial Sequence
  Non-cyclic GFR-binding peptide
  MOD_RES (3), (4): Xaa is C or S
  MOD_RES (18), (19), (20), (21), (22): Xaa is A or G
  MOD_RES (23), (24), (25), (26): Xaa is A or G or is absent
KAXXVPTKLSAISILYLXXXXXXXXXLKNYQGMAVSE

SEQ ID NO: 37874 - protein, 34 aa, Artificial Sequence
  Non-cyclic GFR-binding peptide
  MOD_RES (1), (33): Xaa is C or S
XVPTKLSAISILYLDKGVVTYLKNYQGMAVSEXG

SEQ ID NO: 37875 - protein, 38 aa, Artificial Sequence
  Non-cyclic GFR-binding peptide
  MOD_RES (3), (4), (37): Xaa is C or S
  MOD_RES (18), (19), (20), (21), (22): Xaa is A or G
  MOD_RES (23), (24), (25), (26): Xaa is A or G or is absent
STXXAPVKTSAISMLYLXXXXXXXXXLKNYQMIVEEXG

SEQ ID NO: 37876 - protein, 32 aa, Artificial Sequence
  Non-cyclic GFR-binding peptide
  MOD_RES (1), (1): Xaa is C or S
XVPEKMSAISILYLDENKNVVLKNYQNMTVES

SEQ ID NO: 37877 - protein, 35 aa, Artificial Sequence
  Non-cyclic GFR-binding peptide
  MOD_RES (34), (34): Xaa is C or S
  MOD_RES (14), (15), (16), (17), (18): Xaa is A or G
  MOD_RES (19), (20), (21), (22): Xaa is A or G or is absent
VPTKLSAISILYLXXXXXXXXXLKNYQGMAVSEXG

SEQ ID NO: 37878 - protein, 38 aa, Artificial Sequence
  Non-cyclic GFR-binding peptide
  MOD_RES (1), (2), (36), (38): Xaa is C or S
  MOD_RES (16), (17), (18), (19), (20): Xaa is A or G
  MOD_RES (21), (22), (23), (24): Xaa is A or G or is absent
XXVPARLSAISILYLXXXXXXXXXLKNYQDMVVEAXGX

SEQ ID NO: 37879 - protein, 39 aa, Artificial Sequence
  Non-cyclic GFR-binding peptide
  MOD_RES (1), (2), (36), (38): Xaa is C or S
  MOD_RES (16), (17), (18), (19), (20): Xaa is A or G
  MOD_RES (21), (22), (23), (24): Xaa is A or G or is absent
XXTPTKMSAISMLYLXXXXXXXXXLKNYQGMVVDRXGXS

SEQ ID NO: 37880 - protein, 39 aa, Artificial Sequence
  Non-cyclic GFR-binding peptide
  MOD_RES (1), (2), (36), (38): Xaa is C or S
  MOD_RES (16), (17), (18), (19), (20): Xaa is A or G
  MOD_RES (21), (22), (23), (24): Xaa is A or G or is absent
XXVPARLSAISILYLXXXXXXXXXLKNYQDMVVEAXGXR

SEQ ID NO: 37881 - protein, 40 aa, Artificial Sequence
  Non-cyclic GFR-binding peptide
  MOD_RES (3), (4), (38), (40): Xaa is C or S
  MOD_RES (18), (19), (20), (21), (22): Xaa is A or G
  MOD_RES (23), (24), (25), (26): Xaa is A or G or is absent
EPXXVPEKMSAISILYLXXXXXXXXXLKNYQNMTVESXAX

SEQ ID NO: 37882 - protein, 34 aa, Artificial Sequence
  Non-cyclic GFR-binding peptide
  MOD_RES (1), (33): Xaa is C or S
XVPARLSAISILYLDAANNVVLKNYQDMVVEAXG

SEQ ID NO: 37883 - protein, 37 aa, Artificial Sequence
  Non-cyclic GFR-binding peptide
  MOD_RES (4), (5): Xaa is C or S
  MOD_RES (19), (20), (21), (22), (23): Xaa is A or G
  MOD_RES (24), (25), (26), (27): Xaa is A or G or is absent
AGPXXTPTKMSAISMLYLXXXXXXXXXLKNYQGMVVD

SEQ ID NO: 37884 - protein, 37 aa, Artificial Sequence
  Non-cyclic GFR-binding peptide
  MOD_RES (3), (4): Xaa is C or S
  MOD_RES (18), (19), (20), (21), (22): Xaa is A or G
  MOD_RES (23), (24), (25), (26): Xaa is A or G or is absent
ASXXVPARLSAISILYLXXXXXXXXXLKNYQDMVVEA

SEQ ID NO: 37885 - protein, 33 aa, Artificial Sequence
  Non-cyclic GFR-binding peptide
  MOD_RES (1), (1): Xaa is C or S
  MOD_RES (15), (16), (17), (18), (19): Xaa is A or G
  MOD_RES (20), (21), (22), (23): Xaa is A or G or is absent
XVPEKMSAISILYLXXXXXXXXXLKNYQNMTVE

SEQ ID NO: 37886 - protein, 44 aa, Artificial Sequence
  Non-cyclic GFR-binding peptide
  MOD_RES (6), (7), (41), (43): Xaa is C or S
  MOD_RES (21), (22), (23), (24), (25): Xaa is A or G
  MOD_RES (26), (27), (28), (29): Xaa is A or G or is absent
GSAGPXXTPTKMSAISMLYLXXXXXXXXXLKNYQGMVVDRXGXS

SEQ ID NO: 37887 - protein, 39 aa, Artificial Sequence
  Non-cyclic GFR-binding peptide
  MOD_RES (2), (3), (37), (39): Xaa is C or S
  MOD_RES (17), (18), (19), (20), (21): Xaa is A or G
  MOD_RES (22), (23), (24), (25): Xaa is A or G or is absent
PXXVPEKMSAISILYLXXXXXXXXXLKNYQNMTVESXAX

SEQ ID NO: 37888 - protein, 35 aa, Artificial Sequence
  Non-cyclic GFR-binding peptide
  MOD_RES (3), (4): Xaa is C or S
KAXXVPTKLSAISILYLDKGVVTYLKNYQGMAVSE

SEQ ID NO: 37889 - protein, 40 aa, Artificial Sequence
  Non-cyclic GFR-binding peptide
  MOD_RES (3), (4), (38), (40): Xaa is C or S
  MOD_RES (18), (19), (20), (21), (22): Xaa is A or G
  MOD_RES (23), (24), (25), (26): Xaa is A or G or is absent
GPXXTPTKMSAISMLYLXXXXXXXXXLKNYQGMVVDRXGX

SEQ ID NO: 37890 - protein, 32 aa, Artificial Sequence
  Non-cyclic GFR-binding peptide
  MOD_RES (1), (1): Xaa is C or S
XVPTKLSAISILYLDKGVVTYLKNYQGMAVSE

SEQ ID NO: 37891 - protein, 43 aa, Artificial Sequence
  Non-cyclic GFR-binding peptide
  MOD_RES (6), (7), (41), (43): Xaa is C or S
  MOD_RES (21), (22), (23), (24), (25): Xaa is A or G
  MOD_RES (26), (27), (28), (29): Xaa is A or G or is absent
KASKAXXVPTKLSAISILYLXXXXXXXXXLKNYQGMAVSEXGX

SEQ ID NO: 37892 - protein, 36 aa, Artificial Sequence
  Non-cyclic GFR-binding peptide
  MOD_RES (3), (4), (35): Xaa is C or S
STXXAPVKTSAISMLYLDNGRVLLLKNYQMIVEEXG

SEQ ID NO: 37893 - protein, 42 aa, Artificial Sequence
  Non-cyclic GFR-binding peptide
  MOD_RES (6), (7), (39), (41): Xaa is C or S
KASKAXXVPTKLSAISILYLDKGVVTYLKNYQGMAVSEXGXR

SEQ ID NO: 37894 - protein, 35 aa, Artificial Sequence
  Non-cyclic GFR-binding peptide
  MOD_RES (1), (2), (33), (35): Xaa is C or S
XXAPVKTSAISMLYLDNGRVLLLKNYQMIVEEXGX

SEQ ID NO: 37895 - protein, 37 aa, Artificial Sequence
  Non-cyclic GFR-binding peptide
  MOD_RES (2), (3), (35), (37): Xaa is C or S
PXXVPEKMSAISILYLDENKNVVLKNYQNMTVESXAX

SEQ ID NO: 37896 - protein, 39 aa, Artificial Sequence
  Non-cyclic GFR-binding peptide
  MOD_RES (2), (3), (37), (39): Xaa is C or S
  MOD_RES (17), (18), (19), (20), (21): Xaa is A or G
  MOD_RES (22), (23), (24), (25): Xaa is A or G or is absent
SXXVPARLSAISILYLXXXXXXXXXLKNYQDMVVEAXGX

SEQ ID NO: 37897 - protein, 40 aa, Artificial Sequence
  Non-cyclic GFR-binding peptide
  MOD_RES (6), (7), (40): Xaa is C or S
  MOD_RES (21), (22), (23), (24), (25): Xaa is A or G
  MOD_RES (26), (27), (28), (29): Xaa is A or G or is absent
RVPSTXXAPVKTSAISMLYLXXXXXXXXXLKNYQMIVEEX

SEQ ID NO: 37898 - protein, 39 aa, Artificial Sequence
  Non-cyclic GFR-binding peptide
  MOD_RES (3), (4), (37), (39): Xaa is C or S
  MOD_RES (18), (19), (20), (21), (22): Xaa is A or G
  MOD_RES (23), (24), (25), (26): Xaa is A or G or is absent
STXXAPVKTSAISMLYLXXXXXXXXXLKNYQMIVEEXGX

SEQ ID NO: 37899 - protein, 35 aa, Artificial Sequence
  Non-cyclic GFR-binding peptide
  MOD_RES (3), (4): Xaa is C or S
ASXXVPARLSAISILYLDAANNVVLKNYQDMVVEA

SEQ ID NO: 37900 - protein, 34 aa, Artificial Sequence
  Non-cyclic GFR-binding peptide
  MOD_RES (1), (33): Xaa is C or S
XTPTKMSAISMLYLNDKQQIILKNYQGMVVDRXG

SEQ ID NO: 37901 - protein, 34 aa, Artificial Sequence
  Non-cyclic GFR-binding peptide
  MOD_RES (1), (2): Xaa is C or S
  MOD_RES (16), (17), (18), (19), (20): Xaa is A or G
  MOD_RES (21), (22), (23), (24): Xaa is A or G or is absent
XXVPARLSAISILYLXXXXXXXXXLKNYQDMVVE

SEQ ID NO: 37902 - protein, 40 aa, Artificial Sequence
  Non-cyclic GFR-binding peptide
  MOD_RES (4), (5), (39): Xaa is C or S
  MOD_RES (19), (20), (21), (22), (23): Xaa is A or G
  MOD_RES (24), (25), (26), (27): Xaa is A or G or is absent
SKAXXVPTKLSAISILYLXXXXXXXXXLKNYQGMAVSEXG

SEQ ID NO: 37903 - protein, 37 aa, Artificial Sequence
  Non-cyclic GFR-binding peptide
  MOD_RES (2), (3), (37): Xaa is C or S
  MOD_RES (17), (18), (19), (20), (21): Xaa is A or G
  MOD_RES (22), (23), (24), (25): Xaa is A or G or is absent
AXXVPTKLSAISILYLXXXXXXXXXLKNYQGMAVSEX

SEQ ID NO: 37904 - protein, 37 aa, Artificial Sequence
  Non-cyclic GFR-binding peptide
  MOD_RES (1), (35), (37): Xaa is C or S
  MOD_RES (15), (16), (17), (18), (19): Xaa is A or G
  MOD_RES (20), (21), (22), (23): Xaa is A or G or is absent
XVPARLSAISILYLXXXXXXXXXLKNYQDMVVEAXGX

SEQ ID NO: 37905 - protein, 35 aa, Artificial Sequence
  Non-cyclic GFR-binding peptide
  MOD_RES (2), (3): Xaa is C or S
  MOD_RES (17), (18), (19), (20), (21): Xaa is A or G
  MOD_RES (22), (23), (24), (25): Xaa is A or G or is absent
SXXVPARLSAISILYLXXXXXXXXXLKNYQDMVVE

SEQ ID NO: 37906 - protein, 38 aa, Artificial Sequence
  Non-cyclic GFR-binding peptide
  MOD_RES (4), (5): Xaa is C or S
  MOD_RES (19), (20), (21), (22), (23): Xaa is A or G
  MOD_RES (24), (25), (26), (27): Xaa is A or G or is absent
PASXXVPARLSAISILYLXXXXXXXXXLKNYQDMVVEA

SEQ ID NO: 37907 - protein, 42 aa, Artificial Sequence
  Non-cyclic GFR-binding peptide
  MOD_RES (6), (7), (39), (41): Xaa is C or S
AAPASXXVPARLSAISILYLDAANNVVLKNYQDMVVEAXGXR

SEQ ID NO: 37908 - protein, 37 aa, Artificial Sequence
  Non-cyclic GFR-binding peptide
  MOD_RES (2), (3), (35), (37): Xaa is C or S
SXXVPARLSAISILYLDAANNVVLKNYQDMVVEAXGX

SEQ ID NO: 37909 - protein, 38 aa, Artificial Sequence
  Non-cyclic GFR-binding peptide
  MOD_RES (3), (4), (36), (38): Xaa is C or S
EPXXVPEKMSAISILYLDENKNVVLKNYQNMTVESXAX

SEQ ID NO: 37910 - protein, 36 aa, Artificial Sequence
  Non-cyclic GFR-binding peptide
  MOD_RES (2), (3): Xaa is C or S
  MOD_RES (17), (18), (19), (20), (21): Xaa is A or G
  MOD_RES (22), (23), (24), (25): Xaa is A or G or is absent
AXXVPTKLSAISILYLXXXXXXXXXLKNYQGMAVSE

SEQ ID NO: 37911 - protein, 38 aa, Artificial Sequence
  Non-cyclic GFR-binding peptide
  MOD_RES (1), (2), (36), (38): Xaa is C or S
  MOD_RES (16), (17), (18), (19), (20): Xaa is A or G
  MOD_RES (21), (22), (23), (24): Xaa is A or G or is absent
XXVPEKMSAISILYLXXXXXXXXXLKNYQNMTVESXAX

SEQ ID NO: 37912 - protein, 35 aa, Artificial Sequence
  Non-cyclic GFR-binding peptide
  MOD_RES (2), (3): Xaa is C or S
  MOD_RES (17), (18), (19), (20), (21): Xaa is A or G
  MOD_RES (22), (23), (24), (25): Xaa is A or G or is absent
PXXTPTKMSAISMLYLXXXXXXXXXLKNYQGMVVD

SEQ ID NO: 37913 - protein, 35 aa, Artificial Sequence
  Non-cyclic GFR-binding peptide
  MOD_RES (2), (3): Xaa is C or S
  MOD_RES (17), (18), (19), (20), (21): Xaa is A or G
  MOD_RES (22), (23), (24), (25): Xaa is A or G or is absent
AXXVPTKLSAISILYLXXXXXXXXXLKNYQGMAVS

SEQ ID NO: 37914 - protein, 39 aa, Artificial Sequence
  Non-cyclic GFR-binding peptide
  MOD_RES (4), (5), (37), (39): Xaa is C or S
PEPXXVPEKMSAISILYLDENKNVVLKNYQNMTVESXAX

SEQ ID NO: 37915 - protein, 36 aa, Artificial Sequence
  Non-cyclic GFR-binding peptide
  MOD_RES (1), (34), (36): Xaa is C or S
  MOD_RES (15), (16), (17), (18), (19): Xaa is A or G
  MOD_RES (20), (21), (22), (23): Xaa is A or G or is absent
XAPVKTSAISMLYLXXXXXXXXXLKNYQMIVEEXGX

SEQ ID NO: 37916 - protein, 34 aa, Artificial Sequence
  Non-cyclic GFR-binding peptide
  MOD_RES (31), (33): Xaa is C or S
APVKTSAISMLYLDNGRVLLLKNYQMIVEEXGXL

SEQ ID NO: 37917 - protein, 32 aa, Artificial Sequence
  Non-cyclic GFR-binding peptide
  MOD_RES (1), (32): Xaa is C or S
XAPVKTSAISMLYLDNGRVLLLKNYQMIVEEX

SEQ ID NO: 37918 - protein, 37 aa, Artificial Sequence
  Non-cyclic GFR-binding peptide
  MOD_RES (3), (4), (36): Xaa is C or S
EPXXVPEKMSAISILYLDENKNVVLKNYQNMTVESXA

SEQ ID NO: 37919 - protein, 39 aa, Artificial Sequence
  Non-cyclic GFR-binding peptide
  MOD_RES (4), (5), (37), (39): Xaa is C or S
SKAXXVPTKLSAISILYLDKGVVTYLKNYQGMAVSEXGX

SEQ ID NO: 37920 - protein, 39 aa, Artificial Sequence
  Non-cyclic GFR-binding peptide
  MOD_RES (5), (6): Xaa is C or S
  MOD_RES (20), (21), (22), (23), (24): Xaa is A or G
  MOD_RES (25), (26), (27), (28): Xaa is A or G or is absent
APASXXVPARLSAISILYLXXXXXXXXXLKNYQDMVVEA

SEQ ID NO: 37921 - protein, 36 aa, Artificial Sequence
  Non-cyclic GFR-binding peptide
  MOD_RES (1), (33), (35): Xaa is C or S
XVPEKMSAISILYLDENKNVVLKNYQNMTVESXAXR

SEQ ID NO: 37922 - protein, 44 aa, Artificial Sequence
  Non-cyclic GFR-binding peptide
  MOD_RES (6), (7), (41), (43): Xaa is C or S
  MOD_RES (21), (22), (23), (24), (25): Xaa is A or G
  MOD_RES (26), (27), (28), (29): Xaa is A or G or is absent
HVPKPXXAPTKLSAISVLYLXXXXXXXXXLKNYQNMVVRSXGXH

SEQ ID NO: 37923 - protein, 37 aa, Artificial Sequence
  Non-cyclic GFR-binding peptide
  MOD_RES (1), (2), (34), (36): Xaa is C or S
XXVPTKLSAISILYLDKGVVTYLKNYQGMAVSEXGXR

SEQ ID NO: 37924 - protein, 34 aa, Artificial Sequence
  Non-cyclic GFR-binding peptide
  MOD_RES (32), (34): Xaa is C or S
VPARLSAISILYLDAANNVVLKNYQDMVVEAXGX

SEQ ID NO: 37925 - protein, 37 aa, Artificial Sequence
  Non-cyclic GFR-binding peptide
  MOD_RES (34), (36): Xaa is C or S
  MOD_RES (14), (15), (16), (17), (18): Xaa is A or G
  MOD_RES (19), (20), (21), (22): Xaa is A or G or is absent
VPEKMSAISILYLXXXXXXXXXLKNYQNMTVESXAXR

SEQ ID NO: 37926 - protein, 35 aa, Artificial Sequence
  Non-cyclic GFR-binding peptide
  MOD_RES (4), (5): Xaa is C or S
PSTXXAPVKTSAISMLYLDNGRVLLLKNYQMIVEE

SEQ ID NO: 37927 - protein, 37 aa, Artificial Sequence
  Non-cyclic GFR-binding peptide
  MOD_RES (3), (4), (36): Xaa is C or S
KAXXVPTKLSAISILYLDKGVVTYLKNYQGMAVSEXG

SEQ ID NO: 37928 - protein, 36 aa, Artificial Sequence
  Non-cyclic GFR-binding peptide
  MOD_RES (2), (3), (35): Xaa is C or S
PXXTPTKMSAISMLYLNDKQQIILKNYQGMVVDRXG

SEQ ID NO: 37929 - protein, 38 aa, Artificial Sequence
  Non-cyclic GFR-binding peptide
  MOD_RES (4), (5), (36), (38): Xaa is C or S
PSTXXAPVKTSAISMLYLDNGRVLLLKNYQMIVEEXGX

SEQ ID NO: 37930 - protein, 30 aa, Artificial Sequence
  Non-cyclic GFR-binding peptide
VPEKMSAISILYLDENKNVVLKNYQNMTVE

SEQ ID NO: 37931 - protein, 40 aa, Artificial Sequence
  Non-cyclic GFR-binding peptide
  MOD_RES (6), (7), (39): Xaa is C or S
GIPEPXXVPEKMSAISILYLDENKNVVLKNYQNMTVESXA

SEQ ID NO: 37932 - protein, 34 aa, Artificial Sequence
  Non-cyclic GFR-binding peptide
  MOD_RES (1), (2): Xaa is C or S
  MOD_RES (16), (17), (18), (19), (20): Xaa is A or G
  MOD_RES (21), (22), (23), (24): Xaa is A or G or is absent
XXVPTKLSAISILYLXXXXXXXXXLKNYQGMAVS

SEQ ID NO: 37933 - protein, 33 aa, Artificial Sequence
  Non-cyclic GFR-binding peptide
  MOD_RES (32), (32): Xaa is C or S
VPEKMSAISILYLDENKNVVLKNYQNMTVESXA

SEQ ID NO: 37934 - protein, 36 aa, Artificial Sequence
  Non-cyclic GFR-binding peptide
  MOD_RES (2), (3): Xaa is C or S
  MOD_RES (17), (18), (19), (20), (21): Xaa is A or G
  MOD_RES (22), (23), (24), (25): Xaa is A or G or is absent
PXXTPTKMSAISMLYLXXXXXXXXXLKNYQGMVVDR

SEQ ID NO: 37935 - protein, 36 aa, Artificial Sequence
  Non-cyclic GFR-binding peptide
  MOD_RES (5), (6): Xaa is C or S
VPSTXXAPVKTSAISMLYLDNGRVLLLKNYQMIVEE

SEQ ID NO: 37936 - protein, 39 aa, Artificial Sequence
  Non-cyclic GFR-binding peptide
  MOD_RES (4), (5), (39): Xaa is C or S
  MOD_RES (19), (20), (21), (22), (23): Xaa is A or G
  MOD_RES (24), (25), (26), (27): Xaa is A or G or is absent
AGPXXTPTKMSAISMLYLXXXXXXXXXLKNYQGMVVDRX

SEQ ID NO: 37937 - protein, 31 aa, Artificial Sequence
  Non-cyclic GFR-binding peptide
  MOD_RES (31), (31): Xaa is C or S
APVKTSAISMLYLDNGRVLLLKNYQMIVEEX

SEQ ID NO: 37938 - protein, 41 aa, Artificial Sequence
  Non-cyclic GFR-binding peptide
  MOD_RES (5), (6), (39), (41): Xaa is C or S
  MOD_RES (20), (21), (22), (23), (24): Xaa is A or G
  MOD_RES (25), (26), (27), (28): Xaa is A or G or is absent
VPSTXXAPVKTSAISMLYLXXXXXXXXXLKNYQMIVEEXGX

SEQ ID NO: 37939 - protein, 43 aa, Artificial Sequence
  Non-cyclic GFR-binding peptide
  MOD_RES (6), (7), (41), (43): Xaa is C or S
  MOD_RES (21), (22), (23), (24), (25): Xaa is A or G
  MOD_RES (26), (27), (28), (29): Xaa is A or G or is absent
AAPASXXVPARLSAISILYLXXXXXXXXXLKNYQDMVVEAXGX

SEQ ID NO: 37940 - protein, 39 aa, Artificial Sequence
  Non-cyclic GFR-binding peptide
  MOD_RES (5), (6): Xaa is C or S
  MOD_RES (20), (21), (22), (23), (24): Xaa is A or G
  MOD_RES (25), (26), (27), (28): Xaa is A or G or is absent
IPEPXXVPEKMSAISILYLXXXXXXXXXLKNYQNMTVES

SEQ ID NO: 37941 - protein, 40 aa, Artificial Sequence
  Non-cyclic GFR-binding peptide
  MOD_RES (3), (4), (38), (40): Xaa is C or S
  MOD_RES (18), (19), (20), (21), (22): Xaa is A or G
  MOD_RES (23), (24), (25), (26): Xaa is A or G or is absent
KAXXVPTKLSAISILYLXXXXXXXXXLKNYQGMAVSEXGX

SEQ ID NO: 37942 - protein, 37 aa, Artificial Sequence
  Non-cyclic GFR-binding peptide
  MOD_RES (4), (5): Xaa is C or S
  MOD_RES (19), (20), (21), (22), (23): Xaa is A or G
  MOD_RES (24), (25), (26), (27): Xaa is A or G or is absent
PASXXVPARLSAISILYLXXXXXXXXXLKNYQDMVVE

SEQ ID NO: 37943 - protein, 43 aa, Artificial Sequence
  Non-cyclic GFR-binding peptide
  MOD_RES (5), (6), (40), (42): Xaa is C or S
  MOD_RES (20), (21), (22), (23), (24): Xaa is A or G
  MOD_RES (25), (26), (27), (28): Xaa is A or G or is absent
APASXXVPARLSAISILYLXXXXXXXXXLKNYQDMVVEAXGXR

SEQ ID NO: 37944 - protein, 39 aa, Artificial Sequence
  Non-cyclic GFR-binding peptide
  MOD_RES (6), (7), (38): Xaa is C or S
RVPSTXXAPVKTSAISMLYLDNGRVLLLKNYQMIVEEXG

SEQ ID NO: 37945 - protein, 38 aa, Artificial Sequence
  Non-cyclic GFR-binding peptide
  MOD_RES (1), (2), (36), (38): Xaa is C or S
  MOD_RES (16), (17), (18), (19), (20): Xaa is A or G
  MOD_RES (21), (22), (23), (24): Xaa is A or G or is absent
XXTPTKMSAISMLYLXXXXXXXXXLKNYQGMVVDRXGX

SEQ ID NO: 37946 - protein, 36 aa, Artificial Sequence
  Non-cyclic GFR-binding peptide
  MOD_RES (1), (33), (35): Xaa is C or S
XVPTKLSAISILYLDKGVVTYLKNYQGMAVSEXGXR

SEQ ID NO: 37947 - protein, 36 aa, Artificial Sequence
  Non-cyclic GFR-binding peptide
  MOD_RES (1), (35): Xaa is C or S
  MOD_RES (15), (16), (17), (18), (19): Xaa is A or G
  MOD_RES (20), (21), (22), (23): Xaa is A or G or is absent
XVPEKMSAISILYLXXXXXXXXXLKNYQNMTVESXA

SEQ ID NO: 37948 - protein, 34 aa, Artificial Sequence
  Non-cyclic GFR-binding peptide
  MOD_RES (3), (4): Xaa is C or S
EPXXVPEKMSAISILYLDENKNVVLKNYQNMTVE

SEQ ID NO: 37949 - protein, 36 aa, Artificial Sequence
  Non-cyclic GFR-binding peptide
  MOD_RES (4), (5): Xaa is C or S
PEPXXVPEKMSAISILYLDENKNVVLKNYQNMTVES

SEQ ID NO: 37950 - protein, 40 aa, Artificial Sequence
  Non-cyclic GFR-binding peptide
  MOD_RES (5), (6), (37), (39): Xaa is C or S
VPSTXXAPVKTSAISMLYLDNGRVLLLKNYQMIVEEXGXL

SEQ ID NO: 37951 - protein, 41 aa, Artificial Sequence
  Non-cyclic GFR-binding peptide
  MOD_RES (5), (6), (38), (40): Xaa is C or S
APASXXVPARLSAISILYLDAANNVVLKNYQDMVVEAXGXR

SEQ ID NO: 37952 - protein, 39 aa, Artificial Sequence
  Non-cyclic GFR-binding peptide
  MOD_RES (5), (6), (38): Xaa is C or S
APASXXVPARLSAISILYLDAANNVVLKNYQDMVVEAXG

SEQ ID NO: 37953 - protein, 35 aa, Artificial Sequence
  Non-cyclic GFR-binding peptide
  MOD_RES (1), (2): Xaa is C or S
  MOD_RES (16), (17), (18), (19), (20): Xaa is A or G
  MOD_RES (21), (22), (23), (24): Xaa is A or G or is absent
XXVPTKLSAISILYLXXXXXXXXXLKNYQGMAVSE

SEQ ID NO: 37954 - protein, 33 aa, Artificial Sequence
  Non-cyclic GFR-binding peptide
  MOD_RES (2), (3): Xaa is C or S
PXXTPTKMSAISMLYLNDKQQIILKNYQGMVVD

SEQ ID NO: 37955 - protein, 43 aa, Artificial Sequence
  Non-cyclic GFR-binding peptide
  MOD_RES (6), (7), (41), (43): Xaa is C or S
  MOD_RES (21), (22), (23), (24), (25): Xaa is A or G
  MOD_RES (26), (27), (28), (29): Xaa is A or G or is absent
GIPEPXXVPEKMSAISILYLXXXXXXXXXLKNYQNMTVESXAX

SEQ ID NO: 37956 - protein, 35 aa, Artificial Sequence
  Non-cyclic GFR-binding peptide
  MOD_RES (32), (34): Xaa is C or S
VPARLSAISILYLDAANNVVLKNYQDMVVEAXGXR

SEQ ID NO: 37957 - protein, 37 aa, Artificial Sequence
  Non-cyclic GFR-binding peptide
  MOD_RES (5), (6): Xaa is C or S
IPEPXXVPEKMSAISILYLDENKNVVLKNYQNMTVES

SEQ ID NO: 37958 - protein, 37 aa, Artificial Sequence
  Non-cyclic GFR-binding peptide
  MOD_RES (6), (7): Xaa is C or S
HVPKPXXAPTKLSAISVLYLDDSSNVILKNYQNMVVR

SEQ ID NO: 37959 - protein, 40 aa, Artificial Sequence
  Non-cyclic GFR-binding peptide
  MOD_RES (2), (3), (37), (39): Xaa is C or S
  MOD_RES (17), (18), (19), (20), (21): Xaa is A or G
  MOD_RES (22), (23), (24), (25): Xaa is A or G or is absent
PXXVPEKMSAISILYLXXXXXXXXXLKNYQNMTVESXAXR

SEQ ID NO: 37960 - protein, 42 aa, Artificial Sequence
  Non-cyclic GFR-binding peptide
  MOD_RES (6), (7), (41): Xaa is C or S
  MOD_RES (21), (22), (23), (24), (25): Xaa is A or G
  MOD_RES (26), (27), (28), (29): Xaa is A or G or is absent
KASKAXXVPTKLSAISILYLXXXXXXXXXLKNYQGMAVSEXG

SEQ ID NO: 37961 - protein, 42 aa, Artificial Sequence
  Non-cyclic GFR-binding peptide
  MOD_RES (5), (6), (40), (42): Xaa is C or S
  MOD_RES (20), (21), (22), (23), (24): Xaa is A or G
  MOD_RES (25), (26), (27), (28): Xaa is A or G or is absent
ASKAXXVPTKLSAISILYLXXXXXXXXXLKNYQGMAVSEXGX

SEQ ID NO: 37962 - protein, 41 aa, Artificial Sequence
  Non-cyclic GFR-binding peptide
  MOD_RES (6), (7), (41): Xaa is C or S
  MOD_RES (21), (22), (23), (24), (25): Xaa is A or G
  MOD_RES (26), (27), (28), (29): Xaa is A or G or is absent
AAPASXXVPARLSAISILYLXXXXXXXXXLKNYQDMVVEAX

SEQ ID NO: 37963 - protein, 42 aa, Artificial Sequence
  Non-cyclic GFR-binding peptide
  MOD_RES (4), (5), (39), (41): Xaa is C or S
  MOD_RES (19), (20), (21), (22), (23): Xaa is A or G
  MOD_RES (24), (25), (26), (27): Xaa is A or G or is absent
SKAXXVPTKLSAISILYLXXXXXXXXXLKNYQGMAVSEXGXR

SEQ ID NO: 37964 - protein, 34 aa, Artificial Sequence
  Non-cyclic GFR-binding peptide
  MOD_RES (1), (2): Xaa is C or S
  MOD_RES (16), (17), (18), (19), (20): Xaa is A or G
  MOD_RES (21), (22), (23), (24): Xaa is A or G or is absent
XXAPVKTSAISMLYLXXXXXXXXXLKNYQMIVEE

SEQ ID NO: 37965 - protein, 39 aa, Artificial Sequence
  Non-cyclic GFR-binding peptide
  MOD_RES (6), (7): Xaa is C or S
  MOD_RES (21), (22), (23), (24), (25): Xaa is A or G
  MOD_RES (26), (27), (28), (29): Xaa is A or G or is absent
AAPASXXVPARLSAISILYLXXXXXXXXXLKNYQDMVVE

SEQ ID NO: 37966 - protein, 39 aa, Artificial Sequence
  Non-cyclic GFR-binding peptide
  MOD_RES (4), (5), (38): Xaa is C or S
  MOD_RES (19), (20), (21), (22), (23): Xaa is A or G
  MOD_RES (24), (25), (26), (27): Xaa is A or G or is absent
PSTXXAPVKTSAISMLYLXXXXXXXXXLKNYQMIVEEXG

SEQ ID NO: 37967 - protein, 40 aa, Artificial Sequence
  Non-cyclic GFR-binding peptide
  MOD_RES (4), (5), (37), (39): Xaa is C or S
PASXXVPARLSAISILYLDAANNVVLKNYQDMVVEAXGXR

SEQ ID NO: 37968 - protein, 40 aa, Artificial Sequence
  Non-cyclic GFR-binding peptide
  MOD_RES (6), (7), (39): Xaa is C or S
KASKAXXVPTKLSAISILYLDKGVVTYLKNYQGMAVSEXG

SEQ ID NO: 37969 - protein, 36 aa, Artificial Sequence
  Non-cyclic GFR-binding peptide
  MOD_RES (1), (33), (35): Xaa is C or S
XVPARLSAISILYLDAANNVVLKNYQDMVVEAXGXR

SEQ ID NO: 37970 - protein, 37 aa, Artificial Sequence
  Non-cyclic GFR-binding peptide
  MOD_RES (1), (2), (35), (37): Xaa is C or S
  MOD_RES (16), (17), (18), (19), (20): Xaa is A or G
  MOD_RES (21), (22), (23), (24): Xaa is A or G or is absent
XXAPVKTSAISMLYLXXXXXXXXXLKNYQMIVEEXGX

SEQ ID NO: 37971 - protein, 41 aa, Artificial Sequence
  Non-cyclic GFR-binding peptide
  MOD_RES (3), (4), (38), (40): Xaa is C or S
  MOD_RES (18), (19), (20), (21), (22): Xaa is A or G
  MOD_RES (23), (24), (25), (26): Xaa is A or G or is absent
EPXXVPEKMSAISILYLXXXXXXXXXLKNYQNMTVESXAXR

SEQ ID NO: 37972 - protein, 34 aa, Artificial Sequence
  Non-cyclic GFR-binding peptide
  MOD_RES (3), (4): Xaa is C or S
ASXXVPARLSAISILYLDAANNVVLKNYQDMVVE

SEQ ID NO: 37973 - protein, 37 aa, Artificial Sequence
  Non-cyclic GFR-binding peptide
  MOD_RES (34), (36): Xaa is C or S
  MOD_RES (14), (15), (16), (17), (18): Xaa is A or G
  MOD_RES (19), (20), (21), (22): Xaa is A or G or is absent
TPTKMSAISMLYLXXXXXXXXXLKNYQGMVVDRXGXS

SEQ ID NO: 37974 - protein, 40 aa, Artificial Sequence
  Non-cyclic GFR-binding peptide
  MOD_RES (2), (3), (37), (39): Xaa is C or S
  MOD_RES (17), (18), (19), (20), (21): Xaa is A or G
  MOD_RES (22), (23), (24), (25): Xaa is A or G or is absent
SXXVPARLSAISILYLXXXXXXXXXLKNYQDMVVEAXGXR

SEQ ID NO: 37975 - protein, 35 aa, Artificial Sequence
  Non-cyclic GFR-binding peptide
  MOD_RES (32), (34): Xaa is C or S
VPEKMSAISILYLDENKNVVLKNYQNMTVESXAXR

SEQ ID NO: 37976 - protein, 38 aa, Artificial Sequence
  Non-cyclic GFR-binding peptide
  MOD_RES (2), (3), (35), (37): Xaa is C or S
PXXTPTKMSAISMLYLNDKQQIILKNYQGMVVDRXGXS

SEQ ID NO: 37977 - protein, 38 aa, Artificial Sequence
  Non-cyclic GFR-binding peptide
  MOD_RES (2), (3), (36), (38): Xaa is C or S
  MOD_RES (17), (18), (19), (20), (21): Xaa is A or G
  MOD_RES (22), (23), (24), (25): Xaa is A or G or is absent
TXXAPVKTSAISMLYLXXXXXXXXXLKNYQMIVEEXGX

SEQ ID NO: 37978 - protein, 32 aa, Artificial Sequence
  Non-cyclic GFR-binding peptide
  MOD_RES (1), (1): Xaa is C or S
XTPTKMSAISMLYLNDKQQIILKNYQGMVVDR

SEQ ID NO: 37979 - protein, 36 aa, Artificial Sequence
  Non-cyclic GFR-binding peptide
  MOD_RES (2), (3), (36): Xaa is C or S
  MOD_RES (17), (18), (19), (20), (21): Xaa is A or G
  MOD_RES (22), (23), (24), (25): Xaa is A or G or is absent
TXXAPVKTSAISMLYLXXXXXXXXXLKNYQMIVEEX

SEQ ID NO: 37980 - protein, 37 aa, Artificial Sequence
  Non-cyclic GFR-binding peptide
  MOD_RES (6), (7): Xaa is C or S
GIPEPXXVPEKMSAISILYLDENKNVVLKNYQNMTVE

SEQ ID NO: 37981 - protein, 36 aa, Artificial Sequence
  Non-cyclic GFR-binding peptide
  MOD_RES (3), (4): Xaa is C or S
  MOD_RES (18), (19), (20), (21), (22): Xaa is A or G
  MOD_RES (23), (24), (25), (26): Xaa is A or G or is absent
EPXXVPEKMSAISILYLXXXXXXXXXLKNYQNMTVE

SEQ ID NO: 37982 - protein, 42 aa, Artificial Sequence
  Non-cyclic GFR-binding peptide
  MOD_RES (6), (7), (39), (41): Xaa is C or S
GIPEPXXVPEKMSAISILYLDENKNVVLKNYQNMTVESXAXR

SEQ ID NO: 37983 - protein, 37 aa, Artificial Sequence
  Non-cyclic GFR-binding peptide
  MOD_RES (6), (7): Xaa is C or S
AAPASXXVPARLSAISILYLDAANNVVLKNYQDMVVE

SEQ ID NO: 37984 - protein, 37 aa, Artificial Sequence
  Non-cyclic GFR-binding peptide
  MOD_RES (34), (36): Xaa is C or S
  MOD_RES (14), (15), (16), (17), (18): Xaa is A or G
  MOD_RES (19), (20), (21), (22): Xaa is A or G or is absent
VPTKLSAISILYLXXXXXXXXXLKNYQGMAVSEXGXR

SEQ ID NO: 37985 - protein, 37 aa, Artificial Sequence
  Non-cyclic GFR-binding peptide
  MOD_RES (1), (35), (37): Xaa is C or S
  MOD_RES (15), (16), (17), (18), (19): Xaa is A or G
  MOD_RES (20), (21), (22), (23): Xaa is A or G or is absent
XVPTKLSAISILYLXXXXXXXXXLKNYQGMAVSEXGX

SEQ ID NO: 37986 - protein, 37 aa, Artificial Sequence
  Non-cyclic GFR-binding peptide
  MOD_RES (3), (4): Xaa is C or S
  MOD_RES (18), (19), (20), (21), (22): Xaa is A or G
  MOD_RES (23), (24), (25), (26): Xaa is A or G or is absent
GPXXTPTKMSAISMLYLXXXXXXXXXLKNYQGMVVDR

SEQ ID NO: 37987 - protein, 33 aa, Artificial Sequence
  Non-cyclic GFR-binding peptide
  MOD_RES (1), (33): Xaa is C or S
XVPARLSAISILYLDAANNVVLKNYQDMVVEAX

SEQ ID NO: 37988 - protein, 32 aa, Artificial Sequence
  Non-cyclic GFR-binding peptide
  MOD_RES (1), (2): Xaa is C or S
XXVPARLSAISILYLDAANNVVLKNYQDMVVE

SEQ ID NO: 37989 - protein, 41 aa, Artificial Sequence
  Non-cyclic GFR-binding peptide
  MOD_RES (4), (5), (38), (40): Xaa is C or S
  MOD_RES (19), (20), (21), (22), (23): Xaa is A or G
  MOD_RES (24), (25), (26), (27): Xaa is A or G or is absent
PSTXXAPVKTSAISMLYLXXXXXXXXXLKNYQMIVEEXGXL

SEQ ID NO: 37990 - protein, 35 aa, Artificial Sequence
  Non-cyclic GFR-binding peptide
  MOD_RES (33), (35): Xaa is C or S
  MOD_RES (14), (15), (16), (17), (18): Xaa is A or G
  MOD_RES (19), (20), (21), (22): Xaa is A or G or is absent
APVKTSAISMLYLXXXXXXXXXLKNYQMIVEEXGX

SEQ ID NO: 37991 - protein, 39 aa, Artificial Sequence
  Non-cyclic GFR-binding peptide
  MOD_RES (2), (3), (37), (39): Xaa is C or S
  MOD_RES (17), (18), (19), (20), (21): Xaa is A or G
  MOD_RES (22), (23), (24), (25): Xaa is A or G or is absent
AXXVPTKLSAISILYLXXXXXXXXXLKNYQGMAVSEXGX

SEQ ID NO: 37992 - protein, 37 aa, Artificial Sequence
  Non-cyclic GFR-binding peptide
  MOD_RES (4), (5): Xaa is C or S
  MOD_RES (19), (20), (21), (22), (23): Xaa is A or G
  MOD_RES (24), (25), (26), (27): Xaa is A or G or is absent
PSTXXAPVKTSAISMLYLXXXXXXXXXLKNYQMIVEE

SEQ ID NO: 37993 - protein, 37 aa, Artificial Sequence
  Non-cyclic GFR-binding peptide
  MOD_RES (1), (2), (34), (36): Xaa is C or S
XXVPEKMSAISILYLDENKNVVLKNYQNMTVESXAXR

SEQ ID NO: 37994 - protein, 41 aa, Artificial Sequence
  Non-cyclic GFR-binding peptide
  MOD_RES (5), (6), (40): Xaa is C or S
  MOD_RES (20), (21), (22), (23), (24): Xaa is A or G
  MOD_RES (25), (26), (27), (28): Xaa is A or G or is absent
ASKAXXVPTKLSAISILYLXXXXXXXXXLKNYQGMAVSEXG

SEQ ID NO: 37995 - protein, 41 aa, Artificial Sequence
  Non-cyclic GFR-binding peptide
  MOD_RES (4), (5), (39), (41): Xaa is C or S
  MOD_RES (19), (20), (21), (22), (23): Xaa is A or G
  MOD_RES (24), (25), (26), (27): Xaa is A or G or is absent
AGPXXTPTKMSAISMLYLXXXXXXXXXLKNYQGMVVDRXGX

SEQ ID NO: 37996 - protein, 38 aa, Artificial Sequence
  Non-cyclic GFR-binding peptide
  MOD_RES (6), (7): Xaa is C or S
AAPASXXVPARLSAISILYLDAANNVVLKNYQDMVVEA

SEQ ID NO: 37997 - protein, 31 aa, Artificial Sequence
  Non-cyclic GFR-binding peptide
  MOD_RES (1), (1): Xaa is C or S
XAPVKTSAISMLYLDNGRVLLLKNYQMIVEE

SEQ ID NO: 37998 - protein, 34 aa, Artificial Sequence
  Non-cyclic GFR-binding peptide
  MOD_RES (1), (2), (34): Xaa is C or S
XXTPTKMSAISMLYLNDKQQIILKNYQGMVVDRX

SEQ ID NO: 37999 - protein, 33 aa, Artificial Sequence
  Non-cyclic GFR-binding peptide
  MOD_RES (14), (15), (16), (17), (18): Xaa is A or G
  MOD_RES (19), (20), (21), (22): Xaa is A or G or is absent
TPTKMSAISMLYLXXXXXXXXXLKNYQGMVVDR

SEQ ID NO: 38000 - protein, 40 aa, Artificial Sequence
  Non-cyclic GFR-binding peptide
  MOD_RES (3), (4), (38), (40): Xaa is C or S
  MOD_RES (18), (19), (20), (21), (22): Xaa is A or G
  MOD_RES (23), (24), (25), (26): Xaa is A or G or is absent
ASXXVPARLSAISILYLXXXXXXXXXLKNYQDMVVEAXGX

SEQ ID NO: 38001 - protein, 36 aa, Artificial Sequence
  Non-cyclic GFR-binding peptide
  MOD_RES (34), (36): Xaa is C or S
  MOD_RES (14), (15), (16), (17), (18): Xaa is A or G
  MOD_RES (19), (20), (21), (22): Xaa is A or G or is absent
VPEKMSAISILYLXXXXXXXXXLKNYQNMTVESXAX

SEQ ID NO: 38002 - protein, 31 aa, Artificial Sequence
  Non-cyclic GFR-binding peptide
VPTKLSAISILYLDKGVVTYLKNYQGMAVSE

SEQ ID NO: 38003 - protein, 41 aa, Artificial Sequence
  Non-cyclic GFR-binding peptide
  MOD_RES (4), (5), (39), (41): Xaa is C or S
  MOD_RES (19), (20), (21), (22), (23): Xaa is A or G
  MOD_RES (24), (25), (26), (27): Xaa is A or G or is absent
SKAXXVPTKLSAISILYLXXXXXXXXXLKNYQGMAVSEXGX

SEQ ID NO: 38004 - protein, 41 aa, Artificial Sequence
  Non-cyclic GFR-binding peptide
  MOD_RES (5), (6), (38), (40): Xaa is C or S
SAGPXXTPTKMSAISMLYLNDKQQIILKNYQGMVVDRXGXS

SEQ ID NO: 38005 - protein, 34 aa, Artificial Sequence
  Non-cyclic GFR-binding peptide
  MOD_RES (1), (32), (34): Xaa is C or S
XAPVKTSAISMLYLDNGRVLLLKNYQMIVEEXGX

SEQ ID NO: 38006 - protein, 40 aa, Artificial Sequence
  Non-cyclic GFR-binding peptide
  MOD_RES (4), (5), (39): Xaa is C or S
  MOD_RES (19), (20), (21), (22), (23): Xaa is A or G
  MOD_RES (24), (25), (26), (27): Xaa is A or G or is absent
PEPXXVPEKMSAISILYLXXXXXXXXXLKNYQNMTVESXA

SEQ ID NO: 38007 - protein, 38 aa, Artificial Sequence
  Non-cyclic GFR-binding peptide
  MOD_RES (5), (6): Xaa is C or S
  MOD_RES (20), (21), (22), (23), (24): Xaa is A or G
  MOD_RES (25), (26), (27), (28): Xaa is A or G or is absent
ASKAXXVPTKLSAISILYLXXXXXXXXXLKNYQGMAVS

SEQ ID NO: 38008 - protein, 35 aa, Artificial Sequence
  Non-cyclic GFR-binding peptide
  MOD_RES (1), (2): Xaa is C or S
  MOD_RES (16), (17), (18), (19), (20): Xaa is A or G
  MOD_RES (21), (22), (23), (24): Xaa is A or G or is absent
XXVPARLSAISILYLXXXXXXXXXLKNYQDMVVEA

SEQ ID NO: 38009 - protein, 38 aa, Artificial Sequence
  Non-cyclic GFR-binding peptide
  MOD_RES (5), (6), (38): Xaa is C or S
SAGPXXTPTKMSAISMLYLNDKQQIILKNYQGMVVDRX

SEQ ID NO: 38010 - protein, 36 aa, Artificial Sequence
  Non-cyclic GFR-binding peptide
  MOD_RES (2), (3): Xaa is C or S
  MOD_RES (17), (18), (19), (20), (21): Xaa is A or G
  MOD_RES (22), (23), (24), (25): Xaa is A or G or is absent
PXXVPEKMSAISILYLXXXXXXXXXLKNYQNMTVES

SEQ ID NO: 38011 - protein, 36 aa, Artificial Sequence
  Non-cyclic GFR-binding peptide
  MOD_RES (3), (4): Xaa is C or S
  MOD_RES (18), (19), (20), (21), (22): Xaa is A or G
  MOD_RES (23), (24), (25), (26): Xaa is A or G or is absent
STXXAPVKTSAISMLYLXXXXXXXXXLKNYQMIVEE

SEQ ID NO: 38012 - protein, 39 aa, Artificial Sequence
  Non-cyclic GFR-binding peptide
  MOD_RES (6), (7): Xaa is C or S
  MOD_RES (21), (22), (23), (24), (25): Xaa is A or G
  MOD_RES (26), (27), (28), (29): Xaa is A or G or is absent
HVPKPXXAPTKLSAISVLYLXXXXXXXXXLKNYQNMVVR

SEQ ID NO: 38013 - protein, 38 aa, Artificial Sequence
  Non-cyclic GFR-binding peptide
  MOD_RES (3), (4), (36), (38): Xaa is C or S
ASXXVPARLSAISILYLDAANNVVLKNYQDMVVEAXGX

SEQ ID NO: 38014 - protein, 36 aa, Artificial Sequence
  Non-cyclic GFR-binding peptide
  MOD_RES (1), (2), (36): Xaa is C or S
  MOD_RES (16), (17), (18), (19), (20): Xaa is A or G
  MOD_RES (21), (22), (23), (24): Xaa is A or G or is absent
XXTPTKMSAISMLYLXXXXXXXXXLKNYQGMVVDRX

SEQ ID NO: 38015 - protein, 32 aa, Artificial Sequence
  Non-cyclic GFR-binding peptide
  MOD_RES (31), (31): Xaa is C or S
APVKTSAISMLYLDNGRVLLLKNYQMIVEEXG

SEQ ID NO: 38016 - protein, 38 aa, Artificial Sequence
  Non-cyclic GFR-binding peptide
  MOD_RES (5), (6), (38): Xaa is C or S
IPEPXXVPEKMSAISILYLDENKNVVLKNYQNMTVESX

SEQ ID NO: 38017 - protein, 38 aa, Artificial Sequence
  Non-cyclic GFR-binding peptide
  MOD_RES (2), (3), (35), (37): Xaa is C or S
SXXVPARLSAISILYLDAANNVVLKNYQDMVVEAXGXR

SEQ ID NO: 38018 - protein, 43 aa, Artificial Sequence
  Non-cyclic GFR-binding peptide
  MOD_RES (6), (7), (41), (43): Xaa is C or S
  MOD_RES (21), (22), (23), (24), (25): Xaa is A or G
  MOD_RES (26), (27), (28), (29): Xaa is A or G or is absent
GSAGPXXTPTKMSAISMLYLXXXXXXXXXLKNYQGMVVDRXGX

SEQ ID NO: 38019 - protein, 36 aa, Artificial Sequence
  Non-cyclic GFR-binding peptide
  MOD_RES (1), (2), (33), (35): Xaa is C or S
XXAPVKTSAISMLYLDNGRVLLLKNYQMIVEEXGXL

SEQ ID NO: 38020 - protein, 42 aa, Artificial Sequence
  Non-cyclic GFR-binding peptide
  MOD_RES (4), (5), (39), (41): Xaa is C or S
  MOD_RES (19), (20), (21), (22), (23): Xaa is A or G
  MOD_RES (24), (25), (26), (27): Xaa is A or G or is absent
PASXXVPARLSAISILYLXXXXXXXXXLKNYQDMVVEAXGXR

SEQ ID NO: 38021 - protein, 40 aa, Artificial Sequence
  Non-cyclic GFR-binding peptide
  MOD_RES (6), (7): Xaa is C or S
  MOD_RES (21), (22), (23), (24), (25): Xaa is A or G
  MOD_RES (26), (27), (28), (29): Xaa is A or G or is absent
GSAGPXXTPTKMSAISMLYLXXXXXXXXXLKNYQGMVVDR

SEQ ID NO: 38022 - protein, 35 aa, Artificial Sequence
  Non-cyclic GFR-binding peptide
  MOD_RES (2), (3), (35): Xaa is C or S
PXXVPEKMSAISILYLDENKNVVLKNYQNMTVESX

SEQ ID NO: 38023 - protein, 33 aa, Artificial Sequence
  Non-cyclic GFR-binding peptide
  MOD_RES (1), (1): Xaa is C or S
  MOD_RES (15), (16), (17), (18), (19): Xaa is A or G
  MOD_RES (20), (21), (22), (23): Xaa is A or G or is absent
XAPVKTSAISMLYLXXXXXXXXXLKNYQMIVEE

SEQ ID NO: 38024 - protein, 34 aa, Artificial Sequence
  Non-cyclic GFR-binding peptide
  MOD_RES (2), (3): Xaa is C or S
PXXVPEKMSAISILYLDENKNVVLKNYQNMTVES

SEQ ID NO: 38025 - protein, 35 aa, Artificial Sequence
  Non-cyclic GFR-binding peptide
  MOD_RES (1), (2), (35): Xaa is C or S
  MOD_RES (16), (17), (18), (19), (20): Xaa is A or G
  MOD_RES (21), (22), (23), (24): Xaa is A or G or is absent
XXAPVKTSAISMLYLXXXXXXXXXLKNYQMIVEEX

SEQ ID NO: 38026 - protein, 34 aa, Artificial Sequence
  Non-cyclic GFR-binding peptide
  MOD_RES (2), (3): Xaa is C or S
PXXTPTKMSAISMLYLNDKQQIILKNYQGMVVDR

SEQ ID NO: 38027 - protein, 32 aa, Artificial Sequence
  Non-cyclic GFR-binding peptide
  MOD_RES (14), (15), (16), (17), (18): Xaa is A or G
  MOD_RES (19), (20), (21), (22): Xaa is A or G or is absent
VPARLSAISILYLXXXXXXXXXLKNYQDMVVE

SEQ ID NO: 38028 - protein, 37 aa, Artificial Sequence
  Non-cyclic GFR-binding peptide
  MOD_RES (4), (5), (37): Xaa is C or S
PASXXVPARLSAISILYLDAANNVVLKNYQDMVVEAX

SEQ ID NO: 38029 - protein, 34 aa, Artificial Sequence
  Non-cyclic GFR-binding peptide
  MOD_RES (34), (34): Xaa is C or S
  MOD_RES (14), (15), (16), (17), (18): Xaa is A or G
  MOD_RES (19), (20), (21), (22): Xaa is A or G or is absent
VPARLSAISILYLXXXXXXXXXLKNYQDMVVEAX

SEQ ID NO: 38030 - protein, 39 aa, Artificial Sequence
  Non-cyclic GFR-binding peptide
  MOD_RES (6), (7), (39): Xaa is C or S
GIPEPXXVPEKMSAISILYLDENKNVVLKNYQNMTVESX

SEQ ID NO: 38031 - protein, 34 aa, Artificial Sequence
  Non-cyclic GFR-binding peptide
  MOD_RES (3), (4): Xaa is C or S
STXXAPVKTSAISMLYLDNGRVLLLKNYQMIVEE

SEQ ID NO: 38032 - protein, 39 aa, Artificial Sequence
  Non-cyclic GFR-binding peptide
  MOD_RES (4), (5), (37), (39): Xaa is C or S
AGPXXTPTKMSAISMLYLNDKQQIILKNYQGMVVDRXGX

SEQ ID NO: 38033 - protein, 37 aa, Artificial Sequence
  Non-cyclic GFR-binding peptide
  MOD_RES (6), (7): Xaa is C or S
RVPSTXXAPVKTSAISMLYLDNGRVLLLKNYQMIVEE

SEQ ID NO: 38034 - protein, 39 aa, Artificial Sequence
  Non-cyclic GFR-binding peptide
  MOD_RES (4), (5), (39): Xaa is C or S
  MOD_RES (19), (20), (21), (22), (23): Xaa is A or G
  MOD_RES (24), (25), (26), (27): Xaa is A or G or is absent
SKAXXVPTKLSAISILYLXXXXXXXXXLKNYQGMAVSEX

SEQ ID NO: 38035 - protein, 39 aa, Artificial Sequence
  Non-cyclic GFR-binding peptide
  MOD_RES (5), (6), (38): Xaa is C or S
IPEPXXVPEKMSAISILYLDENKNVVLKNYQNMTVESXA

SEQ ID NO: 38036 - protein, 39 aa, Artificial Sequence
  Non-cyclic GFR-binding peptide
  MOD_RES (3), (4), (36), (38): Xaa is C or S
GPXXTPTKMSAISMLYLNDKQQIILKNYQGMVVDRXGXS

SEQ ID NO: 38037 - protein, 44 aa, Artificial Sequence
  Non-cyclic GFR-binding peptide
  MOD_RES (6), (7), (41), (43): Xaa is C or S
  MOD_RES (21), (22), (23), (24), (25): Xaa is A or G
  MOD_RES (26), (27), (28), (29): Xaa is A or G or is absent
AAPASXXVPARLSAISILYLXXXXXXXXXLKNYQDMVVEAXGXR

SEQ ID NO: 38038 - protein, 34 aa, Artificial Sequence
  Non-cyclic GFR-binding peptide
  MOD_RES (1), (1): Xaa is C or S
  MOD_RES (15), (16), (17), (18), (19): Xaa is A or G
  MOD_RES (20), (21), (22), (23): Xaa is A or G or is absent
XVPTKLSAISILYLXXXXXXXXXLKNYQGMAVSE

SEQ ID NO: 38039 - protein, 36 aa, Artificial Sequence
  Non-cyclic GFR-binding peptide
  MOD_RES (34), (36): Xaa is C or S
  MOD_RES (14), (15), (16), (17), (18): Xaa is A or G
  MOD_RES (19), (20), (21), (22): Xaa is A or G or is absent
VPARLSAISILYLXXXXXXXXXLKNYQDMVVEAXGX

SEQ ID NO: 38040 - protein, 38 aa, Artificial Sequence
  Non-cyclic GFR-binding peptide
  MOD_RES (2), (3), (37): Xaa is C or S
  MOD_RES (17), (18), (19), (20), (21): Xaa is A or G
  MOD_RES (22), (23), (24), (25): Xaa is A or G or is absent
PXXVPEKMSAISILYLXXXXXXXXXLKNYQNMTVESXA

SEQ ID NO: 38041 - protein, 38 aa, Artificial Sequence
  Non-cyclic GFR-binding peptide
  MOD_RES (1), (35), (37): Xaa is C or S
  MOD_RES (15), (16), (17), (18), (19): Xaa is A or G
  MOD_RES (20), (21), (22), (23): Xaa is A or G or is absent
XVPTKLSAISILYLXXXXXXXXXLKNYQGMAVSEXGXR

SEQ ID NO: 38042 - protein, 38 aa, Artificial Sequence
  Non-cyclic GFR-binding peptide
  MOD_RES (6), (7): Xaa is C or S
KASKAXXVPTKLSAISILYLDKGVVTYLKNYQGMAVSE

SEQ ID NO: 38043 - protein, 41 aa, Artificial Sequence
  Non-cyclic GFR-binding peptide
  MOD_RES (6), (7), (41): Xaa is C or S
  MOD_RES (21), (22), (23), (24), (25): Xaa is A or G
  MOD_RES (26), (27), (28), (29): Xaa is A or G or is absent
HVPKPXXAPTKLSAISVLYLXXXXXXXXXLKNYQNMVVRSX

SEQ ID NO: 38044 - protein, 34 aa, Artificial Sequence
  Non-cyclic GFR-binding peptide
  MOD_RES (1), (2): Xaa is C or S
  MOD_RES (16), (17), (18), (19), (20): Xaa is A or G
  MOD_RES (21), (22), (23), (24): Xaa is A or G or is absent
XXVPEKMSAISILYLXXXXXXXXXLKNYQNMTVE

SEQ ID NO: 38045 - protein, 39 aa, Artificial Sequence
  Non-cyclic GFR-binding peptide
  MOD_RES (6), (7): Xaa is C or S
  MOD_RES (21), (22), (23), (24), (25): Xaa is A or G
  MOD_RES (26), (27), (28), (29): Xaa is A or G or is absent
GSAGPXXTPTKMSAISMLYLXXXXXXXXXLKNYQGMVVD

SEQ ID NO: 38046 - protein, 35 aa, Artificial Sequence
  Non-cyclic GFR-binding peptide
  MOD_RES (1), (35): Xaa is C or S
  MOD_RES (15), (16), (17), (18), (19): Xaa is A or G
  MOD_RES (20), (21), (22), (23): Xaa is A or G or is absent
XTPTKMSAISMLYLXXXXXXXXXLKNYQGMVVDRX

SEQ ID NO: 38047 - protein, 37 aa, Artificial Sequence
  Non-cyclic GFR-binding peptide
  MOD_RES (2), (3), (37): Xaa is C or S
  MOD_RES (17), (18), (19), (20), (21): Xaa is A or G
  MOD_RES (22), (23), (24), (25): Xaa is A or G or is absent
PXXTPTKMSAISMLYLXXXXXXXXXLKNYQGMVVDRX

SEQ ID NO: 38048 - protein, 41 aa, Artificial Sequence
  Non-cyclic GFR-binding peptide
  MOD_RES (6), (7), (41): Xaa is C or S
  MOD_RES (21), (22), (23), (24), (25): Xaa is A or G
  MOD_RES (26), (27), (28), (29): Xaa is A or G or is absent
GIPEPXXVPEKMSAISILYLXXXXXXXXXLKNYQNMTVESX

SEQ ID NO: 38049 - protein, 38 aa, Artificial Sequence
  Non-cyclic GFR-binding peptide
  MOD_RES (3), (4), (35), (37): Xaa is C or S
STXXAPVKTSAISMLYLDNGRVLLLKNYQMIVEEXGXL

SEQ ID NO: 38050 - protein, 33 aa, Artificial Sequence
  Non-cyclic GFR-binding peptide
  MOD_RES (32), (32): Xaa is C or S
VPARLSAISILYLDAANNVVLKNYQDMVVEAXG

SEQ ID NO: 38051 - protein, 37 aa, Artificial Sequence
  Non-cyclic GFR-binding peptide
  MOD_RES (2), (3), (37): Xaa is C or S
  MOD_RES (17), (18), (19), (20), (21): Xaa is A or G
  MOD_RES (22), (23), (24), (25): Xaa is A or G or is absent
SXXVPARLSAISILYLXXXXXXXXXLKNYQDMVVEAX

SEQ ID NO: 38052 - protein, 40 aa, Artificial Sequence
  Non-cyclic GFR-binding peptide
  MOD_RES (6), (7): Xaa is C or S
  MOD_RES (21), (22), (23), (24), (25): Xaa is A or G
  MOD_RES (26), (27), (28), (29): Xaa is A or G or is absent
KASKAXXVPTKLSAISILYLXXXXXXXXXLKNYQGMAVSE

SEQ ID NO: 38053 - protein, 33 aa, Artificial Sequence
  Non-cyclic GFR-binding peptide
  MOD_RES (2), (3): Xaa is C or S
AXXVPTKLSAISILYLDKGVVTYLKNYQGMAVS

SEQ ID NO: 38054 - protein, 38 aa, Artificial Sequence
  Non-cyclic GFR-binding peptide
  MOD_RES (2), (3), (37): Xaa is C or S
  MOD_RES (17), (18), (19), (20), (21): Xaa is A or G
  MOD_RES (22), (23), (24), (25): Xaa is A or G or is absent
SXXVPARLSAISILYLXXXXXXXXXLKNYQDMVVEAXG

SEQ ID NO: 38055 - protein, 37 aa, Artificial Sequence
  Non-cyclic GFR-binding peptide
  MOD_RES (1), (2), (34), (36): Xaa is C or S
XXVPARLSAISILYLDAANNVVLKNYQDMVVEAXGXR

SEQ ID NO: 38056 - protein, 44 aa, Artificial Sequence
  Non-cyclic GFR-binding peptide
  MOD_RES (6), (7), (41), (43): Xaa is C or S
  MOD_RES (21), (22), (23), (24), (25): Xaa is A or G
  MOD_RES (26), (27), (28), (29): Xaa is A or G or is absent
KASKAXXVPTKLSAISILYLXXXXXXXXXLKNYQGMAVSEXGXR

SEQ ID NO: 38057 - protein, 41 aa, Artificial Sequence
  Non-cyclic GFR-binding peptide
  MOD_RES (3), (4), (38), (40): Xaa is C or S
  MOD_RES (18), (19), (20), (21), (22): Xaa is A or G
  MOD_RES (23), (24), (25), (26): Xaa is A or G or is absent
ASXXVPARLSAISILYLXXXXXXXXXLKNYQDMVVEAXGXR

SEQ ID NO: 38058 - protein, 41 aa, Artificial Sequence
  Non-cyclic GFR-binding peptide
  MOD_RES (6), (7), (39), (41): Xaa is C or S
HVPKPXXAPTKLSAISVLYLDDSSNVILKNYQNMVVRSXGX

SEQ ID NO: 38059 - protein, 40 aa, Artificial Sequence
  Non-cyclic GFR-binding peptide
  MOD_RES (5), (6), (39): Xaa is C or S
  MOD_RES (20), (21), (22), (23), (24): Xaa is A or G
  MOD_RES (25), (26), (27), (28): Xaa is A or G or is absent
VPSTXXAPVKTSAISMLYLXXXXXXXXXLKNYQMIVEEXG

SEQ ID NO: 38060 - protein, 35 aa, Artificial Sequence
  Non-cyclic GFR-binding peptide
  MOD_RES (1), (2), (34): Xaa is C or S
XXVPEKMSAISILYLDENKNVVLKNYQNMTVESXA

SEQ ID NO: 38061 - protein, 41 aa, Artificial Sequence
  Non-cyclic GFR-binding peptide
  MOD_RES (6), (7), (39), (41): Xaa is C or S
GSAGPXXTPTKMSAISMLYLNDKQQIILKNYQGMVVDRXGX

SEQ ID NO: 38062 - protein, 33 aa, Artificial Sequence
  Non-cyclic GFR-binding peptide
  MOD_RES (32), (32): Xaa is C or S
VPTKLSAISILYLDKGVVTYLKNYQGMAVSEXG

SEQ ID NO: 38063 - protein, 41 aa, Artificial Sequence
  Non-cyclic GFR-binding peptide
  MOD_RES (6), (7), (40): Xaa is C or S
  MOD_RES (21), (22), (23), (24), (25): Xaa is A or G
  MOD_RES (26), (27), (28), (29): Xaa is A or G or is absent
RVPSTXXAPVKTSAISMLYLXXXXXXXXXLKNYQMIVEEXG

SEQ ID NO: 38064 - protein, 31 aa, Artificial Sequence
  Non-cyclic GFR-binding peptide
  MOD_RES (1), (1): Xaa is C or S
XVPARLSAISILYLDAANNVVLKNYQDMVVE

SEQ ID NO: 38065 - protein, 30 aa, Artificial Sequence
  Non-cyclic GFR-binding peptide
VPARLSAISILYLDAANNVVLKNYQDMVVE

SEQ ID NO: 38066 - protein, 39 aa, Artificial Sequence
  Non-cyclic GFR-binding peptide
  MOD_RES (2), (3), (36), (38): Xaa is C or S
  MOD_RES (17), (18), (19), (20), (21): Xaa is A or G
  MOD_RES (22), (23), (24), (25): Xaa is A or G or is absent
TXXAPVKTSAISMLYLXXXXXXXXXLKNYQMIVEEXGXL

SEQ ID NO: 38067 - protein, 39 aa, Artificial Sequence
  Non-cyclic GFR-binding peptide
  MOD_RES (3), (4), (36), (38): Xaa is C or S
ASXXVPARLSAISILYLDAANNVVLKNYQDMVVEAXGXR

SEQ ID NO: 38068 - protein, 38 aa, Artificial Sequence
  Non-cyclic GFR-binding peptide
  MOD_RES (2), (3), (37): Xaa is C or S
  MOD_RES (17), (18), (19), (20), (21): Xaa is A or G
  MOD_RES (22), (23), (24), (25): Xaa is A or G or is absent
AXXVPTKLSAISILYLXXXXXXXXXLKNYQGMAVSEXG

SEQ ID NO: 38069 - protein, 35 aa, Artificial Sequence
  Non-cyclic GFR-binding peptide
  MOD_RES (1), (2): Xaa is C or S
  MOD_RES (16), (17), (18), (19), (20): Xaa is A or G
  MOD_RES (21), (22), (23), (24): Xaa is A or G or is absent
XXTPTKMSAISMLYLXXXXXXXXXLKNYQGMVVDR

SEQ ID NO: 38070 - protein, 38 aa, Artificial Sequence
  Non-cyclic GFR-binding peptide
  MOD_RES (4), (5): Xaa is C or S
  MOD_RES (19), (20), (21), (22), (23): Xaa is A or G
  MOD_RES (24), (25), (26), (27): Xaa is A or G or is absent
SKAXXVPTKLSAISILYLXXXXXXXXXLKNYQGMAVSE

SEQ ID NO: 38071 - protein, 40 aa, Artificial Sequence
  Non-cyclic GFR-binding peptide
  MOD_RES (5), (6), (40): Xaa is C or S
  MOD_RES (20), (21), (22), (23), (24): Xaa is A or G
  MOD_RES (25), (26), (27), (28): Xaa is A or G or is absent
IPEPXXVPEKMSAISILYLXXXXXXXXXLKNYQNMTVESX

SEQ ID NO: 38072 - protein, 39 aa, Artificial Sequence
  Non-cyclic GFR-binding peptide
  MOD_RES (4), (5), (39): Xaa is C or S
  MOD_RES (19), (20), (21), (22), (23): Xaa is A or G
  MOD_RES (24), (25), (26), (27): Xaa is A or G or is absent
PASXXVPARLSAISILYLXXXXXXXXXLKNYQDMVVEAX

SEQ ID NO: 38073 - protein, 36 aa, Artificial Sequence
  Non-cyclic GFR-binding peptide
  MOD_RES (3), (4): Xaa is C or S
  MOD_RES (18), (19), (20), (21), (22): Xaa is A or G
  MOD_RES (23), (24), (25), (26): Xaa is A or G or is absent
ASXXVPARLSAISILYLXXXXXXXXXLKNYQDMVVE

SEQ ID NO: 38074 - protein, 31 aa, Artificial Sequence
  Non-cyclic GFR-binding peptide
VPEKMSAISILYLDENKNVVLKNYQNMTVES

SEQ ID NO: 38075 - protein, 36 aa, Artificial Sequence
  Non-cyclic GFR-binding peptide
  MOD_RES (5), (6): Xaa is C or S
SAGPXXTPTKMSAISMLYLNDKQQIILKNYQGMVVD

SEQ ID NO: 38076 - protein, 39 aa, Artificial Sequence
  Non-cyclic GFR-binding peptide
  MOD_RES (5), (6), (39): Xaa is C or S
  MOD_RES (20), (21), (22), (23), (24): Xaa is A or G
  MOD_RES (25), (26), (27), (28): Xaa is A or G or is absent
VPSTXXAPVKTSAISMLYLXXXXXXXXXLKNYQMIVEEX

SEQ ID NO: 38077 - protein, 35 aa, Artificial Sequence
  Non-cyclic GFR-binding peptide
  MOD_RES (1), (35): Xaa is C or S
  MOD_RES (15), (16), (17), (18), (19): Xaa is A or G
  MOD_RES (20), (21), (22), (23): Xaa is A or G or is absent
XVPTKLSAISILYLXXXXXXXXXLKNYQGMAVSEX

SEQ ID NO: 38078 - protein, 41 aa, Artificial Sequence
  Non-cyclic GFR-binding peptide
  MOD_RES (6), (7), (41): Xaa is C or S
  MOD_RES (21), (22), (23), (24), (25): Xaa is A or G
  MOD_RES (26), (27), (28), (29): Xaa is A or G or is absent
KASKAXXVPTKLSAISILYLXXXXXXXXXLKNYQGMAVSEX

SEQ ID NO: 38079 - protein, 43 aa, Artificial Sequence
  Non-cyclic GFR-binding peptide
  MOD_RES (5), (6), (40), (42): Xaa is C or S
  MOD_RES (20), (21), (22), (23), (24): Xaa is A or G
  MOD_RES (25), (26), (27), (28): Xaa is A or G or is absent
SAGPXXTPTKMSAISMLYLXXXXXXXXXLKNYQGMVVDRXGXS

SEQ ID NO: 38080 - protein, 39 aa, Artificial Sequence
  Non-cyclic GFR-binding peptide
  MOD_RES (6), (7), (39): Xaa is C or S
AAPASXXVPARLSAISILYLDAANNVVLKNYQDMVVEAX

SEQ ID NO: 38081 - protein, 37 aa, Artificial Sequence
  Non-cyclic GFR-binding peptide
  MOD_RES (2), (3), (36): Xaa is C or S
  MOD_RES (17), (18), (19), (20), (21): Xaa is A or G
  MOD_RES (22), (23), (24), (25): Xaa is A or G or is absent
TXXAPVKTSAISMLYLXXXXXXXXXLKNYQMIVEEXG

SEQ ID NO: 38082 - protein, 39 aa, Artificial Sequence
  Non-cyclic GFR-binding peptide
  MOD_RES (3), (4), (38): Xaa is C or S
  MOD_RES (18), (19), (20), (21), (22): Xaa is A or G
  MOD_RES (23), (24), (25), (26): Xaa is A or G or is absent
ASXXVPARLSAISILYLXXXXXXXXXLKNYQDMVVEAXG

SEQ ID NO: 38083 - protein, 32 aa, Artificial Sequence
  Non-cyclic GFR-binding peptide
  MOD_RES (32), (32): Xaa is C or S
VPTKLSAISILYLDKGVVTYLKNYQGMAVSEX

SEQ ID NO: 38084 - protein, 42 aa, Artificial Sequence
  Non-cyclic GFR-binding peptide
  MOD_RES (4), (5), (39), (41): Xaa is C or S
  MOD_RES (19), (20), (21), (22), (23): Xaa is A or G
  MOD_RES (24), (25), (26), (27): Xaa is A or G or is absent
AGPXXTPTKMSAISMLYLXXXXXXXXXLKNYQGMVVDRXGXS

SEQ ID NO: 38085 - protein, 34 aa, Artificial Sequence
  Non-cyclic GFR-binding peptide
  MOD_RES (33), (33): Xaa is C or S
  MOD_RES (14), (15), (16), (17), (18): Xaa is A or G
  MOD_RES (19), (20), (21), (22): Xaa is A or G or is absent
APVKTSAISMLYLXXXXXXXXXLKNYQMIVEEXG

SEQ ID NO: 38086 - protein, 34 aa, Artificial Sequence
  Non-cyclic GFR-binding peptide
  MOD_RES (3), (4): Xaa is C or S
GPXXTPTKMSAISMLYLNDKQQIILKNYQGMVVD

SEQ ID NO: 38087 - protein, 38 aa, Artificial Sequence
  Non-cyclic GFR-binding peptide
  MOD_RES (5), (6): Xaa is C or S
  MOD_RES (20), (21), (22), (23), (24): Xaa is A or G
  MOD_RES (25), (26), (27), (28): Xaa is A or G or is absent
SAGPXXTPTKMSAISMLYLXXXXXXXXXLKNYQGMVVD

SEQ ID NO: 38088 - protein, 39 aa, Artificial Sequence
  Non-cyclic GFR-binding peptide
  MOD_RES (6), (7): Xaa is C or S
  MOD_RES (21), (22), (23), (24), (25): Xaa is A or G
  MOD_RES (26), (27), (28), (29): Xaa is A or G or is absent
RVPSTXXAPVKTSAISMLYLXXXXXXXXXLKNYQMIVEE

SEQ ID NO: 38089 - protein, 40 aa, Artificial Sequence
  Non-cyclic GFR-binding peptide
  MOD_RES (6), (7), (39): Xaa is C or S
HVPKPXXAPTKLSAISVLYLDDSSNVILKNYQNMVVRSXG

SEQ ID NO: 38090 - protein, 35 aa, Artificial Sequence
  Non-cyclic GFR-binding peptide
  MOD_RES (1), (2), (34): Xaa is C or S
XXTPTKMSAISMLYLNDKQQIILKNYQGMVVDRXG

SEQ ID NO: 38091 - protein, 37 aa, Artificial Sequence
  Non-cyclic GFR-binding peptide
  MOD_RES (4), (5), (37): Xaa is C or S
AGPXXTPTKMSAISMLYLNDKQQIILKNYQGMVVDRX

SEQ ID NO: 38092 - protein, 39 aa, Artificial Sequence
  Non-cyclic GFR-binding peptide
  MOD_RES (3), (4), (36), (38): Xaa is C or S
KAXXVPTKLSAISILYLDKGVVTYLKNYQGMAVSEXGXR

SEQ ID NO: 38093 - protein, 36 aa, Artificial Sequence
  Non-cyclic GFR-binding peptide
  MOD_RES (5), (6): Xaa is C or S
APASXXVPARLSAISILYLDAANNVVLKNYQDMVVE

SEQ ID NO: 38094 - protein, 33 aa, Artificial Sequence
  Non-cyclic GFR-binding peptide
  MOD_RES (1), (33): Xaa is C or S
XVPEKMSAISILYLDENKNVVLKNYQNMTVESX

SEQ ID NO: 38095 - protein, 37 aa, Artificial Sequence
  Non-cyclic GFR-binding peptide
  MOD_RES (5), (6): Xaa is C or S
APASXXVPARLSAISILYLDAANNVVLKNYQDMVVEA

SEQ ID NO: 38096 - protein, 40 aa, Artificial Sequence
  Non-cyclic GFR-binding peptide
  MOD_RES (3), (4), (37), (39): Xaa is C or S
  MOD_RES (18), (19), (20), (21), (22): Xaa is A or G
  MOD_RES (23), (24), (25), (26): Xaa is A or G or is absent
STXXAPVKTSAISMLYLXXXXXXXXXLKNYQMIVEEXGXL

SEQ ID NO: 38097 - protein, 38 aa, Artificial Sequence
  Non-cyclic GFR-binding peptide
  MOD_RES (4), (5), (37): Xaa is C or S
PASXXVPARLSAISILYLDAANNVVLKNYQDMVVEAXG

SEQ ID NO: 38098 - protein, 38 aa, Artificial Sequence
  Non-cyclic GFR-binding peptide
  MOD_RES (4), (5), (37): Xaa is C or S
AGPXXTPTKMSAISMLYLNDKQQIILKNYQGMVVDRXG

SEQ ID NO: 38099 - protein, 37 aa, Artificial Sequence
  Non-cyclic GFR-binding peptide
  MOD_RES (3), (4), (36): Xaa is C or S
GPXXTPTKMSAISMLYLNDKQQIILKNYQGMVVDRXG

SEQ ID NO: 38100 - protein, 33 aa, Artificial Sequence
  Non-cyclic GFR-binding peptide
  MOD_RES (1), (1): Xaa is C or S
  MOD_RES (15), (16), (17), (18), (19): Xaa is A or G
  MOD_RES (20), (21), (22), (23): Xaa is A or G or is absent
XVPARLSAISILYLXXXXXXXXXLKNYQDMVVE

SEQ ID NO: 38101 - protein, 37 aa, Artificial Sequence
  Non-cyclic GFR-binding peptide
  MOD_RES (2), (3), (35), (37): Xaa is C or S
PXXTPTKMSAISMLYLNDKQQIILKNYQGMVVDRXGX

SEQ ID NO: 38102 - protein, 38 aa, Artificial Sequence
  Non-cyclic GFR-binding peptide
  MOD_RES (5), (6): Xaa is C or S
  MOD_RES (20), (21), (22), (23), (24): Xaa is A or G
  MOD_RES (25), (26), (27), (28): Xaa is A or G or is absent
IPEPXXVPEKMSAISILYLXXXXXXXXXLKNYQNMTVE

SEQ ID NO: 38103 - protein, 37 aa, Artificial Sequence
  Non-cyclic GFR-binding peptide
  MOD_RES (4), (5), (37): Xaa is C or S
PEPXXVPEKMSAISILYLDENKNVVLKNYQNMTVESX

SEQ ID NO: 38104 - protein, 41 aa, Artificial Sequence
  Non-cyclic GFR-binding peptide
  MOD_RES (6), (7), (39), (41): Xaa is C or S
GIPEPXXVPEKMSAISILYLDENKNVVLKNYQNMTVESXAX

SEQ ID NO: 38105 - protein, 39 aa, Artificial Sequence
  Non-cyclic GFR-binding peptide
  MOD_RES (5), (6): Xaa is C or S
  MOD_RES (20), (21), (22), (23), (24): Xaa is A or G
  MOD_RES (25), (26), (27), (28): Xaa is A or G or is absent
ASKAXXVPTKLSAISILYLXXXXXXXXXLKNYQGMAVSE

SEQ ID NO: 38106 - protein, 33 aa, Artificial Sequence
  Non-cyclic GFR-binding peptide
  MOD_RES (2), (3): Xaa is C or S
SXXVPARLSAISILYLDAANNVVLKNYQDMVVE

SEQ ID NO: 38107 - protein, 36 aa, Artificial Sequence
  Non-cyclic GFR-binding peptide
  MOD_RES (3), (4), (36): Xaa is C or S
KAXXVPTKLSAISILYLDKGVVTYLKNYQGMAVSEX

SEQ ID NO: 38108 - protein, 32 aa, Artificial Sequence
  Non-cyclic GFR-binding peptide
  MOD_RES (1), (2): Xaa is C or S
XXVPTKLSAISILYLDKGVVTYLKNYQGMAVS

SEQ ID NO: 38109 - protein, 36 aa, Artificial Sequence
  Non-cyclic GFR-binding peptide
  MOD_RES (1), (2), (36): Xaa is C or S
  MOD_RES (16), (17), (18), (19), (20): Xaa is A or G
  MOD_RES (21), (22), (23), (24): Xaa is A or G or is absent
XXVPTKLSAISILYLXXXXXXXXXLKNYQGMAVSEX

SEQ ID NO: 38110 - protein, 44 aa, Artificial Sequence
  Non-cyclic GFR-binding peptide
  MOD_RES (6), (7), (41), (43): Xaa is C or S
  MOD_RES (21), (22), (23), (24), (25): Xaa is A or G
  MOD_RES (26), (27), (28), (29): Xaa is A or G or is absent
GIPEPXXVPEKMSAISILYLXXXXXXXXXLKNYQNMTVESXAXR

SEQ ID NO: 38111 - protein, 42 aa, Artificial Sequence
  Non-cyclic GFR-binding peptide
  MOD_RES (6), (7), (40), (42): Xaa is C or S
  MOD_RES (21), (22), (23), (24), (25): Xaa is A or G
  MOD_RES (26), (27), (28), (29): Xaa is A or G or is absent
RVPSTXXAPVKTSAISMLYLXXXXXXXXXLKNYQMIVEEXGX

SEQ ID NO: 38112 - protein, 31 aa, Artificial Sequence
  Non-cyclic GFR-binding peptide
VPARLSAISILYLDAANNVVLKNYQDMVVEA

SEQ ID NO: 38113 - protein, 35 aa, Artificial Sequence
  Non-cyclic GFR-binding peptide
  MOD_RES (4), (5): Xaa is C or S
PASXXVPARLSAISILYLDAANNVVLKNYQDMVVE

SEQ ID NO: 38114 - protein, 39 aa, Artificial Sequence
  Non-cyclic GFR-binding peptide
  MOD_RES (1), (2), (36), (38): Xaa is C or S
  MOD_RES (16), (17), (18), (19), (20): Xaa is A or G
  MOD_RES (21), (22), (23), (24): Xaa is A or G or is absent
XXVPTKLSAISILYLXXXXXXXXXLKNYQGMAVSEXGXR

SEQ ID NO: 38115 - protein, 35 aa, Artificial Sequence
  Non-cyclic GFR-binding peptide
  MOD_RES (4), (5): Xaa is C or S
AGPXXTPTKMSAISMLYLNDKQQIILKNYQGMVVD

SEQ ID NO: 38116 - protein, 36 aa, Artificial Sequence
  Non-cyclic GFR-binding peptide
  MOD_RES (1), (33), (35): Xaa is C or S
XTPTKMSAISMLYLNDKQQIILKNYQGMVVDRXGXS

SEQ ID NO: 38117 - protein, 31 aa, Artificial Sequence
  Non-cyclic GFR-binding peptide
  MOD_RES (1), (1): Xaa is C or S
XVPEKMSAISILYLDENKNVVLKNYQNMTVE

SEQ ID NO: 38118 - protein, 42 aa, Artificial Sequence
  Non-cyclic GFR-binding peptide
  MOD_RES (6), (7), (41): Xaa is C or S
  MOD_RES (21), (22), (23), (24), (25): Xaa is A or G
  MOD_RES (26), (27), (28), (29): Xaa is A or G or is absent
GSAGPXXTPTKMSAISMLYLXXXXXXXXXLKNYQGMVVDRXG

SEQ ID NO: 38119 - protein, 34 aa, Artificial Sequence
  Non-cyclic GFR-binding peptide
  MOD_RES (1), (1): Xaa is C or S
  MOD_RES (15), (16), (17), (18), (19): Xaa is A or G
  MOD_RES (20), (21), (22), (23): Xaa is A or G or is absent
XVPEKMSAISILYLXXXXXXXXXLKNYQNMTVES

SEQ ID NO: 38120 - protein, 34 aa, Artificial Sequence
  Non-cyclic GFR-binding peptide
  MOD_RES (3), (4): Xaa is C or S
KAXXVPTKLSAISILYLDKGVVTYLKNYQGMAVS

SEQ ID NO: 38121 - protein, 41 aa, Artificial Sequence
  Non-cyclic GFR-binding peptide
  MOD_RES (5), (6), (38), (40): Xaa is C or S
IPEPXXVPEKMSAISILYLDENKNVVLKNYQNMTVESXAXR

SEQ ID NO: 38122 - protein, 33 aa, Artificial Sequence
  Non-cyclic GFR-binding peptide
  MOD_RES (1), (33): Xaa is C or S
XTPTKMSAISMLYLNDKQQIILKNYQGMVVDRX

SEQ ID NO: 38123 - protein, 35 aa, Artificial Sequence
  Non-cyclic GFR-binding peptide
  MOD_RES (1), (33), (35): Xaa is C or S
XVPARLSAISILYLDAANNVVLKNYQDMVVEAXGX

SEQ ID NO: 38124 - protein, 40 aa, Artificial Sequence
  Non-cyclic GFR-binding peptide
  MOD_RES (4), (5), (39): Xaa is C or S
  MOD_RES (19), (20), (21), (22), (23): Xaa is A or G
  MOD_RES (24), (25), (26), (27): Xaa is A or G or is absent
PASXXVPARLSAISILYLXXXXXXXXXLKNYQDMVVEAXG

SEQ ID NO: 38125 - protein, 33 aa, Artificial Sequence
  Non-cyclic GFR-binding peptide
  MOD_RES (1), (1): Xaa is C or S
  MOD_RES (15), (16), (17), (18), (19): Xaa is A or G
  MOD_RES (20), (21), (22), (23): Xaa is A or G or is absent
XVPTKLSAISILYLXXXXXXXXXLKNYQGMAVS

SEQ ID NO: 38126 - protein, 34 aa, Artificial Sequence
  Non-cyclic GFR-binding peptide
  MOD_RES (1), (2), (34): Xaa is C or S
XXVPARLSAISILYLDAANNVVLKNYQDMVVEAX

SEQ ID NO: 38127 - protein, 40 aa, Artificial Sequence
  Non-cyclic GFR-binding peptide
  MOD_RES (5), (6), (40): Xaa is C or S
  MOD_RES (20), (21), (22), (23), (24): Xaa is A or G
  MOD_RES (25), (26), (27), (28): Xaa is A or G or is absent
APASXXVPARLSAISILYLXXXXXXXXXLKNYQDMVVEAX

SEQ ID NO: 38128 - protein, 37 aa, Artificial Sequence
  Non-cyclic GFR-binding peptide
  MOD_RES (1), (2), (36): Xaa is C or S
  MOD_RES (16), (17), (18), (19), (20): Xaa is A or G
  MOD_RES (21), (22), (23), (24): Xaa is A or G or is absent
XXVPEKMSAISILYLXXXXXXXXXLKNYQNMTVESXA

SEQ ID NO: 38129 - protein, 42 aa, Artificial Sequence
  Non-cyclic GFR-binding peptide
  MOD_RES (4), (5), (39), (41): Xaa is C or S
  MOD_RES (19), (20), (21), (22), (23): Xaa is A or G
  MOD_RES (24), (25), (26), (27): Xaa is A or G or is absent
PEPXXVPEKMSAISILYLXXXXXXXXXLKNYQNMTVESXAXR

SEQ ID NO: 38130 - protein, 32 aa, Artificial Sequence
  Non-cyclic GFR-binding peptide
  MOD_RES (1), (2): Xaa is C or S
XXVPEKMSAISILYLDENKNVVLKNYQNMTVE

SEQ ID NO: 38131 - protein, 37 aa, Artificial Sequence
  Non-cyclic GFR-binding peptide
  MOD_RES (6), (7): Xaa is C or S
KASKAXXVPTKLSAISILYLDKGVVTYLKNYQGMAVS

SEQ ID NO: 38132 - protein, 33 aa, Artificial Sequence
  Non-cyclic GFR-binding peptide
  MOD_RES (1), (2), (33): Xaa is C or S
XXAPVKTSAISMLYLDNGRVLLLKNYQMIVEEX

SEQ ID NO: 38133 - protein, 33 aa, Artificial Sequence
  Non-cyclic GFR-binding peptide
  MOD_RES (2), (3): Xaa is C or S
PXXVPEKMSAISILYLDENKNVVLKNYQNMTVE

SEQ ID NO: 38134 - protein, 33 aa, Artificial Sequence
  Non-cyclic GFR-binding peptide
  MOD_RES (1), (2): Xaa is C or S
XXVPARLSAISILYLDAANNVVLKNYQDMVVEA

SEQ ID NO: 38135 - protein, 41 aa, Artificial Sequence
  Non-cyclic GFR-binding peptide
  MOD_RES (3), (4), (38), (40): Xaa is C or S
  MOD_RES (18), (19), (20), (21), (22): Xaa is A or G
  MOD_RES (23), (24), (25), (26): Xaa is A or G or is absent
GPXXTPTKMSAISMLYLXXXXXXXXXLKNYQGMVVDRXGXS

SEQ ID NO: 38136 - protein, 32 aa, Artificial Sequence
  Non-cyclic GFR-binding peptide
  MOD_RES (32), (32): Xaa is C or S
VPEKMSAISILYLDENKNVVLKNYQNMTVESX

SEQ ID NO: 38137 - protein, 40 aa, Artificial Sequence
  Non-cyclic GFR-binding peptide
  MOD_RES (6), (7): Xaa is C or S
  MOD_RES (21), (22), (23), (24), (25): Xaa is A or G
  MOD_RES (26), (27), (28), (29): Xaa is A or G or is absent
GIPEPXXVPEKMSAISILYLXXXXXXXXXLKNYQNMTVES

SEQ ID NO: 38138 - protein, 40 aa, Artificial Sequence
  Non-cyclic GFR-binding peptide
  MOD_RES (6), (7), (38), (40): Xaa is C or S
RVPSTXXAPVKTSAISMLYLDNGRVLLLKNYQMIVEEXGX

SEQ ID NO: 38139 - protein, 38 aa, Artificial Sequence
  Non-cyclic GFR-binding peptide
  MOD_RES (5), (6): Xaa is C or S
  MOD_RES (20), (21), (22), (23), (24): Xaa is A or G
  MOD_RES (25), (26), (27), (28): Xaa is A or G or is absent
APASXXVPARLSAISILYLXXXXXXXXXLKNYQDMVVE

SEQ ID NO: 38140 - protein, 35 aa, Artificial Sequence
  Non-cyclic GFR-binding peptide
  MOD_RES (1), (2): Xaa is C or S
  MOD_RES (16), (17), (18), (19), (20): Xaa is A or G
  MOD_RES (21), (22), (23), (24): Xaa is A or G or is absent
XXVPEKMSAISILYLXXXXXXXXXLKNYQNMTVES

SEQ ID NO: 38141 - protein, 33 aa, Artificial Sequence
  Non-cyclic GFR-binding peptide
  MOD_RES (32), (32): Xaa is C or S
TPTKMSAISMLYLNDKQQIILKNYQGMVVDRXG

SEQ ID NO: 38142 - protein, 43 aa, Artificial Sequence
  Non-cyclic GFR-binding peptide
  MOD_RES (5), (6), (40), (42): Xaa is C or S
  MOD_RES (20), (21), (22), (23), (24): Xaa is A or G
  MOD_RES (25), (26), (27), (28): Xaa is A or G or is absent
ASKAXXVPTKLSAISILYLXXXXXXXXXLKNYQGMAVSEXGXR

SEQ ID NO: 38143 - protein, 37 aa, Artificial Sequence
  Non-cyclic GFR-binding peptide
  MOD_RES (1), (34), (36): Xaa is C or S
  MOD_RES (15), (16), (17), (18), (19): Xaa is A or G
  MOD_RES (20), (21), (22), (23): Xaa is A or G or is absent
XAPVKTSAISMLYLXXXXXXXXXLKNYQMIVEEXGXL

SEQ ID NO: 38144 - protein, 39 aa, Artificial Sequence
  Non-cyclic GFR-binding peptide
  MOD_RES (4), (5), (39): Xaa is C or S
  MOD_RES (19), (20), (21), (22), (23): Xaa is A or G
  MOD_RES (24), (25), (26), (27): Xaa is A or G or is absent
PEPXXVPEKMSAISILYLXXXXXXXXXLKNYQNMTVESX

SEQ ID NO: 38145 - protein, 42 aa, Artificial Sequence
  Non-cyclic GFR-binding peptide
  MOD_RES (6), (7), (39), (41): Xaa is C or S
HVPKPXXAPTKLSAISVLYLDDSSNVILKNYQNMVVRSXGXH

SEQ ID NO: 38146 - protein, 36 aa, Artificial Sequence
  Non-cyclic GFR-binding peptide
  MOD_RES (2), (3), (35): Xaa is C or S
AXXVPTKLSAISILYLDKGVVTYLKNYQGMAVSEXG

SEQ ID NO: 38147 - protein, 33 aa, Artificial Sequence
  Non-cyclic GFR-binding peptide
  MOD_RES (14), (15), (16), (17), (18): Xaa is A or G
  MOD_RES (19), (20), (21), (22): Xaa is A or G or is absent
VPARLSAISILYLXXXXXXXXXLKNYQDMVVEA

SEQ ID NO: 38148 - protein, 38 aa, Artificial Sequence
  Non-cyclic GFR-binding peptide
  MOD_RES (4), (5): Xaa is C or S
  MOD_RES (19), (20), (21), (22), (23): Xaa is A or G
  MOD_RES (24), (25), (26), (27): Xaa is A or G or is absent
AGPXXTPTKMSAISMLYLXXXXXXXXXLKNYQGMVVDR

SEQ ID NO: 38149 - protein, 40 aa, Artificial Sequence
  Non-cyclic GFR-binding peptide
  MOD_RES (6), (7), (39): Xaa is C or S
AAPASXXVPARLSAISILYLDAANNVVLKNYQDMVVEAXG

SEQ ID NO: 38150 - protein, 37 aa, Artificial Sequence
  Non-cyclic GFR-binding peptide
  MOD_RES (3), (4), (35), (37): Xaa is C or S
STXXAPVKTSAISMLYLDNGRVLLLKNYQMIVEEXGX

SEQ ID NO: 38151 - protein, 31 aa, Artificial Sequence
  Non-cyclic GFR-binding peptide
  MOD_RES (1), (1): Xaa is C or S
XVPTKLSAISILYLDKGVVTYLKNYQGMAVS

SEQ ID NO: 38152 - protein, 35 aa, Artificial Sequence
  Non-cyclic GFR-binding peptide
  MOD_RES (3), (4), (35): Xaa is C or S
STXXAPVKTSAISMLYLDNGRVLLLKNYQMIVEEX

SEQ ID NO: 38153 - protein, 40 aa, Artificial Sequence
  Non-cyclic GFR-binding peptide
  MOD_RES (4), (5), (38), (40): Xaa is C or S
  MOD_RES (19), (20), (21), (22), (23): Xaa is A or G
  MOD_RES (24), (25), (26), (27): Xaa is A or G or is absent
PSTXXAPVKTSAISMLYLXXXXXXXXXLKNYQMIVEEXGX

SEQ ID NO: 38154 - protein, 36 aa, Artificial Sequence
  Non-cyclic GFR-binding peptide
  MOD_RES (1), (35): Xaa is C or S
  MOD_RES (15), (16), (17), (18), (19): Xaa is A or G
  MOD_RES (20), (21), (22), (23): Xaa is A or G or is absent
XVPARLSAISILYLXXXXXXXXXLKNYQDMVVEAXG

SEQ ID NO: 38155 - protein, 38 aa, Artificial Sequence
  Non-cyclic GFR-binding peptide
  MOD_RES (4), (5), (37): Xaa is C or S
SKAXXVPTKLSAISILYLDKGVVTYLKNYQGMAVSEXG

SEQ ID NO: 38156 - protein, 35 aa, Artificial Sequence
  Non-cyclic GFR-binding peptide
  MOD_RES (2), (3), (34): Xaa is C or S
TXXAPVKTSAISMLYLDNGRVLLLKNYQMIVEEXG

SEQ ID NO: 38157 - protein, 35 aa, Artificial Sequence
  Non-cyclic GFR-binding peptide
  MOD_RES (1), (32), (34): Xaa is C or S
XAPVKTSAISMLYLDNGRVLLLKNYQMIVEEXGXL

SEQ ID NO: 38158 - protein, 39 aa, Artificial Sequence
  Non-cyclic GFR-binding peptide
  MOD_RES (5), (6), (37), (39): Xaa is C or S
VPSTXXAPVKTSAISMLYLDNGRVLLLKNYQMIVEEXGX

SEQ ID NO: 38159 - protein, 35 aa, Artificial Sequence
  Non-cyclic GFR-binding peptide
  MOD_RES (4), (5): Xaa is C or S
SKAXXVPTKLSAISILYLDKGVVTYLKNYQGMAVS

SEQ ID NO: 38160 - protein, 34 aa, Artificial Sequence
  Non-cyclic GFR-binding peptide
  MOD_RES (34), (34): Xaa is C or S
  MOD_RES (14), (15), (16), (17), (18): Xaa is A or G
  MOD_RES (19), (20), (21), (22): Xaa is A or G or is absent
VPTKLSAISILYLXXXXXXXXXLKNYQGMAVSEX

SEQ ID NO: 38161 - protein, 36 aa, Artificial Sequence
  Non-cyclic GFR-binding peptide
  MOD_RES (34), (36): Xaa is C or S
  MOD_RES (14), (15), (16), (17), (18): Xaa is A or G
  MOD_RES (19), (20), (21), (22): Xaa is A or G or is absent
TPTKMSAISMLYLXXXXXXXXXLKNYQGMVVDRXGX

SEQ ID NO: 38162 - protein, 41 aa, Artificial Sequence
  Non-cyclic GFR-binding peptide
  MOD_RES (6), (7), (39), (41): Xaa is C or S
KASKAXXVPTKLSAISILYLDKGVVTYLKNYQGMAVSEXGX

SEQ ID NO: 38163 - protein, 40 aa, Artificial Sequence
  Non-cyclic GFR-binding peptide
  MOD_RES (4), (5), (39): Xaa is C or S
  MOD_RES (19), (20), (21), (22), (23): Xaa is A or G
  MOD_RES (24), (25), (26), (27): Xaa is A or G or is absent
AGPXXTPTKMSAISMLYLXXXXXXXXXLKNYQGMVVDRXG

SEQ ID NO: 38164 - protein, 36 aa, Artificial Sequence
  Non-cyclic GFR-binding peptide
  MOD_RES (5), (6): Xaa is C or S
IPEPXXVPEKMSAISILYLDENKNVVLKNYQNMTVE

SEQ ID NO: 38165 - protein, 39 aa, Artificial Sequence
  Non-cyclic GFR-binding peptide
  MOD_RES (6), (7), (39): Xaa is C or S
KASKAXXVPTKLSAISILYLDKGVVTYLKNYQGMAVSEX

SEQ ID NO: 38166 - protein, 33 aa, Artificial Sequence
  Non-cyclic GFR-binding peptide
  MOD_RES (1), (33): Xaa is C or S
XVPTKLSAISILYLDKGVVTYLKNYQGMAVSEX

SEQ ID NO: 38167 - protein, 36 aa, Artificial Sequence
  Non-cyclic GFR-binding peptide
  MOD_RES (1), (2), (34), (36): Xaa is C or S
XXVPTKLSAISILYLDKGVVTYLKNYQGMAVSEXGX

SEQ ID NO: 38168 - protein, 37 aa, Artificial Sequence
  Non-cyclic GFR-binding peptide
  MOD_RES (1), (2), (36): Xaa is C or S
  MOD_RES (16), (17), (18), (19), (20): Xaa is A or G
  MOD_RES (21), (22), (23), (24): Xaa is A or G or is absent
XXVPTKLSAISILYLXXXXXXXXXLKNYQGMAVSEXG

SEQ ID NO: 38169 - protein, 35 aa, Artificial Sequence
  Non-cyclic GFR-binding peptide
  MOD_RES (2), (3): Xaa is C or S
  MOD_RES (17), (18), (19), (20), (21): Xaa is A or G
  MOD_RES (22), (23), (24), (25): Xaa is A or G or is absent
PXXVPEKMSAISILYLXXXXXXXXXLKNYQNMTVE

SEQ ID NO: 38170 - protein, 35 aa, Artificial Sequence
  Non-cyclic GFR-binding peptide
  MOD_RES (1), (34): Xaa is C or S
  MOD_RES (15), (16), (17), (18), (19): Xaa is A or G
  MOD_RES (20), (21), (22), (23): Xaa is A or G or is absent
XAPVKTSAISMLYLXXXXXXXXXLKNYQMIVEEXG

SEQ ID NO: 38171 - protein, 40 aa, Artificial Sequence
  Non-cyclic GFR-binding peptide
  MOD_RES (4), (5), (37), (39): Xaa is C or S
SKAXXVPTKLSAISILYLDKGVVTYLKNYQGMAVSEXGXR

SEQ ID NO: 38172 - protein, 38 aa, Artificial Sequence
  Non-cyclic GFR-binding peptide
  MOD_RES (6), (7): Xaa is C or S
GIPEPXXVPEKMSAISILYLDENKNVVLKNYQNMTVES

SEQ ID NO: 38173 - protein, 34 aa, Artificial Sequence
  Non-cyclic GFR-binding peptide
  MOD_RES (32), (34): Xaa is C or S
VPEKMSAISILYLDENKNVVLKNYQNMTVESXAX

SEQ ID NO: 38174 - protein, 37 aa, Artificial Sequence
  Non-cyclic GFR-binding peptide
  MOD_RES (2), (3), (35), (37): Xaa is C or S
AXXVPTKLSAISILYLDKGVVTYLKNYQGMAVSEXGX

SEQ ID NO: 38175 - protein, 35 aa, Artificial Sequence
  Non-cyclic GFR-binding peptide
  MOD_RES (1), (2), (34): Xaa is C or S
XXVPTKLSAISILYLDKGVVTYLKNYQGMAVSEXG

SEQ ID NO: 38176 - protein, 35 aa, Artificial Sequence
  Non-cyclic GFR-binding peptide
  MOD_RES (1), (33), (35): Xaa is C or S
XTPTKMSAISMLYLNDKQQIILKNYQGMVVDRXGX

SEQ ID NO: 38177 - protein, 38 aa, Artificial Sequence
  Non-cyclic GFR-binding peptide
  MOD_RES (1), (35), (37): Xaa is C or S
  MOD_RES (15), (16), (17), (18), (19): Xaa is A or G
  MOD_RES (20), (21), (22), (23): Xaa is A or G or is absent
XTPTKMSAISMLYLXXXXXXXXXLKNYQGMVVDRXGXS

SEQ ID NO: 38178 - protein, 38 aa, Artificial Sequence
  Non-cyclic GFR-binding peptide
  MOD_RES (6), (7): Xaa is C or S
GSAGPXXTPTKMSAISMLYLNDKQQIILKNYQGMVVDR

SEQ ID NO: 38179 - protein, 35 aa, Artificial Sequence
  Non-cyclic GFR-binding peptide
  MOD_RES (1), (2), (34): Xaa is C or S
XXVPARLSAISILYLDAANNVVLKNYQDMVVEAXG

SEQ ID NO: 38180 - protein, 35 aa, Artificial Sequence
  Non-cyclic GFR-binding peptide
  MOD_RES (32), (34): Xaa is C or S
VPTKLSAISILYLDKGVVTYLKNYQGMAVSEXGXR

SEQ ID NO: 38181 - protein, 27 aa, Artificial Sequence
  Cyclic GFR-binding peptide
QLSAISTLYLDEYDKVVLKNYQDEYDK

SEQ ID NO: 38182 - protein, 25 aa, Artificial Sequence
  Cyclic GFR-binding peptide
GTPGPSAISTLYLDDMGVPTLKNYQ

SEQ ID NO: 38183 - protein, 20 aa, Artificial Sequence
  Cyclic GFR-binding peptide
SAISTLYLIGKTPKILKNYQ

SEQ ID NO: 38184 - protein, 21 aa, Artificial Sequence
  Cyclic GFR-binding peptide
NAISVLYFDENEKVILKKYEL

SEQ ID NO: 38185 - protein, 20 aa, Artificial Sequence
  Cyclic GFR-binding peptide
SATSVLYYDSSNNVVLRKHR

SEQ ID NO: 38186 - protein, 27 aa, Artificial Sequence
  Cyclic GFR-binding peptide
SAISTLYLEIVRKKPLKNYQEIVRKKP

SEQ ID NO: 38187 - protein, 20 aa, Artificial Sequence
  Cyclic GFR-binding peptide
NAISVLYFGGGLKKYELGGG

SEQ ID NO: 38188 - protein, 19 aa, Artificial Sequence
  Cyclic GFR-binding peptide
SATSVLYYGGGLRKHRGGG

SEQ ID NO: 38189 - protein, 25 aa, Artificial Sequence
  Cyclic GFR-binding peptide
WWFWGSAISTLYLIGKTPKILKNYQ

SEQ ID NO: 38190 - protein, 25 aa, Artificial Sequence
  Cyclic GFR-binding peptide
GTPGPSAISTLYLIGKTPKILKNYQ

SEQ ID NO: 38191 - protein, 26 aa, Artificial Sequence
  Cyclic GFR-binding peptide
GTPGPNAISVLYFDENEKVILKKYEL

SEQ ID NO: 38192 - protein, 21 aa, Artificial Sequence
  Cyclic GFR-binding peptide
GTPGPSAISMLYLGGGLKNYQ

SEQ ID NO: 38193 - protein, 25 aa, Artificial Sequence
  Cyclic GFR-binding peptide
GTPGPSPISTLYKDENEKVVLKYHY

SEQ ID NO: 38194 - protein, 25 aa, Artificial Sequence
  Cyclic GFR-binding peptide
GTPGPNAISMLYFVGRKPKVLKKYR

SEQ ID NO: 38195 - protein, 25 aa, Artificial Sequence
  Cyclic GFR-binding peptide
GTPGPNAISTLYLDENEKVVLKKYR

SEQ ID NO: 38196 - protein, 25 aa, Artificial Sequence
  Cyclic GFR-binding peptide
GTPGPSAISTLYLDDSSNVILKNYQ

SEQ ID NO: 38197 - protein, 25 aa, Artificial Sequence
  Cyclic GFR-binding peptide
GTPGPNAISTLYLDDSSNVILKNYQ

SEQ ID NO: 38198 - protein, 25 aa, Artificial Sequence
  Cyclic GFR-binding peptide
GTPGPSAISTLYLDDYDKVILKKYR

SEQ ID NO: 38199 - protein, 25 aa, Artificial Sequence
  Cyclic GFR-binding peptide
WWFWGSAISTLYLDEYDKVVLKNYQ

SEQ ID NO: 38200 - protein, 22 aa, Artificial Sequence
  Cyclic GFR-binding peptide
GTPGPSAISTLYLGGGGLKNYQ

SEQ ID NO: 38201 - protein, 25 aa, Artificial Sequence
  Cyclic GFR-binding peptide
GTPGPSATSVLYYDDSSNVILRKHR

SEQ ID NO: 38202 - protein, 21 aa, Artificial Sequence
  Cyclic GFR-binding peptide
GTPGPSAISMLYLGGGLKNYQ

SEQ ID NO: 38203 - protein, 24 aa, Artificial Sequence
  Cyclic GFR-binding peptide
ELEPLPIVYYVGRKPKVEQLSNGG

SEQ ID NO: 38204 - protein, 22 aa, Artificial Sequence
  Cyclic GFR-binding peptide
EPLPIVYYVGRTPKVEQLSNGG

SEQ ID NO: 38205 - protein, 25 aa, Artificial Sequence
  Cyclic GFR-binding peptide
GTPGPSATSVLYYDENKNVVLRKHR

SEQ ID NO: 38206 - protein, 24 aa, Artificial Sequence
  Cyclic GFR-binding peptide
RSVKVAKVRIKPHQGQHKEVQVGG

SEQ ID NO: 38207 - protein, 24 aa, Artificial Sequence
  Cyclic GFR-binding peptide
SNITMQIMRIKPHQGQHIGEMSGG

SEQ ID NO: 38208 - protein, 29 aa, Artificial Sequence
  Cyclic GFR-binding peptide
RPTQVQLRPVQVRKIEYVRKKPKLKKATV

SEQ ID NO: 38209 - protein, 25 aa, Artificial Sequence
  Cyclic GFR-binding peptide
DENKNSSLSILFFDENKNVVLKVYP

SEQ ID NO: 38210 - protein, 25 aa, Artificial Sequence
  Cyclic GFR-binding peptide
DENEKSSLSILFFDENEKVVLKVYP

SEQ ID NO: 38211 - protein, 22 aa, Artificial Sequence
  Cyclic GFR-binding peptide
SPISILYIDAANNVVYKQYEGG

SEQ ID NO: 38212 - protein, 25 aa, Artificial Sequence
  Cyclic GFR-binding peptide
SPISILYIDAANNVVYKQYEDAANN

SEQ ID NO: 38213 - protein, 22 aa, Artificial Sequence
  Cyclic GFR-binding peptide
SPISLLYIDAANNVVYKQYEGG

SEQ ID NO: 38214 - protein, 19 aa, Artificial Sequence
  Cyclic GFR-binding peptide
SPISILYIAAYKQYEAAGG

SEQ ID NO: 38215 - protein, 22 aa, Artificial Sequence
  Cyclic GFR-binding peptide
EPLPIVYYVGRKPKVEQLSNGG

SEQ ID NO: 38216 - protein, 25 aa, Artificial Sequence
  Cyclic GFR-binding peptide
EPLPIVYYDDSSNVIEQLSNDDSSN

SEQ ID NO: 38217 - protein, 23 aa, Artificial Sequence
  Cyclic GFR-binding peptide
EPLPIVYYDDSSNEQLSNDDSSN

SEQ ID NO: 38218 - protein, 24 aa, Artificial Sequence
  Cyclic GFR-binding peptide
SPISILYIDAANNVVYKQYEDAAN

SEQ ID NO: 38219 - protein, 22 aa, Artificial Sequence
  Cyclic GFR-binding peptide
NAISTLYFDDSSNVILKKYRGG

SEQ ID NO: 38220 - protein, 24 aa, Artificial Sequence
  Cyclic GFR-binding peptide
KLSAISTLYLEIVRKKPLKNYQGG

SEQ ID NO: 38221 - protein, 22 aa, Artificial Sequence
  Cyclic GFR-binding peptide
SPINMLYFNEKNQIIYGKIPGG

SEQ ID NO: 38222 - protein, 22 aa, Artificial Sequence
  Cyclic GFR-binding peptide
EPLEIVYYDDSSNVIEQLSNGG

SEQ ID NO: 38223 - protein, 19 aa, Artificial Sequence
  Cyclic GFR-binding peptide
SAISMLYLGGGLKNYQGGG

SEQ ID NO: 38224 - protein, 25 aa, Artificial Sequence
  Cyclic GFR-binding peptide
SPINILFFDENKNVVLKVYPDENKN

SEQ ID NO: 38225 - protein, 27 aa, Artificial Sequence
  Cyclic GFR-binding peptide
SNITMQIMIGKTPKIEQLSNIGKTPKI

SEQ ID NO: 38226 - protein, 27 aa, Artificial Sequence
  Cyclic GFR-binding peptide
KDYEDQYNKLVVKDYEDLYLTSIASLQ

SEQ ID NO: 38227 - protein, 25 aa, Artificial Sequence
  Cyclic GFR-binding peptide
QYNKLTPVGMDDLYLTSIASPGPTG

SEQ ID NO: 38228 - protein, 21 aa, Artificial Sequence
  Cyclic GFR-binding peptide
LEYKKLIVKENEDFYLVSIAN

SEQ ID NO: 38229 - protein, 20 aa, Artificial Sequence
  Cyclic GFR-binding peptide
RHKRLVVNNSSDYYLVSTAS

SEQ ID NO: 38230 - protein, 27 aa, Artificial Sequence
  Cyclic GFR-binding peptide
PKKRVIEQYNKLPKKRVIELYLTSIAS

SEQ ID NO: 38231 - protein, 20 aa, Artificial Sequence
  Cyclic GFR-binding peptide
GGGLEYKKLGGGFYLVSIAN

SEQ ID NO: 38232 - protein, 19 aa, Artificial Sequence
  Cyclic GFR-binding peptide
GGGRHKRLGGGYYLVSTAS

SEQ ID NO: 38233 - protein, 26 aa, Artificial Sequence
  Cyclic GFR-binding peptide
LEYKKLIVKENEDFYLVSIANPGPTG

SEQ ID NO: 38234 - protein, 21 aa, Artificial Sequence
  Cyclic GFR-binding peptide
QYNKLGGGLYLMSIASPGPTG

SEQ ID NO: 38235 - protein, 25 aa, Artificial Sequence
  Cyclic GFR-binding peptide
YHYKLVVKENEDKYLTSIPSPGPTG

SEQ ID NO: 38236 - protein, 25 aa, Artificial Sequence
  Cyclic GFR-binding peptide
RYKKLVKPKRGVFYLMSIANPGPTG

SEQ ID NO: 38237 - protein, 25 aa, Artificial Sequence
  Cyclic GFR-binding peptide
RYKKLVVKENEDLYLTSIANPGPTG

SEQ ID NO: 38238 - protein, 25 aa, Artificial Sequence
  Cyclic GFR-binding peptide
QYNKLIVNSSDDLYLTSIASPGPTG

SEQ ID NO: 38239 - protein, 25 aa, Artificial Sequence
  Cyclic GFR-binding peptide
QYNKLIVNSSDDLYLTSIANPGPTG

SEQ ID NO: 38240 - protein, 25 aa, Artificial Sequence
  Cyclic GFR-binding peptide
RYKKLIVKDYDDLYLTSIASPGPTG

SEQ ID NO: 38241 - protein, 25 aa, Artificial Sequence
  Cyclic GFR-binding peptide
QYNKLVVKDYEDLYLTSIASGWFWW

SEQ ID NO: 38242 - protein, 22 aa, Artificial Sequence
  Cyclic GFR-binding peptide
QYNKLGGGGLYLTSIASPGPTG

SEQ ID NO: 38243 - protein, 25 aa, Artificial Sequence
  Cyclic GFR-binding peptide
RHKRLIVNSSDDYYLVSTASPGPTG

SEQ ID NO: 38244 - protein, 24 aa, Artificial Sequence
  Cyclic GFR-binding peptide
GGNSLQEVKPKRGVYYVIPLPELE

SEQ ID NO: 38245 - protein, 22 aa, Artificial Sequence
  Cyclic GFR-binding peptide
GGNSLQEVKPTRGVYYVIPLPE

SEQ ID NO: 38246 - protein, 24 aa, Artificial Sequence
  Cyclic GFR-binding peptide
GGVQVEKHQGQHPKIRVKAVKVSR

SEQ ID NO: 38247 - protein, 24 aa, Artificial Sequence
  Cyclic GFR-binding peptide
GGSMEGIHQGQHPKIRMIQMTINS

SEQ ID NO: 38248 - protein, 29 aa, Artificial Sequence
  Cyclic GFR-binding peptide
VTAKKLKPKKRVYEIKRVQVPRLQVQTPR

SEQ ID NO: 38249 - protein, 25 aa, Artificial Sequence
  Cyclic GFR-binding peptide
PYVKLVVNKNEDFFLISLSSNKNED

SEQ ID NO: 38250 - protein, 25 aa, Artificial Sequence
  Cyclic GFR-binding peptide
PYVKLVVKENEDFFLISLSSKENED

SEQ ID NO: 38251 - protein, 22 aa, Artificial Sequence
  Cyclic GFR-binding peptide
GGEYQKYVVNNAADIYLISIPS

SEQ ID NO: 38252 - protein, 25 aa, Artificial Sequence
  Cyclic GFR-binding peptide
NNAADEYQKYVVNNAADIYLISIPS

SEQ ID NO: 38253 - protein, 22 aa, Artificial Sequence
  Cyclic GFR-binding peptide
GGEYQKYVVNNAADIYLLSIPS

SEQ ID NO: 38254 - protein, 19 aa, Artificial Sequence
  Cyclic GFR-binding peptide
GGAAEYQKYAAIYLISIPS

SEQ ID NO: 38255 - protein, 22 aa, Artificial Sequence
  Cyclic GFR-binding peptide
GGNSLQEVKPKRGVYYVIPLPE

SEQ ID NO: 38256 - protein, 25 aa, Artificial Sequence
  Cyclic GFR-binding peptide
NSSDDNSLQEIVNSSDDYYVIPLPE

SEQ ID NO: 38257 - protein, 23 aa, Artificial Sequence
  Cyclic GFR-binding peptide
NSSDDNSLQENSSDDYYVIPLPE

SEQ ID NO: 38258 - protein, 24 aa, Artificial Sequence
  Cyclic GFR-binding peptide
NAADEYQKYVVNNAADIYLISIPS

SEQ ID NO: 38259 - protein, 22 aa, Artificial Sequence
  Cyclic GFR-binding peptide
GGRYKKLIVNSSDDFYLTSIAN

SEQ ID NO: 38260 - protein, 24 aa, Artificial Sequence
  Cyclic GFR-binding peptide
GGQYNKLPKKRVIELYLTSIASLK

SEQ ID NO: 38261 - protein, 22 aa, Artificial Sequence
  Cyclic GFR-binding peptide
GGPIKGYIIQNKENFYLMNIPS

SEQ ID NO: 38262 - protein, 22 aa, Artificial Sequence
  Cyclic GFR-binding peptide
GGNSLQEIVNSSDDYYVIELPE

SEQ ID NO: 38263 - protein, 19 aa, Artificial Sequence
  Cyclic GFR-binding peptide
GGGQYNKLGGGLYLMSIAS

SEQ ID NO: 38264 - protein, 25 aa, Artificial Sequence
  Cyclic GFR-binding peptide
NKNEDPYVKLVVNKNEDFFLINIPS

SEQ ID NO: 38265 - protein, 27 aa, Artificial Sequence
  Cyclic GFR-binding peptide
IKPTKGINSLQEIKPTKGIMIQMTINS

SEQ ID NO: 38266 - protein, 25 aa, Artificial Sequence
  Cyclic GFR-binding peptide
GTPGPSAISMLYLDENKNVVLKNYQ

SEQ ID NO: 38267 - protein, 25 aa, Artificial Sequence
  Cyclic GFR-binding peptide
GTPGPSAISMLYLDDSSNVILKNYQ

SEQ ID NO: 38268 - protein, 25 aa, Artificial Sequence
  Cyclic GFR-binding peptide
GTPGPSAISMLYLDSSNNVILKNYQ

SEQ ID NO: 38269 - protein, 25 aa, Artificial Sequence
  Cyclic GFR-binding peptide
GTPGPSAISMLYLDDMGVPTLKNYQ

SEQ ID NO: 38270 - protein, 25 aa, Artificial Sequence
  Cyclic GFR-binding peptide
GTPGPSAISMLYLDKGVVTYLKNYQ

SEQ ID NO: 38271 - protein, 25 aa, Artificial Sequence
  Cyclic GFR-binding peptide
GTPGPSAISMLYLNDKQQIILKNYQ

SEQ ID NO: 38272 - protein, 25 aa, Artificial Sequence
  Cyclic GFR-binding peptide
GTPGPSAISMLYLDAANNVVLKNYQ

SEQ ID NO: 38273 - protein, 25 aa, Artificial Sequence
  Cyclic GFR-binding peptide
WWFWGSAISMLYLDSANNVVLKNYQ

SEQ ID NO: 38274 - protein, 25 aa, Artificial Sequence
  Cyclic GFR-binding peptide
WWFWGSAISMLYLDNGRVLLLKNYQ

SEQ ID NO: 38275 - protein, 25 aa, Artificial Sequence
  Cyclic GFR-binding peptide
WWFWGSAISMLYLVGRKPKVLKNYQ

SEQ ID NO: 38276 - protein, 25 aa, Artificial Sequence
  Cyclic GFR-binding peptide
WWFWGSAISMLYLIGKTPKILKNYQ

SEQ ID NO: 38277 - protein, 25 aa, Artificial Sequence
  Cyclic GFR-binding peptide
WWFWGSAISMLYLVGRTPKVLKNYQ

SEQ ID NO: 38278 - protein, 25 aa, Artificial Sequence
  Cyclic GFR-binding peptide
WWFWGSAISMLYLDENKNVVLKNYQ

SEQ ID NO: 38279 - protein, 25 aa, Artificial Sequence
  Cyclic GFR-binding peptide
WWFWGSAISMLYLDDSSNVILKNYQ

SEQ ID NO: 38280 - protein, 21 aa, Artificial Sequence
  Cyclic GFR-binding peptide
GTPGPSAISMLYLGGGLKNYQ

SEQ ID NO: 38281 - protein, 22 aa, Artificial Sequence
  Cyclic GFR-binding peptide
GTPGPSAISMLYLGGGGLKNYQ

SEQ ID NO: 38282 - protein, 19 aa, Artificial Sequence
  Cyclic GFR-binding peptide
SAISMLYLGGGLKNYQGGG

SEQ ID NO: 38283 - protein, 27 aa, Artificial Sequence
  Cyclic GFR-binding peptide
SAISMLYLRIKPHQGQHLKNYQRIKPH

SEQ ID NO: 38284 - protein, 27 aa, Artificial Sequence
  Cyclic GFR-binding peptide
SAISMLYLEYVRKKPKLLKNYQEYVRK

SEQ ID NO: 38285 - protein, 27 aa, Artificial Sequence
  Cyclic GFR-binding peptide
SAISMLYLEIVRKKPIFLKNYQEIVRK

SEQ ID NO: 38286 - protein, 25 aa, Artificial Sequence
  Cyclic GFR-binding peptide
GTPGPSSLSILFFDENEKVVLKVYP

SEQ ID NO: 38287 - protein, 25 aa, Artificial Sequence
  Cyclic GFR-binding peptide
GTPGPSSLSILFFDEYDKVVLKVYP

SEQ ID NO: 38288 - protein, 25 aa, Artificial Sequence
  Cyclic GFR-binding peptide
GTPGPSSLSILFFDDSSNVILKVYP

SEQ ID NO: 38289 - protein, 25 aa, Artificial Sequence
  Cyclic GFR-binding peptide
GTPGPSSLSILFFDSSNNVILKVYP

SEQ ID NO: 38290 - protein, 25 aa, Artificial Sequence
  Cyclic GFR-binding peptide
GTPGPSSLSILFFDDMGVPTLKVYP

SEQ ID NO: 38291 - protein, 25 aa, Artificial Sequence
  Cyclic GFR-binding peptide
GTPGPSSLSILFFDKGVVTYLKVYP

SEQ ID NO: 38292 - protein, 25 aa, Artificial Sequence
  Cyclic GFR-binding peptide
GTPGPSSLSILFFNDKQQIILKVYP

SEQ ID NO: 38293 - protein, 25 aa, Artificial Sequence
  Cyclic GFR-binding peptide
WWFWGSSLSILFFDAANNVVLKVYP

SEQ ID NO: 38294 - protein, 25 aa, Artificial Sequence
  Cyclic GFR-binding peptide
WWFWGSSLSILFFDSANNVVLKVYP

SEQ ID NO: 38295 - protein, 25 aa, Artificial Sequence
  Cyclic GFR-binding peptide
WWFWGSSLSILFFDNGRVLLLKVYP

SEQ ID NO: 38296 - protein, 25 aa, Artificial Sequence
  Cyclic GFR-binding peptide
WWFWGSSLSILFFVGRKPKVLKVYP

SEQ ID NO: 38297 - protein, 25 aa, Artificial Sequence
  Cyclic GFR-binding peptide
WWFWGSSLSILFFIGKTPKILKVYP

SEQ ID NO: 38298 - protein, 25 aa, Artificial Sequence
  Cyclic GFR-binding peptide
WWFWGSSLSILFFVGRTPKVLKVYP

SEQ ID NO: 38299 - protein, 25 aa, Artificial Sequence
  Cyclic GFR-binding peptide
WWFWGSSLSILFFDENEKVVLKVYP

SEQ ID NO: 38300 - protein, 21 aa, Artificial Sequence
  Cyclic GFR-binding peptide
GTPGPSSLSILFFGGGLKVYP

SEQ ID NO: 38301 - protein, 22 aa, Artificial Sequence
  Cyclic GFR-binding peptide
GTPGPSSLSILFFGGGGLKVYP

SEQ ID NO: 38302 - protein, 19 aa, Artificial Sequence
  Cyclic GFR-binding peptide
SSLSILFFGGGLKVYPGGG

SEQ ID NO: 38303 - protein, 27 aa, Artificial Sequence
  Cyclic GFR-binding peptide
SSLSILFFEYVRKKPKLLKVYPEYVRK

SEQ ID NO: 38304 - protein, 27 aa, Artificial Sequence
  Cyclic GFR-binding peptide
SSLSILFFEIVRKKPIFLKVYPEIVRK

SEQ ID NO: 38305 - protein, 25 aa, Artificial Sequence
  Cyclic GFR-binding peptide
GTPGPNAISVLYFDENEKVVLKKYR

SEQ ID NO: 38306 - protein, 25 aa, Artificial Sequence
  Cyclic GFR-binding peptide
GTPGPNAISVLYFDENKNVVLKKYR

SEQ ID NO: 38307 - protein, 25 aa, Artificial Sequence
  Cyclic GFR-binding peptide
GTPGPNAISVLYFDEYDKVVLKKYR

SEQ ID NO: 38308 - protein, 25 aa, Artificial Sequence
  Cyclic GFR-binding peptide
GTPGPNAISVLYFDSSNNVILKKYR

SEQ ID NO: 38309 - protein, 25 aa, Artificial Sequence
  Cyclic GFR-binding peptide
GTPGPNAISVLYFDDMGVPTLKKYR

SEQ ID NO: 38310 - protein, 25 aa, Artificial Sequence
  Cyclic GFR-binding peptide
GTPGPNAISVLYFDKGVVTYLKKYR

SEQ ID NO: 38311 - protein, 25 aa, Artificial Sequence
  Cyclic GFR-binding peptide
GTPGPNAISVLYFNDKQQIILKKYR

SEQ ID NO: 38312 - protein, 25 aa, Artificial Sequence
  Cyclic GFR-binding peptide
GTPGPNAISVLYFDAANNVVLKKYR

SEQ ID NO: 38313 - protein, 25 aa, Artificial Sequence
  Cyclic GFR-binding peptide
WWFWGNAISVLYFDSANNVVLKKYR

SEQ ID NO: 38314 - protein, 25 aa, Artificial Sequence
  Cyclic GFR-binding peptide
WWFWGNAISVLYFDNGRVLLLKKYR

SEQ ID NO: 38315 - protein, 25 aa, Artificial Sequence
  Cyclic GFR-binding peptide
WWFWGNAISVLYFVGRKPKVLKKYR

SEQ ID NO: 38316 - protein, 25 aa, Artificial Sequence
  Cyclic GFR-binding peptide
WWFWGNAISVLYFIGKTPKILKKYR

SEQ ID NO: 38317 - protein, 25 aa, Artificial Sequence
  Cyclic GFR-binding peptide
WWFWGNAISVLYFVGRTPKVLKKYR

SEQ ID NO: 38318 - protein, 25 aa, Artificial Sequence
  Cyclic GFR-binding peptide
WWFWGNAISVLYFDENEKVVLKKYR

SEQ ID NO: 38319 - protein, 25 aa, Artificial Sequence
  Cyclic GFR-binding peptide
WWFWGNAISVLYFDENKNVVLKKYR

SEQ ID NO: 38320 - protein, 20 aa, Artificial Sequence
  Cyclic GFR-binding peptide
GTPGPNAISVLYGGGLKKYR

SEQ ID NO: 38321 - protein, 21 aa, Artificial Sequence
  Cyclic GFR-binding peptide
GTPGPNAISVLYGGGGLKKYR

SEQ ID NO: 38322 - protein, 18 aa, Artificial Sequence
  Cyclic GFR-binding peptide
NAISVLYGGGLKKYRGGG

SEQ ID NO: 38323 - protein, 27 aa, Artificial Sequence
  Cyclic GFR-binding peptide
NAISVLYFRIKPHQGQHLKKYRRIKPH

SEQ ID NO: 38324 - protein, 27 aa, Artificial Sequence
  Cyclic GFR-binding peptide
NAISVLYFEYVRKKPKLLKKYREYVRK

SEQ ID NO: 38325 - protein, 27 aa, Artificial Sequence
  Cyclic GFR-binding peptide
NAISVLYFEIVRKKPIFLKKYREIVRK

SEQ ID NO: 38326 - protein, 25 aa, Artificial Sequence
  Cyclic GFR-binding peptide
GTPGPSATSVLYYDENEKVVLRKHR

SEQ ID NO: 38327 - protein, 25 aa, Artificial Sequence
  Cyclic GFR-binding peptide
GTPGPSATSVLYYDEYDKVVLRKHR

SEQ ID NO: 38328 - protein, 25 aa, Artificial Sequence
  Cyclic GFR-binding peptide
GTPGPSATSVLYYDDSSNVILRKHR

SEQ ID NO: 38329 - protein, 25 aa, Artificial Sequence
  Cyclic GFR-binding peptide
GTPGPSATSVLYYDDMGVPTLRKHR

SEQ ID NO: 38330 - protein, 25 aa, Artificial Sequence
  Cyclic GFR-binding peptide
GTPGPSATSVLYYDKGVVTYLRKHR

SEQ ID NO: 38331 - protein, 25 aa, Artificial Sequence
  Cyclic GFR-binding peptide
GTPGPSATSVLYYNDKQQIILRKHR

SEQ ID NO: 38332 - protein, 25 aa, Artificial Sequence
  Cyclic GFR-binding peptide
WWFWGSATSVLYYDAANNVVLRKHR

SEQ ID NO: 38333 - protein, 25 aa, Artificial Sequence
  Cyclic GFR-binding peptide
WWFWGSATSVLYYDSANNVVLRKHR

SEQ ID NO: 38334 - protein, 25 aa, Artificial Sequence
  Cyclic GFR-binding peptide
WWFWGSATSVLYYDNGRVLLLRKHR

SEQ ID NO: 38335 - protein, 25 aa, Artificial Sequence
  Cyclic GFR-binding peptide
WWFWGSATSVLYYVGRKPKVLRKHR

SEQ ID NO: 38336 - protein, 25 aa, Artificial Sequence
  Cyclic GFR-binding peptide
WWFWGSATSVLYYIGKTPKILRKHR

SEQ ID NO: 38337 - protein, 25 aa, Artificial Sequence
  Cyclic GFR-binding peptide
WWFWGSATSVLYYVGRTPKVLRKHR

SEQ ID NO: 38338 - protein, 25 aa, Artificial Sequence
  Cyclic GFR-binding peptide
WWFWGSATSVLYYDENEKVVLRKHR

SEQ ID NO: 38339 - protein, 21 aa, Artificial Sequence
  Cyclic GFR-binding peptide
GTPGPSATSVLYYGGGLRKHR

SEQ ID NO: 38340 - protein, 22 aa, Artificial Sequence
  Cyclic GFR-binding peptide
GTPGPSATSVLYYGGGGLRKHR

SEQ ID NO: 38341 - protein, 19 aa, Artificial Sequence
  Cyclic GFR-binding peptide
SATSVLYYGGGLRKHRGGG

SEQ ID NO: 38342 - protein, 25 aa, Artificial Sequence
  Cyclic GFR-binding peptide
SATSVLYYVGRTPKVLRKHRVGRTP

SEQ ID NO: 38343 - protein, 27 aa, Artificial Sequence
  Cyclic GFR-binding peptide
SATSVLYYRIKPHQGQHLRKHRRIKPH

SEQ ID NO: 38344 - protein, 27 aa, Artificial Sequence
  Cyclic GFR-binding peptide
SATSVLYYEYVRKKPKLLRKHREYVRK

SEQ ID NO: 38345 - protein, 27 aa, Artificial Sequence
  Cyclic GFR-binding peptide
SATSVLYYEIVRKKPIFLRKHREIVRK

SEQ ID NO: 38346 - protein, 25 aa, Artificial Sequence
  Cyclic GFR-binding peptide
GTPGPSPISVLYKDENEKVVLKYHY

SEQ ID NO: 38347 - protein, 25 aa, Artificial Sequence
  Cyclic GFR-binding peptide
GTPGPSPISVLYKDENKNVVLKYHY

SEQ ID NO: 38348 - protein, 25 aa, Artificial Sequence
  Cyclic GFR-binding peptide
GTPGPSPISVLYKDEYDKVVLKYHY

SEQ ID NO: 38349 - protein, 25 aa, Artificial Sequence
  Cyclic GFR-binding peptide
GTPGPSPISVLYKDDSSNVILKYHY

SEQ ID NO: 38350 - protein, 25 aa, Artificial Sequence
  Cyclic GFR-binding peptide
GTPGPSPISVLYKDSSNNVILKYHY

SEQ ID NO: 38351 - protein, 25 aa, Artificial Sequence
  Cyclic GFR-binding peptide
GTPGPSPISVLYKDKGVVTYLKYHY

SEQ ID NO: 38352 - protein, 25 aa, Artificial Sequence
  Cyclic GFR-binding peptide
GTPGPSPISVLYKNDKQQIILKYHY

SEQ ID NO: 38353 - protein, 25 aa, Artificial Sequence
  Cyclic GFR-binding peptide
WWFWGSPISVLYKDAANNVVLKYHY

SEQ ID NO: 38354 - protein, 25 aa, Artificial Sequence
  Cyclic GFR-binding peptide
WWFWGSPISVLYKDSANNVVLKYHY

SEQ ID NO: 38355 - protein, 25 aa, Artificial Sequence
  Cyclic GFR-binding peptide
WWFWGSPISVLYKDNGRVLLLKYHY

SEQ ID NO: 38356 - protein, 25 aa, Artificial Sequence
  Cyclic GFR-binding peptide
WWFWGSPISVLYKVGRKPKVLKYHY

SEQ ID NO: 38357 - protein, 25 aa, Artificial Sequence
  Cyclic GFR-binding peptide
WWFWGSPISVLYKIGKTPKILKYHY

SEQ ID NO: 38358 - protein, 25 aa, Artificial Sequence
  Cyclic GFR-binding peptide
WWFWGSPISVLYKVGRTPKVLKYHY

SEQ ID NO: 38359 - protein, 25 aa, Artificial Sequence
  Cyclic GFR-binding peptide
WWFWGSPISVLYKDENEKVVLKYHY

SEQ ID NO: 38360 - protein, 20 aa, Artificial Sequence
  Cyclic GFR-binding peptide
GTPGPSPISVLYGGGLKYHY

SEQ ID NO: 38361 - protein, 21 aa, Artificial Sequence
  Cyclic GFR-binding peptide
GTPGPSPISVLYGGGGLKYHY

SEQ ID NO: 38362 - protein, 18 aa, Artificial Sequence
  Cyclic GFR-binding peptide
SPISVLYGGGLKYHYGGG

SEQ ID NO: 38363 - protein, 25 aa, Artificial Sequence
  Cyclic GFR-binding peptide
SPISVLYKVGRTPKVLKYHYVGRTP

SEQ ID NO: 38364 - protein, 27 aa, Artificial Sequence
  Cyclic GFR-binding peptide
SPISVLYKRIKPHQGQHLKYHYRIKPH

SEQ ID NO: 38365 - protein, 27 aa, Artificial Sequence
  Cyclic GFR-binding peptide
SPISVLYKEYVRKKPKLLKYHYEYVRK

SEQ ID NO: 38366 - protein, 27 aa, Artificial Sequence
  Cyclic GFR-binding peptide
SPISVLYKEIVRKKPIFLKYHYEIVRK

SEQ ID NO: 38367 - protein, 25 aa, Artificial Sequence
  Cyclic GFR-binding peptide
GTPGPEPISILYLDENEKVVKFKYE

SEQ ID NO: 38368 - protein, 25 aa, Artificial Sequence
  Cyclic GFR-binding peptide
GTPGPEPISILYLDENKNVVKFKYE

SEQ ID NO: 38369 - protein, 25 aa, Artificial Sequence
  Cyclic GFR-binding peptide
GTPGPEPISILYLDEYDKVVKFKYE

SEQ ID NO: 38370 - protein, 25 aa, Artificial Sequence
  Cyclic GFR-binding peptide
GTPGPEPISILYLDDSSNVIKFKYE

SEQ ID NO: 38371 - protein, 25 aa, Artificial Sequence
  Cyclic GFR-binding peptide
GTPGPEPISILYLDSSNNVIKFKYE

SEQ ID NO: 38372 - protein, 25 aa, Artificial Sequence
  Cyclic GFR-binding peptide
GTPGPEPISILYLDDMGVPTKFKYE

SEQ ID NO: 38373 - protein, 25 aa, Artificial Sequence
  Cyclic GFR-binding peptide
GTPGPEPISILYLNDKQQIIKFKYE

SEQ ID NO: 38374 - protein, 25 aa, Artificial Sequence
  Cyclic GFR-binding peptide
WWFWGEPISILYLDAANNVVKFKYE

SEQ ID NO: 38375 - protein, 25 aa, Artificial Sequence
  Cyclic GFR-binding peptide
WWFWGEPISILYLDSANNVVKFKYE

SEQ ID NO: 38376 - protein, 25 aa, Artificial Sequence
  Cyclic GFR-binding peptide
WWFWGEPISILYLDNGRVLLKFKYE

SEQ ID NO: 38377 - protein, 25 aa, Artificial Sequence
  Cyclic GFR-binding peptide
WWFWGEPISILYLVGRKPKVKFKYE

SEQ ID NO: 38378 - protein, 25 aa, Artificial Sequence
  Cyclic GFR-binding peptide
WWFWGEPISILYLIGKTPKIKFKYE

SEQ ID NO: 38379 - protein, 25 aa, Artificial Sequence
  Cyclic GFR-binding peptide
WWFWGEPISILYLVGRTPKVKFKYE

SEQ ID NO: 38380 - protein, 25 aa, Artificial Sequence
  Cyclic GFR-binding peptide
WWFWGEPISILYLDENEKVVKFKYE

SEQ ID NO: 38381 - protein, 19 aa, Artificial Sequence
  Cyclic GFR-binding peptide
EPISILYLGGGKFKYEGGG

SEQ ID NO: 38382 - protein, 25 aa, Artificial Sequence
  Cyclic GFR-binding peptide
EPISILYLVGRTPKVKFKYEVGRTP

SEQ ID NO: 38383 - protein, 27 aa, Artificial Sequence
  Cyclic GFR-binding peptide
EPISILYLRIKPHQGQHKFKYERIKPH

SEQ ID NO: 38384 - protein, 27 aa, Artificial Sequence
  Cyclic GFR-binding peptide
EPISILYLEYVRKKPKLKFKYEEYVRK

SEQ ID NO: 38385 - protein, 27 aa, Artificial Sequence
  Cyclic GFR-binding peptide
EPISILYLEIVRKKPIFKFKYEEIVRK

SEQ ID NO: 38386 - protein, 25 aa, Artificial Sequence
  Cyclic GFR-binding peptide
GTPGPSPINMLYFDENEKVVYGKIP

SEQ ID NO: 38387 - protein, 25 aa, Artificial Sequence
  Cyclic GFR-binding peptide
GTPGPSPINMLYFDENKNVVYGKIP

SEQ ID NO: 38388 - protein, 25 aa, Artificial Sequence
  Cyclic GFR-binding peptide
GTPGPSPINMLYFDEYDKVVYGKIP

SEQ ID NO: 38389 - protein, 25 aa, Artificial Sequence
  Cyclic GFR-binding peptide
GTPGPSPINMLYFDDSSNVIYGKIP

SEQ ID NO: 38390 - protein, 25 aa, Artificial Sequence
  Cyclic GFR-binding peptide
GTPGPSPINMLYFDSSNNVIYGKIP

SEQ ID NO: 38391 - protein, 25 aa, Artificial Sequence
  Cyclic GFR-binding peptide
GTPGPSPINMLYFDDMGVPTYGKIP

SEQ ID NO: 38392 - protein, 25 aa, Artificial Sequence
  Cyclic GFR-binding peptide
GTPGPSPINMLYFDKGVVTYYGKIP

SEQ ID NO: 38393 - protein, 25 aa, Artificial Sequence
  Cyclic GFR-binding peptide
WWFWGSPINMLYFDAANNVVYGKIP

SEQ ID NO: 38394 - protein, 25 aa, Artificial Sequence
  Cyclic GFR-binding peptide
WWFWGSPINMLYFDSANNVVYGKIP

SEQ ID NO: 38395 - protein, 25 aa, Artificial Sequence
  Cyclic GFR-binding peptide
WWFWGSPINMLYFDNGRVLLYGKIP

SEQ ID NO: 38396 - protein, 25 aa, Artificial Sequence
  Cyclic GFR-binding peptide
WWFWGSPINMLYFVGRKPKVYGKIP

SEQ ID NO: 38397 - protein, 25 aa, Artificial Sequence
  Cyclic GFR-binding peptide
WWFWGSPINMLYFIGKTPKIYGKIP

SEQ ID NO: 38398 - protein, 25 aa, Artificial Sequence
  Cyclic GFR-binding peptide
WWFWGSPINMLYFVGRTPKVYGKIP

SEQ ID NO: 38399 - protein, 25 aa, Artificial Sequence
  Cyclic GFR-binding peptide
WWFWGSPINMLYFDENEKVVYGKIP

SEQ ID NO: 38400 - protein, 21 aa, Artificial Sequence
  Cyclic GFR-binding peptide
GTPGPSPINMLYFGGGYGKIP

SEQ ID NO: 38401 - protein, 22 aa, Artificial Sequence
  Cyclic GFR-binding peptide
GTPGPSPINMLYFGGGGYGKIP

SEQ ID NO: 38402 - protein, 19 aa, Artificial Sequence
  Cyclic GFR-binding peptide
SPINMLYFGGGYGKIPGGG

SEQ ID NO: 38403 - protein, 25 aa, Artificial Sequence
  Cyclic GFR-binding peptide
SPINMLYFIGKTPKIYGKIPIGKTP

SEQ ID NO: 38404 - protein, 25 aa, Artificial Sequence
  Cyclic GFR-binding peptide
SPINMLYFVGRTPKVYGKIPVGRTP

SEQ ID NO: 38405 - protein, 27 aa, Artificial Sequence
  Cyclic GFR-binding peptide
SPINMLYFRIKPHQGQHYGKIPRIKPH

SEQ ID NO: 38406 - protein, 27 aa, Artificial Sequence
  Cyclic GFR-binding peptide
SPINMLYFEYVRKKPKLYGKIPEYVRK

SEQ ID NO: 38407 - protein, 27 aa, Artificial Sequence
  Cyclic GFR-binding peptide
SPINMLYFEIVRKKPIFYGKIPEIVRK

SEQ ID NO: 38408 - protein, 25 aa, Artificial Sequence
  Cyclic GFR-binding peptide
GTPGPSPISILYIDENEKVVYKQYE

SEQ ID NO: 38409 - protein, 25 aa, Artificial Sequence
  Cyclic GFR-binding peptide
GTPGPSPISILYIDENKNVVYKQYE

SEQ ID NO: 38410 - protein, 25 aa, Artificial Sequence
  Cyclic GFR-binding peptide
GTPGPSPISILYIDEYDKVVYKQYE

SEQ ID NO: 38411 - protein, 25 aa, Artificial Sequence
  Cyclic GFR-binding peptide
GTPGPSPISILYIDDSSNVIYKQYE

SEQ ID NO: 38412 - protein, 25 aa, Artificial Sequence
  Cyclic GFR-binding peptide
GTPGPSPISILYIDSSNNVIYKQYE

SEQ ID NO: 38413 - protein, 25 aa, Artificial Sequence
  Cyclic GFR-binding peptide
GTPGPSPISILYIDDMGVPTYKQYE

SEQ ID NO: 38414 - protein, 25 aa, Artificial Sequence
  Cyclic GFR-binding peptide
GTPGPSPISILYIDKGVVTYYKQYE

SEQ ID NO: 38415 - protein, 25 aa, Artificial Sequence
  Cyclic GFR-binding peptide
WWFWGSPISILYINDKQQIIYKQYE

SEQ ID NO: 38416 - protein, 25 aa, Artificial Sequence
  Cyclic GFR-binding peptide
WWFWGSPISILYIDSANNVVYKQYE

SEQ ID NO: 38417 - protein, 25 aa, Artificial Sequence
  Cyclic GFR-binding peptide
WWFWGSPISILYIDNGRVLLYKQYE

SEQ ID NO: 38418 - protein, 25 aa, Artificial Sequence
  Cyclic GFR-binding peptide
WWFWGSPISILYIVGRKPKVYKQYE

SEQ ID NO: 38419 - protein, 25 aa, Artificial Sequence
  Cyclic GFR-binding peptide
WWFWGSPISILYIIGKTPKIYKQYE

SEQ ID NO: 38420 - protein, 25 aa, Artificial Sequence
  Cyclic GFR-binding peptide
WWFWGSPISILYIVGRTPKVYKQYE

SEQ ID NO: 38421 - protein, 25 aa, Artificial Sequence
  Cyclic GFR-binding peptide
WWFWGSPISILYIDENEKVVYKQYE

SEQ ID NO: 38422 - protein, 21 aa, Artificial Sequence
  Cyclic GFR-binding peptide
GTPGPSPISILYIGGGYKQYE

SEQ ID NO: 38423 - protein, 22 aa, Artificial Sequence
  Cyclic GFR-binding peptide
GTPGPSPISILYIGGGGYKQYE

SEQ ID NO: 38424 - protein, 25 aa, Artificial Sequence
  Cyclic GFR-binding peptide
SPISILYIDKGVVTYYKQYEDKGVV

SEQ ID NO: 38425 - protein, 25 aa, Artificial Sequence
  Cyclic GFR-binding peptide
SPISILYINDKQQIIYKQYENDKQQ

SEQ ID NO: 38426 - protein, 25 aa, Artificial Sequence
  Cyclic GFR-binding peptide
SPISILYIDSANNVVYKQYEDSANN

SEQ ID NO: 38427 - protein, 25 aa, Artificial Sequence
  Cyclic GFR-binding peptide
SPISILYIDNGRVLLYKQYEDNGRV

SEQ ID NO: 38428 - protein, 25 aa, Artificial Sequence
  Cyclic GFR-binding peptide
SPISILYIVGRKPKVYKQYEVGRKP

SEQ ID NO: 38429 - protein, 25 aa, Artificial Sequence
  Cyclic GFR-binding peptide
SPISILYIIGKTPKIYKQYEIGKTP

SEQ ID NO: 38430 - protein, 25 aa, Artificial Sequence
  Cyclic GFR-binding peptide
SPISILYIVGRTPKVYKQYEVGRTP

SEQ ID NO: 38431 - protein, 27 aa, Artificial Sequence
  Cyclic GFR-binding peptide
SPISILYIRIKPHQGQHYKQYERIKPH

SEQ ID NO: 38432 - protein, 19 aa, Artificial Sequence
  Cyclic GFR-binding peptide
SPISILYIGGGYKQYEGGG

SEQ ID NO: 38433 - protein, 19 aa, Artificial Sequence
  Cyclic GFR-binding peptide
SPISILFIGGGYKQYEGGG

SEQ ID NO: 38434 - protein, 22 aa, Artificial Sequence
  Cyclic GFR-binding peptide
GTPGPSPISILFIGGGGYKQYE

SEQ ID NO: 38435 - protein, 22 aa, Artificial Sequence
  Cyclic GFR-binding peptide
WWFWGSPISILFIGGGGYKQYE

SEQ ID NO: 38436 - protein, 21 aa, Artificial Sequence
  Cyclic GFR-binding peptide
WWFWGSPISILFIGGGYKQYE

SEQ ID NO: 38437 - protein, 21 aa, Artificial Sequence
  Cyclic GFR-binding peptide
GTPGPSPISILFIGGGYKQYE

SEQ ID NO: 38438 - protein, 25 aa, Artificial Sequence
  Cyclic GFR-binding peptide
GTPGPSPISILFIDNGRVLLYKQYE

SEQ ID NO: 38439 - protein, 25 aa, Artificial Sequence
  Cyclic GFR-binding peptide
GTPGPSPISILFIVGRKPKVYKQYE

SEQ ID NO: 38440 - protein, 25 aa, Artificial Sequence
  Cyclic GFR-binding peptide
WWFWGSPISILFIIGKTPKIYKQYE

SEQ ID NO: 38441 - protein, 25 aa, Artificial Sequence
  Cyclic GFR-binding peptide
WWFWGSPISILFIVGRTPKVYKQYE

SEQ ID NO: 38442 - protein, 25 aa, Artificial Sequence
  Cyclic GFR-binding peptide
GTPGPSPISILFIDENKNVVYKQYE

SEQ ID NO: 38443 - protein, 25 aa, Artificial Sequence
  Cyclic GFR-binding peptide
GTPGPSPISILFIDDSSNVIYKQYE

SEQ ID NO: 38444 - protein, 25 aa, Artificial Sequence
  Cyclic GFR-binding peptide
GTPGPSPISILFIDSSNNVIYKQYE

SEQ ID NO: 38445 - protein, 25 aa, Artificial Sequence
  Cyclic GFR-binding peptide
WWFWGSPISILFIDDMGVPTYKQYE

SEQ ID NO: 38446 - protein, 25 aa, Artificial Sequence
  Cyclic GFR-binding peptide
WWFWGSPISILFIDKGVVTYYKQYE

SEQ ID NO: 38447 - protein, 25 aa, Artificial Sequence
  Cyclic GFR-binding peptide
GTPGPSPISILFINDKQQIIYKQYE

SEQ ID NO: 38448 - protein, 25 aa, Artificial Sequence
  Cyclic GFR-binding peptide
GTPGPSPISILFIDAANNVVYKQYE

SEQ ID NO: 38449 - protein, 25 aa, Artificial Sequence
  Cyclic GFR-binding peptide
SPISILFIDNGRVLLYKQYEDNGRV

SEQ ID NO: 38450 - protein, 25 aa, Artificial Sequence
  Cyclic GFR-binding peptide
SPISILFIVGRKPKVYKQYEVGRKP

SEQ ID NO: 38451 - protein, 25 aa, Artificial Sequence
  Cyclic GFR-binding peptide
SPISILFIIGKTPKIYKQYEIGKTP

SEQ ID NO: 38452 - protein, 25 aa, Artificial Sequence
  Cyclic GFR-binding peptide
SPISILFIVGRTPKVYKQYEVGRTP

SEQ ID NO: 38453 - protein, 27 aa, Artificial Sequence
  Cyclic GFR-binding peptide
SPISILFIRIKPHQGQHYKQYERIKPH

SEQ ID NO: 38454 - protein, 27 aa, Artificial Sequence
  Cyclic GFR-binding peptide
SPISILFIEYVRKKPKLYKQYEEYVRK

SEQ ID NO: 38455 - protein, 27 aa, Artificial Sequence
  Cyclic GFR-binding peptide
SPISILFIEIVRKKPIFYKQYEEIVRK

SEQ ID NO: 38456 - protein, 25 aa, Artificial Sequence
  Cyclic GFR-binding peptide
GTPGPKPLSMLYVDENEKVVDHHKD

SEQ ID NO: 38457 - protein, 25 aa, Artificial Sequence
  Cyclic GFR-binding peptide
GTPGPKPLSMLYVDENKNVVDHHKD

SEQ ID NO: 38458 - protein, 25 aa, Artificial Sequence
  Cyclic GFR-binding peptide
GTPGPKPLSMLYVDEYDKVVDHHKD

SEQ ID NO: 38459 - protein, 25 aa, Artificial Sequence
  Cyclic GFR-binding peptide
GTPGPKPLSMLYVDDSSNVIDHHKD

SEQ ID NO: 38460 - protein, 25 aa, Artificial Sequence
  Cyclic GFR-binding peptide
GTPGPKPLSMLYVDSSNNVIDHHKD

SEQ ID NO: 38461 - protein, 21 aa, Artificial Sequence
  Cyclic GFR-binding peptide
GTPGPKPLSMLYVGGGDHHKD

SEQ ID NO: 38462 - protein, 22 aa, Artificial Sequence
  Cyclic GFR-binding peptide
GTPGPKPLSMLYVGGGGDHHKD

SEQ ID NO: 38463 - protein, 25 aa, Artificial Sequence
  Cyclic GFR-binding peptide
WWFWGKPLSMLYVNDKQQIIDHHKD

SEQ ID NO: 38464 - protein, 25 aa, Artificial Sequence
  Cyclic GFR-binding peptide
WWFWGKPLSMLYVDAANNVVDHHKD

SEQ ID NO: 38465 - protein, 25 aa, Artificial Sequence
  Cyclic GFR-binding peptide
WWFWGKPLSMLYVDSANNVVDHHKD

SEQ ID NO: 38466 - protein, 21 aa, Artificial Sequence
  Cyclic GFR-binding peptide
WWFWGKPLSMLYVGGGDHHKD

SEQ ID NO: 38467 - protein, 22 aa, Artificial Sequence
  Cyclic GFR-binding peptide
WWFWGKPLSMLYVGGGGDHHKD

SEQ ID NO: 38468 - protein, 25 aa, Artificial Sequence
  Cyclic GFR-binding peptide
WWFWGKPLSMLYVVGRTPKVDHHKD

SEQ ID NO: 38469 - protein, 25 aa, Artificial Sequence
  Cyclic GFR-binding peptide
WWFWGKPLSMLYVDENEKVVDHHKD

SEQ ID NO: 38470 - protein, 19 aa, Artificial Sequence
  Cyclic GFR-binding peptide
KPLSMLYVGGGDHHKDGGG

SEQ ID NO: 38471 - protein, 25 aa, Artificial Sequence
  Cyclic GFR-binding peptide
KPLSMLYVVGRTPKVDHHKDVGRTP

SEQ ID NO: 38472 - protein, 27 aa, Artificial Sequence
  Cyclic GFR-binding peptide
KPLSMLYVRIKPHQGQHDHHKDRIKPH

SEQ ID NO: 38473 - protein, 27 aa, Artificial Sequence
  Cyclic GFR-binding peptide
KPLSMLYVEYVRKKPKLDHHKDEYVRK

SEQ ID NO: 38474 - protein, 27 aa, Artificial Sequence
  Cyclic GFR-binding peptide
KPLSMLYVEIVRKKPIFDHHKDEIVRK

SEQ ID NO: 38475 - protein, 25 aa, Artificial Sequence
  Cyclic GFR-binding peptide
GTPGPEPLPIVYYDENEKVVEQLSN

SEQ ID NO: 38476 - protein, 25 aa, Artificial Sequence
  Cyclic GFR-binding peptide
GTPGPEPLPIVYYDENKNVVEQLSN

SEQ ID NO: 38477 - protein, 21 aa, Artificial Sequence
  Cyclic GFR-binding peptide
GTPGPEPLPIVYYGGGEQLSN

SEQ ID NO: 38478 - protein, 22 aa, Artificial Sequence
  Cyclic GFR-binding peptide
GTPGPEPLPIVYYGGGGEQLSN

SEQ ID NO: 38479 - protein, 25 aa, Artificial Sequence
  Cyclic GFR-binding peptide
GTPGPEPLPIVYYDDSSNVIEQLSN

SEQ ID NO: 38480 - protein, 25 aa, Artificial Sequence
  Cyclic GFR-binding peptide
GTPGPEPLPIVYYDSSNNVIEQLSN

SEQ ID NO: 38481 - protein, 25 aa, Artificial Sequence
  Cyclic GFR-binding peptide
GTPGPEPLPIVYYDDMGVPTEQLSN

SEQ ID NO: 38482 - protein, 25 aa, Artificial Sequence
  Cyclic GFR-binding peptide
GTPGPEPLPIVYYDKGVVTYEQLSN

SEQ ID NO: 38483 - protein, 25 aa, Artificial Sequence
  Cyclic GFR-binding peptide
WWFWGEPLPIVYYNDKQQIIEQLSN

SEQ ID NO: 38484 - protein, 25 aa, Artificial Sequence
  Cyclic GFR-binding peptide
WWFWGEPLPIVYYDAANNVVEQLSN

SEQ ID NO: 38485 - protein, 21 aa, Artificial Sequence
  Cyclic GFR-binding peptide
WWFWGEPLPIVYYGGGEQLSN

SEQ ID NO: 38486 - protein, 22 aa, Artificial Sequence
  Cyclic GFR-binding peptide
WWFWGEPLPIVYYGGGGEQLSN

SEQ ID NO: 38487 - protein, 25 aa, Artificial Sequence
  Cyclic GFR-binding peptide
WWFWGEPLPIVYYIGKTPKIEQLSN

SEQ ID NO: 38488 - protein, 25 aa, Artificial Sequence
  Cyclic GFR-binding peptide
WWFWGEPLPIVYYVGRTPKVEQLSN

SEQ ID NO: 38489 - protein, 25 aa, Artificial Sequence
  Cyclic GFR-binding peptide
WWFWGEPLPIVYYDENEKVVEQLSN

SEQ ID NO: 38490 - protein, 25 aa, Artificial Sequence
  Cyclic GFR-binding peptide
GTPGPEPLPIVYYDEYDKVVEQLSN

SEQ ID NO: 38491 - protein, 25 aa, Artificial Sequence
  Cyclic GFR-binding peptide
EPLPIVYYDKGVVTYEQLSNDKGVV

SEQ ID NO: 38492 - protein, 25 aa, Artificial Sequence
  Cyclic GFR-binding peptide
EPLPIVYYNDKQQIIEQLSNNDKQQ

SEQ ID NO: 38493 - protein, 25 aa, Artificial Sequence
  Cyclic GFR-binding peptide
EPLPIVYYDAANNVVEQLSNDAANN

SEQ ID NO: 38494 - protein, 25 aa, Artificial Sequence
  Cyclic GFR-binding peptide
EPLPIVYYDSANNVVEQLSNDSANN

SEQ ID NO: 38495 - protein, 19 aa, Artificial Sequence
  Cyclic GFR-binding peptide
EPLPIVYYGGGEQLSNGGG

SEQ ID NO: 38496 - protein, 25 aa, Artificial Sequence
  Cyclic GFR-binding peptide
GTPGPEPLTILYYDENEKVVEQLSN

SEQ ID NO: 38497 - protein, 25 aa, Artificial Sequence
  Cyclic GFR-binding peptide
GTPGPEPLTILYYDENKNVVEQLSN

SEQ ID NO: 38498 - protein, 25 aa, Artificial Sequence
  Cyclic GFR-binding peptide
GTPGPEPLTILYYDEYDKVVEQLSN

SEQ ID NO: 38499 - protein, 21 aa, Artificial Sequence
  Cyclic GFR-binding peptide
GTPGPEPLTILYYGGGEQLSN

SEQ ID NO: 38500 - protein, 22 aa, Artificial Sequence
  Cyclic GFR-binding peptide
GTPGPEPLTILYYGGGGEQLSN

SEQ ID NO: 38501 - protein, 25 aa, Artificial Sequence
  Cyclic GFR-binding peptide
GTPGPEPLTILYYDSSNNVIEQLSN

SEQ ID NO: 38502 - protein, 25 aa, Artificial Sequence
  Cyclic GFR-binding peptide
GTPGPEPLTILYYDDMGVPTEQLSN

SEQ ID NO: 38503 - protein, 25 aa, Artificial Sequence
  Cyclic GFR-binding peptide
GTPGPEPLTILYYDKGVVTYEQLSN

SEQ ID NO: 38504 - protein, 25 aa, Artificial Sequence
  Cyclic GFR-binding peptide
WWFWGEPLTILYYNDKQQIIEQLSN

SEQ ID NO: 38505 - protein, 25 aa, Artificial Sequence
  Cyclic GFR-binding peptide
WWFWGEPLTILYYDAANNVVEQLSN

SEQ ID NO: 38506 - protein, 25 aa, Artificial Sequence
  Cyclic GFR-binding peptide
WWFWGEPLTILYYDSANNVVEQLSN

SEQ ID NO: 38507 - protein, 21 aa, Artificial Sequence
  Cyclic GFR-binding peptide
WWFWGEPLTILYYGGGEQLSN

SEQ ID NO: 38508 - protein, 22 aa, Artificial Sequence
  Cyclic GFR-binding peptide
WWFWGEPLTILYYGGGGEQLSN

SEQ ID NO: 38509 - protein, 25 aa, Artificial Sequence
  Cyclic GFR-binding peptide
WWFWGEPLTILYYVGRTPKVEQLSN

SEQ ID NO: 38510 - protein, 25 aa, Artificial Sequence
  Cyclic GFR-binding peptide
WWFWGEPLTILYYDENEKVVEQLSN

SEQ ID NO: 38511 - protein, 25 aa, Artificial Sequence
  Cyclic GFR-binding peptide
GTPGPEPLTILYYDDSSNVIEQLSN

SEQ ID NO: 38512 - protein, 25 aa, Artificial Sequence
  Cyclic GFR-binding peptide
EPLTILYYDKGVVTYEQLSNDKGVV

SEQ ID NO: 38513 - protein, 25 aa, Artificial Sequence
  Cyclic GFR-binding peptide
EPLTILYYNDKQQIIEQLSNNDKQQ

SEQ ID NO: 38514 - protein, 25 aa, Artificial Sequence
  Cyclic GFR-binding peptide
EPLTILYYDAANNVVEQLSNDAANN

SEQ ID NO: 38515 - protein, 25 aa, Artificial Sequence
  Cyclic GFR-binding peptide
EPLTILYYDSANNVVEQLSNDSANN

SEQ ID NO: 38516 - protein, 25 aa, Artificial Sequence
  Cyclic GFR-binding peptide
EPLTILYYDNGRVLLEQLSNDNGRV

SEQ ID NO: 38517 - protein, 19 aa, Artificial Sequence
  Cyclic GFR-binding peptide
EPLTILYYGGGEQLSNGGG

SEQ ID NO: 38518 - protein, 25 aa, Artificial Sequence
  Cyclic GFR-binding peptide
GTPGPEPLTILYYNDKQQIIEQLSN

SEQ ID NO: 38519 - protein, 25 aa, Artificial Sequence
  Cyclic GFR-binding peptide
WWFWGEPLTILYYIGKTPKIEQLSN

SEQ ID NO: 38520 - protein, 25 aa, Artificial Sequence
  Cyclic GFR-binding peptide
WWFWGEPLTILYYDENKNVVEQLSN

SEQ ID NO: 38521 - protein, 27 aa, Artificial Sequence
  Cyclic GFR-binding peptide
EPLTILYYRIKPHQGQHEQLSNRIKPH

SEQ ID NO: 38522 - protein, 27 aa, Artificial Sequence
  Cyclic GFR-binding peptide
EPLTILYYEYVRKKPKLEQLSNEYVRK

SEQ ID NO: 38523 - protein, 27 aa, Artificial Sequence
  Cyclic GFR-binding peptide
EPLTILYYEIVRKKPIFEQLSNEIVRK

SEQ ID NO: 38524 - protein, 27 aa, Artificial Sequence
  Cyclic GFR-binding peptide
GTPGPSNITMQIMRIKPHQGQHIGEMS

SEQ ID NO: 38525 - protein, 25 aa, Artificial Sequence
  Cyclic GFR-binding peptide
GTPGPSNITMQIMDENEKVVIGEMS

SEQ ID NO: 38526 - protein, 20 aa, Artificial Sequence
  Cyclic GFR-binding peptide
GTPGPSNITMQIGGGIGEMS

SEQ ID NO: 38527 - protein, 21 aa, Artificial Sequence
  Cyclic GFR-binding peptide
GTPGPSNITMQIGGGGIGEMS

SEQ ID NO: 38528 - protein, 25 aa, Artificial Sequence
  Cyclic GFR-binding peptide
GTPGPSNITMQIMDDSSNVIIGEMS

SEQ ID NO: 38529 - protein, 25 aa, Artificial Sequence
  Cyclic GFR-binding peptide
GTPGPSNITMQIMDSSNNVIIGEMS

SEQ ID NO: 38530 - protein, 25 aa, Artificial Sequence
  Cyclic GFR-binding peptide
GTPGPSNITMQIMDDMGVPTIGEMS

SEQ ID NO: 38531 - protein, 20 aa, Artificial Sequence
  Cyclic GFR-binding peptide
WWFWGSNITMQIGGGIGEMS

SEQ ID NO: 38532 - protein, 21 aa, Artificial Sequence
  Cyclic GFR-binding peptide
WWFWGSNITMQIGGGGIGEMS

SEQ ID NO: 38533 - protein, 25 aa, Artificial Sequence
  Cyclic GFR-binding peptide
WWFWGSNITMQIMDAANNVVIGEMS

SEQ ID NO: 38534 - protein, 25 aa, Artificial Sequence
  Cyclic GFR-binding peptide
WWFWGSNITMQIMDSANNVVIGEMS

SEQ ID NO: 38535 - protein, 25 aa, Artificial Sequence
  Cyclic GFR-binding peptide
WWFWGSNITMQIMDNGRVLLIGEMS

SEQ ID NO: 38536 - protein, 25 aa, Artificial Sequence
  Cyclic GFR-binding peptide
WWFWGSNITMQIMVGRKPKVIGEMS

SEQ ID NO: 38537 - protein, 25 aa, Artificial Sequence
  Cyclic GFR-binding peptide
WWFWGSNITMQIMIGKTPKIIGEMS

SEQ ID NO: 38538 - protein, 25 aa, Artificial Sequence
  Cyclic GFR-binding peptide
GTPGPSNITMQIMVGRTPKVIGEMS

SEQ ID NO: 38539 - protein, 27 aa, Artificial Sequence
  Cyclic GFR-binding peptide
GTPGPSNITMQIMEYVRKKPKLIGEMS

SEQ ID NO: 38540 - protein, 27 aa, Artificial Sequence
  Cyclic GFR-binding peptide
GTPGPSNITMQIMEIVRKKPIFIGEMS

SEQ ID NO: 38541 - protein, 21 aa, Artificial Sequence
  Cyclic GFR-binding peptide
GTPGPSNITMQIMGGGLGEMS

SEQ ID NO: 38542 - protein, 22 aa, Artificial Sequence
  Cyclic GFR-binding peptide
GTPGPSNITMQIMGGGGLGEMS

SEQ ID NO: 38543 - protein, 25 aa, Artificial Sequence
  Cyclic GFR-binding peptide
SNITMQIMDENKNVVLGEMSDENKN

SEQ ID NO: 38544 - protein, 25 aa, Artificial Sequence
  Cyclic GFR-binding peptide
SNITMQIMDEYDKVVLGEMSDEYDK

SEQ ID NO: 38545 - protein, 25 aa, Artificial Sequence
  Cyclic GFR-binding peptide
SNITMQIMDDSSNVILGEMSDDSSN

SEQ ID NO: 38546 - protein, 25 aa, Artificial Sequence
  Cyclic GFR-binding peptide
SNITMQIMDSSNNVILGEMSDSSNN

SEQ ID NO: 38547 - protein, 25 aa, Artificial Sequence
  Cyclic GFR-binding peptide
SNITMQIMDDMGVPTLGEMSDDMGV

SEQ ID NO: 38548 - protein, 25 aa, Artificial Sequence
  Cyclic GFR-binding peptide
SNITMQIMDKGVVTYLGEMSDKGVV

SEQ ID NO: 38549 - protein, 25 aa, Artificial Sequence
  Cyclic GFR-binding peptide
SNITMQIMNDKQQIILGEMSNDKQQ

SEQ ID NO: 38550 - protein, 19 aa, Artificial Sequence
  Cyclic GFR-binding peptide
SNITMQIMGGGLGEMSGGG

SEQ ID NO: 38551 - protein, 27 aa, Artificial Sequence
  Cyclic GFR-binding peptide
GTPGPRSVKVAKVEIVRKKPIFKEVQV

SEQ ID NO: 38552 - protein, 21 aa, Artificial Sequence
  Cyclic GFR-binding peptide
GTPGPRSVKVAKVGGGKEVQV

SEQ ID NO: 38553 - protein, 25 aa, Artificial Sequence
  Cyclic GFR-binding peptide
GTPGPRSVKVAKVDENKNVVKEVQV

SEQ ID NO: 38554 - protein, 25 aa, Artificial Sequence
  Cyclic GFR-binding peptide
GTPGPRSVKVAKVDEYDKVVKEVQV

SEQ ID NO: 38555 - protein, 25 aa, Artificial Sequence
  Cyclic GFR-binding peptide
WWFWGRSVKVAKVDDSSNVIKEVQV

SEQ ID NO: 38556 - protein, 22 aa, Artificial Sequence
  Cyclic GFR-binding peptide
WWFWGRSVKVAKVGGGGKEVQV

SEQ ID NO: 38557 - protein, 25 aa, Artificial Sequence
  Cyclic GFR-binding peptide
WWFWGRSVKVAKVDSSNNVIKEVQV

SEQ ID NO: 38558 - protein, 25 aa, Artificial Sequence
  Cyclic GFR-binding peptide
WWFWGRSVKVAKVDDMGVPTKEVQV

SEQ ID NO: 38559 - protein, 25 aa, Artificial Sequence
  Cyclic GFR-binding peptide
GTPGPRSVKVAKVNDKQQIIKEVQV

SEQ ID NO: 38560 - protein, 25 aa, Artificial Sequence
  Cyclic GFR-binding peptide
GTPGPRSVKVAKVDAANNVVKEVQV

SEQ ID NO: 38561 - protein, 19 aa, Artificial Sequence
  Cyclic GFR-binding peptide
RSVKVAKVGGGKEVQVGGG

SEQ ID NO: 38562 - protein, 25 aa, Artificial Sequence
  Cyclic GFR-binding peptide
RSVKVAKVVGRTPKVKEVQVVGRTP

SEQ ID NO: 38563 - protein, 27 aa, Artificial Sequence
  Cyclic GFR-binding peptide
RSVKVAKVRIKPHQGQHKEVQVRIKPH

SEQ ID NO: 38564 - protein, 27 aa, Artificial Sequence
  Cyclic GFR-binding peptide
RSVKVAKVEIVRKKPIFKEVQVEIVRK

SEQ ID NO: 38565 - protein, 27 aa, Artificial Sequence
  Cyclic GFR-binding peptide
GTPGPRPVQVRKIEYVRKKPKLKKATV

SEQ ID NO: 38566 - protein, 25 aa, Artificial Sequence
  Cyclic GFR-binding peptide
GTPGPRPVQVRKIDENEKVVKKATV

SEQ ID NO: 38567 - protein, 25 aa, Artificial Sequence
  Cyclic GFR-binding peptide
GTPGPRPVQVRKIDENKNVVKKATV

SEQ ID NO: 38568 - protein, 25 aa, Artificial Sequence
  Cyclic GFR-binding peptide
GTPGPRPVQVRKIDEYDKVVKKATV

SEQ ID NO: 38569 - protein, 25 aa, Artificial Sequence
  Cyclic GFR-binding peptide
WWFWGRPVQVRKIDDSSNVIKKATV

SEQ ID NO: 38570 - protein, 21 aa, Artificial Sequence
  Cyclic GFR-binding peptide
WWFWGRPVQVRKIGGGKKATV

SEQ ID NO: 38571 - protein, 22 aa, Artificial Sequence
  Cyclic GFR-binding peptide
WWFWGRPVQVRKIGGGGKKATV

SEQ ID NO: 38572 - protein, 25 aa, Artificial Sequence
  Cyclic GFR-binding peptide
WWFWGRPVQVRKIDDMGVPTKKATV

SEQ ID NO: 38573 - protein, 25 aa, Artificial Sequence
  Cyclic GFR-binding peptide
GTPGPRPVQVRKIDKGVVTYKKATV

SEQ ID NO: 38574 - protein, 21 aa, Artificial Sequence
  Cyclic GFR-binding peptide
GTPGPRPVQVRKIGGGKKATV

SEQ ID NO: 38575 - protein, 22 aa, Artificial Sequence
  Cyclic GFR-binding peptide
GTPGPRPVQVRKIGGGGKKATV

SEQ ID NO: 38576 - protein, 25 aa, Artificial Sequence
  Cyclic GFR-binding peptide
RPVQVRKIDSANNVVKKATVDSANN

SEQ ID NO: 38577 - protein, 25 aa, Artificial Sequence
  Cyclic GFR-binding peptide
RPVQVRKIDNGRVLLKKATVDNGRV

SEQ ID NO: 38578 - protein, 25 aa, Artificial Sequence
  Cyclic GFR-binding peptide
RPVQVRKIVGRKPKVKKATVVGRKP

SEQ ID NO: 38579 - protein, 25 aa, Artificial Sequence
  Cyclic GFR-binding peptide
RPVQVRKIIGKTPKIKKATVIGKTP

SEQ ID NO: 38580 - protein, 19 aa, Artificial Sequence
  Cyclic GFR-binding peptide
RPVQVRKIGGGKKATVGGG

SEQ ID NO: 38581 - protein, 25 aa, Artificial Sequence
  Cyclic GFR-binding peptide
QYNKLVVNKNEDLYLMSIASPGPTG

SEQ ID NO: 38582 - protein, 25 aa, Artificial Sequence
  Cyclic GFR-binding peptide
QYNKLIVNSSDDLYLMSIASPGPTG

SEQ ID NO: 38583 - protein, 25 aa, Artificial Sequence
  Cyclic GFR-binding peptide
QYNKLIVNNSSDLYLMSIASPGPTG

SEQ ID NO: 38584 - protein, 25 aa, Artificial Sequence
  Cyclic GFR-binding peptide
QYNKLTPVGMDDLYLMSIASPGPTG

SEQ ID NO: 38585 - protein, 25 aa, Artificial Sequence
  Cyclic GFR-binding peptide
QYNKLYTVVGKDLYLMSIASPGPTG

SEQ ID NO: 38586 - protein, 25 aa, Artificial Sequence
  Cyclic GFR-binding peptide
QYNKLIIQQKDNLYLMSIASPGPTG

SEQ ID NO: 38587 - protein, 25 aa, Artificial Sequence
  Cyclic GFR-binding peptide
QYNKLVVNNAADLYLMSIASPGPTG

SEQ ID NO: 38588 - protein, 25 aa, Artificial Sequence
  Cyclic GFR-binding peptide
QYNKLVVNNASDLYLMSIASGWFWW

SEQ ID NO: 38589 - protein, 25 aa, Artificial Sequence
  Cyclic GFR-binding peptide
QYNKLLLVRGNDLYLMSIASGWFWW

SEQ ID NO: 38590 - protein, 25 aa, Artificial Sequence
  Cyclic GFR-binding peptide
QYNKLVKPKRGVLYLMSIASGWFWW

SEQ ID NO: 38591 - protein, 25 aa, Artificial Sequence
  Cyclic GFR-binding peptide
QYNKLIKPTKGILYLMSIASGWFWW

SEQ ID NO: 38592 - protein, 25 aa, Artificial Sequence
  Cyclic GFR-binding peptide
QYNKLVKPTRGVLYLMSIASGWFWW

SEQ ID NO: 38593 - protein, 25 aa, Artificial Sequence
  Cyclic GFR-binding peptide
QYNKLVVNKNEDLYLMSIASGWFWW

SEQ ID NO: 38594 - protein, 25 aa, Artificial Sequence
  Cyclic GFR-binding peptide
QYNKLIVNSSDDLYLMSIASGWFWW

SEQ ID NO: 38595 - protein, 22 aa, Artificial Sequence
  Cyclic GFR-binding peptide
QYNKLGGGGLYLMSIASPGPTG

SEQ ID NO: 38596 - protein, 27 aa, Artificial Sequence
  Cyclic GFR-binding peptide
HPKIRQYNKLHQGQHPKIRLYLMSIAS

SEQ ID NO: 38597 - protein, 27 aa, Artificial Sequence
  Cyclic GFR-binding peptide
KRVYEQYNKLLKPKKRVYELYLMSIAS

SEQ ID NO: 38598 - protein, 27 aa, Artificial Sequence
  Cyclic GFR-binding peptide
KRVIEQYNKLFIPKKRVIELYLMSIAS

SEQ ID NO: 38599 - protein, 25 aa, Artificial Sequence
  Cyclic GFR-binding peptide
PYVKLVVKENEDFFLISLSSPGPTG

SEQ ID NO: 38600 - protein, 25 aa, Artificial Sequence
  Cyclic GFR-binding peptide
PYVKLVVKDYEDFFLISLSSPGPTG

SEQ ID NO: 38601 - protein, 25 aa, Artificial Sequence
  Cyclic GFR-binding peptide
PYVKLIVNSSDDFFLISLSSPGPTG

SEQ ID NO: 38602 - protein, 25 aa, Artificial Sequence
  Cyclic GFR-binding peptide
PYVKLIVNNSSDFFLISLSSPGPTG

SEQ ID NO: 38603 - protein, 25 aa, Artificial Sequence
  Cyclic GFR-binding peptide
PYVKLTPVGMDDFFLISLSSPGPTG

SEQ ID NO: 38604 - protein, 25 aa, Artificial Sequence
  Cyclic GFR-binding peptide
PYVKLYTVVGKDFFLISLSSPGPTG

SEQ ID NO: 38605 - protein, 25 aa, Artificial Sequence
  Cyclic GFR-binding peptide
PYVKLIIQQKDNFFLISLSSPGPTG

SEQ ID NO: 38606 - protein, 25 aa, Artificial Sequence
  Cyclic GFR-binding peptide
PYVKLVVNNAADFFLISLSSGWFWW

SEQ ID NO: 38607 - protein, 25 aa, Artificial Sequence
  Cyclic GFR-binding peptide
PYVKLVVNNASDFFLISLSSGWFWW

SEQ ID NO: 38608 - protein, 25 aa, Artificial Sequence
  Cyclic GFR-binding peptide
PYVKLLLVRGNDFFLISLSSGWFWW

SEQ ID NO: 38609 - protein, 25 aa, Artificial Sequence
  Cyclic GFR-binding peptide
PYVKLVKPKRGVFFLISLSSGWFWW

SEQ ID NO: 38610 - protein, 25 aa, Artificial Sequence
  Cyclic GFR-binding peptide
PYVKLIKPTKGIFFLISLSSGWFWW

SEQ ID NO: 38611 - protein, 25 aa, Artificial Sequence
  Cyclic GFR-binding peptide
PYVKLVKPTRGVFFLISLSSGWFWW

SEQ ID NO: 38612 - protein, 25 aa, Artificial Sequence
  Cyclic GFR-binding peptide
PYVKLVVKENEDFFLISLSSGWFWW

SEQ ID NO: 38613 - protein, 21 aa, Artificial Sequence
  Cyclic GFR-binding peptide
PYVKLGGGFFLISLSSPGPTG

SEQ ID NO: 38614 - protein, 22 aa, Artificial Sequence
  Cyclic GFR-binding peptide
PYVKLGGGGFFLISLSSPGPTG

SEQ ID NO: 38615 - protein, 19 aa, Artificial Sequence
  Cyclic GFR-binding peptide
GGGPYVKLGGGFFLISLSS

SEQ ID NO: 38616 - protein, 27 aa, Artificial Sequence
  Cyclic GFR-binding peptide
KRVYEPYVKLLKPKKRVYEFFLISLSS

SEQ ID NO: 38617 - protein, 27 aa, Artificial Sequence
  Cyclic GFR-binding peptide
KRVIEPYVKLFIPKKRVIEFFLISLSS

SEQ ID NO: 38618 - protein, 25 aa, Artificial Sequence
  Cyclic GFR-binding peptide
RYKKLVVKENEDFYLVSIANPGPTG

SEQ ID NO: 38619 - protein, 25 aa, Artificial Sequence
  Cyclic GFR-binding peptide
RYKKLVVNKNEDFYLVSIANPGPTG

SEQ ID NO: 38620 - protein, 25 aa, Artificial Sequence
  Cyclic GFR-binding peptide
RYKKLVVKDYEDFYLVSIANPGPTG

SEQ ID NO: 38621 - protein, 25 aa, Artificial Sequence
  Cyclic GFR-binding peptide
RYKKLIVNNSSDFYLVSIANPGPTG

SEQ ID NO: 38622 - protein, 25 aa, Artificial Sequence
  Cyclic GFR-binding peptide
RYKKLTPVGMDDFYLVSIANPGPTG

SEQ ID NO: 38623 - protein, 25 aa, Artificial Sequence
  Cyclic GFR-binding peptide
RYKKLYTVVGKDFYLVSIANPGPTG

SEQ ID NO: 38624 - protein, 25 aa, Artificial Sequence
  Cyclic GFR-binding peptide
RYKKLIIQQKDNFYLVSIANPGPTG

SEQ ID NO: 38625 - protein, 25 aa, Artificial Sequence
  Cyclic GFR-binding peptide
RYKKLVVNNAADFYLVSIANPGPTG

SEQ ID NO: 38626 - protein, 25 aa, Artificial Sequence
  Cyclic GFR-binding peptide
RYKKLVVNNASDFYLVSIANGWFWW

SEQ ID NO: 38627 - protein, 25 aa, Artificial Sequence
  Cyclic GFR-binding peptide
RYKKLLLVRGNDFYLVSIANGWFWW

SEQ ID NO: 38628 - protein, 25 aa, Artificial Sequence
  Cyclic GFR-binding peptide
RYKKLVKPKRGVFYLVSIANGWFWW

SEQ ID NO: 38629 - protein, 25 aa, Artificial Sequence
  Cyclic GFR-binding peptide
RYKKLIKPTKGIFYLVSIANGWFWW

SEQ ID NO: 38630 - protein, 25 aa, Artificial Sequence
  Cyclic GFR-binding peptide
RYKKLVKPTRGVFYLVSIANGWFWW

SEQ ID NO: 38631 - protein, 25 aa, Artificial Sequence
  Cyclic GFR-binding peptide
RYKKLVVKENEDFYLVSIANGWFWW

SEQ ID NO: 38632 - protein, 25 aa, Artificial Sequence
  Cyclic GFR-binding peptide
RYKKLVVNKNEDFYLVSIANGWFWW

SEQ ID NO: 38633 - protein, 20 aa, Artificial Sequence
  Cyclic GFR-binding peptide
RYKKLGGGYLVSIANPGPTG

SEQ ID NO: 38634 - protein, 21 aa, Artificial Sequence
  Cyclic GFR-binding peptide
RYKKLGGGGYLVSIANPGPTG

SEQ ID NO: 38635 - protein, 18 aa, Artificial Sequence
  Cyclic GFR-binding peptide
GGGRYKKLGGGYLVSIAN

SEQ ID NO: 38636 - protein, 27 aa, Artificial Sequence
  Cyclic GFR-binding peptide
HPKIRRYKKLHQGQHPKIRFYLVSIAN

SEQ ID NO: 38637 - protein, 27 aa, Artificial Sequence
  Cyclic GFR-binding peptide
KRVYERYKKLLKPKKRVYEFYLVSIAN

SEQ ID NO: 38638 - protein, 27 aa, Artificial Sequence
  Cyclic GFR-binding peptide
KRVIERYKKLFIPKKRVIEFYLVSIAN

SEQ ID NO: 38639 - protein, 25 aa, Artificial Sequence
  Cyclic GFR-binding peptide
RHKRLVVKENEDYYLVSTASPGPTG

SEQ ID NO: 38640 - protein, 25 aa, Artificial Sequence
  Cyclic GFR-binding peptide
RHKRLVVNKNEDYYLVSTASPGPTG

SEQ ID NO: 38641 - protein, 25 aa, Artificial Sequence
  Cyclic GFR-binding peptide
RHKRLVVKDYEDYYLVSTASPGPTG

SEQ ID NO: 38642 - protein, 25 aa, Artificial Sequence
  Cyclic GFR-binding peptide
RHKRLTPVGMDDYYLVSTASPGPTG

SEQ ID NO: 38643 - protein, 25 aa, Artificial Sequence
  Cyclic GFR-binding peptide
RHKRLYTVVGKDYYLVSTASPGPTG

SEQ ID NO: 38644 - protein, 25 aa, Artificial Sequence
  Cyclic GFR-binding peptide
RHKRLIIQQKDNYYLVSTASPGPTG

SEQ ID NO: 38645 - protein, 25 aa, Artificial Sequence
  Cyclic GFR-binding peptide
RHKRLVVNNAADYYLVSTASGWFWW

SEQ ID NO: 38646 - protein, 25 aa, Artificial Sequence
  Cyclic GFR-binding peptide
RHKRLVVNNASDYYLVSTASGWFWW

SEQ ID NO: 38647 - protein, 25 aa, Artificial Sequence
  Cyclic GFR-binding peptide
RHKRLLLVRGNDYYLVSTASGWFWW

SEQ ID NO: 38648 - protein, 25 aa, Artificial Sequence
  Cyclic GFR-binding peptide
RHKRLVKPKRGVYYLVSTASGWFWW

SEQ ID NO: 38649 - protein, 25 aa, Artificial Sequence
  Cyclic GFR-binding peptide
RHKRLIKPTKGIYYLVSTASGWFWW

SEQ ID NO: 38650 - protein, 25 aa, Artificial Sequence
  Cyclic GFR-binding peptide
RHKRLVKPTRGVYYLVSTASGWFWW

SEQ ID NO: 38651 - protein, 25 aa, Artificial Sequence
  Cyclic GFR-binding peptide
RHKRLVVKENEDYYLVSTASGWFWW

SEQ ID NO: 38652 - protein, 21 aa, Artificial Sequence
  Cyclic GFR-binding peptide
RHKRLGGGYYLVSTASPGPTG

SEQ ID NO: 38653 - protein, 22 aa, Artificial Sequence
  Cyclic GFR-binding peptide
RHKRLGGGGYYLVSTASPGPTG

SEQ ID NO: 38654 - protein, 25 aa, Artificial Sequence
  Cyclic GFR-binding peptide
PTRGVRHKRLVKPTRGVYYLVSTAS

SEQ ID NO: 38655 - protein, 27 aa, Artificial Sequence
  Cyclic GFR-binding peptide
HPKIRRHKRLHQGQHPKIRYYLVSTAS

SEQ ID NO: 38656 - protein, 27 aa, Artificial Sequence
  Cyclic GFR-binding peptide
KRVYERHKRLLKPKKRVYEYYLVSTAS

SEQ ID NO: 38657 - protein, 27 aa, Artificial Sequence
  Cyclic GFR-binding peptide
KRVIERHKRLFIPKKRVIEYYLVSTAS

SEQ ID NO: 38658 - protein, 25 aa, Artificial Sequence
  Cyclic GFR-binding peptide
YHYKLVVKENEDKYLVSIPSPGPTG

SEQ ID NO: 38659 - protein, 25 aa, Artificial Sequence
  Cyclic GFR-binding peptide
YHYKLVVNKNEDKYLVSIPSPGPTG

SEQ ID NO: 38660 - protein, 25 aa, Artificial Sequence
  Cyclic GFR-binding peptide
YHYKLVVKDYEDKYLVSIPSPGPTG

SEQ ID NO: 38661 - protein, 25 aa, Artificial Sequence
  Cyclic GFR-binding peptide
YHYKLIVNSSDDKYLVSIPSPGPTG

SEQ ID NO: 38662 - protein, 25 aa, Artificial Sequence
  Cyclic GFR-binding peptide
YHYKLIVNNSSDKYLVSIPSPGPTG

SEQ ID NO: 38663 - protein, 25 aa, Artificial Sequence
  Cyclic GFR-binding peptide
YHYKLYTVVGKDKYLVSIPSPGPTG

SEQ ID NO: 38664 - protein, 25 aa, Artificial Sequence
  Cyclic GFR-binding peptide
YHYKLIIQQKDNKYLVSIPSPGPTG

SEQ ID NO: 38665 - protein, 25 aa, Artificial Sequence
  Cyclic GFR-binding peptide
YHYKLVVNNAADKYLVSIPSGWFWW

SEQ ID NO: 38666 - protein, 25 aa, Artificial Sequence
  Cyclic GFR-binding peptide
YHYKLVVNNASDKYLVSIPSGWFWW

SEQ ID NO: 38667 - protein, 25 aa, Artificial Sequence
  Cyclic GFR-binding peptide
YHYKLLLVRGNDKYLVSIPSGWFWW

SEQ ID NO: 38668 - protein, 25 aa, Artificial Sequence
  Cyclic GFR-binding peptide
YHYKLVKPKRGVKYLVSIPSGWFWW

SEQ ID NO: 38669 - protein, 25 aa, Artificial Sequence
  Cyclic GFR-binding peptide
YHYKLIKPTKGIKYLVSIPSGWFWW

SEQ ID NO: 38670 - protein, 25 aa, Artificial Sequence
  Cyclic GFR-binding peptide
YHYKLVKPTRGVKYLVSIPSGWFWW

SEQ ID NO: 38671 - protein, 25 aa, Artificial Sequence
  Cyclic GFR-binding peptide
YHYKLVVKENEDKYLVSIPSGWFWW

SEQ ID NO: 38672 - protein, 20 aa, Artificial Sequence
  Cyclic GFR-binding peptide
YHYKLGGGYLVSIPSPGPTG

SEQ ID NO: 38673 - protein, 21 aa, Artificial Sequence
  Cyclic GFR-binding peptide
YHYKLGGGGYLVSIPSPGPTG

SEQ ID NO: 38674 - protein, 18 aa, Artificial Sequence
  Cyclic GFR-binding peptide
GGGYHYKLGGGYLVSIPS

SEQ ID NO: 38675 - protein, 25 aa, Artificial Sequence
  Cyclic GFR-binding peptide
PTRGVYHYKLVKPTRGVKYLVSIPS

SEQ ID NO: 38676 - protein, 27 aa, Artificial Sequence
  Cyclic GFR-binding peptide
HPKIRYHYKLHQGQHPKIRKYLVSIPS

SEQ ID NO: 38677 - protein, 27 aa, Artificial Sequence
  Cyclic GFR-binding peptide
KRVYEYHYKLLKPKKRVYEKYLVSIPS

SEQ ID NO: 38678 - protein, 27 aa, Artificial Sequence
  Cyclic GFR-binding peptide
KRVIEYHYKLFIPKKRVIEKYLVSIPS

SEQ ID NO: 38679 - protein, 25 aa, Artificial Sequence
  Cyclic GFR-binding peptide
EYKFKVVKENEDLYLISIPEPGPTG

SEQ ID NO: 38680 - protein, 25 aa, Artificial Sequence
  Cyclic GFR-binding peptide
EYKFKVVNKNEDLYLISIPEPGPTG

SEQ ID NO: 38681 - protein, 25 aa, Artificial Sequence
  Cyclic GFR-binding peptide
EYKFKVVKDYEDLYLISIPEPGPTG

SEQ ID NO: 38682 - protein, 25 aa, Artificial Sequence
  Cyclic GFR-binding peptide
EYKFKIVNSSDDLYLISIPEPGPTG

SEQ ID NO: 38683 - protein, 25 aa, Artificial Sequence
  Cyclic GFR-binding peptide
EYKFKIVNNSSDLYLISIPEPGPTG

SEQ ID NO: 38684 - protein, 25 aa, Artificial Sequence
  Cyclic GFR-binding peptide
EYKFKTPVGMDDLYLISIPEPGPTG

SEQ ID NO: 38685 - protein, 25 aa, Artificial Sequence
  Cyclic GFR-binding peptide
EYKFKIIQQKDNLYLISIPEPGPTG

SEQ ID NO: 38686 - protein, 25 aa, Artificial Sequence
  Cyclic GFR-binding peptide
EYKFKVVNNAADLYLISIPEGWFWW

SEQ ID NO: 38687 - protein, 25 aa, Artificial Sequence
  Cyclic GFR-binding peptide
EYKFKVVNNASDLYLISIPEGWFWW

SEQ ID NO: 38688 - protein, 25 aa, Artificial Sequence
  Cyclic GFR-binding peptide
EYKFKLLVRGNDLYLISIPEGWFWW

SEQ ID NO: 38689 - protein, 25 aa, Artificial Sequence
  Cyclic GFR-binding peptide
EYKFKVKPKRGVLYLISIPEGWFWW

SEQ ID NO: 38690 - protein, 25 aa, Artificial Sequence
  Cyclic GFR-binding peptide
EYKFKIKPTKGILYLISIPEGWFWW

SEQ ID NO: 38691 - protein, 25 aa, Artificial Sequence
  Cyclic GFR-binding peptide
EYKFKVKPTRGVLYLISIPEGWFWW

SEQ ID NO: 38692 - protein, 25 aa, Artificial Sequence
  Cyclic GFR-binding peptide
EYKFKVVKENEDLYLISIPEGWFWW

SEQ ID NO: 38693 - protein, 19 aa, Artificial Sequence
  Cyclic GFR-binding peptide
GGGEYKFKGGGLYLISIPE

SEQ ID NO: 38694 - protein, 25 aa, Artificial Sequence
  Cyclic GFR-binding peptide
PTRGVEYKFKVKPTRGVLYLISIPE

SEQ ID NO: 38695 - protein, 27 aa, Artificial Sequence
  Cyclic GFR-binding peptide
HPKIREYKFKHQGQHPKIRLYLISIPE

SEQ ID NO: 38696 - protein, 27 aa, Artificial Sequence
  Cyclic GFR-binding peptide
KRVYEEYKFKLKPKKRVYELYLISIPE

SEQ ID NO: 38697 - protein, 27 aa, Artificial Sequence
  Cyclic GFR-binding peptide
KRVIEEYKFKFIPKKRVIELYLISIPE

SEQ ID NO: 38698 - protein, 25 aa, Artificial Sequence
  Cyclic GFR-binding peptide
PIKGYVVKENEDFYLMNIPSPGPTG

SEQ ID NO: 38699 - protein, 25 aa, Artificial Sequence
  Cyclic GFR-binding peptide
PIKGYVVNKNEDFYLMNIPSPGPTG

SEQ ID NO: 38700 - protein, 25 aa, Artificial Sequence
  Cyclic GFR-binding peptide
PIKGYVVKDYEDFYLMNIPSPGPTG

SEQ ID NO: 38701 - protein, 25 aa, Artificial Sequence
  Cyclic GFR-binding peptide
PIKGYIVNSSDDFYLMNIPSPGPTG

SEQ ID NO: 38702 - protein, 25 aa, Artificial Sequence
  Cyclic GFR-binding peptide
PIKGYIVNNSSDFYLMNIPSPGPTG

SEQ ID NO: 38703 - protein, 25 aa, Artificial Sequence
  Cyclic GFR-binding peptide
PIKGYTPVGMDDFYLMNIPSPGPTG

SEQ ID NO: 38704 - protein, 25 aa, Artificial Sequence
  Cyclic GFR-binding peptide
PIKGYYTVVGKDFYLMNIPSPGPTG

SEQ ID NO: 38705 - protein, 25 aa, Artificial Sequence
  Cyclic GFR-binding peptide
PIKGYVVNNAADFYLMNIPSGWFWW

SEQ ID NO: 38706 - protein, 25 aa, Artificial Sequence
  Cyclic GFR-binding peptide
PIKGYVVNNASDFYLMNIPSGWFWW

SEQ ID NO: 38707 - protein, 25 aa, Artificial Sequence
  Cyclic GFR-binding peptide
PIKGYLLVRGNDFYLMNIPSGWFWW

SEQ ID NO: 38708 - protein, 25 aa, Artificial Sequence
  Cyclic GFR-binding peptide
PIKGYVKPKRGVFYLMNIPSGWFWW

SEQ ID NO: 38709 - protein, 25 aa, Artificial Sequence
  Cyclic GFR-binding peptide
PIKGYIKPTKGIFYLMNIPSGWFWW

SEQ ID NO: 38710 - protein, 25 aa, Artificial Sequence
  Cyclic GFR-binding peptide
PIKGYVKPTRGVFYLMNIPSGWFWW

SEQ ID NO: 38711 - protein, 25 aa, Artificial Sequence
  Cyclic GFR-binding peptide
PIKGYVVKENEDFYLMNIPSGWFWW

SEQ ID NO: 38712 - protein, 21 aa, Artificial Sequence
  Cyclic GFR-binding peptide
PIKGYGGGFYLMNIPSPGPTG

SEQ ID NO: 38713 - protein, 22 aa, Artificial Sequence
  Cyclic GFR-binding peptide
PIKGYGGGGFYLMNIPSPGPTG

SEQ ID NO: 38714 - protein, 19 aa, Artificial Sequence
  Cyclic GFR-binding peptide
GGGPIKGYGGGFYLMNIPS

SEQ ID NO: 38715 - protein, 25 aa, Artificial Sequence
  Cyclic GFR-binding peptide
PTKGIPIKGYIKPTKGIFYLMNIPS

SEQ ID NO: 38716 - protein, 25 aa, Artificial Sequence
  Cyclic GFR-binding peptide
PTRGVPIKGYVKPTRGVFYLMNIPS

SEQ ID NO: 38717 - protein, 27 aa, Artificial Sequence
  Cyclic GFR-binding peptide
HPKIRPIKGYHQGQHPKIRFYLMNIPS

SEQ ID NO: 38718 - protein, 27 aa, Artificial Sequence
  Cyclic GFR-binding peptide
KRVYEPIKGYLKPKKRVYEFYLMNIPS

SEQ ID NO: 38719 - protein, 27 aa, Artificial Sequence
  Cyclic GFR-binding peptide
KRVIEPIKGYFIPKKRVIEFYLMNIPS

SEQ ID NO: 38720 - protein, 25 aa, Artificial Sequence
  Cyclic GFR-binding peptide
EYQKYVVKENEDIYLISIPSPGPTG

SEQ ID NO: 38721 - protein, 25 aa, Artificial Sequence
  Cyclic GFR-binding peptide
EYQKYVVNKNEDIYLISIPSPGPTG

SEQ ID NO: 38722 - protein, 25 aa, Artificial Sequence
  Cyclic GFR-binding peptide
EYQKYVVKDYEDIYLISIPSPGPTG

SEQ ID NO: 38723 - protein, 25 aa, Artificial Sequence
  Cyclic GFR-binding peptide
EYQKYIVNSSDDIYLISIPSPGPTG

SEQ ID NO: 38724 - protein, 25 aa, Artificial Sequence
  Cyclic GFR-binding peptide
EYQKYIVNNSSDIYLISIPSPGPTG

SEQ ID NO: 38725 - protein, 25 aa, Artificial Sequence
  Cyclic GFR-binding peptide
EYQKYTPVGMDDIYLISIPSPGPTG

SEQ ID NO: 38726 - protein, 25 aa, Artificial Sequence
  Cyclic GFR-binding peptide
EYQKYYTVVGKDIYLISIPSPGPTG

SEQ ID NO: 38727 - protein, 25 aa, Artificial Sequence
  Cyclic GFR-binding peptide
EYQKYIIQQKDNIYLISIPSGWFWW

SEQ ID NO: 38728 - protein, 25 aa, Artificial Sequence
  Cyclic GFR-binding peptide
EYQKYVVNNASDIYLISIPSGWFWW

SEQ ID NO: 38729 - protein, 25 aa, Artificial Sequence
  Cyclic GFR-binding peptide
EYQKYLLVRGNDIYLISIPSGWFWW

SEQ ID NO: 38730 - protein, 25 aa, Artificial Sequence
  Cyclic GFR-binding peptide
EYQKYVKPKRGVIYLISIPSGWFWW

SEQ ID NO: 38731 - protein, 25 aa, Artificial Sequence
  Cyclic GFR-binding peptide
EYQKYIKPTKGIIYLISIPSGWFWW

SEQ ID NO: 38732 - protein, 25 aa, Artificial Sequence
  Cyclic GFR-binding peptide
EYQKYVKPTRGVIYLISIPSGWFWW

SEQ ID NO: 38733 - protein, 25 aa, Artificial Sequence
  Cyclic GFR-binding peptide
EYQKYVVKENEDIYLISIPSGWFWW

SEQ ID NO: 38734 - protein, 21 aa, Artificial Sequence
  Cyclic GFR-binding peptide
EYQKYGGGIYLISIPSPGPTG

SEQ ID NO: 38735 - protein, 22 aa, Artificial Sequence
  Cyclic GFR-binding peptide
EYQKYGGGGIYLISIPSPGPTG

SEQ ID NO: 38736 - protein, 25 aa, Artificial Sequence
  Cyclic GFR-binding peptide
VVGKDEYQKYYTVVGKDIYLISIPS

SEQ ID NO: 38737 - protein, 25 aa, Artificial Sequence
  Cyclic GFR-binding peptide
QQKDNEYQKYIIQQKDNIYLISIPS

SEQ ID NO: 38738 - protein, 25 aa, Artificial Sequence
  Cyclic GFR-binding peptide
NNASDEYQKYVVNNASDIYLISIPS

SEQ ID NO: 38739 - protein, 25 aa, Artificial Sequence
  Cyclic GFR-binding peptide
VRGNDEYQKYLLVRGNDIYLISIPS

SEQ ID NO: 38740 - protein, 25 aa, Artificial Sequence
  Cyclic GFR-binding peptide
PKRGVEYQKYVKPKRGVIYLISIPS

SEQ ID NO: 38741 - protein, 25 aa, Artificial Sequence
  Cyclic GFR-binding peptide
PTKGIEYQKYIKPTKGIIYLISIPS

SEQ ID NO: 38742 - protein, 25 aa, Artificial Sequence
  Cyclic GFR-binding peptide
PTRGVEYQKYVKPTRGVIYLISIPS

SEQ ID NO: 38743 - protein, 27 aa, Artificial Sequence
  Cyclic GFR-binding peptide
HPKIREYQKYHQGQHPKIRIYLISIPS

SEQ ID NO: 38744 - protein, 19 aa, Artificial Sequence
  Cyclic GFR-binding peptide
GGGEYQKYGGGIYLISIPS

SEQ ID NO: 38745 - protein, 19 aa, Artificial Sequence
  Cyclic GFR-binding peptide
GGGEYQKYGGGIFLISIPS

SEQ ID NO: 38746 - protein, 22 aa, Artificial Sequence
  Cyclic GFR-binding peptide
EYQKYGGGGIFLISIPSPGPTG

SEQ ID NO: 38747 - protein, 22 aa, Artificial Sequence
  Cyclic GFR-binding peptide
EYQKYGGGGIFLISIPSGWFWW

SEQ ID NO: 38748 - protein, 21 aa, Artificial Sequence
  Cyclic GFR-binding peptide
EYQKYGGGIFLISIPSGWFWW

SEQ ID NO: 38749 - protein, 21 aa, Artificial Sequence
  Cyclic GFR-binding peptide
EYQKYGGGIFLISIPSPGPTG

SEQ ID NO: 38750 - protein, 25 aa, Artificial Sequence
  Cyclic GFR-binding peptide
EYQKYLLVRGNDIFLISIPSPGPTG

SEQ ID NO: 38751 - protein, 25 aa, Artificial Sequence
  Cyclic GFR-binding peptide
EYQKYVKPKRGVIFLISIPSPGPTG

SEQ ID NO: 38752 - protein, 25 aa, Artificial Sequence
  Cyclic GFR-binding peptide
EYQKYIKPTKGIIFLISIPSGWFWW

SEQ ID NO: 38753 - protein, 25 aa, Artificial Sequence
  Cyclic GFR-binding peptide
EYQKYVKPTRGVIFLISIPSGWFWW

SEQ ID NO: 38754 - protein, 25 aa, Artificial Sequence
  Cyclic GFR-binding peptide
EYQKYVVNKNEDIFLISIPSPGPTG

SEQ ID NO: 38755 - protein, 25 aa, Artificial Sequence
  Cyclic GFR-binding peptide
EYQKYIVNSSDDIFLISIPSPGPTG

SEQ ID NO: 38756 - protein, 25 aa, Artificial Sequence
  Cyclic GFR-binding peptide
EYQKYIVNNSSDIFLISIPSPGPTG

SEQ ID NO: 38757 - protein, 25 aa, Artificial Sequence
  Cyclic GFR-binding peptide
EYQKYTPVGMDDIFLISIPSGWFWW

SEQ ID NO: 38758 - protein, 25 aa, Artificial Sequence
  Cyclic GFR-binding peptide
EYQKYYTVVGKDIFLISIPSGWFWW

SEQ ID NO: 38759 - protein, 25 aa, Artificial Sequence
  Cyclic GFR-binding peptide
EYQKYIIQQKDNIFLISIPSPGPTG

SEQ ID NO: 38760 - protein, 25 aa, Artificial Sequence
  Cyclic GFR-binding peptide
EYQKYVVNNAADIFLISIPSPGPTG

SEQ ID NO: 38761 - protein, 25 aa, Artificial Sequence
  Cyclic GFR-binding peptide
VRGNDEYQKYLLVRGNDIFLISIPS

SEQ ID NO: 38762 - protein, 25 aa, Artificial Sequence
  Cyclic GFR-binding peptide
PKRGVEYQKYVKPKRGVIFLISIPS

SEQ ID NO: 38763 - protein, 25 aa, Artificial Sequence
  Cyclic GFR-binding peptide
PTKGIEYQKYIKPTKGIIFLISIPS

SEQ ID NO: 38764 - protein, 25 aa, Artificial Sequence
  Cyclic GFR-binding peptide
PTRGVEYQKYVKPTRGVIFLISIPS

SEQ ID NO: 38765 - protein, 27 aa, Artificial Sequence
  Cyclic GFR-binding peptide
HPKIREYQKYHQGQHPKIRIFLISIPS

SEQ ID NO: 38766 - protein, 27 aa, Artificial Sequence
  Cyclic GFR-binding peptide
KRVYEEYQKYLKPKKRVYEIFLISIPS

SEQ ID NO: 38767 - protein, 27 aa, Artificial Sequence
  Cyclic GFR-binding peptide
KRVIEEYQKYFIPKKRVIEIFLISIPS

SEQ ID NO: 38768 - protein, 25 aa, Artificial Sequence
  Cyclic GFR-binding peptide
DKHHDVVKENEDVYLMSLPKPGPTG

SEQ ID NO: 38769 - protein, 25 aa, Artificial Sequence
  Cyclic GFR-binding peptide
DKHHDVVNKNEDVYLMSLPKPGPTG

SEQ ID NO: 38770 - protein, 25 aa, Artificial Sequence
  Cyclic GFR-binding peptide
DKHHDVVKDYEDVYLMSLPKPGPTG

SEQ ID NO: 38771 - protein, 25 aa, Artificial Sequence
  Cyclic GFR-binding peptide
DKHHDIVNSSDDVYLMSLPKPGPTG

SEQ ID NO: 38772 - protein, 25 aa, Artificial Sequence
  Cyclic GFR-binding peptide
DKHHDIVNNSSDVYLMSLPKPGPTG

SEQ ID NO: 38773 - protein, 21 aa, Artificial Sequence
  Cyclic GFR-binding peptide
DKHHDGGGVYLMSLPKPGPTG

SEQ ID NO: 38774 - protein, 22 aa, Artificial Sequence
  Cyclic GFR-binding peptide
DKHHDGGGGVYLMSLPKPGPTG

SEQ ID NO: 38775 - protein, 25 aa, Artificial Sequence
  Cyclic GFR-binding peptide
DKHHDIIQQKDNVYLMSLPKGWFWW

SEQ ID NO: 38776 - protein, 25 aa, Artificial Sequence
  Cyclic GFR-binding peptide
DKHHDVVNNAADVYLMSLPKGWFWW

SEQ ID NO: 38777 - protein, 25 aa, Artificial Sequence
  Cyclic GFR-binding peptide
DKHHDVVNNASDVYLMSLPKGWFWW

SEQ ID NO: 38778 - protein, 21 aa, Artificial Sequence
  Cyclic GFR-binding peptide
DKHHDGGGVYLMSLPKGWFWW

SEQ ID NO: 38779 - protein, 22 aa, Artificial Sequence
  Cyclic GFR-binding peptide
DKHHDGGGGVYLMSLPKGWFWW

SEQ ID NO: 38780 - protein, 25 aa, Artificial Sequence
  Cyclic GFR-binding peptide
DKHHDVKPTRGVVYLMSLPKGWFWW

SEQ ID NO: 38781 - protein, 25 aa, Artificial Sequence
  Cyclic GFR-binding peptide
DKHHDVVKENEDVYLMSLPKGWFWW

SEQ ID NO: 38782 - protein, 19 aa, Artificial Sequence
  Cyclic GFR-binding peptide
GGGDKHHDGGGVYLMSLPK

SEQ ID NO: 38783 - protein, 25 aa, Artificial Sequence
  Cyclic GFR-binding peptide
PTRGVDKHHDVKPTRGVVYLMSLPK

SEQ ID NO: 38784 - protein, 27 aa, Artificial Sequence
  Cyclic GFR-binding peptide
HPKIRDKHHDHQGQHPKIRVYLMSLPK

SEQ ID NO: 38785 - protein, 27 aa, Artificial Sequence
  Cyclic GFR-binding peptide
KRVYEDKHHDLKPKKRVYEVYLMSLPK

SEQ ID NO: 38786 - protein, 27 aa, Artificial Sequence
  Cyclic GFR-binding peptide
KRVIEDKHHDFIPKKRVIEVYLMSLPK

SEQ ID NO: 38787 - protein, 25 aa, Artificial Sequence
  Cyclic GFR-binding peptide
NSLQEVVKENEDYYVIPLPEPGPTG

SEQ ID NO: 38788 - protein, 25 aa, Artificial Sequence
  Cyclic GFR-binding peptide
NSLQEVVNKNEDYYVIPLPEPGPTG

SEQ ID NO: 38789 - protein, 21 aa, Artificial Sequence
  Cyclic GFR-binding peptide
NSLQEGGGYYVIPLPEPGPTG

SEQ ID NO: 38790 - protein, 22 aa, Artificial Sequence
  Cyclic GFR-binding peptide
NSLQEGGGGYYVIPLPEPGPTG

SEQ ID NO: 38791 - protein, 25 aa, Artificial Sequence
  Cyclic GFR-binding peptide
NSLQEIVNSSDDYYVIPLPEPGPTG

SEQ ID NO: 38792 - protein, 25 aa, Artificial Sequence
  Cyclic GFR-binding peptide
NSLQEIVNNSSDYYVIPLPEPGPTG

SEQ ID NO: 38793 - protein, 25 aa, Artificial Sequence
  Cyclic GFR-binding peptide
NSLQETPVGMDDYYVIPLPEPGPTG

SEQ ID NO: 38794 - protein, 25 aa, Artificial Sequence
  Cyclic GFR-binding peptide
NSLQEYTVVGKDYYVIPLPEPGPTG

SEQ ID NO: 38795 - protein, 25 aa, Artificial Sequence
  Cyclic GFR-binding peptide
NSLQEIIQQKDNYYVIPLPEGWFWW

SEQ ID NO: 38796 - protein, 25 aa, Artificial Sequence
  Cyclic GFR-binding peptide
NSLQEVVNNAADYYVIPLPEGWFWW

SEQ ID NO: 38797 - protein, 21 aa, Artificial Sequence
  Cyclic GFR-binding peptide
NSLQEGGGYYVIPLPEGWFWW

SEQ ID NO: 38798 - protein, 22 aa, Artificial Sequence
  Cyclic GFR-binding peptide
NSLQEGGGGYYVIPLPEGWFWW

SEQ ID NO: 38799 - protein, 25 aa, Artificial Sequence
  Cyclic GFR-binding peptide
NSLQEIKPTKGIYYVIPLPEGWFWW

SEQ ID NO: 38800 - protein, 25 aa, Artificial Sequence
  Cyclic GFR-binding peptide
NSLQEVKPTRGVYYVIPLPEGWFWW

SEQ ID NO: 38801 - protein, 25 aa, Artificial Sequence
  Cyclic GFR-binding peptide
NSLQEVVKENEDYYVIPLPEGWFWW

SEQ ID NO: 38802 - protein, 25 aa, Artificial Sequence
  Cyclic GFR-binding peptide
NSLQEVVKDYEDYYVIPLPEPGPTG

SEQ ID NO: 38803 - protein, 25 aa, Artificial Sequence
  Cyclic GFR-binding peptide
VVGKDNSLQEYTVVGKDYYVIPLPE

SEQ ID NO: 38804 - protein, 25 aa, Artificial Sequence
  Cyclic GFR-binding peptide
QQKDNNSLQEIIQQKDNYYVIPLPE

SEQ ID NO: 38805 - protein, 25 aa, Artificial Sequence
  Cyclic GFR-binding peptide
NNAADNSLQEVVNNAADYYVIPLPE

SEQ ID NO: 38806 - protein, 25 aa, Artificial Sequence
  Cyclic GFR-binding peptide
NNASDNSLQEVVNNASDYYVIPLPE

SEQ ID NO: 38807 - protein, 19 aa, Artificial Sequence
  Cyclic GFR-binding peptide
GGGNSLQEGGGYYVIPLPE

SEQ ID NO: 38808 - protein, 25 aa, Artificial Sequence
  Cyclic GFR-binding peptide
NSLQEVVKENEDYYLITLPEPGPTG

SEQ ID NO: 38809 - protein, 25 aa, Artificial Sequence
  Cyclic GFR-binding peptide
NSLQEVVNKNEDYYLITLPEPGPTG

SEQ ID NO: 38810 - protein, 25 aa, Artificial Sequence
  Cyclic GFR-binding peptide
NSLQEVVKDYEDYYLITLPEPGPTG

SEQ ID NO: 38811 - protein, 21 aa, Artificial Sequence
  Cyclic GFR-binding peptide
NSLQEGGGYYLITLPEPGPTG

SEQ ID NO: 38812 - protein, 22 aa, Artificial Sequence
  Cyclic GFR-binding peptide
NSLQEGGGGYYLITLPEPGPTG

SEQ ID NO: 38813 - protein, 25 aa, Artificial Sequence
  Cyclic GFR-binding peptide
NSLQEIVNNSSDYYLITLPEPGPTG

SEQ ID NO: 38814 - protein, 25 aa, Artificial Sequence
  Cyclic GFR-binding peptide
NSLQETPVGMDDYYLITLPEPGPTG

SEQ ID NO: 38815 - protein, 25 aa, Artificial Sequence
  Cyclic GFR-binding peptide
NSLQEYTVVGKDYYLITLPEPGPTG

SEQ ID NO: 38816 - protein, 25 aa, Artificial Sequence
  Cyclic GFR-binding peptide
NSLQEIIQQKDNYYLITLPEGWFWW

SEQ ID NO: 38817 - protein, 25 aa, Artificial Sequence
  Cyclic GFR-binding peptide
NSLQEVVNNAADYYLITLPEGWFWW

SEQ ID NO: 38818 - protein, 25 aa, Artificial Sequence
  Cyclic GFR-binding peptide
NSLQEVVNNASDYYLITLPEGWFWW

SEQ ID NO: 38819 - protein, 21 aa, Artificial Sequence
  Cyclic GFR-binding peptide
NSLQEGGGYYLITLPEGWFWW

SEQ ID NO: 38820 - protein, 22 aa, Artificial Sequence
  Cyclic GFR-binding peptide
NSLQEGGGGYYLITLPEGWFWW

SEQ ID NO: 38821 - protein, 25 aa, Artificial Sequence
  Cyclic GFR-binding peptide
NSLQEVKPTRGVYYLITLPEGWFWW

SEQ ID NO: 38822 - protein, 25 aa, Artificial Sequence
  Cyclic GFR-binding peptide
NSLQEVVKENEDYYLITLPEGWFWW

SEQ ID NO: 38823 - protein, 25 aa, Artificial Sequence
  Cyclic GFR-binding peptide
NSLQEIVNSSDDYYLITLPEPGPTG

SEQ ID NO: 38824 - protein, 25 aa, Artificial Sequence
  Cyclic GFR-binding peptide
VVGKDNSLQEYTVVGKDYYLITLPE

SEQ ID NO: 38825 - protein, 25 aa, Artificial Sequence
  Cyclic GFR-binding peptide
QQKDNNSLQEIIQQKDNYYLITLPE

SEQ ID NO: 38826 - protein, 25 aa, Artificial Sequence
  Cyclic GFR-binding peptide
NNAADNSLQEVVNNAADYYLITLPE

SEQ ID NO: 38827 - protein, 25 aa, Artificial Sequence
  Cyclic GFR-binding peptide
NNASDNSLQEVVNNASDYYLITLPE

SEQ ID NO: 38828 - protein, 25 aa, Artificial Sequence
  Cyclic GFR-binding peptide
VRGNDNSLQELLVRGNDYYLITLPE

SEQ ID NO: 38829 - protein, 19 aa, Artificial Sequence
  Cyclic GFR-binding peptide
GGGNSLQEGGGYYLITLPE

SEQ ID NO: 38830 - protein, 25 aa, Artificial Sequence
  Cyclic GFR-binding peptide
NSLQEIIQQKDNYYLITLPEPGPTG

SEQ ID NO: 38831 - protein, 25 aa, Artificial Sequence
  Cyclic GFR-binding peptide
NSLQEIKPTKGIYYLITLPEGWFWW

SEQ ID NO: 38832 - protein, 25 aa, Artificial Sequence
  Cyclic GFR-binding peptide
NSLQEVVNKNEDYYLITLPEGWFWW

SEQ ID NO: 38833 - protein, 27 aa, Artificial Sequence
  Cyclic GFR-binding peptide
HPKIRNSLQEHQGQHPKIRYYLITLPE

SEQ ID NO: 38834 - protein, 27 aa, Artificial Sequence
  Cyclic GFR-binding peptide
KRVYENSLQELKPKKRVYEYYLITLPE

SEQ ID NO: 38835 - protein, 27 aa, Artificial Sequence
  Cyclic GFR-binding peptide
KRVIENSLQEFIPKKRVIEYYLITLPE

SEQ ID NO: 38836 - protein, 27 aa, Artificial Sequence
  Cyclic GFR-binding peptide
SMEGIHQGQHPKIRMIQMTINSPGPTG

SEQ ID NO: 38837 - protein, 25 aa, Artificial Sequence
  Cyclic GFR-binding peptide
SMEGIVVKENEDMIQMTINSPGPTG

SEQ ID NO: 38838 - protein, 20 aa, Artificial Sequence
  Cyclic GFR-binding peptide
SMEGIGGGIQMTINSPGPTG

SEQ ID NO: 38839 - protein, 21 aa, Artificial Sequence
  Cyclic GFR-binding peptide
SMEGIGGGGIQMTINSPGPTG

SEQ ID NO: 38840 - protein, 25 aa, Artificial Sequence
  Cyclic GFR-binding peptide
SMEGIIVNSSDDMIQMTINSPGPTG

SEQ ID NO: 38841 - protein, 25 aa, Artificial Sequence
  Cyclic GFR-binding peptide
SMEGIIVNNSSDMIQMTINSPGPTG

SEQ ID NO: 38842 - protein, 25 aa, Artificial Sequence
  Cyclic GFR-binding peptide
SMEGITPVGMDDMIQMTINSPGPTG

SEQ ID NO: 38843 - protein, 20 aa, Artificial Sequence
  Cyclic GFR-binding peptide
SMEGIGGGIQMTINSGWFWW

SEQ ID NO: 38844 - protein, 21 aa, Artificial Sequence
  Cyclic GFR-binding peptide
SMEGIGGGGIQMTINSGWFWW

SEQ ID NO: 38845 - protein, 25 aa, Artificial Sequence
  Cyclic GFR-binding peptide
SMEGIVVNNAADMIQMTINSGWFWW

SEQ ID NO: 38846 - protein, 25 aa, Artificial Sequence
  Cyclic GFR-binding peptide
SMEGIVVNNASDMIQMTINSGWFWW

SEQ ID NO: 38847 - protein, 25 aa, Artificial Sequence
  Cyclic GFR-binding peptide
SMEGILLVRGNDMIQMTINSGWFWW

SEQ ID NO: 38848 - protein, 25 aa, Artificial Sequence
  Cyclic GFR-binding peptide
SMEGIVKPKRGVMIQMTINSGWFWW

SEQ ID NO: 38849 - protein, 25 aa, Artificial Sequence
  Cyclic GFR-binding peptide
SMEGIIKPTKGIMIQMTINSGWFWW

SEQ ID NO: 38850 - protein, 25 aa, Artificial Sequence
  Cyclic GFR-binding peptide
SMEGIVKPTRGVMIQMTINSPGPTG

SEQ ID NO: 38851 - protein, 27 aa, Artificial Sequence
  Cyclic GFR-binding peptide
SMEGILKPKKRVYEMIQMTINSPGPTG

SEQ ID NO: 38852 - protein, 27 aa, Artificial Sequence
  Cyclic GFR-binding peptide
SMEGIFIPKKRVIEMIQMTINSPGPTG

SEQ ID NO: 38853 - protein, 21 aa, Artificial Sequence
  Cyclic GFR-binding peptide
SMEGLGGGMIQMTINSPGPTG

SEQ ID NO: 38854 - protein, 22 aa, Artificial Sequence
  Cyclic GFR-binding peptide
SMEGLGGGGMIQMTINSPGPTG

SEQ ID NO: 38855 - protein, 25 aa, Artificial Sequence
  Cyclic GFR-binding peptide
NKNEDSMEGLVVNKNEDMIQMTINS

SEQ ID NO: 38856 - protein, 25 aa, Artificial Sequence
  Cyclic GFR-binding peptide
KDYEDSMEGLVVKDYEDMIQMTINS

SEQ ID NO: 38857 - protein, 25 aa, Artificial Sequence
  Cyclic GFR-binding peptide
NSSDDSMEGLIVNSSDDMIQMTINS

SEQ ID NO: 38858 - protein, 25 aa, Artificial Sequence
  Cyclic GFR-binding peptide
NNSSDSMEGLIVNNSSDMIQMTINS

SEQ ID NO: 38859 - protein, 25 aa, Artificial Sequence
  Cyclic GFR-binding peptide
VGMDDSMEGLTPVGMDDMIQMTINS

SEQ ID NO: 38860 - protein, 25 aa, Artificial Sequence
  Cyclic GFR-binding peptide
VVGKDSMEGLYTVVGKDMIQMTINS

SEQ ID NO: 38861 - protein, 25 aa, Artificial Sequence
  Cyclic GFR-binding peptide
QQKDNSMEGLIIQQKDNMIQMTINS

SEQ ID NO: 38862 - protein, 19 aa, Artificial Sequence
  Cyclic GFR-binding peptide
GGGSMEGLGGGMIQMTINS

SEQ ID NO: 38863 - protein, 27 aa, Artificial Sequence
  Cyclic GFR-binding peptide
VQVEKFIPKKRVIEVKAVKVSRPGPTG

SEQ ID NO: 38864 - protein, 21 aa, Artificial Sequence
  Cyclic GFR-binding peptide
VQVEKGGGVKAVKVSRPGPTG

SEQ ID NO: 38865 - protein, 25 aa, Artificial Sequence
  Cyclic GFR-binding peptide
VQVEKVVNKNEDVKAVKVSRPGPTG

SEQ ID NO: 38866 - protein, 25 aa, Artificial Sequence
  Cyclic GFR-binding peptide
VQVEKVVKDYEDVKAVKVSRPGPTG

SEQ ID NO: 38867 - protein, 25 aa, Artificial Sequence
  Cyclic GFR-binding peptide
VQVEKIVNSSDDVKAVKVSRGWFWW

SEQ ID NO: 38868 - protein, 22 aa, Artificial Sequence
  Cyclic GFR-binding peptide
VQVEKGGGGVKAVKVSRGWFWW

SEQ ID NO: 38869 - protein, 25 aa, Artificial Sequence
  Cyclic GFR-binding peptide
VQVEKIVNNSSDVKAVKVSRGWFWW

SEQ ID NO: 38870 - protein, 25 aa, Artificial Sequence
  Cyclic GFR-binding peptide
VQVEKTPVGMDDVKAVKVSRGWFWW

SEQ ID NO: 38871 - protein, 25 aa, Artificial Sequence
  Cyclic GFR-binding peptide
VQVEKIIQQKDNVKAVKVSRPGPTG

SEQ ID NO: 38872 - protein, 25 aa, Artificial Sequence
  Cyclic GFR-binding peptide
VQVEKVVNNAADVKAVKVSRPGPTG

SEQ ID NO: 38873 - protein, 19 aa, Artificial Sequence
  Cyclic GFR-binding peptide
GGGVQVEKGGGVKAVKVSR

SEQ ID NO: 38874 - protein, 25 aa, Artificial Sequence
  Cyclic GFR-binding peptide
PTRGVVQVEKVKPTRGVVKAVKVSR

SEQ ID NO: 38875 - protein, 27 aa, Artificial Sequence
  Cyclic GFR-binding peptide
HPKIRVQVEKHQGQHPKIRVKAVKVSR

SEQ ID NO: 38876 - protein, 27 aa, Artificial Sequence
  Cyclic GFR-binding peptide
KRVIEVQVEKFIPKKRVIEVKAVKVSR

SEQ ID NO: 38877 - protein, 27 aa, Artificial Sequence
  Cyclic GFR-binding peptide
VTAKKLKPKKRVYEIKRVQVPRPGPTG

SEQ ID NO: 38878 - protein, 25 aa, Artificial Sequence
  Cyclic GFR-binding peptide
VTAKKVVKENEDIKRVQVPRPGPTG

SEQ ID NO: 38879 - protein, 25 aa, Artificial Sequence
  Cyclic GFR-binding peptide
VTAKKVVNKNEDIKRVQVPRPGPTG

SEQ ID NO: 38880 - protein, 25 aa, Artificial Sequence
  Cyclic GFR-binding peptide
VTAKKVVKDYEDIKRVQVPRPGPTG

SEQ ID NO: 38881 - protein, 25 aa, Artificial Sequence
  Cyclic GFR-binding peptide
VTAKKIVNSSDDIKRVQVPRGWFWW

SEQ ID NO: 38882 - protein, 21 aa, Artificial Sequence
  Cyclic GFR-binding peptide
VTAKKGGGIKRVQVPRGWFWW

SEQ ID NO: 38883 - protein, 22 aa, Artificial Sequence
  Cyclic GFR-binding peptide
VTAKKGGGGIKRVQVPRGWFWW

SEQ ID NO: 38884 - protein, 25 aa, Artificial Sequence
  Cyclic GFR-binding peptide
VTAKKTPVGMDDIKRVQVPRGWFWW

SEQ ID NO: 38885 - protein, 25 aa, Artificial Sequence
  Cyclic GFR-binding peptide
VTAKKYTVVGKDIKRVQVPRPGPTG

SEQ ID NO: 38886 - protein, 21 aa, Artificial Sequence
  Cyclic GFR-binding peptide
VTAKKGGGIKRVQVPRPGPTG

SEQ ID NO: 38887 - protein, 22 aa, Artificial Sequence
  Cyclic GFR-binding peptide
VTAKKGGGGIKRVQVPRPGPTG

SEQ ID NO: 38888 - protein, 25 aa, Artificial Sequence
  Cyclic GFR-binding peptide
NNASDVTAKKVVNNASDIKRVQVPR

SEQ ID NO: 38889 - protein, 25 aa, Artificial Sequence
  Cyclic GFR-binding peptide
VRGNDVTAKKLLVRGNDIKRVQVPR

SEQ ID NO: 38890 - protein, 25 aa, Artificial Sequence
  Cyclic GFR-binding peptide
PKRGVVTAKKVKPKRGVIKRVQVPR

SEQ ID NO: 38891 - protein, 25 aa, Artificial Sequence
  Cyclic GFR-binding peptide
PTKGIVTAKKIKPTKGIIKRVQVPR

SEQ ID NO: 38892 - protein, 19 aa, Artificial Sequence
  Cyclic GFR-binding peptide
GGGVTAKKGGGIKRVQVPR

SEQ ID NO: 38893 - protein, 28 aa, Artificial Sequence
  Cyclic GFR-binding peptide
  MOD_RES (1), (1): Xaa is C or S
XSRVVMNQYNKLIVNSSDDLYLVSIASL

SEQ ID NO: 38894 - protein, 38 aa, Artificial Sequence; identical to SEQ ID NO: 2297
  Cyclic GFR-binding peptide
  MOD_RES (32), (33): Xaa is C or S

SEQ ID NO: 38895 - protein, 35 aa, Artificial Sequence
  Cyclic GFR-binding peptide
  MOD_RES (2), (4): Xaa is C or S
RXGXEAVSMGERHKRLTPVGMDDYYLVSTASLKTP

SEQ ID NO: 38896 - protein, 27 aa, Artificial Sequence
  Cyclic GFR-binding peptide
VMNYHYKLIVNSSDDKYLVSIPSLKTP

SEQ ID NO: 38897 - protein, 35 aa, Artificial Sequence; identical to SEQ ID NO: 2298
  Cyclic GFR-binding peptide
  MOD_RES (2), (4): Xaa is C or S

SEQ ID NO: 38898 - protein, 29 aa, Artificial Sequence
  Cyclic GFR-binding peptide
  MOD_RES (26), (27): Xaa is C or S
RHKRLVVKDYEDYYLMSTASLETPVXXAK

SEQ ID NO: 38899 - protein, 24 aa, Artificial Sequence
  Cyclic GFR-binding peptide
MRYKKLIKPTKGIFYLISIANLDQ

SEQ ID NO: 38900 - protein, 29 aa, Artificial Sequence
  Cyclic GFR-binding peptide
  MOD_RES (1), (1): Xaa is C or S
XSKVVMRYKKLVKPTRGVFYLISIANLDQ

SEQ ID NO: 38901 - protein, 31 aa, Artificial Sequence
  Cyclic GFR-binding peptide
  MOD_RES (2), (2): Xaa is C or S
GXGEVVMEYHYKLVVKDYEDKYLMSIPSLET

SEQ ID NO: 38902 - protein, 30 aa, Artificial Sequence
  Cyclic GFR-binding peptide
  MOD_RES (1), (1): Xaa is C or S
XSRVIMRYKKLVKPKRGVFYLISIANLAQP

SEQ ID NO: 38903 - protein, 25 aa, Artificial Sequence
  Cyclic GFR-binding peptide
QYNKLIKPTKGILYLISIASLDQSV

SEQ ID NO: 38904 - protein, 38 aa, Artificial Sequence; identical to SEQ ID NO: 2303
  Cyclic GFR-binding peptide
  MOD_RES (32), (32): Xaa is C or S

SEQ ID NO: 38905 - protein, 33 aa, Artificial Sequence; identical to SEQ ID NO: 2304
  Cyclic GFR-binding peptide
  MOD_RES (2), (2): Xaa is C or S

SEQ ID NO: 38906 - protein, 28 aa, Artificial Sequence
  Cyclic GFR-binding peptide
RVIMRYKKLVKPKRGVFYLISIANLAQP

SEQ ID NO: 38907 - protein, 26 aa, Artificial Sequence
  Cyclic GFR-binding peptide
SKVIMQYNKLIKPTKGILYLISIASL

SEQ ID NO: 38908 - protein, 25 aa, Artificial Sequence
  Cyclic GFR-binding peptide
VVMDRYKKLVVKENEDFYLMSIANL

SEQ ID NO: 38909 - protein, 33 aa, Artificial Sequence
  Cyclic GFR-binding peptide
  MOD_RES (2), (4): Xaa is C or S
HXGXARVVMNQYNKLIVNSSDDLYLVSIASLQT

SEQ ID NO: 38910 - protein, 36 aa, Artificial Sequence; identical to SEQ ID NO: 2307
  Cyclic GFR-binding peptide
  MOD_RES (1), (33), (34): Xaa is C or S

SEQ ID NO: 38911 - protein, 25 aa, Artificial Sequence
  Cyclic GFR-binding peptide
VMNRHKRLIVNSSDDYYLVSTASLK

SEQ ID NO: 38912 - protein, 32 aa, Artificial Sequence; identical to SEQ ID NO: 2308
  Cyclic GFR-binding peptide
  MOD_RES (1), (32): Xaa is C or S

SEQ ID NO: 38913 - protein, 27 aa, Artificial Sequence
  Cyclic GFR-binding peptide
  MOD_RES (27), (27): Xaa is C or S
NRYKKLIVNNSSDFYLVSIANLKTPAX

SEQ ID NO: 38914 - protein, 38 aa, Artificial Sequence; identical to SEQ ID NO: 2310
  Cyclic GFR-binding peptide
  MOD_RES (1), (3), (34), (35): Xaa is C or S

SEQ ID NO: 38915 - protein, 24 aa, Artificial Sequence
  Cyclic GFR-binding peptide
RHKRLFIPKKRVIEYYLVSTASLQ

SEQ ID NO: 38916 - protein, 27 aa, Artificial Sequence
  Cyclic GFR-binding peptide
IVNNSSDQYNKLIVNNSSDLYLVSIAS

SEQ ID NO: 38917 - protein, 38 aa, Artificial Sequence; identical to SEQ ID NO: 2313
  Cyclic GFR-binding peptide
  MOD_RES (32), (33): Xaa is C or S

SEQ ID NO: 38918 - protein, 22 aa, Artificial Sequence
  Cyclic GFR-binding peptide
MRYKKLVKPKRGVFYLISIANL

SEQ ID NO: 38919 - protein, 35 aa, Artificial Sequence; identical to SEQ ID NO: 2314
  Cyclic GFR-binding peptide
  MOD_RES (31), (32): Xaa is C or S

SEQ ID NO: 38920 - protein, 34 aa, Artificial Sequence
  Cyclic GFR-binding peptide
  MOD_RES (1), (3): Xaa is C or S
XGXEAVSMGERYKKLTPVGMDDFYLVSIANLKTP

SEQ ID NO: 38921 - protein, 29 aa, Artificial Sequence
  Cyclic GFR-binding peptide
  MOD_RES (28), (29): Xaa is C or S
MNRYKKLIVNNSSDFYLVSIANLKTPAXX

SEQ ID NO: 38922 - protein, 32 aa, Artificial Sequence
  Cyclic GFR-binding peptide
  MOD_RES (30), (31): Xaa is C or S
VVMNRHKRLIVNSSDDYYLVSTASLQTPAXXP

SEQ ID NO: 38923 - protein, 27 aa, Artificial Sequence
  Cyclic GFR-binding peptide
  MOD_RES (26), (27): Xaa is C or S
RHKRLTPVGMDDYYLVSTASLKTPVXX

SEQ ID NO: 38924 - protein, 35 aa, Artificial Sequence
  Cyclic GFR-binding peptide
  MOD_RES (30), (31): Xaa is C or S
VVMNRYKKLIVNNSSDFYLVSIANLKTPAXXAKPV

SEQ ID NO: 38925 - protein, 39 aa, Artificial Sequence; identical to SEQ ID NO: 2321
  Cyclic GFR-binding peptide
  MOD_RES (1), (3), (35), (36): Xaa is C or S

SEQ ID NO: 38926 - protein, 35 aa, Artificial Sequence; identical to SEQ ID NO: 2322
  Cyclic GFR-binding peptide
  MOD_RES (1), (32), (33): Xaa is C or S

SEQ ID NO: 38927 - protein, 23 aa, Artificial Sequence
  Cyclic GFR-binding peptide
RHKRLVKPTRGVYYLISTASLDQ

SEQ ID NO: 38928 - protein, 32 aa, Artificial Sequence; identical to SEQ ID NO: 2323
  Cyclic GFR-binding peptide
  MOD_RES (31), (32): Xaa is C or S

SEQ ID NO: 38929 - protein, 31 aa, Artificial Sequence
  Cyclic GFR-binding peptide
  MOD_RES (28), (29): Xaa is C or S
MNYHYKLIVNSSDDKYLVSIPSLQTPAXXPK

SEQ ID NO: 38930 - protein, 34 aa, Artificial Sequence; identical to SEQ ID NO: 2327
  Cyclic GFR-binding peptide
  MOD_RES (32), (33): Xaa is C or S

SEQ ID NO: 38931 - protein, 28 aa, Artificial Sequence
  Cyclic GFR-binding peptide
  MOD_RES (27), (28): Xaa is C or S
MRHKRLVKPTRGVYYLISTASLDQPVXX

SEQ ID NO: 38932 - protein, 33 aa, Artificial Sequence
  Cyclic GFR-binding peptide
  MOD_RES (2), (4): Xaa is C or S
SXKXSKVVMRHKRLVKPTRGVYYLISTASLDQP

SEQ ID NO: 38933 - protein, 30 aa, Artificial Sequence; identical to SEQ ID NO: 2329
  Cyclic GFR-binding peptide

SEQ ID NO: 38934 - protein, 37 aa, Artificial Sequence; identical to SEQ ID NO: 2331
  Cyclic GFR-binding peptide
  MOD_RES (31), (32): Xaa is C or S

SEQ ID NO: 38935 - protein, 32 aa, Artificial Sequence; identical to SEQ ID NO: 2332
  Cyclic GFR-binding peptide
  MOD_RES (32), (32): Xaa is C or S

SEQ ID NO: 38936 - protein, 35 aa, Artificial Sequence; identical to SEQ ID NO: 2333
  Cyclic GFR-binding peptide
  MOD_RES (1), (33), (34): Xaa is C or S

SEQ ID NO: 38937 - protein, 32 aa, Artificial Sequence
  Cyclic GFR-binding peptide
  MOD_RES (30), (31): Xaa is C or S
KVIMRHKRLIKPTKGIYYLISTASLDQSVXXP

SEQ ID NO: 38938 - protein, 29 aa, Artificial Sequence
  Cyclic GFR-binding peptide
SRVIMRYKKLVKPKRGVFYLISIANLAQP

SEQ ID NO: 38939 - protein, 35 aa, Artificial Sequence; identical to SEQ ID NO: 2334
  Cyclic GFR-binding peptide
  MOD_RES (2), (35): Xaa is C or S

SEQ ID NO: 38940 - protein, 36 aa, Artificial Sequence; identical to SEQ ID NO: 2335
  Cyclic GFR-binding peptide
  MOD_RES (35), (35): Xaa is C or S

SEQ ID NO: 38941 - protein, 29 aa, Artificial Sequence
  Cyclic GFR-binding peptide
HDELTYHYKLFIPKKRVIEKYLVSIPSLQ

SEQ ID NO: 38942 - protein, 38 aa, Artificial Sequence; identical to SEQ ID NO: 2336
  Cyclic GFR-binding peptide
  MOD_RES (32), (32): Xaa is C or S

SEQ ID NO: 38943 - protein, 35 aa, Artificial Sequence
  Cyclic GFR-binding peptide
  MOD_RES (30), (31): Xaa is C or S
RVIMRHKRLVKPKRGVYYLISTASLAQPVXXPAAS

SEQ ID NO: 38944 - protein, 36 aa, Artificial Sequence
  Cyclic GFR-binding peptide
  MOD_RES (1), (3): Xaa is C or S
XKXALHDELTQYNKLFIPKKRVIELYLVSIASLQVQ

SEQ ID NO: 38945 - protein, 30 aa, Artificial Sequence
  Cyclic GFR-binding peptide
  MOD_RES (27), (28): Xaa is C or S
ERYKKLTPVGMDDFYLVSIANLKTPVXXAK

SEQ ID NO: 38946 - protein, 30 aa, Artificial Sequence
  Cyclic GFR-binding peptide
  MOD_RES (2), (2): Xaa is C or S
KXSKVVMRYKKLVKPTRGVFYLISIANLDQ

SEQ ID NO: 38947 - protein, 35 aa, Artificial Sequence
  Cyclic GFR-binding peptide
  MOD_RES (29), (30): Xaa is C or S
VMNYHYKLIVNNSSDKYLVSIPSLKTPAXXAKPVA

SEQ ID NO: 38948 - protein, 32 aa, Artificial Sequence; identical to SEQ ID NO: 2337
  Cyclic GFR-binding peptide
  MOD_RES (1), (1): Xaa is C or S

SEQ ID NO: 38949 - protein, 40 aa, Artificial Sequence; identical to SEQ ID NO: 2338
  Cyclic GFR-binding peptide
  MOD_RES (2), (35), (36): Xaa is C or S

SEQ ID NO: 38950 - protein, 34 aa, Artificial Sequence
  Cyclic GFR-binding peptide
  MOD_RES (30), (31): Xaa is C or S
VVMDRHKRLVVKENEDYYLMSTASLETPVXXAKP

SEQ ID NO: 38951 - protein, 33 aa, Artificial Sequence
  Cyclic GFR-binding peptide
  MOD_RES (30), (31): Xaa is C or S
VVMDRYKKLVVKENEDFYLMSIANLETPVXXAK

SEQ ID NO: 38952 - protein, 38 aa, Artificial Sequence; identical to SEQ ID NO: 2344
  Cyclic GFR-binding peptide
  MOD_RES (2), (34), (35): Xaa is C or S

SEQ ID NO: 38953 - protein, 25 aa, Artificial Sequence
  Cyclic GFR-binding peptide
NRYKKLIVNNSSDFYLVSIANLKTP

SEQ ID NO: 38954 - protein, 22 aa, Artificial Sequence
  Cyclic GFR-binding peptide
MQYNKLIKPTKGILYLISIASL

SEQ ID NO: 38955 - protein, 33 aa, Artificial Sequence
  Cyclic GFR-binding peptide
  MOD_RES (29), (30): Xaa is C or S
VMNRYKKLIVNNSSDFYLVSIANLKTPAXXAKP

SEQ ID NO: 38956 - protein, 35 aa, Artificial Sequence; identical to SEQ ID NO: 2350
  Cyclic GFR-binding peptide
  MOD_RES (2), (4), (35): Xaa is C or S

SEQ ID NO: 38957 - protein, 26 aa, Artificial Sequence
  Cyclic GFR-binding peptide
  MOD_RES (26), (26): Xaa is C or S
RYKKLVVKDYEDFYLMSIANLETPVX

SEQ ID NO: 38958 - protein, 26 aa, Artificial Sequence
  Cyclic GFR-binding peptide
VMNRHKRLIVNSSDDYYLVSTASLQT

SEQ ID NO: 38959 - protein, 31 aa, Artificial Sequence
  Cyclic GFR-binding peptide
  MOD_RES (28), (29): Xaa is C or S
MNRHKRLIVNSSDDYYLVSTASLQTPAXXPK

SEQ ID NO: 38960 - protein, 40 aa, Artificial Sequence; identical to SEQ ID NO: 2351
  Cyclic GFR-binding peptide
  MOD_RES (1), (3), (36), (37): Xaa is C or S

SEQ ID NO: 38961 - protein, 32 aa, Artificial Sequence
  Cyclic GFR-binding peptide
  MOD_RES (28), (29): Xaa is C or S
IMQYNKLIKPTKGILYLISIASLDQSVXXPSA

SEQ ID NO: 38962 - protein, 20 aa, Artificial Sequence
  Cyclic GFR-binding peptide
RHKRLVKPTRGVYYLISTAS

SEQ ID NO: 38963 - protein, 34 aa, Artificial Sequence
  Cyclic GFR-binding peptide
  MOD_RES (1), (1): Xaa is C or S
XALHDELTRYKKLFIPKKRVIEFYLVSIANLQVQ

SEQ ID NO: 38964 - protein, 28 aa, Artificial Sequence
  Cyclic GFR-binding peptide
  MOD_RES (2), (2): Xaa is C or S
GXSRVVMNQYNKLIVNSSDDLYLVSIAS

SEQ ID NO: 38965 - protein, 37 aa, Artificial Sequence; identical to SEQ ID NO: 2354
  Cyclic GFR-binding peptide
  MOD_RES (1), (3), (35), (36): Xaa is C or S

SEQ ID NO: 38966 - protein, 25 aa, Artificial Sequence
  Cyclic GFR-binding peptide
IMRYKKLIKPTKGIFYLISIANLDQ

SEQ ID NO: 38967 - protein, 30 aa, Artificial Sequence
  Cyclic GFR-binding peptide
  MOD_RES (1), (1): Xaa is C or S
XALHDELTQYNKLFIPKKRVIELYLVSIAS

SEQ ID NO: 38968 - protein, 27 aa, Artificial Sequence
  Cyclic GFR-binding peptide
IVNSSDDQYNKLIVNSSDDLYLVSIAS

SEQ ID NO: 38969 - protein, 31 aa, Artificial Sequence
  Cyclic GFR-binding peptide
  MOD_RES (1), (3): Xaa is C or S
XGXSRVVMNRHKRLIVNSSDDYYLVSTASLK

SEQ ID NO: 38970 - protein, 38 aa, Artificial Sequence; identical to SEQ ID NO: 2355
  Cyclic GFR-binding peptide
  MOD_RES (1), (38): Xaa is C or S

SEQ ID NO: 38971 - protein, 37 aa, Artificial Sequence; identical to SEQ ID NO: 2356
  Cyclic GFR-binding peptide
  MOD_RES (1), (33), (34): Xaa is C or S

SEQ ID NO: 38972 - protein, 26 aa, Artificial Sequence
  Cyclic GFR-binding peptide
  MOD_RES (26), (26): Xaa is C or S
YHYKLVVKENEDKYLMSIPSLETPVX

SEQ ID NO: 38973 - protein, 30 aa, Artificial Sequence; identical to SEQ ID NO: 2358
  Cyclic GFR-binding peptide

SEQ ID NO: 38974 - protein, 33 aa, Artificial Sequence
  Cyclic GFR-binding peptide
  MOD_RES (2), (4): Xaa is C or S
SXKXSRVIMRYKKLVKPKRGVFYLISIANLAQP

SEQ ID NO: 38975 - protein, 26 aa, Artificial Sequence
  Cyclic GFR-binding peptide
SRVIMQYNKLVKPKRGVLYLISIASL

SEQ ID NO: 38976 - protein, 35 aa, Artificial Sequence
  Cyclic GFR-binding peptide
  MOD_RES (29), (30): Xaa is C or S
VMNQYNKLIVNSSDDLYLVSIASLKTPAXXPKPVY

SEQ ID NO: 38977 - protein, 30 aa, Artificial Sequence
  Cyclic GFR-binding peptide
  MOD_RES (2), (2): Xaa is C or S
GXEAVSMGERHKRLTPVGMDDYYLVSTASL

SEQ ID NO: 38978 - protein, 34 aa, Artificial Sequence; identical to SEQ ID NO: 2360
  Cyclic GFR-binding peptide
  MOD_RES (31), (32): Xaa is C or S

SEQ ID NO: 38979 - protein, 28 aa, Artificial Sequence
  Cyclic GFR-binding peptide
VVMDYHYKLVVKENEDKYLMSIPSLETP

SEQ ID NO: 38980 - protein, 32 aa, Artificial Sequence
  Cyclic GFR-binding peptide
  MOD_RES (2), (4): Xaa is C or S
RXGXGEVVMERYKKLVVKDYEDFYLMSIANLE

SEQ ID NO: 38981 - protein, 33 aa, Artificial Sequence; identical to SEQ ID NO: 2365
  Cyclic GFR-binding peptide
  MOD_RES (2), (33): Xaa is C or S

SEQ ID NO: 38982 - protein, 27 aa, Artificial Sequence
  Cyclic GFR-binding peptide
RVVMNRHKRLIVNSSDDYYLVSTASLQ

SEQ ID NO: 38983 - protein, 36 aa, Artificial Sequence; identical to SEQ ID NO: 2367
  Cyclic GFR-binding peptide
  MOD_RES (36), (36): Xaa is C or S

SEQ ID NO: 38984 - protein, 30 aa, Artificial Sequence
  Cyclic GFR-binding peptide
  MOD_RES (29), (30): Xaa is C or S
VMDRYKKLVVKENEDFYLMSIANLETPVXX

SEQ ID NO: 38985 - protein, 27 aa, Artificial Sequence
  Cyclic GFR-binding peptide
GEVVMERYKKLVVKDYEDFYLMSIANL

SEQ ID NO: 38986 - protein, 29 aa, Artificial Sequence
  Cyclic GFR-binding peptide
AAAAAAAAARYKKLIKPTKGIFYLISIAN

SEQ ID NO: 38987 - protein, 21 aa, Artificial Sequence
  Cyclic GFR-binding peptide
DRHKRLVVKENEDYYLMSTAS

SEQ ID NO: 38988 - protein, 31 aa, Artificial Sequence
  Cyclic GFR-binding peptide
  MOD_RES (29), (30): Xaa is C or S
VIMQYNKLIKPTKGILYLISIASLDQSVXXP

SEQ ID NO: 38989 - protein, 27 aa, Artificial Sequence
  Cyclic GFR-binding peptide
  MOD_RES (2), (2): Xaa is C or S
KXSKVIMRYKKLIKPTKGIFYLISIAN

SEQ ID NO: 38990 - protein, 21 aa, Artificial Sequence
  Cyclic GFR-binding peptide
MQYNKLVKPKRGVLYLISIAS

SEQ ID NO: 38991 - protein, 28 aa, Artificial Sequence
  Cyclic GFR-binding peptide
RYKKLFIPKKRVIEFYLVSIANLQVQTP

SEQ ID NO: 38992 - protein, 31 aa, Artificial Sequence
  Cyclic GFR-binding peptide
  MOD_RES (2), (4): Xaa is C or S
SXKXSKVVMRHKRLVKPTRGVYYLISTASLD

SEQ ID NO: 38993 - protein, 34 aa, Artificial Sequence; identical to SEQ ID NO: 2373
  Cyclic GFR-binding peptide
  MOD_RES (1), (33), (34): Xaa is C or S

SEQ ID NO: 38994 - protein, 29 aa, Artificial Sequence
  Cyclic GFR-binding peptide
VSMGERHKRLTPVGMDDYYLVSTASLKTP

SEQ ID NO: 38995 - protein, 42 aa, Artificial Sequence; identical to SEQ ID NO: 2376
  Cyclic GFR-binding peptide
  MOD_RES (1), (3), (40): Xaa is C or S

SEQ ID NO: 38996 - protein, 30 aa, Artificial Sequence
  Cyclic GFR-binding peptide
  MOD_RES (29), (30): Xaa is C or S
VIMQYNKLVKPKRGVLYLISIASLAQPVXX

SEQ ID NO: 38997 - protein, 33 aa, Artificial Sequence; identical to SEQ ID NO: 2377
  Cyclic GFR-binding peptide

SEQ ID NO: 38998 - protein, 30 aa, Artificial Sequence
  Cyclic GFR-binding peptide
  MOD_RES (30), (30): Xaa is C or S
SMGERYKKLTPVGMDDFYLVSIANLKTPVX

SEQ ID NO: 38999 - protein, 31 aa, Artificial Sequence
  Cyclic GFR-binding peptide
EAVSMGERYKKLTPVGMDDFYLVSIANLKTP

SEQ ID NO: 39000 - protein, 33 aa, Artificial Sequence; identical to SEQ ID NO: 2379
  Cyclic GFR-binding peptide
  MOD_RES (2), (2): Xaa is C or S

SEQ ID NO: 39001 - protein, 26 aa, Artificial Sequence
  Cyclic GFR-binding peptide
VVMNYHYKLIVNNSSDKYLVSIPSLK

SEQ ID NO: 39002 - protein, 37 aa, Artificial Sequence; identical to SEQ ID NO: 2380
  Cyclic GFR-binding peptide
  MOD_RES (32), (33): Xaa is C or S

SEQ ID NO: 39003 - protein, 34 aa, Artificial Sequence
  Cyclic GFR-binding peptide
  MOD_RES (28), (29): Xaa is C or S
VMQYNKLVKPTRGVLYLISIASLDQPVXXPSASA

SEQ ID NO: 39004 - protein, 34 aa, Artificial Sequence
  Cyclic GFR-binding peptide
  MOD_RES (30), (30): Xaa is C or S
VVMNQYNKLIVNSSDDLYLVSIASLKTPAXTPKT

SEQ ID NO: 39005 - protein, 34 aa, Artificial Sequence; identical to SEQ ID NO: 2383
  Cyclic GFR-binding peptide

SEQ ID NO: 39006 - protein, 29 aa, Artificial Sequence
  Cyclic GFR-binding peptide
  MOD_RES (2), (2): Xaa is C or S
GXSRVVMNQYNKLIVNSSDDLYLVSIASL

SEQ ID NO: 39007 - protein, 38 aa, Artificial Sequence; identical to SEQ ID NO: 2384
  Cyclic GFR-binding peptide
  MOD_RES (1), (33), (34): Xaa is C or S

SEQ ID NO: 39008 - protein, 31 aa, Artificial Sequence
  Cyclic GFR-binding peptide
  MOD_RES (27), (28): Xaa is C or S
MRYKKLVKPTRGVFYLISIANLDQPVXXPSA

SEQ ID NO: 39009 - protein, 31 aa, Artificial Sequence
  Cyclic GFR-binding peptide
  MOD_RES (28), (29): Xaa is C or S
GEQYNKLTPVGMDDLYLVSIASLKTPVXXAK

SEQ ID NO: 39010 - protein, 39 aa, Artificial Sequence; identical to SEQ ID NO: 2386
  Cyclic GFR-binding peptide
  MOD_RES (2), (34), (35): Xaa is C or S

SEQ ID NO: 39011 - protein, 37 aa, Artificial Sequence; identical to SEQ ID NO: 2387
  Cyclic GFR-binding peptide
  MOD_RES (2), (4), (37): Xaa is C or S

SEQ ID NO: 39012 - protein, 28 aa, Artificial Sequence
  Cyclic GFR-binding peptide
  MOD_RES (26), (27): Xaa is C or S
YHYKLVKPKRGVKYLISIPSLAQPVXXP

SEQ ID NO: 39013 - protein, 36 aa, Artificial Sequence
  Cyclic GFR-binding peptide
  MOD_RES (30), (31): Xaa is C or S
VVMERHKRLVVKDYEDYYLMSTASLETPVXXAKPIS

SEQ ID NO: 39014 - protein, 26 aa, Artificial Sequence
  Cyclic GFR-binding peptide
KVVMYHYKLVKPTRGVKYLISIPSLD

SEQ ID NO: 39015 - protein, 30 aa, Artificial Sequence
  Cyclic GFR-binding peptide
  MOD_RES (28), (29): Xaa is C or S
GERYKKLTPVGMDDFYLVSIANLKTPVXXA

SEQ ID NO: 39016 - protein, 37 aa, Artificial Sequence; identical to SEQ ID NO: 2392
  Cyclic GFR-binding peptide
  MOD_RES (31), (32): Xaa is C or S

SEQ ID NO: 39017 - protein, 36 aa, Artificial Sequence; identical to SEQ ID NO: 2393
  Cyclic GFR-binding peptide
  MOD_RES (1), (3), (34), (35): Xaa is C or S

SEQ ID NO: 39018 - protein, 23 aa, Artificial Sequence
  Cyclic GFR-binding peptide
QYNKLTPVGMDDLYLVSIASLKT

SEQ ID NO: 39019 - protein, 28 aa, Artificial Sequence
  Cyclic GFR-binding peptide
SRVIMRYKKLVKPKRGVFYLISIANLAQ

SEQ ID NO: 39020 - protein, 27 aa, Artificial Sequence
  Cyclic GFR-binding peptide
  MOD_RES (1), (1): Xaa is C or S
XAKVVMNRYKKLIVNNSSDFYLVSIAN

SEQ ID NO: 39021 - protein, 30 aa, Artificial Sequence
  Cyclic GFR-binding peptide
  MOD_RES (2), (2): Xaa is C or S
GXARVVMNYHYKLIVNSSDDKYLVSIPSLQ

SEQ ID NO: 39022 - protein, 28 aa, Artificial Sequence
  Cyclic GFR-binding peptide
VVMNYHYKLIVNSSDDKYLVSIPSLKTP

SEQ ID NO: 39023 - protein, 26 aa, Artificial Sequence
  Cyclic GFR-binding peptide
VSMGEQYNKLTPVGMDDLYLVSIASL

SEQ ID NO: 39024 - protein, 35 aa, Artificial Sequence; identical to SEQ ID NO: 2396
  Cyclic GFR-binding peptide
  MOD_RES (1), (32), (33): Xaa is C or S

SEQ ID NO: 39025 - protein, 40 aa, Artificial Sequence; identical to SEQ ID NO: 2397
  Cyclic GFR-binding peptide
  MOD_RES (36), (36): Xaa is C or S

SEQ ID NO: 39026 - protein, 35 aa, Artificial Sequence; identical to SEQ ID NO: 2398
  Cyclic GFR-binding peptide
  MOD_RES (1), (3), (35): Xaa is C or S

SEQ ID NO: 39027 - protein, 31 aa, Artificial Sequence
  Cyclic GFR-binding peptide
  MOD_RES (26), (27): Xaa is C or S
RHKRLVVKDYEDYYLMSTASLETPVXXAKPI

SEQ ID NO: 39028 - protein, 31 aa, Artificial Sequence
  Cyclic GFR-binding peptide
EAVSMGEQYNKLTPVGMDDLYLVSIASLKTP

SEQ ID NO: 39029 - protein, 23 aa, Artificial Sequence
  Cyclic GFR-binding peptide
EYHYKLVVKDYEDKYLMSIPSLE

SEQ ID NO: 39030 - protein, 32 aa, Artificial Sequence
  Cyclic GFR-binding peptide
  MOD_RES (2), (2): Xaa is C or S
GXGEVVMERYKKLVVKDYEDFYLMSIANLETP

SEQ ID NO: 39031 - protein, 38 aa, Artificial Sequence; identical to SEQ ID NO: 2401
  Cyclic GFR-binding peptide
  MOD_RES (37), (37): Xaa is C or S

SEQ ID NO: 39032 - protein, 27 aa, Artificial Sequence
  Cyclic GFR-binding peptide
VMNYHYKLIVNNSSDKYLVSIPSLKTP

SEQ ID NO: 39033 - protein, 34 aa, Artificial Sequence; identical to SEQ ID NO: 2404
  Cyclic GFR-binding peptide
  MOD_RES (1), (32), (33): Xaa is C or S

SEQ ID NO: 39034 - protein, 25 aa, Artificial Sequence
  Cyclic GFR-binding peptide
VMNQYNKLIVNSSDDLYLVSIASLK

SEQ ID NO: 39035 - protein, 30 aa, Artificial Sequence; identical to SEQ ID NO: 1860
  Cyclic GFR-binding peptide

SEQ ID NO: 39036 - protein, 41 aa, Artificial Sequence; identical to SEQ ID NO: 2405
  Cyclic GFR-binding peptide
  MOD_RES (1), (3), (35), (36): Xaa is C or S

SEQ ID NO: 39037 - protein, 38 aa, Artificial Sequence; identical to SEQ ID NO: 2406
  Cyclic GFR-binding peptide
  MOD_RES (2), (4), (36), (37): Xaa is C or S

SEQ ID NO: 39038 - protein, 22 aa, Artificial Sequence
  Cyclic GFR-binding peptide
MRHKRLVKPKRGVYYLISTASL

SEQ ID NO: 39039 - protein, 25 aa, Artificial Sequence
  Cyclic GFR-binding peptide
MNRHKRLIVNSSDDYYLVSTASLQT

SEQ ID NO: 39040 - protein, 25 aa, Artificial Sequence
  Cyclic GFR-binding peptide
RVIMYHYKLVKPKRGVKYLISIPSL

SEQ ID NO: 39041 - protein, 27 aa, Artificial Sequence
  Cyclic GFR-binding peptide
VVMNQYNKLIVNNSSDLYLVSIASLKT

SEQ ID NO: 39042 - protein, 36 aa, Artificial Sequence; identical to SEQ ID NO: 2408
  Cyclic GFR-binding peptide
  MOD_RES (2), (34), (35): Xaa is C or S

SEQ ID NO: 39043 - protein, 23 aa, Artificial Sequence
  Cyclic GFR-binding peptide
MDRYKKLVVKENEDFYLMSIANL

SEQ ID NO: 39044 - protein, 40 aa, Artificial Sequence; identical to SEQ ID NO: 2409
  Cyclic GFR-binding peptide
  MOD_RES (2), (4), (36), (37): Xaa is C or S

SEQ ID NO: 39045 - protein, 32 aa, Artificial Sequence
  Cyclic GFR-binding peptide
  MOD_RES (30), (31): Xaa is C or S
VVMNQYNKLIVNNSSDLYLVSIASLKTPAXXA

SEQ ID NO: 39046 - protein, 28 aa, Artificial Sequence
  Cyclic GFR-binding peptide
EAVSMGERHKRLTPVGMDDYYLVSTASL

SEQ ID NO: 39047 - protein, 29 aa, Artificial Sequence
  Cyclic GFR-binding peptide
KVVMRYKKLVKPTRGVFYLISIANLDQPV

SEQ ID NO: 39048 - protein, 25 aa, Artificial Sequence
  Cyclic GFR-binding peptide
SKVIMYHYKLIKPTKGIKYLISIPS

SEQ ID NO: 39049 - protein, 29 aa, Artificial Sequence
  Cyclic GFR-binding peptide
  MOD_RES (2), (2): Xaa is C or S
KXSRVIMQYNKLVKPKRGVLYLISIASLA

SEQ ID NO: 39050 - protein, 31 aa, Artificial Sequence
  Cyclic GFR-binding peptide
AAAAAAAAARHKRLFIPKKRVIEYYLVSTAS

SEQ ID NO: 39051 - protein, 32 aa, Artificial Sequence; identical to SEQ ID NO: 2412
  Cyclic GFR-binding peptide
  MOD_RES (31), (31): Xaa is C or S

SEQ ID NO: 39052 - protein, 34 aa, Artificial Sequence; identical to SEQ ID NO: 2413
  Cyclic GFR-binding peptide
  MOD_RES (31), (32): Xaa is C or S

SEQ ID NO: 39053 - protein, 38 aa, Artificial Sequence; identical to SEQ ID NO: 2414
  Cyclic GFR-binding peptide
  MOD_RES (2), (4), (36), (37): Xaa is C or S

SEQ ID NO: 39054 - protein, 32 aa, Artificial Sequence
  Cyclic GFR-binding peptide
DELTYHYKLFIPKKRVIEKYLVSIPSLQVQTP

SEQ ID NO: 39055 - protein, 41 aa, Artificial Sequence; identical to SEQ ID NO: 2416
  Cyclic GFR-binding peptide
  MOD_RES (37), (37): Xaa is C or S

SEQ ID NO: 39056 - protein, 36 aa, Artificial Sequence; identical to SEQ ID NO: 2418
  Cyclic GFR-binding peptide
  MOD_RES (35), (35): Xaa is C or S

SEQ ID NO: 39057 - protein, 39 aa, Artificial Sequence; identical to SEQ ID NO: 2417
  Cyclic GFR-binding peptide
  MOD_RES (1), (3), (35), (36): Xaa is C or S

SEQ ID NO: 39058 - protein, 29 aa, Artificial Sequence
  Cyclic GFR-binding peptide
  MOD_RES (1), (3): Xaa is C or S
XGXSRVVMNQYNKLIVNSSDDLYLVSIAS

SEQ ID NO: 39059 - protein, 32 aa, Artificial Sequence
  Cyclic GFR-binding peptide
  MOD_RES (31), (32): Xaa is C or S
VSMGERYKKLTPVGMDDFYLVSIANLKTPVXX

SEQ ID NO: 39060 - protein, 38 aa, Artificial Sequence; identical to SEQ ID NO: 2419
  Cyclic GFR-binding peptide
  MOD_RES (1), (33), (34): Xaa is C or S

SEQ ID NO: 39061 - protein, 32 aa, Artificial Sequence
  Cyclic GFR-binding peptide
  MOD_RES (29), (30): Xaa is C or S
VMNYHYKLIVNNSSDKYLVSIPSLKTPAXXAK

SEQ ID NO: 39062 - protein, 36 aa, Artificial Sequence; identical to SEQ ID NO: 2420
  Cyclic GFR-binding peptide
  MOD_RES (1), (32), (33): Xaa is C or S

SEQ ID NO: 39063 - protein, 26 aa, Artificial Sequence
  Cyclic GFR-binding peptide
MDRYKKLVVKENEDFYLMSIANLETP

SEQ ID NO: 39064 - protein, 37 aa, Artificial Sequence; identical to SEQ ID NO: 2421
  Cyclic GFR-binding peptide
  MOD_RES (1), (3), (34), (35): Xaa is C or S

SEQ ID NO: 39065 - protein, 40 aa, Artificial Sequence; identical to SEQ ID NO: 2422
  Cyclic GFR-binding peptide
  MOD_RES (2), (4), (36), (37): Xaa is C or S

SEQ ID NO: 39066 - protein, 29 aa, Artificial Sequence
  Cyclic GFR-binding peptide
ARVVMNRHKRLIVNSSDDYYLVSTASLQT

SEQ ID NO: 39067 - protein, 41 aa, Artificial Sequence; identical to SEQ ID NO: 2424
  Cyclic GFR-binding peptide
  MOD_RES (1), (38): Xaa is C or S

SEQ ID NO: 39068 - protein, 35 aa, Artificial Sequence
  Cyclic GFR-binding peptide
  MOD_RES (29), (30): Xaa is C or S
VMDRYKKLVVKENEDFYLMSIANLETPVXXAKPIK

SEQ ID NO: 39069 - protein, 29 aa, Artificial Sequence
  Cyclic GFR-binding peptide
ARVVMNQYNKLIVNSSDDLYLVSIASLQT

SEQ ID NO: 39070 - protein, 34 aa, Artificial Sequence
  Cyclic GFR-binding peptide
  MOD_RES (29), (30): Xaa is C or S
VVMRHKRLVKPTRGVYYLISTASLDQPVXXPSAS

SEQ ID NO: 39071 - protein, 24 aa, Artificial Sequence
  Cyclic GFR-binding peptide
SMGEQYNKLTPVGMDDLYLVSIAS

SEQ ID NO: 39072 - protein, 28 aa, Artificial Sequence
  Cyclic GFR-binding peptide
  MOD_RES (26), (27): Xaa is C or S
YHYKLIVNSSDDKYLVSIPSLKTPAXXP

SEQ ID NO: 39073 - protein, 33 aa, Artificial Sequence
  Cyclic GFR-binding peptide
  MOD_RES (29), (30): Xaa is C or S
VMNYHYKLIVNSSDDKYLVSIPSLQTPAXXPKP

SEQ ID NO: 39074 - protein, 36 aa, Artificial Sequence; identical to SEQ ID NO: 2428
  Cyclic GFR-binding peptide
  MOD_RES (1), (33), (34): Xaa is C or S

SEQ ID NO: 39075 - protein, 32 aa, Artificial Sequence; identical to SEQ ID NO: 2429
  Cyclic GFR-binding peptide
  MOD_RES (32), (32): Xaa is C or S

SEQ ID NO: 39076 - protein, 37 aa, Artificial Sequence; identical to SEQ ID NO: 2430
  Cyclic GFR-binding peptide
  MOD_RES (2), (4), (36), (37): Xaa is C or S

SEQ ID NO: 39077 - protein, 41 aa, Artificial Sequence; identical to SEQ ID NO: 2431
  Cyclic GFR-binding peptide
  MOD_RES (37), (37): Xaa is C or S

SEQ ID NO: 39078 - protein, 25 aa, Artificial Sequence
  Cyclic GFR-binding peptide
VIMQYNKLIKPTKGILYLISIASLD

SEQ ID NO: 39079 - protein, 26 aa, Artificial Sequence
  Cyclic GFR-binding peptide
  MOD_RES (26), (26): Xaa is C or S
RHKRLVVKENEDYYLMSTASLETPVX

SEQ ID NO: 39080 - protein, 27 aa, Artificial Sequence
  Cyclic GFR-binding peptide
  MOD_RES (26), (27): Xaa is C or S
RYKKLVKPTRGVFYLISIANLDQPVXX

SEQ ID NO: 39081 - protein, 35 aa, Artificial Sequence; identical to SEQ ID NO: 2433
  Cyclic GFR-binding peptide
  MOD_RES (1), (33), (34): Xaa is C or S

SEQ ID NO: 39082 - protein, 32 aa, Artificial Sequence
  Cyclic GFR-binding peptide
  MOD_RES (31), (31): Xaa is C or S
TRHKRLFIPKKRVIEYYLVSTASLQVQTPRXQ

SEQ ID NO: 39083 - protein, 31 aa, Artificial Sequence
  Cyclic GFR-binding peptide
  MOD_RES (26), (27): Xaa is C or S
YHYKLVVKDYEDKYLMSIPSLETPVXXAKPI

SEQ ID NO: 39084 - protein, 25 aa, Artificial Sequence
  Cyclic GFR-binding peptide
SRVIMQYNKLVKPKRGVLYLISIAS

SEQ ID NO: 39085 - protein, 34 aa, Artificial Sequence
  Cyclic GFR-binding peptide
  MOD_RES (1), (3): Xaa is C or S
XKXALHDELTRYKKLFIPKKRVIEFYLVSIANLQ

SEQ ID NO: 39086 - protein, 27 aa, Artificial Sequence
  Cyclic GFR-binding peptide
VMYHYKLVKPTRGVKYLISIPSLDQPV

SEQ ID NO: 39087 - protein, 32 aa, Artificial Sequence
  Cyclic GFR-binding peptide
  MOD_RES (30), (30): Xaa is C or S
RHKRLFIPKKRVIEYYLVSTASLQVQTPRXQV

SEQ ID NO: 39088 - protein, 31 aa, Artificial Sequence
  Cyclic GFR-binding peptide
  MOD_RES (2), (4): Xaa is C or S
SXKXSKVVMQYNKLVKPTRGVLYLISIASLD

SEQ ID NO: 39089 - protein, 33 aa, Artificial Sequence; identical to SEQ ID NO: 2439
  Cyclic GFR-binding peptide
  MOD_RES (31), (32): Xaa is C or S

SEQ ID NO: 39090 - protein, 29 aa, Artificial Sequence
  Cyclic GFR-binding peptide
LTRYKKLFIPKKRVIEFYLVSIANLQVQT

SEQ ID NO: 39091 - protein, 34 aa, Artificial Sequence; identical to SEQ ID NO: 2438
  Cyclic GFR-binding peptide
  MOD_RES (1), (3), (34): Xaa is C or S

SEQ ID NO: 39092 - protein, 35 aa, Artificial Sequence
  Cyclic GFR-binding peptide
  MOD_RES (29), (30): Xaa is C or S
VMNQYNKLIVNNSSDLYLVSIASLKTPAXXAKPVA

SEQ ID NO: 39093 - protein, 31 aa, Artificial Sequence
  Cyclic GFR-binding peptide
  MOD_RES (30), (30): Xaa is C or S
YHYKLFIPKKRVIEKYLVSIPSLQVQTPRXQ

SEQ ID NO: 39094 - protein, 36 aa, Artificial Sequence; identical to SEQ ID NO: 2440
  Cyclic GFR-binding peptide
  MOD_RES (33), (34): Xaa is C or S

SEQ ID NO: 39095 - protein, 34 aa, Artificial Sequence
  Cyclic GFR-binding peptide
  MOD_RES (29), (30): Xaa is C or S
VMEYHYKLVVKDYEDKYLMSIPSLETPVXXAKPI

SEQ ID NO: 39096 - protein, 29 aa, Artificial Sequence
  Cyclic GFR-binding peptide
KVIMQYNKLIKPTKGILYLISIASLDQSV

SEQ ID NO: 39097 - protein, 30 aa, Artificial Sequence
  Cyclic GFR-binding peptide
  MOD_RES (2), (2): Xaa is C or S
KXSKVIMQYNKLIKPTKGILYLISIASLDQ

SEQ ID NO: 39098 - protein, 25 aa, Artificial Sequence
  Cyclic GFR-binding peptide
SKVIMQYNKLIKPTKGILYLISIAS

SEQ ID NO: 39099 - protein, 35 aa, Artificial Sequence; identical to SEQ ID NO: 2442
  Cyclic GFR-binding peptide
  MOD_RES (31), (32): Xaa is C or S

SEQ ID NO: 39100 - protein, 37 aa, Artificial Sequence; identical to SEQ ID NO: 2444
  Cyclic GFR-binding peptide
  MOD_RES (2), (2): Xaa is C or S

SEQ ID NO: 39101 - protein, 26 aa, Artificial Sequence
  Cyclic GFR-binding peptide
NYHYKLIVNSSDDKYLVSIPSLQTPA

SEQ ID NO: 39102 - protein, 25 aa, Artificial Sequence
  Cyclic GFR-binding peptide
VVMNQYNKLIVNNSSDLYLVSIASL

SEQ ID NO: 39103 - protein, 28 aa, Artificial Sequence
  Cyclic GFR-binding peptide
  MOD_RES (28), (28): Xaa is C or S
GERYKKLTPVGMDDFYLVSIANLKTPVX

SEQ ID NO: 39104 - protein, 35 aa, Artificial Sequence
  Cyclic GFR-binding peptide
  MOD_RES (2), (2): Xaa is C or S
KXALHDELTYHYKLFIPKKRVIEKYLVSIPSLQVQ

SEQ ID NO: 39105 - protein, 29 aa, Artificial Sequence
  Cyclic GFR-binding peptide
TQYNKLFIPKKRVIELYLVSIASLQVQTP

SEQ ID NO: 39106 - protein, 25 aa, Artificial Sequence
  Cyclic GFR-binding peptide
VSMGEQYNKLTPVGMDDLYLVSIAS

SEQ ID NO: 39107 - protein, 41 aa, Artificial Sequence; identical to SEQ ID NO: 2447
  Cyclic GFR-binding peptide
  MOD_RES (1), (3), (40): Xaa is C or S

SEQ ID NO: 39108 - protein, 31 aa, Artificial Sequence; identical to SEQ ID NO: 2448
  Cyclic GFR-binding peptide
  MOD_RES (31), (31): Xaa is C or S

SEQ ID NO: 39109 - protein, 26 aa, Artificial Sequence
  Cyclic GFR-binding peptide
MQYNKLIKPTKGILYLISIASLDQSV

SEQ ID NO: 39110 - protein, 31 aa, Artificial Sequence
  Cyclic GFR-binding peptide
  MOD_RES (27), (28): Xaa is C or S
DRYKKLVVKENEDFYLMSIANLETPVXXAKP

SEQ ID NO: 39111 - protein, 28 aa, Artificial Sequence
  Cyclic GFR-binding peptide
  MOD_RES (27), (28): Xaa is C or S
MRHKRLIKPTKGIYYLISTASLDQSVXX

SEQ ID NO: 39112 - protein, 34 aa, Artificial Sequence
  Cyclic GFR-binding peptide
  MOD_RES (31), (32): Xaa is C or S
VSMGEQYNKLTPVGMDDLYLVSIASLKTPVXXAK

SEQ ID NO: 39113 - protein, 33 aa, Artificial Sequence; identical to SEQ ID NO: 2449
  Cyclic GFR-binding peptide
  MOD_RES (32), (32): Xaa is C or S

SEQ ID NO: 39114 - protein, 40 aa, Artificial Sequence; identical to SEQ ID NO: 2452
  Cyclic GFR-binding peptide
  MOD_RES (2), (4), (36), (37): Xaa is C or S

SEQ ID NO: 39115 - protein, 34 aa, Artificial Sequence; identical to SEQ ID NO: 2453
  Cyclic GFR-binding peptide
  MOD_RES (1), (3): Xaa is C or S

SEQ ID NO: 39116 - protein, 24 aa, Artificial Sequence
  Cyclic GFR-binding peptide
IMQYNKLIKPTKGILYLISIASLD

SEQ ID NO: 39117 - protein, 28 aa, Artificial Sequence
  Cyclic GFR-binding peptide
  MOD_RES (28), (28): Xaa is C or S
IMRYKKLVKPKRGVFYLISIANLAQPVX

SEQ ID NO: 39118 - protein, 32 aa, Artificial Sequence
  Cyclic GFR-binding peptide
  MOD_RES (29), (30): Xaa is C or S
VMNRHKRLIVNSSDDYYLVSTASLKTPAXXPK

SEQ ID NO: 39119 - protein, 33 aa, Artificial Sequence
  Cyclic GFR-binding peptide
  MOD_RES (29), (30): Xaa is C or S
VIMRYKKLVKPKRGVFYLISIANLAQPVXXPAA

SEQ ID NO: 39120 - protein, 34 aa, Artificial Sequence
  Cyclic GFR-binding peptide
  MOD_RES (28), (29): Xaa is C or S
IMQYNKLIKPTKGILYLISIASLDQSVXXPSASA

SEQ ID NO: 39121 - protein, 32 aa, Artificial Sequence; identical to SEQ ID NO: 2454
  Cyclic GFR-binding peptide
  MOD_RES (31), (32): Xaa is C or S

SEQ ID NO: 39122 - protein, 30 aa, Artificial Sequence
  Cyclic GFR-binding peptide
  MOD_RES (26), (27): Xaa is C or S
RYKKLVVKENEDFYLMSIANLETPVXXAKP

SEQ ID NO: 39123 - protein, 42 aa, Artificial Sequence; identical to SEQ ID NO: 2457
  Cyclic GFR-binding peptide
  MOD_RES (1), (38): Xaa is C or S

SEQ ID NO: 39124 - protein, 25 aa, Artificial Sequence
  Cyclic GFR-binding peptide
VMNQYNKLIVNNSSDLYLVSIASLK

SEQ ID NO: 39125 - protein, 27 aa, Artificial Sequence
  Cyclic GFR-binding peptide
VVMERHKRLVVKDYEDYYLMSTASLET

SEQ ID NO: 39126 - protein, 38 aa, Artificial Sequence; identical to SEQ ID NO: 2459
  Cyclic GFR-binding peptide
  MOD_RES (1), (32), (33): Xaa is C or S

SEQ ID NO: 39127 - protein, 26 aa, Artificial Sequence
  Cyclic GFR-binding peptide
RVIMRHKRLVKPKRGVYYLISTASLA

SEQ ID NO: 39128 - protein, 26 aa, Artificial Sequence
  Cyclic GFR-binding peptide
LTQYNKLFIPKKRVIELYLVSIASLQ

SEQ ID NO: 39129 - protein, 35 aa, Artificial Sequence
  Cyclic GFR-binding peptide
  MOD_RES (31), (31): Xaa is C or S
TRHKRLFIPKKRVIEYYLVSTASLQVQTPRXQVNR

SEQ ID NO: 39130 - protein, 27 aa, Artificial Sequence
  Cyclic GFR-binding peptide
  MOD_RES (26), (27): Xaa is C or S
YHYKLVKPTRGVKYLISIPSLDQPVXX

SEQ ID NO: 39131 - protein, 32 aa, Artificial Sequence; identical to SEQ ID NO: 2463
  Cyclic GFR-binding peptide
  MOD_RES (1), (32): Xaa is C or S

SEQ ID NO: 39132 - protein, 31 aa, Artificial Sequence
  Cyclic GFR-binding peptide
  MOD_RES (26), (27): Xaa is C or S
YHYKLIKPTKGIKYLISIPSLDQSVXXPSAS

SEQ ID NO: 39133 - protein, 26 aa, Artificial Sequence
  Cyclic GFR-binding peptide
TRYKKLFIPKKRVIEFYLVSIANLQV

SEQ ID NO: 39134 - protein, 27 aa, Artificial Sequence
  Cyclic GFR-binding peptide
VMNQYNKLIVNSSDDLYLVSIASLKTP

SEQ ID NO: 39135 - protein, 37 aa, Artificial Sequence; identical to SEQ ID NO: 2468
  Cyclic GFR-binding peptide
  MOD_RES (32), (33): Xaa is C or S

SEQ ID NO: 39136 - protein, 30 aa, Artificial Sequence
  Cyclic GFR-binding peptide
  MOD_RES (1), (1): Xaa is C or S
XSKVIMQYNKLIKPTKGILYLISIASLDQS

SEQ ID NO: 39137 - protein, 31 aa, Artificial Sequence; identical to SEQ ID NO: 2470
  Cyclic GFR-binding peptide
  MOD_RES (1), (1): Xaa is C or S

SEQ ID NO: 39138 - protein, 33 aa, Artificial Sequence
  Cyclic GFR-binding peptide
  MOD_RES (27), (28): Xaa is C or S
ERHKRLVVKDYEDYYLMSTASLETPVXXAKPIS

SEQ ID NO: 39139 - protein, 40 aa, Artificial Sequence; identical to SEQ ID NO: 2471
  Cyclic GFR-binding peptide
  MOD_RES (1), (3), (34), (35): Xaa is C or S

SEQ ID NO: 39140 - protein, 29 aa, Artificial Sequence
  Cyclic GFR-binding peptide
AAAAAAAAAYHYKLVVKDYEDKYLMSIPS

SEQ ID NO: 39141 - protein, 35 aa, Artificial Sequence; identical to SEQ ID NO: 2473
  Cyclic GFR-binding peptide
  MOD_RES (31), (32): Xaa is C or S

SEQ ID NO: 39142 - protein, 33 aa, Artificial Sequence
  Cyclic GFR-binding peptide
  MOD_RES (29), (30): Xaa is C or S
VMNRHKRLIVNSSDDYYLVSTASLQTPAXXPKP

SEQ ID NO: 39143 - protein, 37 aa, Artificial Sequence; identical to SEQ ID NO: 2475
  Cyclic GFR-binding peptide
  MOD_RES (1), (3), (35), (36): Xaa is C or S

SEQ ID NO: 39144 - protein, 25 aa, Artificial Sequence
  Cyclic GFR-binding peptide
KVIMRYKKLIKPTKGIFYLISIANL

SEQ ID NO: 39145 - protein, 38 aa, Artificial Sequence; identical to SEQ ID NO: 2478
  Cyclic GFR-binding peptide
  MOD_RES (32), (33): Xaa is C or S

SEQ ID NO: 39146 - protein, 39 aa, Artificial Sequence; identical to SEQ ID NO: 2479
  Cyclic GFR-binding peptide
  MOD_RES (2), (4), (35), (36): Xaa is C or S

SEQ ID NO: 39147 - protein, 22 aa, Artificial Sequence
  Cyclic GFR-binding peptide
IMRHKRLIKPTKGIYYLISTAS

SEQ ID NO: 39148 - protein, 31 aa, Artificial Sequence
  Cyclic GFR-binding peptide
  MOD_RES (27), (28): Xaa is C or S
ERHKRLTPVGMDDYYLVSTASLKTPVXXAKG

SEQ ID NO: 39149 - protein, 32 aa, Artificial Sequence
  Cyclic GFR-binding peptide
ALHDELTYHYKLFIPKKRVIEKYLVSIPSLQV

SEQ ID NO: 39150 - protein, 23 aa, Artificial Sequence
  Cyclic GFR-binding peptide
IMYHYKLVKPKRGVKYLISIPSL

SEQ ID NO: 39151 - protein, 40 aa, Artificial Sequence; identical to SEQ ID NO: 2482
  Cyclic GFR-binding peptide
  MOD_RES (2), (4), (35), (36): Xaa is C or S

SEQ ID NO: 39152 - protein, 31 aa, Artificial Sequence
  Cyclic GFR-binding peptide
  MOD_RES (1), (3): Xaa is C or S
XKXSKVVMQYNKLVKPTRGVLYLISIASLDQ

SEQ ID NO: 39153 - protein, 28 aa, Artificial Sequence
  Cyclic GFR-binding peptide
SMGERYKKLTPVGMDDFYLVSIANLKTP

SEQ ID NO: 39154 - protein, 40 aa, Artificial Sequence; identical to SEQ ID NO: 2484
  Cyclic GFR-binding peptide
  MOD_RES (2), (34): Xaa is C or S

SEQ ID NO: 39155 - protein, 33 aa, Artificial Sequence; identical to SEQ ID NO: 2485
  Cyclic GFR-binding peptide

SEQ ID NO: 39156 - protein, 34 aa, Artificial Sequence; identical to SEQ ID NO: 2486
  Cyclic GFR-binding peptide
  MOD_RES (1), (32), (33): Xaa is C or S

SEQ ID NO: 39157 - protein, 29 aa, Artificial Sequence
  Cyclic GFR-binding peptide
LTRHKRLFIPKKRVIEYYLVSTASLQVQT

SEQ ID NO: 39158 - protein, 38 aa, Artificial Sequence; identical to SEQ ID NO: 2488
  Cyclic GFR-binding peptide
  MOD_RES (2), (34), (35): Xaa is C or S

SEQ ID NO: 39159 - protein, 34 aa, Artificial Sequence; identical to SEQ ID NO: 2489
  Cyclic GFR-binding peptide
  MOD_RES (1), (3): Xaa is C or S

SEQ ID NO: 39160 - protein, 33 aa, Artificial Sequence; identical to SEQ ID NO: 2490
  Cyclic GFR-binding peptide

SEQ ID NO: 39161 - protein, 38 aa, Artificial Sequence; identical to SEQ ID NO: 2491
  Cyclic GFR-binding peptide
  MOD_RES (2), (4), (35), (36): Xaa is C or S

SEQ ID NO: 39162 - protein, 20 aa, Artificial Sequence
  Cyclic GFR-binding peptide
YHYKLVKPTRGVKYLISIPS

SEQ ID NO: 39163 - protein, 34 aa, Artificial Sequence; identical to SEQ ID NO: 2493
  Cyclic GFR-binding peptide
  MOD_RES (2), (4): Xaa is C or S

SEQ ID NO: 39164 - protein, 29 aa, Artificial Sequence
  Cyclic GFR-binding peptide
  MOD_RES (2), (2): Xaa is C or S
KXSKVVMRHKRLVKPTRGVYYLISTASLD

SEQ ID NO: 39165 - protein, 36 aa, Artificial Sequence
  Cyclic GFR-binding peptide
  MOD_RES (31), (32): Xaa is C or S
VSMGEQYNKLTPVGMDDLYLVSIASLKTPVXXAKGV

SEQ ID NO: 39166 - protein, 30 aa, Artificial Sequence
  Cyclic GFR-binding peptide
  MOD_RES (26), (26): Xaa is C or S
YHYKLIVNSSDDKYLVSIPSLKTPAXTPKT

SEQ ID NO: 39167 - protein, 32 aa, Artificial Sequence; identical to SEQ ID NO: 2497
  Cyclic GFR-binding peptide
  MOD_RES (31), (31): Xaa is C or S

SEQ ID NO: 39168 - protein, 29 aa, Artificial Sequence
  Cyclic GFR-binding peptide
  MOD_RES (1), (1): Xaa is C or S
XSRVVMNYHYKLIVNSSDDKYLVSIPSLK

SEQ ID NO: 39169 - protein, 31 aa, Artificial Sequence
  Cyclic GFR-binding peptide
  MOD_RES (2), (2): Xaa is C or S
GXEAVSMGEQYNKLTPVGMDDLYLVSIASLK

SEQ ID NO: 39170 - protein, 25 aa, Artificial Sequence
  Cyclic GFR-binding peptide
VMDRYKKLVVKENEDFYLMSIANLE

SEQ ID NO: 39171 - protein, 29 aa, Artificial Sequence
  Cyclic GFR-binding peptide
DELTQYNKLFIPKKRVIELYLVSIASLQV

SEQ ID NO: 39172 - protein, 35 aa, Artificial Sequence
  Cyclic GFR-binding peptide
  MOD_RES (29), (30): Xaa is C or S
VIMRYKKLIKPTKGIFYLISIANLDQSVXXPSASA

SEQ ID NO: 39173 - protein, 38 aa, Artificial Sequence; identical to SEQ ID NO: 2502
  Cyclic GFR-binding peptide
  MOD_RES (2), (35), (36): Xaa is C or S

SEQ ID NO: 39174 - protein, 39 aa, Artificial Sequence; identical to SEQ ID NO: 2503
  Cyclic GFR-binding peptide
  MOD_RES (1), (33), (34): Xaa is C or S

SEQ ID NO: 39175 - protein, 29 aa, Artificial Sequence
  Cyclic GFR-binding peptide
RHKRLFIPKKRVIEYYLVSTASLQVQTPR

SEQ ID NO: 39176 - protein, 32 aa, Artificial Sequence
  Cyclic GFR-binding peptide
  MOD_RES (1), (3): Xaa is C or S
XGXARVVMNYHYKLIVNSSDDKYLVSIPSLQT

SEQ ID NO: 39177 - protein, 35 aa, Artificial Sequence
  Cyclic GFR-binding peptide
  MOD_RES (30), (31): Xaa is C or S
KVVMYHYKLVKPTRGVKYLISIPSLDQPVXXPSAS

SEQ ID NO: 39178 - protein, 32 aa, Artificial Sequence
  Cyclic GFR-binding peptide
  MOD_RES (28), (29): Xaa is C or S
MNRHKRLIVNSSDDYYLVSTASLKTPAXXPKP

SEQ ID NO: 39179 - protein, 31 aa, Artificial Sequence
  Cyclic GFR-binding peptide
  MOD_RES (2), (2): Xaa is C or S
GXSRVVMNYHYKLIVNSSDDKYLVSIPSLKT

SEQ ID NO: 39180 - protein, 23 aa, Artificial Sequence
  Cyclic GFR-binding peptide
IMRHKRLVKPKRGVYYLISTASL

SEQ ID NO: 39181 - protein, 38 aa, Artificial Sequence; identical to SEQ ID NO: 2504
  Cyclic GFR-binding peptide
  MOD_RES (1), (3), (35), (36): Xaa is C or S

SEQ ID NO: 39182 - protein, 28 aa, Artificial Sequence
  Cyclic GFR-binding peptide
GEVVMEYHYKLVVKDYEDKYLMSIPSLE

SEQ ID NO: 39183 - protein, 33 aa, Artificial Sequence; identical to SEQ ID NO: 2506
  Cyclic GFR-binding peptide
  MOD_RES (32), (32): Xaa is C or S

SEQ ID NO: 39184 - protein, 23 aa, Artificial Sequence
  Cyclic GFR-binding peptide
TQYNKLFIPKKRVIELYLVSIAS

SEQ ID NO: 39185 - protein, 31 aa, Artificial Sequence
  Cyclic GFR-binding peptide
  MOD_RES (26), (27): Xaa is C or S
QYNKLVKPTRGVLYLISIASLDQPVXXPSAS

SEQ ID NO: 39186 - protein, 24 aa, Artificial Sequence
  Cyclic GFR-binding peptide
MRHKRLIKPTKGIYYLISTASLDQ

SEQ ID NO: 39187 - protein, 22 aa, Artificial Sequence
  Cyclic GFR-binding peptide
IMYHYKLIKPTKGIKYLISIPS

SEQ ID NO: 39188 - protein, 31 aa, Artificial Sequence
  Cyclic GFR-binding peptide
  MOD_RES (26), (27): Xaa is C or S
RHKRLVKPTRGVYYLISTASLDQPVXXPSAS

SEQ ID NO: 39189 - protein, 32 aa, Artificial Sequence; identical to SEQ ID NO: 2509
  Cyclic GFR-binding peptide
  MOD_RES (2), (2): Xaa is C or S

SEQ ID NO: 39190 - protein, 29 aa, Artificial Sequence
  Cyclic GFR-binding peptide
  MOD_RES (26), (27): Xaa is C or S
RYKKLIVNNSSDFYLVSIANLKTPAXXAK

SEQ ID NO: 39191 - protein, 23 aa, Artificial Sequence
  Cyclic GFR-binding peptide
MQYNKLIKPTKGILYLISIASLD

SEQ ID NO: 39192 - protein, 25 aa, Artificial Sequence
  Cyclic GFR-binding peptide
MNYHYKLIVNSSDDKYLVSIPSLQT

SEQ ID NO: 39193 - protein, 39 aa, Artificial Sequence; identical to SEQ ID NO: 2514
  Cyclic GFR-binding peptide
  MOD_RES (1), (3), (34), (35): Xaa is C or S

SEQ ID NO: 39194 - protein, 30 aa, Artificial Sequence
  Cyclic GFR-binding peptide
  MOD_RES (1), (3): Xaa is C or S
XGXAKVVMNYHYKLIVNNSSDKYLVSIPSL

SEQ ID NO: 39195 - protein, 32 aa, Artificial Sequence
  Cyclic GFR-binding peptide
  MOD_RES (26), (27): Xaa is C or S
RYKKLVVKDYEDFYLMSIANLETPVXXAKPIS

SEQ ID NO: 39196 - protein, 27 aa, Artificial Sequence
  Cyclic GFR-binding peptide
  MOD_RES (1), (1): Xaa is C or S
XSKVIMYHYKLIKPTKGIKYLISIPSL

SEQ ID NO: 39197 - protein, 28 aa, Artificial Sequence
  Cyclic GFR-binding peptide
MGERYKKLTPVGMDDFYLVSIANLKTPV

SEQ ID NO: 39198 - protein, 28 aa, Artificial Sequence
  Cyclic GFR-binding peptide
  MOD_RES (1), (1): Xaa is C or S
XSKVVMRHKRLVKPTRGVYYLISTASLD

SEQ ID NO: 39199 - protein, 28 aa, Artificial Sequence
  Cyclic GFR-binding peptide
  MOD_RES (27), (28): Xaa is C or S
MRYKKLIKPTKGIFYLISIANLDQSVXX

SEQ ID NO: 39200 - protein, 33 aa, Artificial Sequence; identical to SEQ ID NO: 2516
  Cyclic GFR-binding peptide

SEQ ID NO: 39201 - protein, 24 aa, Artificial Sequence
  Cyclic GFR-binding peptide
MNYHYKLIVNNSSDKYLVSIPSLK

SEQ ID NO: 39202 - protein, 35 aa, Artificial Sequence; identical to SEQ ID NO: 2517
  Cyclic GFR-binding peptide
  MOD_RES (2), (34): Xaa is C or S

SEQ ID NO: 39203 - protein, 30 aa, Artificial Sequence
  Cyclic GFR-binding peptide
AKVVMNRYKKLIVNNSSDFYLVSIANLKTP

SEQ ID NO: 39204 - protein, 36 aa, Artificial Sequence; identical to SEQ ID NO: 2518
  Cyclic GFR-binding peptide
  MOD_RES (1), (33), (34): Xaa is C or S

SEQ ID NO: 39205 - protein, 28 aa, Artificial Sequence
  Cyclic GFR-binding peptide
EVVMERYKKLVVKDYEDFYLMSIANLET

SEQ ID NO: 39206 - protein, 28 aa, Artificial Sequence
  Cyclic GFR-binding peptide
LHDELTRYKKLFIPKKRVIEFYLVSIAN

SEQ ID NO: 39207 - protein, 34 aa, Artificial Sequence; identical to SEQ ID NO: 2522
  Cyclic GFR-binding peptide
  MOD_RES (32), (33): Xaa is C or S

SEQ ID NO: 39208 - protein, 34 aa, Artificial Sequence
  Cyclic GFR-binding peptide
  MOD_RES (29), (30): Xaa is C or S
VMNQYNKLIVNSSDDLYLVSIASLQTPAXXPKPV

SEQ ID NO: 39209 - protein, 29 aa, Artificial Sequence
  Cyclic GFR-binding peptide
  MOD_RES (1), (1): Xaa is C or S
XGEVVMDYHYKLVVKENEDKYLMSIPSLE

SEQ ID NO: 39210 - protein, 36 aa, Artificial Sequence
  Cyclic GFR-binding peptide
  MOD_RES (30), (31): Xaa is C or S
VVMNYHYKLIVNSSDDKYLVSIPSLQTPAXXPKPVT

SEQ ID NO: 39211 - protein, 39 aa, Artificial Sequence; identical to SEQ ID NO: 2525
  Cyclic GFR-binding peptide
  MOD_RES (35), (35): Xaa is C or S

SEQ ID NO: 39212 - protein, 33 aa, Artificial Sequence; identical to SEQ ID NO: 2526
  Cyclic GFR-binding peptide
  MOD_RES (2), (2): Xaa is C or S

SEQ ID NO: 39213 - protein, 27 aa, Artificial Sequence
  Cyclic GFR-binding peptide
  MOD_RES (2), (2): Xaa is C or S
KXSKVIMRHKRLIKPTKGIYYLISTAS

SEQ ID NO: 39214 - protein, 36 aa, Artificial Sequence; identical to SEQ ID NO: 2527
  Cyclic GFR-binding peptide
  MOD_RES (1), (3), (35), (36): Xaa is C or S

SEQ ID NO: 39215 - protein, 30 aa, Artificial Sequence
  Cyclic GFR-binding peptide
  MOD_RES (2), (4): Xaa is C or S
RXGXGEVVMERHKRLVVKDYEDYYLMSTAS

SEQ ID NO: 39216 - protein, 28 aa, Artificial Sequence
  Cyclic GFR-binding peptide
KVVMNYHYKLIVNNSSDKYLVSIPSLKT

SEQ ID NO: 39217 - protein, 37 aa, Artificial Sequence; identical to SEQ ID NO: 2528
  Cyclic GFR-binding peptide
  MOD_RES (2), (33), (34): Xaa is C or S

SEQ ID NO: 39218 - protein, 33 aa, Artificial Sequence
  Cyclic GFR-binding peptide
DELTQYNKLFIPKKRVIELYLVSIASLQVQTPR

SEQ ID NO: 39219 - protein, 26 aa, Artificial Sequence
  Cyclic GFR-binding peptide
  MOD_RES (1), (1): Xaa is C or S
XSKVVMRYKKLVKPTRGVFYLISIAN

SEQ ID NO: 39220 - protein, 41 aa, Artificial Sequence; identical to SEQ ID NO: 2531
  Cyclic GFR-binding peptide
  MOD_RES (2), (4), (36), (37): Xaa is C or S

SEQ ID NO: 39221 - protein, 28 aa, Artificial Sequence
  Cyclic GFR-binding peptide
VVMNYHYKLIVNNSSDKYLVSIPSLKTP

SEQ ID NO: 39222 - protein, 35 aa, Artificial Sequence; identical to SEQ ID NO: 2533
  Cyclic GFR-binding peptide
  MOD_RES (2), (34), (35): Xaa is C or S

SEQ ID NO: 39223 - protein, 35 aa, Artificial Sequence; identical to SEQ ID NO: 2534
  Cyclic GFR-binding peptide
  MOD_RES (32), (33): Xaa is C or S

SEQ ID NO: 39224 - protein, 24 aa, Artificial Sequence
  Cyclic GFR-binding peptide
VIMRYKKLIKPTKGIFYLISIANL

SEQ ID NO: 39225 - protein, 25 aa, Artificial Sequence
  Cyclic GFR-binding peptide
VMNYHYKLIVNNSSDKYLVSIPSLK

SEQ ID NO: 39226 - protein, 34 aa, Artificial Sequence; identical to SEQ ID NO: 2536
  Cyclic GFR-binding peptide
  MOD_RES (1), (33): Xaa is C or S

SEQ ID NO: 39227 - protein, 28 aa, Artificial Sequence
  Cyclic GFR-binding peptide
  MOD_RES (2), (2): Xaa is C or S
KXSKVVMQYNKLVKPTRGVLYLISIASL

SEQ ID NO: 39228 - protein, 35 aa, Artificial Sequence; identical to SEQ ID NO: 2538
  Cyclic GFR-binding peptide
  MOD_RES (2), (34), (35): Xaa is C or S

SEQ ID NO: 39229 - protein, 33 aa, Artificial Sequence; identical to SEQ ID NO: 2540
  Cyclic GFR-binding peptide
  MOD_RES (31), (32): Xaa is C or S

SEQ ID NO: 39230 - protein, 36 aa, Artificial Sequence; identical to SEQ ID NO: 2539
  Cyclic GFR-binding peptide
  MOD_RES (32), (33): Xaa is C or S

SEQ ID NO: 39231 - protein, 23 aa, Artificial Sequence
  Cyclic GFR-binding peptide
RHKRLTPVGMDDYYLVSTASLKT

SEQ ID NO: 39232 - protein, 36 aa, Artificial Sequence
  Cyclic GFR-binding peptide
  MOD_RES (30), (31): Xaa is C or S
VVMNRHKRLIVNSSDDYYLVSTASLQTPAXXPKPVT

SEQ ID NO: 39233 - protein, 27 aa, Artificial Sequence
  Cyclic GFR-binding peptide
GEQYNKLTPVGMDDLYLVSIASLKTPV

SEQ ID NO: 39234 - protein, 27 aa, Artificial Sequence
  Cyclic GFR-binding peptide
VIMYHYKLVKPKRGVKYLISIPSLAQP

SEQ ID NO: 39235 - protein, 34 aa, Artificial Sequence; identical to SEQ ID NO: 2543
  Cyclic GFR-binding peptide
  MOD_RES (2), (4): Xaa is C or S

SEQ ID NO: 39236 - protein, 38 aa, Artificial Sequence; identical to SEQ ID NO: 2544
  Cyclic GFR-binding peptide
  MOD_RES (33), (34): Xaa is C or S

SEQ ID NO: 39237 - protein, 29 aa, Artificial Sequence
  Cyclic GFR-binding peptide
KVVMNQYNKLIVNNSSDLYLVSIASLKTP

SEQ ID NO: 39238 - protein, 28 aa, Artificial Sequence
  Cyclic GFR-binding peptide
  MOD_RES (2), (2): Xaa is C or S
KXSRVIMYHYKLVKPKRGVKYLISIPSL

SEQ ID NO: 39239 - protein, 38 aa, Artificial Sequence; identical to SEQ ID NO: 2546
  Cyclic GFR-binding peptide
  MOD_RES (1), (3), (35), (36): Xaa is C or S

SEQ ID NO: 39240 - protein, 36 aa, Artificial Sequence; identical to SEQ ID NO: 2547
  Cyclic GFR-binding peptide
  MOD_RES (2), (4), (36): Xaa is C or S

SEQ ID NO: 39241 - protein, 31 aa, Artificial Sequence
  Cyclic GFR-binding peptide
  MOD_RES (1), (3): Xaa is C or S
XGXEAVSMGEQYNKLTPVGMDDLYLVSIASL

SEQ ID NO: 39242 - protein, 33 aa, Artificial Sequence
  Cyclic GFR-binding peptide
  MOD_RES (27), (28): Xaa is C or S
NYHYKLIVNSSDDKYLVSIPSLQTPAXXPKPVT

SEQ ID NO: 39243 - protein, 30 aa, Artificial Sequence
  Cyclic GFR-binding peptide
  MOD_RES (30), (30): Xaa is C or S
VVMNRHKRLIVNSSDDYYLVSTASLKTPAX

SEQ ID NO: 39244 - protein, 32 aa, Artificial Sequence
  Cyclic GFR-binding peptide
  MOD_RES (28), (29): Xaa is C or S
MNYHYKLIVNSSDDKYLVSIPSLKTPAXXPKP

SEQ ID NO: 39245 - protein, 40 aa, Artificial Sequence; identical to SEQ ID NO: 2548
  Cyclic GFR-binding peptide
  MOD_RES (1), (3), (35), (36): Xaa is C or S

SEQ ID NO: 39246 - protein, 26 aa, Artificial Sequence
  Cyclic GFR-binding peptide
MQYNKLVKPTRGVLYLISIASLDQPV

SEQ ID NO: 39247 - protein, 34 aa, Artificial Sequence; identical to SEQ ID NO: 2550
  Cyclic GFR-binding peptide
  MOD_RES (32), (33): Xaa is C or S

SEQ ID NO: 39248 - protein, 27 aa, Artificial Sequence
  Cyclic GFR-binding peptide
  MOD_RES (27), (27): Xaa is C or S
MQYNKLIKPTKGILYLISIASLDQSVX

SEQ ID NO: 39249 - protein, 27 aa, Artificial Sequence
  Cyclic GFR-binding peptide
ELTYHYKLFIPKKRVIEKYLVSIPSLQ

SEQ ID NO: 39250 - protein, 27 aa, Artificial Sequence
  Cyclic GFR-binding peptide
  MOD_RES (1), (1): Xaa is C or S
XARVVMNRHKRLIVNSSDDYYLVSTAS

SEQ ID NO: 39251 - protein, 39 aa, Artificial Sequence; identical to SEQ ID NO: 2551
  Cyclic GFR-binding peptide
  MOD_RES (2), (35), (36): Xaa is C or S

SEQ ID NO: 39252 - protein, 29 aa, Artificial Sequence
  Cyclic GFR-binding peptide
  MOD_RES (28), (29): Xaa is C or S
IMRYKKLVKPKRGVFYLISIANLAQPVXX

SEQ ID NO: 39253 - protein, 35 aa, Artificial Sequence; identical to SEQ ID NO: 2552
  Cyclic GFR-binding peptide
  MOD_RES (1), (33), (34): Xaa is C or S

SEQ ID NO: 39254 - protein, 27 aa, Artificial Sequence
  Cyclic GFR-binding peptide
KVIMRYKKLIKPTKGIFYLISIANLDQ

SEQ ID NO: 39255 - protein, 39 aa, Artificial Sequence; identical to SEQ ID NO: 2555
  Cyclic GFR-binding peptide
  MOD_RES (1), (3), (34), (35): Xaa is C or S

SEQ ID NO: 39256 - protein, 25 aa, Artificial Sequence
  Cyclic GFR-binding peptide
VIMRHKRLIKPTKGIYYLISTASLD

SEQ ID NO: 39257 - protein, 32 aa, Artificial Sequence
  Cyclic GFR-binding peptide
  MOD_RES (27), (27): Xaa is C or S
NRHKRLIVNSSDDYYLVSTASLKTPAXTPKTV

SEQ ID NO: 39258 - protein, 36 aa, Artificial Sequence
  Cyclic GFR-binding peptide
  MOD_RES (30), (31): Xaa is C or S
VVMDRYKKLVVKENEDFYLMSIANLETPVXXAKPIK

SEQ ID NO: 39259 - protein, 31 aa, Artificial Sequence
  Cyclic GFR-binding peptide
  MOD_RES (1), (1): Xaa is C or S
XGEVVMEYHYKLVVKDYEDKYLMSIPSLETP

SEQ ID NO: 39260 - protein, 31 aa, Artificial Sequence
  Cyclic GFR-binding peptide
  MOD_RES (30), (31): Xaa is C or S
RVIMRHKRLVKPKRGVYYLISTASLAQPVXX

SEQ ID NO: 39261 - protein, 30 aa, Artificial Sequence
  Cyclic GFR-binding peptide
  MOD_RES (2), (2): Xaa is C or S
KXSRVIMQYNKLVKPKRGVLYLISIASLAQ

SEQ ID NO: 39262 - protein, 34 aa, Artificial Sequence; identical to SEQ ID NO: 2561
  Cyclic GFR-binding peptide

SEQ ID NO: 39263 - protein, 31 aa, Artificial Sequence
  Cyclic GFR-binding peptide
  MOD_RES (27), (28): Xaa is C or S
MQYNKLVKPKRGVLYLISIASLAQPVXXPAA

SEQ ID NO: 39264 - protein, 36 aa, Artificial Sequence; identical to SEQ ID NO: 2566
  Cyclic GFR-binding peptide
  MOD_RES (1), (32), (33): Xaa is C or S

SEQ ID NO: 39265 - protein, 38 aa, Artificial Sequence; identical to SEQ ID NO: 2568
  Cyclic GFR-binding peptide
  MOD_RES (2), (4), (35), (36): Xaa is C or S

SEQ ID NO: 39266 - protein, 43 aa, Artificial Sequence; identical to SEQ ID NO: 2569
  Cyclic GFR-binding peptide
  MOD_RES (2), (39): Xaa is C or S

SEQ ID NO: 39267 - protein, 30 aa, Artificial Sequence
  Cyclic GFR-binding peptide
  MOD_RES (27), (28): Xaa is C or S
MRHKRLVKPKRGVYYLISTASLAQPVXXPA

SEQ ID NO: 39268 - protein, 33 aa, Artificial Sequence; identical to SEQ ID NO: 2571
  Cyclic GFR-binding peptide
  MOD_RES (31), (32): Xaa is C or S

SEQ ID NO: 39269 - protein, 33 aa, Artificial Sequence
  Cyclic GFR-binding peptide
  MOD_RES (27), (28): Xaa is C or S
MRYKKLVKPKRGVFYLISIANLAQPVXXPAASA

SEQ ID NO: 39270 - protein, 29 aa, Artificial Sequence
  Cyclic GFR-binding peptide
AVSMGERHKRLTPVGMDDYYLVSTASLKT

SEQ ID NO: 39271 - protein, 30 aa, Artificial Sequence
  Cyclic GFR-binding peptide
  MOD_RES (2), (4): Xaa is C or S
SXKXSKVVMRHKRLVKPTRGVYYLISTASL

SEQ ID NO: 39272 - protein, 42 aa, Artificial Sequence; identical to SEQ ID NO: 2572
  Cyclic GFR-binding peptide
  MOD_RES (2), (4), (36): Xaa is C or S

SEQ ID NO: 39273 - protein, 36 aa, Artificial Sequence; identical to SEQ ID NO: 2574
  Cyclic GFR-binding peptide
  MOD_RES (36), (36): Xaa is C or S

SEQ ID NO: 39274 - protein, 32 aa, Artificial Sequence
  Cyclic GFR-binding peptide
  MOD_RES (1), (3): Xaa is C or S
XGXGEVVMERYKKLVVKDYEDFYLMSIANLET

SEQ ID NO: 39275 - protein, 32 aa, Artificial Sequence
  Cyclic GFR-binding peptide
  MOD_RES (30), (31): Xaa is C or S
RVIMQYNKLVKPKRGVLYLISIASLAQPVXXP

SEQ ID NO: 39276 - protein, 27 aa, Artificial Sequence
  Cyclic GFR-binding peptide
IMQYNKLVKPKRGVLYLISIASLAQPV

SEQ ID NO: 39277 - protein, 30 aa, Artificial Sequence
  Cyclic GFR-binding peptide
  MOD_RES (27), (28): Xaa is C or S
NQYNKLIVNSSDDLYLVSIASLKTPAXXPK

SEQ ID NO: 39278 - protein, 39 aa, Artificial Sequence; identical to SEQ ID NO: 2575
  Cyclic GFR-binding peptide
  MOD_RES (1), (38): Xaa is C or S

SEQ ID NO: 39279 - protein, 34 aa, Artificial Sequence
  Cyclic GFR-binding peptide
  MOD_RES (29), (30): Xaa is C or S
VVMQYNKLVKPTRGVLYLISIASLDQPVXXPSAS

SEQ ID NO: 39280 - protein, 25 aa, Artificial Sequence
  Cyclic GFR-binding peptide
QYNKLFIPKKRVIELYLVSIASLQV

SEQ ID NO: 39281 - protein, 29 aa, Artificial Sequence
  Cyclic GFR-binding peptide
  MOD_RES (1), (1): Xaa is C or S
XEAVSMGERYKKLTPVGMDDFYLVSIANL

SEQ ID NO: 39282 - protein, 34 aa, Artificial Sequence; identical to SEQ ID NO: 2576
  Cyclic GFR-binding peptide
  MOD_RES (2), (4): Xaa is C or S

SEQ ID NO: 39283 - protein, 29 aa, Artificial Sequence
  Cyclic GFR-binding peptide
VVMNQYNKLIVNSSDDLYLVSIASLQTPA

SEQ ID NO: 39284 - protein, 32 aa, Artificial Sequence
  Cyclic GFR-binding peptide
  MOD_RES (27), (28): Xaa is C or S
MQYNKLVKPKRGVLYLISIASLAQPVXXPAAS

SEQ ID NO: 39285 - protein, 27 aa, Artificial Sequence
  Cyclic GFR-binding peptide
GEVVMDRYKKLVVKENEDFYLMSIANL

SEQ ID NO: 39286 - protein, 26 aa, Artificial Sequence
  Cyclic GFR-binding peptide
VVMNRHKRLIVNSSDDYYLVSTASLK

SEQ ID NO: 39287 - protein, 34 aa, Artificial Sequence; identical to SEQ ID NO: 2577
  Cyclic GFR-binding peptide
  MOD_RES (1), (33), (34): Xaa is C or S

SEQ ID NO: 39288 - protein, 27 aa, Artificial Sequence
  Cyclic GFR-binding peptide
  MOD_RES (27), (27): Xaa is C or S
DRYKKLVVKENEDFYLMSIANLETPVX

SEQ ID NO: 39289 - protein, 30 aa, Artificial Sequence
  Cyclic GFR-binding peptide
  MOD_RES (30), (30): Xaa is C or S
YHYKLFIPKKRVIEKYLVSIPSLQVQTPRX

SEQ ID NO: 39290 - protein, 36 aa, Artificial Sequence; identical to SEQ ID NO: 2578
  Cyclic GFR-binding peptide
  MOD_RES (32), (33): Xaa is C or S

SEQ ID NO: 39291 - protein, 35 aa, Artificial Sequence
  Cyclic GFR-binding peptide
  MOD_RES (31), (32): Xaa is C or S
VSMGERYKKLTPVGMDDFYLVSIANLKTPVXXAKG

SEQ ID NO: 39292 - protein, 36 aa, Artificial Sequence
  Cyclic GFR-binding peptide
  MOD_RES (1), (3): Xaa is C or S
XKXALHDELTYHYKLFIPKKRVIEKYLVSIPSLQVQ

SEQ ID NO: 39293 - protein, 31 aa, Artificial Sequence
  Cyclic GFR-binding peptide
  MOD_RES (1), (1): Xaa is C or S
XGEVVMDYHYKLVVKENEDKYLMSIPSLETP

SEQ ID NO: 39294 - protein, 29 aa, Artificial Sequence
  Cyclic GFR-binding peptide
  MOD_RES (26), (27): Xaa is C or S
YHYKLVVKDYEDKYLMSIPSLETPVXXAK

SEQ ID NO: 39295 - protein, 27 aa, Artificial Sequence
  Cyclic GFR-binding peptide
ELTRYKKLFIPKKRVIEFYLVSIANLQ

SEQ ID NO: 39296 - protein, 29 aa, Artificial Sequence
  Cyclic GFR-binding peptide
ELTQYNKLFIPKKRVIELYLVSIASLQVQ

SEQ ID NO: 39297 - protein, 27 aa, Artificial Sequence
  Cyclic GFR-binding peptide
VMRHKRLVKPTRGVYYLISTASLDQPV

SEQ ID NO: 39298 - protein, 28 aa, Artificial Sequence
  Cyclic GFR-binding peptide
  MOD_RES (28), (28): Xaa is C or S
MNRYKKLIVNNSSDFYLVSIANLKTPAX

SEQ ID NO: 39299 - protein, 27 aa, Artificial Sequence
  Cyclic GFR-binding peptide
VMNQYNKLIVNNSSDLYLVSIASLKTP

SEQ ID NO: 39300 - protein, 30 aa, Artificial Sequence
  Cyclic GFR-binding peptide
  MOD_RES (1), (1): Xaa is C or S
XAKVVMNRYKKLIVNNSSDFYLVSIANLKT

SEQ ID NO: 39301 - protein, 29 aa, Artificial Sequence
  Cyclic GFR-binding peptide
  MOD_RES (28), (29): Xaa is C or S
GERYKKLTPVGMDDFYLVSIANLKTPVXX

SEQ ID NO: 39302 - protein, 29 aa, Artificial Sequence
  Cyclic GFR-binding peptide
EAVSMGERYKKLTPVGMDDFYLVSIANLK

SEQ ID NO: 39303 - protein, 29 aa, Artificial Sequence
  Cyclic GFR-binding peptide
  MOD_RES (26), (27): Xaa is C or S
RHKRLVVKENEDYYLMSTASLETPVXXAK

SEQ ID NO: 39304 - protein, 27 aa, Artificial Sequence
  Cyclic GFR-binding peptide
  MOD_RES (1), (1): Xaa is C or S
XSKVVMYHYKLVKPTRGVKYLISIPSL

SEQ ID NO: 39305 - protein, 26 aa, Artificial Sequence
  Cyclic GFR-binding peptide
SMGERYKKLTPVGMDDFYLVSIANLK

SEQ ID NO: 39306 - protein, 32 aa, Artificial Sequence
  Cyclic GFR-binding peptide
  MOD_RES (2), (4): Xaa is C or S
SXKXSRVIMYHYKLVKPKRGVKYLISIPSLAQ

SEQ ID NO: 39307 - protein, 28 aa, Artificial Sequence
  Cyclic GFR-binding peptide
LTYHYKLFIPKKRVIEKYLVSIPSLQVQ

SEQ ID NO: 39308 - protein, 28 aa, Artificial Sequence
  Cyclic GFR-binding peptide
  MOD_RES (2), (2): Xaa is C or S
GXGEVVMDRYKKLVVKENEDFYLMSIAN

SEQ ID NO: 39309 - protein, 20 aa, Artificial Sequence
  Cyclic GFR-binding peptide
RYKKLTPVGMDDFYLVSIAN

SEQ ID NO: 39310 - protein, 35 aa, Artificial Sequence; identical to SEQ ID NO: 2581
  Cyclic GFR-binding peptide
  MOD_RES (2), (4), (35): Xaa is C or S

SEQ ID NO: 39311 - protein, 36 aa, Artificial Sequence; identical to SEQ ID NO: 2582
  Cyclic GFR-binding peptide
  MOD_RES (2), (34): Xaa is C or S

SEQ ID NO: 39312 - protein, 29 aa, Artificial Sequence
  Cyclic GFR-binding peptide
  MOD_RES (2), (2): Xaa is C or S
GXEAVSMGERHKRLTPVGMDDYYLVSTAS

SEQ ID NO: 39313 - protein, 30 aa, Artificial Sequence
  Cyclic GFR-binding peptide
  MOD_RES (28), (29): Xaa is C or S
MNQYNKLIVNSSDDLYLVSIASLKTPAXXP

SEQ ID NO: 39314 - protein, 38 aa, Artificial Sequence; identical to SEQ ID NO: 2588
  Cyclic GFR-binding peptide
  MOD_RES (2), (2): Xaa is C or S

SEQ ID NO: 39315 - protein, 38 aa, Artificial Sequence; identical to SEQ ID NO: 2589
  Cyclic GFR-binding peptide
  MOD_RES (35), (35): Xaa is C or S

SEQ ID NO: 39316 - protein, 37 aa, Artificial Sequence; identical to SEQ ID NO: 2590
  Cyclic GFR-binding peptide
  MOD_RES (1), (1): Xaa is C or S

SEQ ID NO: 39317 - protein, 31 aa, Artificial Sequence
  Cyclic GFR-binding peptide
  MOD_RES (27), (28): Xaa is C or S
DRHKRLVVKENEDYYLMSTASLETPVXXAKP

SEQ ID NO: 39318 - protein, 32 aa, Artificial Sequence
  Cyclic GFR-binding peptide
  MOD_RES (2), (2): Xaa is C or S
GXARVVMNQYNKLIVNSSDDLYLVSIASLQTP

SEQ ID NO: 39319 - protein, 40 aa, Artificial Sequence; identical to SEQ ID NO: 2591
  Cyclic GFR-binding peptide
  MOD_RES (2), (4), (35), (36): Xaa is C or S

SEQ ID NO: 39320 - protein, 39 aa, Artificial Sequence; identical to SEQ ID NO: 2592
  Cyclic GFR-binding peptide
  MOD_RES (1), (3), (35), (36): Xaa is C or S

SEQ ID NO: 39321 - protein, 25 aa, Artificial Sequence
  Cyclic GFR-binding peptide
NYHYKLIVNSSDDKYLVSIPSLKTP

SEQ ID NO: 39322 - protein, 31 aa, Artificial Sequence
  Cyclic GFR-binding peptide
  MOD_RES (30), (31): Xaa is C or S
RVIMYHYKLVKPKRGVKYLISIPSLAQPVXX

SEQ ID NO: 39323 - protein, 41 aa, Artificial Sequence; identical to SEQ ID NO: 2594
  Cyclic GFR-binding peptide
  MOD_RES (1), (3), (35), (36): Xaa is C or S

SEQ ID NO: 39324 - protein, 30 aa, Artificial Sequence
  Cyclic GFR-binding peptide
  MOD_RES (30), (30): Xaa is C or S
RVIMRYKKLVKPKRGVFYLISIANLAQPVX

SEQ ID NO: 39325 - protein, 28 aa, Artificial Sequence
  Cyclic GFR-binding peptide
  MOD_RES (27), (28): Xaa is C or S
NQYNKLIVNSSDDLYLVSIASLKTPAXX

SEQ ID NO: 39326 - protein, 29 aa, Artificial Sequence
  Cyclic GFR-binding peptide
  MOD_RES (2), (2): Xaa is C or S
GXARVVMNYHYKLIVNSSDDKYLVSIPSL

SEQ ID NO: 39327 - protein, 33 aa, Artificial Sequence; identical to SEQ ID NO: 2595
  Cyclic GFR-binding peptide
  MOD_RES (1), (33): Xaa is C or S

SEQ ID NO: 39328 - protein, 33 aa, Artificial Sequence; identical to SEQ ID NO: 2597
  Cyclic GFR-binding peptide
  MOD_RES (31), (32): Xaa is C or S

SEQ ID NO: 39329 - protein, 33 aa, Artificial Sequence
  Cyclic GFR-binding peptide
  MOD_RES (30), (31): Xaa is C or S
KVIMRYKKLIKPTKGIFYLISIANLDQSVXXPS

SEQ ID NO: 39330 - protein, 23 aa, Artificial Sequence
  Cyclic GFR-binding peptide
QYNKLVKPTRGVLYLISIASLDQ

SEQ ID NO: 39331 - protein, 41 aa, Artificial Sequence; identical to SEQ ID NO: 2599
  Cyclic GFR-binding peptide
  MOD_RES (2), (4), (35), (36): Xaa is C or S

SEQ ID NO: 39332 - protein, 37 aa, Artificial Sequence; identical to SEQ ID NO: 2601
  Cyclic GFR-binding peptide
  MOD_RES (32), (32): Xaa is C or S

SEQ ID NO: 39333 - protein, 30 aa, Artificial Sequence
  Cyclic GFR-binding peptide
  MOD_RES (1), (3): Xaa is C or S
XGXGEVVMERHKRLVVKDYEDYYLMSTASL

SEQ ID NO: 39334 - protein, 31 aa, Artificial Sequence; identical to SEQ ID NO: 2600
  Cyclic GFR-binding peptide
  MOD_RES (31), (31): Xaa is C or S

SEQ ID NO: 39335 - protein, 34 aa, Artificial Sequence
  Cyclic GFR-binding peptide
  MOD_RES (29), (30): Xaa is C or S
VMNRHKRLIVNSSDDYYLVSTASLQTPAXXPKPV

SEQ ID NO: 39336 - protein, 35 aa, Artificial Sequence; identical to SEQ ID NO: 2604
  Cyclic GFR-binding peptide

SEQ ID NO: 39337 - protein, 37 aa, Artificial Sequence; identical to SEQ ID NO: 2606
  Cyclic GFR-binding peptide
  MOD_RES (2), (2): Xaa is C or S

SEQ ID NO: 39338 - protein, 26 aa, Artificial Sequence
  Cyclic GFR-binding peptide
KVIMQYNKLIKPTKGILYLISIASLD

SEQ ID NO: 39339 - protein, 37 aa, Artificial Sequence; identical to SEQ ID NO: 2608
  Cyclic GFR-binding peptide
  MOD_RES (1), (33), (34): Xaa is C or S

SEQ ID NO: 39340 - protein, 37 aa, Artificial Sequence; identical to SEQ ID NO: 2611
  Cyclic GFR-binding peptide
  MOD_RES (32), (33): Xaa is C or S

SEQ ID NO: 39341 - protein, 32 aa, Artificial Sequence
  Cyclic GFR-binding peptide
  MOD_RES (1), (3): Xaa is C or S
XGXEAVSMGERHKRLTPVGMDDYYLVSTASLK

SEQ ID NO: 39342 - protein, 30 aa, Artificial Sequence
  Cyclic GFR-binding peptide
  MOD_RES (30), (30): Xaa is C or S
RHKRLFIPKKRVIEYYLVSTASLQVQTPRX

SEQ ID NO: 39343 - protein, 32 aa, Artificial Sequence
  Cyclic GFR-binding peptide
  MOD_RES (2), (2): Xaa is C or S
GXSRVVMNQYNKLIVNSSDDLYLVSIASLKTP

SEQ ID NO: 39344 - protein, 33 aa, Artificial Sequence
  Cyclic GFR-binding peptide
  MOD_RES (28), (29): Xaa is C or S
MNQYNKLIVNSSDDLYLVSIASLKTPAXXPKPV

SEQ ID NO: 39345 - protein, 37 aa, Artificial Sequence; identical to SEQ ID NO: 2612
  Cyclic GFR-binding peptide
  MOD_RES (31), (32): Xaa is C or S

SEQ ID NO: 39346 - protein, 34 aa, Artificial Sequence
  Cyclic GFR-binding peptide
  MOD_RES (2), (4): Xaa is C or S
HXGXARVVMNRHKRLIVNSSDDYYLVSTASLQTP

SEQ ID NO: 39347 - protein, 35 aa, Artificial Sequence; identical to SEQ ID NO: 2614
  Cyclic GFR-binding peptide

SEQ ID NO: 39348 - protein, 32 aa, Artificial Sequence; identical to SEQ ID NO: 2616
  Cyclic GFR-binding peptide
  MOD_RES (1), (1): Xaa is C or S

SEQ ID NO: 39349 - protein, 37 aa, Artificial Sequence; identical to SEQ ID NO: 2615
  Cyclic GFR-binding peptide
  MOD_RES (1), (33): Xaa is C or S

SEQ ID NO: 39350 - protein, 39 aa, Artificial Sequence; identical to SEQ ID NO: 2618
  Cyclic GFR-binding peptide
  MOD_RES (2), (34), (35): Xaa is C or S

SEQ ID NO: 39351 - protein, 28 aa, Artificial Sequence
  Cyclic GFR-binding peptide
SRVVMNYHYKLIVNSSDDKYLVSIPSLK

SEQ ID NO: 39352 - protein, 31 aa, Artificial Sequence
  Cyclic GFR-binding peptide
  MOD_RES (28), (29): Xaa is C or S
MNQYNKLIVNNSSDLYLVSIASLKTPAXXAK

SEQ ID NO: 39353 - protein, 39 aa, Artificial Sequence; identical to SEQ ID NO: 2620
  Cyclic GFR-binding peptide
  MOD_RES (2), (4), (35), (36): Xaa is C or S

SEQ ID NO: 39354 - protein, 33 aa, Artificial Sequence
  Cyclic GFR-binding peptide
  MOD_RES (27), (28): Xaa is C or S
NQYNKLIVNNSSDLYLVSIASLKTPAXXAKPVA

SEQ ID NO: 39355 - protein, 27 aa, Artificial Sequence
  Cyclic GFR-binding peptide
IMRHKRLIKPTKGIYYLISTASLDQSV

SEQ ID NO: 39356 - protein, 29 aa, Artificial Sequence
  Cyclic GFR-binding peptide
RVIMYHYKLVKPKRGVKYLISIPSLAQPV

SEQ ID NO: 39357 - protein, 31 aa, Artificial Sequence
  Cyclic GFR-binding peptide
  MOD_RES (2), (4): Xaa is C or S
HXGXARVVMNQYNKLIVNSSDDLYLVSIASL

SEQ ID NO: 39358 - protein, 24 aa, Artificial Sequence
  Cyclic GFR-binding peptide
RVIMYHYKLVKPKRGVKYLISIPS

SEQ ID NO: 39359 - protein, 22 aa, Artificial Sequence
  Cyclic GFR-binding peptide
RHKRLIVNSSDDYYLVSTASLK

SEQ ID NO: 39360 - protein, 35 aa, Artificial Sequence; identical to SEQ ID NO: 2626
  Cyclic GFR-binding peptide
  MOD_RES (2), (4), (35): Xaa is C or S

SEQ ID NO: 39361 - protein, 35 aa, Artificial Sequence; identical to SEQ ID NO: 2628
  Cyclic GFR-binding peptide
  MOD_RES (1), (3), (34), (35): Xaa is C or S

SEQ ID NO: 39362 - protein, 28 aa, Artificial Sequence
  Cyclic GFR-binding peptide
  MOD_RES (27), (28): Xaa is C or S
MRYKKLVKPTRGVFYLISIANLDQPVXX

SEQ ID NO: 39363 - protein, 37 aa, Artificial Sequence; identical to SEQ ID NO: 2627
  Cyclic GFR-binding peptide
  MOD_RES (2), (33), (34): Xaa is C or S

SEQ ID NO: 39364 - protein, 32 aa, Artificial Sequence
  Cyclic GFR-binding peptide
  MOD_RES (2), (4): Xaa is C or S
RXGXGEVVMDYHYKLVVKENEDKYLMSIPSLE

SEQ ID NO: 39365 - protein, 28 aa, Artificial Sequence
  Cyclic GFR-binding peptide
VIMQYNKLIKPTKGILYLISIASLDQSV

SEQ ID NO: 39366 - protein, 37 aa, Artificial Sequence
  Cyclic GFR-binding peptide
  MOD_RES (32), (33): Xaa is C or S
AVSMGERYKKLTPVGMDDFYLVSIANLKTPVXXAKGV

SEQ ID NO: 39367 - protein, 28 aa, Artificial Sequence
  Cyclic GFR-binding peptide
  MOD_RES (27), (28): Xaa is C or S
MYHYKLVKPKRGVKYLISIPSLAQPVXX

SEQ ID NO: 39368 - protein, 38 aa, Artificial Sequence; identical to SEQ ID NO: 2632
  Cyclic GFR-binding peptide
  MOD_RES (1), (38): Xaa is C or S

SEQ ID NO: 39369 - protein, 29 aa, Artificial Sequence
  Cyclic GFR-binding peptide
  MOD_RES (2), (4): Xaa is C or S
SXKXSRVIMRHKRLVKPKRGVYYLISTAS

SEQ ID NO: 39370 - protein, 24 aa, Artificial Sequence
  Cyclic GFR-binding peptide
VVMNQYNKLIVNNSSDLYLVSIAS

SEQ ID NO: 39371 - protein, 23 aa, Artificial Sequence
  Cyclic GFR-binding peptide
RYKKLFIPKKRVIEFYLVSIANL

SEQ ID NO: 39372 - protein, 34 aa, Artificial Sequence; identical to SEQ ID NO: 2635
  Cyclic GFR-binding peptide
  MOD_RES (31), (31): Xaa is C or S

SEQ ID NO: 39373 - protein, 31 aa, Artificial Sequence; identical to SEQ ID NO: 2637
  Cyclic GFR-binding peptide
  MOD_RES (31), (31): Xaa is C or S

SEQ ID NO: 39374 - protein, 24 aa, Artificial Sequence
  Cyclic GFR-binding peptide
MQYNKLVKPKRGVLYLISIASLAQ

SEQ ID NO: 39375 - protein, 35 aa, Artificial Sequence
  Cyclic GFR-binding peptide
  MOD_RES (29), (30): Xaa is C or S
VIMRHKRLIKPTKGIYYLISTASLDQSVXXPSASA

SEQ ID NO: 39376 - protein, 26 aa, Artificial Sequence
  Cyclic GFR-binding peptide
SKVIMRHKRLIKPTKGIYYLISTASL

SEQ ID NO: 39377 - protein, 35 aa, Artificial Sequence
  Cyclic GFR-binding peptide
  MOD_RES (30), (31): Xaa is C or S
VVMNRHKRLIVNSSDDYYLVSTASLKTPAXXPKPV

SEQ ID NO: 39378 - protein, 24 aa, Artificial Sequence
  Cyclic GFR-binding peptide
MNQYNKLIVNNSSDLYLVSIASLK

SEQ ID NO: 39379 - protein, 30 aa, Artificial Sequence
  Cyclic GFR-binding peptide
  MOD_RES (30), (30): Xaa is C or S
VVMNQYNKLIVNSSDDLYLVSIASLQTPAX

SEQ ID NO: 39380 - protein, 34 aa, Artificial Sequence
  Cyclic GFR-binding peptide
  MOD_RES (28), (29): Xaa is C or S
MNQYNKLIVNNSSDLYLVSIASLKTPAXXAKPVA

SEQ ID NO: 39381 - protein, 34 aa, Artificial Sequence
  Cyclic GFR-binding peptide
  MOD_RES (29), (30): Xaa is C or S
VMNRYKKLIVNNSSDFYLVSIANLKTPAXXAKPV

SEQ ID NO: 39382 - protein, 37 aa, Artificial Sequence; identical to SEQ ID NO: 2640
  Cyclic GFR-binding peptide
  MOD_RES (31), (32): Xaa is C or S

SEQ ID NO: 39383 - protein, 30 aa, Artificial Sequence
  Cyclic GFR-binding peptide
  MOD_RES (1), (1): Xaa is C or S
XSRVIMQYNKLVKPKRGVLYLISIASLAQP

SEQ ID NO: 39384 - protein, 28 aa, Artificial Sequence
  Cyclic GFR-binding peptide
  MOD_RES (1), (1): Xaa is C or S
XSRVIMQYNKLVKPKRGVLYLISIASLA

SEQ ID NO: 39385 - protein, 29 aa, Artificial Sequence
  Cyclic GFR-binding peptide
  MOD_RES (1), (1): Xaa is C or S
XSKVVMQYNKLVKPTRGVLYLISIASLDQ

SEQ ID NO: 39386 - protein, 29 aa, Artificial Sequence
  Cyclic GFR-binding peptide
  MOD_RES (27), (27): Xaa is C or S
NQYNKLIVNSSDDLYLVSIASLKTPAXTP

SEQ ID NO: 39387 - protein, 24 aa, Artificial Sequence
  Cyclic GFR-binding peptide
RVIMRHKRLVKPKRGVYYLISTAS

SEQ ID NO: 39388 - protein, 33 aa, Artificial Sequence
  Cyclic GFR-binding peptide
  MOD_RES (30), (31): Xaa is C or S
RVIMRHKRLVKPKRGVYYLISTASLAQPVXXPA

SEQ ID NO: 39389 - protein, 35 aa, Artificial Sequence
  Cyclic GFR-binding peptide
  MOD_RES (34), (34): Xaa is C or S
DELTYHYKLFIPKKRVIEKYLVSIPSLQVQTPRXQ

SEQ ID NO: 39390 - protein, 26 aa, Artificial Sequence
  Cyclic GFR-binding peptide
TYHYKLFIPKKRVIEKYLVSIPSLQV

SEQ ID NO: 39391 - protein, 31 aa, Artificial Sequence
  Cyclic GFR-binding peptide
  MOD_RES (26), (27): Xaa is C or S
RHKRLIKPTKGIYYLISTASLDQSVXXPSAS

SEQ ID NO: 39392 - protein, 35 aa, Artificial Sequence
  Cyclic GFR-binding peptide
  MOD_RES (33), (33): Xaa is C or S
ELTRHKRLFIPKKRVIEYYLVSTASLQVQTPRXQV

SEQ ID NO: 39393 - protein, 29 aa, Artificial Sequence
  Cyclic GFR-binding peptide
  MOD_RES (28), (29): Xaa is C or S
MNRHKRLIVNSSDDYYLVSTASLQTPAXX

SEQ ID NO: 39394 - protein, 35 aa, Artificial Sequence; identical to SEQ ID NO: 2644
  Cyclic GFR-binding peptide
  MOD_RES (1), (33), (34): Xaa is C or S

SEQ ID NO: 39395 - protein, 29 aa, Artificial Sequence
  Cyclic GFR-binding peptide
  MOD_RES (2), (2): Xaa is C or S
GXGEVVMDRYKKLVVKENEDFYLMSIANL

SEQ ID NO: 39396 - protein, 30 aa, Artificial Sequence
  Cyclic GFR-binding peptide
ARVVMNYHYKLIVNSSDDKYLVSIPSLQTP

SEQ ID NO: 39397 - protein, 32 aa, Artificial Sequence
  Cyclic GFR-binding peptide
  MOD_RES (29), (30): Xaa is C or S
MGERYKKLTPVGMDDFYLVSIANLKTPVXXAK

SEQ ID NO: 39398 - protein, 36 aa, Artificial Sequence
  Cyclic GFR-binding peptide
  MOD_RES (30), (31): Xaa is C or S
VVMNYHYKLIVNSSDDKYLVSIPSLKTPAXXPKPVY

SEQ ID NO: 39399 - protein, 24 aa, Artificial Sequence
  Cyclic GFR-binding peptide
RHKRLTPVGMDDYYLVSTASLKTP

SEQ ID NO: 39400 - protein, 26 aa, Artificial Sequence
  Cyclic GFR-binding peptide
  MOD_RES (1), (1): Xaa is C or S
XSRVIMQYNKLVKPKRGVLYLISIAS

SEQ ID NO: 39401 - protein, 35 aa, Artificial Sequence; identical to SEQ ID NO: 2645
  Cyclic GFR-binding peptide
  MOD_RES (32), (32): Xaa is C or S

SEQ ID NO: 39402 - protein, 29 aa, Artificial Sequence
  Cyclic GFR-binding peptide
  MOD_RES (27), (28): Xaa is C or S
NYHYKLIVNSSDDKYLVSIPSLQTPAXXP

SEQ ID NO: 39403 - protein, 33 aa, Artificial Sequence
  Cyclic GFR-binding peptide
  MOD_RES (31), (31): Xaa is C or S
TQYNKLFIPKKRVIELYLVSIASLQVQTPRXQV

SEQ ID NO: 39404 - protein, 36 aa, Artificial Sequence
  Cyclic GFR-binding peptide
  MOD_RES (30), (31): Xaa is C or S
KVVMQYNKLVKPTRGVLYLISIASLDQPVXXPSASA

SEQ ID NO: 39405 - protein, 36 aa, Artificial Sequence; identical to SEQ ID NO: 2647
  Cyclic GFR-binding peptide
  MOD_RES (1), (3), (35): Xaa is C or S

SEQ ID NO: 39406 - protein, 36 aa, Artificial Sequence; identical to SEQ ID NO: 2648
  Cyclic GFR-binding peptide
  MOD_RES (1), (1): Xaa is C or S

SEQ ID NO: 39407 - protein, 38 aa, Artificial Sequence; identical to SEQ ID NO: 2650
  Cyclic GFR-binding peptide
  MOD_RES (1), (33), (34): Xaa is C or S

SEQ ID NO: 39408 - protein, 21 aa, Artificial Sequence
  Cyclic GFR-binding peptide
DRYKKLVVKENEDFYLMSIAN

SEQ ID NO: 39409 - protein, 30 aa, Artificial Sequence
  Cyclic GFR-binding peptide
  MOD_RES (1), (3): Xaa is C or S
XGXGEVVMEYHYKLVVKDYEDKYLMSIPSL

SEQ ID NO: 39410 - protein, 36 aa, Artificial Sequence
  Cyclic GFR-binding peptide
  MOD_RES (2), (4): Xaa is C or S
EXKXALHDELTQYNKLFIPKKRVIELYLVSIASLQV

SEQ ID NO: 39411 - protein, 32 aa, Artificial Sequence; identical to SEQ ID NO: 2653
  Cyclic GFR-binding peptide
  MOD_RES (31), (32): Xaa is C or S

SEQ ID NO: 39412 - protein, 28 aa, Artificial Sequence
  Cyclic GFR-binding peptide
  MOD_RES (26), (27): Xaa is C or S
RHKRLIVNSSDDYYLVSTASLKTPAXXP

SEQ ID NO: 39413 - protein, 36 aa, Artificial Sequence; identical to SEQ ID NO: 2654
  Cyclic GFR-binding peptide
  MOD_RES (32), (33): Xaa is C or S

SEQ ID NO: 39414 - protein, 30 aa, Artificial Sequence
  Cyclic GFR-binding peptide
  MOD_RES (27), (28): Xaa is C or S
ERYKKLVVKDYEDFYLMSIANLETPVXXAK

SEQ ID NO: 39415 - protein, 29 aa, Artificial Sequence
  Cyclic GFR-binding peptide
  MOD_RES (27), (28): Xaa is C or S
MQYNKLVKPTRGVLYLISIASLDQPVXXP

SEQ ID NO: 39416 - protein, 28 aa, Artificial Sequence
  Cyclic GFR-binding peptide
MGERHKRLTPVGMDDYYLVSTASLKTPV

SEQ ID NO: 39417 - protein, 36 aa, Artificial Sequence
  Cyclic GFR-binding peptide
  MOD_RES (30), (31): Xaa is C or S
VVMNRHKRLIVNSSDDYYLVSTASLKTPAXXPKPVY

SEQ ID NO: 39418 - protein, 27 aa, Artificial Sequence
  Cyclic GFR-binding peptide
MNQYNKLIVNNSSDLYLVSIASLKTPA

SEQ ID NO: 39419 - protein, 29 aa, Artificial Sequence
  Cyclic GFR-binding peptide
HDELTRHKRLFIPKKRVIEYYLVSTASLQ

SEQ ID NO: 39420 - protein, 24 aa, Artificial Sequence
  Cyclic GFR-binding peptide
MERYKKLVVKDYEDFYLMSIANLE

SEQ ID NO: 39421 - protein, 34 aa, Artificial Sequence; identical to SEQ ID NO: 2656
  Cyclic GFR-binding peptide
  MOD_RES (2), (4): Xaa is C or S

SEQ ID NO: 39422 - protein, 33 aa, Artificial Sequence
  Cyclic GFR-binding peptide
  MOD_RES (32), (33): Xaa is C or S
AVSMGERYKKLTPVGMDDFYLVSIANLKTPVXX

SEQ ID NO: 39423 - protein, 34 aa, Artificial Sequence; identical to SEQ ID NO: 2660
  Cyclic GFR-binding peptide
  MOD_RES (2), (33), (34): Xaa is C or S

SEQ ID NO: 39424 - protein, 28 aa, Artificial Sequence
  Cyclic GFR-binding peptide
  MOD_RES (26), (27): Xaa is C or S
QYNKLVKPKRGVLYLISIASLAQPVXXP

SEQ ID NO: 39425 - protein, 29 aa, Artificial Sequence
  Cyclic GFR-binding peptide
KVVMNYHYKLIVNNSSDKYLVSIPSLKTP

SEQ ID NO: 39426 - protein, 28 aa, Artificial Sequence
  Cyclic GFR-binding peptide
  MOD_RES (1), (1): Xaa is C or S
XGEVVMDRYKKLVVKENEDFYLMSIANL

SEQ ID NO: 39427 - protein, 30 aa, Artificial Sequence; identical to SEQ ID NO: 2661
  Cyclic GFR-binding peptide

SEQ ID NO: 39428 - protein, 25 aa, Artificial Sequence
  Cyclic GFR-binding peptide
MDRHKRLVVKENEDYYLMSTASLET

SEQ ID NO: 39429 - protein, 21 aa, Artificial Sequence
  Cyclic GFR-binding peptide
MYHYKLIKPTKGIKYLISIPS

SEQ ID NO: 39430 - protein, 30 aa, Artificial Sequence
  Cyclic GFR-binding peptide
  MOD_RES (29), (30): Xaa is C or S
VMNYHYKLIVNSSDDKYLVSIPSLQTPAXX

SEQ ID NO: 39431 - protein, 28 aa, Artificial Sequence
  Cyclic GFR-binding peptide
  MOD_RES (2), (2): Xaa is C or S
GXARVVMNYHYKLIVNSSDDKYLVSIPS

SEQ ID NO: 39432 - protein, 28 aa, Artificial Sequence
  Cyclic GFR-binding peptide
VSMGERHKRLTPVGMDDYYLVSTASLKT

SEQ ID NO: 39433 - protein, 25 aa, Artificial Sequence
  Cyclic GFR-binding peptide
VIMYHYKLIKPTKGIKYLISIPSLD

SEQ ID NO: 39434 - protein, 30 aa, Artificial Sequence
  Cyclic GFR-binding peptide
  MOD_RES (26), (26): Xaa is C or S
QYNKLIVNSSDDLYLVSIASLKTPAXTPKT

SEQ ID NO: 39435 - protein, 34 aa, Artificial Sequence
  Cyclic GFR-binding peptide
  MOD_RES (30), (31): Xaa is C or S
SMGERYKKLTPVGMDDFYLVSIANLKTPVXXAKG

SEQ ID NO: 39436 - protein, 30 aa, Artificial Sequence; identical to SEQ ID NO: 1892
  Cyclic GFR-binding peptide

SEQ ID NO: 39437 - protein, 25 aa, Artificial Sequence
  Cyclic GFR-binding peptide
RYKKLVVKENEDFYLMSIANLETPV

SEQ ID NO: 39438 - protein, 23 aa, Artificial Sequence
  Cyclic GFR-binding peptide
MYHYKLVKPKRGVKYLISIPSLA

SEQ ID NO: 39439 - protein, 31 aa, Artificial Sequence
  Cyclic GFR-binding peptide
  MOD_RES (27), (28): Xaa is C or S
MRHKRLIKPTKGIYYLISTASLDQSVXXPSA

SEQ ID NO: 39440 - protein, 30 aa, Artificial Sequence
  Cyclic GFR-binding peptide
  MOD_RES (29), (30): Xaa is C or S
VVMRYKKLVKPTRGVFYLISIANLDQPVXX

SEQ ID NO: 39441 - protein, 27 aa, Artificial Sequence
  Cyclic GFR-binding peptide
VVMNQYNKLIVNSSDDLYLVSIASLKT

SEQ ID NO: 39442 - protein, 34 aa, Artificial Sequence; identical to SEQ ID NO: 2669
  Cyclic GFR-binding peptide
  MOD_RES (1), (34): Xaa is C or S

SEQ ID NO: 39443 - protein, 24 aa, Artificial Sequence
  Cyclic GFR-binding peptide
NYHYKLIVNSSDDKYLVSIPSLKT

SEQ ID NO: 39444 - protein, 33 aa, Artificial Sequence
  Cyclic GFR-binding peptide
  MOD_RES (30), (31): Xaa is C or S
VVMNYHYKLIVNNSSDKYLVSIPSLKTPAXXAK

SEQ ID NO: 39445 - protein, 34 aa, Artificial Sequence; identical to SEQ ID NO: 2671
  Cyclic GFR-binding peptide
  MOD_RES (31), (31): Xaa is C or S

SEQ ID NO: 39446 - protein, 32 aa, Artificial Sequence
  Cyclic GFR-binding peptide
  MOD_RES (27), (28): Xaa is C or S
MQYNKLIKPTKGILYLISIASLDQSVXXPSAS

SEQ ID NO: 39447 - protein, 29 aa, Artificial Sequence
  Cyclic GFR-binding peptide
LHDELTRHKRLFIPKKRVIEYYLVSTASL

SEQ ID NO: 39448 - protein, 25 aa, Artificial Sequence
  Cyclic GFR-binding peptide
EVVMDRYKKLVVKENEDFYLMSIAN

SEQ ID NO: 39449 - protein, 22 aa, Artificial Sequence
  Cyclic GFR-binding peptide
ERHKRLVVKDYEDYYLMSTASL

SEQ ID NO: 39450 - protein, 25 aa, Artificial Sequence
  Cyclic GFR-binding peptide
MDYHYKLVVKENEDKYLMSIPSLET

SEQ ID NO: 39451 - protein, 28 aa, Artificial Sequence
  Cyclic GFR-binding peptide
VIMRYKKLIKPTKGIFYLISIANLDQSV

SEQ ID NO: 39452 - protein, 34 aa, Artificial Sequence
  Cyclic GFR-binding peptide
  MOD_RES (30), (31): Xaa is C or S
KVIMRHKRLIKPTKGIYYLISTASLDQSVXXPSA

SEQ ID NO: 39453 - protein, 32 aa, Artificial Sequence
  Cyclic GFR-binding peptide
  MOD_RES (1), (3): Xaa is C or S
XGXGEVVMDRHKRLVVKENEDYYLMSTASLET

SEQ ID NO: 39454 - protein, 35 aa, Artificial Sequence
  Cyclic GFR-binding peptide
  MOD_RES (30), (30): Xaa is C or S
VVMNQYNKLIVNSSDDLYLVSIASLKTPAXTPKTV

SEQ ID NO: 39455 - protein, 44 aa, Artificial Sequence; identical to SEQ ID NO: 2676
  Cyclic GFR-binding peptide
  MOD_RES (1), (3), (40): Xaa is C or S

SEQ ID NO: 39456 - protein, 29 aa, Artificial Sequence
  Cyclic GFR-binding peptide
  MOD_RES (2), (2): Xaa is C or S
KXSKVIMQYNKLIKPTKGILYLISIASLD

SEQ ID NO: 39457 - protein, 41 aa, Artificial Sequence; identical to SEQ ID NO: 2681
  Cyclic GFR-binding peptide
  MOD_RES (1), (38): Xaa is C or S

SEQ ID NO: 39458 - protein, 39 aa, Artificial Sequence; identical to SEQ ID NO: 2679
  Cyclic GFR-binding peptide
  MOD_RES (1), (3), (35): Xaa is C or S

SEQ ID NO: 39459 - protein, 34 aa, Artificial Sequence
  Cyclic GFR-binding peptide
  MOD_RES (30), (31): Xaa is C or S
RVIMQYNKLVKPKRGVLYLISIASLAQPVXXPAA

SEQ ID NO: 39460 - protein, 36 aa, Artificial Sequence; identical to SEQ ID NO: 2683
  Cyclic GFR-binding peptide
  MOD_RES (1), (3), (35), (36): Xaa is C or S

SEQ ID NO: 39461 - protein, 31 aa, Artificial Sequence
  Cyclic GFR-binding peptide
  MOD_RES (1), (1): Xaa is C or S
XSRVVMNYHYKLIVNSSDDKYLVSIPSLKTP

SEQ ID NO: 39462 - protein, 28 aa, Artificial Sequence
  Cyclic GFR-binding peptide
  MOD_RES (27), (27): Xaa is C or S
NRHKRLIVNSSDDYYLVSTASLKTPAXT

SEQ ID NO: 39463 - protein, 26 aa, Artificial Sequence
  Cyclic GFR-binding peptide
VMNQYNKLIVNSSDDLYLVSIASLQT

SEQ ID NO: 39464 - protein, 34 aa, Artificial Sequence
  Cyclic GFR-binding peptide
  MOD_RES (30), (30): Xaa is C or S
QYNKLFIPKKRVIELYLVSIASLQVQTPRXQVNR

SEQ ID NO: 39465 - protein, 36 aa, Artificial Sequence; identical to SEQ ID NO: 2685
  Cyclic GFR-binding peptide
  MOD_RES (2), (34), (35): Xaa is C or S

SEQ ID NO: 39466 - protein, 32 aa, Artificial Sequence
  Cyclic GFR-binding peptide
  MOD_RES (27), (28): Xaa is C or S
DRYKKLVVKENEDFYLMSIANLETPVXXAKPI

SEQ ID NO: 39467 - protein, 39 aa, Artificial Sequence; identical to SEQ ID NO: 2686
  Cyclic GFR-binding peptide
  MOD_RES (2), (4), (35), (36): Xaa is C or S

SEQ ID NO: 39468 - protein, 30 aa, Artificial Sequence; identical to SEQ ID NO: 2687
  Cyclic GFR-binding peptide

SEQ ID NO: 39469 - protein, 33 aa, Artificial Sequence; identical to SEQ ID NO: 2688
  Cyclic GFR-binding peptide
  MOD_RES (32), (33): Xaa is C or S

SEQ ID NO: 39470 - protein, 33 aa, Artificial Sequence
  Cyclic GFR-binding peptide
  MOD_RES (30), (31): Xaa is C or S
VVMNQYNKLIVNSSDDLYLVSIASLQTPAXXPK

SEQ ID NO: 39471 - protein, 38 aa, Artificial Sequence; identical to SEQ ID NO: 2689
  Cyclic GFR-binding peptide
  MOD_RES (1), (33), (34): Xaa is C or S

SEQ ID NO: 39472 - protein, 32 aa, Artificial Sequence
  Cyclic GFR-binding peptide
  MOD_RES (30), (31): Xaa is C or S
VVMEYHYKLVVKDYEDKYLMSIPSLETPVXXA

SEQ ID NO: 39473 - protein, 41 aa, Artificial Sequence; identical to SEQ ID NO: 2691
  Cyclic GFR-binding peptide
  MOD_RES (1), (3), (36), (37): Xaa is C or S

SEQ ID NO: 39474 - protein, 31 aa, Artificial Sequence; identical to SEQ ID NO: 2690
  Cyclic GFR-binding peptide
  MOD_RES (31), (31): Xaa is C or S

SEQ ID NO: 39475 - protein, 36 aa, Artificial Sequence
  Cyclic GFR-binding peptide
  MOD_RES (34), (34): Xaa is C or S
DELTRHKRLFIPKKRVIEYYLVSTASLQVQTPRXQV

SEQ ID NO: 39476 - protein, 29 aa, Artificial Sequence
  Cyclic GFR-binding peptide
YHYKLFIPKKRVIEKYLVSIPSLQVQTPR

SEQ ID NO: 39477 - protein, 35 aa, Artificial Sequence; identical to SEQ ID NO: 2692
  Cyclic GFR-binding peptide
  MOD_RES (1), (33), (34): Xaa is C or S

SEQ ID NO: 39478 - protein, 31 aa, Artificial Sequence; identical to SEQ ID NO: 2693
  Cyclic GFR-binding peptide
  MOD_RES (1), (1): Xaa is C or S

SEQ ID NO: 39479 - protein, 28 aa, Artificial Sequence
  Cyclic GFR-binding peptide
  MOD_RES (26), (27): Xaa is C or S
RYKKLVKPKRGVFYLISIANLAQPVXXP

SEQ ID NO: 39480 - protein, 29 aa, Artificial Sequence
  Cyclic GFR-binding peptide
  MOD_RES (27), (28): Xaa is C or S
EYHYKLVVKDYEDKYLMSIPSLETPVXXA

SEQ ID NO: 39481 - protein, 29 aa, Artificial Sequence
  Cyclic GFR-binding peptide
  MOD_RES (1), (1): Xaa is C or S
XGEVVMEYHYKLVVKDYEDKYLMSIPSLE

SEQ ID NO: 39482 - protein, 34 aa, Artificial Sequence
  Cyclic GFR-binding peptide
  MOD_RES (30), (31): Xaa is C or S
KVIMYHYKLIKPTKGIKYLISIPSLDQSVXXPSA

SEQ ID NO: 39483 - protein, 28 aa, Artificial Sequence
  Cyclic GFR-binding peptide
SKVIMYHYKLIKPTKGIKYLISIPSLDQ

SEQ ID NO: 39484 - protein, 36 aa, Artificial Sequence; identical to SEQ ID NO: 2695
  Cyclic GFR-binding peptide
  MOD_RES (1), (3), (34), (35): Xaa is C or S

SEQ ID NO: 39485 - protein, 26 aa, Artificial Sequence
  Cyclic GFR-binding peptide
SRVVMNRHKRLIVNSSDDYYLVSTAS

SEQ ID NO: 39486 - protein, 39 aa, Artificial Sequence; identical to SEQ ID NO: 2697
  Cyclic GFR-binding peptide
  MOD_RES (33), (34): Xaa is C or S

SEQ ID NO: 39487 - protein, 39 aa, Artificial Sequence; identical to SEQ ID NO: 2699
  Cyclic GFR-binding peptide
  MOD_RES (2), (4), (35), (36): Xaa is C or S

SEQ ID NO: 39488 - protein, 36 aa, Artificial Sequence; identical to SEQ ID NO: 2701
  Cyclic GFR-binding peptide
  MOD_RES (2), (4): Xaa is C or S

SEQ ID NO: 39489 - protein, 36 aa, Artificial Sequence
  Cyclic GFR-binding peptide
  MOD_RES (32), (32): Xaa is C or S
LTQYNKLFIPKKRVIELYLVSIASLQVQTPRXQVNR

SEQ ID NO: 39490 - protein, 33 aa, Artificial Sequence
  Cyclic GFR-binding peptide
  MOD_RES (1), (3): Xaa is C or S
XGXGEVVMDYHYKLVVKENEDKYLMSIPSLETP

SEQ ID NO: 39491 - protein, 37 aa, Artificial Sequence; identical to SEQ ID NO: 2702
  Cyclic GFR-binding peptide
  MOD_RES (2), (35), (36): Xaa is C or S

SEQ ID NO: 39492 - protein, 26 aa, Artificial Sequence
  Cyclic GFR-binding peptide
ARVVMNRHKRLIVNSSDDYYLVSTAS

SEQ ID NO: 39493 - protein, 33 aa, Artificial Sequence
  Cyclic GFR-binding peptide
  MOD_RES (2), (4): Xaa is C or S
RXGXEAVSMGEQYNKLTPVGMDDLYLVSIASLK

SEQ ID NO: 39494 - protein, 27 aa, Artificial Sequence
  Cyclic GFR-binding peptide
  MOD_RES (27), (27): Xaa is C or S
NYHYKLIVNSSDDKYLVSIPSLKTPAX

SEQ ID NO: 39495 - protein, 27 aa, Artificial Sequence
  Cyclic GFR-binding peptide
SRVIMRYKKLVKPKRGVFYLISIANLA

SEQ ID NO: 39496 - protein, 28 aa, Artificial Sequence
  Cyclic GFR-binding peptide
RVVMNYHYKLIVNSSDDKYLVSIPSLKT

SEQ ID NO: 39497 - protein, 24 aa, Artificial Sequence
  Cyclic GFR-binding peptide
RYKKLVKPTRGVFYLISIANLDQP

SEQ ID NO: 39498 - protein, 37 aa, Artificial Sequence
  Cyclic GFR-binding peptide
  MOD_RES (34), (34): Xaa is C or S
DELTYHYKLFIPKKRVIEKYLVSIPSLQVQTPRXQVN

SEQ ID NO: 39499 - protein, 29 aa, Artificial Sequence
  Cyclic GFR-binding peptide
  MOD_RES (1), (1): Xaa is C or S
XARVVMNYHYKLIVNSSDDKYLVSIPSLQ

SEQ ID NO: 39500 - protein, 31 aa, Artificial Sequence
  Cyclic GFR-binding peptide
  MOD_RES (1), (3): Xaa is C or S
XGXGEVVMEYHYKLVVKDYEDKYLMSIPSLE

SEQ ID NO: 39501 - protein, 28 aa, Artificial Sequence
  Cyclic GFR-binding peptide
  MOD_RES (27), (28): Xaa is C or S
EQYNKLTPVGMDDLYLVSIASLKTPVXX

SEQ ID NO: 39502 - protein, 24 aa, Artificial Sequence
  Cyclic GFR-binding peptide
ERHKRLVVKDYEDYYLMSTASLET

SEQ ID NO: 39503 - protein, 29 aa, Artificial Sequence
  Cyclic GFR-binding peptide
  MOD_RES (28), (29): Xaa is C or S
MNYHYKLIVNSSDDKYLVSIPSLQTPAXX

SEQ ID NO: 39504 - protein, 33 aa, Artificial Sequence
  Cyclic GFR-binding peptide
  MOD_RES (1), (3): Xaa is C or S
XKXALHDELTQYNKLFIPKKRVIELYLVSIASL

SEQ ID NO: 39505 - protein, 22 aa, Artificial Sequence
  Cyclic GFR-binding peptide
RHKRLVKPTRGVYYLISTASLD

SEQ ID NO: 39506 - protein, 41 aa, Artificial Sequence; identical to SEQ ID NO: 2710
  Cyclic GFR-binding peptide
  MOD_RES (1), (3), (35), (36): Xaa is C or S

SEQ ID NO: 39507 - protein, 25 aa, Artificial Sequence
  Cyclic GFR-binding peptide
VSMGERHKRLTPVGMDDYYLVSTAS

SEQ ID NO: 39508 - protein, 36 aa, Artificial Sequence; identical to SEQ ID NO: 2712
  Cyclic GFR-binding peptide
  MOD_RES (1), (1): Xaa is C or S

SEQ ID NO: 39509 - protein, 37 aa, Artificial Sequence; identical to SEQ ID NO: 2714
  Cyclic GFR-binding peptide
  MOD_RES (1), (33), (34): Xaa is C or S

SEQ ID NO: 39510 - protein, 30 aa, Artificial Sequence
  Cyclic GFR-binding peptide
  MOD_RES (26), (27): Xaa is C or S
RHKRLTPVGMDDYYLVSTASLKTPVXXAKG

SEQ ID NO: 39511 - protein, 33 aa, Artificial Sequence; identical to SEQ ID NO: 2716
  Cyclic GFR-binding peptide
  MOD_RES (1), (3): Xaa is C or S

SEQ ID NO: 39512 - protein, 40 aa, Artificial Sequence; identical to SEQ ID NO: 2717
  Cyclic GFR-binding peptide
  MOD_RES (2), (4), (35), (36): Xaa is C or S

SEQ ID NO: 39513 - protein, 30 aa, Artificial Sequence
  Cyclic GFR-binding peptide
ELTYHYKLFIPKKRVIEKYLVSIPSLQVQT

SEQ ID NO: 39514 - protein, 34 aa, Artificial Sequence
  Cyclic GFR-binding peptide
  MOD_RES (2), (4): Xaa is C or S
HXGXSRVVMNYHYKLIVNSSDDKYLVSIPSLKTP

SEQ ID NO: 39515 - protein, 25 aa, Artificial Sequence
  Cyclic GFR-binding peptide
MQYNKLVKPKRGVLYLISIASLAQP

SEQ ID NO: 39516 - protein, 32 aa, Artificial Sequence
  Cyclic GFR-binding peptide
  MOD_RES (30), (31): Xaa is C or S
VVMNYHYKLIVNSSDDKYLVSIPSLQTPAXXP

SEQ ID NO: 39517 - protein, 34 aa, Artificial Sequence; identical to SEQ ID NO: 2721
  Cyclic GFR-binding peptide
  MOD_RES (2), (33), (34): Xaa is C or S

SEQ ID NO: 39518 - protein, 26 aa, Artificial Sequence
  Cyclic GFR-binding peptide
VMERHKRLVVKDYEDYYLMSTASLET

SEQ ID NO: 39519 - protein, 39 aa, Artificial Sequence; identical to SEQ ID NO: 2722
  Cyclic GFR-binding peptide
  MOD_RES (1), (38): Xaa is C or S

SEQ ID NO: 39520 - protein, 24 aa, Artificial Sequence
  Cyclic GFR-binding peptide
MGERHKRLTPVGMDDYYLVSTASL

SEQ ID NO: 39521 - protein, 28 aa, Artificial Sequence
  Cyclic GFR-binding peptide
DELTQYNKLFIPKKRVIELYLVSIASLQ

SEQ ID NO: 39522 - protein, 33 aa, Artificial Sequence; identical to SEQ ID NO: 2724
  Cyclic GFR-binding peptide
  MOD_RES (32), (33): Xaa is C or S

SEQ ID NO: 39523 - protein, 41 aa, Artificial Sequence; identical to SEQ ID NO: 2725
  Cyclic GFR-binding peptide
  MOD_RES (37), (37): Xaa is C or S

SEQ ID NO: 39524 - protein, 23 aa, Artificial Sequence
  Cyclic GFR-binding peptide
IMQYNKLIKPTKGILYLISIASL

SEQ ID NO: 39525 - protein, 35 aa, Artificial Sequence
  Cyclic GFR-binding peptide
  MOD_RES (32), (33): Xaa is C or S
AVSMGERHKRLTPVGMDDYYLVSTASLKTPVXXAK

SEQ ID NO: 39526 - protein, 35 aa, Artificial Sequence; identical to SEQ ID NO: 2727
  Cyclic GFR-binding peptide
  MOD_RES (2), (4), (35): Xaa is C or S

SEQ ID NO: 39527 - protein, 32 aa, Artificial Sequence
  Cyclic GFR-binding peptide
  MOD_RES (26), (27): Xaa is C or S
RHKRLVKPKRGVYYLISTASLAQPVXXPAASA

SEQ ID NO: 39528 - protein, 32 aa, Artificial Sequence
  Cyclic GFR-binding peptide
  MOD_RES (2), (4): Xaa is C or S
HXGXSRVVMNQYNKLIVNSSDDLYLVSIASLK

SEQ ID NO: 39529 - protein, 29 aa, Artificial Sequence
  Cyclic GFR-binding peptide
  MOD_RES (2), (2): Xaa is C or S
GXGEVVMEYHYKLVVKDYEDKYLMSIPSL

SEQ ID NO: 39530 - protein, 37 aa, Artificial Sequence; identical to SEQ ID NO: 2728
  Cyclic GFR-binding peptide
  MOD_RES (1), (3), (34), (35): Xaa is C or S

SEQ ID NO: 39531 - protein, 36 aa, Artificial Sequence; identical to SEQ ID NO: 2729
  Cyclic GFR-binding peptide
  MOD_RES (32), (33): Xaa is C or S

SEQ ID NO: 39532 - protein, 32 aa, Artificial Sequence; identical to SEQ ID NO: 2731
  Cyclic GFR-binding peptide
  MOD_RES (31), (32): Xaa is C or S

SEQ ID NO: 39533 - protein, 21 aa, Artificial Sequence
  Cyclic GFR-binding peptide
NYHYKLIVNNSSDKYLVSIPS

SEQ ID NO: 39534 - protein, 30 aa, Artificial Sequence
  Cyclic GFR-binding peptide
  MOD_RES (2), (4): Xaa is C or S
SXKXSKVVMQYNKLVKPTRGVLYLISIASL

SEQ ID NO: 39535 - protein, 34 aa, Artificial Sequence; identical to SEQ ID NO: 2733
  Cyclic GFR-binding peptide
  MOD_RES (31), (32): Xaa is C or S

SEQ ID NO: 39536 - protein, 29 aa, Artificial Sequence
  Cyclic GFR-binding peptide
  MOD_RES (1), (3): Xaa is C or S
XKXSKVIMRHKRLIKPTKGIYYLISTASL

SEQ ID NO: 39537 - protein, 33 aa, Artificial Sequence; identical to SEQ ID NO: 2734
  Cyclic GFR-binding peptide
  MOD_RES (1), (33): Xaa is C or S

SEQ ID NO: 39538 - protein, 39 aa, Artificial Sequence; identical to SEQ ID NO: 2735
  Cyclic GFR-binding peptide
  MOD_RES (1), (33), (34): Xaa is C or S

SEQ ID NO: 39539 - protein, 26 aa, Artificial Sequence
  Cyclic GFR-binding peptide
VMQYNKLVKPTRGVLYLISIASLDQP

SEQ ID NO: 39540 - protein, 26 aa, Artificial Sequence
  Cyclic GFR-binding peptide
KVVMRHKRLVKPTRGVYYLISTASLD

SEQ ID NO: 39541 - protein, 37 aa, Artificial Sequence; identical to SEQ ID NO: 2738
  Cyclic GFR-binding peptide
  MOD_RES (33), (34): Xaa is C or S

SEQ ID NO: 39542 - protein, 33 aa, Artificial Sequence
  Cyclic GFR-binding peptide
  MOD_RES (29), (30): Xaa is C or S
VMDYHYKLVVKENEDKYLMSIPSLETPVXXAKP

SEQ ID NO: 39543 - protein, 34 aa, Artificial Sequence; identical to SEQ ID NO: 2739
  Cyclic GFR-binding peptide
  MOD_RES (1), (33), (34): Xaa is C or S

SEQ ID NO: 39544 - protein, 30 aa, Artificial Sequence
  Cyclic GFR-binding peptide
TRHKRLFIPKKRVIEYYLVSTASLQVQTPR

SEQ ID NO: 39545 - protein, 36 aa, Artificial Sequence; identical to SEQ ID NO: 2740
  Cyclic GFR-binding peptide
  MOD_RES (2), (33), (34): Xaa is C or S

SEQ ID NO: 39546 - protein, 28 aa, Artificial Sequence
  Cyclic GFR-binding peptide
  MOD_RES (28), (28): Xaa is C or S
MNRHKRLIVNSSDDYYLVSTASLQTPAX

SEQ ID NO: 39547 - protein, 32 aa, Artificial Sequence
  Cyclic GFR-binding peptide
  MOD_RES (26), (27): Xaa is C or S
QYNKLIVNSSDDLYLVSIASLQTPAXXPKPVT

SEQ ID NO: 39548 - protein, 35 aa, Artificial Sequence
  Cyclic GFR-binding peptide
  MOD_RES (29), (30): Xaa is C or S
VIMQYNKLIKPTKGILYLISIASLDQSVXXPSASA

SEQ ID NO: 39549 - protein, 36 aa, Artificial Sequence; identical to SEQ ID NO: 2742
  Cyclic GFR-binding peptide
  MOD_RES (1), (33): Xaa is C or S

SEQ ID NO: 39550 - protein, 31 aa, Artificial Sequence
  Cyclic GFR-binding peptide
  MOD_RES (27), (27): Xaa is C or S
NRHKRLIVNSSDDYYLVSTASLKTPAXTPKT

SEQ ID NO: 39551 - protein, 29 aa, Artificial Sequence
  Cyclic GFR-binding peptide
  MOD_RES (1), (3): Xaa is C or S
XKXSKVVMRHKRLVKPTRGVYYLISTASL

SEQ ID NO: 39552 - protein, 32 aa, Artificial Sequence
  Cyclic GFR-binding peptide
  MOD_RES (29), (30): Xaa is C or S
VIMRHKRLIKPTKGIYYLISTASLDQSVXXPS

SEQ ID NO: 39553 - protein, 25 aa, Artificial Sequence
  Cyclic GFR-binding peptide
IMRHKRLIKPTKGIYYLISTASLDQ

SEQ ID NO: 39554 - protein, 29 aa, Artificial Sequence
  Cyclic GFR-binding peptide
AAAAAAAAAQYNKLIVNNSSDLYLVSIAS

SEQ ID NO: 39555 - protein, 29 aa, Artificial Sequence
  Cyclic GFR-binding peptide
  MOD_RES (1), (3): Xaa is C or S
XGXAKVVMNQYNKLIVNNSSDLYLVSIAS

SEQ ID NO: 39556 - protein, 35 aa, Artificial Sequence; identical to SEQ ID NO: 2744
  Cyclic GFR-binding peptide
  MOD_RES (32), (33): Xaa is C or S

SEQ ID NO: 39557 - protein, 32 aa, Artificial Sequence
  Cyclic GFR-binding peptide
  MOD_RES (2), (4): Xaa is C or S
HXGXAKVVMNQYNKLIVNNSSDLYLVSIASLK

SEQ ID NO: 39558 - protein, 26 aa, Artificial Sequence
  Cyclic GFR-binding peptide
GEVVMERHKRLVVKDYEDYYLMSTAS

SEQ ID NO: 39559 - protein, 27 aa, Artificial Sequence
  Cyclic GFR-binding peptide
VMQYNKLVKPTRGVLYLISIASLDQPV

SEQ ID NO: 39560 - protein, 30 aa, Artificial Sequence
  Cyclic GFR-binding peptide
  MOD_RES (27), (27): Xaa is C or S
NYHYKLIVNSSDDKYLVSIPSLKTPAXTPK

SEQ ID NO: 39561 - protein, 32 aa, Artificial Sequence
  Cyclic GFR-binding peptide
  MOD_RES (28), (29): Xaa is C or S
VMRHKRLVKPTRGVYYLISTASLDQPVXXPSA

SEQ ID NO: 39562 - protein, 32 aa, Artificial Sequence
  Cyclic GFR-binding peptide
  MOD_RES (29), (30): Xaa is C or S
VMDYHYKLVVKENEDKYLMSIPSLETPVXXAK

SEQ ID NO: 39563 - protein, 25 aa, Artificial Sequence
  Cyclic GFR-binding peptide
KVIMYHYKLIKPTKGIKYLISIPSL

SEQ ID NO: 39564 - protein, 34 aa, Artificial Sequence; identical to SEQ ID NO: 2750
  Cyclic GFR-binding peptide
  MOD_RES (1), (3), (34): Xaa is C or S

SEQ ID NO: 39565 - protein, 24 aa, Artificial Sequence
  Cyclic GFR-binding peptide
NQYNKLIVNSSDDLYLVSIASLQT

SEQ ID NO: 39566 - protein, 26 aa, Artificial Sequence
  Cyclic GFR-binding peptide
MGERHKRLTPVGMDDYYLVSTASLKT

SEQ ID NO: 39567 - protein, 36 aa, Artificial Sequence; identical to SEQ ID NO: 2752
  Cyclic GFR-binding peptide
  MOD_RES (2), (4), (36): Xaa is C or S

SEQ ID NO: 39568 - protein, 33 aa, Artificial Sequence; identical to SEQ ID NO: 2753
  Cyclic GFR-binding peptide
  MOD_RES (32), (33): Xaa is C or S

SEQ ID NO: 39569 - protein, 24 aa, Artificial Sequence
  Cyclic GFR-binding peptide
MERHKRLVVKDYEDYYLMSTASLE

SEQ ID NO: 39570 - protein, 26 aa, Artificial Sequence
  Cyclic GFR-binding peptide
  MOD_RES (1), (1): Xaa is C or S
XSRVIMRYKKLVKPKRGVFYLISIAN

SEQ ID NO: 39571 - protein, 28 aa, Artificial Sequence
  Cyclic GFR-binding peptide
VVMNRHKRLIVNSSDDYYLVSTASLKTP

SEQ ID NO: 39572 - protein, 34 aa, Artificial Sequence
  Cyclic GFR-binding peptide
  MOD_RES (2), (4): Xaa is C or S
HXGXAKVVMNYHYKLIVNNSSDKYLVSIPSLKTP

SEQ ID NO: 39573 - protein, 36 aa, Artificial Sequence; identical to SEQ ID NO: 2755
  Cyclic GFR-binding peptide
  MOD_RES (1), (3), (34), (35): Xaa is C or S

SEQ ID NO: 39574 - protein, 24 aa, Artificial Sequence
  Cyclic GFR-binding peptide
LTRYKKLFIPKKRVIEFYLVSIAN

SEQ ID NO: 39575 - protein, 30 aa, Artificial Sequence
  Cyclic GFR-binding peptide
  MOD_RES (30), (30): Xaa is C or S
VVMDRHKRLVVKENEDYYLMSTASLETPVX

SEQ ID NO: 39576 - protein, 25 aa, Artificial Sequence
  Cyclic GFR-binding peptide
KVVMNRYKKLIVNNSSDFYLVSIAN

SEQ ID NO: 39577 - protein, 33 aa, Artificial Sequence; identical to SEQ ID NO: 2757
  Cyclic GFR-binding peptide
  MOD_RES (31), (32): Xaa is C or S

SEQ ID NO: 39578 - protein, 34 aa, Artificial Sequence
  Cyclic GFR-binding peptide
  MOD_RES (28), (29): Xaa is C or S
VMYHYKLVKPTRGVKYLISIPSLDQPVXXPSASA

SEQ ID NO: 39579 - protein, 29 aa, Artificial Sequence
  Cyclic GFR-binding peptide
AAAAAAAAARYKKLVVKDYEDFYLMSIAN

SEQ ID NO: 39580 - protein, 32 aa, Artificial Sequence; identical to SEQ ID NO: 2759
  Cyclic GFR-binding peptide
  MOD_RES (1), (32): Xaa is C or S

SEQ ID NO: 39581 - protein, 32 aa, Artificial Sequence; identical to SEQ ID NO: 2760
  Cyclic GFR-binding peptide
  MOD_RES (31), (32): Xaa is C or S

SEQ ID NO: 39582 - protein, 29 aa, Artificial Sequence
  Cyclic GFR-binding peptide
VSMGEQYNKLTPVGMDDLYLVSIASLKTP

SEQ ID NO: 39583 - protein, 39 aa, Artificial Sequence; identical to SEQ ID NO: 2763
  Cyclic GFR-binding peptide
  MOD_RES (1), (3), (34), (35): Xaa is C or S

SEQ ID NO: 39584 - protein, 39 aa, Artificial Sequence; identical to SEQ ID NO: 2766
  Cyclic GFR-binding peptide
  MOD_RES (2), (4), (36), (37): Xaa is C or S

SEQ ID NO: 39585 - protein, 27 aa, Artificial Sequence
  Cyclic GFR-binding peptide
AKVVMNYHYKLIVNNSSDKYLVSIPSL

SEQ ID NO: 39586 - protein, 33 aa, Artificial Sequence; identical to SEQ ID NO: 2767
  Cyclic GFR-binding peptide

SEQ ID NO: 39587 - protein, 35 aa, Artificial Sequence
  Cyclic GFR-binding peptide
  MOD_RES (29), (30): Xaa is C or S
VMDRHKRLVVKENEDYYLMSTASLETPVXXAKPIK

SEQ ID NO: 39588 - protein, 33 aa, Artificial Sequence
  Cyclic GFR-binding peptide
  MOD_RES (30), (31): Xaa is C or S
VVMNRHKRLIVNSSDDYYLVSTASLKTPAXXPK

SEQ ID NO: 39589 - protein, 28 aa, Artificial Sequence
  Cyclic GFR-binding peptide
KVVMRYKKLVKPTRGVFYLISIANLDQP

SEQ ID NO: 39590 - protein, 33 aa, Artificial Sequence
  Cyclic GFR-binding peptide
ALHDELTRYKKLFIPKKRVIEFYLVSIANLQVQ

SEQ ID NO: 39591 - protein, 34 aa, Artificial Sequence
  Cyclic GFR-binding peptide
  MOD_RES (29), (30): Xaa is C or S
VMNYHYKLIVNSSDDKYLVSIPSLQTPAXXPKPV

SEQ ID NO: 39592 - protein, 30 aa, Artificial Sequence
  Cyclic GFR-binding peptide
  MOD_RES (26), (27): Xaa is C or S
RYKKLVVKDYEDFYLMSIANLETPVXXAKP

SEQ ID NO: 39593 - protein, 39 aa, Artificial Sequence; identical to SEQ ID NO: 2771
  Cyclic GFR-binding peptide
  MOD_RES (1), (3), (34), (35): Xaa is C or S

SEQ ID NO: 39594 - protein, 30 aa, Artificial Sequence
  Cyclic GFR-binding peptide
VSMGERYKKLTPVGMDDFYLVSIANLKTPV

SEQ ID NO: 39595 - protein, 38 aa, Artificial Sequence; identical to SEQ ID NO: 2775
  Cyclic GFR-binding peptide
  MOD_RES (2), (4), (36): Xaa is C or S

SEQ ID NO: 39596 - protein, 37 aa, Artificial Sequence; identical to SEQ ID NO: 2776
  Cyclic GFR-binding peptide
  MOD_RES (1), (32), (33): Xaa is C or S

SEQ ID NO: 39597 - protein, 22 aa, Artificial Sequence
  Cyclic GFR-binding peptide
MRHKRLVKPTRGVYYLISTASL

SEQ ID NO: 39598 - protein, 32 aa, Artificial Sequence
  Cyclic GFR-binding peptide
  MOD_RES (2), (2): Xaa is C or S
GXAKVVMNYHYKLIVNNSSDKYLVSIPSLKTP

SEQ ID NO: 39599 - protein, 33 aa, Artificial Sequence; identical to SEQ ID NO: 2777
  Cyclic GFR-binding peptide
  MOD_RES (1), (3): Xaa is C or S

SEQ ID NO: 39600 - protein, 32 aa, Artificial Sequence
  Cyclic GFR-binding peptide
  MOD_RES (27), (28): Xaa is C or S
MRYKKLIKPTKGIFYLISIANLDQSVXXPSAS

SEQ ID NO: 39601 - protein, 31 aa, Artificial Sequence
  Cyclic GFR-binding peptide
  MOD_RES (2), (2): Xaa is C or S
KXSRVIMQYNKLVKPKRGVLYLISIASLAQP

SEQ ID NO: 39602 - protein, 28 aa, Artificial Sequence
  Cyclic GFR-binding peptide
  MOD_RES (1), (1): Xaa is C or S
XGEVVMERYKKLVVKDYEDFYLMSIANL

SEQ ID NO: 39603 - protein, 38 aa, Artificial Sequence; identical to SEQ ID NO: 2780
  Cyclic GFR-binding peptide
  MOD_RES (32), (33): Xaa is C or S

SEQ ID NO: 39604 - protein, 32 aa, Artificial Sequence
  Cyclic GFR-binding peptide
  MOD_RES (30), (31): Xaa is C or S
VVMERHKRLVVKDYEDYYLMSTASLETPVXXA

SEQ ID NO: 39605 - protein, 24 aa, Artificial Sequence
  Cyclic GFR-binding peptide
VVMDYHYKLVVKENEDKYLMSIPS

SEQ ID NO: 39606 - protein, 24 aa, Artificial Sequence
  Cyclic GFR-binding peptide
YHYKLVKPTRGVKYLISIPSLDQP

SEQ ID NO: 39607 - protein, 32 aa, Artificial Sequence
  Cyclic GFR-binding peptide
  MOD_RES (28), (29): Xaa is C or S
MNQYNKLIVNSSDDLYLVSIASLKTPAXXPKP

SEQ ID NO: 39608 - protein, 34 aa, Artificial Sequence
  Cyclic GFR-binding peptide
  MOD_RES (28), (29): Xaa is C or S
GEQYNKLTPVGMDDLYLVSIASLKTPVXXAKGVK

SEQ ID NO: 39609 - protein, 33 aa, Artificial Sequence
  Cyclic GFR-binding peptide
  MOD_RES (2), (4): Xaa is C or S
HXGXSRVVMNRHKRLIVNSSDDYYLVSTASLKT

SEQ ID NO: 39610 - protein, 32 aa, Artificial Sequence
  Cyclic GFR-binding peptide
  MOD_RES (2), (4): Xaa is C or S
SXKXSKVIMRYKKLIKPTKGIFYLISIANLDQ

SEQ ID NO: 39611 - protein, 36 aa, Artificial Sequence
  Cyclic GFR-binding peptide
  MOD_RES (31), (32): Xaa is C or S
VSMGERHKRLTPVGMDDYYLVSTASLKTPVXXAKGV

SEQ ID NO: 39612 - protein, 37 aa, Artificial Sequence; identical to SEQ ID NO: 2782
  Cyclic GFR-binding peptide
  MOD_RES (1), (3): Xaa is C or S

SEQ ID NO: 39613 - protein, 30 aa, Artificial Sequence
  Cyclic GFR-binding peptide
  MOD_RES (1), (1): Xaa is C or S
XEAVSMGERHKRLTPVGMDDYYLVSTASLK

SEQ ID NO: 39614 - protein, 38 aa, Artificial Sequence; identical to SEQ ID NO: 2783
  Cyclic GFR-binding peptide
  MOD_RES (2), (4), (36), (37): Xaa is C or S

SEQ ID NO: 39615 - protein, 35 aa, Artificial Sequence; identical to SEQ ID NO: 2784
  Cyclic GFR-binding peptide
  MOD_RES (1), (3), (35): Xaa is C or S

SEQ ID NO: 39616 - protein, 28 aa, Artificial Sequence
  Cyclic GFR-binding peptide
  MOD_RES (26), (27): Xaa is C or S
RHKRLIVNSSDDYYLVSTASLQTPAXXP

SEQ ID NO: 39617 - protein, 26 aa, Artificial Sequence
  Cyclic GFR-binding peptide
SRVIMRHKRLVKPKRGVYYLISTASL

SEQ ID NO: 39618 - protein, 36 aa, Artificial Sequence
  Cyclic GFR-binding peptide
  MOD_RES (30), (31): Xaa is C or S
VVMEYHYKLVVKDYEDKYLMSIPSLETPVXXAKPIS

SEQ ID NO: 39619 - protein, 29 aa, Artificial Sequence
  Cyclic GFR-binding peptide
  MOD_RES (27), (28): Xaa is C or S
DRHKRLVVKENEDYYLMSTASLETPVXXA

SEQ ID NO: 39620 - protein, 24 aa, Artificial Sequence
  Cyclic GFR-binding peptide
MRHKRLVKPTRGVYYLISTASLDQ

SEQ ID NO: 39621 - protein, 21 aa, Artificial Sequence
  Cyclic GFR-binding peptide
QYNKLIVNSSDDLYLVSIASL

SEQ ID NO: 39622 - protein, 29 aa, Artificial Sequence
  Cyclic GFR-binding peptide
  MOD_RES (1), (3): Xaa is C or S
XGXGEVVMDYHYKLVVKENEDKYLMSIPS

SEQ ID NO: 39623 - protein, 28 aa, Artificial Sequence
  Cyclic GFR-binding peptide
RVVMNQYNKLIVNSSDDLYLVSIASLKT

SEQ ID NO: 39624 - protein, 33 aa, Artificial Sequence
  Cyclic GFR-binding peptide
  MOD_RES (28), (29): Xaa is C or S
MNYHYKLIVNSSDDKYLVSIPSLKTPAXXPKPV

SEQ ID NO: 39625 - protein, 27 aa, Artificial Sequence
  Cyclic GFR-binding peptide
  MOD_RES (1), (1): Xaa is C or S
XSKVIMRHKRLIKPTKGIYYLISTASL

SEQ ID NO: 39626 - protein, 24 aa, Artificial Sequence
  Cyclic GFR-binding peptide
ERHKRLTPVGMDDYYLVSTASLKT

SEQ ID NO: 39627 - protein, 35 aa, Artificial Sequence; identical to SEQ ID NO: 2788
  Cyclic GFR-binding peptide
  MOD_RES (2), (4), (35): Xaa is C or S

SEQ ID NO: 39628 - protein, 30 aa, Artificial Sequence
  Cyclic GFR-binding peptide
  MOD_RES (29), (30): Xaa is C or S
VMDRHKRLVVKENEDYYLMSTASLETPVXX

SEQ ID NO: 39629 - protein, 24 aa, Artificial Sequence
  Cyclic GFR-binding peptide
YHYKLFIPKKRVIEKYLVSIPSLQ

SEQ ID NO: 39630 - protein, 25 aa, Artificial Sequence
  Cyclic GFR-binding peptide
ERYKKLTPVGMDDFYLVSIANLKTP

SEQ ID NO: 39631 - protein, 34 aa, Artificial Sequence; identical to SEQ ID NO: 2799
  Cyclic GFR-binding peptide
  MOD_RES (1), (32), (33): Xaa is C or S

SEQ ID NO: 39632 - protein, 33 aa, Artificial Sequence
  Cyclic GFR-binding peptide
  MOD_RES (27), (27): Xaa is C or S
NYHYKLIVNSSDDKYLVSIPSLKTPAXTPKTVH

SEQ ID NO: 39633 - protein, 34 aa, Artificial Sequence; identical to SEQ ID NO: 2800
  Cyclic GFR-binding peptide
  MOD_RES (32), (33): Xaa is C or S

SEQ ID NO: 39634 - protein, 33 aa, Artificial Sequence; identical to SEQ ID NO: 2801
  Cyclic GFR-binding peptide
  MOD_RES (32), (33): Xaa is C or S

SEQ ID NO: 39635 - protein, 33 aa, Artificial Sequence; identical to SEQ ID NO: 2802
  Cyclic GFR-binding peptide
  MOD_RES (2), (2): Xaa is C or S

SEQ ID NO: 39636 - protein, 36 aa, Artificial Sequence
  Cyclic GFR-binding peptide
  MOD_RES (34), (34): Xaa is C or S
DELTRYKKLFIPKKRVIEFYLVSIANLQVQTPRXQV

SEQ ID NO: 39637 - protein, 33 aa, Artificial Sequence; identical to SEQ ID NO: 2803
  Cyclic GFR-binding peptide
  MOD_RES (1), (33): Xaa is C or S

SEQ ID NO: 39638 - protein, 24 aa, Artificial Sequence
  Cyclic GFR-binding peptide
MGEQYNKLTPVGMDDLYLVSIASL

SEQ ID NO: 39639 - protein, 31 aa, Artificial Sequence; identical to SEQ ID NO: 2804
  Cyclic GFR-binding peptide

SEQ ID NO: 39640 - protein, 37 aa, Artificial Sequence; identical to SEQ ID NO: 2805
  Cyclic GFR-binding peptide
  MOD_RES (2), (33), (34): Xaa is C or S

SEQ ID NO: 39641 - protein, 29 aa, Artificial Sequence
  Cyclic GFR-binding peptide
  MOD_RES (28), (29): Xaa is C or S
VMRYKKLVKPTRGVFYLISIANLDQPVXX

SEQ ID NO: 39642 - protein, 29 aa, Artificial Sequence
  Cyclic GFR-binding peptide
  MOD_RES (2), (2): Xaa is C or S
KXSKVIMRYKKLIKPTKGIFYLISIANLD

SEQ ID NO: 39643 - protein, 25 aa, Artificial Sequence
  Cyclic GFR-binding peptide
SRVIMRHKRLVKPKRGVYYLISTAS

SEQ ID NO: 39644 - protein, 38 aa, Artificial Sequence
  Cyclic GFR-binding peptide
  MOD_RES (32), (33): Xaa is C or S
AVSMGEQYNKLTPVGMDDLYLVSIASLKTPVXXAKGVK

SEQ ID NO: 39645 - protein, 32 aa, Artificial Sequence
  Cyclic GFR-binding peptide
  MOD_RES (30), (31): Xaa is C or S
VVMNYHYKLIVNSSDDKYLVSIPSLKTPAXXP

SEQ ID NO: 39646 - protein, 32 aa, Artificial Sequence
  Cyclic GFR-binding peptide
  MOD_RES (1), (3): Xaa is C or S
XGXARVVMNQYNKLIVNSSDDLYLVSIASLQT

SEQ ID NO: 39647 - protein, 34 aa, Artificial Sequence; identical to SEQ ID NO: 2809
  Cyclic GFR-binding peptide
  MOD_RES (1), (3): Xaa is C or S

SEQ ID NO: 39648 - protein, 32 aa, Artificial Sequence
  Cyclic GFR-binding peptide
  MOD_RES (2), (4): Xaa is C or S
SXKXSRVIMRHKRLVKPKRGVYYLISTASLAQ

SEQ ID NO: 39649 - protein, 23 aa, Artificial Sequence
  Cyclic GFR-binding peptide
MNRHKRLIVNSSDDYYLVSTASL

SEQ ID NO: 39650 - protein, 31 aa, Artificial Sequence
  Cyclic GFR-binding peptide
  MOD_RES (28), (29): Xaa is C or S
MNQYNKLIVNSSDDLYLVSIASLQTPAXXPK

SEQ ID NO: 39651 - protein, 34 aa, Artificial Sequence
  Cyclic GFR-binding peptide
  MOD_RES (30), (31): Xaa is C or S
VVMDYHYKLVVKENEDKYLMSIPSLETPVXXAKP

SEQ ID NO: 39652 - protein, 31 aa, Artificial Sequence
  Cyclic GFR-binding peptide
  MOD_RES (30), (30): Xaa is C or S
QYNKLFIPKKRVIELYLVSIASLQVQTPRXQ

SEQ ID NO: 39653 - protein, 33 aa, Artificial Sequence
  Cyclic GFR-binding peptide
  MOD_RES (2), (4): Xaa is C or S
SXKXSKVIMRHKRLIKPTKGIYYLISTASLDQS

SEQ ID NO: 39654 - protein, 33 aa, Artificial Sequence
  Cyclic GFR-binding peptide
  MOD_RES (2), (4): Xaa is C or S
RXGXGEVVMEYHYKLVVKDYEDKYLMSIPSLET

SEQ ID NO: 39655 - protein, 30 aa, Artificial Sequence
  Cyclic GFR-binding peptide
  MOD_RES (28), (29): Xaa is C or S
GERHKRLTPVGMDDYYLVSTASLKTPVXXA

SEQ ID NO: 39656 - protein, 31 aa, Artificial Sequence
  Cyclic GFR-binding peptide
  MOD_RES (26), (27): Xaa is C or S
RYKKLVKPTRGVFYLISIANLDQPVXXPSAS

SEQ ID NO: 39657 - protein, 24 aa, Artificial Sequence
  Cyclic GFR-binding peptide
VMDYHYKLVVKENEDKYLMSIPSL

SEQ ID NO: 39658 - protein, 30 aa, Artificial Sequence
  Cyclic GFR-binding peptide
  MOD_RES (2), (4): Xaa is C or S
HXGXAKVVMNYHYKLIVNNSSDKYLVSIPS

SEQ ID NO: 39659 - protein, 33 aa, Artificial Sequence
  Cyclic GFR-binding peptide
  MOD_RES (27), (28): Xaa is C or S
EQYNKLTPVGMDDLYLVSIASLKTPVXXAKGVK

SEQ ID NO: 39660 - protein, 37 aa, Artificial Sequence; identical to SEQ ID NO: 2815
  Cyclic GFR-binding peptide
  MOD_RES (2), (4), (35), (36): Xaa is C or S

SEQ ID NO: 39661 - protein, 29 aa, Artificial Sequence
  Cyclic GFR-binding peptide
  MOD_RES (1), (3): Xaa is C or S
XGXSRVVMNYHYKLIVNSSDDKYLVSIPS

SEQ ID NO: 39662 - protein, 31 aa, Artificial Sequence
  Cyclic GFR-binding peptide
  MOD_RES (2), (2): Xaa is C or S
KXALHDELTRYKKLFIPKKRVIEFYLVSIAN

SEQ ID NO: 39663 - protein, 25 aa, Artificial Sequence
  Cyclic GFR-binding peptide
ERHKRLTPVGMDDYYLVSTASLKTP

SEQ ID NO: 39664 - protein, 27 aa, Artificial Sequence
  Cyclic GFR-binding peptide
IMYHYKLIKPTKGIKYLISIPSLDQSV

SEQ ID NO: 39665 - protein, 30 aa, Artificial Sequence
  Cyclic GFR-binding peptide
GEVVMERHKRLVVKDYEDYYLMSTASLETP

SEQ ID NO: 39666 - protein, 27 aa, Artificial Sequence
  Cyclic GFR-binding peptide
GEVVMDRHKRLVVKENEDYYLMSTASL

SEQ ID NO: 39667 - protein, 30 aa, Artificial Sequence; identical to SEQ ID NO: 1894
  Cyclic GFR-binding peptide

SEQ ID NO: 39668 - protein, 31 aa, Artificial Sequence
  Cyclic GFR-binding peptide
LHDELTQYNKLFIPKKRVIELYLVSIASLQV

SEQ ID NO: 39669 - protein, 24 aa, Artificial Sequence
  Cyclic GFR-binding peptide
RYKKLIKPTKGIFYLISIANLDQS

SEQ ID NO: 39670 - protein, 28 aa, Artificial Sequence
  Cyclic GFR-binding peptide
AKVVMNQYNKLIVNNSSDLYLVSIASLK

SEQ ID NO: 39671 - protein, 32 aa, Artificial Sequence; identical to SEQ ID NO: 2820
  Cyclic GFR-binding peptide
  MOD_RES (32), (32): Xaa is C or S

SEQ ID NO: 39672 - protein, 25 aa, Artificial Sequence
  Cyclic GFR-binding peptide
TQYNKLFIPKKRVIELYLVSIASLQ

SEQ ID NO: 39673 - protein, 31 aa, Artificial Sequence
  Cyclic GFR-binding peptide
  MOD_RES (29), (30): Xaa is C or S
VMEYHYKLVVKDYEDKYLMSIPSLETPVXXA

SEQ ID NO: 39674 - protein, 35 aa, Artificial Sequence
  Cyclic GFR-binding peptide
  MOD_RES (30), (31): Xaa is C or S
KVVMRHKRLVKPTRGVYYLISTASLDQPVXXPSAS

SEQ ID NO: 39675 - protein, 23 aa, Artificial Sequence
  Cyclic GFR-binding peptide
RYKKLIVNNSSDFYLVSIANLKT

SEQ ID NO: 39676 - protein, 25 aa, Artificial Sequence
  Cyclic GFR-binding peptide
YHYKLVVKDYEDKYLMSIPSLETPV

SEQ ID NO: 39677 - protein, 38 aa, Artificial Sequence
  Cyclic GFR-binding peptide
  MOD_RES (34), (34): Xaa is C or S
DELTRYKKLFIPKKRVIEFYLVSIANLQVQTPRXQVNR

SEQ ID NO: 39678 - protein, 31 aa, Artificial Sequence; identical to SEQ ID NO: 2822
  Cyclic GFR-binding peptide
  MOD_RES (31), (31): Xaa is C or S

SEQ ID NO: 39679 - protein, 26 aa, Artificial Sequence
  Cyclic GFR-binding peptide
  MOD_RES (26), (26): Xaa is C or S
QYNKLIKPTKGILYLISIASLDQSVX

SEQ ID NO: 39680 - protein, 38 aa, Artificial Sequence; identical to SEQ ID NO: 2823
  Cyclic GFR-binding peptide
  MOD_RES (2), (4), (36), (37): Xaa is C or S

SEQ ID NO: 39681 - protein, 35 aa, Artificial Sequence; identical to SEQ ID NO: 2826
  Cyclic GFR-binding peptide
  MOD_RES (31), (32): Xaa is C or S

SEQ ID NO: 39682 - protein, 23 aa, Artificial Sequence
  Cyclic GFR-binding peptide
MGEQYNKLTPVGMDDLYLVSIAS

SEQ ID NO: 39683 - protein, 27 aa, Artificial Sequence
  Cyclic GFR-binding peptide
  MOD_RES (26), (27): Xaa is C or S
RYKKLTPVGMDDFYLVSIANLKTPVXX

SEQ ID NO: 39684 - protein, 30 aa, Artificial Sequence
  Cyclic GFR-binding peptide
  MOD_RES (29), (30): Xaa is C or S
VMNQYNKLIVNSSDDLYLVSIASLQTPAXX

SEQ ID NO: 39685 - protein, 40 aa, Artificial Sequence; identical to SEQ ID NO: 2829
  Cyclic GFR-binding peptide
  MOD_RES (1), (3), (36), (37): Xaa is C or S

SEQ ID NO: 39686 - protein, 33 aa, Artificial Sequence; identical to SEQ ID NO: 2830
  Cyclic GFR-binding peptide
  MOD_RES (33), (33): Xaa is C or S

SEQ ID NO: 39687 - protein, 31 aa, Artificial Sequence
  Cyclic GFR-binding peptide
  MOD_RES (26), (27): Xaa is C or S
RYKKLVVKDYEDFYLMSIANLETPVXXAKPI

SEQ ID NO: 39688 - protein, 31 aa, Artificial Sequence
  Cyclic GFR-binding peptide
  MOD_RES (1), (3): Xaa is C or S
XGXEAVSMGERYKKLTPVGMDDFYLVSIANL

SEQ ID NO: 39689 - protein, 34 aa, Artificial Sequence
  Cyclic GFR-binding peptide
  MOD_RES (34), (34): Xaa is C or S
DELTRHKRLFIPKKRVIEYYLVSTASLQVQTPRX

SEQ ID NO: 39690 - protein, 24 aa, Artificial Sequence
  Cyclic GFR-binding peptide
KVVMQYNKLVKPTRGVLYLISIAS

SEQ ID NO: 39691 - protein, 41 aa, Artificial Sequence; identical to SEQ ID NO: 2832
  Cyclic GFR-binding peptide
  MOD_RES (2), (35), (36): Xaa is C or S

SEQ ID NO: 39692 - protein, 28 aa, Artificial Sequence
  Cyclic GFR-binding peptide
VVMNRHKRLIVNSSDDYYLVSTASLQTP

SEQ ID NO: 39693 - protein, 27 aa, Artificial Sequence
  Cyclic GFR-binding peptide
  MOD_RES (27), (27): Xaa is C or S
MYHYKLVKPKRGVKYLISIPSLAQPVX

SEQ ID NO: 39694 - protein, 32 aa, Artificial Sequence
  Cyclic GFR-binding peptide
  MOD_RES (30), (31): Xaa is C or S
VVMERYKKLVVKDYEDFYLMSIANLETPVXXA

SEQ ID NO: 39695 - protein, 30 aa, Artificial Sequence
  Cyclic GFR-binding peptide
  MOD_RES (2), (2): Xaa is C or S
KXSKVVMQYNKLVKPTRGVLYLISIASLDQ

SEQ ID NO: 39696 - protein, 31 aa, Artificial Sequence
  Cyclic GFR-binding peptide
LTRYKKLFIPKKRVIEFYLVSIANLQVQTPR

SEQ ID NO: 39697 - protein, 36 aa, Artificial Sequence
  Cyclic GFR-binding peptide
  MOD_RES (30), (31): Xaa is C or S
SMGEQYNKLTPVGMDDLYLVSIASLKTPVXXAKGVK

SEQ ID NO: 39698 - protein, 27 aa, Artificial Sequence
  Cyclic GFR-binding peptide
KVIMYHYKLIKPTKGIKYLISIPSLDQ

SEQ ID NO: 39699 - protein, 40 aa, Artificial Sequence; identical to SEQ ID NO: 2839
  Cyclic GFR-binding peptide
  MOD_RES (2), (4), (35), (36): Xaa is C or S

SEQ ID NO: 39700 - protein, 40 aa, Artificial Sequence; identical to SEQ ID NO: 2840
  Cyclic GFR-binding peptide
  MOD_RES (1), (3), (34), (35): Xaa is C or S

SEQ ID NO: 39701 - protein, 34 aa, Artificial Sequence
  Cyclic GFR-binding peptide
  MOD_RES (1), (3): Xaa is C or S
XGXEAVSMGEQYNKLTPVGMDDLYLVSIASLKTP

SEQ ID NO: 39702 - protein, 35 aa, Artificial Sequence; identical to SEQ ID NO: 2842
  Cyclic GFR-binding peptide
  MOD_RES (1), (34), (35): Xaa is C or S

SEQ ID NO: 39703 - protein, 32 aa, Artificial Sequence
  Cyclic GFR-binding peptide
  MOD_RES (32), (32): Xaa is C or S
LTRHKRLFIPKKRVIEYYLVSTASLQVQTPRX

SEQ ID NO: 39704 - protein, 36 aa, Artificial Sequence; identical to SEQ ID NO: 2843
  Cyclic GFR-binding peptide
  MOD_RES (2), (2): Xaa is C or S

SEQ ID NO: 39705 - protein, 38 aa, Artificial Sequence; identical to SEQ ID NO: 2844
  Cyclic GFR-binding peptide
  MOD_RES (2), (34), (35): Xaa is C or S

SEQ ID NO: 39706 - protein, 29 aa, Artificial Sequence
  Cyclic GFR-binding peptide
AAAAAAAAARYKKLVKPTRGVFYLISIAN

SEQ ID NO: 39707 - protein, 30 aa, Artificial Sequence
  Cyclic GFR-binding peptide
  MOD_RES (2), (2): Xaa is C or S
GXGEVVMEYHYKLVVKDYEDKYLMSIPSLE

SEQ ID NO: 39708 - protein, 41 aa, Artificial Sequence; identical to SEQ ID NO: 2847
  Cyclic GFR-binding peptide
  MOD_RES (1), (3), (35), (36): Xaa is C or S

SEQ ID NO: 39709 - protein, 30 aa, Artificial Sequence
  Cyclic GFR-binding peptide
  MOD_RES (2), (4): Xaa is C or S
HXGXSRVVMNQYNKLIVNSSDDLYLVSIAS

SEQ ID NO: 39710 - protein, 37 aa, Artificial Sequence; identical to SEQ ID NO: 2848
  Cyclic GFR-binding peptide
  MOD_RES (1), (33), (34): Xaa is C or S

SEQ ID NO: 39711 - protein, 35 aa, Artificial Sequence; identical to SEQ ID NO: 2849
  Cyclic GFR-binding peptide
  MOD_RES (1), (3), (34), (35): Xaa is C or S

SEQ ID NO: 39712 - protein, 32 aa, Artificial Sequence
  Cyclic GFR-binding peptide
  MOD_RES (28), (29): Xaa is C or S
IMQYNKLVKPKRGVLYLISIASLAQPVXXPAA

SEQ ID NO: 39713 - protein, 38 aa, Artificial Sequence; identical to SEQ ID NO: 2850
  Cyclic GFR-binding peptide
  MOD_RES (2), (34), (35): Xaa is C or S

SEQ ID NO: 39714 - protein, 29 aa, Artificial Sequence
  Cyclic GFR-binding peptide
VVMNRHKRLIVNSSDDYYLVSTASLKTPA

SEQ ID NO: 39715 - protein, 35 aa, Artificial Sequence; identical to SEQ ID NO: 2853
  Cyclic GFR-binding peptide
  MOD_RES (32), (33): Xaa is C or S

SEQ ID NO: 39716 - protein, 29 aa, Artificial Sequence
  Cyclic GFR-binding peptide
AAAAAAAAARHKRLVVKENEDYYLMSTAS

SEQ ID NO: 39717 - protein, 38 aa, Artificial Sequence
  Cyclic GFR-binding peptide
  MOD_RES (32), (33): Xaa is C or S
AVSMGERHKRLTPVGMDDYYLVSTASLKTPVXXAKGVK

SEQ ID NO: 39718 - protein, 23 aa, Artificial Sequence
  Cyclic GFR-binding peptide
MDYHYKLVVKENEDKYLMSIPSL

SEQ ID NO: 39719 - protein, 29 aa, Artificial Sequence
  Cyclic GFR-binding peptide
HDELTRYKKLFIPKKRVIEFYLVSIANLQ

SEQ ID NO: 39720 - protein, 30 aa, Artificial Sequence
  Cyclic GFR-binding peptide
  MOD_RES (28), (28): Xaa is C or S
MNQYNKLIVNSSDDLYLVSIASLKTPAXTP

SEQ ID NO: 39721 - protein, 34 aa, Artificial Sequence; identical to SEQ ID NO: 2855
  Cyclic GFR-binding peptide
  MOD_RES (2), (4): Xaa is C or S

SEQ ID NO: 39722 - protein, 27 aa, Artificial Sequence
  Cyclic GFR-binding peptide
SMGEQYNKLTPVGMDDLYLVSIASLKT

SEQ ID NO: 39723 - protein, 38 aa, Artificial Sequence; identical to SEQ ID NO: 2856
  Cyclic GFR-binding peptide
  MOD_RES (2), (4), (35), (36): Xaa is C or S

SEQ ID NO: 39724 - protein, 29 aa, Artificial Sequence
  Cyclic GFR-binding peptide
  MOD_RES (1), (3): Xaa is C or S
XKXSKVIMYHYKLIKPTKGIKYLISIPSL

SEQ ID NO: 39725 - protein, 32 aa, Artificial Sequence
  Cyclic GFR-binding peptide
  MOD_RES (29), (30): Xaa is C or S
VMNYHYKLIVNSSDDKYLVSIPSLKTPAXXPK

SEQ ID NO: 39726 - protein, 22 aa, Artificial Sequence
  Cyclic GFR-binding peptide
DYHYKLVVKENEDKYLMSIPSL

SEQ ID NO: 39727 - protein, 41 aa, Artificial Sequence; identical to SEQ ID NO: 2859
  Cyclic GFR-binding peptide
  MOD_RES (1), (3), (35): Xaa is C or S

SEQ ID NO: 39728 - protein, 31 aa, Artificial Sequence; identical to SEQ ID NO: 2861
  Cyclic GFR-binding peptide
  MOD_RES (31), (31): Xaa is C or S

SEQ ID NO: 39729 - protein, 32 aa, Artificial Sequence
  Cyclic GFR-binding peptide
  MOD_RES (26), (27): Xaa is C or S
YHYKLVVKDYEDKYLMSIPSLETPVXXAKPIS

SEQ ID NO: 39730 - protein, 41 aa, Artificial Sequence; identical to SEQ ID NO: 2862
  Cyclic GFR-binding peptide
  MOD_RES (1), (3), (35), (36): Xaa is C or S

SEQ ID NO: 39731 - protein, 34 aa, Artificial Sequence
  Cyclic GFR-binding peptide
  MOD_RES (29), (30): Xaa is C or S
VIMQYNKLVKPKRGVLYLISIASLAQPVXXPAAS

SEQ ID NO: 39732 - protein, 25 aa, Artificial Sequence
  Cyclic GFR-binding peptide
EVVMERYKKLVVKDYEDFYLMSIAN

SEQ ID NO: 39733 - protein, 39 aa, Artificial Sequence; identical to SEQ ID NO: 2863
  Cyclic GFR-binding peptide
  MOD_RES (2), (34): Xaa is C or S

SEQ ID NO: 39734 - protein, 28 aa, Artificial Sequence
  Cyclic GFR-binding peptide
MGEQYNKLTPVGMDDLYLVSIASLKTPV

SEQ ID NO: 39735 - protein, 31 aa, Artificial Sequence; identical to SEQ ID NO: 2864
  Cyclic GFR-binding peptide
  MOD_RES (31), (31): Xaa is C or S

SEQ ID NO: 39736 - protein, 41 aa, Artificial Sequence; identical to SEQ ID NO: 2865
  Cyclic GFR-binding peptide
  MOD_RES (2), (4), (36): Xaa is C or S

SEQ ID NO: 39737 - protein, 24 aa, Artificial Sequence
  Cyclic GFR-binding peptide
MNRHKRLIVNSSDDYYLVSTASLQ

SEQ ID NO: 39738 - protein, 25 aa, Artificial Sequence
  Cyclic GFR-binding peptide
MNYHYKLIVNNSSDKYLVSIPSLKT

SEQ ID NO: 39739 - protein, 35 aa, Artificial Sequence; identical to SEQ ID NO: 2866
  Cyclic GFR-binding peptide
  MOD_RES (31), (32): Xaa is C or S

SEQ ID NO: 39740 - protein, 32 aa, Artificial Sequence
  Cyclic GFR-binding peptide
  MOD_RES (31), (31): Xaa is C or S
TQYNKLFIPKKRVIELYLVSIASLQVQTPRXQ

SEQ ID NO: 39741 - protein, 35 aa, Artificial Sequence; identical to SEQ ID NO: 2869
  Cyclic GFR-binding peptide
  MOD_RES (2), (4): Xaa is C or S

SEQ ID NO: 39742 - protein, 34 aa, Artificial Sequence; identical to SEQ ID NO: 2871
  Cyclic GFR-binding peptide
  MOD_RES (32), (33): Xaa is C or S

SEQ ID NO: 39743 - protein, 32 aa, Artificial Sequence
  Cyclic GFR-binding peptide
  MOD_RES (1), (3): Xaa is C or S
XGXAKVVMNQYNKLIVNNSSDLYLVSIASLKT

SEQ ID NO: 39744 - protein, 31 aa, Artificial Sequence
  Cyclic GFR-binding peptide
  MOD_RES (2), (2): Xaa is C or S
GXARVVMNYHYKLIVNSSDDKYLVSIPSLQT

SEQ ID NO: 39745 - protein, 22 aa, Artificial Sequence
  Cyclic GFR-binding peptide
RYKKLFIPKKRVIEFYLVSIAN

SEQ ID NO: 39746 - protein, 41 aa, Artificial Sequence; identical to SEQ ID NO: 2873
  Cyclic GFR-binding peptide
  MOD_RES (2), (4), (36), (37): Xaa is C or S

SEQ ID NO: 39747 - protein, 29 aa, Artificial Sequence
  Cyclic GFR-binding peptide
  MOD_RES (29), (29): Xaa is C or S
MGERHKRLTPVGMDDYYLVSTASLKTPVX

SEQ ID NO: 39748 - protein, 33 aa, Artificial Sequence
  Cyclic GFR-binding peptide
  MOD_RES (30), (30): Xaa is C or S
YHYKLFIPKKRVIEKYLVSIPSLQVQTPRXQVN

SEQ ID NO: 39749 - protein, 22 aa, Artificial Sequence
  Cyclic GFR-binding peptide
RHKRLVVKDYEDYYLMSTASLE

SEQ ID NO: 39750 - protein, 37 aa, Artificial Sequence; identical to SEQ ID NO: 2876
  Cyclic GFR-binding peptide
  MOD_RES (1), (34), (35): Xaa is C or S

SEQ ID NO: 39751 - protein, 30 aa, Artificial Sequence
  Cyclic GFR-binding peptide
GEVVMDYHYKLVVKENEDKYLMSIPSLETP

SEQ ID NO: 39752 - protein, 23 aa, Artificial Sequence
  Cyclic GFR-binding peptide
VVMRYKKLVKPTRGVFYLISIAN

SEQ ID NO: 39753 - protein, 32 aa, Artificial Sequence; identical to SEQ ID NO: 2878
  Cyclic GFR-binding peptide
  MOD_RES (31), (32): Xaa is C or S

SEQ ID NO: 39754 - protein, 29 aa, Artificial Sequence
  Cyclic GFR-binding peptide
LHDELTQYNKLFIPKKRVIELYLVSIASL

SEQ ID NO: 39755 - protein, 21 aa, Artificial Sequence
  Cyclic GFR-binding peptide
YHYKLVKPTRGVKYLISIPSL

SEQ ID NO: 39756 - protein, 26 aa, Artificial Sequence
  Cyclic GFR-binding peptide
VVMDYHYKLVVKENEDKYLMSIPSLE

SEQ ID NO: 39757 - protein, 40 aa, Artificial Sequence; identical to SEQ ID NO: 2879
  Cyclic GFR-binding peptide
  MOD_RES (2), (34), (35): Xaa is C or S

SEQ ID NO: 39758 - protein, 29 aa, Artificial Sequence
  Cyclic GFR-binding peptide
RVVMNRHKRLIVNSSDDYYLVSTASLQTP

SEQ ID NO: 39759 - protein, 29 aa, Artificial Sequence
  Cyclic GFR-binding peptide
  MOD_RES (26), (27): Xaa is C or S
RYKKLVVKENEDFYLMSIANLETPVXXAK

SEQ ID NO: 39760 - protein, 31 aa, Artificial Sequence
  Cyclic GFR-binding peptide
  MOD_RES (26), (27): Xaa is C or S
YHYKLVVKENEDKYLMSIPSLETPVXXAKPI

SEQ ID NO: 39761 - protein, 26 aa, Artificial Sequence
  Cyclic GFR-binding peptide
VIMRYKKLVKPKRGVFYLISIANLAQ

SEQ ID NO: 39762 - protein, 40 aa, Artificial Sequence; identical to SEQ ID NO: 2887
  Cyclic GFR-binding peptide
  MOD_RES (1), (3), (34), (35): Xaa is C or S

SEQ ID NO: 39763 - protein, 28 aa, Artificial Sequence
  Cyclic GFR-binding peptide
KVIMQYNKLIKPTKGILYLISIASLDQS

SEQ ID NO: 39764 - protein, 23 aa, Artificial Sequence
  Cyclic GFR-binding peptide
MRHKRLVKPTRGVYYLISTASLD

SEQ ID NO: 39765 - protein, 26 aa, Artificial Sequence
  Cyclic GFR-binding peptide
MDYHYKLVVKENEDKYLMSIPSLETP

SEQ ID NO: 39766 - protein, 23 aa, Artificial Sequence
  Cyclic GFR-binding peptide
RYKKLVKPTRGVFYLISIANLDQ

SEQ ID NO: 39767 - protein, 34 aa, Artificial Sequence
  Cyclic GFR-binding peptide
  MOD_RES (30), (31): Xaa is C or S
VVMERYKKLVVKDYEDFYLMSIANLETPVXXAKP

SEQ ID NO: 39768 - protein, 28 aa, Artificial Sequence
  Cyclic GFR-binding peptide
  MOD_RES (1), (1): Xaa is C or S
XSRVIMRYKKLVKPKRGVFYLISIANLA

SEQ ID NO: 39769 - protein, 36 aa, Artificial Sequence; identical to SEQ ID NO: 2889
  Cyclic GFR-binding peptide
  MOD_RES (1), (32), (33): Xaa is C or S

SEQ ID NO: 39770 - protein, 29 aa, Artificial Sequence
  Cyclic GFR-binding peptide
AKVVMNYHYKLIVNNSSDKYLVSIPSLKT

SEQ ID NO: 39771 - protein, 28 aa, Artificial Sequence
  Cyclic GFR-binding peptide
VSMGEQYNKLTPVGMDDLYLVSIASLKT

SEQ ID NO: 39772 - protein, 24 aa, Artificial Sequence
  Cyclic GFR-binding peptide
VMDRHKRLVVKENEDYYLMSTASL

SEQ ID NO: 39773 - protein, 27 aa, Artificial Sequence
  Cyclic GFR-binding peptide
SKVIMRYKKLIKPTKGIFYLISIANLD

SEQ ID NO: 39774 - protein, 20 aa, Artificial Sequence
  Cyclic GFR-binding peptide
RHKRLTPVGMDDYYLVSTAS

SEQ ID NO: 39775 - protein, 26 aa, Artificial Sequence
  Cyclic GFR-binding peptide
VVMNYHYKLIVNSSDDKYLVSIPSLK

SEQ ID NO: 39776 - protein, 33 aa, Artificial Sequence
  Cyclic GFR-binding peptide
  MOD_RES (33), (33): Xaa is C or S
ELTQYNKLFIPKKRVIELYLVSIASLQVQTPRX

SEQ ID NO: 39777 - protein, 27 aa, Artificial Sequence
  Cyclic GFR-binding peptide
VVMRYKKLVKPTRGVFYLISIANLDQP

SEQ ID NO: 39778 - protein, 27 aa, Artificial Sequence
  Cyclic GFR-binding peptide
MNYHYKLIVNNSSDKYLVSIPSLKTPA

SEQ ID NO: 39779 - protein, 41 aa, Artificial Sequence; identical to SEQ ID NO: 2891
  Cyclic GFR-binding peptide
  MOD_RES (1), (3), (40): Xaa is C or S

SEQ ID NO: 39780 - protein, 26 aa, Artificial Sequence
  Cyclic GFR-binding peptide
RYKKLFIPKKRVIEFYLVSIANLQVQ

SEQ ID NO: 39781 - protein, 32 aa, Artificial Sequence; identical to SEQ ID NO: 2892
  Cyclic GFR-binding peptide
  MOD_RES (32), (32): Xaa is C or S

SEQ ID NO: 39782 - protein, 22 aa, Artificial Sequence
  Cyclic GFR-binding peptide
YHYKLIVNSSDDKYLVSIPSLK

SEQ ID NO: 39783 - protein, 33 aa, Artificial Sequence; identical to SEQ ID NO: 2893
  Cyclic GFR-binding peptide
  MOD_RES (1), (32), (33): Xaa is C or S

SEQ ID NO: 39784 - protein, 29 aa, Artificial Sequence
  Cyclic GFR-binding peptide
AAAAAAAAAYHYKLIKPTKGIKYLISIPS

SEQ ID NO: 39785 - protein, 37 aa, Artificial Sequence; identical to SEQ ID NO: 2895
  Cyclic GFR-binding peptide
  MOD_RES (36), (36): Xaa is C or S

SEQ ID NO: 39786 - protein, 30 aa, Artificial Sequence
  Cyclic GFR-binding peptide
LHDELTQYNKLFIPKKRVIELYLVSIASLQ

SEQ ID NO: 39787 - protein, 30 aa, Artificial Sequence; identical to SEQ ID NO: 2896
  Cyclic GFR-binding peptide

SEQ ID NO: 39788 - protein, 37 aa, Artificial Sequence; identical to SEQ ID NO: 2899
  Cyclic GFR-binding peptide
  MOD_RES (2), (4), (35), (36): Xaa is C or S

SEQ ID NO: 39789 - protein, 25 aa, Artificial Sequence
  Cyclic GFR-binding peptide
YHYKLIKPTKGIKYLISIPSLDQSV

SEQ ID NO: 39790 - protein, 39 aa, Artificial Sequence; identical to SEQ ID NO: 2901
  Cyclic GFR-binding peptide
  MOD_RES (2), (34), (35): Xaa is C or S

SEQ ID NO: 39791 - protein, 37 aa, Artificial Sequence; identical to SEQ ID NO: 2900
  Cyclic GFR-binding peptide
  MOD_RES (2), (34), (35): Xaa is C or S

SEQ ID NO: 39792 - protein, 28 aa, Artificial Sequence
  Cyclic GFR-binding peptide
  MOD_RES (28), (28): Xaa is C or S
IMYHYKLVKPKRGVKYLISIPSLAQPVX

SEQ ID NO: 39793 - protein, 26 aa, Artificial Sequence
  Cyclic GFR-binding peptide
EVVMDRYKKLVVKENEDFYLMSIANL

SEQ ID NO: 39794 - protein, 27 aa, Artificial Sequence
  Cyclic GFR-binding peptide
  MOD_RES (1), (1): Xaa is C or S
XAKVVMNQYNKLIVNNSSDLYLVSIAS

SEQ ID NO: 39795 - protein, 27 aa, Artificial Sequence
  Cyclic GFR-binding peptide
RVIMQYNKLVKPKRGVLYLISIASLAQ

SEQ ID NO: 39796 - protein, 36 aa, Artificial Sequence; identical to SEQ ID NO: 2904
  Cyclic GFR-binding peptide
  MOD_RES (2), (4), (36): Xaa is C or S

SEQ ID NO: 39797 - protein, 39 aa, Artificial Sequence; identical to SEQ ID NO: 2905
  Cyclic GFR-binding peptide
  MOD_RES (1), (3), (35), (36): Xaa is C or S

SEQ ID NO: 39798 - protein, 27 aa, Artificial Sequence
  Cyclic GFR-binding peptide
VVMNYHYKLIVNSSDDKYLVSIPSLQT

SEQ ID NO: 39799 - protein, 32 aa, Artificial Sequence
  Cyclic GFR-binding peptide
  MOD_RES (29), (30): Xaa is C or S
VMERYKKLVVKDYEDFYLMSIANLETPVXXAK

SEQ ID NO: 39800 - protein, 24 aa, Artificial Sequence
  Cyclic GFR-binding peptide
DYHYKLVVKENEDKYLMSIPSLET

SEQ ID NO: 39801 - protein, 34 aa, Artificial Sequence; identical to SEQ ID NO: 2907
  Cyclic GFR-binding peptide
  MOD_RES (2), (2): Xaa is C or S

SEQ ID NO: 39802 - protein, 30 aa, Artificial Sequence
  Cyclic GFR-binding peptide
  MOD_RES (26), (27): Xaa is C or S
RHKRLVVKENEDYYLMSTASLETPVXXAKP

SEQ ID NO: 39803 - protein, 26 aa, Artificial Sequence
  Cyclic GFR-binding peptide
RVIMYHYKLVKPKRGVKYLISIPSLA

SEQ ID NO: 39804 - protein, 31 aa, Artificial Sequence
  Cyclic GFR-binding peptide
  MOD_RES (30), (31): Xaa is C or S
VVMDRHKRLVVKENEDYYLMSTASLETPVXX

SEQ ID NO: 39805 - protein, 26 aa, Artificial Sequence
  Cyclic GFR-binding peptide
DELTRHKRLFIPKKRVIEYYLVSTAS

SEQ ID NO: 39806 - protein, 27 aa, Artificial Sequence
  Cyclic GFR-binding peptide
  MOD_RES (2), (2): Xaa is C or S
KXSKVIMQYNKLIKPTKGILYLISIAS

SEQ ID NO: 39807 - protein, 28 aa, Artificial Sequence
  Cyclic GFR-binding peptide
GEVVMDYHYKLVVKENEDKYLMSIPSLE

SEQ ID NO: 39808 - protein, 35 aa, Artificial Sequence
  Cyclic GFR-binding peptide
  MOD_RES (2), (4): Xaa is C or S
EXKXALHDELTRHKRLFIPKKRVIEYYLVSTASLQ

SEQ ID NO: 39809 - protein, 33 aa, Artificial Sequence; identical to SEQ ID NO: 2909
  Cyclic GFR-binding peptide
  MOD_RES (2), (2): Xaa is C or S

SEQ ID NO: 39810 - protein, 24 aa, Artificial Sequence
  Cyclic GFR-binding peptide
KVIMYHYKLIKPTKGIKYLISIPS

SEQ ID NO: 39811 - protein, 36 aa, Artificial Sequence; identical to SEQ ID NO: 2910
  Cyclic GFR-binding peptide

SEQ ID NO: 39812 - protein, 31 aa, Artificial Sequence
  Cyclic GFR-binding peptide
AAAAAAAAARYKKLFIPKKRVIEFYLVSIAN

SEQ ID NO: 39813 - protein, 27 aa, Artificial Sequence
  Cyclic GFR-binding peptide
  MOD_RES (26), (27): Xaa is C or S
RYKKLIKPTKGIFYLISIANLDQSVXX

SEQ ID NO: 39814 - protein, 27 aa, Artificial Sequence
  Cyclic GFR-binding peptide
  MOD_RES (26), (27): Xaa is C or S
QYNKLTPVGMDDLYLVSIASLKTPVXX

SEQ ID NO: 39815 - protein, 31 aa, Artificial Sequence
  Cyclic GFR-binding peptide
  MOD_RES (27), (28): Xaa is C or S
NYHYKLIVNSSDDKYLVSIPSLKTPAXXPKP

SEQ ID NO: 39816 - protein, 35 aa, Artificial Sequence; identical to SEQ ID NO: 2911
  Cyclic GFR-binding peptide
  MOD_RES (1), (32), (33): Xaa is C or S

SEQ ID NO: 39817 - protein, 34 aa, Artificial Sequence; identical to SEQ ID NO: 2912
  Cyclic GFR-binding peptide
  MOD_RES (32), (33): Xaa is C or S

SEQ ID NO: 39818 - protein, 29 aa, Artificial Sequence
  Cyclic GFR-binding peptide
  MOD_RES (2), (2): Xaa is C or S
GXAKVVMNRYKKLIVNNSSDFYLVSIANL

SEQ ID NO: 39819 - protein, 26 aa, Artificial Sequence
  Cyclic GFR-binding peptide
KVVMNQYNKLIVNNSSDLYLVSIASL

SEQ ID NO: 39820 - protein, 32 aa, Artificial Sequence
  Cyclic GFR-binding peptide
  MOD_RES (2), (2): Xaa is C or S
GXARVVMNRHKRLIVNSSDDYYLVSTASLQTP

SEQ ID NO: 39821 - protein, 33 aa, Artificial Sequence
  Cyclic GFR-binding peptide
  MOD_RES (1), (1): Xaa is C or S
XALHDELTRYKKLFIPKKRVIEFYLVSIANLQV

SEQ ID NO: 39822 - protein, 33 aa, Artificial Sequence; identical to SEQ ID NO: 2918
  Cyclic GFR-binding peptide
  MOD_RES (31), (32): Xaa is C or S

SEQ ID NO: 39823 - protein, 38 aa, Artificial Sequence; identical to SEQ ID NO: 2917
  Cyclic GFR-binding peptide
  MOD_RES (2), (34): Xaa is C or S

SEQ ID NO: 39824 - protein, 33 aa, Artificial Sequence
  Cyclic GFR-binding peptide
  MOD_RES (29), (30): Xaa is C or S
VMDRHKRLVVKENEDYYLMSTASLETPVXXAKP

SEQ ID NO: 39825 - protein, 37 aa, Artificial Sequence; identical to SEQ ID NO: 2919
  Cyclic GFR-binding peptide
  MOD_RES (32), (32): Xaa is C or S

SEQ ID NO: 39826 - protein, 29 aa, Artificial Sequence
  Cyclic GFR-binding peptide
SMGERYKKLTPVGMDDFYLVSIANLKTPV

SEQ ID NO: 39827 - protein, 35 aa, Artificial Sequence; identical to SEQ ID NO: 2921
  Cyclic GFR-binding peptide
  MOD_RES (1), (3), (35): Xaa is C or S

SEQ ID NO: 39828 - protein, 28 aa, Artificial Sequence
  Cyclic GFR-binding peptide
VMNYHYKLIVNNSSDKYLVSIPSLKTPA

SEQ ID NO: 39829 - protein, 28 aa, Artificial Sequence
  Cyclic GFR-binding peptide
  MOD_RES (27), (28): Xaa is C or S
DRYKKLVVKENEDFYLMSIANLETPVXX

SEQ ID NO: 39830 - protein, 34 aa, Artificial Sequence
  Cyclic GFR-binding peptide
  MOD_RES (30), (31): Xaa is C or S
VVMNYHYKLIVNSSDDKYLVSIPSLQTPAXXPKP

SEQ ID NO: 39831 - protein, 30 aa, Artificial Sequence
  Cyclic GFR-binding peptide
  MOD_RES (27), (28): Xaa is C or S
NRHKRLIVNSSDDYYLVSTASLQTPAXXPK

SEQ ID NO: 39832 - protein, 35 aa, Artificial Sequence; identical to SEQ ID NO: 2923
  Cyclic GFR-binding peptide
  MOD_RES (32), (33): Xaa is C or S

SEQ ID NO: 39833 - protein, 31 aa, Artificial Sequence
  Cyclic GFR-binding peptide
  MOD_RES (28), (29): Xaa is C or S
MNYHYKLIVNNSSDKYLVSIPSLKTPAXXAK

SEQ ID NO: 39834 - protein, 33 aa, Artificial Sequence
  Cyclic GFR-binding peptide
  MOD_RES (27), (28): Xaa is C or S
MYHYKLIKPTKGIKYLISIPSLDQSVXXPSASA

SEQ ID NO: 39835 - protein, 24 aa, Artificial Sequence
  Cyclic GFR-binding peptide
VMDRYKKLVVKENEDFYLMSIANL

SEQ ID NO: 39836 - protein, 31 aa, Artificial Sequence
  Cyclic GFR-binding peptide
  MOD_RES (27), (28): Xaa is C or S
MRHKRLVKPTRGVYYLISTASLDQPVXXPSA

SEQ ID NO: 39837 - protein, 39 aa, Artificial Sequence; identical to SEQ ID NO: 2925
  Cyclic GFR-binding peptide
  MOD_RES (36), (36): Xaa is C or S

SEQ ID NO: 39838 - protein, 23 aa, Artificial Sequence
  Cyclic GFR-binding peptide
RYKKLVVKENEDFYLMSIANLET

SEQ ID NO: 39839 - protein, 25 aa, Artificial Sequence
  Cyclic GFR-binding peptide
MRHKRLVKPTRGVYYLISTASLDQP

SEQ ID NO: 39840 - protein, 26 aa, Artificial Sequence
  Cyclic GFR-binding peptide
GEVVMDRHKRLVVKENEDYYLMSTAS

SEQ ID NO: 39841 - protein, 25 aa, Artificial Sequence
  Cyclic GFR-binding peptide
MNRYKKLIVNNSSDFYLVSIANLKT

SEQ ID NO: 39842 - protein, 40 aa, Artificial Sequence; identical to SEQ ID NO: 2927
  Cyclic GFR-binding peptide
  MOD_RES (2), (4), (35), (36): Xaa is C or S

SEQ ID NO: 39843 - protein, 35 aa, Artificial Sequence; identical to SEQ ID NO: 2928
  Cyclic GFR-binding peptide
  MOD_RES (2), (33), (34): Xaa is C or S

SEQ ID NO: 39844 - protein, 24 aa, Artificial Sequence
  Cyclic GFR-binding peptide
VVMQYNKLVKPTRGVLYLISIASL

SEQ ID NO: 39845 - protein, 27 aa, Artificial Sequence
  Cyclic GFR-binding peptide
  MOD_RES (1), (1): Xaa is C or S
XSRVVMNRHKRLIVNSSDDYYLVSTAS

SEQ ID NO: 39846 - protein, 29 aa, Artificial Sequence
  Cyclic GFR-binding peptide
SKVVMRHKRLVKPTRGVYYLISTASLDQP

SEQ ID NO: 39847 - protein, 24 aa, Artificial Sequence
  Cyclic GFR-binding peptide
VVMDRYKKLVVKENEDFYLMSIAN

SEQ ID NO: 39848 - protein, 27 aa, Artificial Sequence
  Cyclic GFR-binding peptide
  MOD_RES (26), (27): Xaa is C or S
RHKRLVKPTRGVYYLISTASLDQPVXX

SEQ ID NO: 39849 - protein, 31 aa, Artificial Sequence
  Cyclic GFR-binding peptide
  MOD_RES (26), (27): Xaa is C or S
RHKRLVVKENEDYYLMSTASLETPVXXAKPI

SEQ ID NO: 39850 - protein, 45 aa, Artificial Sequence; identical to SEQ ID NO: 2930
  Cyclic GFR-binding peptide
  MOD_RES (2), (4), (41): Xaa is C or S

SEQ ID NO: 39851 - protein, 26 aa, Artificial Sequence
  Cyclic GFR-binding peptide
VMEYHYKLVVKDYEDKYLMSIPSLET

SEQ ID NO: 39852 - protein, 30 aa, Artificial Sequence
  Cyclic GFR-binding peptide
  MOD_RES (29), (30): Xaa is C or S
VIMRYKKLVKPKRGVFYLISIANLAQPVXX

SEQ ID NO: 39853 - protein, 29 aa, Artificial Sequence
  Cyclic GFR-binding peptide
VVMDYHYKLVVKENEDKYLMSIPSLETPV

SEQ ID NO: 39854 - protein, 41 aa, Artificial Sequence; identical to SEQ ID NO: 2931
  Cyclic GFR-binding peptide
  MOD_RES (2), (4), (36), (37): Xaa is C or S

SEQ ID NO: 39855 - protein, 42 aa, Artificial Sequence; identical to SEQ ID NO: 2932
  Cyclic GFR-binding peptide
  MOD_RES (2), (4), (36), (37): Xaa is C or S

SEQ ID NO: 39856 - protein, 35 aa, Artificial Sequence
  Cyclic GFR-binding peptide
  MOD_RES (2), (2): Xaa is C or S
KXALHDELTRHKRLFIPKKRVIEYYLVSTASLQVQ

SEQ ID NO: 39857 - protein, 29 aa, Artificial Sequence
  Cyclic GFR-binding peptide
  MOD_RES (1), (3): Xaa is C or S
XGXARVVMNRHKRLIVNSSDDYYLVSTAS

SEQ ID NO: 39858 - protein, 40 aa, Artificial Sequence; identical to SEQ ID NO: 2935
  Cyclic GFR-binding peptide
  MOD_RES (2), (39): Xaa is C or S

SEQ ID NO: 39859 - protein, 38 aa, Artificial Sequence; identical to SEQ ID NO: 2936
  Cyclic GFR-binding peptide
  MOD_RES (1), (3), (35): Xaa is C or S

SEQ ID NO: 39860 - protein, 35 aa, Artificial Sequence; identical to SEQ ID NO: 2937
  Cyclic GFR-binding peptide
  MOD_RES (32), (33): Xaa is C or S

SEQ ID NO: 39861 - protein, 29 aa, Artificial Sequence
  Cyclic GFR-binding peptide
  MOD_RES (26), (27): Xaa is C or S
RHKRLIVNSSDDYYLVSTASLQTPAXXPK

SEQ ID NO: 39862 - protein, 37 aa, Artificial Sequence; identical to SEQ ID NO: 2938
  Cyclic GFR-binding peptide
  MOD_RES (2), (2): Xaa is C or S

SEQ ID NO: 39863 - protein, 32 aa, Artificial Sequence
  Cyclic GFR-binding peptide
  MOD_RES (2), (2): Xaa is C or S
GXGEVVMDRYKKLVVKENEDFYLMSIANLETP

SEQ ID NO: 39864 - protein, 37 aa, Artificial Sequence; identical to SEQ ID NO: 2939
  Cyclic GFR-binding peptide
  MOD_RES (2), (33), (34): Xaa is C or S

SEQ ID NO: 39865 - protein, 33 aa, Artificial Sequence
  Cyclic GFR-binding peptide
  MOD_RES (1), (3): Xaa is C or S
XKXALHDELTRHKRLFIPKKRVIEYYLVSTASL

SEQ ID NO: 39866 - protein, 28 aa, Artificial Sequence
  Cyclic GFR-binding peptide
  MOD_RES (26), (27): Xaa is C or S
YHYKLIVNSSDDKYLVSIPSLQTPAXXP

SEQ ID NO: 39867 - protein, 33 aa, Artificial Sequence
  Cyclic GFR-binding peptide
  MOD_RES (28), (29): Xaa is C or S
MEYHYKLVVKDYEDKYLMSIPSLETPVXXAKPI

SEQ ID NO: 39868 - protein, 25 aa, Artificial Sequence
  Cyclic GFR-binding peptide
RHKRLIKPTKGIYYLISTASLDQSV

SEQ ID NO: 39869 - protein, 31 aa, Artificial Sequence
  Cyclic GFR-binding peptide
  MOD_RES (27), (28): Xaa is C or S
NRYKKLIVNNSSDFYLVSIANLKTPAXXAKP

SEQ ID NO: 39870 - protein, 28 aa, Artificial Sequence
  Cyclic GFR-binding peptide
  MOD_RES (27), (28): Xaa is C or S
ERYKKLVVKDYEDFYLMSIANLETPVXX

SEQ ID NO: 39871 - protein, 29 aa, Artificial Sequence
  Cyclic GFR-binding peptide
VVMDRHKRLVVKENEDYYLMSTASLETPV

SEQ ID NO: 39872 - protein, 37 aa, Artificial Sequence; identical to SEQ ID NO: 2941
  Cyclic GFR-binding peptide
  MOD_RES (2), (33), (34): Xaa is C or S

SEQ ID NO: 39873 - protein, 41 aa, Artificial Sequence; identical to SEQ ID NO: 2943
  Cyclic GFR-binding peptide
  MOD_RES (2), (4), (35), (36): Xaa is C or S

SEQ ID NO: 39874 - protein, 26 aa, Artificial Sequence
  Cyclic GFR-binding peptide
VVMNRHKRLIVNSSDDYYLVSTASLQ

SEQ ID NO: 39875 - protein, 27 aa, Artificial Sequence
  Cyclic GFR-binding peptide
IMQYNKLIKPTKGILYLISIASLDQSV

SEQ ID NO: 39876 - protein, 31 aa, Artificial Sequence
  Cyclic GFR-binding peptide
  MOD_RES (30), (31): Xaa is C or S
VVMNQYNKLIVNNSSDLYLVSIASLKTPAXX

SEQ ID NO: 39877 - protein, 30 aa, Artificial Sequence
  Cyclic GFR-binding peptide
  MOD_RES (2), (2): Xaa is C or S
KXSKVVMRHKRLVKPTRGVYYLISTASLDQ

SEQ ID NO: 39878 - protein, 27 aa, Artificial Sequence
  Cyclic GFR-binding peptide
IKPTKGIQYNKLIKPTKGILYLISIAS

SEQ ID NO: 39879 - protein, 27 aa, Artificial Sequence
  Cyclic GFR-binding peptide
RVVMNYHYKLIVNSSDDKYLVSIPSLQ

SEQ ID NO: 39880 - protein, 33 aa, Artificial Sequence; identical to SEQ ID NO: 2948
  Cyclic GFR-binding peptide
  MOD_RES (32), (33): Xaa is C or S

SEQ ID NO: 39881 - protein, 27 aa, Artificial Sequence
  Cyclic GFR-binding peptide
VSMGEQYNKLTPVGMDDLYLVSIASLK

SEQ ID NO: 39882 - protein, 22 aa, Artificial Sequence
  Cyclic GFR-binding peptide
YHYKLVKPTRGVKYLISIPSLD

SEQ ID NO: 39883 - protein, 26 aa, Artificial Sequence
  Cyclic GFR-binding peptide
VVMDRHKRLVVKENEDYYLMSTASLE

SEQ ID NO: 39884 - protein, 26 aa, Artificial Sequence
  Cyclic GFR-binding peptide
VMNYHYKLIVNSSDDKYLVSIPSLQT

SEQ ID NO: 39885 - protein, 29 aa, Artificial Sequence
  Cyclic GFR-binding peptide
TRHKRLFIPKKRVIEYYLVSTASLQVQTP

SEQ ID NO: 39886 - protein, 27 aa, Artificial Sequence
  Cyclic GFR-binding peptide
KVVMNRYKKLIVNNSSDFYLVSIANLK

SEQ ID NO: 39887 - protein, 36 aa, Artificial Sequence; identical to SEQ ID NO: 2952
  Cyclic GFR-binding peptide
  MOD_RES (2), (34): Xaa is C or S

SEQ ID NO: 39888 - protein, 40 aa, Artificial Sequence; identical to SEQ ID NO: 2956
  Cyclic GFR-binding peptide
  MOD_RES (2), (34), (35): Xaa is C or S

SEQ ID NO: 39889 - protein, 39 aa, Artificial Sequence; identical to SEQ ID NO: 2957
  Cyclic GFR-binding peptide
  MOD_RES (2), (33), (34): Xaa is C or S

SEQ ID NO: 39890 - protein, 32 aa, Artificial Sequence
  Cyclic GFR-binding peptide
  MOD_RES (29), (30): Xaa is C or S
VIMYHYKLIKPTKGIKYLISIPSLDQSVXXPS

SEQ ID NO: 39891 - protein, 32 aa, Artificial Sequence
  Cyclic GFR-binding peptide
  MOD_RES (26), (27): Xaa is C or S
RYKKLVKPTRGVFYLISIANLDQPVXXPSASA

SEQ ID NO: 39892 - protein, 35 aa, Artificial Sequence
  Cyclic GFR-binding peptide
  MOD_RES (29), (30): Xaa is C or S
VMDYHYKLVVKENEDKYLMSIPSLETPVXXAKPIK

SEQ ID NO: 39893 - protein, 36 aa, Artificial Sequence
  Cyclic GFR-binding peptide
  MOD_RES (30), (31): Xaa is C or S
KVIMYHYKLIKPTKGIKYLISIPSLDQSVXXPSASA

SEQ ID NO: 39894 - protein, 28 aa, Artificial Sequence
  Cyclic GFR-binding peptide
RVVMNRHKRLIVNSSDDYYLVSTASLKT

SEQ ID NO: 39895 - protein, 39 aa, Artificial Sequence; identical to SEQ ID NO: 2962
  Cyclic GFR-binding peptide
  MOD_RES (1), (33), (34): Xaa is C or S

SEQ ID NO: 39896 - protein, 31 aa, Artificial Sequence; identical to SEQ ID NO: 2964
  Cyclic GFR-binding peptide
  MOD_RES (31), (31): Xaa is C or S

SEQ ID NO: 39897 - protein, 32 aa, Artificial Sequence
  Cyclic GFR-binding peptide
ELTYHYKLFIPKKRVIEKYLVSIPSLQVQTPR

SEQ ID NO: 39898 - protein, 29 aa, Artificial Sequence
  Cyclic GFR-binding peptide
  MOD_RES (2), (2): Xaa is C or S
GXAKVVMNYHYKLIVNNSSDKYLVSIPSL

SEQ ID NO: 39899 - protein, 32 aa, Artificial Sequence; identical to SEQ ID NO: 2967
  Cyclic GFR-binding peptide
  MOD_RES (31), (32): Xaa is C or S

SEQ ID NO: 39900 - protein, 26 aa, Artificial Sequence
  Cyclic GFR-binding peptide
VVMERYKKLVVKDYEDFYLMSIANLE

SEQ ID NO: 39901 - protein, 37 aa, Artificial Sequence
  Cyclic GFR-binding peptide
  MOD_RES (2), (4): Xaa is C or S
EXKXALHDELTQYNKLFIPKKRVIELYLVSIASLQVQ

SEQ ID NO: 39902 - protein, 27 aa, Artificial Sequence
  Cyclic GFR-binding peptide
  MOD_RES (27), (27): Xaa is C or S
NQYNKLIVNSSDDLYLVSIASLQTPAX

SEQ ID NO: 39903 - protein, 41 aa, Artificial Sequence; identical to SEQ ID NO: 2971
  Cyclic GFR-binding peptide
  MOD_RES (1), (3), (40): Xaa is C or S

SEQ ID NO: 39904 - protein, 35 aa, Artificial Sequence
  Cyclic GFR-binding peptide
  MOD_RES (30), (31): Xaa is C or S
VVMDRYKKLVVKENEDFYLMSIANLETPVXXAKPI

SEQ ID NO: 39905 - protein, 29 aa, Artificial Sequence
  Cyclic GFR-binding peptide
  MOD_RES (28), (29): Xaa is C or S
IMRYKKLIKPTKGIFYLISIANLDQSVXX

SEQ ID NO: 39906 - protein, 35 aa, Artificial Sequence; identical to SEQ ID NO: 2972
  Cyclic GFR-binding peptide
  MOD_RES (1), (33), (34): Xaa is C or S

SEQ ID NO: 39907 - protein, 32 aa, Artificial Sequence
  Cyclic GFR-binding peptide
  MOD_RES (27), (28): Xaa is C or S
MQYNKLVKPTRGVLYLISIASLDQPVXXPSAS

SEQ ID NO: 39908 - protein, 36 aa, Artificial Sequence
  Cyclic GFR-binding peptide
  MOD_RES (1), (3): Xaa is C or S
XKXALHDELTRHKRLFIPKKRVIEYYLVSTASLQVQ

SEQ ID NO: 39909 - protein, 26 aa, Artificial Sequence
  Cyclic GFR-binding peptide
IMQYNKLIKPTKGILYLISIASLDQS

SEQ ID NO: 39910 - protein, 26 aa, Artificial Sequence
  Cyclic GFR-binding peptide
IMYHYKLIKPTKGIKYLISIPSLDQS

SEQ ID NO: 39911 - protein, 35 aa, Artificial Sequence; identical to SEQ ID NO: 2975
  Cyclic GFR-binding peptide
  MOD_RES (31), (32): Xaa is C or S

SEQ ID NO: 39912 - protein, 30 aa, Artificial Sequence
  Cyclic GFR-binding peptide
  MOD_RES (26), (27): Xaa is C or S
YHYKLVVKENEDKYLMSIPSLETPVXXAKP

SEQ ID NO: 39913 - protein, 25 aa, Artificial Sequence
  Cyclic GFR-binding peptide
VMQYNKLVKPTRGVLYLISIASLDQ

SEQ ID NO: 39914 - protein, 21 aa, Artificial Sequence
  Cyclic GFR-binding peptide
RHKRLIVNSSDDYYLVSTASL

SEQ ID NO: 39915 - protein, 34 aa, Artificial Sequence; identical to SEQ ID NO: 2976
  Cyclic GFR-binding peptide
  MOD_RES (1), (3): Xaa is C or S

SEQ ID NO: 39916 - protein, 34 aa, Artificial Sequence; identical to SEQ ID NO: 2977
  Cyclic GFR-binding peptide
  MOD_RES (1), (32), (33): Xaa is C or S

SEQ ID NO: 39917 - protein, 30 aa, Artificial Sequence
  Cyclic GFR-binding peptide
  MOD_RES (27), (28): Xaa is C or S
MRHKRLVKPTRGVYYLISTASLDQPVXXPS

SEQ ID NO: 39918 - protein, 28 aa, Artificial Sequence
  Cyclic GFR-binding peptide
KVVMNQYNKLIVNNSSDLYLVSIASLKT

SEQ ID NO: 39919 - protein, 31 aa, Artificial Sequence
  Cyclic GFR-binding peptide
  MOD_RES (2), (2): Xaa is C or S
KXSKVIMRHKRLIKPTKGIYYLISTASLDQS

SEQ ID NO: 39920 - protein, 38 aa, Artificial Sequence; identical to SEQ ID NO: 2978
  Cyclic GFR-binding peptide
  MOD_RES (1), (32), (33): Xaa is C or S

SEQ ID NO: 39921 - protein, 26 aa, Artificial Sequence
  Cyclic GFR-binding peptide
MRHKRLVKPKRGVYYLISTASLAQPV

SEQ ID NO: 39922 - protein, 30 aa, Artificial Sequence
  Cyclic GFR-binding peptide
  MOD_RES (1), (3): Xaa is C or S
XGXEAVSMGERHKRLTPVGMDDYYLVSTAS

SEQ ID NO: 39923 - protein, 32 aa, Artificial Sequence
  Cyclic GFR-binding peptide
  MOD_RES (27), (28): Xaa is C or S
NYHYKLIVNNSSDKYLVSIPSLKTPAXXAKPV

SEQ ID NO: 39924 - protein, 28 aa, Artificial Sequence
  Cyclic GFR-binding peptide
  MOD_RES (1), (1): Xaa is C or S
XSKVIMRHKRLIKPTKGIYYLISTASLD

SEQ ID NO: 39925 - protein, 41 aa, Artificial Sequence; identical to SEQ ID NO: 2988
  Cyclic GFR-binding peptide
  MOD_RES (2), (39): Xaa is C or S

SEQ ID NO: 39926 - protein, 29 aa, Artificial Sequence
  Cyclic GFR-binding peptide
EVVMERYKKLVVKDYEDFYLMSIANLETP

SEQ ID NO: 39927 - protein, 33 aa, Artificial Sequence
  Cyclic GFR-binding peptide
  MOD_RES (29), (30): Xaa is C or S
VIMRHKRLVKPKRGVYYLISTASLAQPVXXPAA

SEQ ID NO: 39928 - protein, 28 aa, Artificial Sequence
  Cyclic GFR-binding peptide
RVIMYHYKLVKPKRGVKYLISIPSLAQP

SEQ ID NO: 39929 - protein, 37 aa, Artificial Sequence; identical to SEQ ID NO: 2989
  Cyclic GFR-binding peptide
  MOD_RES (1), (3), (35), (36): Xaa is C or S

SEQ ID NO: 39930 - protein, 22 aa, Artificial Sequence
  Cyclic GFR-binding peptide
NYHYKLIVNSSDDKYLVSIPSL

SEQ ID NO: 39931 - protein, 29 aa, Artificial Sequence
  Cyclic GFR-binding peptide
  MOD_RES (2), (2): Xaa is C or S
KXSKVVMRYKKLVKPTRGVFYLISIANLD

SEQ ID NO: 39932 - protein, 36 aa, Artificial Sequence; identical to SEQ ID NO: 2993
  Cyclic GFR-binding peptide
  MOD_RES (1), (3), (35), (36): Xaa is C or S

SEQ ID NO: 39933 - protein, 32 aa, Artificial Sequence
  Cyclic GFR-binding peptide
  MOD_RES (2), (2): Xaa is C or S
GXEAVSMGEQYNKLTPVGMDDLYLVSIASLKT

SEQ ID NO: 39934 - protein, 40 aa, Artificial Sequence; identical to SEQ ID NO: 2994
  Cyclic GFR-binding peptide
  MOD_RES (1), (3), (34), (35): Xaa is C or S

SEQ ID NO: 39935 - protein, 27 aa, Artificial Sequence
  Cyclic GFR-binding peptide
  MOD_RES (27), (27): Xaa is C or S
MRYKKLIKPTKGIFYLISIANLDQSVX

SEQ ID NO: 39936 - protein, 32 aa, Artificial Sequence
  Cyclic GFR-binding peptide
  MOD_RES (1), (3): Xaa is C or S
XGXSRVVMNYHYKLIVNSSDDKYLVSIPSLKT

SEQ ID NO: 39937 - protein, 36 aa, Artificial Sequence; identical to SEQ ID NO: 2996
  Cyclic GFR-binding peptide
  MOD_RES (32), (33): Xaa is C or S

SEQ ID NO: 39938 - protein, 31 aa, Artificial Sequence
  Cyclic GFR-binding peptide
  MOD_RES (27), (28): Xaa is C or S
MRYKKLVKPKRGVFYLISIANLAQPVXXPAA

SEQ ID NO: 39939 - protein, 35 aa, Artificial Sequence; identical to SEQ ID NO: 2999
  Cyclic GFR-binding peptide
  MOD_RES (33), (34): Xaa is C or S

SEQ ID NO: 39940 - protein, 31 aa, Artificial Sequence
  Cyclic GFR-binding peptide
  MOD_RES (29), (30): Xaa is C or S
VMERHKRLVVKDYEDYYLMSTASLETPVXXA

SEQ ID NO: 39941 - protein, 30 aa, Artificial Sequence
  Cyclic GFR-binding peptide
  MOD_RES (1), (1): Xaa is C or S
XALHDELTYHYKLFIPKKRVIEKYLVSIPS

SEQ ID NO: 39942 - protein, 34 aa, Artificial Sequence; identical to SEQ ID NO: 3002
  Cyclic GFR-binding peptide
  MOD_RES (31), (32): Xaa is C or S

SEQ ID NO: 39943 - protein, 32 aa, Artificial Sequence
  Cyclic GFR-binding peptide
  MOD_RES (26), (27): Xaa is C or S
QYNKLVKPTRGVLYLISIASLDQPVXXPSASA

SEQ ID NO: 39944 - protein, 34 aa, Artificial Sequence; identical to SEQ ID NO: 3005
  Cyclic GFR-binding peptide
  MOD_RES (32), (32): Xaa is C or S

SEQ ID NO: 39945 - protein, 33 aa, Artificial Sequence; identical to SEQ ID NO: 3006
  Cyclic GFR-binding peptide
  MOD_RES (2), (2): Xaa is C or S

SEQ ID NO: 39946 - protein, 34 aa, Artificial Sequence
  Cyclic GFR-binding peptide
  MOD_RES (30), (30): Xaa is C or S
YHYKLFIPKKRVIEKYLVSIPSLQVQTPRXQVNR

SEQ ID NO: 39947 - protein, 28 aa, Artificial Sequence
  Cyclic GFR-binding peptide
  MOD_RES (28), (28): Xaa is C or S
MNYHYKLIVNNSSDKYLVSIPSLKTPAX

SEQ ID NO: 39948 - protein, 32 aa, Artificial Sequence
  Cyclic GFR-binding peptide
  MOD_RES (1), (1): Xaa is C or S
XEAVSMGERYKKLTPVGMDDFYLVSIANLKTP

SEQ ID NO: 39949 - protein, 34 aa, Artificial Sequence
  Cyclic GFR-binding peptide
  MOD_RES (1), (1): Xaa is C or S
XALHDELTRHKRLFIPKKRVIEYYLVSTASLQVQ

SEQ ID NO: 39950 - protein, 29 aa, Artificial Sequence
  Cyclic GFR-binding peptide
AAAAAAAAAYHYKLVVKENEDKYLMSIPS

SEQ ID NO: 39951 - protein, 27 aa, Artificial Sequence
  Cyclic GFR-binding peptide
VMRYKKLVKPTRGVFYLISIANLDQPV

SEQ ID NO: 39952 - protein, 32 aa, Artificial Sequence
  Cyclic GFR-binding peptide
  MOD_RES (1), (3): Xaa is C or S
XGXAKVVMNYHYKLIVNNSSDKYLVSIPSLKT

SEQ ID NO: 39953 - protein, 26 aa, Artificial Sequence
  Cyclic GFR-binding peptide
KVVMNYHYKLIVNNSSDKYLVSIPSL

SEQ ID NO: 39954 - protein, 32 aa, Artificial Sequence
  Cyclic GFR-binding peptide
  MOD_RES (26), (27): Xaa is C or S
QYNKLVKPKRGVLYLISIASLAQPVXXPAASA

SEQ ID NO: 39955 - protein, 29 aa, Artificial Sequence
  Cyclic GFR-binding peptide
  MOD_RES (28), (29): Xaa is C or S
IMYHYKLVKPKRGVKYLISIPSLAQPVXX

SEQ ID NO: 39956 - protein, 27 aa, Artificial Sequence
  Cyclic GFR-binding peptide
KVVMRHKRLVKPTRGVYYLISTASLDQ

SEQ ID NO: 39957 - protein, 30 aa, Artificial Sequence
  Cyclic GFR-binding peptide
  MOD_RES (29), (30): Xaa is C or S
VIMRHKRLVKPKRGVYYLISTASLAQPVXX

SEQ ID NO: 39958 - protein, 36 aa, Artificial Sequence
  Cyclic GFR-binding peptide
  MOD_RES (30), (31): Xaa is C or S
RVIMQYNKLVKPKRGVLYLISIASLAQPVXXPAASA

SEQ ID NO: 39959 - protein, 37 aa, Artificial Sequence; identical to SEQ ID NO: 3014
  Cyclic GFR-binding peptide
  MOD_RES (2), (34), (35): Xaa is C or S

SEQ ID NO: 39960 - protein, 23 aa, Artificial Sequence
  Cyclic GFR-binding peptide
NRHKRLIVNSSDDYYLVSTASLK

SEQ ID NO: 39961 - protein, 36 aa, Artificial Sequence
  Cyclic GFR-binding peptide
  MOD_RES (30), (31): Xaa is C or S
KVIMRHKRLIKPTKGIYYLISTASLDQSVXXPSASA

SEQ ID NO: 39962 - protein, 30 aa, Artificial Sequence
  Cyclic GFR-binding peptide
  MOD_RES (29), (30): Xaa is C or S
VMDYHYKLVVKENEDKYLMSIPSLETPVXX

SEQ ID NO: 39963 - protein, 30 aa, Artificial Sequence
  Cyclic GFR-binding peptide
  MOD_RES (29), (30): Xaa is C or S
VIMYHYKLVKPKRGVKYLISIPSLAQPVXX

SEQ ID NO: 39964 - protein, 29 aa, Artificial Sequence
  Cyclic GFR-binding peptide
  MOD_RES (26), (27): Xaa is C or S
YHYKLIVNNSSDKYLVSIPSLKTPAXXAK

SEQ ID NO: 39965 - protein, 32 aa, Artificial Sequence; identical to SEQ ID NO: 3017
  Cyclic GFR-binding peptide
  MOD_RES (31), (32): Xaa is C or S

SEQ ID NO: 39966 - protein, 31 aa, Artificial Sequence
  Cyclic GFR-binding peptide
  MOD_RES (2), (4): Xaa is C or S
RXGXGEVVMERYKKLVVKDYEDFYLMSIANL

SEQ ID NO: 39967 - protein, 37 aa, Artificial Sequence; identical to SEQ ID NO: 3019
  Cyclic GFR-binding peptide
  MOD_RES (1), (3), (35), (36): Xaa is C or S

SEQ ID NO: 39968 - protein, 30 aa, Artificial Sequence
  Cyclic GFR-binding peptide
  MOD_RES (27), (28): Xaa is C or S
MRYKKLVKPKRGVFYLISIANLAQPVXXPA

SEQ ID NO: 39969 - protein, 38 aa, Artificial Sequence; identical to SEQ ID NO: 3022
  Cyclic GFR-binding peptide
  MOD_RES (2), (33), (34): Xaa is C or S

SEQ ID NO: 39970 - protein, 27 aa, Artificial Sequence
  Cyclic GFR-binding peptide
  MOD_RES (2), (2): Xaa is C or S
KXSKVVMRYKKLVKPTRGVFYLISIAN

SEQ ID NO: 39971 - protein, 24 aa, Artificial Sequence
  Cyclic GFR-binding peptide
MDYHYKLVVKENEDKYLMSIPSLE

SEQ ID NO: 39972 - protein, 41 aa, Artificial Sequence; identical to SEQ ID NO: 3024
  Cyclic GFR-binding peptide
  MOD_RES (2), (39): Xaa is C or S

SEQ ID NO: 39973 - protein, 24 aa, Artificial Sequence
  Cyclic GFR-binding peptide
QYNKLTPVGMDDLYLVSIASLKTP

SEQ ID NO: 39974 - protein, 32 aa, Artificial Sequence; identical to SEQ ID NO: 3027
  Cyclic GFR-binding peptide
  MOD_RES (1), (32): Xaa is C or S

SEQ ID NO: 39975 - protein, 32 aa, Artificial Sequence; identical to SEQ ID NO: 3028
  Cyclic GFR-binding peptide
  MOD_RES (31), (32): Xaa is C or S

SEQ ID NO: 39976 - protein, 25 aa, Artificial Sequence
  Cyclic GFR-binding peptide
VMDRHKRLVVKENEDYYLMSTASLE

SEQ ID NO: 39977 - protein, 29 aa, Artificial Sequence
  Cyclic GFR-binding peptide
AAAAAAAAARHKRLVKPKRGVYYLISTAS

SEQ ID NO: 39978 - protein, 34 aa, Artificial Sequence; identical to SEQ ID NO: 3029
  Cyclic GFR-binding peptide
  MOD_RES (31), (32): Xaa is C or S

SEQ ID NO: 39979 - protein, 33 aa, Artificial Sequence; identical to SEQ ID NO: 3030
  Cyclic GFR-binding peptide
  MOD_RES (1), (3): Xaa is C or S

SEQ ID NO: 39980 - protein, 31 aa, Artificial Sequence
  Cyclic GFR-binding peptide
  MOD_RES (2), (2): Xaa is C or S
KXSRVIMRHKRLVKPKRGVYYLISTASLAQP

SEQ ID NO: 39981 - protein, 28 aa, Artificial Sequence
  Cyclic GFR-binding peptide
VVMDRYKKLVVKENEDFYLMSIANLETP

SEQ ID NO: 39982 - protein, 26 aa, Artificial Sequence
  Cyclic GFR-binding peptide
SRVIMYHYKLVKPKRGVKYLISIPSL

SEQ ID NO: 39983 - protein, 26 aa, Artificial Sequence
  Cyclic GFR-binding peptide
  MOD_RES (1), (1): Xaa is C or S
XSKVIMQYNKLIKPTKGILYLISIAS

SEQ ID NO: 39984 - protein, 34 aa, Artificial Sequence
  Cyclic GFR-binding peptide
  MOD_RES (2), (4): Xaa is C or S
RXGXGEVVMEYHYKLVVKDYEDKYLMSIPSLETP

SEQ ID NO: 39985 - protein, 31 aa, Artificial Sequence; identical to SEQ ID NO: 3031
  Cyclic GFR-binding peptide
  MOD_RES (31), (31): Xaa is C or S

SEQ ID NO: 39986 - protein, 29 aa, Artificial Sequence
  Cyclic GFR-binding peptide
GEVVMDRYKKLVVKENEDFYLMSIANLET

SEQ ID NO: 39987 - protein, 33 aa, Artificial Sequence
  Cyclic GFR-binding peptide
  MOD_RES (27), (28): Xaa is C or S
ERYKKLTPVGMDDFYLVSIANLKTPVXXAKGVK

SEQ ID NO: 39988 - protein, 30 aa, Artificial Sequence
  Cyclic GFR-binding peptide
  MOD_RES (26), (26): Xaa is C or S
RHKRLIVNSSDDYYLVSTASLKTPAXTPKT

SEQ ID NO: 39989 - protein, 25 aa, Artificial Sequence
  Cyclic GFR-binding peptide
MDRYKKLVVKENEDFYLMSIANLET

SEQ ID NO: 39990 - protein, 32 aa, Artificial Sequence
  Cyclic GFR-binding peptide
  MOD_RES (29), (30): Xaa is C or S
VIMRYKKLIKPTKGIFYLISIANLDQSVXXPS

SEQ ID NO: 39991 - protein, 36 aa, Artificial Sequence; identical to SEQ ID NO: 3032
  Cyclic GFR-binding peptide
  MOD_RES (2), (4), (35), (36): Xaa is C or S

SEQ ID NO: 39992 - protein, 24 aa, Artificial Sequence
  Cyclic GFR-binding peptide
VVMNQYNKLIVNSSDDLYLVSIAS

SEQ ID NO: 39993 - protein, 30 aa, Artificial Sequence
  Cyclic GFR-binding peptide
  MOD_RES (27), (28): Xaa is C or S
ERHKRLTPVGMDDYYLVSTASLKTPVXXAK

SEQ ID NO: 39994 - protein, 32 aa, Artificial Sequence
  Cyclic GFR-binding peptide
  MOD_RES (26), (27): Xaa is C or S
RHKRLVVKDYEDYYLMSTASLETPVXXAKPIS

SEQ ID NO: 39995 - protein, 25 aa, Artificial Sequence
  Cyclic GFR-binding peptide
SMGEQYNKLTPVGMDDLYLVSIASL

SEQ ID NO: 39996 - protein, 34 aa, Artificial Sequence; identical to SEQ ID NO: 3036
  Cyclic GFR-binding peptide
  MOD_RES (31), (32): Xaa is C or S

SEQ ID NO: 39997 - protein, 38 aa, Artificial Sequence; identical to SEQ ID NO: 3034
  Cyclic GFR-binding peptide
  MOD_RES (2), (34), (35): Xaa is C or S

SEQ ID NO: 39998 - protein, 38 aa, Artificial Sequence; identical to SEQ ID NO: 3037
  Cyclic GFR-binding peptide
  MOD_RES (1), (32), (33): Xaa is C or S

SEQ ID NO: 39999 - protein, 28 aa, Artificial Sequence
  Cyclic GFR-binding peptide
  MOD_RES (2), (2): Xaa is C or S
KXSKVIMYHYKLIKPTKGIKYLISIPSL

SEQ ID NO: 40000 - protein, 32 aa, Artificial Sequence
  Cyclic GFR-binding peptide
  MOD_RES (1), (1): Xaa is C or S
XALHDELTRHKRLFIPKKRVIEYYLVSTASLQ

SEQ ID NO: 40001 - protein, 29 aa, Artificial Sequence
  Cyclic GFR-binding peptide
  MOD_RES (27), (28): Xaa is C or S
NRYKKLIVNNSSDFYLVSIANLKTPAXXA

SEQ ID NO: 40002 - protein, 31 aa, Artificial Sequence
  Cyclic GFR-binding peptide
  MOD_RES (30), (30): Xaa is C or S
RHKRLFIPKKRVIEYYLVSTASLQVQTPRXQ

SEQ ID NO: 40003 - protein, 38 aa, Artificial Sequence; identical to SEQ ID NO: 3038
  Cyclic GFR-binding peptide
  MOD_RES (32), (33): Xaa is C or S

SEQ ID NO: 40004 - protein, 28 aa, Artificial Sequence
  Cyclic GFR-binding peptide
  MOD_RES (27), (28): Xaa is C or S
NQYNKLIVNSSDDLYLVSIASLQTPAXX

SEQ ID NO: 40005 - protein, 27 aa, Artificial Sequence
  Cyclic GFR-binding peptide
  MOD_RES (26), (27): Xaa is C or S
QYNKLIKPTKGILYLISIASLDQSVXX

SEQ ID NO: 40006 - protein, 38 aa, Artificial Sequence; identical to SEQ ID NO: 3040
  Cyclic GFR-binding peptide
  MOD_RES (2), (4): Xaa is C or S

SEQ ID NO: 40007 - protein, 44 aa, Artificial Sequence; identical to SEQ ID NO: 3042
  Cyclic GFR-binding peptide
  MOD_RES (2), (4), (41): Xaa is C or S

SEQ ID NO: 40008 - protein, 38 aa, Artificial Sequence; identical to SEQ ID NO: 3044
  Cyclic GFR-binding peptide
  MOD_RES (2), (4), (36), (37): Xaa is C or S

SEQ ID NO: 40009 - protein, 34 aa, Artificial Sequence; identical to SEQ ID NO: 3045
  Cyclic GFR-binding peptide
  MOD_RES (1), (3), (34): Xaa is C or S

SEQ ID NO: 40010 - protein, 37 aa, Artificial Sequence; identical to SEQ ID NO: 3047
  Cyclic GFR-binding peptide
  MOD_RES (2), (34), (35): Xaa is C or S

SEQ ID NO: 40011 - protein, 30 aa, Artificial Sequence
  Cyclic GFR-binding peptide
  MOD_RES (2), (4): Xaa is C or S
SXKXSRVIMQYNKLVKPKRGVLYLISIASL

SEQ ID NO: 40012 - protein, 33 aa, Artificial Sequence
  Cyclic GFR-binding peptide
  MOD_RES (2), (4): Xaa is C or S
RXGXGEVVMERHKRLVVKDYEDYYLMSTASLET

SEQ ID NO: 40013 - protein, 29 aa, Artificial Sequence
  Cyclic GFR-binding peptide
GEVVMERYKKLVVKDYEDFYLMSIANLET

SEQ ID NO: 40014 - protein, 29 aa, Artificial Sequence
  Cyclic GFR-binding peptide
AAAAAAAAAYHYKLVKPKRGVKYLISIPS

SEQ ID NO: 40015 - protein, 30 aa, Artificial Sequence
  Cyclic GFR-binding peptide
  MOD_RES (1), (1): Xaa is C or S
XSRVVMNYHYKLIVNSSDDKYLVSIPSLKT

SEQ ID NO: 40016 - protein, 28 aa, Artificial Sequence
  Cyclic GFR-binding peptide
  MOD_RES (28), (28): Xaa is C or S
IMRYKKLIKPTKGIFYLISIANLDQSVX

SEQ ID NO: 40017 - protein, 37 aa, Artificial Sequence; identical to SEQ ID NO: 3049
  Cyclic GFR-binding peptide
  MOD_RES (2), (4), (36): Xaa is C or S

SEQ ID NO: 40018 - protein, 31 aa, Artificial Sequence
  Cyclic GFR-binding peptide
DELTRHKRLFIPKKRVIEYYLVSTASLQVQT

SEQ ID NO: 40019 - protein, 25 aa, Artificial Sequence
  Cyclic GFR-binding peptide
VMDYHYKLVVKENEDKYLMSIPSLE

SEQ ID NO: 40020 - protein, 36 aa, Artificial Sequence; identical to SEQ ID NO: 3051
  Cyclic GFR-binding peptide
  MOD_RES (2), (4), (35), (36): Xaa is C or S

SEQ ID NO: 40021 - protein, 40 aa, Artificial Sequence; identical to SEQ ID NO: 3052
  Cyclic GFR-binding peptide
  MOD_RES (2), (4), (37), (38): Xaa is C or S

SEQ ID NO: 40022 - protein, 28 aa, Artificial Sequence
  Cyclic GFR-binding peptide
  MOD_RES (1), (1): Xaa is C or S
XAKVVMNYHYKLIVNNSSDKYLVSIPSL

SEQ ID NO: 40023 - protein, 22 aa, Artificial Sequence
  Cyclic GFR-binding peptide
YHYKLVVKDYEDKYLMSIPSLE

SEQ ID NO: 40024 - protein, 33 aa, Artificial Sequence; identical to SEQ ID NO: 3053
  Cyclic GFR-binding peptide
  MOD_RES (2), (33): Xaa is C or S

SEQ ID NO: 40025 - protein, 34 aa, Artificial Sequence; identical to SEQ ID NO: 3054
  Cyclic GFR-binding peptide
  MOD_RES (1), (32), (33): Xaa is C or S

SEQ ID NO: 40026 - protein, 27 aa, Artificial Sequence
  Cyclic GFR-binding peptide
IMRYKKLIKPTKGIFYLISIANLDQSV

SEQ ID NO: 40027 - protein, 38 aa, Artificial Sequence; identical to SEQ ID NO: 3055
  Cyclic GFR-binding peptide
  MOD_RES (2), (4), (35), (36): Xaa is C or S

SEQ ID NO: 40028 - protein, 34 aa, Artificial Sequence; identical to SEQ ID NO: 3056
  Cyclic GFR-binding peptide
  MOD_RES (2), (34): Xaa is C or S

SEQ ID NO: 40029 - protein, 25 aa, Artificial Sequence
  Cyclic GFR-binding peptide
RVIMRHKRLVKPKRGVYYLISTASL

SEQ ID NO: 40030 - protein, 22 aa, Artificial Sequence
  Cyclic GFR-binding peptide
NQYNKLIVNNSSDLYLVSIASL

SEQ ID NO: 40031 - protein, 34 aa, Artificial Sequence; identical to SEQ ID NO: 3059
  Cyclic GFR-binding peptide
  MOD_RES (2), (34): Xaa is C or S

SEQ ID NO: 40032 - protein, 37 aa, Artificial Sequence; identical to SEQ ID NO: 3060
  Cyclic GFR-binding peptide
  MOD_RES (2), (4), (36), (37): Xaa is C or S

SEQ ID NO: 40033 - protein, 36 aa, Artificial Sequence; identical to SEQ ID NO: 3061
  Cyclic GFR-binding peptide
  MOD_RES (1), (34), (35): Xaa is C or S

SEQ ID NO: 40034 - protein, 32 aa, Artificial Sequence
  Cyclic GFR-binding peptide
  MOD_RES (30), (30): Xaa is C or S
YHYKLFIPKKRVIEKYLVSIPSLQVQTPRXQV

SEQ ID NO: 40035 - protein, 20 aa, Artificial Sequence
  Cyclic GFR-binding peptide
RYKKLVVKENEDFYLMSIAN

SEQ ID NO: 40036 - protein, 26 aa, Artificial Sequence
  Cyclic GFR-binding peptide
VMYHYKLVKPTRGVKYLISIPSLDQP

SEQ ID NO: 40037 - protein, 28 aa, Artificial Sequence
  Cyclic GFR-binding peptide
  MOD_RES (26), (27): Xaa is C or S
RYKKLTPVGMDDFYLVSIANLKTPVXXA

SEQ ID NO: 40038 - protein, 31 aa, Artificial Sequence
  Cyclic GFR-binding peptide
  MOD_RES (30), (31): Xaa is C or S
KVVMRHKRLVKPTRGVYYLISTASLDQPVXX

SEQ ID NO: 40039 - protein, 27 aa, Artificial Sequence
  Cyclic GFR-binding peptide
  MOD_RES (27), (27): Xaa is C or S
MQYNKLVKPTRGVLYLISIASLDQPVX

SEQ ID NO: 40040 - protein, 22 aa, Artificial Sequence
  Cyclic GFR-binding peptide
RYKKLIKPTKGIFYLISIANLD

SEQ ID NO: 40041 - protein, 24 aa, Artificial Sequence
  Cyclic GFR-binding peptide
RHKRLVKPTRGVYYLISTASLDQP

SEQ ID NO: 40042 - protein, 36 aa, Artificial Sequence; identical to SEQ ID NO: 3067
  Cyclic GFR-binding peptide
  MOD_RES (1), (3), (35), (36): Xaa is C or S

SEQ ID NO: 40043 - protein, 27 aa, Artificial Sequence
  Cyclic GFR-binding peptide
VVMYHYKLVKPTRGVKYLISIPSLDQP

SEQ ID NO: 40044 - protein, 27 aa, Artificial Sequence
  Cyclic GFR-binding peptide
VVMRHKRLVKPTRGVYYLISTASLDQP

SEQ ID NO: 40045 - protein, 35 aa, Artificial Sequence; identical to SEQ ID NO: 3071
  Cyclic GFR-binding peptide

SEQ ID NO: 40046 - protein, 31 aa, Artificial Sequence
  Cyclic GFR-binding peptide
EAVSMGERHKRLTPVGMDDYYLVSTASLKTP

SEQ ID NO: 40047 - protein, 31 aa, Artificial Sequence
  Cyclic GFR-binding peptide
  MOD_RES (2), (4): Xaa is C or S
SXKXSKVVMYHYKLVKPTRGVKYLISIPSLD

SEQ ID NO: 40048 - protein, 37 aa, Artificial Sequence; identical to SEQ ID NO: 3075
  Cyclic GFR-binding peptide
  MOD_RES (1), (3), (35), (36): Xaa is C or S

SEQ ID NO: 40049 - protein, 30 aa, Artificial Sequence
  Cyclic GFR-binding peptide
  MOD_RES (1), (3): Xaa is C or S
XKXSKVIMQYNKLIKPTKGILYLISIASLD

SEQ ID NO: 40050 - protein, 31 aa, Artificial Sequence
  Cyclic GFR-binding peptide
  MOD_RES (28), (29): Xaa is C or S
MDRYKKLVVKENEDFYLMSIANLETPVXXAK

SEQ ID NO: 40051 - protein, 38 aa, Artificial Sequence; identical to SEQ ID NO: 3079
  Cyclic GFR-binding peptide
  MOD_RES (33), (34): Xaa is C or S

SEQ ID NO: 40052 - protein, 36 aa, Artificial Sequence; identical to SEQ ID NO: 3078
  Cyclic GFR-binding peptide
  MOD_RES (2), (33), (34): Xaa is C or S

SEQ ID NO: 40053 - protein, 33 aa, Artificial Sequence; identical to SEQ ID NO: 3080
  Cyclic GFR-binding peptide

SEQ ID NO: 40054 - protein, 23 aa, Artificial Sequence
  Cyclic GFR-binding peptide
VIMQYNKLVKPKRGVLYLISIAS

SEQ ID NO: 40055 - protein, 36 aa, Artificial Sequence
  Cyclic GFR-binding peptide
  MOD_RES (30), (30): Xaa is C or S
VVMNQYNKLIVNSSDDLYLVSIASLKTPAXTPKTVH

SEQ ID NO: 40056 - protein, 40 aa, Artificial Sequence; identical to SEQ ID NO: 3081
  Cyclic GFR-binding peptide
  MOD_RES (2), (4), (36), (37): Xaa is C or S

SEQ ID NO: 40057 - protein, 27 aa, Artificial Sequence
  Cyclic GFR-binding peptide
MDRYKKLVVKENEDFYLMSIANLETPV

SEQ ID NO: 40058 - protein, 33 aa, Artificial Sequence; identical to SEQ ID NO: 3082
  Cyclic GFR-binding peptide
  MOD_RES (2), (33): Xaa is C or S

SEQ ID NO: 40059 - protein, 33 aa, Artificial Sequence
  Cyclic GFR-binding peptide
  MOD_RES (30), (30): Xaa is C or S
RHKRLFIPKKRVIEYYLVSTASLQVQTPRXQVN

SEQ ID NO: 40060 - protein, 40 aa, Artificial Sequence; identical to SEQ ID NO: 3083
  Cyclic GFR-binding peptide
  MOD_RES (2), (4), (36), (37): Xaa is C or S

SEQ ID NO: 40061 - protein, 35 aa, Artificial Sequence
  Cyclic GFR-binding peptide
  MOD_RES (2), (2): Xaa is C or S
KXALHDELTQYNKLFIPKKRVIELYLVSIASLQVQ

SEQ ID NO: 40062 - protein, 27 aa, Artificial Sequence
  Cyclic GFR-binding peptide
  MOD_RES (1), (1): Xaa is C or S
XGEVVMERHKRLVVKDYEDYYLMSTAS

SEQ ID NO: 40063 - protein, 30 aa, Artificial Sequence
  Cyclic GFR-binding peptide
  MOD_RES (2), (4): Xaa is C or S
SXKXSRVIMYHYKLVKPKRGVKYLISIPSL

SEQ ID NO: 40064 - protein, 33 aa, Artificial Sequence
  Cyclic GFR-binding peptide
  MOD_RES (27), (28): Xaa is C or S
MRHKRLIKPTKGIYYLISTASLDQSVXXPSASA

SEQ ID NO: 40065 - protein, 31 aa, Artificial Sequence
  Cyclic GFR-binding peptide
  MOD_RES (30), (31): Xaa is C or S
VVMERYKKLVVKDYEDFYLMSIANLETPVXX

SEQ ID NO: 40066 - protein, 38 aa, Artificial Sequence
  Cyclic GFR-binding peptide
  MOD_RES (34), (34): Xaa is C or S
DELTQYNKLFIPKKRVIELYLVSIASLQVQTPRXQVNR

SEQ ID NO: 40067 - protein, 35 aa, Artificial Sequence; identical to SEQ ID NO: 3089
  Cyclic GFR-binding peptide
  MOD_RES (1), (34), (35): Xaa is C or S

SEQ ID NO: 40068 - protein, 40 aa, Artificial Sequence; identical to SEQ ID NO: 3090
  Cyclic GFR-binding peptide
  MOD_RES (1), (3), (35), (36): Xaa is C or S

SEQ ID NO: 40069 - protein, 25 aa, Artificial Sequence
  Cyclic GFR-binding peptide
EVVMEYHYKLVVKDYEDKYLMSIPS

SEQ ID NO: 40070 - protein, 32 aa, Artificial Sequence
  Cyclic GFR-binding peptide
  MOD_RES (28), (29): Xaa is C or S
MEYHYKLVVKDYEDKYLMSIPSLETPVXXAKP

SEQ ID NO: 40071 - protein, 33 aa, Artificial Sequence
  Cyclic GFR-binding peptide
  MOD_RES (32), (32): Xaa is C or S
LTRYKKLFIPKKRVIEFYLVSIANLQVQTPRXQ

SEQ ID NO: 40072 - protein, 30 aa, Artificial Sequence
  Cyclic GFR-binding peptide
  MOD_RES (30), (30): Xaa is C or S
VVMDYHYKLVVKENEDKYLMSIPSLETPVX

SEQ ID NO: 40073 - protein, 35 aa, Artificial Sequence; identical to SEQ ID NO: 3092
  Cyclic GFR-binding peptide

SEQ ID NO: 40074 - protein, 36 aa, Artificial Sequence
  Cyclic GFR-binding peptide
  MOD_RES (33), (33): Xaa is C or S
ELTQYNKLFIPKKRVIELYLVSIASLQVQTPRXQVN

SEQ ID NO: 40075 - protein, 26 aa, Artificial Sequence
  Cyclic GFR-binding peptide
AKVVMNRYKKLIVNNSSDFYLVSIAN

SEQ ID NO: 40076 - protein, 29 aa, Artificial Sequence
  Cyclic GFR-binding peptide
SRVVMNRHKRLIVNSSDDYYLVSTASLKT

SEQ ID NO: 40077 - protein, 41 aa, Artificial Sequence; identical to SEQ ID NO: 3095
  Cyclic GFR-binding peptide
  MOD_RES (2), (4), (35), (36): Xaa is C or S

SEQ ID NO: 40078 - protein, 22 aa, Artificial Sequence
  Cyclic GFR-binding peptide
MRYKKLVKPTRGVFYLISIANL

SEQ ID NO: 40079 - protein, 34 aa, Artificial Sequence
  Cyclic GFR-binding peptide
  MOD_RES (2), (4): Xaa is C or S
HXGXSRVVMNRHKRLIVNSSDDYYLVSTASLKTP

SEQ ID NO: 40080 - protein, 26 aa, Artificial Sequence
  Cyclic GFR-binding peptide
RVVMNQYNKLIVNSSDDLYLVSIASL

SEQ ID NO: 40081 - protein, 36 aa, Artificial Sequence; identical to SEQ ID NO: 3096
  Cyclic GFR-binding peptide
  MOD_RES (2), (35), (36): Xaa is C or S

SEQ ID NO: 40082 - protein, 35 aa, Artificial Sequence
  Cyclic GFR-binding peptide
  MOD_RES (32), (32): Xaa is C or S
LTRYKKLFIPKKRVIEFYLVSIANLQVQTPRXQVN

SEQ ID NO: 40083 - protein, 36 aa, Artificial Sequence; identical to SEQ ID NO: 3098
  Cyclic GFR-binding peptide
  MOD_RES (31), (32): Xaa is C or S

SEQ ID NO: 40084 - protein, 42 aa, Artificial Sequence; identical to SEQ ID NO: 3099
  Cyclic GFR-binding peptide
  MOD_RES (2), (4), (36), (37): Xaa is C or S

SEQ ID NO: 40085 - protein, 39 aa, Artificial Sequence; identical to SEQ ID NO: 3100
  Cyclic GFR-binding peptide
  MOD_RES (1), (33), (34): Xaa is C or S

SEQ ID NO: 40086 - protein, 24 aa, Artificial Sequence
  Cyclic GFR-binding peptide
ERYKKLTPVGMDDFYLVSIANLKT

SEQ ID NO: 40087 - protein, 25 aa, Artificial Sequence
  Cyclic GFR-binding peptide
NQYNKLIVNSSDDLYLVSIASLQTP

SEQ ID NO: 40088 - protein, 33 aa, Artificial Sequence; identical to SEQ ID NO: 3104
  Cyclic GFR-binding peptide
  MOD_RES (32), (33): Xaa is C or S

SEQ ID NO: 40089 - protein, 33 aa, Artificial Sequence; identical to SEQ ID NO: 3108
  Cyclic GFR-binding peptide
  MOD_RES (1), (32), (33): Xaa is C or S

SEQ ID NO: 40090 - protein, 29 aa, Artificial Sequence
  Cyclic GFR-binding peptide
  MOD_RES (28), (29): Xaa is C or S
MNYHYKLIVNNSSDKYLVSIPSLKTPAXX

SEQ ID NO: 40091 - protein, 28 aa, Artificial Sequence
  Cyclic GFR-binding peptide
  MOD_RES (26), (27): Xaa is C or S
QYNKLIVNSSDDLYLVSIASLKTPAXXP

SEQ ID NO: 40092 - protein, 28 aa, Artificial Sequence
  Cyclic GFR-binding peptide
SKVVMRHKRLVKPTRGVYYLISTASLDQ

SEQ ID NO: 40093 - protein, 31 aa, Artificial Sequence; identical to SEQ ID NO: 3109
  Cyclic GFR-binding peptide
  MOD_RES (1), (1): Xaa is C or S

SEQ ID NO: 40094 - protein, 38 aa, Artificial Sequence; identical to SEQ ID NO: 3110
  Cyclic GFR-binding peptide
  MOD_RES (1), (32), (33): Xaa is C or S

SEQ ID NO: 40095 - protein, 25 aa, Artificial Sequence
  Cyclic GFR-binding peptide
RHKRLVVKDYEDYYLMSTASLETPV

SEQ ID NO: 40096 - protein, 27 aa, Artificial Sequence
  Cyclic GFR-binding peptide
RVVMNQYNKLIVNSSDDLYLVSIASLQ

SEQ ID NO: 40097 - protein, 33 aa, Artificial Sequence
  Cyclic GFR-binding peptide
  MOD_RES (29), (30): Xaa is C or S
VMNQYNKLIVNSSDDLYLVSIASLQTPAXXPKP

SEQ ID NO: 40098 - protein, 28 aa, Artificial Sequence
  Cyclic GFR-binding peptide
  MOD_RES (1), (1): Xaa is C or S
XARVVMNYHYKLIVNSSDDKYLVSIPSL

SEQ ID NO: 40099 - protein, 22 aa, Artificial Sequence
  Cyclic GFR-binding peptide
IMRYKKLVKPKRGVFYLISIAN

SEQ ID NO: 40100 - protein, 33 aa, Artificial Sequence; identical to SEQ ID NO: 3111
  Cyclic GFR-binding peptide
  MOD_RES (33), (33): Xaa is C or S

SEQ ID NO: 40101 - protein, 36 aa, Artificial Sequence; identical to SEQ ID NO: 3112
  Cyclic GFR-binding peptide
  MOD_RES (1), (3), (34), (35): Xaa is C or S

SEQ ID NO: 40102 - protein, 30 aa, Artificial Sequence
  Cyclic GFR-binding peptide
  MOD_RES (1), (1): Xaa is C or S
XSKVIMRYKKLIKPTKGIFYLISIANLDQS

SEQ ID NO: 40103 - protein, 27 aa, Artificial Sequence
  Cyclic GFR-binding peptide
  MOD_RES (2), (2): Xaa is C or S
KXSRVIMRYKKLVKPKRGVFYLISIAN

SEQ ID NO: 40104 - protein, 34 aa, Artificial Sequence; identical to SEQ ID NO: 3116
  Cyclic GFR-binding peptide
  MOD_RES (2), (33), (34): Xaa is C or S

SEQ ID NO: 40105 - protein, 33 aa, Artificial Sequence; identical to SEQ ID NO: 3115
  Cyclic GFR-binding peptide
  MOD_RES (31), (32): Xaa is C or S

SEQ ID NO: 40106 - protein, 28 aa, Artificial Sequence
  Cyclic GFR-binding peptide
TRHKRLFIPKKRVIEYYLVSTASLQVQT

SEQ ID NO: 40107 - protein, 33 aa, Artificial Sequence; identical to SEQ ID NO: 3117
  Cyclic GFR-binding peptide
  MOD_RES (31), (32): Xaa is C or S

SEQ ID NO: 40108 - protein, 27 aa, Artificial Sequence
  Cyclic GFR-binding peptide
VIMQYNKLVKPKRGVLYLISIASLAQP

SEQ ID NO: 40109 - protein, 31 aa, Artificial Sequence
  Cyclic GFR-binding peptide
  MOD_RES (1), (3): Xaa is C or S
XKXSKVIMRHKRLIKPTKGIYYLISTASLDQ

SEQ ID NO: 40110 - protein, 32 aa, Artificial Sequence; identical to SEQ ID NO: 3120
  Cyclic GFR-binding peptide
  MOD_RES (1), (1): Xaa is C or S

SEQ ID NO: 40111 - protein, 32 aa, Artificial Sequence; identical to SEQ ID NO: 3122
  Cyclic GFR-binding peptide
  MOD_RES (2), (2): Xaa is C or S

SEQ ID NO: 40112 - protein, 30 aa, Artificial Sequence
  Cyclic GFR-binding peptide
  MOD_RES (28), (29): Xaa is C or S
IMRYKKLVKPKRGVFYLISIANLAQPVXXP

SEQ ID NO: 40113 - protein, 27 aa, Artificial Sequence
  Cyclic GFR-binding peptide
LTQYNKLFIPKKRVIELYLVSIASLQV

SEQ ID NO: 40114 - protein, 33 aa, Artificial Sequence
  Cyclic GFR-binding peptide
  MOD_RES (29), (30): Xaa is C or S
VMDRYKKLVVKENEDFYLMSIANLETPVXXAKP

SEQ ID NO: 40115 - protein, 34 aa, Artificial Sequence
  Cyclic GFR-binding peptide
  MOD_RES (30), (31): Xaa is C or S
VVMNQYNKLIVNSSDDLYLVSIASLKTPAXXPKP

SEQ ID NO: 40116 - protein, 36 aa, Artificial Sequence; identical to SEQ ID NO: 3126
  Cyclic GFR-binding peptide
  MOD_RES (2), (4), (36): Xaa is C or S

SEQ ID NO: 40117 - protein, 28 aa, Artificial Sequence
  Cyclic GFR-binding peptide
AVSMGERYKKLTPVGMDDFYLVSIANLK

SEQ ID NO: 40118 - protein, 24 aa, Artificial Sequence
  Cyclic GFR-binding peptide
RYKKLTPVGMDDFYLVSIANLKTP

SEQ ID NO: 40119 - protein, 32 aa, Artificial Sequence; identical to SEQ ID NO: 3127
  Cyclic GFR-binding peptide
  MOD_RES (2), (2): Xaa is C or S

SEQ ID NO: 40120 - protein, 36 aa, Artificial Sequence; identical to SEQ ID NO: 3128
  Cyclic GFR-binding peptide
  MOD_RES (1), (33), (34): Xaa is C or S

SEQ ID NO: 40121 - protein, 33 aa, Artificial Sequence
  Cyclic GFR-binding peptide
  MOD_RES (29), (30): Xaa is C or S
VMNQYNKLIVNNSSDLYLVSIASLKTPAXXAKP

SEQ ID NO: 40122 - protein, 30 aa, Artificial Sequence
  Cyclic GFR-binding peptide
  MOD_RES (27), (28): Xaa is C or S
NYHYKLIVNNSSDKYLVSIPSLKTPAXXAK

SEQ ID NO: 40123 - protein, 32 aa, Artificial Sequence
  Cyclic GFR-binding peptide
  MOD_RES (29), (30): Xaa is C or S
VMNQYNKLIVNNSSDLYLVSIASLKTPAXXAK

SEQ ID NO: 40124 - protein, 30 aa, Artificial Sequence
  Cyclic GFR-binding peptide
ALHDELTRYKKLFIPKKRVIEFYLVSIANL

SEQ ID NO: 40125 - protein, 30 aa, Artificial Sequence; identical to SEQ ID NO: 3131
  Cyclic GFR-binding peptide

SEQ ID NO: 40126 - protein, 42 aa, Artificial Sequence; identical to SEQ ID NO: 3132
  Cyclic GFR-binding peptide
  MOD_RES (2), (4), (36), (37): Xaa is C or S

SEQ ID NO: 40127 - protein, 28 aa, Artificial Sequence
  Cyclic GFR-binding peptide
  MOD_RES (28), (28): Xaa is C or S
VMRYKKLVKPTRGVFYLISIANLDQPVX

SEQ ID NO: 40128 - protein, 35 aa, Artificial Sequence; identical to SEQ ID NO: 3133
  Cyclic GFR-binding peptide
  MOD_RES (2), (4): Xaa is C or S

SEQ ID NO: 40129 - protein, 29 aa, Artificial Sequence
  Cyclic GFR-binding peptide
  MOD_RES (27), (28): Xaa is C or S
NYHYKLIVNSSDDKYLVSIPSLKTPAXXP

SEQ ID NO: 40130 - protein, 27 aa, Artificial Sequence
  Cyclic GFR-binding peptide
VMNRHKRLIVNSSDDYYLVSTASLKTP

SEQ ID NO: 40131 - protein, 32 aa, Artificial Sequence
  Cyclic GFR-binding peptide
  MOD_RES (30), (31): Xaa is C or S
KVVMQYNKLVKPTRGVLYLISIASLDQPVXXP

SEQ ID NO: 40132 - protein, 42 aa, Artificial Sequence; identical to SEQ ID NO: 3134
  Cyclic GFR-binding peptide
  MOD_RES (2), (4), (36), (37): Xaa is C or S

SEQ ID NO: 40133 - protein, 31 aa, Artificial Sequence
  Cyclic GFR-binding peptide
  MOD_RES (30), (31): Xaa is C or S
KVVMYHYKLVKPTRGVKYLISIPSLDQPVXX

SEQ ID NO: 40134 - protein, 32 aa, Artificial Sequence
  Cyclic GFR-binding peptide
  MOD_RES (2), (2): Xaa is C or S
KXALHDELTYHYKLFIPKKRVIEKYLVSIPSL

SEQ ID NO: 40135 - protein, 32 aa, Artificial Sequence
  Cyclic GFR-binding peptide
  MOD_RES (28), (29): Xaa is C or S
IMYHYKLVKPKRGVKYLISIPSLAQPVXXPAA

SEQ ID NO: 40136 - protein, 32 aa, Artificial Sequence
  Cyclic GFR-binding peptide
  MOD_RES (26), (27): Xaa is C or S
RHKRLIKPTKGIYYLISTASLDQSVXXPSASA

SEQ ID NO: 40137 - protein, 30 aa, Artificial Sequence
  Cyclic GFR-binding peptide
  MOD_RES (2), (4): Xaa is C or S
SXKXSKVVMYHYKLVKPTRGVKYLISIPSL

SEQ ID NO: 40138 - protein, 39 aa, Artificial Sequence; identical to SEQ ID NO: 3137
  Cyclic GFR-binding peptide
  MOD_RES (1), (33), (34): Xaa is C or S

SEQ ID NO: 40139 - protein, 41 aa, Artificial Sequence; identical to SEQ ID NO: 3138
  Cyclic GFR-binding peptide
  MOD_RES (2), (35), (36): Xaa is C or S

SEQ ID NO: 40140 - protein, 30 aa, Artificial Sequence
  Cyclic GFR-binding peptide
  MOD_RES (2), (2): Xaa is C or S
GXGEVVMDRHKRLVVKENEDYYLMSTASLE

SEQ ID NO: 40141 - protein, 31 aa, Artificial Sequence
  Cyclic GFR-binding peptide
  MOD_RES (2), (2): Xaa is C or S
KXALHDELTYHYKLFIPKKRVIEKYLVSIPS

SEQ ID NO: 40142 - protein, 34 aa, Artificial Sequence
  Cyclic GFR-binding peptide
  MOD_RES (28), (29): Xaa is C or S
MNYHYKLIVNSSDDKYLVSIPSLQTPAXXPKPVT

SEQ ID NO: 40143 - protein, 33 aa, Artificial Sequence; identical to SEQ ID NO: 3140
  Cyclic GFR-binding peptide
  MOD_RES (2), (33): Xaa is C or S

SEQ ID NO: 40144 - protein, 31 aa, Artificial Sequence
  Cyclic GFR-binding peptide
  MOD_RES (2), (2): Xaa is C or S
KXSKVIMRYKKLIKPTKGIFYLISIANLDQS

SEQ ID NO: 40145 - protein, 30 aa, Artificial Sequence
  Cyclic GFR-binding peptide
  MOD_RES (29), (30): Xaa is C or S
VMNQYNKLIVNNSSDLYLVSIASLKTPAXX

SEQ ID NO: 40146 - protein, 32 aa, Artificial Sequence
  Cyclic GFR-binding peptide
  MOD_RES (27), (28): Xaa is C or S
ERHKRLTPVGMDDYYLVSTASLKTPVXXAKGV

SEQ ID NO: 40147 - protein, 29 aa, Artificial Sequence
  Cyclic GFR-binding peptide
  MOD_RES (26), (26): Xaa is C or S
RHKRLIVNSSDDYYLVSTASLKTPAXTPK

SEQ ID NO: 40148 - protein, 32 aa, Artificial Sequence
  Cyclic GFR-binding peptide
  MOD_RES (30), (31): Xaa is C or S
SMGEQYNKLTPVGMDDLYLVSIASLKTPVXXA

SEQ ID NO: 40149 - protein, 22 aa, Artificial Sequence
  Cyclic GFR-binding peptide
RHKRLVVKENEDYYLMSTASLE

SEQ ID NO: 40150 - protein, 34 aa, Artificial Sequence; identical to SEQ ID NO: 3142
  Cyclic GFR-binding peptide
  MOD_RES (31), (32): Xaa is C or S

SEQ ID NO: 40151 - protein, 31 aa, Artificial Sequence
  Cyclic GFR-binding peptide
  MOD_RES (2), (4): Xaa is C or S
SXKXSRVIMYHYKLVKPKRGVKYLISIPSLA

SEQ ID NO: 40152 - protein, 29 aa, Artificial Sequence
  Cyclic GFR-binding peptide
  MOD_RES (26), (27): Xaa is C or S
QYNKLIVNSSDDLYLVSIASLQTPAXXPK

SEQ ID NO: 40153 - protein, 35 aa, Artificial Sequence; identical to SEQ ID NO: 3144
  Cyclic GFR-binding peptide
  MOD_RES (1), (3), (34), (35): Xaa is C or S

SEQ ID NO: 40154 - protein, 36 aa, Artificial Sequence; identical to SEQ ID NO: 3145
  Cyclic GFR-binding peptide
  MOD_RES (2), (4), (36): Xaa is C or S

SEQ ID NO: 40155 - protein, 35 aa, Artificial Sequence
  Cyclic GFR-binding peptide
  MOD_RES (29), (29): Xaa is C or S
VMNRHKRLIVNSSDDYYLVSTASLKTPAXTPKTVH

SEQ ID NO: 40156 - protein, 25 aa, Artificial Sequence
  Cyclic GFR-binding peptide
VVMERHKRLVVKDYEDYYLMSTASL

SEQ ID NO: 40157 - protein, 26 aa, Artificial Sequence
  Cyclic GFR-binding peptide
  MOD_RES (26), (26): Xaa is C or S
RYKKLVKPKRGVFYLISIANLAQPVX

SEQ ID NO: 40158 - protein, 37 aa, Artificial Sequence; identical to SEQ ID NO: 3146
  Cyclic GFR-binding peptide
  MOD_RES (1), (33), (34): Xaa is C or S

SEQ ID NO: 40159 - protein, 23 aa, Artificial Sequence
  Cyclic GFR-binding peptide
GERHKRLTPVGMDDYYLVSTASL

SEQ ID NO: 40160 - protein, 26 aa, Artificial Sequence
  Cyclic GFR-binding peptide
KVIMRYKKLIKPTKGIFYLISIANLD

SEQ ID NO: 40161 - protein, 29 aa, Artificial Sequence
  Cyclic GFR-binding peptide
  MOD_RES (27), (28): Xaa is C or S
MYHYKLIKPTKGIKYLISIPSLDQSVXXP

SEQ ID NO: 40162 - protein, 32 aa, Artificial Sequence; identical to SEQ ID NO: 3148
  Cyclic GFR-binding peptide
  MOD_RES (1), (1): Xaa is C or S

SEQ ID NO: 40163 - protein, 23 aa, Artificial Sequence
  Cyclic GFR-binding peptide
VVMQYNKLVKPTRGVLYLISIAS

SEQ ID NO: 40164 - protein, 34 aa, Artificial Sequence
  Cyclic GFR-binding peptide
  MOD_RES (2), (2): Xaa is C or S
KXALHDELTRHKRLFIPKKRVIEYYLVSTASLQV

SEQ ID NO: 40165 - protein, 33 aa, Artificial Sequence; identical to SEQ ID NO: 3151
  Cyclic GFR-binding peptide
  MOD_RES (2), (33): Xaa is C or S

SEQ ID NO: 40166 - protein, 35 aa, Artificial Sequence; identical to SEQ ID NO: 3152
  Cyclic GFR-binding peptide
  MOD_RES (1), (1): Xaa is C or S

SEQ ID NO: 40167 - protein, 31 aa, Artificial Sequence
  Cyclic GFR-binding peptide
  MOD_RES (29), (30): Xaa is C or S
VMDRYKKLVVKENEDFYLMSIANLETPVXXA

SEQ ID NO: 40168 - protein, 29 aa, Artificial Sequence
  Cyclic GFR-binding peptide
SMGERHKRLTPVGMDDYYLVSTASLKTPV

SEQ ID NO: 40169 - protein, 28 aa, Artificial Sequence
  Cyclic GFR-binding peptide
  MOD_RES (28), (28): Xaa is C or S
GEQYNKLTPVGMDDLYLVSIASLKTPVX

SEQ ID NO: 40170 - protein, 26 aa, Artificial Sequence
  Cyclic GFR-binding peptide
VVMDRYKKLVVKENEDFYLMSIANLE

SEQ ID NO: 40171 - protein, 29 aa, Artificial Sequence
  Cyclic GFR-binding peptide
  MOD_RES (28), (29): Xaa is C or S
MNQYNKLIVNSSDDLYLVSIASLQTPAXX

SEQ ID NO: 40172 - protein, 22 aa, Artificial Sequence
  Cyclic GFR-binding peptide
DRHKRLVVKENEDYYLMSTASL

SEQ ID NO: 40173 - protein, 31 aa, Artificial Sequence
  Cyclic GFR-binding peptide
  MOD_RES (1), (1): Xaa is C or S
XALHDELTRHKRLFIPKKRVIEYYLVSTASL

SEQ ID NO: 40174 - protein, 30 aa, Artificial Sequence
  Cyclic GFR-binding peptide
  MOD_RES (1), (1): Xaa is C or S
XGEVVMERYKKLVVKDYEDFYLMSIANLET

SEQ ID NO: 40175 - protein, 33 aa, Artificial Sequence
  Cyclic GFR-binding peptide
  MOD_RES (29), (30): Xaa is C or S
VIMYHYKLVKPKRGVKYLISIPSLAQPVXXPAA

SEQ ID NO: 40176 - protein, 31 aa, Artificial Sequence
  Cyclic GFR-binding peptide
  MOD_RES (30), (31): Xaa is C or S
RVIMRYKKLVKPKRGVFYLISIANLAQPVXX

SEQ ID NO: 40177 - protein, 29 aa, Artificial Sequence
  Cyclic GFR-binding peptide
SKVIMRYKKLIKPTKGIFYLISIANLDQS

SEQ ID NO: 40178 - protein, 28 aa, Artificial Sequence
  Cyclic GFR-binding peptide
DELTYHYKLFIPKKRVIEKYLVSIPSLQ

SEQ ID NO: 40179 - protein, 27 aa, Artificial Sequence
  Cyclic GFR-binding peptide
  MOD_RES (1), (1): Xaa is C or S
XSRVVMNYHYKLIVNSSDDKYLVSIPS

SEQ ID NO: 40180 - protein, 36 aa, Artificial Sequence; identical to SEQ ID NO: 3156
  Cyclic GFR-binding peptide
  MOD_RES (2), (34), (35): Xaa is C or S

SEQ ID NO: 40181 - protein, 28 aa, Artificial Sequence
  Cyclic GFR-binding peptide
  MOD_RES (28), (28): Xaa is C or S
MNQYNKLIVNSSDDLYLVSIASLKTPAX

SEQ ID NO: 40182 - protein, 34 aa, Artificial Sequence
  Cyclic GFR-binding peptide
  MOD_RES (28), (29): Xaa is C or S
MNYHYKLIVNNSSDKYLVSIPSLKTPAXXAKPVA

SEQ ID NO: 40183 - protein, 37 aa, Artificial Sequence; identical to SEQ ID NO: 3157
  Cyclic GFR-binding peptide
  MOD_RES (31), (31): Xaa is C or S

SEQ ID NO: 40184 - protein, 43 aa, Artificial Sequence; identical to SEQ ID NO: 3158
  Cyclic GFR-binding peptide
  MOD_RES (2), (39): Xaa is C or S

SEQ ID NO: 40185 - protein, 30 aa, Artificial Sequence
  Cyclic GFR-binding peptide
  MOD_RES (2), (4): Xaa is C or S
RXGXGEVVMEYHYKLVVKDYEDKYLMSIPS

SEQ ID NO: 40186 - protein, 28 aa, Artificial Sequence
  Cyclic GFR-binding peptide
  MOD_RES (27), (28): Xaa is C or S
NRYKKLIVNNSSDFYLVSIANLKTPAXX

SEQ ID NO: 40187 - protein, 31 aa, Artificial Sequence; identical to SEQ ID NO: 3160
  Cyclic GFR-binding peptide
  MOD_RES (31), (31): Xaa is C or S

SEQ ID NO: 40188 - protein, 36 aa, Artificial Sequence; identical to SEQ ID NO: 3161
  Cyclic GFR-binding peptide
  MOD_RES (1), (3), (34), (35): Xaa is C or S

SEQ ID NO: 40189 - protein, 29 aa, Artificial Sequence
  Cyclic GFR-binding peptide
RVVMNYHYKLIVNSSDDKYLVSIPSLQTP

SEQ ID NO: 40190 - protein, 34 aa, Artificial Sequence; identical to SEQ ID NO: 3164
  Cyclic GFR-binding peptide
  MOD_RES (1), (34): Xaa is C or S

SEQ ID NO: 40191 - protein, 31 aa, Artificial Sequence
  Cyclic GFR-binding peptide
  MOD_RES (27), (28): Xaa is C or S
MQYNKLIKPTKGILYLISIASLDQSVXXPSA

SEQ ID NO: 40192 - protein, 38 aa, Artificial Sequence; identical to SEQ ID NO: 3165
  Cyclic GFR-binding peptide
  MOD_RES (1), (3): Xaa is C or S

SEQ ID NO: 40193 - protein, 24 aa, Artificial Sequence
  Cyclic GFR-binding peptide
DRHKRLVVKENEDYYLMSTASLET

SEQ ID NO: 40194 - protein, 37 aa, Artificial Sequence; identical to SEQ ID NO: 3166
  Cyclic GFR-binding peptide
  MOD_RES (31), (32): Xaa is C or S

SEQ ID NO: 40195 - protein, 26 aa, Artificial Sequence
  Cyclic GFR-binding peptide
MNYHYKLIVNNSSDKYLVSIPSLKTP

SEQ ID NO: 40196 - protein, 38 aa, Artificial Sequence; identical to SEQ ID NO: 3168
  Cyclic GFR-binding peptide
  MOD_RES (2), (4): Xaa is C or S

SEQ ID NO: 40197 - protein, 29 aa, Artificial Sequence
  Cyclic GFR-binding peptide
KVVMNRYKKLIVNNSSDFYLVSIANLKTP

SEQ ID NO: 40198 - protein, 30 aa, Artificial Sequence
  Cyclic GFR-binding peptide
  MOD_RES (30), (30): Xaa is C or S
KVVMYHYKLVKPTRGVKYLISIPSLDQPVX

SEQ ID NO: 40199 - protein, 30 aa, Artificial Sequence
  Cyclic GFR-binding peptide
  MOD_RES (27), (28): Xaa is C or S
NRHKRLIVNSSDDYYLVSTASLKTPAXXPK

SEQ ID NO: 40200 - protein, 31 aa, Artificial Sequence
  Cyclic GFR-binding peptide
  MOD_RES (2), (2): Xaa is C or S
KXSKVIMYHYKLIKPTKGIKYLISIPSLDQS

SEQ ID NO: 40201 - protein, 37 aa, Artificial Sequence; identical to SEQ ID NO: 3170
  Cyclic GFR-binding peptide
  MOD_RES (32), (33): Xaa is C or S

SEQ ID NO: 40202 - protein, 29 aa, Artificial Sequence
  Cyclic GFR-binding peptide
  MOD_RES (1), (1): Xaa is C or S
XAKVVMNYHYKLIVNNSSDKYLVSIPSLK

SEQ ID NO: 40203 - protein, 34 aa, Artificial Sequence; identical to SEQ ID NO: 3171
  Cyclic GFR-binding peptide
  MOD_RES (2), (2): Xaa is C or S

SEQ ID NO: 40204 - protein, 42 aa, Artificial Sequence; identical to SEQ ID NO: 3172
  Cyclic GFR-binding peptide
  MOD_RES (2), (4), (36): Xaa is C or S

SEQ ID NO: 40205 - protein, 33 aa, Artificial Sequence; identical to SEQ ID NO: 3174
  Cyclic GFR-binding peptide
  MOD_RES (1), (1): Xaa is C or S

SEQ ID NO: 40206 - protein, 30 aa, Artificial Sequence
  Cyclic GFR-binding peptide
  MOD_RES (28), (29): Xaa is C or S
MNYHYKLIVNNSSDKYLVSIPSLKTPAXXA

SEQ ID NO: 40207 - protein, 21 aa, Artificial Sequence
  Cyclic GFR-binding peptide
MQYNKLIKPTKGILYLISIAS

SEQ ID NO: 40208 - protein, 27 aa, Artificial Sequence
  Cyclic GFR-binding peptide
KVVMNQYNKLIVNNSSDLYLVSIASLK

SEQ ID NO: 40209 - protein, 30 aa, Artificial Sequence; identical to SEQ ID NO: 3175
  Cyclic GFR-binding peptide

SEQ ID NO: 40210 - protein, 22 aa, Artificial Sequence
  Cyclic GFR-binding peptide
MQYNKLVKPKRGVLYLISIASL

SEQ ID NO: 40211 - protein, 29 aa, Artificial Sequence
  Cyclic GFR-binding peptide
  MOD_RES (1), (3): Xaa is C or S
XKXSRVIMQYNKLVKPKRGVLYLISIASL

SEQ ID NO: 40212 - protein, 36 aa, Artificial Sequence
  Cyclic GFR-binding peptide
  MOD_RES (30), (31): Xaa is C or S
VVMDYHYKLVVKENEDKYLMSIPSLETPVXXAKPIK

SEQ ID NO: 40213 - protein, 36 aa, Artificial Sequence; identical to SEQ ID NO: 3178
  Cyclic GFR-binding peptide
  MOD_RES (2), (4), (36): Xaa is C or S

SEQ ID NO: 40214 - protein, 27 aa, Artificial Sequence
  Cyclic GFR-binding peptide
  MOD_RES (27), (27): Xaa is C or S
MRHKRLVKPKRGVYYLISTASLAQPVX

SEQ ID NO: 40215 - protein, 40 aa, Artificial Sequence; identical to SEQ ID NO: 3180
  Cyclic GFR-binding peptide
  MOD_RES (1), (38): Xaa is C or S

SEQ ID NO: 40216 - protein, 39 aa, Artificial Sequence; identical to SEQ ID NO: 3181
  Cyclic GFR-binding peptide
  MOD_RES (33), (34): Xaa is C or S

SEQ ID NO: 40217 - protein, 23 aa, Artificial Sequence
  Cyclic GFR-binding peptide
MRYKKLIKPTKGIFYLISIANLD

SEQ ID NO: 40218 - protein, 35 aa, Artificial Sequence; identical to SEQ ID NO: 3184
  Cyclic GFR-binding peptide
  MOD_RES (2), (4): Xaa is C or S

SEQ ID NO: 40219 - protein, 39 aa, Artificial Sequence; identical to SEQ ID NO: 3185
  Cyclic GFR-binding peptide
  MOD_RES (1), (33), (34): Xaa is C or S

SEQ ID NO: 40220 - protein, 31 aa, Artificial Sequence
  Cyclic GFR-binding peptide
LHDELTRHKRLFIPKKRVIEYYLVSTASLQV

SEQ ID NO: 40221 - protein, 25 aa, Artificial Sequence
  Cyclic GFR-binding peptide
RYKKLVKPTRGVFYLISIANLDQPV

SEQ ID NO: 40222 - protein, 34 aa, Artificial Sequence
  Cyclic GFR-binding peptide
  MOD_RES (1), (3): Xaa is C or S
XKXALHDELTRHKRLFIPKKRVIEYYLVSTASLQ

SEQ ID NO: 40223 - protein, 41 aa, Artificial Sequence; identical to SEQ ID NO: 3188
  Cyclic GFR-binding peptide
  MOD_RES (2), (4), (35), (36): Xaa is C or S

SEQ ID NO: 40224 - protein, 39 aa, Artificial Sequence; identical to SEQ ID NO: 3189
  Cyclic GFR-binding peptide
  MOD_RES (2), (33), (34): Xaa is C or S

SEQ ID NO: 40225 - protein, 34 aa, Artificial Sequence
  Cyclic GFR-binding peptide
  MOD_RES (31), (31): Xaa is C or S
TYHYKLFIPKKRVIEKYLVSIPSLQVQTPRXQVN

SEQ ID NO: 40226 - protein, 32 aa, Artificial Sequence
  Cyclic GFR-binding peptide
  MOD_RES (27), (28): Xaa is C or S
NRYKKLIVNNSSDFYLVSIANLKTPAXXAKPV

SEQ ID NO: 40227 - protein, 30 aa, Artificial Sequence
  Cyclic GFR-binding peptide
  MOD_RES (28), (29): Xaa is C or S
MNYHYKLIVNSSDDKYLVSIPSLKTPAXXP

SEQ ID NO: 40228 - protein, 29 aa, Artificial Sequence
  Cyclic GFR-binding peptide
  MOD_RES (26), (27): Xaa is C or S
QYNKLIKPTKGILYLISIASLDQSVXXPS

SEQ ID NO: 40229 - protein, 23 aa, Artificial Sequence
  Cyclic GFR-binding peptide
VIMRYKKLIKPTKGIFYLISIAN

SEQ ID NO: 40230 - protein, 32 aa, Artificial Sequence
  Cyclic GFR-binding peptide
  MOD_RES (29), (30): Xaa is C or S
VMNRYKKLIVNNSSDFYLVSIANLKTPAXXAK

SEQ ID NO: 40231 - protein, 37 aa, Artificial Sequence; identical to SEQ ID NO: 3194
  Cyclic GFR-binding peptide
  MOD_RES (1), (32), (33): Xaa is C or S

SEQ ID NO: 40232 - protein, 31 aa, Artificial Sequence
  Cyclic GFR-binding peptide
AAAAAAAAAQYNKLFIPKKRVIELYLVSIAS

SEQ ID NO: 40233 - protein, 28 aa, Artificial Sequence
  Cyclic GFR-binding peptide
  MOD_RES (2), (2): Xaa is C or S
GXSRVVMNRHKRLIVNSSDDYYLVSTAS

SEQ ID NO: 40234 - protein, 33 aa, Artificial Sequence
  Cyclic GFR-binding peptide
  MOD_RES (31), (31): Xaa is C or S
TRHKRLFIPKKRVIEYYLVSTASLQVQTPRXQV

SEQ ID NO: 40235 - protein, 37 aa, Artificial Sequence; identical to SEQ ID NO: 3197
  Cyclic GFR-binding peptide
  MOD_RES (1), (32), (33): Xaa is C or S

SEQ ID NO: 40236 - protein, 29 aa, Artificial Sequence
  Cyclic GFR-binding peptide
  MOD_RES (27), (28): Xaa is C or S
NRHKRLIVNSSDDYYLVSTASLKTPAXXP

SEQ ID NO: 40237 - protein, 24 aa, Artificial Sequence
  Cyclic GFR-binding peptide
KVVMRHKRLVKPTRGVYYLISTAS

SEQ ID NO: 40238 - protein, 40 aa, Artificial Sequence; identical to SEQ ID NO: 3198
  Cyclic GFR-binding peptide
  MOD_RES (2), (4), (36), (37): Xaa is C or S

SEQ ID NO: 40239 - protein, 30 aa, Artificial Sequence
  Cyclic GFR-binding peptide
  MOD_RES (29), (30): Xaa is C or S
VMNRHKRLIVNSSDDYYLVSTASLKTPAXX

SEQ ID NO: 40240 - protein, 34 aa, Artificial Sequence
  Cyclic GFR-binding peptide
  MOD_RES (32), (33): Xaa is C or S
AVSMGEQYNKLTPVGMDDLYLVSIASLKTPVXXA

SEQ ID NO: 40241 - protein, 28 aa, Artificial Sequence
  Cyclic GFR-binding peptide
VVMNYHYKLIVNSSDDKYLVSIPSLQTP

SEQ ID NO: 40242 - protein, 28 aa, Artificial Sequence
  Cyclic GFR-binding peptide
  MOD_RES (28), (28): Xaa is C or S
MERHKRLVVKDYEDYYLMSTASLETPVX

SEQ ID NO: 40243 - protein, 35 aa, Artificial Sequence
  Cyclic GFR-binding peptide
  MOD_RES (29), (30): Xaa is C or S
MGERHKRLTPVGMDDYYLVSTASLKTPVXXAKGVK

SEQ ID NO: 40244 - protein, 28 aa, Artificial Sequence
  Cyclic GFR-binding peptide
VVMYHYKLVKPTRGVKYLISIPSLDQPV

SEQ ID NO: 40245 - protein, 30 aa, Artificial Sequence
  Cyclic GFR-binding peptide
  MOD_RES (2), (4): Xaa is C or S
RXGXGEVVMDRYKKLVVKENEDFYLMSIAN

SEQ ID NO: 40246 - protein, 40 aa, Artificial Sequence; identical to SEQ ID NO: 3201
  Cyclic GFR-binding peptide
  MOD_RES (1), (38): Xaa is C or S

SEQ ID NO: 40247 - protein, 35 aa, Artificial Sequence; identical to SEQ ID NO: 3203
  Cyclic GFR-binding peptide
  MOD_RES (1), (3), (34), (35): Xaa is C or S

SEQ ID NO: 40248 - protein, 33 aa, Artificial Sequence
  Cyclic GFR-binding peptide
  MOD_RES (33), (33): Xaa is C or S
ELTRYKKLFIPKKRVIEFYLVSIANLQVQTPRX

SEQ ID NO: 40249 - protein, 24 aa, Artificial Sequence
  Cyclic GFR-binding peptide
RVIMRYKKLVKPKRGVFYLISIAN

SEQ ID NO: 40250 - protein, 27 aa, Artificial Sequence
  Cyclic GFR-binding peptide
VVKENEDQYNKLVVKENEDLYLMSIAS

SEQ ID NO: 40251 - protein, 36 aa, Artificial Sequence; identical to SEQ ID NO: 3207
  Cyclic GFR-binding peptide
  MOD_RES (2), (34), (35): Xaa is C or S

SEQ ID NO: 40252 - protein, 28 aa, Artificial Sequence
  Cyclic GFR-binding peptide
VMNQYNKLIVNNSSDLYLVSIASLKTPA

SEQ ID NO: 40253 - protein, 35 aa, Artificial Sequence; identical to SEQ ID NO: 3208
  Cyclic GFR-binding peptide
  MOD_RES (2), (4): Xaa is C or S

SEQ ID NO: 40254 - protein, 31 aa, Artificial Sequence; identical to SEQ ID NO: 3211
  Cyclic GFR-binding peptide
  MOD_RES (31), (31): Xaa is C or S

SEQ ID NO: 40255 - protein, 36 aa, Artificial Sequence
  Cyclic GFR-binding peptide
  MOD_RES (30), (31): Xaa is C or S
SMGERHKRLTPVGMDDYYLVSTASLKTPVXXAKGVK

SEQ ID NO: 40256 - protein, 30 aa, Artificial Sequence
  Cyclic GFR-binding peptide
  MOD_RES (29), (29): Xaa is C or S
VMNRHKRLIVNSSDDYYLVSTASLKTPAXT

SEQ ID NO: 40257 - protein, 26 aa, Artificial Sequence
  Cyclic GFR-binding peptide
SMGERHKRLTPVGMDDYYLVSTASLK

SEQ ID NO: 40258 - protein, 34 aa, Artificial Sequence; identical to SEQ ID NO: 3213
  Cyclic GFR-binding peptide
  MOD_RES (1), (32), (33): Xaa is C or S

SEQ ID NO: 40259 - protein, 23 aa, Artificial Sequence
  Cyclic GFR-binding peptide
YHYKLVVKENEDKYLMSIPSLET

SEQ ID NO: 40260 - protein, 31 aa, Artificial Sequence; identical to SEQ ID NO: 3216
  Cyclic GFR-binding peptide

SEQ ID NO: 40261 - protein, 33 aa, Artificial Sequence; identical to SEQ ID NO: 3217
  Cyclic GFR-binding peptide
  MOD_RES (31), (32): Xaa is C or S

SEQ ID NO: 40262 - protein, 24 aa, Artificial Sequence
  Cyclic GFR-binding peptide
VIMQYNKLIKPTKGILYLISIASL

SEQ ID NO: 40263 - protein, 32 aa, Artificial Sequence
  Cyclic GFR-binding peptide
  MOD_RES (26), (27): Xaa is C or S
RYKKLVVKENEDFYLMSIANLETPVXXAKPIK

SEQ ID NO: 40264 - protein, 33 aa, Artificial Sequence; identical to SEQ ID NO: 3218
  Cyclic GFR-binding peptide

SEQ ID NO: 40265 - protein, 29 aa, Artificial Sequence
  Cyclic GFR-binding peptide
  MOD_RES (1), (1): Xaa is C or S
XSKVVMRHKRLVKPTRGVYYLISTASLDQ

SEQ ID NO: 40266 - protein, 29 aa, Artificial Sequence
  Cyclic GFR-binding peptide
  MOD_RES (2), (4): Xaa is C or S
SXKXSKVVMRYKKLVKPTRGVFYLISIAN

SEQ ID NO: 40267 - protein, 37 aa, Artificial Sequence; identical to SEQ ID NO: 3219
  Cyclic GFR-binding peptide
  MOD_RES (2), (4), (36), (37): Xaa is C or S

SEQ ID NO: 40268 - protein, 37 aa, Artificial Sequence; identical to SEQ ID NO: 3220
  Cyclic GFR-binding peptide
  MOD_RES (2), (4), (36), (37): Xaa is C or S

SEQ ID NO: 40269 - protein, 35 aa, Artificial Sequence
  Cyclic GFR-binding peptide
  MOD_RES (29), (30): Xaa is C or S
VVMQYNKLVKPTRGVLYLISIASLDQPVXXPSASA

SEQ ID NO: 40270 - protein, 35 aa, Artificial Sequence
  Cyclic GFR-binding peptide
  MOD_RES (2), (4): Xaa is C or S
EXKXALHDELTQYNKLFIPKKRVIELYLVSIASLQ

SEQ ID NO: 40271 - protein, 32 aa, Artificial Sequence
  Cyclic GFR-binding peptide
  MOD_RES (30), (30): Xaa is C or S
VVMNYHYKLIVNSSDDKYLVSIPSLKTPAXTP

SEQ ID NO: 40272 - protein, 37 aa, Artificial Sequence; identical to SEQ ID NO: 3221
  Cyclic GFR-binding peptide
  MOD_RES (1), (3), (34), (35): Xaa is C or S

SEQ ID NO: 40273 - protein, 33 aa, Artificial Sequence
  Cyclic GFR-binding peptide
  MOD_RES (2), (4): Xaa is C or S
SXKXSRVIMYHYKLVKPKRGVKYLISIPSLAQP

SEQ ID NO: 40274 - protein, 36 aa, Artificial Sequence; identical to SEQ ID NO: 3224
  Cyclic GFR-binding peptide
  MOD_RES (2), (33), (34): Xaa is C or S

SEQ ID NO: 40275 - protein, 34 aa, Artificial Sequence
  Cyclic GFR-binding peptide
  MOD_RES (29), (30): Xaa is C or S
VMERYKKLVVKDYEDFYLMSIANLETPVXXAKPI

SEQ ID NO: 40276 - protein, 34 aa, Artificial Sequence
  Cyclic GFR-binding peptide
  MOD_RES (1), (3): Xaa is C or S
XGXEAVSMGERHKRLTPVGMDDYYLVSTASLKTP

SEQ ID NO: 40277 - protein, 40 aa, Artificial Sequence; identical to SEQ ID NO: 3225
  Cyclic GFR-binding peptide
  MOD_RES (2), (34), (35): Xaa is C or S

SEQ ID NO: 40278 - protein, 37 aa, Artificial Sequence; identical to SEQ ID NO: 3226
  Cyclic GFR-binding peptide
  MOD_RES (1), (33), (34): Xaa is C or S

SEQ ID NO: 40279 - protein, 26 aa, Artificial Sequence
  Cyclic GFR-binding peptide
NQYNKLIVNSSDDLYLVSIASLQTPA

SEQ ID NO: 40280 - protein, 26 aa, Artificial Sequence
  Cyclic GFR-binding peptide
EVVMDYHYKLVVKENEDKYLMSIPSL

SEQ ID NO: 40281 - protein, 36 aa, Artificial Sequence; identical to SEQ ID NO: 3227
  Cyclic GFR-binding peptide
  MOD_RES (1), (3), (34), (35): Xaa is C or S

SEQ ID NO: 40282 - protein, 28 aa, Artificial Sequence
  Cyclic GFR-binding peptide
  MOD_RES (27), (28): Xaa is C or S
ERHKRLTPVGMDDYYLVSTASLKTPVXX

SEQ ID NO: 40283 - protein, 25 aa, Artificial Sequence
  Cyclic GFR-binding peptide
RYKKLIVNNSSDFYLVSIANLKTPA

SEQ ID NO: 40284 - protein, 30 aa, Artificial Sequence
  Cyclic GFR-binding peptide
  MOD_RES (30), (30): Xaa is C or S
VVMERYKKLVVKDYEDFYLMSIANLETPVX

SEQ ID NO: 40285 - protein, 25 aa, Artificial Sequence
  Cyclic GFR-binding peptide
RHKRLIVNSSDDYYLVSTASLQTPA

SEQ ID NO: 40286 - protein, 32 aa, Artificial Sequence
  Cyclic GFR-binding peptide
  MOD_RES (29), (30): Xaa is C or S
VVMQYNKLVKPTRGVLYLISIASLDQPVXXPS

SEQ ID NO: 40287 - protein, 40 aa, Artificial Sequence; identical to SEQ ID NO: 3231
  Cyclic GFR-binding peptide
  MOD_RES (1), (3), (40): Xaa is C or S

SEQ ID NO: 40288 - protein, 37 aa, Artificial Sequence; identical to SEQ ID NO: 3232
  Cyclic GFR-binding peptide
  MOD_RES (31), (32): Xaa is C or S

SEQ ID NO: 40289 - protein, 30 aa, Artificial Sequence
  Cyclic GFR-binding peptide
  MOD_RES (27), (28): Xaa is C or S
MRYKKLVKPTRGVFYLISIANLDQPVXXPS

SEQ ID NO: 40290 - protein, 36 aa, Artificial Sequence; identical to SEQ ID NO: 3233
  Cyclic GFR-binding peptide
  MOD_RES (2), (4), (36): Xaa is C or S

SEQ ID NO: 40291 - protein, 32 aa, Artificial Sequence
  Cyclic GFR-binding peptide
  MOD_RES (29), (30): Xaa is C or S
VVMRHKRLVKPTRGVYYLISTASLDQPVXXPS

SEQ ID NO: 40292 - protein, 31 aa, Artificial Sequence
  Cyclic GFR-binding peptide
  MOD_RES (31), (31): Xaa is C or S
TRYKKLFIPKKRVIEFYLVSIANLQVQTPRX

SEQ ID NO: 40293 - protein, 24 aa, Artificial Sequence
  Cyclic GFR-binding peptide
VVMDRHKRLVVKENEDYYLMSTAS

SEQ ID NO: 40294 - protein, 28 aa, Artificial Sequence
  Cyclic GFR-binding peptide
  MOD_RES (2), (2): Xaa is C or S
KXSKVVMRYKKLVKPTRGVFYLISIANL

SEQ ID NO: 40295 - protein, 31 aa, Artificial Sequence
  Cyclic GFR-binding peptide
  MOD_RES (1), (1): Xaa is C or S
XALHDELTQYNKLFIPKKRVIELYLVSIASL

SEQ ID NO: 40296 - protein, 28 aa, Artificial Sequence
  Cyclic GFR-binding peptide
  MOD_RES (28), (28): Xaa is C or S
MEYHYKLVVKDYEDKYLMSIPSLETPVX

SEQ ID NO: 40297 - protein, 28 aa, Artificial Sequence
  Cyclic GFR-binding peptide
ELTRHKRLFIPKKRVIEYYLVSTASLQV

SEQ ID NO: 40298 - protein, 23 aa, Artificial Sequence
  Cyclic GFR-binding peptide
QYNKLIVNSSDDLYLVSIASLQT

SEQ ID NO: 40299 - protein, 33 aa, Artificial Sequence
  Cyclic GFR-binding peptide
  MOD_RES (33), (33): Xaa is C or S
ELTRHKRLFIPKKRVIEYYLVSTASLQVQTPRX

SEQ ID NO: 40300 - protein, 36 aa, Artificial Sequence; identical to SEQ ID NO: 3235
  Cyclic GFR-binding peptide
  MOD_RES (31), (32): Xaa is C or S

SEQ ID NO: 40301 - protein, 29 aa, Artificial Sequence
  Cyclic GFR-binding peptide
  MOD_RES (1), (1): Xaa is C or S
XAKVVMNRYKKLIVNNSSDFYLVSIANLK

SEQ ID NO: 40302 - protein, 31 aa, Artificial Sequence
  Cyclic GFR-binding peptide
  MOD_RES (26), (27): Xaa is C or S
QYNKLIVNSSDDLYLVSIASLKTPAXXPKPV

SEQ ID NO: 40303 - protein, 35 aa, Artificial Sequence; identical to SEQ ID NO: 3236
  Cyclic GFR-binding peptide

SEQ ID NO: 40304 - protein, 29 aa, Artificial Sequence
  Cyclic GFR-binding peptide
RVVMNQYNKLIVNSSDDLYLVSIASLQTP

SEQ ID NO: 40305 - protein, 36 aa, Artificial Sequence; identical to SEQ ID NO: 3237
  Cyclic GFR-binding peptide
  MOD_RES (33), (34): Xaa is C or S

SEQ ID NO: 40306 - protein, 30 aa, Artificial Sequence
  Cyclic GFR-binding peptide
  MOD_RES (30), (30): Xaa is C or S
KVVMQYNKLVKPTRGVLYLISIASLDQPVX

SEQ ID NO: 40307 - protein, 25 aa, Artificial Sequence
  Cyclic GFR-binding peptide
SKVVMRYKKLVKPTRGVFYLISIAN

SEQ ID NO: 40308 - protein, 34 aa, Artificial Sequence; identical to SEQ ID NO: 3240
  Cyclic GFR-binding peptide
  MOD_RES (1), (33), (34): Xaa is C or S

SEQ ID NO: 40309 - protein, 29 aa, Artificial Sequence
  Cyclic GFR-binding peptide
  MOD_RES (29), (29): Xaa is C or S
VIMQYNKLVKPKRGVLYLISIASLAQPVX

SEQ ID NO: 40310 - protein, 34 aa, Artificial Sequence; identical to SEQ ID NO: 3242
  Cyclic GFR-binding peptide
  MOD_RES (1), (33), (34): Xaa is C or S

SEQ ID NO: 40311 - protein, 28 aa, Artificial Sequence
  Cyclic GFR-binding peptide
SKVIMRYKKLIKPTKGIFYLISIANLDQ

SEQ ID NO: 40312 - protein, 40 aa, Artificial Sequence; identical to SEQ ID NO: 3246
  Cyclic GFR-binding peptide
  MOD_RES (37), (37): Xaa is C or S

SEQ ID NO: 40313 - protein, 35 aa, Artificial Sequence
  Cyclic GFR-binding peptide
  MOD_RES (29), (30): Xaa is C or S
MGEQYNKLTPVGMDDLYLVSIASLKTPVXXAKGVK

SEQ ID NO: 40314 - protein, 22 aa, Artificial Sequence
  Cyclic GFR-binding peptide
MRHKRLIKPTKGIYYLISTASL

SEQ ID NO: 40315 - protein, 27 aa, Artificial Sequence
  Cyclic GFR-binding peptide
  MOD_RES (1), (1): Xaa is C or S
XGEVVMERYKKLVVKDYEDFYLMSIAN

SEQ ID NO: 40316 - protein, 29 aa, Artificial Sequence
  Cyclic GFR-binding peptide
KVVMQYNKLVKPTRGVLYLISIASLDQPV

SEQ ID NO: 40317 - protein, 34 aa, Artificial Sequence
  Cyclic GFR-binding peptide
  MOD_RES (29), (30): Xaa is C or S
VIMRYKKLVKPKRGVFYLISIANLAQPVXXPAAS

SEQ ID NO: 40318 - protein, 32 aa, Artificial Sequence
  Cyclic GFR-binding peptide
  MOD_RES (30), (31): Xaa is C or S
VVMNRYKKLIVNNSSDFYLVSIANLKTPAXXA

SEQ ID NO: 40319 - protein, 27 aa, Artificial Sequence
  Cyclic GFR-binding peptide
MNRHKRLIVNSSDDYYLVSTASLKTPA

SEQ ID NO: 40320 - protein, 34 aa, Artificial Sequence
  Cyclic GFR-binding peptide
  MOD_RES (28), (28): Xaa is C or S
MNYHYKLIVNSSDDKYLVSIPSLKTPAXTPKTVH

SEQ ID NO: 40321 - protein, 34 aa, Artificial Sequence
  Cyclic GFR-binding peptide
  MOD_RES (28), (28): Xaa is C or S
MNRHKRLIVNSSDDYYLVSTASLKTPAXTPKTVH

SEQ ID NO: 40322 - protein, 39 aa, Artificial Sequence; identical to SEQ ID NO: 3248
  Cyclic GFR-binding peptide
  MOD_RES (2), (34), (35): Xaa is C or S

SEQ ID NO: 40323 - protein, 41 aa, Artificial Sequence; identical to SEQ ID NO: 3249
  Cyclic GFR-binding peptide
  MOD_RES (2), (4), (36), (37): Xaa is C or S

SEQ ID NO: 40324 - protein, 37 aa, Artificial Sequence; identical to SEQ ID NO: 3250
  Cyclic GFR-binding peptide
  MOD_RES (31), (32): Xaa is C or S

SEQ ID NO: 40325 - protein, 35 aa, Artificial Sequence
  Cyclic GFR-binding peptide
  MOD_RES (30), (31): Xaa is C or S
VVMDYHYKLVVKENEDKYLMSIPSLETPVXXAKPI

SEQ ID NO: 40326 - protein, 34 aa, Artificial Sequence; identical to SEQ ID NO: 3251
  Cyclic GFR-binding peptide
  MOD_RES (1), (33): Xaa is C or S

SEQ ID NO: 40327 - protein, 28 aa, Artificial Sequence
  Cyclic GFR-binding peptide
  MOD_RES (1), (1): Xaa is C or S
XGEVVMERHKRLVVKDYEDYYLMSTASL

SEQ ID NO: 40328 - protein, 27 aa, Artificial Sequence
  Cyclic GFR-binding peptide
  MOD_RES (1), (1): Xaa is C or S
XGEVVMEYHYKLVVKDYEDKYLMSIPS

SEQ ID NO: 40329 - protein, 27 aa, Artificial Sequence
  Cyclic GFR-binding peptide
VVMNRHKRLIVNSSDDYYLVSTASLQT

SEQ ID NO: 40330 - protein, 32 aa, Artificial Sequence
  Cyclic GFR-binding peptide
  MOD_RES (2), (2): Xaa is C or S
GXAKVVMNRYKKLIVNNSSDFYLVSIANLKTP

SEQ ID NO: 40331 - protein, 31 aa, Artificial Sequence; identical to SEQ ID NO: 3256
  Cyclic GFR-binding peptide

SEQ ID NO: 40332 - protein, 36 aa, Artificial Sequence; identical to SEQ ID NO: 3255
  Cyclic GFR-binding peptide
  MOD_RES (2), (33), (34): Xaa is C or S

SEQ ID NO: 40333 - protein, 35 aa, Artificial Sequence; identical to SEQ ID NO: 3259
  Cyclic GFR-binding peptide
  MOD_RES (32), (33): Xaa is C or S

SEQ ID NO: 40334 - protein, 30 aa, Artificial Sequence
  Cyclic GFR-binding peptide
  MOD_RES (26), (27): Xaa is C or S
RYKKLIVNNSSDFYLVSIANLKTPAXXAKP

SEQ ID NO: 40335 - protein, 29 aa, Artificial Sequence
  Cyclic GFR-binding peptide
RVVMNRHKRLIVNSSDDYYLVSTASLKTP

SEQ ID NO: 40336 - protein, 35 aa, Artificial Sequence
  Cyclic GFR-binding peptide
  MOD_RES (30), (31): Xaa is C or S
KVIMYHYKLIKPTKGIKYLISIPSLDQSVXXPSAS

SEQ ID NO: 40337 - protein, 30 aa, Artificial Sequence
  Cyclic GFR-binding peptide
GEVVMDRHKRLVVKENEDYYLMSTASLETP

SEQ ID NO: 40338 - protein, 27 aa, Artificial Sequence
  Cyclic GFR-binding peptide
GEVVMERHKRLVVKDYEDYYLMSTASL

SEQ ID NO: 40339 - protein, 31 aa, Artificial Sequence; identical to SEQ ID NO: 3260
  Cyclic GFR-binding peptide

SEQ ID NO: 40340 - protein, 27 aa, Artificial Sequence
  Cyclic GFR-binding peptide
GERHKRLTPVGMDDYYLVSTASLKTPV

SEQ ID NO: 40341 - protein, 26 aa, Artificial Sequence
  Cyclic GFR-binding peptide
VIMQYNKLVKPKRGVLYLISIASLAQ

SEQ ID NO: 40342 - protein, 23 aa, Artificial Sequence
  Cyclic GFR-binding peptide
MNYHYKLIVNNSSDKYLVSIPSL

SEQ ID NO: 40343 - protein, 29 aa, Artificial Sequence
  Cyclic GFR-binding peptide
RVIMRHKRLVKPKRGVYYLISTASLAQPV

SEQ ID NO: 40344 - protein, 34 aa, Artificial Sequence; identical to SEQ ID NO: 3264
  Cyclic GFR-binding peptide

SEQ ID NO: 40345 - protein, 22 aa, Artificial Sequence
  Cyclic GFR-binding peptide
RYKKLVVKDYEDFYLMSIANLE

SEQ ID NO: 40346 - protein, 35 aa, Artificial Sequence
  Cyclic GFR-binding peptide
  MOD_RES (33), (33): Xaa is C or S
ELTYHYKLFIPKKRVIEKYLVSIPSLQVQTPRXQV

SEQ ID NO: 40347 - protein, 35 aa, Artificial Sequence
  Cyclic GFR-binding peptide
  MOD_RES (29), (30): Xaa is C or S
VVMYHYKLVKPTRGVKYLISIPSLDQPVXXPSASA

SEQ ID NO: 40348 - protein, 40 aa, Artificial Sequence; identical to SEQ ID NO: 3265
  Cyclic GFR-binding peptide
  MOD_RES (2), (4), (36): Xaa is C or S

SEQ ID NO: 40349 - protein, 37 aa, Artificial Sequence; identical to SEQ ID NO: 3268
  Cyclic GFR-binding peptide
  MOD_RES (1), (33): Xaa is C or S

SEQ ID NO: 40350 - protein, 31 aa, Artificial Sequence
  Cyclic GFR-binding peptide
  MOD_RES (30), (31): Xaa is C or S
VVMDYHYKLVVKENEDKYLMSIPSLETPVXX

SEQ ID NO: 40351 - protein, 35 aa, Artificial Sequence; identical to SEQ ID NO: 3270
  Cyclic GFR-binding peptide
  MOD_RES (1), (33), (34): Xaa is C or S

SEQ ID NO: 40352 - protein, 24 aa, Artificial Sequence
  Cyclic GFR-binding peptide
QYNKLFIPKKRVIELYLVSIASLQ

SEQ ID NO: 40353 - protein, 31 aa, Artificial Sequence
  Cyclic GFR-binding peptide
  MOD_RES (2), (4): Xaa is C or S
HXGXARVVMNYHYKLIVNSSDDKYLVSIPSL

SEQ ID NO: 40354 - protein, 31 aa, Artificial Sequence
  Cyclic GFR-binding peptide
  MOD_RES (27), (28): Xaa is C or S
MQYNKLVKPTRGVLYLISIASLDQPVXXPSA

SEQ ID NO: 40355 - protein, 29 aa, Artificial Sequence
  Cyclic GFR-binding peptide
QYNKLFIPKKRVIELYLVSIASLQVQTPR

SEQ ID NO: 40356 - protein, 31 aa, Artificial Sequence
  Cyclic GFR-binding peptide
  MOD_RES (28), (29): Xaa is C or S
GERYKKLTPVGMDDFYLVSIANLKTPVXXAK

SEQ ID NO: 40357 - protein, 31 aa, Artificial Sequence
  Cyclic GFR-binding peptide
  MOD_RES (1), (3): Xaa is C or S
XGXARVVMNQYNKLIVNSSDDLYLVSIASLQ

SEQ ID NO: 40358 - protein, 31 aa, Artificial Sequence
  Cyclic GFR-binding peptide
  MOD_RES (2), (2): Xaa is C or S
KXSKVVMYHYKLVKPTRGVKYLISIPSLDQP

SEQ ID NO: 40359 - protein, 23 aa, Artificial Sequence
  Cyclic GFR-binding peptide
VMEYHYKLVVKDYEDKYLMSIPS

SEQ ID NO: 40360 - protein, 40 aa, Artificial Sequence; identical to SEQ ID NO: 3272
  Cyclic GFR-binding peptide
  MOD_RES (2), (4), (35), (36): Xaa is C or S

SEQ ID NO: 40361 - protein, 22 aa, Artificial Sequence
  Cyclic GFR-binding peptide
RYKKLVKPTRGVFYLISIANLD

SEQ ID NO: 40362 - protein, 28 aa, Artificial Sequence
  Cyclic GFR-binding peptide
SMGEQYNKLTPVGMDDLYLVSIASLKTP

SEQ ID NO: 40363 - protein, 30 aa, Artificial Sequence
  Cyclic GFR-binding peptide
  MOD_RES (30), (30): Xaa is C or S
SMGERHKRLTPVGMDDYYLVSTASLKTPVX

SEQ ID NO: 40364 - protein, 30 aa, Artificial Sequence; identical to SEQ ID NO: 3273
  Cyclic GFR-binding peptide

SEQ ID NO: 40365 - protein, 32 aa, Artificial Sequence
  Cyclic GFR-binding peptide
  MOD_RES (1), (1): Xaa is C or S
XEAVSMGEQYNKLTPVGMDDLYLVSIASLKTP

SEQ ID NO: 40366 - protein, 33 aa, Artificial Sequence
  Cyclic GFR-binding peptide
  MOD_RES (2), (4): Xaa is C or S
EXKXALHDELTRYKKLFIPKKRVIEFYLVSIAN

SEQ ID NO: 40367 - protein, 34 aa, Artificial Sequence
  Cyclic GFR-binding peptide
  MOD_RES (30), (31): Xaa is C or S
VVMNYHYKLIVNNSSDKYLVSIPSLKTPAXXAKP

SEQ ID NO: 40368 - protein, 40 aa, Artificial Sequence; identical to SEQ ID NO: 3277
  Cyclic GFR-binding peptide
  MOD_RES (2), (4), (37), (38): Xaa is C or S

SEQ ID NO: 40369 - protein, 27 aa, Artificial Sequence
  Cyclic GFR-binding peptide
  MOD_RES (27), (27): Xaa is C or S
MRHKRLIKPTKGIYYLISTASLDQSVX

SEQ ID NO: 40370 - protein, 40 aa, Artificial Sequence; identical to SEQ ID NO: 3278
  Cyclic GFR-binding peptide
  MOD_RES (1), (3), (36), (37): Xaa is C or S

SEQ ID NO: 40371 - protein, 32 aa, Artificial Sequence
  Cyclic GFR-binding peptide
  MOD_RES (1), (3): Xaa is C or S
XKXSRVIMQYNKLVKPKRGVLYLISIASLAQP

SEQ ID NO: 40372 - protein, 24 aa, Artificial Sequence
  Cyclic GFR-binding peptide
VIMRHKRLIKPTKGIYYLISTASL

SEQ ID NO: 40373 - protein, 33 aa, Artificial Sequence; identical to SEQ ID NO: 3279
  Cyclic GFR-binding peptide
  MOD_RES (32), (33): Xaa is C or S

SEQ ID NO: 40374 - protein, 22 aa, Artificial Sequence
  Cyclic GFR-binding peptide
NRHKRLIVNSSDDYYLVSTASL

SEQ ID NO: 40375 - protein, 28 aa, Artificial Sequence
  Cyclic GFR-binding peptide
  MOD_RES (2), (2): Xaa is C or S
GXAKVVMNQYNKLIVNNSSDLYLVSIAS

SEQ ID NO: 40376 - protein, 37 aa, Artificial Sequence; identical to SEQ ID NO: 3282
  Cyclic GFR-binding peptide
  MOD_RES (36), (36): Xaa is C or S

SEQ ID NO: 40377 - protein, 27 aa, Artificial Sequence
  Cyclic GFR-binding peptide
DELTQYNKLFIPKKRVIELYLVSIASL

SEQ ID NO: 40378 - protein, 23 aa, Artificial Sequence
  Cyclic GFR-binding peptide
MYHYKLIKPTKGIKYLISIPSLD

SEQ ID NO: 40379 - protein, 38 aa, Artificial Sequence; identical to SEQ ID NO: 3286
  Cyclic GFR-binding peptide
  MOD_RES (1), (32), (33): Xaa is C or S

SEQ ID NO: 40380 - protein, 38 aa, Artificial Sequence; identical to SEQ ID NO: 3288
  Cyclic GFR-binding peptide
  MOD_RES (1), (3): Xaa is C or S

SEQ ID NO: 40381 - protein, 34 aa, Artificial Sequence
  Cyclic GFR-binding peptide
  MOD_RES (30), (31): Xaa is C or S
VVMNQYNKLIVNSSDDLYLVSIASLQTPAXXPKP

SEQ ID NO: 40382 - protein, 20 aa, Artificial Sequence
  Cyclic GFR-binding peptide
QYNKLTPVGMDDLYLVSIAS

SEQ ID NO: 40383 - protein, 28 aa, Artificial Sequence
  Cyclic GFR-binding peptide
KVVMQYNKLVKPTRGVLYLISIASLDQP

SEQ ID NO: 40384 - protein, 21 aa, Artificial Sequence
  Cyclic GFR-binding peptide
RYKKLTPVGMDDFYLVSIANL

SEQ ID NO: 40385 - protein, 28 aa, Artificial Sequence
  Cyclic GFR-binding peptide
  MOD_RES (1), (1): Xaa is C or S
XSRVVMNRHKRLIVNSSDDYYLVSTASL

SEQ ID NO: 40386 - protein, 34 aa, Artificial Sequence; identical to SEQ ID NO: 3290
  Cyclic GFR-binding peptide
  MOD_RES (31), (32): Xaa is C or S

SEQ ID NO: 40387 - protein, 30 aa, Artificial Sequence
  Cyclic GFR-binding peptide
  MOD_RES (30), (30): Xaa is C or S
RVIMRHKRLVKPKRGVYYLISTASLAQPVX

SEQ ID NO: 40388 - protein, 33 aa, Artificial Sequence
  Cyclic GFR-binding peptide
  MOD_RES (29), (30): Xaa is C or S
VMNYHYKLIVNNSSDKYLVSIPSLKTPAXXAKP

SEQ ID NO: 40389 - protein, 36 aa, Artificial Sequence; identical to SEQ ID NO: 3291
  Cyclic GFR-binding peptide
  MOD_RES (2), (4), (36): Xaa is C or S

SEQ ID NO: 40390 - protein, 39 aa, Artificial Sequence; identical to SEQ ID NO: 3292
  Cyclic GFR-binding peptide
  MOD_RES (2), (34), (35): Xaa is C or S

SEQ ID NO: 40391 - protein, 36 aa, Artificial Sequence; identical to SEQ ID NO: 3293
  Cyclic GFR-binding peptide
  MOD_RES (1), (34), (35): Xaa is C or S

SEQ ID NO: 40392 - protein, 25 aa, Artificial Sequence
  Cyclic GFR-binding peptide
ELTRYKKLFIPKKRVIEFYLVSIAN

SEQ ID NO: 40393 - protein, 33 aa, Artificial Sequence; identical to SEQ ID NO: 3294
  Cyclic GFR-binding peptide
  MOD_RES (2), (2): Xaa is C or S

SEQ ID NO: 40394 - protein, 31 aa, Artificial Sequence
  Cyclic GFR-binding peptide
  MOD_RES (2), (2): Xaa is C or S
GXGEVVMERHKRLVVKDYEDYYLMSTASLET

SEQ ID NO: 40395 - protein, 27 aa, Artificial Sequence
  Cyclic GFR-binding peptide
KVVMNYHYKLIVNNSSDKYLVSIPSLK

SEQ ID NO: 40396 - protein, 29 aa, Artificial Sequence
  Cyclic GFR-binding peptide
  MOD_RES (29), (29): Xaa is C or S
VMNYHYKLIVNSSDDKYLVSIPSLQTPAX

SEQ ID NO: 40397 - protein, 26 aa, Artificial Sequence
  Cyclic GFR-binding peptide
VIMYHYKLIKPTKGIKYLISIPSLDQ

SEQ ID NO: 40398 - protein, 38 aa, Artificial Sequence; identical to SEQ ID NO: 3295
  Cyclic GFR-binding peptide
  MOD_RES (1), (3), (35), (36): Xaa is C or S

SEQ ID NO: 40399 - protein, 34 aa, Artificial Sequence; identical to SEQ ID NO: 3296
  Cyclic GFR-binding peptide
  MOD_RES (2), (33), (34): Xaa is C or S

SEQ ID NO: 40400 - protein, 25 aa, Artificial Sequence
  Cyclic GFR-binding peptide
SKVVMRHKRLVKPTRGVYYLISTAS

SEQ ID NO: 40401 - protein, 34 aa, Artificial Sequence; identical to SEQ ID NO: 3299
  Cyclic GFR-binding peptide
  MOD_RES (2), (4): Xaa is C or S

SEQ ID NO: 40402 - protein, 39 aa, Artificial Sequence; identical to SEQ ID NO: 3300
  Cyclic GFR-binding peptide
  MOD_RES (1), (3), (35), (36): Xaa is C or S

SEQ ID NO: 40403 - protein, 37 aa, Artificial Sequence; identical to SEQ ID NO: 3301
  Cyclic GFR-binding peptide
  MOD_RES (31), (32): Xaa is C or S

SEQ ID NO: 40404 - protein, 35 aa, Artificial Sequence; identical to SEQ ID NO: 3303
  Cyclic GFR-binding peptide
  MOD_RES (31), (32): Xaa is C or S

SEQ ID NO: 40405 - protein, 33 aa, Artificial Sequence
  Cyclic GFR-binding peptide
  MOD_RES (29), (30): Xaa is C or S
VIMQYNKLIKPTKGILYLISIASLDQSVXXPSA

SEQ ID NO: 40406 - protein, 35 aa, Artificial Sequence; identical to SEQ ID NO: 3304
  Cyclic GFR-binding peptide
  MOD_RES (1), (3): Xaa is C or S

SEQ ID NO: 40407 - protein, 27 aa, Artificial Sequence
  Cyclic GFR-binding peptide
EVVMERYKKLVVKDYEDFYLMSIANLE

SEQ ID NO: 40408 - protein, 32 aa, Artificial Sequence
  Cyclic GFR-binding peptide
  MOD_RES (26), (27): Xaa is C or S
RYKKLVKPKRGVFYLISIANLAQPVXXPAASA

SEQ ID NO: 40409 - protein, 41 aa, Artificial Sequence; identical to SEQ ID NO: 3305
  Cyclic GFR-binding peptide
  MOD_RES (2), (4), (41): Xaa is C or S

SEQ ID NO: 40410 - protein, 35 aa, Artificial Sequence; identical to SEQ ID NO: 3306
  Cyclic GFR-binding peptide
  MOD_RES (2), (34): Xaa is C or S

SEQ ID NO: 40411 - protein, 29 aa, Artificial Sequence
  Cyclic GFR-binding peptide
KVVMYHYKLVKPTRGVKYLISIPSLDQPV

SEQ ID NO: 40412 - protein, 29 aa, Artificial Sequence
  Cyclic GFR-binding peptide
  MOD_RES (28), (29): Xaa is C or S
MERHKRLVVKDYEDYYLMSTASLETPVXX

SEQ ID NO: 40413 - protein, 29 aa, Artificial Sequence
  Cyclic GFR-binding peptide
  MOD_RES (28), (29): Xaa is C or S
MDRYKKLVVKENEDFYLMSIANLETPVXX

SEQ ID NO: 40414 - protein, 30 aa, Artificial Sequence
  Cyclic GFR-binding peptide
  MOD_RES (1), (1): Xaa is C or S
XGEVVMEYHYKLVVKDYEDKYLMSIPSLET

SEQ ID NO: 40415 - protein, 30 aa, Artificial Sequence; identical to SEQ ID NO: 3314
  Cyclic GFR-binding peptide

SEQ ID NO: 40416 - protein, 35 aa, Artificial Sequence
  Cyclic GFR-binding peptide
  MOD_RES (29), (30): Xaa is C or S
VMNRYKKLIVNNSSDFYLVSIANLKTPAXXAKPVA

SEQ ID NO: 40417 - protein, 29 aa, Artificial Sequence
  Cyclic GFR-binding peptide
AAAAAAAAAQYNKLVKPTRGVLYLISIAS

SEQ ID NO: 40418 - protein, 28 aa, Artificial Sequence
  Cyclic GFR-binding peptide
  MOD_RES (27), (28): Xaa is C or S
DYHYKLVVKENEDKYLMSIPSLETPVXX

SEQ ID NO: 40419 - protein, 37 aa, Artificial Sequence; identical to SEQ ID NO: 3320
  Cyclic GFR-binding peptide
  MOD_RES (1), (3), (34), (35): Xaa is C or S

SEQ ID NO: 40420 - protein, 31 aa, Artificial Sequence
  Cyclic GFR-binding peptide
  MOD_RES (1), (3): Xaa is C or S
XKXSRVIMQYNKLVKPKRGVLYLISIASLAQ

SEQ ID NO: 40421 - protein, 31 aa, Artificial Sequence
  Cyclic GFR-binding peptide
  MOD_RES (2), (2): Xaa is C or S
KXSKVVMRYKKLVKPTRGVFYLISIANLDQP

SEQ ID NO: 40422 - protein, 23 aa, Artificial Sequence
  Cyclic GFR-binding peptide
MERYKKLVVKDYEDFYLMSIANL

SEQ ID NO: 40423 - protein, 26 aa, Artificial Sequence
  Cyclic GFR-binding peptide
AKVVMNYHYKLIVNNSSDKYLVSIPS

SEQ ID NO: 40424 - protein, 29 aa, Artificial Sequence
  Cyclic GFR-binding peptide
  MOD_RES (28), (29): Xaa is C or S
MEYHYKLVVKDYEDKYLMSIPSLETPVXX

SEQ ID NO: 40425 - protein, 40 aa, Artificial Sequence; identical to SEQ ID NO: 3321
  Cyclic GFR-binding peptide
  MOD_RES (2), (4), (35), (36): Xaa is C or S

SEQ ID NO: 40426 - protein, 29 aa, Artificial Sequence
  Cyclic GFR-binding peptide
AAAAAAAAARYKKLVVKENEDFYLMSIAN

SEQ ID NO: 40427 - protein, 38 aa, Artificial Sequence; identical to SEQ ID NO: 3322
  Cyclic GFR-binding peptide
  MOD_RES (1), (3), (34), (35): Xaa is C or S

SEQ ID NO: 40428 - protein, 29 aa, Artificial Sequence
  Cyclic GFR-binding peptide
VVMERYKKLVVKDYEDFYLMSIANLETPV

SEQ ID NO: 40429 - protein, 40 aa, Artificial Sequence; identical to SEQ ID NO: 3323
  Cyclic GFR-binding peptide
  MOD_RES (2), (4), (36), (37): Xaa is C or S

SEQ ID NO: 40430 - protein, 32 aa, Artificial Sequence
  Cyclic GFR-binding peptide
  MOD_RES (28), (29): Xaa is C or S
GERYKKLTPVGMDDFYLVSIANLKTPVXXAKG

SEQ ID NO: 40431 - protein, 40 aa, Artificial Sequence; identical to SEQ ID NO: 3328
  Cyclic GFR-binding peptide
  MOD_RES (1), (3), (40): Xaa is C or S

SEQ ID NO: 40432 - protein, 34 aa, Artificial Sequence; identical to SEQ ID NO: 3327
  Cyclic GFR-binding peptide
  MOD_RES (32), (32): Xaa is C or S

SEQ ID NO: 40433 - protein, 37 aa, Artificial Sequence; identical to SEQ ID NO: 3330
  Cyclic GFR-binding peptide
  MOD_RES (2), (4), (35), (36): Xaa is C or S

SEQ ID NO: 40434 - protein, 30 aa, Artificial Sequence
  Cyclic GFR-binding peptide
  MOD_RES (28), (29): Xaa is C or S
IMRYKKLIKPTKGIFYLISIANLDQSVXXP

SEQ ID NO: 40435 - protein, 34 aa, Artificial Sequence
  Cyclic GFR-binding peptide
  MOD_RES (2), (2): Xaa is C or S
KXALHDELTQYNKLFIPKKRVIELYLVSIASLQV

SEQ ID NO: 40436 - protein, 33 aa, Artificial Sequence
  Cyclic GFR-binding peptide
  MOD_RES (28), (29): Xaa is C or S
MERHKRLVVKDYEDYYLMSTASLETPVXXAKPI

SEQ ID NO: 40437 - protein, 34 aa, Artificial Sequence; identical to SEQ ID NO: 3332
  Cyclic GFR-binding peptide
  MOD_RES (2), (34): Xaa is C or S

SEQ ID NO: 40438 - protein, 38 aa, Artificial Sequence; identical to SEQ ID NO: 3333
  Cyclic GFR-binding peptide
  MOD_RES (35), (35): Xaa is C or S

SEQ ID NO: 40439 - protein, 25 aa, Artificial Sequence
  Cyclic GFR-binding peptide
RHKRLTPVGMDDYYLVSTASLKTPV

SEQ ID NO: 40440 - protein, 23 aa, Artificial Sequence
  Cyclic GFR-binding peptide
NQYNKLIVNSSDDLYLVSIASLK

SEQ ID NO: 40441 - protein, 40 aa, Artificial Sequence; identical to SEQ ID NO: 3335
  Cyclic GFR-binding peptide
  MOD_RES (2), (34), (35): Xaa is C or S

SEQ ID NO: 40442 - protein, 26 aa, Artificial Sequence
  Cyclic GFR-binding peptide
SRVIMRYKKLVKPKRGVFYLISIANL

SEQ ID NO: 40443 - protein, 30 aa, Artificial Sequence
  Cyclic GFR-binding peptide
LHDELTYHYKLFIPKKRVIEKYLVSIPSLQ

SEQ ID NO: 40444 - protein, 34 aa, Artificial Sequence; identical to SEQ ID NO: 3336
  Cyclic GFR-binding peptide
  MOD_RES (1), (32), (33): Xaa is C or S

SEQ ID NO: 40445 - protein, 35 aa, Artificial Sequence; identical to SEQ ID NO: 3337
  Cyclic GFR-binding peptide
  MOD_RES (1), (1): Xaa is C or S

SEQ ID NO: 40446 - protein, 32 aa, Artificial Sequence; identical to SEQ ID NO: 3338
  Cyclic GFR-binding peptide
  MOD_RES (1), (1): Xaa is C or S

SEQ ID NO: 40447 - protein, 36 aa, Artificial Sequence; identical to SEQ ID NO: 3339
  Cyclic GFR-binding peptide
  MOD_RES (1), (3), (34), (35): Xaa is C or S

SEQ ID NO: 40448 - protein, 38 aa, Artificial Sequence; identical to SEQ ID NO: 3340
  Cyclic GFR-binding peptide
  MOD_RES (2), (4), (35), (36): Xaa is C or S

SEQ ID NO: 40449 - protein, 32 aa, Artificial Sequence
  Cyclic GFR-binding peptide
  MOD_RES (29), (30): Xaa is C or S
VMNRHKRLIVNSSDDYYLVSTASLQTPAXXPK

SEQ ID NO: 40450 - protein, 30 aa, Artificial Sequence
  Cyclic GFR-binding peptide
  MOD_RES (30), (30): Xaa is C or S
QYNKLFIPKKRVIELYLVSIASLQVQTPRX

SEQ ID NO: 40451 - protein, 32 aa, Artificial Sequence
  Cyclic GFR-binding peptide
  MOD_RES (2), (4): Xaa is C or S
SXKXSKVVMRYKKLVKPTRGVFYLISIANLDQ

SEQ ID NO: 40452 - protein, 36 aa, Artificial Sequence; identical to SEQ ID NO: 3342
  Cyclic GFR-binding peptide
  MOD_RES (32), (33): Xaa is C or S

SEQ ID NO: 40453 - protein, 43 aa, Artificial Sequence; identical to SEQ ID NO: 3343
  Cyclic GFR-binding peptide
  MOD_RES (2), (4), (37), (38): Xaa is C or S

SEQ ID NO: 40454 - protein, 39 aa, Artificial Sequence; identical to SEQ ID NO: 3345
  Cyclic GFR-binding peptide
  MOD_RES (37), (37): Xaa is C or S

SEQ ID NO: 40455 - protein, 28 aa, Artificial Sequence
  Cyclic GFR-binding peptide
VMNYHYKLIVNSSDDKYLVSIPSLKTPA

SEQ ID NO: 40456 - protein, 36 aa, Artificial Sequence; identical to SEQ ID NO: 3349
  Cyclic GFR-binding peptide
  MOD_RES (32), (33): Xaa is C or S

SEQ ID NO: 40457 - protein, 31 aa, Artificial Sequence
  Cyclic GFR-binding peptide
  MOD_RES (26), (27): Xaa is C or S
RHKRLIVNSSDDYYLVSTASLKTPAXXPKPV

SEQ ID NO: 40458 - protein, 34 aa, Artificial Sequence
  Cyclic GFR-binding peptide
  MOD_RES (2), (4): Xaa is C or S
HXGXARVVMNQYNKLIVNSSDDLYLVSIASLQTP

SEQ ID NO: 40459 - protein, 30 aa, Artificial Sequence
  Cyclic GFR-binding peptide
  MOD_RES (2), (4): Xaa is C or S
RXGXGEVVMDYHYKLVVKENEDKYLMSIPS

SEQ ID NO: 40460 - protein, 30 aa, Artificial Sequence
  Cyclic GFR-binding peptide
  MOD_RES (30), (30): Xaa is C or S
VVMDRYKKLVVKENEDFYLMSIANLETPVX

SEQ ID NO: 40461 - protein, 33 aa, Artificial Sequence
  Cyclic GFR-binding peptide
  MOD_RES (30), (31): Xaa is C or S
SMGERYKKLTPVGMDDFYLVSIANLKTPVXXAK

SEQ ID NO: 40462 - protein, 28 aa, Artificial Sequence
  Cyclic GFR-binding peptide
EVVMDRYKKLVVKENEDFYLMSIANLET

SEQ ID NO: 40463 - protein, 32 aa, Artificial Sequence
  Cyclic GFR-binding peptide
ELTRYKKLFIPKKRVIEFYLVSIANLQVQTPR

SEQ ID NO: 40464 - protein, 35 aa, Artificial Sequence; identical to SEQ ID NO: 3350
  Cyclic GFR-binding peptide
  MOD_RES (2), (33), (34): Xaa is C or S

SEQ ID NO: 40465 - protein, 37 aa, Artificial Sequence; identical to SEQ ID NO: 3351
  Cyclic GFR-binding peptide
  MOD_RES (2), (35), (36): Xaa is C or S

SEQ ID NO: 40466 - protein, 24 aa, Artificial Sequence
  Cyclic GFR-binding peptide
VVMERHKRLVVKDYEDYYLMSTAS

SEQ ID NO: 40467 - protein, 33 aa, Artificial Sequence
  Cyclic GFR-binding peptide
  MOD_RES (1), (3): Xaa is C or S
XGXGEVVMDRYKKLVVKENEDFYLMSIANLETP

SEQ ID NO: 40468 - protein, 30 aa, Artificial Sequence
  Cyclic GFR-binding peptide
  MOD_RES (27), (28): Xaa is C or S
MYHYKLIKPTKGIKYLISIPSLDQSVXXPS

SEQ ID NO: 40469 - protein, 25 aa, Artificial Sequence
  Cyclic GFR-binding peptide
MNQYNKLIVNSSDDLYLVSIASLQT

SEQ ID NO: 40470 - protein, 39 aa, Artificial Sequence; identical to SEQ ID NO: 3353
  Cyclic GFR-binding peptide
  MOD_RES (2), (4): Xaa is C or S

SEQ ID NO: 40471 - protein, 24 aa, Artificial Sequence
  Cyclic GFR-binding peptide
IMYHYKLIKPTKGIKYLISIPSLD

SEQ ID NO: 40472 - protein, 30 aa, Artificial Sequence
  Cyclic GFR-binding peptide
  MOD_RES (2), (4): Xaa is C or S
SXKXSKVIMRYKKLIKPTKGIFYLISIANL

SEQ ID NO: 40473 - protein, 38 aa, Artificial Sequence; identical to SEQ ID NO: 3354
  Cyclic GFR-binding peptide
  MOD_RES (1), (3), (35), (36): Xaa is C or S

SEQ ID NO: 40474 - protein, 29 aa, Artificial Sequence
  Cyclic GFR-binding peptide
  MOD_RES (28), (29): Xaa is C or S
IMYHYKLIKPTKGIKYLISIPSLDQSVXX

SEQ ID NO: 40475 - protein, 34 aa, Artificial Sequence; identical to SEQ ID NO: 3357
  Cyclic GFR-binding peptide
  MOD_RES (2), (33), (34): Xaa is C or S

SEQ ID NO: 40476 - protein, 30 aa, Artificial Sequence
  Cyclic GFR-binding peptide
  MOD_RES (28), (29): Xaa is C or S
VMRYKKLVKPTRGVFYLISIANLDQPVXXP

SEQ ID NO: 40477 - protein, 26 aa, Artificial Sequence
  Cyclic GFR-binding peptide
GEVVMDYHYKLVVKENEDKYLMSIPS

SEQ ID NO: 40478 - protein, 27 aa, Artificial Sequence
  Cyclic GFR-binding peptide
MNRHKRLIVNSSDDYYLVSTASLQTPA

SEQ ID NO: 40479 - protein, 26 aa, Artificial Sequence
  Cyclic GFR-binding peptide
AVSMGEQYNKLTPVGMDDLYLVSIAS

SEQ ID NO: 40480 - protein, 26 aa, Artificial Sequence
  Cyclic GFR-binding peptide
  MOD_RES (1), (1): Xaa is C or S
XSKVIMRYKKLIKPTKGIFYLISIAN

SEQ ID NO: 40481 - protein, 28 aa, Artificial Sequence
  Cyclic GFR-binding peptide
AKVVMNRYKKLIVNNSSDFYLVSIANLK

SEQ ID NO: 40482 - protein, 29 aa, Artificial Sequence
  Cyclic GFR-binding peptide
  MOD_RES (1), (1): Xaa is C or S
XEAVSMGEQYNKLTPVGMDDLYLVSIASL

SEQ ID NO: 40483 - protein, 30 aa, Artificial Sequence
  Cyclic GFR-binding peptide
  MOD_RES (1), (3): Xaa is C or S
XKXSKVIMYHYKLIKPTKGIKYLISIPSLD

SEQ ID NO: 40484 - protein, 24 aa, Artificial Sequence
  Cyclic GFR-binding peptide
RYKKLIVNNSSDFYLVSIANLKTP

SEQ ID NO: 40485 - protein, 29 aa, Artificial Sequence
  Cyclic GFR-binding peptide
  MOD_RES (26), (26): Xaa is C or S
YHYKLIVNSSDDKYLVSIPSLKTPAXTPK

SEQ ID NO: 40486 - protein, 30 aa, Artificial Sequence
  Cyclic GFR-binding peptide
LTYHYKLFIPKKRVIEKYLVSIPSLQVQTP

SEQ ID NO: 40487 - protein, 24 aa, Artificial Sequence
  Cyclic GFR-binding peptide
KVIMRHKRLIKPTKGIYYLISTAS

SEQ ID NO: 40488 - protein, 30 aa, Artificial Sequence
  Cyclic GFR-binding peptide
  MOD_RES (2), (2): Xaa is C or S
KXSKVIMYHYKLIKPTKGIKYLISIPSLDQ

SEQ ID NO: 40489 - protein, 26 aa, Artificial Sequence
  Cyclic GFR-binding peptide
  MOD_RES (26), (26): Xaa is C or S
QYNKLVKPTRGVLYLISIASLDQPVX

SEQ ID NO: 40490 - protein, 29 aa, Artificial Sequence
  Cyclic GFR-binding peptide
SRVVMNQYNKLIVNSSDDLYLVSIASLKT

SEQ ID NO: 40491 - protein, 34 aa, Artificial Sequence; identical to SEQ ID NO: 3360
  Cyclic GFR-binding peptide
  MOD_RES (32), (33): Xaa is C or S

SEQ ID NO: 40492 - protein, 37 aa, Artificial Sequence; identical to SEQ ID NO: 3361
  Cyclic GFR-binding peptide
  MOD_RES (2), (4), (37): Xaa is C or S

SEQ ID NO: 40493 - protein, 33 aa, Artificial Sequence; identical to SEQ ID NO: 3362
  Cyclic GFR-binding peptide
  MOD_RES (2), (2): Xaa is C or S

SEQ ID NO: 40494 - protein, 39 aa, Artificial Sequence; identical to SEQ ID NO: 3363
  Cyclic GFR-binding peptide
  MOD_RES (1), (33), (34): Xaa is C or S

SEQ ID NO: 40495 - protein, 33 aa, Artificial Sequence
  Cyclic GFR-binding peptide
  MOD_RES (30), (31): Xaa is C or S
VVMDYHYKLVVKENEDKYLMSIPSLETPVXXAK

SEQ ID NO: 40496 - protein, 27 aa, Artificial Sequence
  Cyclic GFR-binding peptide
RVVMNQYNKLIVNSSDDLYLVSIASLK

SEQ ID NO: 40497 - protein, 41 aa, Artificial Sequence; identical to SEQ ID NO: 3364
  Cyclic GFR-binding peptide
  MOD_RES (1), (3), (36), (37): Xaa is C or S

SEQ ID NO: 40498 - protein, 31 aa, Artificial Sequence
  Cyclic GFR-binding peptide
  MOD_RES (1), (3): Xaa is C or S
XGXEAVSMGERHKRLTPVGMDDYYLVSTASL

SEQ ID NO: 40499 - protein, 39 aa, Artificial Sequence; identical to SEQ ID NO: 3365
  Cyclic GFR-binding peptide
  MOD_RES (2), (33), (34): Xaa is C or S

SEQ ID NO: 40500 - protein, 23 aa, Artificial Sequence
  Cyclic GFR-binding peptide
VVMYHYKLVKPTRGVKYLISIPS

SEQ ID NO: 40501 - protein, 35 aa, Artificial Sequence; identical to SEQ ID NO: 3366
  Cyclic GFR-binding peptide
  MOD_RES (32), (33): Xaa is C or S

SEQ ID NO: 40502 - protein, 28 aa, Artificial Sequence
  Cyclic GFR-binding peptide
SMGERHKRLTPVGMDDYYLVSTASLKTP

SEQ ID NO: 40503 - protein, 23 aa, Artificial Sequence
  Cyclic GFR-binding peptide
EQYNKLTPVGMDDLYLVSIASLK

SEQ ID NO: 40504 - protein, 39 aa, Artificial Sequence; identical to SEQ ID NO: 3368
  Cyclic GFR-binding peptide
  MOD_RES (2), (4), (36), (37): Xaa is C or S

SEQ ID NO: 40505 - protein, 24 aa, Artificial Sequence
  Cyclic GFR-binding peptide
QYNKLVKPKRGVLYLISIASLAQP

SEQ ID NO: 40506 - protein, 33 aa, Artificial Sequence; identical to SEQ ID NO: 3369
  Cyclic GFR-binding peptide
  MOD_RES (1), (33): Xaa is C or S

SEQ ID NO: 40507 - protein, 35 aa, Artificial Sequence; identical to SEQ ID NO: 3370
  Cyclic GFR-binding peptide
  MOD_RES (2), (4): Xaa is C or S

SEQ ID NO: 40508 - protein, 36 aa, Artificial Sequence; identical to SEQ ID NO: 3371
  Cyclic GFR-binding peptide
  MOD_RES (31), (32): Xaa is C or S

SEQ ID NO: 40509 - protein, 28 aa, Artificial Sequence
  Cyclic GFR-binding peptide
ELTRYKKLFIPKKRVIEFYLVSIANLQV

SEQ ID NO: 40510 - protein, 28 aa, Artificial Sequence
  Cyclic GFR-binding peptide
  MOD_RES (27), (28): Xaa is C or S
MQYNKLVKPKRGVLYLISIASLAQPVXX

SEQ ID NO: 40511 - protein, 26 aa, Artificial Sequence
  Cyclic GFR-binding peptide
MRHKRLIKPTKGIYYLISTASLDQSV

SEQ ID NO: 40512 - protein, 31 aa, Artificial Sequence
  Cyclic GFR-binding peptide
  MOD_RES (28), (28): Xaa is C or S
MNRHKRLIVNSSDDYYLVSTASLKTPAXTPK

SEQ ID NO: 40513 - protein, 33 aa, Artificial Sequence
  Cyclic GFR-binding peptide
  MOD_RES (31), (32): Xaa is C or S
VSMGERHKRLTPVGMDDYYLVSTASLKTPVXXA

SEQ ID NO: 40514 - protein, 32 aa, Artificial Sequence
  Cyclic GFR-binding peptide
  MOD_RES (27), (28): Xaa is C or S
MRYKKLVKPTRGVFYLISIANLDQPVXXPSAS

SEQ ID NO: 40515 - protein, 33 aa, Artificial Sequence
  Cyclic GFR-binding peptide
  MOD_RES (2), (2): Xaa is C or S
KXALHDELTRYKKLFIPKKRVIEFYLVSIANLQ

SEQ ID NO: 40516 - protein, 32 aa, Artificial Sequence
  Cyclic GFR-binding peptide
  MOD_RES (2), (4): Xaa is C or S
HXGXSRVVMNYHYKLIVNSSDDKYLVSIPSLK

SEQ ID NO: 40517 - protein, 27 aa, Artificial Sequence
  Cyclic GFR-binding peptide
EVVMERHKRLVVKDYEDYYLMSTASLE

SEQ ID NO: 40518 - protein, 26 aa, Artificial Sequence
  Cyclic GFR-binding peptide
DELTRYKKLFIPKKRVIEFYLVSIAN

SEQ ID NO: 40519 - protein, 35 aa, Artificial Sequence; identical to SEQ ID NO: 3373
  Cyclic GFR-binding peptide
  MOD_RES (1), (33): Xaa is C or S

SEQ ID NO: 40520 - protein, 25 aa, Artificial Sequence
  Cyclic GFR-binding peptide
LTQYNKLFIPKKRVIELYLVSIASL

SEQ ID NO: 40521 - protein, 35 aa, Artificial Sequence; identical to SEQ ID NO: 3376
  Cyclic GFR-binding peptide
  MOD_RES (2), (34), (35): Xaa is C or S

SEQ ID NO: 40522 - protein, 30 aa, Artificial Sequence; identical to SEQ ID NO: 3377
  Cyclic GFR-binding peptide

SEQ ID NO: 40523 - protein, 29 aa, Artificial Sequence
  Cyclic GFR-binding peptide
SKVIMRHKRLIKPTKGIYYLISTASLDQS

SEQ ID NO: 40524 - protein, 25 aa, Artificial Sequence
  Cyclic GFR-binding peptide
YHYKLVKPTRGVKYLISIPSLDQPV

SEQ ID NO: 40525 - protein, 21 aa, Artificial Sequence
  Cyclic GFR-binding peptide
QYNKLIVNNSSDLYLVSIASL

SEQ ID NO: 40526 - protein, 38 aa, Artificial Sequence; identical to SEQ ID NO: 3379
  Cyclic GFR-binding peptide
  MOD_RES (2), (4), (35), (36): Xaa is C or S

SEQ ID NO: 40527 - protein, 20 aa, Artificial Sequence
  Cyclic GFR-binding peptide
QYNKLIVNSSDDLYLVSIAS

SEQ ID NO: 40528 - protein, 29 aa, Artificial Sequence
  Cyclic GFR-binding peptide
  MOD_RES (26), (27): Xaa is C or S
QYNKLIVNNSSDLYLVSIASLKTPAXXAK

SEQ ID NO: 40529 - protein, 32 aa, Artificial Sequence; identical to SEQ ID NO: 3383
  Cyclic GFR-binding peptide
  MOD_RES (1), (1): Xaa is C or S

SEQ ID NO: 40530 - protein, 44 aa, Artificial Sequence; identical to SEQ ID NO: 3384
  Cyclic GFR-binding peptide
  MOD_RES (1), (3), (40): Xaa is C or S

SEQ ID NO: 40531 - protein, 30 aa, Artificial Sequence
  Cyclic GFR-binding peptide
  MOD_RES (2), (4): Xaa is C or S
RXGXGEVVMERYKKLVVKDYEDFYLMSIAN

SEQ ID NO: 40532 - protein, 38 aa, Artificial Sequence; identical to SEQ ID NO: 3387
  Cyclic GFR-binding peptide
  MOD_RES (32), (33): Xaa is C or S

SEQ ID NO: 40533 - protein, 35 aa, Artificial Sequence
  Cyclic GFR-binding peptide
  MOD_RES (31), (31): Xaa is C or S
TYHYKLFIPKKRVIEKYLVSIPSLQVQTPRXQVNR

SEQ ID NO: 40534 - protein, 35 aa, Artificial Sequence
  Cyclic GFR-binding peptide
  MOD_RES (30), (31): Xaa is C or S
VVMNYHYKLIVNNSSDKYLVSIPSLKTPAXXAKPV

SEQ ID NO: 40535 - protein, 28 aa, Artificial Sequence
  Cyclic GFR-binding peptide
AVSMGERHKRLTPVGMDDYYLVSTASLK

SEQ ID NO: 40536 - protein, 33 aa, Artificial Sequence
  Cyclic GFR-binding peptide
  MOD_RES (28), (28): Xaa is C or S
MNRHKRLIVNSSDDYYLVSTASLKTPAXTPKTV

SEQ ID NO: 40537 - protein, 34 aa, Artificial Sequence; identical to SEQ ID NO: 3389
  Cyclic GFR-binding peptide
  MOD_RES (1), (33), (34): Xaa is C or S

SEQ ID NO: 40538 - protein, 39 aa, Artificial Sequence; identical to SEQ ID NO: 3390
  Cyclic GFR-binding peptide
  MOD_RES (2), (4), (36), (37): Xaa is C or S

SEQ ID NO: 40539 - protein, 39 aa, Artificial Sequence; identical to SEQ ID NO: 3394
  Cyclic GFR-binding peptide
  MOD_RES (2), (34), (35): Xaa is C or S

SEQ ID NO: 40540 - protein, 40 aa, Artificial Sequence; identical to SEQ ID NO: 3396
  Cyclic GFR-binding peptide
  MOD_RES (1), (3), (34), (35): Xaa is C or S

SEQ ID NO: 40541 - protein, 41 aa, Artificial Sequence; identical to SEQ ID NO: 3397
  Cyclic GFR-binding peptide
  MOD_RES (1), (3), (36), (37): Xaa is C or S

SEQ ID NO: 40542 - protein, 25 aa, Artificial Sequence
  Cyclic GFR-binding peptide
QYNKLIVNSSDDLYLVSIASLQTPA

SEQ ID NO: 40543 - protein, 32 aa, Artificial Sequence
  Cyclic GFR-binding peptide
  MOD_RES (2), (2): Xaa is C or S
GXEAVSMGERHKRLTPVGMDDYYLVSTASLKT

SEQ ID NO: 40544 - protein, 34 aa, Artificial Sequence
  Cyclic GFR-binding peptide
  MOD_RES (2), (4): Xaa is C or S
RXGXGEVVMERYKKLVVKDYEDFYLMSIANLETP

SEQ ID NO: 40545 - protein, 31 aa, Artificial Sequence
  Cyclic GFR-binding peptide
  MOD_RES (28), (29): Xaa is C or S
VMRHKRLVKPTRGVYYLISTASLDQPVXXPS

SEQ ID NO: 40546 - protein, 38 aa, Artificial Sequence; identical to SEQ ID NO: 3400
  Cyclic GFR-binding peptide
  MOD_RES (2), (4), (36): Xaa is C or S

SEQ ID NO: 40547 - protein, 36 aa, Artificial Sequence; identical to SEQ ID NO: 3401
  Cyclic GFR-binding peptide
  MOD_RES (1), (3), (35), (36): Xaa is C or S

SEQ ID NO: 40548 - protein, 35 aa, Artificial Sequence
  Cyclic GFR-binding peptide
  MOD_RES (30), (31): Xaa is C or S
VVMNYHYKLIVNSSDDKYLVSIPSLKTPAXXPKPV

SEQ ID NO: 40549 - protein, 26 aa, Artificial Sequence
  Cyclic GFR-binding peptide
GERHKRLTPVGMDDYYLVSTASLKTP

SEQ ID NO: 40550 - protein, 34 aa, Artificial Sequence; identical to SEQ ID NO: 3402
  Cyclic GFR-binding peptide

SEQ ID NO: 40551 - protein, 38 aa, Artificial Sequence; identical to SEQ ID NO: 3403
  Cyclic GFR-binding peptide
  MOD_RES (1), (3), (36), (37): Xaa is C or S

SEQ ID NO: 40552 - protein, 33 aa, Artificial Sequence
  Cyclic GFR-binding peptide
  MOD_RES (1), (3): Xaa is C or S
XGXEAVSMGEQYNKLTPVGMDDLYLVSIASLKT

SEQ ID NO: 40553 - protein, 28 aa, Artificial Sequence
  Cyclic GFR-binding peptide
SRVIMQYNKLVKPKRGVLYLISIASLAQ

SEQ ID NO: 40554 - protein, 25 aa, Artificial Sequence
  Cyclic GFR-binding peptide
VMRHKRLVKPTRGVYYLISTASLDQ

SEQ ID NO: 40555 - protein, 30 aa, Artificial Sequence
  Cyclic GFR-binding peptide
AKVVMNQYNKLIVNNSSDLYLVSIASLKTP

SEQ ID NO: 40556 - protein, 38 aa, Artificial Sequence; identical to SEQ ID NO: 3410
  Cyclic GFR-binding peptide
  MOD_RES (1), (34), (35): Xaa is C or S

SEQ ID NO: 40557 - protein, 28 aa, Artificial Sequence
  Cyclic GFR-binding peptide
RVVMNRHKRLIVNSSDDYYLVSTASLQT

SEQ ID NO: 40558 - protein, 31 aa, Artificial Sequence
  Cyclic GFR-binding peptide
  MOD_RES (2), (4): Xaa is C or S
HXGXSRVVMNYHYKLIVNSSDDKYLVSIPSL

SEQ ID NO: 40559 - protein, 29 aa, Artificial Sequence
  Cyclic GFR-binding peptide
  MOD_RES (1), (1): Xaa is C or S
XSKVIMQYNKLIKPTKGILYLISIASLDQ

SEQ ID NO: 40560 - protein, 39 aa, Artificial Sequence; identical to SEQ ID NO: 3411
  Cyclic GFR-binding peptide
  MOD_RES (1), (3), (34), (35): Xaa is C or S

SEQ ID NO: 40561 - protein, 36 aa, Artificial Sequence; identical to SEQ ID NO: 3412
  Cyclic GFR-binding peptide
  MOD_RES (31), (32): Xaa is C or S

SEQ ID NO: 40562 - protein, 30 aa, Artificial Sequence
  Cyclic GFR-binding peptide
  MOD_RES (2), (2): Xaa is C or S
KXSKVIMRYKKLIKPTKGIFYLISIANLDQ

SEQ ID NO: 40563 - protein, 35 aa, Artificial Sequence; identical to SEQ ID NO: 3413
  Cyclic GFR-binding peptide
  MOD_RES (31), (32): Xaa is C or S

SEQ ID NO: 40564 - protein, 29 aa, Artificial Sequence
  Cyclic GFR-binding peptide
AAAAAAAAAQYNKLTPVGMDDLYLVSIAS

SEQ ID NO: 40565 - protein, 25 aa, Artificial Sequence
  Cyclic GFR-binding peptide
KVVMYHYKLVKPTRGVKYLISIPSL

SEQ ID NO: 40566 - protein, 34 aa, Artificial Sequence; identical to SEQ ID NO: 3415
  Cyclic GFR-binding peptide

SEQ ID NO: 40567 - protein, 30 aa, Artificial Sequence
  Cyclic GFR-binding peptide
  MOD_RES (2), (2): Xaa is C or S
GXSRVVMNYHYKLIVNSSDDKYLVSIPSLK

SEQ ID NO: 40568 - protein, 34 aa, Artificial Sequence; identical to SEQ ID NO: 3416
  Cyclic GFR-binding peptide
  MOD_RES (31), (32): Xaa is C or S

SEQ ID NO: 40569 - protein, 32 aa, Artificial Sequence
  Cyclic GFR-binding peptide
  MOD_RES (26), (27): Xaa is C or S
YHYKLIKPTKGIKYLISIPSLDQSVXXPSASA

SEQ ID NO: 40570 - protein, 35 aa, Artificial Sequence
  Cyclic GFR-binding peptide
  MOD_RES (30), (31): Xaa is C or S
KVVMRYKKLVKPTRGVFYLISIANLDQPVXXPSAS

SEQ ID NO: 40571 - protein, 34 aa, Artificial Sequence
  Cyclic GFR-binding peptide
  MOD_RES (30), (31): Xaa is C or S
RVIMRYKKLVKPKRGVFYLISIANLAQPVXXPAA

SEQ ID NO: 40572 - protein, 34 aa, Artificial Sequence; identical to SEQ ID NO: 3417
  Cyclic GFR-binding peptide

SEQ ID NO: 40573 - protein, 42 aa, Artificial Sequence; identical to SEQ ID NO: 3418
  Cyclic GFR-binding peptide
  MOD_RES (2), (4), (36), (37): Xaa is C or S

SEQ ID NO: 40574 - protein, 28 aa, Artificial Sequence
  Cyclic GFR-binding peptide
  MOD_RES (27), (28): Xaa is C or S
NYHYKLIVNSSDDKYLVSIPSLKTPAXX

SEQ ID NO: 40575 - protein, 29 aa, Artificial Sequence
  Cyclic GFR-binding peptide
  MOD_RES (1), (3): Xaa is C or S
XKXSKVIMRYKKLIKPTKGIFYLISIANL

SEQ ID NO: 40576 - protein, 33 aa, Artificial Sequence
  Cyclic GFR-binding peptide
  MOD_RES (32), (32): Xaa is C or S
LTYHYKLFIPKKRVIEKYLVSIPSLQVQTPRXQ

SEQ ID NO: 40577 - protein, 31 aa, Artificial Sequence
  Cyclic GFR-binding peptide
  MOD_RES (27), (28): Xaa is C or S
NQYNKLIVNSSDDLYLVSIASLQTPAXXPKP

SEQ ID NO: 40578 - protein, 39 aa, Artificial Sequence; identical to SEQ ID NO: 3420
  Cyclic GFR-binding peptide
  MOD_RES (2), (4), (36), (37): Xaa is C or S

SEQ ID NO: 40579 - protein, 33 aa, Artificial Sequence
  Cyclic GFR-binding peptide
  MOD_RES (28), (29): Xaa is C or S
IMRYKKLVKPKRGVFYLISIANLAQPVXXPAAS

SEQ ID NO: 40580 - protein, 27 aa, Artificial Sequence
  Cyclic GFR-binding peptide
  MOD_RES (27), (27): Xaa is C or S
EQYNKLTPVGMDDLYLVSIASLKTPVX

SEQ ID NO: 40581 - protein, 29 aa, Artificial Sequence
  Cyclic GFR-binding peptide
  MOD_RES (27), (28): Xaa is C or S
MRYKKLIKPTKGIFYLISIANLDQSVXXP

SEQ ID NO: 40582 - protein, 35 aa, Artificial Sequence; identical to SEQ ID NO: 3422
  Cyclic GFR-binding peptide
  MOD_RES (2), (35): Xaa is C or S

SEQ ID NO: 40583 - protein, 32 aa, Artificial Sequence
  Cyclic GFR-binding peptide
LHDELTQYNKLFIPKKRVIELYLVSIASLQVQ

SEQ ID NO: 40584 - protein, 33 aa, Artificial Sequence
  Cyclic GFR-binding peptide
  MOD_RES (27), (28): Xaa is C or S
MRHKRLVKPTRGVYYLISTASLDQPVXXPSASA

SEQ ID NO: 40585 - protein, 43 aa, Artificial Sequence; identical to SEQ ID NO: 3423
  Cyclic GFR-binding peptide
  MOD_RES (2), (39): Xaa is C or S

SEQ ID NO: 40586 - protein, 31 aa, Artificial Sequence
  Cyclic GFR-binding peptide
  MOD_RES (2), (2): Xaa is C or S
GXGEVVMDRYKKLVVKENEDFYLMSIANLET

SEQ ID NO: 40587 - protein, 29 aa, Artificial Sequence
  Cyclic GFR-binding peptide
  MOD_RES (28), (28): Xaa is C or S
MNRHKRLIVNSSDDYYLVSTASLKTPAXT

SEQ ID NO: 40588 - protein, 33 aa, Artificial Sequence
  Cyclic GFR-binding peptide
  MOD_RES (2), (2): Xaa is C or S
GXEAVSMGERYKKLTPVGMDDFYLVSIANLKTP

SEQ ID NO: 40589 - protein, 33 aa, Artificial Sequence; identical to SEQ ID NO: 3425
  Cyclic GFR-binding peptide
  MOD_RES (1), (33): Xaa is C or S

SEQ ID NO: 40590 - protein, 34 aa, Artificial Sequence
  Cyclic GFR-binding peptide
  MOD_RES (29), (30): Xaa is C or S
VMNYHYKLIVNNSSDKYLVSIPSLKTPAXXAKPV

SEQ ID NO: 40591 - protein, 31 aa, Artificial Sequence
  Cyclic GFR-binding peptide
  MOD_RES (2), (2): Xaa is C or S
GXEAVSMGERYKKLTPVGMDDFYLVSIANLK

SEQ ID NO: 40592 - protein, 32 aa, Artificial Sequence
  Cyclic GFR-binding peptide
  MOD_RES (27), (27): Xaa is C or S
NQYNKLIVNSSDDLYLVSIASLKTPAXTPKTV

SEQ ID NO: 40593 - protein, 32 aa, Artificial Sequence
  Cyclic GFR-binding peptide
  MOD_RES (27), (28): Xaa is C or S
ERYKKLVVKDYEDFYLMSIANLETPVXXAKPI

SEQ ID NO: 40594 - protein, 31 aa, Artificial Sequence
  Cyclic GFR-binding peptide
ELTRHKRLFIPKKRVIEYYLVSTASLQVQTP

SEQ ID NO: 40595 - protein, 34 aa, Artificial Sequence; identical to SEQ ID NO: 3429
  Cyclic GFR-binding peptide
  MOD_RES (1), (33), (34): Xaa is C or S

SEQ ID NO: 40596 - protein, 39 aa, Artificial Sequence; identical to SEQ ID NO: 3430
  Cyclic GFR-binding peptide
  MOD_RES (33), (34): Xaa is C or S

SEQ ID NO: 40597 - protein, 31 aa, Artificial Sequence
  Cyclic GFR-binding peptide
  MOD_RES (29), (30): Xaa is C or S
VMNQYNKLIVNSSDDLYLVSIASLKTPAXXP

SEQ ID NO: 40598 - protein, 24 aa, Artificial Sequence
  Cyclic GFR-binding peptide
RYKKLVKPKRGVFYLISIANLAQP

SEQ ID NO: 40599 - protein, 35 aa, Artificial Sequence; identical to SEQ ID NO: 3431
  Cyclic GFR-binding peptide
  MOD_RES (2), (34), (35): Xaa is C or S

SEQ ID NO: 40600 - protein, 25 aa, Artificial Sequence
  Cyclic GFR-binding peptide
IMQYNKLVKPKRGVLYLISIASLAQ

SEQ ID NO: 40601 - protein, 29 aa, Artificial Sequence
  Cyclic GFR-binding peptide
  MOD_RES (29), (29): Xaa is C or S
VIMRHKRLVKPKRGVYYLISTASLAQPVX

SEQ ID NO: 40602 - protein, 27 aa, Artificial Sequence
  Cyclic GFR-binding peptide
SKVVMQYNKLVKPTRGVLYLISIASLD

SEQ ID NO: 40603 - protein, 37 aa, Artificial Sequence; identical to SEQ ID NO: 3432
  Cyclic GFR-binding peptide
  MOD_RES (1), (3), (34), (35): Xaa is C or S

SEQ ID NO: 40604 - protein, 36 aa, Artificial Sequence
  Cyclic GFR-binding peptide
  MOD_RES (30), (31): Xaa is C or S
KVIMQYNKLIKPTKGILYLISIASLDQSVXXPSASA

SEQ ID NO: 40605 - protein, 28 aa, Artificial Sequence
  Cyclic GFR-binding peptide
  MOD_RES (28), (28): Xaa is C or S
IMYHYKLIKPTKGIKYLISIPSLDQSVX

SEQ ID NO: 40606 - protein, 34 aa, Artificial Sequence; identical to SEQ ID NO: 3436
  Cyclic GFR-binding peptide
  MOD_RES (1), (33), (34): Xaa is C or S

SEQ ID NO: 40607 - protein, 27 aa, Artificial Sequence
  Cyclic GFR-binding peptide
  MOD_RES (27), (27): Xaa is C or S
NQYNKLIVNSSDDLYLVSIASLKTPAX

SEQ ID NO: 40608 - protein, 36 aa, Artificial Sequence; identical to SEQ ID NO: 3437
  Cyclic GFR-binding peptide
  MOD_RES (2), (4), (35), (36): Xaa is C or S

SEQ ID NO: 40609 - protein, 24 aa, Artificial Sequence
  Cyclic GFR-binding peptide
NQYNKLIVNNSSDLYLVSIASLKT

SEQ ID NO: 40610 - protein, 26 aa, Artificial Sequence
  Cyclic GFR-binding peptide
  MOD_RES (26), (26): Xaa is C or S
RYKKLVKPTRGVFYLISIANLDQPVX

SEQ ID NO: 40611 - protein, 29 aa, Artificial Sequence
  Cyclic GFR-binding peptide
  MOD_RES (26), (27): Xaa is C or S
RYKKLVKPKRGVFYLISIANLAQPVXXPA

SEQ ID NO: 40612 - protein, 32 aa, Artificial Sequence; identical to SEQ ID NO: 3440
  Cyclic GFR-binding peptide
  MOD_RES (1), (1): Xaa is C or S

SEQ ID NO: 40613 - protein, 27 aa, Artificial Sequence
  Cyclic GFR-binding peptide
MDYHYKLVVKENEDKYLMSIPSLETPV

SEQ ID NO: 40614 - protein, 32 aa, Artificial Sequence
  Cyclic GFR-binding peptide
DELTQYNKLFIPKKRVIELYLVSIASLQVQTP

SEQ ID NO: 40615 - protein, 38 aa, Artificial Sequence; identical to SEQ ID NO: 3441
  Cyclic GFR-binding peptide
  MOD_RES (1), (33), (34): Xaa is C or S

SEQ ID NO: 40616 - protein, 37 aa, Artificial Sequence; identical to SEQ ID NO: 3442
  Cyclic GFR-binding peptide
  MOD_RES (31), (32): Xaa is C or S

SEQ ID NO: 40617 - protein, 28 aa, Artificial Sequence
  Cyclic GFR-binding peptide
  MOD_RES (27), (28): Xaa is C or S
ERHKRLVVKDYEDYYLMSTASLETPVXX

SEQ ID NO: 40618 - protein, 39 aa, Artificial Sequence; identical to SEQ ID NO: 3447
  Cyclic GFR-binding peptide
  MOD_RES (1), (3), (35): Xaa is C or S

SEQ ID NO: 40619 - protein, 24 aa, Artificial Sequence
  Cyclic GFR-binding peptide
QYNKLVKPTRGVLYLISIASLDQP

SEQ ID NO: 40620 - protein, 29 aa, Artificial Sequence
  Cyclic GFR-binding peptide
SKVVMYHYKLVKPTRGVKYLISIPSLDQP

SEQ ID NO: 40621 - protein, 24 aa, Artificial Sequence
  Cyclic GFR-binding peptide
RYKKLFIPKKRVIEFYLVSIANLQ

SEQ ID NO: 40622 - protein, 31 aa, Artificial Sequence
  Cyclic GFR-binding peptide
  MOD_RES (30), (31): Xaa is C or S
VVMEYHYKLVVKDYEDKYLMSIPSLETPVXX

SEQ ID NO: 40623 - protein, 25 aa, Artificial Sequence
  Cyclic GFR-binding peptide
DRHKRLVVKENEDYYLMSTASLETP

SEQ ID NO: 40624 - protein, 30 aa, Artificial Sequence
  Cyclic GFR-binding peptide
TYHYKLFIPKKRVIEKYLVSIPSLQVQTPR

SEQ ID NO: 40625 - protein, 31 aa, Artificial Sequence
  Cyclic GFR-binding peptide
  MOD_RES (26), (27): Xaa is C or S
RHKRLVKPKRGVYYLISTASLAQPVXXPAAS

SEQ ID NO: 40626 - protein, 32 aa, Artificial Sequence
  Cyclic GFR-binding peptide
LHDELTRYKKLFIPKKRVIEFYLVSIANLQVQ

SEQ ID NO: 40627 - protein, 23 aa, Artificial Sequence
  Cyclic GFR-binding peptide
RHKRLVVKENEDYYLMSTASLET

SEQ ID NO: 40628 - protein, 35 aa, Artificial Sequence; identical to SEQ ID NO: 3449
  Cyclic GFR-binding peptide
  MOD_RES (32), (33): Xaa is C or S

SEQ ID NO: 40629 - protein, 27 aa, Artificial Sequence
  Cyclic GFR-binding peptide
  MOD_RES (26), (27): Xaa is C or S
QYNKLVKPKRGVLYLISIASLAQPVXX

SEQ ID NO: 40630 - protein, 29 aa, Artificial Sequence
  Cyclic GFR-binding peptide
  MOD_RES (29), (29): Xaa is C or S
VIMQYNKLIKPTKGILYLISIASLDQSVX

SEQ ID NO: 40631 - protein, 31 aa, Artificial Sequence
  Cyclic GFR-binding peptide
  MOD_RES (30), (31): Xaa is C or S
SMGERYKKLTPVGMDDFYLVSIANLKTPVXX

SEQ ID NO: 40632 - protein, 40 aa, Artificial Sequence; identical to SEQ ID NO: 3450
  Cyclic GFR-binding peptide
  MOD_RES (1), (3), (34), (35): Xaa is C or S

SEQ ID NO: 40633 - protein, 28 aa, Artificial Sequence
  Cyclic GFR-binding peptide
  MOD_RES (28), (28): Xaa is C or S
VMYHYKLVKPTRGVKYLISIPSLDQPVX

SEQ ID NO: 40634 - protein, 39 aa, Artificial Sequence; identical to SEQ ID NO: 3451
  Cyclic GFR-binding peptide
  MOD_RES (1), (3), (34), (35): Xaa is C or S

SEQ ID NO: 40635 - protein, 28 aa, Artificial Sequence
  Cyclic GFR-binding peptide
  MOD_RES (2), (2): Xaa is C or S
KXSKVVMYHYKLVKPTRGVKYLISIPSL

SEQ ID NO: 40636 - protein, 30 aa, Artificial Sequence
  Cyclic GFR-binding peptide
  MOD_RES (28), (29): Xaa is C or S
IMYHYKLVKPKRGVKYLISIPSLAQPVXXP

SEQ ID NO: 40637 - protein, 32 aa, Artificial Sequence
  Cyclic GFR-binding peptide
  MOD_RES (27), (28): Xaa is C or S
NQYNKLIVNSSDDLYLVSIASLKTPAXXPKPV

SEQ ID NO: 40638 - protein, 32 aa, Artificial Sequence; identical to SEQ ID NO: 3452
  Cyclic GFR-binding peptide
  MOD_RES (32), (32): Xaa is C or S

SEQ ID NO: 40639 - protein, 23 aa, Artificial Sequence
  Cyclic GFR-binding peptide
MQYNKLVKPKRGVLYLISIASLA

SEQ ID NO: 40640 - protein, 32 aa, Artificial Sequence
  Cyclic GFR-binding peptide
  MOD_RES (28), (29): Xaa is C or S
MERYKKLVVKDYEDFYLMSIANLETPVXXAKP

SEQ ID NO: 40641 - protein, 24 aa, Artificial Sequence
  Cyclic GFR-binding peptide
MGERYKKLTPVGMDDFYLVSIANL

SEQ ID NO: 40642 - protein, 36 aa, Artificial Sequence; identical to SEQ ID NO: 3453
  Cyclic GFR-binding peptide
  MOD_RES (1), (3), (35), (36): Xaa is C or S

SEQ ID NO: 40643 - protein, 28 aa, Artificial Sequence
  Cyclic GFR-binding peptide
  MOD_RES (1), (1): Xaa is C or S
XSRVVMNYHYKLIVNSSDDKYLVSIPSL

SEQ ID NO: 40644 - protein, 26 aa, Artificial Sequence
  Cyclic GFR-binding peptide
  MOD_RES (1), (1): Xaa is C or S
XSKVVMRHKRLVKPTRGVYYLISTAS

SEQ ID NO: 40645 - protein, 26 aa, Artificial Sequence
  Cyclic GFR-binding peptide
DRYKKLVVKENEDFYLMSIANLETPV

SEQ ID NO: 40646 - protein, 29 aa, Artificial Sequence
  Cyclic GFR-binding peptide
ARVVMNYHYKLIVNSSDDKYLVSIPSLQT

SEQ ID NO: 40647 - protein, 29 aa, Artificial Sequence
  Cyclic GFR-binding peptide
  MOD_RES (28), (29): Xaa is C or S
GEQYNKLTPVGMDDLYLVSIASLKTPVXX

SEQ ID NO: 40648 - protein, 36 aa, Artificial Sequence; identical to SEQ ID NO: 3458
  Cyclic GFR-binding peptide
  MOD_RES (32), (32): Xaa is C or S

SEQ ID NO: 40649 - protein, 41 aa, Artificial Sequence; identical to SEQ ID NO: 3460
  Cyclic GFR-binding peptide
  MOD_RES (1), (3), (35), (36): Xaa is C or S

SEQ ID NO: 40650 - protein, 31 aa, Artificial Sequence
  Cyclic GFR-binding peptide
  MOD_RES (30), (30): Xaa is C or S
VVMNQYNKLIVNSSDDLYLVSIASLKTPAXT

SEQ ID NO: 40651 - protein, 36 aa, Artificial Sequence
  Cyclic GFR-binding peptide
  MOD_RES (30), (30): Xaa is C or S
VVMNRHKRLIVNSSDDYYLVSTASLKTPAXTPKTVH

SEQ ID NO: 40652 - protein, 29 aa, Artificial Sequence
  Cyclic GFR-binding peptide
  MOD_RES (2), (2): Xaa is C or S
GXGEVVMERHKRLVVKDYEDYYLMSTASL

SEQ ID NO: 40653 - protein, 31 aa, Artificial Sequence
  Cyclic GFR-binding peptide
  MOD_RES (27), (28): Xaa is C or S
EYHYKLVVKDYEDKYLMSIPSLETPVXXAKP

SEQ ID NO: 40654 - protein, 35 aa, Artificial Sequence; identical to SEQ ID NO: 3462
  Cyclic GFR-binding peptide
  MOD_RES (2), (34), (35): Xaa is C or S

SEQ ID NO: 40655 - protein, 24 aa, Artificial Sequence
  Cyclic GFR-binding peptide
VVMNRYKKLIVNNSSDFYLVSIAN

SEQ ID NO: 40656 - protein, 27 aa, Artificial Sequence
  Cyclic GFR-binding peptide
SKVIMYHYKLIKPTKGIKYLISIPSLD

SEQ ID NO: 40657 - protein, 33 aa, Artificial Sequence
  Cyclic GFR-binding peptide
  MOD_RES (29), (30): Xaa is C or S
VIMYHYKLIKPTKGIKYLISIPSLDQSVXXPSA

SEQ ID NO: 40658 - protein, 40 aa, Artificial Sequence; identical to SEQ ID NO: 3465
  Cyclic GFR-binding peptide
  MOD_RES (1), (3), (35), (36): Xaa is C or S

SEQ ID NO: 40659 - protein, 27 aa, Artificial Sequence
  Cyclic GFR-binding peptide
AKVVMNQYNKLIVNNSSDLYLVSIASL

SEQ ID NO: 40660 - protein, 41 aa, Artificial Sequence; identical to SEQ ID NO: 3468
  Cyclic GFR-binding peptide
  MOD_RES (2), (4), (41): Xaa is C or S

SEQ ID NO: 40661 - protein, 24 aa, Artificial Sequence
  Cyclic GFR-binding peptide
MDRYKKLVVKENEDFYLMSIANLE

SEQ ID NO: 40662 - protein, 34 aa, Artificial Sequence; identical to SEQ ID NO: 3471
  Cyclic GFR-binding peptide
  MOD_RES (1), (32), (33): Xaa is C or S

SEQ ID NO: 40663 - protein, 29 aa, Artificial Sequence
  Cyclic GFR-binding peptide
  MOD_RES (29), (29): Xaa is C or S
VMNQYNKLIVNSSDDLYLVSIASLQTPAX

SEQ ID NO: 40664 - protein, 38 aa, Artificial Sequence; identical to SEQ ID NO: 3473
  Cyclic GFR-binding peptide
  MOD_RES (2), (33), (34): Xaa is C or S

SEQ ID NO: 40665 - protein, 31 aa, Artificial Sequence
  Cyclic GFR-binding peptide
  MOD_RES (27), (28): Xaa is C or S
MRHKRLVKPKRGVYYLISTASLAQPVXXPAA

SEQ ID NO: 40666 - protein, 23 aa, Artificial Sequence
  Cyclic GFR-binding peptide
RHKRLVVKDYEDYYLMSTASLET

SEQ ID NO: 40667 - protein, 28 aa, Artificial Sequence
  Cyclic GFR-binding peptide
  MOD_RES (2), (2): Xaa is C or S
GXGEVVMERYKKLVVKDYEDFYLMSIAN

SEQ ID NO: 40668 - protein, 35 aa, Artificial Sequence
  Cyclic GFR-binding peptide
  MOD_RES (34), (34): Xaa is C or S
DELTRHKRLFIPKKRVIEYYLVSTASLQVQTPRXQ

SEQ ID NO: 40669 - protein, 28 aa, Artificial Sequence
  Cyclic GFR-binding peptide
VVMDRHKRLVVKENEDYYLMSTASLETP

SEQ ID NO: 40670 - protein, 23 aa, Artificial Sequence
  Cyclic GFR-binding peptide
VMDYHYKLVVKENEDKYLMSIPS

SEQ ID NO: 40671 - protein, 26 aa, Artificial Sequence
  Cyclic GFR-binding peptide
VVMRYKKLVKPTRGVFYLISIANLDQ

SEQ ID NO: 40672 - protein, 21 aa, Artificial Sequence
  Cyclic GFR-binding peptide
MYHYKLVKPKRGVKYLISIPS

SEQ ID NO: 40673 - protein, 32 aa, Artificial Sequence
  Cyclic GFR-binding peptide
  MOD_RES (32), (32): Xaa is C or S
AVSMGERHKRLTPVGMDDYYLVSTASLKTPVX

SEQ ID NO: 40674 - protein, 31 aa, Artificial Sequence
  Cyclic GFR-binding peptide
  MOD_RES (2), (4): Xaa is C or S
RXGXEAVSMGERYKKLTPVGMDDFYLVSIAN

SEQ ID NO: 40675 - protein, 41 aa, Artificial Sequence; identical to SEQ ID NO: 3477
  Cyclic GFR-binding peptide
  MOD_RES (2), (4), (35), (36): Xaa is C or S

SEQ ID NO: 40676 - protein, 25 aa, Artificial Sequence
  Cyclic GFR-binding peptide
RVIMRYKKLVKPKRGVFYLISIANL

SEQ ID NO: 40677 - protein, 30 aa, Artificial Sequence
  Cyclic GFR-binding peptide
  MOD_RES (1), (3): Xaa is C or S
XGXARVVMNYHYKLIVNSSDDKYLVSIPSL

SEQ ID NO: 40678 - protein, 28 aa, Artificial Sequence
  Cyclic GFR-binding peptide
  MOD_RES (1), (1): Xaa is C or S
XGEVVMEYHYKLVVKDYEDKYLMSIPSL

SEQ ID NO: 40679 - protein, 40 aa, Artificial Sequence; identical to SEQ ID NO: 3479
  Cyclic GFR-binding peptide
  MOD_RES (1), (3), (34), (35): Xaa is C or S

SEQ ID NO: 40680 - protein, 34 aa, Artificial Sequence; identical to SEQ ID NO: 3480
  Cyclic GFR-binding peptide
  MOD_RES (2), (34): Xaa is C or S

SEQ ID NO: 40681 - protein, 30 aa, Artificial Sequence
  Cyclic GFR-binding peptide
  MOD_RES (30), (30): Xaa is C or S
VVMNRYKKLIVNNSSDFYLVSIANLKTPAX

SEQ ID NO: 40682 - protein, 27 aa, Artificial Sequence
  Cyclic GFR-binding peptide
SKVVMYHYKLVKPTRGVKYLISIPSLD

SEQ ID NO: 40683 - protein, 35 aa, Artificial Sequence
  Cyclic GFR-binding peptide
  MOD_RES (1), (3): Xaa is C or S
XKXALHDELTYHYKLFIPKKRVIEKYLVSIPSLQV

SEQ ID NO: 40684 - protein, 29 aa, Artificial Sequence
  Cyclic GFR-binding peptide
  MOD_RES (2), (2): Xaa is C or S
GXSRVVMNRHKRLIVNSSDDYYLVSTASL

SEQ ID NO: 40685 - protein, 37 aa, Artificial Sequence; identical to SEQ ID NO: 3484
  Cyclic GFR-binding peptide
  MOD_RES (31), (32): Xaa is C or S

SEQ ID NO: 40686 - protein, 29 aa, Artificial Sequence
  Cyclic GFR-binding peptide
  MOD_RES (28), (29): Xaa is C or S
VMYHYKLVKPTRGVKYLISIPSLDQPVXX

SEQ ID NO: 40687 - protein, 41 aa, Artificial Sequence; identical to SEQ ID NO: 3486
  Cyclic GFR-binding peptide
  MOD_RES (2), (4), (37), (38): Xaa is C or S

SEQ ID NO: 40688 - protein, 29 aa, Artificial Sequence
  Cyclic GFR-binding peptide
VVMDRYKKLVVKENEDFYLMSIANLETPV

SEQ ID NO: 40689 - protein, 36 aa, Artificial Sequence; identical to SEQ ID NO: 3489
  Cyclic GFR-binding peptide
  MOD_RES (2), (4), (35), (36): Xaa is C or S

SEQ ID NO: 40690 - protein, 36 aa, Artificial Sequence; identical to SEQ ID NO: 3491
  Cyclic GFR-binding peptide
  MOD_RES (31), (32): Xaa is C or S

SEQ ID NO: 40691 - protein, 31 aa, Artificial Sequence; identical to SEQ ID NO: 3490
  Cyclic GFR-binding peptide

SEQ ID NO: 40692 - protein, 22 aa, Artificial Sequence
  Cyclic GFR-binding peptide
MEYHYKLVVKDYEDKYLMSIPS

SEQ ID NO: 40693 - protein, 33 aa, Artificial Sequence
  Cyclic GFR-binding peptide
  MOD_RES (27), (28): Xaa is C or S
MRYKKLIKPTKGIFYLISIANLDQSVXXPSASA

SEQ ID NO: 40694 - protein, 37 aa, Artificial Sequence
  Cyclic GFR-binding peptide
  MOD_RES (2), (4): Xaa is C or S
EXKXALHDELTRYKKLFIPKKRVIEFYLVSIANLQVQ

SEQ ID NO: 40695 - protein, 33 aa, Artificial Sequence; identical to SEQ ID NO: 3492
  Cyclic GFR-binding peptide
  MOD_RES (32), (33): Xaa is C or S

SEQ ID NO: 40696 - protein, 29 aa, Artificial Sequence
  Cyclic GFR-binding peptide
  MOD_RES (27), (27): Xaa is C or S
NYHYKLIVNSSDDKYLVSIPSLKTPAXTP

SEQ ID NO: 40697 - protein, 29 aa, Artificial Sequence
  Cyclic GFR-binding peptide
  MOD_RES (27), (28): Xaa is C or S
EQYNKLTPVGMDDLYLVSIASLKTPVXXA

SEQ ID NO: 40698 - protein, 32 aa, Artificial Sequence
  Cyclic GFR-binding peptide
  MOD_RES (30), (31): Xaa is C or S
RVIMRYKKLVKPKRGVFYLISIANLAQPVXXP

SEQ ID NO: 40699 - protein, 23 aa, Artificial Sequence
  Cyclic GFR-binding peptide
DYHYKLVVKENEDKYLMSIPSLE

SEQ ID NO: 40700 - protein, 32 aa, Artificial Sequence
  Cyclic GFR-binding peptide
  MOD_RES (29), (29): Xaa is C or S
VMNYHYKLIVNSSDDKYLVSIPSLKTPAXTPK

SEQ ID NO: 40701 - protein, 28 aa, Artificial Sequence
  Cyclic GFR-binding peptide
  MOD_RES (1), (1): Xaa is C or S
XEAVSMGEQYNKLTPVGMDDLYLVSIAS

SEQ ID NO: 40702 - protein, 33 aa, Artificial Sequence
  Cyclic GFR-binding peptide
  MOD_RES (2), (4): Xaa is C or S
HXGXAKVVMNQYNKLIVNNSSDLYLVSIASLKT

SEQ ID NO: 40703 - protein, 26 aa, Artificial Sequence
  Cyclic GFR-binding peptide
KVVMNRYKKLIVNNSSDFYLVSIANL

SEQ ID NO: 40704 - protein, 37 aa, Artificial Sequence; identical to SEQ ID NO: 3495
  Cyclic GFR-binding peptide
  MOD_RES (2), (4), (36), (37): Xaa is C or S

SEQ ID NO: 40705 - protein, 31 aa, Artificial Sequence
  Cyclic GFR-binding peptide
AVSMGERYKKLTPVGMDDFYLVSIANLKTPV

SEQ ID NO: 40706 - protein, 34 aa, Artificial Sequence
  Cyclic GFR-binding peptide
  MOD_RES (28), (29): Xaa is C or S
VMRHKRLVKPTRGVYYLISTASLDQPVXXPSASA

SEQ ID NO: 40707 - protein, 30 aa, Artificial Sequence
  Cyclic GFR-binding peptide
  MOD_RES (1), (1): Xaa is C or S
XGEVVMERHKRLVVKDYEDYYLMSTASLET

SEQ ID NO: 40708 - protein, 38 aa, Artificial Sequence; identical to SEQ ID NO: 3497
  Cyclic GFR-binding peptide
  MOD_RES (2), (4), (36), (37): Xaa is C or S

SEQ ID NO: 40709 - protein, 35 aa, Artificial Sequence
  Cyclic GFR-binding peptide
  MOD_RES (29), (30): Xaa is C or S
VMNRHKRLIVNSSDDYYLVSTASLQTPAXXPKPVT

SEQ ID NO: 40710 - protein, 29 aa, Artificial Sequence
  Cyclic GFR-binding peptide
LTYHYKLFIPKKRVIEKYLVSIPSLQVQT

SEQ ID NO: 40711 - protein, 37 aa, Artificial Sequence; identical to SEQ ID NO: 3498
  Cyclic GFR-binding peptide
  MOD_RES (1), (3): Xaa is C or S

SEQ ID NO: 40712 - protein, 36 aa, Artificial Sequence; identical to SEQ ID NO: 3499
  Cyclic GFR-binding peptide
  MOD_RES (31), (32): Xaa is C or S

SEQ ID NO: 40713 - protein, 30 aa, Artificial Sequence
  Cyclic GFR-binding peptide
  MOD_RES (26), (27): Xaa is C or S
YHYKLIVNNSSDKYLVSIPSLKTPAXXAKP

SEQ ID NO: 40714 - protein, 32 aa, Artificial Sequence
  Cyclic GFR-binding peptide
  MOD_RES (29), (30): Xaa is C or S
VMEYHYKLVVKDYEDKYLMSIPSLETPVXXAK

SEQ ID NO: 40715 - protein, 31 aa, Artificial Sequence
  Cyclic GFR-binding peptide
  MOD_RES (28), (28): Xaa is C or S
MNYHYKLIVNSSDDKYLVSIPSLKTPAXTPK

SEQ ID NO: 40716 - protein, 32 aa, Artificial Sequence
  Cyclic GFR-binding peptide
  MOD_RES (29), (30): Xaa is C or S
MGEQYNKLTPVGMDDLYLVSIASLKTPVXXAK

SEQ ID NO: 40717 - protein, 35 aa, Artificial Sequence; identical to SEQ ID NO: 3500
  Cyclic GFR-binding peptide
  MOD_RES (2), (4), (35): Xaa is C or S

SEQ ID NO: 40718 - protein, 20 aa, Artificial Sequence
  Cyclic GFR-binding peptide
YHYKLIKPTKGIKYLISIPS

SEQ ID NO: 40719 - protein, 26 aa, Artificial Sequence
  Cyclic GFR-binding peptide
VVMNRYKKLIVNNSSDFYLVSIANLK

SEQ ID NO: 40720 - protein, 35 aa, Artificial Sequence; identical to SEQ ID NO: 3501
  Cyclic GFR-binding peptide
  MOD_RES (1), (3), (35): Xaa is C or S

SEQ ID NO: 40721 - protein, 31 aa, Artificial Sequence
  Cyclic GFR-binding peptide
  MOD_RES (27), (28): Xaa is C or S
NQYNKLIVNNSSDLYLVSIASLKTPAXXAKP

SEQ ID NO: 40722 - protein, 35 aa, Artificial Sequence; identical to SEQ ID NO: 3502
  Cyclic GFR-binding peptide
  MOD_RES (2), (4), (35): Xaa is C or S

SEQ ID NO: 40723 - protein, 27 aa, Artificial Sequence
  Cyclic GFR-binding peptide
RVVMNYHYKLIVNSSDDKYLVSIPSLK

SEQ ID NO: 40724 - protein, 26 aa, Artificial Sequence
  Cyclic GFR-binding peptide
KVVMRYKKLVKPTRGVFYLISIANLD

SEQ ID NO: 40725 - protein, 39 aa, Artificial Sequence; identical to SEQ ID NO: 3504
  Cyclic GFR-binding peptide
  MOD_RES (1), (3), (34), (35): Xaa is C or S

SEQ ID NO: 40726 - protein, 39 aa, Artificial Sequence; identical to SEQ ID NO: 3505
  Cyclic GFR-binding peptide
  MOD_RES (2), (34), (35): Xaa is C or S

SEQ ID NO: 40727 - protein, 29 aa, Artificial Sequence
  Cyclic GFR-binding peptide
  MOD_RES (2), (2): Xaa is C or S
GXAKVVMNQYNKLIVNNSSDLYLVSIASL

SEQ ID NO: 40728 - protein, 39 aa, Artificial Sequence; identical to SEQ ID NO: 3507
  Cyclic GFR-binding peptide
  MOD_RES (2), (33), (34): Xaa is C or S

SEQ ID NO: 40729 - protein, 22 aa, Artificial Sequence
  Cyclic GFR-binding peptide
NRYKKLIVNNSSDFYLVSIANL

SEQ ID NO: 40730 - protein, 28 aa, Artificial Sequence
  Cyclic GFR-binding peptide
ARVVMNYHYKLIVNSSDDKYLVSIPSLQ

SEQ ID NO: 40731 - protein, 37 aa, Artificial Sequence
  Cyclic GFR-binding peptide
  MOD_RES (32), (33): Xaa is C or S
AVSMGEQYNKLTPVGMDDLYLVSIASLKTPVXXAKGV

SEQ ID NO: 40732 - protein, 22 aa, Artificial Sequence
  Cyclic GFR-binding peptide
MNRYKKLIVNNSSDFYLVSIAN

SEQ ID NO: 40733 - protein, 29 aa, Artificial Sequence
  Cyclic GFR-binding peptide
AKVVMNRYKKLIVNNSSDFYLVSIANLKT

SEQ ID NO: 40734 - protein, 28 aa, Artificial Sequence
  Cyclic GFR-binding peptide
  MOD_RES (27), (28): Xaa is C or S
NYHYKLIVNNSSDKYLVSIPSLKTPAXX

SEQ ID NO: 40735 - protein, 33 aa, Artificial Sequence
  Cyclic GFR-binding peptide
  MOD_RES (30), (31): Xaa is C or S
KVIMQYNKLIKPTKGILYLISIASLDQSVXXPS

SEQ ID NO: 40736 - protein, 40 aa, Artificial Sequence; identical to SEQ ID NO: 3510
  Cyclic GFR-binding peptide
  MOD_RES (1), (3), (35): Xaa is C or S

SEQ ID NO: 40737 - protein, 32 aa, Artificial Sequence
  Cyclic GFR-binding peptide
  MOD_RES (27), (28): Xaa is C or S
MRHKRLVKPKRGVYYLISTASLAQPVXXPAAS

SEQ ID NO: 40738 - protein, 27 aa, Artificial Sequence
  Cyclic GFR-binding peptide
SKVIMQYNKLIKPTKGILYLISIASLD

SEQ ID NO: 40739 - protein, 29 aa, Artificial Sequence
  Cyclic GFR-binding peptide
  MOD_RES (2), (4): Xaa is C or S
SXKXSRVIMQYNKLVKPKRGVLYLISIAS

SEQ ID NO: 40740 - protein, 25 aa, Artificial Sequence
  Cyclic GFR-binding peptide
SMGERHKRLTPVGMDDYYLVSTASL

SEQ ID NO: 40741 - protein, 30 aa, Artificial Sequence
  Cyclic GFR-binding peptide
ELTQYNKLFIPKKRVIELYLVSIASLQVQT

SEQ ID NO: 40742 - protein, 40 aa, Artificial Sequence; identical to SEQ ID NO: 3511
  Cyclic GFR-binding peptide
  MOD_RES (2), (4), (36), (37): Xaa is C or S

SEQ ID NO: 40743 - protein, 24 aa, Artificial Sequence
  Cyclic GFR-binding peptide
VMNRYKKLIVNNSSDFYLVSIANL

SEQ ID NO: 40744 - protein, 32 aa, Artificial Sequence
  Cyclic GFR-binding peptide
  MOD_RES (30), (31): Xaa is C or S
KVVMRHKRLVKPTRGVYYLISTASLDQPVXXP

SEQ ID NO: 40745 - protein, 34 aa, Artificial Sequence
  Cyclic GFR-binding peptide
  MOD_RES (28), (29): Xaa is C or S
GERYKKLTPVGMDDFYLVSIANLKTPVXXAKGVK

SEQ ID NO: 40746 - protein, 28 aa, Artificial Sequence
  Cyclic GFR-binding peptide
  MOD_RES (1), (3): Xaa is C or S
XKXSKVIMQYNKLIKPTKGILYLISIAS

SEQ ID NO: 40747 - protein, 37 aa, Artificial Sequence; identical to SEQ ID NO: 3515
  Cyclic GFR-binding peptide
  MOD_RES (31), (31): Xaa is C or S

SEQ ID NO: 40748 - protein, 33 aa, Artificial Sequence; identical to SEQ ID NO: 3516
  Cyclic GFR-binding peptide
  MOD_RES (1), (1): Xaa is C or S

SEQ ID NO: 40749 - protein, 31 aa, Artificial Sequence
  Cyclic GFR-binding peptide
  MOD_RES (28), (29): Xaa is C or S
MDYHYKLVVKENEDKYLMSIPSLETPVXXAK

SEQ ID NO: 40750 - protein, 33 aa, Artificial Sequence
  Cyclic GFR-binding peptide
  MOD_RES (27), (27): Xaa is C or S
NRHKRLIVNSSDDYYLVSTASLKTPAXTPKTVH

SEQ ID NO: 40751 - protein, 40 aa, Artificial Sequence; identical to SEQ ID NO: 3518
  Cyclic GFR-binding peptide
  MOD_RES (1), (34), (35): Xaa is C or S

SEQ ID NO: 40752 - protein, 29 aa, Artificial Sequence
  Cyclic GFR-binding peptide
SKVVMQYNKLVKPTRGVLYLISIASLDQP

SEQ ID NO: 40753 - protein, 34 aa, Artificial Sequence
  Cyclic GFR-binding peptide
  MOD_RES (30), (31): Xaa is C or S
VVMDRYKKLVVKENEDFYLMSIANLETPVXXAKP

SEQ ID NO: 40754 - protein, 45 aa, Artificial Sequence; identical to SEQ ID NO: 3520
  Cyclic GFR-binding peptide
  MOD_RES (2), (4), (41): Xaa is C or S

SEQ ID NO: 40755 - protein, 37 aa, Artificial Sequence; identical to SEQ ID NO: 3521
  Cyclic GFR-binding peptide
  MOD_RES (31), (32): Xaa is C or S

SEQ ID NO: 40756 - protein, 25 aa, Artificial Sequence
  Cyclic GFR-binding peptide
NQYNKLIVNNSSDLYLVSIASLKTP

SEQ ID NO: 40757 - protein, 33 aa, Artificial Sequence
  Cyclic GFR-binding peptide
  MOD_RES (2), (2): Xaa is C or S
KXALHDELTRHKRLFIPKKRVIEYYLVSTASLQ

SEQ ID NO: 40758 - protein, 22 aa, Artificial Sequence
  Cyclic GFR-binding peptide
IMRHKRLVKPKRGVYYLISTAS

SEQ ID NO: 40759 - protein, 32 aa, Artificial Sequence; identical to SEQ ID NO: 3522
  Cyclic GFR-binding peptide
  MOD_RES (2), (2): Xaa is C or S

SEQ ID NO: 40760 - protein, 36 aa, Artificial Sequence
  Cyclic GFR-binding peptide
  MOD_RES (31), (32): Xaa is C or S
VSMGERYKKLTPVGMDDFYLVSIANLKTPVXXAKGV

SEQ ID NO: 40761 - protein, 38 aa, Artificial Sequence
  Cyclic GFR-binding peptide
  MOD_RES (32), (33): Xaa is C or S
AVSMGERYKKLTPVGMDDFYLVSIANLKTPVXXAKGVK

SEQ ID NO: 40762 - protein, 38 aa, Artificial Sequence; identical to SEQ ID NO: 3523
  Cyclic GFR-binding peptide
  MOD_RES (32), (33): Xaa is C or S

SEQ ID NO: 40763 - protein, 34 aa, Artificial Sequence
  Cyclic GFR-binding peptide
  MOD_RES (28), (29): Xaa is C or S
IMRHKRLIKPTKGIYYLISTASLDQSVXXPSASA

SEQ ID NO: 40764 - protein, 28 aa, Artificial Sequence
  Cyclic GFR-binding peptide
  MOD_RES (1), (3): Xaa is C or S
XKXSRVIMQYNKLVKPKRGVLYLISIAS

SEQ ID NO: 40765 - protein, 27 aa, Artificial Sequence
  Cyclic GFR-binding peptide
  MOD_RES (26), (27): Xaa is C or S
YHYKLVVKDYEDKYLMSIPSLETPVXX

SEQ ID NO: 40766 - protein, 26 aa, Artificial Sequence
  Cyclic GFR-binding peptide
DELTQYNKLFIPKKRVIELYLVSIAS

SEQ ID NO: 40767 - protein, 35 aa, Artificial Sequence
  Cyclic GFR-binding peptide
  MOD_RES (30), (31): Xaa is C or S
RVIMQYNKLVKPKRGVLYLISIASLAQPVXXPAAS

SEQ ID NO: 40768 - protein, 30 aa, Artificial Sequence
  Cyclic GFR-binding peptide
  MOD_RES (26), (27): Xaa is C or S
YHYKLVKPKRGVKYLISIPSLAQPVXXPAA

SEQ ID NO: 40769 - protein, 30 aa, Artificial Sequence
  Cyclic GFR-binding peptide
  MOD_RES (30), (30): Xaa is C or S
VVMNYHYKLIVNNSSDKYLVSIPSLKTPAX

SEQ ID NO: 40770 - protein, 21 aa, Artificial Sequence
  Cyclic GFR-binding peptide
ERHKRLVVKDYEDYYLMSTAS

SEQ ID NO: 40771 - protein, 39 aa, Artificial Sequence; identical to SEQ ID NO: 3527
  Cyclic GFR-binding peptide
  MOD_RES (1), (3), (34), (35): Xaa is C or S

SEQ ID NO: 40772 - protein, 36 aa, Artificial Sequence; identical to SEQ ID NO: 3528
  Cyclic GFR-binding peptide

SEQ ID NO: 40773 - protein, 34 aa, Artificial Sequence
  Cyclic GFR-binding peptide
  MOD_RES (31), (31): Xaa is C or S
TRYKKLFIPKKRVIEFYLVSIANLQVQTPRXQVN

SEQ ID NO: 40774 - protein, 30 aa, Artificial Sequence
  Cyclic GFR-binding peptide
  MOD_RES (26), (27): Xaa is C or S
QYNKLIVNNSSDLYLVSIASLKTPAXXAKP

SEQ ID NO: 40775 - protein, 34 aa, Artificial Sequence; identical to SEQ ID NO: 3530
  Cyclic GFR-binding peptide
  MOD_RES (1), (3): Xaa is C or S

SEQ ID NO: 40776 - protein, 22 aa, Artificial Sequence
  Cyclic GFR-binding peptide
RYKKLVKPKRGVFYLISIANLA

SEQ ID NO: 40777 - protein, 25 aa, Artificial Sequence
  Cyclic GFR-binding peptide
NYHYKLIVNSSDDKYLVSIPSLQTP

SEQ ID NO: 40778 - protein, 32 aa, Artificial Sequence
  Cyclic GFR-binding peptide
  MOD_RES (28), (28): Xaa is C or S
MNYHYKLIVNSSDDKYLVSIPSLKTPAXTPKT

SEQ ID NO: 40779 - protein, 21 aa, Artificial Sequence
  Cyclic GFR-binding peptide
MQYNKLVKPTRGVLYLISIAS

SEQ ID NO: 40780 - protein, 37 aa, Artificial Sequence; identical to SEQ ID NO: 3537
  Cyclic GFR-binding peptide
  MOD_RES (31), (32): Xaa is C or S

SEQ ID NO: 40781 - protein, 35 aa, Artificial Sequence; identical to SEQ ID NO: 3538
  Cyclic GFR-binding peptide
  MOD_RES (2), (4): Xaa is C or S

SEQ ID NO: 40782 - protein, 32 aa, Artificial Sequence
  Cyclic GFR-binding peptide
LHDELTYHYKLFIPKKRVIEKYLVSIPSLQVQ

SEQ ID NO: 40783 - protein, 34 aa, Artificial Sequence
  Cyclic GFR-binding peptide
  MOD_RES (2), (4): Xaa is C or S
RXGXEAVSMGERHKRLTPVGMDDYYLVSTASLKT

SEQ ID NO: 40784 - protein, 25 aa, Artificial Sequence
  Cyclic GFR-binding peptide
SKVVMYHYKLVKPTRGVKYLISIPS

SEQ ID NO: 40785 - protein, 25 aa, Artificial Sequence
  Cyclic GFR-binding peptide
IMRHKRLVKPKRGVYYLISTASLAQ

SEQ ID NO: 40786 - protein, 28 aa, Artificial Sequence
  Cyclic GFR-binding peptide
  MOD_RES (1), (1): Xaa is C or S
XSKVIMQYNKLIKPTKGILYLISIASLD

SEQ ID NO: 40787 - protein, 31 aa, Artificial Sequence
  Cyclic GFR-binding peptide
  MOD_RES (30), (31): Xaa is C or S
VVMNQYNKLIVNSSDDLYLVSIASLKTPAXX

SEQ ID NO: 40788 - protein, 38 aa, Artificial Sequence; identical to SEQ ID NO: 3543
  Cyclic GFR-binding peptide
  MOD_RES (2), (34), (35): Xaa is C or S

SEQ ID NO: 40789 - protein, 32 aa, Artificial Sequence
  Cyclic GFR-binding peptide
  MOD_RES (30), (31): Xaa is C or S
KVIMQYNKLIKPTKGILYLISIASLDQSVXXP

SEQ ID NO: 40790 - protein, 31 aa, Artificial Sequence
  Cyclic GFR-binding peptide
  MOD_RES (30), (31): Xaa is C or S
KVIMQYNKLIKPTKGILYLISIASLDQSVXX

SEQ ID NO: 40791 - protein, 31 aa, Artificial Sequence
  Cyclic GFR-binding peptide
  MOD_RES (2), (2): Xaa is C or S
KXSKVVMQYNKLVKPTRGVLYLISIASLDQP

SEQ ID NO: 40792 - protein, 28 aa, Artificial Sequence
  Cyclic GFR-binding peptide
ELTQYNKLFIPKKRVIELYLVSIASLQV

SEQ ID NO: 40793 - protein, 33 aa, Artificial Sequence
  Cyclic GFR-binding peptide
  MOD_RES (31), (32): Xaa is C or S
VSMGERYKKLTPVGMDDFYLVSIANLKTPVXXA

SEQ ID NO: 40794 - protein, 29 aa, Artificial Sequence
  Cyclic GFR-binding peptide
SMGEQYNKLTPVGMDDLYLVSIASLKTPV

SEQ ID NO: 40795 - protein, 33 aa, Artificial Sequence
  Cyclic GFR-binding peptide
  MOD_RES (27), (28): Xaa is C or S
MYHYKLVKPKRGVKYLISIPSLAQPVXXPAASA

SEQ ID NO: 40796 - protein, 36 aa, Artificial Sequence; identical to SEQ ID NO: 3547
  Cyclic GFR-binding peptide

SEQ ID NO: 40797 - protein, 31 aa, Artificial Sequence
  Cyclic GFR-binding peptide
  MOD_RES (1), (3): Xaa is C or S
XGXGEVVMERHKRLVVKDYEDYYLMSTASLE

SEQ ID NO: 40798 - protein, 38 aa, Artificial Sequence; identical to SEQ ID NO: 3546
  Cyclic GFR-binding peptide
  MOD_RES (2), (34), (35): Xaa is C or S

SEQ ID NO: 40799 - protein, 23 aa, Artificial Sequence
  Cyclic GFR-binding peptide
GERYKKLTPVGMDDFYLVSIANL

SEQ ID NO: 40800 - protein, 40 aa, Artificial Sequence; identical to SEQ ID NO: 3548
  Cyclic GFR-binding peptide
  MOD_RES (1), (3), (35), (36): Xaa is C or S

SEQ ID NO: 40801 - protein, 28 aa, Artificial Sequence
  Cyclic GFR-binding peptide
TYHYKLFIPKKRVIEKYLVSIPSLQVQT

SEQ ID NO: 40802 - protein, 31 aa, Artificial Sequence; identical to SEQ ID NO: 3549
  Cyclic GFR-binding peptide
  MOD_RES (1), (1): Xaa is C or S

SEQ ID NO: 40803 - protein, 44 aa, Artificial Sequence; identical to SEQ ID NO: 3550
  Cyclic GFR-binding peptide
  MOD_RES (2), (4), (41): Xaa is C or S

SEQ ID NO: 40804 - protein, 31 aa, Artificial Sequence
  Cyclic GFR-binding peptide
  MOD_RES (28), (29): Xaa is C or S
IMYHYKLIKPTKGIKYLISIPSLDQSVXXPS

SEQ ID NO: 40805 - protein, 34 aa, Artificial Sequence
  Cyclic GFR-binding peptide
  MOD_RES (32), (32): Xaa is C or S
LTYHYKLFIPKKRVIEKYLVSIPSLQVQTPRXQV

SEQ ID NO: 40806 - protein, 35 aa, Artificial Sequence
  Cyclic GFR-binding peptide
  MOD_RES (32), (33): Xaa is C or S
AVSMGEQYNKLTPVGMDDLYLVSIASLKTPVXXAK

SEQ ID NO: 40807 - protein, 30 aa, Artificial Sequence
  Cyclic GFR-binding peptide
  MOD_RES (27), (28): Xaa is C or S
MYHYKLVKPKRGVKYLISIPSLAQPVXXPA

SEQ ID NO: 40808 - protein, 34 aa, Artificial Sequence; identical to SEQ ID NO: 3553
  Cyclic GFR-binding peptide
  MOD_RES (1), (34): Xaa is C or S

SEQ ID NO: 40809 - protein, 33 aa, Artificial Sequence
  Cyclic GFR-binding peptide
  MOD_RES (1), (1): Xaa is C or S
XALHDELTQYNKLFIPKKRVIELYLVSIASLQV

SEQ ID NO: 40810 - protein, 26 aa, Artificial Sequence
  Cyclic GFR-binding peptide
MNRYKKLIVNNSSDFYLVSIANLKTP

SEQ ID NO: 40811 - protein, 41 aa, Artificial Sequence; identical to SEQ ID NO: 3554
  Cyclic GFR-binding peptide
  MOD_RES (2), (4), (36), (37): Xaa is C or S

SEQ ID NO: 40812 - protein, 32 aa, Artificial Sequence
  Cyclic GFR-binding peptide
  MOD_RES (27), (28): Xaa is C or S
MYHYKLVKPTRGVKYLISIPSLDQPVXXPSAS

SEQ ID NO: 40813 - protein, 31 aa, Artificial Sequence
  Cyclic GFR-binding peptide
DELTRYKKLFIPKKRVIEFYLVSIANLQVQT

SEQ ID NO: 40814 - protein, 33 aa, Artificial Sequence
  Cyclic GFR-binding peptide
  MOD_RES (30), (31): Xaa is C or S
VVMEYHYKLVVKDYEDKYLMSIPSLETPVXXAK

SEQ ID NO: 40815 - protein, 35 aa, Artificial Sequence; identical to SEQ ID NO: 3555
  Cyclic GFR-binding peptide
  MOD_RES (1), (3), (35): Xaa is C or S

SEQ ID NO: 40816 - protein, 30 aa, Artificial Sequence
  Cyclic GFR-binding peptide
  MOD_RES (1), (1): Xaa is C or S
XSKVVMRHKRLVKPTRGVYYLISTASLDQP

SEQ ID NO: 40817 - protein, 35 aa, Artificial Sequence; identical to SEQ ID NO: 3557
  Cyclic GFR-binding peptide
  MOD_RES (1), (3), (35): Xaa is C or S

SEQ ID NO: 40818 - protein, 35 aa, Artificial Sequence
  Cyclic GFR-binding peptide
  MOD_RES (29), (30): Xaa is C or S
VIMYHYKLVKPKRGVKYLISIPSLAQPVXXPAASA

SEQ ID NO: 40819 - protein, 34 aa, Artificial Sequence
  Cyclic GFR-binding peptide
  MOD_RES (28), (29): Xaa is C or S
MERYKKLVVKDYEDFYLMSIANLETPVXXAKPIS

SEQ ID NO: 40820 - protein, 37 aa, Artificial Sequence; identical to SEQ ID NO: 3558
  Cyclic GFR-binding peptide
  MOD_RES (1), (3), (35), (36): Xaa is C or S

SEQ ID NO: 40821 - protein, 30 aa, Artificial Sequence
  Cyclic GFR-binding peptide
  MOD_RES (27), (28): Xaa is C or S
DRYKKLVVKENEDFYLMSIANLETPVXXAK

SEQ ID NO: 40822 - protein, 33 aa, Artificial Sequence; identical to SEQ ID NO: 3559
  Cyclic GFR-binding peptide
  MOD_RES (1), (33): Xaa is C or S

SEQ ID NO: 40823 - protein, 31 aa, Artificial Sequence; identical to SEQ ID NO: 3561
  Cyclic GFR-binding peptide

SEQ ID NO: 40824 - protein, 26 aa, Artificial Sequence
  Cyclic GFR-binding peptide
SMGEQYNKLTPVGMDDLYLVSIASLK

SEQ ID NO: 40825 - protein, 34 aa, Artificial Sequence
  Cyclic GFR-binding peptide
  MOD_RES (2), (4): Xaa is C or S
EXKXALHDELTQYNKLFIPKKRVIELYLVSIASL

SEQ ID NO: 40826 - protein, 40 aa, Artificial Sequence; identical to SEQ ID NO: 3564
  Cyclic GFR-binding peptide
  MOD_RES (2), (4), (35), (36): Xaa is C or S

SEQ ID NO: 40827 - protein, 31 aa, Artificial Sequence
  Cyclic GFR-binding peptide
  MOD_RES (30), (31): Xaa is C or S
VVMNQYNKLIVNSSDDLYLVSIASLQTPAXX

SEQ ID NO: 40828 - protein, 27 aa, Artificial Sequence
  Cyclic GFR-binding peptide
  MOD_RES (26), (27): Xaa is C or S
QYNKLVKPTRGVLYLISIASLDQPVXX

SEQ ID NO: 40829 - protein, 25 aa, Artificial Sequence
  Cyclic GFR-binding peptide
MRYKKLIKPTKGIFYLISIANLDQS

SEQ ID NO: 40830 - protein, 35 aa, Artificial Sequence; identical to SEQ ID NO: 3567
  Cyclic GFR-binding peptide
  MOD_RES (2), (4): Xaa is C or S

SEQ ID NO: 40831 - protein, 31 aa, Artificial Sequence
  Cyclic GFR-binding peptide
  MOD_RES (2), (4): Xaa is C or S
RXGXGEVVMDRHKRLVVKENEDYYLMSTASL

SEQ ID NO: 40832 - protein, 29 aa, Artificial Sequence
  Cyclic GFR-binding peptide
  MOD_RES (1), (1): Xaa is C or S
XARVVMNRHKRLIVNSSDDYYLVSTASLQ

SEQ ID NO: 40833 - protein, 42 aa, Artificial Sequence; identical to SEQ ID NO: 3568
  Cyclic GFR-binding peptide
  MOD_RES (2), (4), (41): Xaa is C or S

SEQ ID NO: 40834 - protein, 34 aa, Artificial Sequence
  Cyclic GFR-binding peptide
  MOD_RES (28), (28): Xaa is C or S
MNQYNKLIVNSSDDLYLVSIASLKTPAXTPKTVH

SEQ ID NO: 40835 - protein, 35 aa, Artificial Sequence; identical to SEQ ID NO: 3571
  Cyclic GFR-binding peptide
  MOD_RES (1), (32), (33): Xaa is C or S

SEQ ID NO: 40836 - protein, 36 aa, Artificial Sequence; identical to SEQ ID NO: 3572
  Cyclic GFR-binding peptide
  MOD_RES (1), (3), (34), (35): Xaa is C or S

SEQ ID NO: 40837 - protein, 27 aa, Artificial Sequence
  Cyclic GFR-binding peptide
HDELTQYNKLFIPKKRVIELYLVSIAS

SEQ ID NO: 40838 - protein, 33 aa, Artificial Sequence; identical to SEQ ID NO: 3574
  Cyclic GFR-binding peptide
  MOD_RES (2), (2): Xaa is C or S

SEQ ID NO: 40839 - protein, 38 aa, Artificial Sequence; identical to SEQ ID NO: 3577
  Cyclic GFR-binding peptide
  MOD_RES (2), (33), (34): Xaa is C or S

SEQ ID NO: 40840 - protein, 22 aa, Artificial Sequence
  Cyclic GFR-binding peptide
MNQYNKLIVNNSSDLYLVSIAS

SEQ ID NO: 40841 - protein, 30 aa, Artificial Sequence
  Cyclic GFR-binding peptide
  MOD_RES (28), (29): Xaa is C or S
IMYHYKLIKPTKGIKYLISIPSLDQSVXXP

SEQ ID NO: 40842 - protein, 29 aa, Artificial Sequence
  Cyclic GFR-binding peptide
RVVMNQYNKLIVNSSDDLYLVSIASLKTP

SEQ ID NO: 40843 - protein, 23 aa, Artificial Sequence
  Cyclic GFR-binding peptide
MNQYNKLIVNNSSDLYLVSIASL

SEQ ID NO: 40844 - protein, 40 aa, Artificial Sequence; identical to SEQ ID NO: 3578
  Cyclic GFR-binding peptide
  MOD_RES (1), (3), (35), (36): Xaa is C or S

SEQ ID NO: 40845 - protein, 31 aa, Artificial Sequence
  Cyclic GFR-binding peptide
  MOD_RES (26), (27): Xaa is C or S
YHYKLIVNSSDDKYLVSIPSLKTPAXXPKPV

SEQ ID NO: 40846 - protein, 38 aa, Artificial Sequence; identical to SEQ ID NO: 3580
  Cyclic GFR-binding peptide
  MOD_RES (2), (4), (36), (37): Xaa is C or S

SEQ ID NO: 40847 - protein, 24 aa, Artificial Sequence
  Cyclic GFR-binding peptide
MRYKKLVKPTRGVFYLISIANLDQ

SEQ ID NO: 40848 - protein, 23 aa, Artificial Sequence
  Cyclic GFR-binding peptide
MQYNKLVKPTRGVLYLISIASLD

SEQ ID NO: 40849 - protein, 33 aa, Artificial Sequence
  Cyclic GFR-binding peptide
  MOD_RES (27), (28): Xaa is C or S
NYHYKLIVNSSDDKYLVSIPSLKTPAXXPKPVY

SEQ ID NO: 40850 - protein, 29 aa, Artificial Sequence
  Cyclic GFR-binding peptide
  MOD_RES (27), (28): Xaa is C or S
DRYKKLVVKENEDFYLMSIANLETPVXXA

SEQ ID NO: 40851 - protein, 30 aa, Artificial Sequence
  Cyclic GFR-binding peptide
  MOD_RES (1), (3): Xaa is C or S
XKXSKVIMRYKKLIKPTKGIFYLISIANLD

SEQ ID NO: 40852 - protein, 29 aa, Artificial Sequence
  Cyclic GFR-binding peptide
  MOD_RES (29), (29): Xaa is C or S
VMEYHYKLVVKDYEDKYLMSIPSLETPVX

SEQ ID NO: 40853 - protein, 39 aa, Artificial Sequence; identical to SEQ ID NO: 3582
  Cyclic GFR-binding peptide
  MOD_RES (1), (33), (34): Xaa is C or S

SEQ ID NO: 40854 - protein, 25 aa, Artificial Sequence
  Cyclic GFR-binding peptide
SKVVMQYNKLVKPTRGVLYLISIAS

SEQ ID NO: 40855 - protein, 35 aa, Artificial Sequence; identical to SEQ ID NO: 3584
  Cyclic GFR-binding peptide
  MOD_RES (2), (33), (34): Xaa is C or S

SEQ ID NO: 40856 - protein, 31 aa, Artificial Sequence; identical to SEQ ID NO: 3585
  Cyclic GFR-binding peptide

SEQ ID NO: 40857 - protein, 38 aa, Artificial Sequence; identical to SEQ ID NO: 3586
  Cyclic GFR-binding peptide
  MOD_RES (1), (32), (33): Xaa is C or S

SEQ ID NO: 40858 - protein, 34 aa, Artificial Sequence; identical to SEQ ID NO: 3587
  Cyclic GFR-binding peptide
  MOD_RES (1), (3): Xaa is C or S

SEQ ID NO: 40859 - protein, 35 aa, Artificial Sequence; identical to SEQ ID NO: 3588
  Cyclic GFR-binding peptide
  MOD_RES (31), (32): Xaa is C or S

SEQ ID NO: 40860 - protein, 35 aa, Artificial Sequence; identical to SEQ ID NO: 3589
  Cyclic GFR-binding peptide
  MOD_RES (2), (33), (34): Xaa is C or S

SEQ ID NO: 40861 - protein, 24 aa, Artificial Sequence
  Cyclic GFR-binding peptide
VVMYHYKLVKPTRGVKYLISIPSL

SEQ ID NO: 40862 - protein, 31 aa, Artificial Sequence
  Cyclic GFR-binding peptide
  MOD_RES (29), (30): Xaa is C or S
MGEQYNKLTPVGMDDLYLVSIASLKTPVXXA

SEQ ID NO: 40863 - protein, 29 aa, Artificial Sequence
  Cyclic GFR-binding peptide
GEVVMDRHKRLVVKENEDYYLMSTASLET

SEQ ID NO: 40864 - protein, 30 aa, Artificial Sequence
  Cyclic GFR-binding peptide
  MOD_RES (1), (3): Xaa is C or S
XKXSKVVMRYKKLVKPTRGVFYLISIANLD

SEQ ID NO: 40865 - protein, 36 aa, Artificial Sequence
  Cyclic GFR-binding peptide
  MOD_RES (30), (31): Xaa is C or S
KVVMRHKRLVKPTRGVYYLISTASLDQPVXXPSASA

SEQ ID NO: 40866 - protein, 32 aa, Artificial Sequence
  Cyclic GFR-binding peptide
  MOD_RES (28), (29): Xaa is C or S
MNQYNKLIVNSSDDLYLVSIASLQTPAXXPKP

SEQ ID NO: 40867 - protein, 25 aa, Artificial Sequence
  Cyclic GFR-binding peptide
TRHKRLFIPKKRVIEYYLVSTASLQ

SEQ ID NO: 40868 - protein, 27 aa, Artificial Sequence
  Cyclic GFR-binding peptide
RVIMRYKKLVKPKRGVFYLISIANLAQ

SEQ ID NO: 40869 - protein, 31 aa, Artificial Sequence
  Cyclic GFR-binding peptide
  MOD_RES (27), (28): Xaa is C or S
NYHYKLIVNSSDDKYLVSIPSLQTPAXXPKP

SEQ ID NO: 40870 - protein, 28 aa, Artificial Sequence
  Cyclic GFR-binding peptide
VVMNRYKKLIVNNSSDFYLVSIANLKTP

SEQ ID NO: 40871 - protein, 32 aa, Artificial Sequence; identical to SEQ ID NO: 3592
  Cyclic GFR-binding peptide
  MOD_RES (1), (1): Xaa is C or S

SEQ ID NO: 40872 - protein, 33 aa, Artificial Sequence
  Cyclic GFR-binding peptide
  MOD_RES (2), (4): Xaa is C or S
RXGXGEVVMDRHKRLVVKENEDYYLMSTASLET

SEQ ID NO: 40873 - protein, 30 aa, Artificial Sequence
  Cyclic GFR-binding peptide
  MOD_RES (1), (3): Xaa is C or S
XGXAKVVMNQYNKLIVNNSSDLYLVSIASL

SEQ ID NO: 40874 - protein, 35 aa, Artificial Sequence; identical to SEQ ID NO: 3594
  Cyclic GFR-binding peptide
  MOD_RES (2), (34), (35): Xaa is C or S

SEQ ID NO: 40875 - protein, 32 aa, Artificial Sequence
  Cyclic GFR-binding peptide
DELTRHKRLFIPKKRVIEYYLVSTASLQVQTP

SEQ ID NO: 40876 - protein, 34 aa, Artificial Sequence
  Cyclic GFR-binding peptide
  MOD_RES (33), (33): Xaa is C or S
ELTYHYKLFIPKKRVIEKYLVSIPSLQVQTPRXQ

SEQ ID NO: 40877 - protein, 31 aa, Artificial Sequence
  Cyclic GFR-binding peptide
  MOD_RES (28), (29): Xaa is C or S
MERYKKLVVKDYEDFYLMSIANLETPVXXAK

SEQ ID NO: 40878 - protein, 35 aa, Artificial Sequence
  Cyclic GFR-binding peptide
  MOD_RES (30), (31): Xaa is C or S
KVIMRYKKLIKPTKGIFYLISIANLDQSVXXPSAS

SEQ ID NO: 40879 - protein, 25 aa, Artificial Sequence
  Cyclic GFR-binding peptide
RYKKLFIPKKRVIEFYLVSIANLQV

SEQ ID NO: 40880 - protein, 35 aa, Artificial Sequence
  Cyclic GFR-binding peptide
  MOD_RES (32), (33): Xaa is C or S
AVSMGERYKKLTPVGMDDFYLVSIANLKTPVXXAK

SEQ ID NO: 40881 - protein, 25 aa, Artificial Sequence
  Cyclic GFR-binding peptide
MRYKKLVKPTRGVFYLISIANLDQP

SEQ ID NO: 40882 - protein, 29 aa, Artificial Sequence
  Cyclic GFR-binding peptide
RVVMNYHYKLIVNSSDDKYLVSIPSLKTP

SEQ ID NO: 40883 - protein, 29 aa, Artificial Sequence
  Cyclic GFR-binding peptide
  MOD_RES (1), (1): Xaa is C or S
XSKVIMRYKKLIKPTKGIFYLISIANLDQ

SEQ ID NO: 40884 - protein, 36 aa, Artificial Sequence; identical to SEQ ID NO: 3598
  Cyclic GFR-binding peptide
  MOD_RES (32), (33): Xaa is C or S

SEQ ID NO: 40885 - protein, 34 aa, Artificial Sequence
  Cyclic GFR-binding peptide
  MOD_RES (2), (4): Xaa is C or S
RXGXGEVVMDRYKKLVVKENEDFYLMSIANLETP

SEQ ID NO: 40886 - protein, 31 aa, Artificial Sequence
  Cyclic GFR-binding peptide
  MOD_RES (2), (4): Xaa is C or S
SXKXSKVVMRYKKLVKPTRGVFYLISIANLD

SEQ ID NO: 40887 - protein, 26 aa, Artificial Sequence
  Cyclic GFR-binding peptide
DYHYKLVVKENEDKYLMSIPSLETPV

SEQ ID NO: 40888 - protein, 38 aa, Artificial Sequence; identical to SEQ ID NO: 3599
  Cyclic GFR-binding peptide
  MOD_RES (1), (33), (34): Xaa is C or S

SEQ ID NO: 40889 - protein, 36 aa, Artificial Sequence
  Cyclic GFR-binding peptide
  MOD_RES (2), (4): Xaa is C or S
EXKXALHDELTYHYKLFIPKKRVIEKYLVSIPSLQV

SEQ ID NO: 40890 - protein, 30 aa, Artificial Sequence
  Cyclic GFR-binding peptide
  MOD_RES (28), (29): Xaa is C or S
VMQYNKLVKPTRGVLYLISIASLDQPVXXP

SEQ ID NO: 40891 - protein, 39 aa, Artificial Sequence; identical to SEQ ID NO: 3600
  Cyclic GFR-binding peptide
  MOD_RES (2), (34): Xaa is C or S

SEQ ID NO: 40892 - protein, 39 aa, Artificial Sequence; identical to SEQ ID NO: 3601
  Cyclic GFR-binding peptide
  MOD_RES (35), (35): Xaa is C or S

SEQ ID NO: 40893 - protein, 32 aa, Artificial Sequence
  Cyclic GFR-binding peptide
  MOD_RES (2), (4): Xaa is C or S
SXKXSKVIMYHYKLIKPTKGIKYLISIPSLDQ

SEQ ID NO: 40894 - protein, 39 aa, Artificial Sequence; identical to SEQ ID NO: 3602
  Cyclic GFR-binding peptide
  MOD_RES (37), (37): Xaa is C or S

SEQ ID NO: 40895 - protein, 32 aa, Artificial Sequence
  Cyclic GFR-binding peptide
  MOD_RES (2), (2): Xaa is C or S
KXALHDELTRHKRLFIPKKRVIEYYLVSTASL

SEQ ID NO: 40896 - protein, 29 aa, Artificial Sequence
  Cyclic GFR-binding peptide
  MOD_RES (29), (29): Xaa is C or S
VIMYHYKLIKPTKGIKYLISIPSLDQSVX

SEQ ID NO: 40897 - protein, 27 aa, Artificial Sequence
  Cyclic GFR-binding peptide
ELTRHKRLFIPKKRVIEYYLVSTASLQ

SEQ ID NO: 40898 - protein, 27 aa, Artificial Sequence
  Cyclic GFR-binding peptide
SKVVMRHKRLVKPTRGVYYLISTASLD

SEQ ID NO: 40899 - protein, 28 aa, Artificial Sequence
  Cyclic GFR-binding peptide
  MOD_RES (28), (28): Xaa is C or S
MNYHYKLIVNSSDDKYLVSIPSLQTPAX

SEQ ID NO: 40900 - protein, 35 aa, Artificial Sequence; identical to SEQ ID NO: 3604
  Cyclic GFR-binding peptide
  MOD_RES (1), (33): Xaa is C or S

SEQ ID NO: 40901 - protein, 26 aa, Artificial Sequence
  Cyclic GFR-binding peptide
ELTYHYKLFIPKKRVIEKYLVSIPSL

SEQ ID NO: 40902 - protein, 40 aa, Artificial Sequence; identical to SEQ ID NO: 3605
  Cyclic GFR-binding peptide
  MOD_RES (2), (34), (35): Xaa is C or S

SEQ ID NO: 40903 - protein, 34 aa, Artificial Sequence; identical to SEQ ID NO: 3606
  Cyclic GFR-binding peptide
  MOD_RES (2), (33), (34): Xaa is C or S

SEQ ID NO: 40904 - protein, 27 aa, Artificial Sequence
  Cyclic GFR-binding peptide
VMNYHYKLIVNSSDDKYLVSIPSLQTP

SEQ ID NO: 40905 - protein, 31 aa, Artificial Sequence
  Cyclic GFR-binding peptide
  MOD_RES (31), (31): Xaa is C or S
TYHYKLFIPKKRVIEKYLVSIPSLQVQTPRX

SEQ ID NO: 40906 - protein, 29 aa, Artificial Sequence
  Cyclic GFR-binding peptide
  MOD_RES (26), (27): Xaa is C or S
QYNKLTPVGMDDLYLVSIASLKTPVXXAK

SEQ ID NO: 40907 - protein, 28 aa, Artificial Sequence
  Cyclic GFR-binding peptide
SKVIMQYNKLIKPTKGILYLISIASLDQ

SEQ ID NO: 40908 - protein, 34 aa, Artificial Sequence
  Cyclic GFR-binding peptide
  MOD_RES (29), (30): Xaa is C or S
VVMRYKKLVKPTRGVFYLISIANLDQPVXXPSAS

SEQ ID NO: 40909 - protein, 32 aa, Artificial Sequence
  Cyclic GFR-binding peptide
  MOD_RES (30), (31): Xaa is C or S
SMGERHKRLTPVGMDDYYLVSTASLKTPVXXA

SEQ ID NO: 40910 - protein, 33 aa, Artificial Sequence
  Cyclic GFR-binding peptide
  MOD_RES (2), (4): Xaa is C or S
HXGXAKVVMNRYKKLIVNNSSDFYLVSIANLKT

SEQ ID NO: 40911 - protein, 40 aa, Artificial Sequence; identical to SEQ ID NO: 3611
  Cyclic GFR-binding peptide
  MOD_RES (36), (36): Xaa is C or S

SEQ ID NO: 40912 - protein, 26 aa, Artificial Sequence
  Cyclic GFR-binding peptide
  MOD_RES (1), (1): Xaa is C or S
XSRVIMRHKRLVKPKRGVYYLISTAS

SEQ ID NO: 40913 - protein, 37 aa, Artificial Sequence; identical to SEQ ID NO: 3612
  Cyclic GFR-binding peptide
  MOD_RES (37), (37): Xaa is C or S

SEQ ID NO: 40914 - protein, 29 aa, Artificial Sequence
  Cyclic GFR-binding peptide
  MOD_RES (26), (27): Xaa is C or S
YHYKLIKPTKGIKYLISIPSLDQSVXXPS

SEQ ID NO: 40915 - protein, 22 aa, Artificial Sequence
  Cyclic GFR-binding peptide
MNRHKRLIVNSSDDYYLVSTAS

SEQ ID NO: 40916 - protein, 32 aa, Artificial Sequence
  Cyclic GFR-binding peptide
  MOD_RES (26), (27): Xaa is C or S
RHKRLVKPTRGVYYLISTASLDQPVXXPSASA

SEQ ID NO: 40917 - protein, 33 aa, Artificial Sequence
  Cyclic GFR-binding peptide
  MOD_RES (27), (27): Xaa is C or S
NQYNKLIVNSSDDLYLVSIASLKTPAXTPKTVH

SEQ ID NO: 40918 - protein, 32 aa, Artificial Sequence
  Cyclic GFR-binding peptide
  MOD_RES (32), (32): Xaa is C or S
LTRYKKLFIPKKRVIEFYLVSIANLQVQTPRX

SEQ ID NO: 40919 - protein, 31 aa, Artificial Sequence; identical to SEQ ID NO: 3613
  Cyclic GFR-binding peptide
  MOD_RES (31), (31): Xaa is C or S

SEQ ID NO: 40920 - protein, 25 aa, Artificial Sequence
  Cyclic GFR-binding peptide
MNQYNKLIVNSSDDLYLVSIASLKT

SEQ ID NO: 40921 - protein, 36 aa, Artificial Sequence; identical to SEQ ID NO: 3615
  Cyclic GFR-binding peptide
  MOD_RES (1), (3), (34), (35): Xaa is C or S

SEQ ID NO: 40922 - protein, 27 aa, Artificial Sequence
  Cyclic GFR-binding peptide
AVSMGEQYNKLTPVGMDDLYLVSIASL

SEQ ID NO: 40923 - protein, 37 aa, Artificial Sequence; identical to SEQ ID NO: 3616
  Cyclic GFR-binding peptide
  MOD_RES (2), (34), (35): Xaa is C or S

SEQ ID NO: 40924 - protein, 30 aa, Artificial Sequence
  Cyclic GFR-binding peptide
LTRYKKLFIPKKRVIEFYLVSIANLQVQTP

SEQ ID NO: 40925 - protein, 35 aa, Artificial Sequence
  Cyclic GFR-binding peptide
  MOD_RES (30), (31): Xaa is C or S
VVMNYHYKLIVNSSDDKYLVSIPSLQTPAXXPKPV

SEQ ID NO: 40926 - protein, 39 aa, Artificial Sequence; identical to SEQ ID NO: 3618
  Cyclic GFR-binding peptide
  MOD_RES (2), (39): Xaa is C or S

SEQ ID NO: 40927 - protein, 30 aa, Artificial Sequence
  Cyclic GFR-binding peptide
  MOD_RES (1), (3): Xaa is C or S
XGXSRVVMNYHYKLIVNSSDDKYLVSIPSL

SEQ ID NO: 40928 - protein, 34 aa, Artificial Sequence; identical to SEQ ID NO: 3622
  Cyclic GFR-binding peptide
  MOD_RES (31), (32): Xaa is C or S

SEQ ID NO: 40929 - protein, 36 aa, Artificial Sequence
  Cyclic GFR-binding peptide
  MOD_RES (30), (31): Xaa is C or S
KVIMRYKKLIKPTKGIFYLISIANLDQSVXXPSASA

SEQ ID NO: 40930 - protein, 30 aa, Artificial Sequence
  Cyclic GFR-binding peptide
  MOD_RES (28), (29): Xaa is C or S
MNQYNKLIVNNSSDLYLVSIASLKTPAXXA

SEQ ID NO: 40931 - protein, 32 aa, Artificial Sequence
  Cyclic GFR-binding peptide
  MOD_RES (2), (2): Xaa is C or S
GXSRVVMNYHYKLIVNSSDDKYLVSIPSLKTP

SEQ ID NO: 40932 - protein, 25 aa, Artificial Sequence
  Cyclic GFR-binding peptide
QYNKLVKPTRGVLYLISIASLDQPV

SEQ ID NO: 40933 - protein, 33 aa, Artificial Sequence
  Cyclic GFR-binding peptide
  MOD_RES (2), (2): Xaa is C or S
GXEAVSMGERHKRLTPVGMDDYYLVSTASLKTP

SEQ ID NO: 40934 - protein, 33 aa, Artificial Sequence
  Cyclic GFR-binding peptide
  MOD_RES (27), (28): Xaa is C or S
NRHKRLIVNSSDDYYLVSTASLQTPAXXPKPVT

SEQ ID NO: 40935 - protein, 28 aa, Artificial Sequence
  Cyclic GFR-binding peptide
  MOD_RES (1), (1): Xaa is C or S
XARVVMNRHKRLIVNSSDDYYLVSTASL

SEQ ID NO: 40936 - protein, 31 aa, Artificial Sequence
  Cyclic GFR-binding peptide
  MOD_RES (29), (30): Xaa is C or S
VMNRYKKLIVNNSSDFYLVSIANLKTPAXXA

SEQ ID NO: 40937 - protein, 32 aa, Artificial Sequence
  Cyclic GFR-binding peptide
  MOD_RES (26), (27): Xaa is C or S
RYKKLIKPTKGIFYLISIANLDQSVXXPSASA

SEQ ID NO: 40938 - protein, 38 aa, Artificial Sequence; identical to SEQ ID NO: 3627
  Cyclic GFR-binding peptide
  MOD_RES (1), (3), (35), (36): Xaa is C or S

SEQ ID NO: 40939 - protein, 33 aa, Artificial Sequence; identical to SEQ ID NO: 3628
  Cyclic GFR-binding peptide
  MOD_RES (2), (33): Xaa is C or S

SEQ ID NO: 40940 - protein, 28 aa, Artificial Sequence
  Cyclic GFR-binding peptide
VVMERHKRLVVKDYEDYYLMSTASLETP

SEQ ID NO: 40941 - protein, 25 aa, Artificial Sequence
  Cyclic GFR-binding peptide
RYKKLVKPKRGVFYLISIANLAQPV

SEQ ID NO: 40942 - protein, 39 aa, Artificial Sequence; identical to SEQ ID NO: 3629
  Cyclic GFR-binding peptide
  MOD_RES (1), (3), (35), (36): Xaa is C or S

SEQ ID NO: 40943 - protein, 37 aa, Artificial Sequence; identical to SEQ ID NO: 3630
  Cyclic GFR-binding peptide
  MOD_RES (1), (1): Xaa is C or S

SEQ ID NO: 40944 - protein, 31 aa, Artificial Sequence
  Cyclic GFR-binding peptide
  MOD_RES (27), (28): Xaa is C or S
ERYKKLTPVGMDDFYLVSIANLKTPVXXAKG

SEQ ID NO: 40945 - protein, 33 aa, Artificial Sequence
  Cyclic GFR-binding peptide
  MOD_RES (1), (3): Xaa is C or S
XGXSRVVMNRHKRLIVNSSDDYYLVSTASLKTP

SEQ ID NO: 40946 - protein, 26 aa, Artificial Sequence
  Cyclic GFR-binding peptide
GEVVMERYKKLVVKDYEDFYLMSIAN

SEQ ID NO: 40947 - protein, 35 aa, Artificial Sequence; identical to SEQ ID NO: 3632
  Cyclic GFR-binding peptide
  MOD_RES (1), (1): Xaa is C or S

SEQ ID NO: 40948 - protein, 28 aa, Artificial Sequence
  Cyclic GFR-binding peptide
  MOD_RES (26), (27): Xaa is C or S
RHKRLVVKDYEDYYLMSTASLETPVXXA

SEQ ID NO: 40949 - protein, 31 aa, Artificial Sequence
  Cyclic GFR-binding peptide
FIPKKRVIEQYNKLFIPKKRVIELYLVSIAS

SEQ ID NO: 40950 - protein, 29 aa, Artificial Sequence
  Cyclic GFR-binding peptide
VVMNRYKKLIVNNSSDFYLVSIANLKTPA

SEQ ID NO: 40951 - protein, 30 aa, Artificial Sequence
  Cyclic GFR-binding peptide
  MOD_RES (1), (3): Xaa is C or S
XKXSRVIMYHYKLVKPKRGVKYLISIPSLA

SEQ ID NO: 40952 - protein, 25 aa, Artificial Sequence
  Cyclic GFR-binding peptide
RYKKLIKPTKGIFYLISIANLDQSV

SEQ ID NO: 40953 - protein, 31 aa, Artificial Sequence
  Cyclic GFR-binding peptide
  MOD_RES (26), (27): Xaa is C or S
RYKKLVVKENEDFYLMSIANLETPVXXAKPI

SEQ ID NO: 40954 - protein, 26 aa, Artificial Sequence
  Cyclic GFR-binding peptide
VMNYHYKLIVNNSSDKYLVSIPSLKT

SEQ ID NO: 40955 - protein, 39 aa, Artificial Sequence; identical to SEQ ID NO: 3635
  Cyclic GFR-binding peptide
  MOD_RES (36), (36): Xaa is C or S

SEQ ID NO: 40956 - protein, 30 aa, Artificial Sequence
  Cyclic GFR-binding peptide
  MOD_RES (2), (2): Xaa is C or S
GXSRVVMNQYNKLIVNSSDDLYLVSIASLK

SEQ ID NO: 40957 - protein, 37 aa, Artificial Sequence; identical to SEQ ID NO: 3636
  Cyclic GFR-binding peptide
  MOD_RES (1), (34), (35): Xaa is C or S

SEQ ID NO: 40958 - protein, 24 aa, Artificial Sequence
  Cyclic GFR-binding peptide
SMGERHKRLTPVGMDDYYLVSTAS

SEQ ID NO: 40959 - protein, 29 aa, Artificial Sequence
  Cyclic GFR-binding peptide
DELTRHKRLFIPKKRVIEYYLVSTASLQV

SEQ ID NO: 40960 - protein, 28 aa, Artificial Sequence
  Cyclic GFR-binding peptide
  MOD_RES (28), (28): Xaa is C or S
GERHKRLTPVGMDDYYLVSTASLKTPVX

SEQ ID NO: 40961 - protein, 23 aa, Artificial Sequence
  Cyclic GFR-binding peptide
NRHKRLIVNSSDDYYLVSTASLQ

SEQ ID NO: 40962 - protein, 36 aa, Artificial Sequence; identical to SEQ ID NO: 3637
  Cyclic GFR-binding peptide
  MOD_RES (35), (35): Xaa is C or S

SEQ ID NO: 40963 - protein, 23 aa, Artificial Sequence
  Cyclic GFR-binding peptide
NYHYKLIVNNSSDKYLVSIPSLK

SEQ ID NO: 40964 - protein, 36 aa, Artificial Sequence; identical to SEQ ID NO: 3638
  Cyclic GFR-binding peptide
  MOD_RES (31), (32): Xaa is C or S

SEQ ID NO: 40965 - protein, 28 aa, Artificial Sequence
  Cyclic GFR-binding peptide
VMEYHYKLVVKDYEDKYLMSIPSLETPV

SEQ ID NO: 40966 - protein, 28 aa, Artificial Sequence
  Cyclic GFR-binding peptide
  MOD_RES (28), (28): Xaa is C or S
MERYKKLVVKDYEDFYLMSIANLETPVX

SEQ ID NO: 40967 - protein, 39 aa, Artificial Sequence; identical to SEQ ID NO: 3639
  Cyclic GFR-binding peptide
  MOD_RES (1), (3), (35), (36): Xaa is C or S

SEQ ID NO: 40968 - protein, 23 aa, Artificial Sequence
  Cyclic GFR-binding peptide
VIMRHKRLVKPKRGVYYLISTAS

SEQ ID NO: 40969 - protein, 29 aa, Artificial Sequence
  Cyclic GFR-binding peptide
AAAAAAAAARYKKLTPVGMDDFYLVSIAN

SEQ ID NO: 40970 - protein, 38 aa, Artificial Sequence; identical to SEQ ID NO: 3641
  Cyclic GFR-binding peptide
  MOD_RES (1), (3), (35), (36): Xaa is C or S

SEQ ID NO: 40971 - protein, 32 aa, Artificial Sequence
  Cyclic GFR-binding peptide
  MOD_RES (29), (30): Xaa is C or S
VVMRYKKLVKPTRGVFYLISIANLDQPVXXPS

SEQ ID NO: 40972 - protein, 38 aa, Artificial Sequence; identical to SEQ ID NO: 3643
  Cyclic GFR-binding peptide
  MOD_RES (1), (3), (34), (35): Xaa is C or S

SEQ ID NO: 40973 - protein, 26 aa, Artificial Sequence
  Cyclic GFR-binding peptide
NRYKKLIVNNSSDFYLVSIANLKTPA

SEQ ID NO: 40974 - protein, 26 aa, Artificial Sequence
  Cyclic GFR-binding peptide
VMNRHKRLIVNSSDDYYLVSTASLKT

SEQ ID NO: 40975 - protein, 23 aa, Artificial Sequence
  Cyclic GFR-binding peptide
ERHKRLVVKDYEDYYLMSTASLE

SEQ ID NO: 40976 - protein, 37 aa, Artificial Sequence; identical to SEQ ID NO: 3646
  Cyclic GFR-binding peptide
  MOD_RES (2), (4), (35), (36): Xaa is C or S

SEQ ID NO: 40977 - protein, 27 aa, Artificial Sequence
  Cyclic GFR-binding peptide
QYNKLFIPKKRVIELYLVSIASLQVQT

SEQ ID NO: 40978 - protein, 40 aa, Artificial Sequence; identical to SEQ ID NO: 3650
  Cyclic GFR-binding peptide
  MOD_RES (1), (3), (35), (36): Xaa is C or S

SEQ ID NO: 40979 - protein, 42 aa, Artificial Sequence; identical to SEQ ID NO: 3651
  Cyclic GFR-binding peptide
  MOD_RES (2), (4), (36), (37): Xaa is C or S

SEQ ID NO: 40980 - protein, 26 aa, Artificial Sequence
  Cyclic GFR-binding peptide
MRHKRLVKPTRGVYYLISTASLDQPV

SEQ ID NO: 40981 - protein, 37 aa, Artificial Sequence; identical to SEQ ID NO: 3653
  Cyclic GFR-binding peptide
  MOD_RES (32), (33): Xaa is C or S

SEQ ID NO: 40982 - protein, 34 aa, Artificial Sequence; identical to SEQ ID NO: 3652
  Cyclic GFR-binding peptide
  MOD_RES (1), (3): Xaa is C or S

SEQ ID NO: 40983 - protein, 28 aa, Artificial Sequence
  Cyclic GFR-binding peptide
VMNQYNKLIVNSSDDLYLVSIASLQTPA

SEQ ID NO: 40984 - protein, 34 aa, Artificial Sequence
  Cyclic GFR-binding peptide
  MOD_RES (29), (30): Xaa is C or S
VMERHKRLVVKDYEDYYLMSTASLETPVXXAKPI

SEQ ID NO: 40985 - protein, 30 aa, Artificial Sequence
  Cyclic GFR-binding peptide
  MOD_RES (2), (2): Xaa is C or S
GXAKVVMNRYKKLIVNNSSDFYLVSIANLK

SEQ ID NO: 40986 - protein, 28 aa, Artificial Sequence
  Cyclic GFR-binding peptide
DELTRHKRLFIPKKRVIEYYLVSTASLQ

SEQ ID NO: 40987 - protein, 30 aa, Artificial Sequence
  Cyclic GFR-binding peptide
  MOD_RES (30), (30): Xaa is C or S
SMGEQYNKLTPVGMDDLYLVSIASLKTPVX

SEQ ID NO: 40988 - protein, 36 aa, Artificial Sequence; identical to SEQ ID NO: 3654
  Cyclic GFR-binding peptide
  MOD_RES (2), (34), (35): Xaa is C or S

SEQ ID NO: 40989 - protein, 27 aa, Artificial Sequence
  Cyclic GFR-binding peptide
GERYKKLTPVGMDDFYLVSIANLKTPV

SEQ ID NO: 40990 - protein, 37 aa, Artificial Sequence; identical to SEQ ID NO: 3656
  Cyclic GFR-binding peptide
  MOD_RES (2), (4), (35), (36): Xaa is C or S

SEQ ID NO: 40991 - protein, 34 aa, Artificial Sequence
  Cyclic GFR-binding peptide
  MOD_RES (30), (31): Xaa is C or S
VVMNRYKKLIVNNSSDFYLVSIANLKTPAXXAKP

SEQ ID NO: 40992 - protein, 36 aa, Artificial Sequence; identical to SEQ ID NO: 3657
  Cyclic GFR-binding peptide
  MOD_RES (31), (32): Xaa is C or S

SEQ ID NO: 40993 - protein, 31 aa, Artificial Sequence
  Cyclic GFR-binding peptide
  MOD_RES (28), (29): Xaa is C or S
GERHKRLTPVGMDDYYLVSTASLKTPVXXAK

SEQ ID NO: 40994 - protein, 29 aa, Artificial Sequence
  Cyclic GFR-binding peptide
SKVIMYHYKLIKPTKGIKYLISIPSLDQS

SEQ ID NO: 40995 - protein, 31 aa, Artificial Sequence
  Cyclic GFR-binding peptide
  MOD_RES (28), (29): Xaa is C or S
VMYHYKLVKPTRGVKYLISIPSLDQPVXXPS

SEQ ID NO: 40996 - protein, 33 aa, Artificial Sequence
  Cyclic GFR-binding peptide
  MOD_RES (1), (3): Xaa is C or S
XGXARVVMNRHKRLIVNSSDDYYLVSTASLQTP

SEQ ID NO: 40997 - protein, 29 aa, Artificial Sequence
  Cyclic GFR-binding peptide
AAAAAAAAARYKKLVKPKRGVFYLISIAN

SEQ ID NO: 40998 - protein, 34 aa, Artificial Sequence; identical to SEQ ID NO: 3658
  Cyclic GFR-binding peptide
  MOD_RES (1), (33), (34): Xaa is C or S

SEQ ID NO: 40999 - protein, 35 aa, Artificial Sequence
  Cyclic GFR-binding peptide
  MOD_RES (29), (30): Xaa is C or S
MGERYKKLTPVGMDDFYLVSIANLKTPVXXAKGVK

SEQ ID NO: 41000 - protein, 32 aa, Artificial Sequence
  Cyclic GFR-binding peptide
  MOD_RES (2), (2): Xaa is C or S
KXALHDELTQYNKLFIPKKRVIELYLVSIASL

SEQ ID NO: 41001 - protein, 32 aa, Artificial Sequence; identical to SEQ ID NO: 3659
  Cyclic GFR-binding peptide
  MOD_RES (1), (1): Xaa is C or S

SEQ ID NO: 41002 - protein, 32 aa, Artificial Sequence
  Cyclic GFR-binding peptide
  MOD_RES (2), (4): Xaa is C or S
SXKXSRVIMQYNKLVKPKRGVLYLISIASLAQ

SEQ ID NO: 41003 - protein, 35 aa, Artificial Sequence; identical to SEQ ID NO: 3663
  Cyclic GFR-binding peptide
  MOD_RES (31), (32): Xaa is C or S

SEQ ID NO: 41004 - protein, 33 aa, Artificial Sequence; identical to SEQ ID NO: 3666
  Cyclic GFR-binding peptide
  MOD_RES (31), (32): Xaa is C or S

SEQ ID NO: 41005 - protein, 40 aa, Artificial Sequence; identical to SEQ ID NO: 3667
  Cyclic GFR-binding peptide
  MOD_RES (2), (35), (36): Xaa is C or S

SEQ ID NO: 41006 - protein, 24 aa, Artificial Sequence
  Cyclic GFR-binding peptide
VMNQYNKLIVNSSDDLYLVSIASL

SEQ ID NO: 41007 - protein, 35 aa, Artificial Sequence; identical to SEQ ID NO: 3669
  Cyclic GFR-binding peptide
  MOD_RES (1), (34), (35): Xaa is C or S

SEQ ID NO: 41008 - protein, 34 aa, Artificial Sequence; identical to SEQ ID NO: 3672
  Cyclic GFR-binding peptide
  MOD_RES (2), (33), (34): Xaa is C or S

SEQ ID NO: 41009 - protein, 33 aa, Artificial Sequence
  Cyclic GFR-binding peptide
  MOD_RES (2), (2): Xaa is C or S
KXALHDELTQYNKLFIPKKRVIELYLVSIASLQ

SEQ ID NO: 41010 - protein, 33 aa, Artificial Sequence
  Cyclic GFR-binding peptide
  MOD_RES (2), (4): Xaa is C or S
EXKXALHDELTQYNKLFIPKKRVIELYLVSIAS

SEQ ID NO: 41011 - protein, 37 aa, Artificial Sequence; identical to SEQ ID NO: 3674
  Cyclic GFR-binding peptide
  MOD_RES (2), (4), (36): Xaa is C or S

SEQ ID NO: 41012 - protein, 36 aa, Artificial Sequence; identical to SEQ ID NO: 3675
  Cyclic GFR-binding peptide
  MOD_RES (31), (32): Xaa is C or S

SEQ ID NO: 41013 - protein, 32 aa, Artificial Sequence
  Cyclic GFR-binding peptide
  MOD_RES (2), (2): Xaa is C or S
GXARVVMNYHYKLIVNSSDDKYLVSIPSLQTP

SEQ ID NO: 41014 - protein, 28 aa, Artificial Sequence
  Cyclic GFR-binding peptide
VIMYHYKLIKPTKGIKYLISIPSLDQSV

SEQ ID NO: 41015 - protein, 29 aa, Artificial Sequence
  Cyclic GFR-binding peptide
  MOD_RES (28), (29): Xaa is C or S
MDYHYKLVVKENEDKYLMSIPSLETPVXX

SEQ ID NO: 41016 - protein, 28 aa, Artificial Sequence
  Cyclic GFR-binding peptide
  MOD_RES (1), (1): Xaa is C or S
XSKVVMYHYKLVKPTRGVKYLISIPSLD

SEQ ID NO: 41017 - protein, 27 aa, Artificial Sequence
  Cyclic GFR-binding peptide
  MOD_RES (2), (2): Xaa is C or S
KXSKVVMQYNKLVKPTRGVLYLISIAS

SEQ ID NO: 41018 - protein, 28 aa, Artificial Sequence
  Cyclic GFR-binding peptide
  MOD_RES (2), (2): Xaa is C or S
GXGEVVMERHKRLVVKDYEDYYLMSTAS

SEQ ID NO: 41019 - protein, 24 aa, Artificial Sequence
  Cyclic GFR-binding peptide
MNYHYKLIVNSSDDKYLVSIPSLQ

SEQ ID NO: 41020 - protein, 35 aa, Artificial Sequence; identical to SEQ ID NO: 3678
  Cyclic GFR-binding peptide
  MOD_RES (1), (33), (34): Xaa is C or S

SEQ ID NO: 41021 - protein, 27 aa, Artificial Sequence
  Cyclic GFR-binding peptide
VVMNQYNKLIVNSSDDLYLVSIASLQT

SEQ ID NO: 41022 - protein, 31 aa, Artificial Sequence
  Cyclic GFR-binding peptide
  MOD_RES (26), (27): Xaa is C or S
YHYKLVKPKRGVKYLISIPSLAQPVXXPAAS

SEQ ID NO: 41023 - protein, 35 aa, Artificial Sequence; identical to SEQ ID NO: 3680
  Cyclic GFR-binding peptide
  MOD_RES (1), (33), (34): Xaa is C or S

SEQ ID NO: 41024 - protein, 29 aa, Artificial Sequence
  Cyclic GFR-binding peptide
VVMNYHYKLIVNNSSDKYLVSIPSLKTPA

SEQ ID NO: 41025 - protein, 23 aa, Artificial Sequence
  Cyclic GFR-binding peptide
MGERYKKLTPVGMDDFYLVSIAN

SEQ ID NO: 41026 - protein, 35 aa, Artificial Sequence; identical to SEQ ID NO: 3681
  Cyclic GFR-binding peptide
  MOD_RES (1), (3), (34), (35): Xaa is C or S

SEQ ID NO: 41027 - protein, 29 aa, Artificial Sequence
  Cyclic GFR-binding peptide
SKVIMQYNKLIKPTKGILYLISIASLDQS

SEQ ID NO: 41028 - protein, 27 aa, Artificial Sequence
  Cyclic GFR-binding peptide
VIMRHKRLVKPKRGVYYLISTASLAQP

SEQ ID NO: 41029 - protein, 32 aa, Artificial Sequence
  Cyclic GFR-binding peptide
  MOD_RES (1), (1): Xaa is C or S
XALHDELTRYKKLFIPKKRVIEFYLVSIANLQ

SEQ ID NO: 41030 - protein, 32 aa, Artificial Sequence; identical to SEQ ID NO: 3684
  Cyclic GFR-binding peptide
  MOD_RES (31), (32): Xaa is C or S

SEQ ID NO: 41031 - protein, 43 aa, Artificial Sequence; identical to SEQ ID NO: 3687
  Cyclic GFR-binding peptide
  MOD_RES (1), (3), (40): Xaa is C or S

SEQ ID NO: 41032 - protein, 33 aa, Artificial Sequence; identical to SEQ ID NO: 3688
  Cyclic GFR-binding peptide
  MOD_RES (1), (32), (33): Xaa is C or S

SEQ ID NO: 41033 - protein, 27 aa, Artificial Sequence
  Cyclic GFR-binding peptide
AVSMGERYKKLTPVGMDDFYLVSIANL

SEQ ID NO: 41034 - protein, 38 aa, Artificial Sequence; identical to SEQ ID NO: 3689
  Cyclic GFR-binding peptide
  MOD_RES (1), (33): Xaa is C or S

SEQ ID NO: 41035 - protein, 20 aa, Artificial Sequence
  Cyclic GFR-binding peptide
RYKKLIVNNSSDFYLVSIAN

SEQ ID NO: 41036 - protein, 35 aa, Artificial Sequence; identical to SEQ ID NO: 3691
  Cyclic GFR-binding peptide
  MOD_RES (1), (3), (34), (35): Xaa is C or S

SEQ ID NO: 41037 - protein, 27 aa, Artificial Sequence
  Cyclic GFR-binding peptide
MNYHYKLIVNSSDDKYLVSIPSLQTPA

SEQ ID NO: 41038 - protein, 30 aa, Artificial Sequence
  Cyclic GFR-binding peptide
  MOD_RES (27), (28): Xaa is C or S
DYHYKLVVKENEDKYLMSIPSLETPVXXAK

SEQ ID NO: 41039 - protein, 25 aa, Artificial Sequence
  Cyclic GFR-binding peptide
VVMRYKKLVKPTRGVFYLISIANLD

SEQ ID NO: 41040 - protein, 32 aa, Artificial Sequence
  Cyclic GFR-binding peptide
  MOD_RES (26), (27): Xaa is C or S
QYNKLIVNNSSDLYLVSIASLKTPAXXAKPVA

SEQ ID NO: 41041 - protein, 25 aa, Artificial Sequence
  Cyclic GFR-binding peptide
MYHYKLIKPTKGIKYLISIPSLDQS

SEQ ID NO: 41042 - protein, 27 aa, Artificial Sequence
  Cyclic GFR-binding peptide
VVMEYHYKLVVKDYEDKYLMSIPSLET

SEQ ID NO: 41043 - protein, 44 aa, Artificial Sequence; identical to SEQ ID NO: 3693
  Cyclic GFR-binding peptide
  MOD_RES (1), (3), (40): Xaa is C or S

SEQ ID NO: 41044 - protein, 27 aa, Artificial Sequence
  Cyclic GFR-binding peptide
RHKRLFIPKKRVIEYYLVSTASLQVQT

SEQ ID NO: 41045 - protein, 23 aa, Artificial Sequence
  Cyclic GFR-binding peptide
MNRYKKLIVNNSSDFYLVSIANL

SEQ ID NO: 41046 - protein, 30 aa, Artificial Sequence
  Cyclic GFR-binding peptide
  MOD_RES (1), (3): Xaa is C or S
XKXSRVIMRHKRLVKPKRGVYYLISTASLA

SEQ ID NO: 41047 - protein, 27 aa, Artificial Sequence
  Cyclic GFR-binding peptide
  MOD_RES (1), (1): Xaa is C or S
XARVVMNYHYKLIVNSSDDKYLVSIPS

SEQ ID NO: 41048 - protein, 33 aa, Artificial Sequence
  Cyclic GFR-binding peptide
  MOD_RES (32), (33): Xaa is C or S
AVSMGERHKRLTPVGMDDYYLVSTASLKTPVXX

SEQ ID NO: 41049 - protein, 24 aa, Artificial Sequence
  Cyclic GFR-binding peptide
VIMQYNKLVKPKRGVLYLISIASL

SEQ ID NO: 41050 - protein, 41 aa, Artificial Sequence; identical to SEQ ID NO: 3695
  Cyclic GFR-binding peptide
  MOD_RES (1), (3), (35): Xaa is C or S

SEQ ID NO: 41051 - protein, 34 aa, Artificial Sequence; identical to SEQ ID NO: 3697
  Cyclic GFR-binding peptide
  MOD_RES (1), (3): Xaa is C or S

SEQ ID NO: 41052 - protein, 22 aa, Artificial Sequence
  Cyclic GFR-binding peptide
QYNKLVKPTRGVLYLISIASLD

SEQ ID NO: 41053 - protein, 28 aa, Artificial Sequence
  Cyclic GFR-binding peptide
KVIMYHYKLIKPTKGIKYLISIPSLDQS

SEQ ID NO: 41054 - protein, 34 aa, Artificial Sequence; identical to SEQ ID NO: 3699
  Cyclic GFR-binding peptide
  MOD_RES (31), (32): Xaa is C or S

SEQ ID NO: 41055 - protein, 38 aa, Artificial Sequence; identical to SEQ ID NO: 3700
  Cyclic GFR-binding peptide
  MOD_RES (2), (2): Xaa is C or S

SEQ ID NO: 41056 - protein, 39 aa, Artificial Sequence; identical to SEQ ID NO: 3701
  Cyclic GFR-binding peptide
  MOD_RES (2), (4), (36), (37): Xaa is C or S

SEQ ID NO: 41057 - protein, 25 aa, Artificial Sequence
  Cyclic GFR-binding peptide
QYNKLTPVGMDDLYLVSIASLKTPV

SEQ ID NO: 41058 - protein, 28 aa, Artificial Sequence
  Cyclic GFR-binding peptide
LTRYKKLFIPKKRVIEFYLVSIANLQVQ

SEQ ID NO: 41059 - protein, 27 aa, Artificial Sequence
  Cyclic GFR-binding peptide
SRVVMNQYNKLIVNSSDDLYLVSIASL

SEQ ID NO: 41060 - protein, 28 aa, Artificial Sequence
  Cyclic GFR-binding peptide
  MOD_RES (28), (28): Xaa is C or S
MNYHYKLIVNSSDDKYLVSIPSLKTPAX

SEQ ID NO: 41061 - protein, 41 aa, Artificial Sequence; identical to SEQ ID NO: 3704
  Cyclic GFR-binding peptide
  MOD_RES (1), (3), (35), (36): Xaa is C or S

SEQ ID NO: 41062 - protein, 28 aa, Artificial Sequence
  Cyclic GFR-binding peptide
SRVIMYHYKLVKPKRGVKYLISIPSLAQ

SEQ ID NO: 41063 - protein, 26 aa, Artificial Sequence
  Cyclic GFR-binding peptide
NYHYKLIVNSSDDKYLVSIPSLKTPA

SEQ ID NO: 41064 - protein, 26 aa, Artificial Sequence
  Cyclic GFR-binding peptide
  MOD_RES (26), (26): Xaa is C or S
RHKRLVVKDYEDYYLMSTASLETPVX

SEQ ID NO: 41065 - protein, 37 aa, Artificial Sequence; identical to SEQ ID NO: 3706
  Cyclic GFR-binding peptide
  MOD_RES (37), (37): Xaa is C or S

SEQ ID NO: 41066 - protein, 39 aa, Artificial Sequence; identical to SEQ ID NO: 3709
  Cyclic GFR-binding peptide
  MOD_RES (36), (36): Xaa is C or S

SEQ ID NO: 41067 - protein, 37 aa, Artificial Sequence; identical to SEQ ID NO: 3708
  Cyclic GFR-binding peptide
  MOD_RES (2), (34), (35): Xaa is C or S

SEQ ID NO: 41068 - protein, 27 aa, Artificial Sequence
  Cyclic GFR-binding peptide
ARVVMNQYNKLIVNSSDDLYLVSIASL

SEQ ID NO: 41069 - protein, 25 aa, Artificial Sequence
  Cyclic GFR-binding peptide
RHKRLVKPTRGVYYLISTASLDQPV

SEQ ID NO: 41070 - protein, 33 aa, Artificial Sequence
  Cyclic GFR-binding peptide
  MOD_RES (28), (29): Xaa is C or S
MDRYKKLVVKENEDFYLMSIANLETPVXXAKPI

SEQ ID NO: 41071 - protein, 26 aa, Artificial Sequence
  Cyclic GFR-binding peptide
MEYHYKLVVKDYEDKYLMSIPSLETP

SEQ ID NO: 41072 - protein, 34 aa, Artificial Sequence
  Cyclic GFR-binding peptide
  MOD_RES (28), (29): Xaa is C or S
MNRYKKLIVNNSSDFYLVSIANLKTPAXXAKPVA

SEQ ID NO: 41073 - protein, 26 aa, Artificial Sequence
  Cyclic GFR-binding peptide
  MOD_RES (1), (1): Xaa is C or S
XSKVVMQYNKLVKPTRGVLYLISIAS

SEQ ID NO: 41074 - protein, 31 aa, Artificial Sequence
  Cyclic GFR-binding peptide
  MOD_RES (28), (28): Xaa is C or S
MNQYNKLIVNSSDDLYLVSIASLKTPAXTPK

SEQ ID NO: 41075 - protein, 33 aa, Artificial Sequence
  Cyclic GFR-binding peptide
  MOD_RES (27), (28): Xaa is C or S
DYHYKLVVKENEDKYLMSIPSLETPVXXAKPIK

SEQ ID NO: 41076 - protein, 26 aa, Artificial Sequence
  Cyclic GFR-binding peptide
ERHKRLVVKDYEDYYLMSTASLETPV

SEQ ID NO: 41077 - protein, 29 aa, Artificial Sequence
  Cyclic GFR-binding peptide
  MOD_RES (2), (4): Xaa is C or S
SXKXSKVIMRYKKLIKPTKGIFYLISIAN

SEQ ID NO: 41078 - protein, 23 aa, Artificial Sequence
  Cyclic GFR-binding peptide
MEYHYKLVVKDYEDKYLMSIPSL

SEQ ID NO: 41079 - protein, 34 aa, Artificial Sequence; identical to SEQ ID NO: 3718
  Cyclic GFR-binding peptide
  MOD_RES (31), (32): Xaa is C or S

SEQ ID NO: 41080 - protein, 42 aa, Artificial Sequence; identical to SEQ ID NO: 3719
  Cyclic GFR-binding peptide
  MOD_RES (1), (3), (40): Xaa is C or S

SEQ ID NO: 41081 - protein, 30 aa, Artificial Sequence
  Cyclic GFR-binding peptide
  MOD_RES (29), (30): Xaa is C or S
VVMRHKRLVKPTRGVYYLISTASLDQPVXX

SEQ ID NO: 41082 - protein, 36 aa, Artificial Sequence; identical to SEQ ID NO: 3720
  Cyclic GFR-binding peptide
  MOD_RES (1), (3), (34), (35): Xaa is C or S

SEQ ID NO: 41083 - protein, 34 aa, Artificial Sequence; identical to SEQ ID NO: 3721
  Cyclic GFR-binding peptide
  MOD_RES (1), (3): Xaa is C or S

SEQ ID NO: 41084 - protein, 29 aa, Artificial Sequence
  Cyclic GFR-binding peptide
ELTRHKRLFIPKKRVIEYYLVSTASLQVQ

SEQ ID NO: 41085 - protein, 26 aa, Artificial Sequence
  Cyclic GFR-binding peptide
  MOD_RES (26), (26): Xaa is C or S
YHYKLVVKDYEDKYLMSIPSLETPVX

SEQ ID NO: 41086 - protein, 29 aa, Artificial Sequence
  Cyclic GFR-binding peptide
AVSMGERYKKLTPVGMDDFYLVSIANLKT

SEQ ID NO: 41087 - protein, 32 aa, Artificial Sequence; identical to SEQ ID NO: 3728
  Cyclic GFR-binding peptide
  MOD_RES (32), (32): Xaa is C or S

SEQ ID NO: 41088 - protein, 31 aa, Artificial Sequence
  Cyclic GFR-binding peptide
  MOD_RES (29), (30): Xaa is C or S
VIMRYKKLIKPTKGIFYLISIANLDQSVXXP

SEQ ID NO: 41089 - protein, 23 aa, Artificial Sequence
  Cyclic GFR-binding peptide
DRYKKLVVKENEDFYLMSIANLE

SEQ ID NO: 41090 - protein, 33 aa, Artificial Sequence; identical to SEQ ID NO: 3730
  Cyclic GFR-binding peptide
  MOD_RES (31), (32): Xaa is C or S

SEQ ID NO: 41091 - protein, 25 aa, Artificial Sequence
  Cyclic GFR-binding peptide
VIMQYNKLVKPKRGVLYLISIASLA

SEQ ID NO: 41092 - protein, 30 aa, Artificial Sequence
  Cyclic GFR-binding peptide
  MOD_RES (26), (27): Xaa is C or S
QYNKLTPVGMDDLYLVSIASLKTPVXXAKG

SEQ ID NO: 41093 - protein, 33 aa, Artificial Sequence
  Cyclic GFR-binding peptide
  MOD_RES (2), (4): Xaa is C or S
SXKXSKVVMQYNKLVKPTRGVLYLISIASLDQP

SEQ ID NO: 41094 - protein, 38 aa, Artificial Sequence; identical to SEQ ID NO: 3732
  Cyclic GFR-binding peptide
  MOD_RES (2), (4), (35), (36): Xaa is C or S

SEQ ID NO: 41095 - protein, 30 aa, Artificial Sequence
  Cyclic GFR-binding peptide
  MOD_RES (28), (29): Xaa is C or S
VMYHYKLVKPTRGVKYLISIPSLDQPVXXP

SEQ ID NO: 41096 - protein, 36 aa, Artificial Sequence; identical to SEQ ID NO: 3733
  Cyclic GFR-binding peptide
  MOD_RES (1), (1): Xaa is C or S

SEQ ID NO: 41097 - protein, 26 aa, Artificial Sequence
  Cyclic GFR-binding peptide
  MOD_RES (1), (1): Xaa is C or S
XSRVIMYHYKLVKPKRGVKYLISIPS

SEQ ID NO: 41098 - protein, 39 aa, Artificial Sequence; identical to SEQ ID NO: 3734
  Cyclic GFR-binding peptide
  MOD_RES (2), (4), (37), (38): Xaa is C or S

SEQ ID NO: 41099 - protein, 30 aa, Artificial Sequence
  Cyclic GFR-binding peptide
  MOD_RES (1), (1): Xaa is C or S
XSRVVMNQYNKLIVNSSDDLYLVSIASLKT

SEQ ID NO: 41100 - protein, 32 aa, Artificial Sequence
  Cyclic GFR-binding peptide
  MOD_RES (30), (31): Xaa is C or S
RVIMYHYKLVKPKRGVKYLISIPSLAQPVXXP

SEQ ID NO: 41101 - protein, 32 aa, Artificial Sequence; identical to SEQ ID NO: 3735
  Cyclic GFR-binding peptide
  MOD_RES (32), (32): Xaa is C or S

SEQ ID NO: 41102 - protein, 32 aa, Artificial Sequence
  Cyclic GFR-binding peptide
  MOD_RES (29), (30): Xaa is C or S
VMNQYNKLIVNSSDDLYLVSIASLKTPAXXPK

SEQ ID NO: 41103 - protein, 37 aa, Artificial Sequence
  Cyclic GFR-binding peptide
  MOD_RES (33), (33): Xaa is C or S
ELTYHYKLFIPKKRVIEKYLVSIPSLQVQTPRXQVNR

SEQ ID NO: 41104 - protein, 28 aa, Artificial Sequence
  Cyclic GFR-binding peptide
  MOD_RES (1), (3): Xaa is C or S
XKXSKVVMQYNKLVKPTRGVLYLISIAS

SEQ ID NO: 41105 - protein, 30 aa, Artificial Sequence
  Cyclic GFR-binding peptide
  MOD_RES (1), (1): Xaa is C or S
XSKVIMRHKRLIKPTKGIYYLISTASLDQS

SEQ ID NO: 41106 - protein, 38 aa, Artificial Sequence; identical to SEQ ID NO: 3738
  Cyclic GFR-binding peptide
  MOD_RES (1), (3), (34), (35): Xaa is C or S

SEQ ID NO: 41107 - protein, 41 aa, Artificial Sequence; identical to SEQ ID NO: 3739
  Cyclic GFR-binding peptide
  MOD_RES (2), (4), (35), (36): Xaa is C or S

SEQ ID NO: 41108 - protein, 30 aa, Artificial Sequence
  Cyclic GFR-binding peptide
  MOD_RES (1), (3): Xaa is C or S
XKXSKVVMYHYKLVKPTRGVKYLISIPSLD

SEQ ID NO: 41109 - protein, 39 aa, Artificial Sequence; identical to SEQ ID NO: 3741
  Cyclic GFR-binding peptide
  MOD_RES (1), (3), (35), (36): Xaa is C or S

SEQ ID NO: 41110 - protein, 29 aa, Artificial Sequence
  Cyclic GFR-binding peptide
GEVVMEYHYKLVVKDYEDKYLMSIPSLET

SEQ ID NO: 41111 - protein, 25 aa, Artificial Sequence
  Cyclic GFR-binding peptide
RYKKLTPVGMDDFYLVSIANLKTPV

SEQ ID NO: 41112 - protein, 32 aa, Artificial Sequence
  Cyclic GFR-binding peptide
  MOD_RES (26), (27): Xaa is C or S
QYNKLIKPTKGILYLISIASLDQSVXXPSASA

SEQ ID NO: 41113 - protein, 24 aa, Artificial Sequence
  Cyclic GFR-binding peptide
MNQYNKLIVNSSDDLYLVSIASLQ

SEQ ID NO: 41114 - protein, 37 aa, Artificial Sequence; identical to SEQ ID NO: 3743
  Cyclic GFR-binding peptide
  MOD_RES (1), (3), (34), (35): Xaa is C or S

SEQ ID NO: 41115 - protein, 36 aa, Artificial Sequence; identical to SEQ ID NO: 3744
  Cyclic GFR-binding peptide
  MOD_RES (1), (32), (33): Xaa is C or S

SEQ ID NO: 41116 - protein, 42 aa, Artificial Sequence; identical to SEQ ID NO: 3745
  Cyclic GFR-binding peptide
  MOD_RES (1), (3), (36), (37): Xaa is C or S

SEQ ID NO: 41117 - protein, 29 aa, Artificial Sequence
  Cyclic GFR-binding peptide
  MOD_RES (2), (2): Xaa is C or S
KXSKVVMQYNKLVKPTRGVLYLISIASLD

SEQ ID NO: 41118 - protein, 29 aa, Artificial Sequence
  Cyclic GFR-binding peptide
  MOD_RES (1), (3): Xaa is C or S
XGXGEVVMDRHKRLVVKENEDYYLMSTAS

SEQ ID NO: 41119 - protein, 32 aa, Artificial Sequence
  Cyclic GFR-binding peptide
  MOD_RES (29), (29): Xaa is C or S
VMNQYNKLIVNSSDDLYLVSIASLKTPAXTPK

SEQ ID NO: 41120 - protein, 30 aa, Artificial Sequence
  Cyclic GFR-binding peptide
  MOD_RES (30), (30): Xaa is C or S
KVVMRYKKLVKPTRGVFYLISIANLDQPVX

SEQ ID NO: 41121 - protein, 25 aa, Artificial Sequence
  Cyclic GFR-binding peptide
VVMDRHKRLVVKENEDYYLMSTASL

SEQ ID NO: 41122 - protein, 21 aa, Artificial Sequence
  Cyclic GFR-binding peptide
DYHYKLVVKENEDKYLMSIPS

SEQ ID NO: 41123 - protein, 27 aa, Artificial Sequence
  Cyclic GFR-binding peptide
MNQYNKLIVNSSDDLYLVSIASLKTPA

SEQ ID NO: 41124 - protein, 33 aa, Artificial Sequence
  Cyclic GFR-binding peptide
  MOD_RES (1), (3): Xaa is C or S
XGXEAVSMGERYKKLTPVGMDDFYLVSIANLKT

SEQ ID NO: 41125 - protein, 30 aa, Artificial Sequence
  Cyclic GFR-binding peptide
  MOD_RES (29), (30): Xaa is C or S
VMNYHYKLIVNNSSDKYLVSIPSLKTPAXX

SEQ ID NO: 41126 - protein, 36 aa, Artificial Sequence; identical to SEQ ID NO: 3748
  Cyclic GFR-binding peptide
  MOD_RES (2), (34), (35): Xaa is C or S

SEQ ID NO: 41127 - protein, 38 aa, Artificial Sequence; identical to SEQ ID NO: 3749
  Cyclic GFR-binding peptide
  MOD_RES (2), (33), (34): Xaa is C or S

SEQ ID NO: 41128 - protein, 38 aa, Artificial Sequence; identical to SEQ ID NO: 3751
  Cyclic GFR-binding peptide
  MOD_RES (1), (3), (35), (36): Xaa is C or S

SEQ ID NO: 41129 - protein, 31 aa, Artificial Sequence
  Cyclic GFR-binding peptide
DELTYHYKLFIPKKRVIEKYLVSIPSLQVQT

SEQ ID NO: 41130 - protein, 33 aa, Artificial Sequence
  Cyclic GFR-binding peptide
  MOD_RES (32), (32): Xaa is C or S
LTRHKRLFIPKKRVIEYYLVSTASLQVQTPRXQ

SEQ ID NO: 41131 - protein, 26 aa, Artificial Sequence
  Cyclic GFR-binding peptide
MERYKKLVVKDYEDFYLMSIANLETP

SEQ ID NO: 41132 - protein, 28 aa, Artificial Sequence
  Cyclic GFR-binding peptide
VIMRYKKLVKPKRGVFYLISIANLAQPV

SEQ ID NO: 41133 - protein, 37 aa, Artificial Sequence; identical to SEQ ID NO: 3753
  Cyclic GFR-binding peptide
  MOD_RES (1), (32), (33): Xaa is C or S

SEQ ID NO: 41134 - protein, 29 aa, Artificial Sequence
  Cyclic GFR-binding peptide
  MOD_RES (29), (29): Xaa is C or S
VIMRYKKLVKPKRGVFYLISIANLAQPVX

SEQ ID NO: 41135 - protein, 38 aa, Artificial Sequence; identical to SEQ ID NO: 3755
  Cyclic GFR-binding peptide
  MOD_RES (1), (38): Xaa is C or S

SEQ ID NO: 41136 - protein, 37 aa, Artificial Sequence; identical to SEQ ID NO: 3757
  Cyclic GFR-binding peptide
  MOD_RES (1), (3), (34), (35): Xaa is C or S

SEQ ID NO: 41137 - protein, 24 aa, Artificial Sequence
  Cyclic GFR-binding peptide
ERYKKLVVKDYEDFYLMSIANLET

SEQ ID NO: 41138 - protein, 30 aa, Artificial Sequence
  Cyclic GFR-binding peptide
  MOD_RES (1), (3): Xaa is C or S
XKXSKVVMRHKRLVKPTRGVYYLISTASLD

SEQ ID NO: 41139 - protein, 40 aa, Artificial Sequence; identical to SEQ ID NO: 3759
  Cyclic GFR-binding peptide
  MOD_RES (37), (37): Xaa is C or S

SEQ ID NO: 41140 - protein, 31 aa, Artificial Sequence
  Cyclic GFR-binding peptide
DELTQYNKLFIPKKRVIELYLVSIASLQVQT

SEQ ID NO: 41141 - protein, 23 aa, Artificial Sequence
  Cyclic GFR-binding peptide
NRYKKLIVNNSSDFYLVSIANLK

SEQ ID NO: 41142 - protein, 31 aa, Artificial Sequence
  Cyclic GFR-binding peptide
  MOD_RES (1), (3): Xaa is C or S
XGXAKVVMNYHYKLIVNNSSDKYLVSIPSLK

SEQ ID NO: 41143 - protein, 33 aa, Artificial Sequence
  Cyclic GFR-binding peptide
  MOD_RES (1), (3): Xaa is C or S
XGXAKVVMNRYKKLIVNNSSDFYLVSIANLKTP

SEQ ID NO: 41144 - protein, 32 aa, Artificial Sequence; identical to SEQ ID NO: 3761
  Cyclic GFR-binding peptide
  MOD_RES (1), (1): Xaa is C or S

SEQ ID NO: 41145 - protein, 34 aa, Artificial Sequence; identical to SEQ ID NO: 3762
  Cyclic GFR-binding peptide
  MOD_RES (2), (34): Xaa is C or S

SEQ ID NO: 41146 - protein, 27 aa, Artificial Sequence
  Cyclic GFR-binding peptide
VKPKRGVQYNKLVKPKRGVLYLISIAS

SEQ ID NO: 41147 - protein, 25 aa, Artificial Sequence
  Cyclic GFR-binding peptide
EVVMDYHYKLVVKENEDKYLMSIPS

SEQ ID NO: 41148 - protein, 29 aa, Artificial Sequence
  Cyclic GFR-binding peptide
  MOD_RES (29), (29): Xaa is C or S
VMDYHYKLVVKENEDKYLMSIPSLETPVX

SEQ ID NO: 41149 - protein, 26 aa, Artificial Sequence
  Cyclic GFR-binding peptide
GEQYNKLTPVGMDDLYLVSIASLKTP

SEQ ID NO: 41150 - protein, 39 aa, Artificial Sequence; identical to SEQ ID NO: 3767
  Cyclic GFR-binding peptide
  MOD_RES (1), (34), (35): Xaa is C or S

SEQ ID NO: 41151 - protein, 28 aa, Artificial Sequence
  Cyclic GFR-binding peptide
  MOD_RES (28), (28): Xaa is C or S
MNQYNKLIVNSSDDLYLVSIASLQTPAX

SEQ ID NO: 41152 - protein, 32 aa, Artificial Sequence
  Cyclic GFR-binding peptide
  MOD_RES (2), (2): Xaa is C or S
GXEAVSMGERYKKLTPVGMDDFYLVSIANLKT

SEQ ID NO: 41153 - protein, 27 aa, Artificial Sequence
  Cyclic GFR-binding peptide
  MOD_RES (26), (26): Xaa is C or S
QYNKLIVNSSDDLYLVSIASLKTPAXT

SEQ ID NO: 41154 - protein, 30 aa, Artificial Sequence
  Cyclic GFR-binding peptide
  MOD_RES (1), (1): Xaa is C or S
XSKVVMYHYKLVKPTRGVKYLISIPSLDQP

SEQ ID NO: 41155 - protein, 33 aa, Artificial Sequence
  Cyclic GFR-binding peptide
  MOD_RES (2), (4): Xaa is C or S
SXKXSKVIMYHYKLIKPTKGIKYLISIPSLDQS

SEQ ID NO: 41156 - protein, 36 aa, Artificial Sequence; identical to SEQ ID NO: 3770
  Cyclic GFR-binding peptide
  MOD_RES (36), (36): Xaa is C or S

SEQ ID NO: 41157 - protein, 27 aa, Artificial Sequence
  Cyclic GFR-binding peptide
TPVGMDDQYNKLTPVGMDDLYLVSIAS

SEQ ID NO: 41158 - protein, 33 aa, Artificial Sequence; identical to SEQ ID NO: 3771
  Cyclic GFR-binding peptide
  MOD_RES (1), (32), (33): Xaa is C or S

SEQ ID NO: 41159 - protein, 35 aa, Artificial Sequence
  Cyclic GFR-binding peptide
  MOD_RES (30), (31): Xaa is C or S
VVMEYHYKLVVKDYEDKYLMSIPSLETPVXXAKPI

SEQ ID NO: 41160 - protein, 37 aa, Artificial Sequence; identical to SEQ ID NO: 3772
  Cyclic GFR-binding peptide
  MOD_RES (1), (3), (36), (37): Xaa is C or S

SEQ ID NO: 41161 - protein, 24 aa, Artificial Sequence
  Cyclic GFR-binding peptide
QYNKLIVNSSDDLYLVSIASLQTP

SEQ ID NO: 41162 - protein, 28 aa, Artificial Sequence
  Cyclic GFR-binding peptide
EAVSMGEQYNKLTPVGMDDLYLVSIASL

SEQ ID NO: 41163 - protein, 29 aa, Artificial Sequence
  Cyclic GFR-binding peptide
  MOD_RES (26), (27): Xaa is C or S
RHKRLTPVGMDDYYLVSTASLKTPVXXAK

SEQ ID NO: 41164 - protein, 36 aa, Artificial Sequence
  Cyclic GFR-binding peptide
  MOD_RES (30), (31): Xaa is C or S
VVMNQYNKLIVNSSDDLYLVSIASLQTPAXXPKPVT

SEQ ID NO: 41165 - protein, 41 aa, Artificial Sequence; identical to SEQ ID NO: 3776
  Cyclic GFR-binding peptide
  MOD_RES (2), (39): Xaa is C or S

SEQ ID NO: 41166 - protein, 32 aa, Artificial Sequence
  Cyclic GFR-binding peptide
  MOD_RES (2), (4): Xaa is C or S
HXGXARVVMNYHYKLIVNSSDDKYLVSIPSLQ

SEQ ID NO: 41167 - protein, 30 aa, Artificial Sequence
  Cyclic GFR-binding peptide
  MOD_RES (28), (29): Xaa is C or S
IMQYNKLIKPTKGILYLISIASLDQSVXXP

SEQ ID NO: 41168 - protein, 32 aa, Artificial Sequence
  Cyclic GFR-binding peptide
  MOD_RES (27), (28): Xaa is C or S
EYHYKLVVKDYEDKYLMSIPSLETPVXXAKPI

SEQ ID NO: 41169 - protein, 34 aa, Artificial Sequence
  Cyclic GFR-binding peptide
  MOD_RES (29), (30): Xaa is C or S
VMDRYKKLVVKENEDFYLMSIANLETPVXXAKPI

SEQ ID NO: 41170 - protein, 38 aa, Artificial Sequence; identical to SEQ ID NO: 3783
  Cyclic GFR-binding peptide
  MOD_RES (2), (4), (36), (37): Xaa is C or S

SEQ ID NO: 41171 - protein, 35 aa, Artificial Sequence; identical to SEQ ID NO: 3785
  Cyclic GFR-binding peptide
  MOD_RES (2), (34): Xaa is C or S

SEQ ID NO: 41172 - protein, 34 aa, Artificial Sequence; identical to SEQ ID NO: 3786
  Cyclic GFR-binding peptide
  MOD_RES (31), (31): Xaa is C or S

SEQ ID NO: 41173 - protein, 28 aa, Artificial Sequence
  Cyclic GFR-binding peptide
  MOD_RES (27), (28): Xaa is C or S
NRHKRLIVNSSDDYYLVSTASLQTPAXX

SEQ ID NO: 41174 - protein, 26 aa, Artificial Sequence
  Cyclic GFR-binding peptide
EQYNKLTPVGMDDLYLVSIASLKTPV

SEQ ID NO: 41175 - protein, 32 aa, Artificial Sequence; identical to SEQ ID NO: 3789
  Cyclic GFR-binding peptide
  MOD_RES (2), (2): Xaa is C or S

SEQ ID NO: 41176 - protein, 45 aa, Artificial Sequence; identical to SEQ ID NO: 3790
  Cyclic GFR-binding peptide
  MOD_RES (2), (4), (41): Xaa is C or S

SEQ ID NO: 41177 - protein, 23 aa, Artificial Sequence
  Cyclic GFR-binding peptide
GEQYNKLTPVGMDDLYLVSIASL

SEQ ID NO: 41178 - protein, 35 aa, Artificial Sequence; identical to SEQ ID NO: 3791
  Cyclic GFR-binding peptide
  MOD_RES (1), (32), (33): Xaa is C or S

SEQ ID NO: 41179 - protein, 31 aa, Artificial Sequence
  Cyclic GFR-binding peptide
ELTQYNKLFIPKKRVIELYLVSIASLQVQTP

SEQ ID NO: 41180 - protein, 22 aa, Artificial Sequence
  Cyclic GFR-binding peptide
YHYKLVVKENEDKYLMSIPSLE

SEQ ID NO: 41181 - protein, 31 aa, Artificial Sequence
  Cyclic GFR-binding peptide
  MOD_RES (1), (3): Xaa is C or S
XGXSRVVMNQYNKLIVNSSDDLYLVSIASLK

SEQ ID NO: 41182 - protein, 35 aa, Artificial Sequence; identical to SEQ ID NO: 3792
  Cyclic GFR-binding peptide
  MOD_RES (32), (33): Xaa is C or S

SEQ ID NO: 41183 - protein, 35 aa, Artificial Sequence; identical to SEQ ID NO: 3796
  Cyclic GFR-binding peptide
  MOD_RES (32), (33): Xaa is C or S

SEQ ID NO: 41184 - protein, 33 aa, Artificial Sequence
  Cyclic GFR-binding peptide
  MOD_RES (27), (28): Xaa is C or S
ERYKKLVVKDYEDFYLMSIANLETPVXXAKPIS

SEQ ID NO: 41185 - protein, 33 aa, Artificial Sequence; identical to SEQ ID NO: 3797
  Cyclic GFR-binding peptide

SEQ ID NO: 41186 - protein, 30 aa, Artificial Sequence
  Cyclic GFR-binding peptide
  MOD_RES (26), (27): Xaa is C or S
QYNKLIVNSSDDLYLVSIASLQTPAXXPKP

SEQ ID NO: 41187 - protein, 30 aa, Artificial Sequence
  Cyclic GFR-binding peptide
  MOD_RES (2), (2): Xaa is C or S
GXGEVVMERHKRLVVKDYEDYYLMSTASLE

SEQ ID NO: 41188 - protein, 29 aa, Artificial Sequence
  Cyclic GFR-binding peptide
  MOD_RES (28), (29): Xaa is C or S
GERHKRLTPVGMDDYYLVSTASLKTPVXX

SEQ ID NO: 41189 - protein, 43 aa, Artificial Sequence; identical to SEQ ID NO: 3800
  Cyclic GFR-binding peptide
  MOD_RES (2), (4), (41): Xaa is C or S

SEQ ID NO: 41190 - protein, 26 aa, Artificial Sequence
  Cyclic GFR-binding peptide
VSMGERYKKLTPVGMDDFYLVSIANL

SEQ ID NO: 41191 - protein, 31 aa, Artificial Sequence
  Cyclic GFR-binding peptide
  MOD_RES (28), (29): Xaa is C or S
VMRYKKLVKPTRGVFYLISIANLDQPVXXPS

SEQ ID NO: 41192 - protein, 37 aa, Artificial Sequence; identical to SEQ ID NO: 3801
  Cyclic GFR-binding peptide
  MOD_RES (1), (32), (33): Xaa is C or S

SEQ ID NO: 41193 - protein, 22 aa, Artificial Sequence
  Cyclic GFR-binding peptide
ERYKKLVVKDYEDFYLMSIANL

SEQ ID NO: 41194 - protein, 25 aa, Artificial Sequence
  Cyclic GFR-binding peptide
VVMNRYKKLIVNNSSDFYLVSIANL

SEQ ID NO: 41195 - protein, 27 aa, Artificial Sequence
  Cyclic GFR-binding peptide
  MOD_RES (2), (2): Xaa is C or S
KXSRVIMRHKRLVKPKRGVYYLISTAS

SEQ ID NO: 41196 - protein, 30 aa, Artificial Sequence
  Cyclic GFR-binding peptide
  MOD_RES (28), (29): Xaa is C or S
MNRHKRLIVNSSDDYYLVSTASLQTPAXXP

SEQ ID NO: 41197 - protein, 38 aa, Artificial Sequence
  Cyclic GFR-binding peptide
  MOD_RES (34), (34): Xaa is C or S
DELTRHKRLFIPKKRVIEYYLVSTASLQVQTPRXQVNR

SEQ ID NO: 41198 - protein, 28 aa, Artificial Sequence
  Cyclic GFR-binding peptide
EAVSMGERYKKLTPVGMDDFYLVSIANL

SEQ ID NO: 41199 - protein, 23 aa, Artificial Sequence
  Cyclic GFR-binding peptide
VIMRYKKLVKPKRGVFYLISIAN

SEQ ID NO: 41200 - protein, 38 aa, Artificial Sequence; identical to SEQ ID NO: 3806
  Cyclic GFR-binding peptide
  MOD_RES (1), (3), (34), (35): Xaa is C or S

SEQ ID NO: 41201 - protein, 30 aa, Artificial Sequence; identical to SEQ ID NO: 3809
  Cyclic GFR-binding peptide

SEQ ID NO: 41202 - protein, 24 aa, Artificial Sequence
  Cyclic GFR-binding peptide
YHYKLVVKDYEDKYLMSIPSLETP

SEQ ID NO: 41203 - protein, 39 aa, Artificial Sequence; identical to SEQ ID NO: 3812
  Cyclic GFR-binding peptide
  MOD_RES (2), (34): Xaa is C or S

SEQ ID NO: 41204 - protein, 35 aa, Artificial Sequence; identical to SEQ ID NO: 3813
  Cyclic GFR-binding peptide
  MOD_RES (32), (32): Xaa is C or S

SEQ ID NO: 41205 - protein, 38 aa, Artificial Sequence; identical to SEQ ID NO: 3814
  Cyclic GFR-binding peptide
  MOD_RES (2), (4), (36), (37): Xaa is C or S

SEQ ID NO: 41206 - protein, 41 aa, Artificial Sequence; identical to SEQ ID NO: 3815
  Cyclic GFR-binding peptide
  MOD_RES (1), (38): Xaa is C or S

SEQ ID NO: 41207 - protein, 30 aa, Artificial Sequence
  Cyclic GFR-binding peptide
ALHDELTRHKRLFIPKKRVIEYYLVSTASL

SEQ ID NO: 41208 - protein, 28 aa, Artificial Sequence
  Cyclic GFR-binding peptide
EVVMDYHYKLVVKENEDKYLMSIPSLET

SEQ ID NO: 41209 - protein, 29 aa, Artificial Sequence
  Cyclic GFR-binding peptide
  MOD_RES (1), (3): Xaa is C or S
XKXSKVVMRYKKLVKPTRGVFYLISIANL

SEQ ID NO: 41210 - protein, 28 aa, Artificial Sequence
  Cyclic GFR-binding peptide
  MOD_RES (1), (1): Xaa is C or S
XSKVIMRYKKLIKPTKGIFYLISIANLD

SEQ ID NO: 41211 - protein, 40 aa, Artificial Sequence; identical to SEQ ID NO: 3818
  Cyclic GFR-binding peptide
  MOD_RES (1), (3), (34), (35): Xaa is C or S

SEQ ID NO: 41212 - protein, 38 aa, Artificial Sequence; identical to SEQ ID NO: 3819
  Cyclic GFR-binding peptide
  MOD_RES (1), (33), (34): Xaa is C or S

SEQ ID NO: 41213 - protein, 38 aa, Artificial Sequence; identical to SEQ ID NO: 3821
  Cyclic GFR-binding peptide
  MOD_RES (1), (32), (33): Xaa is C or S

SEQ ID NO: 41214 - protein, 27 aa, Artificial Sequence
  Cyclic GFR-binding peptide
VMDYHYKLVVKENEDKYLMSIPSLETP

SEQ ID NO: 41215 - protein, 35 aa, Artificial Sequence
  Cyclic GFR-binding peptide
  MOD_RES (29), (30): Xaa is C or S
VMNRHKRLIVNSSDDYYLVSTASLKTPAXXPKPVY

SEQ ID NO: 41216 - protein, 39 aa, Artificial Sequence; identical to SEQ ID NO: 3824
  Cyclic GFR-binding peptide
  MOD_RES (1), (3), (34), (35): Xaa is C or S

SEQ ID NO: 41217 - protein, 38 aa, Artificial Sequence; identical to SEQ ID NO: 3825
  Cyclic GFR-binding peptide
  MOD_RES (2), (35), (36): Xaa is C or S

SEQ ID NO: 41218 - protein, 26 aa, Artificial Sequence
  Cyclic GFR-binding peptide
GERYKKLTPVGMDDFYLVSIANLKTP

SEQ ID NO: 41219 - protein, 26 aa, Artificial Sequence
  Cyclic GFR-binding peptide
SRVVMNQYNKLIVNSSDDLYLVSIAS

SEQ ID NO: 41220 - protein, 31 aa, Artificial Sequence
  Cyclic GFR-binding peptide
  MOD_RES (29), (30): Xaa is C or S
VIMRHKRLIKPTKGIYYLISTASLDQSVXXP

SEQ ID NO: 41221 - protein, 27 aa, Artificial Sequence
  Cyclic GFR-binding peptide
MNYHYKLIVNSSDDKYLVSIPSLKTPA

SEQ ID NO: 41222 - protein, 33 aa, Artificial Sequence
  Cyclic GFR-binding peptide
  MOD_RES (30), (30): Xaa is C or S
VVMNYHYKLIVNSSDDKYLVSIPSLKTPAXTPK

SEQ ID NO: 41223 - protein, 29 aa, Artificial Sequence
  Cyclic GFR-binding peptide
  MOD_RES (27), (28): Xaa is C or S
MRHKRLVKPKRGVYYLISTASLAQPVXXP

SEQ ID NO: 41224 - protein, 29 aa, Artificial Sequence
  Cyclic GFR-binding peptide
  MOD_RES (1), (3): Xaa is C or S
XGXGEVVMERHKRLVVKDYEDYYLMSTAS

SEQ ID NO: 41225 - protein, 34 aa, Artificial Sequence; identical to SEQ ID NO: 3827
  Cyclic GFR-binding peptide
  MOD_RES (31), (32): Xaa is C or S

SEQ ID NO: 41226 - protein, 38 aa, Artificial Sequence; identical to SEQ ID NO: 3830
  Cyclic GFR-binding peptide
  MOD_RES (1), (3), (34), (35): Xaa is C or S

SEQ ID NO: 41227 - protein, 30 aa, Artificial Sequence
  Cyclic GFR-binding peptide
ALHDELTQYNKLFIPKKRVIELYLVSIASL

SEQ ID NO: 41228 - protein, 37 aa, Artificial Sequence; identical to SEQ ID NO: 3833
  Cyclic GFR-binding peptide
  MOD_RES (1), (33), (34): Xaa is C or S

SEQ ID NO: 41229 - protein, 37 aa, Artificial Sequence; identical to SEQ ID NO: 3836
  Cyclic GFR-binding peptide
  MOD_RES (1), (33): Xaa is C or S

SEQ ID NO: 41230 - protein, 31 aa, Artificial Sequence
  Cyclic GFR-binding peptide
  MOD_RES (2), (4): Xaa is C or S
SXKXSKVIMRYKKLIKPTKGIFYLISIANLD

SEQ ID NO: 41231 - protein, 32 aa, Artificial Sequence
  Cyclic GFR-binding peptide
  MOD_RES (28), (29): Xaa is C or S
MDYHYKLVVKENEDKYLMSIPSLETPVXXAKP

SEQ ID NO: 41232 - protein, 24 aa, Artificial Sequence
  Cyclic GFR-binding peptide
NYHYKLIVNSSDDKYLVSIPSLQT

SEQ ID NO: 41233 - protein, 36 aa, Artificial Sequence; identical to SEQ ID NO: 3837
  Cyclic GFR-binding peptide
  MOD_RES (2), (4), (35), (36): Xaa is C or S

SEQ ID NO: 41234 - protein, 34 aa, Artificial Sequence
  Cyclic GFR-binding peptide
  MOD_RES (2), (4): Xaa is C or S
RXGXGEVVMDYHYKLVVKENEDKYLMSIPSLETP

SEQ ID NO: 41235 - protein, 36 aa, Artificial Sequence; identical to SEQ ID NO: 3838
  Cyclic GFR-binding peptide
  MOD_RES (1), (33), (34): Xaa is C or S

SEQ ID NO: 41236 - protein, 32 aa, Artificial Sequence
  Cyclic GFR-binding peptide
  MOD_RES (32), (32): Xaa is C or S
LTYHYKLFIPKKRVIEKYLVSIPSLQVQTPRX

SEQ ID NO: 41237 - protein, 37 aa, Artificial Sequence; identical to SEQ ID NO: 3839
  Cyclic GFR-binding peptide
  MOD_RES (1), (3): Xaa is C or S

SEQ ID NO: 41238 - protein, 24 aa, Artificial Sequence
  Cyclic GFR-binding peptide
MDRHKRLVVKENEDYYLMSTASLE

SEQ ID NO: 41239 - protein, 36 aa, Artificial Sequence; identical to SEQ ID NO: 3840
  Cyclic GFR-binding peptide
  MOD_RES (31), (32): Xaa is C or S

SEQ ID NO: 41240 - protein, 37 aa, Artificial Sequence; identical to SEQ ID NO: 3842
  Cyclic GFR-binding peptide
  MOD_RES (2), (4), (36), (37): Xaa is C or S

SEQ ID NO: 41241 - protein, 35 aa, Artificial Sequence; identical to SEQ ID NO: 3843
  Cyclic GFR-binding peptide
  MOD_RES (1), (32), (33): Xaa is C or S

SEQ ID NO: 41242 - protein, 35 aa, Artificial Sequence; identical to SEQ ID NO: 3844
  Cyclic GFR-binding peptide
  MOD_RES (31), (32): Xaa is C or S

SEQ ID NO: 41243 - protein, 35 aa, Artificial Sequence; identical to SEQ ID NO: 3845
  Cyclic GFR-binding peptide

SEQ ID NO: 41244 - protein, 37 aa, Artificial Sequence; identical to SEQ ID NO: 3847
  Cyclic GFR-binding peptide
  MOD_RES (1), (32), (33): Xaa is C or S

SEQ ID NO: 41245 - protein, 39 aa, Artificial Sequence; identical to SEQ ID NO: 3849
  Cyclic GFR-binding peptide
  MOD_RES (2), (4), (37), (38): Xaa is C or S

SEQ ID NO: 41246 - protein, 34 aa, Artificial Sequence
  Cyclic GFR-binding peptide
  MOD_RES (31), (31): Xaa is C or S
TRHKRLFIPKKRVIEYYLVSTASLQVQTPRXQVN

SEQ ID NO: 41247 - protein, 37 aa, Artificial Sequence; identical to SEQ ID NO: 3851
  Cyclic GFR-binding peptide
  MOD_RES (1), (33), (34): Xaa is C or S

SEQ ID NO: 41248 - protein, 26 aa, Artificial Sequence
  Cyclic GFR-binding peptide
VSMGERHKRLTPVGMDDYYLVSTASL

SEQ ID NO: 41249 - protein, 28 aa, Artificial Sequence
  Cyclic GFR-binding peptide
VMDYHYKLVVKENEDKYLMSIPSLETPV

SEQ ID NO: 41250 - protein, 31 aa, Artificial Sequence
  Cyclic GFR-binding peptide
  MOD_RES (29), (30): Xaa is C or S
VMNRHKRLIVNSSDDYYLVSTASLQTPAXXP

SEQ ID NO: 41251 - protein, 29 aa, Artificial Sequence
  Cyclic GFR-binding peptide
AVSMGEQYNKLTPVGMDDLYLVSIASLKT

SEQ ID NO: 41252 - protein, 42 aa, Artificial Sequence; identical to SEQ ID NO: 3854
  Cyclic GFR-binding peptide
  MOD_RES (2), (4), (36), (37): Xaa is C or S

SEQ ID NO: 41253 - protein, 38 aa, Artificial Sequence; identical to SEQ ID NO: 3855
  Cyclic GFR-binding peptide
  MOD_RES (2), (34), (35): Xaa is C or S

SEQ ID NO: 41254 - protein, 39 aa, Artificial Sequence; identical to SEQ ID NO: 3856
  Cyclic GFR-binding peptide
  MOD_RES (2), (34), (35): Xaa is C or S

SEQ ID NO: 41255 - protein, 38 aa, Artificial Sequence; identical to SEQ ID NO: 3858
  Cyclic GFR-binding peptide
  MOD_RES (1), (3), (34), (35): Xaa is C or S

SEQ ID NO: 41256 - protein, 21 aa, Artificial Sequence
  Cyclic GFR-binding peptide
NYHYKLIVNSSDDKYLVSIPS

SEQ ID NO: 41257 - protein, 35 aa, Artificial Sequence; identical to SEQ ID NO: 3861
  Cyclic GFR-binding peptide
  MOD_RES (1), (32), (33): Xaa is C or S

SEQ ID NO: 41258 - protein, 27 aa, Artificial Sequence
  Cyclic GFR-binding peptide
VIMRYKKLVKPKRGVFYLISIANLAQP

SEQ ID NO: 41259 - protein, 37 aa, Artificial Sequence; identical to SEQ ID NO: 3865
  Cyclic GFR-binding peptide
  MOD_RES (2), (4), (36), (37): Xaa is C or S

SEQ ID NO: 41260 - protein, 35 aa, Artificial Sequence
  Cyclic GFR-binding peptide
  MOD_RES (29), (30): Xaa is C or S
VMEYHYKLVVKDYEDKYLMSIPSLETPVXXAKPIS

SEQ ID NO: 41261 - protein, 24 aa, Artificial Sequence
  Cyclic GFR-binding peptide
VVMNYHYKLIVNNSSDKYLVSIPS

SEQ ID NO: 41262 - protein, 34 aa, Artificial Sequence
  Cyclic GFR-binding peptide
  MOD_RES (32), (32): Xaa is C or S
LTRYKKLFIPKKRVIEFYLVSIANLQVQTPRXQV

SEQ ID NO: 41263 - protein, 29 aa, Artificial Sequence
  Cyclic GFR-binding peptide
  MOD_RES (2), (2): Xaa is C or S
GXEAVSMGERYKKLTPVGMDDFYLVSIAN

SEQ ID NO: 41264 - protein, 34 aa, Artificial Sequence
  Cyclic GFR-binding peptide
  MOD_RES (29), (30): Xaa is C or S
VMDRHKRLVVKENEDYYLMSTASLETPVXXAKPI

SEQ ID NO: 41265 - protein, 35 aa, Artificial Sequence; identical to SEQ ID NO: 3867
  Cyclic GFR-binding peptide
  MOD_RES (1), (3), (35): Xaa is C or S

SEQ ID NO: 41266 - protein, 32 aa, Artificial Sequence; identical to SEQ ID NO: 3869
  Cyclic GFR-binding peptide
  MOD_RES (2), (2): Xaa is C or S

SEQ ID NO: 41267 - protein, 29 aa, Artificial Sequence
  Cyclic GFR-binding peptide
LHDELTYHYKLFIPKKRVIEKYLVSIPSL

SEQ ID NO: 41268 - protein, 29 aa, Artificial Sequence
  Cyclic GFR-binding peptide
  MOD_RES (1), (3): Xaa is C or S
XGXARVVMNYHYKLIVNSSDDKYLVSIPS

SEQ ID NO: 41269 - protein, 26 aa, Artificial Sequence
  Cyclic GFR-binding peptide
ARVVMNQYNKLIVNSSDDLYLVSIAS

SEQ ID NO: 41270 - protein, 31 aa, Artificial Sequence
  Cyclic GFR-binding peptide
  MOD_RES (30), (30): Xaa is C or S
VVMNRHKRLIVNSSDDYYLVSTASLKTPAXT

SEQ ID NO: 41271 - protein, 27 aa, Artificial Sequence
  Cyclic GFR-binding peptide
DELTYHYKLFIPKKRVIEKYLVSIPSL

SEQ ID NO: 41272 - protein, 32 aa, Artificial Sequence
  Cyclic GFR-binding peptide
  MOD_RES (26), (27): Xaa is C or S
YHYKLVKPTRGVKYLISIPSLDQPVXXPSASA

SEQ ID NO: 41273 - protein, 36 aa, Artificial Sequence; identical to SEQ ID NO: 3871
  Cyclic GFR-binding peptide
  MOD_RES (31), (32): Xaa is C or S

SEQ ID NO: 41274 - protein, 35 aa, Artificial Sequence; identical to SEQ ID NO: 3872
  Cyclic GFR-binding peptide
  MOD_RES (1), (33), (34): Xaa is C or S

SEQ ID NO: 41275 - protein, 39 aa, Artificial Sequence; identical to SEQ ID NO: 3873
  Cyclic GFR-binding peptide
  MOD_RES (2), (4), (36): Xaa is C or S

SEQ ID NO: 41276 - protein, 24 aa, Artificial Sequence
  Cyclic GFR-binding peptide
MNYHYKLIVNSSDDKYLVSIPSLK

SEQ ID NO: 41277 - protein, 42 aa, Artificial Sequence; identical to SEQ ID NO: 3875
  Cyclic GFR-binding peptide
  MOD_RES (2), (4), (36), (37): Xaa is C or S

SEQ ID NO: 41278 - protein, 31 aa, Artificial Sequence
  Cyclic GFR-binding peptide
  MOD_RES (28), (29): Xaa is C or S
IMQYNKLIKPTKGILYLISIASLDQSVXXPS

SEQ ID NO: 41279 - protein, 36 aa, Artificial Sequence
  Cyclic GFR-binding peptide
  MOD_RES (30), (31): Xaa is C or S
VVMNYHYKLIVNNSSDKYLVSIPSLKTPAXXAKPVA

SEQ ID NO: 41280 - protein, 33 aa, Artificial Sequence
  Cyclic GFR-binding peptide
  MOD_RES (28), (29): Xaa is C or S
IMYHYKLVKPKRGVKYLISIPSLAQPVXXPAAS

SEQ ID NO: 41281 - protein, 40 aa, Artificial Sequence; identical to SEQ ID NO: 3876
  Cyclic GFR-binding peptide
  MOD_RES (2), (34), (35): Xaa is C or S

SEQ ID NO: 41282 - protein, 27 aa, Artificial Sequence
  Cyclic GFR-binding peptide
TQYNKLFIPKKRVIELYLVSIASLQVQ

SEQ ID NO: 41283 - protein, 27 aa, Artificial Sequence
  Cyclic GFR-binding peptide
MERYKKLVVKDYEDFYLMSIANLETPV

SEQ ID NO: 41284 - protein, 37 aa, Artificial Sequence; identical to SEQ ID NO: 3877
  Cyclic GFR-binding peptide
  MOD_RES (2), (4), (36), (37): Xaa is C or S

SEQ ID NO: 41285 - protein, 29 aa, Artificial Sequence
  Cyclic GFR-binding peptide
  MOD_RES (28), (29): Xaa is C or S
MNQYNKLIVNSSDDLYLVSIASLKTPAXX

SEQ ID NO: 41286 - protein, 35 aa, Artificial Sequence; identical to SEQ ID NO: 3878
  Cyclic GFR-binding peptide
  MOD_RES (31), (32): Xaa is C or S

SEQ ID NO: 41287 - protein, 42 aa, Artificial Sequence; identical to SEQ ID NO: 3880
  Cyclic GFR-binding peptide
  MOD_RES (2), (39): Xaa is C or S

SEQ ID NO: 41288 - protein, 37 aa, Artificial Sequence; identical to SEQ ID NO: 3881
  Cyclic GFR-binding peptide
  MOD_RES (1), (32), (33): Xaa is C or S

SEQ ID NO: 41289 - protein, 30 aa, Artificial Sequence
  Cyclic GFR-binding peptide
  MOD_RES (27), (28): Xaa is C or S
ERHKRLVVKDYEDYYLMSTASLETPVXXAK

SEQ ID NO: 41290 - protein, 30 aa, Artificial Sequence
  Cyclic GFR-binding peptide
GEVVMERYKKLVVKDYEDFYLMSIANLETP

SEQ ID NO: 41291 - protein, 40 aa, Artificial Sequence; identical to SEQ ID NO: 3882
  Cyclic GFR-binding peptide
  MOD_RES (37), (37): Xaa is C or S

SEQ ID NO: 41292 - protein, 33 aa, Artificial Sequence
  Cyclic GFR-binding peptide
  MOD_RES (31), (32): Xaa is C or S
VSMGEQYNKLTPVGMDDLYLVSIASLKTPVXXA

SEQ ID NO: 41293 - protein, 32 aa, Artificial Sequence
  Cyclic GFR-binding peptide
  MOD_RES (1), (3): Xaa is C or S
XKXALHDELTYHYKLFIPKKRVIEKYLVSIPS

SEQ ID NO: 41294 - protein, 34 aa, Artificial Sequence; identical to SEQ ID NO: 3884
  Cyclic GFR-binding peptide
  MOD_RES (33), (34): Xaa is C or S

SEQ ID NO: 41295 - protein, 32 aa, Artificial Sequence
  Cyclic GFR-binding peptide
  MOD_RES (27), (28): Xaa is C or S
DRHKRLVVKENEDYYLMSTASLETPVXXAKPI

SEQ ID NO: 41296 - protein, 35 aa, Artificial Sequence
  Cyclic GFR-binding peptide
  MOD_RES (2), (4): Xaa is C or S
EXKXALHDELTRYKKLFIPKKRVIEFYLVSIANLQ

SEQ ID NO: 41297 - protein, 30 aa, Artificial Sequence
  Cyclic GFR-binding peptide
  MOD_RES (28), (29): Xaa is C or S
MNRYKKLIVNNSSDFYLVSIANLKTPAXXA

SEQ ID NO: 41298 - protein, 26 aa, Artificial Sequence
  Cyclic GFR-binding peptide
MQYNKLVKPKRGVLYLISIASLAQPV

SEQ ID NO: 41299 - protein, 35 aa, Artificial Sequence; identical to SEQ ID NO: 3885
  Cyclic GFR-binding peptide
  MOD_RES (32), (33): Xaa is C or S

SEQ ID NO: 41300 - protein, 29 aa, Artificial Sequence
  Cyclic GFR-binding peptide
  MOD_RES (26), (27): Xaa is C or S
RHKRLIKPTKGIYYLISTASLDQSVXXPS

SEQ ID NO: 41301 - protein, 28 aa, Artificial Sequence
  Cyclic GFR-binding peptide
SKVIMRHKRLIKPTKGIYYLISTASLDQ

SEQ ID NO: 41302 - protein, 27 aa, Artificial Sequence
  Cyclic GFR-binding peptide
  MOD_RES (27), (27): Xaa is C or S
NRHKRLIVNSSDDYYLVSTASLQTPAX

SEQ ID NO: 41303 - protein, 28 aa, Artificial Sequence
  Cyclic GFR-binding peptide
  MOD_RES (26), (27): Xaa is C or S
YHYKLVVKDYEDKYLMSIPSLETPVXXA

SEQ ID NO: 41304 - protein, 28 aa, Artificial Sequence
  Cyclic GFR-binding peptide
  MOD_RES (1), (1): Xaa is C or S
XAKVVMNQYNKLIVNNSSDLYLVSIASL

SEQ ID NO: 41305 - protein, 27 aa, Artificial Sequence
  Cyclic GFR-binding peptide
  MOD_RES (27), (27): Xaa is C or S
MRHKRLVKPTRGVYYLISTASLDQPVX

SEQ ID NO: 41306 - protein, 28 aa, Artificial Sequence
  Cyclic GFR-binding peptide
  MOD_RES (2), (2): Xaa is C or S
GXAKVVMNYHYKLIVNNSSDKYLVSIPS

SEQ ID NO: 41307 - protein, 38 aa, Artificial Sequence; identical to SEQ ID NO: 3891
  Cyclic GFR-binding peptide
  MOD_RES (2), (4), (35), (36): Xaa is C or S

SEQ ID NO: 41308 - protein, 30 aa, Artificial Sequence
  Cyclic GFR-binding peptide
  MOD_RES (1), (1): Xaa is C or S
XEAVSMGERYKKLTPVGMDDFYLVSIANLK

SEQ ID NO: 41309 - protein, 28 aa, Artificial Sequence
  Cyclic GFR-binding peptide
SRVVMNRHKRLIVNSSDDYYLVSTASLK

SEQ ID NO: 41310 - protein, 32 aa, Artificial Sequence
  Cyclic GFR-binding peptide
  MOD_RES (28), (29): Xaa is C or S
MERHKRLVVKDYEDYYLMSTASLETPVXXAKP

SEQ ID NO: 41311 - protein, 30 aa, Artificial Sequence
  Cyclic GFR-binding peptide
  MOD_RES (28), (29): Xaa is C or S
MNRHKRLIVNSSDDYYLVSTASLKTPAXXP

SEQ ID NO: 41312 - protein, 25 aa, Artificial Sequence
  Cyclic GFR-binding peptide
VVMRHKRLVKPTRGVYYLISTASLD

SEQ ID NO: 41313 - protein, 29 aa, Artificial Sequence
  Cyclic GFR-binding peptide
  MOD_RES (27), (28): Xaa is C or S
NQYNKLIVNSSDDLYLVSIASLKTPAXXP

SEQ ID NO: 41314 - protein, 31 aa, Artificial Sequence
  Cyclic GFR-binding peptide
  MOD_RES (2), (4): Xaa is C or S
SXKXSRVIMRHKRLVKPKRGVYYLISTASLA

SEQ ID NO: 41315 - protein, 38 aa, Artificial Sequence; identical to SEQ ID NO: 3893
  Cyclic GFR-binding peptide
  MOD_RES (1), (32), (33): Xaa is C or S

SEQ ID NO: 41316 - protein, 30 aa, Artificial Sequence
  Cyclic GFR-binding peptide
SRVVMNRHKRLIVNSSDDYYLVSTASLKTP

SEQ ID NO: 41317 - protein, 34 aa, Artificial Sequence; identical to SEQ ID NO: 3895
  Cyclic GFR-binding peptide
  MOD_RES (32), (33): Xaa is C or S

SEQ ID NO: 41318 - protein, 31 aa, Artificial Sequence
  Cyclic GFR-binding peptide
  MOD_RES (2), (2): Xaa is C or S
GXGEVVMDRHKRLVVKENEDYYLMSTASLET

SEQ ID NO: 41319 - protein, 36 aa, Artificial Sequence; identical to SEQ ID NO: 3897
  Cyclic GFR-binding peptide
  MOD_RES (31), (32): Xaa is C or S

SEQ ID NO: 41320 - protein, 22 aa, Artificial Sequence
  Cyclic GFR-binding peptide
MNYHYKLIVNNSSDKYLVSIPS

SEQ ID NO: 41321 - protein, 31 aa, Artificial Sequence
  Cyclic GFR-binding peptide
  MOD_RES (28), (29): Xaa is C or S
VMQYNKLVKPTRGVLYLISIASLDQPVXXPS

SEQ ID NO: 41322 - protein, 21 aa, Artificial Sequence
  Cyclic GFR-binding peptide
MRYKKLVKPKRGVFYLISIAN

SEQ ID NO: 41323 - protein, 31 aa, Artificial Sequence
  Cyclic GFR-binding peptide
  MOD_RES (29), (30): Xaa is C or S
VVMQYNKLVKPTRGVLYLISIASLDQPVXXP

SEQ ID NO: 41324 - protein, 27 aa, Artificial Sequence
  Cyclic GFR-binding peptide
DELTRYKKLFIPKKRVIEFYLVSIANL

SEQ ID NO: 41325 - protein, 37 aa, Artificial Sequence; identical to SEQ ID NO: 3900
  Cyclic GFR-binding peptide
  MOD_RES (2), (34), (35): Xaa is C or S

SEQ ID NO: 41326 - protein, 38 aa, Artificial Sequence; identical to SEQ ID NO: 3902
  Cyclic GFR-binding peptide
  MOD_RES (1), (3), (35): Xaa is C or S

SEQ ID NO: 41327 - protein, 30 aa, Artificial Sequence
  Cyclic GFR-binding peptide
  MOD_RES (2), (4): Xaa is C or S
SXKXSRVIMRYKKLVKPKRGVFYLISIANL

SEQ ID NO: 41328 - protein, 35 aa, Artificial Sequence; identical to SEQ ID NO: 3904
  Cyclic GFR-binding peptide
  MOD_RES (1), (33), (34): Xaa is C or S

SEQ ID NO: 41329 - protein, 34 aa, Artificial Sequence
  Cyclic GFR-binding peptide
  MOD_RES (2), (4): Xaa is C or S
HXGXSRVVMNQYNKLIVNSSDDLYLVSIASLKTP

SEQ ID NO: 41330 - protein, 33 aa, Artificial Sequence; identical to SEQ ID NO: 3905
  Cyclic GFR-binding peptide
  MOD_RES (31), (32): Xaa is C or S

SEQ ID NO: 41331 - protein, 30 aa, Artificial Sequence
  Cyclic GFR-binding peptide
  MOD_RES (27), (28): Xaa is C or S
EQYNKLTPVGMDDLYLVSIASLKTPVXXAK

SEQ ID NO: 41332 - protein, 31 aa, Artificial Sequence
  Cyclic GFR-binding peptide
  MOD_RES (1), (1): Xaa is C or S
XEAVSMGERHKRLTPVGMDDYYLVSTASLKT

SEQ ID NO: 41333 - protein, 41 aa, Artificial Sequence; identical to SEQ ID NO: 3906
  Cyclic GFR-binding peptide
  MOD_RES (2), (4), (35), (36): Xaa is C or S

SEQ ID NO: 41334 - protein, 38 aa, Artificial Sequence; identical to SEQ ID NO: 3908
  Cyclic GFR-binding peptide
  MOD_RES (33), (34): Xaa is C or S

SEQ ID NO: 41335 - protein, 23 aa, Artificial Sequence
  Cyclic GFR-binding peptide
VIMRHKRLIKPTKGIYYLISTAS

SEQ ID NO: 41336 - protein, 22 aa, Artificial Sequence
  Cyclic GFR-binding peptide
NYHYKLIVNNSSDKYLVSIPSL

SEQ ID NO: 41337 - protein, 34 aa, Artificial Sequence
  Cyclic GFR-binding peptide
  MOD_RES (28), (29): Xaa is C or S
GERHKRLTPVGMDDYYLVSTASLKTPVXXAKGVK

SEQ ID NO: 41338 - protein, 34 aa, Artificial Sequence; identical to SEQ ID NO: 3909
  Cyclic GFR-binding peptide
  MOD_RES (31), (32): Xaa is C or S

SEQ ID NO: 41339 - protein, 27 aa, Artificial Sequence
  Cyclic GFR-binding peptide
YHYKLFIPKKRVIEKYLVSIPSLQVQT

SEQ ID NO: 41340 - protein, 28 aa, Artificial Sequence
  Cyclic GFR-binding peptide
GEVVMERYKKLVVKDYEDFYLMSIANLE

SEQ ID NO: 41341 - protein, 31 aa, Artificial Sequence
  Cyclic GFR-binding peptide
  MOD_RES (27), (28): Xaa is C or S
ERYKKLVVKDYEDFYLMSIANLETPVXXAKP

SEQ ID NO: 41342 - protein, 41 aa, Artificial Sequence; identical to SEQ ID NO: 3914
  Cyclic GFR-binding peptide
  MOD_RES (2), (4), (41): Xaa is C or S

SEQ ID NO: 41343 - protein, 33 aa, Artificial Sequence
  Cyclic GFR-binding peptide
  MOD_RES (30), (31): Xaa is C or S
KVVMRHKRLVKPTRGVYYLISTASLDQPVXXPS

SEQ ID NO: 41344 - protein, 34 aa, Artificial Sequence
  Cyclic GFR-binding peptide
  MOD_RES (29), (30): Xaa is C or S
VIMRHKRLVKPKRGVYYLISTASLAQPVXXPAAS

SEQ ID NO: 41345 - protein, 27 aa, Artificial Sequence
  Cyclic GFR-binding peptide
MNQYNKLIVNSSDDLYLVSIASLQTPA

SEQ ID NO: 41346 - protein, 30 aa, Artificial Sequence
  Cyclic GFR-binding peptide
  MOD_RES (28), (28): Xaa is C or S
MNRHKRLIVNSSDDYYLVSTASLKTPAXTP

SEQ ID NO: 41347 - protein, 38 aa, Artificial Sequence; identical to SEQ ID NO: 3921
  Cyclic GFR-binding peptide
  MOD_RES (1), (32), (33): Xaa is C or S

SEQ ID NO: 41348 - protein, 30 aa, Artificial Sequence
  Cyclic GFR-binding peptide
  MOD_RES (1), (1): Xaa is C or S
XSKVIMYHYKLIKPTKGIKYLISIPSLDQS

SEQ ID NO: 41349 - protein, 30 aa, Artificial Sequence; identical to SEQ ID NO: 3922
  Cyclic GFR-binding peptide

SEQ ID NO: 41350 - protein, 36 aa, Artificial Sequence; identical to SEQ ID NO: 3923
  Cyclic GFR-binding peptide
  MOD_RES (36), (36): Xaa is C or S

SEQ ID NO: 41351 - protein, 25 aa, Artificial Sequence
  Cyclic GFR-binding peptide
ERYKKLVVKDYEDFYLMSIANLETP

SEQ ID NO: 41352 - protein, 30 aa, Artificial Sequence
  Cyclic GFR-binding peptide
  MOD_RES (2), (4): Xaa is C or S
HXGXARVVMNRHKRLIVNSSDDYYLVSTAS

SEQ ID NO: 41353 - protein, 34 aa, Artificial Sequence
  Cyclic GFR-binding peptide
  MOD_RES (2), (4): Xaa is C or S
RXGXEAVSMGEQYNKLTPVGMDDLYLVSIASLKT

SEQ ID NO: 41354 - protein, 32 aa, Artificial Sequence; identical to SEQ ID NO: 3924
  Cyclic GFR-binding peptide
  MOD_RES (1), (32): Xaa is C or S

SEQ ID NO: 41355 - protein, 31 aa, Artificial Sequence; identical to SEQ ID NO: 3925
  Cyclic GFR-binding peptide
  MOD_RES (1), (1): Xaa is C or S

SEQ ID NO: 41356 - protein, 23 aa, Artificial Sequence
  Cyclic GFR-binding peptide
RYKKLVVKDYEDFYLMSIANLET

SEQ ID NO: 41357 - protein, 30 aa, Artificial Sequence
  Cyclic GFR-binding peptide
  MOD_RES (26), (27): Xaa is C or S
RYKKLTPVGMDDFYLVSIANLKTPVXXAKG

SEQ ID NO: 41358 - protein, 22 aa, Artificial Sequence
  Cyclic GFR-binding peptide
EQYNKLTPVGMDDLYLVSIASL

SEQ ID NO: 41359 - protein, 28 aa, Artificial Sequence
  Cyclic GFR-binding peptide
  MOD_RES (2), (2): Xaa is C or S
KXSKVIMQYNKLIKPTKGILYLISIASL

SEQ ID NO: 41360 - protein, 23 aa, Artificial Sequence
  Cyclic GFR-binding peptide
MGERHKRLTPVGMDDYYLVSTAS

SEQ ID NO: 41361 - protein, 30 aa, Artificial Sequence
  Cyclic GFR-binding peptide
  MOD_RES (27), (28): Xaa is C or S
MRYKKLIKPTKGIFYLISIANLDQSVXXPS

SEQ ID NO: 41362 - protein, 36 aa, Artificial Sequence; identical to SEQ ID NO: 3928
  Cyclic GFR-binding peptide
  MOD_RES (2), (4), (35), (36): Xaa is C or S

SEQ ID NO: 41363 - protein, 35 aa, Artificial Sequence; identical to SEQ ID NO: 3929
  Cyclic GFR-binding peptide
  MOD_RES (2), (4), (35): Xaa is C or S

SEQ ID NO: 41364 - protein, 40 aa, Artificial Sequence; identical to SEQ ID NO: 3930
  Cyclic GFR-binding peptide
  MOD_RES (1), (3), (34), (35): Xaa is C or S

SEQ ID NO: 41365 - protein, 34 aa, Artificial Sequence
  Cyclic GFR-binding peptide
  MOD_RES (30), (31): Xaa is C or S
RVIMYHYKLVKPKRGVKYLISIPSLAQPVXXPAA

SEQ ID NO: 41366 - protein, 36 aa, Artificial Sequence
  Cyclic GFR-binding peptide
  MOD_RES (32), (32): Xaa is C or S
LTYHYKLFIPKKRVIEKYLVSIPSLQVQTPRXQVNR

SEQ ID NO: 41367 - protein, 30 aa, Artificial Sequence
  Cyclic GFR-binding peptide
  MOD_RES (2), (2): Xaa is C or S
GXGEVVMDRYKKLVVKENEDFYLMSIANLE

SEQ ID NO: 41368 - protein, 28 aa, Artificial Sequence
  Cyclic GFR-binding peptide
  MOD_RES (2), (2): Xaa is C or S
GXSRVVMNYHYKLIVNSSDDKYLVSIPS

SEQ ID NO: 41369 - protein, 34 aa, Artificial Sequence
  Cyclic GFR-binding peptide
  MOD_RES (28), (29): Xaa is C or S
MERHKRLVVKDYEDYYLMSTASLETPVXXAKPIS

SEQ ID NO: 41370 - protein, 32 aa, Artificial Sequence
  Cyclic GFR-binding peptide
  MOD_RES (27), (28): Xaa is C or S
NQYNKLIVNNSSDLYLVSIASLKTPAXXAKPV

SEQ ID NO: 41371 - protein, 37 aa, Artificial Sequence; identical to SEQ ID NO: 3932
  Cyclic GFR-binding peptide
  MOD_RES (2), (4), (35), (36): Xaa is C or S

SEQ ID NO: 41372 - protein, 31 aa, Artificial Sequence
  Cyclic GFR-binding peptide
  MOD_RES (30), (31): Xaa is C or S
VVMNRHKRLIVNSSDDYYLVSTASLQTPAXX

SEQ ID NO: 41373 - protein, 35 aa, Artificial Sequence; identical to SEQ ID NO: 3934
  Cyclic GFR-binding peptide
  MOD_RES (1), (3), (34), (35): Xaa is C or S

SEQ ID NO: 41374 - protein, 30 aa, Artificial Sequence
  Cyclic GFR-binding peptide
  MOD_RES (2), (2): Xaa is C or S
KXSKVVMYHYKLVKPTRGVKYLISIPSLDQ

SEQ ID NO: 41375 - protein, 36 aa, Artificial Sequence; identical to SEQ ID NO: 3936
  Cyclic GFR-binding peptide
  MOD_RES (2), (4), (36): Xaa is C or S

SEQ ID NO: 41376 - protein, 38 aa, Artificial Sequence; identical to SEQ ID NO: 3937
  Cyclic GFR-binding peptide
  MOD_RES (1), (33), (34): Xaa is C or S

SEQ ID NO: 41377 - protein, 36 aa, Artificial Sequence
  Cyclic GFR-binding peptide
  MOD_RES (33), (33): Xaa is C or S
ELTRYKKLFIPKKRVIEFYLVSIANLQVQTPRXQVN

SEQ ID NO: 41378 - protein, 30 aa, Artificial Sequence
  Cyclic GFR-binding peptide
  MOD_RES (2), (2): Xaa is C or S
GXEAVSMGEQYNKLTPVGMDDLYLVSIASL

SEQ ID NO: 41379 - protein, 29 aa, Artificial Sequence
  Cyclic GFR-binding peptide
  MOD_RES (2), (2): Xaa is C or S
GXSRVVMNYHYKLIVNSSDDKYLVSIPSL

SEQ ID NO: 41380 - protein, 29 aa, Artificial Sequence
  Cyclic GFR-binding peptide
  MOD_RES (2), (4): Xaa is C or S
SXKXSKVVMYHYKLVKPTRGVKYLISIPS

SEQ ID NO: 41381 - protein, 25 aa, Artificial Sequence
  Cyclic GFR-binding peptide
MNYHYKLIVNSSDDKYLVSIPSLKT

SEQ ID NO: 41382 - protein, 29 aa, Artificial Sequence
  Cyclic GFR-binding peptide
  MOD_RES (2), (4): Xaa is C or S
SXKXSRVIMRYKKLVKPKRGVFYLISIAN

SEQ ID NO: 41383 - protein, 30 aa, Artificial Sequence; identical to SEQ ID NO: 1829
  Cyclic GFR-binding peptide

SEQ ID NO: 41384 - protein, 29 aa, Artificial Sequence
  Cyclic GFR-binding peptide
  MOD_RES (29), (29): Xaa is C or S
VMNQYNKLIVNNSSDLYLVSIASLKTPAX

SEQ ID NO: 41385 - protein, 23 aa, Artificial Sequence
  Cyclic GFR-binding peptide
NYHYKLIVNSSDDKYLVSIPSLK

SEQ ID NO: 41386 - protein, 37 aa, Artificial Sequence; identical to SEQ ID NO: 3941
  Cyclic GFR-binding peptide
  MOD_RES (1), (3), (35), (36): Xaa is C or S

SEQ ID NO: 41387 - protein, 26 aa, Artificial Sequence
  Cyclic GFR-binding peptide
DELTYHYKLFIPKKRVIEKYLVSIPS

SEQ ID NO: 41388 - protein, 33 aa, Artificial Sequence
  Cyclic GFR-binding peptide
  MOD_RES (29), (30): Xaa is C or S
MGERHKRLTPVGMDDYYLVSTASLKTPVXXAKG

SEQ ID NO: 41389 - protein, 38 aa, Artificial Sequence; identical to SEQ ID NO: 3946
  Cyclic GFR-binding peptide
  MOD_RES (2), (35), (36): Xaa is C or S

SEQ ID NO: 41390 - protein, 31 aa, Artificial Sequence; identical to SEQ ID NO: 3949
  Cyclic GFR-binding peptide
  MOD_RES (31), (31): Xaa is C or S

SEQ ID NO: 41391 - protein, 33 aa, Artificial Sequence
  Cyclic GFR-binding peptide
  MOD_RES (29), (30): Xaa is C or S
VMERHKRLVVKDYEDYYLMSTASLETPVXXAKP

SEQ ID NO: 41392 - protein, 38 aa, Artificial Sequence; identical to SEQ ID NO: 3950
  Cyclic GFR-binding peptide
  MOD_RES (1), (33): Xaa is C or S

SEQ ID NO: 41393 - protein, 31 aa, Artificial Sequence
  Cyclic GFR-binding peptide
  MOD_RES (28), (29): Xaa is C or S
MEYHYKLVVKDYEDKYLMSIPSLETPVXXAK

SEQ ID NO: 41394 - protein, 27 aa, Artificial Sequence
  Cyclic GFR-binding peptide
SRVIMRHKRLVKPKRGVYYLISTASLA

SEQ ID NO: 41395 - protein, 35 aa, Artificial Sequence; identical to SEQ ID NO: 3951
  Cyclic GFR-binding peptide
  MOD_RES (2), (4), (35): Xaa is C or S

SEQ ID NO: 41396 - protein, 30 aa, Artificial Sequence
  Cyclic GFR-binding peptide
  MOD_RES (1), (1): Xaa is C or S
XALHDELTRHKRLFIPKKRVIEYYLVSTAS

SEQ ID NO: 41397 - protein, 29 aa, Artificial Sequence
  Cyclic GFR-binding peptide
  MOD_RES (26), (27): Xaa is C or S
RYKKLVKPTRGVFYLISIANLDQPVXXPS

SEQ ID NO: 41398 - protein, 21 aa, Artificial Sequence
  Cyclic GFR-binding peptide
RHKRLIKPTKGIYYLISTASL

SEQ ID NO: 41399 - protein, 35 aa, Artificial Sequence; identical to SEQ ID NO: 3952
  Cyclic GFR-binding peptide
  MOD_RES (1), (3), (35): Xaa is C or S

SEQ ID NO: 41400 - protein, 35 aa, Artificial Sequence; identical to SEQ ID NO: 3953
  Cyclic GFR-binding peptide
  MOD_RES (2), (35): Xaa is C or S

SEQ ID NO: 41401 - protein, 37 aa, Artificial Sequence; identical to SEQ ID NO: 3954
  Cyclic GFR-binding peptide
  MOD_RES (31), (32): Xaa is C or S

SEQ ID NO: 41402 - protein, 29 aa, Artificial Sequence
  Cyclic GFR-binding peptide
  MOD_RES (28), (28): Xaa is C or S
MNQYNKLIVNSSDDLYLVSIASLKTPAXT

SEQ ID NO: 41403 - protein, 29 aa, Artificial Sequence
  Cyclic GFR-binding peptide
  MOD_RES (27), (28): Xaa is C or S
NYHYKLIVNNSSDKYLVSIPSLKTPAXXA

SEQ ID NO: 41404 - protein, 32 aa, Artificial Sequence
  Cyclic GFR-binding peptide
  MOD_RES (2), (4): Xaa is C or S
HXGXSRVVMNRHKRLIVNSSDDYYLVSTASLK

SEQ ID NO: 41405 - protein, 27 aa, Artificial Sequence
  Cyclic GFR-binding peptide
MGEQYNKLTPVGMDDLYLVSIASLKTP

SEQ ID NO: 41406 - protein, 27 aa, Artificial Sequence
  Cyclic GFR-binding peptide
  MOD_RES (1), (1): Xaa is C or S
XSKVVMRYKKLVKPTRGVFYLISIANL

SEQ ID NO: 41407 - protein, 22 aa, Artificial Sequence
  Cyclic GFR-binding peptide
NQYNKLIVNSSDDLYLVSIASL

SEQ ID NO: 41408 - protein, 26 aa, Artificial Sequence
  Cyclic GFR-binding peptide
VVMERHKRLVVKDYEDYYLMSTASLE

SEQ ID NO: 41409 - protein, 41 aa, Artificial Sequence; identical to SEQ ID NO: 3955
  Cyclic GFR-binding peptide
  MOD_RES (1), (38): Xaa is C or S

SEQ ID NO: 41410 - protein, 28 aa, Artificial Sequence
  Cyclic GFR-binding peptide
VMDRYKKLVVKENEDFYLMSIANLETPV

SEQ ID NO: 41411 - protein, 41 aa, Artificial Sequence; identical to SEQ ID NO: 3956
  Cyclic GFR-binding peptide
  MOD_RES (2), (4), (36), (37): Xaa is C or S

SEQ ID NO: 41412 - protein, 29 aa, Artificial Sequence
  Cyclic GFR-binding peptide
  MOD_RES (29), (29): Xaa is C or S
VVMYHYKLVKPTRGVKYLISIPSLDQPVX

SEQ ID NO: 41413 - protein, 26 aa, Artificial Sequence
  Cyclic GFR-binding peptide
  MOD_RES (1), (1): Xaa is C or S
XSKVVMYHYKLVKPTRGVKYLISIPS

SEQ ID NO: 41414 - protein, 27 aa, Artificial Sequence
  Cyclic GFR-binding peptide
DELTRHKRLFIPKKRVIEYYLVSTASL

SEQ ID NO: 41415 - protein, 27 aa, Artificial Sequence
  Cyclic GFR-binding peptide
  MOD_RES (2), (2): Xaa is C or S
KXSKVIMYHYKLIKPTKGIKYLISIPS

SEQ ID NO: 41416 - protein, 24 aa, Artificial Sequence
  Cyclic GFR-binding peptide
VIMRYKKLVKPKRGVFYLISIANL

SEQ ID NO: 41417 - protein, 29 aa, Artificial Sequence
  Cyclic GFR-binding peptide
  MOD_RES (27), (28): Xaa is C or S
ERHKRLVVKDYEDYYLMSTASLETPVXXA

SEQ ID NO: 41418 - protein, 37 aa, Artificial Sequence; identical to SEQ ID NO: 3958
  Cyclic GFR-binding peptide
  MOD_RES (2), (4), (35), (36): Xaa is C or S

SEQ ID NO: 41419 - protein, 44 aa, Artificial Sequence; identical to SEQ ID NO: 3959
  Cyclic GFR-binding peptide
  MOD_RES (2), (4), (41): Xaa is C or S

SEQ ID NO: 41420 - protein, 29 aa, Artificial Sequence
  Cyclic GFR-binding peptide
  MOD_RES (29), (29): Xaa is C or S
VMNQYNKLIVNSSDDLYLVSIASLKTPAX

SEQ ID NO: 41421 - protein, 31 aa, Artificial Sequence
  Cyclic GFR-binding peptide
  MOD_RES (2), (2): Xaa is C or S
GXEAVSMGERHKRLTPVGMDDYYLVSTASLK

SEQ ID NO: 41422 - protein, 27 aa, Artificial Sequence
  Cyclic GFR-binding peptide
KVVMRYKKLVKPTRGVFYLISIANLDQ

SEQ ID NO: 41423 - protein, 29 aa, Artificial Sequence
  Cyclic GFR-binding peptide
EVVMERHKRLVVKDYEDYYLMSTASLETP

SEQ ID NO: 41424 - protein, 34 aa, Artificial Sequence; identical to SEQ ID NO: 3963
  Cyclic GFR-binding peptide
  MOD_RES (1), (3), (34): Xaa is C or S

SEQ ID NO: 41425 - protein, 36 aa, Artificial Sequence; identical to SEQ ID NO: 3964
  Cyclic GFR-binding peptide
  MOD_RES (2), (33), (34): Xaa is C or S

SEQ ID NO: 41426 - protein, 35 aa, Artificial Sequence
  Cyclic GFR-binding peptide
  MOD_RES (30), (31): Xaa is C or S
VVMERYKKLVVKDYEDFYLMSIANLETPVXXAKPI

SEQ ID NO: 41427 - protein, 27 aa, Artificial Sequence
  Cyclic GFR-binding peptide
  MOD_RES (2), (2): Xaa is C or S
KXSRVIMYHYKLVKPKRGVKYLISIPS

SEQ ID NO: 41428 - protein, 36 aa, Artificial Sequence; identical to SEQ ID NO: 3965
  Cyclic GFR-binding peptide
  MOD_RES (2), (35), (36): Xaa is C or S

SEQ ID NO: 41429 - protein, 34 aa, Artificial Sequence
  Cyclic GFR-binding peptide
  MOD_RES (29), (29): Xaa is C or S
VMNQYNKLIVNSSDDLYLVSIASLKTPAXTPKTV

SEQ ID NO: 41430 - protein, 30 aa, Artificial Sequence
  Cyclic GFR-binding peptide
  MOD_RES (27), (28): Xaa is C or S
MQYNKLVKPTRGVLYLISIASLDQPVXXPS

SEQ ID NO: 41431 - protein, 32 aa, Artificial Sequence
  Cyclic GFR-binding peptide
  MOD_RES (26), (27): Xaa is C or S
RYKKLIVNNSSDFYLVSIANLKTPAXXAKPVA

SEQ ID NO: 41432 - protein, 27 aa, Artificial Sequence
  Cyclic GFR-binding peptide
  MOD_RES (26), (27): Xaa is C or S
RHKRLIVNSSDDYYLVSTASLQTPAXX

SEQ ID NO: 41433 - protein, 34 aa, Artificial Sequence
  Cyclic GFR-binding peptide
  MOD_RES (30), (30): Xaa is C or S
RYKKLFIPKKRVIEFYLVSIANLQVQTPRXQVNR

SEQ ID NO: 41434 - protein, 35 aa, Artificial Sequence; identical to SEQ ID NO: 3968
  Cyclic GFR-binding peptide

SEQ ID NO: 41435 - protein, 42 aa, Artificial Sequence; identical to SEQ ID NO: 3969
  Cyclic GFR-binding peptide
  MOD_RES (1), (38): Xaa is C or S

SEQ ID NO: 41436 - protein, 34 aa, Artificial Sequence; identical to SEQ ID NO: 3971
  Cyclic GFR-binding peptide
  MOD_RES (1), (32), (33): Xaa is C or S

SEQ ID NO: 41437 - protein, 29 aa, Artificial Sequence
  Cyclic GFR-binding peptide
GEVVMDYHYKLVVKENEDKYLMSIPSLET

SEQ ID NO: 41438 - protein, 28 aa, Artificial Sequence
  Cyclic GFR-binding peptide
  MOD_RES (26), (27): Xaa is C or S
RYKKLVVKENEDFYLMSIANLETPVXXA

SEQ ID NO: 41439 - protein, 31 aa, Artificial Sequence
  Cyclic GFR-binding peptide
  MOD_RES (28), (29): Xaa is C or S
MERHKRLVVKDYEDYYLMSTASLETPVXXAK

SEQ ID NO: 41440 - protein, 27 aa, Artificial Sequence
  Cyclic GFR-binding peptide
  MOD_RES (26), (27): Xaa is C or S
YHYKLIVNNSSDKYLVSIPSLKTPAXX

SEQ ID NO: 41441 - protein, 42 aa, Artificial Sequence; identical to SEQ ID NO: 3973
  Cyclic GFR-binding peptide
  MOD_RES (2), (4), (37), (38): Xaa is C or S

SEQ ID NO: 41442 - protein, 29 aa, Artificial Sequence
  Cyclic GFR-binding peptide
  MOD_RES (27), (28): Xaa is C or S
ERYKKLTPVGMDDFYLVSIANLKTPVXXA

SEQ ID NO: 41443 - protein, 32 aa, Artificial Sequence
  Cyclic GFR-binding peptide
  MOD_RES (28), (29): Xaa is C or S
MNYHYKLIVNSSDDKYLVSIPSLQTPAXXPKP

SEQ ID NO: 41444 - protein, 39 aa, Artificial Sequence; identical to SEQ ID NO: 3977
  Cyclic GFR-binding peptide
  MOD_RES (1), (33): Xaa is C or S

SEQ ID NO: 41445 - protein, 25 aa, Artificial Sequence
  Cyclic GFR-binding peptide
RVIMQYNKLVKPKRGVLYLISIASL

SEQ ID NO: 41446 - protein, 37 aa, Artificial Sequence; identical to SEQ ID NO: 3978
  Cyclic GFR-binding peptide
  MOD_RES (2), (4), (36): Xaa is C or S

SEQ ID NO: 41447 - protein, 30 aa, Artificial Sequence
  Cyclic GFR-binding peptide
  MOD_RES (1), (3): Xaa is C or S
XKXSRVIMRYKKLVKPKRGVFYLISIANLA

SEQ ID NO: 41448 - protein, 34 aa, Artificial Sequence
  Cyclic GFR-binding peptide
  MOD_RES (1), (1): Xaa is C or S
XALHDELTYHYKLFIPKKRVIEKYLVSIPSLQVQ

SEQ ID NO: 41449 - protein, 27 aa, Artificial Sequence
  Cyclic GFR-binding peptide
GEVVMDYHYKLVVKENEDKYLMSIPSL

SEQ ID NO: 41450 - protein, 29 aa, Artificial Sequence
  Cyclic GFR-binding peptide
  MOD_RES (29), (29): Xaa is C or S
VMNRHKRLIVNSSDDYYLVSTASLKTPAX

SEQ ID NO: 41451 - protein, 33 aa, Artificial Sequence
  Cyclic GFR-binding peptide
  MOD_RES (27), (28): Xaa is C or S
MQYNKLIKPTKGILYLISIASLDQSVXXPSASA

SEQ ID NO: 41452 - protein, 33 aa, Artificial Sequence; identical to SEQ ID NO: 3980
  Cyclic GFR-binding peptide
  MOD_RES (31), (31): Xaa is C or S

SEQ ID NO: 41453 - protein, 32 aa, Artificial Sequence
  Cyclic GFR-binding peptide
  MOD_RES (28), (29): Xaa is C or S
MNRHKRLIVNSSDDYYLVSTASLQTPAXXPKP

SEQ ID NO: 41454 - protein, 22 aa, Artificial Sequence
  Cyclic GFR-binding peptide
VMRYKKLVKPTRGVFYLISIAN

SEQ ID NO: 41455 - protein, 30 aa, Artificial Sequence
  Cyclic GFR-binding peptide
  MOD_RES (27), (28): Xaa is C or S
NYHYKLIVNSSDDKYLVSIPSLQTPAXXPK

SEQ ID NO: 41456 - protein, 30 aa, Artificial Sequence
  Cyclic GFR-binding peptide
  MOD_RES (26), (27): Xaa is C or S
QYNKLVKPKRGVLYLISIASLAQPVXXPAA

SEQ ID NO: 41457 - protein, 37 aa, Artificial Sequence
  Cyclic GFR-binding peptide
  MOD_RES (33), (33): Xaa is C or S
ELTRHKRLFIPKKRVIEYYLVSTASLQVQTPRXQVNR

SEQ ID NO: 41458 - protein, 31 aa, Artificial Sequence
  Cyclic GFR-binding peptide
  MOD_RES (29), (30): Xaa is C or S
VMNQYNKLIVNNSSDLYLVSIASLKTPAXXA

SEQ ID NO: 41459 - protein, 39 aa, Artificial Sequence; identical to SEQ ID NO: 3982
  Cyclic GFR-binding peptide
  MOD_RES (2), (33), (34): Xaa is C or S

SEQ ID NO: 41460 - protein, 35 aa, Artificial Sequence; identical to SEQ ID NO: 3983
  Cyclic GFR-binding peptide
  MOD_RES (1), (3), (34), (35): Xaa is C or S

SEQ ID NO: 41461 - protein, 28 aa, Artificial Sequence
  Cyclic GFR-binding peptide
TRYKKLFIPKKRVIEFYLVSIANLQVQT

SEQ ID NO: 41462 - protein, 29 aa, Artificial Sequence
  Cyclic GFR-binding peptide
AAAAAAAAAQYNKLVVKENEDLYLMSIAS

SEQ ID NO: 41463 - protein, 30 aa, Artificial Sequence
  Cyclic GFR-binding peptide
TRYKKLFIPKKRVIEFYLVSIANLQVQTPR

SEQ ID NO: 41464 - protein, 31 aa, Artificial Sequence
  Cyclic GFR-binding peptide
  MOD_RES (2), (2): Xaa is C or S
KXALHDELTQYNKLFIPKKRVIELYLVSIAS

SEQ ID NO: 41465 - protein, 31 aa, Artificial Sequence
  Cyclic GFR-binding peptide
  MOD_RES (2), (4): Xaa is C or S
HXGXSRVVMNQYNKLIVNSSDDLYLVSIASL

SEQ ID NO: 41466 - protein, 40 aa, Artificial Sequence; identical to SEQ ID NO: 3990
  Cyclic GFR-binding peptide
  MOD_RES (2), (4), (36), (37): Xaa is C or S

SEQ ID NO: 41467 - protein, 31 aa, Artificial Sequence
  Cyclic GFR-binding peptide
  MOD_RES (28), (29): Xaa is C or S
IMRYKKLIKPTKGIFYLISIANLDQSVXXPS

SEQ ID NO: 41468 - protein, 32 aa, Artificial Sequence
  Cyclic GFR-binding peptide
ALHDELTRYKKLFIPKKRVIEFYLVSIANLQV

SEQ ID NO: 41469 - protein, 26 aa, Artificial Sequence
  Cyclic GFR-binding peptide
KVVMQYNKLVKPTRGVLYLISIASLD

SEQ ID NO: 41470 - protein, 26 aa, Artificial Sequence
  Cyclic GFR-binding peptide
VVMRHKRLVKPTRGVYYLISTASLDQ

SEQ ID NO: 41471 - protein, 26 aa, Artificial Sequence
  Cyclic GFR-binding peptide
TQYNKLFIPKKRVIELYLVSIASLQV

SEQ ID NO: 41472 - protein, 31 aa, Artificial Sequence
  Cyclic GFR-binding peptide
  MOD_RES (30), (31): Xaa is C or S
KVIMRHKRLIKPTKGIYYLISTASLDQSVXX

SEQ ID NO: 41473 - protein, 31 aa, Artificial Sequence
  Cyclic GFR-binding peptide
  MOD_RES (2), (2): Xaa is C or S
GXSRVVMNQYNKLIVNSSDDLYLVSIASLKT

SEQ ID NO: 41474 - protein, 33 aa, Artificial Sequence; identical to SEQ ID NO: 3993
  Cyclic GFR-binding peptide
  MOD_RES (2), (33): Xaa is C or S

SEQ ID NO: 41475 - protein, 26 aa, Artificial Sequence
  Cyclic GFR-binding peptide
LTRYKKLFIPKKRVIEFYLVSIANLQ

SEQ ID NO: 41476 - protein, 30 aa, Artificial Sequence
  Cyclic GFR-binding peptide
  MOD_RES (2), (4): Xaa is C or S
SXKXSKVVMRYKKLVKPTRGVFYLISIANL

SEQ ID NO: 41477 - protein, 33 aa, Artificial Sequence
  Cyclic GFR-binding peptide
  MOD_RES (28), (29): Xaa is C or S
VMYHYKLVKPTRGVKYLISIPSLDQPVXXPSAS

SEQ ID NO: 41478 - protein, 28 aa, Artificial Sequence
  Cyclic GFR-binding peptide
EVVMERHKRLVVKDYEDYYLMSTASLET

SEQ ID NO: 41479 - protein, 33 aa, Artificial Sequence; identical to SEQ ID NO: 3995
  Cyclic GFR-binding peptide
  MOD_RES (2), (33): Xaa is C or S

SEQ ID NO: 41480 - protein, 36 aa, Artificial Sequence; identical to SEQ ID NO: 3997
  Cyclic GFR-binding peptide
  MOD_RES (2), (33), (34): Xaa is C or S

SEQ ID NO: 41481 - protein, 26 aa, Artificial Sequence
  Cyclic GFR-binding peptide
VVMNQYNKLIVNNSSDLYLVSIASLK

SEQ ID NO: 41482 - protein, 40 aa, Artificial Sequence; identical to SEQ ID NO: 3998
  Cyclic GFR-binding peptide
  MOD_RES (2), (34): Xaa is C or S

SEQ ID NO: 41483 - protein, 29 aa, Artificial Sequence
  Cyclic GFR-binding peptide
  MOD_RES (1), (1): Xaa is C or S
XGEVVMDRHKRLVVKENEDYYLMSTASLE

SEQ ID NO: 41484 - protein, 24 aa, Artificial Sequence
  Cyclic GFR-binding peptide
EYHYKLVVKDYEDKYLMSIPSLET

SEQ ID NO: 41485 - protein, 20 aa, Artificial Sequence
  Cyclic GFR-binding peptide
RHKRLVKPKRGVYYLISTAS

SEQ ID NO: 41486 - protein, 36 aa, Artificial Sequence; identical to SEQ ID NO: 4001
  Cyclic GFR-binding peptide
  MOD_RES (2), (4), (35), (36): Xaa is C or S

SEQ ID NO: 41487 - protein, 40 aa, Artificial Sequence; identical to SEQ ID NO: 4002
  Cyclic GFR-binding peptide
  MOD_RES (2), (4), (36), (37): Xaa is C or S

SEQ ID NO: 41488 - protein, 40 aa, Artificial Sequence; identical to SEQ ID NO: 4003
  Cyclic GFR-binding peptide
  MOD_RES (2), (35), (36): Xaa is C or S

SEQ ID NO: 41489 - protein, 32 aa, Artificial Sequence; identical to SEQ ID NO: 4004
  Cyclic GFR-binding peptide
  MOD_RES (31), (32): Xaa is C or S

SEQ ID NO: 41490 - protein, 27 aa, Artificial Sequence
  Cyclic GFR-binding peptide
  MOD_RES (27), (27): Xaa is C or S
ERHKRLVVKDYEDYYLMSTASLETPVX

SEQ ID NO: 41491 - protein, 27 aa, Artificial Sequence
  Cyclic GFR-binding peptide
LTRYKKLFIPKKRVIEFYLVSIANLQV

SEQ ID NO: 41492 - protein, 36 aa, Artificial Sequence; identical to SEQ ID NO: 4008
  Cyclic GFR-binding peptide
  MOD_RES (1), (34), (35): Xaa is C or S

SEQ ID NO: 41493 - protein, 32 aa, Artificial Sequence
  Cyclic GFR-binding peptide
  MOD_RES (2), (4): Xaa is C or S
SXKXSKVIMRHKRLIKPTKGIYYLISTASLDQ

SEQ ID NO: 41494 - protein, 32 aa, Artificial Sequence; identical to SEQ ID NO: 4009
  Cyclic GFR-binding peptide
  MOD_RES (1), (1): Xaa is C or S

SEQ ID NO: 41495 - protein, 30 aa, Artificial Sequence; identical to SEQ ID NO: 1893
  Cyclic GFR-binding peptide

SEQ ID NO: 41496 - protein, 39 aa, Artificial Sequence; identical to SEQ ID NO: 4010
  Cyclic GFR-binding peptide
  MOD_RES (2), (33), (34): Xaa is C or S

SEQ ID NO: 41497 - protein, 31 aa, Artificial Sequence
  Cyclic GFR-binding peptide
  MOD_RES (30), (31): Xaa is C or S
VVMNRYKKLIVNNSSDFYLVSIANLKTPAXX

SEQ ID NO: 41498 - protein, 23 aa, Artificial Sequence
  Cyclic GFR-binding peptide
RYKKLVKPKRGVFYLISIANLAQ

SEQ ID NO: 41499 - protein, 38 aa, Artificial Sequence; identical to SEQ ID NO: 4011
  Cyclic GFR-binding peptide
  MOD_RES (1), (3), (35), (36): Xaa is C or S

SEQ ID NO: 41500 - protein, 33 aa, Artificial Sequence
  Cyclic GFR-binding peptide
  MOD_RES (29), (30): Xaa is C or S
MGEQYNKLTPVGMDDLYLVSIASLKTPVXXAKG

SEQ ID NO: 41501 - protein, 33 aa, Artificial Sequence
  Cyclic GFR-binding peptide
  MOD_RES (28), (29): Xaa is C or S
MNQYNKLIVNNSSDLYLVSIASLKTPAXXAKPV

SEQ ID NO: 41502 - protein, 36 aa, Artificial Sequence; identical to SEQ ID NO: 4013
  Cyclic GFR-binding peptide
  MOD_RES (1), (3), (35), (36): Xaa is C or S

SEQ ID NO: 41503 - protein, 28 aa, Artificial Sequence
  Cyclic GFR-binding peptide
  MOD_RES (26), (27): Xaa is C or S
RHKRLIKPTKGIYYLISTASLDQSVXXP

SEQ ID NO: 41504 - protein, 33 aa, Artificial Sequence
  Cyclic GFR-binding peptide
  MOD_RES (1), (3): Xaa is C or S
XGXSRVVMNYHYKLIVNSSDDKYLVSIPSLKTP

SEQ ID NO: 41505 - protein, 32 aa, Artificial Sequence
  Cyclic GFR-binding peptide
  MOD_RES (1), (3): Xaa is C or S
XGXGEVVMERHKRLVVKDYEDYYLMSTASLET

SEQ ID NO: 41506 - protein, 34 aa, Artificial Sequence; identical to SEQ ID NO: 4017
  Cyclic GFR-binding peptide
  MOD_RES (2), (34): Xaa is C or S

SEQ ID NO: 41507 - protein, 38 aa, Artificial Sequence; identical to SEQ ID NO: 4018
  Cyclic GFR-binding peptide
  MOD_RES (2), (34), (35): Xaa is C or S

SEQ ID NO: 41508 - protein, 37 aa, Artificial Sequence; identical to SEQ ID NO: 4019
  Cyclic GFR-binding peptide
  MOD_RES (31), (32): Xaa is C or S

SEQ ID NO: 41509 - protein, 26 aa, Artificial Sequence
  Cyclic GFR-binding peptide
VVMQYNKLVKPTRGVLYLISIASLDQ

SEQ ID NO: 41510 - protein, 33 aa, Artificial Sequence; identical to SEQ ID NO: 4020
  Cyclic GFR-binding peptide
  MOD_RES (31), (32): Xaa is C or S

SEQ ID NO: 41511 - protein, 33 aa, Artificial Sequence
  Cyclic GFR-binding peptide
  MOD_RES (28), (29): Xaa is C or S
GEQYNKLTPVGMDDLYLVSIASLKTPVXXAKGV

SEQ ID NO: 41512 - protein, 35 aa, Artificial Sequence; identical to SEQ ID NO: 4021
  Cyclic GFR-binding peptide
  MOD_RES (31), (32): Xaa is C or S

SEQ ID NO: 41513 - protein, 25 aa, Artificial Sequence
  Cyclic GFR-binding peptide
MNRHKRLIVNSSDDYYLVSTASLKT

SEQ ID NO: 41514 - protein, 21 aa, Artificial Sequence
  Cyclic GFR-binding peptide
RHKRLVVKDYEDYYLMSTASL

SEQ ID NO: 41515 - protein, 28 aa, Artificial Sequence
  Cyclic GFR-binding peptide
  MOD_RES (2), (2): Xaa is C or S
KXSRVIMRHKRLVKPKRGVYYLISTASL

SEQ ID NO: 41516 - protein, 29 aa, Artificial Sequence
  Cyclic GFR-binding peptide
ALHDELTRHKRLFIPKKRVIEYYLVSTAS

SEQ ID NO: 41517 - protein, 25 aa, Artificial Sequence
  Cyclic GFR-binding peptide
QYNKLVKPKRGVLYLISIASLAQPV

SEQ ID NO: 41518 - protein, 22 aa, Artificial Sequence
  Cyclic GFR-binding peptide
QYNKLVKPKRGVLYLISIASLA

SEQ ID NO: 41519 - protein, 34 aa, Artificial Sequence
  Cyclic GFR-binding peptide
  MOD_RES (28), (29): Xaa is C or S
MEYHYKLVVKDYEDKYLMSIPSLETPVXXAKPIS

SEQ ID NO: 41520 - protein, 30 aa, Artificial Sequence
  Cyclic GFR-binding peptide
AKVVMNYHYKLIVNNSSDKYLVSIPSLKTP

SEQ ID NO: 41521 - protein, 24 aa, Artificial Sequence
  Cyclic GFR-binding peptide
GERHKRLTPVGMDDYYLVSTASLK

SEQ ID NO: 41522 - protein, 37 aa, Artificial Sequence; identical to SEQ ID NO: 4023
  Cyclic GFR-binding peptide
  MOD_RES (2), (4), (35), (36): Xaa is C or S

SEQ ID NO: 41523 - protein, 27 aa, Artificial Sequence
  Cyclic GFR-binding peptide
  MOD_RES (27), (27): Xaa is C or S
DYHYKLVVKENEDKYLMSIPSLETPVX

SEQ ID NO: 41524 - protein, 33 aa, Artificial Sequence
  Cyclic GFR-binding peptide
  MOD_RES (28), (29): Xaa is C or S
MDRHKRLVVKENEDYYLMSTASLETPVXXAKPI

SEQ ID NO: 41525 - protein, 39 aa, Artificial Sequence; identical to SEQ ID NO: 4028
  Cyclic GFR-binding peptide
  MOD_RES (2), (39): Xaa is C or S

SEQ ID NO: 41526 - protein, 22 aa, Artificial Sequence
  Cyclic GFR-binding peptide
EYHYKLVVKDYEDKYLMSIPSL

SEQ ID NO: 41527 - protein, 28 aa, Artificial Sequence
  Cyclic GFR-binding peptide
  MOD_RES (1), (3): Xaa is C or S
XKXSRVIMRYKKLVKPKRGVFYLISIAN

SEQ ID NO: 41528 - protein, 25 aa, Artificial Sequence
  Cyclic GFR-binding peptide
VMERHKRLVVKDYEDYYLMSTASLE

SEQ ID NO: 41529 - protein, 30 aa, Artificial Sequence
  Cyclic GFR-binding peptide
  MOD_RES (28), (29): Xaa is C or S
MDYHYKLVVKENEDKYLMSIPSLETPVXXA

SEQ ID NO: 41530 - protein, 36 aa, Artificial Sequence; identical to SEQ ID NO: 4030
  Cyclic GFR-binding peptide
  MOD_RES (32), (33): Xaa is C or S

SEQ ID NO: 41531 - protein, 39 aa, Artificial Sequence; identical to SEQ ID NO: 4031
  Cyclic GFR-binding peptide
  MOD_RES (2), (33), (34): Xaa is C or S

SEQ ID NO: 41532 - protein, 37 aa, Artificial Sequence; identical to SEQ ID NO: 4032
  Cyclic GFR-binding peptide
  MOD_RES (37), (37): Xaa is C or S

SEQ ID NO: 41533 - protein, 27 aa, Artificial Sequence
  Cyclic GFR-binding peptide
VMEYHYKLVVKDYEDKYLMSIPSLETP

SEQ ID NO: 41534 - protein, 24 aa, Artificial Sequence
  Cyclic GFR-binding peptide
IMQYNKLVKPKRGVLYLISIASLA

SEQ ID NO: 41535 - protein, 26 aa, Artificial Sequence
  Cyclic GFR-binding peptide
YHYKLFIPKKRVIEKYLVSIPSLQVQ

SEQ ID NO: 41536 - protein, 31 aa, Artificial Sequence
  Cyclic GFR-binding peptide
  MOD_RES (2), (2): Xaa is C or S
KXALHDELTRHKRLFIPKKRVIEYYLVSTAS

SEQ ID NO: 41537 - protein, 36 aa, Artificial Sequence; identical to SEQ ID NO: 4033
  Cyclic GFR-binding peptide
  MOD_RES (2), (34), (35): Xaa is C or S

SEQ ID NO: 41538 - protein, 28 aa, Artificial Sequence
  Cyclic GFR-binding peptide
LHDELTRHKRLFIPKKRVIEYYLVSTAS

SEQ ID NO: 41539 - protein, 36 aa, Artificial Sequence; identical to SEQ ID NO: 4035
  Cyclic GFR-binding peptide
  MOD_RES (1), (32), (33): Xaa is C or S

SEQ ID NO: 41540 - protein, 22 aa, Artificial Sequence
  Cyclic GFR-binding peptide
RHKRLVKPKRGVYYLISTASLA

SEQ ID NO: 41541 - protein, 31 aa, Artificial Sequence
  Cyclic GFR-binding peptide
  MOD_RES (29), (29): Xaa is C or S
VMNRHKRLIVNSSDDYYLVSTASLKTPAXTP

SEQ ID NO: 41542 - protein, 32 aa, Artificial Sequence
  Cyclic GFR-binding peptide
  MOD_RES (28), (28): Xaa is C or S
MNQYNKLIVNSSDDLYLVSIASLKTPAXTPKT

SEQ ID NO: 41543 - protein, 32 aa, Artificial Sequence
  Cyclic GFR-binding peptide
  MOD_RES (2), (4): Xaa is C or S
SXKXSKVIMQYNKLIKPTKGILYLISIASLDQ

SEQ ID NO: 41544 - protein, 34 aa, Artificial Sequence
  Cyclic GFR-binding peptide
  MOD_RES (34), (34): Xaa is C or S
DELTYHYKLFIPKKRVIEKYLVSIPSLQVQTPRX

SEQ ID NO: 41545 - protein, 35 aa, Artificial Sequence; identical to SEQ ID NO: 4039
  Cyclic GFR-binding peptide
  MOD_RES (35), (35): Xaa is C or S

SEQ ID NO: 41546 - protein, 34 aa, Artificial Sequence; identical to SEQ ID NO: 4041
  Cyclic GFR-binding peptide
  MOD_RES (1), (32), (33): Xaa is C or S

SEQ ID NO: 41547 - protein, 25 aa, Artificial Sequence
  Cyclic GFR-binding peptide
VVMNRHKRLIVNSSDDYYLVSTASL

SEQ ID NO: 41548 - protein, 38 aa, Artificial Sequence; identical to SEQ ID NO: 4042
  Cyclic GFR-binding peptide
  MOD_RES (37), (37): Xaa is C or S

SEQ ID NO: 41549 - protein, 37 aa, Artificial Sequence; identical to SEQ ID NO: 4043
  Cyclic GFR-binding peptide
  MOD_RES (2), (4), (36), (37): Xaa is C or S

SEQ ID NO: 41550 - protein, 30 aa, Artificial Sequence
  Cyclic GFR-binding peptide
  MOD_RES (28), (29): Xaa is C or S
MDRHKRLVVKENEDYYLMSTASLETPVXXA

SEQ ID NO: 41551 - protein, 33 aa, Artificial Sequence; identical to SEQ ID NO: 4044
  Cyclic GFR-binding peptide
  MOD_RES (1), (1): Xaa is C or S

SEQ ID NO: 41552 - protein, 37 aa, Artificial Sequence; identical to SEQ ID NO: 4045
  Cyclic GFR-binding peptide
  MOD_RES (2), (4), (36), (37): Xaa is C or S

SEQ ID NO: 41553 - protein, 34 aa, Artificial Sequence
  Cyclic GFR-binding peptide
  MOD_RES (29), (30): Xaa is C or S
VIMYHYKLIKPTKGIKYLISIPSLDQSVXXPSAS

SEQ ID NO: 41554 - protein, 34 aa, Artificial Sequence
  Cyclic GFR-binding peptide
  MOD_RES (2), (4): Xaa is C or S
RXGXGEVVMERHKRLVVKDYEDYYLMSTASLETP

SEQ ID NO: 41555 - protein, 32 aa, Artificial Sequence
  Cyclic GFR-binding peptide
  MOD_RES (27), (28): Xaa is C or S
EQYNKLTPVGMDDLYLVSIASLKTPVXXAKGV

SEQ ID NO: 41556 - protein, 32 aa, Artificial Sequence; identical to SEQ ID NO: 4050
  Cyclic GFR-binding peptide
  MOD_RES (32), (32): Xaa is C or S

SEQ ID NO: 41557 - protein, 35 aa, Artificial Sequence; identical to SEQ ID NO: 4049
  Cyclic GFR-binding peptide
  MOD_RES (31), (32): Xaa is C or S

SEQ ID NO: 41558 - protein, 25 aa, Artificial Sequence
  Cyclic GFR-binding peptide
GERYKKLTPVGMDDFYLVSIANLKT

SEQ ID NO: 41559 - protein, 40 aa, Artificial Sequence; identical to SEQ ID NO: 4051
  Cyclic GFR-binding peptide
  MOD_RES (1), (3), (35), (36): Xaa is C or S

SEQ ID NO: 41560 - protein, 35 aa, Artificial Sequence
  Cyclic GFR-binding peptide
  MOD_RES (30), (31): Xaa is C or S
KVVMQYNKLVKPTRGVLYLISIASLDQPVXXPSAS

SEQ ID NO: 41561 - protein, 23 aa, Artificial Sequence
  Cyclic GFR-binding peptide
QYNKLFIPKKRVIELYLVSIASL

SEQ ID NO: 41562 - protein, 34 aa, Artificial Sequence
  Cyclic GFR-binding peptide
  MOD_RES (30), (30): Xaa is C or S
VVMNYHYKLIVNSSDDKYLVSIPSLKTPAXTPKT

SEQ ID NO: 41563 - protein, 24 aa, Artificial Sequence
  Cyclic GFR-binding peptide
VMRHKRLVKPTRGVYYLISTASLD

SEQ ID NO: 41564 - protein, 30 aa, Artificial Sequence
  Cyclic GFR-binding peptide
  MOD_RES (28), (29): Xaa is C or S
MNQYNKLIVNSSDDLYLVSIASLQTPAXXP

SEQ ID NO: 41565 - protein, 32 aa, Artificial Sequence
  Cyclic GFR-binding peptide
  MOD_RES (2), (2): Xaa is C or S
KXALHDELTRYKKLFIPKKRVIEFYLVSIANL

SEQ ID NO: 41566 - protein, 27 aa, Artificial Sequence
  Cyclic GFR-binding peptide
  MOD_RES (1), (1): Xaa is C or S
XAKVVMNYHYKLIVNNSSDKYLVSIPS

SEQ ID NO: 41567 - protein, 27 aa, Artificial Sequence
  Cyclic GFR-binding peptide
  MOD_RES (27), (27): Xaa is C or S
MQYNKLVKPKRGVLYLISIASLAQPVX

SEQ ID NO: 41568 - protein, 32 aa, Artificial Sequence
  Cyclic GFR-binding peptide
  MOD_RES (26), (26): Xaa is C or S
RHKRLIVNSSDDYYLVSTASLKTPAXTPKTVH

SEQ ID NO: 41569 - protein, 24 aa, Artificial Sequence
  Cyclic GFR-binding peptide
QYNKLIVNNSSDLYLVSIASLKTP

SEQ ID NO: 41570 - protein, 38 aa, Artificial Sequence; identical to SEQ ID NO: 4052
  Cyclic GFR-binding peptide
  MOD_RES (37), (37): Xaa is C or S

SEQ ID NO: 41571 - protein, 30 aa, Artificial Sequence
  Cyclic GFR-binding peptide
  MOD_RES (2), (4): Xaa is C or S
HXGXSRVVMNRHKRLIVNSSDDYYLVSTAS

SEQ ID NO: 41572 - protein, 39 aa, Artificial Sequence; identical to SEQ ID NO: 4054
  Cyclic GFR-binding peptide
  MOD_RES (2), (35), (36): Xaa is C or S

SEQ ID NO: 41573 - protein, 29 aa, Artificial Sequence
  Cyclic GFR-binding peptide
  MOD_RES (2), (2): Xaa is C or S
GXGEVVMDRHKRLVVKENEDYYLMSTASL

SEQ ID NO: 41574 - protein, 24 aa, Artificial Sequence
  Cyclic GFR-binding peptide
VMYHYKLVKPTRGVKYLISIPSLD

SEQ ID NO: 41575 - protein, 29 aa, Artificial Sequence
  Cyclic GFR-binding peptide
  MOD_RES (27), (28): Xaa is C or S
ERHKRLTPVGMDDYYLVSTASLKTPVXXA

SEQ ID NO: 41576 - protein, 29 aa, Artificial Sequence
  Cyclic GFR-binding peptide
TRYKKLFIPKKRVIEFYLVSIANLQVQTP

SEQ ID NO: 41577 - protein, 27 aa, Artificial Sequence
  Cyclic GFR-binding peptide
LTRHKRLFIPKKRVIEYYLVSTASLQV

SEQ ID NO: 41578 - protein, 31 aa, Artificial Sequence
  Cyclic GFR-binding peptide
  MOD_RES (27), (28): Xaa is C or S
DYHYKLVVKENEDKYLMSIPSLETPVXXAKP

SEQ ID NO: 41579 - protein, 24 aa, Artificial Sequence
  Cyclic GFR-binding peptide
RHKRLVVKDYEDYYLMSTASLETP

SEQ ID NO: 41580 - protein, 31 aa, Artificial Sequence
  Cyclic GFR-binding peptide
  MOD_RES (1), (1): Xaa is C or S
XGEVVMDRHKRLVVKENEDYYLMSTASLETP

SEQ ID NO: 41581 - protein, 33 aa, Artificial Sequence
  Cyclic GFR-binding peptide
  MOD_RES (1), (3): Xaa is C or S
XGXEAVSMGERHKRLTPVGMDDYYLVSTASLKT

SEQ ID NO: 41582 - protein, 31 aa, Artificial Sequence
  Cyclic GFR-binding peptide
  MOD_RES (27), (28): Xaa is C or S
MYHYKLVKPTRGVKYLISIPSLDQPVXXPSA

SEQ ID NO: 41583 - protein, 26 aa, Artificial Sequence
  Cyclic GFR-binding peptide
ERYKKLTPVGMDDFYLVSIANLKTPV

SEQ ID NO: 41584 - protein, 31 aa, Artificial Sequence
  Cyclic GFR-binding peptide
  MOD_RES (29), (29): Xaa is C or S
VMNYHYKLIVNSSDDKYLVSIPSLKTPAXTP

SEQ ID NO: 41585 - protein, 36 aa, Artificial Sequence; identical to SEQ ID NO: 4057
  Cyclic GFR-binding peptide
  MOD_RES (2), (34): Xaa is C or S

SEQ ID NO: 41586 - protein, 37 aa, Artificial Sequence; identical to SEQ ID NO: 4058
  Cyclic GFR-binding peptide
  MOD_RES (37), (37): Xaa is C or S

SEQ ID NO: 41587 - protein, 28 aa, Artificial Sequence
  Cyclic GFR-binding peptide
GEVVMDRHKRLVVKENEDYYLMSTASLE

SEQ ID NO: 41588 - protein, 29 aa, Artificial Sequence
  Cyclic GFR-binding peptide
VVMERHKRLVVKDYEDYYLMSTASLETPV

SEQ ID NO: 41589 - protein, 39 aa, Artificial Sequence; identical to SEQ ID NO: 4059
  Cyclic GFR-binding peptide
  MOD_RES (1), (33), (34): Xaa is C or S

SEQ ID NO: 41590 - protein, 29 aa, Artificial Sequence
  Cyclic GFR-binding peptide
ELTRYKKLFIPKKRVIEFYLVSIANLQVQ

SEQ ID NO: 41591 - protein, 27 aa, Artificial Sequence
  Cyclic GFR-binding peptide
VMERHKRLVVKDYEDYYLMSTASLETP

SEQ ID NO: 41592 - protein, 39 aa, Artificial Sequence; identical to SEQ ID NO: 4060
  Cyclic GFR-binding peptide
  MOD_RES (1), (3), (36), (37): Xaa is C or S

SEQ ID NO: 41593 - protein, 39 aa, Artificial Sequence; identical to SEQ ID NO: 4061
  Cyclic GFR-binding peptide
  MOD_RES (2), (4), (35), (36): Xaa is C or S

SEQ ID NO: 41594 - protein, 33 aa, Artificial Sequence
  Cyclic GFR-binding peptide
  MOD_RES (28), (29): Xaa is C or S
MDYHYKLVVKENEDKYLMSIPSLETPVXXAKPI

SEQ ID NO: 41595 - protein, 20 aa, Artificial Sequence
  Cyclic GFR-binding peptide
QYNKLIVNNSSDLYLVSIAS

SEQ ID NO: 41596 - protein, 25 aa, Artificial Sequence
  Cyclic GFR-binding peptide
TRYKKLFIPKKRVIEFYLVSIANLQ

SEQ ID NO: 41597 - protein, 27 aa, Artificial Sequence
  Cyclic GFR-binding peptide
AKVVMNRYKKLIVNNSSDFYLVSIANL

SEQ ID NO: 41598 - protein, 33 aa, Artificial Sequence; identical to SEQ ID NO: 4069
  Cyclic GFR-binding peptide
  MOD_RES (32), (33): Xaa is C or S

SEQ ID NO: 41599 - protein, 33 aa, Artificial Sequence; identical to SEQ ID NO: 4070
  Cyclic GFR-binding peptide
  MOD_RES (1), (3): Xaa is C or S

SEQ ID NO: 41600 - protein, 30 aa, Artificial Sequence
  Cyclic GFR-binding peptide
  MOD_RES (2), (2): Xaa is C or S
GXARVVMNQYNKLIVNSSDDLYLVSIASLQ

SEQ ID NO: 41601 - protein, 34 aa, Artificial Sequence; identical to SEQ ID NO: 4071
  Cyclic GFR-binding peptide

SEQ ID NO: 41602 - protein, 37 aa, Artificial Sequence; identical to SEQ ID NO: 4072
  Cyclic GFR-binding peptide
  MOD_RES (35), (35): Xaa is C or S

SEQ ID NO: 41603 - protein, 33 aa, Artificial Sequence; identical to SEQ ID NO: 4073
  Cyclic GFR-binding peptide
  MOD_RES (32), (33): Xaa is C or S

SEQ ID NO: 41604 - protein, 34 aa, Artificial Sequence
  Cyclic GFR-binding peptide
  MOD_RES (28), (29): Xaa is C or S
MNQYNKLIVNSSDDLYLVSIASLKTPAXXPKPVY

SEQ ID NO: 41605 - protein, 28 aa, Artificial Sequence
  Cyclic GFR-binding peptide
VVMRYKKLVKPTRGVFYLISIANLDQPV

SEQ ID NO: 41606 - protein, 31 aa, Artificial Sequence
  Cyclic GFR-binding peptide
ELTYHYKLFIPKKRVIEKYLVSIPSLQVQTP

SEQ ID NO: 41607 - protein, 35 aa, Artificial Sequence; identical to SEQ ID NO: 4075
  Cyclic GFR-binding peptide
  MOD_RES (2), (33), (34): Xaa is C or S

SEQ ID NO: 41608 - protein, 24 aa, Artificial Sequence
  Cyclic GFR-binding peptide
MNQYNKLIVNSSDDLYLVSIASLK

SEQ ID NO: 41609 - protein, 33 aa, Artificial Sequence
  Cyclic GFR-binding peptide
  MOD_RES (27), (28): Xaa is C or S
MQYNKLVKPTRGVLYLISIASLDQPVXXPSASA

SEQ ID NO: 41610 - protein, 21 aa, Artificial Sequence
  Cyclic GFR-binding peptide
QYNKLIKPTKGILYLISIASL

SEQ ID NO: 41611 - protein, 27 aa, Artificial Sequence
  Cyclic GFR-binding peptide
SKVVMRYKKLVKPTRGVFYLISIANLD

SEQ ID NO: 41612 - protein, 41 aa, Artificial Sequence; identical to SEQ ID NO: 4077
  Cyclic GFR-binding peptide
  MOD_RES (2), (4), (36), (37): Xaa is C or S

SEQ ID NO: 41613 - protein, 33 aa, Artificial Sequence; identical to SEQ ID NO: 4078
  Cyclic GFR-binding peptide
  MOD_RES (1), (33): Xaa is C or S

SEQ ID NO: 41614 - protein, 31 aa, Artificial Sequence
  Cyclic GFR-binding peptide
  MOD_RES (26), (27): Xaa is C or S
QYNKLIVNSSDDLYLVSIASLQTPAXXPKPV

SEQ ID NO: 41615 - protein, 29 aa, Artificial Sequence
  Cyclic GFR-binding peptide
  MOD_RES (1), (3): Xaa is C or S
XKXSRVIMYHYKLVKPKRGVKYLISIPSL

SEQ ID NO: 41616 - protein, 38 aa, Artificial Sequence; identical to SEQ ID NO: 4080
  Cyclic GFR-binding peptide
  MOD_RES (1), (3), (34), (35): Xaa is C or S

SEQ ID NO: 41617 - protein, 34 aa, Artificial Sequence; identical to SEQ ID NO: 4081
  Cyclic GFR-binding peptide
  MOD_RES (1), (3): Xaa is C or S

SEQ ID NO: 41618 - protein, 28 aa, Artificial Sequence
  Cyclic GFR-binding peptide
VIMYHYKLVKPKRGVKYLISIPSLAQPV

SEQ ID NO: 41619 - protein, 30 aa, Artificial Sequence
  Cyclic GFR-binding peptide
  MOD_RES (2), (4): Xaa is C or S
SXKXSKVIMYHYKLIKPTKGIKYLISIPSL

SEQ ID NO: 41620 - protein, 25 aa, Artificial Sequence
  Cyclic GFR-binding peptide
IMRYKKLVKPKRGVFYLISIANLAQ

SEQ ID NO: 41621 - protein, 24 aa, Artificial Sequence
  Cyclic GFR-binding peptide
YHYKLIVNSSDDKYLVSIPSLKTP

SEQ ID NO: 41622 - protein, 32 aa, Artificial Sequence
  Cyclic GFR-binding peptide
  MOD_RES (1), (3): Xaa is C or S
XKXSKVVMQYNKLVKPTRGVLYLISIASLDQP

SEQ ID NO: 41623 - protein, 28 aa, Artificial Sequence
  Cyclic GFR-binding peptide
  MOD_RES (2), (2): Xaa is C or S
KXSKVIMRHKRLIKPTKGIYYLISTASL

SEQ ID NO: 41624 - protein, 34 aa, Artificial Sequence; identical to SEQ ID NO: 4082
  Cyclic GFR-binding peptide
  MOD_RES (31), (32): Xaa is C or S

SEQ ID NO: 41625 - protein, 43 aa, Artificial Sequence; identical to SEQ ID NO: 4084
  Cyclic GFR-binding peptide
  MOD_RES (2), (39): Xaa is C or S

SEQ ID NO: 41626 - protein, 34 aa, Artificial Sequence; identical to SEQ ID NO: 4085
  Cyclic GFR-binding peptide
  MOD_RES (2), (34): Xaa is C or S

SEQ ID NO: 41627 - protein, 42 aa, Artificial Sequence; identical to SEQ ID NO: 4088
  Cyclic GFR-binding peptide
  MOD_RES (2), (4), (36), (37): Xaa is C or S

SEQ ID NO: 41628 - protein, 35 aa, Artificial Sequence; identical to SEQ ID NO: 4089
  Cyclic GFR-binding peptide
  MOD_RES (2), (33), (34): Xaa is C or S

SEQ ID NO: 41629 - protein, 33 aa, Artificial Sequence; identical to SEQ ID NO: 4090
  Cyclic GFR-binding peptide
  MOD_RES (1), (32), (33): Xaa is C or S

SEQ ID NO: 41630 - protein, 35 aa, Artificial Sequence; identical to SEQ ID NO: 4091
  Cyclic GFR-binding peptide
  MOD_RES (1), (3), (34), (35): Xaa is C or S

SEQ ID NO: 41631 - protein, 35 aa, Artificial Sequence; identical to SEQ ID NO: 4092
  Cyclic GFR-binding peptide
  MOD_RES (31), (32): Xaa is C or S

SEQ ID NO: 41632 - protein, 32 aa, Artificial Sequence; identical to SEQ ID NO: 1906
  Cyclic GFR-binding peptide

SEQ ID NO: 41633 - protein, 21 aa, Artificial Sequence
  Cyclic GFR-binding peptide
RYKKLIVNNSSDFYLVSIANL

SEQ ID NO: 41634 - protein, 23 aa, Artificial Sequence
  Cyclic GFR-binding peptide
YHYKLVKPKRGVKYLISIPSLAQ

SEQ ID NO: 41635 - protein, 28 aa, Artificial Sequence
  Cyclic GFR-binding peptide
  MOD_RES (2), (2): Xaa is C or S
GXARVVMNQYNKLIVNSSDDLYLVSIAS

SEQ ID NO: 41636 - protein, 28 aa, Artificial Sequence
  Cyclic GFR-binding peptide
  MOD_RES (26), (26): Xaa is C or S
YHYKLIVNSSDDKYLVSIPSLKTPAXTP

SEQ ID NO: 41637 - protein, 29 aa, Artificial Sequence
  Cyclic GFR-binding peptide
  MOD_RES (29), (29): Xaa is C or S
VVMQYNKLVKPTRGVLYLISIASLDQPVX

SEQ ID NO: 41638 - protein, 33 aa, Artificial Sequence; identical to SEQ ID NO: 4094
  Cyclic GFR-binding peptide
  MOD_RES (31), (32): Xaa is C or S

SEQ ID NO: 41639 - protein, 33 aa, Artificial Sequence; identical to SEQ ID NO: 4096
  Cyclic GFR-binding peptide
  MOD_RES (31), (32): Xaa is C or S

SEQ ID NO: 41640 - protein, 28 aa, Artificial Sequence
  Cyclic GFR-binding peptide
HDELTQYNKLFIPKKRVIELYLVSIASL

SEQ ID NO: 41641 - protein, 36 aa, Artificial Sequence
  Cyclic GFR-binding peptide
  MOD_RES (32), (33): Xaa is C or S
AVSMGEQYNKLTPVGMDDLYLVSIASLKTPVXXAKG

SEQ ID NO: 41642 - protein, 34 aa, Artificial Sequence; identical to SEQ ID NO: 4098
  Cyclic GFR-binding peptide
  MOD_RES (2), (4): Xaa is C or S

SEQ ID NO: 41643 - protein, 31 aa, Artificial Sequence
  Cyclic GFR-binding peptide
  MOD_RES (28), (29): Xaa is C or S
MNRHKRLIVNSSDDYYLVSTASLKTPAXXPK

SEQ ID NO: 41644 - protein, 33 aa, Artificial Sequence
  Cyclic GFR-binding peptide
  MOD_RES (28), (29): Xaa is C or S
IMQYNKLVKPKRGVLYLISIASLAQPVXXPAAS

SEQ ID NO: 41645 - protein, 36 aa, Artificial Sequence; identical to SEQ ID NO: 4102
  Cyclic GFR-binding peptide
  MOD_RES (2), (4): Xaa is C or S

SEQ ID NO: 41646 - protein, 36 aa, Artificial Sequence
  Cyclic GFR-binding peptide
  MOD_RES (30), (31): Xaa is C or S
SMGERYKKLTPVGMDDFYLVSIANLKTPVXXAKGVK

SEQ ID NO: 41647 - protein, 33 aa, Artificial Sequence; identical to SEQ ID NO: 4103
  Cyclic GFR-binding peptide
  MOD_RES (31), (32): Xaa is C or S

SEQ ID NO: 41648 - protein, 38 aa, Artificial Sequence; identical to SEQ ID NO: 4104
  Cyclic GFR-binding peptide
  MOD_RES (2), (33), (34): Xaa is C or S

SEQ ID NO: 41649 - protein, 28 aa, Artificial Sequence
  Cyclic GFR-binding peptide
  MOD_RES (1), (3): Xaa is C or S
XKXSRVIMYHYKLVKPKRGVKYLISIPS

SEQ ID NO: 41650 - protein, 25 aa, Artificial Sequence
  Cyclic GFR-binding peptide
VVMERYKKLVVKDYEDFYLMSIANL

SEQ ID NO: 41651 - protein, 28 aa, Artificial Sequence
  Cyclic GFR-binding peptide
VIMRHKRLVKPKRGVYYLISTASLAQPV

SEQ ID NO: 41652 - protein, 31 aa, Artificial Sequence
  Cyclic GFR-binding peptide
  MOD_RES (26), (27): Xaa is C or S
RHKRLIVNSSDDYYLVSTASLQTPAXXPKPV

SEQ ID NO: 41653 - protein, 25 aa, Artificial Sequence
  Cyclic GFR-binding peptide
RHKRLIVNSSDDYYLVSTASLKTPA

SEQ ID NO: 41654 - protein, 34 aa, Artificial Sequence
  Cyclic GFR-binding peptide
  MOD_RES (2), (4): Xaa is C or S
RXGXEAVSMGERYKKLTPVGMDDFYLVSIANLKT

SEQ ID NO: 41655 - protein, 25 aa, Artificial Sequence
  Cyclic GFR-binding peptide
KVVMRYKKLVKPTRGVFYLISIANL

SEQ ID NO: 41656 - protein, 29 aa, Artificial Sequence
  Cyclic GFR-binding peptide
  MOD_RES (1), (3): Xaa is C or S
XGXAKVVMNRYKKLIVNNSSDFYLVSIAN

SEQ ID NO: 41657 - protein, 35 aa, Artificial Sequence; identical to SEQ ID NO: 4106
  Cyclic GFR-binding peptide
  MOD_RES (2), (4): Xaa is C or S

SEQ ID NO: 41658 - protein, 23 aa, Artificial Sequence
  Cyclic GFR-binding peptide
QYNKLIVNSSDDLYLVSIASLKT

SEQ ID NO: 41659 - protein, 34 aa, Artificial Sequence; identical to SEQ ID NO: 4108
  Cyclic GFR-binding peptide
  MOD_RES (1), (33), (34): Xaa is C or S

SEQ ID NO: 41660 - protein, 31 aa, Artificial Sequence
  Cyclic GFR-binding peptide
HDELTRYKKLFIPKKRVIEFYLVSIANLQVQ

SEQ ID NO: 41661 - protein, 29 aa, Artificial Sequence
  Cyclic GFR-binding peptide
KVIMYHYKLIKPTKGIKYLISIPSLDQSV

SEQ ID NO: 41662 - protein, 34 aa, Artificial Sequence
  Cyclic GFR-binding peptide
  MOD_RES (2), (4): Xaa is C or S
EXKXALHDELTRHKRLFIPKKRVIEYYLVSTASL

SEQ ID NO: 41663 - protein, 29 aa, Artificial Sequence
  Cyclic GFR-binding peptide
  MOD_RES (2), (4): Xaa is C or S
SXKXSKVIMRHKRLIKPTKGIYYLISTAS

SEQ ID NO: 41664 - protein, 35 aa, Artificial Sequence; identical to SEQ ID NO: 4109
  Cyclic GFR-binding peptide
  MOD_RES (2), (34), (35): Xaa is C or S

SEQ ID NO: 41665 - protein, 33 aa, Artificial Sequence; identical to SEQ ID NO: 4110
  Cyclic GFR-binding peptide
  MOD_RES (1), (32), (33): Xaa is C or S

SEQ ID NO: 41666 - protein, 30 aa, Artificial Sequence
  Cyclic GFR-binding peptide
  MOD_RES (2), (2): Xaa is C or S
GXAKVVMNYHYKLIVNNSSDKYLVSIPSLK

SEQ ID NO: 41667 - protein, 38 aa, Artificial Sequence; identical to SEQ ID NO: 4112
  Cyclic GFR-binding peptide
  MOD_RES (1), (3), (36), (37): Xaa is C or S

SEQ ID NO: 41668 - protein, 36 aa, Artificial Sequence; identical to SEQ ID NO: 4114
  Cyclic GFR-binding peptide
  MOD_RES (32), (33): Xaa is C or S

SEQ ID NO: 41669 - protein, 39 aa, Artificial Sequence; identical to SEQ ID NO: 4115
  Cyclic GFR-binding peptide
  MOD_RES (2), (34), (35): Xaa is C or S

SEQ ID NO: 41670 - protein, 29 aa, Artificial Sequence
  Cyclic GFR-binding peptide
  MOD_RES (29), (29): Xaa is C or S
VMNYHYKLIVNNSSDKYLVSIPSLKTPAX

SEQ ID NO: 41671 - protein, 28 aa, Artificial Sequence
  Cyclic GFR-binding peptide
  MOD_RES (1), (1): Xaa is C or S
XSRVIMYHYKLVKPKRGVKYLISIPSLA

SEQ ID NO: 41672 - protein, 26 aa, Artificial Sequence
  Cyclic GFR-binding peptide
NRHKRLIVNSSDDYYLVSTASLQTPA

SEQ ID NO: 41673 - protein, 23 aa, Artificial Sequence
  Cyclic GFR-binding peptide
VMNQYNKLIVNNSSDLYLVSIAS

SEQ ID NO: 41674 - protein, 23 aa, Artificial Sequence
  Cyclic GFR-binding peptide
ERYKKLTPVGMDDFYLVSIANLK

SEQ ID NO: 41675 - protein, 32 aa, Artificial Sequence; identical to SEQ ID NO: 4117
  Cyclic GFR-binding peptide
  MOD_RES (2), (2): Xaa is C or S

SEQ ID NO: 41676 - protein, 34 aa, Artificial Sequence; identical to SEQ ID NO: 4118
  Cyclic GFR-binding peptide
  MOD_RES (33), (34): Xaa is C or S

SEQ ID NO: 41677 - protein, 26 aa, Artificial Sequence
  Cyclic GFR-binding peptide
VMDYHYKLVVKENEDKYLMSIPSLET

SEQ ID NO: 41678 - protein, 36 aa, Artificial Sequence; identical to SEQ ID NO: 4120
  Cyclic GFR-binding peptide
  MOD_RES (31), (32): Xaa is C or S

SEQ ID NO: 41679 - protein, 38 aa, Artificial Sequence; identical to SEQ ID NO: 4121
  Cyclic GFR-binding peptide
  MOD_RES (2), (34), (35): Xaa is C or S

SEQ ID NO: 41680 - protein, 39 aa, Artificial Sequence; identical to SEQ ID NO: 4122
  Cyclic GFR-binding peptide
  MOD_RES (2), (4), (35), (36): Xaa is C or S

SEQ ID NO: 41681 - protein, 37 aa, Artificial Sequence
  Cyclic GFR-binding peptide
  MOD_RES (2), (4): Xaa is C or S
EXKXALHDELTRHKRLFIPKKRVIEYYLVSTASLQVQ

SEQ ID NO: 41682 - protein, 31 aa, Artificial Sequence
  Cyclic GFR-binding peptide
  MOD_RES (1), (1): Xaa is C or S
XGEVVMERYKKLVVKDYEDFYLMSIANLETP

SEQ ID NO: 41683 - protein, 25 aa, Artificial Sequence
  Cyclic GFR-binding peptide
VVMNYHYKLIVNNSSDKYLVSIPSL

SEQ ID NO: 41684 - protein, 33 aa, Artificial Sequence; identical to SEQ ID NO: 4124
  Cyclic GFR-binding peptide
  MOD_RES (31), (32): Xaa is C or S

SEQ ID NO: 41685 - protein, 27 aa, Artificial Sequence
  Cyclic GFR-binding peptide
VIMYHYKLIKPTKGIKYLISIPSLDQS

SEQ ID NO: 41686 - protein, 31 aa, Artificial Sequence
  Cyclic GFR-binding peptide
  MOD_RES (28), (29): Xaa is C or S
MNYHYKLIVNSSDDKYLVSIPSLKTPAXXPK

SEQ ID NO: 41687 - protein, 27 aa, Artificial Sequence
  Cyclic GFR-binding peptide
VIMRHKRLIKPTKGIYYLISTASLDQS

SEQ ID NO: 41688 - protein, 27 aa, Artificial Sequence
  Cyclic GFR-binding peptide
  MOD_RES (26), (27): Xaa is C or S
RYKKLVKPKRGVFYLISIANLAQPVXX

SEQ ID NO: 41689 - protein, 31 aa, Artificial Sequence
  Cyclic GFR-binding peptide
  MOD_RES (29), (30): Xaa is C or S
VIMYHYKLVKPKRGVKYLISIPSLAQPVXXP

SEQ ID NO: 41690 - protein, 34 aa, Artificial Sequence
  Cyclic GFR-binding peptide
  MOD_RES (29), (30): Xaa is C or S
MGERYKKLTPVGMDDFYLVSIANLKTPVXXAKGV

SEQ ID NO: 41691 - protein, 39 aa, Artificial Sequence; identical to SEQ ID NO: 4127
  Cyclic GFR-binding peptide
  MOD_RES (1), (3): Xaa is C or S

SEQ ID NO: 41692 - protein, 38 aa, Artificial Sequence; identical to SEQ ID NO: 4128
  Cyclic GFR-binding peptide
  MOD_RES (1), (34), (35): Xaa is C or S

SEQ ID NO: 41693 - protein, 28 aa, Artificial Sequence
  Cyclic GFR-binding peptide
LHDELTQYNKLFIPKKRVIELYLVSIAS

SEQ ID NO: 41694 - protein, 30 aa, Artificial Sequence
  Cyclic GFR-binding peptide
  MOD_RES (30), (30): Xaa is C or S
KVIMYHYKLIKPTKGIKYLISIPSLDQSVX

SEQ ID NO: 41695 - protein, 39 aa, Artificial Sequence; identical to SEQ ID NO: 4129
  Cyclic GFR-binding peptide
  MOD_RES (2), (34), (35): Xaa is C or S

SEQ ID NO: 41696 - protein, 29 aa, Artificial Sequence
  Cyclic GFR-binding peptide
  MOD_RES (28), (29): Xaa is C or S
MERYKKLVVKDYEDFYLMSIANLETPVXX

SEQ ID NO: 41697 - protein, 25 aa, Artificial Sequence
  Cyclic GFR-binding peptide
EYHYKLVVKDYEDKYLMSIPSLETP

SEQ ID NO: 41698 - protein, 29 aa, Artificial Sequence
  Cyclic GFR-binding peptide
  MOD_RES (1), (1): Xaa is C or S
XSKVVMYHYKLVKPTRGVKYLISIPSLDQ

SEQ ID NO: 41699 - protein, 34 aa, Artificial Sequence; identical to SEQ ID NO: 4133
  Cyclic GFR-binding peptide
  MOD_RES (1), (3), (34): Xaa is C or S

SEQ ID NO: 41700 - protein, 32 aa, Artificial Sequence
  Cyclic GFR-binding peptide
  MOD_RES (30), (31): Xaa is C or S
SMGERYKKLTPVGMDDFYLVSIANLKTPVXXA

SEQ ID NO: 41701 - protein, 22 aa, Artificial Sequence
  Cyclic GFR-binding peptide
MYHYKLVKPTRGVKYLISIPSL

SEQ ID NO: 41702 - protein, 31 aa, Artificial Sequence
  Cyclic GFR-binding peptide
AVSMGEQYNKLTPVGMDDLYLVSIASLKTPV

SEQ ID NO: 41703 - protein, 34 aa, Artificial Sequence
  Cyclic GFR-binding peptide
  MOD_RES (30), (31): Xaa is C or S
KVVMYHYKLVKPTRGVKYLISIPSLDQPVXXPSA

SEQ ID NO: 41704 - protein, 35 aa, Artificial Sequence; identical to SEQ ID NO: 4136
  Cyclic GFR-binding peptide
  MOD_RES (1), (33), (34): Xaa is C or S

SEQ ID NO: 41705 - protein, 30 aa, Artificial Sequence
  Cyclic GFR-binding peptide
  MOD_RES (1), (1): Xaa is C or S
XSRVIMYHYKLVKPKRGVKYLISIPSLAQP

SEQ ID NO: 41706 - protein, 25 aa, Artificial Sequence
  Cyclic GFR-binding peptide
QYNKLIVNSSDDLYLVSIASLKTPA

SEQ ID NO: 41707 - protein, 30 aa, Artificial Sequence
  Cyclic GFR-binding peptide
  MOD_RES (29), (30): Xaa is C or S
VIMRHKRLIKPTKGIYYLISTASLDQSVXX

SEQ ID NO: 41708 - protein, 36 aa, Artificial Sequence
  Cyclic GFR-binding peptide
  MOD_RES (32), (32): Xaa is C or S
LTRYKKLFIPKKRVIEFYLVSIANLQVQTPRXQVNR

SEQ ID NO: 41709 - protein, 31 aa, Artificial Sequence
  Cyclic GFR-binding peptide
  MOD_RES (2), (4): Xaa is C or S
RXGXEAVSMGERHKRLTPVGMDDYYLVSTAS

SEQ ID NO: 41710 - protein, 28 aa, Artificial Sequence
  Cyclic GFR-binding peptide
ELTYHYKLFIPKKRVIEKYLVSIPSLQV

SEQ ID NO: 41711 - protein, 26 aa, Artificial Sequence
  Cyclic GFR-binding peptide
MERHKRLVVKDYEDYYLMSTASLETP

SEQ ID NO: 41712 - protein, 21 aa, Artificial Sequence
  Cyclic GFR-binding peptide
YHYKLIKPTKGIKYLISIPSL

SEQ ID NO: 41713 - protein, 26 aa, Artificial Sequence
  Cyclic GFR-binding peptide
VVMYHYKLVKPTRGVKYLISIPSLDQ

SEQ ID NO: 41714 - protein, 33 aa, Artificial Sequence; identical to SEQ ID NO: 4142
  Cyclic GFR-binding peptide
  MOD_RES (2), (2): Xaa is C or S

SEQ ID NO: 41715 - protein, 37 aa, Artificial Sequence; identical to SEQ ID NO: 4141
  Cyclic GFR-binding peptide
  MOD_RES (2), (34), (35): Xaa is C or S

SEQ ID NO: 41716 - protein, 33 aa, Artificial Sequence
  Cyclic GFR-binding peptide
  MOD_RES (29), (30): Xaa is C or S
VIMRYKKLIKPTKGIFYLISIANLDQSVXXPSA

SEQ ID NO: 41717 - protein, 30 aa, Artificial Sequence
  Cyclic GFR-binding peptide
HDELTRHKRLFIPKKRVIEYYLVSTASLQV

SEQ ID NO: 41718 - protein, 29 aa, Artificial Sequence
  Cyclic GFR-binding peptide
SRVIMRHKRLVKPKRGVYYLISTASLAQP

SEQ ID NO: 41719 - protein, 30 aa, Artificial Sequence
  Cyclic GFR-binding peptide
  MOD_RES (1), (3): Xaa is C or S
XGXARVVMNRHKRLIVNSSDDYYLVSTASL

SEQ ID NO: 41720 - protein, 38 aa, Artificial Sequence; identical to SEQ ID NO: 4147
  Cyclic GFR-binding peptide
  MOD_RES (2), (2): Xaa is C or S

SEQ ID NO: 41721 - protein, 35 aa, Artificial Sequence; identical to SEQ ID NO: 4149
  Cyclic GFR-binding peptide
  MOD_RES (31), (32): Xaa is C or S

SEQ ID NO: 41722 - protein, 29 aa, Artificial Sequence
  Cyclic GFR-binding peptide
  MOD_RES (28), (29): Xaa is C or S
MNYHYKLIVNSSDDKYLVSIPSLKTPAXX

SEQ ID NO: 41723 - protein, 35 aa, Artificial Sequence
  Cyclic GFR-binding peptide
  MOD_RES (30), (31): Xaa is C or S
SMGERYKKLTPVGMDDFYLVSIANLKTPVXXAKGV

SEQ ID NO: 41724 - protein, 32 aa, Artificial Sequence
  Cyclic GFR-binding peptide
  MOD_RES (1), (3): Xaa is C or S
XKXALHDELTRYKKLFIPKKRVIEFYLVSIAN

SEQ ID NO: 41725 - protein, 32 aa, Artificial Sequence
  Cyclic GFR-binding peptide
  MOD_RES (29), (30): Xaa is C or S
VIMRYKKLVKPKRGVFYLISIANLAQPVXXPA

SEQ ID NO: 41726 - protein, 30 aa, Artificial Sequence
  Cyclic GFR-binding peptide
  MOD_RES (1), (3): Xaa is C or S
XKXSKVIMRHKRLIKPTKGIYYLISTASLD

SEQ ID NO: 41727 - protein, 29 aa, Artificial Sequence
  Cyclic GFR-binding peptide
  MOD_RES (26), (27): Xaa is C or S
YHYKLVKPTRGVKYLISIPSLDQPVXXPS

SEQ ID NO: 41728 - protein, 37 aa, Artificial Sequence; identical to SEQ ID NO: 4153
  Cyclic GFR-binding peptide
  MOD_RES (2), (33), (34): Xaa is C or S

SEQ ID NO: 41729 - protein, 33 aa, Artificial Sequence
  Cyclic GFR-binding peptide
  MOD_RES (29), (30): Xaa is C or S
VMEYHYKLVVKDYEDKYLMSIPSLETPVXXAKP

SEQ ID NO: 41730 - protein, 31 aa, Artificial Sequence
  Cyclic GFR-binding peptide
  MOD_RES (1), (1): Xaa is C or S
XGEVVMDRYKKLVVKENEDFYLMSIANLETP

SEQ ID NO: 41731 - protein, 28 aa, Artificial Sequence
  Cyclic GFR-binding peptide
  MOD_RES (27), (27): Xaa is C or S
NYHYKLIVNSSDDKYLVSIPSLKTPAXT

SEQ ID NO: 41732 - protein, 29 aa, Artificial Sequence
  Cyclic GFR-binding peptide
  MOD_RES (1), (1): Xaa is C or S
XSKVIMYHYKLIKPTKGIKYLISIPSLDQ

SEQ ID NO: 41733 - protein, 34 aa, Artificial Sequence; identical to SEQ ID NO: 4154
  Cyclic GFR-binding peptide
  MOD_RES (2), (33), (34): Xaa is C or S

SEQ ID NO: 41734 - protein, 35 aa, Artificial Sequence
  Cyclic GFR-binding peptide
  MOD_RES (29), (30): Xaa is C or S
VVMRYKKLVKPTRGVFYLISIANLDQPVXXPSASA

SEQ ID NO: 41735 - protein, 32 aa, Artificial Sequence
  Cyclic GFR-binding peptide
  MOD_RES (2), (4): Xaa is C or S
SXKXSKVVMYHYKLVKPTRGVKYLISIPSLDQ

SEQ ID NO: 41736 - protein, 24 aa, Artificial Sequence
  Cyclic GFR-binding peptide
VVMEYHYKLVVKDYEDKYLMSIPS

SEQ ID NO: 41737 - protein, 41 aa, Artificial Sequence; identical to SEQ ID NO: 4156
  Cyclic GFR-binding peptide
  MOD_RES (1), (3), (35), (36): Xaa is C or S

SEQ ID NO: 41738 - protein, 36 aa, Artificial Sequence
  Cyclic GFR-binding peptide
  MOD_RES (30), (31): Xaa is C or S
VVMNRYKKLIVNNSSDFYLVSIANLKTPAXXAKPVA

SEQ ID NO: 41739 - protein, 38 aa, Artificial Sequence; identical to SEQ ID NO: 4157
  Cyclic GFR-binding peptide
  MOD_RES (1), (32), (33): Xaa is C or S

SEQ ID NO: 41740 - protein, 27 aa, Artificial Sequence
  Cyclic GFR-binding peptide
  MOD_RES (26), (27): Xaa is C or S
RYKKLIVNNSSDFYLVSIANLKTPAXX

SEQ ID NO: 41741 - protein, 34 aa, Artificial Sequence
  Cyclic GFR-binding peptide
  MOD_RES (1), (1): Xaa is C or S
XALHDELTQYNKLFIPKKRVIELYLVSIASLQVQ

SEQ ID NO: 41742 - protein, 35 aa, Artificial Sequence; identical to SEQ ID NO: 4158
  Cyclic GFR-binding peptide
  MOD_RES (1), (33), (34): Xaa is C or S

SEQ ID NO: 41743 - protein, 32 aa, Artificial Sequence; identical to SEQ ID NO: 1862
  Cyclic GFR-binding peptide

SEQ ID NO: 41744 - protein, 33 aa, Artificial Sequence
  Cyclic GFR-binding peptide
ALHDELTRHKRLFIPKKRVIEYYLVSTASLQVQ

SEQ ID NO: 41745 - protein, 33 aa, Artificial Sequence
  Cyclic GFR-binding peptide
  MOD_RES (2), (4): Xaa is C or S
RXGXEAVSMGERHKRLTPVGMDDYYLVSTASLK

SEQ ID NO: 41746 - protein, 31 aa, Artificial Sequence
  Cyclic GFR-binding peptide
  MOD_RES (30), (30): Xaa is C or S
RYKKLFIPKKRVIEFYLVSIANLQVQTPRXQ

SEQ ID NO: 41747 - protein, 31 aa, Artificial Sequence
  Cyclic GFR-binding peptide
  MOD_RES (30), (31): Xaa is C or S
KVVMQYNKLVKPTRGVLYLISIASLDQPVXX

SEQ ID NO: 41748 - protein, 38 aa, Artificial Sequence; identical to SEQ ID NO: 4159
  Cyclic GFR-binding peptide
  MOD_RES (1), (3), (34), (35): Xaa is C or S

SEQ ID NO: 41749 - protein, 41 aa, Artificial Sequence; identical to SEQ ID NO: 4160
  Cyclic GFR-binding peptide
  MOD_RES (1), (3), (35), (36): Xaa is C or S

SEQ ID NO: 41750 - protein, 30 aa, Artificial Sequence
  Cyclic GFR-binding peptide
EAVSMGERHKRLTPVGMDDYYLVSTASLKT

SEQ ID NO: 41751 - protein, 29 aa, Artificial Sequence
  Cyclic GFR-binding peptide
VSMGERYKKLTPVGMDDFYLVSIANLKTP

SEQ ID NO: 41752 - protein, 28 aa, Artificial Sequence
  Cyclic GFR-binding peptide
LTRHKRLFIPKKRVIEYYLVSTASLQVQ

SEQ ID NO: 41753 - protein, 34 aa, Artificial Sequence
  Cyclic GFR-binding peptide
  MOD_RES (30), (31): Xaa is C or S
VVMNYHYKLIVNSSDDKYLVSIPSLKTPAXXPKP

SEQ ID NO: 41754 - protein, 36 aa, Artificial Sequence
  Cyclic GFR-binding peptide
  MOD_RES (34), (34): Xaa is C or S
DELTYHYKLFIPKKRVIEKYLVSIPSLQVQTPRXQV

SEQ ID NO: 41755 - protein, 29 aa, Artificial Sequence
  Cyclic GFR-binding peptide
  MOD_RES (27), (28): Xaa is C or S
DYHYKLVVKENEDKYLMSIPSLETPVXXA

SEQ ID NO: 41756 - protein, 23 aa, Artificial Sequence
  Cyclic GFR-binding peptide
VMQYNKLVKPTRGVLYLISIASL

SEQ ID NO: 41757 - protein, 37 aa, Artificial Sequence; identical to SEQ ID NO: 4166
  Cyclic GFR-binding peptide
  MOD_RES (2), (34), (35): Xaa is C or S

SEQ ID NO: 41758 - protein, 29 aa, Artificial Sequence
  Cyclic GFR-binding peptide
SRVVMNYHYKLIVNSSDDKYLVSIPSLKT

SEQ ID NO: 41759 - protein, 20 aa, Artificial Sequence
  Cyclic GFR-binding peptide
YHYKLVKPKRGVKYLISIPS

SEQ ID NO: 41760 - protein, 25 aa, Artificial Sequence
  Cyclic GFR-binding peptide
VIMRHKRLVKPKRGVYYLISTASLA

SEQ ID NO: 41761 - protein, 29 aa, Artificial Sequence
  Cyclic GFR-binding peptide
AAAAAAAAAYHYKLIVNSSDDKYLVSIPS

SEQ ID NO: 41762 - protein, 32 aa, Artificial Sequence
  Cyclic GFR-binding peptide
  MOD_RES (27), (28): Xaa is C or S
NRHKRLIVNSSDDYYLVSTASLKTPAXXPKPV

SEQ ID NO: 41763 - protein, 32 aa, Artificial Sequence
  Cyclic GFR-binding peptide
  MOD_RES (1), (3): Xaa is C or S
XKXSRVIMYHYKLVKPKRGVKYLISIPSLAQP

SEQ ID NO: 41764 - protein, 34 aa, Artificial Sequence
  Cyclic GFR-binding peptide
  MOD_RES (30), (31): Xaa is C or S
VVMERHKRLVVKDYEDYYLMSTASLETPVXXAKP

SEQ ID NO: 41765 - protein, 30 aa, Artificial Sequence
  Cyclic GFR-binding peptide
  MOD_RES (29), (30): Xaa is C or S
MGERHKRLTPVGMDDYYLVSTASLKTPVXX

SEQ ID NO: 41766 - protein, 26 aa, Artificial Sequence
  Cyclic GFR-binding peptide
  MOD_RES (1), (1): Xaa is C or S
XSKVIMRHKRLIKPTKGIYYLISTAS

SEQ ID NO: 41767 - protein, 39 aa, Artificial Sequence; identical to SEQ ID NO: 4169
  Cyclic GFR-binding peptide
  MOD_RES (1), (33), (34): Xaa is C or S

SEQ ID NO: 41768 - protein, 37 aa, Artificial Sequence; identical to SEQ ID NO: 4170
  Cyclic GFR-binding peptide
  MOD_RES (2), (4), (35), (36): Xaa is C or S

SEQ ID NO: 41769 - protein, 32 aa, Artificial Sequence
  Cyclic GFR-binding peptide
  MOD_RES (1), (3): Xaa is C or S
XKXSKVIMQYNKLIKPTKGILYLISIASLDQS

SEQ ID NO: 41770 - protein, 41 aa, Artificial Sequence; identical to SEQ ID NO: 4172
  Cyclic GFR-binding peptide
  MOD_RES (1), (3), (35), (36): Xaa is C or S

SEQ ID NO: 41771 - protein, 21 aa, Artificial Sequence
  Cyclic GFR-binding peptide
RYKKLVKPKRGVFYLISIANL

SEQ ID NO: 41772 - protein, 32 aa, Artificial Sequence
  Cyclic GFR-binding peptide
  MOD_RES (30), (31): Xaa is C or S
VVMNYHYKLIVNNSSDKYLVSIPSLKTPAXXA

SEQ ID NO: 41773 - protein, 27 aa, Artificial Sequence
  Cyclic GFR-binding peptide
VVMNYHYKLIVNNSSDKYLVSIPSLKT

SEQ ID NO: 41774 - protein, 32 aa, Artificial Sequence
  Cyclic GFR-binding peptide
  MOD_RES (1), (3): Xaa is C or S
XGXEAVSMGEQYNKLTPVGMDDLYLVSIASLK

SEQ ID NO: 41775 - protein, 32 aa, Artificial Sequence
  Cyclic GFR-binding peptide
  MOD_RES (1), (1): Xaa is C or S
XALHDELTQYNKLFIPKKRVIELYLVSIASLQ

SEQ ID NO: 41776 - protein, 22 aa, Artificial Sequence
  Cyclic GFR-binding peptide
MYHYKLVKPKRGVKYLISIPSL

SEQ ID NO: 41777 - protein, 37 aa, Artificial Sequence; identical to SEQ ID NO: 4180
  Cyclic GFR-binding peptide
  MOD_RES (2), (34): Xaa is C or S

SEQ ID NO: 41778 - protein, 37 aa, Artificial Sequence; identical to SEQ ID NO: 4183
  Cyclic GFR-binding peptide
  MOD_RES (1), (3), (35), (36): Xaa is C or S

SEQ ID NO: 41779 - protein, 27 aa, Artificial Sequence
  Cyclic GFR-binding peptide
  MOD_RES (27), (27): Xaa is C or S
NYHYKLIVNNSSDKYLVSIPSLKTPAX

SEQ ID NO: 41780 - protein, 33 aa, Artificial Sequence; identical to SEQ ID NO: 4184
  Cyclic GFR-binding peptide
  MOD_RES (31), (32): Xaa is C or S

SEQ ID NO: 41781 - protein, 36 aa, Artificial Sequence; identical to SEQ ID NO: 4186
  Cyclic GFR-binding peptide
  MOD_RES (1), (33): Xaa is C or S

SEQ ID NO: 41782 - protein, 31 aa, Artificial Sequence
  Cyclic GFR-binding peptide
  MOD_RES (1), (1): Xaa is C or S
XARVVMNQYNKLIVNSSDDLYLVSIASLQTP

SEQ ID NO: 41783 - protein, 42 aa, Artificial Sequence; identical to SEQ ID NO: 4189
  Cyclic GFR-binding peptide
  MOD_RES (2), (4), (36): Xaa is C or S

SEQ ID NO: 41784 - protein, 24 aa, Artificial Sequence
  Cyclic GFR-binding peptide
TRHKRLFIPKKRVIEYYLVSTASL

SEQ ID NO: 41785 - protein, 35 aa, Artificial Sequence; identical to SEQ ID NO: 4191
  Cyclic GFR-binding peptide
  MOD_RES (32), (33): Xaa is C or S

SEQ ID NO: 41786 - protein, 31 aa, Artificial Sequence
  Cyclic GFR-binding peptide
  MOD_RES (1), (3): Xaa is C or S
XGXGEVVMDYHYKLVVKENEDKYLMSIPSLE

SEQ ID NO: 41787 - protein, 34 aa, Artificial Sequence
  Cyclic GFR-binding peptide
  MOD_RES (2), (4): Xaa is C or S
HXGXAKVVMNQYNKLIVNNSSDLYLVSIASLKTP

SEQ ID NO: 41788 - protein, 38 aa, Artificial Sequence; identical to SEQ ID NO: 4193
  Cyclic GFR-binding peptide
  MOD_RES (2), (4), (36), (37): Xaa is C or S

SEQ ID NO: 41789 - protein, 34 aa, Artificial Sequence; identical to SEQ ID NO: 4194
  Cyclic GFR-binding peptide
  MOD_RES (2), (4): Xaa is C or S

SEQ ID NO: 41790 - protein, 31 aa, Artificial Sequence
  Cyclic GFR-binding peptide
  MOD_RES (1), (1): Xaa is C or S
XEAVSMGERYKKLTPVGMDDFYLVSIANLKT

SEQ ID NO: 41791 - protein, 23 aa, Artificial Sequence
  Cyclic GFR-binding peptide
TYHYKLFIPKKRVIEKYLVSIPS

SEQ ID NO: 41792 - protein, 30 aa, Artificial Sequence
  Cyclic GFR-binding peptide
AVSMGERHKRLTPVGMDDYYLVSTASLKTP

SEQ ID NO: 41793 - protein, 29 aa, Artificial Sequence
  Cyclic GFR-binding peptide
  MOD_RES (29), (29): Xaa is C or S
VMNYHYKLIVNSSDDKYLVSIPSLKTPAX

SEQ ID NO: 41794 - protein, 29 aa, Artificial Sequence
  Cyclic GFR-binding peptide
AAAAAAAAAQYNKLVKPKRGVLYLISIAS

SEQ ID NO: 41795 - protein, 38 aa, Artificial Sequence; identical to SEQ ID NO: 4198
  Cyclic GFR-binding peptide
  MOD_RES (2), (4), (36): Xaa is C or S

SEQ ID NO: 41796 - protein, 21 aa, Artificial Sequence
  Cyclic GFR-binding peptide
NRYKKLIVNNSSDFYLVSIAN

SEQ ID NO: 41797 - protein, 35 aa, Artificial Sequence; identical to SEQ ID NO: 4200
  Cyclic GFR-binding peptide
  MOD_RES (2), (4): Xaa is C or S

SEQ ID NO: 41798 - protein, 34 aa, Artificial Sequence; identical to SEQ ID NO: 4201
  Cyclic GFR-binding peptide
  MOD_RES (2), (33), (34): Xaa is C or S

SEQ ID NO: 41799 - protein, 30 aa, Artificial Sequence
  Cyclic GFR-binding peptide
  MOD_RES (29), (30): Xaa is C or S
VIMRYKKLIKPTKGIFYLISIANLDQSVXX

SEQ ID NO: 41800 - protein, 34 aa, Artificial Sequence; identical to SEQ ID NO: 4202
  Cyclic GFR-binding peptide
  MOD_RES (32), (33): Xaa is C or S

SEQ ID NO: 41801 - protein, 34 aa, Artificial Sequence; identical to SEQ ID NO: 4203
  Cyclic GFR-binding peptide
  MOD_RES (2), (34): Xaa is C or S

SEQ ID NO: 41802 - protein, 25 aa, Artificial Sequence
  Cyclic GFR-binding peptide
MRHKRLVKPKRGVYYLISTASLAQP

SEQ ID NO: 41803 - protein, 38 aa, Artificial Sequence; identical to SEQ ID NO: 4205
  Cyclic GFR-binding peptide
  MOD_RES (2), (34): Xaa is C or S

SEQ ID NO: 41804 - protein, 40 aa, Artificial Sequence; identical to SEQ ID NO: 4206
  Cyclic GFR-binding peptide
  MOD_RES (1), (3), (34), (35): Xaa is C or S

SEQ ID NO: 41805 - protein, 39 aa, Artificial Sequence; identical to SEQ ID NO: 4207
  Cyclic GFR-binding peptide
  MOD_RES (2), (4), (36), (37): Xaa is C or S

SEQ ID NO: 41806 - protein, 29 aa, Artificial Sequence
  Cyclic GFR-binding peptide
AAAAAAAAARYKKLIVNNSSDFYLVSIAN

SEQ ID NO: 41807 - protein, 35 aa, Artificial Sequence
  Cyclic GFR-binding peptide
  MOD_RES (29), (30): Xaa is C or S
VIMRYKKLVKPKRGVFYLISIANLAQPVXXPAASA

SEQ ID NO: 41808 - protein, 25 aa, Artificial Sequence
  Cyclic GFR-binding peptide
RHKRLVKPKRGVYYLISTASLAQPV

SEQ ID NO: 41809 - protein, 28 aa, Artificial Sequence
  Cyclic GFR-binding peptide
  MOD_RES (28), (28): Xaa is C or S
MDRHKRLVVKENEDYYLMSTASLETPVX

SEQ ID NO: 41810 - protein, 34 aa, Artificial Sequence; identical to SEQ ID NO: 4213
  Cyclic GFR-binding peptide
  MOD_RES (31), (32): Xaa is C or S

SEQ ID NO: 41811 - protein, 34 aa, Artificial Sequence
  Cyclic GFR-binding peptide
  MOD_RES (29), (30): Xaa is C or S
VIMQYNKLIKPTKGILYLISIASLDQSVXXPSAS

SEQ ID NO: 41812 - protein, 27 aa, Artificial Sequence
  Cyclic GFR-binding peptide
  MOD_RES (26), (27): Xaa is C or S
RHKRLVVKDYEDYYLMSTASLETPVXX

SEQ ID NO: 41813 - protein, 30 aa, Artificial Sequence
  Cyclic GFR-binding peptide
  MOD_RES (26), (27): Xaa is C or S
RHKRLVKPKRGVYYLISTASLAQPVXXPAA

SEQ ID NO: 41814 - protein, 33 aa, Artificial Sequence
  Cyclic GFR-binding peptide
  MOD_RES (2), (4): Xaa is C or S
HXGXSRVVMNYHYKLIVNSSDDKYLVSIPSLKT

SEQ ID NO: 41815 - protein, 30 aa, Artificial Sequence
  Cyclic GFR-binding peptide
HDELTYHYKLFIPKKRVIEKYLVSIPSLQV

SEQ ID NO: 41816 - protein, 23 aa, Artificial Sequence
  Cyclic GFR-binding peptide
VMERYKKLVVKDYEDFYLMSIAN

SEQ ID NO: 41817 - protein, 26 aa, Artificial Sequence
  Cyclic GFR-binding peptide
MNQYNKLIVNNSSDLYLVSIASLKTP

SEQ ID NO: 41818 - protein, 38 aa, Artificial Sequence; identical to SEQ ID NO: 4219
  Cyclic GFR-binding peptide
  MOD_RES (1), (33), (34): Xaa is C or S

SEQ ID NO: 41819 - protein, 32 aa, Artificial Sequence; identical to SEQ ID NO: 1874
  Cyclic GFR-binding peptide

SEQ ID NO: 41820 - protein, 20 aa, Artificial Sequence
  Cyclic GFR-binding peptide
QYNKLVKPKRGVLYLISIAS

SEQ ID NO: 41821 - protein, 39 aa, Artificial Sequence; identical to SEQ ID NO: 4222
  Cyclic GFR-binding peptide
  MOD_RES (1), (3): Xaa is C or S

SEQ ID NO: 41822 - protein, 28 aa, Artificial Sequence
  Cyclic GFR-binding peptide
KVIMRYKKLIKPTKGIFYLISIANLDQS

SEQ ID NO: 41823 - protein, 29 aa, Artificial Sequence
  Cyclic GFR-binding peptide
  MOD_RES (28), (29): Xaa is C or S
MNRHKRLIVNSSDDYYLVSTASLKTPAXX

SEQ ID NO: 41824 - protein, 34 aa, Artificial Sequence
  Cyclic GFR-binding peptide
  MOD_RES (30), (30): Xaa is C or S
VVMNRHKRLIVNSSDDYYLVSTASLKTPAXTPKT

SEQ ID NO: 41825 - protein, 36 aa, Artificial Sequence; identical to SEQ ID NO: 4226
  Cyclic GFR-binding peptide
  MOD_RES (2), (33), (34): Xaa is C or S

SEQ ID NO: 41826 - protein, 39 aa, Artificial Sequence; identical to SEQ ID NO: 4228
  Cyclic GFR-binding peptide
  MOD_RES (1), (3), (35), (36): Xaa is C or S

SEQ ID NO: 41827 - protein, 36 aa, Artificial Sequence
  Cyclic GFR-binding peptide
  MOD_RES (30), (31): Xaa is C or S
RVIMRHKRLVKPKRGVYYLISTASLAQPVXXPAASA

SEQ ID NO: 41828 - protein, 31 aa, Artificial Sequence
  Cyclic GFR-binding peptide
  MOD_RES (2), (2): Xaa is C or S
KXSKVIMQYNKLIKPTKGILYLISIASLDQS

SEQ ID NO: 41829 - protein, 33 aa, Artificial Sequence
  Cyclic GFR-binding peptide
  MOD_RES (1), (1): Xaa is C or S
XALHDELTYHYKLFIPKKRVIEKYLVSIPSLQV

SEQ ID NO: 41830 - protein, 41 aa, Artificial Sequence; identical to SEQ ID NO: 4233
  Cyclic GFR-binding peptide
  MOD_RES (1), (3), (35), (36): Xaa is C or S

SEQ ID NO: 41831 - protein, 32 aa, Artificial Sequence
  Cyclic GFR-binding peptide
  MOD_RES (27), (28): Xaa is C or S
MYHYKLIKPTKGIKYLISIPSLDQSVXXPSAS

SEQ ID NO: 41832 - protein, 21 aa, Artificial Sequence
  Cyclic GFR-binding peptide
MRHKRLVKPTRGVYYLISTAS

SEQ ID NO: 41833 - protein, 22 aa, Artificial Sequence
  Cyclic GFR-binding peptide
RHKRLTPVGMDDYYLVSTASLK

SEQ ID NO: 41834 - protein, 26 aa, Artificial Sequence
  Cyclic GFR-binding peptide
AVSMGERYKKLTPVGMDDFYLVSIAN

SEQ ID NO: 41835 - protein, 26 aa, Artificial Sequence
  Cyclic GFR-binding peptide
  MOD_RES (26), (26): Xaa is C or S
RHKRLIVNSSDDYYLVSTASLKTPAX

SEQ ID NO: 41836 - protein, 35 aa, Artificial Sequence
  Cyclic GFR-binding peptide
  MOD_RES (31), (32): Xaa is C or S
VSMGERHKRLTPVGMDDYYLVSTASLKTPVXXAKG

SEQ ID NO: 41837 - protein, 38 aa, Artificial Sequence; identical to SEQ ID NO: 4236
  Cyclic GFR-binding peptide
  MOD_RES (32), (33): Xaa is C or S

SEQ ID NO: 41838 - protein, 27 aa, Artificial Sequence
  Cyclic GFR-binding peptide
HDELTYHYKLFIPKKRVIEKYLVSIPS

SEQ ID NO: 41839 - protein, 27 aa, Artificial Sequence
  Cyclic GFR-binding peptide
VVMDYHYKLVVKENEDKYLMSIPSLET

SEQ ID NO: 41840 - protein, 29 aa, Artificial Sequence
  Cyclic GFR-binding peptide
AKVVMNQYNKLIVNNSSDLYLVSIASLKT

SEQ ID NO: 41841 - protein, 20 aa, Artificial Sequence
  Cyclic GFR-binding peptide
YHYKLIVNSSDDKYLVSIPS

SEQ ID NO: 41842 - protein, 36 aa, Artificial Sequence
  Cyclic GFR-binding peptide
  MOD_RES (30), (31): Xaa is C or S
RVIMYHYKLVKPKRGVKYLISIPSLAQPVXXPAASA

SEQ ID NO: 41843 - protein, 31 aa, Artificial Sequence
  Cyclic GFR-binding peptide
  MOD_RES (27), (28): Xaa is C or S
NRHKRLIVNSSDDYYLVSTASLQTPAXXPKP

SEQ ID NO: 41844 - protein, 31 aa, Artificial Sequence; identical to SEQ ID NO: 4241
  Cyclic GFR-binding peptide

SEQ ID NO: 41845 - protein, 28 aa, Artificial Sequence
  Cyclic GFR-binding peptide
  MOD_RES (28), (28): Xaa is C or S
MDYHYKLVVKENEDKYLMSIPSLETPVX

SEQ ID NO: 41846 - protein, 41 aa, Artificial Sequence; identical to SEQ ID NO: 4242
  Cyclic GFR-binding peptide
  MOD_RES (37), (37): Xaa is C or S

SEQ ID NO: 41847 - protein, 33 aa, Artificial Sequence
  Cyclic GFR-binding peptide
  MOD_RES (2), (2): Xaa is C or S
KXALHDELTYHYKLFIPKKRVIEKYLVSIPSLQ

SEQ ID NO: 41848 - protein, 34 aa, Artificial Sequence
  Cyclic GFR-binding peptide
  MOD_RES (29), (29): Xaa is C or S
VMNRHKRLIVNSSDDYYLVSTASLKTPAXTPKTV

SEQ ID NO: 41849 - protein, 33 aa, Artificial Sequence
  Cyclic GFR-binding peptide
  MOD_RES (27), (28): Xaa is C or S
EYHYKLVVKDYEDKYLMSIPSLETPVXXAKPIS

SEQ ID NO: 41850 - protein, 32 aa, Artificial Sequence
  Cyclic GFR-binding peptide
  MOD_RES (28), (29): Xaa is C or S
GEQYNKLTPVGMDDLYLVSIASLKTPVXXAKG

SEQ ID NO: 41851 - protein, 21 aa, Artificial Sequence
  Cyclic GFR-binding peptide
ERYKKLTPVGMDDFYLVSIAN

SEQ ID NO: 41852 - protein, 27 aa, Artificial Sequence
  Cyclic GFR-binding peptide
MGERHKRLTPVGMDDYYLVSTASLKTP

SEQ ID NO: 41853 - protein, 30 aa, Artificial Sequence
  Cyclic GFR-binding peptide
  MOD_RES (26), (27): Xaa is C or S
RHKRLIVNSSDDYYLVSTASLQTPAXXPKP

SEQ ID NO: 41854 - protein, 36 aa, Artificial Sequence; identical to SEQ ID NO: 4246
  Cyclic GFR-binding peptide

SEQ ID NO: 41855 - protein, 29 aa, Artificial Sequence
  Cyclic GFR-binding peptide
  MOD_RES (1), (1): Xaa is C or S
XARVVMNQYNKLIVNSSDDLYLVSIASLQ

SEQ ID NO: 41856 - protein, 33 aa, Artificial Sequence
  Cyclic GFR-binding peptide
  MOD_RES (29), (29): Xaa is C or S
VMNYHYKLIVNSSDDKYLVSIPSLKTPAXTPKT

SEQ ID NO: 41857 - protein, 25 aa, Artificial Sequence
  Cyclic GFR-binding peptide
ELTYHYKLFIPKKRVIEKYLVSIPS

SEQ ID NO: 41858 - protein, 33 aa, Artificial Sequence; identical to SEQ ID NO: 4247
  Cyclic GFR-binding peptide
  MOD_RES (31), (31): Xaa is C or S

SEQ ID NO: 41859 - protein, 33 aa, Artificial Sequence; identical to SEQ ID NO: 4248
  Cyclic GFR-binding peptide
  MOD_RES (1), (32), (33): Xaa is C or S

SEQ ID NO: 41860 - protein, 28 aa, Artificial Sequence
  Cyclic GFR-binding peptide
VMNYHYKLIVNSSDDKYLVSIPSLQTPA

SEQ ID NO: 41861 - protein, 23 aa, Artificial Sequence
  Cyclic GFR-binding peptide
VMNRHKRLIVNSSDDYYLVSTAS

SEQ ID NO: 41862 - protein, 35 aa, Artificial Sequence
  Cyclic GFR-binding peptide
  MOD_RES (2), (4): Xaa is C or S
RXGXEAVSMGEQYNKLTPVGMDDLYLVSIASLKTP

SEQ ID NO: 41863 - protein, 36 aa, Artificial Sequence; identical to SEQ ID NO: 4252
  Cyclic GFR-binding peptide
  MOD_RES (1), (33), (34): Xaa is C or S

SEQ ID NO: 41864 - protein, 33 aa, Artificial Sequence
  Cyclic GFR-binding peptide
  MOD_RES (29), (29): Xaa is C or S
VMNRHKRLIVNSSDDYYLVSTASLKTPAXTPKT

SEQ ID NO: 41865 - protein, 24 aa, Artificial Sequence
  Cyclic GFR-binding peptide
VVMNRHKRLIVNSSDDYYLVSTAS

SEQ ID NO: 41866 - protein, 27 aa, Artificial Sequence
  Cyclic GFR-binding peptide
SMGERYKKLTPVGMDDFYLVSIANLKT

SEQ ID NO: 41867 - protein, 40 aa, Artificial Sequence; identical to SEQ ID NO: 4254
  Cyclic GFR-binding peptide
  MOD_RES (1), (3), (35), (36): Xaa is C or S

SEQ ID NO: 41868 - protein, 36 aa, Artificial Sequence
  Cyclic GFR-binding peptide
  MOD_RES (33), (33): Xaa is C or S
ELTRHKRLFIPKKRVIEYYLVSTASLQVQTPRXQVN

SEQ ID NO: 41869 - protein, 27 aa, Artificial Sequence
  Cyclic GFR-binding peptide
RYKKLFIPKKRVIEFYLVSIANLQVQT

SEQ ID NO: 41870 - protein, 31 aa, Artificial Sequence
  Cyclic GFR-binding peptide
  MOD_RES (28), (29): Xaa is C or S
IMYHYKLVKPKRGVKYLISIPSLAQPVXXPA

SEQ ID NO: 41871 - protein, 31 aa, Artificial Sequence
  Cyclic GFR-binding peptide
  MOD_RES (2), (4): Xaa is C or S
HXGXARVVMNRHKRLIVNSSDDYYLVSTASL

SEQ ID NO: 41872 - protein, 34 aa, Artificial Sequence; identical to SEQ ID NO: 4255
  Cyclic GFR-binding peptide
  MOD_RES (1), (3), (34): Xaa is C or S

SEQ ID NO: 41873 - protein, 34 aa, Artificial Sequence; identical to SEQ ID NO: 4256
  Cyclic GFR-binding peptide
  MOD_RES (1), (3), (34): Xaa is C or S

SEQ ID NO: 41874 - protein, 21 aa, Artificial Sequence
  Cyclic GFR-binding peptide
YHYKLVKPKRGVKYLISIPSL

SEQ ID NO: 41875 - protein, 28 aa, Artificial Sequence
  Cyclic GFR-binding peptide
  MOD_RES (26), (26): Xaa is C or S
RHKRLIVNSSDDYYLVSTASLKTPAXTP

SEQ ID NO: 41876 - protein, 30 aa, Artificial Sequence
  Cyclic GFR-binding peptide
  MOD_RES (27), (28): Xaa is C or S
MQYNKLIKPTKGILYLISIASLDQSVXXPS

SEQ ID NO: 41877 - protein, 22 aa, Artificial Sequence
  Cyclic GFR-binding peptide
MDYHYKLVVKENEDKYLMSIPS

SEQ ID NO: 41878 - protein, 36 aa, Artificial Sequence; identical to SEQ ID NO: 4261
  Cyclic GFR-binding peptide
  MOD_RES (2), (4), (35), (36): Xaa is C or S

SEQ ID NO: 41879 - protein, 23 aa, Artificial Sequence
  Cyclic GFR-binding peptide
VMNYHYKLIVNSSDDKYLVSIPS

SEQ ID NO: 41880 - protein, 34 aa, Artificial Sequence; identical to SEQ ID NO: 4263
  Cyclic GFR-binding peptide
  MOD_RES (31), (32): Xaa is C or S

SEQ ID NO: 41881 - protein, 24 aa, Artificial Sequence
  Cyclic GFR-binding peptide
RHKRLIVNSSDDYYLVSTASLKTP

SEQ ID NO: 41882 - protein, 28 aa, Artificial Sequence
  Cyclic GFR-binding peptide
VMNRHKRLIVNSSDDYYLVSTASLQTPA

SEQ ID NO: 41883 - protein, 38 aa, Artificial Sequence; identical to SEQ ID NO: 4264
  Cyclic GFR-binding peptide
  MOD_RES (36), (36): Xaa is C or S

SEQ ID NO: 41884 - protein, 38 aa, Artificial Sequence; identical to SEQ ID NO: 4265
  Cyclic GFR-binding peptide
  MOD_RES (1), (3): Xaa is C or S

SEQ ID NO: 41885 - protein, 30 aa, Artificial Sequence
  Cyclic GFR-binding peptide
  MOD_RES (1), (1): Xaa is C or S
XAKVVMNYHYKLIVNNSSDKYLVSIPSLKT

SEQ ID NO: 41886 - protein, 40 aa, Artificial Sequence; identical to SEQ ID NO: 4266
  Cyclic GFR-binding peptide
  MOD_RES (1), (3), (35): Xaa is C or S

SEQ ID NO: 41887 - protein, 36 aa, Artificial Sequence; identical to SEQ ID NO: 4267
  Cyclic GFR-binding peptide
  MOD_RES (1), (3), (35), (36): Xaa is C or S

SEQ ID NO: 41888 - protein, 26 aa, Artificial Sequence
  Cyclic GFR-binding peptide
ERYKKLVVKDYEDFYLMSIANLETPV

SEQ ID NO: 41889 - protein, 34 aa, Artificial Sequence
  Cyclic GFR-binding peptide
  MOD_RES (2), (4): Xaa is C or S
EXKXALHDELTRYKKLFIPKKRVIEFYLVSIANL

SEQ ID NO: 41890 - protein, 37 aa, Artificial Sequence; identical to SEQ ID NO: 4269
  Cyclic GFR-binding peptide
  MOD_RES (2), (34), (35): Xaa is C or S

SEQ ID NO: 41891 - protein, 31 aa, Artificial Sequence
  Cyclic GFR-binding peptide
  MOD_RES (27), (28): Xaa is C or S
NYHYKLIVNNSSDKYLVSIPSLKTPAXXAKP

SEQ ID NO: 41892 - protein, 33 aa, Artificial Sequence; identical to SEQ ID NO: 4271
  Cyclic GFR-binding peptide
  MOD_RES (1), (33): Xaa is C or S

SEQ ID NO: 41893 - protein, 35 aa, Artificial Sequence
  Cyclic GFR-binding peptide
  MOD_RES (29), (30): Xaa is C or S
VIMQYNKLVKPKRGVLYLISIASLAQPVXXPAASA

SEQ ID NO: 41894 - protein, 20 aa, Artificial Sequence
  Cyclic GFR-binding peptide
RYKKLVKPKRGVFYLISIAN

SEQ ID NO: 41895 - protein, 35 aa, Artificial Sequence
  Cyclic GFR-binding peptide
  MOD_RES (34), (34): Xaa is C or S
DELTQYNKLFIPKKRVIELYLVSIASLQVQTPRXQ

SEQ ID NO: 41896 - protein, 38 aa, Artificial Sequence; identical to SEQ ID NO: 4272
  Cyclic GFR-binding peptide
  MOD_RES (1), (3), (36), (37): Xaa is C or S

SEQ ID NO: 41897 - protein, 33 aa, Artificial Sequence
  Cyclic GFR-binding peptide
  MOD_RES (1), (3): Xaa is C or S
XGXGEVVMEYHYKLVVKDYEDKYLMSIPSLETP

SEQ ID NO: 41898 - protein, 34 aa, Artificial Sequence
  Cyclic GFR-binding peptide
  MOD_RES (29), (29): Xaa is C or S
VMNYHYKLIVNSSDDKYLVSIPSLKTPAXTPKTV

SEQ ID NO: 41899 - protein, 31 aa, Artificial Sequence; identical to SEQ ID NO: 4273
  Cyclic GFR-binding peptide
  MOD_RES (1), (1): Xaa is C or S

SEQ ID NO: 41900 - protein, 31 aa, Artificial Sequence
  Cyclic GFR-binding peptide
  MOD_RES (27), (27): Xaa is C or S
NQYNKLIVNSSDDLYLVSIASLKTPAXTPKT

SEQ ID NO: 41901 - protein, 37 aa, Artificial Sequence; identical to SEQ ID NO: 4276
  Cyclic GFR-binding peptide
  MOD_RES (1), (3), (35): Xaa is C or S

SEQ ID NO: 41902 - protein, 36 aa, Artificial Sequence; identical to SEQ ID NO: 4277
  Cyclic GFR-binding peptide
  MOD_RES (1), (32), (33): Xaa is C or S

SEQ ID NO: 41903 - protein, 34 aa, Artificial Sequence; identical to SEQ ID NO: 4278
  Cyclic GFR-binding peptide
  MOD_RES (31), (32): Xaa is C or S

SEQ ID NO: 41904 - protein, 33 aa, Artificial Sequence; identical to SEQ ID NO: 4279
  Cyclic GFR-binding peptide
  MOD_RES (1), (3): Xaa is C or S

SEQ ID NO: 41905 - protein, 29 aa, Artificial Sequence
  Cyclic GFR-binding peptide
  MOD_RES (1), (1): Xaa is C or S
XGEVVMERYKKLVVKDYEDFYLMSIANLE

SEQ ID NO: 41906 - protein, 27 aa, Artificial Sequence
  Cyclic GFR-binding peptide
TYHYKLFIPKKRVIEKYLVSIPSLQVQ

SEQ ID NO: 41907 - protein, 32 aa, Artificial Sequence
  Cyclic GFR-binding peptide
  MOD_RES (1), (1): Xaa is C or S
XEAVSMGERHKRLTPVGMDDYYLVSTASLKTP

SEQ ID NO: 41908 - protein, 37 aa, Artificial Sequence; identical to SEQ ID NO: 4281
  Cyclic GFR-binding peptide
  MOD_RES (2), (34), (35): Xaa is C or S

SEQ ID NO: 41909 - protein, 31 aa, Artificial Sequence
  Cyclic GFR-binding peptide
  MOD_RES (1), (3): Xaa is C or S
XGXGEVVMDRHKRLVVKENEDYYLMSTASLE

SEQ ID NO: 41910 - protein, 31 aa, Artificial Sequence
  Cyclic GFR-binding peptide
  MOD_RES (1), (3): Xaa is C or S
XKXSKVIMRYKKLIKPTKGIFYLISIANLDQ

SEQ ID NO: 41911 - protein, 34 aa, Artificial Sequence
  Cyclic GFR-binding peptide
  MOD_RES (2), (2): Xaa is C or S
KXALHDELTYHYKLFIPKKRVIEKYLVSIPSLQV

SEQ ID NO: 41912 - protein, 31 aa, Artificial Sequence
  Cyclic GFR-binding peptide
  MOD_RES (2), (2): Xaa is C or S
GXARVVMNRHKRLIVNSSDDYYLVSTASLQT

SEQ ID NO: 41913 - protein, 32 aa, Artificial Sequence
  Cyclic GFR-binding peptide
  MOD_RES (26), (27): Xaa is C or S
YHYKLIVNNSSDKYLVSIPSLKTPAXXAKPVA

SEQ ID NO: 41914 - protein, 38 aa, Artificial Sequence; identical to SEQ ID NO: 4285
  Cyclic GFR-binding peptide
  MOD_RES (2), (4), (36), (37): Xaa is C or S

SEQ ID NO: 41915 - protein, 28 aa, Artificial Sequence
  Cyclic GFR-binding peptide
VVMNQYNKLIVNSSDDLYLVSIASLKTP

SEQ ID NO: 41916 - protein, 27 aa, Artificial Sequence
  Cyclic GFR-binding peptide
VVMDRHKRLVVKENEDYYLMSTASLET

SEQ ID NO: 41917 - protein, 29 aa, Artificial Sequence
  Cyclic GFR-binding peptide
TYHYKLFIPKKRVIEKYLVSIPSLQVQTP

SEQ ID NO: 41918 - protein, 23 aa, Artificial Sequence
  Cyclic GFR-binding peptide
IMRYKKLIKPTKGIFYLISIANL

SEQ ID NO: 41919 - protein, 35 aa, Artificial Sequence; identical to SEQ ID NO: 4286
  Cyclic GFR-binding peptide
  MOD_RES (32), (33): Xaa is C or S

SEQ ID NO: 41920 - protein, 29 aa, Artificial Sequence
  Cyclic GFR-binding peptide
  MOD_RES (26), (27): Xaa is C or S
QYNKLIVNSSDDLYLVSIASLKTPAXXPK

SEQ ID NO: 41921 - protein, 27 aa, Artificial Sequence
  Cyclic GFR-binding peptide
MERHKRLVVKDYEDYYLMSTASLETPV

SEQ ID NO: 41922 - protein, 29 aa, Artificial Sequence
  Cyclic GFR-binding peptide
  MOD_RES (1), (1): Xaa is C or S
XSRVVMNRHKRLIVNSSDDYYLVSTASLK

SEQ ID NO: 41923 - protein, 34 aa, Artificial Sequence; identical to SEQ ID NO: 4288
  Cyclic GFR-binding peptide
  MOD_RES (2), (2): Xaa is C or S

SEQ ID NO: 41924 - protein, 28 aa, Artificial Sequence
  Cyclic GFR-binding peptide
  MOD_RES (27), (28): Xaa is C or S
MRHKRLVKPKRGVYYLISTASLAQPVXX

SEQ ID NO: 41925 - protein, 41 aa, Artificial Sequence; identical to SEQ ID NO: 4289
  Cyclic GFR-binding peptide
  MOD_RES (2), (4), (36), (37): Xaa is C or S

SEQ ID NO: 41926 - protein, 21 aa, Artificial Sequence
  Cyclic GFR-binding peptide
MRHKRLIKPTKGIYYLISTAS

SEQ ID NO: 41927 - protein, 33 aa, Artificial Sequence; identical to SEQ ID NO: 4290
  Cyclic GFR-binding peptide
  MOD_RES (2), (2): Xaa is C or S

SEQ ID NO: 41928 - protein, 24 aa, Artificial Sequence
  Cyclic GFR-binding peptide
NYHYKLIVNNSSDKYLVSIPSLKT

SEQ ID NO: 41929 - protein, 38 aa, Artificial Sequence; identical to SEQ ID NO: 4291
  Cyclic GFR-binding peptide
  MOD_RES (1), (3), (34), (35): Xaa is C or S

SEQ ID NO: 41930 - protein, 22 aa, Artificial Sequence
  Cyclic GFR-binding peptide
GERHKRLTPVGMDDYYLVSTAS

SEQ ID NO: 41931 - protein, 28 aa, Artificial Sequence
  Cyclic GFR-binding peptide
QYNKLFIPKKRVIELYLVSIASLQVQTP

SEQ ID NO: 41932 - protein, 29 aa, Artificial Sequence
  Cyclic GFR-binding peptide
ELTYHYKLFIPKKRVIEKYLVSIPSLQVQ

SEQ ID NO: 41933 - protein, 32 aa, Artificial Sequence
  Cyclic GFR-binding peptide
  MOD_RES (26), (27): Xaa is C or S
RYKKLTPVGMDDFYLVSIANLKTPVXXAKGVK

SEQ ID NO: 41934 - protein, 40 aa, Artificial Sequence; identical to SEQ ID NO: 4294
  Cyclic GFR-binding peptide
  MOD_RES (1), (3), (35), (36): Xaa is C or S

SEQ ID NO: 41935 - protein, 37 aa, Artificial Sequence
  Cyclic GFR-binding peptide
  MOD_RES (34), (34): Xaa is C or S
DELTRHKRLFIPKKRVIEYYLVSTASLQVQTPRXQVN

SEQ ID NO: 41936 - protein, 31 aa, Artificial Sequence
  Cyclic GFR-binding peptide
  MOD_RES (27), (28): Xaa is C or S
ERHKRLVVKDYEDYYLMSTASLETPVXXAKP

SEQ ID NO: 41937 - protein, 43 aa, Artificial Sequence; identical to SEQ ID NO: 4297
  Cyclic GFR-binding peptide
  MOD_RES (1), (3), (40): Xaa is C or S

SEQ ID NO: 41938 - protein, 36 aa, Artificial Sequence; identical to SEQ ID NO: 4296
  Cyclic GFR-binding peptide
  MOD_RES (1), (33), (34): Xaa is C or S

SEQ ID NO: 41939 - protein, 32 aa, Artificial Sequence
  Cyclic GFR-binding peptide
  MOD_RES (30), (31): Xaa is C or S
KVVMYHYKLVKPTRGVKYLISIPSLDQPVXXP

SEQ ID NO: 41940 - protein, 32 aa, Artificial Sequence
  Cyclic GFR-binding peptide
  MOD_RES (28), (29): Xaa is C or S
MDRYKKLVVKENEDFYLMSIANLETPVXXAKP

SEQ ID NO: 41941 - protein, 30 aa, Artificial Sequence
  Cyclic GFR-binding peptide
  MOD_RES (1), (1): Xaa is C or S
XALHDELTRYKKLFIPKKRVIEFYLVSIAN

SEQ ID NO: 41942 - protein, 32 aa, Artificial Sequence
  Cyclic GFR-binding peptide
  MOD_RES (1), (3): Xaa is C or S
XGXGEVVMDRYKKLVVKENEDFYLMSIANLET

SEQ ID NO: 41943 - protein, 34 aa, Artificial Sequence
  Cyclic GFR-binding peptide
  MOD_RES (29), (30): Xaa is C or S
VMNYHYKLIVNSSDDKYLVSIPSLKTPAXXPKPV

SEQ ID NO: 41944 - protein, 33 aa, Artificial Sequence
  Cyclic GFR-binding peptide
  MOD_RES (30), (31): Xaa is C or S
KVVMQYNKLVKPTRGVLYLISIASLDQPVXXPS

SEQ ID NO: 41945 - protein, 33 aa, Artificial Sequence
  Cyclic GFR-binding peptide
  MOD_RES (28), (29): Xaa is C or S
MNQYNKLIVNSSDDLYLVSIASLQTPAXXPKPV

SEQ ID NO: 41946 - protein, 38 aa, Artificial Sequence; identical to SEQ ID NO: 4299
  Cyclic GFR-binding peptide
  MOD_RES (1), (3), (34), (35): Xaa is C or S

SEQ ID NO: 41947 - protein, 37 aa, Artificial Sequence; identical to SEQ ID NO: 4301
  Cyclic GFR-binding peptide
  MOD_RES (32), (32): Xaa is C or S

SEQ ID NO: 41948 - protein, 26 aa, Artificial Sequence
  Cyclic GFR-binding peptide
LTRHKRLFIPKKRVIEYYLVSTASLQ

SEQ ID NO: 41949 - protein, 37 aa, Artificial Sequence; identical to SEQ ID NO: 4300
  Cyclic GFR-binding peptide
  MOD_RES (2), (33), (34): Xaa is C or S

SEQ ID NO: 41950 - protein, 23 aa, Artificial Sequence
  Cyclic GFR-binding peptide
YHYKLIVNSSDDKYLVSIPSLKT

SEQ ID NO: 41951 - protein, 37 aa, Artificial Sequence; identical to SEQ ID NO: 4303
  Cyclic GFR-binding peptide
  MOD_RES (1), (3), (35): Xaa is C or S

SEQ ID NO: 41952 - protein, 39 aa, Artificial Sequence; identical to SEQ ID NO: 4302
  Cyclic GFR-binding peptide
  MOD_RES (1), (3), (34), (35): Xaa is C or S

SEQ ID NO: 41953 - protein, 31 aa, Artificial Sequence; identical to SEQ ID NO: 4304
  Cyclic GFR-binding peptide
  MOD_RES (1), (1): Xaa is C or S

SEQ ID NO: 41954 - protein, 27 aa, Artificial Sequence
  Cyclic GFR-binding peptide
VIMQYNKLIKPTKGILYLISIASLDQS

SEQ ID NO: 41955 - protein, 30 aa, Artificial Sequence
  Cyclic GFR-binding peptide
  MOD_RES (27), (28): Xaa is C or S
NRYKKLIVNNSSDFYLVSIANLKTPAXXAK

SEQ ID NO: 41956 - protein, 28 aa, Artificial Sequence
  Cyclic GFR-binding peptide
  MOD_RES (26), (27): Xaa is C or S
QYNKLVKPTRGVLYLISIASLDQPVXXP

SEQ ID NO: 41957 - protein, 34 aa, Artificial Sequence
  Cyclic GFR-binding peptide
  MOD_RES (29), (30): Xaa is C or S
VMNRHKRLIVNSSDDYYLVSTASLKTPAXXPKPV

SEQ ID NO: 41958 - protein, 33 aa, Artificial Sequence
  Cyclic GFR-binding peptide
ALHDELTQYNKLFIPKKRVIELYLVSIASLQVQ

SEQ ID NO: 41959 - protein, 22 aa, Artificial Sequence
  Cyclic GFR-binding peptide
MDRHKRLVVKENEDYYLMSTAS

SEQ ID NO: 41960 - protein, 32 aa, Artificial Sequence; identical to SEQ ID NO: 4306
  Cyclic GFR-binding peptide
  MOD_RES (32), (32): Xaa is C or S

SEQ ID NO: 41961 - protein, 29 aa, Artificial Sequence
  Cyclic GFR-binding peptide
  MOD_RES (26), (27): Xaa is C or S
RYKKLTPVGMDDFYLVSIANLKTPVXXAK

SEQ ID NO: 41962 - protein, 27 aa, Artificial Sequence
  Cyclic GFR-binding peptide
  MOD_RES (1), (1): Xaa is C or S
XSKVVMQYNKLVKPTRGVLYLISIASL

SEQ ID NO: 41963 - protein, 32 aa, Artificial Sequence
  Cyclic GFR-binding peptide
  MOD_RES (29), (30): Xaa is C or S
VIMRHKRLVKPKRGVYYLISTASLAQPVXXPA

SEQ ID NO: 41964 - protein, 31 aa, Artificial Sequence; identical to SEQ ID NO: 4311
  Cyclic GFR-binding peptide

SEQ ID NO: 41965 - protein, 31 aa, Artificial Sequence
  Cyclic GFR-binding peptide
  MOD_RES (27), (28): Xaa is C or S
MYHYKLIKPTKGIKYLISIPSLDQSVXXPSA

SEQ ID NO: 41966 - protein, 31 aa, Artificial Sequence
  Cyclic GFR-binding peptide
  MOD_RES (1), (3): Xaa is C or S
XKXSKVVMRHKRLVKPTRGVYYLISTASLDQ

SEQ ID NO: 41967 - protein, 31 aa, Artificial Sequence
  Cyclic GFR-binding peptide
  MOD_RES (30), (31): Xaa is C or S
SMGEQYNKLTPVGMDDLYLVSIASLKTPVXX

SEQ ID NO: 41968 - protein, 40 aa, Artificial Sequence; identical to SEQ ID NO: 4314
  Cyclic GFR-binding peptide
  MOD_RES (1), (3), (35), (36): Xaa is C or S

SEQ ID NO: 41969 - protein, 24 aa, Artificial Sequence
  Cyclic GFR-binding peptide
VMERHKRLVVKDYEDYYLMSTASL

SEQ ID NO: 41970 - protein, 28 aa, Artificial Sequence
  Cyclic GFR-binding peptide
EVVMDRHKRLVVKENEDYYLMSTASLET

SEQ ID NO: 41971 - protein, 28 aa, Artificial Sequence
  Cyclic GFR-binding peptide
VSMGERYKKLTPVGMDDFYLVSIANLKT

SEQ ID NO: 41972 - protein, 28 aa, Artificial Sequence
  Cyclic GFR-binding peptide
SRVVMNQYNKLIVNSSDDLYLVSIASLK

SEQ ID NO: 41973 - protein, 28 aa, Artificial Sequence
  Cyclic GFR-binding peptide
  MOD_RES (27), (28): Xaa is C or S
NQYNKLIVNNSSDLYLVSIASLKTPAXX

SEQ ID NO: 41974 - protein, 31 aa, Artificial Sequence
  Cyclic GFR-binding peptide
  MOD_RES (29), (29): Xaa is C or S
VMNQYNKLIVNSSDDLYLVSIASLKTPAXTP

SEQ ID NO: 41975 - protein, 39 aa, Artificial Sequence; identical to SEQ ID NO: 4316
  Cyclic GFR-binding peptide
  MOD_RES (1), (3), (34), (35): Xaa is C or S

SEQ ID NO: 41976 - protein, 37 aa, Artificial Sequence; identical to SEQ ID NO: 4317
  Cyclic GFR-binding peptide
  MOD_RES (32), (33): Xaa is C or S

SEQ ID NO: 41977 - protein, 30 aa, Artificial Sequence
  Cyclic GFR-binding peptide
  MOD_RES (1), (3): Xaa is C or S
XGXGEVVMDYHYKLVVKENEDKYLMSIPSL

SEQ ID NO: 41978 - protein, 32 aa, Artificial Sequence
  Cyclic GFR-binding peptide
  MOD_RES (1), (3): Xaa is C or S
XKXSKVIMRYKKLIKPTKGIFYLISIANLDQS

SEQ ID NO: 41979 - protein, 29 aa, Artificial Sequence
  Cyclic GFR-binding peptide
  MOD_RES (1), (1): Xaa is C or S
XGEVVMDRYKKLVVKENEDFYLMSIANLE

SEQ ID NO: 41980 - protein, 30 aa, Artificial Sequence
  Cyclic GFR-binding peptide
  MOD_RES (1), (3): Xaa is C or S
XGXGEVVMDRHKRLVVKENEDYYLMSTASL

SEQ ID NO: 41981 - protein, 25 aa, Artificial Sequence
  Cyclic GFR-binding peptide
MGERHKRLTPVGMDDYYLVSTASLK

SEQ ID NO: 41982 - protein, 34 aa, Artificial Sequence
  Cyclic GFR-binding peptide
  MOD_RES (29), (30): Xaa is C or S
MGERHKRLTPVGMDDYYLVSTASLKTPVXXAKGV

SEQ ID NO: 41983 - protein, 25 aa, Artificial Sequence
  Cyclic GFR-binding peptide
NYHYKLIVNNSSDKYLVSIPSLKTP

SEQ ID NO: 41984 - protein, 29 aa, Artificial Sequence
  Cyclic GFR-binding peptide
  MOD_RES (27), (28): Xaa is C or S
NRHKRLIVNSSDDYYLVSTASLQTPAXXP

SEQ ID NO: 41985 - protein, 29 aa, Artificial Sequence
  Cyclic GFR-binding peptide
  MOD_RES (26), (27): Xaa is C or S
RYKKLIKPTKGIFYLISIANLDQSVXXPS

SEQ ID NO: 41986 - protein, 40 aa, Artificial Sequence; identical to SEQ ID NO: 4323
  Cyclic GFR-binding peptide
  MOD_RES (2), (34), (35): Xaa is C or S

SEQ ID NO: 41987 - protein, 40 aa, Artificial Sequence; identical to SEQ ID NO: 4324
  Cyclic GFR-binding peptide
  MOD_RES (1), (3), (40): Xaa is C or S

SEQ ID NO: 41988 - protein, 37 aa, Artificial Sequence; identical to SEQ ID NO: 4325
  Cyclic GFR-binding peptide
  MOD_RES (1), (3), (34), (35): Xaa is C or S

SEQ ID NO: 41989 - protein, 27 aa, Artificial Sequence
  Cyclic GFR-binding peptide
ELTQYNKLFIPKKRVIELYLVSIASLQ

SEQ ID NO: 41990 - protein, 36 aa, Artificial Sequence; identical to SEQ ID NO: 4326
  Cyclic GFR-binding peptide
  MOD_RES (2), (33), (34): Xaa is C or S

SEQ ID NO: 41991 - protein, 42 aa, Artificial Sequence; identical to SEQ ID NO: 4327
  Cyclic GFR-binding peptide
  MOD_RES (1), (38): Xaa is C or S

SEQ ID NO: 41992 - protein, 36 aa, Artificial Sequence; identical to SEQ ID NO: 4328
  Cyclic GFR-binding peptide
  MOD_RES (2), (2): Xaa is C or S

SEQ ID NO: 41993 - protein, 30 aa, Artificial Sequence
  Cyclic GFR-binding peptide
  MOD_RES (2), (4): Xaa is C or S
RXGXGEVVMDRHKRLVVKENEDYYLMSTAS

SEQ ID NO: 41994 - protein, 32 aa, Artificial Sequence; identical to SEQ ID NO: 4329
  Cyclic GFR-binding peptide
  MOD_RES (1), (32): Xaa is C or S

SEQ ID NO: 41995 - protein, 27 aa, Artificial Sequence
  Cyclic GFR-binding peptide
  MOD_RES (27), (27): Xaa is C or S
ERHKRLTPVGMDDYYLVSTASLKTPVX

SEQ ID NO: 41996 - protein, 34 aa, Artificial Sequence
  Cyclic GFR-binding peptide
  MOD_RES (30), (31): Xaa is C or S
VVMNRHKRLIVNSSDDYYLVSTASLKTPAXXPKP

SEQ ID NO: 41997 - protein, 27 aa, Artificial Sequence
  Cyclic GFR-binding peptide
MEYHYKLVVKDYEDKYLMSIPSLETPV

SEQ ID NO: 41998 - protein, 31 aa, Artificial Sequence
  Cyclic GFR-binding peptide
  MOD_RES (31), (31): Xaa is C or S
TRHKRLFIPKKRVIEYYLVSTASLQVQTPRX

SEQ ID NO: 41999 - protein, 32 aa, Artificial Sequence
  Cyclic GFR-binding peptide
  MOD_RES (2), (4): Xaa is C or S
RXGXGEVVMEYHYKLVVKDYEDKYLMSIPSLE

SEQ ID NO: 42000 - protein, 31 aa, Artificial Sequence
  Cyclic GFR-binding peptide
  MOD_RES (2), (4): Xaa is C or S
HXGXAKVVMNQYNKLIVNNSSDLYLVSIASL

SEQ ID NO: 42001 - protein, 24 aa, Artificial Sequence
  Cyclic GFR-binding peptide
VMEYHYKLVVKDYEDKYLMSIPSL

SEQ ID NO: 42002 - protein, 31 aa, Artificial Sequence
  Cyclic GFR-binding peptide
  MOD_RES (28), (29): Xaa is C or S
IMRHKRLVKPKRGVYYLISTASLAQPVXXPA

SEQ ID NO: 42003 - protein, 28 aa, Artificial Sequence
  Cyclic GFR-binding peptide
  MOD_RES (1), (1): Xaa is C or S
XGEVVMDYHYKLVVKENEDKYLMSIPSL

SEQ ID NO: 42004 - protein, 31 aa, Artificial Sequence
  Cyclic GFR-binding peptide
  MOD_RES (2), (4): Xaa is C or S
RXGXGEVVMEYHYKLVVKDYEDKYLMSIPSL

SEQ ID NO: 42005 - protein, 31 aa, Artificial Sequence
  Cyclic GFR-binding peptide
  MOD_RES (1), (1): Xaa is C or S
XGEVVMERHKRLVVKDYEDYYLMSTASLETP

SEQ ID NO: 42006 - protein, 24 aa, Artificial Sequence
  Cyclic GFR-binding peptide
MRHKRLVKPKRGVYYLISTASLAQ

SEQ ID NO: 42007 - protein, 33 aa, Artificial Sequence
  Cyclic GFR-binding peptide
  MOD_RES (2), (4): Xaa is C or S
HXGXARVVMNRHKRLIVNSSDDYYLVSTASLQT

SEQ ID NO: 42008 - protein, 30 aa, Artificial Sequence
  Cyclic GFR-binding peptide
  MOD_RES (1), (1): Xaa is C or S
XARVVMNQYNKLIVNSSDDLYLVSIASLQT

SEQ ID NO: 42009 - protein, 31 aa, Artificial Sequence
  Cyclic GFR-binding peptide
  MOD_RES (26), (26): Xaa is C or S
YHYKLIVNSSDDKYLVSIPSLKTPAXTPKTV

SEQ ID NO: 42010 - protein, 39 aa, Artificial Sequence; identical to SEQ ID NO: 4337
  Cyclic GFR-binding peptide
  MOD_RES (1), (33), (34): Xaa is C or S

SEQ ID NO: 42011 - protein, 34 aa, Artificial Sequence; identical to SEQ ID NO: 4338
  Cyclic GFR-binding peptide
  MOD_RES (2), (33), (34): Xaa is C or S

SEQ ID NO: 42012 - protein, 29 aa, Artificial Sequence
  Cyclic GFR-binding peptide
  MOD_RES (27), (27): Xaa is C or S
NRHKRLIVNSSDDYYLVSTASLKTPAXTP

SEQ ID NO: 42013 - protein, 38 aa, Artificial Sequence; identical to SEQ ID NO: 4340
  Cyclic GFR-binding peptide
  MOD_RES (1), (33), (34): Xaa is C or S

SEQ ID NO: 42014 - protein, 28 aa, Artificial Sequence
  Cyclic GFR-binding peptide
  MOD_RES (27), (28): Xaa is C or S
NRHKRLIVNSSDDYYLVSTASLKTPAXX

SEQ ID NO: 42015 - protein, 25 aa, Artificial Sequence
  Cyclic GFR-binding peptide
IMYHYKLVKPKRGVKYLISIPSLAQ

SEQ ID NO: 42016 - protein, 32 aa, Artificial Sequence
  Cyclic GFR-binding peptide
  MOD_RES (30), (31): Xaa is C or S
VVMNQYNKLIVNSSDDLYLVSIASLKTPAXXP

SEQ ID NO: 42017 - protein, 32 aa, Artificial Sequence
  Cyclic GFR-binding peptide
  MOD_RES (28), (28): Xaa is C or S
MNRHKRLIVNSSDDYYLVSTASLKTPAXTPKT

SEQ ID NO: 42018 - protein, 39 aa, Artificial Sequence; identical to SEQ ID NO: 4344
  Cyclic GFR-binding peptide
  MOD_RES (2), (4), (36), (37): Xaa is C or S

SEQ ID NO: 42019 - protein, 35 aa, Artificial Sequence; identical to SEQ ID NO: 4345
  Cyclic GFR-binding peptide
  MOD_RES (1), (3), (34), (35): Xaa is C or S

SEQ ID NO: 42020 - protein, 38 aa, Artificial Sequence; identical to SEQ ID NO: 4346
  Cyclic GFR-binding peptide
  MOD_RES (2), (4), (35), (36): Xaa is C or S

SEQ ID NO: 42021 - protein, 34 aa, Artificial Sequence; identical to SEQ ID NO: 4347
  Cyclic GFR-binding peptide
  MOD_RES (1), (33), (34): Xaa is C or S

SEQ ID NO: 42022 - protein, 36 aa, Artificial Sequence; identical to SEQ ID NO: 4353
  Cyclic GFR-binding peptide
  MOD_RES (1), (3), (35), (36): Xaa is C or S

SEQ ID NO: 42023 - protein, 36 aa, Artificial Sequence
  Cyclic GFR-binding peptide
  MOD_RES (30), (31): Xaa is C or S
VVMDRHKRLVVKENEDYYLMSTASLETPVXXAKPIK

SEQ ID NO: 42024 - protein, 24 aa, Artificial Sequence
  Cyclic GFR-binding peptide
RHKRLIVNSSDDYYLVSTASLQTP

SEQ ID NO: 42025 - protein, 33 aa, Artificial Sequence
  Cyclic GFR-binding peptide
  MOD_RES (30), (31): Xaa is C or S
VVMNRHKRLIVNSSDDYYLVSTASLQTPAXXPK

SEQ ID NO: 42026 - protein, 37 aa, Artificial Sequence; identical to SEQ ID NO: 4356
  Cyclic GFR-binding peptide
  MOD_RES (1), (32), (33): Xaa is C or S

SEQ ID NO: 42027 - protein, 29 aa, Artificial Sequence
  Cyclic GFR-binding peptide
  MOD_RES (2), (4): Xaa is C or S
SXKXSKVVMQYNKLVKPTRGVLYLISIAS

SEQ ID NO: 42028 - protein, 37 aa, Artificial Sequence; identical to SEQ ID NO: 4359
  Cyclic GFR-binding peptide
  MOD_RES (35), (35): Xaa is C or S

SEQ ID NO: 42029 - protein, 25 aa, Artificial Sequence
  Cyclic GFR-binding peptide
MRYKKLVKPKRGVFYLISIANLAQP

SEQ ID NO: 42030 - protein, 25 aa, Artificial Sequence
  Cyclic GFR-binding peptide
QYNKLIVNNSSDLYLVSIASLKTPA

SEQ ID NO: 42031 - protein, 22 aa, Artificial Sequence
  Cyclic GFR-binding peptide
MNYHYKLIVNSSDDKYLVSIPS

SEQ ID NO: 42032 - protein, 37 aa, Artificial Sequence; identical to SEQ ID NO: 4362
  Cyclic GFR-binding peptide
  MOD_RES (35), (35): Xaa is C or S

SEQ ID NO: 42033 - protein, 39 aa, Artificial Sequence; identical to SEQ ID NO: 4363
  Cyclic GFR-binding peptide
  MOD_RES (1), (3), (35), (36): Xaa is C or S

SEQ ID NO: 42034 - protein, 24 aa, Artificial Sequence
  Cyclic GFR-binding peptide
VMERYKKLVVKDYEDFYLMSIANL

SEQ ID NO: 42035 - protein, 37 aa, Artificial Sequence; identical to SEQ ID NO: 4364
  Cyclic GFR-binding peptide
  MOD_RES (32), (33): Xaa is C or S

SEQ ID NO: 42036 - protein, 35 aa, Artificial Sequence
  Cyclic GFR-binding peptide
  MOD_RES (30), (30): Xaa is C or S
VVMNYHYKLIVNSSDDKYLVSIPSLKTPAXTPKTV

SEQ ID NO: 42037 - protein, 23 aa, Artificial Sequence
  Cyclic GFR-binding peptide
MRHKRLVKPKRGVYYLISTASLA

SEQ ID NO: 42038 - protein, 24 aa, Artificial Sequence
  Cyclic GFR-binding peptide
YHYKLIVNNSSDKYLVSIPSLKTP

SEQ ID NO: 42039 - protein, 22 aa, Artificial Sequence
  Cyclic GFR-binding peptide
IMQYNKLVKPKRGVLYLISIAS

SEQ ID NO: 42040 - protein, 33 aa, Artificial Sequence; identical to SEQ ID NO: 4367
  Cyclic GFR-binding peptide
  MOD_RES (31), (32): Xaa is C or S

SEQ ID NO: 42041 - protein, 32 aa, Artificial Sequence; identical to SEQ ID NO: 4368
  Cyclic GFR-binding peptide
  MOD_RES (31), (32): Xaa is C or S

SEQ ID NO: 42042 - protein, 33 aa, Artificial Sequence
  Cyclic GFR-binding peptide
  MOD_RES (27), (28): Xaa is C or S
NQYNKLIVNSSDDLYLVSIASLQTPAXXPKPVT

SEQ ID NO: 42043 - protein, 30 aa, Artificial Sequence
  Cyclic GFR-binding peptide
DELTRHKRLFIPKKRVIEYYLVSTASLQVQ

SEQ ID NO: 42044 - protein, 35 aa, Artificial Sequence; identical to SEQ ID NO: 4369
  Cyclic GFR-binding peptide
  MOD_RES (1), (3): Xaa is C or S

SEQ ID NO: 42045 - protein, 29 aa, Artificial Sequence
  Cyclic GFR-binding peptide
AAAAAAAAARYKKLIVNSSDDFYLVSIAN

SEQ ID NO: 42046 - protein, 31 aa, Artificial Sequence
  Cyclic GFR-binding peptide
  MOD_RES (2), (4): Xaa is C or S
SXKXSRVIMQYNKLVKPKRGVLYLISIASLA

SEQ ID NO: 42047 - protein, 27 aa, Artificial Sequence
  Cyclic GFR-binding peptide
TRHKRLFIPKKRVIEYYLVSTASLQVQ

SEQ ID NO: 42048 - protein, 37 aa, Artificial Sequence; identical to SEQ ID NO: 4372
  Cyclic GFR-binding peptide
  MOD_RES (1), (1): Xaa is C or S

SEQ ID NO: 42049 - protein, 40 aa, Artificial Sequence; identical to SEQ ID NO: 4374
  Cyclic GFR-binding peptide
  MOD_RES (1), (3), (34), (35): Xaa is C or S

SEQ ID NO: 42050 - protein, 29 aa, Artificial Sequence
  Cyclic GFR-binding peptide
  MOD_RES (27), (28): Xaa is C or S
MRHKRLVKPTRGVYYLISTASLDQPVXXP

SEQ ID NO: 42051 - protein, 28 aa, Artificial Sequence
  Cyclic GFR-binding peptide
  MOD_RES (28), (28): Xaa is C or S
IMQYNKLIKPTKGILYLISIASLDQSVX

SEQ ID NO: 42052 - protein, 24 aa, Artificial Sequence
  Cyclic GFR-binding peptide
VVMERYKKLVVKDYEDFYLMSIAN

SEQ ID NO: 42053 - protein, 29 aa, Artificial Sequence
  Cyclic GFR-binding peptide
DELTRYKKLFIPKKRVIEFYLVSIANLQV

SEQ ID NO: 42054 - protein, 30 aa, Artificial Sequence
  Cyclic GFR-binding peptide
  MOD_RES (29), (30): Xaa is C or S
VIMYHYKLIKPTKGIKYLISIPSLDQSVXX

SEQ ID NO: 42055 - protein, 30 aa, Artificial Sequence
  Cyclic GFR-binding peptide
  MOD_RES (26), (27): Xaa is C or S
RHKRLIVNSSDDYYLVSTASLKTPAXXPKP

SEQ ID NO: 42056 - protein, 25 aa, Artificial Sequence
  Cyclic GFR-binding peptide
EVVMDRHKRLVVKENEDYYLMSTAS

SEQ ID NO: 42057 - protein, 32 aa, Artificial Sequence
  Cyclic GFR-binding peptide
  MOD_RES (2), (2): Xaa is C or S
GXGEVVMERHKRLVVKDYEDYYLMSTASLETP

SEQ ID NO: 42058 - protein, 29 aa, Artificial Sequence
  Cyclic GFR-binding peptide
  MOD_RES (1), (3): Xaa is C or S
XKXSKVVMQYNKLVKPTRGVLYLISIASL

SEQ ID NO: 42059 - protein, 41 aa, Artificial Sequence; identical to SEQ ID NO: 4375
  Cyclic GFR-binding peptide
  MOD_RES (2), (4), (41): Xaa is C or S

SEQ ID NO: 42060 - protein, 27 aa, Artificial Sequence
  Cyclic GFR-binding peptide
  MOD_RES (26), (26): Xaa is C or S
RHKRLIVNSSDDYYLVSTASLKTPAXT

SEQ ID NO: 42061 - protein, 23 aa, Artificial Sequence
  Cyclic GFR-binding peptide
VMNRYKKLIVNNSSDFYLVSIAN

SEQ ID NO: 42062 - protein, 32 aa, Artificial Sequence
  Cyclic GFR-binding peptide
  MOD_RES (30), (31): Xaa is C or S
VVMDRYKKLVVKENEDFYLMSIANLETPVXXA

SEQ ID NO: 42063 - protein, 33 aa, Artificial Sequence
  Cyclic GFR-binding peptide
  MOD_RES (29), (30): Xaa is C or S
VMNYHYKLIVNSSDDKYLVSIPSLKTPAXXPKP

SEQ ID NO: 42064 - protein, 31 aa, Artificial Sequence
  Cyclic GFR-binding peptide
ELTRYKKLFIPKKRVIEFYLVSIANLQVQTP

SEQ ID NO: 42065 - protein, 37 aa, Artificial Sequence; identical to SEQ ID NO: 4381
  Cyclic GFR-binding peptide
  MOD_RES (31), (32): Xaa is C or S

SEQ ID NO: 42066 - protein, 25 aa, Artificial Sequence
  Cyclic GFR-binding peptide
VIMYHYKLVKPKRGVKYLISIPSLA

SEQ ID NO: 42067 - protein, 32 aa, Artificial Sequence
  Cyclic GFR-binding peptide
  MOD_RES (26), (27): Xaa is C or S
QYNKLTPVGMDDLYLVSIASLKTPVXXAKGVK

SEQ ID NO: 42068 - protein, 33 aa, Artificial Sequence; identical to SEQ ID NO: 4383
  Cyclic GFR-binding peptide
  MOD_RES (31), (32): Xaa is C or S

SEQ ID NO: 42069 - protein, 29 aa, Artificial Sequence
  Cyclic GFR-binding peptide
  MOD_RES (1), (3): Xaa is C or S
XKXSKVIMQYNKLIKPTKGILYLISIASL

SEQ ID NO: 42070 - protein, 37 aa, Artificial Sequence; identical to SEQ ID NO: 4385
  Cyclic GFR-binding peptide
  MOD_RES (1), (3), (35), (36): Xaa is C or S

SEQ ID NO: 42071 - protein, 27 aa, Artificial Sequence
  Cyclic GFR-binding peptide
  MOD_RES (26), (27): Xaa is C or S
YHYKLVKPKRGVKYLISIPSLAQPVXX

SEQ ID NO: 42072 - protein, 31 aa, Artificial Sequence
  Cyclic GFR-binding peptide
  MOD_RES (2), (2): Xaa is C or S
GXGEVVMERYKKLVVKDYEDFYLMSIANLET

SEQ ID NO: 42073 - protein, 23 aa, Artificial Sequence
  Cyclic GFR-binding peptide
VMYHYKLVKPTRGVKYLISIPSL

SEQ ID NO: 42074 - protein, 30 aa, Artificial Sequence
  Cyclic GFR-binding peptide
  MOD_RES (30), (30): Xaa is C or S
VVMNQYNKLIVNNSSDLYLVSIASLKTPAX

SEQ ID NO: 42075 - protein, 26 aa, Artificial Sequence
  Cyclic GFR-binding peptide
EVVMDRHKRLVVKENEDYYLMSTASL

SEQ ID NO: 42076 - protein, 32 aa, Artificial Sequence
  Cyclic GFR-binding peptide
  MOD_RES (27), (27): Xaa is C or S
NYHYKLIVNSSDDKYLVSIPSLKTPAXTPKTV

SEQ ID NO: 42077 - protein, 34 aa, Artificial Sequence
  Cyclic GFR-binding peptide
  MOD_RES (30), (31): Xaa is C or S
KVVMRYKKLVKPTRGVFYLISIANLDQPVXXPSA

SEQ ID NO: 42078 - protein, 29 aa, Artificial Sequence
  Cyclic GFR-binding peptide
LHDELTRYKKLFIPKKRVIEFYLVSIANL

SEQ ID NO: 42079 - protein, 34 aa, Artificial Sequence; identical to SEQ ID NO: 4387
  Cyclic GFR-binding peptide
  MOD_RES (31), (32): Xaa is C or S

SEQ ID NO: 42080 - protein, 38 aa, Artificial Sequence; identical to SEQ ID NO: 4389
  Cyclic GFR-binding peptide
  MOD_RES (1), (3), (35), (36): Xaa is C or S

SEQ ID NO: 42081 - protein, 30 aa, Artificial Sequence
  Cyclic GFR-binding peptide
  MOD_RES (1), (1): Xaa is C or S
XSKVVMRYKKLVKPTRGVFYLISIANLDQP

SEQ ID NO: 42082 - protein, 33 aa, Artificial Sequence
  Cyclic GFR-binding peptide
  MOD_RES (32), (32): Xaa is C or S
LTQYNKLFIPKKRVIELYLVSIASLQVQTPRXQ

SEQ ID NO: 42083 - protein, 39 aa, Artificial Sequence; identical to SEQ ID NO: 4391
  Cyclic GFR-binding peptide
  MOD_RES (35), (35): Xaa is C or S

SEQ ID NO: 42084 - protein, 33 aa, Artificial Sequence
  Cyclic GFR-binding peptide
DELTRHKRLFIPKKRVIEYYLVSTASLQVQTPR

SEQ ID NO: 42085 - protein, 36 aa, Artificial Sequence
  Cyclic GFR-binding peptide
  MOD_RES (33), (33): Xaa is C or S
ELTYHYKLFIPKKRVIEKYLVSIPSLQVQTPRXQVN

SEQ ID NO: 42086 - protein, 24 aa, Artificial Sequence
  Cyclic GFR-binding peptide
LTQYNKLFIPKKRVIELYLVSIAS

SEQ ID NO: 42087 - protein, 35 aa, Artificial Sequence; identical to SEQ ID NO: 4392
  Cyclic GFR-binding peptide
  MOD_RES (35), (35): Xaa is C or S

SEQ ID NO: 42088 - protein, 28 aa, Artificial Sequence
  Cyclic GFR-binding peptide
  MOD_RES (1), (1): Xaa is C or S
XAKVVMNRYKKLIVNNSSDFYLVSIANL

SEQ ID NO: 42089 - protein, 38 aa, Artificial Sequence; identical to SEQ ID NO: 4393
  Cyclic GFR-binding peptide
  MOD_RES (32), (33): Xaa is C or S

SEQ ID NO: 42090 - protein, 31 aa, Artificial Sequence
  Cyclic GFR-binding peptide
  MOD_RES (27), (28): Xaa is C or S
NRHKRLIVNSSDDYYLVSTASLKTPAXXPKP

SEQ ID NO: 42091 - protein, 33 aa, Artificial Sequence
  Cyclic GFR-binding peptide
  MOD_RES (27), (28): Xaa is C or S
DRYKKLVVKENEDFYLMSIANLETPVXXAKPIK

SEQ ID NO: 42092 - protein, 33 aa, Artificial Sequence; identical to SEQ ID NO: 4396
  Cyclic GFR-binding peptide
  MOD_RES (1), (3): Xaa is C or S

SEQ ID NO: 42093 - protein, 31 aa, Artificial Sequence
  Cyclic GFR-binding peptide
  MOD_RES (29), (30): Xaa is C or S
VMNRHKRLIVNSSDDYYLVSTASLKTPAXXP

SEQ ID NO: 42094 - protein, 24 aa, Artificial Sequence
  Cyclic GFR-binding peptide
YHYKLVVKENEDKYLMSIPSLETP

SEQ ID NO: 42095 - protein, 29 aa, Artificial Sequence
  Cyclic GFR-binding peptide
  MOD_RES (1), (1): Xaa is C or S
XSKVIMRHKRLIKPTKGIYYLISTASLDQ

SEQ ID NO: 42096 - protein, 30 aa, Artificial Sequence
  Cyclic GFR-binding peptide
  MOD_RES (26), (27): Xaa is C or S
RYKKLVKPTRGVFYLISIANLDQPVXXPSA

SEQ ID NO: 42097 - protein, 39 aa, Artificial Sequence; identical to SEQ ID NO: 4399
  Cyclic GFR-binding peptide
  MOD_RES (1), (3), (34), (35): Xaa is C or S

SEQ ID NO: 42098 - protein, 21 aa, Artificial Sequence
  Cyclic GFR-binding peptide
RYKKLIKPTKGIFYLISIANL

SEQ ID NO: 42099 - protein, 33 aa, Artificial Sequence; identical to SEQ ID NO: 4401
  Cyclic GFR-binding peptide
  MOD_RES (1), (3): Xaa is C or S

SEQ ID NO: 42100 - protein, 41 aa, Artificial Sequence; identical to SEQ ID NO: 4402
  Cyclic GFR-binding peptide
  MOD_RES (1), (3), (35), (36): Xaa is C or S

SEQ ID NO: 42101 - protein, 26 aa, Artificial Sequence
  Cyclic GFR-binding peptide
  MOD_RES (26), (26): Xaa is C or S
YHYKLIVNSSDDKYLVSIPSLKTPAX

SEQ ID NO: 42102 - protein, 24 aa, Artificial Sequence
  Cyclic GFR-binding peptide
MNRHKRLIVNSSDDYYLVSTASLK

SEQ ID NO: 42103 - protein, 40 aa, Artificial Sequence; identical to SEQ ID NO: 4403
  Cyclic GFR-binding peptide
  MOD_RES (2), (4), (35), (36): Xaa is C or S

SEQ ID NO: 42104 - protein, 30 aa, Artificial Sequence
  Cyclic GFR-binding peptide
  MOD_RES (29), (30): Xaa is C or S
VMEYHYKLVVKDYEDKYLMSIPSLETPVXX

SEQ ID NO: 42105 - protein, 29 aa, Artificial Sequence
  Cyclic GFR-binding peptide
  MOD_RES (1), (3): Xaa is C or S
XKXSKVVMYHYKLVKPTRGVKYLISIPSL

SEQ ID NO: 42106 - protein, 33 aa, Artificial Sequence
  Cyclic GFR-binding peptide
  MOD_RES (2), (4): Xaa is C or S
RXGXGEVVMERYKKLVVKDYEDFYLMSIANLET

SEQ ID NO: 42107 - protein, 23 aa, Artificial Sequence
  Cyclic GFR-binding peptide
NQYNKLIVNSSDDLYLVSIASLQ

SEQ ID NO: 42108 - protein, 25 aa, Artificial Sequence
  Cyclic GFR-binding peptide
VIMRYKKLVKPKRGVFYLISIANLA

SEQ ID NO: 42109 - protein, 32 aa, Artificial Sequence
  Cyclic GFR-binding peptide
  MOD_RES (30), (31): Xaa is C or S
VVMNQYNKLIVNSSDDLYLVSIASLQTPAXXP

SEQ ID NO: 42110 - protein, 37 aa, Artificial Sequence
  Cyclic GFR-binding peptide
  MOD_RES (34), (34): Xaa is C or S
DELTRYKKLFIPKKRVIEFYLVSIANLQVQTPRXQVN

SEQ ID NO: 42111 - protein, 20 aa, Artificial Sequence
  Cyclic GFR-binding peptide
RHKRLIVNSSDDYYLVSTAS

SEQ ID NO: 42112 - protein, 27 aa, Artificial Sequence
  Cyclic GFR-binding peptide
VVKDYEDQYNKLVVKDYEDLYLMSIAS

SEQ ID NO: 42113 - protein, 29 aa, Artificial Sequence
  Cyclic GFR-binding peptide
RVIMQYNKLVKPKRGVLYLISIASLAQPV

SEQ ID NO: 42114 - protein, 35 aa, Artificial Sequence; identical to SEQ ID NO: 4405
  Cyclic GFR-binding peptide
  MOD_RES (32), (32): Xaa is C or S

SEQ ID NO: 42115 - protein, 36 aa, Artificial Sequence; identical to SEQ ID NO: 4406
  Cyclic GFR-binding peptide
  MOD_RES (2), (4): Xaa is C or S

SEQ ID NO: 42116 - protein, 30 aa, Artificial Sequence
  Cyclic GFR-binding peptide
  MOD_RES (1), (3): Xaa is C or S
XGXARVVMNQYNKLIVNSSDDLYLVSIASL

SEQ ID NO: 42117 - protein, 28 aa, Artificial Sequence
  Cyclic GFR-binding peptide
SKVVMRYKKLVKPTRGVFYLISIANLDQ

SEQ ID NO: 42118 - protein, 31 aa, Artificial Sequence
  Cyclic GFR-binding peptide
  MOD_RES (30), (31): Xaa is C or S
VVMNYHYKLIVNSSDDKYLVSIPSLQTPAXX

SEQ ID NO: 42119 - protein, 38 aa, Artificial Sequence; identical to SEQ ID NO: 4409
  Cyclic GFR-binding peptide
  MOD_RES (1), (33), (34): Xaa is C or S

SEQ ID NO: 42120 - protein, 30 aa, Artificial Sequence; identical to SEQ ID NO: 4411
  Cyclic GFR-binding peptide

SEQ ID NO: 42121 - protein, 33 aa, Artificial Sequence
  Cyclic GFR-binding peptide
  MOD_RES (2), (4): Xaa is C or S
SXKXSRVIMRHKRLVKPKRGVYYLISTASLAQP

SEQ ID NO: 42122 - protein, 36 aa, Artificial Sequence; identical to SEQ ID NO: 4415
  Cyclic GFR-binding peptide
  MOD_RES (31), (32): Xaa is C or S

SEQ ID NO: 42123 - protein, 32 aa, Artificial Sequence
  Cyclic GFR-binding peptide
  MOD_RES (2), (4): Xaa is C or S
HXGXARVVMNQYNKLIVNSSDDLYLVSIASLQ

SEQ ID NO: 42124 - protein, 22 aa, Artificial Sequence
  Cyclic GFR-binding peptide
GEQYNKLTPVGMDDLYLVSIAS

SEQ ID NO: 42125 - protein, 42 aa, Artificial Sequence; identical to SEQ ID NO: 4416
  Cyclic GFR-binding peptide
  MOD_RES (2), (4), (36), (37): Xaa is C or S

SEQ ID NO: 42126 - protein, 35 aa, Artificial Sequence
  Cyclic GFR-binding peptide
  MOD_RES (32), (32): Xaa is C or S
LTQYNKLFIPKKRVIELYLVSIASLQVQTPRXQVN

SEQ ID NO: 42127 - protein, 32 aa, Artificial Sequence
  Cyclic GFR-binding peptide
  MOD_RES (2), (4): Xaa is C or S
RXGXEAVSMGERYKKLTPVGMDDFYLVSIANL

SEQ ID NO: 42128 - protein, 38 aa, Artificial Sequence; identical to SEQ ID NO: 4418
  Cyclic GFR-binding peptide
  MOD_RES (2), (33), (34): Xaa is C or S

SEQ ID NO: 42129 - protein, 27 aa, Artificial Sequence
  Cyclic GFR-binding peptide
  MOD_RES (27), (27): Xaa is C or S
NRHKRLIVNSSDDYYLVSTASLKTPAX

SEQ ID NO: 42130 - protein, 31 aa, Artificial Sequence
  Cyclic GFR-binding peptide
  MOD_RES (28), (29): Xaa is C or S
IMRHKRLIKPTKGIYYLISTASLDQSVXXPS

SEQ ID NO: 42131 - protein, 31 aa, Artificial Sequence
  Cyclic GFR-binding peptide
  MOD_RES (29), (30): Xaa is C or S
VIMRHKRLVKPKRGVYYLISTASLAQPVXXP

SEQ ID NO: 42132 - protein, 38 aa, Artificial Sequence; identical to SEQ ID NO: 4419
  Cyclic GFR-binding peptide
  MOD_RES (2), (33), (34): Xaa is C or S

SEQ ID NO: 42133 - protein, 35 aa, Artificial Sequence; identical to SEQ ID NO: 4420
  Cyclic GFR-binding peptide
  MOD_RES (31), (31): Xaa is C or S

SEQ ID NO: 42134 - protein, 36 aa, Artificial Sequence; identical to SEQ ID NO: 4421
  Cyclic GFR-binding peptide
  MOD_RES (31), (32): Xaa is C or S

SEQ ID NO: 42135 - protein, 34 aa, Artificial Sequence
  Cyclic GFR-binding peptide
  MOD_RES (2), (4): Xaa is C or S
HXGXARVVMNYHYKLIVNSSDDKYLVSIPSLQTP

SEQ ID NO: 42136 - protein, 38 aa, Artificial Sequence
  Cyclic GFR-binding peptide
  MOD_RES (34), (34): Xaa is C or S
DELTYHYKLFIPKKRVIEKYLVSIPSLQVQTPRXQVNR

SEQ ID NO: 42137 - protein, 33 aa, Artificial Sequence; identical to SEQ ID NO: 4424
  Cyclic GFR-binding peptide
  MOD_RES (1), (3): Xaa is C or S

SEQ ID NO: 42138 - protein, 34 aa, Artificial Sequence; identical to SEQ ID NO: 4426
  Cyclic GFR-binding peptide
  MOD_RES (31), (32): Xaa is C or S

SEQ ID NO: 42139 - protein, 30 aa, Artificial Sequence
  Cyclic GFR-binding peptide
LHDELTRYKKLFIPKKRVIEFYLVSIANLQ

SEQ ID NO: 42140 - protein, 35 aa, Artificial Sequence; identical to SEQ ID NO: 4429
  Cyclic GFR-binding peptide
  MOD_RES (35), (35): Xaa is C or S

SEQ ID NO: 42141 - protein, 29 aa, Artificial Sequence
  Cyclic GFR-binding peptide
KVIMRYKKLIKPTKGIFYLISIANLDQSV

SEQ ID NO: 42142 - protein, 39 aa, Artificial Sequence; identical to SEQ ID NO: 4431
  Cyclic GFR-binding peptide
  MOD_RES (2), (4), (35), (36): Xaa is C or S

SEQ ID NO: 42143 - protein, 32 aa, Artificial Sequence
  Cyclic GFR-binding peptide
  MOD_RES (28), (29): Xaa is C or S
IMRYKKLVKPKRGVFYLISIANLAQPVXXPAA

SEQ ID NO: 42144 - protein, 29 aa, Artificial Sequence
  Cyclic GFR-binding peptide
  MOD_RES (26), (27): Xaa is C or S
RHKRLVKPTRGVYYLISTASLDQPVXXPS

SEQ ID NO: 42145 - protein, 33 aa, Artificial Sequence; identical to SEQ ID NO: 4432
  Cyclic GFR-binding peptide
  MOD_RES (1), (3): Xaa is C or S

SEQ ID NO: 42146 - protein, 33 aa, Artificial Sequence
  Cyclic GFR-binding peptide
  MOD_RES (2), (4): Xaa is C or S
EXKXALHDELTRHKRLFIPKKRVIEYYLVSTAS

SEQ ID NO: 42147 - protein, 37 aa, Artificial Sequence; identical to SEQ ID NO: 4433
  Cyclic GFR-binding peptide
  MOD_RES (1), (3), (35), (36): Xaa is C or S

SEQ ID NO: 42148 - protein, 31 aa, Artificial Sequence
  Cyclic GFR-binding peptide
  MOD_RES (1), (1): Xaa is C or S
XARVVMNRHKRLIVNSSDDYYLVSTASLQTP

SEQ ID NO: 42149 - protein, 22 aa, Artificial Sequence
  Cyclic GFR-binding peptide
VMRHKRLVKPTRGVYYLISTAS

SEQ ID NO: 42150 - protein, 32 aa, Artificial Sequence; identical to SEQ ID NO: 4434
  Cyclic GFR-binding peptide
  MOD_RES (1), (1): Xaa is C or S

SEQ ID NO: 42151 - protein, 33 aa, Artificial Sequence
  Cyclic GFR-binding peptide
  MOD_RES (28), (29): Xaa is C or S
VMQYNKLVKPTRGVLYLISIASLDQPVXXPSAS

SEQ ID NO: 42152 - protein, 25 aa, Artificial Sequence
  Cyclic GFR-binding peptide
MYHYKLVKPTRGVKYLISIPSLDQP

SEQ ID NO: 42153 - protein, 27 aa, Artificial Sequence
  Cyclic GFR-binding peptide
EVVMEYHYKLVVKDYEDKYLMSIPSLE

SEQ ID NO: 42154 - protein, 31 aa, Artificial Sequence
  Cyclic GFR-binding peptide
  MOD_RES (29), (30): Xaa is C or S
VMDRHKRLVVKENEDYYLMSTASLETPVXXA

SEQ ID NO: 42155 - protein, 29 aa, Artificial Sequence
  Cyclic GFR-binding peptide
VVMEYHYKLVVKDYEDKYLMSIPSLETPV

SEQ ID NO: 42156 - protein, 30 aa, Artificial Sequence
  Cyclic GFR-binding peptide
  MOD_RES (30), (30): Xaa is C or S
KVVMRHKRLVKPTRGVYYLISTASLDQPVX

SEQ ID NO: 42157 - protein, 29 aa, Artificial Sequence
  Cyclic GFR-binding peptide
  MOD_RES (26), (27): Xaa is C or S
QYNKLVKPKRGVLYLISIASLAQPVXXPA

SEQ ID NO: 42158 - protein, 27 aa, Artificial Sequence
  Cyclic GFR-binding peptide
HDELTRHKRLFIPKKRVIEYYLVSTAS

SEQ ID NO: 42159 - protein, 33 aa, Artificial Sequence
  Cyclic GFR-binding peptide
  MOD_RES (1), (3): Xaa is C or S
XGXARVVMNQYNKLIVNSSDDLYLVSIASLQTP

SEQ ID NO: 42160 - protein, 33 aa, Artificial Sequence
  Cyclic GFR-binding peptide
  MOD_RES (1), (3): Xaa is C or S
XGXGEVVMERYKKLVVKDYEDFYLMSIANLETP

SEQ ID NO: 42161 - protein, 31 aa, Artificial Sequence; identical to SEQ ID NO: 4439
  Cyclic GFR-binding peptide
  MOD_RES (31), (31): Xaa is C or S

SEQ ID NO: 42162 - protein, 31 aa, Artificial Sequence
  Cyclic GFR-binding peptide
  MOD_RES (1), (1): Xaa is C or S
XSRVVMNQYNKLIVNSSDDLYLVSIASLKTP

SEQ ID NO: 42163 - protein, 37 aa, Artificial Sequence; identical to SEQ ID NO: 4441
  Cyclic GFR-binding peptide
  MOD_RES (1), (33), (34): Xaa is C or S

SEQ ID NO: 42164 - protein, 31 aa, Artificial Sequence
  Cyclic GFR-binding peptide
  MOD_RES (29), (30): Xaa is C or S
VIMQYNKLVKPKRGVLYLISIASLAQPVXXP

SEQ ID NO: 42165 - protein, 37 aa, Artificial Sequence; identical to SEQ ID NO: 4444
  Cyclic GFR-binding peptide
  MOD_RES (32), (33): Xaa is C or S

SEQ ID NO: 42166 - protein, 39 aa, Artificial Sequence; identical to SEQ ID NO: 4445
  Cyclic GFR-binding peptide
  MOD_RES (2), (35), (36): Xaa is C or S

SEQ ID NO: 42167 - protein, 33 aa, Artificial Sequence; identical to SEQ ID NO: 4446
  Cyclic GFR-binding peptide
  MOD_RES (1), (32), (33): Xaa is C or S

SEQ ID NO: 42168 - protein, 37 aa, Artificial Sequence; identical to SEQ ID NO: 4447
  Cyclic GFR-binding peptide
  MOD_RES (31), (32): Xaa is C or S

SEQ ID NO: 42169 - protein, 28 aa, Artificial Sequence
  Cyclic GFR-binding peptide
ARVVMNQYNKLIVNSSDDLYLVSIASLQ

SEQ ID NO: 42170 - protein, 32 aa, Artificial Sequence
  Cyclic GFR-binding peptide
  MOD_RES (26), (26): Xaa is C or S
QYNKLIVNSSDDLYLVSIASLKTPAXTPKTVH

SEQ ID NO: 42171 - protein, 33 aa, Artificial Sequence; identical to SEQ ID NO: 4449
  Cyclic GFR-binding peptide
  MOD_RES (2), (33): Xaa is C or S

SEQ ID NO: 42172 - protein, 34 aa, Artificial Sequence
  Cyclic GFR-binding peptide
  MOD_RES (29), (30): Xaa is C or S
VIMRHKRLIKPTKGIYYLISTASLDQSVXXPSAS

SEQ ID NO: 42173 - protein, 29 aa, Artificial Sequence
  Cyclic GFR-binding peptide
AAAAAAAAARHKRLVKPTRGVYYLISTAS

SEQ ID NO: 42174 - protein, 35 aa, Artificial Sequence; identical to SEQ ID NO: 4452
  Cyclic GFR-binding peptide
  MOD_RES (1), (3), (34), (35): Xaa is C or S

SEQ ID NO: 42175 - protein, 41 aa, Artificial Sequence; identical to SEQ ID NO: 4453
  Cyclic GFR-binding peptide
  MOD_RES (2), (4), (36), (37): Xaa is C or S

SEQ ID NO: 42176 - protein, 39 aa, Artificial Sequence; identical to SEQ ID NO: 4455
  Cyclic GFR-binding peptide
  MOD_RES (1), (33), (34): Xaa is C or S

SEQ ID NO: 42177 - protein, 36 aa, Artificial Sequence; identical to SEQ ID NO: 4456
  Cyclic GFR-binding peptide
  MOD_RES (31), (32): Xaa is C or S

SEQ ID NO: 42178 - protein, 33 aa, Artificial Sequence
  Cyclic GFR-binding peptide
  MOD_RES (28), (29): Xaa is C or S
IMQYNKLIKPTKGILYLISIASLDQSVXXPSAS

SEQ ID NO: 42179 - protein, 28 aa, Artificial Sequence
  Cyclic GFR-binding peptide
  MOD_RES (2), (2): Xaa is C or S
KXSKVIMRYKKLIKPTKGIFYLISIANL

SEQ ID NO: 42180 - protein, 23 aa, Artificial Sequence
  Cyclic GFR-binding peptide
ERHKRLTPVGMDDYYLVSTASLK

SEQ ID NO: 42181 - protein, 26 aa, Artificial Sequence
  Cyclic GFR-binding peptide
  MOD_RES (26), (26): Xaa is C or S
RHKRLVKPKRGVYYLISTASLAQPVX

SEQ ID NO: 42182 - protein, 37 aa, Artificial Sequence; identical to SEQ ID NO: 4458
  Cyclic GFR-binding peptide
  MOD_RES (31), (32): Xaa is C or S

SEQ ID NO: 42183 - protein, 24 aa, Artificial Sequence
  Cyclic GFR-binding peptide
SMGERYKKLTPVGMDDFYLVSIAN

SEQ ID NO: 42184 - protein, 28 aa, Artificial Sequence
  Cyclic GFR-binding peptide
  MOD_RES (28), (28): Xaa is C or S
MNRHKRLIVNSSDDYYLVSTASLKTPAX

SEQ ID NO: 42185 - protein, 36 aa, Artificial Sequence; identical to SEQ ID NO: 4459
  Cyclic GFR-binding peptide
  MOD_RES (1), (32), (33): Xaa is C or S

SEQ ID NO: 42186 - protein, 43 aa, Artificial Sequence; identical to SEQ ID NO: 4462
  Cyclic GFR-binding peptide
  MOD_RES (2), (4), (41): Xaa is C or S

SEQ ID NO: 42187 - protein, 38 aa, Artificial Sequence; identical to SEQ ID NO: 4463
  Cyclic GFR-binding peptide
  MOD_RES (2), (4), (36), (37): Xaa is C or S

SEQ ID NO: 42188 - protein, 39 aa, Artificial Sequence; identical to SEQ ID NO: 4466
  Cyclic GFR-binding peptide
  MOD_RES (2), (4), (35), (36): Xaa is C or S

SEQ ID NO: 42189 - protein, 29 aa, Artificial Sequence
  Cyclic GFR-binding peptide
  MOD_RES (1), (3): Xaa is C or S
XKXSRVIMRYKKLVKPKRGVFYLISIANL

SEQ ID NO: 42190 - protein, 33 aa, Artificial Sequence
  Cyclic GFR-binding peptide
  MOD_RES (33), (33): Xaa is C or S
ELTYHYKLFIPKKRVIEKYLVSIPSLQVQTPRX

SEQ ID NO: 42191 - protein, 28 aa, Artificial Sequence
  Cyclic GFR-binding peptide
  MOD_RES (1), (3): Xaa is C or S
XKXSKVVMRYKKLVKPTRGVFYLISIAN

SEQ ID NO: 42192 - protein, 33 aa, Artificial Sequence
  Cyclic GFR-binding peptide
  MOD_RES (1), (3): Xaa is C or S
XGXSRVVMNQYNKLIVNSSDDLYLVSIASLKTP

SEQ ID NO: 42193 - protein, 27 aa, Artificial Sequence
  Cyclic GFR-binding peptide
  MOD_RES (1), (1): Xaa is C or S
XSKVIMQYNKLIKPTKGILYLISIASL

SEQ ID NO: 42194 - protein, 22 aa, Artificial Sequence
  Cyclic GFR-binding peptide
RYKKLVVKENEDFYLMSIANLE

SEQ ID NO: 42195 - protein, 32 aa, Artificial Sequence; identical to SEQ ID NO: 4469
  Cyclic GFR-binding peptide
  MOD_RES (32), (32): Xaa is C or S

SEQ ID NO: 42196 - protein, 37 aa, Artificial Sequence; identical to SEQ ID NO: 4471
  Cyclic GFR-binding peptide
  MOD_RES (1), (3), (35), (36): Xaa is C or S

SEQ ID NO: 42197 - protein, 27 aa, Artificial Sequence
  Cyclic GFR-binding peptide
  MOD_RES (26), (27): Xaa is C or S
RHKRLVVKENEDYYLMSTASLETPVXX

SEQ ID NO: 42198 - protein, 38 aa, Artificial Sequence; identical to SEQ ID NO: 4473
  Cyclic GFR-binding peptide
  MOD_RES (2), (34), (35): Xaa is C or S

SEQ ID NO: 42199 - protein, 26 aa, Artificial Sequence
  Cyclic GFR-binding peptide
SKVVMQYNKLVKPTRGVLYLISIASL

SEQ ID NO: 42200 - protein, 33 aa, Artificial Sequence
  Cyclic GFR-binding peptide
  MOD_RES (31), (31): Xaa is C or S
TRYKKLFIPKKRVIEFYLVSIANLQVQTPRXQV

SEQ ID NO: 42201 - protein, 31 aa, Artificial Sequence
  Cyclic GFR-binding peptide
  MOD_RES (2), (4): Xaa is C or S
HXGXAKVVMNRYKKLIVNNSSDFYLVSIANL

SEQ ID NO: 42202 - protein, 29 aa, Artificial Sequence
  Cyclic GFR-binding peptide
  MOD_RES (1), (1): Xaa is C or S
XSRVIMRHKRLVKPKRGVYYLISTASLAQ

SEQ ID NO: 42203 - protein, 24 aa, Artificial Sequence
  Cyclic GFR-binding peptide
NRHKRLIVNSSDDYYLVSTASLKT

SEQ ID NO: 42204 - protein, 24 aa, Artificial Sequence
  Cyclic GFR-binding peptide
VMRYKKLVKPTRGVFYLISIANLD

SEQ ID NO: 42205 - protein, 26 aa, Artificial Sequence
  Cyclic GFR-binding peptide
  MOD_RES (26), (26): Xaa is C or S
QYNKLVKPKRGVLYLISIASLAQPVX

SEQ ID NO: 42206 - protein, 32 aa, Artificial Sequence; identical to SEQ ID NO: 4477
  Cyclic GFR-binding peptide
  MOD_RES (32), (32): Xaa is C or S

SEQ ID NO: 42207 - protein, 36 aa, Artificial Sequence; identical to SEQ ID NO: 4480
  Cyclic GFR-binding peptide
  MOD_RES (1), (3), (34), (35): Xaa is C or S

SEQ ID NO: 42208 - protein, 36 aa, Artificial Sequence; identical to SEQ ID NO: 4483
  Cyclic GFR-binding peptide
  MOD_RES (1), (3), (34), (35): Xaa is C or S

SEQ ID NO: 42209 - protein, 36 aa, Artificial Sequence; identical to SEQ ID NO: 4484
  Cyclic GFR-binding peptide
  MOD_RES (1), (3), (36): Xaa is C or S

SEQ ID NO: 42210 - protein, 40 aa, Artificial Sequence; identical to SEQ ID NO: 4485
  Cyclic GFR-binding peptide
  MOD_RES (2), (34), (35): Xaa is C or S

SEQ ID NO: 42211 - protein, 25 aa, Artificial Sequence
  Cyclic GFR-binding peptide
VMEYHYKLVVKDYEDKYLMSIPSLE

SEQ ID NO: 42212 - protein, 26 aa, Artificial Sequence
  Cyclic GFR-binding peptide
RVVMNRHKRLIVNSSDDYYLVSTASL

SEQ ID NO: 42213 - protein, 36 aa, Artificial Sequence
  Cyclic GFR-binding peptide
  MOD_RES (30), (31): Xaa is C or S
KVVMRYKKLVKPTRGVFYLISIANLDQPVXXPSASA

SEQ ID NO: 42214 - protein, 28 aa, Artificial Sequence
  Cyclic GFR-binding peptide
LHDELTYHYKLFIPKKRVIEKYLVSIPS

SEQ ID NO: 42215 - protein, 30 aa, Artificial Sequence
  Cyclic GFR-binding peptide
  MOD_RES (29), (30): Xaa is C or S
VIMQYNKLIKPTKGILYLISIASLDQSVXX

SEQ ID NO: 42216 - protein, 27 aa, Artificial Sequence
  Cyclic GFR-binding peptide
VMNQYNKLIVNSSDDLYLVSIASLQTP

SEQ ID NO: 42217 - protein, 28 aa, Artificial Sequence
  Cyclic GFR-binding peptide
GEVVMERHKRLVVKDYEDYYLMSTASLE

SEQ ID NO: 42218 - protein, 30 aa, Artificial Sequence
  Cyclic GFR-binding peptide
ARVVMNQYNKLIVNSSDDLYLVSIASLQTP

SEQ ID NO: 42219 - protein, 34 aa, Artificial Sequence; identical to SEQ ID NO: 4487
  Cyclic GFR-binding peptide
  MOD_RES (31), (32): Xaa is C or S

SEQ ID NO: 42220 - protein, 31 aa, Artificial Sequence
  Cyclic GFR-binding peptide
  MOD_RES (30), (31): Xaa is C or S
VVMDRYKKLVVKENEDFYLMSIANLETPVXX

SEQ ID NO: 42221 - protein, 26 aa, Artificial Sequence
  Cyclic GFR-binding peptide
RVIMQYNKLVKPKRGVLYLISIASLA

SEQ ID NO: 42222 - protein, 35 aa, Artificial Sequence; identical to SEQ ID NO: 4488
  Cyclic GFR-binding peptide
  MOD_RES (2), (33), (34): Xaa is C or S

SEQ ID NO: 42223 - protein, 36 aa, Artificial Sequence
  Cyclic GFR-binding peptide
  MOD_RES (32), (32): Xaa is C or S
LTRHKRLFIPKKRVIEYYLVSTASLQVQTPRXQVNR

SEQ ID NO: 42224 - protein, 27 aa, Artificial Sequence
  Cyclic GFR-binding peptide
KVVMYHYKLVKPTRGVKYLISIPSLDQ

SEQ ID NO: 42225 - protein, 31 aa, Artificial Sequence
  Cyclic GFR-binding peptide
  MOD_RES (29), (30): Xaa is C or S
VVMYHYKLVKPTRGVKYLISIPSLDQPVXXP

SEQ ID NO: 42226 - protein, 30 aa, Artificial Sequence
  Cyclic GFR-binding peptide
  MOD_RES (27), (28): Xaa is C or S
MQYNKLVKPKRGVLYLISIASLAQPVXXPA

SEQ ID NO: 42227 - protein, 20 aa, Artificial Sequence
  Cyclic GFR-binding peptide
QYNKLIKPTKGILYLISIAS

SEQ ID NO: 42228 - protein, 31 aa, Artificial Sequence
  Cyclic GFR-binding peptide
  MOD_RES (29), (30): Xaa is C or S
VVMRHKRLVKPTRGVYYLISTASLDQPVXXP

SEQ ID NO: 42229 - protein, 25 aa, Artificial Sequence
  Cyclic GFR-binding peptide
VVMNYHYKLIVNSSDDKYLVSIPSL

SEQ ID NO: 42230 - protein, 30 aa, Artificial Sequence; identical to SEQ ID NO: 1861
  Cyclic GFR-binding peptide

SEQ ID NO: 42231 - protein, 41 aa, Artificial Sequence; identical to SEQ ID NO: 4490
  Cyclic GFR-binding peptide
  MOD_RES (1), (3), (35), (36): Xaa is C or S

SEQ ID NO: 42232 - protein, 25 aa, Artificial Sequence
  Cyclic GFR-binding peptide
YHYKLVKPKRGVKYLISIPSLAQPV

SEQ ID NO: 42233 - protein, 36 aa, Artificial Sequence; identical to SEQ ID NO: 4491
  Cyclic GFR-binding peptide
  MOD_RES (31), (32): Xaa is C or S

SEQ ID NO: 42234 - protein, 20 aa, Artificial Sequence
  Cyclic GFR-binding peptide
RHKRLIKPTKGIYYLISTAS

SEQ ID NO: 42235 - protein, 40 aa, Artificial Sequence; identical to SEQ ID NO: 4492
  Cyclic GFR-binding peptide
  MOD_RES (2), (4), (36), (37): Xaa is C or S

SEQ ID NO: 42236 - protein, 37 aa, Artificial Sequence; identical to SEQ ID NO: 4493
  Cyclic GFR-binding peptide
  MOD_RES (1), (32), (33): Xaa is C or S

SEQ ID NO: 42237 - protein, 37 aa, Artificial Sequence; identical to SEQ ID NO: 4494
  Cyclic GFR-binding peptide
  MOD_RES (2), (4), (35), (36): Xaa is C or S

SEQ ID NO: 42238 - protein, 31 aa, Artificial Sequence; identical to SEQ ID NO: 4495
  Cyclic GFR-binding peptide
  MOD_RES (31), (31): Xaa is C or S

SEQ ID NO: 42239 - protein, 28 aa, Artificial Sequence
  Cyclic GFR-binding peptide
SRVIMRHKRLVKPKRGVYYLISTASLAQ

SEQ ID NO: 42240 - protein, 31 aa, Artificial Sequence
  Cyclic GFR-binding peptide
AAAAAAAAAYHYKLFIPKKRVIEKYLVSIPS

SEQ ID NO: 42241 - protein, 29 aa, Artificial Sequence
  Cyclic GFR-binding peptide
  MOD_RES (28), (29): Xaa is C or S
IMQYNKLIKPTKGILYLISIASLDQSVXX

SEQ ID NO: 42242 - protein, 39 aa, Artificial Sequence; identical to SEQ ID NO: 4499
  Cyclic GFR-binding peptide
  MOD_RES (2), (4), (36), (37): Xaa is C or S

SEQ ID NO: 42243 - protein, 29 aa, Artificial Sequence
  Cyclic GFR-binding peptide
  MOD_RES (27), (28): Xaa is C or S
MRHKRLIKPTKGIYYLISTASLDQSVXXP

SEQ ID NO: 42244 - protein, 34 aa, Artificial Sequence; identical to SEQ ID NO: 4500
  Cyclic GFR-binding peptide
  MOD_RES (2), (34): Xaa is C or S

SEQ ID NO: 42245 - protein, 34 aa, Artificial Sequence; identical to SEQ ID NO: 4501
  Cyclic GFR-binding peptide
  MOD_RES (32), (33): Xaa is C or S

SEQ ID NO: 42246 - protein, 29 aa, Artificial Sequence
  Cyclic GFR-binding peptide
  MOD_RES (1), (1): Xaa is C or S
XAKVVMNQYNKLIVNNSSDLYLVSIASLK

SEQ ID NO: 42247 - protein, 37 aa, Artificial Sequence; identical to SEQ ID NO: 4505
  Cyclic GFR-binding peptide
  MOD_RES (31), (32): Xaa is C or S

SEQ ID NO: 42248 - protein, 24 aa, Artificial Sequence
  Cyclic GFR-binding peptide
RYKKLVVKDYEDFYLMSIANLETP

SEQ ID NO: 42249 - protein, 32 aa, Artificial Sequence; identical to SEQ ID NO: 1830
  Cyclic GFR-binding peptide

SEQ ID NO: 42250 - protein, 31 aa, Artificial Sequence; identical to SEQ ID NO: 4507
  Cyclic GFR-binding peptide
  MOD_RES (31), (31): Xaa is C or S

SEQ ID NO: 42251 - protein, 37 aa, Artificial Sequence; identical to SEQ ID NO: 4508
  Cyclic GFR-binding peptide
  MOD_RES (1), (3), (34), (35): Xaa is C or S

SEQ ID NO: 42252 - protein, 27 aa, Artificial Sequence
  Cyclic GFR-binding peptide
  MOD_RES (26), (27): Xaa is C or S
YHYKLIVNSSDDKYLVSIPSLKTPAXX

SEQ ID NO: 42253 - protein, 27 aa, Artificial Sequence
  Cyclic GFR-binding peptide
  MOD_RES (1), (1): Xaa is C or S
XSRVVMNQYNKLIVNSSDDLYLVSIAS

SEQ ID NO: 42254 - protein, 25 aa, Artificial Sequence
  Cyclic GFR-binding peptide
MGERYKKLTPVGMDDFYLVSIANLK

SEQ ID NO: 42255 - protein, 33 aa, Artificial Sequence
  Cyclic GFR-binding peptide
  MOD_RES (28), (29): Xaa is C or S
MERYKKLVVKDYEDFYLMSIANLETPVXXAKPI

SEQ ID NO: 42256 - protein, 30 aa, Artificial Sequence
  Cyclic GFR-binding peptide
  MOD_RES (1), (3): Xaa is C or S
XGXSRVVMNRHKRLIVNSSDDYYLVSTASL

SEQ ID NO: 42257 - protein, 27 aa, Artificial Sequence
  Cyclic GFR-binding peptide
  MOD_RES (1), (1): Xaa is C or S
XSRVIMQYNKLVKPKRGVLYLISIASL

SEQ ID NO: 42258 - protein, 34 aa, Artificial Sequence; identical to SEQ ID NO: 4509
  Cyclic GFR-binding peptide
  MOD_RES (1), (33), (34): Xaa is C or S

SEQ ID NO: 42259 - protein, 33 aa, Artificial Sequence
  Cyclic GFR-binding peptide
  MOD_RES (27), (28): Xaa is C or S
MQYNKLVKPKRGVLYLISIASLAQPVXXPAASA

SEQ ID NO: 42260 - protein, 30 aa, Artificial Sequence
  Cyclic GFR-binding peptide
  MOD_RES (30), (30): Xaa is C or S
VVMNQYNKLIVNSSDDLYLVSIASLKTPAX

SEQ ID NO: 42261 - protein, 21 aa, Artificial Sequence
  Cyclic GFR-binding peptide
QYNKLTPVGMDDLYLVSIASL

SEQ ID NO: 42262 - protein, 24 aa, Artificial Sequence
  Cyclic GFR-binding peptide
KVIMQYNKLIKPTKGILYLISIAS

SEQ ID NO: 42263 - protein, 30 aa, Artificial Sequence
  Cyclic GFR-binding peptide
  MOD_RES (29), (30): Xaa is C or S
MGERYKKLTPVGMDDFYLVSIANLKTPVXX

SEQ ID NO: 42264 - protein, 29 aa, Artificial Sequence
  Cyclic GFR-binding peptide
  MOD_RES (28), (29): Xaa is C or S
VMQYNKLVKPTRGVLYLISIASLDQPVXX

SEQ ID NO: 42265 - protein, 34 aa, Artificial Sequence; identical to SEQ ID NO: 4513
  Cyclic GFR-binding peptide
  MOD_RES (32), (33): Xaa is C or S

SEQ ID NO: 42266 - protein, 34 aa, Artificial Sequence; identical to SEQ ID NO: 4514
  Cyclic GFR-binding peptide
  MOD_RES (1), (3): Xaa is C or S

SEQ ID NO: 42267 - protein, 38 aa, Artificial Sequence; identical to SEQ ID NO: 4516
  Cyclic GFR-binding peptide
  MOD_RES (32), (32): Xaa is C or S

SEQ ID NO: 42268 - protein, 28 aa, Artificial Sequence
  Cyclic GFR-binding peptide
  MOD_RES (27), (28): Xaa is C or S
MYHYKLIKPTKGIKYLISIPSLDQSVXX

SEQ ID NO: 42269 - protein, 30 aa, Artificial Sequence
  Cyclic GFR-binding peptide
  MOD_RES (28), (29): Xaa is C or S
IMRHKRLIKPTKGIYYLISTASLDQSVXXP

SEQ ID NO: 42270 - protein, 32 aa, Artificial Sequence
  Cyclic GFR-binding peptide
  MOD_RES (28), (29): Xaa is C or S
MNYHYKLIVNNSSDKYLVSIPSLKTPAXXAKP

SEQ ID NO: 42271 - protein, 33 aa, Artificial Sequence
  Cyclic GFR-binding peptide
  MOD_RES (2), (4): Xaa is C or S
SXKXSKVVMRYKKLVKPTRGVFYLISIANLDQP

SEQ ID NO: 42272 - protein, 36 aa, Artificial Sequence; identical to SEQ ID NO: 4522
  Cyclic GFR-binding peptide
  MOD_RES (1), (1): Xaa is C or S

SEQ ID NO: 42273 - protein, 24 aa, Artificial Sequence
  Cyclic GFR-binding peptide
KVVMYHYKLVKPTRGVKYLISIPS

SEQ ID NO: 42274 - protein, 32 aa, Artificial Sequence
  Cyclic GFR-binding peptide
  MOD_RES (1), (3): Xaa is C or S
XGXSRVVMNQYNKLIVNSSDDLYLVSIASLKT

SEQ ID NO: 42275 - protein, 33 aa, Artificial Sequence; identical to SEQ ID NO: 4523
  Cyclic GFR-binding peptide
  MOD_RES (1), (33): Xaa is C or S

SEQ ID NO: 42276 - protein, 29 aa, Artificial Sequence
  Cyclic GFR-binding peptide
SKVVMRYKKLVKPTRGVFYLISIANLDQP

SEQ ID NO: 42277 - protein, 29 aa, Artificial Sequence
  Cyclic GFR-binding peptide
KVVMRHKRLVKPTRGVYYLISTASLDQPV

SEQ ID NO: 42278 - protein, 34 aa, Artificial Sequence; identical to SEQ ID NO: 4525
  Cyclic GFR-binding peptide
  MOD_RES (1), (3), (34): Xaa is C or S

SEQ ID NO: 42279 - protein, 28 aa, Artificial Sequence
  Cyclic GFR-binding peptide
KVVMRHKRLVKPTRGVYYLISTASLDQP

SEQ ID NO: 42280 - protein, 39 aa, Artificial Sequence; identical to SEQ ID NO: 4527
  Cyclic GFR-binding peptide
  MOD_RES (2), (33), (34): Xaa is C or S

SEQ ID NO: 42281 - protein, 41 aa, Artificial Sequence; identical to SEQ ID NO: 4528
  Cyclic GFR-binding peptide
  MOD_RES (2), (4), (35), (36): Xaa is C or S

SEQ ID NO: 42282 - protein, 39 aa, Artificial Sequence; identical to SEQ ID NO: 4529
  Cyclic GFR-binding peptide
  MOD_RES (1), (3): Xaa is C or S

SEQ ID NO: 42283 - protein, 28 aa, Artificial Sequence
  Cyclic GFR-binding peptide
  MOD_RES (26), (27): Xaa is C or S
RHKRLVVKENEDYYLMSTASLETPVXXA

SEQ ID NO: 42284 - protein, 32 aa, Artificial Sequence
  Cyclic GFR-binding peptide
  MOD_RES (29), (30): Xaa is C or S
VIMQYNKLVKPKRGVLYLISIASLAQPVXXPA

SEQ ID NO: 42285 - protein, 36 aa, Artificial Sequence; identical to SEQ ID NO: 4534
  Cyclic GFR-binding peptide
  MOD_RES (1), (33), (34): Xaa is C or S

SEQ ID NO: 42286 - protein, 30 aa, Artificial Sequence
  Cyclic GFR-binding peptide
EAVSMGEQYNKLTPVGMDDLYLVSIASLKT

SEQ ID NO: 42287 - protein, 36 aa, Artificial Sequence; identical to SEQ ID NO: 4536
  Cyclic GFR-binding peptide
  MOD_RES (31), (32): Xaa is C or S

SEQ ID NO: 42288 - protein, 29 aa, Artificial Sequence
  Cyclic GFR-binding peptide
VVMNQYNKLIVNNSSDLYLVSIASLKTPA

SEQ ID NO: 42289 - protein, 30 aa, Artificial Sequence
  Cyclic GFR-binding peptide
  MOD_RES (30), (30): Xaa is C or S
VVMEYHYKLVVKDYEDKYLMSIPSLETPVX

SEQ ID NO: 42290 - protein, 25 aa, Artificial Sequence
  Cyclic GFR-binding peptide
NRHKRLIVNSSDDYYLVSTASLKTP

SEQ ID NO: 42291 - protein, 35 aa, Artificial Sequence
  Cyclic GFR-binding peptide
  MOD_RES (1), (3): Xaa is C or S
XKXALHDELTRYKKLFIPKKRVIEFYLVSIANLQV

SEQ ID NO: 42292 - protein, 33 aa, Artificial Sequence
  Cyclic GFR-binding peptide
  MOD_RES (29), (30): Xaa is C or S
VVMYHYKLVKPTRGVKYLISIPSLDQPVXXPSA

SEQ ID NO: 42293 - protein, 33 aa, Artificial Sequence; identical to SEQ ID NO: 4540
  Cyclic GFR-binding peptide
  MOD_RES (32), (33): Xaa is C or S

SEQ ID NO: 42294 - protein, 26 aa, Artificial Sequence
  Cyclic GFR-binding peptide
ERHKRLTPVGMDDYYLVSTASLKTPV

SEQ ID NO: 42295 - protein, 32 aa, Artificial Sequence
  Cyclic GFR-binding peptide
  MOD_RES (26), (27): Xaa is C or S
RHKRLVVKENEDYYLMSTASLETPVXXAKPIK

SEQ ID NO: 42296 - protein, 33 aa, Artificial Sequence
  Cyclic GFR-binding peptide
  MOD_RES (2), (4): Xaa is C or S
HXGXAKVVMNYHYKLIVNNSSDKYLVSIPSLKT

SEQ ID NO: 42297 - protein, 34 aa, Artificial Sequence; identical to SEQ ID NO: 4543
  Cyclic GFR-binding peptide
  MOD_RES (2), (33), (34): Xaa is C or S

SEQ ID NO: 42298 - protein, 37 aa, Artificial Sequence; identical to SEQ ID NO: 4544
  Cyclic GFR-binding peptide
  MOD_RES (2), (2): Xaa is C or S

SEQ ID NO: 42299 - protein, 30 aa, Artificial Sequence
  Cyclic GFR-binding peptide
  MOD_RES (30), (30): Xaa is C or S
RVIMQYNKLVKPKRGVLYLISIASLAQPVX

SEQ ID NO: 42300 - protein, 32 aa, Artificial Sequence
  Cyclic GFR-binding peptide
DELTRYKKLFIPKKRVIEFYLVSIANLQVQTP

SEQ ID NO: 42301 - protein, 33 aa, Artificial Sequence
  Cyclic GFR-binding peptide
  MOD_RES (29), (30): Xaa is C or S
VVMRHKRLVKPTRGVYYLISTASLDQPVXXPSA

SEQ ID NO: 42302 - protein, 30 aa, Artificial Sequence
  Cyclic GFR-binding peptide
  MOD_RES (28), (29): Xaa is C or S
MDRYKKLVVKENEDFYLMSIANLETPVXXA

SEQ ID NO: 42303 - protein, 27 aa, Artificial Sequence
  Cyclic GFR-binding peptide
SRVIMQYNKLVKPKRGVLYLISIASLA

SEQ ID NO: 42304 - protein, 32 aa, Artificial Sequence
  Cyclic GFR-binding peptide
  MOD_RES (28), (29): Xaa is C or S
GERHKRLTPVGMDDYYLVSTASLKTPVXXAKG

SEQ ID NO: 42305 - protein, 35 aa, Artificial Sequence; identical to SEQ ID NO: 4551
  Cyclic GFR-binding peptide
  MOD_RES (35), (35): Xaa is C or S

SEQ ID NO: 42306 - protein, 33 aa, Artificial Sequence
  Cyclic GFR-binding peptide
  MOD_RES (30), (31): Xaa is C or S
VVMDRHKRLVVKENEDYYLMSTASLETPVXXAK

SEQ ID NO: 42307 - protein, 26 aa, Artificial Sequence
  Cyclic GFR-binding peptide
VMDRHKRLVVKENEDYYLMSTASLET

SEQ ID NO: 42308 - protein, 21 aa, Artificial Sequence
  Cyclic GFR-binding peptide
ERYKKLVVKDYEDFYLMSIAN

SEQ ID NO: 42309 - protein, 25 aa, Artificial Sequence
  Cyclic GFR-binding peptide
MQYNKLIKPTKGILYLISIASLDQS

SEQ ID NO: 42310 - protein, 33 aa, Artificial Sequence
  Cyclic GFR-binding peptide
  MOD_RES (29), (30): Xaa is C or S
VMERYKKLVVKDYEDFYLMSIANLETPVXXAKP

SEQ ID NO: 42311 - protein, 29 aa, Artificial Sequence
  Cyclic GFR-binding peptide
  MOD_RES (28), (29): Xaa is C or S
MDRHKRLVVKENEDYYLMSTASLETPVXX

SEQ ID NO: 42312 - protein, 36 aa, Artificial Sequence; identical to SEQ ID NO: 4553
  Cyclic GFR-binding peptide
  MOD_RES (1), (33), (34): Xaa is C or S

SEQ ID NO: 42313 - protein, 35 aa, Artificial Sequence; identical to SEQ ID NO: 4554
  Cyclic GFR-binding peptide
  MOD_RES (1), (33), (34): Xaa is C or S

SEQ ID NO: 42314 - protein, 23 aa, Artificial Sequence
  Cyclic GFR-binding peptide
VIMQYNKLIKPTKGILYLISIAS

SEQ ID NO: 42315 - protein, 29 aa, Artificial Sequence
  Cyclic GFR-binding peptide
EVVMEYHYKLVVKDYEDKYLMSIPSLETP

SEQ ID NO: 42316 - protein, 43 aa, Artificial Sequence; identical to SEQ ID NO: 4556
  Cyclic GFR-binding peptide
  MOD_RES (1), (3), (40): Xaa is C or S

SEQ ID NO: 42317 - protein, 27 aa, Artificial Sequence
  Cyclic GFR-binding peptide
  MOD_RES (26), (26): Xaa is C or S
YHYKLIVNSSDDKYLVSIPSLKTPAXT

SEQ ID NO: 42318 - protein, 21 aa, Artificial Sequence
  Cyclic GFR-binding peptide
RYKKLVVKENEDFYLMSIANL

SEQ ID NO: 42319 - protein, 29 aa, Artificial Sequence
  Cyclic GFR-binding peptide
  MOD_RES (27), (28): Xaa is C or S
MQYNKLVKPKRGVLYLISIASLAQPVXXP

SEQ ID NO: 42320 - protein, 30 aa, Artificial Sequence
  Cyclic GFR-binding peptide
  MOD_RES (28), (29): Xaa is C or S
VMRHKRLVKPTRGVYYLISTASLDQPVXXP

SEQ ID NO: 42321 - protein, 31 aa, Artificial Sequence; identical to SEQ ID NO: 4557
  Cyclic GFR-binding peptide

SEQ ID NO: 42322 - protein, 33 aa, Artificial Sequence
  Cyclic GFR-binding peptide
  MOD_RES (1), (3): Xaa is C or S
XGXAKVVMNQYNKLIVNNSSDLYLVSIASLKTP

SEQ ID NO: 42323 - protein, 28 aa, Artificial Sequence
  Cyclic GFR-binding peptide
  MOD_RES (26), (27): Xaa is C or S
RYKKLVVKDYEDFYLMSIANLETPVXXA

SEQ ID NO: 42324 - protein, 35 aa, Artificial Sequence
  Cyclic GFR-binding peptide
  MOD_RES (30), (31): Xaa is C or S
RVIMRYKKLVKPKRGVFYLISIANLAQPVXXPAAS

SEQ ID NO: 42325 - protein, 27 aa, Artificial Sequence
  Cyclic GFR-binding peptide
  MOD_RES (27), (27): Xaa is C or S
ERYKKLVVKDYEDFYLMSIANLETPVX

SEQ ID NO: 42326 - protein, 33 aa, Artificial Sequence; identical to SEQ ID NO: 4558
  Cyclic GFR-binding peptide
  MOD_RES (2), (33): Xaa is C or S

SEQ ID NO: 42327 - protein, 21 aa, Artificial Sequence
  Cyclic GFR-binding peptide
YHYKLVVKDYEDKYLMSIPSL

SEQ ID NO: 42328 - protein, 38 aa, Artificial Sequence; identical to SEQ ID NO: 4559
  Cyclic GFR-binding peptide
  MOD_RES (1), (3), (35): Xaa is C or S

SEQ ID NO: 42329 - protein, 34 aa, Artificial Sequence
  Cyclic GFR-binding peptide
  MOD_RES (1), (3): Xaa is C or S
XKXALHDELTQYNKLFIPKKRVIELYLVSIASLQ

SEQ ID NO: 42330 - protein, 23 aa, Artificial Sequence
  Cyclic GFR-binding peptide
MERHKRLVVKDYEDYYLMSTASL

SEQ ID NO: 42331 - protein, 33 aa, Artificial Sequence; identical to SEQ ID NO: 4560
  Cyclic GFR-binding peptide
  MOD_RES (32), (33): Xaa is C or S

SEQ ID NO: 42332 - protein, 35 aa, Artificial Sequence; identical to SEQ ID NO: 4561
  Cyclic GFR-binding peptide
  MOD_RES (1), (33): Xaa is C or S

SEQ ID NO: 42333 - protein, 26 aa, Artificial Sequence
  Cyclic GFR-binding peptide
VIMQYNKLIKPTKGILYLISIASLDQ

SEQ ID NO: 42334 - protein, 33 aa, Artificial Sequence
  Cyclic GFR-binding peptide
  MOD_RES (27), (28): Xaa is C or S
NQYNKLIVNSSDDLYLVSIASLKTPAXXPKPVY

SEQ ID NO: 42335 - protein, 29 aa, Artificial Sequence
  Cyclic GFR-binding peptide
  MOD_RES (29), (29): Xaa is C or S
VVMRHKRLVKPTRGVYYLISTASLDQPVX

SEQ ID NO: 42336 - protein, 37 aa, Artificial Sequence; identical to SEQ ID NO: 4562
  Cyclic GFR-binding peptide
  MOD_RES (2), (34), (35): Xaa is C or S

SEQ ID NO: 42337 - protein, 36 aa, Artificial Sequence; identical to SEQ ID NO: 4563
  Cyclic GFR-binding peptide
  MOD_RES (2), (34), (35): Xaa is C or S

SEQ ID NO: 42338 - protein, 34 aa, Artificial Sequence; identical to SEQ ID NO: 4564
  Cyclic GFR-binding peptide
  MOD_RES (2), (4): Xaa is C or S

SEQ ID NO: 42339 - protein, 35 aa, Artificial Sequence; identical to SEQ ID NO: 4565
  Cyclic GFR-binding peptide
  MOD_RES (1), (32), (33): Xaa is C or S

SEQ ID NO: 42340 - protein, 38 aa, Artificial Sequence; identical to SEQ ID NO: 4570
  Cyclic GFR-binding peptide
  MOD_RES (1), (32), (33): Xaa is C or S

SEQ ID NO: 42341 - protein, 33 aa, Artificial Sequence; identical to SEQ ID NO: 4571
  Cyclic GFR-binding peptide
  MOD_RES (1), (32), (33): Xaa is C or S

SEQ ID NO: 42342 - protein, 31 aa, Artificial Sequence
  Cyclic GFR-binding peptide
  MOD_RES (29), (30): Xaa is C or S
MGERYKKLTPVGMDDFYLVSIANLKTPVXXA

SEQ ID NO: 42343 - protein, 26 aa, Artificial Sequence
  Cyclic GFR-binding peptide
NQYNKLIVNSSDDLYLVSIASLKTPA

SEQ ID NO: 42344 - protein, 31 aa, Artificial Sequence
  Cyclic GFR-binding peptide
ALHDELTRHKRLFIPKKRVIEYYLVSTASLQ

SEQ ID NO: 42345 - protein, 30 aa, Artificial Sequence
  Cyclic GFR-binding peptide
VSMGERHKRLTPVGMDDYYLVSTASLKTPV

SEQ ID NO: 42346 - protein, 28 aa, Artificial Sequence
  Cyclic GFR-binding peptide
  MOD_RES (28), (28): Xaa is C or S
VMQYNKLVKPTRGVLYLISIASLDQPVX

SEQ ID NO: 42347 - protein, 31 aa, Artificial Sequence
  Cyclic GFR-binding peptide
  MOD_RES (26), (27): Xaa is C or S
RYKKLVKPKRGVFYLISIANLAQPVXXPAAS

SEQ ID NO: 42348 - protein, 21 aa, Artificial Sequence
  Cyclic GFR-binding peptide
YHYKLIVNNSSDKYLVSIPSL

SEQ ID NO: 42349 - protein, 36 aa, Artificial Sequence; identical to SEQ ID NO: 4574
  Cyclic GFR-binding peptide
  MOD_RES (2), (4), (35), (36): Xaa is C or S

SEQ ID NO: 42350 - protein, 26 aa, Artificial Sequence
  Cyclic GFR-binding peptide
AKVVMNQYNKLIVNNSSDLYLVSIAS

SEQ ID NO: 42351 - protein, 30 aa, Artificial Sequence
  Cyclic GFR-binding peptide
  MOD_RES (2), (2): Xaa is C or S
GXGEVVMERYKKLVVKDYEDFYLMSIANLE

SEQ ID NO: 42352 - protein, 35 aa, Artificial Sequence
  Cyclic GFR-binding peptide
  MOD_RES (31), (31): Xaa is C or S
TRYKKLFIPKKRVIEFYLVSIANLQVQTPRXQVNR

SEQ ID NO: 42353 - protein, 36 aa, Artificial Sequence
  Cyclic GFR-binding peptide
  MOD_RES (32), (33): Xaa is C or S
AVSMGERHKRLTPVGMDDYYLVSTASLKTPVXXAKG

SEQ ID NO: 42354 - protein, 36 aa, Artificial Sequence; identical to SEQ ID NO: 4575
  Cyclic GFR-binding peptide
  MOD_RES (2), (4), (36): Xaa is C or S

SEQ ID NO: 42355 - protein, 24 aa, Artificial Sequence
  Cyclic GFR-binding peptide
YHYKLIVNSSDDKYLVSIPSLQTP

SEQ ID NO: 42356 - protein, 34 aa, Artificial Sequence
  Cyclic GFR-binding peptide
  MOD_RES (30), (31): Xaa is C or S
VVMNRHKRLIVNSSDDYYLVSTASLQTPAXXPKP

SEQ ID NO: 42357 - protein, 31 aa, Artificial Sequence
  Cyclic GFR-binding peptide
  MOD_RES (29), (30): Xaa is C or S
VVMRYKKLVKPTRGVFYLISIANLDQPVXXP

SEQ ID NO: 42358 - protein, 42 aa, Artificial Sequence; identical to SEQ ID NO: 4576
  Cyclic GFR-binding peptide
  MOD_RES (2), (4), (41): Xaa is C or S

SEQ ID NO: 42359 - protein, 30 aa, Artificial Sequence
  Cyclic GFR-binding peptide
  MOD_RES (30), (30): Xaa is C or S
VVMERHKRLVVKDYEDYYLMSTASLETPVX

SEQ ID NO: 42360 - protein, 27 aa, Artificial Sequence
  Cyclic GFR-binding peptide
  MOD_RES (1), (1): Xaa is C or S
XARVVMNQYNKLIVNSSDDLYLVSIAS

SEQ ID NO: 42361 - protein, 30 aa, Artificial Sequence
  Cyclic GFR-binding peptide
  MOD_RES (26), (27): Xaa is C or S
QYNKLIVNSSDDLYLVSIASLKTPAXXPKP

SEQ ID NO: 42362 - protein, 27 aa, Artificial Sequence
  Cyclic GFR-binding peptide
RVIMYHYKLVKPKRGVKYLISIPSLAQ

SEQ ID NO: 42363 - protein, 36 aa, Artificial Sequence
  Cyclic GFR-binding peptide
  MOD_RES (30), (31): Xaa is C or S
VVMERYKKLVVKDYEDFYLMSIANLETPVXXAKPIS

SEQ ID NO: 42364 - protein, 26 aa, Artificial Sequence
  Cyclic GFR-binding peptide
VVMNQYNKLIVNSSDDLYLVSIASLK

SEQ ID NO: 42365 - protein, 33 aa, Artificial Sequence
  Cyclic GFR-binding peptide
  MOD_RES (2), (4): Xaa is C or S
HXGXARVVMNYHYKLIVNSSDDKYLVSIPSLQT

SEQ ID NO: 42366 - protein, 26 aa, Artificial Sequence
  Cyclic GFR-binding peptide
TRHKRLFIPKKRVIEYYLVSTASLQV

SEQ ID NO: 42367 - protein, 38 aa, Artificial Sequence; identical to SEQ ID NO: 4584
  Cyclic GFR-binding peptide
  MOD_RES (2), (4), (35), (36): Xaa is C or S

SEQ ID NO: 42368 - protein, 24 aa, Artificial Sequence
  Cyclic GFR-binding peptide
RHKRLVVKENEDYYLMSTASLETP

SEQ ID NO: 42369 - protein, 33 aa, Artificial Sequence
  Cyclic GFR-binding peptide
  MOD_RES (29), (30): Xaa is C or S
VMNRHKRLIVNSSDDYYLVSTASLKTPAXXPKP

SEQ ID NO: 42370 - protein, 31 aa, Artificial Sequence
  Cyclic GFR-binding peptide
ALHDELTQYNKLFIPKKRVIELYLVSIASLQ

SEQ ID NO: 42371 - protein, 25 aa, Artificial Sequence
  Cyclic GFR-binding peptide
VSMGERYKKLTPVGMDDFYLVSIAN

SEQ ID NO: 42372 - protein, 33 aa, Artificial Sequence
  Cyclic GFR-binding peptide
  MOD_RES (31), (31): Xaa is C or S
TYHYKLFIPKKRVIEKYLVSIPSLQVQTPRXQV

SEQ ID NO: 42373 - protein, 38 aa, Artificial Sequence; identical to SEQ ID NO: 4590
  Cyclic GFR-binding peptide
  MOD_RES (2), (33), (34): Xaa is C or S

SEQ ID NO: 42374 - protein, 27 aa, Artificial Sequence
  Cyclic GFR-binding peptide
ARVVMNRHKRLIVNSSDDYYLVSTASL

SEQ ID NO: 42375 - protein, 26 aa, Artificial Sequence
  Cyclic GFR-binding peptide
KVIMYHYKLIKPTKGIKYLISIPSLD

SEQ ID NO: 42376 - protein, 28 aa, Artificial Sequence
  Cyclic GFR-binding peptide
DELTRYKKLFIPKKRVIEFYLVSIANLQ

SEQ ID NO: 42377 - protein, 24 aa, Artificial Sequence
  Cyclic GFR-binding peptide
MYHYKLVKPTRGVKYLISIPSLDQ

SEQ ID NO: 42378 - protein, 36 aa, Artificial Sequence; identical to SEQ ID NO: 4593
  Cyclic GFR-binding peptide
  MOD_RES (1), (3), (35), (36): Xaa is C or S

SEQ ID NO: 42379 - protein, 31 aa, Artificial Sequence
  Cyclic GFR-binding peptide
  MOD_RES (29), (30): Xaa is C or S
VMERYKKLVVKDYEDFYLMSIANLETPVXXA

SEQ ID NO: 42380 - protein, 42 aa, Artificial Sequence; identical to SEQ ID NO: 4594
  Cyclic GFR-binding peptide
  MOD_RES (2), (39): Xaa is C or S

SEQ ID NO: 42381 - protein, 28 aa, Artificial Sequence
  Cyclic GFR-binding peptide
VVMRHKRLVKPTRGVYYLISTASLDQPV

SEQ ID NO: 42382 - protein, 34 aa, Artificial Sequence; identical to SEQ ID NO: 4595
  Cyclic GFR-binding peptide

SEQ ID NO: 42383 - protein, 33 aa, Artificial Sequence
  Cyclic GFR-binding peptide
  MOD_RES (28), (29): Xaa is C or S
IMYHYKLIKPTKGIKYLISIPSLDQSVXXPSAS

SEQ ID NO: 42384 - protein, 30 aa, Artificial Sequence
  Cyclic GFR-binding peptide
  MOD_RES (28), (29): Xaa is C or S
IMQYNKLVKPKRGVLYLISIASLAQPVXXP

SEQ ID NO: 42385 - protein, 35 aa, Artificial Sequence; identical to SEQ ID NO: 4597
  Cyclic GFR-binding peptide
  MOD_RES (2), (34), (35): Xaa is C or S

SEQ ID NO: 42386 - protein, 32 aa, Artificial Sequence
  Cyclic GFR-binding peptide
  MOD_RES (30), (31): Xaa is C or S
VVMDYHYKLVVKENEDKYLMSIPSLETPVXXA

SEQ ID NO: 42387 - protein, 29 aa, Artificial Sequence
  Cyclic GFR-binding peptide
AAAAAAAAARHKRLIKPTKGIYYLISTAS

SEQ ID NO: 42388 - protein, 27 aa, Artificial Sequence
  Cyclic GFR-binding peptide
SRVVMNRHKRLIVNSSDDYYLVSTASL

SEQ ID NO: 42389 - protein, 39 aa, Artificial Sequence; identical to SEQ ID NO: 4598
  Cyclic GFR-binding peptide
  MOD_RES (2), (4), (36), (37): Xaa is C or S

SEQ ID NO: 42390 - protein, 31 aa, Artificial Sequence
  Cyclic GFR-binding peptide
  MOD_RES (30), (31): Xaa is C or S
RVIMQYNKLVKPKRGVLYLISIASLAQPVXX

SEQ ID NO: 42391 - protein, 31 aa, Artificial Sequence; identical to SEQ ID NO: 4599
  Cyclic GFR-binding peptide
  MOD_RES (31), (31): Xaa is C or S

SEQ ID NO: 42392 - protein, 31 aa, Artificial Sequence
  Cyclic GFR-binding peptide
  MOD_RES (28), (29): Xaa is C or S
IMQYNKLVKPKRGVLYLISIASLAQPVXXPA

SEQ ID NO: 42393 - protein, 27 aa, Artificial Sequence
  Cyclic GFR-binding peptide
  MOD_RES (2), (2): Xaa is C or S
KXSKVVMYHYKLVKPTRGVKYLISIPS

SEQ ID NO: 42394 - protein, 31 aa, Artificial Sequence
  Cyclic GFR-binding peptide
  MOD_RES (2), (2): Xaa is C or S
GXAKVVMNRYKKLIVNNSSDFYLVSIANLKT

SEQ ID NO: 42395 - protein, 34 aa, Artificial Sequence
  Cyclic GFR-binding peptide
  MOD_RES (31), (31): Xaa is C or S
TQYNKLFIPKKRVIELYLVSIASLQVQTPRXQVN

SEQ ID NO: 42396 - protein, 27 aa, Artificial Sequence
  Cyclic GFR-binding peptide
  MOD_RES (1), (1): Xaa is C or S
XGEVVMDRHKRLVVKENEDYYLMSTAS

SEQ ID NO: 42397 - protein, 39 aa, Artificial Sequence; identical to SEQ ID NO: 4600
  Cyclic GFR-binding peptide
  MOD_RES (1), (3), (35), (36): Xaa is C or S

SEQ ID NO: 42398 - protein, 23 aa, Artificial Sequence
  Cyclic GFR-binding peptide
MYHYKLVKPTRGVKYLISIPSLD

SEQ ID NO: 42399 - protein, 33 aa, Artificial Sequence; identical to SEQ ID NO: 4601
  Cyclic GFR-binding peptide
  MOD_RES (31), (32): Xaa is C or S

SEQ ID NO: 42400 - protein, 37 aa, Artificial Sequence; identical to SEQ ID NO: 4602
  Cyclic GFR-binding peptide
  MOD_RES (1), (3), (34), (35): Xaa is C or S

SEQ ID NO: 42401 - protein, 31 aa, Artificial Sequence
  Cyclic GFR-binding peptide
  MOD_RES (2), (2): Xaa is C or S
GXARVVMNQYNKLIVNSSDDLYLVSIASLQT

SEQ ID NO: 42402 - protein, 27 aa, Artificial Sequence
  Cyclic GFR-binding peptide
  MOD_RES (26), (27): Xaa is C or S
RYKKLVVKDYEDFYLMSIANLETPVXX

SEQ ID NO: 42403 - protein, 39 aa, Artificial Sequence; identical to SEQ ID NO: 4603
  Cyclic GFR-binding peptide
  MOD_RES (1), (38): Xaa is C or S

SEQ ID NO: 42404 - protein, 37 aa, Artificial Sequence; identical to SEQ ID NO: 4604
  Cyclic GFR-binding peptide
  MOD_RES (1), (3), (36), (37): Xaa is C or S

SEQ ID NO: 42405 - protein, 33 aa, Artificial Sequence
  Cyclic GFR-binding peptide
  MOD_RES (28), (29): Xaa is C or S
MNYHYKLIVNSSDDKYLVSIPSLQTPAXXPKPV

SEQ ID NO: 42406 - protein, 27 aa, Artificial Sequence
  Cyclic GFR-binding peptide
SRVIMYHYKLVKPKRGVKYLISIPSLA

SEQ ID NO: 42407 - protein, 24 aa, Artificial Sequence
  Cyclic GFR-binding peptide
RVIMQYNKLVKPKRGVLYLISIAS

SEQ ID NO: 42408 - protein, 29 aa, Artificial Sequence
  Cyclic GFR-binding peptide
  MOD_RES (2), (4): Xaa is C or S
SXKXSKVIMQYNKLIKPTKGILYLISIAS

SEQ ID NO: 42409 - protein, 37 aa, Artificial Sequence; identical to SEQ ID NO: 4607
  Cyclic GFR-binding peptide
  MOD_RES (1), (32), (33): Xaa is C or S

SEQ ID NO: 42410 - protein, 22 aa, Artificial Sequence
  Cyclic GFR-binding peptide
YHYKLVKPKRGVKYLISIPSLA

SEQ ID NO: 42411 - protein, 37 aa, Artificial Sequence; identical to SEQ ID NO: 4608
  Cyclic GFR-binding peptide
  MOD_RES (2), (4), (37): Xaa is C or S

SEQ ID NO: 42412 - protein, 30 aa, Artificial Sequence
  Cyclic GFR-binding peptide
AVSMGEQYNKLTPVGMDDLYLVSIASLKTP

SEQ ID NO: 42413 - protein, 33 aa, Artificial Sequence
  Cyclic GFR-binding peptide
  MOD_RES (29), (29): Xaa is C or S
VMNQYNKLIVNSSDDLYLVSIASLKTPAXTPKT

SEQ ID NO: 42414 - protein, 37 aa, Artificial Sequence; identical to SEQ ID NO: 4609
  Cyclic GFR-binding peptide
  MOD_RES (31), (32): Xaa is C or S

SEQ ID NO: 42415 - protein, 36 aa, Artificial Sequence; identical to SEQ ID NO: 4612
  Cyclic GFR-binding peptide
  MOD_RES (2), (34), (35): Xaa is C or S

SEQ ID NO: 42416 - protein, 36 aa, Artificial Sequence
  Cyclic GFR-binding peptide
  MOD_RES (30), (31): Xaa is C or S
VVMNQYNKLIVNSSDDLYLVSIASLKTPAXXPKPVY

SEQ ID NO: 42417 - protein, 40 aa, Artificial Sequence; identical to SEQ ID NO: 4614
  Cyclic GFR-binding peptide
  MOD_RES (2), (4): Xaa is C or S

SEQ ID NO: 42418 - protein, 28 aa, Artificial Sequence
  Cyclic GFR-binding peptide
  MOD_RES (1), (1): Xaa is C or S
XEAVSMGERHKRLTPVGMDDYYLVSTAS

SEQ ID NO: 42419 - protein, 26 aa, Artificial Sequence
  Cyclic GFR-binding peptide
NYHYKLIVNNSSDKYLVSIPSLKTPA

SEQ ID NO: 42420 - protein, 31 aa, Artificial Sequence
  Cyclic GFR-binding peptide
  MOD_RES (29), (30): Xaa is C or S
VMNYHYKLIVNSSDDKYLVSIPSLKTPAXXP

SEQ ID NO: 42421 - protein, 28 aa, Artificial Sequence
  Cyclic GFR-binding peptide
AVSMGEQYNKLTPVGMDDLYLVSIASLK

SEQ ID NO: 42422 - protein, 27 aa, Artificial Sequence
  Cyclic GFR-binding peptide
SKVIMRHKRLIKPTKGIYYLISTASLD

SEQ ID NO: 42423 - protein, 34 aa, Artificial Sequence; identical to SEQ ID NO: 4619
  Cyclic GFR-binding peptide
  MOD_RES (1), (33): Xaa is C or S

SEQ ID NO: 42424 - protein, 32 aa, Artificial Sequence
  Cyclic GFR-binding peptide
  MOD_RES (2), (4): Xaa is C or S
RXGXGEVVMDRYKKLVVKENEDFYLMSIANLE

SEQ ID NO: 42425 - protein, 33 aa, Artificial Sequence; identical to SEQ ID NO: 4621
  Cyclic GFR-binding peptide
  MOD_RES (32), (32): Xaa is C or S

SEQ ID NO: 42426 - protein, 33 aa, Artificial Sequence; identical to SEQ ID NO: 4622
  Cyclic GFR-binding peptide
  MOD_RES (31), (32): Xaa is C or S

SEQ ID NO: 42427 - protein, 40 aa, Artificial Sequence; identical to SEQ ID NO: 4623
  Cyclic GFR-binding peptide
  MOD_RES (2), (4), (37), (38): Xaa is C or S

SEQ ID NO: 42428 - protein, 32 aa, Artificial Sequence; identical to SEQ ID NO: 4624
  Cyclic GFR-binding peptide
  MOD_RES (32), (32): Xaa is C or S

SEQ ID NO: 42429 - protein, 28 aa, Artificial Sequence
  Cyclic GFR-binding peptide
  MOD_RES (28), (28): Xaa is C or S
MDRYKKLVVKENEDFYLMSIANLETPVX

SEQ ID NO: 42430 - protein, 36 aa, Artificial Sequence; identical to SEQ ID NO: 4625
  Cyclic GFR-binding peptide
  MOD_RES (32), (32): Xaa is C or S

SEQ ID NO: 42431 - protein, 30 aa, Artificial Sequence
  Cyclic GFR-binding peptide
  MOD_RES (28), (29): Xaa is C or S
MNYHYKLIVNSSDDKYLVSIPSLQTPAXXP

SEQ ID NO: 42432 - protein, 30 aa, Artificial Sequence
  Cyclic GFR-binding peptide
  MOD_RES (1), (1): Xaa is C or S
XSKVVMQYNKLVKPTRGVLYLISIASLDQP

SEQ ID NO: 42433 - protein, 28 aa, Artificial Sequence
  Cyclic GFR-binding peptide
RVIMRHKRLVKPKRGVYYLISTASLAQP

SEQ ID NO: 42434 - protein, 27 aa, Artificial Sequence
  Cyclic GFR-binding peptide
VVMERYKKLVVKDYEDFYLMSIANLET

SEQ ID NO: 42435 - protein, 37 aa, Artificial Sequence; identical to SEQ ID NO: 4628
  Cyclic GFR-binding peptide
  MOD_RES (31), (32): Xaa is C or S

SEQ ID NO: 42436 - protein, 32 aa, Artificial Sequence
  Cyclic GFR-binding peptide
  MOD_RES (1), (1): Xaa is C or S
XALHDELTYHYKLFIPKKRVIEKYLVSIPSLQ

SEQ ID NO: 42437 - protein, 35 aa, Artificial Sequence; identical to SEQ ID NO: 4629
  Cyclic GFR-binding peptide
  MOD_RES (1), (3), (35): Xaa is C or S

SEQ ID NO: 42438 - protein, 29 aa, Artificial Sequence
  Cyclic GFR-binding peptide
  MOD_RES (26), (27): Xaa is C or S
RHKRLVKPKRGVYYLISTASLAQPVXXPA

SEQ ID NO: 42439 - protein, 37 aa, Artificial Sequence; identical to SEQ ID NO: 4630
  Cyclic GFR-binding peptide
  MOD_RES (35), (35): Xaa is C or S

SEQ ID NO: 42440 - protein, 38 aa, Artificial Sequence; identical to SEQ ID NO: 4631
  Cyclic GFR-binding peptide
  MOD_RES (2), (4), (37), (38): Xaa is C or S

SEQ ID NO: 42441 - protein, 42 aa, Artificial Sequence; identical to SEQ ID NO: 4632
  Cyclic GFR-binding peptide
  MOD_RES (1), (3), (36), (37): Xaa is C or S

SEQ ID NO: 42442 - protein, 34 aa, Artificial Sequence; identical to SEQ ID NO: 4633
  Cyclic GFR-binding peptide
  MOD_RES (32), (33): Xaa is C or S

SEQ ID NO: 42443 - protein, 27 aa, Artificial Sequence
  Cyclic GFR-binding peptide
HDELTRYKKLFIPKKRVIEFYLVSIAN

SEQ ID NO: 42444 - protein, 30 aa, Artificial Sequence
  Cyclic GFR-binding peptide
  MOD_RES (29), (30): Xaa is C or S
VMERHKRLVVKDYEDYYLMSTASLETPVXX

SEQ ID NO: 42445 - protein, 23 aa, Artificial Sequence
  Cyclic GFR-binding peptide
VMNQYNKLIVNSSDDLYLVSIAS

SEQ ID NO: 42446 - protein, 37 aa, Artificial Sequence; identical to SEQ ID NO: 4635
  Cyclic GFR-binding peptide
  MOD_RES (32), (33): Xaa is C or S

SEQ ID NO: 42447 - protein, 36 aa, Artificial Sequence
  Cyclic GFR-binding peptide
  MOD_RES (2), (4): Xaa is C or S
EXKXALHDELTRHKRLFIPKKRVIEYYLVSTASLQV

SEQ ID NO: 42448 - protein, 43 aa, Artificial Sequence; identical to SEQ ID NO: 4636
  Cyclic GFR-binding peptide
  MOD_RES (1), (3), (40): Xaa is C or S

SEQ ID NO: 42449 - protein, 33 aa, Artificial Sequence
  Cyclic GFR-binding peptide
  MOD_RES (1), (3): Xaa is C or S
XGXAKVVMNYHYKLIVNNSSDKYLVSIPSLKTP

SEQ ID NO: 42450 - protein, 23 aa, Artificial Sequence
  Cyclic GFR-binding peptide
YHYKLVVKDYEDKYLMSIPSLET

SEQ ID NO: 42451 - protein, 31 aa, Artificial Sequence
  Cyclic GFR-binding peptide
LTQYNKLFIPKKRVIELYLVSIASLQVQTPR

SEQ ID NO: 42452 - protein, 31 aa, Artificial Sequence
  Cyclic GFR-binding peptide
  MOD_RES (1), (3): Xaa is C or S
XGXAKVVMNRYKKLIVNNSSDFYLVSIANLK

SEQ ID NO: 42453 - protein, 31 aa, Artificial Sequence
  Cyclic GFR-binding peptide
  MOD_RES (2), (2): Xaa is C or S
GXAKVVMNYHYKLIVNNSSDKYLVSIPSLKT

SEQ ID NO: 42454 - protein, 30 aa, Artificial Sequence
  Cyclic GFR-binding peptide
  MOD_RES (2), (4): Xaa is C or S
HXGXAKVVMNRYKKLIVNNSSDFYLVSIAN

SEQ ID NO: 42455 - protein, 32 aa, Artificial Sequence
  Cyclic GFR-binding peptide
  MOD_RES (30), (31): Xaa is C or S
VVMDRHKRLVVKENEDYYLMSTASLETPVXXA

SEQ ID NO: 42456 - protein, 32 aa, Artificial Sequence
  Cyclic GFR-binding peptide
  MOD_RES (2), (2): Xaa is C or S
GXGEVVMDYHYKLVVKENEDKYLMSIPSLETP

SEQ ID NO: 42457 - protein, 42 aa, Artificial Sequence; identical to SEQ ID NO: 4639
  Cyclic GFR-binding peptide
  MOD_RES (2), (4), (36), (37): Xaa is C or S

SEQ ID NO: 42458 - protein, 39 aa, Artificial Sequence; identical to SEQ ID NO: 4640
  Cyclic GFR-binding peptide
  MOD_RES (2), (39): Xaa is C or S

SEQ ID NO: 42459 - protein, 31 aa, Artificial Sequence
  Cyclic GFR-binding peptide
  MOD_RES (29), (30): Xaa is C or S
VMDYHYKLVVKENEDKYLMSIPSLETPVXXA

SEQ ID NO: 42460 - protein, 40 aa, Artificial Sequence; identical to SEQ ID NO: 4643
  Cyclic GFR-binding peptide
  MOD_RES (2), (34), (35): Xaa is C or S

SEQ ID NO: 42461 - protein, 30 aa, Artificial Sequence
  Cyclic GFR-binding peptide
  MOD_RES (29), (29): Xaa is C or S
VMNQYNKLIVNSSDDLYLVSIASLKTPAXT

SEQ ID NO: 42462 - protein, 31 aa, Artificial Sequence
  Cyclic GFR-binding peptide
LHDELTRYKKLFIPKKRVIEFYLVSIANLQV

SEQ ID NO: 42463 - protein, 30 aa, Artificial Sequence
  Cyclic GFR-binding peptide
ELTRHKRLFIPKKRVIEYYLVSTASLQVQT

SEQ ID NO: 42464 - protein, 35 aa, Artificial Sequence; identical to SEQ ID NO: 4645
  Cyclic GFR-binding peptide
  MOD_RES (1), (3), (35): Xaa is C or S

SEQ ID NO: 42465 - protein, 33 aa, Artificial Sequence
  Cyclic GFR-binding peptide
  MOD_RES (2), (4): Xaa is C or S
SXKXSKVIMRYKKLIKPTKGIFYLISIANLDQS

SEQ ID NO: 42466 - protein, 29 aa, Artificial Sequence
  Cyclic GFR-binding peptide
  MOD_RES (2), (2): Xaa is C or S
GXEAVSMGEQYNKLTPVGMDDLYLVSIAS

SEQ ID NO: 42467 - protein, 37 aa, Artificial Sequence
  Cyclic GFR-binding peptide
  MOD_RES (33), (33): Xaa is C or S
ELTRYKKLFIPKKRVIEFYLVSIANLQVQTPRXQVNR

SEQ ID NO: 42468 - protein, 22 aa, Artificial Sequence
  Cyclic GFR-binding peptide
ERHKRLTPVGMDDYYLVSTASL

SEQ ID NO: 42469 - protein, 26 aa, Artificial Sequence
  Cyclic GFR-binding peptide
MRYKKLIKPTKGIFYLISIANLDQSV

SEQ ID NO: 42470 - protein, 29 aa, Artificial Sequence
  Cyclic GFR-binding peptide
VVMNYHYKLIVNSSDDKYLVSIPSLQTPA

SEQ ID NO: 42471 - protein, 26 aa, Artificial Sequence
  Cyclic GFR-binding peptide
KVIMRHKRLIKPTKGIYYLISTASLD

SEQ ID NO: 42472 - protein, 32 aa, Artificial Sequence
  Cyclic GFR-binding peptide
  MOD_RES (30), (31): Xaa is C or S
KVIMRYKKLIKPTKGIFYLISIANLDQSVXXP

SEQ ID NO: 42473 - protein, 36 aa, Artificial Sequence; identical to SEQ ID NO: 4649
  Cyclic GFR-binding peptide
  MOD_RES (31), (32): Xaa is C or S

SEQ ID NO: 42474 - protein, 40 aa, Artificial Sequence; identical to SEQ ID NO: 4650
  Cyclic GFR-binding peptide
  MOD_RES (1), (34), (35): Xaa is C or S

SEQ ID NO: 42475 - protein, 20 aa, Artificial Sequence
  Cyclic GFR-binding peptide
YHYKLIVNNSSDKYLVSIPS

SEQ ID NO: 42476 - protein, 24 aa, Artificial Sequence
  Cyclic GFR-binding peptide
QYNKLIVNSSDDLYLVSIASLKTP

SEQ ID NO: 42477 - protein, 23 aa, Artificial Sequence
  Cyclic GFR-binding peptide
IMYHYKLIKPTKGIKYLISIPSL

SEQ ID NO: 42478 - protein, 33 aa, Artificial Sequence
  Cyclic GFR-binding peptide
  MOD_RES (30), (31): Xaa is C or S
VVMNQYNKLIVNNSSDLYLVSIASLKTPAXXAK

SEQ ID NO: 42479 - protein, 24 aa, Artificial Sequence
  Cyclic GFR-binding peptide
VMNYHYKLIVNSSDDKYLVSIPSL

SEQ ID NO: 42480 - protein, 36 aa, Artificial Sequence; identical to SEQ ID NO: 4654
  Cyclic GFR-binding peptide
  MOD_RES (31), (32): Xaa is C or S

SEQ ID NO: 42481 - protein, 28 aa, Artificial Sequence
  Cyclic GFR-binding peptide
EVVMEYHYKLVVKDYEDKYLMSIPSLET

SEQ ID NO: 42482 - protein, 32 aa, Artificial Sequence
  Cyclic GFR-binding peptide
ELTRHKRLFIPKKRVIEYYLVSTASLQVQTPR

SEQ ID NO: 42483 - protein, 29 aa, Artificial Sequence
  Cyclic GFR-binding peptide
AAAAAAAAARHKRLTPVGMDDYYLVSTAS

SEQ ID NO: 42484 - protein, 42 aa, Artificial Sequence; identical to SEQ ID NO: 4655
  Cyclic GFR-binding peptide
  MOD_RES (2), (4), (36), (37): Xaa is C or S

SEQ ID NO: 42485 - protein, 36 aa, Artificial Sequence; identical to SEQ ID NO: 4656
  Cyclic GFR-binding peptide
  MOD_RES (1), (33), (34): Xaa is C or S

SEQ ID NO: 42486 - protein, 29 aa, Artificial Sequence
  Cyclic GFR-binding peptide
ALHDELTQYNKLFIPKKRVIELYLVSIAS

SEQ ID NO: 42487 - protein, 28 aa, Artificial Sequence
  Cyclic GFR-binding peptide
  MOD_RES (1), (1): Xaa is C or S
XSKVIMYHYKLIKPTKGIKYLISIPSLD

SEQ ID NO: 42488 - protein, 28 aa, Artificial Sequence
  Cyclic GFR-binding peptide
RVVMNYHYKLIVNSSDDKYLVSIPSLQT

SEQ ID NO: 42489 - protein, 28 aa, Artificial Sequence
  Cyclic GFR-binding peptide
VMNRYKKLIVNNSSDFYLVSIANLKTPA

SEQ ID NO: 42490 - protein, 35 aa, Artificial Sequence; identical to SEQ ID NO: 4659
  Cyclic GFR-binding peptide
  MOD_RES (31), (31): Xaa is C or S

SEQ ID NO: 42491 - protein, 35 aa, Artificial Sequence; identical to SEQ ID NO: 4661
  Cyclic GFR-binding peptide
  MOD_RES (1), (3), (34), (35): Xaa is C or S

SEQ ID NO: 42492 - protein, 31 aa, Artificial Sequence; identical to SEQ ID NO: 4660
  Cyclic GFR-binding peptide
  MOD_RES (31), (31): Xaa is C or S

SEQ ID NO: 42493 - protein, 28 aa, Artificial Sequence
  Cyclic GFR-binding peptide
  MOD_RES (26), (27): Xaa is C or S
YHYKLVVKENEDKYLMSIPSLETPVXXA

SEQ ID NO: 42494 - protein, 28 aa, Artificial Sequence
  Cyclic GFR-binding peptide
KVVMNRYKKLIVNNSSDFYLVSIANLKT

SEQ ID NO: 42495 - protein, 37 aa, Artificial Sequence; identical to SEQ ID NO: 4662
  Cyclic GFR-binding peptide
  MOD_RES (2), (4), (36), (37): Xaa is C or S

SEQ ID NO: 42496 - protein, 25 aa, Artificial Sequence
  Cyclic GFR-binding peptide
VMRYKKLVKPTRGVFYLISIANLDQ

SEQ ID NO: 42497 - protein, 36 aa, Artificial Sequence; identical to SEQ ID NO: 4663
  Cyclic GFR-binding peptide
  MOD_RES (2), (34), (35): Xaa is C or S

SEQ ID NO: 42498 - protein, 30 aa, Artificial Sequence
  Cyclic GFR-binding peptide
VSMGEQYNKLTPVGMDDLYLVSIASLKTPV

SEQ ID NO: 42499 - protein, 31 aa, Artificial Sequence
  Cyclic GFR-binding peptide
  MOD_RES (1), (3): Xaa is C or S
XKXSKVIMYHYKLIKPTKGIKYLISIPSLDQ

SEQ ID NO: 42500 - protein, 27 aa, Artificial Sequence
  Cyclic GFR-binding peptide
  MOD_RES (26), (27): Xaa is C or S
RHKRLVKPKRGVYYLISTASLAQPVXX

SEQ ID NO: 42501 - protein, 29 aa, Artificial Sequence
  Cyclic GFR-binding peptide
  MOD_RES (2), (2): Xaa is C or S
KXSKVVMYHYKLVKPTRGVKYLISIPSLD

SEQ ID NO: 42502 - protein, 38 aa, Artificial Sequence; identical to SEQ ID NO: 4667
  Cyclic GFR-binding peptide
  MOD_RES (32), (33): Xaa is C or S

SEQ ID NO: 42503 - protein, 32 aa, Artificial Sequence; identical to SEQ ID NO: 4668
  Cyclic GFR-binding peptide
  MOD_RES (1), (1): Xaa is C or S

SEQ ID NO: 42504 - protein, 32 aa, Artificial Sequence; identical to SEQ ID NO: 1842
  Cyclic GFR-binding peptide

SEQ ID NO: 42505 - protein, 37 aa, Artificial Sequence; identical to SEQ ID NO: 4669
  Cyclic GFR-binding peptide
  MOD_RES (31), (32): Xaa is C or S

SEQ ID NO: 42506 - protein, 27 aa, Artificial Sequence
  Cyclic GFR-binding peptide
EAVSMGERHKRLTPVGMDDYYLVSTAS

SEQ ID NO: 42507 - protein, 35 aa, Artificial Sequence; identical to SEQ ID NO: 4671
  Cyclic GFR-binding peptide
  MOD_RES (1), (3), (35): Xaa is C or S

SEQ ID NO: 42508 - protein, 29 aa, Artificial Sequence
  Cyclic GFR-binding peptide
  MOD_RES (26), (27): Xaa is C or S
QYNKLVKPTRGVLYLISIASLDQPVXXPS

SEQ ID NO: 42509 - protein, 24 aa, Artificial Sequence
  Cyclic GFR-binding peptide
MRYKKLVKPKRGVFYLISIANLAQ

SEQ ID NO: 42510 - protein, 34 aa, Artificial Sequence
  Cyclic GFR-binding peptide
  MOD_RES (28), (29): Xaa is C or S
MNQYNKLIVNSSDDLYLVSIASLQTPAXXPKPVT

SEQ ID NO: 42511 - protein, 39 aa, Artificial Sequence; identical to SEQ ID NO: 4674
  Cyclic GFR-binding peptide
  MOD_RES (2), (4), (36): Xaa is C or S

SEQ ID NO: 42512 - protein, 33 aa, Artificial Sequence
  Cyclic GFR-binding peptide
  MOD_RES (28), (28): Xaa is C or S
MNQYNKLIVNSSDDLYLVSIASLKTPAXTPKTV

SEQ ID NO: 42513 - protein, 20 aa, Artificial Sequence
  Cyclic GFR-binding peptide
YHYKLVVKDYEDKYLMSIPS

SEQ ID NO: 42514 - protein, 38 aa, Artificial Sequence; identical to SEQ ID NO: 4676
  Cyclic GFR-binding peptide
  MOD_RES (2), (4), (36), (37): Xaa is C or S

SEQ ID NO: 42515 - protein, 23 aa, Artificial Sequence
  Cyclic GFR-binding peptide
VMNYHYKLIVNNSSDKYLVSIPS

SEQ ID NO: 42516 - protein, 37 aa, Artificial Sequence; identical to SEQ ID NO: 4677
  Cyclic GFR-binding peptide
  MOD_RES (36), (36): Xaa is C or S

SEQ ID NO: 42517 - protein, 38 aa, Artificial Sequence; identical to SEQ ID NO: 4678
  Cyclic GFR-binding peptide
  MOD_RES (36), (36): Xaa is C or S

SEQ ID NO: 42518 - protein, 33 aa, Artificial Sequence
  Cyclic GFR-binding peptide
  MOD_RES (28), (29): Xaa is C or S
IMRHKRLVKPKRGVYYLISTASLAQPVXXPAAS

SEQ ID NO: 42519 - protein, 26 aa, Artificial Sequence
  Cyclic GFR-binding peptide
  MOD_RES (26), (26): Xaa is C or S
RYKKLTPVGMDDFYLVSIANLKTPVX

SEQ ID NO: 42520 - protein, 41 aa, Artificial Sequence; identical to SEQ ID NO: 4680
  Cyclic GFR-binding peptide
  MOD_RES (2), (35), (36): Xaa is C or S

SEQ ID NO: 42521 - protein, 36 aa, Artificial Sequence; identical to SEQ ID NO: 4682
  Cyclic GFR-binding peptide
  MOD_RES (1), (32), (33): Xaa is C or S

SEQ ID NO: 42522 - protein, 27 aa, Artificial Sequence
  Cyclic GFR-binding peptide
RVVMNRHKRLIVNSSDDYYLVSTASLK

SEQ ID NO: 42523 - protein, 23 aa, Artificial Sequence
  Cyclic GFR-binding peptide
MRYKKLVKPKRGVFYLISIANLA

SEQ ID NO: 42524 - protein, 29 aa, Artificial Sequence
  Cyclic GFR-binding peptide
VVMNRHKRLIVNSSDDYYLVSTASLQTPA

SEQ ID NO: 42525 - protein, 31 aa, Artificial Sequence; identical to SEQ ID NO: 4683
  Cyclic GFR-binding peptide

SEQ ID NO: 42526 - protein, 30 aa, Artificial Sequence
  Cyclic GFR-binding peptide
  MOD_RES (26), (27): Xaa is C or S
YHYKLIVNSSDDKYLVSIPSLQTPAXXPKP

SEQ ID NO: 42527 - protein, 32 aa, Artificial Sequence
  Cyclic GFR-binding peptide
  MOD_RES (28), (29): Xaa is C or S
MNQYNKLIVNNSSDLYLVSIASLKTPAXXAKP

SEQ ID NO: 42528 - protein, 27 aa, Artificial Sequence
  Cyclic GFR-binding peptide
VVMNRHKRLIVNSSDDYYLVSTASLKT

SEQ ID NO: 42529 - protein, 30 aa, Artificial Sequence
  Cyclic GFR-binding peptide
  MOD_RES (2), (4): Xaa is C or S
HXGXARVVMNQYNKLIVNSSDDLYLVSIAS

SEQ ID NO: 42530 - protein, 34 aa, Artificial Sequence
  Cyclic GFR-binding peptide
  MOD_RES (30), (31): Xaa is C or S
KVIMQYNKLIKPTKGILYLISIASLDQSVXXPSA

SEQ ID NO: 42531 - protein, 37 aa, Artificial Sequence; identical to SEQ ID NO: 4685
  Cyclic GFR-binding peptide
  MOD_RES (2), (4), (36), (37): Xaa is C or S

SEQ ID NO: 42532 - protein, 33 aa, Artificial Sequence
  Cyclic GFR-binding peptide
  MOD_RES (29), (30): Xaa is C or S
MGERYKKLTPVGMDDFYLVSIANLKTPVXXAKG

SEQ ID NO: 42533 - protein, 26 aa, Artificial Sequence
  Cyclic GFR-binding peptide
MGERYKKLTPVGMDDFYLVSIANLKT

SEQ ID NO: 42534 - protein, 33 aa, Artificial Sequence
  Cyclic GFR-binding peptide
  MOD_RES (30), (31): Xaa is C or S
VVMERYKKLVVKDYEDFYLMSIANLETPVXXAK

SEQ ID NO: 42535 - protein, 35 aa, Artificial Sequence; identical to SEQ ID NO: 4688
  Cyclic GFR-binding peptide
  MOD_RES (31), (31): Xaa is C or S

SEQ ID NO: 42536 - protein, 30 aa, Artificial Sequence; identical to SEQ ID NO: 4689
  Cyclic GFR-binding peptide

SEQ ID NO: 42537 - protein, 28 aa, Artificial Sequence
  Cyclic GFR-binding peptide
RVVMNQYNKLIVNSSDDLYLVSIASLQT

SEQ ID NO: 42538 - protein, 24 aa, Artificial Sequence
  Cyclic GFR-binding peptide
VMNRHKRLIVNSSDDYYLVSTASL

SEQ ID NO: 42539 - protein, 35 aa, Artificial Sequence; identical to SEQ ID NO: 4690
  Cyclic GFR-binding peptide
  MOD_RES (1), (32), (33): Xaa is C or S

SEQ ID NO: 42540 - protein, 32 aa, Artificial Sequence
  Cyclic GFR-binding peptide
  MOD_RES (26), (27): Xaa is C or S
RHKRLTPVGMDDYYLVSTASLKTPVXXAKGVK

SEQ ID NO: 42541 - protein, 34 aa, Artificial Sequence; identical to SEQ ID NO: 4693
  Cyclic GFR-binding peptide
  MOD_RES (2), (34): Xaa is C or S

SEQ ID NO: 42542 - protein, 31 aa, Artificial Sequence; identical to SEQ ID NO: 4694
  Cyclic GFR-binding peptide
  MOD_RES (1), (1): Xaa is C or S

SEQ ID NO: 42543 - protein, 35 aa, Artificial Sequence; identical to SEQ ID NO: 4695
  Cyclic GFR-binding peptide
  MOD_RES (1), (3): Xaa is C or S

SEQ ID NO: 42544 - protein, 26 aa, Artificial Sequence
  Cyclic GFR-binding peptide
VMNQYNKLIVNNSSDLYLVSIASLKT

SEQ ID NO: 42545 - protein, 36 aa, Artificial Sequence; identical to SEQ ID NO: 4696
  Cyclic GFR-binding peptide
  MOD_RES (31), (32): Xaa is C or S

SEQ ID NO: 42546 - protein, 30 aa, Artificial Sequence
  Cyclic GFR-binding peptide
  MOD_RES (29), (30): Xaa is C or S
VMERYKKLVVKDYEDFYLMSIANLETPVXX

SEQ ID NO: 42547 - protein, 37 aa, Artificial Sequence; identical to SEQ ID NO: 4697
  Cyclic GFR-binding peptide
  MOD_RES (31), (31): Xaa is C or S

SEQ ID NO: 42548 - protein, 32 aa, Artificial Sequence; identical to SEQ ID NO: 4698
  Cyclic GFR-binding peptide
  MOD_RES (31), (32): Xaa is C or S

SEQ ID NO: 42549 - protein, 36 aa, Artificial Sequence; identical to SEQ ID NO: 4699
  Cyclic GFR-binding peptide
  MOD_RES (1), (3), (36): Xaa is C or S

SEQ ID NO: 42550 - protein, 28 aa, Artificial Sequence
  Cyclic GFR-binding peptide
  MOD_RES (27), (28): Xaa is C or S
MQYNKLVKPTRGVLYLISIASLDQPVXX

SEQ ID NO: 42551 - protein, 28 aa, Artificial Sequence
  Cyclic GFR-binding peptide
HDELTRYKKLFIPKKRVIEFYLVSIANL

SEQ ID NO: 42552 - protein, 26 aa, Artificial Sequence
  Cyclic GFR-binding peptide
SRVVMNYHYKLIVNSSDDKYLVSIPS

SEQ ID NO: 42553 - protein, 33 aa, Artificial Sequence; identical to SEQ ID NO: 4700
  Cyclic GFR-binding peptide
  MOD_RES (1), (3): Xaa is C or S

SEQ ID NO: 42554 - protein, 22 aa, Artificial Sequence
  Cyclic GFR-binding peptide
QYNKLIVNSSDDLYLVSIASLQ

SEQ ID NO: 42555 - protein, 41 aa, Artificial Sequence; identical to SEQ ID NO: 4701
  Cyclic GFR-binding peptide
  MOD_RES (2), (4), (36), (37): Xaa is C or S

SEQ ID NO: 42556 - protein, 31 aa, Artificial Sequence
  Cyclic GFR-binding peptide
  MOD_RES (30), (31): Xaa is C or S
VVMNYHYKLIVNSSDDKYLVSIPSLKTPAXX

SEQ ID NO: 42557 - protein, 26 aa, Artificial Sequence
  Cyclic GFR-binding peptide
SKVVMYHYKLVKPTRGVKYLISIPSL

SEQ ID NO: 42558 - protein, 26 aa, Artificial Sequence
  Cyclic GFR-binding peptide
ARVVMNYHYKLIVNSSDDKYLVSIPS

SEQ ID NO: 42559 - protein, 22 aa, Artificial Sequence
  Cyclic GFR-binding peptide
MNQYNKLIVNSSDDLYLVSIAS

SEQ ID NO: 42560 - protein, 27 aa, Artificial Sequence
  Cyclic GFR-binding peptide
  MOD_RES (26), (27): Xaa is C or S
QYNKLIVNSSDDLYLVSIASLQTPAXX

SEQ ID NO: 42561 - protein, 31 aa, Artificial Sequence
  Cyclic GFR-binding peptide
  MOD_RES (26), (27): Xaa is C or S
YHYKLIVNSSDDKYLVSIPSLQTPAXXPKPV

SEQ ID NO: 42562 - protein, 37 aa, Artificial Sequence; identical to SEQ ID NO: 4706
  Cyclic GFR-binding peptide
  MOD_RES (2), (34), (35): Xaa is C or S

SEQ ID NO: 42563 - protein, 34 aa, Artificial Sequence; identical to SEQ ID NO: 4708
  Cyclic GFR-binding peptide
  MOD_RES (33), (34): Xaa is C or S

SEQ ID NO: 42564 - protein, 28 aa, Artificial Sequence
  Cyclic GFR-binding peptide
  MOD_RES (26), (27): Xaa is C or S
YHYKLIKPTKGIKYLISIPSLDQSVXXP

SEQ ID NO: 42565 - protein, 29 aa, Artificial Sequence
  Cyclic GFR-binding peptide
AAAAAAAAAYHYKLTPVGMDDKYLVSIPS

SEQ ID NO: 42566 - protein, 40 aa, Artificial Sequence; identical to SEQ ID NO: 4710
  Cyclic GFR-binding peptide
  MOD_RES (2), (4), (36): Xaa is C or S

SEQ ID NO: 42567 - protein, 24 aa, Artificial Sequence
  Cyclic GFR-binding peptide
TYHYKLFIPKKRVIEKYLVSIPSL

SEQ ID NO: 42568 - protein, 30 aa, Artificial Sequence
  Cyclic GFR-binding peptide
  MOD_RES (26), (27): Xaa is C or S
RYKKLVKPKRGVFYLISIANLAQPVXXPAA

SEQ ID NO: 42569 - protein, 37 aa, Artificial Sequence; identical to SEQ ID NO: 4713
  Cyclic GFR-binding peptide
  MOD_RES (32), (33): Xaa is C or S

SEQ ID NO: 42570 - protein, 30 aa, Artificial Sequence
  Cyclic GFR-binding peptide
  MOD_RES (30), (30): Xaa is C or S
KVIMRYKKLIKPTKGIFYLISIANLDQSVX

SEQ ID NO: 42571 - protein, 33 aa, Artificial Sequence
  Cyclic GFR-binding peptide
  MOD_RES (30), (31): Xaa is C or S
RVIMQYNKLVKPKRGVLYLISIASLAQPVXXPA

SEQ ID NO: 42572 - protein, 32 aa, Artificial Sequence
  Cyclic GFR-binding peptide
  MOD_RES (2), (2): Xaa is C or S
GXSRVVMNRHKRLIVNSSDDYYLVSTASLKTP

SEQ ID NO: 42573 - protein, 33 aa, Artificial Sequence
  Cyclic GFR-binding peptide
  MOD_RES (30), (31): Xaa is C or S
KVIMRHKRLIKPTKGIYYLISTASLDQSVXXPS

SEQ ID NO: 42574 - protein, 25 aa, Artificial Sequence
  Cyclic GFR-binding peptide
TYHYKLFIPKKRVIEKYLVSIPSLQ

SEQ ID NO: 42575 - protein, 27 aa, Artificial Sequence
  Cyclic GFR-binding peptide
  MOD_RES (26), (27): Xaa is C or S
YHYKLVVKENEDKYLMSIPSLETPVXX

SEQ ID NO: 42576 - protein, 38 aa, Artificial Sequence; identical to SEQ ID NO: 4716
  Cyclic GFR-binding peptide
  MOD_RES (2), (34), (35): Xaa is C or S

SEQ ID NO: 42577 - protein, 32 aa, Artificial Sequence; identical to SEQ ID NO: 4717
  Cyclic GFR-binding peptide
  MOD_RES (1), (1): Xaa is C or S

SEQ ID NO: 42578 - protein, 31 aa, Artificial Sequence
  Cyclic GFR-binding peptide
  MOD_RES (30), (31): Xaa is C or S
VVMNRHKRLIVNSSDDYYLVSTASLKTPAXX

SEQ ID NO: 42579 - protein, 24 aa, Artificial Sequence
  Cyclic GFR-binding peptide
IMRYKKLIKPTKGIFYLISIANLD

SEQ ID NO: 42580 - protein, 28 aa, Artificial Sequence
  Cyclic GFR-binding peptide
  MOD_RES (26), (27): Xaa is C or S
QYNKLTPVGMDDLYLVSIASLKTPVXXA

SEQ ID NO: 42581 - protein, 27 aa, Artificial Sequence
  Cyclic GFR-binding peptide
VVMNYHYKLIVNSSDDKYLVSIPSLKT

SEQ ID NO: 42582 - protein, 37 aa, Artificial Sequence; identical to SEQ ID NO: 4719
  Cyclic GFR-binding peptide
  MOD_RES (31), (32): Xaa is C or S

SEQ ID NO: 42583 - protein, 32 aa, Artificial Sequence; identical to SEQ ID NO: 4720
  Cyclic GFR-binding peptide
  MOD_RES (1), (32): Xaa is C or S

SEQ ID NO: 42584 - protein, 29 aa, Artificial Sequence
  Cyclic GFR-binding peptide
  MOD_RES (29), (29): Xaa is C or S
VMNRYKKLIVNNSSDFYLVSIANLKTPAX

SEQ ID NO: 42585 - protein, 29 aa, Artificial Sequence
  Cyclic GFR-binding peptide
  MOD_RES (27), (28): Xaa is C or S
MRYKKLVKPTRGVFYLISIANLDQPVXXP

SEQ ID NO: 42586 - protein, 34 aa, Artificial Sequence
  Cyclic GFR-binding peptide
  MOD_RES (28), (29): Xaa is C or S
MNYHYKLIVNSSDDKYLVSIPSLKTPAXXPKPVY

SEQ ID NO: 42587 - protein, 30 aa, Artificial Sequence
  Cyclic GFR-binding peptide
  MOD_RES (30), (30): Xaa is C or S
VVMNYHYKLIVNSSDDKYLVSIPSLQTPAX

SEQ ID NO: 42588 - protein, 42 aa, Artificial Sequence; identical to SEQ ID NO: 4721
  Cyclic GFR-binding peptide
  MOD_RES (2), (39): Xaa is C or S

SEQ ID NO: 42589 - protein, 34 aa, Artificial Sequence
  Cyclic GFR-binding peptide
  MOD_RES (28), (29): Xaa is C or S
IMRYKKLIKPTKGIFYLISIANLDQSVXXPSASA

SEQ ID NO: 42590 - protein, 39 aa, Artificial Sequence; identical to SEQ ID NO: 4722
  Cyclic GFR-binding peptide
  MOD_RES (1), (33), (34): Xaa is C or S

SEQ ID NO: 42591 - protein, 36 aa, Artificial Sequence; identical to SEQ ID NO: 4723
  Cyclic GFR-binding peptide
  MOD_RES (2), (4), (35), (36): Xaa is C or S

SEQ ID NO: 42592 - protein, 30 aa, Artificial Sequence
  Cyclic GFR-binding peptide
  MOD_RES (30), (30): Xaa is C or S
VVMNRHKRLIVNSSDDYYLVSTASLQTPAX

SEQ ID NO: 42593 - protein, 29 aa, Artificial Sequence
  Cyclic GFR-binding peptide
  MOD_RES (2), (2): Xaa is C or S
KXSRVIMRHKRLVKPKRGVYYLISTASLA

SEQ ID NO: 42594 - protein, 21 aa, Artificial Sequence
  Cyclic GFR-binding peptide
MRYKKLIKPTKGIFYLISIAN

SEQ ID NO: 42595 - protein, 33 aa, Artificial Sequence
  Cyclic GFR-binding peptide
  MOD_RES (30), (31): Xaa is C or S
KVIMYHYKLIKPTKGIKYLISIPSLDQSVXXPS

SEQ ID NO: 42596 - protein, 30 aa, Artificial Sequence
  Cyclic GFR-binding peptide
AVSMGERYKKLTPVGMDDFYLVSIANLKTP

SEQ ID NO: 42597 - protein, 31 aa, Artificial Sequence; identical to SEQ ID NO: 4727
  Cyclic GFR-binding peptide
  MOD_RES (31), (31): Xaa is C or S

SEQ ID NO: 42598 - protein, 38 aa, Artificial Sequence; identical to SEQ ID NO: 4728
  Cyclic GFR-binding peptide
  MOD_RES (32), (33): Xaa is C or S

SEQ ID NO: 42599 - protein, 31 aa, Artificial Sequence
  Cyclic GFR-binding peptide
  MOD_RES (28), (29): Xaa is C or S
MNQYNKLIVNSSDDLYLVSIASLKTPAXXPK

SEQ ID NO: 42600 - protein, 29 aa, Artificial Sequence
  Cyclic GFR-binding peptide
  MOD_RES (2), (2): Xaa is C or S
GXARVVMNQYNKLIVNSSDDLYLVSIASL

SEQ ID NO: 42601 - protein, 36 aa, Artificial Sequence; identical to SEQ ID NO: 4729
  Cyclic GFR-binding peptide
  MOD_RES (2), (34), (35): Xaa is C or S

SEQ ID NO: 42602 - protein, 28 aa, Artificial Sequence
  Cyclic GFR-binding peptide
  MOD_RES (1), (1): Xaa is C or S
XSKVVMQYNKLVKPTRGVLYLISIASLD

SEQ ID NO: 42603 - protein, 36 aa, Artificial Sequence; identical to SEQ ID NO: 4730
  Cyclic GFR-binding peptide
  MOD_RES (1), (33), (34): Xaa is C or S

SEQ ID NO: 42604 - protein, 28 aa, Artificial Sequence
  Cyclic GFR-binding peptide
  MOD_RES (2), (2): Xaa is C or S
GXGEVVMDRHKRLVVKENEDYYLMSTAS

SEQ ID NO: 42605 - protein, 35 aa, Artificial Sequence; identical to SEQ ID NO: 4731
  Cyclic GFR-binding peptide
  MOD_RES (1), (3), (35): Xaa is C or S

SEQ ID NO: 42606 - protein, 22 aa, Artificial Sequence
  Cyclic GFR-binding peptide
QYNKLIKPTKGILYLISIASLD

SEQ ID NO: 42607 - protein, 35 aa, Artificial Sequence; identical to SEQ ID NO: 4733
  Cyclic GFR-binding peptide
  MOD_RES (2), (4): Xaa is C or S

SEQ ID NO: 42608 - protein, 27 aa, Artificial Sequence
  Cyclic GFR-binding peptide
  MOD_RES (1), (1): Xaa is C or S
XSRVIMRYKKLVKPKRGVFYLISIANL

SEQ ID NO: 42609 - protein, 24 aa, Artificial Sequence
  Cyclic GFR-binding peptide
VIMYHYKLVKPKRGVKYLISIPSL

SEQ ID NO: 42610 - protein, 41 aa, Artificial Sequence; identical to SEQ ID NO: 4734
  Cyclic GFR-binding peptide
  MOD_RES (2), (4), (36): Xaa is C or S

SEQ ID NO: 42611 - protein, 22 aa, Artificial Sequence
  Cyclic GFR-binding peptide
GERYKKLTPVGMDDFYLVSIAN

SEQ ID NO: 42612 - protein, 40 aa, Artificial Sequence; identical to SEQ ID NO: 4735
  Cyclic GFR-binding peptide
  MOD_RES (2), (39): Xaa is C or S

SEQ ID NO: 42613 - protein, 30 aa, Artificial Sequence
  Cyclic GFR-binding peptide
  MOD_RES (28), (28): Xaa is C or S
MNYHYKLIVNSSDDKYLVSIPSLKTPAXTP

SEQ ID NO: 42614 - protein, 31 aa, Artificial Sequence
  Cyclic GFR-binding peptide
  MOD_RES (2), (4): Xaa is C or S
RXGXGEVVMERHKRLVVKDYEDYYLMSTASL

SEQ ID NO: 42615 - protein, 34 aa, Artificial Sequence
  Cyclic GFR-binding peptide
  MOD_RES (32), (33): Xaa is C or S
AVSMGERYKKLTPVGMDDFYLVSIANLKTPVXXA

SEQ ID NO: 42616 - protein, 26 aa, Artificial Sequence
  Cyclic GFR-binding peptide
VIMYHYKLVKPKRGVKYLISIPSLAQ

SEQ ID NO: 42617 - protein, 36 aa, Artificial Sequence; identical to SEQ ID NO: 4738
  Cyclic GFR-binding peptide
  MOD_RES (1), (33), (34): Xaa is C or S

SEQ ID NO: 42618 - protein, 32 aa, Artificial Sequence
  Cyclic GFR-binding peptide
  MOD_RES (28), (29): Xaa is C or S
MDRHKRLVVKENEDYYLMSTASLETPVXXAKP

SEQ ID NO: 42619 - protein, 29 aa, Artificial Sequence
  Cyclic GFR-binding peptide
AAAAAAAAAYHYKLIVNNSSDKYLVSIPS

SEQ ID NO: 42620 - protein, 30 aa, Artificial Sequence
  Cyclic GFR-binding peptide
  MOD_RES (2), (2): Xaa is C or S
GXEAVSMGERYKKLTPVGMDDFYLVSIANL

SEQ ID NO: 42621 - protein, 32 aa, Artificial Sequence
  Cyclic GFR-binding peptide
  MOD_RES (29), (30): Xaa is C or S
VMNQYNKLIVNSSDDLYLVSIASLQTPAXXPK

SEQ ID NO: 42622 - protein, 29 aa, Artificial Sequence
  Cyclic GFR-binding peptide
LTQYNKLFIPKKRVIELYLVSIASLQVQT

SEQ ID NO: 42623 - protein, 37 aa, Artificial Sequence; identical to SEQ ID NO: 4741
  Cyclic GFR-binding peptide
  MOD_RES (1), (32), (33): Xaa is C or S

SEQ ID NO: 42624 - protein, 31 aa, Artificial Sequence
  Cyclic GFR-binding peptide
  MOD_RES (28), (29): Xaa is C or S
IMRYKKLVKPKRGVFYLISIANLAQPVXXPA

SEQ ID NO: 42625 - protein, 32 aa, Artificial Sequence; identical to SEQ ID NO: 4742
  Cyclic GFR-binding peptide
  MOD_RES (31), (32): Xaa is C or S

SEQ ID NO: 42626 - protein, 32 aa, Artificial Sequence
  Cyclic GFR-binding peptide
  MOD_RES (1), (3): Xaa is C or S
XKXSRVIMRYKKLVKPKRGVFYLISIANLAQP

SEQ ID NO: 42627 - protein, 30 aa, Artificial Sequence; identical to SEQ ID NO: 4744
  Cyclic GFR-binding peptide

SEQ ID NO: 42628 - protein, 35 aa, Artificial Sequence; identical to SEQ ID NO: 4745
  Cyclic GFR-binding peptide
  MOD_RES (2), (34), (35): Xaa is C or S

SEQ ID NO: 42629 - protein, 31 aa, Artificial Sequence
  Cyclic GFR-binding peptide
  MOD_RES (26), (27): Xaa is C or S
QYNKLVKPKRGVLYLISIASLAQPVXXPAAS

SEQ ID NO: 42630 - protein, 35 aa, Artificial Sequence
  Cyclic GFR-binding peptide
  MOD_RES (30), (30): Xaa is C or S
VVMNRHKRLIVNSSDDYYLVSTASLKTPAXTPKTV

SEQ ID NO: 42631 - protein, 34 aa, Artificial Sequence
  Cyclic GFR-binding peptide
  MOD_RES (28), (29): Xaa is C or S
VMRYKKLVKPTRGVFYLISIANLDQPVXXPSASA

SEQ ID NO: 42632 - protein, 34 aa, Artificial Sequence; identical to SEQ ID NO: 4746
  Cyclic GFR-binding peptide
  MOD_RES (1), (3), (34): Xaa is C or S

SEQ ID NO: 42633 - protein, 38 aa, Artificial Sequence; identical to SEQ ID NO: 4747
  Cyclic GFR-binding peptide
  MOD_RES (1), (34), (35): Xaa is C or S

SEQ ID NO: 42634 - protein, 32 aa, Artificial Sequence
  Cyclic GFR-binding peptide
  MOD_RES (29), (30): Xaa is C or S
VMDRYKKLVVKENEDFYLMSIANLETPVXXAK

SEQ ID NO: 42635 - protein, 32 aa, Artificial Sequence; identical to SEQ ID NO: 4749
  Cyclic GFR-binding peptide
  MOD_RES (1), (1): Xaa is C or S

SEQ ID NO: 42636 - protein, 30 aa, Artificial Sequence
  Cyclic GFR-binding peptide
HDELTRYKKLFIPKKRVIEFYLVSIANLQV

SEQ ID NO: 42637 - protein, 28 aa, Artificial Sequence
  Cyclic GFR-binding peptide
VIMQYNKLVKPKRGVLYLISIASLAQPV

SEQ ID NO: 42638 - protein, 22 aa, Artificial Sequence
  Cyclic GFR-binding peptide
MERYKKLVVKDYEDFYLMSIAN

SEQ ID NO: 42639 - protein, 33 aa, Artificial Sequence
  Cyclic GFR-binding peptide
  MOD_RES (30), (31): Xaa is C or S
VVMNYHYKLIVNSSDDKYLVSIPSLQTPAXXPK

SEQ ID NO: 42640 - protein, 32 aa, Artificial Sequence
  Cyclic GFR-binding peptide
  MOD_RES (2), (2): Xaa is C or S
GXAKVVMNQYNKLIVNNSSDLYLVSIASLKTP

SEQ ID NO: 42641 - protein, 31 aa, Artificial Sequence
  Cyclic GFR-binding peptide
  MOD_RES (1), (1): Xaa is C or S
XAKVVMNYHYKLIVNNSSDKYLVSIPSLKTP

SEQ ID NO: 42642 - protein, 28 aa, Artificial Sequence
  Cyclic GFR-binding peptide
VVMNQYNKLIVNNSSDLYLVSIASLKTP

SEQ ID NO: 42643 - protein, 29 aa, Artificial Sequence
  Cyclic GFR-binding peptide
  MOD_RES (1), (3): Xaa is C or S
XGXGEVVMEYHYKLVVKDYEDKYLMSIPS

SEQ ID NO: 42644 - protein, 40 aa, Artificial Sequence; identical to SEQ ID NO: 4752
  Cyclic GFR-binding peptide
  MOD_RES (2), (4): Xaa is C or S

SEQ ID NO: 42645 - protein, 38 aa, Artificial Sequence; identical to SEQ ID NO: 4753
  Cyclic GFR-binding peptide
  MOD_RES (1), (32), (33): Xaa is C or S

SEQ ID NO: 42646 - protein, 32 aa, Artificial Sequence
  Cyclic GFR-binding peptide
  MOD_RES (27), (28): Xaa is C or S
NYHYKLIVNSSDDKYLVSIPSLQTPAXXPKPV

SEQ ID NO: 42647 - protein, 24 aa, Artificial Sequence
  Cyclic GFR-binding peptide
VMQYNKLVKPTRGVLYLISIASLD

SEQ ID NO: 42648 - protein, 26 aa, Artificial Sequence
  Cyclic GFR-binding peptide
VIMRHKRLVKPKRGVYYLISTASLAQ

SEQ ID NO: 42649 - protein, 36 aa, Artificial Sequence; identical to SEQ ID NO: 4754
  Cyclic GFR-binding peptide
  MOD_RES (2), (33), (34): Xaa is C or S

SEQ ID NO: 42650 - protein, 37 aa, Artificial Sequence; identical to SEQ ID NO: 4756
  Cyclic GFR-binding peptide
  MOD_RES (1), (32), (33): Xaa is C or S

SEQ ID NO: 42651 - protein, 25 aa, Artificial Sequence
  Cyclic GFR-binding peptide
VMERYKKLVVKDYEDFYLMSIANLE

SEQ ID NO: 42652 - protein, 32 aa, Artificial Sequence; identical to SEQ ID NO: 4757
  Cyclic GFR-binding peptide

SEQ ID NO: 42653 - protein, 31 aa, Artificial Sequence
  Cyclic GFR-binding peptide
  MOD_RES (2), (4): Xaa is C or S
SXKXSKVIMYHYKLIKPTKGIKYLISIPSLD

SEQ ID NO: 42654 - protein, 23 aa, Artificial Sequence
  Cyclic GFR-binding peptide
YHYKLFIPKKRVIEKYLVSIPSL

SEQ ID NO: 42655 - protein, 24 aa, Artificial Sequence
  Cyclic GFR-binding peptide
VIMRHKRLVKPKRGVYYLISTASL

SEQ ID NO: 42656 - protein, 38 aa, Artificial Sequence; identical to SEQ ID NO: 4759
  Cyclic GFR-binding peptide
  MOD_RES (1), (38): Xaa is C or S

SEQ ID NO: 42657 - protein, 25 aa, Artificial Sequence
  Cyclic GFR-binding peptide
VMNYHYKLIVNSSDDKYLVSIPSLQ

SEQ ID NO: 42658 - protein, 35 aa, Artificial Sequence; identical to SEQ ID NO: 4760
  Cyclic GFR-binding peptide
  MOD_RES (1), (3), (35): Xaa is C or S

SEQ ID NO: 42659 - protein, 26 aa, Artificial Sequence
  Cyclic GFR-binding peptide
VVMNYHYKLIVNSSDDKYLVSIPSLQ

SEQ ID NO: 42660 - protein, 38 aa, Artificial Sequence; identical to SEQ ID NO: 4764
  Cyclic GFR-binding peptide
  MOD_RES (1), (3), (35), (36): Xaa is C or S

SEQ ID NO: 42661 - protein, 35 aa, Artificial Sequence; identical to SEQ ID NO: 4763
  Cyclic GFR-binding peptide
  MOD_RES (1), (32), (33): Xaa is C or S

SEQ ID NO: 42662 - protein, 25 aa, Artificial Sequence
  Cyclic GFR-binding peptide
VMNRHKRLIVNSSDDYYLVSTASLQ

SEQ ID NO: 42663 - protein, 36 aa, Artificial Sequence; identical to SEQ ID NO: 4766
  Cyclic GFR-binding peptide
  MOD_RES (32), (33): Xaa is C or S

SEQ ID NO: 42664 - protein, 41 aa, Artificial Sequence; identical to SEQ ID NO: 4767
  Cyclic GFR-binding peptide
  MOD_RES (1), (3), (35): Xaa is C or S

SEQ ID NO: 42665 - protein, 38 aa, Artificial Sequence; identical to SEQ ID NO: 4768
  Cyclic GFR-binding peptide
  MOD_RES (1), (33), (34): Xaa is C or S

SEQ ID NO: 42666 - protein, 29 aa, Artificial Sequence
  Cyclic GFR-binding peptide
AAAAAAAAARHKRLIVNNSSDYYLVSTAS

SEQ ID NO: 42667 - protein, 26 aa, Artificial Sequence
  Cyclic GFR-binding peptide
  MOD_RES (26), (26): Xaa is C or S
RHKRLVKPTRGVYYLISTASLDQPVX

SEQ ID NO: 42668 - protein, 36 aa, Artificial Sequence; identical to SEQ ID NO: 4769
  Cyclic GFR-binding peptide
  MOD_RES (33), (34): Xaa is C or S

SEQ ID NO: 42669 - protein, 24 aa, Artificial Sequence
  Cyclic GFR-binding peptide
MQYNKLIKPTKGILYLISIASLDQ

SEQ ID NO: 42670 - protein, 33 aa, Artificial Sequence
  Cyclic GFR-binding peptide
  MOD_RES (30), (31): Xaa is C or S
VVMNQYNKLIVNSSDDLYLVSIASLKTPAXXPK

SEQ ID NO: 42671 - protein, 31 aa, Artificial Sequence
  Cyclic GFR-binding peptide
  MOD_RES (1), (1): Xaa is C or S
XAKVVMNRYKKLIVNNSSDFYLVSIANLKTP

SEQ ID NO: 42672 - protein, 37 aa, Artificial Sequence; identical to SEQ ID NO: 4773
  Cyclic GFR-binding peptide
  MOD_RES (2), (34), (35): Xaa is C or S

SEQ ID NO: 42673 - protein, 31 aa, Artificial Sequence; identical to SEQ ID NO: 4775
  Cyclic GFR-binding peptide
  MOD_RES (1), (1): Xaa is C or S

SEQ ID NO: 42674 - protein, 39 aa, Artificial Sequence; identical to SEQ ID NO: 4777
  Cyclic GFR-binding peptide
  MOD_RES (37), (37): Xaa is C or S

SEQ ID NO: 42675 - protein, 21 aa, Artificial Sequence
  Cyclic GFR-binding peptide
YHYKLIVNSSDDKYLVSIPSL

SEQ ID NO: 42676 - protein, 26 aa, Artificial Sequence
  Cyclic GFR-binding peptide
RVVMNYHYKLIVNSSDDKYLVSIPSL

SEQ ID NO: 42677 - protein, 26 aa, Artificial Sequence
  Cyclic GFR-binding peptide
  MOD_RES (26), (26): Xaa is C or S
RYKKLIKPTKGIFYLISIANLDQSVX

SEQ ID NO: 42678 - protein, 26 aa, Artificial Sequence
  Cyclic GFR-binding peptide
  MOD_RES (26), (26): Xaa is C or S
QYNKLTPVGMDDLYLVSIASLKTPVX

SEQ ID NO: 42679 - protein, 32 aa, Artificial Sequence
  Cyclic GFR-binding peptide
  MOD_RES (28), (29): Xaa is C or S
VMRYKKLVKPTRGVFYLISIANLDQPVXXPSA

SEQ ID NO: 42680 - protein, 39 aa, Artificial Sequence; identical to SEQ ID NO: 4778
  Cyclic GFR-binding peptide
  MOD_RES (37), (37): Xaa is C or S

SEQ ID NO: 42681 - protein, 26 aa, Artificial Sequence
  Cyclic GFR-binding peptide
MYHYKLVKPKRGVKYLISIPSLAQPV

SEQ ID NO: 42682 - protein, 30 aa, Artificial Sequence
  Cyclic GFR-binding peptide
  MOD_RES (1), (3): Xaa is C or S
XGXAKVVMNRYKKLIVNNSSDFYLVSIANL

SEQ ID NO: 42683 - protein, 39 aa, Artificial Sequence; identical to SEQ ID NO: 4779
  Cyclic GFR-binding peptide
  MOD_RES (36), (36): Xaa is C or S

SEQ ID NO: 42684 - protein, 25 aa, Artificial Sequence
  Cyclic GFR-binding peptide
MERHKRLVVKDYEDYYLMSTASLET

SEQ ID NO: 42685 - protein, 26 aa, Artificial Sequence
  Cyclic GFR-binding peptide
GEVVMEYHYKLVVKDYEDKYLMSIPS

SEQ ID NO: 42686 - protein, 34 aa, Artificial Sequence
  Cyclic GFR-binding peptide
  MOD_RES (28), (29): Xaa is C or S
MNRHKRLIVNSSDDYYLVSTASLQTPAXXPKPVT

SEQ ID NO: 42687 - protein, 32 aa, Artificial Sequence; identical to SEQ ID NO: 4781
  Cyclic GFR-binding peptide
  MOD_RES (31), (32): Xaa is C or S

SEQ ID NO: 42688 - protein, 33 aa, Artificial Sequence
  Cyclic GFR-binding peptide
  MOD_RES (1), (3): Xaa is C or S
XGXARVVMNYHYKLIVNSSDDKYLVSIPSLQTP

SEQ ID NO: 42689 - protein, 40 aa, Artificial Sequence; identical to SEQ ID NO: 4785
  Cyclic GFR-binding peptide
  MOD_RES (1), (3), (35), (36): Xaa is C or S

SEQ ID NO: 42690 - protein, 28 aa, Artificial Sequence
  Cyclic GFR-binding peptide
VMNRHKRLIVNSSDDYYLVSTASLKTPA

SEQ ID NO: 42691 - protein, 29 aa, Artificial Sequence
  Cyclic GFR-binding peptide
  MOD_RES (1), (3): Xaa is C or S
XKXSRVIMRHKRLVKPKRGVYYLISTASL

SEQ ID NO: 42692 - protein, 35 aa, Artificial Sequence; identical to SEQ ID NO: 4786
  Cyclic GFR-binding peptide
  MOD_RES (2), (34), (35): Xaa is C or S

SEQ ID NO: 42693 - protein, 40 aa, Artificial Sequence; identical to SEQ ID NO: 4787
  Cyclic GFR-binding peptide
  MOD_RES (2), (4), (35), (36): Xaa is C or S

SEQ ID NO: 42694 - protein, 30 aa, Artificial Sequence
  Cyclic GFR-binding peptide
  MOD_RES (2), (2): Xaa is C or S
KXSKVIMRHKRLIKPTKGIYYLISTASLDQ

SEQ ID NO: 42695 - protein, 27 aa, Artificial Sequence
  Cyclic GFR-binding peptide
  MOD_RES (26), (27): Xaa is C or S
RYKKLVVKENEDFYLMSIANLETPVXX

SEQ ID NO: 42696 - protein, 37 aa, Artificial Sequence; identical to SEQ ID NO: 4790
  Cyclic GFR-binding peptide
  MOD_RES (31), (32): Xaa is C or S

SEQ ID NO: 42697 - protein, 41 aa, Artificial Sequence; identical to SEQ ID NO: 4792
  Cyclic GFR-binding peptide
  MOD_RES (2), (4), (35), (36): Xaa is C or S

SEQ ID NO: 42698 - protein, 26 aa, Artificial Sequence
  Cyclic GFR-binding peptide
SKVVMRYKKLVKPTRGVFYLISIANL

SEQ ID NO: 42699 - protein, 32 aa, Artificial Sequence
  Cyclic GFR-binding peptide
  MOD_RES (29), (30): Xaa is C or S
VMNYHYKLIVNSSDDKYLVSIPSLQTPAXXPK

SEQ ID NO: 42700 - protein, 35 aa, Artificial Sequence; identical to SEQ ID NO: 4797
  Cyclic GFR-binding peptide
  MOD_RES (33), (34): Xaa is C or S

SEQ ID NO: 42701 - protein, 32 aa, Artificial Sequence
  Cyclic GFR-binding peptide
  MOD_RES (30), (31): Xaa is C or S
VVMNRHKRLIVNSSDDYYLVSTASLKTPAXXP

SEQ ID NO: 42702 - protein, 30 aa, Artificial Sequence
  Cyclic GFR-binding peptide
  MOD_RES (2), (2): Xaa is C or S
GXARVVMNRHKRLIVNSSDDYYLVSTASLQ

SEQ ID NO: 42703 - protein, 25 aa, Artificial Sequence
  Cyclic GFR-binding peptide
MEYHYKLVVKDYEDKYLMSIPSLET

SEQ ID NO: 42704 - protein, 27 aa, Artificial Sequence
  Cyclic GFR-binding peptide
VSMGERYKKLTPVGMDDFYLVSIANLK

SEQ ID NO: 42705 - protein, 36 aa, Artificial Sequence; identical to SEQ ID NO: 4798
  Cyclic GFR-binding peptide
  MOD_RES (1), (32), (33): Xaa is C or S

SEQ ID NO: 42706 - protein, 32 aa, Artificial Sequence
  Cyclic GFR-binding peptide
  MOD_RES (2), (4): Xaa is C or S
HXGXAKVVMNRYKKLIVNNSSDFYLVSIANLK

SEQ ID NO: 42707 - protein, 35 aa, Artificial Sequence; identical to SEQ ID NO: 4799
  Cyclic GFR-binding peptide
  MOD_RES (2), (34), (35): Xaa is C or S

SEQ ID NO: 42708 - protein, 35 aa, Artificial Sequence; identical to SEQ ID NO: 4800
  Cyclic GFR-binding peptide
  MOD_RES (2), (4), (35): Xaa is C or S

SEQ ID NO: 42709 - protein, 35 aa, Artificial Sequence
  Cyclic GFR-binding peptide
  MOD_RES (34), (34): Xaa is C or S
DELTRYKKLFIPKKRVIEFYLVSIANLQVQTPRXQ

SEQ ID NO: 42710 - protein, 26 aa, Artificial Sequence
  Cyclic GFR-binding peptide
ELTRYKKLFIPKKRVIEFYLVSIANL

SEQ ID NO: 42711 - protein, 33 aa, Artificial Sequence
  Cyclic GFR-binding peptide
  MOD_RES (2), (4): Xaa is C or S
HXGXSRVVMNQYNKLIVNSSDDLYLVSIASLKT

SEQ ID NO: 42712 - protein, 31 aa, Artificial Sequence; identical to SEQ ID NO: 4801
  Cyclic GFR-binding peptide
  MOD_RES (31), (31): Xaa is C or S

SEQ ID NO: 42713 - protein, 30 aa, Artificial Sequence
  Cyclic GFR-binding peptide
  MOD_RES (29), (30): Xaa is C or S
VMNQYNKLIVNSSDDLYLVSIASLKTPAXX

SEQ ID NO: 42714 - protein, 22 aa, Artificial Sequence
  Cyclic GFR-binding peptide
ERYKKLTPVGMDDFYLVSIANL

SEQ ID NO: 42715 - protein, 30 aa, Artificial Sequence
  Cyclic GFR-binding peptide
  MOD_RES (27), (28): Xaa is C or S
MRHKRLIKPTKGIYYLISTASLDQSVXXPS

SEQ ID NO: 42716 - protein, 30 aa, Artificial Sequence
  Cyclic GFR-binding peptide
ELTRYKKLFIPKKRVIEFYLVSIANLQVQT

SEQ ID NO: 42717 - protein, 35 aa, Artificial Sequence
  Cyclic GFR-binding peptide
  MOD_RES (30), (31): Xaa is C or S
SMGERHKRLTPVGMDDYYLVSTASLKTPVXXAKGV

SEQ ID NO: 42718 - protein, 29 aa, Artificial Sequence
  Cyclic GFR-binding peptide
  MOD_RES (1), (3): Xaa is C or S
XGXAKVVMNYHYKLIVNNSSDKYLVSIPS

SEQ ID NO: 42719 - protein, 25 aa, Artificial Sequence
  Cyclic GFR-binding peptide
RVVMNQYNKLIVNSSDDLYLVSIAS

SEQ ID NO: 42720 - protein, 34 aa, Artificial Sequence; identical to SEQ ID NO: 4804
  Cyclic GFR-binding peptide
  MOD_RES (1), (3), (34): Xaa is C or S

SEQ ID NO: 42721 - protein, 35 aa, Artificial Sequence; identical to SEQ ID NO: 4809
  Cyclic GFR-binding peptide
  MOD_RES (2), (4): Xaa is C or S

SEQ ID NO: 42722 - protein, 24 aa, Artificial Sequence
  Cyclic GFR-binding peptide
RHKRLVKPKRGVYYLISTASLAQP

SEQ ID NO: 42723 - protein, 36 aa, Artificial Sequence; identical to SEQ ID NO: 4810
  Cyclic GFR-binding peptide
  MOD_RES (2), (33), (34): Xaa is C or S

SEQ ID NO: 42724 - protein, 35 aa, Artificial Sequence; identical to SEQ ID NO: 4811
  Cyclic GFR-binding peptide
  MOD_RES (31), (32): Xaa is C or S

SEQ ID NO: 42725 - protein, 32 aa, Artificial Sequence
  Cyclic GFR-binding peptide
  MOD_RES (31), (31): Xaa is C or S
TYHYKLFIPKKRVIEKYLVSIPSLQVQTPRXQ

SEQ ID NO: 42726 - protein, 37 aa, Artificial Sequence
  Cyclic GFR-binding peptide
  MOD_RES (32), (33): Xaa is C or S
AVSMGERHKRLTPVGMDDYYLVSTASLKTPVXXAKGV

SEQ ID NO: 42727 - protein, 25 aa, Artificial Sequence
  Cyclic GFR-binding peptide
MNQYNKLIVNNSSDLYLVSIASLKT

SEQ ID NO: 42728 - protein, 39 aa, Artificial Sequence; identical to SEQ ID NO: 4812
  Cyclic GFR-binding peptide
  MOD_RES (2), (4), (37), (38): Xaa is C or S

SEQ ID NO: 42729 - protein, 30 aa, Artificial Sequence
  Cyclic GFR-binding peptide
LHDELTRHKRLFIPKKRVIEYYLVSTASLQ

SEQ ID NO: 42730 - protein, 38 aa, Artificial Sequence; identical to SEQ ID NO: 4813
  Cyclic GFR-binding peptide
  MOD_RES (1), (3), (35), (36): Xaa is C or S

SEQ ID NO: 42731 - protein, 21 aa, Artificial Sequence
  Cyclic GFR-binding peptide
NQYNKLIVNSSDDLYLVSIAS

SEQ ID NO: 42732 - protein, 37 aa, Artificial Sequence; identical to SEQ ID NO: 4816
  Cyclic GFR-binding peptide
  MOD_RES (1), (34), (35): Xaa is C or S

SEQ ID NO: 42733 - protein, 34 aa, Artificial Sequence
  Cyclic GFR-binding peptide
  MOD_RES (29), (30): Xaa is C or S
VIMRYKKLIKPTKGIFYLISIANLDQSVXXPSAS

SEQ ID NO: 42734 - protein, 36 aa, Artificial Sequence; identical to SEQ ID NO: 4817
  Cyclic GFR-binding peptide
  MOD_RES (2), (4), (36): Xaa is C or S

SEQ ID NO: 42735 - protein, 40 aa, Artificial Sequence; identical to SEQ ID NO: 4819
  Cyclic GFR-binding peptide
  MOD_RES (1), (3), (35), (36): Xaa is C or S

SEQ ID NO: 42736 - protein, 39 aa, Artificial Sequence; identical to SEQ ID NO: 4820
  Cyclic GFR-binding peptide
  MOD_RES (2), (33), (34): Xaa is C or S

SEQ ID NO: 42737 - protein, 35 aa, Artificial Sequence
  Cyclic GFR-binding peptide
  MOD_RES (29), (29): Xaa is C or S
VMNQYNKLIVNSSDDLYLVSIASLKTPAXTPKTVH

SEQ ID NO: 42738 - protein, 36 aa, Artificial Sequence; identical to SEQ ID NO: 4823
  Cyclic GFR-binding peptide
  MOD_RES (35), (35): Xaa is C or S

SEQ ID NO: 42739 - protein, 32 aa, Artificial Sequence; identical to SEQ ID NO: 4825
  Cyclic GFR-binding peptide
  MOD_RES (2), (2): Xaa is C or S

SEQ ID NO: 42740 - protein, 30 aa, Artificial Sequence
  Cyclic GFR-binding peptide
  MOD_RES (26), (27): Xaa is C or S
QYNKLVKPTRGVLYLISIASLDQPVXXPSA

SEQ ID NO: 42741 - protein, 27 aa, Artificial Sequence
  Cyclic GFR-binding peptide
VVMDRYKKLVVKENEDFYLMSIANLET

SEQ ID NO: 42742 - protein, 35 aa, Artificial Sequence; identical to SEQ ID NO: 4828
  Cyclic GFR-binding peptide
  MOD_RES (2), (4), (35): Xaa is C or S

SEQ ID NO: 42743 - protein, 38 aa, Artificial Sequence; identical to SEQ ID NO: 4830
  Cyclic GFR-binding peptide
  MOD_RES (32), (33): Xaa is C or S

SEQ ID NO: 42744 - protein, 36 aa, Artificial Sequence; identical to SEQ ID NO: 4831
  Cyclic GFR-binding peptide
  MOD_RES (1), (32), (33): Xaa is C or S

SEQ ID NO: 42745 - protein, 29 aa, Artificial Sequence
  Cyclic GFR-binding peptide
  MOD_RES (27), (28): Xaa is C or S
MYHYKLVKPKRGVKYLISIPSLAQPVXXP

SEQ ID NO: 42746 - protein, 28 aa, Artificial Sequence
  Cyclic GFR-binding peptide
  MOD_RES (2), (2): Xaa is C or S
KXSRVIMQYNKLVKPKRGVLYLISIASL

SEQ ID NO: 42747 - protein, 26 aa, Artificial Sequence
  Cyclic GFR-binding peptide
EVVMERHKRLVVKDYEDYYLMSTASL

SEQ ID NO: 42748 - protein, 31 aa, Artificial Sequence
  Cyclic GFR-binding peptide
  MOD_RES (2), (4): Xaa is C or S
SXKXSKVIMQYNKLIKPTKGILYLISIASLD

SEQ ID NO: 42749 - protein, 29 aa, Artificial Sequence
  Cyclic GFR-binding peptide
  MOD_RES (28), (29): Xaa is C or S
VMRHKRLVKPTRGVYYLISTASLDQPVXX

SEQ ID NO: 42750 - protein, 43 aa, Artificial Sequence; identical to SEQ ID NO: 4835
  Cyclic GFR-binding peptide
  MOD_RES (2), (4), (41): Xaa is C or S

SEQ ID NO: 42751 - protein, 40 aa, Artificial Sequence; identical to SEQ ID NO: 4836
  Cyclic GFR-binding peptide
  MOD_RES (2), (34), (35): Xaa is C or S

SEQ ID NO: 42752 - protein, 34 aa, Artificial Sequence
  Cyclic GFR-binding peptide
  MOD_RES (28), (29): Xaa is C or S
IMYHYKLVKPKRGVKYLISIPSLAQPVXXPAASA

SEQ ID NO: 42753 - protein, 27 aa, Artificial Sequence
  Cyclic GFR-binding peptide
KVIMRHKRLIKPTKGIYYLISTASLDQ

SEQ ID NO: 42754 - protein, 41 aa, Artificial Sequence; identical to SEQ ID NO: 4838
  Cyclic GFR-binding peptide
  MOD_RES (2), (4), (36), (37): Xaa is C or S

SEQ ID NO: 42755 - protein, 29 aa, Artificial Sequence
  Cyclic GFR-binding peptide
  MOD_RES (2), (4): Xaa is C or S
SXKXSRVIMYHYKLVKPKRGVKYLISIPS

SEQ ID NO: 42756 - protein, 34 aa, Artificial Sequence
  Cyclic GFR-binding peptide
  MOD_RES (29), (30): Xaa is C or S
VMNQYNKLIVNNSSDLYLVSIASLKTPAXXAKPV

SEQ ID NO: 42757 - protein, 35 aa, Artificial Sequence; identical to SEQ ID NO: 4840
  Cyclic GFR-binding peptide
  MOD_RES (1), (33), (34): Xaa is C or S

SEQ ID NO: 42758 - protein, 31 aa, Artificial Sequence
  Cyclic GFR-binding peptide
LTYHYKLFIPKKRVIEKYLVSIPSLQVQTPR

SEQ ID NO: 42759 - protein, 39 aa, Artificial Sequence; identical to SEQ ID NO: 4841
  Cyclic GFR-binding peptide
  MOD_RES (2), (34), (35): Xaa is C or S

SEQ ID NO: 42760 - protein, 23 aa, Artificial Sequence
  Cyclic GFR-binding peptide
YHYKLIKPTKGIKYLISIPSLDQ

SEQ ID NO: 42761 - protein, 42 aa, Artificial Sequence; identical to SEQ ID NO: 4842
  Cyclic GFR-binding peptide
  MOD_RES (1), (3), (40): Xaa is C or S

SEQ ID NO: 42762 - protein, 42 aa, Artificial Sequence; identical to SEQ ID NO: 4844
  Cyclic GFR-binding peptide
  MOD_RES (2), (4), (36), (37): Xaa is C or S

SEQ ID NO: 42763 - protein, 26 aa, Artificial Sequence
  Cyclic GFR-binding peptide
MYHYKLIKPTKGIKYLISIPSLDQSV

SEQ ID NO: 42764 - protein, 35 aa, Artificial Sequence; identical to SEQ ID NO: 4846
  Cyclic GFR-binding peptide
  MOD_RES (1), (3), (35): Xaa is C or S

SEQ ID NO: 42765 - protein, 31 aa, Artificial Sequence; identical to SEQ ID NO: 4845
  Cyclic GFR-binding peptide
  MOD_RES (31), (31): Xaa is C or S

SEQ ID NO: 42766 - protein, 33 aa, Artificial Sequence; identical to SEQ ID NO: 4847
  Cyclic GFR-binding peptide
  MOD_RES (31), (32): Xaa is C or S

SEQ ID NO: 42767 - protein, 39 aa, Artificial Sequence; identical to SEQ ID NO: 4849
  Cyclic GFR-binding peptide
  MOD_RES (2), (33), (34): Xaa is C or S

SEQ ID NO: 42768 - protein, 36 aa, Artificial Sequence; identical to SEQ ID NO: 4850
  Cyclic GFR-binding peptide
  MOD_RES (1), (3), (35): Xaa is C or S

SEQ ID NO: 42769 - protein, 32 aa, Artificial Sequence; identical to SEQ ID NO: 4851
  Cyclic GFR-binding peptide
  MOD_RES (31), (32): Xaa is C or S

SEQ ID NO: 42770 - protein, 32 aa, Artificial Sequence
  Cyclic GFR-binding peptide
  MOD_RES (30), (30): Xaa is C or S
VVMNQYNKLIVNSSDDLYLVSIASLKTPAXTP

SEQ ID NO: 42771 - protein, 25 aa, Artificial Sequence
  Cyclic GFR-binding peptide
RVVMNYHYKLIVNSSDDKYLVSIPS

SEQ ID NO: 42772 - protein, 34 aa, Artificial Sequence; identical to SEQ ID NO: 4853
  Cyclic GFR-binding peptide
  MOD_RES (1), (3): Xaa is C or S

SEQ ID NO: 42773 - protein, 25 aa, Artificial Sequence
  Cyclic GFR-binding peptide
DRYKKLVVKENEDFYLMSIANLETP

SEQ ID NO: 42774 - protein, 29 aa, Artificial Sequence
  Cyclic GFR-binding peptide
  MOD_RES (27), (28): Xaa is C or S
NQYNKLIVNSSDDLYLVSIASLQTPAXXP

SEQ ID NO: 42775 - protein, 20 aa, Artificial Sequence
  Cyclic GFR-binding peptide
RYKKLIKPTKGIFYLISIAN

SEQ ID NO: 42776 - protein, 34 aa, Artificial Sequence
  Cyclic GFR-binding peptide
  MOD_RES (28), (29): Xaa is C or S
IMRHKRLVKPKRGVYYLISTASLAQPVXXPAASA

SEQ ID NO: 42777 - protein, 37 aa, Artificial Sequence; identical to SEQ ID NO: 4854
  Cyclic GFR-binding peptide
  MOD_RES (32), (33): Xaa is C or S

SEQ ID NO: 42778 - protein, 33 aa, Artificial Sequence
  Cyclic GFR-binding peptide
  MOD_RES (1), (3): Xaa is C or S
XGXGEVVMERHKRLVVKDYEDYYLMSTASLETP

SEQ ID NO: 42779 - protein, 35 aa, Artificial Sequence; identical to SEQ ID NO: 4857
  Cyclic GFR-binding peptide
  MOD_RES (2), (4): Xaa is C or S

SEQ ID NO: 42780 - protein, 20 aa, Artificial Sequence
  Cyclic GFR-binding peptide
RHKRLVVKENEDYYLMSTAS

SEQ ID NO: 42781 - protein, 38 aa, Artificial Sequence; identical to SEQ ID NO: 4859
  Cyclic GFR-binding peptide
  MOD_RES (2), (4), (35), (36): Xaa is C or S

SEQ ID NO: 42782 - protein, 36 aa, Artificial Sequence; identical to SEQ ID NO: 4860
  Cyclic GFR-binding peptide
  MOD_RES (31), (32): Xaa is C or S

SEQ ID NO: 42783 - protein, 32 aa, Artificial Sequence
  Cyclic GFR-binding peptide
  MOD_RES (27), (28): Xaa is C or S
NRHKRLIVNSSDDYYLVSTASLQTPAXXPKPV

SEQ ID NO: 42784 - protein, 22 aa, Artificial Sequence
  Cyclic GFR-binding peptide
MRYKKLIKPTKGIFYLISIANL

SEQ ID NO: 42785 - protein, 29 aa, Artificial Sequence
  Cyclic GFR-binding peptide
VVMNYHYKLIVNSSDDKYLVSIPSLKTPA

SEQ ID NO: 42786 - protein, 32 aa, Artificial Sequence
  Cyclic GFR-binding peptide
  MOD_RES (2), (4): Xaa is C or S
HXGXARVVMNRHKRLIVNSSDDYYLVSTASLQ

SEQ ID NO: 42787 - protein, 30 aa, Artificial Sequence
  Cyclic GFR-binding peptide
  MOD_RES (26), (27): Xaa is C or S
YHYKLIKPTKGIKYLISIPSLDQSVXXPSA

SEQ ID NO: 42788 - protein, 33 aa, Artificial Sequence; identical to SEQ ID NO: 4863
  Cyclic GFR-binding peptide
  MOD_RES (32), (33): Xaa is C or S

SEQ ID NO: 42789 - protein, 38 aa, Artificial Sequence; identical to SEQ ID NO: 4862
  Cyclic GFR-binding peptide
  MOD_RES (2), (34), (35): Xaa is C or S

SEQ ID NO: 42790 - protein, 31 aa, Artificial Sequence; identical to SEQ ID NO: 4864
  Cyclic GFR-binding peptide
  MOD_RES (31), (31): Xaa is C or S

SEQ ID NO: 42791 - protein, 39 aa, Artificial Sequence; identical to SEQ ID NO: 4866
  Cyclic GFR-binding peptide
  MOD_RES (2), (4), (36), (37): Xaa is C or S

SEQ ID NO: 42792 - protein, 38 aa, Artificial Sequence; identical to SEQ ID NO: 4869
  Cyclic GFR-binding peptide
  MOD_RES (1), (33), (34): Xaa is C or S

SEQ ID NO: 42793 - protein, 23 aa, Artificial Sequence
  Cyclic GFR-binding peptide
VMRYKKLVKPTRGVFYLISIANL

SEQ ID NO: 42794 - protein, 34 aa, Artificial Sequence
  Cyclic GFR-binding peptide
  MOD_RES (32), (32): Xaa is C or S
LTRHKRLFIPKKRVIEYYLVSTASLQVQTPRXQV

SEQ ID NO: 42795 - protein, 32 aa, Artificial Sequence; identical to SEQ ID NO: 4870
  Cyclic GFR-binding peptide
  MOD_RES (2), (2): Xaa is C or S

SEQ ID NO: 42796 - protein, 25 aa, Artificial Sequence
  Cyclic GFR-binding peptide
KVIMRHKRLIKPTKGIYYLISTASL

SEQ ID NO: 42797 - protein, 25 aa, Artificial Sequence
  Cyclic GFR-binding peptide
EVVMERHKRLVVKDYEDYYLMSTAS

SEQ ID NO: 42798 - protein, 38 aa, Artificial Sequence; identical to SEQ ID NO: 4872
  Cyclic GFR-binding peptide
  MOD_RES (2), (33), (34): Xaa is C or S

SEQ ID NO: 42799 - protein, 32 aa, Artificial Sequence
  Cyclic GFR-binding peptide
  MOD_RES (28), (29): Xaa is C or S
IMRHKRLVKPKRGVYYLISTASLAQPVXXPAA

SEQ ID NO: 42800 - protein, 25 aa, Artificial Sequence
  Cyclic GFR-binding peptide
GEQYNKLTPVGMDDLYLVSIASLKT

SEQ ID NO: 42801 - protein, 27 aa, Artificial Sequence
  Cyclic GFR-binding peptide
  MOD_RES (27), (27): Xaa is C or S
NQYNKLIVNNSSDLYLVSIASLKTPAX

SEQ ID NO: 42802 - protein, 33 aa, Artificial Sequence
  Cyclic GFR-binding peptide
  MOD_RES (30), (30): Xaa is C or S
QYNKLFIPKKRVIELYLVSIASLQVQTPRXQVN

SEQ ID NO: 42803 - protein, 21 aa, Artificial Sequence
  Cyclic GFR-binding peptide
EQYNKLTPVGMDDLYLVSIAS

SEQ ID NO: 42804 - protein, 39 aa, Artificial Sequence; identical to SEQ ID NO: 4875
  Cyclic GFR-binding peptide
  MOD_RES (2), (4): Xaa is C or S

SEQ ID NO: 42805 - protein, 37 aa, Artificial Sequence
  Cyclic GFR-binding peptide
  MOD_RES (34), (34): Xaa is C or S
DELTQYNKLFIPKKRVIELYLVSIASLQVQTPRXQVN

SEQ ID NO: 42806 - protein, 35 aa, Artificial Sequence; identical to SEQ ID NO: 4877
  Cyclic GFR-binding peptide
  MOD_RES (1), (1): Xaa is C or S

SEQ ID NO: 42807 - protein, 30 aa, Artificial Sequence
  Cyclic GFR-binding peptide
  MOD_RES (1), (3): Xaa is C or S
XGXEAVSMGERYKKLTPVGMDDFYLVSIAN

SEQ ID NO: 42808 - protein, 28 aa, Artificial Sequence
  Cyclic GFR-binding peptide
VVMQYNKLVKPTRGVLYLISIASLDQPV

SEQ ID NO: 42809 - protein, 33 aa, Artificial Sequence; identical to SEQ ID NO: 4879
  Cyclic GFR-binding peptide
  MOD_RES (1), (33): Xaa is C or S

SEQ ID NO: 42810 - protein, 30 aa, Artificial Sequence; identical to SEQ ID NO: 4880
  Cyclic GFR-binding peptide

SEQ ID NO: 42811 - protein, 31 aa, Artificial Sequence
  Cyclic GFR-binding peptide
  MOD_RES (1), (3): Xaa is C or S
XGXARVVMNRHKRLIVNSSDDYYLVSTASLQ

SEQ ID NO: 42812 - protein, 27 aa, Artificial Sequence
  Cyclic GFR-binding peptide
VVMNRYKKLIVNNSSDFYLVSIANLKT

SEQ ID NO: 42813 - protein, 22 aa, Artificial Sequence
  Cyclic GFR-binding peptide
QYNKLIVNNSSDLYLVSIASLK

SEQ ID NO: 42814 - protein, 38 aa, Artificial Sequence; identical to SEQ ID NO: 4881
  Cyclic GFR-binding peptide
  MOD_RES (1), (3): Xaa is C or S

SEQ ID NO: 42815 - protein, 26 aa, Artificial Sequence
  Cyclic GFR-binding peptide
  MOD_RES (26), (26): Xaa is C or S
QYNKLIVNNSSDLYLVSIASLKTPAX

SEQ ID NO: 42816 - protein, 32 aa, Artificial Sequence
  Cyclic GFR-binding peptide
  MOD_RES (2), (4): Xaa is C or S
SXKXSRVIMRYKKLVKPKRGVFYLISIANLAQ

SEQ ID NO: 42817 - protein, 28 aa, Artificial Sequence
  Cyclic GFR-binding peptide
KVVMYHYKLVKPTRGVKYLISIPSLDQP

SEQ ID NO: 42818 - protein, 33 aa, Artificial Sequence; identical to SEQ ID NO: 4884
  Cyclic GFR-binding peptide
  MOD_RES (1), (33): Xaa is C or S

SEQ ID NO: 42819 - protein, 26 aa, Artificial Sequence
  Cyclic GFR-binding peptide
NRHKRLIVNSSDDYYLVSTASLKTPA

SEQ ID NO: 42820 - protein, 25 aa, Artificial Sequence
  Cyclic GFR-binding peptide
IMQYNKLIKPTKGILYLISIASLDQ

SEQ ID NO: 42821 - protein, 28 aa, Artificial Sequence
  Cyclic GFR-binding peptide
VVMNQYNKLIVNSSDDLYLVSIASLQTP

SEQ ID NO: 42822 - protein, 32 aa, Artificial Sequence
  Cyclic GFR-binding peptide
  MOD_RES (2), (4): Xaa is C or S
RXGXGEVVMERHKRLVVKDYEDYYLMSTASLE

SEQ ID NO: 42823 - protein, 35 aa, Artificial Sequence
  Cyclic GFR-binding peptide
  MOD_RES (29), (30): Xaa is C or S
VVMRHKRLVKPTRGVYYLISTASLDQPVXXPSASA

SEQ ID NO: 42824 - protein, 27 aa, Artificial Sequence
  Cyclic GFR-binding peptide
  MOD_RES (1), (1): Xaa is C or S
XSKVVMRHKRLVKPTRGVYYLISTASL

SEQ ID NO: 42825 - protein, 25 aa, Artificial Sequence
  Cyclic GFR-binding peptide
KVVMNYHYKLIVNNSSDKYLVSIPS

SEQ ID NO: 42826 - protein, 22 aa, Artificial Sequence
  Cyclic GFR-binding peptide
VMQYNKLVKPTRGVLYLISIAS

SEQ ID NO: 42827 - protein, 40 aa, Artificial Sequence; identical to SEQ ID NO: 4886
  Cyclic GFR-binding peptide
  MOD_RES (1), (3), (34), (35): Xaa is C or S

SEQ ID NO: 42828 - protein, 39 aa, Artificial Sequence; identical to SEQ ID NO: 4887
  Cyclic GFR-binding peptide
  MOD_RES (1), (33): Xaa is C or S

SEQ ID NO: 42829 - protein, 24 aa, Artificial Sequence
  Cyclic GFR-binding peptide
TRYKKLFIPKKRVIEFYLVSIANL

SEQ ID NO: 42830 - protein, 31 aa, Artificial Sequence
  Cyclic GFR-binding peptide
  MOD_RES (26), (27): Xaa is C or S
RYKKLIVNNSSDFYLVSIANLKTPAXXAKPV

SEQ ID NO: 42831 - protein, 23 aa, Artificial Sequence
  Cyclic GFR-binding peptide
VMERHKRLVVKDYEDYYLMSTAS

SEQ ID NO: 42832 - protein, 32 aa, Artificial Sequence
  Cyclic GFR-binding peptide
  MOD_RES (27), (28): Xaa is C or S
ERYKKLTPVGMDDFYLVSIANLKTPVXXAKGV

SEQ ID NO: 42833 - protein, 30 aa, Artificial Sequence
  Cyclic GFR-binding peptide
  MOD_RES (1), (1): Xaa is C or S
XARVVMNYHYKLIVNSSDDKYLVSIPSLQT

SEQ ID NO: 42834 - protein, 30 aa, Artificial Sequence
  Cyclic GFR-binding peptide
  MOD_RES (27), (28): Xaa is C or S
MYHYKLVKPTRGVKYLISIPSLDQPVXXPS

SEQ ID NO: 42835 - protein, 39 aa, Artificial Sequence; identical to SEQ ID NO: 4888
  Cyclic GFR-binding peptide
  MOD_RES (2), (4): Xaa is C or S

SEQ ID NO: 42836 - protein, 30 aa, Artificial Sequence
  Cyclic GFR-binding peptide
  MOD_RES (27), (28): Xaa is C or S
NQYNKLIVNSSDDLYLVSIASLQTPAXXPK

SEQ ID NO: 42837 - protein, 31 aa, Artificial Sequence; identical to SEQ ID NO: 4889
  Cyclic GFR-binding peptide
  MOD_RES (31), (31): Xaa is C or S

SEQ ID NO: 42838 - protein, 34 aa, Artificial Sequence
  Cyclic GFR-binding peptide
  MOD_RES (30), (31): Xaa is C or S
VVMNQYNKLIVNNSSDLYLVSIASLKTPAXXAKP

SEQ ID NO: 42839 - protein, 40 aa, Artificial Sequence; identical to SEQ ID NO: 4890
  Cyclic GFR-binding peptide
  MOD_RES (2), (4): Xaa is C or S

SEQ ID NO: 42840 - protein, 25 aa, Artificial Sequence
  Cyclic GFR-binding peptide
YHYKLIVNNSSDKYLVSIPSLKTPA

SEQ ID NO: 42841 - protein, 25 aa, Artificial Sequence
  Cyclic GFR-binding peptide
KVVMQYNKLVKPTRGVLYLISIASL

SEQ ID NO: 42842 - protein, 25 aa, Artificial Sequence
  Cyclic GFR-binding peptide
YHYKLIVNSSDDKYLVSIPSLQTPA

SEQ ID NO: 42843 - protein, 38 aa, Artificial Sequence; identical to SEQ ID NO: 4891
  Cyclic GFR-binding peptide
  MOD_RES (1), (3), (35), (36): Xaa is C or S

SEQ ID NO: 42844 - protein, 33 aa, Artificial Sequence
  Cyclic GFR-binding peptide
  MOD_RES (27), (28): Xaa is C or S
MYHYKLVKPTRGVKYLISIPSLDQPVXXPSASA

SEQ ID NO: 42845 - protein, 29 aa, Artificial Sequence
  Cyclic GFR-binding peptide
  MOD_RES (2), (2): Xaa is C or S
GXARVVMNRHKRLIVNSSDDYYLVSTASL

SEQ ID NO: 42846 - protein, 26 aa, Artificial Sequence
  Cyclic GFR-binding peptide
IMRYKKLIKPTKGIFYLISIANLDQS

SEQ ID NO: 42847 - protein, 29 aa, Artificial Sequence
  Cyclic GFR-binding peptide
  MOD_RES (29), (29): Xaa is C or S
VVMRYKKLVKPTRGVFYLISIANLDQPVX

SEQ ID NO: 42848 - protein, 30 aa, Artificial Sequence
  Cyclic GFR-binding peptide
  MOD_RES (2), (4): Xaa is C or S
SXKXSKVIMRHKRLIKPTKGIYYLISTASL

SEQ ID NO: 42849 - protein, 39 aa, Artificial Sequence; identical to SEQ ID NO: 4894
  Cyclic GFR-binding peptide
  MOD_RES (2), (4), (36): Xaa is C or S

SEQ ID NO: 42850 - protein, 32 aa, Artificial Sequence; identical to SEQ ID NO: 4895
  Cyclic GFR-binding peptide
  MOD_RES (31), (32): Xaa is C or S

SEQ ID NO: 42851 - protein, 28 aa, Artificial Sequence
  Cyclic GFR-binding peptide
  MOD_RES (2), (2): Xaa is C or S
GXARVVMNRHKRLIVNSSDDYYLVSTAS

SEQ ID NO: 42852 - protein, 33 aa, Artificial Sequence; identical to SEQ ID NO: 4896
  Cyclic GFR-binding peptide
  MOD_RES (32), (33): Xaa is C or S

SEQ ID NO: 42853 - protein, 32 aa, Artificial Sequence; identical to SEQ ID NO: 4897
  Cyclic GFR-binding peptide
  MOD_RES (31), (32): Xaa is C or S

SEQ ID NO: 42854 - protein, 30 aa, Artificial Sequence
  Cyclic GFR-binding peptide
  MOD_RES (1), (3): Xaa is C or S
XGXSRVVMNQYNKLIVNSSDDLYLVSIASL

SEQ ID NO: 42855 - protein, 39 aa, Artificial Sequence; identical to SEQ ID NO: 4898
  Cyclic GFR-binding peptide
  MOD_RES (1), (3), (35), (36): Xaa is C or S

SEQ ID NO: 42856 - protein, 35 aa, Artificial Sequence
  Cyclic GFR-binding peptide
  MOD_RES (30), (31): Xaa is C or S
VVMNRHKRLIVNSSDDYYLVSTASLQTPAXXPKPV

SEQ ID NO: 42857 - protein, 27 aa, Artificial Sequence
  Cyclic GFR-binding peptide
IMRHKRLVKPKRGVYYLISTASLAQPV

SEQ ID NO: 42858 - protein, 34 aa, Artificial Sequence
  Cyclic GFR-binding peptide
  MOD_RES (32), (33): Xaa is C or S
AVSMGERHKRLTPVGMDDYYLVSTASLKTPVXXA

SEQ ID NO: 42859 - protein, 34 aa, Artificial Sequence; identical to SEQ ID NO: 4899
  Cyclic GFR-binding peptide
  MOD_RES (1), (3), (34): Xaa is C or S

SEQ ID NO: 42860 - protein, 33 aa, Artificial Sequence; identical to SEQ ID NO: 4900
  Cyclic GFR-binding peptide
  MOD_RES (31), (32): Xaa is C or S

SEQ ID NO: 42861 - protein, 25 aa, Artificial Sequence
  Cyclic GFR-binding peptide
VVMQYNKLVKPTRGVLYLISIASLD

SEQ ID NO: 42862 - protein, 37 aa, Artificial Sequence; identical to SEQ ID NO: 4903
  Cyclic GFR-binding peptide
  MOD_RES (31), (32): Xaa is C or S

SEQ ID NO: 42863 - protein, 31 aa, Artificial Sequence
  Cyclic GFR-binding peptide
  MOD_RES (2), (4): Xaa is C or S
HXGXAKVVMNYHYKLIVNNSSDKYLVSIPSL

SEQ ID NO: 42864 - protein, 27 aa, Artificial Sequence
  Cyclic GFR-binding peptide
MNRYKKLIVNNSSDFYLVSIANLKTPA

SEQ ID NO: 42865 - protein, 32 aa, Artificial Sequence
  Cyclic GFR-binding peptide
  MOD_RES (2), (4): Xaa is C or S
SXKXSKVVMRHKRLVKPTRGVYYLISTASLDQ

SEQ ID NO: 42866 - protein, 32 aa, Artificial Sequence
  Cyclic GFR-binding peptide
  MOD_RES (2), (4): Xaa is C or S
RXGXGEVVMDRHKRLVVKENEDYYLMSTASLE

SEQ ID NO: 42867 - protein, 35 aa, Artificial Sequence; identical to SEQ ID NO: 4908
  Cyclic GFR-binding peptide
  MOD_RES (32), (33): Xaa is C or S

SEQ ID NO: 42868 - protein, 26 aa, Artificial Sequence
  Cyclic GFR-binding peptide
MYHYKLVKPTRGVKYLISIPSLDQPV

SEQ ID NO: 42869 - protein, 35 aa, Artificial Sequence; identical to SEQ ID NO: 4909
  Cyclic GFR-binding peptide
  MOD_RES (31), (32): Xaa is C or S

SEQ ID NO: 42870 - protein, 37 aa, Artificial Sequence; identical to SEQ ID NO: 4910
  Cyclic GFR-binding peptide
  MOD_RES (1), (3), (35), (36): Xaa is C or S

SEQ ID NO: 42871 - protein, 27 aa, Artificial Sequence
  Cyclic GFR-binding peptide
TRYKKLFIPKKRVIEFYLVSIANLQVQ

SEQ ID NO: 42872 - protein, 24 aa, Artificial Sequence
  Cyclic GFR-binding peptide
VIMYHYKLIKPTKGIKYLISIPSL

SEQ ID NO: 42873 - protein, 26 aa, Artificial Sequence
  Cyclic GFR-binding peptide
  MOD_RES (26), (26): Xaa is C or S
QYNKLIVNSSDDLYLVSIASLQTPAX

SEQ ID NO: 42874 - protein, 30 aa, Artificial Sequence
  Cyclic GFR-binding peptide
  MOD_RES (27), (27): Xaa is C or S
NRHKRLIVNSSDDYYLVSTASLKTPAXTPK

SEQ ID NO: 42875 - protein, 33 aa, Artificial Sequence; identical to SEQ ID NO: 4914
  Cyclic GFR-binding peptide
  MOD_RES (31), (32): Xaa is C or S

SEQ ID NO: 42876 - protein, 28 aa, Artificial Sequence
  Cyclic GFR-binding peptide
AKVVMNYHYKLIVNNSSDKYLVSIPSLK

SEQ ID NO: 42877 - protein, 35 aa, Artificial Sequence; identical to SEQ ID NO: 4915
  Cyclic GFR-binding peptide
  MOD_RES (33), (34): Xaa is C or S

SEQ ID NO: 42878 - protein, 35 aa, Artificial Sequence
  Cyclic GFR-binding peptide
  MOD_RES (30), (31): Xaa is C or S
KVIMQYNKLIKPTKGILYLISIASLDQSVXXPSAS

SEQ ID NO: 42879 - protein, 33 aa, Artificial Sequence; identical to SEQ ID NO: 4916
  Cyclic GFR-binding peptide
  MOD_RES (1), (33): Xaa is C or S

SEQ ID NO: 42880 - protein, 29 aa, Artificial Sequence
  Cyclic GFR-binding peptide
AAAAAAAAAYHYKLVKPTRGVKYLISIPS

SEQ ID NO: 42881 - protein, 27 aa, Artificial Sequence
  Cyclic GFR-binding peptide
SMGERHKRLTPVGMDDYYLVSTASLKT

SEQ ID NO: 42882 - protein, 36 aa, Artificial Sequence; identical to SEQ ID NO: 4918
  Cyclic GFR-binding peptide
  MOD_RES (1), (3), (35): Xaa is C or S

SEQ ID NO: 42883 - protein, 29 aa, Artificial Sequence
  Cyclic GFR-binding peptide
VVMNQYNKLIVNSSDDLYLVSIASLKTPA

SEQ ID NO: 42884 - protein, 26 aa, Artificial Sequence
  Cyclic GFR-binding peptide
VMERYKKLVVKDYEDFYLMSIANLET

SEQ ID NO: 42885 - protein, 25 aa, Artificial Sequence
  Cyclic GFR-binding peptide
ELTRHKRLFIPKKRVIEYYLVSTAS

SEQ ID NO: 42886 - protein, 33 aa, Artificial Sequence
  Cyclic GFR-binding peptide
  MOD_RES (27), (28): Xaa is C or S
MRYKKLVKPTRGVFYLISIANLDQPVXXPSASA

SEQ ID NO: 42887 - protein, 35 aa, Artificial Sequence
  Cyclic GFR-binding peptide
  MOD_RES (33), (33): Xaa is C or S
ELTQYNKLFIPKKRVIELYLVSIASLQVQTPRXQV

SEQ ID NO: 42888 - protein, 29 aa, Artificial Sequence
  Cyclic GFR-binding peptide
  MOD_RES (1), (1): Xaa is C or S
XSRVIMYHYKLVKPKRGVKYLISIPSLAQ

SEQ ID NO: 42889 - protein, 25 aa, Artificial Sequence
  Cyclic GFR-binding peptide
LTRYKKLFIPKKRVIEFYLVSIANL

SEQ ID NO: 42890 - protein, 21 aa, Artificial Sequence
  Cyclic GFR-binding peptide
EYHYKLVVKDYEDKYLMSIPS

SEQ ID NO: 42891 - protein, 24 aa, Artificial Sequence
  Cyclic GFR-binding peptide
DRYKKLVVKENEDFYLMSIANLET

SEQ ID NO: 42892 - protein, 41 aa, Artificial Sequence; identical to SEQ ID NO: 4925
  Cyclic GFR-binding peptide
  MOD_RES (2), (4), (36): Xaa is C or S

SEQ ID NO: 42893 - protein, 39 aa, Artificial Sequence; identical to SEQ ID NO: 4926
  Cyclic GFR-binding peptide
  MOD_RES (2), (34), (35): Xaa is C or S

SEQ ID NO: 42894 - protein, 28 aa, Artificial Sequence
  Cyclic GFR-binding peptide
  MOD_RES (2), (2): Xaa is C or S
KXSKVVMRHKRLVKPTRGVYYLISTASL

SEQ ID NO: 42895 - protein, 36 aa, Artificial Sequence
  Cyclic GFR-binding peptide
  MOD_RES (30), (31): Xaa is C or S
RVIMRYKKLVKPKRGVFYLISIANLAQPVXXPAASA

SEQ ID NO: 42896 - protein, 33 aa, Artificial Sequence
  Cyclic GFR-binding peptide
  MOD_RES (30), (31): Xaa is C or S
VVMNYHYKLIVNSSDDKYLVSIPSLKTPAXXPK

SEQ ID NO: 42897 - protein, 28 aa, Artificial Sequence
  Cyclic GFR-binding peptide
VMNQYNKLIVNSSDDLYLVSIASLKTPA

SEQ ID NO: 42898 - protein, 40 aa, Artificial Sequence; identical to SEQ ID NO: 4931
  Cyclic GFR-binding peptide
  MOD_RES (1), (3), (35), (36): Xaa is C or S

SEQ ID NO: 42899 - protein, 21 aa, Artificial Sequence
  Cyclic GFR-binding peptide
RHKRLTPVGMDDYYLVSTASL

SEQ ID NO: 42900 - protein, 40 aa, Artificial Sequence; identical to SEQ ID NO: 4932
  Cyclic GFR-binding peptide
  MOD_RES (2), (4), (35), (36): Xaa is C or S

SEQ ID NO: 42901 - protein, 35 aa, Artificial Sequence; identical to SEQ ID NO: 4936
  Cyclic GFR-binding peptide
  MOD_RES (31), (32): Xaa is C or S

SEQ ID NO: 42902 - protein, 36 aa, Artificial Sequence; identical to SEQ ID NO: 4939
  Cyclic GFR-binding peptide
  MOD_RES (31), (32): Xaa is C or S

SEQ ID NO: 42903 - protein, 32 aa, Artificial Sequence
  Cyclic GFR-binding peptide
  MOD_RES (29), (30): Xaa is C or S
VMDRHKRLVVKENEDYYLMSTASLETPVXXAK

SEQ ID NO: 42904 - protein, 31 aa, Artificial Sequence
  Cyclic GFR-binding peptide
  MOD_RES (26), (26): Xaa is C or S
QYNKLIVNSSDDLYLVSIASLKTPAXTPKTV

SEQ ID NO: 42905 - protein, 30 aa, Artificial Sequence
  Cyclic GFR-binding peptide
  MOD_RES (26), (27): Xaa is C or S
RHKRLVVKDYEDYYLMSTASLETPVXXAKP

SEQ ID NO: 42906 - protein, 40 aa, Artificial Sequence; identical to SEQ ID NO: 4943
  Cyclic GFR-binding peptide
  MOD_RES (1), (3), (40): Xaa is C or S

SEQ ID NO: 42907 - protein, 37 aa, Artificial Sequence; identical to SEQ ID NO: 4944
  Cyclic GFR-binding peptide
  MOD_RES (2), (4), (35), (36): Xaa is C or S

SEQ ID NO: 42908 - protein, 30 aa, Artificial Sequence
  Cyclic GFR-binding peptide
  MOD_RES (28), (29): Xaa is C or S
MEYHYKLVVKDYEDKYLMSIPSLETPVXXA

SEQ ID NO: 42909 - protein, 28 aa, Artificial Sequence
  Cyclic GFR-binding peptide
  MOD_RES (1), (3): Xaa is C or S
XKXSRVIMRHKRLVKPKRGVYYLISTAS

SEQ ID NO: 42910 - protein, 30 aa, Artificial Sequence
  Cyclic GFR-binding peptide
  MOD_RES (1), (1): Xaa is C or S
XSRVIMRHKRLVKPKRGVYYLISTASLAQP

SEQ ID NO: 42911 - protein, 25 aa, Artificial Sequence
  Cyclic GFR-binding peptide
LTRHKRLFIPKKRVIEYYLVSTASL

SEQ ID NO: 42912 - protein, 28 aa, Artificial Sequence
  Cyclic GFR-binding peptide
KVIMRHKRLIKPTKGIYYLISTASLDQS

SEQ ID NO: 42913 - protein, 30 aa, Artificial Sequence
  Cyclic GFR-binding peptide
GEVVMEYHYKLVVKDYEDKYLMSIPSLETP

SEQ ID NO: 42914 - protein, 22 aa, Artificial Sequence
  Cyclic GFR-binding peptide
DRYKKLVVKENEDFYLMSIANL

SEQ ID NO: 42915 - protein, 35 aa, Artificial Sequence; identical to SEQ ID NO: 4949
  Cyclic GFR-binding peptide
  MOD_RES (32), (33): Xaa is C or S

SEQ ID NO: 42916 - protein, 44 aa, Artificial Sequence; identical to SEQ ID NO: 4950
  Cyclic GFR-binding peptide
  MOD_RES (1), (3), (40): Xaa is C or S

SEQ ID NO: 42917 - protein, 30 aa, Artificial Sequence
  Cyclic GFR-binding peptide
HDELTQYNKLFIPKKRVIELYLVSIASLQV

SEQ ID NO: 42918 - protein, 32 aa, Artificial Sequence
  Cyclic GFR-binding peptide
  MOD_RES (29), (30): Xaa is C or S
MGERHKRLTPVGMDDYYLVSTASLKTPVXXAK

SEQ ID NO: 42919 - protein, 30 aa, Artificial Sequence
  Cyclic GFR-binding peptide
  MOD_RES (29), (30): Xaa is C or S
VVMYHYKLVKPTRGVKYLISIPSLDQPVXX

SEQ ID NO: 42920 - protein, 32 aa, Artificial Sequence
  Cyclic GFR-binding peptide
  MOD_RES (28), (29): Xaa is C or S
MNRYKKLIVNNSSDFYLVSIANLKTPAXXAKP

SEQ ID NO: 42921 - protein, 39 aa, Artificial Sequence; identical to SEQ ID NO: 4954
  Cyclic GFR-binding peptide
  MOD_RES (2), (4), (35), (36): Xaa is C or S

SEQ ID NO: 42922 - protein, 35 aa, Artificial Sequence
  Cyclic GFR-binding peptide
  MOD_RES (31), (31): Xaa is C or S
TQYNKLFIPKKRVIELYLVSIASLQVQTPRXQVNR

SEQ ID NO: 42923 - protein, 37 aa, Artificial Sequence; identical to SEQ ID NO: 4956
  Cyclic GFR-binding peptide
  MOD_RES (2), (4), (36), (37): Xaa is C or S

SEQ ID NO: 42924 - protein, 29 aa, Artificial Sequence
  Cyclic GFR-binding peptide
EVVMDRYKKLVVKENEDFYLMSIANLETP

SEQ ID NO: 42925 - protein, 33 aa, Artificial Sequence
  Cyclic GFR-binding peptide
  MOD_RES (28), (29): Xaa is C or S
MNRYKKLIVNNSSDFYLVSIANLKTPAXXAKPV

SEQ ID NO: 42926 - protein, 23 aa, Artificial Sequence
  Cyclic GFR-binding peptide
RHKRLFIPKKRVIEYYLVSTASL

SEQ ID NO: 42927 - protein, 31 aa, Artificial Sequence; identical to SEQ ID NO: 4961
  Cyclic GFR-binding peptide
  MOD_RES (31), (31): Xaa is C or S

SEQ ID NO: 42928 - protein, 28 aa, Artificial Sequence
  Cyclic GFR-binding peptide
  MOD_RES (1), (1): Xaa is C or S
XSKVVMRYKKLVKPTRGVFYLISIANLD

SEQ ID NO: 42929 - protein, 38 aa, Artificial Sequence; identical to SEQ ID NO: 4963
  Cyclic GFR-binding peptide
  MOD_RES (2), (4), (37), (38): Xaa is C or S

SEQ ID NO: 42930 - protein, 41 aa, Artificial Sequence; identical to SEQ ID NO: 4964
  Cyclic GFR-binding peptide
  MOD_RES (1), (3), (35), (36): Xaa is C or S

SEQ ID NO: 42931 - protein, 34 aa, Artificial Sequence; identical to SEQ ID NO: 4965
  Cyclic GFR-binding peptide
  MOD_RES (2), (4): Xaa is C or S

SEQ ID NO: 42932 - protein, 29 aa, Artificial Sequence
  Cyclic GFR-binding peptide
  MOD_RES (2), (4): Xaa is C or S
SXKXSKVIMYHYKLIKPTKGIKYLISIPS

SEQ ID NO: 42933 - protein, 34 aa, Artificial Sequence; identical to SEQ ID NO: 4967
  Cyclic GFR-binding peptide
  MOD_RES (1), (32), (33): Xaa is C or S

SEQ ID NO: 42934 - protein, 31 aa, Artificial Sequence
  Cyclic GFR-binding peptide
  MOD_RES (1), (3): Xaa is C or S
XKXSKVIMQYNKLIKPTKGILYLISIASLDQ

SEQ ID NO: 42935 - protein, 33 aa, Artificial Sequence
  Cyclic GFR-binding peptide
  MOD_RES (2), (4): Xaa is C or S
RXGXEAVSMGERYKKLTPVGMDDFYLVSIANLK

SEQ ID NO: 42936 - protein, 31 aa, Artificial Sequence
  Cyclic GFR-binding peptide
  MOD_RES (26), (27): Xaa is C or S
QYNKLTPVGMDDLYLVSIASLKTPVXXAKGV

SEQ ID NO: 42937 - protein, 39 aa, Artificial Sequence; identical to SEQ ID NO: 4968
  Cyclic GFR-binding peptide
  MOD_RES (1), (3), (35), (36): Xaa is C or S

SEQ ID NO: 42938 - protein, 30 aa, Artificial Sequence
  Cyclic GFR-binding peptide
  MOD_RES (28), (29): Xaa is C or S
MERHKRLVVKDYEDYYLMSTASLETPVXXA

SEQ ID NO: 42939 - protein, 23 aa, Artificial Sequence
  Cyclic GFR-binding peptide
YHYKLIVNNSSDKYLVSIPSLKT

SEQ ID NO: 42940 - protein, 32 aa, Artificial Sequence
  Cyclic GFR-binding peptide
  MOD_RES (26), (27): Xaa is C or S
QYNKLIVNSSDDLYLVSIASLKTPAXXPKPVY

SEQ ID NO: 42941 - protein, 24 aa, Artificial Sequence
  Cyclic GFR-binding peptide
MNRYKKLIVNNSSDFYLVSIANLK

SEQ ID NO: 42942 - protein, 24 aa, Artificial Sequence
  Cyclic GFR-binding peptide
RHKRLIKPTKGIYYLISTASLDQS

SEQ ID NO: 42943 - protein, 28 aa, Artificial Sequence
  Cyclic GFR-binding peptide
VVMERYKKLVVKDYEDFYLMSIANLETP

SEQ ID NO: 42944 - protein, 33 aa, Artificial Sequence; identical to SEQ ID NO: 4972
  Cyclic GFR-binding peptide
  MOD_RES (1), (33): Xaa is C or S

SEQ ID NO: 42945 - protein, 29 aa, Artificial Sequence
  Cyclic GFR-binding peptide
  MOD_RES (2), (2): Xaa is C or S
GXGEVVMERYKKLVVKDYEDFYLMSIANL

SEQ ID NO: 42946 - protein, 30 aa, Artificial Sequence
  Cyclic GFR-binding peptide
  MOD_RES (1), (1): Xaa is C or S
XSRVVMNRHKRLIVNSSDDYYLVSTASLKT

SEQ ID NO: 42947 - protein, 33 aa, Artificial Sequence
  Cyclic GFR-binding peptide
  MOD_RES (27), (28): Xaa is C or S
NRHKRLIVNSSDDYYLVSTASLKTPAXXPKPVY

SEQ ID NO: 42948 - protein, 44 aa, Artificial Sequence; identical to SEQ ID NO: 4976
  Cyclic GFR-binding peptide
  MOD_RES (2), (4), (41): Xaa is C or S

SEQ ID NO: 42949 - protein, 32 aa, Artificial Sequence
  Cyclic GFR-binding peptide
ELTQYNKLFIPKKRVIELYLVSIASLQVQTPR

SEQ ID NO: 42950 - protein, 33 aa, Artificial Sequence
  Cyclic GFR-binding peptide
  MOD_RES (1), (3): Xaa is C or S
XKXALHDELTYHYKLFIPKKRVIEKYLVSIPSL

SEQ ID NO: 42951 - protein, 32 aa, Artificial Sequence; identical to SEQ ID NO: 4977
  Cyclic GFR-binding peptide
  MOD_RES (31), (32): Xaa is C or S

SEQ ID NO: 42952 - protein, 29 aa, Artificial Sequence
  Cyclic GFR-binding peptide
  MOD_RES (2), (2): Xaa is C or S
KXSKVIMRHKRLIKPTKGIYYLISTASLD

SEQ ID NO: 42953 - protein, 23 aa, Artificial Sequence
  Cyclic GFR-binding peptide
TRHKRLFIPKKRVIEYYLVSTAS

SEQ ID NO: 42954 - protein, 30 aa, Artificial Sequence
  Cyclic GFR-binding peptide
  MOD_RES (30), (30): Xaa is C or S
VVMNYHYKLIVNSSDDKYLVSIPSLKTPAX

SEQ ID NO: 42955 - protein, 24 aa, Artificial Sequence
  Cyclic GFR-binding peptide
QYNKLIKPTKGILYLISIASLDQS

SEQ ID NO: 42956 - protein, 29 aa, Artificial Sequence
  Cyclic GFR-binding peptide
AAAAAAAAARHKRLIVNSSDDYYLVSTAS

SEQ ID NO: 42957 - protein, 39 aa, Artificial Sequence; identical to SEQ ID NO: 4979
  Cyclic GFR-binding peptide
  MOD_RES (2), (39): Xaa is C or S

SEQ ID NO: 42958 - protein, 34 aa, Artificial Sequence; identical to SEQ ID NO: 4981
  Cyclic GFR-binding peptide
  MOD_RES (2), (34): Xaa is C or S

SEQ ID NO: 42959 - protein, 33 aa, Artificial Sequence; identical to SEQ ID NO: 4982
  Cyclic GFR-binding peptide
  MOD_RES (1), (32), (33): Xaa is C or S

SEQ ID NO: 42960 - protein, 23 aa, Artificial Sequence
  Cyclic GFR-binding peptide
QYNKLIVNNSSDLYLVSIASLKT

SEQ ID NO: 42961 - protein, 26 aa, Artificial Sequence
  Cyclic GFR-binding peptide
ELTQYNKLFIPKKRVIELYLVSIASL

SEQ ID NO: 42962 - protein, 34 aa, Artificial Sequence; identical to SEQ ID NO: 4984
  Cyclic GFR-binding peptide
  MOD_RES (2), (34): Xaa is C or S

SEQ ID NO: 42963 - protein, 32 aa, Artificial Sequence
  Cyclic GFR-binding peptide
  MOD_RES (1), (3): Xaa is C or S
XGXEAVSMGERYKKLTPVGMDDFYLVSIANLK

SEQ ID NO: 42964 - protein, 30 aa, Artificial Sequence
  Cyclic GFR-binding peptide
LTRHKRLFIPKKRVIEYYLVSTASLQVQTP

SEQ ID NO: 42965 - protein, 31 aa, Artificial Sequence; identical to SEQ ID NO: 4986
  Cyclic GFR-binding peptide
  MOD_RES (1), (1): Xaa is C or S

SEQ ID NO: 42966 - protein, 25 aa, Artificial Sequence
  Cyclic GFR-binding peptide
RHKRLFIPKKRVIEYYLVSTASLQV

SEQ ID NO: 42967 - protein, 24 aa, Artificial Sequence
  Cyclic GFR-binding peptide
NQYNKLIVNSSDDLYLVSIASLKT

SEQ ID NO: 42968 - protein, 41 aa, Artificial Sequence; identical to SEQ ID NO: 4989
  Cyclic GFR-binding peptide
  MOD_RES (2), (4), (37), (38): Xaa is C or S

SEQ ID NO: 42969 - protein, 29 aa, Artificial Sequence
  Cyclic GFR-binding peptide
  MOD_RES (27), (28): Xaa is C or S
MRYKKLVKPKRGVFYLISIANLAQPVXXP

SEQ ID NO: 42970 - protein, 28 aa, Artificial Sequence
  Cyclic GFR-binding peptide
RVIMQYNKLVKPKRGVLYLISIASLAQP

SEQ ID NO: 42971 - protein, 28 aa, Artificial Sequence
  Cyclic GFR-binding peptide
  MOD_RES (27), (28): Xaa is C or S
MQYNKLIKPTKGILYLISIASLDQSVXX

SEQ ID NO: 42972 - protein, 26 aa, Artificial Sequence
  Cyclic GFR-binding peptide
VVMNQYNKLIVNSSDDLYLVSIASLQ

SEQ ID NO: 42973 - protein, 27 aa, Artificial Sequence
  Cyclic GFR-binding peptide
VIMRYKKLIKPTKGIFYLISIANLDQS

SEQ ID NO: 42974 - protein, 25 aa, Artificial Sequence
  Cyclic GFR-binding peptide
SKVIMRYKKLIKPTKGIFYLISIAN

SEQ ID NO: 42975 - protein, 28 aa, Artificial Sequence
  Cyclic GFR-binding peptide
RHKRLFIPKKRVIEYYLVSTASLQVQTP

SEQ ID NO: 42976 - protein, 31 aa, Artificial Sequence; identical to SEQ ID NO: 4996
  Cyclic GFR-binding peptide
  MOD_RES (31), (31): Xaa is C or S

SEQ ID NO: 42977 - protein, 27 aa, Artificial Sequence
  Cyclic GFR-binding peptide
RVIMRHKRLVKPKRGVYYLISTASLAQ

SEQ ID NO: 42978 - protein, 37 aa, Artificial Sequence; identical to SEQ ID NO: 4997
  Cyclic GFR-binding peptide
  MOD_RES (31), (32): Xaa is C or S

SEQ ID NO: 42979 - protein, 32 aa, Artificial Sequence
  Cyclic GFR-binding peptide
  MOD_RES (30), (30): Xaa is C or S
QYNKLFIPKKRVIELYLVSIASLQVQTPRXQV

SEQ ID NO: 42980 - protein, 36 aa, Artificial Sequence; identical to SEQ ID NO: 5003
  Cyclic GFR-binding peptide
  MOD_RES (1), (33): Xaa is C or S

SEQ ID NO: 42981 - protein, 37 aa, Artificial Sequence; identical to SEQ ID NO: 5002
  Cyclic GFR-binding peptide
  MOD_RES (2), (33), (34): Xaa is C or S

SEQ ID NO: 42982 - protein, 24 aa, Artificial Sequence
  Cyclic GFR-binding peptide
IMYHYKLVKPKRGVKYLISIPSLA

SEQ ID NO: 42983 - protein, 33 aa, Artificial Sequence
  Cyclic GFR-binding peptide
DELTYHYKLFIPKKRVIEKYLVSIPSLQVQTPR

SEQ ID NO: 42984 - protein, 32 aa, Artificial Sequence; identical to SEQ ID NO: 5004
  Cyclic GFR-binding peptide
  MOD_RES (31), (32): Xaa is C or S

SEQ ID NO: 42985 - protein, 31 aa, Artificial Sequence
  Cyclic GFR-binding peptide
  MOD_RES (26), (27): Xaa is C or S
RHKRLTPVGMDDYYLVSTASLKTPVXXAKGV

SEQ ID NO: 42986 - protein, 29 aa, Artificial Sequence
  Cyclic GFR-binding peptide
AAAAAAAAARHKRLVVKDYEDYYLMSTAS

SEQ ID NO: 42987 - protein, 38 aa, Artificial Sequence; identical to SEQ ID NO: 5007
  Cyclic GFR-binding peptide
  MOD_RES (1), (33), (34): Xaa is C or S

SEQ ID NO: 42988 - protein, 34 aa, Artificial Sequence
  Cyclic GFR-binding peptide
  MOD_RES (28), (29): Xaa is C or S
IMYHYKLIKPTKGIKYLISIPSLDQSVXXPSASA

SEQ ID NO: 42989 - protein, 28 aa, Artificial Sequence
  Cyclic GFR-binding peptide
SKVVMQYNKLVKPTRGVLYLISIASLDQ

SEQ ID NO: 42990 - protein, 38 aa, Artificial Sequence; identical to SEQ ID NO: 5009
  Cyclic GFR-binding peptide
  MOD_RES (2), (4), (37), (38): Xaa is C or S

SEQ ID NO: 42991 - protein, 32 aa, Artificial Sequence
  Cyclic GFR-binding peptide
  MOD_RES (1), (3): Xaa is C or S
XKXSRVIMRHKRLVKPKRGVYYLISTASLAQP

SEQ ID NO: 42992 - protein, 26 aa, Artificial Sequence
  Cyclic GFR-binding peptide
  MOD_RES (26), (26): Xaa is C or S
RHKRLTPVGMDDYYLVSTASLKTPVX

SEQ ID NO: 42993 - protein, 28 aa, Artificial Sequence
  Cyclic GFR-binding peptide
  MOD_RES (2), (2): Xaa is C or S
GXGEVVMDYHYKLVVKENEDKYLMSIPS

SEQ ID NO: 42994 - protein, 34 aa, Artificial Sequence; identical to SEQ ID NO: 5011
  Cyclic GFR-binding peptide
  MOD_RES (2), (34): Xaa is C or S

SEQ ID NO: 42995 - protein, 29 aa, Artificial Sequence
  Cyclic GFR-binding peptide
  MOD_RES (29), (29): Xaa is C or S
VMERHKRLVVKDYEDYYLMSTASLETPVX

SEQ ID NO: 42996 - protein, 28 aa, Artificial Sequence
  Cyclic GFR-binding peptide
HDELTRHKRLFIPKKRVIEYYLVSTASL

SEQ ID NO: 42997 - protein, 36 aa, Artificial Sequence; identical to SEQ ID NO: 5014
  Cyclic GFR-binding peptide
  MOD_RES (2), (4), (35), (36): Xaa is C or S

SEQ ID NO: 42998 - protein, 36 aa, Artificial Sequence; identical to SEQ ID NO: 5016
  Cyclic GFR-binding peptide
  MOD_RES (31), (32): Xaa is C or S

SEQ ID NO: 42999 - protein, 38 aa, Artificial Sequence; identical to SEQ ID NO: 5015
  Cyclic GFR-binding peptide
  MOD_RES (2), (34), (35): Xaa is C or S

SEQ ID NO: 43000 - protein, 34 aa, Artificial Sequence
  Cyclic GFR-binding peptide
  MOD_RES (30), (31): Xaa is C or S
VVMEYHYKLVVKDYEDKYLMSIPSLETPVXXAKP

SEQ ID NO: 43001 - protein, 36 aa, Artificial Sequence; identical to SEQ ID NO: 5017
  Cyclic GFR-binding peptide
  MOD_RES (32), (33): Xaa is C or S

SEQ ID NO: 43002 - protein, 32 aa, Artificial Sequence; identical to SEQ ID NO: 5019
  Cyclic GFR-binding peptide
  MOD_RES (31), (32): Xaa is C or S

SEQ ID NO: 43003 - protein, 33 aa, Artificial Sequence
  Cyclic GFR-binding peptide
  MOD_RES (28), (28): Xaa is C or S
MNYHYKLIVNSSDDKYLVSIPSLKTPAXTPKTV

SEQ ID NO: 43004 - protein, 33 aa, Artificial Sequence
  Cyclic GFR-binding peptide
  MOD_RES (30), (30): Xaa is C or S
RYKKLFIPKKRVIEFYLVSIANLQVQTPRXQVN

SEQ ID NO: 43005 - protein, 32 aa, Artificial Sequence
  Cyclic GFR-binding peptide
  MOD_RES (2), (2): Xaa is C or S
GXGEVVMDRHKRLVVKENEDYYLMSTASLETP

SEQ ID NO: 43006 - protein, 32 aa, Artificial Sequence
  Cyclic GFR-binding peptide
  MOD_RES (1), (3): Xaa is C or S
XKXSKVVMRYKKLVKPTRGVFYLISIANLDQP

SEQ ID NO: 43007 - protein, 30 aa, Artificial Sequence
  Cyclic GFR-binding peptide
  MOD_RES (30), (30): Xaa is C or S
KVIMRHKRLIKPTKGIYYLISTASLDQSVX

SEQ ID NO: 43008 - protein, 34 aa, Artificial Sequence; identical to SEQ ID NO: 5020
  Cyclic GFR-binding peptide
  MOD_RES (1), (3): Xaa is C or S

SEQ ID NO: 43009 - protein, 32 aa, Artificial Sequence
  Cyclic GFR-binding peptide
  MOD_RES (26), (27): Xaa is C or S
YHYKLVKPKRGVKYLISIPSLAQPVXXPAASA

SEQ ID NO: 43010 - protein, 31 aa, Artificial Sequence
  Cyclic GFR-binding peptide
  MOD_RES (2), (2): Xaa is C or S
GXGEVVMDYHYKLVVKENEDKYLMSIPSLET

SEQ ID NO: 43011 - protein, 31 aa, Artificial Sequence
  Cyclic GFR-binding peptide
  MOD_RES (1), (1): Xaa is C or S
XALHDELTYHYKLFIPKKRVIEKYLVSIPSL

SEQ ID NO: 43012 - protein, 36 aa, Artificial Sequence
  Cyclic GFR-binding peptide
  MOD_RES (34), (34): Xaa is C or S
DELTQYNKLFIPKKRVIELYLVSIASLQVQTPRXQV

SEQ ID NO: 43013 - protein, 30 aa, Artificial Sequence
  Cyclic GFR-binding peptide
  MOD_RES (29), (30): Xaa is C or S
VMNYHYKLIVNSSDDKYLVSIPSLKTPAXX

SEQ ID NO: 43014 - protein, 34 aa, Artificial Sequence; identical to SEQ ID NO: 5023
  Cyclic GFR-binding peptide
  MOD_RES (31), (32): Xaa is C or S

SEQ ID NO: 43015 - protein, 38 aa, Artificial Sequence; identical to SEQ ID NO: 5024
  Cyclic GFR-binding peptide
  MOD_RES (2), (4): Xaa is C or S

SEQ ID NO: 43016 - protein, 31 aa, Artificial Sequence
  Cyclic GFR-binding peptide
  MOD_RES (30), (31): Xaa is C or S
KVIMRYKKLIKPTKGIFYLISIANLDQSVXX

SEQ ID NO: 43017 - protein, 33 aa, Artificial Sequence
  Cyclic GFR-binding peptide
  MOD_RES (29), (30): Xaa is C or S
VVMRYKKLVKPTRGVFYLISIANLDQPVXXPSA

SEQ ID NO: 43018 - protein, 31 aa, Artificial Sequence
  Cyclic GFR-binding peptide
  MOD_RES (27), (27): Xaa is C or S
NYHYKLIVNSSDDKYLVSIPSLKTPAXTPKT

SEQ ID NO: 43019 - protein, 29 aa, Artificial Sequence
  Cyclic GFR-binding peptide
EAVSMGERHKRLTPVGMDDYYLVSTASLK

SEQ ID NO: 43020 - protein, 33 aa, Artificial Sequence
  Cyclic GFR-binding peptide
  MOD_RES (2), (4): Xaa is C or S
SXKXSKVVMYHYKLVKPTRGVKYLISIPSLDQP

SEQ ID NO: 43021 - protein, 35 aa, Artificial Sequence; identical to SEQ ID NO: 5027
  Cyclic GFR-binding peptide

SEQ ID NO: 43022 - protein, 26 aa, Artificial Sequence
  Cyclic GFR-binding peptide
  MOD_RES (26), (26): Xaa is C or S
RHKRLIVNSSDDYYLVSTASLQTPAX

SEQ ID NO: 43023 - protein, 26 aa, Artificial Sequence
  Cyclic GFR-binding peptide
  MOD_RES (26), (26): Xaa is C or S
YHYKLIVNNSSDKYLVSIPSLKTPAX

SEQ ID NO: 43024 - protein, 31 aa, Artificial Sequence
  Cyclic GFR-binding peptide
  MOD_RES (1), (3): Xaa is C or S
XGXGEVVMDRYKKLVVKENEDFYLMSIANLE

SEQ ID NO: 43025 - protein, 33 aa, Artificial Sequence
  Cyclic GFR-binding peptide
  MOD_RES (28), (29): Xaa is C or S
GERHKRLTPVGMDDYYLVSTASLKTPVXXAKGV

SEQ ID NO: 43026 - protein, 29 aa, Artificial Sequence
  Cyclic GFR-binding peptide
AAAAAAAAAQYNKLIKPTKGILYLISIAS

SEQ ID NO: 43027 - protein, 25 aa, Artificial Sequence
  Cyclic GFR-binding peptide
DYHYKLVVKENEDKYLMSIPSLETP

SEQ ID NO: 43028 - protein, 37 aa, Artificial Sequence; identical to SEQ ID NO: 5031
  Cyclic GFR-binding peptide
  MOD_RES (1), (33), (34): Xaa is C or S

SEQ ID NO: 43029 - protein, 26 aa, Artificial Sequence
  Cyclic GFR-binding peptide
MNRHKRLIVNSSDDYYLVSTASLKTP

SEQ ID NO: 43030 - protein, 32 aa, Artificial Sequence
  Cyclic GFR-binding peptide
  MOD_RES (1), (3): Xaa is C or S
XGXGEVVMEYHYKLVVKDYEDKYLMSIPSLET

SEQ ID NO: 43031 - protein, 37 aa, Artificial Sequence; identical to SEQ ID NO: 5032
  Cyclic GFR-binding peptide
  MOD_RES (1), (1): Xaa is C or S

SEQ ID NO: 43032 - protein, 30 aa, Artificial Sequence
  Cyclic GFR-binding peptide
  MOD_RES (2), (2): Xaa is C or S
KXSRVIMRHKRLVKPKRGVYYLISTASLAQ

SEQ ID NO: 43033 - protein, 30 aa, Artificial Sequence
  Cyclic GFR-binding peptide
  MOD_RES (26), (27): Xaa is C or S
RHKRLIKPTKGIYYLISTASLDQSVXXPSA

SEQ ID NO: 43034 - protein, 34 aa, Artificial Sequence; identical to SEQ ID NO: 5036
  Cyclic GFR-binding peptide
  MOD_RES (32), (33): Xaa is C or S

SEQ ID NO: 43035 - protein, 22 aa, Artificial Sequence
  Cyclic GFR-binding peptide
RHKRLIVNSSDDYYLVSTASLQ

SEQ ID NO: 43036 - protein, 22 aa, Artificial Sequence
  Cyclic GFR-binding peptide
YHYKLIVNNSSDKYLVSIPSLK

SEQ ID NO: 43037 - protein, 35 aa, Artificial Sequence; identical to SEQ ID NO: 5037
  Cyclic GFR-binding peptide
  MOD_RES (2), (4): Xaa is C or S

SEQ ID NO: 43038 - protein, 34 aa, Artificial Sequence; identical to SEQ ID NO: 5040
  Cyclic GFR-binding peptide
  MOD_RES (32), (32): Xaa is C or S

SEQ ID NO: 43039 - protein, 31 aa, Artificial Sequence
  Cyclic GFR-binding peptide
  MOD_RES (29), (30): Xaa is C or S
VMNQYNKLIVNSSDDLYLVSIASLQTPAXXP

SEQ ID NO: 43040 - protein, 29 aa, Artificial Sequence
  Cyclic GFR-binding peptide
  MOD_RES (28), (29): Xaa is C or S
MNQYNKLIVNNSSDLYLVSIASLKTPAXX

SEQ ID NO: 43041 - protein, 32 aa, Artificial Sequence; identical to SEQ ID NO: 5042
  Cyclic GFR-binding peptide
  MOD_RES (31), (32): Xaa is C or S

SEQ ID NO: 43042 - protein, 31 aa, Artificial Sequence
  Cyclic GFR-binding peptide
  MOD_RES (1), (1): Xaa is C or S
XEAVSMGEQYNKLTPVGMDDLYLVSIASLKT

SEQ ID NO: 43043 - protein, 25 aa, Artificial Sequence
  Cyclic GFR-binding peptide
KVVMRHKRLVKPTRGVYYLISTASL

SEQ ID NO: 43044 - protein, 31 aa, Artificial Sequence
  Cyclic GFR-binding peptide
  MOD_RES (26), (27): Xaa is C or S
YHYKLIVNNSSDKYLVSIPSLKTPAXXAKPV

SEQ ID NO: 43045 - protein, 41 aa, Artificial Sequence; identical to SEQ ID NO: 5043
  Cyclic GFR-binding peptide
  MOD_RES (2), (4), (36), (37): Xaa is C or S

SEQ ID NO: 43046 - protein, 31 aa, Artificial Sequence
  Cyclic GFR-binding peptide
  MOD_RES (28), (29): Xaa is C or S
MNRYKKLIVNNSSDFYLVSIANLKTPAXXAK

SEQ ID NO: 43047 - protein, 35 aa, Artificial Sequence
  Cyclic GFR-binding peptide
  MOD_RES (32), (32): Xaa is C or S
LTYHYKLFIPKKRVIEKYLVSIPSLQVQTPRXQVN

SEQ ID NO: 43048 - protein, 39 aa, Artificial Sequence; identical to SEQ ID NO: 5044
  Cyclic GFR-binding peptide
  MOD_RES (1), (3), (36), (37): Xaa is C or S

SEQ ID NO: 43049 - protein, 33 aa, Artificial Sequence
  Cyclic GFR-binding peptide
  MOD_RES (2), (2): Xaa is C or S
GXEAVSMGEQYNKLTPVGMDDLYLVSIASLKTP

SEQ ID NO: 43050 - protein, 34 aa, Artificial Sequence; identical to SEQ ID NO: 5046
  Cyclic GFR-binding peptide

SEQ ID NO: 43051 - protein, 21 aa, Artificial Sequence
  Cyclic GFR-binding peptide
QYNKLVKPKRGVLYLISIASL

SEQ ID NO: 43052 - protein, 32 aa, Artificial Sequence
  Cyclic GFR-binding peptide
  MOD_RES (31), (32): Xaa is C or S
VSMGEQYNKLTPVGMDDLYLVSIASLKTPVXX

SEQ ID NO: 43053 - protein, 26 aa, Artificial Sequence
  Cyclic GFR-binding peptide
MRYKKLVKPKRGVFYLISIANLAQPV

SEQ ID NO: 43054 - protein, 21 aa, Artificial Sequence
  Cyclic GFR-binding peptide
MYHYKLVKPTRGVKYLISIPS

SEQ ID NO: 43055 - protein, 22 aa, Artificial Sequence
  Cyclic GFR-binding peptide
MYHYKLIKPTKGIKYLISIPSL

SEQ ID NO: 43056 - protein, 36 aa, Artificial Sequence; identical to SEQ ID NO: 5048
  Cyclic GFR-binding peptide
  MOD_RES (2), (2): Xaa is C or S

SEQ ID NO: 43057 - protein, 31 aa, Artificial Sequence
  Cyclic GFR-binding peptide
ALHDELTYHYKLFIPKKRVIEKYLVSIPSLQ

SEQ ID NO: 43058 - protein, 32 aa, Artificial Sequence
  Cyclic GFR-binding peptide
  MOD_RES (26), (27): Xaa is C or S
RHKRLIVNSSDDYYLVSTASLQTPAXXPKPVT

SEQ ID NO: 43059 - protein, 26 aa, Artificial Sequence
  Cyclic GFR-binding peptide
  MOD_RES (26), (26): Xaa is C or S
YHYKLVKPTRGVKYLISIPSLDQPVX

SEQ ID NO: 43060 - protein, 23 aa, Artificial Sequence
  Cyclic GFR-binding peptide
RHKRLIVNSSDDYYLVSTASLQT

SEQ ID NO: 43061 - protein, 32 aa, Artificial Sequence; identical to SEQ ID NO: 5049
  Cyclic GFR-binding peptide
  MOD_RES (32), (32): Xaa is C or S

SEQ ID NO: 43062 - protein, 23 aa, Artificial Sequence
  Cyclic GFR-binding peptide
RHKRLIKPTKGIYYLISTASLDQ

SEQ ID NO: 43063 - protein, 32 aa, Artificial Sequence; identical to SEQ ID NO: 5050
  Cyclic GFR-binding peptide
  MOD_RES (31), (32): Xaa is C or S

SEQ ID NO: 43064 - protein, 30 aa, Artificial Sequence
  Cyclic GFR-binding peptide
  MOD_RES (1), (3): Xaa is C or S
XKXSKVVMQYNKLVKPTRGVLYLISIASLD

SEQ ID NO: 43065 - protein, 32 aa, Artificial Sequence
  Cyclic GFR-binding peptide
  MOD_RES (27), (28): Xaa is C or S
MRHKRLIKPTKGIYYLISTASLDQSVXXPSAS

SEQ ID NO: 43066 - protein, 24 aa, Artificial Sequence
  Cyclic GFR-binding peptide
VVMNYHYKLIVNSSDDKYLVSIPS

SEQ ID NO: 43067 - protein, 35 aa, Artificial Sequence
  Cyclic GFR-binding peptide
  MOD_RES (2), (4): Xaa is C or S
RXGXEAVSMGERYKKLTPVGMDDFYLVSIANLKTP

SEQ ID NO: 43068 - protein, 32 aa, Artificial Sequence; identical to SEQ ID NO: 5054
  Cyclic GFR-binding peptide
  MOD_RES (1), (32): Xaa is C or S

SEQ ID NO: 43069 - protein, 29 aa, Artificial Sequence
  Cyclic GFR-binding peptide
GEVVMERHKRLVVKDYEDYYLMSTASLET

SEQ ID NO: 43070 - protein, 20 aa, Artificial Sequence
  Cyclic GFR-binding peptide
RHKRLVVKDYEDYYLMSTAS

SEQ ID NO: 43071 - protein, 30 aa, Artificial Sequence
  Cyclic GFR-binding peptide
  MOD_RES (2), (4): Xaa is C or S
SXKXSKVIMQYNKLIKPTKGILYLISIASL

SEQ ID NO: 43072 - protein, 29 aa, Artificial Sequence
  Cyclic GFR-binding peptide
  MOD_RES (28), (28): Xaa is C or S
MNYHYKLIVNSSDDKYLVSIPSLKTPAXT

SEQ ID NO: 43073 - protein, 26 aa, Artificial Sequence
  Cyclic GFR-binding peptide
IMRHKRLVKPKRGVYYLISTASLAQP

SEQ ID NO: 43074 - protein, 25 aa, Artificial Sequence
  Cyclic GFR-binding peptide
VIMRYKKLIKPTKGIFYLISIANLD

SEQ ID NO: 43075 - protein, 29 aa, Artificial Sequence
  Cyclic GFR-binding peptide
  MOD_RES (29), (29): Xaa is C or S
VIMRYKKLIKPTKGIFYLISIANLDQSVX

SEQ ID NO: 43076 - protein, 26 aa, Artificial Sequence
  Cyclic GFR-binding peptide
VMRYKKLVKPTRGVFYLISIANLDQP

SEQ ID NO: 43077 - protein, 35 aa, Artificial Sequence; identical to SEQ ID NO: 5060
  Cyclic GFR-binding peptide
  MOD_RES (31), (32): Xaa is C or S

SEQ ID NO: 43078 - protein, 30 aa, Artificial Sequence
  Cyclic GFR-binding peptide
SRVVMNYHYKLIVNSSDDKYLVSIPSLKTP

SEQ ID NO: 43079 - protein, 28 aa, Artificial Sequence
  Cyclic GFR-binding peptide
  MOD_RES (26), (27): Xaa is C or S
RYKKLIVNNSSDFYLVSIANLKTPAXXA

SEQ ID NO: 43080 - protein, 29 aa, Artificial Sequence
  Cyclic GFR-binding peptide
DELTYHYKLFIPKKRVIEKYLVSIPSLQV

SEQ ID NO: 43081 - protein, 29 aa, Artificial Sequence
  Cyclic GFR-binding peptide
  MOD_RES (26), (26): Xaa is C or S
QYNKLIVNSSDDLYLVSIASLKTPAXTPK

SEQ ID NO: 43082 - protein, 31 aa, Artificial Sequence; identical to SEQ ID NO: 5064
  Cyclic GFR-binding peptide

SEQ ID NO: 43083 - protein, 23 aa, Artificial Sequence
  Cyclic GFR-binding peptide
NQYNKLIVNNSSDLYLVSIASLK

SEQ ID NO: 43084 - protein, 30 aa, Artificial Sequence
  Cyclic GFR-binding peptide
  MOD_RES (29), (29): Xaa is C or S
VMNYHYKLIVNSSDDKYLVSIPSLKTPAXT

SEQ ID NO: 43085 - protein, 33 aa, Artificial Sequence; identical to SEQ ID NO: 5066
  Cyclic GFR-binding peptide
  MOD_RES (1), (33): Xaa is C or S

SEQ ID NO: 43086 - protein, 27 aa, Artificial Sequence
  Cyclic GFR-binding peptide
IMYHYKLVKPKRGVKYLISIPSLAQPV

SEQ ID NO: 43087 - protein, 28 aa, Artificial Sequence
  Cyclic GFR-binding peptide
  MOD_RES (26), (27): Xaa is C or S
RYKKLVKPTRGVFYLISIANLDQPVXXP

SEQ ID NO: 43088 - protein, 34 aa, Artificial Sequence; identical to SEQ ID NO: 5069
  Cyclic GFR-binding peptide
  MOD_RES (2), (4): Xaa is C or S

SEQ ID NO: 43089 - protein, 27 aa, Artificial Sequence
  Cyclic GFR-binding peptide
ARVVMNYHYKLIVNSSDDKYLVSIPSL

SEQ ID NO: 43090 - protein, 32 aa, Artificial Sequence
  Cyclic GFR-binding peptide
  MOD_RES (29), (30): Xaa is C or S
VVMYHYKLVKPTRGVKYLISIPSLDQPVXXPS

SEQ ID NO: 43091 - protein, 34 aa, Artificial Sequence
  Cyclic GFR-binding peptide
  MOD_RES (30), (30): Xaa is C or S
RHKRLFIPKKRVIEYYLVSTASLQVQTPRXQVNR

SEQ ID NO: 43092 - protein, 37 aa, Artificial Sequence; identical to SEQ ID NO: 5071
  Cyclic GFR-binding peptide
  MOD_RES (1), (3): Xaa is C or S

SEQ ID NO: 43093 - protein, 27 aa, Artificial Sequence
  Cyclic GFR-binding peptide
KVVMQYNKLVKPTRGVLYLISIASLDQ

SEQ ID NO: 43094 - protein, 37 aa, Artificial Sequence; identical to SEQ ID NO: 5072
  Cyclic GFR-binding peptide
  MOD_RES (1), (3), (35), (36): Xaa is C or S

SEQ ID NO: 43095 - protein, 30 aa, Artificial Sequence
  Cyclic GFR-binding peptide
  MOD_RES (1), (3): Xaa is C or S
XGXGEVVMERYKKLVVKDYEDFYLMSIANL

SEQ ID NO: 43096 - protein, 37 aa, Artificial Sequence; identical to SEQ ID NO: 5073
  Cyclic GFR-binding peptide
  MOD_RES (1), (33), (34): Xaa is C or S

SEQ ID NO: 43097 - protein, 25 aa, Artificial Sequence
  Cyclic GFR-binding peptide
VMYHYKLVKPTRGVKYLISIPSLDQ

SEQ ID NO: 43098 - protein, 24 aa, Artificial Sequence
  Cyclic GFR-binding peptide
IMRHKRLVKPKRGVYYLISTASLA

SEQ ID NO: 43099 - protein, 32 aa, Artificial Sequence; identical to SEQ ID NO: 5074
  Cyclic GFR-binding peptide
  MOD_RES (31), (32): Xaa is C or S

SEQ ID NO: 43100 - protein, 27 aa, Artificial Sequence
  Cyclic GFR-binding peptide
SRVVMNYHYKLIVNSSDDKYLVSIPSL

SEQ ID NO: 43101 - protein, 40 aa, Artificial Sequence; identical to SEQ ID NO: 5078
  Cyclic GFR-binding peptide
  MOD_RES (1), (3), (35), (36): Xaa is C or S

SEQ ID NO: 43102 - protein, 27 aa, Artificial Sequence
  Cyclic GFR-binding peptide
MGERYKKLTPVGMDDFYLVSIANLKTP

SEQ ID NO: 43103 - protein, 33 aa, Artificial Sequence
  Cyclic GFR-binding peptide
  MOD_RES (29), (30): Xaa is C or S
VIMQYNKLVKPKRGVLYLISIASLAQPVXXPAA

SEQ ID NO: 43104 - protein, 23 aa, Artificial Sequence
  Cyclic GFR-binding peptide
MRHKRLIKPTKGIYYLISTASLD

SEQ ID NO: 43105 - protein, 40 aa, Artificial Sequence; identical to SEQ ID NO: 5079
  Cyclic GFR-binding peptide
  MOD_RES (1), (38): Xaa is C or S

SEQ ID NO: 43106 - protein, 26 aa, Artificial Sequence
  Cyclic GFR-binding peptide
SKVIMRYKKLIKPTKGIFYLISIANL

SEQ ID NO: 43107 - protein, 26 aa, Artificial Sequence
  Cyclic GFR-binding peptide
IMYHYKLVKPKRGVKYLISIPSLAQP

SEQ ID NO: 43108 - protein, 32 aa, Artificial Sequence
  Cyclic GFR-binding peptide
  MOD_RES (2), (4): Xaa is C or S
RXGXEAVSMGEQYNKLTPVGMDDLYLVSIASL

SEQ ID NO: 43109 - protein, 29 aa, Artificial Sequence
  Cyclic GFR-binding peptide
  MOD_RES (28), (29): Xaa is C or S
IMRHKRLIKPTKGIYYLISTASLDQSVXX

SEQ ID NO: 43110 - protein, 31 aa, Artificial Sequence
  Cyclic GFR-binding peptide
  MOD_RES (28), (29): Xaa is C or S
MDRHKRLVVKENEDYYLMSTASLETPVXXAK

SEQ ID NO: 43111 - protein, 36 aa, Artificial Sequence
  Cyclic GFR-binding peptide
  MOD_RES (30), (30): Xaa is C or S
VVMNYHYKLIVNSSDDKYLVSIPSLKTPAXTPKTVH

SEQ ID NO: 43112 - protein, 28 aa, Artificial Sequence
  Cyclic GFR-binding peptide
  MOD_RES (28), (28): Xaa is C or S
IMRHKRLIKPTKGIYYLISTASLDQSVX

SEQ ID NO: 43113 - protein, 31 aa, Artificial Sequence
  Cyclic GFR-binding peptide
  MOD_RES (29), (30): Xaa is C or S
MGERHKRLTPVGMDDYYLVSTASLKTPVXXA

SEQ ID NO: 43114 - protein, 33 aa, Artificial Sequence
  Cyclic GFR-binding peptide
  MOD_RES (30), (31): Xaa is C or S
RVIMYHYKLVKPKRGVKYLISIPSLAQPVXXPA

SEQ ID NO: 43115 - protein, 34 aa, Artificial Sequence
  Cyclic GFR-binding peptide
  MOD_RES (33), (33): Xaa is C or S
ELTRYKKLFIPKKRVIEFYLVSIANLQVQTPRXQ

SEQ ID NO: 43116 - protein, 35 aa, Artificial Sequence; identical to SEQ ID NO: 5085
  Cyclic GFR-binding peptide
  MOD_RES (2), (33), (34): Xaa is C or S

SEQ ID NO: 43117 - protein, 31 aa, Artificial Sequence
  Cyclic GFR-binding peptide
  MOD_RES (2), (2): Xaa is C or S
GXAKVVMNQYNKLIVNNSSDLYLVSIASLKT

SEQ ID NO: 43118 - protein, 32 aa, Artificial Sequence
  Cyclic GFR-binding peptide
  MOD_RES (1), (3): Xaa is C or S
XGXGEVVMDYHYKLVVKENEDKYLMSIPSLET

SEQ ID NO: 43119 - protein, 23 aa, Artificial Sequence
  Cyclic GFR-binding peptide
DRHKRLVVKENEDYYLMSTASLE

SEQ ID NO: 43120 - protein, 34 aa, Artificial Sequence; identical to SEQ ID NO: 5091
  Cyclic GFR-binding peptide
  MOD_RES (1), (32), (33): Xaa is C or S

SEQ ID NO: 43121 - protein, 32 aa, Artificial Sequence
  Cyclic GFR-binding peptide
  MOD_RES (26), (27): Xaa is C or S
YHYKLVVKENEDKYLMSIPSLETPVXXAKPIK

SEQ ID NO: 43122 - protein, 26 aa, Artificial Sequence
  Cyclic GFR-binding peptide
VMDRYKKLVVKENEDFYLMSIANLET

SEQ ID NO: 43123 - protein, 31 aa, Artificial Sequence
  Cyclic GFR-binding peptide
  MOD_RES (31), (31): Xaa is C or S
VSMGEQYNKLTPVGMDDLYLVSIASLKTPVX

SEQ ID NO: 43124 - protein, 27 aa, Artificial Sequence
  Cyclic GFR-binding peptide
VMNRYKKLIVNNSSDFYLVSIANLKTP

SEQ ID NO: 43125 - protein, 32 aa, Artificial Sequence; identical to SEQ ID NO: 5094
  Cyclic GFR-binding peptide
  MOD_RES (31), (32): Xaa is C or S

SEQ ID NO: 43126 - protein, 22 aa, Artificial Sequence
  Cyclic GFR-binding peptide
IMYHYKLVKPKRGVKYLISIPS

SEQ ID NO: 43127 - protein, 37 aa, Artificial Sequence; identical to SEQ ID NO: 5098
  Cyclic GFR-binding peptide
  MOD_RES (33), (34): Xaa is C or S

SEQ ID NO: 43128 - protein, 33 aa, Artificial Sequence; identical to SEQ ID NO: 5101
  Cyclic GFR-binding peptide
  MOD_RES (1), (33): Xaa is C or S

SEQ ID NO: 43129 - protein, 32 aa, Artificial Sequence
  Cyclic GFR-binding peptide
  MOD_RES (27), (28): Xaa is C or S
MYHYKLVKPKRGVKYLISIPSLAQPVXXPAAS

SEQ ID NO: 43130 - protein, 27 aa, Artificial Sequence
  Cyclic GFR-binding peptide
  MOD_RES (27), (27): Xaa is C or S
MYHYKLIKPTKGIKYLISIPSLDQSVX

SEQ ID NO: 43131 - protein, 27 aa, Artificial Sequence
  Cyclic GFR-binding peptide
  MOD_RES (26), (27): Xaa is C or S
RHKRLIVNSSDDYYLVSTASLKTPAXX

SEQ ID NO: 43132 - protein, 34 aa, Artificial Sequence
  Cyclic GFR-binding peptide
  MOD_RES (30), (31): Xaa is C or S
SMGEQYNKLTPVGMDDLYLVSIASLKTPVXXAKG

SEQ ID NO: 43133 - protein, 29 aa, Artificial Sequence
  Cyclic GFR-binding peptide
  MOD_RES (29), (29): Xaa is C or S
VIMYHYKLVKPKRGVKYLISIPSLAQPVX

SEQ ID NO: 43134 - protein, 33 aa, Artificial Sequence
  Cyclic GFR-binding peptide
  MOD_RES (1), (3): Xaa is C or S
XGXGEVVMDRHKRLVVKENEDYYLMSTASLETP

SEQ ID NO: 43135 - protein, 31 aa, Artificial Sequence
  Cyclic GFR-binding peptide
  MOD_RES (27), (28): Xaa is C or S
EQYNKLTPVGMDDLYLVSIASLKTPVXXAKG

SEQ ID NO: 43136 - protein, 31 aa, Artificial Sequence
  Cyclic GFR-binding peptide
  MOD_RES (1), (3): Xaa is C or S
XKXSKVVMYHYKLVKPTRGVKYLISIPSLDQ

SEQ ID NO: 43137 - protein, 32 aa, Artificial Sequence
  Cyclic GFR-binding peptide
  MOD_RES (29), (30): Xaa is C or S
VIMYHYKLVKPKRGVKYLISIPSLAQPVXXPA

SEQ ID NO: 43138 - protein, 28 aa, Artificial Sequence
  Cyclic GFR-binding peptide
  MOD_RES (26), (27): Xaa is C or S
YHYKLIVNNSSDKYLVSIPSLKTPAXXA

SEQ ID NO: 43139 - protein, 32 aa, Artificial Sequence
  Cyclic GFR-binding peptide
  MOD_RES (1), (3): Xaa is C or S
XKXALHDELTQYNKLFIPKKRVIELYLVSIAS

SEQ ID NO: 43140 - protein, 34 aa, Artificial Sequence
  Cyclic GFR-binding peptide
  MOD_RES (2), (4): Xaa is C or S
EXKXALHDELTYHYKLFIPKKRVIEKYLVSIPSL

SEQ ID NO: 43141 - protein, 40 aa, Artificial Sequence; identical to SEQ ID NO: 5107
  Cyclic GFR-binding peptide
  MOD_RES (2), (4), (36), (37): Xaa is C or S

SEQ ID NO: 43142 - protein, 35 aa, Artificial Sequence
  Cyclic GFR-binding peptide
  MOD_RES (29), (30): Xaa is C or S
VMNYHYKLIVNSSDDKYLVSIPSLQTPAXXPKPVT

SEQ ID NO: 43143 - protein, 39 aa, Artificial Sequence; identical to SEQ ID NO: 5109
  Cyclic GFR-binding peptide
  MOD_RES (2), (4), (36), (37): Xaa is C or S

SEQ ID NO: 43144 - protein, 24 aa, Artificial Sequence
  Cyclic GFR-binding peptide
LTYHYKLFIPKKRVIEKYLVSIPS

SEQ ID NO: 43145 - protein, 34 aa, Artificial Sequence
  Cyclic GFR-binding peptide
  MOD_RES (33), (33): Xaa is C or S
ELTQYNKLFIPKKRVIELYLVSIASLQVQTPRXQ

SEQ ID NO: 43146 - protein, 34 aa, Artificial Sequence; identical to SEQ ID NO: 5110
  Cyclic GFR-binding peptide
  MOD_RES (1), (33), (34): Xaa is C or S

SEQ ID NO: 43147 - protein, 24 aa, Artificial Sequence
  Cyclic GFR-binding peptide
TQYNKLFIPKKRVIELYLVSIASL

SEQ ID NO: 43148 - protein, 29 aa, Artificial Sequence
  Cyclic GFR-binding peptide
  MOD_RES (2), (2): Xaa is C or S
KXSKVIMYHYKLIKPTKGIKYLISIPSLD

SEQ ID NO: 43149 - protein, 38 aa, Artificial Sequence; identical to SEQ ID NO: 5112
  Cyclic GFR-binding peptide
  MOD_RES (2), (2): Xaa is C or S

SEQ ID NO: 43150 - protein, 23 aa, Artificial Sequence
  Cyclic GFR-binding peptide
QYNKLVKPKRGVLYLISIASLAQ

SEQ ID NO: 43151 - protein, 29 aa, Artificial Sequence
  Cyclic GFR-binding peptide
  MOD_RES (27), (28): Xaa is C or S
MYHYKLVKPTRGVKYLISIPSLDQPVXXP

SEQ ID NO: 43152 - protein, 33 aa, Artificial Sequence
  Cyclic GFR-binding peptide
  MOD_RES (28), (29): Xaa is C or S
VMRYKKLVKPTRGVFYLISIANLDQPVXXPSAS

SEQ ID NO: 43153 - protein, 31 aa, Artificial Sequence
  Cyclic GFR-binding peptide
  MOD_RES (30), (31): Xaa is C or S
VVMERHKRLVVKDYEDYYLMSTASLETPVXX

SEQ ID NO: 43154 - protein, 29 aa, Artificial Sequence
  Cyclic GFR-binding peptide
  MOD_RES (28), (29): Xaa is C or S
IMQYNKLVKPKRGVLYLISIASLAQPVXX

SEQ ID NO: 43155 - protein, 38 aa, Artificial Sequence; identical to SEQ ID NO: 5115
  Cyclic GFR-binding peptide
  MOD_RES (2), (33), (34): Xaa is C or S

SEQ ID NO: 43156 - protein, 29 aa, Artificial Sequence
  Cyclic GFR-binding peptide
  MOD_RES (27), (28): Xaa is C or S
NQYNKLIVNNSSDLYLVSIASLKTPAXXA

SEQ ID NO: 43157 - protein, 32 aa, Artificial Sequence
  Cyclic GFR-binding peptide
  MOD_RES (32), (32): Xaa is C or S
LTQYNKLFIPKKRVIELYLVSIASLQVQTPRX

SEQ ID NO: 43158 - protein, 25 aa, Artificial Sequence
  Cyclic GFR-binding peptide
SRVIMRYKKLVKPKRGVFYLISIAN

SEQ ID NO: 43159 - protein, 29 aa, Artificial Sequence
  Cyclic GFR-binding peptide
  MOD_RES (29), (29): Xaa is C or S
MGEQYNKLTPVGMDDLYLVSIASLKTPVX

SEQ ID NO: 43160 - protein, 27 aa, Artificial Sequence
  Cyclic GFR-binding peptide
AVSMGERHKRLTPVGMDDYYLVSTASL

SEQ ID NO: 43161 - protein, 28 aa, Artificial Sequence
  Cyclic GFR-binding peptide
  MOD_RES (28), (28): Xaa is C or S
MNQYNKLIVNNSSDLYLVSIASLKTPAX

SEQ ID NO: 43162 - protein, 28 aa, Artificial Sequence
  Cyclic GFR-binding peptide
  MOD_RES (27), (27): Xaa is C or S
NQYNKLIVNSSDDLYLVSIASLKTPAXT

SEQ ID NO: 43163 - protein, 36 aa, Artificial Sequence; identical to SEQ ID NO: 5116
  Cyclic GFR-binding peptide
  MOD_RES (2), (4), (36): Xaa is C or S

SEQ ID NO: 43164 - protein, 31 aa, Artificial Sequence
  Cyclic GFR-binding peptide
  MOD_RES (1), (3): Xaa is C or S
XGXGEVVMERYKKLVVKDYEDFYLMSIANLE

SEQ ID NO: 43165 - protein, 36 aa, Artificial Sequence; identical to SEQ ID NO: 5118
  Cyclic GFR-binding peptide
  MOD_RES (31), (31): Xaa is C or S

SEQ ID NO: 43166 - protein, 37 aa, Artificial Sequence; identical to SEQ ID NO: 5117
  Cyclic GFR-binding peptide
  MOD_RES (2), (33), (34): Xaa is C or S

SEQ ID NO: 43167 - protein, 25 aa, Artificial Sequence
  Cyclic GFR-binding peptide
KVVMNQYNKLIVNNSSDLYLVSIAS

SEQ ID NO: 43168 - protein, 34 aa, Artificial Sequence; identical to SEQ ID NO: 5120
  Cyclic GFR-binding peptide
  MOD_RES (31), (32): Xaa is C or S

SEQ ID NO: 43169 - protein, 30 aa, Artificial Sequence
  Cyclic GFR-binding peptide
  MOD_RES (2), (2): Xaa is C or S
KXSRVIMRYKKLVKPKRGVFYLISIANLAQ

SEQ ID NO: 43170 - protein, 30 aa, Artificial Sequence
  Cyclic GFR-binding peptide
  MOD_RES (1), (1): Xaa is C or S
XGEVVMDRHKRLVVKENEDYYLMSTASLET

SEQ ID NO: 43171 - protein, 27 aa, Artificial Sequence
  Cyclic GFR-binding peptide
  MOD_RES (26), (27): Xaa is C or S
RHKRLIKPTKGIYYLISTASLDQSVXX

SEQ ID NO: 43172 - protein, 40 aa, Artificial Sequence; identical to SEQ ID NO: 5123
  Cyclic GFR-binding peptide
  MOD_RES (2), (4), (36), (37): Xaa is C or S

SEQ ID NO: 43173 - protein, 24 aa, Artificial Sequence
  Cyclic GFR-binding peptide
VMNQYNKLIVNNSSDLYLVSIASL

SEQ ID NO: 43174 - protein, 29 aa, Artificial Sequence
  Cyclic GFR-binding peptide
  MOD_RES (26), (27): Xaa is C or S
YHYKLVKPKRGVKYLISIPSLAQPVXXPA

SEQ ID NO: 43175 - protein, 32 aa, Artificial Sequence; identical to SEQ ID NO: 5125
  Cyclic GFR-binding peptide
  MOD_RES (1), (32): Xaa is C or S

SEQ ID NO: 43176 - protein, 24 aa, Artificial Sequence
  Cyclic GFR-binding peptide
MYHYKLVKPKRGVKYLISIPSLAQ

SEQ ID NO: 43177 - protein, 33 aa, Artificial Sequence
  Cyclic GFR-binding peptide
  MOD_RES (30), (31): Xaa is C or S
KVVMRYKKLVKPTRGVFYLISIANLDQPVXXPS

SEQ ID NO: 43178 - protein, 26 aa, Artificial Sequence
  Cyclic GFR-binding peptide
MNYHYKLIVNSSDDKYLVSIPSLQTP

SEQ ID NO: 43179 - protein, 30 aa, Artificial Sequence
  Cyclic GFR-binding peptide
  MOD_RES (27), (28): Xaa is C or S
NYHYKLIVNSSDDKYLVSIPSLKTPAXXPK

SEQ ID NO: 43180 - protein, 33 aa, Artificial Sequence
  Cyclic GFR-binding peptide
  MOD_RES (29), (30): Xaa is C or S
VIMRHKRLIKPTKGIYYLISTASLDQSVXXPSA

SEQ ID NO: 43181 - protein, 26 aa, Artificial Sequence
  Cyclic GFR-binding peptide
VMNQYNKLIVNSSDDLYLVSIASLKT

SEQ ID NO: 43182 - protein, 31 aa, Artificial Sequence
  Cyclic GFR-binding peptide
HDELTQYNKLFIPKKRVIELYLVSIASLQVQ

SEQ ID NO: 43183 - protein, 23 aa, Artificial Sequence
  Cyclic GFR-binding peptide
VVMRHKRLVKPTRGVYYLISTAS

SEQ ID NO: 43184 - protein, 23 aa, Artificial Sequence
  Cyclic GFR-binding peptide
VMDRHKRLVVKENEDYYLMSTAS

SEQ ID NO: 43185 - protein, 31 aa, Artificial Sequence; identical to SEQ ID NO: 5134
  Cyclic GFR-binding peptide
  MOD_RES (1), (1): Xaa is C or S

SEQ ID NO: 43186 - protein, 41 aa, Artificial Sequence; identical to SEQ ID NO: 5135
  Cyclic GFR-binding peptide
  MOD_RES (2), (4), (35), (36): Xaa is C or S

SEQ ID NO: 43187 - protein, 28 aa, Artificial Sequence
  Cyclic GFR-binding peptide
SKVVMYHYKLVKPTRGVKYLISIPSLDQ

SEQ ID NO: 43188 - protein, 31 aa, Artificial Sequence
  Cyclic GFR-binding peptide
  MOD_RES (29), (30): Xaa is C or S
VIMRYKKLVKPKRGVFYLISIANLAQPVXXP

SEQ ID NO: 43189 - protein, 33 aa, Artificial Sequence
  Cyclic GFR-binding peptide
  MOD_RES (30), (30): Xaa is C or S
VVMNQYNKLIVNSSDDLYLVSIASLKTPAXTPK

SEQ ID NO: 43190 - protein, 30 aa, Artificial Sequence
  Cyclic GFR-binding peptide
  MOD_RES (1), (3): Xaa is C or S
XGXGEVVMDRYKKLVVKENEDFYLMSIANL

SEQ ID NO: 43191 - protein, 39 aa, Artificial Sequence; identical to SEQ ID NO: 5138
  Cyclic GFR-binding peptide
  MOD_RES (2), (4), (35), (36): Xaa is C or S

SEQ ID NO: 43192 - protein, 28 aa, Artificial Sequence
  Cyclic GFR-binding peptide
  MOD_RES (28), (28): Xaa is C or S
IMQYNKLVKPKRGVLYLISIASLAQPVX

SEQ ID NO: 43193 - protein, 21 aa, Artificial Sequence
  Cyclic GFR-binding peptide
MRHKRLVKPKRGVYYLISTAS

SEQ ID NO: 43194 - protein, 34 aa, Artificial Sequence
  Cyclic GFR-binding peptide
  MOD_RES (1), (3): Xaa is C or S
XKXALHDELTYHYKLFIPKKRVIEKYLVSIPSLQ

SEQ ID NO: 43195 - protein, 36 aa, Artificial Sequence; identical to SEQ ID NO: 5139
  Cyclic GFR-binding peptide
  MOD_RES (1), (3), (35), (36): Xaa is C or S

SEQ ID NO: 43196 - protein, 22 aa, Artificial Sequence
  Cyclic GFR-binding peptide
RHKRLIKPTKGIYYLISTASLD

SEQ ID NO: 43197 - protein, 33 aa, Artificial Sequence
  Cyclic GFR-binding peptide
  MOD_RES (27), (28): Xaa is C or S
NYHYKLIVNNSSDKYLVSIPSLKTPAXXAKPVA

SEQ ID NO: 43198 - protein, 37 aa, Artificial Sequence
  Cyclic GFR-binding peptide
  MOD_RES (2), (4): Xaa is C or S
EXKXALHDELTYHYKLFIPKKRVIEKYLVSIPSLQVQ

SEQ ID NO: 43199 - protein, 27 aa, Artificial Sequence
  Cyclic GFR-binding peptide
VSMGERHKRLTPVGMDDYYLVSTASLK

SEQ ID NO: 43200 - protein, 33 aa, Artificial Sequence; identical to SEQ ID NO: 5141
  Cyclic GFR-binding peptide
  MOD_RES (2), (2): Xaa is C or S

SEQ ID NO: 43201 - protein, 33 aa, Artificial Sequence
  Cyclic GFR-binding peptide
  MOD_RES (30), (31): Xaa is C or S
VVMERHKRLVVKDYEDYYLMSTASLETPVXXAK

SEQ ID NO: 43202 - protein, 40 aa, Artificial Sequence; identical to SEQ ID NO: 5144
  Cyclic GFR-binding peptide
  MOD_RES (1), (3), (35), (36): Xaa is C or S

SEQ ID NO: 43203 - protein, 39 aa, Artificial Sequence; identical to SEQ ID NO: 5145
  Cyclic GFR-binding peptide
  MOD_RES (1), (34), (35): Xaa is C or S

SEQ ID NO: 43204 - protein, 32 aa, Artificial Sequence
  Cyclic GFR-binding peptide
  MOD_RES (28), (29): Xaa is C or S
IMYHYKLIKPTKGIKYLISIPSLDQSVXXPSA

SEQ ID NO: 43205 - protein, 32 aa, Artificial Sequence
  Cyclic GFR-binding peptide
  MOD_RES (2), (4): Xaa is C or S
RXGXEAVSMGERHKRLTPVGMDDYYLVSTASL

SEQ ID NO: 43206 - protein, 27 aa, Artificial Sequence
  Cyclic GFR-binding peptide
EVVMDRHKRLVVKENEDYYLMSTASLE

SEQ ID NO: 43207 - protein, 34 aa, Artificial Sequence; identical to SEQ ID NO: 5146
  Cyclic GFR-binding peptide
  MOD_RES (31), (32): Xaa is C or S

SEQ ID NO: 43208 - protein, 39 aa, Artificial Sequence; identical to SEQ ID NO: 5147
  Cyclic GFR-binding peptide
  MOD_RES (2), (34), (35): Xaa is C or S

SEQ ID NO: 43209 - protein, 31 aa, Artificial Sequence
  Cyclic GFR-binding peptide
  MOD_RES (2), (2): Xaa is C or S
GXSRVVMNRHKRLIVNSSDDYYLVSTASLKT

SEQ ID NO: 43210 - protein, 26 aa, Artificial Sequence
  Cyclic GFR-binding peptide
  MOD_RES (26), (26): Xaa is C or S
YHYKLVKPKRGVKYLISIPSLAQPVX

SEQ ID NO: 43211 - protein, 30 aa, Artificial Sequence
  Cyclic GFR-binding peptide
SRVVMNQYNKLIVNSSDDLYLVSIASLKTP

SEQ ID NO: 43212 - protein, 21 aa, Artificial Sequence
  Cyclic GFR-binding peptide
RHKRLVKPTRGVYYLISTASL

SEQ ID NO: 43213 - protein, 31 aa, Artificial Sequence
  Cyclic GFR-binding peptide
  MOD_RES (1), (3): Xaa is C or S
XKXSRVIMRYKKLVKPKRGVFYLISIANLAQ

SEQ ID NO: 43214 - protein, 25 aa, Artificial Sequence
  Cyclic GFR-binding peptide
RVVMNRHKRLIVNSSDDYYLVSTAS

SEQ ID NO: 43215 - protein, 24 aa, Artificial Sequence
  Cyclic GFR-binding peptide
EQYNKLTPVGMDDLYLVSIASLKT

SEQ ID NO: 43216 - protein, 22 aa, Artificial Sequence
  Cyclic GFR-binding peptide
MQYNKLVKPTRGVLYLISIASL

SEQ ID NO: 43217 - protein, 32 aa, Artificial Sequence
  Cyclic GFR-binding peptide
  MOD_RES (29), (30): Xaa is C or S
VMERHKRLVVKDYEDYYLMSTASLETPVXXAK

SEQ ID NO: 43218 - protein, 36 aa, Artificial Sequence; identical to SEQ ID NO: 5154
  Cyclic GFR-binding peptide
  MOD_RES (31), (32): Xaa is C or S

SEQ ID NO: 43219 - protein, 30 aa, Artificial Sequence
  Cyclic GFR-binding peptide
  MOD_RES (1), (1): Xaa is C or S
XARVVMNRHKRLIVNSSDDYYLVSTASLQT

SEQ ID NO: 43220 - protein, 24 aa, Artificial Sequence
  Cyclic GFR-binding peptide
IMRHKRLIKPTKGIYYLISTASLD

SEQ ID NO: 43221 - protein, 28 aa, Artificial Sequence
  Cyclic GFR-binding peptide
  MOD_RES (26), (27): Xaa is C or S
RHKRLTPVGMDDYYLVSTASLKTPVXXA

SEQ ID NO: 43222 - protein, 34 aa, Artificial Sequence
  Cyclic GFR-binding peptide
  MOD_RES (30), (31): Xaa is C or S
KVVMRHKRLVKPTRGVYYLISTASLDQPVXXPSA

SEQ ID NO: 43223 - protein, 26 aa, Artificial Sequence
  Cyclic GFR-binding peptide
MNRHKRLIVNSSDDYYLVSTASLQTP

SEQ ID NO: 43224 - protein, 33 aa, Artificial Sequence; identical to SEQ ID NO: 5158
  Cyclic GFR-binding peptide
  MOD_RES (1), (3): Xaa is C or S

SEQ ID NO: 43225 - protein, 29 aa, Artificial Sequence
  Cyclic GFR-binding peptide
  MOD_RES (29), (29): Xaa is C or S
MGERYKKLTPVGMDDFYLVSIANLKTPVX

SEQ ID NO: 43226 - protein, 29 aa, Artificial Sequence
  Cyclic GFR-binding peptide
  MOD_RES (2), (2): Xaa is C or S
GXGEVVMDYHYKLVVKENEDKYLMSIPSL

SEQ ID NO: 43227 - protein, 34 aa, Artificial Sequence
  Cyclic GFR-binding peptide
  MOD_RES (28), (29): Xaa is C or S
MDRHKRLVVKENEDYYLMSTASLETPVXXAKPIK

SEQ ID NO: 43228 - protein, 32 aa, Artificial Sequence
  Cyclic GFR-binding peptide
  MOD_RES (29), (29): Xaa is C or S
VMNRHKRLIVNSSDDYYLVSTASLKTPAXTPK

SEQ ID NO: 43229 - protein, 30 aa, Artificial Sequence
  Cyclic GFR-binding peptide
  MOD_RES (2), (2): Xaa is C or S
KXSRVIMYHYKLVKPKRGVKYLISIPSLAQ

SEQ ID NO: 43230 - protein, 28 aa, Artificial Sequence
  Cyclic GFR-binding peptide
  MOD_RES (28), (28): Xaa is C or S
VMRHKRLVKPTRGVYYLISTASLDQPVX

SEQ ID NO: 43231 - protein, 41 aa, Artificial Sequence; identical to SEQ ID NO: 5160
  Cyclic GFR-binding peptide
  MOD_RES (2), (4), (36), (37): Xaa is C or S

SEQ ID NO: 43232 - protein, 36 aa, Artificial Sequence
  Cyclic GFR-binding peptide
  MOD_RES (30), (31): Xaa is C or S
VVMNQYNKLIVNNSSDLYLVSIASLKTPAXXAKPVA

SEQ ID NO: 43233 - protein, 35 aa, Artificial Sequence
  Cyclic GFR-binding peptide
  MOD_RES (29), (30): Xaa is C or S
VIMYHYKLIKPTKGIKYLISIPSLDQSVXXPSASA

SEQ ID NO: 43234 - protein, 27 aa, Artificial Sequence
  Cyclic GFR-binding peptide
MDRHKRLVVKENEDYYLMSTASLETPV

SEQ ID NO: 43235 - protein, 27 aa, Artificial Sequence
  Cyclic GFR-binding peptide
  MOD_RES (27), (27): Xaa is C or S
MRYKKLVKPTRGVFYLISIANLDQPVX

SEQ ID NO: 43236 - protein, 39 aa, Artificial Sequence; identical to SEQ ID NO: 5163
  Cyclic GFR-binding peptide
  MOD_RES (1), (3), (35): Xaa is C or S

SEQ ID NO: 43237 - protein, 33 aa, Artificial Sequence
  Cyclic GFR-binding peptide
  MOD_RES (29), (30): Xaa is C or S
VVMQYNKLVKPTRGVLYLISIASLDQPVXXPSA

SEQ ID NO: 43238 - protein, 34 aa, Artificial Sequence
  Cyclic GFR-binding peptide
  MOD_RES (28), (29): Xaa is C or S
MDYHYKLVVKENEDKYLMSIPSLETPVXXAKPIK

SEQ ID NO: 43239 - protein, 25 aa, Artificial Sequence
  Cyclic GFR-binding peptide
MYHYKLVKPKRGVKYLISIPSLAQP

SEQ ID NO: 43240 - protein, 29 aa, Artificial Sequence
  Cyclic GFR-binding peptide
  MOD_RES (26), (27): Xaa is C or S
YHYKLIVNSSDDKYLVSIPSLQTPAXXPK

SEQ ID NO: 43241 - protein, 33 aa, Artificial Sequence; identical to SEQ ID NO: 5166
  Cyclic GFR-binding peptide
  MOD_RES (2), (2): Xaa is C or S

SEQ ID NO: 43242 - protein, 30 aa, Artificial Sequence
  Cyclic GFR-binding peptide
  MOD_RES (28), (29): Xaa is C or S
IMRHKRLVKPKRGVYYLISTASLAQPVXXP

SEQ ID NO: 43243 - protein, 36 aa, Artificial Sequence; identical to SEQ ID NO: 5168
  Cyclic GFR-binding peptide
  MOD_RES (1), (3), (35), (36): Xaa is C or S

SEQ ID NO: 43244 - protein, 22 aa, Artificial Sequence
  Cyclic GFR-binding peptide
MERHKRLVVKDYEDYYLMSTAS

SEQ ID NO: 43245 - protein, 26 aa, Artificial Sequence
  Cyclic GFR-binding peptide
SKVVMRHKRLVKPTRGVYYLISTASL

SEQ ID NO: 43246 - protein, 33 aa, Artificial Sequence
  Cyclic GFR-binding peptide
  MOD_RES (30), (31): Xaa is C or S
SMGEQYNKLTPVGMDDLYLVSIASLKTPVXXAK

SEQ ID NO: 43247 - protein, 32 aa, Artificial Sequence
  Cyclic GFR-binding peptide
  MOD_RES (30), (31): Xaa is C or S
KVIMYHYKLIKPTKGIKYLISIPSLDQSVXXP

SEQ ID NO: 43248 - protein, 38 aa, Artificial Sequence; identical to SEQ ID NO: 5171
  Cyclic GFR-binding peptide
  MOD_RES (1), (33), (34): Xaa is C or S

SEQ ID NO: 43249 - protein, 40 aa, Artificial Sequence; identical to SEQ ID NO: 5172
  Cyclic GFR-binding peptide
  MOD_RES (37), (37): Xaa is C or S

SEQ ID NO: 43250 - protein, 30 aa, Artificial Sequence
  Cyclic GFR-binding peptide
EAVSMGERYKKLTPVGMDDFYLVSIANLKT

SEQ ID NO: 43251 - protein, 37 aa, Artificial Sequence; identical to SEQ ID NO: 5173
  Cyclic GFR-binding peptide
  MOD_RES (1), (3), (35): Xaa is C or S

SEQ ID NO: 43252 - protein, 33 aa, Artificial Sequence; identical to SEQ ID NO: 5175
  Cyclic GFR-binding peptide
  MOD_RES (2), (33): Xaa is C or S

SEQ ID NO: 43253 - protein, 31 aa, Artificial Sequence
  Cyclic GFR-binding peptide
  MOD_RES (31), (31): Xaa is C or S
TQYNKLFIPKKRVIELYLVSIASLQVQTPRX

SEQ ID NO: 43254 - protein, 32 aa, Artificial Sequence
  Cyclic GFR-binding peptide
  MOD_RES (28), (29): Xaa is C or S
IMRHKRLIKPTKGIYYLISTASLDQSVXXPSA

SEQ ID NO: 43255 - protein, 31 aa, Artificial Sequence
  Cyclic GFR-binding peptide
  MOD_RES (30), (31): Xaa is C or S
VVMNYHYKLIVNNSSDKYLVSIPSLKTPAXX

SEQ ID NO: 43256 - protein, 24 aa, Artificial Sequence
  Cyclic GFR-binding peptide
YHYKLVKPKRGVKYLISIPSLAQP

SEQ ID NO: 43257 - protein, 27 aa, Artificial Sequence
  Cyclic GFR-binding peptide
LTYHYKLFIPKKRVIEKYLVSIPSLQV

SEQ ID NO: 43258 - protein, 35 aa, Artificial Sequence; identical to SEQ ID NO: 5177
  Cyclic GFR-binding peptide
  MOD_RES (1), (3), (35): Xaa is C or S

SEQ ID NO: 43259 - protein, 33 aa, Artificial Sequence
  Cyclic GFR-binding peptide
  MOD_RES (28), (29): Xaa is C or S
IMRYKKLIKPTKGIFYLISIANLDQSVXXPSAS

SEQ ID NO: 43260 - protein, 30 aa, Artificial Sequence
  Cyclic GFR-binding peptide
  MOD_RES (29), (30): Xaa is C or S
VVMQYNKLVKPTRGVLYLISIASLDQPVXX

SEQ ID NO: 43261 - protein, 30 aa, Artificial Sequence
  Cyclic GFR-binding peptide
  MOD_RES (1), (1): Xaa is C or S
XAKVVMNQYNKLIVNNSSDLYLVSIASLKT

SEQ ID NO: 43262 - protein, 31 aa, Artificial Sequence
  Cyclic GFR-binding peptide
HDELTYHYKLFIPKKRVIEKYLVSIPSLQVQ

SEQ ID NO: 43263 - protein, 26 aa, Artificial Sequence
  Cyclic GFR-binding peptide
  MOD_RES (26), (26): Xaa is C or S
YHYKLIVNSSDDKYLVSIPSLQTPAX

SEQ ID NO: 43264 - protein, 26 aa, Artificial Sequence
  Cyclic GFR-binding peptide
VVMEYHYKLVVKDYEDKYLMSIPSLE

SEQ ID NO: 43265 - protein, 27 aa, Artificial Sequence
  Cyclic GFR-binding peptide
  MOD_RES (27), (27): Xaa is C or S
NYHYKLIVNSSDDKYLVSIPSLQTPAX

SEQ ID NO: 43266 - protein, 37 aa, Artificial Sequence; identical to SEQ ID NO: 5181
  Cyclic GFR-binding peptide
  MOD_RES (2), (34), (35): Xaa is C or S

SEQ ID NO: 43267 - protein, 27 aa, Artificial Sequence
  Cyclic GFR-binding peptide
VMDRYKKLVVKENEDFYLMSIANLETP

SEQ ID NO: 43268 - protein, 34 aa, Artificial Sequence
  Cyclic GFR-binding peptide
  MOD_RES (2), (2): Xaa is C or S
KXALHDELTRYKKLFIPKKRVIEFYLVSIANLQV

SEQ ID NO: 43269 - protein, 26 aa, Artificial Sequence
  Cyclic GFR-binding peptide
MNQYNKLIVNSSDDLYLVSIASLQTP

SEQ ID NO: 43270 - protein, 29 aa, Artificial Sequence
  Cyclic GFR-binding peptide
  MOD_RES (26), (27): Xaa is C or S
YHYKLIVNSSDDKYLVSIPSLKTPAXXPK

SEQ ID NO: 43271 - protein, 32 aa, Artificial Sequence
  Cyclic GFR-binding peptide
  MOD_RES (30), (30): Xaa is C or S
RYKKLFIPKKRVIEFYLVSIANLQVQTPRXQV

SEQ ID NO: 43272 - protein, 27 aa, Artificial Sequence
  Cyclic GFR-binding peptide
  MOD_RES (1), (1): Xaa is C or S
XSKVIMRYKKLIKPTKGIFYLISIANL

SEQ ID NO: 43273 - protein, 35 aa, Artificial Sequence; identical to SEQ ID NO: 5184
  Cyclic GFR-binding peptide
  MOD_RES (1), (32), (33): Xaa is C or S

SEQ ID NO: 43274 - protein, 29 aa, Artificial Sequence
  Cyclic GFR-binding peptide
  MOD_RES (26), (27): Xaa is C or S
YHYKLVVKENEDKYLMSIPSLETPVXXAK

SEQ ID NO: 43275 - protein, 35 aa, Artificial Sequence; identical to SEQ ID NO: 5187
  Cyclic GFR-binding peptide
  MOD_RES (2), (33), (34): Xaa is C or S

SEQ ID NO: 43276 - protein, 35 aa, Artificial Sequence
  Cyclic GFR-binding peptide
  MOD_RES (31), (32): Xaa is C or S
VSMGEQYNKLTPVGMDDLYLVSIASLKTPVXXAKG

SEQ ID NO: 43277 - protein, 32 aa, Artificial Sequence
  Cyclic GFR-binding peptide
  MOD_RES (30), (30): Xaa is C or S
VVMNRHKRLIVNSSDDYYLVSTASLKTPAXTP

SEQ ID NO: 43278 - protein, 36 aa, Artificial Sequence; identical to SEQ ID NO: 5188
  Cyclic GFR-binding peptide
  MOD_RES (1), (33), (34): Xaa is C or S

SEQ ID NO: 43279 - protein, 22 aa, Artificial Sequence
  Cyclic GFR-binding peptide
VMYHYKLVKPTRGVKYLISIPS

SEQ ID NO: 43280 - protein, 28 aa, Artificial Sequence
  Cyclic GFR-binding peptide
  MOD_RES (2), (2): Xaa is C or S
GXGEVVMEYHYKLVVKDYEDKYLMSIPS

SEQ ID NO: 43281 - protein, 34 aa, Artificial Sequence; identical to SEQ ID NO: 5190
  Cyclic GFR-binding peptide

SEQ ID NO: 43282 - protein, 33 aa, Artificial Sequence
  Cyclic GFR-binding peptide
  MOD_RES (27), (28): Xaa is C or S
ERHKRLTPVGMDDYYLVSTASLKTPVXXAKGVK

SEQ ID NO: 43283 - protein, 26 aa, Artificial Sequence
  Cyclic GFR-binding peptide
  MOD_RES (1), (1): Xaa is C or S
XSKVIMYHYKLIKPTKGIKYLISIPS

SEQ ID NO: 43284 - protein, 41 aa, Artificial Sequence; identical to SEQ ID NO: 5192
  Cyclic GFR-binding peptide
  MOD_RES (2), (4), (35), (36): Xaa is C or S

SEQ ID NO: 43285 - protein, 31 aa, Artificial Sequence; identical to SEQ ID NO: 5193
  Cyclic GFR-binding peptide

SEQ ID NO: 43286 - protein, 27 aa, Artificial Sequence
  Cyclic GFR-binding peptide
EAVSMGERYKKLTPVGMDDFYLVSIAN

SEQ ID NO: 43287 - protein, 32 aa, Artificial Sequence
  Cyclic GFR-binding peptide
  MOD_RES (30), (31): Xaa is C or S
KVVMRYKKLVKPTRGVFYLISIANLDQPVXXP

SEQ ID NO: 43288 - protein, 28 aa, Artificial Sequence
  Cyclic GFR-binding peptide
LTQYNKLFIPKKRVIELYLVSIASLQVQ

SEQ ID NO: 43289 - protein, 25 aa, Artificial Sequence
  Cyclic GFR-binding peptide
IMYHYKLIKPTKGIKYLISIPSLDQ

SEQ ID NO: 43290 - protein, 28 aa, Artificial Sequence
  Cyclic GFR-binding peptide
  MOD_RES (26), (27): Xaa is C or S
YHYKLVKPTRGVKYLISIPSLDQPVXXP

SEQ ID NO: 43291 - protein, 23 aa, Artificial Sequence
  Cyclic GFR-binding peptide
QYNKLIKPTKGILYLISIASLDQ

SEQ ID NO: 43292 - protein, 25 aa, Artificial Sequence
  Cyclic GFR-binding peptide
MERYKKLVVKDYEDFYLMSIANLET

SEQ ID NO: 43293 - protein, 23 aa, Artificial Sequence
  Cyclic GFR-binding peptide
VMDRYKKLVVKENEDFYLMSIAN

SEQ ID NO: 43294 - protein, 38 aa, Artificial Sequence; identical to SEQ ID NO: 5199
  Cyclic GFR-binding peptide
  MOD_RES (2), (4), (35), (36): Xaa is C or S

SEQ ID NO: 43295 - protein, 37 aa, Artificial Sequence; identical to SEQ ID NO: 5200
  Cyclic GFR-binding peptide
  MOD_RES (32), (33): Xaa is C or S

SEQ ID NO: 43296 - protein, 32 aa, Artificial Sequence
  Cyclic GFR-binding peptide
  MOD_RES (32), (32): Xaa is C or S
AVSMGERYKKLTPVGMDDFYLVSIANLKTPVX

SEQ ID NO: 43297 - protein, 37 aa, Artificial Sequence
  Cyclic GFR-binding peptide
  MOD_RES (33), (33): Xaa is C or S
ELTQYNKLFIPKKRVIELYLVSIASLQVQTPRXQVNR

SEQ ID NO: 43298 - protein, 39 aa, Artificial Sequence; identical to SEQ ID NO: 5201
  Cyclic GFR-binding peptide
  MOD_RES (2), (34), (35): Xaa is C or S

SEQ ID NO: 43299 - protein, 32 aa, Artificial Sequence
  Cyclic GFR-binding peptide
  MOD_RES (27), (28): Xaa is C or S
NYHYKLIVNSSDDKYLVSIPSLKTPAXXPKPV

SEQ ID NO: 43300 - protein, 29 aa, Artificial Sequence
  Cyclic GFR-binding peptide
ALHDELTYHYKLFIPKKRVIEKYLVSIPS

SEQ ID NO: 43301 - protein, 37 aa, Artificial Sequence; identical to SEQ ID NO: 5204
  Cyclic GFR-binding peptide
  MOD_RES (1), (33), (34): Xaa is C or S

SEQ ID NO: 43302 - protein, 36 aa, Artificial Sequence; identical to SEQ ID NO: 5205
  Cyclic GFR-binding peptide
  MOD_RES (1), (3), (35), (36): Xaa is C or S

SEQ ID NO: 43303 - protein, 33 aa, Artificial Sequence
  Cyclic GFR-binding peptide
  MOD_RES (28), (29): Xaa is C or S
MNRHKRLIVNSSDDYYLVSTASLKTPAXXPKPV

SEQ ID NO: 43304 - protein, 29 aa, Artificial Sequence
  Cyclic GFR-binding peptide
  MOD_RES (29), (29): Xaa is C or S
VMDRHKRLVVKENEDYYLMSTASLETPVX

SEQ ID NO: 43305 - protein, 32 aa, Artificial Sequence
  Cyclic GFR-binding peptide
  MOD_RES (28), (29): Xaa is C or S
VMYHYKLVKPTRGVKYLISIPSLDQPVXXPSA

SEQ ID NO: 43306 - protein, 27 aa, Artificial Sequence
  Cyclic GFR-binding peptide
  MOD_RES (1), (1): Xaa is C or S
XGEVVMDRYKKLVVKENEDFYLMSIAN

SEQ ID NO: 43307 - protein, 33 aa, Artificial Sequence; identical to SEQ ID NO: 5206
  Cyclic GFR-binding peptide
  MOD_RES (33), (33): Xaa is C or S

SEQ ID NO: 43308 - protein, 35 aa, Artificial Sequence; identical to SEQ ID NO: 5207
  Cyclic GFR-binding peptide
  MOD_RES (31), (32): Xaa is C or S

SEQ ID NO: 43309 - protein, 27 aa, Artificial Sequence
  Cyclic GFR-binding peptide
KVIMQYNKLIKPTKGILYLISIASLDQ

SEQ ID NO: 43310 - protein, 36 aa, Artificial Sequence; identical to SEQ ID NO: 5208
  Cyclic GFR-binding peptide
  MOD_RES (2), (4), (36): Xaa is C or S

SEQ ID NO: 43311 - protein, 38 aa, Artificial Sequence; identical to SEQ ID NO: 5210
  Cyclic GFR-binding peptide
  MOD_RES (35), (35): Xaa is C or S

SEQ ID NO: 43312 - protein, 31 aa, Artificial Sequence
  Cyclic GFR-binding peptide
  MOD_RES (2), (4): Xaa is C or S
RXGXGEVVMDRYKKLVVKENEDFYLMSIANL

SEQ ID NO: 43313 - protein, 25 aa, Artificial Sequence
  Cyclic GFR-binding peptide
EQYNKLTPVGMDDLYLVSIASLKTP

SEQ ID NO: 43314 - protein, 28 aa, Artificial Sequence
  Cyclic GFR-binding peptide
  MOD_RES (27), (28): Xaa is C or S
NYHYKLIVNSSDDKYLVSIPSLQTPAXX

SEQ ID NO: 43315 - protein, 38 aa, Artificial Sequence; identical to SEQ ID NO: 5212
  Cyclic GFR-binding peptide
  MOD_RES (2), (33), (34): Xaa is C or S

SEQ ID NO: 43316 - protein, 35 aa, Artificial Sequence
  Cyclic GFR-binding peptide
  MOD_RES (29), (30): Xaa is C or S
VMERYKKLVVKDYEDFYLMSIANLETPVXXAKPIS

SEQ ID NO: 43317 - protein, 25 aa, Artificial Sequence
  Cyclic GFR-binding peptide
SKVIMRHKRLIKPTKGIYYLISTAS

SEQ ID NO: 43318 - protein, 32 aa, Artificial Sequence
  Cyclic GFR-binding peptide
  MOD_RES (29), (30): Xaa is C or S
VIMQYNKLIKPTKGILYLISIASLDQSVXXPS

SEQ ID NO: 43319 - protein, 33 aa, Artificial Sequence
  Cyclic GFR-binding peptide
  MOD_RES (28), (29): Xaa is C or S
MNYHYKLIVNNSSDKYLVSIPSLKTPAXXAKPV

SEQ ID NO: 43320 - protein, 31 aa, Artificial Sequence; identical to SEQ ID NO: 5214
  Cyclic GFR-binding peptide
  MOD_RES (31), (31): Xaa is C or S

SEQ ID NO: 43321 - protein, 30 aa, Artificial Sequence
  Cyclic GFR-binding peptide
  MOD_RES (30), (30): Xaa is C or S
RYKKLFIPKKRVIEFYLVSIANLQVQTPRX

SEQ ID NO: 43322 - protein, 34 aa, Artificial Sequence; identical to SEQ ID NO: 5216
  Cyclic GFR-binding peptide
  MOD_RES (1), (33), (34): Xaa is C or S

SEQ ID NO: 43323 - protein, 26 aa, Artificial Sequence
  Cyclic GFR-binding peptide
  MOD_RES (26), (26): Xaa is C or S
RYKKLIVNNSSDFYLVSIANLKTPAX

SEQ ID NO: 43324 - protein, 43 aa, Artificial Sequence; identical to SEQ ID NO: 5218
  Cyclic GFR-binding peptide
  MOD_RES (2), (4), (37), (38): Xaa is C or S

SEQ ID NO: 43325 - protein, 33 aa, Artificial Sequence
  Cyclic GFR-binding peptide
DELTRYKKLFIPKKRVIEFYLVSIANLQVQTPR

SEQ ID NO: 43326 - protein, 35 aa, Artificial Sequence
  Cyclic GFR-binding peptide
  MOD_RES (30), (31): Xaa is C or S
SMGEQYNKLTPVGMDDLYLVSIASLKTPVXXAKGV

SEQ ID NO: 43327 - protein, 41 aa, Artificial Sequence; identical to SEQ ID NO: 5219
  Cyclic GFR-binding peptide
  MOD_RES (1), (3), (35), (36): Xaa is C or S

SEQ ID NO: 43328 - protein, 28 aa, Artificial Sequence
  Cyclic GFR-binding peptide
  MOD_RES (27), (28): Xaa is C or S
EYHYKLVVKDYEDKYLMSIPSLETPVXX

SEQ ID NO: 43329 - protein, 30 aa, Artificial Sequence
  Cyclic GFR-binding peptide
  MOD_RES (29), (30): Xaa is C or S
VMNRHKRLIVNSSDDYYLVSTASLQTPAXX

SEQ ID NO: 43330 - protein, 39 aa, Artificial Sequence; identical to SEQ ID NO: 5221
  Cyclic GFR-binding peptide
  MOD_RES (2), (4), (35), (36): Xaa is C or S

SEQ ID NO: 43331 - protein, 22 aa, Artificial Sequence
  Cyclic GFR-binding peptide
RYKKLIVNNSSDFYLVSIANLK

SEQ ID NO: 43332 - protein, 28 aa, Artificial Sequence
  Cyclic GFR-binding peptide
  MOD_RES (1), (1): Xaa is C or S
XGEVVMDRHKRLVVKENEDYYLMSTASL

SEQ ID NO: 43333 - protein, 33 aa, Artificial Sequence; identical to SEQ ID NO: 5223
  Cyclic GFR-binding peptide
  MOD_RES (2), (2): Xaa is C or S

SEQ ID NO: 43334 - protein, 26 aa, Artificial Sequence
  Cyclic GFR-binding peptide
QYNKLFIPKKRVIELYLVSIASLQVQ

SEQ ID NO: 43335 - protein, 30 aa, Artificial Sequence
  Cyclic GFR-binding peptide
LTQYNKLFIPKKRVIELYLVSIASLQVQTP

SEQ ID NO: 43336 - protein, 31 aa, Artificial Sequence
  Cyclic GFR-binding peptide
  MOD_RES (1), (3): Xaa is C or S
XGXARVVMNYHYKLIVNSSDDKYLVSIPSLQ

SEQ ID NO: 43337 - protein, 32 aa, Artificial Sequence
  Cyclic GFR-binding peptide
  MOD_RES (27), (28): Xaa is C or S
ERHKRLVVKDYEDYYLMSTASLETPVXXAKPI

SEQ ID NO: 43338 - protein, 37 aa, Artificial Sequence; identical to SEQ ID NO: 5224
  Cyclic GFR-binding peptide
  MOD_RES (32), (33): Xaa is C or S

SEQ ID NO: 43339 - protein, 21 aa, Artificial Sequence
  Cyclic GFR-binding peptide
RYKKLVVKDYEDFYLMSIANL

SEQ ID NO: 43340 - protein, 27 aa, Artificial Sequence
  Cyclic GFR-binding peptide
  MOD_RES (26), (27): Xaa is C or S
YHYKLIKPTKGIKYLISIPSLDQSVXX

SEQ ID NO: 43341 - protein, 36 aa, Artificial Sequence; identical to SEQ ID NO: 5227
  Cyclic GFR-binding peptide
  MOD_RES (31), (32): Xaa is C or S

SEQ ID NO: 43342 - protein, 42 aa, Artificial Sequence; identical to SEQ ID NO: 5231
  Cyclic GFR-binding peptide
  MOD_RES (2), (4), (36), (37): Xaa is C or S

SEQ ID NO: 43343 - protein, 31 aa, Artificial Sequence
  Cyclic GFR-binding peptide
  MOD_RES (31), (31): Xaa is C or S
VSMGERYKKLTPVGMDDFYLVSIANLKTPVX

SEQ ID NO: 43344 - protein, 35 aa, Artificial Sequence
  Cyclic GFR-binding peptide
  MOD_RES (30), (31): Xaa is C or S
VVMNQYNKLIVNSSDDLYLVSIASLQTPAXXPKPV

SEQ ID NO: 43345 - protein, 35 aa, Artificial Sequence; identical to SEQ ID NO: 5234
  Cyclic GFR-binding peptide
  MOD_RES (31), (32): Xaa is C or S

SEQ ID NO: 43346 - protein, 37 aa, Artificial Sequence; identical to SEQ ID NO: 5235
  Cyclic GFR-binding peptide
  MOD_RES (1), (3), (35), (36): Xaa is C or S

SEQ ID NO: 43347 - protein, 27 aa, Artificial Sequence
  Cyclic GFR-binding peptide
VKPTRGVQYNKLVKPTRGVLYLISIAS

SEQ ID NO: 43348 - protein, 25 aa, Artificial Sequence
  Cyclic GFR-binding peptide
ERHKRLVVKDYEDYYLMSTASLETP

SEQ ID NO: 43349 - protein, 33 aa, Artificial Sequence
  Cyclic GFR-binding peptide
  MOD_RES (27), (28): Xaa is C or S
DRHKRLVVKENEDYYLMSTASLETPVXXAKPIK

SEQ ID NO: 43350 - protein, 29 aa, Artificial Sequence
  Cyclic GFR-binding peptide
  MOD_RES (1), (1): Xaa is C or S
XGEVVMERHKRLVVKDYEDYYLMSTASLE

SEQ ID NO: 43351 - protein, 34 aa, Artificial Sequence; identical to SEQ ID NO: 5239
  Cyclic GFR-binding peptide
  MOD_RES (31), (32): Xaa is C or S

SEQ ID NO: 43352 - protein, 33 aa, Artificial Sequence
  Cyclic GFR-binding peptide
  MOD_RES (32), (33): Xaa is C or S
AVSMGEQYNKLTPVGMDDLYLVSIASLKTPVXX

SEQ ID NO: 43353 - protein, 30 aa, Artificial Sequence
  Cyclic GFR-binding peptide
  MOD_RES (26), (27): Xaa is C or S
QYNKLIKPTKGILYLISIASLDQSVXXPSA

SEQ ID NO: 43354 - protein, 37 aa, Artificial Sequence
  Cyclic GFR-binding peptide
  MOD_RES (31), (32): Xaa is C or S
VSMGEQYNKLTPVGMDDLYLVSIASLKTPVXXAKGVK

SEQ ID NO: 43355 - protein, 34 aa, Artificial Sequence; identical to SEQ ID NO: 5241
  Cyclic GFR-binding peptide

SEQ ID NO: 43356 - protein, 30 aa, Artificial Sequence
  Cyclic GFR-binding peptide
ARVVMNRHKRLIVNSSDDYYLVSTASLQTP

SEQ ID NO: 43357 - protein, 31 aa, Artificial Sequence
  Cyclic GFR-binding peptide
  MOD_RES (27), (28): Xaa is C or S
MYHYKLVKPKRGVKYLISIPSLAQPVXXPAA

SEQ ID NO: 43358 - protein, 24 aa, Artificial Sequence
  Cyclic GFR-binding peptide
VVMRYKKLVKPTRGVFYLISIANL

SEQ ID NO: 43359 - protein, 32 aa, Artificial Sequence
  Cyclic GFR-binding peptide
  MOD_RES (31), (31): Xaa is C or S
TRYKKLFIPKKRVIEFYLVSIANLQVQTPRXQ

SEQ ID NO: 43360 - protein, 21 aa, Artificial Sequence
  Cyclic GFR-binding peptide
RHKRLVKPKRGVYYLISTASL

SEQ ID NO: 43361 - protein, 28 aa, Artificial Sequence
  Cyclic GFR-binding peptide
  MOD_RES (1), (1): Xaa is C or S
XARVVMNQYNKLIVNSSDDLYLVSIASL

SEQ ID NO: 43362 - protein, 33 aa, Artificial Sequence
  Cyclic GFR-binding peptide
  MOD_RES (2), (4): Xaa is C or S
EXKXALHDELTYHYKLFIPKKRVIEKYLVSIPS

SEQ ID NO: 43363 - protein, 32 aa, Artificial Sequence
  Cyclic GFR-binding peptide
  MOD_RES (32), (32): Xaa is C or S
AVSMGEQYNKLTPVGMDDLYLVSIASLKTPVX

SEQ ID NO: 43364 - protein, 29 aa, Artificial Sequence
  Cyclic GFR-binding peptide
EVVMDRHKRLVVKENEDYYLMSTASLETP

SEQ ID NO: 43365 - protein, 32 aa, Artificial Sequence
  Cyclic GFR-binding peptide
  MOD_RES (1), (3): Xaa is C or S
XGXSRVVMNRHKRLIVNSSDDYYLVSTASLKT

SEQ ID NO: 43366 - protein, 23 aa, Artificial Sequence
  Cyclic GFR-binding peptide
MNYHYKLIVNSSDDKYLVSIPSL

SEQ ID NO: 43367 - protein, 25 aa, Artificial Sequence
  Cyclic GFR-binding peptide
RYKKLVVKDYEDFYLMSIANLETPV

SEQ ID NO: 43368 - protein, 29 aa, Artificial Sequence
  Cyclic GFR-binding peptide
SRVIMYHYKLVKPKRGVKYLISIPSLAQP

SEQ ID NO: 43369 - protein, 34 aa, Artificial Sequence; identical to SEQ ID NO: 5252
  Cyclic GFR-binding peptide
  MOD_RES (1), (33), (34): Xaa is C or S

SEQ ID NO: 43370 - protein, 36 aa, Artificial Sequence; identical to SEQ ID NO: 5251
  Cyclic GFR-binding peptide
  MOD_RES (1), (32), (33): Xaa is C or S

SEQ ID NO: 43371 - protein, 28 aa, Artificial Sequence
  Cyclic GFR-binding peptide
  MOD_RES (27), (28): Xaa is C or S
DRHKRLVVKENEDYYLMSTASLETPVXX

SEQ ID NO: 43372 - protein, 25 aa, Artificial Sequence
  Cyclic GFR-binding peptide
MQYNKLVKPTRGVLYLISIASLDQP

SEQ ID NO: 43373 - protein, 25 aa, Artificial Sequence
  Cyclic GFR-binding peptide
VVMEYHYKLVVKDYEDKYLMSIPSL

SEQ ID NO: 43374 - protein, 31 aa, Artificial Sequence
  Cyclic GFR-binding peptide
LTRHKRLFIPKKRVIEYYLVSTASLQVQTPR

SEQ ID NO: 43375 - protein, 37 aa, Artificial Sequence; identical to SEQ ID NO: 5254
  Cyclic GFR-binding peptide
  MOD_RES (2), (33), (34): Xaa is C or S

SEQ ID NO: 43376 - protein, 35 aa, Artificial Sequence
  Cyclic GFR-binding peptide
  MOD_RES (33), (33): Xaa is C or S
ELTRYKKLFIPKKRVIEFYLVSIANLQVQTPRXQV

SEQ ID NO: 43377 - protein, 35 aa, Artificial Sequence
  Cyclic GFR-binding peptide
  MOD_RES (1), (3): Xaa is C or S
XKXALHDELTRHKRLFIPKKRVIEYYLVSTASLQV

SEQ ID NO: 43378 - protein, 36 aa, Artificial Sequence; identical to SEQ ID NO: 5256
  Cyclic GFR-binding peptide
  MOD_RES (2), (35), (36): Xaa is C or S

SEQ ID NO: 43379 - protein, 30 aa, Artificial Sequence
  Cyclic GFR-binding peptide
ALHDELTYHYKLFIPKKRVIEKYLVSIPSL

SEQ ID NO: 43380 - protein, 27 aa, Artificial Sequence
  Cyclic GFR-binding peptide
EVVMDRYKKLVVKENEDFYLMSIANLE

SEQ ID NO: 43381 - protein, 41 aa, Artificial Sequence; identical to SEQ ID NO: 5258
  Cyclic GFR-binding peptide
  MOD_RES (2), (4), (37), (38): Xaa is C or S

SEQ ID NO: 43382 - protein, 31 aa, Artificial Sequence
  Cyclic GFR-binding peptide
  MOD_RES (2), (2): Xaa is C or S
KXSKVVMRHKRLVKPTRGVYYLISTASLDQP

SEQ ID NO: 43383 - protein, 25 aa, Artificial Sequence
  Cyclic GFR-binding peptide
NQYNKLIVNSSDDLYLVSIASLKTP

SEQ ID NO: 43384 - protein, 24 aa, Artificial Sequence
  Cyclic GFR-binding peptide
GEQYNKLTPVGMDDLYLVSIASLK

SEQ ID NO: 43385 - protein, 42 aa, Artificial Sequence; identical to SEQ ID NO: 5260
  Cyclic GFR-binding peptide
  MOD_RES (2), (4), (41): Xaa is C or S

SEQ ID NO: 43386 - protein, 27 aa, Artificial Sequence
  Cyclic GFR-binding peptide
  MOD_RES (2), (2): Xaa is C or S
KXSRVIMQYNKLVKPKRGVLYLISIAS

SEQ ID NO: 43387 - protein, 35 aa, Artificial Sequence; identical to SEQ ID NO: 5261
  Cyclic GFR-binding peptide
  MOD_RES (2), (33), (34): Xaa is C or S

SEQ ID NO: 43388 - protein, 31 aa, Artificial Sequence
  Cyclic GFR-binding peptide
  MOD_RES (30), (30): Xaa is C or S
VVMNYHYKLIVNSSDDKYLVSIPSLKTPAXT

SEQ ID NO: 43389 - protein, 32 aa, Artificial Sequence; identical to SEQ ID NO: 5263
  Cyclic GFR-binding peptide
  MOD_RES (1), (32): Xaa is C or S

SEQ ID NO: 43390 - protein, 24 aa, Artificial Sequence
  Cyclic GFR-binding peptide
KVIMRYKKLIKPTKGIFYLISIAN

SEQ ID NO: 43391 - protein, 36 aa, Artificial Sequence; identical to SEQ ID NO: 5264
  Cyclic GFR-binding peptide
  MOD_RES (2), (34), (35): Xaa is C or S

SEQ ID NO: 43392 - protein, 21 aa, Artificial Sequence
  Cyclic GFR-binding peptide
MRYKKLVKPTRGVFYLISIAN

SEQ ID NO: 43393 - protein, 40 aa, Artificial Sequence; identical to SEQ ID NO: 5265
  Cyclic GFR-binding peptide
  MOD_RES (1), (3), (35): Xaa is C or S

SEQ ID NO: 43394 - protein, 31 aa, Artificial Sequence
  Cyclic GFR-binding peptide
  MOD_RES (30), (31): Xaa is C or S
KVVMRYKKLVKPTRGVFYLISIANLDQPVXX

SEQ ID NO: 43395 - protein, 23 aa, Artificial Sequence
  Cyclic GFR-binding peptide
VMRHKRLVKPTRGVYYLISTASL

SEQ ID NO: 43396 - protein, 25 aa, Artificial Sequence
  Cyclic GFR-binding peptide
MRHKRLIKPTKGIYYLISTASLDQS

SEQ ID NO: 43397 - protein, 22 aa, Artificial Sequence
  Cyclic GFR-binding peptide
YHYKLIVNSSDDKYLVSIPSLQ

SEQ ID NO: 43398 - protein, 31 aa, Artificial Sequence
  Cyclic GFR-binding peptide
  MOD_RES (2), (4): Xaa is C or S
HXGXSRVVMNRHKRLIVNSSDDYYLVSTASL

SEQ ID NO: 43399 - protein, 27 aa, Artificial Sequence
  Cyclic GFR-binding peptide
  MOD_RES (26), (27): Xaa is C or S
QYNKLIVNNSSDLYLVSIASLKTPAXX

SEQ ID NO: 43400 - protein, 29 aa, Artificial Sequence
  Cyclic GFR-binding peptide
EAVSMGEQYNKLTPVGMDDLYLVSIASLK

SEQ ID NO: 43401 - protein, 37 aa, Artificial Sequence; identical to SEQ ID NO: 5268
  Cyclic GFR-binding peptide
  MOD_RES (33), (34): Xaa is C or S

SEQ ID NO: 43402 - protein, 40 aa, Artificial Sequence; identical to SEQ ID NO: 5269
  Cyclic GFR-binding peptide
  MOD_RES (2), (4): Xaa is C or S

SEQ ID NO: 43403 - protein, 39 aa, Artificial Sequence; identical to SEQ ID NO: 5270
  Cyclic GFR-binding peptide
  MOD_RES (2), (4), (36), (37): Xaa is C or S

SEQ ID NO: 43404 - protein, 39 aa, Artificial Sequence; identical to SEQ ID NO: 5271
  Cyclic GFR-binding peptide
  MOD_RES (1), (33), (34): Xaa is C or S

SEQ ID NO: 43405 - protein, 25 aa, Artificial Sequence
  Cyclic GFR-binding peptide
KVIMQYNKLIKPTKGILYLISIASL

SEQ ID NO: 43406 - protein, 38 aa, Artificial Sequence; identical to SEQ ID NO: 5272
  Cyclic GFR-binding peptide
  MOD_RES (2), (4): Xaa is C or S

SEQ ID NO: 43407 - protein, 23 aa, Artificial Sequence
  Cyclic GFR-binding peptide
VIMYHYKLVKPKRGVKYLISIPS

SEQ ID NO: 43408 - protein, 29 aa, Artificial Sequence
  Cyclic GFR-binding peptide
  MOD_RES (1), (1): Xaa is C or S
XSRVVMNQYNKLIVNSSDDLYLVSIASLK

SEQ ID NO: 43409 - protein, 23 aa, Artificial Sequence
  Cyclic GFR-binding peptide
YHYKLIVNSSDDKYLVSIPSLQT

SEQ ID NO: 43410 - protein, 30 aa, Artificial Sequence
  Cyclic GFR-binding peptide
  MOD_RES (1), (1): Xaa is C or S
XGEVVMDYHYKLVVKENEDKYLMSIPSLET

SEQ ID NO: 43411 - protein, 25 aa, Artificial Sequence
  Cyclic GFR-binding peptide
VMNRYKKLIVNNSSDFYLVSIANLK

SEQ ID NO: 43412 - protein, 32 aa, Artificial Sequence; identical to SEQ ID NO: 5275
  Cyclic GFR-binding peptide
  MOD_RES (1), (32): Xaa is C or S

SEQ ID NO: 43413 - protein, 31 aa, Artificial Sequence
  Cyclic GFR-binding peptide
  MOD_RES (1), (1): Xaa is C or S
XSRVVMNRHKRLIVNSSDDYYLVSTASLKTP

SEQ ID NO: 43414 - protein, 37 aa, Artificial Sequence; identical to SEQ ID NO: 5276
  Cyclic GFR-binding peptide
  MOD_RES (32), (33): Xaa is C or S

SEQ ID NO: 43415 - protein, 33 aa, Artificial Sequence
  Cyclic GFR-binding peptide
  MOD_RES (30), (31): Xaa is C or S
VVMNRYKKLIVNNSSDFYLVSIANLKTPAXXAK

SEQ ID NO: 43416 - protein, 26 aa, Artificial Sequence
  Cyclic GFR-binding peptide
VMNYHYKLIVNSSDDKYLVSIPSLKT

SEQ ID NO: 43417 - protein, 33 aa, Artificial Sequence
  Cyclic GFR-binding peptide
  MOD_RES (2), (4): Xaa is C or S
SXKXSRVIMQYNKLVKPKRGVLYLISIASLAQP

SEQ ID NO: 43418 - protein, 24 aa, Artificial Sequence
  Cyclic GFR-binding peptide
VMNYHYKLIVNNSSDKYLVSIPSL

SEQ ID NO: 43419 - protein, 26 aa, Artificial Sequence
  Cyclic GFR-binding peptide
  MOD_RES (26), (26): Xaa is C or S
RHKRLIKPTKGIYYLISTASLDQSVX

SEQ ID NO: 43420 - protein, 39 aa, Artificial Sequence; identical to SEQ ID NO: 5278
  Cyclic GFR-binding peptide
  MOD_RES (1), (3), (36), (37): Xaa is C or S

SEQ ID NO: 43421 - protein, 34 aa, Artificial Sequence
  Cyclic GFR-binding peptide
  MOD_RES (29), (30): Xaa is C or S
VMNQYNKLIVNSSDDLYLVSIASLKTPAXXPKPV

SEQ ID NO: 43422 - protein, 31 aa, Artificial Sequence
  Cyclic GFR-binding peptide
  MOD_RES (2), (4): Xaa is C or S
RXGXEAVSMGEQYNKLTPVGMDDLYLVSIAS

SEQ ID NO: 43423 - protein, 34 aa, Artificial Sequence; identical to SEQ ID NO: 5281
  Cyclic GFR-binding peptide

SEQ ID NO: 43424 - protein, 35 aa, Artificial Sequence
  Cyclic GFR-binding peptide
  MOD_RES (30), (31): Xaa is C or S
KVIMRHKRLIKPTKGIYYLISTASLDQSVXXPSAS

SEQ ID NO: 43425 - protein, 34 aa, Artificial Sequence; identical to SEQ ID NO: 5282
  Cyclic GFR-binding peptide
  MOD_RES (1), (3): Xaa is C or S

SEQ ID NO: 43426 - protein, 34 aa, Artificial Sequence
  Cyclic GFR-binding peptide
  MOD_RES (28), (29): Xaa is C or S
IMRYKKLVKPKRGVFYLISIANLAQPVXXPAASA

SEQ ID NO: 43427 - protein, 31 aa, Artificial Sequence; identical to SEQ ID NO: 5286
  Cyclic GFR-binding peptide
  MOD_RES (1), (1): Xaa is C or S

SEQ ID NO: 43428 - protein, 30 aa, Artificial Sequence
  Cyclic GFR-binding peptide
  MOD_RES (26), (27): Xaa is C or S
YHYKLVKPTRGVKYLISIPSLDQPVXXPSA

SEQ ID NO: 43429 - protein, 30 aa, Artificial Sequence
  Cyclic GFR-binding peptide
  MOD_RES (29), (30): Xaa is C or S
MGEQYNKLTPVGMDDLYLVSIASLKTPVXX

SEQ ID NO: 43430 - protein, 36 aa, Artificial Sequence; identical to SEQ ID NO: 5287
  Cyclic GFR-binding peptide
  MOD_RES (2), (34), (35): Xaa is C or S

SEQ ID NO: 43431 - protein, 39 aa, Artificial Sequence; identical to SEQ ID NO: 5288
  Cyclic GFR-binding peptide
  MOD_RES (1), (33), (34): Xaa is C or S

SEQ ID NO: 43432 - protein, 30 aa, Artificial Sequence
  Cyclic GFR-binding peptide
  MOD_RES (27), (28): Xaa is C or S
DRHKRLVVKENEDYYLMSTASLETPVXXAK

SEQ ID NO: 43433 - protein, 34 aa, Artificial Sequence; identical to SEQ ID NO: 5289
  Cyclic GFR-binding peptide
  MOD_RES (2), (4): Xaa is C or S

SEQ ID NO: 43434 - protein, 34 aa, Artificial Sequence
  Cyclic GFR-binding peptide
  MOD_RES (29), (30): Xaa is C or S
VVMYHYKLVKPTRGVKYLISIPSLDQPVXXPSAS

SEQ ID NO: 43435 - protein, 30 aa, Artificial Sequence; identical to SEQ ID NO: 5290
  Cyclic GFR-binding peptide

SEQ ID NO: 43436 - protein, 25 aa, Artificial Sequence
  Cyclic GFR-binding peptide
VVMNQYNKLIVNSSDDLYLVSIASL

SEQ ID NO: 43437 - protein, 23 aa, Artificial Sequence
  Cyclic GFR-binding peptide
RYKKLTPVGMDDFYLVSIANLKT

SEQ ID NO: 43438 - protein, 38 aa, Artificial Sequence; identical to SEQ ID NO: 5291
  Cyclic GFR-binding peptide
  MOD_RES (2), (33), (34): Xaa is C or S

SEQ ID NO: 43439 - protein, 38 aa, Artificial Sequence; identical to SEQ ID NO: 5292
  Cyclic GFR-binding peptide
  MOD_RES (32), (33): Xaa is C or S

SEQ ID NO: 43440 - protein, 33 aa, Artificial Sequence
  Cyclic GFR-binding peptide
  MOD_RES (2), (4): Xaa is C or S
RXGXGEVVMDRYKKLVVKENEDFYLMSIANLET

SEQ ID NO: 43441 - protein, 38 aa, Artificial Sequence; identical to SEQ ID NO: 5293
  Cyclic GFR-binding peptide
  MOD_RES (1), (3), (34), (35): Xaa is C or S

SEQ ID NO: 43442 - protein, 31 aa, Artificial Sequence; identical to SEQ ID NO: 5294
  Cyclic GFR-binding peptide

SEQ ID NO: 43443 - protein, 35 aa, Artificial Sequence; identical to SEQ ID NO: 5296
  Cyclic GFR-binding peptide
  MOD_RES (1), (32), (33): Xaa is C or S

SEQ ID NO: 43444 - protein, 28 aa, Artificial Sequence
  Cyclic GFR-binding peptide
  MOD_RES (1), (3): Xaa is C or S
XKXSKVVMYHYKLVKPTRGVKYLISIPS

SEQ ID NO: 43445 - protein, 21 aa, Artificial Sequence
  Cyclic GFR-binding peptide
RHKRLVVKENEDYYLMSTASL

SEQ ID NO: 43446 - protein, 31 aa, Artificial Sequence
  Cyclic GFR-binding peptide
  MOD_RES (26), (27): Xaa is C or S
RYKKLTPVGMDDFYLVSIANLKTPVXXAKGV

SEQ ID NO: 43447 - protein, 40 aa, Artificial Sequence; identical to SEQ ID NO: 5299
  Cyclic GFR-binding peptide
  MOD_RES (2), (4), (36), (37): Xaa is C or S

SEQ ID NO: 43448 - protein, 23 aa, Artificial Sequence
  Cyclic GFR-binding peptide
MDRHKRLVVKENEDYYLMSTASL

SEQ ID NO: 43449 - protein, 21 aa, Artificial Sequence
  Cyclic GFR-binding peptide
NQYNKLIVNNSSDLYLVSIAS

SEQ ID NO: 43450 - protein, 36 aa, Artificial Sequence; identical to SEQ ID NO: 5302
  Cyclic GFR-binding peptide
  MOD_RES (2), (2): Xaa is C or S

SEQ ID NO: 43451 - protein, 38 aa, Artificial Sequence; identical to SEQ ID NO: 5303
  Cyclic GFR-binding peptide
  MOD_RES (2), (4), (36), (37): Xaa is C or S

SEQ ID NO: 43452 - protein, 34 aa, Artificial Sequence
  Cyclic GFR-binding peptide
  MOD_RES (34), (34): Xaa is C or S
DELTQYNKLFIPKKRVIELYLVSIASLQVQTPRX

SEQ ID NO: 43453 - protein, 34 aa, Artificial Sequence; identical to SEQ ID NO: 5305
  Cyclic GFR-binding peptide
  MOD_RES (2), (34): Xaa is C or S

SEQ ID NO: 43454 - protein, 27 aa, Artificial Sequence
  Cyclic GFR-binding peptide
EAVSMGEQYNKLTPVGMDDLYLVSIAS

SEQ ID NO: 43455 - protein, 32 aa, Artificial Sequence
  Cyclic GFR-binding peptide
  MOD_RES (1), (3): Xaa is C or S
XGXARVVMNRHKRLIVNSSDDYYLVSTASLQT

SEQ ID NO: 43456 - protein, 25 aa, Artificial Sequence
  Cyclic GFR-binding peptide
YHYKLVVKENEDKYLMSIPSLETPV

SEQ ID NO: 43457 - protein, 28 aa, Artificial Sequence
  Cyclic GFR-binding peptide
  MOD_RES (28), (28): Xaa is C or S
IMRHKRLVKPKRGVYYLISTASLAQPVX

SEQ ID NO: 43458 - protein, 39 aa, Artificial Sequence; identical to SEQ ID NO: 5308
  Cyclic GFR-binding peptide
  MOD_RES (1), (33): Xaa is C or S

SEQ ID NO: 43459 - protein, 39 aa, Artificial Sequence; identical to SEQ ID NO: 5309
  Cyclic GFR-binding peptide
  MOD_RES (2), (4), (36), (37): Xaa is C or S

SEQ ID NO: 43460 - protein, 45 aa, Artificial Sequence; identical to SEQ ID NO: 5310
  Cyclic GFR-binding peptide
  MOD_RES (2), (4), (41): Xaa is C or S

SEQ ID NO: 43461 - protein, 34 aa, Artificial Sequence; identical to SEQ ID NO: 5311
  Cyclic GFR-binding peptide
  MOD_RES (31), (32): Xaa is C or S

SEQ ID NO: 43462 - protein, 24 aa, Artificial Sequence
  Cyclic GFR-binding peptide
GERYKKLTPVGMDDFYLVSIANLK

SEQ ID NO: 43463 - protein, 25 aa, Artificial Sequence
  Cyclic GFR-binding peptide
ELTQYNKLFIPKKRVIELYLVSIAS

SEQ ID NO: 43464 - protein, 27 aa, Artificial Sequence
  Cyclic GFR-binding peptide
VVMQYNKLVKPTRGVLYLISIASLDQP

SEQ ID NO: 43465 - protein, 36 aa, Artificial Sequence; identical to SEQ ID NO: 5313
  Cyclic GFR-binding peptide
  MOD_RES (2), (33), (34): Xaa is C or S

SEQ ID NO: 43466 - protein, 37 aa, Artificial Sequence; identical to SEQ ID NO: 5314
  Cyclic GFR-binding peptide
  MOD_RES (2), (4), (36), (37): Xaa is C or S

SEQ ID NO: 43467 - protein, 27 aa, Artificial Sequence
  Cyclic GFR-binding peptide
  MOD_RES (27), (27): Xaa is C or S
EYHYKLVVKDYEDKYLMSIPSLETPVX

SEQ ID NO: 43468 - protein, 29 aa, Artificial Sequence
  Cyclic GFR-binding peptide
SRVIMQYNKLVKPKRGVLYLISIASLAQP

SEQ ID NO: 43469 - protein, 30 aa, Artificial Sequence
  Cyclic GFR-binding peptide
  MOD_RES (1), (1): Xaa is C or S
XGEVVMDRYKKLVVKENEDFYLMSIANLET

SEQ ID NO: 43470 - protein, 29 aa, Artificial Sequence
  Cyclic GFR-binding peptide
ALHDELTRYKKLFIPKKRVIEFYLVSIAN

SEQ ID NO: 43471 - protein, 36 aa, Artificial Sequence; identical to SEQ ID NO: 5315
  Cyclic GFR-binding peptide
  MOD_RES (1), (3), (35), (36): Xaa is C or S

SEQ ID NO: 43472 - protein, 22 aa, Artificial Sequence
  Cyclic GFR-binding peptide
YHYKLIKPTKGIKYLISIPSLD

SEQ ID NO: 43473 - protein, 35 aa, Artificial Sequence; identical to SEQ ID NO: 5317
  Cyclic GFR-binding peptide
  MOD_RES (2), (33), (34): Xaa is C or S

SEQ ID NO: 43474 - protein, 29 aa, Artificial Sequence
  Cyclic GFR-binding peptide
KVIMRHKRLIKPTKGIYYLISTASLDQSV

SEQ ID NO: 43475 - protein, 39 aa, Artificial Sequence; identical to SEQ ID NO: 5318
  Cyclic GFR-binding peptide
  MOD_RES (2), (34), (35): Xaa is C or S

SEQ ID NO: 43476 - protein, 33 aa, Artificial Sequence
  Cyclic GFR-binding peptide
  MOD_RES (1), (1): Xaa is C or S
XALHDELTRHKRLFIPKKRVIEYYLVSTASLQV

SEQ ID NO: 43477 - protein, 28 aa, Artificial Sequence
  Cyclic GFR-binding peptide
HDELTYHYKLFIPKKRVIEKYLVSIPSL

SEQ ID NO: 43478 - protein, 35 aa, Artificial Sequence
  Cyclic GFR-binding peptide
  MOD_RES (29), (30): Xaa is C or S
VMNQYNKLIVNSSDDLYLVSIASLQTPAXXPKPVT

SEQ ID NO: 43479 - protein, 37 aa, Artificial Sequence; identical to SEQ ID NO: 5322
  Cyclic GFR-binding peptide
  MOD_RES (32), (33): Xaa is C or S

SEQ ID NO: 43480 - protein, 39 aa, Artificial Sequence; identical to SEQ ID NO: 5325
  Cyclic GFR-binding peptide
  MOD_RES (2), (33), (34): Xaa is C or S

SEQ ID NO: 43481 - protein, 27 aa, Artificial Sequence
  Cyclic GFR-binding peptide
IMRYKKLVKPKRGVFYLISIANLAQPV

SEQ ID NO: 43482 - protein, 32 aa, Artificial Sequence; identical to SEQ ID NO: 5326
  Cyclic GFR-binding peptide

SEQ ID NO: 43483 - protein, 28 aa, Artificial Sequence
  Cyclic GFR-binding peptide
  MOD_RES (1), (3): Xaa is C or S
XKXSKVIMRYKKLIKPTKGIFYLISIAN

SEQ ID NO: 43484 - protein, 35 aa, Artificial Sequence; identical to SEQ ID NO: 5327
  Cyclic GFR-binding peptide
  MOD_RES (2), (34), (35): Xaa is C or S

SEQ ID NO: 43485 - protein, 31 aa, Artificial Sequence
  Cyclic GFR-binding peptide
  MOD_RES (1), (1): Xaa is C or S
XARVVMNYHYKLIVNSSDDKYLVSIPSLQTP

SEQ ID NO: 43486 - protein, 37 aa, Artificial Sequence; identical to SEQ ID NO: 5329
  Cyclic GFR-binding peptide
  MOD_RES (31), (32): Xaa is C or S

SEQ ID NO: 43487 - protein, 36 aa, Artificial Sequence; identical to SEQ ID NO: 5331
  Cyclic GFR-binding peptide
  MOD_RES (32), (32): Xaa is C or S

SEQ ID NO: 43488 - protein, 37 aa, Artificial Sequence; identical to SEQ ID NO: 5332
  Cyclic GFR-binding peptide
  MOD_RES (2), (4), (35), (36): Xaa is C or S

SEQ ID NO: 43489 - protein, 34 aa, Artificial Sequence; identical to SEQ ID NO: 5333
  Cyclic GFR-binding peptide
  MOD_RES (32), (33): Xaa is C or S

SEQ ID NO: 43490 - protein, 32 aa, Artificial Sequence
  Cyclic GFR-binding peptide
  MOD_RES (2), (4): Xaa is C or S
SXKXSKVVMQYNKLVKPTRGVLYLISIASLDQ

SEQ ID NO: 43491 - protein, 25 aa, Artificial Sequence
  Cyclic GFR-binding peptide
GERHKRLTPVGMDDYYLVSTASLKT

SEQ ID NO: 43492 - protein, 34 aa, Artificial Sequence
  Cyclic GFR-binding peptide
  MOD_RES (29), (30): Xaa is C or S
MGEQYNKLTPVGMDDLYLVSIASLKTPVXXAKGV

SEQ ID NO: 43493 - protein, 34 aa, Artificial Sequence
  Cyclic GFR-binding peptide
  MOD_RES (28), (29): Xaa is C or S
IMQYNKLVKPKRGVLYLISIASLAQPVXXPAASA

SEQ ID NO: 43494 - protein, 25 aa, Artificial Sequence
  Cyclic GFR-binding peptide
VMNQYNKLIVNSSDDLYLVSIASLQ

SEQ ID NO: 43495 - protein, 40 aa, Artificial Sequence; identical to SEQ ID NO: 5337
  Cyclic GFR-binding peptide
  MOD_RES (2), (34), (35): Xaa is C or S

SEQ ID NO: 43496 - protein, 32 aa, Artificial Sequence; identical to SEQ ID NO: 5338
  Cyclic GFR-binding peptide
  MOD_RES (31), (32): Xaa is C or S

SEQ ID NO: 43497 - protein, 26 aa, Artificial Sequence
  Cyclic GFR-binding peptide
VIMRHKRLIKPTKGIYYLISTASLDQ

SEQ ID NO: 43498 - protein, 30 aa, Artificial Sequence
  Cyclic GFR-binding peptide
  MOD_RES (29), (30): Xaa is C or S
VMNRYKKLIVNNSSDFYLVSIANLKTPAXX

SEQ ID NO: 43499 - protein, 28 aa, Artificial Sequence
  Cyclic GFR-binding peptide
VMERHKRLVVKDYEDYYLMSTASLETPV

SEQ ID NO: 43500 - protein, 27 aa, Artificial Sequence
  Cyclic GFR-binding peptide
  MOD_RES (27), (27): Xaa is C or S
DRHKRLVVKENEDYYLMSTASLETPVX

SEQ ID NO: 43501 - protein, 28 aa, Artificial Sequence
  Cyclic GFR-binding peptide
VIMRHKRLIKPTKGIYYLISTASLDQSV

SEQ ID NO: 43502 - protein, 29 aa, Artificial Sequence
  Cyclic GFR-binding peptide
  MOD_RES (1), (3): Xaa is C or S
XGXSRVVMNRHKRLIVNSSDDYYLVSTAS

SEQ ID NO: 43503 - protein, 37 aa, Artificial Sequence; identical to SEQ ID NO: 5341
  Cyclic GFR-binding peptide
  MOD_RES (36), (36): Xaa is C or S

SEQ ID NO: 43504 - protein, 41 aa, Artificial Sequence; identical to SEQ ID NO: 5344
  Cyclic GFR-binding peptide
  MOD_RES (2), (4), (35), (36): Xaa is C or S

SEQ ID NO: 43505 - protein, 33 aa, Artificial Sequence
  Cyclic GFR-binding peptide
  MOD_RES (28), (29): Xaa is C or S
GERYKKLTPVGMDDFYLVSIANLKTPVXXAKGV

SEQ ID NO: 43506 - protein, 35 aa, Artificial Sequence; identical to SEQ ID NO: 5345
  Cyclic GFR-binding peptide
  MOD_RES (31), (32): Xaa is C or S

SEQ ID NO: 43507 - protein, 35 aa, Artificial Sequence; identical to SEQ ID NO: 5346
  Cyclic GFR-binding peptide
  MOD_RES (2), (34), (35): Xaa is C or S

SEQ ID NO: 43508 - protein, 36 aa, Artificial Sequence; identical to SEQ ID NO: 5347
  Cyclic GFR-binding peptide
  MOD_RES (2), (4), (36): Xaa is C or S

SEQ ID NO: 43509 - protein, 30 aa, Artificial Sequence
  Cyclic GFR-binding peptide
  MOD_RES (28), (29): Xaa is C or S
MERYKKLVVKDYEDFYLMSIANLETPVXXA

SEQ ID NO: 43510 - protein, 28 aa, Artificial Sequence
  Cyclic GFR-binding peptide
  MOD_RES (26), (27): Xaa is C or S
QYNKLIVNNSSDLYLVSIASLKTPAXXA

SEQ ID NO: 43511 - protein, 30 aa, Artificial Sequence
  Cyclic GFR-binding peptide
DELTQYNKLFIPKKRVIELYLVSIASLQVQ

SEQ ID NO: 43512 - protein, 29 aa, Artificial Sequence
  Cyclic GFR-binding peptide
  MOD_RES (29), (29): Xaa is C or S
VMNRHKRLIVNSSDDYYLVSTASLQTPAX

SEQ ID NO: 43513 - protein, 30 aa, Artificial Sequence
  Cyclic GFR-binding peptide
  MOD_RES (26), (27): Xaa is C or S
YHYKLIVNSSDDKYLVSIPSLKTPAXXPKP

SEQ ID NO: 43514 - protein, 26 aa, Artificial Sequence
  Cyclic GFR-binding peptide
MNYHYKLIVNSSDDKYLVSIPSLKTP

SEQ ID NO: 43515 - protein, 32 aa, Artificial Sequence
  Cyclic GFR-binding peptide
  MOD_RES (1), (3): Xaa is C or S
XKXALHDELTRHKRLFIPKKRVIEYYLVSTAS

SEQ ID NO: 43516 - protein, 23 aa, Artificial Sequence
  Cyclic GFR-binding peptide
MRYKKLVKPTRGVFYLISIANLD

SEQ ID NO: 43517 - protein, 26 aa, Artificial Sequence
  Cyclic GFR-binding peptide
GEVVMDRYKKLVVKENEDFYLMSIAN

SEQ ID NO: 43518 - protein, 29 aa, Artificial Sequence
  Cyclic GFR-binding peptide
  MOD_RES (29), (29): Xaa is C or S
VMERYKKLVVKDYEDFYLMSIANLETPVX

SEQ ID NO: 43519 - protein, 29 aa, Artificial Sequence
  Cyclic GFR-binding peptide
  MOD_RES (1), (1): Xaa is C or S
XSRVIMRYKKLVKPKRGVFYLISIANLAQ

SEQ ID NO: 43520 - protein, 23 aa, Artificial Sequence
  Cyclic GFR-binding peptide
IMRYKKLVKPKRGVFYLISIANL

SEQ ID NO: 43521 - protein, 38 aa, Artificial Sequence; identical to SEQ ID NO: 5351
  Cyclic GFR-binding peptide
  MOD_RES (1), (3), (35), (36): Xaa is C or S

SEQ ID NO: 43522 - protein, 34 aa, Artificial Sequence
  Cyclic GFR-binding peptide
  MOD_RES (2), (4): Xaa is C or S
RXGXGEVVMDRHKRLVVKENEDYYLMSTASLETP

SEQ ID NO: 43523 - protein, 30 aa, Artificial Sequence
  Cyclic GFR-binding peptide
TQYNKLFIPKKRVIELYLVSIASLQVQTPR

SEQ ID NO: 43524 - protein, 31 aa, Artificial Sequence
  Cyclic GFR-binding peptide
  MOD_RES (26), (26): Xaa is C or S
RHKRLIVNSSDDYYLVSTASLKTPAXTPKTV

SEQ ID NO: 43525 - protein, 35 aa, Artificial Sequence
  Cyclic GFR-binding peptide
  MOD_RES (30), (31): Xaa is C or S
RVIMYHYKLVKPKRGVKYLISIPSLAQPVXXPAAS

SEQ ID NO: 43526 - protein, 30 aa, Artificial Sequence
  Cyclic GFR-binding peptide
  MOD_RES (30), (30): Xaa is C or S
RVIMYHYKLVKPKRGVKYLISIPSLAQPVX

SEQ ID NO: 43527 - protein, 37 aa, Artificial Sequence; identical to SEQ ID NO: 5353
  Cyclic GFR-binding peptide
  MOD_RES (2), (33), (34): Xaa is C or S

SEQ ID NO: 43528 - protein, 33 aa, Artificial Sequence; identical to SEQ ID NO: 5354
  Cyclic GFR-binding peptide
  MOD_RES (1), (32), (33): Xaa is C or S

SEQ ID NO: 43529 - protein, 35 aa, Artificial Sequence
  Cyclic GFR-binding peptide
  MOD_RES (30), (31): Xaa is C or S
VVMDRHKRLVVKENEDYYLMSTASLETPVXXAKPI

SEQ ID NO: 43530 - protein, 31 aa, Artificial Sequence; identical to SEQ ID NO: 5359
  Cyclic GFR-binding peptide

SEQ ID NO: 43531 - protein, 31 aa, Artificial Sequence
  Cyclic GFR-binding peptide
ALHDELTRYKKLFIPKKRVIEFYLVSIANLQ

SEQ ID NO: 43532 - protein, 26 aa, Artificial Sequence
  Cyclic GFR-binding peptide
EVVMEYHYKLVVKDYEDKYLMSIPSL

SEQ ID NO: 43533 - protein, 32 aa, Artificial Sequence; identical to SEQ ID NO: 5360
  Cyclic GFR-binding peptide
  MOD_RES (2), (2): Xaa is C or S

SEQ ID NO: 43534 - protein, 36 aa, Artificial Sequence; identical to SEQ ID NO: 5364
  Cyclic GFR-binding peptide
  MOD_RES (2), (33), (34): Xaa is C or S

SEQ ID NO: 43535 - protein, 42 aa, Artificial Sequence; identical to SEQ ID NO: 5366
  Cyclic GFR-binding peptide
  MOD_RES (2), (4), (41): Xaa is C or S

SEQ ID NO: 43536 - protein, 39 aa, Artificial Sequence; identical to SEQ ID NO: 5367
  Cyclic GFR-binding peptide
  MOD_RES (2), (4), (35), (36): Xaa is C or S

SEQ ID NO: 43537 - protein, 30 aa, Artificial Sequence
  Cyclic GFR-binding peptide
  MOD_RES (1), (1): Xaa is C or S
XEAVSMGEQYNKLTPVGMDDLYLVSIASLK

SEQ ID NO: 43538 - protein, 28 aa, Artificial Sequence
  Cyclic GFR-binding peptide
  MOD_RES (1), (3): Xaa is C or S
XKXSKVIMRHKRLIKPTKGIYYLISTAS

SEQ ID NO: 43539 - protein, 28 aa, Artificial Sequence
  Cyclic GFR-binding peptide
  MOD_RES (1), (3): Xaa is C or S
XKXSKVIMYHYKLIKPTKGIKYLISIPS

SEQ ID NO: 43540 - protein, 30 aa, Artificial Sequence; identical to SEQ ID NO: 5369
  Cyclic GFR-binding peptide

SEQ ID NO: 43541 - protein, 29 aa, Artificial Sequence
  Cyclic GFR-binding peptide
  MOD_RES (26), (27): Xaa is C or S
RYKKLVVKDYEDFYLMSIANLETPVXXAK

SEQ ID NO: 43542 - protein, 38 aa, Artificial Sequence; identical to SEQ ID NO: 5371
  Cyclic GFR-binding peptide
  MOD_RES (32), (33): Xaa is C or S

SEQ ID NO: 43543 - protein, 22 aa, Artificial Sequence
  Cyclic GFR-binding peptide
YHYKLFIPKKRVIEKYLVSIPS

SEQ ID NO: 43544 - protein, 40 aa, Artificial Sequence; identical to SEQ ID NO: 5372
  Cyclic GFR-binding peptide
  MOD_RES (2), (4), (35), (36): Xaa is C or S

SEQ ID NO: 43545 - protein, 37 aa, Artificial Sequence; identical to SEQ ID NO: 5373
  Cyclic GFR-binding peptide
  MOD_RES (2), (34): Xaa is C or S

SEQ ID NO: 43546 - protein, 41 aa, Artificial Sequence; identical to SEQ ID NO: 5374
  Cyclic GFR-binding peptide
  MOD_RES (2), (39): Xaa is C or S

SEQ ID NO: 43547 - protein, 28 aa, Artificial Sequence
  Cyclic GFR-binding peptide
  MOD_RES (2), (2): Xaa is C or S
KXSRVIMRYKKLVKPKRGVFYLISIANL

SEQ ID NO: 43548 - protein, 26 aa, Artificial Sequence
  Cyclic GFR-binding peptide
MDRHKRLVVKENEDYYLMSTASLETP

SEQ ID NO: 43549 - protein, 27 aa, Artificial Sequence
  Cyclic GFR-binding peptide
  MOD_RES (1), (1): Xaa is C or S
XGEVVMDYHYKLVVKENEDKYLMSIPS

SEQ ID NO: 43550 - protein, 26 aa, Artificial Sequence
  Cyclic GFR-binding peptide
LTYHYKLFIPKKRVIEKYLVSIPSLQ

SEQ ID NO: 43551 - protein, 30 aa, Artificial Sequence
  Cyclic GFR-binding peptide
  MOD_RES (2), (4): Xaa is C or S
HXGXARVVMNYHYKLIVNSSDDKYLVSIPS

SEQ ID NO: 43552 - protein, 39 aa, Artificial Sequence; identical to SEQ ID NO: 5376
  Cyclic GFR-binding peptide
  MOD_RES (1), (38): Xaa is C or S

SEQ ID NO: 43553 - protein, 24 aa, Artificial Sequence
  Cyclic GFR-binding peptide
RYKKLVVKENEDFYLMSIANLETP

SEQ ID NO: 43554 - protein, 33 aa, Artificial Sequence; identical to SEQ ID NO: 5377
  Cyclic GFR-binding peptide
  MOD_RES (31), (31): Xaa is C or S

SEQ ID NO: 43555 - protein, 29 aa, Artificial Sequence
  Cyclic GFR-binding peptide
RVIMRYKKLVKPKRGVFYLISIANLAQPV

SEQ ID NO: 43556 - protein, 28 aa, Artificial Sequence
  Cyclic GFR-binding peptide
  MOD_RES (1), (3): Xaa is C or S
XKXSKVVMRHKRLVKPTRGVYYLISTAS

SEQ ID NO: 43557 - protein, 34 aa, Artificial Sequence; identical to SEQ ID NO: 5378
  Cyclic GFR-binding peptide
  MOD_RES (2), (34): Xaa is C or S

SEQ ID NO: 43558 - protein, 32 aa, Artificial Sequence
  Cyclic GFR-binding peptide
  MOD_RES (26), (27): Xaa is C or S
RHKRLIVNSSDDYYLVSTASLKTPAXXPKPVY

SEQ ID NO: 43559 - protein, 39 aa, Artificial Sequence; identical to SEQ ID NO: 5379
  Cyclic GFR-binding peptide
  MOD_RES (2), (33), (34): Xaa is C or S

SEQ ID NO: 43560 - protein, 37 aa, Artificial Sequence; identical to SEQ ID NO: 5381
  Cyclic GFR-binding peptide
  MOD_RES (1), (3), (36), (37): Xaa is C or S

SEQ ID NO: 43561 - protein, 26 aa, Artificial Sequence
  Cyclic GFR-binding peptide
  MOD_RES (26), (26): Xaa is C or S
RYKKLVVKENEDFYLMSIANLETPVX

SEQ ID NO: 43562 - protein, 32 aa, Artificial Sequence
  Cyclic GFR-binding peptide
  MOD_RES (2), (4): Xaa is C or S
HXGXAKVVMNYHYKLIVNNSSDKYLVSIPSLK

SEQ ID NO: 43563 - protein, 27 aa, Artificial Sequence
  Cyclic GFR-binding peptide
VMERYKKLVVKDYEDFYLMSIANLETP

SEQ ID NO: 43564 - protein, 35 aa, Artificial Sequence
  Cyclic GFR-binding peptide
  MOD_RES (29), (30): Xaa is C or S
VIMRHKRLVKPKRGVYYLISTASLAQPVXXPAASA

SEQ ID NO: 43565 - protein, 34 aa, Artificial Sequence
  Cyclic GFR-binding peptide
  MOD_RES (28), (29): Xaa is C or S
MDRYKKLVVKENEDFYLMSIANLETPVXXAKPIK

SEQ ID NO: 43566 - protein, 32 aa, Artificial Sequence
  Cyclic GFR-binding peptide
  MOD_RES (27), (28): Xaa is C or S
DYHYKLVVKENEDKYLMSIPSLETPVXXAKPI

SEQ ID NO: 43567 - protein, 40 aa, Artificial Sequence; identical to SEQ ID NO: 5385
  Cyclic GFR-binding peptide
  MOD_RES (1), (34), (35): Xaa is C or S

SEQ ID NO: 43568 - protein, 29 aa, Artificial Sequence
  Cyclic GFR-binding peptide
  MOD_RES (28), (29): Xaa is C or S
IMRHKRLVKPKRGVYYLISTASLAQPVXX

SEQ ID NO: 43569 - protein, 40 aa, Artificial Sequence; identical to SEQ ID NO: 5386
  Cyclic GFR-binding peptide
  MOD_RES (1), (38): Xaa is C or S

SEQ ID NO: 43570 - protein, 32 aa, Artificial Sequence; identical to SEQ ID NO: 5388
  Cyclic GFR-binding peptide
  MOD_RES (32), (32): Xaa is C or S

SEQ ID NO: 43571 - protein, 25 aa, Artificial Sequence
  Cyclic GFR-binding peptide
MGEQYNKLTPVGMDDLYLVSIASLK

SEQ ID NO: 43572 - protein, 30 aa, Artificial Sequence
  Cyclic GFR-binding peptide
  MOD_RES (27), (28): Xaa is C or S
EYHYKLVVKDYEDKYLMSIPSLETPVXXAK

SEQ ID NO: 43573 - protein, 38 aa, Artificial Sequence; identical to SEQ ID NO: 5390
  Cyclic GFR-binding peptide
  MOD_RES (37), (37): Xaa is C or S

SEQ ID NO: 43574 - protein, 28 aa, Artificial Sequence
  Cyclic GFR-binding peptide
YHYKLFIPKKRVIEKYLVSIPSLQVQTP

SEQ ID NO: 43575 - protein, 35 aa, Artificial Sequence
  Cyclic GFR-binding peptide
  MOD_RES (29), (29): Xaa is C or S
VMNYHYKLIVNSSDDKYLVSIPSLKTPAXTPKTVH

SEQ ID NO: 43576 - protein, 34 aa, Artificial Sequence; identical to SEQ ID NO: 5391
  Cyclic GFR-binding peptide
  MOD_RES (1), (3), (34): Xaa is C or S

SEQ ID NO: 43577 - protein, 40 aa, Artificial Sequence; identical to SEQ ID NO: 5392
  Cyclic GFR-binding peptide
  MOD_RES (36), (36): Xaa is C or S

SEQ ID NO: 43578 - protein, 32 aa, Artificial Sequence; identical to SEQ ID NO: 5394
  Cyclic GFR-binding peptide
  MOD_RES (31), (31): Xaa is C or S

SEQ ID NO: 43579 - protein, 21 aa, Artificial Sequence
  Cyclic GFR-binding peptide
ERHKRLTPVGMDDYYLVSTAS

SEQ ID NO: 43580 - protein, 27 aa, Artificial Sequence
  Cyclic GFR-binding peptide
  MOD_RES (27), (27): Xaa is C or S
MYHYKLVKPTRGVKYLISIPSLDQPVX

SEQ ID NO: 43581 - protein, 36 aa, Artificial Sequence; identical to SEQ ID NO: 5395
  Cyclic GFR-binding peptide
  MOD_RES (2), (4), (36): Xaa is C or S

SEQ ID NO: 43582 - protein, 29 aa, Artificial Sequence
  Cyclic GFR-binding peptide
  MOD_RES (29), (29): Xaa is C or S
VIMRHKRLIKPTKGIYYLISTASLDQSVX

SEQ ID NO: 43583 - protein, 34 aa, Artificial Sequence
  Cyclic GFR-binding peptide
  MOD_RES (33), (33): Xaa is C or S
ELTRHKRLFIPKKRVIEYYLVSTASLQVQTPRXQ

SEQ ID NO: 43584 - protein, 37 aa, Artificial Sequence; identical to SEQ ID NO: 5397
  Cyclic GFR-binding peptide
  MOD_RES (2), (34), (35): Xaa is C or S

SEQ ID NO: 43585 - protein, 36 aa, Artificial Sequence; identical to SEQ ID NO: 5398
  Cyclic GFR-binding peptide
  MOD_RES (1), (32), (33): Xaa is C or S

SEQ ID NO: 43586 - protein, 29 aa, Artificial Sequence
  Cyclic GFR-binding peptide
  MOD_RES (2), (2): Xaa is C or S
KXSRVIMRYKKLVKPKRGVFYLISIANLA

SEQ ID NO: 43587 - protein, 25 aa, Artificial Sequence
  Cyclic GFR-binding peptide
VMNYHYKLIVNSSDDKYLVSIPSLK

SEQ ID NO: 43588 - protein, 26 aa, Artificial Sequence
  Cyclic GFR-binding peptide
MRYKKLVKPTRGVFYLISIANLDQPV

SEQ ID NO: 43589 - protein, 32 aa, Artificial Sequence
  Cyclic GFR-binding peptide
  MOD_RES (30), (31): Xaa is C or S
RVIMRHKRLVKPKRGVYYLISTASLAQPVXXP

SEQ ID NO: 43590 - protein, 33 aa, Artificial Sequence
  Cyclic GFR-binding peptide
  MOD_RES (28), (29): Xaa is C or S
IMRHKRLIKPTKGIYYLISTASLDQSVXXPSAS

SEQ ID NO: 43591 - protein, 22 aa, Artificial Sequence
  Cyclic GFR-binding peptide
RYKKLTPVGMDDFYLVSIANLK

SEQ ID NO: 43592 - protein, 35 aa, Artificial Sequence
  Cyclic GFR-binding peptide
  MOD_RES (2), (2): Xaa is C or S
KXALHDELTRYKKLFIPKKRVIEFYLVSIANLQVQ

SEQ ID NO: 43593 - protein, 31 aa, Artificial Sequence
  Cyclic GFR-binding peptide
  MOD_RES (26), (27): Xaa is C or S
RYKKLIKPTKGIFYLISIANLDQSVXXPSAS

SEQ ID NO: 43594 - protein, 31 aa, Artificial Sequence
  Cyclic GFR-binding peptide
  MOD_RES (2), (4): Xaa is C or S
SXKXSKVIMRHKRLIKPTKGIYYLISTASLD

SEQ ID NO: 43595 - protein, 29 aa, Artificial Sequence
  Cyclic GFR-binding peptide
AAAAAAAAAQYNKLVVKDYEDLYLMSIAS

SEQ ID NO: 43596 - protein, 23 aa, Artificial Sequence
  Cyclic GFR-binding peptide
RHKRLIVNSSDDYYLVSTASLKT

SEQ ID NO: 43597 - protein, 21 aa, Artificial Sequence
  Cyclic GFR-binding peptide
RYKKLVKPTRGVFYLISIANL

SEQ ID NO: 43598 - protein, 42 aa, Artificial Sequence; identical to SEQ ID NO: 5404
  Cyclic GFR-binding peptide
  MOD_RES (2), (4), (37), (38): Xaa is C or S

SEQ ID NO: 43599 - protein, 28 aa, Artificial Sequence
  Cyclic GFR-binding peptide
  MOD_RES (2), (2): Xaa is C or S
GXAKVVMNRYKKLIVNNSSDFYLVSIAN

SEQ ID NO: 43600 - protein, 40 aa, Artificial Sequence; identical to SEQ ID NO: 5405
  Cyclic GFR-binding peptide
  MOD_RES (2), (39): Xaa is C or S

SEQ ID NO: 43601 - protein, 32 aa, Artificial Sequence
  Cyclic GFR-binding peptide
  MOD_RES (1), (3): Xaa is C or S
XKXSKVIMRHKRLIKPTKGIYYLISTASLDQS

SEQ ID NO: 43602 - protein, 38 aa, Artificial Sequence; identical to SEQ ID NO: 5406
  Cyclic GFR-binding peptide
  MOD_RES (36), (36): Xaa is C or S

SEQ ID NO: 43603 - protein, 38 aa, Artificial Sequence; identical to SEQ ID NO: 5408
  Cyclic GFR-binding peptide
  MOD_RES (2), (34), (35): Xaa is C or S

SEQ ID NO: 43604 - protein, 28 aa, Artificial Sequence
  Cyclic GFR-binding peptide
  MOD_RES (26), (27): Xaa is C or S
RYKKLIKPTKGIFYLISIANLDQSVXXP

SEQ ID NO: 43605 - protein, 34 aa, Artificial Sequence; identical to SEQ ID NO: 5410
  Cyclic GFR-binding peptide
  MOD_RES (31), (32): Xaa is C or S

SEQ ID NO: 43606 - protein, 30 aa, Artificial Sequence
  Cyclic GFR-binding peptide
  MOD_RES (27), (27): Xaa is C or S
NQYNKLIVNSSDDLYLVSIASLKTPAXTPK

SEQ ID NO: 43607 - protein, 29 aa, Artificial Sequence
  Cyclic GFR-binding peptide
  MOD_RES (2), (2): Xaa is C or S
KXSRVIMYHYKLVKPKRGVKYLISIPSLA

SEQ ID NO: 43608 - protein, 26 aa, Artificial Sequence
  Cyclic GFR-binding peptide
EVVMERYKKLVVKDYEDFYLMSIANL

SEQ ID NO: 43609 - protein, 34 aa, Artificial Sequence
  Cyclic GFR-binding peptide
  MOD_RES (34), (34): Xaa is C or S
DELTRYKKLFIPKKRVIEFYLVSIANLQVQTPRX

SEQ ID NO: 43610 - protein, 23 aa, Artificial Sequence
  Cyclic GFR-binding peptide
YHYKLVKPTRGVKYLISIPSLDQ

SEQ ID NO: 43611 - protein, 38 aa, Artificial Sequence; identical to SEQ ID NO: 5413
  Cyclic GFR-binding peptide
  MOD_RES (32), (33): Xaa is C or S

SEQ ID NO: 43612 - protein, 39 aa, Artificial Sequence; identical to SEQ ID NO: 5415
  Cyclic GFR-binding peptide
  MOD_RES (1), (34), (35): Xaa is C or S

SEQ ID NO: 43613 - protein, 32 aa, Artificial Sequence; identical to SEQ ID NO: 5414
  Cyclic GFR-binding peptide
  MOD_RES (2), (2): Xaa is C or S

SEQ ID NO: 43614 - protein, 31 aa, Artificial Sequence
  Cyclic GFR-binding peptide
  MOD_RES (1), (3): Xaa is C or S
XKXSRVIMRHKRLVKPKRGVYYLISTASLAQ

SEQ ID NO: 43615 - protein, 35 aa, Artificial Sequence; identical to SEQ ID NO: 5416
  Cyclic GFR-binding peptide
  MOD_RES (2), (34), (35): Xaa is C or S

SEQ ID NO: 43616 - protein, 20 aa, Artificial Sequence
  Cyclic GFR-binding peptide
QYNKLVKPTRGVLYLISIAS

SEQ ID NO: 43617 - protein, 31 aa, Artificial Sequence
  Cyclic GFR-binding peptide
  MOD_RES (31), (31): Xaa is C or S
VSMGERHKRLTPVGMDDYYLVSTASLKTPVX

SEQ ID NO: 43618 - protein, 31 aa, Artificial Sequence
  Cyclic GFR-binding peptide
  MOD_RES (1), (3): Xaa is C or S
XGXAKVVMNQYNKLIVNNSSDLYLVSIASLK

SEQ ID NO: 43619 - protein, 34 aa, Artificial Sequence; identical to SEQ ID NO: 5417
  Cyclic GFR-binding peptide
  MOD_RES (1), (3): Xaa is C or S

SEQ ID NO: 43620 - protein, 29 aa, Artificial Sequence
  Cyclic GFR-binding peptide
  MOD_RES (26), (27): Xaa is C or S
RHKRLIVNSSDDYYLVSTASLKTPAXXPK

SEQ ID NO: 43621 - protein, 30 aa, Artificial Sequence; identical to SEQ ID NO: 5418
  Cyclic GFR-binding peptide

SEQ ID NO: 43622 - protein, 29 aa, Artificial Sequence
  Cyclic GFR-binding peptide
  MOD_RES (1), (3): Xaa is C or S
XGXGEVVMERYKKLVVKDYEDFYLMSIAN

SEQ ID NO: 43623 - protein, 28 aa, Artificial Sequence
  Cyclic GFR-binding peptide
  MOD_RES (27), (28): Xaa is C or S
MYHYKLVKPTRGVKYLISIPSLDQPVXX

SEQ ID NO: 43624 - protein, 37 aa, Artificial Sequence; identical to SEQ ID NO: 5419
  Cyclic GFR-binding peptide
  MOD_RES (1), (3), (35), (36): Xaa is C or S

SEQ ID NO: 43625 - protein, 28 aa, Artificial Sequence
  Cyclic GFR-binding peptide
  MOD_RES (26), (27): Xaa is C or S
RHKRLVKPTRGVYYLISTASLDQPVXXP

SEQ ID NO: 43626 - protein, 36 aa, Artificial Sequence; identical to SEQ ID NO: 5424
  Cyclic GFR-binding peptide
  MOD_RES (31), (31): Xaa is C or S

SEQ ID NO: 43627 - protein, 32 aa, Artificial Sequence
  Cyclic GFR-binding peptide
  MOD_RES (1), (3): Xaa is C or S
XKXSKVIMYHYKLIKPTKGIKYLISIPSLDQS

SEQ ID NO: 43628 - protein, 28 aa, Artificial Sequence
  Cyclic GFR-binding peptide
  MOD_RES (1), (1): Xaa is C or S
XEAVSMGERYKKLTPVGMDDFYLVSIAN

SEQ ID NO: 43629 - protein, 32 aa, Artificial Sequence
  Cyclic GFR-binding peptide
LHDELTRHKRLFIPKKRVIEYYLVSTASLQVQ

SEQ ID NO: 43630 - protein, 35 aa, Artificial Sequence
  Cyclic GFR-binding peptide
  MOD_RES (30), (31): Xaa is C or S
VVMNQYNKLIVNNSSDLYLVSIASLKTPAXXAKPV

SEQ ID NO: 43631 - protein, 31 aa, Artificial Sequence
  Cyclic GFR-binding peptide
  MOD_RES (29), (30): Xaa is C or S
VMNYHYKLIVNNSSDKYLVSIPSLKTPAXXA

SEQ ID NO: 43632 - protein, 25 aa, Artificial Sequence
  Cyclic GFR-binding peptide
SRVIMYHYKLVKPKRGVKYLISIPS

SEQ ID NO: 43633 - protein, 27 aa, Artificial Sequence
  Cyclic GFR-binding peptide
  MOD_RES (27), (27): Xaa is C or S
ERYKKLTPVGMDDFYLVSIANLKTPVX

SEQ ID NO: 43634 - protein, 33 aa, Artificial Sequence
  Cyclic GFR-binding peptide
  MOD_RES (30), (31): Xaa is C or S
KVVMYHYKLVKPTRGVKYLISIPSLDQPVXXPS

SEQ ID NO: 43635 - protein, 25 aa, Artificial Sequence
  Cyclic GFR-binding peptide
YHYKLFIPKKRVIEKYLVSIPSLQV

SEQ ID NO: 43636 - protein, 40 aa, Artificial Sequence; identical to SEQ ID NO: 5428
  Cyclic GFR-binding peptide
  MOD_RES (36), (36): Xaa is C or S

SEQ ID NO: 43637 - protein, 28 aa, Artificial Sequence
  Cyclic GFR-binding peptide
  MOD_RES (27), (28): Xaa is C or S
ERYKKLTPVGMDDFYLVSIANLKTPVXX

SEQ ID NO: 43638 - protein, 31 aa, Artificial Sequence
  Cyclic GFR-binding peptide
LHDELTYHYKLFIPKKRVIEKYLVSIPSLQV

SEQ ID NO: 43639 - protein, 29 aa, Artificial Sequence
  Cyclic GFR-binding peptide
  MOD_RES (27), (28): Xaa is C or S
MQYNKLIKPTKGILYLISIASLDQSVXXP

SEQ ID NO: 43640 - protein, 37 aa, Artificial Sequence; identical to SEQ ID NO: 5429
  Cyclic GFR-binding peptide
  MOD_RES (1), (33), (34): Xaa is C or S

SEQ ID NO: 43641 - protein, 33 aa, Artificial Sequence; identical to SEQ ID NO: 5430
  Cyclic GFR-binding peptide
  MOD_RES (32), (33): Xaa is C or S

SEQ ID NO: 43642 - protein, 39 aa, Artificial Sequence; identical to SEQ ID NO: 5431
  Cyclic GFR-binding peptide
  MOD_RES (1), (3), (35), (36): Xaa is C or S

SEQ ID NO: 43643 - protein, 32 aa, Artificial Sequence
  Cyclic GFR-binding peptide
  MOD_RES (1), (3): Xaa is C or S
XGXAKVVMNRYKKLIVNNSSDFYLVSIANLKT

SEQ ID NO: 43644 - protein, 34 aa, Artificial Sequence
  Cyclic GFR-binding peptide
  MOD_RES (2), (4): Xaa is C or S
HXGXAKVVMNRYKKLIVNNSSDFYLVSIANLKTP

SEQ ID NO: 43645 - protein, 22 aa, Artificial Sequence
  Cyclic GFR-binding peptide
IMRYKKLIKPTKGIFYLISIAN

SEQ ID NO: 43646 - protein, 36 aa, Artificial Sequence
  Cyclic GFR-binding peptide
  MOD_RES (2), (4): Xaa is C or S
EXKXALHDELTRYKKLFIPKKRVIEFYLVSIANLQV

SEQ ID NO: 43647 - protein, 30 aa, Artificial Sequence
  Cyclic GFR-binding peptide
  MOD_RES (28), (29): Xaa is C or S
GEQYNKLTPVGMDDLYLVSIASLKTPVXXA

SEQ ID NO: 43648 - protein, 36 aa, Artificial Sequence; identical to SEQ ID NO: 5434
  Cyclic GFR-binding peptide
  MOD_RES (1), (33), (34): Xaa is C or S

SEQ ID NO: 43649 - protein, 35 aa, Artificial Sequence; identical to SEQ ID NO: 5435
  Cyclic GFR-binding peptide
  MOD_RES (2), (4): Xaa is C or S

SEQ ID NO: 43650 - protein, 31 aa, Artificial Sequence
  Cyclic GFR-binding peptide
  MOD_RES (2), (4): Xaa is C or S
RXGXGEVVMDYHYKLVVKENEDKYLMSIPSL

SEQ ID NO: 43651 - protein, 23 aa, Artificial Sequence
  Cyclic GFR-binding peptide
MNQYNKLIVNSSDDLYLVSIASL

SEQ ID NO: 43652 - protein, 33 aa, Artificial Sequence
  Cyclic GFR-binding peptide
  MOD_RES (2), (4): Xaa is C or S
SXKXSKVIMQYNKLIKPTKGILYLISIASLDQS

SEQ ID NO: 43653 - protein, 23 aa, Artificial Sequence
  Cyclic GFR-binding peptide
NYHYKLIVNSSDDKYLVSIPSLQ

SEQ ID NO: 43654 - protein, 32 aa, Artificial Sequence
  Cyclic GFR-binding peptide
ALHDELTQYNKLFIPKKRVIELYLVSIASLQV

SEQ ID NO: 43655 - protein, 35 aa, Artificial Sequence; identical to SEQ ID NO: 5438
  Cyclic GFR-binding peptide
  MOD_RES (31), (32): Xaa is C or S

SEQ ID NO: 43656 - protein, 30 aa, Artificial Sequence
  Cyclic GFR-binding peptide
  MOD_RES (30), (30): Xaa is C or S
KVIMQYNKLIKPTKGILYLISIASLDQSVX

SEQ ID NO: 43657 - protein, 23 aa, Artificial Sequence
  Cyclic GFR-binding peptide
ERYKKLVVKDYEDFYLMSIANLE

SEQ ID NO: 43658 - protein, 43 aa, Artificial Sequence; identical to SEQ ID NO: 5439
  Cyclic GFR-binding peptide
  MOD_RES (2), (4), (37), (38): Xaa is C or S

SEQ ID NO: 43659 - protein, 30 aa, Artificial Sequence
  Cyclic GFR-binding peptide
  MOD_RES (1), (3): Xaa is C or S
XGXEAVSMGEQYNKLTPVGMDDLYLVSIAS

SEQ ID NO: 43660 - protein, 36 aa, Artificial Sequence; identical to SEQ ID NO: 5441
  Cyclic GFR-binding peptide
  MOD_RES (32), (33): Xaa is C or S

SEQ ID NO: 43661 - protein, 31 aa, Artificial Sequence
  Cyclic GFR-binding peptide
  MOD_RES (1), (3): Xaa is C or S
XKXSKVVMRYKKLVKPTRGVFYLISIANLDQ

SEQ ID NO: 43662 - protein, 24 aa, Artificial Sequence
  Cyclic GFR-binding peptide
NRHKRLIVNSSDDYYLVSTASLQT

SEQ ID NO: 43663 - protein, 36 aa, Artificial Sequence; identical to SEQ ID NO: 5444
  Cyclic GFR-binding peptide
  MOD_RES (2), (34), (35): Xaa is C or S

SEQ ID NO: 43664 - protein, 25 aa, Artificial Sequence
  Cyclic GFR-binding peptide
YHYKLIVNSSDDKYLVSIPSLKTPA

SEQ ID NO: 43665 - protein, 24 aa, Artificial Sequence
  Cyclic GFR-binding peptide
MYHYKLIKPTKGIKYLISIPSLDQ

SEQ ID NO: 43666 - protein, 33 aa, Artificial Sequence
  Cyclic GFR-binding peptide
  MOD_RES (30), (31): Xaa is C or S
RVIMRYKKLVKPKRGVFYLISIANLAQPVXXPA

SEQ ID NO: 43667 - protein, 24 aa, Artificial Sequence
  Cyclic GFR-binding peptide
LTRHKRLFIPKKRVIEYYLVSTAS

SEQ ID NO: 43668 - protein, 39 aa, Artificial Sequence; identical to SEQ ID NO: 5449
  Cyclic GFR-binding peptide
  MOD_RES (2), (4): Xaa is C or S

SEQ ID NO: 43669 - protein, 30 aa, Artificial Sequence
  Cyclic GFR-binding peptide
DELTYHYKLFIPKKRVIEKYLVSIPSLQVQ

SEQ ID NO: 43670 - protein, 36 aa, Artificial Sequence; identical to SEQ ID NO: 5451
  Cyclic GFR-binding peptide
  MOD_RES (2), (4), (35), (36): Xaa is C or S

SEQ ID NO: 43671 - protein, 33 aa, Artificial Sequence
  Cyclic GFR-binding peptide
  MOD_RES (29), (30): Xaa is C or S
VMNQYNKLIVNSSDDLYLVSIASLKTPAXXPKP

SEQ ID NO: 43672 - protein, 33 aa, Artificial Sequence; identical to SEQ ID NO: 5453
  Cyclic GFR-binding peptide
  MOD_RES (31), (32): Xaa is C or S

SEQ ID NO: 43673 - protein, 37 aa, Artificial Sequence
  Cyclic GFR-binding peptide
  MOD_RES (31), (32): Xaa is C or S
VSMGERHKRLTPVGMDDYYLVSTASLKTPVXXAKGVK

SEQ ID NO: 43674 - protein, 32 aa, Artificial Sequence
  Cyclic GFR-binding peptide
  MOD_RES (28), (29): Xaa is C or S
VMQYNKLVKPTRGVLYLISIASLDQPVXXPSA

SEQ ID NO: 43675 - protein, 25 aa, Artificial Sequence
  Cyclic GFR-binding peptide
NRHKRLIVNSSDDYYLVSTASLQTP

SEQ ID NO: 43676 - protein, 32 aa, Artificial Sequence
  Cyclic GFR-binding peptide
ALHDELTRHKRLFIPKKRVIEYYLVSTASLQV

SEQ ID NO: 43677 - protein, 42 aa, Artificial Sequence; identical to SEQ ID NO: 5456
  Cyclic GFR-binding peptide
  MOD_RES (1), (38): Xaa is C or S

SEQ ID NO: 43678 - protein, 34 aa, Artificial Sequence
  Cyclic GFR-binding peptide
  MOD_RES (32), (32): Xaa is C or S
LTQYNKLFIPKKRVIELYLVSIASLQVQTPRXQV

SEQ ID NO: 43679 - protein, 29 aa, Artificial Sequence
  Cyclic GFR-binding peptide
  MOD_RES (2), (4): Xaa is C or S
SXKXSKVVMRHKRLVKPTRGVYYLISTAS

SEQ ID NO: 43680 - protein, 30 aa, Artificial Sequence
  Cyclic GFR-binding peptide
  MOD_RES (2), (2): Xaa is C or S
GXAKVVMNQYNKLIVNNSSDLYLVSIASLK

SEQ ID NO: 43681 - protein, 24 aa, Artificial Sequence
  Cyclic GFR-binding peptide
IMRYKKLVKPKRGVFYLISIANLA

SEQ ID NO: 43682 - protein, 26 aa, Artificial Sequence
  Cyclic GFR-binding peptide
AVSMGERHKRLTPVGMDDYYLVSTAS

SEQ ID NO: 43683 - protein, 29 aa, Artificial Sequence
  Cyclic GFR-binding peptide
EVVMDYHYKLVVKENEDKYLMSIPSLETP

SEQ ID NO: 43684 - protein, 33 aa, Artificial Sequence
  Cyclic GFR-binding peptide
  MOD_RES (28), (29): Xaa is C or S
MNRHKRLIVNSSDDYYLVSTASLQTPAXXPKPV

SEQ ID NO: 43685 - protein, 28 aa, Artificial Sequence
  Cyclic GFR-binding peptide
VMERYKKLVVKDYEDFYLMSIANLETPV

SEQ ID NO: 43686 - protein, 28 aa, Artificial Sequence
  Cyclic GFR-binding peptide
  MOD_RES (1), (1): Xaa is C or S
XSRVIMRHKRLVKPKRGVYYLISTASLA

SEQ ID NO: 43687 - protein, 22 aa, Artificial Sequence
  Cyclic GFR-binding peptide
QYNKLFIPKKRVIELYLVSIAS

SEQ ID NO: 43688 - protein, 36 aa, Artificial Sequence; identical to SEQ ID NO: 5458
  Cyclic GFR-binding peptide
  MOD_RES (32), (33): Xaa is C or S

SEQ ID NO: 43689 - protein, 25 aa, Artificial Sequence
  Cyclic GFR-binding peptide
VVMDYHYKLVVKENEDKYLMSIPSL

SEQ ID NO: 43690 - protein, 36 aa, Artificial Sequence
  Cyclic GFR-binding peptide
  MOD_RES (32), (33): Xaa is C or S
AVSMGERYKKLTPVGMDDFYLVSIANLKTPVXXAKG

SEQ ID NO: 43691 - protein, 33 aa, Artificial Sequence; identical to SEQ ID NO: 5460
  Cyclic GFR-binding peptide
  MOD_RES (2), (2): Xaa is C or S

SEQ ID NO: 43692 - protein, 32 aa, Artificial Sequence; identical to SEQ ID NO: 5461
  Cyclic GFR-binding peptide
  MOD_RES (1), (32): Xaa is C or S

SEQ ID NO: 43693 - protein, 30 aa, Artificial Sequence
  Cyclic GFR-binding peptide
  MOD_RES (26), (27): Xaa is C or S
RHKRLVKPTRGVYYLISTASLDQPVXXPSA

SEQ ID NO: 43694 - protein, 40 aa, Artificial Sequence; identical to SEQ ID NO: 5462
  Cyclic GFR-binding peptide
  MOD_RES (2), (34), (35): Xaa is C or S

SEQ ID NO: 43695 - protein, 40 aa, Artificial Sequence; identical to SEQ ID NO: 5463
  Cyclic GFR-binding peptide
  MOD_RES (2), (34): Xaa is C or S

SEQ ID NO: 43696 - protein, 20 aa, Artificial Sequence
  Cyclic GFR-binding peptide
RYKKLVKPTRGVFYLISIAN

SEQ ID NO: 43697 - protein, 26 aa, Artificial Sequence
  Cyclic GFR-binding peptide
ELTRHKRLFIPKKRVIEYYLVSTASL

SEQ ID NO: 43698 - protein, 23 aa, Artificial Sequence
  Cyclic GFR-binding peptide
TRYKKLFIPKKRVIEFYLVSIAN

SEQ ID NO: 43699 - protein, 36 aa, Artificial Sequence; identical to SEQ ID NO: 5467
  Cyclic GFR-binding peptide
  MOD_RES (32), (33): Xaa is C or S

SEQ ID NO: 43700 - protein, 30 aa, Artificial Sequence
  Cyclic GFR-binding peptide
  MOD_RES (2), (2): Xaa is C or S
GXSRVVMNRHKRLIVNSSDDYYLVSTASLK

SEQ ID NO: 43701 - protein, 33 aa, Artificial Sequence
  Cyclic GFR-binding peptide
  MOD_RES (27), (28): Xaa is C or S
MRHKRLVKPKRGVYYLISTASLAQPVXXPAASA

SEQ ID NO: 43702 - protein, 27 aa, Artificial Sequence
  Cyclic GFR-binding peptide
  MOD_RES (27), (27): Xaa is C or S
MRYKKLVKPKRGVFYLISIANLAQPVX

SEQ ID NO: 43703 - protein, 31 aa, Artificial Sequence
  Cyclic GFR-binding peptide
  MOD_RES (29), (30): Xaa is C or S
VIMYHYKLIKPTKGIKYLISIPSLDQSVXXP

SEQ ID NO: 43704 - protein, 26 aa, Artificial Sequence
  Cyclic GFR-binding peptide
RVIMRYKKLVKPKRGVFYLISIANLA

SEQ ID NO: 43705 - protein, 41 aa, Artificial Sequence; identical to SEQ ID NO: 5471
  Cyclic GFR-binding peptide
  MOD_RES (2), (4), (36), (37): Xaa is C or S

SEQ ID NO: 43706 - protein, 41 aa, Artificial Sequence; identical to SEQ ID NO: 5473
  Cyclic GFR-binding peptide
  MOD_RES (2), (4), (36), (37): Xaa is C or S

SEQ ID NO: 43707 - protein, 33 aa, Artificial Sequence
  Cyclic GFR-binding peptide
  MOD_RES (2), (4): Xaa is C or S
RXGXGEVVMDYHYKLVVKENEDKYLMSIPSLET

SEQ ID NO: 43708 - protein, 24 aa, Artificial Sequence
  Cyclic GFR-binding peptide
VVMRHKRLVKPTRGVYYLISTASL

SEQ ID NO: 43709 - protein, 32 aa, Artificial Sequence; identical to SEQ ID NO: 5474
  Cyclic GFR-binding peptide
  MOD_RES (2), (2): Xaa is C or S

SEQ ID NO: 43710 - protein, 28 aa, Artificial Sequence
  Cyclic GFR-binding peptide
  MOD_RES (26), (27): Xaa is C or S
QYNKLIVNSSDDLYLVSIASLQTPAXXP

SEQ ID NO: 43711 - protein, 27 aa, Artificial Sequence
  Cyclic GFR-binding peptide
VMNRHKRLIVNSSDDYYLVSTASLQTP

SEQ ID NO: 43712 - protein, 38 aa, Artificial Sequence; identical to SEQ ID NO: 5477
  Cyclic GFR-binding peptide
  MOD_RES (36), (36): Xaa is C or S

SEQ ID NO: 43713 - protein, 28 aa, Artificial Sequence
  Cyclic GFR-binding peptide
  MOD_RES (26), (27): Xaa is C or S
QYNKLIKPTKGILYLISIASLDQSVXXP

SEQ ID NO: 43714 - protein, 26 aa, Artificial Sequence
  Cyclic GFR-binding peptide
IMRHKRLIKPTKGIYYLISTASLDQS

SEQ ID NO: 43715 - protein, 31 aa, Artificial Sequence
  Cyclic GFR-binding peptide
AVSMGERHKRLTPVGMDDYYLVSTASLKTPV

SEQ ID NO: 43716 - protein, 37 aa, Artificial Sequence; identical to SEQ ID NO: 5479
  Cyclic GFR-binding peptide
  MOD_RES (2), (4), (36), (37): Xaa is C or S

SEQ ID NO: 43717 - protein, 27 aa, Artificial Sequence
  Cyclic GFR-binding peptide
GEVVMEYHYKLVVKDYEDKYLMSIPSL

SEQ ID NO: 43718 - protein, 35 aa, Artificial Sequence
  Cyclic GFR-binding peptide
  MOD_RES (29), (30): Xaa is C or S
VMNYHYKLIVNSSDDKYLVSIPSLKTPAXXPKPVY

SEQ ID NO: 43719 - protein, 39 aa, Artificial Sequence; identical to SEQ ID NO: 5480
  Cyclic GFR-binding peptide
  MOD_RES (35), (35): Xaa is C or S

SEQ ID NO: 43720 - protein, 26 aa, Artificial Sequence
  Cyclic GFR-binding peptide
NQYNKLIVNNSSDLYLVSIASLKTPA

SEQ ID NO: 43721 - protein, 35 aa, Artificial Sequence; identical to SEQ ID NO: 5483
  Cyclic GFR-binding peptide
  MOD_RES (31), (32): Xaa is C or S

SEQ ID NO: 43722 - protein, 36 aa, Artificial Sequence; identical to SEQ ID NO: 5484
  Cyclic GFR-binding peptide
  MOD_RES (1), (33), (34): Xaa is C or S

SEQ ID NO: 43723 - protein, 31 aa, Artificial Sequence
  Cyclic GFR-binding peptide
  MOD_RES (26), (27): Xaa is C or S
QYNKLIVNNSSDLYLVSIASLKTPAXXAKPV

SEQ ID NO: 43724 - protein, 42 aa, Artificial Sequence; identical to SEQ ID NO: 5486
  Cyclic GFR-binding peptide
  MOD_RES (2), (39): Xaa is C or S

SEQ ID NO: 43725 - protein, 34 aa, Artificial Sequence
  Cyclic GFR-binding peptide
  MOD_RES (30), (31): Xaa is C or S
KVIMRYKKLIKPTKGIFYLISIANLDQSVXXPSA

SEQ ID NO: 43726 - protein, 26 aa, Artificial Sequence
  Cyclic GFR-binding peptide
VMNRYKKLIVNNSSDFYLVSIANLKT

SEQ ID NO: 43727 - protein, 27 aa, Artificial Sequence
  Cyclic GFR-binding peptide
  MOD_RES (26), (27): Xaa is C or S
YHYKLIVNSSDDKYLVSIPSLQTPAXX

SEQ ID NO: 43728 - protein, 39 aa, Artificial Sequence; identical to SEQ ID NO: 5488
  Cyclic GFR-binding peptide
  MOD_RES (1), (3), (35), (36): Xaa is C or S

SEQ ID NO: 43729 - protein, 35 aa, Artificial Sequence
  Cyclic GFR-binding peptide
  MOD_RES (1), (3): Xaa is C or S
XKXALHDELTQYNKLFIPKKRVIELYLVSIASLQV

SEQ ID NO: 43730 - protein, 32 aa, Artificial Sequence
  Cyclic GFR-binding peptide
  MOD_RES (1), (3): Xaa is C or S
XKXSKVVMRHKRLVKPTRGVYYLISTASLDQP

SEQ ID NO: 43731 - protein, 35 aa, Artificial Sequence; identical to SEQ ID NO: 5489
  Cyclic GFR-binding peptide
  MOD_RES (2), (33), (34): Xaa is C or S

SEQ ID NO: 43732 - protein, 31 aa, Artificial Sequence
  Cyclic GFR-binding peptide
  MOD_RES (1), (3): Xaa is C or S
XGXSRVVMNYHYKLIVNSSDDKYLVSIPSLK

SEQ ID NO: 43733 - protein, 35 aa, Artificial Sequence; identical to SEQ ID NO: 5492
  Cyclic GFR-binding peptide
  MOD_RES (31), (32): Xaa is C or S

SEQ ID NO: 43734 - protein, 38 aa, Artificial Sequence; identical to SEQ ID NO: 5494
  Cyclic GFR-binding peptide
  MOD_RES (1), (3), (35), (36): Xaa is C or S

SEQ ID NO: 43735 - protein, 40 aa, Artificial Sequence; identical to SEQ ID NO: 5495
  Cyclic GFR-binding peptide
  MOD_RES (2), (34), (35): Xaa is C or S

SEQ ID NO: 43736 - protein, 30 aa, Artificial Sequence
  Cyclic GFR-binding peptide
  MOD_RES (2), (4): Xaa is C or S
SXKXSRVIMRHKRLVKPKRGVYYLISTASL

SEQ ID NO: 43737 - protein, 33 aa, Artificial Sequence; identical to SEQ ID NO: 5496
  Cyclic GFR-binding peptide
  MOD_RES (1), (32), (33): Xaa is C or S

SEQ ID NO: 43738 - protein, 23 aa, Artificial Sequence
  Cyclic GFR-binding peptide
IMRHKRLIKPTKGIYYLISTASL

SEQ ID NO: 43739 - protein, 37 aa, Artificial Sequence
  Cyclic GFR-binding peptide
  MOD_RES (31), (32): Xaa is C or S
VSMGERYKKLTPVGMDDFYLVSIANLKTPVXXAKGVK

SEQ ID NO: 43740 - protein, 31 aa, Artificial Sequence; identical to SEQ ID NO: 5497
  Cyclic GFR-binding peptide
  MOD_RES (31), (31): Xaa is C or S

SEQ ID NO: 43741 - protein, 30 aa, Artificial Sequence
  Cyclic GFR-binding peptide
  MOD_RES (26), (27): Xaa is C or S
YHYKLVVKDYEDKYLMSIPSLETPVXXAKP

SEQ ID NO: 43742 - protein, 31 aa, Artificial Sequence
  Cyclic GFR-binding peptide
  MOD_RES (26), (27): Xaa is C or S
QYNKLIKPTKGILYLISIASLDQSVXXPSAS

SEQ ID NO: 43743 - protein, 21 aa, Artificial Sequence
  Cyclic GFR-binding peptide
QYNKLVKPTRGVLYLISIASL

SEQ ID NO: 43744 - protein, 23 aa, Artificial Sequence
  Cyclic GFR-binding peptide
RHKRLVKPKRGVYYLISTASLAQ

SEQ ID NO: 43745 - protein, 29 aa, Artificial Sequence
  Cyclic GFR-binding peptide
HDELTQYNKLFIPKKRVIELYLVSIASLQ

SEQ ID NO: 43746 - protein, 36 aa, Artificial Sequence; identical to SEQ ID NO: 5503
  Cyclic GFR-binding peptide
  MOD_RES (1), (3), (35), (36): Xaa is C or S

SEQ ID NO: 43747 - protein, 28 aa, Artificial Sequence
  Cyclic GFR-binding peptide
VVMEYHYKLVVKDYEDKYLMSIPSLETP

SEQ ID NO: 43748 - protein, 36 aa, Artificial Sequence; identical to SEQ ID NO: 5504
  Cyclic GFR-binding peptide
  MOD_RES (31), (32): Xaa is C or S

SEQ ID NO: 43749 - protein, 29 aa, Artificial Sequence
  Cyclic GFR-binding peptide
RYKKLFIPKKRVIEFYLVSIANLQVQTPR

SEQ ID NO: 43750 - protein, 32 aa, Artificial Sequence
  Cyclic GFR-binding peptide
  MOD_RES (2), (2): Xaa is C or S
GXGEVVMEYHYKLVVKDYEDKYLMSIPSLETP

SEQ ID NO: 43751 - protein, 34 aa, Artificial Sequence; identical to SEQ ID NO: 5505
  Cyclic GFR-binding peptide
  MOD_RES (2), (33), (34): Xaa is C or S

SEQ ID NO: 43752 - protein, 24 aa, Artificial Sequence
  Cyclic GFR-binding peptide
NRYKKLIVNNSSDFYLVSIANLKT

SEQ ID NO: 43753 - protein, 40 aa, Artificial Sequence; identical to SEQ ID NO: 5507
  Cyclic GFR-binding peptide
  MOD_RES (2), (4), (36): Xaa is C or S

SEQ ID NO: 43754 - protein, 42 aa, Artificial Sequence; identical to SEQ ID NO: 5508
  Cyclic GFR-binding peptide
  MOD_RES (1), (3), (40): Xaa is C or S

SEQ ID NO: 43755 - protein, 30 aa, Artificial Sequence
  Cyclic GFR-binding peptide
  MOD_RES (2), (4): Xaa is C or S
HXGXSRVVMNYHYKLIVNSSDDKYLVSIPS

SEQ ID NO: 43756 - protein, 25 aa, Artificial Sequence
  Cyclic GFR-binding peptide
VVMYHYKLVKPTRGVKYLISIPSLD

SEQ ID NO: 43757 - protein, 26 aa, Artificial Sequence
  Cyclic GFR-binding peptide
VMRHKRLVKPTRGVYYLISTASLDQP

SEQ ID NO: 43758 - protein, 26 aa, Artificial Sequence
  Cyclic GFR-binding peptide
RHKRLFIPKKRVIEYYLVSTASLQVQ

SEQ ID NO: 43759 - protein, 26 aa, Artificial Sequence
  Cyclic GFR-binding peptide
IMQYNKLVKPKRGVLYLISIASLAQP

SEQ ID NO: 43760 - protein, 31 aa, Artificial Sequence
  Cyclic GFR-binding peptide
  MOD_RES (1), (1): Xaa is C or S
XAKVVMNQYNKLIVNNSSDLYLVSIASLKTP

SEQ ID NO: 43761 - protein, 37 aa, Artificial Sequence; identical to SEQ ID NO: 5509
  Cyclic GFR-binding peptide
  MOD_RES (31), (32): Xaa is C or S

SEQ ID NO: 43762 - protein, 27 aa, Artificial Sequence
  Cyclic GFR-binding peptide
  MOD_RES (1), (1): Xaa is C or S
XSRVIMRHKRLVKPKRGVYYLISTASL

SEQ ID NO: 43763 - protein, 24 aa, Artificial Sequence
  Cyclic GFR-binding peptide
KVVMRYKKLVKPTRGVFYLISIAN

SEQ ID NO: 43764 - protein, 22 aa, Artificial Sequence
  Cyclic GFR-binding peptide
QYNKLIVNSSDDLYLVSIASLK

SEQ ID NO: 43765 - protein, 28 aa, Artificial Sequence
  Cyclic GFR-binding peptide
  MOD_RES (26), (26): Xaa is C or S
QYNKLIVNSSDDLYLVSIASLKTPAXTP

SEQ ID NO: 43766 - protein, 28 aa, Artificial Sequence
  Cyclic GFR-binding peptide
ARVVMNRHKRLIVNSSDDYYLVSTASLQ

SEQ ID NO: 43767 - protein, 42 aa, Artificial Sequence; identical to SEQ ID NO: 5513
  Cyclic GFR-binding peptide
  MOD_RES (1), (3), (36), (37): Xaa is C or S

SEQ ID NO: 43768 - protein, 32 aa, Artificial Sequence
  Cyclic GFR-binding peptide
  MOD_RES (26), (27): Xaa is C or S
YHYKLIVNSSDDKYLVSIPSLKTPAXXPKPVY

SEQ ID NO: 43769 - protein, 22 aa, Artificial Sequence
  Cyclic GFR-binding peptide
QYNKLTPVGMDDLYLVSIASLK

SEQ ID NO: 43770 - protein, 35 aa, Artificial Sequence
  Cyclic GFR-binding peptide
  MOD_RES (32), (32): Xaa is C or S
LTRHKRLFIPKKRVIEYYLVSTASLQVQTPRXQVN

SEQ ID NO: 43771 - protein, 40 aa, Artificial Sequence; identical to SEQ ID NO: 5515
  Cyclic GFR-binding peptide
  MOD_RES (2), (39): Xaa is C or S

SEQ ID NO: 43772 - protein, 33 aa, Artificial Sequence
  Cyclic GFR-binding peptide
  MOD_RES (1), (3): Xaa is C or S
XKXALHDELTRYKKLFIPKKRVIEFYLVSIANL

SEQ ID NO: 43773 - protein, 26 aa, Artificial Sequence
  Cyclic GFR-binding peptide
  MOD_RES (26), (26): Xaa is C or S
QYNKLIVNSSDDLYLVSIASLKTPAX

SEQ ID NO: 43774 - protein, 31 aa, Artificial Sequence
  Cyclic GFR-binding peptide
  MOD_RES (2), (2): Xaa is C or S
KXSRVIMYHYKLVKPKRGVKYLISIPSLAQP

SEQ ID NO: 43775 - protein, 30 aa, Artificial Sequence
  Cyclic GFR-binding peptide
  MOD_RES (2), (4): Xaa is C or S
HXGXAKVVMNQYNKLIVNNSSDLYLVSIAS

SEQ ID NO: 43776 - protein, 35 aa, Artificial Sequence
  Cyclic GFR-binding peptide
  MOD_RES (30), (31): Xaa is C or S
VVMNQYNKLIVNSSDDLYLVSIASLKTPAXXPKPV

SEQ ID NO: 43777 - protein, 30 aa, Artificial Sequence; identical to SEQ ID NO: 5516
  Cyclic GFR-binding peptide

SEQ ID NO: 43778 - protein, 27 aa, Artificial Sequence
  Cyclic GFR-binding peptide
  MOD_RES (26), (27): Xaa is C or S
QYNKLIVNSSDDLYLVSIASLKTPAXX

SEQ ID NO: 43779 - protein, 42 aa, Artificial Sequence; identical to SEQ ID NO: 5518
  Cyclic GFR-binding peptide
  MOD_RES (2), (4), (37), (38): Xaa is C or S

SEQ ID NO: 43780 - protein, 36 aa, Artificial Sequence
  Cyclic GFR-binding peptide
  MOD_RES (1), (3): Xaa is C or S
XKXALHDELTRYKKLFIPKKRVIEFYLVSIANLQVQ

SEQ ID NO: 43781 - protein, 25 aa, Artificial Sequence
  Cyclic GFR-binding peptide
LTYHYKLFIPKKRVIEKYLVSIPSL

SEQ ID NO: 43782 - protein, 26 aa, Artificial Sequence
  Cyclic GFR-binding peptide
IMRYKKLVKPKRGVFYLISIANLAQP

SEQ ID NO: 43783 - protein, 34 aa, Artificial Sequence
  Cyclic GFR-binding peptide
  MOD_RES (31), (32): Xaa is C or S
VSMGERYKKLTPVGMDDFYLVSIANLKTPVXXAK

SEQ ID NO: 43784 - protein, 34 aa, Artificial Sequence
  Cyclic GFR-binding peptide
  MOD_RES (30), (31): Xaa is C or S
RVIMRHKRLVKPKRGVYYLISTASLAQPVXXPAA

SEQ ID NO: 43785 - protein, 27 aa, Artificial Sequence
  Cyclic GFR-binding peptide
VMDRHKRLVVKENEDYYLMSTASLETP

SEQ ID NO: 43786 - protein, 25 aa, Artificial Sequence
  Cyclic GFR-binding peptide
SMGERYKKLTPVGMDDFYLVSIANL

SEQ ID NO: 43787 - protein, 21 aa, Artificial Sequence
  Cyclic GFR-binding peptide
NRHKRLIVNSSDDYYLVSTAS

SEQ ID NO: 43788 - protein, 29 aa, Artificial Sequence
  Cyclic GFR-binding peptide
  MOD_RES (29), (29): Xaa is C or S
VMDRYKKLVVKENEDFYLMSIANLETPVX

SEQ ID NO: 43789 - protein, 37 aa, Artificial Sequence; identical to SEQ ID NO: 5525
  Cyclic GFR-binding peptide
  MOD_RES (2), (34): Xaa is C or S

SEQ ID NO: 43790 - protein, 33 aa, Artificial Sequence; identical to SEQ ID NO: 5526
  Cyclic GFR-binding peptide
  MOD_RES (1), (3): Xaa is C or S

SEQ ID NO: 43791 - protein, 34 aa, Artificial Sequence
  Cyclic GFR-binding peptide
  MOD_RES (28), (29): Xaa is C or S
MNRHKRLIVNSSDDYYLVSTASLKTPAXXPKPVY

SEQ ID NO: 43792 - protein, 34 aa, Artificial Sequence
  Cyclic GFR-binding peptide
  MOD_RES (29), (30): Xaa is C or S
VMDYHYKLVVKENEDKYLMSIPSLETPVXXAKPI

SEQ ID NO: 43793 - protein, 33 aa, Artificial Sequence
  Cyclic GFR-binding peptide
  MOD_RES (27), (28): Xaa is C or S
NRYKKLIVNNSSDFYLVSIANLKTPAXXAKPVA

SEQ ID NO: 43794 - protein, 23 aa, Artificial Sequence
  Cyclic GFR-binding peptide
IMQYNKLVKPKRGVLYLISIASL

SEQ ID NO: 43795 - protein, 30 aa, Artificial Sequence
  Cyclic GFR-binding peptide
DELTRYKKLFIPKKRVIEFYLVSIANLQVQ

SEQ ID NO: 43796 - protein, 37 aa, Artificial Sequence; identical to SEQ ID NO: 5530
  Cyclic GFR-binding peptide
  MOD_RES (2), (35), (36): Xaa is C or S

SEQ ID NO: 43797 - protein, 33 aa, Artificial Sequence
  Cyclic GFR-binding peptide
  MOD_RES (30), (30): Xaa is C or S
VVMNRHKRLIVNSSDDYYLVSTASLKTPAXTPK

SEQ ID NO: 43798 - protein, 35 aa, Artificial Sequence; identical to SEQ ID NO: 5533
  Cyclic GFR-binding peptide
  MOD_RES (31), (32): Xaa is C or S

SEQ ID NO: 43799 - protein, 28 aa, Artificial Sequence
  Cyclic GFR-binding peptide
  MOD_RES (26), (27): Xaa is C or S
RHKRLVKPKRGVYYLISTASLAQPVXXP

SEQ ID NO: 43800 - protein, 20 aa, Artificial Sequence
  Cyclic GFR-binding peptide
YHYKLVVKENEDKYLMSIPS

SEQ ID NO: 43801 - protein, 31 aa, Artificial Sequence
  Cyclic GFR-binding peptide
  MOD_RES (26), (27): Xaa is C or S
YHYKLVKPTRGVKYLISIPSLDQPVXXPSAS

SEQ ID NO: 43802 - protein, 35 aa, Artificial Sequence
  Cyclic GFR-binding peptide
  MOD_RES (29), (30): Xaa is C or S
VMERHKRLVVKDYEDYYLMSTASLETPVXXAKPIS

SEQ ID NO: 43803 - protein, 33 aa, Artificial Sequence
  Cyclic GFR-binding peptide
  MOD_RES (28), (29): Xaa is C or S
VMRHKRLVKPTRGVYYLISTASLDQPVXXPSAS

SEQ ID NO: 43804 - protein, 24 aa, Artificial Sequence
  Cyclic GFR-binding peptide
YHYKLIKPTKGIKYLISIPSLDQS

SEQ ID NO: 43805 - protein, 34 aa, Artificial Sequence; identical to SEQ ID NO: 5537
  Cyclic GFR-binding peptide
  MOD_RES (32), (33): Xaa is C or S

SEQ ID NO: 43806 - protein, 31 aa, Artificial Sequence
  Cyclic GFR-binding peptide
  MOD_RES (29), (30): Xaa is C or S
VMNYHYKLIVNSSDDKYLVSIPSLQTPAXXP

SEQ ID NO: 43807 - protein, 21 aa, Artificial Sequence
  Cyclic GFR-binding peptide
YHYKLVVKENEDKYLMSIPSL

SEQ ID NO: 43808 - protein, 29 aa, Artificial Sequence
  Cyclic GFR-binding peptide
  MOD_RES (1), (1): Xaa is C or S
XEAVSMGERHKRLTPVGMDDYYLVSTASL

SEQ ID NO: 43809 - protein, 22 aa, Artificial Sequence
  Cyclic GFR-binding peptide
IMQYNKLIKPTKGILYLISIAS

SEQ ID NO: 43810 - protein, 37 aa, Artificial Sequence; identical to SEQ ID NO: 5540
  Cyclic GFR-binding peptide
  MOD_RES (1), (33), (34): Xaa is C or S

SEQ ID NO: 43811 - protein, 32 aa, Artificial Sequence
  Cyclic GFR-binding peptide
  MOD_RES (31), (32): Xaa is C or S
VSMGERHKRLTPVGMDDYYLVSTASLKTPVXX

SEQ ID NO: 43812 - protein, 38 aa, Artificial Sequence; identical to SEQ ID NO: 5542
  Cyclic GFR-binding peptide
  MOD_RES (1), (3), (35), (36): Xaa is C or S

SEQ ID NO: 43813 - protein, 32 aa, Artificial Sequence
  Cyclic GFR-binding peptide
  MOD_RES (27), (28): Xaa is C or S
NQYNKLIVNSSDDLYLVSIASLQTPAXXPKPV

SEQ ID NO: 43814 - protein, 35 aa, Artificial Sequence
  Cyclic GFR-binding peptide
  MOD_RES (2), (4): Xaa is C or S
EXKXALHDELTYHYKLFIPKKRVIEKYLVSIPSLQ

SEQ ID NO: 43815 - protein, 26 aa, Artificial Sequence
  Cyclic GFR-binding peptide
  MOD_RES (26), (26): Xaa is C or S
YHYKLIKPTKGIKYLISIPSLDQSVX

SEQ ID NO: 43816 - protein, 38 aa, Artificial Sequence; identical to SEQ ID NO: 5544
  Cyclic GFR-binding peptide
  MOD_RES (2), (34): Xaa is C or S

SEQ ID NO: 43817 - protein, 32 aa, Artificial Sequence
  Cyclic GFR-binding peptide
  MOD_RES (26), (26): Xaa is C or S
YHYKLIVNSSDDKYLVSIPSLKTPAXTPKTVH

SEQ ID NO: 43818 - protein, 32 aa, Artificial Sequence
  Cyclic GFR-binding peptide
  MOD_RES (27), (28): Xaa is C or S
MRYKKLVKPKRGVFYLISIANLAQPVXXPAAS

SEQ ID NO: 43819 - protein, 32 aa, Artificial Sequence
  Cyclic GFR-binding peptide
  MOD_RES (1), (3): Xaa is C or S
XKXSKVVMYHYKLVKPTRGVKYLISIPSLDQP

SEQ ID NO: 43820 - protein, 26 aa, Artificial Sequence
  Cyclic GFR-binding peptide
VIMRYKKLIKPTKGIFYLISIANLDQ

SEQ ID NO: 43821 - protein, 30 aa, Artificial Sequence
  Cyclic GFR-binding peptide
  MOD_RES (2), (2): Xaa is C or S
GXGEVVMDYHYKLVVKENEDKYLMSIPSLE

SEQ ID NO: 43822 - protein, 39 aa, Artificial Sequence; identical to SEQ ID NO: 5545
  Cyclic GFR-binding peptide
  MOD_RES (1), (3): Xaa is C or S

SEQ ID NO: 43823 - protein, 31 aa, Artificial Sequence
  Cyclic GFR-binding peptide
  MOD_RES (2), (2): Xaa is C or S
KXSRVIMRYKKLVKPKRGVFYLISIANLAQP

SEQ ID NO: 43824 - protein, 26 aa, Artificial Sequence
  Cyclic GFR-binding peptide
EYHYKLVVKDYEDKYLMSIPSLETPV

SEQ ID NO: 43825 - protein, 31 aa, Artificial Sequence
  Cyclic GFR-binding peptide
  MOD_RES (27), (28): Xaa is C or S
NQYNKLIVNSSDDLYLVSIASLKTPAXXPKP

SEQ ID NO: 43826 - protein, 30 aa, Artificial Sequence; identical to SEQ ID NO: 5548
  Cyclic GFR-binding peptide

SEQ ID NO: 43827 - protein, 29 aa, Artificial Sequence
  Cyclic GFR-binding peptide
  MOD_RES (1), (1): Xaa is C or S
XSRVIMQYNKLVKPKRGVLYLISIASLAQ

SEQ ID NO: 43828 - protein, 40 aa, Artificial Sequence; identical to SEQ ID NO: 5550
  Cyclic GFR-binding peptide
  MOD_RES (2), (34), (35): Xaa is C or S

SEQ ID NO: 43829 - protein, 27 aa, Artificial Sequence
  Cyclic GFR-binding peptide
EVVMDYHYKLVVKENEDKYLMSIPSLE

SEQ ID NO: 43830 - protein, 26 aa, Artificial Sequence
  Cyclic GFR-binding peptide
SKVIMYHYKLIKPTKGIKYLISIPSL

SEQ ID NO: 43831 - protein, 29 aa, Artificial Sequence
  Cyclic GFR-binding peptide
  MOD_RES (1), (3): Xaa is C or S
XGXGEVVMDRYKKLVVKENEDFYLMSIAN

SEQ ID NO: 43832 - protein, 33 aa, Artificial Sequence
  Cyclic GFR-binding peptide
ALHDELTYHYKLFIPKKRVIEKYLVSIPSLQVQ

SEQ ID NO: 43833 - protein, 37 aa, Artificial Sequence; identical to SEQ ID NO: 5552
  Cyclic GFR-binding peptide
  MOD_RES (1), (3), (34), (35): Xaa is C or S

SEQ ID NO: 43834 - protein, 38 aa, Artificial Sequence; identical to SEQ ID NO: 5554
  Cyclic GFR-binding peptide
  MOD_RES (35), (35): Xaa is C or S

SEQ ID NO: 43835 - protein, 43 aa, Artificial Sequence; identical to SEQ ID NO: 5555
  Cyclic GFR-binding peptide
  MOD_RES (2), (4), (41): Xaa is C or S

SEQ ID NO: 43836 - protein, 37 aa, Artificial Sequence; identical to SEQ ID NO: 5556
  Cyclic GFR-binding peptide
  MOD_RES (1), (33), (34): Xaa is C or S

SEQ ID NO: 43837 - protein, 42 aa, Artificial Sequence; identical to SEQ ID NO: 5557
  Cyclic GFR-binding peptide
  MOD_RES (2), (4), (36), (37): Xaa is C or S

SEQ ID NO: 43838 - protein, 23 aa, Artificial Sequence
  Cyclic GFR-binding peptide
VIMYHYKLIKPTKGIKYLISIPS

SEQ ID NO: 43839 - protein, 31 aa, Artificial Sequence
  Cyclic GFR-binding peptide
  MOD_RES (30), (31): Xaa is C or S
KVIMYHYKLIKPTKGIKYLISIPSLDQSVXX

SEQ ID NO: 43840 - protein, 28 aa, Artificial Sequence
  Cyclic GFR-binding peptide
VMDRHKRLVVKENEDYYLMSTASLETPV

SEQ ID NO: 43841 - protein, 32 aa, Artificial Sequence; identical to SEQ ID NO: 5558
  Cyclic GFR-binding peptide
  MOD_RES (31), (32): Xaa is C or S

SEQ ID NO: 43842 - protein, 20 aa, Artificial Sequence
  Cyclic GFR-binding peptide
RYKKLVVKDYEDFYLMSIAN

SEQ ID NO: 43843 - protein, 38 aa, Artificial Sequence; identical to SEQ ID NO: 5561
  Cyclic GFR-binding peptide
  MOD_RES (2), (4), (36), (37): Xaa is C or S

SEQ ID NO: 43844 - protein, 30 aa, Artificial Sequence
  Cyclic GFR-binding peptide
GEVVMDRYKKLVVKENEDFYLMSIANLETP

SEQ ID NO: 43845 - protein, 29 aa, Artificial Sequence
  Cyclic GFR-binding peptide
  MOD_RES (1), (3): Xaa is C or S
XGXARVVMNQYNKLIVNSSDDLYLVSIAS

SEQ ID NO: 43846 - protein, 30 aa, Artificial Sequence
  Cyclic GFR-binding peptide
  MOD_RES (1), (3): Xaa is C or S
XKXSRVIMQYNKLVKPKRGVLYLISIASLA

SEQ ID NO: 43847 - protein, 37 aa, Artificial Sequence; identical to SEQ ID NO: 5562
  Cyclic GFR-binding peptide
  MOD_RES (2), (33), (34): Xaa is C or S

SEQ ID NO: 43848 - protein, 28 aa, Artificial Sequence
  Cyclic GFR-binding peptide
TQYNKLFIPKKRVIELYLVSIASLQVQT

SEQ ID NO: 43849 - protein, 35 aa, Artificial Sequence
  Cyclic GFR-binding peptide
  MOD_RES (30), (31): Xaa is C or S
VVMERHKRLVVKDYEDYYLMSTASLETPVXXAKPI

SEQ ID NO: 43850 - protein, 24 aa, Artificial Sequence
  Cyclic GFR-binding peptide
MQYNKLVKPTRGVLYLISIASLDQ

SEQ ID NO: 43851 - protein, 38 aa, Artificial Sequence; identical to SEQ ID NO: 5566
  Cyclic GFR-binding peptide
  MOD_RES (1), (33): Xaa is C or S

SEQ ID NO: 43852 - protein, 31 aa, Artificial Sequence
  Cyclic GFR-binding peptide
  MOD_RES (1), (1): Xaa is C or S
XALHDELTRYKKLFIPKKRVIEFYLVSIANL

SEQ ID NO: 43853 - protein, 40 aa, Artificial Sequence; identical to SEQ ID NO: 5568
  Cyclic GFR-binding peptide
  MOD_RES (2), (34), (35): Xaa is C or S

SEQ ID NO: 43854 - protein, 36 aa, Artificial Sequence; identical to SEQ ID NO: 5569
  Cyclic GFR-binding peptide
  MOD_RES (1), (3), (36): Xaa is C or S

SEQ ID NO: 43855 - protein, 36 aa, Artificial Sequence
  Cyclic GFR-binding peptide
  MOD_RES (30), (31): Xaa is C or S
KVVMYHYKLVKPTRGVKYLISIPSLDQPVXXPSASA

SEQ ID NO: 43856 - protein, 32 aa, Artificial Sequence
  Cyclic GFR-binding peptide
  MOD_RES (28), (29): Xaa is C or S
IMRYKKLIKPTKGIFYLISIANLDQSVXXPSA

SEQ ID NO: 43857 - protein, 35 aa, Artificial Sequence; identical to SEQ ID NO: 5570
  Cyclic GFR-binding peptide
  MOD_RES (2), (34), (35): Xaa is C or S

SEQ ID NO: 43858 - protein, 34 aa, Artificial Sequence
  Cyclic GFR-binding peptide
  MOD_RES (31), (32): Xaa is C or S
VSMGERHKRLTPVGMDDYYLVSTASLKTPVXXAK

SEQ ID NO: 43859 - protein, 39 aa, Artificial Sequence; identical to SEQ ID NO: 5571
  Cyclic GFR-binding peptide
  MOD_RES (2), (4), (36), (37): Xaa is C or S

SEQ ID NO: 43860 - protein, 23 aa, Artificial Sequence
  Cyclic GFR-binding peptide
RYKKLIKPTKGIFYLISIANLDQ

SEQ ID NO: 43861 - protein, 31 aa, Artificial Sequence
  Cyclic GFR-binding peptide
  MOD_RES (2), (4): Xaa is C or S
SXKXSRVIMRYKKLVKPKRGVFYLISIANLA

SEQ ID NO: 43862 - protein, 22 aa, Artificial Sequence
  Cyclic GFR-binding peptide
RHKRLFIPKKRVIEYYLVSTAS

SEQ ID NO: 43863 - protein, 24 aa, Artificial Sequence
  Cyclic GFR-binding peptide
MEYHYKLVVKDYEDKYLMSIPSLE

SEQ ID NO: 43864 - protein, 26 aa, Artificial Sequence
  Cyclic GFR-binding peptide
MNQYNKLIVNSSDDLYLVSIASLKTP

SEQ ID NO: 43865 - protein, 26 aa, Artificial Sequence
  Cyclic GFR-binding peptide
MGEQYNKLTPVGMDDLYLVSIASLKT

SEQ ID NO: 43866 - protein, 34 aa, Artificial Sequence
  Cyclic GFR-binding peptide
  MOD_RES (30), (31): Xaa is C or S
SMGERHKRLTPVGMDDYYLVSTASLKTPVXXAKG

SEQ ID NO: 43867 - protein, 29 aa, Artificial Sequence
  Cyclic GFR-binding peptide
AAAAAAAAAQYNKLIVNSSDDLYLVSIAS

SEQ ID NO: 43868 - protein, 32 aa, Artificial Sequence; identical to SEQ ID NO: 5574
  Cyclic GFR-binding peptide
  MOD_RES (32), (32): Xaa is C or S

SEQ ID NO: 43869 - protein, 26 aa, Artificial Sequence
  Cyclic GFR-binding peptide
DRHKRLVVKENEDYYLMSTASLETPV

SEQ ID NO: 43870 - protein, 36 aa, Artificial Sequence; identical to SEQ ID NO: 5575
  Cyclic GFR-binding peptide
  MOD_RES (31), (31): Xaa is C or S

SEQ ID NO: 43871 - protein, 28 aa, Artificial Sequence
  Cyclic GFR-binding peptide
  MOD_RES (27), (28): Xaa is C or S
MRYKKLVKPKRGVFYLISIANLAQPVXX

SEQ ID NO: 43872 - protein, 30 aa, Artificial Sequence
  Cyclic GFR-binding peptide
  MOD_RES (27), (28): Xaa is C or S
NQYNKLIVNNSSDLYLVSIASLKTPAXXAK

SEQ ID NO: 43873 - protein, 40 aa, Artificial Sequence; identical to SEQ ID NO: 5576
  Cyclic GFR-binding peptide
  MOD_RES (2), (4), (36), (37): Xaa is C or S

SEQ ID NO: 43874 - protein, 31 aa, Artificial Sequence
  Cyclic GFR-binding peptide
  MOD_RES (1), (3): Xaa is C or S
XKXSRVIMYHYKLVKPKRGVKYLISIPSLAQ

SEQ ID NO: 43875 - protein, 33 aa, Artificial Sequence
  Cyclic GFR-binding peptide
  MOD_RES (30), (31): Xaa is C or S
SMGERHKRLTPVGMDDYYLVSTASLKTPVXXAK

SEQ ID NO: 43876 - protein, 22 aa, Artificial Sequence
  Cyclic GFR-binding peptide
MDRYKKLVVKENEDFYLMSIAN

SEQ ID NO: 43877 - protein, 37 aa, Artificial Sequence; identical to SEQ ID NO: 5578
  Cyclic GFR-binding peptide
  MOD_RES (1), (3), (34), (35): Xaa is C or S

SEQ ID NO: 43878 - protein, 32 aa, Artificial Sequence
  Cyclic GFR-binding peptide
  MOD_RES (26), (27): Xaa is C or S
YHYKLIVNSSDDKYLVSIPSLQTPAXXPKPVT

SEQ ID NO: 43879 - protein, 41 aa, Artificial Sequence; identical to SEQ ID NO: 5579
  Cyclic GFR-binding peptide
  MOD_RES (1), (3), (40): Xaa is C or S

SEQ ID NO: 43880 - protein, 36 aa, Artificial Sequence; identical to SEQ ID NO: 5581
  Cyclic GFR-binding peptide
  MOD_RES (2), (34), (35): Xaa is C or S

SEQ ID NO: 43881 - protein, 27 aa, Artificial Sequence
  Cyclic GFR-binding peptide
  MOD_RES (1), (1): Xaa is C or S
XSRVIMYHYKLVKPKRGVKYLISIPSL

SEQ ID NO: 43882 - protein, 29 aa, Artificial Sequence
  Cyclic GFR-binding peptide
  MOD_RES (27), (28): Xaa is C or S
ERYKKLVVKDYEDFYLMSIANLETPVXXA

SEQ ID NO: 43883 - protein, 27 aa, Artificial Sequence
  Cyclic GFR-binding peptide
  MOD_RES (2), (2): Xaa is C or S
KXSKVVMRHKRLVKPTRGVYYLISTAS

SEQ ID NO: 43884 - protein, 34 aa, Artificial Sequence
  Cyclic GFR-binding peptide
  MOD_RES (29), (30): Xaa is C or S
VIMYHYKLVKPKRGVKYLISIPSLAQPVXXPAAS

SEQ ID NO: 43885 - protein, 32 aa, Artificial Sequence
  Cyclic GFR-binding peptide
  MOD_RES (27), (28): Xaa is C or S
MRHKRLVKPTRGVYYLISTASLDQPVXXPSAS

SEQ ID NO: 43886 - protein, 30 aa, Artificial Sequence
  Cyclic GFR-binding peptide
  MOD_RES (26), (27): Xaa is C or S
RYKKLIKPTKGIFYLISIANLDQSVXXPSA

SEQ ID NO: 43887 - protein, 35 aa, Artificial Sequence; identical to SEQ ID NO: 5583
  Cyclic GFR-binding peptide
  MOD_RES (2), (4), (35): Xaa is C or S

SEQ ID NO: 43888 - protein, 39 aa, Artificial Sequence; identical to SEQ ID NO: 5586
  Cyclic GFR-binding peptide
  MOD_RES (2), (4), (36), (37): Xaa is C or S

SEQ ID NO: 43889 - protein, 28 aa, Artificial Sequence
  Cyclic GFR-binding peptide
GEVVMDRYKKLVVKENEDFYLMSIANLE

SEQ ID NO: 43890 - protein, 31 aa, Artificial Sequence
  Cyclic GFR-binding peptide
HDELTRHKRLFIPKKRVIEYYLVSTASLQVQ

SEQ ID NO: 43891 - protein, 33 aa, Artificial Sequence; identical to SEQ ID NO: 5588
  Cyclic GFR-binding peptide
  MOD_RES (31), (32): Xaa is C or S

SEQ ID NO: 43892 - protein, 25 aa, Artificial Sequence
  Cyclic GFR-binding peptide
RHKRLVVKENEDYYLMSTASLETPV

SEQ ID NO: 43893 - protein, 34 aa, Artificial Sequence
  Cyclic GFR-binding peptide
  MOD_RES (30), (31): Xaa is C or S
KVVMQYNKLVKPTRGVLYLISIASLDQPVXXPSA

SEQ ID NO: 43894 - protein, 31 aa, Artificial Sequence
  Cyclic GFR-binding peptide
  MOD_RES (30), (31): Xaa is C or S
SMGERHKRLTPVGMDDYYLVSTASLKTPVXX

SEQ ID NO: 43895 - protein, 33 aa, Artificial Sequence; identical to SEQ ID NO: 5589
  Cyclic GFR-binding peptide
  MOD_RES (2), (33): Xaa is C or S

SEQ ID NO: 43896 - protein, 31 aa, Artificial Sequence
  Cyclic GFR-binding peptide
  MOD_RES (27), (28): Xaa is C or S
MRYKKLIKPTKGIFYLISIANLDQSVXXPSA

SEQ ID NO: 43897 - protein, 28 aa, Artificial Sequence
  Cyclic GFR-binding peptide
  MOD_RES (28), (28): Xaa is C or S
LSAISVLYLDDSSNVILKNYQNMVVRSX

SEQ ID NO: 43898 - protein, 38 aa, Artificial Sequence; identical to SEQ ID NO: 5590
  Cyclic GFR-binding peptide
  MOD_RES (6), (7): Xaa is C or S

SEQ ID NO: 43899 - protein, 35 aa, Artificial Sequence
  Cyclic GFR-binding peptide
  MOD_RES (32), (34): Xaa is C or S
PTKLSATSVLYYDDMGVPTLRKHREGMSVAEXGXR

SEQ ID NO: 43900 - protein, 27 aa, Artificial Sequence
  Cyclic GFR-binding peptide
PTKLSPISVLYKDDSSNVILKYHYNMV

SEQ ID NO: 43901 - protein, 35 aa, Artificial Sequence; identical to SEQ ID NO: 5591
  Cyclic GFR-binding peptide
  MOD_RES (32), (34): Xaa is C or S

SEQ ID NO: 43902 - protein, 29 aa, Artificial Sequence
  Cyclic GFR-binding peptide
  MOD_RES (3), (4): Xaa is C or S
KAXXVPTELSATSMLYYDEYDKVVLRKHR

SEQ ID NO: 43903 - protein, 24 aa, Artificial Sequence
  Cyclic GFR-binding peptide
QDLNAISILYFIGKTPKILKKYRM

SEQ ID NO: 43904 - protein, 29 aa, Artificial Sequence
  Cyclic GFR-binding peptide
  MOD_RES (29), (29): Xaa is C or S
QDLNAISILYFVGRTPKVLKKYRMVVKSX

SEQ ID NO: 43905 - protein, 31 aa, Artificial Sequence
  Cyclic GFR-binding peptide
  MOD_RES (30), (30): Xaa is C or S
TELSPISMLYKDEYDKVVLKYHYEMVVEGXG

SEQ ID NO: 43906 - protein, 30 aa, Artificial Sequence
  Cyclic GFR-binding peptide
  MOD_RES (30), (30): Xaa is C or S
PQALNAISILYFVGRKPKVLKKYRMIVRSX

SEQ ID NO: 43907 - protein, 25 aa, Artificial Sequence
  Cyclic GFR-binding peptide
VSQDLSAISILYLIGKTPKILKNYQ

SEQ ID NO: 43908 - protein, 38 aa, Artificial Sequence; identical to SEQ ID NO: 5596
  Cyclic GFR-binding peptide
  MOD_RES (7), (7): Xaa is C or S

SEQ ID NO: 43909 - protein, 33 aa, Artificial Sequence; identical to SEQ ID NO: 5597
  Cyclic GFR-binding peptide
  MOD_RES (32), (32): Xaa is C or S

SEQ ID NO: 43910 - protein, 28 aa, Artificial Sequence
  Cyclic GFR-binding peptide
PQALNAISILYFVGRKPKVLKKYRMIVR

SEQ ID NO: 43911 - protein, 26 aa, Artificial Sequence
  Cyclic GFR-binding peptide
LSAISILYLIGKTPKILKNYQMIVKS

SEQ ID NO: 43912 - protein, 25 aa, Artificial Sequence
  Cyclic GFR-binding peptide
LNAISMLYFDENEKVVLKKYRDMVV

SEQ ID NO: 43913 - protein, 33 aa, Artificial Sequence
  Cyclic GFR-binding peptide
  MOD_RES (30), (32): Xaa is C or S
TQLSAISVLYLDDSSNVILKNYQNMVVRAXGXH

SEQ ID NO: 43914 - protein, 36 aa, Artificial Sequence; identical to SEQ ID NO: 5600
  Cyclic GFR-binding peptide
  MOD_RES (3), (4), (36): Xaa is C or S

SEQ ID NO: 43915 - protein, 25 aa, Artificial Sequence
  Cyclic GFR-binding peptide
KLSATSVLYYDDSSNVILRKHRNMV

SEQ ID NO: 43916 - protein, 32 aa, Artificial Sequence; identical to SEQ ID NO: 5601
  Cyclic GFR-binding peptide
  MOD_RES (1), (32): Xaa is C or S

SEQ ID NO: 43917 - protein, 27 aa, Artificial Sequence
  Cyclic GFR-binding peptide
  MOD_RES (1), (1): Xaa is C or S
XAPTKLNAISVLYFDSSNNVILKKYRN

SEQ ID NO: 43918 - protein, 38 aa, Artificial Sequence; identical to SEQ ID NO: 5603
  Cyclic GFR-binding peptide
  MOD_RES (4), (5), (36), (38): Xaa is C or S

SEQ ID NO: 43919 - protein, 24 aa, Artificial Sequence
  Cyclic GFR-binding peptide
QLSATSVLYYEIVRKKPIFLRKHR

SEQ ID NO: 43920 - protein, 27 aa, Artificial Sequence
  Cyclic GFR-binding peptide
SAISVLYLDSSNNVILKNYQDSSNNVI

SEQ ID NO: 43921 - protein, 38 aa, Artificial Sequence; identical to SEQ ID NO: 5606
  Cyclic GFR-binding peptide
  MOD_RES (6), (7): Xaa is C or S

SEQ ID NO: 43922 - protein, 22 aa, Artificial Sequence
  Cyclic GFR-binding peptide
LNAISILYFVGRKPKVLKKYRM

SEQ ID NO: 43923 - protein, 35 aa, Artificial Sequence; identical to SEQ ID NO: 5607
  Cyclic GFR-binding peptide
  MOD_RES (4), (5): Xaa is C or S

SEQ ID NO: 43924 - protein, 34 aa, Artificial Sequence
  Cyclic GFR-binding peptide
  MOD_RES (32), (34): Xaa is C or S
PTKLNAISVLYFDDMGVPTLKKYREGMSVAEXGX

SEQ ID NO: 43925 - protein, 29 aa, Artificial Sequence
  Cyclic GFR-binding peptide
  MOD_RES (1), (2): Xaa is C or S
XXAPTKLNAISVLYFDSSNNVILKKYRNM

SEQ ID NO: 43926 - protein, 32 aa, Artificial Sequence
  Cyclic GFR-binding peptide
  MOD_RES (2), (3): Xaa is C or S
PXXAPTQLSATSVLYYDDSSNVILRKHRNMVV

SEQ ID NO: 43927 - protein, 27 aa, Artificial Sequence
  Cyclic GFR-binding peptide
  MOD_RES (1), (2): Xaa is C or S
XXVPTKLSATSVLYYDDMGVPTLRKHR

SEQ ID NO: 43928 - protein, 35 aa, Artificial Sequence
  Cyclic GFR-binding peptide
  MOD_RES (5), (6): Xaa is C or S
VPKAXXAPTKLNAISVLYFDSSNNVILKKYRNMVV

SEQ ID NO: 43929 - protein, 39 aa, Artificial Sequence; identical to SEQ ID NO: 5614
  Cyclic GFR-binding peptide
  MOD_RES (4), (5), (37), (39): Xaa is C or S

SEQ ID NO: 43930 - protein, 35 aa, Artificial Sequence; identical to SEQ ID NO: 5615
  Cyclic GFR-binding peptide
  MOD_RES (3), (4), (35): Xaa is C or S

SEQ ID NO: 43931 - protein, 23 aa, Artificial Sequence
  Cyclic GFR-binding peptide
QDLSATSILYYVGRTPKVLRKHR

SEQ ID NO: 43932 - protein, 32 aa, Artificial Sequence; identical to SEQ ID NO: 5616
  Cyclic GFR-binding peptide
  MOD_RES (1), (2): Xaa is C or S

SEQ ID NO: 43933 - protein, 31 aa, Artificial Sequence
  Cyclic GFR-binding peptide
  MOD_RES (3), (4): Xaa is C or S
KPXXAPTQLSPISVLYKDDSSNVILKYHYNM

SEQ ID NO: 43934 - protein, 34 aa, Artificial Sequence; identical to SEQ ID NO: 5620
  Cyclic GFR-binding peptide
  MOD_RES (2), (3): Xaa is C or S

SEQ ID NO: 43935 - protein, 28 aa, Artificial Sequence
  Cyclic GFR-binding peptide
  MOD_RES (1), (2): Xaa is C or S
XXVPQDLSATSILYYVGRTPKVLRKHRM

SEQ ID NO: 43936 - protein, 33 aa, Artificial Sequence
  Cyclic GFR-binding peptide
  MOD_RES (30), (32): Xaa is C or S
PQDLSATSILYYVGRTPKVLRKHRMVVKSXKXS

SEQ ID NO: 43937 - protein, 30 aa, Artificial Sequence; identical to SEQ ID NO: 5622
  Cyclic GFR-binding peptide

SEQ ID NO: 43938 - protein, 37 aa, Artificial Sequence; identical to SEQ ID NO: 5624
  Cyclic GFR-binding peptide
  MOD_RES (6), (7): Xaa is C or S

SEQ ID NO: 43939 - protein, 32 aa, Artificial Sequence; identical to SEQ ID NO: 5625
  Cyclic GFR-binding peptide
  MOD_RES (1), (1): Xaa is C or S

SEQ ID NO: 43940 - protein, 35 aa, Artificial Sequence; identical to SEQ ID NO: 5626
  Cyclic GFR-binding peptide
  MOD_RES (2), (3), (35): Xaa is C or S

SEQ ID NO: 43941 - protein, 32 aa, Artificial Sequence
  Cyclic GFR-binding peptide
  MOD_RES (2), (3): Xaa is C or S
PXXVSQDLSATSILYYIGKTPKILRKHRMIVK

SEQ ID NO: 43942 - protein, 29 aa, Artificial Sequence
  Cyclic GFR-binding peptide
PQALNAISILYFVGRKPKVLKKYRMIVRS

SEQ ID NO: 43943 - protein, 35 aa, Artificial Sequence; identical to SEQ ID NO: 5627
  Cyclic GFR-binding peptide
  MOD_RES (1), (34): Xaa is C or S

SEQ ID NO: 43944 - protein, 36 aa, Artificial Sequence; identical to SEQ ID NO: 5628
  Cyclic GFR-binding peptide
  MOD_RES (2), (2): Xaa is C or S

SEQ ID NO: 43945 - protein, 29 aa, Artificial Sequence
  Cyclic GFR-binding peptide
QLSPISVLYKEIVRKKPIFLKYHYTLEDH

SEQ ID NO: 43946 - protein, 38 aa, Artificial Sequence; identical to SEQ ID NO: 5629
  Cyclic GFR-binding peptide
  MOD_RES (7), (7): Xaa is C or S

SEQ ID NO: 43947 - protein, 35 aa, Artificial Sequence
  Cyclic GFR-binding peptide
  MOD_RES (5), (6): Xaa is C or S
SAAPXXVPQALSATSILYYVGRKPKVLRKHRMIVR

SEQ ID NO: 43948 - protein, 36 aa, Artificial Sequence
  Cyclic GFR-binding peptide
  MOD_RES (34), (36): Xaa is C or S
QVQLSAISVLYLEIVRKKPIFLKNYQTLEDHLAXKX

SEQ ID NO: 43949 - protein, 30 aa, Artificial Sequence
  Cyclic GFR-binding peptide
  MOD_RES (3), (4): Xaa is C or S
KAXXVPTKLNAISVLYFDDMGVPTLKKYRE

SEQ ID NO: 43950 - protein, 30 aa, Artificial Sequence
  Cyclic GFR-binding peptide
  MOD_RES (29), (29): Xaa is C or S
QDLNAISILYFVGRTPKVLKKYRMVVKSXK

SEQ ID NO: 43951 - protein, 35 aa, Artificial Sequence
  Cyclic GFR-binding peptide
  MOD_RES (6), (7): Xaa is C or S
AVPKAXXAPTKLSPISVLYKDSSNNVILKYHYNMV

SEQ ID NO: 43952 - protein, 32 aa, Artificial Sequence; identical to SEQ ID NO: 5630
  Cyclic GFR-binding peptide
  MOD_RES (32), (32): Xaa is C or S

SEQ ID NO: 43953 - protein, 40 aa, Artificial Sequence; identical to SEQ ID NO: 5631
  Cyclic GFR-binding peptide
  MOD_RES (5), (6), (39): Xaa is C or S

SEQ ID NO: 43954 - protein, 34 aa, Artificial Sequence
  Cyclic GFR-binding peptide
  MOD_RES (4), (5): Xaa is C or S
PKAXXVPTELSATSMLYYDENEKVVLRKHRDMVV

SEQ ID NO: 43955 - protein, 33 aa, Artificial Sequence
  Cyclic GFR-binding peptide
  MOD_RES (3), (4): Xaa is C or S
KAXXVPTELNAISMLYFDENEKVVLKKYRDMVV

SEQ ID NO: 43956 - protein, 38 aa, Artificial Sequence; identical to SEQ ID NO: 5637
  Cyclic GFR-binding peptide
  MOD_RES (4), (5), (37): Xaa is C or S

SEQ ID NO: 43957 - protein, 25 aa, Artificial Sequence
  Cyclic GFR-binding peptide
PTKLNAISVLYFDSSNNVILKKYRN

SEQ ID NO: 43958 - protein, 22 aa, Artificial Sequence
  Cyclic GFR-binding peptide
LSAISILYLIGKTPKILKNYQM

SEQ ID NO: 43959 - protein, 33 aa, Artificial Sequence
  Cyclic GFR-binding peptide
  MOD_RES (4), (5): Xaa is C or S
PKAXXAPTKLNAISVLYFDSSNNVILKKYRNMV

SEQ ID NO: 43960 - protein, 35 aa, Artificial Sequence; identical to SEQ ID NO: 5643
  Cyclic GFR-binding peptide
  MOD_RES (1), (32), (34): Xaa is C or S

SEQ ID NO: 43961 - protein, 26 aa, Artificial Sequence
  Cyclic GFR-binding peptide
  MOD_RES (1), (1): Xaa is C or S
XVPTELNAISMLYFDEYDKVVLKKYR

SEQ ID NO: 43962 - protein, 26 aa, Artificial Sequence
  Cyclic GFR-binding peptide
TQLSATSVLYYDDSSNVILRKHRNMV

SEQ ID NO: 43963 - protein, 31 aa, Artificial Sequence
  Cyclic GFR-binding peptide
  MOD_RES (3), (4): Xaa is C or S
KPXXAPTQLSATSVLYYDDSSNVILRKHRNM

SEQ ID NO: 43964 - protein, 40 aa, Artificial Sequence; identical to SEQ ID NO: 5644
  Cyclic GFR-binding peptide
  MOD_RES (4), (5), (38), (40): Xaa is C or S

SEQ ID NO: 43965 - protein, 32 aa, Artificial Sequence
  Cyclic GFR-binding peptide
  MOD_RES (4), (5): Xaa is C or S
ASPXXVSQDLSAISILYLIGKTPKILKNYQMI

SEQ ID NO: 43966 - protein, 20 aa, Artificial Sequence
  Cyclic GFR-binding peptide
SATSILYYVGRTPKVLRKHR

SEQ ID NO: 43967 - protein, 34 aa, Artificial Sequence
  Cyclic GFR-binding peptide
  MOD_RES (34), (34): Xaa is C or S
QVQLNAISVLYFEIVRKKPIFLKKYRTLEDHLAX

SEQ ID NO: 43968 - protein, 28 aa, Artificial Sequence
  Cyclic GFR-binding peptide
  MOD_RES (27), (27): Xaa is C or S
SAISVLYLDDSSNVILKNYQNMVVRSXG

SEQ ID NO: 43969 - protein, 37 aa, Artificial Sequence; identical to SEQ ID NO: 5647
  Cyclic GFR-binding peptide
  MOD_RES (2), (3), (35), (37): Xaa is C or S

SEQ ID NO: 43970 - protein, 25 aa, Artificial Sequence
  Cyclic GFR-binding peptide
QDLNAISILYFIGKTPKILKKYRMI

SEQ ID NO: 43971 - protein, 30 aa, Artificial Sequence
  Cyclic GFR-binding peptide
  MOD_RES (30), (30): Xaa is C or S
SAISVLYLEIVRKKPIFLKNYQTLEDHLAX

SEQ ID NO: 43972 - protein, 27 aa, Artificial Sequence
  Cyclic GFR-binding peptide
SAISVLYLDDSSNVILKNYQDDSSNVI

SEQ ID NO: 43973 - protein, 31 aa, Artificial Sequence
  Cyclic GFR-binding peptide
  MOD_RES (29), (31): Xaa is C or S
KLSATSVLYYDDSSNVILRKHRNMVVRSXGX

SEQ ID NO: 43974 - protein, 38 aa, Artificial Sequence; identical to SEQ ID NO: 5648
  Cyclic GFR-binding peptide
  MOD_RES (1), (38): Xaa is C or S

SEQ ID NO: 43975 - protein, 37 aa, Artificial Sequence; identical to SEQ ID NO: 5649
  Cyclic GFR-binding peptide
  MOD_RES (4), (5), (37): Xaa is C or S

SEQ ID NO: 43976 - protein, 26 aa, Artificial Sequence
  Cyclic GFR-binding peptide
  MOD_RES (1), (1): Xaa is C or S
XVPTELSPISMLYKDENEKVVLKYHY

SEQ ID NO: 43977 - protein, 30 aa, Artificial Sequence; identical to SEQ ID NO: 5651
  Cyclic GFR-binding peptide

SEQ ID NO: 43978 - protein, 33 aa, Artificial Sequence
  Cyclic GFR-binding peptide
  MOD_RES (30), (32): Xaa is C or S
PQALNAISILYFVGRKPKVLKKYRMIVRSXKXS

SEQ ID NO: 43979 - protein, 26 aa, Artificial Sequence
  Cyclic GFR-binding peptide
LSAISILYLVGRKPKVLKNYQMIVRS

SEQ ID NO: 43980 - protein, 35 aa, Artificial Sequence
  Cyclic GFR-binding peptide
  MOD_RES (6), (7): Xaa is C or S
YVPKPXXAPTKLSAISVLYLDDSSNVILKNYQNMV

SEQ ID NO: 43981 - protein, 30 aa, Artificial Sequence
  Cyclic GFR-binding peptide
  MOD_RES (29), (29): Xaa is C or S
LSATSVLYYDDMGVPTLRKHREGMSVAEXG

SEQ ID NO: 43982 - protein, 34 aa, Artificial Sequence; identical to SEQ ID NO: 5653
  Cyclic GFR-binding peptide
  MOD_RES (3), (4): Xaa is C or S

SEQ ID NO: 43983 - protein, 28 aa, Artificial Sequence
  Cyclic GFR-binding peptide
PTELSPISMLYKDENEKVVLKYHYDMVV

SEQ ID NO: 43984 - protein, 32 aa, Artificial Sequence
  Cyclic GFR-binding peptide
  MOD_RES (29), (31): Xaa is C or S
ELNAISMLYFDEYDKVVLKKYREMVVEGXGXR

SEQ ID NO: 43985 - protein, 33 aa, Artificial Sequence; identical to SEQ ID NO: 5658
  Cyclic GFR-binding peptide
  MOD_RES (1), (32): Xaa is C or S

SEQ ID NO: 43986 - protein, 27 aa, Artificial Sequence
  Cyclic GFR-binding peptide
QLSATSVLYYDDSSNVILRKHRNMVVR

SEQ ID NO: 43987 - protein, 36 aa, Artificial Sequence; identical to SEQ ID NO: 5660
  Cyclic GFR-binding peptide
  MOD_RES (1), (1): Xaa is C or S

SEQ ID NO: 43988 - protein, 30 aa, Artificial Sequence
  Cyclic GFR-binding peptide
  MOD_RES (1), (2): Xaa is C or S
XXVPTELNAISMLYFDENEKVVLKKYRDMV

SEQ ID NO: 43989 - protein, 27 aa, Artificial Sequence
  Cyclic GFR-binding peptide
LNAISMLYFDEYDKVVLKKYREMVVEG

SEQ ID NO: 43990 - protein, 29 aa, Artificial Sequence
  Cyclic GFR-binding peptide
NAISILYFIGKTPKILKKYRAAAAAAAAA

SEQ ID NO: 43991 - protein, 21 aa, Artificial Sequence
  Cyclic GFR-binding peptide
SATSMLYYDENEKVVLRKHRD

SEQ ID NO: 43992 - protein, 31 aa, Artificial Sequence
  Cyclic GFR-binding peptide
  MOD_RES (2), (3): Xaa is C or S
PXXVSQDLSAISILYLIGKTPKILKNYQMIV

SEQ ID NO: 43993 - protein, 27 aa, Artificial Sequence
  Cyclic GFR-binding peptide
  MOD_RES (26), (26): Xaa is C or S
NAISILYFIGKTPKILKKYRMIVKSXK

SEQ ID NO: 43994 - protein, 21 aa, Artificial Sequence
  Cyclic GFR-binding peptide
SAISILYLVGRKPKVLKNYQM

SEQ ID NO: 43995 - protein, 28 aa, Artificial Sequence
  Cyclic GFR-binding peptide
PTQVQLNAISVLYFEIVRKKPIFLKKYR

SEQ ID NO: 43996 - protein, 31 aa, Artificial Sequence
  Cyclic GFR-binding peptide
  MOD_RES (28), (30): Xaa is C or S
DLSATSILYYVGRTPKVLRKHRMVVKSXKXS

SEQ ID NO: 43997 - protein, 34 aa, Artificial Sequence; identical to SEQ ID NO: 5666
  Cyclic GFR-binding peptide
  MOD_RES (1), (2), (34): Xaa is C or S

SEQ ID NO: 43998 - protein, 29 aa, Artificial Sequence
  Cyclic GFR-binding peptide
PTKLSATSVLYYDDMGVPTLRKHREGMSV

SEQ ID NO: 43999 - protein, 42 aa, Artificial Sequence; identical to SEQ ID NO: 5669
  Cyclic GFR-binding peptide
  MOD_RES (3), (40), (42): Xaa is C or S

SEQ ID NO: 44000 - protein, 30 aa, Artificial Sequence
  Cyclic GFR-binding peptide
  MOD_RES (1), (2): Xaa is C or S
XXVPQALSAISILYLVGRKPKVLKNYQMIV

SEQ ID NO: 44001 - protein, 33 aa, Artificial Sequence; identical to SEQ ID NO: 5670
  Cyclic GFR-binding peptide

SEQ ID NO: 44002 - protein, 30 aa, Artificial Sequence
  Cyclic GFR-binding peptide
  MOD_RES (1), (1): Xaa is C or S
XVPTKLNAISVLYFDDMGVPTLKKYREGMS

SEQ ID NO: 44003 - protein, 31 aa, Artificial Sequence
  Cyclic GFR-binding peptide
PTKLNAISVLYFDDMGVPTLKKYREGMSVAE

SEQ ID NO: 44004 - protein, 33 aa, Artificial Sequence; identical to SEQ ID NO: 5672
  Cyclic GFR-binding peptide
  MOD_RES (32), (32): Xaa is C or S

SEQ ID NO: 44005 - protein, 26 aa, Artificial Sequence
  Cyclic GFR-binding peptide
KLSPISVLYKDSSNNVILKYHYNMVV

SEQ ID NO: 44006 - protein, 37 aa, Artificial Sequence; identical to SEQ ID NO: 5673
  Cyclic GFR-binding peptide
  MOD_RES (5), (6): Xaa is C or S

SEQ ID NO: 44007 - protein, 34 aa, Artificial Sequence
  Cyclic GFR-binding peptide
  MOD_RES (6), (7): Xaa is C or S
ASASPXXVPQDLSAISILYLVGRTPKVLKNYQMV

SEQ ID NO: 44008 - protein, 34 aa, Artificial Sequence
  Cyclic GFR-binding peptide
  MOD_RES (5), (5): Xaa is C or S
TKPTXAPTKLSAISVLYLDDSSNVILKNYQNMVV

SEQ ID NO: 44009 - protein, 34 aa, Artificial Sequence; identical to SEQ ID NO: 5676
  Cyclic GFR-binding peptide

SEQ ID NO: 44010 - protein, 29 aa, Artificial Sequence
  Cyclic GFR-binding peptide
  MOD_RES (28), (28): Xaa is C or S
LSAISVLYLDDSSNVILKNYQNMVVRSXG

SEQ ID NO: 44011 - protein, 38 aa, Artificial Sequence; identical to SEQ ID NO: 5677
  Cyclic GFR-binding peptide
  MOD_RES (5), (6), (38): Xaa is C or S

SEQ ID NO: 44012 - protein, 31 aa, Artificial Sequence
  Cyclic GFR-binding peptide
  MOD_RES (4), (5): Xaa is C or S
ASPXXVPQDLNAISILYFVGRTPKVLKKYRM

SEQ ID NO: 44013 - protein, 31 aa, Artificial Sequence
  Cyclic GFR-binding peptide
  MOD_RES (3), (4): Xaa is C or S
KAXXVPTKLSAISVLYLDDMGVPTLKNYQEG

SEQ ID NO: 44014 - protein, 39 aa, Artificial Sequence; identical to SEQ ID NO: 5679
  Cyclic GFR-binding peptide
  MOD_RES (5), (6), (38): Xaa is C or S

SEQ ID NO: 44015 - protein, 37 aa, Artificial Sequence; identical to SEQ ID NO: 5680
  Cyclic GFR-binding peptide
  MOD_RES (1), (34), (36): Xaa is C or S

SEQ ID NO: 44016 - protein, 28 aa, Artificial Sequence
  Cyclic GFR-binding peptide
  MOD_RES (2), (3): Xaa is C or S
PXXVPQALSPISILYKVGRKPKVLKYHY

SEQ ID NO: 44017 - protein, 36 aa, Artificial Sequence
  Cyclic GFR-binding peptide
  MOD_RES (6), (7): Xaa is C or S
SIPKAXXVPTELSATSMLYYDEYDKVVLRKHREMVV

SEQ ID NO: 44018 - protein, 26 aa, Artificial Sequence
  Cyclic GFR-binding peptide
DLSPISILYKVGRTPKVLKYHYMVVK

SEQ ID NO: 44019 - protein, 30 aa, Artificial Sequence
  Cyclic GFR-binding peptide
  MOD_RES (2), (3): Xaa is C or S
AXXVPTKLNAISVLYFDDMGVPTLKKYREG

SEQ ID NO: 44020 - protein, 37 aa, Artificial Sequence; identical to SEQ ID NO: 5685
  Cyclic GFR-binding peptide
  MOD_RES (6), (7): Xaa is C or S

SEQ ID NO: 44021 - protein, 36 aa, Artificial Sequence; identical to SEQ ID NO: 5686
  Cyclic GFR-binding peptide
  MOD_RES (2), (3), (34), (36): Xaa is C or S

SEQ ID NO: 44022 - protein, 23 aa, Artificial Sequence
  Cyclic GFR-binding peptide
TKLSAISVLYLDDMGVPTLKNYQ

SEQ ID NO: 44023 - protein, 28 aa, Artificial Sequence
  Cyclic GFR-binding peptide
QALNAISILYFVGRKPKVLKKYRMIVRS

SEQ ID NO: 44024 - protein, 27 aa, Artificial Sequence
  Cyclic GFR-binding peptide
  MOD_RES (27), (27): Xaa is C or S
NAISVLYFDSSNNVILKKYRNMVVKAX

SEQ ID NO: 44025 - protein, 30 aa, Artificial Sequence
  Cyclic GFR-binding peptide
  MOD_RES (29), (29): Xaa is C or S
QLSPISVLYKDDSSNVILKYHYNMVVRAXG

SEQ ID NO: 44026 - protein, 28 aa, Artificial Sequence
  Cyclic GFR-binding peptide
PTKLSPISVLYKDDSSNVILKYHYNMVV

SEQ ID NO: 44027 - protein, 26 aa, Artificial Sequence
  Cyclic GFR-binding peptide
LSAISVLYLDDMGVPTLKNYQEGMSV

SEQ ID NO: 44028 - protein, 35 aa, Artificial Sequence; identical to SEQ ID NO: 5689
  Cyclic GFR-binding peptide
  MOD_RES (3), (4), (35): Xaa is C or S

SEQ ID NO: 44029 - protein, 40 aa, Artificial Sequence; identical to SEQ ID NO: 5690
  Cyclic GFR-binding peptide
  MOD_RES (5), (5): Xaa is C or S

SEQ ID NO: 44030 - protein, 35 aa, Artificial Sequence; identical to SEQ ID NO: 5691
  Cyclic GFR-binding peptide
  MOD_RES (1), (33), (35): Xaa is C or S

SEQ ID NO: 44031 - protein, 31 aa, Artificial Sequence
  Cyclic GFR-binding peptide
  MOD_RES (5), (6): Xaa is C or S
IPKAXXVPTELSATSMLYYDEYDKVVLRKHR

SEQ ID NO: 44032 - protein, 31 aa, Artificial Sequence
  Cyclic GFR-binding peptide
PTKLSAISVLYLDDMGVPTLKNYQEGMSVAE

SEQ ID NO: 44033 - protein, 23 aa, Artificial Sequence
  Cyclic GFR-binding peptide
ELSPISMLYKDEYDKVVLKYHYE

SEQ ID NO: 44034 - protein, 32 aa, Artificial Sequence
  Cyclic GFR-binding peptide
  MOD_RES (31), (31): Xaa is C or S
PTELNAISMLYFDEYDKVVLKKYREMVVEGXG

SEQ ID NO: 44035 - protein, 38 aa, Artificial Sequence; identical to SEQ ID NO: 5694
  Cyclic GFR-binding peptide
  MOD_RES (2), (2): Xaa is C or S

SEQ ID NO: 44036 - protein, 27 aa, Artificial Sequence
  Cyclic GFR-binding peptide
PTKLSPISVLYKDSSNNVILKYHYNMV

SEQ ID NO: 44037 - protein, 34 aa, Artificial Sequence; identical to SEQ ID NO: 5697
  Cyclic GFR-binding peptide
  MOD_RES (2), (3), (34): Xaa is C or S

SEQ ID NO: 44038 - protein, 25 aa, Artificial Sequence
  Cyclic GFR-binding peptide
KLSAISVLYLDDSSNVILKNYQNMV

SEQ ID NO: 44039 - protein, 30 aa, Artificial Sequence; identical to SEQ ID NO: 825
  Cyclic GFR-binding peptide

SEQ ID NO: 44040 - protein, 41 aa, Artificial Sequence; identical to SEQ ID NO: 5698
  Cyclic GFR-binding peptide
  MOD_RES (6), (7), (39), (41): Xaa is C or S

SEQ ID NO: 44041 - protein, 38 aa, Artificial Sequence; identical to SEQ ID NO: 5699
  Cyclic GFR-binding peptide
  MOD_RES (2), (3), (35), (37): Xaa is C or S

SEQ ID NO: 44042 - protein, 22 aa, Artificial Sequence
  Cyclic GFR-binding peptide
LSATSILYYVGRKPKVLRKHRM

SEQ ID NO: 44043 - protein, 25 aa, Artificial Sequence
  Cyclic GFR-binding peptide
TQLSATSVLYYDDSSNVILRKHRNM

SEQ ID NO: 44044 - protein, 25 aa, Artificial Sequence
  Cyclic GFR-binding peptide
LSPISILYKVGRKPKVLKYHYMIVR

SEQ ID NO: 44045 - protein, 27 aa, Artificial Sequence
  Cyclic GFR-binding peptide
TKLSAISVLYLDSSNNVILKNYQNMVV

SEQ ID NO: 44046 - protein, 36 aa, Artificial Sequence; identical to SEQ ID NO: 5701
  Cyclic GFR-binding peptide
  MOD_RES (2), (3), (35): Xaa is C or S

SEQ ID NO: 44047 - protein, 23 aa, Artificial Sequence
  Cyclic GFR-binding peptide
LNAISMLYFDENEKVVLKKYRDM

SEQ ID NO: 44048 - protein, 40 aa, Artificial Sequence; identical to SEQ ID NO: 5702
  Cyclic GFR-binding peptide
  MOD_RES (4), (5), (37), (39): Xaa is C or S

SEQ ID NO: 44049 - protein, 32 aa, Artificial Sequence
  Cyclic GFR-binding peptide
  MOD_RES (2), (3): Xaa is C or S
AXXAPTKLSAISVLYLDSSNNVILKNYQNMVV

SEQ ID NO: 44050 - protein, 28 aa, Artificial Sequence
  Cyclic GFR-binding peptide
LSATSVLYYDDMGVPTLRKHREGMSVAE

SEQ ID NO: 44051 - protein, 29 aa, Artificial Sequence
  Cyclic GFR-binding peptide
VPQDLNAISILYFVGRTPKVLKKYRMVVK

SEQ ID NO: 44052 - protein, 25 aa, Artificial Sequence
  Cyclic GFR-binding peptide
SPISILYKIGKTPKILKYHYMIVKS

SEQ ID NO: 44053 - protein, 29 aa, Artificial Sequence
  Cyclic GFR-binding peptide
  MOD_RES (28), (28): Xaa is C or S
ALSAISILYLVGRKPKVLKNYQMIVRSXK

SEQ ID NO: 44054 - protein, 31 aa, Artificial Sequence
  Cyclic GFR-binding peptide
SATSVLYYEIVRKKPIFLRKHRAAAAAAAAA

SEQ ID NO: 44055 - protein, 32 aa, Artificial Sequence; identical to SEQ ID NO: 5705
  Cyclic GFR-binding peptide
  MOD_RES (2), (2): Xaa is C or S

SEQ ID NO: 44056 - protein, 34 aa, Artificial Sequence; identical to SEQ ID NO: 5706
  Cyclic GFR-binding peptide
  MOD_RES (3), (4): Xaa is C or S

SEQ ID NO: 44057 - protein, 38 aa, Artificial Sequence; identical to SEQ ID NO: 5707
  Cyclic GFR-binding peptide
  MOD_RES (2), (3), (35), (37): Xaa is C or S

SEQ ID NO: 44058 - protein, 32 aa, Artificial Sequence
  Cyclic GFR-binding peptide
PTQVQLSPISVLYKEIVRKKPIFLKYHYTLED

SEQ ID NO: 44059 - protein, 41 aa, Artificial Sequence; identical to SEQ ID NO: 5709
  Cyclic GFR-binding peptide
  MOD_RES (5), (5): Xaa is C or S

SEQ ID NO: 44060 - protein, 36 aa, Artificial Sequence; identical to SEQ ID NO: 5711
  Cyclic GFR-binding peptide
  MOD_RES (2), (2): Xaa is C or S

SEQ ID NO: 44061 - protein, 39 aa, Artificial Sequence; identical to SEQ ID NO: 5710
  Cyclic GFR-binding peptide
  MOD_RES (4), (5), (37), (39): Xaa is C or S

SEQ ID NO: 44062 - protein, 29 aa, Artificial Sequence
  Cyclic GFR-binding peptide
  MOD_RES (27), (29): Xaa is C or S
SAISVLYLDDSSNVILKNYQNMVVRSXGX

SEQ ID NO: 44063 - protein, 32 aa, Artificial Sequence
  Cyclic GFR-binding peptide
  MOD_RES (1), (2): Xaa is C or S
XXVPTKLNAISVLYFDDMGVPTLKKYREGMSV

SEQ ID NO: 44064 - protein, 38 aa, Artificial Sequence; identical to SEQ ID NO: 5712
  Cyclic GFR-binding peptide
  MOD_RES (5), (6), (38): Xaa is C or S

SEQ ID NO: 44065 - protein, 32 aa, Artificial Sequence
  Cyclic GFR-binding peptide
  MOD_RES (3), (4): Xaa is C or S
KAXXAPTKLSPISVLYKDSSNNVILKYHYNMV

SEQ ID NO: 44066 - protein, 36 aa, Artificial Sequence; identical to SEQ ID NO: 5713
  Cyclic GFR-binding peptide
  MOD_RES (4), (5), (36): Xaa is C or S

SEQ ID NO: 44067 - protein, 26 aa, Artificial Sequence
  Cyclic GFR-binding peptide
PTELNAISMLYFDENEKVVLKKYRDM

SEQ ID NO: 44068 - protein, 37 aa, Artificial Sequence; identical to SEQ ID NO: 5714
  Cyclic GFR-binding peptide
  MOD_RES (3), (4), (35), (37): Xaa is C or S

SEQ ID NO: 44069 - protein, 40 aa, Artificial Sequence; identical to SEQ ID NO: 5715
  Cyclic GFR-binding peptide
  MOD_RES (4), (5), (37), (39): Xaa is C or S

SEQ ID NO: 44070 - protein, 29 aa, Artificial Sequence
  Cyclic GFR-binding peptide
TQLSATSVLYYDDSSNVILRKHRNMVVRA

SEQ ID NO: 44071 - protein, 41 aa, Artificial Sequence; identical to SEQ ID NO: 5717
  Cyclic GFR-binding peptide
  MOD_RES (4), (41): Xaa is C or S

SEQ ID NO: 44072 - protein, 35 aa, Artificial Sequence
  Cyclic GFR-binding peptide
  MOD_RES (6), (7): Xaa is C or S
KIPKAXXVPTELNAISMLYFDENEKVVLKKYRDMV

SEQ ID NO: 44073 - protein, 29 aa, Artificial Sequence
  Cyclic GFR-binding peptide
TQLSAISVLYLDDSSNVILKNYQNMVVRA

SEQ ID NO: 44074 - protein, 34 aa, Artificial Sequence
  Cyclic GFR-binding peptide
  MOD_RES (5), (6): Xaa is C or S
SASPXXVPQDLSATSILYYVGRTPKVLRKHRMVV

SEQ ID NO: 44075 - protein, 24 aa, Artificial Sequence
  Cyclic GFR-binding peptide
SAISVLYLDDMGVPTLKNYQEGMS

SEQ ID NO: 44076 - protein, 28 aa, Artificial Sequence
  Cyclic GFR-binding peptide
  MOD_RES (2), (3): Xaa is C or S
PXXAPTKLSPISVLYKDDSSNVILKYHY

SEQ ID NO: 44077 - protein, 33 aa, Artificial Sequence
  Cyclic GFR-binding peptide
  MOD_RES (4), (5): Xaa is C or S
PKPXXAPTQLSPISVLYKDDSSNVILKYHYNMV

SEQ ID NO: 44078 - protein, 36 aa, Artificial Sequence; identical to SEQ ID NO: 5721
  Cyclic GFR-binding peptide
  MOD_RES (3), (4), (36): Xaa is C or S

SEQ ID NO: 44079 - protein, 32 aa, Artificial Sequence; identical to SEQ ID NO: 5722
  Cyclic GFR-binding peptide
  MOD_RES (1), (1): Xaa is C or S

SEQ ID NO: 44080 - protein, 37 aa, Artificial Sequence; identical to SEQ ID NO: 5723
  Cyclic GFR-binding peptide
  MOD_RES (1), (2), (34), (36): Xaa is C or S

SEQ ID NO: 44081 - protein, 41 aa, Artificial Sequence; identical to SEQ ID NO: 5724
  Cyclic GFR-binding peptide
  MOD_RES (5), (5): Xaa is C or S

SEQ ID NO: 44082 - protein, 25 aa, Artificial Sequence
  Cyclic GFR-binding peptide
DLSAISILYLIGKTPKILKNYQMIV

SEQ ID NO: 44083 - protein, 26 aa, Artificial Sequence
  Cyclic GFR-binding peptide
  MOD_RES (1), (1): Xaa is C or S
XVPTELSATSMLYYDENEKVVLRKHR

SEQ ID NO: 44084 - protein, 27 aa, Artificial Sequence
  Cyclic GFR-binding peptide
  MOD_RES (1), (2): Xaa is C or S
XXVPQDLNAISILYFVGRTPKVLKKYR

SEQ ID NO: 44085 - protein, 35 aa, Artificial Sequence; identical to SEQ ID NO: 5726
  Cyclic GFR-binding peptide
  MOD_RES (2), (3), (35): Xaa is C or S

SEQ ID NO: 44086 - protein, 32 aa, Artificial Sequence
  Cyclic GFR-binding peptide
  MOD_RES (2), (2): Xaa is C or S
QXRPTQVQLSATSVLYYEIVRKKPIFLRKHRT

SEQ ID NO: 44087 - protein, 31 aa, Artificial Sequence
  Cyclic GFR-binding peptide
  MOD_RES (5), (6): Xaa is C or S
IPKAXXVPTELSPISMLYKDEYDKVVLKYHY

SEQ ID NO: 44088 - protein, 25 aa, Artificial Sequence
  Cyclic GFR-binding peptide
SAISILYLVGRKPKVLKNYQMIVRS

SEQ ID NO: 44089 - protein, 34 aa, Artificial Sequence
  Cyclic GFR-binding peptide
  MOD_RES (32), (34): Xaa is C or S
QLNAISVLYFEIVRKKPIFLKKYRTLEDHLAXKX

SEQ ID NO: 44090 - protein, 27 aa, Artificial Sequence
  Cyclic GFR-binding peptide
VPQDLSPISILYKVGRTPKVLKYHYMV

SEQ ID NO: 44091 - protein, 32 aa, Artificial Sequence
  Cyclic GFR-binding peptide
  MOD_RES (3), (3): Xaa is C or S
VQXRPTQVQLSATSVLYYEIVRKKPIFLRKHR

SEQ ID NO: 44092 - protein, 31 aa, Artificial Sequence
  Cyclic GFR-binding peptide
  MOD_RES (28), (30): Xaa is C or S
DLSAISILYLVGRTPKVLKNYQMVVKSXKXS

SEQ ID NO: 44093 - protein, 33 aa, Artificial Sequence; identical to SEQ ID NO: 5732
  Cyclic GFR-binding peptide
  MOD_RES (2), (3): Xaa is C or S

SEQ ID NO: 44094 - protein, 29 aa, Artificial Sequence
  Cyclic GFR-binding peptide
TQVQLNAISVLYFEIVRKKPIFLKKYRTL

SEQ ID NO: 44095 - protein, 34 aa, Artificial Sequence; identical to SEQ ID NO: 5731
  Cyclic GFR-binding peptide
  MOD_RES (1), (32), (34): Xaa is C or S

SEQ ID NO: 44096 - protein, 35 aa, Artificial Sequence
  Cyclic GFR-binding peptide
  MOD_RES (6), (7): Xaa is C or S
AVPKAXXAPTKLSAISVLYLDSSNNVILKNYQNMV

SEQ ID NO: 44097 - protein, 31 aa, Artificial Sequence
  Cyclic GFR-binding peptide
  MOD_RES (2), (2): Xaa is C or S
QXRPTQVQLSPISVLYKEIVRKKPIFLKYHY

SEQ ID NO: 44098 - protein, 36 aa, Artificial Sequence; identical to SEQ ID NO: 5733
  Cyclic GFR-binding peptide
  MOD_RES (3), (4): Xaa is C or S

SEQ ID NO: 44099 - protein, 34 aa, Artificial Sequence
  Cyclic GFR-binding peptide
  MOD_RES (5), (6): Xaa is C or S
IPKAXXVPTELSPISMLYKDEYDKVVLKYHYEMV

SEQ ID NO: 44100 - protein, 29 aa, Artificial Sequence
  Cyclic GFR-binding peptide
VSQDLSAISILYLIGKTPKILKNYQMIVK

SEQ ID NO: 44101 - protein, 30 aa, Artificial Sequence
  Cyclic GFR-binding peptide
  MOD_RES (29), (29): Xaa is C or S
QDLSAISILYLIGKTPKILKNYQMIVKSXK

SEQ ID NO: 44102 - protein, 25 aa, Artificial Sequence
  Cyclic GFR-binding peptide
SAISILYLIGKTPKILKNYQMIVKS

SEQ ID NO: 44103 - protein, 35 aa, Artificial Sequence; identical to SEQ ID NO: 5735
  Cyclic GFR-binding peptide
  MOD_RES (4), (5): Xaa is C or S

SEQ ID NO: 44104 - protein, 37 aa, Artificial Sequence; identical to SEQ ID NO: 5737
  Cyclic GFR-binding peptide
  MOD_RES (36), (36): Xaa is C or S

SEQ ID NO: 44105 - protein, 26 aa, Artificial Sequence
  Cyclic GFR-binding peptide
APTQLSPISVLYKDDSSNVILKYHYN

SEQ ID NO: 44106 - protein, 25 aa, Artificial Sequence
  Cyclic GFR-binding peptide
LSAISVLYLDSSNNVILKNYQNMVV

SEQ ID NO: 44107 - protein, 28 aa, Artificial Sequence
  Cyclic GFR-binding peptide
  MOD_RES (1), (1): Xaa is C or S
XVPTKLNAISVLYFDDMGVPTLKKYREG

SEQ ID NO: 44108 - protein, 35 aa, Artificial Sequence
  Cyclic GFR-binding peptide
  MOD_RES (34), (34): Xaa is C or S
QVQLSPISVLYKEIVRKKPIFLKYHYTLEDHLAXK

SEQ ID NO: 44109 - protein, 29 aa, Artificial Sequence
  Cyclic GFR-binding peptide
PTQVQLSAISVLYLEIVRKKPIFLKNYQT

SEQ ID NO: 44110 - protein, 25 aa, Artificial Sequence
  Cyclic GFR-binding peptide
SAISVLYLDDMGVPTLKNYQEGMSV

SEQ ID NO: 44111 - protein, 41 aa, Artificial Sequence; identical to SEQ ID NO: 5740
  Cyclic GFR-binding peptide
  MOD_RES (2), (39), (41): Xaa is C or S

SEQ ID NO: 44112 - protein, 31 aa, Artificial Sequence; identical to SEQ ID NO: 5741
  Cyclic GFR-binding peptide
  MOD_RES (1), (1): Xaa is C or S

SEQ ID NO: 44113 - protein, 26 aa, Artificial Sequence
  Cyclic GFR-binding peptide
VSQDLSAISILYLIGKTPKILKNYQM

SEQ ID NO: 44114 - protein, 31 aa, Artificial Sequence
  Cyclic GFR-binding peptide
  MOD_RES (4), (5): Xaa is C or S
PKAXXVPTELNAISMLYFDENEKVVLKKYRD

SEQ ID NO: 44115 - protein, 28 aa, Artificial Sequence
  Cyclic GFR-binding peptide
  MOD_RES (1), (2): Xaa is C or S
XXVSQDLSATSILYYIGKTPKILRKHRM

SEQ ID NO: 44116 - protein, 34 aa, Artificial Sequence
  Cyclic GFR-binding peptide
  MOD_RES (3), (4): Xaa is C or S
KAXXVPTKLSAISVLYLDDMGVPTLKNYQEGMSV

SEQ ID NO: 44117 - protein, 33 aa, Artificial Sequence; identical to SEQ ID NO: 5742
  Cyclic GFR-binding peptide
  MOD_RES (2), (2): Xaa is C or S

SEQ ID NO: 44118 - protein, 40 aa, Artificial Sequence; identical to SEQ ID NO: 5745
  Cyclic GFR-binding peptide
  MOD_RES (4), (5), (37), (39): Xaa is C or S

SEQ ID NO: 44119 - protein, 34 aa, Artificial Sequence; identical to SEQ ID NO: 5746
  Cyclic GFR-binding peptide
  MOD_RES (32), (34): Xaa is C or S

SEQ ID NO: 44120 - protein, 24 aa, Artificial Sequence
  Cyclic GFR-binding peptide
DLSAISILYLIGKTPKILKNYQMI

SEQ ID NO: 44121 - protein, 28 aa, Artificial Sequence
  Cyclic GFR-binding peptide
  MOD_RES (1), (1): Xaa is C or S
XVPQALNAISILYFVGRKPKVLKKYRMI

SEQ ID NO: 44122 - protein, 32 aa, Artificial Sequence
  Cyclic GFR-binding peptide
  MOD_RES (3), (4): Xaa is C or S
KPXXAPTKLSATSVLYYDDSSNVILRKHRNMV

SEQ ID NO: 44123 - protein, 33 aa, Artificial Sequence
  Cyclic GFR-binding peptide
  MOD_RES (4), (5): Xaa is C or S
AAPXXVPQALNAISILYFVGRKPKVLKKYRMIV

SEQ ID NO: 44124 - protein, 34 aa, Artificial Sequence
  Cyclic GFR-binding peptide
  MOD_RES (6), (7): Xaa is C or S
ASASPXXVSQDLSAISILYLIGKTPKILKNYQMI

SEQ ID NO: 44125 - protein, 32 aa, Artificial Sequence; identical to SEQ ID NO: 5747
  Cyclic GFR-binding peptide
  MOD_RES (1), (2): Xaa is C or S

SEQ ID NO: 44126 - protein, 30 aa, Artificial Sequence
  Cyclic GFR-binding peptide
  MOD_RES (4), (5): Xaa is C or S
PKAXXVPTELNAISMLYFDENEKVVLKKYR

SEQ ID NO: 44127 - protein, 42 aa, Artificial Sequence; identical to SEQ ID NO: 5750
  Cyclic GFR-binding peptide
  MOD_RES (5), (42): Xaa is C or S

SEQ ID NO: 44128 - protein, 25 aa, Artificial Sequence
  Cyclic GFR-binding peptide
KLSAISVLYLDSSNNVILKNYQNMV

SEQ ID NO: 44129 - protein, 27 aa, Artificial Sequence
  Cyclic GFR-binding peptide
TELSATSMLYYDEYDKVVLRKHREMVV

SEQ ID NO: 44130 - protein, 38 aa, Artificial Sequence; identical to SEQ ID NO: 5752
  Cyclic GFR-binding peptide
  MOD_RES (6), (7), (38): Xaa is C or S

SEQ ID NO: 44131 - protein, 26 aa, Artificial Sequence
  Cyclic GFR-binding peptide
ALSATSILYYVGRKPKVLRKHRMIVR

SEQ ID NO: 44132 - protein, 26 aa, Artificial Sequence
  Cyclic GFR-binding peptide
QLSAISVLYLEIVRKKPIFLKNYQTL

SEQ ID NO: 44133 - protein, 35 aa, Artificial Sequence
  Cyclic GFR-binding peptide
  MOD_RES (5), (5): Xaa is C or S
RNVQXRPTQVQLSATSVLYYEIVRKKPIFLRKHRT

SEQ ID NO: 44134 - protein, 27 aa, Artificial Sequence
  Cyclic GFR-binding peptide
  MOD_RES (1), (2): Xaa is C or S
XXVPQDLSPISILYKVGRTPKVLKYHY

SEQ ID NO: 44135 - protein, 32 aa, Artificial Sequence; identical to SEQ ID NO: 5756
  Cyclic GFR-binding peptide
  MOD_RES (1), (32): Xaa is C or S

SEQ ID NO: 44136 - protein, 31 aa, Artificial Sequence
  Cyclic GFR-binding peptide
  MOD_RES (5), (6): Xaa is C or S
SASPXXVSQDLSPISILYKIGKTPKILKYHY

SEQ ID NO: 44137 - protein, 26 aa, Artificial Sequence
  Cyclic GFR-binding peptide
VQLNAISVLYFEIVRKKPIFLKKYRT

SEQ ID NO: 44138 - protein, 27 aa, Artificial Sequence
  Cyclic GFR-binding peptide
PTKLSAISVLYLDDSSNVILKNYQNMV

SEQ ID NO: 44139 - protein, 37 aa, Artificial Sequence; identical to SEQ ID NO: 5761
  Cyclic GFR-binding peptide
  MOD_RES (5), (6): Xaa is C or S

SEQ ID NO: 44140 - protein, 30 aa, Artificial Sequence
  Cyclic GFR-binding peptide
  MOD_RES (30), (30): Xaa is C or S
SQDLSAISILYLIGKTPKILKNYQMIVKSX

SEQ ID NO: 44141 - protein, 31 aa, Artificial Sequence; identical to SEQ ID NO: 5763
  Cyclic GFR-binding peptide
  MOD_RES (31), (31): Xaa is C or S

SEQ ID NO: 44142 - protein, 33 aa, Artificial Sequence
  Cyclic GFR-binding peptide
  MOD_RES (6), (7): Xaa is C or S
SIPKAXXVPTELSATSMLYYDEYDKVVLRKHRE

SEQ ID NO: 44143 - protein, 40 aa, Artificial Sequence; identical to SEQ ID NO: 5764
  Cyclic GFR-binding peptide
  MOD_RES (6), (7), (38), (40): Xaa is C or S

SEQ ID NO: 44144 - protein, 29 aa, Artificial Sequence
  Cyclic GFR-binding peptide
SPISMLYKDEYDKVVLKYHYAAAAAAAAA

SEQ ID NO: 44145 - protein, 35 aa, Artificial Sequence; identical to SEQ ID NO: 5766
  Cyclic GFR-binding peptide
  MOD_RES (4), (5): Xaa is C or S

SEQ ID NO: 44146 - protein, 33 aa, Artificial Sequence
  Cyclic GFR-binding peptide
  MOD_RES (4), (5): Xaa is C or S
PKPXXAPTQLSATSVLYYDDSSNVILRKHRNMV

SEQ ID NO: 44147 - protein, 37 aa, Artificial Sequence; identical to SEQ ID NO: 5768
  Cyclic GFR-binding peptide
  MOD_RES (2), (3), (35), (37): Xaa is C or S

SEQ ID NO: 44148 - protein, 25 aa, Artificial Sequence
  Cyclic GFR-binding peptide
LNAISILYFIGKTPKILKKYRMIVK

SEQ ID NO: 44149 - protein, 38 aa, Artificial Sequence; identical to SEQ ID NO: 5771
  Cyclic GFR-binding peptide
  MOD_RES (6), (7): Xaa is C or S

SEQ ID NO: 44150 - protein, 39 aa, Artificial Sequence; identical to SEQ ID NO: 5772
  Cyclic GFR-binding peptide
  MOD_RES (4), (5), (36), (38): Xaa is C or S

SEQ ID NO: 44151 - protein, 22 aa, Artificial Sequence
  Cyclic GFR-binding peptide
SATSILYYIGKTPKILRKHRMI

SEQ ID NO: 44152 - protein, 31 aa, Artificial Sequence
  Cyclic GFR-binding peptide
  MOD_RES (4), (5): Xaa is C or S
GKAXXVPTKLSATSVLYYDDMGVPTLRKHRE

SEQ ID NO: 44153 - protein, 32 aa, Artificial Sequence
  Cyclic GFR-binding peptide
VQLSPISVLYKEIVRKKPIFLKYHYTLEDHLA

SEQ ID NO: 44154 - protein, 23 aa, Artificial Sequence
  Cyclic GFR-binding peptide
LSPISILYKVGRKPKVLKYHYMI

SEQ ID NO: 44155 - protein, 40 aa, Artificial Sequence; identical to SEQ ID NO: 5775
  Cyclic GFR-binding peptide
  MOD_RES (5), (6), (37), (39): Xaa is C or S

SEQ ID NO: 44156 - protein, 31 aa, Artificial Sequence
  Cyclic GFR-binding peptide
  MOD_RES (29), (31): Xaa is C or S
QDLSAISILYLVGRTPKVLKNYQMVVKSXKX

SEQ ID NO: 44157 - protein, 28 aa, Artificial Sequence
  Cyclic GFR-binding peptide
PTKLNAISVLYFDDMGVPTLKKYREGMS

SEQ ID NO: 44158 - protein, 40 aa, Artificial Sequence; identical to SEQ ID NO: 5777
  Cyclic GFR-binding peptide
  MOD_RES (7), (39): Xaa is C or S

SEQ ID NO: 44159 - protein, 33 aa, Artificial Sequence; identical to SEQ ID NO: 5778
  Cyclic GFR-binding peptide

SEQ ID NO: 44160 - protein, 34 aa, Artificial Sequence; identical to SEQ ID NO: 5779
  Cyclic GFR-binding peptide
  MOD_RES (2), (3), (34): Xaa is C or S

SEQ ID NO: 44161 - protein, 29 aa, Artificial Sequence
  Cyclic GFR-binding peptide
TQVQLSATSVLYYEIVRKKPIFLRKHRTL

SEQ ID NO: 44162 - protein, 38 aa, Artificial Sequence; identical to SEQ ID NO: 5781
  Cyclic GFR-binding peptide
  MOD_RES (4), (5), (37): Xaa is C or S

SEQ ID NO: 44163 - protein, 34 aa, Artificial Sequence; identical to SEQ ID NO: 5782
  Cyclic GFR-binding peptide
  MOD_RES (32), (34): Xaa is C or S

SEQ ID NO: 44164 - protein, 33 aa, Artificial Sequence; identical to SEQ ID NO: 5783
  Cyclic GFR-binding peptide

SEQ ID NO: 44165 - protein, 38 aa, Artificial Sequence; identical to SEQ ID NO: 5784
  Cyclic GFR-binding peptide
  MOD_RES (3), (4), (35), (37): Xaa is C or S

SEQ ID NO: 44166 - protein, 20 aa, Artificial Sequence
  Cyclic GFR-binding peptide
SPISILYKVGRTPKVLKYHY

SEQ ID NO: 44167 - protein, 34 aa, Artificial Sequence; identical to SEQ ID NO: 5786
  Cyclic GFR-binding peptide
  MOD_RES (31), (33): Xaa is C or S

SEQ ID NO: 44168 - protein, 29 aa, Artificial Sequence
  Cyclic GFR-binding peptide
  MOD_RES (28), (28): Xaa is C or S
DLSATSILYYVGRTPKVLRKHRMVVKSXK

SEQ ID NO: 44169 - protein, 36 aa, Artificial Sequence
  Cyclic GFR-binding peptide
  MOD_RES (5), (6): Xaa is C or S
VGKAXXVPTKLSAISVLYLDDMGVPTLKNYQEGMSV

SEQ ID NO: 44170 - protein, 30 aa, Artificial Sequence
  Cyclic GFR-binding peptide
  MOD_RES (5), (5): Xaa is C or S
TKPTXAPTKLSPISVLYKDDSSNVILKYHY

SEQ ID NO: 44171 - protein, 32 aa, Artificial Sequence; identical to SEQ ID NO: 5790
  Cyclic GFR-binding peptide
  MOD_RES (2), (2): Xaa is C or S

SEQ ID NO: 44172 - protein, 29 aa, Artificial Sequence
  Cyclic GFR-binding peptide
  MOD_RES (29), (29): Xaa is C or S
KLSPISVLYKDDSSNVILKYHYNMVVRSX

SEQ ID NO: 44173 - protein, 31 aa, Artificial Sequence
  Cyclic GFR-binding peptide
  MOD_RES (30), (30): Xaa is C or S
KLSAISVLYLDDMGVPTLKNYQEGMSVAEXG

SEQ ID NO: 44174 - protein, 25 aa, Artificial Sequence
  Cyclic GFR-binding peptide
ELNAISMLYFDENEKVVLKKYRDMV

SEQ ID NO: 44175 - protein, 29 aa, Artificial Sequence
  Cyclic GFR-binding peptide
VQLSAISVLYLEIVRKKPIFLKNYQTLED

SEQ ID NO: 44176 - protein, 35 aa, Artificial Sequence
  Cyclic GFR-binding peptide
  MOD_RES (6), (7): Xaa is C or S
ASASPXXVSQDLNAISILYFIGKTPKILKKYRMIV

SEQ ID NO: 44177 - protein, 38 aa, Artificial Sequence; identical to SEQ ID NO: 5795
  Cyclic GFR-binding peptide
  MOD_RES (3), (4), (37): Xaa is C or S

SEQ ID NO: 44178 - protein, 39 aa, Artificial Sequence; identical to SEQ ID NO: 5796
  Cyclic GFR-binding peptide
  MOD_RES (6), (7), (39): Xaa is C or S

SEQ ID NO: 44179 - protein, 29 aa, Artificial Sequence
  Cyclic GFR-binding peptide
RPTQVQLSATSVLYYEIVRKKPIFLRKHR

SEQ ID NO: 44180 - protein, 32 aa, Artificial Sequence
  Cyclic GFR-binding peptide
  MOD_RES (30), (32): Xaa is C or S
TQLSPISVLYKDDSSNVILKYHYNMVVRAXGX

SEQ ID NO: 44181 - protein, 35 aa, Artificial Sequence
  Cyclic GFR-binding peptide
  MOD_RES (5), (6): Xaa is C or S
SASPXXVPQDLSPISILYKVGRTPKVLKYHYMVVK

SEQ ID NO: 44182 - protein, 32 aa, Artificial Sequence
  Cyclic GFR-binding peptide
  MOD_RES (4), (5): Xaa is C or S
PKPXXAPTKLSATSVLYYDDSSNVILRKHRNM

SEQ ID NO: 44183 - protein, 31 aa, Artificial Sequence
  Cyclic GFR-binding peptide
  MOD_RES (30), (30): Xaa is C or S
TKLSPISVLYKDDSSNVILKYHYNMVVRSXG

SEQ ID NO: 44184 - protein, 23 aa, Artificial Sequence
  Cyclic GFR-binding peptide
LSATSILYYVGRKPKVLRKHRMI

SEQ ID NO: 44185 - protein, 38 aa, Artificial Sequence; identical to SEQ ID NO: 5797
  Cyclic GFR-binding peptide
  MOD_RES (3), (4), (36), (38): Xaa is C or S

SEQ ID NO: 44186 - protein, 28 aa, Artificial Sequence
  Cyclic GFR-binding peptide
ELSPISMLYKDEYDKVVLKYHYEMVVEG

SEQ ID NO: 44187 - protein, 33 aa, Artificial Sequence; identical to SEQ ID NO: 5799
  Cyclic GFR-binding peptide
  MOD_RES (2), (2): Xaa is C or S

SEQ ID NO: 44188 - protein, 23 aa, Artificial Sequence
  Cyclic GFR-binding peptide
SAISVLYLEIVRKKPIFLKNYQT

SEQ ID NO: 44189 - protein, 31 aa, Artificial Sequence
  Cyclic GFR-binding peptide
  MOD_RES (5), (6): Xaa is C or S
SASPXXVPQDLSAISILYLVGRTPKVLKNYQ

SEQ ID NO: 44190 - protein, 24 aa, Artificial Sequence
  Cyclic GFR-binding peptide
QDLSATSILYYIGKTPKILRKHRM

SEQ ID NO: 44191 - protein, 22 aa, Artificial Sequence
  Cyclic GFR-binding peptide
SPISILYKIGKTPKILKYHYMI

SEQ ID NO: 44192 - protein, 31 aa, Artificial Sequence
  Cyclic GFR-binding peptide
  MOD_RES (5), (6): Xaa is C or S
SASPXXVPQDLSATSILYYVGRTPKVLRKHR

SEQ ID NO: 44193 - protein, 32 aa, Artificial Sequence; identical to SEQ ID NO: 5802
  Cyclic GFR-binding peptide
  MOD_RES (31), (31): Xaa is C or S

SEQ ID NO: 44194 - protein, 29 aa, Artificial Sequence
  Cyclic GFR-binding peptide
  MOD_RES (3), (4): Xaa is C or S
KAXXAPTKLNAISVLYFDSSNNVILKKYR

SEQ ID NO: 44195 - protein, 23 aa, Artificial Sequence
  Cyclic GFR-binding peptide
DLSAISILYLIGKTPKILKNYQM

SEQ ID NO: 44196 - protein, 25 aa, Artificial Sequence
  Cyclic GFR-binding peptide
TQLSPISVLYKDDSSNVILKYHYNM

SEQ ID NO: 44197 - protein, 39 aa, Artificial Sequence; identical to SEQ ID NO: 5807
  Cyclic GFR-binding peptide
  MOD_RES (5), (6), (37), (39): Xaa is C or S

SEQ ID NO: 44198 - protein, 30 aa, Artificial Sequence
  Cyclic GFR-binding peptide
  MOD_RES (28), (30): Xaa is C or S
LSPISVLYKDSSNNVILKYHYNMVVKAXGX

SEQ ID NO: 44199 - protein, 32 aa, Artificial Sequence
  Cyclic GFR-binding peptide
  MOD_RES (6), (7): Xaa is C or S
SIPKAXXVPTELNAISMLYFDEYDKVVLKKYR

SEQ ID NO: 44200 - protein, 27 aa, Artificial Sequence
  Cyclic GFR-binding peptide
  MOD_RES (27), (27): Xaa is C or S
LSPISILYKIGKTPKILKYHYMIVKSX

SEQ ID NO: 44201 - protein, 28 aa, Artificial Sequence
  Cyclic GFR-binding peptide
VPTKLNAISVLYFDDMGVPTLKKYREGM

SEQ ID NO: 44202 - protein, 28 aa, Artificial Sequence
  Cyclic GFR-binding peptide
  MOD_RES (28), (28): Xaa is C or S
DLSATSILYYVGRTPKVLRKHRMVVKSX

SEQ ID NO: 44203 - protein, 28 aa, Artificial Sequence
  Cyclic GFR-binding peptide
  MOD_RES (1), (2): Xaa is C or S
XXVSQDLNAISILYFIGKTPKILKKYRM

SEQ ID NO: 44204 - protein, 33 aa, Artificial Sequence; identical to SEQ ID NO: 5809
  Cyclic GFR-binding peptide

SEQ ID NO: 44205 - protein, 24 aa, Artificial Sequence
  Cyclic GFR-binding peptide
KLSPISVLYKDSSNNVILKYHYNM

SEQ ID NO: 44206 - protein, 35 aa, Artificial Sequence; identical to SEQ ID NO: 5810
  Cyclic GFR-binding peptide
  MOD_RES (2), (34): Xaa is C or S

SEQ ID NO: 44207 - protein, 30 aa, Artificial Sequence
  Cyclic GFR-binding peptide
PTKLNAISVLYFDSSNNVILKKYRNMVVKA

SEQ ID NO: 44208 - protein, 36 aa, Artificial Sequence; identical to SEQ ID NO: 5811
  Cyclic GFR-binding peptide
  MOD_RES (3), (4), (36): Xaa is C or S

SEQ ID NO: 44209 - protein, 28 aa, Artificial Sequence
  Cyclic GFR-binding peptide
TELNAISMLYFDEYDKVVLKKYREMVVE

SEQ ID NO: 44210 - protein, 28 aa, Artificial Sequence
  Cyclic GFR-binding peptide
NAISVLYFEIVRKKPIFLKKYRTLEDHL

SEQ ID NO: 44211 - protein, 34 aa, Artificial Sequence; identical to SEQ ID NO: 5815
  Cyclic GFR-binding peptide
  MOD_RES (2), (3): Xaa is C or S

SEQ ID NO: 44212 - protein, 34 aa, Artificial Sequence
  Cyclic GFR-binding peptide
  MOD_RES (5), (6): Xaa is C or S
VPKPXXAPTQLSAISVLYLDDSSNVILKNYQNMV

SEQ ID NO: 44213 - protein, 29 aa, Artificial Sequence
  Cyclic GFR-binding peptide
  MOD_RES (29), (29): Xaa is C or S
ELSPISMLYKDENEKVVLKYHYDMVVEGX

SEQ ID NO: 44214 - protein, 36 aa, Artificial Sequence
  Cyclic GFR-binding peptide
  MOD_RES (6), (7): Xaa is C or S
TVPKPXXAPTQLSPISVLYKDDSSNVILKYHYNMVV

SEQ ID NO: 44215 - protein, 39 aa, Artificial Sequence; identical to SEQ ID NO: 5818
  Cyclic GFR-binding peptide
  MOD_RES (5), (5): Xaa is C or S

SEQ ID NO: 44216 - protein, 33 aa, Artificial Sequence; identical to SEQ ID NO: 5819
  Cyclic GFR-binding peptide
  MOD_RES (32), (32): Xaa is C or S

SEQ ID NO: 44217 - protein, 27 aa, Artificial Sequence
  Cyclic GFR-binding peptide
  MOD_RES (26), (26): Xaa is C or S
SATSILYYIGKTPKILRKHRMIVKSXK

SEQ ID NO: 44218 - protein, 36 aa, Artificial Sequence; identical to SEQ ID NO: 5820
  Cyclic GFR-binding peptide
  MOD_RES (1), (2), (34), (36): Xaa is C or S

SEQ ID NO: 44219 - protein, 30 aa, Artificial Sequence
  Cyclic GFR-binding peptide
  MOD_RES (27), (29): Xaa is C or S
SATSMLYYDEYDKVVLRKHREMVVEGXGXR

SEQ ID NO: 44220 - protein, 28 aa, Artificial Sequence
  Cyclic GFR-binding peptide
TKLSPISVLYKDSSNNVILKYHYNMVVK

SEQ ID NO: 44221 - protein, 37 aa, Artificial Sequence; identical to SEQ ID NO: 5821
  Cyclic GFR-binding peptide
  MOD_RES (4), (5), (36): Xaa is C or S

SEQ ID NO: 44222 - protein, 33 aa, Artificial Sequence
  Cyclic GFR-binding peptide
RPTQVQLSAISVLYLEIVRKKPIFLKNYQTLED

SEQ ID NO: 44223 - protein, 26 aa, Artificial Sequence
  Cyclic GFR-binding peptide
  MOD_RES (26), (26): Xaa is C or S
NAISILYFVGRTPKVLKKYRMVVKSX

SEQ ID NO: 44224 - protein, 41 aa, Artificial Sequence; identical to SEQ ID NO: 5824
  Cyclic GFR-binding peptide
  MOD_RES (5), (6), (38), (40): Xaa is C or S

SEQ ID NO: 44225 - protein, 28 aa, Artificial Sequence
  Cyclic GFR-binding peptide
PTKLSPISVLYKDSSNNVILKYHYNMVV

SEQ ID NO: 44226 - protein, 35 aa, Artificial Sequence; identical to SEQ ID NO: 5826
  Cyclic GFR-binding peptide
  MOD_RES (1), (2), (34): Xaa is C or S

SEQ ID NO: 44227 - protein, 35 aa, Artificial Sequence; identical to SEQ ID NO: 5827
  Cyclic GFR-binding peptide
  MOD_RES (3), (4): Xaa is C or S

SEQ ID NO: 44228 - protein, 24 aa, Artificial Sequence
  Cyclic GFR-binding peptide
LNAISILYFIGKTPKILKKYRMIV

SEQ ID NO: 44229 - protein, 25 aa, Artificial Sequence
  Cyclic GFR-binding peptide
KLSPISVLYKDSSNNVILKYHYNMV

SEQ ID NO: 44230 - protein, 34 aa, Artificial Sequence; identical to SEQ ID NO: 5829
  Cyclic GFR-binding peptide
  MOD_RES (2), (34): Xaa is C or S

SEQ ID NO: 44231 - protein, 28 aa, Artificial Sequence
  Cyclic GFR-binding peptide
  MOD_RES (27), (27): Xaa is C or S
LSAISILYLVGRTPKVLKNYQMVVKSXK

SEQ ID NO: 44232 - protein, 35 aa, Artificial Sequence; identical to SEQ ID NO: 5831
  Cyclic GFR-binding peptide
  MOD_RES (1), (2), (34): Xaa is C or S

SEQ ID NO: 44233 - protein, 33 aa, Artificial Sequence; identical to SEQ ID NO: 5833
  Cyclic GFR-binding peptide
  MOD_RES (2), (3): Xaa is C or S

SEQ ID NO: 44234 - protein, 36 aa, Artificial Sequence; identical to SEQ ID NO: 5832
  Cyclic GFR-binding peptide
  MOD_RES (4), (5): Xaa is C or S

SEQ ID NO: 44235 - protein, 23 aa, Artificial Sequence
  Cyclic GFR-binding peptide
TKLSATSVLYYDDMGVPTLRKHR

SEQ ID NO: 44236 - protein, 36 aa, Artificial Sequence
  Cyclic GFR-binding peptide
  MOD_RES (6), (7): Xaa is C or S
TVPKPXXAPTQLSATSVLYYDDSSNVILRKHRNMVV

SEQ ID NO: 44237 - protein, 27 aa, Artificial Sequence
  Cyclic GFR-binding peptide
VPTKLSAISVLYLDDMGVPTLKNYQEG

SEQ ID NO: 44238 - protein, 27 aa, Artificial Sequence
  Cyclic GFR-binding peptide
PQALSPISILYKVGRKPKVLKYHYMIV

SEQ ID NO: 44239 - protein, 34 aa, Artificial Sequence; identical to SEQ ID NO: 5836
  Cyclic GFR-binding peptide
  MOD_RES (31), (33): Xaa is C or S

SEQ ID NO: 44240 - protein, 38 aa, Artificial Sequence; identical to SEQ ID NO: 5837
  Cyclic GFR-binding peptide
  MOD_RES (5), (6): Xaa is C or S

SEQ ID NO: 44241 - protein, 29 aa, Artificial Sequence
  Cyclic GFR-binding peptide
PTKLSAISVLYLDSSNNVILKNYQNMVVK

SEQ ID NO: 44242 - protein, 28 aa, Artificial Sequence
  Cyclic GFR-binding peptide
  MOD_RES (27), (27): Xaa is C or S
LSPISILYKVGRKPKVLKYHYMIVRSXK

SEQ ID NO: 44243 - protein, 38 aa, Artificial Sequence; identical to SEQ ID NO: 5839
  Cyclic GFR-binding peptide
  MOD_RES (3), (4), (36), (38): Xaa is C or S

SEQ ID NO: 44244 - protein, 36 aa, Artificial Sequence; identical to SEQ ID NO: 5840
  Cyclic GFR-binding peptide
  MOD_RES (1), (33), (35): Xaa is C or S

SEQ ID NO: 44245 - protein, 31 aa, Artificial Sequence
  Cyclic GFR-binding peptide
  MOD_RES (29), (31): Xaa is C or S
LSAISVLYLDDMGVPTLKNYQEGMSVAEXGX

SEQ ID NO: 44246 - protein, 33 aa, Artificial Sequence
  Cyclic GFR-binding peptide
  MOD_RES (6), (7): Xaa is C or S
TVPKPXXAPTQLSPISVLYKDDSSNVILKYHYN

SEQ ID NO: 44247 - protein, 30 aa, Artificial Sequence
  Cyclic GFR-binding peptide
  MOD_RES (1), (1): Xaa is C or S
XAPTKLSATSVLYYDDSSNVILRKHRNMVV

SEQ ID NO: 44248 - protein, 32 aa, Artificial Sequence
  Cyclic GFR-binding peptide
  MOD_RES (4), (5): Xaa is C or S
PKPXXAPTKLSPISVLYKDDSSNVILKYHYNM

SEQ ID NO: 44249 - protein, 40 aa, Artificial Sequence; identical to SEQ ID NO: 5841
  Cyclic GFR-binding peptide
  MOD_RES (5), (6), (38), (40): Xaa is C or S

SEQ ID NO: 44250 - protein, 26 aa, Artificial Sequence
  Cyclic GFR-binding peptide
VPQDLSAISILYLVGRTPKVLKNYQM

SEQ ID NO: 44251 - protein, 34 aa, Artificial Sequence; identical to SEQ ID NO: 5843
  Cyclic GFR-binding peptide
  MOD_RES (2), (3): Xaa is C or S

SEQ ID NO: 44252 - protein, 27 aa, Artificial Sequence
  Cyclic GFR-binding peptide
  MOD_RES (1), (1): Xaa is C or S
XVSQDLSAISILYLIGKTPKILKNYQM

SEQ ID NO: 44253 - protein, 27 aa, Artificial Sequence
  Cyclic GFR-binding peptide
QLSPISVLYKEIVRKKPIFLKYHYTLE

SEQ ID NO: 44254 - protein, 27 aa, Artificial Sequence
  Cyclic GFR-binding peptide
  MOD_RES (27), (27): Xaa is C or S
SATSVLYYDDSSNVILRKHRNMVVRAX

SEQ ID NO: 44255 - protein, 39 aa, Artificial Sequence; identical to SEQ ID NO: 5844
  Cyclic GFR-binding peptide
  MOD_RES (4), (5), (38): Xaa is C or S

SEQ ID NO: 44256 - protein, 29 aa, Artificial Sequence
  Cyclic GFR-binding peptide
  MOD_RES (1), (2): Xaa is C or S
XXVPQALNAISILYFVGRKPKVLKKYRMI

SEQ ID NO: 44257 - protein, 35 aa, Artificial Sequence; identical to SEQ ID NO: 5845
  Cyclic GFR-binding peptide
  MOD_RES (2), (3), (35): Xaa is C or S

SEQ ID NO: 44258 - protein, 27 aa, Artificial Sequence
  Cyclic GFR-binding peptide
QDLNAISILYFIGKTPKILKKYRMIVK

SEQ ID NO: 44259 - protein, 39 aa, Artificial Sequence; identical to SEQ ID NO: 5848
  Cyclic GFR-binding peptide
  MOD_RES (5), (6), (37), (39): Xaa is C or S

SEQ ID NO: 44260 - protein, 25 aa, Artificial Sequence
  Cyclic GFR-binding peptide
DLSATSILYYIGKTPKILRKHRMIV

SEQ ID NO: 44261 - protein, 32 aa, Artificial Sequence
  Cyclic GFR-binding peptide
  MOD_RES (6), (6): Xaa is C or S
VTKPTXAPTKLSATSVLYYDDSSNVILRKHRN

SEQ ID NO: 44262 - protein, 36 aa, Artificial Sequence
  Cyclic GFR-binding peptide
  MOD_RES (6), (7): Xaa is C or S
KIPKAXXVPTELNAISMLYFDENEKVVLKKYRDMVV

SEQ ID NO: 44263 - protein, 31 aa, Artificial Sequence
  Cyclic GFR-binding peptide
  MOD_RES (31), (31): Xaa is C or S
PTELSPISMLYKDEYDKVVLKYHYEMVVEGX

SEQ ID NO: 44264 - protein, 31 aa, Artificial Sequence
  Cyclic GFR-binding peptide
  MOD_RES (1), (2): Xaa is C or S
XXVPQALSATSILYYVGRKPKVLRKHRMIVR

SEQ ID NO: 44265 - protein, 30 aa, Artificial Sequence
  Cyclic GFR-binding peptide
  MOD_RES (29), (29): Xaa is C or S
QALSAISILYLVGRKPKVLKNYQMIVRSXK

SEQ ID NO: 44266 - protein, 34 aa, Artificial Sequence; identical to SEQ ID NO: 5854
  Cyclic GFR-binding peptide

SEQ ID NO: 44267 - protein, 31 aa, Artificial Sequence
  Cyclic GFR-binding peptide
  MOD_RES (4), (5): Xaa is C or S
AAPXXVPQALSAISILYLVGRKPKVLKNYQM

SEQ ID NO: 44268 - protein, 36 aa, Artificial Sequence; identical to SEQ ID NO: 5859
  Cyclic GFR-binding peptide
  MOD_RES (4), (5), (36): Xaa is C or S

SEQ ID NO: 44269 - protein, 38 aa, Artificial Sequence; identical to SEQ ID NO: 5861
  Cyclic GFR-binding peptide
  MOD_RES (3), (4), (35), (37): Xaa is C or S

SEQ ID NO: 44270 - protein, 43 aa, Artificial Sequence; identical to SEQ ID NO: 5862
  Cyclic GFR-binding peptide
  MOD_RES (5), (42): Xaa is C or S

SEQ ID NO: 44271 - protein, 30 aa, Artificial Sequence
  Cyclic GFR-binding peptide
  MOD_RES (3), (4): Xaa is C or S
APXXVPQALSATSILYYVGRKPKVLRKHRM

SEQ ID NO: 44272 - protein, 33 aa, Artificial Sequence; identical to SEQ ID NO: 5864
  Cyclic GFR-binding peptide
  MOD_RES (2), (3): Xaa is C or S

SEQ ID NO: 44273 - protein, 33 aa, Artificial Sequence
  Cyclic GFR-binding peptide
  MOD_RES (6), (7): Xaa is C or S
ASAAPXXVPQALNAISILYFVGRKPKVLKKYRM

SEQ ID NO: 44274 - protein, 29 aa, Artificial Sequence
  Cyclic GFR-binding peptide
TKLSATSVLYYDDMGVPTLRKHREGMSVA

SEQ ID NO: 44275 - protein, 30 aa, Artificial Sequence
  Cyclic GFR-binding peptide
  MOD_RES (27), (29): Xaa is C or S
LSATSILYYVGRTPKVLRKHRMVVKSXKXS

SEQ ID NO: 44276 - protein, 42 aa, Artificial Sequence; identical to SEQ ID NO: 5865
  Cyclic GFR-binding peptide
  MOD_RES (7), (39), (41): Xaa is C or S

SEQ ID NO: 44277 - protein, 36 aa, Artificial Sequence; identical to SEQ ID NO: 5867
  Cyclic GFR-binding peptide
  MOD_RES (1), (1): Xaa is C or S

SEQ ID NO: 44278 - protein, 32 aa, Artificial Sequence
  Cyclic GFR-binding peptide
  MOD_RES (30), (32): Xaa is C or S
TELNAISMLYFDEYDKVVLKKYREMVVEGXGX

SEQ ID NO: 44279 - protein, 32 aa, Artificial Sequence
  Cyclic GFR-binding peptide
  MOD_RES (2), (3): Xaa is C or S
PXXVPQALSAISILYLVGRKPKVLKNYQMIVR

SEQ ID NO: 44280 - protein, 27 aa, Artificial Sequence
  Cyclic GFR-binding peptide
VPQALSAISILYLVGRKPKVLKNYQMI

SEQ ID NO: 44281 - protein, 30 aa, Artificial Sequence
  Cyclic GFR-binding peptide
  MOD_RES (3), (4): Xaa is C or S
KPXXAPTKLSAISVLYLDDSSNVILKNYQN

SEQ ID NO: 44282 - protein, 39 aa, Artificial Sequence; identical to SEQ ID NO: 5868
  Cyclic GFR-binding peptide
  MOD_RES (2), (39): Xaa is C or S

SEQ ID NO: 44283 - protein, 34 aa, Artificial Sequence
  Cyclic GFR-binding peptide
  MOD_RES (5), (6): Xaa is C or S
SASPXXVPQDLSAISILYLVGRTPKVLKNYQMVV

SEQ ID NO: 44284 - protein, 25 aa, Artificial Sequence
  Cyclic GFR-binding peptide
VQLSAISVLYLEIVRKKPIFLKNYQ

SEQ ID NO: 44285 - protein, 29 aa, Artificial Sequence
  Cyclic GFR-binding peptide
  MOD_RES (29), (29): Xaa is C or S
LNAISVLYFDDMGVPTLKKYREGMSVAEX

SEQ ID NO: 44286 - protein, 34 aa, Artificial Sequence; identical to SEQ ID NO: 5869
  Cyclic GFR-binding peptide
  MOD_RES (31), (33): Xaa is C or S

SEQ ID NO: 44287 - protein, 29 aa, Artificial Sequence
  Cyclic GFR-binding peptide
APTQLSAISVLYLDDSSNVILKNYQNMVV

SEQ ID NO: 44288 - protein, 32 aa, Artificial Sequence
  Cyclic GFR-binding peptide
  MOD_RES (5), (6): Xaa is C or S
SAAPXXVPQALSAISILYLVGRKPKVLKNYQM

SEQ ID NO: 44289 - protein, 27 aa, Artificial Sequence
  Cyclic GFR-binding peptide
LNAISMLYFDENEKVVLKKYRDMVVEG

SEQ ID NO: 44290 - protein, 26 aa, Artificial Sequence
  Cyclic GFR-binding peptide
KLSATSVLYYDDSSNVILRKHRNMVV

SEQ ID NO: 44291 - protein, 34 aa, Artificial Sequence; identical to SEQ ID NO: 5870
  Cyclic GFR-binding peptide
  MOD_RES (1), (2), (34): Xaa is C or S

SEQ ID NO: 44292 - protein, 27 aa, Artificial Sequence
  Cyclic GFR-binding peptide
  MOD_RES (1), (1): Xaa is C or S
XVPTELNAISMLYFDENEKVVLKKYRD

SEQ ID NO: 44293 - protein, 30 aa, Artificial Sequence
  Cyclic GFR-binding peptide
  MOD_RES (1), (1): Xaa is C or S
XRPTQVQLSPISVLYKEIVRKKPIFLKYHY

SEQ ID NO: 44294 - protein, 36 aa, Artificial Sequence; identical to SEQ ID NO: 5871
  Cyclic GFR-binding peptide
  MOD_RES (4), (5): Xaa is C or S

SEQ ID NO: 44295 - protein, 35 aa, Artificial Sequence
  Cyclic GFR-binding peptide
  MOD_RES (4), (5): Xaa is C or S
GKAXXVPTKLNAISVLYFDDMGVPTLKKYREGMSV

SEQ ID NO: 44296 - protein, 36 aa, Artificial Sequence
  Cyclic GFR-binding peptide
  MOD_RES (34), (36): Xaa is C or S
QVQLSPISVLYKEIVRKKPIFLKYHYTLEDHLAXKX

SEQ ID NO: 44297 - protein, 31 aa, Artificial Sequence
  Cyclic GFR-binding peptide
  MOD_RES (31), (31): Xaa is C or S
PTELSPISMLYKDENEKVVLKYHYDMVVEGX

SEQ ID NO: 44298 - protein, 29 aa, Artificial Sequence
  Cyclic GFR-binding peptide
  MOD_RES (3), (4): Xaa is C or S
KAXXVPTELSPISMLYKDEYDKVVLKYHY

SEQ ID NO: 44299 - protein, 27 aa, Artificial Sequence
  Cyclic GFR-binding peptide
QLNAISVLYFEIVRKKPIFLKKYRTLE

SEQ ID NO: 44300 - protein, 29 aa, Artificial Sequence
  Cyclic GFR-binding peptide
QVQLSAISVLYLEIVRKKPIFLKNYQTLE

SEQ ID NO: 44301 - protein, 27 aa, Artificial Sequence
  Cyclic GFR-binding peptide
VPQDLSATSILYYVGRTPKVLRKHRMV

SEQ ID NO: 44302 - protein, 28 aa, Artificial Sequence
  Cyclic GFR-binding peptide
  MOD_RES (1), (1): Xaa is C or S
XAPTKLNAISVLYFDSSNNVILKKYRNM

SEQ ID NO: 44303 - protein, 27 aa, Artificial Sequence
  Cyclic GFR-binding peptide
PTKLSAISVLYLDSSNNVILKNYQNMV

SEQ ID NO: 44304 - protein, 30 aa, Artificial Sequence
  Cyclic GFR-binding peptide
  MOD_RES (30), (30): Xaa is C or S
TKLNAISVLYFDSSNNVILKKYRNMVVKAX

SEQ ID NO: 44305 - protein, 29 aa, Artificial Sequence
  Cyclic GFR-binding peptide
  MOD_RES (1), (2): Xaa is C or S
XXVPTKLNAISVLYFDDMGVPTLKKYREG

SEQ ID NO: 44306 - protein, 29 aa, Artificial Sequence
  Cyclic GFR-binding peptide
KLNAISVLYFDDMGVPTLKKYREGMSVAE

SEQ ID NO: 44307 - protein, 29 aa, Artificial Sequence
  Cyclic GFR-binding peptide
  MOD_RES (3), (4): Xaa is C or S
KAXXVPTELSATSMLYYDENEKVVLRKHR

SEQ ID NO: 44308 - protein, 27 aa, Artificial Sequence
  Cyclic GFR-binding peptide
  MOD_RES (27), (27): Xaa is C or S
LSPISILYKVGRTPKVLKYHYMVVKSX

SEQ ID NO: 44309 - protein, 26 aa, Artificial Sequence
  Cyclic GFR-binding peptide
KLNAISVLYFDDMGVPTLKKYREGMS

SEQ ID NO: 44310 - protein, 32 aa, Artificial Sequence
  Cyclic GFR-binding peptide
  MOD_RES (29), (31): Xaa is C or S
QALSPISILYKVGRKPKVLKYHYMIVRSXKXS

SEQ ID NO: 44311 - protein, 28 aa, Artificial Sequence
  Cyclic GFR-binding peptide
QVQLSPISVLYKEIVRKKPIFLKYHYTL

SEQ ID NO: 44312 - protein, 28 aa, Artificial Sequence
  Cyclic GFR-binding peptide
  MOD_RES (27), (27): Xaa is C or S
NAISMLYFDENEKVVLKKYRDMVVEGXG

SEQ ID NO: 44313 - protein, 20 aa, Artificial Sequence
  Cyclic GFR-binding peptide
NAISVLYFDDMGVPTLKKYR

SEQ ID NO: 44314 - protein, 35 aa, Artificial Sequence; identical to SEQ ID NO: 5874
  Cyclic GFR-binding peptide
  MOD_RES (1), (32), (34): Xaa is C or S

SEQ ID NO: 44315 - protein, 36 aa, Artificial Sequence; identical to SEQ ID NO: 5875
  Cyclic GFR-binding peptide
  MOD_RES (3), (35): Xaa is C or S

SEQ ID NO: 44316 - protein, 29 aa, Artificial Sequence
  Cyclic GFR-binding peptide
  MOD_RES (28), (28): Xaa is C or S
SATSVLYYDDMGVPTLRKHREGMSVAEXG

SEQ ID NO: 44317 - protein, 30 aa, Artificial Sequence
  Cyclic GFR-binding peptide
  MOD_RES (2), (3): Xaa is C or S
PXXAPTKLSAISVLYLDDSSNVILKNYQNM

SEQ ID NO: 44318 - protein, 38 aa, Artificial Sequence; identical to SEQ ID NO: 5881
  Cyclic GFR-binding peptide
  MOD_RES (37), (37): Xaa is C or S

SEQ ID NO: 44319 - protein, 38 aa, Artificial Sequence; identical to SEQ ID NO: 5882
  Cyclic GFR-binding peptide
  MOD_RES (4), (4): Xaa is C or S

SEQ ID NO: 44320 - protein, 37 aa, Artificial Sequence; identical to SEQ ID NO: 5883
  Cyclic GFR-binding peptide
  MOD_RES (37), (37): Xaa is C or S

SEQ ID NO: 44321 - protein, 31 aa, Artificial Sequence
  Cyclic GFR-binding peptide
  MOD_RES (4), (5): Xaa is C or S
PKAXXVPTELSATSMLYYDENEKVVLRKHRD

SEQ ID NO: 44322 - protein, 32 aa, Artificial Sequence
  Cyclic GFR-binding peptide
  MOD_RES (31), (31): Xaa is C or S
PTQLSAISVLYLDDSSNVILKNYQNMVVRAXG

SEQ ID NO: 44323 - protein, 40 aa, Artificial Sequence; identical to SEQ ID NO: 5884
  Cyclic GFR-binding peptide
  MOD_RES (5), (6), (37), (39): Xaa is C or S

SEQ ID NO: 44324 - protein, 39 aa, Artificial Sequence; identical to SEQ ID NO: 5885
  Cyclic GFR-binding peptide
  MOD_RES (4), (5), (37), (39): Xaa is C or S

SEQ ID NO: 44325 - protein, 25 aa, Artificial Sequence
  Cyclic GFR-binding peptide
PTKLSPISVLYKDDSSNVILKYHYN

SEQ ID NO: 44326 - protein, 31 aa, Artificial Sequence
  Cyclic GFR-binding peptide
  MOD_RES (1), (2): Xaa is C or S
XXVPQALSPISILYKVGRKPKVLKYHYMIVR

SEQ ID NO: 44327 - protein, 41 aa, Artificial Sequence; identical to SEQ ID NO: 5887
  Cyclic GFR-binding peptide
  MOD_RES (6), (7), (39), (41): Xaa is C or S

SEQ ID NO: 44328 - protein, 30 aa, Artificial Sequence
  Cyclic GFR-binding peptide
  MOD_RES (1), (1): Xaa is C or S
XVPQALNAISILYFVGRKPKVLKKYRMIVR

SEQ ID NO: 44329 - protein, 28 aa, Artificial Sequence
  Cyclic GFR-binding peptide
  MOD_RES (1), (2): Xaa is C or S
XXAPTKLSAISVLYLDDSSNVILKNYQN

SEQ ID NO: 44330 - protein, 29 aa, Artificial Sequence
  Cyclic GFR-binding peptide
  MOD_RES (28), (28): Xaa is C or S
LSPISVLYKDDSSNVILKYHYNMVVRAXG

SEQ ID NO: 44331 - protein, 33 aa, Artificial Sequence; identical to SEQ ID NO: 5888
  Cyclic GFR-binding peptide
  MOD_RES (1), (33): Xaa is C or S

SEQ ID NO: 44332 - protein, 33 aa, Artificial Sequence; identical to SEQ ID NO: 5890
  Cyclic GFR-binding peptide
  MOD_RES (2), (3): Xaa is C or S

SEQ ID NO: 44333 - protein, 33 aa, Artificial Sequence
  Cyclic GFR-binding peptide
  MOD_RES (3), (4): Xaa is C or S
SPXXVSQDLNAISILYFIGKTPKILKKYRMIVK

SEQ ID NO: 44334 - protein, 23 aa, Artificial Sequence
  Cyclic GFR-binding peptide
QDLSAISILYLVGRTPKVLKNYQ

SEQ ID NO: 44335 - protein, 41 aa, Artificial Sequence; identical to SEQ ID NO: 5892
  Cyclic GFR-binding peptide
  MOD_RES (6), (7), (38), (40): Xaa is C or S

SEQ ID NO: 44336 - protein, 37 aa, Artificial Sequence; identical to SEQ ID NO: 5894
  Cyclic GFR-binding peptide
  MOD_RES (6), (6): Xaa is C or S

SEQ ID NO: 44337 - protein, 30 aa, Artificial Sequence
  Cyclic GFR-binding peptide
  MOD_RES (28), (30): Xaa is C or S
LSATSMLYYDEYDKVVLRKHREMVVEGXGX

SEQ ID NO: 44338 - protein, 31 aa, Artificial Sequence; identical to SEQ ID NO: 5893
  Cyclic GFR-binding peptide
  MOD_RES (1), (1): Xaa is C or S

SEQ ID NO: 44339 - protein, 34 aa, Artificial Sequence
  Cyclic GFR-binding peptide
  MOD_RES (5), (6): Xaa is C or S
VPKPXXAPTQLSATSVLYYDDSSNVILRKHRNMV

SEQ ID NO: 44340 - protein, 35 aa, Artificial Sequence; identical to SEQ ID NO: 5897
  Cyclic GFR-binding peptide

SEQ ID NO: 44341 - protein, 37 aa, Artificial Sequence; identical to SEQ ID NO: 5899
  Cyclic GFR-binding peptide
  MOD_RES (36), (36): Xaa is C or S

SEQ ID NO: 44342 - protein, 26 aa, Artificial Sequence
  Cyclic GFR-binding peptide
DLSAISILYLIGKTPKILKNYQMIVK

SEQ ID NO: 44343 - protein, 37 aa, Artificial Sequence; identical to SEQ ID NO: 5901
  Cyclic GFR-binding peptide
  MOD_RES (4), (5), (37): Xaa is C or S

SEQ ID NO: 44344 - protein, 37 aa, Artificial Sequence; identical to SEQ ID NO: 5904
  Cyclic GFR-binding peptide
  MOD_RES (5), (6): Xaa is C or S

SEQ ID NO: 44345 - protein, 32 aa, Artificial Sequence
  Cyclic GFR-binding peptide
  MOD_RES (30), (32): Xaa is C or S
KLSATSVLYYDDMGVPTLRKHREGMSVAEXGX

SEQ ID NO: 44346 - protein, 30 aa, Artificial Sequence
  Cyclic GFR-binding peptide
  MOD_RES (1), (1): Xaa is C or S
XRPTQVQLSATSVLYYEIVRKKPIFLRKHR

SEQ ID NO: 44347 - protein, 32 aa, Artificial Sequence
  Cyclic GFR-binding peptide
  MOD_RES (31), (31): Xaa is C or S
PTKLSAISVLYLDDSSNVILKNYQNMVVRSXG

SEQ ID NO: 44348 - protein, 33 aa, Artificial Sequence
  Cyclic GFR-binding peptide
  MOD_RES (5), (6): Xaa is C or S
VPKPXXAPTKLSAISVLYLDDSSNVILKNYQNM

SEQ ID NO: 44349 - protein, 37 aa, Artificial Sequence; identical to SEQ ID NO: 5905
  Cyclic GFR-binding peptide
  MOD_RES (6), (7): Xaa is C or S

SEQ ID NO: 44350 - protein, 34 aa, Artificial Sequence
  Cyclic GFR-binding peptide
  MOD_RES (31), (33): Xaa is C or S
PTQLSATSVLYYDDSSNVILRKHRNMVVRAXGXH

SEQ ID NO: 44351 - protein, 35 aa, Artificial Sequence; identical to SEQ ID NO: 5907
  Cyclic GFR-binding peptide

SEQ ID NO: 44352 - protein, 32 aa, Artificial Sequence; identical to SEQ ID NO: 5909
  Cyclic GFR-binding peptide
  MOD_RES (32), (32): Xaa is C or S

SEQ ID NO: 44353 - protein, 37 aa, Artificial Sequence; identical to SEQ ID NO: 5908
  Cyclic GFR-binding peptide
  MOD_RES (5), (37): Xaa is C or S

SEQ ID NO: 44354 - protein, 39 aa, Artificial Sequence; identical to SEQ ID NO: 5911
  Cyclic GFR-binding peptide
  MOD_RES (5), (6), (38): Xaa is C or S

SEQ ID NO: 44355 - protein, 28 aa, Artificial Sequence
  Cyclic GFR-binding peptide
KLSPISVLYKDDSSNVILKYHYNMVVRS

SEQ ID NO: 44356 - protein, 31 aa, Artificial Sequence
  Cyclic GFR-binding peptide
  MOD_RES (3), (4): Xaa is C or S
KAXXAPTKLSAISVLYLDSSNNVILKNYQNM

SEQ ID NO: 44357 - protein, 39 aa, Artificial Sequence; identical to SEQ ID NO: 5913
  Cyclic GFR-binding peptide
  MOD_RES (4), (5), (36), (38): Xaa is C or S

SEQ ID NO: 44358 - protein, 33 aa, Artificial Sequence
  Cyclic GFR-binding peptide
  MOD_RES (6), (7): Xaa is C or S
AVPKAXXAPTKLSAISVLYLDSSNNVILKNYQN

SEQ ID NO: 44359 - protein, 27 aa, Artificial Sequence
  Cyclic GFR-binding peptide
VSQDLSATSILYYIGKTPKILRKHRMI

SEQ ID NO: 44360 - protein, 29 aa, Artificial Sequence
  Cyclic GFR-binding peptide
VPQALSPISILYKVGRKPKVLKYHYMIVR

SEQ ID NO: 44361 - protein, 31 aa, Artificial Sequence
  Cyclic GFR-binding peptide
  MOD_RES (28), (30): Xaa is C or S
LSAISVLYLDDSSNVILKNYQNMVVRAXGXH

SEQ ID NO: 44362 - protein, 24 aa, Artificial Sequence
  Cyclic GFR-binding peptide
SPISILYKVGRKPKVLKYHYMIVR

SEQ ID NO: 44363 - protein, 22 aa, Artificial Sequence
  Cyclic GFR-binding peptide
KLSATSVLYYDDSSNVILRKHR

SEQ ID NO: 44364 - protein, 35 aa, Artificial Sequence; identical to SEQ ID NO: 5919
  Cyclic GFR-binding peptide
  MOD_RES (1), (32), (34): Xaa is C or S

SEQ ID NO: 44365 - protein, 35 aa, Artificial Sequence; identical to SEQ ID NO: 5921
  Cyclic GFR-binding peptide
  MOD_RES (1), (2), (33), (35): Xaa is C or S

SEQ ID NO: 44366 - protein, 28 aa, Artificial Sequence
  Cyclic GFR-binding peptide
  MOD_RES (1), (2): Xaa is C or S
XXVPQDLNAISILYFVGRTPKVLKKYRM

SEQ ID NO: 44367 - protein, 37 aa, Artificial Sequence; identical to SEQ ID NO: 5920
  Cyclic GFR-binding peptide
  MOD_RES (4), (5), (36): Xaa is C or S

SEQ ID NO: 44368 - protein, 32 aa, Artificial Sequence
  Cyclic GFR-binding peptide
  MOD_RES (29), (31): Xaa is C or S
ELSPISMLYKDENEKVVLKYHYDMVVEGXGXR

SEQ ID NO: 44369 - protein, 28 aa, Artificial Sequence
  Cyclic GFR-binding peptide
VSQDLSAISILYLIGKTPKILKNYQMIV

SEQ ID NO: 44370 - protein, 37 aa, Artificial Sequence
  Cyclic GFR-binding peptide
  MOD_RES (5), (6): Xaa is C or S
VGKAXXVPTKLNAISVLYFDDMGVPTLKKYREGMSVA

SEQ ID NO: 44371 - protein, 28 aa, Artificial Sequence
  Cyclic GFR-binding peptide
  MOD_RES (1), (2): Xaa is C or S
XXVPQALSPISILYKVGRKPKVLKYHYM

SEQ ID NO: 44372 - protein, 38 aa, Artificial Sequence; identical to SEQ ID NO: 5925
  Cyclic GFR-binding peptide
  MOD_RES (1), (38): Xaa is C or S

SEQ ID NO: 44373 - protein, 29 aa, Artificial Sequence
  Cyclic GFR-binding peptide
  MOD_RES (26), (28): Xaa is C or S
SATSILYYVGRKPKVLRKHRMIVRSXKXS

SEQ ID NO: 44374 - protein, 24 aa, Artificial Sequence
  Cyclic GFR-binding peptide
SAISVLYLDSSNNVILKNYQNMVV

SEQ ID NO: 44375 - protein, 23 aa, Artificial Sequence
  Cyclic GFR-binding peptide
LNAISVLYFEIVRKKPIFLKKYR

SEQ ID NO: 44376 - protein, 34 aa, Artificial Sequence; identical to SEQ ID NO: 5928
  Cyclic GFR-binding peptide
  MOD_RES (4), (4): Xaa is C or S

SEQ ID NO: 44377 - protein, 31 aa, Artificial Sequence; identical to SEQ ID NO: 5930
  Cyclic GFR-binding peptide
  MOD_RES (1), (1): Xaa is C or S

SEQ ID NO: 44378 - protein, 24 aa, Artificial Sequence
  Cyclic GFR-binding peptide
QALSAISILYLVGRKPKVLKNYQM

SEQ ID NO: 44379 - protein, 35 aa, Artificial Sequence
  Cyclic GFR-binding peptide
  MOD_RES (6), (7): Xaa is C or S
ASASPXXVSQDLSATSILYYIGKTPKILRKHRMIV

SEQ ID NO: 44380 - protein, 26 aa, Artificial Sequence
  Cyclic GFR-binding peptide
LSATSILYYIGKTPKILRKHRMIVKS

SEQ ID NO: 44381 - protein, 35 aa, Artificial Sequence
  Cyclic GFR-binding peptide
  MOD_RES (5), (6): Xaa is C or S
VPKPXXAPTKLSATSVLYYDDSSNVILRKHRNMVV

SEQ ID NO: 44382 - protein, 24 aa, Artificial Sequence
  Cyclic GFR-binding peptide
KLSAISVLYLDSSNNVILKNYQNM

SEQ ID NO: 44383 - protein, 30 aa, Artificial Sequence
  Cyclic GFR-binding peptide
  MOD_RES (1), (1): Xaa is C or S
XAPTQLSAISVLYLDDSSNVILKNYQNMVV

SEQ ID NO: 44384 - protein, 34 aa, Artificial Sequence
  Cyclic GFR-binding peptide
  MOD_RES (6), (7): Xaa is C or S
AVPKAXXAPTKLSAISVLYLDSSNNVILKNYQNM

SEQ ID NO: 44385 - protein, 34 aa, Artificial Sequence
  Cyclic GFR-binding peptide
  MOD_RES (5), (6): Xaa is C or S
VPKAXXAPTKLNAISVLYFDSSNNVILKKYRNMV

SEQ ID NO: 44386 - protein, 37 aa, Artificial Sequence; identical to SEQ ID NO: 5933
  Cyclic GFR-binding peptide
  MOD_RES (6), (7): Xaa is C or S

SEQ ID NO: 44387 - protein, 30 aa, Artificial Sequence
  Cyclic GFR-binding peptide
  MOD_RES (30), (30): Xaa is C or S
PQALSAISILYLVGRKPKVLKNYQMIVRSX

SEQ ID NO: 44388 - protein, 28 aa, Artificial Sequence
  Cyclic GFR-binding peptide
  MOD_RES (28), (28): Xaa is C or S
ALSAISILYLVGRKPKVLKNYQMIVRSX

SEQ ID NO: 44389 - protein, 29 aa, Artificial Sequence
  Cyclic GFR-binding peptide
  MOD_RES (29), (29): Xaa is C or S
QDLSAISILYLVGRTPKVLKNYQMVVKSX

SEQ ID NO: 44390 - protein, 29 aa, Artificial Sequence
  Cyclic GFR-binding peptide
  MOD_RES (3), (3): Xaa is C or S
PTXAPTKLSAISVLYLDDSSNVILKNYQN

SEQ ID NO: 44391 - protein, 24 aa, Artificial Sequence
  Cyclic GFR-binding peptide
SATSILYYVGRKPKVLRKHRMIVR

SEQ ID NO: 44392 - protein, 33 aa, Artificial Sequence
  Cyclic GFR-binding peptide
  MOD_RES (3), (4): Xaa is C or S
APXXVPQALSATSILYYVGRKPKVLRKHRMIVR

SEQ ID NO: 44393 - protein, 35 aa, Artificial Sequence
  Cyclic GFR-binding peptide
  MOD_RES (2), (2): Xaa is C or S
QXRPTQVQLSPISVLYKEIVRKKPIFLKYHYTLED

SEQ ID NO: 44394 - protein, 26 aa, Artificial Sequence
  Cyclic GFR-binding peptide
VQLSPISVLYKEIVRKKPIFLKYHYT

SEQ ID NO: 44395 - protein, 31 aa, Artificial Sequence
  Cyclic GFR-binding peptide
  MOD_RES (5), (6): Xaa is C or S
SASPXXVSQDLSATSILYYIGKTPKILRKHR

SEQ ID NO: 44396 - protein, 35 aa, Artificial Sequence
  Cyclic GFR-binding peptide
  MOD_RES (3), (3): Xaa is C or S
VQXRPTQVQLSATSVLYYEIVRKKPIFLRKHRTLE

SEQ ID NO: 44397 - protein, 29 aa, Artificial Sequence
  Cyclic GFR-binding peptide
  MOD_RES (1), (2): Xaa is C or S
XXAPTQLSATSVLYYDDSSNVILRKHRNM

SEQ ID NO: 44398 - protein, 35 aa, Artificial Sequence; identical to SEQ ID NO: 5937
  Cyclic GFR-binding peptide
  MOD_RES (2), (3), (35): Xaa is C or S

SEQ ID NO: 44399 - protein, 29 aa, Artificial Sequence
  Cyclic GFR-binding peptide
  MOD_RES (28), (28): Xaa is C or S
LNAISMLYFDENEKVVLKKYRDMVVEGXG

SEQ ID NO: 44400 - protein, 30 aa, Artificial Sequence
  Cyclic GFR-binding peptide
PTQLSPISVLYKDDSSNVILKYHYNMVVRA

SEQ ID NO: 44401 - protein, 32 aa, Artificial Sequence
  Cyclic GFR-binding peptide
  MOD_RES (3), (4): Xaa is C or S
KAXXVPTKLNAISVLYFDDMGVPTLKKYREGM

SEQ ID NO: 44402 - protein, 36 aa, Artificial Sequence
  Cyclic GFR-binding peptide
  MOD_RES (6), (7): Xaa is C or S
YVPKPXXAPTKLSPISVLYKDDSSNVILKYHYNMVV

SEQ ID NO: 44403 - protein, 24 aa, Artificial Sequence
  Cyclic GFR-binding peptide
PTKLSATSVLYYDDMGVPTLRKHR

SEQ ID NO: 44404 - protein, 26 aa, Artificial Sequence
  Cyclic GFR-binding peptide
  MOD_RES (26), (26): Xaa is C or S
SAISILYLVGRKPKVLKNYQMIVRSX

SEQ ID NO: 44405 - protein, 35 aa, Artificial Sequence; identical to SEQ ID NO: 5938
  Cyclic GFR-binding peptide
  MOD_RES (4), (4): Xaa is C or S

SEQ ID NO: 44406 - protein, 29 aa, Artificial Sequence
  Cyclic GFR-binding peptide
  MOD_RES (2), (3): Xaa is C or S
PXXAPTQLSPISVLYKDDSSNVILKYHYN

SEQ ID NO: 44407 - protein, 33 aa, Artificial Sequence
  Cyclic GFR-binding peptide
  MOD_RES (3), (3): Xaa is C or S
VQXRPTQVQLSAISVLYLEIVRKKPIFLKNYQT

SEQ ID NO: 44408 - protein, 36 aa, Artificial Sequence
  Cyclic GFR-binding peptide
  MOD_RES (6), (7): Xaa is C or S
ASASPXXVPQDLSAISILYLVGRTPKVLKNYQMVVK

SEQ ID NO: 44409 - protein, 36 aa, Artificial Sequence; identical to SEQ ID NO: 5940
  Cyclic GFR-binding peptide
  MOD_RES (2), (34), (36): Xaa is C or S

SEQ ID NO: 44410 - protein, 36 aa, Artificial Sequence; identical to SEQ ID NO: 5941
  Cyclic GFR-binding peptide
  MOD_RES (36), (36): Xaa is C or S

SEQ ID NO: 44411 - protein, 38 aa, Artificial Sequence; identical to SEQ ID NO: 5943
  Cyclic GFR-binding peptide
  MOD_RES (5), (6), (38): Xaa is C or S

SEQ ID NO: 44412 - protein, 21 aa, Artificial Sequence
  Cyclic GFR-binding peptide
NAISMLYFDENEKVVLKKYRD

SEQ ID NO: 44413 - protein, 30 aa, Artificial Sequence
  Cyclic GFR-binding peptide
  MOD_RES (28), (30): Xaa is C or S
LSPISMLYKDEYDKVVLKYHYEMVVEGXGX

SEQ ID NO: 44414 - protein, 36 aa, Artificial Sequence
  Cyclic GFR-binding peptide
  MOD_RES (33), (35): Xaa is C or S
VQLSAISVLYLEIVRKKPIFLKNYQTLEDHLAXKXE

SEQ ID NO: 44415 - protein, 32 aa, Artificial Sequence; identical to SEQ ID NO: 5946
  Cyclic GFR-binding peptide
  MOD_RES (1), (2): Xaa is C or S

SEQ ID NO: 44416 - protein, 28 aa, Artificial Sequence
  Cyclic GFR-binding peptide
  MOD_RES (2), (3): Xaa is C or S
PXXAPTKLSATSVLYYDDSSNVILRKHR

SEQ ID NO: 44417 - protein, 36 aa, Artificial Sequence; identical to SEQ ID NO: 5947
  Cyclic GFR-binding peptide
  MOD_RES (4), (5): Xaa is C or S

SEQ ID NO: 44418 - protein, 30 aa, Artificial Sequence
  Cyclic GFR-binding peptide
  MOD_RES (3), (4): Xaa is C or S
KAXXVPTELNAISMLYFDEYDKVVLKKYRE

SEQ ID NO: 44419 - protein, 29 aa, Artificial Sequence
  Cyclic GFR-binding peptide
  MOD_RES (2), (3): Xaa is C or S
PXXVPQDLSAISILYLVGRTPKVLKNYQM

SEQ ID NO: 44420 - protein, 28 aa, Artificial Sequence
  Cyclic GFR-binding peptide
VPTKLSATSVLYYDDMGVPTLRKHREGM

SEQ ID NO: 44421 - protein, 36 aa, Artificial Sequence
  Cyclic GFR-binding peptide
  MOD_RES (6), (7): Xaa is C or S
YVPKPXXAPTKLSATSVLYYDDSSNVILRKHRNMVV

SEQ ID NO: 44422 - protein, 27 aa, Artificial Sequence
  Cyclic GFR-binding peptide
APTKLSAISVLYLDSSNNVILKNYQNM

SEQ ID NO: 44423 - protein, 29 aa, Artificial Sequence
  Cyclic GFR-binding peptide
QLSATSVLYYEIVRKKPIFLRKHRTLEDH

SEQ ID NO: 44424 - protein, 24 aa, Artificial Sequence
  Cyclic GFR-binding peptide
ELNAISMLYFDEYDKVVLKKYREM

SEQ ID NO: 44425 - protein, 34 aa, Artificial Sequence; identical to SEQ ID NO: 5949
  Cyclic GFR-binding peptide
  MOD_RES (31), (33): Xaa is C or S

SEQ ID NO: 44426 - protein, 33 aa, Artificial Sequence
  Cyclic GFR-binding peptide
  MOD_RES (1), (2): Xaa is C or S
XXVPTKLNAISVLYFDDMGVPTLKKYREGMSVA

SEQ ID NO: 44427 - protein, 34 aa, Artificial Sequence; identical to SEQ ID NO: 5953
  Cyclic GFR-binding peptide
  MOD_RES (1), (2), (33): Xaa is C or S

SEQ ID NO: 44428 - protein, 28 aa, Artificial Sequence
  Cyclic GFR-binding peptide
  MOD_RES (2), (3): Xaa is C or S
PXXVPQALSAISILYLVGRKPKVLKNYQ

SEQ ID NO: 44429 - protein, 29 aa, Artificial Sequence
  Cyclic GFR-binding peptide
PTKLSPISVLYKDSSNNVILKYHYNMVVK

SEQ ID NO: 44430 - protein, 28 aa, Artificial Sequence
  Cyclic GFR-binding peptide
  MOD_RES (28), (28): Xaa is C or S
LNAISMLYFDENEKVVLKKYRDMVVEGX

SEQ ID NO: 44431 - protein, 30 aa, Artificial Sequence; identical to SEQ ID NO: 5954
  Cyclic GFR-binding peptide

SEQ ID NO: 44432 - protein, 25 aa, Artificial Sequence
  Cyclic GFR-binding peptide
TELSATSMLYYDENEKVVLRKHRDM

SEQ ID NO: 44433 - protein, 21 aa, Artificial Sequence
  Cyclic GFR-binding peptide
SPISILYKIGKTPKILKYHYM

SEQ ID NO: 44434 - protein, 30 aa, Artificial Sequence
  Cyclic GFR-binding peptide
  MOD_RES (1), (2): Xaa is C or S
XXAPTQLSPISVLYKDDSSNVILKYHYNMV

SEQ ID NO: 44435 - protein, 28 aa, Artificial Sequence
  Cyclic GFR-binding peptide
  MOD_RES (27), (27): Xaa is C or S
SPISVLYKDDSSNVILKYHYNMVVRAXG

SEQ ID NO: 44436 - protein, 28 aa, Artificial Sequence
  Cyclic GFR-binding peptide
TKLSATSVLYYDDMGVPTLRKHREGMSV

SEQ ID NO: 44437 - protein, 25 aa, Artificial Sequence
  Cyclic GFR-binding peptide
DLSPISILYKIGKTPKILKYHYMIV

SEQ ID NO: 44438 - protein, 30 aa, Artificial Sequence
  Cyclic GFR-binding peptide
  MOD_RES (5), (5): Xaa is C or S
TKPTXAPTKLSAISVLYLDDSSNVILKNYQ

SEQ ID NO: 44439 - protein, 34 aa, Artificial Sequence
  Cyclic GFR-binding peptide
  MOD_RES (4), (5): Xaa is C or S
GKAXXVPTKLNAISVLYFDDMGVPTLKKYREGMS

SEQ ID NO: 44440 - protein, 30 aa, Artificial Sequence; identical to SEQ ID NO: 857
  Cyclic GFR-binding peptide

SEQ ID NO: 44441 - protein, 25 aa, Artificial Sequence
  Cyclic GFR-binding peptide
VPTELNAISMLYFDENEKVVLKKYR

SEQ ID NO: 44442 - protein, 23 aa, Artificial Sequence
  Cyclic GFR-binding peptide
ALSPISILYKVGRKPKVLKYHYM

SEQ ID NO: 44443 - protein, 31 aa, Artificial Sequence
  Cyclic GFR-binding peptide
  MOD_RES (4), (5): Xaa is C or S
ASPXXVSQDLSATSILYYIGKTPKILRKHRM

SEQ ID NO: 44444 - protein, 30 aa, Artificial Sequence
  Cyclic GFR-binding peptide
  MOD_RES (1), (2): Xaa is C or S
XXVPQDLNAISILYFVGRTPKVLKKYRMVV

SEQ ID NO: 44445 - protein, 27 aa, Artificial Sequence
  Cyclic GFR-binding peptide
TKLSAISVLYLDDSSNVILKNYQNMVV

SEQ ID NO: 44446 - protein, 34 aa, Artificial Sequence; identical to SEQ ID NO: 5962
  Cyclic GFR-binding peptide
  MOD_RES (1), (34): Xaa is C or S

SEQ ID NO: 44447 - protein, 24 aa, Artificial Sequence
  Cyclic GFR-binding peptide
TKLSPISVLYKDDSSNVILKYHYN

SEQ ID NO: 44448 - protein, 33 aa, Artificial Sequence
  Cyclic GFR-binding peptide
  MOD_RES (3), (4): Xaa is C or S
KAXXAPTKLSPISVLYKDSSNNVILKYHYNMVV

SEQ ID NO: 44449 - protein, 34 aa, Artificial Sequence; identical to SEQ ID NO: 5964
  Cyclic GFR-binding peptide
  MOD_RES (4), (4): Xaa is C or S

SEQ ID NO: 44450 - protein, 32 aa, Artificial Sequence
  Cyclic GFR-binding peptide
  MOD_RES (5), (6): Xaa is C or S
SASPXXVSQDLSAISILYLIGKTPKILKNYQM

SEQ ID NO: 44451 - protein, 29 aa, Artificial Sequence
  Cyclic GFR-binding peptide
LSATSVLYYEIVRKKPIFLRKHRTLEDHL

SEQ ID NO: 44452 - protein, 25 aa, Artificial Sequence
  Cyclic GFR-binding peptide
NAISMLYFDENEKVVLKKYRDMVVE

SEQ ID NO: 44453 - protein, 22 aa, Artificial Sequence
  Cyclic GFR-binding peptide
LSATSMLYYDEYDKVVLRKHRE

SEQ ID NO: 44454 - protein, 25 aa, Artificial Sequence
  Cyclic GFR-binding peptide
TELSPISMLYKDENEKVVLKYHYDM

SEQ ID NO: 44455 - protein, 28 aa, Artificial Sequence
  Cyclic GFR-binding peptide
VSQDLNAISILYFIGKTPKILKKYRMIV

SEQ ID NO: 44456 - protein, 34 aa, Artificial Sequence
  Cyclic GFR-binding peptide
  MOD_RES (4), (5): Xaa is C or S
ASPXXVSQDLSATSILYYIGKTPKILRKHRMIVK

SEQ ID NO: 44457 - protein, 32 aa, Artificial Sequence
  Cyclic GFR-binding peptide
  MOD_RES (30), (32): Xaa is C or S
TELSATSMLYYDENEKVVLRKHRDMVVEGXGX

SEQ ID NO: 44458 - protein, 35 aa, Artificial Sequence
  Cyclic GFR-binding peptide
  MOD_RES (6), (6): Xaa is C or S
VTKPTXAPTKLSAISVLYLDDSSNVILKNYQNMVV

SEQ ID NO: 44459 - protein, 44 aa, Artificial Sequence; identical to SEQ ID NO: 5969
  Cyclic GFR-binding peptide
  MOD_RES (5), (42), (44): Xaa is C or S

SEQ ID NO: 44460 - protein, 29 aa, Artificial Sequence
  Cyclic GFR-binding peptide
  MOD_RES (28), (28): Xaa is C or S
DLSAISILYLIGKTPKILKNYQMIVKSXK

SEQ ID NO: 44461 - protein, 41 aa, Artificial Sequence; identical to SEQ ID NO: 5974
  Cyclic GFR-binding peptide
  MOD_RES (4), (41): Xaa is C or S

SEQ ID NO: 44462 - protein, 39 aa, Artificial Sequence; identical to SEQ ID NO: 5972
  Cyclic GFR-binding peptide
  MOD_RES (5), (37), (39): Xaa is C or S

SEQ ID NO: 44463 - protein, 34 aa, Artificial Sequence
  Cyclic GFR-binding peptide
  MOD_RES (4), (5): Xaa is C or S
AAPXXVPQALSAISILYLVGRKPKVLKNYQMIVR

SEQ ID NO: 44464 - protein, 36 aa, Artificial Sequence; identical to SEQ ID NO: 5976
  Cyclic GFR-binding peptide
  MOD_RES (1), (2), (34), (36): Xaa is C or S

SEQ ID NO: 44465 - protein, 31 aa, Artificial Sequence
  Cyclic GFR-binding peptide
  MOD_RES (31), (31): Xaa is C or S
PTKLSPISVLYKDDSSNVILKYHYNMVVRSX

SEQ ID NO: 44466 - protein, 28 aa, Artificial Sequence
  Cyclic GFR-binding peptide
  MOD_RES (2), (2): Xaa is C or S
TXAPTKLSATSVLYYDDSSNVILRKHRN

SEQ ID NO: 44467 - protein, 26 aa, Artificial Sequence
  Cyclic GFR-binding peptide
TQLSAISVLYLDDSSNVILKNYQNMV

SEQ ID NO: 44468 - protein, 34 aa, Artificial Sequence
  Cyclic GFR-binding peptide
  MOD_RES (5), (5): Xaa is C or S
RNVQXRPTQVQLSAISVLYLEIVRKKPIFLKNYQ

SEQ ID NO: 44469 - protein, 36 aa, Artificial Sequence; identical to SEQ ID NO: 5978
  Cyclic GFR-binding peptide
  MOD_RES (2), (3), (35): Xaa is C or S

SEQ ID NO: 44470 - protein, 32 aa, Artificial Sequence
  Cyclic GFR-binding peptide
  MOD_RES (5), (6): Xaa is C or S
IPKAXXVPTELNAISMLYFDENEKVVLKKYRD

SEQ ID NO: 44471 - protein, 39 aa, Artificial Sequence; identical to SEQ ID NO: 5979
  Cyclic GFR-binding peptide
  MOD_RES (4), (5), (36), (38): Xaa is C or S

SEQ ID NO: 44472 - protein, 30 aa, Artificial Sequence; identical to SEQ ID NO: 5980
  Cyclic GFR-binding peptide

SEQ ID NO: 44473 - protein, 33 aa, Artificial Sequence; identical to SEQ ID NO: 5981
  Cyclic GFR-binding peptide
  MOD_RES (1), (2): Xaa is C or S

SEQ ID NO: 44474 - protein, 33 aa, Artificial Sequence
  Cyclic GFR-binding peptide
  MOD_RES (3), (4): Xaa is C or S
KPXXAPTQLSAISVLYLDDSSNVILKNYQNMVV

SEQ ID NO: 44475 - protein, 38 aa, Artificial Sequence; identical to SEQ ID NO: 5982
  Cyclic GFR-binding peptide
  MOD_RES (5), (6), (38): Xaa is C or S

SEQ ID NO: 44476 - protein, 32 aa, Artificial Sequence
  Cyclic GFR-binding peptide
  MOD_RES (2), (3): Xaa is C or S
AXXVPTELSPISMLYKDEYDKVVLKYHYEMVV

SEQ ID NO: 44477 - protein, 41 aa, Artificial Sequence; identical to SEQ ID NO: 5984
  Cyclic GFR-binding peptide
  MOD_RES (5), (6), (39), (41): Xaa is C or S

SEQ ID NO: 44478 - protein, 31 aa, Artificial Sequence; identical to SEQ ID NO: 5983
  Cyclic GFR-binding peptide
  MOD_RES (1), (1): Xaa is C or S

SEQ ID NO: 44479 - protein, 36 aa, Artificial Sequence
  Cyclic GFR-binding peptide
  MOD_RES (3), (3): Xaa is C or S
VQXRPTQVQLSATSVLYYEIVRKKPIFLRKHRTLED

SEQ ID NO: 44480 - protein, 29 aa, Artificial Sequence
  Cyclic GFR-binding peptide
RPTQVQLSPISVLYKEIVRKKPIFLKYHY

SEQ ID NO: 44481 - protein, 35 aa, Artificial Sequence; identical to SEQ ID NO: 5985
  Cyclic GFR-binding peptide
  MOD_RES (2), (3), (35): Xaa is C or S

SEQ ID NO: 44482 - protein, 31 aa, Artificial Sequence; identical to SEQ ID NO: 5986
  Cyclic GFR-binding peptide
  MOD_RES (31), (31): Xaa is C or S

SEQ ID NO: 44483 - protein, 28 aa, Artificial Sequence
  Cyclic GFR-binding peptide
  MOD_RES (2), (3): Xaa is C or S
PXXVPQALNAISILYFVGRKPKVLKKYR

SEQ ID NO: 44484 - protein, 29 aa, Artificial Sequence
  Cyclic GFR-binding peptide
  MOD_RES (2), (3): Xaa is C or S
AXXVPTELSPISMLYKDEYDKVVLKYHYE

SEQ ID NO: 44485 - protein, 29 aa, Artificial Sequence
  Cyclic GFR-binding peptide
  MOD_RES (29), (29): Xaa is C or S
ELSPISMLYKDEYDKVVLKYHYEMVVEGX

SEQ ID NO: 44486 - protein, 34 aa, Artificial Sequence
  Cyclic GFR-binding peptide
  MOD_RES (4), (5): Xaa is C or S
ASPXXVSQDLSPISILYKIGKTPKILKYHYMIVK

SEQ ID NO: 44487 - protein, 28 aa, Artificial Sequence
  Cyclic GFR-binding peptide
QDLSPISILYKIGKTPKILKYHYMIVKS

SEQ ID NO: 44488 - protein, 36 aa, Artificial Sequence; identical to SEQ ID NO: 5988
  Cyclic GFR-binding peptide
  MOD_RES (2), (3), (34), (36): Xaa is C or S

SEQ ID NO: 44489 - protein, 26 aa, Artificial Sequence
  Cyclic GFR-binding peptide
SATSVLYYDDSSNVILRKHRNMVVRS

SEQ ID NO: 44490 - protein, 39 aa, Artificial Sequence; identical to SEQ ID NO: 5990
  Cyclic GFR-binding peptide
  MOD_RES (6), (7): Xaa is C or S

SEQ ID NO: 44491 - protein, 39 aa, Artificial Sequence; identical to SEQ ID NO: 5992
  Cyclic GFR-binding peptide
  MOD_RES (4), (5), (36), (38): Xaa is C or S

SEQ ID NO: 44492 - protein, 36 aa, Artificial Sequence; identical to SEQ ID NO: 5994
  Cyclic GFR-binding peptide
  MOD_RES (33), (35): Xaa is C or S

SEQ ID NO: 44493 - protein, 36 aa, Artificial Sequence
  Cyclic GFR-binding peptide
  MOD_RES (5), (5): Xaa is C or S
RNVQXRPTQVQLSAISVLYLEIVRKKPIFLKNYQTL

SEQ ID NO: 44494 - protein, 33 aa, Artificial Sequence
  Cyclic GFR-binding peptide
  MOD_RES (31), (33): Xaa is C or S
PTELSPISMLYKDENEKVVLKYHYDMVVEGXGX

SEQ ID NO: 44495 - protein, 37 aa, Artificial Sequence; identical to SEQ ID NO: 5995
  Cyclic GFR-binding peptide
  MOD_RES (2), (3), (36): Xaa is C or S

SEQ ID NO: 44496 - protein, 26 aa, Artificial Sequence
  Cyclic GFR-binding peptide
SATSVLYYDDSSNVILRKHRNMVVRA

SEQ ID NO: 44497 - protein, 33 aa, Artificial Sequence
  Cyclic GFR-binding peptide
  MOD_RES (30), (32): Xaa is C or S
KLSAISVLYLDDMGVPTLKNYQEGMSVAEXGXR

SEQ ID NO: 44498 - protein, 27 aa, Artificial Sequence
  Cyclic GFR-binding peptide
  MOD_RES (1), (1): Xaa is C or S
XAPTKLSPISVLYKDDSSNVILKYHYN

SEQ ID NO: 44499 - protein, 27 aa, Artificial Sequence
  Cyclic GFR-binding peptide
ALNAISILYFVGRKPKVLKKYRMIVRS

SEQ ID NO: 44500 - protein, 28 aa, Artificial Sequence
  Cyclic GFR-binding peptide
TKLSPISVLYKDDSSNVILKYHYNMVVR

SEQ ID NO: 44501 - protein, 24 aa, Artificial Sequence
  Cyclic GFR-binding peptide
PQDLNAISILYFVGRTPKVLKKYR

SEQ ID NO: 44502 - protein, 37 aa, Artificial Sequence
  Cyclic GFR-binding peptide
  MOD_RES (4), (4): Xaa is C or S
NVQXRPTQVQLSPISVLYKEIVRKKPIFLKYHYTLED

SEQ ID NO: 44503 - protein, 29 aa, Artificial Sequence
  Cyclic GFR-binding peptide
  MOD_RES (29), (29): Xaa is C or S
QLSPISVLYKDDSSNVILKYHYNMVVRAX

SEQ ID NO: 44504 - protein, 31 aa, Artificial Sequence
  Cyclic GFR-binding peptide
  MOD_RES (29), (31): Xaa is C or S
ELSPISMLYKDEYDKVVLKYHYEMVVEGXGX

SEQ ID NO: 44505 - protein, 28 aa, Artificial Sequence
  Cyclic GFR-binding peptide
  MOD_RES (1), (2): Xaa is C or S
XXVPTKLSAISVLYLDDMGVPTLKNYQE

SEQ ID NO: 44506 - protein, 24 aa, Artificial Sequence
  Cyclic GFR-binding peptide
TELSATSMLYYDEYDKVVLRKHRE

SEQ ID NO: 44507 - protein, 29 aa, Artificial Sequence
  Cyclic GFR-binding peptide
  MOD_RES (1), (2): Xaa is C or S
XXAPTQLSPISVLYKDDSSNVILKYHYNM

SEQ ID NO: 44508 - protein, 33 aa, Artificial Sequence
  Cyclic GFR-binding peptide
  MOD_RES (31), (33): Xaa is C or S
LSAISVLYLEIVRKKPIFLKNYQTLEDHLAXKX

SEQ ID NO: 44509 - protein, 22 aa, Artificial Sequence
  Cyclic GFR-binding peptide
DLSATSILYYVGRTPKVLRKHR

SEQ ID NO: 44510 - protein, 41 aa, Artificial Sequence; identical to SEQ ID NO: 6003
  Cyclic GFR-binding peptide
  MOD_RES (6), (7), (39), (41): Xaa is C or S

SEQ ID NO: 44511 - protein, 25 aa, Artificial Sequence
  Cyclic GFR-binding peptide
SATSVLYYDDMGVPTLRKHREGMSV

SEQ ID NO: 44512 - protein, 36 aa, Artificial Sequence; identical to SEQ ID NO: 6005
  Cyclic GFR-binding peptide
  MOD_RES (36), (36): Xaa is C or S

SEQ ID NO: 44513 - protein, 37 aa, Artificial Sequence; identical to SEQ ID NO: 6007
  Cyclic GFR-binding peptide
  MOD_RES (4), (5), (37): Xaa is C or S

SEQ ID NO: 44514 - protein, 30 aa, Artificial Sequence
  Cyclic GFR-binding peptide
  MOD_RES (4), (5): Xaa is C or S
GKAXXVPTKLSATSVLYYDDMGVPTLRKHR

SEQ ID NO: 44515 - protein, 33 aa, Artificial Sequence; identical to SEQ ID NO: 6009
  Cyclic GFR-binding peptide
  MOD_RES (31), (33): Xaa is C or S

SEQ ID NO: 44516 - protein, 40 aa, Artificial Sequence; identical to SEQ ID NO: 6010
  Cyclic GFR-binding peptide
  MOD_RES (5), (6), (37), (39): Xaa is C or S

SEQ ID NO: 44517 - protein, 30 aa, Artificial Sequence
  Cyclic GFR-binding peptide
TQVQLSPISVLYKEIVRKKPIFLKYHYTLE

SEQ ID NO: 44518 - protein, 34 aa, Artificial Sequence
  Cyclic GFR-binding peptide
  MOD_RES (31), (33): Xaa is C or S
PTKLSPISVLYKDDSSNVILKYHYNMVVRSXGXH

SEQ ID NO: 44519 - protein, 25 aa, Artificial Sequence
  Cyclic GFR-binding peptide
PQALSAISILYLVGRKPKVLKNYQM

SEQ ID NO: 44520 - protein, 32 aa, Artificial Sequence
  Cyclic GFR-binding peptide
  MOD_RES (2), (3): Xaa is C or S
PXXAPTQLSPISVLYKDDSSNVILKYHYNMVV

SEQ ID NO: 44521 - protein, 34 aa, Artificial Sequence; identical to SEQ ID NO: 6014
  Cyclic GFR-binding peptide
  MOD_RES (1), (2), (33): Xaa is C or S

SEQ ID NO: 44522 - protein, 26 aa, Artificial Sequence
  Cyclic GFR-binding peptide
TELSATSMLYYDEYDKVVLRKHREMV

SEQ ID NO: 44523 - protein, 39 aa, Artificial Sequence; identical to SEQ ID NO: 6015
  Cyclic GFR-binding peptide
  MOD_RES (2), (39): Xaa is C or S

SEQ ID NO: 44524 - protein, 24 aa, Artificial Sequence
  Cyclic GFR-binding peptide
LSATSVLYYDDMGVPTLRKHREGM

SEQ ID NO: 44525 - protein, 28 aa, Artificial Sequence
  Cyclic GFR-binding peptide
QLSAISVLYLEIVRKKPIFLKNYQTLED

SEQ ID NO: 44526 - protein, 33 aa, Artificial Sequence; identical to SEQ ID NO: 6017
  Cyclic GFR-binding peptide
  MOD_RES (1), (2): Xaa is C or S

SEQ ID NO: 44527 - protein, 41 aa, Artificial Sequence; identical to SEQ ID NO: 6018
  Cyclic GFR-binding peptide
  MOD_RES (5), (5): Xaa is C or S

SEQ ID NO: 44528 - protein, 23 aa, Artificial Sequence
  Cyclic GFR-binding peptide
LSAISILYLIGKTPKILKNYQMI

SEQ ID NO: 44529 - protein, 35 aa, Artificial Sequence
  Cyclic GFR-binding peptide
  MOD_RES (3), (4): Xaa is C or S
KAXXVPTKLSATSVLYYDDMGVPTLRKHREGMSVA

SEQ ID NO: 44530 - protein, 35 aa, Artificial Sequence; identical to SEQ ID NO: 6020
  Cyclic GFR-binding peptide
  MOD_RES (1), (32), (34): Xaa is C or S

SEQ ID NO: 44531 - protein, 32 aa, Artificial Sequence
  Cyclic GFR-binding peptide
  MOD_RES (6), (7): Xaa is C or S
ASAAPXXVPQALSATSILYYVGRKPKVLRKHR

SEQ ID NO: 44532 - protein, 32 aa, Artificial Sequence
  Cyclic GFR-binding peptide
  MOD_RES (29), (31): Xaa is C or S
KLSAISVLYLDDSSNVILKNYQNMVVRSXGXH

SEQ ID NO: 44533 - protein, 29 aa, Artificial Sequence
  Cyclic GFR-binding peptide
  MOD_RES (28), (28): Xaa is C or S
LSPISMLYKDEYDKVVLKYHYEMVVEGXG

SEQ ID NO: 44534 - protein, 37 aa, Artificial Sequence; identical to SEQ ID NO: 6021
  Cyclic GFR-binding peptide
  MOD_RES (3), (4), (35), (37): Xaa is C or S

SEQ ID NO: 44535 - protein, 36 aa, Artificial Sequence; identical to SEQ ID NO: 6022
  Cyclic GFR-binding peptide
  MOD_RES (4), (5): Xaa is C or S

SEQ ID NO: 44536 - protein, 32 aa, Artificial Sequence; identical to SEQ ID NO: 6024
  Cyclic GFR-binding peptide
  MOD_RES (1), (2): Xaa is C or S

SEQ ID NO: 44537 - protein, 21 aa, Artificial Sequence
  Cyclic GFR-binding peptide
SPISVLYKDSSNNVILKYHYN

SEQ ID NO: 44538 - protein, 30 aa, Artificial Sequence
  Cyclic GFR-binding peptide
  MOD_RES (27), (29): Xaa is C or S
LSAISILYLVGRTPKVLKNYQMVVKSXKXS

SEQ ID NO: 44539 - protein, 34 aa, Artificial Sequence; identical to SEQ ID NO: 6026
  Cyclic GFR-binding peptide
  MOD_RES (3), (4): Xaa is C or S

SEQ ID NO: 44540 - protein, 29 aa, Artificial Sequence
  Cyclic GFR-binding peptide
  MOD_RES (27), (29): Xaa is C or S
LSATSILYYIGKTPKILRKHRMIVKSXKX

SEQ ID NO: 44541 - protein, 33 aa, Artificial Sequence; identical to SEQ ID NO: 6027
  Cyclic GFR-binding peptide
  MOD_RES (1), (33): Xaa is C or S

SEQ ID NO: 44542 - protein, 39 aa, Artificial Sequence; identical to SEQ ID NO: 6028
  Cyclic GFR-binding peptide
  MOD_RES (6), (7), (39): Xaa is C or S

SEQ ID NO: 44543 - protein, 26 aa, Artificial Sequence
  Cyclic GFR-binding peptide
PQDLSAISILYLVGRTPKVLKNYQMV

SEQ ID NO: 44544 - protein, 26 aa, Artificial Sequence
  Cyclic GFR-binding peptide
DLSATSILYYVGRTPKVLRKHRMVVK

SEQ ID NO: 44545 - protein, 37 aa, Artificial Sequence; identical to SEQ ID NO: 6031
  Cyclic GFR-binding peptide
  MOD_RES (4), (5): Xaa is C or S

SEQ ID NO: 44546 - protein, 33 aa, Artificial Sequence
  Cyclic GFR-binding peptide
  MOD_RES (4), (5): Xaa is C or S
PKAXXVPTELSPISMLYKDENEKVVLKYHYDMV

SEQ ID NO: 44547 - protein, 34 aa, Artificial Sequence; identical to SEQ ID NO: 6032
  Cyclic GFR-binding peptide
  MOD_RES (1), (2), (34): Xaa is C or S

SEQ ID NO: 44548 - protein, 30 aa, Artificial Sequence
  Cyclic GFR-binding peptide
RPTQVQLSATSVLYYEIVRKKPIFLRKHRT

SEQ ID NO: 44549 - protein, 36 aa, Artificial Sequence; identical to SEQ ID NO: 6033
  Cyclic GFR-binding peptide
  MOD_RES (3), (4), (35): Xaa is C or S

SEQ ID NO: 44550 - protein, 28 aa, Artificial Sequence
  Cyclic GFR-binding peptide
  MOD_RES (1), (1): Xaa is C or S
XAPTQLSATSVLYYDDSSNVILRKHRNM

SEQ ID NO: 44551 - protein, 32 aa, Artificial Sequence
  Cyclic GFR-binding peptide
  MOD_RES (6), (7): Xaa is C or S
TVPKPXXAPTQLSAISVLYLDDSSNVILKNYQ

SEQ ID NO: 44552 - protein, 35 aa, Artificial Sequence
  Cyclic GFR-binding peptide
  MOD_RES (6), (7): Xaa is C or S
ASASPXXVSQDLSAISILYLIGKTPKILKNYQMIV

SEQ ID NO: 44553 - protein, 36 aa, Artificial Sequence; identical to SEQ ID NO: 6035
  Cyclic GFR-binding peptide
  MOD_RES (4), (36): Xaa is C or S

SEQ ID NO: 44554 - protein, 31 aa, Artificial Sequence
  Cyclic GFR-binding peptide
  MOD_RES (5), (5): Xaa is C or S
TKPTXAPTKLSATSVLYYDDSSNVILRKHRN

SEQ ID NO: 44555 - protein, 29 aa, Artificial Sequence
  Cyclic GFR-binding peptide
  MOD_RES (27), (29): Xaa is C or S
LSATSILYYVGRTPKVLRKHRMVVKSXKX

SEQ ID NO: 44556 - protein, 32 aa, Artificial Sequence
  Cyclic GFR-binding peptide
  MOD_RES (3), (4): Xaa is C or S
SPXXVSQDLSATSILYYIGKTPKILRKHRMIV

SEQ ID NO: 44557 - protein, 25 aa, Artificial Sequence
  Cyclic GFR-binding peptide
QDLSATSILYYIGKTPKILRKHRMI

SEQ ID NO: 44558 - protein, 29 aa, Artificial Sequence
  Cyclic GFR-binding peptide
SAISVLYLDSSNNVILKNYQAAAAAAAAA

SEQ ID NO: 44559 - protein, 29 aa, Artificial Sequence
  Cyclic GFR-binding peptide
  MOD_RES (27), (29): Xaa is C or S
SAISVLYLDSSNNVILKNYQNMVVKAXGX

SEQ ID NO: 44560 - protein, 35 aa, Artificial Sequence; identical to SEQ ID NO: 6037
  Cyclic GFR-binding peptide
  MOD_RES (3), (4): Xaa is C or S

SEQ ID NO: 44561 - protein, 32 aa, Artificial Sequence
  Cyclic GFR-binding peptide
  MOD_RES (29), (31): Xaa is C or S
KLSAISVLYLDSSNNVILKNYQNMVVKAXGXH

SEQ ID NO: 44562 - protein, 26 aa, Artificial Sequence
  Cyclic GFR-binding peptide
SATSMLYYDEYDKVVLRKHREMVVEG

SEQ ID NO: 44563 - protein, 27 aa, Artificial Sequence
  Cyclic GFR-binding peptide
VPQDLSAISILYLVGRTPKVLKNYQMV

SEQ ID NO: 44564 - protein, 30 aa, Artificial Sequence
  Cyclic GFR-binding peptide
  MOD_RES (4), (4): Xaa is C or S
KPTXAPTKLSPISVLYKDDSSNVILKYHYN

SEQ ID NO: 44565 - protein, 32 aa, Artificial Sequence
  Cyclic GFR-binding peptide
  MOD_RES (4), (5): Xaa is C or S
ASPXXVPQDLSATSILYYVGRTPKVLRKHRMV

SEQ ID NO: 44566 - protein, 32 aa, Artificial Sequence
  Cyclic GFR-binding peptide
  MOD_RES (3), (4): Xaa is C or S
KAXXVPTELSPISMLYKDENEKVVLKYHYDMV

SEQ ID NO: 44567 - protein, 25 aa, Artificial Sequence
  Cyclic GFR-binding peptide
LSPISILYKIGKTPKILKYHYMIVK

SEQ ID NO: 44568 - protein, 34 aa, Artificial Sequence; identical to SEQ ID NO: 6043
  Cyclic GFR-binding peptide
  MOD_RES (1), (32), (34): Xaa is C or S

SEQ ID NO: 44569 - protein, 24 aa, Artificial Sequence
  Cyclic GFR-binding peptide
TQLSAISVLYLDDSSNVILKNYQN

SEQ ID NO: 44570 - protein, 26 aa, Artificial Sequence
  Cyclic GFR-binding peptide
TKLSATSVLYYDDMGVPTLRKHREGM

SEQ ID NO: 44571 - protein, 36 aa, Artificial Sequence; identical to SEQ ID NO: 6045
  Cyclic GFR-binding peptide
  MOD_RES (1), (33), (35): Xaa is C or S

SEQ ID NO: 44572 - protein, 33 aa, Artificial Sequence; identical to SEQ ID NO: 6046
  Cyclic GFR-binding peptide
  MOD_RES (1), (2): Xaa is C or S

SEQ ID NO: 44573 - protein, 24 aa, Artificial Sequence
  Cyclic GFR-binding peptide
ELSATSMLYYDEYDKVVLRKHREM

SEQ ID NO: 44574 - protein, 26 aa, Artificial Sequence
  Cyclic GFR-binding peptide
  MOD_RES (26), (26): Xaa is C or S
NAISILYFVGRKPKVLKKYRMIVRSX

SEQ ID NO: 44575 - protein, 28 aa, Artificial Sequence
  Cyclic GFR-binding peptide
PTKLSATSVLYYDDSSNVILRKHRNMVV

SEQ ID NO: 44576 - protein, 34 aa, Artificial Sequence
  Cyclic GFR-binding peptide
  MOD_RES (31), (33): Xaa is C or S
PTKLSPISVLYKDSSNNVILKYHYNMVVKAXGXH

SEQ ID NO: 44577 - protein, 36 aa, Artificial Sequence; identical to SEQ ID NO: 6048
  Cyclic GFR-binding peptide
  MOD_RES (2), (3), (34), (36): Xaa is C or S

SEQ ID NO: 44578 - protein, 24 aa, Artificial Sequence
  Cyclic GFR-binding peptide
NAISVLYFEIVRKKPIFLKKYRTL

SEQ ID NO: 44579 - protein, 30 aa, Artificial Sequence
  Cyclic GFR-binding peptide
  MOD_RES (1), (1): Xaa is C or S
XVPTELSATSMLYYDENEKVVLRKHRDMVV

SEQ ID NO: 44580 - protein, 25 aa, Artificial Sequence
  Cyclic GFR-binding peptide
NAISVLYFDSSNNVILKKYRNMVVK

SEQ ID NO: 44581 - protein, 33 aa, Artificial Sequence; identical to SEQ ID NO: 6050
  Cyclic GFR-binding peptide
  MOD_RES (2), (3): Xaa is C or S

SEQ ID NO: 44582 - protein, 34 aa, Artificial Sequence
  Cyclic GFR-binding peptide
  MOD_RES (6), (7): Xaa is C or S
ASASPXXVPQDLSPISILYKVGRTPKVLKYHYMV

SEQ ID NO: 44583 - protein, 29 aa, Artificial Sequence
  Cyclic GFR-binding peptide
NAISMLYFDEYDKVVLKKYRAAAAAAAAA

SEQ ID NO: 44584 - protein, 32 aa, Artificial Sequence; identical to SEQ ID NO: 6052
  Cyclic GFR-binding peptide
  MOD_RES (1), (32): Xaa is C or S

SEQ ID NO: 44585 - protein, 32 aa, Artificial Sequence; identical to SEQ ID NO: 6053
  Cyclic GFR-binding peptide
  MOD_RES (1), (2): Xaa is C or S

SEQ ID NO: 44586 - protein, 29 aa, Artificial Sequence
  Cyclic GFR-binding peptide
PTKLSAISVLYLDDMGVPTLKNYQEGMSV

SEQ ID NO: 44587 - protein, 39 aa, Artificial Sequence; identical to SEQ ID NO: 6056
  Cyclic GFR-binding peptide
  MOD_RES (5), (6), (37), (39): Xaa is C or S

SEQ ID NO: 44588 - protein, 39 aa, Artificial Sequence; identical to SEQ ID NO: 6059
  Cyclic GFR-binding peptide
  MOD_RES (3), (4), (36), (38): Xaa is C or S

SEQ ID NO: 44589 - protein, 27 aa, Artificial Sequence
  Cyclic GFR-binding peptide
LSPISVLYKDSSNNVILKYHYNMVVKA

SEQ ID NO: 44590 - protein, 33 aa, Artificial Sequence; identical to SEQ ID NO: 6060
  Cyclic GFR-binding peptide

SEQ ID NO: 44591 - protein, 35 aa, Artificial Sequence
  Cyclic GFR-binding peptide
  MOD_RES (6), (7): Xaa is C or S
KIPKAXXVPTELSATSMLYYDENEKVVLRKHRDMV

SEQ ID NO: 44592 - protein, 33 aa, Artificial Sequence
  Cyclic GFR-binding peptide
  MOD_RES (3), (4): Xaa is C or S
KPXXAPTKLSATSVLYYDDSSNVILRKHRNMVV

SEQ ID NO: 44593 - protein, 28 aa, Artificial Sequence
  Cyclic GFR-binding peptide
PQDLNAISILYFVGRTPKVLKKYRMVVK

SEQ ID NO: 44594 - protein, 33 aa, Artificial Sequence
  Cyclic GFR-binding peptide
QVQLNAISVLYFEIVRKKPIFLKKYRTLEDHLA

SEQ ID NO: 44595 - protein, 34 aa, Artificial Sequence
  Cyclic GFR-binding peptide
  MOD_RES (5), (6): Xaa is C or S
VPKPXXAPTQLSPISVLYKDDSSNVILKYHYNMV

SEQ ID NO: 44596 - protein, 30 aa, Artificial Sequence
  Cyclic GFR-binding peptide
  MOD_RES (4), (5): Xaa is C or S
PKAXXVPTELNAISMLYFDEYDKVVLKKYR

SEQ ID NO: 44597 - protein, 39 aa, Artificial Sequence; identical to SEQ ID NO: 6064
  Cyclic GFR-binding peptide
  MOD_RES (5), (6), (37), (39): Xaa is C or S

SEQ ID NO: 44598 - protein, 30 aa, Artificial Sequence
  Cyclic GFR-binding peptide
VPTKLNAISVLYFDDMGVPTLKKYREGMSV

SEQ ID NO: 44599 - protein, 38 aa, Artificial Sequence; identical to SEQ ID NO: 6068
  Cyclic GFR-binding peptide
  MOD_RES (3), (35), (37): Xaa is C or S

SEQ ID NO: 44600 - protein, 37 aa, Artificial Sequence; identical to SEQ ID NO: 6069
  Cyclic GFR-binding peptide
  MOD_RES (5), (6), (37): Xaa is C or S

SEQ ID NO: 44601 - protein, 22 aa, Artificial Sequence
  Cyclic GFR-binding peptide
LSATSILYYVGRTPKVLRKHRM

SEQ ID NO: 44602 - protein, 32 aa, Artificial Sequence
  Cyclic GFR-binding peptide
  MOD_RES (31), (31): Xaa is C or S
PTKLSPISVLYKDSSNNVILKYHYNMVVKAXG

SEQ ID NO: 44603 - protein, 33 aa, Artificial Sequence; identical to SEQ ID NO: 6070
  Cyclic GFR-binding peptide
  MOD_RES (31), (33): Xaa is C or S

SEQ ID NO: 44604 - protein, 32 aa, Artificial Sequence
  Cyclic GFR-binding peptide
  MOD_RES (5), (6): Xaa is C or S
SASPXXVSQDLNAISILYFIGKTPKILKKYRM

SEQ ID NO: 44605 - protein, 31 aa, Artificial Sequence
  Cyclic GFR-binding peptide
  MOD_RES (30), (30): Xaa is C or S
PQALSAISILYLVGRKPKVLKNYQMIVRSXK

SEQ ID NO: 44606 - protein, 28 aa, Artificial Sequence
  Cyclic GFR-binding peptide
  MOD_RES (28), (28): Xaa is C or S
LNAISMLYFDEYDKVVLKKYREMVVEGX

SEQ ID NO: 44607 - protein, 38 aa, Artificial Sequence; identical to SEQ ID NO: 6073
  Cyclic GFR-binding peptide
  MOD_RES (6), (7): Xaa is C or S

SEQ ID NO: 44608 - protein, 32 aa, Artificial Sequence
  Cyclic GFR-binding peptide
  MOD_RES (2), (3): Xaa is C or S
AXXVPTELSATSMLYYDEYDKVVLRKHREMVV

SEQ ID NO: 44609 - protein, 24 aa, Artificial Sequence
  Cyclic GFR-binding peptide
SPISMLYKDENEKVVLKYHYDMVV

SEQ ID NO: 44610 - protein, 24 aa, Artificial Sequence
  Cyclic GFR-binding peptide
PQDLSPISILYKVGRTPKVLKYHY

SEQ ID NO: 44611 - protein, 32 aa, Artificial Sequence
  Cyclic GFR-binding peptide
  MOD_RES (4), (5): Xaa is C or S
PKPXXAPTKLSAISVLYLDDSSNVILKNYQNM

SEQ ID NO: 44612 - protein, 34 aa, Artificial Sequence
  Cyclic GFR-binding peptide
  MOD_RES (6), (7): Xaa is C or S
KVGKAXXVPTKLSAISVLYLDDMGVPTLKNYQEG

SEQ ID NO: 44613 - protein, 33 aa, Artificial Sequence
  Cyclic GFR-binding peptide
  MOD_RES (30), (32): Xaa is C or S
TKLSATSVLYYDDSSNVILRKHRNMVVRSXGXH

SEQ ID NO: 44614 - protein, 32 aa, Artificial Sequence
  Cyclic GFR-binding peptide
  MOD_RES (29), (31): Xaa is C or S
QDLNAISILYFIGKTPKILKKYRMIVKSXKXS

SEQ ID NO: 44615 - protein, 36 aa, Artificial Sequence
  Cyclic GFR-binding peptide
  MOD_RES (5), (6): Xaa is C or S
VGKAXXVPTKLSATSVLYYDDMGVPTLRKHREGMSV

SEQ ID NO: 44616 - protein, 37 aa, Artificial Sequence; identical to SEQ ID NO: 6075
  Cyclic GFR-binding peptide
  MOD_RES (35), (37): Xaa is C or S

SEQ ID NO: 44617 - protein, 30 aa, Artificial Sequence
  Cyclic GFR-binding peptide
  MOD_RES (30), (30): Xaa is C or S
KLSATSVLYYDDMGVPTLRKHREGMSVAEX

SEQ ID NO: 44618 - protein, 38 aa, Artificial Sequence; identical to SEQ ID NO: 6076
  Cyclic GFR-binding peptide
  MOD_RES (2), (3), (35), (37): Xaa is C or S

SEQ ID NO: 44619 - protein, 35 aa, Artificial Sequence; identical to SEQ ID NO: 6077
  Cyclic GFR-binding peptide
  MOD_RES (1), (33), (35): Xaa is C or S

SEQ ID NO: 44620 - protein, 28 aa, Artificial Sequence
  Cyclic GFR-binding peptide
  MOD_RES (2), (3): Xaa is C or S
PXXAPTQLSATSVLYYDDSSNVILRKHR

SEQ ID NO: 44621 - protein, 26 aa, Artificial Sequence
  Cyclic GFR-binding peptide
LSATSILYYVGRKPKVLRKHRMIVRS

SEQ ID NO: 44622 - protein, 36 aa, Artificial Sequence
  Cyclic GFR-binding peptide
  MOD_RES (6), (7): Xaa is C or S
SIPKAXXVPTELSPISMLYKDEYDKVVLKYHYEMVV

SEQ ID NO: 44623 - protein, 29 aa, Artificial Sequence
  Cyclic GFR-binding peptide
  MOD_RES (2), (3): Xaa is C or S
AXXVPTELSATSMLYYDENEKVVLRKHRD

SEQ ID NO: 44624 - protein, 24 aa, Artificial Sequence
  Cyclic GFR-binding peptide
QDLSATSILYYVGRTPKVLRKHRM

SEQ ID NO: 44625 - protein, 21 aa, Artificial Sequence
  Cyclic GFR-binding peptide
LSAISVLYLDDSSNVILKNYQ

SEQ ID NO: 44626 - protein, 29 aa, Artificial Sequence
  Cyclic GFR-binding peptide
  MOD_RES (27), (29): Xaa is C or S
SPISMLYKDENEKVVLKYHYDMVVEGXGX

SEQ ID NO: 44627 - protein, 28 aa, Artificial Sequence
  Cyclic GFR-binding peptide
TKLSAISVLYLDDSSNVILKNYQNMVVR

SEQ ID NO: 44628 - protein, 33 aa, Artificial Sequence
  Cyclic GFR-binding peptide
  MOD_RES (5), (6): Xaa is C or S
VPKPXXAPTKLSPISVLYKDDSSNVILKYHYNM

SEQ ID NO: 44629 - protein, 27 aa, Artificial Sequence
  Cyclic GFR-binding peptide
  MOD_RES (27), (27): Xaa is C or S
LSATSILYYIGKTPKILRKHRMIVKSX

SEQ ID NO: 44630 - protein, 24 aa, Artificial Sequence
  Cyclic GFR-binding peptide
TKLSATSVLYYDDMGVPTLRKHRE

SEQ ID NO: 44631 - protein, 35 aa, Artificial Sequence; identical to SEQ ID NO: 6081
  Cyclic GFR-binding peptide
  MOD_RES (1), (32), (34): Xaa is C or S

SEQ ID NO: 44632 - protein, 30 aa, Artificial Sequence
  Cyclic GFR-binding peptide
  MOD_RES (1), (2): Xaa is C or S
XXVPTELSATSMLYYDENEKVVLRKHRDMV

SEQ ID NO: 44633 - protein, 24 aa, Artificial Sequence
  Cyclic GFR-binding peptide
QLSPISVLYKEIVRKKPIFLKYHY

SEQ ID NO: 44634 - protein, 25 aa, Artificial Sequence
  Cyclic GFR-binding peptide
PTKLNAISVLYFDDMGVPTLKKYRE

SEQ ID NO: 44635 - protein, 34 aa, Artificial Sequence; identical to SEQ ID NO: 6092
  Cyclic GFR-binding peptide
  MOD_RES (2), (3), (34): Xaa is C or S

SEQ ID NO: 44636 - protein, 33 aa, Artificial Sequence
  Cyclic GFR-binding peptide
  MOD_RES (7), (7): Xaa is C or S
HVTKPTXAPTKLSPISVLYKDDSSNVILKYHYN

SEQ ID NO: 44637 - protein, 34 aa, Artificial Sequence; identical to SEQ ID NO: 6093
  Cyclic GFR-binding peptide
  MOD_RES (2), (3): Xaa is C or S

SEQ ID NO: 44638 - protein, 33 aa, Artificial Sequence; identical to SEQ ID NO: 6094
  Cyclic GFR-binding peptide
  MOD_RES (1), (2): Xaa is C or S

SEQ ID NO: 44639 - protein, 33 aa, Artificial Sequence; identical to SEQ ID NO: 6095
  Cyclic GFR-binding peptide
  MOD_RES (32), (32): Xaa is C or S

SEQ ID NO: 44640 - protein, 36 aa, Artificial Sequence
  Cyclic GFR-binding peptide
  MOD_RES (3), (3): Xaa is C or S
VQXRPTQVQLNAISVLYFEIVRKKPIFLKKYRTLED

SEQ ID NO: 44641 - protein, 33 aa, Artificial Sequence; identical to SEQ ID NO: 6096
  Cyclic GFR-binding peptide
  MOD_RES (1), (33): Xaa is C or S

SEQ ID NO: 44642 - protein, 24 aa, Artificial Sequence
  Cyclic GFR-binding peptide
LSAISVLYLDDMGVPTLKNYQEGM

SEQ ID NO: 44643 - protein, 31 aa, Artificial Sequence; identical to SEQ ID NO: 6097
  Cyclic GFR-binding peptide

SEQ ID NO: 44644 - protein, 37 aa, Artificial Sequence; identical to SEQ ID NO: 6098
  Cyclic GFR-binding peptide
  MOD_RES (4), (5), (36): Xaa is C or S

SEQ ID NO: 44645 - protein, 29 aa, Artificial Sequence
  Cyclic GFR-binding peptide
  MOD_RES (1), (2): Xaa is C or S
XXVPQDLNAISILYFVGRTPKVLKKYRMV

SEQ ID NO: 44646 - protein, 29 aa, Artificial Sequence
  Cyclic GFR-binding peptide
  MOD_RES (28), (28): Xaa is C or S
DLNAISILYFIGKTPKILKKYRMIVKSXK

SEQ ID NO: 44647 - protein, 25 aa, Artificial Sequence
  Cyclic GFR-binding peptide
SATSILYYVGRKPKVLRKHRMIVRS

SEQ ID NO: 44648 - protein, 38 aa, Artificial Sequence
  Cyclic GFR-binding peptide
  MOD_RES (6), (7): Xaa is C or S
KVGKAXXVPTKLSAISVLYLDDMGVPTLKNYQEGMSVA

SEQ ID NO: 44649 - protein, 32 aa, Artificial Sequence
  Cyclic GFR-binding peptide
  MOD_RES (2), (3): Xaa is C or S
PXXAPTKLSPISVLYKDDSSNVILKYHYNMVV

SEQ ID NO: 44650 - protein, 32 aa, Artificial Sequence
  Cyclic GFR-binding peptide
  MOD_RES (30), (32): Xaa is C or S
TQLSAISVLYLDDSSNVILKNYQNMVVRAXGX

SEQ ID NO: 44651 - protein, 34 aa, Artificial Sequence; identical to SEQ ID NO: 6102
  Cyclic GFR-binding peptide
  MOD_RES (32), (34): Xaa is C or S

SEQ ID NO: 44652 - protein, 32 aa, Artificial Sequence
  Cyclic GFR-binding peptide
  MOD_RES (29), (31): Xaa is C or S
QALSATSILYYVGRKPKVLRKHRMIVRSXKXS

SEQ ID NO: 44653 - protein, 23 aa, Artificial Sequence
  Cyclic GFR-binding peptide
LSATSVLYYDDSSNVILRKHRNM

SEQ ID NO: 44654 - protein, 31 aa, Artificial Sequence
  Cyclic GFR-binding peptide
  MOD_RES (3), (4): Xaa is C or S
KPXXAPTQLSAISVLYLDDSSNVILKNYQNM

SEQ ID NO: 44655 - protein, 34 aa, Artificial Sequence
  Cyclic GFR-binding peptide
  MOD_RES (4), (5): Xaa is C or S
PKAXXVPTELSPISMLYKDENEKVVLKYHYDMVV

SEQ ID NO: 44656 - protein, 31 aa, Artificial Sequence
  Cyclic GFR-binding peptide
  MOD_RES (2), (2): Xaa is C or S
QXRPTQVQLSAISVLYLEIVRKKPIFLKNYQ

SEQ ID NO: 44657 - protein, 33 aa, Artificial Sequence
  Cyclic GFR-binding peptide
  MOD_RES (30), (32): Xaa is C or S
SQDLSATSILYYIGKTPKILRKHRMIVKSXKXS

SEQ ID NO: 44658 - protein, 33 aa, Artificial Sequence
  Cyclic GFR-binding peptide
  MOD_RES (30), (32): Xaa is C or S
TELSPISMLYKDEYDKVVLKYHYEMVVEGXGXR

SEQ ID NO: 44659 - protein, 30 aa, Artificial Sequence
  Cyclic GFR-binding peptide
  MOD_RES (2), (3): Xaa is C or S
AXXVPTKLSATSVLYYDDMGVPTLRKHREG

SEQ ID NO: 44660 - protein, 31 aa, Artificial Sequence
  Cyclic GFR-binding peptide
  MOD_RES (5), (6): Xaa is C or S
SASPXXVPQDLNAISILYFVGRTPKVLKKYR

SEQ ID NO: 44661 - protein, 24 aa, Artificial Sequence
  Cyclic GFR-binding peptide
LSPISMLYKDENEKVVLKYHYDMV

SEQ ID NO: 44662 - protein, 30 aa, Artificial Sequence
  Cyclic GFR-binding peptide
  MOD_RES (27), (29): Xaa is C or S
SPISVLYKDSSNNVILKYHYNMVVKAXGXH

SEQ ID NO: 44663 - protein, 33 aa, Artificial Sequence
  Cyclic GFR-binding peptide
  MOD_RES (6), (7): Xaa is C or S
KVGKAXXVPTKLSAISVLYLDDMGVPTLKNYQE

SEQ ID NO: 44664 - protein, 37 aa, Artificial Sequence; identical to SEQ ID NO: 6108
  Cyclic GFR-binding peptide
  MOD_RES (2), (3), (34), (36): Xaa is C or S

SEQ ID NO: 44665 - protein, 29 aa, Artificial Sequence
  Cyclic GFR-binding peptide
  MOD_RES (27), (29): Xaa is C or S
SPISVLYKDDSSNVILKYHYNMVVRSXGX

SEQ ID NO: 44666 - protein, 31 aa, Artificial Sequence
  Cyclic GFR-binding peptide
  MOD_RES (30), (30): Xaa is C or S
NAISVLYFEIVRKKPIFLKKYRTLEDHLAXK

SEQ ID NO: 44667 - protein, 25 aa, Artificial Sequence
  Cyclic GFR-binding peptide
PTKLSATSVLYYDDMGVPTLRKHRE

SEQ ID NO: 44668 - protein, 27 aa, Artificial Sequence
  Cyclic GFR-binding peptide
VSQDLSPISILYKIGKTPKILKYHYMI

SEQ ID NO: 44669 - protein, 30 aa, Artificial Sequence
  Cyclic GFR-binding peptide
PTELSATSMLYYDEYDKVVLRKHREMVVEG

SEQ ID NO: 44670 - protein, 27 aa, Artificial Sequence
  Cyclic GFR-binding peptide
LSATSMLYYDENEKVVLRKHRDMVVEG

SEQ ID NO: 44671 - protein, 30 aa, Artificial Sequence; identical to SEQ ID NO: 859
  Cyclic GFR-binding peptide

SEQ ID NO: 44672 - protein, 31 aa, Artificial Sequence
  Cyclic GFR-binding peptide
VQLSAISVLYLEIVRKKPIFLKNYQTLEDHL

SEQ ID NO: 44673 - protein, 24 aa, Artificial Sequence
  Cyclic GFR-binding peptide
SQDLNAISILYFIGKTPKILKKYR

SEQ ID NO: 44674 - protein, 28 aa, Artificial Sequence
  Cyclic GFR-binding peptide
KLSAISVLYLDSSNNVILKNYQNMVVKA

SEQ ID NO: 44675 - protein, 32 aa, Artificial Sequence; identical to SEQ ID NO: 6113
  Cyclic GFR-binding peptide
  MOD_RES (1), (1): Xaa is C or S

SEQ ID NO: 44676 - protein, 25 aa, Artificial Sequence
  Cyclic GFR-binding peptide
QLSAISVLYLEIVRKKPIFLKNYQT

SEQ ID NO: 44677 - protein, 31 aa, Artificial Sequence
  Cyclic GFR-binding peptide
  MOD_RES (2), (3): Xaa is C or S
AXXVPTELSPISMLYKDEYDKVVLKYHYEMV

SEQ ID NO: 44678 - protein, 35 aa, Artificial Sequence
  Cyclic GFR-binding peptide
  MOD_RES (5), (6): Xaa is C or S
SASPXXVPQDLSATSILYYVGRTPKVLRKHRMVVK

SEQ ID NO: 44679 - protein, 23 aa, Artificial Sequence
  Cyclic GFR-binding peptide
TKLNAISVLYFDSSNNVILKKYR

SEQ ID NO: 44680 - protein, 25 aa, Artificial Sequence
  Cyclic GFR-binding peptide
VPTELSPISMLYKDEYDKVVLKYHY

SEQ ID NO: 44681 - protein, 38 aa, Artificial Sequence
  Cyclic GFR-binding peptide
  MOD_RES (5), (5): Xaa is C or S
RNVQXRPTQVQLNAISVLYFEIVRKKPIFLKKYRTLED

SEQ ID NO: 44682 - protein, 31 aa, Artificial Sequence; identical to SEQ ID NO: 6115
  Cyclic GFR-binding peptide
  MOD_RES (1), (1): Xaa is C or S

SEQ ID NO: 44683 - protein, 26 aa, Artificial Sequence
  Cyclic GFR-binding peptide
  MOD_RES (1), (1): Xaa is C or S
XVSQDLSAISILYLIGKTPKILKNYQ

SEQ ID NO: 44684 - protein, 38 aa, Artificial Sequence; identical to SEQ ID NO: 6116
  Cyclic GFR-binding peptide
  MOD_RES (2), (3), (35), (37): Xaa is C or S

SEQ ID NO: 44685 - protein, 35 aa, Artificial Sequence; identical to SEQ ID NO: 6119
  Cyclic GFR-binding peptide
  MOD_RES (4), (5): Xaa is C or S

SEQ ID NO: 44686 - protein, 23 aa, Artificial Sequence
  Cyclic GFR-binding peptide
SAISVLYLDDMGVPTLKNYQEGM

SEQ ID NO: 44687 - protein, 27 aa, Artificial Sequence
  Cyclic GFR-binding peptide
  MOD_RES (1), (2): Xaa is C or S
XXVPTKLNAISVLYFDDMGVPTLKKYR

SEQ ID NO: 44688 - protein, 30 aa, Artificial Sequence
  Cyclic GFR-binding peptide
  MOD_RES (1), (2): Xaa is C or S
XXAPTQLSAISVLYLDDSSNVILKNYQNMV

SEQ ID NO: 44689 - protein, 40 aa, Artificial Sequence; identical to SEQ ID NO: 6122
  Cyclic GFR-binding peptide
  MOD_RES (4), (5), (38), (40): Xaa is C or S

SEQ ID NO: 44690 - protein, 33 aa, Artificial Sequence; identical to SEQ ID NO: 6123
  Cyclic GFR-binding peptide
  MOD_RES (1), (1): Xaa is C or S

SEQ ID NO: 44691 - protein, 31 aa, Artificial Sequence
  Cyclic GFR-binding peptide
  MOD_RES (5), (6): Xaa is C or S
IPKAXXVPTELNAISMLYFDEYDKVVLKKYR

SEQ ID NO: 44692 - protein, 31 aa, Artificial Sequence
  Cyclic GFR-binding peptide
  MOD_RES (29), (31): Xaa is C or S
LNAISVLYFDDMGVPTLKKYREGMSVAEXGX

SEQ ID NO: 44693 - protein, 34 aa, Artificial Sequence
  Cyclic GFR-binding peptide
  MOD_RES (1), (1): Xaa is C or S
XRPTQVQLSATSVLYYEIVRKKPIFLRKHRTLED

SEQ ID NO: 44694 - protein, 24 aa, Artificial Sequence
  Cyclic GFR-binding peptide
SAISILYLVGRTPKVLKNYQMVVK

SEQ ID NO: 44695 - protein, 41 aa, Artificial Sequence; identical to SEQ ID NO: 6125
  Cyclic GFR-binding peptide
  MOD_RES (6), (7), (40): Xaa is C or S

SEQ ID NO: 44696 - protein, 28 aa, Artificial Sequence
  Cyclic GFR-binding peptide
PTQLSATSVLYYDDSSNVILRKHRNMVV

SEQ ID NO: 44697 - protein, 27 aa, Artificial Sequence
  Cyclic GFR-binding peptide
  MOD_RES (1), (1): Xaa is C or S
XVPQALSPISILYKVGRKPKVLKYHYM

SEQ ID NO: 44698 - protein, 32 aa, Artificial Sequence
  Cyclic GFR-binding peptide
  MOD_RES (2), (3): Xaa is C or S
AXXVPTELNAISMLYFDEYDKVVLKKYREMVV

SEQ ID NO: 44699 - protein, 30 aa, Artificial Sequence
  Cyclic GFR-binding peptide
  MOD_RES (29), (29): Xaa is C or S
QDLSAISILYLVGRTPKVLKNYQMVVKSXK

SEQ ID NO: 44700 - protein, 31 aa, Artificial Sequence
  Cyclic GFR-binding peptide
RPTQVQLNAISVLYFEIVRKKPIFLKKYRTL

SEQ ID NO: 44701 - protein, 36 aa, Artificial Sequence
  Cyclic GFR-binding peptide
  MOD_RES (6), (7): Xaa is C or S
KVGKAXXVPTKLSAISVLYLDDMGVPTLKNYQEGMS

SEQ ID NO: 44702 - protein, 27 aa, Artificial Sequence
  Cyclic GFR-binding peptide
QDLSPISILYKIGKTPKILKYHYMIVK

SEQ ID NO: 44703 - protein, 40 aa, Artificial Sequence; identical to SEQ ID NO: 6132
  Cyclic GFR-binding peptide
  MOD_RES (5), (6), (37), (39): Xaa is C or S

SEQ ID NO: 44704 - protein, 40 aa, Artificial Sequence; identical to SEQ ID NO: 6133
  Cyclic GFR-binding peptide
  MOD_RES (6), (7), (38), (40): Xaa is C or S

SEQ ID NO: 44705 - protein, 34 aa, Artificial Sequence
  Cyclic GFR-binding peptide
  MOD_RES (32), (34): Xaa is C or S
PTKLSAISVLYLDDMGVPTLKNYQEGMSVAEXGX

SEQ ID NO: 44706 - protein, 35 aa, Artificial Sequence; identical to SEQ ID NO: 6135
  Cyclic GFR-binding peptide
  MOD_RES (1), (2), (35): Xaa is C or S

SEQ ID NO: 44707 - protein, 32 aa, Artificial Sequence
  Cyclic GFR-binding peptide
  MOD_RES (1), (1): Xaa is C or S
XRPTQVQLSATSVLYYEIVRKKPIFLRKHRTL

SEQ ID NO: 44708 - protein, 36 aa, Artificial Sequence; identical to SEQ ID NO: 6136
  Cyclic GFR-binding peptide
  MOD_RES (35), (35): Xaa is C or S

SEQ ID NO: 44709 - protein, 38 aa, Artificial Sequence; identical to SEQ ID NO: 6137
  Cyclic GFR-binding peptide
  MOD_RES (4), (5), (37): Xaa is C or S

SEQ ID NO: 44710 - protein, 29 aa, Artificial Sequence
  Cyclic GFR-binding peptide
NAISILYFVGRTPKVLKKYRAAAAAAAAA

SEQ ID NO: 44711 - protein, 30 aa, Artificial Sequence
  Cyclic GFR-binding peptide
  MOD_RES (29), (29): Xaa is C or S
ELSPISMLYKDEYDKVVLKYHYEMVVEGXG

SEQ ID NO: 44712 - protein, 41 aa, Artificial Sequence; identical to SEQ ID NO: 6140
  Cyclic GFR-binding peptide
  MOD_RES (6), (7), (39), (41): Xaa is C or S

SEQ ID NO: 44713 - protein, 30 aa, Artificial Sequence
  Cyclic GFR-binding peptide
  MOD_RES (27), (29): Xaa is C or S
SAISVLYLDDSSNVILKNYQNMVVRSXGXH

SEQ ID NO: 44714 - protein, 37 aa, Artificial Sequence; identical to SEQ ID NO: 6141
  Cyclic GFR-binding peptide
  MOD_RES (4), (5), (37): Xaa is C or S

SEQ ID NO: 44715 - protein, 35 aa, Artificial Sequence; identical to SEQ ID NO: 6142
  Cyclic GFR-binding peptide
  MOD_RES (1), (2), (33), (35): Xaa is C or S

SEQ ID NO: 44716 - protein, 32 aa, Artificial Sequence
  Cyclic GFR-binding peptide
  MOD_RES (4), (5): Xaa is C or S
AAPXXVPQALSAISILYLVGRKPKVLKNYQMI

SEQ ID NO: 44717 - protein, 38 aa, Artificial Sequence; identical to SEQ ID NO: 6143
  Cyclic GFR-binding peptide
  MOD_RES (4), (5), (37): Xaa is C or S

SEQ ID NO: 44718 - protein, 29 aa, Artificial Sequence
  Cyclic GFR-binding peptide
APTKLSATSVLYYDDSSNVILRKHRNMVV

SEQ ID NO: 44719 - protein, 35 aa, Artificial Sequence; identical to SEQ ID NO: 6146
  Cyclic GFR-binding peptide
  MOD_RES (3), (4): Xaa is C or S

SEQ ID NO: 44720 - protein, 29 aa, Artificial Sequence
  Cyclic GFR-binding peptide
SATSMLYYDENEKVVLRKHRAAAAAAAAA

SEQ ID NO: 44721 - protein, 38 aa, Artificial Sequence
  Cyclic GFR-binding peptide
  MOD_RES (6), (7): Xaa is C or S
KVGKAXXVPTKLSATSVLYYDDMGVPTLRKHREGMSVA

SEQ ID NO: 44722 - protein, 23 aa, Artificial Sequence
  Cyclic GFR-binding peptide
LSPISMLYKDENEKVVLKYHYDM

SEQ ID NO: 44723 - protein, 29 aa, Artificial Sequence
  Cyclic GFR-binding peptide
QLNAISVLYFEIVRKKPIFLKKYRTLEDH

SEQ ID NO: 44724 - protein, 30 aa, Artificial Sequence
  Cyclic GFR-binding peptide
  MOD_RES (3), (3): Xaa is C or S
PTXAPTKLSAISVLYLDDSSNVILKNYQNM

SEQ ID NO: 44725 - protein, 34 aa, Artificial Sequence; identical to SEQ ID NO: 6148
  Cyclic GFR-binding peptide
  MOD_RES (31), (33): Xaa is C or S

SEQ ID NO: 44726 - protein, 27 aa, Artificial Sequence
  Cyclic GFR-binding peptide
TKLSAISVLYLDDMGVPTLKNYQEGMS

SEQ ID NO: 44727 - protein, 38 aa, Artificial Sequence; identical to SEQ ID NO: 6149
  Cyclic GFR-binding peptide
  MOD_RES (3), (4), (35), (37): Xaa is C or S

SEQ ID NO: 44728 - protein, 29 aa, Artificial Sequence
  Cyclic GFR-binding peptide
  MOD_RES (27), (29): Xaa is C or S
LSPISILYKIGKTPKILKYHYMIVKSXKX

SEQ ID NO: 44729 - protein, 32 aa, Artificial Sequence
  Cyclic GFR-binding peptide
  MOD_RES (3), (4): Xaa is C or S
KPXXAPTKLSPISVLYKDDSSNVILKYHYNMV

SEQ ID NO: 44730 - protein, 22 aa, Artificial Sequence
  Cyclic GFR-binding peptide
LSPISMLYKDENEKVVLKYHYD

SEQ ID NO: 44731 - protein, 41 aa, Artificial Sequence; identical to SEQ ID NO: 6152
  Cyclic GFR-binding peptide
  MOD_RES (7), (39), (41): Xaa is C or S

SEQ ID NO: 44732 - protein, 31 aa, Artificial Sequence; identical to SEQ ID NO: 6154
  Cyclic GFR-binding peptide
  MOD_RES (1), (1): Xaa is C or S

SEQ ID NO: 44733 - protein, 32 aa, Artificial Sequence
  Cyclic GFR-binding peptide
  MOD_RES (6), (7): Xaa is C or S
SIPKAXXVPTELSPISMLYKDEYDKVVLKYHY

SEQ ID NO: 44734 - protein, 41 aa, Artificial Sequence; identical to SEQ ID NO: 6155
  Cyclic GFR-binding peptide
  MOD_RES (6), (7), (39), (41): Xaa is C or S

SEQ ID NO: 44735 - protein, 34 aa, Artificial Sequence
  Cyclic GFR-binding peptide
  MOD_RES (5), (6): Xaa is C or S
SAAPXXVPQALSAISILYLVGRKPKVLKNYQMIV

SEQ ID NO: 44736 - protein, 25 aa, Artificial Sequence
  Cyclic GFR-binding peptide
NAISMLYFDEYDKVVLKKYREMVVE

SEQ ID NO: 44737 - protein, 39 aa, Artificial Sequence; identical to SEQ ID NO: 6156
  Cyclic GFR-binding peptide
  MOD_RES (6), (38): Xaa is C or S

SEQ ID NO: 44738 - protein, 28 aa, Artificial Sequence
  Cyclic GFR-binding peptide
VPTKLSAISVLYLDDMGVPTLKNYQEGM

SEQ ID NO: 44739 - protein, 31 aa, Artificial Sequence; identical to SEQ ID NO: 6157
  Cyclic GFR-binding peptide
  MOD_RES (1), (1): Xaa is C or S

SEQ ID NO: 44740 - protein, 41 aa, Artificial Sequence; identical to SEQ ID NO: 6158
  Cyclic GFR-binding peptide
  MOD_RES (6), (38), (40): Xaa is C or S

SEQ ID NO: 44741 - protein, 24 aa, Artificial Sequence
  Cyclic GFR-binding peptide
QLSATSVLYYDDSSNVILRKHRNM

SEQ ID NO: 44742 - protein, 25 aa, Artificial Sequence
  Cyclic GFR-binding peptide
TKLSPISVLYKDSSNNVILKYHYNM

SEQ ID NO: 44743 - protein, 35 aa, Artificial Sequence; identical to SEQ ID NO: 6159
  Cyclic GFR-binding peptide
  MOD_RES (4), (5): Xaa is C or S

SEQ ID NO: 44744 - protein, 32 aa, Artificial Sequence
  Cyclic GFR-binding peptide
  MOD_RES (2), (2): Xaa is C or S
QXRPTQVQLSAISVLYLEIVRKKPIFLKNYQT

SEQ ID NO: 44745 - protein, 35 aa, Artificial Sequence; identical to SEQ ID NO: 6162
  Cyclic GFR-binding peptide
  MOD_RES (32), (34): Xaa is C or S

SEQ ID NO: 44746 - protein, 34 aa, Artificial Sequence; identical to SEQ ID NO: 6164
  Cyclic GFR-binding peptide
  MOD_RES (2), (3): Xaa is C or S

SEQ ID NO: 44747 - protein, 32 aa, Artificial Sequence
  Cyclic GFR-binding peptide
  MOD_RES (30), (32): Xaa is C or S
TKLSAISVLYLDSSNNVILKNYQNMVVKAXGX

SEQ ID NO: 44748 - protein, 31 aa, Artificial Sequence
  Cyclic GFR-binding peptide
  MOD_RES (30), (30): Xaa is C or S
TQLSPISVLYKDDSSNVILKYHYNMVVRAXG

SEQ ID NO: 44749 - protein, 22 aa, Artificial Sequence
  Cyclic GFR-binding peptide
NAISVLYFEIVRKKPIFLKKYR

SEQ ID NO: 44750 - protein, 41 aa, Artificial Sequence; identical to SEQ ID NO: 6166
  Cyclic GFR-binding peptide
  MOD_RES (5), (6), (38), (40): Xaa is C or S

SEQ ID NO: 44751 - protein, 29 aa, Artificial Sequence
  Cyclic GFR-binding peptide
  MOD_RES (1), (1): Xaa is C or S
XVPTKLSATSVLYYDDMGVPTLRKHREGM

SEQ ID NO: 44752 - protein, 33 aa, Artificial Sequence
  Cyclic GFR-binding peptide
  MOD_RES (4), (4): Xaa is C or S
NVQXRPTQVQLSPISVLYKEIVRKKPIFLKYHY

SEQ ID NO: 44753 - protein, 22 aa, Artificial Sequence
  Cyclic GFR-binding peptide
ELSATSMLYYDEYDKVVLRKHR

SEQ ID NO: 44754 - protein, 37 aa, Artificial Sequence; identical to SEQ ID NO: 6169
  Cyclic GFR-binding peptide
  MOD_RES (3), (4), (37): Xaa is C or S

SEQ ID NO: 44755 - protein, 30 aa, Artificial Sequence
  Cyclic GFR-binding peptide
PTELSPISMLYKDENEKVVLKYHYDMVVEG

SEQ ID NO: 44756 - protein, 23 aa, Artificial Sequence
  Cyclic GFR-binding peptide
NAISILYFVGRTPKVLKKYRMVV

SEQ ID NO: 44757 - protein, 32 aa, Artificial Sequence; identical to SEQ ID NO: 6171
  Cyclic GFR-binding peptide
  MOD_RES (1), (2): Xaa is C or S

SEQ ID NO: 44758 - protein, 29 aa, Artificial Sequence
  Cyclic GFR-binding peptide
LSAISVLYLEIVRKKPIFLKNYQTLEDHL

SEQ ID NO: 44759 - protein, 21 aa, Artificial Sequence
  Cyclic GFR-binding peptide
LSPISILYKVGRTPKVLKYHY

SEQ ID NO: 44760 - protein, 26 aa, Artificial Sequence
  Cyclic GFR-binding peptide
ELSPISMLYKDENEKVVLKYHYDMVV

SEQ ID NO: 44761 - protein, 40 aa, Artificial Sequence; identical to SEQ ID NO: 6172
  Cyclic GFR-binding peptide
  MOD_RES (6), (7), (39): Xaa is C or S

SEQ ID NO: 44762 - protein, 29 aa, Artificial Sequence
  Cyclic GFR-binding peptide
PTQLSATSVLYYDDSSNVILRKHRNMVVR

SEQ ID NO: 44763 - protein, 29 aa, Artificial Sequence
  Cyclic GFR-binding peptide
  MOD_RES (3), (4): Xaa is C or S
KAXXVPTELNAISMLYFDENEKVVLKKYR

SEQ ID NO: 44764 - protein, 31 aa, Artificial Sequence
  Cyclic GFR-binding peptide
  MOD_RES (5), (6): Xaa is C or S
IPKAXXVPTELSPISMLYKDENEKVVLKYHY

SEQ ID NO: 44765 - protein, 26 aa, Artificial Sequence
  Cyclic GFR-binding peptide
QALNAISILYFVGRKPKVLKKYRMIV

SEQ ID NO: 44766 - protein, 40 aa, Artificial Sequence; identical to SEQ ID NO: 6180
  Cyclic GFR-binding peptide
  MOD_RES (6), (7), (38), (40): Xaa is C or S

SEQ ID NO: 44767 - protein, 28 aa, Artificial Sequence
  Cyclic GFR-binding peptide
SQDLSAISILYLIGKTPKILKNYQMIVK

SEQ ID NO: 44768 - protein, 23 aa, Artificial Sequence
  Cyclic GFR-binding peptide
DLSATSILYYVGRTPKVLRKHRM

SEQ ID NO: 44769 - protein, 26 aa, Artificial Sequence
  Cyclic GFR-binding peptide
PTELSPISMLYKDENEKVVLKYHYDM

SEQ ID NO: 44770 - protein, 23 aa, Artificial Sequence
  Cyclic GFR-binding peptide
QDLNAISILYFVGRTPKVLKKYR

SEQ ID NO: 44771 - protein, 34 aa, Artificial Sequence
  Cyclic GFR-binding peptide
  MOD_RES (4), (5): Xaa is C or S
PKAXXVPTELNAISMLYFDEYDKVVLKKYREMVV

SEQ ID NO: 44772 - protein, 28 aa, Artificial Sequence
  Cyclic GFR-binding peptide
  MOD_RES (28), (28): Xaa is C or S
ALNAISILYFVGRKPKVLKKYRMIVRSX

SEQ ID NO: 44773 - protein, 36 aa, Artificial Sequence; identical to SEQ ID NO: 6182
  Cyclic GFR-binding peptide
  MOD_RES (4), (5), (36): Xaa is C or S

SEQ ID NO: 44774 - protein, 29 aa, Artificial Sequence
  Cyclic GFR-binding peptide
TKLSPISVLYKDSSNNVILKYHYNMVVKA

SEQ ID NO: 44775 - protein, 28 aa, Artificial Sequence
  Cyclic GFR-binding peptide
TKLSAISVLYLDDMGVPTLKNYQEGMSV

SEQ ID NO: 44776 - protein, 24 aa, Artificial Sequence
  Cyclic GFR-binding peptide
LSATSMLYYDENEKVVLRKHRDMV

SEQ ID NO: 44777 - protein, 27 aa, Artificial Sequence
  Cyclic GFR-binding peptide
DLNAISILYFIGKTPKILKKYRMIVKS

SEQ ID NO: 44778 - protein, 20 aa, Artificial Sequence
  Cyclic GFR-binding peptide
SATSVLYYDDMGVPTLRKHR

SEQ ID NO: 44779 - protein, 26 aa, Artificial Sequence
  Cyclic GFR-binding peptide
KLSPISVLYKDDSSNVILKYHYNMVV

SEQ ID NO: 44780 - protein, 33 aa, Artificial Sequence
  Cyclic GFR-binding peptide
  MOD_RES (1), (1): Xaa is C or S
XRPTQVQLSAISVLYLEIVRKKPIFLKNYQTLE

SEQ ID NO: 44781 - protein, 27 aa, Artificial Sequence
  Cyclic GFR-binding peptide
PQDLNAISILYFVGRTPKVLKKYRMVV

SEQ ID NO: 44782 - protein, 27 aa, Artificial Sequence
  Cyclic GFR-binding peptide
APTKLSPISVLYKDSSNNVILKYHYNM

SEQ ID NO: 44783 - protein, 41 aa, Artificial Sequence; identical to SEQ ID NO: 6184
  Cyclic GFR-binding peptide
  MOD_RES (2), (39), (41): Xaa is C or S

SEQ ID NO: 44784 - protein, 26 aa, Artificial Sequence
  Cyclic GFR-binding peptide
QVQLNAISVLYFEIVRKKPIFLKKYR

SEQ ID NO: 44785 - protein, 32 aa, Artificial Sequence; identical to SEQ ID NO: 6185
  Cyclic GFR-binding peptide
  MOD_RES (1), (1): Xaa is C or S

SEQ ID NO: 44786 - protein, 22 aa, Artificial Sequence
  Cyclic GFR-binding peptide
KLSPISVLYKDDSSNVILKYHY

SEQ ID NO: 44787 - protein, 33 aa, Artificial Sequence; identical to SEQ ID NO: 6186
  Cyclic GFR-binding peptide
  MOD_RES (1), (2), (33): Xaa is C or S

SEQ ID NO: 44788 - protein, 29 aa, Artificial Sequence
  Cyclic GFR-binding peptide
SPISILYKIGKTPKILKYHYAAAAAAAAA

SEQ ID NO: 44789 - protein, 37 aa, Artificial Sequence; identical to SEQ ID NO: 6188
  Cyclic GFR-binding peptide
  MOD_RES (2), (2): Xaa is C or S

SEQ ID NO: 44790 - protein, 30 aa, Artificial Sequence
  Cyclic GFR-binding peptide
QLSAISVLYLEIVRKKPIFLKNYQTLEDHL

SEQ ID NO: 44791 - protein, 30 aa, Artificial Sequence; identical to SEQ ID NO: 6189
  Cyclic GFR-binding peptide

SEQ ID NO: 44792 - protein, 37 aa, Artificial Sequence; identical to SEQ ID NO: 6192
  Cyclic GFR-binding peptide
  MOD_RES (2), (3), (34), (36): Xaa is C or S

SEQ ID NO: 44793 - protein, 25 aa, Artificial Sequence
  Cyclic GFR-binding peptide
VSQDLSPISILYKIGKTPKILKYHY

SEQ ID NO: 44794 - protein, 39 aa, Artificial Sequence; identical to SEQ ID NO: 6194
  Cyclic GFR-binding peptide
  MOD_RES (5), (6), (38): Xaa is C or S

SEQ ID NO: 44795 - protein, 37 aa, Artificial Sequence; identical to SEQ ID NO: 6193
  Cyclic GFR-binding peptide
  MOD_RES (3), (4), (36): Xaa is C or S

SEQ ID NO: 44796 - protein, 28 aa, Artificial Sequence
  Cyclic GFR-binding peptide
  MOD_RES (1), (1): Xaa is C or S
XVPQALSPISILYKVGRKPKVLKYHYMI

SEQ ID NO: 44797 - protein, 26 aa, Artificial Sequence
  Cyclic GFR-binding peptide
LNAISMLYFDENEKVVLKKYRDMVVE

SEQ ID NO: 44798 - protein, 27 aa, Artificial Sequence
  Cyclic GFR-binding peptide
  MOD_RES (27), (27): Xaa is C or S
SAISVLYLDSSNNVILKNYQNMVVKAX

SEQ ID NO: 44799 - protein, 27 aa, Artificial Sequence
  Cyclic GFR-binding peptide
QALSAISILYLVGRKPKVLKNYQMIVR

SEQ ID NO: 44800 - protein, 36 aa, Artificial Sequence; identical to SEQ ID NO: 6197
  Cyclic GFR-binding peptide
  MOD_RES (1), (33), (35): Xaa is C or S

SEQ ID NO: 44801 - protein, 39 aa, Artificial Sequence; identical to SEQ ID NO: 6198
  Cyclic GFR-binding peptide
  MOD_RES (4), (5), (37), (39): Xaa is C or S

SEQ ID NO: 44802 - protein, 27 aa, Artificial Sequence
  Cyclic GFR-binding peptide
TQLSPISVLYKDDSSNVILKYHYNMVV

SEQ ID NO: 44803 - protein, 32 aa, Artificial Sequence
  Cyclic GFR-binding peptide
  MOD_RES (3), (4): Xaa is C or S
KAXXVPTELNAISMLYFDEYDKVVLKKYREMV

SEQ ID NO: 44804 - protein, 24 aa, Artificial Sequence
  Cyclic GFR-binding peptide
TELSPISMLYKDENEKVVLKYHYD

SEQ ID NO: 44805 - protein, 34 aa, Artificial Sequence; identical to SEQ ID NO: 6200
  Cyclic GFR-binding peptide
  MOD_RES (33), (33): Xaa is C or S

SEQ ID NO: 44806 - protein, 30 aa, Artificial Sequence
  Cyclic GFR-binding peptide
  MOD_RES (4), (5): Xaa is C or S
PKAXXVPTELSATSMLYYDENEKVVLRKHR

SEQ ID NO: 44807 - protein, 26 aa, Artificial Sequence
  Cyclic GFR-binding peptide
ALSPISILYKVGRKPKVLKYHYMIVR

SEQ ID NO: 44808 - protein, 31 aa, Artificial Sequence
  Cyclic GFR-binding peptide
  MOD_RES (1), (2): Xaa is C or S
XXVPTELSATSMLYYDENEKVVLRKHRDMVV

SEQ ID NO: 44809 - protein, 26 aa, Artificial Sequence
  Cyclic GFR-binding peptide
SATSVLYYEIVRKKPIFLRKHRTLED

SEQ ID NO: 44810 - protein, 27 aa, Artificial Sequence
  Cyclic GFR-binding peptide
  MOD_RES (26), (26): Xaa is C or S
SAISILYLIGKTPKILKNYQMIVKSXK

SEQ ID NO: 44811 - protein, 28 aa, Artificial Sequence
  Cyclic GFR-binding peptide
ELSPISMLYKDENEKVVLKYHYDMVVEG

SEQ ID NO: 44812 - protein, 35 aa, Artificial Sequence
  Cyclic GFR-binding peptide
  MOD_RES (32), (34): Xaa is C or S
QLSATSVLYYEIVRKKPIFLRKHRTLEDHLAXKXE

SEQ ID NO: 44813 - protein, 33 aa, Artificial Sequence; identical to SEQ ID NO: 6202
  Cyclic GFR-binding peptide
  MOD_RES (32), (32): Xaa is C or S

SEQ ID NO: 44814 - protein, 24 aa, Artificial Sequence
  Cyclic GFR-binding peptide
SPISILYKIGKTPKILKYHYMIVK

SEQ ID NO: 44815 - protein, 36 aa, Artificial Sequence; identical to SEQ ID NO: 6203
  Cyclic GFR-binding peptide

SEQ ID NO: 44816 - protein, 31 aa, Artificial Sequence
  Cyclic GFR-binding peptide
NAISVLYFEIVRKKPIFLKKYRAAAAAAAAA

SEQ ID NO: 44817 - protein, 27 aa, Artificial Sequence
  Cyclic GFR-binding peptide
  MOD_RES (1), (2): Xaa is C or S
XXVSQDLNAISILYFIGKTPKILKKYR

SEQ ID NO: 44818 - protein, 27 aa, Artificial Sequence
  Cyclic GFR-binding peptide
  MOD_RES (1), (2): Xaa is C or S
XXVPTKLSAISVLYLDDMGVPTLKNYQ

SEQ ID NO: 44819 - protein, 31 aa, Artificial Sequence
  Cyclic GFR-binding peptide
  MOD_RES (4), (5): Xaa is C or S
PKPXXAPTKLSPISVLYKDDSSNVILKYHYN

SEQ ID NO: 44820 - protein, 35 aa, Artificial Sequence; identical to SEQ ID NO: 6204
  Cyclic GFR-binding peptide
  MOD_RES (3), (4), (35): Xaa is C or S

SEQ ID NO: 44821 - protein, 34 aa, Artificial Sequence; identical to SEQ ID NO: 6205
  Cyclic GFR-binding peptide
  MOD_RES (2), (3): Xaa is C or S

SEQ ID NO: 44822 - protein, 29 aa, Artificial Sequence
  Cyclic GFR-binding peptide
  MOD_RES (28), (28): Xaa is C or S
LNAISVLYFDSSNNVILKKYRNMVVKAXG

SEQ ID NO: 44823 - protein, 26 aa, Artificial Sequence
  Cyclic GFR-binding peptide
LSAISVLYLDSSNNVILKNYQNMVVK

SEQ ID NO: 44824 - protein, 32 aa, Artificial Sequence
  Cyclic GFR-binding peptide
  MOD_RES (31), (31): Xaa is C or S
PTQLSATSVLYYDDSSNVILRKHRNMVVRAXG

SEQ ID NO: 44825 - protein, 33 aa, Artificial Sequence
  Cyclic GFR-binding peptide
  MOD_RES (33), (33): Xaa is C or S
VQLNAISVLYFEIVRKKPIFLKKYRTLEDHLAX

SEQ ID NO: 44826 - protein, 33 aa, Artificial Sequence; identical to SEQ ID NO: 6211
  Cyclic GFR-binding peptide
  MOD_RES (2), (3): Xaa is C or S

SEQ ID NO: 44827 - protein, 38 aa, Artificial Sequence; identical to SEQ ID NO: 6210
  Cyclic GFR-binding peptide
  MOD_RES (5), (37): Xaa is C or S

SEQ ID NO: 44828 - protein, 33 aa, Artificial Sequence
  Cyclic GFR-binding peptide
  MOD_RES (4), (5): Xaa is C or S
PKAXXVPTELSATSMLYYDENEKVVLRKHRDMV

SEQ ID NO: 44829 - protein, 37 aa, Artificial Sequence; identical to SEQ ID NO: 6212
  Cyclic GFR-binding peptide
  MOD_RES (6), (6): Xaa is C or S

SEQ ID NO: 44830 - protein, 29 aa, Artificial Sequence
  Cyclic GFR-binding peptide
VPTKLNAISVLYFDDMGVPTLKKYREGMS

SEQ ID NO: 44831 - protein, 35 aa, Artificial Sequence; identical to SEQ ID NO: 6214
  Cyclic GFR-binding peptide
  MOD_RES (1), (33), (35): Xaa is C or S

SEQ ID NO: 44832 - protein, 28 aa, Artificial Sequence
  Cyclic GFR-binding peptide
APTKLSPISVLYKDSSNNVILKYHYNMV

SEQ ID NO: 44833 - protein, 28 aa, Artificial Sequence
  Cyclic GFR-binding peptide
  MOD_RES (1), (2): Xaa is C or S
XXVPTELNAISMLYFDENEKVVLKKYRD

SEQ ID NO: 44834 - protein, 34 aa, Artificial Sequence
  Cyclic GFR-binding peptide
  MOD_RES (4), (5): Xaa is C or S
PKPXXAPTQLSPISVLYKDDSSNVILKYHYNMVV

SEQ ID NO: 44835 - protein, 30 aa, Artificial Sequence
  Cyclic GFR-binding peptide
  MOD_RES (3), (4): Xaa is C or S
KPXXAPTQLSATSVLYYDDSSNVILRKHRN

SEQ ID NO: 44836 - protein, 35 aa, Artificial Sequence; identical to SEQ ID NO: 6216
  Cyclic GFR-binding peptide
  MOD_RES (3), (4): Xaa is C or S

SEQ ID NO: 44837 - protein, 31 aa, Artificial Sequence
  Cyclic GFR-binding peptide
  MOD_RES (3), (4): Xaa is C or S
KAXXAPTKLSPISVLYKDSSNNVILKYHYNM

SEQ ID NO: 44838 - protein, 33 aa, Artificial Sequence
  Cyclic GFR-binding peptide
  MOD_RES (6), (7): Xaa is C or S
ASASPXXVSQDLSPISILYKIGKTPKILKYHYM

SEQ ID NO: 44839 - protein, 24 aa, Artificial Sequence
  Cyclic GFR-binding peptide
LNAISMLYFDENEKVVLKKYRDMV

SEQ ID NO: 44840 - protein, 31 aa, Artificial Sequence
  Cyclic GFR-binding peptide
  MOD_RES (4), (5): Xaa is C or S
ASPXXVPQDLSATSILYYVGRTPKVLRKHRM

SEQ ID NO: 44841 - protein, 39 aa, Artificial Sequence; identical to SEQ ID NO: 6218
  Cyclic GFR-binding peptide
  MOD_RES (4), (4): Xaa is C or S

SEQ ID NO: 44842 - protein, 23 aa, Artificial Sequence
  Cyclic GFR-binding peptide
TELNAISMLYFDENEKVVLKKYR

SEQ ID NO: 44843 - protein, 25 aa, Artificial Sequence
  Cyclic GFR-binding peptide
PQDLSATSILYYVGRTPKVLRKHRM

SEQ ID NO: 44844 - protein, 26 aa, Artificial Sequence
  Cyclic GFR-binding peptide
SATSMLYYDENEKVVLRKHRDMVVEG

SEQ ID NO: 44845 - protein, 25 aa, Artificial Sequence
  Cyclic GFR-binding peptide
TKLNAISVLYFDSSNNVILKKYRNM

SEQ ID NO: 44846 - protein, 40 aa, Artificial Sequence; identical to SEQ ID NO: 6220
  Cyclic GFR-binding peptide
  MOD_RES (5), (6), (37), (39): Xaa is C or S

SEQ ID NO: 44847 - protein, 35 aa, Artificial Sequence; identical to SEQ ID NO: 6221
  Cyclic GFR-binding peptide
  MOD_RES (2), (3), (34): Xaa is C or S

SEQ ID NO: 44848 - protein, 24 aa, Artificial Sequence
  Cyclic GFR-binding peptide
LSAISILYLVGRTPKVLKNYQMVV

SEQ ID NO: 44849 - protein, 27 aa, Artificial Sequence
  Cyclic GFR-binding peptide
  MOD_RES (27), (27): Xaa is C or S
SATSVLYYDDSSNVILRKHRNMVVRSX

SEQ ID NO: 44850 - protein, 29 aa, Artificial Sequence
  Cyclic GFR-binding peptide
PQDLSATSILYYVGRTPKVLRKHRMVVKS

SEQ ID NO: 44851 - protein, 24 aa, Artificial Sequence
  Cyclic GFR-binding peptide
NAISMLYFDENEKVVLKKYRDMVV

SEQ ID NO: 44852 - protein, 27 aa, Artificial Sequence
  Cyclic GFR-binding peptide
  MOD_RES (1), (2): Xaa is C or S
XXVPQDLSATSILYYVGRTPKVLRKHR

SEQ ID NO: 44853 - protein, 31 aa, Artificial Sequence
  Cyclic GFR-binding peptide
  MOD_RES (5), (6): Xaa is C or S
IPKAXXVPTELSATSMLYYDENEKVVLRKHR

SEQ ID NO: 44854 - protein, 45 aa, Artificial Sequence; identical to SEQ ID NO: 6223
  Cyclic GFR-binding peptide
  MOD_RES (5), (42), (44): Xaa is C or S

SEQ ID NO: 44855 - protein, 26 aa, Artificial Sequence
  Cyclic GFR-binding peptide
TELSPISMLYKDEYDKVVLKYHYEMV

SEQ ID NO: 44856 - protein, 30 aa, Artificial Sequence
  Cyclic GFR-binding peptide
  MOD_RES (1), (2): Xaa is C or S
XXVPQALNAISILYFVGRKPKVLKKYRMIV

SEQ ID NO: 44857 - protein, 29 aa, Artificial Sequence
  Cyclic GFR-binding peptide
VPTELSPISMLYKDENEKVVLKYHYDMVV

SEQ ID NO: 44858 - protein, 41 aa, Artificial Sequence; identical to SEQ ID NO: 6224
  Cyclic GFR-binding peptide
  MOD_RES (5), (6), (38), (40): Xaa is C or S

SEQ ID NO: 44859 - protein, 42 aa, Artificial Sequence; identical to SEQ ID NO: 6225
  Cyclic GFR-binding peptide
  MOD_RES (6), (7), (39), (41): Xaa is C or S

SEQ ID NO: 44860 - protein, 35 aa, Artificial Sequence
  Cyclic GFR-binding peptide
  MOD_RES (34), (34): Xaa is C or S
QVQLSATSVLYYEIVRKKPIFLRKHRTLEDHLAXK

SEQ ID NO: 44861 - protein, 29 aa, Artificial Sequence
  Cyclic GFR-binding peptide
  MOD_RES (27), (29): Xaa is C or S
SATSVLYYDDSSNVILRKHRNMVVRAXGX

SEQ ID NO: 44862 - protein, 40 aa, Artificial Sequence; identical to SEQ ID NO: 6228
  Cyclic GFR-binding peptide
  MOD_RES (2), (39): Xaa is C or S

SEQ ID NO: 44863 - protein, 38 aa, Artificial Sequence; identical to SEQ ID NO: 6229
  Cyclic GFR-binding peptide
  MOD_RES (4), (36), (38): Xaa is C or S

SEQ ID NO: 44864 - protein, 35 aa, Artificial Sequence; identical to SEQ ID NO: 6230
  Cyclic GFR-binding peptide
  MOD_RES (3), (4): Xaa is C or S

SEQ ID NO: 44865 - protein, 29 aa, Artificial Sequence
  Cyclic GFR-binding peptide
  MOD_RES (3), (4): Xaa is C or S
KPXXAPTQLSATSVLYYDDSSNVILRKHR

SEQ ID NO: 44866 - protein, 37 aa, Artificial Sequence; identical to SEQ ID NO: 6231
  Cyclic GFR-binding peptide
  MOD_RES (36), (36): Xaa is C or S

SEQ ID NO: 44867 - protein, 32 aa, Artificial Sequence
  Cyclic GFR-binding peptide
  MOD_RES (31), (31): Xaa is C or S
PTELNAISMLYFDENEKVVLKKYRDMVVEGXG

SEQ ID NO: 44868 - protein, 37 aa, Artificial Sequence; identical to SEQ ID NO: 6232
  Cyclic GFR-binding peptide
  MOD_RES (4), (5), (36): Xaa is C or S

SEQ ID NO: 44869 - protein, 33 aa, Artificial Sequence
  Cyclic GFR-binding peptide
  MOD_RES (31), (33): Xaa is C or S
LSATSVLYYEIVRKKPIFLRKHRTLEDHLAXKX

SEQ ID NO: 44870 - protein, 28 aa, Artificial Sequence
  Cyclic GFR-binding peptide
  MOD_RES (2), (3): Xaa is C or S
PXXAPTQLSPISVLYKDDSSNVILKYHY

SEQ ID NO: 44871 - protein, 33 aa, Artificial Sequence
  Cyclic GFR-binding peptide
  MOD_RES (5), (6): Xaa is C or S
IPKAXXVPTELSPISMLYKDEYDKVVLKYHYEM

SEQ ID NO: 44872 - protein, 25 aa, Artificial Sequence
  Cyclic GFR-binding peptide
VSQDLSATSILYYIGKTPKILRKHR

SEQ ID NO: 44873 - protein, 31 aa, Artificial Sequence
  Cyclic GFR-binding peptide
  MOD_RES (4), (5): Xaa is C or S
PKAXXAPTKLNAISVLYFDSSNNVILKKYRN

SEQ ID NO: 44874 - protein, 28 aa, Artificial Sequence
  Cyclic GFR-binding peptide
  MOD_RES (1), (2): Xaa is C or S
XXVPTELNAISMLYFDEYDKVVLKKYRE

SEQ ID NO: 44875 - protein, 29 aa, Artificial Sequence
  Cyclic GFR-binding peptide
VPTELSATSMLYYDENEKVVLRKHRDMVV

SEQ ID NO: 44876 - protein, 37 aa, Artificial Sequence; identical to SEQ ID NO: 6234
  Cyclic GFR-binding peptide
  MOD_RES (4), (5), (36): Xaa is C or S

SEQ ID NO: 44877 - protein, 41 aa, Artificial Sequence; identical to SEQ ID NO: 6236
  Cyclic GFR-binding peptide
  MOD_RES (6), (7), (38), (40): Xaa is C or S

SEQ ID NO: 44878 - protein, 26 aa, Artificial Sequence
  Cyclic GFR-binding peptide
QLSATSVLYYDDSSNVILRKHRNMVV

SEQ ID NO: 44879 - protein, 27 aa, Artificial Sequence
  Cyclic GFR-binding peptide
VSQDLSAISILYLIGKTPKILKNYQMI

SEQ ID NO: 44880 - protein, 31 aa, Artificial Sequence
  Cyclic GFR-binding peptide
  MOD_RES (1), (2): Xaa is C or S
XXAPTKLSAISVLYLDSSNNVILKNYQNMVV

SEQ ID NO: 44881 - protein, 30 aa, Artificial Sequence
  Cyclic GFR-binding peptide
  MOD_RES (29), (29): Xaa is C or S
QDLSATSILYYVGRTPKVLRKHRMVVKSXK

SEQ ID NO: 44882 - protein, 27 aa, Artificial Sequence
  Cyclic GFR-binding peptide
SAISILYLIGKTPKILKNYQIGKTPKI

SEQ ID NO: 44883 - protein, 27 aa, Artificial Sequence
  Cyclic GFR-binding peptide
QLSPISVLYKDDSSNVILKYHYNMVVR

SEQ ID NO: 44884 - protein, 33 aa, Artificial Sequence; identical to SEQ ID NO: 6241
  Cyclic GFR-binding peptide
  MOD_RES (1), (2): Xaa is C or S

SEQ ID NO: 44885 - protein, 27 aa, Artificial Sequence
  Cyclic GFR-binding peptide
KLSAISVLYLDDMGVPTLKNYQEGMSV

SEQ ID NO: 44886 - protein, 22 aa, Artificial Sequence
  Cyclic GFR-binding peptide
DLSPISILYKVGRTPKVLKYHY

SEQ ID NO: 44887 - protein, 26 aa, Artificial Sequence
  Cyclic GFR-binding peptide
ELSATSMLYYDENEKVVLRKHRDMVV

SEQ ID NO: 44888 - protein, 26 aa, Artificial Sequence
  Cyclic GFR-binding peptide
TQLSPISVLYKDDSSNVILKYHYNMV

SEQ ID NO: 44889 - protein, 29 aa, Artificial Sequence
  Cyclic GFR-binding peptide
PTQVQLSATSVLYYEIVRKKPIFLRKHRT

SEQ ID NO: 44890 - protein, 27 aa, Artificial Sequence
  Cyclic GFR-binding peptide
KLNAISVLYFDSSNNVILKKYRNMVVK

SEQ ID NO: 44891 - protein, 36 aa, Artificial Sequence; identical to SEQ ID NO: 6245
  Cyclic GFR-binding peptide
  MOD_RES (3), (35): Xaa is C or S

SEQ ID NO: 44892 - protein, 40 aa, Artificial Sequence; identical to SEQ ID NO: 6249
  Cyclic GFR-binding peptide
  MOD_RES (6), (7), (39): Xaa is C or S

SEQ ID NO: 44893 - protein, 39 aa, Artificial Sequence; identical to SEQ ID NO: 6250
  Cyclic GFR-binding peptide
  MOD_RES (6), (7), (38): Xaa is C or S

SEQ ID NO: 44894 - protein, 32 aa, Artificial Sequence
  Cyclic GFR-binding peptide
  MOD_RES (3), (4): Xaa is C or S
SPXXVSQDLSPISILYKIGKTPKILKYHYMIV

SEQ ID NO: 44895 - protein, 32 aa, Artificial Sequence
  Cyclic GFR-binding peptide
  MOD_RES (6), (7): Xaa is C or S
ASASPXXVPQDLNAISILYFVGRTPKVLKKYR

SEQ ID NO: 44896 - protein, 35 aa, Artificial Sequence
  Cyclic GFR-binding peptide
  MOD_RES (6), (7): Xaa is C or S
KIPKAXXVPTELSPISMLYKDENEKVVLKYHYDMV

SEQ ID NO: 44897 - protein, 36 aa, Artificial Sequence
  Cyclic GFR-binding peptide
  MOD_RES (6), (7): Xaa is C or S
ASASPXXVSQDLSPISILYKIGKTPKILKYHYMIVK

SEQ ID NO: 44898 - protein, 28 aa, Artificial Sequence
  Cyclic GFR-binding peptide
TKLSATSVLYYDDSSNVILRKHRNMVVR

SEQ ID NO: 44899 - protein, 39 aa, Artificial Sequence; identical to SEQ ID NO: 6255
  Cyclic GFR-binding peptide
  MOD_RES (6), (7), (39): Xaa is C or S

SEQ ID NO: 44900 - protein, 31 aa, Artificial Sequence; identical to SEQ ID NO: 6257
  Cyclic GFR-binding peptide
  MOD_RES (1), (1): Xaa is C or S

SEQ ID NO: 44901 - protein, 32 aa, Artificial Sequence
  Cyclic GFR-binding peptide
RPTQVQLSPISVLYKEIVRKKPIFLKYHYTLE

SEQ ID NO: 44902 - protein, 29 aa, Artificial Sequence
  Cyclic GFR-binding peptide
  MOD_RES (28), (28): Xaa is C or S
LSPISVLYKDSSNNVILKYHYNMVVKAXG

SEQ ID NO: 44903 - protein, 32 aa, Artificial Sequence; identical to SEQ ID NO: 6260
  Cyclic GFR-binding peptide
  MOD_RES (1), (2): Xaa is C or S

SEQ ID NO: 44904 - protein, 26 aa, Artificial Sequence
  Cyclic GFR-binding peptide
ELNAISMLYFDEYDKVVLKKYREMVV

SEQ ID NO: 44905 - protein, 37 aa, Artificial Sequence
  Cyclic GFR-binding peptide
  MOD_RES (34), (36): Xaa is C or S
QVQLSAISVLYLEIVRKKPIFLKNYQTLEDHLAXKXE

SEQ ID NO: 44906 - protein, 27 aa, Artificial Sequence
  Cyclic GFR-binding peptide
  MOD_RES (1), (1): Xaa is C or S
XAPTQLSAISVLYLDDSSNVILKNYQN

SEQ ID NO: 44907 - protein, 41 aa, Artificial Sequence; identical to SEQ ID NO: 6264
  Cyclic GFR-binding peptide
  MOD_RES (2), (39), (41): Xaa is C or S

SEQ ID NO: 44908 - protein, 35 aa, Artificial Sequence
  Cyclic GFR-binding peptide
  MOD_RES (5), (6): Xaa is C or S
IPKAXXVPTELNAISMLYFDENEKVVLKKYRDMVV

SEQ ID NO: 44909 - protein, 29 aa, Artificial Sequence
  Cyclic GFR-binding peptide
  MOD_RES (1), (2): Xaa is C or S
XXVSQDLNAISILYFIGKTPKILKKYRMI

SEQ ID NO: 44910 - protein, 35 aa, Artificial Sequence; identical to SEQ ID NO: 6265
  Cyclic GFR-binding peptide
  MOD_RES (2), (3), (35): Xaa is C or S

SEQ ID NO: 44911 - protein, 32 aa, Artificial Sequence
  Cyclic GFR-binding peptide
  MOD_RES (5), (6): Xaa is C or S
SASPXXVPQDLSAISILYLVGRTPKVLKNYQM

SEQ ID NO: 44912 - protein, 36 aa, Artificial Sequence
  Cyclic GFR-binding peptide
  MOD_RES (34), (36): Xaa is C or S
QVQLSATSVLYYEIVRKKPIFLRKHRTLEDHLAXKX

SEQ ID NO: 44913 - protein, 26 aa, Artificial Sequence
  Cyclic GFR-binding peptide
SQDLSAISILYLIGKTPKILKNYQMI

SEQ ID NO: 44914 - protein, 26 aa, Artificial Sequence
  Cyclic GFR-binding peptide
SQDLSPISILYKIGKTPKILKYHYMI

SEQ ID NO: 44915 - protein, 35 aa, Artificial Sequence; identical to SEQ ID NO: 6268
  Cyclic GFR-binding peptide
  MOD_RES (4), (5): Xaa is C or S

SEQ ID NO: 44916 - protein, 30 aa, Artificial Sequence
  Cyclic GFR-binding peptide
  MOD_RES (4), (5): Xaa is C or S
PKAXXVPTELSPISMLYKDENEKVVLKYHY

SEQ ID NO: 44917 - protein, 25 aa, Artificial Sequence
  Cyclic GFR-binding peptide
QDLSAISILYLVGRTPKVLKNYQMV

SEQ ID NO: 44918 - protein, 21 aa, Artificial Sequence
  Cyclic GFR-binding peptide
LSATSVLYYDDSSNVILRKHR

SEQ ID NO: 44919 - protein, 34 aa, Artificial Sequence; identical to SEQ ID NO: 6269
  Cyclic GFR-binding peptide
  MOD_RES (32), (34): Xaa is C or S

SEQ ID NO: 44920 - protein, 34 aa, Artificial Sequence; identical to SEQ ID NO: 6270
  Cyclic GFR-binding peptide
  MOD_RES (2), (3), (34): Xaa is C or S

SEQ ID NO: 44921 - protein, 30 aa, Artificial Sequence
  Cyclic GFR-binding peptide
  MOD_RES (3), (4): Xaa is C or S
SPXXVPQDLSATSILYYVGRTPKVLRKHRM

SEQ ID NO: 44922 - protein, 28 aa, Artificial Sequence
  Cyclic GFR-binding peptide
TKLSAISVLYLDSSNNVILKNYQNMVVK

SEQ ID NO: 44923 - protein, 31 aa, Artificial Sequence
  Cyclic GFR-binding peptide
  MOD_RES (30), (30): Xaa is C or S
SQDLSATSILYYIGKTPKILRKHRMIVKSXK

SEQ ID NO: 44924 - protein, 38 aa, Artificial Sequence; identical to SEQ ID NO: 6271
  Cyclic GFR-binding peptide
  MOD_RES (6), (7), (38): Xaa is C or S

SEQ ID NO: 44925 - protein, 26 aa, Artificial Sequence
  Cyclic GFR-binding peptide
VPQALSATSILYYVGRKPKVLRKHRM

SEQ ID NO: 44926 - protein, 30 aa, Artificial Sequence
  Cyclic GFR-binding peptide
  MOD_RES (28), (30): Xaa is C or S
SATSVLYYDDMGVPTLRKHREGMSVAEXGX

SEQ ID NO: 44927 - protein, 32 aa, Artificial Sequence
  Cyclic GFR-binding peptide
  MOD_RES (5), (6): Xaa is C or S
VPKAXXAPTKLSPISVLYKDSSNNVILKYHYN

SEQ ID NO: 44928 - protein, 28 aa, Artificial Sequence
  Cyclic GFR-binding peptide
  MOD_RES (28), (28): Xaa is C or S
DLSATSILYYIGKTPKILRKHRMIVKSX

SEQ ID NO: 44929 - protein, 41 aa, Artificial Sequence; identical to SEQ ID NO: 6281
  Cyclic GFR-binding peptide
  MOD_RES (3), (40): Xaa is C or S

SEQ ID NO: 44930 - protein, 29 aa, Artificial Sequence
  Cyclic GFR-binding peptide
PTELNAISMLYFDEYDKVVLKKYREMVVE

SEQ ID NO: 44931 - protein, 33 aa, Artificial Sequence
  Cyclic GFR-binding peptide
  MOD_RES (4), (5): Xaa is C or S
AAPXXVPQALSATSILYYVGRKPKVLRKHRMIV

SEQ ID NO: 44932 - protein, 28 aa, Artificial Sequence
  Cyclic GFR-binding peptide
PQALSPISILYKVGRKPKVLKYHYMIVR

SEQ ID NO: 44933 - protein, 37 aa, Artificial Sequence; identical to SEQ ID NO: 6282
  Cyclic GFR-binding peptide
  MOD_RES (2), (3), (35), (37): Xaa is C or S

SEQ ID NO: 44934 - protein, 22 aa, Artificial Sequence
  Cyclic GFR-binding peptide
LSPISVLYKDDSSNVILKYHYN

SEQ ID NO: 44935 - protein, 29 aa, Artificial Sequence
  Cyclic GFR-binding peptide
  MOD_RES (28), (28): Xaa is C or S
DLNAISILYFVGRTPKVLKKYRMVVKSXK

SEQ ID NO: 44936 - protein, 36 aa, Artificial Sequence; identical to SEQ ID NO: 6286
  Cyclic GFR-binding peptide
  MOD_RES (1), (2), (34), (36): Xaa is C or S

SEQ ID NO: 44937 - protein, 32 aa, Artificial Sequence
  Cyclic GFR-binding peptide
  MOD_RES (31), (31): Xaa is C or S
TKLSAISVLYLDDMGVPTLKNYQEGMSVAEXG

SEQ ID NO: 44938 - protein, 40 aa, Artificial Sequence; identical to SEQ ID NO: 6287
  Cyclic GFR-binding peptide
  MOD_RES (6), (7), (38), (40): Xaa is C or S

SEQ ID NO: 44939 - protein, 27 aa, Artificial Sequence
  Cyclic GFR-binding peptide
  MOD_RES (1), (1): Xaa is C or S
XVSQDLNAISILYFIGKTPKILKKYRM

SEQ ID NO: 44940 - protein, 32 aa, Artificial Sequence
  Cyclic GFR-binding peptide
  MOD_RES (30), (32): Xaa is C or S
TKLSPISVLYKDDSSNVILKYHYNMVVRSXGX

SEQ ID NO: 44941 - protein, 36 aa, Artificial Sequence; identical to SEQ ID NO: 6289
  Cyclic GFR-binding peptide
  MOD_RES (4), (5): Xaa is C or S

SEQ ID NO: 44942 - protein, 31 aa, Artificial Sequence
  Cyclic GFR-binding peptide
  MOD_RES (4), (5): Xaa is C or S
AAPXXVPQALNAISILYFVGRKPKVLKKYRM

SEQ ID NO: 44943 - protein, 35 aa, Artificial Sequence; identical to SEQ ID NO: 6292
  Cyclic GFR-binding peptide
  MOD_RES (2), (3): Xaa is C or S

SEQ ID NO: 44944 - protein, 31 aa, Artificial Sequence
  Cyclic GFR-binding peptide
  MOD_RES (2), (3): Xaa is C or S
AXXVPTELSATSMLYYDEYDKVVLRKHREMV

SEQ ID NO: 44945 - protein, 30 aa, Artificial Sequence
  Cyclic GFR-binding peptide
  MOD_RES (30), (30): Xaa is C or S
SPISVLYKEIVRKKPIFLKYHYTLEDHLAX

SEQ ID NO: 44946 - protein, 34 aa, Artificial Sequence; identical to SEQ ID NO: 6295
  Cyclic GFR-binding peptide
  MOD_RES (3), (4): Xaa is C or S

SEQ ID NO: 44947 - protein, 32 aa, Artificial Sequence
  Cyclic GFR-binding peptide
  MOD_RES (6), (7): Xaa is C or S
ASASPXXVPQDLSAISILYLVGRTPKVLKNYQ

SEQ ID NO: 44948 - protein, 34 aa, Artificial Sequence; identical to SEQ ID NO: 6298
  Cyclic GFR-binding peptide
  MOD_RES (3), (3): Xaa is C or S

SEQ ID NO: 44949 - protein, 33 aa, Artificial Sequence; identical to SEQ ID NO: 6299
  Cyclic GFR-binding peptide
  MOD_RES (32), (32): Xaa is C or S

SEQ ID NO: 44950 - protein, 34 aa, Artificial Sequence
  Cyclic GFR-binding peptide
  MOD_RES (5), (5): Xaa is C or S
RNVQXRPTQVQLSPISVLYKEIVRKKPIFLKYHY

SEQ ID NO: 44951 - protein, 28 aa, Artificial Sequence
  Cyclic GFR-binding peptide
  MOD_RES (1), (1): Xaa is C or S
XAPTKLSPISVLYKDSSNNVILKYHYNM

SEQ ID NO: 44952 - protein, 32 aa, Artificial Sequence
  Cyclic GFR-binding peptide
  MOD_RES (32), (32): Xaa is C or S
PTKLNAISVLYFDDMGVPTLKKYREGMSVAEX

SEQ ID NO: 44953 - protein, 34 aa, Artificial Sequence
  Cyclic GFR-binding peptide
  MOD_RES (34), (34): Xaa is C or S
QVQLSATSVLYYEIVRKKPIFLRKHRTLEDHLAX

SEQ ID NO: 44954 - protein, 29 aa, Artificial Sequence
  Cyclic GFR-binding peptide
SPISMLYKDENEKVVLKYHYAAAAAAAAA

SEQ ID NO: 44955 - protein, 27 aa, Artificial Sequence
  Cyclic GFR-binding peptide
VPQDLNAISILYFVGRTPKVLKKYRMV

SEQ ID NO: 44956 - protein, 32 aa, Artificial Sequence
  Cyclic GFR-binding peptide
  MOD_RES (30), (32): Xaa is C or S
TKLSPISVLYKDSSNNVILKYHYNMVVKAXGX

SEQ ID NO: 44957 - protein, 26 aa, Artificial Sequence
  Cyclic GFR-binding peptide
LSPISVLYKDSSNNVILKYHYNMVVK

SEQ ID NO: 44958 - protein, 32 aa, Artificial Sequence
  Cyclic GFR-binding peptide
  MOD_RES (6), (7): Xaa is C or S
ASAAPXXVPQALSAISILYLVGRKPKVLKNYQ

SEQ ID NO: 44959 - protein, 29 aa, Artificial Sequence
  Cyclic GFR-binding peptide
  MOD_RES (1), (2): Xaa is C or S
XXVPQALSPISILYKVGRKPKVLKYHYMI

SEQ ID NO: 44960 - protein, 27 aa, Artificial Sequence
  Cyclic GFR-binding peptide
QDLSATSILYYVGRTPKVLRKHRMVVK

SEQ ID NO: 44961 - protein, 30 aa, Artificial Sequence
  Cyclic GFR-binding peptide
  MOD_RES (1), (2): Xaa is C or S
XXVPQALSATSILYYVGRKPKVLRKHRMIV

SEQ ID NO: 44962 - protein, 36 aa, Artificial Sequence
  Cyclic GFR-binding peptide
  MOD_RES (6), (7): Xaa is C or S
ASAAPXXVPQALSAISILYLVGRKPKVLKNYQMIVR

SEQ ID NO: 44963 - protein, 37 aa, Artificial Sequence; identical to SEQ ID NO: 6307
  Cyclic GFR-binding peptide
  MOD_RES (3), (4), (36): Xaa is C or S

SEQ ID NO: 44964 - protein, 23 aa, Artificial Sequence
  Cyclic GFR-binding peptide
KLSATSVLYYDDSSNVILRKHRN

SEQ ID NO: 44965 - protein, 36 aa, Artificial Sequence
  Cyclic GFR-binding peptide
  MOD_RES (6), (7): Xaa is C or S
ASASPXXVSQDLSATSILYYIGKTPKILRKHRMIVK

SEQ ID NO: 44966 - protein, 30 aa, Artificial Sequence
  Cyclic GFR-binding peptide
  MOD_RES (1), (2): Xaa is C or S
XXVPTELSPISMLYKDENEKVVLKYHYDMV

SEQ ID NO: 44967 - protein, 30 aa, Artificial Sequence
  Cyclic GFR-binding peptide
  MOD_RES (1), (2): Xaa is C or S
XXVPQALSPISILYKVGRKPKVLKYHYMIV

SEQ ID NO: 44968 - protein, 29 aa, Artificial Sequence
  Cyclic GFR-binding peptide
  MOD_RES (3), (4): Xaa is C or S
KAXXAPTKLSPISVLYKDSSNNVILKYHY

SEQ ID NO: 44969 - protein, 32 aa, Artificial Sequence; identical to SEQ ID NO: 6310
  Cyclic GFR-binding peptide
  MOD_RES (1), (2): Xaa is C or S

SEQ ID NO: 44970 - protein, 31 aa, Artificial Sequence
  Cyclic GFR-binding peptide
  MOD_RES (28), (30): Xaa is C or S
LNAISMLYFDEYDKVVLKKYREMVVEGXGXR

SEQ ID NO: 44971 - protein, 37 aa, Artificial Sequence; identical to SEQ ID NO: 6312
  Cyclic GFR-binding peptide
  MOD_RES (2), (3), (35), (37): Xaa is C or S

SEQ ID NO: 44972 - protein, 30 aa, Artificial Sequence
  Cyclic GFR-binding peptide
  MOD_RES (3), (4): Xaa is C or S
APXXVPQALNAISILYFVGRKPKVLKKYRM

SEQ ID NO: 44973 - protein, 38 aa, Artificial Sequence; identical to SEQ ID NO: 6315
  Cyclic GFR-binding peptide
  MOD_RES (5), (6), (37): Xaa is C or S

SEQ ID NO: 44974 - protein, 27 aa, Artificial Sequence
  Cyclic GFR-binding peptide
  MOD_RES (26), (26): Xaa is C or S
NAISILYFVGRTPKVLKKYRMVVKSXK

SEQ ID NO: 44975 - protein, 24 aa, Artificial Sequence
  Cyclic GFR-binding peptide
ELSPISMLYKDENEKVVLKYHYDM

SEQ ID NO: 44976 - protein, 41 aa, Artificial Sequence; identical to SEQ ID NO: 6317
  Cyclic GFR-binding peptide
  MOD_RES (3), (40): Xaa is C or S

SEQ ID NO: 44977 - protein, 24 aa, Artificial Sequence
  Cyclic GFR-binding peptide
PTKLSAISVLYLDDMGVPTLKNYQ

SEQ ID NO: 44978 - protein, 32 aa, Artificial Sequence; identical to SEQ ID NO: 6320
  Cyclic GFR-binding peptide
  MOD_RES (1), (32): Xaa is C or S

SEQ ID NO: 44979 - protein, 32 aa, Artificial Sequence; identical to SEQ ID NO: 6321
  Cyclic GFR-binding peptide
  MOD_RES (1), (2): Xaa is C or S

SEQ ID NO: 44980 - protein, 25 aa, Artificial Sequence
  Cyclic GFR-binding peptide
ELSATSMLYYDENEKVVLRKHRDMV

SEQ ID NO: 44981 - protein, 29 aa, Artificial Sequence
  Cyclic GFR-binding peptide
SATSILYYVGRKPKVLRKHRAAAAAAAAA

SEQ ID NO: 44982 - protein, 34 aa, Artificial Sequence; identical to SEQ ID NO: 6322
  Cyclic GFR-binding peptide
  MOD_RES (3), (4): Xaa is C or S

SEQ ID NO: 44983 - protein, 33 aa, Artificial Sequence; identical to SEQ ID NO: 6323
  Cyclic GFR-binding peptide
  MOD_RES (31), (33): Xaa is C or S

SEQ ID NO: 44984 - protein, 31 aa, Artificial Sequence
  Cyclic GFR-binding peptide
  MOD_RES (30), (30): Xaa is C or S
PQALSATSILYYVGRKPKVLRKHRMIVRSXK

SEQ ID NO: 44985 - protein, 28 aa, Artificial Sequence
  Cyclic GFR-binding peptide
PTELNAISMLYFDENEKVVLKKYRDMVV

SEQ ID NO: 44986 - protein, 26 aa, Artificial Sequence
  Cyclic GFR-binding peptide
LSPISILYKVGRKPKVLKYHYMIVRS

SEQ ID NO: 44987 - protein, 26 aa, Artificial Sequence
  Cyclic GFR-binding peptide
  MOD_RES (26), (26): Xaa is C or S
SAISILYLIGKTPKILKNYQMIVKSX

SEQ ID NO: 44988 - protein, 34 aa, Artificial Sequence
  Cyclic GFR-binding peptide
  MOD_RES (31), (33): Xaa is C or S
PTELSPISMLYKDEYDKVVLKYHYEMVVEGXGXR

SEQ ID NO: 44989 - protein, 31 aa, Artificial Sequence; identical to SEQ ID NO: 6324
  Cyclic GFR-binding peptide
  MOD_RES (1), (1): Xaa is C or S

SEQ ID NO: 44990 - protein, 29 aa, Artificial Sequence
  Cyclic GFR-binding peptide
TELNAISMLYFDENEKVVLKKYRDMVVEG

SEQ ID NO: 44991 - protein, 33 aa, Artificial Sequence
  Cyclic GFR-binding peptide
  MOD_RES (6), (7): Xaa is C or S
KVGKAXXVPTKLNAISVLYFDDMGVPTLKKYRE

SEQ ID NO: 44992 - protein, 30 aa, Artificial Sequence
  Cyclic GFR-binding peptide
  MOD_RES (5), (5): Xaa is C or S
TKPTXAPTKLSATSVLYYDDSSNVILRKHR

SEQ ID NO: 44993 - protein, 25 aa, Artificial Sequence
  Cyclic GFR-binding peptide
TELNAISMLYFDENEKVVLKKYRDM

SEQ ID NO: 44994 - protein, 32 aa, Artificial Sequence
  Cyclic GFR-binding peptide
  MOD_RES (3), (4): Xaa is C or S
SPXXVSQDLNAISILYFIGKTPKILKKYRMIV

SEQ ID NO: 44995 - protein, 36 aa, Artificial Sequence; identical to SEQ ID NO: 6325
  Cyclic GFR-binding peptide
  MOD_RES (1), (2), (33), (35): Xaa is C or S

SEQ ID NO: 44996 - protein, 24 aa, Artificial Sequence
  Cyclic GFR-binding peptide
SAISVLYLDDSSNVILKNYQNMVV

SEQ ID NO: 44997 - protein, 30 aa, Artificial Sequence
  Cyclic GFR-binding peptide
  MOD_RES (3), (4): Xaa is C or S
KAXXVPTKLSATSVLYYDDMGVPTLRKHRE

SEQ ID NO: 44998 - protein, 32 aa, Artificial Sequence
  Cyclic GFR-binding peptide
  MOD_RES (6), (7): Xaa is C or S
SIPKAXXVPTELSATSMLYYDEYDKVVLRKHR

SEQ ID NO: 44999 - protein, 25 aa, Artificial Sequence
  Cyclic GFR-binding peptide
LSAISVLYLDDMGVPTLKNYQEGMS

SEQ ID NO: 45000 - protein, 34 aa, Artificial Sequence; identical to SEQ ID NO: 6329
  Cyclic GFR-binding peptide
  MOD_RES (3), (4): Xaa is C or S

SEQ ID NO: 45001 - protein, 38 aa, Artificial Sequence; identical to SEQ ID NO: 6327
  Cyclic GFR-binding peptide
  MOD_RES (4), (5), (37): Xaa is C or S

SEQ ID NO: 45002 - protein, 38 aa, Artificial Sequence; identical to SEQ ID NO: 6330
  Cyclic GFR-binding peptide
  MOD_RES (6), (7), (38): Xaa is C or S

SEQ ID NO: 45003 - protein, 28 aa, Artificial Sequence
  Cyclic GFR-binding peptide
  MOD_RES (27), (27): Xaa is C or S
LSPISILYKIGKTPKILKYHYMIVKSXK

SEQ ID NO: 45004 - protein, 32 aa, Artificial Sequence
  Cyclic GFR-binding peptide
  MOD_RES (32), (32): Xaa is C or S
QLSATSVLYYEIVRKKPIFLRKHRTLEDHLAX

SEQ ID NO: 45005 - protein, 29 aa, Artificial Sequence
  Cyclic GFR-binding peptide
  MOD_RES (2), (3): Xaa is C or S
AXXAPTKLNAISVLYFDSSNNVILKKYRN

SEQ ID NO: 45006 - protein, 31 aa, Artificial Sequence
  Cyclic GFR-binding peptide
  MOD_RES (2), (2): Xaa is C or S
QXRPTQVQLSATSVLYYEIVRKKPIFLRKHR

SEQ ID NO: 45007 - protein, 38 aa, Artificial Sequence; identical to SEQ ID NO: 6331
  Cyclic GFR-binding peptide
  MOD_RES (6), (7): Xaa is C or S

SEQ ID NO: 45008 - protein, 28 aa, Artificial Sequence
  Cyclic GFR-binding peptide
  MOD_RES (1), (2): Xaa is C or S
XXAPTQLSAISVLYLDDSSNVILKNYQN

SEQ ID NO: 45009 - protein, 27 aa, Artificial Sequence
  Cyclic GFR-binding peptide
  MOD_RES (1), (2): Xaa is C or S
XXVSQDLSAISILYLIGKTPKILKNYQ

SEQ ID NO: 45010 - protein, 38 aa, Artificial Sequence; identical to SEQ ID NO: 6333
  Cyclic GFR-binding peptide
  MOD_RES (35), (37): Xaa is C or S

SEQ ID NO: 45011 - protein, 44 aa, Artificial Sequence; identical to SEQ ID NO: 6335
  Cyclic GFR-binding peptide
  MOD_RES (4), (41), (43): Xaa is C or S

SEQ ID NO: 45012 - protein, 38 aa, Artificial Sequence; identical to SEQ ID NO: 6337
  Cyclic GFR-binding peptide
  MOD_RES (2), (3), (35), (37): Xaa is C or S

SEQ ID NO: 45013 - protein, 34 aa, Artificial Sequence; identical to SEQ ID NO: 6338
  Cyclic GFR-binding peptide
  MOD_RES (1), (32), (34): Xaa is C or S

SEQ ID NO: 45014 - protein, 37 aa, Artificial Sequence; identical to SEQ ID NO: 6340
  Cyclic GFR-binding peptide
  MOD_RES (3), (4), (36): Xaa is C or S

SEQ ID NO: 45015 - protein, 30 aa, Artificial Sequence
  Cyclic GFR-binding peptide
  MOD_RES (27), (29): Xaa is C or S
LSAISILYLVGRKPKVLKNYQMIVRSXKXS

SEQ ID NO: 45016 - protein, 33 aa, Artificial Sequence
  Cyclic GFR-binding peptide
  MOD_RES (30), (32): Xaa is C or S
TELSATSMLYYDEYDKVVLRKHREMVVEGXGXR

SEQ ID NO: 45017 - protein, 29 aa, Artificial Sequence
  Cyclic GFR-binding peptide
TELNAISMLYFDEYDKVVLKKYREMVVEG

SEQ ID NO: 45018 - protein, 29 aa, Artificial Sequence
  Cyclic GFR-binding peptide
SPISILYKVGRKPKVLKYHYAAAAAAAAA

SEQ ID NO: 45019 - protein, 30 aa, Artificial Sequence
  Cyclic GFR-binding peptide
  MOD_RES (30), (30): Xaa is C or S
TKLSPISVLYKDDSSNVILKYHYNMVVRSX

SEQ ID NO: 45020 - protein, 28 aa, Artificial Sequence
  Cyclic GFR-binding peptide
  MOD_RES (1), (1): Xaa is C or S
XVSQDLNAISILYFIGKTPKILKKYRMI

SEQ ID NO: 45021 - protein, 37 aa, Artificial Sequence; identical to SEQ ID NO: 6342
  Cyclic GFR-binding peptide
  MOD_RES (2), (34), (36): Xaa is C or S

SEQ ID NO: 45022 - protein, 31 aa, Artificial Sequence
  Cyclic GFR-binding peptide
TQVQLSATSVLYYEIVRKKPIFLRKHRTLED

SEQ ID NO: 45023 - protein, 25 aa, Artificial Sequence
  Cyclic GFR-binding peptide
ELSPISMLYKDENEKVVLKYHYDMV

SEQ ID NO: 45024 - protein, 36 aa, Artificial Sequence; identical to SEQ ID NO: 6344
  Cyclic GFR-binding peptide
  MOD_RES (1), (2), (33), (35): Xaa is C or S

SEQ ID NO: 45025 - protein, 40 aa, Artificial Sequence; identical to SEQ ID NO: 6345
  Cyclic GFR-binding peptide
  MOD_RES (3), (4), (37), (39): Xaa is C or S

SEQ ID NO: 45026 - protein, 28 aa, Artificial Sequence
  Cyclic GFR-binding peptide
  MOD_RES (28), (28): Xaa is C or S
LSPISVLYKDSSNNVILKYHYNMVVKAX

SEQ ID NO: 45027 - protein, 22 aa, Artificial Sequence
  Cyclic GFR-binding peptide
ELSPISMLYKDEYDKVVLKYHY

SEQ ID NO: 45028 - protein, 33 aa, Artificial Sequence; identical to SEQ ID NO: 6346
  Cyclic GFR-binding peptide
  MOD_RES (1), (32): Xaa is C or S

SEQ ID NO: 45029 - protein, 34 aa, Artificial Sequence; identical to SEQ ID NO: 6347
  Cyclic GFR-binding peptide
  MOD_RES (2), (3), (34): Xaa is C or S

SEQ ID NO: 45030 - protein, 27 aa, Artificial Sequence
  Cyclic GFR-binding peptide
VSQDLNAISILYFIGKTPKILKKYRMI

SEQ ID NO: 45031 - protein, 38 aa, Artificial Sequence; identical to SEQ ID NO: 6348
  Cyclic GFR-binding peptide
  MOD_RES (3), (4), (35), (37): Xaa is C or S

SEQ ID NO: 45032 - protein, 34 aa, Artificial Sequence; identical to SEQ ID NO: 6349
  Cyclic GFR-binding peptide
  MOD_RES (1), (33): Xaa is C or S

SEQ ID NO: 45033 - protein, 25 aa, Artificial Sequence
  Cyclic GFR-binding peptide
LSATSILYYVGRKPKVLRKHRMIVR

SEQ ID NO: 45034 - protein, 22 aa, Artificial Sequence
  Cyclic GFR-binding peptide
LSAISVLYLDSSNNVILKNYQN

SEQ ID NO: 45035 - protein, 34 aa, Artificial Sequence; identical to SEQ ID NO: 6352
  Cyclic GFR-binding peptide
  MOD_RES (1), (33): Xaa is C or S

SEQ ID NO: 45036 - protein, 37 aa, Artificial Sequence; identical to SEQ ID NO: 6353
  Cyclic GFR-binding peptide
  MOD_RES (1), (2), (34), (36): Xaa is C or S

SEQ ID NO: 45037 - protein, 36 aa, Artificial Sequence; identical to SEQ ID NO: 6354
  Cyclic GFR-binding peptide
  MOD_RES (2), (3), (36): Xaa is C or S

SEQ ID NO: 45038 - protein, 32 aa, Artificial Sequence
  Cyclic GFR-binding peptide
  MOD_RES (3), (3): Xaa is C or S
VQXRPTQVQLSPISVLYKEIVRKKPIFLKYHY

SEQ ID NO: 45039 - protein, 20 aa, Artificial Sequence
  Cyclic GFR-binding peptide
NAISMLYFDENEKVVLKKYR

SEQ ID NO: 45040 - protein, 26 aa, Artificial Sequence
  Cyclic GFR-binding peptide
PQDLSPISILYKVGRTPKVLKYHYMV

SEQ ID NO: 45041 - protein, 28 aa, Artificial Sequence
  Cyclic GFR-binding peptide
  MOD_RES (2), (3): Xaa is C or S
AXXVPTKLNAISVLYFDDMGVPTLKKYR

SEQ ID NO: 45042 - protein, 31 aa, Artificial Sequence
  Cyclic GFR-binding peptide
  MOD_RES (1), (2): Xaa is C or S
XXVPQDLSATSILYYVGRTPKVLRKHRMVVK

SEQ ID NO: 45043 - protein, 27 aa, Artificial Sequence
  Cyclic GFR-binding peptide
  MOD_RES (1), (1): Xaa is C or S
XVPQDLSAISILYLVGRTPKVLKNYQM

SEQ ID NO: 45044 - protein, 22 aa, Artificial Sequence
  Cyclic GFR-binding peptide
DLNAISILYFIGKTPKILKKYR

SEQ ID NO: 45045 - protein, 24 aa, Artificial Sequence
  Cyclic GFR-binding peptide
PQDLSATSILYYVGRTPKVLRKHR

SEQ ID NO: 45046 - protein, 36 aa, Artificial Sequence; identical to SEQ ID NO: 6360
  Cyclic GFR-binding peptide
  MOD_RES (1), (2), (34), (36): Xaa is C or S

SEQ ID NO: 45047 - protein, 27 aa, Artificial Sequence
  Cyclic GFR-binding peptide
PQDLSPISILYKVGRTPKVLKYHYMVV

SEQ ID NO: 45048 - protein, 27 aa, Artificial Sequence
  Cyclic GFR-binding peptide
PQDLSATSILYYVGRTPKVLRKHRMVV

SEQ ID NO: 45049 - protein, 35 aa, Artificial Sequence; identical to SEQ ID NO: 6364
  Cyclic GFR-binding peptide

SEQ ID NO: 45050 - protein, 31 aa, Artificial Sequence
  Cyclic GFR-binding peptide
PTKLSATSVLYYDDMGVPTLRKHREGMSVAE

SEQ ID NO: 45051 - protein, 31 aa, Artificial Sequence
  Cyclic GFR-binding peptide
  MOD_RES (28), (30): Xaa is C or S
DLSPISILYKVGRTPKVLKYHYMVVKSXKXS

SEQ ID NO: 45052 - protein, 37 aa, Artificial Sequence; identical to SEQ ID NO: 6368
  Cyclic GFR-binding peptide
  MOD_RES (2), (3), (35), (37): Xaa is C or S

SEQ ID NO: 45053 - protein, 30 aa, Artificial Sequence
  Cyclic GFR-binding peptide
  MOD_RES (28), (30): Xaa is C or S
DLSAISILYLIGKTPKILKNYQMIVKSXKX

SEQ ID NO: 45054 - protein, 31 aa, Artificial Sequence
  Cyclic GFR-binding peptide
  MOD_RES (3), (4): Xaa is C or S
KAXXVPTELNAISMLYFDENEKVVLKKYRDM

SEQ ID NO: 45055 - protein, 38 aa, Artificial Sequence; identical to SEQ ID NO: 6372
  Cyclic GFR-binding peptide
  MOD_RES (5), (6): Xaa is C or S

SEQ ID NO: 45056 - protein, 36 aa, Artificial Sequence; identical to SEQ ID NO: 6371
  Cyclic GFR-binding peptide
  MOD_RES (3), (4), (35): Xaa is C or S

SEQ ID NO: 45057 - protein, 33 aa, Artificial Sequence; identical to SEQ ID NO: 6373
  Cyclic GFR-binding peptide

SEQ ID NO: 45058 - protein, 23 aa, Artificial Sequence
  Cyclic GFR-binding peptide
SAISILYLVGRKPKVLKNYQMIV

SEQ ID NO: 45059 - protein, 36 aa, Artificial Sequence
  Cyclic GFR-binding peptide
  MOD_RES (7), (7): Xaa is C or S
HVTKPTXAPTKLSAISVLYLDDSSNVILKNYQNMVV

SEQ ID NO: 45060 - protein, 40 aa, Artificial Sequence; identical to SEQ ID NO: 6374
  Cyclic GFR-binding peptide
  MOD_RES (4), (5), (37), (39): Xaa is C or S

SEQ ID NO: 45061 - protein, 27 aa, Artificial Sequence
  Cyclic GFR-binding peptide
VPTELNAISMLYFDENEKVVLKKYRDM

SEQ ID NO: 45062 - protein, 33 aa, Artificial Sequence; identical to SEQ ID NO: 6375
  Cyclic GFR-binding peptide
  MOD_RES (1), (32): Xaa is C or S

SEQ ID NO: 45063 - protein, 33 aa, Artificial Sequence
  Cyclic GFR-binding peptide
  MOD_RES (4), (4): Xaa is C or S
NVQXRPTQVQLSATSVLYYEIVRKKPIFLRKHR

SEQ ID NO: 45064 - protein, 40 aa, Artificial Sequence; identical to SEQ ID NO: 6376
  Cyclic GFR-binding peptide
  MOD_RES (4), (5), (37), (39): Xaa is C or S

SEQ ID NO: 45065 - protein, 35 aa, Artificial Sequence
  Cyclic GFR-binding peptide
  MOD_RES (34), (34): Xaa is C or S
QVQLSAISVLYLEIVRKKPIFLKNYQTLEDHLAXK

SEQ ID NO: 45066 - protein, 27 aa, Artificial Sequence
  Cyclic GFR-binding peptide
  MOD_RES (27), (27): Xaa is C or S
SATSMLYYDEYDKVVLRKHREMVVEGX

SEQ ID NO: 45067 - protein, 30 aa, Artificial Sequence
  Cyclic GFR-binding peptide
  MOD_RES (27), (29): Xaa is C or S
LSPISILYKVGRKPKVLKYHYMIVRSXKXS

SEQ ID NO: 45068 - protein, 33 aa, Artificial Sequence
  Cyclic GFR-binding peptide
  MOD_RES (6), (7): Xaa is C or S
ASASPXXVSQDLSATSILYYIGKTPKILRKHRM

SEQ ID NO: 45069 - protein, 31 aa, Artificial Sequence
  Cyclic GFR-binding peptide
  MOD_RES (1), (2): Xaa is C or S
XXVPTELNAISMLYFDEYDKVVLKKYREMVV

SEQ ID NO: 45070 - protein, 38 aa, Artificial Sequence
  Cyclic GFR-binding peptide
  MOD_RES (5), (5): Xaa is C or S
RNVQXRPTQVQLSAISVLYLEIVRKKPIFLKNYQTLED

SEQ ID NO: 45071 - protein, 35 aa, Artificial Sequence; identical to SEQ ID NO: 6382
  Cyclic GFR-binding peptide
  MOD_RES (1), (2), (35): Xaa is C or S

SEQ ID NO: 45072 - protein, 40 aa, Artificial Sequence; identical to SEQ ID NO: 6383
  Cyclic GFR-binding peptide
  MOD_RES (5), (6), (38), (40): Xaa is C or S

SEQ ID NO: 45073 - protein, 25 aa, Artificial Sequence
  Cyclic GFR-binding peptide
SPISMLYKDEYDKVVLKYHYEMVVE

SEQ ID NO: 45074 - protein, 32 aa, Artificial Sequence
  Cyclic GFR-binding peptide
  MOD_RES (4), (5): Xaa is C or S
PKAXXVPTELSPISMLYKDEYDKVVLKYHYEM

SEQ ID NO: 45075 - protein, 33 aa, Artificial Sequence
  Cyclic GFR-binding peptide
  MOD_RES (2), (2): Xaa is C or S
QXRPTQVQLNAISVLYFEIVRKKPIFLKKYRTL

SEQ ID NO: 45076 - protein, 30 aa, Artificial Sequence
  Cyclic GFR-binding peptide
  MOD_RES (1), (1): Xaa is C or S
XVPTELSPISMLYKDENEKVVLKYHYDMVV

SEQ ID NO: 45077 - protein, 35 aa, Artificial Sequence; identical to SEQ ID NO: 6385
  Cyclic GFR-binding peptide

SEQ ID NO: 45078 - protein, 36 aa, Artificial Sequence
  Cyclic GFR-binding peptide
  MOD_RES (4), (4): Xaa is C or S
NVQXRPTQVQLSAISVLYLEIVRKKPIFLKNYQTLE

SEQ ID NO: 45079 - protein, 26 aa, Artificial Sequence
  Cyclic GFR-binding peptide
NAISVLYFDSSNNVILKKYRNMVVKA

SEQ ID NO: 45080 - protein, 29 aa, Artificial Sequence
  Cyclic GFR-binding peptide
TKLSATSVLYYDDSSNVILRKHRNMVVRS

SEQ ID NO: 45081 - protein, 41 aa, Artificial Sequence; identical to SEQ ID NO: 6388
  Cyclic GFR-binding peptide
  MOD_RES (6), (7), (38), (40): Xaa is C or S

SEQ ID NO: 45082 - protein, 22 aa, Artificial Sequence
  Cyclic GFR-binding peptide
LNAISILYFVGRTPKVLKKYRM

SEQ ID NO: 45083 - protein, 34 aa, Artificial Sequence
  Cyclic GFR-binding peptide
  MOD_RES (31), (33): Xaa is C or S
PTKLSATSVLYYDDSSNVILRKHRNMVVRSXGXH

SEQ ID NO: 45084 - protein, 26 aa, Artificial Sequence
  Cyclic GFR-binding peptide
LSAISVLYLDDSSNVILKNYQNMVVR

SEQ ID NO: 45085 - protein, 36 aa, Artificial Sequence; identical to SEQ ID NO: 6389
  Cyclic GFR-binding peptide
  MOD_RES (1), (2), (35): Xaa is C or S

SEQ ID NO: 45086 - protein, 35 aa, Artificial Sequence
  Cyclic GFR-binding peptide
  MOD_RES (4), (4): Xaa is C or S
NVQXRPTQVQLNAISVLYFEIVRKKPIFLKKYRTL

SEQ ID NO: 45087 - protein, 36 aa, Artificial Sequence; identical to SEQ ID NO: 6391
  Cyclic GFR-binding peptide
  MOD_RES (5), (6): Xaa is C or S

SEQ ID NO: 45088 - protein, 42 aa, Artificial Sequence; identical to SEQ ID NO: 6392
  Cyclic GFR-binding peptide
  MOD_RES (6), (7), (39), (41): Xaa is C or S

SEQ ID NO: 45089 - protein, 39 aa, Artificial Sequence; identical to SEQ ID NO: 6393
  Cyclic GFR-binding peptide
  MOD_RES (6), (7), (39): Xaa is C or S

SEQ ID NO: 45090 - protein, 24 aa, Artificial Sequence
  Cyclic GFR-binding peptide
TKLNAISVLYFDDMGVPTLKKYRE

SEQ ID NO: 45091 - protein, 25 aa, Artificial Sequence
  Cyclic GFR-binding peptide
PTQLSAISVLYLDDSSNVILKNYQN

SEQ ID NO: 45092 - protein, 33 aa, Artificial Sequence; identical to SEQ ID NO: 6397
  Cyclic GFR-binding peptide
  MOD_RES (1), (2): Xaa is C or S

SEQ ID NO: 45093 - protein, 33 aa, Artificial Sequence; identical to SEQ ID NO: 6401
  Cyclic GFR-binding peptide
  MOD_RES (1), (2), (33): Xaa is C or S

SEQ ID NO: 45094 - protein, 29 aa, Artificial Sequence
  Cyclic GFR-binding peptide
  MOD_RES (1), (2): Xaa is C or S
XXAPTKLSPISVLYKDSSNNVILKYHYNM

SEQ ID NO: 45095 - protein, 28 aa, Artificial Sequence
  Cyclic GFR-binding peptide
  MOD_RES (2), (3): Xaa is C or S
PXXAPTKLSAISVLYLDDSSNVILKNYQ

SEQ ID NO: 45096 - protein, 28 aa, Artificial Sequence
  Cyclic GFR-binding peptide
QDLSATSILYYVGRTPKVLRKHRMVVKS

SEQ ID NO: 45097 - protein, 31 aa, Artificial Sequence; identical to SEQ ID NO: 6402
  Cyclic GFR-binding peptide
  MOD_RES (31), (31): Xaa is C or S

SEQ ID NO: 45098 - protein, 38 aa, Artificial Sequence; identical to SEQ ID NO: 6403
  Cyclic GFR-binding peptide
  MOD_RES (6), (7), (38): Xaa is C or S

SEQ ID NO: 45099 - protein, 25 aa, Artificial Sequence
  Cyclic GFR-binding peptide
VPTELSATSMLYYDEYDKVVLRKHR

SEQ ID NO: 45100 - protein, 27 aa, Artificial Sequence
  Cyclic GFR-binding peptide
QLSAISVLYLDDSSNVILKNYQNMVVR

SEQ ID NO: 45101 - protein, 33 aa, Artificial Sequence
  Cyclic GFR-binding peptide
  MOD_RES (4), (5): Xaa is C or S
PKPXXAPTQLSAISVLYLDDSSNVILKNYQNMV

SEQ ID NO: 45102 - protein, 28 aa, Artificial Sequence
  Cyclic GFR-binding peptide
  MOD_RES (28), (28): Xaa is C or S
LSPISVLYKDDSSNVILKYHYNMVVRAX

SEQ ID NO: 45103 - protein, 22 aa, Artificial Sequence
  Cyclic GFR-binding peptide
NAISILYFVGRKPKVLKKYRMI

SEQ ID NO: 45104 - protein, 33 aa, Artificial Sequence; identical to SEQ ID NO: 6404
  Cyclic GFR-binding peptide
  MOD_RES (1), (1): Xaa is C or S

SEQ ID NO: 45105 - protein, 36 aa, Artificial Sequence; identical to SEQ ID NO: 6405
  Cyclic GFR-binding peptide
  MOD_RES (2), (3), (34), (36): Xaa is C or S

SEQ ID NO: 45106 - protein, 30 aa, Artificial Sequence
  Cyclic GFR-binding peptide
  MOD_RES (30), (30): Xaa is C or S
SQDLNAISILYFIGKTPKILKKYRMIVKSX

SEQ ID NO: 45107 - protein, 27 aa, Artificial Sequence
  Cyclic GFR-binding peptide
  MOD_RES (26), (26): Xaa is C or S
NAISILYFVGRKPKVLKKYRMIVRSXK

SEQ ID NO: 45108 - protein, 34 aa, Artificial Sequence; identical to SEQ ID NO: 6409
  Cyclic GFR-binding peptide
  MOD_RES (1), (2), (33): Xaa is C or S

SEQ ID NO: 45109 - protein, 33 aa, Artificial Sequence; identical to SEQ ID NO: 6408
  Cyclic GFR-binding peptide
  MOD_RES (2), (3): Xaa is C or S

SEQ ID NO: 45110 - protein, 28 aa, Artificial Sequence
  Cyclic GFR-binding peptide
TQVQLSATSVLYYEIVRKKPIFLRKHRT

SEQ ID NO: 45111 - protein, 33 aa, Artificial Sequence; identical to SEQ ID NO: 6410
  Cyclic GFR-binding peptide
  MOD_RES (2), (3): Xaa is C or S

SEQ ID NO: 45112 - protein, 27 aa, Artificial Sequence
  Cyclic GFR-binding peptide
PQALSAISILYLVGRKPKVLKNYQMIV

SEQ ID NO: 45113 - protein, 31 aa, Artificial Sequence
  Cyclic GFR-binding peptide
  MOD_RES (29), (31): Xaa is C or S
QDLSATSILYYIGKTPKILRKHRMIVKSXKX

SEQ ID NO: 45114 - protein, 32 aa, Artificial Sequence; identical to SEQ ID NO: 6413
  Cyclic GFR-binding peptide
  MOD_RES (32), (32): Xaa is C or S

SEQ ID NO: 45115 - protein, 32 aa, Artificial Sequence; identical to SEQ ID NO: 6415
  Cyclic GFR-binding peptide
  MOD_RES (31), (31): Xaa is C or S

SEQ ID NO: 45116 - protein, 30 aa, Artificial Sequence
  Cyclic GFR-binding peptide
  MOD_RES (2), (3): Xaa is C or S
PXXVPQALNAISILYFVGRKPKVLKKYRMI

SEQ ID NO: 45117 - protein, 27 aa, Artificial Sequence
  Cyclic GFR-binding peptide
VQLSAISVLYLEIVRKKPIFLKNYQTL

SEQ ID NO: 45118 - protein, 33 aa, Artificial Sequence
  Cyclic GFR-binding peptide
  MOD_RES (4), (5): Xaa is C or S
PKAXXVPTELNAISMLYFDENEKVVLKKYRDMV

SEQ ID NO: 45119 - protein, 34 aa, Artificial Sequence
  Cyclic GFR-binding peptide
  MOD_RES (4), (5): Xaa is C or S
PKPXXAPTKLSAISVLYLDDSSNVILKNYQNMVV

SEQ ID NO: 45120 - protein, 36 aa, Artificial Sequence; identical to SEQ ID NO: 6419
  Cyclic GFR-binding peptide
  MOD_RES (1), (33), (35): Xaa is C or S

SEQ ID NO: 45121 - protein, 28 aa, Artificial Sequence
  Cyclic GFR-binding peptide
KLNAISVLYFDDMGVPTLKKYREGMSVA

SEQ ID NO: 45122 - protein, 24 aa, Artificial Sequence
  Cyclic GFR-binding peptide
PTKLNAISVLYFDDMGVPTLKKYR

SEQ ID NO: 45123 - protein, 32 aa, Artificial Sequence; identical to SEQ ID NO: 6420
  Cyclic GFR-binding peptide
  MOD_RES (31), (31): Xaa is C or S

SEQ ID NO: 45124 - protein, 36 aa, Artificial Sequence; identical to SEQ ID NO: 6421
  Cyclic GFR-binding peptide
  MOD_RES (3), (4), (36): Xaa is C or S

SEQ ID NO: 45125 - protein, 33 aa, Artificial Sequence
  Cyclic GFR-binding peptide
  MOD_RES (4), (5): Xaa is C or S
PKAXXAPTKLSAISVLYLDSSNNVILKNYQNMV

SEQ ID NO: 45126 - protein, 30 aa, Artificial Sequence
  Cyclic GFR-binding peptide
  MOD_RES (3), (4): Xaa is C or S
KAXXAPTKLSPISVLYKDSSNNVILKYHYN

SEQ ID NO: 45127 - protein, 32 aa, Artificial Sequence
  Cyclic GFR-binding peptide
  MOD_RES (3), (4): Xaa is C or S
KAXXAPTKLSAISVLYLDSSNNVILKNYQNMV

SEQ ID NO: 45128 - protein, 30 aa, Artificial Sequence
  Cyclic GFR-binding peptide
LNAISVLYFEIVRKKPIFLKKYRTLEDHLA

SEQ ID NO: 45129 - protein, 30 aa, Artificial Sequence; identical to SEQ ID NO: 6424
  Cyclic GFR-binding peptide

SEQ ID NO: 45130 - protein, 42 aa, Artificial Sequence; identical to SEQ ID NO: 6425
  Cyclic GFR-binding peptide
  MOD_RES (6), (7), (39), (41): Xaa is C or S

SEQ ID NO: 45131 - protein, 28 aa, Artificial Sequence
  Cyclic GFR-binding peptide
  MOD_RES (1), (1): Xaa is C or S
XVPQDLNAISILYFVGRTPKVLKKYRMV

SEQ ID NO: 45132 - protein, 35 aa, Artificial Sequence; identical to SEQ ID NO: 6426
  Cyclic GFR-binding peptide
  MOD_RES (32), (34): Xaa is C or S

SEQ ID NO: 45133 - protein, 29 aa, Artificial Sequence
  Cyclic GFR-binding peptide
  MOD_RES (2), (3): Xaa is C or S
PXXAPTKLSPISVLYKDDSSNVILKYHYN

SEQ ID NO: 45134 - protein, 27 aa, Artificial Sequence
  Cyclic GFR-binding peptide
PTKLSATSVLYYDDSSNVILRKHRNMV

SEQ ID NO: 45135 - protein, 32 aa, Artificial Sequence
  Cyclic GFR-binding peptide
  MOD_RES (2), (3): Xaa is C or S
PXXVPQDLSAISILYLVGRTPKVLKNYQMVVK

SEQ ID NO: 45136 - protein, 42 aa, Artificial Sequence; identical to SEQ ID NO: 6427
  Cyclic GFR-binding peptide
  MOD_RES (6), (7), (39), (41): Xaa is C or S

SEQ ID NO: 45137 - protein, 31 aa, Artificial Sequence
  Cyclic GFR-binding peptide
  MOD_RES (1), (2): Xaa is C or S
XXVPQDLSPISILYKVGRTPKVLKYHYMVVK

SEQ ID NO: 45138 - protein, 32 aa, Artificial Sequence
  Cyclic GFR-binding peptide
  MOD_RES (31), (31): Xaa is C or S
LSPISVLYKEIVRKKPIFLKYHYTLEDHLAXK

SEQ ID NO: 45139 - protein, 32 aa, Artificial Sequence
  Cyclic GFR-binding peptide
  MOD_RES (4), (5): Xaa is C or S
AAPXXVPQALSPISILYKVGRKPKVLKYHYMI

SEQ ID NO: 45140 - protein, 32 aa, Artificial Sequence
  Cyclic GFR-binding peptide
  MOD_RES (6), (7): Xaa is C or S
ASASPXXVSQDLSATSILYYIGKTPKILRKHR

SEQ ID NO: 45141 - protein, 30 aa, Artificial Sequence
  Cyclic GFR-binding peptide
  MOD_RES (27), (29): Xaa is C or S
LSPISILYKVGRTPKVLKYHYMVVKSXKXS

SEQ ID NO: 45142 - protein, 39 aa, Artificial Sequence; identical to SEQ ID NO: 6430
  Cyclic GFR-binding peptide
  MOD_RES (6), (7), (39): Xaa is C or S

SEQ ID NO: 45143 - protein, 41 aa, Artificial Sequence; identical to SEQ ID NO: 6431
  Cyclic GFR-binding peptide
  MOD_RES (6), (7), (40): Xaa is C or S

SEQ ID NO: 45144 - protein, 30 aa, Artificial Sequence
  Cyclic GFR-binding peptide
  MOD_RES (29), (29): Xaa is C or S
ELSATSMLYYDENEKVVLRKHRDMVVEGXG

SEQ ID NO: 45145 - protein, 31 aa, Artificial Sequence
  Cyclic GFR-binding peptide
  MOD_RES (30), (30): Xaa is C or S
SPISVLYKEIVRKKPIFLKYHYTLEDHLAXK

SEQ ID NO: 45146 - protein, 34 aa, Artificial Sequence
  Cyclic GFR-binding peptide
  MOD_RES (6), (7): Xaa is C or S
TVPKPXXAPTQLSPISVLYKDDSSNVILKYHYNM

SEQ ID NO: 45147 - protein, 33 aa, Artificial Sequence; identical to SEQ ID NO: 6433
  Cyclic GFR-binding peptide
  MOD_RES (1), (32): Xaa is C or S

SEQ ID NO: 45148 - protein, 31 aa, Artificial Sequence
  Cyclic GFR-binding peptide
  MOD_RES (30), (30): Xaa is C or S
SQDLNAISILYFIGKTPKILKKYRMIVKSXK

SEQ ID NO: 45149 - protein, 30 aa, Artificial Sequence
  Cyclic GFR-binding peptide
  MOD_RES (1), (2): Xaa is C or S
XXAPTKLSAISVLYLDSSNNVILKNYQNMV

SEQ ID NO: 45150 - protein, 32 aa, Artificial Sequence
  Cyclic GFR-binding peptide
  MOD_RES (5), (6): Xaa is C or S
VGKAXXVPTKLSATSVLYYDDMGVPTLRKHRE

SEQ ID NO: 45151 - protein, 29 aa, Artificial Sequence
  Cyclic GFR-binding peptide
  MOD_RES (4), (4): Xaa is C or S
KPTXAPTKLSATSVLYYDDSSNVILRKHR

SEQ ID NO: 45152 - protein, 32 aa, Artificial Sequence
  Cyclic GFR-binding peptide
  MOD_RES (2), (3): Xaa is C or S
AXXVPTKLSAISVLYLDDMGVPTLKNYQEGMS

SEQ ID NO: 45153 - protein, 22 aa, Artificial Sequence
  Cyclic GFR-binding peptide
ELSATSMLYYDENEKVVLRKHR

SEQ ID NO: 45154 - protein, 34 aa, Artificial Sequence; identical to SEQ ID NO: 6435
  Cyclic GFR-binding peptide
  MOD_RES (3), (4): Xaa is C or S

SEQ ID NO: 45155 - protein, 31 aa, Artificial Sequence
  Cyclic GFR-binding peptide
  MOD_RES (28), (30): Xaa is C or S
ALSPISILYKVGRKPKVLKYHYMIVRSXKXS

SEQ ID NO: 45156 - protein, 29 aa, Artificial Sequence
  Cyclic GFR-binding peptide
  MOD_RES (3), (4): Xaa is C or S
KPXXAPTQLSAISVLYLDDSSNVILKNYQ

SEQ ID NO: 45157 - protein, 35 aa, Artificial Sequence; identical to SEQ ID NO: 6437
  Cyclic GFR-binding peptide
  MOD_RES (1), (2), (33), (35): Xaa is C or S

SEQ ID NO: 45158 - protein, 36 aa, Artificial Sequence; identical to SEQ ID NO: 6438
  Cyclic GFR-binding peptide
  MOD_RES (1), (33), (35): Xaa is C or S

SEQ ID NO: 45159 - protein, 35 aa, Artificial Sequence
  Cyclic GFR-binding peptide
  MOD_RES (7), (7): Xaa is C or S
HVTKPTXAPTKLSATSVLYYDDSSNVILRKHRNMV

SEQ ID NO: 45160 - protein, 25 aa, Artificial Sequence
  Cyclic GFR-binding peptide
LSATSMLYYDEYDKVVLRKHREMVV

SEQ ID NO: 45161 - protein, 26 aa, Artificial Sequence
  Cyclic GFR-binding peptide
  MOD_RES (1), (1): Xaa is C or S
XVPQALNAISILYFVGRKPKVLKKYR

SEQ ID NO: 45162 - protein, 37 aa, Artificial Sequence; identical to SEQ ID NO: 6439
  Cyclic GFR-binding peptide
  MOD_RES (4), (5), (37): Xaa is C or S

SEQ ID NO: 45163 - protein, 23 aa, Artificial Sequence
  Cyclic GFR-binding peptide
LSATSVLYYDDMGVPTLRKHREG

SEQ ID NO: 45164 - protein, 26 aa, Artificial Sequence
  Cyclic GFR-binding peptide
DLNAISILYFIGKTPKILKKYRMIVK

SEQ ID NO: 45165 - protein, 29 aa, Artificial Sequence
  Cyclic GFR-binding peptide
  MOD_RES (2), (3): Xaa is C or S
PXXVSQDLSPISILYKIGKTPKILKYHYM

SEQ ID NO: 45166 - protein, 32 aa, Artificial Sequence; identical to SEQ ID NO: 6441
  Cyclic GFR-binding peptide
  MOD_RES (32), (32): Xaa is C or S

SEQ ID NO: 45167 - protein, 23 aa, Artificial Sequence
  Cyclic GFR-binding peptide
SAISILYLVGRTPKVLKNYQMVV

SEQ ID NO: 45168 - protein, 34 aa, Artificial Sequence
  Cyclic GFR-binding peptide
  MOD_RES (33), (33): Xaa is C or S
VQLSATSVLYYEIVRKKPIFLRKHRTLEDHLAXK

SEQ ID NO: 45169 - protein, 33 aa, Artificial Sequence; identical to SEQ ID NO: 6444
  Cyclic GFR-binding peptide
  MOD_RES (1), (32): Xaa is C or S

SEQ ID NO: 45170 - protein, 35 aa, Artificial Sequence; identical to SEQ ID NO: 6445
  Cyclic GFR-binding peptide
  MOD_RES (35), (35): Xaa is C or S

SEQ ID NO: 45171 - protein, 31 aa, Artificial Sequence
  Cyclic GFR-binding peptide
  MOD_RES (2), (3): Xaa is C or S
AXXVPTELNAISMLYFDENEKVVLKKYRDMV

SEQ ID NO: 45172 - protein, 29 aa, Artificial Sequence
  Cyclic GFR-binding peptide
VPTKLSATSVLYYDDMGVPTLRKHREGMS

SEQ ID NO: 45173 - protein, 28 aa, Artificial Sequence
  Cyclic GFR-binding peptide
  MOD_RES (1), (1): Xaa is C or S
XVPTKLSAISVLYLDDMGVPTLKNYQEG

SEQ ID NO: 45174 - protein, 26 aa, Artificial Sequence
  Cyclic GFR-binding peptide
ELNAISMLYFDENEKVVLKKYRDMVV

SEQ ID NO: 45175 - protein, 29 aa, Artificial Sequence
  Cyclic GFR-binding peptide
  MOD_RES (1), (2): Xaa is C or S
XXAPTQLSAISVLYLDDSSNVILKNYQNM

SEQ ID NO: 45176 - protein, 22 aa, Artificial Sequence
  Cyclic GFR-binding peptide
LSATSMLYYDENEKVVLRKHRD

SEQ ID NO: 45177 - protein, 31 aa, Artificial Sequence
  Cyclic GFR-binding peptide
  MOD_RES (31), (31): Xaa is C or S
LSATSVLYYEIVRKKPIFLRKHRTLEDHLAX

SEQ ID NO: 45178 - protein, 30 aa, Artificial Sequence
  Cyclic GFR-binding peptide
  MOD_RES (30), (30): Xaa is C or S
TELNAISMLYFDEYDKVVLKKYREMVVEGX

SEQ ID NO: 45179 - protein, 33 aa, Artificial Sequence
  Cyclic GFR-binding peptide
  MOD_RES (4), (5): Xaa is C or S
AAPXXVPQALSPISILYKVGRKPKVLKYHYMIV

SEQ ID NO: 45180 - protein, 31 aa, Artificial Sequence
  Cyclic GFR-binding peptide
  MOD_RES (1), (2): Xaa is C or S
XXVPQALNAISILYFVGRKPKVLKKYRMIVR

SEQ ID NO: 45181 - protein, 29 aa, Artificial Sequence
  Cyclic GFR-binding peptide
SQDLNAISILYFIGKTPKILKKYRMIVKS

SEQ ID NO: 45182 - protein, 28 aa, Artificial Sequence
  Cyclic GFR-binding peptide
QLSPISVLYKEIVRKKPIFLKYHYTLED

SEQ ID NO: 45183 - protein, 27 aa, Artificial Sequence
  Cyclic GFR-binding peptide
  MOD_RES (27), (27): Xaa is C or S
SPISVLYKDDSSNVILKYHYNMVVRSX

SEQ ID NO: 45184 - protein, 36 aa, Artificial Sequence; identical to SEQ ID NO: 6449
  Cyclic GFR-binding peptide
  MOD_RES (2), (3), (35): Xaa is C or S

SEQ ID NO: 45185 - protein, 28 aa, Artificial Sequence
  Cyclic GFR-binding peptide
  MOD_RES (1), (1): Xaa is C or S
XAPTKLSAISVLYLDDSSNVILKNYQNM

SEQ ID NO: 45186 - protein, 34 aa, Artificial Sequence
  Cyclic GFR-binding peptide
  MOD_RES (6), (7): Xaa is C or S
AVPKAXXAPTKLSPISVLYKDSSNNVILKYHYNM

SEQ ID NO: 45187 - protein, 37 aa, Artificial Sequence; identical to SEQ ID NO: 6450
  Cyclic GFR-binding peptide
  MOD_RES (7), (7): Xaa is C or S

SEQ ID NO: 45188 - protein, 43 aa, Artificial Sequence; identical to SEQ ID NO: 6451
  Cyclic GFR-binding peptide
  MOD_RES (5), (42): Xaa is C or S

SEQ ID NO: 45189 - protein, 30 aa, Artificial Sequence
  Cyclic GFR-binding peptide
  MOD_RES (27), (29): Xaa is C or S
SPISMLYKDEYDKVVLKYHYEMVVEGXGXR

SEQ ID NO: 45190 - protein, 28 aa, Artificial Sequence
  Cyclic GFR-binding peptide
  MOD_RES (1), (2): Xaa is C or S
XXAPTKLNAISVLYFDSSNNVILKKYRN

SEQ ID NO: 45191 - protein, 31 aa, Artificial Sequence; identical to SEQ ID NO: 6453
  Cyclic GFR-binding peptide
  MOD_RES (1), (1): Xaa is C or S

SEQ ID NO: 45192 - protein, 36 aa, Artificial Sequence; identical to SEQ ID NO: 6454
  Cyclic GFR-binding peptide
  MOD_RES (2), (3), (34), (36): Xaa is C or S

SEQ ID NO: 45193 - protein, 29 aa, Artificial Sequence
  Cyclic GFR-binding peptide
PTQLSPISVLYKDDSSNVILKYHYNMVVR

SEQ ID NO: 45194 - protein, 34 aa, Artificial Sequence; identical to SEQ ID NO: 6457
  Cyclic GFR-binding peptide
  MOD_RES (1), (34): Xaa is C or S

SEQ ID NO: 45195 - protein, 31 aa, Artificial Sequence
  Cyclic GFR-binding peptide
  MOD_RES (4), (5): Xaa is C or S
ASPXXVSQDLSAISILYLIGKTPKILKNYQM

SEQ ID NO: 45196 - protein, 38 aa, Artificial Sequence; identical to SEQ ID NO: 6458
  Cyclic GFR-binding peptide
  MOD_RES (36), (38): Xaa is C or S

SEQ ID NO: 45197 - protein, 24 aa, Artificial Sequence
  Cyclic GFR-binding peptide
TELSATSMLYYDENEKVVLRKHRD

SEQ ID NO: 45198 - protein, 37 aa, Artificial Sequence; identical to SEQ ID NO: 6459
  Cyclic GFR-binding peptide
  MOD_RES (6), (7): Xaa is C or S

SEQ ID NO: 45199 - protein, 26 aa, Artificial Sequence
  Cyclic GFR-binding peptide
PTKLSPISVLYKDSSNNVILKYHYNM

SEQ ID NO: 45200 - protein, 38 aa, Artificial Sequence; identical to SEQ ID NO: 6461
  Cyclic GFR-binding peptide
  MOD_RES (35), (37): Xaa is C or S

SEQ ID NO: 45201 - protein, 29 aa, Artificial Sequence
  Cyclic GFR-binding peptide
PTKLNAISVLYFDSSNNVILKKYRNMVVK

SEQ ID NO: 45202 - protein, 30 aa, Artificial Sequence
  Cyclic GFR-binding peptide
  MOD_RES (1), (1): Xaa is C or S
XVPQDLSPISILYKVGRTPKVLKYHYMVVK

SEQ ID NO: 45203 - protein, 30 aa, Artificial Sequence
  Cyclic GFR-binding peptide
  MOD_RES (3), (4): Xaa is C or S
KPXXAPTKLSATSVLYYDDSSNVILRKHRN

SEQ ID NO: 45204 - protein, 31 aa, Artificial Sequence
  Cyclic GFR-binding peptide
  MOD_RES (30), (30): Xaa is C or S
SQDLSPISILYKIGKTPKILKYHYMIVKSXK

SEQ ID NO: 45205 - protein, 37 aa, Artificial Sequence; identical to SEQ ID NO: 6463
  Cyclic GFR-binding peptide
  MOD_RES (5), (6): Xaa is C or S

SEQ ID NO: 45206 - protein, 29 aa, Artificial Sequence
  Cyclic GFR-binding peptide
  MOD_RES (29), (29): Xaa is C or S
KLSPISVLYKDSSNNVILKYHYNMVVKAX

SEQ ID NO: 45207 - protein, 34 aa, Artificial Sequence; identical to SEQ ID NO: 6464
  Cyclic GFR-binding peptide
  MOD_RES (33), (33): Xaa is C or S

SEQ ID NO: 45208 - protein, 42 aa, Artificial Sequence; identical to SEQ ID NO: 6465
  Cyclic GFR-binding peptide
  MOD_RES (7), (39), (41): Xaa is C or S

SEQ ID NO: 45209 - protein, 33 aa, Artificial Sequence; identical to SEQ ID NO: 6467
  Cyclic GFR-binding peptide
  MOD_RES (33), (33): Xaa is C or S

SEQ ID NO: 45210 - protein, 30 aa, Artificial Sequence
  Cyclic GFR-binding peptide
  MOD_RES (2), (3): Xaa is C or S
AXXAPTKLSPISVLYKDSSNNVILKYHYNM

SEQ ID NO: 45211 - protein, 21 aa, Artificial Sequence
  Cyclic GFR-binding peptide
SAISILYLIGKTPKILKNYQM

SEQ ID NO: 45212 - protein, 27 aa, Artificial Sequence
  Cyclic GFR-binding peptide
KLSAISVLYLDSSNNVILKNYQNMVVK

SEQ ID NO: 45213 - protein, 30 aa, Artificial Sequence; identical to SEQ ID NO: 6468
  Cyclic GFR-binding peptide

SEQ ID NO: 45214 - protein, 22 aa, Artificial Sequence
  Cyclic GFR-binding peptide
LSAISILYLVGRKPKVLKNYQM

SEQ ID NO: 45215 - protein, 29 aa, Artificial Sequence
  Cyclic GFR-binding peptide
  MOD_RES (27), (29): Xaa is C or S
LSAISILYLVGRKPKVLKNYQMIVRSXKX

SEQ ID NO: 45216 - protein, 36 aa, Artificial Sequence
  Cyclic GFR-binding peptide
  MOD_RES (6), (7): Xaa is C or S
KIPKAXXVPTELSPISMLYKDENEKVVLKYHYDMVV

SEQ ID NO: 45217 - protein, 36 aa, Artificial Sequence; identical to SEQ ID NO: 6471
  Cyclic GFR-binding peptide
  MOD_RES (1), (33), (35): Xaa is C or S

SEQ ID NO: 45218 - protein, 27 aa, Artificial Sequence
  Cyclic GFR-binding peptide
  MOD_RES (1), (1): Xaa is C or S
XVPQALSATSILYYVGRKPKVLRKHRM

SEQ ID NO: 45219 - protein, 40 aa, Artificial Sequence; identical to SEQ ID NO: 6473
  Cyclic GFR-binding peptide
  MOD_RES (3), (40): Xaa is C or S

SEQ ID NO: 45220 - protein, 39 aa, Artificial Sequence; identical to SEQ ID NO: 6474
  Cyclic GFR-binding peptide
  MOD_RES (6), (7): Xaa is C or S

SEQ ID NO: 45221 - protein, 23 aa, Artificial Sequence
  Cyclic GFR-binding peptide
DLNAISILYFIGKTPKILKKYRM

SEQ ID NO: 45222 - protein, 35 aa, Artificial Sequence; identical to SEQ ID NO: 6477
  Cyclic GFR-binding peptide
  MOD_RES (32), (34): Xaa is C or S

SEQ ID NO: 45223 - protein, 39 aa, Artificial Sequence; identical to SEQ ID NO: 6478
  Cyclic GFR-binding peptide
  MOD_RES (6), (7), (39): Xaa is C or S

SEQ ID NO: 45224 - protein, 31 aa, Artificial Sequence
  Cyclic GFR-binding peptide
VQLSATSVLYYEIVRKKPIFLRKHRTLEDHL

SEQ ID NO: 45225 - protein, 25 aa, Artificial Sequence
  Cyclic GFR-binding peptide
VPQDLNAISILYFVGRTPKVLKKYR

SEQ ID NO: 45226 - protein, 34 aa, Artificial Sequence
  Cyclic GFR-binding peptide
  MOD_RES (32), (34): Xaa is C or S
QLSATSVLYYEIVRKKPIFLRKHRTLEDHLAXKX

SEQ ID NO: 45227 - protein, 41 aa, Artificial Sequence; identical to SEQ ID NO: 6481
  Cyclic GFR-binding peptide
  MOD_RES (6), (7), (38), (40): Xaa is C or S

SEQ ID NO: 45228 - protein, 39 aa, Artificial Sequence; identical to SEQ ID NO: 6482
  Cyclic GFR-binding peptide
  MOD_RES (6), (7), (38): Xaa is C or S

SEQ ID NO: 45229 - protein, 34 aa, Artificial Sequence
  Cyclic GFR-binding peptide
  MOD_RES (4), (4): Xaa is C or S
NVQXRPTQVQLSPISVLYKEIVRKKPIFLKYHYT

SEQ ID NO: 45230 - protein, 32 aa, Artificial Sequence
  Cyclic GFR-binding peptide
  MOD_RES (5), (6): Xaa is C or S
VPKAXXAPTKLNAISVLYFDSSNNVILKKYRN

SEQ ID NO: 45231 - protein, 30 aa, Artificial Sequence
  Cyclic GFR-binding peptide
  MOD_RES (2), (3): Xaa is C or S
PXXAPTKLSPISVLYKDDSSNVILKYHYNM

SEQ ID NO: 45232 - protein, 29 aa, Artificial Sequence
  Cyclic GFR-binding peptide
  MOD_RES (3), (4): Xaa is C or S
SPXXVSQDLSAISILYLIGKTPKILKNYQ

SEQ ID NO: 45233 - protein, 23 aa, Artificial Sequence
  Cyclic GFR-binding peptide
NAISILYFIGKTPKILKKYRMIV

SEQ ID NO: 45234 - protein, 32 aa, Artificial Sequence
  Cyclic GFR-binding peptide
  MOD_RES (3), (4): Xaa is C or S
KAXXAPTKLNAISVLYFDSSNNVILKKYRNMV

SEQ ID NO: 45235 - protein, 37 aa, Artificial Sequence; identical to SEQ ID NO: 6487
  Cyclic GFR-binding peptide
  MOD_RES (5), (6), (37): Xaa is C or S

SEQ ID NO: 45236 - protein, 31 aa, Artificial Sequence
  Cyclic GFR-binding peptide
SAISVLYLEIVRKKPIFLKNYQAAAAAAAAA

SEQ ID NO: 45237 - protein, 28 aa, Artificial Sequence
  Cyclic GFR-binding peptide
  MOD_RES (27), (27): Xaa is C or S
SATSVLYYDDSSNVILRKHRNMVVRSXG

SEQ ID NO: 45238 - protein, 33 aa, Artificial Sequence
  Cyclic GFR-binding peptide
  MOD_RES (3), (3): Xaa is C or S
VQXRPTQVQLSATSVLYYEIVRKKPIFLRKHRT

SEQ ID NO: 45239 - protein, 37 aa, Artificial Sequence; identical to SEQ ID NO: 6490
  Cyclic GFR-binding peptide
  MOD_RES (5), (6), (37): Xaa is C or S

SEQ ID NO: 45240 - protein, 29 aa, Artificial Sequence
  Cyclic GFR-binding peptide
  MOD_RES (2), (3): Xaa is C or S
PXXAPTKLSATSVLYYDDSSNVILRKHRN

SEQ ID NO: 45241 - protein, 24 aa, Artificial Sequence
  Cyclic GFR-binding peptide
SATSILYYVGRTPKVLRKHRMVVK

SEQ ID NO: 45242 - protein, 40 aa, Artificial Sequence; identical to SEQ ID NO: 6491
  Cyclic GFR-binding peptide
  MOD_RES (4), (5), (37), (39): Xaa is C or S

SEQ ID NO: 45243 - protein, 30 aa, Artificial Sequence
  Cyclic GFR-binding peptide
  MOD_RES (1), (2): Xaa is C or S
XXAPTKLSATSVLYYDDSSNVILRKHRNMV

SEQ ID NO: 45244 - protein, 34 aa, Artificial Sequence
  Cyclic GFR-binding peptide
  MOD_RES (2), (3): Xaa is C or S
AXXVPTKLSAISVLYLDDMGVPTLKNYQEGMSVA

SEQ ID NO: 45245 - protein, 28 aa, Artificial Sequence
  Cyclic GFR-binding peptide
PTQLSPISVLYKDDSSNVILKYHYNMVV

SEQ ID NO: 45246 - protein, 28 aa, Artificial Sequence
  Cyclic GFR-binding peptide
  MOD_RES (1), (1): Xaa is C or S
XVPTELSATSMLYYDEYDKVVLRKHREM

SEQ ID NO: 45247 - protein, 35 aa, Artificial Sequence
  Cyclic GFR-binding peptide
  MOD_RES (6), (7): Xaa is C or S
KVGKAXXVPTKLSATSVLYYDDMGVPTLRKHREGM

SEQ ID NO: 45248 - protein, 28 aa, Artificial Sequence
  Cyclic GFR-binding peptide
VPQDLSPISILYKVGRTPKVLKYHYMVV

SEQ ID NO: 45249 - protein, 30 aa, Artificial Sequence
  Cyclic GFR-binding peptide
  MOD_RES (27), (29): Xaa is C or S
NAISMLYFDENEKVVLKKYRDMVVEGXGXR

SEQ ID NO: 45250 - protein, 40 aa, Artificial Sequence; identical to SEQ ID NO: 6494
  Cyclic GFR-binding peptide
  MOD_RES (3), (40): Xaa is C or S

SEQ ID NO: 45251 - protein, 35 aa, Artificial Sequence; identical to SEQ ID NO: 6496
  Cyclic GFR-binding peptide
  MOD_RES (1), (2), (33), (35): Xaa is C or S

SEQ ID NO: 45252 - protein, 33 aa, Artificial Sequence
  Cyclic GFR-binding peptide
  MOD_RES (1), (1): Xaa is C or S
XRPTQVQLNAISVLYFEIVRKKPIFLKKYRTLE

SEQ ID NO: 45253 - protein, 24 aa, Artificial Sequence
  Cyclic GFR-binding peptide
NAISILYFVGRKPKVLKKYRMIVR

SEQ ID NO: 45254 - protein, 27 aa, Artificial Sequence
  Cyclic GFR-binding peptide
SAISMLYLDENEKVVLKNYQDENEKVV

SEQ ID NO: 45255 - protein, 36 aa, Artificial Sequence; identical to SEQ ID NO: 6500
  Cyclic GFR-binding peptide
  MOD_RES (2), (3), (35): Xaa is C or S

SEQ ID NO: 45256 - protein, 28 aa, Artificial Sequence
  Cyclic GFR-binding peptide
APTKLSAISVLYLDSSNNVILKNYQNMV

SEQ ID NO: 45257 - protein, 35 aa, Artificial Sequence; identical to SEQ ID NO: 6501
  Cyclic GFR-binding peptide
  MOD_RES (32), (34): Xaa is C or S

SEQ ID NO: 45258 - protein, 31 aa, Artificial Sequence; identical to SEQ ID NO: 6504
  Cyclic GFR-binding peptide
  MOD_RES (1), (1): Xaa is C or S

SEQ ID NO: 45259 - protein, 36 aa, Artificial Sequence
  Cyclic GFR-binding peptide
  MOD_RES (6), (7): Xaa is C or S
KVGKAXXVPTKLSATSVLYYDDMGVPTLRKHREGMS

SEQ ID NO: 45260 - protein, 30 aa, Artificial Sequence
  Cyclic GFR-binding peptide
  MOD_RES (2), (2): Xaa is C or S
TXAPTKLSATSVLYYDDSSNVILRKHRNMV

SEQ ID NO: 45261 - protein, 26 aa, Artificial Sequence
  Cyclic GFR-binding peptide
KLSATSVLYYDDMGVPTLRKHREGMS

SEQ ID NO: 45262 - protein, 34 aa, Artificial Sequence; identical to SEQ ID NO: 6506
  Cyclic GFR-binding peptide
  MOD_RES (2), (3), (34): Xaa is C or S

SEQ ID NO: 45263 - protein, 23 aa, Artificial Sequence
  Cyclic GFR-binding peptide
TELSPISMLYKDENEKVVLKYHY

SEQ ID NO: 45264 - protein, 31 aa, Artificial Sequence; identical to SEQ ID NO: 6509
  Cyclic GFR-binding peptide

SEQ ID NO: 45265 - protein, 33 aa, Artificial Sequence; identical to SEQ ID NO: 6510
  Cyclic GFR-binding peptide
  MOD_RES (2), (3): Xaa is C or S

SEQ ID NO: 45266 - protein, 24 aa, Artificial Sequence
  Cyclic GFR-binding peptide
LSAISILYLIGKTPKILKNYQMIV

SEQ ID NO: 45267 - protein, 32 aa, Artificial Sequence
  Cyclic GFR-binding peptide
  MOD_RES (6), (7): Xaa is C or S
KIPKAXXVPTELNAISMLYFDENEKVVLKKYR

SEQ ID NO: 45268 - protein, 33 aa, Artificial Sequence; identical to SEQ ID NO: 6511
  Cyclic GFR-binding peptide

SEQ ID NO: 45269 - protein, 29 aa, Artificial Sequence
  Cyclic GFR-binding peptide
  MOD_RES (29), (29): Xaa is C or S
QDLSATSILYYVGRTPKVLRKHRMVVKSX

SEQ ID NO: 45270 - protein, 29 aa, Artificial Sequence
  Cyclic GFR-binding peptide
  MOD_RES (26), (28): Xaa is C or S
NAISILYFVGRTPKVLKKYRMVVKSXKXS

SEQ ID NO: 45271 - protein, 37 aa, Artificial Sequence; identical to SEQ ID NO: 6512
  Cyclic GFR-binding peptide
  MOD_RES (1), (2), (34), (36): Xaa is C or S

SEQ ID NO: 45272 - protein, 37 aa, Artificial Sequence; identical to SEQ ID NO: 6513
  Cyclic GFR-binding peptide
  MOD_RES (1), (2), (34), (36): Xaa is C or S

SEQ ID NO: 45273 - protein, 35 aa, Artificial Sequence
  Cyclic GFR-binding peptide
  MOD_RES (6), (7): Xaa is C or S
ASASPXXVPQDLSAISILYLVGRTPKVLKNYQMVV

SEQ ID NO: 45274 - protein, 35 aa, Artificial Sequence
  Cyclic GFR-binding peptide
  MOD_RES (32), (34): Xaa is C or S
QLSAISVLYLEIVRKKPIFLKNYQTLEDHLAXKXE

SEQ ID NO: 45275 - protein, 32 aa, Artificial Sequence
  Cyclic GFR-binding peptide
  MOD_RES (3), (3): Xaa is C or S
PTXAPTKLSPISVLYKDDSSNVILKYHYNMVV

SEQ ID NO: 45276 - protein, 37 aa, Artificial Sequence; identical to SEQ ID NO: 6514
  Cyclic GFR-binding peptide
  MOD_RES (3), (4), (35), (37): Xaa is C or S

SEQ ID NO: 45277 - protein, 33 aa, Artificial Sequence
  Cyclic GFR-binding peptide
  MOD_RES (30), (32): Xaa is C or S
PQALSPISILYKVGRKPKVLKYHYMIVRSXKXS

SEQ ID NO: 45278 - protein, 36 aa, Artificial Sequence; identical to SEQ ID NO: 6517
  Cyclic GFR-binding peptide
  MOD_RES (3), (4), (35): Xaa is C or S

SEQ ID NO: 45279 - protein, 34 aa, Artificial Sequence
  Cyclic GFR-binding peptide
  MOD_RES (5), (6): Xaa is C or S
IPKAXXVPTELNAISMLYFDEYDKVVLKKYREMV

SEQ ID NO: 45280 - protein, 34 aa, Artificial Sequence
  Cyclic GFR-binding peptide
  MOD_RES (32), (34): Xaa is C or S
PTKLSATSVLYYDDMGVPTLRKHREGMSVAEXGX

SEQ ID NO: 45281 - protein, 40 aa, Artificial Sequence; identical to SEQ ID NO: 6518
  Cyclic GFR-binding peptide
  MOD_RES (6), (7), (39): Xaa is C or S

SEQ ID NO: 45282 - protein, 37 aa, Artificial Sequence; identical to SEQ ID NO: 6519
  Cyclic GFR-binding peptide
  MOD_RES (4), (5), (37): Xaa is C or S

SEQ ID NO: 45283 - protein, 26 aa, Artificial Sequence
  Cyclic GFR-binding peptide
APTQLSAISVLYLDDSSNVILKNYQN

SEQ ID NO: 45284 - protein, 26 aa, Artificial Sequence
  Cyclic GFR-binding peptide
LSPISMLYKDENEKVVLKYHYDMVVE

SEQ ID NO: 45285 - protein, 36 aa, Artificial Sequence; identical to SEQ ID NO: 6520
  Cyclic GFR-binding peptide
  MOD_RES (2), (3), (34), (36): Xaa is C or S

SEQ ID NO: 45286 - protein, 28 aa, Artificial Sequence
  Cyclic GFR-binding peptide
  MOD_RES (1), (2): Xaa is C or S
XXVPTKLSATSVLYYDDMGVPTLRKHRE

SEQ ID NO: 45287 - protein, 25 aa, Artificial Sequence
  Cyclic GFR-binding peptide
APTKLNAISVLYFDSSNNVILKKYR

SEQ ID NO: 45288 - protein, 30 aa, Artificial Sequence
  Cyclic GFR-binding peptide
  MOD_RES (1), (1): Xaa is C or S
XVPTELNAISMLYFDEYDKVVLKKYREMVV

SEQ ID NO: 45289 - protein, 25 aa, Artificial Sequence
  Cyclic GFR-binding peptide
APTQLSATSVLYYDDSSNVILRKHR

SEQ ID NO: 45290 - protein, 32 aa, Artificial Sequence
  Cyclic GFR-binding peptide
  MOD_RES (3), (4): Xaa is C or S
SPXXVPQDLSAISILYLVGRTPKVLKNYQMVV

SEQ ID NO: 45291 - protein, 40 aa, Artificial Sequence; identical to SEQ ID NO: 6524
  Cyclic GFR-binding peptide
  MOD_RES (1), (38), (40): Xaa is C or S

SEQ ID NO: 45292 - protein, 37 aa, Artificial Sequence; identical to SEQ ID NO: 6525
  Cyclic GFR-binding peptide
  MOD_RES (6), (7): Xaa is C or S

SEQ ID NO: 45293 - protein, 30 aa, Artificial Sequence
  Cyclic GFR-binding peptide
  MOD_RES (3), (4): Xaa is C or S
SPXXVPQDLNAISILYFVGRTPKVLKKYRM

SEQ ID NO: 45294 - protein, 36 aa, Artificial Sequence; identical to SEQ ID NO: 6526
  Cyclic GFR-binding peptide
  MOD_RES (1), (33), (35): Xaa is C or S

SEQ ID NO: 45295 - protein, 32 aa, Artificial Sequence
  Cyclic GFR-binding peptide
  MOD_RES (3), (4): Xaa is C or S
SPXXVPQDLSATSILYYVGRTPKVLRKHRMVV

SEQ ID NO: 45296 - protein, 31 aa, Artificial Sequence
  Cyclic GFR-binding peptide
  MOD_RES (1), (1): Xaa is C or S
XRPTQVQLNAISVLYFEIVRKKPIFLKKYRT

SEQ ID NO: 45297 - protein, 24 aa, Artificial Sequence
  Cyclic GFR-binding peptide
SATSMLYYDENEKVVLRKHRDMVV

SEQ ID NO: 45298 - protein, 28 aa, Artificial Sequence
  Cyclic GFR-binding peptide
  MOD_RES (27), (27): Xaa is C or S
LNAISILYFVGRTPKVLKKYRMVVKSXK

SEQ ID NO: 45299 - protein, 31 aa, Artificial Sequence
  Cyclic GFR-binding peptide
  MOD_RES (31), (31): Xaa is C or S
LSAISVLYLEIVRKKPIFLKNYQTLEDHLAX

SEQ ID NO: 45300 - protein, 28 aa, Artificial Sequence
  Cyclic GFR-binding peptide
  MOD_RES (1), (1): Xaa is C or S
XVPTELSPISMLYKDEYDKVVLKYHYEM

SEQ ID NO: 45301 - protein, 28 aa, Artificial Sequence
  Cyclic GFR-binding peptide
VQLSATSVLYYEIVRKKPIFLRKHRTLE

SEQ ID NO: 45302 - protein, 23 aa, Artificial Sequence
  Cyclic GFR-binding peptide
TQLSAISVLYLDDSSNVILKNYQ

SEQ ID NO: 45303 - protein, 33 aa, Artificial Sequence
  Cyclic GFR-binding peptide
  MOD_RES (1), (1): Xaa is C or S
XRPTQVQLSATSVLYYEIVRKKPIFLRKHRTLE

SEQ ID NO: 45304 - protein, 36 aa, Artificial Sequence; identical to SEQ ID NO: 6528
  Cyclic GFR-binding peptide
  MOD_RES (5), (6): Xaa is C or S

SEQ ID NO: 45305 - protein, 29 aa, Artificial Sequence
  Cyclic GFR-binding peptide
  MOD_RES (29), (29): Xaa is C or S
KLNAISVLYFDSSNNVILKKYRNMVVKAX

SEQ ID NO: 45306 - protein, 31 aa, Artificial Sequence
  Cyclic GFR-binding peptide
  MOD_RES (5), (6): Xaa is C or S
VPKPXXAPTKLSAISVLYLDDSSNVILKNYQ

SEQ ID NO: 45307 - protein, 35 aa, Artificial Sequence; identical to SEQ ID NO: 6529
  Cyclic GFR-binding peptide

SEQ ID NO: 45308 - protein, 29 aa, Artificial Sequence
  Cyclic GFR-binding peptide
PTQLSAISVLYLDDSSNVILKNYQNMVVR

SEQ ID NO: 45309 - protein, 36 aa, Artificial Sequence; identical to SEQ ID NO: 6530
  Cyclic GFR-binding peptide
  MOD_RES (3), (4): Xaa is C or S

SEQ ID NO: 45310 - protein, 30 aa, Artificial Sequence
  Cyclic GFR-binding peptide
  MOD_RES (1), (1): Xaa is C or S
XVPQDLSAISILYLVGRTPKVLKNYQMVVK

SEQ ID NO: 45311 - protein, 25 aa, Artificial Sequence
  Cyclic GFR-binding peptide
NAISILYFVGRTPKVLKKYRMVVKS

SEQ ID NO: 45312 - protein, 34 aa, Artificial Sequence; identical to SEQ ID NO: 6533
  Cyclic GFR-binding peptide
  MOD_RES (1), (2), (34): Xaa is C or S

SEQ ID NO: 45313 - protein, 29 aa, Artificial Sequence
  Cyclic GFR-binding peptide
  MOD_RES (1), (1): Xaa is C or S
XVPQALSAISILYLVGRKPKVLKNYQMIV

SEQ ID NO: 45314 - protein, 34 aa, Artificial Sequence; identical to SEQ ID NO: 6535
  Cyclic GFR-binding peptide
  MOD_RES (1), (2), (34): Xaa is C or S

SEQ ID NO: 45315 - protein, 28 aa, Artificial Sequence
  Cyclic GFR-binding peptide
QDLNAISILYFIGKTPKILKKYRMIVKS

SEQ ID NO: 45316 - protein, 40 aa, Artificial Sequence; identical to SEQ ID NO: 6539
  Cyclic GFR-binding peptide
  MOD_RES (4), (4): Xaa is C or S

SEQ ID NO: 45317 - protein, 35 aa, Artificial Sequence
  Cyclic GFR-binding peptide
  MOD_RES (6), (7): Xaa is C or S
KVGKAXXVPTKLSAISVLYLDDMGVPTLKNYQEGM

SEQ ID NO: 45318 - protein, 22 aa, Artificial Sequence
  Cyclic GFR-binding peptide
LSATSILYYIGKTPKILRKHRM

SEQ ID NO: 45319 - protein, 27 aa, Artificial Sequence
  Cyclic GFR-binding peptide
  MOD_RES (27), (27): Xaa is C or S
NAISMLYFDEYDKVVLKKYREMVVEGX

SEQ ID NO: 45320 - protein, 29 aa, Artificial Sequence
  Cyclic GFR-binding peptide
VPQDLSAISILYLVGRTPKVLKNYQMVVK

SEQ ID NO: 45321 - protein, 34 aa, Artificial Sequence
  Cyclic GFR-binding peptide
  MOD_RES (5), (6): Xaa is C or S
SAAPXXVPQALNAISILYFVGRKPKVLKKYRMIV

SEQ ID NO: 45322 - protein, 32 aa, Artificial Sequence
  Cyclic GFR-binding peptide
  MOD_RES (2), (3): Xaa is C or S
AXXAPTKLNAISVLYFDSSNNVILKKYRNMVV

SEQ ID NO: 45323 - protein, 27 aa, Artificial Sequence
  Cyclic GFR-binding peptide
APTKLSATSVLYYDDSSNVILRKHRNM

SEQ ID NO: 45324 - protein, 34 aa, Artificial Sequence
  Cyclic GFR-binding peptide
  MOD_RES (7), (7): Xaa is C or S
HVTKPTXAPTKLSPISVLYKDDSSNVILKYHYNM

SEQ ID NO: 45325 - protein, 34 aa, Artificial Sequence
  Cyclic GFR-binding peptide
  MOD_RES (7), (7): Xaa is C or S
HVTKPTXAPTKLSATSVLYYDDSSNVILRKHRNM

SEQ ID NO: 45326 - protein, 39 aa, Artificial Sequence; identical to SEQ ID NO: 6541
  Cyclic GFR-binding peptide
  MOD_RES (5), (6), (38): Xaa is C or S

SEQ ID NO: 45327 - protein, 41 aa, Artificial Sequence; identical to SEQ ID NO: 6542
  Cyclic GFR-binding peptide
  MOD_RES (5), (6), (38), (40): Xaa is C or S

SEQ ID NO: 45328 - protein, 37 aa, Artificial Sequence; identical to SEQ ID NO: 6543
  Cyclic GFR-binding peptide
  MOD_RES (6), (7): Xaa is C or S

SEQ ID NO: 45329 - protein, 35 aa, Artificial Sequence
  Cyclic GFR-binding peptide
  MOD_RES (5), (6): Xaa is C or S
IPKAXXVPTELSPISMLYKDENEKVVLKYHYDMVV

SEQ ID NO: 45330 - protein, 34 aa, Artificial Sequence; identical to SEQ ID NO: 6544
  Cyclic GFR-binding peptide
  MOD_RES (2), (34): Xaa is C or S

SEQ ID NO: 45331 - protein, 28 aa, Artificial Sequence
  Cyclic GFR-binding peptide
  MOD_RES (28), (28): Xaa is C or S
LSATSMLYYDEYDKVVLRKHREMVVEGX

SEQ ID NO: 45332 - protein, 27 aa, Artificial Sequence
  Cyclic GFR-binding peptide
  MOD_RES (27), (27): Xaa is C or S
SPISMLYKDEYDKVVLKYHYEMVVEGX

SEQ ID NO: 45333 - protein, 27 aa, Artificial Sequence
  Cyclic GFR-binding peptide
TQLSATSVLYYDDSSNVILRKHRNMVV

SEQ ID NO: 45334 - protein, 32 aa, Artificial Sequence
  Cyclic GFR-binding peptide
  MOD_RES (31), (31): Xaa is C or S
PTKLNAISVLYFDSSNNVILKKYRNMVVKAXG

SEQ ID NO: 45335 - protein, 31 aa, Artificial Sequence; identical to SEQ ID NO: 6549
  Cyclic GFR-binding peptide

SEQ ID NO: 45336 - protein, 36 aa, Artificial Sequence; identical to SEQ ID NO: 6548
  Cyclic GFR-binding peptide
  MOD_RES (3), (4), (35): Xaa is C or S

SEQ ID NO: 45337 - protein, 35 aa, Artificial Sequence; identical to SEQ ID NO: 6552
  Cyclic GFR-binding peptide
  MOD_RES (3), (4): Xaa is C or S

SEQ ID NO: 45338 - protein, 30 aa, Artificial Sequence
  Cyclic GFR-binding peptide
  MOD_RES (4), (5): Xaa is C or S
PKAXXAPTKLNAISVLYFDSSNNVILKKYR

SEQ ID NO: 45339 - protein, 29 aa, Artificial Sequence
  Cyclic GFR-binding peptide
PTKLSATSVLYYDDSSNVILRKHRNMVVR

SEQ ID NO: 45340 - protein, 35 aa, Artificial Sequence
  Cyclic GFR-binding peptide
  MOD_RES (5), (6): Xaa is C or S
SASPXXVSQDLSPISILYKIGKTPKILKYHYMIVK

SEQ ID NO: 45341 - protein, 30 aa, Artificial Sequence
  Cyclic GFR-binding peptide
PTELSATSMLYYDENEKVVLRKHRDMVVEG

SEQ ID NO: 45342 - protein, 27 aa, Artificial Sequence
  Cyclic GFR-binding peptide
LSATSMLYYDEYDKVVLRKHREMVVEG

SEQ ID NO: 45343 - protein, 31 aa, Artificial Sequence; identical to SEQ ID NO: 6553
  Cyclic GFR-binding peptide

SEQ ID NO: 45344 - protein, 27 aa, Artificial Sequence
  Cyclic GFR-binding peptide
VPTKLSATSVLYYDDMGVPTLRKHREG

SEQ ID NO: 45345 - protein, 26 aa, Artificial Sequence
  Cyclic GFR-binding peptide
QALSAISILYLVGRKPKVLKNYQMIV

SEQ ID NO: 45346 - protein, 23 aa, Artificial Sequence
  Cyclic GFR-binding peptide
LSPISVLYKDSSNNVILKYHYNM

SEQ ID NO: 45347 - protein, 29 aa, Artificial Sequence
  Cyclic GFR-binding peptide
VPQALSATSILYYVGRKPKVLRKHRMIVR

SEQ ID NO: 45348 - protein, 34 aa, Artificial Sequence; identical to SEQ ID NO: 6557
  Cyclic GFR-binding peptide

SEQ ID NO: 45349 - protein, 22 aa, Artificial Sequence
  Cyclic GFR-binding peptide
ELNAISMLYFDEYDKVVLKKYR

SEQ ID NO: 45350 - protein, 35 aa, Artificial Sequence
  Cyclic GFR-binding peptide
  MOD_RES (3), (3): Xaa is C or S
VQXRPTQVQLSPISVLYKEIVRKKPIFLKYHYTLE

SEQ ID NO: 45351 - protein, 35 aa, Artificial Sequence
  Cyclic GFR-binding peptide
  MOD_RES (6), (7): Xaa is C or S
ASASPXXVPQDLSPISILYKVGRTPKVLKYHYMVV

SEQ ID NO: 45352 - protein, 40 aa, Artificial Sequence; identical to SEQ ID NO: 6558
  Cyclic GFR-binding peptide
  MOD_RES (5), (37), (39): Xaa is C or S

SEQ ID NO: 45353 - protein, 37 aa, Artificial Sequence; identical to SEQ ID NO: 6561
  Cyclic GFR-binding peptide
  MOD_RES (5), (37): Xaa is C or S

SEQ ID NO: 45354 - protein, 31 aa, Artificial Sequence
  Cyclic GFR-binding peptide
  MOD_RES (1), (2): Xaa is C or S
XXVPTELSPISMLYKDENEKVVLKYHYDMVV

SEQ ID NO: 45355 - protein, 35 aa, Artificial Sequence; identical to SEQ ID NO: 6563
  Cyclic GFR-binding peptide
  MOD_RES (2), (3), (35): Xaa is C or S

SEQ ID NO: 45356 - protein, 24 aa, Artificial Sequence
  Cyclic GFR-binding peptide
QLSAISVLYLEIVRKKPIFLKNYQ

SEQ ID NO: 45357 - protein, 31 aa, Artificial Sequence
  Cyclic GFR-binding peptide
  MOD_RES (28), (30): Xaa is C or S
LSPISVLYKDDSSNVILKYHYNMVVRAXGXH

SEQ ID NO: 45358 - protein, 31 aa, Artificial Sequence
  Cyclic GFR-binding peptide
  MOD_RES (4), (5): Xaa is C or S
ASPXXVPQDLSAISILYLVGRTPKVLKNYQM

SEQ ID NO: 45359 - protein, 29 aa, Artificial Sequence
  Cyclic GFR-binding peptide
RPTQVQLSAISVLYLEIVRKKPIFLKNYQ

SEQ ID NO: 45360 - protein, 31 aa, Artificial Sequence
  Cyclic GFR-binding peptide
  MOD_RES (3), (4): Xaa is C or S
KAXXVPTKLNAISVLYFDDMGVPTLKKYREG

SEQ ID NO: 45361 - protein, 31 aa, Artificial Sequence
  Cyclic GFR-binding peptide
  MOD_RES (29), (31): Xaa is C or S
QLSAISVLYLDDSSNVILKNYQNMVVRAXGX

SEQ ID NO: 45362 - protein, 31 aa, Artificial Sequence
  Cyclic GFR-binding peptide
  MOD_RES (30), (30): Xaa is C or S
PQDLSPISILYKVGRTPKVLKYHYMVVKSXK

SEQ ID NO: 45363 - protein, 23 aa, Artificial Sequence
  Cyclic GFR-binding peptide
SPISMLYKDEYDKVVLKYHYEMV

SEQ ID NO: 45364 - protein, 40 aa, Artificial Sequence; identical to SEQ ID NO: 6565
  Cyclic GFR-binding peptide
  MOD_RES (5), (6), (37), (39): Xaa is C or S

SEQ ID NO: 45365 - protein, 22 aa, Artificial Sequence
  Cyclic GFR-binding peptide
DLNAISILYFVGRTPKVLKKYR

SEQ ID NO: 45366 - protein, 28 aa, Artificial Sequence
  Cyclic GFR-binding peptide
PTKLSAISVLYLDDMGVPTLKNYQEGMS

SEQ ID NO: 45367 - protein, 30 aa, Artificial Sequence
  Cyclic GFR-binding peptide
  MOD_RES (1), (1): Xaa is C or S
XVPTKLSATSVLYYDDMGVPTLRKHREGMS

SEQ ID NO: 45368 - protein, 30 aa, Artificial Sequence; identical to SEQ ID NO: 6566
  Cyclic GFR-binding peptide

SEQ ID NO: 45369 - protein, 32 aa, Artificial Sequence
  Cyclic GFR-binding peptide
  MOD_RES (32), (32): Xaa is C or S
PTKLSAISVLYLDDMGVPTLKNYQEGMSVAEX

SEQ ID NO: 45370 - protein, 33 aa, Artificial Sequence
  Cyclic GFR-binding peptide
  MOD_RES (30), (32): Xaa is C or S
NAISVLYFEIVRKKPIFLKKYRTLEDHLAXKXE

SEQ ID NO: 45371 - protein, 34 aa, Artificial Sequence
  Cyclic GFR-binding peptide
  MOD_RES (4), (5): Xaa is C or S
PKAXXAPTKLSPISVLYKDSSNNVILKYHYNMVV

SEQ ID NO: 45372 - protein, 40 aa, Artificial Sequence; identical to SEQ ID NO: 6570
  Cyclic GFR-binding peptide
  MOD_RES (3), (4), (37), (39): Xaa is C or S

SEQ ID NO: 45373 - protein, 27 aa, Artificial Sequence
  Cyclic GFR-binding peptide
  MOD_RES (1), (1): Xaa is C or S
XVSQDLSATSILYYIGKTPKILRKHRM

SEQ ID NO: 45374 - protein, 40 aa, Artificial Sequence; identical to SEQ ID NO: 6571
  Cyclic GFR-binding peptide
  MOD_RES (4), (5), (38), (40): Xaa is C or S

SEQ ID NO: 45375 - protein, 32 aa, Artificial Sequence
  Cyclic GFR-binding peptide
  MOD_RES (30), (32): Xaa is C or S
PQALSAISILYLVGRKPKVLKNYQMIVRSXKX

SEQ ID NO: 45376 - protein, 24 aa, Artificial Sequence
  Cyclic GFR-binding peptide
LSATSILYYIGKTPKILRKHRMIV

SEQ ID NO: 45377 - protein, 33 aa, Artificial Sequence; identical to SEQ ID NO: 6572
  Cyclic GFR-binding peptide
  MOD_RES (1), (2): Xaa is C or S

SEQ ID NO: 45378 - protein, 22 aa, Artificial Sequence
  Cyclic GFR-binding peptide
LSATSVLYYDDSSNVILRKHRN

SEQ ID NO: 45379 - protein, 28 aa, Artificial Sequence
  Cyclic GFR-binding peptide
  MOD_RES (27), (27): Xaa is C or S
SAISVLYLDSSNNVILKNYQNMVVKAXG

SEQ ID NO: 45380 - protein, 37 aa, Artificial Sequence; identical to SEQ ID NO: 6575
  Cyclic GFR-binding peptide
  MOD_RES (2), (2): Xaa is C or S

SEQ ID NO: 45381 - protein, 27 aa, Artificial Sequence
  Cyclic GFR-binding peptide
LSAISVLYLEIVRKKPIFLKNYQTLED

SEQ ID NO: 45382 - protein, 23 aa, Artificial Sequence
  Cyclic GFR-binding peptide
DLSPISILYKIGKTPKILKYHYM

SEQ ID NO: 45383 - protein, 38 aa, Artificial Sequence; identical to SEQ ID NO: 6579
  Cyclic GFR-binding peptide
  MOD_RES (6), (7), (38): Xaa is C or S

SEQ ID NO: 45384 - protein, 38 aa, Artificial Sequence; identical to SEQ ID NO: 6581
  Cyclic GFR-binding peptide
  MOD_RES (36), (38): Xaa is C or S

SEQ ID NO: 45385 - protein, 34 aa, Artificial Sequence
  Cyclic GFR-binding peptide
  MOD_RES (4), (5): Xaa is C or S
PKPXXAPTQLSAISVLYLDDSSNVILKNYQNMVV

SEQ ID NO: 45386 - protein, 20 aa, Artificial Sequence
  Cyclic GFR-binding peptide
SAISVLYLDDMGVPTLKNYQ

SEQ ID NO: 45387 - protein, 28 aa, Artificial Sequence
  Cyclic GFR-binding peptide
PQDLSAISILYLVGRTPKVLKNYQMVVK

SEQ ID NO: 45388 - protein, 21 aa, Artificial Sequence
  Cyclic GFR-binding peptide
LNAISVLYFDDMGVPTLKKYR

SEQ ID NO: 45389 - protein, 28 aa, Artificial Sequence
  Cyclic GFR-binding peptide
  MOD_RES (28), (28): Xaa is C or S
LSATSVLYYDDSSNVILRKHRNMVVRSX

SEQ ID NO: 45390 - protein, 34 aa, Artificial Sequence; identical to SEQ ID NO: 6583
  Cyclic GFR-binding peptide
  MOD_RES (3), (4): Xaa is C or S

SEQ ID NO: 45391 - protein, 30 aa, Artificial Sequence
  Cyclic GFR-binding peptide
  MOD_RES (1), (1): Xaa is C or S
XVPQALSATSILYYVGRKPKVLRKHRMIVR

SEQ ID NO: 45392 - protein, 33 aa, Artificial Sequence
  Cyclic GFR-binding peptide
  MOD_RES (4), (5): Xaa is C or S
PKAXXAPTKLSPISVLYKDSSNNVILKYHYNMV

SEQ ID NO: 45393 - protein, 36 aa, Artificial Sequence; identical to SEQ ID NO: 6584
  Cyclic GFR-binding peptide
  MOD_RES (1), (33), (35): Xaa is C or S

SEQ ID NO: 45394 - protein, 39 aa, Artificial Sequence; identical to SEQ ID NO: 6585
  Cyclic GFR-binding peptide
  MOD_RES (5), (6), (38): Xaa is C or S

SEQ ID NO: 45395 - protein, 36 aa, Artificial Sequence; identical to SEQ ID NO: 6586
  Cyclic GFR-binding peptide
  MOD_RES (2), (3), (36): Xaa is C or S

SEQ ID NO: 45396 - protein, 25 aa, Artificial Sequence
  Cyclic GFR-binding peptide
NAISVLYFEIVRKKPIFLKKYRTLE

SEQ ID NO: 45397 - protein, 33 aa, Artificial Sequence; identical to SEQ ID NO: 6587
  Cyclic GFR-binding peptide
  MOD_RES (32), (32): Xaa is C or S

SEQ ID NO: 45398 - protein, 31 aa, Artificial Sequence
  Cyclic GFR-binding peptide
  MOD_RES (30), (30): Xaa is C or S
TELSATSMLYYDEYDKVVLRKHREMVVEGXG

SEQ ID NO: 45399 - protein, 27 aa, Artificial Sequence
  Cyclic GFR-binding peptide
KLSPISVLYKDSSNNVILKYHYNMVVK

SEQ ID NO: 45400 - protein, 29 aa, Artificial Sequence
  Cyclic GFR-binding peptide
  MOD_RES (1), (1): Xaa is C or S
XAPTQLSPISVLYKDDSSNVILKYHYNMV

SEQ ID NO: 45401 - protein, 26 aa, Artificial Sequence
  Cyclic GFR-binding peptide
QDLSPISILYKIGKTPKILKYHYMIV

SEQ ID NO: 45402 - protein, 38 aa, Artificial Sequence; identical to SEQ ID NO: 6588
  Cyclic GFR-binding peptide
  MOD_RES (3), (4), (36), (38): Xaa is C or S

SEQ ID NO: 45403 - protein, 34 aa, Artificial Sequence; identical to SEQ ID NO: 6589
  Cyclic GFR-binding peptide
  MOD_RES (1), (2), (33): Xaa is C or S

SEQ ID NO: 45404 - protein, 25 aa, Artificial Sequence
  Cyclic GFR-binding peptide
SATSILYYVGRTPKVLRKHRMVVKS

SEQ ID NO: 45405 - protein, 34 aa, Artificial Sequence; identical to SEQ ID NO: 6592
  Cyclic GFR-binding peptide
  MOD_RES (31), (33): Xaa is C or S

SEQ ID NO: 45406 - protein, 39 aa, Artificial Sequence; identical to SEQ ID NO: 6593
  Cyclic GFR-binding peptide
  MOD_RES (4), (5), (37), (39): Xaa is C or S

SEQ ID NO: 45407 - protein, 37 aa, Artificial Sequence; identical to SEQ ID NO: 6594
  Cyclic GFR-binding peptide
  MOD_RES (6), (7): Xaa is C or S

SEQ ID NO: 45408 - protein, 35 aa, Artificial Sequence; identical to SEQ ID NO: 6596
  Cyclic GFR-binding peptide
  MOD_RES (4), (5): Xaa is C or S

SEQ ID NO: 45409 - protein, 33 aa, Artificial Sequence
  Cyclic GFR-binding peptide
  MOD_RES (4), (5): Xaa is C or S
ASPXXVSQDLSAISILYLIGKTPKILKNYQMIV

SEQ ID NO: 45410 - protein, 35 aa, Artificial Sequence; identical to SEQ ID NO: 6597
  Cyclic GFR-binding peptide
  MOD_RES (33), (35): Xaa is C or S

SEQ ID NO: 45411 - protein, 27 aa, Artificial Sequence
  Cyclic GFR-binding peptide
ELNAISMLYFDEYDKVVLKKYREMVVE

SEQ ID NO: 45412 - protein, 32 aa, Artificial Sequence
  Cyclic GFR-binding peptide
  MOD_RES (6), (7): Xaa is C or S
ASAAPXXVPQALNAISILYFVGRKPKVLKKYR

SEQ ID NO: 45413 - protein, 41 aa, Artificial Sequence; identical to SEQ ID NO: 6598
  Cyclic GFR-binding peptide
  MOD_RES (1), (38), (40): Xaa is C or S

SEQ ID NO: 45414 - protein, 35 aa, Artificial Sequence; identical to SEQ ID NO: 6599
  Cyclic GFR-binding peptide
  MOD_RES (2), (34): Xaa is C or S

SEQ ID NO: 45415 - protein, 29 aa, Artificial Sequence
  Cyclic GFR-binding peptide
VPQDLSPISILYKVGRTPKVLKYHYMVVK

SEQ ID NO: 45416 - protein, 29 aa, Artificial Sequence
  Cyclic GFR-binding peptide
  MOD_RES (1), (2): Xaa is C or S
XXVPTELSATSMLYYDEYDKVVLRKHREM

SEQ ID NO: 45417 - protein, 29 aa, Artificial Sequence
  Cyclic GFR-binding peptide
  MOD_RES (1), (2): Xaa is C or S
XXVPTELNAISMLYFDENEKVVLKKYRDM

SEQ ID NO: 45418 - protein, 30 aa, Artificial Sequence
  Cyclic GFR-binding peptide
  MOD_RES (30), (30): Xaa is C or S
TELSPISMLYKDEYDKVVLKYHYEMVVEGX

SEQ ID NO: 45419 - protein, 30 aa, Artificial Sequence; identical to SEQ ID NO: 6607
  Cyclic GFR-binding peptide

SEQ ID NO: 45420 - protein, 35 aa, Artificial Sequence
  Cyclic GFR-binding peptide
  MOD_RES (6), (7): Xaa is C or S
AVPKAXXAPTKLNAISVLYFDSSNNVILKKYRNMV

SEQ ID NO: 45421 - protein, 29 aa, Artificial Sequence
  Cyclic GFR-binding peptide
SAISILYLVGRTPKVLKNYQAAAAAAAAA

SEQ ID NO: 45422 - protein, 28 aa, Artificial Sequence
  Cyclic GFR-binding peptide
  MOD_RES (1), (2): Xaa is C or S
XXVPTELSPISMLYKDENEKVVLKYHYD

SEQ ID NO: 45423 - protein, 37 aa, Artificial Sequence; identical to SEQ ID NO: 6613
  Cyclic GFR-binding peptide
  MOD_RES (3), (4), (35), (37): Xaa is C or S

SEQ ID NO: 45424 - protein, 31 aa, Artificial Sequence
  Cyclic GFR-binding peptide
  MOD_RES (29), (31): Xaa is C or S
QALSAISILYLVGRKPKVLKNYQMIVRSXKX

SEQ ID NO: 45425 - protein, 31 aa, Artificial Sequence
  Cyclic GFR-binding peptide
  MOD_RES (30), (30): Xaa is C or S
PQDLNAISILYFVGRTPKVLKKYRMVVKSXK

SEQ ID NO: 45426 - protein, 23 aa, Artificial Sequence
  Cyclic GFR-binding peptide
LNAISMLYFDEYDKVVLKKYREM

SEQ ID NO: 45427 - protein, 26 aa, Artificial Sequence
  Cyclic GFR-binding peptide
SPISVLYKDSSNNVILKYHYNMVVKA

SEQ ID NO: 45428 - protein, 29 aa, Artificial Sequence
  Cyclic GFR-binding peptide
  MOD_RES (1), (2): Xaa is C or S
XXVPTELSPISMLYKDEYDKVVLKYHYEM

SEQ ID NO: 45429 - protein, 40 aa, Artificial Sequence; identical to SEQ ID NO: 6614
  Cyclic GFR-binding peptide
  MOD_RES (5), (6), (37), (39): Xaa is C or S

SEQ ID NO: 45430 - protein, 29 aa, Artificial Sequence
  Cyclic GFR-binding peptide
NAISMLYFDENEKVVLKKYRAAAAAAAAA

SEQ ID NO: 45431 - protein, 38 aa, Artificial Sequence; identical to SEQ ID NO: 6615
  Cyclic GFR-binding peptide
  MOD_RES (4), (5), (36), (38): Xaa is C or S

SEQ ID NO: 45432 - protein, 29 aa, Artificial Sequence
  Cyclic GFR-binding peptide
VPTELNAISMLYFDEYDKVVLKKYREMVV

SEQ ID NO: 45433 - protein, 40 aa, Artificial Sequence; identical to SEQ ID NO: 6616
  Cyclic GFR-binding peptide
  MOD_RES (4), (5), (37), (39): Xaa is C or S

SEQ ID NO: 45434 - protein, 32 aa, Artificial Sequence
  Cyclic GFR-binding peptide
  MOD_RES (4), (5): Xaa is C or S
GKAXXVPTKLNAISVLYFDDMGVPTLKKYREG

SEQ ID NO: 45435 - protein, 40 aa, Artificial Sequence; identical to SEQ ID NO: 6621
  Cyclic GFR-binding peptide
  MOD_RES (1), (38), (40): Xaa is C or S

SEQ ID NO: 45436 - protein, 34 aa, Artificial Sequence; identical to SEQ ID NO: 6620
  Cyclic GFR-binding peptide
  MOD_RES (3), (3): Xaa is C or S

SEQ ID NO: 45437 - protein, 37 aa, Artificial Sequence; identical to SEQ ID NO: 6623
  Cyclic GFR-binding peptide
  MOD_RES (2), (3), (34), (36): Xaa is C or S

SEQ ID NO: 45438 - protein, 30 aa, Artificial Sequence
  Cyclic GFR-binding peptide
  MOD_RES (2), (3): Xaa is C or S
PXXVSQDLNAISILYFIGKTPKILKKYRMI

SEQ ID NO: 45439 - protein, 34 aa, Artificial Sequence
  Cyclic GFR-binding peptide
  MOD_RES (33), (33): Xaa is C or S
VQLSAISVLYLEIVRKKPIFLKNYQTLEDHLAXK

SEQ ID NO: 45440 - protein, 33 aa, Artificial Sequence
  Cyclic GFR-binding peptide
  MOD_RES (5), (6): Xaa is C or S
IPKAXXVPTELSATSMLYYDEYDKVVLRKHREM

SEQ ID NO: 45441 - protein, 34 aa, Artificial Sequence; identical to SEQ ID NO: 6625
  Cyclic GFR-binding peptide
  MOD_RES (1), (33): Xaa is C or S

SEQ ID NO: 45442 - protein, 38 aa, Artificial Sequence; identical to SEQ ID NO: 6626
  Cyclic GFR-binding peptide
  MOD_RES (4), (4): Xaa is C or S

SEQ ID NO: 45443 - protein, 25 aa, Artificial Sequence
  Cyclic GFR-binding peptide
VPTKLSATSVLYYDDMGVPTLRKHR

SEQ ID NO: 45444 - protein, 23 aa, Artificial Sequence
  Cyclic GFR-binding peptide
KLSAISVLYLDDSSNVILKNYQN

SEQ ID NO: 45445 - protein, 40 aa, Artificial Sequence; identical to SEQ ID NO: 6628
  Cyclic GFR-binding peptide
  MOD_RES (6), (7), (39): Xaa is C or S

SEQ ID NO: 45446 - protein, 26 aa, Artificial Sequence
  Cyclic GFR-binding peptide
LNAISILYFVGRKPKVLKKYRMIVRS

SEQ ID NO: 45447 - protein, 30 aa, Artificial Sequence
  Cyclic GFR-binding peptide
QLSPISVLYKEIVRKKPIFLKYHYTLEDHL

SEQ ID NO: 45448 - protein, 34 aa, Artificial Sequence; identical to SEQ ID NO: 6629
  Cyclic GFR-binding peptide
  MOD_RES (2), (3), (34): Xaa is C or S

SEQ ID NO: 45449 - protein, 35 aa, Artificial Sequence; identical to SEQ ID NO: 6630
  Cyclic GFR-binding peptide
  MOD_RES (35), (35): Xaa is C or S

SEQ ID NO: 45450 - protein, 32 aa, Artificial Sequence; identical to SEQ ID NO: 6631
  Cyclic GFR-binding peptide
  MOD_RES (32), (32): Xaa is C or S

SEQ ID NO: 45451 - protein, 36 aa, Artificial Sequence; identical to SEQ ID NO: 6632
  Cyclic GFR-binding peptide
  MOD_RES (2), (3), (34), (36): Xaa is C or S

SEQ ID NO: 45452 - protein, 38 aa, Artificial Sequence; identical to SEQ ID NO: 6633
  Cyclic GFR-binding peptide
  MOD_RES (3), (4), (35), (37): Xaa is C or S

SEQ ID NO: 45453 - protein, 32 aa, Artificial Sequence
  Cyclic GFR-binding peptide
  MOD_RES (3), (4): Xaa is C or S
KPXXAPTQLSATSVLYYDDSSNVILRKHRNMV

SEQ ID NO: 45454 - protein, 30 aa, Artificial Sequence
  Cyclic GFR-binding peptide
  MOD_RES (1), (1): Xaa is C or S
XRPTQVQLSAISVLYLEIVRKKPIFLKNYQ

SEQ ID NO: 45455 - protein, 32 aa, Artificial Sequence
  Cyclic GFR-binding peptide
  MOD_RES (29), (31): Xaa is C or S
QDLNAISILYFVGRTPKVLKKYRMVVKSXKXS

SEQ ID NO: 45456 - protein, 36 aa, Artificial Sequence; identical to SEQ ID NO: 6635
  Cyclic GFR-binding peptide
  MOD_RES (4), (5): Xaa is C or S

SEQ ID NO: 45457 - protein, 43 aa, Artificial Sequence; identical to SEQ ID NO: 6636
  Cyclic GFR-binding peptide
  MOD_RES (6), (7), (40), (42): Xaa is C or S

SEQ ID NO: 45458 - protein, 39 aa, Artificial Sequence; identical to SEQ ID NO: 6638
  Cyclic GFR-binding peptide
  MOD_RES (3), (3): Xaa is C or S

SEQ ID NO: 45459 - protein, 28 aa, Artificial Sequence
  Cyclic GFR-binding peptide
APTKLSPISVLYKDDSSNVILKYHYNMV

SEQ ID NO: 45460 - protein, 36 aa, Artificial Sequence; identical to SEQ ID NO: 6642
  Cyclic GFR-binding peptide
  MOD_RES (4), (5): Xaa is C or S

SEQ ID NO: 45461 - protein, 31 aa, Artificial Sequence
  Cyclic GFR-binding peptide
  MOD_RES (5), (6): Xaa is C or S
VPKPXXAPTKLSATSVLYYDDSSNVILRKHR

SEQ ID NO: 45462 - protein, 34 aa, Artificial Sequence
  Cyclic GFR-binding peptide
  MOD_RES (31), (33): Xaa is C or S
PTQLSAISVLYLDDSSNVILKNYQNMVVRAXGXH

SEQ ID NO: 45463 - protein, 30 aa, Artificial Sequence
  Cyclic GFR-binding peptide
  MOD_RES (27), (29): Xaa is C or S
SPISMLYKDENEKVVLKYHYDMVVEGXGXR

SEQ ID NO: 45464 - protein, 30 aa, Artificial Sequence
  Cyclic GFR-binding peptide
  MOD_RES (1), (1): Xaa is C or S
XVPTELNAISMLYFDENEKVVLKKYRDMVV

SEQ ID NO: 45465 - protein, 33 aa, Artificial Sequence
  Cyclic GFR-binding peptide
  MOD_RES (3), (4): Xaa is C or S
KAXXVPTKLNAISVLYFDDMGVPTLKKYREGMS

SEQ ID NO: 45466 - protein, 28 aa, Artificial Sequence
  Cyclic GFR-binding peptide
TELNAISMLYFDENEKVVLKKYRDMVVE

SEQ ID NO: 45467 - protein, 32 aa, Artificial Sequence
  Cyclic GFR-binding peptide
RPTQVQLNAISVLYFEIVRKKPIFLKKYRTLE

SEQ ID NO: 45468 - protein, 35 aa, Artificial Sequence; identical to SEQ ID NO: 6643
  Cyclic GFR-binding peptide
  MOD_RES (2), (3), (34): Xaa is C or S

SEQ ID NO: 45469 - protein, 37 aa, Artificial Sequence; identical to SEQ ID NO: 6644
  Cyclic GFR-binding peptide
  MOD_RES (2), (3), (36): Xaa is C or S

SEQ ID NO: 45470 - protein, 24 aa, Artificial Sequence
  Cyclic GFR-binding peptide
SATSMLYYDEYDKVVLRKHREMVV

SEQ ID NO: 45471 - protein, 33 aa, Artificial Sequence
  Cyclic GFR-binding peptide
  MOD_RES (31), (33): Xaa is C or S
PTELNAISMLYFDENEKVVLKKYRDMVVEGXGX

SEQ ID NO: 45472 - protein, 30 aa, Artificial Sequence
  Cyclic GFR-binding peptide
  MOD_RES (3), (4): Xaa is C or S
SPXXVSQDLSPISILYKIGKTPKILKYHYM

SEQ ID NO: 45473 - protein, 25 aa, Artificial Sequence
  Cyclic GFR-binding peptide
TQLSAISVLYLDDSSNVILKNYQNM

SEQ ID NO: 45474 - protein, 39 aa, Artificial Sequence; identical to SEQ ID NO: 6646
  Cyclic GFR-binding peptide
  MOD_RES (36), (38): Xaa is C or S

SEQ ID NO: 45475 - protein, 24 aa, Artificial Sequence
  Cyclic GFR-binding peptide
DLSPISILYKIGKTPKILKYHYMI

SEQ ID NO: 45476 - protein, 30 aa, Artificial Sequence
  Cyclic GFR-binding peptide
  MOD_RES (27), (29): Xaa is C or S
LNAISILYFIGKTPKILKKYRMIVKSXKXS

SEQ ID NO: 45477 - protein, 38 aa, Artificial Sequence; identical to SEQ ID NO: 6647
  Cyclic GFR-binding peptide
  MOD_RES (3), (4), (36), (38): Xaa is C or S

SEQ ID NO: 45478 - protein, 29 aa, Artificial Sequence
  Cyclic GFR-binding peptide
  MOD_RES (1), (2): Xaa is C or S
XXVSQDLSPISILYKIGKTPKILKYHYMI

SEQ ID NO: 45479 - protein, 34 aa, Artificial Sequence; identical to SEQ ID NO: 6650
  Cyclic GFR-binding peptide
  MOD_RES (1), (2), (33): Xaa is C or S

SEQ ID NO: 45480 - protein, 30 aa, Artificial Sequence
  Cyclic GFR-binding peptide
  MOD_RES (2), (3): Xaa is C or S
PXXVPQDLNAISILYFVGRTPKVLKKYRMV

SEQ ID NO: 45481 - protein, 26 aa, Artificial Sequence
  Cyclic GFR-binding peptide
SPISMLYKDENEKVVLKYHYDMVVEG

SEQ ID NO: 45482 - protein, 27 aa, Artificial Sequence
  Cyclic GFR-binding peptide
APTQLSATSVLYYDDSSNVILRKHRNM

SEQ ID NO: 45483 - protein, 26 aa, Artificial Sequence
  Cyclic GFR-binding peptide
SAISVLYLDDMGVPTLKNYQEGMSVA

SEQ ID NO: 45484 - protein, 26 aa, Artificial Sequence
  Cyclic GFR-binding peptide
  MOD_RES (26), (26): Xaa is C or S
NAISILYFIGKTPKILKKYRMIVKSX

SEQ ID NO: 45485 - protein, 28 aa, Artificial Sequence
  Cyclic GFR-binding peptide
KLNAISVLYFDSSNNVILKKYRNMVVKA

SEQ ID NO: 45486 - protein, 29 aa, Artificial Sequence
  Cyclic GFR-binding peptide
  MOD_RES (29), (29): Xaa is C or S
LSAISVLYLDDMGVPTLKNYQEGMSVAEX

SEQ ID NO: 45487 - protein, 30 aa, Artificial Sequence
  Cyclic GFR-binding peptide
  MOD_RES (28), (30): Xaa is C or S
DLSPISILYKIGKTPKILKYHYMIVKSXKX

SEQ ID NO: 45488 - protein, 24 aa, Artificial Sequence
  Cyclic GFR-binding peptide
PTKLNAISVLYFDSSNNVILKKYR

SEQ ID NO: 45489 - protein, 29 aa, Artificial Sequence
  Cyclic GFR-binding peptide
  MOD_RES (4), (4): Xaa is C or S
KPTXAPTKLSPISVLYKDDSSNVILKYHY

SEQ ID NO: 45490 - protein, 30 aa, Artificial Sequence
  Cyclic GFR-binding peptide
PTQVQLSPISVLYKEIVRKKPIFLKYHYTL

SEQ ID NO: 45491 - protein, 24 aa, Artificial Sequence
  Cyclic GFR-binding peptide
SATSILYYIGKTPKILRKHRMIVK

SEQ ID NO: 45492 - protein, 30 aa, Artificial Sequence
  Cyclic GFR-binding peptide
  MOD_RES (29), (29): Xaa is C or S
QDLSPISILYKIGKTPKILKYHYMIVKSXK

SEQ ID NO: 45493 - protein, 26 aa, Artificial Sequence
  Cyclic GFR-binding peptide
  MOD_RES (1), (1): Xaa is C or S
XVPQDLSAISILYLVGRTPKVLKNYQ

SEQ ID NO: 45494 - protein, 29 aa, Artificial Sequence
  Cyclic GFR-binding peptide
TKLSAISVLYLDDSSNVILKNYQNMVVRS

SEQ ID NO: 45495 - protein, 34 aa, Artificial Sequence; identical to SEQ ID NO: 6653
  Cyclic GFR-binding peptide
  MOD_RES (2), (3): Xaa is C or S

SEQ ID NO: 45496 - protein, 37 aa, Artificial Sequence; identical to SEQ ID NO: 6654
  Cyclic GFR-binding peptide
  MOD_RES (1), (34), (36): Xaa is C or S

SEQ ID NO: 45497 - protein, 33 aa, Artificial Sequence; identical to SEQ ID NO: 6655
  Cyclic GFR-binding peptide
  MOD_RES (32), (32): Xaa is C or S

SEQ ID NO: 45498 - protein, 39 aa, Artificial Sequence; identical to SEQ ID NO: 6656
  Cyclic GFR-binding peptide
  MOD_RES (6), (7), (39): Xaa is C or S

SEQ ID NO: 45499 - protein, 33 aa, Artificial Sequence
  Cyclic GFR-binding peptide
  MOD_RES (3), (4): Xaa is C or S
KAXXVPTELSPISMLYKDENEKVVLKYHYDMVV

SEQ ID NO: 45500 - protein, 27 aa, Artificial Sequence
  Cyclic GFR-binding peptide
KLSAISVLYLDDSSNVILKNYQNMVVR

SEQ ID NO: 45501 - protein, 41 aa, Artificial Sequence; identical to SEQ ID NO: 6657
  Cyclic GFR-binding peptide
  MOD_RES (5), (6), (39), (41): Xaa is C or S

SEQ ID NO: 45502 - protein, 31 aa, Artificial Sequence
  Cyclic GFR-binding peptide
  MOD_RES (29), (31): Xaa is C or S
LSATSVLYYDDMGVPTLRKHREGMSVAEXGX

SEQ ID NO: 45503 - protein, 39 aa, Artificial Sequence; identical to SEQ ID NO: 6658
  Cyclic GFR-binding peptide
  MOD_RES (6), (7), (38): Xaa is C or S

SEQ ID NO: 45504 - protein, 23 aa, Artificial Sequence
  Cyclic GFR-binding peptide
SPISILYKVGRTPKVLKYHYMVV

SEQ ID NO: 45505 - protein, 35 aa, Artificial Sequence; identical to SEQ ID NO: 6659
  Cyclic GFR-binding peptide
  MOD_RES (3), (4): Xaa is C or S

SEQ ID NO: 45506 - protein, 28 aa, Artificial Sequence
  Cyclic GFR-binding peptide
PTKLSATSVLYYDDMGVPTLRKHREGMS

SEQ ID NO: 45507 - protein, 23 aa, Artificial Sequence
  Cyclic GFR-binding peptide
KLSAISVLYLDDMGVPTLKNYQE

SEQ ID NO: 45508 - protein, 39 aa, Artificial Sequence; identical to SEQ ID NO: 6661
  Cyclic GFR-binding peptide
  MOD_RES (3), (4), (36), (38): Xaa is C or S

SEQ ID NO: 45509 - protein, 24 aa, Artificial Sequence
  Cyclic GFR-binding peptide
PQALSAISILYLVGRKPKVLKNYQ

SEQ ID NO: 45510 - protein, 33 aa, Artificial Sequence; identical to SEQ ID NO: 6662
  Cyclic GFR-binding peptide
  MOD_RES (1), (33): Xaa is C or S

SEQ ID NO: 45511 - protein, 35 aa, Artificial Sequence; identical to SEQ ID NO: 6663
  Cyclic GFR-binding peptide
  MOD_RES (32), (34): Xaa is C or S

SEQ ID NO: 45512 - protein, 36 aa, Artificial Sequence; identical to SEQ ID NO: 6664
  Cyclic GFR-binding peptide
  MOD_RES (5), (6): Xaa is C or S

SEQ ID NO: 45513 - protein, 28 aa, Artificial Sequence
  Cyclic GFR-binding peptide
VQLNAISVLYFEIVRKKPIFLKKYRTLE

SEQ ID NO: 45514 - protein, 28 aa, Artificial Sequence
  Cyclic GFR-binding peptide
  MOD_RES (1), (2): Xaa is C or S
XXVPQALSAISILYLVGRKPKVLKNYQM

SEQ ID NO: 45515 - protein, 26 aa, Artificial Sequence
  Cyclic GFR-binding peptide
VSQDLSATSILYYIGKTPKILRKHRM

SEQ ID NO: 45516 - protein, 31 aa, Artificial Sequence
  Cyclic GFR-binding peptide
  MOD_RES (4), (4): Xaa is C or S
KPTXAPTKLSATSVLYYDDSSNVILRKHRNM

SEQ ID NO: 45517 - protein, 33 aa, Artificial Sequence
  Cyclic GFR-binding peptide
  MOD_RES (2), (3): Xaa is C or S
AXXVPTKLSATSVLYYDDMGVPTLRKHREGMSV

SEQ ID NO: 45518 - protein, 32 aa, Artificial Sequence
  Cyclic GFR-binding peptide
  MOD_RES (5), (6): Xaa is C or S
SASPXXVPQDLNAISILYFVGRTPKVLKKYRM

SEQ ID NO: 45519 - protein, 33 aa, Artificial Sequence
  Cyclic GFR-binding peptide
  MOD_RES (32), (32): Xaa is C or S
QLNAISVLYFEIVRKKPIFLKKYRTLEDHLAXK

SEQ ID NO: 45520 - protein, 32 aa, Artificial Sequence
  Cyclic GFR-binding peptide
  MOD_RES (29), (31): Xaa is C or S
KLSPISVLYKDDSSNVILKYHYNMVVRSXGXH

SEQ ID NO: 45521 - protein, 27 aa, Artificial Sequence
  Cyclic GFR-binding peptide
ELSATSMLYYDEYDKVVLRKHREMVVE

SEQ ID NO: 45522 - protein, 26 aa, Artificial Sequence
  Cyclic GFR-binding peptide
NAISVLYFEIVRKKPIFLKKYRTLED

SEQ ID NO: 45523 - protein, 35 aa, Artificial Sequence; identical to SEQ ID NO: 6666
  Cyclic GFR-binding peptide
  MOD_RES (3), (35): Xaa is C or S

SEQ ID NO: 45524 - protein, 25 aa, Artificial Sequence
  Cyclic GFR-binding peptide
LSAISVLYLEIVRKKPIFLKNYQTL

SEQ ID NO: 45525 - protein, 35 aa, Artificial Sequence; identical to SEQ ID NO: 6669
  Cyclic GFR-binding peptide
  MOD_RES (1), (2), (34): Xaa is C or S

SEQ ID NO: 45526 - protein, 30 aa, Artificial Sequence; identical to SEQ ID NO: 6670
  Cyclic GFR-binding peptide

SEQ ID NO: 45527 - protein, 29 aa, Artificial Sequence
  Cyclic GFR-binding peptide
SQDLSATSILYYIGKTPKILRKHRMIVKS

SEQ ID NO: 45528 - protein, 25 aa, Artificial Sequence
  Cyclic GFR-binding peptide
VPQDLSPISILYKVGRTPKVLKYHY

SEQ ID NO: 45529 - protein, 21 aa, Artificial Sequence
  Cyclic GFR-binding peptide
LSAISVLYLDSSNNVILKNYQ

SEQ ID NO: 45530 - protein, 38 aa, Artificial Sequence; identical to SEQ ID NO: 6672
  Cyclic GFR-binding peptide
  MOD_RES (3), (4), (35), (37): Xaa is C or S

SEQ ID NO: 45531 - protein, 20 aa, Artificial Sequence
  Cyclic GFR-binding peptide
SAISVLYLDDSSNVILKNYQ

SEQ ID NO: 45532 - protein, 29 aa, Artificial Sequence
  Cyclic GFR-binding peptide
  MOD_RES (3), (4): Xaa is C or S
KAXXAPTKLSAISVLYLDSSNNVILKNYQ

SEQ ID NO: 45533 - protein, 32 aa, Artificial Sequence; identical to SEQ ID NO: 6676
  Cyclic GFR-binding peptide
  MOD_RES (32), (32): Xaa is C or S

SEQ ID NO: 45534 - protein, 44 aa, Artificial Sequence; identical to SEQ ID NO: 6677
  Cyclic GFR-binding peptide
  MOD_RES (5), (42), (44): Xaa is C or S

SEQ ID NO: 45535 - protein, 30 aa, Artificial Sequence
  Cyclic GFR-binding peptide
  MOD_RES (27), (29): Xaa is C or S
NAISMLYFDEYDKVVLKKYREMVVEGXGXR

SEQ ID NO: 45536 - protein, 38 aa, Artificial Sequence; identical to SEQ ID NO: 6680
  Cyclic GFR-binding peptide
  MOD_RES (6), (7): Xaa is C or S

SEQ ID NO: 45537 - protein, 35 aa, Artificial Sequence
  Cyclic GFR-binding peptide
  MOD_RES (5), (5): Xaa is C or S
RNVQXRPTQVQLSPISVLYKEIVRKKPIFLKYHYT

SEQ ID NO: 45538 - protein, 35 aa, Artificial Sequence
  Cyclic GFR-binding peptide
  MOD_RES (5), (6): Xaa is C or S
VPKAXXAPTKLSPISVLYKDSSNNVILKYHYNMVV

SEQ ID NO: 45539 - protein, 28 aa, Artificial Sequence
  Cyclic GFR-binding peptide
KLSATSVLYYDDMGVPTLRKHREGMSVA

SEQ ID NO: 45540 - protein, 33 aa, Artificial Sequence
  Cyclic GFR-binding peptide
  MOD_RES (6), (6): Xaa is C or S
VTKPTXAPTKLSATSVLYYDDSSNVILRKHRNM

SEQ ID NO: 45541 - protein, 34 aa, Artificial Sequence; identical to SEQ ID NO: 6682
  Cyclic GFR-binding peptide
  MOD_RES (1), (2), (34): Xaa is C or S

SEQ ID NO: 45542 - protein, 39 aa, Artificial Sequence; identical to SEQ ID NO: 6683
  Cyclic GFR-binding peptide
  MOD_RES (3), (4), (36), (38): Xaa is C or S

SEQ ID NO: 45543 - protein, 39 aa, Artificial Sequence; identical to SEQ ID NO: 6687
  Cyclic GFR-binding peptide
  MOD_RES (5), (6), (38): Xaa is C or S

SEQ ID NO: 45544 - protein, 40 aa, Artificial Sequence; identical to SEQ ID NO: 6689
  Cyclic GFR-binding peptide
  MOD_RES (6), (7), (38), (40): Xaa is C or S

SEQ ID NO: 45545 - protein, 41 aa, Artificial Sequence; identical to SEQ ID NO: 6690
  Cyclic GFR-binding peptide
  MOD_RES (5), (6), (39), (41): Xaa is C or S

SEQ ID NO: 45546 - protein, 25 aa, Artificial Sequence
  Cyclic GFR-binding peptide
APTQLSAISVLYLDDSSNVILKNYQ

SEQ ID NO: 45547 - protein, 32 aa, Artificial Sequence
  Cyclic GFR-binding peptide
  MOD_RES (31), (31): Xaa is C or S
TKLSATSVLYYDDMGVPTLRKHREGMSVAEXG

SEQ ID NO: 45548 - protein, 34 aa, Artificial Sequence
  Cyclic GFR-binding peptide
  MOD_RES (31), (33): Xaa is C or S
PTELNAISMLYFDEYDKVVLKKYREMVVEGXGXR

SEQ ID NO: 45549 - protein, 31 aa, Artificial Sequence
  Cyclic GFR-binding peptide
  MOD_RES (3), (4): Xaa is C or S
SPXXVPQDLSATSILYYVGRTPKVLRKHRMV

SEQ ID NO: 45550 - protein, 38 aa, Artificial Sequence; identical to SEQ ID NO: 6693
  Cyclic GFR-binding peptide
  MOD_RES (3), (35), (37): Xaa is C or S

SEQ ID NO: 45551 - protein, 36 aa, Artificial Sequence; identical to SEQ ID NO: 6694
  Cyclic GFR-binding peptide
  MOD_RES (1), (2), (34), (36): Xaa is C or S

SEQ ID NO: 45552 - protein, 35 aa, Artificial Sequence
  Cyclic GFR-binding peptide
  MOD_RES (5), (6): Xaa is C or S
VPKPXXAPTKLSPISVLYKDDSSNVILKYHYNMVV

SEQ ID NO: 45553 - protein, 26 aa, Artificial Sequence
  Cyclic GFR-binding peptide
PTKLSATSVLYYDDMGVPTLRKHREG

SEQ ID NO: 45554 - protein, 34 aa, Artificial Sequence; identical to SEQ ID NO: 6695
  Cyclic GFR-binding peptide

SEQ ID NO: 45555 - protein, 38 aa, Artificial Sequence; identical to SEQ ID NO: 6696
  Cyclic GFR-binding peptide
  MOD_RES (2), (3), (36), (38): Xaa is C or S

SEQ ID NO: 45556 - protein, 33 aa, Artificial Sequence
  Cyclic GFR-binding peptide
  MOD_RES (31), (33): Xaa is C or S
TKLSAISVLYLDDMGVPTLKNYQEGMSVAEXGX

SEQ ID NO: 45557 - protein, 28 aa, Artificial Sequence
  Cyclic GFR-binding peptide
QALSAISILYLVGRKPKVLKNYQMIVRS

SEQ ID NO: 45558 - protein, 25 aa, Artificial Sequence
  Cyclic GFR-binding peptide
QDLSATSILYYVGRTPKVLRKHRMV

SEQ ID NO: 45559 - protein, 30 aa, Artificial Sequence
  Cyclic GFR-binding peptide
PTKLSAISVLYLDSSNNVILKNYQNMVVKA

SEQ ID NO: 45560 - protein, 38 aa, Artificial Sequence; identical to SEQ ID NO: 6703
  Cyclic GFR-binding peptide
  MOD_RES (4), (5), (38): Xaa is C or S

SEQ ID NO: 45561 - protein, 28 aa, Artificial Sequence
  Cyclic GFR-binding peptide
TQLSATSVLYYDDSSNVILRKHRNMVVR

SEQ ID NO: 45562 - protein, 31 aa, Artificial Sequence
  Cyclic GFR-binding peptide
  MOD_RES (28), (30): Xaa is C or S
LSPISVLYKDDSSNVILKYHYNMVVRSXGXH

SEQ ID NO: 45563 - protein, 29 aa, Artificial Sequence
  Cyclic GFR-binding peptide
  MOD_RES (29), (29): Xaa is C or S
QDLSAISILYLIGKTPKILKNYQMIVKSX

SEQ ID NO: 45564 - protein, 39 aa, Artificial Sequence; identical to SEQ ID NO: 6704
  Cyclic GFR-binding peptide
  MOD_RES (5), (6), (37), (39): Xaa is C or S

SEQ ID NO: 45565 - protein, 36 aa, Artificial Sequence; identical to SEQ ID NO: 6705
  Cyclic GFR-binding peptide
  MOD_RES (5), (6): Xaa is C or S

SEQ ID NO: 45566 - protein, 30 aa, Artificial Sequence
  Cyclic GFR-binding peptide
  MOD_RES (29), (29): Xaa is C or S
QDLNAISILYFIGKTPKILKKYRMIVKSXK

SEQ ID NO: 45567 - protein, 35 aa, Artificial Sequence; identical to SEQ ID NO: 6706
  Cyclic GFR-binding peptide
  MOD_RES (4), (5): Xaa is C or S

SEQ ID NO: 45568 - protein, 29 aa, Artificial Sequence
  Cyclic GFR-binding peptide
SAISVLYLDDMGVPTLKNYQAAAAAAAAA

SEQ ID NO: 45569 - protein, 25 aa, Artificial Sequence
  Cyclic GFR-binding peptide
LSPISILYKVGRTPKVLKYHYMVVK

SEQ ID NO: 45570 - protein, 34 aa, Artificial Sequence; identical to SEQ ID NO: 6708
  Cyclic GFR-binding peptide

SEQ ID NO: 45571 - protein, 30 aa, Artificial Sequence
  Cyclic GFR-binding peptide
  MOD_RES (29), (29): Xaa is C or S
KLSPISVLYKDDSSNVILKYHYNMVVRSXG

SEQ ID NO: 45572 - protein, 34 aa, Artificial Sequence; identical to SEQ ID NO: 6709
  Cyclic GFR-binding peptide
  MOD_RES (3), (4): Xaa is C or S

SEQ ID NO: 45573 - protein, 32 aa, Artificial Sequence
  Cyclic GFR-binding peptide
  MOD_RES (6), (7): Xaa is C or S
ASASPXXVSQDLSPISILYKIGKTPKILKYHY

SEQ ID NO: 45574 - protein, 35 aa, Artificial Sequence
  Cyclic GFR-binding peptide
  MOD_RES (5), (6): Xaa is C or S
SASPXXVPQDLNAISILYFVGRTPKVLKKYRMVVK

SEQ ID NO: 45575 - protein, 34 aa, Artificial Sequence
  Cyclic GFR-binding peptide
  MOD_RES (4), (5): Xaa is C or S
AAPXXVPQALNAISILYFVGRKPKVLKKYRMIVR

SEQ ID NO: 45576 - protein, 34 aa, Artificial Sequence; identical to SEQ ID NO: 6710
  Cyclic GFR-binding peptide

SEQ ID NO: 45577 - protein, 42 aa, Artificial Sequence; identical to SEQ ID NO: 6711
  Cyclic GFR-binding peptide
  MOD_RES (6), (7), (39), (41): Xaa is C or S

SEQ ID NO: 45578 - protein, 28 aa, Artificial Sequence
  Cyclic GFR-binding peptide
  MOD_RES (1), (2): Xaa is C or S
XXAPTKLSPISVLYKDDSSNVILKYHYN

SEQ ID NO: 45579 - protein, 29 aa, Artificial Sequence
  Cyclic GFR-binding peptide
  MOD_RES (27), (29): Xaa is C or S
LNAISILYFIGKTPKILKKYRMIVKSXKX

SEQ ID NO: 45580 - protein, 33 aa, Artificial Sequence
  Cyclic GFR-binding peptide
  MOD_RES (2), (2): Xaa is C or S
QXRPTQVQLSPISVLYKEIVRKKPIFLKYHYTL

SEQ ID NO: 45581 - protein, 31 aa, Artificial Sequence
  Cyclic GFR-binding peptide
  MOD_RES (4), (5): Xaa is C or S
PKPXXAPTQLSAISVLYLDDSSNVILKNYQN

SEQ ID NO: 45582 - protein, 39 aa, Artificial Sequence; identical to SEQ ID NO: 6713
  Cyclic GFR-binding peptide
  MOD_RES (3), (4), (36), (38): Xaa is C or S

SEQ ID NO: 45583 - protein, 33 aa, Artificial Sequence
  Cyclic GFR-binding peptide
  MOD_RES (5), (6): Xaa is C or S
SAAPXXVPQALNAISILYFVGRKPKVLKKYRMI

SEQ ID NO: 45584 - protein, 27 aa, Artificial Sequence
  Cyclic GFR-binding peptide
  MOD_RES (1), (1): Xaa is C or S
XVPTKLSAISVLYLDDMGVPTLKNYQE

SEQ ID NO: 45585 - protein, 29 aa, Artificial Sequence
  Cyclic GFR-binding peptide
  MOD_RES (2), (3): Xaa is C or S
PXXVSQDLNAISILYFIGKTPKILKKYRM

SEQ ID NO: 45586 - protein, 35 aa, Artificial Sequence; identical to SEQ ID NO: 6715
  Cyclic GFR-binding peptide
  MOD_RES (1), (34): Xaa is C or S

SEQ ID NO: 45587 - protein, 32 aa, Artificial Sequence
  Cyclic GFR-binding peptide
QVQLSAISVLYLEIVRKKPIFLKNYQTLEDHL

SEQ ID NO: 45588 - protein, 33 aa, Artificial Sequence
  Cyclic GFR-binding peptide
  MOD_RES (6), (7): Xaa is C or S
ASASPXXVPQDLSATSILYYVGRTPKVLRKHRM

SEQ ID NO: 45589 - protein, 43 aa, Artificial Sequence; identical to SEQ ID NO: 6716
  Cyclic GFR-binding peptide
  MOD_RES (5), (42): Xaa is C or S

SEQ ID NO: 45590 - protein, 31 aa, Artificial Sequence
  Cyclic GFR-binding peptide
  MOD_RES (30), (30): Xaa is C or S
TELNAISMLYFDENEKVVLKKYRDMVVEGXG

SEQ ID NO: 45591 - protein, 29 aa, Artificial Sequence
  Cyclic GFR-binding peptide
  MOD_RES (2), (2): Xaa is C or S
TXAPTKLSATSVLYYDDSSNVILRKHRNM

SEQ ID NO: 45592 - protein, 33 aa, Artificial Sequence
  Cyclic GFR-binding peptide
  MOD_RES (32), (32): Xaa is C or S
PTKLNAISVLYFDDMGVPTLKKYREGMSVAEXG

SEQ ID NO: 45593 - protein, 33 aa, Artificial Sequence; identical to SEQ ID NO: 6718
  Cyclic GFR-binding peptide
  MOD_RES (1), (33): Xaa is C or S

SEQ ID NO: 45594 - protein, 34 aa, Artificial Sequence
  Cyclic GFR-binding peptide
  MOD_RES (5), (6): Xaa is C or S
VPKAXXAPTKLSPISVLYKDSSNNVILKYHYNMV

SEQ ID NO: 45595 - protein, 31 aa, Artificial Sequence
  Cyclic GFR-binding peptide
  MOD_RES (30), (30): Xaa is C or S
KLNAISVLYFDDMGVPTLKKYREGMSVAEXG

SEQ ID NO: 45596 - protein, 32 aa, Artificial Sequence
  Cyclic GFR-binding peptide
  MOD_RES (6), (6): Xaa is C or S
VTKPTXAPTKLSAISVLYLDDSSNVILKNYQN

SEQ ID NO: 45597 - protein, 32 aa, Artificial Sequence
  Cyclic GFR-binding peptide
  MOD_RES (5), (6): Xaa is C or S
IPKAXXVPTELNAISMLYFDEYDKVVLKKYRE

SEQ ID NO: 45598 - protein, 31 aa, Artificial Sequence
  Cyclic GFR-binding peptide
PTQVQLSATSVLYYEIVRKKPIFLRKHRTLE

SEQ ID NO: 45599 - protein, 34 aa, Artificial Sequence; identical to SEQ ID NO: 6722
  Cyclic GFR-binding peptide
  MOD_RES (1), (2), (34): Xaa is C or S

SEQ ID NO: 45600 - protein, 39 aa, Artificial Sequence; identical to SEQ ID NO: 6723
  Cyclic GFR-binding peptide
  MOD_RES (6), (7): Xaa is C or S

SEQ ID NO: 45601 - protein, 31 aa, Artificial Sequence
  Cyclic GFR-binding peptide
  MOD_RES (2), (3): Xaa is C or S
PXXAPTKLSAISVLYLDDSSNVILKNYQNMV

SEQ ID NO: 45602 - protein, 24 aa, Artificial Sequence
  Cyclic GFR-binding peptide
PQALNAISILYFVGRKPKVLKKYR

SEQ ID NO: 45603 - protein, 35 aa, Artificial Sequence; identical to SEQ ID NO: 6724
  Cyclic GFR-binding peptide
  MOD_RES (1), (2), (34): Xaa is C or S

SEQ ID NO: 45604 - protein, 25 aa, Artificial Sequence
  Cyclic GFR-binding peptide
QALSAISILYLVGRKPKVLKNYQMI

SEQ ID NO: 45605 - protein, 29 aa, Artificial Sequence
  Cyclic GFR-binding peptide
  MOD_RES (1), (1): Xaa is C or S
XVPQALSATSILYYVGRKPKVLRKHRMIV

SEQ ID NO: 45606 - protein, 27 aa, Artificial Sequence
  Cyclic GFR-binding peptide
DLSAISILYLVGRTPKVLKNYQMVVKS

SEQ ID NO: 45607 - protein, 37 aa, Artificial Sequence; identical to SEQ ID NO: 6725
  Cyclic GFR-binding peptide
  MOD_RES (3), (4), (35), (37): Xaa is C or S

SEQ ID NO: 45608 - protein, 36 aa, Artificial Sequence
  Cyclic GFR-binding peptide
  MOD_RES (6), (7): Xaa is C or S
ASASPXXVSQDLSAISILYLIGKTPKILKNYQMIVK

SEQ ID NO: 45609 - protein, 28 aa, Artificial Sequence
  Cyclic GFR-binding peptide
  MOD_RES (1), (1): Xaa is C or S
XVSQDLSPISILYKIGKTPKILKYHYMI

SEQ ID NO: 45610 - protein, 34 aa, Artificial Sequence; identical to SEQ ID NO: 6729
  Cyclic GFR-binding peptide
  MOD_RES (1), (2), (34): Xaa is C or S

SEQ ID NO: 45611 - protein, 27 aa, Artificial Sequence
  Cyclic GFR-binding peptide
  MOD_RES (1), (1): Xaa is C or S
XAPTKLSAISVLYLDDSSNVILKNYQN

SEQ ID NO: 45612 - protein, 36 aa, Artificial Sequence; identical to SEQ ID NO: 6730
  Cyclic GFR-binding peptide
  MOD_RES (1), (2), (33), (35): Xaa is C or S

SEQ ID NO: 45613 - protein, 24 aa, Artificial Sequence
  Cyclic GFR-binding peptide
TKLSAISVLYLDSSNNVILKNYQN

SEQ ID NO: 45614 - protein, 26 aa, Artificial Sequence
  Cyclic GFR-binding peptide
  MOD_RES (1), (1): Xaa is C or S
XVPQDLNAISILYFVGRTPKVLKKYR

SEQ ID NO: 45615 - protein, 29 aa, Artificial Sequence
  Cyclic GFR-binding peptide
  MOD_RES (3), (4): Xaa is C or S
APXXVPQALNAISILYFVGRKPKVLKKYR

SEQ ID NO: 45616 - protein, 32 aa, Artificial Sequence; identical to SEQ ID NO: 6733
  Cyclic GFR-binding peptide
  MOD_RES (32), (32): Xaa is C or S

SEQ ID NO: 45617 - protein, 27 aa, Artificial Sequence
  Cyclic GFR-binding peptide
VPTELSPISMLYKDENEKVVLKYHYDM

SEQ ID NO: 45618 - protein, 32 aa, Artificial Sequence
  Cyclic GFR-binding peptide
PTQVQLSAISVLYLEIVRKKPIFLKNYQTLED

SEQ ID NO: 45619 - protein, 38 aa, Artificial Sequence; identical to SEQ ID NO: 6734
  Cyclic GFR-binding peptide
  MOD_RES (5), (6), (38): Xaa is C or S

SEQ ID NO: 45620 - protein, 37 aa, Artificial Sequence; identical to SEQ ID NO: 6735
  Cyclic GFR-binding peptide
  MOD_RES (6), (7): Xaa is C or S

SEQ ID NO: 45621 - protein, 28 aa, Artificial Sequence
  Cyclic GFR-binding peptide
  MOD_RES (1), (2): Xaa is C or S
XXVPTELSATSMLYYDEYDKVVLRKHRE

SEQ ID NO: 45622 - protein, 39 aa, Artificial Sequence; identical to SEQ ID NO: 6740
  Cyclic GFR-binding peptide
  MOD_RES (5), (37), (39): Xaa is C or S

SEQ ID NO: 45623 - protein, 24 aa, Artificial Sequence
  Cyclic GFR-binding peptide
PQDLSAISILYLVGRTPKVLKNYQ

SEQ ID NO: 45624 - protein, 29 aa, Artificial Sequence
  Cyclic GFR-binding peptide
PQDLSPISILYKVGRTPKVLKYHYMVVKS

SEQ ID NO: 45625 - protein, 24 aa, Artificial Sequence
  Cyclic GFR-binding peptide
QLNAISVLYFEIVRKKPIFLKKYR

SEQ ID NO: 45626 - protein, 31 aa, Artificial Sequence
  Cyclic GFR-binding peptide
  MOD_RES (1), (2): Xaa is C or S
XXVPTELSPISMLYKDEYDKVVLKYHYEMVV

SEQ ID NO: 45627 - protein, 25 aa, Artificial Sequence
  Cyclic GFR-binding peptide
PTELSATSMLYYDENEKVVLRKHRD

SEQ ID NO: 45628 - protein, 30 aa, Artificial Sequence
  Cyclic GFR-binding peptide
RPTQVQLSPISVLYKEIVRKKPIFLKYHYT

SEQ ID NO: 45629 - protein, 31 aa, Artificial Sequence
  Cyclic GFR-binding peptide
  MOD_RES (5), (6): Xaa is C or S
SAAPXXVPQALSATSILYYVGRKPKVLRKHR

SEQ ID NO: 45630 - protein, 32 aa, Artificial Sequence
  Cyclic GFR-binding peptide
QVQLNAISVLYFEIVRKKPIFLKKYRTLEDHL

SEQ ID NO: 45631 - protein, 23 aa, Artificial Sequence
  Cyclic GFR-binding peptide
TELSATSMLYYDENEKVVLRKHR

SEQ ID NO: 45632 - protein, 35 aa, Artificial Sequence; identical to SEQ ID NO: 6742
  Cyclic GFR-binding peptide
  MOD_RES (3), (4): Xaa is C or S

SEQ ID NO: 45633 - protein, 27 aa, Artificial Sequence
  Cyclic GFR-binding peptide
  MOD_RES (1), (2): Xaa is C or S
XXVPQALSAISILYLVGRKPKVLKNYQ

SEQ ID NO: 45634 - protein, 29 aa, Artificial Sequence
  Cyclic GFR-binding peptide
  MOD_RES (1), (1): Xaa is C or S
XVSQDLSAISILYLIGKTPKILKNYQMIV

SEQ ID NO: 45635 - protein, 31 aa, Artificial Sequence
  Cyclic GFR-binding peptide
  MOD_RES (1), (2): Xaa is C or S
XXVPTKLNAISVLYFDDMGVPTLKKYREGMS

SEQ ID NO: 45636 - protein, 40 aa, Artificial Sequence; identical to SEQ ID NO: 6743
  Cyclic GFR-binding peptide
  MOD_RES (6), (7), (38), (40): Xaa is C or S

SEQ ID NO: 45637 - protein, 28 aa, Artificial Sequence
  Cyclic GFR-binding peptide
  MOD_RES (1), (1): Xaa is C or S
XVPQDLSPISILYKVGRTPKVLKYHYMV

SEQ ID NO: 45638 - protein, 39 aa, Artificial Sequence; identical to SEQ ID NO: 6744
  Cyclic GFR-binding peptide
  MOD_RES (5), (6), (37), (39): Xaa is C or S

SEQ ID NO: 45639 - protein, 28 aa, Artificial Sequence
  Cyclic GFR-binding peptide
  MOD_RES (27), (27): Xaa is C or S
LSPISILYKVGRTPKVLKYHYMVVKSXK

SEQ ID NO: 45640 - protein, 30 aa, Artificial Sequence
  Cyclic GFR-binding peptide
  MOD_RES (2), (3): Xaa is C or S
PXXVPQALSPISILYKVGRKPKVLKYHYMI

SEQ ID NO: 45641 - protein, 32 aa, Artificial Sequence
  Cyclic GFR-binding peptide
  MOD_RES (5), (6): Xaa is C or S
VPKPXXAPTKLSAISVLYLDDSSNVILKNYQN

SEQ ID NO: 45642 - protein, 32 aa, Artificial Sequence; identical to SEQ ID NO: 6745
  Cyclic GFR-binding peptide
  MOD_RES (1), (1): Xaa is C or S

SEQ ID NO: 45643 - protein, 23 aa, Artificial Sequence
  Cyclic GFR-binding peptide
ALSAISILYLVGRKPKVLKNYQM

SEQ ID NO: 45644 - protein, 32 aa, Artificial Sequence
  Cyclic GFR-binding peptide
  MOD_RES (4), (5): Xaa is C or S
PKAXXVPTELNAISMLYFDEYDKVVLKKYREM

SEQ ID NO: 45645 - protein, 24 aa, Artificial Sequence
  Cyclic GFR-binding peptide
LNAISVLYFDDMGVPTLKKYREGM

SEQ ID NO: 45646 - protein, 36 aa, Artificial Sequence; identical to SEQ ID NO: 6746
  Cyclic GFR-binding peptide
  MOD_RES (1), (2), (34), (36): Xaa is C or S

SEQ ID NO: 45647 - protein, 28 aa, Artificial Sequence
  Cyclic GFR-binding peptide
  MOD_RES (28), (28): Xaa is C or S
LSPISVLYKDDSSNVILKYHYNMVVRSX

SEQ ID NO: 45648 - protein, 26 aa, Artificial Sequence
  Cyclic GFR-binding peptide
  MOD_RES (26), (26): Xaa is C or S
SATSILYYVGRTPKVLRKHRMVVKSX

SEQ ID NO: 45649 - protein, 26 aa, Artificial Sequence
  Cyclic GFR-binding peptide
VPTELNAISMLYFDENEKVVLKKYRD

SEQ ID NO: 45650 - protein, 29 aa, Artificial Sequence
  Cyclic GFR-binding peptide
TQLSPISVLYKDDSSNVILKYHYNMVVRA

SEQ ID NO: 45651 - protein, 29 aa, Artificial Sequence
  Cyclic GFR-binding peptide
  MOD_RES (1), (2): Xaa is C or S
XXVPTKLSAISVLYLDDMGVPTLKNYQEG

SEQ ID NO: 45652 - protein, 36 aa, Artificial Sequence; identical to SEQ ID NO: 6751
  Cyclic GFR-binding peptide
  MOD_RES (5), (5): Xaa is C or S

SEQ ID NO: 45653 - protein, 41 aa, Artificial Sequence; identical to SEQ ID NO: 6753
  Cyclic GFR-binding peptide
  MOD_RES (6), (7), (39), (41): Xaa is C or S

SEQ ID NO: 45654 - protein, 31 aa, Artificial Sequence
  Cyclic GFR-binding peptide
  MOD_RES (2), (2): Xaa is C or S
TXAPTKLSAISVLYLDDSSNVILKNYQNMVV

SEQ ID NO: 45655 - protein, 36 aa, Artificial Sequence
  Cyclic GFR-binding peptide
  MOD_RES (7), (7): Xaa is C or S
HVTKPTXAPTKLSATSVLYYDDSSNVILRKHRNMVV

SEQ ID NO: 45656 - protein, 29 aa, Artificial Sequence
  Cyclic GFR-binding peptide
  MOD_RES (28), (28): Xaa is C or S
LSATSMLYYDEYDKVVLRKHREMVVEGXG

SEQ ID NO: 45657 - protein, 31 aa, Artificial Sequence
  Cyclic GFR-binding peptide
  MOD_RES (4), (5): Xaa is C or S
PKAXXVPTELSPISMLYKDEYDKVVLKYHYE

SEQ ID NO: 45658 - protein, 35 aa, Artificial Sequence; identical to SEQ ID NO: 6755
  Cyclic GFR-binding peptide
  MOD_RES (1), (2), (34): Xaa is C or S

SEQ ID NO: 45659 - protein, 24 aa, Artificial Sequence
  Cyclic GFR-binding peptide
NAISVLYFDSSNNVILKKYRNMVV

SEQ ID NO: 45660 - protein, 27 aa, Artificial Sequence
  Cyclic GFR-binding peptide
DLSPISILYKIGKTPKILKYHYMIVKS

SEQ ID NO: 45661 - protein, 33 aa, Artificial Sequence
  Cyclic GFR-binding peptide
  MOD_RES (4), (5): Xaa is C or S
ASPXXVSQDLSPISILYKIGKTPKILKYHYMIV

SEQ ID NO: 45662 - protein, 40 aa, Artificial Sequence; identical to SEQ ID NO: 6758
  Cyclic GFR-binding peptide
  MOD_RES (5), (6), (38), (40): Xaa is C or S

SEQ ID NO: 45663 - protein, 27 aa, Artificial Sequence
  Cyclic GFR-binding peptide
LSAISVLYLDSSNNVILKNYQNMVVKA

SEQ ID NO: 45664 - protein, 41 aa, Artificial Sequence; identical to SEQ ID NO: 6761
  Cyclic GFR-binding peptide
  MOD_RES (1), (38), (40): Xaa is C or S

SEQ ID NO: 45665 - protein, 24 aa, Artificial Sequence
  Cyclic GFR-binding peptide
ELNAISMLYFDENEKVVLKKYRDM

SEQ ID NO: 45666 - protein, 34 aa, Artificial Sequence; identical to SEQ ID NO: 6764
  Cyclic GFR-binding peptide
  MOD_RES (2), (3), (34): Xaa is C or S

SEQ ID NO: 45667 - protein, 29 aa, Artificial Sequence
  Cyclic GFR-binding peptide
  MOD_RES (1), (1): Xaa is C or S
XAPTQLSAISVLYLDDSSNVILKNYQNMV

SEQ ID NO: 45668 - protein, 38 aa, Artificial Sequence; identical to SEQ ID NO: 6766
  Cyclic GFR-binding peptide
  MOD_RES (5), (6), (37): Xaa is C or S

SEQ ID NO: 45669 - protein, 31 aa, Artificial Sequence
  Cyclic GFR-binding peptide
  MOD_RES (4), (5): Xaa is C or S
AAPXXVPQALSATSILYYVGRKPKVLRKHRM

SEQ ID NO: 45670 - protein, 23 aa, Artificial Sequence
  Cyclic GFR-binding peptide
TELSATSMLYYDEYDKVVLRKHR

SEQ ID NO: 45671 - protein, 28 aa, Artificial Sequence
  Cyclic GFR-binding peptide
  MOD_RES (27), (27): Xaa is C or S
NAISMLYFDEYDKVVLKKYREMVVEGXG

SEQ ID NO: 45672 - protein, 35 aa, Artificial Sequence
  Cyclic GFR-binding peptide
  MOD_RES (2), (2): Xaa is C or S
QXRPTQVQLSATSVLYYEIVRKKPIFLRKHRTLED

SEQ ID NO: 45673 - protein, 28 aa, Artificial Sequence
  Cyclic GFR-binding peptide
PTELSATSMLYYDENEKVVLRKHRDMVV

SEQ ID NO: 45674 - protein, 23 aa, Artificial Sequence
  Cyclic GFR-binding peptide
SPISMLYKDENEKVVLKYHYDMV

SEQ ID NO: 45675 - protein, 26 aa, Artificial Sequence
  Cyclic GFR-binding peptide
QDLNAISILYFVGRTPKVLKKYRMVV

SEQ ID NO: 45676 - protein, 21 aa, Artificial Sequence
  Cyclic GFR-binding peptide
SPISILYKVGRKPKVLKYHYM

SEQ ID NO: 45677 - protein, 32 aa, Artificial Sequence
  Cyclic GFR-binding peptide
  MOD_RES (1), (1): Xaa is C or S
XVPTKLSATSVLYYDDMGVPTLRKHREGMSVA

SEQ ID NO: 45678 - protein, 31 aa, Artificial Sequence
  Cyclic GFR-binding peptide
  MOD_RES (28), (30): Xaa is C or S
NAISVLYFDDMGVPTLKKYREGMSVAEXGXR

SEQ ID NO: 45679 - protein, 41 aa, Artificial Sequence; identical to SEQ ID NO: 6770
  Cyclic GFR-binding peptide
  MOD_RES (6), (7), (38), (40): Xaa is C or S

SEQ ID NO: 45680 - protein, 25 aa, Artificial Sequence
  Cyclic GFR-binding peptide
LNAISILYFVGRKPKVLKKYRMIVR

SEQ ID NO: 45681 - protein, 30 aa, Artificial Sequence
  Cyclic GFR-binding peptide
  MOD_RES (28), (30): Xaa is C or S
LSPISVLYKDDSSNVILKYHYNMVVRAXGX

SEQ ID NO: 45682 - protein, 28 aa, Artificial Sequence
  Cyclic GFR-binding peptide
  MOD_RES (28), (28): Xaa is C or S
LSPISMLYKDEYDKVVLKYHYEMVVEGX

SEQ ID NO: 45683 - protein, 40 aa, Artificial Sequence; identical to SEQ ID NO: 6772
  Cyclic GFR-binding peptide
  MOD_RES (6), (7), (38), (40): Xaa is C or S

SEQ ID NO: 45684 - protein, 34 aa, Artificial Sequence; identical to SEQ ID NO: 6773
  Cyclic GFR-binding peptide
  MOD_RES (1), (33): Xaa is C or S

SEQ ID NO: 45685 - protein, 30 aa, Artificial Sequence
  Cyclic GFR-binding peptide
  MOD_RES (1), (1): Xaa is C or S
XAPTKLNAISVLYFDSSNNVILKKYRNMVV

SEQ ID NO: 45686 - protein, 27 aa, Artificial Sequence
  Cyclic GFR-binding peptide
DLSPISILYKVGRTPKVLKYHYMVVKS

SEQ ID NO: 45687 - protein, 35 aa, Artificial Sequence
  Cyclic GFR-binding peptide
  MOD_RES (33), (35): Xaa is C or S
VQLSPISVLYKEIVRKKPIFLKYHYTLEDHLAXKX

SEQ ID NO: 45688 - protein, 29 aa, Artificial Sequence
  Cyclic GFR-binding peptide
  MOD_RES (28), (28): Xaa is C or S
LSATSVLYYDDSSNVILRKHRNMVVRSXG

SEQ ID NO: 45689 - protein, 37 aa, Artificial Sequence; identical to SEQ ID NO: 6777
  Cyclic GFR-binding peptide
  MOD_RES (6), (7): Xaa is C or S

SEQ ID NO: 45690 - protein, 29 aa, Artificial Sequence
  Cyclic GFR-binding peptide
  MOD_RES (1), (2): Xaa is C or S
XXVPQDLSPISILYKVGRTPKVLKYHYMV

SEQ ID NO: 45691 - protein, 41 aa, Artificial Sequence; identical to SEQ ID NO: 6779
  Cyclic GFR-binding peptide
  MOD_RES (4), (5), (38), (40): Xaa is C or S

SEQ ID NO: 45692 - protein, 29 aa, Artificial Sequence
  Cyclic GFR-binding peptide
VPTELNAISMLYFDENEKVVLKKYRDMVV

SEQ ID NO: 45693 - protein, 36 aa, Artificial Sequence; identical to SEQ ID NO: 6782
  Cyclic GFR-binding peptide
  MOD_RES (1), (2), (33), (35): Xaa is C or S

SEQ ID NO: 45694 - protein, 36 aa, Artificial Sequence; identical to SEQ ID NO: 6784
  Cyclic GFR-binding peptide
  MOD_RES (5), (6): Xaa is C or S

SEQ ID NO: 45695 - protein, 31 aa, Artificial Sequence; identical to SEQ ID NO: 6783
  Cyclic GFR-binding peptide

SEQ ID NO: 45696 - protein, 22 aa, Artificial Sequence
  Cyclic GFR-binding peptide
SPISMLYKDEYDKVVLKYHYEM

SEQ ID NO: 45697 - protein, 33 aa, Artificial Sequence
  Cyclic GFR-binding peptide
  MOD_RES (6), (7): Xaa is C or S
ASASPXXVSQDLNAISILYFIGKTPKILKKYRM

SEQ ID NO: 45698 - protein, 37 aa, Artificial Sequence
  Cyclic GFR-binding peptide
  MOD_RES (34), (36): Xaa is C or S
QVQLNAISVLYFEIVRKKPIFLKKYRTLEDHLAXKXE

SEQ ID NO: 45699 - protein, 33 aa, Artificial Sequence; identical to SEQ ID NO: 6785
  Cyclic GFR-binding peptide
  MOD_RES (1), (2): Xaa is C or S

SEQ ID NO: 45700 - protein, 29 aa, Artificial Sequence
  Cyclic GFR-binding peptide
  MOD_RES (3), (3): Xaa is C or S
PTXAPTKLSPISVLYKDDSSNVILKYHYN

SEQ ID NO: 45701 - protein, 29 aa, Artificial Sequence
  Cyclic GFR-binding peptide
  MOD_RES (2), (3): Xaa is C or S
AXXVPTKLSAISVLYLDDMGVPTLKNYQE

SEQ ID NO: 45702 - protein, 32 aa, Artificial Sequence
  Cyclic GFR-binding peptide
  MOD_RES (2), (3): Xaa is C or S
PXXVPQALNAISILYFVGRKPKVLKKYRMIVR

SEQ ID NO: 45703 - protein, 23 aa, Artificial Sequence
  Cyclic GFR-binding peptide
ELSPISMLYKDENEKVVLKYHYD

SEQ ID NO: 45704 - protein, 32 aa, Artificial Sequence
  Cyclic GFR-binding peptide
  MOD_RES (4), (4): Xaa is C or S
KPTXAPTKLSPISVLYKDDSSNVILKYHYNMV

SEQ ID NO: 45705 - protein, 28 aa, Artificial Sequence
  Cyclic GFR-binding peptide
  MOD_RES (28), (28): Xaa is C or S
SAISVLYLDDMGVPTLKNYQEGMSVAEX

SEQ ID NO: 45706 - protein, 33 aa, Artificial Sequence
  Cyclic GFR-binding peptide
  MOD_RES (30), (32): Xaa is C or S
TKLSAISVLYLDSSNNVILKNYQNMVVKAXGXH

SEQ ID NO: 45707 - protein, 26 aa, Artificial Sequence
  Cyclic GFR-binding peptide
LNAISVLYFDSSNNVILKKYRNMVVK

SEQ ID NO: 45708 - protein, 37 aa, Artificial Sequence; identical to SEQ ID NO: 6788
  Cyclic GFR-binding peptide
  MOD_RES (1), (2), (34), (36): Xaa is C or S

SEQ ID NO: 45709 - protein, 31 aa, Artificial Sequence
  Cyclic GFR-binding peptide
VPTKLNAISVLYFDDMGVPTLKKYREGMSVA

SEQ ID NO: 45710 - protein, 34 aa, Artificial Sequence
  Cyclic GFR-binding peptide
  MOD_RES (6), (7): Xaa is C or S
ASASPXXVPQDLSATSILYYVGRTPKVLRKHRMV

SEQ ID NO: 45711 - protein, 30 aa, Artificial Sequence
  Cyclic GFR-binding peptide
  MOD_RES (30), (30): Xaa is C or S
TELSATSMLYYDEYDKVVLRKHREMVVEGX

SEQ ID NO: 45712 - protein, 38 aa, Artificial Sequence; identical to SEQ ID NO: 6790
  Cyclic GFR-binding peptide
  MOD_RES (2), (3), (35), (37): Xaa is C or S

SEQ ID NO: 45713 - protein, 35 aa, Artificial Sequence
  Cyclic GFR-binding peptide
  MOD_RES (6), (7): Xaa is C or S
TVPKPXXAPTQLSATSVLYYDDSSNVILRKHRNMV

SEQ ID NO: 45714 - protein, 29 aa, Artificial Sequence
  Cyclic GFR-binding peptide
TQVQLSPISVLYKEIVRKKPIFLKYHYTL

SEQ ID NO: 45715 - protein, 37 aa, Artificial Sequence; identical to SEQ ID NO: 6791
  Cyclic GFR-binding peptide
  MOD_RES (35), (37): Xaa is C or S

SEQ ID NO: 45716 - protein, 36 aa, Artificial Sequence; identical to SEQ ID NO: 6792
  Cyclic GFR-binding peptide
  MOD_RES (5), (6): Xaa is C or S

SEQ ID NO: 45717 - protein, 30 aa, Artificial Sequence
  Cyclic GFR-binding peptide
  MOD_RES (4), (5): Xaa is C or S
PKAXXAPTKLSPISVLYKDSSNNVILKYHY

SEQ ID NO: 45718 - protein, 32 aa, Artificial Sequence
  Cyclic GFR-binding peptide
  MOD_RES (3), (4): Xaa is C or S
KAXXVPTELSPISMLYKDEYDKVVLKYHYEMV

SEQ ID NO: 45719 - protein, 31 aa, Artificial Sequence
  Cyclic GFR-binding peptide
  MOD_RES (4), (4): Xaa is C or S
KPTXAPTKLSPISVLYKDDSSNVILKYHYNM

SEQ ID NO: 45720 - protein, 32 aa, Artificial Sequence
  Cyclic GFR-binding peptide
  MOD_RES (3), (4): Xaa is C or S
KAXXVPTKLSAISVLYLDDMGVPTLKNYQEGM

SEQ ID NO: 45721 - protein, 35 aa, Artificial Sequence; identical to SEQ ID NO: 6793
  Cyclic GFR-binding peptide
  MOD_RES (1), (32), (34): Xaa is C or S

SEQ ID NO: 45722 - protein, 20 aa, Artificial Sequence
  Cyclic GFR-binding peptide
SPISILYKIGKTPKILKYHY

SEQ ID NO: 45723 - protein, 26 aa, Artificial Sequence
  Cyclic GFR-binding peptide
KLNAISVLYFDSSNNVILKKYRNMVV

SEQ ID NO: 45724 - protein, 35 aa, Artificial Sequence; identical to SEQ ID NO: 6794
  Cyclic GFR-binding peptide
  MOD_RES (1), (33), (35): Xaa is C or S

SEQ ID NO: 45725 - protein, 31 aa, Artificial Sequence
  Cyclic GFR-binding peptide
  MOD_RES (4), (5): Xaa is C or S
PKAXXAPTKLSAISVLYLDSSNNVILKNYQN

SEQ ID NO: 45726 - protein, 35 aa, Artificial Sequence; identical to SEQ ID NO: 6795
  Cyclic GFR-binding peptide
  MOD_RES (1), (32), (34): Xaa is C or S

SEQ ID NO: 45727 - protein, 27 aa, Artificial Sequence
  Cyclic GFR-binding peptide
KLSPISVLYKDDSSNVILKYHYNMVVR

SEQ ID NO: 45728 - protein, 26 aa, Artificial Sequence
  Cyclic GFR-binding peptide
DLNAISILYFVGRTPKVLKKYRMVVK

SEQ ID NO: 45729 - protein, 39 aa, Artificial Sequence; identical to SEQ ID NO: 6797
  Cyclic GFR-binding peptide
  MOD_RES (5), (6), (37), (39): Xaa is C or S

SEQ ID NO: 45730 - protein, 39 aa, Artificial Sequence; identical to SEQ ID NO: 6798
  Cyclic GFR-binding peptide
  MOD_RES (5), (6), (38): Xaa is C or S

SEQ ID NO: 45731 - protein, 29 aa, Artificial Sequence
  Cyclic GFR-binding peptide
  MOD_RES (28), (28): Xaa is C or S
LSAISVLYLDSSNNVILKNYQNMVVKAXG

SEQ ID NO: 45732 - protein, 39 aa, Artificial Sequence; identical to SEQ ID NO: 6800
  Cyclic GFR-binding peptide
  MOD_RES (6), (7), (38): Xaa is C or S

SEQ ID NO: 45733 - protein, 22 aa, Artificial Sequence
  Cyclic GFR-binding peptide
LNAISVLYFDSSNNVILKKYRN

SEQ ID NO: 45734 - protein, 28 aa, Artificial Sequence
  Cyclic GFR-binding peptide
QLSPISVLYKDDSSNVILKYHYNMVVRA

SEQ ID NO: 45735 - protein, 37 aa, Artificial Sequence
  Cyclic GFR-binding peptide
  MOD_RES (5), (6): Xaa is C or S
VGKAXXVPTKLSAISVLYLDDMGVPTLKNYQEGMSVA

SEQ ID NO: 45736 - protein, 22 aa, Artificial Sequence
  Cyclic GFR-binding peptide
NAISVLYFDSSNNVILKKYRNM

SEQ ID NO: 45737 - protein, 29 aa, Artificial Sequence
  Cyclic GFR-binding peptide
TKLNAISVLYFDSSNNVILKKYRNMVVKA

SEQ ID NO: 45738 - protein, 28 aa, Artificial Sequence
  Cyclic GFR-binding peptide
  MOD_RES (1), (2): Xaa is C or S
XXAPTKLSPISVLYKDSSNNVILKYHYN

SEQ ID NO: 45739 - protein, 33 aa, Artificial Sequence
  Cyclic GFR-binding peptide
  MOD_RES (3), (4): Xaa is C or S
SPXXVSQDLSAISILYLIGKTPKILKNYQMIVK

SEQ ID NO: 45740 - protein, 40 aa, Artificial Sequence; identical to SEQ ID NO: 6803
  Cyclic GFR-binding peptide
  MOD_RES (6), (38), (40): Xaa is C or S

SEQ ID NO: 45741 - protein, 32 aa, Artificial Sequence
  Cyclic GFR-binding peptide
  MOD_RES (5), (6): Xaa is C or S
SAAPXXVPQALSATSILYYVGRKPKVLRKHRM

SEQ ID NO: 45742 - protein, 27 aa, Artificial Sequence
  Cyclic GFR-binding peptide
DLSAISILYLIGKTPKILKNYQMIVKS

SEQ ID NO: 45743 - protein, 29 aa, Artificial Sequence
  Cyclic GFR-binding peptide
  MOD_RES (26), (28): Xaa is C or S
SAISILYLVGRKPKVLKNYQMIVRSXKXS

SEQ ID NO: 45744 - protein, 25 aa, Artificial Sequence
  Cyclic GFR-binding peptide
LSATSVLYYDDMGVPTLRKHREGMS

SEQ ID NO: 45745 - protein, 30 aa, Artificial Sequence
  Cyclic GFR-binding peptide
TQVQLSAISVLYLEIVRKKPIFLKNYQTLE

SEQ ID NO: 45746 - protein, 40 aa, Artificial Sequence; identical to SEQ ID NO: 6804
  Cyclic GFR-binding peptide
  MOD_RES (4), (5), (37), (39): Xaa is C or S

SEQ ID NO: 45747 - protein, 24 aa, Artificial Sequence
  Cyclic GFR-binding peptide
LNAISVLYFDSSNNVILKKYRNMV

SEQ ID NO: 45748 - protein, 32 aa, Artificial Sequence
  Cyclic GFR-binding peptide
  MOD_RES (2), (3): Xaa is C or S
PXXVPQDLSATSILYYVGRTPKVLRKHRMVVK

SEQ ID NO: 45749 - protein, 34 aa, Artificial Sequence
  Cyclic GFR-binding peptide
  MOD_RES (6), (7): Xaa is C or S
KVGKAXXVPTKLNAISVLYFDDMGVPTLKKYREG

SEQ ID NO: 45750 - protein, 28 aa, Artificial Sequence
  Cyclic GFR-binding peptide
  MOD_RES (26), (28): Xaa is C or S
SAISILYLIGKTPKILKNYQMIVKSXKX

SEQ ID NO: 45751 - protein, 37 aa, Artificial Sequence; identical to SEQ ID NO: 6808
  Cyclic GFR-binding peptide
  MOD_RES (7), (7): Xaa is C or S

SEQ ID NO: 45752 - protein, 33 aa, Artificial Sequence; identical to SEQ ID NO: 6809
  Cyclic GFR-binding peptide
  MOD_RES (33), (33): Xaa is C or S

SEQ ID NO: 45753 - protein, 31 aa, Artificial Sequence
  Cyclic GFR-binding peptide
  MOD_RES (3), (4): Xaa is C or S
KAXXVPTELSPISMLYKDENEKVVLKYHYDM

SEQ ID NO: 45754 - protein, 33 aa, Artificial Sequence
  Cyclic GFR-binding peptide
  MOD_RES (7), (7): Xaa is C or S
HVTKPTXAPTKLSATSVLYYDDSSNVILRKHRN

SEQ ID NO: 45755 - protein, 40 aa, Artificial Sequence; identical to SEQ ID NO: 6811
  Cyclic GFR-binding peptide
  MOD_RES (6), (7), (40): Xaa is C or S

SEQ ID NO: 45756 - protein, 29 aa, Artificial Sequence
  Cyclic GFR-binding peptide
PQDLSAISILYLVGRTPKVLKNYQMVVKS

SEQ ID NO: 45757 - protein, 34 aa, Artificial Sequence
  Cyclic GFR-binding peptide
  MOD_RES (4), (5): Xaa is C or S
PKAXXVPTELNAISMLYFDENEKVVLKKYRDMVV

SEQ ID NO: 45758 - protein, 45 aa, Artificial Sequence; identical to SEQ ID NO: 6813
  Cyclic GFR-binding peptide
  MOD_RES (5), (42), (44): Xaa is C or S

SEQ ID NO: 45759 - protein, 37 aa, Artificial Sequence; identical to SEQ ID NO: 6814
  Cyclic GFR-binding peptide
  MOD_RES (6), (7): Xaa is C or S

SEQ ID NO: 45760 - protein, 25 aa, Artificial Sequence
  Cyclic GFR-binding peptide
PTKLSAISVLYLDSSNNVILKNYQN

SEQ ID NO: 45761 - protein, 33 aa, Artificial Sequence
  Cyclic GFR-binding peptide
  MOD_RES (32), (32): Xaa is C or S
QLSATSVLYYEIVRKKPIFLRKHRTLEDHLAXK

SEQ ID NO: 45762 - protein, 22 aa, Artificial Sequence
  Cyclic GFR-binding peptide
SATSILYYVGRKPKVLRKHRMI

SEQ ID NO: 45763 - protein, 32 aa, Artificial Sequence; identical to SEQ ID NO: 6815
  Cyclic GFR-binding peptide
  MOD_RES (31), (31): Xaa is C or S

SEQ ID NO: 45764 - protein, 36 aa, Artificial Sequence
  Cyclic GFR-binding peptide
  MOD_RES (5), (6): Xaa is C or S
VGKAXXVPTKLNAISVLYFDDMGVPTLKKYREGMSV

SEQ ID NO: 45765 - protein, 38 aa, Artificial Sequence
  Cyclic GFR-binding peptide
  MOD_RES (6), (7): Xaa is C or S
KVGKAXXVPTKLNAISVLYFDDMGVPTLKKYREGMSVA

SEQ ID NO: 45766 - protein, 38 aa, Artificial Sequence; identical to SEQ ID NO: 6816
  Cyclic GFR-binding peptide
  MOD_RES (6), (7): Xaa is C or S

SEQ ID NO: 45767 - protein, 34 aa, Artificial Sequence
  Cyclic GFR-binding peptide
  MOD_RES (6), (7): Xaa is C or S
ASASPXXVSQDLSATSILYYIGKTPKILRKHRMI

SEQ ID NO: 45768 - protein, 28 aa, Artificial Sequence
  Cyclic GFR-binding peptide
  MOD_RES (26), (28): Xaa is C or S
SAISILYLVGRKPKVLKNYQMIVRSXKX

SEQ ID NO: 45769 - protein, 27 aa, Artificial Sequence
  Cyclic GFR-binding peptide
  MOD_RES (1), (2): Xaa is C or S
XXVPTELSPISMLYKDEYDKVVLKYHY

SEQ ID NO: 45770 - protein, 26 aa, Artificial Sequence
  Cyclic GFR-binding peptide
SAISVLYLEIVRKKPIFLKNYQTLED

SEQ ID NO: 45771 - protein, 35 aa, Artificial Sequence
  Cyclic GFR-binding peptide
  MOD_RES (5), (6): Xaa is C or S
SAAPXXVPQALSAISILYLVGRKPKVLKNYQMIVR

SEQ ID NO: 45772 - protein, 30 aa, Artificial Sequence
  Cyclic GFR-binding peptide
  MOD_RES (4), (5): Xaa is C or S
AAPXXVPQALSPISILYKVGRKPKVLKYHY

SEQ ID NO: 45773 - protein, 30 aa, Artificial Sequence
  Cyclic GFR-binding peptide
  MOD_RES (1), (1): Xaa is C or S
XAPTKLSPISVLYKDSSNNVILKYHYNMVV

SEQ ID NO: 45774 - protein, 21 aa, Artificial Sequence
  Cyclic GFR-binding peptide
SATSMLYYDEYDKVVLRKHRE

SEQ ID NO: 45775 - protein, 39 aa, Artificial Sequence; identical to SEQ ID NO: 6820
  Cyclic GFR-binding peptide
  MOD_RES (5), (6), (37), (39): Xaa is C or S

SEQ ID NO: 45776 - protein, 36 aa, Artificial Sequence; identical to SEQ ID NO: 6821
  Cyclic GFR-binding peptide

SEQ ID NO: 45777 - protein, 34 aa, Artificial Sequence
  Cyclic GFR-binding peptide
  MOD_RES (4), (4): Xaa is C or S
NVQXRPTQVQLNAISVLYFEIVRKKPIFLKKYRT

SEQ ID NO: 45778 - protein, 30 aa, Artificial Sequence
  Cyclic GFR-binding peptide
  MOD_RES (4), (5): Xaa is C or S
PKAXXAPTKLSAISVLYLDSSNNVILKNYQ

SEQ ID NO: 45779 - protein, 34 aa, Artificial Sequence; identical to SEQ ID NO: 6823
  Cyclic GFR-binding peptide
  MOD_RES (32), (34): Xaa is C or S

SEQ ID NO: 45780 - protein, 22 aa, Artificial Sequence
  Cyclic GFR-binding peptide
ALNAISILYFVGRKPKVLKKYR

SEQ ID NO: 45781 - protein, 25 aa, Artificial Sequence
  Cyclic GFR-binding peptide
PTQLSPISVLYKDDSSNVILKYHYN

SEQ ID NO: 45782 - protein, 32 aa, Artificial Sequence
  Cyclic GFR-binding peptide
  MOD_RES (5), (5): Xaa is C or S
TKPTXAPTKLSPISVLYKDDSSNVILKYHYNM

SEQ ID NO: 45783 - protein, 21 aa, Artificial Sequence
  Cyclic GFR-binding peptide
SAISILYLVGRTPKVLKNYQM

SEQ ID NO: 45784 - protein, 37 aa, Artificial Sequence; identical to SEQ ID NO: 6830
  Cyclic GFR-binding peptide
  MOD_RES (6), (7): Xaa is C or S

SEQ ID NO: 45785 - protein, 35 aa, Artificial Sequence; identical to SEQ ID NO: 6831
  Cyclic GFR-binding peptide
  MOD_RES (32), (34): Xaa is C or S

SEQ ID NO: 45786 - protein, 32 aa, Artificial Sequence
  Cyclic GFR-binding peptide
QVQLSPISVLYKEIVRKKPIFLKYHYTLEDHL

SEQ ID NO: 45787 - protein, 34 aa, Artificial Sequence
  Cyclic GFR-binding peptide
  MOD_RES (31), (33): Xaa is C or S
TKLSATSVLYYDDMGVPTLRKHREGMSVAEXGXR

SEQ ID NO: 45788 - protein, 25 aa, Artificial Sequence
  Cyclic GFR-binding peptide
SPISILYKVGRTPKVLKYHYMVVKS

SEQ ID NO: 45789 - protein, 25 aa, Artificial Sequence
  Cyclic GFR-binding peptide
QALSATSILYYVGRKPKVLRKHRMI

SEQ ID NO: 45790 - protein, 28 aa, Artificial Sequence
  Cyclic GFR-binding peptide
  MOD_RES (28), (28): Xaa is C or S
DLSAISILYLIGKTPKILKNYQMIVKSX

SEQ ID NO: 45791 - protein, 31 aa, Artificial Sequence
  Cyclic GFR-binding peptide
  MOD_RES (1), (2): Xaa is C or S
XXAPTKLSAISVLYLDDSSNVILKNYQNMVV

SEQ ID NO: 45792 - protein, 38 aa, Artificial Sequence; identical to SEQ ID NO: 6836
  Cyclic GFR-binding peptide
  MOD_RES (4), (5), (37): Xaa is C or S

SEQ ID NO: 45793 - protein, 32 aa, Artificial Sequence
  Cyclic GFR-binding peptide
  MOD_RES (2), (3): Xaa is C or S
PXXVSQDLSAISILYLIGKTPKILKNYQMIVK

SEQ ID NO: 45794 - protein, 31 aa, Artificial Sequence
  Cyclic GFR-binding peptide
  MOD_RES (1), (2): Xaa is C or S
XXVSQDLSAISILYLIGKTPKILKNYQMIVK

SEQ ID NO: 45795 - protein, 31 aa, Artificial Sequence
  Cyclic GFR-binding peptide
  MOD_RES (30), (30): Xaa is C or S
PQDLSAISILYLVGRTPKVLKNYQMVVKSXK

SEQ ID NO: 45796 - protein, 28 aa, Artificial Sequence
  Cyclic GFR-binding peptide
VQLSAISVLYLEIVRKKPIFLKNYQTLE

SEQ ID NO: 45797 - protein, 33 aa, Artificial Sequence
  Cyclic GFR-binding peptide
  MOD_RES (2), (3): Xaa is C or S
AXXVPTKLNAISVLYFDDMGVPTLKKYREGMSV

SEQ ID NO: 45798 - protein, 29 aa, Artificial Sequence
  Cyclic GFR-binding peptide
VPTKLSAISVLYLDDMGVPTLKNYQEGMS

SEQ ID NO: 45799 - protein, 33 aa, Artificial Sequence
  Cyclic GFR-binding peptide
  MOD_RES (6), (7): Xaa is C or S
ASAAPXXVPQALSPISILYKVGRKPKVLKYHYM

SEQ ID NO: 45800 - protein, 36 aa, Artificial Sequence; identical to SEQ ID NO: 6840
  Cyclic GFR-binding peptide

SEQ ID NO: 45801 - protein, 31 aa, Artificial Sequence
  Cyclic GFR-binding peptide
  MOD_RES (29), (31): Xaa is C or S
ELSATSMLYYDEYDKVVLRKHREMVVEGXGX

SEQ ID NO: 45802 - protein, 38 aa, Artificial Sequence; identical to SEQ ID NO: 6839
  Cyclic GFR-binding peptide
  MOD_RES (4), (5), (37): Xaa is C or S

SEQ ID NO: 45803 - protein, 23 aa, Artificial Sequence
  Cyclic GFR-binding peptide
LNAISVLYFDDMGVPTLKKYREG

SEQ ID NO: 45804 - protein, 40 aa, Artificial Sequence; identical to SEQ ID NO: 6841
  Cyclic GFR-binding peptide
  MOD_RES (5), (6), (38), (40): Xaa is C or S

SEQ ID NO: 45805 - protein, 28 aa, Artificial Sequence
  Cyclic GFR-binding peptide
TQVQLSPISVLYKEIVRKKPIFLKYHYT

SEQ ID NO: 45806 - protein, 31 aa, Artificial Sequence; identical to SEQ ID NO: 6842
  Cyclic GFR-binding peptide
  MOD_RES (31), (31): Xaa is C or S

SEQ ID NO: 45807 - protein, 44 aa, Artificial Sequence; identical to SEQ ID NO: 6843
  Cyclic GFR-binding peptide
  MOD_RES (4), (41), (43): Xaa is C or S

SEQ ID NO: 45808 - protein, 31 aa, Artificial Sequence
  Cyclic GFR-binding peptide
  MOD_RES (3), (4): Xaa is C or S
SPXXVSQDLSPISILYKIGKTPKILKYHYMI

SEQ ID NO: 45809 - protein, 34 aa, Artificial Sequence
  Cyclic GFR-binding peptide
  MOD_RES (3), (3): Xaa is C or S
VQXRPTQVQLSPISVLYKEIVRKKPIFLKYHYTL

SEQ ID NO: 45810 - protein, 35 aa, Artificial Sequence
  Cyclic GFR-binding peptide
  MOD_RES (3), (4): Xaa is C or S
KAXXVPTKLSAISVLYLDDMGVPTLKNYQEGMSVA

SEQ ID NO: 45811 - protein, 30 aa, Artificial Sequence
  Cyclic GFR-binding peptide
  MOD_RES (3), (4): Xaa is C or S
APXXVPQALSPISILYKVGRKPKVLKYHYM

SEQ ID NO: 45812 - protein, 34 aa, Artificial Sequence; identical to SEQ ID NO: 6846
  Cyclic GFR-binding peptide
  MOD_RES (1), (34): Xaa is C or S

SEQ ID NO: 45813 - protein, 33 aa, Artificial Sequence
  Cyclic GFR-binding peptide
  MOD_RES (33), (33): Xaa is C or S
VQLSAISVLYLEIVRKKPIFLKNYQTLEDHLAX

SEQ ID NO: 45814 - protein, 26 aa, Artificial Sequence
  Cyclic GFR-binding peptide
PTKLNAISVLYFDSSNNVILKKYRNM

SEQ ID NO: 45815 - protein, 41 aa, Artificial Sequence; identical to SEQ ID NO: 6847
  Cyclic GFR-binding peptide
  MOD_RES (5), (6), (38), (40): Xaa is C or S

SEQ ID NO: 45816 - protein, 32 aa, Artificial Sequence
  Cyclic GFR-binding peptide
  MOD_RES (5), (6): Xaa is C or S
SASPXXVPQDLSPISILYKVGRTPKVLKYHYM

SEQ ID NO: 45817 - protein, 31 aa, Artificial Sequence
  Cyclic GFR-binding peptide
TQVQLNAISVLYFEIVRKKPIFLKKYRTLED

SEQ ID NO: 45818 - protein, 33 aa, Artificial Sequence
  Cyclic GFR-binding peptide
  MOD_RES (3), (4): Xaa is C or S
KAXXVPTELSPISMLYKDEYDKVVLKYHYEMVV

SEQ ID NO: 45819 - protein, 35 aa, Artificial Sequence; identical to SEQ ID NO: 6848
  Cyclic GFR-binding peptide
  MOD_RES (1), (33), (35): Xaa is C or S

SEQ ID NO: 45820 - protein, 30 aa, Artificial Sequence
  Cyclic GFR-binding peptide
  MOD_RES (30), (30): Xaa is C or S
PQDLSATSILYYVGRTPKVLRKHRMVVKSX

SEQ ID NO: 45821 - protein, 35 aa, Artificial Sequence; identical to SEQ ID NO: 6850
  Cyclic GFR-binding peptide
  MOD_RES (1), (33), (35): Xaa is C or S

SEQ ID NO: 45822 - protein, 35 aa, Artificial Sequence
  Cyclic GFR-binding peptide
  MOD_RES (6), (7): Xaa is C or S
ASAAPXXVPQALSPISILYKVGRKPKVLKYHYMIV

SEQ ID NO: 45823 - protein, 34 aa, Artificial Sequence
  Cyclic GFR-binding peptide
  MOD_RES (6), (7): Xaa is C or S
SIPKAXXVPTELNAISMLYFDEYDKVVLKKYREM

SEQ ID NO: 45824 - protein, 37 aa, Artificial Sequence; identical to SEQ ID NO: 6851
  Cyclic GFR-binding peptide
  MOD_RES (2), (3), (35), (37): Xaa is C or S

SEQ ID NO: 45825 - protein, 30 aa, Artificial Sequence
  Cyclic GFR-binding peptide
  MOD_RES (3), (4): Xaa is C or S
KAXXVPTELNAISMLYFDENEKVVLKKYRD

SEQ ID NO: 45826 - protein, 33 aa, Artificial Sequence; identical to SEQ ID NO: 6852
  Cyclic GFR-binding peptide
  MOD_RES (1), (33): Xaa is C or S

SEQ ID NO: 45827 - protein, 31 aa, Artificial Sequence; identical to SEQ ID NO: 6854
  Cyclic GFR-binding peptide

SEQ ID NO: 45828 - protein, 26 aa, Artificial Sequence
  Cyclic GFR-binding peptide
KLSAISVLYLDDMGVPTLKNYQEGMS

SEQ ID NO: 45829 - protein, 34 aa, Artificial Sequence
  Cyclic GFR-binding peptide
  MOD_RES (31), (33): Xaa is C or S
LSAISVLYLEIVRKKPIFLKNYQTLEDHLAXKXE

SEQ ID NO: 45830 - protein, 40 aa, Artificial Sequence; identical to SEQ ID NO: 6857
  Cyclic GFR-binding peptide
  MOD_RES (5), (6), (37), (39): Xaa is C or S

SEQ ID NO: 45831 - protein, 31 aa, Artificial Sequence
  Cyclic GFR-binding peptide
  MOD_RES (1), (2): Xaa is C or S
XXAPTQLSAISVLYLDDSSNVILKNYQNMVV

SEQ ID NO: 45832 - protein, 27 aa, Artificial Sequence
  Cyclic GFR-binding peptide
  MOD_RES (1), (2): Xaa is C or S
XXVPQDLSAISILYLVGRTPKVLKNYQ

SEQ ID NO: 45833 - protein, 25 aa, Artificial Sequence
  Cyclic GFR-binding peptide
SQDLNAISILYFIGKTPKILKKYRM

SEQ ID NO: 45834 - protein, 35 aa, Artificial Sequence; identical to SEQ ID NO: 6860
  Cyclic GFR-binding peptide
  MOD_RES (32), (34): Xaa is C or S

SEQ ID NO: 45835 - protein, 31 aa, Artificial Sequence
  Cyclic GFR-binding peptide
  MOD_RES (28), (30): Xaa is C or S
LSATSMLYYDENEKVVLRKHRDMVVEGXGXR

SEQ ID NO: 45836 - protein, 29 aa, Artificial Sequence
  Cyclic GFR-binding peptide
  MOD_RES (29), (29): Xaa is C or S
QLSATSVLYYDDSSNVILRKHRNMVVRAX

SEQ ID NO: 45837 - protein, 42 aa, Artificial Sequence; identical to SEQ ID NO: 6861
  Cyclic GFR-binding peptide
  MOD_RES (2), (39), (41): Xaa is C or S

SEQ ID NO: 45838 - protein, 34 aa, Artificial Sequence
  Cyclic GFR-binding peptide
  MOD_RES (7), (7): Xaa is C or S
HVTKPTXAPTKLSAISVLYLDDSSNVILKNYQNM

SEQ ID NO: 45839 - protein, 35 aa, Artificial Sequence; identical to SEQ ID NO: 6864
  Cyclic GFR-binding peptide
  MOD_RES (3), (4), (35): Xaa is C or S

SEQ ID NO: 45840 - protein, 36 aa, Artificial Sequence; identical to SEQ ID NO: 6865
  Cyclic GFR-binding peptide
  MOD_RES (2), (3), (34), (36): Xaa is C or S

SEQ ID NO: 45841 - protein, 27 aa, Artificial Sequence
  Cyclic GFR-binding peptide
SAISVLYLEIVRKKPIFLKNYQTLEDH

SEQ ID NO: 45842 - protein, 33 aa, Artificial Sequence; identical to SEQ ID NO: 6867
  Cyclic GFR-binding peptide
  MOD_RES (32), (32): Xaa is C or S

SEQ ID NO: 45843 - protein, 38 aa, Artificial Sequence; identical to SEQ ID NO: 6870
  Cyclic GFR-binding peptide
  MOD_RES (5), (6), (37): Xaa is C or S

SEQ ID NO: 45844 - protein, 22 aa, Artificial Sequence
  Cyclic GFR-binding peptide
SAISVLYLDSSNNVILKNYQNM

SEQ ID NO: 45845 - protein, 30 aa, Artificial Sequence
  Cyclic GFR-binding peptide
  MOD_RES (2), (3): Xaa is C or S
PXXVSQDLSPISILYKIGKTPKILKYHYMI

SEQ ID NO: 45846 - protein, 29 aa, Artificial Sequence
  Cyclic GFR-binding peptide
PTKLSAISVLYLDDSSNVILKNYQNMVVR

SEQ ID NO: 45847 - protein, 23 aa, Artificial Sequence
  Cyclic GFR-binding peptide
LSAISVLYLDSSNNVILKNYQNM

SEQ ID NO: 45848 - protein, 40 aa, Artificial Sequence; identical to SEQ ID NO: 6871
  Cyclic GFR-binding peptide
  MOD_RES (5), (6), (38), (40): Xaa is C or S

SEQ ID NO: 45849 - protein, 31 aa, Artificial Sequence
  Cyclic GFR-binding peptide
  MOD_RES (5), (6): Xaa is C or S
VPKPXXAPTKLSPISVLYKDDSSNVILKYHY

SEQ ID NO: 45850 - protein, 38 aa, Artificial Sequence; identical to SEQ ID NO: 6873
  Cyclic GFR-binding peptide
  MOD_RES (2), (3), (35), (37): Xaa is C or S

SEQ ID NO: 45851 - protein, 24 aa, Artificial Sequence
  Cyclic GFR-binding peptide
QDLNAISILYFVGRTPKVLKKYRM

SEQ ID NO: 45852 - protein, 23 aa, Artificial Sequence
  Cyclic GFR-binding peptide
DLSAISILYLVGRTPKVLKNYQM

SEQ ID NO: 45853 - protein, 33 aa, Artificial Sequence
  Cyclic GFR-binding peptide
  MOD_RES (6), (7): Xaa is C or S
YVPKPXXAPTKLSPISVLYKDDSSNVILKYHYN

SEQ ID NO: 45854 - protein, 29 aa, Artificial Sequence
  Cyclic GFR-binding peptide
  MOD_RES (2), (3): Xaa is C or S
AXXVPTELNAISMLYFDENEKVVLKKYRD

SEQ ID NO: 45855 - protein, 30 aa, Artificial Sequence
  Cyclic GFR-binding peptide
  MOD_RES (28), (30): Xaa is C or S
DLNAISILYFIGKTPKILKKYRMIVKSXKX

SEQ ID NO: 45856 - protein, 29 aa, Artificial Sequence
  Cyclic GFR-binding peptide
  MOD_RES (1), (1): Xaa is C or S
XVPTELSPISMLYKDEYDKVVLKYHYEMV

SEQ ID NO: 45857 - protein, 39 aa, Artificial Sequence; identical to SEQ ID NO: 6875
  Cyclic GFR-binding peptide
  MOD_RES (6), (7), (39): Xaa is C or S

SEQ ID NO: 45858 - protein, 25 aa, Artificial Sequence
  Cyclic GFR-binding peptide
SAISILYLVGRTPKVLKNYQMVVKS

SEQ ID NO: 45859 - protein, 35 aa, Artificial Sequence; identical to SEQ ID NO: 6877
  Cyclic GFR-binding peptide
  MOD_RES (2), (3), (34): Xaa is C or S

SEQ ID NO: 45860 - protein, 31 aa, Artificial Sequence; identical to SEQ ID NO: 6878
  Cyclic GFR-binding peptide

SEQ ID NO: 45861 - protein, 38 aa, Artificial Sequence; identical to SEQ ID NO: 6879
  Cyclic GFR-binding peptide
  MOD_RES (6), (7), (38): Xaa is C or S

SEQ ID NO: 45862 - protein, 34 aa, Artificial Sequence; identical to SEQ ID NO: 6880
  Cyclic GFR-binding peptide
  MOD_RES (32), (34): Xaa is C or S

SEQ ID NO: 45863 - protein, 35 aa, Artificial Sequence; identical to SEQ ID NO: 6881
  Cyclic GFR-binding peptide
  MOD_RES (4), (5): Xaa is C or S

SEQ ID NO: 45864 - protein, 35 aa, Artificial Sequence; identical to SEQ ID NO: 6882
  Cyclic GFR-binding peptide
  MOD_RES (2), (3), (34): Xaa is C or S

SEQ ID NO: 45865 - protein, 24 aa, Artificial Sequence
  Cyclic GFR-binding peptide
LSPISILYKVGRTPKVLKYHYMVV

SEQ ID NO: 45866 - protein, 31 aa, Artificial Sequence
  Cyclic GFR-binding peptide
  MOD_RES (2), (3): Xaa is C or S
AXXVPTKLSAISVLYLDDMGVPTLKNYQEGM

SEQ ID NO: 45867 - protein, 29 aa, Artificial Sequence
  Cyclic GFR-binding peptide
TELSATSMLYYDENEKVVLRKHRDMVVEG

SEQ ID NO: 45868 - protein, 30 aa, Artificial Sequence
  Cyclic GFR-binding peptide
  MOD_RES (28), (30): Xaa is C or S
DLNAISILYFVGRTPKVLKKYRMVVKSXKX

SEQ ID NO: 45869 - protein, 36 aa, Artificial Sequence
  Cyclic GFR-binding peptide
  MOD_RES (6), (7): Xaa is C or S
ASASPXXVPQDLSATSILYYVGRTPKVLRKHRMVVK

SEQ ID NO: 45870 - protein, 32 aa, Artificial Sequence
  Cyclic GFR-binding peptide
  MOD_RES (4), (5): Xaa is C or S
PKPXXAPTQLSAISVLYLDDSSNVILKNYQNM

SEQ ID NO: 45871 - protein, 25 aa, Artificial Sequence
  Cyclic GFR-binding peptide
QLSATSVLYYEIVRKKPIFLRKHRT

SEQ ID NO: 45872 - protein, 27 aa, Artificial Sequence
  Cyclic GFR-binding peptide
QALNAISILYFVGRKPKVLKKYRMIVR

SEQ ID NO: 45873 - protein, 31 aa, Artificial Sequence
  Cyclic GFR-binding peptide
  MOD_RES (4), (5): Xaa is C or S
PKPXXAPTQLSPISVLYKDDSSNVILKYHYN

SEQ ID NO: 45874 - protein, 28 aa, Artificial Sequence
  Cyclic GFR-binding peptide
PTKLNAISVLYFDSSNNVILKKYRNMVV

SEQ ID NO: 45875 - protein, 32 aa, Artificial Sequence; identical to SEQ ID NO: 6885
  Cyclic GFR-binding peptide
  MOD_RES (32), (32): Xaa is C or S

SEQ ID NO: 45876 - protein, 33 aa, Artificial Sequence
  Cyclic GFR-binding peptide
  MOD_RES (30), (32): Xaa is C or S
TELSATSMLYYDENEKVVLRKHRDMVVEGXGXR

SEQ ID NO: 45877 - protein, 30 aa, Artificial Sequence
  Cyclic GFR-binding peptide
  MOD_RES (28), (30): Xaa is C or S
LSAISVLYLDSSNNVILKNYQNMVVKAXGX

SEQ ID NO: 45878 - protein, 35 aa, Artificial Sequence; identical to SEQ ID NO: 6887
  Cyclic GFR-binding peptide
  MOD_RES (1), (2), (34): Xaa is C or S

SEQ ID NO: 45879 - protein, 32 aa, Artificial Sequence
  Cyclic GFR-binding peptide
PTQVQLSATSVLYYEIVRKKPIFLRKHRTLED

SEQ ID NO: 45880 - protein, 34 aa, Artificial Sequence
  Cyclic GFR-binding peptide
  MOD_RES (2), (2): Xaa is C or S
QXRPTQVQLSPISVLYKEIVRKKPIFLKYHYTLE

SEQ ID NO: 45881 - protein, 31 aa, Artificial Sequence
  Cyclic GFR-binding peptide
  MOD_RES (3), (4): Xaa is C or S
KAXXVPTELNAISMLYFDEYDKVVLKKYREM

SEQ ID NO: 45882 - protein, 35 aa, Artificial Sequence
  Cyclic GFR-binding peptide
  MOD_RES (5), (6): Xaa is C or S
SASPXXVSQDLNAISILYFIGKTPKILKKYRMIVK

SEQ ID NO: 45883 - protein, 25 aa, Artificial Sequence
  Cyclic GFR-binding peptide
VQLNAISVLYFEIVRKKPIFLKKYR

SEQ ID NO: 45884 - protein, 35 aa, Artificial Sequence
  Cyclic GFR-binding peptide
  MOD_RES (3), (4): Xaa is C or S
KAXXVPTKLNAISVLYFDDMGVPTLKKYREGMSVA

SEQ ID NO: 45885 - protein, 25 aa, Artificial Sequence
  Cyclic GFR-binding peptide
PQDLNAISILYFVGRTPKVLKKYRM

SEQ ID NO: 45886 - protein, 29 aa, Artificial Sequence
  Cyclic GFR-binding peptide
PTKLSPISVLYKDDSSNVILKYHYNMVVR

SEQ ID NO: 45887 - protein, 29 aa, Artificial Sequence
  Cyclic GFR-binding peptide
  MOD_RES (29), (29): Xaa is C or S
QDLNAISILYFIGKTPKILKKYRMIVKSX

SEQ ID NO: 45888 - protein, 36 aa, Artificial Sequence; identical to SEQ ID NO: 6891
  Cyclic GFR-binding peptide
  MOD_RES (4), (5): Xaa is C or S

SEQ ID NO: 45889 - protein, 34 aa, Artificial Sequence
  Cyclic GFR-binding peptide
  MOD_RES (31), (33): Xaa is C or S
PTELNAISMLYFDENEKVVLKKYRDMVVEGXGXR

SEQ ID NO: 45890 - protein, 31 aa, Artificial Sequence
  Cyclic GFR-binding peptide
  MOD_RES (28), (30): Xaa is C or S
DLNAISILYFVGRTPKVLKKYRMVVKSXKXS

SEQ ID NO: 45891 - protein, 26 aa, Artificial Sequence
  Cyclic GFR-binding peptide
VPTELSPISMLYKDENEKVVLKYHYD

SEQ ID NO: 45892 - protein, 38 aa, Artificial Sequence; identical to SEQ ID NO: 6892
  Cyclic GFR-binding peptide
  MOD_RES (5), (6), (38): Xaa is C or S

SEQ ID NO: 45893 - protein, 36 aa, Artificial Sequence
  Cyclic GFR-binding peptide
  MOD_RES (33), (35): Xaa is C or S
VQLSPISVLYKEIVRKKPIFLKYHYTLEDHLAXKXE

SEQ ID NO: 45894 - protein, 30 aa, Artificial Sequence
  Cyclic GFR-binding peptide
  MOD_RES (2), (3): Xaa is C or S
PXXVPQDLSAISILYLVGRTPKVLKNYQMV

SEQ ID NO: 45895 - protein, 39 aa, Artificial Sequence; identical to SEQ ID NO: 6893
  Cyclic GFR-binding peptide
  MOD_RES (6), (38): Xaa is C or S

SEQ ID NO: 45896 - protein, 39 aa, Artificial Sequence; identical to SEQ ID NO: 6894
  Cyclic GFR-binding peptide
  MOD_RES (5), (5): Xaa is C or S

SEQ ID NO: 45897 - protein, 32 aa, Artificial Sequence
  Cyclic GFR-binding peptide
  MOD_RES (29), (31): Xaa is C or S
QDLSPISILYKIGKTPKILKYHYMIVKSXKXS

SEQ ID NO: 45898 - protein, 39 aa, Artificial Sequence; identical to SEQ ID NO: 6895
  Cyclic GFR-binding peptide
  MOD_RES (3), (3): Xaa is C or S

SEQ ID NO: 45899 - protein, 32 aa, Artificial Sequence
  Cyclic GFR-binding peptide
  MOD_RES (31), (31): Xaa is C or S
LSATSVLYYEIVRKKPIFLRKHRTLEDHLAXK

SEQ ID NO: 45900 - protein, 29 aa, Artificial Sequence
  Cyclic GFR-binding peptide
  MOD_RES (1), (1): Xaa is C or S
XVSQDLSPISILYKIGKTPKILKYHYMIV

SEQ ID NO: 45901 - protein, 27 aa, Artificial Sequence
  Cyclic GFR-binding peptide
QLSATSVLYYEIVRKKPIFLRKHRTLE

SEQ ID NO: 45902 - protein, 27 aa, Artificial Sequence
  Cyclic GFR-binding peptide
DLSATSILYYVGRTPKVLRKHRMVVKS

SEQ ID NO: 45903 - protein, 28 aa, Artificial Sequence
  Cyclic GFR-binding peptide
  MOD_RES (1), (1): Xaa is C or S
XAPTQLSPISVLYKDDSSNVILKYHYNM

SEQ ID NO: 45904 - protein, 35 aa, Artificial Sequence; identical to SEQ ID NO: 6897
  Cyclic GFR-binding peptide
  MOD_RES (3), (35): Xaa is C or S

SEQ ID NO: 45905 - protein, 26 aa, Artificial Sequence
  Cyclic GFR-binding peptide
LSPISVLYKEIVRKKPIFLKYHYTLE

SEQ ID NO: 45906 - protein, 40 aa, Artificial Sequence; identical to SEQ ID NO: 6898
  Cyclic GFR-binding peptide
  MOD_RES (6), (7), (39): Xaa is C or S

SEQ ID NO: 45907 - protein, 34 aa, Artificial Sequence; identical to SEQ ID NO: 6899
  Cyclic GFR-binding peptide
  MOD_RES (1), (2), (33): Xaa is C or S

SEQ ID NO: 45908 - protein, 27 aa, Artificial Sequence
  Cyclic GFR-binding peptide
PTQLSPISVLYKDDSSNVILKYHYNMV

SEQ ID NO: 45909 - protein, 31 aa, Artificial Sequence
  Cyclic GFR-binding peptide
  MOD_RES (1), (1): Xaa is C or S
XRPTQVQLSPISVLYKEIVRKKPIFLKYHYT

SEQ ID NO: 45910 - protein, 29 aa, Artificial Sequence
  Cyclic GFR-binding peptide
  MOD_RES (3), (4): Xaa is C or S
KAXXVPTKLSAISVLYLDDMGVPTLKNYQ

SEQ ID NO: 45911 - protein, 28 aa, Artificial Sequence
  Cyclic GFR-binding peptide
QDLSAISILYLIGKTPKILKNYQMIVKS

SEQ ID NO: 45912 - protein, 34 aa, Artificial Sequence
  Cyclic GFR-binding peptide
  MOD_RES (5), (6): Xaa is C or S
SASPXXVPQDLNAISILYFVGRTPKVLKKYRMVV

SEQ ID NO: 45913 - protein, 32 aa, Artificial Sequence
  Cyclic GFR-binding peptide
  MOD_RES (2), (3): Xaa is C or S
AXXVPTKLSATSVLYYDDMGVPTLRKHREGMS

SEQ ID NO: 45914 - protein, 33 aa, Artificial Sequence
  Cyclic GFR-binding peptide
  MOD_RES (30), (32): Xaa is C or S
TKLNAISVLYFDSSNNVILKKYRNMVVKAXGXH

SEQ ID NO: 45915 - protein, 40 aa, Artificial Sequence; identical to SEQ ID NO: 6904
  Cyclic GFR-binding peptide
  MOD_RES (5), (5): Xaa is C or S

SEQ ID NO: 45916 - protein, 26 aa, Artificial Sequence
  Cyclic GFR-binding peptide
  MOD_RES (26), (26): Xaa is C or S
SATSILYYVGRKPKVLRKHRMIVRSX

SEQ ID NO: 45917 - protein, 37 aa, Artificial Sequence; identical to SEQ ID NO: 6905
  Cyclic GFR-binding peptide
  MOD_RES (1), (1): Xaa is C or S

SEQ ID NO: 45918 - protein, 29 aa, Artificial Sequence
  Cyclic GFR-binding peptide
  MOD_RES (3), (4): Xaa is C or S
SPXXVSQDLSPISILYKIGKTPKILKYHY

SEQ ID NO: 45919 - protein, 22 aa, Artificial Sequence
  Cyclic GFR-binding peptide
SATSVLYYDDSSNVILRKHRNM

SEQ ID NO: 45920 - protein, 32 aa, Artificial Sequence
  Cyclic GFR-binding peptide
  MOD_RES (6), (7): Xaa is C or S
ASASPXXVPQDLSATSILYYVGRTPKVLRKHR

SEQ ID NO: 45921 - protein, 33 aa, Artificial Sequence
  Cyclic GFR-binding peptide
  MOD_RES (7), (7): Xaa is C or S
HVTKPTXAPTKLSAISVLYLDDSSNVILKNYQN

SEQ ID NO: 45922 - protein, 32 aa, Artificial Sequence
  Cyclic GFR-binding peptide
  MOD_RES (1), (1): Xaa is C or S
XRPTQVQLNAISVLYFEIVRKKPIFLKKYRTL

SEQ ID NO: 45923 - protein, 31 aa, Artificial Sequence; identical to SEQ ID NO: 6906
  Cyclic GFR-binding peptide
  MOD_RES (1), (1): Xaa is C or S

SEQ ID NO: 45924 - protein, 25 aa, Artificial Sequence
  Cyclic GFR-binding peptide
TKLSAISVLYLDDSSNVILKNYQNM

SEQ ID NO: 45925 - protein, 36 aa, Artificial Sequence; identical to SEQ ID NO: 6908
  Cyclic GFR-binding peptide
  MOD_RES (2), (3), (34), (36): Xaa is C or S

SEQ ID NO: 45926 - protein, 27 aa, Artificial Sequence
  Cyclic GFR-binding peptide
LSAISVLYLDDMGVPTLKNYQEGMSVA

SEQ ID NO: 45927 - protein, 37 aa, Artificial Sequence; identical to SEQ ID NO: 6909
  Cyclic GFR-binding peptide
  MOD_RES (3), (4), (36): Xaa is C or S

SEQ ID NO: 45928 - protein, 30 aa, Artificial Sequence
  Cyclic GFR-binding peptide
PTQVQLNAISVLYFEIVRKKPIFLKKYRTL

SEQ ID NO: 45929 - protein, 35 aa, Artificial Sequence
  Cyclic GFR-binding peptide
  MOD_RES (5), (6): Xaa is C or S
VPKPXXAPTQLSPISVLYKDDSSNVILKYHYNMVV

SEQ ID NO: 45930 - protein, 39 aa, Artificial Sequence; identical to SEQ ID NO: 6911
  Cyclic GFR-binding peptide
  MOD_RES (1), (38): Xaa is C or S

SEQ ID NO: 45931 - protein, 30 aa, Artificial Sequence
  Cyclic GFR-binding peptide
  MOD_RES (28), (30): Xaa is C or S
LSPISVLYKDDSSNVILKYHYNMVVRSXGX

SEQ ID NO: 45932 - protein, 34 aa, Artificial Sequence; identical to SEQ ID NO: 6915
  Cyclic GFR-binding peptide
  MOD_RES (3), (4): Xaa is C or S

SEQ ID NO: 45933 - protein, 36 aa, Artificial Sequence
  Cyclic GFR-binding peptide
  MOD_RES (6), (7): Xaa is C or S
ASASPXXVSQDLNAISILYFIGKTPKILKKYRMIVK

SEQ ID NO: 45934 - protein, 30 aa, Artificial Sequence
  Cyclic GFR-binding peptide
  MOD_RES (2), (3): Xaa is C or S
AXXAPTKLSAISVLYLDSSNNVILKNYQNM

SEQ ID NO: 45935 - protein, 32 aa, Artificial Sequence
  Cyclic GFR-binding peptide
  MOD_RES (31), (31): Xaa is C or S
PTKLSPISVLYKDDSSNVILKYHYNMVVRSXG

SEQ ID NO: 45936 - protein, 25 aa, Artificial Sequence
  Cyclic GFR-binding peptide
VPQDLSAISILYLVGRTPKVLKNYQ

SEQ ID NO: 45937 - protein, 33 aa, Artificial Sequence
  Cyclic GFR-binding peptide
  MOD_RES (32), (32): Xaa is C or S
PTKLSATSVLYYDDMGVPTLRKHREGMSVAEXG

SEQ ID NO: 45938 - protein, 33 aa, Artificial Sequence
  Cyclic GFR-binding peptide
  MOD_RES (6), (7): Xaa is C or S
TVPKPXXAPTQLSATSVLYYDDSSNVILRKHRN

SEQ ID NO: 45939 - protein, 28 aa, Artificial Sequence
  Cyclic GFR-binding peptide
  MOD_RES (28), (28): Xaa is C or S
LSATSVLYYDDSSNVILRKHRNMVVRAX

SEQ ID NO: 45940 - protein, 31 aa, Artificial Sequence
  Cyclic GFR-binding peptide
  MOD_RES (2), (3): Xaa is C or S
AXXAPTKLNAISVLYFDSSNNVILKKYRNMV

SEQ ID NO: 45941 - protein, 32 aa, Artificial Sequence
  Cyclic GFR-binding peptide
  MOD_RES (6), (7): Xaa is C or S
ASASPXXVSQDLNAISILYFIGKTPKILKKYR

SEQ ID NO: 45942 - protein, 38 aa, Artificial Sequence; identical to SEQ ID NO: 6920
  Cyclic GFR-binding peptide
  MOD_RES (3), (4), (36), (38): Xaa is C or S

SEQ ID NO: 45943 - protein, 33 aa, Artificial Sequence; identical to SEQ ID NO: 6921
  Cyclic GFR-binding peptide
  MOD_RES (1), (32): Xaa is C or S

SEQ ID NO: 45944 - protein, 28 aa, Artificial Sequence
  Cyclic GFR-binding peptide
PTELSATSMLYYDEYDKVVLRKHREMVV

SEQ ID NO: 45945 - protein, 25 aa, Artificial Sequence
  Cyclic GFR-binding peptide
VPQALNAISILYFVGRKPKVLKKYR

SEQ ID NO: 45946 - protein, 39 aa, Artificial Sequence; identical to SEQ ID NO: 6922
  Cyclic GFR-binding peptide
  MOD_RES (4), (5), (37), (39): Xaa is C or S

SEQ ID NO: 45947 - protein, 37 aa, Artificial Sequence; identical to SEQ ID NO: 6923
  Cyclic GFR-binding peptide
  MOD_RES (37), (37): Xaa is C or S

SEQ ID NO: 45948 - protein, 31 aa, Artificial Sequence
  Cyclic GFR-binding peptide
  MOD_RES (4), (5): Xaa is C or S
GKAXXVPTKLNAISVLYFDDMGVPTLKKYRE

SEQ ID NO: 45949 - protein, 33 aa, Artificial Sequence
  Cyclic GFR-binding peptide
  MOD_RES (31), (33): Xaa is C or S
PTKLSATSVLYYDDSSNVILRKHRNMVVRSXGX

SEQ ID NO: 45950 - protein, 26 aa, Artificial Sequence
  Cyclic GFR-binding peptide
NAISMLYFDEYDKVVLKKYREMVVEG

SEQ ID NO: 45951 - protein, 35 aa, Artificial Sequence; identical to SEQ ID NO: 6925
  Cyclic GFR-binding peptide
  MOD_RES (35), (35): Xaa is C or S

SEQ ID NO: 45952 - protein, 28 aa, Artificial Sequence
  Cyclic GFR-binding peptide
  MOD_RES (2), (3): Xaa is C or S
AXXVPTELSATSMLYYDEYDKVVLRKHR

SEQ ID NO: 45953 - protein, 31 aa, Artificial Sequence
  Cyclic GFR-binding peptide
SAISVLYLEIVRKKPIFLKNYQEIVRKKPIF

SEQ ID NO: 45954 - protein, 29 aa, Artificial Sequence
  Cyclic GFR-binding peptide
APTKLNAISVLYFDSSNNVILKKYRNMVV

SEQ ID NO: 45955 - protein, 30 aa, Artificial Sequence
  Cyclic GFR-binding peptide
  MOD_RES (28), (30): Xaa is C or S
ALSPISILYKVGRKPKVLKYHYMIVRSXKX

SEQ ID NO: 45956 - protein, 25 aa, Artificial Sequence
  Cyclic GFR-binding peptide
VSQDLNAISILYFIGKTPKILKKYR

SEQ ID NO: 45957 - protein, 31 aa, Artificial Sequence
  Cyclic GFR-binding peptide
  MOD_RES (5), (6): Xaa is C or S
IPKAXXVPTELNAISMLYFDENEKVVLKKYR

SEQ ID NO: 45958 - protein, 26 aa, Artificial Sequence
  Cyclic GFR-binding peptide
TKLSPISVLYKDSSNNVILKYHYNMV

SEQ ID NO: 45959 - protein, 39 aa, Artificial Sequence; identical to SEQ ID NO: 6928
  Cyclic GFR-binding peptide
  MOD_RES (4), (4): Xaa is C or S

SEQ ID NO: 45960 - protein, 30 aa, Artificial Sequence
  Cyclic GFR-binding peptide
  MOD_RES (29), (29): Xaa is C or S
KLSAISVLYLDDSSNVILKNYQNMVVRSXG

SEQ ID NO: 45961 - protein, 37 aa, Artificial Sequence; identical to SEQ ID NO: 6929
  Cyclic GFR-binding peptide
  MOD_RES (3), (4), (37): Xaa is C or S

SEQ ID NO: 45962 - protein, 24 aa, Artificial Sequence
  Cyclic GFR-binding peptide
SATSVLYYDDMGVPTLRKHREGMS

SEQ ID NO: 45963 - protein, 29 aa, Artificial Sequence
  Cyclic GFR-binding peptide
VQLSATSVLYYEIVRKKPIFLRKHRTLED

SEQ ID NO: 45964 - protein, 28 aa, Artificial Sequence
  Cyclic GFR-binding peptide
  MOD_RES (1), (1): Xaa is C or S
XVPTKLSATSVLYYDDMGVPTLRKHREG

SEQ ID NO: 45965 - protein, 23 aa, Artificial Sequence
  Cyclic GFR-binding peptide
QLSATSVLYYDDSSNVILRKHRN

SEQ ID NO: 45966 - protein, 36 aa, Artificial Sequence; identical to SEQ ID NO: 6930
  Cyclic GFR-binding peptide
  MOD_RES (2), (2): Xaa is C or S

SEQ ID NO: 45967 - protein, 23 aa, Artificial Sequence
  Cyclic GFR-binding peptide
KLSPISVLYKDSSNNVILKYHYN

SEQ ID NO: 45968 - protein, 36 aa, Artificial Sequence; identical to SEQ ID NO: 6931
  Cyclic GFR-binding peptide
  MOD_RES (5), (6): Xaa is C or S

SEQ ID NO: 45969 - protein, 28 aa, Artificial Sequence
  Cyclic GFR-binding peptide
VPTELSPISMLYKDEYDKVVLKYHYEMV

SEQ ID NO: 45970 - protein, 28 aa, Artificial Sequence
  Cyclic GFR-binding peptide
  MOD_RES (1), (1): Xaa is C or S
XVPTELNAISMLYFDEYDKVVLKKYREM

SEQ ID NO: 45971 - protein, 39 aa, Artificial Sequence; identical to SEQ ID NO: 6932
  Cyclic GFR-binding peptide
  MOD_RES (4), (5), (37), (39): Xaa is C or S

SEQ ID NO: 45972 - protein, 23 aa, Artificial Sequence
  Cyclic GFR-binding peptide
SATSILYYVGRKPKVLRKHRMIV

SEQ ID NO: 45973 - protein, 29 aa, Artificial Sequence
  Cyclic GFR-binding peptide
NAISVLYFDDMGVPTLKKYRAAAAAAAAA

SEQ ID NO: 45974 - protein, 38 aa, Artificial Sequence; identical to SEQ ID NO: 6934
  Cyclic GFR-binding peptide
  MOD_RES (3), (4), (36), (38): Xaa is C or S

SEQ ID NO: 45975 - protein, 32 aa, Artificial Sequence
  Cyclic GFR-binding peptide
  MOD_RES (3), (4): Xaa is C or S
SPXXVPQDLNAISILYFVGRTPKVLKKYRMVV

SEQ ID NO: 45976 - protein, 38 aa, Artificial Sequence; identical to SEQ ID NO: 6936
  Cyclic GFR-binding peptide
  MOD_RES (4), (5), (36), (38): Xaa is C or S

SEQ ID NO: 45977 - protein, 26 aa, Artificial Sequence
  Cyclic GFR-binding peptide
APTKLNAISVLYFDSSNNVILKKYRN

SEQ ID NO: 45978 - protein, 26 aa, Artificial Sequence
  Cyclic GFR-binding peptide
TKLSATSVLYYDDSSNVILRKHRNMV

SEQ ID NO: 45979 - protein, 23 aa, Artificial Sequence
  Cyclic GFR-binding peptide
ELSATSMLYYDEYDKVVLRKHRE

SEQ ID NO: 45980 - protein, 37 aa, Artificial Sequence; identical to SEQ ID NO: 6939
  Cyclic GFR-binding peptide
  MOD_RES (2), (3), (34), (36): Xaa is C or S

SEQ ID NO: 45981 - protein, 27 aa, Artificial Sequence
  Cyclic GFR-binding peptide
TQVQLSAISVLYLEIVRKKPIFLKNYQ

SEQ ID NO: 45982 - protein, 40 aa, Artificial Sequence; identical to SEQ ID NO: 6943
  Cyclic GFR-binding peptide
  MOD_RES (5), (6), (38), (40): Xaa is C or S

SEQ ID NO: 45983 - protein, 42 aa, Artificial Sequence; identical to SEQ ID NO: 6944
  Cyclic GFR-binding peptide
  MOD_RES (6), (7), (39), (41): Xaa is C or S

SEQ ID NO: 45984 - protein, 26 aa, Artificial Sequence
  Cyclic GFR-binding peptide
VPQDLSATSILYYVGRTPKVLRKHRM

SEQ ID NO: 45985 - protein, 37 aa, Artificial Sequence; identical to SEQ ID NO: 6946
  Cyclic GFR-binding peptide
  MOD_RES (5), (6): Xaa is C or S

SEQ ID NO: 45986 - protein, 34 aa, Artificial Sequence; identical to SEQ ID NO: 6945
  Cyclic GFR-binding peptide
  MOD_RES (32), (34): Xaa is C or S

SEQ ID NO: 45987 - protein, 28 aa, Artificial Sequence
  Cyclic GFR-binding peptide
APTQLSAISVLYLDDSSNVILKNYQNMV

SEQ ID NO: 45988 - protein, 34 aa, Artificial Sequence
  Cyclic GFR-binding peptide
  MOD_RES (5), (6): Xaa is C or S
IPKAXXVPTELSATSMLYYDEYDKVVLRKHREMV

SEQ ID NO: 45989 - protein, 30 aa, Artificial Sequence
  Cyclic GFR-binding peptide
  MOD_RES (29), (29): Xaa is C or S
KLNAISVLYFDSSNNVILKKYRNMVVKAXG

SEQ ID NO: 45990 - protein, 28 aa, Artificial Sequence
  Cyclic GFR-binding peptide
QLSATSVLYYEIVRKKPIFLRKHRTLED

SEQ ID NO: 45991 - protein, 30 aa, Artificial Sequence
  Cyclic GFR-binding peptide
  MOD_RES (1), (1): Xaa is C or S
XVPTKLSAISVLYLDDMGVPTLKNYQEGMS

SEQ ID NO: 45992 - protein, 36 aa, Artificial Sequence; identical to SEQ ID NO: 6947
  Cyclic GFR-binding peptide
  MOD_RES (2), (3), (35): Xaa is C or S

SEQ ID NO: 45993 - protein, 27 aa, Artificial Sequence
  Cyclic GFR-binding peptide
VPTKLNAISVLYFDDMGVPTLKKYREG

SEQ ID NO: 45994 - protein, 37 aa, Artificial Sequence; identical to SEQ ID NO: 6949
  Cyclic GFR-binding peptide
  MOD_RES (2), (3), (34), (36): Xaa is C or S

SEQ ID NO: 45995 - protein, 34 aa, Artificial Sequence
  Cyclic GFR-binding peptide
  MOD_RES (4), (5): Xaa is C or S
PKAXXAPTKLNAISVLYFDSSNNVILKKYRNMVV

SEQ ID NO: 45996 - protein, 36 aa, Artificial Sequence; identical to SEQ ID NO: 6950
  Cyclic GFR-binding peptide
  MOD_RES (5), (6): Xaa is C or S

SEQ ID NO: 45997 - protein, 31 aa, Artificial Sequence
  Cyclic GFR-binding peptide
  MOD_RES (3), (4): Xaa is C or S
KAXXVPTKLSATSVLYYDDMGVPTLRKHREG

SEQ ID NO: 45998 - protein, 29 aa, Artificial Sequence
  Cyclic GFR-binding peptide
SQDLSPISILYKIGKTPKILKYHYMIVKS

SEQ ID NO: 45999 - protein, 31 aa, Artificial Sequence
  Cyclic GFR-binding peptide
  MOD_RES (3), (4): Xaa is C or S
SPXXVPQDLSPISILYKVGRTPKVLKYHYMV

SEQ ID NO: 46000 - protein, 33 aa, Artificial Sequence
  Cyclic GFR-binding peptide
  MOD_RES (31), (33): Xaa is C or S
PTQLSATSVLYYDDSSNVILRKHRNMVVRAXGX

SEQ ID NO: 46001 - protein, 29 aa, Artificial Sequence
  Cyclic GFR-binding peptide
NAISILYFVGRKPKVLKKYRAAAAAAAAA

SEQ ID NO: 46002 - protein, 34 aa, Artificial Sequence; identical to SEQ ID NO: 6951
  Cyclic GFR-binding peptide
  MOD_RES (1), (2), (34): Xaa is C or S

SEQ ID NO: 46003 - protein, 35 aa, Artificial Sequence
  Cyclic GFR-binding peptide
  MOD_RES (6), (7): Xaa is C or S
KVGKAXXVPTKLNAISVLYFDDMGVPTLKKYREGM

SEQ ID NO: 46004 - protein, 32 aa, Artificial Sequence
  Cyclic GFR-binding peptide
  MOD_RES (31), (31): Xaa is C or S
LSAISVLYLEIVRKKPIFLKNYQTLEDHLAXK

SEQ ID NO: 46005 - protein, 32 aa, Artificial Sequence; identical to SEQ ID NO: 6952
  Cyclic GFR-binding peptide
  MOD_RES (32), (32): Xaa is C or S

SEQ ID NO: 46006 - protein, 32 aa, Artificial Sequence
  Cyclic GFR-binding peptide
  MOD_RES (29), (31): Xaa is C or S
QALSAISILYLVGRKPKVLKNYQMIVRSXKXS

SEQ ID NO: 46007 - protein, 35 aa, Artificial Sequence; identical to SEQ ID NO: 6956
  Cyclic GFR-binding peptide
  MOD_RES (4), (5): Xaa is C or S

SEQ ID NO: 46008 - protein, 33 aa, Artificial Sequence; identical to SEQ ID NO: 6959
  Cyclic GFR-binding peptide
  MOD_RES (2), (3): Xaa is C or S

SEQ ID NO: 46009 - protein, 40 aa, Artificial Sequence; identical to SEQ ID NO: 6960
  Cyclic GFR-binding peptide
  MOD_RES (5), (6), (39): Xaa is C or S

SEQ ID NO: 46010 - protein, 24 aa, Artificial Sequence
  Cyclic GFR-binding peptide
LSAISVLYLDDSSNVILKNYQNMV

SEQ ID NO: 46011 - protein, 35 aa, Artificial Sequence; identical to SEQ ID NO: 6962
  Cyclic GFR-binding peptide
  MOD_RES (1), (2), (35): Xaa is C or S

SEQ ID NO: 46012 - protein, 34 aa, Artificial Sequence; identical to SEQ ID NO: 6965
  Cyclic GFR-binding peptide
  MOD_RES (1), (2), (33): Xaa is C or S

SEQ ID NO: 46013 - protein, 33 aa, Artificial Sequence
  Cyclic GFR-binding peptide
  MOD_RES (32), (32): Xaa is C or S
QLSAISVLYLEIVRKKPIFLKNYQTLEDHLAXK

SEQ ID NO: 46014 - protein, 33 aa, Artificial Sequence
  Cyclic GFR-binding peptide
  MOD_RES (30), (32): Xaa is C or S
SAISVLYLEIVRKKPIFLKNYQTLEDHLAXKXE

SEQ ID NO: 46015 - protein, 37 aa, Artificial Sequence; identical to SEQ ID NO: 6967
  Cyclic GFR-binding peptide
  MOD_RES (2), (34), (36): Xaa is C or S

SEQ ID NO: 46016 - protein, 36 aa, Artificial Sequence; identical to SEQ ID NO: 6968
  Cyclic GFR-binding peptide
  MOD_RES (5), (6): Xaa is C or S

SEQ ID NO: 46017 - protein, 32 aa, Artificial Sequence
  Cyclic GFR-binding peptide
  MOD_RES (31), (31): Xaa is C or S
PTQLSPISVLYKDDSSNVILKYHYNMVVRAXG

SEQ ID NO: 46018 - protein, 28 aa, Artificial Sequence
  Cyclic GFR-binding peptide
VSQDLSPISILYKIGKTPKILKYHYMIV

SEQ ID NO: 46019 - protein, 29 aa, Artificial Sequence
  Cyclic GFR-binding peptide
  MOD_RES (1), (2): Xaa is C or S
XXVPTELSPISMLYKDENEKVVLKYHYDM

SEQ ID NO: 46020 - protein, 28 aa, Artificial Sequence
  Cyclic GFR-binding peptide
  MOD_RES (28), (28): Xaa is C or S
DLSPISILYKVGRTPKVLKYHYMVVKSX

SEQ ID NO: 46021 - protein, 27 aa, Artificial Sequence
  Cyclic GFR-binding peptide
  MOD_RES (26), (26): Xaa is C or S
SAISILYLVGRTPKVLKNYQMVVKSXK

SEQ ID NO: 46022 - protein, 28 aa, Artificial Sequence
  Cyclic GFR-binding peptide
  MOD_RES (27), (27): Xaa is C or S
SATSMLYYDEYDKVVLRKHREMVVEGXG

SEQ ID NO: 46023 - protein, 24 aa, Artificial Sequence
  Cyclic GFR-binding peptide
QLSPISVLYKDDSSNVILKYHYNM

SEQ ID NO: 46024 - protein, 35 aa, Artificial Sequence; identical to SEQ ID NO: 6971
  Cyclic GFR-binding peptide
  MOD_RES (2), (3), (35): Xaa is C or S

SEQ ID NO: 46025 - protein, 27 aa, Artificial Sequence
  Cyclic GFR-binding peptide
TQLSAISVLYLDDSSNVILKNYQNMVV

SEQ ID NO: 46026 - protein, 31 aa, Artificial Sequence
  Cyclic GFR-binding peptide
  MOD_RES (5), (6): Xaa is C or S
SAAPXXVPQALSPISILYKVGRKPKVLKYHY

SEQ ID NO: 46027 - protein, 35 aa, Artificial Sequence; identical to SEQ ID NO: 6973
  Cyclic GFR-binding peptide
  MOD_RES (2), (3), (35): Xaa is C or S

SEQ ID NO: 46028 - protein, 29 aa, Artificial Sequence
  Cyclic GFR-binding peptide
APTKLSPISVLYKDSSNNVILKYHYNMVV

SEQ ID NO: 46029 - protein, 23 aa, Artificial Sequence
  Cyclic GFR-binding peptide
NAISVLYFDDMGVPTLKKYREGM

SEQ ID NO: 46030 - protein, 35 aa, Artificial Sequence; identical to SEQ ID NO: 6974
  Cyclic GFR-binding peptide
  MOD_RES (1), (2), (33), (35): Xaa is C or S

SEQ ID NO: 46031 - protein, 29 aa, Artificial Sequence
  Cyclic GFR-binding peptide
SQDLSAISILYLIGKTPKILKNYQMIVKS

SEQ ID NO: 46032 - protein, 27 aa, Artificial Sequence
  Cyclic GFR-binding peptide
PQALSATSILYYVGRKPKVLRKHRMIV

SEQ ID NO: 46033 - protein, 32 aa, Artificial Sequence
  Cyclic GFR-binding peptide
  MOD_RES (32), (32): Xaa is C or S
QLNAISVLYFEIVRKKPIFLKKYRTLEDHLAX

SEQ ID NO: 46034 - protein, 32 aa, Artificial Sequence; identical to SEQ ID NO: 6977
  Cyclic GFR-binding peptide
  MOD_RES (1), (2): Xaa is C or S

SEQ ID NO: 46035 - protein, 43 aa, Artificial Sequence; identical to SEQ ID NO: 6980
  Cyclic GFR-binding peptide
  MOD_RES (4), (41), (43): Xaa is C or S

SEQ ID NO: 46036 - protein, 33 aa, Artificial Sequence; identical to SEQ ID NO: 6981
  Cyclic GFR-binding peptide
  MOD_RES (1), (2), (33): Xaa is C or S

SEQ ID NO: 46037 - protein, 27 aa, Artificial Sequence
  Cyclic GFR-binding peptide
LNAISVLYFDDMGVPTLKKYREGMSVA

SEQ ID NO: 46038 - protein, 38 aa, Artificial Sequence; identical to SEQ ID NO: 6982
  Cyclic GFR-binding peptide
  MOD_RES (6), (38): Xaa is C or S

SEQ ID NO: 46039 - protein, 20 aa, Artificial Sequence
  Cyclic GFR-binding peptide
NAISVLYFDSSNNVILKKYR

SEQ ID NO: 46040 - protein, 35 aa, Artificial Sequence; identical to SEQ ID NO: 6984
  Cyclic GFR-binding peptide
  MOD_RES (1), (2), (33), (35): Xaa is C or S

SEQ ID NO: 46041 - protein, 27 aa, Artificial Sequence
  Cyclic GFR-binding peptide
APTQLSPISVLYKDDSSNVILKYHYNM

SEQ ID NO: 46042 - protein, 30 aa, Artificial Sequence
  Cyclic GFR-binding peptide
  MOD_RES (3), (4): Xaa is C or S
KAXXVPTELSPISMLYKDENEKVVLKYHYD

SEQ ID NO: 46043 - protein, 25 aa, Artificial Sequence
  Cyclic GFR-binding peptide
DLNAISILYFVGRTPKVLKKYRMVV

SEQ ID NO: 46044 - protein, 32 aa, Artificial Sequence
  Cyclic GFR-binding peptide
  MOD_RES (6), (7): Xaa is C or S
AVPKAXXAPTKLSAISVLYLDSSNNVILKNYQ

SEQ ID NO: 46045 - protein, 25 aa, Artificial Sequence
  Cyclic GFR-binding peptide
SQDLSPISILYKIGKTPKILKYHYM

SEQ ID NO: 46046 - protein, 27 aa, Artificial Sequence
  Cyclic GFR-binding peptide
TELSPISMLYKDEYDKVVLKYHYEMVV

SEQ ID NO: 46047 - protein, 44 aa, Artificial Sequence; identical to SEQ ID NO: 6986
  Cyclic GFR-binding peptide
  MOD_RES (5), (42), (44): Xaa is C or S

SEQ ID NO: 46048 - protein, 27 aa, Artificial Sequence
  Cyclic GFR-binding peptide
TQVQLSATSVLYYEIVRKKPIFLRKHR

SEQ ID NO: 46049 - protein, 23 aa, Artificial Sequence
  Cyclic GFR-binding peptide
LNAISVLYFDSSNNVILKKYRNM

SEQ ID NO: 46050 - protein, 30 aa, Artificial Sequence
  Cyclic GFR-binding peptide
  MOD_RES (28), (30): Xaa is C or S
ALSATSILYYVGRKPKVLRKHRMIVRSXKX

SEQ ID NO: 46051 - protein, 27 aa, Artificial Sequence
  Cyclic GFR-binding peptide
  MOD_RES (27), (27): Xaa is C or S
SPISVLYKDDSSNVILKYHYNMVVRAX

SEQ ID NO: 46052 - protein, 33 aa, Artificial Sequence
  Cyclic GFR-binding peptide
  MOD_RES (1), (2): Xaa is C or S
XXVPTKLSATSVLYYDDMGVPTLRKHREGMSVA

SEQ ID NO: 46053 - protein, 24 aa, Artificial Sequence
  Cyclic GFR-binding peptide
LSAISILYLVGRKPKVLKNYQMIV

SEQ ID NO: 46054 - protein, 41 aa, Artificial Sequence; identical to SEQ ID NO: 6988
  Cyclic GFR-binding peptide
  MOD_RES (7), (39), (41): Xaa is C or S

SEQ ID NO: 46055 - protein, 34 aa, Artificial Sequence; identical to SEQ ID NO: 6990
  Cyclic GFR-binding peptide
  MOD_RES (32), (34): Xaa is C or S

SEQ ID NO: 46056 - protein, 22 aa, Artificial Sequence
  Cyclic GFR-binding peptide
DLSAISILYLVGRTPKVLKNYQ

SEQ ID NO: 46057 - protein, 28 aa, Artificial Sequence
  Cyclic GFR-binding peptide
SQDLSPISILYKIGKTPKILKYHYMIVK

SEQ ID NO: 46058 - protein, 34 aa, Artificial Sequence; identical to SEQ ID NO: 6992
  Cyclic GFR-binding peptide
  MOD_RES (3), (4): Xaa is C or S

SEQ ID NO: 46059 - protein, 38 aa, Artificial Sequence; identical to SEQ ID NO: 6993
  Cyclic GFR-binding peptide
  MOD_RES (37), (37): Xaa is C or S

SEQ ID NO: 46060 - protein, 39 aa, Artificial Sequence; identical to SEQ ID NO: 6994
  Cyclic GFR-binding peptide
  MOD_RES (3), (4), (36), (38): Xaa is C or S

SEQ ID NO: 46061 - protein, 25 aa, Artificial Sequence
  Cyclic GFR-binding peptide
VPTKLSAISVLYLDDMGVPTLKNYQ

SEQ ID NO: 46062 - protein, 28 aa, Artificial Sequence
  Cyclic GFR-binding peptide
QVQLNAISVLYFEIVRKKPIFLKKYRTL

SEQ ID NO: 46063 - protein, 27 aa, Artificial Sequence
  Cyclic GFR-binding peptide
LSAISVLYLDDSSNVILKNYQNMVVRS

SEQ ID NO: 46064 - protein, 28 aa, Artificial Sequence
  Cyclic GFR-binding peptide
  MOD_RES (1), (1): Xaa is C or S
XAPTKLSPISVLYKDDSSNVILKYHYNM

SEQ ID NO: 46065 - protein, 41 aa, Artificial Sequence; identical to SEQ ID NO: 6997
  Cyclic GFR-binding peptide
  MOD_RES (6), (7), (39), (41): Xaa is C or S

SEQ ID NO: 46066 - protein, 28 aa, Artificial Sequence
  Cyclic GFR-binding peptide
QALSPISILYKVGRKPKVLKYHYMIVRS

SEQ ID NO: 46067 - protein, 26 aa, Artificial Sequence
  Cyclic GFR-binding peptide
APTKLSPISVLYKDDSSNVILKYHYN

SEQ ID NO: 46068 - protein, 26 aa, Artificial Sequence
  Cyclic GFR-binding peptide
  MOD_RES (1), (1): Xaa is C or S
XVPTELSATSMLYYDEYDKVVLRKHR

SEQ ID NO: 46069 - protein, 37 aa, Artificial Sequence; identical to SEQ ID NO: 6999
  Cyclic GFR-binding peptide
  MOD_RES (1), (1): Xaa is C or S

SEQ ID NO: 46070 - protein, 39 aa, Artificial Sequence; identical to SEQ ID NO: 7002
  Cyclic GFR-binding peptide
  MOD_RES (4), (4): Xaa is C or S

SEQ ID NO: 46071 - protein, 37 aa, Artificial Sequence; identical to SEQ ID NO: 7001
  Cyclic GFR-binding peptide
  MOD_RES (3), (4), (36): Xaa is C or S

SEQ ID NO: 46072 - protein, 27 aa, Artificial Sequence
  Cyclic GFR-binding peptide
LSAISVLYLDDSSNVILKNYQNMVVRA

SEQ ID NO: 46073 - protein, 25 aa, Artificial Sequence
  Cyclic GFR-binding peptide
VPQDLSATSILYYVGRTPKVLRKHR

SEQ ID NO: 46074 - protein, 33 aa, Artificial Sequence
  Cyclic GFR-binding peptide
  MOD_RES (5), (6): Xaa is C or S
IPKAXXVPTELNAISMLYFDENEKVVLKKYRDM

SEQ ID NO: 46075 - protein, 26 aa, Artificial Sequence
  Cyclic GFR-binding peptide
PTELSPISMLYKDEYDKVVLKYHYEM

SEQ ID NO: 46076 - protein, 34 aa, Artificial Sequence
  Cyclic GFR-binding peptide
  MOD_RES (6), (7): Xaa is C or S
AVPKAXXAPTKLNAISVLYFDSSNNVILKKYRNM

SEQ ID NO: 46077 - protein, 26 aa, Artificial Sequence
  Cyclic GFR-binding peptide
  MOD_RES (26), (26): Xaa is C or S
SAISILYLVGRTPKVLKNYQMVVKSX

SEQ ID NO: 46078 - protein, 31 aa, Artificial Sequence
  Cyclic GFR-binding peptide
  MOD_RES (4), (4): Xaa is C or S
KPTXAPTKLSAISVLYLDDSSNVILKNYQNM

SEQ ID NO: 46079 - protein, 33 aa, Artificial Sequence
  Cyclic GFR-binding peptide
  MOD_RES (6), (7): Xaa is C or S
KIPKAXXVPTELSPISMLYKDENEKVVLKYHYD

SEQ ID NO: 46080 - protein, 26 aa, Artificial Sequence
  Cyclic GFR-binding peptide
VPTELSATSMLYYDEYDKVVLRKHRE

SEQ ID NO: 46081 - protein, 29 aa, Artificial Sequence
  Cyclic GFR-binding peptide
  MOD_RES (26), (28): Xaa is C or S
NAISILYFIGKTPKILKKYRMIVKSXKXS

SEQ ID NO: 46082 - protein, 23 aa, Artificial Sequence
  Cyclic GFR-binding peptide
LSPISMLYKDEYDKVVLKYHYEM

SEQ ID NO: 46083 - protein, 34 aa, Artificial Sequence; identical to SEQ ID NO: 7011
  Cyclic GFR-binding peptide
  MOD_RES (3), (4): Xaa is C or S

SEQ ID NO: 46084 - protein, 42 aa, Artificial Sequence; identical to SEQ ID NO: 7012
  Cyclic GFR-binding peptide
  MOD_RES (3), (40), (42): Xaa is C or S

SEQ ID NO: 46085 - protein, 30 aa, Artificial Sequence
  Cyclic GFR-binding peptide
  MOD_RES (1), (2): Xaa is C or S
XXVPQDLSATSILYYVGRTPKVLRKHRMVV

SEQ ID NO: 46086 - protein, 36 aa, Artificial Sequence; identical to SEQ ID NO: 7013
  Cyclic GFR-binding peptide
  MOD_RES (2), (3), (34), (36): Xaa is C or S

SEQ ID NO: 46087 - protein, 34 aa, Artificial Sequence; identical to SEQ ID NO: 7014
  Cyclic GFR-binding peptide
  MOD_RES (32), (34): Xaa is C or S

SEQ ID NO: 46088 - protein, 29 aa, Artificial Sequence
  Cyclic GFR-binding peptide
QVQLSATSVLYYEIVRKKPIFLRKHRTLE

SEQ ID NO: 46089 - protein, 26 aa, Artificial Sequence
  Cyclic GFR-binding peptide
  MOD_RES (1), (1): Xaa is C or S
XVPTELSPISMLYKDEYDKVVLKYHY

SEQ ID NO: 46090 - protein, 29 aa, Artificial Sequence
  Cyclic GFR-binding peptide
TKLNAISVLYFDDMGVPTLKKYREGMSVA

SEQ ID NO: 46091 - protein, 32 aa, Artificial Sequence; identical to SEQ ID NO: 7021
  Cyclic GFR-binding peptide
  MOD_RES (1), (1): Xaa is C or S

SEQ ID NO: 46092 - protein, 31 aa, Artificial Sequence
  Cyclic GFR-binding peptide
  MOD_RES (2), (3): Xaa is C or S
PXXVSQDLNAISILYFIGKTPKILKKYRMIV

SEQ ID NO: 46093 - protein, 23 aa, Artificial Sequence
  Cyclic GFR-binding peptide
ELNAISMLYFDENEKVVLKKYRD

SEQ ID NO: 46094 - protein, 33 aa, Artificial Sequence; identical to SEQ ID NO: 7023
  Cyclic GFR-binding peptide
  MOD_RES (2), (3): Xaa is C or S

SEQ ID NO: 46095 - protein, 25 aa, Artificial Sequence
  Cyclic GFR-binding peptide
ALSAISILYLVGRKPKVLKNYQMIV

SEQ ID NO: 46096 - protein, 30 aa, Artificial Sequence
  Cyclic GFR-binding peptide
  MOD_RES (4), (5): Xaa is C or S
GKAXXVPTKLSAISVLYLDDMGVPTLKNYQ

SEQ ID NO: 46097 - protein, 33 aa, Artificial Sequence
  Cyclic GFR-binding peptide
  MOD_RES (30), (32): Xaa is C or S
PQDLSAISILYLVGRTPKVLKNYQMVVKSXKXS

SEQ ID NO: 46098 - protein, 38 aa, Artificial Sequence; identical to SEQ ID NO: 7025
  Cyclic GFR-binding peptide
  MOD_RES (3), (4), (35), (37): Xaa is C or S

SEQ ID NO: 46099 - protein, 30 aa, Artificial Sequence
  Cyclic GFR-binding peptide
  MOD_RES (2), (3): Xaa is C or S
PXXVPQDLSPISILYKVGRTPKVLKYHYMV

SEQ ID NO: 46100 - protein, 36 aa, Artificial Sequence; identical to SEQ ID NO: 7026
  Cyclic GFR-binding peptide
  MOD_RES (36), (36): Xaa is C or S

SEQ ID NO: 46101 - protein, 26 aa, Artificial Sequence
  Cyclic GFR-binding peptide
  MOD_RES (26), (26): Xaa is C or S
SPISILYKVGRKPKVLKYHYMIVRSX

SEQ ID NO: 46102 - protein, 39 aa, Artificial Sequence; identical to SEQ ID NO: 7027
  Cyclic GFR-binding peptide
  MOD_RES (2), (3), (36), (38): Xaa is C or S

SEQ ID NO: 46103 - protein, 30 aa, Artificial Sequence
  Cyclic GFR-binding peptide
  MOD_RES (30), (30): Xaa is C or S
TKLSAISVLYLDDSSNVILKNYQNMVVRSX

SEQ ID NO: 46104 - protein, 32 aa, Artificial Sequence
  Cyclic GFR-binding peptide
  MOD_RES (2), (3): Xaa is C or S
PXXVPQALSPISILYKVGRKPKVLKYHYMIVR

SEQ ID NO: 46105 - protein, 32 aa, Artificial Sequence; identical to SEQ ID NO: 7028
  Cyclic GFR-binding peptide
  MOD_RES (1), (1): Xaa is C or S

SEQ ID NO: 46106 - protein, 32 aa, Artificial Sequence
  Cyclic GFR-binding peptide
  MOD_RES (3), (4): Xaa is C or S
KPXXAPTKLSAISVLYLDDSSNVILKNYQNMV

SEQ ID NO: 46107 - protein, 37 aa, Artificial Sequence
  Cyclic GFR-binding peptide
  MOD_RES (5), (5): Xaa is C or S
RNVQXRPTQVQLSPISVLYKEIVRKKPIFLKYHYTLE

SEQ ID NO: 46108 - protein, 28 aa, Artificial Sequence
  Cyclic GFR-binding peptide
  MOD_RES (26), (28): Xaa is C or S
SAISILYLVGRTPKVLKNYQMVVKSXKX

SEQ ID NO: 46109 - protein, 30 aa, Artificial Sequence
  Cyclic GFR-binding peptide
  MOD_RES (30), (30): Xaa is C or S
SQDLSATSILYYIGKTPKILRKHRMIVKSX

SEQ ID NO: 46110 - protein, 38 aa, Artificial Sequence; identical to SEQ ID NO: 7031
  Cyclic GFR-binding peptide
  MOD_RES (4), (5), (36), (38): Xaa is C or S

SEQ ID NO: 46111 - protein, 41 aa, Artificial Sequence; identical to SEQ ID NO: 7032
  Cyclic GFR-binding peptide
  MOD_RES (6), (7), (38), (40): Xaa is C or S

SEQ ID NO: 46112 - protein, 30 aa, Artificial Sequence
  Cyclic GFR-binding peptide
  MOD_RES (28), (30): Xaa is C or S
DLSPISILYKVGRTPKVLKYHYMVVKSXKX

SEQ ID NO: 46113 - protein, 39 aa, Artificial Sequence; identical to SEQ ID NO: 7034
  Cyclic GFR-binding peptide
  MOD_RES (4), (5), (37), (39): Xaa is C or S

SEQ ID NO: 46114 - protein, 29 aa, Artificial Sequence
  Cyclic GFR-binding peptide
TELSPISMLYKDEYDKVVLKYHYEMVVEG

SEQ ID NO: 46115 - protein, 25 aa, Artificial Sequence
  Cyclic GFR-binding peptide
VPTKLNAISVLYFDDMGVPTLKKYR

SEQ ID NO: 46116 - protein, 32 aa, Artificial Sequence
  Cyclic GFR-binding peptide
  MOD_RES (6), (7): Xaa is C or S
ASASPXXVSQDLSAISILYLIGKTPKILKNYQ

SEQ ID NO: 46117 - protein, 24 aa, Artificial Sequence
  Cyclic GFR-binding peptide
QLSAISVLYLDDSSNVILKNYQNM

SEQ ID NO: 46118 - protein, 37 aa, Artificial Sequence; identical to SEQ ID NO: 7036
  Cyclic GFR-binding peptide
  MOD_RES (3), (4), (35), (37): Xaa is C or S

SEQ ID NO: 46119 - protein, 36 aa, Artificial Sequence; identical to SEQ ID NO: 7037
  Cyclic GFR-binding peptide
  MOD_RES (4), (5), (36): Xaa is C or S

SEQ ID NO: 46120 - protein, 42 aa, Artificial Sequence; identical to SEQ ID NO: 7038
  Cyclic GFR-binding peptide
  MOD_RES (6), (7), (40), (42): Xaa is C or S

SEQ ID NO: 46121 - protein, 29 aa, Artificial Sequence
  Cyclic GFR-binding peptide
  MOD_RES (28), (28): Xaa is C or S
DLSAISILYLVGRTPKVLKNYQMVVKSXK

SEQ ID NO: 46122 - protein, 29 aa, Artificial Sequence
  Cyclic GFR-binding peptide
  MOD_RES (27), (29): Xaa is C or S
SATSMLYYDENEKVVLRKHRDMVVEGXGX

SEQ ID NO: 46123 - protein, 32 aa, Artificial Sequence
  Cyclic GFR-binding peptide
  MOD_RES (4), (4): Xaa is C or S
KPTXAPTKLSAISVLYLDDSSNVILKNYQNMV

SEQ ID NO: 46124 - protein, 30 aa, Artificial Sequence
  Cyclic GFR-binding peptide
  MOD_RES (1), (1): Xaa is C or S
XVPQDLNAISILYFVGRTPKVLKKYRMVVK

SEQ ID NO: 46125 - protein, 25 aa, Artificial Sequence
  Cyclic GFR-binding peptide
LSATSMLYYDENEKVVLRKHRDMVV

SEQ ID NO: 46126 - protein, 21 aa, Artificial Sequence
  Cyclic GFR-binding peptide
SPISMLYKDENEKVVLKYHYD

SEQ ID NO: 46127 - protein, 27 aa, Artificial Sequence
  Cyclic GFR-binding peptide
APTKLSAISVLYLDDSSNVILKNYQNM

SEQ ID NO: 46128 - protein, 33 aa, Artificial Sequence
  Cyclic GFR-binding peptide
  MOD_RES (31), (33): Xaa is C or S
TKLNAISVLYFDDMGVPTLKKYREGMSVAEXGX

SEQ ID NO: 46129 - protein, 30 aa, Artificial Sequence
  Cyclic GFR-binding peptide
  MOD_RES (1), (2): Xaa is C or S
XXAPTKLSPISVLYKDSSNNVILKYHYNMV

SEQ ID NO: 46130 - protein, 36 aa, Artificial Sequence; identical to SEQ ID NO: 7041
  Cyclic GFR-binding peptide
  MOD_RES (2), (3), (35): Xaa is C or S

SEQ ID NO: 46131 - protein, 38 aa, Artificial Sequence; identical to SEQ ID NO: 7042
  Cyclic GFR-binding peptide
  MOD_RES (5), (6), (37): Xaa is C or S

SEQ ID NO: 46132 - protein, 38 aa, Artificial Sequence; identical to SEQ ID NO: 7044
  Cyclic GFR-binding peptide
  MOD_RES (3), (4), (36), (38): Xaa is C or S

SEQ ID NO: 46133 - protein, 31 aa, Artificial Sequence
  Cyclic GFR-binding peptide
TQVQLSPISVLYKEIVRKKPIFLKYHYTLED

SEQ ID NO: 46134 - protein, 33 aa, Artificial Sequence
  Cyclic GFR-binding peptide
  MOD_RES (2), (2): Xaa is C or S
QXRPTQVQLSATSVLYYEIVRKKPIFLRKHRTL

SEQ ID NO: 46135 - protein, 26 aa, Artificial Sequence
  Cyclic GFR-binding peptide
PTELNAISMLYFDEYDKVVLKKYREM

SEQ ID NO: 46136 - protein, 28 aa, Artificial Sequence
  Cyclic GFR-binding peptide
VPQALNAISILYFVGRKPKVLKKYRMIV

SEQ ID NO: 46137 - protein, 37 aa, Artificial Sequence; identical to SEQ ID NO: 7046
  Cyclic GFR-binding peptide
  MOD_RES (5), (6), (37): Xaa is C or S

SEQ ID NO: 46138 - protein, 29 aa, Artificial Sequence
  Cyclic GFR-binding peptide
  MOD_RES (1), (1): Xaa is C or S
XVPQALNAISILYFVGRKPKVLKKYRMIV

SEQ ID NO: 46139 - protein, 38 aa, Artificial Sequence; identical to SEQ ID NO: 7048
  Cyclic GFR-binding peptide
  MOD_RES (1), (38): Xaa is C or S

SEQ ID NO: 46140 - protein, 37 aa, Artificial Sequence; identical to SEQ ID NO: 7050
  Cyclic GFR-binding peptide
  MOD_RES (3), (4), (35), (37): Xaa is C or S

SEQ ID NO: 46141 - protein, 24 aa, Artificial Sequence
  Cyclic GFR-binding peptide
TELNAISMLYFDEYDKVVLKKYRE

SEQ ID NO: 46142 - protein, 30 aa, Artificial Sequence
  Cyclic GFR-binding peptide
  MOD_RES (28), (30): Xaa is C or S
DLSATSILYYVGRTPKVLRKHRMVVKSXKX

SEQ ID NO: 46143 - protein, 40 aa, Artificial Sequence; identical to SEQ ID NO: 7052
  Cyclic GFR-binding peptide
  MOD_RES (4), (4): Xaa is C or S

SEQ ID NO: 46144 - protein, 31 aa, Artificial Sequence
  Cyclic GFR-binding peptide
TQVQLSAISVLYLEIVRKKPIFLKNYQTLED

SEQ ID NO: 46145 - protein, 23 aa, Artificial Sequence
  Cyclic GFR-binding peptide
KLNAISVLYFDSSNNVILKKYRN

SEQ ID NO: 46146 - protein, 31 aa, Artificial Sequence
  Cyclic GFR-binding peptide
  MOD_RES (29), (31): Xaa is C or S
KLSPISVLYKDSSNNVILKYHYNMVVKAXGX

SEQ ID NO: 46147 - protein, 33 aa, Artificial Sequence
  Cyclic GFR-binding peptide
  MOD_RES (31), (33): Xaa is C or S
PTKLNAISVLYFDSSNNVILKKYRNMVVKAXGX

SEQ ID NO: 46148 - protein, 32 aa, Artificial Sequence; identical to SEQ ID NO: 7054
  Cyclic GFR-binding peptide
  MOD_RES (32), (32): Xaa is C or S

SEQ ID NO: 46149 - protein, 34 aa, Artificial Sequence; identical to SEQ ID NO: 7055
  Cyclic GFR-binding peptide
  MOD_RES (1), (33): Xaa is C or S

SEQ ID NO: 46150 - protein, 27 aa, Artificial Sequence
  Cyclic GFR-binding peptide
SAISILYLVGRKPKVLKNYQVGRKPKV

SEQ ID NO: 46151 - protein, 25 aa, Artificial Sequence
  Cyclic GFR-binding peptide
SPISMLYKDENEKVVLKYHYDMVVE

SEQ ID NO: 46152 - protein, 29 aa, Artificial Sequence
  Cyclic GFR-binding peptide
  MOD_RES (1), (1): Xaa is C or S
XVPTELSPISMLYKDENEKVVLKYHYDMV

SEQ ID NO: 46153 - protein, 26 aa, Artificial Sequence
  Cyclic GFR-binding peptide
PTKLSAISVLYLDDMGVPTLKNYQEG

SEQ ID NO: 46154 - protein, 39 aa, Artificial Sequence; identical to SEQ ID NO: 7060
  Cyclic GFR-binding peptide
  MOD_RES (5), (6), (39): Xaa is C or S

SEQ ID NO: 46155 - protein, 28 aa, Artificial Sequence
  Cyclic GFR-binding peptide
  MOD_RES (1), (1): Xaa is C or S
XAPTQLSAISVLYLDDSSNVILKNYQNM

SEQ ID NO: 46156 - protein, 32 aa, Artificial Sequence
  Cyclic GFR-binding peptide
  MOD_RES (31), (31): Xaa is C or S
TKLNAISVLYFDDMGVPTLKKYREGMSVAEXG

SEQ ID NO: 46157 - protein, 27 aa, Artificial Sequence
  Cyclic GFR-binding peptide
  MOD_RES (2), (2): Xaa is C or S
TXAPTKLSAISVLYLDDSSNVILKNYQ

SEQ ID NO: 46158 - protein, 30 aa, Artificial Sequence
  Cyclic GFR-binding peptide
  MOD_RES (30), (30): Xaa is C or S
PQDLSPISILYKVGRTPKVLKYHYMVVKSX

SEQ ID NO: 46159 - protein, 33 aa, Artificial Sequence
  Cyclic GFR-binding peptide
  MOD_RES (30), (32): Xaa is C or S
SQDLSPISILYKIGKTPKILKYHYMIVKSXKXS

SEQ ID NO: 46160 - protein, 36 aa, Artificial Sequence; identical to SEQ ID NO: 7063
  Cyclic GFR-binding peptide
  MOD_RES (1), (1): Xaa is C or S

SEQ ID NO: 46161 - protein, 27 aa, Artificial Sequence
  Cyclic GFR-binding peptide
SAISVLYLDDMGVPTLKNYQDDMGVPT

SEQ ID NO: 46162 - protein, 33 aa, Artificial Sequence; identical to SEQ ID NO: 7064
  Cyclic GFR-binding peptide
  MOD_RES (1), (2), (33): Xaa is C or S

SEQ ID NO: 46163 - protein, 35 aa, Artificial Sequence
  Cyclic GFR-binding peptide
  MOD_RES (5), (6): Xaa is C or S
IPKAXXVPTELSPISMLYKDEYDKVVLKYHYEMVV

SEQ ID NO: 46164 - protein, 37 aa, Artificial Sequence; identical to SEQ ID NO: 7065
  Cyclic GFR-binding peptide
  MOD_RES (1), (2), (35), (37): Xaa is C or S

SEQ ID NO: 46165 - protein, 24 aa, Artificial Sequence
  Cyclic GFR-binding peptide
PTQLSAISVLYLDDSSNVILKNYQ

SEQ ID NO: 46166 - protein, 28 aa, Artificial Sequence
  Cyclic GFR-binding peptide
LSAISVLYLDDMGVPTLKNYQEGMSVAE

SEQ ID NO: 46167 - protein, 29 aa, Artificial Sequence
  Cyclic GFR-binding peptide
  MOD_RES (3), (4): Xaa is C or S
KAXXVPTKLSATSVLYYDDMGVPTLRKHR

SEQ ID NO: 46168 - protein, 36 aa, Artificial Sequence
  Cyclic GFR-binding peptide
  MOD_RES (6), (7): Xaa is C or S
TVPKPXXAPTQLSAISVLYLDDSSNVILKNYQNMVV

SEQ ID NO: 46169 - protein, 41 aa, Artificial Sequence; identical to SEQ ID NO: 7069
  Cyclic GFR-binding peptide
  MOD_RES (3), (40): Xaa is C or S

SEQ ID NO: 46170 - protein, 32 aa, Artificial Sequence
  Cyclic GFR-binding peptide
  MOD_RES (29), (31): Xaa is C or S
QLSPISVLYKDDSSNVILKYHYNMVVRAXGXH

SEQ ID NO: 46171 - protein, 30 aa, Artificial Sequence
  Cyclic GFR-binding peptide
  MOD_RES (2), (3): Xaa is C or S
PXXVSQDLSAISILYLIGKTPKILKNYQMI

SEQ ID NO: 46172 - protein, 32 aa, Artificial Sequence
  Cyclic GFR-binding peptide
  MOD_RES (5), (6): Xaa is C or S
IPKAXXVPTELSPISMLYKDEYDKVVLKYHYE

SEQ ID NO: 46173 - protein, 34 aa, Artificial Sequence
  Cyclic GFR-binding peptide
  MOD_RES (5), (6): Xaa is C or S
IPKAXXVPTELNAISMLYFDENEKVVLKKYRDMV

SEQ ID NO: 46174 - protein, 38 aa, Artificial Sequence; identical to SEQ ID NO: 7076
  Cyclic GFR-binding peptide
  MOD_RES (2), (3), (35), (37): Xaa is C or S

SEQ ID NO: 46175 - protein, 35 aa, Artificial Sequence; identical to SEQ ID NO: 7078
  Cyclic GFR-binding peptide
  MOD_RES (2), (34): Xaa is C or S

SEQ ID NO: 46176 - protein, 34 aa, Artificial Sequence; identical to SEQ ID NO: 7079
  Cyclic GFR-binding peptide
  MOD_RES (4), (4): Xaa is C or S

SEQ ID NO: 46177 - protein, 28 aa, Artificial Sequence
  Cyclic GFR-binding peptide
  MOD_RES (1), (2): Xaa is C or S
XXAPTQLSATSVLYYDDSSNVILRKHRN

SEQ ID NO: 46178 - protein, 26 aa, Artificial Sequence
  Cyclic GFR-binding peptide
VPTKLSAISVLYLDDMGVPTLKNYQE

SEQ ID NO: 46179 - protein, 32 aa, Artificial Sequence; identical to SEQ ID NO: 7082
  Cyclic GFR-binding peptide
  MOD_RES (31), (31): Xaa is C or S

SEQ ID NO: 46180 - protein, 45 aa, Artificial Sequence; identical to SEQ ID NO: 7083
  Cyclic GFR-binding peptide
  MOD_RES (5), (42), (44): Xaa is C or S

SEQ ID NO: 46181 - protein, 23 aa, Artificial Sequence
  Cyclic GFR-binding peptide
LSAISVLYLDDMGVPTLKNYQEG

SEQ ID NO: 46182 - protein, 35 aa, Artificial Sequence; identical to SEQ ID NO: 7084
  Cyclic GFR-binding peptide
  MOD_RES (3), (4), (35): Xaa is C or S

SEQ ID NO: 46183 - protein, 31 aa, Artificial Sequence
  Cyclic GFR-binding peptide
PTQVQLSAISVLYLEIVRKKPIFLKNYQTLE

SEQ ID NO: 46184 - protein, 22 aa, Artificial Sequence
  Cyclic GFR-binding peptide
ELSPISMLYKDENEKVVLKYHY

SEQ ID NO: 46185 - protein, 31 aa, Artificial Sequence
  Cyclic GFR-binding peptide
  MOD_RES (29), (31): Xaa is C or S
KLSAISVLYLDDSSNVILKNYQNMVVRSXGX

SEQ ID NO: 46186 - protein, 35 aa, Artificial Sequence; identical to SEQ ID NO: 7085
  Cyclic GFR-binding peptide
  MOD_RES (3), (4): Xaa is C or S

SEQ ID NO: 46187 - protein, 35 aa, Artificial Sequence; identical to SEQ ID NO: 7089
  Cyclic GFR-binding peptide
  MOD_RES (3), (4): Xaa is C or S

SEQ ID NO: 46188 - protein, 33 aa, Artificial Sequence
  Cyclic GFR-binding peptide
  MOD_RES (6), (7): Xaa is C or S
SIPKAXXVPTELNAISMLYFDEYDKVVLKKYRE

SEQ ID NO: 46189 - protein, 33 aa, Artificial Sequence; identical to SEQ ID NO: 7090
  Cyclic GFR-binding peptide

SEQ ID NO: 46190 - protein, 30 aa, Artificial Sequence
  Cyclic GFR-binding peptide
  MOD_RES (4), (5): Xaa is C or S
PKPXXAPTQLSAISVLYLDDSSNVILKNYQ

SEQ ID NO: 46191 - protein, 30 aa, Artificial Sequence
  Cyclic GFR-binding peptide
  MOD_RES (29), (29): Xaa is C or S
ELSATSMLYYDEYDKVVLRKHREMVVEGXG

SEQ ID NO: 46192 - protein, 29 aa, Artificial Sequence
  Cyclic GFR-binding peptide
  MOD_RES (1), (2): Xaa is C or S
XXVPTKLSATSVLYYDDMGVPTLRKHREG

SEQ ID NO: 46193 - protein, 43 aa, Artificial Sequence; identical to SEQ ID NO: 7093
  Cyclic GFR-binding peptide
  MOD_RES (3), (40), (42): Xaa is C or S

SEQ ID NO: 46194 - protein, 26 aa, Artificial Sequence
  Cyclic GFR-binding peptide
LNAISVLYFDDMGVPTLKKYREGMSV

SEQ ID NO: 46195 - protein, 31 aa, Artificial Sequence
  Cyclic GFR-binding peptide
  MOD_RES (3), (4): Xaa is C or S
SPXXVPQDLNAISILYFVGRTPKVLKKYRMV

SEQ ID NO: 46196 - protein, 37 aa, Artificial Sequence; identical to SEQ ID NO: 7094
  Cyclic GFR-binding peptide
  MOD_RES (5), (6), (37): Xaa is C or S

SEQ ID NO: 46197 - protein, 22 aa, Artificial Sequence
  Cyclic GFR-binding peptide
LNAISMLYFDEYDKVVLKKYRE

SEQ ID NO: 46198 - protein, 25 aa, Artificial Sequence
  Cyclic GFR-binding peptide
LNAISVLYFDSSNNVILKKYRNMVV

SEQ ID NO: 46199 - protein, 27 aa, Artificial Sequence
  Cyclic GFR-binding peptide
  MOD_RES (26), (26): Xaa is C or S
SATSILYYVGRKPKVLRKHRMIVRSXK

SEQ ID NO: 46200 - protein, 30 aa, Artificial Sequence
  Cyclic GFR-binding peptide
  MOD_RES (2), (3): Xaa is C or S
PXXAPTQLSATSVLYYDDSSNVILRKHRNM

SEQ ID NO: 46201 - protein, 38 aa, Artificial Sequence
  Cyclic GFR-binding peptide
  MOD_RES (5), (5): Xaa is C or S
RNVQXRPTQVQLSATSVLYYEIVRKKPIFLRKHRTLED

SEQ ID NO: 46202 - protein, 28 aa, Artificial Sequence
  Cyclic GFR-binding peptide
LNAISVLYFDDMGVPTLKKYREGMSVAE

SEQ ID NO: 46203 - protein, 23 aa, Artificial Sequence
  Cyclic GFR-binding peptide
NAISILYFVGRKPKVLKKYRMIV

SEQ ID NO: 46204 - protein, 38 aa, Artificial Sequence; identical to SEQ ID NO: 7099
  Cyclic GFR-binding peptide
  MOD_RES (4), (5), (36), (38): Xaa is C or S

SEQ ID NO: 46205 - protein, 30 aa, Artificial Sequence; identical to SEQ ID NO: 7102
  Cyclic GFR-binding peptide

SEQ ID NO: 46206 - protein, 24 aa, Artificial Sequence
  Cyclic GFR-binding peptide
PTELSPISMLYKDEYDKVVLKYHY

SEQ ID NO: 46207 - protein, 39 aa, Artificial Sequence; identical to SEQ ID NO: 7105
  Cyclic GFR-binding peptide
  MOD_RES (6), (38): Xaa is C or S

SEQ ID NO: 46208 - protein, 35 aa, Artificial Sequence; identical to SEQ ID NO: 7106
  Cyclic GFR-binding peptide
  MOD_RES (4), (4): Xaa is C or S

SEQ ID NO: 46209 - protein, 38 aa, Artificial Sequence; identical to SEQ ID NO: 7107
  Cyclic GFR-binding peptide
  MOD_RES (2), (3), (35), (37): Xaa is C or S

SEQ ID NO: 46210 - protein, 41 aa, Artificial Sequence; identical to SEQ ID NO: 7108
  Cyclic GFR-binding peptide
  MOD_RES (4), (41): Xaa is C or S

SEQ ID NO: 46211 - protein, 30 aa, Artificial Sequence
  Cyclic GFR-binding peptide
LSATSVLYYEIVRKKPIFLRKHRTLEDHLA

SEQ ID NO: 46212 - protein, 28 aa, Artificial Sequence
  Cyclic GFR-binding peptide
TELSPISMLYKDENEKVVLKYHYDMVVE

SEQ ID NO: 46213 - protein, 29 aa, Artificial Sequence
  Cyclic GFR-binding peptide
  MOD_RES (27), (29): Xaa is C or S
LNAISILYFVGRTPKVLKKYRMVVKSXKX

SEQ ID NO: 46214 - protein, 28 aa, Artificial Sequence
  Cyclic GFR-binding peptide
  MOD_RES (28), (28): Xaa is C or S
DLNAISILYFIGKTPKILKKYRMIVKSX

SEQ ID NO: 46215 - protein, 40 aa, Artificial Sequence; identical to SEQ ID NO: 7111
  Cyclic GFR-binding peptide
  MOD_RES (6), (7), (38), (40): Xaa is C or S

SEQ ID NO: 46216 - protein, 38 aa, Artificial Sequence; identical to SEQ ID NO: 7112
  Cyclic GFR-binding peptide
  MOD_RES (5), (6), (38): Xaa is C or S

SEQ ID NO: 46217 - protein, 38 aa, Artificial Sequence; identical to SEQ ID NO: 7114
  Cyclic GFR-binding peptide
  MOD_RES (6), (7), (38): Xaa is C or S

SEQ ID NO: 46218 - protein, 27 aa, Artificial Sequence
  Cyclic GFR-binding peptide
PTELSPISMLYKDENEKVVLKYHYDMV

SEQ ID NO: 46219 - protein, 35 aa, Artificial Sequence
  Cyclic GFR-binding peptide
  MOD_RES (6), (7): Xaa is C or S
YVPKPXXAPTKLSATSVLYYDDSSNVILRKHRNMV

SEQ ID NO: 46220 - protein, 39 aa, Artificial Sequence; identical to SEQ ID NO: 7117
  Cyclic GFR-binding peptide
  MOD_RES (5), (6), (37), (39): Xaa is C or S

SEQ ID NO: 46221 - protein, 38 aa, Artificial Sequence; identical to SEQ ID NO: 7118
  Cyclic GFR-binding peptide
  MOD_RES (3), (4), (37): Xaa is C or S

SEQ ID NO: 46222 - protein, 26 aa, Artificial Sequence
  Cyclic GFR-binding peptide
PTKLNAISVLYFDDMGVPTLKKYREG

SEQ ID NO: 46223 - protein, 26 aa, Artificial Sequence
  Cyclic GFR-binding peptide
SAISVLYLDDSSNVILKNYQNMVVRS

SEQ ID NO: 46224 - protein, 31 aa, Artificial Sequence
  Cyclic GFR-binding peptide
  MOD_RES (2), (3): Xaa is C or S
PXXVSQDLSATSILYYIGKTPKILRKHRMIV

SEQ ID NO: 46225 - protein, 27 aa, Artificial Sequence
  Cyclic GFR-binding peptide
APTKLSPISVLYKDDSSNVILKYHYNM

SEQ ID NO: 46226 - protein, 33 aa, Artificial Sequence
  Cyclic GFR-binding peptide
  MOD_RES (4), (4): Xaa is C or S
KPTXAPTKLSPISVLYKDDSSNVILKYHYNMVV

SEQ ID NO: 46227 - protein, 29 aa, Artificial Sequence
  Cyclic GFR-binding peptide
  MOD_RES (2), (3): Xaa is C or S
PXXVPQALSATSILYYVGRKPKVLRKHRM

SEQ ID NO: 46228 - protein, 29 aa, Artificial Sequence
  Cyclic GFR-binding peptide
  MOD_RES (27), (29): Xaa is C or S
SATSMLYYDEYDKVVLRKHREMVVEGXGX

SEQ ID NO: 46229 - protein, 34 aa, Artificial Sequence; identical to SEQ ID NO: 7120
  Cyclic GFR-binding peptide
  MOD_RES (3), (4): Xaa is C or S

SEQ ID NO: 46230 - protein, 38 aa, Artificial Sequence; identical to SEQ ID NO: 7123
  Cyclic GFR-binding peptide
  MOD_RES (4), (5), (36), (38): Xaa is C or S

SEQ ID NO: 46231 - protein, 30 aa, Artificial Sequence
  Cyclic GFR-binding peptide
LSAISVLYLEIVRKKPIFLKNYQTLEDHLA

SEQ ID NO: 46232 - protein, 37 aa, Artificial Sequence; identical to SEQ ID NO: 7126
  Cyclic GFR-binding peptide
  MOD_RES (4), (5), (37): Xaa is C or S

SEQ ID NO: 46233 - protein, 37 aa, Artificial Sequence; identical to SEQ ID NO: 7129
  Cyclic GFR-binding peptide
  MOD_RES (5), (37): Xaa is C or S

SEQ ID NO: 46234 - protein, 31 aa, Artificial Sequence
  Cyclic GFR-binding peptide
  MOD_RES (28), (30): Xaa is C or S
DLNAISILYFIGKTPKILKKYRMIVKSXKXS

SEQ ID NO: 46235 - protein, 32 aa, Artificial Sequence
  Cyclic GFR-binding peptide
  MOD_RES (4), (5): Xaa is C or S
PKAXXVPTELSPISMLYKDENEKVVLKYHYDM

SEQ ID NO: 46236 - protein, 24 aa, Artificial Sequence
  Cyclic GFR-binding peptide
TQLSPISVLYKDDSSNVILKYHYN

SEQ ID NO: 46237 - protein, 36 aa, Artificial Sequence; identical to SEQ ID NO: 7130
  Cyclic GFR-binding peptide
  MOD_RES (1), (2), (33), (35): Xaa is C or S

SEQ ID NO: 46238 - protein, 34 aa, Artificial Sequence
  Cyclic GFR-binding peptide
  MOD_RES (31), (33): Xaa is C or S
PTELSPISMLYKDENEKVVLKYHYDMVVEGXGXR

SEQ ID NO: 46239 - protein, 36 aa, Artificial Sequence; identical to SEQ ID NO: 7131
  Cyclic GFR-binding peptide
  MOD_RES (3), (4), (36): Xaa is C or S

SEQ ID NO: 46240 - protein, 32 aa, Artificial Sequence
  Cyclic GFR-binding peptide
  MOD_RES (1), (1): Xaa is C or S
XRPTQVQLSPISVLYKEIVRKKPIFLKYHYTL

SEQ ID NO: 46241 - protein, 37 aa, Artificial Sequence; identical to SEQ ID NO: 7132
  Cyclic GFR-binding peptide
  MOD_RES (35), (37): Xaa is C or S

SEQ ID NO: 46242 - protein, 24 aa, Artificial Sequence
  Cyclic GFR-binding peptide
ELSATSMLYYDENEKVVLRKHRDM

SEQ ID NO: 46243 - protein, 36 aa, Artificial Sequence; identical to SEQ ID NO: 7133
  Cyclic GFR-binding peptide
  MOD_RES (5), (6): Xaa is C or S

SEQ ID NO: 46244 - protein, 37 aa, Artificial Sequence; identical to SEQ ID NO: 7135
  Cyclic GFR-binding peptide
  MOD_RES (1), (2), (34), (36): Xaa is C or S

SEQ ID NO: 46245 - protein, 35 aa, Artificial Sequence; identical to SEQ ID NO: 7136
  Cyclic GFR-binding peptide
  MOD_RES (3), (4), (35): Xaa is C or S

SEQ ID NO: 46246 - protein, 35 aa, Artificial Sequence; identical to SEQ ID NO: 7137
  Cyclic GFR-binding peptide
  MOD_RES (4), (5): Xaa is C or S

SEQ ID NO: 46247 - protein, 35 aa, Artificial Sequence; identical to SEQ ID NO: 7138
  Cyclic GFR-binding peptide

SEQ ID NO: 46248 - protein, 37 aa, Artificial Sequence; identical to SEQ ID NO: 7140
  Cyclic GFR-binding peptide
  MOD_RES (5), (6), (37): Xaa is C or S

SEQ ID NO: 46249 - protein, 39 aa, Artificial Sequence; identical to SEQ ID NO: 7142
  Cyclic GFR-binding peptide
  MOD_RES (2), (3), (36), (38): Xaa is C or S

SEQ ID NO: 46250 - protein, 34 aa, Artificial Sequence
  Cyclic GFR-binding peptide
  MOD_RES (4), (4): Xaa is C or S
NVQXRPTQVQLSATSVLYYEIVRKKPIFLRKHRT

SEQ ID NO: 46251 - protein, 37 aa, Artificial Sequence; identical to SEQ ID NO: 7144
  Cyclic GFR-binding peptide
  MOD_RES (4), (5), (37): Xaa is C or S

SEQ ID NO: 46252 - protein, 26 aa, Artificial Sequence
  Cyclic GFR-binding peptide
LSATSVLYYDDMGVPTLRKHREGMSV

SEQ ID NO: 46253 - protein, 28 aa, Artificial Sequence
  Cyclic GFR-binding peptide
VPTELSPISMLYKDENEKVVLKYHYDMV

SEQ ID NO: 46254 - protein, 31 aa, Artificial Sequence
  Cyclic GFR-binding peptide
  MOD_RES (2), (3): Xaa is C or S
PXXAPTQLSATSVLYYDDSSNVILRKHRNMV

SEQ ID NO: 46255 - protein, 29 aa, Artificial Sequence
  Cyclic GFR-binding peptide
TKLSAISVLYLDDMGVPTLKNYQEGMSVA

SEQ ID NO: 46256 - protein, 42 aa, Artificial Sequence; identical to SEQ ID NO: 7147
  Cyclic GFR-binding peptide
  MOD_RES (6), (7), (39), (41): Xaa is C or S

SEQ ID NO: 46257 - protein, 38 aa, Artificial Sequence; identical to SEQ ID NO: 7148
  Cyclic GFR-binding peptide
  MOD_RES (4), (5), (37): Xaa is C or S

SEQ ID NO: 46258 - protein, 39 aa, Artificial Sequence; identical to SEQ ID NO: 7149
  Cyclic GFR-binding peptide
  MOD_RES (5), (6), (38): Xaa is C or S

SEQ ID NO: 46259 - protein, 38 aa, Artificial Sequence; identical to SEQ ID NO: 7151
  Cyclic GFR-binding peptide
  MOD_RES (4), (5), (36), (38): Xaa is C or S

SEQ ID NO: 46260 - protein, 21 aa, Artificial Sequence
  Cyclic GFR-binding peptide
SPISVLYKDDSSNVILKYHYN

SEQ ID NO: 46261 - protein, 35 aa, Artificial Sequence; identical to SEQ ID NO: 7154
  Cyclic GFR-binding peptide
  MOD_RES (3), (4), (35): Xaa is C or S

SEQ ID NO: 46262 - protein, 27 aa, Artificial Sequence
  Cyclic GFR-binding peptide
PQALNAISILYFVGRKPKVLKKYRMIV

SEQ ID NO: 46263 - protein, 37 aa, Artificial Sequence; identical to SEQ ID NO: 7158
  Cyclic GFR-binding peptide
  MOD_RES (1), (2), (34), (36): Xaa is C or S

SEQ ID NO: 46264 - protein, 35 aa, Artificial Sequence
  Cyclic GFR-binding peptide
  MOD_RES (6), (7): Xaa is C or S
SIPKAXXVPTELSPISMLYKDEYDKVVLKYHYEMV

SEQ ID NO: 46265 - protein, 24 aa, Artificial Sequence
  Cyclic GFR-binding peptide
SPISVLYKDSSNNVILKYHYNMVV

SEQ ID NO: 46266 - protein, 34 aa, Artificial Sequence
  Cyclic GFR-binding peptide
  MOD_RES (3), (3): Xaa is C or S
VQXRPTQVQLNAISVLYFEIVRKKPIFLKKYRTL

SEQ ID NO: 46267 - protein, 29 aa, Artificial Sequence
  Cyclic GFR-binding peptide
  MOD_RES (28), (28): Xaa is C or S
NAISVLYFDDMGVPTLKKYREGMSVAEXG

SEQ ID NO: 46268 - protein, 34 aa, Artificial Sequence
  Cyclic GFR-binding peptide
  MOD_RES (5), (6): Xaa is C or S
IPKAXXVPTELSATSMLYYDENEKVVLRKHRDMV

SEQ ID NO: 46269 - protein, 35 aa, Artificial Sequence; identical to SEQ ID NO: 7160
  Cyclic GFR-binding peptide
  MOD_RES (1), (33), (35): Xaa is C or S

SEQ ID NO: 46270 - protein, 32 aa, Artificial Sequence; identical to SEQ ID NO: 7162
  Cyclic GFR-binding peptide
  MOD_RES (31), (31): Xaa is C or S

SEQ ID NO: 46271 - protein, 29 aa, Artificial Sequence
  Cyclic GFR-binding peptide
LSPISVLYKEIVRKKPIFLKYHYTLEDHL

SEQ ID NO: 46272 - protein, 29 aa, Artificial Sequence
  Cyclic GFR-binding peptide
  MOD_RES (27), (29): Xaa is C or S
SPISVLYKDDSSNVILKYHYNMVVRAXGX

SEQ ID NO: 46273 - protein, 26 aa, Artificial Sequence
  Cyclic GFR-binding peptide
SAISVLYLDDSSNVILKNYQNMVVRA

SEQ ID NO: 46274 - protein, 31 aa, Artificial Sequence
  Cyclic GFR-binding peptide
  MOD_RES (2), (2): Xaa is C or S
TXAPTKLSATSVLYYDDSSNVILRKHRNMVV

SEQ ID NO: 46275 - protein, 27 aa, Artificial Sequence
  Cyclic GFR-binding peptide
LSPISVLYKEIVRKKPIFLKYHYTLED

SEQ ID NO: 46276 - protein, 32 aa, Artificial Sequence
  Cyclic GFR-binding peptide
  MOD_RES (6), (7): Xaa is C or S
ASASPXXVPQDLSPISILYKVGRTPKVLKYHY

SEQ ID NO: 46277 - protein, 36 aa, Artificial Sequence; identical to SEQ ID NO: 7164
  Cyclic GFR-binding peptide
  MOD_RES (5), (6): Xaa is C or S

SEQ ID NO: 46278 - protein, 35 aa, Artificial Sequence; identical to SEQ ID NO: 7165
  Cyclic GFR-binding peptide
  MOD_RES (2), (3), (35): Xaa is C or S

SEQ ID NO: 46279 - protein, 39 aa, Artificial Sequence; identical to SEQ ID NO: 7166
  Cyclic GFR-binding peptide
  MOD_RES (4), (36), (38): Xaa is C or S

SEQ ID NO: 46280 - protein, 24 aa, Artificial Sequence
  Cyclic GFR-binding peptide
KLSPISVLYKDDSSNVILKYHYNM

SEQ ID NO: 46281 - protein, 42 aa, Artificial Sequence; identical to SEQ ID NO: 7168
  Cyclic GFR-binding peptide
  MOD_RES (6), (7), (39), (41): Xaa is C or S

SEQ ID NO: 46282 - protein, 31 aa, Artificial Sequence
  Cyclic GFR-binding peptide
  MOD_RES (3), (4): Xaa is C or S
SPXXVSQDLSAISILYLIGKTPKILKNYQMI

SEQ ID NO: 46283 - protein, 36 aa, Artificial Sequence
  Cyclic GFR-binding peptide
  MOD_RES (6), (7): Xaa is C or S
AVPKAXXAPTKLSPISVLYKDSSNNVILKYHYNMVV

SEQ ID NO: 46284 - protein, 33 aa, Artificial Sequence
  Cyclic GFR-binding peptide
  MOD_RES (5), (6): Xaa is C or S
SAAPXXVPQALSPISILYKVGRKPKVLKYHYMI

SEQ ID NO: 46285 - protein, 40 aa, Artificial Sequence; identical to SEQ ID NO: 7169
  Cyclic GFR-binding peptide
  MOD_RES (6), (7), (39): Xaa is C or S

SEQ ID NO: 46286 - protein, 27 aa, Artificial Sequence
  Cyclic GFR-binding peptide
QVQLSAISVLYLEIVRKKPIFLKNYQT

SEQ ID NO: 46287 - protein, 27 aa, Artificial Sequence
  Cyclic GFR-binding peptide
VPTELNAISMLYFDEYDKVVLKKYREM

SEQ ID NO: 46288 - protein, 37 aa, Artificial Sequence; identical to SEQ ID NO: 7170
  Cyclic GFR-binding peptide
  MOD_RES (1), (2), (34), (36): Xaa is C or S

SEQ ID NO: 46289 - protein, 29 aa, Artificial Sequence
  Cyclic GFR-binding peptide
  MOD_RES (1), (2): Xaa is C or S
XXAPTKLSAISVLYLDDSSNVILKNYQNM

SEQ ID NO: 46290 - protein, 35 aa, Artificial Sequence; identical to SEQ ID NO: 7171
  Cyclic GFR-binding peptide
  MOD_RES (4), (5): Xaa is C or S

SEQ ID NO: 46291 - protein, 42 aa, Artificial Sequence; identical to SEQ ID NO: 7173
  Cyclic GFR-binding peptide
  MOD_RES (4), (41): Xaa is C or S

SEQ ID NO: 46292 - protein, 37 aa, Artificial Sequence; identical to SEQ ID NO: 7174
  Cyclic GFR-binding peptide
  MOD_RES (5), (6), (37): Xaa is C or S

SEQ ID NO: 46293 - protein, 30 aa, Artificial Sequence
  Cyclic GFR-binding peptide
  MOD_RES (3), (4): Xaa is C or S
KAXXVPTELSATSMLYYDEYDKVVLRKHRE

SEQ ID NO: 46294 - protein, 30 aa, Artificial Sequence
  Cyclic GFR-binding peptide
PTELNAISMLYFDEYDKVVLKKYREMVVEG

SEQ ID NO: 46295 - protein, 40 aa, Artificial Sequence; identical to SEQ ID NO: 7175
  Cyclic GFR-binding peptide
  MOD_RES (4), (4): Xaa is C or S

SEQ ID NO: 46296 - protein, 33 aa, Artificial Sequence
  Cyclic GFR-binding peptide
  MOD_RES (2), (3): Xaa is C or S
AXXVPTKLSAISVLYLDDMGVPTLKNYQEGMSV

SEQ ID NO: 46297 - protein, 32 aa, Artificial Sequence
  Cyclic GFR-binding peptide
  MOD_RES (30), (32): Xaa is C or S
SPISVLYKEIVRKKPIFLKYHYTLEDHLAXKX

SEQ ID NO: 46298 - protein, 34 aa, Artificial Sequence; identical to SEQ ID NO: 7177
  Cyclic GFR-binding peptide
  MOD_RES (1), (2): Xaa is C or S

SEQ ID NO: 46299 - protein, 32 aa, Artificial Sequence
  Cyclic GFR-binding peptide
  MOD_RES (5), (6): Xaa is C or S
IPKAXXVPTELSATSMLYYDENEKVVLRKHRD

SEQ ID NO: 46300 - protein, 35 aa, Artificial Sequence
  Cyclic GFR-binding peptide
  MOD_RES (32), (34): Xaa is C or S
QLNAISVLYFEIVRKKPIFLKKYRTLEDHLAXKXE

SEQ ID NO: 46301 - protein, 30 aa, Artificial Sequence
  Cyclic GFR-binding peptide
  MOD_RES (2), (3): Xaa is C or S
AXXAPTKLNAISVLYFDSSNNVILKKYRNM

SEQ ID NO: 46302 - protein, 26 aa, Artificial Sequence
  Cyclic GFR-binding peptide
VPQALSAISILYLVGRKPKVLKNYQM

SEQ ID NO: 46303 - protein, 35 aa, Artificial Sequence; identical to SEQ ID NO: 7178
  Cyclic GFR-binding peptide
  MOD_RES (3), (4): Xaa is C or S

SEQ ID NO: 46304 - protein, 29 aa, Artificial Sequence
  Cyclic GFR-binding peptide
  MOD_RES (3), (4): Xaa is C or S
SPXXVSQDLSATSILYYIGKTPKILRKHR

SEQ ID NO: 46305 - protein, 28 aa, Artificial Sequence
  Cyclic GFR-binding peptide
QDLSATSILYYIGKTPKILRKHRMIVKS

SEQ ID NO: 46306 - protein, 27 aa, Artificial Sequence
  Cyclic GFR-binding peptide
  MOD_RES (1), (1): Xaa is C or S
XAPTQLSATSVLYYDDSSNVILRKHRN

SEQ ID NO: 46307 - protein, 28 aa, Artificial Sequence
  Cyclic GFR-binding peptide
  MOD_RES (2), (3): Xaa is C or S
AXXVPTELSPISMLYKDEYDKVVLKYHY

SEQ ID NO: 46308 - protein, 28 aa, Artificial Sequence
  Cyclic GFR-binding peptide
  MOD_RES (28), (28): Xaa is C or S
LSAISVLYLDSSNNVILKNYQNMVVKAX

SEQ ID NO: 46309 - protein, 27 aa, Artificial Sequence
  Cyclic GFR-binding peptide
  MOD_RES (1), (1): Xaa is C or S
XVPQDLSATSILYYVGRTPKVLRKHRM

SEQ ID NO: 46310 - protein, 28 aa, Artificial Sequence
  Cyclic GFR-binding peptide
  MOD_RES (27), (27): Xaa is C or S
SPISVLYKDSSNNVILKYHYNMVVKAXG

SEQ ID NO: 46311 - protein, 38 aa, Artificial Sequence; identical to SEQ ID NO: 7184
  Cyclic GFR-binding peptide
  MOD_RES (3), (4), (35), (37): Xaa is C or S

SEQ ID NO: 46312 - protein, 30 aa, Artificial Sequence
  Cyclic GFR-binding peptide
  MOD_RES (30), (30): Xaa is C or S
KLNAISVLYFDDMGVPTLKKYREGMSVAEX

SEQ ID NO: 46313 - protein, 28 aa, Artificial Sequence
  Cyclic GFR-binding peptide
KLSATSVLYYDDSSNVILRKHRNMVVRS

SEQ ID NO: 46314 - protein, 32 aa, Artificial Sequence
  Cyclic GFR-binding peptide
  MOD_RES (4), (5): Xaa is C or S
PKAXXVPTELSATSMLYYDEYDKVVLRKHREM

SEQ ID NO: 46315 - protein, 30 aa, Artificial Sequence
  Cyclic GFR-binding peptide
  MOD_RES (2), (3): Xaa is C or S
PXXAPTKLSATSVLYYDDSSNVILRKHRNM

SEQ ID NO: 46316 - protein, 25 aa, Artificial Sequence
  Cyclic GFR-binding peptide
DLSATSILYYVGRTPKVLRKHRMVV

SEQ ID NO: 46317 - protein, 29 aa, Artificial Sequence
  Cyclic GFR-binding peptide
  MOD_RES (2), (3): Xaa is C or S
PXXAPTKLSAISVLYLDDSSNVILKNYQN

SEQ ID NO: 46318 - protein, 31 aa, Artificial Sequence
  Cyclic GFR-binding peptide
  MOD_RES (28), (30): Xaa is C or S
ALSATSILYYVGRKPKVLRKHRMIVRSXKXS

SEQ ID NO: 46319 - protein, 38 aa, Artificial Sequence; identical to SEQ ID NO: 7186
  Cyclic GFR-binding peptide
  MOD_RES (6), (7), (38): Xaa is C or S

SEQ ID NO: 46320 - protein, 30 aa, Artificial Sequence
  Cyclic GFR-binding peptide
PTKLSATSVLYYDDSSNVILRKHRNMVVRS

SEQ ID NO: 46321 - protein, 34 aa, Artificial Sequence; identical to SEQ ID NO: 7188
  Cyclic GFR-binding peptide
  MOD_RES (2), (3): Xaa is C or S

SEQ ID NO: 46322 - protein, 31 aa, Artificial Sequence
  Cyclic GFR-binding peptide
  MOD_RES (30), (30): Xaa is C or S
TELSATSMLYYDENEKVVLRKHRDMVVEGXG

SEQ ID NO: 46323 - protein, 36 aa, Artificial Sequence; identical to SEQ ID NO: 7190
  Cyclic GFR-binding peptide
  MOD_RES (5), (6): Xaa is C or S

SEQ ID NO: 46324 - protein, 22 aa, Artificial Sequence
  Cyclic GFR-binding peptide
SPISVLYKDSSNNVILKYHYNM

SEQ ID NO: 46325 - protein, 31 aa, Artificial Sequence
  Cyclic GFR-binding peptide
  MOD_RES (3), (4): Xaa is C or S
SPXXVPQDLSAISILYLVGRTPKVLKNYQMV

SEQ ID NO: 46326 - protein, 21 aa, Artificial Sequence
  Cyclic GFR-binding peptide
NAISILYFVGRKPKVLKKYRM

SEQ ID NO: 46327 - protein, 31 aa, Artificial Sequence
  Cyclic GFR-binding peptide
  MOD_RES (2), (3): Xaa is C or S
PXXVPQDLSAISILYLVGRTPKVLKNYQMVV

SEQ ID NO: 46328 - protein, 27 aa, Artificial Sequence
  Cyclic GFR-binding peptide
LNAISVLYFEIVRKKPIFLKKYRTLED

SEQ ID NO: 46329 - protein, 37 aa, Artificial Sequence; identical to SEQ ID NO: 7193
  Cyclic GFR-binding peptide
  MOD_RES (3), (4), (36): Xaa is C or S

SEQ ID NO: 46330 - protein, 38 aa, Artificial Sequence; identical to SEQ ID NO: 7195
  Cyclic GFR-binding peptide
  MOD_RES (4), (36), (38): Xaa is C or S

SEQ ID NO: 46331 - protein, 30 aa, Artificial Sequence
  Cyclic GFR-binding peptide
  MOD_RES (27), (29): Xaa is C or S
LNAISILYFVGRKPKVLKKYRMIVRSXKXS

SEQ ID NO: 46332 - protein, 35 aa, Artificial Sequence; identical to SEQ ID NO: 7197
  Cyclic GFR-binding peptide
  MOD_RES (2), (3), (35): Xaa is C or S

SEQ ID NO: 46333 - protein, 34 aa, Artificial Sequence
  Cyclic GFR-binding peptide
  MOD_RES (31), (33): Xaa is C or S
PTKLSAISVLYLDDSSNVILKNYQNMVVRSXGXH

SEQ ID NO: 46334 - protein, 33 aa, Artificial Sequence; identical to SEQ ID NO: 7198
  Cyclic GFR-binding peptide
  MOD_RES (2), (3): Xaa is C or S

SEQ ID NO: 46335 - protein, 30 aa, Artificial Sequence
  Cyclic GFR-binding peptide
  MOD_RES (3), (4): Xaa is C or S
KAXXVPTKLSAISVLYLDDMGVPTLKNYQE

SEQ ID NO: 46336 - protein, 31 aa, Artificial Sequence
  Cyclic GFR-binding peptide
  MOD_RES (31), (31): Xaa is C or S
TKLSATSVLYYDDMGVPTLRKHREGMSVAEX

SEQ ID NO: 46337 - protein, 41 aa, Artificial Sequence; identical to SEQ ID NO: 7199
  Cyclic GFR-binding peptide
  MOD_RES (6), (7), (38), (40): Xaa is C or S

SEQ ID NO: 46338 - protein, 38 aa, Artificial Sequence; identical to SEQ ID NO: 7201
  Cyclic GFR-binding peptide
  MOD_RES (5), (6): Xaa is C or S

SEQ ID NO: 46339 - protein, 23 aa, Artificial Sequence
  Cyclic GFR-binding peptide
SATSILYYIGKTPKILRKHRMIV

SEQ ID NO: 46340 - protein, 22 aa, Artificial Sequence
  Cyclic GFR-binding peptide
LSPISVLYKDSSNNVILKYHYN

SEQ ID NO: 46341 - protein, 34 aa, Artificial Sequence
  Cyclic GFR-binding peptide
  MOD_RES (6), (7): Xaa is C or S
KVGKAXXVPTKLSATSVLYYDDMGVPTLRKHREG

SEQ ID NO: 46342 - protein, 34 aa, Artificial Sequence; identical to SEQ ID NO: 7202
  Cyclic GFR-binding peptide
  MOD_RES (3), (4): Xaa is C or S

SEQ ID NO: 46343 - protein, 27 aa, Artificial Sequence
  Cyclic GFR-binding peptide
TQVQLSPISVLYKEIVRKKPIFLKYHY

SEQ ID NO: 46344 - protein, 28 aa, Artificial Sequence
  Cyclic GFR-binding peptide
ELNAISMLYFDEYDKVVLKKYREMVVEG

SEQ ID NO: 46345 - protein, 31 aa, Artificial Sequence
  Cyclic GFR-binding peptide
  MOD_RES (4), (5): Xaa is C or S
PKAXXVPTELNAISMLYFDEYDKVVLKKYRE

SEQ ID NO: 46346 - protein, 41 aa, Artificial Sequence; identical to SEQ ID NO: 7207
  Cyclic GFR-binding peptide
  MOD_RES (1), (38), (40): Xaa is C or S

SEQ ID NO: 46347 - protein, 33 aa, Artificial Sequence
  Cyclic GFR-binding peptide
  MOD_RES (3), (4): Xaa is C or S
SPXXVPQDLSATSILYYVGRTPKVLRKHRMVVK

SEQ ID NO: 46348 - protein, 34 aa, Artificial Sequence
  Cyclic GFR-binding peptide
  MOD_RES (5), (6): Xaa is C or S
SAAPXXVPQALSATSILYYVGRKPKVLRKHRMIV

SEQ ID NO: 46349 - protein, 27 aa, Artificial Sequence
  Cyclic GFR-binding peptide
APTQLSAISVLYLDDSSNVILKNYQNM

SEQ ID NO: 46350 - protein, 30 aa, Artificial Sequence
  Cyclic GFR-binding peptide
  MOD_RES (3), (3): Xaa is C or S
PTXAPTKLSATSVLYYDDSSNVILRKHRNM

SEQ ID NO: 46351 - protein, 38 aa, Artificial Sequence; identical to SEQ ID NO: 7214
  Cyclic GFR-binding peptide
  MOD_RES (6), (7), (38): Xaa is C or S

SEQ ID NO: 46352 - protein, 30 aa, Artificial Sequence
  Cyclic GFR-binding peptide
  MOD_RES (30), (30): Xaa is C or S
SQDLSPISILYKIGKTPKILKYHYMIVKSX

SEQ ID NO: 46353 - protein, 30 aa, Artificial Sequence; identical to SEQ ID NO: 7215
  Cyclic GFR-binding peptide

SEQ ID NO: 46354 - protein, 36 aa, Artificial Sequence; identical to SEQ ID NO: 7216
  Cyclic GFR-binding peptide
  MOD_RES (1), (1): Xaa is C or S

SEQ ID NO: 46355 - protein, 25 aa, Artificial Sequence
  Cyclic GFR-binding peptide
PTELNAISMLYFDEYDKVVLKKYRE

SEQ ID NO: 46356 - protein, 30 aa, Artificial Sequence
  Cyclic GFR-binding peptide
  MOD_RES (27), (29): Xaa is C or S
SATSVLYYDDSSNVILRKHRNMVVRAXGXH

SEQ ID NO: 46357 - protein, 34 aa, Artificial Sequence
  Cyclic GFR-binding peptide
  MOD_RES (31), (33): Xaa is C or S
TKLSAISVLYLDDMGVPTLKNYQEGMSVAEXGXR

SEQ ID NO: 46358 - protein, 32 aa, Artificial Sequence; identical to SEQ ID NO: 7217
  Cyclic GFR-binding peptide
  MOD_RES (1), (32): Xaa is C or S

SEQ ID NO: 46359 - protein, 31 aa, Artificial Sequence; identical to SEQ ID NO: 7218
  Cyclic GFR-binding peptide
  MOD_RES (31), (31): Xaa is C or S

SEQ ID NO: 46360 - protein, 23 aa, Artificial Sequence
  Cyclic GFR-binding peptide
TELNAISMLYFDEYDKVVLKKYR

SEQ ID NO: 46361 - protein, 30 aa, Artificial Sequence
  Cyclic GFR-binding peptide
  MOD_RES (4), (5): Xaa is C or S
GKAXXVPTKLNAISVLYFDDMGVPTLKKYR

SEQ ID NO: 46362 - protein, 22 aa, Artificial Sequence
  Cyclic GFR-binding peptide
LSAISVLYLDDMGVPTLKNYQE

SEQ ID NO: 46363 - protein, 28 aa, Artificial Sequence
  Cyclic GFR-binding peptide
  MOD_RES (27), (27): Xaa is C or S
LSAISILYLIGKTPKILKNYQMIVKSXK

SEQ ID NO: 46364 - protein, 23 aa, Artificial Sequence
  Cyclic GFR-binding peptide
SATSVLYYDDMGVPTLRKHREGM

SEQ ID NO: 46365 - protein, 30 aa, Artificial Sequence
  Cyclic GFR-binding peptide
  MOD_RES (3), (4): Xaa is C or S
SPXXVSQDLNAISILYFIGKTPKILKKYRM

SEQ ID NO: 46366 - protein, 36 aa, Artificial Sequence; identical to SEQ ID NO: 7221
  Cyclic GFR-binding peptide
  MOD_RES (1), (2), (33), (35): Xaa is C or S

SEQ ID NO: 46367 - protein, 35 aa, Artificial Sequence; identical to SEQ ID NO: 7222
  Cyclic GFR-binding peptide
  MOD_RES (1), (32), (34): Xaa is C or S

SEQ ID NO: 46368 - protein, 40 aa, Artificial Sequence; identical to SEQ ID NO: 7223
  Cyclic GFR-binding peptide
  MOD_RES (6), (7), (38), (40): Xaa is C or S

SEQ ID NO: 46369 - protein, 34 aa, Artificial Sequence
  Cyclic GFR-binding peptide
  MOD_RES (4), (5): Xaa is C or S
AAPXXVPQALSPISILYKVGRKPKVLKYHYMIVR

SEQ ID NO: 46370 - protein, 36 aa, Artificial Sequence
  Cyclic GFR-binding peptide
  MOD_RES (5), (5): Xaa is C or S
RNVQXRPTQVQLSPISVLYKEIVRKKPIFLKYHYTL

SEQ ID NO: 46371 - protein, 30 aa, Artificial Sequence
  Cyclic GFR-binding peptide
  MOD_RES (29), (29): Xaa is C or S
ELNAISMLYFDENEKVVLKKYRDMVVEGXG

SEQ ID NO: 46372 - protein, 28 aa, Artificial Sequence
  Cyclic GFR-binding peptide
  MOD_RES (27), (27): Xaa is C or S
SPISVLYKDDSSNVILKYHYNMVVRSXG

SEQ ID NO: 46373 - protein, 34 aa, Artificial Sequence
  Cyclic GFR-binding peptide
  MOD_RES (6), (7): Xaa is C or S
SIPKAXXVPTELSATSMLYYDEYDKVVLRKHREM

SEQ ID NO: 46374 - protein, 32 aa, Artificial Sequence
  Cyclic GFR-binding peptide
  MOD_RES (5), (6): Xaa is C or S
VPKAXXAPTKLSAISVLYLDSSNNVILKNYQN

SEQ ID NO: 46375 - protein, 37 aa, Artificial Sequence; identical to SEQ ID NO: 7225
  Cyclic GFR-binding peptide
  MOD_RES (2), (3), (34), (36): Xaa is C or S

SEQ ID NO: 46376 - protein, 31 aa, Artificial Sequence
  Cyclic GFR-binding peptide
  MOD_RES (1), (2): Xaa is C or S
XXAPTQLSATSVLYYDDSSNVILRKHRNMVV

SEQ ID NO: 46377 - protein, 35 aa, Artificial Sequence; identical to SEQ ID NO: 7227
  Cyclic GFR-binding peptide
  MOD_RES (1), (2), (33), (35): Xaa is C or S

SEQ ID NO: 46378 - protein, 30 aa, Artificial Sequence
  Cyclic GFR-binding peptide
  MOD_RES (29), (29): Xaa is C or S
QDLSPISILYKVGRTPKVLKYHYMVVKSXK

SEQ ID NO: 46379 - protein, 36 aa, Artificial Sequence; identical to SEQ ID NO: 7229
  Cyclic GFR-binding peptide
  MOD_RES (1), (33), (35): Xaa is C or S

SEQ ID NO: 46380 - protein, 38 aa, Artificial Sequence; identical to SEQ ID NO: 7230
  Cyclic GFR-binding peptide
  MOD_RES (5), (6), (38): Xaa is C or S

SEQ ID NO: 46381 - protein, 36 aa, Artificial Sequence
  Cyclic GFR-binding peptide
  MOD_RES (4), (4): Xaa is C or S
NVQXRPTQVQLNAISVLYFEIVRKKPIFLKKYRTLE

SEQ ID NO: 46382 - protein, 30 aa, Artificial Sequence
  Cyclic GFR-binding peptide
  MOD_RES (29), (29): Xaa is C or S
LSAISVLYLDDMGVPTLKNYQEGMSVAEXG

SEQ ID NO: 46383 - protein, 29 aa, Artificial Sequence
  Cyclic GFR-binding peptide
  MOD_RES (28), (28): Xaa is C or S
LSPISVLYKDDSSNVILKYHYNMVVRSXG

SEQ ID NO: 46384 - protein, 29 aa, Artificial Sequence
  Cyclic GFR-binding peptide
  MOD_RES (26), (28): Xaa is C or S
SPISILYKVGRTPKVLKYHYMVVKSXKXS

SEQ ID NO: 46385 - protein, 25 aa, Artificial Sequence
  Cyclic GFR-binding peptide
TKLSPISVLYKDDSSNVILKYHYNM

SEQ ID NO: 46386 - protein, 29 aa, Artificial Sequence
  Cyclic GFR-binding peptide
  MOD_RES (26), (28): Xaa is C or S
NAISILYFVGRKPKVLKKYRMIVRSXKXS

SEQ ID NO: 46387 - protein, 30 aa, Artificial Sequence; identical to SEQ ID NO: 794
  Cyclic GFR-binding peptide

SEQ ID NO: 46388 - protein, 29 aa, Artificial Sequence
  Cyclic GFR-binding peptide
  MOD_RES (1), (1): Xaa is C or S
XAPTKLSAISVLYLDSSNNVILKNYQNMV

SEQ ID NO: 46389 - protein, 23 aa, Artificial Sequence
  Cyclic GFR-binding peptide
KLSPISVLYKDDSSNVILKYHYN

SEQ ID NO: 46390 - protein, 37 aa, Artificial Sequence; identical to SEQ ID NO: 7234
  Cyclic GFR-binding peptide
  MOD_RES (2), (3), (35), (37): Xaa is C or S

SEQ ID NO: 46391 - protein, 26 aa, Artificial Sequence
  Cyclic GFR-binding peptide
SPISVLYKEIVRKKPIFLKYHYTLED

SEQ ID NO: 46392 - protein, 33 aa, Artificial Sequence
  Cyclic GFR-binding peptide
  MOD_RES (4), (5): Xaa is C or S
GKAXXVPTKLSATSVLYYDDMGVPTLRKHREGM

SEQ ID NO: 46393 - protein, 38 aa, Artificial Sequence; identical to SEQ ID NO: 7239
  Cyclic GFR-binding peptide
  MOD_RES (3), (4), (37): Xaa is C or S

SEQ ID NO: 46394 - protein, 31 aa, Artificial Sequence; identical to SEQ ID NO: 7242
  Cyclic GFR-binding peptide
  MOD_RES (1), (1): Xaa is C or S

SEQ ID NO: 46395 - protein, 33 aa, Artificial Sequence
  Cyclic GFR-binding peptide
  MOD_RES (4), (5): Xaa is C or S
PKAXXVPTELSATSMLYYDEYDKVVLRKHREMV

SEQ ID NO: 46396 - protein, 38 aa, Artificial Sequence; identical to SEQ ID NO: 7243
  Cyclic GFR-binding peptide
  MOD_RES (6), (38): Xaa is C or S

SEQ ID NO: 46397 - protein, 31 aa, Artificial Sequence
  Cyclic GFR-binding peptide
  MOD_RES (3), (4): Xaa is C or S
KAXXVPTELSPISMLYKDEYDKVVLKYHYEM

SEQ ID NO: 46398 - protein, 27 aa, Artificial Sequence
  Cyclic GFR-binding peptide
ALSATSILYYVGRKPKVLRKHRMIVRS

SEQ ID NO: 46399 - protein, 35 aa, Artificial Sequence; identical to SEQ ID NO: 7244
  Cyclic GFR-binding peptide
  MOD_RES (1), (32), (34): Xaa is C or S

SEQ ID NO: 46400 - protein, 30 aa, Artificial Sequence
  Cyclic GFR-binding peptide
  MOD_RES (30), (30): Xaa is C or S
SATSVLYYEIVRKKPIFLRKHRTLEDHLAX

SEQ ID NO: 46401 - protein, 29 aa, Artificial Sequence
  Cyclic GFR-binding peptide
  MOD_RES (3), (4): Xaa is C or S
SPXXVPQDLNAISILYFVGRTPKVLKKYR

SEQ ID NO: 46402 - protein, 21 aa, Artificial Sequence
  Cyclic GFR-binding peptide
LSATSILYYIGKTPKILRKHR

SEQ ID NO: 46403 - protein, 35 aa, Artificial Sequence; identical to SEQ ID NO: 7245
  Cyclic GFR-binding peptide
  MOD_RES (1), (33), (35): Xaa is C or S

SEQ ID NO: 46404 - protein, 35 aa, Artificial Sequence; identical to SEQ ID NO: 7246
  Cyclic GFR-binding peptide
  MOD_RES (1), (34): Xaa is C or S

SEQ ID NO: 46405 - protein, 37 aa, Artificial Sequence; identical to SEQ ID NO: 7247
  Cyclic GFR-binding peptide
  MOD_RES (6), (7): Xaa is C or S

SEQ ID NO: 46406 - protein, 29 aa, Artificial Sequence
  Cyclic GFR-binding peptide
  MOD_RES (2), (2): Xaa is C or S
TXAPTKLSAISVLYLDDSSNVILKNYQNM

SEQ ID NO: 46407 - protein, 29 aa, Artificial Sequence
  Cyclic GFR-binding peptide
  MOD_RES (2), (3): Xaa is C or S
AXXAPTKLSPISVLYKDSSNNVILKYHYN

SEQ ID NO: 46408 - protein, 32 aa, Artificial Sequence
  Cyclic GFR-binding peptide
  MOD_RES (29), (31): Xaa is C or S
KLSATSVLYYDDSSNVILRKHRNMVVRSXGXH

SEQ ID NO: 46409 - protein, 27 aa, Artificial Sequence
  Cyclic GFR-binding peptide
PTKLSAISVLYLDDMGVPTLKNYQEGM

SEQ ID NO: 46410 - protein, 27 aa, Artificial Sequence
  Cyclic GFR-binding peptide
  MOD_RES (27), (27): Xaa is C or S
LNAISILYFVGRTPKVLKKYRMVVKSX

SEQ ID NO: 46411 - protein, 22 aa, Artificial Sequence
  Cyclic GFR-binding peptide
LSAISVLYLDDSSNVILKNYQN

SEQ ID NO: 46412 - protein, 26 aa, Artificial Sequence
  Cyclic GFR-binding peptide
ELSATSMLYYDEYDKVVLRKHREMVV

SEQ ID NO: 46413 - protein, 41 aa, Artificial Sequence; identical to SEQ ID NO: 7248
  Cyclic GFR-binding peptide
  MOD_RES (4), (41): Xaa is C or S

SEQ ID NO: 46414 - protein, 28 aa, Artificial Sequence
  Cyclic GFR-binding peptide
VPTELNAISMLYFDENEKVVLKKYRDMV

SEQ ID NO: 46415 - protein, 41 aa, Artificial Sequence; identical to SEQ ID NO: 7249
  Cyclic GFR-binding peptide
  MOD_RES (5), (6), (38), (40): Xaa is C or S

SEQ ID NO: 46416 - protein, 29 aa, Artificial Sequence
  Cyclic GFR-binding peptide
  MOD_RES (1), (1): Xaa is C or S
XVPQDLSPISILYKVGRTPKVLKYHYMVV

SEQ ID NO: 46417 - protein, 26 aa, Artificial Sequence
  Cyclic GFR-binding peptide
  MOD_RES (26), (26): Xaa is C or S
SPISILYKVGRTPKVLKYHYMVVKSX

SEQ ID NO: 46418 - protein, 27 aa, Artificial Sequence
  Cyclic GFR-binding peptide
LSATSVLYYEIVRKKPIFLRKHRTLED

SEQ ID NO: 46419 - protein, 27 aa, Artificial Sequence
  Cyclic GFR-binding peptide
  MOD_RES (26), (26): Xaa is C or S
SPISILYKIGKTPKILKYHYMIVKSXK

SEQ ID NO: 46420 - protein, 24 aa, Artificial Sequence
  Cyclic GFR-binding peptide
LNAISILYFVGRKPKVLKKYRMIV

SEQ ID NO: 46421 - protein, 29 aa, Artificial Sequence
  Cyclic GFR-binding peptide
  MOD_RES (2), (3): Xaa is C or S
AXXVPTELSATSMLYYDEYDKVVLRKHRE

SEQ ID NO: 46422 - protein, 37 aa, Artificial Sequence; identical to SEQ ID NO: 7251
  Cyclic GFR-binding peptide
  MOD_RES (2), (3), (34), (36): Xaa is C or S

SEQ ID NO: 46423 - protein, 44 aa, Artificial Sequence; identical to SEQ ID NO: 7252
  Cyclic GFR-binding peptide
  MOD_RES (4), (41), (43): Xaa is C or S

SEQ ID NO: 46424 - protein, 29 aa, Artificial Sequence
  Cyclic GFR-binding peptide
  MOD_RES (1), (1): Xaa is C or S
XAPTKLSAISVLYLDDSSNVILKNYQNMV

SEQ ID NO: 46425 - protein, 31 aa, Artificial Sequence
  Cyclic GFR-binding peptide
  MOD_RES (30), (30): Xaa is C or S
KLSATSVLYYDDMGVPTLRKHREGMSVAEXG

SEQ ID NO: 46426 - protein, 27 aa, Artificial Sequence
  Cyclic GFR-binding peptide
QDLNAISILYFVGRTPKVLKKYRMVVK

SEQ ID NO: 46427 - protein, 29 aa, Artificial Sequence
  Cyclic GFR-binding peptide
PTELSATSMLYYDEYDKVVLRKHREMVVE

SEQ ID NO: 46428 - protein, 34 aa, Artificial Sequence; identical to SEQ ID NO: 7256
  Cyclic GFR-binding peptide
  MOD_RES (1), (32), (34): Xaa is C or S

SEQ ID NO: 46429 - protein, 36 aa, Artificial Sequence; identical to SEQ ID NO: 7257
  Cyclic GFR-binding peptide
  MOD_RES (3), (4), (35): Xaa is C or S

SEQ ID NO: 46430 - protein, 35 aa, Artificial Sequence
  Cyclic GFR-binding peptide
  MOD_RES (5), (6): Xaa is C or S
IPKAXXVPTELNAISMLYFDEYDKVVLKKYREMVV

SEQ ID NO: 46431 - protein, 27 aa, Artificial Sequence
  Cyclic GFR-binding peptide
  MOD_RES (26), (26): Xaa is C or S
SPISILYKVGRKPKVLKYHYMIVRSXK

SEQ ID NO: 46432 - protein, 36 aa, Artificial Sequence; identical to SEQ ID NO: 7258
  Cyclic GFR-binding peptide
  MOD_RES (1), (2), (35): Xaa is C or S

SEQ ID NO: 46433 - protein, 34 aa, Artificial Sequence
  Cyclic GFR-binding peptide
  MOD_RES (6), (6): Xaa is C or S
VTKPTXAPTKLSAISVLYLDDSSNVILKNYQNMV

SEQ ID NO: 46434 - protein, 30 aa, Artificial Sequence
  Cyclic GFR-binding peptide
  MOD_RES (3), (4): Xaa is C or S
SPXXVPQDLSAISILYLVGRTPKVLKNYQM

SEQ ID NO: 46435 - protein, 32 aa, Artificial Sequence
  Cyclic GFR-binding peptide
  MOD_RES (6), (7): Xaa is C or S
AVPKAXXAPTKLNAISVLYFDSSNNVILKKYR

SEQ ID NO: 46436 - protein, 27 aa, Artificial Sequence
  Cyclic GFR-binding peptide
  MOD_RES (1), (2): Xaa is C or S
XXAPTQLSATSVLYYDDSSNVILRKHR

SEQ ID NO: 46437 - protein, 34 aa, Artificial Sequence
  Cyclic GFR-binding peptide
  MOD_RES (5), (5): Xaa is C or S
RNVQXRPTQVQLNAISVLYFEIVRKKPIFLKKYR

SEQ ID NO: 46438 - protein, 35 aa, Artificial Sequence; identical to SEQ ID NO: 7261
  Cyclic GFR-binding peptide

SEQ ID NO: 46439 - protein, 42 aa, Artificial Sequence; identical to SEQ ID NO: 7262
  Cyclic GFR-binding peptide
  MOD_RES (5), (42): Xaa is C or S

SEQ ID NO: 46440 - protein, 34 aa, Artificial Sequence; identical to SEQ ID NO: 7264
  Cyclic GFR-binding peptide
  MOD_RES (2), (3), (34): Xaa is C or S

SEQ ID NO: 46441 - protein, 29 aa, Artificial Sequence
  Cyclic GFR-binding peptide
TELSPISMLYKDENEKVVLKYHYDMVVEG

SEQ ID NO: 46442 - protein, 28 aa, Artificial Sequence
  Cyclic GFR-binding peptide
  MOD_RES (2), (3): Xaa is C or S
AXXVPTELNAISMLYFDENEKVVLKKYR

SEQ ID NO: 46443 - protein, 31 aa, Artificial Sequence
  Cyclic GFR-binding peptide
  MOD_RES (3), (4): Xaa is C or S
KAXXVPTELSATSMLYYDEYDKVVLRKHREM

SEQ ID NO: 46444 - protein, 27 aa, Artificial Sequence
  Cyclic GFR-binding peptide
  MOD_RES (1), (2): Xaa is C or S
XXAPTKLSPISVLYKDSSNNVILKYHY

SEQ ID NO: 46445 - protein, 42 aa, Artificial Sequence; identical to SEQ ID NO: 7266
  Cyclic GFR-binding peptide
  MOD_RES (5), (6), (39), (41): Xaa is C or S

SEQ ID NO: 46446 - protein, 29 aa, Artificial Sequence
  Cyclic GFR-binding peptide
  MOD_RES (2), (3): Xaa is C or S
AXXVPTKLNAISVLYFDDMGVPTLKKYRE

SEQ ID NO: 46447 - protein, 32 aa, Artificial Sequence
  Cyclic GFR-binding peptide
  MOD_RES (4), (5): Xaa is C or S
PKPXXAPTQLSPISVLYKDDSSNVILKYHYNM

SEQ ID NO: 46448 - protein, 39 aa, Artificial Sequence; identical to SEQ ID NO: 7270
  Cyclic GFR-binding peptide
  MOD_RES (7), (39): Xaa is C or S

SEQ ID NO: 46449 - protein, 25 aa, Artificial Sequence
  Cyclic GFR-binding peptide
LSAISILYLVGRKPKVLKNYQMIVR

SEQ ID NO: 46450 - protein, 37 aa, Artificial Sequence; identical to SEQ ID NO: 7271
  Cyclic GFR-binding peptide
  MOD_RES (2), (34), (36): Xaa is C or S

SEQ ID NO: 46451 - protein, 30 aa, Artificial Sequence
  Cyclic GFR-binding peptide
  MOD_RES (28), (30): Xaa is C or S
ALNAISILYFVGRKPKVLKKYRMIVRSXKX

SEQ ID NO: 46452 - protein, 34 aa, Artificial Sequence
  Cyclic GFR-binding peptide
  MOD_RES (34), (34): Xaa is C or S
QVQLSPISVLYKEIVRKKPIFLKYHYTLEDHLAX

SEQ ID NO: 46453 - protein, 27 aa, Artificial Sequence
  Cyclic GFR-binding peptide
LSPISMLYKDENEKVVLKYHYDMVVEG

SEQ ID NO: 46454 - protein, 29 aa, Artificial Sequence
  Cyclic GFR-binding peptide
  MOD_RES (1), (1): Xaa is C or S
XAPTKLSATSVLYYDDSSNVILRKHRNMV

SEQ ID NO: 46455 - protein, 33 aa, Artificial Sequence
  Cyclic GFR-binding peptide
  MOD_RES (6), (7): Xaa is C or S
ASASPXXVSQDLSAISILYLIGKTPKILKNYQM

SEQ ID NO: 46456 - protein, 33 aa, Artificial Sequence; identical to SEQ ID NO: 7273
  Cyclic GFR-binding peptide
  MOD_RES (3), (3): Xaa is C or S

SEQ ID NO: 46457 - protein, 32 aa, Artificial Sequence
  Cyclic GFR-binding peptide
  MOD_RES (4), (5): Xaa is C or S
PKPXXAPTQLSATSVLYYDDSSNVILRKHRNM

SEQ ID NO: 46458 - protein, 22 aa, Artificial Sequence
  Cyclic GFR-binding peptide
NAISILYFVGRTPKVLKKYRMV

SEQ ID NO: 46459 - protein, 30 aa, Artificial Sequence
  Cyclic GFR-binding peptide
  MOD_RES (3), (4): Xaa is C or S
KPXXAPTQLSPISVLYKDDSSNVILKYHYN

SEQ ID NO: 46460 - protein, 30 aa, Artificial Sequence
  Cyclic GFR-binding peptide
  MOD_RES (4), (5): Xaa is C or S
AAPXXVPQALSAISILYLVGRKPKVLKNYQ

SEQ ID NO: 46461 - protein, 37 aa, Artificial Sequence
  Cyclic GFR-binding peptide
  MOD_RES (5), (5): Xaa is C or S
RNVQXRPTQVQLSATSVLYYEIVRKKPIFLRKHRTLE

SEQ ID NO: 46462 - protein, 31 aa, Artificial Sequence
  Cyclic GFR-binding peptide
  MOD_RES (2), (3): Xaa is C or S
AXXAPTKLSAISVLYLDSSNNVILKNYQNMV

SEQ ID NO: 46463 - protein, 39 aa, Artificial Sequence; identical to SEQ ID NO: 7275
  Cyclic GFR-binding peptide
  MOD_RES (6), (7), (38): Xaa is C or S

SEQ ID NO: 46464 - protein, 35 aa, Artificial Sequence; identical to SEQ ID NO: 7276
  Cyclic GFR-binding peptide
  MOD_RES (1), (2), (33), (35): Xaa is C or S

SEQ ID NO: 46465 - protein, 28 aa, Artificial Sequence
  Cyclic GFR-binding peptide
TQVQLNAISVLYFEIVRKKPIFLKKYRT

SEQ ID NO: 46466 - protein, 29 aa, Artificial Sequence
  Cyclic GFR-binding peptide
SAISMLYLDENEKVVLKNYQAAAAAAAAA

SEQ ID NO: 46467 - protein, 30 aa, Artificial Sequence
  Cyclic GFR-binding peptide
RPTQVQLNAISVLYFEIVRKKPIFLKKYRT

SEQ ID NO: 46468 - protein, 31 aa, Artificial Sequence
  Cyclic GFR-binding peptide
  MOD_RES (30), (30): Xaa is C or S
SAISVLYLEIVRKKPIFLKNYQTLEDHLAXK

SEQ ID NO: 46469 - protein, 31 aa, Artificial Sequence
  Cyclic GFR-binding peptide
  MOD_RES (28), (30): Xaa is C or S
LSAISVLYLDDSSNVILKNYQNMVVRSXGXH

SEQ ID NO: 46470 - protein, 40 aa, Artificial Sequence; identical to SEQ ID NO: 7283
  Cyclic GFR-binding peptide
  MOD_RES (4), (5), (37), (39): Xaa is C or S

SEQ ID NO: 46471 - protein, 31 aa, Artificial Sequence
  Cyclic GFR-binding peptide
  MOD_RES (3), (4): Xaa is C or S
SPXXVSQDLNAISILYFIGKTPKILKKYRMI

SEQ ID NO: 46472 - protein, 32 aa, Artificial Sequence
  Cyclic GFR-binding peptide
VQLNAISVLYFEIVRKKPIFLKKYRTLEDHLA

SEQ ID NO: 46473 - protein, 26 aa, Artificial Sequence
  Cyclic GFR-binding peptide
DLSAISILYLVGRTPKVLKNYQMVVK

SEQ ID NO: 46474 - protein, 26 aa, Artificial Sequence
  Cyclic GFR-binding peptide
QDLSATSILYYVGRTPKVLRKHRMVV

SEQ ID NO: 46475 - protein, 26 aa, Artificial Sequence
  Cyclic GFR-binding peptide
VQLSAISVLYLEIVRKKPIFLKNYQT

SEQ ID NO: 46476 - protein, 31 aa, Artificial Sequence
  Cyclic GFR-binding peptide
  MOD_RES (1), (2): Xaa is C or S
XXVSQDLSATSILYYIGKTPKILRKHRMIVK

SEQ ID NO: 46477 - protein, 31 aa, Artificial Sequence
  Cyclic GFR-binding peptide
  MOD_RES (30), (30): Xaa is C or S
TKLSAISVLYLDDSSNVILKNYQNMVVRSXG

SEQ ID NO: 46478 - protein, 33 aa, Artificial Sequence; identical to SEQ ID NO: 7286
  Cyclic GFR-binding peptide
  MOD_RES (1), (32): Xaa is C or S

SEQ ID NO: 46479 - protein, 26 aa, Artificial Sequence
  Cyclic GFR-binding peptide
QLNAISVLYFEIVRKKPIFLKKYRTL

SEQ ID NO: 46480 - protein, 30 aa, Artificial Sequence
  Cyclic GFR-binding peptide
  MOD_RES (27), (29): Xaa is C or S
LNAISILYFVGRTPKVLKKYRMVVKSXKXS

SEQ ID NO: 46481 - protein, 33 aa, Artificial Sequence
  Cyclic GFR-binding peptide
  MOD_RES (5), (6): Xaa is C or S
SASPXXVPQDLSPISILYKVGRTPKVLKYHYMV

SEQ ID NO: 46482 - protein, 28 aa, Artificial Sequence
  Cyclic GFR-binding peptide
TELSATSMLYYDEYDKVVLRKHREMVVE

SEQ ID NO: 46483 - protein, 33 aa, Artificial Sequence; identical to SEQ ID NO: 7288
  Cyclic GFR-binding peptide
  MOD_RES (1), (32): Xaa is C or S

SEQ ID NO: 46484 - protein, 36 aa, Artificial Sequence; identical to SEQ ID NO: 7290
  Cyclic GFR-binding peptide
  MOD_RES (3), (4), (35): Xaa is C or S

SEQ ID NO: 46485 - protein, 26 aa, Artificial Sequence
  Cyclic GFR-binding peptide
KLSAISVLYLDSSNNVILKNYQNMVV

SEQ ID NO: 46486 - protein, 40 aa, Artificial Sequence; identical to SEQ ID NO: 7291
  Cyclic GFR-binding peptide
  MOD_RES (7), (39): Xaa is C or S

SEQ ID NO: 46487 - protein, 29 aa, Artificial Sequence
  Cyclic GFR-binding peptide
  MOD_RES (29), (29): Xaa is C or S
ELSATSMLYYDENEKVVLRKHRDMVVEGX

SEQ ID NO: 46488 - protein, 24 aa, Artificial Sequence
  Cyclic GFR-binding peptide
TELSPISMLYKDEYDKVVLKYHYE

SEQ ID NO: 46489 - protein, 20 aa, Artificial Sequence
  Cyclic GFR-binding peptide
SATSILYYVGRKPKVLRKHR

SEQ ID NO: 46490 - protein, 36 aa, Artificial Sequence; identical to SEQ ID NO: 7294
  Cyclic GFR-binding peptide
  MOD_RES (1), (2), (33), (35): Xaa is C or S

SEQ ID NO: 46491 - protein, 40 aa, Artificial Sequence; identical to SEQ ID NO: 7295
  Cyclic GFR-binding peptide
  MOD_RES (4), (5), (37), (39): Xaa is C or S

SEQ ID NO: 46492 - protein, 40 aa, Artificial Sequence; identical to SEQ ID NO: 7296
  Cyclic GFR-binding peptide
  MOD_RES (5), (6), (39): Xaa is C or S

SEQ ID NO: 46493 - protein, 32 aa, Artificial Sequence; identical to SEQ ID NO: 7297
  Cyclic GFR-binding peptide
  MOD_RES (1), (2): Xaa is C or S

SEQ ID NO: 46494 - protein, 27 aa, Artificial Sequence
  Cyclic GFR-binding peptide
  MOD_RES (1), (1): Xaa is C or S
XVPTELSATSMLYYDEYDKVVLRKHRE

SEQ ID NO: 46495 - protein, 27 aa, Artificial Sequence
  Cyclic GFR-binding peptide
VQLNAISVLYFEIVRKKPIFLKKYRTL

SEQ ID NO: 46496 - protein, 36 aa, Artificial Sequence; identical to SEQ ID NO: 7301
  Cyclic GFR-binding peptide
  MOD_RES (2), (3), (36): Xaa is C or S

SEQ ID NO: 46497 - protein, 32 aa, Artificial Sequence
  Cyclic GFR-binding peptide
  MOD_RES (29), (31): Xaa is C or S
QDLSATSILYYIGKTPKILRKHRMIVKSXKXS

SEQ ID NO: 46498 - protein, 32 aa, Artificial Sequence; identical to SEQ ID NO: 7302
  Cyclic GFR-binding peptide
  MOD_RES (32), (32): Xaa is C or S

SEQ ID NO: 46499 - protein, 30 aa, Artificial Sequence; identical to SEQ ID NO: 858
  Cyclic GFR-binding peptide

SEQ ID NO: 46500 - protein, 39 aa, Artificial Sequence; identical to SEQ ID NO: 7303
  Cyclic GFR-binding peptide
  MOD_RES (6), (7), (38): Xaa is C or S

SEQ ID NO: 46501 - protein, 31 aa, Artificial Sequence
  Cyclic GFR-binding peptide
  MOD_RES (1), (2): Xaa is C or S
XXAPTKLNAISVLYFDSSNNVILKKYRNMVV

SEQ ID NO: 46502 - protein, 23 aa, Artificial Sequence
  Cyclic GFR-binding peptide
QALNAISILYFVGRKPKVLKKYR

SEQ ID NO: 46503 - protein, 38 aa, Artificial Sequence; identical to SEQ ID NO: 7304
  Cyclic GFR-binding peptide
  MOD_RES (3), (4), (36), (38): Xaa is C or S

SEQ ID NO: 46504 - protein, 33 aa, Artificial Sequence
  Cyclic GFR-binding peptide
  MOD_RES (4), (5): Xaa is C or S
GKAXXVPTKLSAISVLYLDDMGVPTLKNYQEGM

SEQ ID NO: 46505 - protein, 33 aa, Artificial Sequence
  Cyclic GFR-binding peptide
  MOD_RES (5), (6): Xaa is C or S
VPKAXXAPTKLSAISVLYLDSSNNVILKNYQNM

SEQ ID NO: 46506 - protein, 36 aa, Artificial Sequence; identical to SEQ ID NO: 7306
  Cyclic GFR-binding peptide
  MOD_RES (1), (2), (34), (36): Xaa is C or S

SEQ ID NO: 46507 - protein, 28 aa, Artificial Sequence
  Cyclic GFR-binding peptide
  MOD_RES (2), (3): Xaa is C or S
PXXVSQDLSATSILYYIGKTPKILRKHR

SEQ ID NO: 46508 - protein, 33 aa, Artificial Sequence
  Cyclic GFR-binding peptide
  MOD_RES (31), (33): Xaa is C or S
PTKLSPISVLYKDDSSNVILKYHYNMVVRSXGX

SEQ ID NO: 46509 - protein, 32 aa, Artificial Sequence
  Cyclic GFR-binding peptide
  MOD_RES (30), (32): Xaa is C or S
TELSATSMLYYDEYDKVVLRKHREMVVEGXGX

SEQ ID NO: 46510 - protein, 34 aa, Artificial Sequence; identical to SEQ ID NO: 7310
  Cyclic GFR-binding peptide
  MOD_RES (1), (33): Xaa is C or S

SEQ ID NO: 46511 - protein, 38 aa, Artificial Sequence; identical to SEQ ID NO: 7311
  Cyclic GFR-binding peptide
  MOD_RES (4), (5), (37): Xaa is C or S

SEQ ID NO: 46512 - protein, 37 aa, Artificial Sequence; identical to SEQ ID NO: 7312
  Cyclic GFR-binding peptide
  MOD_RES (6), (7): Xaa is C or S

SEQ ID NO: 46513 - protein, 26 aa, Artificial Sequence
  Cyclic GFR-binding peptide
QDLSAISILYLVGRTPKVLKNYQMVV

SEQ ID NO: 46514 - protein, 33 aa, Artificial Sequence; identical to SEQ ID NO: 7313
  Cyclic GFR-binding peptide
  MOD_RES (2), (3): Xaa is C or S

SEQ ID NO: 46515 - protein, 33 aa, Artificial Sequence
  Cyclic GFR-binding peptide
  MOD_RES (5), (6): Xaa is C or S
VGKAXXVPTKLSAISVLYLDDMGVPTLKNYQEG

SEQ ID NO: 46516 - protein, 35 aa, Artificial Sequence; identical to SEQ ID NO: 7314
  Cyclic GFR-binding peptide
  MOD_RES (4), (5): Xaa is C or S

SEQ ID NO: 46517 - protein, 25 aa, Artificial Sequence
  Cyclic GFR-binding peptide
TKLSATSVLYYDDSSNVILRKHRNM

SEQ ID NO: 46518 - protein, 21 aa, Artificial Sequence
  Cyclic GFR-binding peptide
LSATSMLYYDEYDKVVLRKHR

SEQ ID NO: 46519 - protein, 28 aa, Artificial Sequence
  Cyclic GFR-binding peptide
  MOD_RES (27), (27): Xaa is C or S
LSATSILYYVGRKPKVLRKHRMIVRSXK

SEQ ID NO: 46520 - protein, 29 aa, Artificial Sequence
  Cyclic GFR-binding peptide
SATSVLYYEIVRKKPIFLRKHRTLEDHLA

SEQ ID NO: 46521 - protein, 25 aa, Artificial Sequence
  Cyclic GFR-binding peptide
VPQALSAISILYLVGRKPKVLKNYQ

SEQ ID NO: 46522 - protein, 22 aa, Artificial Sequence
  Cyclic GFR-binding peptide
ALSAISILYLVGRKPKVLKNYQ

SEQ ID NO: 46523 - protein, 34 aa, Artificial Sequence
  Cyclic GFR-binding peptide
  MOD_RES (6), (7): Xaa is C or S
SIPKAXXVPTELSPISMLYKDEYDKVVLKYHYEM

SEQ ID NO: 46524 - protein, 30 aa, Artificial Sequence
  Cyclic GFR-binding peptide
PTKLSPISVLYKDSSNNVILKYHYNMVVKA

SEQ ID NO: 46525 - protein, 24 aa, Artificial Sequence
  Cyclic GFR-binding peptide
KLSATSVLYYDDMGVPTLRKHREG

SEQ ID NO: 46526 - protein, 37 aa, Artificial Sequence; identical to SEQ ID NO: 7316
  Cyclic GFR-binding peptide
  MOD_RES (2), (3), (34), (36): Xaa is C or S

SEQ ID NO: 46527 - protein, 27 aa, Artificial Sequence
  Cyclic GFR-binding peptide
  MOD_RES (1), (1): Xaa is C or S
XVPTELSPISMLYKDENEKVVLKYHYD

SEQ ID NO: 46528 - protein, 33 aa, Artificial Sequence
  Cyclic GFR-binding peptide
  MOD_RES (5), (6): Xaa is C or S
IPKAXXVPTELSATSMLYYDENEKVVLRKHRDM

SEQ ID NO: 46529 - protein, 39 aa, Artificial Sequence; identical to SEQ ID NO: 7321
  Cyclic GFR-binding peptide
  MOD_RES (1), (38): Xaa is C or S

SEQ ID NO: 46530 - protein, 22 aa, Artificial Sequence
  Cyclic GFR-binding peptide
LSPISMLYKDEYDKVVLKYHYE

SEQ ID NO: 46531 - protein, 28 aa, Artificial Sequence
  Cyclic GFR-binding peptide
  MOD_RES (26), (28): Xaa is C or S
NAISILYFVGRKPKVLKKYRMIVRSXKX

SEQ ID NO: 46532 - protein, 25 aa, Artificial Sequence
  Cyclic GFR-binding peptide
ELSATSMLYYDEYDKVVLRKHREMV

SEQ ID NO: 46533 - protein, 30 aa, Artificial Sequence
  Cyclic GFR-binding peptide
  MOD_RES (2), (3): Xaa is C or S
AXXVPTELSPISMLYKDENEKVVLKYHYDM

SEQ ID NO: 46534 - protein, 36 aa, Artificial Sequence; identical to SEQ ID NO: 7323
  Cyclic GFR-binding peptide
  MOD_RES (4), (5): Xaa is C or S

SEQ ID NO: 46535 - protein, 39 aa, Artificial Sequence; identical to SEQ ID NO: 7324
  Cyclic GFR-binding peptide
  MOD_RES (6), (7), (38): Xaa is C or S

SEQ ID NO: 46536 - protein, 37 aa, Artificial Sequence; identical to SEQ ID NO: 7325
  Cyclic GFR-binding peptide
  MOD_RES (1), (1): Xaa is C or S

SEQ ID NO: 46537 - protein, 27 aa, Artificial Sequence
  Cyclic GFR-binding peptide
PTELSPISMLYKDEYDKVVLKYHYEMV

SEQ ID NO: 46538 - protein, 24 aa, Artificial Sequence
  Cyclic GFR-binding peptide
ALSAISILYLVGRKPKVLKNYQMI

SEQ ID NO: 46539 - protein, 26 aa, Artificial Sequence
  Cyclic GFR-binding peptide
QVQLSPISVLYKEIVRKKPIFLKYHY

SEQ ID NO: 46540 - protein, 31 aa, Artificial Sequence
  Cyclic GFR-binding peptide
  MOD_RES (30), (30): Xaa is C or S
SATSVLYYEIVRKKPIFLRKHRTLEDHLAXK

SEQ ID NO: 46541 - protein, 36 aa, Artificial Sequence; identical to SEQ ID NO: 7326
  Cyclic GFR-binding peptide
  MOD_RES (2), (3), (35): Xaa is C or S

SEQ ID NO: 46542 - protein, 28 aa, Artificial Sequence
  Cyclic GFR-binding peptide
SATSVLYYEIVRKKPIFLRKHRTLEDHL

SEQ ID NO: 46543 - protein, 36 aa, Artificial Sequence; identical to SEQ ID NO: 7328
  Cyclic GFR-binding peptide
  MOD_RES (4), (5), (36): Xaa is C or S

SEQ ID NO: 46544 - protein, 22 aa, Artificial Sequence
  Cyclic GFR-binding peptide
ALSATSILYYVGRKPKVLRKHR

SEQ ID NO: 46545 - protein, 31 aa, Artificial Sequence
  Cyclic GFR-binding peptide
  MOD_RES (3), (3): Xaa is C or S
PTXAPTKLSATSVLYYDDSSNVILRKHRNMV

SEQ ID NO: 46546 - protein, 32 aa, Artificial Sequence
  Cyclic GFR-binding peptide
  MOD_RES (5), (5): Xaa is C or S
TKPTXAPTKLSAISVLYLDDSSNVILKNYQNM

SEQ ID NO: 46547 - protein, 32 aa, Artificial Sequence
  Cyclic GFR-binding peptide
  MOD_RES (29), (31): Xaa is C or S
QDLSAISILYLIGKTPKILKNYQMIVKSXKXS

SEQ ID NO: 46548 - protein, 34 aa, Artificial Sequence
  Cyclic GFR-binding peptide
  MOD_RES (1), (1): Xaa is C or S
XRPTQVQLSPISVLYKEIVRKKPIFLKYHYTLED

SEQ ID NO: 46549 - protein, 35 aa, Artificial Sequence; identical to SEQ ID NO: 7332
  Cyclic GFR-binding peptide
  MOD_RES (1), (1): Xaa is C or S

SEQ ID NO: 46550 - protein, 34 aa, Artificial Sequence; identical to SEQ ID NO: 7334
  Cyclic GFR-binding peptide
  MOD_RES (2), (3), (34): Xaa is C or S

SEQ ID NO: 46551 - protein, 25 aa, Artificial Sequence
  Cyclic GFR-binding peptide
LSATSVLYYDDSSNVILRKHRNMVV

SEQ ID NO: 46552 - protein, 38 aa, Artificial Sequence; identical to SEQ ID NO: 7335
  Cyclic GFR-binding peptide
  MOD_RES (2), (2): Xaa is C or S

SEQ ID NO: 46553 - protein, 37 aa, Artificial Sequence; identical to SEQ ID NO: 7336
  Cyclic GFR-binding peptide
  MOD_RES (1), (2), (34), (36): Xaa is C or S

SEQ ID NO: 46554 - protein, 30 aa, Artificial Sequence
  Cyclic GFR-binding peptide
  MOD_RES (2), (3): Xaa is C or S
AXXVPTELSATSMLYYDENEKVVLRKHRDM

SEQ ID NO: 46555 - protein, 33 aa, Artificial Sequence; identical to SEQ ID NO: 7337
  Cyclic GFR-binding peptide
  MOD_RES (33), (33): Xaa is C or S

SEQ ID NO: 46556 - protein, 37 aa, Artificial Sequence; identical to SEQ ID NO: 7338
  Cyclic GFR-binding peptide
  MOD_RES (1), (2), (34), (36): Xaa is C or S

SEQ ID NO: 46557 - protein, 34 aa, Artificial Sequence
  Cyclic GFR-binding peptide
  MOD_RES (5), (6): Xaa is C or S
SASPXXVSQDLSPISILYKIGKTPKILKYHYMIV

SEQ ID NO: 46558 - protein, 34 aa, Artificial Sequence
  Cyclic GFR-binding peptide
  MOD_RES (31), (33): Xaa is C or S
PTELSATSMLYYDEYDKVVLRKHREMVVEGXGXR

SEQ ID NO: 46559 - protein, 32 aa, Artificial Sequence
  Cyclic GFR-binding peptide
  MOD_RES (5), (6): Xaa is C or S
VGKAXXVPTKLSAISVLYLDDMGVPTLKNYQE

SEQ ID NO: 46560 - protein, 32 aa, Artificial Sequence; identical to SEQ ID NO: 7343
  Cyclic GFR-binding peptide
  MOD_RES (1), (1): Xaa is C or S

SEQ ID NO: 46561 - protein, 35 aa, Artificial Sequence; identical to SEQ ID NO: 7342
  Cyclic GFR-binding peptide
  MOD_RES (4), (5): Xaa is C or S

SEQ ID NO: 46562 - protein, 25 aa, Artificial Sequence
  Cyclic GFR-binding peptide
TKLNAISVLYFDDMGVPTLKKYREG

SEQ ID NO: 46563 - protein, 40 aa, Artificial Sequence; identical to SEQ ID NO: 7344
  Cyclic GFR-binding peptide
  MOD_RES (5), (6), (38), (40): Xaa is C or S

SEQ ID NO: 46564 - protein, 35 aa, Artificial Sequence
  Cyclic GFR-binding peptide
  MOD_RES (5), (6): Xaa is C or S
SASPXXVPQDLSAISILYLVGRTPKVLKNYQMVVK

SEQ ID NO: 46565 - protein, 23 aa, Artificial Sequence
  Cyclic GFR-binding peptide
LSAISVLYLEIVRKKPIFLKNYQ

SEQ ID NO: 46566 - protein, 34 aa, Artificial Sequence
  Cyclic GFR-binding peptide
  MOD_RES (5), (5): Xaa is C or S
TKPTXAPTKLSPISVLYKDDSSNVILKYHYNMVV

SEQ ID NO: 46567 - protein, 24 aa, Artificial Sequence
  Cyclic GFR-binding peptide
DLSATSILYYVGRTPKVLRKHRMV

SEQ ID NO: 46568 - protein, 30 aa, Artificial Sequence
  Cyclic GFR-binding peptide
  MOD_RES (2), (3): Xaa is C or S
PXXAPTQLSAISVLYLDDSSNVILKNYQNM

SEQ ID NO: 46569 - protein, 32 aa, Artificial Sequence
  Cyclic GFR-binding peptide
  MOD_RES (31), (31): Xaa is C or S
LNAISVLYFEIVRKKPIFLKKYRTLEDHLAXK

SEQ ID NO: 46570 - protein, 27 aa, Artificial Sequence
  Cyclic GFR-binding peptide
  MOD_RES (27), (27): Xaa is C or S
SPISVLYKDSSNNVILKYHYNMVVKAX

SEQ ID NO: 46571 - protein, 27 aa, Artificial Sequence
  Cyclic GFR-binding peptide
  MOD_RES (1), (1): Xaa is C or S
XVPQALSAISILYLVGRKPKVLKNYQM

SEQ ID NO: 46572 - protein, 32 aa, Artificial Sequence
  Cyclic GFR-binding peptide
  MOD_RES (7), (7): Xaa is C or S
HVTKPTXAPTKLSATSVLYYDDSSNVILRKHR

SEQ ID NO: 46573 - protein, 24 aa, Artificial Sequence
  Cyclic GFR-binding peptide
PTKLSAISVLYLDSSNNVILKNYQ

SEQ ID NO: 46574 - protein, 38 aa, Artificial Sequence; identical to SEQ ID NO: 7345
  Cyclic GFR-binding peptide
  MOD_RES (2), (2): Xaa is C or S

SEQ ID NO: 46575 - protein, 30 aa, Artificial Sequence
  Cyclic GFR-binding peptide
  MOD_RES (27), (29): Xaa is C or S
SATSVLYYDDSSNVILRKHRNMVVRSXGXH

SEQ ID NO: 46576 - protein, 39 aa, Artificial Sequence; identical to SEQ ID NO: 7347
  Cyclic GFR-binding peptide
  MOD_RES (4), (5), (38): Xaa is C or S

SEQ ID NO: 46577 - protein, 29 aa, Artificial Sequence
  Cyclic GFR-binding peptide
  MOD_RES (28), (28): Xaa is C or S
LSATSMLYYDENEKVVLRKHRDMVVEGXG

SEQ ID NO: 46578 - protein, 24 aa, Artificial Sequence
  Cyclic GFR-binding peptide
DLSPISILYKVGRTPKVLKYHYMV

SEQ ID NO: 46579 - protein, 29 aa, Artificial Sequence
  Cyclic GFR-binding peptide
  MOD_RES (2), (3): Xaa is C or S
AXXVPTKLSATSVLYYDDMGVPTLRKHRE

SEQ ID NO: 46580 - protein, 29 aa, Artificial Sequence
  Cyclic GFR-binding peptide
PTQVQLNAISVLYFEIVRKKPIFLKKYRT

SEQ ID NO: 46581 - protein, 27 aa, Artificial Sequence
  Cyclic GFR-binding peptide
VQLSATSVLYYEIVRKKPIFLRKHRTL

SEQ ID NO: 46582 - protein, 31 aa, Artificial Sequence
  Cyclic GFR-binding peptide
  MOD_RES (4), (5): Xaa is C or S
PKAXXVPTELSPISMLYKDENEKVVLKYHYD

SEQ ID NO: 46583 - protein, 24 aa, Artificial Sequence
  Cyclic GFR-binding peptide
PTELSATSMLYYDEYDKVVLRKHR

SEQ ID NO: 46584 - protein, 31 aa, Artificial Sequence
  Cyclic GFR-binding peptide
  MOD_RES (31), (31): Xaa is C or S
PTELSATSMLYYDENEKVVLRKHRDMVVEGX

SEQ ID NO: 46585 - protein, 33 aa, Artificial Sequence
  Cyclic GFR-binding peptide
  MOD_RES (31), (33): Xaa is C or S
TKLSATSVLYYDDMGVPTLRKHREGMSVAEXGX

SEQ ID NO: 46586 - protein, 31 aa, Artificial Sequence
  Cyclic GFR-binding peptide
  MOD_RES (4), (5): Xaa is C or S
ASPXXVPQDLSPISILYKVGRTPKVLKYHYM

SEQ ID NO: 46587 - protein, 26 aa, Artificial Sequence
  Cyclic GFR-binding peptide
VPTKLNAISVLYFDDMGVPTLKKYRE

SEQ ID NO: 46588 - protein, 31 aa, Artificial Sequence
  Cyclic GFR-binding peptide
  MOD_RES (3), (3): Xaa is C or S
PTXAPTKLSPISVLYKDDSSNVILKYHYNMV

SEQ ID NO: 46589 - protein, 36 aa, Artificial Sequence; identical to SEQ ID NO: 7350
  Cyclic GFR-binding peptide
  MOD_RES (3), (35): Xaa is C or S

SEQ ID NO: 46590 - protein, 37 aa, Artificial Sequence; identical to SEQ ID NO: 7351
  Cyclic GFR-binding peptide
  MOD_RES (1), (1): Xaa is C or S

SEQ ID NO: 46591 - protein, 28 aa, Artificial Sequence
  Cyclic GFR-binding peptide
ELSATSMLYYDENEKVVLRKHRDMVVEG

SEQ ID NO: 46592 - protein, 29 aa, Artificial Sequence
  Cyclic GFR-binding peptide
VPTELSATSMLYYDEYDKVVLRKHREMVV

SEQ ID NO: 46593 - protein, 39 aa, Artificial Sequence; identical to SEQ ID NO: 7352
  Cyclic GFR-binding peptide
  MOD_RES (6), (7), (39): Xaa is C or S

SEQ ID NO: 46594 - protein, 29 aa, Artificial Sequence
  Cyclic GFR-binding peptide
QVQLNAISVLYFEIVRKKPIFLKKYRTLE

SEQ ID NO: 46595 - protein, 27 aa, Artificial Sequence
  Cyclic GFR-binding peptide
PTELSATSMLYYDEYDKVVLRKHREMV

SEQ ID NO: 46596 - protein, 39 aa, Artificial Sequence; identical to SEQ ID NO: 7353
  Cyclic GFR-binding peptide
  MOD_RES (3), (4), (37), (39): Xaa is C or S

SEQ ID NO: 46597 - protein, 39 aa, Artificial Sequence; identical to SEQ ID NO: 7354
  Cyclic GFR-binding peptide
  MOD_RES (4), (5), (36), (38): Xaa is C or S

SEQ ID NO: 46598 - protein, 33 aa, Artificial Sequence
  Cyclic GFR-binding peptide
  MOD_RES (5), (6): Xaa is C or S
IPKAXXVPTELSPISMLYKDENEKVVLKYHYDM

SEQ ID NO: 46599 - protein, 20 aa, Artificial Sequence
  Cyclic GFR-binding peptide
SAISVLYLDSSNNVILKNYQ

SEQ ID NO: 46600 - protein, 25 aa, Artificial Sequence
  Cyclic GFR-binding peptide
QLNAISVLYFEIVRKKPIFLKKYRT

SEQ ID NO: 46601 - protein, 27 aa, Artificial Sequence
  Cyclic GFR-binding peptide
LNAISVLYFDSSNNVILKKYRNMVVKA

SEQ ID NO: 46602 - protein, 33 aa, Artificial Sequence; identical to SEQ ID NO: 7362
  Cyclic GFR-binding peptide
  MOD_RES (1), (2): Xaa is C or S

SEQ ID NO: 46603 - protein, 33 aa, Artificial Sequence; identical to SEQ ID NO: 7363
  Cyclic GFR-binding peptide
  MOD_RES (31), (33): Xaa is C or S

SEQ ID NO: 46604 - protein, 30 aa, Artificial Sequence
  Cyclic GFR-binding peptide
  MOD_RES (29), (29): Xaa is C or S
QLSAISVLYLDDSSNVILKNYQNMVVRAXG

SEQ ID NO: 46605 - protein, 34 aa, Artificial Sequence; identical to SEQ ID NO: 7364
  Cyclic GFR-binding peptide

SEQ ID NO: 46606 - protein, 37 aa, Artificial Sequence; identical to SEQ ID NO: 7365
  Cyclic GFR-binding peptide
  MOD_RES (3), (3): Xaa is C or S

SEQ ID NO: 46607 - protein, 33 aa, Artificial Sequence; identical to SEQ ID NO: 7366
  Cyclic GFR-binding peptide
  MOD_RES (1), (2): Xaa is C or S

SEQ ID NO: 46608 - protein, 34 aa, Artificial Sequence
  Cyclic GFR-binding peptide
  MOD_RES (6), (7): Xaa is C or S
YVPKPXXAPTKLSAISVLYLDDSSNVILKNYQNM

SEQ ID NO: 46609 - protein, 28 aa, Artificial Sequence
  Cyclic GFR-binding peptide
VPQDLNAISILYFVGRTPKVLKKYRMVV

SEQ ID NO: 46610 - protein, 31 aa, Artificial Sequence
  Cyclic GFR-binding peptide
PTQVQLSPISVLYKEIVRKKPIFLKYHYTLE

SEQ ID NO: 46611 - protein, 35 aa, Artificial Sequence; identical to SEQ ID NO: 7368
  Cyclic GFR-binding peptide
  MOD_RES (2), (3), (34): Xaa is C or S

SEQ ID NO: 46612 - protein, 24 aa, Artificial Sequence
  Cyclic GFR-binding peptide
KLSAISVLYLDDSSNVILKNYQNM

SEQ ID NO: 46613 - protein, 33 aa, Artificial Sequence
  Cyclic GFR-binding peptide
  MOD_RES (6), (7): Xaa is C or S
ASASPXXVPQDLSAISILYLVGRTPKVLKNYQM

SEQ ID NO: 46614 - protein, 21 aa, Artificial Sequence
  Cyclic GFR-binding peptide
LSAISILYLIGKTPKILKNYQ

SEQ ID NO: 46615 - protein, 27 aa, Artificial Sequence
  Cyclic GFR-binding peptide
DLNAISILYFVGRTPKVLKKYRMVVKS

SEQ ID NO: 46616 - protein, 41 aa, Artificial Sequence; identical to SEQ ID NO: 7370
  Cyclic GFR-binding peptide
  MOD_RES (5), (6), (38), (40): Xaa is C or S

SEQ ID NO: 46617 - protein, 33 aa, Artificial Sequence; identical to SEQ ID NO: 7371
  Cyclic GFR-binding peptide
  MOD_RES (1), (33): Xaa is C or S

SEQ ID NO: 46618 - protein, 31 aa, Artificial Sequence
  Cyclic GFR-binding peptide
  MOD_RES (5), (6): Xaa is C or S
VPKPXXAPTQLSAISVLYLDDSSNVILKNYQ

SEQ ID NO: 46619 - protein, 29 aa, Artificial Sequence
  Cyclic GFR-binding peptide
  MOD_RES (27), (29): Xaa is C or S
LSPISILYKVGRKPKVLKYHYMIVRSXKX

SEQ ID NO: 46620 - protein, 38 aa, Artificial Sequence; identical to SEQ ID NO: 7373
  Cyclic GFR-binding peptide
  MOD_RES (4), (5), (36), (38): Xaa is C or S

SEQ ID NO: 46621 - protein, 34 aa, Artificial Sequence; identical to SEQ ID NO: 7374
  Cyclic GFR-binding peptide
  MOD_RES (32), (34): Xaa is C or S

SEQ ID NO: 46622 - protein, 28 aa, Artificial Sequence
  Cyclic GFR-binding peptide
VPQALSPISILYKVGRKPKVLKYHYMIV

SEQ ID NO: 46623 - protein, 30 aa, Artificial Sequence
  Cyclic GFR-binding peptide
  MOD_RES (27), (29): Xaa is C or S
LSPISILYKIGKTPKILKYHYMIVKSXKXS

SEQ ID NO: 46624 - protein, 25 aa, Artificial Sequence
  Cyclic GFR-binding peptide
QALNAISILYFVGRKPKVLKKYRMI

SEQ ID NO: 46625 - protein, 24 aa, Artificial Sequence
  Cyclic GFR-binding peptide
PTKLSPISVLYKDDSSNVILKYHY

SEQ ID NO: 46626 - protein, 32 aa, Artificial Sequence
  Cyclic GFR-binding peptide
  MOD_RES (30), (32): Xaa is C or S
PQDLSAISILYLVGRTPKVLKNYQMVVKSXKX

SEQ ID NO: 46627 - protein, 28 aa, Artificial Sequence
  Cyclic GFR-binding peptide
  MOD_RES (27), (27): Xaa is C or S
LSATSILYYIGKTPKILRKHRMIVKSXK

SEQ ID NO: 46628 - protein, 34 aa, Artificial Sequence; identical to SEQ ID NO: 7375
  Cyclic GFR-binding peptide
  MOD_RES (3), (4): Xaa is C or S

SEQ ID NO: 46629 - protein, 43 aa, Artificial Sequence; identical to SEQ ID NO: 7377
  Cyclic GFR-binding peptide
  MOD_RES (5), (42): Xaa is C or S

SEQ ID NO: 46630 - protein, 34 aa, Artificial Sequence; identical to SEQ ID NO: 7378
  Cyclic GFR-binding peptide
  MOD_RES (1), (33): Xaa is C or S

SEQ ID NO: 46631 - protein, 42 aa, Artificial Sequence; identical to SEQ ID NO: 7381
  Cyclic GFR-binding peptide
  MOD_RES (6), (7), (39), (41): Xaa is C or S

SEQ ID NO: 46632 - protein, 35 aa, Artificial Sequence; identical to SEQ ID NO: 7382
  Cyclic GFR-binding peptide
  MOD_RES (2), (3), (34): Xaa is C or S

SEQ ID NO: 46633 - protein, 33 aa, Artificial Sequence; identical to SEQ ID NO: 7383
  Cyclic GFR-binding peptide
  MOD_RES (1), (2), (33): Xaa is C or S

SEQ ID NO: 46634 - protein, 35 aa, Artificial Sequence; identical to SEQ ID NO: 7384
  Cyclic GFR-binding peptide
  MOD_RES (1), (2), (33), (35): Xaa is C or S

SEQ ID NO: 46635 - protein, 35 aa, Artificial Sequence; identical to SEQ ID NO: 7385
  Cyclic GFR-binding peptide
  MOD_RES (4), (5): Xaa is C or S

SEQ ID NO: 46636 - protein, 32 aa, Artificial Sequence; identical to SEQ ID NO: 871
  Cyclic GFR-binding peptide

SEQ ID NO: 46637 - protein, 21 aa, Artificial Sequence
  Cyclic GFR-binding peptide
LNAISVLYFDSSNNVILKKYR

SEQ ID NO: 46638 - protein, 23 aa, Artificial Sequence
  Cyclic GFR-binding peptide
QALSPISILYKVGRKPKVLKYHY

SEQ ID NO: 46639 - protein, 28 aa, Artificial Sequence
  Cyclic GFR-binding peptide
  MOD_RES (27), (27): Xaa is C or S
SAISVLYLDDSSNVILKNYQNMVVRAXG

SEQ ID NO: 46640 - protein, 28 aa, Artificial Sequence
  Cyclic GFR-binding peptide
  MOD_RES (3), (3): Xaa is C or S
PTXAPTKLSPISVLYKDDSSNVILKYHY

SEQ ID NO: 46641 - protein, 29 aa, Artificial Sequence
  Cyclic GFR-binding peptide
  MOD_RES (1), (1): Xaa is C or S
XVPQDLSAISILYLVGRTPKVLKNYQMVV

SEQ ID NO: 46642 - protein, 33 aa, Artificial Sequence; identical to SEQ ID NO: 7387
  Cyclic GFR-binding peptide
  MOD_RES (2), (3): Xaa is C or S

SEQ ID NO: 46643 - protein, 33 aa, Artificial Sequence; identical to SEQ ID NO: 7389
  Cyclic GFR-binding peptide
  MOD_RES (2), (3): Xaa is C or S

SEQ ID NO: 46644 - protein, 28 aa, Artificial Sequence
  Cyclic GFR-binding peptide
LSAISVLYLEIVRKKPIFLKNYQTLEDH

SEQ ID NO: 46645 - protein, 36 aa, Artificial Sequence
  Cyclic GFR-binding peptide
  MOD_RES (4), (5): Xaa is C or S
GKAXXVPTKLSAISVLYLDDMGVPTLKNYQEGMSVA

SEQ ID NO: 46646 - protein, 34 aa, Artificial Sequence; identical to SEQ ID NO: 7391
  Cyclic GFR-binding peptide
  MOD_RES (31), (33): Xaa is C or S

SEQ ID NO: 46647 - protein, 31 aa, Artificial Sequence
  Cyclic GFR-binding peptide
  MOD_RES (3), (4): Xaa is C or S
KPXXAPTKLSATSVLYYDDSSNVILRKHRNM

SEQ ID NO: 46648 - protein, 33 aa, Artificial Sequence
  Cyclic GFR-binding peptide
  MOD_RES (5), (6): Xaa is C or S
SAAPXXVPQALSAISILYLVGRKPKVLKNYQMI

SEQ ID NO: 46649 - protein, 36 aa, Artificial Sequence; identical to SEQ ID NO: 7395
  Cyclic GFR-binding peptide
  MOD_RES (33), (35): Xaa is C or S

SEQ ID NO: 46650 - protein, 36 aa, Artificial Sequence
  Cyclic GFR-binding peptide
  MOD_RES (6), (7): Xaa is C or S
KVGKAXXVPTKLNAISVLYFDDMGVPTLKKYREGMS

SEQ ID NO: 46651 - protein, 33 aa, Artificial Sequence; identical to SEQ ID NO: 7396
  Cyclic GFR-binding peptide
  MOD_RES (2), (3): Xaa is C or S

SEQ ID NO: 46652 - protein, 38 aa, Artificial Sequence; identical to SEQ ID NO: 7397
  Cyclic GFR-binding peptide
  MOD_RES (5), (6), (37): Xaa is C or S

SEQ ID NO: 46653 - protein, 28 aa, Artificial Sequence
  Cyclic GFR-binding peptide
  MOD_RES (26), (28): Xaa is C or S
SPISILYKVGRKPKVLKYHYMIVRSXKX

SEQ ID NO: 46654 - protein, 25 aa, Artificial Sequence
  Cyclic GFR-binding peptide
LNAISMLYFDEYDKVVLKKYREMVV

SEQ ID NO: 46655 - protein, 28 aa, Artificial Sequence
  Cyclic GFR-binding peptide
VPQALSATSILYYVGRKPKVLRKHRMIV

SEQ ID NO: 46656 - protein, 31 aa, Artificial Sequence
  Cyclic GFR-binding peptide
  MOD_RES (5), (6): Xaa is C or S
VPKPXXAPTQLSATSVLYYDDSSNVILRKHR

SEQ ID NO: 46657 - protein, 25 aa, Artificial Sequence
  Cyclic GFR-binding peptide
APTKLSATSVLYYDDSSNVILRKHR

SEQ ID NO: 46658 - protein, 34 aa, Artificial Sequence
  Cyclic GFR-binding peptide
  MOD_RES (31), (33): Xaa is C or S
TKLNAISVLYFDDMGVPTLKKYREGMSVAEXGXR

SEQ ID NO: 46659 - protein, 25 aa, Artificial Sequence
  Cyclic GFR-binding peptide
LNAISILYFVGRTPKVLKKYRMVVK

SEQ ID NO: 46660 - protein, 29 aa, Artificial Sequence
  Cyclic GFR-binding peptide
  MOD_RES (27), (29): Xaa is C or S
NAISVLYFDSSNNVILKKYRNMVVKAXGX

SEQ ID NO: 46661 - protein, 35 aa, Artificial Sequence; identical to SEQ ID NO: 7399
  Cyclic GFR-binding peptide
  MOD_RES (32), (34): Xaa is C or S

SEQ ID NO: 46662 - protein, 23 aa, Artificial Sequence
  Cyclic GFR-binding peptide
TKLSAISVLYLDDSSNVILKNYQ

SEQ ID NO: 46663 - protein, 34 aa, Artificial Sequence; identical to SEQ ID NO: 7401
  Cyclic GFR-binding peptide
  MOD_RES (1), (2), (34): Xaa is C or S

SEQ ID NO: 46664 - protein, 31 aa, Artificial Sequence
  Cyclic GFR-binding peptide
QVQLNAISVLYFEIVRKKPIFLKKYRTLEDH

SEQ ID NO: 46665 - protein, 29 aa, Artificial Sequence
  Cyclic GFR-binding peptide
VSQDLSPISILYKIGKTPKILKYHYMIVK

SEQ ID NO: 46666 - protein, 34 aa, Artificial Sequence
  Cyclic GFR-binding peptide
  MOD_RES (31), (33): Xaa is C or S
LSATSVLYYEIVRKKPIFLRKHRTLEDHLAXKXE

SEQ ID NO: 46667 - protein, 29 aa, Artificial Sequence
  Cyclic GFR-binding peptide
  MOD_RES (26), (28): Xaa is C or S
SATSILYYIGKTPKILRKHRMIVKSXKXS

SEQ ID NO: 46668 - protein, 35 aa, Artificial Sequence; identical to SEQ ID NO: 7402
  Cyclic GFR-binding peptide
  MOD_RES (1), (2), (34): Xaa is C or S

SEQ ID NO: 46669 - protein, 33 aa, Artificial Sequence; identical to SEQ ID NO: 7403
  Cyclic GFR-binding peptide
  MOD_RES (1), (2), (33): Xaa is C or S

SEQ ID NO: 46670 - protein, 30 aa, Artificial Sequence
  Cyclic GFR-binding peptide
  MOD_RES (29), (29): Xaa is C or S
KLSPISVLYKDSSNNVILKYHYNMVVKAXG

SEQ ID NO: 46671 - protein, 38 aa, Artificial Sequence; identical to SEQ ID NO: 7405
  Cyclic GFR-binding peptide
  MOD_RES (2), (3), (36), (38): Xaa is C or S

SEQ ID NO: 46672 - protein, 36 aa, Artificial Sequence; identical to SEQ ID NO: 7407
  Cyclic GFR-binding peptide
  MOD_RES (4), (5): Xaa is C or S

SEQ ID NO: 46673 - protein, 39 aa, Artificial Sequence; identical to SEQ ID NO: 7408
  Cyclic GFR-binding peptide
  MOD_RES (5), (6), (38): Xaa is C or S

SEQ ID NO: 46674 - protein, 29 aa, Artificial Sequence
  Cyclic GFR-binding peptide
  MOD_RES (1), (1): Xaa is C or S
XAPTKLSPISVLYKDSSNNVILKYHYNMV

SEQ ID NO: 46675 - protein, 28 aa, Artificial Sequence
  Cyclic GFR-binding peptide
  MOD_RES (28), (28): Xaa is C or S
ALSPISILYKVGRKPKVLKYHYMIVRSX

SEQ ID NO: 46676 - protein, 26 aa, Artificial Sequence
  Cyclic GFR-binding peptide
APTQLSATSVLYYDDSSNVILRKHRN

SEQ ID NO: 46677 - protein, 23 aa, Artificial Sequence
  Cyclic GFR-binding peptide
SAISVLYLDSSNNVILKNYQNMV

SEQ ID NO: 46678 - protein, 23 aa, Artificial Sequence
  Cyclic GFR-binding peptide
KLNAISVLYFDDMGVPTLKKYRE

SEQ ID NO: 46679 - protein, 32 aa, Artificial Sequence; identical to SEQ ID NO: 7410
  Cyclic GFR-binding peptide
  MOD_RES (31), (31): Xaa is C or S

SEQ ID NO: 46680 - protein, 34 aa, Artificial Sequence; identical to SEQ ID NO: 7411
  Cyclic GFR-binding peptide
  MOD_RES (1), (2): Xaa is C or S

SEQ ID NO: 46681 - protein, 26 aa, Artificial Sequence
  Cyclic GFR-binding peptide
TELSPISMLYKDENEKVVLKYHYDMV

SEQ ID NO: 46682 - protein, 36 aa, Artificial Sequence; identical to SEQ ID NO: 7413
  Cyclic GFR-binding peptide
  MOD_RES (5), (6): Xaa is C or S

SEQ ID NO: 46683 - protein, 38 aa, Artificial Sequence; identical to SEQ ID NO: 7414
  Cyclic GFR-binding peptide
  MOD_RES (4), (5), (37): Xaa is C or S

SEQ ID NO: 46684 - protein, 39 aa, Artificial Sequence; identical to SEQ ID NO: 7415
  Cyclic GFR-binding peptide
  MOD_RES (4), (5), (36), (38): Xaa is C or S

SEQ ID NO: 46685 - protein, 37 aa, Artificial Sequence
  Cyclic GFR-binding peptide
  MOD_RES (34), (36): Xaa is C or S
QVQLSATSVLYYEIVRKKPIFLRKHRTLEDHLAXKXE

SEQ ID NO: 46686 - protein, 31 aa, Artificial Sequence
  Cyclic GFR-binding peptide
  MOD_RES (31), (31): Xaa is C or S
PTELNAISMLYFDEYDKVVLKKYREMVVEGX

SEQ ID NO: 46687 - protein, 25 aa, Artificial Sequence
  Cyclic GFR-binding peptide
LSPISVLYKDSSNNVILKYHYNMVV

SEQ ID NO: 46688 - protein, 33 aa, Artificial Sequence; identical to SEQ ID NO: 7417
  Cyclic GFR-binding peptide
  MOD_RES (2), (3): Xaa is C or S

SEQ ID NO: 46689 - protein, 27 aa, Artificial Sequence
  Cyclic GFR-binding peptide
SQDLSPISILYKIGKTPKILKYHYMIV

SEQ ID NO: 46690 - protein, 31 aa, Artificial Sequence
  Cyclic GFR-binding peptide
  MOD_RES (3), (4): Xaa is C or S
KPXXAPTKLSPISVLYKDDSSNVILKYHYNM

SEQ ID NO: 46691 - protein, 27 aa, Artificial Sequence
  Cyclic GFR-binding peptide
SQDLSATSILYYIGKTPKILRKHRMIV

SEQ ID NO: 46692 - protein, 27 aa, Artificial Sequence
  Cyclic GFR-binding peptide
  MOD_RES (1), (2): Xaa is C or S
XXVPQALNAISILYFVGRKPKVLKKYR

SEQ ID NO: 46693 - protein, 31 aa, Artificial Sequence
  Cyclic GFR-binding peptide
  MOD_RES (2), (3): Xaa is C or S
PXXVPQALSPISILYKVGRKPKVLKYHYMIV

SEQ ID NO: 46694 - protein, 34 aa, Artificial Sequence
  Cyclic GFR-binding peptide
  MOD_RES (5), (6): Xaa is C or S
VGKAXXVPTKLNAISVLYFDDMGVPTLKKYREGM

SEQ ID NO: 46695 - protein, 39 aa, Artificial Sequence; identical to SEQ ID NO: 7420
  Cyclic GFR-binding peptide
  MOD_RES (37), (39): Xaa is C or S

SEQ ID NO: 46696 - protein, 38 aa, Artificial Sequence; identical to SEQ ID NO: 7421
  Cyclic GFR-binding peptide
  MOD_RES (4), (5), (38): Xaa is C or S

SEQ ID NO: 46697 - protein, 28 aa, Artificial Sequence
  Cyclic GFR-binding peptide
SAISVLYLEIVRKKPIFLKNYQTLEDHL

SEQ ID NO: 46698 - protein, 30 aa, Artificial Sequence
  Cyclic GFR-binding peptide
  MOD_RES (1), (1): Xaa is C or S
XVSQDLSPISILYKIGKTPKILKYHYMIVK

SEQ ID NO: 46699 - protein, 39 aa, Artificial Sequence; identical to SEQ ID NO: 7422
  Cyclic GFR-binding peptide
  MOD_RES (5), (6), (38): Xaa is C or S

SEQ ID NO: 46700 - protein, 29 aa, Artificial Sequence
  Cyclic GFR-binding peptide
  MOD_RES (1), (2): Xaa is C or S
XXVPTELNAISMLYFDEYDKVVLKKYREM

SEQ ID NO: 46701 - protein, 25 aa, Artificial Sequence
  Cyclic GFR-binding peptide
PTELSPISMLYKDEYDKVVLKYHYE

SEQ ID NO: 46702 - protein, 29 aa, Artificial Sequence
  Cyclic GFR-binding peptide
  MOD_RES (29), (29): Xaa is C or S
QDLSPISILYKVGRTPKVLKYHYMVVKSX

SEQ ID NO: 46703 - protein, 34 aa, Artificial Sequence; identical to SEQ ID NO: 7426
  Cyclic GFR-binding peptide
  MOD_RES (1), (32), (34): Xaa is C or S

SEQ ID NO: 46704 - protein, 32 aa, Artificial Sequence
  Cyclic GFR-binding peptide
  MOD_RES (2), (3): Xaa is C or S
AXXVPTKLNAISVLYFDDMGVPTLKKYREGMS

SEQ ID NO: 46705 - protein, 22 aa, Artificial Sequence
  Cyclic GFR-binding peptide
LSPISILYKVGRTPKVLKYHYM

SEQ ID NO: 46706 - protein, 31 aa, Artificial Sequence
  Cyclic GFR-binding peptide
VPTKLSAISVLYLDDMGVPTLKNYQEGMSVA

SEQ ID NO: 46707 - protein, 34 aa, Artificial Sequence
  Cyclic GFR-binding peptide
  MOD_RES (4), (5): Xaa is C or S
ASPXXVPQDLSPISILYKVGRTPKVLKYHYMVVK

SEQ ID NO: 46708 - protein, 35 aa, Artificial Sequence; identical to SEQ ID NO: 7429
  Cyclic GFR-binding peptide
  MOD_RES (2), (3), (35): Xaa is C or S

SEQ ID NO: 46709 - protein, 30 aa, Artificial Sequence
  Cyclic GFR-binding peptide
  MOD_RES (30), (30): Xaa is C or S
PQALSPISILYKVGRKPKVLKYHYMIVRSX

SEQ ID NO: 46710 - protein, 25 aa, Artificial Sequence
  Cyclic GFR-binding peptide
APTKLSAISVLYLDDSSNVILKNYQ

SEQ ID NO: 46711 - protein, 30 aa, Artificial Sequence
  Cyclic GFR-binding peptide
  MOD_RES (1), (2): Xaa is C or S
XXVSQDLSATSILYYIGKTPKILRKHRMIV

SEQ ID NO: 46712 - protein, 36 aa, Artificial Sequence
  Cyclic GFR-binding peptide
  MOD_RES (5), (5): Xaa is C or S
RNVQXRPTQVQLNAISVLYFEIVRKKPIFLKKYRTL

SEQ ID NO: 46713 - protein, 31 aa, Artificial Sequence
  Cyclic GFR-binding peptide
  MOD_RES (28), (30): Xaa is C or S
SATSVLYYDDMGVPTLRKHREGMSVAEXGXR

SEQ ID NO: 46714 - protein, 28 aa, Artificial Sequence
  Cyclic GFR-binding peptide
VQLSPISVLYKEIVRKKPIFLKYHYTLE

SEQ ID NO: 46715 - protein, 26 aa, Artificial Sequence
  Cyclic GFR-binding peptide
PTELSATSMLYYDEYDKVVLRKHREM

SEQ ID NO: 46716 - protein, 21 aa, Artificial Sequence
  Cyclic GFR-binding peptide
LSPISILYKIGKTPKILKYHY

SEQ ID NO: 46717 - protein, 26 aa, Artificial Sequence
  Cyclic GFR-binding peptide
QDLSPISILYKVGRTPKVLKYHYMVV

SEQ ID NO: 46718 - protein, 33 aa, Artificial Sequence; identical to SEQ ID NO: 7435
  Cyclic GFR-binding peptide
  MOD_RES (32), (32): Xaa is C or S

SEQ ID NO: 46719 - protein, 37 aa, Artificial Sequence; identical to SEQ ID NO: 7434
  Cyclic GFR-binding peptide
  MOD_RES (3), (4), (36): Xaa is C or S

SEQ ID NO: 46720 - protein, 33 aa, Artificial Sequence
  Cyclic GFR-binding peptide
  MOD_RES (4), (5): Xaa is C or S
ASPXXVSQDLNAISILYFIGKTPKILKKYRMIV

SEQ ID NO: 46721 - protein, 30 aa, Artificial Sequence
  Cyclic GFR-binding peptide
VQLSATSVLYYEIVRKKPIFLRKHRTLEDH

SEQ ID NO: 46722 - protein, 29 aa, Artificial Sequence
  Cyclic GFR-binding peptide
PQALSATSILYYVGRKPKVLRKHRMIVRS

SEQ ID NO: 46723 - protein, 30 aa, Artificial Sequence
  Cyclic GFR-binding peptide
  MOD_RES (28), (30): Xaa is C or S
LSATSVLYYDDSSNVILRKHRNMVVRAXGX

SEQ ID NO: 46724 - protein, 38 aa, Artificial Sequence; identical to SEQ ID NO: 7440
  Cyclic GFR-binding peptide
  MOD_RES (37), (37): Xaa is C or S

SEQ ID NO: 46725 - protein, 35 aa, Artificial Sequence; identical to SEQ ID NO: 7442
  Cyclic GFR-binding peptide
  MOD_RES (4), (5): Xaa is C or S

SEQ ID NO: 46726 - protein, 29 aa, Artificial Sequence
  Cyclic GFR-binding peptide
  MOD_RES (1), (2): Xaa is C or S
XXAPTKLSPISVLYKDDSSNVILKYHYNM

SEQ ID NO: 46727 - protein, 35 aa, Artificial Sequence
  Cyclic GFR-binding peptide
  MOD_RES (5), (6): Xaa is C or S
VGKAXXVPTKLNAISVLYFDDMGVPTLKKYREGMS

SEQ ID NO: 46728 - protein, 32 aa, Artificial Sequence
  Cyclic GFR-binding peptide
  MOD_RES (30), (32): Xaa is C or S
NAISVLYFEIVRKKPIFLKKYRTLEDHLAXKX

SEQ ID NO: 46729 - protein, 32 aa, Artificial Sequence
  Cyclic GFR-binding peptide
  MOD_RES (3), (4): Xaa is C or S
APXXVPQALNAISILYFVGRKPKVLKKYRMIV

SEQ ID NO: 46730 - protein, 30 aa, Artificial Sequence
  Cyclic GFR-binding peptide
  MOD_RES (28), (30): Xaa is C or S
DLSATSILYYIGKTPKILRKHRMIVKSXKX

SEQ ID NO: 46731 - protein, 29 aa, Artificial Sequence
  Cyclic GFR-binding peptide
  MOD_RES (3), (4): Xaa is C or S
SPXXVPQDLSPISILYKVGRTPKVLKYHY

SEQ ID NO: 46732 - protein, 37 aa, Artificial Sequence; identical to SEQ ID NO: 7446
  Cyclic GFR-binding peptide
  MOD_RES (4), (5), (36): Xaa is C or S

SEQ ID NO: 46733 - protein, 33 aa, Artificial Sequence
  Cyclic GFR-binding peptide
  MOD_RES (4), (5): Xaa is C or S
PKAXXVPTELSPISMLYKDEYDKVVLKYHYEMV

SEQ ID NO: 46734 - protein, 31 aa, Artificial Sequence
  Cyclic GFR-binding peptide
  MOD_RES (31), (31): Xaa is C or S
PTELNAISMLYFDENEKVVLKKYRDMVVEGX

SEQ ID NO: 46735 - protein, 28 aa, Artificial Sequence
  Cyclic GFR-binding peptide
  MOD_RES (2), (2): Xaa is C or S
TXAPTKLSPISVLYKDDSSNVILKYHYN

SEQ ID NO: 46736 - protein, 29 aa, Artificial Sequence
  Cyclic GFR-binding peptide
  MOD_RES (29), (29): Xaa is C or S
QDLSPISILYKIGKTPKILKYHYMIVKSX

SEQ ID NO: 46737 - protein, 34 aa, Artificial Sequence; identical to SEQ ID NO: 7447
  Cyclic GFR-binding peptide
  MOD_RES (1), (2), (33): Xaa is C or S

SEQ ID NO: 46738 - protein, 35 aa, Artificial Sequence
  Cyclic GFR-binding peptide
  MOD_RES (6), (7): Xaa is C or S
ASASPXXVPQDLNAISILYFVGRTPKVLKKYRMVV

SEQ ID NO: 46739 - protein, 32 aa, Artificial Sequence
  Cyclic GFR-binding peptide
  MOD_RES (29), (31): Xaa is C or S
QDLSPISILYKVGRTPKVLKYHYMVVKSXKXS

SEQ ID NO: 46740 - protein, 24 aa, Artificial Sequence
  Cyclic GFR-binding peptide
SPISMLYKDEYDKVVLKYHYEMVV

SEQ ID NO: 46741 - protein, 41 aa, Artificial Sequence; identical to SEQ ID NO: 7449
  Cyclic GFR-binding peptide
  MOD_RES (6), (7), (39), (41): Xaa is C or S

SEQ ID NO: 46742 - protein, 36 aa, Artificial Sequence
  Cyclic GFR-binding peptide
  MOD_RES (6), (7): Xaa is C or S
AVPKAXXAPTKLNAISVLYFDSSNNVILKKYRNMVV

SEQ ID NO: 46743 - protein, 38 aa, Artificial Sequence; identical to SEQ ID NO: 7450
  Cyclic GFR-binding peptide
  MOD_RES (6), (7), (38): Xaa is C or S

SEQ ID NO: 46744 - protein, 27 aa, Artificial Sequence
  Cyclic GFR-binding peptide
  MOD_RES (1), (2): Xaa is C or S
XXAPTKLNAISVLYFDSSNNVILKKYR

SEQ ID NO: 46745 - protein, 34 aa, Artificial Sequence
  Cyclic GFR-binding peptide
  MOD_RES (34), (34): Xaa is C or S
QVQLSAISVLYLEIVRKKPIFLKNYQTLEDHLAX

SEQ ID NO: 46746 - protein, 35 aa, Artificial Sequence; identical to SEQ ID NO: 7451
  Cyclic GFR-binding peptide
  MOD_RES (2), (3), (35): Xaa is C or S

SEQ ID NO: 46747 - protein, 32 aa, Artificial Sequence; identical to SEQ ID NO: 827
  Cyclic GFR-binding peptide

SEQ ID NO: 46748 - protein, 33 aa, Artificial Sequence
  Cyclic GFR-binding peptide
QVQLSATSVLYYEIVRKKPIFLRKHRTLEDHLA

SEQ ID NO: 46749 - protein, 33 aa, Artificial Sequence
  Cyclic GFR-binding peptide
  MOD_RES (30), (32): Xaa is C or S
KLSATSVLYYDDMGVPTLRKHREGMSVAEXGXR

SEQ ID NO: 46750 - protein, 31 aa, Artificial Sequence
  Cyclic GFR-binding peptide
  MOD_RES (2), (2): Xaa is C or S
QXRPTQVQLNAISVLYFEIVRKKPIFLKKYR

SEQ ID NO: 46751 - protein, 31 aa, Artificial Sequence
  Cyclic GFR-binding peptide
  MOD_RES (1), (2): Xaa is C or S
XXVPQDLSAISILYLVGRTPKVLKNYQMVVK

SEQ ID NO: 46752 - protein, 38 aa, Artificial Sequence; identical to SEQ ID NO: 7452
  Cyclic GFR-binding peptide
  MOD_RES (4), (5), (36), (38): Xaa is C or S

SEQ ID NO: 46753 - protein, 41 aa, Artificial Sequence; identical to SEQ ID NO: 7453
  Cyclic GFR-binding peptide
  MOD_RES (6), (7), (39), (41): Xaa is C or S

SEQ ID NO: 46754 - protein, 30 aa, Artificial Sequence
  Cyclic GFR-binding peptide
TKLSATSVLYYDDMGVPTLRKHREGMSVAE

SEQ ID NO: 46755 - protein, 29 aa, Artificial Sequence
  Cyclic GFR-binding peptide
PTKLNAISVLYFDDMGVPTLKKYREGMSV

SEQ ID NO: 46756 - protein, 28 aa, Artificial Sequence
  Cyclic GFR-binding peptide
QVQLSATSVLYYEIVRKKPIFLRKHRTL

SEQ ID NO: 46757 - protein, 34 aa, Artificial Sequence
  Cyclic GFR-binding peptide
  MOD_RES (4), (5): Xaa is C or S
PKPXXAPTKLSPISVLYKDDSSNVILKYHYNMVV

SEQ ID NO: 46758 - protein, 36 aa, Artificial Sequence
  Cyclic GFR-binding peptide
  MOD_RES (3), (3): Xaa is C or S
VQXRPTQVQLSPISVLYKEIVRKKPIFLKYHYTLED

SEQ ID NO: 46759 - protein, 29 aa, Artificial Sequence
  Cyclic GFR-binding peptide
  MOD_RES (2), (3): Xaa is C or S
AXXVPTELSPISMLYKDENEKVVLKYHYD

SEQ ID NO: 46760 - protein, 23 aa, Artificial Sequence
  Cyclic GFR-binding peptide
LSAISILYLVGRTPKVLKNYQMV

SEQ ID NO: 46761 - protein, 37 aa, Artificial Sequence; identical to SEQ ID NO: 7459
  Cyclic GFR-binding peptide
  MOD_RES (3), (4), (36): Xaa is C or S

SEQ ID NO: 46762 - protein, 29 aa, Artificial Sequence
  Cyclic GFR-binding peptide
TKLSPISVLYKDDSSNVILKYHYNMVVRS

SEQ ID NO: 46763 - protein, 20 aa, Artificial Sequence
  Cyclic GFR-binding peptide
SPISILYKVGRKPKVLKYHY

SEQ ID NO: 46764 - protein, 25 aa, Artificial Sequence
  Cyclic GFR-binding peptide
ALSATSILYYVGRKPKVLRKHRMIV

SEQ ID NO: 46765 - protein, 29 aa, Artificial Sequence
  Cyclic GFR-binding peptide
SPISVLYKDDSSNVILKYHYAAAAAAAAA

SEQ ID NO: 46766 - protein, 32 aa, Artificial Sequence
  Cyclic GFR-binding peptide
  MOD_RES (5), (6): Xaa is C or S
VPKPXXAPTKLSATSVLYYDDSSNVILRKHRN

SEQ ID NO: 46767 - protein, 32 aa, Artificial Sequence
  Cyclic GFR-binding peptide
  MOD_RES (30), (32): Xaa is C or S
PQALSPISILYKVGRKPKVLKYHYMIVRSXKX

SEQ ID NO: 46768 - protein, 34 aa, Artificial Sequence
  Cyclic GFR-binding peptide
  MOD_RES (4), (5): Xaa is C or S
PKAXXVPTELSATSMLYYDEYDKVVLRKHREMVV

SEQ ID NO: 46769 - protein, 30 aa, Artificial Sequence
  Cyclic GFR-binding peptide
  MOD_RES (1), (2): Xaa is C or S
XXVPTKLSATSVLYYDDMGVPTLRKHREGM

SEQ ID NO: 46770 - protein, 26 aa, Artificial Sequence
  Cyclic GFR-binding peptide
  MOD_RES (26), (26): Xaa is C or S
SATSILYYIGKTPKILRKHRMIVKSX

SEQ ID NO: 46771 - protein, 39 aa, Artificial Sequence; identical to SEQ ID NO: 7462
  Cyclic GFR-binding peptide
  MOD_RES (6), (7), (39): Xaa is C or S

SEQ ID NO: 46772 - protein, 37 aa, Artificial Sequence; identical to SEQ ID NO: 7463
  Cyclic GFR-binding peptide
  MOD_RES (2), (3), (34), (36): Xaa is C or S

SEQ ID NO: 46773 - protein, 32 aa, Artificial Sequence
  Cyclic GFR-binding peptide
  MOD_RES (30), (32): Xaa is C or S
SQDLSAISILYLIGKTPKILKNYQMIVKSXKX

SEQ ID NO: 46774 - protein, 41 aa, Artificial Sequence; identical to SEQ ID NO: 7465
  Cyclic GFR-binding peptide
  MOD_RES (6), (7), (39), (41): Xaa is C or S

SEQ ID NO: 46775 - protein, 21 aa, Artificial Sequence
  Cyclic GFR-binding peptide
LNAISILYFVGRKPKVLKKYR

SEQ ID NO: 46776 - protein, 32 aa, Artificial Sequence
  Cyclic GFR-binding peptide
  MOD_RES (2), (3): Xaa is C or S
AXXAPTKLSPISVLYKDSSNNVILKYHYNMVV

SEQ ID NO: 46777 - protein, 27 aa, Artificial Sequence
  Cyclic GFR-binding peptide
TKLSPISVLYKDSSNNVILKYHYNMVV

SEQ ID NO: 46778 - protein, 32 aa, Artificial Sequence
  Cyclic GFR-binding peptide
  MOD_RES (30), (32): Xaa is C or S
KLSAISVLYLDDMGVPTLKNYQEGMSVAEXGX

SEQ ID NO: 46779 - protein, 32 aa, Artificial Sequence
  Cyclic GFR-binding peptide
  MOD_RES (32), (32): Xaa is C or S
QLSAISVLYLEIVRKKPIFLKNYQTLEDHLAX

SEQ ID NO: 46780 - protein, 22 aa, Artificial Sequence
  Cyclic GFR-binding peptide
LSPISILYKVGRKPKVLKYHYM

SEQ ID NO: 46781 - protein, 37 aa, Artificial Sequence; identical to SEQ ID NO: 7473
  Cyclic GFR-binding peptide
  MOD_RES (4), (36): Xaa is C or S

SEQ ID NO: 46782 - protein, 37 aa, Artificial Sequence; identical to SEQ ID NO: 7476
  Cyclic GFR-binding peptide
  MOD_RES (2), (3), (35), (37): Xaa is C or S

SEQ ID NO: 46783 - protein, 27 aa, Artificial Sequence
  Cyclic GFR-binding peptide
  MOD_RES (1), (1): Xaa is C or S
XAPTKLSPISVLYKDSSNNVILKYHYN

SEQ ID NO: 46784 - protein, 33 aa, Artificial Sequence; identical to SEQ ID NO: 7477
  Cyclic GFR-binding peptide
  MOD_RES (2), (3): Xaa is C or S

SEQ ID NO: 46785 - protein, 36 aa, Artificial Sequence; identical to SEQ ID NO: 7479
  Cyclic GFR-binding peptide
  MOD_RES (4), (36): Xaa is C or S

SEQ ID NO: 46786 - protein, 31 aa, Artificial Sequence
  Cyclic GFR-binding peptide
  MOD_RES (31), (31): Xaa is C or S
PTQLSAISVLYLDDSSNVILKNYQNMVVRAX

SEQ ID NO: 46787 - protein, 42 aa, Artificial Sequence; identical to SEQ ID NO: 7482
  Cyclic GFR-binding peptide
  MOD_RES (7), (39), (41): Xaa is C or S

SEQ ID NO: 46788 - protein, 24 aa, Artificial Sequence
  Cyclic GFR-binding peptide
LSATSVLYYEIVRKKPIFLRKHRT

SEQ ID NO: 46789 - protein, 35 aa, Artificial Sequence; identical to SEQ ID NO: 7484
  Cyclic GFR-binding peptide
  MOD_RES (3), (4): Xaa is C or S

SEQ ID NO: 46790 - protein, 31 aa, Artificial Sequence
  Cyclic GFR-binding peptide
  MOD_RES (29), (31): Xaa is C or S
ELSPISMLYKDENEKVVLKYHYDMVVEGXGX

SEQ ID NO: 46791 - protein, 34 aa, Artificial Sequence
  Cyclic GFR-binding peptide
  MOD_RES (31), (33): Xaa is C or S
PTKLSAISVLYLDSSNNVILKNYQNMVVKAXGXH

SEQ ID NO: 46792 - protein, 38 aa, Artificial Sequence; identical to SEQ ID NO: 7486
  Cyclic GFR-binding peptide
  MOD_RES (2), (3), (35), (37): Xaa is C or S

SEQ ID NO: 46793 - protein, 34 aa, Artificial Sequence; identical to SEQ ID NO: 7487
  Cyclic GFR-binding peptide
  MOD_RES (31), (33): Xaa is C or S

SEQ ID NO: 46794 - protein, 31 aa, Artificial Sequence
  Cyclic GFR-binding peptide
  MOD_RES (31), (31): Xaa is C or S
TKLNAISVLYFDDMGVPTLKKYREGMSVAEX

SEQ ID NO: 46795 - protein, 23 aa, Artificial Sequence
  Cyclic GFR-binding peptide
SPISVLYKEIVRKKPIFLKYHYT

SEQ ID NO: 46796 - protein, 30 aa, Artificial Sequence
  Cyclic GFR-binding peptide
PTKLSATSVLYYDDMGVPTLRKHREGMSVA

SEQ ID NO: 46797 - protein, 29 aa, Artificial Sequence
  Cyclic GFR-binding peptide
  MOD_RES (1), (1): Xaa is C or S
XAPTKLSPISVLYKDDSSNVILKYHYNMV

SEQ ID NO: 46798 - protein, 29 aa, Artificial Sequence
  Cyclic GFR-binding peptide
SAISILYLVGRKPKVLKNYQAAAAAAAAA

SEQ ID NO: 46799 - protein, 38 aa, Artificial Sequence; identical to SEQ ID NO: 7491
  Cyclic GFR-binding peptide
  MOD_RES (3), (35), (37): Xaa is C or S

SEQ ID NO: 46800 - protein, 21 aa, Artificial Sequence
  Cyclic GFR-binding peptide
NAISVLYFDSSNNVILKKYRN

SEQ ID NO: 46801 - protein, 35 aa, Artificial Sequence; identical to SEQ ID NO: 7493
  Cyclic GFR-binding peptide
  MOD_RES (32), (34): Xaa is C or S

SEQ ID NO: 46802 - protein, 34 aa, Artificial Sequence; identical to SEQ ID NO: 7494
  Cyclic GFR-binding peptide
  MOD_RES (1), (2), (33): Xaa is C or S

SEQ ID NO: 46803 - protein, 30 aa, Artificial Sequence
  Cyclic GFR-binding peptide
  MOD_RES (1), (2): Xaa is C or S
XXVSQDLNAISILYFIGKTPKILKKYRMIV

SEQ ID NO: 46804 - protein, 34 aa, Artificial Sequence; identical to SEQ ID NO: 7495
  Cyclic GFR-binding peptide
  MOD_RES (2), (3): Xaa is C or S

SEQ ID NO: 46805 - protein, 34 aa, Artificial Sequence; identical to SEQ ID NO: 7496
  Cyclic GFR-binding peptide
  MOD_RES (1), (33): Xaa is C or S

SEQ ID NO: 46806 - protein, 25 aa, Artificial Sequence
  Cyclic GFR-binding peptide
PQALSATSILYYVGRKPKVLRKHRM

SEQ ID NO: 46807 - protein, 38 aa, Artificial Sequence; identical to SEQ ID NO: 7498
  Cyclic GFR-binding peptide
  MOD_RES (5), (37): Xaa is C or S

SEQ ID NO: 46808 - protein, 40 aa, Artificial Sequence; identical to SEQ ID NO: 7499
  Cyclic GFR-binding peptide
  MOD_RES (6), (7), (38), (40): Xaa is C or S

SEQ ID NO: 46809 - protein, 39 aa, Artificial Sequence; identical to SEQ ID NO: 7500
  Cyclic GFR-binding peptide
  MOD_RES (3), (4), (36), (38): Xaa is C or S

SEQ ID NO: 46810 - protein, 29 aa, Artificial Sequence
  Cyclic GFR-binding peptide
NAISVLYFDSSNNVILKKYRAAAAAAAAA

SEQ ID NO: 46811 - protein, 35 aa, Artificial Sequence
  Cyclic GFR-binding peptide
  MOD_RES (6), (7): Xaa is C or S
ASAAPXXVPQALNAISILYFVGRKPKVLKKYRMIV

SEQ ID NO: 46812 - protein, 25 aa, Artificial Sequence
  Cyclic GFR-binding peptide
VPQALSATSILYYVGRKPKVLRKHR

SEQ ID NO: 46813 - protein, 28 aa, Artificial Sequence
  Cyclic GFR-binding peptide
  MOD_RES (1), (1): Xaa is C or S
XVPTELSATSMLYYDENEKVVLRKHRDM

SEQ ID NO: 46814 - protein, 34 aa, Artificial Sequence; identical to SEQ ID NO: 7506
  Cyclic GFR-binding peptide
  MOD_RES (3), (4): Xaa is C or S

SEQ ID NO: 46815 - protein, 34 aa, Artificial Sequence
  Cyclic GFR-binding peptide
  MOD_RES (5), (6): Xaa is C or S
SASPXXVSQDLSAISILYLIGKTPKILKNYQMIV

SEQ ID NO: 46816 - protein, 27 aa, Artificial Sequence
  Cyclic GFR-binding peptide
  MOD_RES (1), (2): Xaa is C or S
XXVPTELSATSMLYYDEYDKVVLRKHR

SEQ ID NO: 46817 - protein, 30 aa, Artificial Sequence
  Cyclic GFR-binding peptide
  MOD_RES (4), (5): Xaa is C or S
AAPXXVPQALSATSILYYVGRKPKVLRKHR

SEQ ID NO: 46818 - protein, 33 aa, Artificial Sequence
  Cyclic GFR-binding peptide
  MOD_RES (30), (32): Xaa is C or S
TKLSPISVLYKDDSSNVILKYHYNMVVRSXGXH

SEQ ID NO: 46819 - protein, 30 aa, Artificial Sequence
  Cyclic GFR-binding peptide
VQLSPISVLYKEIVRKKPIFLKYHYTLEDH

SEQ ID NO: 46820 - protein, 23 aa, Artificial Sequence
  Cyclic GFR-binding peptide
NAISMLYFDEYDKVVLKKYREMV

SEQ ID NO: 46821 - protein, 26 aa, Artificial Sequence
  Cyclic GFR-binding peptide
PTKLSAISVLYLDSSNNVILKNYQNM

SEQ ID NO: 46822 - protein, 38 aa, Artificial Sequence; identical to SEQ ID NO: 7512
  Cyclic GFR-binding peptide
  MOD_RES (5), (6), (38): Xaa is C or S

SEQ ID NO: 46823 - protein, 32 aa, Artificial Sequence; identical to SEQ ID NO: 839
  Cyclic GFR-binding peptide

SEQ ID NO: 46824 - protein, 20 aa, Artificial Sequence
  Cyclic GFR-binding peptide
SAISILYLVGRKPKVLKNYQ

SEQ ID NO: 46825 - protein, 39 aa, Artificial Sequence; identical to SEQ ID NO: 7515
  Cyclic GFR-binding peptide
  MOD_RES (37), (39): Xaa is C or S

SEQ ID NO: 46826 - protein, 28 aa, Artificial Sequence
  Cyclic GFR-binding peptide
SQDLNAISILYFIGKTPKILKKYRMIVK

SEQ ID NO: 46827 - protein, 29 aa, Artificial Sequence
  Cyclic GFR-binding peptide
  MOD_RES (1), (2): Xaa is C or S
XXAPTKLSATSVLYYDDSSNVILRKHRNM

SEQ ID NO: 46828 - protein, 34 aa, Artificial Sequence
  Cyclic GFR-binding peptide
  MOD_RES (5), (5): Xaa is C or S
TKPTXAPTKLSATSVLYYDDSSNVILRKHRNMVV

SEQ ID NO: 46829 - protein, 36 aa, Artificial Sequence; identical to SEQ ID NO: 7519
  Cyclic GFR-binding peptide
  MOD_RES (3), (4), (35): Xaa is C or S

SEQ ID NO: 46830 - protein, 39 aa, Artificial Sequence; identical to SEQ ID NO: 7521
  Cyclic GFR-binding peptide
  MOD_RES (4), (5), (37), (39): Xaa is C or S

SEQ ID NO: 46831 - protein, 36 aa, Artificial Sequence
  Cyclic GFR-binding peptide
  MOD_RES (6), (7): Xaa is C or S
ASAAPXXVPQALSATSILYYVGRKPKVLRKHRMIVR

SEQ ID NO: 46832 - protein, 31 aa, Artificial Sequence
  Cyclic GFR-binding peptide
  MOD_RES (30), (30): Xaa is C or S
SQDLSAISILYLIGKTPKILKNYQMIVKSXK

SEQ ID NO: 46833 - protein, 33 aa, Artificial Sequence
  Cyclic GFR-binding peptide
  MOD_RES (33), (33): Xaa is C or S
VQLSPISVLYKEIVRKKPIFLKYHYTLEDHLAX

SEQ ID NO: 46834 - protein, 41 aa, Artificial Sequence; identical to SEQ ID NO: 7526
  Cyclic GFR-binding peptide
  MOD_RES (6), (7), (39), (41): Xaa is C or S

SEQ ID NO: 46835 - protein, 32 aa, Artificial Sequence
  Cyclic GFR-binding peptide
  MOD_RES (5), (6): Xaa is C or S
SASPXXVSQDLSPISILYKIGKTPKILKYHYM

SEQ ID NO: 46836 - protein, 21 aa, Artificial Sequence
  Cyclic GFR-binding peptide
SATSILYYVGRTPKVLRKHRM

SEQ ID NO: 46837 - protein, 22 aa, Artificial Sequence
  Cyclic GFR-binding peptide
KLSATSVLYYDDMGVPTLRKHR

SEQ ID NO: 46838 - protein, 26 aa, Artificial Sequence
  Cyclic GFR-binding peptide
NAISVLYFDDMGVPTLKKYREGMSVA

SEQ ID NO: 46839 - protein, 26 aa, Artificial Sequence
  Cyclic GFR-binding peptide
  MOD_RES (1), (1): Xaa is C or S
XAPTKLSATSVLYYDDSSNVILRKHR

SEQ ID NO: 46840 - protein, 35 aa, Artificial Sequence
  Cyclic GFR-binding peptide
  MOD_RES (4), (5): Xaa is C or S
GKAXXVPTKLSATSVLYYDDMGVPTLRKHREGMSV

SEQ ID NO: 46841 - protein, 38 aa, Artificial Sequence; identical to SEQ ID NO: 7529
  Cyclic GFR-binding peptide
  MOD_RES (6), (7): Xaa is C or S

SEQ ID NO: 46842 - protein, 27 aa, Artificial Sequence
  Cyclic GFR-binding peptide
SPISVLYKEIVRKKPIFLKYHYTLEDH

SEQ ID NO: 46843 - protein, 27 aa, Artificial Sequence
  Cyclic GFR-binding peptide
TELSPISMLYKDENEKVVLKYHYDMVV

SEQ ID NO: 46844 - protein, 29 aa, Artificial Sequence
  Cyclic GFR-binding peptide
TKLSAISVLYLDSSNNVILKNYQNMVVKA

SEQ ID NO: 46845 - protein, 20 aa, Artificial Sequence
  Cyclic GFR-binding peptide
SPISVLYKDDSSNVILKYHY

SEQ ID NO: 46846 - protein, 36 aa, Artificial Sequence
  Cyclic GFR-binding peptide
  MOD_RES (6), (7): Xaa is C or S
ASAAPXXVPQALSPISILYKVGRKPKVLKYHYMIVR

SEQ ID NO: 46847 - protein, 31 aa, Artificial Sequence
  Cyclic GFR-binding peptide
  MOD_RES (4), (5): Xaa is C or S
PKPXXAPTQLSATSVLYYDDSSNVILRKHRN

SEQ ID NO: 46848 - protein, 31 aa, Artificial Sequence; identical to SEQ ID NO: 7534
  Cyclic GFR-binding peptide

SEQ ID NO: 46849 - protein, 28 aa, Artificial Sequence
  Cyclic GFR-binding peptide
  MOD_RES (1), (1): Xaa is C or S
XVPTELSPISMLYKDENEKVVLKYHYDM

SEQ ID NO: 46850 - protein, 41 aa, Artificial Sequence; identical to SEQ ID NO: 7535
  Cyclic GFR-binding peptide
  MOD_RES (5), (5): Xaa is C or S

SEQ ID NO: 46851 - protein, 33 aa, Artificial Sequence
  Cyclic GFR-binding peptide
  MOD_RES (32), (32): Xaa is C or S
QLSPISVLYKEIVRKKPIFLKYHYTLEDHLAXK

SEQ ID NO: 46852 - protein, 34 aa, Artificial Sequence
  Cyclic GFR-binding peptide
  MOD_RES (6), (6): Xaa is C or S
VTKPTXAPTKLSATSVLYYDDSSNVILRKHRNMV

SEQ ID NO: 46853 - protein, 33 aa, Artificial Sequence
  Cyclic GFR-binding peptide
  MOD_RES (6), (7): Xaa is C or S
SIPKAXXVPTELSPISMLYKDEYDKVVLKYHYE

SEQ ID NO: 46854 - protein, 32 aa, Artificial Sequence
  Cyclic GFR-binding peptide
  MOD_RES (4), (5): Xaa is C or S
GKAXXVPTKLSAISVLYLDDMGVPTLKNYQEG

SEQ ID NO: 46855 - protein, 21 aa, Artificial Sequence
  Cyclic GFR-binding peptide
NAISVLYFDDMGVPTLKKYRE

SEQ ID NO: 46856 - protein, 27 aa, Artificial Sequence
  Cyclic GFR-binding peptide
PTKLSATSVLYYDDMGVPTLRKHREGM

SEQ ID NO: 46857 - protein, 30 aa, Artificial Sequence
  Cyclic GFR-binding peptide
  MOD_RES (4), (5): Xaa is C or S
PKPXXAPTQLSATSVLYYDDSSNVILRKHR

SEQ ID NO: 46858 - protein, 36 aa, Artificial Sequence; identical to SEQ ID NO: 7539
  Cyclic GFR-binding peptide

SEQ ID NO: 46859 - protein, 29 aa, Artificial Sequence
  Cyclic GFR-binding peptide
  MOD_RES (29), (29): Xaa is C or S
QLSAISVLYLDDSSNVILKNYQNMVVRAX

SEQ ID NO: 46860 - protein, 33 aa, Artificial Sequence
  Cyclic GFR-binding peptide
  MOD_RES (5), (5): Xaa is C or S
TKPTXAPTKLSPISVLYKDDSSNVILKYHYNMV

SEQ ID NO: 46861 - protein, 25 aa, Artificial Sequence
  Cyclic GFR-binding peptide
SPISVLYKEIVRKKPIFLKYHYTLE

SEQ ID NO: 46862 - protein, 33 aa, Artificial Sequence; identical to SEQ ID NO: 7540
  Cyclic GFR-binding peptide
  MOD_RES (3), (3): Xaa is C or S

SEQ ID NO: 46863 - protein, 33 aa, Artificial Sequence; identical to SEQ ID NO: 7541
  Cyclic GFR-binding peptide
  MOD_RES (1), (2), (33): Xaa is C or S

SEQ ID NO: 46864 - protein, 28 aa, Artificial Sequence
  Cyclic GFR-binding peptide
APTQLSPISVLYKDDSSNVILKYHYNMV

SEQ ID NO: 46865 - protein, 23 aa, Artificial Sequence
  Cyclic GFR-binding peptide
SATSVLYYDDSSNVILRKHRNMV

SEQ ID NO: 46866 - protein, 35 aa, Artificial Sequence
  Cyclic GFR-binding peptide
  MOD_RES (32), (34): Xaa is C or S
PTKLSAISVLYLDDMGVPTLKNYQEGMSVAEXGXR

SEQ ID NO: 46867 - protein, 36 aa, Artificial Sequence; identical to SEQ ID NO: 7545
  Cyclic GFR-binding peptide
  MOD_RES (3), (4), (36): Xaa is C or S

SEQ ID NO: 46868 - protein, 33 aa, Artificial Sequence
  Cyclic GFR-binding peptide
  MOD_RES (5), (5): Xaa is C or S
TKPTXAPTKLSATSVLYYDDSSNVILRKHRNMV

SEQ ID NO: 46869 - protein, 24 aa, Artificial Sequence
  Cyclic GFR-binding peptide
SATSVLYYDDSSNVILRKHRNMVV

SEQ ID NO: 46870 - protein, 27 aa, Artificial Sequence
  Cyclic GFR-binding peptide
TKLNAISVLYFDDMGVPTLKKYREGMS

SEQ ID NO: 46871 - protein, 40 aa, Artificial Sequence; identical to SEQ ID NO: 7547
  Cyclic GFR-binding peptide
  MOD_RES (5), (6), (38), (40): Xaa is C or S

SEQ ID NO: 46872 - protein, 36 aa, Artificial Sequence
  Cyclic GFR-binding peptide
  MOD_RES (4), (4): Xaa is C or S
NVQXRPTQVQLSATSVLYYEIVRKKPIFLRKHRTLE

SEQ ID NO: 46873 - protein, 27 aa, Artificial Sequence
  Cyclic GFR-binding peptide
TQVQLNAISVLYFEIVRKKPIFLKKYR

SEQ ID NO: 46874 - protein, 31 aa, Artificial Sequence
  Cyclic GFR-binding peptide
  MOD_RES (3), (4): Xaa is C or S
APXXVPQALSPISILYKVGRKPKVLKYHYMI

SEQ ID NO: 46875 - protein, 31 aa, Artificial Sequence
  Cyclic GFR-binding peptide
  MOD_RES (28), (30): Xaa is C or S
LSATSVLYYDDSSNVILRKHRNMVVRAXGXH

SEQ ID NO: 46876 - protein, 34 aa, Artificial Sequence; identical to SEQ ID NO: 7548
  Cyclic GFR-binding peptide
  MOD_RES (1), (32), (34): Xaa is C or S

SEQ ID NO: 46877 - protein, 34 aa, Artificial Sequence; identical to SEQ ID NO: 7549
  Cyclic GFR-binding peptide
  MOD_RES (1), (32), (34): Xaa is C or S

SEQ ID NO: 46878 - protein, 21 aa, Artificial Sequence
  Cyclic GFR-binding peptide
LSPISILYKVGRKPKVLKYHY

SEQ ID NO: 46879 - protein, 28 aa, Artificial Sequence
  Cyclic GFR-binding peptide
  MOD_RES (3), (3): Xaa is C or S
PTXAPTKLSATSVLYYDDSSNVILRKHR

SEQ ID NO: 46880 - protein, 30 aa, Artificial Sequence
  Cyclic GFR-binding peptide
  MOD_RES (3), (4): Xaa is C or S
SPXXVSQDLSAISILYLIGKTPKILKNYQM

SEQ ID NO: 46881 - protein, 22 aa, Artificial Sequence
  Cyclic GFR-binding peptide
SPISMLYKDENEKVVLKYHYDM

SEQ ID NO: 46882 - protein, 36 aa, Artificial Sequence; identical to SEQ ID NO: 7554
  Cyclic GFR-binding peptide
  MOD_RES (1), (2), (33), (35): Xaa is C or S

SEQ ID NO: 46883 - protein, 23 aa, Artificial Sequence
  Cyclic GFR-binding peptide
SPISVLYKDDSSNVILKYHYNMV

SEQ ID NO: 46884 - protein, 34 aa, Artificial Sequence; identical to SEQ ID NO: 7556
  Cyclic GFR-binding peptide
  MOD_RES (3), (4): Xaa is C or S

SEQ ID NO: 46885 - protein, 24 aa, Artificial Sequence
  Cyclic GFR-binding peptide
PTKLSATSVLYYDDSSNVILRKHR

SEQ ID NO: 46886 - protein, 28 aa, Artificial Sequence
  Cyclic GFR-binding peptide
APTQLSATSVLYYDDSSNVILRKHRNMV

SEQ ID NO: 46887 - protein, 38 aa, Artificial Sequence; identical to SEQ ID NO: 7557
  Cyclic GFR-binding peptide
  MOD_RES (3), (3): Xaa is C or S

SEQ ID NO: 46888 - protein, 38 aa, Artificial Sequence; identical to SEQ ID NO: 7558
  Cyclic GFR-binding peptide
  MOD_RES (36), (38): Xaa is C or S

SEQ ID NO: 46889 - protein, 30 aa, Artificial Sequence
  Cyclic GFR-binding peptide
  MOD_RES (30), (30): Xaa is C or S
TKLSPISVLYKDSSNNVILKYHYNMVVKAX

SEQ ID NO: 46890 - protein, 40 aa, Artificial Sequence; identical to SEQ ID NO: 7559
  Cyclic GFR-binding peptide
  MOD_RES (6), (38), (40): Xaa is C or S

SEQ ID NO: 46891 - protein, 36 aa, Artificial Sequence; identical to SEQ ID NO: 7560
  Cyclic GFR-binding peptide
  MOD_RES (1), (2), (34), (36): Xaa is C or S

SEQ ID NO: 46892 - protein, 26 aa, Artificial Sequence
  Cyclic GFR-binding peptide
VPTELNAISMLYFDEYDKVVLKKYRE

SEQ ID NO: 46893 - protein, 34 aa, Artificial Sequence
  Cyclic GFR-binding peptide
  MOD_RES (31), (33): Xaa is C or S
LNAISVLYFEIVRKKPIFLKKYRTLEDHLAXKXE

SEQ ID NO: 46894 - protein, 37 aa, Artificial Sequence; identical to SEQ ID NO: 7562
  Cyclic GFR-binding peptide
  MOD_RES (3), (4), (36): Xaa is C or S

SEQ ID NO: 46895 - protein, 31 aa, Artificial Sequence
  Cyclic GFR-binding peptide
  MOD_RES (4), (5): Xaa is C or S
PKAXXAPTKLSPISVLYKDSSNNVILKYHYN

SEQ ID NO: 46896 - protein, 33 aa, Artificial Sequence; identical to SEQ ID NO: 7564
  Cyclic GFR-binding peptide
  MOD_RES (1), (33): Xaa is C or S

SEQ ID NO: 46897 - protein, 35 aa, Artificial Sequence
  Cyclic GFR-binding peptide
  MOD_RES (6), (7): Xaa is C or S
ASAAPXXVPQALSAISILYLVGRKPKVLKNYQMIV

SEQ ID NO: 46898 - protein, 20 aa, Artificial Sequence
  Cyclic GFR-binding peptide
NAISILYFVGRKPKVLKKYR

SEQ ID NO: 46899 - protein, 35 aa, Artificial Sequence
  Cyclic GFR-binding peptide
  MOD_RES (2), (2): Xaa is C or S
QXRPTQVQLSAISVLYLEIVRKKPIFLKNYQTLED

SEQ ID NO: 46900 - protein, 38 aa, Artificial Sequence; identical to SEQ ID NO: 7565
  Cyclic GFR-binding peptide
  MOD_RES (2), (3), (36), (38): Xaa is C or S

SEQ ID NO: 46901 - protein, 33 aa, Artificial Sequence
  Cyclic GFR-binding peptide
  MOD_RES (31), (33): Xaa is C or S
PTELSPISMLYKDEYDKVVLKYHYEMVVEGXGX

SEQ ID NO: 46902 - protein, 34 aa, Artificial Sequence
  Cyclic GFR-binding peptide
  MOD_RES (6), (6): Xaa is C or S
VTKPTXAPTKLSPISVLYKDDSSNVILKYHYNMV

SEQ ID NO: 46903 - protein, 31 aa, Artificial Sequence; identical to SEQ ID NO: 7566
  Cyclic GFR-binding peptide
  MOD_RES (31), (31): Xaa is C or S

SEQ ID NO: 46904 - protein, 31 aa, Artificial Sequence
  Cyclic GFR-binding peptide
  MOD_RES (5), (5): Xaa is C or S
TKPTXAPTKLSAISVLYLDDSSNVILKNYQN

SEQ ID NO: 46905 - protein, 37 aa, Artificial Sequence; identical to SEQ ID NO: 7569
  Cyclic GFR-binding peptide
  MOD_RES (3), (35), (37): Xaa is C or S

SEQ ID NO: 46906 - protein, 36 aa, Artificial Sequence; identical to SEQ ID NO: 7570
  Cyclic GFR-binding peptide
  MOD_RES (4), (5), (36): Xaa is C or S

SEQ ID NO: 46907 - protein, 34 aa, Artificial Sequence; identical to SEQ ID NO: 7571
  Cyclic GFR-binding peptide
  MOD_RES (3), (4): Xaa is C or S

SEQ ID NO: 46908 - protein, 33 aa, Artificial Sequence; identical to SEQ ID NO: 7572
  Cyclic GFR-binding peptide
  MOD_RES (31), (33): Xaa is C or S

SEQ ID NO: 46909 - protein, 29 aa, Artificial Sequence
  Cyclic GFR-binding peptide
  MOD_RES (29), (29): Xaa is C or S
ELNAISMLYFDEYDKVVLKKYREMVVEGX

SEQ ID NO: 46910 - protein, 27 aa, Artificial Sequence
  Cyclic GFR-binding peptide
QVQLSPISVLYKEIVRKKPIFLKYHYT

SEQ ID NO: 46911 - protein, 32 aa, Artificial Sequence
  Cyclic GFR-binding peptide
  MOD_RES (32), (32): Xaa is C or S
PTKLSATSVLYYDDMGVPTLRKHREGMSVAEX

SEQ ID NO: 46912 - protein, 37 aa, Artificial Sequence; identical to SEQ ID NO: 7574
  Cyclic GFR-binding peptide
  MOD_RES (3), (4), (36): Xaa is C or S

SEQ ID NO: 46913 - protein, 31 aa, Artificial Sequence
  Cyclic GFR-binding peptide
  MOD_RES (29), (31): Xaa is C or S
ELSATSMLYYDENEKVVLRKHRDMVVEGXGX

SEQ ID NO: 46914 - protein, 31 aa, Artificial Sequence
  Cyclic GFR-binding peptide
  MOD_RES (29), (31): Xaa is C or S
QDLNAISILYFIGKTPKILKKYRMIVKSXKX

SEQ ID NO: 46915 - protein, 34 aa, Artificial Sequence
  Cyclic GFR-binding peptide
  MOD_RES (33), (33): Xaa is C or S
VQLSPISVLYKEIVRKKPIFLKYHYTLEDHLAXK

SEQ ID NO: 46916 - protein, 31 aa, Artificial Sequence
  Cyclic GFR-binding peptide
  MOD_RES (30), (30): Xaa is C or S
TQLSATSVLYYDDSSNVILRKHRNMVVRAXG

SEQ ID NO: 46917 - protein, 32 aa, Artificial Sequence
  Cyclic GFR-binding peptide
  MOD_RES (6), (7): Xaa is C or S
AVPKAXXAPTKLSPISVLYKDSSNNVILKYHY

SEQ ID NO: 46918 - protein, 38 aa, Artificial Sequence; identical to SEQ ID NO: 7578
  Cyclic GFR-binding peptide
  MOD_RES (2), (3), (35), (37): Xaa is C or S

SEQ ID NO: 46919 - protein, 28 aa, Artificial Sequence
  Cyclic GFR-binding peptide
PTKLSAISVLYLDDSSNVILKNYQNMVV

SEQ ID NO: 46920 - protein, 27 aa, Artificial Sequence
  Cyclic GFR-binding peptide
TELSATSMLYYDENEKVVLRKHRDMVV

SEQ ID NO: 46921 - protein, 29 aa, Artificial Sequence
  Cyclic GFR-binding peptide
PTQVQLSPISVLYKEIVRKKPIFLKYHYT

SEQ ID NO: 46922 - protein, 23 aa, Artificial Sequence
  Cyclic GFR-binding peptide
LNAISILYFIGKTPKILKKYRMI

SEQ ID NO: 46923 - protein, 35 aa, Artificial Sequence; identical to SEQ ID NO: 7579
  Cyclic GFR-binding peptide
  MOD_RES (3), (4): Xaa is C or S

SEQ ID NO: 46924 - protein, 29 aa, Artificial Sequence
  Cyclic GFR-binding peptide
  MOD_RES (3), (4): Xaa is C or S
KPXXAPTKLSAISVLYLDDSSNVILKNYQ

SEQ ID NO: 46925 - protein, 27 aa, Artificial Sequence
  Cyclic GFR-binding peptide
VPTELSATSMLYYDEYDKVVLRKHREM

SEQ ID NO: 46926 - protein, 29 aa, Artificial Sequence
  Cyclic GFR-binding peptide
  MOD_RES (29), (29): Xaa is C or S
KLSATSVLYYDDSSNVILRKHRNMVVRSX

SEQ ID NO: 46927 - protein, 34 aa, Artificial Sequence; identical to SEQ ID NO: 7581
  Cyclic GFR-binding peptide
  MOD_RES (33), (33): Xaa is C or S

SEQ ID NO: 46928 - protein, 28 aa, Artificial Sequence
  Cyclic GFR-binding peptide
  MOD_RES (1), (2): Xaa is C or S
XXVPQALSATSILYYVGRKPKVLRKHRM

SEQ ID NO: 46929 - protein, 41 aa, Artificial Sequence; identical to SEQ ID NO: 7582
  Cyclic GFR-binding peptide
  MOD_RES (5), (6), (38), (40): Xaa is C or S

SEQ ID NO: 46930 - protein, 21 aa, Artificial Sequence
  Cyclic GFR-binding peptide
SATSILYYIGKTPKILRKHRM

SEQ ID NO: 46931 - protein, 33 aa, Artificial Sequence; identical to SEQ ID NO: 7583
  Cyclic GFR-binding peptide
  MOD_RES (32), (32): Xaa is C or S

SEQ ID NO: 46932 - protein, 24 aa, Artificial Sequence
  Cyclic GFR-binding peptide
TKLSPISVLYKDSSNNVILKYHYN

SEQ ID NO: 46933 - protein, 38 aa, Artificial Sequence; identical to SEQ ID NO: 7584
  Cyclic GFR-binding peptide
  MOD_RES (4), (5), (36), (38): Xaa is C or S

SEQ ID NO: 46934 - protein, 22 aa, Artificial Sequence
  Cyclic GFR-binding peptide
SATSVLYYDDMGVPTLRKHREG

SEQ ID NO: 46935 - protein, 28 aa, Artificial Sequence
  Cyclic GFR-binding peptide
PTQVQLSAISVLYLEIVRKKPIFLKNYQ

SEQ ID NO: 46936 - protein, 29 aa, Artificial Sequence
  Cyclic GFR-binding peptide
QVQLSPISVLYKEIVRKKPIFLKYHYTLE

SEQ ID NO: 46937 - protein, 32 aa, Artificial Sequence
  Cyclic GFR-binding peptide
  MOD_RES (6), (7): Xaa is C or S
KVGKAXXVPTKLNAISVLYFDDMGVPTLKKYR

SEQ ID NO: 46938 - protein, 40 aa, Artificial Sequence; identical to SEQ ID NO: 7587
  Cyclic GFR-binding peptide
  MOD_RES (5), (6), (38), (40): Xaa is C or S

SEQ ID NO: 46939 - protein, 37 aa, Artificial Sequence
  Cyclic GFR-binding peptide
  MOD_RES (4), (4): Xaa is C or S
NVQXRPTQVQLSATSVLYYEIVRKKPIFLRKHRTLED

SEQ ID NO: 46940 - protein, 31 aa, Artificial Sequence
  Cyclic GFR-binding peptide
  MOD_RES (4), (5): Xaa is C or S
PKAXXVPTELSATSMLYYDEYDKVVLRKHRE

SEQ ID NO: 46941 - protein, 43 aa, Artificial Sequence; identical to SEQ ID NO: 7590
  Cyclic GFR-binding peptide
  MOD_RES (4), (41), (43): Xaa is C or S

SEQ ID NO: 46942 - protein, 36 aa, Artificial Sequence; identical to SEQ ID NO: 7589
  Cyclic GFR-binding peptide
  MOD_RES (3), (4), (36): Xaa is C or S

SEQ ID NO: 46943 - protein, 32 aa, Artificial Sequence
  Cyclic GFR-binding peptide
  MOD_RES (2), (3): Xaa is C or S
PXXVPQDLSPISILYKVGRTPKVLKYHYMVVK

SEQ ID NO: 46944 - protein, 32 aa, Artificial Sequence
  Cyclic GFR-binding peptide
  MOD_RES (4), (5): Xaa is C or S
PKAXXVPTELNAISMLYFDENEKVVLKKYRDM

SEQ ID NO: 46945 - protein, 30 aa, Artificial Sequence
  Cyclic GFR-binding peptide
  MOD_RES (30), (30): Xaa is C or S
NAISVLYFEIVRKKPIFLKKYRTLEDHLAX

SEQ ID NO: 46946 - protein, 32 aa, Artificial Sequence
  Cyclic GFR-binding peptide
  MOD_RES (30), (32): Xaa is C or S
TELNAISMLYFDENEKVVLKKYRDMVVEGXGX

SEQ ID NO: 46947 - protein, 34 aa, Artificial Sequence
  Cyclic GFR-binding peptide
  MOD_RES (5), (6): Xaa is C or S
VPKPXXAPTKLSPISVLYKDDSSNVILKYHYNMV

SEQ ID NO: 46948 - protein, 33 aa, Artificial Sequence
  Cyclic GFR-binding peptide
  MOD_RES (3), (4): Xaa is C or S
SPXXVPQDLSAISILYLVGRTPKVLKNYQMVVK

SEQ ID NO: 46949 - protein, 33 aa, Artificial Sequence
  Cyclic GFR-binding peptide
  MOD_RES (5), (6): Xaa is C or S
VPKPXXAPTQLSAISVLYLDDSSNVILKNYQNM

SEQ ID NO: 46950 - protein, 38 aa, Artificial Sequence; identical to SEQ ID NO: 7592
  Cyclic GFR-binding peptide
  MOD_RES (4), (5), (36), (38): Xaa is C or S

SEQ ID NO: 46951 - protein, 37 aa, Artificial Sequence; identical to SEQ ID NO: 7594
  Cyclic GFR-binding peptide
  MOD_RES (6), (6): Xaa is C or S

SEQ ID NO: 46952 - protein, 26 aa, Artificial Sequence
  Cyclic GFR-binding peptide
QLSATSVLYYEIVRKKPIFLRKHRTL

SEQ ID NO: 46953 - protein, 37 aa, Artificial Sequence; identical to SEQ ID NO: 7593
  Cyclic GFR-binding peptide
  MOD_RES (4), (5), (36): Xaa is C or S

SEQ ID NO: 46954 - protein, 23 aa, Artificial Sequence
  Cyclic GFR-binding peptide
TKLSPISVLYKDDSSNVILKYHY

SEQ ID NO: 46955 - protein, 37 aa, Artificial Sequence; identical to SEQ ID NO: 7596
  Cyclic GFR-binding peptide
  MOD_RES (3), (35), (37): Xaa is C or S

SEQ ID NO: 46956 - protein, 39 aa, Artificial Sequence; identical to SEQ ID NO: 7595
  Cyclic GFR-binding peptide
  MOD_RES (5), (6), (37), (39): Xaa is C or S

SEQ ID NO: 46957 - protein, 31 aa, Artificial Sequence; identical to SEQ ID NO: 7597
  Cyclic GFR-binding peptide
  MOD_RES (31), (31): Xaa is C or S

SEQ ID NO: 46958 - protein, 27 aa, Artificial Sequence
  Cyclic GFR-binding peptide
SQDLSAISILYLIGKTPKILKNYQMIV

SEQ ID NO: 46959 - protein, 30 aa, Artificial Sequence
  Cyclic GFR-binding peptide
  MOD_RES (3), (4): Xaa is C or S
KAXXAPTKLNAISVLYFDSSNNVILKKYRN

SEQ ID NO: 46960 - protein, 28 aa, Artificial Sequence
  Cyclic GFR-binding peptide
  MOD_RES (2), (3): Xaa is C or S
PXXVPQDLSAISILYLVGRTPKVLKNYQ

SEQ ID NO: 46961 - protein, 34 aa, Artificial Sequence
  Cyclic GFR-binding peptide
  MOD_RES (5), (6): Xaa is C or S
VPKPXXAPTKLSATSVLYYDDSSNVILRKHRNMV

SEQ ID NO: 46962 - protein, 33 aa, Artificial Sequence
  Cyclic GFR-binding peptide
QVQLSAISVLYLEIVRKKPIFLKNYQTLEDHLA

SEQ ID NO: 46963 - protein, 22 aa, Artificial Sequence
  Cyclic GFR-binding peptide
SATSMLYYDENEKVVLRKHRDM

SEQ ID NO: 46964 - protein, 32 aa, Artificial Sequence; identical to SEQ ID NO: 7599
  Cyclic GFR-binding peptide
  MOD_RES (1), (1): Xaa is C or S

SEQ ID NO: 46965 - protein, 29 aa, Artificial Sequence
  Cyclic GFR-binding peptide
  MOD_RES (3), (4): Xaa is C or S
KAXXVPTKLNAISVLYFDDMGVPTLKKYR

SEQ ID NO: 46966 - protein, 27 aa, Artificial Sequence
  Cyclic GFR-binding peptide
  MOD_RES (27), (27): Xaa is C or S
LSAISILYLVGRTPKVLKNYQMVVKSX

SEQ ID NO: 46967 - protein, 32 aa, Artificial Sequence
  Cyclic GFR-binding peptide
  MOD_RES (3), (4): Xaa is C or S
APXXVPQALSATSILYYVGRKPKVLRKHRMIV

SEQ ID NO: 46968 - protein, 31 aa, Artificial Sequence; identical to SEQ ID NO: 7604
  Cyclic GFR-binding peptide

SEQ ID NO: 46969 - protein, 31 aa, Artificial Sequence
  Cyclic GFR-binding peptide
  MOD_RES (4), (5): Xaa is C or S
ASPXXVSQDLSPISILYKIGKTPKILKYHYM

SEQ ID NO: 46970 - protein, 31 aa, Artificial Sequence
  Cyclic GFR-binding peptide
  MOD_RES (29), (31): Xaa is C or S
QDLSATSILYYVGRTPKVLRKHRMVVKSXKX

SEQ ID NO: 46971 - protein, 31 aa, Artificial Sequence
  Cyclic GFR-binding peptide
  MOD_RES (1), (2): Xaa is C or S
XXVPTKLSAISVLYLDDMGVPTLKNYQEGMS

SEQ ID NO: 46972 - protein, 40 aa, Artificial Sequence; identical to SEQ ID NO: 7607
  Cyclic GFR-binding peptide
  MOD_RES (5), (6), (38), (40): Xaa is C or S

SEQ ID NO: 46973 - protein, 24 aa, Artificial Sequence
  Cyclic GFR-binding peptide
LSATSMLYYDEYDKVVLRKHREMV

SEQ ID NO: 46974 - protein, 28 aa, Artificial Sequence
  Cyclic GFR-binding peptide
TELSATSMLYYDENEKVVLRKHRDMVVE

SEQ ID NO: 46975 - protein, 28 aa, Artificial Sequence
  Cyclic GFR-binding peptide
TKLNAISVLYFDDMGVPTLKKYREGMSV

SEQ ID NO: 46976 - protein, 28 aa, Artificial Sequence
  Cyclic GFR-binding peptide
KLSAISVLYLDDSSNVILKNYQNMVVRS

SEQ ID NO: 46977 - protein, 28 aa, Artificial Sequence
  Cyclic GFR-binding peptide
  MOD_RES (1), (2): Xaa is C or S
XXAPTKLSAISVLYLDSSNNVILKNYQN

SEQ ID NO: 46978 - protein, 31 aa, Artificial Sequence
  Cyclic GFR-binding peptide
  MOD_RES (3), (3): Xaa is C or S
PTXAPTKLSAISVLYLDDSSNVILKNYQNMV

SEQ ID NO: 46979 - protein, 39 aa, Artificial Sequence; identical to SEQ ID NO: 7609
  Cyclic GFR-binding peptide
  MOD_RES (5), (6), (37), (39): Xaa is C or S

SEQ ID NO: 46980 - protein, 37 aa, Artificial Sequence; identical to SEQ ID NO: 7610
  Cyclic GFR-binding peptide
  MOD_RES (5), (6): Xaa is C or S

SEQ ID NO: 46981 - protein, 30 aa, Artificial Sequence
  Cyclic GFR-binding peptide
  MOD_RES (28), (30): Xaa is C or S
LSPISMLYKDENEKVVLKYHYDMVVEGXGX

SEQ ID NO: 46982 - protein, 32 aa, Artificial Sequence
  Cyclic GFR-binding peptide
  MOD_RES (30), (32): Xaa is C or S
SQDLNAISILYFIGKTPKILKKYRMIVKSXKX

SEQ ID NO: 46983 - protein, 29 aa, Artificial Sequence
  Cyclic GFR-binding peptide
  MOD_RES (29), (29): Xaa is C or S
ELNAISMLYFDENEKVVLKKYRDMVVEGX

SEQ ID NO: 46984 - protein, 30 aa, Artificial Sequence
  Cyclic GFR-binding peptide
  MOD_RES (28), (30): Xaa is C or S
LSATSMLYYDENEKVVLRKHRDMVVEGXGX

SEQ ID NO: 46985 - protein, 25 aa, Artificial Sequence
  Cyclic GFR-binding peptide
KLSATSVLYYDDMGVPTLRKHREGM

SEQ ID NO: 46986 - protein, 34 aa, Artificial Sequence
  Cyclic GFR-binding peptide
  MOD_RES (5), (6): Xaa is C or S
VGKAXXVPTKLSATSVLYYDDMGVPTLRKHREGM

SEQ ID NO: 46987 - protein, 25 aa, Artificial Sequence
  Cyclic GFR-binding peptide
PTKLSPISVLYKDSSNNVILKYHYN

SEQ ID NO: 46988 - protein, 29 aa, Artificial Sequence
  Cyclic GFR-binding peptide
  MOD_RES (2), (3): Xaa is C or S
PXXAPTQLSATSVLYYDDSSNVILRKHRN

SEQ ID NO: 46989 - protein, 29 aa, Artificial Sequence
  Cyclic GFR-binding peptide
  MOD_RES (3), (4): Xaa is C or S
SPXXVSQDLNAISILYFIGKTPKILKKYR

SEQ ID NO: 46990 - protein, 40 aa, Artificial Sequence; identical to SEQ ID NO: 7616
  Cyclic GFR-binding peptide
  MOD_RES (6), (7), (39): Xaa is C or S

SEQ ID NO: 46991 - protein, 40 aa, Artificial Sequence; identical to SEQ ID NO: 7617
  Cyclic GFR-binding peptide
  MOD_RES (1), (38), (40): Xaa is C or S

SEQ ID NO: 46992 - protein, 37 aa, Artificial Sequence; identical to SEQ ID NO: 7618
  Cyclic GFR-binding peptide
  MOD_RES (3), (4), (35), (37): Xaa is C or S

SEQ ID NO: 46993 - protein, 27 aa, Artificial Sequence
  Cyclic GFR-binding peptide
QLSAISVLYLEIVRKKPIFLKNYQTLE

SEQ ID NO: 46994 - protein, 36 aa, Artificial Sequence; identical to SEQ ID NO: 7619
  Cyclic GFR-binding peptide
  MOD_RES (3), (4), (35): Xaa is C or S

SEQ ID NO: 46995 - protein, 42 aa, Artificial Sequence; identical to SEQ ID NO: 7620
  Cyclic GFR-binding peptide
  MOD_RES (5), (42): Xaa is C or S

SEQ ID NO: 46996 - protein, 36 aa, Artificial Sequence; identical to SEQ ID NO: 7621
  Cyclic GFR-binding peptide
  MOD_RES (35), (35): Xaa is C or S

SEQ ID NO: 46997 - protein, 30 aa, Artificial Sequence
  Cyclic GFR-binding peptide
  MOD_RES (27), (29): Xaa is C or S
SATSMLYYDENEKVVLRKHRDMVVEGXGXR

SEQ ID NO: 46998 - protein, 32 aa, Artificial Sequence; identical to SEQ ID NO: 7622
  Cyclic GFR-binding peptide
  MOD_RES (1), (32): Xaa is C or S

SEQ ID NO: 46999 - protein, 27 aa, Artificial Sequence
  Cyclic GFR-binding peptide
  MOD_RES (1), (1): Xaa is C or S
XVPTKLSATSVLYYDDMGVPTLRKHRE

SEQ ID NO: 47000 - protein, 34 aa, Artificial Sequence
  Cyclic GFR-binding peptide
  MOD_RES (4), (5): Xaa is C or S
PKPXXAPTKLSATSVLYYDDSSNVILRKHRNMVV

SEQ ID NO: 47001 - protein, 27 aa, Artificial Sequence
  Cyclic GFR-binding peptide
VPTELSPISMLYKDEYDKVVLKYHYEM

SEQ ID NO: 47002 - protein, 31 aa, Artificial Sequence
  Cyclic GFR-binding peptide
  MOD_RES (1), (1): Xaa is C or S
XRPTQVQLSATSVLYYEIVRKKPIFLRKHRT

SEQ ID NO: 47003 - protein, 32 aa, Artificial Sequence
  Cyclic GFR-binding peptide
  MOD_RES (29), (31): Xaa is C or S
ELSPISMLYKDEYDKVVLKYHYEMVVEGXGXR

SEQ ID NO: 47004 - protein, 31 aa, Artificial Sequence
  Cyclic GFR-binding peptide
  MOD_RES (28), (30): Xaa is C or S
LSAISVLYLDSSNNVILKNYQNMVVKAXGXH

SEQ ID NO: 47005 - protein, 24 aa, Artificial Sequence
  Cyclic GFR-binding peptide
LSPISMLYKDEYDKVVLKYHYEMV

SEQ ID NO: 47006 - protein, 31 aa, Artificial Sequence
  Cyclic GFR-binding peptide
  MOD_RES (3), (4): Xaa is C or S
APXXVPQALSATSILYYVGRKPKVLRKHRMI

SEQ ID NO: 47007 - protein, 28 aa, Artificial Sequence
  Cyclic GFR-binding peptide
  MOD_RES (28), (28): Xaa is C or S
LSPISMLYKDENEKVVLKYHYDMVVEGX

SEQ ID NO: 47008 - protein, 31 aa, Artificial Sequence
  Cyclic GFR-binding peptide
  MOD_RES (28), (30): Xaa is C or S
LSPISMLYKDEYDKVVLKYHYEMVVEGXGXR

SEQ ID NO: 47009 - protein, 31 aa, Artificial Sequence
  Cyclic GFR-binding peptide
  MOD_RES (31), (31): Xaa is C or S
PTELSATSMLYYDEYDKVVLRKHREMVVEGX

SEQ ID NO: 47010 - protein, 24 aa, Artificial Sequence
  Cyclic GFR-binding peptide
QALSATSILYYVGRKPKVLRKHRM

SEQ ID NO: 47011 - protein, 33 aa, Artificial Sequence
  Cyclic GFR-binding peptide
  MOD_RES (30), (32): Xaa is C or S
TQLSATSVLYYDDSSNVILRKHRNMVVRAXGXH

SEQ ID NO: 47012 - protein, 30 aa, Artificial Sequence
  Cyclic GFR-binding peptide
  MOD_RES (30), (30): Xaa is C or S
TQLSAISVLYLDDSSNVILKNYQNMVVRAX

SEQ ID NO: 47013 - protein, 31 aa, Artificial Sequence
  Cyclic GFR-binding peptide
  MOD_RES (6), (6): Xaa is C or S
VTKPTXAPTKLSPISVLYKDDSSNVILKYHY

SEQ ID NO: 47014 - protein, 39 aa, Artificial Sequence; identical to SEQ ID NO: 7630
  Cyclic GFR-binding peptide
  MOD_RES (6), (7), (39): Xaa is C or S

SEQ ID NO: 47015 - protein, 34 aa, Artificial Sequence; identical to SEQ ID NO: 7631
  Cyclic GFR-binding peptide
  MOD_RES (1), (2), (33): Xaa is C or S

SEQ ID NO: 47016 - protein, 29 aa, Artificial Sequence
  Cyclic GFR-binding peptide
  MOD_RES (3), (3): Xaa is C or S
PTXAPTKLSATSVLYYDDSSNVILRKHRN

SEQ ID NO: 47017 - protein, 38 aa, Artificial Sequence; identical to SEQ ID NO: 7633
  Cyclic GFR-binding peptide
  MOD_RES (5), (6), (38): Xaa is C or S

SEQ ID NO: 47018 - protein, 28 aa, Artificial Sequence
  Cyclic GFR-binding peptide
  MOD_RES (1), (2): Xaa is C or S
XXAPTKLSATSVLYYDDSSNVILRKHRN

SEQ ID NO: 47019 - protein, 25 aa, Artificial Sequence
  Cyclic GFR-binding peptide
QALSPISILYKVGRKPKVLKYHYMI

SEQ ID NO: 47020 - protein, 32 aa, Artificial Sequence
  Cyclic GFR-binding peptide
  MOD_RES (2), (3): Xaa is C or S
PXXAPTKLSAISVLYLDDSSNVILKNYQNMVV

SEQ ID NO: 47021 - protein, 32 aa, Artificial Sequence
  Cyclic GFR-binding peptide
  MOD_RES (5), (5): Xaa is C or S
TKPTXAPTKLSATSVLYYDDSSNVILRKHRNM

SEQ ID NO: 47022 - protein, 39 aa, Artificial Sequence; identical to SEQ ID NO: 7637
  Cyclic GFR-binding peptide
  MOD_RES (3), (4), (36), (38): Xaa is C or S

SEQ ID NO: 47023 - protein, 35 aa, Artificial Sequence; identical to SEQ ID NO: 7638
  Cyclic GFR-binding peptide
  MOD_RES (1), (2), (33), (35): Xaa is C or S

SEQ ID NO: 47024 - protein, 38 aa, Artificial Sequence; identical to SEQ ID NO: 7639
  Cyclic GFR-binding peptide
  MOD_RES (3), (4), (35), (37): Xaa is C or S

SEQ ID NO: 47025 - protein, 34 aa, Artificial Sequence; identical to SEQ ID NO: 7640
  Cyclic GFR-binding peptide
  MOD_RES (1), (2), (34): Xaa is C or S

SEQ ID NO: 47026 - protein, 36 aa, Artificial Sequence; identical to SEQ ID NO: 7646
  Cyclic GFR-binding peptide
  MOD_RES (1), (2), (34), (36): Xaa is C or S

SEQ ID NO: 47027 - protein, 36 aa, Artificial Sequence
  Cyclic GFR-binding peptide
  MOD_RES (6), (7): Xaa is C or S
KIPKAXXVPTELSATSMLYYDENEKVVLRKHRDMVV

SEQ ID NO: 47028 - protein, 24 aa, Artificial Sequence
  Cyclic GFR-binding peptide
PTQLSATSVLYYDDSSNVILRKHR

SEQ ID NO: 47029 - protein, 33 aa, Artificial Sequence
  Cyclic GFR-binding peptide
  MOD_RES (3), (4): Xaa is C or S
KPXXAPTQLSATSVLYYDDSSNVILRKHRNMVV

SEQ ID NO: 47030 - protein, 37 aa, Artificial Sequence; identical to SEQ ID NO: 7649
  Cyclic GFR-binding peptide
  MOD_RES (5), (6), (37): Xaa is C or S

SEQ ID NO: 47031 - protein, 29 aa, Artificial Sequence
  Cyclic GFR-binding peptide
  MOD_RES (26), (28): Xaa is C or S
SAISILYLVGRTPKVLKNYQMVVKSXKXS

SEQ ID NO: 47032 - protein, 37 aa, Artificial Sequence; identical to SEQ ID NO: 7652
  Cyclic GFR-binding peptide
  MOD_RES (3), (3): Xaa is C or S

SEQ ID NO: 47033 - protein, 25 aa, Artificial Sequence
  Cyclic GFR-binding peptide
PQALNAISILYFVGRKPKVLKKYRM

SEQ ID NO: 47034 - protein, 25 aa, Artificial Sequence
  Cyclic GFR-binding peptide
APTKLSAISVLYLDSSNNVILKNYQ

SEQ ID NO: 47035 - protein, 22 aa, Artificial Sequence
  Cyclic GFR-binding peptide
SPISVLYKDDSSNVILKYHYNM

SEQ ID NO: 47036 - protein, 37 aa, Artificial Sequence; identical to SEQ ID NO: 7655
  Cyclic GFR-binding peptide
  MOD_RES (3), (3): Xaa is C or S

SEQ ID NO: 47037 - protein, 39 aa, Artificial Sequence; identical to SEQ ID NO: 7656
  Cyclic GFR-binding peptide
  MOD_RES (4), (5), (37), (39): Xaa is C or S

SEQ ID NO: 47038 - protein, 24 aa, Artificial Sequence
  Cyclic GFR-binding peptide
LNAISMLYFDEYDKVVLKKYREMV

SEQ ID NO: 47039 - protein, 37 aa, Artificial Sequence; identical to SEQ ID NO: 7657
  Cyclic GFR-binding peptide
  MOD_RES (5), (6): Xaa is C or S

SEQ ID NO: 47040 - protein, 35 aa, Artificial Sequence
  Cyclic GFR-binding peptide
  MOD_RES (6), (6): Xaa is C or S
VTKPTXAPTKLSPISVLYKDDSSNVILKYHYNMVV

SEQ ID NO: 47041 - protein, 23 aa, Artificial Sequence
  Cyclic GFR-binding peptide
ALSATSILYYVGRKPKVLRKHRM

SEQ ID NO: 47042 - protein, 24 aa, Artificial Sequence
  Cyclic GFR-binding peptide
PTKLSPISVLYKDSSNNVILKYHY

SEQ ID NO: 47043 - protein, 22 aa, Artificial Sequence
  Cyclic GFR-binding peptide
SAISILYLVGRKPKVLKNYQMI

SEQ ID NO: 47044 - protein, 33 aa, Artificial Sequence; identical to SEQ ID NO: 7660
  Cyclic GFR-binding peptide
  MOD_RES (2), (3): Xaa is C or S

SEQ ID NO: 47045 - protein, 32 aa, Artificial Sequence; identical to SEQ ID NO: 7661
  Cyclic GFR-binding peptide
  MOD_RES (1), (2): Xaa is C or S

SEQ ID NO: 47046 - protein, 33 aa, Artificial Sequence
  Cyclic GFR-binding peptide
  MOD_RES (6), (7): Xaa is C or S
TVPKPXXAPTQLSAISVLYLDDSSNVILKNYQN

SEQ ID NO: 47047 - protein, 30 aa, Artificial Sequence
  Cyclic GFR-binding peptide
QVQLSATSVLYYEIVRKKPIFLRKHRTLED

SEQ ID NO: 47048 - protein, 35 aa, Artificial Sequence; identical to SEQ ID NO: 7662
  Cyclic GFR-binding peptide
  MOD_RES (33), (35): Xaa is C or S

SEQ ID NO: 47049 - protein, 29 aa, Artificial Sequence
  Cyclic GFR-binding peptide
NAISVLYFDDSSNVILKKYRAAAAAAAAA

SEQ ID NO: 47050 - protein, 31 aa, Artificial Sequence
  Cyclic GFR-binding peptide
  MOD_RES (28), (30): Xaa is C or S
ALSAISILYLVGRKPKVLKNYQMIVRSXKXS

SEQ ID NO: 47051 - protein, 27 aa, Artificial Sequence
  Cyclic GFR-binding peptide
QVQLSATSVLYYEIVRKKPIFLRKHRT

SEQ ID NO: 47052 - protein, 37 aa, Artificial Sequence; identical to SEQ ID NO: 7665
  Cyclic GFR-binding peptide
  MOD_RES (37), (37): Xaa is C or S

SEQ ID NO: 47053 - protein, 40 aa, Artificial Sequence; identical to SEQ ID NO: 7667
  Cyclic GFR-binding peptide
  MOD_RES (6), (7), (38), (40): Xaa is C or S

SEQ ID NO: 47054 - protein, 29 aa, Artificial Sequence
  Cyclic GFR-binding peptide
  MOD_RES (2), (3): Xaa is C or S
PXXVPQDLSATSILYYVGRTPKVLRKHRM

SEQ ID NO: 47055 - protein, 28 aa, Artificial Sequence
  Cyclic GFR-binding peptide
  MOD_RES (1), (1): Xaa is C or S
XVSQDLSAISILYLIGKTPKILKNYQMI

SEQ ID NO: 47056 - protein, 24 aa, Artificial Sequence
  Cyclic GFR-binding peptide
NAISMLYFDEYDKVVLKKYREMVV

SEQ ID NO: 47057 - protein, 29 aa, Artificial Sequence
  Cyclic GFR-binding peptide
VQLNAISVLYFEIVRKKPIFLKKYRTLED

SEQ ID NO: 47058 - protein, 30 aa, Artificial Sequence
  Cyclic GFR-binding peptide
  MOD_RES (1), (2): Xaa is C or S
XXVSQDLSPISILYKIGKTPKILKYHYMIV

SEQ ID NO: 47059 - protein, 30 aa, Artificial Sequence
  Cyclic GFR-binding peptide
  MOD_RES (4), (5): Xaa is C or S
PKPXXAPTKLSATSVLYYDDSSNVILRKHR

SEQ ID NO: 47060 - protein, 25 aa, Artificial Sequence
  Cyclic GFR-binding peptide
SATSMLYYDENEKVVLRKHRDMVVE

SEQ ID NO: 47061 - protein, 32 aa, Artificial Sequence
  Cyclic GFR-binding peptide
  MOD_RES (31), (31): Xaa is C or S
PTELSATSMLYYDEYDKVVLRKHREMVVEGXG

SEQ ID NO: 47062 - protein, 29 aa, Artificial Sequence
  Cyclic GFR-binding peptide
  MOD_RES (27), (29): Xaa is C or S
LSAISILYLVGRTPKVLKNYQMVVKSXKX

SEQ ID NO: 47063 - protein, 41 aa, Artificial Sequence; identical to SEQ ID NO: 7668
  Cyclic GFR-binding peptide
  MOD_RES (1), (38), (40): Xaa is C or S

SEQ ID NO: 47064 - protein, 27 aa, Artificial Sequence
  Cyclic GFR-binding peptide
  MOD_RES (2), (2): Xaa is C or S
TXAPTKLSATSVLYYDDSSNVILRKHR

SEQ ID NO: 47065 - protein, 23 aa, Artificial Sequence
  Cyclic GFR-binding peptide
NAISVLYFDSSNNVILKKYRNMV

SEQ ID NO: 47066 - protein, 32 aa, Artificial Sequence
  Cyclic GFR-binding peptide
  MOD_RES (2), (3): Xaa is C or S
AXXVPTELNAISMLYFDENEKVVLKKYRDMVV

SEQ ID NO: 47067 - protein, 33 aa, Artificial Sequence
  Cyclic GFR-binding peptide
  MOD_RES (4), (5): Xaa is C or S
PKPXXAPTKLSPISVLYKDDSSNVILKYHYNMV

SEQ ID NO: 47068 - protein, 31 aa, Artificial Sequence
  Cyclic GFR-binding peptide
PTQVQLNAISVLYFEIVRKKPIFLKKYRTLE

SEQ ID NO: 47069 - protein, 37 aa, Artificial Sequence; identical to SEQ ID NO: 7674
  Cyclic GFR-binding peptide
  MOD_RES (6), (7): Xaa is C or S

SEQ ID NO: 47070 - protein, 25 aa, Artificial Sequence
  Cyclic GFR-binding peptide
ALSPISILYKVGRKPKVLKYHYMIV

SEQ ID NO: 47071 - protein, 32 aa, Artificial Sequence
  Cyclic GFR-binding peptide
  MOD_RES (6), (7): Xaa is C or S
KVGKAXXVPTKLSAISVLYLDDMGVPTLKNYQ

SEQ ID NO: 47072 - protein, 33 aa, Artificial Sequence; identical to SEQ ID NO: 7676
  Cyclic GFR-binding peptide
  MOD_RES (2), (3): Xaa is C or S

SEQ ID NO: 47073 - protein, 29 aa, Artificial Sequence
  Cyclic GFR-binding peptide
  MOD_RES (27), (29): Xaa is C or S
LSAISILYLIGKTPKILKNYQMIVKSXKX

SEQ ID NO: 47074 - protein, 37 aa, Artificial Sequence; identical to SEQ ID NO: 7678
  Cyclic GFR-binding peptide
  MOD_RES (2), (3), (35), (37): Xaa is C or S

SEQ ID NO: 47075 - protein, 27 aa, Artificial Sequence
  Cyclic GFR-binding peptide
  MOD_RES (1), (2): Xaa is C or S
XXVPQALSPISILYKVGRKPKVLKYHY

SEQ ID NO: 47076 - protein, 31 aa, Artificial Sequence
  Cyclic GFR-binding peptide
  MOD_RES (30), (30): Xaa is C or S
TELNAISMLYFDEYDKVVLKKYREMVVEGXG

SEQ ID NO: 47077 - protein, 23 aa, Artificial Sequence
  Cyclic GFR-binding peptide
LSPISILYKVGRTPKVLKYHYMV

SEQ ID NO: 47078 - protein, 30 aa, Artificial Sequence
  Cyclic GFR-binding peptide
  MOD_RES (1), (1): Xaa is C or S
XAPTKLSAISVLYLDSSNNVILKNYQNMVV

SEQ ID NO: 47079 - protein, 26 aa, Artificial Sequence
  Cyclic GFR-binding peptide
LSATSMLYYDENEKVVLRKHRDMVVE

SEQ ID NO: 47080 - protein, 32 aa, Artificial Sequence
  Cyclic GFR-binding peptide
  MOD_RES (6), (6): Xaa is C or S
VTKPTXAPTKLSPISVLYKDDSSNVILKYHYN

SEQ ID NO: 47081 - protein, 34 aa, Artificial Sequence
  Cyclic GFR-binding peptide
  MOD_RES (4), (5): Xaa is C or S
ASPXXVPQDLNAISILYFVGRTPKVLKKYRMVVK

SEQ ID NO: 47082 - protein, 29 aa, Artificial Sequence
  Cyclic GFR-binding peptide
LNAISVLYFEIVRKKPIFLKKYRTLEDHL

SEQ ID NO: 47083 - protein, 34 aa, Artificial Sequence; identical to SEQ ID NO: 7680
  Cyclic GFR-binding peptide
  MOD_RES (3), (4): Xaa is C or S

SEQ ID NO: 47084 - protein, 38 aa, Artificial Sequence; identical to SEQ ID NO: 7682
  Cyclic GFR-binding peptide
  MOD_RES (3), (4), (36), (38): Xaa is C or S

SEQ ID NO: 47085 - protein, 30 aa, Artificial Sequence
  Cyclic GFR-binding peptide
  MOD_RES (30), (30): Xaa is C or S
PQDLNAISILYFVGRTPKVLKKYRMVVKSX

SEQ ID NO: 47086 - protein, 33 aa, Artificial Sequence
  Cyclic GFR-binding peptide
  MOD_RES (2), (2): Xaa is C or S
QXRPTQVQLSAISVLYLEIVRKKPIFLKNYQTL

SEQ ID NO: 47087 - protein, 39 aa, Artificial Sequence; identical to SEQ ID NO: 7684
  Cyclic GFR-binding peptide
  MOD_RES (5), (5): Xaa is C or S

SEQ ID NO: 47088 - protein, 33 aa, Artificial Sequence
  Cyclic GFR-binding peptide
RPTQVQLSATSVLYYEIVRKKPIFLRKHRTLED

SEQ ID NO: 47089 - protein, 36 aa, Artificial Sequence
  Cyclic GFR-binding peptide
  MOD_RES (4), (4): Xaa is C or S
NVQXRPTQVQLSPISVLYKEIVRKKPIFLKYHYTLE

SEQ ID NO: 47090 - protein, 24 aa, Artificial Sequence
  Cyclic GFR-binding peptide
SAISVLYLEIVRKKPIFLKNYQTL

SEQ ID NO: 47091 - protein, 35 aa, Artificial Sequence; identical to SEQ ID NO: 7685
  Cyclic GFR-binding peptide
  MOD_RES (1), (1): Xaa is C or S

SEQ ID NO: 47092 - protein, 28 aa, Artificial Sequence
  Cyclic GFR-binding peptide
  MOD_RES (28), (28): Xaa is C or S
LNAISVLYFDSSNNVILKKYRNMVVKAX

SEQ ID NO: 47093 - protein, 38 aa, Artificial Sequence; identical to SEQ ID NO: 7686
  Cyclic GFR-binding peptide
  MOD_RES (6), (7): Xaa is C or S

SEQ ID NO: 47094 - protein, 31 aa, Artificial Sequence
  Cyclic GFR-binding peptide
  MOD_RES (4), (5): Xaa is C or S
PKPXXAPTKLSATSVLYYDDSSNVILRKHRN

SEQ ID NO: 47095 - protein, 33 aa, Artificial Sequence
  Cyclic GFR-binding peptide
  MOD_RES (6), (7): Xaa is C or S
KIPKAXXVPTELNAISMLYFDENEKVVLKKYRD

SEQ ID NO: 47096 - protein, 33 aa, Artificial Sequence; identical to SEQ ID NO: 7689
  Cyclic GFR-binding peptide
  MOD_RES (31), (33): Xaa is C or S

SEQ ID NO: 47097 - protein, 31 aa, Artificial Sequence
  Cyclic GFR-binding peptide
  MOD_RES (2), (3): Xaa is C or S
PXXAPTKLSATSVLYYDDSSNVILRKHRNMV

SEQ ID NO: 47098 - protein, 24 aa, Artificial Sequence
  Cyclic GFR-binding peptide
PTELSPISMLYKDENEKVVLKYHY

SEQ ID NO: 47099 - protein, 29 aa, Artificial Sequence
  Cyclic GFR-binding peptide
  MOD_RES (29), (29): Xaa is C or S
QDLSATSILYYIGKTPKILRKHRMIVKSX

SEQ ID NO: 47100 - protein, 30 aa, Artificial Sequence
  Cyclic GFR-binding peptide
  MOD_RES (4), (5): Xaa is C or S
ASPXXVPQDLNAISILYFVGRTPKVLKKYR

SEQ ID NO: 47101 - protein, 39 aa, Artificial Sequence; identical to SEQ ID NO: 7692
  Cyclic GFR-binding peptide
  MOD_RES (5), (6), (37), (39): Xaa is C or S

SEQ ID NO: 47102 - protein, 21 aa, Artificial Sequence
  Cyclic GFR-binding peptide
LNAISILYFIGKTPKILKKYR

SEQ ID NO: 47103 - protein, 33 aa, Artificial Sequence; identical to SEQ ID NO: 7694
  Cyclic GFR-binding peptide
  MOD_RES (31), (33): Xaa is C or S

SEQ ID NO: 47104 - protein, 41 aa, Artificial Sequence; identical to SEQ ID NO: 7695
  Cyclic GFR-binding peptide
  MOD_RES (6), (7), (39), (41): Xaa is C or S

SEQ ID NO: 47105 - protein, 26 aa, Artificial Sequence
  Cyclic GFR-binding peptide
  MOD_RES (1), (1): Xaa is C or S
XAPTKLSPISVLYKDDSSNVILKYHY

SEQ ID NO: 47106 - protein, 24 aa, Artificial Sequence
  Cyclic GFR-binding peptide
KLSATSVLYYDDSSNVILRKHRNM

SEQ ID NO: 47107 - protein, 40 aa, Artificial Sequence; identical to SEQ ID NO: 7696
  Cyclic GFR-binding peptide
  MOD_RES (5), (6), (37), (39): Xaa is C or S

SEQ ID NO: 47108 - protein, 30 aa, Artificial Sequence
  Cyclic GFR-binding peptide
  MOD_RES (1), (2): Xaa is C or S
XXVPTELSPISMLYKDEYDKVVLKYHYEMV

SEQ ID NO: 47109 - protein, 29 aa, Artificial Sequence
  Cyclic GFR-binding peptide
  MOD_RES (27), (29): Xaa is C or S
LSPISILYKVGRTPKVLKYHYMVVKSXKX

SEQ ID NO: 47110 - protein, 33 aa, Artificial Sequence
  Cyclic GFR-binding peptide
  MOD_RES (30), (32): Xaa is C or S
TELNAISMLYFDEYDKVVLKKYREMVVEGXGXR

SEQ ID NO: 47111 - protein, 23 aa, Artificial Sequence
  Cyclic GFR-binding peptide
QLSAISVLYLDDSSNVILKNYQN

SEQ ID NO: 47112 - protein, 25 aa, Artificial Sequence
  Cyclic GFR-binding peptide
ALNAISILYFVGRKPKVLKKYRMIV

SEQ ID NO: 47113 - protein, 32 aa, Artificial Sequence
  Cyclic GFR-binding peptide
  MOD_RES (2), (3): Xaa is C or S
PXXAPTQLSAISVLYLDDSSNVILKNYQNMVV

SEQ ID NO: 47114 - protein, 37 aa, Artificial Sequence
  Cyclic GFR-binding peptide
  MOD_RES (4), (4): Xaa is C or S
NVQXRPTQVQLNAISVLYFEIVRKKPIFLKKYRTLED

SEQ ID NO: 47115 - protein, 20 aa, Artificial Sequence
  Cyclic GFR-binding peptide
SATSVLYYDDSSNVILRKHR

SEQ ID NO: 47116 - protein, 27 aa, Artificial Sequence
  Cyclic GFR-binding peptide
SAISMLYLDEYDKVVLKNYQDEYDKVV

SEQ ID NO: 47117 - protein, 29 aa, Artificial Sequence
  Cyclic GFR-binding peptide
VPQALSAISILYLVGRKPKVLKNYQMIVR

SEQ ID NO: 47118 - protein, 35 aa, Artificial Sequence; identical to SEQ ID NO: 7698
  Cyclic GFR-binding peptide
  MOD_RES (4), (4): Xaa is C or S

SEQ ID NO: 47119 - protein, 36 aa, Artificial Sequence; identical to SEQ ID NO: 7699
  Cyclic GFR-binding peptide
  MOD_RES (33), (35): Xaa is C or S

SEQ ID NO: 47120 - protein, 30 aa, Artificial Sequence
  Cyclic GFR-binding peptide
  MOD_RES (28), (30): Xaa is C or S
LSAISVLYLDDSSNVILKNYQNMVVRAXGX

SEQ ID NO: 47121 - protein, 28 aa, Artificial Sequence
  Cyclic GFR-binding peptide
QDLNAISILYFVGRTPKVLKKYRMVVKS

SEQ ID NO: 47122 - protein, 31 aa, Artificial Sequence
  Cyclic GFR-binding peptide
  MOD_RES (1), (2): Xaa is C or S
XXAPTQLSPISVLYKDDSSNVILKYHYNMVV

SEQ ID NO: 47123 - protein, 38 aa, Artificial Sequence; identical to SEQ ID NO: 7702
  Cyclic GFR-binding peptide
  MOD_RES (5), (6), (38): Xaa is C or S

SEQ ID NO: 47124 - protein, 30 aa, Artificial Sequence; identical to SEQ ID NO: 7704
  Cyclic GFR-binding peptide

SEQ ID NO: 47125 - protein, 33 aa, Artificial Sequence
  Cyclic GFR-binding peptide
  MOD_RES (30), (32): Xaa is C or S
PQALSATSILYYVGRKPKVLRKHRMIVRSXKXS

SEQ ID NO: 47126 - protein, 36 aa, Artificial Sequence; identical to SEQ ID NO: 7708
  Cyclic GFR-binding peptide
  MOD_RES (5), (6): Xaa is C or S

SEQ ID NO: 47127 - protein, 32 aa, Artificial Sequence
  Cyclic GFR-binding peptide
  MOD_RES (29), (31): Xaa is C or S
QLSAISVLYLDDSSNVILKNYQNMVVRAXGXH

SEQ ID NO: 47128 - protein, 22 aa, Artificial Sequence
  Cyclic GFR-binding peptide
SAISVLYLDDMGVPTLKNYQEG

SEQ ID NO: 47129 - protein, 42 aa, Artificial Sequence; identical to SEQ ID NO: 7709
  Cyclic GFR-binding peptide
  MOD_RES (6), (7), (39), (41): Xaa is C or S

SEQ ID NO: 47130 - protein, 35 aa, Artificial Sequence
  Cyclic GFR-binding peptide
  MOD_RES (4), (4): Xaa is C or S
NVQXRPTQVQLSAISVLYLEIVRKKPIFLKNYQTL

SEQ ID NO: 47131 - protein, 32 aa, Artificial Sequence
  Cyclic GFR-binding peptide
  MOD_RES (29), (31): Xaa is C or S
LNAISVLYFDDMGVPTLKKYREGMSVAEXGXR

SEQ ID NO: 47132 - protein, 38 aa, Artificial Sequence; identical to SEQ ID NO: 7711
  Cyclic GFR-binding peptide
  MOD_RES (5), (6), (37): Xaa is C or S

SEQ ID NO: 47133 - protein, 27 aa, Artificial Sequence
  Cyclic GFR-binding peptide
  MOD_RES (1), (1): Xaa is C or S
XAPTKLSATSVLYYDDSSNVILRKHRN

SEQ ID NO: 47134 - protein, 31 aa, Artificial Sequence
  Cyclic GFR-binding peptide
  MOD_RES (3), (4): Xaa is C or S
SPXXVSQDLSATSILYYIGKTPKILRKHRMI

SEQ ID NO: 47135 - protein, 31 aa, Artificial Sequence
  Cyclic GFR-binding peptide
  MOD_RES (2), (3): Xaa is C or S
PXXVPQALSATSILYYVGRKPKVLRKHRMIV

SEQ ID NO: 47136 - protein, 38 aa, Artificial Sequence; identical to SEQ ID NO: 7712
  Cyclic GFR-binding peptide
  MOD_RES (5), (6), (37): Xaa is C or S

SEQ ID NO: 47137 - protein, 35 aa, Artificial Sequence; identical to SEQ ID NO: 7713
  Cyclic GFR-binding peptide
  MOD_RES (5), (5): Xaa is C or S

SEQ ID NO: 47138 - protein, 36 aa, Artificial Sequence; identical to SEQ ID NO: 7714
  Cyclic GFR-binding peptide
  MOD_RES (5), (6): Xaa is C or S

SEQ ID NO: 47139 - protein, 34 aa, Artificial Sequence
  Cyclic GFR-binding peptide
  MOD_RES (31), (33): Xaa is C or S
PTQLSPISVLYKDDSSNVILKYHYNMVVRAXGXH

SEQ ID NO: 47140 - protein, 38 aa, Artificial Sequence
  Cyclic GFR-binding peptide
  MOD_RES (5), (5): Xaa is C or S
RNVQXRPTQVQLSPISVLYKEIVRKKPIFLKYHYTLED

SEQ ID NO: 47141 - protein, 33 aa, Artificial Sequence; identical to SEQ ID NO: 7717
  Cyclic GFR-binding peptide
  MOD_RES (31), (33): Xaa is C or S

SEQ ID NO: 47142 - protein, 34 aa, Artificial Sequence; identical to SEQ ID NO: 7719
  Cyclic GFR-binding peptide
  MOD_RES (3), (4): Xaa is C or S

SEQ ID NO: 47143 - protein, 30 aa, Artificial Sequence
  Cyclic GFR-binding peptide
QLNAISVLYFEIVRKKPIFLKKYRTLEDHL

SEQ ID NO: 47144 - protein, 35 aa, Artificial Sequence; identical to SEQ ID NO: 7722
  Cyclic GFR-binding peptide
  MOD_RES (1), (1): Xaa is C or S

SEQ ID NO: 47145 - protein, 29 aa, Artificial Sequence
  Cyclic GFR-binding peptide
VSQDLNAISILYFIGKTPKILKKYRMIVK

SEQ ID NO: 47146 - protein, 39 aa, Artificial Sequence; identical to SEQ ID NO: 7724
  Cyclic GFR-binding peptide
  MOD_RES (4), (5), (36), (38): Xaa is C or S

SEQ ID NO: 47147 - protein, 32 aa, Artificial Sequence
  Cyclic GFR-binding peptide
  MOD_RES (4), (5): Xaa is C or S
AAPXXVPQALNAISILYFVGRKPKVLKKYRMI

SEQ ID NO: 47148 - protein, 29 aa, Artificial Sequence
  Cyclic GFR-binding peptide
  MOD_RES (3), (4): Xaa is C or S
SPXXVPQDLSATSILYYVGRTPKVLRKHR

SEQ ID NO: 47149 - protein, 33 aa, Artificial Sequence; identical to SEQ ID NO: 7725
  Cyclic GFR-binding peptide
  MOD_RES (31), (33): Xaa is C or S

SEQ ID NO: 47150 - protein, 33 aa, Artificial Sequence
  Cyclic GFR-binding peptide
  MOD_RES (30), (32): Xaa is C or S
SATSVLYYEIVRKKPIFLRKHRTLEDHLAXKXE

SEQ ID NO: 47151 - protein, 37 aa, Artificial Sequence; identical to SEQ ID NO: 7726
  Cyclic GFR-binding peptide
  MOD_RES (2), (3), (35), (37): Xaa is C or S

SEQ ID NO: 47152 - protein, 31 aa, Artificial Sequence
  Cyclic GFR-binding peptide
  MOD_RES (31), (31): Xaa is C or S
PTQLSATSVLYYDDSSNVILRKHRNMVVRAX

SEQ ID NO: 47153 - protein, 22 aa, Artificial Sequence
  Cyclic GFR-binding peptide
SATSILYYVGRTPKVLRKHRMV

SEQ ID NO: 47154 - protein, 32 aa, Artificial Sequence; identical to SEQ ID NO: 7727
  Cyclic GFR-binding peptide
  MOD_RES (32), (32): Xaa is C or S

SEQ ID NO: 47155 - protein, 33 aa, Artificial Sequence
  Cyclic GFR-binding peptide
  MOD_RES (5), (6): Xaa is C or S
SASPXXVPQDLSAISILYLVGRTPKVLKNYQMV

SEQ ID NO: 47156 - protein, 25 aa, Artificial Sequence
  Cyclic GFR-binding peptide
PQDLSPISILYKVGRTPKVLKYHYM

SEQ ID NO: 47157 - protein, 27 aa, Artificial Sequence
  Cyclic GFR-binding peptide
ELSPISMLYKDEYDKVVLKYHYEMVVE

SEQ ID NO: 47158 - protein, 31 aa, Artificial Sequence
  Cyclic GFR-binding peptide
  MOD_RES (2), (3): Xaa is C or S
AXXVPTELSATSMLYYDENEKVVLRKHRDMV

SEQ ID NO: 47159 - protein, 29 aa, Artificial Sequence
  Cyclic GFR-binding peptide
VPTELSPISMLYKDEYDKVVLKYHYEMVV

SEQ ID NO: 47160 - protein, 30 aa, Artificial Sequence
  Cyclic GFR-binding peptide
  MOD_RES (1), (1): Xaa is C or S
XVPQDLSATSILYYVGRTPKVLRKHRMVVK

SEQ ID NO: 47161 - protein, 29 aa, Artificial Sequence
  Cyclic GFR-binding peptide
  MOD_RES (3), (4): Xaa is C or S
APXXVPQALSAISILYLVGRKPKVLKNYQ

SEQ ID NO: 47162 - protein, 27 aa, Artificial Sequence
  Cyclic GFR-binding peptide
SATSVLYYEIVRKKPIFLRKHRTLEDH

SEQ ID NO: 47163 - protein, 33 aa, Artificial Sequence
  Cyclic GFR-binding peptide
  MOD_RES (31), (33): Xaa is C or S
PTQLSAISVLYLDDSSNVILKNYQNMVVRAXGX

SEQ ID NO: 47164 - protein, 33 aa, Artificial Sequence
  Cyclic GFR-binding peptide
  MOD_RES (31), (33): Xaa is C or S
PTELNAISMLYFDEYDKVVLKKYREMVVEGXGX

SEQ ID NO: 47165 - protein, 31 aa, Artificial Sequence; identical to SEQ ID NO: 7732
  Cyclic GFR-binding peptide
  MOD_RES (1), (1): Xaa is C or S

SEQ ID NO: 47166 - protein, 31 aa, Artificial Sequence
  Cyclic GFR-binding peptide
  MOD_RES (31), (31): Xaa is C or S
PTKLSAISVLYLDDSSNVILKNYQNMVVRSX

SEQ ID NO: 47167 - protein, 37 aa, Artificial Sequence; identical to SEQ ID NO: 7734
  Cyclic GFR-binding peptide
  MOD_RES (4), (5), (37): Xaa is C or S

SEQ ID NO: 47168 - protein, 31 aa, Artificial Sequence
  Cyclic GFR-binding peptide
  MOD_RES (2), (3): Xaa is C or S
PXXVPQALSAISILYLVGRKPKVLKNYQMIV

SEQ ID NO: 47169 - protein, 37 aa, Artificial Sequence; identical to SEQ ID NO: 7737
  Cyclic GFR-binding peptide
  MOD_RES (5), (6): Xaa is C or S

SEQ ID NO: 47170 - protein, 39 aa, Artificial Sequence; identical to SEQ ID NO: 7738
  Cyclic GFR-binding peptide
  MOD_RES (4), (5), (38): Xaa is C or S

SEQ ID NO: 47171 - protein, 33 aa, Artificial Sequence; identical to SEQ ID NO: 7739
  Cyclic GFR-binding peptide
  MOD_RES (1), (2), (33): Xaa is C or S

SEQ ID NO: 47172 - protein, 37 aa, Artificial Sequence; identical to SEQ ID NO: 7740
  Cyclic GFR-binding peptide
  MOD_RES (6), (7): Xaa is C or S

SEQ ID NO: 47173 - protein, 28 aa, Artificial Sequence
  Cyclic GFR-binding peptide
QLSAISVLYLDDSSNVILKNYQNMVVRA

SEQ ID NO: 47174 - protein, 32 aa, Artificial Sequence
  Cyclic GFR-binding peptide
  MOD_RES (7), (7): Xaa is C or S
HVTKPTXAPTKLSAISVLYLDDSSNVILKNYQ

SEQ ID NO: 47175 - protein, 33 aa, Artificial Sequence; identical to SEQ ID NO: 7742
  Cyclic GFR-binding peptide
  MOD_RES (1), (32): Xaa is C or S

SEQ ID NO: 47176 - protein, 34 aa, Artificial Sequence
  Cyclic GFR-binding peptide
  MOD_RES (5), (6): Xaa is C or S
SASPXXVSQDLSATSILYYIGKTPKILRKHRMIV

SEQ ID NO: 47177 - protein, 29 aa, Artificial Sequence
  Cyclic GFR-binding peptide
SATSILYYVGRTPKVLRKHRAAAAAAAAA

SEQ ID NO: 47178 - protein, 35 aa, Artificial Sequence; identical to SEQ ID NO: 7745
  Cyclic GFR-binding peptide
  MOD_RES (1), (2), (33), (35): Xaa is C or S

SEQ ID NO: 47179 - protein, 41 aa, Artificial Sequence; identical to SEQ ID NO: 7746
  Cyclic GFR-binding peptide
  MOD_RES (5), (6), (38), (40): Xaa is C or S

SEQ ID NO: 47180 - protein, 39 aa, Artificial Sequence; identical to SEQ ID NO: 7748
  Cyclic GFR-binding peptide
  MOD_RES (6), (7), (39): Xaa is C or S

SEQ ID NO: 47181 - protein, 36 aa, Artificial Sequence; identical to SEQ ID NO: 7749
  Cyclic GFR-binding peptide
  MOD_RES (5), (6): Xaa is C or S

SEQ ID NO: 47182 - protein, 33 aa, Artificial Sequence
  Cyclic GFR-binding peptide
  MOD_RES (5), (6): Xaa is C or S
SASPXXVSQDLSAISILYLIGKTPKILKNYQMI

SEQ ID NO: 47183 - protein, 28 aa, Artificial Sequence
  Cyclic GFR-binding peptide
  MOD_RES (27), (27): Xaa is C or S
LNAISILYFIGKTPKILKKYRMIVKSXK

SEQ ID NO: 47184 - protein, 23 aa, Artificial Sequence
  Cyclic GFR-binding peptide
KLSATSVLYYDDMGVPTLRKHRE

SEQ ID NO: 47185 - protein, 26 aa, Artificial Sequence
  Cyclic GFR-binding peptide
  MOD_RES (1), (1): Xaa is C or S
XVPQALSATSILYYVGRKPKVLRKHR

SEQ ID NO: 47186 - protein, 37 aa, Artificial Sequence; identical to SEQ ID NO: 7751
  Cyclic GFR-binding peptide
  MOD_RES (6), (7): Xaa is C or S

SEQ ID NO: 47187 - protein, 24 aa, Artificial Sequence
  Cyclic GFR-binding peptide
NAISVLYFDDMGVPTLKKYREGMS

SEQ ID NO: 47188 - protein, 28 aa, Artificial Sequence
  Cyclic GFR-binding peptide
  MOD_RES (1), (1): Xaa is C or S
XAPTKLSATSVLYYDDSSNVILRKHRNM

SEQ ID NO: 47189 - protein, 36 aa, Artificial Sequence; identical to SEQ ID NO: 7752
  Cyclic GFR-binding peptide
  MOD_RES (4), (5), (36): Xaa is C or S

SEQ ID NO: 47190 - protein, 43 aa, Artificial Sequence; identical to SEQ ID NO: 7755
  Cyclic GFR-binding peptide
  MOD_RES (3), (40), (42): Xaa is C or S

SEQ ID NO: 47191 - protein, 38 aa, Artificial Sequence; identical to SEQ ID NO: 7756
  Cyclic GFR-binding peptide
  MOD_RES (2), (3), (35), (37): Xaa is C or S

SEQ ID NO: 47192 - protein, 39 aa, Artificial Sequence; identical to SEQ ID NO: 7759
  Cyclic GFR-binding peptide
  MOD_RES (4), (5), (36), (38): Xaa is C or S

SEQ ID NO: 47193 - protein, 29 aa, Artificial Sequence
  Cyclic GFR-binding peptide
  MOD_RES (27), (29): Xaa is C or S
LNAISILYFVGRKPKVLKKYRMIVRSXKX

SEQ ID NO: 47194 - protein, 33 aa, Artificial Sequence
  Cyclic GFR-binding peptide
  MOD_RES (1), (1): Xaa is C or S
XRPTQVQLSPISVLYKEIVRKKPIFLKYHYTLE

SEQ ID NO: 47195 - protein, 28 aa, Artificial Sequence
  Cyclic GFR-binding peptide
  MOD_RES (26), (28): Xaa is C or S
NAISILYFVGRTPKVLKKYRMVVKSXKX

SEQ ID NO: 47196 - protein, 33 aa, Artificial Sequence
  Cyclic GFR-binding peptide
  MOD_RES (31), (33): Xaa is C or S
PTKLSAISVLYLDDSSNVILKNYQNMVVRSXGX

SEQ ID NO: 47197 - protein, 27 aa, Artificial Sequence
  Cyclic GFR-binding peptide
  MOD_RES (27), (27): Xaa is C or S
LSAISILYLIGKTPKILKNYQMIVKSX

SEQ ID NO: 47198 - protein, 22 aa, Artificial Sequence
  Cyclic GFR-binding peptide
ELNAISMLYFDENEKVVLKKYR

SEQ ID NO: 47199 - protein, 32 aa, Artificial Sequence; identical to SEQ ID NO: 7762
  Cyclic GFR-binding peptide
  MOD_RES (1), (1): Xaa is C or S

SEQ ID NO: 47200 - protein, 37 aa, Artificial Sequence; identical to SEQ ID NO: 7764
  Cyclic GFR-binding peptide
  MOD_RES (2), (3), (35), (37): Xaa is C or S

SEQ ID NO: 47201 - protein, 27 aa, Artificial Sequence
  Cyclic GFR-binding peptide
  MOD_RES (1), (2): Xaa is C or S
XXVPTELSATSMLYYDENEKVVLRKHR

SEQ ID NO: 47202 - protein, 38 aa, Artificial Sequence; identical to SEQ ID NO: 7766
  Cyclic GFR-binding peptide
  MOD_RES (4), (5), (37): Xaa is C or S

SEQ ID NO: 47203 - protein, 26 aa, Artificial Sequence
  Cyclic GFR-binding peptide
LSAISILYLVGRTPKVLKNYQMVVKS

SEQ ID NO: 47204 - protein, 33 aa, Artificial Sequence
  Cyclic GFR-binding peptide
  MOD_RES (3), (3): Xaa is C or S
VQXRPTQVQLNAISVLYFEIVRKKPIFLKKYRT

SEQ ID NO: 47205 - protein, 31 aa, Artificial Sequence
  Cyclic GFR-binding peptide
  MOD_RES (28), (30): Xaa is C or S
LNAISVLYFDSSNNVILKKYRNMVVKAXGXH

SEQ ID NO: 47206 - protein, 29 aa, Artificial Sequence
  Cyclic GFR-binding peptide
  MOD_RES (29), (29): Xaa is C or S
QALSATSILYYVGRKPKVLRKHRMIVRSX

SEQ ID NO: 47207 - protein, 24 aa, Artificial Sequence
  Cyclic GFR-binding peptide
TKLSATSVLYYDDSSNVILRKHRN

SEQ ID NO: 47208 - protein, 24 aa, Artificial Sequence
  Cyclic GFR-binding peptide
DLNAISILYFVGRTPKVLKKYRMV

SEQ ID NO: 47209 - protein, 26 aa, Artificial Sequence
  Cyclic GFR-binding peptide
  MOD_RES (1), (1): Xaa is C or S
XVPQALSAISILYLVGRKPKVLKNYQ

SEQ ID NO: 47210 - protein, 32 aa, Artificial Sequence; identical to SEQ ID NO: 7770
  Cyclic GFR-binding peptide
  MOD_RES (1), (1): Xaa is C or S

SEQ ID NO: 47211 - protein, 36 aa, Artificial Sequence; identical to SEQ ID NO: 7773
  Cyclic GFR-binding peptide
  MOD_RES (2), (3), (34), (36): Xaa is C or S

SEQ ID NO: 47212 - protein, 36 aa, Artificial Sequence; identical to SEQ ID NO: 7776
  Cyclic GFR-binding peptide
  MOD_RES (2), (3), (34), (36): Xaa is C or S

SEQ ID NO: 47213 - protein, 36 aa, Artificial Sequence; identical to SEQ ID NO: 7777
  Cyclic GFR-binding peptide
  MOD_RES (1), (34), (36): Xaa is C or S

SEQ ID NO: 47214 - protein, 40 aa, Artificial Sequence; identical to SEQ ID NO: 7778
  Cyclic GFR-binding peptide
  MOD_RES (6), (7), (39): Xaa is C or S

SEQ ID NO: 47215 - protein, 25 aa, Artificial Sequence
  Cyclic GFR-binding peptide
ELSPISMLYKDEYDKVVLKYHYEMV

SEQ ID NO: 47216 - protein, 26 aa, Artificial Sequence
  Cyclic GFR-binding peptide
LSATSVLYYDDSSNVILRKHRNMVVR

SEQ ID NO: 47217 - protein, 36 aa, Artificial Sequence
  Cyclic GFR-binding peptide
  MOD_RES (6), (7): Xaa is C or S
ASASPXXVPQDLNAISILYFVGRTPKVLKKYRMVVK

SEQ ID NO: 47218 - protein, 28 aa, Artificial Sequence
  Cyclic GFR-binding peptide
SPISVLYKEIVRKKPIFLKYHYTLEDHL

SEQ ID NO: 47219 - protein, 30 aa, Artificial Sequence
  Cyclic GFR-binding peptide
  MOD_RES (1), (2): Xaa is C or S
XXVSQDLSAISILYLIGKTPKILKNYQMIV

SEQ ID NO: 47220 - protein, 27 aa, Artificial Sequence
  Cyclic GFR-binding peptide
PTQLSAISVLYLDDSSNVILKNYQNMV

SEQ ID NO: 47221 - protein, 28 aa, Artificial Sequence
  Cyclic GFR-binding peptide
ELSATSMLYYDEYDKVVLRKHREMVVEG

SEQ ID NO: 47222 - protein, 30 aa, Artificial Sequence
  Cyclic GFR-binding peptide
PTQLSAISVLYLDDSSNVILKNYQNMVVRA

SEQ ID NO: 47223 - protein, 34 aa, Artificial Sequence; identical to SEQ ID NO: 7780
  Cyclic GFR-binding peptide
  MOD_RES (3), (4): Xaa is C or S

SEQ ID NO: 47224 - protein, 31 aa, Artificial Sequence
  Cyclic GFR-binding peptide
  MOD_RES (1), (2): Xaa is C or S
XXVPTELNAISMLYFDENEKVVLKKYRDMVV

SEQ ID NO: 47225 - protein, 26 aa, Artificial Sequence
  Cyclic GFR-binding peptide
ALSAISILYLVGRKPKVLKNYQMIVR

SEQ ID NO: 47226 - protein, 35 aa, Artificial Sequence; identical to SEQ ID NO: 7781
  Cyclic GFR-binding peptide
  MOD_RES (2), (3), (34): Xaa is C or S

SEQ ID NO: 47227 - protein, 36 aa, Artificial Sequence
  Cyclic GFR-binding peptide
  MOD_RES (5), (5): Xaa is C or S
RNVQXRPTQVQLSATSVLYYEIVRKKPIFLRKHRTL

SEQ ID NO: 47228 - protein, 27 aa, Artificial Sequence
  Cyclic GFR-binding peptide
QDLSPISILYKVGRTPKVLKYHYMVVK

SEQ ID NO: 47229 - protein, 31 aa, Artificial Sequence
  Cyclic GFR-binding peptide
  MOD_RES (2), (3): Xaa is C or S
PXXVPQDLSPISILYKVGRTPKVLKYHYMVV

SEQ ID NO: 47230 - protein, 30 aa, Artificial Sequence
  Cyclic GFR-binding peptide
  MOD_RES (3), (4): Xaa is C or S
APXXVPQALSAISILYLVGRKPKVLKNYQM

SEQ ID NO: 47231 - protein, 20 aa, Artificial Sequence
  Cyclic GFR-binding peptide
SAISILYLIGKTPKILKNYQ

SEQ ID NO: 47232 - protein, 31 aa, Artificial Sequence
  Cyclic GFR-binding peptide
  MOD_RES (2), (3): Xaa is C or S
PXXVPQDLSATSILYYVGRTPKVLRKHRMVV

SEQ ID NO: 47233 - protein, 25 aa, Artificial Sequence
  Cyclic GFR-binding peptide
LSPISVLYKDDSSNVILKYHYNMVV

SEQ ID NO: 47234 - protein, 30 aa, Artificial Sequence; identical to SEQ ID NO: 826
  Cyclic GFR-binding peptide

SEQ ID NO: 47235 - protein, 41 aa, Artificial Sequence; identical to SEQ ID NO: 7783
  Cyclic GFR-binding peptide
  MOD_RES (6), (7), (39), (41): Xaa is C or S

SEQ ID NO: 47236 - protein, 25 aa, Artificial Sequence
  Cyclic GFR-binding peptide
VPQALSPISILYKVGRKPKVLKYHY

SEQ ID NO: 47237 - protein, 36 aa, Artificial Sequence; identical to SEQ ID NO: 7784
  Cyclic GFR-binding peptide
  MOD_RES (5), (6): Xaa is C or S

SEQ ID NO: 47238 - protein, 20 aa, Artificial Sequence
  Cyclic GFR-binding peptide
SATSILYYIGKTPKILRKHR

SEQ ID NO: 47239 - protein, 40 aa, Artificial Sequence; identical to SEQ ID NO: 7785
  Cyclic GFR-binding peptide
  MOD_RES (4), (5), (37), (39): Xaa is C or S

SEQ ID NO: 47240 - protein, 37 aa, Artificial Sequence; identical to SEQ ID NO: 7786
  Cyclic GFR-binding peptide
  MOD_RES (5), (6), (37): Xaa is C or S

SEQ ID NO: 47241 - protein, 37 aa, Artificial Sequence; identical to SEQ ID NO: 7787
  Cyclic GFR-binding peptide
  MOD_RES (2), (3), (34), (36): Xaa is C or S

SEQ ID NO: 47242 - protein, 31 aa, Artificial Sequence; identical to SEQ ID NO: 7788
  Cyclic GFR-binding peptide
  MOD_RES (1), (1): Xaa is C or S

SEQ ID NO: 47243 - protein, 28 aa, Artificial Sequence
  Cyclic GFR-binding peptide
QALSATSILYYVGRKPKVLRKHRMIVRS

SEQ ID NO: 47244 - protein, 31 aa, Artificial Sequence
  Cyclic GFR-binding peptide
SPISVLYKEIVRKKPIFLKYHYAAAAAAAAA

SEQ ID NO: 47245 - protein, 29 aa, Artificial Sequence
  Cyclic GFR-binding peptide
  MOD_RES (1), (2): Xaa is C or S
XXVSQDLSAISILYLIGKTPKILKNYQMI

SEQ ID NO: 47246 - protein, 39 aa, Artificial Sequence; identical to SEQ ID NO: 7792
  Cyclic GFR-binding peptide
  MOD_RES (3), (4), (36), (38): Xaa is C or S

SEQ ID NO: 47247 - protein, 29 aa, Artificial Sequence
  Cyclic GFR-binding peptide
  MOD_RES (2), (3): Xaa is C or S
PXXVSQDLSATSILYYIGKTPKILRKHRM

SEQ ID NO: 47248 - protein, 34 aa, Artificial Sequence; identical to SEQ ID NO: 7793
  Cyclic GFR-binding peptide
  MOD_RES (1), (33): Xaa is C or S

SEQ ID NO: 47249 - protein, 34 aa, Artificial Sequence; identical to SEQ ID NO: 7794
  Cyclic GFR-binding peptide
  MOD_RES (2), (3): Xaa is C or S

SEQ ID NO: 47250 - protein, 29 aa, Artificial Sequence
  Cyclic GFR-binding peptide
  MOD_RES (29), (29): Xaa is C or S
KLSAISVLYLDSSNNVILKNYQNMVVKAX

SEQ ID NO: 47251 - protein, 37 aa, Artificial Sequence; identical to SEQ ID NO: 7798
  Cyclic GFR-binding peptide
  MOD_RES (6), (7): Xaa is C or S

SEQ ID NO: 47252 - protein, 24 aa, Artificial Sequence
  Cyclic GFR-binding peptide
PTELNAISMLYFDEYDKVVLKKYR

SEQ ID NO: 47253 - protein, 32 aa, Artificial Sequence; identical to SEQ ID NO: 795
  Cyclic GFR-binding peptide

SEQ ID NO: 47254 - protein, 31 aa, Artificial Sequence; identical to SEQ ID NO: 7800
  Cyclic GFR-binding peptide
  MOD_RES (1), (1): Xaa is C or S

SEQ ID NO: 47255 - protein, 37 aa, Artificial Sequence; identical to SEQ ID NO: 7801
  Cyclic GFR-binding peptide
  MOD_RES (3), (4), (35), (37): Xaa is C or S

SEQ ID NO: 47256 - protein, 27 aa, Artificial Sequence
  Cyclic GFR-binding peptide
  MOD_RES (1), (2): Xaa is C or S
XXAPTKLSPISVLYKDDSSNVILKYHY

SEQ ID NO: 47257 - protein, 27 aa, Artificial Sequence
  Cyclic GFR-binding peptide
  MOD_RES (27), (27): Xaa is C or S
SAISVLYLDDSSNVILKNYQNMVVRSX

SEQ ID NO: 47258 - protein, 25 aa, Artificial Sequence
  Cyclic GFR-binding peptide
KLNAISVLYFDDMGVPTLKKYREGM

SEQ ID NO: 47259 - protein, 33 aa, Artificial Sequence
  Cyclic GFR-binding peptide
  MOD_RES (5), (6): Xaa is C or S
IPKAXXVPTELNAISMLYFDEYDKVVLKKYREM

SEQ ID NO: 47260 - protein, 30 aa, Artificial Sequence
  Cyclic GFR-binding peptide
  MOD_RES (28), (30): Xaa is C or S
LSATSVLYYDDSSNVILRKHRNMVVRSXGX

SEQ ID NO: 47261 - protein, 27 aa, Artificial Sequence
  Cyclic GFR-binding peptide
  MOD_RES (27), (27): Xaa is C or S
LSAISILYLVGRKPKVLKNYQMIVRSX

SEQ ID NO: 47262 - protein, 34 aa, Artificial Sequence; identical to SEQ ID NO: 7802
  Cyclic GFR-binding peptide
  MOD_RES (1), (2), (34): Xaa is C or S

SEQ ID NO: 47263 - protein, 33 aa, Artificial Sequence
  Cyclic GFR-binding peptide
  MOD_RES (6), (7): Xaa is C or S
ASAAPXXVPQALSAISILYLVGRKPKVLKNYQM

SEQ ID NO: 47264 - protein, 30 aa, Artificial Sequence
  Cyclic GFR-binding peptide
  MOD_RES (1), (1): Xaa is C or S
XAPTKLSAISVLYLDDSSNVILKNYQNMVV

SEQ ID NO: 47265 - protein, 21 aa, Artificial Sequence
  Cyclic GFR-binding peptide
LSAISVLYLDDMGVPTLKNYQ

SEQ ID NO: 47266 - protein, 24 aa, Artificial Sequence
  Cyclic GFR-binding peptide
SAISILYLIGKTPKILKNYQMIVK

SEQ ID NO: 47267 - protein, 30 aa, Artificial Sequence
  Cyclic GFR-binding peptide
  MOD_RES (1), (2): Xaa is C or S
XXVPTKLNAISVLYFDDMGVPTLKKYREGM

SEQ ID NO: 47268 - protein, 29 aa, Artificial Sequence
  Cyclic GFR-binding peptide
  MOD_RES (1), (2): Xaa is C or S
XXVPQDLSAISILYLVGRTPKVLKNYQMV

SEQ ID NO: 47269 - protein, 34 aa, Artificial Sequence; identical to SEQ ID NO: 7806
  Cyclic GFR-binding peptide
  MOD_RES (2), (3): Xaa is C or S

SEQ ID NO: 47270 - protein, 34 aa, Artificial Sequence; identical to SEQ ID NO: 7807
  Cyclic GFR-binding peptide
  MOD_RES (32), (34): Xaa is C or S

SEQ ID NO: 47271 - protein, 38 aa, Artificial Sequence; identical to SEQ ID NO: 7809
  Cyclic GFR-binding peptide
  MOD_RES (7), (7): Xaa is C or S

SEQ ID NO: 47272 - protein, 28 aa, Artificial Sequence
  Cyclic GFR-binding peptide
  MOD_RES (1), (2): Xaa is C or S
XXVSQDLSPISILYKIGKTPKILKYHYM

SEQ ID NO: 47273 - protein, 30 aa, Artificial Sequence
  Cyclic GFR-binding peptide
  MOD_RES (2), (3): Xaa is C or S
PXXVSQDLSATSILYYIGKTPKILRKHRMI

SEQ ID NO: 47274 - protein, 32 aa, Artificial Sequence
  Cyclic GFR-binding peptide
  MOD_RES (4), (5): Xaa is C or S
PKAXXAPTKLSPISVLYKDSSNNVILKYHYNM

SEQ ID NO: 47275 - protein, 33 aa, Artificial Sequence
  Cyclic GFR-binding peptide
  MOD_RES (30), (32): Xaa is C or S
PQDLNAISILYFVGRTPKVLKKYRMVVKSXKXS

SEQ ID NO: 47276 - protein, 36 aa, Artificial Sequence; identical to SEQ ID NO: 7815
  Cyclic GFR-binding peptide
  MOD_RES (36), (36): Xaa is C or S

SEQ ID NO: 47277 - protein, 24 aa, Artificial Sequence
  Cyclic GFR-binding peptide
SPISILYKVGRTPKVLKYHYMVVK

SEQ ID NO: 47278 - protein, 32 aa, Artificial Sequence
  Cyclic GFR-binding peptide
  MOD_RES (30), (32): Xaa is C or S
TKLSAISVLYLDDSSNVILKNYQNMVVRSXGX

SEQ ID NO: 47279 - protein, 33 aa, Artificial Sequence; identical to SEQ ID NO: 7816
  Cyclic GFR-binding peptide
  MOD_RES (1), (33): Xaa is C or S

SEQ ID NO: 47280 - protein, 29 aa, Artificial Sequence
  Cyclic GFR-binding peptide
PQDLNAISILYFVGRTPKVLKKYRMVVKS

SEQ ID NO: 47281 - protein, 29 aa, Artificial Sequence
  Cyclic GFR-binding peptide
VPQDLSATSILYYVGRTPKVLRKHRMVVK

SEQ ID NO: 47282 - protein, 34 aa, Artificial Sequence; identical to SEQ ID NO: 7818
  Cyclic GFR-binding peptide
  MOD_RES (1), (32), (34): Xaa is C or S

SEQ ID NO: 47283 - protein, 28 aa, Artificial Sequence
  Cyclic GFR-binding peptide
PQDLSATSILYYVGRTPKVLRKHRMVVK

SEQ ID NO: 47284 - protein, 39 aa, Artificial Sequence; identical to SEQ ID NO: 7820
  Cyclic GFR-binding peptide
  MOD_RES (6), (7), (38): Xaa is C or S

SEQ ID NO: 47285 - protein, 41 aa, Artificial Sequence; identical to SEQ ID NO: 7821
  Cyclic GFR-binding peptide
  MOD_RES (6), (7), (38), (40): Xaa is C or S

SEQ ID NO: 47286 - protein, 39 aa, Artificial Sequence; identical to SEQ ID NO: 7822
  Cyclic GFR-binding peptide
  MOD_RES (37), (39): Xaa is C or S

SEQ ID NO: 47287 - protein, 28 aa, Artificial Sequence
  Cyclic GFR-binding peptide
  MOD_RES (2), (3): Xaa is C or S
AXXVPTELSATSMLYYDENEKVVLRKHR

SEQ ID NO: 47288 - protein, 32 aa, Artificial Sequence
  Cyclic GFR-binding peptide
  MOD_RES (3), (4): Xaa is C or S
APXXVPQALSAISILYLVGRKPKVLKNYQMIV

SEQ ID NO: 47289 - protein, 36 aa, Artificial Sequence; identical to SEQ ID NO: 7827
  Cyclic GFR-binding peptide
  MOD_RES (3), (4), (36): Xaa is C or S

SEQ ID NO: 47290 - protein, 30 aa, Artificial Sequence
  Cyclic GFR-binding peptide
TKLSAISVLYLDDMGVPTLKNYQEGMSVAE

SEQ ID NO: 47291 - protein, 36 aa, Artificial Sequence; identical to SEQ ID NO: 7829
  Cyclic GFR-binding peptide
  MOD_RES (5), (6): Xaa is C or S

SEQ ID NO: 47292 - protein, 29 aa, Artificial Sequence
  Cyclic GFR-binding peptide
APTKLSAISVLYLDSSNNVILKNYQNMVV

SEQ ID NO: 47293 - protein, 30 aa, Artificial Sequence
  Cyclic GFR-binding peptide
  MOD_RES (1), (1): Xaa is C or S
XVPTELSPISMLYKDEYDKVVLKYHYEMVV

SEQ ID NO: 47294 - protein, 25 aa, Artificial Sequence
  Cyclic GFR-binding peptide
PTKLSATSVLYYDDSSNVILRKHRN

SEQ ID NO: 47295 - protein, 35 aa, Artificial Sequence
  Cyclic GFR-binding peptide
  MOD_RES (33), (35): Xaa is C or S
VQLNAISVLYFEIVRKKPIFLKKYRTLEDHLAXKX

SEQ ID NO: 47296 - protein, 33 aa, Artificial Sequence
  Cyclic GFR-binding peptide
  MOD_RES (4), (5): Xaa is C or S
ASPXXVPQDLSPISILYKVGRTPKVLKYHYMVV

SEQ ID NO: 47297 - protein, 33 aa, Artificial Sequence; identical to SEQ ID NO: 7833
  Cyclic GFR-binding peptide
  MOD_RES (1), (2): Xaa is C or S

SEQ ID NO: 47298 - protein, 26 aa, Artificial Sequence
  Cyclic GFR-binding peptide
VPTKLSATSVLYYDDMGVPTLRKHRE

SEQ ID NO: 47299 - protein, 32 aa, Artificial Sequence
  Cyclic GFR-binding peptide
  MOD_RES (6), (7): Xaa is C or S
KIPKAXXVPTELSATSMLYYDENEKVVLRKHR

SEQ ID NO: 47300 - protein, 33 aa, Artificial Sequence
  Cyclic GFR-binding peptide
  MOD_RES (30), (32): Xaa is C or S
TKLSPISVLYKDSSNNVILKYHYNMVVKAXGXH

SEQ ID NO: 47301 - protein, 34 aa, Artificial Sequence; identical to SEQ ID NO: 7836
  Cyclic GFR-binding peptide
  MOD_RES (1), (2), (33): Xaa is C or S

SEQ ID NO: 47302 - protein, 37 aa, Artificial Sequence; identical to SEQ ID NO: 7837
  Cyclic GFR-binding peptide
  MOD_RES (36), (36): Xaa is C or S

SEQ ID NO: 47303 - protein, 30 aa, Artificial Sequence
  Cyclic GFR-binding peptide
  MOD_RES (1), (1): Xaa is C or S
XVPQALSAISILYLVGRKPKVLKNYQMIVR

SEQ ID NO: 47304 - protein, 32 aa, Artificial Sequence
  Cyclic GFR-binding peptide
PTQVQLNAISVLYFEIVRKKPIFLKKYRTLED

SEQ ID NO: 47305 - protein, 33 aa, Artificial Sequence
  Cyclic GFR-binding peptide
  MOD_RES (4), (5): Xaa is C or S
ASPXXVPQDLSATSILYYVGRTPKVLRKHRMVV

SEQ ID NO: 47306 - protein, 30 aa, Artificial Sequence
  Cyclic GFR-binding peptide
  MOD_RES (2), (3): Xaa is C or S
AXXVPTELNAISMLYFDENEKVVLKKYRDM

SEQ ID NO: 47307 - protein, 27 aa, Artificial Sequence
  Cyclic GFR-binding peptide
ALSAISILYLVGRKPKVLKNYQMIVRS

SEQ ID NO: 47308 - protein, 32 aa, Artificial Sequence
  Cyclic GFR-binding peptide
  MOD_RES (4), (5): Xaa is C or S
GKAXXVPTKLSATSVLYYDDMGVPTLRKHREG

SEQ ID NO: 47309 - protein, 35 aa, Artificial Sequence; identical to SEQ ID NO: 7844
  Cyclic GFR-binding peptide
  MOD_RES (1), (1): Xaa is C or S

SEQ ID NO: 47310 - protein, 33 aa, Artificial Sequence
  Cyclic GFR-binding peptide
  MOD_RES (3), (4): Xaa is C or S
KAXXVPTELSATSMLYYDENEKVVLRKHRDMVV

SEQ ID NO: 47311 - protein, 26 aa, Artificial Sequence
  Cyclic GFR-binding peptide
TELSATSMLYYDENEKVVLRKHRDMV

SEQ ID NO: 47312 - protein, 21 aa, Artificial Sequence
  Cyclic GFR-binding peptide
NAISMLYFDEYDKVVLKKYRE

SEQ ID NO: 47313 - protein, 25 aa, Artificial Sequence
  Cyclic GFR-binding peptide
SQDLSAISILYLIGKTPKILKNYQM

SEQ ID NO: 47314 - protein, 33 aa, Artificial Sequence
  Cyclic GFR-binding peptide
  MOD_RES (4), (5): Xaa is C or S
PKAXXVPTELNAISMLYFDEYDKVVLKKYREMV

SEQ ID NO: 47315 - protein, 29 aa, Artificial Sequence
  Cyclic GFR-binding peptide
  MOD_RES (1), (2): Xaa is C or S
XXVPTELSATSMLYYDENEKVVLRKHRDM

SEQ ID NO: 47316 - protein, 36 aa, Artificial Sequence; identical to SEQ ID NO: 7846
  Cyclic GFR-binding peptide
  MOD_RES (3), (4), (36): Xaa is C or S

SEQ ID NO: 47317 - protein, 35 aa, Artificial Sequence; identical to SEQ ID NO: 7847
  Cyclic GFR-binding peptide
  MOD_RES (2), (3), (35): Xaa is C or S

SEQ ID NO: 47318 - protein, 23 aa, Artificial Sequence
  Cyclic GFR-binding peptide
SAISILYLIGKTPKILKNYQMIV

SEQ ID NO: 47319 - protein, 29 aa, Artificial Sequence
  Cyclic GFR-binding peptide
PTELSPISMLYKDEYDKVVLKYHYEMVVE

SEQ ID NO: 47320 - protein, 43 aa, Artificial Sequence; identical to SEQ ID NO: 7849
  Cyclic GFR-binding peptide
  MOD_RES (4), (41), (43): Xaa is C or S

SEQ ID NO: 47321 - protein, 27 aa, Artificial Sequence
  Cyclic GFR-binding peptide
  MOD_RES (2), (2): Xaa is C or S
TXAPTKLSPISVLYKDDSSNVILKYHY

SEQ ID NO: 47322 - protein, 21 aa, Artificial Sequence
  Cyclic GFR-binding peptide
LNAISMLYFDENEKVVLKKYR

SEQ ID NO: 47323 - protein, 29 aa, Artificial Sequence
  Cyclic GFR-binding peptide
  MOD_RES (2), (3): Xaa is C or S
PXXVPQALSAISILYLVGRKPKVLKNYQM

SEQ ID NO: 47324 - protein, 30 aa, Artificial Sequence
  Cyclic GFR-binding peptide
  MOD_RES (2), (3): Xaa is C or S
PXXVPQDLSATSILYYVGRTPKVLRKHRMV

SEQ ID NO: 47325 - protein, 31 aa, Artificial Sequence; identical to SEQ ID NO: 7850
  Cyclic GFR-binding peptide

SEQ ID NO: 47326 - protein, 33 aa, Artificial Sequence
  Cyclic GFR-binding peptide
  MOD_RES (31), (33): Xaa is C or S
PTKLSAISVLYLDSSNNVILKNYQNMVVKAXGX

SEQ ID NO: 47327 - protein, 28 aa, Artificial Sequence
  Cyclic GFR-binding peptide
  MOD_RES (2), (3): Xaa is C or S
AXXVPTELNAISMLYFDEYDKVVLKKYR

SEQ ID NO: 47328 - protein, 35 aa, Artificial Sequence
  Cyclic GFR-binding peptide
  MOD_RES (5), (6): Xaa is C or S
SAAPXXVPQALNAISILYFVGRKPKVLKKYRMIVR

SEQ ID NO: 47329 - protein, 27 aa, Artificial Sequence
  Cyclic GFR-binding peptide
  MOD_RES (1), (1): Xaa is C or S
XVPTELNAISMLYFDEYDKVVLKKYRE

SEQ ID NO: 47330 - protein, 33 aa, Artificial Sequence; identical to SEQ ID NO: 7851
  Cyclic GFR-binding peptide
  MOD_RES (1), (32): Xaa is C or S

SEQ ID NO: 47331 - protein, 21 aa, Artificial Sequence
  Cyclic GFR-binding peptide
LSPISMLYKDEYDKVVLKYHY

SEQ ID NO: 47332 - protein, 38 aa, Artificial Sequence; identical to SEQ ID NO: 7852
  Cyclic GFR-binding peptide
  MOD_RES (4), (36), (38): Xaa is C or S

SEQ ID NO: 47333 - protein, 34 aa, Artificial Sequence
  Cyclic GFR-binding peptide
  MOD_RES (32), (34): Xaa is C or S
QLSAISVLYLEIVRKKPIFLKNYQTLEDHLAXKX

SEQ ID NO: 47334 - protein, 23 aa, Artificial Sequence
  Cyclic GFR-binding peptide
LSATSMLYYDEYDKVVLRKHREM

SEQ ID NO: 47335 - protein, 33 aa, Artificial Sequence; identical to SEQ ID NO: 7853
  Cyclic GFR-binding peptide
  MOD_RES (1), (2): Xaa is C or S

SEQ ID NO: 47336 - protein, 35 aa, Artificial Sequence; identical to SEQ ID NO: 7854
  Cyclic GFR-binding peptide
  MOD_RES (3), (35): Xaa is C or S

SEQ ID NO: 47337 - protein, 26 aa, Artificial Sequence
  Cyclic GFR-binding peptide
QDLSAISILYLIGKTPKILKNYQMIV

SEQ ID NO: 47338 - protein, 33 aa, Artificial Sequence
  Cyclic GFR-binding peptide
  MOD_RES (6), (7): Xaa is C or S
YVPKPXXAPTKLSAISVLYLDDSSNVILKNYQN

SEQ ID NO: 47339 - protein, 29 aa, Artificial Sequence
  Cyclic GFR-binding peptide
  MOD_RES (1), (1): Xaa is C or S
XVPQDLSATSILYYVGRTPKVLRKHRMVV

SEQ ID NO: 47340 - protein, 37 aa, Artificial Sequence; identical to SEQ ID NO: 7855
  Cyclic GFR-binding peptide
  MOD_RES (3), (4), (36): Xaa is C or S

SEQ ID NO: 47341 - protein, 36 aa, Artificial Sequence; identical to SEQ ID NO: 7856
  Cyclic GFR-binding peptide
  MOD_RES (2), (3), (35): Xaa is C or S

SEQ ID NO: 47342 - protein, 34 aa, Artificial Sequence; identical to SEQ ID NO: 7857
  Cyclic GFR-binding peptide
  MOD_RES (31), (33): Xaa is C or S

SEQ ID NO: 47343 - protein, 35 aa, Artificial Sequence; identical to SEQ ID NO: 7858
  Cyclic GFR-binding peptide
  MOD_RES (3), (4), (35): Xaa is C or S

SEQ ID NO: 47344 - protein, 38 aa, Artificial Sequence; identical to SEQ ID NO: 7863
  Cyclic GFR-binding peptide
  MOD_RES (6), (7), (38): Xaa is C or S

SEQ ID NO: 47345 - protein, 33 aa, Artificial Sequence; identical to SEQ ID NO: 7864
  Cyclic GFR-binding peptide
  MOD_RES (1), (2), (33): Xaa is C or S

SEQ ID NO: 47346 - protein, 31 aa, Artificial Sequence
  Cyclic GFR-binding peptide
  MOD_RES (2), (3): Xaa is C or S
AXXVPTKLNAISVLYFDDMGVPTLKKYREGM

SEQ ID NO: 47347 - protein, 26 aa, Artificial Sequence
  Cyclic GFR-binding peptide
APTKLSAISVLYLDDSSNVILKNYQN

SEQ ID NO: 47348 - protein, 31 aa, Artificial Sequence
  Cyclic GFR-binding peptide
QLSATSVLYYEIVRKKPIFLRKHRTLEDHLA

SEQ ID NO: 47349 - protein, 30 aa, Artificial Sequence
  Cyclic GFR-binding peptide
VPTKLSATSVLYYDDMGVPTLRKHREGMSV

SEQ ID NO: 47350 - protein, 28 aa, Artificial Sequence
  Cyclic GFR-binding peptide
  MOD_RES (1), (1): Xaa is C or S
XVPQDLSAISILYLVGRTPKVLKNYQMV

SEQ ID NO: 47351 - protein, 31 aa, Artificial Sequence
  Cyclic GFR-binding peptide
  MOD_RES (5), (6): Xaa is C or S
SAAPXXVPQALNAISILYFVGRKPKVLKKYR

SEQ ID NO: 47352 - protein, 21 aa, Artificial Sequence
  Cyclic GFR-binding peptide
LSPISVLYKDSSNNVILKYHY

SEQ ID NO: 47353 - protein, 36 aa, Artificial Sequence; identical to SEQ ID NO: 7867
  Cyclic GFR-binding peptide
  MOD_RES (1), (2), (33), (35): Xaa is C or S

SEQ ID NO: 47354 - protein, 26 aa, Artificial Sequence
  Cyclic GFR-binding peptide
SAISVLYLDSSNNVILKNYQNMVVKA

SEQ ID NO: 47355 - protein, 30 aa, Artificial Sequence
  Cyclic GFR-binding peptide
  MOD_RES (29), (29): Xaa is C or S
ELNAISMLYFDEYDKVVLKKYREMVVEGXG

SEQ ID NO: 47356 - protein, 35 aa, Artificial Sequence
  Cyclic GFR-binding peptide
  MOD_RES (5), (5): Xaa is C or S
RNVQXRPTQVQLNAISVLYFEIVRKKPIFLKKYRT

SEQ ID NO: 47357 - protein, 36 aa, Artificial Sequence
  Cyclic GFR-binding peptide
  MOD_RES (4), (5): Xaa is C or S
GKAXXVPTKLSATSVLYYDDMGVPTLRKHREGMSVA

SEQ ID NO: 47358 - protein, 36 aa, Artificial Sequence; identical to SEQ ID NO: 7868
  Cyclic GFR-binding peptide
  MOD_RES (1), (33), (35): Xaa is C or S

SEQ ID NO: 47359 - protein, 24 aa, Artificial Sequence
  Cyclic GFR-binding peptide
PTQLSPISVLYKDDSSNVILKYHY

SEQ ID NO: 47360 - protein, 34 aa, Artificial Sequence
  Cyclic GFR-binding peptide
  MOD_RES (4), (5): Xaa is C or S
PKPXXAPTQLSATSVLYYDDSSNVILRKHRNMVV

SEQ ID NO: 47361 - protein, 31 aa, Artificial Sequence
  Cyclic GFR-binding peptide
  MOD_RES (2), (3): Xaa is C or S
PXXVPQDLNAISILYFVGRTPKVLKKYRMVV

SEQ ID NO: 47362 - protein, 42 aa, Artificial Sequence; identical to SEQ ID NO: 7869
  Cyclic GFR-binding peptide
  MOD_RES (2), (39), (41): Xaa is C or S

SEQ ID NO: 47363 - protein, 30 aa, Artificial Sequence
  Cyclic GFR-binding peptide
  MOD_RES (1), (1): Xaa is C or S
XVPTELSATSMLYYDEYDKVVLRKHREMVV

SEQ ID NO: 47364 - protein, 27 aa, Artificial Sequence
  Cyclic GFR-binding peptide
  MOD_RES (27), (27): Xaa is C or S
SAISVLYLDDSSNVILKNYQNMVVRAX

SEQ ID NO: 47365 - protein, 30 aa, Artificial Sequence
  Cyclic GFR-binding peptide
  MOD_RES (4), (5): Xaa is C or S
PKPXXAPTKLSAISVLYLDDSSNVILKNYQ

SEQ ID NO: 47366 - protein, 27 aa, Artificial Sequence
  Cyclic GFR-binding peptide
QALSPISILYKVGRKPKVLKYHYMIVR

SEQ ID NO: 47367 - protein, 36 aa, Artificial Sequence
  Cyclic GFR-binding peptide
  MOD_RES (6), (7): Xaa is C or S
SIPKAXXVPTELNAISMLYFDEYDKVVLKKYREMVV

SEQ ID NO: 47368 - protein, 26 aa, Artificial Sequence
  Cyclic GFR-binding peptide
KLSAISVLYLDDSSNVILKNYQNMVV

SEQ ID NO: 47369 - protein, 33 aa, Artificial Sequence
  Cyclic GFR-binding peptide
  MOD_RES (30), (32): Xaa is C or S
TQLSPISVLYKDDSSNVILKYHYNMVVRAXGXH

SEQ ID NO: 47370 - protein, 26 aa, Artificial Sequence
  Cyclic GFR-binding peptide
VQLSATSVLYYEIVRKKPIFLRKHRT

SEQ ID NO: 47371 - protein, 38 aa, Artificial Sequence; identical to SEQ ID NO: 7877
  Cyclic GFR-binding peptide
  MOD_RES (3), (4), (35), (37): Xaa is C or S

SEQ ID NO: 47372 - protein, 24 aa, Artificial Sequence
  Cyclic GFR-binding peptide
PTELSATSMLYYDENEKVVLRKHR

SEQ ID NO: 47373 - protein, 33 aa, Artificial Sequence
  Cyclic GFR-binding peptide
  MOD_RES (4), (5): Xaa is C or S
PKPXXAPTKLSATSVLYYDDSSNVILRKHRNMV

SEQ ID NO: 47374 - protein, 31 aa, Artificial Sequence
  Cyclic GFR-binding peptide
QLSAISVLYLEIVRKKPIFLKNYQTLEDHLA

SEQ ID NO: 47375 - protein, 25 aa, Artificial Sequence
  Cyclic GFR-binding peptide
NAISVLYFDDMGVPTLKKYREGMSV

SEQ ID NO: 47376 - protein, 33 aa, Artificial Sequence
  Cyclic GFR-binding peptide
  MOD_RES (3), (3): Xaa is C or S
VQXRPTQVQLSPISVLYKEIVRKKPIFLKYHYT

SEQ ID NO: 47377 - protein, 38 aa, Artificial Sequence; identical to SEQ ID NO: 7883
  Cyclic GFR-binding peptide
  MOD_RES (5), (6), (37): Xaa is C or S

SEQ ID NO: 47378 - protein, 27 aa, Artificial Sequence
  Cyclic GFR-binding peptide
LSATSVLYYDDSSNVILRKHRNMVVRA

SEQ ID NO: 47379 - protein, 26 aa, Artificial Sequence
  Cyclic GFR-binding peptide
DLSPISILYKIGKTPKILKYHYMIVK

SEQ ID NO: 47380 - protein, 28 aa, Artificial Sequence
  Cyclic GFR-binding peptide
QLNAISVLYFEIVRKKPIFLKKYRTLED

SEQ ID NO: 47381 - protein, 24 aa, Artificial Sequence
  Cyclic GFR-binding peptide
QDLSPISILYKVGRTPKVLKYHYM

SEQ ID NO: 47382 - protein, 36 aa, Artificial Sequence; identical to SEQ ID NO: 7886
  Cyclic GFR-binding peptide
  MOD_RES (1), (2), (34), (36): Xaa is C or S

SEQ ID NO: 47383 - protein, 31 aa, Artificial Sequence
  Cyclic GFR-binding peptide
  MOD_RES (2), (3): Xaa is C or S
AXXVPTELNAISMLYFDEYDKVVLKKYREMV

SEQ ID NO: 47384 - protein, 42 aa, Artificial Sequence; identical to SEQ ID NO: 7887
  Cyclic GFR-binding peptide
  MOD_RES (4), (41): Xaa is C or S

SEQ ID NO: 47385 - protein, 28 aa, Artificial Sequence
  Cyclic GFR-binding peptide
VPQDLSATSILYYVGRTPKVLRKHRMVV

SEQ ID NO: 47386 - protein, 34 aa, Artificial Sequence; identical to SEQ ID NO: 7888
  Cyclic GFR-binding peptide

SEQ ID NO: 47387 - protein, 33 aa, Artificial Sequence
  Cyclic GFR-binding peptide
  MOD_RES (5), (6): Xaa is C or S
SASPXXVSQDLSPISILYKIGKTPKILKYHYMI

SEQ ID NO: 47388 - protein, 30 aa, Artificial Sequence
  Cyclic GFR-binding peptide
  MOD_RES (2), (3): Xaa is C or S
PXXVPQALSAISILYLVGRKPKVLKNYQMI

SEQ ID NO: 47389 - protein, 35 aa, Artificial Sequence; identical to SEQ ID NO: 7890
  Cyclic GFR-binding peptide
  MOD_RES (1), (2), (34): Xaa is C or S

SEQ ID NO: 47390 - protein, 32 aa, Artificial Sequence
  Cyclic GFR-binding peptide
  MOD_RES (2), (3): Xaa is C or S
AXXVPTELSPISMLYKDENEKVVLKYHYDMVV

SEQ ID NO: 47391 - protein, 29 aa, Artificial Sequence
  Cyclic GFR-binding peptide
SATSILYYIGKTPKILRKHRAAAAAAAAA

SEQ ID NO: 47392 - protein, 27 aa, Artificial Sequence
  Cyclic GFR-binding peptide
LSATSVLYYDDSSNVILRKHRNMVVRS

SEQ ID NO: 47393 - protein, 39 aa, Artificial Sequence; identical to SEQ ID NO: 7891
  Cyclic GFR-binding peptide
  MOD_RES (3), (4), (36), (38): Xaa is C or S

SEQ ID NO: 47394 - protein, 31 aa, Artificial Sequence
  Cyclic GFR-binding peptide
  MOD_RES (1), (2): Xaa is C or S
XXVPQALSAISILYLVGRKPKVLKNYQMIVR

SEQ ID NO: 47395 - protein, 31 aa, Artificial Sequence; identical to SEQ ID NO: 7892
  Cyclic GFR-binding peptide
  MOD_RES (1), (1): Xaa is C or S

SEQ ID NO: 47396 - protein, 31 aa, Artificial Sequence
  Cyclic GFR-binding peptide
  MOD_RES (3), (4): Xaa is C or S
APXXVPQALSAISILYLVGRKPKVLKNYQMI

SEQ ID NO: 47397 - protein, 27 aa, Artificial Sequence
  Cyclic GFR-binding peptide
  MOD_RES (26), (26): Xaa is C or S
SPISILYKVGRTPKVLKYHYMVVKSXK

SEQ ID NO: 47398 - protein, 31 aa, Artificial Sequence
  Cyclic GFR-binding peptide
  MOD_RES (30), (30): Xaa is C or S
TKLNAISVLYFDSSNNVILKKYRNMVVKAXG

SEQ ID NO: 47399 - protein, 34 aa, Artificial Sequence
  Cyclic GFR-binding peptide
  MOD_RES (4), (4): Xaa is C or S
NVQXRPTQVQLSAISVLYLEIVRKKPIFLKNYQT

SEQ ID NO: 47400 - protein, 27 aa, Artificial Sequence
  Cyclic GFR-binding peptide
  MOD_RES (27), (27): Xaa is C or S
SATSMLYYDENEKVVLRKHRDMVVEGX

SEQ ID NO: 47401 - protein, 39 aa, Artificial Sequence; identical to SEQ ID NO: 7893
  Cyclic GFR-binding peptide
  MOD_RES (4), (5), (37), (39): Xaa is C or S

SEQ ID NO: 47402 - protein, 23 aa, Artificial Sequence
  Cyclic GFR-binding peptide
DLSPISILYKVGRTPKVLKYHYM

SEQ ID NO: 47403 - protein, 33 aa, Artificial Sequence; identical to SEQ ID NO: 7894
  Cyclic GFR-binding peptide
  MOD_RES (2), (3): Xaa is C or S

SEQ ID NO: 47404 - protein, 37 aa, Artificial Sequence; identical to SEQ ID NO: 7895
  Cyclic GFR-binding peptide
  MOD_RES (3), (4), (35), (37): Xaa is C or S

SEQ ID NO: 47405 - protein, 31 aa, Artificial Sequence
  Cyclic GFR-binding peptide
  MOD_RES (30), (30): Xaa is C or S
TQLSAISVLYLDDSSNVILKNYQNMVVRAXG

SEQ ID NO: 47406 - protein, 27 aa, Artificial Sequence
  Cyclic GFR-binding peptide
  MOD_RES (1), (2): Xaa is C or S
XXVPTELNAISMLYFDEYDKVVLKKYR

SEQ ID NO: 47407 - protein, 39 aa, Artificial Sequence; identical to SEQ ID NO: 7896
  Cyclic GFR-binding peptide
  MOD_RES (2), (39): Xaa is C or S

SEQ ID NO: 47408 - protein, 37 aa, Artificial Sequence; identical to SEQ ID NO: 7897
  Cyclic GFR-binding peptide
  MOD_RES (1), (2), (35), (37): Xaa is C or S

SEQ ID NO: 47409 - protein, 33 aa, Artificial Sequence
  Cyclic GFR-binding peptide
  MOD_RES (5), (6): Xaa is C or S
VPKPXXAPTQLSPISVLYKDDSSNVILKYHYNM

SEQ ID NO: 47410 - protein, 27 aa, Artificial Sequence
  Cyclic GFR-binding peptide
ALSPISILYKVGRKPKVLKYHYMIVRS

SEQ ID NO: 47411 - protein, 24 aa, Artificial Sequence
  Cyclic GFR-binding peptide
SAISILYLVGRKPKVLKNYQMIVR

SEQ ID NO: 47412 - protein, 29 aa, Artificial Sequence
  Cyclic GFR-binding peptide
  MOD_RES (26), (28): Xaa is C or S
SAISILYLIGKTPKILKNYQMIVKSXKXS

SEQ ID NO: 47413 - protein, 37 aa, Artificial Sequence; identical to SEQ ID NO: 7900
  Cyclic GFR-binding peptide
  MOD_RES (5), (6), (37): Xaa is C or S

SEQ ID NO: 47414 - protein, 22 aa, Artificial Sequence
  Cyclic GFR-binding peptide
ALSPISILYKVGRKPKVLKYHY

SEQ ID NO: 47415 - protein, 37 aa, Artificial Sequence; identical to SEQ ID NO: 7901
  Cyclic GFR-binding peptide
  MOD_RES (1), (34), (36): Xaa is C or S

SEQ ID NO: 47416 - protein, 30 aa, Artificial Sequence
  Cyclic GFR-binding peptide
PTKLSAISVLYLDDMGVPTLKNYQEGMSVA

SEQ ID NO: 47417 - protein, 33 aa, Artificial Sequence
  Cyclic GFR-binding peptide
  MOD_RES (5), (5): Xaa is C or S
TKPTXAPTKLSAISVLYLDDSSNVILKNYQNMV

SEQ ID NO: 47418 - protein, 37 aa, Artificial Sequence; identical to SEQ ID NO: 7902
  Cyclic GFR-binding peptide
  MOD_RES (6), (7): Xaa is C or S

SEQ ID NO: 47419 - protein, 36 aa, Artificial Sequence; identical to SEQ ID NO: 7905
  Cyclic GFR-binding peptide
  MOD_RES (2), (3), (35): Xaa is C or S

SEQ ID NO: 47420 - protein, 36 aa, Artificial Sequence
  Cyclic GFR-binding peptide
  MOD_RES (6), (7): Xaa is C or S
YVPKPXXAPTKLSAISVLYLDDSSNVILKNYQNMVV

SEQ ID NO: 47421 - protein, 40 aa, Artificial Sequence; identical to SEQ ID NO: 7907
  Cyclic GFR-binding peptide
  MOD_RES (37), (39): Xaa is C or S

SEQ ID NO: 47422 - protein, 28 aa, Artificial Sequence
  Cyclic GFR-binding peptide
  MOD_RES (28), (28): Xaa is C or S
SATSVLYYDDMGVPTLRKHREGMSVAEX

SEQ ID NO: 47423 - protein, 26 aa, Artificial Sequence
  Cyclic GFR-binding peptide
APTKLSPISVLYKDSSNNVILKYHYN

SEQ ID NO: 47424 - protein, 31 aa, Artificial Sequence
  Cyclic GFR-binding peptide
  MOD_RES (2), (3): Xaa is C or S
PXXAPTKLSPISVLYKDDSSNVILKYHYNMV

SEQ ID NO: 47425 - protein, 28 aa, Artificial Sequence
  Cyclic GFR-binding peptide
KLSAISVLYLDDMGVPTLKNYQEGMSVA

SEQ ID NO: 47426 - protein, 27 aa, Artificial Sequence
  Cyclic GFR-binding peptide
DLSATSILYYIGKTPKILRKHRMIVKS

SEQ ID NO: 47427 - protein, 34 aa, Artificial Sequence; identical to SEQ ID NO: 7912
  Cyclic GFR-binding peptide
  MOD_RES (2), (34): Xaa is C or S

SEQ ID NO: 47428 - protein, 32 aa, Artificial Sequence
  Cyclic GFR-binding peptide
  MOD_RES (29), (31): Xaa is C or S
ELNAISMLYFDENEKVVLKKYRDMVVEGXGXR

SEQ ID NO: 47429 - protein, 33 aa, Artificial Sequence; identical to SEQ ID NO: 7914
  Cyclic GFR-binding peptide
  MOD_RES (2), (2): Xaa is C or S

SEQ ID NO: 47430 - protein, 33 aa, Artificial Sequence; identical to SEQ ID NO: 7915
  Cyclic GFR-binding peptide
  MOD_RES (2), (3): Xaa is C or S

SEQ ID NO: 47431 - protein, 40 aa, Artificial Sequence; identical to SEQ ID NO: 7916
  Cyclic GFR-binding peptide
  MOD_RES (3), (4), (37), (39): Xaa is C or S

SEQ ID NO: 47432 - protein, 32 aa, Artificial Sequence; identical to SEQ ID NO: 7917
  Cyclic GFR-binding peptide
  MOD_RES (1), (1): Xaa is C or S

SEQ ID NO: 47433 - protein, 28 aa, Artificial Sequence
  Cyclic GFR-binding peptide
  MOD_RES (1), (1): Xaa is C or S
XVPTELNAISMLYFDENEKVVLKKYRDM

SEQ ID NO: 47434 - protein, 36 aa, Artificial Sequence; identical to SEQ ID NO: 7918
  Cyclic GFR-binding peptide
  MOD_RES (5), (5): Xaa is C or S

SEQ ID NO: 47435 - protein, 30 aa, Artificial Sequence
  Cyclic GFR-binding peptide
  MOD_RES (2), (3): Xaa is C or S
PXXAPTQLSPISVLYKDDSSNVILKYHYNM

SEQ ID NO: 47436 - protein, 30 aa, Artificial Sequence
  Cyclic GFR-binding peptide
  MOD_RES (30), (30): Xaa is C or S
PQDLSAISILYLVGRTPKVLKNYQMVVKSX

SEQ ID NO: 47437 - protein, 28 aa, Artificial Sequence
  Cyclic GFR-binding peptide
PQALSATSILYYVGRKPKVLRKHRMIVR

SEQ ID NO: 47438 - protein, 27 aa, Artificial Sequence
  Cyclic GFR-binding peptide
TELNAISMLYFDEYDKVVLKKYREMVV

SEQ ID NO: 47439 - protein, 37 aa, Artificial Sequence; identical to SEQ ID NO: 7921
  Cyclic GFR-binding peptide
  MOD_RES (6), (7): Xaa is C or S

SEQ ID NO: 47440 - protein, 32 aa, Artificial Sequence
  Cyclic GFR-binding peptide
  MOD_RES (32), (32): Xaa is C or S
QLSPISVLYKEIVRKKPIFLKYHYTLEDHLAX

SEQ ID NO: 47441 - protein, 35 aa, Artificial Sequence; identical to SEQ ID NO: 7922
  Cyclic GFR-binding peptide
  MOD_RES (1), (33), (35): Xaa is C or S

SEQ ID NO: 47442 - protein, 29 aa, Artificial Sequence
  Cyclic GFR-binding peptide
  MOD_RES (3), (4): Xaa is C or S
APXXVPQALSATSILYYVGRKPKVLRKHR

SEQ ID NO: 47443 - protein, 37 aa, Artificial Sequence; identical to SEQ ID NO: 7923
  Cyclic GFR-binding peptide
  MOD_RES (3), (3): Xaa is C or S

SEQ ID NO: 47444 - protein, 38 aa, Artificial Sequence; identical to SEQ ID NO: 7924
  Cyclic GFR-binding peptide
  MOD_RES (1), (2), (35), (37): Xaa is C or S

SEQ ID NO: 47445 - protein, 42 aa, Artificial Sequence; identical to SEQ ID NO: 7925
  Cyclic GFR-binding peptide
  MOD_RES (6), (7), (40), (42): Xaa is C or S

SEQ ID NO: 47446 - protein, 34 aa, Artificial Sequence; identical to SEQ ID NO: 7926
  Cyclic GFR-binding peptide
  MOD_RES (2), (3): Xaa is C or S

SEQ ID NO: 47447 - protein, 27 aa, Artificial Sequence
  Cyclic GFR-binding peptide
NAISVLYFEIVRKKPIFLKKYRTLEDH

SEQ ID NO: 47448 - protein, 30 aa, Artificial Sequence
  Cyclic GFR-binding peptide
  MOD_RES (1), (2): Xaa is C or S
XXVPTELSATSMLYYDEYDKVVLRKHREMV

SEQ ID NO: 47449 - protein, 23 aa, Artificial Sequence
  Cyclic GFR-binding peptide
SAISVLYLDDSSNVILKNYQNMV

SEQ ID NO: 47450 - protein, 37 aa, Artificial Sequence; identical to SEQ ID NO: 7928
  Cyclic GFR-binding peptide
  MOD_RES (5), (6): Xaa is C or S

SEQ ID NO: 47451 - protein, 36 aa, Artificial Sequence
  Cyclic GFR-binding peptide
  MOD_RES (33), (35): Xaa is C or S
VQLSATSVLYYEIVRKKPIFLRKHRTLEDHLAXKXE

SEQ ID NO: 47452 - protein, 43 aa, Artificial Sequence; identical to SEQ ID NO: 7929
  Cyclic GFR-binding peptide
  MOD_RES (4), (41), (43): Xaa is C or S

SEQ ID NO: 47453 - protein, 33 aa, Artificial Sequence
  Cyclic GFR-binding peptide
  MOD_RES (31), (33): Xaa is C or S
PTKLSPISVLYKDSSNNVILKYHYNMVVKAXGX

SEQ ID NO: 47454 - protein, 23 aa, Artificial Sequence
  Cyclic GFR-binding peptide
TELSPISMLYKDEYDKVVLKYHY

SEQ ID NO: 47455 - protein, 31 aa, Artificial Sequence
  Cyclic GFR-binding peptide
RPTQVQLSAISVLYLEIVRKKPIFLKNYQTL

SEQ ID NO: 47456 - protein, 31 aa, Artificial Sequence
  Cyclic GFR-binding peptide
  MOD_RES (29), (31): Xaa is C or S
KLNAISVLYFDSSNNVILKKYRNMVVKAXGX

SEQ ID NO: 47457 - protein, 31 aa, Artificial Sequence
  Cyclic GFR-binding peptide
  MOD_RES (30), (30): Xaa is C or S
TKLSPISVLYKDSSNNVILKYHYNMVVKAXG

SEQ ID NO: 47458 - protein, 30 aa, Artificial Sequence
  Cyclic GFR-binding peptide
  MOD_RES (27), (29): Xaa is C or S
NAISVLYFDSSNNVILKKYRNMVVKAXGXH

SEQ ID NO: 47459 - protein, 32 aa, Artificial Sequence
  Cyclic GFR-binding peptide
  MOD_RES (2), (3): Xaa is C or S
AXXVPTELSATSMLYYDENEKVVLRKHRDMVV

SEQ ID NO: 47460 - protein, 32 aa, Artificial Sequence
  Cyclic GFR-binding peptide
  MOD_RES (31), (31): Xaa is C or S
PTELSPISMLYKDENEKVVLKYHYDMVVEGXG

SEQ ID NO: 47461 - protein, 42 aa, Artificial Sequence; identical to SEQ ID NO: 7932
  Cyclic GFR-binding peptide
  MOD_RES (6), (7), (39), (41): Xaa is C or S

SEQ ID NO: 47462 - protein, 39 aa, Artificial Sequence; identical to SEQ ID NO: 7933
  Cyclic GFR-binding peptide
  MOD_RES (1), (38): Xaa is C or S

SEQ ID NO: 47463 - protein, 31 aa, Artificial Sequence
  Cyclic GFR-binding peptide
  MOD_RES (2), (3): Xaa is C or S
AXXVPTELSPISMLYKDENEKVVLKYHYDMV

SEQ ID NO: 47464 - protein, 40 aa, Artificial Sequence; identical to SEQ ID NO: 7936
  Cyclic GFR-binding peptide
  MOD_RES (6), (7), (39): Xaa is C or S

SEQ ID NO: 47465 - protein, 30 aa, Artificial Sequence
  Cyclic GFR-binding peptide
  MOD_RES (2), (2): Xaa is C or S
TXAPTKLSAISVLYLDDSSNVILKNYQNMV

SEQ ID NO: 47466 - protein, 31 aa, Artificial Sequence
  Cyclic GFR-binding peptide
VQLNAISVLYFEIVRKKPIFLKKYRTLEDHL

SEQ ID NO: 47467 - protein, 30 aa, Artificial Sequence
  Cyclic GFR-binding peptide
TQVQLSATSVLYYEIVRKKPIFLRKHRTLE

SEQ ID NO: 47468 - protein, 35 aa, Artificial Sequence; identical to SEQ ID NO: 7938
  Cyclic GFR-binding peptide
  MOD_RES (1), (33), (35): Xaa is C or S

SEQ ID NO: 47469 - protein, 33 aa, Artificial Sequence
  Cyclic GFR-binding peptide
  MOD_RES (30), (32): Xaa is C or S
SQDLNAISILYFIGKTPKILKKYRMIVKSXKXS

SEQ ID NO: 47470 - protein, 29 aa, Artificial Sequence
  Cyclic GFR-binding peptide
  MOD_RES (28), (28): Xaa is C or S
SAISVLYLDDMGVPTLKNYQEGMSVAEXG

SEQ ID NO: 47471 - protein, 37 aa, Artificial Sequence
  Cyclic GFR-binding peptide
  MOD_RES (5), (5): Xaa is C or S
RNVQXRPTQVQLNAISVLYFEIVRKKPIFLKKYRTLE

SEQ ID NO: 47472 - protein, 22 aa, Artificial Sequence
  Cyclic GFR-binding peptide
LSATSVLYYDDMGVPTLRKHRE

SEQ ID NO: 47473 - protein, 26 aa, Artificial Sequence
  Cyclic GFR-binding peptide
VSQDLNAISILYFIGKTPKILKKYRM

SEQ ID NO: 47474 - protein, 29 aa, Artificial Sequence
  Cyclic GFR-binding peptide
APTQLSPISVLYKDDSSNVILKYHYNMVV

SEQ ID NO: 47475 - protein, 26 aa, Artificial Sequence
  Cyclic GFR-binding peptide
DLSATSILYYIGKTPKILRKHRMIVK

SEQ ID NO: 47476 - protein, 32 aa, Artificial Sequence
  Cyclic GFR-binding peptide
  MOD_RES (2), (3): Xaa is C or S
PXXVSQDLNAISILYFIGKTPKILKKYRMIVK

SEQ ID NO: 47477 - protein, 36 aa, Artificial Sequence; identical to SEQ ID NO: 7942
  Cyclic GFR-binding peptide
  MOD_RES (5), (6): Xaa is C or S

SEQ ID NO: 47478 - protein, 40 aa, Artificial Sequence; identical to SEQ ID NO: 7943
  Cyclic GFR-binding peptide
  MOD_RES (6), (7), (40): Xaa is C or S

SEQ ID NO: 47479 - protein, 20 aa, Artificial Sequence
  Cyclic GFR-binding peptide
SPISVLYKDSSNNVILKYHY

SEQ ID NO: 47480 - protein, 24 aa, Artificial Sequence
  Cyclic GFR-binding peptide
PTKLSAISVLYLDDSSNVILKNYQ

SEQ ID NO: 47481 - protein, 23 aa, Artificial Sequence
  Cyclic GFR-binding peptide
LSPISILYKIGKTPKILKYHYMI

SEQ ID NO: 47482 - protein, 33 aa, Artificial Sequence
  Cyclic GFR-binding peptide
  MOD_RES (3), (4): Xaa is C or S
KAXXAPTKLSAISVLYLDSSNNVILKNYQNMVV

SEQ ID NO: 47483 - protein, 24 aa, Artificial Sequence
  Cyclic GFR-binding peptide
LSPISVLYKDDSSNVILKYHYNMV

SEQ ID NO: 47484 - protein, 36 aa, Artificial Sequence; identical to SEQ ID NO: 7947
  Cyclic GFR-binding peptide
  MOD_RES (5), (6): Xaa is C or S

SEQ ID NO: 47485 - protein, 28 aa, Artificial Sequence
  Cyclic GFR-binding peptide
TELSPISMLYKDEYDKVVLKYHYEMVVE

SEQ ID NO: 47486 - protein, 32 aa, Artificial Sequence
  Cyclic GFR-binding peptide
RPTQVQLSATSVLYYEIVRKKPIFLRKHRTLE

SEQ ID NO: 47487 - protein, 29 aa, Artificial Sequence
  Cyclic GFR-binding peptide
SATSVLYYDDMGVPTLRKHRAAAAAAAAA

SEQ ID NO: 47488 - protein, 42 aa, Artificial Sequence; identical to SEQ ID NO: 7948
  Cyclic GFR-binding peptide
  MOD_RES (6), (7), (39), (41): Xaa is C or S

SEQ ID NO: 47489 - protein, 36 aa, Artificial Sequence; identical to SEQ ID NO: 7949
  Cyclic GFR-binding peptide
  MOD_RES (3), (4), (36): Xaa is C or S

SEQ ID NO: 47490 - protein, 29 aa, Artificial Sequence
  Cyclic GFR-binding peptide
SAISVLYLEIVRKKPIFLKNYQTLEDHLA

SEQ ID NO: 47491 - protein, 28 aa, Artificial Sequence
  Cyclic GFR-binding peptide
  MOD_RES (28), (28): Xaa is C or S
DLSPISILYKIGKTPKILKYHYMIVKSX

SEQ ID NO: 47492 - protein, 28 aa, Artificial Sequence
  Cyclic GFR-binding peptide
TQLSPISVLYKDDSSNVILKYHYNMVVR

SEQ ID NO: 47493 - protein, 28 aa, Artificial Sequence
  Cyclic GFR-binding peptide
APTKLNAISVLYFDSSNNVILKKYRNMV

SEQ ID NO: 47494 - protein, 35 aa, Artificial Sequence; identical to SEQ ID NO: 7952
  Cyclic GFR-binding peptide
  MOD_RES (5), (5): Xaa is C or S

SEQ ID NO: 47495 - protein, 35 aa, Artificial Sequence; identical to SEQ ID NO: 7954
  Cyclic GFR-binding peptide
  MOD_RES (1), (2), (33), (35): Xaa is C or S

SEQ ID NO: 47496 - protein, 31 aa, Artificial Sequence; identical to SEQ ID NO: 7953
  Cyclic GFR-binding peptide
  MOD_RES (1), (1): Xaa is C or S

SEQ ID NO: 47497 - protein, 28 aa, Artificial Sequence
  Cyclic GFR-binding peptide
  MOD_RES (2), (3): Xaa is C or S
AXXVPTELSPISMLYKDENEKVVLKYHY

SEQ ID NO: 47498 - protein, 28 aa, Artificial Sequence
  Cyclic GFR-binding peptide
TKLNAISVLYFDSSNNVILKKYRNMVVK

SEQ ID NO: 47499 - protein, 37 aa, Artificial Sequence; identical to SEQ ID NO: 7955
  Cyclic GFR-binding peptide
  MOD_RES (1), (2), (34), (36): Xaa is C or S

SEQ ID NO: 47500 - protein, 25 aa, Artificial Sequence
  Cyclic GFR-binding peptide
QDLNAISILYFVGRTPKVLKKYRMV

SEQ ID NO: 47501 - protein, 36 aa, Artificial Sequence; identical to SEQ ID NO: 7956
  Cyclic GFR-binding peptide
  MOD_RES (2), (3), (35): Xaa is C or S

SEQ ID NO: 47502 - protein, 30 aa, Artificial Sequence
  Cyclic GFR-binding peptide
VPTKLSAISVLYLDDMGVPTLKNYQEGMSV

SEQ ID NO: 47503 - protein, 31 aa, Artificial Sequence
  Cyclic GFR-binding peptide
  MOD_RES (29), (31): Xaa is C or S
QDLSPISILYKIGKTPKILKYHYMIVKSXKX

SEQ ID NO: 47504 - protein, 27 aa, Artificial Sequence
  Cyclic GFR-binding peptide
  MOD_RES (1), (2): Xaa is C or S
XXVPQALSATSILYYVGRKPKVLRKHR

SEQ ID NO: 47505 - protein, 29 aa, Artificial Sequence
  Cyclic GFR-binding peptide
  MOD_RES (28), (28): Xaa is C or S
DLSPISILYKVGRTPKVLKYHYMVVKSXK

SEQ ID NO: 47506 - protein, 38 aa, Artificial Sequence; identical to SEQ ID NO: 7960
  Cyclic GFR-binding peptide
  MOD_RES (6), (7): Xaa is C or S

SEQ ID NO: 47507 - protein, 32 aa, Artificial Sequence; identical to SEQ ID NO: 7961
  Cyclic GFR-binding peptide
  MOD_RES (32), (32): Xaa is C or S

SEQ ID NO: 47508 - protein, 32 aa, Artificial Sequence; identical to SEQ ID NO: 807
  Cyclic GFR-binding peptide

SEQ ID NO: 47509 - protein, 37 aa, Artificial Sequence; identical to SEQ ID NO: 7962
  Cyclic GFR-binding peptide
  MOD_RES (6), (7): Xaa is C or S

SEQ ID NO: 47510 - protein, 27 aa, Artificial Sequence
  Cyclic GFR-binding peptide
SATSVLYYDDMGVPTLRKHREGMSVAE

SEQ ID NO: 47511 - protein, 35 aa, Artificial Sequence; identical to SEQ ID NO: 7964
  Cyclic GFR-binding peptide
  MOD_RES (1), (33), (35): Xaa is C or S

SEQ ID NO: 47512 - protein, 29 aa, Artificial Sequence
  Cyclic GFR-binding peptide
  MOD_RES (3), (4): Xaa is C or S
SPXXVPQDLSAISILYLVGRTPKVLKNYQ

SEQ ID NO: 47513 - protein, 24 aa, Artificial Sequence
  Cyclic GFR-binding peptide
QALNAISILYFVGRKPKVLKKYRM

SEQ ID NO: 47514 - protein, 34 aa, Artificial Sequence
  Cyclic GFR-binding peptide
  MOD_RES (6), (7): Xaa is C or S
TVPKPXXAPTQLSAISVLYLDDSSNVILKNYQNM

SEQ ID NO: 47515 - protein, 39 aa, Artificial Sequence; identical to SEQ ID NO: 7967
  Cyclic GFR-binding peptide
  MOD_RES (4), (36), (38): Xaa is C or S

SEQ ID NO: 47516 - protein, 33 aa, Artificial Sequence
  Cyclic GFR-binding peptide
  MOD_RES (6), (6): Xaa is C or S
VTKPTXAPTKLSAISVLYLDDSSNVILKNYQNM

SEQ ID NO: 47517 - protein, 20 aa, Artificial Sequence
  Cyclic GFR-binding peptide
SPISMLYKDEYDKVVLKYHY

SEQ ID NO: 47518 - protein, 38 aa, Artificial Sequence; identical to SEQ ID NO: 7969
  Cyclic GFR-binding peptide
  MOD_RES (2), (3), (35), (37): Xaa is C or S

SEQ ID NO: 47519 - protein, 23 aa, Artificial Sequence
  Cyclic GFR-binding peptide
SPISVLYKDSSNNVILKYHYNMV

SEQ ID NO: 47520 - protein, 37 aa, Artificial Sequence; identical to SEQ ID NO: 7970
  Cyclic GFR-binding peptide
  MOD_RES (2), (2): Xaa is C or S

SEQ ID NO: 47521 - protein, 38 aa, Artificial Sequence; identical to SEQ ID NO: 7971
  Cyclic GFR-binding peptide
  MOD_RES (3), (3): Xaa is C or S

SEQ ID NO: 47522 - protein, 33 aa, Artificial Sequence
  Cyclic GFR-binding peptide
  MOD_RES (5), (6): Xaa is C or S
SAAPXXVPQALSATSILYYVGRKPKVLRKHRMI

SEQ ID NO: 47523 - protein, 26 aa, Artificial Sequence
  Cyclic GFR-binding peptide
  MOD_RES (1), (1): Xaa is C or S
XVPTKLNAISVLYFDDMGVPTLKKYR

SEQ ID NO: 47524 - protein, 41 aa, Artificial Sequence; identical to SEQ ID NO: 7973
  Cyclic GFR-binding peptide
  MOD_RES (6), (7), (40): Xaa is C or S

SEQ ID NO: 47525 - protein, 36 aa, Artificial Sequence; identical to SEQ ID NO: 7975
  Cyclic GFR-binding peptide
  MOD_RES (4), (5), (36): Xaa is C or S

SEQ ID NO: 47526 - protein, 27 aa, Artificial Sequence
  Cyclic GFR-binding peptide
KLSATSVLYYDDSSNVILRKHRNMVVR

SEQ ID NO: 47527 - protein, 23 aa, Artificial Sequence
  Cyclic GFR-binding peptide
ALNAISILYFVGRKPKVLKKYRM

SEQ ID NO: 47528 - protein, 29 aa, Artificial Sequence
  Cyclic GFR-binding peptide
APTQLSATSVLYYDDSSNVILRKHRNMVV

SEQ ID NO: 47529 - protein, 31 aa, Artificial Sequence; identical to SEQ ID NO: 7976
  Cyclic GFR-binding peptide

SEQ ID NO: 47530 - protein, 30 aa, Artificial Sequence
  Cyclic GFR-binding peptide
  MOD_RES (4), (5): Xaa is C or S
PKPXXAPTQLSPISVLYKDDSSNVILKYHY

SEQ ID NO: 47531 - protein, 32 aa, Artificial Sequence
  Cyclic GFR-binding peptide
  MOD_RES (4), (5): Xaa is C or S
PKAXXAPTKLSAISVLYLDSSNNVILKNYQNM

SEQ ID NO: 47532 - protein, 27 aa, Artificial Sequence
  Cyclic GFR-binding peptide
TKLSATSVLYYDDSSNVILRKHRNMVV

SEQ ID NO: 47533 - protein, 30 aa, Artificial Sequence
  Cyclic GFR-binding peptide
  MOD_RES (27), (29): Xaa is C or S
SAISVLYLDDSSNVILKNYQNMVVRAXGXH

SEQ ID NO: 47534 - protein, 34 aa, Artificial Sequence
  Cyclic GFR-binding peptide
  MOD_RES (4), (5): Xaa is C or S
ASPXXVSQDLSAISILYLIGKTPKILKNYQMIVK

SEQ ID NO: 47535 - protein, 37 aa, Artificial Sequence; identical to SEQ ID NO: 7978
  Cyclic GFR-binding peptide
  MOD_RES (1), (2), (34), (36): Xaa is C or S

SEQ ID NO: 47536 - protein, 33 aa, Artificial Sequence
  Cyclic GFR-binding peptide
  MOD_RES (4), (5): Xaa is C or S
GKAXXVPTKLNAISVLYFDDMGVPTLKKYREGM

SEQ ID NO: 47537 - protein, 26 aa, Artificial Sequence
  Cyclic GFR-binding peptide
TKLNAISVLYFDDMGVPTLKKYREGM

SEQ ID NO: 47538 - protein, 33 aa, Artificial Sequence
  Cyclic GFR-binding peptide
  MOD_RES (3), (4): Xaa is C or S
KAXXVPTELNAISMLYFDEYDKVVLKKYREMVV

SEQ ID NO: 47539 - protein, 35 aa, Artificial Sequence; identical to SEQ ID NO: 7981
  Cyclic GFR-binding peptide
  MOD_RES (5), (5): Xaa is C or S

SEQ ID NO: 47540 - protein, 30 aa, Artificial Sequence; identical to SEQ ID NO: 7982
  Cyclic GFR-binding peptide

SEQ ID NO: 47541 - protein, 28 aa, Artificial Sequence
  Cyclic GFR-binding peptide
TQLSAISVLYLDDSSNVILKNYQNMVVR

SEQ ID NO: 47542 - protein, 24 aa, Artificial Sequence
  Cyclic GFR-binding peptide
LSATSVLYYDDSSNVILRKHRNMV

SEQ ID NO: 47543 - protein, 35 aa, Artificial Sequence; identical to SEQ ID NO: 7983
  Cyclic GFR-binding peptide
  MOD_RES (3), (4), (35): Xaa is C or S

SEQ ID NO: 47544 - protein, 32 aa, Artificial Sequence
  Cyclic GFR-binding peptide
  MOD_RES (6), (7): Xaa is C or S
KVGKAXXVPTKLSATSVLYYDDMGVPTLRKHR

SEQ ID NO: 47545 - protein, 34 aa, Artificial Sequence; identical to SEQ ID NO: 7986
  Cyclic GFR-binding peptide
  MOD_RES (1), (33): Xaa is C or S

SEQ ID NO: 47546 - protein, 31 aa, Artificial Sequence; identical to SEQ ID NO: 7987
  Cyclic GFR-binding peptide
  MOD_RES (31), (31): Xaa is C or S

SEQ ID NO: 47547 - protein, 35 aa, Artificial Sequence; identical to SEQ ID NO: 7988
  Cyclic GFR-binding peptide
  MOD_RES (33), (35): Xaa is C or S

SEQ ID NO: 47548 - protein, 26 aa, Artificial Sequence
  Cyclic GFR-binding peptide
TKLSAISVLYLDSSNNVILKNYQNMV

SEQ ID NO: 47549 - protein, 36 aa, Artificial Sequence; identical to SEQ ID NO: 7989
  Cyclic GFR-binding peptide
  MOD_RES (5), (6): Xaa is C or S

SEQ ID NO: 47550 - protein, 30 aa, Artificial Sequence
  Cyclic GFR-binding peptide
  MOD_RES (1), (2): Xaa is C or S
XXVPTELNAISMLYFDEYDKVVLKKYREMV

SEQ ID NO: 47551 - protein, 37 aa, Artificial Sequence; identical to SEQ ID NO: 7990
  Cyclic GFR-binding peptide
  MOD_RES (7), (7): Xaa is C or S

SEQ ID NO: 47552 - protein, 32 aa, Artificial Sequence; identical to SEQ ID NO: 7991
  Cyclic GFR-binding peptide
  MOD_RES (1), (2): Xaa is C or S

SEQ ID NO: 47553 - protein, 36 aa, Artificial Sequence; identical to SEQ ID NO: 7992
  Cyclic GFR-binding peptide
  MOD_RES (1), (34), (36): Xaa is C or S

SEQ ID NO: 47554 - protein, 28 aa, Artificial Sequence
  Cyclic GFR-binding peptide
  MOD_RES (1), (2): Xaa is C or S
XXVPQDLSAISILYLVGRTPKVLKNYQM

SEQ ID NO: 47555 - protein, 28 aa, Artificial Sequence
  Cyclic GFR-binding peptide
LNAISVLYFEIVRKKPIFLKKYRTLEDH

SEQ ID NO: 47556 - protein, 26 aa, Artificial Sequence
  Cyclic GFR-binding peptide
SPISVLYKDDSSNVILKYHYNMVVRS

SEQ ID NO: 47557 - protein, 33 aa, Artificial Sequence; identical to SEQ ID NO: 7993
  Cyclic GFR-binding peptide
  MOD_RES (31), (33): Xaa is C or S

SEQ ID NO: 47558 - protein, 22 aa, Artificial Sequence
  Cyclic GFR-binding peptide
QLSAISVLYLDDSSNVILKNYQ

SEQ ID NO: 47559 - protein, 41 aa, Artificial Sequence; identical to SEQ ID NO: 7994
  Cyclic GFR-binding peptide
  MOD_RES (5), (6), (38), (40): Xaa is C or S

SEQ ID NO: 47560 - protein, 31 aa, Artificial Sequence
  Cyclic GFR-binding peptide
  MOD_RES (1), (2): Xaa is C or S
XXAPTKLSPISVLYKDDSSNVILKYHYNMVV

SEQ ID NO: 47561 - protein, 26 aa, Artificial Sequence
  Cyclic GFR-binding peptide
LSPISILYKVGRTPKVLKYHYMVVKS

SEQ ID NO: 47562 - protein, 26 aa, Artificial Sequence
  Cyclic GFR-binding peptide
SPISVLYKDDSSNVILKYHYNMVVRA

SEQ ID NO: 47563 - protein, 22 aa, Artificial Sequence
  Cyclic GFR-binding peptide
SAISVLYLDDSSNVILKNYQNM

SEQ ID NO: 47564 - protein, 27 aa, Artificial Sequence
  Cyclic GFR-binding peptide
  MOD_RES (1), (2): Xaa is C or S
XXAPTQLSAISVLYLDDSSNVILKNYQ

SEQ ID NO: 47565 - protein, 31 aa, Artificial Sequence
  Cyclic GFR-binding peptide
  MOD_RES (5), (6): Xaa is C or S
VPKPXXAPTQLSPISVLYKDDSSNVILKYHY

SEQ ID NO: 47566 - protein, 37 aa, Artificial Sequence; identical to SEQ ID NO: 7999
  Cyclic GFR-binding peptide
  MOD_RES (3), (4), (36): Xaa is C or S

SEQ ID NO: 47567 - protein, 34 aa, Artificial Sequence; identical to SEQ ID NO: 8001
  Cyclic GFR-binding peptide
  MOD_RES (1), (2): Xaa is C or S

SEQ ID NO: 47568 - protein, 28 aa, Artificial Sequence
  Cyclic GFR-binding peptide
  MOD_RES (2), (3): Xaa is C or S
PXXVSQDLSPISILYKIGKTPKILKYHY

SEQ ID NO: 47569 - protein, 29 aa, Artificial Sequence
  Cyclic GFR-binding peptide
SPISVLYKDDMGVPTLKYHYAAAAAAAAA

SEQ ID NO: 47570 - protein, 40 aa, Artificial Sequence; identical to SEQ ID NO: 8003
  Cyclic GFR-binding peptide
  MOD_RES (5), (37), (39): Xaa is C or S

SEQ ID NO: 47571 - protein, 24 aa, Artificial Sequence
  Cyclic GFR-binding peptide
LSPISVLYKEIVRKKPIFLKYHYT

SEQ ID NO: 47572 - protein, 30 aa, Artificial Sequence
  Cyclic GFR-binding peptide
  MOD_RES (4), (5): Xaa is C or S
AAPXXVPQALNAISILYFVGRKPKVLKKYR

SEQ ID NO: 47573 - protein, 37 aa, Artificial Sequence; identical to SEQ ID NO: 8006
  Cyclic GFR-binding peptide
  MOD_RES (5), (6): Xaa is C or S

SEQ ID NO: 47574 - protein, 30 aa, Artificial Sequence
  Cyclic GFR-binding peptide
  MOD_RES (1), (1): Xaa is C or S
XVSQDLNAISILYFIGKTPKILKKYRMIVK

SEQ ID NO: 47575 - protein, 33 aa, Artificial Sequence
  Cyclic GFR-binding peptide
  MOD_RES (3), (4): Xaa is C or S
APXXVPQALSAISILYLVGRKPKVLKNYQMIVR

SEQ ID NO: 47576 - protein, 32 aa, Artificial Sequence
  Cyclic GFR-binding peptide
  MOD_RES (31), (31): Xaa is C or S
PTKLSATSVLYYDDSSNVILRKHRNMVVRSXG

SEQ ID NO: 47577 - protein, 33 aa, Artificial Sequence
  Cyclic GFR-binding peptide
  MOD_RES (3), (4): Xaa is C or S
SPXXVSQDLSATSILYYIGKTPKILRKHRMIVK

SEQ ID NO: 47578 - protein, 25 aa, Artificial Sequence
  Cyclic GFR-binding peptide
QLSPISVLYKEIVRKKPIFLKYHYT

SEQ ID NO: 47579 - protein, 27 aa, Artificial Sequence
  Cyclic GFR-binding peptide
  MOD_RES (1), (2): Xaa is C or S
XXVPTELSPISMLYKDENEKVVLKYHY

SEQ ID NO: 47580 - protein, 38 aa, Artificial Sequence; identical to SEQ ID NO: 8009
  Cyclic GFR-binding peptide
  MOD_RES (4), (5), (37): Xaa is C or S

SEQ ID NO: 47581 - protein, 32 aa, Artificial Sequence; identical to SEQ ID NO: 8010
  Cyclic GFR-binding peptide
  MOD_RES (32), (32): Xaa is C or S

SEQ ID NO: 47582 - protein, 31 aa, Artificial Sequence
  Cyclic GFR-binding peptide
  MOD_RES (1), (2): Xaa is C or S
XXAPTKLSATSVLYYDDSSNVILRKHRNMVV

SEQ ID NO: 47583 - protein, 24 aa, Artificial Sequence
  Cyclic GFR-binding peptide
DLNAISILYFIGKTPKILKKYRMI

SEQ ID NO: 47584 - protein, 28 aa, Artificial Sequence
  Cyclic GFR-binding peptide
  MOD_RES (2), (3): Xaa is C or S
AXXVPTKLSAISVLYLDDMGVPTLKNYQ

SEQ ID NO: 47585 - protein, 27 aa, Artificial Sequence
  Cyclic GFR-binding peptide
TKLSPISVLYKDDSSNVILKYHYNMVV

SEQ ID NO: 47586 - protein, 37 aa, Artificial Sequence; identical to SEQ ID NO: 8012
  Cyclic GFR-binding peptide
  MOD_RES (6), (7): Xaa is C or S

SEQ ID NO: 47587 - protein, 32 aa, Artificial Sequence; identical to SEQ ID NO: 8013
  Cyclic GFR-binding peptide
  MOD_RES (1), (32): Xaa is C or S

SEQ ID NO: 47588 - protein, 29 aa, Artificial Sequence
  Cyclic GFR-binding peptide
  MOD_RES (1), (1): Xaa is C or S
XAPTKLNAISVLYFDSSNNVILKKYRNMV

SEQ ID NO: 47589 - protein, 29 aa, Artificial Sequence
  Cyclic GFR-binding peptide
  MOD_RES (2), (3): Xaa is C or S
PXXVPQDLNAISILYFVGRTPKVLKKYRM

SEQ ID NO: 47590 - protein, 34 aa, Artificial Sequence
  Cyclic GFR-binding peptide
  MOD_RES (6), (7): Xaa is C or S
YVPKPXXAPTKLSPISVLYKDDSSNVILKYHYNM

SEQ ID NO: 47591 - protein, 30 aa, Artificial Sequence
  Cyclic GFR-binding peptide
  MOD_RES (1), (1): Xaa is C or S
XAPTQLSPISVLYKDDSSNVILKYHYNMVV

SEQ ID NO: 47592 - protein, 42 aa, Artificial Sequence; identical to SEQ ID NO: 8014
  Cyclic GFR-binding peptide
  MOD_RES (4), (41): Xaa is C or S

SEQ ID NO: 47593 - protein, 34 aa, Artificial Sequence
  Cyclic GFR-binding peptide
  MOD_RES (6), (7): Xaa is C or S
ASASPXXVSQDLNAISILYFIGKTPKILKKYRMI

SEQ ID NO: 47594 - protein, 39 aa, Artificial Sequence; identical to SEQ ID NO: 8015
  Cyclic GFR-binding peptide
  MOD_RES (6), (7), (39): Xaa is C or S

SEQ ID NO: 47595 - protein, 36 aa, Artificial Sequence; identical to SEQ ID NO: 8016
  Cyclic GFR-binding peptide
  MOD_RES (1), (2), (33), (35): Xaa is C or S

SEQ ID NO: 47596 - protein, 30 aa, Artificial Sequence
  Cyclic GFR-binding peptide
  MOD_RES (1), (1): Xaa is C or S
XAPTQLSATSVLYYDDSSNVILRKHRNMVV

SEQ ID NO: 47597 - protein, 29 aa, Artificial Sequence
  Cyclic GFR-binding peptide
  MOD_RES (28), (28): Xaa is C or S
ALSATSILYYVGRKPKVLRKHRMIVRSXK

SEQ ID NO: 47598 - protein, 21 aa, Artificial Sequence
  Cyclic GFR-binding peptide
NAISILYFIGKTPKILKKYRM

SEQ ID NO: 47599 - protein, 33 aa, Artificial Sequence
  Cyclic GFR-binding peptide
  MOD_RES (3), (4): Xaa is C or S
SPXXVSQDLSPISILYKIGKTPKILKYHYMIVK

SEQ ID NO: 47600 - protein, 30 aa, Artificial Sequence
  Cyclic GFR-binding peptide
PTKLNAISVLYFDDMGVPTLKKYREGMSVA

SEQ ID NO: 47601 - protein, 31 aa, Artificial Sequence; identical to SEQ ID NO: 8020
  Cyclic GFR-binding peptide
  MOD_RES (1), (1): Xaa is C or S

SEQ ID NO: 47602 - protein, 38 aa, Artificial Sequence; identical to SEQ ID NO: 8021
  Cyclic GFR-binding peptide
  MOD_RES (6), (7): Xaa is C or S

SEQ ID NO: 47603 - protein, 31 aa, Artificial Sequence
  Cyclic GFR-binding peptide
  MOD_RES (3), (4): Xaa is C or S
KPXXAPTKLSAISVLYLDDSSNVILKNYQNM

SEQ ID NO: 47604 - protein, 29 aa, Artificial Sequence
  Cyclic GFR-binding peptide
  MOD_RES (28), (28): Xaa is C or S
LSAISVLYLDDSSNVILKNYQNMVVRAXG

SEQ ID NO: 47605 - protein, 36 aa, Artificial Sequence; identical to SEQ ID NO: 8022
  Cyclic GFR-binding peptide
  MOD_RES (2), (3), (35): Xaa is C or S

SEQ ID NO: 47606 - protein, 28 aa, Artificial Sequence
  Cyclic GFR-binding peptide
  MOD_RES (28), (28): Xaa is C or S
DLSAISILYLVGRTPKVLKNYQMVVKSX

SEQ ID NO: 47607 - protein, 36 aa, Artificial Sequence; identical to SEQ ID NO: 8023
  Cyclic GFR-binding peptide
  MOD_RES (3), (4), (36): Xaa is C or S

SEQ ID NO: 47608 - protein, 28 aa, Artificial Sequence
  Cyclic GFR-binding peptide
  MOD_RES (27), (27): Xaa is C or S
SATSMLYYDENEKVVLRKHRDMVVEGXG

SEQ ID NO: 47609 - protein, 35 aa, Artificial Sequence; identical to SEQ ID NO: 8024
  Cyclic GFR-binding peptide
  MOD_RES (1), (33), (35): Xaa is C or S

SEQ ID NO: 47610 - protein, 22 aa, Artificial Sequence
  Cyclic GFR-binding peptide
DLSAISILYLIGKTPKILKNYQ

SEQ ID NO: 47611 - protein, 35 aa, Artificial Sequence; identical to SEQ ID NO: 8026
  Cyclic GFR-binding peptide
  MOD_RES (32), (34): Xaa is C or S

SEQ ID NO: 47612 - protein, 27 aa, Artificial Sequence
  Cyclic GFR-binding peptide
  MOD_RES (27), (27): Xaa is C or S
LNAISILYFVGRKPKVLKKYRMIVRSX

SEQ ID NO: 47613 - protein, 24 aa, Artificial Sequence
  Cyclic GFR-binding peptide
LSPISILYKVGRKPKVLKYHYMIV

SEQ ID NO: 47614 - protein, 41 aa, Artificial Sequence; identical to SEQ ID NO: 8027
  Cyclic GFR-binding peptide
  MOD_RES (6), (38), (40): Xaa is C or S

SEQ ID NO: 47615 - protein, 22 aa, Artificial Sequence
  Cyclic GFR-binding peptide
NAISVLYFDDMGVPTLKKYREG

SEQ ID NO: 47616 - protein, 40 aa, Artificial Sequence; identical to SEQ ID NO: 8028
  Cyclic GFR-binding peptide
  MOD_RES (2), (39): Xaa is C or S

SEQ ID NO: 47617 - protein, 30 aa, Artificial Sequence
  Cyclic GFR-binding peptide
  MOD_RES (3), (3): Xaa is C or S
PTXAPTKLSPISVLYKDDSSNVILKYHYNM

SEQ ID NO: 47618 - protein, 31 aa, Artificial Sequence
  Cyclic GFR-binding peptide
  MOD_RES (28), (30): Xaa is C or S
LSATSMLYYDEYDKVVLRKHREMVVEGXGXR

SEQ ID NO: 47619 - protein, 34 aa, Artificial Sequence
  Cyclic GFR-binding peptide
  MOD_RES (2), (3): Xaa is C or S
AXXVPTKLNAISVLYFDDMGVPTLKKYREGMSVA

SEQ ID NO: 47620 - protein, 26 aa, Artificial Sequence
  Cyclic GFR-binding peptide
QALSPISILYKVGRKPKVLKYHYMIV

SEQ ID NO: 47621 - protein, 36 aa, Artificial Sequence; identical to SEQ ID NO: 8031
  Cyclic GFR-binding peptide
  MOD_RES (3), (4), (36): Xaa is C or S

SEQ ID NO: 47622 - protein, 32 aa, Artificial Sequence
  Cyclic GFR-binding peptide
  MOD_RES (4), (5): Xaa is C or S
PKAXXVPTELSATSMLYYDENEKVVLRKHRDM

SEQ ID NO: 47623 - protein, 29 aa, Artificial Sequence
  Cyclic GFR-binding peptide
SPISVLYKDSSNNVILKYHYAAAAAAAAA

SEQ ID NO: 47624 - protein, 30 aa, Artificial Sequence
  Cyclic GFR-binding peptide
  MOD_RES (29), (29): Xaa is C or S
LNAISVLYFDDMGVPTLKKYREGMSVAEXG

SEQ ID NO: 47625 - protein, 32 aa, Artificial Sequence
  Cyclic GFR-binding peptide
  MOD_RES (3), (4): Xaa is C or S
KPXXAPTQLSAISVLYLDDSSNVILKNYQNMV

SEQ ID NO: 47626 - protein, 29 aa, Artificial Sequence
  Cyclic GFR-binding peptide
TQVQLSAISVLYLEIVRKKPIFLKNYQTL

SEQ ID NO: 47627 - protein, 37 aa, Artificial Sequence; identical to SEQ ID NO: 8034
  Cyclic GFR-binding peptide
  MOD_RES (5), (6), (37): Xaa is C or S

SEQ ID NO: 47628 - protein, 31 aa, Artificial Sequence
  Cyclic GFR-binding peptide
  MOD_RES (3), (4): Xaa is C or S
APXXVPQALNAISILYFVGRKPKVLKKYRMI

SEQ ID NO: 47629 - protein, 32 aa, Artificial Sequence; identical to SEQ ID NO: 8035
  Cyclic GFR-binding peptide
  MOD_RES (1), (2): Xaa is C or S

SEQ ID NO: 47630 - protein, 32 aa, Artificial Sequence
  Cyclic GFR-binding peptide
  MOD_RES (30), (32): Xaa is C or S
PQALNAISILYFVGRKPKVLKKYRMIVRSXKX

SEQ ID NO: 47631 - protein, 30 aa, Artificial Sequence; identical to SEQ ID NO: 8037
  Cyclic GFR-binding peptide

SEQ ID NO: 47632 - protein, 35 aa, Artificial Sequence; identical to SEQ ID NO: 8038
  Cyclic GFR-binding peptide
  MOD_RES (1), (2), (34): Xaa is C or S

SEQ ID NO: 47633 - protein, 31 aa, Artificial Sequence
  Cyclic GFR-binding peptide
  MOD_RES (5), (6): Xaa is C or S
SAAPXXVPQALSAISILYLVGRKPKVLKNYQ

SEQ ID NO: 47634 - protein, 35 aa, Artificial Sequence
  Cyclic GFR-binding peptide
  MOD_RES (6), (6): Xaa is C or S
VTKPTXAPTKLSATSVLYYDDSSNVILRKHRNMVV

SEQ ID NO: 47635 - protein, 34 aa, Artificial Sequence
  Cyclic GFR-binding peptide
  MOD_RES (6), (7): Xaa is C or S
ASASPXXVPQDLNAISILYFVGRTPKVLKKYRMV

SEQ ID NO: 47636 - protein, 34 aa, Artificial Sequence; identical to SEQ ID NO: 8039
  Cyclic GFR-binding peptide
  MOD_RES (1), (32), (34): Xaa is C or S

SEQ ID NO: 47637 - protein, 38 aa, Artificial Sequence; identical to SEQ ID NO: 8040
  Cyclic GFR-binding peptide
  MOD_RES (4), (5), (38): Xaa is C or S

SEQ ID NO: 47638 - protein, 32 aa, Artificial Sequence
  Cyclic GFR-binding peptide
  MOD_RES (3), (4): Xaa is C or S
KAXXVPTELNAISMLYFDENEKVVLKKYRDMV

SEQ ID NO: 47639 - protein, 32 aa, Artificial Sequence; identical to SEQ ID NO: 8042
  Cyclic GFR-binding peptide
  MOD_RES (32), (32): Xaa is C or S

SEQ ID NO: 47640 - protein, 30 aa, Artificial Sequence
  Cyclic GFR-binding peptide
VQLNAISVLYFEIVRKKPIFLKKYRTLEDH

SEQ ID NO: 47641 - protein, 28 aa, Artificial Sequence
  Cyclic GFR-binding peptide
VPQALSAISILYLVGRKPKVLKNYQMIV

SEQ ID NO: 47642 - protein, 22 aa, Artificial Sequence
  Cyclic GFR-binding peptide
NAISMLYFDEYDKVVLKKYREM

SEQ ID NO: 47643 - protein, 33 aa, Artificial Sequence
  Cyclic GFR-binding peptide
  MOD_RES (3), (4): Xaa is C or S
KPXXAPTQLSPISVLYKDDSSNVILKYHYNMVV

SEQ ID NO: 47644 - protein, 32 aa, Artificial Sequence
  Cyclic GFR-binding peptide
  MOD_RES (31), (31): Xaa is C or S
PTKLSAISVLYLDSSNNVILKNYQNMVVKAXG

SEQ ID NO: 47645 - protein, 31 aa, Artificial Sequence
  Cyclic GFR-binding peptide
  MOD_RES (31), (31): Xaa is C or S
PTKLSPISVLYKDSSNNVILKYHYNMVVKAX

SEQ ID NO: 47646 - protein, 28 aa, Artificial Sequence
  Cyclic GFR-binding peptide
PTKLSAISVLYLDSSNNVILKNYQNMVV

SEQ ID NO: 47647 - protein, 29 aa, Artificial Sequence
  Cyclic GFR-binding peptide
  MOD_RES (27), (29): Xaa is C or S
SPISMLYKDEYDKVVLKYHYEMVVEGXGX

SEQ ID NO: 47648 - protein, 40 aa, Artificial Sequence; identical to SEQ ID NO: 8045
  Cyclic GFR-binding peptide
  MOD_RES (37), (39): Xaa is C or S

SEQ ID NO: 47649 - protein, 38 aa, Artificial Sequence; identical to SEQ ID NO: 8046
  Cyclic GFR-binding peptide
  MOD_RES (6), (7), (38): Xaa is C or S

SEQ ID NO: 47650 - protein, 32 aa, Artificial Sequence
  Cyclic GFR-binding peptide
  MOD_RES (5), (6): Xaa is C or S
VPKPXXAPTQLSPISVLYKDDSSNVILKYHYN

SEQ ID NO: 47651 - protein, 24 aa, Artificial Sequence
  Cyclic GFR-binding peptide
DLSAISILYLVGRTPKVLKNYQMV

SEQ ID NO: 47652 - protein, 26 aa, Artificial Sequence
  Cyclic GFR-binding peptide
QALSATSILYYVGRKPKVLRKHRMIV

SEQ ID NO: 47653 - protein, 36 aa, Artificial Sequence; identical to SEQ ID NO: 8047
  Cyclic GFR-binding peptide
  MOD_RES (3), (4), (35): Xaa is C or S

SEQ ID NO: 47654 - protein, 37 aa, Artificial Sequence; identical to SEQ ID NO: 8049
  Cyclic GFR-binding peptide
  MOD_RES (5), (6), (37): Xaa is C or S

SEQ ID NO: 47655 - protein, 25 aa, Artificial Sequence
  Cyclic GFR-binding peptide
ELNAISMLYFDEYDKVVLKKYREMV

SEQ ID NO: 47656 - protein, 32 aa, Artificial Sequence; identical to SEQ ID NO: 8050
  Cyclic GFR-binding peptide

SEQ ID NO: 47657 - protein, 31 aa, Artificial Sequence
  Cyclic GFR-binding peptide
  MOD_RES (28), (30): Xaa is C or S
DLSPISILYKIGKTPKILKYHYMIVKSXKXS

SEQ ID NO: 47658 - protein, 23 aa, Artificial Sequence
  Cyclic GFR-binding peptide
LSPISVLYKEIVRKKPIFLKYHY

SEQ ID NO: 47659 - protein, 24 aa, Artificial Sequence
  Cyclic GFR-binding peptide
LSATSILYYVGRKPKVLRKHRMIV

SEQ ID NO: 47660 - protein, 38 aa, Artificial Sequence; identical to SEQ ID NO: 8052
  Cyclic GFR-binding peptide
  MOD_RES (1), (38): Xaa is C or S

SEQ ID NO: 47661 - protein, 25 aa, Artificial Sequence
  Cyclic GFR-binding peptide
QLSPISVLYKDDSSNVILKYHYNMV

SEQ ID NO: 47662 - protein, 35 aa, Artificial Sequence; identical to SEQ ID NO: 8053
  Cyclic GFR-binding peptide
  MOD_RES (1), (33), (35): Xaa is C or S

SEQ ID NO: 47663 - protein, 26 aa, Artificial Sequence
  Cyclic GFR-binding peptide
QLSPISVLYKDDSSNVILKYHYNMVV

SEQ ID NO: 47664 - protein, 38 aa, Artificial Sequence; identical to SEQ ID NO: 8057
  Cyclic GFR-binding peptide
  MOD_RES (3), (4), (36), (38): Xaa is C or S

SEQ ID NO: 47665 - protein, 35 aa, Artificial Sequence; identical to SEQ ID NO: 8056
  Cyclic GFR-binding peptide
  MOD_RES (3), (4), (35): Xaa is C or S

SEQ ID NO: 47666 - protein, 25 aa, Artificial Sequence
  Cyclic GFR-binding peptide
QLSATSVLYYDDSSNVILRKHRNMV

SEQ ID NO: 47667 - protein, 36 aa, Artificial Sequence; identical to SEQ ID NO: 8059
  Cyclic GFR-binding peptide
  MOD_RES (4), (5): Xaa is C or S

SEQ ID NO: 47668 - protein, 41 aa, Artificial Sequence; identical to SEQ ID NO: 8060
  Cyclic GFR-binding peptide
  MOD_RES (7), (39), (41): Xaa is C or S

SEQ ID NO: 47669 - protein, 38 aa, Artificial Sequence; identical to SEQ ID NO: 8061
  Cyclic GFR-binding peptide
  MOD_RES (5), (6), (38): Xaa is C or S

SEQ ID NO: 47670 - protein, 29 aa, Artificial Sequence
  Cyclic GFR-binding peptide
SATSVLYYDSSNNVILRKHRAAAAAAAAA

SEQ ID NO: 47671 - protein, 26 aa, Artificial Sequence
  Cyclic GFR-binding peptide
  MOD_RES (1), (1): Xaa is C or S
XVPQDLSATSILYYVGRTPKVLRKHR

SEQ ID NO: 47672 - protein, 36 aa, Artificial Sequence; identical to SEQ ID NO: 8062
  Cyclic GFR-binding peptide
  MOD_RES (3), (4): Xaa is C or S

SEQ ID NO: 47673 - protein, 24 aa, Artificial Sequence
  Cyclic GFR-binding peptide
QDLSAISILYLIGKTPKILKNYQM

SEQ ID NO: 47674 - protein, 33 aa, Artificial Sequence
  Cyclic GFR-binding peptide
  MOD_RES (3), (4): Xaa is C or S
KPXXAPTKLSAISVLYLDDSSNVILKNYQNMVV

SEQ ID NO: 47675 - protein, 31 aa, Artificial Sequence
  Cyclic GFR-binding peptide
  MOD_RES (31), (31): Xaa is C or S
PTKLNAISVLYFDSSNNVILKKYRNMVVKAX

SEQ ID NO: 47676 - protein, 37 aa, Artificial Sequence; identical to SEQ ID NO: 8066
  Cyclic GFR-binding peptide
  MOD_RES (3), (4), (36): Xaa is C or S

SEQ ID NO: 47677 - protein, 31 aa, Artificial Sequence; identical to SEQ ID NO: 8068
  Cyclic GFR-binding peptide
  MOD_RES (31), (31): Xaa is C or S

SEQ ID NO: 47678 - protein, 39 aa, Artificial Sequence; identical to SEQ ID NO: 8070
  Cyclic GFR-binding peptide
  MOD_RES (3), (3): Xaa is C or S

SEQ ID NO: 47679 - protein, 21 aa, Artificial Sequence
  Cyclic GFR-binding peptide
LSPISVLYKDDSSNVILKYHY

SEQ ID NO: 47680 - protein, 26 aa, Artificial Sequence
  Cyclic GFR-binding peptide
LSPISVLYKDDSSNVILKYHYNMVVR

SEQ ID NO: 47681 - protein, 26 aa, Artificial Sequence
  Cyclic GFR-binding peptide
  MOD_RES (1), (1): Xaa is C or S
XVSQDLNAISILYFIGKTPKILKKYR

SEQ ID NO: 47682 - protein, 26 aa, Artificial Sequence
  Cyclic GFR-binding peptide
  MOD_RES (1), (1): Xaa is C or S
XVPTKLSAISVLYLDDMGVPTLKNYQ

SEQ ID NO: 47683 - protein, 32 aa, Artificial Sequence
  Cyclic GFR-binding peptide
  MOD_RES (4), (5): Xaa is C or S
ASPXXVPQDLNAISILYFVGRTPKVLKKYRMV

SEQ ID NO: 47684 - protein, 39 aa, Artificial Sequence; identical to SEQ ID NO: 8071
  Cyclic GFR-binding peptide
  MOD_RES (3), (3): Xaa is C or S

SEQ ID NO: 47685 - protein, 26 aa, Artificial Sequence
  Cyclic GFR-binding peptide
VPQALSPISILYKVGRKPKVLKYHYM

SEQ ID NO: 47686 - protein, 30 aa, Artificial Sequence
  Cyclic GFR-binding peptide
  MOD_RES (28), (30): Xaa is C or S
LNAISVLYFDSSNNVILKKYRNMVVKAXGX

SEQ ID NO: 47687 - protein, 39 aa, Artificial Sequence; identical to SEQ ID NO: 8072
  Cyclic GFR-binding peptide
  MOD_RES (4), (4): Xaa is C or S

SEQ ID NO: 47688 - protein, 25 aa, Artificial Sequence
  Cyclic GFR-binding peptide
TELSATSMLYYDEYDKVVLRKHREM

SEQ ID NO: 47689 - protein, 26 aa, Artificial Sequence
  Cyclic GFR-binding peptide
SPISMLYKDEYDKVVLKYHYEMVVEG

SEQ ID NO: 47690 - protein, 34 aa, Artificial Sequence
  Cyclic GFR-binding peptide
  MOD_RES (6), (7): Xaa is C or S
TVPKPXXAPTQLSATSVLYYDDSSNVILRKHRNM

SEQ ID NO: 47691 - protein, 32 aa, Artificial Sequence; identical to SEQ ID NO: 8074
  Cyclic GFR-binding peptide
  MOD_RES (1), (2): Xaa is C or S

SEQ ID NO: 47692 - protein, 33 aa, Artificial Sequence
  Cyclic GFR-binding peptide
  MOD_RES (31), (33): Xaa is C or S
PTQLSPISVLYKDDSSNVILKYHYNMVVRAXGX

SEQ ID NO: 47693 - protein, 40 aa, Artificial Sequence; identical to SEQ ID NO: 8078
  Cyclic GFR-binding peptide
  MOD_RES (5), (6), (38), (40): Xaa is C or S

SEQ ID NO: 47694 - protein, 28 aa, Artificial Sequence
  Cyclic GFR-binding peptide
APTKLSATSVLYYDDSSNVILRKHRNMV

SEQ ID NO: 47695 - protein, 29 aa, Artificial Sequence
  Cyclic GFR-binding peptide
  MOD_RES (27), (29): Xaa is C or S
LSATSILYYVGRKPKVLRKHRMIVRSXKX

SEQ ID NO: 47696 - protein, 35 aa, Artificial Sequence; identical to SEQ ID NO: 8079
  Cyclic GFR-binding peptide
  MOD_RES (1), (2), (34): Xaa is C or S

SEQ ID NO: 47697 - protein, 40 aa, Artificial Sequence; identical to SEQ ID NO: 8080
  Cyclic GFR-binding peptide
  MOD_RES (5), (6), (37), (39): Xaa is C or S

SEQ ID NO: 47698 - protein, 30 aa, Artificial Sequence
  Cyclic GFR-binding peptide
  MOD_RES (29), (29): Xaa is C or S
QDLSATSILYYIGKTPKILRKHRMIVKSXK

SEQ ID NO: 47699 - protein, 27 aa, Artificial Sequence
  Cyclic GFR-binding peptide
  MOD_RES (1), (2): Xaa is C or S
XXVPTELNAISMLYFDENEKVVLKKYR

SEQ ID NO: 47700 - protein, 37 aa, Artificial Sequence; identical to SEQ ID NO: 8083
  Cyclic GFR-binding peptide
  MOD_RES (6), (7): Xaa is C or S

SEQ ID NO: 47701 - protein, 41 aa, Artificial Sequence; identical to SEQ ID NO: 8085
  Cyclic GFR-binding peptide
  MOD_RES (6), (7), (38), (40): Xaa is C or S

SEQ ID NO: 47702 - protein, 26 aa, Artificial Sequence
  Cyclic GFR-binding peptide
LNAISILYFVGRTPKVLKKYRMVVKS

SEQ ID NO: 47703 - protein, 32 aa, Artificial Sequence
  Cyclic GFR-binding peptide
  MOD_RES (3), (4): Xaa is C or S
KPXXAPTQLSPISVLYKDDSSNVILKYHYNMV

SEQ ID NO: 47704 - protein, 35 aa, Artificial Sequence; identical to SEQ ID NO: 8090
  Cyclic GFR-binding peptide
  MOD_RES (2), (3): Xaa is C or S

SEQ ID NO: 47705 - protein, 32 aa, Artificial Sequence
  Cyclic GFR-binding peptide
  MOD_RES (2), (3): Xaa is C or S
PXXAPTKLSATSVLYYDDSSNVILRKHRNMVV

SEQ ID NO: 47706 - protein, 30 aa, Artificial Sequence
  Cyclic GFR-binding peptide
  MOD_RES (29), (29): Xaa is C or S
QLSATSVLYYDDSSNVILRKHRNMVVRAXG

SEQ ID NO: 47707 - protein, 25 aa, Artificial Sequence
  Cyclic GFR-binding peptide
TELSPISMLYKDEYDKVVLKYHYEM

SEQ ID NO: 47708 - protein, 27 aa, Artificial Sequence
  Cyclic GFR-binding peptide
KLNAISVLYFDDMGVPTLKKYREGMSV

SEQ ID NO: 47709 - protein, 36 aa, Artificial Sequence; identical to SEQ ID NO: 8091
  Cyclic GFR-binding peptide
  MOD_RES (4), (5), (36): Xaa is C or S

SEQ ID NO: 47710 - protein, 32 aa, Artificial Sequence
  Cyclic GFR-binding peptide
  MOD_RES (29), (31): Xaa is C or S
KLNAISVLYFDSSNNVILKKYRNMVVKAXGXH

SEQ ID NO: 47711 - protein, 35 aa, Artificial Sequence; identical to SEQ ID NO: 8092
  Cyclic GFR-binding peptide
  MOD_RES (1), (2), (34): Xaa is C or S

SEQ ID NO: 47712 - protein, 35 aa, Artificial Sequence; identical to SEQ ID NO: 8093
  Cyclic GFR-binding peptide
  MOD_RES (1), (32), (34): Xaa is C or S

SEQ ID NO: 47713 - protein, 35 aa, Artificial Sequence
  Cyclic GFR-binding peptide
  MOD_RES (2), (2): Xaa is C or S
QXRPTQVQLNAISVLYFEIVRKKPIFLKKYRTLED

SEQ ID NO: 47714 - protein, 26 aa, Artificial Sequence
  Cyclic GFR-binding peptide
LNAISVLYFEIVRKKPIFLKKYRTLE

SEQ ID NO: 47715 - protein, 33 aa, Artificial Sequence
  Cyclic GFR-binding peptide
  MOD_RES (30), (32): Xaa is C or S
TKLSAISVLYLDDSSNVILKNYQNMVVRSXGXH

SEQ ID NO: 47716 - protein, 31 aa, Artificial Sequence; identical to SEQ ID NO: 8094
  Cyclic GFR-binding peptide
  MOD_RES (1), (1): Xaa is C or S

SEQ ID NO: 47717 - protein, 30 aa, Artificial Sequence
  Cyclic GFR-binding peptide
  MOD_RES (1), (2): Xaa is C or S
XXAPTKLSAISVLYLDDSSNVILKNYQNMV

SEQ ID NO: 47718 - protein, 22 aa, Artificial Sequence
  Cyclic GFR-binding peptide
LNAISVLYFDDMGVPTLKKYRE

SEQ ID NO: 47719 - protein, 30 aa, Artificial Sequence
  Cyclic GFR-binding peptide
  MOD_RES (3), (4): Xaa is C or S
SPXXVSQDLSATSILYYIGKTPKILRKHRM

SEQ ID NO: 47720 - protein, 30 aa, Artificial Sequence
  Cyclic GFR-binding peptide
TQVQLNAISVLYFEIVRKKPIFLKKYRTLE

SEQ ID NO: 47721 - protein, 35 aa, Artificial Sequence
  Cyclic GFR-binding peptide
  MOD_RES (5), (6): Xaa is C or S
VGKAXXVPTKLSATSVLYYDDMGVPTLRKHREGMS

SEQ ID NO: 47722 - protein, 29 aa, Artificial Sequence
  Cyclic GFR-binding peptide
  MOD_RES (27), (29): Xaa is C or S
SPISVLYKDSSNNVILKYHYNMVVKAXGX

SEQ ID NO: 47723 - protein, 25 aa, Artificial Sequence
  Cyclic GFR-binding peptide
SAISVLYLDDSSNVILKNYQNMVVR

SEQ ID NO: 47724 - protein, 34 aa, Artificial Sequence; identical to SEQ ID NO: 8097
  Cyclic GFR-binding peptide
  MOD_RES (1), (32), (34): Xaa is C or S

SEQ ID NO: 47725 - protein, 35 aa, Artificial Sequence; identical to SEQ ID NO: 8102
  Cyclic GFR-binding peptide
  MOD_RES (32), (34): Xaa is C or S

SEQ ID NO: 47726 - protein, 24 aa, Artificial Sequence
  Cyclic GFR-binding peptide
PQALSATSILYYVGRKPKVLRKHR

SEQ ID NO: 47727 - protein, 36 aa, Artificial Sequence; identical to SEQ ID NO: 8103
  Cyclic GFR-binding peptide
  MOD_RES (3), (4), (35): Xaa is C or S

SEQ ID NO: 47728 - protein, 35 aa, Artificial Sequence; identical to SEQ ID NO: 8104
  Cyclic GFR-binding peptide
  MOD_RES (4), (5): Xaa is C or S

SEQ ID NO: 47729 - protein, 32 aa, Artificial Sequence
  Cyclic GFR-binding peptide
  MOD_RES (2), (2): Xaa is C or S
QXRPTQVQLSPISVLYKEIVRKKPIFLKYHYT

SEQ ID NO: 47730 - protein, 37 aa, Artificial Sequence
  Cyclic GFR-binding peptide
  MOD_RES (5), (6): Xaa is C or S
VGKAXXVPTKLSATSVLYYDDMGVPTLRKHREGMSVA

SEQ ID NO: 47731 - protein, 25 aa, Artificial Sequence
  Cyclic GFR-binding peptide
TKLSAISVLYLDSSNNVILKNYQNM

SEQ ID NO: 47732 - protein, 39 aa, Artificial Sequence; identical to SEQ ID NO: 8105
  Cyclic GFR-binding peptide
  MOD_RES (2), (3), (36), (38): Xaa is C or S

SEQ ID NO: 47733 - protein, 30 aa, Artificial Sequence
  Cyclic GFR-binding peptide
QLSATSVLYYEIVRKKPIFLRKHRTLEDHL

SEQ ID NO: 47734 - protein, 38 aa, Artificial Sequence; identical to SEQ ID NO: 8106
  Cyclic GFR-binding peptide
  MOD_RES (3), (4), (36), (38): Xaa is C or S

SEQ ID NO: 47735 - protein, 21 aa, Artificial Sequence
  Cyclic GFR-binding peptide
SAISVLYLDDSSNVILKNYQN

SEQ ID NO: 47736 - protein, 37 aa, Artificial Sequence; identical to SEQ ID NO: 8109
  Cyclic GFR-binding peptide
  MOD_RES (3), (4), (37): Xaa is C or S

SEQ ID NO: 47737 - protein, 34 aa, Artificial Sequence
  Cyclic GFR-binding peptide
  MOD_RES (5), (6): Xaa is C or S
SASPXXVSQDLNAISILYFIGKTPKILKKYRMIV

SEQ ID NO: 47738 - protein, 36 aa, Artificial Sequence; identical to SEQ ID NO: 8110
  Cyclic GFR-binding peptide
  MOD_RES (1), (33), (35): Xaa is C or S

SEQ ID NO: 47739 - protein, 40 aa, Artificial Sequence; identical to SEQ ID NO: 8112
  Cyclic GFR-binding peptide
  MOD_RES (5), (6), (38), (40): Xaa is C or S

SEQ ID NO: 47740 - protein, 39 aa, Artificial Sequence; identical to SEQ ID NO: 8113
  Cyclic GFR-binding peptide
  MOD_RES (6), (7), (38): Xaa is C or S

SEQ ID NO: 47741 - protein, 35 aa, Artificial Sequence
  Cyclic GFR-binding peptide
  MOD_RES (7), (7): Xaa is C or S
HVTKPTXAPTKLSAISVLYLDDSSNVILKNYQNMV

SEQ ID NO: 47742 - protein, 36 aa, Artificial Sequence; identical to SEQ ID NO: 8116
  Cyclic GFR-binding peptide
  MOD_RES (2), (2): Xaa is C or S

SEQ ID NO: 47743 - protein, 32 aa, Artificial Sequence; identical to SEQ ID NO: 8118
  Cyclic GFR-binding peptide
  MOD_RES (31), (31): Xaa is C or S

SEQ ID NO: 47744 - protein, 30 aa, Artificial Sequence
  Cyclic GFR-binding peptide
  MOD_RES (4), (5): Xaa is C or S
ASPXXVPQDLSAISILYLVGRTPKVLKNYQ

SEQ ID NO: 47745 - protein, 27 aa, Artificial Sequence
  Cyclic GFR-binding peptide
TELNAISMLYFDENEKVVLKKYRDMVV

SEQ ID NO: 47746 - protein, 35 aa, Artificial Sequence; identical to SEQ ID NO: 8121
  Cyclic GFR-binding peptide
  MOD_RES (1), (32), (34): Xaa is C or S

SEQ ID NO: 47747 - protein, 38 aa, Artificial Sequence; identical to SEQ ID NO: 8123
  Cyclic GFR-binding peptide
  MOD_RES (6), (7): Xaa is C or S

SEQ ID NO: 47748 - protein, 36 aa, Artificial Sequence; identical to SEQ ID NO: 8124
  Cyclic GFR-binding peptide
  MOD_RES (4), (5), (36): Xaa is C or S

SEQ ID NO: 47749 - protein, 29 aa, Artificial Sequence
  Cyclic GFR-binding peptide
  MOD_RES (2), (3): Xaa is C or S
PXXVPQALSPISILYKVGRKPKVLKYHYM

SEQ ID NO: 47750 - protein, 28 aa, Artificial Sequence
  Cyclic GFR-binding peptide
  MOD_RES (27), (27): Xaa is C or S
LSAISILYLVGRKPKVLKNYQMIVRSXK

SEQ ID NO: 47751 - protein, 26 aa, Artificial Sequence
  Cyclic GFR-binding peptide
LSATSMLYYDEYDKVVLRKHREMVVE

SEQ ID NO: 47752 - protein, 31 aa, Artificial Sequence
  Cyclic GFR-binding peptide
  MOD_RES (28), (30): Xaa is C or S
DLSAISILYLIGKTPKILKNYQMIVKSXKXS

SEQ ID NO: 47753 - protein, 29 aa, Artificial Sequence
  Cyclic GFR-binding peptide
  MOD_RES (1), (2): Xaa is C or S
XXVPQDLSATSILYYVGRTPKVLRKHRMV

SEQ ID NO: 47754 - protein, 43 aa, Artificial Sequence; identical to SEQ ID NO: 8128
  Cyclic GFR-binding peptide
  MOD_RES (3), (40), (42): Xaa is C or S

SEQ ID NO: 47755 - protein, 40 aa, Artificial Sequence; identical to SEQ ID NO: 8129
  Cyclic GFR-binding peptide
  MOD_RES (6), (7), (39): Xaa is C or S

SEQ ID NO: 47756 - protein, 34 aa, Artificial Sequence
  Cyclic GFR-binding peptide
  MOD_RES (6), (7): Xaa is C or S
ASAAPXXVPQALSPISILYKVGRKPKVLKYHYMI

SEQ ID NO: 47757 - protein, 27 aa, Artificial Sequence
  Cyclic GFR-binding peptide
QDLSATSILYYIGKTPKILRKHRMIVK

SEQ ID NO: 47758 - protein, 41 aa, Artificial Sequence; identical to SEQ ID NO: 8131
  Cyclic GFR-binding peptide
  MOD_RES (5), (6), (38), (40): Xaa is C or S

SEQ ID NO: 47759 - protein, 29 aa, Artificial Sequence
  Cyclic GFR-binding peptide
  MOD_RES (26), (28): Xaa is C or S
SPISILYKVGRKPKVLKYHYMIVRSXKXS

SEQ ID NO: 47760 - protein, 34 aa, Artificial Sequence
  Cyclic GFR-binding peptide
  MOD_RES (5), (6): Xaa is C or S
VPKAXXAPTKLSAISVLYLDSSNNVILKNYQNMV

SEQ ID NO: 47761 - protein, 35 aa, Artificial Sequence; identical to SEQ ID NO: 8133
  Cyclic GFR-binding peptide
  MOD_RES (2), (3), (35): Xaa is C or S

SEQ ID NO: 47762 - protein, 31 aa, Artificial Sequence
  Cyclic GFR-binding peptide
RPTQVQLSPISVLYKEIVRKKPIFLKYHYTL

SEQ ID NO: 47763 - protein, 39 aa, Artificial Sequence; identical to SEQ ID NO: 8134
  Cyclic GFR-binding peptide
  MOD_RES (5), (6), (38): Xaa is C or S

SEQ ID NO: 47764 - protein, 23 aa, Artificial Sequence
  Cyclic GFR-binding peptide
QDLSPISILYKIGKTPKILKYHY

SEQ ID NO: 47765 - protein, 42 aa, Artificial Sequence; identical to SEQ ID NO: 8135
  Cyclic GFR-binding peptide
  MOD_RES (3), (40), (42): Xaa is C or S

SEQ ID NO: 47766 - protein, 42 aa, Artificial Sequence; identical to SEQ ID NO: 8137
  Cyclic GFR-binding peptide
  MOD_RES (6), (7), (39), (41): Xaa is C or S

SEQ ID NO: 47767 - protein, 26 aa, Artificial Sequence
  Cyclic GFR-binding peptide
VSQDLSPISILYKIGKTPKILKYHYM

SEQ ID NO: 47768 - protein, 35 aa, Artificial Sequence; identical to SEQ ID NO: 8139
  Cyclic GFR-binding peptide
  MOD_RES (1), (33), (35): Xaa is C or S

SEQ ID NO: 47769 - protein, 31 aa, Artificial Sequence; identical to SEQ ID NO: 8138
  Cyclic GFR-binding peptide
  MOD_RES (1), (1): Xaa is C or S

SEQ ID NO: 47770 - protein, 33 aa, Artificial Sequence; identical to SEQ ID NO: 8140
  Cyclic GFR-binding peptide
  MOD_RES (2), (3): Xaa is C or S

SEQ ID NO: 47771 - protein, 39 aa, Artificial Sequence; identical to SEQ ID NO: 8142
  Cyclic GFR-binding peptide
  MOD_RES (6), (7), (38): Xaa is C or S

SEQ ID NO: 47772 - protein, 36 aa, Artificial Sequence; identical to SEQ ID NO: 8143
  Cyclic GFR-binding peptide
  MOD_RES (2), (34), (36): Xaa is C or S

SEQ ID NO: 47773 - protein, 32 aa, Artificial Sequence; identical to SEQ ID NO: 8144
  Cyclic GFR-binding peptide
  MOD_RES (1), (2): Xaa is C or S

SEQ ID NO: 47774 - protein, 32 aa, Artificial Sequence
  Cyclic GFR-binding peptide
  MOD_RES (3), (3): Xaa is C or S
PTXAPTKLSAISVLYLDDSSNVILKNYQNMVV

SEQ ID NO: 47775 - protein, 25 aa, Artificial Sequence
  Cyclic GFR-binding peptide
SPISVLYKDDSSNVILKYHYNMVVR

SEQ ID NO: 47776 - protein, 34 aa, Artificial Sequence; identical to SEQ ID NO: 8146
  Cyclic GFR-binding peptide
  MOD_RES (32), (34): Xaa is C or S

SEQ ID NO: 47777 - protein, 25 aa, Artificial Sequence
  Cyclic GFR-binding peptide
PTELNAISMLYFDENEKVVLKKYRD

SEQ ID NO: 47778 - protein, 29 aa, Artificial Sequence
  Cyclic GFR-binding peptide
  MOD_RES (2), (3): Xaa is C or S
PXXAPTQLSAISVLYLDDSSNVILKNYQN

SEQ ID NO: 47779 - protein, 20 aa, Artificial Sequence
  Cyclic GFR-binding peptide
NAISILYFIGKTPKILKKYR

SEQ ID NO: 47780 - protein, 34 aa, Artificial Sequence
  Cyclic GFR-binding peptide
  MOD_RES (6), (7): Xaa is C or S
ASAAPXXVPQALSATSILYYVGRKPKVLRKHRMI

SEQ ID NO: 47781 - protein, 37 aa, Artificial Sequence; identical to SEQ ID NO: 8147
  Cyclic GFR-binding peptide
  MOD_RES (5), (6): Xaa is C or S

SEQ ID NO: 47782 - protein, 33 aa, Artificial Sequence
  Cyclic GFR-binding peptide
  MOD_RES (31), (33): Xaa is C or S
PTELSATSMLYYDEYDKVVLRKHREMVVEGXGX

SEQ ID NO: 47783 - protein, 35 aa, Artificial Sequence; identical to SEQ ID NO: 8150
  Cyclic GFR-binding peptide
  MOD_RES (32), (34): Xaa is C or S

SEQ ID NO: 47784 - protein, 20 aa, Artificial Sequence
  Cyclic GFR-binding peptide
SATSMLYYDENEKVVLRKHR

SEQ ID NO: 47785 - protein, 38 aa, Artificial Sequence; identical to SEQ ID NO: 8152
  Cyclic GFR-binding peptide
  MOD_RES (3), (4), (35), (37): Xaa is C or S

SEQ ID NO: 47786 - protein, 36 aa, Artificial Sequence; identical to SEQ ID NO: 8153
  Cyclic GFR-binding peptide
  MOD_RES (5), (6): Xaa is C or S

SEQ ID NO: 47787 - protein, 32 aa, Artificial Sequence
  Cyclic GFR-binding peptide
  MOD_RES (5), (6): Xaa is C or S
VPKPXXAPTQLSATSVLYYDDSSNVILRKHRN

SEQ ID NO: 47788 - protein, 22 aa, Artificial Sequence
  Cyclic GFR-binding peptide
LNAISILYFIGKTPKILKKYRM

SEQ ID NO: 47789 - protein, 29 aa, Artificial Sequence
  Cyclic GFR-binding peptide
APTKLSPISVLYKDDSSNVILKYHYNMVV

SEQ ID NO: 47790 - protein, 32 aa, Artificial Sequence
  Cyclic GFR-binding peptide
  MOD_RES (29), (31): Xaa is C or S
QLSATSVLYYDDSSNVILRKHRNMVVRAXGXH

SEQ ID NO: 47791 - protein, 30 aa, Artificial Sequence
  Cyclic GFR-binding peptide
  MOD_RES (4), (5): Xaa is C or S
ASPXXVSQDLSPISILYKIGKTPKILKYHY

SEQ ID NO: 47792 - protein, 33 aa, Artificial Sequence; identical to SEQ ID NO: 8156
  Cyclic GFR-binding peptide
  MOD_RES (1), (2): Xaa is C or S

SEQ ID NO: 47793 - protein, 38 aa, Artificial Sequence; identical to SEQ ID NO: 8155
  Cyclic GFR-binding peptide
  MOD_RES (4), (5), (37): Xaa is C or S

SEQ ID NO: 47794 - protein, 31 aa, Artificial Sequence; identical to SEQ ID NO: 8157
  Cyclic GFR-binding peptide
  MOD_RES (1), (1): Xaa is C or S

SEQ ID NO: 47795 - protein, 39 aa, Artificial Sequence; identical to SEQ ID NO: 8159
  Cyclic GFR-binding peptide
  MOD_RES (3), (4), (36), (38): Xaa is C or S

SEQ ID NO: 47796 - protein, 38 aa, Artificial Sequence; identical to SEQ ID NO: 8162
  Cyclic GFR-binding peptide
  MOD_RES (5), (6), (38): Xaa is C or S

SEQ ID NO: 47797 - protein, 23 aa, Artificial Sequence
  Cyclic GFR-binding peptide
LNAISILYFVGRTPKVLKKYRMV

SEQ ID NO: 47798 - protein, 34 aa, Artificial Sequence
  Cyclic GFR-binding peptide
  MOD_RES (3), (3): Xaa is C or S
VQXRPTQVQLSATSVLYYEIVRKKPIFLRKHRTL

SEQ ID NO: 47799 - protein, 32 aa, Artificial Sequence; identical to SEQ ID NO: 8163
  Cyclic GFR-binding peptide
  MOD_RES (31), (31): Xaa is C or S

SEQ ID NO: 47800 - protein, 25 aa, Artificial Sequence
  Cyclic GFR-binding peptide
LSATSILYYIGKTPKILRKHRMIVK

SEQ ID NO: 47801 - protein, 25 aa, Artificial Sequence
  Cyclic GFR-binding peptide
SATSMLYYDEYDKVVLRKHREMVVE

SEQ ID NO: 47802 - protein, 38 aa, Artificial Sequence; identical to SEQ ID NO: 8165
  Cyclic GFR-binding peptide
  MOD_RES (5), (6), (37): Xaa is C or S

SEQ ID NO: 47803 - protein, 32 aa, Artificial Sequence
  Cyclic GFR-binding peptide
  MOD_RES (4), (5): Xaa is C or S
AAPXXVPQALSATSILYYVGRKPKVLRKHRMI

SEQ ID NO: 47804 - protein, 25 aa, Artificial Sequence
  Cyclic GFR-binding peptide
TKLSAISVLYLDDMGVPTLKNYQEG

SEQ ID NO: 47805 - protein, 27 aa, Artificial Sequence
  Cyclic GFR-binding peptide
  MOD_RES (1), (1): Xaa is C or S
XAPTKLSAISVLYLDSSNNVILKNYQN

SEQ ID NO: 47806 - protein, 33 aa, Artificial Sequence
  Cyclic GFR-binding peptide
  MOD_RES (4), (4): Xaa is C or S
NVQXRPTQVQLSAISVLYLEIVRKKPIFLKNYQ

SEQ ID NO: 47807 - protein, 21 aa, Artificial Sequence
  Cyclic GFR-binding peptide
SAISVLYLDDMGVPTLKNYQE

SEQ ID NO: 47808 - protein, 39 aa, Artificial Sequence; identical to SEQ ID NO: 8168
  Cyclic GFR-binding peptide
  MOD_RES (36), (38): Xaa is C or S

SEQ ID NO: 47809 - protein, 37 aa, Artificial Sequence
  Cyclic GFR-binding peptide
  MOD_RES (4), (4): Xaa is C or S
NVQXRPTQVQLSAISVLYLEIVRKKPIFLKNYQTLED

SEQ ID NO: 47810 - protein, 35 aa, Artificial Sequence; identical to SEQ ID NO: 8170
  Cyclic GFR-binding peptide
  MOD_RES (35), (35): Xaa is C or S

SEQ ID NO: 47811 - protein, 30 aa, Artificial Sequence
  Cyclic GFR-binding peptide
  MOD_RES (28), (30): Xaa is C or S
NAISVLYFDDMGVPTLKKYREGMSVAEXGX

SEQ ID NO: 47812 - protein, 28 aa, Artificial Sequence
  Cyclic GFR-binding peptide
VPQDLSAISILYLVGRTPKVLKNYQMVV

SEQ ID NO: 47813 - protein, 33 aa, Artificial Sequence; identical to SEQ ID NO: 8172
  Cyclic GFR-binding peptide
  MOD_RES (1), (33): Xaa is C or S

SEQ ID NO: 47814 - protein, 30 aa, Artificial Sequence; identical to SEQ ID NO: 8173
  Cyclic GFR-binding peptide

SEQ ID NO: 47815 - protein, 31 aa, Artificial Sequence
  Cyclic GFR-binding peptide
  MOD_RES (29), (31): Xaa is C or S
QLSATSVLYYDDSSNVILRKHRNMVVRAXGX

SEQ ID NO: 47816 - protein, 27 aa, Artificial Sequence
  Cyclic GFR-binding peptide
TKLNAISVLYFDSSNNVILKKYRNMVV

SEQ ID NO: 47817 - protein, 22 aa, Artificial Sequence
  Cyclic GFR-binding peptide
KLSAISVLYLDSSNNVILKNYQ

SEQ ID NO: 47818 - protein, 38 aa, Artificial Sequence; identical to SEQ ID NO: 8174
  Cyclic GFR-binding peptide
  MOD_RES (36), (38): Xaa is C or S

SEQ ID NO: 47819 - protein, 26 aa, Artificial Sequence
  Cyclic GFR-binding peptide
  MOD_RES (1), (1): Xaa is C or S
XAPTKLSAISVLYLDSSNNVILKNYQ

SEQ ID NO: 47820 - protein, 32 aa, Artificial Sequence
  Cyclic GFR-binding peptide
  MOD_RES (29), (31): Xaa is C or S
QALNAISILYFVGRKPKVLKKYRMIVRSXKXS

SEQ ID NO: 47821 - protein, 28 aa, Artificial Sequence
  Cyclic GFR-binding peptide
PQDLSPISILYKVGRTPKVLKYHYMVVK

SEQ ID NO: 47822 - protein, 33 aa, Artificial Sequence; identical to SEQ ID NO: 8177
  Cyclic GFR-binding peptide
  MOD_RES (1), (33): Xaa is C or S

SEQ ID NO: 47823 - protein, 26 aa, Artificial Sequence
  Cyclic GFR-binding peptide
APTKLSATSVLYYDDSSNVILRKHRN

SEQ ID NO: 47824 - protein, 25 aa, Artificial Sequence
  Cyclic GFR-binding peptide
QDLSAISILYLIGKTPKILKNYQMI

SEQ ID NO: 47825 - protein, 28 aa, Artificial Sequence
  Cyclic GFR-binding peptide
PTQLSAISVLYLDDSSNVILKNYQNMVV

SEQ ID NO: 47826 - protein, 32 aa, Artificial Sequence
  Cyclic GFR-binding peptide
  MOD_RES (29), (31): Xaa is C or S
ELSATSMLYYDEYDKVVLRKHREMVVEGXGXR

SEQ ID NO: 47827 - protein, 35 aa, Artificial Sequence
  Cyclic GFR-binding peptide
  MOD_RES (6), (7): Xaa is C or S
ASASPXXVPQDLSATSILYYVGRTPKVLRKHRMVV

SEQ ID NO: 47828 - protein, 27 aa, Artificial Sequence
  Cyclic GFR-binding peptide
  MOD_RES (27), (27): Xaa is C or S
LSATSILYYVGRTPKVLRKHRMVVKSX

SEQ ID NO: 47829 - protein, 25 aa, Artificial Sequence
  Cyclic GFR-binding peptide
SPISVLYKDSSNNVILKYHYNMVVK

SEQ ID NO: 47830 - protein, 22 aa, Artificial Sequence
  Cyclic GFR-binding peptide
SAISILYLVGRTPKVLKNYQMV

SEQ ID NO: 47831 - protein, 40 aa, Artificial Sequence; identical to SEQ ID NO: 8179
  Cyclic GFR-binding peptide
  MOD_RES (6), (7), (38), (40): Xaa is C or S

SEQ ID NO: 47832 - protein, 39 aa, Artificial Sequence; identical to SEQ ID NO: 8180
  Cyclic GFR-binding peptide
  MOD_RES (7), (39): Xaa is C or S

SEQ ID NO: 47833 - protein, 24 aa, Artificial Sequence
  Cyclic GFR-binding peptide
LNAISVLYFEIVRKKPIFLKKYRT

SEQ ID NO: 47834 - protein, 31 aa, Artificial Sequence
  Cyclic GFR-binding peptide
  MOD_RES (5), (6): Xaa is C or S
VPKAXXAPTKLNAISVLYFDSSNNVILKKYR

SEQ ID NO: 47835 - protein, 23 aa, Artificial Sequence
  Cyclic GFR-binding peptide
SATSMLYYDEYDKVVLRKHREMV

SEQ ID NO: 47836 - protein, 32 aa, Artificial Sequence
  Cyclic GFR-binding peptide
  MOD_RES (5), (6): Xaa is C or S
VGKAXXVPTKLNAISVLYFDDMGVPTLKKYRE

SEQ ID NO: 47837 - protein, 30 aa, Artificial Sequence
  Cyclic GFR-binding peptide
  MOD_RES (30), (30): Xaa is C or S
TQLSPISVLYKDDSSNVILKYHYNMVVRAX

SEQ ID NO: 47838 - protein, 30 aa, Artificial Sequence
  Cyclic GFR-binding peptide
  MOD_RES (3), (4): Xaa is C or S
SPXXVPQDLSPISILYKVGRTPKVLKYHYM

SEQ ID NO: 47839 - protein, 39 aa, Artificial Sequence; identical to SEQ ID NO: 8181
  Cyclic GFR-binding peptide
  MOD_RES (36), (38): Xaa is C or S

SEQ ID NO: 47840 - protein, 30 aa, Artificial Sequence
  Cyclic GFR-binding peptide
  MOD_RES (3), (4): Xaa is C or S
KPXXAPTQLSAISVLYLDDSSNVILKNYQN

SEQ ID NO: 47841 - protein, 31 aa, Artificial Sequence; identical to SEQ ID NO: 8182
  Cyclic GFR-binding peptide
  MOD_RES (1), (1): Xaa is C or S

SEQ ID NO: 47842 - protein, 34 aa, Artificial Sequence
  Cyclic GFR-binding peptide
  MOD_RES (4), (5): Xaa is C or S
PKAXXAPTKLSAISVLYLDSSNNVILKNYQNMVV

SEQ ID NO: 47843 - protein, 40 aa, Artificial Sequence; identical to SEQ ID NO: 8183
  Cyclic GFR-binding peptide
  MOD_RES (37), (39): Xaa is C or S

SEQ ID NO: 47844 - protein, 25 aa, Artificial Sequence
  Cyclic GFR-binding peptide
APTKLSPISVLYKDSSNNVILKYHY

SEQ ID NO: 47845 - protein, 25 aa, Artificial Sequence
  Cyclic GFR-binding peptide
LSAISILYLVGRTPKVLKNYQMVVK

SEQ ID NO: 47846 - protein, 25 aa, Artificial Sequence
  Cyclic GFR-binding peptide
APTQLSPISVLYKDDSSNVILKYHY

SEQ ID NO: 47847 - protein, 38 aa, Artificial Sequence; identical to SEQ ID NO: 8184
  Cyclic GFR-binding peptide
  MOD_RES (3), (4), (36), (38): Xaa is C or S

SEQ ID NO: 47848 - protein, 33 aa, Artificial Sequence
  Cyclic GFR-binding peptide
  MOD_RES (6), (7): Xaa is C or S
ASASPXXVPQDLSPISILYKVGRTPKVLKYHYM

SEQ ID NO: 47849 - protein, 29 aa, Artificial Sequence
  Cyclic GFR-binding peptide
  MOD_RES (28), (28): Xaa is C or S
LSATSVLYYDDSSNVILRKHRNMVVRAXG

SEQ ID NO: 47850 - protein, 26 aa, Artificial Sequence
  Cyclic GFR-binding peptide
SQDLNAISILYFIGKTPKILKKYRMI

SEQ ID NO: 47851 - protein, 29 aa, Artificial Sequence
  Cyclic GFR-binding peptide
  MOD_RES (1), (1): Xaa is C or S
XVPQDLNAISILYFVGRTPKVLKKYRMVV

SEQ ID NO: 47852 - protein, 30 aa, Artificial Sequence
  Cyclic GFR-binding peptide
  MOD_RES (27), (29): Xaa is C or S
LSATSILYYIGKTPKILRKHRMIVKSXKXS

SEQ ID NO: 47853 - protein, 39 aa, Artificial Sequence; identical to SEQ ID NO: 8187
  Cyclic GFR-binding peptide
  MOD_RES (4), (36), (38): Xaa is C or S

SEQ ID NO: 47854 - protein, 32 aa, Artificial Sequence; identical to SEQ ID NO: 8188
  Cyclic GFR-binding peptide
  MOD_RES (1), (2): Xaa is C or S

SEQ ID NO: 47855 - protein, 28 aa, Artificial Sequence
  Cyclic GFR-binding peptide
  MOD_RES (27), (27): Xaa is C or S
SATSVLYYDDSSNVILRKHRNMVVRAXG

SEQ ID NO: 47856 - protein, 33 aa, Artificial Sequence; identical to SEQ ID NO: 8189
  Cyclic GFR-binding peptide
  MOD_RES (1), (2): Xaa is C or S

SEQ ID NO: 47857 - protein, 32 aa, Artificial Sequence; identical to SEQ ID NO: 8190
  Cyclic GFR-binding peptide
  MOD_RES (1), (2): Xaa is C or S

SEQ ID NO: 47858 - protein, 30 aa, Artificial Sequence
  Cyclic GFR-binding peptide
  MOD_RES (28), (30): Xaa is C or S
LSAISVLYLDDSSNVILKNYQNMVVRSXGX

SEQ ID NO: 47859 - protein, 39 aa, Artificial Sequence; identical to SEQ ID NO: 8191
  Cyclic GFR-binding peptide
  MOD_RES (4), (5), (37), (39): Xaa is C or S

SEQ ID NO: 47860 - protein, 35 aa, Artificial Sequence
  Cyclic GFR-binding peptide
  MOD_RES (5), (6): Xaa is C or S
VPKPXXAPTQLSATSVLYYDDSSNVILRKHRNMVV

SEQ ID NO: 47861 - protein, 27 aa, Artificial Sequence
  Cyclic GFR-binding peptide
VPQALSATSILYYVGRKPKVLRKHRMI

SEQ ID NO: 47862 - protein, 34 aa, Artificial Sequence
  Cyclic GFR-binding peptide
  MOD_RES (2), (3): Xaa is C or S
AXXVPTKLSATSVLYYDDMGVPTLRKHREGMSVA

SEQ ID NO: 47863 - protein, 34 aa, Artificial Sequence; identical to SEQ ID NO: 8192
  Cyclic GFR-binding peptide
  MOD_RES (1), (32), (34): Xaa is C or S

SEQ ID NO: 47864 - protein, 33 aa, Artificial Sequence; identical to SEQ ID NO: 8193
  Cyclic GFR-binding peptide
  MOD_RES (2), (3): Xaa is C or S

SEQ ID NO: 47865 - protein, 25 aa, Artificial Sequence
  Cyclic GFR-binding peptide
DLSAISILYLVGRTPKVLKNYQMVV

SEQ ID NO: 47866 - protein, 37 aa, Artificial Sequence; identical to SEQ ID NO: 8196
  Cyclic GFR-binding peptide
  MOD_RES (6), (7): Xaa is C or S

SEQ ID NO: 47867 - protein, 31 aa, Artificial Sequence
  Cyclic GFR-binding peptide
  MOD_RES (28), (30): Xaa is C or S
LSPISVLYKDSSNNVILKYHYNMVVKAXGXH

SEQ ID NO: 47868 - protein, 27 aa, Artificial Sequence
  Cyclic GFR-binding peptide
APTKLNAISVLYFDSSNNVILKKYRNM

SEQ ID NO: 47869 - protein, 32 aa, Artificial Sequence
  Cyclic GFR-binding peptide
  MOD_RES (29), (31): Xaa is C or S
QDLSATSILYYVGRTPKVLRKHRMVVKSXKXS

SEQ ID NO: 47870 - protein, 32 aa, Artificial Sequence
  Cyclic GFR-binding peptide
  MOD_RES (29), (31): Xaa is C or S
ELSATSMLYYDENEKVVLRKHRDMVVEGXGXR

SEQ ID NO: 47871 - protein, 35 aa, Artificial Sequence; identical to SEQ ID NO: 8201
  Cyclic GFR-binding peptide
  MOD_RES (3), (4): Xaa is C or S

SEQ ID NO: 47872 - protein, 26 aa, Artificial Sequence
  Cyclic GFR-binding peptide
VPQDLSPISILYKVGRTPKVLKYHYM

SEQ ID NO: 47873 - protein, 35 aa, Artificial Sequence; identical to SEQ ID NO: 8202
  Cyclic GFR-binding peptide
  MOD_RES (4), (5): Xaa is C or S

SEQ ID NO: 47874 - protein, 37 aa, Artificial Sequence; identical to SEQ ID NO: 8203
  Cyclic GFR-binding peptide
  MOD_RES (2), (3), (35), (37): Xaa is C or S

SEQ ID NO: 47875 - protein, 27 aa, Artificial Sequence
  Cyclic GFR-binding peptide
QVQLNAISVLYFEIVRKKPIFLKKYRT

SEQ ID NO: 47876 - protein, 24 aa, Artificial Sequence
  Cyclic GFR-binding peptide
LSPISILYKIGKTPKILKYHYMIV

SEQ ID NO: 47877 - protein, 26 aa, Artificial Sequence
  Cyclic GFR-binding peptide
  MOD_RES (1), (1): Xaa is C or S
XAPTQLSAISVLYLDDSSNVILKNYQ

SEQ ID NO: 47878 - protein, 30 aa, Artificial Sequence
  Cyclic GFR-binding peptide
  MOD_RES (4), (4): Xaa is C or S
KPTXAPTKLSATSVLYYDDSSNVILRKHRN

SEQ ID NO: 47879 - protein, 33 aa, Artificial Sequence; identical to SEQ ID NO: 8207
  Cyclic GFR-binding peptide
  MOD_RES (2), (3): Xaa is C or S

SEQ ID NO: 47880 - protein, 28 aa, Artificial Sequence
  Cyclic GFR-binding peptide
KLSPISVLYKDSSNNVILKYHYNMVVKA

SEQ ID NO: 47881 - protein, 35 aa, Artificial Sequence; identical to SEQ ID NO: 8208
  Cyclic GFR-binding peptide
  MOD_RES (2), (3): Xaa is C or S

SEQ ID NO: 47882 - protein, 35 aa, Artificial Sequence
  Cyclic GFR-binding peptide
  MOD_RES (5), (6): Xaa is C or S
SASPXXVSQDLSAISILYLIGKTPKILKNYQMIVK

SEQ ID NO: 47883 - protein, 33 aa, Artificial Sequence; identical to SEQ ID NO: 8209
  Cyclic GFR-binding peptide
  MOD_RES (1), (33): Xaa is C or S

SEQ ID NO: 47884 - protein, 29 aa, Artificial Sequence
  Cyclic GFR-binding peptide
SPISILYKVGRTPKVLKYHYAAAAAAAAA

SEQ ID NO: 47885 - protein, 27 aa, Artificial Sequence
  Cyclic GFR-binding peptide
TKLSATSVLYYDDMGVPTLRKHREGMS

SEQ ID NO: 47886 - protein, 36 aa, Artificial Sequence; identical to SEQ ID NO: 8211
  Cyclic GFR-binding peptide
  MOD_RES (2), (34), (36): Xaa is C or S

SEQ ID NO: 47887 - protein, 29 aa, Artificial Sequence
  Cyclic GFR-binding peptide
APTKLSAISVLYLDDSSNVILKNYQNMVV

SEQ ID NO: 47888 - protein, 26 aa, Artificial Sequence
  Cyclic GFR-binding peptide
TELNAISMLYFDEYDKVVLKKYREMV

SEQ ID NO: 47889 - protein, 25 aa, Artificial Sequence
  Cyclic GFR-binding peptide
SATSVLYYEIVRKKPIFLRKHRTLE

SEQ ID NO: 47890 - protein, 33 aa, Artificial Sequence
  Cyclic GFR-binding peptide
  MOD_RES (6), (7): Xaa is C or S
ASASPXXVPQDLNAISILYFVGRTPKVLKKYRM

SEQ ID NO: 47891 - protein, 35 aa, Artificial Sequence
  Cyclic GFR-binding peptide
  MOD_RES (3), (3): Xaa is C or S
VQXRPTQVQLSAISVLYLEIVRKKPIFLKNYQTLE

SEQ ID NO: 47892 - protein, 29 aa, Artificial Sequence
  Cyclic GFR-binding peptide
  MOD_RES (29), (29): Xaa is C or S
QALSPISILYKVGRKPKVLKYHYMIVRSX

SEQ ID NO: 47893 - protein, 25 aa, Artificial Sequence
  Cyclic GFR-binding peptide
LNAISVLYFEIVRKKPIFLKKYRTL

SEQ ID NO: 47894 - protein, 21 aa, Artificial Sequence
  Cyclic GFR-binding peptide
SPISMLYKDEYDKVVLKYHYE

SEQ ID NO: 47895 - protein, 24 aa, Artificial Sequence
  Cyclic GFR-binding peptide
TELNAISMLYFDENEKVVLKKYRD

SEQ ID NO: 47896 - protein, 41 aa, Artificial Sequence; identical to SEQ ID NO: 8218
  Cyclic GFR-binding peptide
  MOD_RES (6), (38), (40): Xaa is C or S

SEQ ID NO: 47897 - protein, 39 aa, Artificial Sequence; identical to SEQ ID NO: 8219
  Cyclic GFR-binding peptide
  MOD_RES (5), (6), (38): Xaa is C or S

SEQ ID NO: 47898 - protein, 28 aa, Artificial Sequence
  Cyclic GFR-binding peptide
  MOD_RES (27), (27): Xaa is C or S
LSATSILYYVGRTPKVLRKHRMVVKSXK

SEQ ID NO: 47899 - protein, 36 aa, Artificial Sequence
  Cyclic GFR-binding peptide
  MOD_RES (6), (7): Xaa is C or S
ASAAPXXVPQALNAISILYFVGRKPKVLKKYRMIVR

SEQ ID NO: 47900 - protein, 33 aa, Artificial Sequence
  Cyclic GFR-binding peptide
  MOD_RES (3), (4): Xaa is C or S
KPXXAPTKLSPISVLYKDDSSNVILKYHYNMVV

SEQ ID NO: 47901 - protein, 28 aa, Artificial Sequence
  Cyclic GFR-binding peptide
APTKLSAISVLYLDDSSNVILKNYQNMV

SEQ ID NO: 47902 - protein, 40 aa, Artificial Sequence; identical to SEQ ID NO: 8224
  Cyclic GFR-binding peptide
  MOD_RES (5), (6), (38), (40): Xaa is C or S

SEQ ID NO: 47903 - protein, 21 aa, Artificial Sequence
  Cyclic GFR-binding peptide
LSATSVLYYDDMGVPTLRKHR

SEQ ID NO: 47904 - protein, 40 aa, Artificial Sequence; identical to SEQ ID NO: 8225
  Cyclic GFR-binding peptide
  MOD_RES (5), (6), (37), (39): Xaa is C or S

SEQ ID NO: 47905 - protein, 35 aa, Artificial Sequence; identical to SEQ ID NO: 8229
  Cyclic GFR-binding peptide
  MOD_RES (4), (5): Xaa is C or S

SEQ ID NO: 47906 - protein, 36 aa, Artificial Sequence; identical to SEQ ID NO: 8232
  Cyclic GFR-binding peptide
  MOD_RES (5), (6): Xaa is C or S

SEQ ID NO: 47907 - protein, 32 aa, Artificial Sequence
  Cyclic GFR-binding peptide
  MOD_RES (3), (4): Xaa is C or S
KAXXVPTELSATSMLYYDENEKVVLRKHRDMV

SEQ ID NO: 47908 - protein, 31 aa, Artificial Sequence
  Cyclic GFR-binding peptide
  MOD_RES (6), (6): Xaa is C or S
VTKPTXAPTKLSAISVLYLDDSSNVILKNYQ

SEQ ID NO: 47909 - protein, 30 aa, Artificial Sequence
  Cyclic GFR-binding peptide
  MOD_RES (4), (5): Xaa is C or S
PKAXXVPTELSATSMLYYDEYDKVVLRKHR

SEQ ID NO: 47910 - protein, 40 aa, Artificial Sequence; identical to SEQ ID NO: 8236
  Cyclic GFR-binding peptide
  MOD_RES (1), (38), (40): Xaa is C or S

SEQ ID NO: 47911 - protein, 37 aa, Artificial Sequence; identical to SEQ ID NO: 8237
  Cyclic GFR-binding peptide
  MOD_RES (2), (3), (34), (36): Xaa is C or S

SEQ ID NO: 47912 - protein, 30 aa, Artificial Sequence
  Cyclic GFR-binding peptide
  MOD_RES (2), (3): Xaa is C or S
AXXVPTELSPISMLYKDEYDKVVLKYHYEM

SEQ ID NO: 47913 - protein, 28 aa, Artificial Sequence
  Cyclic GFR-binding peptide
  MOD_RES (26), (28): Xaa is C or S
SATSILYYVGRKPKVLRKHRMIVRSXKX

SEQ ID NO: 47914 - protein, 30 aa, Artificial Sequence
  Cyclic GFR-binding peptide
  MOD_RES (30), (30): Xaa is C or S
PQALSATSILYYVGRKPKVLRKHRMIVRSX

SEQ ID NO: 47915 - protein, 25 aa, Artificial Sequence
  Cyclic GFR-binding peptide
LSATSVLYYEIVRKKPIFLRKHRTL

SEQ ID NO: 47916 - protein, 28 aa, Artificial Sequence
  Cyclic GFR-binding peptide
SQDLSATSILYYIGKTPKILRKHRMIVK

SEQ ID NO: 47917 - protein, 30 aa, Artificial Sequence
  Cyclic GFR-binding peptide
PTELSPISMLYKDEYDKVVLKYHYEMVVEG

SEQ ID NO: 47918 - protein, 22 aa, Artificial Sequence
  Cyclic GFR-binding peptide
LNAISMLYFDENEKVVLKKYRD

SEQ ID NO: 47919 - protein, 35 aa, Artificial Sequence; identical to SEQ ID NO: 8242
  Cyclic GFR-binding peptide
  MOD_RES (3), (4): Xaa is C or S

SEQ ID NO: 47920 - protein, 44 aa, Artificial Sequence; identical to SEQ ID NO: 8243
  Cyclic GFR-binding peptide
  MOD_RES (5), (42), (44): Xaa is C or S

SEQ ID NO: 47921 - protein, 30 aa, Artificial Sequence
  Cyclic GFR-binding peptide
VQLSAISVLYLEIVRKKPIFLKNYQTLEDH

SEQ ID NO: 47922 - protein, 32 aa, Artificial Sequence
  Cyclic GFR-binding peptide
  MOD_RES (3), (4): Xaa is C or S
KAXXVPTKLSATSVLYYDDMGVPTLRKHREGM

SEQ ID NO: 47923 - protein, 30 aa, Artificial Sequence
  Cyclic GFR-binding peptide
  MOD_RES (1), (2): Xaa is C or S
XXVPQDLSPISILYKVGRTPKVLKYHYMVV

SEQ ID NO: 47924 - protein, 32 aa, Artificial Sequence
  Cyclic GFR-binding peptide
  MOD_RES (4), (5): Xaa is C or S
PKAXXAPTKLNAISVLYFDSSNNVILKKYRNM

SEQ ID NO: 47925 - protein, 39 aa, Artificial Sequence; identical to SEQ ID NO: 8247
  Cyclic GFR-binding peptide
  MOD_RES (4), (5), (36), (38): Xaa is C or S

SEQ ID NO: 47926 - protein, 35 aa, Artificial Sequence
  Cyclic GFR-binding peptide
  MOD_RES (5), (5): Xaa is C or S
RNVQXRPTQVQLSAISVLYLEIVRKKPIFLKNYQT

SEQ ID NO: 47927 - protein, 37 aa, Artificial Sequence; identical to SEQ ID NO: 8249
  Cyclic GFR-binding peptide
  MOD_RES (1), (2), (34), (36): Xaa is C or S

SEQ ID NO: 47928 - protein, 29 aa, Artificial Sequence
  Cyclic GFR-binding peptide
PTELNAISMLYFDENEKVVLKKYRDMVVE

SEQ ID NO: 47929 - protein, 33 aa, Artificial Sequence
  Cyclic GFR-binding peptide
  MOD_RES (5), (6): Xaa is C or S
VPKAXXAPTKLNAISVLYFDSSNNVILKKYRNM

SEQ ID NO: 47930 - protein, 23 aa, Artificial Sequence
  Cyclic GFR-binding peptide
LSATSVLYYEIVRKKPIFLRKHR

SEQ ID NO: 47931 - protein, 31 aa, Artificial Sequence; identical to SEQ ID NO: 8254
  Cyclic GFR-binding peptide
  MOD_RES (1), (1): Xaa is C or S

SEQ ID NO: 47932 - protein, 28 aa, Artificial Sequence
  Cyclic GFR-binding peptide
  MOD_RES (28), (28): Xaa is C or S
DLNAISILYFVGRTPKVLKKYRMVVKSX

SEQ ID NO: 47933 - protein, 38 aa, Artificial Sequence; identical to SEQ ID NO: 8256
  Cyclic GFR-binding peptide
  MOD_RES (1), (2), (35), (37): Xaa is C or S

SEQ ID NO: 47934 - protein, 41 aa, Artificial Sequence; identical to SEQ ID NO: 8257
  Cyclic GFR-binding peptide
  MOD_RES (6), (7), (39), (41): Xaa is C or S

SEQ ID NO: 47935 - protein, 34 aa, Artificial Sequence; identical to SEQ ID NO: 8258
  Cyclic GFR-binding peptide
  MOD_RES (31), (33): Xaa is C or S

SEQ ID NO: 47936 - protein, 29 aa, Artificial Sequence
  Cyclic GFR-binding peptide
  MOD_RES (26), (28): Xaa is C or S
SPISILYKIGKTPKILKYHYMIVKSXKXS

SEQ ID NO: 47937 - protein, 34 aa, Artificial Sequence; identical to SEQ ID NO: 8260
  Cyclic GFR-binding peptide
  MOD_RES (2), (3), (34): Xaa is C or S

SEQ ID NO: 47938 - protein, 31 aa, Artificial Sequence
  Cyclic GFR-binding peptide
  MOD_RES (29), (31): Xaa is C or S
QDLSAISILYLIGKTPKILKNYQMIVKSXKX

SEQ ID NO: 47939 - protein, 33 aa, Artificial Sequence
  Cyclic GFR-binding peptide
  MOD_RES (30), (32): Xaa is C or S
KLNAISVLYFDDMGVPTLKKYREGMSVAEXGXR

SEQ ID NO: 47940 - protein, 31 aa, Artificial Sequence
  Cyclic GFR-binding peptide
  MOD_RES (5), (6): Xaa is C or S
VGKAXXVPTKLSAISVLYLDDMGVPTLKNYQ

SEQ ID NO: 47941 - protein, 39 aa, Artificial Sequence; identical to SEQ ID NO: 8261
  Cyclic GFR-binding peptide
  MOD_RES (4), (5), (37), (39): Xaa is C or S

SEQ ID NO: 47942 - protein, 30 aa, Artificial Sequence
  Cyclic GFR-binding peptide
  MOD_RES (2), (3): Xaa is C or S
AXXVPTELSATSMLYYDEYDKVVLRKHREM

SEQ ID NO: 47943 - protein, 23 aa, Artificial Sequence
  Cyclic GFR-binding peptide
TKLSPISVLYKDSSNNVILKYHY

SEQ ID NO: 47944 - protein, 32 aa, Artificial Sequence
  Cyclic GFR-binding peptide
  MOD_RES (6), (7): Xaa is C or S
YVPKPXXAPTKLSAISVLYLDDSSNVILKNYQ

SEQ ID NO: 47945 - protein, 24 aa, Artificial Sequence
  Cyclic GFR-binding peptide
KLNAISVLYFDSSNNVILKKYRNM

SEQ ID NO: 47946 - protein, 24 aa, Artificial Sequence
  Cyclic GFR-binding peptide
SQDLSATSILYYIGKTPKILRKHR

SEQ ID NO: 47947 - protein, 28 aa, Artificial Sequence
  Cyclic GFR-binding peptide
PTELNAISMLYFDEYDKVVLKKYREMVV

SEQ ID NO: 47948 - protein, 33 aa, Artificial Sequence; identical to SEQ ID NO: 8265
  Cyclic GFR-binding peptide
  MOD_RES (1), (33): Xaa is C or S

SEQ ID NO: 47949 - protein, 29 aa, Artificial Sequence
  Cyclic GFR-binding peptide
  MOD_RES (28), (28): Xaa is C or S
LNAISMLYFDEYDKVVLKKYREMVVEGXG

SEQ ID NO: 47950 - protein, 30 aa, Artificial Sequence
  Cyclic GFR-binding peptide
  MOD_RES (30), (30): Xaa is C or S
TKLSATSVLYYDDSSNVILRKHRNMVVRSX

SEQ ID NO: 47951 - protein, 33 aa, Artificial Sequence
  Cyclic GFR-binding peptide
  MOD_RES (6), (7): Xaa is C or S
YVPKPXXAPTKLSATSVLYYDDSSNVILRKHRN

SEQ ID NO: 47952 - protein, 44 aa, Artificial Sequence; identical to SEQ ID NO: 8269
  Cyclic GFR-binding peptide
  MOD_RES (4), (41), (43): Xaa is C or S

SEQ ID NO: 47953 - protein, 32 aa, Artificial Sequence
  Cyclic GFR-binding peptide
RPTQVQLSAISVLYLEIVRKKPIFLKNYQTLE

SEQ ID NO: 47954 - protein, 33 aa, Artificial Sequence
  Cyclic GFR-binding peptide
  MOD_RES (31), (33): Xaa is C or S
LSPISVLYKEIVRKKPIFLKYHYTLEDHLAXKX

SEQ ID NO: 47955 - protein, 32 aa, Artificial Sequence; identical to SEQ ID NO: 8270
  Cyclic GFR-binding peptide
  MOD_RES (1), (2): Xaa is C or S

SEQ ID NO: 47956 - protein, 29 aa, Artificial Sequence
  Cyclic GFR-binding peptide
  MOD_RES (28), (28): Xaa is C or S
DLSATSILYYIGKTPKILRKHRMIVKSXK

SEQ ID NO: 47957 - protein, 23 aa, Artificial Sequence
  Cyclic GFR-binding peptide
SATSVLYYEIVRKKPIFLRKHRT

SEQ ID NO: 47958 - protein, 30 aa, Artificial Sequence
  Cyclic GFR-binding peptide
  MOD_RES (1), (1): Xaa is C or S
XAPTKLSPISVLYKDDSSNVILKYHYNMVV

SEQ ID NO: 47959 - protein, 24 aa, Artificial Sequence
  Cyclic GFR-binding peptide
SQDLSAISILYLIGKTPKILKNYQ

SEQ ID NO: 47960 - protein, 29 aa, Artificial Sequence
  Cyclic GFR-binding peptide
SATSVLYYDDSSNVILRKHRAAAAAAAAA

SEQ ID NO: 47961 - protein, 39 aa, Artificial Sequence; identical to SEQ ID NO: 8272
  Cyclic GFR-binding peptide
  MOD_RES (1), (38): Xaa is C or S

SEQ ID NO: 47962 - protein, 34 aa, Artificial Sequence; identical to SEQ ID NO: 8274
  Cyclic GFR-binding peptide
  MOD_RES (1), (33): Xaa is C or S

SEQ ID NO: 47963 - protein, 33 aa, Artificial Sequence; identical to SEQ ID NO: 8275
  Cyclic GFR-binding peptide
  MOD_RES (1), (2), (33): Xaa is C or S

SEQ ID NO: 47964 - protein, 23 aa, Artificial Sequence
  Cyclic GFR-binding peptide
TKLSAISVLYLDSSNNVILKNYQ

SEQ ID NO: 47965 - protein, 26 aa, Artificial Sequence
  Cyclic GFR-binding peptide
LSAISVLYLEIVRKKPIFLKNYQTLE

SEQ ID NO: 47966 - protein, 34 aa, Artificial Sequence; identical to SEQ ID NO: 8277
  Cyclic GFR-binding peptide
  MOD_RES (1), (33): Xaa is C or S

SEQ ID NO: 47967 - protein, 32 aa, Artificial Sequence
  Cyclic GFR-binding peptide
  MOD_RES (30), (32): Xaa is C or S
KLNAISVLYFDDMGVPTLKKYREGMSVAEXGX

SEQ ID NO: 47968 - protein, 30 aa, Artificial Sequence
  Cyclic GFR-binding peptide
PTQVQLSATSVLYYEIVRKKPIFLRKHRTL

SEQ ID NO: 47969 - protein, 31 aa, Artificial Sequence; identical to SEQ ID NO: 8279
  Cyclic GFR-binding peptide
  MOD_RES (31), (31): Xaa is C or S

SEQ ID NO: 47970 - protein, 25 aa, Artificial Sequence
  Cyclic GFR-binding peptide
VQLSATSVLYYEIVRKKPIFLRKHR

SEQ ID NO: 47971 - protein, 24 aa, Artificial Sequence
  Cyclic GFR-binding peptide
TKLSAISVLYLDDSSNVILKNYQN

SEQ ID NO: 47972 - protein, 41 aa, Artificial Sequence; identical to SEQ ID NO: 8282
  Cyclic GFR-binding peptide
  MOD_RES (4), (5), (38), (40): Xaa is C or S

SEQ ID NO: 47973 - protein, 29 aa, Artificial Sequence
  Cyclic GFR-binding peptide
  MOD_RES (2), (3): Xaa is C or S
PXXVPQALNAISILYFVGRKPKVLKKYRM

SEQ ID NO: 47974 - protein, 28 aa, Artificial Sequence
  Cyclic GFR-binding peptide
PQALSAISILYLVGRKPKVLKNYQMIVR

SEQ ID NO: 47975 - protein, 28 aa, Artificial Sequence
  Cyclic GFR-binding peptide
  MOD_RES (1), (2): Xaa is C or S
XXVSQDLSAISILYLIGKTPKILKNYQM

SEQ ID NO: 47976 - protein, 26 aa, Artificial Sequence
  Cyclic GFR-binding peptide
QLSAISVLYLDDSSNVILKNYQNMVV

SEQ ID NO: 47977 - protein, 27 aa, Artificial Sequence
  Cyclic GFR-binding peptide
SQDLNAISILYFIGKTPKILKKYRMIV

SEQ ID NO: 47978 - protein, 25 aa, Artificial Sequence
  Cyclic GFR-binding peptide
NAISILYFIGKTPKILKKYRMIVKS

SEQ ID NO: 47979 - protein, 28 aa, Artificial Sequence
  Cyclic GFR-binding peptide
PTQVQLSATSVLYYEIVRKKPIFLRKHR

SEQ ID NO: 47980 - protein, 31 aa, Artificial Sequence; identical to SEQ ID NO: 8289
  Cyclic GFR-binding peptide
  MOD_RES (1), (1): Xaa is C or S

SEQ ID NO: 47981 - protein, 27 aa, Artificial Sequence
  Cyclic GFR-binding peptide
QALSATSILYYVGRKPKVLRKHRMIVR

SEQ ID NO: 47982 - protein, 37 aa, Artificial Sequence; identical to SEQ ID NO: 8290
  Cyclic GFR-binding peptide
  MOD_RES (6), (7): Xaa is C or S

SEQ ID NO: 47983 - protein, 32 aa, Artificial Sequence
  Cyclic GFR-binding peptide
  MOD_RES (3), (3): Xaa is C or S
VQXRPTQVQLSAISVLYLEIVRKKPIFLKNYQ

SEQ ID NO: 47984 - protein, 36 aa, Artificial Sequence; identical to SEQ ID NO: 8296
  Cyclic GFR-binding peptide
  MOD_RES (4), (36): Xaa is C or S

SEQ ID NO: 47985 - protein, 37 aa, Artificial Sequence; identical to SEQ ID NO: 8295
  Cyclic GFR-binding peptide
  MOD_RES (4), (5), (36): Xaa is C or S

SEQ ID NO: 47986 - protein, 24 aa, Artificial Sequence
  Cyclic GFR-binding peptide
ALSPISILYKVGRKPKVLKYHYMI

SEQ ID NO: 47987 - protein, 33 aa, Artificial Sequence
  Cyclic GFR-binding peptide
RPTQVQLSPISVLYKEIVRKKPIFLKYHYTLED

SEQ ID NO: 47988 - protein, 32 aa, Artificial Sequence; identical to SEQ ID NO: 8297
  Cyclic GFR-binding peptide
  MOD_RES (1), (2): Xaa is C or S

SEQ ID NO: 47989 - protein, 31 aa, Artificial Sequence
  Cyclic GFR-binding peptide
  MOD_RES (5), (6): Xaa is C or S
VGKAXXVPTKLSATSVLYYDDMGVPTLRKHR

SEQ ID NO: 47990 - protein, 29 aa, Artificial Sequence
  Cyclic GFR-binding peptide
SATSMLYYDEYDKVVLRKHRAAAAAAAAA

SEQ ID NO: 47991 - protein, 38 aa, Artificial Sequence; identical to SEQ ID NO: 8300
  Cyclic GFR-binding peptide
  MOD_RES (5), (6), (38): Xaa is C or S

SEQ ID NO: 47992 - protein, 34 aa, Artificial Sequence
  Cyclic GFR-binding peptide
  MOD_RES (6), (7): Xaa is C or S
ASASPXXVSQDLSPISILYKIGKTPKILKYHYMI

SEQ ID NO: 47993 - protein, 28 aa, Artificial Sequence
  Cyclic GFR-binding peptide
QDLSAISILYLVGRTPKVLKNYQMVVKS

SEQ ID NO: 47994 - protein, 38 aa, Artificial Sequence; identical to SEQ ID NO: 8302
  Cyclic GFR-binding peptide
  MOD_RES (1), (2), (35), (37): Xaa is C or S

SEQ ID NO: 47995 - protein, 32 aa, Artificial Sequence
  Cyclic GFR-binding peptide
  MOD_RES (30), (32): Xaa is C or S
PQALSATSILYYVGRKPKVLRKHRMIVRSXKX

SEQ ID NO: 47996 - protein, 26 aa, Artificial Sequence
  Cyclic GFR-binding peptide
  MOD_RES (1), (1): Xaa is C or S
XVPTKLSATSVLYYDDMGVPTLRKHR

SEQ ID NO: 47997 - protein, 28 aa, Artificial Sequence
  Cyclic GFR-binding peptide
  MOD_RES (27), (27): Xaa is C or S
SPISMLYKDENEKVVLKYHYDMVVEGXG

SEQ ID NO: 47998 - protein, 34 aa, Artificial Sequence; identical to SEQ ID NO: 8304
  Cyclic GFR-binding peptide
  MOD_RES (1), (33): Xaa is C or S

SEQ ID NO: 47999 - protein, 29 aa, Artificial Sequence
  Cyclic GFR-binding peptide
  MOD_RES (1), (1): Xaa is C or S
XVPTELSATSMLYYDEYDKVVLRKHREMV

SEQ ID NO: 48000 - protein, 28 aa, Artificial Sequence
  Cyclic GFR-binding peptide
LSATSVLYYEIVRKKPIFLRKHRTLEDH

SEQ ID NO: 48001 - protein, 36 aa, Artificial Sequence; identical to SEQ ID NO: 8307
  Cyclic GFR-binding peptide
  MOD_RES (1), (2), (33), (35): Xaa is C or S

SEQ ID NO: 48002 - protein, 36 aa, Artificial Sequence; identical to SEQ ID NO: 8309
  Cyclic GFR-binding peptide
  MOD_RES (5), (6): Xaa is C or S

SEQ ID NO: 48003 - protein, 38 aa, Artificial Sequence; identical to SEQ ID NO: 8308
  Cyclic GFR-binding peptide
  MOD_RES (4), (5), (37): Xaa is C or S

SEQ ID NO: 48004 - protein, 34 aa, Artificial Sequence
  Cyclic GFR-binding peptide
  MOD_RES (4), (5): Xaa is C or S
PKAXXVPTELSPISMLYKDEYDKVVLKYHYEMVV

SEQ ID NO: 48005 - protein, 36 aa, Artificial Sequence; identical to SEQ ID NO: 8310
  Cyclic GFR-binding peptide
  MOD_RES (4), (5): Xaa is C or S

SEQ ID NO: 48006 - protein, 32 aa, Artificial Sequence; identical to SEQ ID NO: 8312
  Cyclic GFR-binding peptide
  MOD_RES (1), (2): Xaa is C or S

SEQ ID NO: 48007 - protein, 33 aa, Artificial Sequence
  Cyclic GFR-binding peptide
  MOD_RES (6), (6): Xaa is C or S
VTKPTXAPTKLSPISVLYKDDSSNVILKYHYNM

SEQ ID NO: 48008 - protein, 33 aa, Artificial Sequence
  Cyclic GFR-binding peptide
  MOD_RES (4), (4): Xaa is C or S
NVQXRPTQVQLNAISVLYFEIVRKKPIFLKKYR

SEQ ID NO: 48009 - protein, 32 aa, Artificial Sequence
  Cyclic GFR-binding peptide
  MOD_RES (31), (31): Xaa is C or S
PTELSATSMLYYDENEKVVLRKHRDMVVEGXG

SEQ ID NO: 48010 - protein, 32 aa, Artificial Sequence
  Cyclic GFR-binding peptide
  MOD_RES (30), (32): Xaa is C or S
PQDLNAISILYFVGRTPKVLKKYRMVVKSXKX

SEQ ID NO: 48011 - protein, 30 aa, Artificial Sequence
  Cyclic GFR-binding peptide
  MOD_RES (1), (1): Xaa is C or S
XVSQDLSATSILYYIGKTPKILRKHRMIVK

SEQ ID NO: 48012 - protein, 34 aa, Artificial Sequence; identical to SEQ ID NO: 8313
  Cyclic GFR-binding peptide
  MOD_RES (32), (34): Xaa is C or S

SEQ ID NO: 48013 - protein, 32 aa, Artificial Sequence
  Cyclic GFR-binding peptide
  MOD_RES (6), (7): Xaa is C or S
ASAAPXXVPQALSPISILYKVGRKPKVLKYHY

SEQ ID NO: 48014 - protein, 31 aa, Artificial Sequence
  Cyclic GFR-binding peptide
  MOD_RES (30), (30): Xaa is C or S
TELSPISMLYKDENEKVVLKYHYDMVVEGXG

SEQ ID NO: 48015 - protein, 31 aa, Artificial Sequence
  Cyclic GFR-binding peptide
  MOD_RES (31), (31): Xaa is C or S
LSPISVLYKEIVRKKPIFLKYHYTLEDHLAX

SEQ ID NO: 48016 - protein, 36 aa, Artificial Sequence
  Cyclic GFR-binding peptide
  MOD_RES (3), (3): Xaa is C or S
VQXRPTQVQLSAISVLYLEIVRKKPIFLKNYQTLED

SEQ ID NO: 48017 - protein, 30 aa, Artificial Sequence
  Cyclic GFR-binding peptide
  MOD_RES (1), (2): Xaa is C or S
XXAPTKLSPISVLYKDDSSNVILKYHYNMV

SEQ ID NO: 48018 - protein, 34 aa, Artificial Sequence; identical to SEQ ID NO: 8316
  Cyclic GFR-binding peptide
  MOD_RES (3), (4): Xaa is C or S

SEQ ID NO: 48019 - protein, 38 aa, Artificial Sequence; identical to SEQ ID NO: 8317
  Cyclic GFR-binding peptide
  MOD_RES (35), (37): Xaa is C or S

SEQ ID NO: 48020 - protein, 31 aa, Artificial Sequence
  Cyclic GFR-binding peptide
  MOD_RES (1), (2): Xaa is C or S
XXVSQDLNAISILYFIGKTPKILKKYRMIVK

SEQ ID NO: 48021 - protein, 33 aa, Artificial Sequence
  Cyclic GFR-binding peptide
  MOD_RES (4), (5): Xaa is C or S
ASPXXVPQDLNAISILYFVGRTPKVLKKYRMVV

SEQ ID NO: 48022 - protein, 31 aa, Artificial Sequence
  Cyclic GFR-binding peptide
  MOD_RES (5), (5): Xaa is C or S
TKPTXAPTKLSPISVLYKDDSSNVILKYHYN

SEQ ID NO: 48023 - protein, 29 aa, Artificial Sequence
  Cyclic GFR-binding peptide
KLSATSVLYYDDMGVPTLRKHREGMSVAE

SEQ ID NO: 48024 - protein, 33 aa, Artificial Sequence
  Cyclic GFR-binding peptide
  MOD_RES (30), (32): Xaa is C or S
PQDLSPISILYKVGRTPKVLKYHYMVVKSXKXS

SEQ ID NO: 48025 - protein, 35 aa, Artificial Sequence; identical to SEQ ID NO: 8320
  Cyclic GFR-binding peptide

SEQ ID NO: 48026 - protein, 26 aa, Artificial Sequence
  Cyclic GFR-binding peptide
  MOD_RES (1), (1): Xaa is C or S
XAPTQLSATSVLYYDDSSNVILRKHR

SEQ ID NO: 48027 - protein, 26 aa, Artificial Sequence
  Cyclic GFR-binding peptide
  MOD_RES (1), (1): Xaa is C or S
XAPTKLSPISVLYKDSSNNVILKYHY

SEQ ID NO: 48028 - protein, 31 aa, Artificial Sequence
  Cyclic GFR-binding peptide
  MOD_RES (29), (31): Xaa is C or S
ELNAISMLYFDENEKVVLKKYRDMVVEGXGX

SEQ ID NO: 48029 - protein, 33 aa, Artificial Sequence
  Cyclic GFR-binding peptide
  MOD_RES (5), (6): Xaa is C or S
VGKAXXVPTKLSATSVLYYDDMGVPTLRKHREG

SEQ ID NO: 48030 - protein, 29 aa, Artificial Sequence
  Cyclic GFR-binding peptide
SAISILYLIGKTPKILKNYQAAAAAAAAA

SEQ ID NO: 48031 - protein, 25 aa, Artificial Sequence
  Cyclic GFR-binding peptide
PTELSPISMLYKDENEKVVLKYHYD

SEQ ID NO: 48032 - protein, 37 aa, Artificial Sequence; identical to SEQ ID NO: 8324
  Cyclic GFR-binding peptide
  MOD_RES (4), (5), (37): Xaa is C or S

SEQ ID NO: 48033 - protein, 26 aa, Artificial Sequence
  Cyclic GFR-binding peptide
PTKLSATSVLYYDDSSNVILRKHRNM

SEQ ID NO: 48034 - protein, 32 aa, Artificial Sequence
  Cyclic GFR-binding peptide
  MOD_RES (30), (32): Xaa is C or S
TELSPISMLYKDEYDKVVLKYHYEMVVEGXGX

SEQ ID NO: 48035 - protein, 37 aa, Artificial Sequence; identical to SEQ ID NO: 8325
  Cyclic GFR-binding peptide
  MOD_RES (37), (37): Xaa is C or S

SEQ ID NO: 48036 - protein, 30 aa, Artificial Sequence
  Cyclic GFR-binding peptide
  MOD_RES (29), (29): Xaa is C or S
QALSATSILYYVGRKPKVLRKHRMIVRSXK

SEQ ID NO: 48037 - protein, 30 aa, Artificial Sequence
  Cyclic GFR-binding peptide
  MOD_RES (4), (5): Xaa is C or S
ASPXXVSQDLSATSILYYIGKTPKILRKHR

SEQ ID NO: 48038 - protein, 34 aa, Artificial Sequence; identical to SEQ ID NO: 8329
  Cyclic GFR-binding peptide
  MOD_RES (2), (3): Xaa is C or S

SEQ ID NO: 48039 - protein, 22 aa, Artificial Sequence
  Cyclic GFR-binding peptide
QLSATSVLYYDDSSNVILRKHR

SEQ ID NO: 48040 - protein, 22 aa, Artificial Sequence
  Cyclic GFR-binding peptide
KLSPISVLYKDSSNNVILKYHY

SEQ ID NO: 48041 - protein, 35 aa, Artificial Sequence; identical to SEQ ID NO: 8330
  Cyclic GFR-binding peptide
  MOD_RES (32), (34): Xaa is C or S

SEQ ID NO: 48042 - protein, 34 aa, Artificial Sequence; identical to SEQ ID NO: 8333
  Cyclic GFR-binding peptide
  MOD_RES (3), (3): Xaa is C or S

SEQ ID NO: 48043 - protein, 31 aa, Artificial Sequence
  Cyclic GFR-binding peptide
  MOD_RES (2), (3): Xaa is C or S
PXXAPTQLSAISVLYLDDSSNVILKNYQNMV

SEQ ID NO: 48044 - protein, 29 aa, Artificial Sequence
  Cyclic GFR-binding peptide
  MOD_RES (1), (2): Xaa is C or S
XXAPTKLSAISVLYLDSSNNVILKNYQNM

SEQ ID NO: 48045 - protein, 32 aa, Artificial Sequence; identical to SEQ ID NO: 8335
  Cyclic GFR-binding peptide
  MOD_RES (1), (2): Xaa is C or S

SEQ ID NO: 48046 - protein, 31 aa, Artificial Sequence
  Cyclic GFR-binding peptide
  MOD_RES (31), (31): Xaa is C or S
TKLSAISVLYLDDMGVPTLKNYQEGMSVAEX

SEQ ID NO: 48047 - protein, 25 aa, Artificial Sequence
  Cyclic GFR-binding peptide
LSATSILYYVGRTPKVLRKHRMVVK

SEQ ID NO: 48048 - protein, 31 aa, Artificial Sequence
  Cyclic GFR-binding peptide
  MOD_RES (5), (6): Xaa is C or S
VPKAXXAPTKLSPISVLYKDSSNNVILKYHY

SEQ ID NO: 48049 - protein, 41 aa, Artificial Sequence; identical to SEQ ID NO: 8336
  Cyclic GFR-binding peptide
  MOD_RES (5), (6), (38), (40): Xaa is C or S

SEQ ID NO: 48050 - protein, 31 aa, Artificial Sequence
  Cyclic GFR-binding peptide
  MOD_RES (3), (4): Xaa is C or S
KAXXAPTKLNAISVLYFDSSNNVILKKYRNM

SEQ ID NO: 48051 - protein, 35 aa, Artificial Sequence
  Cyclic GFR-binding peptide
  MOD_RES (4), (4): Xaa is C or S
NVQXRPTQVQLSPISVLYKEIVRKKPIFLKYHYTL

SEQ ID NO: 48052 - protein, 39 aa, Artificial Sequence; identical to SEQ ID NO: 8337
  Cyclic GFR-binding peptide
  MOD_RES (3), (4), (37), (39): Xaa is C or S

SEQ ID NO: 48053 - protein, 33 aa, Artificial Sequence
  Cyclic GFR-binding peptide
  MOD_RES (32), (32): Xaa is C or S
PTKLSAISVLYLDDMGVPTLKNYQEGMSVAEXG

SEQ ID NO: 48054 - protein, 34 aa, Artificial Sequence; identical to SEQ ID NO: 8339
  Cyclic GFR-binding peptide

SEQ ID NO: 48055 - protein, 21 aa, Artificial Sequence
  Cyclic GFR-binding peptide
LSAISILYLVGRKPKVLKNYQ

SEQ ID NO: 48056 - protein, 32 aa, Artificial Sequence
  Cyclic GFR-binding peptide
  MOD_RES (1), (2): Xaa is C or S
XXVPTKLSAISVLYLDDMGVPTLKNYQEGMSV

SEQ ID NO: 48057 - protein, 26 aa, Artificial Sequence
  Cyclic GFR-binding peptide
VPQALNAISILYFVGRKPKVLKKYRM

SEQ ID NO: 48058 - protein, 21 aa, Artificial Sequence
  Cyclic GFR-binding peptide
SPISILYKVGRTPKVLKYHYM

SEQ ID NO: 48059 - protein, 22 aa, Artificial Sequence
  Cyclic GFR-binding peptide
LSPISILYKIGKTPKILKYHYM

SEQ ID NO: 48060 - protein, 36 aa, Artificial Sequence; identical to SEQ ID NO: 8341
  Cyclic GFR-binding peptide
  MOD_RES (35), (35): Xaa is C or S

SEQ ID NO: 48061 - protein, 31 aa, Artificial Sequence
  Cyclic GFR-binding peptide
QLSPISVLYKEIVRKKPIFLKYHYTLEDHLA

SEQ ID NO: 48062 - protein, 32 aa, Artificial Sequence
  Cyclic GFR-binding peptide
  MOD_RES (6), (7): Xaa is C or S
TVPKPXXAPTQLSATSVLYYDDSSNVILRKHR

SEQ ID NO: 48063 - protein, 26 aa, Artificial Sequence
  Cyclic GFR-binding peptide
  MOD_RES (1), (1): Xaa is C or S
XVPQDLSPISILYKVGRTPKVLKYHY

SEQ ID NO: 48064 - protein, 23 aa, Artificial Sequence
  Cyclic GFR-binding peptide
TQLSATSVLYYDDSSNVILRKHR

SEQ ID NO: 48065 - protein, 32 aa, Artificial Sequence; identical to SEQ ID NO: 8342
  Cyclic GFR-binding peptide
  MOD_RES (1), (1): Xaa is C or S

SEQ ID NO: 48066 - protein, 23 aa, Artificial Sequence
  Cyclic GFR-binding peptide
QDLSATSILYYIGKTPKILRKHR

SEQ ID NO: 48067 - protein, 32 aa, Artificial Sequence; identical to SEQ ID NO: 8343
  Cyclic GFR-binding peptide
  MOD_RES (1), (2): Xaa is C or S

SEQ ID NO: 48068 - protein, 30 aa, Artificial Sequence
  Cyclic GFR-binding peptide
  MOD_RES (28), (30): Xaa is C or S
DLSAISILYLVGRTPKVLKNYQMVVKSXKX

SEQ ID NO: 48069 - protein, 32 aa, Artificial Sequence
  Cyclic GFR-binding peptide
  MOD_RES (5), (6): Xaa is C or S
SASPXXVSQDLSATSILYYIGKTPKILRKHRM

SEQ ID NO: 48070 - protein, 24 aa, Artificial Sequence
  Cyclic GFR-binding peptide
SPISVLYKDDSSNVILKYHYNMVV

SEQ ID NO: 48071 - protein, 35 aa, Artificial Sequence
  Cyclic GFR-binding peptide
  MOD_RES (32), (34): Xaa is C or S
PTKLNAISVLYFDDMGVPTLKKYREGMSVAEXGXR

SEQ ID NO: 48072 - protein, 32 aa, Artificial Sequence; identical to SEQ ID NO: 8347
  Cyclic GFR-binding peptide
  MOD_RES (1), (32): Xaa is C or S

SEQ ID NO: 48073 - protein, 29 aa, Artificial Sequence
  Cyclic GFR-binding peptide
TELSATSMLYYDEYDKVVLRKHREMVVEG

SEQ ID NO: 48074 - protein, 20 aa, Artificial Sequence
  Cyclic GFR-binding peptide
SATSMLYYDEYDKVVLRKHR

SEQ ID NO: 48075 - protein, 30 aa, Artificial Sequence
  Cyclic GFR-binding peptide
  MOD_RES (27), (29): Xaa is C or S
LSAISILYLIGKTPKILKNYQMIVKSXKXS

SEQ ID NO: 48076 - protein, 29 aa, Artificial Sequence
  Cyclic GFR-binding peptide
  MOD_RES (2), (2): Xaa is C or S
TXAPTKLSPISVLYKDDSSNVILKYHYNM

SEQ ID NO: 48077 - protein, 26 aa, Artificial Sequence
  Cyclic GFR-binding peptide
PQALSATSILYYVGRKPKVLRKHRMI

SEQ ID NO: 48078 - protein, 25 aa, Artificial Sequence
  Cyclic GFR-binding peptide
DLNAISILYFIGKTPKILKKYRMIV

SEQ ID NO: 48079 - protein, 29 aa, Artificial Sequence
  Cyclic GFR-binding peptide
  MOD_RES (1), (1): Xaa is C or S
XVSQDLNAISILYFIGKTPKILKKYRMIV

SEQ ID NO: 48080 - protein, 26 aa, Artificial Sequence
  Cyclic GFR-binding peptide
PQDLNAISILYFVGRTPKVLKKYRMV

SEQ ID NO: 48081 - protein, 35 aa, Artificial Sequence; identical to SEQ ID NO: 8353
  Cyclic GFR-binding peptide
  MOD_RES (4), (5): Xaa is C or S

SEQ ID NO: 48082 - protein, 30 aa, Artificial Sequence
  Cyclic GFR-binding peptide
PTKLSPISVLYKDDSSNVILKYHYNMVVRS

SEQ ID NO: 48083 - protein, 28 aa, Artificial Sequence
  Cyclic GFR-binding peptide
  MOD_RES (2), (3): Xaa is C or S
AXXAPTKLNAISVLYFDSSNNVILKKYR

SEQ ID NO: 48084 - protein, 29 aa, Artificial Sequence
  Cyclic GFR-binding peptide
VQLSPISVLYKEIVRKKPIFLKYHYTLED

SEQ ID NO: 48085 - protein, 29 aa, Artificial Sequence
  Cyclic GFR-binding peptide
  MOD_RES (4), (4): Xaa is C or S
KPTXAPTKLSAISVLYLDDSSNVILKNYQ

SEQ ID NO: 48086 - protein, 31 aa, Artificial Sequence; identical to SEQ ID NO: 8357
  Cyclic GFR-binding peptide

SEQ ID NO: 48087 - protein, 23 aa, Artificial Sequence
  Cyclic GFR-binding peptide
KLSAISVLYLDSSNNVILKNYQN

SEQ ID NO: 48088 - protein, 30 aa, Artificial Sequence
  Cyclic GFR-binding peptide
  MOD_RES (2), (2): Xaa is C or S
TXAPTKLSPISVLYKDDSSNVILKYHYNMV

SEQ ID NO: 48089 - protein, 33 aa, Artificial Sequence; identical to SEQ ID NO: 8359
  Cyclic GFR-binding peptide
  MOD_RES (1), (33): Xaa is C or S

SEQ ID NO: 48090 - protein, 27 aa, Artificial Sequence
  Cyclic GFR-binding peptide
VPQALSPISILYKVGRKPKVLKYHYMI

SEQ ID NO: 48091 - protein, 28 aa, Artificial Sequence
  Cyclic GFR-binding peptide
  MOD_RES (2), (3): Xaa is C or S
PXXVPQDLNAISILYFVGRTPKVLKKYR

SEQ ID NO: 48092 - protein, 34 aa, Artificial Sequence; identical to SEQ ID NO: 8362
  Cyclic GFR-binding peptide
  MOD_RES (31), (33): Xaa is C or S

SEQ ID NO: 48093 - protein, 27 aa, Artificial Sequence
  Cyclic GFR-binding peptide
LSPISVLYKDDSSNVILKYHYNMVVRA

SEQ ID NO: 48094 - protein, 32 aa, Artificial Sequence
  Cyclic GFR-binding peptide
  MOD_RES (3), (4): Xaa is C or S
SPXXVPQDLSPISILYKVGRTPKVLKYHYMVV

SEQ ID NO: 48095 - protein, 34 aa, Artificial Sequence
  Cyclic GFR-binding peptide
  MOD_RES (5), (5): Xaa is C or S
RNVQXRPTQVQLSATSVLYYEIVRKKPIFLRKHR

SEQ ID NO: 48096 - protein, 37 aa, Artificial Sequence; identical to SEQ ID NO: 8364
  Cyclic GFR-binding peptide
  MOD_RES (35), (37): Xaa is C or S

SEQ ID NO: 48097 - protein, 27 aa, Artificial Sequence
  Cyclic GFR-binding peptide
QDLSAISILYLVGRTPKVLKNYQMVVK

SEQ ID NO: 48098 - protein, 37 aa, Artificial Sequence; identical to SEQ ID NO: 8365
  Cyclic GFR-binding peptide
  MOD_RES (2), (3), (35), (37): Xaa is C or S

SEQ ID NO: 48099 - protein, 30 aa, Artificial Sequence
  Cyclic GFR-binding peptide
  MOD_RES (28), (30): Xaa is C or S
LNAISMLYFDEYDKVVLKKYREMVVEGXGX

SEQ ID NO: 48100 - protein, 37 aa, Artificial Sequence; identical to SEQ ID NO: 8366
  Cyclic GFR-binding peptide
  MOD_RES (4), (5), (37): Xaa is C or S

SEQ ID NO: 48101 - protein, 25 aa, Artificial Sequence
  Cyclic GFR-binding peptide
QDLSPISILYKVGRTPKVLKYHYMV

SEQ ID NO: 48102 - protein, 24 aa, Artificial Sequence
  Cyclic GFR-binding peptide
ALSATSILYYVGRKPKVLRKHRMI

SEQ ID NO: 48103 - protein, 32 aa, Artificial Sequence; identical to SEQ ID NO: 8367
  Cyclic GFR-binding peptide
  MOD_RES (1), (2): Xaa is C or S

SEQ ID NO: 48104 - protein, 27 aa, Artificial Sequence
  Cyclic GFR-binding peptide
LSPISVLYKDDSSNVILKYHYNMVVRS

SEQ ID NO: 48105 - protein, 40 aa, Artificial Sequence; identical to SEQ ID NO: 8371
  Cyclic GFR-binding peptide
  MOD_RES (5), (6), (38), (40): Xaa is C or S

SEQ ID NO: 48106 - protein, 27 aa, Artificial Sequence
  Cyclic GFR-binding peptide
PTKLNAISVLYFDDMGVPTLKKYREGM

SEQ ID NO: 48107 - protein, 33 aa, Artificial Sequence
  Cyclic GFR-binding peptide
  MOD_RES (4), (5): Xaa is C or S
AAPXXVPQALSAISILYLVGRKPKVLKNYQMIV

SEQ ID NO: 48108 - protein, 23 aa, Artificial Sequence
  Cyclic GFR-binding peptide
DLSATSILYYIGKTPKILRKHRM

SEQ ID NO: 48109 - protein, 40 aa, Artificial Sequence; identical to SEQ ID NO: 8372
  Cyclic GFR-binding peptide
  MOD_RES (3), (40): Xaa is C or S

SEQ ID NO: 48110 - protein, 26 aa, Artificial Sequence
  Cyclic GFR-binding peptide
LNAISILYFIGKTPKILKKYRMIVKS

SEQ ID NO: 48111 - protein, 26 aa, Artificial Sequence
  Cyclic GFR-binding peptide
PQALSPISILYKVGRKPKVLKYHYMI

SEQ ID NO: 48112 - protein, 32 aa, Artificial Sequence
  Cyclic GFR-binding peptide
  MOD_RES (29), (31): Xaa is C or S
LSAISVLYLDDMGVPTLKNYQEGMSVAEXGXR

SEQ ID NO: 48113 - protein, 29 aa, Artificial Sequence
  Cyclic GFR-binding peptide
  MOD_RES (1), (2): Xaa is C or S
XXVSQDLSATSILYYIGKTPKILRKHRMI

SEQ ID NO: 48114 - protein, 31 aa, Artificial Sequence
  Cyclic GFR-binding peptide
  MOD_RES (3), (4): Xaa is C or S
KAXXVPTELSATSMLYYDENEKVVLRKHRDM

SEQ ID NO: 48115 - protein, 36 aa, Artificial Sequence
  Cyclic GFR-binding peptide
  MOD_RES (7), (7): Xaa is C or S
HVTKPTXAPTKLSPISVLYKDDSSNVILKYHYNMVV

SEQ ID NO: 48116 - protein, 28 aa, Artificial Sequence
  Cyclic GFR-binding peptide
  MOD_RES (1), (1): Xaa is C or S
XVSQDLSATSILYYIGKTPKILRKHRMI

SEQ ID NO: 48117 - protein, 31 aa, Artificial Sequence
  Cyclic GFR-binding peptide
  MOD_RES (2), (3): Xaa is C or S
AXXVPTKLSATSVLYYDDMGVPTLRKHREGM

SEQ ID NO: 48118 - protein, 33 aa, Artificial Sequence
  Cyclic GFR-binding peptide
  MOD_RES (3), (4): Xaa is C or S
APXXVPQALSPISILYKVGRKPKVLKYHYMIVR

SEQ ID NO: 48119 - protein, 34 aa, Artificial Sequence
  Cyclic GFR-binding peptide
  MOD_RES (2), (2): Xaa is C or S
QXRPTQVQLNAISVLYFEIVRKKPIFLKKYRTLE

SEQ ID NO: 48120 - protein, 35 aa, Artificial Sequence; identical to SEQ ID NO: 8378
  Cyclic GFR-binding peptide
  MOD_RES (2), (3), (34): Xaa is C or S

SEQ ID NO: 48121 - protein, 31 aa, Artificial Sequence
  Cyclic GFR-binding peptide
  MOD_RES (30), (30): Xaa is C or S
TKLSAISVLYLDSSNNVILKNYQNMVVKAXG

SEQ ID NO: 48122 - protein, 32 aa, Artificial Sequence
  Cyclic GFR-binding peptide
  MOD_RES (30), (32): Xaa is C or S
TELSPISMLYKDENEKVVLKYHYDMVVEGXGX

SEQ ID NO: 48123 - protein, 23 aa, Artificial Sequence
  Cyclic GFR-binding peptide
ELSATSMLYYDENEKVVLRKHRD

SEQ ID NO: 48124 - protein, 34 aa, Artificial Sequence; identical to SEQ ID NO: 8384
  Cyclic GFR-binding peptide
  MOD_RES (2), (3), (34): Xaa is C or S

SEQ ID NO: 48125 - protein, 32 aa, Artificial Sequence
  Cyclic GFR-binding peptide
  MOD_RES (6), (7): Xaa is C or S
KIPKAXXVPTELSPISMLYKDENEKVVLKYHY

SEQ ID NO: 48126 - protein, 26 aa, Artificial Sequence
  Cyclic GFR-binding peptide
TELNAISMLYFDENEKVVLKKYRDMV

SEQ ID NO: 48127 - protein, 31 aa, Artificial Sequence
  Cyclic GFR-binding peptide
  MOD_RES (1), (1): Xaa is C or S
XVPTKLSAISVLYLDDMGVPTLKNYQEGMSV

SEQ ID NO: 48128 - protein, 27 aa, Artificial Sequence
  Cyclic GFR-binding peptide
PTKLNAISVLYFDSSNNVILKKYRNMV

SEQ ID NO: 48129 - protein, 32 aa, Artificial Sequence; identical to SEQ ID NO: 8387
  Cyclic GFR-binding peptide
  MOD_RES (1), (2): Xaa is C or S

SEQ ID NO: 48130 - protein, 22 aa, Artificial Sequence
  Cyclic GFR-binding peptide
SPISILYKVGRKPKVLKYHYMI

SEQ ID NO: 48131 - protein, 37 aa, Artificial Sequence; identical to SEQ ID NO: 8391
  Cyclic GFR-binding peptide
  MOD_RES (4), (5): Xaa is C or S

SEQ ID NO: 48132 - protein, 33 aa, Artificial Sequence; identical to SEQ ID NO: 8394
  Cyclic GFR-binding peptide
  MOD_RES (1), (33): Xaa is C or S

SEQ ID NO: 48133 - protein, 32 aa, Artificial Sequence
  Cyclic GFR-binding peptide
  MOD_RES (5), (6): Xaa is C or S
SAAPXXVPQALSPISILYKVGRKPKVLKYHYM

SEQ ID NO: 48134 - protein, 27 aa, Artificial Sequence
  Cyclic GFR-binding peptide
  MOD_RES (1), (1): Xaa is C or S
XVSQDLSPISILYKIGKTPKILKYHYM

SEQ ID NO: 48135 - protein, 27 aa, Artificial Sequence
  Cyclic GFR-binding peptide
  MOD_RES (1), (2): Xaa is C or S
XXAPTKLSATSVLYYDDSSNVILRKHR

SEQ ID NO: 48136 - protein, 34 aa, Artificial Sequence
  Cyclic GFR-binding peptide
  MOD_RES (4), (5): Xaa is C or S
GKAXXVPTKLSAISVLYLDDMGVPTLKNYQEGMS

SEQ ID NO: 48137 - protein, 29 aa, Artificial Sequence
  Cyclic GFR-binding peptide
  MOD_RES (1), (1): Xaa is C or S
XVPQALSPISILYKVGRKPKVLKYHYMIV

SEQ ID NO: 48138 - protein, 33 aa, Artificial Sequence
  Cyclic GFR-binding peptide
  MOD_RES (31), (33): Xaa is C or S
PTELSATSMLYYDENEKVVLRKHRDMVVEGXGX

SEQ ID NO: 48139 - protein, 31 aa, Artificial Sequence
  Cyclic GFR-binding peptide
  MOD_RES (4), (5): Xaa is C or S
GKAXXVPTKLSAISVLYLDDMGVPTLKNYQE

SEQ ID NO: 48140 - protein, 31 aa, Artificial Sequence
  Cyclic GFR-binding peptide
  MOD_RES (29), (31): Xaa is C or S
QDLSPISILYKVGRTPKVLKYHYMVVKSXKX

SEQ ID NO: 48141 - protein, 32 aa, Artificial Sequence
  Cyclic GFR-binding peptide
  MOD_RES (3), (4): Xaa is C or S
APXXVPQALSPISILYKVGRKPKVLKYHYMIV

SEQ ID NO: 48142 - protein, 28 aa, Artificial Sequence
  Cyclic GFR-binding peptide
  MOD_RES (2), (3): Xaa is C or S
AXXAPTKLSPISVLYKDSSNNVILKYHY

SEQ ID NO: 48143 - protein, 32 aa, Artificial Sequence
  Cyclic GFR-binding peptide
  MOD_RES (30), (32): Xaa is C or S
SAISVLYLEIVRKKPIFLKNYQTLEDHLAXKX

SEQ ID NO: 48144 - protein, 34 aa, Artificial Sequence
  Cyclic GFR-binding peptide
  MOD_RES (31), (33): Xaa is C or S
LSPISVLYKEIVRKKPIFLKYHYTLEDHLAXKXE

SEQ ID NO: 48145 - protein, 40 aa, Artificial Sequence; identical to SEQ ID NO: 8400
  Cyclic GFR-binding peptide
  MOD_RES (4), (5), (37), (39): Xaa is C or S

SEQ ID NO: 48146 - protein, 35 aa, Artificial Sequence
  Cyclic GFR-binding peptide
  MOD_RES (6), (7): Xaa is C or S
TVPKPXXAPTQLSPISVLYKDDSSNVILKYHYNMV

SEQ ID NO: 48147 - protein, 39 aa, Artificial Sequence; identical to SEQ ID NO: 8402
  Cyclic GFR-binding peptide
  MOD_RES (3), (4), (36), (38): Xaa is C or S

SEQ ID NO: 48148 - protein, 24 aa, Artificial Sequence
  Cyclic GFR-binding peptide
SPISVLYKEIVRKKPIFLKYHYTL

SEQ ID NO: 48149 - protein, 34 aa, Artificial Sequence
  Cyclic GFR-binding peptide
  MOD_RES (2), (2): Xaa is C or S
QXRPTQVQLSAISVLYLEIVRKKPIFLKNYQTLE

SEQ ID NO: 48150 - protein, 34 aa, Artificial Sequence; identical to SEQ ID NO: 8403
  Cyclic GFR-binding peptide
  MOD_RES (1), (2), (34): Xaa is C or S

SEQ ID NO: 48151 - protein, 24 aa, Artificial Sequence
  Cyclic GFR-binding peptide
LSAISVLYLEIVRKKPIFLKNYQT

SEQ ID NO: 48152 - protein, 29 aa, Artificial Sequence
  Cyclic GFR-binding peptide
  MOD_RES (28), (28): Xaa is C or S
DLSPISILYKIGKTPKILKYHYMIVKSXK

SEQ ID NO: 48153 - protein, 38 aa, Artificial Sequence; identical to SEQ ID NO: 8405
  Cyclic GFR-binding peptide
  MOD_RES (37), (37): Xaa is C or S

SEQ ID NO: 48154 - protein, 23 aa, Artificial Sequence
  Cyclic GFR-binding peptide
QALSAISILYLVGRKPKVLKNYQ

SEQ ID NO: 48155 - protein, 29 aa, Artificial Sequence
  Cyclic GFR-binding peptide
  MOD_RES (2), (3): Xaa is C or S
PXXVPQDLSPISILYKVGRTPKVLKYHYM

SEQ ID NO: 48156 - protein, 33 aa, Artificial Sequence
  Cyclic GFR-binding peptide
  MOD_RES (5), (6): Xaa is C or S
SASPXXVPQDLNAISILYFVGRTPKVLKKYRMV

SEQ ID NO: 48157 - protein, 31 aa, Artificial Sequence
  Cyclic GFR-binding peptide
  MOD_RES (1), (2): Xaa is C or S
XXVPTELSATSMLYYDEYDKVVLRKHREMVV

SEQ ID NO: 48158 - protein, 29 aa, Artificial Sequence
  Cyclic GFR-binding peptide
  MOD_RES (1), (2): Xaa is C or S
XXVPQALSAISILYLVGRKPKVLKNYQMI

SEQ ID NO: 48159 - protein, 38 aa, Artificial Sequence; identical to SEQ ID NO: 8408
  Cyclic GFR-binding peptide
  MOD_RES (5), (6), (37): Xaa is C or S

SEQ ID NO: 48160 - protein, 29 aa, Artificial Sequence
  Cyclic GFR-binding peptide
  MOD_RES (2), (3): Xaa is C or S
AXXAPTKLSAISVLYLDSSNNVILKNYQN

SEQ ID NO: 48161 - protein, 32 aa, Artificial Sequence
  Cyclic GFR-binding peptide
  MOD_RES (1), (1): Xaa is C or S
XRPTQVQLSAISVLYLEIVRKKPIFLKNYQTL

SEQ ID NO: 48162 - protein, 25 aa, Artificial Sequence
  Cyclic GFR-binding peptide
NAISILYFVGRKPKVLKKYRMIVRS

SEQ ID NO: 48163 - protein, 29 aa, Artificial Sequence
  Cyclic GFR-binding peptide
  MOD_RES (1), (1): Xaa is C or S
XVPTKLSAISVLYLDDMGVPTLKNYQEGM

SEQ ID NO: 48164 - protein, 27 aa, Artificial Sequence
  Cyclic GFR-binding peptide
LSATSVLYYDDMGVPTLRKHREGMSVA

SEQ ID NO: 48165 - protein, 28 aa, Artificial Sequence
  Cyclic GFR-binding peptide
  MOD_RES (1), (1): Xaa is C or S
XAPTKLSAISVLYLDSSNNVILKNYQNM

SEQ ID NO: 48166 - protein, 28 aa, Artificial Sequence
  Cyclic GFR-binding peptide
  MOD_RES (2), (2): Xaa is C or S
TXAPTKLSAISVLYLDDSSNVILKNYQN

SEQ ID NO: 48167 - protein, 36 aa, Artificial Sequence; identical to SEQ ID NO: 8409
  Cyclic GFR-binding peptide
  MOD_RES (1), (33), (35): Xaa is C or S

SEQ ID NO: 48168 - protein, 31 aa, Artificial Sequence
  Cyclic GFR-binding peptide
  MOD_RES (29), (31): Xaa is C or S
ELNAISMLYFDEYDKVVLKKYREMVVEGXGX

SEQ ID NO: 48169 - protein, 36 aa, Artificial Sequence; identical to SEQ ID NO: 8411
  Cyclic GFR-binding peptide
  MOD_RES (6), (6): Xaa is C or S

SEQ ID NO: 48170 - protein, 37 aa, Artificial Sequence; identical to SEQ ID NO: 8410
  Cyclic GFR-binding peptide
  MOD_RES (4), (5), (36): Xaa is C or S

SEQ ID NO: 48171 - protein, 25 aa, Artificial Sequence
  Cyclic GFR-binding peptide
SAISVLYLDSSNNVILKNYQNMVVK

SEQ ID NO: 48172 - protein, 34 aa, Artificial Sequence; identical to SEQ ID NO: 8413
  Cyclic GFR-binding peptide
  MOD_RES (3), (4): Xaa is C or S

SEQ ID NO: 48173 - protein, 30 aa, Artificial Sequence
  Cyclic GFR-binding peptide
  MOD_RES (29), (29): Xaa is C or S
QALNAISILYFVGRKPKVLKKYRMIVRSXK

SEQ ID NO: 48174 - protein, 30 aa, Artificial Sequence
  Cyclic GFR-binding peptide
  MOD_RES (30), (30): Xaa is C or S
TELSATSMLYYDENEKVVLRKHRDMVVEGX

SEQ ID NO: 48175 - protein, 27 aa, Artificial Sequence
  Cyclic GFR-binding peptide
  MOD_RES (1), (2): Xaa is C or S
XXVSQDLSATSILYYIGKTPKILRKHR

SEQ ID NO: 48176 - protein, 40 aa, Artificial Sequence; identical to SEQ ID NO: 8416
  Cyclic GFR-binding peptide
  MOD_RES (4), (5), (37), (39): Xaa is C or S

SEQ ID NO: 48177 - protein, 24 aa, Artificial Sequence
  Cyclic GFR-binding peptide
LSAISVLYLDSSNNVILKNYQNMV

SEQ ID NO: 48178 - protein, 29 aa, Artificial Sequence
  Cyclic GFR-binding peptide
  MOD_RES (3), (4): Xaa is C or S
APXXVPQALSPISILYKVGRKPKVLKYHY

SEQ ID NO: 48179 - protein, 32 aa, Artificial Sequence; identical to SEQ ID NO: 8418
  Cyclic GFR-binding peptide
  MOD_RES (1), (32): Xaa is C or S

SEQ ID NO: 48180 - protein, 24 aa, Artificial Sequence
  Cyclic GFR-binding peptide
QALSPISILYKVGRKPKVLKYHYM

SEQ ID NO: 48181 - protein, 33 aa, Artificial Sequence
  Cyclic GFR-binding peptide
  MOD_RES (3), (4): Xaa is C or S
SPXXVPQDLNAISILYFVGRTPKVLKKYRMVVK

SEQ ID NO: 48182 - protein, 26 aa, Artificial Sequence
  Cyclic GFR-binding peptide
PTQLSPISVLYKDDSSNVILKYHYNM

SEQ ID NO: 48183 - protein, 30 aa, Artificial Sequence
  Cyclic GFR-binding peptide
  MOD_RES (3), (4): Xaa is C or S
KPXXAPTKLSPISVLYKDDSSNVILKYHYN

SEQ ID NO: 48184 - protein, 33 aa, Artificial Sequence
  Cyclic GFR-binding peptide
  MOD_RES (4), (5): Xaa is C or S
ASPXXVSQDLSATSILYYIGKTPKILRKHRMIV

SEQ ID NO: 48185 - protein, 26 aa, Artificial Sequence
  Cyclic GFR-binding peptide
TKLSAISVLYLDDSSNVILKNYQNMV

SEQ ID NO: 48186 - protein, 31 aa, Artificial Sequence
  Cyclic GFR-binding peptide
QVQLSAISVLYLEIVRKKPIFLKNYQTLEDH

SEQ ID NO: 48187 - protein, 23 aa, Artificial Sequence
  Cyclic GFR-binding peptide
SATSILYYVGRTPKVLRKHRMVV

SEQ ID NO: 48188 - protein, 23 aa, Artificial Sequence
  Cyclic GFR-binding peptide
SATSMLYYDENEKVVLRKHRDMV

SEQ ID NO: 48189 - protein, 31 aa, Artificial Sequence; identical to SEQ ID NO: 8427
  Cyclic GFR-binding peptide
  MOD_RES (31), (31): Xaa is C or S

SEQ ID NO: 48190 - protein, 41 aa, Artificial Sequence; identical to SEQ ID NO: 8428
  Cyclic GFR-binding peptide
  MOD_RES (6), (7), (38), (40): Xaa is C or S

SEQ ID NO: 48191 - protein, 28 aa, Artificial Sequence
  Cyclic GFR-binding peptide
QDLSPISILYKVGRTPKVLKYHYMVVKS

SEQ ID NO: 48192 - protein, 31 aa, Artificial Sequence
  Cyclic GFR-binding peptide
  MOD_RES (2), (3): Xaa is C or S
PXXVPQALNAISILYFVGRKPKVLKKYRMIV

SEQ ID NO: 48193 - protein, 33 aa, Artificial Sequence
  Cyclic GFR-binding peptide
  MOD_RES (4), (4): Xaa is C or S
KPTXAPTKLSAISVLYLDDSSNVILKNYQNMVV

SEQ ID NO: 48194 - protein, 30 aa, Artificial Sequence
  Cyclic GFR-binding peptide
  MOD_RES (28), (30): Xaa is C or S
LNAISMLYFDENEKVVLKKYRDMVVEGXGX

SEQ ID NO: 48195 - protein, 39 aa, Artificial Sequence; identical to SEQ ID NO: 8431
  Cyclic GFR-binding peptide
  MOD_RES (4), (5), (36), (38): Xaa is C or S

SEQ ID NO: 48196 - protein, 28 aa, Artificial Sequence
  Cyclic GFR-binding peptide
  MOD_RES (1), (1): Xaa is C or S
XVPQALSAISILYLVGRKPKVLKNYQMI

SEQ ID NO: 48197 - protein, 21 aa, Artificial Sequence
  Cyclic GFR-binding peptide
SATSILYYVGRKPKVLRKHRM

SEQ ID NO: 48198 - protein, 34 aa, Artificial Sequence
  Cyclic GFR-binding peptide
  MOD_RES (32), (34): Xaa is C or S
QLSPISVLYKEIVRKKPIFLKYHYTLEDHLAXKX

SEQ ID NO: 48199 - protein, 36 aa, Artificial Sequence; identical to SEQ ID NO: 8432
  Cyclic GFR-binding peptide
  MOD_RES (1), (2), (34), (36): Xaa is C or S

SEQ ID NO: 48200 - protein, 22 aa, Artificial Sequence
  Cyclic GFR-binding peptide
DLSATSILYYIGKTPKILRKHR

SEQ ID NO: 48201 - protein, 33 aa, Artificial Sequence
  Cyclic GFR-binding peptide
  MOD_RES (6), (7): Xaa is C or S
AVPKAXXAPTKLSPISVLYKDSSNNVILKYHYN

SEQ ID NO: 48202 - protein, 37 aa, Artificial Sequence
  Cyclic GFR-binding peptide
  MOD_RES (34), (36): Xaa is C or S
QVQLSPISVLYKEIVRKKPIFLKYHYTLEDHLAXKXE

SEQ ID NO: 48203 - protein, 27 aa, Artificial Sequence
  Cyclic GFR-binding peptide
KLSATSVLYYDDMGVPTLRKHREGMSV

SEQ ID NO: 48204 - protein, 33 aa, Artificial Sequence; identical to SEQ ID NO: 8434
  Cyclic GFR-binding peptide
  MOD_RES (32), (32): Xaa is C or S

SEQ ID NO: 48205 - protein, 33 aa, Artificial Sequence
  Cyclic GFR-binding peptide
  MOD_RES (3), (4): Xaa is C or S
KAXXVPTELSATSMLYYDEYDKVVLRKHREMVV

SEQ ID NO: 48206 - protein, 40 aa, Artificial Sequence; identical to SEQ ID NO: 8437
  Cyclic GFR-binding peptide
  MOD_RES (5), (6), (38), (40): Xaa is C or S

SEQ ID NO: 48207 - protein, 39 aa, Artificial Sequence; identical to SEQ ID NO: 8438
  Cyclic GFR-binding peptide
  MOD_RES (5), (6), (39): Xaa is C or S

SEQ ID NO: 48208 - protein, 32 aa, Artificial Sequence
  Cyclic GFR-binding peptide
  MOD_RES (4), (5): Xaa is C or S
ASPXXVSQDLSPISILYKIGKTPKILKYHYMI

SEQ ID NO: 48209 - protein, 32 aa, Artificial Sequence
  Cyclic GFR-binding peptide
  MOD_RES (29), (31): Xaa is C or S
LSATSVLYYDDMGVPTLRKHREGMSVAEXGXR

SEQ ID NO: 48210 - protein, 27 aa, Artificial Sequence
  Cyclic GFR-binding peptide
ELSATSMLYYDENEKVVLRKHRDMVVE

SEQ ID NO: 48211 - protein, 34 aa, Artificial Sequence; identical to SEQ ID NO: 8439
  Cyclic GFR-binding peptide
  MOD_RES (3), (4): Xaa is C or S

SEQ ID NO: 48212 - protein, 39 aa, Artificial Sequence; identical to SEQ ID NO: 8440
  Cyclic GFR-binding peptide
  MOD_RES (5), (6), (38): Xaa is C or S

SEQ ID NO: 48213 - protein, 31 aa, Artificial Sequence
  Cyclic GFR-binding peptide
  MOD_RES (30), (30): Xaa is C or S
TKLSATSVLYYDDSSNVILRKHRNMVVRSXG

SEQ ID NO: 48214 - protein, 26 aa, Artificial Sequence
  Cyclic GFR-binding peptide
  MOD_RES (1), (1): Xaa is C or S
XVPQALSPISILYKVGRKPKVLKYHY

SEQ ID NO: 48215 - protein, 30 aa, Artificial Sequence
  Cyclic GFR-binding peptide
PTKLSAISVLYLDDSSNVILKNYQNMVVRS

SEQ ID NO: 48216 - protein, 21 aa, Artificial Sequence
  Cyclic GFR-binding peptide
LSATSILYYVGRTPKVLRKHR

SEQ ID NO: 48217 - protein, 31 aa, Artificial Sequence
  Cyclic GFR-binding peptide
  MOD_RES (29), (31): Xaa is C or S
QALNAISILYFVGRKPKVLKKYRMIVRSXKX

SEQ ID NO: 48218 - protein, 25 aa, Artificial Sequence
  Cyclic GFR-binding peptide
SATSVLYYDDSSNVILRKHRNMVVR

SEQ ID NO: 48219 - protein, 24 aa, Artificial Sequence
  Cyclic GFR-binding peptide
TKLSAISVLYLDDMGVPTLKNYQE

SEQ ID NO: 48220 - protein, 22 aa, Artificial Sequence
  Cyclic GFR-binding peptide
LSAISILYLVGRTPKVLKNYQM

SEQ ID NO: 48221 - protein, 32 aa, Artificial Sequence
  Cyclic GFR-binding peptide
  MOD_RES (3), (4): Xaa is C or S
KAXXVPTELSATSMLYYDEYDKVVLRKHREMV

SEQ ID NO: 48222 - protein, 36 aa, Artificial Sequence; identical to SEQ ID NO: 8447
  Cyclic GFR-binding peptide
  MOD_RES (5), (6): Xaa is C or S

SEQ ID NO: 48223 - protein, 30 aa, Artificial Sequence
  Cyclic GFR-binding peptide
  MOD_RES (30), (30): Xaa is C or S
TQLSATSVLYYDDSSNVILRKHRNMVVRAX

SEQ ID NO: 48224 - protein, 24 aa, Artificial Sequence
  Cyclic GFR-binding peptide
DLSATSILYYIGKTPKILRKHRMI

SEQ ID NO: 48225 - protein, 28 aa, Artificial Sequence
  Cyclic GFR-binding peptide
  MOD_RES (2), (3): Xaa is C or S
AXXVPTKLSATSVLYYDDMGVPTLRKHR

SEQ ID NO: 48226 - protein, 34 aa, Artificial Sequence
  Cyclic GFR-binding peptide
  MOD_RES (4), (5): Xaa is C or S
ASPXXVPQDLSATSILYYVGRTPKVLRKHRMVVK

SEQ ID NO: 48227 - protein, 26 aa, Artificial Sequence
  Cyclic GFR-binding peptide
PTQLSATSVLYYDDSSNVILRKHRNM

SEQ ID NO: 48228 - protein, 33 aa, Artificial Sequence; identical to SEQ ID NO: 8451
  Cyclic GFR-binding peptide
  MOD_RES (31), (33): Xaa is C or S

SEQ ID NO: 48229 - protein, 29 aa, Artificial Sequence
  Cyclic GFR-binding peptide
  MOD_RES (1), (1): Xaa is C or S
XVPTKLNAISVLYFDDMGVPTLKKYREGM

SEQ ID NO: 48230 - protein, 29 aa, Artificial Sequence
  Cyclic GFR-binding peptide
  MOD_RES (28), (28): Xaa is C or S
LSPISMLYKDENEKVVLKYHYDMVVEGXG

SEQ ID NO: 48231 - protein, 34 aa, Artificial Sequence
  Cyclic GFR-binding peptide
  MOD_RES (6), (7): Xaa is C or S
KIPKAXXVPTELSATSMLYYDENEKVVLRKHRDM

SEQ ID NO: 48232 - protein, 32 aa, Artificial Sequence
  Cyclic GFR-binding peptide
  MOD_RES (4), (4): Xaa is C or S
KPTXAPTKLSATSVLYYDDSSNVILRKHRNMV

SEQ ID NO: 48233 - protein, 30 aa, Artificial Sequence
  Cyclic GFR-binding peptide
  MOD_RES (29), (29): Xaa is C or S
QALSPISILYKVGRKPKVLKYHYMIVRSXK

SEQ ID NO: 48234 - protein, 28 aa, Artificial Sequence
  Cyclic GFR-binding peptide
  MOD_RES (1), (1): Xaa is C or S
XVPQDLSATSILYYVGRTPKVLRKHRMV

SEQ ID NO: 48235 - protein, 41 aa, Artificial Sequence; identical to SEQ ID NO: 8453
  Cyclic GFR-binding peptide
  MOD_RES (5), (6), (38), (40): Xaa is C or S

SEQ ID NO: 48236 - protein, 36 aa, Artificial Sequence
  Cyclic GFR-binding peptide
  MOD_RES (6), (7): Xaa is C or S
AVPKAXXAPTKLSAISVLYLDSSNNVILKNYQNMVV

SEQ ID NO: 48237 - protein, 35 aa, Artificial Sequence
  Cyclic GFR-binding peptide
  MOD_RES (6), (7): Xaa is C or S
ASASPXXVSQDLSPISILYKIGKTPKILKYHYMIV

SEQ ID NO: 48238 - protein, 27 aa, Artificial Sequence
  Cyclic GFR-binding peptide
VPTELSATSMLYYDENEKVVLRKHRDM

SEQ ID NO: 48239 - protein, 27 aa, Artificial Sequence
  Cyclic GFR-binding peptide
  MOD_RES (1), (1): Xaa is C or S
XVPQDLNAISILYFVGRTPKVLKKYRM

SEQ ID NO: 48240 - protein, 39 aa, Artificial Sequence; identical to SEQ ID NO: 8456
  Cyclic GFR-binding peptide
  MOD_RES (5), (37), (39): Xaa is C or S

SEQ ID NO: 48241 - protein, 33 aa, Artificial Sequence
  Cyclic GFR-binding peptide
  MOD_RES (4), (5): Xaa is C or S
ASPXXVPQDLSAISILYLVGRTPKVLKNYQMVV

SEQ ID NO: 48242 - protein, 34 aa, Artificial Sequence
  Cyclic GFR-binding peptide
  MOD_RES (6), (7): Xaa is C or S
KIPKAXXVPTELSPISMLYKDENEKVVLKYHYDM

SEQ ID NO: 48243 - protein, 25 aa, Artificial Sequence
  Cyclic GFR-binding peptide
PQALSPISILYKVGRKPKVLKYHYM

SEQ ID NO: 48244 - protein, 29 aa, Artificial Sequence
  Cyclic GFR-binding peptide
  MOD_RES (3), (4): Xaa is C or S
KPXXAPTQLSPISVLYKDDSSNVILKYHY

SEQ ID NO: 48245 - protein, 33 aa, Artificial Sequence; identical to SEQ ID NO: 8459
  Cyclic GFR-binding peptide
  MOD_RES (32), (32): Xaa is C or S

SEQ ID NO: 48246 - protein, 30 aa, Artificial Sequence
  Cyclic GFR-binding peptide
  MOD_RES (2), (3): Xaa is C or S
PXXVPQALSATSILYYVGRKPKVLRKHRMI

SEQ ID NO: 48247 - protein, 36 aa, Artificial Sequence; identical to SEQ ID NO: 8461
  Cyclic GFR-binding peptide
  MOD_RES (1), (2), (34), (36): Xaa is C or S

SEQ ID NO: 48248 - protein, 22 aa, Artificial Sequence
  Cyclic GFR-binding peptide
SATSMLYYDEYDKVVLRKHREM

SEQ ID NO: 48249 - protein, 26 aa, Artificial Sequence
  Cyclic GFR-binding peptide
LSATSILYYVGRTPKVLRKHRMVVKS

SEQ ID NO: 48250 - protein, 33 aa, Artificial Sequence
  Cyclic GFR-binding peptide
  MOD_RES (3), (4): Xaa is C or S
KAXXVPTKLSAISVLYLDDMGVPTLKNYQEGMS

SEQ ID NO: 48251 - protein, 32 aa, Artificial Sequence
  Cyclic GFR-binding peptide
  MOD_RES (2), (3): Xaa is C or S
PXXVSQDLSPISILYKIGKTPKILKYHYMIVK

SEQ ID NO: 48252 - protein, 38 aa, Artificial Sequence; identical to SEQ ID NO: 8464
  Cyclic GFR-binding peptide
  MOD_RES (5), (6), (38): Xaa is C or S

SEQ ID NO: 48253 - protein, 40 aa, Artificial Sequence; identical to SEQ ID NO: 8465
  Cyclic GFR-binding peptide
  MOD_RES (4), (4): Xaa is C or S

SEQ ID NO: 48254 - protein, 30 aa, Artificial Sequence
  Cyclic GFR-binding peptide
TKLNAISVLYFDDMGVPTLKKYREGMSVAE

SEQ ID NO: 48255 - protein, 37 aa, Artificial Sequence; identical to SEQ ID NO: 8466
  Cyclic GFR-binding peptide
  MOD_RES (3), (35), (37): Xaa is C or S

SEQ ID NO: 48256 - protein, 33 aa, Artificial Sequence; identical to SEQ ID NO: 8468
  Cyclic GFR-binding peptide
  MOD_RES (1), (32): Xaa is C or S

SEQ ID NO: 48257 - protein, 31 aa, Artificial Sequence
  Cyclic GFR-binding peptide
  MOD_RES (1), (1): Xaa is C or S
XRPTQVQLSAISVLYLEIVRKKPIFLKNYQT

SEQ ID NO: 48258 - protein, 32 aa, Artificial Sequence
  Cyclic GFR-binding peptide
  MOD_RES (4), (5): Xaa is C or S
ASPXXVSQDLSATSILYYIGKTPKILRKHRMI

SEQ ID NO: 48259 - protein, 31 aa, Artificial Sequence
  Cyclic GFR-binding peptide
  MOD_RES (1), (2): Xaa is C or S
XXAPTKLSPISVLYKDSSNNVILKYHYNMVV

SEQ ID NO: 48260 - protein, 24 aa, Artificial Sequence
  Cyclic GFR-binding peptide
PQALSPISILYKVGRKPKVLKYHY

SEQ ID NO: 48261 - protein, 27 aa, Artificial Sequence
  Cyclic GFR-binding peptide
VQLSPISVLYKEIVRKKPIFLKYHYTL

SEQ ID NO: 48262 - protein, 35 aa, Artificial Sequence; identical to SEQ ID NO: 8470
  Cyclic GFR-binding peptide
  MOD_RES (1), (33), (35): Xaa is C or S

SEQ ID NO: 48263 - protein, 33 aa, Artificial Sequence
  Cyclic GFR-binding peptide
  MOD_RES (5), (6): Xaa is C or S
SASPXXVSQDLNAISILYFIGKTPKILKKYRMI

SEQ ID NO: 48264 - protein, 30 aa, Artificial Sequence
  Cyclic GFR-binding peptide
  MOD_RES (1), (2): Xaa is C or S
XXVPQDLSAISILYLVGRTPKVLKNYQMVV

SEQ ID NO: 48265 - protein, 30 aa, Artificial Sequence
  Cyclic GFR-binding peptide
  MOD_RES (30), (30): Xaa is C or S
TKLSAISVLYLDSSNNVILKNYQNMVVKAX

SEQ ID NO: 48266 - protein, 31 aa, Artificial Sequence
  Cyclic GFR-binding peptide
QVQLSPISVLYKEIVRKKPIFLKYHYTLEDH

SEQ ID NO: 48267 - protein, 26 aa, Artificial Sequence
  Cyclic GFR-binding peptide
  MOD_RES (1), (1): Xaa is C or S
XAPTQLSPISVLYKDDSSNVILKYHY

SEQ ID NO: 48268 - protein, 26 aa, Artificial Sequence
  Cyclic GFR-binding peptide
ELSPISMLYKDEYDKVVLKYHYEMVV

SEQ ID NO: 48269 - protein, 27 aa, Artificial Sequence
  Cyclic GFR-binding peptide
  MOD_RES (1), (1): Xaa is C or S
XAPTQLSPISVLYKDDSSNVILKYHYN

SEQ ID NO: 48270 - protein, 37 aa, Artificial Sequence; identical to SEQ ID NO: 8474
  Cyclic GFR-binding peptide
  MOD_RES (3), (4), (36): Xaa is C or S

SEQ ID NO: 48271 - protein, 27 aa, Artificial Sequence
  Cyclic GFR-binding peptide
PTELNAISMLYFDENEKVVLKKYRDMV

SEQ ID NO: 48272 - protein, 34 aa, Artificial Sequence
  Cyclic GFR-binding peptide
  MOD_RES (33), (33): Xaa is C or S
VQLNAISVLYFEIVRKKPIFLKKYRTLEDHLAXK

SEQ ID NO: 48273 - protein, 26 aa, Artificial Sequence
  Cyclic GFR-binding peptide
PTQLSAISVLYLDDSSNVILKNYQNM

SEQ ID NO: 48274 - protein, 29 aa, Artificial Sequence
  Cyclic GFR-binding peptide
  MOD_RES (3), (4): Xaa is C or S
KPXXAPTKLSPISVLYKDDSSNVILKYHY

SEQ ID NO: 48275 - protein, 32 aa, Artificial Sequence
  Cyclic GFR-binding peptide
  MOD_RES (3), (3): Xaa is C or S
VQXRPTQVQLNAISVLYFEIVRKKPIFLKKYR

SEQ ID NO: 48276 - protein, 27 aa, Artificial Sequence
  Cyclic GFR-binding peptide
  MOD_RES (27), (27): Xaa is C or S
LNAISILYFIGKTPKILKKYRMIVKSX

SEQ ID NO: 48277 - protein, 35 aa, Artificial Sequence; identical to SEQ ID NO: 8477
  Cyclic GFR-binding peptide
  MOD_RES (3), (4), (35): Xaa is C or S

SEQ ID NO: 48278 - protein, 29 aa, Artificial Sequence
  Cyclic GFR-binding peptide
  MOD_RES (3), (4): Xaa is C or S
KAXXVPTELSPISMLYKDENEKVVLKYHY

SEQ ID NO: 48279 - protein, 35 aa, Artificial Sequence; identical to SEQ ID NO: 8480
  Cyclic GFR-binding peptide
  MOD_RES (2), (3), (34): Xaa is C or S

SEQ ID NO: 48280 - protein, 35 aa, Artificial Sequence
  Cyclic GFR-binding peptide
  MOD_RES (4), (5): Xaa is C or S
GKAXXVPTKLSAISVLYLDDMGVPTLKNYQEGMSV

SEQ ID NO: 48281 - protein, 32 aa, Artificial Sequence
  Cyclic GFR-binding peptide
  MOD_RES (3), (3): Xaa is C or S
PTXAPTKLSATSVLYYDDSSNVILRKHRNMVV

SEQ ID NO: 48282 - protein, 36 aa, Artificial Sequence; identical to SEQ ID NO: 8481
  Cyclic GFR-binding peptide
  MOD_RES (3), (4), (36): Xaa is C or S

SEQ ID NO: 48283 - protein, 22 aa, Artificial Sequence
  Cyclic GFR-binding peptide
SPISILYKVGRTPKVLKYHYMV

SEQ ID NO: 48284 - protein, 28 aa, Artificial Sequence
  Cyclic GFR-binding peptide
  MOD_RES (27), (27): Xaa is C or S
SPISMLYKDEYDKVVLKYHYEMVVEGXG

SEQ ID NO: 48285 - protein, 34 aa, Artificial Sequence; identical to SEQ ID NO: 8483
  Cyclic GFR-binding peptide

SEQ ID NO: 48286 - protein, 33 aa, Artificial Sequence
  Cyclic GFR-binding peptide
  MOD_RES (6), (7): Xaa is C or S
KVGKAXXVPTKLSATSVLYYDDMGVPTLRKHRE

SEQ ID NO: 48287 - protein, 26 aa, Artificial Sequence
  Cyclic GFR-binding peptide
  MOD_RES (26), (26): Xaa is C or S
SPISILYKIGKTPKILKYHYMIVKSX

SEQ ID NO: 48288 - protein, 41 aa, Artificial Sequence; identical to SEQ ID NO: 8485
  Cyclic GFR-binding peptide
  MOD_RES (6), (7), (38), (40): Xaa is C or S

SEQ ID NO: 48289 - protein, 31 aa, Artificial Sequence; identical to SEQ ID NO: 8486
  Cyclic GFR-binding peptide

SEQ ID NO: 48290 - protein, 27 aa, Artificial Sequence
  Cyclic GFR-binding peptide
NAISVLYFDDMGVPTLKKYREGMSVAE

SEQ ID NO: 48291 - protein, 32 aa, Artificial Sequence
  Cyclic GFR-binding peptide
  MOD_RES (2), (3): Xaa is C or S
PXXVPQDLNAISILYFVGRTPKVLKKYRMVVK

SEQ ID NO: 48292 - protein, 28 aa, Artificial Sequence
  Cyclic GFR-binding peptide
QVQLSAISVLYLEIVRKKPIFLKNYQTL

SEQ ID NO: 48293 - protein, 25 aa, Artificial Sequence
  Cyclic GFR-binding peptide
QDLSPISILYKIGKTPKILKYHYMI

SEQ ID NO: 48294 - protein, 28 aa, Artificial Sequence
  Cyclic GFR-binding peptide
  MOD_RES (2), (3): Xaa is C or S
PXXVPQDLSPISILYKVGRTPKVLKYHY

SEQ ID NO: 48295 - protein, 23 aa, Artificial Sequence
  Cyclic GFR-binding peptide
QDLSAISILYLIGKTPKILKNYQ

SEQ ID NO: 48296 - protein, 25 aa, Artificial Sequence
  Cyclic GFR-binding peptide
TELNAISMLYFDEYDKVVLKKYREM

SEQ ID NO: 48297 - protein, 23 aa, Artificial Sequence
  Cyclic GFR-binding peptide
NAISMLYFDENEKVVLKKYRDMV

SEQ ID NO: 48298 - protein, 38 aa, Artificial Sequence; identical to SEQ ID NO: 8492
  Cyclic GFR-binding peptide
  MOD_RES (3), (4), (35), (37): Xaa is C or S

SEQ ID NO: 48299 - protein, 37 aa, Artificial Sequence; identical to SEQ ID NO: 8493
  Cyclic GFR-binding peptide
  MOD_RES (5), (6): Xaa is C or S

SEQ ID NO: 48300 - protein, 32 aa, Artificial Sequence
  Cyclic GFR-binding peptide
  MOD_RES (1), (1): Xaa is C or S
XVPTKLNAISVLYFDDMGVPTLKKYREGMSVA

SEQ ID NO: 48301 - protein, 37 aa, Artificial Sequence
  Cyclic GFR-binding peptide
  MOD_RES (5), (5): Xaa is C or S
RNVQXRPTQVQLSAISVLYLEIVRKKPIFLKNYQTLE

SEQ ID NO: 48302 - protein, 39 aa, Artificial Sequence; identical to SEQ ID NO: 8494
  Cyclic GFR-binding peptide
  MOD_RES (5), (6), (38): Xaa is C or S

SEQ ID NO: 48303 - protein, 32 aa, Artificial Sequence
  Cyclic GFR-binding peptide
  MOD_RES (5), (6): Xaa is C or S
VPKPXXAPTKLSPISVLYKDDSSNVILKYHYN

SEQ ID NO: 48304 - protein, 29 aa, Artificial Sequence
  Cyclic GFR-binding peptide
SPISVLYKEIVRKKPIFLKYHYTLEDHLA

SEQ ID NO: 48305 - protein, 37 aa, Artificial Sequence; identical to SEQ ID NO: 8497
  Cyclic GFR-binding peptide
  MOD_RES (4), (5), (37): Xaa is C or S

SEQ ID NO: 48306 - protein, 36 aa, Artificial Sequence; identical to SEQ ID NO: 8498
  Cyclic GFR-binding peptide
  MOD_RES (1), (2), (34), (36): Xaa is C or S

SEQ ID NO: 48307 - protein, 33 aa, Artificial Sequence
  Cyclic GFR-binding peptide
  MOD_RES (5), (6): Xaa is C or S
VPKPXXAPTKLSATSVLYYDDSSNVILRKHRNM

SEQ ID NO: 48308 - protein, 29 aa, Artificial Sequence
  Cyclic GFR-binding peptide
  MOD_RES (1), (1): Xaa is C or S
XVPTELSATSMLYYDENEKVVLRKHRDMV

SEQ ID NO: 48309 - protein, 32 aa, Artificial Sequence
  Cyclic GFR-binding peptide
  MOD_RES (4), (5): Xaa is C or S
ASPXXVPQDLSPISILYKVGRTPKVLKYHYMV

SEQ ID NO: 48310 - protein, 27 aa, Artificial Sequence
  Cyclic GFR-binding peptide
  MOD_RES (27), (27): Xaa is C or S
NAISMLYFDENEKVVLKKYRDMVVEGX

SEQ ID NO: 48311 - protein, 33 aa, Artificial Sequence; identical to SEQ ID NO: 8499
  Cyclic GFR-binding peptide
  MOD_RES (1), (1): Xaa is C or S

SEQ ID NO: 48312 - protein, 35 aa, Artificial Sequence; identical to SEQ ID NO: 8500
  Cyclic GFR-binding peptide
  MOD_RES (4), (5): Xaa is C or S

SEQ ID NO: 48313 - protein, 27 aa, Artificial Sequence
  Cyclic GFR-binding peptide
QDLSAISILYLIGKTPKILKNYQMIVK

SEQ ID NO: 48314 - protein, 36 aa, Artificial Sequence; identical to SEQ ID NO: 8501
  Cyclic GFR-binding peptide
  MOD_RES (1), (33), (35): Xaa is C or S

SEQ ID NO: 48315 - protein, 38 aa, Artificial Sequence; identical to SEQ ID NO: 8503
  Cyclic GFR-binding peptide
  MOD_RES (4), (4): Xaa is C or S

SEQ ID NO: 48316 - protein, 31 aa, Artificial Sequence
  Cyclic GFR-binding peptide
  MOD_RES (28), (30): Xaa is C or S
LNAISMLYFDENEKVVLKKYRDMVVEGXGXR

SEQ ID NO: 48317 - protein, 25 aa, Artificial Sequence
  Cyclic GFR-binding peptide
PTKLSAISVLYLDDMGVPTLKNYQE

SEQ ID NO: 48318 - protein, 28 aa, Artificial Sequence
  Cyclic GFR-binding peptide
  MOD_RES (1), (2): Xaa is C or S
XXAPTQLSPISVLYKDDSSNVILKYHYN

SEQ ID NO: 48319 - protein, 38 aa, Artificial Sequence; identical to SEQ ID NO: 8505
  Cyclic GFR-binding peptide
  MOD_RES (5), (6), (37): Xaa is C or S

SEQ ID NO: 48320 - protein, 35 aa, Artificial Sequence
  Cyclic GFR-binding peptide
  MOD_RES (6), (7): Xaa is C or S
SIPKAXXVPTELNAISMLYFDEYDKVVLKKYREMV

SEQ ID NO: 48321 - protein, 25 aa, Artificial Sequence
  Cyclic GFR-binding peptide
SATSILYYIGKTPKILRKHRMIVKS

SEQ ID NO: 48322 - protein, 32 aa, Artificial Sequence
  Cyclic GFR-binding peptide
  MOD_RES (3), (4): Xaa is C or S
SPXXVSQDLSAISILYLIGKTPKILKNYQMIV

SEQ ID NO: 48323 - protein, 33 aa, Artificial Sequence
  Cyclic GFR-binding peptide
  MOD_RES (5), (6): Xaa is C or S
VPKAXXAPTKLSPISVLYKDSSNNVILKYHYNM

SEQ ID NO: 48324 - protein, 31 aa, Artificial Sequence; identical to SEQ ID NO: 8507
  Cyclic GFR-binding peptide
  MOD_RES (1), (1): Xaa is C or S

SEQ ID NO: 48325 - protein, 30 aa, Artificial Sequence
  Cyclic GFR-binding peptide
  MOD_RES (1), (1): Xaa is C or S
XRPTQVQLNAISVLYFEIVRKKPIFLKKYR

SEQ ID NO: 48326 - protein, 34 aa, Artificial Sequence; identical to SEQ ID NO: 8509
  Cyclic GFR-binding peptide
  MOD_RES (1), (2), (34): Xaa is C or S

SEQ ID NO: 48327 - protein, 26 aa, Artificial Sequence
  Cyclic GFR-binding peptide
  MOD_RES (1), (1): Xaa is C or S
XAPTKLNAISVLYFDSSNNVILKKYR

SEQ ID NO: 48328 - protein, 43 aa, Artificial Sequence; identical to SEQ ID NO: 8511
  Cyclic GFR-binding peptide
  MOD_RES (6), (7), (40), (42): Xaa is C or S

SEQ ID NO: 48329 - protein, 33 aa, Artificial Sequence
  Cyclic GFR-binding peptide
RPTQVQLNAISVLYFEIVRKKPIFLKKYRTLED

SEQ ID NO: 48330 - protein, 35 aa, Artificial Sequence
  Cyclic GFR-binding peptide
  MOD_RES (5), (6): Xaa is C or S
VGKAXXVPTKLSAISVLYLDDMGVPTLKNYQEGMS

SEQ ID NO: 48331 - protein, 41 aa, Artificial Sequence; identical to SEQ ID NO: 8512
  Cyclic GFR-binding peptide
  MOD_RES (6), (7), (39), (41): Xaa is C or S

SEQ ID NO: 48332 - protein, 28 aa, Artificial Sequence
  Cyclic GFR-binding peptide
  MOD_RES (1), (2): Xaa is C or S
XXVPTELSPISMLYKDEYDKVVLKYHYE

SEQ ID NO: 48333 - protein, 30 aa, Artificial Sequence
  Cyclic GFR-binding peptide
  MOD_RES (1), (2): Xaa is C or S
XXAPTQLSATSVLYYDDSSNVILRKHRNMV

SEQ ID NO: 48334 - protein, 39 aa, Artificial Sequence; identical to SEQ ID NO: 8514
  Cyclic GFR-binding peptide
  MOD_RES (4), (5), (36), (38): Xaa is C or S

SEQ ID NO: 48335 - protein, 22 aa, Artificial Sequence
  Cyclic GFR-binding peptide
KLNAISVLYFDSSNNVILKKYR

SEQ ID NO: 48336 - protein, 28 aa, Artificial Sequence
  Cyclic GFR-binding peptide
  MOD_RES (28), (28): Xaa is C or S
LSATSMLYYDENEKVVLRKHRDMVVEGX

SEQ ID NO: 48337 - protein, 33 aa, Artificial Sequence; identical to SEQ ID NO: 8516
  Cyclic GFR-binding peptide
  MOD_RES (32), (32): Xaa is C or S

SEQ ID NO: 48338 - protein, 26 aa, Artificial Sequence
  Cyclic GFR-binding peptide
QVQLSAISVLYLEIVRKKPIFLKNYQ

SEQ ID NO: 48339 - protein, 30 aa, Artificial Sequence
  Cyclic GFR-binding peptide
PTQVQLSAISVLYLEIVRKKPIFLKNYQTL

SEQ ID NO: 48340 - protein, 31 aa, Artificial Sequence
  Cyclic GFR-binding peptide
  MOD_RES (29), (31): Xaa is C or S
QLSPISVLYKDDSSNVILKYHYNMVVRAXGX

SEQ ID NO: 48341 - protein, 32 aa, Artificial Sequence
  Cyclic GFR-binding peptide
  MOD_RES (5), (6): Xaa is C or S
IPKAXXVPTELSATSMLYYDEYDKVVLRKHRE

SEQ ID NO: 48342 - protein, 37 aa, Artificial Sequence; identical to SEQ ID NO: 8517
  Cyclic GFR-binding peptide
  MOD_RES (5), (6): Xaa is C or S

SEQ ID NO: 48343 - protein, 21 aa, Artificial Sequence
  Cyclic GFR-binding peptide
LNAISMLYFDEYDKVVLKKYR

SEQ ID NO: 48344 - protein, 27 aa, Artificial Sequence
  Cyclic GFR-binding peptide
  MOD_RES (1), (2): Xaa is C or S
XXVSQDLSPISILYKIGKTPKILKYHY

SEQ ID NO: 48345 - protein, 36 aa, Artificial Sequence; identical to SEQ ID NO: 8520
  Cyclic GFR-binding peptide
  MOD_RES (5), (6): Xaa is C or S

SEQ ID NO: 48346 - protein, 42 aa, Artificial Sequence; identical to SEQ ID NO: 8524
  Cyclic GFR-binding peptide
  MOD_RES (6), (7), (39), (41): Xaa is C or S

SEQ ID NO: 48347 - protein, 31 aa, Artificial Sequence
  Cyclic GFR-binding peptide
  MOD_RES (1), (1): Xaa is C or S
XVPTKLNAISVLYFDDMGVPTLKKYREGMSV

SEQ ID NO: 48348 - protein, 35 aa, Artificial Sequence
  Cyclic GFR-binding peptide
  MOD_RES (5), (6): Xaa is C or S
VPKPXXAPTQLSAISVLYLDDSSNVILKNYQNMVV

SEQ ID NO: 48349 - protein, 35 aa, Artificial Sequence; identical to SEQ ID NO: 8527
  Cyclic GFR-binding peptide
  MOD_RES (4), (5): Xaa is C or S

SEQ ID NO: 48350 - protein, 37 aa, Artificial Sequence; identical to SEQ ID NO: 8528
  Cyclic GFR-binding peptide
  MOD_RES (2), (3), (35), (37): Xaa is C or S

SEQ ID NO: 48351 - protein, 27 aa, Artificial Sequence
  Cyclic GFR-binding peptide
SAISILYLVGRTPKVLKNYQVGRTPKV

SEQ ID NO: 48352 - protein, 25 aa, Artificial Sequence
  Cyclic GFR-binding peptide
PTELSATSMLYYDEYDKVVLRKHRE

SEQ ID NO: 48353 - protein, 33 aa, Artificial Sequence
  Cyclic GFR-binding peptide
  MOD_RES (6), (7): Xaa is C or S
KIPKAXXVPTELSATSMLYYDENEKVVLRKHRD

SEQ ID NO: 48354 - protein, 29 aa, Artificial Sequence
  Cyclic GFR-binding peptide
  MOD_RES (29), (29): Xaa is C or S
ELSATSMLYYDEYDKVVLRKHREMVVEGX

SEQ ID NO: 48355 - protein, 34 aa, Artificial Sequence; identical to SEQ ID NO: 8532
  Cyclic GFR-binding peptide
  MOD_RES (3), (4): Xaa is C or S

SEQ ID NO: 48356 - protein, 33 aa, Artificial Sequence
  Cyclic GFR-binding peptide
  MOD_RES (1), (2): Xaa is C or S
XXVPTKLSAISVLYLDDMGVPTLKNYQEGMSVA

SEQ ID NO: 48357 - protein, 30 aa, Artificial Sequence
  Cyclic GFR-binding peptide
  MOD_RES (4), (5): Xaa is C or S
ASPXXVSQDLSAISILYLIGKTPKILKNYQ

SEQ ID NO: 48358 - protein, 37 aa, Artificial Sequence
  Cyclic GFR-binding peptide
  MOD_RES (6), (7): Xaa is C or S
KVGKAXXVPTKLSAISVLYLDDMGVPTLKNYQEGMSV

SEQ ID NO: 48359 - protein, 34 aa, Artificial Sequence; identical to SEQ ID NO: 8534
  Cyclic GFR-binding peptide

SEQ ID NO: 48360 - protein, 30 aa, Artificial Sequence
  Cyclic GFR-binding peptide
PTQLSATSVLYYDDSSNVILRKHRNMVVRA

SEQ ID NO: 48361 - protein, 31 aa, Artificial Sequence
  Cyclic GFR-binding peptide
  MOD_RES (4), (5): Xaa is C or S
AAPXXVPQALSPISILYKVGRKPKVLKYHYM

SEQ ID NO: 48362 - protein, 24 aa, Artificial Sequence
  Cyclic GFR-binding peptide
LNAISILYFVGRTPKVLKKYRMVV

SEQ ID NO: 48363 - protein, 32 aa, Artificial Sequence
  Cyclic GFR-binding peptide
  MOD_RES (2), (2): Xaa is C or S
QXRPTQVQLNAISVLYFEIVRKKPIFLKKYRT

SEQ ID NO: 48364 - protein, 21 aa, Artificial Sequence
  Cyclic GFR-binding peptide
LSATSILYYVGRKPKVLRKHR

SEQ ID NO: 48365 - protein, 28 aa, Artificial Sequence
  Cyclic GFR-binding peptide
  MOD_RES (28), (28): Xaa is C or S
LSAISVLYLDDSSNVILKNYQNMVVRAX

SEQ ID NO: 48366 - protein, 33 aa, Artificial Sequence
  Cyclic GFR-binding peptide
  MOD_RES (30), (32): Xaa is C or S
SPISVLYKEIVRKKPIFLKYHYTLEDHLAXKXE

SEQ ID NO: 48367 - protein, 32 aa, Artificial Sequence
  Cyclic GFR-binding peptide
  MOD_RES (1), (1): Xaa is C or S
XVPTKLSAISVLYLDDMGVPTLKNYQEGMSVA

SEQ ID NO: 48368 - protein, 29 aa, Artificial Sequence
  Cyclic GFR-binding peptide
PTELSATSMLYYDENEKVVLRKHRDMVVE

SEQ ID NO: 48369 - protein, 32 aa, Artificial Sequence
  Cyclic GFR-binding peptide
  MOD_RES (30), (32): Xaa is C or S
TKLSATSVLYYDDSSNVILRKHRNMVVRSXGX

SEQ ID NO: 48370 - protein, 23 aa, Artificial Sequence
  Cyclic GFR-binding peptide
LSPISVLYKDDSSNVILKYHYNM

SEQ ID NO: 48371 - protein, 25 aa, Artificial Sequence
  Cyclic GFR-binding peptide
VPTELNAISMLYFDEYDKVVLKKYR

SEQ ID NO: 48372 - protein, 29 aa, Artificial Sequence
  Cyclic GFR-binding peptide
PQALSPISILYKVGRKPKVLKYHYMIVRS

SEQ ID NO: 48373 - protein, 34 aa, Artificial Sequence; identical to SEQ ID NO: 8545
  Cyclic GFR-binding peptide
  MOD_RES (1), (2), (34): Xaa is C or S

SEQ ID NO: 48374 - protein, 36 aa, Artificial Sequence; identical to SEQ ID NO: 8544
  Cyclic GFR-binding peptide
  MOD_RES (4), (5), (36): Xaa is C or S

SEQ ID NO: 48375 - protein, 28 aa, Artificial Sequence
  Cyclic GFR-binding peptide
  MOD_RES (1), (2): Xaa is C or S
XXVPTELSATSMLYYDENEKVVLRKHRD

SEQ ID NO: 48376 - protein, 25 aa, Artificial Sequence
  Cyclic GFR-binding peptide
PQDLSAISILYLVGRTPKVLKNYQM

SEQ ID NO: 48377 - protein, 25 aa, Artificial Sequence
  Cyclic GFR-binding peptide
LSPISMLYKDEYDKVVLKYHYEMVV

SEQ ID NO: 48378 - protein, 31 aa, Artificial Sequence
  Cyclic GFR-binding peptide
RPTQVQLSATSVLYYEIVRKKPIFLRKHRTL

SEQ ID NO: 48379 - protein, 37 aa, Artificial Sequence; identical to SEQ ID NO: 8547
  Cyclic GFR-binding peptide
  MOD_RES (4), (5), (36): Xaa is C or S

SEQ ID NO: 48380 - protein, 35 aa, Artificial Sequence
  Cyclic GFR-binding peptide
  MOD_RES (3), (3): Xaa is C or S
VQXRPTQVQLNAISVLYFEIVRKKPIFLKKYRTLE

SEQ ID NO: 48381 - protein, 35 aa, Artificial Sequence
  Cyclic GFR-binding peptide
  MOD_RES (33), (35): Xaa is C or S
VQLSATSVLYYEIVRKKPIFLRKHRTLEDHLAXKX

SEQ ID NO: 48382 - protein, 36 aa, Artificial Sequence; identical to SEQ ID NO: 8549
  Cyclic GFR-binding peptide
  MOD_RES (1), (2), (35): Xaa is C or S

SEQ ID NO: 48383 - protein, 30 aa, Artificial Sequence
  Cyclic GFR-binding peptide
LSPISVLYKEIVRKKPIFLKYHYTLEDHLA

SEQ ID NO: 48384 - protein, 27 aa, Artificial Sequence
  Cyclic GFR-binding peptide
ELNAISMLYFDENEKVVLKKYRDMVVE

SEQ ID NO: 48385 - protein, 41 aa, Artificial Sequence; identical to SEQ ID NO: 8551
  Cyclic GFR-binding peptide
  MOD_RES (4), (5), (38), (40): Xaa is C or S

SEQ ID NO: 48386 - protein, 31 aa, Artificial Sequence
  Cyclic GFR-binding peptide
  MOD_RES (30), (30): Xaa is C or S
PQDLSATSILYYVGRTPKVLRKHRMVVKSXK

SEQ ID NO: 48387 - protein, 25 aa, Artificial Sequence
  Cyclic GFR-binding peptide
PTKLSAISVLYLDDSSNVILKNYQN

SEQ ID NO: 48388 - protein, 24 aa, Artificial Sequence
  Cyclic GFR-binding peptide
KLSAISVLYLDDMGVPTLKNYQEG

SEQ ID NO: 48389 - protein, 42 aa, Artificial Sequence; identical to SEQ ID NO: 8553
  Cyclic GFR-binding peptide
  MOD_RES (2), (39), (41): Xaa is C or S

SEQ ID NO: 48390 - protein, 27 aa, Artificial Sequence
  Cyclic GFR-binding peptide
  MOD_RES (26), (26): Xaa is C or S
SAISILYLVGRKPKVLKNYQMIVRSXK

SEQ ID NO: 48391 - protein, 35 aa, Artificial Sequence; identical to SEQ ID NO: 8554
  Cyclic GFR-binding peptide
  MOD_RES (2), (3), (34): Xaa is C or S

SEQ ID NO: 48392 - protein, 31 aa, Artificial Sequence
  Cyclic GFR-binding peptide
  MOD_RES (2), (2): Xaa is C or S
TXAPTKLSPISVLYKDDSSNVILKYHYNMVV

SEQ ID NO: 48393 - protein, 32 aa, Artificial Sequence; identical to SEQ ID NO: 8556
  Cyclic GFR-binding peptide
  MOD_RES (1), (32): Xaa is C or S

SEQ ID NO: 48394 - protein, 24 aa, Artificial Sequence
  Cyclic GFR-binding peptide
NAISILYFIGKTPKILKKYRMIVK

SEQ ID NO: 48395 - protein, 36 aa, Artificial Sequence; identical to SEQ ID NO: 8557
  Cyclic GFR-binding peptide
  MOD_RES (2), (3), (35): Xaa is C or S

SEQ ID NO: 48396 - protein, 21 aa, Artificial Sequence
  Cyclic GFR-binding peptide
NAISILYFVGRTPKVLKKYRM

SEQ ID NO: 48397 - protein, 40 aa, Artificial Sequence; identical to SEQ ID NO: 8558
  Cyclic GFR-binding peptide
  MOD_RES (6), (38), (40): Xaa is C or S

SEQ ID NO: 48398 - protein, 31 aa, Artificial Sequence
  Cyclic GFR-binding peptide
  MOD_RES (1), (2): Xaa is C or S
XXVPQDLNAISILYFVGRTPKVLKKYRMVVK

SEQ ID NO: 48399 - protein, 23 aa, Artificial Sequence
  Cyclic GFR-binding peptide
LSATSILYYVGRTPKVLRKHRMV

SEQ ID NO: 48400 - protein, 25 aa, Artificial Sequence
  Cyclic GFR-binding peptide
SQDLSATSILYYIGKTPKILRKHRM

SEQ ID NO: 48401 - protein, 22 aa, Artificial Sequence
  Cyclic GFR-binding peptide
QLSPISVLYKDDSSNVILKYHY

SEQ ID NO: 48402 - protein, 31 aa, Artificial Sequence
  Cyclic GFR-binding peptide
  MOD_RES (28), (30): Xaa is C or S
LSATSVLYYDDSSNVILRKHRNMVVRSXGXH

SEQ ID NO: 48403 - protein, 27 aa, Artificial Sequence
  Cyclic GFR-binding peptide
  MOD_RES (1), (2): Xaa is C or S
XXAPTKLSAISVLYLDSSNNVILKNYQ

SEQ ID NO: 48404 - protein, 29 aa, Artificial Sequence
  Cyclic GFR-binding peptide
KLSAISVLYLDDMGVPTLKNYQEGMSVAE

SEQ ID NO: 48405 - protein, 37 aa, Artificial Sequence; identical to SEQ ID NO: 8561
  Cyclic GFR-binding peptide
  MOD_RES (4), (5): Xaa is C or S

SEQ ID NO: 48406 - protein, 40 aa, Artificial Sequence; identical to SEQ ID NO: 8562
  Cyclic GFR-binding peptide
  MOD_RES (37), (39): Xaa is C or S

SEQ ID NO: 48407 - protein, 39 aa, Artificial Sequence; identical to SEQ ID NO: 8563
  Cyclic GFR-binding peptide
  MOD_RES (3), (4), (36), (38): Xaa is C or S

SEQ ID NO: 48408 - protein, 39 aa, Artificial Sequence; identical to SEQ ID NO: 8564
  Cyclic GFR-binding peptide
  MOD_RES (6), (7), (39): Xaa is C or S

SEQ ID NO: 48409 - protein, 25 aa, Artificial Sequence
  Cyclic GFR-binding peptide
LSAISILYLIGKTPKILKNYQMIVK

SEQ ID NO: 48410 - protein, 38 aa, Artificial Sequence; identical to SEQ ID NO: 8565
  Cyclic GFR-binding peptide
  MOD_RES (35), (37): Xaa is C or S

SEQ ID NO: 48411 - protein, 23 aa, Artificial Sequence
  Cyclic GFR-binding peptide
SPISILYKVGRKPKVLKYHYMIV

SEQ ID NO: 48412 - protein, 29 aa, Artificial Sequence
  Cyclic GFR-binding peptide
  MOD_RES (29), (29): Xaa is C or S
KLSAISVLYLDDSSNVILKNYQNMVVRSX

SEQ ID NO: 48413 - protein, 23 aa, Artificial Sequence
  Cyclic GFR-binding peptide
TQLSPISVLYKDDSSNVILKYHY

SEQ ID NO: 48414 - protein, 30 aa, Artificial Sequence
  Cyclic GFR-binding peptide
  MOD_RES (30), (30): Xaa is C or S
TELSPISMLYKDENEKVVLKYHYDMVVEGX

SEQ ID NO: 48415 - protein, 25 aa, Artificial Sequence
  Cyclic GFR-binding peptide
KLNAISVLYFDSSNNVILKKYRNMV

SEQ ID NO: 48416 - protein, 32 aa, Artificial Sequence; identical to SEQ ID NO: 8568
  Cyclic GFR-binding peptide
  MOD_RES (1), (32): Xaa is C or S

SEQ ID NO: 48417 - protein, 31 aa, Artificial Sequence
  Cyclic GFR-binding peptide
  MOD_RES (31), (31): Xaa is C or S
PTKLSATSVLYYDDSSNVILRKHRNMVVRSX

SEQ ID NO: 48418 - protein, 37 aa, Artificial Sequence; identical to SEQ ID NO: 8569
  Cyclic GFR-binding peptide
  MOD_RES (5), (6): Xaa is C or S

SEQ ID NO: 48419 - protein, 33 aa, Artificial Sequence
  Cyclic GFR-binding peptide
  MOD_RES (3), (4): Xaa is C or S
KAXXAPTKLNAISVLYFDSSNNVILKKYRNMVV

SEQ ID NO: 48420 - protein, 26 aa, Artificial Sequence
  Cyclic GFR-binding peptide
TKLSPISVLYKDDSSNVILKYHYNMV

SEQ ID NO: 48421 - protein, 33 aa, Artificial Sequence
  Cyclic GFR-binding peptide
  MOD_RES (30), (32): Xaa is C or S
PQALSAISILYLVGRKPKVLKNYQMIVRSXKXS

SEQ ID NO: 48422 - protein, 24 aa, Artificial Sequence
  Cyclic GFR-binding peptide
LSPISVLYKDSSNNVILKYHYNMV

SEQ ID NO: 48423 - protein, 26 aa, Artificial Sequence
  Cyclic GFR-binding peptide
  MOD_RES (1), (1): Xaa is C or S
XVSQDLSATSILYYIGKTPKILRKHR

SEQ ID NO: 48424 - protein, 39 aa, Artificial Sequence; identical to SEQ ID NO: 8571
  Cyclic GFR-binding peptide
  MOD_RES (3), (4), (37), (39): Xaa is C or S

SEQ ID NO: 48425 - protein, 34 aa, Artificial Sequence
  Cyclic GFR-binding peptide
  MOD_RES (5), (6): Xaa is C or S
VPKPXXAPTKLSAISVLYLDDSSNVILKNYQNMV

SEQ ID NO: 48426 - protein, 31 aa, Artificial Sequence
  Cyclic GFR-binding peptide
  MOD_RES (28), (30): Xaa is C or S
SAISVLYLDDMGVPTLKNYQEGMSVAEXGXR

SEQ ID NO: 48427 - protein, 34 aa, Artificial Sequence; identical to SEQ ID NO: 8574
  Cyclic GFR-binding peptide

SEQ ID NO: 48428 - protein, 35 aa, Artificial Sequence
  Cyclic GFR-binding peptide
  MOD_RES (5), (6): Xaa is C or S
SASPXXVSQDLSATSILYYIGKTPKILRKHRMIVK

SEQ ID NO: 48429 - protein, 34 aa, Artificial Sequence; identical to SEQ ID NO: 8575
  Cyclic GFR-binding peptide
  MOD_RES (32), (34): Xaa is C or S

SEQ ID NO: 48430 - protein, 34 aa, Artificial Sequence
  Cyclic GFR-binding peptide
  MOD_RES (6), (7): Xaa is C or S
ASAAPXXVPQALNAISILYFVGRKPKVLKKYRMI

SEQ ID NO: 48431 - protein, 31 aa, Artificial Sequence; identical to SEQ ID NO: 8579
  Cyclic GFR-binding peptide
  MOD_RES (31), (31): Xaa is C or S

SEQ ID NO: 48432 - protein, 30 aa, Artificial Sequence
  Cyclic GFR-binding peptide
  MOD_RES (4), (5): Xaa is C or S
ASPXXVPQDLSPISILYKVGRTPKVLKYHY

SEQ ID NO: 48433 - protein, 30 aa, Artificial Sequence
  Cyclic GFR-binding peptide
  MOD_RES (1), (2): Xaa is C or S
XXVPTKLSAISVLYLDDMGVPTLKNYQEGM

SEQ ID NO: 48434 - protein, 36 aa, Artificial Sequence; identical to SEQ ID NO: 8580
  Cyclic GFR-binding peptide
  MOD_RES (2), (3), (35): Xaa is C or S

SEQ ID NO: 48435 - protein, 39 aa, Artificial Sequence; identical to SEQ ID NO: 8581
  Cyclic GFR-binding peptide
  MOD_RES (6), (7), (39): Xaa is C or S

SEQ ID NO: 48436 - protein, 30 aa, Artificial Sequence
  Cyclic GFR-binding peptide
  MOD_RES (3), (4): Xaa is C or S
KAXXVPTELSATSMLYYDENEKVVLRKHRD

SEQ ID NO: 48437 - protein, 34 aa, Artificial Sequence; identical to SEQ ID NO: 8582
  Cyclic GFR-binding peptide
  MOD_RES (31), (33): Xaa is C or S

SEQ ID NO: 48438 - protein, 34 aa, Artificial Sequence
  Cyclic GFR-binding peptide
  MOD_RES (5), (6): Xaa is C or S
SASPXXVPQDLSPISILYKVGRTPKVLKYHYMVV

SEQ ID NO: 48439 - protein, 30 aa, Artificial Sequence; identical to SEQ ID NO: 8583
  Cyclic GFR-binding peptide

SEQ ID NO: 48440 - protein, 25 aa, Artificial Sequence
  Cyclic GFR-binding peptide
LSAISVLYLDDSSNVILKNYQNMVV

SEQ ID NO: 48441 - protein, 23 aa, Artificial Sequence
  Cyclic GFR-binding peptide
TKLNAISVLYFDDMGVPTLKKYR

SEQ ID NO: 48442 - protein, 38 aa, Artificial Sequence; identical to SEQ ID NO: 8584
  Cyclic GFR-binding peptide
  MOD_RES (5), (6), (37): Xaa is C or S

SEQ ID NO: 48443 - protein, 38 aa, Artificial Sequence; identical to SEQ ID NO: 8585
  Cyclic GFR-binding peptide
  MOD_RES (6), (7): Xaa is C or S

SEQ ID NO: 48444 - protein, 33 aa, Artificial Sequence
  Cyclic GFR-binding peptide
  MOD_RES (30), (32): Xaa is C or S
TELNAISMLYFDENEKVVLKKYRDMVVEGXGXR

SEQ ID NO: 48445 - protein, 38 aa, Artificial Sequence; identical to SEQ ID NO: 8586
  Cyclic GFR-binding peptide
  MOD_RES (4), (5), (36), (38): Xaa is C or S

SEQ ID NO: 48446 - protein, 31 aa, Artificial Sequence; identical to SEQ ID NO: 8587
  Cyclic GFR-binding peptide

SEQ ID NO: 48447 - protein, 35 aa, Artificial Sequence; identical to SEQ ID NO: 8589
  Cyclic GFR-binding peptide
  MOD_RES (3), (4), (35): Xaa is C or S

SEQ ID NO: 48448 - protein, 28 aa, Artificial Sequence
  Cyclic GFR-binding peptide
  MOD_RES (26), (28): Xaa is C or S
SPISILYKVGRTPKVLKYHYMVVKSXKX

SEQ ID NO: 48449 - protein, 21 aa, Artificial Sequence
  Cyclic GFR-binding peptide
LSATSMLYYDENEKVVLRKHR

SEQ ID NO: 48450 - protein, 31 aa, Artificial Sequence
  Cyclic GFR-binding peptide
  MOD_RES (5), (6): Xaa is C or S
VGKAXXVPTKLNAISVLYFDDMGVPTLKKYR

SEQ ID NO: 48451 - protein, 40 aa, Artificial Sequence; identical to SEQ ID NO: 8592
  Cyclic GFR-binding peptide
  MOD_RES (4), (5), (37), (39): Xaa is C or S

SEQ ID NO: 48452 - protein, 23 aa, Artificial Sequence
  Cyclic GFR-binding peptide
LSATSMLYYDENEKVVLRKHRDM

SEQ ID NO: 48453 - protein, 21 aa, Artificial Sequence
  Cyclic GFR-binding peptide
SAISVLYLDSSNNVILKNYQN

SEQ ID NO: 48454 - protein, 36 aa, Artificial Sequence; identical to SEQ ID NO: 8595
  Cyclic GFR-binding peptide
  MOD_RES (35), (35): Xaa is C or S

SEQ ID NO: 48455 - protein, 38 aa, Artificial Sequence; identical to SEQ ID NO: 8596
  Cyclic GFR-binding peptide
  MOD_RES (2), (3), (35), (37): Xaa is C or S

SEQ ID NO: 48456 - protein, 34 aa, Artificial Sequence
  Cyclic GFR-binding peptide
  MOD_RES (1), (1): Xaa is C or S
XRPTQVQLSAISVLYLEIVRKKPIFLKNYQTLED

SEQ ID NO: 48457 - protein, 34 aa, Artificial Sequence; identical to SEQ ID NO: 8598
  Cyclic GFR-binding peptide
  MOD_RES (1), (33): Xaa is C or S

SEQ ID NO: 48458 - protein, 27 aa, Artificial Sequence
  Cyclic GFR-binding peptide
SAISVLYLDDMGVPTLKNYQEGMSVAE

SEQ ID NO: 48459 - protein, 32 aa, Artificial Sequence
  Cyclic GFR-binding peptide
  MOD_RES (30), (32): Xaa is C or S
TQLSATSVLYYDDSSNVILRKHRNMVVRAXGX

SEQ ID NO: 48460 - protein, 25 aa, Artificial Sequence
  Cyclic GFR-binding peptide
VPTELSPISMLYKDENEKVVLKYHY

SEQ ID NO: 48461 - protein, 28 aa, Artificial Sequence
  Cyclic GFR-binding peptide
  MOD_RES (1), (1): Xaa is C or S
XVPQALSATSILYYVGRKPKVLRKHRMI

SEQ ID NO: 48462 - protein, 39 aa, Artificial Sequence; identical to SEQ ID NO: 8601
  Cyclic GFR-binding peptide
  MOD_RES (7), (39): Xaa is C or S

SEQ ID NO: 48463 - protein, 39 aa, Artificial Sequence; identical to SEQ ID NO: 8602
  Cyclic GFR-binding peptide
  MOD_RES (3), (4), (36), (38): Xaa is C or S

SEQ ID NO: 48464 - protein, 45 aa, Artificial Sequence; identical to SEQ ID NO: 8603
  Cyclic GFR-binding peptide
  MOD_RES (5), (42), (44): Xaa is C or S

SEQ ID NO: 48465 - protein, 34 aa, Artificial Sequence; identical to SEQ ID NO: 8604
  Cyclic GFR-binding peptide
  MOD_RES (3), (4): Xaa is C or S

SEQ ID NO: 48466 - protein, 24 aa, Artificial Sequence
  Cyclic GFR-binding peptide
KLNAISVLYFDDMGVPTLKKYREG

SEQ ID NO: 48467 - protein, 25 aa, Artificial Sequence
  Cyclic GFR-binding peptide
SAISVLYLEIVRKKPIFLKNYQTLE

SEQ ID NO: 48468 - protein, 27 aa, Artificial Sequence
  Cyclic GFR-binding peptide
PQDLSAISILYLVGRTPKVLKNYQMVV

SEQ ID NO: 48469 - protein, 36 aa, Artificial Sequence; identical to SEQ ID NO: 8606
  Cyclic GFR-binding peptide
  MOD_RES (3), (4), (35): Xaa is C or S

SEQ ID NO: 48470 - protein, 37 aa, Artificial Sequence; identical to SEQ ID NO: 8607
  Cyclic GFR-binding peptide
  MOD_RES (1), (2), (34), (36): Xaa is C or S

SEQ ID NO: 48471 - protein, 27 aa, Artificial Sequence
  Cyclic GFR-binding peptide
  MOD_RES (1), (1): Xaa is C or S
XVPTELSPISMLYKDEYDKVVLKYHYE

SEQ ID NO: 48472 - protein, 29 aa, Artificial Sequence
  Cyclic GFR-binding peptide
PQALSAISILYLVGRKPKVLKNYQMIVRS

SEQ ID NO: 48473 - protein, 30 aa, Artificial Sequence
  Cyclic GFR-binding peptide
  MOD_RES (30), (30): Xaa is C or S
TELNAISMLYFDENEKVVLKKYRDMVVEGX

SEQ ID NO: 48474 - protein, 29 aa, Artificial Sequence
  Cyclic GFR-binding peptide
NAISVLYFEIVRKKPIFLKKYRTLEDHLA

SEQ ID NO: 48475 - protein, 36 aa, Artificial Sequence; identical to SEQ ID NO: 8608
  Cyclic GFR-binding peptide
  MOD_RES (1), (2), (34), (36): Xaa is C or S

SEQ ID NO: 48476 - protein, 22 aa, Artificial Sequence
  Cyclic GFR-binding peptide
DLSPISILYKIGKTPKILKYHY

SEQ ID NO: 48477 - protein, 35 aa, Artificial Sequence; identical to SEQ ID NO: 8610
  Cyclic GFR-binding peptide
  MOD_RES (2), (3), (34): Xaa is C or S

SEQ ID NO: 48478 - protein, 29 aa, Artificial Sequence
  Cyclic GFR-binding peptide
VSQDLSATSILYYIGKTPKILRKHRMIVK

SEQ ID NO: 48479 - protein, 39 aa, Artificial Sequence; identical to SEQ ID NO: 8611
  Cyclic GFR-binding peptide
  MOD_RES (5), (6), (38): Xaa is C or S

SEQ ID NO: 48480 - protein, 33 aa, Artificial Sequence
  Cyclic GFR-binding peptide
  MOD_RES (33), (33): Xaa is C or S
VQLSATSVLYYEIVRKKPIFLRKHRTLEDHLAX

SEQ ID NO: 48481 - protein, 28 aa, Artificial Sequence
  Cyclic GFR-binding peptide
LSPISVLYKEIVRKKPIFLKYHYTLEDH

SEQ ID NO: 48482 - protein, 35 aa, Artificial Sequence
  Cyclic GFR-binding peptide
  MOD_RES (6), (7): Xaa is C or S
TVPKPXXAPTQLSAISVLYLDDSSNVILKNYQNMV

SEQ ID NO: 48483 - protein, 37 aa, Artificial Sequence; identical to SEQ ID NO: 8615
  Cyclic GFR-binding peptide
  MOD_RES (5), (6): Xaa is C or S

SEQ ID NO: 48484 - protein, 39 aa, Artificial Sequence; identical to SEQ ID NO: 8618
  Cyclic GFR-binding peptide
  MOD_RES (6), (7), (38): Xaa is C or S

SEQ ID NO: 48485 - protein, 27 aa, Artificial Sequence
  Cyclic GFR-binding peptide
VPQALNAISILYFVGRKPKVLKKYRMI

SEQ ID NO: 48486 - protein, 32 aa, Artificial Sequence; identical to SEQ ID NO: 8619
  Cyclic GFR-binding peptide

SEQ ID NO: 48487 - protein, 28 aa, Artificial Sequence
  Cyclic GFR-binding peptide
  MOD_RES (26), (28): Xaa is C or S
NAISILYFIGKTPKILKKYRMIVKSXKX

SEQ ID NO: 48488 - protein, 35 aa, Artificial Sequence; identical to SEQ ID NO: 8620
  Cyclic GFR-binding peptide
  MOD_RES (1), (2), (34): Xaa is C or S

SEQ ID NO: 48489 - protein, 31 aa, Artificial Sequence
  Cyclic GFR-binding peptide
  MOD_RES (31), (31): Xaa is C or S
PTQLSPISVLYKDDSSNVILKYHYNMVVRAX

SEQ ID NO: 48490 - protein, 37 aa, Artificial Sequence; identical to SEQ ID NO: 8622
  Cyclic GFR-binding peptide
  MOD_RES (6), (7): Xaa is C or S

SEQ ID NO: 48491 - protein, 36 aa, Artificial Sequence; identical to SEQ ID NO: 8624
  Cyclic GFR-binding peptide
  MOD_RES (5), (5): Xaa is C or S

SEQ ID NO: 48492 - protein, 37 aa, Artificial Sequence; identical to SEQ ID NO: 8625
  Cyclic GFR-binding peptide
  MOD_RES (2), (3), (34), (36): Xaa is C or S

SEQ ID NO: 48493 - protein, 34 aa, Artificial Sequence; identical to SEQ ID NO: 8626
  Cyclic GFR-binding peptide
  MOD_RES (2), (3): Xaa is C or S

SEQ ID NO: 48494 - protein, 32 aa, Artificial Sequence
  Cyclic GFR-binding peptide
  MOD_RES (29), (31): Xaa is C or S
QDLSAISILYLVGRTPKVLKNYQMVVKSXKXS

SEQ ID NO: 48495 - protein, 25 aa, Artificial Sequence
  Cyclic GFR-binding peptide
TKLSATSVLYYDDMGVPTLRKHREG

SEQ ID NO: 48496 - protein, 34 aa, Artificial Sequence
  Cyclic GFR-binding peptide
  MOD_RES (5), (6): Xaa is C or S
VGKAXXVPTKLSAISVLYLDDMGVPTLKNYQEGM

SEQ ID NO: 48497 - protein, 34 aa, Artificial Sequence
  Cyclic GFR-binding peptide
  MOD_RES (6), (7): Xaa is C or S
ASAAPXXVPQALSAISILYLVGRKPKVLKNYQMI

SEQ ID NO: 48498 - protein, 25 aa, Artificial Sequence
  Cyclic GFR-binding peptide
QLSAISVLYLDDSSNVILKNYQNMV

SEQ ID NO: 48499 - protein, 40 aa, Artificial Sequence; identical to SEQ ID NO: 8630
  Cyclic GFR-binding peptide
  MOD_RES (6), (7), (39): Xaa is C or S

SEQ ID NO: 48500 - protein, 32 aa, Artificial Sequence; identical to SEQ ID NO: 8631
  Cyclic GFR-binding peptide
  MOD_RES (1), (2): Xaa is C or S

SEQ ID NO: 48501 - protein, 26 aa, Artificial Sequence
  Cyclic GFR-binding peptide
QDLSATSILYYIGKTPKILRKHRMIV

SEQ ID NO: 48502 - protein, 30 aa, Artificial Sequence
  Cyclic GFR-binding peptide
  MOD_RES (1), (2): Xaa is C or S
XXAPTKLNAISVLYFDSSNNVILKKYRNMV

SEQ ID NO: 48503 - protein, 28 aa, Artificial Sequence
  Cyclic GFR-binding peptide
VPTELSATSMLYYDEYDKVVLRKHREMV

SEQ ID NO: 48504 - protein, 27 aa, Artificial Sequence
  Cyclic GFR-binding peptide
  MOD_RES (1), (1): Xaa is C or S
XVPTELSATSMLYYDENEKVVLRKHRD

SEQ ID NO: 48505 - protein, 28 aa, Artificial Sequence
  Cyclic GFR-binding peptide
VSQDLSATSILYYIGKTPKILRKHRMIV

SEQ ID NO: 48506 - protein, 29 aa, Artificial Sequence
  Cyclic GFR-binding peptide
  MOD_RES (27), (29): Xaa is C or S
SATSVLYYDDSSNVILRKHRNMVVRSXGX

SEQ ID NO: 48507 - protein, 37 aa, Artificial Sequence; identical to SEQ ID NO: 8634
  Cyclic GFR-binding peptide
  MOD_RES (2), (2): Xaa is C or S

SEQ ID NO: 48508 - protein, 41 aa, Artificial Sequence; identical to SEQ ID NO: 8637
  Cyclic GFR-binding peptide
  MOD_RES (6), (7), (38), (40): Xaa is C or S

SEQ ID NO: 48509 - protein, 33 aa, Artificial Sequence
  Cyclic GFR-binding peptide
  MOD_RES (5), (6): Xaa is C or S
VGKAXXVPTKLNAISVLYFDDMGVPTLKKYREG

SEQ ID NO: 48510 - protein, 35 aa, Artificial Sequence; identical to SEQ ID NO: 8638
  Cyclic GFR-binding peptide
  MOD_RES (4), (5): Xaa is C or S

SEQ ID NO: 48511 - protein, 35 aa, Artificial Sequence; identical to SEQ ID NO: 8639
  Cyclic GFR-binding peptide
  MOD_RES (1), (2), (34): Xaa is C or S

SEQ ID NO: 48512 - protein, 36 aa, Artificial Sequence; identical to SEQ ID NO: 8640
  Cyclic GFR-binding peptide
  MOD_RES (1), (33), (35): Xaa is C or S

SEQ ID NO: 48513 - protein, 30 aa, Artificial Sequence
  Cyclic GFR-binding peptide
  MOD_RES (2), (3): Xaa is C or S
AXXVPTELNAISMLYFDEYDKVVLKKYREM

SEQ ID NO: 48514 - protein, 28 aa, Artificial Sequence
  Cyclic GFR-binding peptide
  MOD_RES (2), (3): Xaa is C or S
AXXAPTKLSAISVLYLDSSNNVILKNYQ

SEQ ID NO: 48515 - protein, 30 aa, Artificial Sequence
  Cyclic GFR-binding peptide
QVQLSAISVLYLEIVRKKPIFLKNYQTLED

SEQ ID NO: 48516 - protein, 29 aa, Artificial Sequence
  Cyclic GFR-binding peptide
  MOD_RES (1), (1): Xaa is C or S
XAPTQLSATSVLYYDDSSNVILRKHRNMV

SEQ ID NO: 48517 - protein, 30 aa, Artificial Sequence
  Cyclic GFR-binding peptide
  MOD_RES (4), (5): Xaa is C or S
PKPXXAPTKLSPISVLYKDDSSNVILKYHY

SEQ ID NO: 48518 - protein, 26 aa, Artificial Sequence
  Cyclic GFR-binding peptide
PTKLSPISVLYKDDSSNVILKYHYNM

SEQ ID NO: 48519 - protein, 32 aa, Artificial Sequence
  Cyclic GFR-binding peptide
  MOD_RES (30), (32): Xaa is C or S
SATSVLYYEIVRKKPIFLRKHRTLEDHLAXKX

SEQ ID NO: 48520 - protein, 23 aa, Artificial Sequence
  Cyclic GFR-binding peptide
DLNAISILYFVGRTPKVLKKYRM

SEQ ID NO: 48521 - protein, 26 aa, Artificial Sequence
  Cyclic GFR-binding peptide
NAISMLYFDENEKVVLKKYRDMVVEG

SEQ ID NO: 48522 - protein, 29 aa, Artificial Sequence
  Cyclic GFR-binding peptide
  MOD_RES (1), (1): Xaa is C or S
XVPTELNAISMLYFDEYDKVVLKKYREMV

SEQ ID NO: 48523 - protein, 29 aa, Artificial Sequence
  Cyclic GFR-binding peptide
  MOD_RES (29), (29): Xaa is C or S
QALNAISILYFVGRKPKVLKKYRMIVRSX

SEQ ID NO: 48524 - protein, 23 aa, Artificial Sequence
  Cyclic GFR-binding peptide
LNAISILYFVGRKPKVLKKYRMI

SEQ ID NO: 48525 - protein, 38 aa, Artificial Sequence; identical to SEQ ID NO: 8644
  Cyclic GFR-binding peptide
  MOD_RES (3), (4), (36), (38): Xaa is C or S

SEQ ID NO: 48526 - protein, 34 aa, Artificial Sequence
  Cyclic GFR-binding peptide
  MOD_RES (31), (33): Xaa is C or S
PTELSATSMLYYDENEKVVLRKHRDMVVEGXGXR

SEQ ID NO: 48527 - protein, 30 aa, Artificial Sequence
  Cyclic GFR-binding peptide
RPTQVQLSAISVLYLEIVRKKPIFLKNYQT

SEQ ID NO: 48528 - protein, 31 aa, Artificial Sequence
  Cyclic GFR-binding peptide
  MOD_RES (6), (6): Xaa is C or S
VTKPTXAPTKLSATSVLYYDDSSNVILRKHR

SEQ ID NO: 48529 - protein, 35 aa, Artificial Sequence
  Cyclic GFR-binding peptide
  MOD_RES (5), (6): Xaa is C or S
SAAPXXVPQALSPISILYKVGRKPKVLKYHYMIVR

SEQ ID NO: 48530 - protein, 30 aa, Artificial Sequence
  Cyclic GFR-binding peptide
  MOD_RES (1), (1): Xaa is C or S
XVPQALSPISILYKVGRKPKVLKYHYMIVR

SEQ ID NO: 48531 - protein, 37 aa, Artificial Sequence; identical to SEQ ID NO: 8646
  Cyclic GFR-binding peptide
  MOD_RES (4), (5), (36): Xaa is C or S

SEQ ID NO: 48532 - protein, 33 aa, Artificial Sequence; identical to SEQ ID NO: 8647
  Cyclic GFR-binding peptide
  MOD_RES (1), (2), (33): Xaa is C or S

SEQ ID NO: 48533 - protein, 35 aa, Artificial Sequence
  Cyclic GFR-binding peptide
  MOD_RES (5), (6): Xaa is C or S
IPKAXXVPTELSATSMLYYDENEKVVLRKHRDMVV

SEQ ID NO: 48534 - protein, 31 aa, Artificial Sequence; identical to SEQ ID NO: 8652
  Cyclic GFR-binding peptide

SEQ ID NO: 48535 - protein, 31 aa, Artificial Sequence
  Cyclic GFR-binding peptide
QLNAISVLYFEIVRKKPIFLKKYRTLEDHLA

SEQ ID NO: 48536 - protein, 26 aa, Artificial Sequence
  Cyclic GFR-binding peptide
LSPISMLYKDEYDKVVLKYHYEMVVE

SEQ ID NO: 48537 - protein, 32 aa, Artificial Sequence; identical to SEQ ID NO: 8653
  Cyclic GFR-binding peptide
  MOD_RES (31), (31): Xaa is C or S

SEQ ID NO: 48538 - protein, 36 aa, Artificial Sequence; identical to SEQ ID NO: 8657
  Cyclic GFR-binding peptide
  MOD_RES (3), (4), (35): Xaa is C or S

SEQ ID NO: 48539 - protein, 42 aa, Artificial Sequence; identical to SEQ ID NO: 8659
  Cyclic GFR-binding peptide
  MOD_RES (2), (39), (41): Xaa is C or S

SEQ ID NO: 48540 - protein, 39 aa, Artificial Sequence; identical to SEQ ID NO: 8660
  Cyclic GFR-binding peptide
  MOD_RES (4), (5), (36), (38): Xaa is C or S

SEQ ID NO: 48541 - protein, 30 aa, Artificial Sequence
  Cyclic GFR-binding peptide
  MOD_RES (30), (30): Xaa is C or S
KLSAISVLYLDDMGVPTLKNYQEGMSVAEX

SEQ ID NO: 48542 - protein, 28 aa, Artificial Sequence
  Cyclic GFR-binding peptide
  MOD_RES (26), (28): Xaa is C or S
SATSILYYIGKTPKILRKHRMIVKSXKX

SEQ ID NO: 48543 - protein, 28 aa, Artificial Sequence
  Cyclic GFR-binding peptide
  MOD_RES (26), (28): Xaa is C or S
SPISILYKIGKTPKILKYHYMIVKSXKX

SEQ ID NO: 48544 - protein, 30 aa, Artificial Sequence; identical to SEQ ID NO: 8662
  Cyclic GFR-binding peptide

SEQ ID NO: 48545 - protein, 29 aa, Artificial Sequence
  Cyclic GFR-binding peptide
  MOD_RES (3), (4): Xaa is C or S
KAXXVPTELNAISMLYFDEYDKVVLKKYR

SEQ ID NO: 48546 - protein, 38 aa, Artificial Sequence; identical to SEQ ID NO: 8664
  Cyclic GFR-binding peptide
  MOD_RES (6), (7): Xaa is C or S

SEQ ID NO: 48547 - protein, 22 aa, Artificial Sequence
  Cyclic GFR-binding peptide
SPISVLYKEIVRKKPIFLKYHY

SEQ ID NO: 48548 - protein, 40 aa, Artificial Sequence; identical to SEQ ID NO: 8665
  Cyclic GFR-binding peptide
  MOD_RES (5), (6), (37), (39): Xaa is C or S

SEQ ID NO: 48549 - protein, 37 aa, Artificial Sequence; identical to SEQ ID NO: 8666
  Cyclic GFR-binding peptide
  MOD_RES (4), (36): Xaa is C or S

SEQ ID NO: 48550 - protein, 41 aa, Artificial Sequence; identical to SEQ ID NO: 8667
  Cyclic GFR-binding peptide
  MOD_RES (3), (40): Xaa is C or S

SEQ ID NO: 48551 - protein, 28 aa, Artificial Sequence
  Cyclic GFR-binding peptide
  MOD_RES (27), (27): Xaa is C or S
LNAISILYFVGRKPKVLKKYRMIVRSXK

SEQ ID NO: 48552 - protein, 26 aa, Artificial Sequence
  Cyclic GFR-binding peptide
PTELSATSMLYYDENEKVVLRKHRDM

SEQ ID NO: 48553 - protein, 27 aa, Artificial Sequence
  Cyclic GFR-binding peptide
  MOD_RES (27), (27): Xaa is C or S
SPISMLYKDENEKVVLKYHYDMVVEGX

SEQ ID NO: 48554 - protein, 26 aa, Artificial Sequence
  Cyclic GFR-binding peptide
QLSPISVLYKEIVRKKPIFLKYHYTL

SEQ ID NO: 48555 - protein, 30 aa, Artificial Sequence
  Cyclic GFR-binding peptide
  MOD_RES (27), (29): Xaa is C or S
SPISVLYKDDSSNVILKYHYNMVVRAXGXH

SEQ ID NO: 48556 - protein, 39 aa, Artificial Sequence; identical to SEQ ID NO: 8669
  Cyclic GFR-binding peptide
  MOD_RES (2), (39): Xaa is C or S

SEQ ID NO: 48557 - protein, 24 aa, Artificial Sequence
  Cyclic GFR-binding peptide
PTELNAISMLYFDENEKVVLKKYR

SEQ ID NO: 48558 - protein, 33 aa, Artificial Sequence; identical to SEQ ID NO: 8670
  Cyclic GFR-binding peptide
  MOD_RES (3), (3): Xaa is C or S

SEQ ID NO: 48559 - protein, 29 aa, Artificial Sequence
  Cyclic GFR-binding peptide
VPQALNAISILYFVGRKPKVLKKYRMIVR

SEQ ID NO: 48560 - protein, 28 aa, Artificial Sequence
  Cyclic GFR-binding peptide
  MOD_RES (26), (28): Xaa is C or S
SATSILYYVGRTPKVLRKHRMVVKSXKX

SEQ ID NO: 48561 - protein, 34 aa, Artificial Sequence; identical to SEQ ID NO: 8671
  Cyclic GFR-binding peptide
  MOD_RES (1), (33): Xaa is C or S

SEQ ID NO: 48562 - protein, 32 aa, Artificial Sequence
  Cyclic GFR-binding peptide
  MOD_RES (6), (7): Xaa is C or S
YVPKPXXAPTKLSATSVLYYDDSSNVILRKHR

SEQ ID NO: 48563 - protein, 39 aa, Artificial Sequence; identical to SEQ ID NO: 8672
  Cyclic GFR-binding peptide
  MOD_RES (6), (7), (38): Xaa is C or S

SEQ ID NO: 48564 - protein, 37 aa, Artificial Sequence; identical to SEQ ID NO: 8674
  Cyclic GFR-binding peptide
  MOD_RES (1), (2), (35), (37): Xaa is C or S

SEQ ID NO: 48565 - protein, 26 aa, Artificial Sequence
  Cyclic GFR-binding peptide
  MOD_RES (1), (1): Xaa is C or S
XVPTELNAISMLYFDENEKVVLKKYR

SEQ ID NO: 48566 - protein, 32 aa, Artificial Sequence
  Cyclic GFR-binding peptide
  MOD_RES (29), (31): Xaa is C or S
KLSPISVLYKDSSNNVILKYHYNMVVKAXGXH

SEQ ID NO: 48567 - protein, 27 aa, Artificial Sequence
  Cyclic GFR-binding peptide
PTELNAISMLYFDEYDKVVLKKYREMV

SEQ ID NO: 48568 - protein, 35 aa, Artificial Sequence
  Cyclic GFR-binding peptide
  MOD_RES (6), (7): Xaa is C or S
ASAAPXXVPQALSATSILYYVGRKPKVLRKHRMIV

SEQ ID NO: 48569 - protein, 34 aa, Artificial Sequence
  Cyclic GFR-binding peptide
  MOD_RES (6), (7): Xaa is C or S
KIPKAXXVPTELNAISMLYFDENEKVVLKKYRDM

SEQ ID NO: 48570 - protein, 32 aa, Artificial Sequence
  Cyclic GFR-binding peptide
  MOD_RES (5), (6): Xaa is C or S
IPKAXXVPTELSPISMLYKDENEKVVLKYHYD

SEQ ID NO: 48571 - protein, 40 aa, Artificial Sequence; identical to SEQ ID NO: 8678
  Cyclic GFR-binding peptide
  MOD_RES (6), (7), (40): Xaa is C or S

SEQ ID NO: 48572 - protein, 29 aa, Artificial Sequence
  Cyclic GFR-binding peptide
  MOD_RES (1), (2): Xaa is C or S
XXVPQALSATSILYYVGRKPKVLRKHRMI

SEQ ID NO: 48573 - protein, 40 aa, Artificial Sequence; identical to SEQ ID NO: 8679
  Cyclic GFR-binding peptide
  MOD_RES (3), (40): Xaa is C or S

SEQ ID NO: 48574 - protein, 32 aa, Artificial Sequence; identical to SEQ ID NO: 8681
  Cyclic GFR-binding peptide
  MOD_RES (1), (1): Xaa is C or S

SEQ ID NO: 48575 - protein, 25 aa, Artificial Sequence
  Cyclic GFR-binding peptide
KLSAISVLYLDDMGVPTLKNYQEGM

SEQ ID NO: 48576 - protein, 30 aa, Artificial Sequence
  Cyclic GFR-binding peptide
  MOD_RES (3), (4): Xaa is C or S
KAXXVPTELSPISMLYKDEYDKVVLKYHYE

SEQ ID NO: 48577 - protein, 38 aa, Artificial Sequence; identical to SEQ ID NO: 8683
  Cyclic GFR-binding peptide
  MOD_RES (2), (2): Xaa is C or S

SEQ ID NO: 48578 - protein, 28 aa, Artificial Sequence
  Cyclic GFR-binding peptide
PTQVQLSPISVLYKEIVRKKPIFLKYHY

SEQ ID NO: 48579 - protein, 35 aa, Artificial Sequence
  Cyclic GFR-binding peptide
  MOD_RES (7), (7): Xaa is C or S
HVTKPTXAPTKLSPISVLYKDDSSNVILKYHYNMV

SEQ ID NO: 48580 - protein, 34 aa, Artificial Sequence; identical to SEQ ID NO: 8684
  Cyclic GFR-binding peptide
  MOD_RES (1), (32), (34): Xaa is C or S

SEQ ID NO: 48581 - protein, 40 aa, Artificial Sequence; identical to SEQ ID NO: 8685
  Cyclic GFR-binding peptide
  MOD_RES (5), (5): Xaa is C or S

SEQ ID NO: 48582 - protein, 32 aa, Artificial Sequence; identical to SEQ ID NO: 8687
  Cyclic GFR-binding peptide
  MOD_RES (2), (2): Xaa is C or S

SEQ ID NO: 48583 - protein, 21 aa, Artificial Sequence
  Cyclic GFR-binding peptide
SATSVLYYDDMGVPTLRKHRE

SEQ ID NO: 48584 - protein, 27 aa, Artificial Sequence
  Cyclic GFR-binding peptide
  MOD_RES (1), (1): Xaa is C or S
XVPQDLSPISILYKVGRTPKVLKYHYM

SEQ ID NO: 48585 - protein, 36 aa, Artificial Sequence; identical to SEQ ID NO: 8688
  Cyclic GFR-binding peptide
  MOD_RES (1), (33), (35): Xaa is C or S

SEQ ID NO: 48586 - protein, 29 aa, Artificial Sequence
  Cyclic GFR-binding peptide
  MOD_RES (1), (1): Xaa is C or S
XVSQDLSATSILYYIGKTPKILRKHRMIV

SEQ ID NO: 48587 - protein, 34 aa, Artificial Sequence
  Cyclic GFR-binding peptide
  MOD_RES (2), (2): Xaa is C or S
QXRPTQVQLSATSVLYYEIVRKKPIFLRKHRTLE

SEQ ID NO: 48588 - protein, 37 aa, Artificial Sequence; identical to SEQ ID NO: 8690
  Cyclic GFR-binding peptide
  MOD_RES (3), (4), (36): Xaa is C or S

SEQ ID NO: 48589 - protein, 36 aa, Artificial Sequence; identical to SEQ ID NO: 8691
  Cyclic GFR-binding peptide
  MOD_RES (4), (5), (36): Xaa is C or S

SEQ ID NO: 48590 - protein, 29 aa, Artificial Sequence
  Cyclic GFR-binding peptide
  MOD_RES (28), (28): Xaa is C or S
ALNAISILYFVGRKPKVLKKYRMIVRSXK

SEQ ID NO: 48591 - protein, 25 aa, Artificial Sequence
  Cyclic GFR-binding peptide
KLSPISVLYKDDSSNVILKYHYNMV

SEQ ID NO: 48592 - protein, 26 aa, Artificial Sequence
  Cyclic GFR-binding peptide
VPQDLNAISILYFVGRTPKVLKKYRM

SEQ ID NO: 48593 - protein, 32 aa, Artificial Sequence
  Cyclic GFR-binding peptide
  MOD_RES (2), (3): Xaa is C or S
PXXVPQALSATSILYYVGRKPKVLRKHRMIVR

SEQ ID NO: 48594 - protein, 33 aa, Artificial Sequence
  Cyclic GFR-binding peptide
  MOD_RES (5), (6): Xaa is C or S
SASPXXVSQDLSATSILYYIGKTPKILRKHRMI

SEQ ID NO: 48595 - protein, 22 aa, Artificial Sequence
  Cyclic GFR-binding peptide
KLNAISVLYFDDMGVPTLKKYR

SEQ ID NO: 48596 - protein, 35 aa, Artificial Sequence
  Cyclic GFR-binding peptide
  MOD_RES (34), (34): Xaa is C or S
QVQLNAISVLYFEIVRKKPIFLKKYRTLEDHLAXK

SEQ ID NO: 48597 - protein, 31 aa, Artificial Sequence
  Cyclic GFR-binding peptide
  MOD_RES (5), (6): Xaa is C or S
SASPXXVSQDLNAISILYFIGKTPKILKKYR

SEQ ID NO: 48598 - protein, 31 aa, Artificial Sequence
  Cyclic GFR-binding peptide
  MOD_RES (28), (30): Xaa is C or S
DLSATSILYYIGKTPKILRKHRMIVKSXKXS

SEQ ID NO: 48599 - protein, 29 aa, Artificial Sequence
  Cyclic GFR-binding peptide
SAISMLYLDEYDKVVLKNYQAAAAAAAAA

SEQ ID NO: 48600 - protein, 23 aa, Artificial Sequence
  Cyclic GFR-binding peptide
TKLSATSVLYYDDSSNVILRKHR

SEQ ID NO: 48601 - protein, 21 aa, Artificial Sequence
  Cyclic GFR-binding peptide
LNAISILYFVGRTPKVLKKYR

SEQ ID NO: 48602 - protein, 42 aa, Artificial Sequence; identical to SEQ ID NO: 8697
  Cyclic GFR-binding peptide
  MOD_RES (5), (6), (39), (41): Xaa is C or S

SEQ ID NO: 48603 - protein, 28 aa, Artificial Sequence
  Cyclic GFR-binding peptide
  MOD_RES (27), (27): Xaa is C or S
NAISVLYFDSSNNVILKKYRNMVVKAXG

SEQ ID NO: 48604 - protein, 40 aa, Artificial Sequence; identical to SEQ ID NO: 8698
  Cyclic GFR-binding peptide
  MOD_RES (2), (39): Xaa is C or S

SEQ ID NO: 48605 - protein, 32 aa, Artificial Sequence
  Cyclic GFR-binding peptide
  MOD_RES (30), (32): Xaa is C or S
SQDLSATSILYYIGKTPKILRKHRMIVKSXKX

SEQ ID NO: 48606 - protein, 38 aa, Artificial Sequence; identical to SEQ ID NO: 8699
  Cyclic GFR-binding peptide
  MOD_RES (3), (3): Xaa is C or S

SEQ ID NO: 48607 - protein, 38 aa, Artificial Sequence; identical to SEQ ID NO: 8701
  Cyclic GFR-binding peptide
  MOD_RES (4), (5), (37): Xaa is C or S

SEQ ID NO: 48608 - protein, 28 aa, Artificial Sequence
  Cyclic GFR-binding peptide
  MOD_RES (2), (3): Xaa is C or S
PXXVSQDLNAISILYFIGKTPKILKKYR

SEQ ID NO: 48609 - protein, 34 aa, Artificial Sequence; identical to SEQ ID NO: 8703
  Cyclic GFR-binding peptide
  MOD_RES (3), (4): Xaa is C or S

SEQ ID NO: 48610 - protein, 30 aa, Artificial Sequence
  Cyclic GFR-binding peptide
  MOD_RES (4), (4): Xaa is C or S
KPTXAPTKLSAISVLYLDDSSNVILKNYQN

SEQ ID NO: 48611 - protein, 29 aa, Artificial Sequence
  Cyclic GFR-binding peptide
  MOD_RES (28), (28): Xaa is C or S
ALSPISILYKVGRKPKVLKYHYMIVRSXK

SEQ ID NO: 48612 - protein, 26 aa, Artificial Sequence
  Cyclic GFR-binding peptide
LNAISMLYFDEYDKVVLKKYREMVVE

SEQ ID NO: 48613 - protein, 34 aa, Artificial Sequence
  Cyclic GFR-binding peptide
  MOD_RES (1), (1): Xaa is C or S
XRPTQVQLNAISVLYFEIVRKKPIFLKKYRTLED

SEQ ID NO: 48614 - protein, 23 aa, Artificial Sequence
  Cyclic GFR-binding peptide
QDLSPISILYKVGRTPKVLKYHY

SEQ ID NO: 48615 - protein, 38 aa, Artificial Sequence; identical to SEQ ID NO: 8706
  Cyclic GFR-binding peptide
  MOD_RES (6), (7): Xaa is C or S

SEQ ID NO: 48616 - protein, 39 aa, Artificial Sequence; identical to SEQ ID NO: 8708
  Cyclic GFR-binding peptide
  MOD_RES (5), (6), (39): Xaa is C or S

SEQ ID NO: 48617 - protein, 32 aa, Artificial Sequence; identical to SEQ ID NO: 8707
  Cyclic GFR-binding peptide
  MOD_RES (31), (31): Xaa is C or S

SEQ ID NO: 48618 - protein, 31 aa, Artificial Sequence
  Cyclic GFR-binding peptide
  MOD_RES (29), (31): Xaa is C or S
QALSATSILYYVGRKPKVLRKHRMIVRSXKX

SEQ ID NO: 48619 - protein, 35 aa, Artificial Sequence; identical to SEQ ID NO: 8709
  Cyclic GFR-binding peptide
  MOD_RES (1), (2), (34): Xaa is C or S

SEQ ID NO: 48620 - protein, 20 aa, Artificial Sequence
  Cyclic GFR-binding peptide
SAISILYLVGRTPKVLKNYQ

SEQ ID NO: 48621 - protein, 31 aa, Artificial Sequence
  Cyclic GFR-binding peptide
  MOD_RES (1), (1): Xaa is C or S
XVPTKLSATSVLYYDDMGVPTLRKHREGMSV

SEQ ID NO: 48622 - protein, 31 aa, Artificial Sequence
  Cyclic GFR-binding peptide
  MOD_RES (29), (31): Xaa is C or S
KLSAISVLYLDSSNNVILKNYQNMVVKAXGX

SEQ ID NO: 48623 - protein, 34 aa, Artificial Sequence; identical to SEQ ID NO: 8710
  Cyclic GFR-binding peptide
  MOD_RES (32), (34): Xaa is C or S

SEQ ID NO: 48624 - protein, 29 aa, Artificial Sequence
  Cyclic GFR-binding peptide
  MOD_RES (3), (4): Xaa is C or S
KPXXAPTKLSATSVLYYDDSSNVILRKHR

SEQ ID NO: 48625 - protein, 30 aa, Artificial Sequence; identical to SEQ ID NO: 8711
  Cyclic GFR-binding peptide

SEQ ID NO: 48626 - protein, 29 aa, Artificial Sequence
  Cyclic GFR-binding peptide
  MOD_RES (27), (29): Xaa is C or S
NAISMLYFDEYDKVVLKKYREMVVEGXGX

SEQ ID NO: 48627 - protein, 28 aa, Artificial Sequence
  Cyclic GFR-binding peptide
  MOD_RES (1), (2): Xaa is C or S
XXVPQDLSPISILYKVGRTPKVLKYHYM

SEQ ID NO: 48628 - protein, 37 aa, Artificial Sequence; identical to SEQ ID NO: 8712
  Cyclic GFR-binding peptide
  MOD_RES (2), (3), (35), (37): Xaa is C or S

SEQ ID NO: 48629 - protein, 28 aa, Artificial Sequence
  Cyclic GFR-binding peptide
  MOD_RES (2), (3): Xaa is C or S
PXXVPQDLSATSILYYVGRTPKVLRKHR

SEQ ID NO: 48630 - protein, 36 aa, Artificial Sequence; identical to SEQ ID NO: 8717
  Cyclic GFR-binding peptide
  MOD_RES (6), (6): Xaa is C or S

SEQ ID NO: 48631 - protein, 32 aa, Artificial Sequence
  Cyclic GFR-binding peptide
  MOD_RES (30), (32): Xaa is C or S
SQDLSPISILYKIGKTPKILKYHYMIVKSXKX

SEQ ID NO: 48632 - protein, 28 aa, Artificial Sequence
  Cyclic GFR-binding peptide
  MOD_RES (28), (28): Xaa is C or S
NAISVLYFDDMGVPTLKKYREGMSVAEX

SEQ ID NO: 48633 - protein, 32 aa, Artificial Sequence
  Cyclic GFR-binding peptide
QVQLSATSVLYYEIVRKKPIFLRKHRTLEDHL

SEQ ID NO: 48634 - protein, 35 aa, Artificial Sequence
  Cyclic GFR-binding peptide
  MOD_RES (5), (6): Xaa is C or S
VPKAXXAPTKLSAISVLYLDSSNNVILKNYQNMVV

SEQ ID NO: 48635 - protein, 31 aa, Artificial Sequence
  Cyclic GFR-binding peptide
  MOD_RES (2), (3): Xaa is C or S
AXXAPTKLSPISVLYKDSSNNVILKYHYNMV

SEQ ID NO: 48636 - protein, 25 aa, Artificial Sequence
  Cyclic GFR-binding peptide
SPISILYKVGRKPKVLKYHYMIVRS

SEQ ID NO: 48637 - protein, 27 aa, Artificial Sequence
  Cyclic GFR-binding peptide
  MOD_RES (1), (1): Xaa is C or S
XVPTKLNAISVLYFDDMGVPTLKKYRE

SEQ ID NO: 48638 - protein, 33 aa, Artificial Sequence
  Cyclic GFR-binding peptide
  MOD_RES (3), (4): Xaa is C or S
SPXXVPQDLSPISILYKVGRTPKVLKYHYMVVK

SEQ ID NO: 48639 - protein, 25 aa, Artificial Sequence
  Cyclic GFR-binding peptide
VQLSPISVLYKEIVRKKPIFLKYHY

SEQ ID NO: 48640 - protein, 40 aa, Artificial Sequence; identical to SEQ ID NO: 8721
  Cyclic GFR-binding peptide
  MOD_RES (5), (5): Xaa is C or S

SEQ ID NO: 48641 - protein, 28 aa, Artificial Sequence
  Cyclic GFR-binding peptide
  MOD_RES (1), (2): Xaa is C or S
XXVPTKLNAISVLYFDDMGVPTLKKYRE

SEQ ID NO: 48642 - protein, 31 aa, Artificial Sequence
  Cyclic GFR-binding peptide
VQLSPISVLYKEIVRKKPIFLKYHYTLEDHL

SEQ ID NO: 48643 - protein, 29 aa, Artificial Sequence
  Cyclic GFR-binding peptide
  MOD_RES (2), (3): Xaa is C or S
PXXVSQDLSAISILYLIGKTPKILKNYQM

SEQ ID NO: 48644 - protein, 37 aa, Artificial Sequence; identical to SEQ ID NO: 8722
  Cyclic GFR-binding peptide
  MOD_RES (4), (5), (37): Xaa is C or S

SEQ ID NO: 48645 - protein, 33 aa, Artificial Sequence; identical to SEQ ID NO: 8723
  Cyclic GFR-binding peptide
  MOD_RES (1), (2): Xaa is C or S

SEQ ID NO: 48646 - protein, 39 aa, Artificial Sequence; identical to SEQ ID NO: 8724
  Cyclic GFR-binding peptide
  MOD_RES (4), (5), (37), (39): Xaa is C or S

SEQ ID NO: 48647 - protein, 32 aa, Artificial Sequence
  Cyclic GFR-binding peptide
  MOD_RES (30), (32): Xaa is C or S
TKLNAISVLYFDSSNNVILKKYRNMVVKAXGX

SEQ ID NO: 48648 - protein, 34 aa, Artificial Sequence
  Cyclic GFR-binding peptide
  MOD_RES (31), (33): Xaa is C or S
PTKLNAISVLYFDSSNNVILKKYRNMVVKAXGXH

SEQ ID NO: 48649 - protein, 22 aa, Artificial Sequence
  Cyclic GFR-binding peptide
NAISILYFIGKTPKILKKYRMI

SEQ ID NO: 48650 - protein, 36 aa, Artificial Sequence
  Cyclic GFR-binding peptide
  MOD_RES (33), (35): Xaa is C or S
VQLNAISVLYFEIVRKKPIFLKKYRTLEDHLAXKXE

SEQ ID NO: 48651 - protein, 30 aa, Artificial Sequence
  Cyclic GFR-binding peptide
  MOD_RES (2), (3): Xaa is C or S
AXXVPTKLSAISVLYLDDMGVPTLKNYQEG

SEQ ID NO: 48652 - protein, 36 aa, Artificial Sequence; identical to SEQ ID NO: 8727
  Cyclic GFR-binding peptide
  MOD_RES (3), (4), (36): Xaa is C or S

SEQ ID NO: 48653 - protein, 35 aa, Artificial Sequence; identical to SEQ ID NO: 8728
  Cyclic GFR-binding peptide
  MOD_RES (32), (34): Xaa is C or S

SEQ ID NO: 48654 - protein, 31 aa, Artificial Sequence
  Cyclic GFR-binding peptide
  MOD_RES (28), (30): Xaa is C or S
LSPISMLYKDENEKVVLKYHYDMVVEGXGXR

SEQ ID NO: 48655 - protein, 23 aa, Artificial Sequence
  Cyclic GFR-binding peptide
LSAISVLYLDDSSNVILKNYQNM

SEQ ID NO: 48656 - protein, 33 aa, Artificial Sequence
  Cyclic GFR-binding peptide
  MOD_RES (30), (32): Xaa is C or S
SQDLSAISILYLIGKTPKILKNYQMIVKSXKXS

SEQ ID NO: 48657 - protein, 23 aa, Artificial Sequence
  Cyclic GFR-binding peptide
QLSPISVLYKDDSSNVILKYHYN

SEQ ID NO: 48658 - protein, 32 aa, Artificial Sequence
  Cyclic GFR-binding peptide
VQLSAISVLYLEIVRKKPIFLKNYQTLEDHLA

SEQ ID NO: 48659 - protein, 35 aa, Artificial Sequence; identical to SEQ ID NO: 8731
  Cyclic GFR-binding peptide
  MOD_RES (4), (5): Xaa is C or S

SEQ ID NO: 48660 - protein, 30 aa, Artificial Sequence
  Cyclic GFR-binding peptide
  MOD_RES (1), (1): Xaa is C or S
XVSQDLSAISILYLIGKTPKILKNYQMIVK

SEQ ID NO: 48661 - protein, 23 aa, Artificial Sequence
  Cyclic GFR-binding peptide
ELNAISMLYFDEYDKVVLKKYRE

SEQ ID NO: 48662 - protein, 43 aa, Artificial Sequence; identical to SEQ ID NO: 8732
  Cyclic GFR-binding peptide
  MOD_RES (6), (7), (40), (42): Xaa is C or S

SEQ ID NO: 48663 - protein, 30 aa, Artificial Sequence
  Cyclic GFR-binding peptide
  MOD_RES (28), (30): Xaa is C or S
SAISVLYLDDMGVPTLKNYQEGMSVAEXGX

SEQ ID NO: 48664 - protein, 36 aa, Artificial Sequence; identical to SEQ ID NO: 8734
  Cyclic GFR-binding peptide
  MOD_RES (4), (5): Xaa is C or S

SEQ ID NO: 48665 - protein, 31 aa, Artificial Sequence
  Cyclic GFR-binding peptide
  MOD_RES (29), (31): Xaa is C or S
QDLNAISILYFVGRTPKVLKKYRMVVKSXKX

SEQ ID NO: 48666 - protein, 24 aa, Artificial Sequence
  Cyclic GFR-binding peptide
TQLSATSVLYYDDSSNVILRKHRN

SEQ ID NO: 48667 - protein, 36 aa, Artificial Sequence; identical to SEQ ID NO: 8737
  Cyclic GFR-binding peptide
  MOD_RES (2), (3), (35): Xaa is C or S

SEQ ID NO: 48668 - protein, 25 aa, Artificial Sequence
  Cyclic GFR-binding peptide
APTKLSPISVLYKDDSSNVILKYHY

SEQ ID NO: 48669 - protein, 24 aa, Artificial Sequence
  Cyclic GFR-binding peptide
QDLSPISILYKIGKTPKILKYHYM

SEQ ID NO: 48670 - protein, 33 aa, Artificial Sequence
  Cyclic GFR-binding peptide
  MOD_RES (3), (4): Xaa is C or S
APXXVPQALNAISILYFVGRKPKVLKKYRMIVR

SEQ ID NO: 48671 - protein, 24 aa, Artificial Sequence
  Cyclic GFR-binding peptide
SATSVLYYEIVRKKPIFLRKHRTL

SEQ ID NO: 48672 - protein, 39 aa, Artificial Sequence; identical to SEQ ID NO: 8742
  Cyclic GFR-binding peptide
  MOD_RES (36), (38): Xaa is C or S

SEQ ID NO: 48673 - protein, 30 aa, Artificial Sequence
  Cyclic GFR-binding peptide
QVQLSPISVLYKEIVRKKPIFLKYHYTLED

SEQ ID NO: 48674 - protein, 36 aa, Artificial Sequence; identical to SEQ ID NO: 8744
  Cyclic GFR-binding peptide
  MOD_RES (1), (2), (33), (35): Xaa is C or S

SEQ ID NO: 48675 - protein, 33 aa, Artificial Sequence
  Cyclic GFR-binding peptide
  MOD_RES (4), (5): Xaa is C or S
PKPXXAPTKLSAISVLYLDDSSNVILKNYQNMV

SEQ ID NO: 48676 - protein, 33 aa, Artificial Sequence; identical to SEQ ID NO: 8746
  Cyclic GFR-binding peptide
  MOD_RES (2), (3): Xaa is C or S

SEQ ID NO: 48677 - protein, 37 aa, Artificial Sequence
  Cyclic GFR-binding peptide
  MOD_RES (6), (7): Xaa is C or S
KVGKAXXVPTKLSATSVLYYDDMGVPTLRKHREGMSV

SEQ ID NO: 48678 - protein, 32 aa, Artificial Sequence
  Cyclic GFR-binding peptide
  MOD_RES (4), (5): Xaa is C or S
ASPXXVPQDLSAISILYLVGRTPKVLKNYQMV

SEQ ID NO: 48679 - protein, 25 aa, Artificial Sequence
  Cyclic GFR-binding peptide
PTQLSATSVLYYDDSSNVILRKHRN

SEQ ID NO: 48680 - protein, 32 aa, Artificial Sequence
  Cyclic GFR-binding peptide
VQLSATSVLYYEIVRKKPIFLRKHRTLEDHLA

SEQ ID NO: 48681 - protein, 42 aa, Artificial Sequence; identical to SEQ ID NO: 8749
  Cyclic GFR-binding peptide
  MOD_RES (5), (42): Xaa is C or S

SEQ ID NO: 48682 - protein, 34 aa, Artificial Sequence
  Cyclic GFR-binding peptide
  MOD_RES (3), (3): Xaa is C or S
VQXRPTQVQLSAISVLYLEIVRKKPIFLKNYQTL

SEQ ID NO: 48683 - protein, 29 aa, Artificial Sequence
  Cyclic GFR-binding peptide
  MOD_RES (26), (28): Xaa is C or S
SATSILYYVGRTPKVLRKHRMVVKSXKXS

SEQ ID NO: 48684 - protein, 30 aa, Artificial Sequence
  Cyclic GFR-binding peptide
  MOD_RES (29), (29): Xaa is C or S
KLSAISVLYLDSSNNVILKNYQNMVVKAXG

SEQ ID NO: 48685 - protein, 24 aa, Artificial Sequence
  Cyclic GFR-binding peptide
ALNAISILYFVGRKPKVLKKYRMI

SEQ ID NO: 48686 - protein, 26 aa, Artificial Sequence
  Cyclic GFR-binding peptide
SATSVLYYDDMGVPTLRKHREGMSVA

SEQ ID NO: 48687 - protein, 29 aa, Artificial Sequence
  Cyclic GFR-binding peptide
PTELSPISMLYKDENEKVVLKYHYDMVVE

SEQ ID NO: 48688 - protein, 33 aa, Artificial Sequence
  Cyclic GFR-binding peptide
  MOD_RES (5), (6): Xaa is C or S
VPKPXXAPTQLSATSVLYYDDSSNVILRKHRNM

SEQ ID NO: 48689 - protein, 28 aa, Artificial Sequence
  Cyclic GFR-binding peptide
VPTELNAISMLYFDEYDKVVLKKYREMV

SEQ ID NO: 48690 - protein, 28 aa, Artificial Sequence
  Cyclic GFR-binding peptide
  MOD_RES (28), (28): Xaa is C or S
ALSATSILYYVGRKPKVLRKHRMIVRSX

SEQ ID NO: 48691 - protein, 22 aa, Artificial Sequence
  Cyclic GFR-binding peptide
SAISVLYLEIVRKKPIFLKNYQ

SEQ ID NO: 48692 - protein, 36 aa, Artificial Sequence; identical to SEQ ID NO: 8751
  Cyclic GFR-binding peptide
  MOD_RES (4), (5): Xaa is C or S

SEQ ID NO: 48693 - protein, 25 aa, Artificial Sequence
  Cyclic GFR-binding peptide
LSPISMLYKDENEKVVLKYHYDMVV

SEQ ID NO: 48694 - protein, 36 aa, Artificial Sequence
  Cyclic GFR-binding peptide
  MOD_RES (4), (5): Xaa is C or S
GKAXXVPTKLNAISVLYFDDMGVPTLKKYREGMSVA

SEQ ID NO: 48695 - protein, 33 aa, Artificial Sequence; identical to SEQ ID NO: 8753
  Cyclic GFR-binding peptide
  MOD_RES (32), (32): Xaa is C or S

SEQ ID NO: 48696 - protein, 32 aa, Artificial Sequence; identical to SEQ ID NO: 8754
  Cyclic GFR-binding peptide
  MOD_RES (1), (32): Xaa is C or S

SEQ ID NO: 48697 - protein, 30 aa, Artificial Sequence
  Cyclic GFR-binding peptide
  MOD_RES (4), (5): Xaa is C or S
ASPXXVPQDLSATSILYYVGRTPKVLRKHR

SEQ ID NO: 48698 - protein, 40 aa, Artificial Sequence; identical to SEQ ID NO: 8755
  Cyclic GFR-binding peptide
  MOD_RES (6), (7), (39): Xaa is C or S

SEQ ID NO: 48699 - protein, 40 aa, Artificial Sequence; identical to SEQ ID NO: 8756
  Cyclic GFR-binding peptide
  MOD_RES (7), (39): Xaa is C or S

SEQ ID NO: 48700 - protein, 20 aa, Artificial Sequence
  Cyclic GFR-binding peptide
NAISILYFVGRTPKVLKKYR

SEQ ID NO: 48701 - protein, 26 aa, Artificial Sequence
  Cyclic GFR-binding peptide
LSATSVLYYEIVRKKPIFLRKHRTLE

SEQ ID NO: 48702 - protein, 23 aa, Artificial Sequence
  Cyclic GFR-binding peptide
NAISVLYFEIVRKKPIFLKKYRT

SEQ ID NO: 48703 - protein, 36 aa, Artificial Sequence; identical to SEQ ID NO: 8760
  Cyclic GFR-binding peptide
  MOD_RES (4), (5): Xaa is C or S

SEQ ID NO: 48704 - protein, 30 aa, Artificial Sequence
  Cyclic GFR-binding peptide
  MOD_RES (29), (29): Xaa is C or S
KLSATSVLYYDDSSNVILRKHRNMVVRSXG

SEQ ID NO: 48705 - protein, 33 aa, Artificial Sequence
  Cyclic GFR-binding peptide
  MOD_RES (6), (7): Xaa is C or S
ASAAPXXVPQALSATSILYYVGRKPKVLRKHRM

SEQ ID NO: 48706 - protein, 27 aa, Artificial Sequence
  Cyclic GFR-binding peptide
  MOD_RES (1), (1): Xaa is C or S
XVPQALNAISILYFVGRKPKVLKKYRM

SEQ ID NO: 48707 - protein, 31 aa, Artificial Sequence
  Cyclic GFR-binding peptide
  MOD_RES (2), (3): Xaa is C or S
PXXVSQDLSPISILYKIGKTPKILKYHYMIV

SEQ ID NO: 48708 - protein, 26 aa, Artificial Sequence
  Cyclic GFR-binding peptide
ALNAISILYFVGRKPKVLKKYRMIVR

SEQ ID NO: 48709 - protein, 41 aa, Artificial Sequence; identical to SEQ ID NO: 8764
  Cyclic GFR-binding peptide
  MOD_RES (5), (6), (38), (40): Xaa is C or S

SEQ ID NO: 48710 - protein, 41 aa, Artificial Sequence; identical to SEQ ID NO: 8766
  Cyclic GFR-binding peptide
  MOD_RES (5), (6), (38), (40): Xaa is C or S

SEQ ID NO: 48711 - protein, 33 aa, Artificial Sequence
  Cyclic GFR-binding peptide
  MOD_RES (30), (32): Xaa is C or S
TELSPISMLYKDENEKVVLKYHYDMVVEGXGXR

SEQ ID NO: 48712 - protein, 24 aa, Artificial Sequence
  Cyclic GFR-binding peptide
LSATSILYYVGRTPKVLRKHRMVV

SEQ ID NO: 48713 - protein, 32 aa, Artificial Sequence; identical to SEQ ID NO: 8767
  Cyclic GFR-binding peptide
  MOD_RES (31), (31): Xaa is C or S

SEQ ID NO: 48714 - protein, 28 aa, Artificial Sequence
  Cyclic GFR-binding peptide
  MOD_RES (2), (3): Xaa is C or S
PXXAPTQLSAISVLYLDDSSNVILKNYQ

SEQ ID NO: 48715 - protein, 27 aa, Artificial Sequence
  Cyclic GFR-binding peptide
PTQLSATSVLYYDDSSNVILRKHRNMV

SEQ ID NO: 48716 - protein, 38 aa, Artificial Sequence; identical to SEQ ID NO: 8770
  Cyclic GFR-binding peptide
  MOD_RES (3), (3): Xaa is C or S

SEQ ID NO: 48717 - protein, 28 aa, Artificial Sequence
  Cyclic GFR-binding peptide
  MOD_RES (2), (3): Xaa is C or S
PXXVSQDLSAISILYLIGKTPKILKNYQ

SEQ ID NO: 48718 - protein, 26 aa, Artificial Sequence
  Cyclic GFR-binding peptide
SQDLSATSILYYIGKTPKILRKHRMI

SEQ ID NO: 48719 - protein, 31 aa, Artificial Sequence
  Cyclic GFR-binding peptide
VPTKLSATSVLYYDDMGVPTLRKHREGMSVA

SEQ ID NO: 48720 - protein, 37 aa, Artificial Sequence; identical to SEQ ID NO: 8772
  Cyclic GFR-binding peptide
  MOD_RES (1), (2), (34), (36): Xaa is C or S

SEQ ID NO: 48721 - protein, 27 aa, Artificial Sequence
  Cyclic GFR-binding peptide
LSPISMLYKDEYDKVVLKYHYEMVVEG

SEQ ID NO: 48722 - protein, 35 aa, Artificial Sequence
  Cyclic GFR-binding peptide
  MOD_RES (6), (7): Xaa is C or S
YVPKPXXAPTKLSPISVLYKDDSSNVILKYHYNMV

SEQ ID NO: 48723 - protein, 39 aa, Artificial Sequence; identical to SEQ ID NO: 8773
  Cyclic GFR-binding peptide
  MOD_RES (5), (5): Xaa is C or S

SEQ ID NO: 48724 - protein, 26 aa, Artificial Sequence
  Cyclic GFR-binding peptide
APTKLSAISVLYLDSSNNVILKNYQN

SEQ ID NO: 48725 - protein, 35 aa, Artificial Sequence; identical to SEQ ID NO: 8776
  Cyclic GFR-binding peptide
  MOD_RES (4), (5): Xaa is C or S

SEQ ID NO: 48726 - protein, 36 aa, Artificial Sequence; identical to SEQ ID NO: 8777
  Cyclic GFR-binding peptide
  MOD_RES (3), (4), (36): Xaa is C or S

SEQ ID NO: 48727 - protein, 31 aa, Artificial Sequence
  Cyclic GFR-binding peptide
  MOD_RES (5), (6): Xaa is C or S
VPKAXXAPTKLSAISVLYLDSSNNVILKNYQ

SEQ ID NO: 48728 - protein, 42 aa, Artificial Sequence; identical to SEQ ID NO: 8779
  Cyclic GFR-binding peptide
  MOD_RES (4), (41): Xaa is C or S

SEQ ID NO: 48729 - protein, 34 aa, Artificial Sequence
  Cyclic GFR-binding peptide
  MOD_RES (4), (5): Xaa is C or S
ASPXXVSQDLNAISILYFIGKTPKILKKYRMIVK

SEQ ID NO: 48730 - protein, 26 aa, Artificial Sequence
  Cyclic GFR-binding peptide
TKLNAISVLYFDSSNNVILKKYRNMV

SEQ ID NO: 48731 - protein, 27 aa, Artificial Sequence
  Cyclic GFR-binding peptide
  MOD_RES (1), (2): Xaa is C or S
XXAPTQLSPISVLYKDDSSNVILKYHY

SEQ ID NO: 48732 - protein, 39 aa, Artificial Sequence; identical to SEQ ID NO: 8781
  Cyclic GFR-binding peptide
  MOD_RES (4), (5), (37), (39): Xaa is C or S

SEQ ID NO: 48733 - protein, 35 aa, Artificial Sequence
  Cyclic GFR-binding peptide
  MOD_RES (33), (35): Xaa is C or S
VQLSAISVLYLEIVRKKPIFLKNYQTLEDHLAXKX

SEQ ID NO: 48734 - protein, 32 aa, Artificial Sequence
  Cyclic GFR-binding peptide
  MOD_RES (30), (32): Xaa is C or S
PQDLSATSILYYVGRTPKVLRKHRMVVKSXKX

SEQ ID NO: 48735 - protein, 35 aa, Artificial Sequence; identical to SEQ ID NO: 8782
  Cyclic GFR-binding peptide
  MOD_RES (2), (3), (34): Xaa is C or S

SEQ ID NO: 48736 - protein, 31 aa, Artificial Sequence
  Cyclic GFR-binding peptide
  MOD_RES (29), (31): Xaa is C or S
KLSPISVLYKDDSSNVILKYHYNMVVRSXGX

SEQ ID NO: 48737 - protein, 35 aa, Artificial Sequence; identical to SEQ ID NO: 8785
  Cyclic GFR-binding peptide
  MOD_RES (4), (5): Xaa is C or S

SEQ ID NO: 48738 - protein, 38 aa, Artificial Sequence; identical to SEQ ID NO: 8787
  Cyclic GFR-binding peptide
  MOD_RES (3), (4), (36), (38): Xaa is C or S

SEQ ID NO: 48739 - protein, 40 aa, Artificial Sequence; identical to SEQ ID NO: 8788
  Cyclic GFR-binding peptide
  MOD_RES (6), (7), (39): Xaa is C or S

SEQ ID NO: 48740 - protein, 30 aa, Artificial Sequence
  Cyclic GFR-binding peptide
  MOD_RES (27), (29): Xaa is C or S
LSATSILYYVGRKPKVLRKHRMIVRSXKXS

SEQ ID NO: 48741 - protein, 33 aa, Artificial Sequence; identical to SEQ ID NO: 8789
  Cyclic GFR-binding peptide
  MOD_RES (1), (2), (33): Xaa is C or S

SEQ ID NO: 48742 - protein, 23 aa, Artificial Sequence
  Cyclic GFR-binding peptide
LSATSILYYIGKTPKILRKHRMI

SEQ ID NO: 48743 - protein, 37 aa, Artificial Sequence
  Cyclic GFR-binding peptide
  MOD_RES (6), (7): Xaa is C or S
KVGKAXXVPTKLNAISVLYFDDMGVPTLKKYREGMSV

SEQ ID NO: 48744 - protein, 31 aa, Artificial Sequence; identical to SEQ ID NO: 8790
  Cyclic GFR-binding peptide
  MOD_RES (1), (1): Xaa is C or S

SEQ ID NO: 48745 - protein, 30 aa, Artificial Sequence
  Cyclic GFR-binding peptide
  MOD_RES (4), (5): Xaa is C or S
PKAXXVPTELSPISMLYKDEYDKVVLKYHY

SEQ ID NO: 48746 - protein, 31 aa, Artificial Sequence
  Cyclic GFR-binding peptide
  MOD_RES (5), (6): Xaa is C or S
SASPXXVSQDLSAISILYLIGKTPKILKNYQ

SEQ ID NO: 48747 - protein, 21 aa, Artificial Sequence
  Cyclic GFR-binding peptide
LSAISILYLVGRTPKVLKNYQ

SEQ ID NO: 48748 - protein, 23 aa, Artificial Sequence
  Cyclic GFR-binding peptide
QALSATSILYYVGRKPKVLRKHR

SEQ ID NO: 48749 - protein, 29 aa, Artificial Sequence
  Cyclic GFR-binding peptide
QLSAISVLYLEIVRKKPIFLKNYQTLEDH

SEQ ID NO: 48750 - protein, 36 aa, Artificial Sequence; identical to SEQ ID NO: 8796
  Cyclic GFR-binding peptide
  MOD_RES (1), (2), (34), (36): Xaa is C or S

SEQ ID NO: 48751 - protein, 28 aa, Artificial Sequence
  Cyclic GFR-binding peptide
PTELSPISMLYKDEYDKVVLKYHYEMVV

SEQ ID NO: 48752 - protein, 36 aa, Artificial Sequence; identical to SEQ ID NO: 8797
  Cyclic GFR-binding peptide
  MOD_RES (5), (6): Xaa is C or S

SEQ ID NO: 48753 - protein, 29 aa, Artificial Sequence
  Cyclic GFR-binding peptide
RPTQVQLNAISVLYFEIVRKKPIFLKKYR

SEQ ID NO: 48754 - protein, 32 aa, Artificial Sequence
  Cyclic GFR-binding peptide
  MOD_RES (31), (31): Xaa is C or S
PTELSPISMLYKDEYDKVVLKYHYEMVVEGXG

SEQ ID NO: 48755 - protein, 34 aa, Artificial Sequence; identical to SEQ ID NO: 8798
  Cyclic GFR-binding peptide
  MOD_RES (1), (2), (33): Xaa is C or S

SEQ ID NO: 48756 - protein, 24 aa, Artificial Sequence
  Cyclic GFR-binding peptide
TKLNAISVLYFDSSNNVILKKYRN

SEQ ID NO: 48757 - protein, 40 aa, Artificial Sequence; identical to SEQ ID NO: 8800
  Cyclic GFR-binding peptide
  MOD_RES (5), (37), (39): Xaa is C or S

SEQ ID NO: 48758 - protein, 42 aa, Artificial Sequence; identical to SEQ ID NO: 8801
  Cyclic GFR-binding peptide
  MOD_RES (3), (40), (42): Xaa is C or S

SEQ ID NO: 48759 - protein, 30 aa, Artificial Sequence
  Cyclic GFR-binding peptide
  MOD_RES (27), (29): Xaa is C or S
SPISVLYKDDSSNVILKYHYNMVVRSXGXH

SEQ ID NO: 48760 - protein, 25 aa, Artificial Sequence
  Cyclic GFR-binding peptide
DLSPISILYKVGRTPKVLKYHYMVV

SEQ ID NO: 48761 - protein, 26 aa, Artificial Sequence
  Cyclic GFR-binding peptide
PQDLSATSILYYVGRTPKVLRKHRMV

SEQ ID NO: 48762 - protein, 26 aa, Artificial Sequence
  Cyclic GFR-binding peptide
QVQLSATSVLYYEIVRKKPIFLRKHR

SEQ ID NO: 48763 - protein, 26 aa, Artificial Sequence
  Cyclic GFR-binding peptide
PQALSAISILYLVGRKPKVLKNYQMI

SEQ ID NO: 48764 - protein, 31 aa, Artificial Sequence
  Cyclic GFR-binding peptide
  MOD_RES (31), (31): Xaa is C or S
PTKLSAISVLYLDSSNNVILKNYQNMVVKAX

SEQ ID NO: 48765 - protein, 37 aa, Artificial Sequence; identical to SEQ ID NO: 8802
  Cyclic GFR-binding peptide
  MOD_RES (6), (7): Xaa is C or S

SEQ ID NO: 48766 - protein, 27 aa, Artificial Sequence
  Cyclic GFR-binding peptide
  MOD_RES (27), (27): Xaa is C or S
LSATSILYYVGRKPKVLRKHRMIVRSX

SEQ ID NO: 48767 - protein, 24 aa, Artificial Sequence
  Cyclic GFR-binding peptide
NAISILYFVGRTPKVLKKYRMVVK

SEQ ID NO: 48768 - protein, 22 aa, Artificial Sequence
  Cyclic GFR-binding peptide
KLSAISVLYLDDSSNVILKNYQ

SEQ ID NO: 48769 - protein, 28 aa, Artificial Sequence
  Cyclic GFR-binding peptide
  MOD_RES (3), (3): Xaa is C or S
PTXAPTKLSAISVLYLDDSSNVILKNYQ

SEQ ID NO: 48770 - protein, 28 aa, Artificial Sequence
  Cyclic GFR-binding peptide
QLSATSVLYYDDSSNVILRKHRNMVVRA

SEQ ID NO: 48771 - protein, 42 aa, Artificial Sequence; identical to SEQ ID NO: 8806
  Cyclic GFR-binding peptide
  MOD_RES (6), (7), (40), (42): Xaa is C or S

SEQ ID NO: 48772 - protein, 32 aa, Artificial Sequence
  Cyclic GFR-binding peptide
  MOD_RES (6), (7): Xaa is C or S
YVPKPXXAPTKLSPISVLYKDDSSNVILKYHY

SEQ ID NO: 48773 - protein, 22 aa, Artificial Sequence
  Cyclic GFR-binding peptide
KLSAISVLYLDDMGVPTLKNYQ

SEQ ID NO: 48774 - protein, 35 aa, Artificial Sequence
  Cyclic GFR-binding peptide
  MOD_RES (4), (4): Xaa is C or S
NVQXRPTQVQLSATSVLYYEIVRKKPIFLRKHRTL

SEQ ID NO: 48775 - protein, 40 aa, Artificial Sequence; identical to SEQ ID NO: 8808
  Cyclic GFR-binding peptide
  MOD_RES (2), (39): Xaa is C or S

SEQ ID NO: 48776 - protein, 33 aa, Artificial Sequence
  Cyclic GFR-binding peptide
  MOD_RES (31), (33): Xaa is C or S
LNAISVLYFEIVRKKPIFLKKYRTLEDHLAXKX

SEQ ID NO: 48777 - protein, 26 aa, Artificial Sequence
  Cyclic GFR-binding peptide
  MOD_RES (1), (1): Xaa is C or S
XAPTKLSAISVLYLDDSSNVILKNYQ

SEQ ID NO: 48778 - protein, 31 aa, Artificial Sequence
  Cyclic GFR-binding peptide
  MOD_RES (30), (30): Xaa is C or S
PQALSPISILYKVGRKPKVLKYHYMIVRSXK

SEQ ID NO: 48779 - protein, 30 aa, Artificial Sequence
  Cyclic GFR-binding peptide
  MOD_RES (27), (29): Xaa is C or S
SAISVLYLDSSNNVILKNYQNMVVKAXGXH

SEQ ID NO: 48780 - protein, 35 aa, Artificial Sequence
  Cyclic GFR-binding peptide
  MOD_RES (5), (6): Xaa is C or S
VPKPXXAPTKLSAISVLYLDDSSNVILKNYQNMVV

SEQ ID NO: 48781 - protein, 30 aa, Artificial Sequence; identical to SEQ ID NO: 8809
  Cyclic GFR-binding peptide

SEQ ID NO: 48782 - protein, 27 aa, Artificial Sequence
  Cyclic GFR-binding peptide
  MOD_RES (1), (2): Xaa is C or S
XXAPTKLSAISVLYLDDSSNVILKNYQ

SEQ ID NO: 48783 - protein, 42 aa, Artificial Sequence; identical to SEQ ID NO: 8811
  Cyclic GFR-binding peptide
  MOD_RES (5), (6), (39), (41): Xaa is C or S

SEQ ID NO: 48784 - protein, 36 aa, Artificial Sequence
  Cyclic GFR-binding peptide
  MOD_RES (34), (36): Xaa is C or S
QVQLNAISVLYFEIVRKKPIFLKKYRTLEDHLAXKX

SEQ ID NO: 48785 - protein, 25 aa, Artificial Sequence
  Cyclic GFR-binding peptide
LSPISVLYKEIVRKKPIFLKYHYTL

SEQ ID NO: 48786 - protein, 26 aa, Artificial Sequence
  Cyclic GFR-binding peptide
PQALNAISILYFVGRKPKVLKKYRMI

SEQ ID NO: 48787 - protein, 34 aa, Artificial Sequence
  Cyclic GFR-binding peptide
  MOD_RES (3), (4): Xaa is C or S
KAXXVPTKLNAISVLYFDDMGVPTLKKYREGMSV

SEQ ID NO: 48788 - protein, 34 aa, Artificial Sequence
  Cyclic GFR-binding peptide
  MOD_RES (4), (5): Xaa is C or S
AAPXXVPQALSATSILYYVGRKPKVLRKHRMIVR

SEQ ID NO: 48789 - protein, 27 aa, Artificial Sequence
  Cyclic GFR-binding peptide
PTELSATSMLYYDENEKVVLRKHRDMV

SEQ ID NO: 48790 - protein, 25 aa, Artificial Sequence
  Cyclic GFR-binding peptide
LNAISVLYFDDMGVPTLKKYREGMS

SEQ ID NO: 48791 - protein, 21 aa, Artificial Sequence
  Cyclic GFR-binding peptide
SATSVLYYDDSSNVILRKHRN

SEQ ID NO: 48792 - protein, 29 aa, Artificial Sequence
  Cyclic GFR-binding peptide
  MOD_RES (1), (1): Xaa is C or S
XVPTELNAISMLYFDENEKVVLKKYRDMV

SEQ ID NO: 48793 - protein, 37 aa, Artificial Sequence; identical to SEQ ID NO: 8818
  Cyclic GFR-binding peptide
  MOD_RES (4), (36): Xaa is C or S

SEQ ID NO: 48794 - protein, 33 aa, Artificial Sequence; identical to SEQ ID NO: 8819
  Cyclic GFR-binding peptide
  MOD_RES (31), (33): Xaa is C or S

SEQ ID NO: 48795 - protein, 34 aa, Artificial Sequence
  Cyclic GFR-binding peptide
  MOD_RES (6), (7): Xaa is C or S
YVPKPXXAPTKLSATSVLYYDDSSNVILRKHRNM

SEQ ID NO: 48796 - protein, 34 aa, Artificial Sequence
  Cyclic GFR-binding peptide
  MOD_RES (5), (6): Xaa is C or S
IPKAXXVPTELSPISMLYKDENEKVVLKYHYDMV

SEQ ID NO: 48797 - protein, 33 aa, Artificial Sequence
  Cyclic GFR-binding peptide
  MOD_RES (6), (7): Xaa is C or S
AVPKAXXAPTKLNAISVLYFDSSNNVILKKYRN

SEQ ID NO: 48798 - protein, 23 aa, Artificial Sequence
  Cyclic GFR-binding peptide
LSAISILYLVGRKPKVLKNYQMI

SEQ ID NO: 48799 - protein, 30 aa, Artificial Sequence
  Cyclic GFR-binding peptide
QVQLNAISVLYFEIVRKKPIFLKKYRTLED

SEQ ID NO: 48800 - protein, 37 aa, Artificial Sequence; identical to SEQ ID NO: 8823
  Cyclic GFR-binding peptide
  MOD_RES (2), (3), (36): Xaa is C or S

SEQ ID NO: 48801 - protein, 33 aa, Artificial Sequence
  Cyclic GFR-binding peptide
  MOD_RES (4), (4): Xaa is C or S
KPTXAPTKLSATSVLYYDDSSNVILRKHRNMVV

SEQ ID NO: 48802 - protein, 35 aa, Artificial Sequence; identical to SEQ ID NO: 8826
  Cyclic GFR-binding peptide
  MOD_RES (4), (5): Xaa is C or S

SEQ ID NO: 48803 - protein, 28 aa, Artificial Sequence
  Cyclic GFR-binding peptide
  MOD_RES (2), (3): Xaa is C or S
PXXVPQALSATSILYYVGRKPKVLRKHR

SEQ ID NO: 48804 - protein, 20 aa, Artificial Sequence
  Cyclic GFR-binding peptide
SPISMLYKDENEKVVLKYHY

SEQ ID NO: 48805 - protein, 31 aa, Artificial Sequence
  Cyclic GFR-binding peptide
  MOD_RES (5), (6): Xaa is C or S
SASPXXVPQDLSPISILYKVGRTPKVLKYHY

SEQ ID NO: 48806 - protein, 35 aa, Artificial Sequence
  Cyclic GFR-binding peptide
  MOD_RES (6), (7): Xaa is C or S
SIPKAXXVPTELSATSMLYYDEYDKVVLRKHREMV

SEQ ID NO: 48807 - protein, 33 aa, Artificial Sequence
  Cyclic GFR-binding peptide
  MOD_RES (5), (6): Xaa is C or S
SASPXXVPQDLSATSILYYVGRTPKVLRKHRMV

SEQ ID NO: 48808 - protein, 24 aa, Artificial Sequence
  Cyclic GFR-binding peptide
SQDLSPISILYKIGKTPKILKYHY

SEQ ID NO: 48809 - protein, 34 aa, Artificial Sequence; identical to SEQ ID NO: 8830
  Cyclic GFR-binding peptide
  MOD_RES (2), (3): Xaa is C or S

SEQ ID NO: 48810 - protein, 31 aa, Artificial Sequence
  Cyclic GFR-binding peptide
  MOD_RES (2), (3): Xaa is C or S
PXXAPTQLSPISVLYKDDSSNVILKYHYNMV

SEQ ID NO: 48811 - protein, 21 aa, Artificial Sequence
  Cyclic GFR-binding peptide
LSPISMLYKDENEKVVLKYHY

SEQ ID NO: 48812 - protein, 29 aa, Artificial Sequence
  Cyclic GFR-binding peptide
  MOD_RES (29), (29): Xaa is C or S
LSATSVLYYDDMGVPTLRKHREGMSVAEX

SEQ ID NO: 48813 - protein, 22 aa, Artificial Sequence
  Cyclic GFR-binding peptide
SAISILYLIGKTPKILKNYQMI

SEQ ID NO: 48814 - protein, 37 aa, Artificial Sequence; identical to SEQ ID NO: 8833
  Cyclic GFR-binding peptide
  MOD_RES (4), (5), (37): Xaa is C or S

SEQ ID NO: 48815 - protein, 32 aa, Artificial Sequence
  Cyclic GFR-binding peptide
  MOD_RES (1), (2): Xaa is C or S
XXVPTKLSATSVLYYDDMGVPTLRKHREGMSV

SEQ ID NO: 48816 - protein, 38 aa, Artificial Sequence; identical to SEQ ID NO: 8835
  Cyclic GFR-binding peptide
  MOD_RES (3), (4), (36), (38): Xaa is C or S

SEQ ID NO: 48817 - protein, 32 aa, Artificial Sequence
  Cyclic GFR-binding peptide
  MOD_RES (5), (6): Xaa is C or S
VPKPXXAPTQLSAISVLYLDDSSNVILKNYQN

SEQ ID NO: 48818 - protein, 35 aa, Artificial Sequence
  Cyclic GFR-binding peptide
  MOD_RES (32), (34): Xaa is C or S
QLSPISVLYKEIVRKKPIFLKYHYTLEDHLAXKXE

SEQ ID NO: 48819 - protein, 26 aa, Artificial Sequence
  Cyclic GFR-binding peptide
  MOD_RES (1), (1): Xaa is C or S
XVSQDLSPISILYKIGKTPKILKYHY

SEQ ID NO: 48820 - protein, 38 aa, Artificial Sequence; identical to SEQ ID NO: 8837
  Cyclic GFR-binding peptide
  MOD_RES (5), (37): Xaa is C or S

SEQ ID NO: 48821 - protein, 32 aa, Artificial Sequence
  Cyclic GFR-binding peptide
  MOD_RES (7), (7): Xaa is C or S
HVTKPTXAPTKLSPISVLYKDDSSNVILKYHY

SEQ ID NO: 48822 - protein, 32 aa, Artificial Sequence
  Cyclic GFR-binding peptide
  MOD_RES (5), (6): Xaa is C or S
SAAPXXVPQALNAISILYFVGRKPKVLKKYRM

SEQ ID NO: 48823 - protein, 32 aa, Artificial Sequence
  Cyclic GFR-binding peptide
  MOD_RES (30), (32): Xaa is C or S
PQDLSPISILYKVGRTPKVLKYHYMVVKSXKX

SEQ ID NO: 48824 - protein, 26 aa, Artificial Sequence
  Cyclic GFR-binding peptide
QDLNAISILYFIGKTPKILKKYRMIV

SEQ ID NO: 48825 - protein, 30 aa, Artificial Sequence
  Cyclic GFR-binding peptide
  MOD_RES (29), (29): Xaa is C or S
ELSPISMLYKDENEKVVLKYHYDMVVEGXG

SEQ ID NO: 48826 - protein, 39 aa, Artificial Sequence; identical to SEQ ID NO: 8838
  Cyclic GFR-binding peptide
  MOD_RES (37), (39): Xaa is C or S

SEQ ID NO: 48827 - protein, 31 aa, Artificial Sequence
  Cyclic GFR-binding peptide
  MOD_RES (30), (30): Xaa is C or S
PQALNAISILYFVGRKPKVLKKYRMIVRSXK

SEQ ID NO: 48828 - protein, 26 aa, Artificial Sequence
  Cyclic GFR-binding peptide
VPTELSPISMLYKDEYDKVVLKYHYE

SEQ ID NO: 48829 - protein, 31 aa, Artificial Sequence
  Cyclic GFR-binding peptide
  MOD_RES (4), (5): Xaa is C or S
PKPXXAPTKLSAISVLYLDDSSNVILKNYQN

SEQ ID NO: 48830 - protein, 30 aa, Artificial Sequence; identical to SEQ ID NO: 8841
  Cyclic GFR-binding peptide

SEQ ID NO: 48831 - protein, 29 aa, Artificial Sequence
  Cyclic GFR-binding peptide
  MOD_RES (29), (29): Xaa is C or S
QALSAISILYLVGRKPKVLKNYQMIVRSX

SEQ ID NO: 48832 - protein, 40 aa, Artificial Sequence; identical to SEQ ID NO: 8843
  Cyclic GFR-binding peptide
  MOD_RES (6), (7), (39): Xaa is C or S

SEQ ID NO: 48833 - protein, 27 aa, Artificial Sequence
  Cyclic GFR-binding peptide
ELSPISMLYKDENEKVVLKYHYDMVVE

SEQ ID NO: 48834 - protein, 26 aa, Artificial Sequence
  Cyclic GFR-binding peptide
LSPISILYKIGKTPKILKYHYMIVKS

SEQ ID NO: 48835 - protein, 29 aa, Artificial Sequence
  Cyclic GFR-binding peptide
  MOD_RES (27), (29): Xaa is C or S
NAISMLYFDENEKVVLKKYRDMVVEGXGX

SEQ ID NO: 48836 - protein, 33 aa, Artificial Sequence
  Cyclic GFR-binding peptide
QVQLSPISVLYKEIVRKKPIFLKYHYTLEDHLA

SEQ ID NO: 48837 - protein, 37 aa, Artificial Sequence; identical to SEQ ID NO: 8845
  Cyclic GFR-binding peptide
  MOD_RES (3), (4), (35), (37): Xaa is C or S

SEQ ID NO: 48838 - protein, 38 aa, Artificial Sequence; identical to SEQ ID NO: 8847
  Cyclic GFR-binding peptide
  MOD_RES (4), (4): Xaa is C or S

SEQ ID NO: 48839 - protein, 43 aa, Artificial Sequence; identical to SEQ ID NO: 8848
  Cyclic GFR-binding peptide
  MOD_RES (3), (40), (42): Xaa is C or S

SEQ ID NO: 48840 - protein, 37 aa, Artificial Sequence; identical to SEQ ID NO: 8849
  Cyclic GFR-binding peptide
  MOD_RES (4), (5), (37): Xaa is C or S

SEQ ID NO: 48841 - protein, 42 aa, Artificial Sequence; identical to SEQ ID NO: 8850
  Cyclic GFR-binding peptide
  MOD_RES (6), (7), (39), (41): Xaa is C or S

SEQ ID NO: 48842 - protein, 23 aa, Artificial Sequence
  Cyclic GFR-binding peptide
SPISILYKIGKTPKILKYHYMIV

SEQ ID NO: 48843 - protein, 31 aa, Artificial Sequence
  Cyclic GFR-binding peptide
  MOD_RES (1), (2): Xaa is C or S
XXVSQDLSPISILYKIGKTPKILKYHYMIVK

SEQ ID NO: 48844 - protein, 28 aa, Artificial Sequence
  Cyclic GFR-binding peptide
VPTELSATSMLYYDENEKVVLRKHRDMV

SEQ ID NO: 48845 - protein, 32 aa, Artificial Sequence; identical to SEQ ID NO: 8851
  Cyclic GFR-binding peptide
  MOD_RES (1), (2): Xaa is C or S

SEQ ID NO: 48846 - protein, 20 aa, Artificial Sequence
  Cyclic GFR-binding peptide
NAISMLYFDEYDKVVLKKYR

SEQ ID NO: 48847 - protein, 38 aa, Artificial Sequence; identical to SEQ ID NO: 8854
  Cyclic GFR-binding peptide
  MOD_RES (2), (3), (35), (37): Xaa is C or S

SEQ ID NO: 48848 - protein, 30 aa, Artificial Sequence
  Cyclic GFR-binding peptide
PTELNAISMLYFDENEKVVLKKYRDMVVEG

SEQ ID NO: 48849 - protein, 29 aa, Artificial Sequence
  Cyclic GFR-binding peptide
  MOD_RES (27), (29): Xaa is C or S
SAISVLYLDDSSNVILKNYQNMVVRAXGX

SEQ ID NO: 48850 - protein, 30 aa, Artificial Sequence
  Cyclic GFR-binding peptide
  MOD_RES (28), (30): Xaa is C or S
ALSAISILYLVGRKPKVLKNYQMIVRSXKX

SEQ ID NO: 48851 - protein, 37 aa, Artificial Sequence; identical to SEQ ID NO: 8855
  Cyclic GFR-binding peptide
  MOD_RES (4), (5), (36): Xaa is C or S

SEQ ID NO: 48852 - protein, 28 aa, Artificial Sequence
  Cyclic GFR-binding peptide
TQVQLSAISVLYLEIVRKKPIFLKNYQT

SEQ ID NO: 48853 - protein, 35 aa, Artificial Sequence
  Cyclic GFR-binding peptide
  MOD_RES (5), (6): Xaa is C or S
IPKAXXVPTELSATSMLYYDEYDKVVLRKHREMVV

SEQ ID NO: 48854 - protein, 24 aa, Artificial Sequence
  Cyclic GFR-binding peptide
QDLSAISILYLVGRTPKVLKNYQM

SEQ ID NO: 48855 - protein, 38 aa, Artificial Sequence; identical to SEQ ID NO: 8859
  Cyclic GFR-binding peptide
  MOD_RES (6), (38): Xaa is C or S

SEQ ID NO: 48856 - protein, 31 aa, Artificial Sequence
  Cyclic GFR-binding peptide
  MOD_RES (31), (31): Xaa is C or S
LNAISVLYFEIVRKKPIFLKKYRTLEDHLAX

SEQ ID NO: 48857 - protein, 40 aa, Artificial Sequence; identical to SEQ ID NO: 8861
  Cyclic GFR-binding peptide
  MOD_RES (6), (7), (39): Xaa is C or S

SEQ ID NO: 48858 - protein, 36 aa, Artificial Sequence; identical to SEQ ID NO: 8862
  Cyclic GFR-binding peptide
  MOD_RES (1), (34), (36): Xaa is C or S

SEQ ID NO: 48859 - protein, 36 aa, Artificial Sequence
  Cyclic GFR-binding peptide
  MOD_RES (6), (7): Xaa is C or S
ASASPXXVPQDLSPISILYKVGRTPKVLKYHYMVVK

SEQ ID NO: 48860 - protein, 32 aa, Artificial Sequence
  Cyclic GFR-binding peptide
  MOD_RES (4), (5): Xaa is C or S
ASPXXVSQDLNAISILYFIGKTPKILKKYRMI

SEQ ID NO: 48861 - protein, 35 aa, Artificial Sequence; identical to SEQ ID NO: 8863
  Cyclic GFR-binding peptide
  MOD_RES (1), (2), (34): Xaa is C or S

SEQ ID NO: 48862 - protein, 34 aa, Artificial Sequence
  Cyclic GFR-binding peptide
  MOD_RES (3), (4): Xaa is C or S
KAXXVPTKLSATSVLYYDDMGVPTLRKHREGMSV

SEQ ID NO: 48863 - protein, 39 aa, Artificial Sequence; identical to SEQ ID NO: 8864
  Cyclic GFR-binding peptide
  MOD_RES (3), (4), (36), (38): Xaa is C or S

SEQ ID NO: 48864 - protein, 23 aa, Artificial Sequence
  Cyclic GFR-binding peptide
QDLNAISILYFIGKTPKILKKYR

SEQ ID NO: 48865 - protein, 31 aa, Artificial Sequence
  Cyclic GFR-binding peptide
  MOD_RES (28), (30): Xaa is C or S
ALNAISILYFVGRKPKVLKKYRMIVRSXKXS

SEQ ID NO: 48866 - protein, 22 aa, Artificial Sequence
  Cyclic GFR-binding peptide
SATSVLYYEIVRKKPIFLRKHR

SEQ ID NO: 48867 - protein, 24 aa, Artificial Sequence
  Cyclic GFR-binding peptide
ELSPISMLYKDEYDKVVLKYHYEM

SEQ ID NO: 48868 - protein, 26 aa, Artificial Sequence
  Cyclic GFR-binding peptide
PTKLSAISVLYLDDSSNVILKNYQNM

SEQ ID NO: 48869 - protein, 26 aa, Artificial Sequence
  Cyclic GFR-binding peptide
TKLSAISVLYLDDMGVPTLKNYQEGM

SEQ ID NO: 48870 - protein, 34 aa, Artificial Sequence
  Cyclic GFR-binding peptide
  MOD_RES (4), (5): Xaa is C or S
GKAXXVPTKLSATSVLYYDDMGVPTLRKHREGMS

SEQ ID NO: 48871 - protein, 29 aa, Artificial Sequence
  Cyclic GFR-binding peptide
SAISVLYLDDSSNVILKNYQAAAAAAAAA

SEQ ID NO: 48872 - protein, 32 aa, Artificial Sequence; identical to SEQ ID NO: 8867
  Cyclic GFR-binding peptide
  MOD_RES (1), (1): Xaa is C or S

SEQ ID NO: 48873 - protein, 26 aa, Artificial Sequence
  Cyclic GFR-binding peptide
VPTELSATSMLYYDENEKVVLRKHRD

SEQ ID NO: 48874 - protein, 36 aa, Artificial Sequence; identical to SEQ ID NO: 8868
  Cyclic GFR-binding peptide
  MOD_RES (6), (6): Xaa is C or S

SEQ ID NO: 48875 - protein, 28 aa, Artificial Sequence
  Cyclic GFR-binding peptide
  MOD_RES (1), (2): Xaa is C or S
XXVPQALNAISILYFVGRKPKVLKKYRM

SEQ ID NO: 48876 - protein, 30 aa, Artificial Sequence
  Cyclic GFR-binding peptide
  MOD_RES (3), (4): Xaa is C or S
KAXXAPTKLSAISVLYLDSSNNVILKNYQN

SEQ ID NO: 48877 - protein, 40 aa, Artificial Sequence; identical to SEQ ID NO: 8869
  Cyclic GFR-binding peptide
  MOD_RES (4), (5), (37), (39): Xaa is C or S

SEQ ID NO: 48878 - protein, 31 aa, Artificial Sequence
  Cyclic GFR-binding peptide
  MOD_RES (29), (31): Xaa is C or S
QALSPISILYKVGRKPKVLKYHYMIVRSXKX

SEQ ID NO: 48879 - protein, 33 aa, Artificial Sequence
  Cyclic GFR-binding peptide
  MOD_RES (3), (4): Xaa is C or S
KAXXVPTKLSATSVLYYDDMGVPTLRKHREGMS

SEQ ID NO: 48880 - protein, 22 aa, Artificial Sequence
  Cyclic GFR-binding peptide
NAISMLYFDENEKVVLKKYRDM

SEQ ID NO: 48881 - protein, 37 aa, Artificial Sequence; identical to SEQ ID NO: 8871
  Cyclic GFR-binding peptide
  MOD_RES (3), (4), (35), (37): Xaa is C or S

SEQ ID NO: 48882 - protein, 32 aa, Artificial Sequence
  Cyclic GFR-binding peptide
  MOD_RES (6), (7): Xaa is C or S
TVPKPXXAPTQLSPISVLYKDDSSNVILKYHY

SEQ ID NO: 48883 - protein, 41 aa, Artificial Sequence; identical to SEQ ID NO: 8872
  Cyclic GFR-binding peptide
  MOD_RES (2), (39), (41): Xaa is C or S

SEQ ID NO: 48884 - protein, 36 aa, Artificial Sequence; identical to SEQ ID NO: 8874
  Cyclic GFR-binding peptide
  MOD_RES (2), (3), (35): Xaa is C or S

SEQ ID NO: 48885 - protein, 27 aa, Artificial Sequence
  Cyclic GFR-binding peptide
  MOD_RES (27), (27): Xaa is C or S
LSPISILYKVGRKPKVLKYHYMIVRSX

SEQ ID NO: 48886 - protein, 29 aa, Artificial Sequence
  Cyclic GFR-binding peptide
  MOD_RES (2), (3): Xaa is C or S
AXXVPTELNAISMLYFDEYDKVVLKKYRE

SEQ ID NO: 48887 - protein, 27 aa, Artificial Sequence
  Cyclic GFR-binding peptide
  MOD_RES (26), (26): Xaa is C or S
SATSILYYVGRTPKVLRKHRMVVKSXK

SEQ ID NO: 48888 - protein, 34 aa, Artificial Sequence
  Cyclic GFR-binding peptide
  MOD_RES (5), (6): Xaa is C or S
SAAPXXVPQALSPISILYKVGRKPKVLKYHYMIV

SEQ ID NO: 48889 - protein, 32 aa, Artificial Sequence
  Cyclic GFR-binding peptide
  MOD_RES (5), (6): Xaa is C or S
SASPXXVPQDLSATSILYYVGRTPKVLRKHRM

SEQ ID NO: 48890 - protein, 30 aa, Artificial Sequence
  Cyclic GFR-binding peptide
  MOD_RES (4), (5): Xaa is C or S
ASPXXVSQDLNAISILYFIGKTPKILKKYR

SEQ ID NO: 48891 - protein, 35 aa, Artificial Sequence; identical to SEQ ID NO: 8876
  Cyclic GFR-binding peptide
  MOD_RES (1), (32), (34): Xaa is C or S

SEQ ID NO: 48892 - protein, 39 aa, Artificial Sequence; identical to SEQ ID NO: 8879
  Cyclic GFR-binding peptide
  MOD_RES (3), (4), (36), (38): Xaa is C or S

SEQ ID NO: 48893 - protein, 28 aa, Artificial Sequence
  Cyclic GFR-binding peptide
ELNAISMLYFDENEKVVLKKYRDMVVEG

SEQ ID NO: 48894 - protein, 31 aa, Artificial Sequence
  Cyclic GFR-binding peptide
QVQLSATSVLYYEIVRKKPIFLRKHRTLEDH

SEQ ID NO: 48895 - protein, 33 aa, Artificial Sequence; identical to SEQ ID NO: 8881
  Cyclic GFR-binding peptide
  MOD_RES (2), (3): Xaa is C or S

SEQ ID NO: 48896 - protein, 25 aa, Artificial Sequence
  Cyclic GFR-binding peptide
VPTELSATSMLYYDENEKVVLRKHR

SEQ ID NO: 48897 - protein, 34 aa, Artificial Sequence
  Cyclic GFR-binding peptide
  MOD_RES (4), (5): Xaa is C or S
ASPXXVPQDLSAISILYLVGRTPKVLKNYQMVVK

SEQ ID NO: 48898 - protein, 31 aa, Artificial Sequence
  Cyclic GFR-binding peptide
  MOD_RES (1), (2): Xaa is C or S
XXVPTKLSATSVLYYDDMGVPTLRKHREGMS

SEQ ID NO: 48899 - protein, 33 aa, Artificial Sequence; identical to SEQ ID NO: 8882
  Cyclic GFR-binding peptide
  MOD_RES (1), (32): Xaa is C or S

SEQ ID NO: 48900 - protein, 31 aa, Artificial Sequence
  Cyclic GFR-binding peptide
  MOD_RES (4), (5): Xaa is C or S
ASPXXVSQDLNAISILYFIGKTPKILKKYRM

SEQ ID NO: 48901 - protein, 30 aa, Artificial Sequence
  Cyclic GFR-binding peptide
  MOD_RES (29), (30): Xaa is C or S
VMDNSLQEVVNNASDYYLITLPELRTPVXX

SEQ ID NO: 48902 - protein, 36 aa, Artificial Sequence; identical to SEQ ID NO: 8883
  Cyclic GFR-binding peptide
  MOD_RES (2), (4), (36): Xaa is C or S

SEQ ID NO: 48903 - protein, 32 aa, Artificial Sequence
  Cyclic GFR-binding peptide
  MOD_RES (26), (27): Xaa is C or S
NSLQEIVNSSDDYYVVPLPELKTPAXXPKPVY

SEQ ID NO: 48904 - protein, 35 aa, Artificial Sequence; identical to SEQ ID NO: 8884
  Cyclic GFR-binding peptide
  MOD_RES (1), (33), (34): Xaa is C or S

SEQ ID NO: 48905 - protein, 34 aa, Artificial Sequence; identical to SEQ ID NO: 8885
  Cyclic GFR-binding peptide
  MOD_RES (2), (34): Xaa is C or S

SEQ ID NO: 48906 - protein, 25 aa, Artificial Sequence
  Cyclic GFR-binding peptide
RYKKLVVNNASDFYLISIANLRTPV

SEQ ID NO: 48907 - protein, 25 aa, Artificial Sequence
  Cyclic GFR-binding peptide
EYQKYIVNSSDDIFLVSIPSLKTPA

SEQ ID NO: 48908 - protein, 28 aa, Artificial Sequence
  Cyclic GFR-binding peptide
  MOD_RES (27), (28): Xaa is C or S
DNSLQEVVNNASDYYVIPLPELRTPVXX

SEQ ID NO: 48909 - protein, 32 aa, Artificial Sequence
  Cyclic GFR-binding peptide
  MOD_RES (26), (27): Xaa is C or S
NSLQEVKPTRGVYYVIPLPELDQPVXXPSASA

SEQ ID NO: 48910 - protein, 40 aa, Artificial Sequence; identical to SEQ ID NO: 8886
  Cyclic GFR-binding peptide
  MOD_RES (2), (34), (35): Xaa is C or S

SEQ ID NO: 48911 - protein, 27 aa, Artificial Sequence
  Cyclic GFR-binding peptide
  MOD_RES (26), (26): Xaa is C or S
NSLQEIVNSSDDYYLVTLPELKTPAXT

SEQ ID NO: 48912 - protein, 26 aa, Artificial Sequence
  Cyclic GFR-binding peptide
VMNNSLQEIVNSSDDYYLVTLPELQT

SEQ ID NO: 48913 - protein, 35 aa, Artificial Sequence; identical to SEQ ID NO: 8887
  Cyclic GFR-binding peptide
  MOD_RES (1), (33), (34): Xaa is C or S

SEQ ID NO: 48914 - protein, 34 aa, Artificial Sequence
  Cyclic GFR-binding peptide
  MOD_RES (28), (29): Xaa is C or S
VMNSLQEVKPTRGVYYVIPLPELDQPVXXPSASA

SEQ ID NO: 48915 - protein, 31 aa, Artificial Sequence
  Cyclic GFR-binding peptide
  MOD_RES (29), (30): Xaa is C or S
VVMEYQKYVKPTRGVIFLISIPSLDQPVXXP

SEQ ID NO: 48916 - protein, 29 aa, Artificial Sequence
  Cyclic GFR-binding peptide
RVVMNEYQKYIVNSSDDIFLVSIPSLQTP

SEQ ID NO: 48917 - protein, 32 aa, Artificial Sequence
  Cyclic GFR-binding peptide
  MOD_RES (26), (27): Xaa is C or S
QYNKLVVNNASDLYLISIASLRTPVXXTPPTS

SEQ ID NO: 48918 - protein, 36 aa, Artificial Sequence
  Cyclic GFR-binding peptide
  MOD_RES (30), (31): Xaa is C or S
RVIMEYQKYVKPKRGVIFLISIPSLAQPVXXPAASA

SEQ ID NO: 48919 - protein, 33 aa, Artificial Sequence
  Cyclic GFR-binding peptide
  MOD_RES (27), (28): Xaa is C or S
MNSLQEIKPTKGIYYVIPLPELDQSVXXPSASA

SEQ ID NO: 48920 - protein, 35 aa, Artificial Sequence; identical to SEQ ID NO: 8890
  Cyclic GFR-binding peptide
  MOD_RES (1), (33), (34): Xaa is C or S

SEQ ID NO: 48921 - protein, 35 aa, Artificial Sequence; identical to SEQ ID NO: 8891
  Cyclic GFR-binding peptide
  MOD_RES (2), (34), (35): Xaa is C or S

SEQ ID NO: 48922 - protein, 27 aa, Artificial Sequence
  Cyclic GFR-binding peptide
  MOD_RES (27), (27): Xaa is C or S
DRYKKLVVNNASDFYLISIANLRTPVX

SEQ ID NO: 48923 - protein, 30 aa, Artificial Sequence
  Cyclic GFR-binding peptide
  MOD_RES (27), (28): Xaa is C or S
MNSLQEIKPTKGIYYVIPLPELDQSVXXPS

SEQ ID NO: 48924 - protein, 27 aa, Artificial Sequence
  Cyclic GFR-binding peptide
EVVMDEYQKYVVKENEDIFLMSIPSLE

SEQ ID NO: 48925 - protein, 37 aa, Artificial Sequence; identical to SEQ ID NO: 8896
  Cyclic GFR-binding peptide
  MOD_RES (32), (33): Xaa is C or S

SEQ ID NO: 48926 - protein, 22 aa, Artificial Sequence
  Cyclic GFR-binding peptide
NNSLQEIVNSSDDYYVVPLPEL

SEQ ID NO: 48927 - protein, 27 aa, Artificial Sequence
  Cyclic GFR-binding peptide
VVMDEYQKYVVKENEDIFLMSIPSLET

SEQ ID NO: 48928 - protein, 35 aa, Artificial Sequence; identical to SEQ ID NO: 8898
  Cyclic GFR-binding peptide
  MOD_RES (31), (32): Xaa is C or S

SEQ ID NO: 48929 - protein, 33 aa, Artificial Sequence
  Cyclic GFR-binding peptide
  MOD_RES (2), (4): Xaa is C or S
HXGXSRVVMNNSLQEIVNSSDDYYVVPLPELKT

SEQ ID NO: 48930 - protein, 25 aa, Artificial Sequence
  Cyclic GFR-binding peptide
DNSLQEVVKENEDYYVMPLPELETP

SEQ ID NO: 48931 - protein, 34 aa, Artificial Sequence
  Cyclic GFR-binding peptide
  MOD_RES (2), (4): Xaa is C or S
RXGXSEVVMDQYNKLVVNNASDLYLISIASLRTP

SEQ ID NO: 48932 - protein, 33 aa, Artificial Sequence; identical to SEQ ID NO: 8901
  Cyclic GFR-binding peptide
  MOD_RES (2), (2): Xaa is C or S

SEQ ID NO: 48933 - protein, 37 aa, Artificial Sequence; identical to SEQ ID NO: 8902
  Cyclic GFR-binding peptide
  MOD_RES (1), (33), (34): Xaa is C or S

SEQ ID NO: 48934 - protein, 24 aa, Artificial Sequence
  Cyclic GFR-binding peptide
NSLQEIVNSSDDYYLVTLPELKTP

SEQ ID NO: 48935 - protein, 30 aa, Artificial Sequence
  Cyclic GFR-binding peptide
  MOD_RES (1), (1): Xaa is C or S
XSKVIMNSLQEIKPTKGIYYVIPLPELDQS

SEQ ID NO: 48936 - protein, 26 aa, Artificial Sequence
  Cyclic GFR-binding peptide
SEVVMDNSLQEVVNNASDYYLITLPE

SEQ ID NO: 48937 - protein, 25 aa, Artificial Sequence
  Cyclic GFR-binding peptide
IMEYQKYVKPKRGVIFLISIPSLAQ

SEQ ID NO: 48938 - protein, 41 aa, Artificial Sequence; identical to SEQ ID NO: 8903
  Cyclic GFR-binding peptide
  MOD_RES (1), (3), (35), (36): Xaa is C or S

SEQ ID NO: 48939 - protein, 20 aa, Artificial Sequence
  Cyclic GFR-binding peptide
EYQKYVKPKRGVIFLISIPS

SEQ ID NO: 48940 - protein, 29 aa, Artificial Sequence
  Cyclic GFR-binding peptide
  MOD_RES (1), (3): Xaa is C or S
XGXGEVVMEEYQKYVVKDYEDIFLMSIPS

SEQ ID NO: 48941 - protein, 35 aa, Artificial Sequence
  Cyclic GFR-binding peptide
  MOD_RES (30), (31): Xaa is C or S
VVMDQYNKLVVNNASDLYLISIASLRTPVXXTPPT

SEQ ID NO: 48942 - protein, 30 aa, Artificial Sequence
  Cyclic GFR-binding peptide
  MOD_RES (27), (28): Xaa is C or S
DEYQKYVVKENEDIFLMSIPSLETPVXXAK

SEQ ID NO: 48943 - protein, 40 aa, Artificial Sequence; identical to SEQ ID NO: 8906
  Cyclic GFR-binding peptide
  MOD_RES (1), (3), (34), (35): Xaa is C or S

SEQ ID NO: 48944 - protein, 35 aa, Artificial Sequence; identical to SEQ ID NO: 8907
  Cyclic GFR-binding peptide
  MOD_RES (2), (4): Xaa is C or S

SEQ ID NO: 48945 - protein, 25 aa, Artificial Sequence
  Cyclic GFR-binding peptide
VMNNSLQEIVNSSDDYYLVTLPELK

SEQ ID NO: 48946 - protein, 34 aa, Artificial Sequence
  Cyclic GFR-binding peptide
  MOD_RES (28), (29): Xaa is C or S
MENSLQEVVKDYEDYYLMTLPELETPVXXAKPIS

SEQ ID NO: 48947 - protein, 25 aa, Artificial Sequence
  Cyclic GFR-binding peptide
VVMNEYQKYIVNSSDDIFLVSIPSL

SEQ ID NO: 48948 - protein, 31 aa, Artificial Sequence; identical to SEQ ID NO: 8910
  Cyclic GFR-binding peptide

SEQ ID NO: 48949 - protein, 24 aa, Artificial Sequence
  Cyclic GFR-binding peptide
EYQKYVVKDYEDIFLMSIPSLETP

SEQ ID NO: 48950 - protein, 32 aa, Artificial Sequence; identical to SEQ ID NO: 8912
  Cyclic GFR-binding peptide
  MOD_RES (1), (1): Xaa is C or S

SEQ ID NO: 48951 - protein, 24 aa, Artificial Sequence
  Cyclic GFR-binding peptide
MDNSLQEVVKENEDYYVMPLPELE

SEQ ID NO: 48952 - protein, 30 aa, Artificial Sequence
  Cyclic GFR-binding peptide
  MOD_RES (30), (30): Xaa is C or S
VVMEEYQKYVVKDYEDIFLMSIPSLETPVX

SEQ ID NO: 48953 - protein, 27 aa, Artificial Sequence
  Cyclic GFR-binding peptide
  MOD_RES (26), (27): Xaa is C or S
EYQKYIVNSSDDIFLVSIPSLQTPAXX

SEQ ID NO: 48954 - protein, 27 aa, Artificial Sequence
  Cyclic GFR-binding peptide
  MOD_RES (1), (1): Xaa is C or S
XSRVIMEYQKYVKPKRGVIFLISIPSL

SEQ ID NO: 48955 - protein, 35 aa, Artificial Sequence; identical to SEQ ID NO: 8914
  Cyclic GFR-binding peptide
  MOD_RES (31), (32): Xaa is C or S

SEQ ID NO: 48956 - protein, 27 aa, Artificial Sequence
  Cyclic GFR-binding peptide
VMNNSLQEIVNSSDDYYVVPLPELQTP

SEQ ID NO: 48957 - protein, 28 aa, Artificial Sequence
  Cyclic GFR-binding peptide
  MOD_RES (26), (26): Xaa is C or S
NSLQEIVNSSDDYYLVTLPELKTPAXTP

SEQ ID NO: 48958 - protein, 25 aa, Artificial Sequence
  Cyclic GFR-binding peptide
NSLQEVVKENEDYYVMPLPELETPV

SEQ ID NO: 48959 - protein, 36 aa, Artificial Sequence; identical to SEQ ID NO: 8918
  Cyclic GFR-binding peptide
  MOD_RES (1), (33), (34): Xaa is C or S

SEQ ID NO: 48960 - protein, 30 aa, Artificial Sequence
  Cyclic GFR-binding peptide
  MOD_RES (29), (30): Xaa is C or S
VMDQYNKLVVNNASDLYLISIASLRTPVXX

SEQ ID NO: 48961 - protein, 27 aa, Artificial Sequence
  Cyclic GFR-binding peptide
SKVIMNSLQEIKPTKGIYYVIPLPELD

SEQ ID NO: 48962 - protein, 21 aa, Artificial Sequence
  Cyclic GFR-binding peptide
NSLQEVKPTRGVYYVIPLPEL

SEQ ID NO: 48963 - protein, 30 aa, Artificial Sequence
  Cyclic GFR-binding peptide
  MOD_RES (27), (28): Xaa is C or S
DNSLQEVVNNASDYYVIPLPELRTPVXXTP

SEQ ID NO: 48964 - protein, 27 aa, Artificial Sequence
  Cyclic GFR-binding peptide
EVVMDNSLQEVVNNASDYYVIPLPELR

SEQ ID NO: 48965 - protein, 31 aa, Artificial Sequence
  Cyclic GFR-binding peptide
  MOD_RES (1), (3): Xaa is C or S
XGXARVVMNNSLQEIVNSSDDYYVVPLPELQ

SEQ ID NO: 48966 - protein, 27 aa, Artificial Sequence
  Cyclic GFR-binding peptide
VVMNEYQKYIVNSSDDIFLVSIPSLKT

SEQ ID NO: 48967 - protein, 41 aa, Artificial Sequence; identical to SEQ ID NO: 8922
  Cyclic GFR-binding peptide
  MOD_RES (2), (4), (36), (37): Xaa is C or S

SEQ ID NO: 48968 - protein, 32 aa, Artificial Sequence
  Cyclic GFR-binding peptide
  MOD_RES (30), (30): Xaa is C or S
VVMNNSLQEIVNSSDDYYVVPLPELKTPAXTP

SEQ ID NO: 48969 - protein, 29 aa, Artificial Sequence
  Cyclic GFR-binding peptide
SKVVMEYQKYVKPTRGVIFLISIPSLDQP

SEQ ID NO: 48970 - protein, 34 aa, Artificial Sequence
  Cyclic GFR-binding peptide
  MOD_RES (30), (31): Xaa is C or S
VVMNEYQKYIVNSSDDIFLVSIPSLKTPAXXPKP

SEQ ID NO: 48971 - protein, 32 aa, Artificial Sequence
  Cyclic GFR-binding peptide
  MOD_RES (1), (3): Xaa is C or S
XGXSEVVMDQYNKLVVNNASDLYLISIASLRT

SEQ ID NO: 48972 - protein, 32 aa, Artificial Sequence; identical to SEQ ID NO: 8924
  Cyclic GFR-binding peptide
  MOD_RES (31), (32): Xaa is C or S

SEQ ID NO: 48973 - protein, 30 aa, Artificial Sequence
  Cyclic GFR-binding peptide
  MOD_RES (2), (2): Xaa is C or S
GXSEVVMDNSLQEVVNNASDYYLITLPELR

SEQ ID NO: 48974 - protein, 40 aa, Artificial Sequence; identical to SEQ ID NO: 8925
  Cyclic GFR-binding peptide
  MOD_RES (2), (4), (35), (36): Xaa is C or S

SEQ ID NO: 48975 - protein, 30 aa, Artificial Sequence
  Cyclic GFR-binding peptide
  MOD_RES (1), (3): Xaa is C or S
XGXSEVVMDRYKKLVVNNASDFYLISIANL

SEQ ID NO: 48976 - protein, 30 aa, Artificial Sequence
  Cyclic GFR-binding peptide
  MOD_RES (26), (27): Xaa is C or S
NSLQEVVNNASDYYLITLPELRTPVXXTPP

SEQ ID NO: 48977 - protein, 32 aa, Artificial Sequence; identical to SEQ ID NO: 8928
  Cyclic GFR-binding peptide
  MOD_RES (32), (32): Xaa is C or S

SEQ ID NO: 48978 - protein, 39 aa, Artificial Sequence; identical to SEQ ID NO: 8929
  Cyclic GFR-binding peptide
  MOD_RES (1), (3), (35), (36): Xaa is C or S

SEQ ID NO: 48979 - protein, 26 aa, Artificial Sequence
  Cyclic GFR-binding peptide
  MOD_RES (26), (26): Xaa is C or S
NSLQEIVNSSDDYYVVPLPELQTPAX

SEQ ID NO: 48980 - protein, 32 aa, Artificial Sequence
  Cyclic GFR-binding peptide
  MOD_RES (26), (27): Xaa is C or S
NSLQEVVKDYEDYYVMPLPELETPVXXAKPIS

SEQ ID NO: 48981 - protein, 32 aa, Artificial Sequence
  Cyclic GFR-binding peptide
  MOD_RES (28), (29): Xaa is C or S
VMNSLQEVKPTRGVYYVIPLPELDQPVXXPSA

SEQ ID NO: 48982 - protein, 25 aa, Artificial Sequence
  Cyclic GFR-binding peptide
MNNSLQEIVNSSDDYYLVTLPELKT

SEQ ID NO: 48983 - protein, 33 aa, Artificial Sequence
  Cyclic GFR-binding peptide
  MOD_RES (1), (3): Xaa is C or S
XGXSEVVMDNSLQEVVNNASDYYLITLPELRTP

SEQ ID NO: 48984 - protein, 31 aa, Artificial Sequence
  Cyclic GFR-binding peptide
  MOD_RES (29), (30): Xaa is C or S
VVMNSLQEVKPTRGVYYVIPLPELDQPVXXP

SEQ ID NO: 48985 - protein, 31 aa, Artificial Sequence; identical to SEQ ID NO: 8932
  Cyclic GFR-binding peptide
  MOD_RES (31), (31): Xaa is C or S

SEQ ID NO: 48986 - protein, 32 aa, Artificial Sequence; identical to SEQ ID NO: 8934
  Cyclic GFR-binding peptide
  MOD_RES (31), (32): Xaa is C or S

SEQ ID NO: 48987 - protein, 29 aa, Artificial Sequence
  Cyclic GFR-binding peptide
VVMDNSLQEVVNNASDYYVIPLPELRTPV

SEQ ID NO: 48988 - protein, 30 aa, Artificial Sequence
  Cyclic GFR-binding peptide
  MOD_RES (30), (30): Xaa is C or S
KVVMNSLQEVKPTRGVYYVIPLPELDQPVX

SEQ ID NO: 48989 - protein, 31 aa, Artificial Sequence
  Cyclic GFR-binding peptide
  MOD_RES (28), (29): Xaa is C or S
MDNSLQEVVNNASDYYLITLPELRTPVXXTP

SEQ ID NO: 48990 - protein, 23 aa, Artificial Sequence
  Cyclic GFR-binding peptide
NNSLQEIVNSSDDYYLVTLPELQ

SEQ ID NO: 48991 - protein, 34 aa, Artificial Sequence; identical to SEQ ID NO: 8939
  Cyclic GFR-binding peptide
  MOD_RES (31), (31): Xaa is C or S

SEQ ID NO: 48992 - protein, 29 aa, Artificial Sequence
  Cyclic GFR-binding peptide
AAAAAAAAANSLQEVVKDYEDYYLMTLPE

SEQ ID NO: 48993 - protein, 38 aa, Artificial Sequence; identical to SEQ ID NO: 8946
  Cyclic GFR-binding peptide
  MOD_RES (1), (33), (34): Xaa is C or S

SEQ ID NO: 48994 - protein, 25 aa, Artificial Sequence
  Cyclic GFR-binding peptide
NEYQKYIVNSSDDIFLVSIPSLKTP

SEQ ID NO: 48995 - protein, 28 aa, Artificial Sequence
  Cyclic GFR-binding peptide
  MOD_RES (2), (2): Xaa is C or S
GXSRVVMNNSLQEIVNSSDDYYVVPLPE

SEQ ID NO: 48996 - protein, 30 aa, Artificial Sequence
  Cyclic GFR-binding peptide
  MOD_RES (29), (30): Xaa is C or S
VIMEYQKYIKPTKGIIFLISIPSLDQSVXX

SEQ ID NO: 48997 - protein, 39 aa, Artificial Sequence; identical to SEQ ID NO: 8950
  Cyclic GFR-binding peptide
  MOD_RES (2), (34): Xaa is C or S

SEQ ID NO: 48998 - protein, 33 aa, Artificial Sequence
  Cyclic GFR-binding peptide
  MOD_RES (27), (28): Xaa is C or S
MNSLQEVKPTRGVYYVIPLPELDQPVXXPSASA

SEQ ID NO: 48999 - protein, 34 aa, Artificial Sequence
  Cyclic GFR-binding peptide
  MOD_RES (30), (31): Xaa is C or S
VVMDNSLQEVVNNASDYYLITLPELRTPVXXTPP

SEQ ID NO: 49000 - protein, 32 aa, Artificial Sequence
  Cyclic GFR-binding peptide
  MOD_RES (26), (26): Xaa is C or S
EYQKYIVNSSDDIFLVSIPSLKTPAXTPKTVH

SEQ ID NO: 49001 - protein, 30 aa, Artificial Sequence
  Cyclic GFR-binding peptide
  MOD_RES (27), (28): Xaa is C or S
MNSLQEVKPKRGVYYLITLPELAQPVXXPA

SEQ ID NO: 49002 - protein, 28 aa, Artificial Sequence
  Cyclic GFR-binding peptide
GEVVMENSLQEVVKDYEDYYVMPLPELE

SEQ ID NO: 49003 - protein, 30 aa, Artificial Sequence
  Cyclic GFR-binding peptide
  MOD_RES (1), (1): Xaa is C or S
XSEVVMDRYKKLVVNNASDFYLISIANLRT

SEQ ID NO: 49004 - protein, 35 aa, Artificial Sequence; identical to SEQ ID NO: 8953
  Cyclic GFR-binding peptide
  MOD_RES (1), (3), (34), (35): Xaa is C or S

SEQ ID NO: 49005 - protein, 38 aa, Artificial Sequence; identical to SEQ ID NO: 8954
  Cyclic GFR-binding peptide
  MOD_RES (2), (4), (36), (37): Xaa is C or S

SEQ ID NO: 49006 - protein, 30 aa, Artificial Sequence
  Cyclic GFR-binding peptide
  MOD_RES (29), (30): Xaa is C or S
VMENSLQEVVKDYEDYYVMPLPELETPVXX

SEQ ID NO: 49007 - protein, 34 aa, Artificial Sequence; identical to SEQ ID NO: 8956
  Cyclic GFR-binding peptide
  MOD_RES (32), (33): Xaa is C or S

SEQ ID NO: 49008 - protein, 40 aa, Artificial Sequence; identical to SEQ ID NO: 8957
  Cyclic GFR-binding peptide
  MOD_RES (2), (34), (35): Xaa is C or S

SEQ ID NO: 49009 - protein, 32 aa, Artificial Sequence
  Cyclic GFR-binding peptide
  MOD_RES (28), (29): Xaa is C or S
IMNSLQEIKPTKGIYYVIPLPELDQSVXXPSA

SEQ ID NO: 49010 - protein, 33 aa, Artificial Sequence
  Cyclic GFR-binding peptide
  MOD_RES (30), (31): Xaa is C or S
KVIMNSLQEIKPTKGIYYVIPLPELDQSVXXPS

SEQ ID NO: 49011 - protein, 29 aa, Artificial Sequence
  Cyclic GFR-binding peptide
  MOD_RES (2), (2): Xaa is C or S
GXGEVVMDNSLQEVVKENEDYYLMTLPEL

SEQ ID NO: 49012 - protein, 34 aa, Artificial Sequence; identical to SEQ ID NO: 8959
  Cyclic GFR-binding peptide
  MOD_RES (1), (3): Xaa is C or S

SEQ ID NO: 49013 - protein, 30 aa, Artificial Sequence
  Cyclic GFR-binding peptide
  MOD_RES (1), (1): Xaa is C or S
XSEVVMDNSLQEVVNNASDYYVIPLPELRT

SEQ ID NO: 49014 - protein, 22 aa, Artificial Sequence
  Cyclic GFR-binding peptide
MEEYQKYVVKDYEDIFLMSIPS

SEQ ID NO: 49015 - protein, 30 aa, Artificial Sequence; identical to SEQ ID NO: 8961
  Cyclic GFR-binding peptide

SEQ ID NO: 49016 - protein, 37 aa, Artificial Sequence; identical to SEQ ID NO: 8963
  Cyclic GFR-binding peptide
  MOD_RES (1), (3), (34), (35): Xaa is C or S

SEQ ID NO: 49017 - protein, 26 aa, Artificial Sequence
  Cyclic GFR-binding peptide
VVMDNSLQEVVNNASDYYVIPLPELR

SEQ ID NO: 49018 - protein, 24 aa, Artificial Sequence
  Cyclic GFR-binding peptide
DNSLQEVVKENEDYYVMPLPELET

SEQ ID NO: 49019 - protein, 38 aa, Artificial Sequence; identical to SEQ ID NO: 8966
  Cyclic GFR-binding peptide
  MOD_RES (2), (4), (36), (37): Xaa is C or S

SEQ ID NO: 49020 - protein, 32 aa, Artificial Sequence
  Cyclic GFR-binding peptide
  MOD_RES (1), (3): Xaa is C or S
XGXSRVVMNNSLQEIVNSSDDYYLVTLPELKT

SEQ ID NO: 49021 - protein, 24 aa, Artificial Sequence
  Cyclic GFR-binding peptide
VVMDNSLQEVVKENEDYYLMTLPE

SEQ ID NO: 49022 - protein, 31 aa, Artificial Sequence; identical to SEQ ID NO: 8969
  Cyclic GFR-binding peptide
  MOD_RES (31), (31): Xaa is C or S

SEQ ID NO: 49023 - protein, 20 aa, Artificial Sequence
  Cyclic GFR-binding peptide
RYKKLVVNNASDFYLISIAN

SEQ ID NO: 49024 - protein, 22 aa, Artificial Sequence
  Cyclic GFR-binding peptide
DNSLQEVVKENEDYYVMPLPEL

SEQ ID NO: 49025 - protein, 41 aa, Artificial Sequence; identical to SEQ ID NO: 8973
  Cyclic GFR-binding peptide
  MOD_RES (2), (4), (35), (36): Xaa is C or S

SEQ ID NO: 49026 - protein, 37 aa, Artificial Sequence; identical to SEQ ID NO: 8974
  Cyclic GFR-binding peptide
  MOD_RES (31), (32): Xaa is C or S

SEQ ID NO: 49027 - protein, 33 aa, Artificial Sequence
  Cyclic GFR-binding peptide
  MOD_RES (28), (29): Xaa is C or S
MNNSLQEIVNSSDDYYVVPLPELKTPAXXPKPV

SEQ ID NO: 49028 - protein, 36 aa, Artificial Sequence; identical to SEQ ID NO: 8975
  Cyclic GFR-binding peptide
  MOD_RES (32), (33): Xaa is C or S

SEQ ID NO: 49029 - protein, 31 aa, Artificial Sequence
  Cyclic GFR-binding peptide
  MOD_RES (28), (29): Xaa is C or S
VMEYQKYVKPTRGVIFLISIPSLDQPVXXPS

SEQ ID NO: 49030 - protein, 31 aa, Artificial Sequence; identical to SEQ ID NO: 8978
  Cyclic GFR-binding peptide
  MOD_RES (1), (1): Xaa is C or S

SEQ ID NO: 49031 - protein, 28 aa, Artificial Sequence
  Cyclic GFR-binding peptide
RVVMNEYQKYIVNSSDDIFLVSIPSLQT

SEQ ID NO: 49032 - protein, 28 aa, Artificial Sequence
  Cyclic GFR-binding peptide
  MOD_RES (26), (27): Xaa is C or S
EYQKYIKPTKGIIFLISIPSLDQSVXXP

SEQ ID NO: 49033 - protein, 34 aa, Artificial Sequence; identical to SEQ ID NO: 8980
  Cyclic GFR-binding peptide
  MOD_RES (1), (3): Xaa is C or S

SEQ ID NO: 49034 - protein, 28 aa, Artificial Sequence
  Cyclic GFR-binding peptide
EVVMDQYNKLVVNNASDLYLISIASLRT

SEQ ID NO: 49035 - protein, 33 aa, Artificial Sequence
  Cyclic GFR-binding peptide
  MOD_RES (29), (30): Xaa is C or S
VMNNSLQEIVNSSDDYYLVTLPELQTPAXXPKP

SEQ ID NO: 49036 - protein, 35 aa, Artificial Sequence
  Cyclic GFR-binding peptide
  MOD_RES (29), (30): Xaa is C or S
VMNNSLQEIVNSSDDYYLVTLPELKTPAXXPKPVY

SEQ ID NO: 49037 - protein, 26 aa, Artificial Sequence
  Cyclic GFR-binding peptide
MNEYQKYIVNSSDDIFLVSIPSLKTP

SEQ ID NO: 49038 - protein, 29 aa, Artificial Sequence
  Cyclic GFR-binding peptide
RVIMNSLQEVKPKRGVYYLITLPELAQPV

SEQ ID NO: 49039 - protein, 28 aa, Artificial Sequence
  Cyclic GFR-binding peptide
GEVVMDNSLQEVVKENEDYYVMPLPELE

SEQ ID NO: 49040 - protein, 30 aa, Artificial Sequence
  Cyclic GFR-binding peptide
  MOD_RES (29), (30): Xaa is C or S
VMEEYQKYVVKDYEDIFLMSIPSLETPVXX

SEQ ID NO: 49041 - protein, 34 aa, Artificial Sequence; identical to SEQ ID NO: 8987
  Cyclic GFR-binding peptide
  MOD_RES (32), (33): Xaa is C or S

SEQ ID NO: 49042 - protein, 41 aa, Artificial Sequence; identical to SEQ ID NO: 8989
  Cyclic GFR-binding peptide
  MOD_RES (2), (4), (36), (37): Xaa is C or S

SEQ ID NO: 49043 - protein, 31 aa, Artificial Sequence
  Cyclic GFR-binding peptide
  MOD_RES (30), (31): Xaa is C or S
VVMNEYQKYIVNSSDDIFLVSIPSLQTPAXX

SEQ ID NO: 49044 - protein, 30 aa, Artificial Sequence
  Cyclic GFR-binding peptide
  MOD_RES (27), (28): Xaa is C or S
MNSLQEVKPTRGVYYVIPLPELDQPVXXPS

SEQ ID NO: 49045 - protein, 23 aa, Artificial Sequence
  Cyclic GFR-binding peptide
VMDNSLQEVVNNASDYYVIPLPE

SEQ ID NO: 49046 - protein, 29 aa, Artificial Sequence
  Cyclic GFR-binding peptide
VVMDRYKKLVVNNASDFYLISIANLRTPV

SEQ ID NO: 49047 - protein, 28 aa, Artificial Sequence
  Cyclic GFR-binding peptide
SKVVMEYQKYVKPTRGVIFLISIPSLDQ

SEQ ID NO: 49048 - protein, 33 aa, Artificial Sequence; identical to SEQ ID NO: 8990
  Cyclic GFR-binding peptide
  MOD_RES (1), (33): Xaa is C or S

SEQ ID NO: 49049 - protein, 35 aa, Artificial Sequence; identical to SEQ ID NO: 8991
  Cyclic GFR-binding peptide
  MOD_RES (1), (33), (34): Xaa is C or S

SEQ ID NO: 49050 - protein, 37 aa, Artificial Sequence; identical to SEQ ID NO: 8992
  Cyclic GFR-binding peptide
  MOD_RES (32), (33): Xaa is C or S

SEQ ID NO: 49051 - protein, 31 aa, Artificial Sequence
  Cyclic GFR-binding peptide
  MOD_RES (28), (29): Xaa is C or S
IMEYQKYIKPTKGIIFLISIPSLDQSVXXPS

SEQ ID NO: 49052 - protein, 28 aa, Artificial Sequence
  Cyclic GFR-binding peptide
VMDEYQKYVVKENEDIFLMSIPSLETPV

SEQ ID NO: 49053 - protein, 38 aa, Artificial Sequence; identical to SEQ ID NO: 8993
  Cyclic GFR-binding peptide
  MOD_RES (1), (33), (34): Xaa is C or S

SEQ ID NO: 49054 - protein, 26 aa, Artificial Sequence
  Cyclic GFR-binding peptide
EVVMDNSLQEVVNNASDYYVIPLPEL

SEQ ID NO: 49055 - protein, 31 aa, Artificial Sequence
  Cyclic GFR-binding peptide
  MOD_RES (1), (3): Xaa is C or S
XGXARVVMNEYQKYIVNSSDDIFLVSIPSLQ

SEQ ID NO: 49056 - protein, 37 aa, Artificial Sequence; identical to SEQ ID NO: 8994
  Cyclic GFR-binding peptide
  MOD_RES (1), (3), (34), (35): Xaa is C or S

SEQ ID NO: 49057 - protein, 35 aa, Artificial Sequence; identical to SEQ ID NO: 8995
  Cyclic GFR-binding peptide
  MOD_RES (1), (32), (33): Xaa is C or S

SEQ ID NO: 49058 - protein, 33 aa, Artificial Sequence
  Cyclic GFR-binding peptide
  MOD_RES (28), (29): Xaa is C or S
MDNSLQEVVKENEDYYLMTLPELETPVXXAKPI

SEQ ID NO: 49059 - protein, 34 aa, Artificial Sequence; identical to SEQ ID NO: 8997
  Cyclic GFR-binding peptide
  MOD_RES (31), (32): Xaa is C or S

SEQ ID NO: 49060 - protein, 30 aa, Artificial Sequence
  Cyclic GFR-binding peptide
ARVVMNNSLQEIVNSSDDYYLVTLPELQTP

SEQ ID NO: 49061 - protein, 21 aa, Artificial Sequence
  Cyclic GFR-binding peptide
EYQKYVVKDYEDIFLMSIPSL

SEQ ID NO: 49062 - protein, 32 aa, Artificial Sequence
  Cyclic GFR-binding peptide
  MOD_RES (29), (30): Xaa is C or S
VIMEYQKYVKPKRGVIFLISIPSLAQPVXXPA

SEQ ID NO: 49063 - protein, 33 aa, Artificial Sequence
  Cyclic GFR-binding peptide
  MOD_RES (1), (3): Xaa is C or S
XGXGEVVMENSLQEVVKDYEDYYVMPLPELETP

SEQ ID NO: 49064 - protein, 28 aa, Artificial Sequence
  Cyclic GFR-binding peptide
  MOD_RES (26), (27): Xaa is C or S
RYKKLVVNNASDFYLISIANLRTPVXXT

SEQ ID NO: 49065 - protein, 21 aa, Artificial Sequence
  Cyclic GFR-binding peptide
EYQKYIKPTKGIIFLISIPSL

SEQ ID NO: 49066 - protein, 34 aa, Artificial Sequence; identical to SEQ ID NO: 9000
  Cyclic GFR-binding peptide
  MOD_RES (1), (33), (34): Xaa is C or S

SEQ ID NO: 49067 - protein, 27 aa, Artificial Sequence
  Cyclic GFR-binding peptide
VMNEYQKYIVNSSDDIFLVSIPSLQTP

SEQ ID NO: 49068 - protein, 34 aa, Artificial Sequence; identical to SEQ ID NO: 9001
  Cyclic GFR-binding peptide
  MOD_RES (1), (3): Xaa is C or S

SEQ ID NO: 49069 - protein, 31 aa, Artificial Sequence
  Cyclic GFR-binding peptide
  MOD_RES (30), (31): Xaa is C or S
VVMENSLQEVVKDYEDYYVMPLPELETPVXX

SEQ ID NO: 49070 - protein, 27 aa, Artificial Sequence
  Cyclic GFR-binding peptide
SEVVMDQYNKLVVNNASDLYLISIASL

SEQ ID NO: 49071 - protein, 28 aa, Artificial Sequence
  Cyclic GFR-binding peptide
  MOD_RES (26), (27): Xaa is C or S
NSLQEVVKDYEDYYLMTLPELETPVXXA

SEQ ID NO: 49072 - protein, 27 aa, Artificial Sequence
  Cyclic GFR-binding peptide
SKVVMEYQKYVKPTRGVIFLISIPSLD

SEQ ID NO: 49073 - protein, 34 aa, Artificial Sequence; identical to SEQ ID NO: 9002
  Cyclic GFR-binding peptide
  MOD_RES (32), (32): Xaa is C or S

SEQ ID NO: 49074 - protein, 34 aa, Artificial Sequence; identical to SEQ ID NO: 9004
  Cyclic GFR-binding peptide
  MOD_RES (2), (33), (34): Xaa is C or S

SEQ ID NO: 49075 - protein, 30 aa, Artificial Sequence
  Cyclic GFR-binding peptide
  MOD_RES (2), (4): Xaa is C or S
HXGXARVVMNNSLQEIVNSSDDYYVVPLPE

SEQ ID NO: 49076 - protein, 32 aa, Artificial Sequence
  Cyclic GFR-binding peptide
  MOD_RES (2), (4): Xaa is C or S
RXGXGEVVMENSLQEVVKDYEDYYLMTLPELE

SEQ ID NO: 49077 - protein, 36 aa, Artificial Sequence; identical to SEQ ID NO: 9008
  Cyclic GFR-binding peptide
  MOD_RES (31), (31): Xaa is C or S

SEQ ID NO: 49078 - protein, 29 aa, Artificial Sequence
  Cyclic GFR-binding peptide
VVMEEYQKYVVKDYEDIFLMSIPSLETPV

SEQ ID NO: 49079 - protein, 33 aa, Artificial Sequence
  Cyclic GFR-binding peptide
  MOD_RES (27), (28): Xaa is C or S
MNSLQEVKPKRGVYYLITLPELAQPVXXPAASA

SEQ ID NO: 49080 - protein, 41 aa, Artificial Sequence; identical to SEQ ID NO: 9010
  Cyclic GFR-binding peptide
  MOD_RES (2), (4), (36), (37): Xaa is C or S

SEQ ID NO: 49081 - protein, 30 aa, Artificial Sequence
  Cyclic GFR-binding peptide
  MOD_RES (1), (3): Xaa is C or S
XGXSRVVMNNSLQEIVNSSDDYYLVTLPEL

SEQ ID NO: 49082 - protein, 34 aa, Artificial Sequence; identical to SEQ ID NO: 9013
  Cyclic GFR-binding peptide
  MOD_RES (1), (33), (34): Xaa is C or S

SEQ ID NO: 49083 - protein, 29 aa, Artificial Sequence
  Cyclic GFR-binding peptide
RVVMNNSLQEIVNSSDDYYLVTLPELKTP

SEQ ID NO: 49084 - protein, 28 aa, Artificial Sequence
  Cyclic GFR-binding peptide
VVMEEYQKYVVKDYEDIFLMSIPSLETP

SEQ ID NO: 49085 - protein, 33 aa, Artificial Sequence; identical to SEQ ID NO: 9014
  Cyclic GFR-binding peptide
  MOD_RES (31), (32): Xaa is C or S

SEQ ID NO: 49086 - protein, 30 aa, Artificial Sequence; identical to SEQ ID NO: 9015
  Cyclic GFR-binding peptide

SEQ ID NO: 49087 - protein, 36 aa, Artificial Sequence
  Cyclic GFR-binding peptide
  MOD_RES (30), (31): Xaa is C or S
VVMDNSLQEVVKENEDYYVMPLPELETPVXXAKPIK

SEQ ID NO: 49088 - protein, 26 aa, Artificial Sequence
  Cyclic GFR-binding peptide
NNSLQEIVNSSDDYYVVPLPELKTPA

SEQ ID NO: 49089 - protein, 28 aa, Artificial Sequence
  Cyclic GFR-binding peptide
  MOD_RES (26), (27): Xaa is C or S
NSLQEVVKENEDYYLMTLPELETPVXXA

SEQ ID NO: 49090 - protein, 26 aa, Artificial Sequence
  Cyclic GFR-binding peptide
EVVMENSLQEVVKDYEDYYVMPLPEL

SEQ ID NO: 49091 - protein, 28 aa, Artificial Sequence
  Cyclic GFR-binding peptide
SEVVMDRYKKLVVNNASDFYLISIANLR

SEQ ID NO: 49092 - protein, 39 aa, Artificial Sequence; identical to SEQ ID NO: 9019
  Cyclic GFR-binding peptide
  MOD_RES (2), (34), (35): Xaa is C or S

SEQ ID NO: 49093 - protein, 35 aa, Artificial Sequence; identical to SEQ ID NO: 9021
  Cyclic GFR-binding peptide
  MOD_RES (31), (32): Xaa is C or S

SEQ ID NO: 49094 - protein, 31 aa, Artificial Sequence
  Cyclic GFR-binding peptide
  MOD_RES (2), (4): Xaa is C or S
RXGXGEVVMEEYQKYVVKDYEDIFLMSIPSL

SEQ ID NO: 49095 - protein, 35 aa, Artificial Sequence; identical to SEQ ID NO: 9022
  Cyclic GFR-binding peptide
  MOD_RES (1), (33), (34): Xaa is C or S

SEQ ID NO: 49096 - protein, 36 aa, Artificial Sequence; identical to SEQ ID NO: 9023
  Cyclic GFR-binding peptide
  MOD_RES (2), (34), (35): Xaa is C or S

SEQ ID NO: 49097 - protein, 36 aa, Artificial Sequence; identical to SEQ ID NO: 9024
  Cyclic GFR-binding peptide
  MOD_RES (2), (34), (35): Xaa is C or S

SEQ ID NO: 49098 - protein, 24 aa, Artificial Sequence
  Cyclic GFR-binding peptide
NSLQEVKPTRGVYYVIPLPELDQP

SEQ ID NO: 49099 - protein, 33 aa, Artificial Sequence
  Cyclic GFR-binding peptide
  MOD_RES (27), (28): Xaa is C or S
NEYQKYIVNSSDDIFLVSIPSLQTPAXXPKPVT

SEQ ID NO: 49100 - protein, 30 aa, Artificial Sequence
  Cyclic GFR-binding peptide
  MOD_RES (28), (29): Xaa is C or S
MDNSLQEVVKENEDYYLMTLPELETPVXXA

SEQ ID NO: 49101 - protein, 34 aa, Artificial Sequence; identical to SEQ ID NO: 9025
  Cyclic GFR-binding peptide
  MOD_RES (1), (3): Xaa is C or S

SEQ ID NO: 49102 - protein, 27 aa, Artificial Sequence
  Cyclic GFR-binding peptide
  MOD_RES (26), (27): Xaa is C or S
NSLQEIKPTKGIYYVIPLPELDQSVXX

SEQ ID NO: 49103 - protein, 28 aa, Artificial Sequence
  Cyclic GFR-binding peptide
VVMNNSLQEIVNSSDDYYLVTLPELKTP

SEQ ID NO: 49104 - protein, 39 aa, Artificial Sequence; identical to SEQ ID NO: 9027
  Cyclic GFR-binding peptide
  MOD_RES (1), (3), (35), (36): Xaa is C or S

SEQ ID NO: 49105 - protein, 23 aa, Artificial Sequence
  Cyclic GFR-binding peptide
VMNEYQKYIVNSSDDIFLVSIPS

SEQ ID NO: 49106 - protein, 29 aa, Artificial Sequence
  Cyclic GFR-binding peptide
  MOD_RES (28), (29): Xaa is C or S
MEEYQKYVVKDYEDIFLMSIPSLETPVXX

SEQ ID NO: 49107 - protein, 35 aa, Artificial Sequence; identical to SEQ ID NO: 9028
  Cyclic GFR-binding peptide
  MOD_RES (1), (33), (34): Xaa is C or S

SEQ ID NO: 49108 - protein, 25 aa, Artificial Sequence
  Cyclic GFR-binding peptide
VVMDNSLQEVVKENEDYYVMPLPEL

SEQ ID NO: 49109 - protein, 25 aa, Artificial Sequence
  Cyclic GFR-binding peptide
VMEEYQKYVVKDYEDIFLMSIPSLE

SEQ ID NO: 49110 - protein, 35 aa, Artificial Sequence; identical to SEQ ID NO: 9029
  Cyclic GFR-binding peptide
  MOD_RES (1), (33), (34): Xaa is C or S

SEQ ID NO: 49111 - protein, 22 aa, Artificial Sequence
  Cyclic GFR-binding peptide
NSLQEIVNSSDDYYLVTLPELQ

SEQ ID NO: 49112 - protein, 34 aa, Artificial Sequence; identical to SEQ ID NO: 9030
  Cyclic GFR-binding peptide
  MOD_RES (2), (34): Xaa is C or S

SEQ ID NO: 49113 - protein, 32 aa, Artificial Sequence; identical to SEQ ID NO: 9031
  Cyclic GFR-binding peptide
  MOD_RES (1), (1): Xaa is C or S

SEQ ID NO: 49114 - protein, 32 aa, Artificial Sequence; identical to SEQ ID NO: 9033
  Cyclic GFR-binding peptide
  MOD_RES (2), (2): Xaa is C or S

SEQ ID NO: 49115 - protein, 31 aa, Artificial Sequence
  Cyclic GFR-binding peptide
  MOD_RES (26), (26): Xaa is C or S
NSLQEIVNSSDDYYLVTLPELKTPAXTPKTV

SEQ ID NO: 49116 - protein, 36 aa, Artificial Sequence; identical to SEQ ID NO: 9034
  Cyclic GFR-binding peptide
  MOD_RES (2), (4), (36): Xaa is C or S

SEQ ID NO: 49117 - protein, 32 aa, Artificial Sequence; identical to SEQ ID NO: 9038
  Cyclic GFR-binding peptide
  MOD_RES (31), (32): Xaa is C or S

SEQ ID NO: 49118 - protein, 33 aa, Artificial Sequence
  Cyclic GFR-binding peptide
  MOD_RES (29), (29): Xaa is C or S
VMNEYQKYIVNSSDDIFLVSIPSLKTPAXTPKT

SEQ ID NO: 49119 - protein, 28 aa, Artificial Sequence
  Cyclic GFR-binding peptide
VVMDNSLQEVVNNASDYYVIPLPELRTP

SEQ ID NO: 49120 - protein, 34 aa, Artificial Sequence
  Cyclic GFR-binding peptide
  MOD_RES (2), (4): Xaa is C or S
HXGXARVVMNNSLQEIVNSSDDYYVVPLPELQTP

SEQ ID NO: 49121 - protein, 34 aa, Artificial Sequence
  Cyclic GFR-binding peptide
  MOD_RES (28), (29): Xaa is C or S
MDRYKKLVVNNASDFYLISIANLRTPVXXTPPTS

SEQ ID NO: 49122 - protein, 31 aa, Artificial Sequence; identical to SEQ ID NO: 9040
  Cyclic GFR-binding peptide
  MOD_RES (31), (31): Xaa is C or S

SEQ ID NO: 49123 - protein, 35 aa, Artificial Sequence; identical to SEQ ID NO: 9041
  Cyclic GFR-binding peptide
  MOD_RES (1), (33), (34): Xaa is C or S

SEQ ID NO: 49124 - protein, 39 aa, Artificial Sequence; identical to SEQ ID NO: 9042
  Cyclic GFR-binding peptide
  MOD_RES (1), (3), (35): Xaa is C or S

SEQ ID NO: 49125 - protein, 41 aa, Artificial Sequence; identical to SEQ ID NO: 9043
  Cyclic GFR-binding peptide
  MOD_RES (2), (4), (36): Xaa is C or S

SEQ ID NO: 49126 - protein, 36 aa, Artificial Sequence; identical to SEQ ID NO: 9044
  Cyclic GFR-binding peptide
  MOD_RES (2), (34), (35): Xaa is C or S

SEQ ID NO: 49127 - protein, 36 aa, Artificial Sequence; identical to SEQ ID NO: 9045
  Cyclic GFR-binding peptide
  MOD_RES (31), (32): Xaa is C or S

SEQ ID NO: 49128 - protein, 29 aa, Artificial Sequence
  Cyclic GFR-binding peptide
  MOD_RES (2), (2): Xaa is C or S
KXSKVVMEYQKYVKPTRGVIFLISIPSLD

SEQ ID NO: 49129 - protein, 26 aa, Artificial Sequence
  Cyclic GFR-binding peptide
IMNSLQEIKPTKGIYYVIPLPELDQS

SEQ ID NO: 49130 - protein, 32 aa, Artificial Sequence
  Cyclic GFR-binding peptide
  MOD_RES (2), (4): Xaa is C or S
RXGXSEVVMDNSLQEVVNNASDYYVIPLPELR

SEQ ID NO: 49131 - protein, 29 aa, Artificial Sequence
  Cyclic GFR-binding peptide
RVVMNNSLQEIVNSSDDYYVVPLPELKTP

SEQ ID NO: 49132 - protein, 30 aa, Artificial Sequence
  Cyclic GFR-binding peptide
  MOD_RES (27), (27): Xaa is C or S
NNSLQEIVNSSDDYYVVPLPELKTPAXTPK

SEQ ID NO: 49133 - protein, 33 aa, Artificial Sequence
  Cyclic GFR-binding peptide
  MOD_RES (27), (28): Xaa is C or S
NEYQKYIVNSSDDIFLVSIPSLKTPAXXPKPVY

SEQ ID NO: 49134 - protein, 27 aa, Artificial Sequence
  Cyclic GFR-binding peptide
  MOD_RES (2), (2): Xaa is C or S
KXSKVIMNSLQEIKPTKGIYYVIPLPE

SEQ ID NO: 49135 - protein, 29 aa, Artificial Sequence
  Cyclic GFR-binding peptide
  MOD_RES (27), (28): Xaa is C or S
NEYQKYIVNSSDDIFLVSIPSLKTPAXXP

SEQ ID NO: 49136 - protein, 25 aa, Artificial Sequence
  Cyclic GFR-binding peptide
VMNSLQEVKPTRGVYYVIPLPELDQ

SEQ ID NO: 49137 - protein, 28 aa, Artificial Sequence
  Cyclic GFR-binding peptide
  MOD_RES (1), (1): Xaa is C or S
XARVVMNNSLQEIVNSSDDYYLVTLPEL

SEQ ID NO: 49138 - protein, 24 aa, Artificial Sequence
  Cyclic GFR-binding peptide
VMEEYQKYVVKDYEDIFLMSIPSL

SEQ ID NO: 49139 - protein, 23 aa, Artificial Sequence
  Cyclic GFR-binding peptide
EYQKYIVNSSDDIFLVSIPSLKT

SEQ ID NO: 49140 - protein, 33 aa, Artificial Sequence
  Cyclic GFR-binding peptide
  MOD_RES (2), (4): Xaa is C or S
HXGXARVVMNEYQKYIVNSSDDIFLVSIPSLQT

SEQ ID NO: 49141 - protein, 28 aa, Artificial Sequence
  Cyclic GFR-binding peptide
  MOD_RES (27), (28): Xaa is C or S
DNSLQEVVKENEDYYLMTLPELETPVXX

SEQ ID NO: 49142 - protein, 40 aa, Artificial Sequence; identical to SEQ ID NO: 9049
  Cyclic GFR-binding peptide
  MOD_RES (1), (3), (35): Xaa is C or S

SEQ ID NO: 49143 - protein, 31 aa, Artificial Sequence; identical to SEQ ID NO: 9050
  Cyclic GFR-binding peptide
  MOD_RES (1), (1): Xaa is C or S

SEQ ID NO: 49144 - protein, 42 aa, Artificial Sequence; identical to SEQ ID NO: 9051
  Cyclic GFR-binding peptide
  MOD_RES (2), (4), (36), (37): Xaa is C or S

SEQ ID NO: 49145 - protein, 25 aa, Artificial Sequence
  Cyclic GFR-binding peptide
VMNNSLQEIVNSSDDYYVVPLPELQ

SEQ ID NO: 49146 - protein, 30 aa, Artificial Sequence
  Cyclic GFR-binding peptide
  MOD_RES (30), (30): Xaa is C or S
RVIMNSLQEVKPKRGVYYLITLPELAQPVX

SEQ ID NO: 49147 - protein, 36 aa, Artificial Sequence; identical to SEQ ID NO: 9054
  Cyclic GFR-binding peptide
  MOD_RES (2), (4), (35), (36): Xaa is C or S

SEQ ID NO: 49148 - protein, 29 aa, Artificial Sequence
  Cyclic GFR-binding peptide
AAAAAAAAANSLQEIKPTKGIYYVIPLPE

SEQ ID NO: 49149 - protein, 33 aa, Artificial Sequence
  Cyclic GFR-binding peptide
  MOD_RES (1), (3): Xaa is C or S
XGXARVVMNNSLQEIVNSSDDYYLVTLPELQTP

SEQ ID NO: 49150 - protein, 33 aa, Artificial Sequence; identical to SEQ ID NO: 9055
  Cyclic GFR-binding peptide
  MOD_RES (1), (3): Xaa is C or S

SEQ ID NO: 49151 - protein, 31 aa, Artificial Sequence
  Cyclic GFR-binding peptide
  MOD_RES (30), (31): Xaa is C or S
KVIMEYQKYIKPTKGIIFLISIPSLDQSVXX

SEQ ID NO: 49152 - protein, 36 aa, Artificial Sequence; identical to SEQ ID NO: 9058
  Cyclic GFR-binding peptide
  MOD_RES (31), (32): Xaa is C or S

SEQ ID NO: 49153 - protein, 25 aa, Artificial Sequence
  Cyclic GFR-binding peptide
EYQKYVKPKRGVIFLISIPSLAQPV

SEQ ID NO: 49154 - protein, 35 aa, Artificial Sequence; identical to SEQ ID NO: 9059
  Cyclic GFR-binding peptide
  MOD_RES (32), (33): Xaa is C or S

SEQ ID NO: 49155 - protein, 33 aa, Artificial Sequence; identical to SEQ ID NO: 9060
  Cyclic GFR-binding peptide
  MOD_RES (31), (32): Xaa is C or S

SEQ ID NO: 49156 - protein, 29 aa, Artificial Sequence
  Cyclic GFR-binding peptide
  MOD_RES (28), (29): Xaa is C or S
MDNSLQEVVNNASDYYVIPLPELRTPVXX

SEQ ID NO: 49157 - protein, 34 aa, Artificial Sequence; identical to SEQ ID NO: 9062
  Cyclic GFR-binding peptide
  MOD_RES (31), (32): Xaa is C or S

SEQ ID NO: 49158 - protein, 27 aa, Artificial Sequence
  Cyclic GFR-binding peptide
  MOD_RES (1), (1): Xaa is C or S
XARVVMNEYQKYIVNSSDDIFLVSIPS

SEQ ID NO: 49159 - protein, 38 aa, Artificial Sequence; identical to SEQ ID NO: 9063
  Cyclic GFR-binding peptide
  MOD_RES (1), (32), (33): Xaa is C or S

SEQ ID NO: 49160 - protein, 33 aa, Artificial Sequence
  Cyclic GFR-binding peptide
  MOD_RES (27), (28): Xaa is C or S
NNSLQEIVNSSDDYYVVPLPELKTPAXXPKPVY

SEQ ID NO: 49161 - protein, 34 aa, Artificial Sequence
  Cyclic GFR-binding peptide
  MOD_RES (28), (29): Xaa is C or S
IMNSLQEIKPTKGIYYVIPLPELDQSVXXPSASA

SEQ ID NO: 49162 - protein, 29 aa, Artificial Sequence
  Cyclic GFR-binding peptide
AAAAAAAAANSLQEVKPKRGVYYLITLPE

SEQ ID NO: 49163 - protein, 22 aa, Artificial Sequence
  Cyclic GFR-binding peptide
NSLQEIKPTKGIYYVIPLPELD

SEQ ID NO: 49164 - protein, 37 aa, Artificial Sequence; identical to SEQ ID NO: 9064
  Cyclic GFR-binding peptide
  MOD_RES (31), (32): Xaa is C or S

SEQ ID NO: 49165 - protein, 33 aa, Artificial Sequence
  Cyclic GFR-binding peptide
  MOD_RES (2), (4): Xaa is C or S
SXKXSRVIMNSLQEVKPKRGVYYLITLPELAQP

SEQ ID NO: 49166 - protein, 35 aa, Artificial Sequence
  Cyclic GFR-binding peptide
  MOD_RES (29), (30): Xaa is C or S
VMNEYQKYIVNSSDDIFLVSIPSLQTPAXXPKPVT

SEQ ID NO: 49167 - protein, 26 aa, Artificial Sequence
  Cyclic GFR-binding peptide
EVVMENSLQEVVKDYEDYYLMTLPEL

SEQ ID NO: 49168 - protein, 30 aa, Artificial Sequence
  Cyclic GFR-binding peptide
ARVVMNNSLQEIVNSSDDYYVVPLPELQTP

SEQ ID NO: 49169 - protein, 35 aa, Artificial Sequence
  Cyclic GFR-binding peptide
  MOD_RES (30), (31): Xaa is C or S
KVIMNSLQEIKPTKGIYYVIPLPELDQSVXXPSAS

SEQ ID NO: 49170 - protein, 31 aa, Artificial Sequence
  Cyclic GFR-binding peptide
  MOD_RES (26), (27): Xaa is C or S
NSLQEIVNSSDDYYLVTLPELKTPAXXPKPV

SEQ ID NO: 49171 - protein, 26 aa, Artificial Sequence
  Cyclic GFR-binding peptide
DRYKKLVVNNASDFYLISIANLRTPV

SEQ ID NO: 49172 - protein, 37 aa, Artificial Sequence; identical to SEQ ID NO: 9065
  Cyclic GFR-binding peptide
  MOD_RES (2), (4), (36), (37): Xaa is C or S

SEQ ID NO: 49173 - protein, 33 aa, Artificial Sequence
  Cyclic GFR-binding peptide
  MOD_RES (2), (4): Xaa is C or S
RXGXGEVVMDEYQKYVVKENEDIFLMSIPSLET

SEQ ID NO: 49174 - protein, 38 aa, Artificial Sequence; identical to SEQ ID NO: 9067
  Cyclic GFR-binding peptide
  MOD_RES (1), (33), (34): Xaa is C or S

SEQ ID NO: 49175 - protein, 33 aa, Artificial Sequence; identical to SEQ ID NO: 9068
  Cyclic GFR-binding peptide
  MOD_RES (31), (32): Xaa is C or S

SEQ ID NO: 49176 - protein, 32 aa, Artificial Sequence
  Cyclic GFR-binding peptide
  MOD_RES (2), (2): Xaa is C or S
GXARVVMNEYQKYIVNSSDDIFLVSIPSLQTP

SEQ ID NO: 49177 - protein, 28 aa, Artificial Sequence
  Cyclic GFR-binding peptide
VMDNSLQEVVKENEDYYVMPLPELETPV

SEQ ID NO: 49178 - protein, 38 aa, Artificial Sequence; identical to SEQ ID NO: 9069
  Cyclic GFR-binding peptide
  MOD_RES (1), (3), (34), (35): Xaa is C or S

SEQ ID NO: 49179 - protein, 26 aa, Artificial Sequence
  Cyclic GFR-binding peptide
VIMEYQKYIKPTKGIIFLISIPSLDQ

SEQ ID NO: 49180 - protein, 34 aa, Artificial Sequence; identical to SEQ ID NO: 9071
  Cyclic GFR-binding peptide
  MOD_RES (1), (3): Xaa is C or S

SEQ ID NO: 49181 - protein, 33 aa, Artificial Sequence
  Cyclic GFR-binding peptide
  MOD_RES (28), (29): Xaa is C or S
MENSLQEVVKDYEDYYVMPLPELETPVXXAKPI

SEQ ID NO: 49182 - protein, 33 aa, Artificial Sequence
  Cyclic GFR-binding peptide
  MOD_RES (30), (31): Xaa is C or S
VVMNEYQKYIVNSSDDIFLVSIPSLQTPAXXPK

SEQ ID NO: 49183 - protein, 34 aa, Artificial Sequence
  Cyclic GFR-binding peptide
  MOD_RES (30), (31): Xaa is C or S
RVIMEYQKYVKPKRGVIFLISIPSLAQPVXXPAA

SEQ ID NO: 49184 - protein, 35 aa, Artificial Sequence; identical to SEQ ID NO: 9072
  Cyclic GFR-binding peptide
  MOD_RES (2), (4), (35): Xaa is C or S

SEQ ID NO: 49185 - protein, 36 aa, Artificial Sequence; identical to SEQ ID NO: 9074
  Cyclic GFR-binding peptide
  MOD_RES (1), (32), (33): Xaa is C or S

SEQ ID NO: 49186 - protein, 30 aa, Artificial Sequence
  Cyclic GFR-binding peptide
  MOD_RES (30), (30): Xaa is C or S
VVMDNSLQEVVKENEDYYLMTLPELETPVX

SEQ ID NO: 49187 - protein, 35 aa, Artificial Sequence
  Cyclic GFR-binding peptide
  MOD_RES (29), (30): Xaa is C or S
VMENSLQEVVKDYEDYYVMPLPELETPVXXAKPIS

SEQ ID NO: 49188 - protein, 40 aa, Artificial Sequence; identical to SEQ ID NO: 9075
  Cyclic GFR-binding peptide
  MOD_RES (1), (3), (35), (36): Xaa is C or S

SEQ ID NO: 49189 - protein, 40 aa, Artificial Sequence; identical to SEQ ID NO: 9076
  Cyclic GFR-binding peptide
  MOD_RES (2), (4), (36), (37): Xaa is C or S

SEQ ID NO: 49190 - protein, 30 aa, Artificial Sequence
  Cyclic GFR-binding peptide
  MOD_RES (28), (29): Xaa is C or S
MENSLQEVVKDYEDYYVMPLPELETPVXXA

SEQ ID NO: 49191 - protein, 31 aa, Artificial Sequence
  Cyclic GFR-binding peptide
  MOD_RES (1), (3): Xaa is C or S
XKXSKVIMNSLQEIKPTKGIYYVIPLPELDQ

SEQ ID NO: 49192 - protein, 32 aa, Artificial Sequence
  Cyclic GFR-binding peptide
  MOD_RES (26), (26): Xaa is C or S
NSLQEIVNSSDDYYLVTLPELKTPAXTPKTVH

SEQ ID NO: 49193 - protein, 24 aa, Artificial Sequence
  Cyclic GFR-binding peptide
IMNSLQEIKPTKGIYYVIPLPELD

SEQ ID NO: 49194 - protein, 28 aa, Artificial Sequence
  Cyclic GFR-binding peptide
  MOD_RES (26), (27): Xaa is C or S
NSLQEIVNSSDDYYVVPLPELKTPAXXP

SEQ ID NO: 49195 - protein, 25 aa, Artificial Sequence
  Cyclic GFR-binding peptide
EVVMDRYKKLVVNNASDFYLISIAN

SEQ ID NO: 49196 - protein, 35 aa, Artificial Sequence; identical to SEQ ID NO: 9079
  Cyclic GFR-binding peptide
  MOD_RES (1), (3), (35): Xaa is C or S

SEQ ID NO: 49197 - protein, 30 aa, Artificial Sequence
  Cyclic GFR-binding peptide
  MOD_RES (27), (27): Xaa is C or S
NEYQKYIVNSSDDIFLVSIPSLKTPAXTPK

SEQ ID NO: 49198 - protein, 29 aa, Artificial Sequence
  Cyclic GFR-binding peptide
  MOD_RES (26), (27): Xaa is C or S
NSLQEIVNSSDDYYVVPLPELQTPAXXPK

SEQ ID NO: 49199 - protein, 35 aa, Artificial Sequence
  Cyclic GFR-binding peptide
  MOD_RES (30), (30): Xaa is C or S
VVMNEYQKYIVNSSDDIFLVSIPSLKTPAXTPKTV

SEQ ID NO: 49200 - protein, 36 aa, Artificial Sequence; identical to SEQ ID NO: 9082
  Cyclic GFR-binding peptide
  MOD_RES (1), (3), (35): Xaa is C or S

SEQ ID NO: 49201 - protein, 33 aa, Artificial Sequence
  Cyclic GFR-binding peptide
  MOD_RES (1), (3): Xaa is C or S
XGXGEVVMEEYQKYVVKDYEDIFLMSIPSLETP

SEQ ID NO: 49202 - protein, 32 aa, Artificial Sequence
  Cyclic GFR-binding peptide
  MOD_RES (2), (2): Xaa is C or S
GXARVVMNNSLQEIVNSSDDYYVVPLPELQTP

SEQ ID NO: 49203 - protein, 32 aa, Artificial Sequence
  Cyclic GFR-binding peptide
  MOD_RES (29), (30): Xaa is C or S
VMNEYQKYIVNSSDDIFLVSIPSLQTPAXXPK

SEQ ID NO: 49204 - protein, 36 aa, Artificial Sequence; identical to SEQ ID NO: 9085
  Cyclic GFR-binding peptide
  MOD_RES (2), (34), (35): Xaa is C or S

SEQ ID NO: 49205 - protein, 30 aa, Artificial Sequence
  Cyclic GFR-binding peptide
  MOD_RES (2), (4): Xaa is C or S
SXKXSKVVMEYQKYVKPTRGVIFLISIPSL

SEQ ID NO: 49206 - protein, 30 aa, Artificial Sequence
  Cyclic GFR-binding peptide
  MOD_RES (28), (29): Xaa is C or S
MDRYKKLVVNNASDFYLISIANLRTPVXXT

SEQ ID NO: 49207 - protein, 23 aa, Artificial Sequence
  Cyclic GFR-binding peptide
NSLQEVVNNASDYYVIPLPELRT

SEQ ID NO: 49208 - protein, 32 aa, Artificial Sequence
  Cyclic GFR-binding peptide
  MOD_RES (2), (4): Xaa is C or S
RXGXGEVVMENSLQEVVKDYEDYYVMPLPELE

SEQ ID NO: 49209 - protein, 24 aa, Artificial Sequence
  Cyclic GFR-binding peptide
EYQKYIVNSSDDIFLVSIPSLKTP

SEQ ID NO: 49210 - protein, 20 aa, Artificial Sequence
  Cyclic GFR-binding peptide
NSLQEVVNNASDYYVIPLPE

SEQ ID NO: 49211 - protein, 34 aa, Artificial Sequence
  Cyclic GFR-binding peptide
  MOD_RES (28), (29): Xaa is C or S
IMEYQKYVKPKRGVIFLISIPSLAQPVXXPAASA

SEQ ID NO: 49212 - protein, 37 aa, Artificial Sequence; identical to SEQ ID NO: 9088
  Cyclic GFR-binding peptide
  MOD_RES (31), (32): Xaa is C or S

SEQ ID NO: 49213 - protein, 35 aa, Artificial Sequence; identical to SEQ ID NO: 9089
  Cyclic GFR-binding peptide
  MOD_RES (2), (4), (35): Xaa is C or S

SEQ ID NO: 49214 - protein, 21 aa, Artificial Sequence
  Cyclic GFR-binding peptide
DNSLQEVVKENEDYYLMTLPE

SEQ ID NO: 49215 - protein, 35 aa, Artificial Sequence; identical to SEQ ID NO: 9090
  Cyclic GFR-binding peptide
  MOD_RES (31), (32): Xaa is C or S

SEQ ID NO: 49216 - protein, 28 aa, Artificial Sequence
  Cyclic GFR-binding peptide
VVMNSLQEVKPTRGVYYVIPLPELDQPV

SEQ ID NO: 49217 - protein, 29 aa, Artificial Sequence
  Cyclic GFR-binding peptide
  MOD_RES (27), (28): Xaa is C or S
NNSLQEIVNSSDDYYVVPLPELKTPAXXP

SEQ ID NO: 49218 - protein, 34 aa, Artificial Sequence
  Cyclic GFR-binding peptide
  MOD_RES (30), (31): Xaa is C or S
VVMENSLQEVVKDYEDYYVMPLPELETPVXXAKP

SEQ ID NO: 49219 - protein, 38 aa, Artificial Sequence; identical to SEQ ID NO: 9097
  Cyclic GFR-binding peptide
  MOD_RES (1), (3), (34), (35): Xaa is C or S

SEQ ID NO: 49220 - protein, 33 aa, Artificial Sequence; identical to SEQ ID NO: 9099
  Cyclic GFR-binding peptide
  MOD_RES (31), (32): Xaa is C or S

SEQ ID NO: 49221 - protein, 31 aa, Artificial Sequence
  Cyclic GFR-binding peptide
  MOD_RES (29), (30): Xaa is C or S
VMNNSLQEIVNSSDDYYVVPLPELKTPAXXP

SEQ ID NO: 49222 - protein, 30 aa, Artificial Sequence
  Cyclic GFR-binding peptide
  MOD_RES (1), (3): Xaa is C or S
XGXARVVMNNSLQEIVNSSDDYYLVTLPEL

SEQ ID NO: 49223 - protein, 34 aa, Artificial Sequence; identical to SEQ ID NO: 9101
  Cyclic GFR-binding peptide
  MOD_RES (1), (3), (34): Xaa is C or S

SEQ ID NO: 49224 - protein, 39 aa, Artificial Sequence; identical to SEQ ID NO: 9102
  Cyclic GFR-binding peptide
  MOD_RES (2), (4), (36), (37): Xaa is C or S

SEQ ID NO: 49225 - protein, 24 aa, Artificial Sequence
  Cyclic GFR-binding peptide
MNNSLQEIVNSSDDYYVVPLPELQ

SEQ ID NO: 49226 - protein, 32 aa, Artificial Sequence
  Cyclic GFR-binding peptide
  MOD_RES (28), (29): Xaa is C or S
MNNSLQEIVNSSDDYYLVTLPELQTPAXXPKP

SEQ ID NO: 49227 - protein, 28 aa, Artificial Sequence
  Cyclic GFR-binding peptide
  MOD_RES (2), (2): Xaa is C or S
KXSRVIMNSLQEVKPKRGVYYLITLPEL

SEQ ID NO: 49228 - protein, 32 aa, Artificial Sequence
  Cyclic GFR-binding peptide
  MOD_RES (26), (27): Xaa is C or S
NSLQEIKPTKGIYYVIPLPELDQSVXXPSASA

SEQ ID NO: 49229 - protein, 26 aa, Artificial Sequence
  Cyclic GFR-binding peptide
SEVVMDNSLQEVVNNASDYYVIPLPE

SEQ ID NO: 49230 - protein, 38 aa, Artificial Sequence; identical to SEQ ID NO: 9104
  Cyclic GFR-binding peptide
  MOD_RES (32), (33): Xaa is C or S

SEQ ID NO: 49231 - protein, 31 aa, Artificial Sequence; identical to SEQ ID NO: 9105
  Cyclic GFR-binding peptide

SEQ ID NO: 49232 - protein, 27 aa, Artificial Sequence
  Cyclic GFR-binding peptide
MNNSLQEIVNSSDDYYVVPLPELQTPA

SEQ ID NO: 49233 - protein, 41 aa, Artificial Sequence; identical to SEQ ID NO: 9106
  Cyclic GFR-binding peptide
  MOD_RES (2), (4), (36), (37): Xaa is C or S

SEQ ID NO: 49234 - protein, 35 aa, Artificial Sequence; identical to SEQ ID NO: 9107
  Cyclic GFR-binding peptide
  MOD_RES (32), (33): Xaa is C or S

SEQ ID NO: 49235 - protein, 31 aa, Artificial Sequence
  Cyclic GFR-binding peptide
  MOD_RES (2), (2): Xaa is C or S
GXGEVVMDNSLQEVVKENEDYYLMTLPELET

SEQ ID NO: 49236 - protein, 31 aa, Artificial Sequence; identical to SEQ ID NO: 9108
  Cyclic GFR-binding peptide
  MOD_RES (31), (31): Xaa is C or S

SEQ ID NO: 49237 - protein, 29 aa, Artificial Sequence
  Cyclic GFR-binding peptide
  MOD_RES (26), (27): Xaa is C or S
EYQKYVKPTRGVIFLISIPSLDQPVXXPS

SEQ ID NO: 49238 - protein, 30 aa, Artificial Sequence
  Cyclic GFR-binding peptide
  MOD_RES (26), (27): Xaa is C or S
NSLQEIVNSSDDYYLVTLPELKTPAXXPKP

SEQ ID NO: 49239 - protein, 25 aa, Artificial Sequence
  Cyclic GFR-binding peptide
MDNSLQEVVNNASDYYLITLPELRT

SEQ ID NO: 49240 - protein, 28 aa, Artificial Sequence
  Cyclic GFR-binding peptide
SRVVMNNSLQEIVNSSDDYYVVPLPELK

SEQ ID NO: 49241 - protein, 34 aa, Artificial Sequence; identical to SEQ ID NO: 9111
  Cyclic GFR-binding peptide
  MOD_RES (1), (3), (34): Xaa is C or S

SEQ ID NO: 49242 - protein, 22 aa, Artificial Sequence
  Cyclic GFR-binding peptide
NSLQEVVNNASDYYLITLPELR

SEQ ID NO: 49243 - protein, 31 aa, Artificial Sequence
  Cyclic GFR-binding peptide
  MOD_RES (2), (2): Xaa is C or S
GXSEVVMDRYKKLVVNNASDFYLISIANLRT

SEQ ID NO: 49244 - protein, 31 aa, Artificial Sequence
  Cyclic GFR-binding peptide
  MOD_RES (30), (31): Xaa is C or S
VVMDNSLQEVVNNASDYYLITLPELRTPVXX

SEQ ID NO: 49245 - protein, 25 aa, Artificial Sequence
  Cyclic GFR-binding peptide
RVIMNSLQEVKPKRGVYYLITLPEL

SEQ ID NO: 49246 - protein, 41 aa, Artificial Sequence; identical to SEQ ID NO: 9116
  Cyclic GFR-binding peptide
  MOD_RES (2), (4), (36), (37): Xaa is C or S

SEQ ID NO: 49247 - protein, 26 aa, Artificial Sequence
  Cyclic GFR-binding peptide
VVMDRYKKLVVNNASDFYLISIANLR

SEQ ID NO: 49248 - protein, 35 aa, Artificial Sequence; identical to SEQ ID NO: 9117
  Cyclic GFR-binding peptide
  MOD_RES (1), (32), (33): Xaa is C or S

SEQ ID NO: 49249 - protein, 28 aa, Artificial Sequence
  Cyclic GFR-binding peptide
  MOD_RES (1), (1): Xaa is C or S
XSRVIMNSLQEVKPKRGVYYLITLPELA

SEQ ID NO: 49250 - protein, 29 aa, Artificial Sequence
  Cyclic GFR-binding peptide
  MOD_RES (1), (1): Xaa is C or S
XSKVVMNSLQEVKPTRGVYYVIPLPELDQ

SEQ ID NO: 49251 - protein, 22 aa, Artificial Sequence
  Cyclic GFR-binding peptide
IMNSLQEIKPTKGIYYVIPLPE

SEQ ID NO: 49252 - protein, 33 aa, Artificial Sequence; identical to SEQ ID NO: 9120
  Cyclic GFR-binding peptide
  MOD_RES (32), (33): Xaa is C or S

SEQ ID NO: 49253 - protein, 28 aa, Artificial Sequence
  Cyclic GFR-binding peptide
RVVMNNSLQEIVNSSDDYYLVTLPELKT

SEQ ID NO: 49254 - protein, 30 aa, Artificial Sequence
  Cyclic GFR-binding peptide
  MOD_RES (1), (1): Xaa is C or S
XSRVIMNSLQEVKPKRGVYYLITLPELAQP

SEQ ID NO: 49255 - protein, 34 aa, Artificial Sequence; identical to SEQ ID NO: 9122
  Cyclic GFR-binding peptide
  MOD_RES (31), (31): Xaa is C or S

SEQ ID NO: 49256 - protein, 31 aa, Artificial Sequence
  Cyclic GFR-binding peptide
  MOD_RES (29), (30): Xaa is C or S
VMDRYKKLVVNNASDFYLISIANLRTPVXXT

SEQ ID NO: 49257 - protein, 31 aa, Artificial Sequence
  Cyclic GFR-binding peptide
  MOD_RES (26), (27): Xaa is C or S
NSLQEVKPKRGVYYLITLPELAQPVXXPAAS

SEQ ID NO: 49258 - protein, 34 aa, Artificial Sequence
  Cyclic GFR-binding peptide
  MOD_RES (29), (30): Xaa is C or S
VMNNSLQEIVNSSDDYYLVTLPELQTPAXXPKPV

SEQ ID NO: 49259 - protein, 37 aa, Artificial Sequence; identical to SEQ ID NO: 9125
  Cyclic GFR-binding peptide
  MOD_RES (31), (31): Xaa is C or S

SEQ ID NO: 49260 - protein, 30 aa, Artificial Sequence
  Cyclic GFR-binding peptide
GEVVMDEYQKYVVKENEDIFLMSIPSLETP

SEQ ID NO: 49261 - protein, 32 aa, Artificial Sequence; identical to SEQ ID NO: 9126
  Cyclic GFR-binding peptide
  MOD_RES (32), (32): Xaa is C or S

SEQ ID NO: 49262 - protein, 26 aa, Artificial Sequence
  Cyclic GFR-binding peptide
KVIMEYQKYIKPTKGIIFLISIPSLD

SEQ ID NO: 49263 - protein, 27 aa, Artificial Sequence
  Cyclic GFR-binding peptide
IMNSLQEIKPTKGIYYVIPLPELDQSV

SEQ ID NO: 49264 - protein, 29 aa, Artificial Sequence
  Cyclic GFR-binding peptide
  MOD_RES (2), (4): Xaa is C or S
SXKXSRVIMEYQKYVKPKRGVIFLISIPS

SEQ ID NO: 49265 - protein, 30 aa, Artificial Sequence
  Cyclic GFR-binding peptide
  MOD_RES (2), (4): Xaa is C or S
SXKXSKVIMNSLQEIKPTKGIYYVIPLPEL

SEQ ID NO: 49266 - protein, 29 aa, Artificial Sequence
  Cyclic GFR-binding peptide
EVVMDQYNKLVVNNASDLYLISIASLRTP

SEQ ID NO: 49267 - protein, 28 aa, Artificial Sequence
  Cyclic GFR-binding peptide
SRVVMNNSLQEIVNSSDDYYLVTLPELK

SEQ ID NO: 49268 - protein, 25 aa, Artificial Sequence
  Cyclic GFR-binding peptide
VIMEYQKYVKPKRGVIFLISIPSLA

SEQ ID NO: 49269 - protein, 27 aa, Artificial Sequence
  Cyclic GFR-binding peptide
VVMNNSLQEIVNSSDDYYVVPLPELQT

SEQ ID NO: 49270 - protein, 34 aa, Artificial Sequence; identical to SEQ ID NO: 9129
  Cyclic GFR-binding peptide
  MOD_RES (1), (33): Xaa is C or S

SEQ ID NO: 49271 - protein, 33 aa, Artificial Sequence
  Cyclic GFR-binding peptide
  MOD_RES (30), (31): Xaa is C or S
VVMDQYNKLVVNNASDLYLISIASLRTPVXXTP

SEQ ID NO: 49272 - protein, 36 aa, Artificial Sequence; identical to SEQ ID NO: 9132
  Cyclic GFR-binding peptide
  MOD_RES (1), (33), (34): Xaa is C or S

SEQ ID NO: 49273 - protein, 33 aa, Artificial Sequence; identical to SEQ ID NO: 9133
  Cyclic GFR-binding peptide
  MOD_RES (31), (32): Xaa is C or S

SEQ ID NO: 49274 - protein, 37 aa, Artificial Sequence; identical to SEQ ID NO: 9134
  Cyclic GFR-binding peptide
  MOD_RES (1), (32), (33): Xaa is C or S

SEQ ID NO: 49275 - protein, 28 aa, Artificial Sequence
  Cyclic GFR-binding peptide
SKVIMNSLQEIKPTKGIYYVIPLPELDQ

SEQ ID NO: 49276 - protein, 28 aa, Artificial Sequence
  Cyclic GFR-binding peptide
  MOD_RES (26), (27): Xaa is C or S
NSLQEVVNNASDYYVIPLPELRTPVXXT

SEQ ID NO: 49277 - protein, 30 aa, Artificial Sequence
  Cyclic GFR-binding peptide
GEVVMEEYQKYVVKDYEDIFLMSIPSLETP

SEQ ID NO: 49278 - protein, 28 aa, Artificial Sequence
  Cyclic GFR-binding peptide
  MOD_RES (28), (28): Xaa is C or S
MEEYQKYVVKDYEDIFLMSIPSLETPVX

SEQ ID NO: 49279 - protein, 31 aa, Artificial Sequence
  Cyclic GFR-binding peptide
  MOD_RES (27), (28): Xaa is C or S
NEYQKYIVNSSDDIFLVSIPSLKTPAXXPKP

SEQ ID NO: 49280 - protein, 23 aa, Artificial Sequence
  Cyclic GFR-binding peptide
NSLQEIVNSSDDYYVVPLPELQT

SEQ ID NO: 49281 - protein, 33 aa, Artificial Sequence
  Cyclic GFR-binding peptide
  MOD_RES (27), (28): Xaa is C or S
MEYQKYIKPTKGIIFLISIPSLDQSVXXPSASA

SEQ ID NO: 49282 - protein, 40 aa, Artificial Sequence; identical to SEQ ID NO: 9139
  Cyclic GFR-binding peptide
  MOD_RES (2), (34): Xaa is C or S

SEQ ID NO: 49283 - protein, 28 aa, Artificial Sequence
  Cyclic GFR-binding peptide
  MOD_RES (2), (2): Xaa is C or S
GXGEVVMDNSLQEVVKENEDYYLMTLPE

SEQ ID NO: 49284 - protein, 31 aa, Artificial Sequence; identical to SEQ ID NO: 9141
  Cyclic GFR-binding peptide

SEQ ID NO: 49285 - protein, 25 aa, Artificial Sequence
  Cyclic GFR-binding peptide
VVMDQYNKLVVNNASDLYLISIASL

SEQ ID NO: 49286 - protein, 26 aa, Artificial Sequence
  Cyclic GFR-binding peptide
MNSLQEVKPKRGVYYLITLPELAQPV

SEQ ID NO: 49287 - protein, 25 aa, Artificial Sequence
  Cyclic GFR-binding peptide
VVMDNSLQEVVKENEDYYLMTLPEL

SEQ ID NO: 49288 - protein, 32 aa, Artificial Sequence
  Cyclic GFR-binding peptide
  MOD_RES (28), (29): Xaa is C or S
IMEYQKYVKPKRGVIFLISIPSLAQPVXXPAA

SEQ ID NO: 49289 - protein, 36 aa, Artificial Sequence; identical to SEQ ID NO: 9145
  Cyclic GFR-binding peptide
  MOD_RES (1), (3), (35), (36): Xaa is C or S

SEQ ID NO: 49290 - protein, 28 aa, Artificial Sequence
  Cyclic GFR-binding peptide
  MOD_RES (26), (26): Xaa is C or S
EYQKYIVNSSDDIFLVSIPSLKTPAXTP

SEQ ID NO: 49291 - protein, 30 aa, Artificial Sequence; identical to SEQ ID NO: 9150
  Cyclic GFR-binding peptide

SEQ ID NO: 49292 - protein, 27 aa, Artificial Sequence
  Cyclic GFR-binding peptide
EVVMDNSLQEVVNNASDYYLITLPELR

SEQ ID NO: 49293 - protein, 21 aa, Artificial Sequence
  Cyclic GFR-binding peptide
NSLQEVVNNASDYYVIPLPEL

SEQ ID NO: 49294 - protein, 27 aa, Artificial Sequence
  Cyclic GFR-binding peptide
VMNSLQEVKPTRGVYYVIPLPELDQPV

SEQ ID NO: 49295 - protein, 37 aa, Artificial Sequence; identical to SEQ ID NO: 9151
  Cyclic GFR-binding peptide
  MOD_RES (31), (32): Xaa is C or S

SEQ ID NO: 49296 - protein, 36 aa, Artificial Sequence; identical to SEQ ID NO: 9152
  Cyclic GFR-binding peptide
  MOD_RES (2), (4), (36): Xaa is C or S

SEQ ID NO: 49297 - protein, 28 aa, Artificial Sequence
  Cyclic GFR-binding peptide
  MOD_RES (1), (1): Xaa is C or S
XGEVVMDNSLQEVVKENEDYYVMPLPEL

SEQ ID NO: 49298 - protein, 40 aa, Artificial Sequence; identical to SEQ ID NO: 9153
  Cyclic GFR-binding peptide
  MOD_RES (2), (34), (35): Xaa is C or S

SEQ ID NO: 49299 - protein, 28 aa, Artificial Sequence
  Cyclic GFR-binding peptide
KVVMNSLQEVKPTRGVYYVIPLPELDQP

SEQ ID NO: 49300 - protein, 33 aa, Artificial Sequence
  Cyclic GFR-binding peptide
  MOD_RES (30), (31): Xaa is C or S
VVMDNSLQEVVKENEDYYVMPLPELETPVXXAK

SEQ ID NO: 49301 - protein, 32 aa, Artificial Sequence
  Cyclic GFR-binding peptide
  MOD_RES (30), (31): Xaa is C or S
RVIMEYQKYVKPKRGVIFLISIPSLAQPVXXP

SEQ ID NO: 49302 - protein, 28 aa, Artificial Sequence
  Cyclic GFR-binding peptide
RVVMNNSLQEIVNSSDDYYVVPLPELKT

SEQ ID NO: 49303 - protein, 29 aa, Artificial Sequence
  Cyclic GFR-binding peptide
AAAAAAAAANSLQEVKPTRGVYYVIPLPE

SEQ ID NO: 49304 - protein, 35 aa, Artificial Sequence; identical to SEQ ID NO: 9155
  Cyclic GFR-binding peptide
  MOD_RES (1), (3), (34), (35): Xaa is C or S

SEQ ID NO: 49305 - protein, 36 aa, Artificial Sequence; identical to SEQ ID NO: 9157
  Cyclic GFR-binding peptide
  MOD_RES (32), (32): Xaa is C or S

SEQ ID NO: 49306 - protein, 35 aa, Artificial Sequence; identical to SEQ ID NO: 9158
  Cyclic GFR-binding peptide
  MOD_RES (1), (3), (34), (35): Xaa is C or S

SEQ ID NO: 49307 - protein, 31 aa, Artificial Sequence
  Cyclic GFR-binding peptide
  MOD_RES (27), (28): Xaa is C or S
NNSLQEIVNSSDDYYVVPLPELKTPAXXPKP

SEQ ID NO: 49308 - protein, 28 aa, Artificial Sequence
  Cyclic GFR-binding peptide
EVVMDNSLQEVVNNASDYYLITLPELRT

SEQ ID NO: 49309 - protein, 25 aa, Artificial Sequence
  Cyclic GFR-binding peptide
MDNSLQEVVKENEDYYVMPLPELET

SEQ ID NO: 49310 - protein, 23 aa, Artificial Sequence
  Cyclic GFR-binding peptide
NSLQEVVKENEDYYVMPLPELET

SEQ ID NO: 49311 - protein, 28 aa, Artificial Sequence
  Cyclic GFR-binding peptide
  MOD_RES (1), (1): Xaa is C or S
XSKVIMNSLQEIKPTKGIYYVIPLPELD

SEQ ID NO: 49312 - protein, 28 aa, Artificial Sequence
  Cyclic GFR-binding peptide
KVVMEYQKYVKPTRGVIFLISIPSLDQP

SEQ ID NO: 49313 - protein, 23 aa, Artificial Sequence
  Cyclic GFR-binding peptide
NNSLQEIVNSSDDYYVVPLPELQ

SEQ ID NO: 49314 - protein, 31 aa, Artificial Sequence
  Cyclic GFR-binding peptide
  MOD_RES (29), (29): Xaa is C or S
VMNNSLQEIVNSSDDYYVVPLPELKTPAXTP

SEQ ID NO: 49315 - protein, 31 aa, Artificial Sequence
  Cyclic GFR-binding peptide
  MOD_RES (30), (31): Xaa is C or S
VVMDRYKKLVVNNASDFYLISIANLRTPVXX

SEQ ID NO: 49316 - protein, 31 aa, Artificial Sequence
  Cyclic GFR-binding peptide
  MOD_RES (2), (2): Xaa is C or S
KXSRVIMEYQKYVKPKRGVIFLISIPSLAQP

SEQ ID NO: 49317 - protein, 34 aa, Artificial Sequence
  Cyclic GFR-binding peptide
  MOD_RES (29), (30): Xaa is C or S
VIMNSLQEVKPKRGVYYLITLPELAQPVXXPAAS

SEQ ID NO: 49318 - protein, 35 aa, Artificial Sequence; identical to SEQ ID NO: 9163
  Cyclic GFR-binding peptide
  MOD_RES (1), (3), (34), (35): Xaa is C or S

SEQ ID NO: 49319 - protein, 27 aa, Artificial Sequence
  Cyclic GFR-binding peptide
  MOD_RES (26), (27): Xaa is C or S
NSLQEIVNSSDDYYLVTLPELQTPAXX

SEQ ID NO: 49320 - protein, 32 aa, Artificial Sequence
  Cyclic GFR-binding peptide
  MOD_RES (2), (2): Xaa is C or S
GXSRVVMNNSLQEIVNSSDDYYVVPLPELKTP

SEQ ID NO: 49321 - protein, 37 aa, Artificial Sequence; identical to SEQ ID NO: 9164
  Cyclic GFR-binding peptide
  MOD_RES (1), (3), (35), (36): Xaa is C or S

SEQ ID NO: 49322 - protein, 27 aa, Artificial Sequence
  Cyclic GFR-binding peptide
KVIMNSLQEIKPTKGIYYVIPLPELDQ

SEQ ID NO: 49323 - protein, 33 aa, Artificial Sequence
  Cyclic GFR-binding peptide
  MOD_RES (1), (3): Xaa is C or S
XGXSRVVMNNSLQEIVNSSDDYYVVPLPELKTP

SEQ ID NO: 49324 - protein, 28 aa, Artificial Sequence
  Cyclic GFR-binding peptide
  MOD_RES (28), (28): Xaa is C or S
MDNSLQEVVNNASDYYVIPLPELRTPVX

SEQ ID NO: 49325 - protein, 34 aa, Artificial Sequence
  Cyclic GFR-binding peptide
  MOD_RES (2), (4): Xaa is C or S
HXGXARVVMNNSLQEIVNSSDDYYLVTLPELQTP

SEQ ID NO: 49326 - protein, 31 aa, Artificial Sequence
  Cyclic GFR-binding peptide
  MOD_RES (2), (4): Xaa is C or S
RXGXSEVVMDNSLQEVVNNASDYYVIPLPEL

SEQ ID NO: 49327 - protein, 31 aa, Artificial Sequence; identical to SEQ ID NO: 9169
  Cyclic GFR-binding peptide

SEQ ID NO: 49328 - protein, 27 aa, Artificial Sequence
  Cyclic GFR-binding peptide
VIMNSLQEVKPKRGVYYLITLPELAQP

SEQ ID NO: 49329 - protein, 39 aa, Artificial Sequence; identical to SEQ ID NO: 9170
  Cyclic GFR-binding peptide
  MOD_RES (1), (3), (35): Xaa is C or S

SEQ ID NO: 49330 - protein, 28 aa, Artificial Sequence
  Cyclic GFR-binding peptide
VVMDRYKKLVVNNASDFYLISIANLRTP

SEQ ID NO: 49331 - protein, 31 aa, Artificial Sequence
  Cyclic GFR-binding peptide
  MOD_RES (28), (29): Xaa is C or S
MNNSLQEIVNSSDDYYVVPLPELQTPAXXPK

SEQ ID NO: 49332 - protein, 37 aa, Artificial Sequence; identical to SEQ ID NO: 9171
  Cyclic GFR-binding peptide
  MOD_RES (1), (33): Xaa is C or S

SEQ ID NO: 49333 - protein, 33 aa, Artificial Sequence; identical to SEQ ID NO: 9172
  Cyclic GFR-binding peptide
  MOD_RES (31), (32): Xaa is C or S

SEQ ID NO: 49334 - protein, 38 aa, Artificial Sequence; identical to SEQ ID NO: 9173
  Cyclic GFR-binding peptide
  MOD_RES (32), (33): Xaa is C or S

SEQ ID NO: 49335 - protein, 32 aa, Artificial Sequence; identical to SEQ ID NO: 9174
  Cyclic GFR-binding peptide
  MOD_RES (1), (32): Xaa is C or S

SEQ ID NO: 49336 - protein, 34 aa, Artificial Sequence; identical to SEQ ID NO: 9175
  Cyclic GFR-binding peptide
  MOD_RES (1), (3), (34): Xaa is C or S

SEQ ID NO: 49337 - protein, 29 aa, Artificial Sequence
  Cyclic GFR-binding peptide
  MOD_RES (1), (3): Xaa is C or S
XKXSKVVMNSLQEVKPTRGVYYVIPLPEL

SEQ ID NO: 49338 - protein, 33 aa, Artificial Sequence
  Cyclic GFR-binding peptide
  MOD_RES (27), (28): Xaa is C or S
MEYQKYVKPTRGVIFLISIPSLDQPVXXPSASA

SEQ ID NO: 49339 - protein, 32 aa, Artificial Sequence; identical to SEQ ID NO: 9176
  Cyclic GFR-binding peptide
  MOD_RES (31), (31): Xaa is C or S

SEQ ID NO: 49340 - protein, 34 aa, Artificial Sequence; identical to SEQ ID NO: 9178
  Cyclic GFR-binding peptide
  MOD_RES (1), (3), (34): Xaa is C or S

SEQ ID NO: 49341 - protein, 32 aa, Artificial Sequence
  Cyclic GFR-binding peptide
  MOD_RES (28), (29): Xaa is C or S
MDRYKKLVVNNASDFYLISIANLRTPVXXTPP

SEQ ID NO: 49342 - protein, 27 aa, Artificial Sequence
  Cyclic GFR-binding peptide
ARVVMNNSLQEIVNSSDDYYVVPLPEL

SEQ ID NO: 49343 - protein, 34 aa, Artificial Sequence
  Cyclic GFR-binding peptide
  MOD_RES (2), (4): Xaa is C or S
RXGXGEVVMDNSLQEVVKENEDYYLMTLPELETP

SEQ ID NO: 49344 - protein, 31 aa, Artificial Sequence
  Cyclic GFR-binding peptide
  MOD_RES (27), (27): Xaa is C or S
NNSLQEIVNSSDDYYVVPLPELKTPAXTPKT

SEQ ID NO: 49345 - protein, 32 aa, Artificial Sequence
  Cyclic GFR-binding peptide
  MOD_RES (2), (2): Xaa is C or S
GXGEVVMENSLQEVVKDYEDYYVMPLPELETP

SEQ ID NO: 49346 - protein, 27 aa, Artificial Sequence
  Cyclic GFR-binding peptide
  MOD_RES (27), (27): Xaa is C or S
DNSLQEVVNNASDYYLITLPELRTPVX

SEQ ID NO: 49347 - protein, 38 aa, Artificial Sequence; identical to SEQ ID NO: 9183
  Cyclic GFR-binding peptide
  MOD_RES (32), (33): Xaa is C or S

SEQ ID NO: 49348 - protein, 27 aa, Artificial Sequence
  Cyclic GFR-binding peptide
SRVVMNNSLQEIVNSSDDYYVVPLPEL

SEQ ID NO: 49349 - protein, 37 aa, Artificial Sequence; identical to SEQ ID NO: 9184
  Cyclic GFR-binding peptide
  MOD_RES (1), (33), (34): Xaa is C or S

SEQ ID NO: 49350 - protein, 37 aa, Artificial Sequence; identical to SEQ ID NO: 9185
  Cyclic GFR-binding peptide
  MOD_RES (1), (3), (35), (36): Xaa is C or S

SEQ ID NO: 49351 - protein, 36 aa, Artificial Sequence; identical to SEQ ID NO: 9187
  Cyclic GFR-binding peptide
  MOD_RES (2), (34), (35): Xaa is C or S

SEQ ID NO: 49352 - protein, 32 aa, Artificial Sequence
  Cyclic GFR-binding peptide
  MOD_RES (30), (31): Xaa is C or S
VVMNNSLQEIVNSSDDYYVVPLPELKTPAXXP

SEQ ID NO: 49353 - protein, 35 aa, Artificial Sequence; identical to SEQ ID NO: 9186
  Cyclic GFR-binding peptide
  MOD_RES (1), (3), (35): Xaa is C or S

SEQ ID NO: 49354 - protein, 32 aa, Artificial Sequence
  Cyclic GFR-binding peptide
  MOD_RES (28), (29): Xaa is C or S
MDNSLQEVVNNASDYYVIPLPELRTPVXXTPP

SEQ ID NO: 49355 - protein, 29 aa, Artificial Sequence
  Cyclic GFR-binding peptide
  MOD_RES (2), (2): Xaa is C or S
GXSRVVMNEYQKYIVNSSDDIFLVSIPSL

SEQ ID NO: 49356 - protein, 30 aa, Artificial Sequence
  Cyclic GFR-binding peptide
SEVVMDNSLQEVVNNASDYYVIPLPELRTP

SEQ ID NO: 49357 - protein, 37 aa, Artificial Sequence; identical to SEQ ID NO: 9188
  Cyclic GFR-binding peptide
  MOD_RES (1), (3), (35), (36): Xaa is C or S

SEQ ID NO: 49358 - protein, 34 aa, Artificial Sequence; identical to SEQ ID NO: 9189
  Cyclic GFR-binding peptide
  MOD_RES (32), (32): Xaa is C or S

SEQ ID NO: 49359 - protein, 20 aa, Artificial Sequence
  Cyclic GFR-binding peptide
EYQKYIVNSSDDIFLVSIPS

SEQ ID NO: 49360 - protein, 33 aa, Artificial Sequence; identical to SEQ ID NO: 9190
  Cyclic GFR-binding peptide
  MOD_RES (31), (32): Xaa is C or S

SEQ ID NO: 49361 - protein, 22 aa, Artificial Sequence
  Cyclic GFR-binding peptide
MDRYKKLVVNNASDFYLISIAN

SEQ ID NO: 49362 - protein, 31 aa, Artificial Sequence
  Cyclic GFR-binding peptide
  MOD_RES (28), (29): Xaa is C or S
MEEYQKYVVKDYEDIFLMSIPSLETPVXXAK

SEQ ID NO: 49363 - protein, 27 aa, Artificial Sequence
  Cyclic GFR-binding peptide
  MOD_RES (26), (26): Xaa is C or S
EYQKYIVNSSDDIFLVSIPSLKTPAXT

SEQ ID NO: 49364 - protein, 33 aa, Artificial Sequence; identical to SEQ ID NO: 9191
  Cyclic GFR-binding peptide
  MOD_RES (2), (2): Xaa is C or S

SEQ ID NO: 49365 - protein, 35 aa, Artificial Sequence; identical to SEQ ID NO: 9193
  Cyclic GFR-binding peptide
  MOD_RES (31), (32): Xaa is C or S

SEQ ID NO: 49366 - protein, 27 aa, Artificial Sequence
  Cyclic GFR-binding peptide
  MOD_RES (26), (27): Xaa is C or S
NSLQEIVNSSDDYYLVTLPELKTPAXX

SEQ ID NO: 49367 - protein, 29 aa, Artificial Sequence
  Cyclic GFR-binding peptide
AAAAAAAAAEYQKYIVNSSDDIFLVSIPS

SEQ ID NO: 49368 - protein, 31 aa, Artificial Sequence
  Cyclic GFR-binding peptide
  MOD_RES (2), (2): Xaa is C or S
GXSEVVMDNSLQEVVNNASDYYVIPLPELRT

SEQ ID NO: 49369 - protein, 29 aa, Artificial Sequence
  Cyclic GFR-binding peptide
AAAAAAAAAEYQKYVKPTRGVIFLISIPS

SEQ ID NO: 49370 - protein, 29 aa, Artificial Sequence
  Cyclic GFR-binding peptide
  MOD_RES (1), (1): Xaa is C or S
XGEVVMDNSLQEVVKENEDYYLMTLPELE

SEQ ID NO: 49371 - protein, 26 aa, Artificial Sequence
  Cyclic GFR-binding peptide
EVVMDRYKKLVVNNASDFYLISIANL

SEQ ID NO: 49372 - protein, 31 aa, Artificial Sequence
  Cyclic GFR-binding peptide
  MOD_RES (2), (2): Xaa is C or S
KXSKVIMEYQKYIKPTKGIIFLISIPSLDQS

SEQ ID NO: 49373 - protein, 24 aa, Artificial Sequence
  Cyclic GFR-binding peptide
EYQKYIVNSSDDIFLVSIPSLQTP

SEQ ID NO: 49374 - protein, 38 aa, Artificial Sequence; identical to SEQ ID NO: 9196
  Cyclic GFR-binding peptide
  MOD_RES (1), (33), (34): Xaa is C or S

SEQ ID NO: 49375 - protein, 26 aa, Artificial Sequence
  Cyclic GFR-binding peptide
EEYQKYVVKDYEDIFLMSIPSLETPV

SEQ ID NO: 49376 - protein, 31 aa, Artificial Sequence
  Cyclic GFR-binding peptide
  MOD_RES (2), (2): Xaa is C or S
KXSKVVMEYQKYVKPTRGVIFLISIPSLDQP

SEQ ID NO: 49377 - protein, 35 aa, Artificial Sequence; identical to SEQ ID NO: 9197
  Cyclic GFR-binding peptide
  MOD_RES (31), (32): Xaa is C or S

SEQ ID NO: 49378 - protein, 30 aa, Artificial Sequence
  Cyclic GFR-binding peptide
  MOD_RES (29), (30): Xaa is C or S
VMNNSLQEIVNSSDDYYLVTLPELQTPAXX

SEQ ID NO: 49379 - protein, 30 aa, Artificial Sequence
  Cyclic GFR-binding peptide
  MOD_RES (2), (4): Xaa is C or S
SXKXSKVIMEYQKYIKPTKGIIFLISIPSL

SEQ ID NO: 49380 - protein, 29 aa, Artificial Sequence
  Cyclic GFR-binding peptide
KVIMEYQKYIKPTKGIIFLISIPSLDQSV

SEQ ID NO: 49381 - protein, 28 aa, Artificial Sequence
  Cyclic GFR-binding peptide
  MOD_RES (1), (1): Xaa is C or S
XSEVVMDNSLQEVVNNASDYYVIPLPEL

SEQ ID NO: 49382 - protein, 20 aa, Artificial Sequence
  Cyclic GFR-binding peptide
NSLQEVKPKRGVYYLITLPE

SEQ ID NO: 49383 - protein, 31 aa, Artificial Sequence
  Cyclic GFR-binding peptide
  MOD_RES (1), (3): Xaa is C or S
XKXSKVVMEYQKYVKPTRGVIFLISIPSLDQ

SEQ ID NO: 49384 - protein, 34 aa, Artificial Sequence; identical to SEQ ID NO: 9200
  Cyclic GFR-binding peptide
  MOD_RES (1), (3), (34): Xaa is C or S

SEQ ID NO: 49385 - protein, 28 aa, Artificial Sequence
  Cyclic GFR-binding peptide
VVMEYQKYVKPTRGVIFLISIPSLDQPV

SEQ ID NO: 49386 - protein, 38 aa, Artificial Sequence; identical to SEQ ID NO: 9201
  Cyclic GFR-binding peptide
  MOD_RES (2), (4), (36), (37): Xaa is C or S

SEQ ID NO: 49387 - protein, 32 aa, Artificial Sequence
  Cyclic GFR-binding peptide
  MOD_RES (28), (29): Xaa is C or S
MDNSLQEVVKENEDYYVMPLPELETPVXXAKP

SEQ ID NO: 49388 - protein, 25 aa, Artificial Sequence
  Cyclic GFR-binding peptide
NNSLQEIVNSSDDYYVVPLPELKTP

SEQ ID NO: 49389 - protein, 23 aa, Artificial Sequence
  Cyclic GFR-binding peptide
EYQKYVVKDYEDIFLMSIPSLET

SEQ ID NO: 49390 - protein, 41 aa, Artificial Sequence; identical to SEQ ID NO: 9205
  Cyclic GFR-binding peptide
  MOD_RES (2), (4), (36), (37): Xaa is C or S

SEQ ID NO: 49391 - protein, 29 aa, Artificial Sequence
  Cyclic GFR-binding peptide
VVMDNSLQEVVNNASDYYLITLPELRTPV

SEQ ID NO: 49392 - protein, 29 aa, Artificial Sequence
  Cyclic GFR-binding peptide
  MOD_RES (29), (29): Xaa is C or S
VMNNSLQEIVNSSDDYYLVTLPELQTPAX

SEQ ID NO: 49393 - protein, 28 aa, Artificial Sequence
  Cyclic GFR-binding peptide
  MOD_RES (26), (27): Xaa is C or S
QYNKLVVNNASDLYLISIASLRTPVXXT

SEQ ID NO: 49394 - protein, 30 aa, Artificial Sequence
  Cyclic GFR-binding peptide
  MOD_RES (27), (28): Xaa is C or S
MEYQKYVKPTRGVIFLISIPSLDQPVXXPS

SEQ ID NO: 49395 - protein, 36 aa, Artificial Sequence; identical to SEQ ID NO: 9206
  Cyclic GFR-binding peptide
  MOD_RES (1), (33), (34): Xaa is C or S

SEQ ID NO: 49396 - protein, 37 aa, Artificial Sequence; identical to SEQ ID NO: 9207
  Cyclic GFR-binding peptide
  MOD_RES (2), (4), (35), (36): Xaa is C or S

SEQ ID NO: 49397 - protein, 37 aa, Artificial Sequence; identical to SEQ ID NO: 9209
  Cyclic GFR-binding peptide
  MOD_RES (32), (33): Xaa is C or S

SEQ ID NO: 49398 - protein, 26 aa, Artificial Sequence
  Cyclic GFR-binding peptide
  MOD_RES (26), (26): Xaa is C or S
EYQKYIVNSSDDIFLVSIPSLKTPAX

SEQ ID NO: 49399 - protein, 31 aa, Artificial Sequence
  Cyclic GFR-binding peptide
  MOD_RES (1), (3): Xaa is C or S
XKXSKVIMEYQKYIKPTKGIIFLISIPSLDQ

SEQ ID NO: 49400 - protein, 33 aa, Artificial Sequence
  Cyclic GFR-binding peptide
  MOD_RES (28), (29): Xaa is C or S
MNNSLQEIVNSSDDYYLVTLPELQTPAXXPKPV

SEQ ID NO: 49401 - protein, 27 aa, Artificial Sequence
  Cyclic GFR-binding peptide
EVVMEEYQKYVVKDYEDIFLMSIPSLE

SEQ ID NO: 49402 - protein, 33 aa, Artificial Sequence
  Cyclic GFR-binding peptide
  MOD_RES (29), (30): Xaa is C or S
VIMNSLQEIKPTKGIYYVIPLPELDQSVXXPSA

SEQ ID NO: 49403 - protein, 39 aa, Artificial Sequence; identical to SEQ ID NO: 9211
  Cyclic GFR-binding peptide
  MOD_RES (1), (3), (35), (36): Xaa is C or S

SEQ ID NO: 49404 - protein, 32 aa, Artificial Sequence; identical to SEQ ID NO: 9212
  Cyclic GFR-binding peptide
  MOD_RES (31), (32): Xaa is C or S

SEQ ID NO: 49405 - protein, 23 aa, Artificial Sequence
  Cyclic GFR-binding peptide
VIMNSLQEVKPKRGVYYLITLPE

SEQ ID NO: 49406 - protein, 29 aa, Artificial Sequence
  Cyclic GFR-binding peptide
  MOD_RES (29), (29): Xaa is C or S
VVMEYQKYVKPTRGVIFLISIPSLDQPVX

SEQ ID NO: 49407 - protein, 26 aa, Artificial Sequence
  Cyclic GFR-binding peptide
  MOD_RES (1), (1): Xaa is C or S
XSKVVMNSLQEVKPTRGVYYVIPLPE

SEQ ID NO: 49408 - protein, 23 aa, Artificial Sequence
  Cyclic GFR-binding peptide
NNSLQEIVNSSDDYYLVTLPELK

SEQ ID NO: 49409 - protein, 25 aa, Artificial Sequence
  Cyclic GFR-binding peptide
QYNKLVVNNASDLYLISIASLRTPV

SEQ ID NO: 49410 - protein, 38 aa, Artificial Sequence; identical to SEQ ID NO: 9217
  Cyclic GFR-binding peptide
  MOD_RES (32), (33): Xaa is C or S

SEQ ID NO: 49411 - protein, 26 aa, Artificial Sequence
  Cyclic GFR-binding peptide
VVMNNSLQEIVNSSDDYYLVTLPELK

SEQ ID NO: 49412 - protein, 25 aa, Artificial Sequence
  Cyclic GFR-binding peptide
SKVIMNSLQEIKPTKGIYYVIPLPE

SEQ ID NO: 49413 - protein, 36 aa, Artificial Sequence; identical to SEQ ID NO: 9218
  Cyclic GFR-binding peptide
  MOD_RES (2), (34), (35): Xaa is C or S

SEQ ID NO: 49414 - protein, 29 aa, Artificial Sequence
  Cyclic GFR-binding peptide
SEVVMDNSLQEVVNNASDYYLITLPELRT

SEQ ID NO: 49415 - protein, 34 aa, Artificial Sequence; identical to SEQ ID NO: 9219
  Cyclic GFR-binding peptide
  MOD_RES (2), (34): Xaa is C or S

SEQ ID NO: 49416 - protein, 27 aa, Artificial Sequence
  Cyclic GFR-binding peptide
  MOD_RES (26), (27): Xaa is C or S
EYQKYVVKENEDIFLMSIPSLETPVXX

SEQ ID NO: 49417 - protein, 33 aa, Artificial Sequence; identical to SEQ ID NO: 9223
  Cyclic GFR-binding peptide
  MOD_RES (1), (32), (33): Xaa is C or S

SEQ ID NO: 49418 - protein, 24 aa, Artificial Sequence
  Cyclic GFR-binding peptide
NSLQEVVKDYEDYYLMTLPELETP

SEQ ID NO: 49419 - protein, 30 aa, Artificial Sequence
  Cyclic GFR-binding peptide
ARVVMNEYQKYIVNSSDDIFLVSIPSLQTP

SEQ ID NO: 49420 - protein, 38 aa, Artificial Sequence; identical to SEQ ID NO: 9224
  Cyclic GFR-binding peptide
  MOD_RES (1), (3), (34), (35): Xaa is C or S

SEQ ID NO: 49421 - protein, 37 aa, Artificial Sequence; identical to SEQ ID NO: 9225
  Cyclic GFR-binding peptide
  MOD_RES (1), (33), (34): Xaa is C or S

SEQ ID NO: 49422 - protein, 24 aa, Artificial Sequence
  Cyclic GFR-binding peptide
VVMNNSLQEIVNSSDDYYVVPLPE

SEQ ID NO: 49423 - protein, 36 aa, Artificial Sequence; identical to SEQ ID NO: 9226
  Cyclic GFR-binding peptide
  MOD_RES (31), (32): Xaa is C or S

SEQ ID NO: 49424 - protein, 38 aa, Artificial Sequence; identical to SEQ ID NO: 9227
  Cyclic GFR-binding peptide
  MOD_RES (1), (3), (35): Xaa is C or S

SEQ ID NO: 49425 - protein, 39 aa, Artificial Sequence; identical to SEQ ID NO: 9228
  Cyclic GFR-binding peptide
  MOD_RES (2), (4), (36), (37): Xaa is C or S

SEQ ID NO: 49426 - protein, 42 aa, Artificial Sequence; identical to SEQ ID NO: 9229
  Cyclic GFR-binding peptide
  MOD_RES (2), (4), (36), (37): Xaa is C or S

SEQ ID NO: 49427 - protein, 26 aa, Artificial Sequence
  Cyclic GFR-binding peptide
MNNSLQEIVNSSDDYYLVTLPELKTP

SEQ ID NO: 49428 - protein, 26 aa, Artificial Sequence
  Cyclic GFR-binding peptide
  MOD_RES (26), (26): Xaa is C or S
EYQKYVKPKRGVIFLISIPSLAQPVX

SEQ ID NO: 49429 - protein, 38 aa, Artificial Sequence; identical to SEQ ID NO: 9230
  Cyclic GFR-binding peptide
  MOD_RES (1), (3), (35), (36): Xaa is C or S

SEQ ID NO: 49430 - protein, 29 aa, Artificial Sequence
  Cyclic GFR-binding peptide
  MOD_RES (2), (4): Xaa is C or S
SXKXSKVVMEYQKYVKPTRGVIFLISIPS

SEQ ID NO: 49431 - protein, 28 aa, Artificial Sequence
  Cyclic GFR-binding peptide
VMNEYQKYIVNSSDDIFLVSIPSLKTPA

SEQ ID NO: 49432 - protein, 27 aa, Artificial Sequence
  Cyclic GFR-binding peptide
  MOD_RES (1), (1): Xaa is C or S
XSRVVMNEYQKYIVNSSDDIFLVSIPS

SEQ ID NO: 49433 - protein, 28 aa, Artificial Sequence
  Cyclic GFR-binding peptide
  MOD_RES (27), (28): Xaa is C or S
DNSLQEVVNNASDYYLITLPELRTPVXX

SEQ ID NO: 49434 - protein, 42 aa, Artificial Sequence; identical to SEQ ID NO: 9232
  Cyclic GFR-binding peptide
  MOD_RES (2), (4), (36): Xaa is C or S

SEQ ID NO: 49435 - protein, 23 aa, Artificial Sequence
  Cyclic GFR-binding peptide
RYKKLVVNNASDFYLISIANLRT

SEQ ID NO: 49436 - protein, 40 aa, Artificial Sequence; identical to SEQ ID NO: 9233
  Cyclic GFR-binding peptide
  MOD_RES (2), (34), (35): Xaa is C or S

SEQ ID NO: 49437 - protein, 25 aa, Artificial Sequence
  Cyclic GFR-binding peptide
NSLQEVKPKRGVYYLITLPELAQPV

SEQ ID NO: 49438 - protein, 29 aa, Artificial Sequence
  Cyclic GFR-binding peptide
AAAAAAAAANSLQEVVKENEDYYLMTLPE

SEQ ID NO: 49439 - protein, 30 aa, Artificial Sequence
  Cyclic GFR-binding peptide
  MOD_RES (1), (1): Xaa is C or S
XARVVMNNSLQEIVNSSDDYYVVPLPELQT

SEQ ID NO: 49440 - protein, 31 aa, Artificial Sequence
  Cyclic GFR-binding peptide
  MOD_RES (2), (4): Xaa is C or S
HXGXARVVMNEYQKYIVNSSDDIFLVSIPSL

SEQ ID NO: 49441 - protein, 30 aa, Artificial Sequence
  Cyclic GFR-binding peptide
  MOD_RES (26), (27): Xaa is C or S
EYQKYIVNSSDDIFLVSIPSLQTPAXXPKP

SEQ ID NO: 49442 - protein, 33 aa, Artificial Sequence; identical to SEQ ID NO: 9235
  Cyclic GFR-binding peptide
  MOD_RES (2), (2): Xaa is C or S

SEQ ID NO: 49443 - protein, 39 aa, Artificial Sequence; identical to SEQ ID NO: 9238
  Cyclic GFR-binding peptide
  MOD_RES (1), (3), (34), (35): Xaa is C or S

SEQ ID NO: 49444 - protein, 38 aa, Artificial Sequence; identical to SEQ ID NO: 9239
  Cyclic GFR-binding peptide
  MOD_RES (1), (3), (35), (36): Xaa is C or S

SEQ ID NO: 49445 - protein, 26 aa, Artificial Sequence
  Cyclic GFR-binding peptide
MENSLQEVVKDYEDYYLMTLPELETP

SEQ ID NO: 49446 - protein, 35 aa, Artificial Sequence; identical to SEQ ID NO: 9240
  Cyclic GFR-binding peptide
  MOD_RES (31), (32): Xaa is C or S

SEQ ID NO: 49447 - protein, 26 aa, Artificial Sequence
  Cyclic GFR-binding peptide
VMDRYKKLVVNNASDFYLISIANLRT

SEQ ID NO: 49448 - protein, 28 aa, Artificial Sequence
  Cyclic GFR-binding peptide
RVIMNSLQEVKPKRGVYYLITLPELAQP

SEQ ID NO: 49449 - protein, 34 aa, Artificial Sequence; identical to SEQ ID NO: 9241
  Cyclic GFR-binding peptide
  MOD_RES (2), (34): Xaa is C or S

SEQ ID NO: 49450 - protein, 27 aa, Artificial Sequence
  Cyclic GFR-binding peptide
VVMNNSLQEIVNSSDDYYVVPLPELKT

SEQ ID NO: 49451 - protein, 36 aa, Artificial Sequence
  Cyclic GFR-binding peptide
  MOD_RES (30), (31): Xaa is C or S
KVVMEYQKYVKPTRGVIFLISIPSLDQPVXXPSASA

SEQ ID NO: 49452 - protein, 38 aa, Artificial Sequence; identical to SEQ ID NO: 9243
  Cyclic GFR-binding peptide
  MOD_RES (1), (33), (34): Xaa is C or S

SEQ ID NO: 49453 - protein, 23 aa, Artificial Sequence
  Cyclic GFR-binding peptide
MDNSLQEVVNNASDYYVIPLPEL

SEQ ID NO: 49454 - protein, 26 aa, Artificial Sequence
  Cyclic GFR-binding peptide
SKVVMEYQKYVKPTRGVIFLISIPSL

SEQ ID NO: 49455 - protein, 32 aa, Artificial Sequence
  Cyclic GFR-binding peptide
  MOD_RES (26), (27): Xaa is C or S
EYQKYVVKENEDIFLMSIPSLETPVXXAKPIK

SEQ ID NO: 49456 - protein, 30 aa, Artificial Sequence
  Cyclic GFR-binding peptide
  MOD_RES (2), (2): Xaa is C or S
KXSKVVMEYQKYVKPTRGVIFLISIPSLDQ

SEQ ID NO: 49457 - protein, 38 aa, Artificial Sequence; identical to SEQ ID NO: 9246
  Cyclic GFR-binding peptide
  MOD_RES (1), (3), (35), (36): Xaa is C or S

SEQ ID NO: 49458 - protein, 23 aa, Artificial Sequence
  Cyclic GFR-binding peptide
NSLQEIVNSSDDYYLVTLPELKT

SEQ ID NO: 49459 - protein, 29 aa, Artificial Sequence
  Cyclic GFR-binding peptide
  MOD_RES (29), (29): Xaa is C or S
VMNEYQKYIVNSSDDIFLVSIPSLKTPAX

SEQ ID NO: 49460 - protein, 34 aa, Artificial Sequence
  Cyclic GFR-binding peptide
  MOD_RES (2), (4): Xaa is C or S
RXGXSEVVMDNSLQEVVNNASDYYLITLPELRTP

SEQ ID NO: 49461 - protein, 27 aa, Artificial Sequence
  Cyclic GFR-binding peptide
VIMNSLQEIKPTKGIYYVIPLPELDQS

SEQ ID NO: 49462 - protein, 29 aa, Artificial Sequence
  Cyclic GFR-binding peptide
  MOD_RES (28), (29): Xaa is C or S
MNEYQKYIVNSSDDIFLVSIPSLKTPAXX

SEQ ID NO: 49463 - protein, 23 aa, Artificial Sequence
  Cyclic GFR-binding peptide
MENSLQEVVKDYEDYYLMTLPEL

SEQ ID NO: 49464 - protein, 22 aa, Artificial Sequence
  Cyclic GFR-binding peptide
NSLQEVVKENEDYYLMTLPELE

SEQ ID NO: 49465 - protein, 33 aa, Artificial Sequence; identical to SEQ ID NO: 9250
  Cyclic GFR-binding peptide
  MOD_RES (1), (33): Xaa is C or S

SEQ ID NO: 49466 - protein, 26 aa, Artificial Sequence
  Cyclic GFR-binding peptide
VVMNSLQEVKPTRGVYYVIPLPELDQ

SEQ ID NO: 49467 - protein, 39 aa, Artificial Sequence; identical to SEQ ID NO: 9252
  Cyclic GFR-binding peptide
  MOD_RES (1), (33), (34): Xaa is C or S

SEQ ID NO: 49468 - protein, 36 aa, Artificial Sequence; identical to SEQ ID NO: 9253
  Cyclic GFR-binding peptide
  MOD_RES (32), (33): Xaa is C or S

SEQ ID NO: 49469 - protein, 25 aa, Artificial Sequence
  Cyclic GFR-binding peptide
IMNSLQEVKPKRGVYYLITLPELAQ

SEQ ID NO: 49470 - protein, 20 aa, Artificial Sequence
  Cyclic GFR-binding peptide
QYNKLVVNNASDLYLISIAS

SEQ ID NO: 49471 - protein, 30 aa, Artificial Sequence
  Cyclic GFR-binding peptide
  MOD_RES (27), (28): Xaa is C or S
NNSLQEIVNSSDDYYLVTLPELQTPAXXPK

SEQ ID NO: 49472 - protein, 40 aa, Artificial Sequence; identical to SEQ ID NO: 9256
  Cyclic GFR-binding peptide
  MOD_RES (2), (4), (36), (37): Xaa is C or S

SEQ ID NO: 49473 - protein, 20 aa, Artificial Sequence
  Cyclic GFR-binding peptide
NSLQEVVKENEDYYVMPLPE

SEQ ID NO: 49474 - protein, 26 aa, Artificial Sequence
  Cyclic GFR-binding peptide
IMEYQKYVKPKRGVIFLISIPSLAQP

SEQ ID NO: 49475 - protein, 35 aa, Artificial Sequence; identical to SEQ ID NO: 9258
  Cyclic GFR-binding peptide
  MOD_RES (2), (4), (35): Xaa is C or S

SEQ ID NO: 49476 - protein, 35 aa, Artificial Sequence
  Cyclic GFR-binding peptide
  MOD_RES (30), (30): Xaa is C or S
VVMNNSLQEIVNSSDDYYVVPLPELKTPAXTPKTV

SEQ ID NO: 49477 - protein, 28 aa, Artificial Sequence
  Cyclic GFR-binding peptide
  MOD_RES (28), (28): Xaa is C or S
MNNSLQEIVNSSDDYYLVTLPELKTPAX

SEQ ID NO: 49478 - protein, 27 aa, Artificial Sequence
  Cyclic GFR-binding peptide
  MOD_RES (1), (1): Xaa is C or S
XGEVVMEEYQKYVVKDYEDIFLMSIPS

SEQ ID NO: 49479 - protein, 36 aa, Artificial Sequence; identical to SEQ ID NO: 9259
  Cyclic GFR-binding peptide
  MOD_RES (32), (33): Xaa is C or S

SEQ ID NO: 49480 - protein, 27 aa, Artificial Sequence
  Cyclic GFR-binding peptide
VMDNSLQEVVNNASDYYLITLPELRTP

SEQ ID NO: 49481 - protein, 34 aa, Artificial Sequence; identical to SEQ ID NO: 9260
  Cyclic GFR-binding peptide
  MOD_RES (2), (4): Xaa is C or S

SEQ ID NO: 49482 - protein, 30 aa, Artificial Sequence
  Cyclic GFR-binding peptide
  MOD_RES (1), (1): Xaa is C or S
XGEVVMENSLQEVVKDYEDYYVMPLPELET

SEQ ID NO: 49483 - protein, 28 aa, Artificial Sequence
  Cyclic GFR-binding peptide
VMENSLQEVVKDYEDYYLMTLPELETPV

SEQ ID NO: 49484 - protein, 30 aa, Artificial Sequence
  Cyclic GFR-binding peptide
  MOD_RES (2), (2): Xaa is C or S
KXSRVIMNSLQEVKPKRGVYYLITLPELAQ

SEQ ID NO: 49485 - protein, 35 aa, Artificial Sequence; identical to SEQ ID NO: 9264
  Cyclic GFR-binding peptide
  MOD_RES (1), (33), (34): Xaa is C or S

SEQ ID NO: 49486 - protein, 33 aa, Artificial Sequence; identical to SEQ ID NO: 9263
  Cyclic GFR-binding peptide
  MOD_RES (2), (2): Xaa is C or S

SEQ ID NO: 49487 - protein, 40 aa, Artificial Sequence; identical to SEQ ID NO: 9265
  Cyclic GFR-binding peptide
  MOD_RES (2), (4), (36), (37): Xaa is C or S

SEQ ID NO: 49488 - protein, 32 aa, Artificial Sequence; identical to SEQ ID NO: 9266
  Cyclic GFR-binding peptide
  MOD_RES (2), (2): Xaa is C or S

SEQ ID NO: 49489 - protein, 32 aa, Artificial Sequence
  Cyclic GFR-binding peptide
  MOD_RES (28), (29): Xaa is C or S
MNEYQKYIVNSSDDIFLVSIPSLQTPAXXPKP

SEQ ID NO: 49490 - protein, 20 aa, Artificial Sequence
  Cyclic GFR-binding peptide
EYQKYIKPTKGIIFLISIPS

SEQ ID NO: 49491 - protein, 25 aa, Artificial Sequence
  Cyclic GFR-binding peptide
NSLQEIVNSSDDYYLVTLPELKTPA

SEQ ID NO: 49492 - protein, 34 aa, Artificial Sequence
  Cyclic GFR-binding peptide
  MOD_RES (30), (31): Xaa is C or S
VVMDRYKKLVVNNASDFYLISIANLRTPVXXTPP

SEQ ID NO: 49493 - protein, 35 aa, Artificial Sequence
  Cyclic GFR-binding peptide
  MOD_RES (29), (30): Xaa is C or S
VVMNSLQEVKPTRGVYYVIPLPELDQPVXXPSASA

SEQ ID NO: 49494 - protein, 25 aa, Artificial Sequence
  Cyclic GFR-binding peptide
VMENSLQEVVKDYEDYYVMPLPELE

SEQ ID NO: 49495 - protein, 34 aa, Artificial Sequence
  Cyclic GFR-binding peptide
  MOD_RES (30), (31): Xaa is C or S
VVMEEYQKYVVKDYEDIFLMSIPSLETPVXXAKP

SEQ ID NO: 49496 - protein, 21 aa, Artificial Sequence
  Cyclic GFR-binding peptide
RYKKLVVNNASDFYLISIANL

SEQ ID NO: 49497 - protein, 28 aa, Artificial Sequence
  Cyclic GFR-binding peptide
  MOD_RES (27), (28): Xaa is C or S
DNSLQEVVKENEDYYVMPLPELETPVXX

SEQ ID NO: 49498 - protein, 27 aa, Artificial Sequence
  Cyclic GFR-binding peptide
  MOD_RES (1), (1): Xaa is C or S
XARVVMNNSLQEIVNSSDDYYVVPLPE

SEQ ID NO: 49499 - protein, 28 aa, Artificial Sequence
  Cyclic GFR-binding peptide
  MOD_RES (1), (1): Xaa is C or S
XSRVVMNNSLQEIVNSSDDYYLVTLPEL

SEQ ID NO: 49500 - protein, 30 aa, Artificial Sequence
  Cyclic GFR-binding peptide
  MOD_RES (30), (30): Xaa is C or S
VVMDNSLQEVVNNASDYYLITLPELRTPVX

SEQ ID NO: 49501 - protein, 33 aa, Artificial Sequence; identical to SEQ ID NO: 9271
  Cyclic GFR-binding peptide
  MOD_RES (2), (33): Xaa is C or S

SEQ ID NO: 49502 - protein, 34 aa, Artificial Sequence
  Cyclic GFR-binding peptide
  MOD_RES (29), (30): Xaa is C or S
VMENSLQEVVKDYEDYYLMTLPELETPVXXAKPI

SEQ ID NO: 49503 - protein, 34 aa, Artificial Sequence
  Cyclic GFR-binding peptide
  MOD_RES (30), (31): Xaa is C or S
VVMNNSLQEIVNSSDDYYLVTLPELQTPAXXPKP

SEQ ID NO: 49504 - protein, 31 aa, Artificial Sequence
  Cyclic GFR-binding peptide
  MOD_RES (26), (27): Xaa is C or S
QYNKLVVNNASDLYLISIASLRTPVXXTPPT

SEQ ID NO: 49505 - protein, 36 aa, Artificial Sequence; identical to SEQ ID NO: 9272
  Cyclic GFR-binding peptide
  MOD_RES (32), (33): Xaa is C or S

SEQ ID NO: 49506 - protein, 36 aa, Artificial Sequence; identical to SEQ ID NO: 9273
  Cyclic GFR-binding peptide
  MOD_RES (2), (34), (35): Xaa is C or S

SEQ ID NO: 49507 - protein, 42 aa, Artificial Sequence; identical to SEQ ID NO: 9275
  Cyclic GFR-binding peptide
  MOD_RES (2), (4), (36), (37): Xaa is C or S

SEQ ID NO: 49508 - protein, 34 aa, Artificial Sequence; identical to SEQ ID NO: 9276
  Cyclic GFR-binding peptide
  MOD_RES (32), (32): Xaa is C or S

SEQ ID NO: 49509 - protein, 31 aa, Artificial Sequence
  Cyclic GFR-binding peptide
  MOD_RES (1), (3): Xaa is C or S
XGXSEVVMDNSLQEVVNNASDYYVIPLPELR

SEQ ID NO: 49510 - protein, 29 aa, Artificial Sequence
  Cyclic GFR-binding peptide
AAAAAAAAANSLQEVVNNASDYYLITLPE

SEQ ID NO: 49511 - protein, 39 aa, Artificial Sequence; identical to SEQ ID NO: 9277
  Cyclic GFR-binding peptide
  MOD_RES (2), (34): Xaa is C or S

SEQ ID NO: 49512 - protein, 27 aa, Artificial Sequence
  Cyclic GFR-binding peptide
MNEYQKYIVNSSDDIFLVSIPSLQTPA

SEQ ID NO: 49513 - protein, 28 aa, Artificial Sequence
  Cyclic GFR-binding peptide
  MOD_RES (27), (28): Xaa is C or S
DEYQKYVVKENEDIFLMSIPSLETPVXX

SEQ ID NO: 49514 - protein, 35 aa, Artificial Sequence; identical to SEQ ID NO: 9279
  Cyclic GFR-binding peptide
  MOD_RES (2), (4): Xaa is C or S

SEQ ID NO: 49515 - protein, 36 aa, Artificial Sequence; identical to SEQ ID NO: 9280
  Cyclic GFR-binding peptide
  MOD_RES (2), (4), (36): Xaa is C or S

SEQ ID NO: 49516 - protein, 24 aa, Artificial Sequence
  Cyclic GFR-binding peptide
EYQKYVVKENEDIFLMSIPSLETP

SEQ ID NO: 49517 - protein, 26 aa, Artificial Sequence
  Cyclic GFR-binding peptide
RVVMNNSLQEIVNSSDDYYVVPLPEL

SEQ ID NO: 49518 - protein, 34 aa, Artificial Sequence
  Cyclic GFR-binding peptide
  MOD_RES (29), (30): Xaa is C or S
VIMEYQKYIKPTKGIIFLISIPSLDQSVXXPSAS

SEQ ID NO: 49519 - protein, 37 aa, Artificial Sequence; identical to SEQ ID NO: 9282
  Cyclic GFR-binding peptide
  MOD_RES (31), (32): Xaa is C or S

SEQ ID NO: 49520 - protein, 31 aa, Artificial Sequence
  Cyclic GFR-binding peptide
  MOD_RES (1), (1): Xaa is C or S
XSRVVMNNSLQEIVNSSDDYYLVTLPELKTP

SEQ ID NO: 49521 - protein, 31 aa, Artificial Sequence
  Cyclic GFR-binding peptide
  MOD_RES (2), (4): Xaa is C or S
SXKXSKVVMEYQKYVKPTRGVIFLISIPSLD

SEQ ID NO: 49522 - protein, 36 aa, Artificial Sequence; identical to SEQ ID NO: 9283
  Cyclic GFR-binding peptide
  MOD_RES (32), (33): Xaa is C or S

SEQ ID NO: 49523 - protein, 30 aa, Artificial Sequence
  Cyclic GFR-binding peptide
  MOD_RES (2), (2): Xaa is C or S
KXSKVVMNSLQEVKPTRGVYYVIPLPELDQ

SEQ ID NO: 49524 - protein, 36 aa, Artificial Sequence; identical to SEQ ID NO: 9284
  Cyclic GFR-binding peptide
  MOD_RES (31), (32): Xaa is C or S

SEQ ID NO: 49525 - protein, 33 aa, Artificial Sequence; identical to SEQ ID NO: 9285
  Cyclic GFR-binding peptide
  MOD_RES (2), (2): Xaa is C or S

SEQ ID NO: 49526 - protein, 35 aa, Artificial Sequence
  Cyclic GFR-binding peptide
  MOD_RES (30), (31): Xaa is C or S
VVMDEYQKYVVKENEDIFLMSIPSLETPVXXAKPI

SEQ ID NO: 49527 - protein, 32 aa, Artificial Sequence
  Cyclic GFR-binding peptide
  MOD_RES (29), (30): Xaa is C or S
VMDNSLQEVVNNASDYYVIPLPELRTPVXXTP

SEQ ID NO: 49528 - protein, 29 aa, Artificial Sequence
  Cyclic GFR-binding peptide
  MOD_RES (26), (27): Xaa is C or S
NSLQEIVNSSDDYYLVTLPELKTPAXXPK

SEQ ID NO: 49529 - protein, 34 aa, Artificial Sequence; identical to SEQ ID NO: 9286
  Cyclic GFR-binding peptide
  MOD_RES (1), (33), (34): Xaa is C or S

SEQ ID NO: 49530 - protein, 27 aa, Artificial Sequence
  Cyclic GFR-binding peptide
  MOD_RES (27), (27): Xaa is C or S
EEYQKYVVKDYEDIFLMSIPSLETPVX

SEQ ID NO: 49531 - protein, 26 aa, Artificial Sequence
  Cyclic GFR-binding peptide
RVIMNSLQEVKPKRGVYYLITLPELA

SEQ ID NO: 49532 - protein, 37 aa, Artificial Sequence; identical to SEQ ID NO: 9287
  Cyclic GFR-binding peptide
  MOD_RES (2), (34): Xaa is C or S

SEQ ID NO: 49533 - protein, 35 aa, Artificial Sequence
  Cyclic GFR-binding peptide
  MOD_RES (30), (31): Xaa is C or S
VVMNEYQKYIVNSSDDIFLVSIPSLQTPAXXPKPV

SEQ ID NO: 49534 - protein, 37 aa, Artificial Sequence; identical to SEQ ID NO: 9289
  Cyclic GFR-binding peptide
  MOD_RES (32), (33): Xaa is C or S

SEQ ID NO: 49535 - protein, 26 aa, Artificial Sequence
  Cyclic GFR-binding peptide
MDNSLQEVVNNASDYYVIPLPELRTP

SEQ ID NO: 49536 - protein, 31 aa, Artificial Sequence
  Cyclic GFR-binding peptide
  MOD_RES (30), (31): Xaa is C or S
KVVMNSLQEVKPTRGVYYVIPLPELDQPVXX

SEQ ID NO: 49537 - protein, 29 aa, Artificial Sequence
  Cyclic GFR-binding peptide
  MOD_RES (1), (3): Xaa is C or S
XGXGEVVMENSLQEVVKDYEDYYVMPLPE

SEQ ID NO: 49538 - protein, 35 aa, Artificial Sequence; identical to SEQ ID NO: 9293
  Cyclic GFR-binding peptide
  MOD_RES (1), (3), (35): Xaa is C or S

SEQ ID NO: 49539 - protein, 29 aa, Artificial Sequence
  Cyclic GFR-binding peptide
SEVVMDQYNKLVVNNASDLYLISIASLRT

SEQ ID NO: 49540 - protein, 35 aa, Artificial Sequence; identical to SEQ ID NO: 9295
  Cyclic GFR-binding peptide
  MOD_RES (2), (4): Xaa is C or S

SEQ ID NO: 49541 - protein, 27 aa, Artificial Sequence
  Cyclic GFR-binding peptide
MDNSLQEVVNNASDYYVIPLPELRTPV

SEQ ID NO: 49542 - protein, 27 aa, Artificial Sequence
  Cyclic GFR-binding peptide
  MOD_RES (1), (1): Xaa is C or S
XSRVVMNNSLQEIVNSSDDYYVVPLPE

SEQ ID NO: 49543 - protein, 25 aa, Artificial Sequence
  Cyclic GFR-binding peptide
VMNEYQKYIVNSSDDIFLVSIPSLQ

SEQ ID NO: 49544 - protein, 39 aa, Artificial Sequence; identical to SEQ ID NO: 9302
  Cyclic GFR-binding peptide
  MOD_RES (1), (3), (34), (35): Xaa is C or S

SEQ ID NO: 49545 - protein, 33 aa, Artificial Sequence
  Cyclic GFR-binding peptide
  MOD_RES (1), (3): Xaa is C or S
XGXSRVVMNEYQKYIVNSSDDIFLVSIPSLKTP

SEQ ID NO: 49546 - protein, 30 aa, Artificial Sequence
  Cyclic GFR-binding peptide
  MOD_RES (28), (29): Xaa is C or S
VMEYQKYVKPTRGVIFLISIPSLDQPVXXP

SEQ ID NO: 49547 - protein, 33 aa, Artificial Sequence; identical to SEQ ID NO: 9304
  Cyclic GFR-binding peptide
  MOD_RES (31), (32): Xaa is C or S

SEQ ID NO: 49548 - protein, 31 aa, Artificial Sequence
  Cyclic GFR-binding peptide
  MOD_RES (29), (30): Xaa is C or S
VMDEYQKYVVKENEDIFLMSIPSLETPVXXA

SEQ ID NO: 49549 - protein, 32 aa, Artificial Sequence
  Cyclic GFR-binding peptide
  MOD_RES (2), (4): Xaa is C or S
HXGXSRVVMNEYQKYIVNSSDDIFLVSIPSLK

SEQ ID NO: 49550 - protein, 31 aa, Artificial Sequence
  Cyclic GFR-binding peptide
  MOD_RES (27), (28): Xaa is C or S
NEYQKYIVNSSDDIFLVSIPSLQTPAXXPKP

SEQ ID NO: 49551 - protein, 26 aa, Artificial Sequence
  Cyclic GFR-binding peptide
NEYQKYIVNSSDDIFLVSIPSLKTPA

SEQ ID NO: 49552 - protein, 32 aa, Artificial Sequence; identical to SEQ ID NO: 9312
  Cyclic GFR-binding peptide
  MOD_RES (31), (32): Xaa is C or S

SEQ ID NO: 49553 - protein, 29 aa, Artificial Sequence
  Cyclic GFR-binding peptide
  MOD_RES (26), (27): Xaa is C or S
EYQKYVKPKRGVIFLISIPSLAQPVXXPA

SEQ ID NO: 49554 - protein, 30 aa, Artificial Sequence
  Cyclic GFR-binding peptide
  MOD_RES (1), (3): Xaa is C or S
XKXSKVIMEYQKYIKPTKGIIFLISIPSLD

SEQ ID NO: 49555 - protein, 31 aa, Artificial Sequence
  Cyclic GFR-binding peptide
  MOD_RES (30), (31): Xaa is C or S
VVMEEYQKYVVKDYEDIFLMSIPSLETPVXX

SEQ ID NO: 49556 - protein, 34 aa, Artificial Sequence; identical to SEQ ID NO: 9316
  Cyclic GFR-binding peptide
  MOD_RES (31), (32): Xaa is C or S

SEQ ID NO: 49557 - protein, 32 aa, Artificial Sequence
  Cyclic GFR-binding peptide
  MOD_RES (27), (27): Xaa is C or S
NNSLQEIVNSSDDYYVVPLPELKTPAXTPKTV

SEQ ID NO: 49558 - protein, 25 aa, Artificial Sequence
  Cyclic GFR-binding peptide
SRVIMNSLQEVKPKRGVYYLITLPE

SEQ ID NO: 49559 - protein, 36 aa, Artificial Sequence; identical to SEQ ID NO: 9318
  Cyclic GFR-binding peptide
  MOD_RES (31), (32): Xaa is C or S

SEQ ID NO: 49560 - protein, 24 aa, Artificial Sequence
  Cyclic GFR-binding peptide
VIMEYQKYVKPKRGVIFLISIPSL

SEQ ID NO: 49561 - protein, 32 aa, Artificial Sequence; identical to SEQ ID NO: 9319
  Cyclic GFR-binding peptide
  MOD_RES (1), (32): Xaa is C or S

SEQ ID NO: 49562 - protein, 32 aa, Artificial Sequence
  Cyclic GFR-binding peptide
  MOD_RES (2), (4): Xaa is C or S
RXGXSEVVMDRYKKLVVNNASDFYLISIANLR

SEQ ID NO: 49563 - protein, 28 aa, Artificial Sequence
  Cyclic GFR-binding peptide
  MOD_RES (26), (27): Xaa is C or S
EYQKYVVKENEDIFLMSIPSLETPVXXA

SEQ ID NO: 49564 - protein, 37 aa, Artificial Sequence; identical to SEQ ID NO: 9321
  Cyclic GFR-binding peptide
  MOD_RES (31), (32): Xaa is C or S

SEQ ID NO: 49565 - protein, 31 aa, Artificial Sequence
  Cyclic GFR-binding peptide
  MOD_RES (26), (27): Xaa is C or S
EYQKYIVNSSDDIFLVSIPSLQTPAXXPKPV

SEQ ID NO: 49566 - protein, 33 aa, Artificial Sequence; identical to SEQ ID NO: 9322
  Cyclic GFR-binding peptide
  MOD_RES (32), (32): Xaa is C or S

SEQ ID NO: 49567 - protein, 32 aa, Artificial Sequence; identical to SEQ ID NO: 9323
  Cyclic GFR-binding peptide
  MOD_RES (1), (1): Xaa is C or S

SEQ ID NO: 49568 - protein, 35 aa, Artificial Sequence; identical to SEQ ID NO: 9324
  Cyclic GFR-binding peptide
  MOD_RES (2), (34): Xaa is C or S

SEQ ID NO: 49569 - protein, 32 aa, Artificial Sequence
  Cyclic GFR-binding peptide
  MOD_RES (28), (29): Xaa is C or S
MDEYQKYVVKENEDIFLMSIPSLETPVXXAKP

SEQ ID NO: 49570 - protein, 28 aa, Artificial Sequence
  Cyclic GFR-binding peptide
VMNNSLQEIVNSSDDYYVVPLPELQTPA

SEQ ID NO: 49571 - protein, 35 aa, Artificial Sequence; identical to SEQ ID NO: 9326
  Cyclic GFR-binding peptide
  MOD_RES (2), (4): Xaa is C or S

SEQ ID NO: 49572 - protein, 30 aa, Artificial Sequence
  Cyclic GFR-binding peptide
SRVVMNEYQKYIVNSSDDIFLVSIPSLKTP

SEQ ID NO: 49573 - protein, 26 aa, Artificial Sequence
  Cyclic GFR-binding peptide
DQYNKLVVNNASDLYLISIASLRTPV

SEQ ID NO: 49574 - protein, 29 aa, Artificial Sequence
  Cyclic GFR-binding peptide
  MOD_RES (1), (1): Xaa is C or S
XSRVIMEYQKYVKPKRGVIFLISIPSLAQ

SEQ ID NO: 49575 - protein, 37 aa, Artificial Sequence; identical to SEQ ID NO: 9332
  Cyclic GFR-binding peptide
  MOD_RES (1), (32), (33): Xaa is C or S

SEQ ID NO: 49576 - protein, 35 aa, Artificial Sequence; identical to SEQ ID NO: 9333
  Cyclic GFR-binding peptide
  MOD_RES (1), (3), (34), (35): Xaa is C or S

SEQ ID NO: 49577 - protein, 24 aa, Artificial Sequence
  Cyclic GFR-binding peptide
IMNSLQEVKPKRGVYYLITLPELA

SEQ ID NO: 49578 - protein, 30 aa, Artificial Sequence
  Cyclic GFR-binding peptide
  MOD_RES (26), (27): Xaa is C or S
NSLQEVVKDYEDYYVMPLPELETPVXXAKP

SEQ ID NO: 49579 - protein, 36 aa, Artificial Sequence; identical to SEQ ID NO: 9335
  Cyclic GFR-binding peptide
  MOD_RES (2), (4), (36): Xaa is C or S

SEQ ID NO: 49580 - protein, 31 aa, Artificial Sequence
  Cyclic GFR-binding peptide
  MOD_RES (2), (4): Xaa is C or S
SXKXSKVIMNSLQEIKPTKGIYYVIPLPELD

SEQ ID NO: 49581 - protein, 35 aa, Artificial Sequence; identical to SEQ ID NO: 9338
  Cyclic GFR-binding peptide
  MOD_RES (2), (34), (35): Xaa is C or S

SEQ ID NO: 49582 - protein, 31 aa, Artificial Sequence
  Cyclic GFR-binding peptide
  MOD_RES (1), (3): Xaa is C or S
XKXSKVVMNSLQEVKPTRGVYYVIPLPELDQ

SEQ ID NO: 49583 - protein, 39 aa, Artificial Sequence; identical to SEQ ID NO: 9340
  Cyclic GFR-binding peptide
  MOD_RES (1), (3), (34), (35): Xaa is C or S

SEQ ID NO: 49584 - protein, 34 aa, Artificial Sequence
  Cyclic GFR-binding peptide
  MOD_RES (28), (29): Xaa is C or S
IMNSLQEVKPKRGVYYLITLPELAQPVXXPAASA

SEQ ID NO: 49585 - protein, 29 aa, Artificial Sequence
  Cyclic GFR-binding peptide
  MOD_RES (28), (29): Xaa is C or S
MNNSLQEIVNSSDDYYLVTLPELKTPAXX

SEQ ID NO: 49586 - protein, 29 aa, Artificial Sequence
  Cyclic GFR-binding peptide
  MOD_RES (27), (28): Xaa is C or S
NNSLQEIVNSSDDYYVVPLPELQTPAXXP

SEQ ID NO: 49587 - protein, 24 aa, Artificial Sequence
  Cyclic GFR-binding peptide
NEYQKYIVNSSDDIFLVSIPSLKT

SEQ ID NO: 49588 - protein, 30 aa, Artificial Sequence; identical to SEQ ID NO: 2122
  Cyclic GFR-binding peptide

SEQ ID NO: 49589 - protein, 29 aa, Artificial Sequence
  Cyclic GFR-binding peptide
AAAAAAAAANSLQEVKPKRGVYYVIPLPE

SEQ ID NO: 49590 - protein, 31 aa, Artificial Sequence
  Cyclic GFR-binding peptide
  MOD_RES (27), (27): Xaa is C or S
NNSLQEIVNSSDDYYLVTLPELKTPAXTPKT

SEQ ID NO: 49591 - protein, 26 aa, Artificial Sequence
  Cyclic GFR-binding peptide
EVVMDNSLQEVVKENEDYYVMPLPEL

SEQ ID NO: 49592 - protein, 26 aa, Artificial Sequence
  Cyclic GFR-binding peptide
MEEYQKYVVKDYEDIFLMSIPSLETP

SEQ ID NO: 49593 - protein, 33 aa, Artificial Sequence
  Cyclic GFR-binding peptide
  MOD_RES (2), (4): Xaa is C or S
RXGXGEVVMDNSLQEVVKENEDYYLMTLPELET

SEQ ID NO: 49594 - protein, 23 aa, Artificial Sequence
  Cyclic GFR-binding peptide
MEEYQKYVVKDYEDIFLMSIPSL

SEQ ID NO: 49595 - protein, 33 aa, Artificial Sequence
  Cyclic GFR-binding peptide
  MOD_RES (1), (3): Xaa is C or S
XGXSEVVMDRYKKLVVNNASDFYLISIANLRTP

SEQ ID NO: 49596 - protein, 26 aa, Artificial Sequence
  Cyclic GFR-binding peptide
VVMEEYQKYVVKDYEDIFLMSIPSLE

SEQ ID NO: 49597 - protein, 23 aa, Artificial Sequence
  Cyclic GFR-binding peptide
MEYQKYVKPKRGVIFLISIPSLA

SEQ ID NO: 49598 - protein, 21 aa, Artificial Sequence
  Cyclic GFR-binding peptide
NSLQEVKPKRGVYYLITLPEL

SEQ ID NO: 49599 - protein, 32 aa, Artificial Sequence; identical to SEQ ID NO: 9343
  Cyclic GFR-binding peptide
  MOD_RES (32), (32): Xaa is C or S

SEQ ID NO: 49600 - protein, 41 aa, Artificial Sequence; identical to SEQ ID NO: 9345
  Cyclic GFR-binding peptide
  MOD_RES (2), (4), (36), (37): Xaa is C or S

SEQ ID NO: 49601 - protein, 28 aa, Artificial Sequence
  Cyclic GFR-binding peptide
  MOD_RES (28), (28): Xaa is C or S
MNEYQKYIVNSSDDIFLVSIPSLKTPAX

SEQ ID NO: 49602 - protein, 29 aa, Artificial Sequence
  Cyclic GFR-binding peptide
  MOD_RES (1), (1): Xaa is C or S
XSEVVMDNSLQEVVNNASDYYVIPLPELR

SEQ ID NO: 49603 - protein, 30 aa, Artificial Sequence
  Cyclic GFR-binding peptide
  MOD_RES (28), (29): Xaa is C or S
MEEYQKYVVKDYEDIFLMSIPSLETPVXXA

SEQ ID NO: 49604 - protein, 33 aa, Artificial Sequence; identical to SEQ ID NO: 9348
  Cyclic GFR-binding peptide
  MOD_RES (1), (33): Xaa is C or S

SEQ ID NO: 49605 - protein, 28 aa, Artificial Sequence
  Cyclic GFR-binding peptide
SRVVMNEYQKYIVNSSDDIFLVSIPSLK

SEQ ID NO: 49606 - protein, 32 aa, Artificial Sequence
  Cyclic GFR-binding peptide
  MOD_RES (28), (29): Xaa is C or S
MNNSLQEIVNSSDDYYVVPLPELKTPAXXPKP

SEQ ID NO: 49607 - protein, 39 aa, Artificial Sequence; identical to SEQ ID NO: 9351
  Cyclic GFR-binding peptide
  MOD_RES (2), (4), (36), (37): Xaa is C or S

SEQ ID NO: 49608 - protein, 24 aa, Artificial Sequence
  Cyclic GFR-binding peptide
RVIMNSLQEVKPKRGVYYLITLPE

SEQ ID NO: 49609 - protein, 27 aa, Artificial Sequence
  Cyclic GFR-binding peptide
  MOD_RES (26), (27): Xaa is C or S
EYQKYVKPKRGVIFLISIPSLAQPVXX

SEQ ID NO: 49610 - protein, 35 aa, Artificial Sequence; identical to SEQ ID NO: 9354
  Cyclic GFR-binding peptide
  MOD_RES (31), (31): Xaa is C or S

SEQ ID NO: 49611 - protein, 42 aa, Artificial Sequence; identical to SEQ ID NO: 9355
  Cyclic GFR-binding peptide
  MOD_RES (2), (4), (36), (37): Xaa is C or S

SEQ ID NO: 49612 - protein, 27 aa, Artificial Sequence
  Cyclic GFR-binding peptide
MENSLQEVVKDYEDYYLMTLPELETPV

SEQ ID NO: 49613 - protein, 31 aa, Artificial Sequence
  Cyclic GFR-binding peptide
  MOD_RES (27), (27): Xaa is C or S
NEYQKYIVNSSDDIFLVSIPSLKTPAXTPKT

SEQ ID NO: 49614 - protein, 42 aa, Artificial Sequence; identical to SEQ ID NO: 9356
  Cyclic GFR-binding peptide
  MOD_RES (2), (4), (36), (37): Xaa is C or S

SEQ ID NO: 49615 - protein, 29 aa, Artificial Sequence
  Cyclic GFR-binding peptide
  MOD_RES (2), (4): Xaa is C or S
SXKXSKVVMNSLQEVKPTRGVYYVIPLPE

SEQ ID NO: 49616 - protein, 36 aa, Artificial Sequence
  Cyclic GFR-binding peptide
  MOD_RES (30), (31): Xaa is C or S
VVMNNSLQEIVNSSDDYYLVTLPELKTPAXXPKPVY

SEQ ID NO: 49617 - protein, 23 aa, Artificial Sequence
  Cyclic GFR-binding peptide
NSLQEVKPTRGVYYVIPLPELDQ

SEQ ID NO: 49618 - protein, 34 aa, Artificial Sequence
  Cyclic GFR-binding peptide
  MOD_RES (30), (31): Xaa is C or S
KVVMEYQKYVKPTRGVIFLISIPSLDQPVXXPSA

SEQ ID NO: 49619 - protein, 30 aa, Artificial Sequence
  Cyclic GFR-binding peptide
  MOD_RES (29), (30): Xaa is C or S
VMDRYKKLVVNNASDFYLISIANLRTPVXX

SEQ ID NO: 49620 - protein, 31 aa, Artificial Sequence
  Cyclic GFR-binding peptide
  MOD_RES (2), (2): Xaa is C or S
GXARVVMNNSLQEIVNSSDDYYLVTLPELQT

SEQ ID NO: 49621 - protein, 28 aa, Artificial Sequence
  Cyclic GFR-binding peptide
EVVMENSLQEVVKDYEDYYVMPLPELET

SEQ ID NO: 49622 - protein, 38 aa, Artificial Sequence; identical to SEQ ID NO: 9359
  Cyclic GFR-binding peptide
  MOD_RES (2), (34), (35): Xaa is C or S

SEQ ID NO: 49623 - protein, 30 aa, Artificial Sequence
  Cyclic GFR-binding peptide
  MOD_RES (2), (4): Xaa is C or S
HXGXARVVMNNSLQEIVNSSDDYYLVTLPE

SEQ ID NO: 49624 - protein, 29 aa, Artificial Sequence
  Cyclic GFR-binding peptide
KVVMNSLQEVKPTRGVYYVIPLPELDQPV

SEQ ID NO: 49625 - protein, 28 aa, Artificial Sequence
  Cyclic GFR-binding peptide
  MOD_RES (2), (2): Xaa is C or S
GXSEVVMDNSLQEVVNNASDYYVIPLPE

SEQ ID NO: 49626 - protein, 35 aa, Artificial Sequence; identical to SEQ ID NO: 9360
  Cyclic GFR-binding peptide
  MOD_RES (1), (3), (35): Xaa is C or S

SEQ ID NO: 49627 - protein, 35 aa, Artificial Sequence; identical to SEQ ID NO: 9361
  Cyclic GFR-binding peptide
  MOD_RES (1), (33), (34): Xaa is C or S

SEQ ID NO: 49628 - protein, 38 aa, Artificial Sequence; identical to SEQ ID NO: 9362
  Cyclic GFR-binding peptide
  MOD_RES (1), (3), (35): Xaa is C or S

SEQ ID NO: 49629 - protein, 40 aa, Artificial Sequence; identical to SEQ ID NO: 9363
  Cyclic GFR-binding peptide
  MOD_RES (2), (34), (35): Xaa is C or S

SEQ ID NO: 49630 - protein, 34 aa, Artificial Sequence
  Cyclic GFR-binding peptide
  MOD_RES (29), (30): Xaa is C or S
VMNNSLQEIVNSSDDYYVVPLPELKTPAXXPKPV

SEQ ID NO: 49631 - protein, 27 aa, Artificial Sequence
  Cyclic GFR-binding peptide
VMDQYNKLVVNNASDLYLISIASLRTP

SEQ ID NO: 49632 - protein, 37 aa, Artificial Sequence; identical to SEQ ID NO: 9366
  Cyclic GFR-binding peptide
  MOD_RES (1), (33), (34): Xaa is C or S

SEQ ID NO: 49633 - protein, 27 aa, Artificial Sequence
  Cyclic GFR-binding peptide
VMDNSLQEVVKENEDYYLMTLPELETP

SEQ ID NO: 49634 - protein, 40 aa, Artificial Sequence; identical to SEQ ID NO: 9367
  Cyclic GFR-binding peptide
  MOD_RES (1), (3), (34), (35): Xaa is C or S

SEQ ID NO: 49635 - protein, 33 aa, Artificial Sequence
  Cyclic GFR-binding peptide
  MOD_RES (28), (29): Xaa is C or S
MDEYQKYVVKENEDIFLMSIPSLETPVXXAKPI

SEQ ID NO: 49636 - protein, 35 aa, Artificial Sequence; identical to SEQ ID NO: 9368
  Cyclic GFR-binding peptide
  MOD_RES (1), (3), (35): Xaa is C or S

SEQ ID NO: 49637 - protein, 32 aa, Artificial Sequence; identical to SEQ ID NO: 9369
  Cyclic GFR-binding peptide
  MOD_RES (31), (32): Xaa is C or S

SEQ ID NO: 49638 - protein, 31 aa, Artificial Sequence
  Cyclic GFR-binding peptide
  MOD_RES (26), (27): Xaa is C or S
NSLQEVKPTRGVYYVIPLPELDQPVXXPSAS

SEQ ID NO: 49639 - protein, 24 aa, Artificial Sequence
  Cyclic GFR-binding peptide
NSLQEIKPTKGIYYVIPLPELDQS

SEQ ID NO: 49640 - protein, 29 aa, Artificial Sequence
  Cyclic GFR-binding peptide
  MOD_RES (2), (2): Xaa is C or S
GXGEVVMENSLQEVVKDYEDYYLMTLPEL

SEQ ID NO: 49641 - protein, 29 aa, Artificial Sequence
  Cyclic GFR-binding peptide
  MOD_RES (1), (3): Xaa is C or S
XKXSKVVMEYQKYVKPTRGVIFLISIPSL

SEQ ID NO: 49642 - protein, 26 aa, Artificial Sequence
  Cyclic GFR-binding peptide
  MOD_RES (1), (1): Xaa is C or S
XSKVVMEYQKYVKPTRGVIFLISIPS

SEQ ID NO: 49643 - protein, 38 aa, Artificial Sequence; identical to SEQ ID NO: 9371
  Cyclic GFR-binding peptide
  MOD_RES (2), (33), (34): Xaa is C or S

SEQ ID NO: 49644 - protein, 25 aa, Artificial Sequence
  Cyclic GFR-binding peptide
EVVMENSLQEVVKDYEDYYVMPLPE

SEQ ID NO: 49645 - protein, 31 aa, Artificial Sequence
  Cyclic GFR-binding peptide
  MOD_RES (28), (29): Xaa is C or S
MENSLQEVVKDYEDYYLMTLPELETPVXXAK

SEQ ID NO: 49646 - protein, 33 aa, Artificial Sequence
  Cyclic GFR-binding peptide
  MOD_RES (29), (30): Xaa is C or S
VMDRYKKLVVNNASDFYLISIANLRTPVXXTPP

SEQ ID NO: 49647 - protein, 29 aa, Artificial Sequence
  Cyclic GFR-binding peptide
  MOD_RES (1), (3): Xaa is C or S
XGXGEVVMDNSLQEVVKENEDYYLMTLPE

SEQ ID NO: 49648 - protein, 25 aa, Artificial Sequence
  Cyclic GFR-binding peptide
EVVMDNSLQEVVNNASDYYLITLPE

SEQ ID NO: 49649 - protein, 35 aa, Artificial Sequence; identical to SEQ ID NO: 9373
  Cyclic GFR-binding peptide
  MOD_RES (1), (3), (35): Xaa is C or S

SEQ ID NO: 49650 - protein, 21 aa, Artificial Sequence
  Cyclic GFR-binding peptide
MNSLQEIKPTKGIYYVIPLPE

SEQ ID NO: 49651 - protein, 26 aa, Artificial Sequence
  Cyclic GFR-binding peptide
  MOD_RES (26), (26): Xaa is C or S
NSLQEVVKDYEDYYVMPLPELETPVX

SEQ ID NO: 49652 - protein, 26 aa, Artificial Sequence
  Cyclic GFR-binding peptide
VMDEYQKYVVKENEDIFLMSIPSLET

SEQ ID NO: 49653 - protein, 24 aa, Artificial Sequence
  Cyclic GFR-binding peptide
VVMEEYQKYVVKDYEDIFLMSIPS

SEQ ID NO: 49654 - protein, 31 aa, Artificial Sequence; identical to SEQ ID NO: 9378
  Cyclic GFR-binding peptide
  MOD_RES (1), (1): Xaa is C or S

SEQ ID NO: 49655 - protein, 24 aa, Artificial Sequence
  Cyclic GFR-binding peptide
KVIMNSLQEIKPTKGIYYVIPLPE

SEQ ID NO: 49656 - protein, 33 aa, Artificial Sequence
  Cyclic GFR-binding peptide
  MOD_RES (30), (31): Xaa is C or S
VVMEEYQKYVVKDYEDIFLMSIPSLETPVXXAK

SEQ ID NO: 49657 - protein, 23 aa, Artificial Sequence
  Cyclic GFR-binding peptide
NSLQEVKPKRGVYYLITLPELAQ

SEQ ID NO: 49658 - protein, 22 aa, Artificial Sequence
  Cyclic GFR-binding peptide
EYQKYVKPKRGVIFLISIPSLA

SEQ ID NO: 49659 - protein, 37 aa, Artificial Sequence; identical to SEQ ID NO: 9380
  Cyclic GFR-binding peptide
  MOD_RES (32), (33): Xaa is C or S

SEQ ID NO: 49660 - protein, 27 aa, Artificial Sequence
  Cyclic GFR-binding peptide
  MOD_RES (27), (27): Xaa is C or S
NEYQKYIVNSSDDIFLVSIPSLKTPAX

SEQ ID NO: 49661 - protein, 33 aa, Artificial Sequence
  Cyclic GFR-binding peptide
  MOD_RES (30), (31): Xaa is C or S
RVIMNSLQEVKPKRGVYYLITLPELAQPVXXPA

SEQ ID NO: 49662 - protein, 24 aa, Artificial Sequence
  Cyclic GFR-binding peptide
MDRYKKLVVNNASDFYLISIANLR

SEQ ID NO: 49663 - protein, 36 aa, Artificial Sequence; identical to SEQ ID NO: 9382
  Cyclic GFR-binding peptide
  MOD_RES (2), (34), (35): Xaa is C or S

SEQ ID NO: 49664 - protein, 37 aa, Artificial Sequence; identical to SEQ ID NO: 9383
  Cyclic GFR-binding peptide
  MOD_RES (2), (33), (34): Xaa is C or S

SEQ ID NO: 49665 - protein, 31 aa, Artificial Sequence
  Cyclic GFR-binding peptide
  MOD_RES (30), (31): Xaa is C or S
RVIMNSLQEVKPKRGVYYLITLPELAQPVXX

SEQ ID NO: 49666 - protein, 24 aa, Artificial Sequence
  Cyclic GFR-binding peptide
VMDNSLQEVVNNASDYYVIPLPEL

SEQ ID NO: 49667 - protein, 24 aa, Artificial Sequence
  Cyclic GFR-binding peptide
VMENSLQEVVKDYEDYYVMPLPEL

SEQ ID NO: 49668 - protein, 24 aa, Artificial Sequence
  Cyclic GFR-binding peptide
NNSLQEIVNSSDDYYVVPLPELKT

SEQ ID NO: 49669 - protein, 34 aa, Artificial Sequence
  Cyclic GFR-binding peptide
  MOD_RES (30), (31): Xaa is C or S
VVMNNSLQEIVNSSDDYYVVPLPELQTPAXXPKP

SEQ ID NO: 49670 - protein, 34 aa, Artificial Sequence; identical to SEQ ID NO: 9386
  Cyclic GFR-binding peptide
  MOD_RES (31), (32): Xaa is C or S

SEQ ID NO: 49671 - protein, 37 aa, Artificial Sequence; identical to SEQ ID NO: 9388
  Cyclic GFR-binding peptide
  MOD_RES (1), (33), (34): Xaa is C or S

SEQ ID NO: 49672 - protein, 31 aa, Artificial Sequence
  Cyclic GFR-binding peptide
  MOD_RES (26), (27): Xaa is C or S
NSLQEVVKDYEDYYVMPLPELETPVXXAKPI

SEQ ID NO: 49673 - protein, 27 aa, Artificial Sequence
  Cyclic GFR-binding peptide
  MOD_RES (27), (27): Xaa is C or S
NNSLQEIVNSSDDYYVVPLPELKTPAX

SEQ ID NO: 49674 - protein, 31 aa, Artificial Sequence
  Cyclic GFR-binding peptide
  MOD_RES (2), (4): Xaa is C or S
SXKXSKVIMEYQKYIKPTKGIIFLISIPSLD

SEQ ID NO: 49675 - protein, 36 aa, Artificial Sequence; identical to SEQ ID NO: 9391
  Cyclic GFR-binding peptide
  MOD_RES (1), (33), (34): Xaa is C or S

SEQ ID NO: 49676 - protein, 39 aa, Artificial Sequence; identical to SEQ ID NO: 9392
  Cyclic GFR-binding peptide
  MOD_RES (1), (33), (34): Xaa is C or S

SEQ ID NO: 49677 - protein, 29 aa, Artificial Sequence
  Cyclic GFR-binding peptide
  MOD_RES (2), (2): Xaa is C or S
GXSRVVMNNSLQEIVNSSDDYYLVTLPEL

SEQ ID NO: 49678 - protein, 25 aa, Artificial Sequence
  Cyclic GFR-binding peptide
EVVMDNSLQEVVKENEDYYLMTLPE

SEQ ID NO: 49679 - protein, 25 aa, Artificial Sequence
  Cyclic GFR-binding peptide
RVVMNNSLQEIVNSSDDYYLVTLPE

SEQ ID NO: 49680 - protein, 22 aa, Artificial Sequence
  Cyclic GFR-binding peptide
VMEYQKYVKPTRGVIFLISIPS

SEQ ID NO: 49681 - protein, 31 aa, Artificial Sequence
  Cyclic GFR-binding peptide
  MOD_RES (2), (4): Xaa is C or S
RXGXSEVVMDNSLQEVVNNASDYYLITLPEL

SEQ ID NO: 49682 - protein, 35 aa, Artificial Sequence
  Cyclic GFR-binding peptide
  MOD_RES (29), (30): Xaa is C or S
VMNNSLQEIVNSSDDYYVVPLPELQTPAXXPKPVT

SEQ ID NO: 49683 - protein, 32 aa, Artificial Sequence
  Cyclic GFR-binding peptide
  MOD_RES (27), (27): Xaa is C or S
NNSLQEIVNSSDDYYLVTLPELKTPAXTPKTV

SEQ ID NO: 49684 - protein, 25 aa, Artificial Sequence
  Cyclic GFR-binding peptide
EYQKYIVNSSDDIFLVSIPSLQTPA

SEQ ID NO: 49685 - protein, 39 aa, Artificial Sequence; identical to SEQ ID NO: 9395
  Cyclic GFR-binding peptide
  MOD_RES (2), (34), (35): Xaa is C or S

SEQ ID NO: 49686 - protein, 32 aa, Artificial Sequence
  Cyclic GFR-binding peptide
  MOD_RES (30), (31): Xaa is C or S
VVMNNSLQEIVNSSDDYYLVTLPELKTPAXXP

SEQ ID NO: 49687 - protein, 30 aa, Artificial Sequence
  Cyclic GFR-binding peptide
  MOD_RES (30), (30): Xaa is C or S
VVMDNSLQEVVNNASDYYVIPLPELRTPVX

SEQ ID NO: 49688 - protein, 31 aa, Artificial Sequence
  Cyclic GFR-binding peptide
  MOD_RES (29), (30): Xaa is C or S
VMNEYQKYIVNSSDDIFLVSIPSLKTPAXXP

SEQ ID NO: 49689 - protein, 29 aa, Artificial Sequence
  Cyclic GFR-binding peptide
  MOD_RES (27), (28): Xaa is C or S
NEYQKYIVNSSDDIFLVSIPSLQTPAXXP

SEQ ID NO: 49690 - protein, 37 aa, Artificial Sequence; identical to SEQ ID NO: 9398
  Cyclic GFR-binding peptide
  MOD_RES (2), (4), (36), (37): Xaa is C or S

SEQ ID NO: 49691 - protein, 40 aa, Artificial Sequence; identical to SEQ ID NO: 9399
  Cyclic GFR-binding peptide
  MOD_RES (1), (3), (35), (36): Xaa is C or S

SEQ ID NO: 49692 - protein, 32 aa, Artificial Sequence
  Cyclic GFR-binding peptide
  MOD_RES (2), (4): Xaa is C or S
RXGXGEVVMEEYQKYVVKDYEDIFLMSIPSLE

SEQ ID NO: 49693 - protein, 30 aa, Artificial Sequence
  Cyclic GFR-binding peptide
  MOD_RES (2), (4): Xaa is C or S
SXKXSRVIMNSLQEVKPKRGVYYLITLPEL

SEQ ID NO: 49694 - protein, 34 aa, Artificial Sequence
  Cyclic GFR-binding peptide
  MOD_RES (28), (29): Xaa is C or S
MEEYQKYVVKDYEDIFLMSIPSLETPVXXAKPIS

SEQ ID NO: 49695 - protein, 34 aa, Artificial Sequence
  Cyclic GFR-binding peptide
  MOD_RES (2), (4): Xaa is C or S
RXGXGEVVMDNSLQEVVKENEDYYVMPLPELETP

SEQ ID NO: 49696 - protein, 34 aa, Artificial Sequence
  Cyclic GFR-binding peptide
  MOD_RES (29), (29): Xaa is C or S
VMNNSLQEIVNSSDDYYVVPLPELKTPAXTPKTV

SEQ ID NO: 49697 - protein, 31 aa, Artificial Sequence
  Cyclic GFR-binding peptide
  MOD_RES (2), (4): Xaa is C or S
SXKXSRVIMNSLQEVKPKRGVYYLITLPELA

SEQ ID NO: 49698 - protein, 35 aa, Artificial Sequence; identical to SEQ ID NO: 9401
  Cyclic GFR-binding peptide
  MOD_RES (1), (3), (35): Xaa is C or S

SEQ ID NO: 49699 - protein, 36 aa, Artificial Sequence; identical to SEQ ID NO: 9404
  Cyclic GFR-binding peptide
  MOD_RES (31), (32): Xaa is C or S

SEQ ID NO: 49700 - protein, 33 aa, Artificial Sequence
  Cyclic GFR-binding peptide
  MOD_RES (29), (30): Xaa is C or S
VMENSLQEVVKDYEDYYVMPLPELETPVXXAKP

SEQ ID NO: 49701 - protein, 25 aa, Artificial Sequence
  Cyclic GFR-binding peptide
NSLQEVVNNASDYYVIPLPELRTPV

SEQ ID NO: 49702 - protein, 41 aa, Artificial Sequence; identical to SEQ ID NO: 9405
  Cyclic GFR-binding peptide
  MOD_RES (2), (4), (36), (37): Xaa is C or S

SEQ ID NO: 49703 - protein, 22 aa, Artificial Sequence
  Cyclic GFR-binding peptide
MDNSLQEVVKENEDYYLMTLPE

SEQ ID NO: 49704 - protein, 40 aa, Artificial Sequence; identical to SEQ ID NO: 9406
  Cyclic GFR-binding peptide
  MOD_RES (1), (3), (34), (35): Xaa is C or S

SEQ ID NO: 49705 - protein, 40 aa, Artificial Sequence; identical to SEQ ID NO: 9410
  Cyclic GFR-binding peptide
  MOD_RES (1), (3), (34), (35): Xaa is C or S

SEQ ID NO: 49706 - protein, 25 aa, Artificial Sequence
  Cyclic GFR-binding peptide
VMDRYKKLVVNNASDFYLISIANLR

SEQ ID NO: 49707 - protein, 30 aa, Artificial Sequence
  Cyclic GFR-binding peptide
  MOD_RES (30), (30): Xaa is C or S
KVIMEYQKYIKPTKGIIFLISIPSLDQSVX

SEQ ID NO: 49708 - protein, 35 aa, Artificial Sequence; identical to SEQ ID NO: 9413
  Cyclic GFR-binding peptide
  MOD_RES (32), (33): Xaa is C or S

SEQ ID NO: 49709 - protein, 35 aa, Artificial Sequence; identical to SEQ ID NO: 9415
  Cyclic GFR-binding peptide
  MOD_RES (2), (4), (35): Xaa is C or S

SEQ ID NO: 49710 - protein, 22 aa, Artificial Sequence
  Cyclic GFR-binding peptide
MNSLQEVKPKRGVYYLITLPEL

SEQ ID NO: 49711 - protein, 33 aa, Artificial Sequence; identical to SEQ ID NO: 9417
  Cyclic GFR-binding peptide
  MOD_RES (1), (3): Xaa is C or S

SEQ ID NO: 49712 - protein, 35 aa, Artificial Sequence; identical to SEQ ID NO: 9418
  Cyclic GFR-binding peptide
  MOD_RES (31), (32): Xaa is C or S

SEQ ID NO: 49713 - protein, 32 aa, Artificial Sequence
  Cyclic GFR-binding peptide
  MOD_RES (30), (30): Xaa is C or S
VVMNEYQKYIVNSSDDIFLVSIPSLKTPAXTP

SEQ ID NO: 49714 - protein, 32 aa, Artificial Sequence
  Cyclic GFR-binding peptide
  MOD_RES (2), (2): Xaa is C or S
GXGEVVMDEYQKYVVKENEDIFLMSIPSLETP

SEQ ID NO: 49715 - protein, 21 aa, Artificial Sequence
  Cyclic GFR-binding peptide
MEYQKYIKPTKGIIFLISIPS

SEQ ID NO: 49716 - protein, 29 aa, Artificial Sequence
  Cyclic GFR-binding peptide
AAAAAAAAANSLQEVVNNASDYYVIPLPE

SEQ ID NO: 49717 - protein, 23 aa, Artificial Sequence
  Cyclic GFR-binding peptide
VMEEYQKYVVKDYEDIFLMSIPS

SEQ ID NO: 49718 - protein, 35 aa, Artificial Sequence; identical to SEQ ID NO: 9422
  Cyclic GFR-binding peptide
  MOD_RES (2), (4): Xaa is C or S

SEQ ID NO: 49719 - protein, 24 aa, Artificial Sequence
  Cyclic GFR-binding peptide
EYQKYVKPKRGVIFLISIPSLAQP

SEQ ID NO: 49720 - protein, 32 aa, Artificial Sequence
  Cyclic GFR-binding peptide
  MOD_RES (28), (29): Xaa is C or S
VMEYQKYVKPTRGVIFLISIPSLDQPVXXPSA

SEQ ID NO: 49721 - protein, 29 aa, Artificial Sequence
  Cyclic GFR-binding peptide
  MOD_RES (1), (3): Xaa is C or S
XGXSRVVMNEYQKYIVNSSDDIFLVSIPS

SEQ ID NO: 49722 - protein, 24 aa, Artificial Sequence
  Cyclic GFR-binding peptide
EYQKYIKPTKGIIFLISIPSLDQS

SEQ ID NO: 49723 - protein, 28 aa, Artificial Sequence
  Cyclic GFR-binding peptide
VMNNSLQEIVNSSDDYYLVTLPELKTPA

SEQ ID NO: 49724 - protein, 33 aa, Artificial Sequence
  Cyclic GFR-binding peptide
  MOD_RES (28), (29): Xaa is C or S
MNEYQKYIVNSSDDIFLVSIPSLKTPAXXPKPV

SEQ ID NO: 49725 - protein, 29 aa, Artificial Sequence
  Cyclic GFR-binding peptide
  MOD_RES (2), (2): Xaa is C or S
KXSKVIMEYQKYIKPTKGIIFLISIPSLD

SEQ ID NO: 49726 - protein, 36 aa, Artificial Sequence; identical to SEQ ID NO: 9424
  Cyclic GFR-binding peptide
  MOD_RES (1), (32), (33): Xaa is C or S

SEQ ID NO: 49727 - protein, 23 aa, Artificial Sequence
  Cyclic GFR-binding peptide
NSLQEVVKDYEDYYLMTLPELET

SEQ ID NO: 49728 - protein, 29 aa, Artificial Sequence
  Cyclic GFR-binding peptide
  MOD_RES (29), (29): Xaa is C or S
VMDNSLQEVVNNASDYYLITLPELRTPVX

SEQ ID NO: 49729 - protein, 33 aa, Artificial Sequence
  Cyclic GFR-binding peptide
  MOD_RES (2), (4): Xaa is C or S
HXGXARVVMNNSLQEIVNSSDDYYVVPLPELQT

SEQ ID NO: 49730 - protein, 27 aa, Artificial Sequence
  Cyclic GFR-binding peptide
SEVVMDRYKKLVVNNASDFYLISIANL

SEQ ID NO: 49731 - protein, 27 aa, Artificial Sequence
  Cyclic GFR-binding peptide
  MOD_RES (27), (27): Xaa is C or S
DQYNKLVVNNASDLYLISIASLRTPVX

SEQ ID NO: 49732 - protein, 30 aa, Artificial Sequence
  Cyclic GFR-binding peptide
  MOD_RES (27), (28): Xaa is C or S
ENSLQEVVKDYEDYYVMPLPELETPVXXAK

SEQ ID NO: 49733 - protein, 38 aa, Artificial Sequence; identical to SEQ ID NO: 9428
  Cyclic GFR-binding peptide
  MOD_RES (2), (34), (35): Xaa is C or S

SEQ ID NO: 49734 - protein, 34 aa, Artificial Sequence
  Cyclic GFR-binding peptide
  MOD_RES (30), (31): Xaa is C or S
VVMENSLQEVVKDYEDYYLMTLPELETPVXXAKP

SEQ ID NO: 49735 - protein, 39 aa, Artificial Sequence; identical to SEQ ID NO: 9432
  Cyclic GFR-binding peptide
  MOD_RES (1), (33): Xaa is C or S

SEQ ID NO: 49736 - protein, 26 aa, Artificial Sequence
  Cyclic GFR-binding peptide
  MOD_RES (26), (26): Xaa is C or S
NSLQEIVNSSDDYYVVPLPELKTPAX

SEQ ID NO: 49737 - protein, 36 aa, Artificial Sequence; identical to SEQ ID NO: 9434
  Cyclic GFR-binding peptide
  MOD_RES (2), (4), (36): Xaa is C or S

SEQ ID NO: 49738 - protein, 42 aa, Artificial Sequence; identical to SEQ ID NO: 9435
  Cyclic GFR-binding peptide
  MOD_RES (2), (4), (36), (37): Xaa is C or S

SEQ ID NO: 49739 - protein, 39 aa, Artificial Sequence; identical to SEQ ID NO: 9436
  Cyclic GFR-binding peptide
  MOD_RES (2), (4), (35), (36): Xaa is C or S

SEQ ID NO: 49740 - protein, 31 aa, Artificial Sequence
  Cyclic GFR-binding peptide
  MOD_RES (1), (1): Xaa is C or S
XARVVMNNSLQEIVNSSDDYYLVTLPELQTP

SEQ ID NO: 49741 - protein, 30 aa, Artificial Sequence
  Cyclic GFR-binding peptide
  MOD_RES (1), (1): Xaa is C or S
XGEVVMDEYQKYVVKENEDIFLMSIPSLET

SEQ ID NO: 49742 - protein, 22 aa, Artificial Sequence
  Cyclic GFR-binding peptide
NSLQEIVNSSDDYYVVPLPELK

SEQ ID NO: 49743 - protein, 30 aa, Artificial Sequence
  Cyclic GFR-binding peptide
  MOD_RES (2), (4): Xaa is C or S
RXGXSEVVMDQYNKLVVNNASDLYLISIAS

SEQ ID NO: 49744 - protein, 32 aa, Artificial Sequence
  Cyclic GFR-binding peptide
  MOD_RES (27), (28): Xaa is C or S
DNSLQEVVKENEDYYVMPLPELETPVXXAKPI

SEQ ID NO: 49745 - protein, 38 aa, Artificial Sequence; identical to SEQ ID NO: 9439
  Cyclic GFR-binding peptide
  MOD_RES (1), (33), (34): Xaa is C or S

SEQ ID NO: 49746 - protein, 33 aa, Artificial Sequence; identical to SEQ ID NO: 9441
  Cyclic GFR-binding peptide
  MOD_RES (32), (33): Xaa is C or S

SEQ ID NO: 49747 - protein, 28 aa, Artificial Sequence
  Cyclic GFR-binding peptide
  MOD_RES (1), (1): Xaa is C or S
XSKVVMNSLQEVKPTRGVYYVIPLPELD

SEQ ID NO: 49748 - protein, 37 aa, Artificial Sequence; identical to SEQ ID NO: 9442
  Cyclic GFR-binding peptide
  MOD_RES (1), (3), (35), (36): Xaa is C or S

SEQ ID NO: 49749 - protein, 32 aa, Artificial Sequence; identical to SEQ ID NO: 9443
  Cyclic GFR-binding peptide
  MOD_RES (32), (32): Xaa is C or S

SEQ ID NO: 49750 - protein, 31 aa, Artificial Sequence
  Cyclic GFR-binding peptide
  MOD_RES (27), (28): Xaa is C or S
MNSLQEIKPTKGIYYVIPLPELDQSVXXPSA

SEQ ID NO: 49751 - protein, 37 aa, Artificial Sequence; identical to SEQ ID NO: 9444
  Cyclic GFR-binding peptide
  MOD_RES (32), (33): Xaa is C or S

SEQ ID NO: 49752 - protein, 35 aa, Artificial Sequence; identical to SEQ ID NO: 9447
  Cyclic GFR-binding peptide
  MOD_RES (2), (34), (35): Xaa is C or S

SEQ ID NO: 49753 - protein, 37 aa, Artificial Sequence; identical to SEQ ID NO: 9448
  Cyclic GFR-binding peptide
  MOD_RES (1), (33), (34): Xaa is C or S

SEQ ID NO: 49754 - protein, 39 aa, Artificial Sequence; identical to SEQ ID NO: 9449
  Cyclic GFR-binding peptide
  MOD_RES (1), (33), (34): Xaa is C or S

SEQ ID NO: 49755 - protein, 36 aa, Artificial Sequence; identical to SEQ ID NO: 9450
  Cyclic GFR-binding peptide
  MOD_RES (1), (3), (34), (35): Xaa is C or S

SEQ ID NO: 49756 - protein, 29 aa, Artificial Sequence
  Cyclic GFR-binding peptide
  MOD_RES (27), (28): Xaa is C or S
ENSLQEVVKDYEDYYVMPLPELETPVXXA

SEQ ID NO: 49757 - protein, 32 aa, Artificial Sequence
  Cyclic GFR-binding peptide
  MOD_RES (26), (27): Xaa is C or S
NSLQEVKPKRGVYYLITLPELAQPVXXPAASA

SEQ ID NO: 49758 - protein, 31 aa, Artificial Sequence
  Cyclic GFR-binding peptide
  MOD_RES (1), (3): Xaa is C or S
XGXGEVVMDEYQKYVVKENEDIFLMSIPSLE

SEQ ID NO: 49759 - protein, 30 aa, Artificial Sequence
  Cyclic GFR-binding peptide
  MOD_RES (2), (2): Xaa is C or S
GXARVVMNNSLQEIVNSSDDYYLVTLPELQ

SEQ ID NO: 49760 - protein, 31 aa, Artificial Sequence
  Cyclic GFR-binding peptide
  MOD_RES (29), (30): Xaa is C or S
VMEEYQKYVVKDYEDIFLMSIPSLETPVXXA

SEQ ID NO: 49761 - protein, 31 aa, Artificial Sequence
  Cyclic GFR-binding peptide
  MOD_RES (1), (3): Xaa is C or S
XGXSRVVMNNSLQEIVNSSDDYYVVPLPELK

SEQ ID NO: 49762 - protein, 30 aa, Artificial Sequence; identical to SEQ ID NO: 9453
  Cyclic GFR-binding peptide

SEQ ID NO: 49763 - protein, 38 aa, Artificial Sequence; identical to SEQ ID NO: 9454
  Cyclic GFR-binding peptide
  MOD_RES (2), (34), (35): Xaa is C or S

SEQ ID NO: 49764 - protein, 34 aa, Artificial Sequence
  Cyclic GFR-binding peptide
  MOD_RES (28), (29): Xaa is C or S
MDQYNKLVVNNASDLYLISIASLRTPVXXTPPTS

SEQ ID NO: 49765 - protein, 33 aa, Artificial Sequence
  Cyclic GFR-binding peptide
  MOD_RES (30), (31): Xaa is C or S
VVMDRYKKLVVNNASDFYLISIANLRTPVXXTP

SEQ ID NO: 49766 - protein, 28 aa, Artificial Sequence
  Cyclic GFR-binding peptide
  MOD_RES (27), (28): Xaa is C or S
MNSLQEVKPTRGVYYVIPLPELDQPVXX

SEQ ID NO: 49767 - protein, 29 aa, Artificial Sequence
  Cyclic GFR-binding peptide
  MOD_RES (1), (1): Xaa is C or S
XSEVVMDRYKKLVVNNASDFYLISIANLR

SEQ ID NO: 49768 - protein, 35 aa, Artificial Sequence
  Cyclic GFR-binding peptide
  MOD_RES (29), (29): Xaa is C or S
VMNNSLQEIVNSSDDYYLVTLPELKTPAXTPKTVH

SEQ ID NO: 49769 - protein, 20 aa, Artificial Sequence
  Cyclic GFR-binding peptide
EYQKYVVKENEDIFLMSIPS

SEQ ID NO: 49770 - protein, 32 aa, Artificial Sequence
  Cyclic GFR-binding peptide
  MOD_RES (28), (28): Xaa is C or S
MNEYQKYIVNSSDDIFLVSIPSLKTPAXTPKT

SEQ ID NO: 49771 - protein, 37 aa, Artificial Sequence; identical to SEQ ID NO: 9456
  Cyclic GFR-binding peptide
  MOD_RES (2), (34), (35): Xaa is C or S

SEQ ID NO: 49772 - protein, 31 aa, Artificial Sequence
  Cyclic GFR-binding peptide
  MOD_RES (1), (3): Xaa is C or S
XGXGEVVMDNSLQEVVKENEDYYLMTLPELE

SEQ ID NO: 49773 - protein, 33 aa, Artificial Sequence; identical to SEQ ID NO: 9457
  Cyclic GFR-binding peptide
  MOD_RES (31), (31): Xaa is C or S

SEQ ID NO: 49774 - protein, 30 aa, Artificial Sequence
  Cyclic GFR-binding peptide
  MOD_RES (28), (29): Xaa is C or S
MDQYNKLVVNNASDLYLISIASLRTPVXXT

SEQ ID NO: 49775 - protein, 33 aa, Artificial Sequence
  Cyclic GFR-binding peptide
  MOD_RES (29), (30): Xaa is C or S
VVMEYQKYVKPTRGVIFLISIPSLDQPVXXPSA

SEQ ID NO: 49776 - protein, 25 aa, Artificial Sequence
  Cyclic GFR-binding peptide
VVMDEYQKYVVKENEDIFLMSIPSL

SEQ ID NO: 49777 - protein, 41 aa, Artificial Sequence; identical to SEQ ID NO: 9458
  Cyclic GFR-binding peptide
  MOD_RES (1), (3), (35), (36): Xaa is C or S

SEQ ID NO: 49778 - protein, 24 aa, Artificial Sequence
  Cyclic GFR-binding peptide
NSLQEIVNSSDDYYLVTLPELQTP

SEQ ID NO: 49779 - protein, 29 aa, Artificial Sequence
  Cyclic GFR-binding peptide
  MOD_RES (28), (29): Xaa is C or S
MNNSLQEIVNSSDDYYVVPLPELQTPAXX

SEQ ID NO: 49780 - protein, 21 aa, Artificial Sequence
  Cyclic GFR-binding peptide
QYNKLVVNNASDLYLISIASL

SEQ ID NO: 49781 - protein, 33 aa, Artificial Sequence
  Cyclic GFR-binding peptide
  MOD_RES (27), (28): Xaa is C or S
NNSLQEIVNSSDDYYLVTLPELQTPAXXPKPVT

SEQ ID NO: 49782 - protein, 27 aa, Artificial Sequence
  Cyclic GFR-binding peptide
MNNSLQEIVNSSDDYYLVTLPELKTPA

SEQ ID NO: 49783 - protein, 22 aa, Artificial Sequence
  Cyclic GFR-binding peptide
MDEYQKYVVKENEDIFLMSIPS

SEQ ID NO: 49784 - protein, 33 aa, Artificial Sequence
  Cyclic GFR-binding peptide
  MOD_RES (27), (27): Xaa is C or S
NNSLQEIVNSSDDYYLVTLPELKTPAXTPKTVH

SEQ ID NO: 49785 - protein, 40 aa, Artificial Sequence; identical to SEQ ID NO: 9462
  Cyclic GFR-binding peptide
  MOD_RES (2), (34), (35): Xaa is C or S

SEQ ID NO: 49786 - protein, 32 aa, Artificial Sequence; identical to SEQ ID NO: 9463
  Cyclic GFR-binding peptide
  MOD_RES (2), (2): Xaa is C or S

SEQ ID NO: 49787 - protein, 34 aa, Artificial Sequence
  Cyclic GFR-binding peptide
  MOD_RES (28), (29): Xaa is C or S
MNNSLQEIVNSSDDYYLVTLPELQTPAXXPKPVT

SEQ ID NO: 49788 - protein, 38 aa, Artificial Sequence; identical to SEQ ID NO: 9464
  Cyclic GFR-binding peptide
  MOD_RES (32), (33): Xaa is C or S

SEQ ID NO: 49789 - protein, 25 aa, Artificial Sequence
  Cyclic GFR-binding peptide
MENSLQEVVKDYEDYYLMTLPELET

SEQ ID NO: 49790 - protein, 28 aa, Artificial Sequence
  Cyclic GFR-binding peptide
  MOD_RES (28), (28): Xaa is C or S
MNNSLQEIVNSSDDYYVVPLPELKTPAX

SEQ ID NO: 49791 - protein, 34 aa, Artificial Sequence; identical to SEQ ID NO: 9465
  Cyclic GFR-binding peptide
  MOD_RES (1), (3), (34): Xaa is C or S

SEQ ID NO: 49792 - protein, 35 aa, Artificial Sequence; identical to SEQ ID NO: 9466
  Cyclic GFR-binding peptide
  MOD_RES (32), (32): Xaa is C or S

SEQ ID NO: 49793 - protein, 35 aa, Artificial Sequence; identical to SEQ ID NO: 9467
  Cyclic GFR-binding peptide
  MOD_RES (31), (32): Xaa is C or S

SEQ ID NO: 49794 - protein, 24 aa, Artificial Sequence
  Cyclic GFR-binding peptide
DNSLQEVVNNASDYYLITLPELRT

SEQ ID NO: 49795 - protein, 21 aa, Artificial Sequence
  Cyclic GFR-binding peptide
MEYQKYVKPTRGVIFLISIPS

SEQ ID NO: 49796 - protein, 31 aa, Artificial Sequence; identical to SEQ ID NO: 9470
  Cyclic GFR-binding peptide

SEQ ID NO: 49797 - protein, 33 aa, Artificial Sequence
  Cyclic GFR-binding peptide
  MOD_RES (30), (31): Xaa is C or S
VVMDEYQKYVVKENEDIFLMSIPSLETPVXXAK

SEQ ID NO: 49798 - protein, 26 aa, Artificial Sequence
  Cyclic GFR-binding peptide
VVMNEYQKYIVNSSDDIFLVSIPSLQ

SEQ ID NO: 49799 - protein, 40 aa, Artificial Sequence; identical to SEQ ID NO: 9472
  Cyclic GFR-binding peptide
  MOD_RES (2), (34), (35): Xaa is C or S

SEQ ID NO: 49800 - protein, 28 aa, Artificial Sequence
  Cyclic GFR-binding peptide
  MOD_RES (2), (2): Xaa is C or S
GXGEVVMDNSLQEVVKENEDYYVMPLPE

SEQ ID NO: 49801 - protein, 29 aa, Artificial Sequence
  Cyclic GFR-binding peptide
  MOD_RES (26), (27): Xaa is C or S
NSLQEVVNNASDYYVIPLPELRTPVXXTP

SEQ ID NO: 49802 - protein, 32 aa, Artificial Sequence
  Cyclic GFR-binding peptide
  MOD_RES (1), (3): Xaa is C or S
XGXSEVVMDNSLQEVVNNASDYYLITLPELRT

SEQ ID NO: 49803 - protein, 32 aa, Artificial Sequence
  Cyclic GFR-binding peptide
  MOD_RES (27), (28): Xaa is C or S
DQYNKLVVNNASDLYLISIASLRTPVXXTPPT

SEQ ID NO: 49804 - protein, 31 aa, Artificial Sequence
  Cyclic GFR-binding peptide
  MOD_RES (2), (4): Xaa is C or S
RXGXSEVVMDRYKKLVVNNASDFYLISIANL

SEQ ID NO: 49805 - protein, 26 aa, Artificial Sequence
  Cyclic GFR-binding peptide
EVVMDQYNKLVVNNASDLYLISIASL

SEQ ID NO: 49806 - protein, 39 aa, Artificial Sequence; identical to SEQ ID NO: 9476
  Cyclic GFR-binding peptide
  MOD_RES (2), (34), (35): Xaa is C or S

SEQ ID NO: 49807 - protein, 32 aa, Artificial Sequence
  Cyclic GFR-binding peptide
  MOD_RES (27), (28): Xaa is C or S
DNSLQEVVNNASDYYVIPLPELRTPVXXTPPT

SEQ ID NO: 49808 - protein, 29 aa, Artificial Sequence
  Cyclic GFR-binding peptide
VVMDQYNKLVVNNASDLYLISIASLRTPV

SEQ ID NO: 49809 - protein, 26 aa, Artificial Sequence
  Cyclic GFR-binding peptide
NNSLQEIVNSSDDYYVVPLPELQTPA

SEQ ID NO: 49810 - protein, 29 aa, Artificial Sequence
  Cyclic GFR-binding peptide
  MOD_RES (29), (29): Xaa is C or S
VMEEYQKYVVKDYEDIFLMSIPSLETPVX

SEQ ID NO: 49811 - protein, 38 aa, Artificial Sequence; identical to SEQ ID NO: 9478
  Cyclic GFR-binding peptide
  MOD_RES (2), (34), (35): Xaa is C or S

SEQ ID NO: 49812 - protein, 40 aa, Artificial Sequence; identical to SEQ ID NO: 9479
  Cyclic GFR-binding peptide
  MOD_RES (1), (3), (35), (36): Xaa is C or S

SEQ ID NO: 49813 - protein, 28 aa, Artificial Sequence
  Cyclic GFR-binding peptide
VVMDNSLQEVVNNASDYYLITLPELRTP

SEQ ID NO: 49814 - protein, 28 aa, Artificial Sequence
  Cyclic GFR-binding peptide
  MOD_RES (26), (27): Xaa is C or S
NSLQEVKPTRGVYYVIPLPELDQPVXXP

SEQ ID NO: 49815 - protein, 26 aa, Artificial Sequence
  Cyclic GFR-binding peptide
GEVVMENSLQEVVKDYEDYYLMTLPE

SEQ ID NO: 49816 - protein, 25 aa, Artificial Sequence
  Cyclic GFR-binding peptide
EVVMDQYNKLVVNNASDLYLISIAS

SEQ ID NO: 49817 - protein, 26 aa, Artificial Sequence
  Cyclic GFR-binding peptide
  MOD_RES (26), (26): Xaa is C or S
EYQKYVKPTRGVIFLISIPSLDQPVX

SEQ ID NO: 49818 - protein, 32 aa, Artificial Sequence
  Cyclic GFR-binding peptide
  MOD_RES (28), (29): Xaa is C or S
IMNSLQEVKPKRGVYYLITLPELAQPVXXPAA

SEQ ID NO: 49819 - protein, 34 aa, Artificial Sequence
  Cyclic GFR-binding peptide
  MOD_RES (2), (4): Xaa is C or S
HXGXARVVMNEYQKYIVNSSDDIFLVSIPSLQTP

SEQ ID NO: 49820 - protein, 24 aa, Artificial Sequence
  Cyclic GFR-binding peptide
VMNNSLQEIVNSSDDYYVVPLPEL

SEQ ID NO: 49821 - protein, 26 aa, Artificial Sequence
  Cyclic GFR-binding peptide
  MOD_RES (26), (26): Xaa is C or S
NSLQEVKPKRGVYYLITLPELAQPVX

SEQ ID NO: 49822 - protein, 35 aa, Artificial Sequence; identical to SEQ ID NO: 9483
  Cyclic GFR-binding peptide
  MOD_RES (2), (4), (35): Xaa is C or S

SEQ ID NO: 49823 - protein, 24 aa, Artificial Sequence
  Cyclic GFR-binding peptide
MNSLQEIKPTKGIYYVIPLPELDQ

SEQ ID NO: 49824 - protein, 30 aa, Artificial Sequence
  Cyclic GFR-binding peptide
  MOD_RES (30), (30): Xaa is C or S
RVIMEYQKYVKPKRGVIFLISIPSLAQPVX

SEQ ID NO: 49825 - protein, 38 aa, Artificial Sequence; identical to SEQ ID NO: 9486
  Cyclic GFR-binding peptide
  MOD_RES (2), (4), (36): Xaa is C or S

SEQ ID NO: 49826 - protein, 33 aa, Artificial Sequence
  Cyclic GFR-binding peptide
  MOD_RES (28), (29): Xaa is C or S
MDRYKKLVVNNASDFYLISIANLRTPVXXTPPT

SEQ ID NO: 49827 - protein, 32 aa, Artificial Sequence
  Cyclic GFR-binding peptide
  MOD_RES (1), (3): Xaa is C or S
XGXGEVVMENSLQEVVKDYEDYYVMPLPELET

SEQ ID NO: 49828 - protein, 25 aa, Artificial Sequence
  Cyclic GFR-binding peptide
KVIMEYQKYIKPTKGIIFLISIPSL

SEQ ID NO: 49829 - protein, 40 aa, Artificial Sequence; identical to SEQ ID NO: 9489
  Cyclic GFR-binding peptide
  MOD_RES (2), (4), (36), (37): Xaa is C or S

SEQ ID NO: 49830 - protein, 36 aa, Artificial Sequence; identical to SEQ ID NO: 9490
  Cyclic GFR-binding peptide
  MOD_RES (1), (33): Xaa is C or S

SEQ ID NO: 49831 - protein, 30 aa, Artificial Sequence
  Cyclic GFR-binding peptide
  MOD_RES (2), (4): Xaa is C or S
HXGXARVVMNEYQKYIVNSSDDIFLVSIPS

SEQ ID NO: 49832 - protein, 32 aa, Artificial Sequence
  Cyclic GFR-binding peptide
  MOD_RES (27), (28): Xaa is C or S
NEYQKYIVNSSDDIFLVSIPSLKTPAXXPKPV

SEQ ID NO: 49833 - protein, 26 aa, Artificial Sequence
  Cyclic GFR-binding peptide
SRVIMEYQKYVKPKRGVIFLISIPSL

SEQ ID NO: 49834 - protein, 24 aa, Artificial Sequence
  Cyclic GFR-binding peptide
VMDRYKKLVVNNASDFYLISIANL

SEQ ID NO: 49835 - protein, 27 aa, Artificial Sequence
  Cyclic GFR-binding peptide
  MOD_RES (1), (1): Xaa is C or S
XGEVVMDEYQKYVVKENEDIFLMSIPS

SEQ ID NO: 49836 - protein, 37 aa, Artificial Sequence; identical to SEQ ID NO: 9491
  Cyclic GFR-binding peptide
  MOD_RES (1), (33), (34): Xaa is C or S

SEQ ID NO: 49837 - protein, 30 aa, Artificial Sequence
  Cyclic GFR-binding peptide
  MOD_RES (1), (3): Xaa is C or S
XGXGEVVMDNSLQEVVKENEDYYVMPLPEL

SEQ ID NO: 49838 - protein, 33 aa, Artificial Sequence; identical to SEQ ID NO: 9493
  Cyclic GFR-binding peptide
  MOD_RES (32), (33): Xaa is C or S

SEQ ID NO: 49839 - protein, 28 aa, Artificial Sequence
  Cyclic GFR-binding peptide
  MOD_RES (1), (1): Xaa is C or S
XSRVIMEYQKYVKPKRGVIFLISIPSLA

SEQ ID NO: 49840 - protein, 25 aa, Artificial Sequence
  Cyclic GFR-binding peptide
DNSLQEVVNNASDYYLITLPELRTP

SEQ ID NO: 49841 - protein, 31 aa, Artificial Sequence
  Cyclic GFR-binding peptide
  MOD_RES (27), (28): Xaa is C or S
DNSLQEVVKENEDYYVMPLPELETPVXXAKP

SEQ ID NO: 49842 - protein, 37 aa, Artificial Sequence; identical to SEQ ID NO: 9496
  Cyclic GFR-binding peptide
  MOD_RES (1), (33): Xaa is C or S

SEQ ID NO: 49843 - protein, 33 aa, Artificial Sequence
  Cyclic GFR-binding peptide
  MOD_RES (2), (4): Xaa is C or S
SXKXSKVVMNSLQEVKPTRGVYYVIPLPELDQP

SEQ ID NO: 49844 - protein, 36 aa, Artificial Sequence; identical to SEQ ID NO: 9497
  Cyclic GFR-binding peptide
  MOD_RES (31), (32): Xaa is C or S

SEQ ID NO: 49845 - protein, 32 aa, Artificial Sequence
  Cyclic GFR-binding peptide
  MOD_RES (27), (27): Xaa is C or S
NEYQKYIVNSSDDIFLVSIPSLKTPAXTPKTV

SEQ ID NO: 49846 - protein, 30 aa, Artificial Sequence
  Cyclic GFR-binding peptide
  MOD_RES (2), (2): Xaa is C or S
KXSKVIMEYQKYIKPTKGIIFLISIPSLDQ

SEQ ID NO: 49847 - protein, 35 aa, Artificial Sequence; identical to SEQ ID NO: 9499
  Cyclic GFR-binding peptide
  MOD_RES (31), (32): Xaa is C or S

SEQ ID NO: 49848 - protein, 32 aa, Artificial Sequence
  Cyclic GFR-binding peptide
  MOD_RES (26), (27): Xaa is C or S
NSLQEIVNSSDDYYLVTLPELQTPAXXPKPVT

SEQ ID NO: 49849 - protein, 30 aa, Artificial Sequence
  Cyclic GFR-binding peptide
SEVVMDRYKKLVVNNASDFYLISIANLRTP

SEQ ID NO: 49850 - protein, 34 aa, Artificial Sequence
  Cyclic GFR-binding peptide
  MOD_RES (28), (29): Xaa is C or S
MDNSLQEVVNNASDYYVIPLPELRTPVXXTPPTS

SEQ ID NO: 49851 - protein, 27 aa, Artificial Sequence
  Cyclic GFR-binding peptide
SRVVMNNSLQEIVNSSDDYYLVTLPEL

SEQ ID NO: 49852 - protein, 27 aa, Artificial Sequence
  Cyclic GFR-binding peptide
IMNSLQEVKPKRGVYYLITLPELAQPV

SEQ ID NO: 49853 - protein, 31 aa, Artificial Sequence
  Cyclic GFR-binding peptide
  MOD_RES (29), (30): Xaa is C or S
VIMEYQKYVKPKRGVIFLISIPSLAQPVXXP

SEQ ID NO: 49854 - protein, 33 aa, Artificial Sequence
  Cyclic GFR-binding peptide
  MOD_RES (28), (29): Xaa is C or S
MNEYQKYIVNSSDDIFLVSIPSLQTPAXXPKPV

SEQ ID NO: 49855 - protein, 33 aa, Artificial Sequence
  Cyclic GFR-binding peptide
  MOD_RES (1), (3): Xaa is C or S
XGXSEVVMDQYNKLVVNNASDLYLISIASLRTP

SEQ ID NO: 49856 - protein, 28 aa, Artificial Sequence
  Cyclic GFR-binding peptide
VVMNNSLQEIVNSSDDYYVVPLPELKTP

SEQ ID NO: 49857 - protein, 29 aa, Artificial Sequence
  Cyclic GFR-binding peptide
  MOD_RES (29), (29): Xaa is C or S
VMDEYQKYVVKENEDIFLMSIPSLETPVX

SEQ ID NO: 49858 - protein, 27 aa, Artificial Sequence
  Cyclic GFR-binding peptide
  MOD_RES (26), (27): Xaa is C or S
NSLQEVVKDYEDYYVMPLPELETPVXX

SEQ ID NO: 49859 - protein, 31 aa, Artificial Sequence
  Cyclic GFR-binding peptide
  MOD_RES (27), (28): Xaa is C or S
MNSLQEVKPTRGVYYVIPLPELDQPVXXPSA

SEQ ID NO: 49860 - protein, 28 aa, Artificial Sequence
  Cyclic GFR-binding peptide
  MOD_RES (2), (2): Xaa is C or S
GXARVVMNNSLQEIVNSSDDYYLVTLPE

SEQ ID NO: 49861 - protein, 32 aa, Artificial Sequence
  Cyclic GFR-binding peptide
  MOD_RES (26), (27): Xaa is C or S
NSLQEVVKENEDYYLMTLPELETPVXXAKPIK

SEQ ID NO: 49862 - protein, 33 aa, Artificial Sequence
  Cyclic GFR-binding peptide
  MOD_RES (2), (4): Xaa is C or S
RXGXGEVVMDNSLQEVVKENEDYYVMPLPELET

SEQ ID NO: 49863 - protein, 37 aa, Artificial Sequence; identical to SEQ ID NO: 9503
  Cyclic GFR-binding peptide
  MOD_RES (2), (4), (36), (37): Xaa is C or S

SEQ ID NO: 49864 - protein, 30 aa, Artificial Sequence
  Cyclic GFR-binding peptide
  MOD_RES (1), (1): Xaa is C or S
XSRVIMEYQKYVKPKRGVIFLISIPSLAQP

SEQ ID NO: 49865 - protein, 41 aa, Artificial Sequence; identical to SEQ ID NO: 9506
  Cyclic GFR-binding peptide
  MOD_RES (1), (3), (35), (36): Xaa is C or S

SEQ ID NO: 49866 - protein, 28 aa, Artificial Sequence
  Cyclic GFR-binding peptide
  MOD_RES (27), (28): Xaa is C or S
NEYQKYIVNSSDDIFLVSIPSLKTPAXX

SEQ ID NO: 49867 - protein, 38 aa, Artificial Sequence; identical to SEQ ID NO: 9507
  Cyclic GFR-binding peptide
  MOD_RES (2), (4), (35), (36): Xaa is C or S

SEQ ID NO: 49868 - protein, 32 aa, Artificial Sequence; identical to SEQ ID NO: 9508
  Cyclic GFR-binding peptide
  MOD_RES (31), (32): Xaa is C or S

SEQ ID NO: 49869 - protein, 37 aa, Artificial Sequence; identical to SEQ ID NO: 9509
  Cyclic GFR-binding peptide
  MOD_RES (31), (32): Xaa is C or S

SEQ ID NO: 49870 - protein, 34 aa, Artificial Sequence; identical to SEQ ID NO: 9511
  Cyclic GFR-binding peptide
  MOD_RES (1), (33), (34): Xaa is C or S

SEQ ID NO: 49871 - protein, 38 aa, Artificial Sequence; identical to SEQ ID NO: 9512
  Cyclic GFR-binding peptide
  MOD_RES (2), (4), (36), (37): Xaa is C or S

SEQ ID NO: 49872 - protein, 33 aa, Artificial Sequence; identical to SEQ ID NO: 9513
  Cyclic GFR-binding peptide
  MOD_RES (31), (31): Xaa is C or S

SEQ ID NO: 49873 - protein, 38 aa, Artificial Sequence; identical to SEQ ID NO: 9514
  Cyclic GFR-binding peptide
  MOD_RES (2), (4), (36), (37): Xaa is C or S

SEQ ID NO: 49874 - protein, 36 aa, Artificial Sequence; identical to SEQ ID NO: 9516
  Cyclic GFR-binding peptide
  MOD_RES (2), (33), (34): Xaa is C or S

SEQ ID NO: 49875 - protein, 30 aa, Artificial Sequence
  Cyclic GFR-binding peptide
SEVVMDNSLQEVVNNASDYYLITLPELRTP

SEQ ID NO: 49876 - protein, 29 aa, Artificial Sequence
  Cyclic GFR-binding peptide
  MOD_RES (1), (1): Xaa is C or S
XARVVMNNSLQEIVNSSDDYYLVTLPELQ

SEQ ID NO: 49877 - protein, 23 aa, Artificial Sequence
  Cyclic GFR-binding peptide
NEYQKYIVNSSDDIFLVSIPSLQ

SEQ ID NO: 49878 - protein, 28 aa, Artificial Sequence
  Cyclic GFR-binding peptide
SRVIMNSLQEVKPKRGVYYLITLPELAQ

SEQ ID NO: 49879 - protein, 31 aa, Artificial Sequence
  Cyclic GFR-binding peptide
  MOD_RES (30), (31): Xaa is C or S
VVMNNSLQEIVNSSDDYYLVTLPELQTPAXX

SEQ ID NO: 49880 - protein, 31 aa, Artificial Sequence
  Cyclic GFR-binding peptide
  MOD_RES (27), (28): Xaa is C or S
MNSLQEVKPKRGVYYLITLPELAQPVXXPAA

SEQ ID NO: 49881 - protein, 41 aa, Artificial Sequence; identical to SEQ ID NO: 9518
  Cyclic GFR-binding peptide
  MOD_RES (1), (3), (35), (36): Xaa is C or S

SEQ ID NO: 49882 - protein, 28 aa, Artificial Sequence
  Cyclic GFR-binding peptide
  MOD_RES (26), (27): Xaa is C or S
NSLQEIVNSSDDYYVVPLPELQTPAXXP

SEQ ID NO: 49883 - protein, 26 aa, Artificial Sequence
  Cyclic GFR-binding peptide
SKVIMEYQKYIKPTKGIIFLISIPSL

SEQ ID NO: 49884 - protein, 27 aa, Artificial Sequence
  Cyclic GFR-binding peptide
  MOD_RES (1), (1): Xaa is C or S
XSKVVMEYQKYVKPTRGVIFLISIPSL

SEQ ID NO: 49885 - protein, 31 aa, Artificial Sequence
  Cyclic GFR-binding peptide
  MOD_RES (29), (30): Xaa is C or S
VMENSLQEVVKDYEDYYVMPLPELETPVXXA

SEQ ID NO: 49886 - protein, 39 aa, Artificial Sequence; identical to SEQ ID NO: 9520
  Cyclic GFR-binding peptide
  MOD_RES (2), (4), (35), (36): Xaa is C or S

SEQ ID NO: 49887 - protein, 34 aa, Artificial Sequence; identical to SEQ ID NO: 9521
  Cyclic GFR-binding peptide
  MOD_RES (31), (32): Xaa is C or S

SEQ ID NO: 49888 - protein, 30 aa, Artificial Sequence
  Cyclic GFR-binding peptide
  MOD_RES (30), (30): Xaa is C or S
VVMDQYNKLVVNNASDLYLISIASLRTPVX

SEQ ID NO: 49889 - protein, 29 aa, Artificial Sequence
  Cyclic GFR-binding peptide
  MOD_RES (1), (3): Xaa is C or S
XGXSRVVMNNSLQEIVNSSDDYYLVTLPE

SEQ ID NO: 49890 - protein, 34 aa, Artificial Sequence; identical to SEQ ID NO: 9522
  Cyclic GFR-binding peptide
  MOD_RES (31), (32): Xaa is C or S

SEQ ID NO: 49891 - protein, 33 aa, Artificial Sequence
  Cyclic GFR-binding peptide
  MOD_RES (30), (31): Xaa is C or S
VVMNNSLQEIVNSSDDYYVVPLPELQTPAXXPK

SEQ ID NO: 49892 - protein, 26 aa, Artificial Sequence
  Cyclic GFR-binding peptide
VMNNSLQEIVNSSDDYYVVPLPELKT

SEQ ID NO: 49893 - protein, 38 aa, Artificial Sequence; identical to SEQ ID NO: 9527
  Cyclic GFR-binding peptide
  MOD_RES (2), (4), (36), (37): Xaa is C or S

SEQ ID NO: 49894 - protein, 29 aa, Artificial Sequence
  Cyclic GFR-binding peptide
  MOD_RES (28), (29): Xaa is C or S
MDRYKKLVVNNASDFYLISIANLRTPVXX

SEQ ID NO: 49895 - protein, 21 aa, Artificial Sequence
  Cyclic GFR-binding peptide
EYQKYIVNSSDDIFLVSIPSL

SEQ ID NO: 49896 - protein, 29 aa, Artificial Sequence
  Cyclic GFR-binding peptide
AAAAAAAAANSLQEVKPTRGVYYLITLPE

SEQ ID NO: 49897 - protein, 25 aa, Artificial Sequence
  Cyclic GFR-binding peptide
VVMEEYQKYVVKDYEDIFLMSIPSL

SEQ ID NO: 49898 - protein, 36 aa, Artificial Sequence; identical to SEQ ID NO: 9531
  Cyclic GFR-binding peptide
  MOD_RES (1), (33), (34): Xaa is C or S

SEQ ID NO: 49899 - protein, 31 aa, Artificial Sequence
  Cyclic GFR-binding peptide
  MOD_RES (2), (2): Xaa is C or S
GXGEVVMENSLQEVVKDYEDYYLMTLPELET

SEQ ID NO: 49900 - protein, 29 aa, Artificial Sequence
  Cyclic GFR-binding peptide
  MOD_RES (2), (2): Xaa is C or S
KXSRVIMEYQKYVKPKRGVIFLISIPSLA

SEQ ID NO: 49901 - protein, 25 aa, Artificial Sequence
  Cyclic GFR-binding peptide
IMNSLQEIKPTKGIYYVIPLPELDQ

SEQ ID NO: 49902 - protein, 25 aa, Artificial Sequence
  Cyclic GFR-binding peptide
VVMDNSLQEVVNNASDYYVIPLPEL

SEQ ID NO: 49903 - protein, 28 aa, Artificial Sequence
  Cyclic GFR-binding peptide
  MOD_RES (27), (28): Xaa is C or S
DRYKKLVVNNASDFYLISIANLRTPVXX

SEQ ID NO: 49904 - protein, 31 aa, Artificial Sequence
  Cyclic GFR-binding peptide
  MOD_RES (2), (4): Xaa is C or S
RXGXGEVVMDNSLQEVVKENEDYYVMPLPEL

SEQ ID NO: 49905 - protein, 36 aa, Artificial Sequence; identical to SEQ ID NO: 9533
  Cyclic GFR-binding peptide
  MOD_RES (2), (34), (35): Xaa is C or S

SEQ ID NO: 49906 - protein, 42 aa, Artificial Sequence; identical to SEQ ID NO: 9534
  Cyclic GFR-binding peptide
  MOD_RES (2), (4), (36), (37): Xaa is C or S

SEQ ID NO: 49907 - protein, 32 aa, Artificial Sequence; identical to SEQ ID NO: 9535
  Cyclic GFR-binding peptide
  MOD_RES (1), (1): Xaa is C or S

SEQ ID NO: 49908 - protein, 27 aa, Artificial Sequence
  Cyclic GFR-binding peptide
  MOD_RES (27), (27): Xaa is C or S
ENSLQEVVKDYEDYYVMPLPELETPVX

SEQ ID NO: 49909 - protein, 24 aa, Artificial Sequence
  Cyclic GFR-binding peptide
VMNEYQKYIVNSSDDIFLVSIPSL

SEQ ID NO: 49910 - protein, 33 aa, Artificial Sequence; identical to SEQ ID NO: 9536
  Cyclic GFR-binding peptide
  MOD_RES (2), (2): Xaa is C or S

SEQ ID NO: 49911 - protein, 21 aa, Artificial Sequence
  Cyclic GFR-binding peptide
EEYQKYVVKDYEDIFLMSIPS

SEQ ID NO: 49912 - protein, 27 aa, Artificial Sequence
  Cyclic GFR-binding peptide
IMEYQKYIKPTKGIIFLISIPSLDQSV

SEQ ID NO: 49913 - protein, 32 aa, Artificial Sequence; identical to SEQ ID NO: 9537
  Cyclic GFR-binding peptide
  MOD_RES (32), (32): Xaa is C or S

SEQ ID NO: 49914 - protein, 29 aa, Artificial Sequence
  Cyclic GFR-binding peptide
  MOD_RES (26), (27): Xaa is C or S
NSLQEIVNSSDDYYVVPLPELKTPAXXPK

SEQ ID NO: 49915 - protein, 23 aa, Artificial Sequence
  Cyclic GFR-binding peptide
VMENSLQEVVKDYEDYYLMTLPE

SEQ ID NO: 49916 - protein, 40 aa, Artificial Sequence; identical to SEQ ID NO: 9539
  Cyclic GFR-binding peptide
  MOD_RES (2), (34), (35): Xaa is C or S

SEQ ID NO: 49917 - protein, 27 aa, Artificial Sequence
  Cyclic GFR-binding peptide
ARVVMNNSLQEIVNSSDDYYLVTLPEL

SEQ ID NO: 49918 - protein, 32 aa, Artificial Sequence
  Cyclic GFR-binding peptide
  MOD_RES (29), (30): Xaa is C or S
VMDNSLQEVVKENEDYYVMPLPELETPVXXAK

SEQ ID NO: 49919 - protein, 37 aa, Artificial Sequence; identical to SEQ ID NO: 9540
  Cyclic GFR-binding peptide
  MOD_RES (32), (32): Xaa is C or S

SEQ ID NO: 49920 - protein, 30 aa, Artificial Sequence
  Cyclic GFR-binding peptide
  MOD_RES (29), (30): Xaa is C or S
VMNNSLQEIVNSSDDYYLVTLPELKTPAXX

SEQ ID NO: 49921 - protein, 23 aa, Artificial Sequence
  Cyclic GFR-binding peptide
VMEYQKYVKPTRGVIFLISIPSL

SEQ ID NO: 49922 - protein, 32 aa, Artificial Sequence; identical to SEQ ID NO: 9542
  Cyclic GFR-binding peptide
  MOD_RES (31), (31): Xaa is C or S

SEQ ID NO: 49923 - protein, 33 aa, Artificial Sequence
  Cyclic GFR-binding peptide
  MOD_RES (2), (4): Xaa is C or S
RXGXGEVVMENSLQEVVKDYEDYYVMPLPELET

SEQ ID NO: 49924 - protein, 25 aa, Artificial Sequence
  Cyclic GFR-binding peptide
KVVMEYQKYVKPTRGVIFLISIPSL

SEQ ID NO: 49925 - protein, 28 aa, Artificial Sequence
  Cyclic GFR-binding peptide
RVIMEYQKYVKPKRGVIFLISIPSLAQP

SEQ ID NO: 49926 - protein, 35 aa, Artificial Sequence; identical to SEQ ID NO: 9544
  Cyclic GFR-binding peptide
  MOD_RES (31), (32): Xaa is C or S

SEQ ID NO: 49927 - protein, 22 aa, Artificial Sequence
  Cyclic GFR-binding peptide
NSLQEVVKDYEDYYLMTLPELE

SEQ ID NO: 49928 - protein, 33 aa, Artificial Sequence; identical to SEQ ID NO: 9545
  Cyclic GFR-binding peptide
  MOD_RES (31), (32): Xaa is C or S

SEQ ID NO: 49929 - protein, 28 aa, Artificial Sequence
  Cyclic GFR-binding peptide
VMNEYQKYIVNSSDDIFLVSIPSLQTPA

SEQ ID NO: 49930 - protein, 34 aa, Artificial Sequence
  Cyclic GFR-binding peptide
  MOD_RES (30), (31): Xaa is C or S
VVMNNSLQEIVNSSDDYYVVPLPELKTPAXXPKP

SEQ ID NO: 49931 - protein, 32 aa, Artificial Sequence; identical to SEQ ID NO: 9549
  Cyclic GFR-binding peptide
  MOD_RES (2), (2): Xaa is C or S

SEQ ID NO: 49932 - protein, 41 aa, Artificial Sequence; identical to SEQ ID NO: 9551
  Cyclic GFR-binding peptide
  MOD_RES (1), (3), (35), (36): Xaa is C or S

SEQ ID NO: 49933 - protein, 37 aa, Artificial Sequence; identical to SEQ ID NO: 9552
  Cyclic GFR-binding peptide
  MOD_RES (2), (34), (35): Xaa is C or S

SEQ ID NO: 49934 - protein, 29 aa, Artificial Sequence
  Cyclic GFR-binding peptide
EVVMENSLQEVVKDYEDYYVMPLPELETP

SEQ ID NO: 49935 - protein, 23 aa, Artificial Sequence
  Cyclic GFR-binding peptide
NNSLQEIVNSSDDYYVVPLPELK

SEQ ID NO: 49936 - protein, 39 aa, Artificial Sequence; identical to SEQ ID NO: 9553
  Cyclic GFR-binding peptide
  MOD_RES (2), (4), (36), (37): Xaa is C or S

SEQ ID NO: 49937 - protein, 26 aa, Artificial Sequence
  Cyclic GFR-binding peptide
MEYQKYVKPTRGVIFLISIPSLDQPV

SEQ ID NO: 49938 - protein, 31 aa, Artificial Sequence
  Cyclic GFR-binding peptide
  MOD_RES (30), (31): Xaa is C or S
VVMDNSLQEVVNNASDYYVIPLPELRTPVXX

SEQ ID NO: 49939 - protein, 28 aa, Artificial Sequence
  Cyclic GFR-binding peptide
  MOD_RES (1), (1): Xaa is C or S
XGEVVMENSLQEVVKDYEDYYLMTLPEL

SEQ ID NO: 49940 - protein, 20 aa, Artificial Sequence
  Cyclic GFR-binding peptide
NSLQEIKPTKGIYYVIPLPE

SEQ ID NO: 49941 - protein, 41 aa, Artificial Sequence; identical to SEQ ID NO: 9554
  Cyclic GFR-binding peptide
  MOD_RES (1), (3), (35), (36): Xaa is C or S

SEQ ID NO: 49942 - protein, 32 aa, Artificial Sequence
  Cyclic GFR-binding peptide
  MOD_RES (28), (29): Xaa is C or S
MNEYQKYIVNSSDDIFLVSIPSLKTPAXXPKP

SEQ ID NO: 49943 - protein, 31 aa, Artificial Sequence
  Cyclic GFR-binding peptide
  MOD_RES (29), (30): Xaa is C or S
VMNNSLQEIVNSSDDYYVVPLPELQTPAXXP

SEQ ID NO: 49944 - protein, 23 aa, Artificial Sequence
  Cyclic GFR-binding peptide
VIMNSLQEIKPTKGIYYVIPLPE

SEQ ID NO: 49945 - protein, 36 aa, Artificial Sequence; identical to SEQ ID NO: 9556
  Cyclic GFR-binding peptide
  MOD_RES (2), (4), (36): Xaa is C or S

SEQ ID NO: 49946 - protein, 30 aa, Artificial Sequence; identical to SEQ ID NO: 2025
  Cyclic GFR-binding peptide

SEQ ID NO: 49947 - protein, 29 aa, Artificial Sequence
  Cyclic GFR-binding peptide
  MOD_RES (26), (27): Xaa is C or S
NSLQEVVKENEDYYLMTLPELETPVXXAK

SEQ ID NO: 49948 - protein, 32 aa, Artificial Sequence
  Cyclic GFR-binding peptide
  MOD_RES (1), (3): Xaa is C or S
XGXGEVVMDNSLQEVVKENEDYYVMPLPELET

SEQ ID NO: 49949 - protein, 23 aa, Artificial Sequence
  Cyclic GFR-binding peptide
VMDEYQKYVVKENEDIFLMSIPS

SEQ ID NO: 49950 - protein, 31 aa, Artificial Sequence
  Cyclic GFR-binding peptide
  MOD_RES (28), (29): Xaa is C or S
VMNSLQEVKPTRGVYYVIPLPELDQPVXXPS

SEQ ID NO: 49951 - protein, 30 aa, Artificial Sequence
  Cyclic GFR-binding peptide
  MOD_RES (1), (3): Xaa is C or S
XGXGEVVMENSLQEVVKDYEDYYVMPLPEL

SEQ ID NO: 49952 - protein, 35 aa, Artificial Sequence; identical to SEQ ID NO: 9557
  Cyclic GFR-binding peptide
  MOD_RES (1), (3), (35): Xaa is C or S

SEQ ID NO: 49953 - protein, 38 aa, Artificial Sequence; identical to SEQ ID NO: 9559
  Cyclic GFR-binding peptide
  MOD_RES (1), (3), (34), (35): Xaa is C or S

SEQ ID NO: 49954 - protein, 29 aa, Artificial Sequence
  Cyclic GFR-binding peptide
RVIMEYQKYVKPKRGVIFLISIPSLAQPV

SEQ ID NO: 49955 - protein, 31 aa, Artificial Sequence
  Cyclic GFR-binding peptide
  MOD_RES (2), (4): Xaa is C or S
RXGXGEVVMENSLQEVVKDYEDYYVMPLPEL

SEQ ID NO: 49956 - protein, 29 aa, Artificial Sequence
  Cyclic GFR-binding peptide
  MOD_RES (26), (27): Xaa is C or S
EYQKYIVNSSDDIFLVSIPSLQTPAXXPK

SEQ ID NO: 49957 - protein, 27 aa, Artificial Sequence
  Cyclic GFR-binding peptide
  MOD_RES (27), (27): Xaa is C or S
NNSLQEIVNSSDDYYVVPLPELQTPAX

SEQ ID NO: 49958 - protein, 29 aa, Artificial Sequence
  Cyclic GFR-binding peptide
EVVMDEYQKYVVKENEDIFLMSIPSLETP

SEQ ID NO: 49959 - protein, 36 aa, Artificial Sequence; identical to SEQ ID NO: 9563
  Cyclic GFR-binding peptide
  MOD_RES (2), (4), (36): Xaa is C or S

SEQ ID NO: 49960 - protein, 35 aa, Artificial Sequence; identical to SEQ ID NO: 9565
  Cyclic GFR-binding peptide
  MOD_RES (2), (34), (35): Xaa is C or S

SEQ ID NO: 49961 - protein, 34 aa, Artificial Sequence; identical to SEQ ID NO: 9570
  Cyclic GFR-binding peptide
  MOD_RES (1), (3): Xaa is C or S

SEQ ID NO: 49962 - protein, 24 aa, Artificial Sequence
  Cyclic GFR-binding peptide
DNSLQEVVKENEDYYLMTLPELET

SEQ ID NO: 49963 - protein, 32 aa, Artificial Sequence
  Cyclic GFR-binding peptide
  MOD_RES (30), (31): Xaa is C or S
VVMNNSLQEIVNSSDDYYLVTLPELQTPAXXP

SEQ ID NO: 49964 - protein, 27 aa, Artificial Sequence
  Cyclic GFR-binding peptide
  MOD_RES (2), (2): Xaa is C or S
KXSRVIMNSLQEVKPKRGVYYLITLPE

SEQ ID NO: 49965 - protein, 32 aa, Artificial Sequence; identical to SEQ ID NO: 9572
  Cyclic GFR-binding peptide
  MOD_RES (1), (1): Xaa is C or S

SEQ ID NO: 49966 - protein, 37 aa, Artificial Sequence; identical to SEQ ID NO: 9573
  Cyclic GFR-binding peptide
  MOD_RES (1), (3), (35), (36): Xaa is C or S

SEQ ID NO: 49967 - protein, 36 aa, Artificial Sequence; identical to SEQ ID NO: 9574
  Cyclic GFR-binding peptide
  MOD_RES (2), (4), (36): Xaa is C or S

SEQ ID NO: 49968 - protein, 22 aa, Artificial Sequence
  Cyclic GFR-binding peptide
EYQKYIKPTKGIIFLISIPSLD

SEQ ID NO: 49969 - protein, 29 aa, Artificial Sequence
  Cyclic GFR-binding peptide
EVVMDNSLQEVVNNASDYYVIPLPELRTP

SEQ ID NO: 49970 - protein, 34 aa, Artificial Sequence
  Cyclic GFR-binding peptide
  MOD_RES (30), (31): Xaa is C or S
VVMDNSLQEVVKENEDYYLMTLPELETPVXXAKP

SEQ ID NO: 49971 - protein, 38 aa, Artificial Sequence; identical to SEQ ID NO: 9575
  Cyclic GFR-binding peptide
  MOD_RES (32), (33): Xaa is C or S

SEQ ID NO: 49972 - protein, 32 aa, Artificial Sequence
  Cyclic GFR-binding peptide
  MOD_RES (30), (31): Xaa is C or S
VVMDQYNKLVVNNASDLYLISIASLRTPVXXT

SEQ ID NO: 49973 - protein, 23 aa, Artificial Sequence
  Cyclic GFR-binding peptide
EYQKYIKPTKGIIFLISIPSLDQ

SEQ ID NO: 49974 - protein, 37 aa, Artificial Sequence; identical to SEQ ID NO: 9577
  Cyclic GFR-binding peptide
  MOD_RES (2), (4), (36): Xaa is C or S

SEQ ID NO: 49975 - protein, 31 aa, Artificial Sequence; identical to SEQ ID NO: 9580
  Cyclic GFR-binding peptide
  MOD_RES (31), (31): Xaa is C or S

SEQ ID NO: 49976 - protein, 28 aa, Artificial Sequence
  Cyclic GFR-binding peptide
ARVVMNNSLQEIVNSSDDYYLVTLPELQ

SEQ ID NO: 49977 - protein, 29 aa, Artificial Sequence
  Cyclic GFR-binding peptide
VVMNNSLQEIVNSSDDYYVVPLPELQTPA

SEQ ID NO: 49978 - protein, 34 aa, Artificial Sequence; identical to SEQ ID NO: 9582
  Cyclic GFR-binding peptide
  MOD_RES (1), (3): Xaa is C or S

SEQ ID NO: 49979 - protein, 41 aa, Artificial Sequence; identical to SEQ ID NO: 9583
  Cyclic GFR-binding peptide
  MOD_RES (1), (3), (35), (36): Xaa is C or S

SEQ ID NO: 49980 - protein, 32 aa, Artificial Sequence
  Cyclic GFR-binding peptide
  MOD_RES (1), (3): Xaa is C or S
XGXARVVMNNSLQEIVNSSDDYYLVTLPELQT

SEQ ID NO: 49981 - protein, 30 aa, Artificial Sequence; identical to SEQ ID NO: 9584
  Cyclic GFR-binding peptide

SEQ ID NO: 49982 - protein, 33 aa, Artificial Sequence; identical to SEQ ID NO: 9585
  Cyclic GFR-binding peptide
  MOD_RES (32), (33): Xaa is C or S

SEQ ID NO: 49983 - protein, 27 aa, Artificial Sequence
  Cyclic GFR-binding peptide
KVIMEYQKYIKPTKGIIFLISIPSLDQ

SEQ ID NO: 49984 - protein, 36 aa, Artificial Sequence; identical to SEQ ID NO: 9586
  Cyclic GFR-binding peptide
  MOD_RES (2), (34): Xaa is C or S

SEQ ID NO: 49985 - protein, 29 aa, Artificial Sequence
  Cyclic GFR-binding peptide
  MOD_RES (27), (28): Xaa is C or S
NNSLQEIVNSSDDYYLVTLPELKTPAXXP

SEQ ID NO: 49986 - protein, 32 aa, Artificial Sequence
  Cyclic GFR-binding peptide
  MOD_RES (1), (3): Xaa is C or S
XGXARVVMNEYQKYIVNSSDDIFLVSIPSLQT

SEQ ID NO: 49987 - protein, 23 aa, Artificial Sequence
  Cyclic GFR-binding peptide
EYQKYIVNSSDDIFLVSIPSLQT

SEQ ID NO: 49988 - protein, 32 aa, Artificial Sequence
  Cyclic GFR-binding peptide
  MOD_RES (2), (4): Xaa is C or S
HXGXSRVVMNNSLQEIVNSSDDYYLVTLPELK

SEQ ID NO: 49989 - protein, 36 aa, Artificial Sequence
  Cyclic GFR-binding peptide
  MOD_RES (30), (31): Xaa is C or S
VVMDEYQKYVVKENEDIFLMSIPSLETPVXXAKPIK

SEQ ID NO: 49990 - protein, 32 aa, Artificial Sequence
  Cyclic GFR-binding peptide
  MOD_RES (1), (3): Xaa is C or S
XKXSKVVMNSLQEVKPTRGVYYVIPLPELDQP

SEQ ID NO: 49991 - protein, 35 aa, Artificial Sequence; identical to SEQ ID NO: 9588
  Cyclic GFR-binding peptide
  MOD_RES (1), (3), (35): Xaa is C or S

SEQ ID NO: 49992 - protein, 24 aa, Artificial Sequence
  Cyclic GFR-binding peptide
IMEYQKYIKPTKGIIFLISIPSLD

SEQ ID NO: 49993 - protein, 33 aa, Artificial Sequence
  Cyclic GFR-binding peptide
  MOD_RES (28), (29): Xaa is C or S
MDNSLQEVVKENEDYYVMPLPELETPVXXAKPI

SEQ ID NO: 49994 - protein, 36 aa, Artificial Sequence; identical to SEQ ID NO: 9590
  Cyclic GFR-binding peptide
  MOD_RES (2), (34), (35): Xaa is C or S

SEQ ID NO: 49995 - protein, 26 aa, Artificial Sequence
  Cyclic GFR-binding peptide
  MOD_RES (1), (1): Xaa is C or S
XSRVIMNSLQEVKPKRGVYYLITLPE

SEQ ID NO: 49996 - protein, 27 aa, Artificial Sequence
  Cyclic GFR-binding peptide
VVMDNSLQEVVKENEDYYVMPLPELET

SEQ ID NO: 49997 - protein, 30 aa, Artificial Sequence
  Cyclic GFR-binding peptide
  MOD_RES (2), (4): Xaa is C or S
HXGXSRVVMNNSLQEIVNSSDDYYLVTLPE

SEQ ID NO: 49998 - protein, 31 aa, Artificial Sequence
  Cyclic GFR-binding peptide
  MOD_RES (26), (26): Xaa is C or S
EYQKYIVNSSDDIFLVSIPSLKTPAXTPKTV

SEQ ID NO: 49999 - protein, 40 aa, Artificial Sequence; identical to SEQ ID NO: 9591
  Cyclic GFR-binding peptide
  MOD_RES (2), (34), (35): Xaa is C or S

SEQ ID NO: 50000 - protein, 32 aa, Artificial Sequence; identical to SEQ ID NO: 9593
  Cyclic GFR-binding peptide
  MOD_RES (2), (2): Xaa is C or S

SEQ ID NO: 50001 - protein, 24 aa, Artificial Sequence
  Cyclic GFR-binding peptide
NSLQEVVNNASDYYLITLPELRTP

SEQ ID NO: 50002 - protein, 20 aa, Artificial Sequence
  Cyclic GFR-binding peptide
EYQKYVVKDYEDIFLMSIPS

SEQ ID NO: 50003 - protein, 37 aa, Artificial Sequence; identical to SEQ ID NO: 9594
  Cyclic GFR-binding peptide
  MOD_RES (31), (31): Xaa is C or S

SEQ ID NO: 50004 - protein, 37 aa, Artificial Sequence; identical to SEQ ID NO: 9595
  Cyclic GFR-binding peptide
  MOD_RES (2), (34), (35): Xaa is C or S

SEQ ID NO: 50005 - protein, 30 aa, Artificial Sequence
  Cyclic GFR-binding peptide
  MOD_RES (2), (4): Xaa is C or S
HXGXSRVVMNEYQKYIVNSSDDIFLVSIPS

SEQ ID NO: 50006 - protein, 27 aa, Artificial Sequence
  Cyclic GFR-binding peptide
VVMNNSLQEIVNSSDDYYLVTLPELKT

SEQ ID NO: 50007 - protein, 30 aa, Artificial Sequence
  Cyclic GFR-binding peptide
  MOD_RES (26), (27): Xaa is C or S
EYQKYIKPTKGIIFLISIPSLDQSVXXPSA

SEQ ID NO: 50008 - protein, 37 aa, Artificial Sequence; identical to SEQ ID NO: 9597
  Cyclic GFR-binding peptide
  MOD_RES (2), (34), (35): Xaa is C or S

SEQ ID NO: 50009 - protein, 31 aa, Artificial Sequence
  Cyclic GFR-binding peptide
  MOD_RES (29), (30): Xaa is C or S
VMDNSLQEVVNNASDYYLITLPELRTPVXXT

SEQ ID NO: 50010 - protein, 32 aa, Artificial Sequence
  Cyclic GFR-binding peptide
  MOD_RES (2), (4): Xaa is C or S
SXKXSKVIMEYQKYIKPTKGIIFLISIPSLDQ

SEQ ID NO: 50011 - protein, 37 aa, Artificial Sequence; identical to SEQ ID NO: 9599
  Cyclic GFR-binding peptide
  MOD_RES (2), (4), (35), (36): Xaa is C or S

SEQ ID NO: 50012 - protein, 29 aa, Artificial Sequence
  Cyclic GFR-binding peptide
  MOD_RES (29), (29): Xaa is C or S
VMENSLQEVVKDYEDYYLMTLPELETPVX

SEQ ID NO: 50013 - protein, 35 aa, Artificial Sequence; identical to SEQ ID NO: 9601
  Cyclic GFR-binding peptide
  MOD_RES (31), (32): Xaa is C or S

SEQ ID NO: 50014 - protein, 37 aa, Artificial Sequence; identical to SEQ ID NO: 9602
  Cyclic GFR-binding peptide
  MOD_RES (2), (4), (36): Xaa is C or S

SEQ ID NO: 50015 - protein, 25 aa, Artificial Sequence
  Cyclic GFR-binding peptide
VVMDRYKKLVVNNASDFYLISIANL

SEQ ID NO: 50016 - protein, 34 aa, Artificial Sequence; identical to SEQ ID NO: 9607
  Cyclic GFR-binding peptide
  MOD_RES (2), (34): Xaa is C or S

SEQ ID NO: 50017 - protein, 30 aa, Artificial Sequence
  Cyclic GFR-binding peptide
  MOD_RES (29), (30): Xaa is C or S
VMNEYQKYIVNSSDDIFLVSIPSLQTPAXX

SEQ ID NO: 50018 - protein, 33 aa, Artificial Sequence
  Cyclic GFR-binding peptide
  MOD_RES (28), (29): Xaa is C or S
IMNSLQEVKPKRGVYYLITLPELAQPVXXPAAS

SEQ ID NO: 50019 - protein, 32 aa, Artificial Sequence
  Cyclic GFR-binding peptide
  MOD_RES (28), (29): Xaa is C or S
IMEYQKYIKPTKGIIFLISIPSLDQSVXXPSA

SEQ ID NO: 50020 - protein, 21 aa, Artificial Sequence
  Cyclic GFR-binding peptide
NSLQEIKPTKGIYYVIPLPEL

SEQ ID NO: 50021 - protein, 40 aa, Artificial Sequence; identical to SEQ ID NO: 9610
  Cyclic GFR-binding peptide
  MOD_RES (2), (34): Xaa is C or S

SEQ ID NO: 50022 - protein, 29 aa, Artificial Sequence
  Cyclic GFR-binding peptide
  MOD_RES (28), (29): Xaa is C or S
MDEYQKYVVKENEDIFLMSIPSLETPVXX

SEQ ID NO: 50023 - protein, 39 aa, Artificial Sequence; identical to SEQ ID NO: 9612
  Cyclic GFR-binding peptide
  MOD_RES (1), (33), (34): Xaa is C or S

SEQ ID NO: 50024 - protein, 21 aa, Artificial Sequence
  Cyclic GFR-binding peptide
NSLQEVVKENEDYYLMTLPEL

SEQ ID NO: 50025 - protein, 37 aa, Artificial Sequence; identical to SEQ ID NO: 9615
  Cyclic GFR-binding peptide
  MOD_RES (2), (34), (35): Xaa is C or S

SEQ ID NO: 50026 - protein, 38 aa, Artificial Sequence; identical to SEQ ID NO: 9614
  Cyclic GFR-binding peptide
  MOD_RES (2), (34), (35): Xaa is C or S

SEQ ID NO: 50027 - protein, 22 aa, Artificial Sequence
  Cyclic GFR-binding peptide
EYQKYIVNSSDDIFLVSIPSLQ

SEQ ID NO: 50028 - protein, 27 aa, Artificial Sequence
  Cyclic GFR-binding peptide
ARVVMNEYQKYIVNSSDDIFLVSIPSL

SEQ ID NO: 50029 - protein, 36 aa, Artificial Sequence; identical to SEQ ID NO: 9617
  Cyclic GFR-binding peptide
  MOD_RES (31), (32): Xaa is C or S

SEQ ID NO: 50030 - protein, 31 aa, Artificial Sequence
  Cyclic GFR-binding peptide
  MOD_RES (2), (2): Xaa is C or S
KXSRVIMNSLQEVKPKRGVYYLITLPELAQP

SEQ ID NO: 50031 - protein, 37 aa, Artificial Sequence; identical to SEQ ID NO: 9618
  Cyclic GFR-binding peptide
  MOD_RES (2), (4), (36), (37): Xaa is C or S

SEQ ID NO: 50032 - protein, 30 aa, Artificial Sequence
  Cyclic GFR-binding peptide
  MOD_RES (30), (30): Xaa is C or S
VVMNEYQKYIVNSSDDIFLVSIPSLQTPAX

SEQ ID NO: 50033 - protein, 24 aa, Artificial Sequence
  Cyclic GFR-binding peptide
MNNSLQEIVNSSDDYYLVTLPELK

SEQ ID NO: 50034 - protein, 29 aa, Artificial Sequence
  Cyclic GFR-binding peptide
  MOD_RES (27), (28): Xaa is C or S
MEYQKYVKPKRGVIFLISIPSLAQPVXXP

SEQ ID NO: 50035 - protein, 28 aa, Artificial Sequence
  Cyclic GFR-binding peptide
  MOD_RES (27), (28): Xaa is C or S
MEYQKYVKPTRGVIFLISIPSLDQPVXX

SEQ ID NO: 50036 - protein, 27 aa, Artificial Sequence
  Cyclic GFR-binding peptide
SRVVMNEYQKYIVNSSDDIFLVSIPSL

SEQ ID NO: 50037 - protein, 30 aa, Artificial Sequence
  Cyclic GFR-binding peptide
  MOD_RES (28), (29): Xaa is C or S
MDNSLQEVVKENEDYYVMPLPELETPVXXA

SEQ ID NO: 50038 - protein, 30 aa, Artificial Sequence; identical to SEQ ID NO: 9620
  Cyclic GFR-binding peptide

SEQ ID NO: 50039 - protein, 39 aa, Artificial Sequence; identical to SEQ ID NO: 9622
  Cyclic GFR-binding peptide
  MOD_RES (2), (4), (36), (37): Xaa is C or S

SEQ ID NO: 50040 - protein, 26 aa, Artificial Sequence
  Cyclic GFR-binding peptide
MEYQKYVKPKRGVIFLISIPSLAQPV

SEQ ID NO: 50041 - protein, 22 aa, Artificial Sequence
  Cyclic GFR-binding peptide
DNSLQEVVKENEDYYLMTLPEL

SEQ ID NO: 50042 - protein, 32 aa, Artificial Sequence
  Cyclic GFR-binding peptide
  MOD_RES (29), (30): Xaa is C or S
VMDEYQKYVVKENEDIFLMSIPSLETPVXXAK

SEQ ID NO: 50043 - protein, 29 aa, Artificial Sequence
  Cyclic GFR-binding peptide
  MOD_RES (2), (2): Xaa is C or S
GXSEVVMDQYNKLVVNNASDLYLISIASL

SEQ ID NO: 50044 - protein, 42 aa, Artificial Sequence; identical to SEQ ID NO: 9625
  Cyclic GFR-binding peptide
  MOD_RES (2), (4), (36), (37): Xaa is C or S

SEQ ID NO: 50045 - protein, 32 aa, Artificial Sequence
  Cyclic GFR-binding peptide
  MOD_RES (2), (2): Xaa is C or S
GXSRVVMNEYQKYIVNSSDDIFLVSIPSLKTP

SEQ ID NO: 50046 - protein, 34 aa, Artificial Sequence; identical to SEQ ID NO: 9627
  Cyclic GFR-binding peptide
  MOD_RES (2), (33), (34): Xaa is C or S

SEQ ID NO: 50047 - protein, 37 aa, Artificial Sequence; identical to SEQ ID NO: 9626
  Cyclic GFR-binding peptide
  MOD_RES (2), (34), (35): Xaa is C or S

SEQ ID NO: 50048 - protein, 38 aa, Artificial Sequence; identical to SEQ ID NO: 9628
  Cyclic GFR-binding peptide
  MOD_RES (2), (33), (34): Xaa is C or S

SEQ ID NO: 50049 - protein, 34 aa, Artificial Sequence; identical to SEQ ID NO: 9630
  Cyclic GFR-binding peptide
  MOD_RES (32), (33): Xaa is C or S

SEQ ID NO: 50050 - protein, 32 aa, Artificial Sequence
  Cyclic GFR-binding peptide
  MOD_RES (2), (4): Xaa is C or S
RXGXGEVVMDNSLQEVVKENEDYYVMPLPELE

SEQ ID NO: 50051 - protein, 37 aa, Artificial Sequence; identical to SEQ ID NO: 9631
  Cyclic GFR-binding peptide
  MOD_RES (1), (33), (34): Xaa is C or S

SEQ ID NO: 50052 - protein, 32 aa, Artificial Sequence
  Cyclic GFR-binding peptide
  MOD_RES (28), (29): Xaa is C or S
MDQYNKLVVNNASDLYLISIASLRTPVXXTPP

SEQ ID NO: 50053 - protein, 29 aa, Artificial Sequence
  Cyclic GFR-binding peptide
  MOD_RES (27), (28): Xaa is C or S
DNSLQEVVNNASDYYVIPLPELRTPVXXT

SEQ ID NO: 50054 - protein, 23 aa, Artificial Sequence
  Cyclic GFR-binding peptide
NSLQEIVNSSDDYYVVPLPELKT

SEQ ID NO: 50055 - protein, 42 aa, Artificial Sequence; identical to SEQ ID NO: 9632
  Cyclic GFR-binding peptide
  MOD_RES (2), (4), (36): Xaa is C or S

SEQ ID NO: 50056 - protein, 33 aa, Artificial Sequence; identical to SEQ ID NO: 9633
  Cyclic GFR-binding peptide
  MOD_RES (32), (33): Xaa is C or S

SEQ ID NO: 50057 - protein, 40 aa, Artificial Sequence; identical to SEQ ID NO: 9634
  Cyclic GFR-binding peptide
  MOD_RES (1), (3), (35), (36): Xaa is C or S

SEQ ID NO: 50058 - protein, 33 aa, Artificial Sequence
  Cyclic GFR-binding peptide
  MOD_RES (27), (28): Xaa is C or S
DQYNKLVVNNASDLYLISIASLRTPVXXTPPTS

SEQ ID NO: 50059 - protein, 26 aa, Artificial Sequence
  Cyclic GFR-binding peptide
VVMDQYNKLVVNNASDLYLISIASLR

SEQ ID NO: 50060 - protein, 31 aa, Artificial Sequence; identical to SEQ ID NO: 9635
  Cyclic GFR-binding peptide
  MOD_RES (31), (31): Xaa is C or S

SEQ ID NO: 50061 - protein, 30 aa, Artificial Sequence
  Cyclic GFR-binding peptide
  MOD_RES (27), (28): Xaa is C or S
EEYQKYVVKDYEDIFLMSIPSLETPVXXAK

SEQ ID NO: 50062 - protein, 27 aa, Artificial Sequence
  Cyclic GFR-binding peptide
IMEYQKYVKPKRGVIFLISIPSLAQPV

SEQ ID NO: 50063 - protein, 27 aa, Artificial Sequence
  Cyclic GFR-binding peptide
RVVMNNSLQEIVNSSDDYYLVTLPELK

SEQ ID NO: 50064 - protein, 30 aa, Artificial Sequence
  Cyclic GFR-binding peptide
  MOD_RES (2), (2): Xaa is C or S
GXSRVVMNEYQKYIVNSSDDIFLVSIPSLK

SEQ ID NO: 50065 - protein, 37 aa, Artificial Sequence; identical to SEQ ID NO: 9639
  Cyclic GFR-binding peptide
  MOD_RES (2), (4), (36), (37): Xaa is C or S

SEQ ID NO: 50066 - protein, 30 aa, Artificial Sequence
  Cyclic GFR-binding peptide
SRVVMNNSLQEIVNSSDDYYVVPLPELKTP

SEQ ID NO: 50067 - protein, 31 aa, Artificial Sequence
  Cyclic GFR-binding peptide
  MOD_RES (1), (3): Xaa is C or S
XGXGEVVMENSLQEVVKDYEDYYLMTLPELE

SEQ ID NO: 50068 - protein, 26 aa, Artificial Sequence
  Cyclic GFR-binding peptide
MDQYNKLVVNNASDLYLISIASLRTP

SEQ ID NO: 50069 - protein, 24 aa, Artificial Sequence
  Cyclic GFR-binding peptide
VVMDNSLQEVVNNASDYYVIPLPE

SEQ ID NO: 50070 - protein, 40 aa, Artificial Sequence; identical to SEQ ID NO: 9644
  Cyclic GFR-binding peptide
  MOD_RES (2), (4), (35), (36): Xaa is C or S

SEQ ID NO: 50071 - protein, 28 aa, Artificial Sequence
  Cyclic GFR-binding peptide
  MOD_RES (28), (28): Xaa is C or S
MNNSLQEIVNSSDDYYVVPLPELQTPAX

SEQ ID NO: 50072 - protein, 34 aa, Artificial Sequence
  Cyclic GFR-binding peptide
  MOD_RES (28), (29): Xaa is C or S
MNNSLQEIVNSSDDYYLVTLPELKTPAXXPKPVY

SEQ ID NO: 50073 - protein, 33 aa, Artificial Sequence
  Cyclic GFR-binding peptide
  MOD_RES (1), (3): Xaa is C or S
XGXARVVMNNSLQEIVNSSDDYYVVPLPELQTP

SEQ ID NO: 50074 - protein, 29 aa, Artificial Sequence
  Cyclic GFR-binding peptide
AAAAAAAAAEYQKYIKPTKGIIFLISIPS

SEQ ID NO: 50075 - protein, 31 aa, Artificial Sequence
  Cyclic GFR-binding peptide
  MOD_RES (2), (4): Xaa is C or S
HXGXARVVMNNSLQEIVNSSDDYYLVTLPEL

SEQ ID NO: 50076 - protein, 30 aa, Artificial Sequence
  Cyclic GFR-binding peptide
  MOD_RES (26), (27): Xaa is C or S
NSLQEIVNSSDDYYLVTLPELQTPAXXPKP

SEQ ID NO: 50077 - protein, 28 aa, Artificial Sequence
  Cyclic GFR-binding peptide
  MOD_RES (1), (1): Xaa is C or S
XSRVVMNNSLQEIVNSSDDYYVVPLPEL

SEQ ID NO: 50078 - protein, 32 aa, Artificial Sequence; identical to SEQ ID NO: 9647
  Cyclic GFR-binding peptide
  MOD_RES (1), (1): Xaa is C or S

SEQ ID NO: 50079 - protein, 36 aa, Artificial Sequence; identical to SEQ ID NO: 9650
  Cyclic GFR-binding peptide
  MOD_RES (31), (32): Xaa is C or S

SEQ ID NO: 50080 - protein, 21 aa, Artificial Sequence
  Cyclic GFR-binding peptide
EYQKYVKPTRGVIFLISIPSL

SEQ ID NO: 50081 - protein, 32 aa, Artificial Sequence; identical to SEQ ID NO: 9651
  Cyclic GFR-binding peptide
  MOD_RES (31), (32): Xaa is C or S

SEQ ID NO: 50082 - protein, 38 aa, Artificial Sequence; identical to SEQ ID NO: 9652
  Cyclic GFR-binding peptide
  MOD_RES (1), (3), (34), (35): Xaa is C or S

SEQ ID NO: 50083 - protein, 35 aa, Artificial Sequence
  Cyclic GFR-binding peptide
  MOD_RES (29), (29): Xaa is C or S
VMNNSLQEIVNSSDDYYVVPLPELKTPAXTPKTVH

SEQ ID NO: 50084 - protein, 27 aa, Artificial Sequence
  Cyclic GFR-binding peptide
  MOD_RES (26), (27): Xaa is C or S
NSLQEVVNNASDYYLITLPELRTPVXX

SEQ ID NO: 50085 - protein, 31 aa, Artificial Sequence
  Cyclic GFR-binding peptide
  MOD_RES (29), (30): Xaa is C or S
VMDNSLQEVVKENEDYYVMPLPELETPVXXA

SEQ ID NO: 50086 - protein, 33 aa, Artificial Sequence; identical to SEQ ID NO: 9654
  Cyclic GFR-binding peptide
  MOD_RES (1), (3): Xaa is C or S

SEQ ID NO: 50087 - protein, 34 aa, Artificial Sequence; identical to SEQ ID NO: 9658
  Cyclic GFR-binding peptide
  MOD_RES (32), (33): Xaa is C or S

SEQ ID NO: 50088 - protein, 32 aa, Artificial Sequence; identical to SEQ ID NO: 9659
  Cyclic GFR-binding peptide
  MOD_RES (1), (32): Xaa is C or S

SEQ ID NO: 50089 - protein, 37 aa, Artificial Sequence; identical to SEQ ID NO: 9661
  Cyclic GFR-binding peptide
  MOD_RES (2), (34), (35): Xaa is C or S

SEQ ID NO: 50090 - protein, 28 aa, Artificial Sequence
  Cyclic GFR-binding peptide
GEVVMEEYQKYVVKDYEDIFLMSIPSLE

SEQ ID NO: 50091 - protein, 32 aa, Artificial Sequence
  Cyclic GFR-binding peptide
  MOD_RES (1), (3): Xaa is C or S
XKXSKVIMNSLQEIKPTKGIYYVIPLPELDQS

SEQ ID NO: 50092 - protein, 32 aa, Artificial Sequence; identical to SEQ ID NO: 9668
  Cyclic GFR-binding peptide
  MOD_RES (31), (31): Xaa is C or S

SEQ ID NO: 50093 - protein, 33 aa, Artificial Sequence
  Cyclic GFR-binding peptide
  MOD_RES (29), (30): Xaa is C or S
VMNEYQKYIVNSSDDIFLVSIPSLQTPAXXPKP

SEQ ID NO: 50094 - protein, 30 aa, Artificial Sequence
  Cyclic GFR-binding peptide
  MOD_RES (1), (1): Xaa is C or S
XSRVVMNEYQKYIVNSSDDIFLVSIPSLKT

SEQ ID NO: 50095 - protein, 37 aa, Artificial Sequence; identical to SEQ ID NO: 9670
  Cyclic GFR-binding peptide
  MOD_RES (1), (3), (35): Xaa is C or S

SEQ ID NO: 50096 - protein, 32 aa, Artificial Sequence
  Cyclic GFR-binding peptide
  MOD_RES (2), (2): Xaa is C or S
GXSRVVMNNSLQEIVNSSDDYYLVTLPELKTP

SEQ ID NO: 50097 - protein, 26 aa, Artificial Sequence
  Cyclic GFR-binding peptide
ENSLQEVVKDYEDYYLMTLPELETPV

SEQ ID NO: 50098 - protein, 30 aa, Artificial Sequence
  Cyclic GFR-binding peptide
  MOD_RES (2), (2): Xaa is C or S
GXSEVVMDQYNKLVVNNASDLYLISIASLR

SEQ ID NO: 50099 - protein, 31 aa, Artificial Sequence
  Cyclic GFR-binding peptide
  MOD_RES (1), (3): Xaa is C or S
XGXGEVVMEEYQKYVVKDYEDIFLMSIPSLE

SEQ ID NO: 50100 - protein, 28 aa, Artificial Sequence
  Cyclic GFR-binding peptide
  MOD_RES (1), (1): Xaa is C or S
XGEVVMENSLQEVVKDYEDYYVMPLPEL

SEQ ID NO: 50101 - protein, 37 aa, Artificial Sequence; identical to SEQ ID NO: 9674
  Cyclic GFR-binding peptide
  MOD_RES (2), (33), (34): Xaa is C or S

SEQ ID NO: 50102 - protein, 34 aa, Artificial Sequence
  Cyclic GFR-binding peptide
  MOD_RES (2), (4): Xaa is C or S
RXGXGEVVMEEYQKYVVKDYEDIFLMSIPSLETP

SEQ ID NO: 50103 - protein, 25 aa, Artificial Sequence
  Cyclic GFR-binding peptide
VVMNSLQEVKPTRGVYYVIPLPELD

SEQ ID NO: 50104 - protein, 32 aa, Artificial Sequence
  Cyclic GFR-binding peptide
  MOD_RES (28), (28): Xaa is C or S
MNNSLQEIVNSSDDYYLVTLPELKTPAXTPKT

SEQ ID NO: 50105 - protein, 26 aa, Artificial Sequence
  Cyclic GFR-binding peptide
ENSLQEVVKDYEDYYVMPLPELETPV

SEQ ID NO: 50106 - protein, 26 aa, Artificial Sequence
  Cyclic GFR-binding peptide
SEVVMDQYNKLVVNNASDLYLISIAS

SEQ ID NO: 50107 - protein, 27 aa, Artificial Sequence
  Cyclic GFR-binding peptide
MDNSLQEVVNNASDYYLITLPELRTPV

SEQ ID NO: 50108 - protein, 26 aa, Artificial Sequence
  Cyclic GFR-binding peptide
GEVVMENSLQEVVKDYEDYYVMPLPE

SEQ ID NO: 50109 - protein, 31 aa, Artificial Sequence
  Cyclic GFR-binding peptide
  MOD_RES (30), (30): Xaa is C or S
VVMNEYQKYIVNSSDDIFLVSIPSLKTPAXT

SEQ ID NO: 50110 - protein, 39 aa, Artificial Sequence; identical to SEQ ID NO: 9680
  Cyclic GFR-binding peptide
  MOD_RES (2), (4), (35), (36): Xaa is C or S

SEQ ID NO: 50111 - protein, 22 aa, Artificial Sequence
  Cyclic GFR-binding peptide
NNSLQEIVNSSDDYYLVTLPEL

SEQ ID NO: 50112 - protein, 40 aa, Artificial Sequence; identical to SEQ ID NO: 9681
  Cyclic GFR-binding peptide
  MOD_RES (1), (3), (35), (36): Xaa is C or S

SEQ ID NO: 50113 - protein, 27 aa, Artificial Sequence
  Cyclic GFR-binding peptide
  MOD_RES (1), (1): Xaa is C or S
XGEVVMDNSLQEVVKENEDYYLMTLPE

SEQ ID NO: 50114 - protein, 32 aa, Artificial Sequence; identical to SEQ ID NO: 9684
  Cyclic GFR-binding peptide
  MOD_RES (31), (32): Xaa is C or S

SEQ ID NO: 50115 - protein, 34 aa, Artificial Sequence
  Cyclic GFR-binding peptide
  MOD_RES (29), (30): Xaa is C or S
VMDQYNKLVVNNASDLYLISIASLRTPVXXTPPT

SEQ ID NO: 50116 - protein, 32 aa, Artificial Sequence
  Cyclic GFR-binding peptide
  MOD_RES (27), (28): Xaa is C or S
DEYQKYVVKENEDIFLMSIPSLETPVXXAKPI

SEQ ID NO: 50117 - protein, 34 aa, Artificial Sequence; identical to SEQ ID NO: 9686
  Cyclic GFR-binding peptide
  MOD_RES (32), (33): Xaa is C or S

SEQ ID NO: 50118 - protein, 25 aa, Artificial Sequence
  Cyclic GFR-binding peptide
VVMNNSLQEIVNSSDDYYVVPLPEL

SEQ ID NO: 50119 - protein, 40 aa, Artificial Sequence; identical to SEQ ID NO: 9687
  Cyclic GFR-binding peptide
  MOD_RES (2), (34): Xaa is C or S

SEQ ID NO: 50120 - protein, 23 aa, Artificial Sequence
  Cyclic GFR-binding peptide
VMDNSLQEVVKENEDYYLMTLPE

SEQ ID NO: 50121 - protein, 32 aa, Artificial Sequence
  Cyclic GFR-binding peptide
  MOD_RES (28), (29): Xaa is C or S
MDNSLQEVVKENEDYYLMTLPELETPVXXAKP

SEQ ID NO: 50122 - protein, 38 aa, Artificial Sequence; identical to SEQ ID NO: 9688
  Cyclic GFR-binding peptide
  MOD_RES (1), (32), (33): Xaa is C or S

SEQ ID NO: 50123 - protein, 27 aa, Artificial Sequence
  Cyclic GFR-binding peptide
KVVMEYQKYVKPTRGVIFLISIPSLDQ

SEQ ID NO: 50124 - protein, 41 aa, Artificial Sequence; identical to SEQ ID NO: 9689
  Cyclic GFR-binding peptide
  MOD_RES (1), (3), (35), (36): Xaa is C or S

SEQ ID NO: 50125 - protein, 35 aa, Artificial Sequence; identical to SEQ ID NO: 9690
  Cyclic GFR-binding peptide
  MOD_RES (1), (3), (35): Xaa is C or S

SEQ ID NO: 50126 - protein, 27 aa, Artificial Sequence
  Cyclic GFR-binding peptide
  MOD_RES (27), (27): Xaa is C or S
NEYQKYIVNSSDDIFLVSIPSLQTPAX

SEQ ID NO: 50127 - protein, 31 aa, Artificial Sequence
  Cyclic GFR-binding peptide
  MOD_RES (28), (29): Xaa is C or S
IMNSLQEIKPTKGIYYVIPLPELDQSVXXPS

SEQ ID NO: 50128 - protein, 27 aa, Artificial Sequence
  Cyclic GFR-binding peptide
VMEEYQKYVVKDYEDIFLMSIPSLETP

SEQ ID NO: 50129 - protein, 34 aa, Artificial Sequence; identical to SEQ ID NO: 9691
  Cyclic GFR-binding peptide
  MOD_RES (2), (4): Xaa is C or S

SEQ ID NO: 50130 - protein, 33 aa, Artificial Sequence
  Cyclic GFR-binding peptide
  MOD_RES (28), (28): Xaa is C or S
MNNSLQEIVNSSDDYYVVPLPELKTPAXTPKTV

SEQ ID NO: 50131 - protein, 29 aa, Artificial Sequence
  Cyclic GFR-binding peptide
  MOD_RES (28), (29): Xaa is C or S
MNNSLQEIVNSSDDYYVVPLPELKTPAXX

SEQ ID NO: 50132 - protein, 28 aa, Artificial Sequence
  Cyclic GFR-binding peptide
  MOD_RES (27), (28): Xaa is C or S
NNSLQEIVNSSDDYYLVTLPELQTPAXX

SEQ ID NO: 50133 - protein, 36 aa, Artificial Sequence; identical to SEQ ID NO: 9695
  Cyclic GFR-binding peptide
  MOD_RES (1), (3), (35), (36): Xaa is C or S

SEQ ID NO: 50134 - protein, 36 aa, Artificial Sequence; identical to SEQ ID NO: 9696
  Cyclic GFR-binding peptide
  MOD_RES (2), (34): Xaa is C or S

SEQ ID NO: 50135 - protein, 39 aa, Artificial Sequence; identical to SEQ ID NO: 9697
  Cyclic GFR-binding peptide
  MOD_RES (1), (33), (34): Xaa is C or S

SEQ ID NO: 50136 - protein, 32 aa, Artificial Sequence
  Cyclic GFR-binding peptide
  MOD_RES (2), (2): Xaa is C or S
GXARVVMNNSLQEIVNSSDDYYLVTLPELQTP

SEQ ID NO: 50137 - protein, 28 aa, Artificial Sequence
  Cyclic GFR-binding peptide
  MOD_RES (28), (28): Xaa is C or S
MDEYQKYVVKENEDIFLMSIPSLETPVX

SEQ ID NO: 50138 - protein, 29 aa, Artificial Sequence
  Cyclic GFR-binding peptide
SRVVMNNSLQEIVNSSDDYYVVPLPELKT

SEQ ID NO: 50139 - protein, 27 aa, Artificial Sequence
  Cyclic GFR-binding peptide
  MOD_RES (26), (27): Xaa is C or S
EYQKYIVNSSDDIFLVSIPSLKTPAXX

SEQ ID NO: 50140 - protein, 29 aa, Artificial Sequence
  Cyclic GFR-binding peptide
VVMDNSLQEVVKENEDYYLMTLPELETPV

SEQ ID NO: 50141 - protein, 39 aa, Artificial Sequence; identical to SEQ ID NO: 9699
  Cyclic GFR-binding peptide
  MOD_RES (1), (3), (35), (36): Xaa is C or S

SEQ ID NO: 50142 - protein, 29 aa, Artificial Sequence
  Cyclic GFR-binding peptide
  MOD_RES (2), (2): Xaa is C or S
KXSRVIMNSLQEVKPKRGVYYLITLPELA

SEQ ID NO: 50143 - protein, 33 aa, Artificial Sequence; identical to SEQ ID NO: 9703
  Cyclic GFR-binding peptide
  MOD_RES (1), (3): Xaa is C or S

SEQ ID NO: 50144 - protein, 35 aa, Artificial Sequence; identical to SEQ ID NO: 9704
  Cyclic GFR-binding peptide
  MOD_RES (1), (3), (35): Xaa is C or S

SEQ ID NO: 50145 - protein, 37 aa, Artificial Sequence; identical to SEQ ID NO: 9705
  Cyclic GFR-binding peptide
  MOD_RES (1), (3), (35): Xaa is C or S

SEQ ID NO: 50146 - protein, 26 aa, Artificial Sequence
  Cyclic GFR-binding peptide
VVMDNSLQEVVNNASDYYLITLPELR

SEQ ID NO: 50147 - protein, 30 aa, Artificial Sequence
  Cyclic GFR-binding peptide
  MOD_RES (2), (4): Xaa is C or S
RXGXGEVVMENSLQEVVKDYEDYYLMTLPE

SEQ ID NO: 50148 - protein, 29 aa, Artificial Sequence
  Cyclic GFR-binding peptide
  MOD_RES (26), (27): Xaa is C or S
NSLQEVVKDYEDYYVMPLPELETPVXXAK

SEQ ID NO: 50149 - protein, 30 aa, Artificial Sequence
  Cyclic GFR-binding peptide
  MOD_RES (2), (2): Xaa is C or S
GXSRVVMNNSLQEIVNSSDDYYVVPLPELK

SEQ ID NO: 50150 - protein, 24 aa, Artificial Sequence
  Cyclic GFR-binding peptide
IMEYQKYVKPKRGVIFLISIPSLA

SEQ ID NO: 50151 - protein, 29 aa, Artificial Sequence
  Cyclic GFR-binding peptide
EVVMEEYQKYVVKDYEDIFLMSIPSLETP

SEQ ID NO: 50152 - protein, 29 aa, Artificial Sequence
  Cyclic GFR-binding peptide
  MOD_RES (1), (1): Xaa is C or S
XARVVMNNSLQEIVNSSDDYYVVPLPELQ

SEQ ID NO: 50153 - protein, 31 aa, Artificial Sequence
  Cyclic GFR-binding peptide
  MOD_RES (29), (30): Xaa is C or S
VIMNSLQEVKPKRGVYYLITLPELAQPVXXP

SEQ ID NO: 50154 - protein, 32 aa, Artificial Sequence
  Cyclic GFR-binding peptide
  MOD_RES (28), (29): Xaa is C or S
MENSLQEVVKDYEDYYVMPLPELETPVXXAKP

SEQ ID NO: 50155 - protein, 35 aa, Artificial Sequence
  Cyclic GFR-binding peptide
  MOD_RES (29), (30): Xaa is C or S
VVMEYQKYVKPTRGVIFLISIPSLDQPVXXPSASA

SEQ ID NO: 50156 - protein, 33 aa, Artificial Sequence
  Cyclic GFR-binding peptide
  MOD_RES (1), (3): Xaa is C or S
XGXGEVVMDNSLQEVVKENEDYYLMTLPELETP

SEQ ID NO: 50157 - protein, 24 aa, Artificial Sequence
  Cyclic GFR-binding peptide
VMDNSLQEVVNNASDYYLITLPEL

SEQ ID NO: 50158 - protein, 23 aa, Artificial Sequence
  Cyclic GFR-binding peptide
MNSLQEVKPTRGVYYVIPLPELD

SEQ ID NO: 50159 - protein, 31 aa, Artificial Sequence
  Cyclic GFR-binding peptide
  MOD_RES (27), (28): Xaa is C or S
DRYKKLVVNNASDFYLISIANLRTPVXXTPP

SEQ ID NO: 50160 - protein, 36 aa, Artificial Sequence; identical to SEQ ID NO: 9710
  Cyclic GFR-binding peptide
  MOD_RES (2), (4), (36): Xaa is C or S

SEQ ID NO: 50161 - protein, 28 aa, Artificial Sequence
  Cyclic GFR-binding peptide
  MOD_RES (26), (27): Xaa is C or S
NSLQEIKPTKGIYYVIPLPELDQSVXXP

SEQ ID NO: 50162 - protein, 38 aa, Artificial Sequence; identical to SEQ ID NO: 9712
  Cyclic GFR-binding peptide
  MOD_RES (1), (3), (35), (36): Xaa is C or S

SEQ ID NO: 50163 - protein, 24 aa, Artificial Sequence
  Cyclic GFR-binding peptide
DQYNKLVVNNASDLYLISIASLRT

SEQ ID NO: 50164 - protein, 29 aa, Artificial Sequence
  Cyclic GFR-binding peptide
VVMNEYQKYIVNSSDDIFLVSIPSLQTPA

SEQ ID NO: 50165 - protein, 32 aa, Artificial Sequence; identical to SEQ ID NO: 9716
  Cyclic GFR-binding peptide
  MOD_RES (31), (32): Xaa is C or S

SEQ ID NO: 50166 - protein, 26 aa, Artificial Sequence
  Cyclic GFR-binding peptide
NNSLQEIVNSSDDYYLVTLPELQTPA

SEQ ID NO: 50167 - protein, 32 aa, Artificial Sequence
  Cyclic GFR-binding peptide
  MOD_RES (1), (3): Xaa is C or S
XKXSRVIMNSLQEVKPKRGVYYLITLPELAQP

SEQ ID NO: 50168 - protein, 27 aa, Artificial Sequence
  Cyclic GFR-binding peptide
  MOD_RES (26), (27): Xaa is C or S
QYNKLVVNNASDLYLISIASLRTPVXX

SEQ ID NO: 50169 - protein, 26 aa, Artificial Sequence
  Cyclic GFR-binding peptide
NEYQKYIVNSSDDIFLVSIPSLQTPA

SEQ ID NO: 50170 - protein, 29 aa, Artificial Sequence
  Cyclic GFR-binding peptide
  MOD_RES (27), (28): Xaa is C or S
DNSLQEVVNNASDYYLITLPELRTPVXXT

SEQ ID NO: 50171 - protein, 26 aa, Artificial Sequence
  Cyclic GFR-binding peptide
GEVVMEEYQKYVVKDYEDIFLMSIPS

SEQ ID NO: 50172 - protein, 36 aa, Artificial Sequence; identical to SEQ ID NO: 9720
  Cyclic GFR-binding peptide
  MOD_RES (2), (34), (35): Xaa is C or S

SEQ ID NO: 50173 - protein, 30 aa, Artificial Sequence
  Cyclic GFR-binding peptide
  MOD_RES (26), (27): Xaa is C or S
EYQKYIVNSSDDIFLVSIPSLKTPAXXPKP

SEQ ID NO: 50174 - protein, 27 aa, Artificial Sequence
  Cyclic GFR-binding peptide
VVMENSLQEVVKDYEDYYVMPLPELET

SEQ ID NO: 50175 - protein, 31 aa, Artificial Sequence
  Cyclic GFR-binding peptide
  MOD_RES (30), (31): Xaa is C or S
KVVMEYQKYVKPTRGVIFLISIPSLDQPVXX

SEQ ID NO: 50176 - protein, 38 aa, Artificial Sequence; identical to SEQ ID NO: 9721
  Cyclic GFR-binding peptide
  MOD_RES (1), (32), (33): Xaa is C or S

SEQ ID NO: 50177 - protein, 29 aa, Artificial Sequence
  Cyclic GFR-binding peptide
  MOD_RES (1), (3): Xaa is C or S
XGXSEVVMDQYNKLVVNNASDLYLISIAS

SEQ ID NO: 50178 - protein, 35 aa, Artificial Sequence; identical to SEQ ID NO: 9722
  Cyclic GFR-binding peptide
  MOD_RES (2), (4): Xaa is C or S

SEQ ID NO: 50179 - protein, 40 aa, Artificial Sequence; identical to SEQ ID NO: 9723
  Cyclic GFR-binding peptide
  MOD_RES (1), (3), (35), (36): Xaa is C or S

SEQ ID NO: 50180 - protein, 30 aa, Artificial Sequence
  Cyclic GFR-binding peptide
  MOD_RES (1), (3): Xaa is C or S
XGXSEVVMDQYNKLVVNNASDLYLISIASL

SEQ ID NO: 50181 - protein, 31 aa, Artificial Sequence
  Cyclic GFR-binding peptide
  MOD_RES (29), (30): Xaa is C or S
VIMNSLQEIKPTKGIYYVIPLPELDQSVXXP

SEQ ID NO: 50182 - protein, 31 aa, Artificial Sequence
  Cyclic GFR-binding peptide
  MOD_RES (28), (29): Xaa is C or S
MENSLQEVVKDYEDYYVMPLPELETPVXXAK

SEQ ID NO: 50183 - protein, 31 aa, Artificial Sequence
  Cyclic GFR-binding peptide
  MOD_RES (26), (27): Xaa is C or S
NSLQEIKPTKGIYYVIPLPELDQSVXXPSAS

SEQ ID NO: 50184 - protein, 28 aa, Artificial Sequence
  Cyclic GFR-binding peptide
EVVMDRYKKLVVNNASDFYLISIANLRT

SEQ ID NO: 50185 - protein, 28 aa, Artificial Sequence
  Cyclic GFR-binding peptide
KVIMNSLQEIKPTKGIYYVIPLPELDQS

SEQ ID NO: 50186 - protein, 33 aa, Artificial Sequence
  Cyclic GFR-binding peptide
  MOD_RES (27), (28): Xaa is C or S
NNSLQEIVNSSDDYYVVPLPELQTPAXXPKPVT

SEQ ID NO: 50187 - protein, 29 aa, Artificial Sequence
  Cyclic GFR-binding peptide
GEVVMDEYQKYVVKENEDIFLMSIPSLET

SEQ ID NO: 50188 - protein, 33 aa, Artificial Sequence; identical to SEQ ID NO: 9725
  Cyclic GFR-binding peptide
  MOD_RES (1), (32), (33): Xaa is C or S

SEQ ID NO: 50189 - protein, 25 aa, Artificial Sequence
  Cyclic GFR-binding peptide
EYQKYVVKENEDIFLMSIPSLETPV

SEQ ID NO: 50190 - protein, 26 aa, Artificial Sequence
  Cyclic GFR-binding peptide
  MOD_RES (26), (26): Xaa is C or S
NSLQEVVKENEDYYVMPLPELETPVX

SEQ ID NO: 50191 - protein, 30 aa, Artificial Sequence
  Cyclic GFR-binding peptide
  MOD_RES (1), (1): Xaa is C or S
XARVVMNEYQKYIVNSSDDIFLVSIPSLQT

SEQ ID NO: 50192 - protein, 34 aa, Artificial Sequence
  Cyclic GFR-binding peptide
  MOD_RES (28), (29): Xaa is C or S
MNEYQKYIVNSSDDIFLVSIPSLQTPAXXPKPVT

SEQ ID NO: 50193 - protein, 27 aa, Artificial Sequence
  Cyclic GFR-binding peptide
VIMEYQKYIKPTKGIIFLISIPSLDQS

SEQ ID NO: 50194 - protein, 28 aa, Artificial Sequence
  Cyclic GFR-binding peptide
  MOD_RES (28), (28): Xaa is C or S
MENSLQEVVKDYEDYYVMPLPELETPVX

SEQ ID NO: 50195 - protein, 26 aa, Artificial Sequence
  Cyclic GFR-binding peptide
VMENSLQEVVKDYEDYYLMTLPELET

SEQ ID NO: 50196 - protein, 32 aa, Artificial Sequence
  Cyclic GFR-binding peptide
  MOD_RES (29), (30): Xaa is C or S
VVMNSLQEVKPTRGVYYVIPLPELDQPVXXPS

SEQ ID NO: 50197 - protein, 29 aa, Artificial Sequence
  Cyclic GFR-binding peptide
  MOD_RES (1), (3): Xaa is C or S
XKXSKVIMNSLQEIKPTKGIYYVIPLPEL

SEQ ID NO: 50198 - protein, 36 aa, Artificial Sequence; identical to SEQ ID NO: 9733
  Cyclic GFR-binding peptide
  MOD_RES (31), (32): Xaa is C or S

SEQ ID NO: 50199 - protein, 35 aa, Artificial Sequence
  Cyclic GFR-binding peptide
  MOD_RES (30), (31): Xaa is C or S
VVMNNSLQEIVNSSDDYYVVPLPELQTPAXXPKPV

SEQ ID NO: 50200 - protein, 22 aa, Artificial Sequence
  Cyclic GFR-binding peptide
MDNSLQEVVNNASDYYVIPLPE

SEQ ID NO: 50201 - protein, 34 aa, Artificial Sequence; identical to SEQ ID NO: 9734
  Cyclic GFR-binding peptide
  MOD_RES (1), (3): Xaa is C or S

SEQ ID NO: 50202 - protein, 30 aa, Artificial Sequence
  Cyclic GFR-binding peptide
  MOD_RES (30), (30): Xaa is C or S
VVMENSLQEVVKDYEDYYLMTLPELETPVX

SEQ ID NO: 50203 - protein, 34 aa, Artificial Sequence
  Cyclic GFR-binding peptide
  MOD_RES (28), (28): Xaa is C or S
MNNSLQEIVNSSDDYYVVPLPELKTPAXTPKTVH

SEQ ID NO: 50204 - protein, 26 aa, Artificial Sequence
  Cyclic GFR-binding peptide
  MOD_RES (26), (26): Xaa is C or S
NSLQEVVNNASDYYLITLPELRTPVX

SEQ ID NO: 50205 - protein, 32 aa, Artificial Sequence; identical to SEQ ID NO: 9738
  Cyclic GFR-binding peptide
  MOD_RES (31), (32): Xaa is C or S

SEQ ID NO: 50206 - protein, 26 aa, Artificial Sequence
  Cyclic GFR-binding peptide
VVMDNSLQEVVKENEDYYLMTLPELE

SEQ ID NO: 50207 - protein, 30 aa, Artificial Sequence
  Cyclic GFR-binding peptide
  MOD_RES (1), (1): Xaa is C or S
XSEVVMDNSLQEVVNNASDYYLITLPELRT

SEQ ID NO: 50208 - protein, 32 aa, Artificial Sequence
  Cyclic GFR-binding peptide
  MOD_RES (27), (28): Xaa is C or S
DNSLQEVVNNASDYYLITLPELRTPVXXTPPT

SEQ ID NO: 50209 - protein, 29 aa, Artificial Sequence
  Cyclic GFR-binding peptide
  MOD_RES (1), (1): Xaa is C or S
XGEVVMEEYQKYVVKDYEDIFLMSIPSLE

SEQ ID NO: 50210 - protein, 33 aa, Artificial Sequence
  Cyclic GFR-binding peptide
  MOD_RES (30), (30): Xaa is C or S
VVMNNSLQEIVNSSDDYYVVPLPELKTPAXTPK

SEQ ID NO: 50211 - protein, 32 aa, Artificial Sequence
  Cyclic GFR-binding peptide
  MOD_RES (29), (30): Xaa is C or S
VMEEYQKYVVKDYEDIFLMSIPSLETPVXXAK

SEQ ID NO: 50212 - protein, 28 aa, Artificial Sequence
  Cyclic GFR-binding peptide
  MOD_RES (1), (1): Xaa is C or S
XGEVVMDEYQKYVVKENEDIFLMSIPSL

SEQ ID NO: 50213 - protein, 37 aa, Artificial Sequence; identical to SEQ ID NO: 9740
  Cyclic GFR-binding peptide
  MOD_RES (2), (34), (35): Xaa is C or S

SEQ ID NO: 50214 - protein, 20 aa, Artificial Sequence
  Cyclic GFR-binding peptide
NSLQEVKPTRGVYYVIPLPE

SEQ ID NO: 50215 - protein, 30 aa, Artificial Sequence
  Cyclic GFR-binding peptide
  MOD_RES (28), (29): Xaa is C or S
IMEYQKYVKPKRGVIFLISIPSLAQPVXXP

SEQ ID NO: 50216 - protein, 40 aa, Artificial Sequence; identical to SEQ ID NO: 9741
  Cyclic GFR-binding peptide
  MOD_RES (2), (34), (35): Xaa is C or S

SEQ ID NO: 50217 - protein, 29 aa, Artificial Sequence
  Cyclic GFR-binding peptide
SRVIMEYQKYVKPKRGVIFLISIPSLAQP

SEQ ID NO: 50218 - protein, 22 aa, Artificial Sequence
  Cyclic GFR-binding peptide
NEYQKYIVNSSDDIFLVSIPSL

SEQ ID NO: 50219 - protein, 21 aa, Artificial Sequence
  Cyclic GFR-binding peptide
MNSLQEVKPTRGVYYVIPLPE

SEQ ID NO: 50220 - protein, 28 aa, Artificial Sequence
  Cyclic GFR-binding peptide
  MOD_RES (28), (28): Xaa is C or S
MDQYNKLVVNNASDLYLISIASLRTPVX

SEQ ID NO: 50221 - protein, 36 aa, Artificial Sequence; identical to SEQ ID NO: 9742
  Cyclic GFR-binding peptide
  MOD_RES (1), (32), (33): Xaa is C or S

SEQ ID NO: 50222 - protein, 24 aa, Artificial Sequence
  Cyclic GFR-binding peptide
NSLQEVKPKRGVYYLITLPELAQP

SEQ ID NO: 50223 - protein, 34 aa, Artificial Sequence
  Cyclic GFR-binding peptide
  MOD_RES (2), (4): Xaa is C or S
HXGXSRVVMNNSLQEIVNSSDDYYLVTLPELKTP

SEQ ID NO: 50224 - protein, 33 aa, Artificial Sequence
  Cyclic GFR-binding peptide
  MOD_RES (27), (28): Xaa is C or S
DNSLQEVVNNASDYYVIPLPELRTPVXXTPPTS

SEQ ID NO: 50225 - protein, 33 aa, Artificial Sequence; identical to SEQ ID NO: 9745
  Cyclic GFR-binding peptide
  MOD_RES (32), (33): Xaa is C or S

SEQ ID NO: 50226 - protein, 33 aa, Artificial Sequence; identical to SEQ ID NO: 9746
  Cyclic GFR-binding peptide
  MOD_RES (32), (33): Xaa is C or S

SEQ ID NO: 50227 - protein, 31 aa, Artificial Sequence
  Cyclic GFR-binding peptide
  MOD_RES (2), (2): Xaa is C or S
GXARVVMNNSLQEIVNSSDDYYVVPLPELQT

SEQ ID NO: 50228 - protein, 22 aa, Artificial Sequence
  Cyclic GFR-binding peptide
NSLQEVKPKRGVYYLITLPELA

SEQ ID NO: 50229 - protein, 29 aa, Artificial Sequence
  Cyclic GFR-binding peptide
EVVMDNSLQEVVKENEDYYVMPLPELETP

SEQ ID NO: 50230 - protein, 28 aa, Artificial Sequence
  Cyclic GFR-binding peptide
  MOD_RES (28), (28): Xaa is C or S
VMEYQKYVKPTRGVIFLISIPSLDQPVX

SEQ ID NO: 50231 - protein, 31 aa, Artificial Sequence
  Cyclic GFR-binding peptide
  MOD_RES (27), (28): Xaa is C or S
DEYQKYVVKENEDIFLMSIPSLETPVXXAKP

SEQ ID NO: 50232 - protein, 37 aa, Artificial Sequence; identical to SEQ ID NO: 9749
  Cyclic GFR-binding peptide
  MOD_RES (32), (33): Xaa is C or S

SEQ ID NO: 50233 - protein, 39 aa, Artificial Sequence; identical to SEQ ID NO: 9751
  Cyclic GFR-binding peptide
  MOD_RES (1), (3), (35), (36): Xaa is C or S

SEQ ID NO: 50234 - protein, 32 aa, Artificial Sequence
  Cyclic GFR-binding peptide
  MOD_RES (30), (31): Xaa is C or S
KVVMEYQKYVKPTRGVIFLISIPSLDQPVXXP

SEQ ID NO: 50235 - protein, 33 aa, Artificial Sequence; identical to SEQ ID NO: 9753
  Cyclic GFR-binding peptide
  MOD_RES (2), (2): Xaa is C or S

SEQ ID NO: 50236 - protein, 35 aa, Artificial Sequence
  Cyclic GFR-binding peptide
  MOD_RES (29), (30): Xaa is C or S
VMNNSLQEIVNSSDDYYLVTLPELQTPAXXPKPVT

SEQ ID NO: 50237 - protein, 25 aa, Artificial Sequence
  Cyclic GFR-binding peptide
KVIMNSLQEIKPTKGIYYVIPLPEL

SEQ ID NO: 50238 - protein, 29 aa, Artificial Sequence
  Cyclic GFR-binding peptide
EVVMDNSLQEVVNNASDYYLITLPELRTP

SEQ ID NO: 50239 - protein, 22 aa, Artificial Sequence
  Cyclic GFR-binding peptide
MEYQKYIKPTKGIIFLISIPSL

SEQ ID NO: 50240 - protein, 31 aa, Artificial Sequence
  Cyclic GFR-binding peptide
  MOD_RES (1), (1): Xaa is C or S
XGEVVMDNSLQEVVKENEDYYLMTLPELETP

SEQ ID NO: 50241 - protein, 34 aa, Artificial Sequence
  Cyclic GFR-binding peptide
  MOD_RES (2), (4): Xaa is C or S
RXGXSEVVMDRYKKLVVNNASDFYLISIANLRTP

SEQ ID NO: 50242 - protein, 34 aa, Artificial Sequence
  Cyclic GFR-binding peptide
  MOD_RES (30), (31): Xaa is C or S
VVMDQYNKLVVNNASDLYLISIASLRTPVXXTPP

SEQ ID NO: 50243 - protein, 34 aa, Artificial Sequence; identical to SEQ ID NO: 9756
  Cyclic GFR-binding peptide
  MOD_RES (31), (32): Xaa is C or S

SEQ ID NO: 50244 - protein, 25 aa, Artificial Sequence
  Cyclic GFR-binding peptide
VMDNSLQEVVKENEDYYLMTLPELE

SEQ ID NO: 50245 - protein, 42 aa, Artificial Sequence; identical to SEQ ID NO: 9757
  Cyclic GFR-binding peptide
  MOD_RES (2), (4), (36), (37): Xaa is C or S

SEQ ID NO: 50246 - protein, 39 aa, Artificial Sequence; identical to SEQ ID NO: 9759
  Cyclic GFR-binding peptide
  MOD_RES (2), (4), (36), (37): Xaa is C or S

SEQ ID NO: 50247 - protein, 34 aa, Artificial Sequence
  Cyclic GFR-binding peptide
  MOD_RES (29), (30): Xaa is C or S
VMDNSLQEVVKENEDYYVMPLPELETPVXXAKPI

SEQ ID NO: 50248 - protein, 23 aa, Artificial Sequence
  Cyclic GFR-binding peptide
NSLQEVVNNASDYYLITLPELRT

SEQ ID NO: 50249 - protein, 32 aa, Artificial Sequence
  Cyclic GFR-binding peptide
  MOD_RES (27), (28): Xaa is C or S
DNSLQEVVKENEDYYLMTLPELETPVXXAKPI

SEQ ID NO: 50250 - protein, 38 aa, Artificial Sequence; identical to SEQ ID NO: 9760
  Cyclic GFR-binding peptide
  MOD_RES (2), (33), (34): Xaa is C or S

SEQ ID NO: 50251 - protein, 38 aa, Artificial Sequence; identical to SEQ ID NO: 9761
  Cyclic GFR-binding peptide
  MOD_RES (1), (3), (35), (36): Xaa is C or S

SEQ ID NO: 50252 - protein, 31 aa, Artificial Sequence
  Cyclic GFR-binding peptide
  MOD_RES (1), (1): Xaa is C or S
XSRVVMNEYQKYIVNSSDDIFLVSIPSLKTP

SEQ ID NO: 50253 - protein, 23 aa, Artificial Sequence
  Cyclic GFR-binding peptide
VVMEYQKYVKPTRGVIFLISIPS

SEQ ID NO: 50254 - protein, 35 aa, Artificial Sequence; identical to SEQ ID NO: 9763
  Cyclic GFR-binding peptide
  MOD_RES (32), (33): Xaa is C or S

SEQ ID NO: 50255 - protein, 25 aa, Artificial Sequence
  Cyclic GFR-binding peptide
DEYQKYVVKENEDIFLMSIPSLETP

SEQ ID NO: 50256 - protein, 35 aa, Artificial Sequence; identical to SEQ ID NO: 9768
  Cyclic GFR-binding peptide
  MOD_RES (2), (34), (35): Xaa is C or S

SEQ ID NO: 50257 - protein, 35 aa, Artificial Sequence; identical to SEQ ID NO: 9769
  Cyclic GFR-binding peptide
  MOD_RES (31), (32): Xaa is C or S

SEQ ID NO: 50258 - protein, 34 aa, Artificial Sequence
  Cyclic GFR-binding peptide
  MOD_RES (29), (29): Xaa is C or S
VMNEYQKYIVNSSDDIFLVSIPSLKTPAXTPKTV

SEQ ID NO: 50259 - protein, 37 aa, Artificial Sequence; identical to SEQ ID NO: 9771
  Cyclic GFR-binding peptide
  MOD_RES (1), (3), (34), (35): Xaa is C or S

SEQ ID NO: 50260 - protein, 36 aa, Artificial Sequence
  Cyclic GFR-binding peptide
  MOD_RES (30), (31): Xaa is C or S
VVMNNSLQEIVNSSDDYYLVTLPELQTPAXXPKPVT

SEQ ID NO: 50261 - protein, 26 aa, Artificial Sequence
  Cyclic GFR-binding peptide
  MOD_RES (1), (1): Xaa is C or S
XSKVIMEYQKYIKPTKGIIFLISIPS

SEQ ID NO: 50262 - protein, 29 aa, Artificial Sequence
  Cyclic GFR-binding peptide
AAAAAAAAAEYQKYVVNNASDIFLISIPS

SEQ ID NO: 50263 - protein, 24 aa, Artificial Sequence
  Cyclic GFR-binding peptide
VMDNSLQEVVKENEDYYLMTLPEL

SEQ ID NO: 50264 - protein, 34 aa, Artificial Sequence; identical to SEQ ID NO: 9772
  Cyclic GFR-binding peptide
  MOD_RES (1), (3): Xaa is C or S

SEQ ID NO: 50265 - protein, 30 aa, Artificial Sequence
  Cyclic GFR-binding peptide
  MOD_RES (27), (28): Xaa is C or S
ENSLQEVVKDYEDYYLMTLPELETPVXXAK

SEQ ID NO: 50266 - protein, 28 aa, Artificial Sequence
  Cyclic GFR-binding peptide
  MOD_RES (28), (28): Xaa is C or S
MDRYKKLVVNNASDFYLISIANLRTPVX

SEQ ID NO: 50267 - protein, 29 aa, Artificial Sequence
  Cyclic GFR-binding peptide
  MOD_RES (28), (29): Xaa is C or S
MDNSLQEVVKENEDYYLMTLPELETPVXX

SEQ ID NO: 50268 - protein, 27 aa, Artificial Sequence
  Cyclic GFR-binding peptide
  MOD_RES (2), (2): Xaa is C or S
KXSKVVMEYQKYVKPTRGVIFLISIPS

SEQ ID NO: 50269 - protein, 39 aa, Artificial Sequence; identical to SEQ ID NO: 9775
  Cyclic GFR-binding peptide
  MOD_RES (1), (3), (35), (36): Xaa is C or S

SEQ ID NO: 50270 - protein, 21 aa, Artificial Sequence
  Cyclic GFR-binding peptide
EYQKYVVKENEDIFLMSIPSL

SEQ ID NO: 50271 - protein, 34 aa, Artificial Sequence
  Cyclic GFR-binding peptide
  MOD_RES (29), (30): Xaa is C or S
VMDNSLQEVVNNASDYYVIPLPELRTPVXXTPPT

SEQ ID NO: 50272 - protein, 31 aa, Artificial Sequence
  Cyclic GFR-binding peptide
  MOD_RES (28), (28): Xaa is C or S
MNNSLQEIVNSSDDYYVVPLPELKTPAXTPK

SEQ ID NO: 50273 - protein, 29 aa, Artificial Sequence
  Cyclic GFR-binding peptide
  MOD_RES (1), (1): Xaa is C or S
XSKVIMEYQKYIKPTKGIIFLISIPSLDQ

SEQ ID NO: 50274 - protein, 23 aa, Artificial Sequence
  Cyclic GFR-binding peptide
NSLQEIVNSSDDYYLVTLPELQT

SEQ ID NO: 50275 - protein, 40 aa, Artificial Sequence; identical to SEQ ID NO: 9777
  Cyclic GFR-binding peptide
  MOD_RES (2), (4), (36): Xaa is C or S

SEQ ID NO: 50276 - protein, 29 aa, Artificial Sequence
  Cyclic GFR-binding peptide
  MOD_RES (1), (3): Xaa is C or S
XGXSEVVMDNSLQEVVNNASDYYVIPLPE

SEQ ID NO: 50277 - protein, 32 aa, Artificial Sequence
  Cyclic GFR-binding peptide
  MOD_RES (29), (30): Xaa is C or S
VMNNSLQEIVNSSDDYYVVPLPELQTPAXXPK

SEQ ID NO: 50278 - protein, 29 aa, Artificial Sequence
  Cyclic GFR-binding peptide
  MOD_RES (2), (2): Xaa is C or S
GXSEVVMDNSLQEVVNNASDYYVIPLPEL

SEQ ID NO: 50279 - protein, 26 aa, Artificial Sequence
  Cyclic GFR-binding peptide
  MOD_RES (26), (26): Xaa is C or S
EYQKYIKPTKGIIFLISIPSLDQSVX

SEQ ID NO: 50280 - protein, 35 aa, Artificial Sequence; identical to SEQ ID NO: 9779
  Cyclic GFR-binding peptide
  MOD_RES (32), (33): Xaa is C or S

SEQ ID NO: 50281 - protein, 27 aa, Artificial Sequence
  Cyclic GFR-binding peptide
  MOD_RES (26), (27): Xaa is C or S
EYQKYIKPTKGIIFLISIPSLDQSVXX

SEQ ID NO: 50282 - protein, 31 aa, Artificial Sequence
  Cyclic GFR-binding peptide
  MOD_RES (2), (2): Xaa is C or S
GXSEVVMDNSLQEVVNNASDYYLITLPELRT

SEQ ID NO: 50283 - protein, 26 aa, Artificial Sequence
  Cyclic GFR-binding peptide
MDNSLQEVVNNASDYYLITLPELRTP

SEQ ID NO: 50284 - protein, 39 aa, Artificial Sequence; identical to SEQ ID NO: 9780
  Cyclic GFR-binding peptide
  MOD_RES (1), (3), (35), (36): Xaa is C or S

SEQ ID NO: 50285 - protein, 30 aa, Artificial Sequence
  Cyclic GFR-binding peptide
  MOD_RES (1), (3): Xaa is C or S
XGXSEVVMDNSLQEVVNNASDYYVIPLPEL

SEQ ID NO: 50286 - protein, 39 aa, Artificial Sequence; identical to SEQ ID NO: 9781
  Cyclic GFR-binding peptide
  MOD_RES (2), (34), (35): Xaa is C or S

SEQ ID NO: 50287 - protein, 33 aa, Artificial Sequence
  Cyclic GFR-binding peptide
  MOD_RES (30), (31): Xaa is C or S
VVMENSLQEVVKDYEDYYVMPLPELETPVXXAK

SEQ ID NO: 50288 - protein, 35 aa, Artificial Sequence
  Cyclic GFR-binding peptide
  MOD_RES (30), (31): Xaa is C or S
VVMNNSLQEIVNSSDDYYVVPLPELKTPAXXPKPV

SEQ ID NO: 50289 - protein, 33 aa, Artificial Sequence
  Cyclic GFR-binding peptide
  MOD_RES (28), (29): Xaa is C or S
VMEYQKYVKPTRGVIFLISIPSLDQPVXXPSAS

SEQ ID NO: 50290 - protein, 32 aa, Artificial Sequence
  Cyclic GFR-binding peptide
  MOD_RES (26), (27): Xaa is C or S
EYQKYIVNSSDDIFLVSIPSLKTPAXXPKPVY

SEQ ID NO: 50291 - protein, 27 aa, Artificial Sequence
  Cyclic GFR-binding peptide
GEVVMENSLQEVVKDYEDYYVMPLPEL

SEQ ID NO: 50292 - protein, 37 aa, Artificial Sequence; identical to SEQ ID NO: 9784
  Cyclic GFR-binding peptide
  MOD_RES (1), (32), (33): Xaa is C or S

SEQ ID NO: 50293 - protein, 21 aa, Artificial Sequence
  Cyclic GFR-binding peptide
NSLQEVVKDYEDYYVMPLPEL

SEQ ID NO: 50294 - protein, 21 aa, Artificial Sequence
  Cyclic GFR-binding peptide
NSLQEVVNNASDYYLITLPEL

SEQ ID NO: 50295 - protein, 27 aa, Artificial Sequence
  Cyclic GFR-binding peptide
VVMNNSLQEIVNSSDDYYLVTLPELQT

SEQ ID NO: 50296 - protein, 41 aa, Artificial Sequence; identical to SEQ ID NO: 9786
  Cyclic GFR-binding peptide
  MOD_RES (1), (3), (35): Xaa is C or S

SEQ ID NO: 50297 - protein, 27 aa, Artificial Sequence
  Cyclic GFR-binding peptide
  MOD_RES (1), (1): Xaa is C or S
XSKVIMNSLQEIKPTKGIYYVIPLPEL

SEQ ID NO: 50298 - protein, 35 aa, Artificial Sequence; identical to SEQ ID NO: 9787
  Cyclic GFR-binding peptide
  MOD_RES (31), (32): Xaa is C or S

SEQ ID NO: 50299 - protein, 29 aa, Artificial Sequence
  Cyclic GFR-binding peptide
  MOD_RES (26), (27): Xaa is C or S
NSLQEIVNSSDDYYLVTLPELQTPAXXPK

SEQ ID NO: 50300 - protein, 26 aa, Artificial Sequence
  Cyclic GFR-binding peptide
MNSLQEVKPTRGVYYVIPLPELDQPV

SEQ ID NO: 50301 - protein, 38 aa, Artificial Sequence; identical to SEQ ID NO: 9789
  Cyclic GFR-binding peptide
  MOD_RES (2), (34), (35): Xaa is C or S

SEQ ID NO: 50302 - protein, 30 aa, Artificial Sequence; identical to SEQ ID NO: 9790
  Cyclic GFR-binding peptide

SEQ ID NO: 50303 - protein, 31 aa, Artificial Sequence
  Cyclic GFR-binding peptide
  MOD_RES (28), (29): Xaa is C or S
MNEYQKYIVNSSDDIFLVSIPSLQTPAXXPK

SEQ ID NO: 50304 - protein, 29 aa, Artificial Sequence
  Cyclic GFR-binding peptide
  MOD_RES (26), (26): Xaa is C or S
NSLQEIVNSSDDYYVVPLPELKTPAXTPK

SEQ ID NO: 50305 - protein, 28 aa, Artificial Sequence
  Cyclic GFR-binding peptide
VVMENSLQEVVKDYEDYYLMTLPELETP

SEQ ID NO: 50306 - protein, 24 aa, Artificial Sequence
  Cyclic GFR-binding peptide
VMEYQKYVKPTRGVIFLISIPSLD

SEQ ID NO: 50307 - protein, 21 aa, Artificial Sequence
  Cyclic GFR-binding peptide
EYQKYVKPKRGVIFLISIPSL

SEQ ID NO: 50308 - protein, 35 aa, Artificial Sequence; identical to SEQ ID NO: 9793
  Cyclic GFR-binding peptide
  MOD_RES (2), (34), (35): Xaa is C or S

SEQ ID NO: 50309 - protein, 26 aa, Artificial Sequence
  Cyclic GFR-binding peptide
  MOD_RES (26), (26): Xaa is C or S
EYQKYIVNSSDDIFLVSIPSLQTPAX

SEQ ID NO: 50310 - protein, 37 aa, Artificial Sequence; identical to SEQ ID NO: 9796
  Cyclic GFR-binding peptide
  MOD_RES (32), (33): Xaa is C or S

SEQ ID NO: 50311 - protein, 30 aa, Artificial Sequence
  Cyclic GFR-binding peptide
  MOD_RES (30), (30): Xaa is C or S
VVMDRYKKLVVNNASDFYLISIANLRTPVX

SEQ ID NO: 50312 - protein, 23 aa, Artificial Sequence
  Cyclic GFR-binding peptide
NSLQEIKPTKGIYYVIPLPELDQ

SEQ ID NO: 50313 - protein, 30 aa, Artificial Sequence
  Cyclic GFR-binding peptide
  MOD_RES (29), (30): Xaa is C or S
VMDNSLQEVVKENEDYYLMTLPELETPVXX

SEQ ID NO: 50314 - protein, 24 aa, Artificial Sequence
  Cyclic GFR-binding peptide
DEYQKYVVKENEDIFLMSIPSLET

SEQ ID NO: 50315 - protein, 27 aa, Artificial Sequence
  Cyclic GFR-binding peptide
  MOD_RES (27), (27): Xaa is C or S
MNSLQEVKPKRGVYYLITLPELAQPVX

SEQ ID NO: 50316 - protein, 31 aa, Artificial Sequence; identical to SEQ ID NO: 9798
  Cyclic GFR-binding peptide
  MOD_RES (31), (31): Xaa is C or S

SEQ ID NO: 50317 - protein, 29 aa, Artificial Sequence
  Cyclic GFR-binding peptide
VVMNEYQKYIVNSSDDIFLVSIPSLKTPA

SEQ ID NO: 50318 - protein, 34 aa, Artificial Sequence
  Cyclic GFR-binding peptide
  MOD_RES (2), (4): Xaa is C or S
RXGXGEVVMENSLQEVVKDYEDYYLMTLPELETP

SEQ ID NO: 50319 - protein, 26 aa, Artificial Sequence
  Cyclic GFR-binding peptide
EVVMDNSLQEVVNNASDYYLITLPEL

SEQ ID NO: 50320 - protein, 24 aa, Artificial Sequence
  Cyclic GFR-binding peptide
DNSLQEVVNNASDYYVIPLPELRT

SEQ ID NO: 50321 - protein, 27 aa, Artificial Sequence
  Cyclic GFR-binding peptide
MDQYNKLVVNNASDLYLISIASLRTPV

SEQ ID NO: 50322 - protein, 34 aa, Artificial Sequence; identical to SEQ ID NO: 9801
  Cyclic GFR-binding peptide
  MOD_RES (1), (32), (33): Xaa is C or S

SEQ ID NO: 50323 - protein, 26 aa, Artificial Sequence
  Cyclic GFR-binding peptide
MDNSLQEVVKENEDYYLMTLPELETP

SEQ ID NO: 50324 - protein, 32 aa, Artificial Sequence
  Cyclic GFR-binding peptide
  MOD_RES (29), (30): Xaa is C or S
VMDNSLQEVVNNASDYYLITLPELRTPVXXTP

SEQ ID NO: 50325 - protein, 31 aa, Artificial Sequence
  Cyclic GFR-binding peptide
  MOD_RES (27), (28): Xaa is C or S
DNSLQEVVKENEDYYLMTLPELETPVXXAKP

SEQ ID NO: 50326 - protein, 32 aa, Artificial Sequence; identical to SEQ ID NO: 9803
  Cyclic GFR-binding peptide
  MOD_RES (32), (32): Xaa is C or S

SEQ ID NO: 50327 - protein, 27 aa, Artificial Sequence
  Cyclic GFR-binding peptide
VMEYQKYVKPTRGVIFLISIPSLDQPV

SEQ ID NO: 50328 - protein, 35 aa, Artificial Sequence; identical to SEQ ID NO: 9804
  Cyclic GFR-binding peptide
  MOD_RES (32), (33): Xaa is C or S

SEQ ID NO: 50329 - protein, 33 aa, Artificial Sequence
  Cyclic GFR-binding peptide
  MOD_RES (1), (3): Xaa is C or S
XGXSEVVMDNSLQEVVNNASDYYVIPLPELRTP

SEQ ID NO: 50330 - protein, 32 aa, Artificial Sequence
  Cyclic GFR-binding peptide
  MOD_RES (2), (4): Xaa is C or S
SXKXSKVVMEYQKYVKPTRGVIFLISIPSLDQ

SEQ ID NO: 50331 - protein, 39 aa, Artificial Sequence; identical to SEQ ID NO: 9805
  Cyclic GFR-binding peptide
  MOD_RES (2), (4), (36): Xaa is C or S

SEQ ID NO: 50332 - protein, 29 aa, Artificial Sequence
  Cyclic GFR-binding peptide
RVVMNNSLQEIVNSSDDYYLVTLPELQTP

SEQ ID NO: 50333 - protein, 35 aa, Artificial Sequence
  Cyclic GFR-binding peptide
  MOD_RES (29), (30): Xaa is C or S
VMEEYQKYVVKDYEDIFLMSIPSLETPVXXAKPIS

SEQ ID NO: 50334 - protein, 34 aa, Artificial Sequence; identical to SEQ ID NO: 9807
  Cyclic GFR-binding peptide
  MOD_RES (2), (4): Xaa is C or S

SEQ ID NO: 50335 - protein, 25 aa, Artificial Sequence
  Cyclic GFR-binding peptide
DNSLQEVVNNASDYYVIPLPELRTP

SEQ ID NO: 50336 - protein, 25 aa, Artificial Sequence
  Cyclic GFR-binding peptide
DQYNKLVVNNASDLYLISIASLRTP

SEQ ID NO: 50337 - protein, 32 aa, Artificial Sequence
  Cyclic GFR-binding peptide
  MOD_RES (28), (29): Xaa is C or S
MNNSLQEIVNSSDDYYLVTLPELKTPAXXPKP

SEQ ID NO: 50338 - protein, 29 aa, Artificial Sequence
  Cyclic GFR-binding peptide
  MOD_RES (1), (1): Xaa is C or S
XSRVVMNNSLQEIVNSSDDYYVVPLPELK

SEQ ID NO: 50339 - protein, 33 aa, Artificial Sequence
  Cyclic GFR-binding peptide
  MOD_RES (30), (31): Xaa is C or S
VVMDNSLQEVVNNASDYYVIPLPELRTPVXXTP

SEQ ID NO: 50340 - protein, 20 aa, Artificial Sequence
  Cyclic GFR-binding peptide
NSLQEVVKDYEDYYVMPLPE

SEQ ID NO: 50341 - protein, 38 aa, Artificial Sequence; identical to SEQ ID NO: 9809
  Cyclic GFR-binding peptide
  MOD_RES (1), (33), (34): Xaa is C or S

SEQ ID NO: 50342 - protein, 29 aa, Artificial Sequence
  Cyclic GFR-binding peptide
  MOD_RES (28), (29): Xaa is C or S
IMEYQKYVKPKRGVIFLISIPSLAQPVXX

SEQ ID NO: 50343 - protein, 23 aa, Artificial Sequence
  Cyclic GFR-binding peptide
MDNSLQEVVKENEDYYLMTLPEL

SEQ ID NO: 50344 - protein, 40 aa, Artificial Sequence; identical to SEQ ID NO: 9810
  Cyclic GFR-binding peptide
  MOD_RES (2), (4), (36), (37): Xaa is C or S

SEQ ID NO: 50345 - protein, 33 aa, Artificial Sequence; identical to SEQ ID NO: 9811
  Cyclic GFR-binding peptide
  MOD_RES (32), (33): Xaa is C or S

SEQ ID NO: 50346 - protein, 38 aa, Artificial Sequence; identical to SEQ ID NO: 9812
  Cyclic GFR-binding peptide
  MOD_RES (1), (33): Xaa is C or S

SEQ ID NO: 50347 - protein, 25 aa, Artificial Sequence
  Cyclic GFR-binding peptide
MNNSLQEIVNSSDDYYVVPLPELKT

SEQ ID NO: 50348 - protein, 38 aa, Artificial Sequence; identical to SEQ ID NO: 9813
  Cyclic GFR-binding peptide
  MOD_RES (1), (3), (35), (36): Xaa is C or S

SEQ ID NO: 50349 - protein, 34 aa, Artificial Sequence
  Cyclic GFR-binding peptide
  MOD_RES (30), (31): Xaa is C or S
KVVMNSLQEVKPTRGVYYVIPLPELDQPVXXPSA

SEQ ID NO: 50350 - protein, 33 aa, Artificial Sequence
  Cyclic GFR-binding peptide
  MOD_RES (29), (30): Xaa is C or S
VIMEYQKYIKPTKGIIFLISIPSLDQSVXXPSA

SEQ ID NO: 50351 - protein, 30 aa, Artificial Sequence
  Cyclic GFR-binding peptide
  MOD_RES (26), (27): Xaa is C or S
NSLQEIKPTKGIYYVIPLPELDQSVXXPSA

SEQ ID NO: 50352 - protein, 39 aa, Artificial Sequence; identical to SEQ ID NO: 9819
  Cyclic GFR-binding peptide
  MOD_RES (2), (34): Xaa is C or S

SEQ ID NO: 50353 - protein, 27 aa, Artificial Sequence
  Cyclic GFR-binding peptide
SEVVMDNSLQEVVNNASDYYLITLPEL

SEQ ID NO: 50354 - protein, 22 aa, Artificial Sequence
  Cyclic GFR-binding peptide
DEYQKYVVKENEDIFLMSIPSL

SEQ ID NO: 50355 - protein, 27 aa, Artificial Sequence
  Cyclic GFR-binding peptide
  MOD_RES (2), (2): Xaa is C or S
KXSKVIMEYQKYIKPTKGIIFLISIPS

SEQ ID NO: 50356 - protein, 29 aa, Artificial Sequence
  Cyclic GFR-binding peptide
  MOD_RES (27), (28): Xaa is C or S
MNSLQEVKPKRGVYYLITLPELAQPVXXP

SEQ ID NO: 50357 - protein, 29 aa, Artificial Sequence
  Cyclic GFR-binding peptide
AAAAAAAAANSLQEIVNSSDDYYVVPLPE

SEQ ID NO: 50358 - protein, 33 aa, Artificial Sequence; identical to SEQ ID NO: 9820
  Cyclic GFR-binding peptide
  MOD_RES (31), (31): Xaa is C or S

SEQ ID NO: 50359 - protein, 28 aa, Artificial Sequence
  Cyclic GFR-binding peptide
RVVMNEYQKYIVNSSDDIFLVSIPSLKT

SEQ ID NO: 50360 - protein, 36 aa, Artificial Sequence; identical to SEQ ID NO: 9821
  Cyclic GFR-binding peptide
  MOD_RES (1), (33), (34): Xaa is C or S

SEQ ID NO: 50361 - protein, 24 aa, Artificial Sequence
  Cyclic GFR-binding peptide
VIMNSLQEIKPTKGIYYVIPLPEL

SEQ ID NO: 50362 - protein, 32 aa, Artificial Sequence
  Cyclic GFR-binding peptide
  MOD_RES (26), (27): Xaa is C or S
EYQKYIVNSSDDIFLVSIPSLQTPAXXPKPVT

SEQ ID NO: 50363 - protein, 25 aa, Artificial Sequence
  Cyclic GFR-binding peptide
DNSLQEVVKENEDYYLMTLPELETP

SEQ ID NO: 50364 - protein, 39 aa, Artificial Sequence; identical to SEQ ID NO: 9825
  Cyclic GFR-binding peptide
  MOD_RES (1), (3), (34), (35): Xaa is C or S

SEQ ID NO: 50365 - protein, 34 aa, Artificial Sequence; identical to SEQ ID NO: 9826
  Cyclic GFR-binding peptide
  MOD_RES (1), (33), (34): Xaa is C or S

SEQ ID NO: 50366 - protein, 31 aa, Artificial Sequence
  Cyclic GFR-binding peptide
  MOD_RES (28), (29): Xaa is C or S
MNNSLQEIVNSSDDYYLVTLPELKTPAXXPK

SEQ ID NO: 50367 - protein, 21 aa, Artificial Sequence
  Cyclic GFR-binding peptide
NSLQEIVNSSDDYYLVTLPEL

SEQ ID NO: 50368 - protein, 31 aa, Artificial Sequence
  Cyclic GFR-binding peptide
  MOD_RES (26), (27): Xaa is C or S
EYQKYVKPTRGVIFLISIPSLDQPVXXPSAS

SEQ ID NO: 50369 - protein, 30 aa, Artificial Sequence
  Cyclic GFR-binding peptide
GEVVMENSLQEVVKDYEDYYLMTLPELETP

SEQ ID NO: 50370 - protein, 28 aa, Artificial Sequence
  Cyclic GFR-binding peptide
GEVVMENSLQEVVKDYEDYYLMTLPELE

SEQ ID NO: 50371 - protein, 27 aa, Artificial Sequence
  Cyclic GFR-binding peptide
VMNNSLQEIVNSSDDYYLVTLPELKTP

SEQ ID NO: 50372 - protein, 28 aa, Artificial Sequence
  Cyclic GFR-binding peptide
  MOD_RES (27), (28): Xaa is C or S
MNSLQEVKPKRGVYYLITLPELAQPVXX

SEQ ID NO: 50373 - protein, 32 aa, Artificial Sequence
  Cyclic GFR-binding peptide
  MOD_RES (30), (31): Xaa is C or S
VVMENSLQEVVKDYEDYYLMTLPELETPVXXA

SEQ ID NO: 50374 - protein, 31 aa, Artificial Sequence
  Cyclic GFR-binding peptide
  MOD_RES (2), (2): Xaa is C or S
GXSEVVMDQYNKLVVNNASDLYLISIASLRT

SEQ ID NO: 50375 - protein, 31 aa, Artificial Sequence
  Cyclic GFR-binding peptide
  MOD_RES (1), (1): Xaa is C or S
XSEVVMDNSLQEVVNNASDYYLITLPELRTP

SEQ ID NO: 50376 - protein, 39 aa, Artificial Sequence; identical to SEQ ID NO: 9835
  Cyclic GFR-binding peptide
  MOD_RES (1), (3), (35), (36): Xaa is C or S

SEQ ID NO: 50377 - protein, 28 aa, Artificial Sequence
  Cyclic GFR-binding peptide
EVVMENSLQEVVKDYEDYYLMTLPELET

SEQ ID NO: 50378 - protein, 29 aa, Artificial Sequence
  Cyclic GFR-binding peptide
AAAAAAAAANSLQEVVKDYEDYYVMPLPE

SEQ ID NO: 50379 - protein, 25 aa, Artificial Sequence
  Cyclic GFR-binding peptide
NSLQEVVKDYEDYYVMPLPELETPV

SEQ ID NO: 50380 - protein, 28 aa, Artificial Sequence
  Cyclic GFR-binding peptide
  MOD_RES (1), (3): Xaa is C or S
XKXSKVVMNSLQEVKPTRGVYYVIPLPE

SEQ ID NO: 50381 - protein, 23 aa, Artificial Sequence
  Cyclic GFR-binding peptide
ENSLQEVVKDYEDYYVMPLPELE

SEQ ID NO: 50382 - protein, 27 aa, Artificial Sequence
  Cyclic GFR-binding peptide
VMDEYQKYVVKENEDIFLMSIPSLETP

SEQ ID NO: 50383 - protein, 34 aa, Artificial Sequence; identical to SEQ ID NO: 9838
  Cyclic GFR-binding peptide
  MOD_RES (32), (33): Xaa is C or S

SEQ ID NO: 50384 - protein, 23 aa, Artificial Sequence
  Cyclic GFR-binding peptide
VMNNSLQEIVNSSDDYYVVPLPE

SEQ ID NO: 50385 - protein, 33 aa, Artificial Sequence
  Cyclic GFR-binding peptide
  MOD_RES (29), (30): Xaa is C or S
VMNNSLQEIVNSSDDYYLVTLPELKTPAXXPKP

SEQ ID NO: 50386 - protein, 34 aa, Artificial Sequence; identical to SEQ ID NO: 9840
  Cyclic GFR-binding peptide
  MOD_RES (31), (32): Xaa is C or S

SEQ ID NO: 50387 - protein, 30 aa, Artificial Sequence
  Cyclic GFR-binding peptide
SEVVMDQYNKLVVNNASDLYLISIASLRTP

SEQ ID NO: 50388 - protein, 29 aa, Artificial Sequence
  Cyclic GFR-binding peptide
  MOD_RES (1), (3): Xaa is C or S
XKXSRVIMNSLQEVKPKRGVYYLITLPEL

SEQ ID NO: 50389 - protein, 25 aa, Artificial Sequence
  Cyclic GFR-binding peptide
SRVIMEYQKYVKPKRGVIFLISIPS

SEQ ID NO: 50390 - protein, 29 aa, Artificial Sequence
  Cyclic GFR-binding peptide
VVMENSLQEVVKDYEDYYLMTLPELETPV

SEQ ID NO: 50391 - protein, 31 aa, Artificial Sequence; identical to SEQ ID NO: 9841
  Cyclic GFR-binding peptide
  MOD_RES (31), (31): Xaa is C or S

SEQ ID NO: 50392 - protein, 33 aa, Artificial Sequence; identical to SEQ ID NO: 9842
  Cyclic GFR-binding peptide
  MOD_RES (32), (33): Xaa is C or S

SEQ ID NO: 50393 - protein, 34 aa, Artificial Sequence; identical to SEQ ID NO: 9843
  Cyclic GFR-binding peptide
  MOD_RES (1), (3): Xaa is C or S

SEQ ID NO: 50394 - protein, 27 aa, Artificial Sequence
  Cyclic GFR-binding peptide
  MOD_RES (26), (27): Xaa is C or S
NSLQEVVKENEDYYVMPLPELETPVXX

SEQ ID NO: 50395 - protein, 38 aa, Artificial Sequence; identical to SEQ ID NO: 9844
  Cyclic GFR-binding peptide
  MOD_RES (1), (3), (35), (36): Xaa is C or S

SEQ ID NO: 50396 - protein, 34 aa, Artificial Sequence; identical to SEQ ID NO: 9847
  Cyclic GFR-binding peptide
  MOD_RES (32), (33): Xaa is C or S

SEQ ID NO: 50397 - protein, 40 aa, Artificial Sequence; identical to SEQ ID NO: 9848
  Cyclic GFR-binding peptide
  MOD_RES (2), (4), (36), (37): Xaa is C or S

SEQ ID NO: 50398 - protein, 32 aa, Artificial Sequence
  Cyclic GFR-binding peptide
  MOD_RES (27), (28): Xaa is C or S
NNSLQEIVNSSDDYYVVPLPELKTPAXXPKPV

SEQ ID NO: 50399 - protein, 33 aa, Artificial Sequence
  Cyclic GFR-binding peptide
  MOD_RES (29), (30): Xaa is C or S
VIMNSLQEVKPKRGVYYLITLPELAQPVXXPAA

SEQ ID NO: 50400 - protein, 28 aa, Artificial Sequence
  Cyclic GFR-binding peptide
  MOD_RES (26), (27): Xaa is C or S
NSLQEVVKENEDYYVMPLPELETPVXXA

SEQ ID NO: 50401 - protein, 26 aa, Artificial Sequence
  Cyclic GFR-binding peptide
VMDNSLQEVVNNASDYYLITLPELRT

SEQ ID NO: 50402 - protein, 31 aa, Artificial Sequence
  Cyclic GFR-binding peptide
  MOD_RES (26), (27): Xaa is C or S
NSLQEIVNSSDDYYVVPLPELQTPAXXPKPV

SEQ ID NO: 50403 - protein, 26 aa, Artificial Sequence
  Cyclic GFR-binding peptide
EVVMDNSLQEVVKENEDYYLMTLPEL

SEQ ID NO: 50404 - protein, 37 aa, Artificial Sequence; identical to SEQ ID NO: 9852
  Cyclic GFR-binding peptide
  MOD_RES (1), (3), (34), (35): Xaa is C or S

SEQ ID NO: 50405 - protein, 38 aa, Artificial Sequence; identical to SEQ ID NO: 9851
  Cyclic GFR-binding peptide
  MOD_RES (2), (34), (35): Xaa is C or S

SEQ ID NO: 50406 - protein, 28 aa, Artificial Sequence
  Cyclic GFR-binding peptide
VVMDQYNKLVVNNASDLYLISIASLRTP

SEQ ID NO: 50407 - protein, 28 aa, Artificial Sequence
  Cyclic GFR-binding peptide
  MOD_RES (2), (2): Xaa is C or S
GXSEVVMDQYNKLVVNNASDLYLISIAS

SEQ ID NO: 50408 - protein, 34 aa, Artificial Sequence; identical to SEQ ID NO: 9853
  Cyclic GFR-binding peptide
  MOD_RES (2), (33), (34): Xaa is C or S

SEQ ID NO: 50409 - protein, 36 aa, Artificial Sequence
  Cyclic GFR-binding peptide
  MOD_RES (30), (30): Xaa is C or S
VVMNEYQKYIVNSSDDIFLVSIPSLKTPAXTPKTVH

SEQ ID NO: 50410 - protein, 29 aa, Artificial Sequence
  Cyclic GFR-binding peptide
SRVVMNEYQKYIVNSSDDIFLVSIPSLKT

SEQ ID NO: 50411 - protein, 39 aa, Artificial Sequence; identical to SEQ ID NO: 9854
  Cyclic GFR-binding peptide
  MOD_RES (2), (4), (36), (37): Xaa is C or S

SEQ ID NO: 50412 - protein, 26 aa, Artificial Sequence
  Cyclic GFR-binding peptide
VVMENSLQEVVKDYEDYYLMTLPELE

SEQ ID NO: 50413 - protein, 35 aa, Artificial Sequence; identical to SEQ ID NO: 9857
  Cyclic GFR-binding peptide
  MOD_RES (1), (32), (33): Xaa is C or S

SEQ ID NO: 50414 - protein, 30 aa, Artificial Sequence
  Cyclic GFR-binding peptide
  MOD_RES (26), (27): Xaa is C or S
EYQKYVVKDYEDIFLMSIPSLETPVXXAKP

SEQ ID NO: 50415 - protein, 30 aa, Artificial Sequence
  Cyclic GFR-binding peptide
  MOD_RES (29), (30): Xaa is C or S
VMENSLQEVVKDYEDYYLMTLPELETPVXX

SEQ ID NO: 50416 - protein, 30 aa, Artificial Sequence
  Cyclic GFR-binding peptide
  MOD_RES (1), (1): Xaa is C or S
XSKVVMNSLQEVKPTRGVYYVIPLPELDQP

SEQ ID NO: 50417 - protein, 24 aa, Artificial Sequence
  Cyclic GFR-binding peptide
RYKKLVVNNASDFYLISIANLRTP

SEQ ID NO: 50418 - protein, 34 aa, Artificial Sequence; identical to SEQ ID NO: 9861
  Cyclic GFR-binding peptide
  MOD_RES (2), (34): Xaa is C or S

SEQ ID NO: 50419 - protein, 35 aa, Artificial Sequence; identical to SEQ ID NO: 9862
  Cyclic GFR-binding peptide
  MOD_RES (31), (32): Xaa is C or S

SEQ ID NO: 50420 - protein, 36 aa, Artificial Sequence; identical to SEQ ID NO: 9863
  Cyclic GFR-binding peptide
  MOD_RES (1), (3), (35), (36): Xaa is C or S

SEQ ID NO: 50421 - protein, 32 aa, Artificial Sequence
  Cyclic GFR-binding peptide
  MOD_RES (26), (27): Xaa is C or S
NSLQEVVKDYEDYYLMTLPELETPVXXAKPIS

SEQ ID NO: 50422 - protein, 29 aa, Artificial Sequence
  Cyclic GFR-binding peptide
  MOD_RES (26), (27): Xaa is C or S
EYQKYIVNSSDDIFLVSIPSLKTPAXXPK

SEQ ID NO: 50423 - protein, 38 aa, Artificial Sequence; identical to SEQ ID NO: 9866
  Cyclic GFR-binding peptide
  MOD_RES (2), (4), (36), (37): Xaa is C or S

SEQ ID NO: 50424 - protein, 33 aa, Artificial Sequence; identical to SEQ ID NO: 9868
  Cyclic GFR-binding peptide
  MOD_RES (1), (32), (33): Xaa is C or S

SEQ ID NO: 50425 - protein, 27 aa, Artificial Sequence
  Cyclic GFR-binding peptide
RVVMNNSLQEIVNSSDDYYLVTLPELQ

SEQ ID NO: 50426 - protein, 31 aa, Artificial Sequence
  Cyclic GFR-binding peptide
  MOD_RES (1), (1): Xaa is C or S
XSEVVMDNSLQEVVNNASDYYVIPLPELRTP

SEQ ID NO: 50427 - protein, 27 aa, Artificial Sequence
  Cyclic GFR-binding peptide
  MOD_RES (27), (27): Xaa is C or S
MEYQKYVKPKRGVIFLISIPSLAQPVX

SEQ ID NO: 50428 - protein, 30 aa, Artificial Sequence
  Cyclic GFR-binding peptide
  MOD_RES (30), (30): Xaa is C or S
KVIMNSLQEIKPTKGIYYVIPLPELDQSVX

SEQ ID NO: 50429 - protein, 26 aa, Artificial Sequence
  Cyclic GFR-binding peptide
ARVVMNNSLQEIVNSSDDYYLVTLPE

SEQ ID NO: 50430 - protein, 36 aa, Artificial Sequence
  Cyclic GFR-binding peptide
  MOD_RES (30), (31): Xaa is C or S
VVMENSLQEVVKDYEDYYLMTLPELETPVXXAKPIS

SEQ ID NO: 50431 - protein, 28 aa, Artificial Sequence
  Cyclic GFR-binding peptide
  MOD_RES (2), (2): Xaa is C or S
GXSEVVMDNSLQEVVNNASDYYLITLPE

SEQ ID NO: 50432 - protein, 35 aa, Artificial Sequence; identical to SEQ ID NO: 9875
  Cyclic GFR-binding peptide
  MOD_RES (2), (34): Xaa is C or S

SEQ ID NO: 50433 - protein, 25 aa, Artificial Sequence
  Cyclic GFR-binding peptide
MNNSLQEIVNSSDDYYVVPLPELQT

SEQ ID NO: 50434 - protein, 30 aa, Artificial Sequence
  Cyclic GFR-binding peptide
  MOD_RES (26), (26): Xaa is C or S
NSLQEIVNSSDDYYLVTLPELKTPAXTPKT

SEQ ID NO: 50435 - protein, 33 aa, Artificial Sequence
  Cyclic GFR-binding peptide
  MOD_RES (30), (31): Xaa is C or S
VVMNEYQKYIVNSSDDIFLVSIPSLKTPAXXPK

SEQ ID NO: 50436 - protein, 25 aa, Artificial Sequence
  Cyclic GFR-binding peptide
RVVMNNSLQEIVNSSDDYYVVPLPE

SEQ ID NO: 50437 - protein, 27 aa, Artificial Sequence
  Cyclic GFR-binding peptide
SRVIMNSLQEVKPKRGVYYLITLPELA

SEQ ID NO: 50438 - protein, 23 aa, Artificial Sequence
  Cyclic GFR-binding peptide
EEYQKYVVKDYEDIFLMSIPSLE

SEQ ID NO: 50439 - protein, 35 aa, Artificial Sequence; identical to SEQ ID NO: 9878
  Cyclic GFR-binding peptide
  MOD_RES (32), (33): Xaa is C or S

SEQ ID NO: 50440 - protein, 40 aa, Artificial Sequence; identical to SEQ ID NO: 9880
  Cyclic GFR-binding peptide
  MOD_RES (2), (4), (35), (36): Xaa is C or S

SEQ ID NO: 50441 - protein, 27 aa, Artificial Sequence
  Cyclic GFR-binding peptide
  MOD_RES (1), (1): Xaa is C or S
XSEVVMDNSLQEVVNNASDYYVIPLPE

SEQ ID NO: 50442 - protein, 28 aa, Artificial Sequence
  Cyclic GFR-binding peptide
  MOD_RES (28), (28): Xaa is C or S
MDNSLQEVVKENEDYYLMTLPELETPVX

SEQ ID NO: 50443 - protein, 33 aa, Artificial Sequence
  Cyclic GFR-binding peptide
  MOD_RES (28), (29): Xaa is C or S
IMEYQKYIKPTKGIIFLISIPSLDQSVXXPSAS

SEQ ID NO: 50444 - protein, 23 aa, Artificial Sequence
  Cyclic GFR-binding peptide
IMEYQKYIKPTKGIIFLISIPSL

SEQ ID NO: 50445 - protein, 30 aa, Artificial Sequence
  Cyclic GFR-binding peptide
  MOD_RES (27), (28): Xaa is C or S
NNSLQEIVNSSDDYYLVTLPELKTPAXXPK

SEQ ID NO: 50446 - protein, 33 aa, Artificial Sequence
  Cyclic GFR-binding peptide
  MOD_RES (29), (30): Xaa is C or S
VMDNSLQEVVKENEDYYLMTLPELETPVXXAKP

SEQ ID NO: 50447 - protein, 33 aa, Artificial Sequence
  Cyclic GFR-binding peptide
  MOD_RES (27), (28): Xaa is C or S
DNSLQEVVNNASDYYLITLPELRTPVXXTPPTS

SEQ ID NO: 50448 - protein, 38 aa, Artificial Sequence; identical to SEQ ID NO: 9884
  Cyclic GFR-binding peptide
  MOD_RES (2), (34), (35): Xaa is C or S

SEQ ID NO: 50449 - protein, 33 aa, Artificial Sequence; identical to SEQ ID NO: 9886
  Cyclic GFR-binding peptide
  MOD_RES (1), (33): Xaa is C or S

SEQ ID NO: 50450 - protein, 29 aa, Artificial Sequence
  Cyclic GFR-binding peptide
GEVVMDNSLQEVVKENEDYYVMPLPELET

SEQ ID NO: 50451 - protein, 26 aa, Artificial Sequence
  Cyclic GFR-binding peptide
  MOD_RES (26), (26): Xaa is C or S
QYNKLVVNNASDLYLISIASLRTPVX

SEQ ID NO: 50452 - protein, 30 aa, Artificial Sequence
  Cyclic GFR-binding peptide
  MOD_RES (28), (28): Xaa is C or S
MNNSLQEIVNSSDDYYVVPLPELKTPAXTP

SEQ ID NO: 50453 - protein, 32 aa, Artificial Sequence
  Cyclic GFR-binding peptide
  MOD_RES (27), (28): Xaa is C or S
MNSLQEVKPKRGVYYLITLPELAQPVXXPAAS

SEQ ID NO: 50454 - protein, 33 aa, Artificial Sequence
  Cyclic GFR-binding peptide
  MOD_RES (30), (31): Xaa is C or S
RVIMEYQKYVKPKRGVIFLISIPSLAQPVXXPA

SEQ ID NO: 50455 - protein, 31 aa, Artificial Sequence
  Cyclic GFR-binding peptide
  MOD_RES (28), (29): Xaa is C or S
MNEYQKYIVNSSDDIFLVSIPSLKTPAXXPK

SEQ ID NO: 50456 - protein, 25 aa, Artificial Sequence
  Cyclic GFR-binding peptide
EVVMENSLQEVVKDYEDYYLMTLPE

SEQ ID NO: 50457 - protein, 27 aa, Artificial Sequence
  Cyclic GFR-binding peptide
GEVVMEEYQKYVVKDYEDIFLMSIPSL

SEQ ID NO: 50458 - protein, 41 aa, Artificial Sequence; identical to SEQ ID NO: 9889
  Cyclic GFR-binding peptide
  MOD_RES (2), (4), (36), (37): Xaa is C or S

SEQ ID NO: 50459 - protein, 25 aa, Artificial Sequence
  Cyclic GFR-binding peptide
VMDNSLQEVVNNASDYYLITLPELR

SEQ ID NO: 50460 - protein, 35 aa, Artificial Sequence
  Cyclic GFR-binding peptide
  MOD_RES (30), (31): Xaa is C or S
RVIMNSLQEVKPKRGVYYLITLPELAQPVXXPAAS

SEQ ID NO: 50461 - protein, 39 aa, Artificial Sequence; identical to SEQ ID NO: 9892
  Cyclic GFR-binding peptide
  MOD_RES (2), (34), (35): Xaa is C or S

SEQ ID NO: 50462 - protein, 26 aa, Artificial Sequence
  Cyclic GFR-binding peptide
SRVVMNNSLQEIVNSSDDYYLVTLPE

SEQ ID NO: 50463 - protein, 29 aa, Artificial Sequence
  Cyclic GFR-binding peptide
  MOD_RES (29), (29): Xaa is C or S
VMNEYQKYIVNSSDDIFLVSIPSLQTPAX

SEQ ID NO: 50464 - protein, 34 aa, Artificial Sequence
  Cyclic GFR-binding peptide
  MOD_RES (29), (30): Xaa is C or S
VMENSLQEVVKDYEDYYVMPLPELETPVXXAKPI

SEQ ID NO: 50465 - protein, 24 aa, Artificial Sequence
  Cyclic GFR-binding peptide
QYNKLVVNNASDLYLISIASLRTP

SEQ ID NO: 50466 - protein, 33 aa, Artificial Sequence
  Cyclic GFR-binding peptide
  MOD_RES (2), (4): Xaa is C or S
SXKXSKVIMEYQKYIKPTKGIIFLISIPSLDQS

SEQ ID NO: 50467 - protein, 32 aa, Artificial Sequence; identical to SEQ ID NO: 9893
  Cyclic GFR-binding peptide
  MOD_RES (1), (1): Xaa is C or S

SEQ ID NO: 50468 - protein, 21 aa, Artificial Sequence
  Cyclic GFR-binding peptide
DNSLQEVVNNASDYYVIPLPE

SEQ ID NO: 50469 - protein, 28 aa, Artificial Sequence
  Cyclic GFR-binding peptide
SEVVMDQYNKLVVNNASDLYLISIASLR

SEQ ID NO: 50470 - protein, 31 aa, Artificial Sequence
  Cyclic GFR-binding peptide
  MOD_RES (26), (27): Xaa is C or S
NSLQEVVKENEDYYLMTLPELETPVXXAKPI

SEQ ID NO: 50471 - protein, 30 aa, Artificial Sequence
  Cyclic GFR-binding peptide
  MOD_RES (27), (28): Xaa is C or S
DNSLQEVVNNASDYYLITLPELRTPVXXTP

SEQ ID NO: 50472 - protein, 25 aa, Artificial Sequence
  Cyclic GFR-binding peptide
NSLQEIVNSSDDYYLVTLPELQTPA

SEQ ID NO: 50473 - protein, 25 aa, Artificial Sequence
  Cyclic GFR-binding peptide
VMENSLQEVVKDYEDYYLMTLPELE

SEQ ID NO: 50474 - protein, 33 aa, Artificial Sequence
  Cyclic GFR-binding peptide
  MOD_RES (27), (27): Xaa is C or S
NNSLQEIVNSSDDYYVVPLPELKTPAXTPKTVH

SEQ ID NO: 50475 - protein, 27 aa, Artificial Sequence
  Cyclic GFR-binding peptide
  MOD_RES (1), (1): Xaa is C or S
XSEVVMDNSLQEVVNNASDYYLITLPE

SEQ ID NO: 50476 - protein, 34 aa, Artificial Sequence; identical to SEQ ID NO: 9898
  Cyclic GFR-binding peptide
  MOD_RES (32), (33): Xaa is C or S

SEQ ID NO: 50477 - protein, 37 aa, Artificial Sequence; identical to SEQ ID NO: 9899
  Cyclic GFR-binding peptide
  MOD_RES (1), (33), (34): Xaa is C or S

SEQ ID NO: 50478 - protein, 29 aa, Artificial Sequence
  Cyclic GFR-binding peptide
  MOD_RES (27), (28): Xaa is C or S
EEYQKYVVKDYEDIFLMSIPSLETPVXXA

SEQ ID NO: 50479 - protein, 23 aa, Artificial Sequence
  Cyclic GFR-binding peptide
MDEYQKYVVKENEDIFLMSIPSL

SEQ ID NO: 50480 - protein, 35 aa, Artificial Sequence
  Cyclic GFR-binding peptide
  MOD_RES (29), (30): Xaa is C or S
VIMEYQKYVKPKRGVIFLISIPSLAQPVXXPAASA

SEQ ID NO: 50481 - protein, 30 aa, Artificial Sequence
  Cyclic GFR-binding peptide
  MOD_RES (27), (28): Xaa is C or S
NNSLQEIVNSSDDYYVVPLPELKTPAXXPK

SEQ ID NO: 50482 - protein, 27 aa, Artificial Sequence
  Cyclic GFR-binding peptide
  MOD_RES (26), (27): Xaa is C or S
RYKKLVVNNASDFYLISIANLRTPVXX

SEQ ID NO: 50483 - protein, 30 aa, Artificial Sequence
  Cyclic GFR-binding peptide
  MOD_RES (28), (29): Xaa is C or S
MNNSLQEIVNSSDDYYVVPLPELKTPAXXP

SEQ ID NO: 50484 - protein, 31 aa, Artificial Sequence; identical to SEQ ID NO: 9906
  Cyclic GFR-binding peptide

SEQ ID NO: 50485 - protein, 25 aa, Artificial Sequence
  Cyclic GFR-binding peptide
VMNNSLQEIVNSSDDYYLVTLPELQ

SEQ ID NO: 50486 - protein, 40 aa, Artificial Sequence; identical to SEQ ID NO: 9907
  Cyclic GFR-binding peptide
  MOD_RES (2), (34), (35): Xaa is C or S

SEQ ID NO: 50487 - protein, 29 aa, Artificial Sequence
  Cyclic GFR-binding peptide
  MOD_RES (27), (28): Xaa is C or S
ENSLQEVVKDYEDYYLMTLPELETPVXXA

SEQ ID NO: 50488 - protein, 35 aa, Artificial Sequence; identical to SEQ ID NO: 9909
  Cyclic GFR-binding peptide
  MOD_RES (2), (4): Xaa is C or S

SEQ ID NO: 50489 - protein, 40 aa, Artificial Sequence; identical to SEQ ID NO: 9910
  Cyclic GFR-binding peptide
  MOD_RES (1), (3), (34), (35): Xaa is C or S

SEQ ID NO: 50490 - protein, 32 aa, Artificial Sequence
  Cyclic GFR-binding peptide
  MOD_RES (27), (28): Xaa is C or S
NNSLQEIVNSSDDYYLVTLPELKTPAXXPKPV

SEQ ID NO: 50491 - protein, 33 aa, Artificial Sequence; identical to SEQ ID NO: 9911
  Cyclic GFR-binding peptide
  MOD_RES (2), (33): Xaa is C or S

SEQ ID NO: 50492 - protein, 31 aa, Artificial Sequence
  Cyclic GFR-binding peptide
  MOD_RES (28), (29): Xaa is C or S
MNNSLQEIVNSSDDYYLVTLPELQTPAXXPK

SEQ ID NO: 50493 - protein, 26 aa, Artificial Sequence
  Cyclic GFR-binding peptide
  MOD_RES (26), (26): Xaa is C or S
RYKKLVVNNASDFYLISIANLRTPVX

SEQ ID NO: 50494 - protein, 32 aa, Artificial Sequence; identical to SEQ ID NO: 9912
  Cyclic GFR-binding peptide
  MOD_RES (32), (32): Xaa is C or S

SEQ ID NO: 50495 - protein, 29 aa, Artificial Sequence
  Cyclic GFR-binding peptide
  MOD_RES (29), (29): Xaa is C or S
VIMEYQKYIKPTKGIIFLISIPSLDQSVX

SEQ ID NO: 50496 - protein, 30 aa, Artificial Sequence
  Cyclic GFR-binding peptide
  MOD_RES (30), (30): Xaa is C or S
VVMNEYQKYIVNSSDDIFLVSIPSLKTPAX

SEQ ID NO: 50497 - protein, 34 aa, Artificial Sequence; identical to SEQ ID NO: 9913
  Cyclic GFR-binding peptide
  MOD_RES (1), (32), (33): Xaa is C or S

SEQ ID NO: 50498 - protein, 26 aa, Artificial Sequence
  Cyclic GFR-binding peptide
VMEYQKYVKPTRGVIFLISIPSLDQP

SEQ ID NO: 50499 - protein, 29 aa, Artificial Sequence
  Cyclic GFR-binding peptide
  MOD_RES (28), (29): Xaa is C or S
MENSLQEVVKDYEDYYVMPLPELETPVXX

SEQ ID NO: 50500 - protein, 30 aa, Artificial Sequence
  Cyclic GFR-binding peptide
  MOD_RES (1), (3): Xaa is C or S
XKXSRVIMEYQKYVKPKRGVIFLISIPSLA

SEQ ID NO: 50501 - protein, 37 aa, Artificial Sequence; identical to SEQ ID NO: 9914
  Cyclic GFR-binding peptide
  MOD_RES (31), (32): Xaa is C or S

SEQ ID NO: 50502 - protein, 24 aa, Artificial Sequence
  Cyclic GFR-binding peptide
KVIMEYQKYIKPTKGIIFLISIPS

SEQ ID NO: 50503 - protein, 37 aa, Artificial Sequence; identical to SEQ ID NO: 9915
  Cyclic GFR-binding peptide
  MOD_RES (32), (33): Xaa is C or S

SEQ ID NO: 50504 - protein, 26 aa, Artificial Sequence
  Cyclic GFR-binding peptide
RVIMEYQKYVKPKRGVIFLISIPSLA

SEQ ID NO: 50505 - protein, 23 aa, Artificial Sequence
  Cyclic GFR-binding peptide
EYQKYVKPKRGVIFLISIPSLAQ

SEQ ID NO: 50506 - protein, 31 aa, Artificial Sequence; identical to SEQ ID NO: 9919
  Cyclic GFR-binding peptide

SEQ ID NO: 50507 - protein, 32 aa, Artificial Sequence; identical to SEQ ID NO: 9918
  Cyclic GFR-binding peptide
  MOD_RES (32), (32): Xaa is C or S

SEQ ID NO: 50508 - protein, 29 aa, Artificial Sequence
  Cyclic GFR-binding peptide
  MOD_RES (1), (3): Xaa is C or S
XGXARVVMNNSLQEIVNSSDDYYLVTLPE

SEQ ID NO: 50509 - protein, 30 aa, Artificial Sequence
  Cyclic GFR-binding peptide
  MOD_RES (29), (29): Xaa is C or S
VMNNSLQEIVNSSDDYYVVPLPELKTPAXT

SEQ ID NO: 50510 - protein, 29 aa, Artificial Sequence
  Cyclic GFR-binding peptide
  MOD_RES (26), (27): Xaa is C or S
NSLQEVKPKRGVYYLITLPELAQPVXXPA

SEQ ID NO: 50511 - protein, 38 aa, Artificial Sequence; identical to SEQ ID NO: 9922
  Cyclic GFR-binding peptide
  MOD_RES (2), (34), (35): Xaa is C or S

SEQ ID NO: 50512 - protein, 37 aa, Artificial Sequence; identical to SEQ ID NO: 9923
  Cyclic GFR-binding peptide
  MOD_RES (1), (3), (35), (36): Xaa is C or S

SEQ ID NO: 50513 - protein, 37 aa, Artificial Sequence; identical to SEQ ID NO: 9925
  Cyclic GFR-binding peptide
  MOD_RES (2), (33), (34): Xaa is C or S

SEQ ID NO: 50514 - protein, 20 aa, Artificial Sequence
  Cyclic GFR-binding peptide
NSLQEIVNSSDDYYLVTLPE

SEQ ID NO: 50515 - protein, 23 aa, Artificial Sequence
  Cyclic GFR-binding peptide
ENSLQEVVKDYEDYYLMTLPELE

SEQ ID NO: 50516 - protein, 33 aa, Artificial Sequence
  Cyclic GFR-binding peptide
  MOD_RES (27), (27): Xaa is C or S
NEYQKYIVNSSDDIFLVSIPSLKTPAXTPKTVH

SEQ ID NO: 50517 - protein, 24 aa, Artificial Sequence
  Cyclic GFR-binding peptide
KVVMEYQKYVKPTRGVIFLISIPS

SEQ ID NO: 50518 - protein, 21 aa, Artificial Sequence
  Cyclic GFR-binding peptide
DNSLQEVVNNASDYYLITLPE

SEQ ID NO: 50519 - protein, 34 aa, Artificial Sequence
  Cyclic GFR-binding peptide
  MOD_RES (28), (29): Xaa is C or S
MNEYQKYIVNSSDDIFLVSIPSLKTPAXXPKPVY

SEQ ID NO: 50520 - protein, 34 aa, Artificial Sequence; identical to SEQ ID NO: 9930
  Cyclic GFR-binding peptide
  MOD_RES (32), (33): Xaa is C or S

SEQ ID NO: 50521 - protein, 29 aa, Artificial Sequence
  Cyclic GFR-binding peptide
KVIMNSLQEIKPTKGIYYVIPLPELDQSV

SEQ ID NO: 50522 - protein, 29 aa, Artificial Sequence
  Cyclic GFR-binding peptide
  MOD_RES (28), (29): Xaa is C or S
MDQYNKLVVNNASDLYLISIASLRTPVXX

SEQ ID NO: 50523 - protein, 30 aa, Artificial Sequence
  Cyclic GFR-binding peptide
  MOD_RES (2), (2): Xaa is C or S
KXSRVIMEYQKYVKPKRGVIFLISIPSLAQ

SEQ ID NO: 50524 - protein, 31 aa, Artificial Sequence
  Cyclic GFR-binding peptide
  MOD_RES (28), (29): Xaa is C or S
MDNSLQEVVKENEDYYLMTLPELETPVXXAK

SEQ ID NO: 50525 - protein, 38 aa, Artificial Sequence; identical to SEQ ID NO: 9933
  Cyclic GFR-binding peptide
  MOD_RES (2), (4), (36), (37): Xaa is C or S

SEQ ID NO: 50526 - protein, 37 aa, Artificial Sequence; identical to SEQ ID NO: 9934
  Cyclic GFR-binding peptide
  MOD_RES (2), (33), (34): Xaa is C or S

SEQ ID NO: 50527 - protein, 39 aa, Artificial Sequence; identical to SEQ ID NO: 9935
  Cyclic GFR-binding peptide
  MOD_RES (2), (4), (36): Xaa is C or S

SEQ ID NO: 50528 - protein, 27 aa, Artificial Sequence
  Cyclic GFR-binding peptide
EVVMDNSLQEVVKENEDYYVMPLPELE

SEQ ID NO: 50529 - protein, 31 aa, Artificial Sequence
  Cyclic GFR-binding peptide
  MOD_RES (27), (28): Xaa is C or S
MEYQKYIKPTKGIIFLISIPSLDQSVXXPSA

SEQ ID NO: 50530 - protein, 30 aa, Artificial Sequence
  Cyclic GFR-binding peptide
  MOD_RES (26), (27): Xaa is C or S
EYQKYVKPTRGVIFLISIPSLDQPVXXPSA

SEQ ID NO: 50531 - protein, 36 aa, Artificial Sequence; identical to SEQ ID NO: 9938
  Cyclic GFR-binding peptide
  MOD_RES (2), (4), (35), (36): Xaa is C or S

SEQ ID NO: 50532 - protein, 41 aa, Artificial Sequence; identical to SEQ ID NO: 9939
  Cyclic GFR-binding peptide
  MOD_RES (2), (4), (36): Xaa is C or S

SEQ ID NO: 50533 - protein, 28 aa, Artificial Sequence
  Cyclic GFR-binding peptide
  MOD_RES (26), (27): Xaa is C or S
EYQKYVKPTRGVIFLISIPSLDQPVXXP

SEQ ID NO: 50534 - protein, 36 aa, Artificial Sequence; identical to SEQ ID NO: 9941
  Cyclic GFR-binding peptide
  MOD_RES (32), (33): Xaa is C or S

SEQ ID NO: 50535 - protein, 33 aa, Artificial Sequence; identical to SEQ ID NO: 9943
  Cyclic GFR-binding peptide
  MOD_RES (2), (2): Xaa is C or S

SEQ ID NO: 50536 - protein, 34 aa, Artificial Sequence
  Cyclic GFR-binding peptide
  MOD_RES (30), (30): Xaa is C or S
VVMNEYQKYIVNSSDDIFLVSIPSLKTPAXTPKT

SEQ ID NO: 50537 - protein, 29 aa, Artificial Sequence
  Cyclic GFR-binding peptide
  MOD_RES (1), (3): Xaa is C or S
XGXARVVMNEYQKYIVNSSDDIFLVSIPS

SEQ ID NO: 50538 - protein, 23 aa, Artificial Sequence
  Cyclic GFR-binding peptide
DRYKKLVVNNASDFYLISIANLR

SEQ ID NO: 50539 - protein, 28 aa, Artificial Sequence
  Cyclic GFR-binding peptide
VVMDNSLQEVVKENEDYYLMTLPELETP

SEQ ID NO: 50540 - protein, 31 aa, Artificial Sequence
  Cyclic GFR-binding peptide
  MOD_RES (1), (3): Xaa is C or S
XGXSEVVMDRYKKLVVNNASDFYLISIANLR

SEQ ID NO: 50541 - protein, 33 aa, Artificial Sequence
  Cyclic GFR-binding peptide
  MOD_RES (29), (29): Xaa is C or S
VMNNSLQEIVNSSDDYYVVPLPELKTPAXTPKT

SEQ ID NO: 50542 - protein, 32 aa, Artificial Sequence
  Cyclic GFR-binding peptide
  MOD_RES (27), (28): Xaa is C or S
MEYQKYVKPKRGVIFLISIPSLAQPVXXPAAS

SEQ ID NO: 50543 - protein, 27 aa, Artificial Sequence
  Cyclic GFR-binding peptide
MDNSLQEVVKENEDYYLMTLPELETPV

SEQ ID NO: 50544 - protein, 32 aa, Artificial Sequence
  Cyclic GFR-binding peptide
  MOD_RES (2), (2): Xaa is C or S
GXGEVVMDNSLQEVVKENEDYYVMPLPELETP

SEQ ID NO: 50545 - protein, 36 aa, Artificial Sequence; identical to SEQ ID NO: 9945
  Cyclic GFR-binding peptide
  MOD_RES (1), (3), (35), (36): Xaa is C or S

SEQ ID NO: 50546 - protein, 34 aa, Artificial Sequence; identical to SEQ ID NO: 9946
  Cyclic GFR-binding peptide
  MOD_RES (2), (34): Xaa is C or S

SEQ ID NO: 50547 - protein, 24 aa, Artificial Sequence
  Cyclic GFR-binding peptide
NSLQEVVKENEDYYVMPLPELETP

SEQ ID NO: 50548 - protein, 26 aa, Artificial Sequence
  Cyclic GFR-binding peptide
SKVIMNSLQEIKPTKGIYYVIPLPEL

SEQ ID NO: 50549 - protein, 28 aa, Artificial Sequence
  Cyclic GFR-binding peptide
  MOD_RES (27), (28): Xaa is C or S
MEYQKYVKPKRGVIFLISIPSLAQPVXX

SEQ ID NO: 50550 - protein, 30 aa, Artificial Sequence
  Cyclic GFR-binding peptide
  MOD_RES (28), (29): Xaa is C or S
MDNSLQEVVNNASDYYVIPLPELRTPVXXT

SEQ ID NO: 50551 - protein, 33 aa, Artificial Sequence
  Cyclic GFR-binding peptide
  MOD_RES (29), (30): Xaa is C or S
VMDQYNKLVVNNASDLYLISIASLRTPVXXTPP

SEQ ID NO: 50552 - protein, 32 aa, Artificial Sequence; identical to SEQ ID NO: 9955
  Cyclic GFR-binding peptide
  MOD_RES (31), (32): Xaa is C or S

SEQ ID NO: 50553 - protein, 35 aa, Artificial Sequence; identical to SEQ ID NO: 9957
  Cyclic GFR-binding peptide
  MOD_RES (1), (3), (35): Xaa is C or S

SEQ ID NO: 50554 - protein, 30 aa, Artificial Sequence
  Cyclic GFR-binding peptide
  MOD_RES (28), (29): Xaa is C or S
IMNSLQEVKPKRGVYYLITLPELAQPVXXP

SEQ ID NO: 50555 - protein, 22 aa, Artificial Sequence
  Cyclic GFR-binding peptide
MENSLQEVVKDYEDYYLMTLPE

SEQ ID NO: 50556 - protein, 32 aa, Artificial Sequence
  Cyclic GFR-binding peptide
  MOD_RES (26), (27): Xaa is C or S
NSLQEVVNNASDYYVIPLPELRTPVXXTPPTS

SEQ ID NO: 50557 - protein, 27 aa, Artificial Sequence
  Cyclic GFR-binding peptide
  MOD_RES (26), (27): Xaa is C or S
NSLQEVKPKRGVYYLITLPELAQPVXX

SEQ ID NO: 50558 - protein, 30 aa, Artificial Sequence
  Cyclic GFR-binding peptide
  MOD_RES (27), (28): Xaa is C or S
NEYQKYIVNSSDDIFLVSIPSLKTPAXXPK

SEQ ID NO: 50559 - protein, 29 aa, Artificial Sequence
  Cyclic GFR-binding peptide
  MOD_RES (1), (1): Xaa is C or S
XSRVVMNNSLQEIVNSSDDYYLVTLPELK

SEQ ID NO: 50560 - protein, 35 aa, Artificial Sequence
  Cyclic GFR-binding peptide
  MOD_RES (30), (31): Xaa is C or S
VVMDNSLQEVVKENEDYYVMPLPELETPVXXAKPI

SEQ ID NO: 50561 - protein, 28 aa, Artificial Sequence
  Cyclic GFR-binding peptide
  MOD_RES (1), (1): Xaa is C or S
XARVVMNNSLQEIVNSSDDYYVVPLPEL

SEQ ID NO: 50562 - protein, 31 aa, Artificial Sequence; identical to SEQ ID NO: 9960
  Cyclic GFR-binding peptide
  MOD_RES (31), (31): Xaa is C or S

SEQ ID NO: 50563 - protein, 24 aa, Artificial Sequence
  Cyclic GFR-binding peptide
VVMNEYQKYIVNSSDDIFLVSIPS

SEQ ID NO: 50564 - protein, 35 aa, Artificial Sequence; identical to SEQ ID NO: 9962
  Cyclic GFR-binding peptide
  MOD_RES (2), (34): Xaa is C or S

SEQ ID NO: 50565 - protein, 26 aa, Artificial Sequence
  Cyclic GFR-binding peptide
IMEYQKYIKPTKGIIFLISIPSLDQS

SEQ ID NO: 50566 - protein, 30 aa, Artificial Sequence
  Cyclic GFR-binding peptide
  MOD_RES (2), (4): Xaa is C or S
RXGXSEVVMDNSLQEVVNNASDYYVIPLPE

SEQ ID NO: 50567 - protein, 24 aa, Artificial Sequence
  Cyclic GFR-binding peptide
NNSLQEIVNSSDDYYLVTLPELQT

SEQ ID NO: 50568 - protein, 25 aa, Artificial Sequence
  Cyclic GFR-binding peptide
VMDEYQKYVVKENEDIFLMSIPSLE

SEQ ID NO: 50569 - protein, 34 aa, Artificial Sequence; identical to SEQ ID NO: 9970
  Cyclic GFR-binding peptide
  MOD_RES (1), (32), (33): Xaa is C or S

SEQ ID NO: 50570 - protein, 28 aa, Artificial Sequence
  Cyclic GFR-binding peptide
  MOD_RES (28), (28): Xaa is C or S
MNEYQKYIVNSSDDIFLVSIPSLQTPAX

SEQ ID NO: 50571 - protein, 31 aa, Artificial Sequence
  Cyclic GFR-binding peptide
  MOD_RES (27), (28): Xaa is C or S
ENSLQEVVKDYEDYYLMTLPELETPVXXAKP

SEQ ID NO: 50572 - protein, 29 aa, Artificial Sequence
  Cyclic GFR-binding peptide
  MOD_RES (1), (1): Xaa is C or S
XGEVVMDNSLQEVVKENEDYYVMPLPELE

SEQ ID NO: 50573 - protein, 39 aa, Artificial Sequence; identical to SEQ ID NO: 9972
  Cyclic GFR-binding peptide
  MOD_RES (2), (33), (34): Xaa is C or S

SEQ ID NO: 50574 - protein, 27 aa, Artificial Sequence
  Cyclic GFR-binding peptide
GEVVMDNSLQEVVKENEDYYLMTLPEL

SEQ ID NO: 50575 - protein, 36 aa, Artificial Sequence; identical to SEQ ID NO: 9973
  Cyclic GFR-binding peptide
  MOD_RES (31), (31): Xaa is C or S

SEQ ID NO: 50576 - protein, 32 aa, Artificial Sequence
  Cyclic GFR-binding peptide
  MOD_RES (27), (28): Xaa is C or S
NNSLQEIVNSSDDYYVVPLPELQTPAXXPKPV

SEQ ID NO: 50577 - protein, 26 aa, Artificial Sequence
  Cyclic GFR-binding peptide
  MOD_RES (26), (26): Xaa is C or S
NSLQEVVKDYEDYYLMTLPELETPVX

SEQ ID NO: 50578 - protein, 28 aa, Artificial Sequence
  Cyclic GFR-binding peptide
  MOD_RES (2), (2): Xaa is C or S
GXGEVVMEEYQKYVVKDYEDIFLMSIPS

SEQ ID NO: 50579 - protein, 29 aa, Artificial Sequence
  Cyclic GFR-binding peptide
  MOD_RES (2), (2): Xaa is C or S
GXGEVVMEEYQKYVVKDYEDIFLMSIPSL

SEQ ID NO: 50580 - protein, 35 aa, Artificial Sequence
  Cyclic GFR-binding peptide
  MOD_RES (29), (30): Xaa is C or S
VIMNSLQEIKPTKGIYYVIPLPELDQSVXXPSASA

SEQ ID NO: 50581 - protein, 27 aa, Artificial Sequence
  Cyclic GFR-binding peptide
VVMDRYKKLVVNNASDFYLISIANLRT

SEQ ID NO: 50582 - protein, 34 aa, Artificial Sequence
  Cyclic GFR-binding peptide
  MOD_RES (28), (29): Xaa is C or S
MNNSLQEIVNSSDDYYVVPLPELKTPAXXPKPVY

SEQ ID NO: 50583 - protein, 35 aa, Artificial Sequence; identical to SEQ ID NO: 9975
  Cyclic GFR-binding peptide
  MOD_RES (1), (3), (35): Xaa is C or S

SEQ ID NO: 50584 - protein, 34 aa, Artificial Sequence; identical to SEQ ID NO: 9976
  Cyclic GFR-binding peptide
  MOD_RES (32), (33): Xaa is C or S

SEQ ID NO: 50585 - protein, 33 aa, Artificial Sequence; identical to SEQ ID NO: 9977
  Cyclic GFR-binding peptide
  MOD_RES (31), (32): Xaa is C or S

SEQ ID NO: 50586 - protein, 34 aa, Artificial Sequence; identical to SEQ ID NO: 9978
  Cyclic GFR-binding peptide
  MOD_RES (1), (32), (33): Xaa is C or S

SEQ ID NO: 50587 - protein, 30 aa, Artificial Sequence
  Cyclic GFR-binding peptide
  MOD_RES (1), (3): Xaa is C or S
XGXSRVVMNEYQKYIVNSSDDIFLVSIPSL

SEQ ID NO: 50588 - protein, 29 aa, Artificial Sequence
  Cyclic GFR-binding peptide
  MOD_RES (26), (27): Xaa is C or S
EYQKYVVKDYEDIFLMSIPSLETPVXXAK

SEQ ID NO: 50589 - protein, 35 aa, Artificial Sequence
  Cyclic GFR-binding peptide
  MOD_RES (29), (30): Xaa is C or S
VIMEYQKYIKPTKGIIFLISIPSLDQSVXXPSASA

SEQ ID NO: 50590 - protein, 32 aa, Artificial Sequence
  Cyclic GFR-binding peptide
  MOD_RES (29), (30): Xaa is C or S
VMDRYKKLVVNNASDFYLISIANLRTPVXXTP

SEQ ID NO: 50591 - protein, 32 aa, Artificial Sequence; identical to SEQ ID NO: 9980
  Cyclic GFR-binding peptide
  MOD_RES (1), (1): Xaa is C or S

SEQ ID NO: 50592 - protein, 27 aa, Artificial Sequence
  Cyclic GFR-binding peptide
RVIMNSLQEVKPKRGVYYLITLPELAQ

SEQ ID NO: 50593 - protein, 32 aa, Artificial Sequence
  Cyclic GFR-binding peptide
  MOD_RES (27), (28): Xaa is C or S
DRYKKLVVNNASDFYLISIANLRTPVXXTPPT

SEQ ID NO: 50594 - protein, 39 aa, Artificial Sequence; identical to SEQ ID NO: 9981
  Cyclic GFR-binding peptide
  MOD_RES (2), (4), (36), (37): Xaa is C or S

SEQ ID NO: 50595 - protein, 38 aa, Artificial Sequence; identical to SEQ ID NO: 9982
  Cyclic GFR-binding peptide
  MOD_RES (2), (34), (35): Xaa is C or S

SEQ ID NO: 50596 - protein, 36 aa, Artificial Sequence; identical to SEQ ID NO: 9985
  Cyclic GFR-binding peptide
  MOD_RES (1), (3), (34), (35): Xaa is C or S

SEQ ID NO: 50597 - protein, 37 aa, Artificial Sequence; identical to SEQ ID NO: 9987
  Cyclic GFR-binding peptide
  MOD_RES (32), (32): Xaa is C or S

SEQ ID NO: 50598 - protein, 31 aa, Artificial Sequence
  Cyclic GFR-binding peptide
  MOD_RES (26), (27): Xaa is C or S
EYQKYVVKDYEDIFLMSIPSLETPVXXAKPI

SEQ ID NO: 50599 - protein, 36 aa, Artificial Sequence; identical to SEQ ID NO: 9988
  Cyclic GFR-binding peptide
  MOD_RES (1), (3), (35), (36): Xaa is C or S

SEQ ID NO: 50600 - protein, 33 aa, Artificial Sequence; identical to SEQ ID NO: 9989
  Cyclic GFR-binding peptide
  MOD_RES (1), (33): Xaa is C or S

SEQ ID NO: 50601 - protein, 23 aa, Artificial Sequence
  Cyclic GFR-binding peptide
EYQKYVKPTRGVIFLISIPSLDQ

SEQ ID NO: 50602 - protein, 29 aa, Artificial Sequence
  Cyclic GFR-binding peptide
  MOD_RES (1), (3): Xaa is C or S
XGXGEVVMENSLQEVVKDYEDYYLMTLPE

SEQ ID NO: 50603 - protein, 32 aa, Artificial Sequence
  Cyclic GFR-binding peptide
  MOD_RES (30), (31): Xaa is C or S
VVMDRYKKLVVNNASDFYLISIANLRTPVXXT

SEQ ID NO: 50604 - protein, 35 aa, Artificial Sequence; identical to SEQ ID NO: 9991
  Cyclic GFR-binding peptide
  MOD_RES (1), (33), (34): Xaa is C or S

SEQ ID NO: 50605 - protein, 33 aa, Artificial Sequence
  Cyclic GFR-binding peptide
  MOD_RES (30), (31): Xaa is C or S
VVMNNSLQEIVNSSDDYYVVPLPELKTPAXXPK

SEQ ID NO: 50606 - protein, 22 aa, Artificial Sequence
  Cyclic GFR-binding peptide
MNSLQEIKPTKGIYYVIPLPEL

SEQ ID NO: 50607 - protein, 40 aa, Artificial Sequence; identical to SEQ ID NO: 9994
  Cyclic GFR-binding peptide
  MOD_RES (2), (4), (36), (37): Xaa is C or S

SEQ ID NO: 50608 - protein, 27 aa, Artificial Sequence
  Cyclic GFR-binding peptide
  MOD_RES (27), (27): Xaa is C or S
MNSLQEVKPTRGVYYVIPLPELDQPVX

SEQ ID NO: 50609 - protein, 26 aa, Artificial Sequence
  Cyclic GFR-binding peptide
VVMNEYQKYIVNSSDDIFLVSIPSLK

SEQ ID NO: 50610 - protein, 36 aa, Artificial Sequence; identical to SEQ ID NO: 9996
  Cyclic GFR-binding peptide
  MOD_RES (1), (3), (35), (36): Xaa is C or S

SEQ ID NO: 50611 - protein, 28 aa, Artificial Sequence
  Cyclic GFR-binding peptide
  MOD_RES (2), (2): Xaa is C or S
GXARVVMNNSLQEIVNSSDDYYVVPLPE

SEQ ID NO: 50612 - protein, 23 aa, Artificial Sequence
  Cyclic GFR-binding peptide
MDNSLQEVVNNASDYYLITLPEL

SEQ ID NO: 50613 - protein, 22 aa, Artificial Sequence
  Cyclic GFR-binding peptide
DRYKKLVVNNASDFYLISIANL

SEQ ID NO: 50614 - protein, 36 aa, Artificial Sequence
  Cyclic GFR-binding peptide
  MOD_RES (30), (31): Xaa is C or S
VVMNEYQKYIVNSSDDIFLVSIPSLKTPAXXPKPVY

SEQ ID NO: 50615 - protein, 24 aa, Artificial Sequence
  Cyclic GFR-binding peptide
RVIMEYQKYVKPKRGVIFLISIPS

SEQ ID NO: 50616 - protein, 27 aa, Artificial Sequence
  Cyclic GFR-binding peptide
EVVMENSLQEVVKDYEDYYLMTLPELE

SEQ ID NO: 50617 - protein, 38 aa, Artificial Sequence; identical to SEQ ID NO: 9998
  Cyclic GFR-binding peptide
  MOD_RES (2), (34), (35): Xaa is C or S

SEQ ID NO: 50618 - protein, 39 aa, Artificial Sequence; identical to SEQ ID NO: 9999
  Cyclic GFR-binding peptide
  MOD_RES (2), (33), (34): Xaa is C or S

SEQ ID NO: 50619 - protein, 28 aa, Artificial Sequence
  Cyclic GFR-binding peptide
SKVVMNSLQEVKPTRGVYYVIPLPELDQ

SEQ ID NO: 50620 - protein, 24 aa, Artificial Sequence
  Cyclic GFR-binding peptide
MDNSLQEVVNNASDYYVIPLPELR

SEQ ID NO: 50621 - protein, 25 aa, Artificial Sequence
  Cyclic GFR-binding peptide
MNSLQEVKPKRGVYYLITLPELAQP

SEQ ID NO: 50622 - protein, 30 aa, Artificial Sequence
  Cyclic GFR-binding peptide
  MOD_RES (30), (30): Xaa is C or S
VVMNNSLQEIVNSSDDYYLVTLPELQTPAX

SEQ ID NO: 50623 - protein, 36 aa, Artificial Sequence; identical to SEQ ID NO: 10001
  Cyclic GFR-binding peptide
  MOD_RES (2), (33), (34): Xaa is C or S

SEQ ID NO: 50624 - protein, 36 aa, Artificial Sequence; identical to SEQ ID NO: 10002
  Cyclic GFR-binding peptide
  MOD_RES (1), (33), (34): Xaa is C or S

SEQ ID NO: 50625 - protein, 25 aa, Artificial Sequence
  Cyclic GFR-binding peptide
IMEYQKYIKPTKGIIFLISIPSLDQ

SEQ ID NO: 50626 - protein, 31 aa, Artificial Sequence; identical to SEQ ID NO: 10003
  Cyclic GFR-binding peptide
  MOD_RES (31), (31): Xaa is C or S

SEQ ID NO: 50627 - protein, 36 aa, Artificial Sequence; identical to SEQ ID NO: 10004
  Cyclic GFR-binding peptide
  MOD_RES (2), (33), (34): Xaa is C or S

SEQ ID NO: 50628 - protein, 26 aa, Artificial Sequence
  Cyclic GFR-binding peptide
VVMDEYQKYVVKENEDIFLMSIPSLE

SEQ ID NO: 50629 - protein, 40 aa, Artificial Sequence; identical to SEQ ID NO: 10005
  Cyclic GFR-binding peptide
  MOD_RES (2), (4), (36), (37): Xaa is C or S

SEQ ID NO: 50630 - protein, 31 aa, Artificial Sequence
  Cyclic GFR-binding peptide
  MOD_RES (1), (1): Xaa is C or S
XGEVVMDNSLQEVVKENEDYYVMPLPELETP

SEQ ID NO: 50631 - protein, 29 aa, Artificial Sequence
  Cyclic GFR-binding peptide
  MOD_RES (27), (28): Xaa is C or S
DRYKKLVVNNASDFYLISIANLRTPVXXT

SEQ ID NO: 50632 - protein, 35 aa, Artificial Sequence; identical to SEQ ID NO: 10008
  Cyclic GFR-binding peptide
  MOD_RES (1), (3), (35): Xaa is C or S

SEQ ID NO: 50633 - protein, 35 aa, Artificial Sequence; identical to SEQ ID NO: 10010
  Cyclic GFR-binding peptide
  MOD_RES (2), (34), (35): Xaa is C or S

SEQ ID NO: 50634 - protein, 37 aa, Artificial Sequence; identical to SEQ ID NO: 10009
  Cyclic GFR-binding peptide
  MOD_RES (2), (34), (35): Xaa is C or S

SEQ ID NO: 50635 - protein, 24 aa, Artificial Sequence
  Cyclic GFR-binding peptide
MEEYQKYVVKDYEDIFLMSIPSLE

SEQ ID NO: 50636 - protein, 42 aa, Artificial Sequence; identical to SEQ ID NO: 10011
  Cyclic GFR-binding peptide
  MOD_RES (2), (4), (36), (37): Xaa is C or S

SEQ ID NO: 50637 - protein, 40 aa, Artificial Sequence; identical to SEQ ID NO: 10013
  Cyclic GFR-binding peptide
  MOD_RES (2), (4), (35), (36): Xaa is C or S

SEQ ID NO: 50638 - protein, 39 aa, Artificial Sequence; identical to SEQ ID NO: 10016
  Cyclic GFR-binding peptide
  MOD_RES (2), (4), (36), (37): Xaa is C or S

SEQ ID NO: 50639 - protein, 32 aa, Artificial Sequence
  Cyclic GFR-binding peptide
  MOD_RES (28), (28): Xaa is C or S
MNNSLQEIVNSSDDYYVVPLPELKTPAXTPKT

SEQ ID NO: 50640 - protein, 28 aa, Artificial Sequence
  Cyclic GFR-binding peptide
VIMEYQKYIKPTKGIIFLISIPSLDQSV

SEQ ID NO: 50641 - protein, 33 aa, Artificial Sequence
  Cyclic GFR-binding peptide
  MOD_RES (2), (4): Xaa is C or S
RXGXSEVVMDNSLQEVVNNASDYYLITLPELRT

SEQ ID NO: 50642 - protein, 28 aa, Artificial Sequence
  Cyclic GFR-binding peptide
  MOD_RES (26), (27): Xaa is C or S
NSLQEVVKDYEDYYVMPLPELETPVXXA

SEQ ID NO: 50643 - protein, 32 aa, Artificial Sequence
  Cyclic GFR-binding peptide
  MOD_RES (30), (31): Xaa is C or S
VVMDNSLQEVVKENEDYYLMTLPELETPVXXA

SEQ ID NO: 50644 - protein, 24 aa, Artificial Sequence
  Cyclic GFR-binding peptide
VMDEYQKYVVKENEDIFLMSIPSL

SEQ ID NO: 50645 - protein, 39 aa, Artificial Sequence; identical to SEQ ID NO: 10021
  Cyclic GFR-binding peptide
  MOD_RES (2), (34), (35): Xaa is C or S

SEQ ID NO: 50646 - protein, 36 aa, Artificial Sequence; identical to SEQ ID NO: 10023
  Cyclic GFR-binding peptide
  MOD_RES (1), (3), (35), (36): Xaa is C or S

SEQ ID NO: 50647 - protein, 32 aa, Artificial Sequence
  Cyclic GFR-binding peptide
  MOD_RES (27), (28): Xaa is C or S
MEYQKYIKPTKGIIFLISIPSLDQSVXXPSAS

SEQ ID NO: 50648 - protein, 33 aa, Artificial Sequence
  Cyclic GFR-binding peptide
  MOD_RES (29), (30): Xaa is C or S
VMENSLQEVVKDYEDYYLMTLPELETPVXXAKP

SEQ ID NO: 50649 - protein, 28 aa, Artificial Sequence
  Cyclic GFR-binding peptide
VMENSLQEVVKDYEDYYVMPLPELETPV

SEQ ID NO: 50650 - protein, 28 aa, Artificial Sequence
  Cyclic GFR-binding peptide
  MOD_RES (26), (27): Xaa is C or S
EYQKYVKPKRGVIFLISIPSLAQPVXXP

SEQ ID NO: 50651 - protein, 26 aa, Artificial Sequence
  Cyclic GFR-binding peptide
RVVMNEYQKYIVNSSDDIFLVSIPSL

SEQ ID NO: 50652 - protein, 35 aa, Artificial Sequence
  Cyclic GFR-binding peptide
  MOD_RES (29), (30): Xaa is C or S
VMDEYQKYVVKENEDIFLMSIPSLETPVXXAKPIK

SEQ ID NO: 50653 - protein, 36 aa, Artificial Sequence; identical to SEQ ID NO: 10028
  Cyclic GFR-binding peptide
  MOD_RES (2), (33), (34): Xaa is C or S

SEQ ID NO: 50654 - protein, 29 aa, Artificial Sequence
  Cyclic GFR-binding peptide
  MOD_RES (27), (28): Xaa is C or S
DEYQKYVVKENEDIFLMSIPSLETPVXXA

SEQ ID NO: 50655 - protein, 30 aa, Artificial Sequence
  Cyclic GFR-binding peptide
  MOD_RES (28), (29): Xaa is C or S
IMNSLQEIKPTKGIYYVIPLPELDQSVXXP

SEQ ID NO: 50656 - protein, 34 aa, Artificial Sequence
  Cyclic GFR-binding peptide
  MOD_RES (29), (29): Xaa is C or S
VMNNSLQEIVNSSDDYYLVTLPELKTPAXTPKTV

SEQ ID NO: 50657 - protein, 27 aa, Artificial Sequence
  Cyclic GFR-binding peptide
VVMEYQKYVKPTRGVIFLISIPSLDQP

SEQ ID NO: 50658 - protein, 32 aa, Artificial Sequence
  Cyclic GFR-binding peptide
  MOD_RES (29), (30): Xaa is C or S
VIMEYQKYIKPTKGIIFLISIPSLDQSVXXPS

SEQ ID NO: 50659 - protein, 33 aa, Artificial Sequence; identical to SEQ ID NO: 10030
  Cyclic GFR-binding peptide
  MOD_RES (2), (2): Xaa is C or S

SEQ ID NO: 50660 - protein, 24 aa, Artificial Sequence
  Cyclic GFR-binding peptide
VVMENSLQEVVKDYEDYYLMTLPE

SEQ ID NO: 50661 - protein, 28 aa, Artificial Sequence
  Cyclic GFR-binding peptide
  MOD_RES (1), (1): Xaa is C or S
XSEVVMDNSLQEVVNNASDYYLITLPEL

SEQ ID NO: 50662 - protein, 26 aa, Artificial Sequence
  Cyclic GFR-binding peptide
MDEYQKYVVKENEDIFLMSIPSLETP

SEQ ID NO: 50663 - protein, 27 aa, Artificial Sequence
  Cyclic GFR-binding peptide
MDEYQKYVVKENEDIFLMSIPSLETPV

SEQ ID NO: 50664 - protein, 30 aa, Artificial Sequence
  Cyclic GFR-binding peptide
  MOD_RES (26), (27): Xaa is C or S
NSLQEIVNSSDDYYVVPLPELKTPAXXPKP

SEQ ID NO: 50665 - protein, 31 aa, Artificial Sequence
  Cyclic GFR-binding peptide
  MOD_RES (2), (2): Xaa is C or S
GXSRVVMNNSLQEIVNSSDDYYVVPLPELKT

SEQ ID NO: 50666 - protein, 33 aa, Artificial Sequence
  Cyclic GFR-binding peptide
  MOD_RES (29), (30): Xaa is C or S
VMDEYQKYVVKENEDIFLMSIPSLETPVXXAKP

SEQ ID NO: 50667 - protein, 37 aa, Artificial Sequence; identical to SEQ ID NO: 10034
  Cyclic GFR-binding peptide
  MOD_RES (2), (34), (35): Xaa is C or S

SEQ ID NO: 50668 - protein, 31 aa, Artificial Sequence
  Cyclic GFR-binding peptide
  MOD_RES (2), (2): Xaa is C or S
GXGEVVMENSLQEVVKDYEDYYVMPLPELET

SEQ ID NO: 50669 - protein, 27 aa, Artificial Sequence
  Cyclic GFR-binding peptide
VMENSLQEVVKDYEDYYLMTLPELETP

SEQ ID NO: 50670 - protein, 29 aa, Artificial Sequence
  Cyclic GFR-binding peptide
  MOD_RES (26), (27): Xaa is C or S
QYNKLVVNNASDLYLISIASLRTPVXXTP

SEQ ID NO: 50671 - protein, 26 aa, Artificial Sequence
  Cyclic GFR-binding peptide
  MOD_RES (26), (26): Xaa is C or S
EYQKYVVKENEDIFLMSIPSLETPVX

SEQ ID NO: 50672 - protein, 23 aa, Artificial Sequence
  Cyclic GFR-binding peptide
IMNSLQEVKPKRGVYYLITLPEL

SEQ ID NO: 50673 - protein, 25 aa, Artificial Sequence
  Cyclic GFR-binding peptide
RVVMNEYQKYIVNSSDDIFLVSIPS

SEQ ID NO: 50674 - protein, 32 aa, Artificial Sequence; identical to SEQ ID NO: 10040
  Cyclic GFR-binding peptide
  MOD_RES (31), (32): Xaa is C or S

SEQ ID NO: 50675 - protein, 36 aa, Artificial Sequence; identical to SEQ ID NO: 10041
  Cyclic GFR-binding peptide
  MOD_RES (2), (34), (35): Xaa is C or S

SEQ ID NO: 50676 - protein, 34 aa, Artificial Sequence; identical to SEQ ID NO: 10043
  Cyclic GFR-binding peptide
  MOD_RES (1), (3): Xaa is C or S

SEQ ID NO: 50677 - protein, 37 aa, Artificial Sequence; identical to SEQ ID NO: 10045
  Cyclic GFR-binding peptide
  MOD_RES (31), (32): Xaa is C or S

SEQ ID NO: 50678 - protein, 28 aa, Artificial Sequence
  Cyclic GFR-binding peptide
SEVVMDNSLQEVVNNASDYYLITLPELR

SEQ ID NO: 50679 - protein, 33 aa, Artificial Sequence; identical to SEQ ID NO: 10047
  Cyclic GFR-binding peptide
  MOD_RES (31), (32): Xaa is C or S

SEQ ID NO: 50680 - protein, 34 aa, Artificial Sequence
  Cyclic GFR-binding peptide
  MOD_RES (30), (31): Xaa is C or S
KVIMEYQKYIKPTKGIIFLISIPSLDQSVXXPSA

SEQ ID NO: 50681 - protein, 28 aa, Artificial Sequence
  Cyclic GFR-binding peptide
VIMNSLQEIKPTKGIYYVIPLPELDQSV

SEQ ID NO: 50682 - protein, 26 aa, Artificial Sequence
  Cyclic GFR-binding peptide
EVVMDEYQKYVVKENEDIFLMSIPSL

SEQ ID NO: 50683 - protein, 38 aa, Artificial Sequence; identical to SEQ ID NO: 10049
  Cyclic GFR-binding peptide
  MOD_RES (2), (4), (35), (36): Xaa is C or S

SEQ ID NO: 50684 - protein, 31 aa, Artificial Sequence
  Cyclic GFR-binding peptide
  MOD_RES (26), (27): Xaa is C or S
NSLQEIVNSSDDYYVVPLPELKTPAXXPKPV

SEQ ID NO: 50685 - protein, 28 aa, Artificial Sequence
  Cyclic GFR-binding peptide
  MOD_RES (28), (28): Xaa is C or S
IMEYQKYVKPKRGVIFLISIPSLAQPVX

SEQ ID NO: 50686 - protein, 35 aa, Artificial Sequence
  Cyclic GFR-binding peptide
  MOD_RES (30), (31): Xaa is C or S
VVMNNSLQEIVNSSDDYYLVTLPELQTPAXXPKPV

SEQ ID NO: 50687 - protein, 34 aa, Artificial Sequence; identical to SEQ ID NO: 10053
  Cyclic GFR-binding peptide
  MOD_RES (31), (32): Xaa is C or S

SEQ ID NO: 50688 - protein, 23 aa, Artificial Sequence
  Cyclic GFR-binding peptide
VMNNSLQEIVNSSDDYYLVTLPE

SEQ ID NO: 50689 - protein, 26 aa, Artificial Sequence
  Cyclic GFR-binding peptide
MDRYKKLVVNNASDFYLISIANLRTP

SEQ ID NO: 50690 - protein, 36 aa, Artificial Sequence
  Cyclic GFR-binding peptide
  MOD_RES (30), (31): Xaa is C or S
VVMNEYQKYIVNSSDDIFLVSIPSLQTPAXXPKPVT

SEQ ID NO: 50691 - protein, 36 aa, Artificial Sequence; identical to SEQ ID NO: 10056
  Cyclic GFR-binding peptide
  MOD_RES (31), (32): Xaa is C or S

SEQ ID NO: 50692 - protein, 28 aa, Artificial Sequence
  Cyclic GFR-binding peptide
  MOD_RES (28), (28): Xaa is C or S
MDNSLQEVVNNASDYYLITLPELRTPVX

SEQ ID NO: 50693 - protein, 37 aa, Artificial Sequence; identical to SEQ ID NO: 10057
  Cyclic GFR-binding peptide
  MOD_RES (2), (34), (35): Xaa is C or S

SEQ ID NO: 50694 - protein, 33 aa, Artificial Sequence
  Cyclic GFR-binding peptide
  MOD_RES (28), (29): Xaa is C or S
MDQYNKLVVNNASDLYLISIASLRTPVXXTPPT

SEQ ID NO: 50695 - protein, 34 aa, Artificial Sequence; identical to SEQ ID NO: 10059
  Cyclic GFR-binding peptide
  MOD_RES (1), (3): Xaa is C or S

SEQ ID NO: 50696 - protein, 27 aa, Artificial Sequence
  Cyclic GFR-binding peptide
SKVIMEYQKYIKPTKGIIFLISIPSLD

SEQ ID NO: 50697 - protein, 35 aa, Artificial Sequence; identical to SEQ ID NO: 10063
  Cyclic GFR-binding peptide
  MOD_RES (31), (31): Xaa is C or S

SEQ ID NO: 50698 - protein, 30 aa, Artificial Sequence; identical to SEQ ID NO: 2120
  Cyclic GFR-binding peptide

SEQ ID NO: 50699 - protein, 35 aa, Artificial Sequence; identical to SEQ ID NO: 10064
  Cyclic GFR-binding peptide
  MOD_RES (2), (4): Xaa is C or S

SEQ ID NO: 50700 - protein, 33 aa, Artificial Sequence
  Cyclic GFR-binding peptide
  MOD_RES (29), (29): Xaa is C or S
VMNNSLQEIVNSSDDYYLVTLPELKTPAXTPKT

SEQ ID NO: 50701 - protein, 30 aa, Artificial Sequence
  Cyclic GFR-binding peptide
  MOD_RES (26), (27): Xaa is C or S
NSLQEVVNNASDYYVIPLPELRTPVXXTPP

SEQ ID NO: 50702 - protein, 31 aa, Artificial Sequence
  Cyclic GFR-binding peptide
  MOD_RES (2), (4): Xaa is C or S
RXGXGEVVMDEYQKYVVKENEDIFLMSIPSL

SEQ ID NO: 50703 - protein, 32 aa, Artificial Sequence
  Cyclic GFR-binding peptide
  MOD_RES (28), (29): Xaa is C or S
MDNSLQEVVNNASDYYLITLPELRTPVXXTPP

SEQ ID NO: 50704 - protein, 39 aa, Artificial Sequence; identical to SEQ ID NO: 10072
  Cyclic GFR-binding peptide
  MOD_RES (2), (33), (34): Xaa is C or S

SEQ ID NO: 50705 - protein, 28 aa, Artificial Sequence
  Cyclic GFR-binding peptide
VIMNSLQEVKPKRGVYYLITLPELAQPV

SEQ ID NO: 50706 - protein, 37 aa, Artificial Sequence; identical to SEQ ID NO: 10073
  Cyclic GFR-binding peptide
  MOD_RES (2), (33), (34): Xaa is C or S

SEQ ID NO: 50707 - protein, 25 aa, Artificial Sequence
  Cyclic GFR-binding peptide
MNNSLQEIVNSSDDYYLVTLPELQT

SEQ ID NO: 50708 - protein, 29 aa, Artificial Sequence
  Cyclic GFR-binding peptide
  MOD_RES (26), (27): Xaa is C or S
NSLQEIKPTKGIYYVIPLPELDQSVXXPS

SEQ ID NO: 50709 - protein, 24 aa, Artificial Sequence
  Cyclic GFR-binding peptide
MDQYNKLVVNNASDLYLISIASLR

SEQ ID NO: 50710 - protein, 35 aa, Artificial Sequence; identical to SEQ ID NO: 10078
  Cyclic GFR-binding peptide
  MOD_RES (32), (33): Xaa is C or S

SEQ ID NO: 50711 - protein, 36 aa, Artificial Sequence
  Cyclic GFR-binding peptide
  MOD_RES (30), (30): Xaa is C or S
VVMNNSLQEIVNSSDDYYVVPLPELKTPAXTPKTVH

SEQ ID NO: 50712 - protein, 33 aa, Artificial Sequence
  Cyclic GFR-binding peptide
  MOD_RES (2), (4): Xaa is C or S
RXGXGEVVMEEYQKYVVKDYEDIFLMSIPSLET

SEQ ID NO: 50713 - protein, 28 aa, Artificial Sequence
  Cyclic GFR-binding peptide
  MOD_RES (27), (28): Xaa is C or S
DQYNKLVVNNASDLYLISIASLRTPVXX

SEQ ID NO: 50714 - protein, 36 aa, Artificial Sequence; identical to SEQ ID NO: 10079
  Cyclic GFR-binding peptide
  MOD_RES (31), (32): Xaa is C or S

SEQ ID NO: 50715 - protein, 36 aa, Artificial Sequence
  Cyclic GFR-binding peptide
  MOD_RES (30), (31): Xaa is C or S
VVMEEYQKYVVKDYEDIFLMSIPSLETPVXXAKPIS

SEQ ID NO: 50716 - protein, 34 aa, Artificial Sequence
  Cyclic GFR-binding peptide
  MOD_RES (2), (4): Xaa is C or S
HXGXSRVVMNEYQKYIVNSSDDIFLVSIPSLKTP

SEQ ID NO: 50717 - protein, 33 aa, Artificial Sequence
  Cyclic GFR-binding peptide
  MOD_RES (28), (28): Xaa is C or S
MNEYQKYIVNSSDDIFLVSIPSLKTPAXTPKTV

SEQ ID NO: 50718 - protein, 38 aa, Artificial Sequence; identical to SEQ ID NO: 10080
  Cyclic GFR-binding peptide
  MOD_RES (32), (33): Xaa is C or S

SEQ ID NO: 50719 - protein, 25 aa, Artificial Sequence
  Cyclic GFR-binding peptide
VVMENSLQEVVKDYEDYYLMTLPEL

SEQ ID NO: 50720 - protein, 41 aa, Artificial Sequence; identical to SEQ ID NO: 10081
  Cyclic GFR-binding peptide
  MOD_RES (2), (4), (35), (36): Xaa is C or S

SEQ ID NO: 50721 - protein, 28 aa, Artificial Sequence
  Cyclic GFR-binding peptide
VMDNSLQEVVNNASDYYLITLPELRTPV

SEQ ID NO: 50722 - protein, 22 aa, Artificial Sequence
  Cyclic GFR-binding peptide
NSLQEIVNSSDDYYVVPLPELQ

SEQ ID NO: 50723 - protein, 32 aa, Artificial Sequence; identical to SEQ ID NO: 10083
  Cyclic GFR-binding peptide
  MOD_RES (1), (1): Xaa is C or S

SEQ ID NO: 50724 - protein, 32 aa, Artificial Sequence; identical to SEQ ID NO: 10084
  Cyclic GFR-binding peptide
  MOD_RES (32), (32): Xaa is C or S

SEQ ID NO: 50725 - protein, 29 aa, Artificial Sequence
  Cyclic GFR-binding peptide
RVVMNNSLQEIVNSSDDYYVVPLPELQTP

SEQ ID NO: 50726 - protein, 39 aa, Artificial Sequence; identical to SEQ ID NO: 10086
  Cyclic GFR-binding peptide
  MOD_RES (2), (4), (36), (37): Xaa is C or S

SEQ ID NO: 50727 - protein, 31 aa, Artificial Sequence
  Cyclic GFR-binding peptide
  MOD_RES (29), (29): Xaa is C or S
VMNNSLQEIVNSSDDYYLVTLPELKTPAXTP

SEQ ID NO: 50728 - protein, 24 aa, Artificial Sequence
  Cyclic GFR-binding peptide
VMDNSLQEVVKENEDYYVMPLPEL

SEQ ID NO: 50729 - protein, 25 aa, Artificial Sequence
  Cyclic GFR-binding peptide
NSLQEVVNNASDYYLITLPELRTPV

SEQ ID NO: 50730 - protein, 32 aa, Artificial Sequence
  Cyclic GFR-binding peptide
  MOD_RES (30), (31): Xaa is C or S
VVMDNSLQEVVNNASDYYVIPLPELRTPVXXT

SEQ ID NO: 50731 - protein, 38 aa, Artificial Sequence; identical to SEQ ID NO: 10087
  Cyclic GFR-binding peptide
  MOD_RES (2), (4), (36), (37): Xaa is C or S

SEQ ID NO: 50732 - protein, 40 aa, Artificial Sequence; identical to SEQ ID NO: 10088
  Cyclic GFR-binding peptide
  MOD_RES (2), (4), (36), (37): Xaa is C or S

SEQ ID NO: 50733 - protein, 29 aa, Artificial Sequence
  Cyclic GFR-binding peptide
AAAAAAAAAEYQKYVVKENEDIFLMSIPS

SEQ ID NO: 50734 - protein, 36 aa, Artificial Sequence
  Cyclic GFR-binding peptide
  MOD_RES (30), (31): Xaa is C or S
VVMDNSLQEVVNNASDYYVIPLPELRTPVXXTPPTS

SEQ ID NO: 50735 - protein, 34 aa, Artificial Sequence; identical to SEQ ID NO: 10091
  Cyclic GFR-binding peptide
  MOD_RES (1), (3): Xaa is C or S

SEQ ID NO: 50736 - protein, 34 aa, Artificial Sequence; identical to SEQ ID NO: 10092
  Cyclic GFR-binding peptide
  MOD_RES (1), (32), (33): Xaa is C or S

SEQ ID NO: 50737 - protein, 36 aa, Artificial Sequence; identical to SEQ ID NO: 10093
  Cyclic GFR-binding peptide
  MOD_RES (1), (3), (34), (35): Xaa is C or S

SEQ ID NO: 50738 - protein, 42 aa, Artificial Sequence; identical to SEQ ID NO: 10094
  Cyclic GFR-binding peptide
  MOD_RES (2), (4), (36), (37): Xaa is C or S

SEQ ID NO: 50739 - protein, 27 aa, Artificial Sequence
  Cyclic GFR-binding peptide
  MOD_RES (27), (27): Xaa is C or S
ENSLQEVVKDYEDYYLMTLPELETPVX

SEQ ID NO: 50740 - protein, 33 aa, Artificial Sequence
  Cyclic GFR-binding peptide
  MOD_RES (2), (4): Xaa is C or S
RXGXSEVVMDNSLQEVVNNASDYYVIPLPELRT

SEQ ID NO: 50741 - protein, 37 aa, Artificial Sequence; identical to SEQ ID NO: 10097
  Cyclic GFR-binding peptide
  MOD_RES (31), (31): Xaa is C or S

SEQ ID NO: 50742 - protein, 20 aa, Artificial Sequence
  Cyclic GFR-binding peptide
NSLQEIVNSSDDYYVVPLPE

SEQ ID NO: 50743 - protein, 38 aa, Artificial Sequence; identical to SEQ ID NO: 10098
  Cyclic GFR-binding peptide
  MOD_RES (2), (4), (36), (37): Xaa is C or S

SEQ ID NO: 50744 - protein, 29 aa, Artificial Sequence
  Cyclic GFR-binding peptide
  MOD_RES (29), (29): Xaa is C or S
VMNNSLQEIVNSSDDYYVVPLPELQTPAX

SEQ ID NO: 50745 - protein, 23 aa, Artificial Sequence
  Cyclic GFR-binding peptide
MEYQKYVKPTRGVIFLISIPSLD

SEQ ID NO: 50746 - protein, 38 aa, Artificial Sequence; identical to SEQ ID NO: 10099
  Cyclic GFR-binding peptide
  MOD_RES (32), (33): Xaa is C or S

SEQ ID NO: 50747 - protein, 27 aa, Artificial Sequence
  Cyclic GFR-binding peptide
  MOD_RES (26), (26): Xaa is C or S
NSLQEIVNSSDDYYVVPLPELKTPAXT

SEQ ID NO: 50748 - protein, 31 aa, Artificial Sequence; identical to SEQ ID NO: 10100
  Cyclic GFR-binding peptide

SEQ ID NO: 50749 - protein, 32 aa, Artificial Sequence
  Cyclic GFR-binding peptide
  MOD_RES (26), (27): Xaa is C or S
NSLQEIVNSSDDYYLVTLPELKTPAXXPKPVY

SEQ ID NO: 50750 - protein, 32 aa, Artificial Sequence
  Cyclic GFR-binding peptide
  MOD_RES (30), (31): Xaa is C or S
VVMNEYQKYIVNSSDDIFLVSIPSLQTPAXXP

SEQ ID NO: 50751 - protein, 20 aa, Artificial Sequence
  Cyclic GFR-binding peptide
NSLQEVVNNASDYYLITLPE

SEQ ID NO: 50752 - protein, 36 aa, Artificial Sequence; identical to SEQ ID NO: 10102
  Cyclic GFR-binding peptide
  MOD_RES (1), (33), (34): Xaa is C or S

SEQ ID NO: 50753 - protein, 25 aa, Artificial Sequence
  Cyclic GFR-binding peptide
VIMNSLQEVKPKRGVYYLITLPELA

SEQ ID NO: 50754 - protein, 30 aa, Artificial Sequence
  Cyclic GFR-binding peptide
  MOD_RES (26), (27): Xaa is C or S
NSLQEVVKENEDYYLMTLPELETPVXXAKP

SEQ ID NO: 50755 - protein, 36 aa, Artificial Sequence; identical to SEQ ID NO: 10106
  Cyclic GFR-binding peptide
  MOD_RES (1), (3), (35): Xaa is C or S

SEQ ID NO: 50756 - protein, 24 aa, Artificial Sequence
  Cyclic GFR-binding peptide
MNNSLQEIVNSSDDYYVVPLPELK

SEQ ID NO: 50757 - protein, 33 aa, Artificial Sequence
  Cyclic GFR-binding peptide
  MOD_RES (29), (30): Xaa is C or S
VMDNSLQEVVKENEDYYVMPLPELETPVXXAKP

SEQ ID NO: 50758 - protein, 29 aa, Artificial Sequence
  Cyclic GFR-binding peptide
  MOD_RES (2), (2): Xaa is C or S
GXARVVMNNSLQEIVNSSDDYYVVPLPEL

SEQ ID NO: 50759 - protein, 23 aa, Artificial Sequence
  Cyclic GFR-binding peptide
MNSLQEIKPTKGIYYVIPLPELD

SEQ ID NO: 50760 - protein, 33 aa, Artificial Sequence
  Cyclic GFR-binding peptide
  MOD_RES (28), (29): Xaa is C or S
MDNSLQEVVNNASDYYVIPLPELRTPVXXTPPT

SEQ ID NO: 50761 - protein, 32 aa, Artificial Sequence
  Cyclic GFR-binding peptide
  MOD_RES (2), (2): Xaa is C or S
GXSEVVMDNSLQEVVNNASDYYLITLPELRTP

SEQ ID NO: 50762 - protein, 32 aa, Artificial Sequence
  Cyclic GFR-binding peptide
  MOD_RES (29), (30): Xaa is C or S
VIMNSLQEIKPTKGIYYVIPLPELDQSVXXPS

SEQ ID NO: 50763 - protein, 32 aa, Artificial Sequence
  Cyclic GFR-binding peptide
  MOD_RES (2), (4): Xaa is C or S
HXGXARVVMNEYQKYIVNSSDDIFLVSIPSLQ

SEQ ID NO: 50764 - protein, 37 aa, Artificial Sequence; identical to SEQ ID NO: 10108
  Cyclic GFR-binding peptide
  MOD_RES (2), (4), (36), (37): Xaa is C or S

SEQ ID NO: 50765 - protein, 31 aa, Artificial Sequence; identical to SEQ ID NO: 10109
  Cyclic GFR-binding peptide
  MOD_RES (31), (31): Xaa is C or S

SEQ ID NO: 50766 - protein, 37 aa, Artificial Sequence; identical to SEQ ID NO: 10110
  Cyclic GFR-binding peptide
  MOD_RES (2), (4), (35), (36): Xaa is C or S

SEQ ID NO: 50767 - protein, 24 aa, Artificial Sequence
  Cyclic GFR-binding peptide
VVMNSLQEVKPTRGVYYVIPLPEL

SEQ ID NO: 50768 - protein, 27 aa, Artificial Sequence
  Cyclic GFR-binding peptide
MENSLQEVVKDYEDYYVMPLPELETPV

SEQ ID NO: 50769 - protein, 37 aa, Artificial Sequence; identical to SEQ ID NO: 10111
  Cyclic GFR-binding peptide
  MOD_RES (2), (34), (35): Xaa is C or S

SEQ ID NO: 50770 - protein, 31 aa, Artificial Sequence
  Cyclic GFR-binding peptide
  MOD_RES (30), (31): Xaa is C or S
VVMDQYNKLVVNNASDLYLISIASLRTPVXX

SEQ ID NO: 50771 - protein, 30 aa, Artificial Sequence; identical to SEQ ID NO: 10112
  Cyclic GFR-binding peptide

SEQ ID NO: 50772 - protein, 36 aa, Artificial Sequence; identical to SEQ ID NO: 10113
  Cyclic GFR-binding peptide
  MOD_RES (1), (3), (35), (36): Xaa is C or S

SEQ ID NO: 50773 - protein, 32 aa, Artificial Sequence
  Cyclic GFR-binding peptide
  MOD_RES (27), (28): Xaa is C or S
MNSLQEVKPTRGVYYVIPLPELDQPVXXPSAS

SEQ ID NO: 50774 - protein, 37 aa, Artificial Sequence; identical to SEQ ID NO: 10115
  Cyclic GFR-binding peptide
  MOD_RES (2), (34), (35): Xaa is C or S

SEQ ID NO: 50775 - protein, 38 aa, Artificial Sequence; identical to SEQ ID NO: 10118
  Cyclic GFR-binding peptide
  MOD_RES (1), (32), (33): Xaa is C or S

SEQ ID NO: 50776 - protein, 26 aa, Artificial Sequence
  Cyclic GFR-binding peptide
VMDNSLQEVVKENEDYYLMTLPELET

SEQ ID NO: 50777 - protein, 28 aa, Artificial Sequence
  Cyclic GFR-binding peptide
  MOD_RES (26), (26): Xaa is C or S
NSLQEIVNSSDDYYVVPLPELKTPAXTP

SEQ ID NO: 50778 - protein, 32 aa, Artificial Sequence
  Cyclic GFR-binding peptide
  MOD_RES (29), (30): Xaa is C or S
VMNEYQKYIVNSSDDIFLVSIPSLKTPAXXPK

SEQ ID NO: 50779 - protein, 29 aa, Artificial Sequence
  Cyclic GFR-binding peptide
  MOD_RES (2), (4): Xaa is C or S
SXKXSRVIMNSLQEVKPKRGVYYLITLPE

SEQ ID NO: 50780 - protein, 32 aa, Artificial Sequence
  Cyclic GFR-binding peptide
  MOD_RES (29), (29): Xaa is C or S
VMNEYQKYIVNSSDDIFLVSIPSLKTPAXTPK

SEQ ID NO: 50781 - protein, 30 aa, Artificial Sequence
  Cyclic GFR-binding peptide
  MOD_RES (28), (29): Xaa is C or S
MNNSLQEIVNSSDDYYVVPLPELQTPAXXP

SEQ ID NO: 50782 - protein, 31 aa, Artificial Sequence; identical to SEQ ID NO: 10120
  Cyclic GFR-binding peptide
  MOD_RES (31), (31): Xaa is C or S

SEQ ID NO: 50783 - protein, 38 aa, Artificial Sequence; identical to SEQ ID NO: 10121
  Cyclic GFR-binding peptide
  MOD_RES (32), (33): Xaa is C or S

SEQ ID NO: 50784 - protein, 31 aa, Artificial Sequence
  Cyclic GFR-binding peptide
  MOD_RES (1), (3): Xaa is C or S
XKXSRVIMEYQKYVKPKRGVIFLISIPSLAQ

SEQ ID NO: 50785 - protein, 27 aa, Artificial Sequence
  Cyclic GFR-binding peptide
  MOD_RES (26), (27): Xaa is C or S
NSLQEIVNSSDDYYVVPLPELKTPAXX

SEQ ID NO: 50786 - protein, 36 aa, Artificial Sequence; identical to SEQ ID NO: 10123
  Cyclic GFR-binding peptide
  MOD_RES (1), (33), (34): Xaa is C or S

SEQ ID NO: 50787 - protein, 25 aa, Artificial Sequence
  Cyclic GFR-binding peptide
RVIMEYQKYVKPKRGVIFLISIPSL

SEQ ID NO: 50788 - protein, 30 aa, Artificial Sequence
  Cyclic GFR-binding peptide
  MOD_RES (2), (2): Xaa is C or S
GXGEVVMENSLQEVVKDYEDYYLMTLPELE

SEQ ID NO: 50789 - protein, 28 aa, Artificial Sequence
  Cyclic GFR-binding peptide
  MOD_RES (26), (27): Xaa is C or S
NSLQEVVNNASDYYLITLPELRTPVXXT

SEQ ID NO: 50790 - protein, 35 aa, Artificial Sequence
  Cyclic GFR-binding peptide
  MOD_RES (30), (31): Xaa is C or S
VVMENSLQEVVKDYEDYYVMPLPELETPVXXAKPI

SEQ ID NO: 50791 - protein, 26 aa, Artificial Sequence
  Cyclic GFR-binding peptide
  MOD_RES (26), (26): Xaa is C or S
NSLQEIVNSSDDYYLVTLPELQTPAX

SEQ ID NO: 50792 - protein, 24 aa, Artificial Sequence
  Cyclic GFR-binding peptide
VVMEYQKYVKPTRGVIFLISIPSL

SEQ ID NO: 50793 - protein, 34 aa, Artificial Sequence
  Cyclic GFR-binding peptide
  MOD_RES (28), (29): Xaa is C or S
MDNSLQEVVNNASDYYLITLPELRTPVXXTPPTS

SEQ ID NO: 50794 - protein, 31 aa, Artificial Sequence
  Cyclic GFR-binding peptide
  MOD_RES (2), (2): Xaa is C or S
GXGEVVMDEYQKYVVKENEDIFLMSIPSLET

SEQ ID NO: 50795 - protein, 35 aa, Artificial Sequence; identical to SEQ ID NO: 10128
  Cyclic GFR-binding peptide
  MOD_RES (2), (33), (34): Xaa is C or S

SEQ ID NO: 50796 - protein, 38 aa, Artificial Sequence; identical to SEQ ID NO: 10127
  Cyclic GFR-binding peptide
  MOD_RES (1), (3), (35), (36): Xaa is C or S

SEQ ID NO: 50797 - protein, 33 aa, Artificial Sequence
  Cyclic GFR-binding peptide
  MOD_RES (30), (31): Xaa is C or S
VVMNNSLQEIVNSSDDYYLVTLPELQTPAXXPK

SEQ ID NO: 50798 - protein, 36 aa, Artificial Sequence; identical to SEQ ID NO: 10129
  Cyclic GFR-binding peptide
  MOD_RES (2), (4), (36): Xaa is C or S

SEQ ID NO: 50799 - protein, 27 aa, Artificial Sequence
  Cyclic GFR-binding peptide
VVMDNSLQEVVNNASDYYVIPLPELRT

SEQ ID NO: 50800 - protein, 35 aa, Artificial Sequence; identical to SEQ ID NO: 10130
  Cyclic GFR-binding peptide
  MOD_RES (1), (33), (34): Xaa is C or S

SEQ ID NO: 50801 - protein, 27 aa, Artificial Sequence
  Cyclic GFR-binding peptide
  MOD_RES (27), (27): Xaa is C or S
DEYQKYVVKENEDIFLMSIPSLETPVX

SEQ ID NO: 50802 - protein, 33 aa, Artificial Sequence
  Cyclic GFR-binding peptide
  MOD_RES (30), (30): Xaa is C or S
VVMNEYQKYIVNSSDDIFLVSIPSLKTPAXTPK

SEQ ID NO: 50803 - protein, 33 aa, Artificial Sequence; identical to SEQ ID NO: 10135
  Cyclic GFR-binding peptide
  MOD_RES (32), (33): Xaa is C or S

SEQ ID NO: 50804 - protein, 30 aa, Artificial Sequence
  Cyclic GFR-binding peptide
  MOD_RES (30), (30): Xaa is C or S
VVMDEYQKYVVKENEDIFLMSIPSLETPVX

SEQ ID NO: 50805 - protein, 23 aa, Artificial Sequence
  Cyclic GFR-binding peptide
VMDNSLQEVVNNASDYYLITLPE

SEQ ID NO: 50806 - protein, 30 aa, Artificial Sequence
  Cyclic GFR-binding peptide
  MOD_RES (1), (3): Xaa is C or S
XKXSKVVMEYQKYVKPTRGVIFLISIPSLD

SEQ ID NO: 50807 - protein, 31 aa, Artificial Sequence
  Cyclic GFR-binding peptide
  MOD_RES (28), (28): Xaa is C or S
MNEYQKYIVNSSDDIFLVSIPSLKTPAXTPK

SEQ ID NO: 50808 - protein, 31 aa, Artificial Sequence
  Cyclic GFR-binding peptide
  MOD_RES (29), (30): Xaa is C or S
VMDNSLQEVVNNASDYYVIPLPELRTPVXXT

SEQ ID NO: 50809 - protein, 36 aa, Artificial Sequence; identical to SEQ ID NO: 10139
  Cyclic GFR-binding peptide
  MOD_RES (2), (33), (34): Xaa is C or S

SEQ ID NO: 50810 - protein, 36 aa, Artificial Sequence; identical to SEQ ID NO: 10140
  Cyclic GFR-binding peptide
  MOD_RES (32), (33): Xaa is C or S

SEQ ID NO: 50811 - protein, 29 aa, Artificial Sequence
  Cyclic GFR-binding peptide
  MOD_RES (27), (28): Xaa is C or S
MNSLQEIKPTKGIYYVIPLPELDQSVXXP

SEQ ID NO: 50812 - protein, 27 aa, Artificial Sequence
  Cyclic GFR-binding peptide
GEVVMENSLQEVVKDYEDYYLMTLPEL

SEQ ID NO: 50813 - protein, 41 aa, Artificial Sequence; identical to SEQ ID NO: 10143
  Cyclic GFR-binding peptide
  MOD_RES (2), (4), (35), (36): Xaa is C or S

SEQ ID NO: 50814 - protein, 29 aa, Artificial Sequence
  Cyclic GFR-binding peptide
  MOD_RES (26), (27): Xaa is C or S
NSLQEVKPTRGVYYVIPLPELDQPVXXPS

SEQ ID NO: 50815 - protein, 34 aa, Artificial Sequence; identical to SEQ ID NO: 10146
  Cyclic GFR-binding peptide
  MOD_RES (1), (33), (34): Xaa is C or S

SEQ ID NO: 50816 - protein, 41 aa, Artificial Sequence; identical to SEQ ID NO: 10147
  Cyclic GFR-binding peptide
  MOD_RES (2), (4), (36), (37): Xaa is C or S

SEQ ID NO: 50817 - protein, 23 aa, Artificial Sequence
  Cyclic GFR-binding peptide
MENSLQEVVKDYEDYYVMPLPEL

SEQ ID NO: 50818 - protein, 33 aa, Artificial Sequence
  Cyclic GFR-binding peptide
  MOD_RES (1), (3): Xaa is C or S
XGXGEVVMDNSLQEVVKENEDYYVMPLPELETP

SEQ ID NO: 50819 - protein, 29 aa, Artificial Sequence
  Cyclic GFR-binding peptide
  MOD_RES (28), (29): Xaa is C or S
IMNSLQEVKPKRGVYYLITLPELAQPVXX

SEQ ID NO: 50820 - protein, 37 aa, Artificial Sequence; identical to SEQ ID NO: 10149
  Cyclic GFR-binding peptide
  MOD_RES (2), (4), (36), (37): Xaa is C or S

SEQ ID NO: 50821 - protein, 29 aa, Artificial Sequence
  Cyclic GFR-binding peptide
SEVVMDRYKKLVVNNASDFYLISIANLRT

SEQ ID NO: 50822 - protein, 36 aa, Artificial Sequence; identical to SEQ ID NO: 10150
  Cyclic GFR-binding peptide
  MOD_RES (32), (33): Xaa is C or S

SEQ ID NO: 50823 - protein, 30 aa, Artificial Sequence
  Cyclic GFR-binding peptide
  MOD_RES (28), (29): Xaa is C or S
VMNSLQEVKPTRGVYYVIPLPELDQPVXXP

SEQ ID NO: 50824 - protein, 29 aa, Artificial Sequence
  Cyclic GFR-binding peptide
SRVVMNNSLQEIVNSSDDYYLVTLPELKT

SEQ ID NO: 50825 - protein, 38 aa, Artificial Sequence; identical to SEQ ID NO: 10153
  Cyclic GFR-binding peptide
  MOD_RES (32), (33): Xaa is C or S

SEQ ID NO: 50826 - protein, 35 aa, Artificial Sequence
  Cyclic GFR-binding peptide
  MOD_RES (30), (31): Xaa is C or S
KVVMEYQKYVKPTRGVIFLISIPSLDQPVXXPSAS

SEQ ID NO: 50827 - protein, 32 aa, Artificial Sequence; identical to SEQ ID NO: 10154
  Cyclic GFR-binding peptide
  MOD_RES (32), (32): Xaa is C or S

SEQ ID NO: 50828 - protein, 29 aa, Artificial Sequence
  Cyclic GFR-binding peptide
GEVVMEEYQKYVVKDYEDIFLMSIPSLET

SEQ ID NO: 50829 - protein, 26 aa, Artificial Sequence
  Cyclic GFR-binding peptide
MENSLQEVVKDYEDYYVMPLPELETP

SEQ ID NO: 50830 - protein, 38 aa, Artificial Sequence; identical to SEQ ID NO: 10156
  Cyclic GFR-binding peptide
  MOD_RES (2), (4), (36): Xaa is C or S

SEQ ID NO: 50831 - protein, 27 aa, Artificial Sequence
  Cyclic GFR-binding peptide
VMDNSLQEVVKENEDYYVMPLPELETP

SEQ ID NO: 50832 - protein, 36 aa, Artificial Sequence; identical to SEQ ID NO: 10160
  Cyclic GFR-binding peptide
  MOD_RES (31), (32): Xaa is C or S

SEQ ID NO: 50833 - protein, 29 aa, Artificial Sequence
  Cyclic GFR-binding peptide
ARVVMNNSLQEIVNSSDDYYVVPLPELQT

SEQ ID NO: 50834 - protein, 21 aa, Artificial Sequence
  Cyclic GFR-binding peptide
ENSLQEVVKDYEDYYLMTLPE

SEQ ID NO: 50835 - protein, 28 aa, Artificial Sequence
  Cyclic GFR-binding peptide
  MOD_RES (2), (2): Xaa is C or S
GXARVVMNEYQKYIVNSSDDIFLVSIPS

SEQ ID NO: 50836 - protein, 26 aa, Artificial Sequence
  Cyclic GFR-binding peptide
MNEYQKYIVNSSDDIFLVSIPSLQTP

SEQ ID NO: 50837 - protein, 29 aa, Artificial Sequence
  Cyclic GFR-binding peptide
  MOD_RES (1), (1): Xaa is C or S
XSEVVMDNSLQEVVNNASDYYLITLPELR

SEQ ID NO: 50838 - protein, 40 aa, Artificial Sequence; identical to SEQ ID NO: 10163
  Cyclic GFR-binding peptide
  MOD_RES (1), (3), (34), (35): Xaa is C or S

SEQ ID NO: 50839 - protein, 34 aa, Artificial Sequence
  Cyclic GFR-binding peptide
  MOD_RES (29), (30): Xaa is C or S
VVMNSLQEVKPTRGVYYVIPLPELDQPVXXPSAS

SEQ ID NO: 50840 - protein, 31 aa, Artificial Sequence; identical to SEQ ID NO: 10164
  Cyclic GFR-binding peptide

SEQ ID NO: 50841 - protein, 26 aa, Artificial Sequence
  Cyclic GFR-binding peptide
SEVVMDRYKKLVVNNASDFYLISIAN

SEQ ID NO: 50842 - protein, 33 aa, Artificial Sequence; identical to SEQ ID NO: 10165
  Cyclic GFR-binding peptide
  MOD_RES (2), (33): Xaa is C or S

SEQ ID NO: 50843 - protein, 30 aa, Artificial Sequence
  Cyclic GFR-binding peptide
  MOD_RES (28), (29): Xaa is C or S
MDNSLQEVVNNASDYYLITLPELRTPVXXT

SEQ ID NO: 50844 - protein, 36 aa, Artificial Sequence; identical to SEQ ID NO: 10167
  Cyclic GFR-binding peptide
  MOD_RES (1), (3), (35): Xaa is C or S

SEQ ID NO: 50845 - protein, 33 aa, Artificial Sequence
  Cyclic GFR-binding peptide
  MOD_RES (2), (4): Xaa is C or S
SXKXSRVIMEYQKYVKPKRGVIFLISIPSLAQP

SEQ ID NO: 50846 - protein, 38 aa, Artificial Sequence; identical to SEQ ID NO: 10169
  Cyclic GFR-binding peptide
  MOD_RES (1), (3), (35), (36): Xaa is C or S

SEQ ID NO: 50847 - protein, 26 aa, Artificial Sequence
  Cyclic GFR-binding peptide
  MOD_RES (1), (1): Xaa is C or S
XSRVIMEYQKYVKPKRGVIFLISIPS

SEQ ID NO: 50848 - protein, 32 aa, Artificial Sequence; identical to SEQ ID NO: 10170
  Cyclic GFR-binding peptide
  MOD_RES (31), (32): Xaa is C or S

SEQ ID NO: 50849 - protein, 29 aa, Artificial Sequence
  Cyclic GFR-binding peptide
  MOD_RES (28), (29): Xaa is C or S
MNEYQKYIVNSSDDIFLVSIPSLQTPAXX

SEQ ID NO: 50850 - protein, 24 aa, Artificial Sequence
  Cyclic GFR-binding peptide
NSLQEIVNSSDDYYVVPLPELKTP

SEQ ID NO: 50851 - protein, 26 aa, Artificial Sequence
  Cyclic GFR-binding peptide
DNSLQEVVKENEDYYVMPLPELETPV

SEQ ID NO: 50852 - protein, 28 aa, Artificial Sequence
  Cyclic GFR-binding peptide
  MOD_RES (1), (1): Xaa is C or S
XSKVIMEYQKYIKPTKGIIFLISIPSLD

SEQ ID NO: 50853 - protein, 28 aa, Artificial Sequence
  Cyclic GFR-binding peptide
  MOD_RES (28), (28): Xaa is C or S
IMEYQKYIKPTKGIIFLISIPSLDQSVX

SEQ ID NO: 50854 - protein, 38 aa, Artificial Sequence; identical to SEQ ID NO: 10171
  Cyclic GFR-binding peptide
  MOD_RES (2), (4), (35), (36): Xaa is C or S

SEQ ID NO: 50855 - protein, 38 aa, Artificial Sequence; identical to SEQ ID NO: 10172
  Cyclic GFR-binding peptide
  MOD_RES (32), (33): Xaa is C or S

SEQ ID NO: 50856 - protein, 35 aa, Artificial Sequence; identical to SEQ ID NO: 10173
  Cyclic GFR-binding peptide
  MOD_RES (2), (33), (34): Xaa is C or S

SEQ ID NO: 50857 - protein, 22 aa, Artificial Sequence
  Cyclic GFR-binding peptide
MDNSLQEVVKENEDYYVMPLPE

SEQ ID NO: 50858 - protein, 30 aa, Artificial Sequence
  Cyclic GFR-binding peptide
  MOD_RES (2), (2): Xaa is C or S
GXSRVVMNNSLQEIVNSSDDYYLVTLPELK

SEQ ID NO: 50859 - protein, 27 aa, Artificial Sequence
  Cyclic GFR-binding peptide
  MOD_RES (27), (27): Xaa is C or S
NNSLQEIVNSSDDYYLVTLPELQTPAX

SEQ ID NO: 50860 - protein, 34 aa, Artificial Sequence
  Cyclic GFR-binding peptide
  MOD_RES (28), (28): Xaa is C or S
MNEYQKYIVNSSDDIFLVSIPSLKTPAXTPKTVH

SEQ ID NO: 50861 - protein, 37 aa, Artificial Sequence; identical to SEQ ID NO: 10174
  Cyclic GFR-binding peptide
  MOD_RES (32), (32): Xaa is C or S

SEQ ID NO: 50862 - protein, 35 aa, Artificial Sequence; identical to SEQ ID NO: 10175
  Cyclic GFR-binding peptide
  MOD_RES (31), (32): Xaa is C or S

SEQ ID NO: 50863 - protein, 34 aa, Artificial Sequence
  Cyclic GFR-binding peptide
  MOD_RES (28), (29): Xaa is C or S
MDEYQKYVVKENEDIFLMSIPSLETPVXXAKPIK

SEQ ID NO: 50864 - protein, 41 aa, Artificial Sequence; identical to SEQ ID NO: 10176
  Cyclic GFR-binding peptide
  MOD_RES (2), (4), (36), (37): Xaa is C or S

SEQ ID NO: 50865 - protein, 28 aa, Artificial Sequence
  Cyclic GFR-binding peptide
  MOD_RES (1), (3): Xaa is C or S
XKXSKVIMNSLQEIKPTKGIYYVIPLPE

SEQ ID NO: 50866 - protein, 22 aa, Artificial Sequence
  Cyclic GFR-binding peptide
IMEYQKYVKPKRGVIFLISIPS

SEQ ID NO: 50867 - protein, 33 aa, Artificial Sequence
  Cyclic GFR-binding peptide
  MOD_RES (1), (3): Xaa is C or S
XGXGEVVMENSLQEVVKDYEDYYLMTLPELETP

SEQ ID NO: 50868 - protein, 28 aa, Artificial Sequence
  Cyclic GFR-binding peptide
  MOD_RES (1), (3): Xaa is C or S
XKXSKVIMEYQKYIKPTKGIIFLISIPS

SEQ ID NO: 50869 - protein, 28 aa, Artificial Sequence
  Cyclic GFR-binding peptide
  MOD_RES (2), (2): Xaa is C or S
GXGEVVMENSLQEVVKDYEDYYVMPLPE

SEQ ID NO: 50870 - protein, 40 aa, Artificial Sequence; identical to SEQ ID NO: 10178
  Cyclic GFR-binding peptide
  MOD_RES (2), (34), (35): Xaa is C or S

SEQ ID NO: 50871 - protein, 27 aa, Artificial Sequence
  Cyclic GFR-binding peptide
KVVMNSLQEVKPTRGVYYVIPLPELDQ

SEQ ID NO: 50872 - protein, 28 aa, Artificial Sequence
  Cyclic GFR-binding peptide
  MOD_RES (28), (28): Xaa is C or S
VMNSLQEVKPTRGVYYVIPLPELDQPVX

SEQ ID NO: 50873 - protein, 40 aa, Artificial Sequence; identical to SEQ ID NO: 10181
  Cyclic GFR-binding peptide
  MOD_RES (2), (34), (35): Xaa is C or S

SEQ ID NO: 50874 - protein, 28 aa, Artificial Sequence
  Cyclic GFR-binding peptide
VVMNEYQKYIVNSSDDIFLVSIPSLKTP

SEQ ID NO: 50875 - protein, 33 aa, Artificial Sequence; identical to SEQ ID NO: 10182
  Cyclic GFR-binding peptide
  MOD_RES (32), (33): Xaa is C or S

SEQ ID NO: 50876 - protein, 31 aa, Artificial Sequence
  Cyclic GFR-binding peptide
  MOD_RES (28), (29): Xaa is C or S
MNNSLQEIVNSSDDYYVVPLPELKTPAXXPK

SEQ ID NO: 50877 - protein, 28 aa, Artificial Sequence
  Cyclic GFR-binding peptide
  MOD_RES (27), (28): Xaa is C or S
NEYQKYIVNSSDDIFLVSIPSLQTPAXX

SEQ ID NO: 50878 - protein, 33 aa, Artificial Sequence
  Cyclic GFR-binding peptide
  MOD_RES (30), (31): Xaa is C or S
KVVMEYQKYVKPTRGVIFLISIPSLDQPVXXPS

SEQ ID NO: 50879 - protein, 24 aa, Artificial Sequence
  Cyclic GFR-binding peptide
VMENSLQEVVKDYEDYYLMTLPEL

SEQ ID NO: 50880 - protein, 39 aa, Artificial Sequence; identical to SEQ ID NO: 10185
  Cyclic GFR-binding peptide
  MOD_RES (2), (33), (34): Xaa is C or S

SEQ ID NO: 50881 - protein, 21 aa, Artificial Sequence
  Cyclic GFR-binding peptide
DQYNKLVVNNASDLYLISIAS

SEQ ID NO: 50882 - protein, 31 aa, Artificial Sequence
  Cyclic GFR-binding peptide
  MOD_RES (26), (27): Xaa is C or S
EYQKYIKPTKGIIFLISIPSLDQSVXXPSAS

SEQ ID NO: 50883 - protein, 28 aa, Artificial Sequence
  Cyclic GFR-binding peptide
VVMNNSLQEIVNSSDDYYVVPLPELQTP

SEQ ID NO: 50884 - protein, 35 aa, Artificial Sequence; identical to SEQ ID NO: 10190
  Cyclic GFR-binding peptide
  MOD_RES (32), (33): Xaa is C or S

SEQ ID NO: 50885 - protein, 29 aa, Artificial Sequence
  Cyclic GFR-binding peptide
  MOD_RES (28), (28): Xaa is C or S
MNNSLQEIVNSSDDYYVVPLPELKTPAXT

SEQ ID NO: 50886 - protein, 25 aa, Artificial Sequence
  Cyclic GFR-binding peptide
KVVMNSLQEVKPTRGVYYVIPLPEL

SEQ ID NO: 50887 - protein, 30 aa, Artificial Sequence
  Cyclic GFR-binding peptide
  MOD_RES (27), (28): Xaa is C or S
DQYNKLVVNNASDLYLISIASLRTPVXXTP

SEQ ID NO: 50888 - protein, 27 aa, Artificial Sequence
  Cyclic GFR-binding peptide
MDRYKKLVVNNASDFYLISIANLRTPV

SEQ ID NO: 50889 - protein, 36 aa, Artificial Sequence; identical to SEQ ID NO: 10192
  Cyclic GFR-binding peptide
  MOD_RES (2), (4), (36): Xaa is C or S

SEQ ID NO: 50890 - protein, 29 aa, Artificial Sequence
  Cyclic GFR-binding peptide
VVMNNSLQEIVNSSDDYYLVTLPELQTPA

SEQ ID NO: 50891 - protein, 37 aa, Artificial Sequence; identical to SEQ ID NO: 10193
  Cyclic GFR-binding peptide
  MOD_RES (1), (3), (35), (36): Xaa is C or S

SEQ ID NO: 50892 - protein, 29 aa, Artificial Sequence
  Cyclic GFR-binding peptide
SKVVMNSLQEVKPTRGVYYVIPLPELDQP

SEQ ID NO: 50893 - protein, 34 aa, Artificial Sequence
  Cyclic GFR-binding peptide
  MOD_RES (30), (31): Xaa is C or S
VVMDEYQKYVVKENEDIFLMSIPSLETPVXXAKP

SEQ ID NO: 50894 - protein, 32 aa, Artificial Sequence
  Cyclic GFR-binding peptide
  MOD_RES (28), (29): Xaa is C or S
MENSLQEVVKDYEDYYLMTLPELETPVXXAKP

SEQ ID NO: 50895 - protein, 35 aa, Artificial Sequence; identical to SEQ ID NO: 10195
  Cyclic GFR-binding peptide
  MOD_RES (32), (32): Xaa is C or S

SEQ ID NO: 50896 - protein, 36 aa, Artificial Sequence; identical to SEQ ID NO: 10197
  Cyclic GFR-binding peptide
  MOD_RES (2), (4), (36): Xaa is C or S

SEQ ID NO: 50897 - protein, 30 aa, Artificial Sequence
  Cyclic GFR-binding peptide
  MOD_RES (2), (2): Xaa is C or S
GXARVVMNNSLQEIVNSSDDYYVVPLPELQ

SEQ ID NO: 50898 - protein, 31 aa, Artificial Sequence
  Cyclic GFR-binding peptide
  MOD_RES (28), (29): Xaa is C or S
MDEYQKYVVKENEDIFLMSIPSLETPVXXAK

SEQ ID NO: 50899 - protein, 30 aa, Artificial Sequence
  Cyclic GFR-binding peptide
  MOD_RES (27), (28): Xaa is C or S
NEYQKYIVNSSDDIFLVSIPSLQTPAXXPK

SEQ ID NO: 50900 - protein, 34 aa, Artificial Sequence
  Cyclic GFR-binding peptide
  MOD_RES (30), (31): Xaa is C or S
RVIMNSLQEVKPKRGVYYLITLPELAQPVXXPAA

SEQ ID NO: 50901 - protein, 34 aa, Artificial Sequence
  Cyclic GFR-binding peptide
  MOD_RES (29), (30): Xaa is C or S
VMDRYKKLVVNNASDFYLISIANLRTPVXXTPPT

SEQ ID NO: 50902 - protein, 29 aa, Artificial Sequence
  Cyclic GFR-binding peptide
  MOD_RES (28), (29): Xaa is C or S
VMEYQKYVKPTRGVIFLISIPSLDQPVXX

SEQ ID NO: 50903 - protein, 23 aa, Artificial Sequence
  Cyclic GFR-binding peptide
VMDRYKKLVVNNASDFYLISIAN

SEQ ID NO: 50904 - protein, 32 aa, Artificial Sequence
  Cyclic GFR-binding peptide
  MOD_RES (29), (30): Xaa is C or S
VIMNSLQEVKPKRGVYYLITLPELAQPVXXPA

SEQ ID NO: 50905 - protein, 31 aa, Artificial Sequence
  Cyclic GFR-binding peptide
  MOD_RES (26), (26): Xaa is C or S
NSLQEIVNSSDDYYVVPLPELKTPAXTPKTV

SEQ ID NO: 50906 - protein, 25 aa, Artificial Sequence
  Cyclic GFR-binding peptide
VMNNSLQEIVNSSDDYYVVPLPELK

SEQ ID NO: 50907 - protein, 30 aa, Artificial Sequence
  Cyclic GFR-binding peptide
  MOD_RES (1), (3): Xaa is C or S
XKXSKVVMNSLQEVKPTRGVYYVIPLPELD

SEQ ID NO: 50908 - protein, 36 aa, Artificial Sequence; identical to SEQ ID NO: 10201
  Cyclic GFR-binding peptide
  MOD_RES (2), (34): Xaa is C or S

SEQ ID NO: 50909 - protein, 39 aa, Artificial Sequence; identical to SEQ ID NO: 10202
  Cyclic GFR-binding peptide
  MOD_RES (1), (3), (35): Xaa is C or S

SEQ ID NO: 50910 - protein, 34 aa, Artificial Sequence; identical to SEQ ID NO: 10203
  Cyclic GFR-binding peptide
  MOD_RES (31), (32): Xaa is C or S

SEQ ID NO: 50911 - protein, 24 aa, Artificial Sequence
  Cyclic GFR-binding peptide
MENSLQEVVKDYEDYYLMTLPELE

SEQ ID NO: 50912 - protein, 30 aa, Artificial Sequence
  Cyclic GFR-binding peptide
  MOD_RES (26), (27): Xaa is C or S
RYKKLVVNNASDFYLISIANLRTPVXXTPP

SEQ ID NO: 50913 - protein, 36 aa, Artificial Sequence
  Cyclic GFR-binding peptide
  MOD_RES (30), (31): Xaa is C or S
VVMDRYKKLVVNNASDFYLISIANLRTPVXXTPPTS

SEQ ID NO: 50914 - protein, 32 aa, Artificial Sequence
  Cyclic GFR-binding peptide
  MOD_RES (27), (28): Xaa is C or S
NEYQKYIVNSSDDIFLVSIPSLQTPAXXPKPV

SEQ ID NO: 50915 - protein, 29 aa, Artificial Sequence
  Cyclic GFR-binding peptide
  MOD_RES (26), (27): Xaa is C or S
EYQKYVVKENEDIFLMSIPSLETPVXXAK

SEQ ID NO: 50916 - protein, 29 aa, Artificial Sequence
  Cyclic GFR-binding peptide
  MOD_RES (1), (3): Xaa is C or S
XKXSKVIMEYQKYIKPTKGIIFLISIPSL

SEQ ID NO: 50917 - protein, 33 aa, Artificial Sequence; identical to SEQ ID NO: 10207
  Cyclic GFR-binding peptide
  MOD_RES (1), (32), (33): Xaa is C or S

SEQ ID NO: 50918 - protein, 33 aa, Artificial Sequence; identical to SEQ ID NO: 10208
  Cyclic GFR-binding peptide
  MOD_RES (31), (32): Xaa is C or S

SEQ ID NO: 50919 - protein, 26 aa, Artificial Sequence
  Cyclic GFR-binding peptide
DEYQKYVVKENEDIFLMSIPSLETPV

SEQ ID NO: 50920 - protein, 28 aa, Artificial Sequence
  Cyclic GFR-binding peptide
  MOD_RES (26), (27): Xaa is C or S
NSLQEIVNSSDDYYLVTLPELKTPAXXP

SEQ ID NO: 50921 - protein, 29 aa, Artificial Sequence
  Cyclic GFR-binding peptide
VVMDEYQKYVVKENEDIFLMSIPSLETPV

SEQ ID NO: 50922 - protein, 30 aa, Artificial Sequence
  Cyclic GFR-binding peptide
  MOD_RES (29), (30): Xaa is C or S
VMDNSLQEVVKENEDYYVMPLPELETPVXX

SEQ ID NO: 50923 - protein, 40 aa, Artificial Sequence; identical to SEQ ID NO: 10209
  Cyclic GFR-binding peptide
  MOD_RES (1), (3), (35): Xaa is C or S

SEQ ID NO: 50924 - protein, 38 aa, Artificial Sequence; identical to SEQ ID NO: 10210
  Cyclic GFR-binding peptide
  MOD_RES (1), (33), (34): Xaa is C or S

SEQ ID NO: 50925 - protein, 35 aa, Artificial Sequence
  Cyclic GFR-binding peptide
  MOD_RES (29), (30): Xaa is C or S
VMDNSLQEVVKENEDYYVMPLPELETPVXXAKPIK

SEQ ID NO: 50926 - protein, 28 aa, Artificial Sequence
  Cyclic GFR-binding peptide
VMEEYQKYVVKDYEDIFLMSIPSLETPV

SEQ ID NO: 50927 - protein, 29 aa, Artificial Sequence
  Cyclic GFR-binding peptide
  MOD_RES (28), (29): Xaa is C or S
IMEYQKYIKPTKGIIFLISIPSLDQSVXX

SEQ ID NO: 50928 - protein, 36 aa, Artificial Sequence; identical to SEQ ID NO: 10212
  Cyclic GFR-binding peptide
  MOD_RES (32), (33): Xaa is C or S

SEQ ID NO: 50929 - protein, 31 aa, Artificial Sequence
  Cyclic GFR-binding peptide
  MOD_RES (30), (30): Xaa is C or S
VVMNNSLQEIVNSSDDYYLVTLPELKTPAXT

SEQ ID NO: 50930 - protein, 25 aa, Artificial Sequence
  Cyclic GFR-binding peptide
VVMDNSLQEVVNNASDYYLITLPEL

SEQ ID NO: 50931 - protein, 30 aa, Artificial Sequence
  Cyclic GFR-binding peptide
  MOD_RES (1), (3): Xaa is C or S
XGXARVVMNEYQKYIVNSSDDIFLVSIPSL

SEQ ID NO: 50932 - protein, 27 aa, Artificial Sequence
  Cyclic GFR-binding peptide
  MOD_RES (1), (1): Xaa is C or S
XGEVVMENSLQEVVKDYEDYYLMTLPE

SEQ ID NO: 50933 - protein, 38 aa, Artificial Sequence; identical to SEQ ID NO: 10215
  Cyclic GFR-binding peptide
  MOD_RES (2), (34), (35): Xaa is C or S

SEQ ID NO: 50934 - protein, 22 aa, Artificial Sequence
  Cyclic GFR-binding peptide
MNNSLQEIVNSSDDYYVVPLPE

SEQ ID NO: 50935 - protein, 41 aa, Artificial Sequence; identical to SEQ ID NO: 10216
  Cyclic GFR-binding peptide
  MOD_RES (2), (4), (35), (36): Xaa is C or S

SEQ ID NO: 50936 - protein, 34 aa, Artificial Sequence
  Cyclic GFR-binding peptide
  MOD_RES (28), (29): Xaa is C or S
MNNSLQEIVNSSDDYYVVPLPELQTPAXXPKPVT

SEQ ID NO: 50937 - protein, 33 aa, Artificial Sequence; identical to SEQ ID NO: 10217
  Cyclic GFR-binding peptide
  MOD_RES (2), (33): Xaa is C or S

SEQ ID NO: 50938 - protein, 31 aa, Artificial Sequence
  Cyclic GFR-binding peptide
  MOD_RES (27), (28): Xaa is C or S
DNSLQEVVNNASDYYVIPLPELRTPVXXTPP

SEQ ID NO: 50939 - protein, 30 aa, Artificial Sequence
  Cyclic GFR-binding peptide
  MOD_RES (2), (4): Xaa is C or S
RXGXSEVVMDNSLQEVVNNASDYYLITLPE

SEQ ID NO: 50940 - protein, 30 aa, Artificial Sequence; identical to SEQ ID NO: 10219
  Cyclic GFR-binding peptide

SEQ ID NO: 50941 - protein, 39 aa, Artificial Sequence; identical to SEQ ID NO: 10220
  Cyclic GFR-binding peptide
  MOD_RES (1), (3), (34), (35): Xaa is C or S

SEQ ID NO: 50942 - protein, 41 aa, Artificial Sequence; identical to SEQ ID NO: 10222
  Cyclic GFR-binding peptide
  MOD_RES (2), (4), (36), (37): Xaa is C or S

SEQ ID NO: 50943 - protein, 34 aa, Artificial Sequence
  Cyclic GFR-binding peptide
  MOD_RES (29), (30): Xaa is C or S
VMNNSLQEIVNSSDDYYLVTLPELKTPAXXPKPV

SEQ ID NO: 50944 - protein, 33 aa, Artificial Sequence
  Cyclic GFR-binding peptide
  MOD_RES (1), (3): Xaa is C or S
XGXGEVVMDEYQKYVVKENEDIFLMSIPSLETP

SEQ ID NO: 50945 - protein, 32 aa, Artificial Sequence
  Cyclic GFR-binding peptide
  MOD_RES (27), (28): Xaa is C or S
MEYQKYVKPTRGVIFLISIPSLDQPVXXPSAS

SEQ ID NO: 50946 - protein, 36 aa, Artificial Sequence; identical to SEQ ID NO: 10226
  Cyclic GFR-binding peptide
  MOD_RES (1), (3), (35), (36): Xaa is C or S

SEQ ID NO: 50947 - protein, 36 aa, Artificial Sequence; identical to SEQ ID NO: 10227
  Cyclic GFR-binding peptide
  MOD_RES (31), (32): Xaa is C or S

SEQ ID NO: 50948 - protein, 28 aa, Artificial Sequence
  Cyclic GFR-binding peptide
  MOD_RES (27), (28): Xaa is C or S
NNSLQEIVNSSDDYYVVPLPELQTPAXX

SEQ ID NO: 50949 - protein, 28 aa, Artificial Sequence
  Cyclic GFR-binding peptide
  MOD_RES (26), (27): Xaa is C or S
EYQKYIVNSSDDIFLVSIPSLKTPAXXP

SEQ ID NO: 50950 - protein, 32 aa, Artificial Sequence
  Cyclic GFR-binding peptide
  MOD_RES (1), (3): Xaa is C or S
XGXGEVVMDNSLQEVVKENEDYYLMTLPELET

SEQ ID NO: 50951 - protein, 27 aa, Artificial Sequence
  Cyclic GFR-binding peptide
SKVVMNSLQEVKPTRGVYYVIPLPELD

SEQ ID NO: 50952 - protein, 23 aa, Artificial Sequence
  Cyclic GFR-binding peptide
VMDQYNKLVVNNASDLYLISIAS

SEQ ID NO: 50953 - protein, 36 aa, Artificial Sequence; identical to SEQ ID NO: 10228
  Cyclic GFR-binding peptide
  MOD_RES (31), (32): Xaa is C or S

SEQ ID NO: 50954 - protein, 34 aa, Artificial Sequence; identical to SEQ ID NO: 10230
  Cyclic GFR-binding peptide
  MOD_RES (2), (34): Xaa is C or S

SEQ ID NO: 50955 - protein, 31 aa, Artificial Sequence
  Cyclic GFR-binding peptide
  MOD_RES (1), (1): Xaa is C or S
XSRVVMNNSLQEIVNSSDDYYVVPLPELKTP

SEQ ID NO: 50956 - protein, 34 aa, Artificial Sequence; identical to SEQ ID NO: 10231
  Cyclic GFR-binding peptide
  MOD_RES (2), (34): Xaa is C or S

SEQ ID NO: 50957 - protein, 36 aa, Artificial Sequence; identical to SEQ ID NO: 10232
  Cyclic GFR-binding peptide
  MOD_RES (1), (32), (33): Xaa is C or S

SEQ ID NO: 50958 - protein, 32 aa, Artificial Sequence
  Cyclic GFR-binding peptide
  MOD_RES (27), (28): Xaa is C or S
ENSLQEVVKDYEDYYLMTLPELETPVXXAKPI

SEQ ID NO: 50959 - protein, 20 aa, Artificial Sequence
  Cyclic GFR-binding peptide
EYQKYVKPTRGVIFLISIPS

SEQ ID NO: 50960 - protein, 35 aa, Artificial Sequence; identical to SEQ ID NO: 10235
  Cyclic GFR-binding peptide
  MOD_RES (2), (4), (35): Xaa is C or S

SEQ ID NO: 50961 - protein, 27 aa, Artificial Sequence
  Cyclic GFR-binding peptide
  MOD_RES (27), (27): Xaa is C or S
MEYQKYVKPTRGVIFLISIPSLDQPVX

SEQ ID NO: 50962 - protein, 29 aa, Artificial Sequence
  Cyclic GFR-binding peptide
  MOD_RES (29), (29): Xaa is C or S
VMNNSLQEIVNSSDDYYLVTLPELKTPAX

SEQ ID NO: 50963 - protein, 27 aa, Artificial Sequence
  Cyclic GFR-binding peptide
  MOD_RES (1), (1): Xaa is C or S
XSRVVMNNSLQEIVNSSDDYYLVTLPE

SEQ ID NO: 50964 - protein, 34 aa, Artificial Sequence; identical to SEQ ID NO: 10237
  Cyclic GFR-binding peptide
  MOD_RES (31), (32): Xaa is C or S

SEQ ID NO: 50965 - protein, 31 aa, Artificial Sequence
  Cyclic GFR-binding peptide
  MOD_RES (30), (31): Xaa is C or S
VVMNNSLQEIVNSSDDYYLVTLPELKTPAXX

SEQ ID NO: 50966 - protein, 39 aa, Artificial Sequence; identical to SEQ ID NO: 10241
  Cyclic GFR-binding peptide
  MOD_RES (2), (34), (35): Xaa is C or S

SEQ ID NO: 50967 - protein, 33 aa, Artificial Sequence
  Cyclic GFR-binding peptide
  MOD_RES (27), (28): Xaa is C or S
DNSLQEVVKENEDYYLMTLPELETPVXXAKPIK

SEQ ID NO: 50968 - protein, 25 aa, Artificial Sequence
  Cyclic GFR-binding peptide
NNSLQEIVNSSDDYYLVTLPELQTP

SEQ ID NO: 50969 - protein, 35 aa, Artificial Sequence; identical to SEQ ID NO: 10242
  Cyclic GFR-binding peptide
  MOD_RES (2), (34), (35): Xaa is C or S

SEQ ID NO: 50970 - protein, 34 aa, Artificial Sequence; identical to SEQ ID NO: 10244
  Cyclic GFR-binding peptide
  MOD_RES (2), (33), (34): Xaa is C or S

SEQ ID NO: 50971 - protein, 26 aa, Artificial Sequence
  Cyclic GFR-binding peptide
EVVMEEYQKYVVKDYEDIFLMSIPSL

SEQ ID NO: 50972 - protein, 28 aa, Artificial Sequence
  Cyclic GFR-binding peptide
  MOD_RES (2), (2): Xaa is C or S
KXSKVIMEYQKYIKPTKGIIFLISIPSL

SEQ ID NO: 50973 - protein, 21 aa, Artificial Sequence
  Cyclic GFR-binding peptide
NEYQKYIVNSSDDIFLVSIPS

SEQ ID NO: 50974 - protein, 26 aa, Artificial Sequence
  Cyclic GFR-binding peptide
KVVMEYQKYVKPTRGVIFLISIPSLD

SEQ ID NO: 50975 - protein, 35 aa, Artificial Sequence
  Cyclic GFR-binding peptide
  MOD_RES (30), (31): Xaa is C or S
VVMENSLQEVVKDYEDYYLMTLPELETPVXXAKPI

SEQ ID NO: 50976 - protein, 31 aa, Artificial Sequence
  Cyclic GFR-binding peptide
  MOD_RES (30), (31): Xaa is C or S
VVMDNSLQEVVKENEDYYVMPLPELETPVXX

SEQ ID NO: 50977 - protein, 28 aa, Artificial Sequence
  Cyclic GFR-binding peptide
VMNNSLQEIVNSSDDYYLVTLPELQTPA

SEQ ID NO: 50978 - protein, 34 aa, Artificial Sequence; identical to SEQ ID NO: 10246
  Cyclic GFR-binding peptide
  MOD_RES (31), (32): Xaa is C or S

SEQ ID NO: 50979 - protein, 29 aa, Artificial Sequence
  Cyclic GFR-binding peptide
  MOD_RES (1), (1): Xaa is C or S
XGEVVMENSLQEVVKDYEDYYVMPLPELE

SEQ ID NO: 50980 - protein, 33 aa, Artificial Sequence; identical to SEQ ID NO: 10247
  Cyclic GFR-binding peptide
  MOD_RES (32), (33): Xaa is C or S

SEQ ID NO: 50981 - protein, 27 aa, Artificial Sequence
  Cyclic GFR-binding peptide
  MOD_RES (1), (1): Xaa is C or S
XSKVVMNSLQEVKPTRGVYYVIPLPEL

SEQ ID NO: 50982 - protein, 22 aa, Artificial Sequence
  Cyclic GFR-binding peptide
EYQKYIVNSSDDIFLVSIPSLK

SEQ ID NO: 50983 - protein, 32 aa, Artificial Sequence
  Cyclic GFR-binding peptide
  MOD_RES (30), (31): Xaa is C or S
VVMDNSLQEVVNNASDYYLITLPELRTPVXXT

SEQ ID NO: 50984 - protein, 25 aa, Artificial Sequence
  Cyclic GFR-binding peptide
VMDNSLQEVVKENEDYYVMPLPELE

SEQ ID NO: 50985 - protein, 27 aa, Artificial Sequence
  Cyclic GFR-binding peptide
VVMNSLQEVKPTRGVYYVIPLPELDQP

SEQ ID NO: 50986 - protein, 30 aa, Artificial Sequence
  Cyclic GFR-binding peptide
  MOD_RES (2), (2): Xaa is C or S
GXARVVMNEYQKYIVNSSDDIFLVSIPSLQ

SEQ ID NO: 50987 - protein, 30 aa, Artificial Sequence
  Cyclic GFR-binding peptide
  MOD_RES (26), (27): Xaa is C or S
EYQKYVVKENEDIFLMSIPSLETPVXXAKP

SEQ ID NO: 50988 - protein, 33 aa, Artificial Sequence; identical to SEQ ID NO: 10250
  Cyclic GFR-binding peptide
  MOD_RES (2), (33): Xaa is C or S

SEQ ID NO: 50989 - protein, 31 aa, Artificial Sequence
  Cyclic GFR-binding peptide
  MOD_RES (2), (2): Xaa is C or S
GXGEVVMEEYQKYVVKDYEDIFLMSIPSLET

SEQ ID NO: 50990 - protein, 32 aa, Artificial Sequence
  Cyclic GFR-binding peptide
  MOD_RES (28), (29): Xaa is C or S
MNNSLQEIVNSSDDYYVVPLPELQTPAXXPKP

SEQ ID NO: 50991 - protein, 38 aa, Artificial Sequence; identical to SEQ ID NO: 10252
  Cyclic GFR-binding peptide
  MOD_RES (2), (4), (36): Xaa is C or S

SEQ ID NO: 50992 - protein, 35 aa, Artificial Sequence; identical to SEQ ID NO: 10253
  Cyclic GFR-binding peptide
  MOD_RES (32), (32): Xaa is C or S

SEQ ID NO: 50993 - protein, 24 aa, Artificial Sequence
  Cyclic GFR-binding peptide
MNNSLQEIVNSSDDYYLVTLPELQ

SEQ ID NO: 50994 - protein, 35 aa, Artificial Sequence; identical to SEQ ID NO: 10254
  Cyclic GFR-binding peptide
  MOD_RES (1), (3), (35): Xaa is C or S

SEQ ID NO: 50995 - protein, 38 aa, Artificial Sequence; identical to SEQ ID NO: 10255
  Cyclic GFR-binding peptide
  MOD_RES (2), (33), (34): Xaa is C or S

SEQ ID NO: 50996 - protein, 29 aa, Artificial Sequence
  Cyclic GFR-binding peptide
  MOD_RES (28), (29): Xaa is C or S
VMNSLQEVKPTRGVYYVIPLPELDQPVXX

SEQ ID NO: 50997 - protein, 23 aa, Artificial Sequence
  Cyclic GFR-binding peptide
MNNSLQEIVNSSDDYYLVTLPEL

SEQ ID NO: 50998 - protein, 30 aa, Artificial Sequence
  Cyclic GFR-binding peptide
  MOD_RES (2), (4): Xaa is C or S
RXGXGEVVMDNSLQEVVKENEDYYVMPLPE

SEQ ID NO: 50999 - protein, 31 aa, Artificial Sequence
  Cyclic GFR-binding peptide
  MOD_RES (30), (31): Xaa is C or S
VVMNNSLQEIVNSSDDYYVVPLPELKTPAXX

SEQ ID NO: 51000 - protein, 31 aa, Artificial Sequence
  Cyclic GFR-binding peptide
  MOD_RES (2), (2): Xaa is C or S
GXSRVVMNEYQKYIVNSSDDIFLVSIPSLKT

SEQ ID NO: 51001 - protein, 22 aa, Artificial Sequence
  Cyclic GFR-binding peptide
DNSLQEVVNNASDYYLITLPEL

SEQ ID NO: 51002 - protein, 37 aa, Artificial Sequence; identical to SEQ ID NO: 10258
  Cyclic GFR-binding peptide
  MOD_RES (1), (3), (35), (36): Xaa is C or S

SEQ ID NO: 51003 - protein, 30 aa, Artificial Sequence
  Cyclic GFR-binding peptide
  MOD_RES (29), (30): Xaa is C or S
VIMEYQKYVKPKRGVIFLISIPSLAQPVXX

SEQ ID NO: 51004 - protein, 28 aa, Artificial Sequence
  Cyclic GFR-binding peptide
SKVIMEYQKYIKPTKGIIFLISIPSLDQ

SEQ ID NO: 51005 - protein, 33 aa, Artificial Sequence
  Cyclic GFR-binding peptide
  MOD_RES (27), (28): Xaa is C or S
DNSLQEVVKENEDYYVMPLPELETPVXXAKPIK

SEQ ID NO: 51006 - protein, 37 aa, Artificial Sequence; identical to SEQ ID NO: 10264
  Cyclic GFR-binding peptide
  MOD_RES (1), (32), (33): Xaa is C or S

SEQ ID NO: 51007 - protein, 27 aa, Artificial Sequence
  Cyclic GFR-binding peptide
  MOD_RES (1), (1): Xaa is C or S
XSEVVMDRYKKLVVNNASDFYLISIAN

SEQ ID NO: 51008 - protein, 37 aa, Artificial Sequence; identical to SEQ ID NO: 10265
  Cyclic GFR-binding peptide
  MOD_RES (31), (32): Xaa is C or S

SEQ ID NO: 51009 - protein, 38 aa, Artificial Sequence; identical to SEQ ID NO: 10267
  Cyclic GFR-binding peptide
  MOD_RES (1), (3), (35), (36): Xaa is C or S

SEQ ID NO: 51010 - protein, 22 aa, Artificial Sequence
  Cyclic GFR-binding peptide
MNSLQEVKPTRGVYYVIPLPEL

SEQ ID NO: 51011 - protein, 33 aa, Artificial Sequence
  Cyclic GFR-binding peptide
  MOD_RES (28), (29): Xaa is C or S
MNNSLQEIVNSSDDYYLVTLPELKTPAXXPKPV

SEQ ID NO: 51012 - protein, 31 aa, Artificial Sequence
  Cyclic GFR-binding peptide
  MOD_RES (1), (1): Xaa is C or S
XGEVVMENSLQEVVKDYEDYYVMPLPELETP

SEQ ID NO: 51013 - protein, 28 aa, Artificial Sequence
  Cyclic GFR-binding peptide
  MOD_RES (28), (28): Xaa is C or S
MNNSLQEIVNSSDDYYLVTLPELQTPAX

SEQ ID NO: 51014 - protein, 32 aa, Artificial Sequence
  Cyclic GFR-binding peptide
  MOD_RES (30), (31): Xaa is C or S
RVIMNSLQEVKPKRGVYYLITLPELAQPVXXP

SEQ ID NO: 51015 - protein, 36 aa, Artificial Sequence; identical to SEQ ID NO: 10271
  Cyclic GFR-binding peptide
  MOD_RES (32), (33): Xaa is C or S

SEQ ID NO: 51016 - protein, 32 aa, Artificial Sequence
  Cyclic GFR-binding peptide
  MOD_RES (26), (26): Xaa is C or S
NSLQEIVNSSDDYYVVPLPELKTPAXTPKTVH

SEQ ID NO: 51017 - protein, 30 aa, Artificial Sequence
  Cyclic GFR-binding peptide
  MOD_RES (2), (4): Xaa is C or S
RXGXGEVVMEEYQKYVVKDYEDIFLMSIPS

SEQ ID NO: 51018 - protein, 36 aa, Artificial Sequence; identical to SEQ ID NO: 10273
  Cyclic GFR-binding peptide
  MOD_RES (1), (33), (34): Xaa is C or S

SEQ ID NO: 51019 - protein, 25 aa, Artificial Sequence
  Cyclic GFR-binding peptide
MDNSLQEVVNNASDYYVIPLPELRT

SEQ ID NO: 51020 - protein, 38 aa, Artificial Sequence; identical to SEQ ID NO: 10275
  Cyclic GFR-binding peptide
  MOD_RES (1), (33), (34): Xaa is C or S

SEQ ID NO: 51021 - protein, 31 aa, Artificial Sequence
  Cyclic GFR-binding peptide
  MOD_RES (2), (4): Xaa is C or S
RXGXSEVVMDQYNKLVVNNASDLYLISIASL

SEQ ID NO: 51022 - protein, 22 aa, Artificial Sequence
  Cyclic GFR-binding peptide
EYQKYVKPTRGVIFLISIPSLD

SEQ ID NO: 51023 - protein, 23 aa, Artificial Sequence
  Cyclic GFR-binding peptide
MEYQKYIKPTKGIIFLISIPSLD

SEQ ID NO: 51024 - protein, 32 aa, Artificial Sequence; identical to SEQ ID NO: 10281
  Cyclic GFR-binding peptide
  MOD_RES (1), (1): Xaa is C or S

SEQ ID NO: 51025 - protein, 32 aa, Artificial Sequence
  Cyclic GFR-binding peptide
  MOD_RES (1), (3): Xaa is C or S
XGXARVVMNNSLQEIVNSSDDYYVVPLPELQT

SEQ ID NO: 51026 - protein, 33 aa, Artificial Sequence; identical to SEQ ID NO: 10284
  Cyclic GFR-binding peptide
  MOD_RES (31), (32): Xaa is C or S

SEQ ID NO: 51027 - protein, 24 aa, Artificial Sequence
  Cyclic GFR-binding peptide
MEYQKYIKPTKGIIFLISIPSLDQ

SEQ ID NO: 51028 - protein, 32 aa, Artificial Sequence
  Cyclic GFR-binding peptide
  MOD_RES (26), (27): Xaa is C or S
EYQKYVKPKRGVIFLISIPSLAQPVXXPAASA

SEQ ID NO: 51029 - protein, 25 aa, Artificial Sequence
  Cyclic GFR-binding peptide
VVMENSLQEVVKDYEDYYVMPLPEL

SEQ ID NO: 51030 - protein, 29 aa, Artificial Sequence
  Cyclic GFR-binding peptide
  MOD_RES (29), (29): Xaa is C or S
VIMEYQKYVKPKRGVIFLISIPSLAQPVX

SEQ ID NO: 51031 - protein, 25 aa, Artificial Sequence
  Cyclic GFR-binding peptide
MEEYQKYVVKDYEDIFLMSIPSLET

SEQ ID NO: 51032 - protein, 39 aa, Artificial Sequence; identical to SEQ ID NO: 10285
  Cyclic GFR-binding peptide
  MOD_RES (2), (4), (36), (37): Xaa is C or S

SEQ ID NO: 51033 - protein, 34 aa, Artificial Sequence; identical to SEQ ID NO: 10286
  Cyclic GFR-binding peptide
  MOD_RES (31), (32): Xaa is C or S

SEQ ID NO: 51034 - protein, 36 aa, Artificial Sequence; identical to SEQ ID NO: 10287
  Cyclic GFR-binding peptide
  MOD_RES (1), (33), (34): Xaa is C or S

SEQ ID NO: 51035 - protein, 35 aa, Artificial Sequence; identical to SEQ ID NO: 10288
  Cyclic GFR-binding peptide
  MOD_RES (2), (4): Xaa is C or S

SEQ ID NO: 51036 - protein, 32 aa, Artificial Sequence; identical to SEQ ID NO: 10289
  Cyclic GFR-binding peptide
  MOD_RES (31), (32): Xaa is C or S

SEQ ID NO: 51037 - protein, 31 aa, Artificial Sequence
  Cyclic GFR-binding peptide
  MOD_RES (28), (29): Xaa is C or S
MDNSLQEVVKENEDYYVMPLPELETPVXXAK

SEQ ID NO: 51038 - protein, 35 aa, Artificial Sequence
  Cyclic GFR-binding peptide
  MOD_RES (29), (30): Xaa is C or S
VMNNSLQEIVNSSDDYYVVPLPELKTPAXXPKPVY

SEQ ID NO: 51039 - protein, 34 aa, Artificial Sequence; identical to SEQ ID NO: 10290
  Cyclic GFR-binding peptide
  MOD_RES (1), (33), (34): Xaa is C or S

SEQ ID NO: 51040 - protein, 30 aa, Artificial Sequence
  Cyclic GFR-binding peptide
  MOD_RES (2), (4): Xaa is C or S
RXGXSEVVMDRYKKLVVNNASDFYLISIAN

SEQ ID NO: 51041 - protein, 31 aa, Artificial Sequence; identical to SEQ ID NO: 10291
  Cyclic GFR-binding peptide
  MOD_RES (31), (31): Xaa is C or S

SEQ ID NO: 51042 - protein, 28 aa, Artificial Sequence
  Cyclic GFR-binding peptide
SEVVMDNSLQEVVNNASDYYVIPLPELR

SEQ ID NO: 51043 - protein, 34 aa, Artificial Sequence; identical to SEQ ID NO: 10292
  Cyclic GFR-binding peptide
  MOD_RES (31), (31): Xaa is C or S

SEQ ID NO: 51044 - protein, 35 aa, Artificial Sequence
  Cyclic GFR-binding peptide
  MOD_RES (29), (30): Xaa is C or S
VMDNSLQEVVNNASDYYLITLPELRTPVXXTPPTS

SEQ ID NO: 51045 - protein, 35 aa, Artificial Sequence; identical to SEQ ID NO: 10293
  Cyclic GFR-binding peptide
  MOD_RES (1), (33), (34): Xaa is C or S

SEQ ID NO: 51046 - protein, 39 aa, Artificial Sequence; identical to SEQ ID NO: 10295
  Cyclic GFR-binding peptide
  MOD_RES (1), (3), (35), (36): Xaa is C or S

SEQ ID NO: 51047 - protein, 32 aa, Artificial Sequence
  Cyclic GFR-binding peptide
  MOD_RES (30), (31): Xaa is C or S
VVMNNSLQEIVNSSDDYYVVPLPELQTPAXXP

SEQ ID NO: 51048 - protein, 32 aa, Artificial Sequence
  Cyclic GFR-binding peptide
  MOD_RES (27), (28): Xaa is C or S
ENSLQEVVKDYEDYYVMPLPELETPVXXAKPI

SEQ ID NO: 51049 - protein, 28 aa, Artificial Sequence
  Cyclic GFR-binding peptide
  MOD_RES (1), (1): Xaa is C or S
XSEVVMDQYNKLVVNNASDLYLISIASL

SEQ ID NO: 51050 - protein, 34 aa, Artificial Sequence
  Cyclic GFR-binding peptide
  MOD_RES (30), (31): Xaa is C or S
VVMDNSLQEVVKENEDYYVMPLPELETPVXXAKP

SEQ ID NO: 51051 - protein, 26 aa, Artificial Sequence
  Cyclic GFR-binding peptide
VVMNNSLQEIVNSSDDYYLVTLPELQ

SEQ ID NO: 51052 - protein, 29 aa, Artificial Sequence
  Cyclic GFR-binding peptide
  MOD_RES (29), (29): Xaa is C or S
VMDNSLQEVVKENEDYYLMTLPELETPVX

SEQ ID NO: 51053 - protein, 37 aa, Artificial Sequence; identical to SEQ ID NO: 10300
  Cyclic GFR-binding peptide
  MOD_RES (2), (4), (36), (37): Xaa is C or S

SEQ ID NO: 51054 - protein, 31 aa, Artificial Sequence
  Cyclic GFR-binding peptide
  MOD_RES (26), (27): Xaa is C or S
NSLQEVVNNASDYYVIPLPELRTPVXXTPPT

SEQ ID NO: 51055 - protein, 37 aa, Artificial Sequence; identical to SEQ ID NO: 10301
  Cyclic GFR-binding peptide
  MOD_RES (2), (34), (35): Xaa is C or S

SEQ ID NO: 51056 - protein, 36 aa, Artificial Sequence; identical to SEQ ID NO: 10302
  Cyclic GFR-binding peptide
  MOD_RES (1), (32), (33): Xaa is C or S

SEQ ID NO: 51057 - protein, 29 aa, Artificial Sequence
  Cyclic GFR-binding peptide
  MOD_RES (27), (28): Xaa is C or S
NNSLQEIVNSSDDYYLVTLPELQTPAXXP

SEQ ID NO: 51058 - protein, 31 aa, Artificial Sequence
  Cyclic GFR-binding peptide
  MOD_RES (1), (3): Xaa is C or S
XKXSRVIMNSLQEVKPKRGVYYLITLPELAQ

SEQ ID NO: 51059 - protein, 28 aa, Artificial Sequence
  Cyclic GFR-binding peptide
  MOD_RES (28), (28): Xaa is C or S
IMNSLQEIKPTKGIYYVIPLPELDQSVX

SEQ ID NO: 51060 - protein, 31 aa, Artificial Sequence
  Cyclic GFR-binding peptide
  MOD_RES (30), (31): Xaa is C or S
VVMDEYQKYVVKENEDIFLMSIPSLETPVXX

SEQ ID NO: 51061 - protein, 36 aa, Artificial Sequence; identical to SEQ ID NO: 10305
  Cyclic GFR-binding peptide
  MOD_RES (32), (33): Xaa is C or S

SEQ ID NO: 51062 - protein, 34 aa, Artificial Sequence
  Cyclic GFR-binding peptide
  MOD_RES (30), (30): Xaa is C or S
VVMNNSLQEIVNSSDDYYLVTLPELKTPAXTPKT

SEQ ID NO: 51063 - protein, 30 aa, Artificial Sequence
  Cyclic GFR-binding peptide
  MOD_RES (29), (30): Xaa is C or S
VMNNSLQEIVNSSDDYYVVPLPELKTPAXX

SEQ ID NO: 51064 - protein, 34 aa, Artificial Sequence; identical to SEQ ID NO: 10306
  Cyclic GFR-binding peptide
  MOD_RES (31), (32): Xaa is C or S

SEQ ID NO: 51065 - protein, 20 aa, Artificial Sequence
  Cyclic GFR-binding peptide
NSLQEVVKENEDYYLMTLPE

SEQ ID NO: 51066 - protein, 34 aa, Artificial Sequence; identical to SEQ ID NO: 10308
  Cyclic GFR-binding peptide
  MOD_RES (31), (32): Xaa is C or S

SEQ ID NO: 51067 - protein, 32 aa, Artificial Sequence
  Cyclic GFR-binding peptide
  MOD_RES (2), (4): Xaa is C or S
HXGXARVVMNNSLQEIVNSSDDYYVVPLPELQ

SEQ ID NO: 51068 - protein, 33 aa, Artificial Sequence; identical to SEQ ID NO: 10310
  Cyclic GFR-binding peptide
  MOD_RES (1), (33): Xaa is C or S

SEQ ID NO: 51069 - protein, 36 aa, Artificial Sequence; identical to SEQ ID NO: 10311
  Cyclic GFR-binding peptide
  MOD_RES (1), (33), (34): Xaa is C or S

SEQ ID NO: 51070 - protein, 34 aa, Artificial Sequence; identical to SEQ ID NO: 10312
  Cyclic GFR-binding peptide
  MOD_RES (31), (32): Xaa is C or S

SEQ ID NO: 51071 - protein, 36 aa, Artificial Sequence; identical to SEQ ID NO: 10313
  Cyclic GFR-binding peptide
  MOD_RES (31), (32): Xaa is C or S

SEQ ID NO: 51072 - protein, 28 aa, Artificial Sequence
  Cyclic GFR-binding peptide
  MOD_RES (27), (28): Xaa is C or S
NNSLQEIVNSSDDYYVVPLPELKTPAXX

SEQ ID NO: 51073 - protein, 36 aa, Artificial Sequence; identical to SEQ ID NO: 10315
  Cyclic GFR-binding peptide
  MOD_RES (2), (34), (35): Xaa is C or S

SEQ ID NO: 51074 - protein, 39 aa, Artificial Sequence; identical to SEQ ID NO: 10319
  Cyclic GFR-binding peptide
  MOD_RES (1), (33), (34): Xaa is C or S

SEQ ID NO: 51075 - protein, 41 aa, Artificial Sequence; identical to SEQ ID NO: 10321
  Cyclic GFR-binding peptide
  MOD_RES (2), (4), (35), (36): Xaa is C or S

SEQ ID NO: 51076 - protein, 39 aa, Artificial Sequence; identical to SEQ ID NO: 10322
  Cyclic GFR-binding peptide
  MOD_RES (2), (4), (35), (36): Xaa is C or S

SEQ ID NO: 51077 - protein, 39 aa, Artificial Sequence; identical to SEQ ID NO: 10323
  Cyclic GFR-binding peptide
  MOD_RES (1), (33), (34): Xaa is C or S

SEQ ID NO: 51078 - protein, 24 aa, Artificial Sequence
  Cyclic GFR-binding peptide
VIMEYQKYIKPTKGIIFLISIPSL

SEQ ID NO: 51079 - protein, 23 aa, Artificial Sequence
  Cyclic GFR-binding peptide
IMEYQKYVKPKRGVIFLISIPSL

SEQ ID NO: 51080 - protein, 31 aa, Artificial Sequence
  Cyclic GFR-binding peptide
  MOD_RES (27), (28): Xaa is C or S
MEYQKYVKPTRGVIFLISIPSLDQPVXXPSA

SEQ ID NO: 51081 - protein, 37 aa, Artificial Sequence; identical to SEQ ID NO: 10325
  Cyclic GFR-binding peptide
  MOD_RES (2), (34), (35): Xaa is C or S

SEQ ID NO: 51082 - protein, 37 aa, Artificial Sequence; identical to SEQ ID NO: 10326
  Cyclic GFR-binding peptide
  MOD_RES (31), (32): Xaa is C or S

SEQ ID NO: 51083 - protein, 31 aa, Artificial Sequence
  Cyclic GFR-binding peptide
  MOD_RES (28), (29): Xaa is C or S
MDRYKKLVVNNASDFYLISIANLRTPVXXTP

SEQ ID NO: 51084 - protein, 32 aa, Artificial Sequence; identical to SEQ ID NO: 10328
  Cyclic GFR-binding peptide
  MOD_RES (32), (32): Xaa is C or S

SEQ ID NO: 51085 - protein, 39 aa, Artificial Sequence; identical to SEQ ID NO: 10329
  Cyclic GFR-binding peptide
  MOD_RES (1), (3), (35), (36): Xaa is C or S

SEQ ID NO: 51086 - protein, 22 aa, Artificial Sequence
  Cyclic GFR-binding peptide
MEYQKYVKPKRGVIFLISIPSL

SEQ ID NO: 51087 - protein, 36 aa, Artificial Sequence
  Cyclic GFR-binding peptide
  MOD_RES (30), (31): Xaa is C or S
KVIMNSLQEIKPTKGIYYVIPLPELDQSVXXPSASA

SEQ ID NO: 51088 - protein, 26 aa, Artificial Sequence
  Cyclic GFR-binding peptide
VMNNSLQEIVNSSDDYYLVTLPELKT

SEQ ID NO: 51089 - protein, 42 aa, Artificial Sequence; identical to SEQ ID NO: 10331
  Cyclic GFR-binding peptide
  MOD_RES (2), (4), (36), (37): Xaa is C or S

SEQ ID NO: 51090 - protein, 32 aa, Artificial Sequence; identical to SEQ ID NO: 10333
  Cyclic GFR-binding peptide
  MOD_RES (1), (1): Xaa is C or S

SEQ ID NO: 51091 - protein, 38 aa, Artificial Sequence; identical to SEQ ID NO: 10334
  Cyclic GFR-binding peptide
  MOD_RES (2), (4), (36), (37): Xaa is C or S

SEQ ID NO: 51092 - protein, 28 aa, Artificial Sequence
  Cyclic GFR-binding peptide
ARVVMNEYQKYIVNSSDDIFLVSIPSLQ

SEQ ID NO: 51093 - protein, 30 aa, Artificial Sequence
  Cyclic GFR-binding peptide
  MOD_RES (26), (27): Xaa is C or S
NSLQEVVKDYEDYYLMTLPELETPVXXAKP

SEQ ID NO: 51094 - protein, 35 aa, Artificial Sequence; identical to SEQ ID NO: 10339
  Cyclic GFR-binding peptide
  MOD_RES (2), (34), (35): Xaa is C or S

SEQ ID NO: 51095 - protein, 26 aa, Artificial Sequence
  Cyclic GFR-binding peptide
SRVVMNEYQKYIVNSSDDIFLVSIPS

SEQ ID NO: 51096 - protein, 33 aa, Artificial Sequence; identical to SEQ ID NO: 10341
  Cyclic GFR-binding peptide
  MOD_RES (32), (32): Xaa is C or S

SEQ ID NO: 51097 - protein, 39 aa, Artificial Sequence; identical to SEQ ID NO: 10342
  Cyclic GFR-binding peptide
  MOD_RES (2), (33), (34): Xaa is C or S

SEQ ID NO: 51098 - protein, 31 aa, Artificial Sequence
  Cyclic GFR-binding peptide
  MOD_RES (26), (27): Xaa is C or S
NSLQEVVKDYEDYYLMTLPELETPVXXAKPI

SEQ ID NO: 51099 - protein, 28 aa, Artificial Sequence
  Cyclic GFR-binding peptide
EVVMEEYQKYVVKDYEDIFLMSIPSLET

SEQ ID NO: 51100 - protein, 34 aa, Artificial Sequence; identical to SEQ ID NO: 10343
  Cyclic GFR-binding peptide
  MOD_RES (2), (4): Xaa is C or S

SEQ ID NO: 51101 - protein, 29 aa, Artificial Sequence
  Cyclic GFR-binding peptide
  MOD_RES (1), (1): Xaa is C or S
XSEVVMDQYNKLVVNNASDLYLISIASLR

SEQ ID NO: 51102 - protein, 39 aa, Artificial Sequence; identical to SEQ ID NO: 10344
  Cyclic GFR-binding peptide
  MOD_RES (2), (4), (36), (37): Xaa is C or S

SEQ ID NO: 51103 - protein, 24 aa, Artificial Sequence
  Cyclic GFR-binding peptide
EYQKYVKPTRGVIFLISIPSLDQP

SEQ ID NO: 51104 - protein, 30 aa, Artificial Sequence
  Cyclic GFR-binding peptide
  MOD_RES (30), (30): Xaa is C or S
VVMNNSLQEIVNSSDDYYVVPLPELQTPAX

SEQ ID NO: 51105 - protein, 36 aa, Artificial Sequence; identical to SEQ ID NO: 10346
  Cyclic GFR-binding peptide
  MOD_RES (1), (3), (34), (35): Xaa is C or S

SEQ ID NO: 51106 - protein, 36 aa, Artificial Sequence
  Cyclic GFR-binding peptide
  MOD_RES (30), (31): Xaa is C or S
RVIMNSLQEVKPKRGVYYLITLPELAQPVXXPAASA

SEQ ID NO: 51107 - protein, 31 aa, Artificial Sequence
  Cyclic GFR-binding peptide
  MOD_RES (1), (3): Xaa is C or S
XGXGEVVMENSLQEVVKDYEDYYVMPLPELE

SEQ ID NO: 51108 - protein, 28 aa, Artificial Sequence
  Cyclic GFR-binding peptide
  MOD_RES (26), (27): Xaa is C or S
EYQKYIVNSSDDIFLVSIPSLQTPAXXP

SEQ ID NO: 51109 - protein, 27 aa, Artificial Sequence
  Cyclic GFR-binding peptide
VMNEYQKYIVNSSDDIFLVSIPSLKTP

SEQ ID NO: 51110 - protein, 38 aa, Artificial Sequence; identical to SEQ ID NO: 10348
  Cyclic GFR-binding peptide
  MOD_RES (1), (33), (34): Xaa is C or S

SEQ ID NO: 51111 - protein, 37 aa, Artificial Sequence; identical to SEQ ID NO: 10350
  Cyclic GFR-binding peptide
  MOD_RES (1), (33), (34): Xaa is C or S

SEQ ID NO: 51112 - protein, 35 aa, Artificial Sequence; identical to SEQ ID NO: 10351
  Cyclic GFR-binding peptide
  MOD_RES (1), (32), (33): Xaa is C or S

SEQ ID NO: 51113 - protein, 35 aa, Artificial Sequence; identical to SEQ ID NO: 10352
  Cyclic GFR-binding peptide
  MOD_RES (31), (32): Xaa is C or S

SEQ ID NO: 51114 - protein, 32 aa, Artificial Sequence; identical to SEQ ID NO: 10353
  Cyclic GFR-binding peptide
  MOD_RES (1), (32): Xaa is C or S

SEQ ID NO: 51115 - protein, 34 aa, Artificial Sequence
  Cyclic GFR-binding peptide
  MOD_RES (30), (31): Xaa is C or S
KVIMNSLQEIKPTKGIYYVIPLPELDQSVXXPSA

SEQ ID NO: 51116 - protein, 30 aa, Artificial Sequence
  Cyclic GFR-binding peptide
  MOD_RES (29), (30): Xaa is C or S
VVMNSLQEVKPTRGVYYVIPLPELDQPVXX

SEQ ID NO: 51117 - protein, 36 aa, Artificial Sequence; identical to SEQ ID NO: 10354
  Cyclic GFR-binding peptide
  MOD_RES (1), (3), (34), (35): Xaa is C or S

SEQ ID NO: 51118 - protein, 23 aa, Artificial Sequence
  Cyclic GFR-binding peptide
NEYQKYIVNSSDDIFLVSIPSLK

SEQ ID NO: 51119 - protein, 31 aa, Artificial Sequence; identical to SEQ ID NO: 10355
  Cyclic GFR-binding peptide
  MOD_RES (1), (1): Xaa is C or S

SEQ ID NO: 51120 - protein, 37 aa, Artificial Sequence; identical to SEQ ID NO: 10356
  Cyclic GFR-binding peptide
  MOD_RES (1), (3), (35), (36): Xaa is C or S

SEQ ID NO: 51121 - protein, 31 aa, Artificial Sequence
  Cyclic GFR-binding peptide
  MOD_RES (1), (1): Xaa is C or S
XARVVMNNSLQEIVNSSDDYYVVPLPELQTP

SEQ ID NO: 51122 - protein, 40 aa, Artificial Sequence; identical to SEQ ID NO: 10357
  Cyclic GFR-binding peptide
  MOD_RES (2), (4), (36), (37): Xaa is C or S

SEQ ID NO: 51123 - protein, 26 aa, Artificial Sequence
  Cyclic GFR-binding peptide
ARVVMNEYQKYIVNSSDDIFLVSIPS

SEQ ID NO: 51124 - protein, 33 aa, Artificial Sequence
  Cyclic GFR-binding peptide
  MOD_RES (1), (3): Xaa is C or S
XGXARVVMNEYQKYIVNSSDDIFLVSIPSLQTP

SEQ ID NO: 51125 - protein, 41 aa, Artificial Sequence; identical to SEQ ID NO: 10358
  Cyclic GFR-binding peptide
  MOD_RES (2), (4), (36), (37): Xaa is C or S

SEQ ID NO: 51126 - protein, 32 aa, Artificial Sequence
  Cyclic GFR-binding peptide
  MOD_RES (30), (31): Xaa is C or S
VVMEEYQKYVVKDYEDIFLMSIPSLETPVXXA

SEQ ID NO: 51127 - protein, 29 aa, Artificial Sequence
  Cyclic GFR-binding peptide
  MOD_RES (1), (1): Xaa is C or S
XSRVVMNEYQKYIVNSSDDIFLVSIPSLK

SEQ ID NO: 51128 - protein, 30 aa, Artificial Sequence
  Cyclic GFR-binding peptide
  MOD_RES (29), (30): Xaa is C or S
VMDNSLQEVVNNASDYYVIPLPELRTPVXX

SEQ ID NO: 51129 - protein, 35 aa, Artificial Sequence; identical to SEQ ID NO: 10361
  Cyclic GFR-binding peptide
  MOD_RES (32), (33): Xaa is C or S

SEQ ID NO: 51130 - protein, 21 aa, Artificial Sequence
  Cyclic GFR-binding peptide
ENSLQEVVKDYEDYYVMPLPE

SEQ ID NO: 51131 - protein, 28 aa, Artificial Sequence
  Cyclic GFR-binding peptide
  MOD_RES (28), (28): Xaa is C or S
IMNSLQEVKPKRGVYYLITLPELAQPVX

SEQ ID NO: 51132 - protein, 40 aa, Artificial Sequence; identical to SEQ ID NO: 10363
  Cyclic GFR-binding peptide
  MOD_RES (2), (4), (36), (37): Xaa is C or S

SEQ ID NO: 51133 - protein, 38 aa, Artificial Sequence; identical to SEQ ID NO: 10364
  Cyclic GFR-binding peptide
  MOD_RES (2), (4), (36), (37): Xaa is C or S

SEQ ID NO: 51134 - protein, 29 aa, Artificial Sequence
  Cyclic GFR-binding peptide
  MOD_RES (26), (27): Xaa is C or S
NSLQEVVKDYEDYYLMTLPELETPVXXAK

SEQ ID NO: 51135 - protein, 36 aa, Artificial Sequence; identical to SEQ ID NO: 10368
  Cyclic GFR-binding peptide
  MOD_RES (1), (33), (34): Xaa is C or S

SEQ ID NO: 51136 - protein, 34 aa, Artificial Sequence
  Cyclic GFR-binding peptide
  MOD_RES (28), (29): Xaa is C or S
MENSLQEVVKDYEDYYVMPLPELETPVXXAKPIS

SEQ ID NO: 51137 - protein, 40 aa, Artificial Sequence; identical to SEQ ID NO: 10370
  Cyclic GFR-binding peptide
  MOD_RES (2), (4), (36), (37): Xaa is C or S

SEQ ID NO: 51138 - protein, 35 aa, Artificial Sequence; identical to SEQ ID NO: 10371
  Cyclic GFR-binding peptide
  MOD_RES (2), (34), (35): Xaa is C or S

SEQ ID NO: 51139 - protein, 29 aa, Artificial Sequence
  Cyclic GFR-binding peptide
  MOD_RES (2), (2): Xaa is C or S
GXSEVVMDNSLQEVVNNASDYYLITLPEL

SEQ ID NO: 51140 - protein, 25 aa, Artificial Sequence
  Cyclic GFR-binding peptide
EVVMEEYQKYVVKDYEDIFLMSIPS

SEQ ID NO: 51141 - protein, 39 aa, Artificial Sequence; identical to SEQ ID NO: 10372
  Cyclic GFR-binding peptide
  MOD_RES (1), (3), (35), (36): Xaa is C or S

SEQ ID NO: 51142 - protein, 28 aa, Artificial Sequence
  Cyclic GFR-binding peptide
  MOD_RES (28), (28): Xaa is C or S
MDNSLQEVVKENEDYYVMPLPELETPVX

SEQ ID NO: 51143 - protein, 32 aa, Artificial Sequence
  Cyclic GFR-binding peptide
  MOD_RES (1), (3): Xaa is C or S
XGXSRVVMNNSLQEIVNSSDDYYVVPLPELKT

SEQ ID NO: 51144 - protein, 37 aa, Artificial Sequence; identical to SEQ ID NO: 10374
  Cyclic GFR-binding peptide
  MOD_RES (32), (33): Xaa is C or S

SEQ ID NO: 51145 - protein, 29 aa, Artificial Sequence
  Cyclic GFR-binding peptide
  MOD_RES (28), (29): Xaa is C or S
MDNSLQEVVNNASDYYLITLPELRTPVXX

SEQ ID NO: 51146 - protein, 28 aa, Artificial Sequence
  Cyclic GFR-binding peptide
VVMNEYQKYIVNSSDDIFLVSIPSLQTP

SEQ ID NO: 51147 - protein, 25 aa, Artificial Sequence
  Cyclic GFR-binding peptide
VIMEYQKYIKPTKGIIFLISIPSLD

SEQ ID NO: 51148 - protein, 27 aa, Artificial Sequence
  Cyclic GFR-binding peptide
MNNSLQEIVNSSDDYYVVPLPELKTPA

SEQ ID NO: 51149 - protein, 29 aa, Artificial Sequence
  Cyclic GFR-binding peptide
  MOD_RES (2), (2): Xaa is C or S
GXARVVMNEYQKYIVNSSDDIFLVSIPSL

SEQ ID NO: 51150 - protein, 32 aa, Artificial Sequence; identical to SEQ ID NO: 10379
  Cyclic GFR-binding peptide
  MOD_RES (31), (32): Xaa is C or S

SEQ ID NO: 51151 - protein, 32 aa, Artificial Sequence; identical to SEQ ID NO: 10380
  Cyclic GFR-binding peptide
  MOD_RES (2), (2): Xaa is C or S

SEQ ID NO: 51152 - protein, 36 aa, Artificial Sequence; identical to SEQ ID NO: 10381
  Cyclic GFR-binding peptide
  MOD_RES (1), (3), (34), (35): Xaa is C or S

SEQ ID NO: 51153 - protein, 29 aa, Artificial Sequence
  Cyclic GFR-binding peptide
  MOD_RES (2), (4): Xaa is C or S
SXKXSKVIMEYQKYIKPTKGIIFLISIPS

SEQ ID NO: 51154 - protein, 39 aa, Artificial Sequence; identical to SEQ ID NO: 10383
  Cyclic GFR-binding peptide
  MOD_RES (1), (33), (34): Xaa is C or S

SEQ ID NO: 51155 - protein, 27 aa, Artificial Sequence
  Cyclic GFR-binding peptide
  MOD_RES (26), (27): Xaa is C or S
NSLQEIVNSSDDYYVVPLPELQTPAXX

SEQ ID NO: 51156 - protein, 40 aa, Artificial Sequence; identical to SEQ ID NO: 10385
  Cyclic GFR-binding peptide
  MOD_RES (2), (4), (35), (36): Xaa is C or S

SEQ ID NO: 51157 - protein, 39 aa, Artificial Sequence; identical to SEQ ID NO: 10386
  Cyclic GFR-binding peptide
  MOD_RES (2), (4), (35), (36): Xaa is C or S

SEQ ID NO: 51158 - protein, 30 aa, Artificial Sequence; identical to SEQ ID NO: 2088
  Cyclic GFR-binding peptide

SEQ ID NO: 51159 - protein, 35 aa, Artificial Sequence
  Cyclic GFR-binding peptide
  MOD_RES (29), (30): Xaa is C or S
VIMNSLQEVKPKRGVYYLITLPELAQPVXXPAASA

SEQ ID NO: 51160 - protein, 29 aa, Artificial Sequence
  Cyclic GFR-binding peptide
  MOD_RES (28), (29): Xaa is C or S
IMNSLQEIKPTKGIYYVIPLPELDQSVXX

SEQ ID NO: 51161 - protein, 37 aa, Artificial Sequence; identical to SEQ ID NO: 10393
  Cyclic GFR-binding peptide
  MOD_RES (31), (32): Xaa is C or S

SEQ ID NO: 51162 - protein, 25 aa, Artificial Sequence
  Cyclic GFR-binding peptide
VMDNSLQEVVNNASDYYVIPLPELR

SEQ ID NO: 51163 - protein, 35 aa, Artificial Sequence
  Cyclic GFR-binding peptide
  MOD_RES (29), (30): Xaa is C or S
VMDQYNKLVVNNASDLYLISIASLRTPVXXTPPTS

SEQ ID NO: 51164 - protein, 27 aa, Artificial Sequence
  Cyclic GFR-binding peptide
  MOD_RES (1), (1): Xaa is C or S
XGEVVMDNSLQEVVKENEDYYVMPLPE

SEQ ID NO: 51165 - protein, 32 aa, Artificial Sequence
  Cyclic GFR-binding peptide
  MOD_RES (29), (30): Xaa is C or S
VMNNSLQEIVNSSDDYYVVPLPELKTPAXXPK

SEQ ID NO: 51166 - protein, 38 aa, Artificial Sequence; identical to SEQ ID NO: 10396
  Cyclic GFR-binding peptide
  MOD_RES (2), (4), (36), (37): Xaa is C or S

SEQ ID NO: 51167 - protein, 35 aa, Artificial Sequence; identical to SEQ ID NO: 10398
  Cyclic GFR-binding peptide
  MOD_RES (1), (33), (34): Xaa is C or S

SEQ ID NO: 51168 - protein, 34 aa, Artificial Sequence; identical to SEQ ID NO: 10399
  Cyclic GFR-binding peptide
  MOD_RES (2), (34): Xaa is C or S

SEQ ID NO: 51169 - protein, 34 aa, Artificial Sequence; identical to SEQ ID NO: 10401
  Cyclic GFR-binding peptide
  MOD_RES (32), (33): Xaa is C or S

SEQ ID NO: 51170 - protein, 37 aa, Artificial Sequence; identical to SEQ ID NO: 10403
  Cyclic GFR-binding peptide
  MOD_RES (2), (4), (36), (37): Xaa is C or S

SEQ ID NO: 51171 - protein, 29 aa, Artificial Sequence
  Cyclic GFR-binding peptide
  MOD_RES (26), (27): Xaa is C or S
RYKKLVVNNASDFYLISIANLRTPVXXTP

SEQ ID NO: 51172 - protein, 32 aa, Artificial Sequence
  Cyclic GFR-binding peptide
  MOD_RES (29), (29): Xaa is C or S
VMNNSLQEIVNSSDDYYVVPLPELKTPAXTPK

SEQ ID NO: 51173 - protein, 30 aa, Artificial Sequence; identical to SEQ ID NO: 10408
  Cyclic GFR-binding peptide

SEQ ID NO: 51174 - protein, 31 aa, Artificial Sequence; identical to SEQ ID NO: 10409
  Cyclic GFR-binding peptide
  MOD_RES (1), (1): Xaa is C or S

SEQ ID NO: 51175 - protein, 35 aa, Artificial Sequence; identical to SEQ ID NO: 10410
  Cyclic GFR-binding peptide
  MOD_RES (2), (34), (35): Xaa is C or S

SEQ ID NO: 51176 - protein, 35 aa, Artificial Sequence; identical to SEQ ID NO: 10411
  Cyclic GFR-binding peptide
  MOD_RES (2), (34), (35): Xaa is C or S

SEQ ID NO: 51177 - protein, 29 aa, Artificial Sequence
  Cyclic GFR-binding peptide
  MOD_RES (28), (29): Xaa is C or S
MDNSLQEVVKENEDYYVMPLPELETPVXX

SEQ ID NO: 51178 - protein, 39 aa, Artificial Sequence; identical to SEQ ID NO: 10412
  Cyclic GFR-binding peptide
  MOD_RES (1), (33): Xaa is C or S

SEQ ID NO: 51179 - protein, 32 aa, Artificial Sequence
  Cyclic GFR-binding peptide
  MOD_RES (2), (2): Xaa is C or S
GXSEVVMDRYKKLVVNNASDFYLISIANLRTP

SEQ ID NO: 51180 - protein, 22 aa, Artificial Sequence
  Cyclic GFR-binding peptide
IMEYQKYIKPTKGIIFLISIPS

SEQ ID NO: 51181 - protein, 34 aa, Artificial Sequence; identical to SEQ ID NO: 10413
  Cyclic GFR-binding peptide
  MOD_RES (2), (33), (34): Xaa is C or S

SEQ ID NO: 51182 - protein, 32 aa, Artificial Sequence
  Cyclic GFR-binding peptide
  MOD_RES (2), (2): Xaa is C or S
GXGEVVMDNSLQEVVKENEDYYLMTLPELETP

SEQ ID NO: 51183 - protein, 32 aa, Artificial Sequence; identical to SEQ ID NO: 10415
  Cyclic GFR-binding peptide
  MOD_RES (1), (1): Xaa is C or S

SEQ ID NO: 51184 - protein, 31 aa, Artificial Sequence
  Cyclic GFR-binding peptide
  MOD_RES (28), (28): Xaa is C or S
MNNSLQEIVNSSDDYYLVTLPELKTPAXTPK

SEQ ID NO: 51185 - protein, 27 aa, Artificial Sequence
  Cyclic GFR-binding peptide
  MOD_RES (27), (27): Xaa is C or S
MEYQKYIKPTKGIIFLISIPSLDQSVX

SEQ ID NO: 51186 - protein, 34 aa, Artificial Sequence; identical to SEQ ID NO: 10417
  Cyclic GFR-binding peptide
  MOD_RES (1), (33), (34): Xaa is C or S

SEQ ID NO: 51187 - protein, 22 aa, Artificial Sequence
  Cyclic GFR-binding peptide
NSLQEVVNNASDYYVIPLPELR

SEQ ID NO: 51188 - protein, 34 aa, Artificial Sequence
  Cyclic GFR-binding peptide
  MOD_RES (28), (29): Xaa is C or S
MDNSLQEVVKENEDYYLMTLPELETPVXXAKPIK

SEQ ID NO: 51189 - protein, 37 aa, Artificial Sequence; identical to SEQ ID NO: 10420
  Cyclic GFR-binding peptide
  MOD_RES (1), (3), (35), (36): Xaa is C or S

SEQ ID NO: 51190 - protein, 22 aa, Artificial Sequence
  Cyclic GFR-binding peptide
EYQKYVVKDYEDIFLMSIPSLE

SEQ ID NO: 51191 - protein, 34 aa, Artificial Sequence; identical to SEQ ID NO: 10424
  Cyclic GFR-binding peptide
  MOD_RES (1), (33): Xaa is C or S

SEQ ID NO: 51192 - protein, 32 aa, Artificial Sequence
  Cyclic GFR-binding peptide
  MOD_RES (29), (30): Xaa is C or S
VMNNSLQEIVNSSDDYYLVTLPELQTPAXXPK

SEQ ID NO: 51193 - protein, 34 aa, Artificial Sequence
  Cyclic GFR-binding peptide
  MOD_RES (29), (30): Xaa is C or S
VMNEYQKYIVNSSDDIFLVSIPSLQTPAXXPKPV

SEQ ID NO: 51194 - protein, 31 aa, Artificial Sequence
  Cyclic GFR-binding peptide
  MOD_RES (2), (4): Xaa is C or S
HXGXSRVVMNNSLQEIVNSSDDYYLVTLPEL

SEQ ID NO: 51195 - protein, 29 aa, Artificial Sequence
  Cyclic GFR-binding peptide
  MOD_RES (1), (1): Xaa is C or S
XSRVIMNSLQEVKPKRGVYYLITLPELAQ

SEQ ID NO: 51196 - protein, 27 aa, Artificial Sequence
  Cyclic GFR-binding peptide
MNNSLQEIVNSSDDYYLVTLPELQTPA

SEQ ID NO: 51197 - protein, 32 aa, Artificial Sequence
  Cyclic GFR-binding peptide
  MOD_RES (1), (3): Xaa is C or S
XGXSRVVMNEYQKYIVNSSDDIFLVSIPSLKT

SEQ ID NO: 51198 - protein, 26 aa, Artificial Sequence
  Cyclic GFR-binding peptide
VVMNNSLQEIVNSSDDYYVVPLPELK

SEQ ID NO: 51199 - protein, 32 aa, Artificial Sequence; identical to SEQ ID NO: 10431
  Cyclic GFR-binding peptide
  MOD_RES (31), (32): Xaa is C or S

SEQ ID NO: 51200 - protein, 31 aa, Artificial Sequence
  Cyclic GFR-binding peptide
  MOD_RES (26), (27): Xaa is C or S
RYKKLVVNNASDFYLISIANLRTPVXXTPPT

SEQ ID NO: 51201 - protein, 30 aa, Artificial Sequence
  Cyclic GFR-binding peptide
  MOD_RES (26), (27): Xaa is C or S
NSLQEVKPTRGVYYVIPLPELDQPVXXPSA

SEQ ID NO: 51202 - protein, 38 aa, Artificial Sequence; identical to SEQ ID NO: 10436
  Cyclic GFR-binding peptide
  MOD_RES (1), (3), (35), (36): Xaa is C or S

SEQ ID NO: 51203 - protein, 39 aa, Artificial Sequence; identical to SEQ ID NO: 10437
  Cyclic GFR-binding peptide
  MOD_RES (1), (3), (35), (36): Xaa is C or S

SEQ ID NO: 51204 - protein, 26 aa, Artificial Sequence
  Cyclic GFR-binding peptide
MNSLQEIKPTKGIYYVIPLPELDQSV

SEQ ID NO: 51205 - protein, 32 aa, Artificial Sequence; identical to SEQ ID NO: 10438
  Cyclic GFR-binding peptide
  MOD_RES (32), (32): Xaa is C or S

SEQ ID NO: 51206 - protein, 40 aa, Artificial Sequence; identical to SEQ ID NO: 10439
  Cyclic GFR-binding peptide
  MOD_RES (2), (34), (35): Xaa is C or S

SEQ ID NO: 51207 - protein, 26 aa, Artificial Sequence
  Cyclic GFR-binding peptide
VVMNNSLQEIVNSSDDYYVVPLPELQ

SEQ ID NO: 51208 - protein, 35 aa, Artificial Sequence
  Cyclic GFR-binding peptide
  MOD_RES (30), (31): Xaa is C or S
RVIMEYQKYVKPKRGVIFLISIPSLAQPVXXPAAS

SEQ ID NO: 51209 - protein, 31 aa, Artificial Sequence
  Cyclic GFR-binding peptide
  MOD_RES (1), (1): Xaa is C or S
XGEVVMDEYQKYVVKENEDIFLMSIPSLETP

SEQ ID NO: 51210 - protein, 32 aa, Artificial Sequence
  Cyclic GFR-binding peptide
  MOD_RES (2), (4): Xaa is C or S
HXGXARVVMNNSLQEIVNSSDDYYLVTLPELQ

SEQ ID NO: 51211 - protein, 33 aa, Artificial Sequence; identical to SEQ ID NO: 10444
  Cyclic GFR-binding peptide
  MOD_RES (31), (32): Xaa is C or S

SEQ ID NO: 51212 - protein, 31 aa, Artificial Sequence
  Cyclic GFR-binding peptide
  MOD_RES (27), (28): Xaa is C or S
NNSLQEIVNSSDDYYLVTLPELQTPAXXPKP

SEQ ID NO: 51213 - protein, 26 aa, Artificial Sequence
  Cyclic GFR-binding peptide
VIMEYQKYVKPKRGVIFLISIPSLAQ

SEQ ID NO: 51214 - protein, 37 aa, Artificial Sequence; identical to SEQ ID NO: 10446
  Cyclic GFR-binding peptide
  MOD_RES (1), (3), (35), (36): Xaa is C or S

SEQ ID NO: 51215 - protein, 28 aa, Artificial Sequence
  Cyclic GFR-binding peptide
  MOD_RES (27), (28): Xaa is C or S
NNSLQEIVNSSDDYYLVTLPELKTPAXX

SEQ ID NO: 51216 - protein, 39 aa, Artificial Sequence; identical to SEQ ID NO: 10447
  Cyclic GFR-binding peptide
  MOD_RES (2), (34), (35): Xaa is C or S

SEQ ID NO: 51217 - protein, 31 aa, Artificial Sequence
  Cyclic GFR-binding peptide
  MOD_RES (29), (30): Xaa is C or S
VMNNSLQEIVNSSDDYYLVTLPELQTPAXXP

SEQ ID NO: 51218 - protein, 29 aa, Artificial Sequence
  Cyclic GFR-binding peptide
  MOD_RES (2), (4): Xaa is C or S
SXKXSKVIMNSLQEIKPTKGIYYVIPLPE

SEQ ID NO: 51219 - protein, 32 aa, Artificial Sequence
  Cyclic GFR-binding peptide
  MOD_RES (30), (31): Xaa is C or S
KVIMEYQKYIKPTKGIIFLISIPSLDQSVXXP

SEQ ID NO: 51220 - protein, 24 aa, Artificial Sequence
  Cyclic GFR-binding peptide
MNSLQEVKPKRGVYYLITLPELAQ

SEQ ID NO: 51221 - protein, 28 aa, Artificial Sequence
  Cyclic GFR-binding peptide
  MOD_RES (27), (28): Xaa is C or S
ENSLQEVVKDYEDYYLMTLPELETPVXX

SEQ ID NO: 51222 - protein, 33 aa, Artificial Sequence
  Cyclic GFR-binding peptide
  MOD_RES (29), (30): Xaa is C or S
VIMEYQKYVKPKRGVIFLISIPSLAQPVXXPAA

SEQ ID NO: 51223 - protein, 38 aa, Artificial Sequence; identical to SEQ ID NO: 10449
  Cyclic GFR-binding peptide
  MOD_RES (2), (4), (36), (37): Xaa is C or S

SEQ ID NO: 51224 - protein, 29 aa, Artificial Sequence
  Cyclic GFR-binding peptide
  MOD_RES (27), (27): Xaa is C or S
NNSLQEIVNSSDDYYLVTLPELKTPAXTP

SEQ ID NO: 51225 - protein, 33 aa, Artificial Sequence
  Cyclic GFR-binding peptide
  MOD_RES (30), (31): Xaa is C or S
VVMNNSLQEIVNSSDDYYLVTLPELKTPAXXPK

SEQ ID NO: 51226 - protein, 27 aa, Artificial Sequence
  Cyclic GFR-binding peptide
SRVIMEYQKYVKPKRGVIFLISIPSLA

SEQ ID NO: 51227 - protein, 31 aa, Artificial Sequence
  Cyclic GFR-binding peptide
  MOD_RES (2), (4): Xaa is C or S
RXGXGEVVMDNSLQEVVKENEDYYLMTLPEL

SEQ ID NO: 51228 - protein, 33 aa, Artificial Sequence
  Cyclic GFR-binding peptide
  MOD_RES (1), (3): Xaa is C or S
XGXSRVVMNNSLQEIVNSSDDYYLVTLPELKTP

SEQ ID NO: 51229 - protein, 38 aa, Artificial Sequence; identical to SEQ ID NO: 10455
  Cyclic GFR-binding peptide
  MOD_RES (2), (34): Xaa is C or S

SEQ ID NO: 51230 - protein, 32 aa, Artificial Sequence
  Cyclic GFR-binding peptide
  MOD_RES (26), (27): Xaa is C or S
NSLQEIVNSSDDYYVVPLPELQTPAXXPKPVT

SEQ ID NO: 51231 - protein, 23 aa, Artificial Sequence
  Cyclic GFR-binding peptide
QYNKLVVNNASDLYLISIASLRT

SEQ ID NO: 51232 - protein, 28 aa, Artificial Sequence
  Cyclic GFR-binding peptide
  MOD_RES (27), (28): Xaa is C or S
ENSLQEVVKDYEDYYVMPLPELETPVXX

SEQ ID NO: 51233 - protein, 29 aa, Artificial Sequence
  Cyclic GFR-binding peptide
EVVMDNSLQEVVKENEDYYLMTLPELETP

SEQ ID NO: 51234 - protein, 29 aa, Artificial Sequence
  Cyclic GFR-binding peptide
  MOD_RES (2), (2): Xaa is C or S
GXSEVVMDRYKKLVVNNASDFYLISIANL

SEQ ID NO: 51235 - protein, 33 aa, Artificial Sequence; identical to SEQ ID NO: 10457
  Cyclic GFR-binding peptide
  MOD_RES (2), (2): Xaa is C or S

SEQ ID NO: 51236 - protein, 33 aa, Artificial Sequence
  Cyclic GFR-binding peptide
  MOD_RES (29), (30): Xaa is C or S
VMDNSLQEVVNNASDYYVIPLPELRTPVXXTPP

SEQ ID NO: 51237 - protein, 32 aa, Artificial Sequence; identical to SEQ ID NO: 10458
  Cyclic GFR-binding peptide
  MOD_RES (1), (1): Xaa is C or S

SEQ ID NO: 51238 - protein, 35 aa, Artificial Sequence
  Cyclic GFR-binding peptide
  MOD_RES (30), (31): Xaa is C or S
VVMDNSLQEVVNNASDYYLITLPELRTPVXXTPPT

SEQ ID NO: 51239 - protein, 38 aa, Artificial Sequence; identical to SEQ ID NO: 10460
  Cyclic GFR-binding peptide
  MOD_RES (2), (34), (35): Xaa is C or S

SEQ ID NO: 51240 - protein, 35 aa, Artificial Sequence; identical to SEQ ID NO: 10462
  Cyclic GFR-binding peptide
  MOD_RES (1), (33): Xaa is C or S

SEQ ID NO: 51241 - protein, 30 aa, Artificial Sequence
  Cyclic GFR-binding peptide
GEVVMENSLQEVVKDYEDYYVMPLPELETP

SEQ ID NO: 51242 - protein, 33 aa, Artificial Sequence; identical to SEQ ID NO: 10463
  Cyclic GFR-binding peptide
  MOD_RES (31), (32): Xaa is C or S

SEQ ID NO: 51243 - protein, 32 aa, Artificial Sequence
  Cyclic GFR-binding peptide
  MOD_RES (1), (3): Xaa is C or S
XGXSEVVMDRYKKLVVNNASDFYLISIANLRT

SEQ ID NO: 51244 - protein, 27 aa, Artificial Sequence
  Cyclic GFR-binding peptide
SEVVMDNSLQEVVNNASDYYVIPLPEL

SEQ ID NO: 51245 - protein, 30 aa, Artificial Sequence
  Cyclic GFR-binding peptide
  MOD_RES (27), (28): Xaa is C or S
MEYQKYVKPKRGVIFLISIPSLAQPVXXPA

SEQ ID NO: 51246 - protein, 38 aa, Artificial Sequence; identical to SEQ ID NO: 10465
  Cyclic GFR-binding peptide
  MOD_RES (32), (32): Xaa is C or S

SEQ ID NO: 51247 - protein, 31 aa, Artificial Sequence
  Cyclic GFR-binding peptide
  MOD_RES (27), (28): Xaa is C or S
MEYQKYVKPKRGVIFLISIPSLAQPVXXPAA

SEQ ID NO: 51248 - protein, 31 aa, Artificial Sequence
  Cyclic GFR-binding peptide
  MOD_RES (1), (1): Xaa is C or S
XARVVMNEYQKYIVNSSDDIFLVSIPSLQTP

SEQ ID NO: 51249 - protein, 40 aa, Artificial Sequence; identical to SEQ ID NO: 10466
  Cyclic GFR-binding peptide
  MOD_RES (1), (3), (35), (36): Xaa is C or S

SEQ ID NO: 51250 - protein, 35 aa, Artificial Sequence; identical to SEQ ID NO: 10467
  Cyclic GFR-binding peptide
  MOD_RES (32), (33): Xaa is C or S

SEQ ID NO: 51251 - protein, 35 aa, Artificial Sequence; identical to SEQ ID NO: 10470
  Cyclic GFR-binding peptide
  MOD_RES (31), (32): Xaa is C or S

SEQ ID NO: 51252 - protein, 27 aa, Artificial Sequence
  Cyclic GFR-binding peptide
VVMEEYQKYVVKDYEDIFLMSIPSLET

SEQ ID NO: 51253 - protein, 35 aa, Artificial Sequence; identical to SEQ ID NO: 10471
  Cyclic GFR-binding peptide
  MOD_RES (2), (33), (34): Xaa is C or S

SEQ ID NO: 51254 - protein, 31 aa, Artificial Sequence
  Cyclic GFR-binding peptide
  MOD_RES (2), (4): Xaa is C or S
HXGXSRVVMNEYQKYIVNSSDDIFLVSIPSL

SEQ ID NO: 51255 - protein, 31 aa, Artificial Sequence
  Cyclic GFR-binding peptide
  MOD_RES (27), (28): Xaa is C or S
NNSLQEIVNSSDDYYVVPLPELQTPAXXPKP

SEQ ID NO: 51256 - protein, 27 aa, Artificial Sequence
  Cyclic GFR-binding peptide
EVVMENSLQEVVKDYEDYYVMPLPELE

SEQ ID NO: 51257 - protein, 40 aa, Artificial Sequence; identical to SEQ ID NO: 10473
  Cyclic GFR-binding peptide
  MOD_RES (2), (4), (36), (37): Xaa is C or S

SEQ ID NO: 51258 - protein, 36 aa, Artificial Sequence; identical to SEQ ID NO: 10474
  Cyclic GFR-binding peptide
  MOD_RES (32), (33): Xaa is C or S

SEQ ID NO: 51259 - protein, 31 aa, Artificial Sequence
  Cyclic GFR-binding peptide
  MOD_RES (2), (2): Xaa is C or S
GXARVVMNEYQKYIVNSSDDIFLVSIPSLQT

SEQ ID NO: 51260 - protein, 26 aa, Artificial Sequence
  Cyclic GFR-binding peptide
  MOD_RES (26), (26): Xaa is C or S
NSLQEIKPTKGIYYVIPLPELDQSVX

SEQ ID NO: 51261 - protein, 35 aa, Artificial Sequence; identical to SEQ ID NO: 10477
  Cyclic GFR-binding peptide
  MOD_RES (2), (33), (34): Xaa is C or S

SEQ ID NO: 51262 - protein, 36 aa, Artificial Sequence; identical to SEQ ID NO: 10479
  Cyclic GFR-binding peptide
  MOD_RES (31), (31): Xaa is C or S

SEQ ID NO: 51263 - protein, 36 aa, Artificial Sequence; identical to SEQ ID NO: 10478
  Cyclic GFR-binding peptide
  MOD_RES (32), (33): Xaa is C or S

SEQ ID NO: 51264 - protein, 31 aa, Artificial Sequence; identical to SEQ ID NO: 10481
  Cyclic GFR-binding peptide
  MOD_RES (31), (31): Xaa is C or S

SEQ ID NO: 51265 - protein, 37 aa, Artificial Sequence; identical to SEQ ID NO: 10482
  Cyclic GFR-binding peptide
  MOD_RES (31), (32): Xaa is C or S

SEQ ID NO: 51266 - protein, 32 aa, Artificial Sequence
  Cyclic GFR-binding peptide
  MOD_RES (26), (27): Xaa is C or S
EYQKYVVKDYEDIFLMSIPSLETPVXXAKPIS

SEQ ID NO: 51267 - protein, 33 aa, Artificial Sequence
  Cyclic GFR-binding peptide
  MOD_RES (28), (29): Xaa is C or S
IMEYQKYVKPKRGVIFLISIPSLAQPVXXPAAS

SEQ ID NO: 51268 - protein, 28 aa, Artificial Sequence
  Cyclic GFR-binding peptide
  MOD_RES (2), (2): Xaa is C or S
KXSRVIMEYQKYVKPKRGVIFLISIPSL

SEQ ID NO: 51269 - protein, 34 aa, Artificial Sequence; identical to SEQ ID NO: 10484
  Cyclic GFR-binding peptide
  MOD_RES (1), (33), (34): Xaa is C or S

SEQ ID NO: 51270 - protein, 31 aa, Artificial Sequence
  Cyclic GFR-binding peptide
  MOD_RES (1), (3): Xaa is C or S
XGXSEVVMDQYNKLVVNNASDLYLISIASLR

SEQ ID NO: 51271 - protein, 26 aa, Artificial Sequence
  Cyclic GFR-binding peptide
MEYQKYIKPTKGIIFLISIPSLDQSV

SEQ ID NO: 51272 - protein, 28 aa, Artificial Sequence
  Cyclic GFR-binding peptide
RVVMNNSLQEIVNSSDDYYVVPLPELQT

SEQ ID NO: 51273 - protein, 33 aa, Artificial Sequence; identical to SEQ ID NO: 10486
  Cyclic GFR-binding peptide
  MOD_RES (1), (33): Xaa is C or S

SEQ ID NO: 51274 - protein, 32 aa, Artificial Sequence; identical to SEQ ID NO: 10488
  Cyclic GFR-binding peptide
  MOD_RES (1), (32): Xaa is C or S

SEQ ID NO: 51275 - protein, 22 aa, Artificial Sequence
  Cyclic GFR-binding peptide
MDQYNKLVVNNASDLYLISIAS

SEQ ID NO: 51276 - protein, 37 aa, Artificial Sequence; identical to SEQ ID NO: 10492
  Cyclic GFR-binding peptide
  MOD_RES (1), (33), (34): Xaa is C or S

SEQ ID NO: 51277 - protein, 39 aa, Artificial Sequence; identical to SEQ ID NO: 10493
  Cyclic GFR-binding peptide
  MOD_RES (2), (34), (35): Xaa is C or S

SEQ ID NO: 51278 - protein, 31 aa, Artificial Sequence
  Cyclic GFR-binding peptide
  MOD_RES (1), (1): Xaa is C or S
XGEVVMEEYQKYVVKDYEDIFLMSIPSLETP

SEQ ID NO: 51279 - protein, 27 aa, Artificial Sequence
  Cyclic GFR-binding peptide
VMNNSLQEIVNSSDDYYLVTLPELQTP

SEQ ID NO: 51280 - protein, 24 aa, Artificial Sequence
  Cyclic GFR-binding peptide
MNEYQKYIVNSSDDIFLVSIPSLK

SEQ ID NO: 51281 - protein, 36 aa, Artificial Sequence; identical to SEQ ID NO: 10495
  Cyclic GFR-binding peptide
  MOD_RES (31), (32): Xaa is C or S

SEQ ID NO: 51282 - protein, 24 aa, Artificial Sequence
  Cyclic GFR-binding peptide
KVVMNSLQEVKPTRGVYYVIPLPE

SEQ ID NO: 51283 - protein, 37 aa, Artificial Sequence; identical to SEQ ID NO: 10496
  Cyclic GFR-binding peptide
  MOD_RES (31), (32): Xaa is C or S

SEQ ID NO: 51284 - protein, 34 aa, Artificial Sequence; identical to SEQ ID NO: 10498
  Cyclic GFR-binding peptide
  MOD_RES (2), (34): Xaa is C or S

SEQ ID NO: 51285 - protein, 22 aa, Artificial Sequence
  Cyclic GFR-binding peptide
NSLQEVVKENEDYYVMPLPELE

SEQ ID NO: 51286 - protein, 32 aa, Artificial Sequence
  Cyclic GFR-binding peptide
  MOD_RES (27), (28): Xaa is C or S
MNSLQEIKPTKGIYYVIPLPELDQSVXXPSAS

SEQ ID NO: 51287 - protein, 36 aa, Artificial Sequence; identical to SEQ ID NO: 10500
  Cyclic GFR-binding peptide
  MOD_RES (32), (33): Xaa is C or S

SEQ ID NO: 51288 - protein, 36 aa, Artificial Sequence; identical to SEQ ID NO: 10501
  Cyclic GFR-binding peptide
  MOD_RES (32), (33): Xaa is C or S

SEQ ID NO: 51289 - protein, 31 aa, Artificial Sequence
  Cyclic GFR-binding peptide
  MOD_RES (2), (4): Xaa is C or S
SXKXSRVIMEYQKYVKPKRGVIFLISIPSLA

SEQ ID NO: 51290 - protein, 27 aa, Artificial Sequence
  Cyclic GFR-binding peptide
  MOD_RES (1), (1): Xaa is C or S
XARVVMNNSLQEIVNSSDDYYLVTLPE

SEQ ID NO: 51291 - protein, 30 aa, Artificial Sequence
  Cyclic GFR-binding peptide
  MOD_RES (1), (3): Xaa is C or S
XKXSKVIMNSLQEIKPTKGIYYVIPLPELD

SEQ ID NO: 51292 - protein, 35 aa, Artificial Sequence
  Cyclic GFR-binding peptide
  MOD_RES (29), (30): Xaa is C or S
VMENSLQEVVKDYEDYYLMTLPELETPVXXAKPIS

SEQ ID NO: 51293 - protein, 22 aa, Artificial Sequence
  Cyclic GFR-binding peptide
MEYQKYVKPTRGVIFLISIPSL

SEQ ID NO: 51294 - protein, 29 aa, Artificial Sequence
  Cyclic GFR-binding peptide
  MOD_RES (1), (3): Xaa is C or S
XGXGEVVMDEYQKYVVKENEDIFLMSIPS

SEQ ID NO: 51295 - protein, 25 aa, Artificial Sequence
  Cyclic GFR-binding peptide
NSLQEIVNSSDDYYVVPLPELKTPA

SEQ ID NO: 51296 - protein, 27 aa, Artificial Sequence
  Cyclic GFR-binding peptide
  MOD_RES (27), (27): Xaa is C or S
NNSLQEIVNSSDDYYLVTLPELKTPAX

SEQ ID NO: 51297 - protein, 29 aa, Artificial Sequence
  Cyclic GFR-binding peptide
  MOD_RES (27), (27): Xaa is C or S
NEYQKYIVNSSDDIFLVSIPSLKTPAXTP

SEQ ID NO: 51298 - protein, 27 aa, Artificial Sequence
  Cyclic GFR-binding peptide
  MOD_RES (27), (27): Xaa is C or S
MNSLQEIKPTKGIYYVIPLPELDQSVX

SEQ ID NO: 51299 - protein, 29 aa, Artificial Sequence
  Cyclic GFR-binding peptide
  MOD_RES (27), (28): Xaa is C or S
MNSLQEVKPTRGVYYVIPLPELDQPVXXP

SEQ ID NO: 51300 - protein, 31 aa, Artificial Sequence; identical to SEQ ID NO: 10507
  Cyclic GFR-binding peptide
  MOD_RES (31), (31): Xaa is C or S

SEQ ID NO: 51301 - protein, 34 aa, Artificial Sequence; identical to SEQ ID NO: 10508
  Cyclic GFR-binding peptide
  MOD_RES (31), (32): Xaa is C or S

SEQ ID NO: 51302 - protein, 40 aa, Artificial Sequence; identical to SEQ ID NO: 10509
  Cyclic GFR-binding peptide
  MOD_RES (1), (3), (35), (36): Xaa is C or S

SEQ ID NO: 51303 - protein, 29 aa, Artificial Sequence
  Cyclic GFR-binding peptide
VVMNNSLQEIVNSSDDYYVVPLPELKTPA

SEQ ID NO: 51304 - protein, 28 aa, Artificial Sequence
  Cyclic GFR-binding peptide
VMDNSLQEVVKENEDYYLMTLPELETPV

SEQ ID NO: 51305 - protein, 34 aa, Artificial Sequence; identical to SEQ ID NO: 10510
  Cyclic GFR-binding peptide
  MOD_RES (2), (34): Xaa is C or S

SEQ ID NO: 51306 - protein, 33 aa, Artificial Sequence; identical to SEQ ID NO: 10511
  Cyclic GFR-binding peptide
  MOD_RES (1), (33): Xaa is C or S

SEQ ID NO: 51307 - protein, 29 aa, Artificial Sequence
  Cyclic GFR-binding peptide
  MOD_RES (1), (3): Xaa is C or S
XGXGEVVMDNSLQEVVKENEDYYVMPLPE

SEQ ID NO: 51308 - protein, 39 aa, Artificial Sequence; identical to SEQ ID NO: 10513
  Cyclic GFR-binding peptide
  MOD_RES (2), (34), (35): Xaa is C or S

SEQ ID NO: 51309 - protein, 26 aa, Artificial Sequence
  Cyclic GFR-binding peptide
IMNSLQEVKPKRGVYYLITLPELAQP

SEQ ID NO: 51310 - protein, 25 aa, Artificial Sequence
  Cyclic GFR-binding peptide
EYQKYVVKDYEDIFLMSIPSLETPV

SEQ ID NO: 51311 - protein, 30 aa, Artificial Sequence
  Cyclic GFR-binding peptide
  MOD_RES (29), (30): Xaa is C or S
VMDEYQKYVVKENEDIFLMSIPSLETPVXX

SEQ ID NO: 51312 - protein, 25 aa, Artificial Sequence
  Cyclic GFR-binding peptide
NNSLQEIVNSSDDYYLVTLPELKTP

SEQ ID NO: 51313 - protein, 38 aa, Artificial Sequence; identical to SEQ ID NO: 10514
  Cyclic GFR-binding peptide
  MOD_RES (2), (34), (35): Xaa is C or S

SEQ ID NO: 51314 - protein, 26 aa, Artificial Sequence
  Cyclic GFR-binding peptide
SKVVMNSLQEVKPTRGVYYVIPLPEL

SEQ ID NO: 51315 - protein, 31 aa, Artificial Sequence; identical to SEQ ID NO: 10519
  Cyclic GFR-binding peptide
  MOD_RES (1), (1): Xaa is C or S

SEQ ID NO: 51316 - protein, 30 aa, Artificial Sequence
  Cyclic GFR-binding peptide
  MOD_RES (30), (30): Xaa is C or S
VVMNNSLQEIVNSSDDYYVVPLPELKTPAX

SEQ ID NO: 51317 - protein, 29 aa, Artificial Sequence
  Cyclic GFR-binding peptide
AAAAAAAAANSLQEVVKENEDYYVMPLPE

SEQ ID NO: 51318 - protein, 35 aa, Artificial Sequence; identical to SEQ ID NO: 10521
  Cyclic GFR-binding peptide
  MOD_RES (1), (3), (35): Xaa is C or S

SEQ ID NO: 51319 - protein, 30 aa, Artificial Sequence
  Cyclic GFR-binding peptide
  MOD_RES (2), (2): Xaa is C or S
GXGEVVMDNSLQEVVKENEDYYVMPLPELE

SEQ ID NO: 51320 - protein, 38 aa, Artificial Sequence; identical to SEQ ID NO: 10523
  Cyclic GFR-binding peptide
  MOD_RES (1), (33), (34): Xaa is C or S

SEQ ID NO: 51321 - protein, 37 aa, Artificial Sequence; identical to SEQ ID NO: 10525
  Cyclic GFR-binding peptide
  MOD_RES (2), (4), (36), (37): Xaa is C or S

SEQ ID NO: 51322 - protein, 32 aa, Artificial Sequence; identical to SEQ ID NO: 10527
  Cyclic GFR-binding peptide
  MOD_RES (1), (32): Xaa is C or S

SEQ ID NO: 51323 - protein, 30 aa, Artificial Sequence
  Cyclic GFR-binding peptide
  MOD_RES (2), (4): Xaa is C or S
HXGXSRVVMNNSLQEIVNSSDDYYVVPLPE

SEQ ID NO: 51324 - protein, 29 aa, Artificial Sequence
  Cyclic GFR-binding peptide
  MOD_RES (27), (28): Xaa is C or S
MEYQKYVKPTRGVIFLISIPSLDQPVXXP

SEQ ID NO: 51325 - protein, 27 aa, Artificial Sequence
  Cyclic GFR-binding peptide
EVVMDNSLQEVVKENEDYYLMTLPELE

SEQ ID NO: 51326 - protein, 35 aa, Artificial Sequence
  Cyclic GFR-binding peptide
  MOD_RES (30), (31): Xaa is C or S
VVMNEYQKYIVNSSDDIFLVSIPSLKTPAXXPKPV

SEQ ID NO: 51327 - protein, 23 aa, Artificial Sequence
  Cyclic GFR-binding peptide
MNSLQEVKPKRGVYYLITLPELA

SEQ ID NO: 51328 - protein, 29 aa, Artificial Sequence
  Cyclic GFR-binding peptide
  MOD_RES (28), (29): Xaa is C or S
MNNSLQEIVNSSDDYYLVTLPELQTPAXX

SEQ ID NO: 51329 - protein, 31 aa, Artificial Sequence
  Cyclic GFR-binding peptide
  MOD_RES (1), (3): Xaa is C or S
XGXSEVVMDNSLQEVVNNASDYYLITLPELR

SEQ ID NO: 51330 - protein, 39 aa, Artificial Sequence; identical to SEQ ID NO: 10530
  Cyclic GFR-binding peptide
  MOD_RES (1), (33), (34): Xaa is C or S

SEQ ID NO: 51331 - protein, 31 aa, Artificial Sequence
  Cyclic GFR-binding peptide
  MOD_RES (2), (2): Xaa is C or S
GXSRVVMNNSLQEIVNSSDDYYLVTLPELKT

SEQ ID NO: 51332 - protein, 29 aa, Artificial Sequence
  Cyclic GFR-binding peptide
AAAAAAAAAEYQKYVVKDYEDIFLMSIPS

SEQ ID NO: 51333 - protein, 28 aa, Artificial Sequence
  Cyclic GFR-binding peptide
VVMDEYQKYVVKENEDIFLMSIPSLETP

SEQ ID NO: 51334 - protein, 35 aa, Artificial Sequence; identical to SEQ ID NO: 10532
  Cyclic GFR-binding peptide
  MOD_RES (1), (33), (34): Xaa is C or S

SEQ ID NO: 51335 - protein, 28 aa, Artificial Sequence
  Cyclic GFR-binding peptide
  MOD_RES (2), (2): Xaa is C or S
KXSKVVMEYQKYVKPTRGVIFLISIPSL

SEQ ID NO: 51336 - protein, 34 aa, Artificial Sequence; identical to SEQ ID NO: 10533
  Cyclic GFR-binding peptide
  MOD_RES (1), (33), (34): Xaa is C or S

SEQ ID NO: 51337 - protein, 29 aa, Artificial Sequence
  Cyclic GFR-binding peptide
GEVVMDNSLQEVVKENEDYYLMTLPELET

SEQ ID NO: 51338 - protein, 30 aa, Artificial Sequence
  Cyclic GFR-binding peptide
  MOD_RES (1), (1): Xaa is C or S
XGEVVMDNSLQEVVKENEDYYLMTLPELET

SEQ ID NO: 51339 - protein, 29 aa, Artificial Sequence
  Cyclic GFR-binding peptide
  MOD_RES (27), (28): Xaa is C or S
DQYNKLVVNNASDLYLISIASLRTPVXXT

SEQ ID NO: 51340 - protein, 26 aa, Artificial Sequence
  Cyclic GFR-binding peptide
SRVVMNNSLQEIVNSSDDYYVVPLPE

SEQ ID NO: 51341 - protein, 41 aa, Artificial Sequence; identical to SEQ ID NO: 10535
  Cyclic GFR-binding peptide
  MOD_RES (2), (4), (35), (36): Xaa is C or S

SEQ ID NO: 51342 - protein, 28 aa, Artificial Sequence
  Cyclic GFR-binding peptide
  MOD_RES (27), (28): Xaa is C or S
EEYQKYVVKDYEDIFLMSIPSLETPVXX

SEQ ID NO: 51343 - protein, 31 aa, Artificial Sequence; identical to SEQ ID NO: 10537
  Cyclic GFR-binding peptide
  MOD_RES (31), (31): Xaa is C or S

SEQ ID NO: 51344 - protein, 28 aa, Artificial Sequence
  Cyclic GFR-binding peptide
  MOD_RES (26), (27): Xaa is C or S
NSLQEVKPKRGVYYLITLPELAQPVXXP

SEQ ID NO: 51345 - protein, 38 aa, Artificial Sequence; identical to SEQ ID NO: 10539
  Cyclic GFR-binding peptide
  MOD_RES (1), (33), (34): Xaa is C or S

SEQ ID NO: 51346 - protein, 34 aa, Artificial Sequence
  Cyclic GFR-binding peptide
  MOD_RES (30), (31): Xaa is C or S
VVMNNSLQEIVNSSDDYYLVTLPELKTPAXXPKP

SEQ ID NO: 51347 - protein, 29 aa, Artificial Sequence
  Cyclic GFR-binding peptide
  MOD_RES (27), (27): Xaa is C or S
NNSLQEIVNSSDDYYVVPLPELKTPAXTP

SEQ ID NO: 51348 - protein, 34 aa, Artificial Sequence
  Cyclic GFR-binding peptide
  MOD_RES (29), (30): Xaa is C or S
VMDNSLQEVVKENEDYYLMTLPELETPVXXAKPI

SEQ ID NO: 51349 - protein, 30 aa, Artificial Sequence
  Cyclic GFR-binding peptide
  MOD_RES (2), (4): Xaa is C or S
SXKXSRVIMEYQKYVKPKRGVIFLISIPSL

SEQ ID NO: 51350 - protein, 33 aa, Artificial Sequence; identical to SEQ ID NO: 10541
  Cyclic GFR-binding peptide
  MOD_RES (31), (32): Xaa is C or S

SEQ ID NO: 51351 - protein, 35 aa, Artificial Sequence; identical to SEQ ID NO: 10542
  Cyclic GFR-binding peptide
  MOD_RES (2), (33), (34): Xaa is C or S

SEQ ID NO: 51352 - protein, 22 aa, Artificial Sequence
  Cyclic GFR-binding peptide
RYKKLVVNNASDFYLISIANLR

SEQ ID NO: 51353 - protein, 24 aa, Artificial Sequence
  Cyclic GFR-binding peptide
NSLQEVVKDYEDYYVMPLPELETP

SEQ ID NO: 51354 - protein, 38 aa, Artificial Sequence; identical to SEQ ID NO: 10543
  Cyclic GFR-binding peptide
  MOD_RES (1), (3), (35): Xaa is C or S

SEQ ID NO: 51355 - protein, 31 aa, Artificial Sequence
  Cyclic GFR-binding peptide
  MOD_RES (28), (29): Xaa is C or S
MDQYNKLVVNNASDLYLISIASLRTPVXXTP

SEQ ID NO: 51356 - protein, 23 aa, Artificial Sequence
  Cyclic GFR-binding peptide
MNEYQKYIVNSSDDIFLVSIPSL

SEQ ID NO: 51357 - protein, 33 aa, Artificial Sequence
  Cyclic GFR-binding peptide
  MOD_RES (2), (4): Xaa is C or S
RXGXSEVVMDQYNKLVVNNASDLYLISIASLRT

SEQ ID NO: 51358 - protein, 35 aa, Artificial Sequence; identical to SEQ ID NO: 10545
  Cyclic GFR-binding peptide
  MOD_RES (32), (33): Xaa is C or S

SEQ ID NO: 51359 - protein, 32 aa, Artificial Sequence
  Cyclic GFR-binding peptide
  MOD_RES (29), (30): Xaa is C or S
VMENSLQEVVKDYEDYYVMPLPELETPVXXAK

SEQ ID NO: 51360 - protein, 27 aa, Artificial Sequence
  Cyclic GFR-binding peptide
MNEYQKYIVNSSDDIFLVSIPSLKTPA

SEQ ID NO: 51361 - protein, 29 aa, Artificial Sequence
  Cyclic GFR-binding peptide
GEVVMENSLQEVVKDYEDYYLMTLPELET

SEQ ID NO: 51362 - protein, 36 aa, Artificial Sequence; identical to SEQ ID NO: 10546
  Cyclic GFR-binding peptide
  MOD_RES (2), (33), (34): Xaa is C or S

SEQ ID NO: 51363 - protein, 30 aa, Artificial Sequence
  Cyclic GFR-binding peptide
  MOD_RES (1), (1): Xaa is C or S
XGEVVMENSLQEVVKDYEDYYLMTLPELET

SEQ ID NO: 51364 - protein, 25 aa, Artificial Sequence
  Cyclic GFR-binding peptide
SKVIMEYQKYIKPTKGIIFLISIPS

SEQ ID NO: 51365 - protein, 24 aa, Artificial Sequence
  Cyclic GFR-binding peptide
MEYQKYVKPKRGVIFLISIPSLAQ

SEQ ID NO: 51366 - protein, 25 aa, Artificial Sequence
  Cyclic GFR-binding peptide
NSLQEVVKENEDYYLMTLPELETPV

SEQ ID NO: 51367 - protein, 33 aa, Artificial Sequence; identical to SEQ ID NO: 10549
  Cyclic GFR-binding peptide
  MOD_RES (1), (33): Xaa is C or S

SEQ ID NO: 51368 - protein, 36 aa, Artificial Sequence; identical to SEQ ID NO: 10550
  Cyclic GFR-binding peptide
  MOD_RES (1), (33), (34): Xaa is C or S

SEQ ID NO: 51369 - protein, 28 aa, Artificial Sequence
  Cyclic GFR-binding peptide
VMDQYNKLVVNNASDLYLISIASLRTPV

SEQ ID NO: 51370 - protein, 33 aa, Artificial Sequence; identical to SEQ ID NO: 10551
  Cyclic GFR-binding peptide
  MOD_RES (2), (33): Xaa is C or S

SEQ ID NO: 51371 - protein, 36 aa, Artificial Sequence
  Cyclic GFR-binding peptide
  MOD_RES (30), (30): Xaa is C or S
VVMNNSLQEIVNSSDDYYLVTLPELKTPAXTPKTVH

SEQ ID NO: 51372 - protein, 31 aa, Artificial Sequence
  Cyclic GFR-binding peptide
  MOD_RES (26), (27): Xaa is C or S
EYQKYVVKENEDIFLMSIPSLETPVXXAKPI

SEQ ID NO: 51373 - protein, 26 aa, Artificial Sequence
  Cyclic GFR-binding peptide
ARVVMNNSLQEIVNSSDDYYVVPLPE

SEQ ID NO: 51374 - protein, 34 aa, Artificial Sequence; identical to SEQ ID NO: 10553
  Cyclic GFR-binding peptide
  MOD_RES (32), (33): Xaa is C or S

SEQ ID NO: 51375 - protein, 27 aa, Artificial Sequence
  Cyclic GFR-binding peptide
  MOD_RES (26), (27): Xaa is C or S
EYQKYVKPTRGVIFLISIPSLDQPVXX

SEQ ID NO: 51376 - protein, 24 aa, Artificial Sequence
  Cyclic GFR-binding peptide
NNSLQEIVNSSDDYYLVTLPELKT

SEQ ID NO: 51377 - protein, 26 aa, Artificial Sequence
  Cyclic GFR-binding peptide
VMNEYQKYIVNSSDDIFLVSIPSLQT

SEQ ID NO: 51378 - protein, 35 aa, Artificial Sequence; identical to SEQ ID NO: 10554
  Cyclic GFR-binding peptide
  MOD_RES (31), (32): Xaa is C or S

SEQ ID NO: 51379 - protein, 28 aa, Artificial Sequence
  Cyclic GFR-binding peptide
EVVMDNSLQEVVKENEDYYLMTLPELET

SEQ ID NO: 51380 - protein, 25 aa, Artificial Sequence
  Cyclic GFR-binding peptide
EYQKYIKPTKGIIFLISIPSLDQSV

SEQ ID NO: 51381 - protein, 26 aa, Artificial Sequence
  Cyclic GFR-binding peptide
MNNSLQEIVNSSDDYYLVTLPELQTP

SEQ ID NO: 51382 - protein, 23 aa, Artificial Sequence
  Cyclic GFR-binding peptide
VVMNSLQEVKPTRGVYYVIPLPE

SEQ ID NO: 51383 - protein, 30 aa, Artificial Sequence
  Cyclic GFR-binding peptide
  MOD_RES (26), (26): Xaa is C or S
EYQKYIVNSSDDIFLVSIPSLKTPAXTPKT

SEQ ID NO: 51384 - protein, 30 aa, Artificial Sequence
  Cyclic GFR-binding peptide
  MOD_RES (1), (1): Xaa is C or S
XARVVMNNSLQEIVNSSDDYYLVTLPELQT

SEQ ID NO: 51385 - protein, 41 aa, Artificial Sequence; identical to SEQ ID NO: 10559
  Cyclic GFR-binding peptide
  MOD_RES (1), (3), (35), (36): Xaa is C or S

SEQ ID NO: 51386 - protein, 39 aa, Artificial Sequence; identical to SEQ ID NO: 10560
  Cyclic GFR-binding peptide
  MOD_RES (2), (4), (36), (37): Xaa is C or S

SEQ ID NO: 51387 - protein, 39 aa, Artificial Sequence; identical to SEQ ID NO: 10561
  Cyclic GFR-binding peptide
  MOD_RES (1), (33), (34): Xaa is C or S

SEQ ID NO: 51388 - protein, 30 aa, Artificial Sequence
  Cyclic GFR-binding peptide
  MOD_RES (26), (27): Xaa is C or S
NSLQEIVNSSDDYYVVPLPELQTPAXXPKP

SEQ ID NO: 51389 - protein, 30 aa, Artificial Sequence
  Cyclic GFR-binding peptide
  MOD_RES (2), (2): Xaa is C or S
KXSKVIMNSLQEIKPTKGIYYVIPLPELDQ

SEQ ID NO: 51390 - protein, 34 aa, Artificial Sequence; identical to SEQ ID NO: 10563
  Cyclic GFR-binding peptide
  MOD_RES (2), (4): Xaa is C or S

SEQ ID NO: 51391 - protein, 30 aa, Artificial Sequence
  Cyclic GFR-binding peptide
  MOD_RES (30), (30): Xaa is C or S
VVMDNSLQEVVKENEDYYVMPLPELETPVX

SEQ ID NO: 51392 - protein, 30 aa, Artificial Sequence
  Cyclic GFR-binding peptide
  MOD_RES (2), (2): Xaa is C or S
GXGEVVMDNSLQEVVKENEDYYLMTLPELE

SEQ ID NO: 51393 - protein, 40 aa, Artificial Sequence; identical to SEQ ID NO: 10566
  Cyclic GFR-binding peptide
  MOD_RES (2), (4), (36), (37): Xaa is C or S

SEQ ID NO: 51394 - protein, 37 aa, Artificial Sequence; identical to SEQ ID NO: 10567
  Cyclic GFR-binding peptide
  MOD_RES (1), (33), (34): Xaa is C or S

SEQ ID NO: 51395 - protein, 34 aa, Artificial Sequence; identical to SEQ ID NO: 10569
  Cyclic GFR-binding peptide
  MOD_RES (1), (33), (34): Xaa is C or S

SEQ ID NO: 51396 - protein, 36 aa, Artificial Sequence; identical to SEQ ID NO: 10574
  Cyclic GFR-binding peptide
  MOD_RES (1), (32), (33): Xaa is C or S

SEQ ID NO: 51397 - protein, 30 aa, Artificial Sequence
  Cyclic GFR-binding peptide
  MOD_RES (28), (29): Xaa is C or S
IMEYQKYIKPTKGIIFLISIPSLDQSVXXP

SEQ ID NO: 51398 - protein, 32 aa, Artificial Sequence; identical to SEQ ID NO: 10576
  Cyclic GFR-binding peptide
  MOD_RES (31), (32): Xaa is C or S

SEQ ID NO: 51399 - protein, 29 aa, Artificial Sequence
  Cyclic GFR-binding peptide
  MOD_RES (26), (26): Xaa is C or S
EYQKYIVNSSDDIFLVSIPSLKTPAXTPK

SEQ ID NO: 51400 - protein, 21 aa, Artificial Sequence
  Cyclic GFR-binding peptide
DNSLQEVVKENEDYYVMPLPE

SEQ ID NO: 51401 - protein, 24 aa, Artificial Sequence
  Cyclic GFR-binding peptide
NEYQKYIVNSSDDIFLVSIPSLQT

SEQ ID NO: 51402 - protein, 31 aa, Artificial Sequence
  Cyclic GFR-binding peptide
  MOD_RES (2), (4): Xaa is C or S
SXKXSKVVMNSLQEVKPTRGVYYVIPLPELD

SEQ ID NO: 51403 - protein, 29 aa, Artificial Sequence
  Cyclic GFR-binding peptide
SRVIMNSLQEVKPKRGVYYLITLPELAQP

SEQ ID NO: 51404 - protein, 28 aa, Artificial Sequence
  Cyclic GFR-binding peptide
  MOD_RES (1), (1): Xaa is C or S
XGEVVMEEYQKYVVKDYEDIFLMSIPSL

SEQ ID NO: 51405 - protein, 31 aa, Artificial Sequence; identical to SEQ ID NO: 10580
  Cyclic GFR-binding peptide

SEQ ID NO: 51406 - protein, 34 aa, Artificial Sequence; identical to SEQ ID NO: 10581
  Cyclic GFR-binding peptide
  MOD_RES (1), (3): Xaa is C or S

SEQ ID NO: 51407 - protein, 35 aa, Artificial Sequence
  Cyclic GFR-binding peptide
  MOD_RES (30), (31): Xaa is C or S
VVMEEYQKYVVKDYEDIFLMSIPSLETPVXXAKPI

SEQ ID NO: 51408 - protein, 37 aa, Artificial Sequence; identical to SEQ ID NO: 10582
  Cyclic GFR-binding peptide
  MOD_RES (1), (3), (35), (36): Xaa is C or S

SEQ ID NO: 51409 - protein, 30 aa, Artificial Sequence
  Cyclic GFR-binding peptide
  MOD_RES (30), (30): Xaa is C or S
VVMNNSLQEIVNSSDDYYLVTLPELKTPAX

SEQ ID NO: 51410 - protein, 28 aa, Artificial Sequence
  Cyclic GFR-binding peptide
  MOD_RES (1), (3): Xaa is C or S
XKXSRVIMNSLQEVKPKRGVYYLITLPE

SEQ ID NO: 51411 - protein, 24 aa, Artificial Sequence
  Cyclic GFR-binding peptide
MENSLQEVVKDYEDYYVMPLPELE

SEQ ID NO: 51412 - protein, 35 aa, Artificial Sequence
  Cyclic GFR-binding peptide
  MOD_RES (29), (30): Xaa is C or S
VMDNSLQEVVNNASDYYVIPLPELRTPVXXTPPTS

SEQ ID NO: 51413 - protein, 24 aa, Artificial Sequence
  Cyclic GFR-binding peptide
NSLQEVVNNASDYYVIPLPELRTP

SEQ ID NO: 51414 - protein, 34 aa, Artificial Sequence
  Cyclic GFR-binding peptide
  MOD_RES (2), (4): Xaa is C or S
RXGXSEVVMDNSLQEVVNNASDYYVIPLPELRTP

SEQ ID NO: 51415 - protein, 28 aa, Artificial Sequence
  Cyclic GFR-binding peptide
  MOD_RES (27), (27): Xaa is C or S
NNSLQEIVNSSDDYYVVPLPELKTPAXT

SEQ ID NO: 51416 - protein, 38 aa, Artificial Sequence; identical to SEQ ID NO: 10583
  Cyclic GFR-binding peptide
  MOD_RES (32), (32): Xaa is C or S

SEQ ID NO: 51417 - protein, 21 aa, Artificial Sequence
  Cyclic GFR-binding peptide
NSLQEVVKENEDYYVMPLPEL

SEQ ID NO: 51418 - protein, 28 aa, Artificial Sequence
  Cyclic GFR-binding peptide
  MOD_RES (26), (27): Xaa is C or S
NSLQEIVNSSDDYYLVTLPELQTPAXXP

SEQ ID NO: 51419 - protein, 25 aa, Artificial Sequence
  Cyclic GFR-binding peptide
MEYQKYVKPKRGVIFLISIPSLAQP

SEQ ID NO: 51420 - protein, 27 aa, Artificial Sequence
  Cyclic GFR-binding peptide
  MOD_RES (1), (1): Xaa is C or S
XSRVIMNSLQEVKPKRGVYYLITLPEL

SEQ ID NO: 51421 - protein, 33 aa, Artificial Sequence; identical to SEQ ID NO: 10587
  Cyclic GFR-binding peptide
  MOD_RES (2), (2): Xaa is C or S

SEQ ID NO: 51422 - protein, 24 aa, Artificial Sequence
  Cyclic GFR-binding peptide
VVMNNSLQEIVNSSDDYYLVTLPE

SEQ ID NO: 51423 - protein, 33 aa, Artificial Sequence; identical to SEQ ID NO: 10589
  Cyclic GFR-binding peptide
  MOD_RES (1), (33): Xaa is C or S

SEQ ID NO: 51424 - protein, 33 aa, Artificial Sequence; identical to SEQ ID NO: 10590
  Cyclic GFR-binding peptide
  MOD_RES (1), (3): Xaa is C or S

SEQ ID NO: 51425 - protein, 35 aa, Artificial Sequence
  Cyclic GFR-binding peptide
  MOD_RES (30), (31): Xaa is C or S
VVMDNSLQEVVNNASDYYVIPLPELRTPVXXTPPT

SEQ ID NO: 51426 - protein, 25 aa, Artificial Sequence
  Cyclic GFR-binding peptide
MEYQKYIKPTKGIIFLISIPSLDQS

SEQ ID NO: 51427 - protein, 28 aa, Artificial Sequence
  Cyclic GFR-binding peptide
VVMENSLQEVVKDYEDYYVMPLPELETP

SEQ ID NO: 51428 - protein, 33 aa, Artificial Sequence; identical to SEQ ID NO: 10592
  Cyclic GFR-binding peptide
  MOD_RES (31), (32): Xaa is C or S

SEQ ID NO: 51429 - protein, 33 aa, Artificial Sequence; identical to SEQ ID NO: 10594
  Cyclic GFR-binding peptide
  MOD_RES (2), (2): Xaa is C or S

SEQ ID NO: 51430 - protein, 28 aa, Artificial Sequence
  Cyclic GFR-binding peptide
  MOD_RES (2), (2): Xaa is C or S
GXSRVVMNNSLQEIVNSSDDYYLVTLPE

SEQ ID NO: 51431 - protein, 36 aa, Artificial Sequence; identical to SEQ ID NO: 10597
  Cyclic GFR-binding peptide
  MOD_RES (32), (33): Xaa is C or S

SEQ ID NO: 51432 - protein, 27 aa, Artificial Sequence
  Cyclic GFR-binding peptide
RVVMNNSLQEIVNSSDDYYVVPLPELQ

SEQ ID NO: 51433 - protein, 35 aa, Artificial Sequence; identical to SEQ ID NO: 10598
  Cyclic GFR-binding peptide
  MOD_RES (1), (33): Xaa is C or S

SEQ ID NO: 51434 - protein, 42 aa, Artificial Sequence; identical to SEQ ID NO: 10599
  Cyclic GFR-binding peptide
  MOD_RES (2), (4), (36), (37): Xaa is C or S

SEQ ID NO: 51435 - protein, 38 aa, Artificial Sequence; identical to SEQ ID NO: 10600
  Cyclic GFR-binding peptide
  MOD_RES (32), (33): Xaa is C or S

SEQ ID NO: 51436 - protein, 29 aa, Artificial Sequence
  Cyclic GFR-binding peptide
  MOD_RES (29), (29): Xaa is C or S
VMDQYNKLVVNNASDLYLISIASLRTPVX

SEQ ID NO: 51437 - protein, 26 aa, Artificial Sequence
  Cyclic GFR-binding peptide
KVVMNSLQEVKPTRGVYYVIPLPELD

SEQ ID NO: 51438 - protein, 27 aa, Artificial Sequence
  Cyclic GFR-binding peptide
  MOD_RES (27), (27): Xaa is C or S
DNSLQEVVNNASDYYVIPLPELRTPVX

SEQ ID NO: 51439 - protein, 26 aa, Artificial Sequence
  Cyclic GFR-binding peptide
VMENSLQEVVKDYEDYYVMPLPELET

SEQ ID NO: 51440 - protein, 24 aa, Artificial Sequence
  Cyclic GFR-binding peptide
MEYQKYVKPTRGVIFLISIPSLDQ

SEQ ID NO: 51441 - protein, 29 aa, Artificial Sequence
  Cyclic GFR-binding peptide
  MOD_RES (2), (2): Xaa is C or S
GXGEVVMDNSLQEVVKENEDYYVMPLPEL

SEQ ID NO: 51442 - protein, 31 aa, Artificial Sequence
  Cyclic GFR-binding peptide
  MOD_RES (27), (28): Xaa is C or S
DNSLQEVVNNASDYYLITLPELRTPVXXTPP

SEQ ID NO: 51443 - protein, 39 aa, Artificial Sequence; identical to SEQ ID NO: 10603
  Cyclic GFR-binding peptide
  MOD_RES (2), (4), (36), (37): Xaa is C or S

SEQ ID NO: 51444 - protein, 34 aa, Artificial Sequence; identical to SEQ ID NO: 10604
  Cyclic GFR-binding peptide
  MOD_RES (1), (33), (34): Xaa is C or S

SEQ ID NO: 51445 - protein, 27 aa, Artificial Sequence
  Cyclic GFR-binding peptide
VMDRYKKLVVNNASDFYLISIANLRTP

SEQ ID NO: 51446 - protein, 38 aa, Artificial Sequence; identical to SEQ ID NO: 10606
  Cyclic GFR-binding peptide
  MOD_RES (1), (32), (33): Xaa is C or S

SEQ ID NO: 51447 - protein, 29 aa, Artificial Sequence
  Cyclic GFR-binding peptide
  MOD_RES (2), (2): Xaa is C or S
GXARVVMNNSLQEIVNSSDDYYLVTLPEL

SEQ ID NO: 51448 - protein, 30 aa, Artificial Sequence
  Cyclic GFR-binding peptide
  MOD_RES (1), (3): Xaa is C or S
XGXGEVVMEEYQKYVVKDYEDIFLMSIPSL

SEQ ID NO: 51449 - protein, 27 aa, Artificial Sequence
  Cyclic GFR-binding peptide
VVMNEYQKYIVNSSDDIFLVSIPSLQT

SEQ ID NO: 51450 - protein, 33 aa, Artificial Sequence
  Cyclic GFR-binding peptide
  MOD_RES (30), (30): Xaa is C or S
VVMNNSLQEIVNSSDDYYLVTLPELKTPAXTPK

SEQ ID NO: 51451 - protein, 29 aa, Artificial Sequence
  Cyclic GFR-binding peptide
SEVVMDNSLQEVVNNASDYYVIPLPELRT

SEQ ID NO: 51452 - protein, 33 aa, Artificial Sequence
  Cyclic GFR-binding peptide
  MOD_RES (27), (28): Xaa is C or S
DEYQKYVVKENEDIFLMSIPSLETPVXXAKPIK

SEQ ID NO: 51453 - protein, 26 aa, Artificial Sequence
  Cyclic GFR-binding peptide
VMNEYQKYIVNSSDDIFLVSIPSLKT

SEQ ID NO: 51454 - protein, 40 aa, Artificial Sequence; identical to SEQ ID NO: 10607
  Cyclic GFR-binding peptide
  MOD_RES (2), (4), (36): Xaa is C or S

SEQ ID NO: 51455 - protein, 30 aa, Artificial Sequence; identical to SEQ ID NO: 10608
  Cyclic GFR-binding peptide

SEQ ID NO: 51456 - protein, 37 aa, Artificial Sequence; identical to SEQ ID NO: 10609
  Cyclic GFR-binding peptide
  MOD_RES (31), (32): Xaa is C or S

SEQ ID NO: 51457 - protein, 27 aa, Artificial Sequence
  Cyclic GFR-binding peptide
  MOD_RES (26), (27): Xaa is C or S
NSLQEVVKENEDYYLMTLPELETPVXX

SEQ ID NO: 51458 - protein, 31 aa, Artificial Sequence
  Cyclic GFR-binding peptide
  MOD_RES (2), (4): Xaa is C or S
HXGXSRVVMNNSLQEIVNSSDDYYVVPLPEL

SEQ ID NO: 51459 - protein, 41 aa, Artificial Sequence; identical to SEQ ID NO: 10611
  Cyclic GFR-binding peptide
  MOD_RES (1), (3), (35), (36): Xaa is C or S

SEQ ID NO: 51460 - protein, 32 aa, Artificial Sequence
  Cyclic GFR-binding peptide
  MOD_RES (29), (30): Xaa is C or S
VMENSLQEVVKDYEDYYLMTLPELETPVXXAK

SEQ ID NO: 51461 - protein, 34 aa, Artificial Sequence; identical to SEQ ID NO: 10612
  Cyclic GFR-binding peptide
  MOD_RES (2), (34): Xaa is C or S

SEQ ID NO: 51462 - protein, 26 aa, Artificial Sequence
  Cyclic GFR-binding peptide
  MOD_RES (1), (1): Xaa is C or S
XSKVIMNSLQEIKPTKGIYYVIPLPE

SEQ ID NO: 51463 - protein, 22 aa, Artificial Sequence
  Cyclic GFR-binding peptide
QYNKLVVNNASDLYLISIASLR

SEQ ID NO: 51464 - protein, 41 aa, Artificial Sequence; identical to SEQ ID NO: 10614
  Cyclic GFR-binding peptide
  MOD_RES (1), (3), (35), (36): Xaa is C or S

SEQ ID NO: 51465 - protein, 30 aa, Artificial Sequence
  Cyclic GFR-binding peptide
  MOD_RES (1), (3): Xaa is C or S
XGXGEVVMENSLQEVVKDYEDYYLMTLPEL

SEQ ID NO: 51466 - protein, 31 aa, Artificial Sequence
  Cyclic GFR-binding peptide
  MOD_RES (1), (1): Xaa is C or S
XSEVVMDRYKKLVVNNASDFYLISIANLRTP

SEQ ID NO: 51467 - protein, 24 aa, Artificial Sequence
  Cyclic GFR-binding peptide
MNEYQKYIVNSSDDIFLVSIPSLQ

SEQ ID NO: 51468 - protein, 33 aa, Artificial Sequence; identical to SEQ ID NO: 10619
  Cyclic GFR-binding peptide
  MOD_RES (31), (32): Xaa is C or S

SEQ ID NO: 51469 - protein, 23 aa, Artificial Sequence
  Cyclic GFR-binding peptide
DNSLQEVVNNASDYYLITLPELR

SEQ ID NO: 51470 - protein, 22 aa, Artificial Sequence
  Cyclic GFR-binding peptide
EYQKYVVKENEDIFLMSIPSLE

SEQ ID NO: 51471 - protein, 34 aa, Artificial Sequence
  Cyclic GFR-binding peptide
  MOD_RES (30), (30): Xaa is C or S
VVMNNSLQEIVNSSDDYYVVPLPELKTPAXTPKT

SEQ ID NO: 51472 - protein, 30 aa, Artificial Sequence; identical to SEQ ID NO: 10620
  Cyclic GFR-binding peptide

SEQ ID NO: 51473 - protein, 32 aa, Artificial Sequence
  Cyclic GFR-binding peptide
  MOD_RES (26), (27): Xaa is C or S
EYQKYIKPTKGIIFLISIPSLDQSVXXPSASA

SEQ ID NO: 51474 - protein, 39 aa, Artificial Sequence; identical to SEQ ID NO: 10621
  Cyclic GFR-binding peptide
  MOD_RES (1), (3), (34), (35): Xaa is C or S

SEQ ID NO: 51475 - protein, 32 aa, Artificial Sequence
  Cyclic GFR-binding peptide
  MOD_RES (2), (4): Xaa is C or S
SXKXSRVIMNSLQEVKPKRGVYYLITLPELAQ

SEQ ID NO: 51476 - protein, 23 aa, Artificial Sequence
  Cyclic GFR-binding peptide
MNNSLQEIVNSSDDYYVVPLPEL

SEQ ID NO: 51477 - protein, 28 aa, Artificial Sequence
  Cyclic GFR-binding peptide
  MOD_RES (28), (28): Xaa is C or S
MENSLQEVVKDYEDYYLMTLPELETPVX

SEQ ID NO: 51478 - protein, 41 aa, Artificial Sequence; identical to SEQ ID NO: 10625
  Cyclic GFR-binding peptide
  MOD_RES (1), (3), (35), (36): Xaa is C or S

SEQ ID NO: 51479 - protein, 30 aa, Artificial Sequence
  Cyclic GFR-binding peptide
  MOD_RES (28), (29): Xaa is C or S
MENSLQEVVKDYEDYYLMTLPELETPVXXA

SEQ ID NO: 51480 - protein, 32 aa, Artificial Sequence
  Cyclic GFR-binding peptide
  MOD_RES (27), (28): Xaa is C or S
EEYQKYVVKDYEDIFLMSIPSLETPVXXAKPI

SEQ ID NO: 51481 - protein, 32 aa, Artificial Sequence
  Cyclic GFR-binding peptide
  MOD_RES (2), (2): Xaa is C or S
GXGEVVMEEYQKYVVKDYEDIFLMSIPSLETP

SEQ ID NO: 51482 - protein, 24 aa, Artificial Sequence
  Cyclic GFR-binding peptide
VVMDRYKKLVVNNASDFYLISIAN

SEQ ID NO: 51483 - protein, 21 aa, Artificial Sequence
  Cyclic GFR-binding peptide
DRYKKLVVNNASDFYLISIAN

SEQ ID NO: 51484 - protein, 37 aa, Artificial Sequence; identical to SEQ ID NO: 10627
  Cyclic GFR-binding peptide
  MOD_RES (31), (32): Xaa is C or S

SEQ ID NO: 51485 - protein, 33 aa, Artificial Sequence; identical to SEQ ID NO: 10628
  Cyclic GFR-binding peptide
  MOD_RES (32), (33): Xaa is C or S

SEQ ID NO: 51486 - protein, 30 aa, Artificial Sequence
  Cyclic GFR-binding peptide
  MOD_RES (28), (29): Xaa is C or S
MNNSLQEIVNSSDDYYLVTLPELQTPAXXP

SEQ ID NO: 51487 - protein, 34 aa, Artificial Sequence
  Cyclic GFR-binding peptide
  MOD_RES (29), (30): Xaa is C or S
VIMEYQKYVKPKRGVIFLISIPSLAQPVXXPAAS

SEQ ID NO: 51488 - protein, 35 aa, Artificial Sequence; identical to SEQ ID NO: 10630
  Cyclic GFR-binding peptide
  MOD_RES (1), (3), (34), (35): Xaa is C or S

SEQ ID NO: 51489 - protein, 30 aa, Artificial Sequence
  Cyclic GFR-binding peptide
GEVVMDNSLQEVVKENEDYYVMPLPELETP

SEQ ID NO: 51490 - protein, 29 aa, Artificial Sequence
  Cyclic GFR-binding peptide
  MOD_RES (29), (29): Xaa is C or S
VMDNSLQEVVKENEDYYVMPLPELETPVX

SEQ ID NO: 51491 - protein, 35 aa, Artificial Sequence; identical to SEQ ID NO: 10634
  Cyclic GFR-binding peptide
  MOD_RES (2), (33), (34): Xaa is C or S

SEQ ID NO: 51492 - protein, 31 aa, Artificial Sequence; identical to SEQ ID NO: 10635
  Cyclic GFR-binding peptide

SEQ ID NO: 51493 - protein, 36 aa, Artificial Sequence; identical to SEQ ID NO: 10636
  Cyclic GFR-binding peptide
  MOD_RES (2), (4), (35), (36): Xaa is C or S

SEQ ID NO: 51494 - protein, 33 aa, Artificial Sequence; identical to SEQ ID NO: 10638
  Cyclic GFR-binding peptide
  MOD_RES (1), (33): Xaa is C or S

SEQ ID NO: 51495 - protein, 39 aa, Artificial Sequence; identical to SEQ ID NO: 10639
  Cyclic GFR-binding peptide
  MOD_RES (1), (33): Xaa is C or S

SEQ ID NO: 51496 - protein, 36 aa, Artificial Sequence; identical to SEQ ID NO: 10642
  Cyclic GFR-binding peptide
  MOD_RES (31), (32): Xaa is C or S

SEQ ID NO: 51497 - protein, 34 aa, Artificial Sequence
  Cyclic GFR-binding peptide
  MOD_RES (30), (31): Xaa is C or S
VVMNEYQKYIVNSSDDIFLVSIPSLQTPAXXPKP

SEQ ID NO: 51498 - protein, 36 aa, Artificial Sequence
  Cyclic GFR-binding peptide
  MOD_RES (30), (31): Xaa is C or S
KVVMNSLQEVKPTRGVYYVIPLPELDQPVXXPSASA

SEQ ID NO: 51499 - protein, 37 aa, Artificial Sequence; identical to SEQ ID NO: 10643
  Cyclic GFR-binding peptide
  MOD_RES (32), (33): Xaa is C or S

SEQ ID NO: 51500 - protein, 29 aa, Artificial Sequence
  Cyclic GFR-binding peptide
  MOD_RES (1), (1): Xaa is C or S
XSKVVMEYQKYVKPTRGVIFLISIPSLDQ

SEQ ID NO: 51501 - protein, 26 aa, Artificial Sequence
  Cyclic GFR-binding peptide
VMEEYQKYVVKDYEDIFLMSIPSLET

SEQ ID NO: 51502 - protein, 38 aa, Artificial Sequence; identical to SEQ ID NO: 10645
  Cyclic GFR-binding peptide
  MOD_RES (32), (33): Xaa is C or S

SEQ ID NO: 51503 - protein, 32 aa, Artificial Sequence
  Cyclic GFR-binding peptide
  MOD_RES (30), (31): Xaa is C or S
VVMENSLQEVVKDYEDYYVMPLPELETPVXXA

SEQ ID NO: 51504 - protein, 37 aa, Artificial Sequence; identical to SEQ ID NO: 10646
  Cyclic GFR-binding peptide
  MOD_RES (2), (34), (35): Xaa is C or S

SEQ ID NO: 51505 - protein, 37 aa, Artificial Sequence; identical to SEQ ID NO: 10647
  Cyclic GFR-binding peptide
  MOD_RES (1), (33), (34): Xaa is C or S

SEQ ID NO: 51506 - protein, 23 aa, Artificial Sequence
  Cyclic GFR-binding peptide
EYQKYVVKENEDIFLMSIPSLET

SEQ ID NO: 51507 - protein, 34 aa, Artificial Sequence
  Cyclic GFR-binding peptide
  MOD_RES (28), (29): Xaa is C or S
VMEYQKYVKPTRGVIFLISIPSLDQPVXXPSASA

SEQ ID NO: 51508 - protein, 29 aa, Artificial Sequence
  Cyclic GFR-binding peptide
ARVVMNEYQKYIVNSSDDIFLVSIPSLQT

SEQ ID NO: 51509 - protein, 27 aa, Artificial Sequence
  Cyclic GFR-binding peptide
  MOD_RES (1), (1): Xaa is C or S
XGEVVMENSLQEVVKDYEDYYVMPLPE

SEQ ID NO: 51510 - protein, 37 aa, Artificial Sequence; identical to SEQ ID NO: 10649
  Cyclic GFR-binding peptide
  MOD_RES (1), (3), (34), (35): Xaa is C or S

SEQ ID NO: 51511 - protein, 30 aa, Artificial Sequence
  Cyclic GFR-binding peptide
  MOD_RES (2), (2): Xaa is C or S
GXGEVVMEEYQKYVVKDYEDIFLMSIPSLE

SEQ ID NO: 51512 - protein, 33 aa, Artificial Sequence
  Cyclic GFR-binding peptide
  MOD_RES (29), (30): Xaa is C or S
VVMNSLQEVKPTRGVYYVIPLPELDQPVXXPSA

SEQ ID NO: 51513 - protein, 28 aa, Artificial Sequence
  Cyclic GFR-binding peptide
VVMDNSLQEVVKENEDYYVMPLPELETP

SEQ ID NO: 51514 - protein, 26 aa, Artificial Sequence
  Cyclic GFR-binding peptide
DNSLQEVVKENEDYYLMTLPELETPV

SEQ ID NO: 51515 - protein, 28 aa, Artificial Sequence
  Cyclic GFR-binding peptide
EVVMDEYQKYVVKENEDIFLMSIPSLET

SEQ ID NO: 51516 - protein, 35 aa, Artificial Sequence
  Cyclic GFR-binding peptide
  MOD_RES (29), (30): Xaa is C or S
VMDRYKKLVVNNASDFYLISIANLRTPVXXTPPTS

SEQ ID NO: 51517 - protein, 25 aa, Artificial Sequence
  Cyclic GFR-binding peptide
MEYQKYVKPTRGVIFLISIPSLDQP

SEQ ID NO: 51518 - protein, 30 aa, Artificial Sequence
  Cyclic GFR-binding peptide
  MOD_RES (29), (29): Xaa is C or S
VMNNSLQEIVNSSDDYYLVTLPELKTPAXT

SEQ ID NO: 51519 - protein, 39 aa, Artificial Sequence; identical to SEQ ID NO: 10654
  Cyclic GFR-binding peptide
  MOD_RES (2), (4), (36): Xaa is C or S

SEQ ID NO: 51520 - protein, 30 aa, Artificial Sequence
  Cyclic GFR-binding peptide
  MOD_RES (27), (28): Xaa is C or S
DNSLQEVVKENEDYYLMTLPELETPVXXAK

SEQ ID NO: 51521 - protein, 36 aa, Artificial Sequence; identical to SEQ ID NO: 10656
  Cyclic GFR-binding peptide
  MOD_RES (31), (32): Xaa is C or S

SEQ ID NO: 51522 - protein, 22 aa, Artificial Sequence
  Cyclic GFR-binding peptide
MDNSLQEVVNNASDYYLITLPE

SEQ ID NO: 51523 - protein, 29 aa, Artificial Sequence
  Cyclic GFR-binding peptide
  MOD_RES (29), (29): Xaa is C or S
VIMNSLQEVKPKRGVYYLITLPELAQPVX

SEQ ID NO: 51524 - protein, 27 aa, Artificial Sequence
  Cyclic GFR-binding peptide
VVMENSLQEVVKDYEDYYLMTLPELET

SEQ ID NO: 51525 - protein, 39 aa, Artificial Sequence; identical to SEQ ID NO: 10658
  Cyclic GFR-binding peptide
  MOD_RES (2), (4), (35), (36): Xaa is C or S

SEQ ID NO: 51526 - protein, 33 aa, Artificial Sequence
  Cyclic GFR-binding peptide
  MOD_RES (29), (30): Xaa is C or S
VMNNSLQEIVNSSDDYYVVPLPELKTPAXXPKP

SEQ ID NO: 51527 - protein, 29 aa, Artificial Sequence
  Cyclic GFR-binding peptide
VVMNNSLQEIVNSSDDYYLVTLPELKTPA

SEQ ID NO: 51528 - protein, 32 aa, Artificial Sequence; identical to SEQ ID NO: 10661
  Cyclic GFR-binding peptide
  MOD_RES (31), (32): Xaa is C or S

SEQ ID NO: 51529 - protein, 23 aa, Artificial Sequence
  Cyclic GFR-binding peptide
NSLQEVVKDYEDYYVMPLPELET

SEQ ID NO: 51530 - protein, 39 aa, Artificial Sequence; identical to SEQ ID NO: 10663
  Cyclic GFR-binding peptide
  MOD_RES (2), (4), (36), (37): Xaa is C or S

SEQ ID NO: 51531 - protein, 35 aa, Artificial Sequence; identical to SEQ ID NO: 10664
  Cyclic GFR-binding peptide
  MOD_RES (2), (4): Xaa is C or S

SEQ ID NO: 51532 - protein, 34 aa, Artificial Sequence
  Cyclic GFR-binding peptide
  MOD_RES (28), (28): Xaa is C or S
MNNSLQEIVNSSDDYYLVTLPELKTPAXTPKTVH

SEQ ID NO: 51533 - protein, 28 aa, Artificial Sequence
  Cyclic GFR-binding peptide
  MOD_RES (27), (28): Xaa is C or S
MNSLQEIKPTKGIYYVIPLPELDQSVXX

SEQ ID NO: 51534 - protein, 42 aa, Artificial Sequence; identical to SEQ ID NO: 10667
  Cyclic GFR-binding peptide
  MOD_RES (2), (4), (36), (37): Xaa is C or S

SEQ ID NO: 51535 - protein, 36 aa, Artificial Sequence; identical to SEQ ID NO: 10668
  Cyclic GFR-binding peptide
  MOD_RES (2), (4), (36): Xaa is C or S

SEQ ID NO: 51536 - protein, 30 aa, Artificial Sequence
  Cyclic GFR-binding peptide
  MOD_RES (2), (2): Xaa is C or S
GXGEVVMENSLQEVVKDYEDYYVMPLPELE

SEQ ID NO: 51537 - protein, 34 aa, Artificial Sequence
  Cyclic GFR-binding peptide
  MOD_RES (29), (30): Xaa is C or S
VMNEYQKYIVNSSDDIFLVSIPSLKTPAXXPKPV

SEQ ID NO: 51538 - protein, 37 aa, Artificial Sequence; identical to SEQ ID NO: 10669
  Cyclic GFR-binding peptide
  MOD_RES (1), (32), (33): Xaa is C or S

SEQ ID NO: 51539 - protein, 29 aa, Artificial Sequence
  Cyclic GFR-binding peptide
  MOD_RES (26), (27): Xaa is C or S
NSLQEVVNNASDYYLITLPELRTPVXXTP

SEQ ID NO: 51540 - protein, 29 aa, Artificial Sequence
  Cyclic GFR-binding peptide
  MOD_RES (1), (1): Xaa is C or S
XGEVVMENSLQEVVKDYEDYYLMTLPELE

SEQ ID NO: 51541 - protein, 31 aa, Artificial Sequence; identical to SEQ ID NO: 10670
  Cyclic GFR-binding peptide
  MOD_RES (31), (31): Xaa is C or S

SEQ ID NO: 51542 - protein, 39 aa, Artificial Sequence; identical to SEQ ID NO: 10672
  Cyclic GFR-binding peptide
  MOD_RES (2), (34), (35): Xaa is C or S

SEQ ID NO: 51543 - protein, 35 aa, Artificial Sequence; identical to SEQ ID NO: 10674
  Cyclic GFR-binding peptide
  MOD_RES (2), (4): Xaa is C or S

SEQ ID NO: 51544 - protein, 28 aa, Artificial Sequence
  Cyclic GFR-binding peptide
  MOD_RES (1), (1): Xaa is C or S
XGEVVMDNSLQEVVKENEDYYLMTLPEL

SEQ ID NO: 51545 - protein, 32 aa, Artificial Sequence; identical to SEQ ID NO: 10676
  Cyclic GFR-binding peptide
  MOD_RES (31), (32): Xaa is C or S

SEQ ID NO: 51546 - protein, 34 aa, Artificial Sequence
  Cyclic GFR-binding peptide
  MOD_RES (29), (30): Xaa is C or S
VMDNSLQEVVNNASDYYLITLPELRTPVXXTPPT

SEQ ID NO: 51547 - protein, 31 aa, Artificial Sequence
  Cyclic GFR-binding peptide
  MOD_RES (30), (31): Xaa is C or S
VVMDNSLQEVVKENEDYYLMTLPELETPVXX

SEQ ID NO: 51548 - protein, 29 aa, Artificial Sequence
  Cyclic GFR-binding peptide
VVMDNSLQEVVKENEDYYVMPLPELETPV

SEQ ID NO: 51549 - protein, 32 aa, Artificial Sequence; identical to SEQ ID NO: 10677
  Cyclic GFR-binding peptide
  MOD_RES (1), (1): Xaa is C or S

SEQ ID NO: 51550 - protein, 24 aa, Artificial Sequence
  Cyclic GFR-binding peptide
VVMDEYQKYVVKENEDIFLMSIPS

SEQ ID NO: 51551 - protein, 39 aa, Artificial Sequence; identical to SEQ ID NO: 10679
  Cyclic GFR-binding peptide
  MOD_RES (1), (3), (35), (36): Xaa is C or S

SEQ ID NO: 51552 - protein, 36 aa, Artificial Sequence; identical to SEQ ID NO: 10680
  Cyclic GFR-binding peptide
  MOD_RES (32), (32): Xaa is C or S

SEQ ID NO: 51553 - protein, 33 aa, Artificial Sequence
  Cyclic GFR-binding peptide
  MOD_RES (30), (31): Xaa is C or S
KVVMNSLQEVKPTRGVYYVIPLPELDQPVXXPS

SEQ ID NO: 51554 - protein, 30 aa, Artificial Sequence
  Cyclic GFR-binding peptide
  MOD_RES (2), (2): Xaa is C or S
GXSEVVMDNSLQEVVNNASDYYVIPLPELR

SEQ ID NO: 51555 - protein, 22 aa, Artificial Sequence
  Cyclic GFR-binding peptide
MNEYQKYIVNSSDDIFLVSIPS

SEQ ID NO: 51556 - protein, 32 aa, Artificial Sequence
  Cyclic GFR-binding peptide
  MOD_RES (2), (4): Xaa is C or S
SXKXSKVIMNSLQEIKPTKGIYYVIPLPELDQ

SEQ ID NO: 51557 - protein, 33 aa, Artificial Sequence
  Cyclic GFR-binding peptide
  MOD_RES (28), (29): Xaa is C or S
MENSLQEVVKDYEDYYLMTLPELETPVXXAKPI

SEQ ID NO: 51558 - protein, 34 aa, Artificial Sequence; identical to SEQ ID NO: 10681
  Cyclic GFR-binding peptide
  MOD_RES (1), (33): Xaa is C or S

SEQ ID NO: 51559 - protein, 35 aa, Artificial Sequence; identical to SEQ ID NO: 10682
  Cyclic GFR-binding peptide
  MOD_RES (31), (32): Xaa is C or S

SEQ ID NO: 51560 - protein, 29 aa, Artificial Sequence
  Cyclic GFR-binding peptide
  MOD_RES (28), (28): Xaa is C or S
MNEYQKYIVNSSDDIFLVSIPSLKTPAXT

SEQ ID NO: 51561 - protein, 29 aa, Artificial Sequence
  Cyclic GFR-binding peptide
AAAAAAAAAQYNKLVVNNASDLYLISIAS

SEQ ID NO: 51562 - protein, 24 aa, Artificial Sequence
  Cyclic GFR-binding peptide
NSLQEIVNSSDDYYVVPLPELQTP

SEQ ID NO: 51563 - protein, 30 aa, Artificial Sequence
  Cyclic GFR-binding peptide
  MOD_RES (1), (1): Xaa is C or S
XGEVVMDNSLQEVVKENEDYYVMPLPELET

SEQ ID NO: 51564 - protein, 22 aa, Artificial Sequence
  Cyclic GFR-binding peptide
VMNSLQEVKPTRGVYYVIPLPE

SEQ ID NO: 51565 - protein, 22 aa, Artificial Sequence
  Cyclic GFR-binding peptide
DQYNKLVVNNASDLYLISIASL

SEQ ID NO: 51566 - protein, 22 aa, Artificial Sequence
  Cyclic GFR-binding peptide
DNSLQEVVNNASDYYVIPLPEL

SEQ ID NO: 51567 - protein, 37 aa, Artificial Sequence; identical to SEQ ID NO: 10686
  Cyclic GFR-binding peptide
  MOD_RES (2), (4), (35), (36): Xaa is C or S

SEQ ID NO: 51568 - protein, 39 aa, Artificial Sequence; identical to SEQ ID NO: 10687
  Cyclic GFR-binding peptide
  MOD_RES (1), (3), (35), (36): Xaa is C or S

SEQ ID NO: 51569 - protein, 29 aa, Artificial Sequence
  Cyclic GFR-binding peptide
  MOD_RES (27), (28): Xaa is C or S
DNSLQEVVKENEDYYLMTLPELETPVXXA

SEQ ID NO: 51570 - protein, 32 aa, Artificial Sequence
  Cyclic GFR-binding peptide
  MOD_RES (30), (31): Xaa is C or S
KVVMNSLQEVKPTRGVYYVIPLPELDQPVXXP

SEQ ID NO: 51571 - protein, 32 aa, Artificial Sequence
  Cyclic GFR-binding peptide
  MOD_RES (2), (4): Xaa is C or S
RXGXSEVVMDQYNKLVVNNASDLYLISIASLR

SEQ ID NO: 51572 - protein, 31 aa, Artificial Sequence; identical to SEQ ID NO: 10691
  Cyclic GFR-binding peptide
  MOD_RES (31), (31): Xaa is C or S

SEQ ID NO: 51573 - protein, 36 aa, Artificial Sequence; identical to SEQ ID NO: 10693
  Cyclic GFR-binding peptide
  MOD_RES (31), (32): Xaa is C or S

SEQ ID NO: 51574 - protein, 33 aa, Artificial Sequence; identical to SEQ ID NO: 10695
  Cyclic GFR-binding peptide
  MOD_RES (32), (32): Xaa is C or S

SEQ ID NO: 51575 - protein, 35 aa, Artificial Sequence
  Cyclic GFR-binding peptide
  MOD_RES (30), (30): Xaa is C or S
VVMNNSLQEIVNSSDDYYLVTLPELKTPAXTPKTV

SEQ ID NO: 51576 - protein, 28 aa, Artificial Sequence
  Cyclic GFR-binding peptide
KVIMEYQKYIKPTKGIIFLISIPSLDQS

SEQ ID NO: 51577 - protein, 27 aa, Artificial Sequence
  Cyclic GFR-binding peptide
  MOD_RES (26), (27): Xaa is C or S
NSLQEVVKDYEDYYLMTLPELETPVXX

SEQ ID NO: 51578 - protein, 36 aa, Artificial Sequence; identical to SEQ ID NO: 10696
  Cyclic GFR-binding peptide
  MOD_RES (1), (33): Xaa is C or S

SEQ ID NO: 51579 - protein, 30 aa, Artificial Sequence
  Cyclic GFR-binding peptide
  MOD_RES (26), (27): Xaa is C or S
NSLQEVKPKRGVYYLITLPELAQPVXXPAA

SEQ ID NO: 51580 - protein, 26 aa, Artificial Sequence
  Cyclic GFR-binding peptide
MNNSLQEIVNSSDDYYVVPLPELKTP

SEQ ID NO: 51581 - protein, 28 aa, Artificial Sequence
  Cyclic GFR-binding peptide
  MOD_RES (27), (28): Xaa is C or S
MEYQKYIKPTKGIIFLISIPSLDQSVXX

SEQ ID NO: 51582 - protein, 38 aa, Artificial Sequence; identical to SEQ ID NO: 10699
  Cyclic GFR-binding peptide
  MOD_RES (2), (34): Xaa is C or S

SEQ ID NO: 51583 - protein, 31 aa, Artificial Sequence
  Cyclic GFR-binding peptide
  MOD_RES (26), (27): Xaa is C or S
NSLQEVVNNASDYYLITLPELRTPVXXTPPT

SEQ ID NO: 51584 - protein, 33 aa, Artificial Sequence; identical to SEQ ID NO: 10700
  Cyclic GFR-binding peptide
  MOD_RES (31), (32): Xaa is C or S

SEQ ID NO: 51585 - protein, 25 aa, Artificial Sequence
  Cyclic GFR-binding peptide
NNSLQEIVNSSDDYYVVPLPELQTP

SEQ ID NO: 51586 - protein, 32 aa, Artificial Sequence
  Cyclic GFR-binding peptide
  MOD_RES (26), (27): Xaa is C or S
NSLQEVVKENEDYYVMPLPELETPVXXAKPIK

SEQ ID NO: 51587 - protein, 31 aa, Artificial Sequence
  Cyclic GFR-binding peptide
  MOD_RES (29), (30): Xaa is C or S
VMDQYNKLVVNNASDLYLISIASLRTPVXXT

SEQ ID NO: 51588 - protein, 28 aa, Artificial Sequence
  Cyclic GFR-binding peptide
  MOD_RES (2), (2): Xaa is C or S
GXGEVVMDEYQKYVVKENEDIFLMSIPS

SEQ ID NO: 51589 - protein, 26 aa, Artificial Sequence
  Cyclic GFR-binding peptide
VVMDNSLQEVVKENEDYYVMPLPELE

SEQ ID NO: 51590 - protein, 40 aa, Artificial Sequence; identical to SEQ ID NO: 10701
  Cyclic GFR-binding peptide
  MOD_RES (1), (3), (35), (36): Xaa is C or S

SEQ ID NO: 51591 - protein, 32 aa, Artificial Sequence; identical to SEQ ID NO: 10702
  Cyclic GFR-binding peptide
  MOD_RES (32), (32): Xaa is C or S

SEQ ID NO: 51592 - protein, 29 aa, Artificial Sequence
  Cyclic GFR-binding peptide
  MOD_RES (28), (29): Xaa is C or S
MENSLQEVVKDYEDYYLMTLPELETPVXX

SEQ ID NO: 51593 - protein, 25 aa, Artificial Sequence
  Cyclic GFR-binding peptide
NSLQEVKPTRGVYYVIPLPELDQPV

SEQ ID NO: 51594 - protein, 26 aa, Artificial Sequence
  Cyclic GFR-binding peptide
VMDNSLQEVVNNASDYYVIPLPELRT

SEQ ID NO: 51595 - protein, 31 aa, Artificial Sequence
  Cyclic GFR-binding peptide
  MOD_RES (2), (2): Xaa is C or S
KXSKVIMNSLQEIKPTKGIYYVIPLPELDQS

SEQ ID NO: 51596 - protein, 30 aa, Artificial Sequence
  Cyclic GFR-binding peptide
  MOD_RES (30), (30): Xaa is C or S
VVMENSLQEVVKDYEDYYVMPLPELETPVX

SEQ ID NO: 51597 - protein, 35 aa, Artificial Sequence; identical to SEQ ID NO: 10705
  Cyclic GFR-binding peptide
  MOD_RES (1), (32), (33): Xaa is C or S

SEQ ID NO: 51598 - protein, 38 aa, Artificial Sequence; identical to SEQ ID NO: 10706
  Cyclic GFR-binding peptide
  MOD_RES (1), (3), (34), (35): Xaa is C or S

SEQ ID NO: 51599 - protein, 35 aa, Artificial Sequence; identical to SEQ ID NO: 10707
  Cyclic GFR-binding peptide
  MOD_RES (32), (33): Xaa is C or S

SEQ ID NO: 51600 - protein, 31 aa, Artificial Sequence
  Cyclic GFR-binding peptide
  MOD_RES (30), (31): Xaa is C or S
VVMNEYQKYIVNSSDDIFLVSIPSLKTPAXX

SEQ ID NO: 51601 - protein, 37 aa, Artificial Sequence; identical to SEQ ID NO: 10709
  Cyclic GFR-binding peptide
  MOD_RES (1), (33), (34): Xaa is C or S

SEQ ID NO: 51602 - protein, 27 aa, Artificial Sequence
  Cyclic GFR-binding peptide
RVVMNEYQKYIVNSSDDIFLVSIPSLQ

SEQ ID NO: 51603 - protein, 35 aa, Artificial Sequence; identical to SEQ ID NO: 10712
  Cyclic GFR-binding peptide
  MOD_RES (1), (33): Xaa is C or S

SEQ ID NO: 51604 - protein, 27 aa, Artificial Sequence
  Cyclic GFR-binding peptide
  MOD_RES (27), (27): Xaa is C or S
DNSLQEVVKENEDYYLMTLPELETPVX

SEQ ID NO: 51605 - protein, 30 aa, Artificial Sequence
  Cyclic GFR-binding peptide
  MOD_RES (1), (1): Xaa is C or S
XSEVVMDQYNKLVVNNASDLYLISIASLRT

SEQ ID NO: 51606 - protein, 29 aa, Artificial Sequence
  Cyclic GFR-binding peptide
  MOD_RES (1), (3): Xaa is C or S
XGXSRVVMNNSLQEIVNSSDDYYVVPLPE

SEQ ID NO: 51607 - protein, 40 aa, Artificial Sequence; identical to SEQ ID NO: 10715
  Cyclic GFR-binding peptide
  MOD_RES (1), (3), (35), (36): Xaa is C or S

SEQ ID NO: 51608 - protein, 38 aa, Artificial Sequence; identical to SEQ ID NO: 10716
  Cyclic GFR-binding peptide
  MOD_RES (32), (33): Xaa is C or S

SEQ ID NO: 51609 - protein, 32 aa, Artificial Sequence
  Cyclic GFR-binding peptide
  MOD_RES (1), (3): Xaa is C or S
XKXSKVIMEYQKYIKPTKGIIFLISIPSLDQS

SEQ ID NO: 51610 - protein, 26 aa, Artificial Sequence
  Cyclic GFR-binding peptide
DNSLQEVVNNASDYYLITLPELRTPV

SEQ ID NO: 51611 - protein, 30 aa, Artificial Sequence
  Cyclic GFR-binding peptide
  MOD_RES (2), (4): Xaa is C or S
RXGXGEVVMDNSLQEVVKENEDYYLMTLPE

SEQ ID NO: 51612 - protein, 26 aa, Artificial Sequence
  Cyclic GFR-binding peptide
NNSLQEIVNSSDDYYLVTLPELKTPA

SEQ ID NO: 51613 - protein, 31 aa, Artificial Sequence
  Cyclic GFR-binding peptide
  MOD_RES (26), (27): Xaa is C or S
EYQKYIVNSSDDIFLVSIPSLKTPAXXPKPV

SEQ ID NO: 51614 - protein, 30 aa, Artificial Sequence
  Cyclic GFR-binding peptide
SRVVMNNSLQEIVNSSDDYYLVTLPELKTP

SEQ ID NO: 51615 - protein, 31 aa, Artificial Sequence; identical to SEQ ID NO: 10722
  Cyclic GFR-binding peptide

SEQ ID NO: 51616 - protein, 37 aa, Artificial Sequence; identical to SEQ ID NO: 10721
  Cyclic GFR-binding peptide
  MOD_RES (1), (33), (34): Xaa is C or S

SEQ ID NO: 51617 - protein, 31 aa, Artificial Sequence
  Cyclic GFR-binding peptide
  MOD_RES (1), (3): Xaa is C or S
XGXGEVVMDNSLQEVVKENEDYYVMPLPELE

SEQ ID NO: 51618 - protein, 38 aa, Artificial Sequence; identical to SEQ ID NO: 10723
  Cyclic GFR-binding peptide
  MOD_RES (1), (33), (34): Xaa is C or S

SEQ ID NO: 51619 - protein, 42 aa, Artificial Sequence; identical to SEQ ID NO: 10724
  Cyclic GFR-binding peptide
  MOD_RES (2), (4), (36), (37): Xaa is C or S

SEQ ID NO: 51620 - protein, 35 aa, Artificial Sequence; identical to SEQ ID NO: 10725
  Cyclic GFR-binding peptide
  MOD_RES (31), (32): Xaa is C or S

SEQ ID NO: 51621 - protein, 33 aa, Artificial Sequence; identical to SEQ ID NO: 10726
  Cyclic GFR-binding peptide
  MOD_RES (31), (32): Xaa is C or S

SEQ ID NO: 51622 - protein, 36 aa, Artificial Sequence; identical to SEQ ID NO: 10727
  Cyclic GFR-binding peptide
  MOD_RES (2), (34), (35): Xaa is C or S

SEQ ID NO: 51623 - protein, 36 aa, Artificial Sequence
  Cyclic GFR-binding peptide
  MOD_RES (30), (31): Xaa is C or S
VVMNNSLQEIVNSSDDYYVVPLPELQTPAXXPKPVT

SEQ ID NO: 51624 - protein, 30 aa, Artificial Sequence
  Cyclic GFR-binding peptide
  MOD_RES (1), (1): Xaa is C or S
XSKVIMEYQKYIKPTKGIIFLISIPSLDQS

SEQ ID NO: 51625 - protein, 23 aa, Artificial Sequence
  Cyclic GFR-binding peptide
NSLQEVVKENEDYYLMTLPELET

SEQ ID NO: 51626 - protein, 32 aa, Artificial Sequence
  Cyclic GFR-binding peptide
  MOD_RES (30), (31): Xaa is C or S
VVMDNSLQEVVKENEDYYVMPLPELETPVXXA

SEQ ID NO: 51627 - protein, 36 aa, Artificial Sequence; identical to SEQ ID NO: 10731
  Cyclic GFR-binding peptide
  MOD_RES (2), (34), (35): Xaa is C or S

SEQ ID NO: 51628 - protein, 29 aa, Artificial Sequence
  Cyclic GFR-binding peptide
EVVMENSLQEVVKDYEDYYLMTLPELETP

SEQ ID NO: 51629 - protein, 36 aa, Artificial Sequence; identical to SEQ ID NO: 10733
  Cyclic GFR-binding peptide
  MOD_RES (32), (32): Xaa is C or S

SEQ ID NO: 51630 - protein, 40 aa, Artificial Sequence; identical to SEQ ID NO: 10734
  Cyclic GFR-binding peptide
  MOD_RES (2), (4), (35), (36): Xaa is C or S

SEQ ID NO: 51631 - protein, 22 aa, Artificial Sequence
  Cyclic GFR-binding peptide
NSLQEIVNSSDDYYLVTLPELK

SEQ ID NO: 51632 - protein, 30 aa, Artificial Sequence
  Cyclic GFR-binding peptide
  MOD_RES (26), (27): Xaa is C or S
QYNKLVVNNASDLYLISIASLRTPVXXTPP

SEQ ID NO: 51633 - protein, 40 aa, Artificial Sequence; identical to SEQ ID NO: 10735
  Cyclic GFR-binding peptide
  MOD_RES (2), (34), (35): Xaa is C or S

SEQ ID NO: 51634 - protein, 28 aa, Artificial Sequence
  Cyclic GFR-binding peptide
ARVVMNNSLQEIVNSSDDYYVVPLPELQ

SEQ ID NO: 51635 - protein, 29 aa, Artificial Sequence
  Cyclic GFR-binding peptide
  MOD_RES (27), (28): Xaa is C or S
MEYQKYIKPTKGIIFLISIPSLDQSVXXP

SEQ ID NO: 51636 - protein, 34 aa, Artificial Sequence; identical to SEQ ID NO: 10737
  Cyclic GFR-binding peptide
  MOD_RES (32), (33): Xaa is C or S

SEQ ID NO: 51637 - protein, 38 aa, Artificial Sequence; identical to SEQ ID NO: 10738
  Cyclic GFR-binding peptide
  MOD_RES (2), (34), (35): Xaa is C or S

SEQ ID NO: 51638 - protein, 33 aa, Artificial Sequence
  Cyclic GFR-binding peptide
  MOD_RES (27), (28): Xaa is C or S
NNSLQEIVNSSDDYYLVTLPELKTPAXXPKPVY

SEQ ID NO: 51639 - protein, 32 aa, Artificial Sequence
  Cyclic GFR-binding peptide
  MOD_RES (29), (29): Xaa is C or S
VMNNSLQEIVNSSDDYYLVTLPELKTPAXTPK

SEQ ID NO: 51640 - protein, 33 aa, Artificial Sequence
  Cyclic GFR-binding peptide
  MOD_RES (27), (28): Xaa is C or S
MEYQKYVKPKRGVIFLISIPSLAQPVXXPAASA

SEQ ID NO: 51641 - protein, 37 aa, Artificial Sequence; identical to SEQ ID NO: 10739
  Cyclic GFR-binding peptide
  MOD_RES (2), (4), (36), (37): Xaa is C or S

SEQ ID NO: 51642 - protein, 31 aa, Artificial Sequence; identical to SEQ ID NO: 10740
  Cyclic GFR-binding peptide

SEQ ID NO: 51643 - protein, 36 aa, Artificial Sequence
  Cyclic GFR-binding peptide
  MOD_RES (30), (31): Xaa is C or S
VVMNNSLQEIVNSSDDYYVVPLPELKTPAXXPKPVY

SEQ ID NO: 51644 - protein, 25 aa, Artificial Sequence
  Cyclic GFR-binding peptide
NEYQKYIVNSSDDIFLVSIPSLQTP

SEQ ID NO: 51645 - protein, 30 aa, Artificial Sequence
  Cyclic GFR-binding peptide
  MOD_RES (27), (28): Xaa is C or S
NNSLQEIVNSSDDYYVVPLPELQTPAXXPK

SEQ ID NO: 51646 - protein, 29 aa, Artificial Sequence
  Cyclic GFR-binding peptide
  MOD_RES (1), (1): Xaa is C or S
XSKVIMNSLQEIKPTKGIYYVIPLPELDQ

SEQ ID NO: 51647 - protein, 30 aa, Artificial Sequence
  Cyclic GFR-binding peptide
  MOD_RES (1), (3): Xaa is C or S
XGXARVVMNNSLQEIVNSSDDYYVVPLPEL

SEQ ID NO: 51648 - protein, 27 aa, Artificial Sequence
  Cyclic GFR-binding peptide
MDNSLQEVVKENEDYYVMPLPELETPV

SEQ ID NO: 51649 - protein, 34 aa, Artificial Sequence; identical to SEQ ID NO: 10744
  Cyclic GFR-binding peptide
  MOD_RES (31), (32): Xaa is C or S

SEQ ID NO: 51650 - protein, 37 aa, Artificial Sequence; identical to SEQ ID NO: 10745
  Cyclic GFR-binding peptide
  MOD_RES (32), (33): Xaa is C or S

SEQ ID NO: 51651 - protein, 27 aa, Artificial Sequence
  Cyclic GFR-binding peptide
MEEYQKYVVKDYEDIFLMSIPSLETPV

SEQ ID NO: 51652 - protein, 25 aa, Artificial Sequence
  Cyclic GFR-binding peptide
MNSLQEVKPTRGVYYVIPLPELDQP

SEQ ID NO: 51653 - protein, 31 aa, Artificial Sequence; identical to SEQ ID NO: 10746
  Cyclic GFR-binding peptide
  MOD_RES (31), (31): Xaa is C or S

SEQ ID NO: 51654 - protein, 26 aa, Artificial Sequence
  Cyclic GFR-binding peptide
KVIMNSLQEIKPTKGIYYVIPLPELD

SEQ ID NO: 51655 - protein, 36 aa, Artificial Sequence; identical to SEQ ID NO: 10748
  Cyclic GFR-binding peptide
  MOD_RES (1), (3), (35), (36): Xaa is C or S

SEQ ID NO: 51656 - protein, 28 aa, Artificial Sequence
  Cyclic GFR-binding peptide
  MOD_RES (1), (3): Xaa is C or S
XKXSRVIMEYQKYVKPKRGVIFLISIPS

SEQ ID NO: 51657 - protein, 26 aa, Artificial Sequence
  Cyclic GFR-binding peptide
MDNSLQEVVKENEDYYVMPLPELETP

SEQ ID NO: 51658 - protein, 33 aa, Artificial Sequence
  Cyclic GFR-binding peptide
  MOD_RES (29), (30): Xaa is C or S
VMNEYQKYIVNSSDDIFLVSIPSLKTPAXXPKP

SEQ ID NO: 51659 - protein, 34 aa, Artificial Sequence
  Cyclic GFR-binding peptide
  MOD_RES (28), (29): Xaa is C or S
IMEYQKYIKPTKGIIFLISIPSLDQSVXXPSASA

SEQ ID NO: 51660 - protein, 32 aa, Artificial Sequence
  Cyclic GFR-binding peptide
  MOD_RES (2), (2): Xaa is C or S
GXSEVVMDQYNKLVVNNASDLYLISIASLRTP

SEQ ID NO: 51661 - protein, 27 aa, Artificial Sequence
  Cyclic GFR-binding peptide
  MOD_RES (26), (27): Xaa is C or S
NSLQEVVNNASDYYVIPLPELRTPVXX

SEQ ID NO: 51662 - protein, 23 aa, Artificial Sequence
  Cyclic GFR-binding peptide
MDNSLQEVVKENEDYYVMPLPEL

SEQ ID NO: 51663 - protein, 32 aa, Artificial Sequence
  Cyclic GFR-binding peptide
  MOD_RES (2), (4): Xaa is C or S
SXKXSRVIMEYQKYVKPKRGVIFLISIPSLAQ

SEQ ID NO: 51664 - protein, 29 aa, Artificial Sequence
  Cyclic GFR-binding peptide
  MOD_RES (29), (29): Xaa is C or S
VVMNSLQEVKPTRGVYYVIPLPELDQPVX

SEQ ID NO: 51665 - protein, 34 aa, Artificial Sequence; identical to SEQ ID NO: 10750
  Cyclic GFR-binding peptide
  MOD_RES (1), (32), (33): Xaa is C or S

SEQ ID NO: 51666 - protein, 37 aa, Artificial Sequence; identical to SEQ ID NO: 10752
  Cyclic GFR-binding peptide
  MOD_RES (31), (32): Xaa is C or S

SEQ ID NO: 51667 - protein, 32 aa, Artificial Sequence
  Cyclic GFR-binding peptide
  MOD_RES (1), (3): Xaa is C or S
XGXGEVVMEEYQKYVVKDYEDIFLMSIPSLET

SEQ ID NO: 51668 - protein, 22 aa, Artificial Sequence
  Cyclic GFR-binding peptide
MENSLQEVVKDYEDYYVMPLPE

SEQ ID NO: 51669 - protein, 37 aa, Artificial Sequence; identical to SEQ ID NO: 10757
  Cyclic GFR-binding peptide
  MOD_RES (2), (4), (36), (37): Xaa is C or S

SEQ ID NO: 51670 - protein, 29 aa, Artificial Sequence
  Cyclic GFR-binding peptide
  MOD_RES (2), (2): Xaa is C or S
GXGEVVMDEYQKYVVKENEDIFLMSIPSL

SEQ ID NO: 51671 - protein, 27 aa, Artificial Sequence
  Cyclic GFR-binding peptide
  MOD_RES (27), (27): Xaa is C or S
DNSLQEVVKENEDYYVMPLPELETPVX

SEQ ID NO: 51672 - protein, 36 aa, Artificial Sequence; identical to SEQ ID NO: 10758
  Cyclic GFR-binding peptide
  MOD_RES (1), (3), (35), (36): Xaa is C or S

SEQ ID NO: 51673 - protein, 26 aa, Artificial Sequence
  Cyclic GFR-binding peptide
GEVVMDNSLQEVVKENEDYYLMTLPE

SEQ ID NO: 51674 - protein, 38 aa, Artificial Sequence; identical to SEQ ID NO: 10760
  Cyclic GFR-binding peptide
  MOD_RES (2), (33), (34): Xaa is C or S

SEQ ID NO: 51675 - protein, 38 aa, Artificial Sequence; identical to SEQ ID NO: 10761
  Cyclic GFR-binding peptide
  MOD_RES (1), (33), (34): Xaa is C or S

SEQ ID NO: 51676 - protein, 34 aa, Artificial Sequence; identical to SEQ ID NO: 10763
  Cyclic GFR-binding peptide
  MOD_RES (2), (34): Xaa is C or S

SEQ ID NO: 51677 - protein, 37 aa, Artificial Sequence; identical to SEQ ID NO: 10764
  Cyclic GFR-binding peptide
  MOD_RES (1), (32), (33): Xaa is C or S

SEQ ID NO: 51678 - protein, 29 aa, Artificial Sequence
  Cyclic GFR-binding peptide
VVMENSLQEVVKDYEDYYVMPLPELETPV

SEQ ID NO: 51679 - protein, 34 aa, Artificial Sequence; identical to SEQ ID NO: 10767
  Cyclic GFR-binding peptide
  MOD_RES (31), (32): Xaa is C or S

SEQ ID NO: 51680 - protein, 28 aa, Artificial Sequence
  Cyclic GFR-binding peptide
EVVMDNSLQEVVNNASDYYVIPLPELRT

SEQ ID NO: 51681 - protein, 29 aa, Artificial Sequence
  Cyclic GFR-binding peptide
  MOD_RES (29), (29): Xaa is C or S
VIMNSLQEIKPTKGIYYVIPLPELDQSVX

SEQ ID NO: 51682 - protein, 39 aa, Artificial Sequence; identical to SEQ ID NO: 10774
  Cyclic GFR-binding peptide
  MOD_RES (2), (34), (35): Xaa is C or S

SEQ ID NO: 51683 - protein, 31 aa, Artificial Sequence
  Cyclic GFR-binding peptide
  MOD_RES (1), (1): Xaa is C or S
XGEVVMENSLQEVVKDYEDYYLMTLPELETP

SEQ ID NO: 51684 - protein, 21 aa, Artificial Sequence
  Cyclic GFR-binding peptide
DEYQKYVVKENEDIFLMSIPS

SEQ ID NO: 51685 - protein, 38 aa, Artificial Sequence; identical to SEQ ID NO: 10776
  Cyclic GFR-binding peptide
  MOD_RES (2), (34), (35): Xaa is C or S

SEQ ID NO: 51686 - protein, 31 aa, Artificial Sequence
  Cyclic GFR-binding peptide
  MOD_RES (27), (28): Xaa is C or S
NNSLQEIVNSSDDYYLVTLPELKTPAXXPKP

SEQ ID NO: 51687 - protein, 30 aa, Artificial Sequence
  Cyclic GFR-binding peptide
  MOD_RES (1), (3): Xaa is C or S
XGXGEVVMDEYQKYVVKENEDIFLMSIPSL

SEQ ID NO: 51688 - protein, 30 aa, Artificial Sequence
  Cyclic GFR-binding peptide
  MOD_RES (2), (4): Xaa is C or S
SXKXSKVVMNSLQEVKPTRGVYYVIPLPEL

SEQ ID NO: 51689 - protein, 34 aa, Artificial Sequence; identical to SEQ ID NO: 10779
  Cyclic GFR-binding peptide
  MOD_RES (2), (34): Xaa is C or S

SEQ ID NO: 51690 - protein, 35 aa, Artificial Sequence; identical to SEQ ID NO: 10782
  Cyclic GFR-binding peptide
  MOD_RES (32), (33): Xaa is C or S

SEQ ID NO: 51691 - protein, 32 aa, Artificial Sequence
  Cyclic GFR-binding peptide
  MOD_RES (27), (28): Xaa is C or S
NNSLQEIVNSSDDYYLVTLPELQTPAXXPKPV

SEQ ID NO: 51692 - protein, 32 aa, Artificial Sequence
  Cyclic GFR-binding peptide
  MOD_RES (30), (31): Xaa is C or S
VVMDEYQKYVVKENEDIFLMSIPSLETPVXXA

SEQ ID NO: 51693 - protein, 35 aa, Artificial Sequence
  Cyclic GFR-binding peptide
  MOD_RES (30), (31): Xaa is C or S
KVVMNSLQEVKPTRGVYYVIPLPELDQPVXXPSAS

SEQ ID NO: 51694 - protein, 34 aa, Artificial Sequence; identical to SEQ ID NO: 10787
  Cyclic GFR-binding peptide
  MOD_RES (1), (33), (34): Xaa is C or S

SEQ ID NO: 51695 - protein, 25 aa, Artificial Sequence
  Cyclic GFR-binding peptide
MDEYQKYVVKENEDIFLMSIPSLET

SEQ ID NO: 51696 - protein, 24 aa, Artificial Sequence
  Cyclic GFR-binding peptide
NNSLQEIVNSSDDYYVVPLPELQT

SEQ ID NO: 51697 - protein, 31 aa, Artificial Sequence
  Cyclic GFR-binding peptide
  MOD_RES (26), (27): Xaa is C or S
EYQKYVKPKRGVIFLISIPSLAQPVXXPAAS

SEQ ID NO: 51698 - protein, 41 aa, Artificial Sequence; identical to SEQ ID NO: 10791
  Cyclic GFR-binding peptide
  MOD_RES (1), (3), (35), (36): Xaa is C or S

SEQ ID NO: 51699 - protein, 30 aa, Artificial Sequence
  Cyclic GFR-binding peptide
  MOD_RES (1), (3): Xaa is C or S
XKXSRVIMNSLQEVKPKRGVYYLITLPELA

SEQ ID NO: 51700 - protein, 32 aa, Artificial Sequence; identical to SEQ ID NO: 10792
  Cyclic GFR-binding peptide
  MOD_RES (31), (32): Xaa is C or S

SEQ ID NO: 51701 - protein, 29 aa, Artificial Sequence
  Cyclic GFR-binding peptide
  MOD_RES (2), (2): Xaa is C or S
KXSKVIMNSLQEIKPTKGIYYVIPLPELD

SEQ ID NO: 51702 - protein, 38 aa, Artificial Sequence; identical to SEQ ID NO: 10793
  Cyclic GFR-binding peptide
  MOD_RES (1), (33): Xaa is C or S

SEQ ID NO: 51703 - protein, 35 aa, Artificial Sequence; identical to SEQ ID NO: 10794
  Cyclic GFR-binding peptide
  MOD_RES (1), (33), (34): Xaa is C or S

SEQ ID NO: 51704 - protein, 20 aa, Artificial Sequence
  Cyclic GFR-binding peptide
NSLQEVVKDYEDYYLMTLPE

SEQ ID NO: 51705 - protein, 36 aa, Artificial Sequence; identical to SEQ ID NO: 10795
  Cyclic GFR-binding peptide
  MOD_RES (31), (32): Xaa is C or S

SEQ ID NO: 51706 - protein, 31 aa, Artificial Sequence
  Cyclic GFR-binding peptide
  MOD_RES (2), (2): Xaa is C or S
GXGEVVMDNSLQEVVKENEDYYVMPLPELET

SEQ ID NO: 51707 - protein, 30 aa, Artificial Sequence
  Cyclic GFR-binding peptide
  MOD_RES (29), (29): Xaa is C or S
VMNEYQKYIVNSSDDIFLVSIPSLKTPAXT

SEQ ID NO: 51708 - protein, 27 aa, Artificial Sequence
  Cyclic GFR-binding peptide
VMNNSLQEIVNSSDDYYVVPLPELKTP

SEQ ID NO: 51709 - protein, 28 aa, Artificial Sequence
  Cyclic GFR-binding peptide
  MOD_RES (2), (2): Xaa is C or S
KXSKVVMNSLQEVKPTRGVYYVIPLPEL

SEQ ID NO: 51710 - protein, 38 aa, Artificial Sequence; identical to SEQ ID NO: 10797
  Cyclic GFR-binding peptide
  MOD_RES (2), (4), (36), (37): Xaa is C or S

SEQ ID NO: 51711 - protein, 21 aa, Artificial Sequence
  Cyclic GFR-binding peptide
NNSLQEIVNSSDDYYVVPLPE

SEQ ID NO: 51712 - protein, 36 aa, Artificial Sequence; identical to SEQ ID NO: 10798
  Cyclic GFR-binding peptide
  MOD_RES (1), (33), (34): Xaa is C or S

SEQ ID NO: 51713 - protein, 30 aa, Artificial Sequence; identical to SEQ ID NO: 10799
  Cyclic GFR-binding peptide

SEQ ID NO: 51714 - protein, 32 aa, Artificial Sequence
  Cyclic GFR-binding peptide
  MOD_RES (29), (30): Xaa is C or S
VVMEYQKYVKPTRGVIFLISIPSLDQPVXXPS

SEQ ID NO: 51715 - protein, 26 aa, Artificial Sequence
  Cyclic GFR-binding peptide
  MOD_RES (26), (26): Xaa is C or S
NSLQEIVNSSDDYYLVTLPELKTPAX

SEQ ID NO: 51716 - protein, 34 aa, Artificial Sequence
  Cyclic GFR-binding peptide
  MOD_RES (2), (4): Xaa is C or S
RXGXGEVVMDEYQKYVVKENEDIFLMSIPSLETP

SEQ ID NO: 51717 - protein, 37 aa, Artificial Sequence; identical to SEQ ID NO: 10804
  Cyclic GFR-binding peptide
  MOD_RES (2), (4), (36), (37): Xaa is C or S

SEQ ID NO: 51718 - protein, 36 aa, Artificial Sequence
  Cyclic GFR-binding peptide
  MOD_RES (30), (31): Xaa is C or S
VVMDNSLQEVVKENEDYYLMTLPELETPVXXAKPIK

SEQ ID NO: 51719 - protein, 27 aa, Artificial Sequence
  Cyclic GFR-binding peptide
VIMEYQKYVKPKRGVIFLISIPSLAQP

SEQ ID NO: 51720 - protein, 33 aa, Artificial Sequence; identical to SEQ ID NO: 10805
  Cyclic GFR-binding peptide
  MOD_RES (1), (33): Xaa is C or S

SEQ ID NO: 51721 - protein, 36 aa, Artificial Sequence; identical to SEQ ID NO: 10806
  Cyclic GFR-binding peptide
  MOD_RES (1), (3), (35), (36): Xaa is C or S

SEQ ID NO: 51722 - protein, 38 aa, Artificial Sequence; identical to SEQ ID NO: 10807
  Cyclic GFR-binding peptide
  MOD_RES (1), (32), (33): Xaa is C or S

SEQ ID NO: 51723 - protein, 33 aa, Artificial Sequence; identical to SEQ ID NO: 10808
  Cyclic GFR-binding peptide
  MOD_RES (1), (3): Xaa is C or S

SEQ ID NO: 51724 - protein, 24 aa, Artificial Sequence
  Cyclic GFR-binding peptide
MDNSLQEVVKENEDYYLMTLPELE

SEQ ID NO: 51725 - protein, 30 aa, Artificial Sequence
  Cyclic GFR-binding peptide
  MOD_RES (1), (3): Xaa is C or S
XGXGEVVMDNSLQEVVKENEDYYLMTLPEL

SEQ ID NO: 51726 - protein, 31 aa, Artificial Sequence; identical to SEQ ID NO: 10809
  Cyclic GFR-binding peptide

SEQ ID NO: 51727 - protein, 30 aa, Artificial Sequence
  Cyclic GFR-binding peptide
  MOD_RES (27), (27): Xaa is C or S
NNSLQEIVNSSDDYYLVTLPELKTPAXTPK

SEQ ID NO: 51728 - protein, 25 aa, Artificial Sequence
  Cyclic GFR-binding peptide
MNEYQKYIVNSSDDIFLVSIPSLKT

SEQ ID NO: 51729 - protein, 37 aa, Artificial Sequence; identical to SEQ ID NO: 10811
  Cyclic GFR-binding peptide
  MOD_RES (2), (4), (35), (36): Xaa is C or S

SEQ ID NO: 51730 - protein, 35 aa, Artificial Sequence; identical to SEQ ID NO: 10814
  Cyclic GFR-binding peptide
  MOD_RES (31), (32): Xaa is C or S

SEQ ID NO: 51731 - protein, 40 aa, Artificial Sequence; identical to SEQ ID NO: 10815
  Cyclic GFR-binding peptide
  MOD_RES (2), (4), (36), (37): Xaa is C or S

SEQ ID NO: 51732 - protein, 29 aa, Artificial Sequence
  Cyclic GFR-binding peptide
  MOD_RES (1), (3): Xaa is C or S
XGXSEVVMDRYKKLVVNNASDFYLISIAN

SEQ ID NO: 51733 - protein, 26 aa, Artificial Sequence
  Cyclic GFR-binding peptide
GEVVMDNSLQEVVKENEDYYVMPLPE

SEQ ID NO: 51734 - protein, 30 aa, Artificial Sequence
  Cyclic GFR-binding peptide
  MOD_RES (28), (28): Xaa is C or S
MNNSLQEIVNSSDDYYLVTLPELKTPAXTP

SEQ ID NO: 51735 - protein, 29 aa, Artificial Sequence
  Cyclic GFR-binding peptide
  MOD_RES (26), (27): Xaa is C or S
NSLQEVVKENEDYYVMPLPELETPVXXAK

SEQ ID NO: 51736 - protein, 37 aa, Artificial Sequence; identical to SEQ ID NO: 10819
  Cyclic GFR-binding peptide
  MOD_RES (2), (33), (34): Xaa is C or S

SEQ ID NO: 51737 - protein, 31 aa, Artificial Sequence; identical to SEQ ID NO: 10820
  Cyclic GFR-binding peptide
  MOD_RES (31), (31): Xaa is C or S

SEQ ID NO: 51738 - protein, 35 aa, Artificial Sequence; identical to SEQ ID NO: 10821
  Cyclic GFR-binding peptide
  MOD_RES (2), (4): Xaa is C or S

SEQ ID NO: 51739 - protein, 34 aa, Artificial Sequence; identical to SEQ ID NO: 10822
  Cyclic GFR-binding peptide
  MOD_RES (32), (33): Xaa is C or S

SEQ ID NO: 51740 - protein, 40 aa, Artificial Sequence; identical to SEQ ID NO: 10823
  Cyclic GFR-binding peptide
  MOD_RES (1), (3), (35), (36): Xaa is C or S

SEQ ID NO: 51741 - protein, 40 aa, Artificial Sequence; identical to SEQ ID NO: 10825
  Cyclic GFR-binding peptide
  MOD_RES (1), (3), (35), (36): Xaa is C or S

SEQ ID NO: 51742 - protein, 34 aa, Artificial Sequence; identical to SEQ ID NO: 10826
  Cyclic GFR-binding peptide
  MOD_RES (2), (33), (34): Xaa is C or S

SEQ ID NO: 51743 - protein, 29 aa, Artificial Sequence
  Cyclic GFR-binding peptide
  MOD_RES (1), (3): Xaa is C or S
XGXSEVVMDNSLQEVVNNASDYYLITLPE

SEQ ID NO: 51744 - protein, 23 aa, Artificial Sequence
  Cyclic GFR-binding peptide
VIMEYQKYVKPKRGVIFLISIPS

SEQ ID NO: 51745 - protein, 37 aa, Artificial Sequence; identical to SEQ ID NO: 10832
  Cyclic GFR-binding peptide
  MOD_RES (32), (33): Xaa is C or S

SEQ ID NO: 51746 - protein, 34 aa, Artificial Sequence; identical to SEQ ID NO: 10833
  Cyclic GFR-binding peptide
  MOD_RES (1), (33), (34): Xaa is C or S

SEQ ID NO: 51747 - protein, 41 aa, Artificial Sequence; identical to SEQ ID NO: 10834
  Cyclic GFR-binding peptide
  MOD_RES (2), (4), (36): Xaa is C or S

SEQ ID NO: 51748 - protein, 39 aa, Artificial Sequence; identical to SEQ ID NO: 10835
  Cyclic GFR-binding peptide
  MOD_RES (2), (34), (35): Xaa is C or S

SEQ ID NO: 51749 - protein, 31 aa, Artificial Sequence
  Cyclic GFR-binding peptide
  MOD_RES (28), (29): Xaa is C or S
MDNSLQEVVNNASDYYVIPLPELRTPVXXTP

SEQ ID NO: 51750 - protein, 39 aa, Artificial Sequence; identical to SEQ ID NO: 10837
  Cyclic GFR-binding peptide
  MOD_RES (2), (34), (35): Xaa is C or S

SEQ ID NO: 51751 - protein, 38 aa, Artificial Sequence; identical to SEQ ID NO: 10838
  Cyclic GFR-binding peptide
  MOD_RES (2), (4), (36), (37): Xaa is C or S

SEQ ID NO: 51752 - protein, 36 aa, Artificial Sequence
  Cyclic GFR-binding peptide
  MOD_RES (30), (31): Xaa is C or S
VVMDQYNKLVVNNASDLYLISIASLRTPVXXTPPTS

SEQ ID NO: 51753 - protein, 30 aa, Artificial Sequence
  Cyclic GFR-binding peptide
  MOD_RES (28), (29): Xaa is C or S
MNNSLQEIVNSSDDYYLVTLPELKTPAXXP

SEQ ID NO: 51754 - protein, 36 aa, Artificial Sequence; identical to SEQ ID NO: 10841
  Cyclic GFR-binding peptide
  MOD_RES (31), (32): Xaa is C or S

SEQ ID NO: 51755 - protein, 28 aa, Artificial Sequence
  Cyclic GFR-binding peptide
GEVVMDEYQKYVVKENEDIFLMSIPSLE

SEQ ID NO: 51756 - protein, 36 aa, Artificial Sequence; identical to SEQ ID NO: 10843
  Cyclic GFR-binding peptide
  MOD_RES (1), (3), (35), (36): Xaa is C or S

SEQ ID NO: 51757 - protein, 30 aa, Artificial Sequence
  Cyclic GFR-binding peptide
  MOD_RES (29), (30): Xaa is C or S
VMNEYQKYIVNSSDDIFLVSIPSLKTPAXX

SEQ ID NO: 51758 - protein, 33 aa, Artificial Sequence
  Cyclic GFR-binding peptide
  MOD_RES (2), (4): Xaa is C or S
HXGXARVVMNNSLQEIVNSSDDYYLVTLPELQT

SEQ ID NO: 51759 - protein, 35 aa, Artificial Sequence; identical to SEQ ID NO: 10847
  Cyclic GFR-binding peptide
  MOD_RES (2), (4): Xaa is C or S

SEQ ID NO: 51760 - protein, 33 aa, Artificial Sequence
  Cyclic GFR-binding peptide
  MOD_RES (30), (31): Xaa is C or S
VVMDNSLQEVVNNASDYYLITLPELRTPVXXTP

SEQ ID NO: 51761 - protein, 34 aa, Artificial Sequence
  Cyclic GFR-binding peptide
  MOD_RES (29), (30): Xaa is C or S
VMEEYQKYVVKDYEDIFLMSIPSLETPVXXAKPI

SEQ ID NO: 51762 - protein, 25 aa, Artificial Sequence
  Cyclic GFR-binding peptide
SKVVMEYQKYVKPTRGVIFLISIPS

SEQ ID NO: 51763 - protein, 32 aa, Artificial Sequence; identical to SEQ ID NO: 10850
  Cyclic GFR-binding peptide
  MOD_RES (1), (1): Xaa is C or S

SEQ ID NO: 51764 - protein, 28 aa, Artificial Sequence
  Cyclic GFR-binding peptide
  MOD_RES (2), (2): Xaa is C or S
GXSRVVMNEYQKYIVNSSDDIFLVSIPS

SEQ ID NO: 51765 - protein, 28 aa, Artificial Sequence
  Cyclic GFR-binding peptide
  MOD_RES (1), (1): Xaa is C or S
XARVVMNEYQKYIVNSSDDIFLVSIPSL

SEQ ID NO: 51766 - protein, 24 aa, Artificial Sequence
  Cyclic GFR-binding peptide
DRYKKLVVNNASDFYLISIANLRT

SEQ ID NO: 51767 - protein, 36 aa, Artificial Sequence
  Cyclic GFR-binding peptide
  MOD_RES (30), (31): Xaa is C or S
VVMDNSLQEVVNNASDYYLITLPELRTPVXXTPPTS

SEQ ID NO: 51768 - protein, 24 aa, Artificial Sequence
  Cyclic GFR-binding peptide
VVMDNSLQEVVKENEDYYVMPLPE

SEQ ID NO: 51769 - protein, 21 aa, Artificial Sequence
  Cyclic GFR-binding peptide
NSLQEVVKDYEDYYLMTLPEL

SEQ ID NO: 51770 - protein, 34 aa, Artificial Sequence
  Cyclic GFR-binding peptide
  MOD_RES (29), (30): Xaa is C or S
VMDEYQKYVVKENEDIFLMSIPSLETPVXXAKPI

SEQ ID NO: 51771 - protein, 25 aa, Artificial Sequence
  Cyclic GFR-binding peptide
ENSLQEVVKDYEDYYVMPLPELETP

SEQ ID NO: 51772 - protein, 33 aa, Artificial Sequence
  Cyclic GFR-binding peptide
  MOD_RES (28), (29): Xaa is C or S
VMNSLQEVKPTRGVYYVIPLPELDQPVXXPSAS

SEQ ID NO: 51773 - protein, 37 aa, Artificial Sequence; identical to SEQ ID NO: 10853
  Cyclic GFR-binding peptide
  MOD_RES (31), (32): Xaa is C or S

SEQ ID NO: 51774 - protein, 35 aa, Artificial Sequence
  Cyclic GFR-binding peptide
  MOD_RES (29), (30): Xaa is C or S
VMDNSLQEVVKENEDYYLMTLPELETPVXXAKPIK

SEQ ID NO: 51775 - protein, 21 aa, Artificial Sequence
  Cyclic GFR-binding peptide
NNSLQEIVNSSDDYYLVTLPE

SEQ ID NO: 51776 - protein, 29 aa, Artificial Sequence
  Cyclic GFR-binding peptide
  MOD_RES (27), (28): Xaa is C or S
DNSLQEVVKENEDYYVMPLPELETPVXXA

SEQ ID NO: 51777 - protein, 31 aa, Artificial Sequence
  Cyclic GFR-binding peptide
  MOD_RES (27), (28): Xaa is C or S
DQYNKLVVNNASDLYLISIASLRTPVXXTPP

SEQ ID NO: 51778 - protein, 41 aa, Artificial Sequence; identical to SEQ ID NO: 10857
  Cyclic GFR-binding peptide
  MOD_RES (1), (3), (35), (36): Xaa is C or S

SEQ ID NO: 51779 - protein, 31 aa, Artificial Sequence
  Cyclic GFR-binding peptide
  MOD_RES (29), (30): Xaa is C or S
VIMEYQKYIKPTKGIIFLISIPSLDQSVXXP

SEQ ID NO: 51780 - protein, 40 aa, Artificial Sequence; identical to SEQ ID NO: 10859
  Cyclic GFR-binding peptide
  MOD_RES (1), (3), (35), (36): Xaa is C or S

SEQ ID NO: 51781 - protein, 23 aa, Artificial Sequence
  Cyclic GFR-binding peptide
DNSLQEVVNNASDYYVIPLPELR

SEQ ID NO: 51782 - protein, 39 aa, Artificial Sequence; identical to SEQ ID NO: 10860
  Cyclic GFR-binding peptide
  MOD_RES (2), (4), (36), (37): Xaa is C or S

SEQ ID NO: 51783 - protein, 30 aa, Artificial Sequence
  Cyclic GFR-binding peptide
  MOD_RES (28), (29): Xaa is C or S
MNEYQKYIVNSSDDIFLVSIPSLKTPAXXP

SEQ ID NO: 51784 - protein, 31 aa, Artificial Sequence
  Cyclic GFR-binding peptide
  MOD_RES (30), (31): Xaa is C or S
KVIMNSLQEIKPTKGIYYVIPLPELDQSVXX

SEQ ID NO: 51785 - protein, 32 aa, Artificial Sequence
  Cyclic GFR-binding peptide
  MOD_RES (1), (3): Xaa is C or S
XGXGEVVMDEYQKYVVKENEDIFLMSIPSLET

SEQ ID NO: 51786 - protein, 33 aa, Artificial Sequence; identical to SEQ ID NO: 10861
  Cyclic GFR-binding peptide
  MOD_RES (31), (32): Xaa is C or S

SEQ ID NO: 51787 - protein, 24 aa, Artificial Sequence
  Cyclic GFR-binding peptide
VMNSLQEVKPTRGVYYVIPLPELD

SEQ ID NO: 51788 - protein, 32 aa, Artificial Sequence
  Cyclic GFR-binding peptide
  MOD_RES (2), (4): Xaa is C or S
HXGXSRVVMNNSLQEIVNSSDDYYVVPLPELK

SEQ ID NO: 51789 - protein, 27 aa, Artificial Sequence
  Cyclic GFR-binding peptide
RVVMNNSLQEIVNSSDDYYVVPLPELK

SEQ ID NO: 51790 - protein, 30 aa, Artificial Sequence
  Cyclic GFR-binding peptide
  MOD_RES (26), (26): Xaa is C or S
NSLQEIVNSSDDYYVVPLPELKTPAXTPKT

SEQ ID NO: 51791 - protein, 34 aa, Artificial Sequence
  Cyclic GFR-binding peptide
  MOD_RES (30), (31): Xaa is C or S
VVMDNSLQEVVNNASDYYVIPLPELRTPVXXTPP

SEQ ID NO: 51792 - protein, 24 aa, Artificial Sequence
  Cyclic GFR-binding peptide
MNSLQEVKPTRGVYYVIPLPELDQ

SEQ ID NO: 51793 - protein, 31 aa, Artificial Sequence
  Cyclic GFR-binding peptide
  MOD_RES (29), (29): Xaa is C or S
VMNEYQKYIVNSSDDIFLVSIPSLKTPAXTP

SEQ ID NO: 51794 - protein, 40 aa, Artificial Sequence; identical to SEQ ID NO: 10862
  Cyclic GFR-binding peptide
  MOD_RES (1), (3), (35), (36): Xaa is C or S

SEQ ID NO: 51795 - protein, 39 aa, Artificial Sequence; identical to SEQ ID NO: 10863
  Cyclic GFR-binding peptide
  MOD_RES (1), (33), (34): Xaa is C or S

SEQ ID NO: 51796 - protein, 31 aa, Artificial Sequence
  Cyclic GFR-binding peptide
  MOD_RES (30), (31): Xaa is C or S
VVMNNSLQEIVNSSDDYYVVPLPELQTPAXX

SEQ ID NO: 51797 - protein, 39 aa, Artificial Sequence; identical to SEQ ID NO: 10864
  Cyclic GFR-binding peptide
  MOD_RES (2), (34), (35): Xaa is C or S

SEQ ID NO: 51798 - protein, 28 aa, Artificial Sequence
  Cyclic GFR-binding peptide
GEVVMDNSLQEVVKENEDYYLMTLPELE

SEQ ID NO: 51799 - protein, 36 aa, Artificial Sequence; identical to SEQ ID NO: 10865
  Cyclic GFR-binding peptide
  MOD_RES (2), (4), (35), (36): Xaa is C or S

SEQ ID NO: 51800 - protein, 36 aa, Artificial Sequence; identical to SEQ ID NO: 10866
  Cyclic GFR-binding peptide
  MOD_RES (2), (4), (36): Xaa is C or S

SEQ ID NO: 51801 - protein, 36 aa, Artificial Sequence; identical to SEQ ID NO: 10868
  Cyclic GFR-binding peptide
  MOD_RES (2), (4), (35), (36): Xaa is C or S

SEQ ID NO: 51802 - protein, 30 aa, Artificial Sequence
  Cyclic GFR-binding peptide
  MOD_RES (2), (2): Xaa is C or S
GXSEVVMDRYKKLVVNNASDFYLISIANLR

SEQ ID NO: 51803 - protein, 32 aa, Artificial Sequence
  Cyclic GFR-binding peptide
  MOD_RES (30), (31): Xaa is C or S
KVIMNSLQEIKPTKGIYYVIPLPELDQSVXXP

SEQ ID NO: 51804 - protein, 38 aa, Artificial Sequence; identical to SEQ ID NO: 10869
  Cyclic GFR-binding peptide
  MOD_RES (1), (3), (35), (36): Xaa is C or S

SEQ ID NO: 51805 - protein, 30 aa, Artificial Sequence
  Cyclic GFR-binding peptide
GEVVMDNSLQEVVKENEDYYLMTLPELETP

SEQ ID NO: 51806 - protein, 39 aa, Artificial Sequence; identical to SEQ ID NO: 10871
  Cyclic GFR-binding peptide
  MOD_RES (1), (3), (35), (36): Xaa is C or S

SEQ ID NO: 51807 - protein, 35 aa, Artificial Sequence
  Cyclic GFR-binding peptide
  MOD_RES (29), (30): Xaa is C or S
VMNEYQKYIVNSSDDIFLVSIPSLKTPAXXPKPVY

SEQ ID NO: 51808 - protein, 23 aa, Artificial Sequence
  Cyclic GFR-binding peptide
MDRYKKLVVNNASDFYLISIANL

SEQ ID NO: 51809 - protein, 35 aa, Artificial Sequence
  Cyclic GFR-binding peptide
  MOD_RES (30), (31): Xaa is C or S
KVIMEYQKYIKPTKGIIFLISIPSLDQSVXXPSAS

SEQ ID NO: 51810 - protein, 33 aa, Artificial Sequence; identical to SEQ ID NO: 10874
  Cyclic GFR-binding peptide
  MOD_RES (2), (2): Xaa is C or S

SEQ ID NO: 51811 - protein, 25 aa, Artificial Sequence
  Cyclic GFR-binding peptide
NSLQEIVNSSDDYYVVPLPELQTPA

SEQ ID NO: 51812 - protein, 28 aa, Artificial Sequence
  Cyclic GFR-binding peptide
VIMEYQKYVKPKRGVIFLISIPSLAQPV

SEQ ID NO: 51813 - protein, 32 aa, Artificial Sequence
  Cyclic GFR-binding peptide
  MOD_RES (2), (2): Xaa is C or S
GXGEVVMENSLQEVVKDYEDYYLMTLPELETP

SEQ ID NO: 51814 - protein, 33 aa, Artificial Sequence; identical to SEQ ID NO: 10879
  Cyclic GFR-binding peptide
  MOD_RES (1), (32), (33): Xaa is C or S

SEQ ID NO: 51815 - protein, 33 aa, Artificial Sequence; identical to SEQ ID NO: 10878
  Cyclic GFR-binding peptide
  MOD_RES (32), (33): Xaa is C or S

SEQ ID NO: 51816 - protein, 27 aa, Artificial Sequence
  Cyclic GFR-binding peptide
  MOD_RES (2), (2): Xaa is C or S
KXSKVVMNSLQEVKPTRGVYYVIPLPE

SEQ ID NO: 51817 - protein, 35 aa, Artificial Sequence; identical to SEQ ID NO: 10880
  Cyclic GFR-binding peptide
  MOD_RES (1), (32), (33): Xaa is C or S

SEQ ID NO: 51818 - protein, 41 aa, Artificial Sequence; identical to SEQ ID NO: 10881
  Cyclic GFR-binding peptide
  MOD_RES (2), (4), (36), (37): Xaa is C or S

SEQ ID NO: 51819 - protein, 32 aa, Artificial Sequence
  Cyclic GFR-binding peptide
  MOD_RES (1), (3): Xaa is C or S
XGXGEVVMENSLQEVVKDYEDYYLMTLPELET

SEQ ID NO: 51820 - protein, 32 aa, Artificial Sequence
  Cyclic GFR-binding peptide
  MOD_RES (1), (3): Xaa is C or S
XKXSKVVMEYQKYVKPTRGVIFLISIPSLDQP

SEQ ID NO: 51821 - protein, 33 aa, Artificial Sequence
  Cyclic GFR-binding peptide
  MOD_RES (2), (4): Xaa is C or S
RXGXGEVVMENSLQEVVKDYEDYYLMTLPELET

SEQ ID NO: 51822 - protein, 25 aa, Artificial Sequence
  Cyclic GFR-binding peptide
MDRYKKLVVNNASDFYLISIANLRT

SEQ ID NO: 51823 - protein, 31 aa, Artificial Sequence
  Cyclic GFR-binding peptide
  MOD_RES (2), (2): Xaa is C or S
KXSKVVMNSLQEVKPTRGVYYVIPLPELDQP

SEQ ID NO: 51824 - protein, 32 aa, Artificial Sequence; identical to SEQ ID NO: 10884
  Cyclic GFR-binding peptide
  MOD_RES (31), (32): Xaa is C or S

SEQ ID NO: 51825 - protein, 29 aa, Artificial Sequence
  Cyclic GFR-binding peptide
  MOD_RES (1), (3): Xaa is C or S
XKXSRVIMEYQKYVKPKRGVIFLISIPSL

SEQ ID NO: 51826 - protein, 29 aa, Artificial Sequence
  Cyclic GFR-binding peptide
  MOD_RES (26), (26): Xaa is C or S
NSLQEIVNSSDDYYLVTLPELKTPAXTPK

SEQ ID NO: 51827 - protein, 40 aa, Artificial Sequence; identical to SEQ ID NO: 10886
  Cyclic GFR-binding peptide
  MOD_RES (1), (3), (35), (36): Xaa is C or S

SEQ ID NO: 51828 - protein, 22 aa, Artificial Sequence
  Cyclic GFR-binding peptide
MNNSLQEIVNSSDDYYLVTLPE

SEQ ID NO: 51829 - protein, 33 aa, Artificial Sequence; identical to SEQ ID NO: 10888
  Cyclic GFR-binding peptide
  MOD_RES (31), (32): Xaa is C or S

SEQ ID NO: 51830 - protein, 39 aa, Artificial Sequence; identical to SEQ ID NO: 10889
  Cyclic GFR-binding peptide
  MOD_RES (1), (33), (34): Xaa is C or S

SEQ ID NO: 51831 - protein, 33 aa, Artificial Sequence
  Cyclic GFR-binding peptide
  MOD_RES (29), (30): Xaa is C or S
VMNNSLQEIVNSSDDYYVVPLPELQTPAXXPKP

SEQ ID NO: 51832 - protein, 24 aa, Artificial Sequence
  Cyclic GFR-binding peptide
VMDQYNKLVVNNASDLYLISIASL

SEQ ID NO: 51833 - protein, 26 aa, Artificial Sequence
  Cyclic GFR-binding peptide
  MOD_RES (26), (26): Xaa is C or S
EYQKYVVKDYEDIFLMSIPSLETPVX

SEQ ID NO: 51834 - protein, 33 aa, Artificial Sequence; identical to SEQ ID NO: 10891
  Cyclic GFR-binding peptide
  MOD_RES (1), (33): Xaa is C or S

SEQ ID NO: 51835 - protein, 23 aa, Artificial Sequence
  Cyclic GFR-binding peptide
DQYNKLVVNNASDLYLISIASLR

SEQ ID NO: 51836 - protein, 29 aa, Artificial Sequence
  Cyclic GFR-binding peptide
AAAAAAAAANSLQEIKPTKGIYYLITLPE

SEQ ID NO: 51837 - protein, 37 aa, Artificial Sequence; identical to SEQ ID NO: 10892
  Cyclic GFR-binding peptide
  MOD_RES (1), (3), (35), (36): Xaa is C or S

SEQ ID NO: 51838 - protein, 30 aa, Artificial Sequence
  Cyclic GFR-binding peptide
  MOD_RES (28), (29): Xaa is C or S
MDEYQKYVVKENEDIFLMSIPSLETPVXXA

SEQ ID NO: 51839 - protein, 29 aa, Artificial Sequence
  Cyclic GFR-binding peptide
  MOD_RES (29), (29): Xaa is C or S
VMNNSLQEIVNSSDDYYVVPLPELKTPAX

SEQ ID NO: 51840 - protein, 30 aa, Artificial Sequence
  Cyclic GFR-binding peptide
  MOD_RES (2), (2): Xaa is C or S
GXGEVVMDEYQKYVVKENEDIFLMSIPSLE

SEQ ID NO: 51841 - protein, 29 aa, Artificial Sequence
  Cyclic GFR-binding peptide
RVVMNEYQKYIVNSSDDIFLVSIPSLKTP

SEQ ID NO: 51842 - protein, 40 aa, Artificial Sequence; identical to SEQ ID NO: 10895
  Cyclic GFR-binding peptide
  MOD_RES (2), (4), (36), (37): Xaa is C or S

SEQ ID NO: 51843 - protein, 35 aa, Artificial Sequence; identical to SEQ ID NO: 10897
  Cyclic GFR-binding peptide
  MOD_RES (32), (33): Xaa is C or S

SEQ ID NO: 51844 - protein, 32 aa, Artificial Sequence
  Cyclic GFR-binding peptide
  MOD_RES (28), (29): Xaa is C or S
MEEYQKYVVKDYEDIFLMSIPSLETPVXXAKP

SEQ ID NO: 51845 - protein, 27 aa, Artificial Sequence
  Cyclic GFR-binding peptide
RVIMEYQKYVKPKRGVIFLISIPSLAQ

SEQ ID NO: 51846 - protein, 33 aa, Artificial Sequence; identical to SEQ ID NO: 10898
  Cyclic GFR-binding peptide
  MOD_RES (2), (2): Xaa is C or S

SEQ ID NO: 51847 - protein, 42 aa, Artificial Sequence; identical to SEQ ID NO: 10900
  Cyclic GFR-binding peptide
  MOD_RES (2), (4), (36), (37): Xaa is C or S

SEQ ID NO: 51848 - protein, 41 aa, Artificial Sequence; identical to SEQ ID NO: 10901
  Cyclic GFR-binding peptide
  MOD_RES (2), (4), (36), (37): Xaa is C or S

SEQ ID NO: 51849 - protein, 23 aa, Artificial Sequence
  Cyclic GFR-binding peptide
VMENSLQEVVKDYEDYYVMPLPE

SEQ ID NO: 51850 - protein, 40 aa, Artificial Sequence; identical to SEQ ID NO: 10904
  Cyclic GFR-binding peptide
  MOD_RES (2), (34), (35): Xaa is C or S

SEQ ID NO: 51851 - protein, 25 aa, Artificial Sequence
  Cyclic GFR-binding peptide
MNEYQKYIVNSSDDIFLVSIPSLQT

SEQ ID NO: 51852 - protein, 36 aa, Artificial Sequence
  Cyclic GFR-binding peptide
  MOD_RES (30), (31): Xaa is C or S
VVMENSLQEVVKDYEDYYVMPLPELETPVXXAKPIS

SEQ ID NO: 51853 - protein, 25 aa, Artificial Sequence
  Cyclic GFR-binding peptide
VIMNSLQEIKPTKGIYYVIPLPELD

SEQ ID NO: 51854 - protein, 25 aa, Artificial Sequence
  Cyclic GFR-binding peptide
EVVMDNSLQEVVKENEDYYVMPLPE

SEQ ID NO: 51855 - protein, 27 aa, Artificial Sequence
  Cyclic GFR-binding peptide
GEVVMDEYQKYVVKENEDIFLMSIPSL

SEQ ID NO: 51856 - protein, 33 aa, Artificial Sequence
  Cyclic GFR-binding peptide
  MOD_RES (28), (29): Xaa is C or S
MDNSLQEVVNNASDYYLITLPELRTPVXXTPPT

SEQ ID NO: 51857 - protein, 31 aa, Artificial Sequence
  Cyclic GFR-binding peptide
  MOD_RES (28), (29): Xaa is C or S
IMEYQKYVKPKRGVIFLISIPSLAQPVXXPA

SEQ ID NO: 51858 - protein, 32 aa, Artificial Sequence; identical to SEQ ID NO: 10908
  Cyclic GFR-binding peptide
  MOD_RES (1), (1): Xaa is C or S

SEQ ID NO: 51859 - protein, 27 aa, Artificial Sequence
  Cyclic GFR-binding peptide
  MOD_RES (2), (2): Xaa is C or S
KXSRVIMEYQKYVKPKRGVIFLISIPS

SEQ ID NO: 51860 - protein, 37 aa, Artificial Sequence; identical to SEQ ID NO: 10910
  Cyclic GFR-binding peptide
  MOD_RES (1), (3), (35): Xaa is C or S

SEQ ID NO: 51861 - protein, 26 aa, Artificial Sequence
  Cyclic GFR-binding peptide
MNNSLQEIVNSSDDYYVVPLPELQTP

SEQ ID NO: 51862 - protein, 28 aa, Artificial Sequence
  Cyclic GFR-binding peptide
RVVMNNSLQEIVNSSDDYYLVTLPELQT

SEQ ID NO: 51863 - protein, 26 aa, Artificial Sequence
  Cyclic GFR-binding peptide
VMNNSLQEIVNSSDDYYVVPLPELQT

SEQ ID NO: 51864 - protein, 21 aa, Artificial Sequence
  Cyclic GFR-binding peptide
MNSLQEVKPKRGVYYLITLPE

SEQ ID NO: 51865 - protein, 34 aa, Artificial Sequence; identical to SEQ ID NO: 10911
  Cyclic GFR-binding peptide
  MOD_RES (1), (33), (34): Xaa is C or S

SEQ ID NO: 51866 - protein, 33 aa, Artificial Sequence
  Cyclic GFR-binding peptide
  MOD_RES (30), (31): Xaa is C or S
KVIMEYQKYIKPTKGIIFLISIPSLDQSVXXPS

SEQ ID NO: 51867 - protein, 27 aa, Artificial Sequence
  Cyclic GFR-binding peptide
VMENSLQEVVKDYEDYYVMPLPELETP

SEQ ID NO: 51868 - protein, 29 aa, Artificial Sequence
  Cyclic GFR-binding peptide
  MOD_RES (29), (29): Xaa is C or S
VMDRYKKLVVNNASDFYLISIANLRTPVX

SEQ ID NO: 51869 - protein, 33 aa, Artificial Sequence
  Cyclic GFR-binding peptide
  MOD_RES (29), (30): Xaa is C or S
VMEEYQKYVVKDYEDIFLMSIPSLETPVXXAKP

SEQ ID NO: 51870 - protein, 41 aa, Artificial Sequence; identical to SEQ ID NO: 10913
  Cyclic GFR-binding peptide
  MOD_RES (1), (3), (35): Xaa is C or S

SEQ ID NO: 51871 - protein, 28 aa, Artificial Sequence
  Cyclic GFR-binding peptide
  MOD_RES (26), (27): Xaa is C or S
EYQKYVVKDYEDIFLMSIPSLETPVXXA

SEQ ID NO: 51872 - protein, 25 aa, Artificial Sequence
  Cyclic GFR-binding peptide
EYQKYVKPTRGVIFLISIPSLDQPV

SEQ ID NO: 51873 - protein, 31 aa, Artificial Sequence; identical to SEQ ID NO: 10916
  Cyclic GFR-binding peptide

SEQ ID NO: 51874 - protein, 38 aa, Artificial Sequence; identical to SEQ ID NO: 10917
  Cyclic GFR-binding peptide
  MOD_RES (32), (33): Xaa is C or S

SEQ ID NO: 51875 - protein, 31 aa, Artificial Sequence
  Cyclic GFR-binding peptide
  MOD_RES (2), (4): Xaa is C or S
HXGXARVVMNNSLQEIVNSSDDYYVVPLPEL

SEQ ID NO: 51876 - protein, 25 aa, Artificial Sequence
  Cyclic GFR-binding peptide
VMEYQKYVKPTRGVIFLISIPSLDQ

SEQ ID NO: 51877 - protein, 41 aa, Artificial Sequence; identical to SEQ ID NO: 10920
  Cyclic GFR-binding peptide
  MOD_RES (1), (3), (35), (36): Xaa is C or S

SEQ ID NO: 51878 - protein, 22 aa, Artificial Sequence
  Cyclic GFR-binding peptide
ENSLQEVVKDYEDYYVMPLPEL

SEQ ID NO: 51879 - protein, 31 aa, Artificial Sequence
  Cyclic GFR-binding peptide
  MOD_RES (29), (30): Xaa is C or S
VMDNSLQEVVKENEDYYLMTLPELETPVXXA

SEQ ID NO: 51880 - protein, 33 aa, Artificial Sequence
  Cyclic GFR-binding peptide
  MOD_RES (28), (28): Xaa is C or S
MNNSLQEIVNSSDDYYLVTLPELKTPAXTPKTV

SEQ ID NO: 51881 - protein, 37 aa, Artificial Sequence; identical to SEQ ID NO: 10921
  Cyclic GFR-binding peptide
  MOD_RES (2), (4), (36), (37): Xaa is C or S

SEQ ID NO: 51882 - protein, 35 aa, Artificial Sequence
  Cyclic GFR-binding peptide
  MOD_RES (30), (31): Xaa is C or S
VVMDNSLQEVVKENEDYYLMTLPELETPVXXAKPI

SEQ ID NO: 51883 - protein, 34 aa, Artificial Sequence
  Cyclic GFR-binding peptide
  MOD_RES (28), (29): Xaa is C or S
MDNSLQEVVKENEDYYVMPLPELETPVXXAKPIK

SEQ ID NO: 51884 - protein, 26 aa, Artificial Sequence
  Cyclic GFR-binding peptide
  MOD_RES (26), (26): Xaa is C or S
NSLQEVKPTRGVYYVIPLPELDQPVX

SEQ ID NO: 51885 - protein, 26 aa, Artificial Sequence
  Cyclic GFR-binding peptide
DNSLQEVVNNASDYYVIPLPELRTPV

SEQ ID NO: 51886 - protein, 36 aa, Artificial Sequence; identical to SEQ ID NO: 10923
  Cyclic GFR-binding peptide
  MOD_RES (2), (34), (35): Xaa is C or S

SEQ ID NO: 51887 - protein, 35 aa, Artificial Sequence; identical to SEQ ID NO: 10924
  Cyclic GFR-binding peptide
  MOD_RES (2), (4): Xaa is C or S

SEQ ID NO: 51888 - protein, 31 aa, Artificial Sequence
  Cyclic GFR-binding peptide
  MOD_RES (26), (27): Xaa is C or S
NSLQEIVNSSDDYYLVTLPELQTPAXXPKPV

SEQ ID NO: 51889 - protein, 31 aa, Artificial Sequence; identical to SEQ ID NO: 10926
  Cyclic GFR-binding peptide
  MOD_RES (31), (31): Xaa is C or S

SEQ ID NO: 51890 - protein, 28 aa, Artificial Sequence
  Cyclic GFR-binding peptide
VMDNSLQEVVNNASDYYVIPLPELRTPV

SEQ ID NO: 51891 - protein, 30 aa, Artificial Sequence
  Cyclic GFR-binding peptide
  MOD_RES (1), (1): Xaa is C or S
XSKVVMEYQKYVKPTRGVIFLISIPSLDQP

SEQ ID NO: 51892 - protein, 33 aa, Artificial Sequence; identical to SEQ ID NO: 10928
  Cyclic GFR-binding peptide
  MOD_RES (2), (2): Xaa is C or S

SEQ ID NO: 51893 - protein, 38 aa, Artificial Sequence; identical to SEQ ID NO: 10929
  Cyclic GFR-binding peptide
  MOD_RES (2), (4), (35), (36): Xaa is C or S

SEQ ID NO: 51894 - protein, 38 aa, Artificial Sequence; identical to SEQ ID NO: 10931
  Cyclic GFR-binding peptide
  MOD_RES (2), (33), (34): Xaa is C or S

SEQ ID NO: 51895 - protein, 36 aa, Artificial Sequence; identical to SEQ ID NO: 10932
  Cyclic GFR-binding peptide
  MOD_RES (2), (4), (36): Xaa is C or S

SEQ ID NO: 51896 - protein, 41 aa, Artificial Sequence; identical to SEQ ID NO: 10933
  Cyclic GFR-binding peptide
  MOD_RES (2), (4), (36), (37): Xaa is C or S

SEQ ID NO: 51897 - protein, 24 aa, Artificial Sequence
  Cyclic GFR-binding peptide
NSLQEVVKENEDYYLMTLPELETP

SEQ ID NO: 51898 - protein, 25 aa, Artificial Sequence
  Cyclic GFR-binding peptide
DRYKKLVVNNASDFYLISIANLRTP

SEQ ID NO: 51899 - protein, 34 aa, Artificial Sequence; identical to SEQ ID NO: 10936
  Cyclic GFR-binding peptide
  MOD_RES (31), (32): Xaa is C or S

SEQ ID NO: 51900 - protein, 33 aa, Artificial Sequence; identical to SEQ ID NO: 10938
  Cyclic GFR-binding peptide
  MOD_RES (1), (33): Xaa is C or S

SEQ ID NO: 51901 - protein, 27 aa, Artificial Sequence
  Cyclic GFR-binding peptide
GEVVMDNSLQEVVKENEDYYVMPLPEL

SEQ ID NO: 51902 - protein, 32 aa, Artificial Sequence
  Cyclic GFR-binding peptide
  MOD_RES (26), (27): Xaa is C or S
EYQKYVKPTRGVIFLISIPSLDQPVXXPSASA

SEQ ID NO: 51903 - protein, 39 aa, Artificial Sequence; identical to SEQ ID NO: 10939
  Cyclic GFR-binding peptide
  MOD_RES (1), (33), (34): Xaa is C or S

SEQ ID NO: 51904 - protein, 29 aa, Artificial Sequence
  Cyclic GFR-binding peptide
EVVMDRYKKLVVNNASDFYLISIANLRTP

SEQ ID NO: 51905 - protein, 27 aa, Artificial Sequence
  Cyclic GFR-binding peptide
EVVMDQYNKLVVNNASDLYLISIASLR

SEQ ID NO: 51906 - protein, 21 aa, Artificial Sequence
  Cyclic GFR-binding peptide
NSLQEIVNSSDDYYVVPLPEL

SEQ ID NO: 51907 - protein, 40 aa, Artificial Sequence; identical to SEQ ID NO: 10941
  Cyclic GFR-binding peptide
  MOD_RES (1), (3), (35): Xaa is C or S

SEQ ID NO: 51908 - protein, 26 aa, Artificial Sequence
  Cyclic GFR-binding peptide
VVMEYQKYVKPTRGVIFLISIPSLDQ

SEQ ID NO: 51909 - protein, 34 aa, Artificial Sequence; identical to SEQ ID NO: 10943
  Cyclic GFR-binding peptide
  MOD_RES (2), (34): Xaa is C or S

SEQ ID NO: 51910 - protein, 29 aa, Artificial Sequence
  Cyclic GFR-binding peptide
  MOD_RES (2), (2): Xaa is C or S
GXGEVVMENSLQEVVKDYEDYYVMPLPEL

SEQ ID NO: 51911 - protein, 29 aa, Artificial Sequence
  Cyclic GFR-binding peptide
SKVIMNSLQEIKPTKGIYYVIPLPELDQS

SEQ ID NO: 51912 - protein, 26 aa, Artificial Sequence
  Cyclic GFR-binding peptide
RVVMNNSLQEIVNSSDDYYLVTLPEL

SEQ ID NO: 51913 - protein, 40 aa, Artificial Sequence; identical to SEQ ID NO: 10946
  Cyclic GFR-binding peptide
  MOD_RES (2), (4), (36): Xaa is C or S

SEQ ID NO: 51914 - protein, 30 aa, Artificial Sequence; identical to SEQ ID NO: 10948
  Cyclic GFR-binding peptide

SEQ ID NO: 51915 - protein, 31 aa, Artificial Sequence
  Cyclic GFR-binding peptide
  MOD_RES (30), (30): Xaa is C or S
VVMNNSLQEIVNSSDDYYVVPLPELKTPAXT

SEQ ID NO: 51916 - protein, 23 aa, Artificial Sequence
  Cyclic GFR-binding peptide
IMNSLQEIKPTKGIYYVIPLPEL

SEQ ID NO: 51917 - protein, 26 aa, Artificial Sequence
  Cyclic GFR-binding peptide
VMDNSLQEVVKENEDYYVMPLPELET

SEQ ID NO: 51918 - protein, 24 aa, Artificial Sequence
  Cyclic GFR-binding peptide
VVMDQYNKLVVNNASDLYLISIAS

SEQ ID NO: 51919 - protein, 35 aa, Artificial Sequence; identical to SEQ ID NO: 10949
  Cyclic GFR-binding peptide
  MOD_RES (2), (4): Xaa is C or S

SEQ ID NO: 51920 - protein, 25 aa, Artificial Sequence
  Cyclic GFR-binding peptide
VVMNNSLQEIVNSSDDYYLVTLPEL

SEQ ID NO: 51921 - protein, 34 aa, Artificial Sequence; identical to SEQ ID NO: 10950
  Cyclic GFR-binding peptide
  MOD_RES (1), (3): Xaa is C or S

SEQ ID NO: 51922 - protein, 30 aa, Artificial Sequence
  Cyclic GFR-binding peptide
  MOD_RES (1), (1): Xaa is C or S
XGEVVMEEYQKYVVKDYEDIFLMSIPSLET

SEQ ID NO: 51923 - protein, 27 aa, Artificial Sequence
  Cyclic GFR-binding peptide
VVMDNSLQEVVNNASDYYLITLPELRT

SEQ ID NO: 51924 - protein, 30 aa, Artificial Sequence; identical to SEQ ID NO: 2026
  Cyclic GFR-binding peptide

SEQ ID NO: 51925 - protein, 27 aa, Artificial Sequence
  Cyclic GFR-binding peptide
  MOD_RES (26), (27): Xaa is C or S
EYQKYVVKDYEDIFLMSIPSLETPVXX

SEQ ID NO: 51926 - protein, 32 aa, Artificial Sequence
  Cyclic GFR-binding peptide
  MOD_RES (26), (27): Xaa is C or S
NSLQEVVNNASDYYLITLPELRTPVXXTPPTS

SEQ ID NO: 51927 - protein, 33 aa, Artificial Sequence
  Cyclic GFR-binding peptide
  MOD_RES (2), (4): Xaa is C or S
SXKXSKVIMNSLQEIKPTKGIYYVIPLPELDQS

SEQ ID NO: 51928 - protein, 38 aa, Artificial Sequence; identical to SEQ ID NO: 10954
  Cyclic GFR-binding peptide
  MOD_RES (2), (34): Xaa is C or S

SEQ ID NO: 51929 - protein, 24 aa, Artificial Sequence
  Cyclic GFR-binding peptide
VVMDNSLQEVVNNASDYYLITLPE

SEQ ID NO: 51930 - protein, 23 aa, Artificial Sequence
  Cyclic GFR-binding peptide
MDQYNKLVVNNASDLYLISIASL

SEQ ID NO: 51931 - protein, 34 aa, Artificial Sequence; identical to SEQ ID NO: 10955
  Cyclic GFR-binding peptide
  MOD_RES (31), (32): Xaa is C or S

SEQ ID NO: 51932 - protein, 26 aa, Artificial Sequence
  Cyclic GFR-binding peptide
VVMENSLQEVVKDYEDYYVMPLPELE

SEQ ID NO: 51933 - protein, 30 aa, Artificial Sequence
  Cyclic GFR-binding peptide
  MOD_RES (26), (27): Xaa is C or S
EYQKYVKPKRGVIFLISIPSLAQPVXXPAA

SEQ ID NO: 51934 - protein, 29 aa, Artificial Sequence
  Cyclic GFR-binding peptide
AAAAAAAAAEYQKYVKPKRGVIFLISIPS

SEQ ID NO: 51935 - protein, 27 aa, Artificial Sequence
  Cyclic GFR-binding peptide
RVVMNEYQKYIVNSSDDIFLVSIPSLK

SEQ ID NO: 51936 - protein, 41 aa, Artificial Sequence; identical to SEQ ID NO: 10957
  Cyclic GFR-binding peptide
  MOD_RES (1), (3), (35): Xaa is C or S

SEQ ID NO: 51937 - protein, 32 aa, Artificial Sequence
  Cyclic GFR-binding peptide
  MOD_RES (2), (4): Xaa is C or S
RXGXSEVVMDNSLQEVVNNASDYYLITLPELR

SEQ ID NO: 51938 - protein, 31 aa, Artificial Sequence
  Cyclic GFR-binding peptide
  MOD_RES (29), (30): Xaa is C or S
VMNNSLQEIVNSSDDYYLVTLPELKTPAXXP

SEQ ID NO: 51939 - protein, 30 aa, Artificial Sequence
  Cyclic GFR-binding peptide
  MOD_RES (1), (1): Xaa is C or S
XSRVVMNNSLQEIVNSSDDYYLVTLPELKT

SEQ ID NO: 51940 - protein, 30 aa, Artificial Sequence; identical to SEQ ID NO: 2091
  Cyclic GFR-binding peptide

SEQ ID NO: 51941 - protein, 25 aa, Artificial Sequence
  Cyclic GFR-binding peptide
MENSLQEVVKDYEDYYVMPLPELET

SEQ ID NO: 51942 - protein, 33 aa, Artificial Sequence
  Cyclic GFR-binding peptide
  MOD_RES (2), (4): Xaa is C or S
SXKXSKVVMEYQKYVKPTRGVIFLISIPSLDQP

SEQ ID NO: 51943 - protein, 32 aa, Artificial Sequence; identical to SEQ ID NO: 10961
  Cyclic GFR-binding peptide
  MOD_RES (32), (32): Xaa is C or S

SEQ ID NO: 51944 - protein, 40 aa, Artificial Sequence; identical to SEQ ID NO: 10962
  Cyclic GFR-binding peptide
  MOD_RES (1), (3), (35), (36): Xaa is C or S

SEQ ID NO: 51945 - protein, 36 aa, Artificial Sequence
  Cyclic GFR-binding peptide
  MOD_RES (30), (31): Xaa is C or S
KVIMEYQKYIKPTKGIIFLISIPSLDQSVXXPSASA

SEQ ID NO: 51946 - protein, 30 aa, Artificial Sequence
  Cyclic GFR-binding peptide
  MOD_RES (27), (28): Xaa is C or S
DNSLQEVVKENEDYYVMPLPELETPVXXAK

SEQ ID NO: 51947 - protein, 35 aa, Artificial Sequence; identical to SEQ ID NO: 10965
  Cyclic GFR-binding peptide
  MOD_RES (2), (4): Xaa is C or S

SEQ ID NO: 51948 - protein, 33 aa, Artificial Sequence
  Cyclic GFR-binding peptide
  MOD_RES (30), (31): Xaa is C or S
VVMDNSLQEVVKENEDYYLMTLPELETPVXXAK

SEQ ID NO: 51949 - protein, 25 aa, Artificial Sequence
  Cyclic GFR-binding peptide
SKVVMNSLQEVKPTRGVYYVIPLPE

SEQ ID NO: 51950 - protein, 33 aa, Artificial Sequence; identical to SEQ ID NO: 10966
  Cyclic GFR-binding peptide
  MOD_RES (1), (33): Xaa is C or S

SEQ ID NO: 51951 - protein, 34 aa, Artificial Sequence; identical to SEQ ID NO: 10967
  Cyclic GFR-binding peptide
  MOD_RES (32), (33): Xaa is C or S

SEQ ID NO: 51952 - protein, 30 aa, Artificial Sequence
  Cyclic GFR-binding peptide
  MOD_RES (2), (4): Xaa is C or S
RXGXGEVVMDEYQKYVVKENEDIFLMSIPS

SEQ ID NO: 51953 - protein, 35 aa, Artificial Sequence; identical to SEQ ID NO: 10969
  Cyclic GFR-binding peptide
  MOD_RES (32), (33): Xaa is C or S

SEQ ID NO: 51954 - protein, 34 aa, Artificial Sequence
  Cyclic GFR-binding peptide
  MOD_RES (2), (4): Xaa is C or S
HXGXSRVVMNNSLQEIVNSSDDYYVVPLPELKTP

SEQ ID NO: 51955 - protein, 37 aa, Artificial Sequence; identical to SEQ ID NO: 10971
  Cyclic GFR-binding peptide
  MOD_RES (2), (4), (35), (36): Xaa is C or S

SEQ ID NO: 51956 - protein, 26 aa, Artificial Sequence
  Cyclic GFR-binding peptide
VMDQYNKLVVNNASDLYLISIASLRT

SEQ ID NO: 51957 - protein, 26 aa, Artificial Sequence
  Cyclic GFR-binding peptide
  MOD_RES (26), (26): Xaa is C or S
NSLQEVVKENEDYYLMTLPELETPVX

SEQ ID NO: 51958 - protein, 26 aa, Artificial Sequence
  Cyclic GFR-binding peptide
  MOD_RES (26), (26): Xaa is C or S
NSLQEVVNNASDYYVIPLPELRTPVX

SEQ ID NO: 51959 - protein, 33 aa, Artificial Sequence; identical to SEQ ID NO: 10973
  Cyclic GFR-binding peptide
  MOD_RES (32), (33): Xaa is C or S

SEQ ID NO: 51960 - protein, 28 aa, Artificial Sequence
  Cyclic GFR-binding peptide
  MOD_RES (2), (2): Xaa is C or S
GXGEVVMENSLQEVVKDYEDYYLMTLPE

SEQ ID NO: 51961 - protein, 26 aa, Artificial Sequence
  Cyclic GFR-binding peptide
VMNSLQEVKPTRGVYYVIPLPELDQP

SEQ ID NO: 51962 - protein, 32 aa, Artificial Sequence
  Cyclic GFR-binding peptide
  MOD_RES (26), (27): Xaa is C or S
RYKKLVVNNASDFYLISIANLRTPVXXTPPTS

SEQ ID NO: 51963 - protein, 29 aa, Artificial Sequence
  Cyclic GFR-binding peptide
ARVVMNNSLQEIVNSSDDYYLVTLPELQT

SEQ ID NO: 51964 - protein, 38 aa, Artificial Sequence; identical to SEQ ID NO: 10974
  Cyclic GFR-binding peptide
  MOD_RES (32), (33): Xaa is C or S

SEQ ID NO: 51965 - protein, 37 aa, Artificial Sequence; identical to SEQ ID NO: 10975
  Cyclic GFR-binding peptide
  MOD_RES (31), (32): Xaa is C or S

SEQ ID NO: 51966 - protein, 25 aa, Artificial Sequence
  Cyclic GFR-binding peptide
MDQYNKLVVNNASDLYLISIASLRT

SEQ ID NO: 51967 - protein, 25 aa, Artificial Sequence
  Cyclic GFR-binding peptide
MNSLQEIKPTKGIYYVIPLPELDQS

SEQ ID NO: 51968 - protein, 37 aa, Artificial Sequence; identical to SEQ ID NO: 10978
  Cyclic GFR-binding peptide
  MOD_RES (1), (33): Xaa is C or S

SEQ ID NO: 51969 - protein, 31 aa, Artificial Sequence
  Cyclic GFR-binding peptide
  MOD_RES (1), (3): Xaa is C or S
XGXSRVVMNEYQKYIVNSSDDIFLVSIPSLK

SEQ ID NO: 51970 - protein, 35 aa, Artificial Sequence; identical to SEQ ID NO: 10979
  Cyclic GFR-binding peptide
  MOD_RES (31), (31): Xaa is C or S

SEQ ID NO: 51971 - protein, 36 aa, Artificial Sequence; identical to SEQ ID NO: 10980
  Cyclic GFR-binding peptide
  MOD_RES (1), (33), (34): Xaa is C or S

SEQ ID NO: 51972 - protein, 33 aa, Artificial Sequence
  Cyclic GFR-binding peptide
  MOD_RES (28), (29): Xaa is C or S
MNNSLQEIVNSSDDYYVVPLPELQTPAXXPKPV

SEQ ID NO: 51973 - protein, 34 aa, Artificial Sequence
  Cyclic GFR-binding peptide
  MOD_RES (29), (30): Xaa is C or S
VMNNSLQEIVNSSDDYYVVPLPELQTPAXXPKPV

SEQ ID NO: 51974 - protein, 24 aa, Artificial Sequence
  Cyclic GFR-binding peptide
EEYQKYVVKDYEDIFLMSIPSLET

SEQ ID NO: 51975 - protein, 39 aa, Artificial Sequence; identical to SEQ ID NO: 10984
  Cyclic GFR-binding peptide
  MOD_RES (2), (34), (35): Xaa is C or S

SEQ ID NO: 51976 - protein, 33 aa, Artificial Sequence
  Cyclic GFR-binding peptide
  MOD_RES (30), (31): Xaa is C or S
VVMENSLQEVVKDYEDYYLMTLPELETPVXXAK

SEQ ID NO: 51977 - protein, 33 aa, Artificial Sequence
  Cyclic GFR-binding peptide
  MOD_RES (27), (28): Xaa is C or S
ENSLQEVVKDYEDYYLMTLPELETPVXXAKPIS

SEQ ID NO: 51978 - protein, 35 aa, Artificial Sequence; identical to SEQ ID NO: 10985
  Cyclic GFR-binding peptide
  MOD_RES (2), (34), (35): Xaa is C or S

SEQ ID NO: 51979 - protein, 37 aa, Artificial Sequence; identical to SEQ ID NO: 10988
  Cyclic GFR-binding peptide
  MOD_RES (32), (33): Xaa is C or S

SEQ ID NO: 51980 - protein, 37 aa, Artificial Sequence; identical to SEQ ID NO: 10989
  Cyclic GFR-binding peptide
  MOD_RES (31), (32): Xaa is C or S

SEQ ID NO: 51981 - protein, 33 aa, Artificial Sequence
  Cyclic GFR-binding peptide
  MOD_RES (29), (30): Xaa is C or S
VMDNSLQEVVNNASDYYLITLPELRTPVXXTPP

SEQ ID NO: 51982 - protein, 29 aa, Artificial Sequence
  Cyclic GFR-binding peptide
  MOD_RES (28), (28): Xaa is C or S
MNNSLQEIVNSSDDYYLVTLPELKTPAXT

SEQ ID NO: 51983 - protein, 33 aa, Artificial Sequence; identical to SEQ ID NO: 10990
  Cyclic GFR-binding peptide
  MOD_RES (1), (33): Xaa is C or S

SEQ ID NO: 51984 - protein, 33 aa, Artificial Sequence; identical to SEQ ID NO: 10991
  Cyclic GFR-binding peptide
  MOD_RES (1), (32), (33): Xaa is C or S

SEQ ID NO: 51985 - protein, 41 aa, Artificial Sequence; identical to SEQ ID NO: 10993
  Cyclic GFR-binding peptide
  MOD_RES (1), (3), (35), (36): Xaa is C or S

SEQ ID NO: 51986 - protein, 34 aa, Artificial Sequence
  Cyclic GFR-binding peptide
  MOD_RES (29), (30): Xaa is C or S
VVMEYQKYVKPTRGVIFLISIPSLDQPVXXPSAS

SEQ ID NO: 51987 - protein, 26 aa, Artificial Sequence
  Cyclic GFR-binding peptide
GEVVMDEYQKYVVKENEDIFLMSIPS

SEQ ID NO: 51988 - protein, 31 aa, Artificial Sequence
  Cyclic GFR-binding peptide
  MOD_RES (1), (3): Xaa is C or S
XGXARVVMNNSLQEIVNSSDDYYLVTLPELQ

SEQ ID NO: 51989 - protein, 36 aa, Artificial Sequence; identical to SEQ ID NO: 10995
  Cyclic GFR-binding peptide
  MOD_RES (1), (3), (35), (36): Xaa is C or S

SEQ ID NO: 51990 - protein, 26 aa, Artificial Sequence
  Cyclic GFR-binding peptide
SRVIMNSLQEVKPKRGVYYLITLPEL

SEQ ID NO: 51991 - protein, 24 aa, Artificial Sequence
  Cyclic GFR-binding peptide
ENSLQEVVKDYEDYYLMTLPELET

SEQ ID NO: 51992 - protein, 31 aa, Artificial Sequence; identical to SEQ ID NO: 10996
  Cyclic GFR-binding peptide
  MOD_RES (31), (31): Xaa is C or S

SEQ ID NO: 51993 - protein, 26 aa, Artificial Sequence
  Cyclic GFR-binding peptide
VIMNSLQEIKPTKGIYYVIPLPELDQ

SEQ ID NO: 51994 - protein, 33 aa, Artificial Sequence
  Cyclic GFR-binding peptide
  MOD_RES (27), (28): Xaa is C or S
EEYQKYVVKDYEDIFLMSIPSLETPVXXAKPIS

SEQ ID NO: 51995 - protein, 30 aa, Artificial Sequence; identical to SEQ ID NO: 2027
  Cyclic GFR-binding peptide

SEQ ID NO: 51996 - protein, 22 aa, Artificial Sequence
  Cyclic GFR-binding peptide
ENSLQEVVKDYEDYYLMTLPEL

SEQ ID NO: 51997 - protein, 38 aa, Artificial Sequence; identical to SEQ ID NO: 10998
  Cyclic GFR-binding peptide
  MOD_RES (1), (33), (34): Xaa is C or S

SEQ ID NO: 51998 - protein, 38 aa, Artificial Sequence; identical to SEQ ID NO: 10999
  Cyclic GFR-binding peptide
  MOD_RES (1), (3), (35), (36): Xaa is C or S

SEQ ID NO: 51999 - protein, 38 aa, Artificial Sequence; identical to SEQ ID NO: 11000
  Cyclic GFR-binding peptide
  MOD_RES (1), (33): Xaa is C or S

SEQ ID NO: 52000 - protein, 33 aa, Artificial Sequence
  Cyclic GFR-binding peptide
  MOD_RES (2), (4): Xaa is C or S
RXGXSEVVMDRYKKLVVNNASDFYLISIANLRT

SEQ ID NO: 52001 - protein, 34 aa, Artificial Sequence
  Cyclic GFR-binding peptide
  MOD_RES (29), (30): Xaa is C or S
VIMNSLQEIKPTKGIYYVIPLPELDQSVXXPSAS

SEQ ID NO: 52002 - protein, 32 aa, Artificial Sequence
  Cyclic GFR-binding peptide
  MOD_RES (1), (3): Xaa is C or S
XGXSEVVMDNSLQEVVNNASDYYVIPLPELRT

SEQ ID NO: 52003 - protein, 37 aa, Artificial Sequence; identical to SEQ ID NO: 11003
  Cyclic GFR-binding peptide
  MOD_RES (32), (33): Xaa is C or S

SEQ ID NO: 52004 - protein, 27 aa, Artificial Sequence
  Cyclic GFR-binding peptide
VVMDQYNKLVVNNASDLYLISIASLRT

SEQ ID NO: 52005 - protein, 28 aa, Artificial Sequence
  Cyclic GFR-binding peptide
VVMNNSLQEIVNSSDDYYLVTLPELQTP

SEQ ID NO: 52006 - protein, 38 aa, Artificial Sequence; identical to SEQ ID NO: 11007
  Cyclic GFR-binding peptide
  MOD_RES (2), (4), (35), (36): Xaa is C or S

SEQ ID NO: 52007 - protein, 32 aa, Artificial Sequence
  Cyclic GFR-binding peptide
  MOD_RES (1), (3): Xaa is C or S
XKXSRVIMEYQKYVKPKRGVIFLISIPSLAQP

SEQ ID NO: 52008 - protein, 23 aa, Artificial Sequence
  Cyclic GFR-binding peptide
VIMEYQKYIKPTKGIIFLISIPS

SEQ ID NO: 52009 - protein, 30 aa, Artificial Sequence
  Cyclic GFR-binding peptide
  MOD_RES (2), (4): Xaa is C or S
RXGXGEVVMENSLQEVVKDYEDYYVMPLPE

SEQ ID NO: 52010 - protein, 23 aa, Artificial Sequence
  Cyclic GFR-binding peptide
DNSLQEVVKENEDYYVMPLPELE

SEQ ID NO: 52011 - protein, 37 aa, Artificial Sequence; identical to SEQ ID NO: 11010
  Cyclic GFR-binding peptide
  MOD_RES (1), (3), (35), (36): Xaa is C or S

SEQ ID NO: 52012 - protein, 37 aa, Artificial Sequence; identical to SEQ ID NO: 11011
  Cyclic GFR-binding peptide
  MOD_RES (1), (3), (35), (36): Xaa is C or S

SEQ ID NO: 52013 - protein, 33 aa, Artificial Sequence; identical to SEQ ID NO: 11012
  Cyclic GFR-binding peptide
  MOD_RES (2), (2): Xaa is C or S

SEQ ID NO: 52014 - protein, 28 aa, Artificial Sequence
  Cyclic GFR-binding peptide
  MOD_RES (1), (1): Xaa is C or S
XSKVVMEYQKYVKPTRGVIFLISIPSLD

SEQ ID NO: 52015 - protein, 32 aa, Artificial Sequence
  Cyclic GFR-binding peptide
  MOD_RES (2), (4): Xaa is C or S
RXGXGEVVMDNSLQEVVKENEDYYLMTLPELE

SEQ ID NO: 52016 - protein, 37 aa, Artificial Sequence; identical to SEQ ID NO: 11014
  Cyclic GFR-binding peptide
  MOD_RES (2), (34): Xaa is C or S

SEQ ID NO: 52017 - protein, 32 aa, Artificial Sequence
  Cyclic GFR-binding peptide
  MOD_RES (2), (4): Xaa is C or S
SXKXSKVVMNSLQEVKPTRGVYYVIPLPELDQ

SEQ ID NO: 52018 - protein, 38 aa, Artificial Sequence; identical to SEQ ID NO: 11017
  Cyclic GFR-binding peptide
  MOD_RES (1), (33), (34): Xaa is C or S

SEQ ID NO: 52019 - protein, 32 aa, Artificial Sequence
  Cyclic GFR-binding peptide
  MOD_RES (30), (30): Xaa is C or S
VVMNNSLQEIVNSSDDYYLVTLPELKTPAXTP

SEQ ID NO: 52020 - protein, 32 aa, Artificial Sequence
  Cyclic GFR-binding peptide
  MOD_RES (2), (2): Xaa is C or S
GXSEVVMDNSLQEVVNNASDYYVIPLPELRTP

SEQ ID NO: 52021 - protein, 33 aa, Artificial Sequence
  Cyclic GFR-binding peptide
  MOD_RES (28), (29): Xaa is C or S
MEEYQKYVVKDYEDIFLMSIPSLETPVXXAKPI

SEQ ID NO: 52022 - protein, 42 aa, Artificial Sequence; identical to SEQ ID NO: 11018
  Cyclic GFR-binding peptide
  MOD_RES (2), (4), (36): Xaa is C or S

SEQ ID NO: 52023 - protein, 29 aa, Artificial Sequence
  Cyclic GFR-binding peptide
AAAAAAAAARYKKLVVNNASDFYLISIAN

SEQ ID NO: 52024 - protein, 32 aa, Artificial Sequence
  Cyclic GFR-binding peptide
  MOD_RES (29), (30): Xaa is C or S
VMNNSLQEIVNSSDDYYLVTLPELKTPAXXPK

SEQ ID NO: 52025 - protein, 28 aa, Artificial Sequence
  Cyclic GFR-binding peptide
  MOD_RES (2), (2): Xaa is C or S
GXSEVVMDRYKKLVVNNASDFYLISIAN

SEQ ID NO: 52026 - protein, 31 aa, Artificial Sequence
  Cyclic GFR-binding peptide
  MOD_RES (1), (3): Xaa is C or S
XGXSRVVMNNSLQEIVNSSDDYYLVTLPELK

SEQ ID NO: 52027 - protein, 39 aa, Artificial Sequence; identical to SEQ ID NO: 11023
  Cyclic GFR-binding peptide
  MOD_RES (1), (3), (35), (36): Xaa is C or S

SEQ ID NO: 52028 - protein, 37 aa, Artificial Sequence; identical to SEQ ID NO: 11024
  Cyclic GFR-binding peptide
  MOD_RES (31), (32): Xaa is C or S

SEQ ID NO: 52029 - protein, 25 aa, Artificial Sequence
  Cyclic GFR-binding peptide
VVMEYQKYVKPTRGVIFLISIPSLD

SEQ ID NO: 52030 - protein, 38 aa, Artificial Sequence; identical to SEQ ID NO: 11025
  Cyclic GFR-binding peptide
  MOD_RES (1), (3), (35), (36): Xaa is C or S

SEQ ID NO: 52031 - protein, 29 aa, Artificial Sequence
  Cyclic GFR-binding peptide
  MOD_RES (1), (3): Xaa is C or S
XGXARVVMNNSLQEIVNSSDDYYVVPLPE

SEQ ID NO: 52032 - protein, 37 aa, Artificial Sequence; identical to SEQ ID NO: 11028
  Cyclic GFR-binding peptide
  MOD_RES (1), (3), (35), (36): Xaa is C or S

SEQ ID NO: 52033 - protein, 24 aa, Artificial Sequence
  Cyclic GFR-binding peptide
VVMENSLQEVVKDYEDYYVMPLPE

SEQ ID NO: 52034 - protein, 33 aa, Artificial Sequence
  Cyclic GFR-binding peptide
  MOD_RES (2), (4): Xaa is C or S
HXGXSRVVMNNSLQEIVNSSDDYYLVTLPELKT

SEQ ID NO: 52035 - protein, 25 aa, Artificial Sequence
  Cyclic GFR-binding peptide
NSLQEIKPTKGIYYVIPLPELDQSV

SEQ ID NO: 52036 - protein, 35 aa, Artificial Sequence
  Cyclic GFR-binding peptide
  MOD_RES (30), (31): Xaa is C or S
VVMDRYKKLVVNNASDFYLISIANLRTPVXXTPPT

SEQ ID NO: 52037 - protein, 36 aa, Artificial Sequence; identical to SEQ ID NO: 11030
  Cyclic GFR-binding peptide
  MOD_RES (1), (3), (35), (36): Xaa is C or S

SEQ ID NO: 52038 - protein, 22 aa, Artificial Sequence
  Cyclic GFR-binding peptide
EEYQKYVVKDYEDIFLMSIPSL

SEQ ID NO: 52039 - protein, 30 aa, Artificial Sequence
  Cyclic GFR-binding peptide
  MOD_RES (1), (3): Xaa is C or S
XGXSEVVMDNSLQEVVNNASDYYLITLPEL

SEQ ID NO: 52040 - protein, 29 aa, Artificial Sequence
  Cyclic GFR-binding peptide
  MOD_RES (26), (27): Xaa is C or S
EYQKYIKPTKGIIFLISIPSLDQSVXXPS

SEQ ID NO: 52041 - protein, 36 aa, Artificial Sequence; identical to SEQ ID NO: 11031
  Cyclic GFR-binding peptide
  MOD_RES (1), (33): Xaa is C or S

SEQ ID NO: 52042 - protein, 24 aa, Artificial Sequence
  Cyclic GFR-binding peptide
ENSLQEVVKDYEDYYVMPLPELET

SEQ ID NO: 52043 - protein, 23 aa, Artificial Sequence
  Cyclic GFR-binding peptide
VMDNSLQEVVKENEDYYVMPLPE

SEQ ID NO: 52044 - protein, 24 aa, Artificial Sequence
  Cyclic GFR-binding peptide
MDEYQKYVVKENEDIFLMSIPSLE

SEQ ID NO: 52045 - protein, 37 aa, Artificial Sequence; identical to SEQ ID NO: 11034
  Cyclic GFR-binding peptide
  MOD_RES (31), (32): Xaa is C or S

SEQ ID NO: 52046 - protein, 31 aa, Artificial Sequence
  Cyclic GFR-binding peptide
  MOD_RES (29), (30): Xaa is C or S
VMNEYQKYIVNSSDDIFLVSIPSLQTPAXXP

SEQ ID NO: 52047 - protein, 30 aa, Artificial Sequence
  Cyclic GFR-binding peptide
  MOD_RES (1), (3): Xaa is C or S
XGXSRVVMNNSLQEIVNSSDDYYVVPLPEL

SEQ ID NO: 52048 - protein, 27 aa, Artificial Sequence
  Cyclic GFR-binding peptide
VMDNSLQEVVNNASDYYVIPLPELRTP

SEQ ID NO: 52049 - protein, 37 aa, Artificial Sequence; identical to SEQ ID NO: 11035
  Cyclic GFR-binding peptide
  MOD_RES (1), (33), (34): Xaa is C or S

SEQ ID NO: 52050 - protein, 37 aa, Artificial Sequence; identical to SEQ ID NO: 11037
  Cyclic GFR-binding peptide
  MOD_RES (1), (3), (34), (35): Xaa is C or S

SEQ ID NO: 52051 - protein, 34 aa, Artificial Sequence; identical to SEQ ID NO: 11038
  Cyclic GFR-binding peptide
  MOD_RES (2), (4): Xaa is C or S

SEQ ID NO: 52052 - protein, 25 aa, Artificial Sequence
  Cyclic GFR-binding peptide
EVVMDEYQKYVVKENEDIFLMSIPS

SEQ ID NO: 52053 - protein, 29 aa, Artificial Sequence
  Cyclic GFR-binding peptide
KVVMEYQKYVKPTRGVIFLISIPSLDQPV

SEQ ID NO: 52054 - protein, 33 aa, Artificial Sequence
  Cyclic GFR-binding peptide
  MOD_RES (2), (4): Xaa is C or S
HXGXSRVVMNEYQKYIVNSSDDIFLVSIPSLKT

SEQ ID NO: 52055 - protein, 23 aa, Artificial Sequence
  Cyclic GFR-binding peptide
DNSLQEVVKENEDYYLMTLPELE

SEQ ID NO: 52056 - protein, 33 aa, Artificial Sequence
  Cyclic GFR-binding peptide
  MOD_RES (28), (29): Xaa is C or S
IMNSLQEIKPTKGIYYVIPLPELDQSVXXPSAS

SEQ ID NO: 52057 - protein, 30 aa, Artificial Sequence
  Cyclic GFR-binding peptide
  MOD_RES (29), (30): Xaa is C or S
VIMNSLQEIKPTKGIYYVIPLPELDQSVXX

SEQ ID NO: 52058 - protein, 30 aa, Artificial Sequence
  Cyclic GFR-binding peptide
  MOD_RES (28), (28): Xaa is C or S
MNEYQKYIVNSSDDIFLVSIPSLKTPAXTP

SEQ ID NO: 52059 - protein, 32 aa, Artificial Sequence
  Cyclic GFR-binding peptide
  MOD_RES (29), (30): Xaa is C or S
VMDNSLQEVVKENEDYYLMTLPELETPVXXAK

SEQ ID NO: 52060 - protein, 35 aa, Artificial Sequence; identical to SEQ ID NO: 11045
  Cyclic GFR-binding peptide
  MOD_RES (2), (34), (35): Xaa is C or S

SEQ ID NO: 52061 - protein, 28 aa, Artificial Sequence
  Cyclic GFR-binding peptide
  MOD_RES (27), (27): Xaa is C or S
NNSLQEIVNSSDDYYLVTLPELKTPAXT

SEQ ID NO: 52062 - protein, 29 aa, Artificial Sequence
  Cyclic GFR-binding peptide
  MOD_RES (1), (1): Xaa is C or S
XGEVVMDEYQKYVVKENEDIFLMSIPSLE

SEQ ID NO: 52063 - protein, 28 aa, Artificial Sequence
  Cyclic GFR-binding peptide
  MOD_RES (27), (27): Xaa is C or S
NEYQKYIVNSSDDIFLVSIPSLKTPAXT

SEQ ID NO: 52064 - protein, 27 aa, Artificial Sequence
  Cyclic GFR-binding peptide
  MOD_RES (1), (1): Xaa is C or S
XSEVVMDQYNKLVVNNASDLYLISIAS

SEQ ID NO: 52065 - protein, 30 aa, Artificial Sequence
  Cyclic GFR-binding peptide
  MOD_RES (29), (30): Xaa is C or S
VVMEYQKYVKPTRGVIFLISIPSLDQPVXX

SEQ ID NO: 52066 - protein, 23 aa, Artificial Sequence
  Cyclic GFR-binding peptide
VMNSLQEVKPTRGVYYVIPLPEL

SEQ ID NO: 52067 - protein, 34 aa, Artificial Sequence; identical to SEQ ID NO: 11048
  Cyclic GFR-binding peptide
  MOD_RES (32), (33): Xaa is C or S

SEQ ID NO: 52068 - protein, 24 aa, Artificial Sequence
  Cyclic GFR-binding peptide
VMNNSLQEIVNSSDDYYLVTLPEL

SEQ ID NO: 52069 - protein, 31 aa, Artificial Sequence; identical to SEQ ID NO: 11050
  Cyclic GFR-binding peptide

SEQ ID NO: 52070 - protein, 34 aa, Artificial Sequence
  Cyclic GFR-binding peptide
  MOD_RES (2), (4): Xaa is C or S
RXGXGEVVMENSLQEVVKDYEDYYVMPLPELETP

SEQ ID NO: 52071 - protein, 29 aa, Artificial Sequence
  Cyclic GFR-binding peptide
GEVVMENSLQEVVKDYEDYYVMPLPELET

SEQ ID NO: 52072 - protein, 22 aa, Artificial Sequence
  Cyclic GFR-binding peptide
NSLQEVKPTRGVYYVIPLPELD

SEQ ID NO: 52073 - protein, 33 aa, Artificial Sequence
  Cyclic GFR-binding peptide
  MOD_RES (27), (28): Xaa is C or S
DRYKKLVVNNASDFYLISIANLRTPVXXTPPTS

SEQ ID NO: 52074 - protein, 29 aa, Artificial Sequence
  Cyclic GFR-binding peptide
  MOD_RES (29), (29): Xaa is C or S
VMENSLQEVVKDYEDYYVMPLPELETPVX

SEQ ID NO: 52075 - protein, 31 aa, Artificial Sequence
  Cyclic GFR-binding peptide
  MOD_RES (26), (27): Xaa is C or S
NSLQEVVKENEDYYVMPLPELETPVXXAKPI

SEQ ID NO: 52076 - protein, 29 aa, Artificial Sequence
  Cyclic GFR-binding peptide
  MOD_RES (2), (2): Xaa is C or S
KXSKVVMNSLQEVKPTRGVYYVIPLPELD

SEQ ID NO: 52077 - protein, 28 aa, Artificial Sequence
  Cyclic GFR-binding peptide
  MOD_RES (1), (3): Xaa is C or S
XKXSKVVMEYQKYVKPTRGVIFLISIPS

SEQ ID NO: 52078 - protein, 38 aa, Artificial Sequence; identical to SEQ ID NO: 11055
  Cyclic GFR-binding peptide
  MOD_RES (32), (32): Xaa is C or S

SEQ ID NO: 52079 - protein, 27 aa, Artificial Sequence
  Cyclic GFR-binding peptide
  MOD_RES (26), (27): Xaa is C or S
NSLQEVKPTRGVYYVIPLPELDQPVXX

SEQ ID NO: 52080 - protein, 35 aa, Artificial Sequence; identical to SEQ ID NO: 11056
  Cyclic GFR-binding peptide
  MOD_RES (2), (34), (35): Xaa is C or S

SEQ ID NO: 52081 - protein, 30 aa, Artificial Sequence
  Cyclic GFR-binding peptide
  MOD_RES (29), (30): Xaa is C or S
VIMNSLQEVKPKRGVYYLITLPELAQPVXX

SEQ ID NO: 52082 - protein, 25 aa, Artificial Sequence
  Cyclic GFR-binding peptide
ENSLQEVVKDYEDYYLMTLPELETP

SEQ ID NO: 52083 - protein, 27 aa, Artificial Sequence
  Cyclic GFR-binding peptide
  MOD_RES (1), (1): Xaa is C or S
XSKVIMEYQKYIKPTKGIIFLISIPSL

SEQ ID NO: 52084 - protein, 32 aa, Artificial Sequence; identical to SEQ ID NO: 11057
  Cyclic GFR-binding peptide
  MOD_RES (32), (32): Xaa is C or S

SEQ ID NO: 52085 - protein, 33 aa, Artificial Sequence
  Cyclic GFR-binding peptide
  MOD_RES (27), (28): Xaa is C or S
ENSLQEVVKDYEDYYVMPLPELETPVXXAKPIS

SEQ ID NO: 52086 - protein, 39 aa, Artificial Sequence; identical to SEQ ID NO: 11061
  Cyclic GFR-binding peptide
  MOD_RES (1), (33), (34): Xaa is C or S

SEQ ID NO: 52087 - protein, 30 aa, Artificial Sequence
  Cyclic GFR-binding peptide
  MOD_RES (27), (28): Xaa is C or S
MEYQKYIKPTKGIIFLISIPSLDQSVXXPS

SEQ ID NO: 52088 - protein, 30 aa, Artificial Sequence
  Cyclic GFR-binding peptide
  MOD_RES (27), (28): Xaa is C or S
DRYKKLVVNNASDFYLISIANLRTPVXXTP

SEQ ID NO: 52089 - protein, 27 aa, Artificial Sequence
  Cyclic GFR-binding peptide
VVMDNSLQEVVKENEDYYLMTLPELET

SEQ ID NO: 52090 - protein, 29 aa, Artificial Sequence
  Cyclic GFR-binding peptide
  MOD_RES (2), (2): Xaa is C or S
GXSRVVMNNSLQEIVNSSDDYYVVPLPEL

SEQ ID NO: 52091 - protein, 34 aa, Artificial Sequence; identical to SEQ ID NO: 11063
  Cyclic GFR-binding peptide
  MOD_RES (1), (33), (34): Xaa is C or S

SEQ ID NO: 52092 - protein, 30 aa, Artificial Sequence
  Cyclic GFR-binding peptide
  MOD_RES (26), (27): Xaa is C or S
NSLQEVVKENEDYYVMPLPELETPVXXAKP

SEQ ID NO: 52093 - protein, 26 aa, Artificial Sequence
  Cyclic GFR-binding peptide
VIMNSLQEVKPKRGVYYLITLPELAQ

SEQ ID NO: 52094 - protein, 38 aa, Artificial Sequence; identical to SEQ ID NO: 11064
  Cyclic GFR-binding peptide
  MOD_RES (2), (4), (35), (36): Xaa is C or S

SEQ ID NO: 52095 - protein, 31 aa, Artificial Sequence
  Cyclic GFR-binding peptide
  MOD_RES (27), (28): Xaa is C or S
ENSLQEVVKDYEDYYVMPLPELETPVXXAKP

SEQ ID NO: 52096 - protein, 39 aa, Artificial Sequence; identical to SEQ ID NO: 11067
  Cyclic GFR-binding peptide
  MOD_RES (1), (33), (34): Xaa is C or S

SEQ ID NO: 52097 - protein, 36 aa, Artificial Sequence; identical to SEQ ID NO: 11068
  Cyclic GFR-binding peptide
  MOD_RES (1), (3), (35), (36): Xaa is C or S

SEQ ID NO: 52098 - protein, 28 aa, Artificial Sequence
  Cyclic GFR-binding peptide
  MOD_RES (2), (2): Xaa is C or S
KXSKVIMNSLQEIKPTKGIYYVIPLPEL

SEQ ID NO: 52099 - protein, 28 aa, Artificial Sequence
  Cyclic GFR-binding peptide
VMDRYKKLVVNNASDFYLISIANLRTPV

SEQ ID NO: 52100 - protein, 27 aa, Artificial Sequence
  Cyclic GFR-binding peptide
EVVMDRYKKLVVNNASDFYLISIANLR

SEQ ID NO: 52101 - protein, 29 aa, Artificial Sequence
  Cyclic GFR-binding peptide
  MOD_RES (1), (1): Xaa is C or S
XARVVMNEYQKYIVNSSDDIFLVSIPSLQ

SEQ ID NO: 52102 - protein, 37 aa, Artificial Sequence; identical to SEQ ID NO: 11072
  Cyclic GFR-binding peptide
  MOD_RES (32), (33): Xaa is C or S

SEQ ID NO: 52103 - protein, 34 aa, Artificial Sequence; identical to SEQ ID NO: 11073
  Cyclic GFR-binding peptide
  MOD_RES (1), (3): Xaa is C or S

SEQ ID NO: 52104 - protein, 25 aa, Artificial Sequence
  Cyclic GFR-binding peptide
NSLQEVVKDYEDYYLMTLPELETPV

SEQ ID NO: 52105 - protein, 24 aa, Artificial Sequence
  Cyclic GFR-binding peptide
VIMNSLQEVKPKRGVYYLITLPEL

SEQ ID NO: 52106 - protein, 25 aa, Artificial Sequence
  Cyclic GFR-binding peptide
VMDQYNKLVVNNASDLYLISIASLR

SEQ ID NO: 52107 - protein, 25 aa, Artificial Sequence
  Cyclic GFR-binding peptide
VMNEYQKYIVNSSDDIFLVSIPSLK

SEQ ID NO: 52108 - protein, 37 aa, Artificial Sequence; identical to SEQ ID NO: 11075
  Cyclic GFR-binding peptide
  MOD_RES (2), (4), (36): Xaa is C or S

SEQ ID NO: 52109 - protein, 25 aa, Artificial Sequence
  Cyclic GFR-binding peptide
MDNSLQEVVKENEDYYLMTLPELET

SEQ ID NO: 52110 - protein, 37 aa, Artificial Sequence; identical to SEQ ID NO: 11077
  Cyclic GFR-binding peptide
  MOD_RES (2), (34): Xaa is C or S

SEQ ID NO: 52111 - protein, 39 aa, Artificial Sequence; identical to SEQ ID NO: 11078
  Cyclic GFR-binding peptide
  MOD_RES (2), (33), (34): Xaa is C or S

SEQ ID NO: 52112 - protein, 29 aa, Artificial Sequence
  Cyclic GFR-binding peptide
SKVIMEYQKYIKPTKGIIFLISIPSLDQS

SEQ ID NO: 52113 - protein, 28 aa, Artificial Sequence
  Cyclic GFR-binding peptide
EVVMDNSLQEVVKENEDYYVMPLPELET

SEQ ID NO: 52114 - protein, 24 aa, Artificial Sequence
  Cyclic GFR-binding peptide
MDNSLQEVVNNASDYYLITLPELR

SEQ ID NO: 52115 - protein, 35 aa, Artificial Sequence
  Cyclic GFR-binding peptide
  MOD_RES (29), (29): Xaa is C or S
VMNEYQKYIVNSSDDIFLVSIPSLKTPAXTPKTVH

SEQ ID NO: 52116 - protein, 22 aa, Artificial Sequence
  Cyclic GFR-binding peptide
NSLQEVVKDYEDYYVMPLPELE

SEQ ID NO: 52117 - protein, 31 aa, Artificial Sequence
  Cyclic GFR-binding peptide
  MOD_RES (29), (30): Xaa is C or S
VMENSLQEVVKDYEDYYLMTLPELETPVXXA

SEQ ID NO: 52118 - protein, 30 aa, Artificial Sequence
  Cyclic GFR-binding peptide
  MOD_RES (1), (1): Xaa is C or S
XSRVVMNNSLQEIVNSSDDYYVVPLPELKT

SEQ ID NO: 52119 - protein, 37 aa, Artificial Sequence; identical to SEQ ID NO: 11082
  Cyclic GFR-binding peptide
  MOD_RES (2), (4), (36), (37): Xaa is C or S

SEQ ID NO: 52120 - protein, 28 aa, Artificial Sequence
  Cyclic GFR-binding peptide
  MOD_RES (1), (1): Xaa is C or S
XSEVVMDRYKKLVVNNASDFYLISIANL

SEQ ID NO: 52121 - protein, 35 aa, Artificial Sequence
  Cyclic GFR-binding peptide
  MOD_RES (30), (31): Xaa is C or S
VVMNNSLQEIVNSSDDYYLVTLPELKTPAXXPKPV

SEQ ID NO: 52122 - protein, 35 aa, Artificial Sequence; identical to SEQ ID NO: 11084
  Cyclic GFR-binding peptide
  MOD_RES (2), (34), (35): Xaa is C or S

SEQ ID NO: 52123 - protein, 38 aa, Artificial Sequence; identical to SEQ ID NO: 11085
  Cyclic GFR-binding peptide
  MOD_RES (1), (3), (35), (36): Xaa is C or S

SEQ ID NO: 52124 - protein, 31 aa, Artificial Sequence
  Cyclic GFR-binding peptide
  MOD_RES (2), (4): Xaa is C or S
RXGXGEVVMENSLQEVVKDYEDYYLMTLPEL

SEQ ID NO: 52125 - protein, 22 aa, Artificial Sequence
  Cyclic GFR-binding peptide
IMNSLQEVKPKRGVYYLITLPE

SEQ ID NO: 52126 - protein, 31 aa, Artificial Sequence
  Cyclic GFR-binding peptide
  MOD_RES (30), (31): Xaa is C or S
RVIMEYQKYVKPKRGVIFLISIPSLAQPVXX

SEQ ID NO: 52127 - protein, 31 aa, Artificial Sequence
  Cyclic GFR-binding peptide
  MOD_RES (28), (29): Xaa is C or S
IMNSLQEVKPKRGVYYLITLPELAQPVXXPA

SEQ ID NO: 52128 - protein, 29 aa, Artificial Sequence
  Cyclic GFR-binding peptide
AAAAAAAAANSLQEIVNSSDDYYLVTLPE

SEQ ID NO: 52129 - protein, 32 aa, Artificial Sequence
  Cyclic GFR-binding peptide
  MOD_RES (2), (4): Xaa is C or S
RXGXGEVVMDEYQKYVVKENEDIFLMSIPSLE

SEQ ID NO: 52130 - protein, 30 aa, Artificial Sequence
  Cyclic GFR-binding peptide
  MOD_RES (30), (30): Xaa is C or S
KVVMEYQKYVKPTRGVIFLISIPSLDQPVX

SEQ ID NO: 52131 - protein, 32 aa, Artificial Sequence
  Cyclic GFR-binding peptide
  MOD_RES (30), (31): Xaa is C or S
VVMNEYQKYIVNSSDDIFLVSIPSLKTPAXXP

SEQ ID NO: 52132 - protein, 28 aa, Artificial Sequence
  Cyclic GFR-binding peptide
VMNNSLQEIVNSSDDYYVVPLPELKTPA

SEQ ID NO: 52133 - protein, 39 aa, Artificial Sequence; identical to SEQ ID NO: 11095
  Cyclic GFR-binding peptide
  MOD_RES (1), (33), (34): Xaa is C or S

SEQ ID NO: 52134 - protein, 25 aa, Artificial Sequence
  Cyclic GFR-binding peptide
EEYQKYVVKDYEDIFLMSIPSLETP

SEQ ID NO: 52135 - protein, 28 aa, Artificial Sequence
  Cyclic GFR-binding peptide
  MOD_RES (1), (1): Xaa is C or S
XSRVVMNEYQKYIVNSSDDIFLVSIPSL

SEQ ID NO: 52136 - protein, 36 aa, Artificial Sequence; identical to SEQ ID NO: 11096
  Cyclic GFR-binding peptide
  MOD_RES (2), (4), (35), (36): Xaa is C or S

SEQ ID NO: 52137 - protein, 29 aa, Artificial Sequence
  Cyclic GFR-binding peptide
  MOD_RES (29), (29): Xaa is C or S
VMDNSLQEVVNNASDYYVIPLPELRTPVX

SEQ ID NO: 52138 - protein, 32 aa, Artificial Sequence
  Cyclic GFR-binding peptide
  MOD_RES (29), (30): Xaa is C or S
VMDQYNKLVVNNASDLYLISIASLRTPVXXTP

SEQ ID NO: 52139 - protein, 23 aa, Artificial Sequence
  Cyclic GFR-binding peptide
DEYQKYVVKENEDIFLMSIPSLE

SEQ ID NO: 52140 - protein, 31 aa, Artificial Sequence
  Cyclic GFR-binding peptide
  MOD_RES (1), (1): Xaa is C or S
XSEVVMDQYNKLVVNNASDLYLISIASLRTP

SEQ ID NO: 52141 - protein, 28 aa, Artificial Sequence
  Cyclic GFR-binding peptide
SRVIMEYQKYVKPKRGVIFLISIPSLAQ

SEQ ID NO: 52142 - protein, 32 aa, Artificial Sequence; identical to SEQ ID NO: 11098
  Cyclic GFR-binding peptide
  MOD_RES (32), (32): Xaa is C or S

SEQ ID NO: 52143 - protein, 25 aa, Artificial Sequence
  Cyclic GFR-binding peptide
EVVMDNSLQEVVNNASDYYVIPLPE

SEQ ID NO: 52144 - protein, 21 aa, Artificial Sequence
  Cyclic GFR-binding peptide
MEYQKYVKPKRGVIFLISIPS

SEQ ID NO: 52145 - protein, 30 aa, Artificial Sequence
  Cyclic GFR-binding peptide
  MOD_RES (29), (30): Xaa is C or S
VMNNSLQEIVNSSDDYYVVPLPELQTPAXX

SEQ ID NO: 52146 - protein, 33 aa, Artificial Sequence; identical to SEQ ID NO: 11101
  Cyclic GFR-binding peptide
  MOD_RES (32), (33): Xaa is C or S

SEQ ID NO: 52147 - protein, 34 aa, Artificial Sequence; identical to SEQ ID NO: 11102
  Cyclic GFR-binding peptide
  MOD_RES (31), (32): Xaa is C or S

SEQ ID NO: 52148 - protein, 37 aa, Artificial Sequence; identical to SEQ ID NO: 11103
  Cyclic GFR-binding peptide
  MOD_RES (2), (4), (36), (37): Xaa is C or S

SEQ ID NO: 52149 - protein, 31 aa, Artificial Sequence
  Cyclic GFR-binding peptide
  MOD_RES (27), (28): Xaa is C or S
EEYQKYVVKDYEDIFLMSIPSLETPVXXAKP

SEQ ID NO: 52150 - protein, 30 aa, Artificial Sequence
  Cyclic GFR-binding peptide
  MOD_RES (28), (29): Xaa is C or S
MNEYQKYIVNSSDDIFLVSIPSLQTPAXXP

SEQ ID NO: 52151 - protein, 31 aa, Artificial Sequence
  Cyclic GFR-binding peptide
  MOD_RES (30), (31): Xaa is C or S
VVMENSLQEVVKDYEDYYLMTLPELETPVXX

SEQ ID NO: 52152 - protein, 30 aa, Artificial Sequence; identical to SEQ ID NO: 2090
  Cyclic GFR-binding peptide

SEQ ID NO: 52153 - protein, 38 aa, Artificial Sequence; identical to SEQ ID NO: 11106
  Cyclic GFR-binding peptide
  MOD_RES (1), (3), (35), (36): Xaa is C or S

SEQ ID NO: 52154 - protein, 30 aa, Artificial Sequence
  Cyclic GFR-binding peptide
  MOD_RES (1), (2): Xaa is C or S
XXVPTRLEPLTILYYDSANNVVEQLSNDMV

SEQ ID NO: 52155 - protein, 36 aa, Artificial Sequence; identical to SEQ ID NO: 11107
  Cyclic GFR-binding peptide
  MOD_RES (1), (33), (35): Xaa is C or S

SEQ ID NO: 52156 - protein, 32 aa, Artificial Sequence
  Cyclic GFR-binding peptide
  MOD_RES (6), (7): Xaa is C or S
YVPKPXXAPTKLEPLPVVYYDDSSNVIEQLSN

SEQ ID NO: 52157 - protein, 35 aa, Artificial Sequence; identical to SEQ ID NO: 11108
  Cyclic GFR-binding peptide
  MOD_RES (2), (3), (35): Xaa is C or S

SEQ ID NO: 52158 - protein, 34 aa, Artificial Sequence; identical to SEQ ID NO: 11109
  Cyclic GFR-binding peptide
  MOD_RES (1), (33): Xaa is C or S

SEQ ID NO: 52159 - protein, 25 aa, Artificial Sequence
  Cyclic GFR-binding peptide
VPTRLNAISILYFDSANNVVLKKYR

SEQ ID NO: 52160 - protein, 25 aa, Artificial Sequence
  Cyclic GFR-binding peptide
APTKLSPISVLFIDDSSNVIYKQYE

SEQ ID NO: 52161 - protein, 28 aa, Artificial Sequence
  Cyclic GFR-binding peptide
  MOD_RES (1), (2): Xaa is C or S
XXVPTRLEPLPIVYYDSANNVVEQLSND

SEQ ID NO: 52162 - protein, 32 aa, Artificial Sequence
  Cyclic GFR-binding peptide
  MOD_RES (6), (7): Xaa is C or S
ASASPXXVPQDLEPLPIVYYVGRTPKVEQLSN

SEQ ID NO: 52163 - protein, 40 aa, Artificial Sequence; identical to SEQ ID NO: 11110
  Cyclic GFR-binding peptide
  MOD_RES (6), (7), (39): Xaa is C or S

SEQ ID NO: 52164 - protein, 27 aa, Artificial Sequence
  Cyclic GFR-binding peptide
  MOD_RES (2), (2): Xaa is C or S
TXAPTKLEPLTVLYYDDSSNVIEQLSN

SEQ ID NO: 52165 - protein, 26 aa, Artificial Sequence
  Cyclic GFR-binding peptide
TQLEPLTVLYYDDSSNVIEQLSNNMV

SEQ ID NO: 52166 - protein, 35 aa, Artificial Sequence; identical to SEQ ID NO: 11111
  Cyclic GFR-binding peptide
  MOD_RES (2), (3), (35): Xaa is C or S

SEQ ID NO: 52167 - protein, 34 aa, Artificial Sequence
  Cyclic GFR-binding peptide
  MOD_RES (6), (7): Xaa is C or S
ASASPXXVPQDLEPLPIVYYVGRTPKVEQLSNMV

SEQ ID NO: 52168 - protein, 31 aa, Artificial Sequence
  Cyclic GFR-binding peptide
  MOD_RES (2), (3): Xaa is C or S
PXXVPQDLSPISILFIVGRTPKVYKQYEMVV

SEQ ID NO: 52169 - protein, 29 aa, Artificial Sequence
  Cyclic GFR-binding peptide
PTQLSPISVLFIDDSSNVIYKQYENMVVR

SEQ ID NO: 52170 - protein, 32 aa, Artificial Sequence
  Cyclic GFR-binding peptide
  MOD_RES (6), (7): Xaa is C or S
STPPTXXVPTRLSAISILYLDSANNVVLKNYQ

SEQ ID NO: 52171 - protein, 36 aa, Artificial Sequence
  Cyclic GFR-binding peptide
  MOD_RES (6), (7): Xaa is C or S
ASAAPXXVPQALSPISILFIVGRKPKVYKQYEMIVR

SEQ ID NO: 52172 - protein, 33 aa, Artificial Sequence
  Cyclic GFR-binding peptide
  MOD_RES (6), (7): Xaa is C or S
ASASPXXVSQDLEPLPIVYYIGKTPKIEQLSNM

SEQ ID NO: 52173 - protein, 35 aa, Artificial Sequence; identical to SEQ ID NO: 11114
  Cyclic GFR-binding peptide
  MOD_RES (2), (3), (35): Xaa is C or S

SEQ ID NO: 52174 - protein, 35 aa, Artificial Sequence; identical to SEQ ID NO: 11115
  Cyclic GFR-binding peptide
  MOD_RES (1), (2), (34): Xaa is C or S

SEQ ID NO: 52175 - protein, 27 aa, Artificial Sequence
  Cyclic GFR-binding peptide
  MOD_RES (1), (1): Xaa is C or S
XVPTRLNAISILYFDSANNVVLKKYRD

SEQ ID NO: 52176 - protein, 30 aa, Artificial Sequence
  Cyclic GFR-binding peptide
  MOD_RES (3), (4): Xaa is C or S
SPXXVSQDLEPLPIVYYIGKTPKIEQLSNM

SEQ ID NO: 52177 - protein, 27 aa, Artificial Sequence
  Cyclic GFR-binding peptide
ELSPISMLFIDENEKVVYKQYEDMVVE

SEQ ID NO: 52178 - protein, 37 aa, Artificial Sequence; identical to SEQ ID NO: 11120
  Cyclic GFR-binding peptide
  MOD_RES (5), (6): Xaa is C or S

SEQ ID NO: 52179 - protein, 22 aa, Artificial Sequence
  Cyclic GFR-binding peptide
LEPLPVVYYDDSSNVIEQLSNN

SEQ ID NO: 52180 - protein, 27 aa, Artificial Sequence
  Cyclic GFR-binding peptide
TELSPISMLFIDENEKVVYKQYEDMVV

SEQ ID NO: 52181 - protein, 35 aa, Artificial Sequence; identical to SEQ ID NO: 11122
  Cyclic GFR-binding peptide
  MOD_RES (4), (5): Xaa is C or S

SEQ ID NO: 52182 - protein, 33 aa, Artificial Sequence
  Cyclic GFR-binding peptide
  MOD_RES (30), (32): Xaa is C or S
TKLEPLPVVYYDDSSNVIEQLSNNMVVRSXGXH

SEQ ID NO: 52183 - protein, 25 aa, Artificial Sequence
  Cyclic GFR-binding peptide
PTELEPLPMVYYDENEKVVEQLSND

SEQ ID NO: 52184 - protein, 34 aa, Artificial Sequence
  Cyclic GFR-binding peptide
  MOD_RES (31), (33): Xaa is C or S
PTRLSAISILYLDSANNVVLKNYQDMVVESXGXR

SEQ ID NO: 52185 - protein, 33 aa, Artificial Sequence; identical to SEQ ID NO: 11125
  Cyclic GFR-binding peptide
  MOD_RES (32), (32): Xaa is C or S

SEQ ID NO: 52186 - protein, 37 aa, Artificial Sequence; identical to SEQ ID NO: 11126
  Cyclic GFR-binding peptide
  MOD_RES (4), (5), (37): Xaa is C or S

SEQ ID NO: 52187 - protein, 24 aa, Artificial Sequence
  Cyclic GFR-binding peptide
PTKLEPLTVLYYDDSSNVIEQLSN

SEQ ID NO: 52188 - protein, 30 aa, Artificial Sequence
  Cyclic GFR-binding peptide
  MOD_RES (30), (30): Xaa is C or S
SQDLEPLPIVYYIGKTPKIEQLSNMIVKSX

SEQ ID NO: 52189 - protein, 26 aa, Artificial Sequence
  Cyclic GFR-binding peptide
EPLTILYYDSANNVVEQLSNDMVVES

SEQ ID NO: 52190 - protein, 25 aa, Artificial Sequence
  Cyclic GFR-binding peptide
QALSPISILFIVGRKPKVYKQYEMI

SEQ ID NO: 52191 - protein, 41 aa, Artificial Sequence; identical to SEQ ID NO: 11127
  Cyclic GFR-binding peptide
  MOD_RES (6), (7), (39), (41): Xaa is C or S

SEQ ID NO: 52192 - protein, 20 aa, Artificial Sequence
  Cyclic GFR-binding peptide
SPISILFIVGRKPKVYKQYE

SEQ ID NO: 52193 - protein, 29 aa, Artificial Sequence
  Cyclic GFR-binding peptide
  MOD_RES (27), (29): Xaa is C or S
SPISMLFIDEYDKVVYKQYEEMVVEGXGX

SEQ ID NO: 52194 - protein, 35 aa, Artificial Sequence
  Cyclic GFR-binding peptide
  MOD_RES (5), (6): Xaa is C or S
TPPTXXVPTRLSAISILYLDSANNVVLKNYQDMVV

SEQ ID NO: 52195 - protein, 30 aa, Artificial Sequence
  Cyclic GFR-binding peptide
  MOD_RES (3), (4): Xaa is C or S
KAXXVPTELSPISMLFIDENEKVVYKQYED

SEQ ID NO: 52196 - protein, 40 aa, Artificial Sequence; identical to SEQ ID NO: 11130
  Cyclic GFR-binding peptide
  MOD_RES (6), (7), (38), (40): Xaa is C or S

SEQ ID NO: 52197 - protein, 35 aa, Artificial Sequence; identical to SEQ ID NO: 11131
  Cyclic GFR-binding peptide
  MOD_RES (32), (34): Xaa is C or S

SEQ ID NO: 52198 - protein, 25 aa, Artificial Sequence
  Cyclic GFR-binding peptide
KLEPLTVLYYDDSSNVIEQLSNNMV

SEQ ID NO: 52199 - protein, 34 aa, Artificial Sequence
  Cyclic GFR-binding peptide
  MOD_RES (6), (7): Xaa is C or S
SIPKAXXVPTELEPLTMLYYDEYDKVVEQLSNEM

SEQ ID NO: 52200 - protein, 25 aa, Artificial Sequence
  Cyclic GFR-binding peptide
LSPISVLFIDDSSNVIYKQYENMVV

SEQ ID NO: 52201 - protein, 31 aa, Artificial Sequence; identical to SEQ ID NO: 11134
  Cyclic GFR-binding peptide

SEQ ID NO: 52202 - protein, 24 aa, Artificial Sequence
  Cyclic GFR-binding peptide
PTELSPISMLFIDEYDKVVYKQYE

SEQ ID NO: 52203 - protein, 32 aa, Artificial Sequence; identical to SEQ ID NO: 11136
  Cyclic GFR-binding peptide
  MOD_RES (32), (32): Xaa is C or S

SEQ ID NO: 52204 - protein, 24 aa, Artificial Sequence
  Cyclic GFR-binding peptide
ELEPLPMVYYDENEKVVEQLSNDM

SEQ ID NO: 52205 - protein, 30 aa, Artificial Sequence
  Cyclic GFR-binding peptide
  MOD_RES (1), (1): Xaa is C or S
XVPTELSPISMLFIDEYDKVVYKQYEEMVV

SEQ ID NO: 52206 - protein, 27 aa, Artificial Sequence
  Cyclic GFR-binding peptide
  MOD_RES (1), (2): Xaa is C or S
XXAPTQLSPISVLFIDDSSNVIYKQYE

SEQ ID NO: 52207 - protein, 27 aa, Artificial Sequence
  Cyclic GFR-binding peptide
  MOD_RES (27), (27): Xaa is C or S
LSPISILFIVGRKPKVYKQYEMIVRSX

SEQ ID NO: 52208 - protein, 35 aa, Artificial Sequence; identical to SEQ ID NO: 11138
  Cyclic GFR-binding peptide
  MOD_RES (4), (5): Xaa is C or S

SEQ ID NO: 52209 - protein, 27 aa, Artificial Sequence
  Cyclic GFR-binding peptide
PTQLEPLPVVYYDDSSNVIEQLSNNMV

SEQ ID NO: 52210 - protein, 28 aa, Artificial Sequence
  Cyclic GFR-binding peptide
  MOD_RES (3), (3): Xaa is C or S
PTXAPTKLEPLTVLYYDDSSNVIEQLSN

SEQ ID NO: 52211 - protein, 25 aa, Artificial Sequence
  Cyclic GFR-binding peptide
VPTELEPLPMVYYDENEKVVEQLSN

SEQ ID NO: 52212 - protein, 36 aa, Artificial Sequence; identical to SEQ ID NO: 11142
  Cyclic GFR-binding peptide
  MOD_RES (3), (4), (36): Xaa is C or S

SEQ ID NO: 52213 - protein, 30 aa, Artificial Sequence
  Cyclic GFR-binding peptide
  MOD_RES (1), (2): Xaa is C or S
XXVPTRLSAISILYLDSANNVVLKNYQDMV

SEQ ID NO: 52214 - protein, 27 aa, Artificial Sequence
  Cyclic GFR-binding peptide
DLEPLPIVYYIGKTPKIEQLSNMIVKS

SEQ ID NO: 52215 - protein, 21 aa, Artificial Sequence
  Cyclic GFR-binding peptide
LEPLPIVYYVGRTPKVEQLSN

SEQ ID NO: 52216 - protein, 30 aa, Artificial Sequence
  Cyclic GFR-binding peptide
  MOD_RES (3), (4): Xaa is C or S
PTXXVPTRLEPLPIVYYDSANNVVEQLSND

SEQ ID NO: 52217 - protein, 27 aa, Artificial Sequence
  Cyclic GFR-binding peptide
RLEPLPIVYYDSANNVVEQLSNDMVVE

SEQ ID NO: 52218 - protein, 31 aa, Artificial Sequence
  Cyclic GFR-binding peptide
  MOD_RES (29), (31): Xaa is C or S
QLEPLPVVYYDDSSNVIEQLSNNMVVRAXGX

SEQ ID NO: 52219 - protein, 27 aa, Artificial Sequence
  Cyclic GFR-binding peptide
TKLSPISVLFIDDSSNVIYKQYENMVV

SEQ ID NO: 52220 - protein, 41 aa, Artificial Sequence; identical to SEQ ID NO: 11146
  Cyclic GFR-binding peptide
  MOD_RES (5), (6), (38), (40): Xaa is C or S

SEQ ID NO: 52221 - protein, 32 aa, Artificial Sequence
  Cyclic GFR-binding peptide
  MOD_RES (3), (3): Xaa is C or S
PTXAPTKLEPLPVVYYDDSSNVIEQLSNNMVV

SEQ ID NO: 52222 - protein, 29 aa, Artificial Sequence
  Cyclic GFR-binding peptide
PQDLSPISILFIVGRTPKVYKQYEMVVKS

SEQ ID NO: 52223 - protein, 34 aa, Artificial Sequence
  Cyclic GFR-binding peptide
  MOD_RES (4), (5): Xaa is C or S
PKPXXAPTKLSPISVLFIDDSSNVIYKQYENMVV

SEQ ID NO: 52224 - protein, 32 aa, Artificial Sequence
  Cyclic GFR-binding peptide
  MOD_RES (30), (32): Xaa is C or S
TRLSAISILYLDSANNVVLKNYQDMVVESXGX

SEQ ID NO: 52225 - protein, 32 aa, Artificial Sequence; identical to SEQ ID NO: 11148
  Cyclic GFR-binding peptide
  MOD_RES (1), (2): Xaa is C or S

SEQ ID NO: 52226 - protein, 30 aa, Artificial Sequence
  Cyclic GFR-binding peptide
  MOD_RES (29), (29): Xaa is C or S
RLEPLTILYYDSANNVVEQLSNDMVVESXG

SEQ ID NO: 52227 - protein, 40 aa, Artificial Sequence; identical to SEQ ID NO: 11149
  Cyclic GFR-binding peptide
  MOD_RES (5), (6), (37), (39): Xaa is C or S

SEQ ID NO: 52228 - protein, 30 aa, Artificial Sequence
  Cyclic GFR-binding peptide
  MOD_RES (28), (30): Xaa is C or S
LNAISILYFDSANNVVLKKYRDMVVESXGX

SEQ ID NO: 52229 - protein, 30 aa, Artificial Sequence
  Cyclic GFR-binding peptide
  MOD_RES (4), (5): Xaa is C or S
PPTXXVPTRLEPLTILYYDSANNVVEQLSN

SEQ ID NO: 52230 - protein, 32 aa, Artificial Sequence; identical to SEQ ID NO: 11152
  Cyclic GFR-binding peptide
  MOD_RES (1), (1): Xaa is C or S

SEQ ID NO: 52231 - protein, 39 aa, Artificial Sequence; identical to SEQ ID NO: 11153
  Cyclic GFR-binding peptide
  MOD_RES (4), (5), (37), (39): Xaa is C or S

SEQ ID NO: 52232 - protein, 26 aa, Artificial Sequence
  Cyclic GFR-binding peptide
  MOD_RES (1), (1): Xaa is C or S
XAPTQLEPLPVVYYDDSSNVIEQLSN

SEQ ID NO: 52233 - protein, 32 aa, Artificial Sequence
  Cyclic GFR-binding peptide
  MOD_RES (6), (7): Xaa is C or S
SIPKAXXVPTELEPLPMVYYDEYDKVVEQLSN

SEQ ID NO: 52234 - protein, 32 aa, Artificial Sequence
  Cyclic GFR-binding peptide
  MOD_RES (4), (5): Xaa is C or S
ASPXXVPQDLEPLPIVYYVGRTPKVEQLSNMV

SEQ ID NO: 52235 - protein, 25 aa, Artificial Sequence
  Cyclic GFR-binding peptide
TKLEPLTVLYYDDSSNVIEQLSNNM

SEQ ID NO: 52236 - protein, 33 aa, Artificial Sequence
  Cyclic GFR-binding peptide
  MOD_RES (31), (33): Xaa is C or S
PTRLEPLTILYYDSANNVVEQLSNDMVVESXGX

SEQ ID NO: 52237 - protein, 31 aa, Artificial Sequence
  Cyclic GFR-binding peptide
  MOD_RES (2), (3): Xaa is C or S
PXXVPQDLEPLPIVYYVGRTPKVEQLSNMVV

SEQ ID NO: 52238 - protein, 31 aa, Artificial Sequence; identical to SEQ ID NO: 11156
  Cyclic GFR-binding peptide
  MOD_RES (1), (1): Xaa is C or S

SEQ ID NO: 52239 - protein, 32 aa, Artificial Sequence; identical to SEQ ID NO: 11158
  Cyclic GFR-binding peptide
  MOD_RES (1), (2): Xaa is C or S

SEQ ID NO: 52240 - protein, 29 aa, Artificial Sequence
  Cyclic GFR-binding peptide
VPTRLEPLPIVYYDSANNVVEQLSNDMVV

SEQ ID NO: 52241 - protein, 30 aa, Artificial Sequence
  Cyclic GFR-binding peptide
  MOD_RES (1), (1): Xaa is C or S
XVPQDLEPLPIVYYVGRTPKVEQLSNMVVK

SEQ ID NO: 52242 - protein, 31 aa, Artificial Sequence
  Cyclic GFR-binding peptide
  MOD_RES (3), (4): Xaa is C or S
PTXXVPTRLEPLTILYYDSANNVVEQLSNDM

SEQ ID NO: 52243 - protein, 23 aa, Artificial Sequence
  Cyclic GFR-binding peptide
QLEPLTVLYYDDSSNVIEQLSNN

SEQ ID NO: 52244 - protein, 34 aa, Artificial Sequence; identical to SEQ ID NO: 11163
  Cyclic GFR-binding peptide
  MOD_RES (4), (4): Xaa is C or S

SEQ ID NO: 52245 - protein, 29 aa, Artificial Sequence
  Cyclic GFR-binding peptide
EPLTMLYYDEYDKVVEQLSNAAAAAAAAA

SEQ ID NO: 52246 - protein, 38 aa, Artificial Sequence; identical to SEQ ID NO: 11170
  Cyclic GFR-binding peptide
  MOD_RES (5), (6), (38): Xaa is C or S

SEQ ID NO: 52247 - protein, 25 aa, Artificial Sequence
  Cyclic GFR-binding peptide
PTKLSPISVLFIDDSSNVIYKQYEN

SEQ ID NO: 52248 - protein, 28 aa, Artificial Sequence
  Cyclic GFR-binding peptide
  MOD_RES (27), (27): Xaa is C or S
EPLPVVYYDDSSNVIEQLSNNMVVRSXG

SEQ ID NO: 52249 - protein, 30 aa, Artificial Sequence
  Cyclic GFR-binding peptide
  MOD_RES (1), (2): Xaa is C or S
XXVSQDLSPISILFIIGKTPKIYKQYEMIV

SEQ ID NO: 52250 - protein, 39 aa, Artificial Sequence; identical to SEQ ID NO: 11174
  Cyclic GFR-binding peptide
  MOD_RES (6), (38): Xaa is C or S

SEQ ID NO: 52251 - protein, 33 aa, Artificial Sequence
  Cyclic GFR-binding peptide
  MOD_RES (6), (7): Xaa is C or S
ASASPXXVPQDLEPLPIVYYVGRTPKVEQLSNM

SEQ ID NO: 52252 - protein, 34 aa, Artificial Sequence
  Cyclic GFR-binding peptide
  MOD_RES (4), (5): Xaa is C or S
PPTXXVPTRLEPLTILYYDSANNVVEQLSNDMVV

SEQ ID NO: 52253 - protein, 32 aa, Artificial Sequence
  Cyclic GFR-binding peptide
  MOD_RES (7), (7): Xaa is C or S
HVTKPTXAPTKLSPISVLFIDDSSNVIYKQYE

SEQ ID NO: 52254 - protein, 30 aa, Artificial Sequence
  Cyclic GFR-binding peptide
  MOD_RES (3), (4): Xaa is C or S
APXXVPQALEPLTILYYVGRKPKVEQLSNM

SEQ ID NO: 52255 - protein, 28 aa, Artificial Sequence
  Cyclic GFR-binding peptide
ELEPLPMVYYDEYDKVVEQLSNEMVVEG

SEQ ID NO: 52256 - protein, 30 aa, Artificial Sequence
  Cyclic GFR-binding peptide
  MOD_RES (30), (30): Xaa is C or S
TRLNAISILYFDSANNVVLKKYRDMVVESX

SEQ ID NO: 52257 - protein, 35 aa, Artificial Sequence; identical to SEQ ID NO: 11177
  Cyclic GFR-binding peptide
  MOD_RES (1), (2), (33), (35): Xaa is C or S

SEQ ID NO: 52258 - protein, 38 aa, Artificial Sequence; identical to SEQ ID NO: 11178
  Cyclic GFR-binding peptide
  MOD_RES (2), (3), (35), (37): Xaa is C or S

SEQ ID NO: 52259 - protein, 30 aa, Artificial Sequence
  Cyclic GFR-binding peptide
  MOD_RES (1), (2): Xaa is C or S
XXVPTELEPLPMVYYDEYDKVVEQLSNEMV

SEQ ID NO: 52260 - protein, 34 aa, Artificial Sequence; identical to SEQ ID NO: 11180
  Cyclic GFR-binding peptide
  MOD_RES (2), (3): Xaa is C or S

SEQ ID NO: 52261 - protein, 40 aa, Artificial Sequence; identical to SEQ ID NO: 11181
  Cyclic GFR-binding peptide
  MOD_RES (6), (7), (39): Xaa is C or S

SEQ ID NO: 52262 - protein, 32 aa, Artificial Sequence
  Cyclic GFR-binding peptide
  MOD_RES (4), (5): Xaa is C or S
ASPXXVSQDLEPLPIVYYIGKTPKIEQLSNMI

SEQ ID NO: 52263 - protein, 33 aa, Artificial Sequence
  Cyclic GFR-binding peptide
  MOD_RES (3), (4): Xaa is C or S
SPXXVSQDLEPLPIVYYIGKTPKIEQLSNMIVK

SEQ ID NO: 52264 - protein, 29 aa, Artificial Sequence
  Cyclic GFR-binding peptide
  MOD_RES (28), (28): Xaa is C or S
LEPLTMLYYDENEKVVEQLSNDMVVEGXG

SEQ ID NO: 52265 - protein, 34 aa, Artificial Sequence; identical to SEQ ID NO: 11183
  Cyclic GFR-binding peptide
  MOD_RES (32), (34): Xaa is C or S

SEQ ID NO: 52266 - protein, 30 aa, Artificial Sequence
  Cyclic GFR-binding peptide
  MOD_RES (30), (30): Xaa is C or S
TRLEPLPIVYYDSANNVVEQLSNDMVVESX

SEQ ID NO: 52267 - protein, 22 aa, Artificial Sequence
  Cyclic GFR-binding peptide
SPISMLFIDEYDKVVYKQYEEM

SEQ ID NO: 52268 - protein, 30 aa, Artificial Sequence; identical to SEQ ID NO: 11185
  Cyclic GFR-binding peptide

SEQ ID NO: 52269 - protein, 37 aa, Artificial Sequence; identical to SEQ ID NO: 11187
  Cyclic GFR-binding peptide
  MOD_RES (3), (4), (35), (37): Xaa is C or S

SEQ ID NO: 52270 - protein, 26 aa, Artificial Sequence
  Cyclic GFR-binding peptide
RLEPLPIVYYDSANNVVEQLSNDMVV

SEQ ID NO: 52271 - protein, 24 aa, Artificial Sequence
  Cyclic GFR-binding peptide
TELEPLPMVYYDENEKVVEQLSND

SEQ ID NO: 52272 - protein, 38 aa, Artificial Sequence; identical to SEQ ID NO: 11190
  Cyclic GFR-binding peptide
  MOD_RES (2), (3), (35), (37): Xaa is C or S

SEQ ID NO: 52273 - protein, 32 aa, Artificial Sequence
  Cyclic GFR-binding peptide
  MOD_RES (30), (32): Xaa is C or S
TKLEPLTVLYYDDSSNVIEQLSNNMVVRSXGX

SEQ ID NO: 52274 - protein, 24 aa, Artificial Sequence
  Cyclic GFR-binding peptide
EPLTMLYYDENEKVVEQLSNDMVV

SEQ ID NO: 52275 - protein, 31 aa, Artificial Sequence; identical to SEQ ID NO: 11193
  Cyclic GFR-binding peptide
  MOD_RES (1), (1): Xaa is C or S

SEQ ID NO: 52276 - protein, 20 aa, Artificial Sequence
  Cyclic GFR-binding peptide
NAISILYFDSANNVVLKKYR

SEQ ID NO: 52277 - protein, 22 aa, Artificial Sequence
  Cyclic GFR-binding peptide
LEPLPMVYYDENEKVVEQLSND

SEQ ID NO: 52278 - protein, 41 aa, Artificial Sequence; identical to SEQ ID NO: 11197
  Cyclic GFR-binding peptide
  MOD_RES (6), (7), (38), (40): Xaa is C or S

SEQ ID NO: 52279 - protein, 37 aa, Artificial Sequence; identical to SEQ ID NO: 11198
  Cyclic GFR-binding peptide
  MOD_RES (6), (7): Xaa is C or S

SEQ ID NO: 52280 - protein, 33 aa, Artificial Sequence
  Cyclic GFR-binding peptide
  MOD_RES (5), (6): Xaa is C or S
VPKPXXAPTKLEPLPVVYYDDSSNVIEQLSNNM

SEQ ID NO: 52281 - protein, 36 aa, Artificial Sequence; identical to SEQ ID NO: 11199
  Cyclic GFR-binding peptide
  MOD_RES (4), (5): Xaa is C or S

SEQ ID NO: 52282 - protein, 31 aa, Artificial Sequence
  Cyclic GFR-binding peptide
  MOD_RES (3), (4): Xaa is C or S
SPXXVPQDLSPISILFIVGRTPKVYKQYEMV

SEQ ID NO: 52283 - protein, 31 aa, Artificial Sequence; identical to SEQ ID NO: 11202
  Cyclic GFR-binding peptide
  MOD_RES (31), (31): Xaa is C or S

SEQ ID NO: 52284 - protein, 28 aa, Artificial Sequence
  Cyclic GFR-binding peptide
TQLSPISVLFIDDSSNVIYKQYENMVVR

SEQ ID NO: 52285 - protein, 28 aa, Artificial Sequence
  Cyclic GFR-binding peptide
  MOD_RES (2), (3): Xaa is C or S
PXXVSQDLSPISILFIIGKTPKIYKQYE

SEQ ID NO: 52286 - protein, 34 aa, Artificial Sequence; identical to SEQ ID NO: 11204
  Cyclic GFR-binding peptide
  MOD_RES (32), (34): Xaa is C or S

SEQ ID NO: 52287 - protein, 28 aa, Artificial Sequence
  Cyclic GFR-binding peptide
TRLSAISILYLDSANNVVLKNYQDMVVE

SEQ ID NO: 52288 - protein, 33 aa, Artificial Sequence
  Cyclic GFR-binding peptide
  MOD_RES (4), (5): Xaa is C or S
PKPXXAPTQLEPLTVLYYDDSSNVIEQLSNNMV

SEQ ID NO: 52289 - protein, 35 aa, Artificial Sequence
  Cyclic GFR-binding peptide
  MOD_RES (6), (7): Xaa is C or S
YVPKPXXAPTKLEPLTVLYYDDSSNVIEQLSNNMV

SEQ ID NO: 52290 - protein, 26 aa, Artificial Sequence
  Cyclic GFR-binding peptide
PTKLSPISVLFIDDSSNVIYKQYENM

SEQ ID NO: 52291 - protein, 29 aa, Artificial Sequence
  Cyclic GFR-binding peptide
VPQALEPLTILYYVGRKPKVEQLSNMIVR

SEQ ID NO: 52292 - protein, 28 aa, Artificial Sequence
  Cyclic GFR-binding peptide
ELEPLPMVYYDENEKVVEQLSNDMVVEG

SEQ ID NO: 52293 - protein, 30 aa, Artificial Sequence
  Cyclic GFR-binding peptide
  MOD_RES (1), (2): Xaa is C or S
XXVPTELSPISMLFIDEYDKVVYKQYEEMV

SEQ ID NO: 52294 - protein, 34 aa, Artificial Sequence; identical to SEQ ID NO: 11211
  Cyclic GFR-binding peptide
  MOD_RES (2), (3): Xaa is C or S

SEQ ID NO: 52295 - protein, 41 aa, Artificial Sequence; identical to SEQ ID NO: 11213
  Cyclic GFR-binding peptide
  MOD_RES (5), (6), (38), (40): Xaa is C or S

SEQ ID NO: 52296 - protein, 31 aa, Artificial Sequence
  Cyclic GFR-binding peptide
  MOD_RES (1), (2): Xaa is C or S
XXAPTQLSPISVLFIDDSSNVIYKQYENMVV

SEQ ID NO: 52297 - protein, 30 aa, Artificial Sequence
  Cyclic GFR-binding peptide
  MOD_RES (3), (4): Xaa is C or S
SPXXVPQDLEPLPIVYYVGRTPKVEQLSNM

SEQ ID NO: 52298 - protein, 23 aa, Artificial Sequence
  Cyclic GFR-binding peptide
EPLPIVYYDSANNVVEQLSNDMV

SEQ ID NO: 52299 - protein, 29 aa, Artificial Sequence
  Cyclic GFR-binding peptide
VPTRLNAISILYFDSANNVVLKKYRDMVV

SEQ ID NO: 52300 - protein, 28 aa, Artificial Sequence
  Cyclic GFR-binding peptide
QDLSPISILFIVGRTPKVYKQYEMVVKS

SEQ ID NO: 52301 - protein, 33 aa, Artificial Sequence; identical to SEQ ID NO: 11214
  Cyclic GFR-binding peptide
  MOD_RES (1), (33): Xaa is C or S

SEQ ID NO: 52302 - protein, 35 aa, Artificial Sequence; identical to SEQ ID NO: 11215
  Cyclic GFR-binding peptide
  MOD_RES (2), (3), (35): Xaa is C or S

SEQ ID NO: 52303 - protein, 37 aa, Artificial Sequence; identical to SEQ ID NO: 11216
  Cyclic GFR-binding peptide
  MOD_RES (5), (6): Xaa is C or S

SEQ ID NO: 52304 - protein, 31 aa, Artificial Sequence
  Cyclic GFR-binding peptide
  MOD_RES (3), (4): Xaa is C or S
SPXXVSQDLSPISILFIIGKTPKIYKQYEMI

SEQ ID NO: 52305 - protein, 28 aa, Artificial Sequence
  Cyclic GFR-binding peptide
VPTELSPISMLFIDENEKVVYKQYEDMV

SEQ ID NO: 52306 - protein, 38 aa, Artificial Sequence; identical to SEQ ID NO: 11217
  Cyclic GFR-binding peptide
  MOD_RES (5), (6), (38): Xaa is C or S

SEQ ID NO: 52307 - protein, 26 aa, Artificial Sequence
  Cyclic GFR-binding peptide
LEPLPIVYYDSANNVVEQLSNDMVVE

SEQ ID NO: 52308 - protein, 31 aa, Artificial Sequence
  Cyclic GFR-binding peptide
  MOD_RES (29), (31): Xaa is C or S
QLSPISVLFIDDSSNVIYKQYENMVVRAXGX

SEQ ID NO: 52309 - protein, 37 aa, Artificial Sequence; identical to SEQ ID NO: 11218
  Cyclic GFR-binding peptide
  MOD_RES (3), (4), (35), (37): Xaa is C or S

SEQ ID NO: 52310 - protein, 35 aa, Artificial Sequence; identical to SEQ ID NO: 11219
  Cyclic GFR-binding peptide
  MOD_RES (3), (4), (35): Xaa is C or S

SEQ ID NO: 52311 - protein, 33 aa, Artificial Sequence
  Cyclic GFR-binding peptide
  MOD_RES (5), (6): Xaa is C or S
IPKAXXVPTELEPLTMLYYDENEKVVEQLSNDM

SEQ ID NO: 52312 - protein, 34 aa, Artificial Sequence; identical to SEQ ID NO: 11221
  Cyclic GFR-binding peptide
  MOD_RES (3), (4): Xaa is C or S

SEQ ID NO: 52313 - protein, 30 aa, Artificial Sequence
  Cyclic GFR-binding peptide
PTQLEPLTVLYYDDSSNVIEQLSNNMVVRA

SEQ ID NO: 52314 - protein, 21 aa, Artificial Sequence
  Cyclic GFR-binding peptide
LSPISMLFIDEYDKVVYKQYE

SEQ ID NO: 52315 - protein, 32 aa, Artificial Sequence
  Cyclic GFR-binding peptide
  MOD_RES (3), (4): Xaa is C or S
APXXVPQALSPISILFIVGRKPKVYKQYEMIV

SEQ ID NO: 52316 - protein, 33 aa, Artificial Sequence
  Cyclic GFR-binding peptide
  MOD_RES (31), (33): Xaa is C or S
PTELEPLPMVYYDEYDKVVEQLSNEMVVEGXGX

SEQ ID NO: 52317 - protein, 28 aa, Artificial Sequence
  Cyclic GFR-binding peptide
  MOD_RES (2), (3): Xaa is C or S
TXXVPTRLNAISILYFDSANNVVLKKYR

SEQ ID NO: 52318 - protein, 21 aa, Artificial Sequence
  Cyclic GFR-binding peptide
LSPISILFIIGKTPKIYKQYE

SEQ ID NO: 52319 - protein, 34 aa, Artificial Sequence; identical to SEQ ID NO: 11224
  Cyclic GFR-binding peptide
  MOD_RES (1), (2), (34): Xaa is C or S

SEQ ID NO: 52320 - protein, 27 aa, Artificial Sequence
  Cyclic GFR-binding peptide
PTQLSPISVLFIDDSSNVIYKQYENMV

SEQ ID NO: 52321 - protein, 34 aa, Artificial Sequence; identical to SEQ ID NO: 11225
  Cyclic GFR-binding peptide
  MOD_RES (32), (34): Xaa is C or S

SEQ ID NO: 52322 - protein, 31 aa, Artificial Sequence
  Cyclic GFR-binding peptide
  MOD_RES (1), (2): Xaa is C or S
XXVPTELEPLPMVYYDEYDKVVEQLSNEMVV

SEQ ID NO: 52323 - protein, 27 aa, Artificial Sequence
  Cyclic GFR-binding peptide
LSAISILYLDSANNVVLKNYQDMVVES

SEQ ID NO: 52324 - protein, 28 aa, Artificial Sequence
  Cyclic GFR-binding peptide
  MOD_RES (2), (3): Xaa is C or S
AXXVPTELEPLTMLYYDEYDKVVEQLSN

SEQ ID NO: 52325 - protein, 27 aa, Artificial Sequence
  Cyclic GFR-binding peptide
DLSPISILFIVGRTPKVYKQYEMVVKS

SEQ ID NO: 52326 - protein, 34 aa, Artificial Sequence; identical to SEQ ID NO: 11226
  Cyclic GFR-binding peptide
  MOD_RES (3), (3): Xaa is C or S

SEQ ID NO: 52327 - protein, 34 aa, Artificial Sequence; identical to SEQ ID NO: 11228
  Cyclic GFR-binding peptide
  MOD_RES (1), (2), (33): Xaa is C or S

SEQ ID NO: 52328 - protein, 30 aa, Artificial Sequence
  Cyclic GFR-binding peptide
  MOD_RES (27), (29): Xaa is C or S
EPLPVVYYDDSSNVIEQLSNNMVVRAXGXH

SEQ ID NO: 52329 - protein, 32 aa, Artificial Sequence
  Cyclic GFR-binding peptide
  MOD_RES (29), (31): Xaa is C or S
ELEPLTMLYYDEYDKVVEQLSNEMVVEGXGXR

SEQ ID NO: 52330 - protein, 36 aa, Artificial Sequence; identical to SEQ ID NO: 11232
  Cyclic GFR-binding peptide
  MOD_RES (6), (6): Xaa is C or S

SEQ ID NO: 52331 - protein, 29 aa, Artificial Sequence
  Cyclic GFR-binding peptide
VPTELSPISMLFIDEYDKVVYKQYEEMVV

SEQ ID NO: 52332 - protein, 33 aa, Artificial Sequence
  Cyclic GFR-binding peptide
  MOD_RES (6), (7): Xaa is C or S
ASAAPXXVPQALEPLTILYYVGRKPKVEQLSNM

SEQ ID NO: 52333 - protein, 41 aa, Artificial Sequence; identical to SEQ ID NO: 11234
  Cyclic GFR-binding peptide
  MOD_RES (5), (6), (38), (40): Xaa is C or S

SEQ ID NO: 52334 - protein, 30 aa, Artificial Sequence
  Cyclic GFR-binding peptide
  MOD_RES (28), (30): Xaa is C or S
LEPLTVLYYDDSSNVIEQLSNNMVVRSXGX

SEQ ID NO: 52335 - protein, 34 aa, Artificial Sequence; identical to SEQ ID NO: 11237
  Cyclic GFR-binding peptide
  MOD_RES (1), (2), (34): Xaa is C or S

SEQ ID NO: 52336 - protein, 29 aa, Artificial Sequence
  Cyclic GFR-binding peptide
PTKLEPLTVLYYDDSSNVIEQLSNNMVVR

SEQ ID NO: 52337 - protein, 28 aa, Artificial Sequence
  Cyclic GFR-binding peptide
PTELSPISMLFIDEYDKVVYKQYEEMVV

SEQ ID NO: 52338 - protein, 33 aa, Artificial Sequence; identical to SEQ ID NO: 11238
  Cyclic GFR-binding peptide
  MOD_RES (2), (3): Xaa is C or S

SEQ ID NO: 52339 - protein, 30 aa, Artificial Sequence; identical to SEQ ID NO: 11239
  Cyclic GFR-binding peptide

SEQ ID NO: 52340 - protein, 36 aa, Artificial Sequence
  Cyclic GFR-binding peptide
  MOD_RES (6), (7): Xaa is C or S
KIPKAXXVPTELEPLPMVYYDENEKVVEQLSNDMVV

SEQ ID NO: 52341 - protein, 26 aa, Artificial Sequence
  Cyclic GFR-binding peptide
APTKLEPLPVVYYDDSSNVIEQLSNN

SEQ ID NO: 52342 - protein, 28 aa, Artificial Sequence
  Cyclic GFR-binding peptide
  MOD_RES (2), (3): Xaa is C or S
AXXVPTELEPLTMLYYDENEKVVEQLSN

SEQ ID NO: 52343 - protein, 26 aa, Artificial Sequence
  Cyclic GFR-binding peptide
LEPLPMVYYDEYDKVVEQLSNEMVVE

SEQ ID NO: 52344 - protein, 28 aa, Artificial Sequence
  Cyclic GFR-binding peptide
RLNAISILYFDSANNVVLKKYRDMVVES

SEQ ID NO: 52345 - protein, 39 aa, Artificial Sequence; identical to SEQ ID NO: 11243
  Cyclic GFR-binding peptide
  MOD_RES (5), (6), (38): Xaa is C or S

SEQ ID NO: 52346 - protein, 35 aa, Artificial Sequence; identical to SEQ ID NO: 11245
  Cyclic GFR-binding peptide
  MOD_RES (4), (5): Xaa is C or S

SEQ ID NO: 52347 - protein, 31 aa, Artificial Sequence
  Cyclic GFR-binding peptide
  MOD_RES (28), (30): Xaa is C or S
LSPISMLFIDEYDKVVYKQYEEMVVEGXGXR

SEQ ID NO: 52348 - protein, 35 aa, Artificial Sequence; identical to SEQ ID NO: 11246
  Cyclic GFR-binding peptide
  MOD_RES (2), (3), (35): Xaa is C or S

SEQ ID NO: 52349 - protein, 36 aa, Artificial Sequence; identical to SEQ ID NO: 11247
  Cyclic GFR-binding peptide
  MOD_RES (2), (3), (35): Xaa is C or S

SEQ ID NO: 52350 - protein, 36 aa, Artificial Sequence; identical to SEQ ID NO: 11248
  Cyclic GFR-binding peptide
  MOD_RES (2), (3), (35): Xaa is C or S

SEQ ID NO: 52351 - protein, 24 aa, Artificial Sequence
  Cyclic GFR-binding peptide
PQDLEPLPIVYYVGRTPKVEQLSN

SEQ ID NO: 52352 - protein, 33 aa, Artificial Sequence
  Cyclic GFR-binding peptide
  MOD_RES (6), (7): Xaa is C or S
TVPKPXXAPTQLSPISVLFIDDSSNVIYKQYEN

SEQ ID NO: 52353 - protein, 30 aa, Artificial Sequence
  Cyclic GFR-binding peptide
  MOD_RES (2), (3): Xaa is C or S
AXXVPTELEPLTMLYYDENEKVVEQLSNDM

SEQ ID NO: 52354 - protein, 34 aa, Artificial Sequence; identical to SEQ ID NO: 11249
  Cyclic GFR-binding peptide
  MOD_RES (32), (34): Xaa is C or S

SEQ ID NO: 52355 - protein, 27 aa, Artificial Sequence
  Cyclic GFR-binding peptide
  MOD_RES (1), (2): Xaa is C or S
XXVSQDLEPLPIVYYIGKTPKIEQLSN

SEQ ID NO: 52356 - protein, 28 aa, Artificial Sequence
  Cyclic GFR-binding peptide
PTKLEPLTVLYYDDSSNVIEQLSNNMVV

SEQ ID NO: 52357 - protein, 39 aa, Artificial Sequence; identical to SEQ ID NO: 11251
  Cyclic GFR-binding peptide
  MOD_RES (4), (5), (37), (39): Xaa is C or S

SEQ ID NO: 52358 - protein, 23 aa, Artificial Sequence
  Cyclic GFR-binding peptide
SPISVLFIDDSSNVIYKQYENMV

SEQ ID NO: 52359 - protein, 29 aa, Artificial Sequence
  Cyclic GFR-binding peptide
  MOD_RES (1), (2): Xaa is C or S
XXVPTELSPISMLFIDEYDKVVYKQYEEM

SEQ ID NO: 52360 - protein, 35 aa, Artificial Sequence; identical to SEQ ID NO: 11252
  Cyclic GFR-binding peptide
  MOD_RES (2), (3), (35): Xaa is C or S

SEQ ID NO: 52361 - protein, 25 aa, Artificial Sequence
  Cyclic GFR-binding peptide
LEPLPMVYYDENEKVVEQLSNDMVV

SEQ ID NO: 52362 - protein, 25 aa, Artificial Sequence
  Cyclic GFR-binding peptide
ELSPISMLFIDEYDKVVYKQYEEMV

SEQ ID NO: 52363 - protein, 35 aa, Artificial Sequence; identical to SEQ ID NO: 11253
  Cyclic GFR-binding peptide
  MOD_RES (2), (3), (35): Xaa is C or S

SEQ ID NO: 52364 - protein, 22 aa, Artificial Sequence
  Cyclic GFR-binding peptide
QLEPLTVLYYDDSSNVIEQLSN

SEQ ID NO: 52365 - protein, 34 aa, Artificial Sequence; identical to SEQ ID NO: 11254
  Cyclic GFR-binding peptide
  MOD_RES (1), (33): Xaa is C or S

SEQ ID NO: 52366 - protein, 32 aa, Artificial Sequence; identical to SEQ ID NO: 11255
  Cyclic GFR-binding peptide
  MOD_RES (32), (32): Xaa is C or S

SEQ ID NO: 52367 - protein, 32 aa, Artificial Sequence; identical to SEQ ID NO: 11257
  Cyclic GFR-binding peptide
  MOD_RES (31), (31): Xaa is C or S

SEQ ID NO: 52368 - protein, 31 aa, Artificial Sequence
  Cyclic GFR-binding peptide
  MOD_RES (6), (6): Xaa is C or S
VTKPTXAPTKLEPLTVLYYDDSSNVIEQLSN

SEQ ID NO: 52369 - protein, 36 aa, Artificial Sequence; identical to SEQ ID NO: 11258
  Cyclic GFR-binding peptide
  MOD_RES (1), (33), (35): Xaa is C or S

SEQ ID NO: 52370 - protein, 32 aa, Artificial Sequence; identical to SEQ ID NO: 11262
  Cyclic GFR-binding peptide
  MOD_RES (1), (2): Xaa is C or S

SEQ ID NO: 52371 - protein, 33 aa, Artificial Sequence
  Cyclic GFR-binding peptide
  MOD_RES (5), (5): Xaa is C or S
TKPTXAPTKLSPISVLFIDDSSNVIYKQYENMV

SEQ ID NO: 52372 - protein, 28 aa, Artificial Sequence
  Cyclic GFR-binding peptide
PTRLEPLPIVYYDSANNVVEQLSNDMVV

SEQ ID NO: 52373 - protein, 34 aa, Artificial Sequence
  Cyclic GFR-binding peptide
  MOD_RES (31), (33): Xaa is C or S
PTQLEPLPVVYYDDSSNVIEQLSNNMVVRAXGXH

SEQ ID NO: 52374 - protein, 34 aa, Artificial Sequence
  Cyclic GFR-binding peptide
  MOD_RES (6), (7): Xaa is C or S
STPPTXXVPTRLNAISILYFDSANNVVLKKYRDM

SEQ ID NO: 52375 - protein, 31 aa, Artificial Sequence; identical to SEQ ID NO: 11264
  Cyclic GFR-binding peptide
  MOD_RES (1), (1): Xaa is C or S

SEQ ID NO: 52376 - protein, 35 aa, Artificial Sequence; identical to SEQ ID NO: 11265
  Cyclic GFR-binding peptide
  MOD_RES (2), (3), (35): Xaa is C or S

SEQ ID NO: 52377 - protein, 39 aa, Artificial Sequence; identical to SEQ ID NO: 11266
  Cyclic GFR-binding peptide
  MOD_RES (5), (37), (39): Xaa is C or S

SEQ ID NO: 52378 - protein, 41 aa, Artificial Sequence; identical to SEQ ID NO: 11267
  Cyclic GFR-binding peptide
  MOD_RES (6), (38), (40): Xaa is C or S

SEQ ID NO: 52379 - protein, 36 aa, Artificial Sequence; identical to SEQ ID NO: 11268
  Cyclic GFR-binding peptide
  MOD_RES (2), (3), (35): Xaa is C or S

SEQ ID NO: 52380 - protein, 36 aa, Artificial Sequence; identical to SEQ ID NO: 11269
  Cyclic GFR-binding peptide
  MOD_RES (5), (6): Xaa is C or S

SEQ ID NO: 52381 - protein, 29 aa, Artificial Sequence
  Cyclic GFR-binding peptide
  MOD_RES (28), (28): Xaa is C or S
DLSPISILFIVGRTPKVYKQYEMVVKSXK

SEQ ID NO: 52382 - protein, 26 aa, Artificial Sequence
  Cyclic GFR-binding peptide
SQDLEPLPIVYYIGKTPKIEQLSNMI

SEQ ID NO: 52383 - protein, 32 aa, Artificial Sequence
  Cyclic GFR-binding peptide
  MOD_RES (29), (31): Xaa is C or S
RLEPLPIVYYDSANNVVEQLSNDMVVESXGXR

SEQ ID NO: 52384 - protein, 29 aa, Artificial Sequence
  Cyclic GFR-binding peptide
PTKLEPLPVVYYDDSSNVIEQLSNNMVVR

SEQ ID NO: 52385 - protein, 30 aa, Artificial Sequence
  Cyclic GFR-binding peptide
  MOD_RES (4), (4): Xaa is C or S
KPTXAPTKLEPLPVVYYDDSSNVIEQLSNN

SEQ ID NO: 52386 - protein, 33 aa, Artificial Sequence
  Cyclic GFR-binding peptide
  MOD_RES (6), (7): Xaa is C or S
YVPKPXXAPTKLSPISVLFIDDSSNVIYKQYEN

SEQ ID NO: 52387 - protein, 27 aa, Artificial Sequence
  Cyclic GFR-binding peptide
  MOD_RES (26), (26): Xaa is C or S
EPLPIVYYIGKTPKIEQLSNMIVKSXK

SEQ ID NO: 52388 - protein, 29 aa, Artificial Sequence
  Cyclic GFR-binding peptide
  MOD_RES (2), (3): Xaa is C or S
PXXAPTKLSPISVLFIDDSSNVIYKQYEN

SEQ ID NO: 52389 - protein, 25 aa, Artificial Sequence
  Cyclic GFR-binding peptide
QDLEPLPIVYYVGRTPKVEQLSNMV

SEQ ID NO: 52390 - protein, 28 aa, Artificial Sequence
  Cyclic GFR-binding peptide
  MOD_RES (28), (28): Xaa is C or S
LEPLTVLYYDDSSNVIEQLSNNMVVRAX

SEQ ID NO: 52391 - protein, 24 aa, Artificial Sequence
  Cyclic GFR-binding peptide
LSPISMLFIDEYDKVVYKQYEEMV

SEQ ID NO: 52392 - protein, 23 aa, Artificial Sequence
  Cyclic GFR-binding peptide
TKLSPISVLFIDDSSNVIYKQYE

SEQ ID NO: 52393 - protein, 33 aa, Artificial Sequence
  Cyclic GFR-binding peptide
  MOD_RES (30), (32): Xaa is C or S
TQLSPISVLFIDDSSNVIYKQYENMVVRAXGXH

SEQ ID NO: 52394 - protein, 28 aa, Artificial Sequence
  Cyclic GFR-binding peptide
  MOD_RES (1), (2): Xaa is C or S
XXVPTELEPLTMLYYDENEKVVEQLSND

SEQ ID NO: 52395 - protein, 40 aa, Artificial Sequence; identical to SEQ ID NO: 11273
  Cyclic GFR-binding peptide
  MOD_RES (6), (38), (40): Xaa is C or S

SEQ ID NO: 52396 - protein, 31 aa, Artificial Sequence; identical to SEQ ID NO: 11274
  Cyclic GFR-binding peptide
  MOD_RES (31), (31): Xaa is C or S

SEQ ID NO: 52397 - protein, 42 aa, Artificial Sequence; identical to SEQ ID NO: 11275
  Cyclic GFR-binding peptide
  MOD_RES (6), (7), (39), (41): Xaa is C or S

SEQ ID NO: 52398 - protein, 25 aa, Artificial Sequence
  Cyclic GFR-binding peptide
QLEPLPVVYYDDSSNVIEQLSNNMV

SEQ ID NO: 52399 - protein, 30 aa, Artificial Sequence
  Cyclic GFR-binding peptide
  MOD_RES (1), (1): Xaa is C or S
XVPQALEPLTILYYVGRKPKVEQLSNMIVR

SEQ ID NO: 52400 - protein, 36 aa, Artificial Sequence; identical to SEQ ID NO: 11278
  Cyclic GFR-binding peptide
  MOD_RES (1), (2), (33), (35): Xaa is C or S

SEQ ID NO: 52401 - protein, 29 aa, Artificial Sequence
  Cyclic GFR-binding peptide
EPLPIVYYIGKTPKIEQLSNAAAAAAAAA

SEQ ID NO: 52402 - protein, 33 aa, Artificial Sequence
  Cyclic GFR-binding peptide
  MOD_RES (31), (33): Xaa is C or S
PTQLEPLTVLYYDDSSNVIEQLSNNMVVRAXGX

SEQ ID NO: 52403 - protein, 33 aa, Artificial Sequence; identical to SEQ ID NO: 11279
  Cyclic GFR-binding peptide
  MOD_RES (31), (33): Xaa is C or S

SEQ ID NO: 52404 - protein, 31 aa, Artificial Sequence
  Cyclic GFR-binding peptide
  MOD_RES (1), (2): Xaa is C or S
XXVSQDLSPISILFIIGKTPKIYKQYEMIVK

SEQ ID NO: 52405 - protein, 36 aa, Artificial Sequence; identical to SEQ ID NO: 11282
  Cyclic GFR-binding peptide
  MOD_RES (5), (6): Xaa is C or S

SEQ ID NO: 52406 - protein, 25 aa, Artificial Sequence
  Cyclic GFR-binding peptide
VPQALSPISILFIVGRKPKVYKQYE

SEQ ID NO: 52407 - protein, 35 aa, Artificial Sequence; identical to SEQ ID NO: 11283
  Cyclic GFR-binding peptide
  MOD_RES (3), (4): Xaa is C or S

SEQ ID NO: 52408 - protein, 33 aa, Artificial Sequence; identical to SEQ ID NO: 11284
  Cyclic GFR-binding peptide
  MOD_RES (2), (3): Xaa is C or S

SEQ ID NO: 52409 - protein, 29 aa, Artificial Sequence
  Cyclic GFR-binding peptide
  MOD_RES (1), (2): Xaa is C or S
XXVPTRLEPLPIVYYDSANNVVEQLSNDM

SEQ ID NO: 52410 - protein, 34 aa, Artificial Sequence; identical to SEQ ID NO: 11286
  Cyclic GFR-binding peptide
  MOD_RES (3), (4): Xaa is C or S

SEQ ID NO: 52411 - protein, 27 aa, Artificial Sequence
  Cyclic GFR-binding peptide
  MOD_RES (27), (27): Xaa is C or S
SPISVLFIDDSSNVIYKQYENMVVRAX

SEQ ID NO: 52412 - protein, 38 aa, Artificial Sequence; identical to SEQ ID NO: 11287
  Cyclic GFR-binding peptide
  MOD_RES (6), (7), (38): Xaa is C or S

SEQ ID NO: 52413 - protein, 33 aa, Artificial Sequence
  Cyclic GFR-binding peptide
  MOD_RES (6), (7): Xaa is C or S
YVPKPXXAPTKLEPLPVVYYDDSSNVIEQLSNN

SEQ ID NO: 52414 - protein, 34 aa, Artificial Sequence
  Cyclic GFR-binding peptide
  MOD_RES (6), (7): Xaa is C or S
ASASPXXVSQDLEPLPIVYYIGKTPKIEQLSNMI

SEQ ID NO: 52415 - protein, 29 aa, Artificial Sequence
  Cyclic GFR-binding peptide
EPLTILYYVGRKPKVEQLSNAAAAAAAAA

SEQ ID NO: 52416 - protein, 22 aa, Artificial Sequence
  Cyclic GFR-binding peptide
DLEPLPIVYYIGKTPKIEQLSN

SEQ ID NO: 52417 - protein, 37 aa, Artificial Sequence; identical to SEQ ID NO: 11288
  Cyclic GFR-binding peptide
  MOD_RES (6), (7): Xaa is C or S

SEQ ID NO: 52418 - protein, 33 aa, Artificial Sequence
  Cyclic GFR-binding peptide
  MOD_RES (30), (32): Xaa is C or S
PQALEPLTILYYVGRKPKVEQLSNMIVRSXKXS

SEQ ID NO: 52419 - protein, 35 aa, Artificial Sequence
  Cyclic GFR-binding peptide
  MOD_RES (6), (7): Xaa is C or S
TVPKPXXAPTQLSPISVLFIDDSSNVIYKQYENMV

SEQ ID NO: 52420 - protein, 26 aa, Artificial Sequence
  Cyclic GFR-binding peptide
LEPLTMLYYDEYDKVVEQLSNEMVVE

SEQ ID NO: 52421 - protein, 30 aa, Artificial Sequence
  Cyclic GFR-binding peptide
PTQLEPLPVVYYDDSSNVIEQLSNNMVVRA

SEQ ID NO: 52422 - protein, 35 aa, Artificial Sequence
  Cyclic GFR-binding peptide
  MOD_RES (5), (6): Xaa is C or S
SASPXXVSQDLEPLPIVYYIGKTPKIEQLSNMIVK

SEQ ID NO: 52423 - protein, 31 aa, Artificial Sequence
  Cyclic GFR-binding peptide
  MOD_RES (5), (6): Xaa is C or S
VPKPXXAPTKLEPLTVLYYDDSSNVIEQLSN

SEQ ID NO: 52424 - protein, 26 aa, Artificial Sequence
  Cyclic GFR-binding peptide
VPTRLNAISILYFDSANNVVLKKYRD

SEQ ID NO: 52425 - protein, 37 aa, Artificial Sequence; identical to SEQ ID NO: 11289
  Cyclic GFR-binding peptide
  MOD_RES (1), (2), (34), (36): Xaa is C or S

SEQ ID NO: 52426 - protein, 33 aa, Artificial Sequence
  Cyclic GFR-binding peptide
  MOD_RES (30), (32): Xaa is C or S
TELSPISMLFIDENEKVVYKQYEDMVVEGXGXR

SEQ ID NO: 52427 - protein, 38 aa, Artificial Sequence; identical to SEQ ID NO: 11291
  Cyclic GFR-binding peptide
  MOD_RES (5), (6), (38): Xaa is C or S

SEQ ID NO: 52428 - protein, 33 aa, Artificial Sequence; identical to SEQ ID NO: 11292
  Cyclic GFR-binding peptide
  MOD_RES (2), (3): Xaa is C or S

SEQ ID NO: 52429 - protein, 32 aa, Artificial Sequence
  Cyclic GFR-binding peptide
  MOD_RES (31), (31): Xaa is C or S
PTQLSPISVLFIDDSSNVIYKQYENMVVRAXG

SEQ ID NO: 52430 - protein, 28 aa, Artificial Sequence
  Cyclic GFR-binding peptide
VPTELEPLPMVYYDENEKVVEQLSNDMV

SEQ ID NO: 52431 - protein, 38 aa, Artificial Sequence; identical to SEQ ID NO: 11293
  Cyclic GFR-binding peptide
  MOD_RES (4), (5), (36), (38): Xaa is C or S

SEQ ID NO: 52432 - protein, 26 aa, Artificial Sequence
  Cyclic GFR-binding peptide
QDLSPISILFIIGKTPKIYKQYEMIV

SEQ ID NO: 52433 - protein, 34 aa, Artificial Sequence; identical to SEQ ID NO: 11295
  Cyclic GFR-binding peptide
  MOD_RES (32), (34): Xaa is C or S

SEQ ID NO: 52434 - protein, 33 aa, Artificial Sequence
  Cyclic GFR-binding peptide
  MOD_RES (5), (6): Xaa is C or S
IPKAXXVPTELEPLPMVYYDEYDKVVEQLSNEM

SEQ ID NO: 52435 - protein, 33 aa, Artificial Sequence
  Cyclic GFR-binding peptide
  MOD_RES (3), (4): Xaa is C or S
KPXXAPTQLSPISVLFIDDSSNVIYKQYENMVV

SEQ ID NO: 52436 - protein, 34 aa, Artificial Sequence
  Cyclic GFR-binding peptide
  MOD_RES (4), (5): Xaa is C or S
AAPXXVPQALSPISILFIVGRKPKVYKQYEMIVR

SEQ ID NO: 52437 - protein, 35 aa, Artificial Sequence; identical to SEQ ID NO: 11296
  Cyclic GFR-binding peptide
  MOD_RES (1), (32), (34): Xaa is C or S

SEQ ID NO: 52438 - protein, 36 aa, Artificial Sequence; identical to SEQ ID NO: 11298
  Cyclic GFR-binding peptide
  MOD_RES (4), (5), (36): Xaa is C or S

SEQ ID NO: 52439 - protein, 30 aa, Artificial Sequence
  Cyclic GFR-binding peptide
  MOD_RES (1), (1): Xaa is C or S
XVPTELEPLTMLYYDENEKVVEQLSNDMVV

SEQ ID NO: 52440 - protein, 35 aa, Artificial Sequence
  Cyclic GFR-binding peptide
  MOD_RES (6), (7): Xaa is C or S
SIPKAXXVPTELEPLPMVYYDEYDKVVEQLSNEMV

SEQ ID NO: 52441 - protein, 40 aa, Artificial Sequence; identical to SEQ ID NO: 11299
  Cyclic GFR-binding peptide
  MOD_RES (5), (6), (38), (40): Xaa is C or S

SEQ ID NO: 52442 - protein, 40 aa, Artificial Sequence; identical to SEQ ID NO: 11300
  Cyclic GFR-binding peptide
  MOD_RES (4), (5), (37), (39): Xaa is C or S

SEQ ID NO: 52443 - protein, 30 aa, Artificial Sequence
  Cyclic GFR-binding peptide
  MOD_RES (2), (3): Xaa is C or S
AXXVPTELEPLPMVYYDEYDKVVEQLSNEM

SEQ ID NO: 52444 - protein, 31 aa, Artificial Sequence
  Cyclic GFR-binding peptide
  MOD_RES (29), (31): Xaa is C or S
QDLEPLPIVYYIGKTPKIEQLSNMIVKSXKX

SEQ ID NO: 52445 - protein, 32 aa, Artificial Sequence
  Cyclic GFR-binding peptide
  MOD_RES (7), (7): Xaa is C or S
HVTKPTXAPTKLEPLTVLYYDDSSNVIEQLSN

SEQ ID NO: 52446 - protein, 24 aa, Artificial Sequence
  Cyclic GFR-binding peptide
DLEPLPIVYYIGKTPKIEQLSNMI

SEQ ID NO: 52447 - protein, 28 aa, Artificial Sequence
  Cyclic GFR-binding peptide
  MOD_RES (2), (3): Xaa is C or S
PXXAPTKLEPLPVVYYDDSSNVIEQLSN

SEQ ID NO: 52448 - protein, 25 aa, Artificial Sequence
  Cyclic GFR-binding peptide
NAISILYFDSANNVVLKKYRDMVVE

SEQ ID NO: 52449 - protein, 35 aa, Artificial Sequence; identical to SEQ ID NO: 11303
  Cyclic GFR-binding peptide
  MOD_RES (1), (33), (35): Xaa is C or S

SEQ ID NO: 52450 - protein, 30 aa, Artificial Sequence
  Cyclic GFR-binding peptide
  MOD_RES (4), (4): Xaa is C or S
KPTXAPTKLSPISVLFIDDSSNVIYKQYEN

SEQ ID NO: 52451 - protein, 29 aa, Artificial Sequence
  Cyclic GFR-binding peptide
  MOD_RES (3), (4): Xaa is C or S
KPXXAPTQLEPLPVVYYDDSSNVIEQLSN

SEQ ID NO: 52452 - protein, 35 aa, Artificial Sequence
  Cyclic GFR-binding peptide
  MOD_RES (6), (6): Xaa is C or S
VTKPTXAPTKLSPISVLFIDDSSNVIYKQYENMVV

SEQ ID NO: 52453 - protein, 36 aa, Artificial Sequence; identical to SEQ ID NO: 11306
  Cyclic GFR-binding peptide
  MOD_RES (2), (34), (36): Xaa is C or S

SEQ ID NO: 52454 - protein, 33 aa, Artificial Sequence
  Cyclic GFR-binding peptide
  MOD_RES (31), (33): Xaa is C or S
PTELSPISMLFIDEYDKVVYKQYEEMVVEGXGX

SEQ ID NO: 52455 - protein, 32 aa, Artificial Sequence
  Cyclic GFR-binding peptide
  MOD_RES (31), (31): Xaa is C or S
PTQLEPLPVVYYDDSSNVIEQLSNNMVVRAXG

SEQ ID NO: 52456 - protein, 32 aa, Artificial Sequence
  Cyclic GFR-binding peptide
  MOD_RES (3), (4): Xaa is C or S
KPXXAPTQLSPISVLFIDDSSNVIYKQYENMV

SEQ ID NO: 52457 - protein, 36 aa, Artificial Sequence; identical to SEQ ID NO: 11309
  Cyclic GFR-binding peptide
  MOD_RES (2), (3), (35): Xaa is C or S

SEQ ID NO: 52458 - protein, 30 aa, Artificial Sequence
  Cyclic GFR-binding peptide
  MOD_RES (27), (29): Xaa is C or S
LSPISILFIVGRTPKVYKQYEMVVKSXKXS

SEQ ID NO: 52459 - protein, 30 aa, Artificial Sequence
  Cyclic GFR-binding peptide
  MOD_RES (2), (3): Xaa is C or S
TXXVPTRLNAISILYFDSANNVVLKKYRDM

SEQ ID NO: 52460 - protein, 23 aa, Artificial Sequence
  Cyclic GFR-binding peptide
TRLEPLPIVYYDSANNVVEQLSN

SEQ ID NO: 52461 - protein, 32 aa, Artificial Sequence
  Cyclic GFR-binding peptide
  MOD_RES (29), (31): Xaa is C or S
ELEPLPMVYYDEYDKVVEQLSNEMVVEGXGXR

SEQ ID NO: 52462 - protein, 24 aa, Artificial Sequence
  Cyclic GFR-binding peptide
PTKLSPISVLFIDDSSNVIYKQYE

SEQ ID NO: 52463 - protein, 20 aa, Artificial Sequence
  Cyclic GFR-binding peptide
EPLPIVYYDSANNVVEQLSN

SEQ ID NO: 52464 - protein, 34 aa, Artificial Sequence
  Cyclic GFR-binding peptide
  MOD_RES (6), (7): Xaa is C or S
ASAAPXXVPQALSPISILFIVGRKPKVYKQYEMI

SEQ ID NO: 52465 - protein, 37 aa, Artificial Sequence; identical to SEQ ID NO: 11312
  Cyclic GFR-binding peptide
  MOD_RES (6), (7): Xaa is C or S

SEQ ID NO: 52466 - protein, 35 aa, Artificial Sequence; identical to SEQ ID NO: 11313
  Cyclic GFR-binding peptide
  MOD_RES (1), (32), (34): Xaa is C or S

SEQ ID NO: 52467 - protein, 21 aa, Artificial Sequence
  Cyclic GFR-binding peptide
EPLTMLYYDENEKVVEQLSND

SEQ ID NO: 52468 - protein, 35 aa, Artificial Sequence; identical to SEQ ID NO: 11314
  Cyclic GFR-binding peptide
  MOD_RES (4), (5): Xaa is C or S

SEQ ID NO: 52469 - protein, 28 aa, Artificial Sequence
  Cyclic GFR-binding peptide
VPQDLEPLPIVYYVGRTPKVEQLSNMVV

SEQ ID NO: 52470 - protein, 29 aa, Artificial Sequence
  Cyclic GFR-binding peptide
  MOD_RES (2), (3): Xaa is C or S
PXXAPTKLEPLPVVYYDDSSNVIEQLSNN

SEQ ID NO: 52471 - protein, 34 aa, Artificial Sequence
  Cyclic GFR-binding peptide
  MOD_RES (4), (5): Xaa is C or S
PKAXXVPTELEPLPMVYYDEYDKVVEQLSNEMVV

SEQ ID NO: 52472 - protein, 38 aa, Artificial Sequence; identical to SEQ ID NO: 11321
  Cyclic GFR-binding peptide
  MOD_RES (4), (5), (36), (38): Xaa is C or S

SEQ ID NO: 52473 - protein, 33 aa, Artificial Sequence; identical to SEQ ID NO: 11323
  Cyclic GFR-binding peptide
  MOD_RES (2), (3): Xaa is C or S

SEQ ID NO: 52474 - protein, 31 aa, Artificial Sequence
  Cyclic GFR-binding peptide
  MOD_RES (2), (3): Xaa is C or S
PXXAPTKLEPLPVVYYDDSSNVIEQLSNNMV

SEQ ID NO: 52475 - protein, 30 aa, Artificial Sequence
  Cyclic GFR-binding peptide
  MOD_RES (28), (30): Xaa is C or S
LEPLTVLYYDDSSNVIEQLSNNMVVRAXGX

SEQ ID NO: 52476 - protein, 34 aa, Artificial Sequence; identical to SEQ ID NO: 11325
  Cyclic GFR-binding peptide
  MOD_RES (1), (32), (34): Xaa is C or S

SEQ ID NO: 52477 - protein, 39 aa, Artificial Sequence; identical to SEQ ID NO: 11326
  Cyclic GFR-binding peptide
  MOD_RES (3), (4), (36), (38): Xaa is C or S

SEQ ID NO: 52478 - protein, 24 aa, Artificial Sequence
  Cyclic GFR-binding peptide
QLEPLPVVYYDDSSNVIEQLSNNM

SEQ ID NO: 52479 - protein, 32 aa, Artificial Sequence
  Cyclic GFR-binding peptide
  MOD_RES (4), (5): Xaa is C or S
PKPXXAPTQLEPLTVLYYDDSSNVIEQLSNNM

SEQ ID NO: 52480 - protein, 28 aa, Artificial Sequence
  Cyclic GFR-binding peptide
  MOD_RES (27), (27): Xaa is C or S
LEPLTILYYVGRKPKVEQLSNMIVRSXK

SEQ ID NO: 52481 - protein, 32 aa, Artificial Sequence
  Cyclic GFR-binding peptide
  MOD_RES (6), (7): Xaa is C or S
ASASPXXVSQDLEPLPIVYYIGKTPKIEQLSN

SEQ ID NO: 52482 - protein, 26 aa, Artificial Sequence
  Cyclic GFR-binding peptide
EPLPIVYYDSANNVVEQLSNDMVVES

SEQ ID NO: 52483 - protein, 38 aa, Artificial Sequence; identical to SEQ ID NO: 11328
  Cyclic GFR-binding peptide
  MOD_RES (6), (7): Xaa is C or S

SEQ ID NO: 52484 - protein, 31 aa, Artificial Sequence; identical to SEQ ID NO: 11329
  Cyclic GFR-binding peptide

SEQ ID NO: 52485 - protein, 27 aa, Artificial Sequence
  Cyclic GFR-binding peptide
APTQLEPLPVVYYDDSSNVIEQLSNNM

SEQ ID NO: 52486 - protein, 41 aa, Artificial Sequence; identical to SEQ ID NO: 11330
  Cyclic GFR-binding peptide
  MOD_RES (5), (6), (38), (40): Xaa is C or S

SEQ ID NO: 52487 - protein, 35 aa, Artificial Sequence; identical to SEQ ID NO: 11331
  Cyclic GFR-binding peptide
  MOD_RES (3), (4): Xaa is C or S

SEQ ID NO: 52488 - protein, 31 aa, Artificial Sequence
  Cyclic GFR-binding peptide
  MOD_RES (30), (30): Xaa is C or S
TELEPLTMLYYDENEKVVEQLSNDMVVEGXG

SEQ ID NO: 52489 - protein, 31 aa, Artificial Sequence; identical to SEQ ID NO: 11332
  Cyclic GFR-binding peptide
  MOD_RES (1), (1): Xaa is C or S

SEQ ID NO: 52490 - protein, 29 aa, Artificial Sequence
  Cyclic GFR-binding peptide
  MOD_RES (3), (4): Xaa is C or S
SPXXVPQDLSPISILFIVGRTPKVYKQYE

SEQ ID NO: 52491 - protein, 30 aa, Artificial Sequence
  Cyclic GFR-binding peptide
  MOD_RES (4), (5): Xaa is C or S
PKPXXAPTKLEPLTVLYYDDSSNVIEQLSN

SEQ ID NO: 52492 - protein, 25 aa, Artificial Sequence
  Cyclic GFR-binding peptide
TRLEPLTILYYDSANNVVEQLSNDM

SEQ ID NO: 52493 - protein, 28 aa, Artificial Sequence
  Cyclic GFR-binding peptide
KLEPLPVVYYDDSSNVIEQLSNNMVVRS

SEQ ID NO: 52494 - protein, 34 aa, Artificial Sequence; identical to SEQ ID NO: 11335
  Cyclic GFR-binding peptide
  MOD_RES (1), (32), (34): Xaa is C or S

SEQ ID NO: 52495 - protein, 22 aa, Artificial Sequence
  Cyclic GFR-binding peptide
RLEPLTILYYDSANNVVEQLSN

SEQ ID NO: 52496 - protein, 31 aa, Artificial Sequence
  Cyclic GFR-binding peptide
  MOD_RES (30), (30): Xaa is C or S
TRLNAISILYFDSANNVVLKKYRDMVVESXG

SEQ ID NO: 52497 - protein, 31 aa, Artificial Sequence
  Cyclic GFR-binding peptide
  MOD_RES (1), (2): Xaa is C or S
XXVPTRLEPLTILYYDSANNVVEQLSNDMVV

SEQ ID NO: 52498 - protein, 25 aa, Artificial Sequence
  Cyclic GFR-binding peptide
LEPLTILYYVGRKPKVEQLSNMIVR

SEQ ID NO: 52499 - protein, 41 aa, Artificial Sequence; identical to SEQ ID NO: 11340
  Cyclic GFR-binding peptide
  MOD_RES (5), (6), (38), (40): Xaa is C or S

SEQ ID NO: 52500 - protein, 26 aa, Artificial Sequence
  Cyclic GFR-binding peptide
RLNAISILYFDSANNVVLKKYRDMVV

SEQ ID NO: 52501 - protein, 35 aa, Artificial Sequence; identical to SEQ ID NO: 11341
  Cyclic GFR-binding peptide
  MOD_RES (3), (4), (35): Xaa is C or S

SEQ ID NO: 52502 - protein, 28 aa, Artificial Sequence
  Cyclic GFR-binding peptide
  MOD_RES (28), (28): Xaa is C or S
ALEPLTILYYVGRKPKVEQLSNMIVRSX

SEQ ID NO: 52503 - protein, 29 aa, Artificial Sequence
  Cyclic GFR-binding peptide
  MOD_RES (29), (29): Xaa is C or S
QDLEPLPIVYYVGRTPKVEQLSNMVVKSX

SEQ ID NO: 52504 - protein, 22 aa, Artificial Sequence
  Cyclic GFR-binding peptide
EPLPIVYYIGKTPKIEQLSNMI

SEQ ID NO: 52505 - protein, 33 aa, Artificial Sequence; identical to SEQ ID NO: 11344
  Cyclic GFR-binding peptide
  MOD_RES (1), (2): Xaa is C or S

SEQ ID NO: 52506 - protein, 28 aa, Artificial Sequence
  Cyclic GFR-binding peptide
TKLEPLTVLYYDDSSNVIEQLSNNMVVR

SEQ ID NO: 52507 - protein, 30 aa, Artificial Sequence
  Cyclic GFR-binding peptide
  MOD_RES (30), (30): Xaa is C or S
PQALEPLTILYYVGRKPKVEQLSNMIVRSX

SEQ ID NO: 52508 - protein, 34 aa, Artificial Sequence; identical to SEQ ID NO: 11346
  Cyclic GFR-binding peptide
  MOD_RES (4), (4): Xaa is C or S

SEQ ID NO: 52509 - protein, 31 aa, Artificial Sequence
  Cyclic GFR-binding peptide
  MOD_RES (2), (3): Xaa is C or S
TXXVPTRLNAISILYFDSANNVVLKKYRDMV

SEQ ID NO: 52510 - protein, 31 aa, Artificial Sequence
  Cyclic GFR-binding peptide
  MOD_RES (5), (6): Xaa is C or S
SAAPXXVPQALEPLTILYYVGRKPKVEQLSN

SEQ ID NO: 52511 - protein, 34 aa, Artificial Sequence
  Cyclic GFR-binding peptide
  MOD_RES (5), (6): Xaa is C or S
VPKPXXAPTQLEPLTVLYYDDSSNVIEQLSNNMV

SEQ ID NO: 52512 - protein, 37 aa, Artificial Sequence; identical to SEQ ID NO: 11349
  Cyclic GFR-binding peptide
  MOD_RES (7), (7): Xaa is C or S

SEQ ID NO: 52513 - protein, 30 aa, Artificial Sequence
  Cyclic GFR-binding peptide
PTELSPISMLFIDENEKVVYKQYEDMVVEG

SEQ ID NO: 52514 - protein, 32 aa, Artificial Sequence; identical to SEQ ID NO: 11350
  Cyclic GFR-binding peptide
  MOD_RES (1), (1): Xaa is C or S

SEQ ID NO: 52515 - protein, 26 aa, Artificial Sequence
  Cyclic GFR-binding peptide
DLSPISILFIIGKTPKIYKQYEMIVK

SEQ ID NO: 52516 - protein, 27 aa, Artificial Sequence
  Cyclic GFR-binding peptide
VSQDLEPLPIVYYIGKTPKIEQLSNMI

SEQ ID NO: 52517 - protein, 29 aa, Artificial Sequence
  Cyclic GFR-binding peptide
  MOD_RES (26), (28): Xaa is C or S
SPISILFIVGRKPKVYKQYEMIVRSXKXS

SEQ ID NO: 52518 - protein, 30 aa, Artificial Sequence
  Cyclic GFR-binding peptide
  MOD_RES (27), (29): Xaa is C or S
LEPLPIVYYIGKTPKIEQLSNMIVKSXKXS

SEQ ID NO: 52519 - protein, 29 aa, Artificial Sequence
  Cyclic GFR-binding peptide
PTRLSAISILYLDSANNVVLKNYQDMVVE

SEQ ID NO: 52520 - protein, 28 aa, Artificial Sequence
  Cyclic GFR-binding peptide
KLEPLTVLYYDDSSNVIEQLSNNMVVRS

SEQ ID NO: 52521 - protein, 25 aa, Artificial Sequence
  Cyclic GFR-binding peptide
ALSPISILFIVGRKPKVYKQYEMIV

SEQ ID NO: 52522 - protein, 27 aa, Artificial Sequence
  Cyclic GFR-binding peptide
TQLEPLPVVYYDDSSNVIEQLSNNMVV

SEQ ID NO: 52523 - protein, 34 aa, Artificial Sequence; identical to SEQ ID NO: 11353
  Cyclic GFR-binding peptide
  MOD_RES (2), (34): Xaa is C or S

SEQ ID NO: 52524 - protein, 33 aa, Artificial Sequence
  Cyclic GFR-binding peptide
  MOD_RES (3), (4): Xaa is C or S
PTXXVPTRLSAISILYLDSANNVVLKNYQDMVV

SEQ ID NO: 52525 - protein, 36 aa, Artificial Sequence; identical to SEQ ID NO: 11356
  Cyclic GFR-binding peptide
  MOD_RES (3), (4), (36): Xaa is C or S

SEQ ID NO: 52526 - protein, 33 aa, Artificial Sequence; identical to SEQ ID NO: 11357
  Cyclic GFR-binding peptide
  MOD_RES (2), (3): Xaa is C or S

SEQ ID NO: 52527 - protein, 37 aa, Artificial Sequence; identical to SEQ ID NO: 11358
  Cyclic GFR-binding peptide
  MOD_RES (5), (6), (37): Xaa is C or S

SEQ ID NO: 52528 - protein, 28 aa, Artificial Sequence
  Cyclic GFR-binding peptide
QDLEPLPIVYYIGKTPKIEQLSNMIVKS

SEQ ID NO: 52529 - protein, 28 aa, Artificial Sequence
  Cyclic GFR-binding peptide
  MOD_RES (2), (3): Xaa is C or S
TXXVPTRLEPLPIVYYDSANNVVEQLSN

SEQ ID NO: 52530 - protein, 30 aa, Artificial Sequence
  Cyclic GFR-binding peptide
PTELSPISMLFIDEYDKVVYKQYEEMVVEG

SEQ ID NO: 52531 - protein, 28 aa, Artificial Sequence
  Cyclic GFR-binding peptide
  MOD_RES (1), (1): Xaa is C or S
XVPTELSPISMLFIDEYDKVVYKQYEEM

SEQ ID NO: 52532 - protein, 31 aa, Artificial Sequence
  Cyclic GFR-binding peptide
  MOD_RES (4), (5): Xaa is C or S
PKPXXAPTKLSPISVLFIDDSSNVIYKQYEN

SEQ ID NO: 52533 - protein, 23 aa, Artificial Sequence
  Cyclic GFR-binding peptide
TQLEPLPVVYYDDSSNVIEQLSN

SEQ ID NO: 52534 - protein, 33 aa, Artificial Sequence
  Cyclic GFR-binding peptide
  MOD_RES (6), (7): Xaa is C or S
ASASPXXVSQDLSPISILFIIGKTPKIYKQYEM

SEQ ID NO: 52535 - protein, 40 aa, Artificial Sequence; identical to SEQ ID NO: 11363
  Cyclic GFR-binding peptide
  MOD_RES (7), (39): Xaa is C or S

SEQ ID NO: 52536 - protein, 28 aa, Artificial Sequence
  Cyclic GFR-binding peptide
  MOD_RES (27), (27): Xaa is C or S
EPLTMLYYDENEKVVEQLSNDMVVEGXG

SEQ ID NO: 52537 - protein, 31 aa, Artificial Sequence; identical to SEQ ID NO: 11365
  Cyclic GFR-binding peptide

SEQ ID NO: 52538 - protein, 25 aa, Artificial Sequence
  Cyclic GFR-binding peptide
LSAISILYLDSANNVVLKNYQDMVV

SEQ ID NO: 52539 - protein, 26 aa, Artificial Sequence
  Cyclic GFR-binding peptide
VPQALEPLTILYYVGRKPKVEQLSNM

SEQ ID NO: 52540 - protein, 25 aa, Artificial Sequence
  Cyclic GFR-binding peptide
LEPLTMLYYDENEKVVEQLSNDMVV

SEQ ID NO: 52541 - protein, 32 aa, Artificial Sequence
  Cyclic GFR-binding peptide
  MOD_RES (4), (5): Xaa is C or S
AAPXXVPQALSPISILFIVGRKPKVYKQYEMI

SEQ ID NO: 52542 - protein, 36 aa, Artificial Sequence; identical to SEQ ID NO: 11369
  Cyclic GFR-binding peptide
  MOD_RES (1), (2), (34), (36): Xaa is C or S

SEQ ID NO: 52543 - protein, 28 aa, Artificial Sequence
  Cyclic GFR-binding peptide
  MOD_RES (3), (3): Xaa is C or S
PTXAPTKLSPISVLFIDDSSNVIYKQYE

SEQ ID NO: 52544 - protein, 30 aa, Artificial Sequence; identical to SEQ ID NO: 11374
  Cyclic GFR-binding peptide

SEQ ID NO: 52545 - protein, 27 aa, Artificial Sequence
  Cyclic GFR-binding peptide
RLEPLTILYYDSANNVVEQLSNDMVVE

SEQ ID NO: 52546 - protein, 21 aa, Artificial Sequence
  Cyclic GFR-binding peptide
LEPLPIVYYDSANNVVEQLSN

SEQ ID NO: 52547 - protein, 27 aa, Artificial Sequence
  Cyclic GFR-binding peptide
VPQDLEPLPIVYYVGRTPKVEQLSNMV

SEQ ID NO: 52548 - protein, 37 aa, Artificial Sequence; identical to SEQ ID NO: 11375
  Cyclic GFR-binding peptide
  MOD_RES (6), (7): Xaa is C or S

SEQ ID NO: 52549 - protein, 36 aa, Artificial Sequence; identical to SEQ ID NO: 11376
  Cyclic GFR-binding peptide
  MOD_RES (1), (33), (35): Xaa is C or S

SEQ ID NO: 52550 - protein, 28 aa, Artificial Sequence
  Cyclic GFR-binding peptide
  MOD_RES (28), (28): Xaa is C or S
LEPLPMVYYDENEKVVEQLSNDMVVEGX

SEQ ID NO: 52551 - protein, 40 aa, Artificial Sequence; identical to SEQ ID NO: 11377
  Cyclic GFR-binding peptide
  MOD_RES (6), (7), (39): Xaa is C or S

SEQ ID NO: 52552 - protein, 28 aa, Artificial Sequence
  Cyclic GFR-binding peptide
PQDLEPLPIVYYVGRTPKVEQLSNMVVK

SEQ ID NO: 52553 - protein, 33 aa, Artificial Sequence
  Cyclic GFR-binding peptide
  MOD_RES (3), (4): Xaa is C or S
KAXXVPTELEPLPMVYYDENEKVVEQLSNDMVV

SEQ ID NO: 52554 - protein, 32 aa, Artificial Sequence
  Cyclic GFR-binding peptide
  MOD_RES (2), (3): Xaa is C or S
PXXVPQALSPISILFIVGRKPKVYKQYEMIVR

SEQ ID NO: 52555 - protein, 28 aa, Artificial Sequence
  Cyclic GFR-binding peptide
TKLEPLPVVYYDDSSNVIEQLSNNMVVR

SEQ ID NO: 52556 - protein, 29 aa, Artificial Sequence
  Cyclic GFR-binding peptide
EPLPIVYYVGRTPKVEQLSNAAAAAAAAA

SEQ ID NO: 52557 - protein, 35 aa, Artificial Sequence; identical to SEQ ID NO: 11379
  Cyclic GFR-binding peptide
  MOD_RES (1), (2), (33), (35): Xaa is C or S

SEQ ID NO: 52558 - protein, 36 aa, Artificial Sequence; identical to SEQ ID NO: 11381
  Cyclic GFR-binding peptide
  MOD_RES (5), (5): Xaa is C or S

SEQ ID NO: 52559 - protein, 35 aa, Artificial Sequence; identical to SEQ ID NO: 11382
  Cyclic GFR-binding peptide
  MOD_RES (1), (2), (33), (35): Xaa is C or S

SEQ ID NO: 52560 - protein, 31 aa, Artificial Sequence
  Cyclic GFR-binding peptide
  MOD_RES (4), (5): Xaa is C or S
PKPXXAPTKLEPLPVVYYDDSSNVIEQLSNN

SEQ ID NO: 52561 - protein, 28 aa, Artificial Sequence
  Cyclic GFR-binding peptide
TRLEPLTILYYDSANNVVEQLSNDMVVE

SEQ ID NO: 52562 - protein, 25 aa, Artificial Sequence
  Cyclic GFR-binding peptide
TELEPLPMVYYDENEKVVEQLSNDM

SEQ ID NO: 52563 - protein, 23 aa, Artificial Sequence
  Cyclic GFR-binding peptide
TELEPLPMVYYDENEKVVEQLSN

SEQ ID NO: 52564 - protein, 28 aa, Artificial Sequence
  Cyclic GFR-binding peptide
  MOD_RES (28), (28): Xaa is C or S
DLEPLPIVYYIGKTPKIEQLSNMIVKSX

SEQ ID NO: 52565 - protein, 28 aa, Artificial Sequence
  Cyclic GFR-binding peptide
PQDLSPISILFIVGRTPKVYKQYEMVVK

SEQ ID NO: 52566 - protein, 23 aa, Artificial Sequence
  Cyclic GFR-binding peptide
QLEPLPVVYYDDSSNVIEQLSNN

SEQ ID NO: 52567 - protein, 31 aa, Artificial Sequence
  Cyclic GFR-binding peptide
  MOD_RES (3), (3): Xaa is C or S
PTXAPTKLEPLPVVYYDDSSNVIEQLSNNMV

SEQ ID NO: 52568 - protein, 31 aa, Artificial Sequence
  Cyclic GFR-binding peptide
  MOD_RES (1), (2): Xaa is C or S
XXVPTRLNAISILYFDSANNVVLKKYRDMVV

SEQ ID NO: 52569 - protein, 31 aa, Artificial Sequence
  Cyclic GFR-binding peptide
  MOD_RES (30), (30): Xaa is C or S
PQALSPISILFIVGRKPKVYKQYEMIVRSXK

SEQ ID NO: 52570 - protein, 34 aa, Artificial Sequence
  Cyclic GFR-binding peptide
  MOD_RES (5), (6): Xaa is C or S
SAAPXXVPQALEPLTILYYVGRKPKVEQLSNMIV

SEQ ID NO: 52571 - protein, 35 aa, Artificial Sequence; identical to SEQ ID NO: 11387
  Cyclic GFR-binding peptide
  MOD_RES (1), (2), (33), (35): Xaa is C or S

SEQ ID NO: 52572 - protein, 27 aa, Artificial Sequence
  Cyclic GFR-binding peptide
  MOD_RES (1), (2): Xaa is C or S
XXAPTQLEPLTVLYYDDSSNVIEQLSN

SEQ ID NO: 52573 - protein, 32 aa, Artificial Sequence
  Cyclic GFR-binding peptide
  MOD_RES (31), (31): Xaa is C or S
PTKLEPLPVVYYDDSSNVIEQLSNNMVVRSXG

SEQ ID NO: 52574 - protein, 37 aa, Artificial Sequence; identical to SEQ ID NO: 11388
  Cyclic GFR-binding peptide
  MOD_RES (2), (3), (35), (37): Xaa is C or S

SEQ ID NO: 52575 - protein, 27 aa, Artificial Sequence
  Cyclic GFR-binding peptide
QDLEPLPIVYYIGKTPKIEQLSNMIVK

SEQ ID NO: 52576 - protein, 33 aa, Artificial Sequence
  Cyclic GFR-binding peptide
  MOD_RES (31), (33): Xaa is C or S
PTKLEPLPVVYYDDSSNVIEQLSNNMVVRSXGX

SEQ ID NO: 52577 - protein, 28 aa, Artificial Sequence
  Cyclic GFR-binding peptide
  MOD_RES (1), (1): Xaa is C or S
XVPTRLEPLPIVYYDSANNVVEQLSNDM

SEQ ID NO: 52578 - protein, 34 aa, Artificial Sequence
  Cyclic GFR-binding peptide
  MOD_RES (31), (33): Xaa is C or S
PTQLEPLTVLYYDDSSNVIEQLSNNMVVRAXGXH

SEQ ID NO: 52579 - protein, 31 aa, Artificial Sequence
  Cyclic GFR-binding peptide
  MOD_RES (28), (30): Xaa is C or S
LEPLPIVYYDSANNVVEQLSNDMVVESXGXR

SEQ ID NO: 52580 - protein, 31 aa, Artificial Sequence; identical to SEQ ID NO: 11393
  Cyclic GFR-binding peptide

SEQ ID NO: 52581 - protein, 27 aa, Artificial Sequence
  Cyclic GFR-binding peptide
PQALEPLTILYYVGRKPKVEQLSNMIV

SEQ ID NO: 52582 - protein, 39 aa, Artificial Sequence; identical to SEQ ID NO: 11394
  Cyclic GFR-binding peptide
  MOD_RES (5), (37), (39): Xaa is C or S

SEQ ID NO: 52583 - protein, 28 aa, Artificial Sequence
  Cyclic GFR-binding peptide
PTRLNAISILYFDSANNVVLKKYRDMVV

SEQ ID NO: 52584 - protein, 31 aa, Artificial Sequence
  Cyclic GFR-binding peptide
  MOD_RES (3), (4): Xaa is C or S
KPXXAPTQLEPLPVVYYDDSSNVIEQLSNNM

SEQ ID NO: 52585 - protein, 37 aa, Artificial Sequence; identical to SEQ ID NO: 11395
  Cyclic GFR-binding peptide
  MOD_RES (5), (37): Xaa is C or S

SEQ ID NO: 52586 - protein, 33 aa, Artificial Sequence; identical to SEQ ID NO: 11396
  Cyclic GFR-binding peptide
  MOD_RES (2), (3): Xaa is C or S

SEQ ID NO: 52587 - protein, 38 aa, Artificial Sequence; identical to SEQ ID NO: 11397
  Cyclic GFR-binding peptide
  MOD_RES (6), (7): Xaa is C or S

SEQ ID NO: 52588 - protein, 32 aa, Artificial Sequence; identical to SEQ ID NO: 11398
  Cyclic GFR-binding peptide
  MOD_RES (1), (32): Xaa is C or S

SEQ ID NO: 52589 - protein, 34 aa, Artificial Sequence; identical to SEQ ID NO: 11399
  Cyclic GFR-binding peptide
  MOD_RES (1), (32), (34): Xaa is C or S

SEQ ID NO: 52590 - protein, 29 aa, Artificial Sequence
  Cyclic GFR-binding peptide
  MOD_RES (27), (29): Xaa is C or S
LEPLPIVYYVGRTPKVEQLSNMVVKSXKX

SEQ ID NO: 52591 - protein, 33 aa, Artificial Sequence
  Cyclic GFR-binding peptide
  MOD_RES (6), (7): Xaa is C or S
ASASPXXVPQDLSPISILFIVGRTPKVYKQYEM

SEQ ID NO: 52592 - protein, 32 aa, Artificial Sequence; identical to SEQ ID NO: 11400
  Cyclic GFR-binding peptide
  MOD_RES (2), (2): Xaa is C or S

SEQ ID NO: 52593 - protein, 34 aa, Artificial Sequence; identical to SEQ ID NO: 11402
  Cyclic GFR-binding peptide
  MOD_RES (1), (32), (34): Xaa is C or S

SEQ ID NO: 52594 - protein, 32 aa, Artificial Sequence
  Cyclic GFR-binding peptide
  MOD_RES (4), (5): Xaa is C or S
PPTXXVPTRLNAISILYFDSANNVVLKKYRDM

SEQ ID NO: 52595 - protein, 27 aa, Artificial Sequence
  Cyclic GFR-binding peptide
LEPLPVVYYDDSSNVIEQLSNNMVVRA

SEQ ID NO: 52596 - protein, 34 aa, Artificial Sequence
  Cyclic GFR-binding peptide
  MOD_RES (31), (33): Xaa is C or S
PTELEPLTMLYYDENEKVVEQLSNDMVVEGXGXR

SEQ ID NO: 52597 - protein, 31 aa, Artificial Sequence
  Cyclic GFR-binding peptide
  MOD_RES (5), (5): Xaa is C or S
TKPTXAPTKLEPLPVVYYDDSSNVIEQLSNN

SEQ ID NO: 52598 - protein, 32 aa, Artificial Sequence
  Cyclic GFR-binding peptide
  MOD_RES (31), (31): Xaa is C or S
PTELEPLPMVYYDEYDKVVEQLSNEMVVEGXG

SEQ ID NO: 52599 - protein, 27 aa, Artificial Sequence
  Cyclic GFR-binding peptide
  MOD_RES (1), (1): Xaa is C or S
XVPTRLEPLTILYYDSANNVVEQLSND

SEQ ID NO: 52600 - protein, 38 aa, Artificial Sequence; identical to SEQ ID NO: 11407
  Cyclic GFR-binding peptide
  MOD_RES (6), (7): Xaa is C or S

SEQ ID NO: 52601 - protein, 27 aa, Artificial Sequence
  Cyclic GFR-binding peptide
LEPLPVVYYDDSSNVIEQLSNNMVVRS

SEQ ID NO: 52602 - protein, 37 aa, Artificial Sequence; identical to SEQ ID NO: 11408
  Cyclic GFR-binding peptide
  MOD_RES (4), (5), (37): Xaa is C or S

SEQ ID NO: 52603 - protein, 37 aa, Artificial Sequence; identical to SEQ ID NO: 11409
  Cyclic GFR-binding peptide
  MOD_RES (2), (3), (35), (37): Xaa is C or S

SEQ ID NO: 52604 - protein, 36 aa, Artificial Sequence; identical to SEQ ID NO: 11411
  Cyclic GFR-binding peptide
  MOD_RES (2), (3), (35): Xaa is C or S

SEQ ID NO: 52605 - protein, 32 aa, Artificial Sequence
  Cyclic GFR-binding peptide
  MOD_RES (2), (3): Xaa is C or S
PXXAPTKLEPLPVVYYDDSSNVIEQLSNNMVV

SEQ ID NO: 52606 - protein, 35 aa, Artificial Sequence; identical to SEQ ID NO: 11410
  Cyclic GFR-binding peptide
  MOD_RES (1), (33), (35): Xaa is C or S

SEQ ID NO: 52607 - protein, 32 aa, Artificial Sequence
  Cyclic GFR-binding peptide
  MOD_RES (4), (5): Xaa is C or S
PPTXXVPTRLEPLPIVYYDSANNVVEQLSNDM

SEQ ID NO: 52608 - protein, 29 aa, Artificial Sequence
  Cyclic GFR-binding peptide
  MOD_RES (28), (28): Xaa is C or S
LSPISVLFIDDSSNVIYKQYENMVVRSXG

SEQ ID NO: 52609 - protein, 30 aa, Artificial Sequence
  Cyclic GFR-binding peptide
PTRLEPLPIVYYDSANNVVEQLSNDMVVES

SEQ ID NO: 52610 - protein, 37 aa, Artificial Sequence; identical to SEQ ID NO: 11412
  Cyclic GFR-binding peptide
  MOD_RES (2), (3), (35), (37): Xaa is C or S

SEQ ID NO: 52611 - protein, 34 aa, Artificial Sequence; identical to SEQ ID NO: 11413
  Cyclic GFR-binding peptide
  MOD_RES (3), (3): Xaa is C or S

SEQ ID NO: 52612 - protein, 20 aa, Artificial Sequence
  Cyclic GFR-binding peptide
SPISVLFIDDSSNVIYKQYE

SEQ ID NO: 52613 - protein, 33 aa, Artificial Sequence; identical to SEQ ID NO: 11414
  Cyclic GFR-binding peptide
  MOD_RES (2), (3): Xaa is C or S

SEQ ID NO: 52614 - protein, 22 aa, Artificial Sequence
  Cyclic GFR-binding peptide
NAISILYFDSANNVVLKKYRDM

SEQ ID NO: 52615 - protein, 31 aa, Artificial Sequence
  Cyclic GFR-binding peptide
  MOD_RES (3), (4): Xaa is C or S
KAXXVPTELSPISMLFIDEYDKVVYKQYEEM

SEQ ID NO: 52616 - protein, 27 aa, Artificial Sequence
  Cyclic GFR-binding peptide
  MOD_RES (2), (2): Xaa is C or S
TXAPTKLSPISVLFIDDSSNVIYKQYE

SEQ ID NO: 52617 - protein, 33 aa, Artificial Sequence; identical to SEQ ID NO: 11415
  Cyclic GFR-binding peptide
  MOD_RES (32), (32): Xaa is C or S

SEQ ID NO: 52618 - protein, 35 aa, Artificial Sequence; identical to SEQ ID NO: 11417
  Cyclic GFR-binding peptide
  MOD_RES (4), (5): Xaa is C or S

SEQ ID NO: 52619 - protein, 27 aa, Artificial Sequence
  Cyclic GFR-binding peptide
  MOD_RES (1), (2): Xaa is C or S
XXAPTKLEPLTVLYYDDSSNVIEQLSN

SEQ ID NO: 52620 - protein, 29 aa, Artificial Sequence
  Cyclic GFR-binding peptide
SPISVLFIDDSSNVIYKQYEAAAAAAAAA

SEQ ID NO: 52621 - protein, 31 aa, Artificial Sequence
  Cyclic GFR-binding peptide
  MOD_RES (30), (30): Xaa is C or S
TRLEPLPIVYYDSANNVVEQLSNDMVVESXG

SEQ ID NO: 52622 - protein, 29 aa, Artificial Sequence
  Cyclic GFR-binding peptide
SPISILFIVGRTPKVYKQYEAAAAAAAAA

SEQ ID NO: 52623 - protein, 29 aa, Artificial Sequence
  Cyclic GFR-binding peptide
  MOD_RES (29), (29): Xaa is C or S
ELEPLTMLYYDENEKVVEQLSNDMVVEGX

SEQ ID NO: 52624 - protein, 26 aa, Artificial Sequence
  Cyclic GFR-binding peptide
LNAISILYFDSANNVVLKKYRDMVVE

SEQ ID NO: 52625 - protein, 31 aa, Artificial Sequence
  Cyclic GFR-binding peptide
  MOD_RES (30), (30): Xaa is C or S
SQDLSPISILFIIGKTPKIYKQYEMIVKSXK

SEQ ID NO: 52626 - protein, 24 aa, Artificial Sequence
  Cyclic GFR-binding peptide
PTQLSPISVLFIDDSSNVIYKQYE

SEQ ID NO: 52627 - protein, 38 aa, Artificial Sequence; identical to SEQ ID NO: 11420
  Cyclic GFR-binding peptide
  MOD_RES (5), (6), (38): Xaa is C or S

SEQ ID NO: 52628 - protein, 26 aa, Artificial Sequence
  Cyclic GFR-binding peptide
VPTELSPISMLFIDEYDKVVYKQYEE

SEQ ID NO: 52629 - protein, 31 aa, Artificial Sequence
  Cyclic GFR-binding peptide
  MOD_RES (30), (30): Xaa is C or S
PQDLSPISILFIVGRTPKVYKQYEMVVKSXK

SEQ ID NO: 52630 - protein, 35 aa, Artificial Sequence; identical to SEQ ID NO: 11421
  Cyclic GFR-binding peptide
  MOD_RES (4), (5): Xaa is C or S

SEQ ID NO: 52631 - protein, 30 aa, Artificial Sequence
  Cyclic GFR-binding peptide
  MOD_RES (1), (2): Xaa is C or S
XXAPTQLEPLTVLYYDDSSNVIEQLSNNMV

SEQ ID NO: 52632 - protein, 30 aa, Artificial Sequence
  Cyclic GFR-binding peptide
  MOD_RES (27), (29): Xaa is C or S
LSPISILFIIGKTPKIYKQYEMIVKSXKXS

SEQ ID NO: 52633 - protein, 29 aa, Artificial Sequence
  Cyclic GFR-binding peptide
VSQDLSPISILFIIGKTPKIYKQYEMIVK

SEQ ID NO: 52634 - protein, 28 aa, Artificial Sequence
  Cyclic GFR-binding peptide
  MOD_RES (28), (28): Xaa is C or S
LEPLPIVYYDSANNVVEQLSNDMVVESX

SEQ ID NO: 52635 - protein, 20 aa, Artificial Sequence
  Cyclic GFR-binding peptide
EPLTILYYVGRKPKVEQLSN

SEQ ID NO: 52636 - protein, 31 aa, Artificial Sequence
  Cyclic GFR-binding peptide
  MOD_RES (29), (31): Xaa is C or S
QDLSPISILFIVGRTPKVYKQYEMVVKSXKX

SEQ ID NO: 52637 - protein, 34 aa, Artificial Sequence; identical to SEQ ID NO: 11424
  Cyclic GFR-binding peptide
  MOD_RES (1), (32), (34): Xaa is C or S

SEQ ID NO: 52638 - protein, 28 aa, Artificial Sequence
  Cyclic GFR-binding peptide
VPQDLSPISILFIVGRTPKVYKQYEMVV

SEQ ID NO: 52639 - protein, 38 aa, Artificial Sequence; identical to SEQ ID NO: 11425
  Cyclic GFR-binding peptide
  MOD_RES (2), (3), (35), (37): Xaa is C or S

SEQ ID NO: 52640 - protein, 32 aa, Artificial Sequence
  Cyclic GFR-binding peptide
  MOD_RES (4), (5): Xaa is C or S
PKAXXVPTELEPLPMVYYDENEKVVEQLSNDM

SEQ ID NO: 52641 - protein, 25 aa, Artificial Sequence
  Cyclic GFR-binding peptide
PTKLEPLPVVYYDDSSNVIEQLSNN

SEQ ID NO: 52642 - protein, 23 aa, Artificial Sequence
  Cyclic GFR-binding peptide
TELSPISMLFIDEYDKVVYKQYE

SEQ ID NO: 52643 - protein, 41 aa, Artificial Sequence; identical to SEQ ID NO: 11429
  Cyclic GFR-binding peptide
  MOD_RES (5), (6), (38), (40): Xaa is C or S

SEQ ID NO: 52644 - protein, 29 aa, Artificial Sequence
  Cyclic GFR-binding peptide
VPTRLEPLTILYYDSANNVVEQLSNDMVV

SEQ ID NO: 52645 - protein, 29 aa, Artificial Sequence
  Cyclic GFR-binding peptide
  MOD_RES (1), (1): Xaa is C or S
XAPTQLEPLTVLYYDDSSNVIEQLSNNMV

SEQ ID NO: 52646 - protein, 28 aa, Artificial Sequence
  Cyclic GFR-binding peptide
  MOD_RES (2), (3): Xaa is C or S
TXXVPTRLSAISILYLDSANNVVLKNYQ

SEQ ID NO: 52647 - protein, 30 aa, Artificial Sequence
  Cyclic GFR-binding peptide
  MOD_RES (3), (4): Xaa is C or S
SPXXVPQDLSPISILFIVGRTPKVYKQYEM

SEQ ID NO: 52648 - protein, 36 aa, Artificial Sequence; identical to SEQ ID NO: 11430
  Cyclic GFR-binding peptide
  MOD_RES (3), (4), (36): Xaa is C or S

SEQ ID NO: 52649 - protein, 37 aa, Artificial Sequence; identical to SEQ ID NO: 11431
  Cyclic GFR-binding peptide
  MOD_RES (2), (3), (34), (36): Xaa is C or S

SEQ ID NO: 52650 - protein, 37 aa, Artificial Sequence; identical to SEQ ID NO: 11433
  Cyclic GFR-binding peptide
  MOD_RES (5), (6): Xaa is C or S

SEQ ID NO: 52651 - protein, 26 aa, Artificial Sequence
  Cyclic GFR-binding peptide
  MOD_RES (1), (1): Xaa is C or S
XAPTKLSPISVLFIDDSSNVIYKQYE

SEQ ID NO: 52652 - protein, 31 aa, Artificial Sequence
  Cyclic GFR-binding peptide
  MOD_RES (29), (31): Xaa is C or S
QDLSPISILFIIGKTPKIYKQYEMIVKSXKX

SEQ ID NO: 52653 - protein, 33 aa, Artificial Sequence
  Cyclic GFR-binding peptide
  MOD_RES (5), (6): Xaa is C or S
VPKPXXAPTQLEPLTVLYYDDSSNVIEQLSNNM

SEQ ID NO: 52654 - protein, 27 aa, Artificial Sequence
  Cyclic GFR-binding peptide
ELSPISMLFIDEYDKVVYKQYEEMVVE

SEQ ID NO: 52655 - protein, 33 aa, Artificial Sequence
  Cyclic GFR-binding peptide
  MOD_RES (4), (5): Xaa is C or S
ASPXXVSQDLEPLPIVYYIGKTPKIEQLSNMIV

SEQ ID NO: 52656 - protein, 39 aa, Artificial Sequence; identical to SEQ ID NO: 11435
  Cyclic GFR-binding peptide
  MOD_RES (4), (5), (37), (39): Xaa is C or S

SEQ ID NO: 52657 - protein, 32 aa, Artificial Sequence; identical to SEQ ID NO: 11436
  Cyclic GFR-binding peptide
  MOD_RES (1), (2): Xaa is C or S

SEQ ID NO: 52658 - protein, 23 aa, Artificial Sequence
  Cyclic GFR-binding peptide
EPLTILYYVGRKPKVEQLSNMIV

SEQ ID NO: 52659 - protein, 29 aa, Artificial Sequence
  Cyclic GFR-binding peptide
  MOD_RES (1), (1): Xaa is C or S
XVPQDLSPISILFIVGRTPKVYKQYEMVV

SEQ ID NO: 52660 - protein, 26 aa, Artificial Sequence
  Cyclic GFR-binding peptide
  MOD_RES (26), (26): Xaa is C or S
EPLPIVYYVGRTPKVEQLSNMVVKSX

SEQ ID NO: 52661 - protein, 23 aa, Artificial Sequence
  Cyclic GFR-binding peptide
KLEPLTVLYYDDSSNVIEQLSNN

SEQ ID NO: 52662 - protein, 25 aa, Artificial Sequence
  Cyclic GFR-binding peptide
VPTRLSAISILYLDSANNVVLKNYQ

SEQ ID NO: 52663 - protein, 38 aa, Artificial Sequence; identical to SEQ ID NO: 11441
  Cyclic GFR-binding peptide
  MOD_RES (6), (7): Xaa is C or S

SEQ ID NO: 52664 - protein, 26 aa, Artificial Sequence
  Cyclic GFR-binding peptide
KLEPLTVLYYDDSSNVIEQLSNNMVV

SEQ ID NO: 52665 - protein, 25 aa, Artificial Sequence
  Cyclic GFR-binding peptide
EPLPIVYYIGKTPKIEQLSNMIVKS

SEQ ID NO: 52666 - protein, 36 aa, Artificial Sequence; identical to SEQ ID NO: 11442
  Cyclic GFR-binding peptide
  MOD_RES (2), (3), (35): Xaa is C or S

SEQ ID NO: 52667 - protein, 29 aa, Artificial Sequence
  Cyclic GFR-binding peptide
TRLEPLTILYYDSANNVVEQLSNDMVVES

SEQ ID NO: 52668 - protein, 34 aa, Artificial Sequence; identical to SEQ ID NO: 11443
  Cyclic GFR-binding peptide
  MOD_RES (1), (33): Xaa is C or S

SEQ ID NO: 52669 - protein, 27 aa, Artificial Sequence
  Cyclic GFR-binding peptide
  MOD_RES (1), (2): Xaa is C or S
XXVPTELSPISMLFIDENEKVVYKQYE

SEQ ID NO: 52670 - protein, 33 aa, Artificial Sequence; identical to SEQ ID NO: 11447
  Cyclic GFR-binding peptide
  MOD_RES (1), (2), (33): Xaa is C or S

SEQ ID NO: 52671 - protein, 24 aa, Artificial Sequence
  Cyclic GFR-binding peptide
PTELEPLTMLYYDEYDKVVEQLSN

SEQ ID NO: 52672 - protein, 30 aa, Artificial Sequence
  Cyclic GFR-binding peptide
PTQLSPISVLFIDDSSNVIYKQYENMVVRA

SEQ ID NO: 52673 - protein, 38 aa, Artificial Sequence; identical to SEQ ID NO: 11448
  Cyclic GFR-binding peptide
  MOD_RES (4), (5), (36), (38): Xaa is C or S

SEQ ID NO: 52674 - protein, 37 aa, Artificial Sequence; identical to SEQ ID NO: 11449
  Cyclic GFR-binding peptide
  MOD_RES (4), (5), (37): Xaa is C or S

SEQ ID NO: 52675 - protein, 24 aa, Artificial Sequence
  Cyclic GFR-binding peptide
EPLPVVYYDDSSNVIEQLSNNMVV

SEQ ID NO: 52676 - protein, 36 aa, Artificial Sequence; identical to SEQ ID NO: 11450
  Cyclic GFR-binding peptide
  MOD_RES (5), (6): Xaa is C or S

SEQ ID NO: 52677 - protein, 38 aa, Artificial Sequence; identical to SEQ ID NO: 11451
  Cyclic GFR-binding peptide
  MOD_RES (4), (36), (38): Xaa is C or S

SEQ ID NO: 52678 - protein, 39 aa, Artificial Sequence; identical to SEQ ID NO: 11452
  Cyclic GFR-binding peptide
  MOD_RES (3), (4), (36), (38): Xaa is C or S

SEQ ID NO: 52679 - protein, 42 aa, Artificial Sequence; identical to SEQ ID NO: 11453
  Cyclic GFR-binding peptide
  MOD_RES (6), (7), (39), (41): Xaa is C or S

SEQ ID NO: 52680 - protein, 26 aa, Artificial Sequence
  Cyclic GFR-binding peptide
PTKLEPLTVLYYDDSSNVIEQLSNNM

SEQ ID NO: 52681 - protein, 26 aa, Artificial Sequence
  Cyclic GFR-binding peptide
  MOD_RES (1), (1): Xaa is C or S
XVPQALSPISILFIVGRKPKVYKQYE

SEQ ID NO: 52682 - protein, 38 aa, Artificial Sequence; identical to SEQ ID NO: 11454
  Cyclic GFR-binding peptide
  MOD_RES (3), (4), (36), (38): Xaa is C or S

SEQ ID NO: 52683 - protein, 29 aa, Artificial Sequence
  Cyclic GFR-binding peptide
  MOD_RES (26), (28): Xaa is C or S
SPISILFIVGRTPKVYKQYEMVVKSXKXS

SEQ ID NO: 52684 - protein, 28 aa, Artificial Sequence
  Cyclic GFR-binding peptide
APTKLSPISVLFIDDSSNVIYKQYENMV

SEQ ID NO: 52685 - protein, 27 aa, Artificial Sequence
  Cyclic GFR-binding peptide
  MOD_RES (27), (27): Xaa is C or S
SPISVLFIDDSSNVIYKQYENMVVRSX

SEQ ID NO: 52686 - protein, 28 aa, Artificial Sequence
  Cyclic GFR-binding peptide
  MOD_RES (1), (2): Xaa is C or S
XXVPTRLEPLTILYYDSANNVVEQLSND

SEQ ID NO: 52687 - protein, 42 aa, Artificial Sequence; identical to SEQ ID NO: 11456
  Cyclic GFR-binding peptide
  MOD_RES (7), (39), (41): Xaa is C or S

SEQ ID NO: 52688 - protein, 23 aa, Artificial Sequence
  Cyclic GFR-binding peptide
TRLNAISILYFDSANNVVLKKYR

SEQ ID NO: 52689 - protein, 40 aa, Artificial Sequence; identical to SEQ ID NO: 11457
  Cyclic GFR-binding peptide
  MOD_RES (6), (7), (39): Xaa is C or S

SEQ ID NO: 52690 - protein, 25 aa, Artificial Sequence
  Cyclic GFR-binding peptide
VPQALEPLTILYYVGRKPKVEQLSN

SEQ ID NO: 52691 - protein, 29 aa, Artificial Sequence
  Cyclic GFR-binding peptide
EPLTMLYYDENEKVVEQLSNAAAAAAAAA

SEQ ID NO: 52692 - protein, 30 aa, Artificial Sequence
  Cyclic GFR-binding peptide
  MOD_RES (30), (30): Xaa is C or S
TQLEPLPVVYYDDSSNVIEQLSNNMVVRAX

SEQ ID NO: 52693 - protein, 31 aa, Artificial Sequence
  Cyclic GFR-binding peptide
  MOD_RES (28), (30): Xaa is C or S
LSPISVLFIDDSSNVIYKQYENMVVRAXGXH

SEQ ID NO: 52694 - protein, 30 aa, Artificial Sequence
  Cyclic GFR-binding peptide
  MOD_RES (4), (5): Xaa is C or S
PKPXXAPTQLSPISVLFIDDSSNVIYKQYE

SEQ ID NO: 52695 - protein, 33 aa, Artificial Sequence; identical to SEQ ID NO: 11459
  Cyclic GFR-binding peptide
  MOD_RES (32), (32): Xaa is C or S

SEQ ID NO: 52696 - protein, 39 aa, Artificial Sequence; identical to SEQ ID NO: 11462
  Cyclic GFR-binding peptide
  MOD_RES (5), (6), (37), (39): Xaa is C or S

SEQ ID NO: 52697 - protein, 38 aa, Artificial Sequence; identical to SEQ ID NO: 11463
  Cyclic GFR-binding peptide
  MOD_RES (3), (4), (36), (38): Xaa is C or S

SEQ ID NO: 52698 - protein, 26 aa, Artificial Sequence
  Cyclic GFR-binding peptide
PTELEPLTMLYYDEYDKVVEQLSNEM

SEQ ID NO: 52699 - protein, 35 aa, Artificial Sequence; identical to SEQ ID NO: 11464
  Cyclic GFR-binding peptide
  MOD_RES (4), (5): Xaa is C or S

SEQ ID NO: 52700 - protein, 26 aa, Artificial Sequence
  Cyclic GFR-binding peptide
TRLNAISILYFDSANNVVLKKYRDMV

SEQ ID NO: 52701 - protein, 28 aa, Artificial Sequence
  Cyclic GFR-binding peptide
PQALEPLTILYYVGRKPKVEQLSNMIVR

SEQ ID NO: 52702 - protein, 34 aa, Artificial Sequence; identical to SEQ ID NO: 11465
  Cyclic GFR-binding peptide
  MOD_RES (1), (33): Xaa is C or S

SEQ ID NO: 52703 - protein, 27 aa, Artificial Sequence
  Cyclic GFR-binding peptide
TKLEPLPVVYYDDSSNVIEQLSNNMVV

SEQ ID NO: 52704 - protein, 36 aa, Artificial Sequence
  Cyclic GFR-binding peptide
  MOD_RES (6), (7): Xaa is C or S
ASASPXXVPQDLSPISILFIVGRTPKVYKQYEMVVK

SEQ ID NO: 52705 - protein, 38 aa, Artificial Sequence; identical to SEQ ID NO: 11467
  Cyclic GFR-binding peptide
  MOD_RES (5), (6), (38): Xaa is C or S

SEQ ID NO: 52706 - protein, 23 aa, Artificial Sequence
  Cyclic GFR-binding peptide
LEPLPIVYYDSANNVVEQLSNDM

SEQ ID NO: 52707 - protein, 26 aa, Artificial Sequence
  Cyclic GFR-binding peptide
LSPISILFIVGRTPKVYKQYEMVVKS

SEQ ID NO: 52708 - protein, 32 aa, Artificial Sequence
  Cyclic GFR-binding peptide
  MOD_RES (6), (7): Xaa is C or S
KIPKAXXVPTELSPISMLFIDENEKVVYKQYE

SEQ ID NO: 52709 - protein, 30 aa, Artificial Sequence
  Cyclic GFR-binding peptide
  MOD_RES (29), (29): Xaa is C or S
QDLSPISILFIVGRTPKVYKQYEMVVKSXK

SEQ ID NO: 52710 - protein, 38 aa, Artificial Sequence; identical to SEQ ID NO: 11470
  Cyclic GFR-binding peptide
  MOD_RES (3), (4), (36), (38): Xaa is C or S

SEQ ID NO: 52711 - protein, 23 aa, Artificial Sequence
  Cyclic GFR-binding peptide
TKLEPLTVLYYDDSSNVIEQLSN

SEQ ID NO: 52712 - protein, 29 aa, Artificial Sequence
  Cyclic GFR-binding peptide
  MOD_RES (1), (1): Xaa is C or S
XAPTKLSPISVLFIDDSSNVIYKQYENMV

SEQ ID NO: 52713 - protein, 34 aa, Artificial Sequence
  Cyclic GFR-binding peptide
  MOD_RES (31), (33): Xaa is C or S
PTRLEPLTILYYDSANNVVEQLSNDMVVESXGXR

SEQ ID NO: 52714 - protein, 27 aa, Artificial Sequence
  Cyclic GFR-binding peptide
SQDLEPLPIVYYIGKTPKIEQLSNMIV

SEQ ID NO: 52715 - protein, 29 aa, Artificial Sequence
  Cyclic GFR-binding peptide
  MOD_RES (1), (2): Xaa is C or S
XXAPTKLSPISVLFIDDSSNVIYKQYENM

SEQ ID NO: 52716 - protein, 23 aa, Artificial Sequence
  Cyclic GFR-binding peptide
LEPLTMLYYDEYDKVVEQLSNEM

SEQ ID NO: 52717 - protein, 22 aa, Artificial Sequence
  Cyclic GFR-binding peptide
ELEPLTMLYYDENEKVVEQLSN

SEQ ID NO: 52718 - protein, 33 aa, Artificial Sequence; identical to SEQ ID NO: 11474
  Cyclic GFR-binding peptide
  MOD_RES (1), (33): Xaa is C or S

SEQ ID NO: 52719 - protein, 26 aa, Artificial Sequence
  Cyclic GFR-binding peptide
QDLEPLPIVYYVGRTPKVEQLSNMVV

SEQ ID NO: 52720 - protein, 39 aa, Artificial Sequence; identical to SEQ ID NO: 11476
  Cyclic GFR-binding peptide
  MOD_RES (6), (7), (39): Xaa is C or S

SEQ ID NO: 52721 - protein, 36 aa, Artificial Sequence; identical to SEQ ID NO: 11477
  Cyclic GFR-binding peptide
  MOD_RES (4), (5): Xaa is C or S

SEQ ID NO: 52722 - protein, 25 aa, Artificial Sequence
  Cyclic GFR-binding peptide
QALEPLTILYYVGRKPKVEQLSNMI

SEQ ID NO: 52723 - protein, 20 aa, Artificial Sequence
  Cyclic GFR-binding peptide
SAISILYLDSANNVVLKNYQ

SEQ ID NO: 52724 - protein, 30 aa, Artificial Sequence
  Cyclic GFR-binding peptide
  MOD_RES (3), (4): Xaa is C or S
KPXXAPTQLEPLTVLYYDDSSNVIEQLSNN

SEQ ID NO: 52725 - protein, 40 aa, Artificial Sequence; identical to SEQ ID NO: 11480
  Cyclic GFR-binding peptide
  MOD_RES (4), (5), (37), (39): Xaa is C or S

SEQ ID NO: 52726 - protein, 20 aa, Artificial Sequence
  Cyclic GFR-binding peptide
EPLPMVYYDENEKVVEQLSN

SEQ ID NO: 52727 - protein, 26 aa, Artificial Sequence
  Cyclic GFR-binding peptide
PQALSPISILFIVGRKPKVYKQYEMI

SEQ ID NO: 52728 - protein, 35 aa, Artificial Sequence; identical to SEQ ID NO: 11482
  Cyclic GFR-binding peptide
  MOD_RES (1), (32), (34): Xaa is C or S

SEQ ID NO: 52729 - protein, 35 aa, Artificial Sequence
  Cyclic GFR-binding peptide
  MOD_RES (6), (6): Xaa is C or S
VTKPTXAPTKLEPLPVVYYDDSSNVIEQLSNNMVV

SEQ ID NO: 52730 - protein, 28 aa, Artificial Sequence
  Cyclic GFR-binding peptide
  MOD_RES (1), (1): Xaa is C or S
XAPTKLEPLTVLYYDDSSNVIEQLSNNM

SEQ ID NO: 52731 - protein, 27 aa, Artificial Sequence
  Cyclic GFR-binding peptide
  MOD_RES (27), (27): Xaa is C or S
SPISMLFIDEYDKVVYKQYEEMVVEGX

SEQ ID NO: 52732 - protein, 36 aa, Artificial Sequence; identical to SEQ ID NO: 11483
  Cyclic GFR-binding peptide
  MOD_RES (4), (5): Xaa is C or S

SEQ ID NO: 52733 - protein, 27 aa, Artificial Sequence
  Cyclic GFR-binding peptide
PTRLEPLTILYYDSANNVVEQLSNDMV

SEQ ID NO: 52734 - protein, 34 aa, Artificial Sequence; identical to SEQ ID NO: 11484
  Cyclic GFR-binding peptide
  MOD_RES (31), (33): Xaa is C or S

SEQ ID NO: 52735 - protein, 30 aa, Artificial Sequence
  Cyclic GFR-binding peptide
  MOD_RES (30), (30): Xaa is C or S
TELEPLPMVYYDEYDKVVEQLSNEMVVEGX

SEQ ID NO: 52736 - protein, 28 aa, Artificial Sequence
  Cyclic GFR-binding peptide
VPTELEPLTMLYYDEYDKVVEQLSNEMV

SEQ ID NO: 52737 - protein, 30 aa, Artificial Sequence
  Cyclic GFR-binding peptide
  MOD_RES (29), (29): Xaa is C or S
QALEPLTILYYVGRKPKVEQLSNMIVRSXK

SEQ ID NO: 52738 - protein, 35 aa, Artificial Sequence; identical to SEQ ID NO: 11488
  Cyclic GFR-binding peptide
  MOD_RES (2), (3), (35): Xaa is C or S

SEQ ID NO: 52739 - protein, 33 aa, Artificial Sequence; identical to SEQ ID NO: 11487
  Cyclic GFR-binding peptide
  MOD_RES (32), (32): Xaa is C or S

SEQ ID NO: 52740 - protein, 40 aa, Artificial Sequence; identical to SEQ ID NO: 11489
  Cyclic GFR-binding peptide
  MOD_RES (4), (5), (37), (39): Xaa is C or S

SEQ ID NO: 52741 - protein, 32 aa, Artificial Sequence; identical to SEQ ID NO: 11490
  Cyclic GFR-binding peptide
  MOD_RES (31), (31): Xaa is C or S

SEQ ID NO: 52742 - protein, 32 aa, Artificial Sequence
  Cyclic GFR-binding peptide
  MOD_RES (4), (5): Xaa is C or S
PKPXXAPTQLSPISVLFIDDSSNVIYKQYENM

SEQ ID NO: 52743 - protein, 20 aa, Artificial Sequence
  Cyclic GFR-binding peptide
SPISILFIIGKTPKIYKQYE

SEQ ID NO: 52744 - protein, 25 aa, Artificial Sequence
  Cyclic GFR-binding peptide
APTKLEPLTVLYYDDSSNVIEQLSN

SEQ ID NO: 52745 - protein, 34 aa, Artificial Sequence
  Cyclic GFR-binding peptide
  MOD_RES (4), (5): Xaa is C or S
PPTXXVPTRLNAISILYFDSANNVVLKKYRDMVV

SEQ ID NO: 52746 - protein, 35 aa, Artificial Sequence
  Cyclic GFR-binding peptide
  MOD_RES (6), (7): Xaa is C or S
ASASPXXVPQDLEPLPIVYYVGRTPKVEQLSNMVV

SEQ ID NO: 52747 - protein, 25 aa, Artificial Sequence
  Cyclic GFR-binding peptide
ELEPLPMVYYDEYDKVVEQLSNEMV

SEQ ID NO: 52748 - protein, 34 aa, Artificial Sequence
  Cyclic GFR-binding peptide
  MOD_RES (4), (5): Xaa is C or S
PKAXXVPTELSPISMLFIDEYDKVVYKQYEEMVV

SEQ ID NO: 52749 - protein, 21 aa, Artificial Sequence
  Cyclic GFR-binding peptide
LNAISILYFDSANNVVLKKYR

SEQ ID NO: 52750 - protein, 28 aa, Artificial Sequence
  Cyclic GFR-binding peptide
  MOD_RES (1), (2): Xaa is C or S
XXVPTELEPLPMVYYDENEKVVEQLSND

SEQ ID NO: 52751 - protein, 27 aa, Artificial Sequence
  Cyclic GFR-binding peptide
  MOD_RES (27), (27): Xaa is C or S
EPLPVVYYDDSSNVIEQLSNNMVVRAX

SEQ ID NO: 52752 - protein, 28 aa, Artificial Sequence
  Cyclic GFR-binding peptide
  MOD_RES (28), (28): Xaa is C or S
LEPLTVLYYDDSSNVIEQLSNNMVVRSX

SEQ ID NO: 52753 - protein, 30 aa, Artificial Sequence
  Cyclic GFR-binding peptide
  MOD_RES (1), (1): Xaa is C or S
XVPTRLEPLTILYYDSANNVVEQLSNDMVV

SEQ ID NO: 52754 - protein, 33 aa, Artificial Sequence; identical to SEQ ID NO: 11495
  Cyclic GFR-binding peptide
  MOD_RES (1), (32): Xaa is C or S

SEQ ID NO: 52755 - protein, 34 aa, Artificial Sequence
  Cyclic GFR-binding peptide
  MOD_RES (5), (6): Xaa is C or S
IPKAXXVPTELEPLTMLYYDEYDKVVEQLSNEMV

SEQ ID NO: 52756 - protein, 34 aa, Artificial Sequence
  Cyclic GFR-binding peptide
  MOD_RES (4), (5): Xaa is C or S
PKPXXAPTQLEPLTVLYYDDSSNVIEQLSNNMVV

SEQ ID NO: 52757 - protein, 31 aa, Artificial Sequence
  Cyclic GFR-binding peptide
  MOD_RES (5), (6): Xaa is C or S
TPPTXXVPTRLSAISILYLDSANNVVLKNYQ

SEQ ID NO: 52758 - protein, 36 aa, Artificial Sequence; identical to SEQ ID NO: 11496
  Cyclic GFR-binding peptide
  MOD_RES (4), (5): Xaa is C or S

SEQ ID NO: 52759 - protein, 36 aa, Artificial Sequence; identical to SEQ ID NO: 11497
  Cyclic GFR-binding peptide
  MOD_RES (2), (3), (35): Xaa is C or S

SEQ ID NO: 52760 - protein, 42 aa, Artificial Sequence; identical to SEQ ID NO: 11499
  Cyclic GFR-binding peptide
  MOD_RES (6), (7), (39), (41): Xaa is C or S

SEQ ID NO: 52761 - protein, 34 aa, Artificial Sequence; identical to SEQ ID NO: 11500
  Cyclic GFR-binding peptide
  MOD_RES (3), (3): Xaa is C or S

SEQ ID NO: 52762 - protein, 31 aa, Artificial Sequence
  Cyclic GFR-binding peptide
  MOD_RES (29), (31): Xaa is C or S
RLEPLPIVYYDSANNVVEQLSNDMVVESXGX

SEQ ID NO: 52763 - protein, 29 aa, Artificial Sequence
  Cyclic GFR-binding peptide
EPLTILYYDSANNVVEQLSNAAAAAAAAA

SEQ ID NO: 52764 - protein, 39 aa, Artificial Sequence; identical to SEQ ID NO: 11501
  Cyclic GFR-binding peptide
  MOD_RES (6), (38): Xaa is C or S

SEQ ID NO: 52765 - protein, 27 aa, Artificial Sequence
  Cyclic GFR-binding peptide
APTQLSPISVLFIDDSSNVIYKQYENM

SEQ ID NO: 52766 - protein, 28 aa, Artificial Sequence
  Cyclic GFR-binding peptide
  MOD_RES (1), (2): Xaa is C or S
XXVPTELSPISMLFIDENEKVVYKQYED

SEQ ID NO: 52767 - protein, 35 aa, Artificial Sequence; identical to SEQ ID NO: 11503
  Cyclic GFR-binding peptide
  MOD_RES (32), (34): Xaa is C or S

SEQ ID NO: 52768 - protein, 36 aa, Artificial Sequence; identical to SEQ ID NO: 11504
  Cyclic GFR-binding peptide
  MOD_RES (1), (33), (35): Xaa is C or S

SEQ ID NO: 52769 - protein, 24 aa, Artificial Sequence
  Cyclic GFR-binding peptide
PTELSPISMLFIDENEKVVYKQYE

SEQ ID NO: 52770 - protein, 26 aa, Artificial Sequence
  Cyclic GFR-binding peptide
LEPLPVVYYDDSSNVIEQLSNNMVVR

SEQ ID NO: 52771 - protein, 34 aa, Artificial Sequence
  Cyclic GFR-binding peptide
  MOD_RES (5), (6): Xaa is C or S
SASPXXVSQDLSPISILFIIGKTPKIYKQYEMIV

SEQ ID NO: 52772 - protein, 37 aa, Artificial Sequence; identical to SEQ ID NO: 11506
  Cyclic GFR-binding peptide
  MOD_RES (6), (7): Xaa is C or S

SEQ ID NO: 52773 - protein, 31 aa, Artificial Sequence
  Cyclic GFR-binding peptide
  MOD_RES (31), (31): Xaa is C or S
PTKLEPLTVLYYDDSSNVIEQLSNNMVVRSX

SEQ ID NO: 52774 - protein, 31 aa, Artificial Sequence
  Cyclic GFR-binding peptide
  MOD_RES (28), (30): Xaa is C or S
DLSPISILFIVGRTPKVYKQYEMVVKSXKXS

SEQ ID NO: 52775 - protein, 36 aa, Artificial Sequence; identical to SEQ ID NO: 11507
  Cyclic GFR-binding peptide
  MOD_RES (4), (5): Xaa is C or S

SEQ ID NO: 52776 - protein, 30 aa, Artificial Sequence
  Cyclic GFR-binding peptide
  MOD_RES (29), (29): Xaa is C or S
QDLEPLPIVYYVGRTPKVEQLSNMVVKSXK

SEQ ID NO: 52777 - protein, 36 aa, Artificial Sequence; identical to SEQ ID NO: 11508
  Cyclic GFR-binding peptide
  MOD_RES (5), (6): Xaa is C or S

SEQ ID NO: 52778 - protein, 33 aa, Artificial Sequence; identical to SEQ ID NO: 11509
  Cyclic GFR-binding peptide
  MOD_RES (32), (32): Xaa is C or S

SEQ ID NO: 52779 - protein, 35 aa, Artificial Sequence
  Cyclic GFR-binding peptide
  MOD_RES (5), (6): Xaa is C or S
IPKAXXVPTELSPISMLFIDENEKVVYKQYEDMVV

SEQ ID NO: 52780 - protein, 32 aa, Artificial Sequence
  Cyclic GFR-binding peptide
  MOD_RES (3), (4): Xaa is C or S
PTXXVPTRLEPLPIVYYDSANNVVEQLSNDMV

SEQ ID NO: 52781 - protein, 29 aa, Artificial Sequence
  Cyclic GFR-binding peptide
  MOD_RES (3), (4): Xaa is C or S
KPXXAPTKLEPLTVLYYDDSSNVIEQLSN

SEQ ID NO: 52782 - protein, 34 aa, Artificial Sequence; identical to SEQ ID NO: 11510
  Cyclic GFR-binding peptide
  MOD_RES (1), (2), (34): Xaa is C or S

SEQ ID NO: 52783 - protein, 27 aa, Artificial Sequence
  Cyclic GFR-binding peptide
  MOD_RES (1), (1): Xaa is C or S
XVPTELSPISMLFIDEYDKVVYKQYEE

SEQ ID NO: 52784 - protein, 26 aa, Artificial Sequence
  Cyclic GFR-binding peptide
ALEPLTILYYVGRKPKVEQLSNMIVR

SEQ ID NO: 52785 - protein, 37 aa, Artificial Sequence; identical to SEQ ID NO: 11511
  Cyclic GFR-binding peptide
  MOD_RES (4), (36): Xaa is C or S

SEQ ID NO: 52786 - protein, 35 aa, Artificial Sequence
  Cyclic GFR-binding peptide
  MOD_RES (5), (6): Xaa is C or S
VPKPXXAPTQLSPISVLFIDDSSNVIYKQYENMVV

SEQ ID NO: 52787 - protein, 37 aa, Artificial Sequence; identical to SEQ ID NO: 11513
  Cyclic GFR-binding peptide
  MOD_RES (5), (6): Xaa is C or S

SEQ ID NO: 52788 - protein, 26 aa, Artificial Sequence
  Cyclic GFR-binding peptide
PTRLEPLPIVYYDSANNVVEQLSNDM

SEQ ID NO: 52789 - protein, 31 aa, Artificial Sequence
  Cyclic GFR-binding peptide
  MOD_RES (1), (2): Xaa is C or S
XXVPQDLEPLPIVYYVGRTPKVEQLSNMVVK

SEQ ID NO: 52790 - protein, 29 aa, Artificial Sequence
  Cyclic GFR-binding peptide
  MOD_RES (27), (29): Xaa is C or S
EPLPMVYYDEYDKVVEQLSNEMVVEGXGX

SEQ ID NO: 52791 - protein, 35 aa, Artificial Sequence; identical to SEQ ID NO: 11517
  Cyclic GFR-binding peptide
  MOD_RES (1), (33), (35): Xaa is C or S

SEQ ID NO: 52792 - protein, 29 aa, Artificial Sequence
  Cyclic GFR-binding peptide
TRLSAISILYLDSANNVVLKNYQDMVVES

SEQ ID NO: 52793 - protein, 35 aa, Artificial Sequence; identical to SEQ ID NO: 11519
  Cyclic GFR-binding peptide
  MOD_RES (32), (34): Xaa is C or S

SEQ ID NO: 52794 - protein, 27 aa, Artificial Sequence
  Cyclic GFR-binding peptide
VPTRLEPLPIVYYDSANNVVEQLSNDM

SEQ ID NO: 52795 - protein, 27 aa, Artificial Sequence
  Cyclic GFR-binding peptide
  MOD_RES (27), (27): Xaa is C or S
EPLPVVYYDDSSNVIEQLSNNMVVRSX

SEQ ID NO: 52796 - protein, 25 aa, Artificial Sequence
  Cyclic GFR-binding peptide
QLSPISVLFIDDSSNVIYKQYENMV

SEQ ID NO: 52797 - protein, 39 aa, Artificial Sequence; identical to SEQ ID NO: 11526
  Cyclic GFR-binding peptide
  MOD_RES (5), (6), (37), (39): Xaa is C or S

SEQ ID NO: 52798 - protein, 33 aa, Artificial Sequence
  Cyclic GFR-binding peptide
  MOD_RES (31), (33): Xaa is C or S
PTKLSPISVLFIDDSSNVIYKQYENMVVRSXGX

SEQ ID NO: 52799 - protein, 30 aa, Artificial Sequence
  Cyclic GFR-binding peptide
  MOD_RES (2), (3): Xaa is C or S
PXXVPQDLSPISILFIVGRTPKVYKQYEMV

SEQ ID NO: 52800 - protein, 33 aa, Artificial Sequence; identical to SEQ ID NO: 11528
  Cyclic GFR-binding peptide
  MOD_RES (2), (3): Xaa is C or S

SEQ ID NO: 52801 - protein, 31 aa, Artificial Sequence
  Cyclic GFR-binding peptide
  MOD_RES (2), (3): Xaa is C or S
AXXVPTELSPISMLFIDENEKVVYKQYEDMV

SEQ ID NO: 52802 - protein, 32 aa, Artificial Sequence
  Cyclic GFR-binding peptide
  MOD_RES (29), (31): Xaa is C or S
KLSPISVLFIDDSSNVIYKQYENMVVRSXGXH

SEQ ID NO: 52803 - protein, 31 aa, Artificial Sequence
  Cyclic GFR-binding peptide
  MOD_RES (4), (5): Xaa is C or S
PKPXXAPTQLSPISVLFIDDSSNVIYKQYEN

SEQ ID NO: 52804 - protein, 26 aa, Artificial Sequence
  Cyclic GFR-binding peptide
APTKLSPISVLFIDDSSNVIYKQYEN

SEQ ID NO: 52805 - protein, 32 aa, Artificial Sequence; identical to SEQ ID NO: 11536
  Cyclic GFR-binding peptide
  MOD_RES (1), (2): Xaa is C or S

SEQ ID NO: 52806 - protein, 29 aa, Artificial Sequence
  Cyclic GFR-binding peptide
  MOD_RES (3), (4): Xaa is C or S
APXXVPQALSPISILFIVGRKPKVYKQYE

SEQ ID NO: 52807 - protein, 30 aa, Artificial Sequence
  Cyclic GFR-binding peptide
  MOD_RES (28), (30): Xaa is C or S
DLSPISILFIIGKTPKIYKQYEMIVKSXKX

SEQ ID NO: 52808 - protein, 31 aa, Artificial Sequence
  Cyclic GFR-binding peptide
  MOD_RES (1), (2): Xaa is C or S
XXVPTELSPISMLFIDEYDKVVYKQYEEMVV

SEQ ID NO: 52809 - protein, 34 aa, Artificial Sequence; identical to SEQ ID NO: 11540
  Cyclic GFR-binding peptide
  MOD_RES (3), (4): Xaa is C or S

SEQ ID NO: 52810 - protein, 32 aa, Artificial Sequence
  Cyclic GFR-binding peptide
  MOD_RES (6), (6): Xaa is C or S
VTKPTXAPTKLEPLPVVYYDDSSNVIEQLSNN

SEQ ID NO: 52811 - protein, 25 aa, Artificial Sequence
  Cyclic GFR-binding peptide
EPLTILYYVGRKPKVEQLSNMIVRS

SEQ ID NO: 52812 - protein, 36 aa, Artificial Sequence; identical to SEQ ID NO: 11542
  Cyclic GFR-binding peptide
  MOD_RES (5), (6): Xaa is C or S

SEQ ID NO: 52813 - protein, 24 aa, Artificial Sequence
  Cyclic GFR-binding peptide
LSPISILFIVGRKPKVYKQYEMIV

SEQ ID NO: 52814 - protein, 32 aa, Artificial Sequence; identical to SEQ ID NO: 11543
  Cyclic GFR-binding peptide
  MOD_RES (1), (32): Xaa is C or S

SEQ ID NO: 52815 - protein, 32 aa, Artificial Sequence
  Cyclic GFR-binding peptide
  MOD_RES (29), (31): Xaa is C or S
RLNAISILYFDSANNVVLKKYRDMVVESXGXR

SEQ ID NO: 52816 - protein, 28 aa, Artificial Sequence
  Cyclic GFR-binding peptide
  MOD_RES (2), (3): Xaa is C or S
AXXVPTELSPISMLFIDENEKVVYKQYE

SEQ ID NO: 52817 - protein, 37 aa, Artificial Sequence; identical to SEQ ID NO: 11545
  Cyclic GFR-binding peptide
  MOD_RES (6), (7): Xaa is C or S

SEQ ID NO: 52818 - protein, 31 aa, Artificial Sequence
  Cyclic GFR-binding peptide
  MOD_RES (5), (6): Xaa is C or S
VPKPXXAPTQLSPISVLFIDDSSNVIYKQYE

SEQ ID NO: 52819 - protein, 33 aa, Artificial Sequence; identical to SEQ ID NO: 11546
  Cyclic GFR-binding peptide
  MOD_RES (2), (2): Xaa is C or S

SEQ ID NO: 52820 - protein, 32 aa, Artificial Sequence; identical to SEQ ID NO: 11547
  Cyclic GFR-binding peptide
  MOD_RES (32), (32): Xaa is C or S

SEQ ID NO: 52821 - protein, 35 aa, Artificial Sequence; identical to SEQ ID NO: 11548
  Cyclic GFR-binding peptide
  MOD_RES (2), (34): Xaa is C or S

SEQ ID NO: 52822 - protein, 32 aa, Artificial Sequence
  Cyclic GFR-binding peptide
  MOD_RES (4), (5): Xaa is C or S
PKAXXVPTELSPISMLFIDENEKVVYKQYEDM

SEQ ID NO: 52823 - protein, 28 aa, Artificial Sequence
  Cyclic GFR-binding peptide
APTQLEPLPVVYYDDSSNVIEQLSNNMV

SEQ ID NO: 52824 - protein, 35 aa, Artificial Sequence; identical to SEQ ID NO: 11550
  Cyclic GFR-binding peptide
  MOD_RES (32), (34): Xaa is C or S

SEQ ID NO: 52825 - protein, 30 aa, Artificial Sequence
  Cyclic GFR-binding peptide
PTKLSPISVLFIDDSSNVIYKQYENMVVRS

SEQ ID NO: 52826 - protein, 26 aa, Artificial Sequence
  Cyclic GFR-binding peptide
VPTRLSAISILYLDSANNVVLKNYQD

SEQ ID NO: 52827 - protein, 29 aa, Artificial Sequence
  Cyclic GFR-binding peptide
  MOD_RES (29), (29): Xaa is C or S
QALSPISILFIVGRKPKVYKQYEMIVRSX

SEQ ID NO: 52828 - protein, 37 aa, Artificial Sequence; identical to SEQ ID NO: 11556
  Cyclic GFR-binding peptide
  MOD_RES (5), (6), (37): Xaa is C or S

SEQ ID NO: 52829 - protein, 35 aa, Artificial Sequence; identical to SEQ ID NO: 11557
  Cyclic GFR-binding peptide
  MOD_RES (1), (2), (33), (35): Xaa is C or S

SEQ ID NO: 52830 - protein, 24 aa, Artificial Sequence
  Cyclic GFR-binding peptide
ALEPLTILYYVGRKPKVEQLSNMI

SEQ ID NO: 52831 - protein, 30 aa, Artificial Sequence
  Cyclic GFR-binding peptide
  MOD_RES (4), (5): Xaa is C or S
PKAXXVPTELEPLPMVYYDEYDKVVEQLSN

SEQ ID NO: 52832 - protein, 36 aa, Artificial Sequence; identical to SEQ ID NO: 11559
  Cyclic GFR-binding peptide
  MOD_RES (1), (33), (35): Xaa is C or S

SEQ ID NO: 52833 - protein, 31 aa, Artificial Sequence
  Cyclic GFR-binding peptide
  MOD_RES (28), (30): Xaa is C or S
DLEPLPIVYYIGKTPKIEQLSNMIVKSXKXS

SEQ ID NO: 52834 - protein, 35 aa, Artificial Sequence; identical to SEQ ID NO: 11562
  Cyclic GFR-binding peptide
  MOD_RES (1), (2), (34): Xaa is C or S

SEQ ID NO: 52835 - protein, 31 aa, Artificial Sequence
  Cyclic GFR-binding peptide
  MOD_RES (29), (31): Xaa is C or S
QDLEPLPIVYYVGRTPKVEQLSNMVVKSXKX

SEQ ID NO: 52836 - protein, 39 aa, Artificial Sequence; identical to SEQ ID NO: 11564
  Cyclic GFR-binding peptide
  MOD_RES (5), (6), (37), (39): Xaa is C or S

SEQ ID NO: 52837 - protein, 34 aa, Artificial Sequence
  Cyclic GFR-binding peptide
  MOD_RES (6), (7): Xaa is C or S
ASAAPXXVPQALEPLTILYYVGRKPKVEQLSNMI

SEQ ID NO: 52838 - protein, 29 aa, Artificial Sequence
  Cyclic GFR-binding peptide
  MOD_RES (1), (2): Xaa is C or S
XXAPTKLEPLTVLYYDDSSNVIEQLSNNM

SEQ ID NO: 52839 - protein, 29 aa, Artificial Sequence
  Cyclic GFR-binding peptide
  MOD_RES (2), (3): Xaa is C or S
PXXAPTQLEPLPVVYYDDSSNVIEQLSNN

SEQ ID NO: 52840 - protein, 24 aa, Artificial Sequence
  Cyclic GFR-binding peptide
TKLSPISVLFIDDSSNVIYKQYEN

SEQ ID NO: 52841 - protein, 30 aa, Artificial Sequence; identical to SEQ ID NO: 1087
  Cyclic GFR-binding peptide

SEQ ID NO: 52842 - protein, 29 aa, Artificial Sequence
  Cyclic GFR-binding peptide
EPLPIVYYVGRKPKVEQLSNAAAAAAAAA

SEQ ID NO: 52843 - protein, 31 aa, Artificial Sequence
  Cyclic GFR-binding peptide
  MOD_RES (5), (5): Xaa is C or S
TKPTXAPTKLEPLTVLYYDDSSNVIEQLSNN

SEQ ID NO: 52844 - protein, 26 aa, Artificial Sequence
  Cyclic GFR-binding peptide
LEPLPMVYYDENEKVVEQLSNDMVVE

SEQ ID NO: 52845 - protein, 26 aa, Artificial Sequence
  Cyclic GFR-binding peptide
PTELSPISMLFIDEYDKVVYKQYEEM

SEQ ID NO: 52846 - protein, 33 aa, Artificial Sequence
  Cyclic GFR-binding peptide
  MOD_RES (30), (32): Xaa is C or S
TELEPLTMLYYDENEKVVEQLSNDMVVEGXGXR

SEQ ID NO: 52847 - protein, 23 aa, Artificial Sequence
  Cyclic GFR-binding peptide
LSPISMLFIDEYDKVVYKQYEEM

SEQ ID NO: 52848 - protein, 33 aa, Artificial Sequence
  Cyclic GFR-binding peptide
  MOD_RES (31), (33): Xaa is C or S
PTRLNAISILYFDSANNVVLKKYRDMVVESXGX

SEQ ID NO: 52849 - protein, 26 aa, Artificial Sequence
  Cyclic GFR-binding peptide
ELSPISMLFIDEYDKVVYKQYEEMVV

SEQ ID NO: 52850 - protein, 23 aa, Artificial Sequence
  Cyclic GFR-binding peptide
ALSPISILFIVGRKPKVYKQYEM

SEQ ID NO: 52851 - protein, 21 aa, Artificial Sequence
  Cyclic GFR-binding peptide
LEPLTILYYVGRKPKVEQLSN

SEQ ID NO: 52852 - protein, 32 aa, Artificial Sequence; identical to SEQ ID NO: 11567
  Cyclic GFR-binding peptide
  MOD_RES (1), (1): Xaa is C or S

SEQ ID NO: 52853 - protein, 41 aa, Artificial Sequence; identical to SEQ ID NO: 11569
  Cyclic GFR-binding peptide
  MOD_RES (5), (6), (38), (40): Xaa is C or S

SEQ ID NO: 52854 - protein, 28 aa, Artificial Sequence
  Cyclic GFR-binding peptide
  MOD_RES (1), (1): Xaa is C or S
XAPTKLSPISVLFIDDSSNVIYKQYENM

SEQ ID NO: 52855 - protein, 29 aa, Artificial Sequence
  Cyclic GFR-binding peptide
  MOD_RES (29), (29): Xaa is C or S
RLEPLPIVYYDSANNVVEQLSNDMVVESX

SEQ ID NO: 52856 - protein, 30 aa, Artificial Sequence
  Cyclic GFR-binding peptide
  MOD_RES (2), (3): Xaa is C or S
AXXVPTELSPISMLFIDEYDKVVYKQYEEM

SEQ ID NO: 52857 - protein, 33 aa, Artificial Sequence; identical to SEQ ID NO: 11572
  Cyclic GFR-binding peptide
  MOD_RES (1), (33): Xaa is C or S

SEQ ID NO: 52858 - protein, 28 aa, Artificial Sequence
  Cyclic GFR-binding peptide
KLSPISVLFIDDSSNVIYKQYENMVVRS

SEQ ID NO: 52859 - protein, 32 aa, Artificial Sequence
  Cyclic GFR-binding peptide
  MOD_RES (4), (5): Xaa is C or S
PKPXXAPTKLEPLPVVYYDDSSNVIEQLSNNM

SEQ ID NO: 52860 - protein, 39 aa, Artificial Sequence; identical to SEQ ID NO: 11575
  Cyclic GFR-binding peptide
  MOD_RES (3), (4), (36), (38): Xaa is C or S

SEQ ID NO: 52861 - protein, 24 aa, Artificial Sequence
  Cyclic GFR-binding peptide
EPLTILYYVGRKPKVEQLSNMIVR

SEQ ID NO: 52862 - protein, 27 aa, Artificial Sequence
  Cyclic GFR-binding peptide
  MOD_RES (1), (2): Xaa is C or S
XXVPQALSPISILFIVGRKPKVYKQYE

SEQ ID NO: 52863 - protein, 35 aa, Artificial Sequence; identical to SEQ ID NO: 11578
  Cyclic GFR-binding peptide
  MOD_RES (5), (5): Xaa is C or S

SEQ ID NO: 52864 - protein, 42 aa, Artificial Sequence; identical to SEQ ID NO: 11579
  Cyclic GFR-binding peptide
  MOD_RES (6), (7), (39), (41): Xaa is C or S

SEQ ID NO: 52865 - protein, 27 aa, Artificial Sequence
  Cyclic GFR-binding peptide
VPTELEPLTMLYYDEYDKVVEQLSNEM

SEQ ID NO: 52866 - protein, 31 aa, Artificial Sequence
  Cyclic GFR-binding peptide
  MOD_RES (5), (5): Xaa is C or S
TKPTXAPTKLSPISVLFIDDSSNVIYKQYEN

SEQ ID NO: 52867 - protein, 42 aa, Artificial Sequence; identical to SEQ ID NO: 11580
  Cyclic GFR-binding peptide
  MOD_RES (6), (7), (39), (41): Xaa is C or S

SEQ ID NO: 52868 - protein, 29 aa, Artificial Sequence
  Cyclic GFR-binding peptide
  MOD_RES (26), (28): Xaa is C or S
EPLPIVYYVGRTPKVEQLSNMVVKSXKXS

SEQ ID NO: 52869 - protein, 36 aa, Artificial Sequence
  Cyclic GFR-binding peptide
  MOD_RES (6), (7): Xaa is C or S
YVPKPXXAPTKLEPLTVLYYDDSSNVIEQLSNNMVV

SEQ ID NO: 52870 - protein, 23 aa, Artificial Sequence
  Cyclic GFR-binding peptide
QDLEPLPIVYYVGRTPKVEQLSN

SEQ ID NO: 52871 - protein, 34 aa, Artificial Sequence
  Cyclic GFR-binding peptide
  MOD_RES (4), (5): Xaa is C or S
ASPXXVPQDLSPISILFIVGRTPKVYKQYEMVVK

SEQ ID NO: 52872 - protein, 30 aa, Artificial Sequence
  Cyclic GFR-binding peptide
  MOD_RES (1), (2): Xaa is C or S
XXVPTRLNAISILYFDSANNVVLKKYRDMV

SEQ ID NO: 52873 - protein, 31 aa, Artificial Sequence
  Cyclic GFR-binding peptide
  MOD_RES (30), (30): Xaa is C or S
TQLEPLTVLYYDDSSNVIEQLSNNMVVRAXG

SEQ ID NO: 52874 - protein, 28 aa, Artificial Sequence
  Cyclic GFR-binding peptide
TELEPLPMVYYDEYDKVVEQLSNEMVVE

SEQ ID NO: 52875 - protein, 38 aa, Artificial Sequence; identical to SEQ ID NO: 11583
  Cyclic GFR-binding peptide
  MOD_RES (4), (5), (37): Xaa is C or S

SEQ ID NO: 52876 - protein, 30 aa, Artificial Sequence
  Cyclic GFR-binding peptide
  MOD_RES (27), (29): Xaa is C or S
EPLTVLYYDDSSNVIEQLSNNMVVRAXGXH

SEQ ID NO: 52877 - protein, 29 aa, Artificial Sequence
  Cyclic GFR-binding peptide
VPQDLEPLPIVYYVGRTPKVEQLSNMVVK

SEQ ID NO: 52878 - protein, 28 aa, Artificial Sequence
  Cyclic GFR-binding peptide
  MOD_RES (27), (27): Xaa is C or S
EPLPIVYYDSANNVVEQLSNDMVVESXG

SEQ ID NO: 52879 - protein, 35 aa, Artificial Sequence; identical to SEQ ID NO: 11584
  Cyclic GFR-binding peptide
  MOD_RES (1), (33), (35): Xaa is C or S

SEQ ID NO: 52880 - protein, 35 aa, Artificial Sequence; identical to SEQ ID NO: 11585
  Cyclic GFR-binding peptide
  MOD_RES (2), (3), (35): Xaa is C or S

SEQ ID NO: 52881 - protein, 38 aa, Artificial Sequence; identical to SEQ ID NO: 11586
  Cyclic GFR-binding peptide
  MOD_RES (4), (36), (38): Xaa is C or S

SEQ ID NO: 52882 - protein, 40 aa, Artificial Sequence; identical to SEQ ID NO: 11587
  Cyclic GFR-binding peptide
  MOD_RES (6), (7), (39): Xaa is C or S

SEQ ID NO: 52883 - protein, 34 aa, Artificial Sequence
  Cyclic GFR-binding peptide
  MOD_RES (5), (6): Xaa is C or S
VPKPXXAPTKLEPLPVVYYDDSSNVIEQLSNNMV

SEQ ID NO: 52884 - protein, 27 aa, Artificial Sequence
  Cyclic GFR-binding peptide
PTRLSAISILYLDSANNVVLKNYQDMV

SEQ ID NO: 52885 - protein, 37 aa, Artificial Sequence; identical to SEQ ID NO: 11590
  Cyclic GFR-binding peptide
  MOD_RES (4), (5), (37): Xaa is C or S

SEQ ID NO: 52886 - protein, 27 aa, Artificial Sequence
  Cyclic GFR-binding peptide
PTELEPLTMLYYDENEKVVEQLSNDMV

SEQ ID NO: 52887 - protein, 40 aa, Artificial Sequence; identical to SEQ ID NO: 11591
  Cyclic GFR-binding peptide
  MOD_RES (6), (7), (38), (40): Xaa is C or S

SEQ ID NO: 52888 - protein, 33 aa, Artificial Sequence
  Cyclic GFR-binding peptide
  MOD_RES (5), (6): Xaa is C or S
IPKAXXVPTELSPISMLFIDENEKVVYKQYEDM

SEQ ID NO: 52889 - protein, 35 aa, Artificial Sequence; identical to SEQ ID NO: 11592
  Cyclic GFR-binding peptide
  MOD_RES (1), (33), (35): Xaa is C or S

SEQ ID NO: 52890 - protein, 32 aa, Artificial Sequence; identical to SEQ ID NO: 11593
  Cyclic GFR-binding peptide
  MOD_RES (1), (2): Xaa is C or S

SEQ ID NO: 52891 - protein, 31 aa, Artificial Sequence
  Cyclic GFR-binding peptide
  MOD_RES (5), (6): Xaa is C or S
SASPXXVPQDLEPLPIVYYVGRTPKVEQLSN

SEQ ID NO: 52892 - protein, 24 aa, Artificial Sequence
  Cyclic GFR-binding peptide
SQDLEPLPIVYYIGKTPKIEQLSN

SEQ ID NO: 52893 - protein, 29 aa, Artificial Sequence
  Cyclic GFR-binding peptide
  MOD_RES (28), (28): Xaa is C or S
LEPLTMLYYDEYDKVVEQLSNEMVVEGXG

SEQ ID NO: 52894 - protein, 29 aa, Artificial Sequence
  Cyclic GFR-binding peptide
  MOD_RES (27), (29): Xaa is C or S
LSPISILFIVGRTPKVYKQYEMVVKSXKX

SEQ ID NO: 52895 - protein, 26 aa, Artificial Sequence
  Cyclic GFR-binding peptide
  MOD_RES (26), (26): Xaa is C or S
SPISILFIVGRTPKVYKQYEMVVKSX

SEQ ID NO: 52896 - protein, 38 aa, Artificial Sequence; identical to SEQ ID NO: 11595
  Cyclic GFR-binding peptide
  MOD_RES (5), (6), (37): Xaa is C or S

SEQ ID NO: 52897 - protein, 25 aa, Artificial Sequence
  Cyclic GFR-binding peptide
EPLPMVYYDEYDKVVEQLSNEMVVE

SEQ ID NO: 52898 - protein, 31 aa, Artificial Sequence
  Cyclic GFR-binding peptide
  MOD_RES (3), (4): Xaa is C or S
KAXXVPTELEPLTMLYYDEYDKVVEQLSNEM

SEQ ID NO: 52899 - protein, 33 aa, Artificial Sequence
  Cyclic GFR-binding peptide
  MOD_RES (4), (5): Xaa is C or S
PPTXXVPTRLNAISILYFDSANNVVLKKYRDMV

SEQ ID NO: 52900 - protein, 29 aa, Artificial Sequence
  Cyclic GFR-binding peptide
  MOD_RES (27), (29): Xaa is C or S
EPLTMLYYDENEKVVEQLSNDMVVEGXGX

SEQ ID NO: 52901 - protein, 25 aa, Artificial Sequence
  Cyclic GFR-binding peptide
EPLTILYYDSANNVVEQLSNDMVVE

SEQ ID NO: 52902 - protein, 35 aa, Artificial Sequence; identical to SEQ ID NO: 11597
  Cyclic GFR-binding peptide
  MOD_RES (1), (33), (35): Xaa is C or S

SEQ ID NO: 52903 - protein, 21 aa, Artificial Sequence
  Cyclic GFR-binding peptide
EPLPIVYYIGKTPKIEQLSNM

SEQ ID NO: 52904 - protein, 26 aa, Artificial Sequence
  Cyclic GFR-binding peptide
  MOD_RES (1), (1): Xaa is C or S
XVPTELEPLPMVYYDEYDKVVEQLSN

SEQ ID NO: 52905 - protein, 26 aa, Artificial Sequence
  Cyclic GFR-binding peptide
TELSPISMLFIDENEKVVYKQYEDMV

SEQ ID NO: 52906 - protein, 24 aa, Artificial Sequence
  Cyclic GFR-binding peptide
SPISMLFIDEYDKVVYKQYEEMVV

SEQ ID NO: 52907 - protein, 31 aa, Artificial Sequence; identical to SEQ ID NO: 11602
  Cyclic GFR-binding peptide
  MOD_RES (31), (31): Xaa is C or S

SEQ ID NO: 52908 - protein, 24 aa, Artificial Sequence
  Cyclic GFR-binding peptide
EPLPIVYYIGKTPKIEQLSNMIVK

SEQ ID NO: 52909 - protein, 33 aa, Artificial Sequence
  Cyclic GFR-binding peptide
  MOD_RES (3), (4): Xaa is C or S
KAXXVPTELSPISMLFIDEYDKVVYKQYEEMVV

SEQ ID NO: 52910 - protein, 23 aa, Artificial Sequence
  Cyclic GFR-binding peptide
QALEPLTILYYVGRKPKVEQLSN

SEQ ID NO: 52911 - protein, 22 aa, Artificial Sequence
  Cyclic GFR-binding peptide
ALSPISILFIVGRKPKVYKQYE

SEQ ID NO: 52912 - protein, 37 aa, Artificial Sequence; identical to SEQ ID NO: 11604
  Cyclic GFR-binding peptide
  MOD_RES (5), (6): Xaa is C or S

SEQ ID NO: 52913 - protein, 27 aa, Artificial Sequence
  Cyclic GFR-binding peptide
  MOD_RES (1), (1): Xaa is C or S
XAPTKLSPISVLFIDDSSNVIYKQYEN

SEQ ID NO: 52914 - protein, 33 aa, Artificial Sequence
  Cyclic GFR-binding peptide
  MOD_RES (3), (4): Xaa is C or S
APXXVPQALEPLTILYYVGRKPKVEQLSNMIVR

SEQ ID NO: 52915 - protein, 24 aa, Artificial Sequence
  Cyclic GFR-binding peptide
RLNAISILYFDSANNVVLKKYRDM

SEQ ID NO: 52916 - protein, 36 aa, Artificial Sequence; identical to SEQ ID NO: 11606
  Cyclic GFR-binding peptide
  MOD_RES (2), (3), (35): Xaa is C or S

SEQ ID NO: 52917 - protein, 37 aa, Artificial Sequence; identical to SEQ ID NO: 11607
  Cyclic GFR-binding peptide
  MOD_RES (4), (5), (36): Xaa is C or S

SEQ ID NO: 52918 - protein, 31 aa, Artificial Sequence
  Cyclic GFR-binding peptide
  MOD_RES (1), (2): Xaa is C or S
XXVPQALEPLTILYYVGRKPKVEQLSNMIVR

SEQ ID NO: 52919 - protein, 24 aa, Artificial Sequence
  Cyclic GFR-binding peptide
LEPLPIVYYDSANNVVEQLSNDMV

SEQ ID NO: 52920 - protein, 24 aa, Artificial Sequence
  Cyclic GFR-binding peptide
LEPLPMVYYDEYDKVVEQLSNEMV

SEQ ID NO: 52921 - protein, 24 aa, Artificial Sequence
  Cyclic GFR-binding peptide
TKLEPLPVVYYDDSSNVIEQLSNN

SEQ ID NO: 52922 - protein, 34 aa, Artificial Sequence
  Cyclic GFR-binding peptide
  MOD_RES (4), (5): Xaa is C or S
PKPXXAPTQLEPLPVVYYDDSSNVIEQLSNNMVV

SEQ ID NO: 52923 - protein, 34 aa, Artificial Sequence; identical to SEQ ID NO: 11610
  Cyclic GFR-binding peptide
  MOD_RES (3), (4): Xaa is C or S

SEQ ID NO: 52924 - protein, 37 aa, Artificial Sequence; identical to SEQ ID NO: 11612
  Cyclic GFR-binding peptide
  MOD_RES (4), (5), (37): Xaa is C or S

SEQ ID NO: 52925 - protein, 31 aa, Artificial Sequence
  Cyclic GFR-binding peptide
  MOD_RES (5), (6): Xaa is C or S
IPKAXXVPTELEPLPMVYYDEYDKVVEQLSN

SEQ ID NO: 52926 - protein, 27 aa, Artificial Sequence
  Cyclic GFR-binding peptide
  MOD_RES (1), (1): Xaa is C or S
XAPTKLEPLPVVYYDDSSNVIEQLSNN

SEQ ID NO: 52927 - protein, 31 aa, Artificial Sequence
  Cyclic GFR-binding peptide
  MOD_RES (28), (30): Xaa is C or S
DLSPISILFIIGKTPKIYKQYEMIVKSXKXS

SEQ ID NO: 52928 - protein, 36 aa, Artificial Sequence; identical to SEQ ID NO: 11615
  Cyclic GFR-binding peptide
  MOD_RES (3), (4), (36): Xaa is C or S

SEQ ID NO: 52929 - protein, 39 aa, Artificial Sequence; identical to SEQ ID NO: 11616
  Cyclic GFR-binding peptide
  MOD_RES (6), (7), (39): Xaa is C or S

SEQ ID NO: 52930 - protein, 29 aa, Artificial Sequence
  Cyclic GFR-binding peptide
  MOD_RES (28), (28): Xaa is C or S
LEPLTVLYYDDSSNVIEQLSNNMVVRSXG

SEQ ID NO: 52931 - protein, 25 aa, Artificial Sequence
  Cyclic GFR-binding peptide
EPLTMLYYDENEKVVEQLSNDMVVE

SEQ ID NO: 52932 - protein, 25 aa, Artificial Sequence
  Cyclic GFR-binding peptide
EPLTVLYYDDSSNVIEQLSNNMVVR

SEQ ID NO: 52933 - protein, 22 aa, Artificial Sequence
  Cyclic GFR-binding peptide
SPISILFIVGRTPKVYKQYEMV

SEQ ID NO: 52934 - protein, 31 aa, Artificial Sequence
  Cyclic GFR-binding peptide
  MOD_RES (28), (30): Xaa is C or S
LEPLTILYYDSANNVVEQLSNDMVVESXGXR

SEQ ID NO: 52935 - protein, 35 aa, Artificial Sequence
  Cyclic GFR-binding peptide
  MOD_RES (6), (7): Xaa is C or S
TVPKPXXAPTQLEPLPVVYYDDSSNVIEQLSNNMV

SEQ ID NO: 52936 - protein, 32 aa, Artificial Sequence
  Cyclic GFR-binding peptide
  MOD_RES (6), (6): Xaa is C or S
VTKPTXAPTKLEPLTVLYYDDSSNVIEQLSNN

SEQ ID NO: 52937 - protein, 25 aa, Artificial Sequence
  Cyclic GFR-binding peptide
APTQLSPISVLFIDDSSNVIYKQYE

SEQ ID NO: 52938 - protein, 39 aa, Artificial Sequence; identical to SEQ ID NO: 11619
  Cyclic GFR-binding peptide
  MOD_RES (5), (6), (38): Xaa is C or S

SEQ ID NO: 52939 - protein, 32 aa, Artificial Sequence
  Cyclic GFR-binding peptide
  MOD_RES (2), (3): Xaa is C or S
PXXAPTKLEPLTVLYYDDSSNVIEQLSNNMVV

SEQ ID NO: 52940 - protein, 30 aa, Artificial Sequence
  Cyclic GFR-binding peptide
  MOD_RES (1), (1): Xaa is C or S
XVPTRLEPLPIVYYDSANNVVEQLSNDMVV

SEQ ID NO: 52941 - protein, 31 aa, Artificial Sequence
  Cyclic GFR-binding peptide
  MOD_RES (2), (3): Xaa is C or S
PXXAPTKLSPISVLFIDDSSNVIYKQYENMV

SEQ ID NO: 52942 - protein, 29 aa, Artificial Sequence
  Cyclic GFR-binding peptide
  MOD_RES (2), (3): Xaa is C or S
PXXAPTQLSPISVLFIDDSSNVIYKQYEN

SEQ ID NO: 52943 - protein, 37 aa, Artificial Sequence; identical to SEQ ID NO: 11622
  Cyclic GFR-binding peptide
  MOD_RES (1), (2), (34), (36): Xaa is C or S

SEQ ID NO: 52944 - protein, 40 aa, Artificial Sequence; identical to SEQ ID NO: 11623
  Cyclic GFR-binding peptide
  MOD_RES (5), (6), (38), (40): Xaa is C or S

SEQ ID NO: 52945 - protein, 32 aa, Artificial Sequence
  Cyclic GFR-binding peptide
  MOD_RES (29), (31): Xaa is C or S
ELSPISMLFIDEYDKVVYKQYEEMVVEGXGXR

SEQ ID NO: 52946 - protein, 30 aa, Artificial Sequence
  Cyclic GFR-binding peptide
  MOD_RES (27), (29): Xaa is C or S
LEPLTILYYVGRKPKVEQLSNMIVRSXKXS

SEQ ID NO: 52947 - protein, 34 aa, Artificial Sequence
  Cyclic GFR-binding peptide
  MOD_RES (6), (7): Xaa is C or S
SIPKAXXVPTELSPISMLFIDEYDKVVYKQYEEM

SEQ ID NO: 52948 - protein, 34 aa, Artificial Sequence
  Cyclic GFR-binding peptide
  MOD_RES (31), (33): Xaa is C or S
PTELEPLPMVYYDENEKVVEQLSNDMVVEGXGXR

SEQ ID NO: 52949 - protein, 34 aa, Artificial Sequence
  Cyclic GFR-binding peptide
  MOD_RES (6), (6): Xaa is C or S
VTKPTXAPTKLEPLPVVYYDDSSNVIEQLSNNMV

SEQ ID NO: 52950 - protein, 31 aa, Artificial Sequence
  Cyclic GFR-binding peptide
  MOD_RES (28), (30): Xaa is C or S
ALEPLTILYYVGRKPKVEQLSNMIVRSXKXS

SEQ ID NO: 52951 - protein, 35 aa, Artificial Sequence; identical to SEQ ID NO: 11625
  Cyclic GFR-binding peptide
  MOD_RES (1), (33), (35): Xaa is C or S

SEQ ID NO: 52952 - protein, 36 aa, Artificial Sequence; identical to SEQ ID NO: 11628
  Cyclic GFR-binding peptide
  MOD_RES (5), (6): Xaa is C or S

SEQ ID NO: 52953 - protein, 33 aa, Artificial Sequence
  Cyclic GFR-binding peptide
  MOD_RES (4), (5): Xaa is C or S
PKAXXVPTELEPLPMVYYDEYDKVVEQLSNEMV

SEQ ID NO: 52954 - protein, 25 aa, Artificial Sequence
  Cyclic GFR-binding peptide
VPTRLEPLPIVYYDSANNVVEQLSN

SEQ ID NO: 52955 - protein, 41 aa, Artificial Sequence; identical to SEQ ID NO: 11629
  Cyclic GFR-binding peptide
  MOD_RES (5), (6), (38), (40): Xaa is C or S

SEQ ID NO: 52956 - protein, 22 aa, Artificial Sequence
  Cyclic GFR-binding peptide
EPLTMLYYDENEKVVEQLSNDM

SEQ ID NO: 52957 - protein, 40 aa, Artificial Sequence; identical to SEQ ID NO: 11630
  Cyclic GFR-binding peptide
  MOD_RES (6), (7), (38), (40): Xaa is C or S

SEQ ID NO: 52958 - protein, 40 aa, Artificial Sequence; identical to SEQ ID NO: 11634
  Cyclic GFR-binding peptide
  MOD_RES (6), (7), (38), (40): Xaa is C or S

SEQ ID NO: 52959 - protein, 25 aa, Artificial Sequence
  Cyclic GFR-binding peptide
RLNAISILYFDSANNVVLKKYRDMV

SEQ ID NO: 52960 - protein, 30 aa, Artificial Sequence
  Cyclic GFR-binding peptide
  MOD_RES (1), (1): Xaa is C or S
XVSQDLSPISILFIIGKTPKIYKQYEMIVK

SEQ ID NO: 52961 - protein, 35 aa, Artificial Sequence; identical to SEQ ID NO: 11637
  Cyclic GFR-binding peptide
  MOD_RES (3), (4): Xaa is C or S

SEQ ID NO: 52962 - protein, 35 aa, Artificial Sequence; identical to SEQ ID NO: 11639
  Cyclic GFR-binding peptide
  MOD_RES (1), (32), (34): Xaa is C or S

SEQ ID NO: 52963 - protein, 22 aa, Artificial Sequence
  Cyclic GFR-binding peptide
LEPLTILYYVGRKPKVEQLSNM

SEQ ID NO: 52964 - protein, 33 aa, Artificial Sequence; identical to SEQ ID NO: 11641
  Cyclic GFR-binding peptide
  MOD_RES (31), (33): Xaa is C or S

SEQ ID NO: 52965 - protein, 35 aa, Artificial Sequence; identical to SEQ ID NO: 11642
  Cyclic GFR-binding peptide
  MOD_RES (4), (5): Xaa is C or S

SEQ ID NO: 52966 - protein, 32 aa, Artificial Sequence
  Cyclic GFR-binding peptide
  MOD_RES (3), (3): Xaa is C or S
PTXAPTKLSPISVLFIDDSSNVIYKQYENMVV

SEQ ID NO: 52967 - protein, 32 aa, Artificial Sequence
  Cyclic GFR-binding peptide
  MOD_RES (31), (31): Xaa is C or S
PTELSPISMLFIDENEKVVYKQYEDMVVEGXG

SEQ ID NO: 52968 - protein, 21 aa, Artificial Sequence
  Cyclic GFR-binding peptide
SPISILFIIGKTPKIYKQYEM

SEQ ID NO: 52969 - protein, 29 aa, Artificial Sequence
  Cyclic GFR-binding peptide
EPLPIVYYDSANNVVEQLSNAAAAAAAAA

SEQ ID NO: 52970 - protein, 23 aa, Artificial Sequence
  Cyclic GFR-binding peptide
SPISMLFIDEYDKVVYKQYEEMV

SEQ ID NO: 52971 - protein, 35 aa, Artificial Sequence; identical to SEQ ID NO: 11646
  Cyclic GFR-binding peptide
  MOD_RES (32), (34): Xaa is C or S

SEQ ID NO: 52972 - protein, 24 aa, Artificial Sequence
  Cyclic GFR-binding peptide
PQALSPISILFIVGRKPKVYKQYE

SEQ ID NO: 52973 - protein, 32 aa, Artificial Sequence
  Cyclic GFR-binding peptide
  MOD_RES (4), (5): Xaa is C or S
ASPXXVPQDLSPISILFIVGRTPKVYKQYEMV

SEQ ID NO: 52974 - protein, 29 aa, Artificial Sequence
  Cyclic GFR-binding peptide
  MOD_RES (27), (29): Xaa is C or S
SPISVLFIDDSSNVIYKQYENMVVRSXGX

SEQ ID NO: 52975 - protein, 24 aa, Artificial Sequence
  Cyclic GFR-binding peptide
SQDLSPISILFIIGKTPKIYKQYE

SEQ ID NO: 52976 - protein, 28 aa, Artificial Sequence
  Cyclic GFR-binding peptide
APTKLEPLTVLYYDDSSNVIEQLSNNMV

SEQ ID NO: 52977 - protein, 33 aa, Artificial Sequence
  Cyclic GFR-binding peptide
  MOD_RES (5), (6): Xaa is C or S
VPKPXXAPTKLSPISVLFIDDSSNVIYKQYENM

SEQ ID NO: 52978 - protein, 29 aa, Artificial Sequence
  Cyclic GFR-binding peptide
  MOD_RES (28), (28): Xaa is C or S
DLSPISILFIIGKTPKIYKQYEMIVKSXK

SEQ ID NO: 52979 - protein, 36 aa, Artificial Sequence; identical to SEQ ID NO: 11648
  Cyclic GFR-binding peptide
  MOD_RES (4), (5), (36): Xaa is C or S

SEQ ID NO: 52980 - protein, 23 aa, Artificial Sequence
  Cyclic GFR-binding peptide
TELEPLTMLYYDEYDKVVEQLSN

SEQ ID NO: 52981 - protein, 29 aa, Artificial Sequence
  Cyclic GFR-binding peptide
  MOD_RES (1), (1): Xaa is C or S
XVPTRLEPLTILYYDSANNVVEQLSNDMV

SEQ ID NO: 52982 - protein, 33 aa, Artificial Sequence
  Cyclic GFR-binding peptide
  MOD_RES (30), (32): Xaa is C or S
TQLEPLPVVYYDDSSNVIEQLSNNMVVRAXGXH

SEQ ID NO: 52983 - protein, 27 aa, Artificial Sequence
  Cyclic GFR-binding peptide
LNAISILYFDSANNVVLKKYRDMVVES

SEQ ID NO: 52984 - protein, 27 aa, Artificial Sequence
  Cyclic GFR-binding peptide
  MOD_RES (1), (1): Xaa is C or S
XVPTRLSAISILYLDSANNVVLKNYQD

SEQ ID NO: 52985 - protein, 30 aa, Artificial Sequence
  Cyclic GFR-binding peptide
  MOD_RES (3), (4): Xaa is C or S
KAXXVPTELEPLPMVYYDEYDKVVEQLSNE

SEQ ID NO: 52986 - protein, 38 aa, Artificial Sequence; identical to SEQ ID NO: 11652
  Cyclic GFR-binding peptide
  MOD_RES (4), (5), (37): Xaa is C or S

SEQ ID NO: 52987 - protein, 34 aa, Artificial Sequence
  Cyclic GFR-binding peptide
  MOD_RES (4), (5): Xaa is C or S
PKAXXVPTELEPLTMLYYDEYDKVVEQLSNEMVV

SEQ ID NO: 52988 - protein, 39 aa, Artificial Sequence; identical to SEQ ID NO: 11656
  Cyclic GFR-binding peptide
  MOD_RES (7), (39): Xaa is C or S

SEQ ID NO: 52989 - protein, 26 aa, Artificial Sequence
  Cyclic GFR-binding peptide
  MOD_RES (1), (1): Xaa is C or S
XAPTKLEPLPVVYYDDSSNVIEQLSN

SEQ ID NO: 52990 - protein, 36 aa, Artificial Sequence; identical to SEQ ID NO: 11658
  Cyclic GFR-binding peptide
  MOD_RES (1), (33), (35): Xaa is C or S

SEQ ID NO: 52991 - protein, 42 aa, Artificial Sequence; identical to SEQ ID NO: 11659
  Cyclic GFR-binding peptide
  MOD_RES (6), (7), (39), (41): Xaa is C or S

SEQ ID NO: 52992 - protein, 39 aa, Artificial Sequence; identical to SEQ ID NO: 11660
  Cyclic GFR-binding peptide
  MOD_RES (4), (5), (36), (38): Xaa is C or S

SEQ ID NO: 52993 - protein, 31 aa, Artificial Sequence
  Cyclic GFR-binding peptide
  MOD_RES (31), (31): Xaa is C or S
PTQLEPLTVLYYDDSSNVIEQLSNNMVVRAX

SEQ ID NO: 52994 - protein, 30 aa, Artificial Sequence
  Cyclic GFR-binding peptide
  MOD_RES (30), (30): Xaa is C or S
TELSPISMLFIDENEKVVYKQYEDMVVEGX

SEQ ID NO: 52995 - protein, 22 aa, Artificial Sequence
  Cyclic GFR-binding peptide
KLEPLPVVYYDDSSNVIEQLSN

SEQ ID NO: 52996 - protein, 30 aa, Artificial Sequence
  Cyclic GFR-binding peptide
  MOD_RES (27), (29): Xaa is C or S
SAISILYLDSANNVVLKNYQDMVVESXGXR

SEQ ID NO: 52997 - protein, 32 aa, Artificial Sequence
  Cyclic GFR-binding peptide
  MOD_RES (5), (6): Xaa is C or S
IPKAXXVPTELEPLPMVYYDENEKVVEQLSND

SEQ ID NO: 52998 - protein, 38 aa, Artificial Sequence; identical to SEQ ID NO: 11663
  Cyclic GFR-binding peptide
  MOD_RES (5), (6), (38): Xaa is C or S

SEQ ID NO: 52999 - protein, 33 aa, Artificial Sequence; identical to SEQ ID NO: 11665
  Cyclic GFR-binding peptide
  MOD_RES (1), (2): Xaa is C or S

SEQ ID NO: 53000 - protein, 28 aa, Artificial Sequence
  Cyclic GFR-binding peptide
  MOD_RES (28), (28): Xaa is C or S
DLEPLPIVYYVGRTPKVEQLSNMVVKSX

SEQ ID NO: 53001 - protein, 37 aa, Artificial Sequence; identical to SEQ ID NO: 11666
  Cyclic GFR-binding peptide
  MOD_RES (2), (3), (35), (37): Xaa is C or S

SEQ ID NO: 53002 - protein, 32 aa, Artificial Sequence; identical to SEQ ID NO: 11667
  Cyclic GFR-binding peptide
  MOD_RES (1), (1): Xaa is C or S

SEQ ID NO: 53003 - protein, 31 aa, Artificial Sequence
  Cyclic GFR-binding peptide
  MOD_RES (4), (5): Xaa is C or S
ASPXXVSQDLEPLPIVYYIGKTPKIEQLSNM

SEQ ID NO: 53004 - protein, 37 aa, Artificial Sequence; identical to SEQ ID NO: 11668
  Cyclic GFR-binding peptide
  MOD_RES (5), (6): Xaa is C or S

SEQ ID NO: 53005 - protein, 35 aa, Artificial Sequence; identical to SEQ ID NO: 11671
  Cyclic GFR-binding peptide
  MOD_RES (1), (2), (34): Xaa is C or S

SEQ ID NO: 53006 - protein, 37 aa, Artificial Sequence; identical to SEQ ID NO: 11672
  Cyclic GFR-binding peptide
  MOD_RES (4), (5), (37): Xaa is C or S

SEQ ID NO: 53007 - protein, 39 aa, Artificial Sequence; identical to SEQ ID NO: 11673
  Cyclic GFR-binding peptide
  MOD_RES (6), (7), (39): Xaa is C or S

SEQ ID NO: 53008 - protein, 36 aa, Artificial Sequence; identical to SEQ ID NO: 11674
  Cyclic GFR-binding peptide
  MOD_RES (2), (3), (34), (36): Xaa is C or S

SEQ ID NO: 53009 - protein, 29 aa, Artificial Sequence
  Cyclic GFR-binding peptide
  MOD_RES (2), (3): Xaa is C or S
AXXVPTELEPLPMVYYDEYDKVVEQLSNE

SEQ ID NO: 53010 - protein, 32 aa, Artificial Sequence
  Cyclic GFR-binding peptide
  MOD_RES (6), (7): Xaa is C or S
ASAAPXXVPQALEPLTILYYVGRKPKVEQLSN

SEQ ID NO: 53011 - protein, 31 aa, Artificial Sequence
  Cyclic GFR-binding peptide
  MOD_RES (29), (31): Xaa is C or S
ELSPISMLFIDENEKVVYKQYEDMVVEGXGX

SEQ ID NO: 53012 - protein, 30 aa, Artificial Sequence
  Cyclic GFR-binding peptide
  MOD_RES (29), (29): Xaa is C or S
QLEPLTVLYYDDSSNVIEQLSNNMVVRAXG

SEQ ID NO: 53013 - protein, 31 aa, Artificial Sequence
  Cyclic GFR-binding peptide
  MOD_RES (2), (3): Xaa is C or S
AXXVPTELSPISMLFIDEYDKVVYKQYEEMV

SEQ ID NO: 53014 - protein, 31 aa, Artificial Sequence
  Cyclic GFR-binding peptide
  MOD_RES (29), (31): Xaa is C or S
KLEPLPVVYYDDSSNVIEQLSNNMVVRSXGX

SEQ ID NO: 53015 - protein, 30 aa, Artificial Sequence; identical to SEQ ID NO: 11677
  Cyclic GFR-binding peptide

SEQ ID NO: 53016 - protein, 38 aa, Artificial Sequence; identical to SEQ ID NO: 11678
  Cyclic GFR-binding peptide
  MOD_RES (4), (5), (37): Xaa is C or S

SEQ ID NO: 53017 - protein, 34 aa, Artificial Sequence
  Cyclic GFR-binding peptide
  MOD_RES (6), (7): Xaa is C or S
STPPTXXVPTRLSAISILYLDSANNVVLKNYQDM

SEQ ID NO: 53018 - protein, 33 aa, Artificial Sequence
  Cyclic GFR-binding peptide
  MOD_RES (3), (4): Xaa is C or S
PTXXVPTRLNAISILYFDSANNVVLKKYRDMVV

SEQ ID NO: 53019 - protein, 28 aa, Artificial Sequence
  Cyclic GFR-binding peptide
  MOD_RES (1), (2): Xaa is C or S
XXVPQDLEPLPIVYYVGRTPKVEQLSNM

SEQ ID NO: 53020 - protein, 29 aa, Artificial Sequence
  Cyclic GFR-binding peptide
  MOD_RES (29), (29): Xaa is C or S
RLNAISILYFDSANNVVLKKYRDMVVESX

SEQ ID NO: 53021 - protein, 35 aa, Artificial Sequence
  Cyclic GFR-binding peptide
  MOD_RES (7), (7): Xaa is C or S
HVTKPTXAPTKLEPLTVLYYDDSSNVIEQLSNNMV

SEQ ID NO: 53022 - protein, 20 aa, Artificial Sequence
  Cyclic GFR-binding peptide
SPISMLFIDENEKVVYKQYE

SEQ ID NO: 53023 - protein, 32 aa, Artificial Sequence
  Cyclic GFR-binding peptide
  MOD_RES (5), (5): Xaa is C or S
TKPTXAPTKLSPISVLFIDDSSNVIYKQYENM

SEQ ID NO: 53024 - protein, 37 aa, Artificial Sequence; identical to SEQ ID NO: 11680
  Cyclic GFR-binding peptide
  MOD_RES (3), (4), (36): Xaa is C or S

SEQ ID NO: 53025 - protein, 31 aa, Artificial Sequence
  Cyclic GFR-binding peptide
  MOD_RES (29), (31): Xaa is C or S
ELEPLTMLYYDENEKVVEQLSNDMVVEGXGX

SEQ ID NO: 53026 - protein, 33 aa, Artificial Sequence; identical to SEQ ID NO: 11681
  Cyclic GFR-binding peptide
  MOD_RES (3), (3): Xaa is C or S

SEQ ID NO: 53027 - protein, 30 aa, Artificial Sequence
  Cyclic GFR-binding peptide
  MOD_RES (2), (3): Xaa is C or S
TXXVPTRLSAISILYLDSANNVVLKNYQDM

SEQ ID NO: 53028 - protein, 33 aa, Artificial Sequence
  Cyclic GFR-binding peptide
  MOD_RES (4), (5): Xaa is C or S
ASPXXVPQDLSPISILFIVGRTPKVYKQYEMVV

SEQ ID NO: 53029 - protein, 25 aa, Artificial Sequence
  Cyclic GFR-binding peptide
LSPISMLFIDENEKVVYKQYEDMVV

SEQ ID NO: 53030 - protein, 41 aa, Artificial Sequence; identical to SEQ ID NO: 11682
  Cyclic GFR-binding peptide
  MOD_RES (6), (7), (39), (41): Xaa is C or S

SEQ ID NO: 53031 - protein, 24 aa, Artificial Sequence
  Cyclic GFR-binding peptide
PTQLEPLTVLYYDDSSNVIEQLSN

SEQ ID NO: 53032 - protein, 29 aa, Artificial Sequence
  Cyclic GFR-binding peptide
  MOD_RES (1), (2): Xaa is C or S
XXAPTQLEPLPVVYYDDSSNVIEQLSNNM

SEQ ID NO: 53033 - protein, 21 aa, Artificial Sequence
  Cyclic GFR-binding peptide
LSAISILYLDSANNVVLKNYQ

SEQ ID NO: 53034 - protein, 33 aa, Artificial Sequence
  Cyclic GFR-binding peptide
  MOD_RES (6), (7): Xaa is C or S
TVPKPXXAPTQLEPLTVLYYDDSSNVIEQLSNN

SEQ ID NO: 53035 - protein, 27 aa, Artificial Sequence
  Cyclic GFR-binding peptide
APTKLEPLTVLYYDDSSNVIEQLSNNM

SEQ ID NO: 53036 - protein, 22 aa, Artificial Sequence
  Cyclic GFR-binding peptide
SPISMLFIDENEKVVYKQYEDM

SEQ ID NO: 53037 - protein, 33 aa, Artificial Sequence
  Cyclic GFR-binding peptide
  MOD_RES (7), (7): Xaa is C or S
HVTKPTXAPTKLEPLTVLYYDDSSNVIEQLSNN

SEQ ID NO: 53038 - protein, 40 aa, Artificial Sequence; identical to SEQ ID NO: 11686
  Cyclic GFR-binding peptide
  MOD_RES (6), (7), (39): Xaa is C or S

SEQ ID NO: 53039 - protein, 32 aa, Artificial Sequence; identical to SEQ ID NO: 11687
  Cyclic GFR-binding peptide
  MOD_RES (31), (31): Xaa is C or S

SEQ ID NO: 53040 - protein, 34 aa, Artificial Sequence
  Cyclic GFR-binding peptide
  MOD_RES (6), (7): Xaa is C or S
TVPKPXXAPTQLEPLTVLYYDDSSNVIEQLSNNM

SEQ ID NO: 53041 - protein, 38 aa, Artificial Sequence; identical to SEQ ID NO: 11688
  Cyclic GFR-binding peptide
  MOD_RES (6), (7): Xaa is C or S

SEQ ID NO: 53042 - protein, 25 aa, Artificial Sequence
  Cyclic GFR-binding peptide
TELEPLTMLYYDEYDKVVEQLSNEM

SEQ ID NO: 53043 - protein, 28 aa, Artificial Sequence
  Cyclic GFR-binding peptide
  MOD_RES (1), (1): Xaa is C or S
XAPTKLEPLPVVYYDDSSNVIEQLSNNM

SEQ ID NO: 53044 - protein, 34 aa, Artificial Sequence; identical to SEQ ID NO: 11689
  Cyclic GFR-binding peptide
  MOD_RES (1), (32), (34): Xaa is C or S

SEQ ID NO: 53045 - protein, 35 aa, Artificial Sequence; identical to SEQ ID NO: 11690
  Cyclic GFR-binding peptide
  MOD_RES (4), (4): Xaa is C or S

SEQ ID NO: 53046 - protein, 35 aa, Artificial Sequence; identical to SEQ ID NO: 11691
  Cyclic GFR-binding peptide
  MOD_RES (4), (5): Xaa is C or S

SEQ ID NO: 53047 - protein, 24 aa, Artificial Sequence
  Cyclic GFR-binding peptide
TRLEPLTILYYDSANNVVEQLSND

SEQ ID NO: 53048 - protein, 21 aa, Artificial Sequence
  Cyclic GFR-binding peptide
SPISILFIVGRTPKVYKQYEM

SEQ ID NO: 53049 - protein, 31 aa, Artificial Sequence; identical to SEQ ID NO: 11694
  Cyclic GFR-binding peptide

SEQ ID NO: 53050 - protein, 33 aa, Artificial Sequence
  Cyclic GFR-binding peptide
  MOD_RES (3), (4): Xaa is C or S
KAXXVPTELSPISMLFIDENEKVVYKQYEDMVV

SEQ ID NO: 53051 - protein, 26 aa, Artificial Sequence
  Cyclic GFR-binding peptide
QLSPISVLFIDDSSNVIYKQYENMVV

SEQ ID NO: 53052 - protein, 40 aa, Artificial Sequence; identical to SEQ ID NO: 11696
  Cyclic GFR-binding peptide
  MOD_RES (6), (7), (39): Xaa is C or S

SEQ ID NO: 53053 - protein, 28 aa, Artificial Sequence
  Cyclic GFR-binding peptide
  MOD_RES (27), (27): Xaa is C or S
EPLPMVYYDENEKVVEQLSNDMVVEGXG

SEQ ID NO: 53054 - protein, 29 aa, Artificial Sequence
  Cyclic GFR-binding peptide
  MOD_RES (3), (4): Xaa is C or S
PTXXVPTRLEPLPIVYYDSANNVVEQLSN

SEQ ID NO: 53055 - protein, 32 aa, Artificial Sequence
  Cyclic GFR-binding peptide
  MOD_RES (30), (32): Xaa is C or S
TRLEPLTILYYDSANNVVEQLSNDMVVESXGX

SEQ ID NO: 53056 - protein, 32 aa, Artificial Sequence
  Cyclic GFR-binding peptide
  MOD_RES (5), (6): Xaa is C or S
TPPTXXVPTRLSAISILYLDSANNVVLKNYQD

SEQ ID NO: 53057 - protein, 31 aa, Artificial Sequence
  Cyclic GFR-binding peptide
  MOD_RES (28), (30): Xaa is C or S
LNAISILYFDSANNVVLKKYRDMVVESXGXR

SEQ ID NO: 53058 - protein, 26 aa, Artificial Sequence
  Cyclic GFR-binding peptide
LSAISILYLDSANNVVLKNYQDMVVE

SEQ ID NO: 53059 - protein, 39 aa, Artificial Sequence; identical to SEQ ID NO: 11700
  Cyclic GFR-binding peptide
  MOD_RES (5), (6), (38): Xaa is C or S

SEQ ID NO: 53060 - protein, 32 aa, Artificial Sequence
  Cyclic GFR-binding peptide
  MOD_RES (5), (6): Xaa is C or S
TPPTXXVPTRLEPLPIVYYDSANNVVEQLSND

SEQ ID NO: 53061 - protein, 29 aa, Artificial Sequence
  Cyclic GFR-binding peptide
VPTRLSAISILYLDSANNVVLKNYQDMVV

SEQ ID NO: 53062 - protein, 26 aa, Artificial Sequence
  Cyclic GFR-binding peptide
APTQLEPLPVVYYDDSSNVIEQLSNN

SEQ ID NO: 53063 - protein, 29 aa, Artificial Sequence
  Cyclic GFR-binding peptide
  MOD_RES (1), (1): Xaa is C or S
XVPTELSPISMLFIDEYDKVVYKQYEEMV

SEQ ID NO: 53064 - protein, 38 aa, Artificial Sequence; identical to SEQ ID NO: 11702
  Cyclic GFR-binding peptide
  MOD_RES (4), (5), (37): Xaa is C or S

SEQ ID NO: 53065 - protein, 40 aa, Artificial Sequence; identical to SEQ ID NO: 11703
  Cyclic GFR-binding peptide
  MOD_RES (5), (6), (38), (40): Xaa is C or S

SEQ ID NO: 53066 - protein, 28 aa, Artificial Sequence
  Cyclic GFR-binding peptide
PTRLEPLTILYYDSANNVVEQLSNDMVV

SEQ ID NO: 53067 - protein, 28 aa, Artificial Sequence
  Cyclic GFR-binding peptide
  MOD_RES (2), (3): Xaa is C or S
PXXVPQDLEPLPIVYYVGRTPKVEQLSN

SEQ ID NO: 53068 - protein, 26 aa, Artificial Sequence
  Cyclic GFR-binding peptide
EPLTMLYYDEYDKVVEQLSNEMVVEG

SEQ ID NO: 53069 - protein, 25 aa, Artificial Sequence
  Cyclic GFR-binding peptide
SAISILYLDSANNVVLKNYQDMVVE

SEQ ID NO: 53070 - protein, 26 aa, Artificial Sequence
  Cyclic GFR-binding peptide
  MOD_RES (1), (1): Xaa is C or S
XVPQDLSPISILFIVGRTPKVYKQYE

SEQ ID NO: 53071 - protein, 32 aa, Artificial Sequence
  Cyclic GFR-binding peptide
  MOD_RES (4), (5): Xaa is C or S
AAPXXVPQALEPLTILYYVGRKPKVEQLSNMI

SEQ ID NO: 53072 - protein, 34 aa, Artificial Sequence
  Cyclic GFR-binding peptide
  MOD_RES (31), (33): Xaa is C or S
PTQLSPISVLFIDDSSNVIYKQYENMVVRAXGXH

SEQ ID NO: 53073 - protein, 24 aa, Artificial Sequence
  Cyclic GFR-binding peptide
LEPLPVVYYDDSSNVIEQLSNNMV

SEQ ID NO: 53074 - protein, 26 aa, Artificial Sequence
  Cyclic GFR-binding peptide
  MOD_RES (1), (1): Xaa is C or S
XVPQALEPLTILYYVGRKPKVEQLSN

SEQ ID NO: 53075 - protein, 35 aa, Artificial Sequence; identical to SEQ ID NO: 11707
  Cyclic GFR-binding peptide
  MOD_RES (1), (32), (34): Xaa is C or S

SEQ ID NO: 53076 - protein, 24 aa, Artificial Sequence
  Cyclic GFR-binding peptide
QDLEPLPIVYYIGKTPKIEQLSNM

SEQ ID NO: 53077 - protein, 30 aa, Artificial Sequence
  Cyclic GFR-binding peptide
  MOD_RES (1), (1): Xaa is C or S
XVPQALSPISILFIVGRKPKVYKQYEMIVR

SEQ ID NO: 53078 - protein, 38 aa, Artificial Sequence; identical to SEQ ID NO: 11710
  Cyclic GFR-binding peptide
  MOD_RES (3), (35), (37): Xaa is C or S

SEQ ID NO: 53079 - protein, 33 aa, Artificial Sequence
  Cyclic GFR-binding peptide
  MOD_RES (5), (6): Xaa is C or S
TPPTXXVPTRLNAISILYFDSANNVVLKKYRDM

SEQ ID NO: 53080 - protein, 32 aa, Artificial Sequence
  Cyclic GFR-binding peptide
  MOD_RES (30), (32): Xaa is C or S
TELEPLPMVYYDEYDKVVEQLSNEMVVEGXGX

SEQ ID NO: 53081 - protein, 25 aa, Artificial Sequence
  Cyclic GFR-binding peptide
LSPISILFIIGKTPKIYKQYEMIVK

SEQ ID NO: 53082 - protein, 40 aa, Artificial Sequence; identical to SEQ ID NO: 11713
  Cyclic GFR-binding peptide
  MOD_RES (4), (5), (37), (39): Xaa is C or S

SEQ ID NO: 53083 - protein, 36 aa, Artificial Sequence; identical to SEQ ID NO: 11714
  Cyclic GFR-binding peptide
  MOD_RES (4), (36): Xaa is C or S

SEQ ID NO: 53084 - protein, 30 aa, Artificial Sequence
  Cyclic GFR-binding peptide
  MOD_RES (27), (29): Xaa is C or S
SPISVLFIDDSSNVIYKQYENMVVRAXGXH

SEQ ID NO: 53085 - protein, 32 aa, Artificial Sequence
  Cyclic GFR-binding peptide
  MOD_RES (5), (6): Xaa is C or S
VPKPXXAPTKLSPISVLFIDDSSNVIYKQYEN

SEQ ID NO: 53086 - protein, 26 aa, Artificial Sequence
  Cyclic GFR-binding peptide
LSPISILFIVGRKPKVYKQYEMIVRS

SEQ ID NO: 53087 - protein, 24 aa, Artificial Sequence
  Cyclic GFR-binding peptide
LNAISILYFDSANNVVLKKYRDMV

SEQ ID NO: 53088 - protein, 27 aa, Artificial Sequence
  Cyclic GFR-binding peptide
  MOD_RES (27), (27): Xaa is C or S
SPISMLFIDENEKVVYKQYEDMVVEGX

SEQ ID NO: 53089 - protein, 37 aa, Artificial Sequence; identical to SEQ ID NO: 11715
  Cyclic GFR-binding peptide
  MOD_RES (4), (5), (37): Xaa is C or S

SEQ ID NO: 53090 - protein, 30 aa, Artificial Sequence
  Cyclic GFR-binding peptide
  MOD_RES (28), (30): Xaa is C or S
LEPLPMVYYDENEKVVEQLSNDMVVEGXGX

SEQ ID NO: 53091 - protein, 33 aa, Artificial Sequence; identical to SEQ ID NO: 11717
  Cyclic GFR-binding peptide
  MOD_RES (1), (2): Xaa is C or S

SEQ ID NO: 53092 - protein, 28 aa, Artificial Sequence
  Cyclic GFR-binding peptide
  MOD_RES (28), (28): Xaa is C or S
ALSPISILFIVGRKPKVYKQYEMIVRSX

SEQ ID NO: 53093 - protein, 25 aa, Artificial Sequence
  Cyclic GFR-binding peptide
PTRLEPLTILYYDSANNVVEQLSND

SEQ ID NO: 53094 - protein, 31 aa, Artificial Sequence
  Cyclic GFR-binding peptide
  MOD_RES (4), (5): Xaa is C or S
PKAXXVPTELEPLPMVYYDENEKVVEQLSND

SEQ ID NO: 53095 - protein, 37 aa, Artificial Sequence; identical to SEQ ID NO: 11720
  Cyclic GFR-binding peptide
  MOD_RES (5), (37): Xaa is C or S

SEQ ID NO: 53096 - protein, 33 aa, Artificial Sequence
  Cyclic GFR-binding peptide
  MOD_RES (30), (32): Xaa is C or S
PQDLEPLPIVYYVGRTPKVEQLSNMVVKSXKXS

SEQ ID NO: 53097 - protein, 36 aa, Artificial Sequence; identical to SEQ ID NO: 11721
  Cyclic GFR-binding peptide
  MOD_RES (5), (6): Xaa is C or S

SEQ ID NO: 53098 - protein, 32 aa, Artificial Sequence
  Cyclic GFR-binding peptide
  MOD_RES (6), (6): Xaa is C or S
VTKPTXAPTKLSPISVLFIDDSSNVIYKQYEN

SEQ ID NO: 53099 - protein, 30 aa, Artificial Sequence
  Cyclic GFR-binding peptide
  MOD_RES (29), (29): Xaa is C or S
QDLSPISILFIIGKTPKIYKQYEMIVKSXK

SEQ ID NO: 53100 - protein, 35 aa, Artificial Sequence; identical to SEQ ID NO: 11723
  Cyclic GFR-binding peptide
  MOD_RES (4), (5): Xaa is C or S

SEQ ID NO: 53101 - protein, 32 aa, Artificial Sequence
  Cyclic GFR-binding peptide
  MOD_RES (6), (7): Xaa is C or S
TVPKPXXAPTQLEPLTVLYYDDSSNVIEQLSN

SEQ ID NO: 53102 - protein, 30 aa, Artificial Sequence
  Cyclic GFR-binding peptide
PTRLNAISILYFDSANNVVLKKYRDMVVES

SEQ ID NO: 53103 - protein, 34 aa, Artificial Sequence
  Cyclic GFR-binding peptide
  MOD_RES (6), (7): Xaa is C or S
STPPTXXVPTRLEPLPIVYYDSANNVVEQLSNDM

SEQ ID NO: 53104 - protein, 27 aa, Artificial Sequence
  Cyclic GFR-binding peptide
LEPLTVLYYDDSSNVIEQLSNNMVVRS

SEQ ID NO: 53105 - protein, 27 aa, Artificial Sequence
  Cyclic GFR-binding peptide
VPQALEPLTILYYVGRKPKVEQLSNMI

SEQ ID NO: 53106 - protein, 31 aa, Artificial Sequence
  Cyclic GFR-binding peptide
  MOD_RES (2), (3): Xaa is C or S
PXXVPQALSPISILFIVGRKPKVYKQYEMIV

SEQ ID NO: 53107 - protein, 33 aa, Artificial Sequence
  Cyclic GFR-binding peptide
  MOD_RES (5), (6): Xaa is C or S
VPKPXXAPTQLSPISVLFIDDSSNVIYKQYENM

SEQ ID NO: 53108 - protein, 33 aa, Artificial Sequence
  Cyclic GFR-binding peptide
  MOD_RES (31), (33): Xaa is C or S
PTRLSAISILYLDSANNVVLKNYQDMVVESXGX

SEQ ID NO: 53109 - protein, 28 aa, Artificial Sequence
  Cyclic GFR-binding peptide
PTKLEPLPVVYYDDSSNVIEQLSNNMVV

SEQ ID NO: 53110 - protein, 29 aa, Artificial Sequence
  Cyclic GFR-binding peptide
  MOD_RES (1), (1): Xaa is C or S
XVPTELSPISMLFIDENEKVVYKQYEDMV

SEQ ID NO: 53111 - protein, 27 aa, Artificial Sequence
  Cyclic GFR-binding peptide
  MOD_RES (1), (2): Xaa is C or S
XXVPTELEPLPMVYYDEYDKVVEQLSN

SEQ ID NO: 53112 - protein, 31 aa, Artificial Sequence
  Cyclic GFR-binding peptide
  MOD_RES (4), (5): Xaa is C or S
ASPXXVPQDLEPLPIVYYVGRTPKVEQLSNM

SEQ ID NO: 53113 - protein, 28 aa, Artificial Sequence
  Cyclic GFR-binding peptide
  MOD_RES (27), (27): Xaa is C or S
EPLTVLYYDDSSNVIEQLSNNMVVRAXG

SEQ ID NO: 53114 - protein, 32 aa, Artificial Sequence
  Cyclic GFR-binding peptide
  MOD_RES (6), (7): Xaa is C or S
KIPKAXXVPTELEPLTMLYYDENEKVVEQLSN

SEQ ID NO: 53115 - protein, 33 aa, Artificial Sequence
  Cyclic GFR-binding peptide
  MOD_RES (30), (32): Xaa is C or S
TELEPLPMVYYDENEKVVEQLSNDMVVEGXGXR

SEQ ID NO: 53116 - protein, 37 aa, Artificial Sequence; identical to SEQ ID NO: 11727
  Cyclic GFR-binding peptide
  MOD_RES (1), (2), (34), (36): Xaa is C or S

SEQ ID NO: 53117 - protein, 30 aa, Artificial Sequence
  Cyclic GFR-binding peptide
  MOD_RES (30), (30): Xaa is C or S
PQALSPISILFIVGRKPKVYKQYEMIVRSX

SEQ ID NO: 53118 - protein, 41 aa, Artificial Sequence; identical to SEQ ID NO: 11730
  Cyclic GFR-binding peptide
  MOD_RES (6), (7), (39), (41): Xaa is C or S

SEQ ID NO: 53119 - protein, 28 aa, Artificial Sequence
  Cyclic GFR-binding peptide
  MOD_RES (1), (2): Xaa is C or S
XXAPTKLSPISVLFIDDSSNVIYKQYEN

SEQ ID NO: 53120 - protein, 38 aa, Artificial Sequence; identical to SEQ ID NO: 11731
  Cyclic GFR-binding peptide
  MOD_RES (3), (4), (35), (37): Xaa is C or S

SEQ ID NO: 53121 - protein, 32 aa, Artificial Sequence; identical to SEQ ID NO: 11732
  Cyclic GFR-binding peptide
  MOD_RES (1), (2): Xaa is C or S

SEQ ID NO: 53122 - protein, 37 aa, Artificial Sequence; identical to SEQ ID NO: 11733
  Cyclic GFR-binding peptide
  MOD_RES (6), (7): Xaa is C or S

SEQ ID NO: 53123 - protein, 34 aa, Artificial Sequence; identical to SEQ ID NO: 11735
  Cyclic GFR-binding peptide
  MOD_RES (1), (2), (34): Xaa is C or S

SEQ ID NO: 53124 - protein, 38 aa, Artificial Sequence; identical to SEQ ID NO: 11736
  Cyclic GFR-binding peptide
  MOD_RES (2), (3), (35), (37): Xaa is C or S

SEQ ID NO: 53125 - protein, 33 aa, Artificial Sequence; identical to SEQ ID NO: 11737
  Cyclic GFR-binding peptide
  MOD_RES (3), (3): Xaa is C or S

SEQ ID NO: 53126 - protein, 38 aa, Artificial Sequence; identical to SEQ ID NO: 11738
  Cyclic GFR-binding peptide
  MOD_RES (2), (3), (35), (37): Xaa is C or S

SEQ ID NO: 53127 - protein, 36 aa, Artificial Sequence; identical to SEQ ID NO: 11740
  Cyclic GFR-binding peptide
  MOD_RES (3), (4), (35): Xaa is C or S

SEQ ID NO: 53128 - protein, 30 aa, Artificial Sequence
  Cyclic GFR-binding peptide
PTRLEPLTILYYDSANNVVEQLSNDMVVES

SEQ ID NO: 53129 - protein, 29 aa, Artificial Sequence
  Cyclic GFR-binding peptide
  MOD_RES (29), (29): Xaa is C or S
QLEPLTVLYYDDSSNVIEQLSNNMVVRAX

SEQ ID NO: 53130 - protein, 23 aa, Artificial Sequence
  Cyclic GFR-binding peptide
QLSPISVLFIDDSSNVIYKQYEN

SEQ ID NO: 53131 - protein, 28 aa, Artificial Sequence
  Cyclic GFR-binding peptide
QALEPLTILYYVGRKPKVEQLSNMIVRS

SEQ ID NO: 53132 - protein, 31 aa, Artificial Sequence
  Cyclic GFR-binding peptide
  MOD_RES (1), (2): Xaa is C or S
XXAPTQLEPLTVLYYDDSSNVIEQLSNNMVV

SEQ ID NO: 53133 - protein, 31 aa, Artificial Sequence
  Cyclic GFR-binding peptide
  MOD_RES (4), (5): Xaa is C or S
AAPXXVPQALEPLTILYYVGRKPKVEQLSNM

SEQ ID NO: 53134 - protein, 41 aa, Artificial Sequence; identical to SEQ ID NO: 11742
  Cyclic GFR-binding peptide
  MOD_RES (6), (7), (39), (41): Xaa is C or S

SEQ ID NO: 53135 - protein, 28 aa, Artificial Sequence
  Cyclic GFR-binding peptide
  MOD_RES (2), (3): Xaa is C or S
PXXAPTQLEPLPVVYYDDSSNVIEQLSN

SEQ ID NO: 53136 - protein, 26 aa, Artificial Sequence
  Cyclic GFR-binding peptide
LSPISILFIIGKTPKIYKQYEMIVKS

SEQ ID NO: 53137 - protein, 27 aa, Artificial Sequence
  Cyclic GFR-binding peptide
  MOD_RES (27), (27): Xaa is C or S
LSPISILFIVGRTPKVYKQYEMVVKSX

SEQ ID NO: 53138 - protein, 31 aa, Artificial Sequence
  Cyclic GFR-binding peptide
  MOD_RES (2), (3): Xaa is C or S
AXXVPTELEPLPMVYYDEYDKVVEQLSNEMV

SEQ ID NO: 53139 - protein, 39 aa, Artificial Sequence; identical to SEQ ID NO: 11744
  Cyclic GFR-binding peptide
  MOD_RES (4), (5), (36), (38): Xaa is C or S

SEQ ID NO: 53140 - protein, 34 aa, Artificial Sequence; identical to SEQ ID NO: 11745
  Cyclic GFR-binding peptide
  MOD_RES (3), (4): Xaa is C or S

SEQ ID NO: 53141 - protein, 30 aa, Artificial Sequence
  Cyclic GFR-binding peptide
  MOD_RES (1), (1): Xaa is C or S
XVPTRLSAISILYLDSANNVVLKNYQDMVV

SEQ ID NO: 53142 - protein, 29 aa, Artificial Sequence
  Cyclic GFR-binding peptide
  MOD_RES (27), (29): Xaa is C or S
EPLTVLYYDDSSNVIEQLSNNMVVRSXGX

SEQ ID NO: 53143 - protein, 34 aa, Artificial Sequence; identical to SEQ ID NO: 11746
  Cyclic GFR-binding peptide
  MOD_RES (3), (4): Xaa is C or S

SEQ ID NO: 53144 - protein, 33 aa, Artificial Sequence
  Cyclic GFR-binding peptide
  MOD_RES (3), (4): Xaa is C or S
KPXXAPTQLEPLPVVYYDDSSNVIEQLSNNMVV

SEQ ID NO: 53145 - protein, 26 aa, Artificial Sequence
  Cyclic GFR-binding peptide
TKLEPLPVVYYDDSSNVIEQLSNNMV

SEQ ID NO: 53146 - protein, 38 aa, Artificial Sequence; identical to SEQ ID NO: 11751
  Cyclic GFR-binding peptide
  MOD_RES (2), (3), (35), (37): Xaa is C or S

SEQ ID NO: 53147 - protein, 29 aa, Artificial Sequence
  Cyclic GFR-binding peptide
  MOD_RES (1), (2): Xaa is C or S
XXVPTRLNAISILYFDSANNVVLKKYRDM

SEQ ID NO: 53148 - protein, 21 aa, Artificial Sequence
  Cyclic GFR-binding peptide
LSPISVLFIDDSSNVIYKQYE

SEQ ID NO: 53149 - protein, 29 aa, Artificial Sequence
  Cyclic GFR-binding peptide
EPLTILYYVGRTPKVEQLSNAAAAAAAAA

SEQ ID NO: 53150 - protein, 25 aa, Artificial Sequence
  Cyclic GFR-binding peptide
LSPISMLFIDEYDKVVYKQYEEMVV

SEQ ID NO: 53151 - protein, 36 aa, Artificial Sequence; identical to SEQ ID NO: 11755
  Cyclic GFR-binding peptide
  MOD_RES (3), (4), (36): Xaa is C or S

SEQ ID NO: 53152 - protein, 31 aa, Artificial Sequence
  Cyclic GFR-binding peptide
  MOD_RES (30), (30): Xaa is C or S
TELEPLTMLYYDEYDKVVEQLSNEMVVEGXG

SEQ ID NO: 53153 - protein, 29 aa, Artificial Sequence
  Cyclic GFR-binding peptide
  MOD_RES (28), (28): Xaa is C or S
ALSPISILFIVGRKPKVYKQYEMIVRSXK

SEQ ID NO: 53154 - protein, 25 aa, Artificial Sequence
  Cyclic GFR-binding peptide
QDLEPLPIVYYIGKTPKIEQLSNMI

SEQ ID NO: 53155 - protein, 25 aa, Artificial Sequence
  Cyclic GFR-binding peptide
LEPLPIVYYDSANNVVEQLSNDMVV

SEQ ID NO: 53156 - protein, 28 aa, Artificial Sequence
  Cyclic GFR-binding peptide
  MOD_RES (1), (2): Xaa is C or S
XXVPTRLNAISILYFDSANNVVLKKYRD

SEQ ID NO: 53157 - protein, 31 aa, Artificial Sequence
  Cyclic GFR-binding peptide
  MOD_RES (28), (30): Xaa is C or S
LEPLPMVYYDENEKVVEQLSNDMVVEGXGXR

SEQ ID NO: 53158 - protein, 36 aa, Artificial Sequence; identical to SEQ ID NO: 11757
  Cyclic GFR-binding peptide
  MOD_RES (2), (3), (35): Xaa is C or S

SEQ ID NO: 53159 - protein, 42 aa, Artificial Sequence; identical to SEQ ID NO: 11758
  Cyclic GFR-binding peptide
  MOD_RES (6), (7), (39), (41): Xaa is C or S

SEQ ID NO: 53160 - protein, 32 aa, Artificial Sequence; identical to SEQ ID NO: 11759
  Cyclic GFR-binding peptide
  MOD_RES (32), (32): Xaa is C or S

SEQ ID NO: 53161 - protein, 27 aa, Artificial Sequence
  Cyclic GFR-binding peptide
  MOD_RES (1), (1): Xaa is C or S
XVPTELEPLPMVYYDEYDKVVEQLSNE

SEQ ID NO: 53162 - protein, 24 aa, Artificial Sequence
  Cyclic GFR-binding peptide
LSPISVLFIDDSSNVIYKQYENMV

SEQ ID NO: 53163 - protein, 33 aa, Artificial Sequence; identical to SEQ ID NO: 11760
  Cyclic GFR-binding peptide
  MOD_RES (32), (32): Xaa is C or S

SEQ ID NO: 53164 - protein, 21 aa, Artificial Sequence
  Cyclic GFR-binding peptide
SPISMLFIDEYDKVVYKQYEE

SEQ ID NO: 53165 - protein, 27 aa, Artificial Sequence
  Cyclic GFR-binding peptide
VSQDLSPISILFIIGKTPKIYKQYEMI

SEQ ID NO: 53166 - protein, 32 aa, Artificial Sequence; identical to SEQ ID NO: 11761
  Cyclic GFR-binding peptide
  MOD_RES (1), (1): Xaa is C or S

SEQ ID NO: 53167 - protein, 29 aa, Artificial Sequence
  Cyclic GFR-binding peptide
  MOD_RES (3), (4): Xaa is C or S
KPXXAPTKLEPLPVVYYDDSSNVIEQLSN

SEQ ID NO: 53168 - protein, 23 aa, Artificial Sequence
  Cyclic GFR-binding peptide
EPLTMLYYDEYDKVVEQLSNEMV

SEQ ID NO: 53169 - protein, 40 aa, Artificial Sequence; identical to SEQ ID NO: 11763
  Cyclic GFR-binding peptide
  MOD_RES (6), (7), (39): Xaa is C or S

SEQ ID NO: 53170 - protein, 27 aa, Artificial Sequence
  Cyclic GFR-binding peptide
LEPLTVLYYDDSSNVIEQLSNNMVVRA

SEQ ID NO: 53171 - protein, 32 aa, Artificial Sequence
  Cyclic GFR-binding peptide
  MOD_RES (3), (4): Xaa is C or S
KAXXVPTELEPLPMVYYDENEKVVEQLSNDMV

SEQ ID NO: 53172 - protein, 37 aa, Artificial Sequence; identical to SEQ ID NO: 11764
  Cyclic GFR-binding peptide
  MOD_RES (6), (6): Xaa is C or S

SEQ ID NO: 53173 - protein, 30 aa, Artificial Sequence
  Cyclic GFR-binding peptide
  MOD_RES (1), (2): Xaa is C or S
XXAPTKLEPLTVLYYDDSSNVIEQLSNNMV

SEQ ID NO: 53174 - protein, 23 aa, Artificial Sequence
  Cyclic GFR-binding peptide
LSPISILFIVGRTPKVYKQYEMV

SEQ ID NO: 53175 - protein, 32 aa, Artificial Sequence; identical to SEQ ID NO: 11766
  Cyclic GFR-binding peptide
  MOD_RES (2), (2): Xaa is C or S

SEQ ID NO: 53176 - protein, 33 aa, Artificial Sequence
  Cyclic GFR-binding peptide
  MOD_RES (30), (32): Xaa is C or S
TELEPLPMVYYDEYDKVVEQLSNEMVVEGXGXR

SEQ ID NO: 53177 - protein, 25 aa, Artificial Sequence
  Cyclic GFR-binding peptide
LSPISILFIVGRTPKVYKQYEMVVK

SEQ ID NO: 53178 - protein, 28 aa, Artificial Sequence
  Cyclic GFR-binding peptide
PQALSPISILFIVGRKPKVYKQYEMIVR

SEQ ID NO: 53179 - protein, 35 aa, Artificial Sequence; identical to SEQ ID NO: 11768
  Cyclic GFR-binding peptide
  MOD_RES (4), (5): Xaa is C or S

SEQ ID NO: 53180 - protein, 22 aa, Artificial Sequence
  Cyclic GFR-binding peptide
ELEPLTMLYYDEYDKVVEQLSN

SEQ ID NO: 53181 - protein, 33 aa, Artificial Sequence; identical to SEQ ID NO: 11769
  Cyclic GFR-binding peptide
  MOD_RES (2), (3): Xaa is C or S

SEQ ID NO: 53182 - protein, 28 aa, Artificial Sequence
  Cyclic GFR-binding peptide
APTQLSPISVLFIDDSSNVIYKQYENMV

SEQ ID NO: 53183 - protein, 34 aa, Artificial Sequence
  Cyclic GFR-binding peptide
  MOD_RES (4), (5): Xaa is C or S
PKPXXAPTKLEPLPVVYYDDSSNVIEQLSNNMVV

SEQ ID NO: 53184 - protein, 32 aa, Artificial Sequence; identical to SEQ ID NO: 11773
  Cyclic GFR-binding peptide
  MOD_RES (31), (31): Xaa is C or S

SEQ ID NO: 53185 - protein, 41 aa, Artificial Sequence; identical to SEQ ID NO: 11775
  Cyclic GFR-binding peptide
  MOD_RES (6), (7), (39), (41): Xaa is C or S

SEQ ID NO: 53186 - protein, 37 aa, Artificial Sequence; identical to SEQ ID NO: 11776
  Cyclic GFR-binding peptide
  MOD_RES (3), (4), (36): Xaa is C or S

SEQ ID NO: 53187 - protein, 29 aa, Artificial Sequence
  Cyclic GFR-binding peptide
PTELEPLPMVYYDEYDKVVEQLSNEMVVE

SEQ ID NO: 53188 - protein, 23 aa, Artificial Sequence
  Cyclic GFR-binding peptide
KLEPLPVVYYDDSSNVIEQLSNN

SEQ ID NO: 53189 - protein, 39 aa, Artificial Sequence; identical to SEQ ID NO: 11777
  Cyclic GFR-binding peptide
  MOD_RES (3), (4), (36), (38): Xaa is C or S

SEQ ID NO: 53190 - protein, 26 aa, Artificial Sequence
  Cyclic GFR-binding peptide
VPQDLSPISILFIVGRTPKVYKQYEM

SEQ ID NO: 53191 - protein, 31 aa, Artificial Sequence
  Cyclic GFR-binding peptide
  MOD_RES (1), (2): Xaa is C or S
XXVPTRLEPLPIVYYDSANNVVEQLSNDMVV

SEQ ID NO: 53192 - protein, 28 aa, Artificial Sequence
  Cyclic GFR-binding peptide
  MOD_RES (28), (28): Xaa is C or S
LEPLTMLYYDEYDKVVEQLSNEMVVEGX

SEQ ID NO: 53193 - protein, 20 aa, Artificial Sequence
  Cyclic GFR-binding peptide
EPLPIVYYIGKTPKIEQLSN

SEQ ID NO: 53194 - protein, 41 aa, Artificial Sequence; identical to SEQ ID NO: 11778
  Cyclic GFR-binding peptide
  MOD_RES (6), (7), (39), (41): Xaa is C or S

SEQ ID NO: 53195 - protein, 32 aa, Artificial Sequence
  Cyclic GFR-binding peptide
  MOD_RES (4), (5): Xaa is C or S
PKPXXAPTKLSPISVLFIDDSSNVIYKQYENM

SEQ ID NO: 53196 - protein, 31 aa, Artificial Sequence
  Cyclic GFR-binding peptide
  MOD_RES (2), (3): Xaa is C or S
PXXAPTQLEPLPVVYYDDSSNVIEQLSNNMV

SEQ ID NO: 53197 - protein, 23 aa, Artificial Sequence
  Cyclic GFR-binding peptide
EPLPIVYYIGKTPKIEQLSNMIV

SEQ ID NO: 53198 - protein, 36 aa, Artificial Sequence; identical to SEQ ID NO: 11780
  Cyclic GFR-binding peptide
  MOD_RES (1), (33), (35): Xaa is C or S

SEQ ID NO: 53199 - protein, 30 aa, Artificial Sequence; identical to SEQ ID NO: 990
  Cyclic GFR-binding peptide

SEQ ID NO: 53200 - protein, 29 aa, Artificial Sequence
  Cyclic GFR-binding peptide
  MOD_RES (3), (4): Xaa is C or S
KAXXVPTELEPLTMLYYDENEKVVEQLSN

SEQ ID NO: 53201 - protein, 32 aa, Artificial Sequence
  Cyclic GFR-binding peptide
  MOD_RES (30), (32): Xaa is C or S
TELEPLPMVYYDENEKVVEQLSNDMVVEGXGX

SEQ ID NO: 53202 - protein, 23 aa, Artificial Sequence
  Cyclic GFR-binding peptide
SPISMLFIDENEKVVYKQYEDMV

SEQ ID NO: 53203 - protein, 31 aa, Artificial Sequence
  Cyclic GFR-binding peptide
  MOD_RES (3), (4): Xaa is C or S
SPXXVPQDLEPLPIVYYVGRTPKVEQLSNMV

SEQ ID NO: 53204 - protein, 30 aa, Artificial Sequence
  Cyclic GFR-binding peptide
  MOD_RES (28), (30): Xaa is C or S
LEPLPMVYYDEYDKVVEQLSNEMVVEGXGX

SEQ ID NO: 53205 - protein, 35 aa, Artificial Sequence; identical to SEQ ID NO: 11781
  Cyclic GFR-binding peptide
  MOD_RES (1), (33), (35): Xaa is C or S

SEQ ID NO: 53206 - protein, 38 aa, Artificial Sequence; identical to SEQ ID NO: 11783
  Cyclic GFR-binding peptide
  MOD_RES (4), (5), (36), (38): Xaa is C or S

SEQ ID NO: 53207 - protein, 29 aa, Artificial Sequence
  Cyclic GFR-binding peptide
VPQALSPISILFIVGRKPKVYKQYEMIVR

SEQ ID NO: 53208 - protein, 31 aa, Artificial Sequence
  Cyclic GFR-binding peptide
  MOD_RES (28), (30): Xaa is C or S
LEPLPMVYYDEYDKVVEQLSNEMVVEGXGXR

SEQ ID NO: 53209 - protein, 29 aa, Artificial Sequence
  Cyclic GFR-binding peptide
  MOD_RES (3), (4): Xaa is C or S
KPXXAPTQLSPISVLFIDDSSNVIYKQYE

SEQ ID NO: 53210 - protein, 27 aa, Artificial Sequence
  Cyclic GFR-binding peptide
  MOD_RES (1), (1): Xaa is C or S
XAPTQLEPLPVVYYDDSSNVIEQLSNN

SEQ ID NO: 53211 - protein, 29 aa, Artificial Sequence
  Cyclic GFR-binding peptide
PTELSPISMLFIDENEKVVYKQYEDMVVE

SEQ ID NO: 53212 - protein, 36 aa, Artificial Sequence; identical to SEQ ID NO: 11787
  Cyclic GFR-binding peptide
  MOD_RES (1), (33), (35): Xaa is C or S

SEQ ID NO: 53213 - protein, 35 aa, Artificial Sequence; identical to SEQ ID NO: 11789
  Cyclic GFR-binding peptide
  MOD_RES (1), (2), (34): Xaa is C or S

SEQ ID NO: 53214 - protein, 34 aa, Artificial Sequence; identical to SEQ ID NO: 11794
  Cyclic GFR-binding peptide
  MOD_RES (32), (34): Xaa is C or S

SEQ ID NO: 53215 - protein, 24 aa, Artificial Sequence
  Cyclic GFR-binding peptide
TELEPLTMLYYDENEKVVEQLSND

SEQ ID NO: 53216 - protein, 32 aa, Artificial Sequence
  Cyclic GFR-binding peptide
  MOD_RES (2), (3): Xaa is C or S
PXXAPTQLEPLTVLYYDDSSNVIEQLSNNMVV

SEQ ID NO: 53217 - protein, 27 aa, Artificial Sequence
  Cyclic GFR-binding peptide
  MOD_RES (26), (26): Xaa is C or S
EPLTILYYVGRKPKVEQLSNMIVRSXK

SEQ ID NO: 53218 - protein, 32 aa, Artificial Sequence; identical to SEQ ID NO: 11796
  Cyclic GFR-binding peptide
  MOD_RES (32), (32): Xaa is C or S

SEQ ID NO: 53219 - protein, 37 aa, Artificial Sequence; identical to SEQ ID NO: 11797
  Cyclic GFR-binding peptide
  MOD_RES (2), (3), (35), (37): Xaa is C or S

SEQ ID NO: 53220 - protein, 36 aa, Artificial Sequence; identical to SEQ ID NO: 11798
  Cyclic GFR-binding peptide
  MOD_RES (1), (33), (35): Xaa is C or S

SEQ ID NO: 53221 - protein, 22 aa, Artificial Sequence
  Cyclic GFR-binding peptide
DLSPISILFIIGKTPKIYKQYE

SEQ ID NO: 53222 - protein, 29 aa, Artificial Sequence
  Cyclic GFR-binding peptide
PTRLEPLPIVYYDSANNVVEQLSNDMVVE

SEQ ID NO: 53223 - protein, 34 aa, Artificial Sequence
  Cyclic GFR-binding peptide
  MOD_RES (4), (5): Xaa is C or S
PKAXXVPTELEPLTMLYYDENEKVVEQLSNDMVV

SEQ ID NO: 53224 - protein, 38 aa, Artificial Sequence; identical to SEQ ID NO: 11799
  Cyclic GFR-binding peptide
  MOD_RES (6), (7): Xaa is C or S

SEQ ID NO: 53225 - protein, 32 aa, Artificial Sequence
  Cyclic GFR-binding peptide
  MOD_RES (2), (3): Xaa is C or S
TXXVPTRLSAISILYLDSANNVVLKNYQDMVV

SEQ ID NO: 53226 - protein, 23 aa, Artificial Sequence
  Cyclic GFR-binding peptide
QDLSPISILFIIGKTPKIYKQYE

SEQ ID NO: 53227 - protein, 37 aa, Artificial Sequence; identical to SEQ ID NO: 11801
  Cyclic GFR-binding peptide
  MOD_RES (2), (34), (36): Xaa is C or S

SEQ ID NO: 53228 - protein, 31 aa, Artificial Sequence; identical to SEQ ID NO: 11804
  Cyclic GFR-binding peptide
  MOD_RES (1), (1): Xaa is C or S

SEQ ID NO: 53229 - protein, 28 aa, Artificial Sequence
  Cyclic GFR-binding peptide
QLEPLTVLYYDDSSNVIEQLSNNMVVRA

SEQ ID NO: 53230 - protein, 29 aa, Artificial Sequence
  Cyclic GFR-binding peptide
APTQLEPLPVVYYDDSSNVIEQLSNNMVV

SEQ ID NO: 53231 - protein, 34 aa, Artificial Sequence; identical to SEQ ID NO: 11806
  Cyclic GFR-binding peptide
  MOD_RES (32), (34): Xaa is C or S

SEQ ID NO: 53232 - protein, 41 aa, Artificial Sequence; identical to SEQ ID NO: 11807
  Cyclic GFR-binding peptide
  MOD_RES (6), (7), (39), (41): Xaa is C or S

SEQ ID NO: 53233 - protein, 32 aa, Artificial Sequence
  Cyclic GFR-binding peptide
  MOD_RES (30), (32): Xaa is C or S
TQLEPLTVLYYDDSSNVIEQLSNNMVVRAXGX

SEQ ID NO: 53234 - protein, 30 aa, Artificial Sequence; identical to SEQ ID NO: 11808
  Cyclic GFR-binding peptide

SEQ ID NO: 53235 - protein, 33 aa, Artificial Sequence; identical to SEQ ID NO: 11809
  Cyclic GFR-binding peptide
  MOD_RES (1), (2): Xaa is C or S

SEQ ID NO: 53236 - protein, 27 aa, Artificial Sequence
  Cyclic GFR-binding peptide
QDLSPISILFIIGKTPKIYKQYEMIVK

SEQ ID NO: 53237 - protein, 36 aa, Artificial Sequence; identical to SEQ ID NO: 11810
  Cyclic GFR-binding peptide
  MOD_RES (3), (35): Xaa is C or S

SEQ ID NO: 53238 - protein, 29 aa, Artificial Sequence
  Cyclic GFR-binding peptide
  MOD_RES (2), (3): Xaa is C or S
PXXAPTKLEPLTVLYYDDSSNVIEQLSNN

SEQ ID NO: 53239 - protein, 32 aa, Artificial Sequence
  Cyclic GFR-binding peptide
  MOD_RES (30), (32): Xaa is C or S
TQLSPISVLFIDDSSNVIYKQYENMVVRAXGX

SEQ ID NO: 53240 - protein, 23 aa, Artificial Sequence
  Cyclic GFR-binding peptide
TQLSPISVLFIDDSSNVIYKQYE

SEQ ID NO: 53241 - protein, 32 aa, Artificial Sequence
  Cyclic GFR-binding peptide
  MOD_RES (29), (31): Xaa is C or S
KLEPLTVLYYDDSSNVIEQLSNNMVVRSXGXH

SEQ ID NO: 53242 - protein, 36 aa, Artificial Sequence
  Cyclic GFR-binding peptide
  MOD_RES (6), (7): Xaa is C or S
KIPKAXXVPTELSPISMLFIDENEKVVYKQYEDMVV

SEQ ID NO: 53243 - protein, 32 aa, Artificial Sequence
  Cyclic GFR-binding peptide
  MOD_RES (30), (32): Xaa is C or S
PQDLEPLPIVYYVGRTPKVEQLSNMVVKSXKX

SEQ ID NO: 53244 - protein, 35 aa, Artificial Sequence; identical to SEQ ID NO: 11812
  Cyclic GFR-binding peptide
  MOD_RES (1), (33), (35): Xaa is C or S

SEQ ID NO: 53245 - protein, 24 aa, Artificial Sequence
  Cyclic GFR-binding peptide
DLSPISILFIIGKTPKIYKQYEMI

SEQ ID NO: 53246 - protein, 33 aa, Artificial Sequence
  Cyclic GFR-binding peptide
  MOD_RES (5), (6): Xaa is C or S
IPKAXXVPTELEPLPMVYYDENEKVVEQLSNDM

SEQ ID NO: 53247 - protein, 36 aa, Artificial Sequence; identical to SEQ ID NO: 11814
  Cyclic GFR-binding peptide
  MOD_RES (2), (3), (35): Xaa is C or S

SEQ ID NO: 53248 - protein, 26 aa, Artificial Sequence
  Cyclic GFR-binding peptide
  MOD_RES (26), (26): Xaa is C or S
EPLTILYYVGRKPKVEQLSNMIVRSX

SEQ ID NO: 53249 - protein, 27 aa, Artificial Sequence
  Cyclic GFR-binding peptide
TELEPLPMVYYDENEKVVEQLSNDMVV

SEQ ID NO: 53250 - protein, 30 aa, Artificial Sequence
  Cyclic GFR-binding peptide
  MOD_RES (27), (29): Xaa is C or S
EPLTVLYYDDSSNVIEQLSNNMVVRSXGXH

SEQ ID NO: 53251 - protein, 31 aa, Artificial Sequence
  Cyclic GFR-binding peptide
  MOD_RES (6), (6): Xaa is C or S
VTKPTXAPTKLSPISVLFIDDSSNVIYKQYE

SEQ ID NO: 53252 - protein, 40 aa, Artificial Sequence; identical to SEQ ID NO: 11815
  Cyclic GFR-binding peptide
  MOD_RES (6), (7), (39): Xaa is C or S

SEQ ID NO: 53253 - protein, 32 aa, Artificial Sequence; identical to SEQ ID NO: 11817
  Cyclic GFR-binding peptide
  MOD_RES (31), (31): Xaa is C or S

SEQ ID NO: 53254 - protein, 24 aa, Artificial Sequence
  Cyclic GFR-binding peptide
PTRLEPLTILYYDSANNVVEQLSN

SEQ ID NO: 53255 - protein, 20 aa, Artificial Sequence
  Cyclic GFR-binding peptide
SPISMLFIDEYDKVVYKQYE

SEQ ID NO: 53256 - protein, 37 aa, Artificial Sequence; identical to SEQ ID NO: 11818
  Cyclic GFR-binding peptide
  MOD_RES (7), (7): Xaa is C or S

SEQ ID NO: 53257 - protein, 37 aa, Artificial Sequence; identical to SEQ ID NO: 11819
  Cyclic GFR-binding peptide
  MOD_RES (3), (4), (36): Xaa is C or S

SEQ ID NO: 53258 - protein, 30 aa, Artificial Sequence
  Cyclic GFR-binding peptide
  MOD_RES (27), (29): Xaa is C or S
SPISVLFIDDSSNVIYKQYENMVVRSXGXH

SEQ ID NO: 53259 - protein, 27 aa, Artificial Sequence
  Cyclic GFR-binding peptide
TKLEPLTVLYYDDSSNVIEQLSNNMVV

SEQ ID NO: 53260 - protein, 30 aa, Artificial Sequence
  Cyclic GFR-binding peptide
  MOD_RES (4), (5): Xaa is C or S
ASPXXVSQDLSPISILFIIGKTPKIYKQYE

SEQ ID NO: 53261 - protein, 37 aa, Artificial Sequence; identical to SEQ ID NO: 11821
  Cyclic GFR-binding peptide
  MOD_RES (3), (4), (36): Xaa is C or S

SEQ ID NO: 53262 - protein, 31 aa, Artificial Sequence
  Cyclic GFR-binding peptide
  MOD_RES (2), (3): Xaa is C or S
TXXVPTRLEPLTILYYDSANNVVEQLSNDMV

SEQ ID NO: 53263 - protein, 32 aa, Artificial Sequence
  Cyclic GFR-binding peptide
  MOD_RES (29), (31): Xaa is C or S
QDLSPISILFIIGKTPKIYKQYEMIVKSXKXS

SEQ ID NO: 53264 - protein, 37 aa, Artificial Sequence; identical to SEQ ID NO: 11823
  Cyclic GFR-binding peptide
  MOD_RES (2), (3), (34), (36): Xaa is C or S

SEQ ID NO: 53265 - protein, 29 aa, Artificial Sequence
  Cyclic GFR-binding peptide
  MOD_RES (1), (1): Xaa is C or S
XVPTELEPLTMLYYDEYDKVVEQLSNEMV

SEQ ID NO: 53266 - protein, 35 aa, Artificial Sequence; identical to SEQ ID NO: 11825
  Cyclic GFR-binding peptide
  MOD_RES (4), (5): Xaa is C or S

SEQ ID NO: 53267 - protein, 37 aa, Artificial Sequence; identical to SEQ ID NO: 11826
  Cyclic GFR-binding peptide
  MOD_RES (2), (34), (36): Xaa is C or S

SEQ ID NO: 53268 - protein, 25 aa, Artificial Sequence
  Cyclic GFR-binding peptide
LNAISILYFDSANNVVLKKYRDMVV

SEQ ID NO: 53269 - protein, 34 aa, Artificial Sequence; identical to SEQ ID NO: 11831
  Cyclic GFR-binding peptide
  MOD_RES (1), (33): Xaa is C or S

SEQ ID NO: 53270 - protein, 30 aa, Artificial Sequence
  Cyclic GFR-binding peptide
  MOD_RES (1), (2): Xaa is C or S
XXAPTQLSPISVLFIDDSSNVIYKQYENMV

SEQ ID NO: 53271 - protein, 33 aa, Artificial Sequence
  Cyclic GFR-binding peptide
  MOD_RES (5), (6): Xaa is C or S
SAAPXXVPQALEPLTILYYVGRKPKVEQLSNMI

SEQ ID NO: 53272 - protein, 32 aa, Artificial Sequence
  Cyclic GFR-binding peptide
  MOD_RES (4), (5): Xaa is C or S
ASPXXVSQDLSPISILFIIGKTPKIYKQYEMI

SEQ ID NO: 53273 - protein, 21 aa, Artificial Sequence
  Cyclic GFR-binding peptide
LEPLPIVYYIGKTPKIEQLSN

SEQ ID NO: 53274 - protein, 40 aa, Artificial Sequence; identical to SEQ ID NO: 11834
  Cyclic GFR-binding peptide
  MOD_RES (7), (39): Xaa is C or S

SEQ ID NO: 53275 - protein, 29 aa, Artificial Sequence
  Cyclic GFR-binding peptide
  MOD_RES (1), (2): Xaa is C or S
XXVPTELSPISMLFIDENEKVVYKQYEDM

SEQ ID NO: 53276 - protein, 39 aa, Artificial Sequence; identical to SEQ ID NO: 11836
  Cyclic GFR-binding peptide
  MOD_RES (6), (7), (39): Xaa is C or S

SEQ ID NO: 53277 - protein, 21 aa, Artificial Sequence
  Cyclic GFR-binding peptide
LEPLTMLYYDENEKVVEQLSN

SEQ ID NO: 53278 - protein, 37 aa, Artificial Sequence; identical to SEQ ID NO: 11839
  Cyclic GFR-binding peptide
  MOD_RES (3), (4), (36): Xaa is C or S

SEQ ID NO: 53279 - protein, 38 aa, Artificial Sequence; identical to SEQ ID NO: 11838
  Cyclic GFR-binding peptide
  MOD_RES (4), (5), (37): Xaa is C or S

SEQ ID NO: 53280 - protein, 22 aa, Artificial Sequence
  Cyclic GFR-binding peptide
QLSPISVLFIDDSSNVIYKQYE

SEQ ID NO: 53281 - protein, 27 aa, Artificial Sequence
  Cyclic GFR-binding peptide
LSPISVLFIDDSSNVIYKQYENMVVRA

SEQ ID NO: 53282 - protein, 36 aa, Artificial Sequence; identical to SEQ ID NO: 11841
  Cyclic GFR-binding peptide
  MOD_RES (5), (6): Xaa is C or S

SEQ ID NO: 53283 - protein, 31 aa, Artificial Sequence
  Cyclic GFR-binding peptide
  MOD_RES (30), (30): Xaa is C or S
PQALEPLTILYYVGRKPKVEQLSNMIVRSXK

SEQ ID NO: 53284 - protein, 37 aa, Artificial Sequence; identical to SEQ ID NO: 11842
  Cyclic GFR-binding peptide
  MOD_RES (1), (2), (34), (36): Xaa is C or S

SEQ ID NO: 53285 - protein, 30 aa, Artificial Sequence
  Cyclic GFR-binding peptide
  MOD_RES (1), (1): Xaa is C or S
XAPTQLSPISVLFIDDSSNVIYKQYENMVV

SEQ ID NO: 53286 - protein, 24 aa, Artificial Sequence
  Cyclic GFR-binding peptide
KLEPLTVLYYDDSSNVIEQLSNNM

SEQ ID NO: 53287 - protein, 29 aa, Artificial Sequence
  Cyclic GFR-binding peptide
  MOD_RES (2), (3): Xaa is C or S
PXXVPQALSPISILFIVGRKPKVYKQYEM

SEQ ID NO: 53288 - protein, 28 aa, Artificial Sequence
  Cyclic GFR-binding peptide
  MOD_RES (1), (2): Xaa is C or S
XXVPQDLSPISILFIVGRTPKVYKQYEM

SEQ ID NO: 53289 - protein, 27 aa, Artificial Sequence
  Cyclic GFR-binding peptide
LSPISVLFIDDSSNVIYKQYENMVVRS

SEQ ID NO: 53290 - protein, 30 aa, Artificial Sequence
  Cyclic GFR-binding peptide
  MOD_RES (2), (3): Xaa is C or S
AXXVPTELEPLPMVYYDENEKVVEQLSNDM

SEQ ID NO: 53291 - protein, 30 aa, Artificial Sequence; identical to SEQ ID NO: 11844
  Cyclic GFR-binding peptide

SEQ ID NO: 53292 - protein, 39 aa, Artificial Sequence; identical to SEQ ID NO: 11846
  Cyclic GFR-binding peptide
  MOD_RES (3), (4), (36), (38): Xaa is C or S

SEQ ID NO: 53293 - protein, 26 aa, Artificial Sequence
  Cyclic GFR-binding peptide
VPQALSPISILFIVGRKPKVYKQYEM

SEQ ID NO: 53294 - protein, 22 aa, Artificial Sequence
  Cyclic GFR-binding peptide
LEPLTMLYYDENEKVVEQLSND

SEQ ID NO: 53295 - protein, 32 aa, Artificial Sequence
  Cyclic GFR-binding peptide
  MOD_RES (3), (4): Xaa is C or S
KAXXVPTELSPISMLFIDENEKVVYKQYEDMV

SEQ ID NO: 53296 - protein, 29 aa, Artificial Sequence
  Cyclic GFR-binding peptide
  MOD_RES (28), (28): Xaa is C or S
LSAISILYLDSANNVVLKNYQDMVVESXG

SEQ ID NO: 53297 - protein, 42 aa, Artificial Sequence; identical to SEQ ID NO: 11849
  Cyclic GFR-binding peptide
  MOD_RES (6), (7), (39), (41): Xaa is C or S

SEQ ID NO: 53298 - protein, 32 aa, Artificial Sequence
  Cyclic GFR-binding peptide
  MOD_RES (31), (31): Xaa is C or S
PTKLSPISVLFIDDSSNVIYKQYENMVVRSXG

SEQ ID NO: 53299 - protein, 34 aa, Artificial Sequence; identical to SEQ ID NO: 11851
  Cyclic GFR-binding peptide
  MOD_RES (1), (2), (33): Xaa is C or S

SEQ ID NO: 53300 - protein, 37 aa, Artificial Sequence; identical to SEQ ID NO: 11850
  Cyclic GFR-binding peptide
  MOD_RES (3), (4), (36): Xaa is C or S

SEQ ID NO: 53301 - protein, 38 aa, Artificial Sequence; identical to SEQ ID NO: 11852
  Cyclic GFR-binding peptide
  MOD_RES (5), (6), (37): Xaa is C or S

SEQ ID NO: 53302 - protein, 34 aa, Artificial Sequence; identical to SEQ ID NO: 11854
  Cyclic GFR-binding peptide
  MOD_RES (2), (3): Xaa is C or S

SEQ ID NO: 53303 - protein, 32 aa, Artificial Sequence
  Cyclic GFR-binding peptide
  MOD_RES (29), (31): Xaa is C or S
ELEPLPMVYYDENEKVVEQLSNDMVVEGXGXR

SEQ ID NO: 53304 - protein, 37 aa, Artificial Sequence; identical to SEQ ID NO: 11855
  Cyclic GFR-binding peptide
  MOD_RES (4), (5), (37): Xaa is C or S

SEQ ID NO: 53305 - protein, 32 aa, Artificial Sequence
  Cyclic GFR-binding peptide
  MOD_RES (4), (5): Xaa is C or S
PPTXXVPTRLSAISILYLDSANNVVLKNYQDM

SEQ ID NO: 53306 - protein, 29 aa, Artificial Sequence
  Cyclic GFR-binding peptide
  MOD_RES (2), (3): Xaa is C or S
TXXVPTRLEPLPIVYYDSANNVVEQLSND

SEQ ID NO: 53307 - protein, 23 aa, Artificial Sequence
  Cyclic GFR-binding peptide
TKLEPLPVVYYDDSSNVIEQLSN

SEQ ID NO: 53308 - protein, 42 aa, Artificial Sequence; identical to SEQ ID NO: 11856
  Cyclic GFR-binding peptide
  MOD_RES (7), (39), (41): Xaa is C or S

SEQ ID NO: 53309 - protein, 33 aa, Artificial Sequence; identical to SEQ ID NO: 11857
  Cyclic GFR-binding peptide
  MOD_RES (1), (2): Xaa is C or S

SEQ ID NO: 53310 - protein, 40 aa, Artificial Sequence; identical to SEQ ID NO: 11858
  Cyclic GFR-binding peptide
  MOD_RES (5), (6), (38), (40): Xaa is C or S

SEQ ID NO: 53311 - protein, 33 aa, Artificial Sequence
  Cyclic GFR-binding peptide
  MOD_RES (6), (7): Xaa is C or S
STPPTXXVPTRLSAISILYLDSANNVVLKNYQD

SEQ ID NO: 53312 - protein, 26 aa, Artificial Sequence
  Cyclic GFR-binding peptide
RLSAISILYLDSANNVVLKNYQDMVV

SEQ ID NO: 53313 - protein, 31 aa, Artificial Sequence; identical to SEQ ID NO: 11859
  Cyclic GFR-binding peptide
  MOD_RES (1), (1): Xaa is C or S

SEQ ID NO: 53314 - protein, 30 aa, Artificial Sequence
  Cyclic GFR-binding peptide
  MOD_RES (3), (4): Xaa is C or S
KAXXVPTELSPISMLFIDEYDKVVYKQYEE

SEQ ID NO: 53315 - protein, 27 aa, Artificial Sequence
  Cyclic GFR-binding peptide
VPQALSPISILFIVGRKPKVYKQYEMI

SEQ ID NO: 53316 - protein, 27 aa, Artificial Sequence
  Cyclic GFR-binding peptide
KLEPLTVLYYDDSSNVIEQLSNNMVVR

SEQ ID NO: 53317 - protein, 30 aa, Artificial Sequence
  Cyclic GFR-binding peptide
  MOD_RES (29), (29): Xaa is C or S
KLSPISVLFIDDSSNVIYKQYENMVVRSXG

SEQ ID NO: 53318 - protein, 37 aa, Artificial Sequence; identical to SEQ ID NO: 11863
  Cyclic GFR-binding peptide
  MOD_RES (1), (2), (34), (36): Xaa is C or S

SEQ ID NO: 53319 - protein, 30 aa, Artificial Sequence
  Cyclic GFR-binding peptide
PTKLEPLPVVYYDDSSNVIEQLSNNMVVRS

SEQ ID NO: 53320 - protein, 31 aa, Artificial Sequence
  Cyclic GFR-binding peptide
  MOD_RES (29), (31): Xaa is C or S
ELEPLTMLYYDEYDKVVEQLSNEMVVEGXGX

SEQ ID NO: 53321 - protein, 26 aa, Artificial Sequence
  Cyclic GFR-binding peptide
PTRLSAISILYLDSANNVVLKNYQDM

SEQ ID NO: 53322 - protein, 24 aa, Artificial Sequence
  Cyclic GFR-binding peptide
EPLPIVYYDSANNVVEQLSNDMVV

SEQ ID NO: 53323 - protein, 40 aa, Artificial Sequence; identical to SEQ ID NO: 11868
  Cyclic GFR-binding peptide
  MOD_RES (5), (6), (37), (39): Xaa is C or S

SEQ ID NO: 53324 - protein, 28 aa, Artificial Sequence
  Cyclic GFR-binding peptide
  MOD_RES (1), (1): Xaa is C or S
XAPTQLEPLPVVYYDDSSNVIEQLSNNM

SEQ ID NO: 53325 - protein, 34 aa, Artificial Sequence
  Cyclic GFR-binding peptide
  MOD_RES (6), (7): Xaa is C or S
YVPKPXXAPTKLEPLTVLYYDDSSNVIEQLSNNM

SEQ ID NO: 53326 - protein, 33 aa, Artificial Sequence
  Cyclic GFR-binding peptide
  MOD_RES (31), (33): Xaa is C or S
PTQLEPLPVVYYDDSSNVIEQLSNNMVVRAXGX

SEQ ID NO: 53327 - protein, 29 aa, Artificial Sequence
  Cyclic GFR-binding peptide
SPISILFIIGKTPKIYKQYEAAAAAAAAA

SEQ ID NO: 53328 - protein, 31 aa, Artificial Sequence
  Cyclic GFR-binding peptide
  MOD_RES (28), (30): Xaa is C or S
LEPLTVLYYDDSSNVIEQLSNNMVVRAXGXH

SEQ ID NO: 53329 - protein, 30 aa, Artificial Sequence
  Cyclic GFR-binding peptide
  MOD_RES (4), (5): Xaa is C or S
PKPXXAPTQLEPLTVLYYDDSSNVIEQLSN

SEQ ID NO: 53330 - protein, 28 aa, Artificial Sequence
  Cyclic GFR-binding peptide
  MOD_RES (28), (28): Xaa is C or S
LEPLPVVYYDDSSNVIEQLSNNMVVRSX

SEQ ID NO: 53331 - protein, 32 aa, Artificial Sequence; identical to SEQ ID NO: 11871
  Cyclic GFR-binding peptide
  MOD_RES (32), (32): Xaa is C or S

SEQ ID NO: 53332 - protein, 36 aa, Artificial Sequence; identical to SEQ ID NO: 11874
  Cyclic GFR-binding peptide
  MOD_RES (5), (6): Xaa is C or S

SEQ ID NO: 53333 - protein, 21 aa, Artificial Sequence
  Cyclic GFR-binding peptide
LSPISILFIVGRTPKVYKQYE

SEQ ID NO: 53334 - protein, 32 aa, Artificial Sequence; identical to SEQ ID NO: 11875
  Cyclic GFR-binding peptide
  MOD_RES (1), (2): Xaa is C or S

SEQ ID NO: 53335 - protein, 38 aa, Artificial Sequence; identical to SEQ ID NO: 11876
  Cyclic GFR-binding peptide
  MOD_RES (4), (5), (36), (38): Xaa is C or S

SEQ ID NO: 53336 - protein, 35 aa, Artificial Sequence
  Cyclic GFR-binding peptide
  MOD_RES (7), (7): Xaa is C or S
HVTKPTXAPTKLEPLPVVYYDDSSNVIEQLSNNMV

SEQ ID NO: 53337 - protein, 27 aa, Artificial Sequence
  Cyclic GFR-binding peptide
  MOD_RES (1), (2): Xaa is C or S
XXVPTRLEPLTILYYDSANNVVEQLSN

SEQ ID NO: 53338 - protein, 31 aa, Artificial Sequence
  Cyclic GFR-binding peptide
  MOD_RES (2), (3): Xaa is C or S
AXXVPTELEPLPMVYYDENEKVVEQLSNDMV

SEQ ID NO: 53339 - protein, 33 aa, Artificial Sequence; identical to SEQ ID NO: 11878
  Cyclic GFR-binding peptide
  MOD_RES (31), (33): Xaa is C or S

SEQ ID NO: 53340 - protein, 34 aa, Artificial Sequence; identical to SEQ ID NO: 11882
  Cyclic GFR-binding peptide
  MOD_RES (2), (3): Xaa is C or S

SEQ ID NO: 53341 - protein, 32 aa, Artificial Sequence; identical to SEQ ID NO: 11883
  Cyclic GFR-binding peptide
  MOD_RES (1), (32): Xaa is C or S

SEQ ID NO: 53342 - protein, 37 aa, Artificial Sequence; identical to SEQ ID NO: 11885
  Cyclic GFR-binding peptide
  MOD_RES (3), (4), (36): Xaa is C or S

SEQ ID NO: 53343 - protein, 28 aa, Artificial Sequence
  Cyclic GFR-binding peptide
ELSPISMLFIDEYDKVVYKQYEEMVVEG

SEQ ID NO: 53344 - protein, 32 aa, Artificial Sequence
  Cyclic GFR-binding peptide
  MOD_RES (30), (32): Xaa is C or S
SQDLEPLPIVYYIGKTPKIEQLSNMIVKSXKX

SEQ ID NO: 53345 - protein, 32 aa, Artificial Sequence; identical to SEQ ID NO: 11892
  Cyclic GFR-binding peptide
  MOD_RES (2), (2): Xaa is C or S

SEQ ID NO: 53346 - protein, 33 aa, Artificial Sequence
  Cyclic GFR-binding peptide
  MOD_RES (4), (5): Xaa is C or S
PKPXXAPTQLSPISVLFIDDSSNVIYKQYENMV

SEQ ID NO: 53347 - protein, 30 aa, Artificial Sequence
  Cyclic GFR-binding peptide
  MOD_RES (30), (30): Xaa is C or S
TKLSPISVLFIDDSSNVIYKQYENMVVRSX

SEQ ID NO: 53348 - protein, 37 aa, Artificial Sequence; identical to SEQ ID NO: 11894
  Cyclic GFR-binding peptide
  MOD_RES (3), (35), (37): Xaa is C or S

SEQ ID NO: 53349 - protein, 32 aa, Artificial Sequence
  Cyclic GFR-binding peptide
  MOD_RES (31), (31): Xaa is C or S
PTKLEPLTVLYYDDSSNVIEQLSNNMVVRSXG

SEQ ID NO: 53350 - protein, 26 aa, Artificial Sequence
  Cyclic GFR-binding peptide
VPTELEPLTMLYYDEYDKVVEQLSNE

SEQ ID NO: 53351 - protein, 30 aa, Artificial Sequence
  Cyclic GFR-binding peptide
  MOD_RES (29), (29): Xaa is C or S
RLSAISILYLDSANNVVLKNYQDMVVESXG

SEQ ID NO: 53352 - protein, 31 aa, Artificial Sequence
  Cyclic GFR-binding peptide
  MOD_RES (29), (31): Xaa is C or S
ELSPISMLFIDEYDKVVYKQYEEMVVEGXGX

SEQ ID NO: 53353 - protein, 28 aa, Artificial Sequence
  Cyclic GFR-binding peptide
  MOD_RES (28), (28): Xaa is C or S
LEPLPMVYYDEYDKVVEQLSNEMVVEGX

SEQ ID NO: 53354 - protein, 37 aa, Artificial Sequence; identical to SEQ ID NO: 11898
  Cyclic GFR-binding peptide
  MOD_RES (4), (5), (36): Xaa is C or S

SEQ ID NO: 53355 - protein, 34 aa, Artificial Sequence
  Cyclic GFR-binding peptide
  MOD_RES (31), (33): Xaa is C or S
PTELSPISMLFIDEYDKVVYKQYEEMVVEGXGXR

SEQ ID NO: 53356 - protein, 25 aa, Artificial Sequence
  Cyclic GFR-binding peptide
DLEPLPIVYYVGRTPKVEQLSNMVV

SEQ ID NO: 53357 - protein, 32 aa, Artificial Sequence
  Cyclic GFR-binding peptide
  MOD_RES (5), (5): Xaa is C or S
TKPTXAPTKLEPLTVLYYDDSSNVIEQLSNNM

SEQ ID NO: 53358 - protein, 26 aa, Artificial Sequence
  Cyclic GFR-binding peptide
VPTELEPLPMVYYDEYDKVVEQLSNE

SEQ ID NO: 53359 - protein, 26 aa, Artificial Sequence
  Cyclic GFR-binding peptide
SAISILYLDSANNVVLKNYQDMVVES

SEQ ID NO: 53360 - protein, 27 aa, Artificial Sequence
  Cyclic GFR-binding peptide
VPTRLEPLTILYYDSANNVVEQLSNDM

SEQ ID NO: 53361 - protein, 26 aa, Artificial Sequence
  Cyclic GFR-binding peptide
EPLPMVYYDEYDKVVEQLSNEMVVEG

SEQ ID NO: 53362 - protein, 31 aa, Artificial Sequence
  Cyclic GFR-binding peptide
  MOD_RES (2), (2): Xaa is C or S
TXAPTKLSPISVLFIDDSSNVIYKQYENMVV

SEQ ID NO: 53363 - protein, 39 aa, Artificial Sequence; identical to SEQ ID NO: 11904
  Cyclic GFR-binding peptide
  MOD_RES (4), (5), (36), (38): Xaa is C or S

SEQ ID NO: 53364 - protein, 22 aa, Artificial Sequence
  Cyclic GFR-binding peptide
LEPLTVLYYDDSSNVIEQLSNN

SEQ ID NO: 53365 - protein, 40 aa, Artificial Sequence; identical to SEQ ID NO: 11905
  Cyclic GFR-binding peptide
  MOD_RES (5), (6), (38), (40): Xaa is C or S

SEQ ID NO: 53366 - protein, 27 aa, Artificial Sequence
  Cyclic GFR-binding peptide
  MOD_RES (27), (27): Xaa is C or S
EPLTMLYYDENEKVVEQLSNDMVVEGX

SEQ ID NO: 53367 - protein, 32 aa, Artificial Sequence; identical to SEQ ID NO: 11908
  Cyclic GFR-binding peptide
  MOD_RES (1), (2): Xaa is C or S

SEQ ID NO: 53368 - protein, 34 aa, Artificial Sequence
  Cyclic GFR-binding peptide
  MOD_RES (5), (6): Xaa is C or S
TPPTXXVPTRLSAISILYLDSANNVVLKNYQDMV

SEQ ID NO: 53369 - protein, 32 aa, Artificial Sequence
  Cyclic GFR-binding peptide
  MOD_RES (5), (6): Xaa is C or S
IPKAXXVPTELSPISMLFIDENEKVVYKQYED

SEQ ID NO: 53370 - protein, 34 aa, Artificial Sequence; identical to SEQ ID NO: 11910
  Cyclic GFR-binding peptide
  MOD_RES (2), (3): Xaa is C or S

SEQ ID NO: 53371 - protein, 25 aa, Artificial Sequence
  Cyclic GFR-binding peptide
LEPLPVVYYDDSSNVIEQLSNNMVV

SEQ ID NO: 53372 - protein, 40 aa, Artificial Sequence; identical to SEQ ID NO: 11911
  Cyclic GFR-binding peptide
  MOD_RES (7), (39): Xaa is C or S

SEQ ID NO: 53373 - protein, 23 aa, Artificial Sequence
  Cyclic GFR-binding peptide
EPLTMLYYDENEKVVEQLSNDMV

SEQ ID NO: 53374 - protein, 32 aa, Artificial Sequence
  Cyclic GFR-binding peptide
  MOD_RES (4), (5): Xaa is C or S
PKAXXVPTELEPLTMLYYDENEKVVEQLSNDM

SEQ ID NO: 53375 - protein, 38 aa, Artificial Sequence; identical to SEQ ID NO: 11912
  Cyclic GFR-binding peptide
  MOD_RES (6), (7), (38): Xaa is C or S

SEQ ID NO: 53376 - protein, 27 aa, Artificial Sequence
  Cyclic GFR-binding peptide
QDLSPISILFIVGRTPKVYKQYEMVVK

SEQ ID NO: 53377 - protein, 41 aa, Artificial Sequence; identical to SEQ ID NO: 11913
  Cyclic GFR-binding peptide
  MOD_RES (6), (7), (39), (41): Xaa is C or S

SEQ ID NO: 53378 - protein, 35 aa, Artificial Sequence; identical to SEQ ID NO: 11914
  Cyclic GFR-binding peptide
  MOD_RES (1), (33), (35): Xaa is C or S

SEQ ID NO: 53379 - protein, 27 aa, Artificial Sequence
  Cyclic GFR-binding peptide
  MOD_RES (1), (1): Xaa is C or S
XAPTQLSPISVLFIDDSSNVIYKQYEN

SEQ ID NO: 53380 - protein, 31 aa, Artificial Sequence
  Cyclic GFR-binding peptide
  MOD_RES (3), (4): Xaa is C or S
SPXXVSQDLEPLPIVYYIGKTPKIEQLSNMI

SEQ ID NO: 53381 - protein, 27 aa, Artificial Sequence
  Cyclic GFR-binding peptide
PTELSPISMLFIDEYDKVVYKQYEEMV

SEQ ID NO: 53382 - protein, 34 aa, Artificial Sequence; identical to SEQ ID NO: 11915
  Cyclic GFR-binding peptide
  MOD_RES (31), (33): Xaa is C or S

SEQ ID NO: 53383 - protein, 33 aa, Artificial Sequence
  Cyclic GFR-binding peptide
  MOD_RES (6), (6): Xaa is C or S
VTKPTXAPTKLEPLPVVYYDDSSNVIEQLSNNM

SEQ ID NO: 53384 - protein, 29 aa, Artificial Sequence
  Cyclic GFR-binding peptide
  MOD_RES (1), (2): Xaa is C or S
XXAPTKLEPLPVVYYDDSSNVIEQLSNNM

SEQ ID NO: 53385 - protein, 28 aa, Artificial Sequence
  Cyclic GFR-binding peptide
  MOD_RES (1), (2): Xaa is C or S
XXAPTQLEPLTVLYYDDSSNVIEQLSNN

SEQ ID NO: 53386 - protein, 36 aa, Artificial Sequence; identical to SEQ ID NO: 11919
  Cyclic GFR-binding peptide
  MOD_RES (1), (2), (34), (36): Xaa is C or S

SEQ ID NO: 53387 - protein, 36 aa, Artificial Sequence; identical to SEQ ID NO: 11920
  Cyclic GFR-binding peptide
  MOD_RES (3), (35): Xaa is C or S

SEQ ID NO: 53388 - protein, 39 aa, Artificial Sequence; identical to SEQ ID NO: 11921
  Cyclic GFR-binding peptide
  MOD_RES (6), (7), (39): Xaa is C or S

SEQ ID NO: 53389 - protein, 32 aa, Artificial Sequence
  Cyclic GFR-binding peptide
  MOD_RES (31), (31): Xaa is C or S
PTQLEPLTVLYYDDSSNVIEQLSNNMVVRAXG

SEQ ID NO: 53390 - protein, 28 aa, Artificial Sequence
  Cyclic GFR-binding peptide
  MOD_RES (1), (1): Xaa is C or S
XVPTELSPISMLFIDENEKVVYKQYEDM

SEQ ID NO: 53391 - protein, 29 aa, Artificial Sequence
  Cyclic GFR-binding peptide
TKLEPLPVVYYDDSSNVIEQLSNNMVVRS

SEQ ID NO: 53392 - protein, 27 aa, Artificial Sequence
  Cyclic GFR-binding peptide
  MOD_RES (1), (2): Xaa is C or S
XXAPTKLSPISVLFIDDSSNVIYKQYE

SEQ ID NO: 53393 - protein, 29 aa, Artificial Sequence
  Cyclic GFR-binding peptide
VPTELEPLTMLYYDENEKVVEQLSNDMVV

SEQ ID NO: 53394 - protein, 39 aa, Artificial Sequence; identical to SEQ ID NO: 11923
  Cyclic GFR-binding peptide
  MOD_RES (4), (5), (37), (39): Xaa is C or S

SEQ ID NO: 53395 - protein, 29 aa, Artificial Sequence
  Cyclic GFR-binding peptide
  MOD_RES (28), (28): Xaa is C or S
ALEPLTILYYVGRKPKVEQLSNMIVRSXK

SEQ ID NO: 53396 - protein, 33 aa, Artificial Sequence; identical to SEQ ID NO: 11927
  Cyclic GFR-binding peptide
  MOD_RES (31), (33): Xaa is C or S

SEQ ID NO: 53397 - protein, 35 aa, Artificial Sequence; identical to SEQ ID NO: 11928
  Cyclic GFR-binding peptide
  MOD_RES (1), (33), (35): Xaa is C or S

SEQ ID NO: 53398 - protein, 37 aa, Artificial Sequence; identical to SEQ ID NO: 11929
  Cyclic GFR-binding peptide
  MOD_RES (3), (35), (37): Xaa is C or S

SEQ ID NO: 53399 - protein, 26 aa, Artificial Sequence
  Cyclic GFR-binding peptide
RLEPLTILYYDSANNVVEQLSNDMVV

SEQ ID NO: 53400 - protein, 30 aa, Artificial Sequence
  Cyclic GFR-binding peptide
  MOD_RES (27), (29): Xaa is C or S
EPLTMLYYDEYDKVVEQLSNEMVVEGXGXR

SEQ ID NO: 53401 - protein, 29 aa, Artificial Sequence
  Cyclic GFR-binding peptide
  MOD_RES (3), (4): Xaa is C or S
KAXXVPTELEPLPMVYYDEYDKVVEQLSN

SEQ ID NO: 53402 - protein, 30 aa, Artificial Sequence
  Cyclic GFR-binding peptide
  MOD_RES (29), (29): Xaa is C or S
KLEPLPVVYYDDSSNVIEQLSNNMVVRSXG

SEQ ID NO: 53403 - protein, 24 aa, Artificial Sequence
  Cyclic GFR-binding peptide
ALSPISILFIVGRKPKVYKQYEMI

SEQ ID NO: 53404 - protein, 29 aa, Artificial Sequence
  Cyclic GFR-binding peptide
PTELSPISMLFIDEYDKVVYKQYEEMVVE

SEQ ID NO: 53405 - protein, 29 aa, Artificial Sequence
  Cyclic GFR-binding peptide
  MOD_RES (29), (29): Xaa is C or S
QLEPLPVVYYDDSSNVIEQLSNNMVVRAX

SEQ ID NO: 53406 - protein, 31 aa, Artificial Sequence
  Cyclic GFR-binding peptide
  MOD_RES (2), (3): Xaa is C or S
PXXVPQALEPLTILYYVGRKPKVEQLSNMIV

SEQ ID NO: 53407 - protein, 32 aa, Artificial Sequence
  Cyclic GFR-binding peptide
  MOD_RES (4), (5): Xaa is C or S
PKAXXVPTELEPLPMVYYDEYDKVVEQLSNEM

SEQ ID NO: 53408 - protein, 35 aa, Artificial Sequence
  Cyclic GFR-binding peptide
  MOD_RES (6), (7): Xaa is C or S
ASASPXXVPQDLSPISILFIVGRTPKVYKQYEMVV

SEQ ID NO: 53409 - protein, 33 aa, Artificial Sequence
  Cyclic GFR-binding peptide
  MOD_RES (31), (33): Xaa is C or S
PTELEPLTMLYYDENEKVVEQLSNDMVVEGXGX

SEQ ID NO: 53410 - protein, 24 aa, Artificial Sequence
  Cyclic GFR-binding peptide
LEPLTILYYDSANNVVEQLSNDMV

SEQ ID NO: 53411 - protein, 23 aa, Artificial Sequence
  Cyclic GFR-binding peptide
DLEPLPIVYYVGRTPKVEQLSNM

SEQ ID NO: 53412 - protein, 31 aa, Artificial Sequence
  Cyclic GFR-binding peptide
  MOD_RES (4), (5): Xaa is C or S
PPTXXVPTRLNAISILYFDSANNVVLKKYRD

SEQ ID NO: 53413 - protein, 36 aa, Artificial Sequence; identical to SEQ ID NO: 11934
  Cyclic GFR-binding peptide
  MOD_RES (1), (33), (35): Xaa is C or S

SEQ ID NO: 53414 - protein, 28 aa, Artificial Sequence
  Cyclic GFR-binding peptide
  MOD_RES (2), (3): Xaa is C or S
PXXVSQDLEPLPIVYYIGKTPKIEQLSN

SEQ ID NO: 53415 - protein, 38 aa, Artificial Sequence; identical to SEQ ID NO: 11936
  Cyclic GFR-binding peptide
  MOD_RES (3), (4), (36), (38): Xaa is C or S

SEQ ID NO: 53416 - protein, 24 aa, Artificial Sequence
  Cyclic GFR-binding peptide
TRLSAISILYLDSANNVVLKNYQD

SEQ ID NO: 53417 - protein, 29 aa, Artificial Sequence
  Cyclic GFR-binding peptide
APTQLSPISVLFIDDSSNVIYKQYENMVV

SEQ ID NO: 53418 - protein, 32 aa, Artificial Sequence; identical to SEQ ID NO: 11940
  Cyclic GFR-binding peptide
  MOD_RES (1), (2): Xaa is C or S

SEQ ID NO: 53419 - protein, 26 aa, Artificial Sequence
  Cyclic GFR-binding peptide
APTQLEPLTVLYYDDSSNVIEQLSNN

SEQ ID NO: 53420 - protein, 32 aa, Artificial Sequence
  Cyclic GFR-binding peptide
  MOD_RES (30), (32): Xaa is C or S
PQALEPLTILYYVGRKPKVEQLSNMIVRSXKX

SEQ ID NO: 53421 - protein, 27 aa, Artificial Sequence
  Cyclic GFR-binding peptide
  MOD_RES (1), (2): Xaa is C or S
XXVPTRLSAISILYLDSANNVVLKNYQ

SEQ ID NO: 53422 - protein, 26 aa, Artificial Sequence
  Cyclic GFR-binding peptide
APTQLSPISVLFIDDSSNVIYKQYEN

SEQ ID NO: 53423 - protein, 29 aa, Artificial Sequence
  Cyclic GFR-binding peptide
  MOD_RES (2), (3): Xaa is C or S
TXXVPTRLEPLTILYYDSANNVVEQLSND

SEQ ID NO: 53424 - protein, 26 aa, Artificial Sequence
  Cyclic GFR-binding peptide
SPISMLFIDEYDKVVYKQYEEMVVEG

SEQ ID NO: 53425 - protein, 36 aa, Artificial Sequence; identical to SEQ ID NO: 11944
  Cyclic GFR-binding peptide
  MOD_RES (2), (3), (35): Xaa is C or S

SEQ ID NO: 53426 - protein, 30 aa, Artificial Sequence
  Cyclic GFR-binding peptide
  MOD_RES (4), (5): Xaa is C or S
PKPXXAPTKLSPISVLFIDDSSNVIYKQYE

SEQ ID NO: 53427 - protein, 27 aa, Artificial Sequence
  Cyclic GFR-binding peptide
TELEPLPMVYYDEYDKVVEQLSNEMVV

SEQ ID NO: 53428 - protein, 31 aa, Artificial Sequence
  Cyclic GFR-binding peptide
  MOD_RES (1), (2): Xaa is C or S
XXVPQDLSPISILFIVGRTPKVYKQYEMVVK

SEQ ID NO: 53429 - protein, 38 aa, Artificial Sequence; identical to SEQ ID NO: 11945
  Cyclic GFR-binding peptide
  MOD_RES (6), (7), (38): Xaa is C or S

SEQ ID NO: 53430 - protein, 29 aa, Artificial Sequence
  Cyclic GFR-binding peptide
  MOD_RES (27), (29): Xaa is C or S
SAISILYLDSANNVVLKNYQDMVVESXGX

SEQ ID NO: 53431 - protein, 35 aa, Artificial Sequence; identical to SEQ ID NO: 11946
  Cyclic GFR-binding peptide
  MOD_RES (32), (34): Xaa is C or S

SEQ ID NO: 53432 - protein, 40 aa, Artificial Sequence; identical to SEQ ID NO: 11947
  Cyclic GFR-binding peptide
  MOD_RES (5), (6), (38), (40): Xaa is C or S

SEQ ID NO: 53433 - protein, 30 aa, Artificial Sequence
  Cyclic GFR-binding peptide
  MOD_RES (28), (30): Xaa is C or S
LSAISILYLDSANNVVLKNYQDMVVESXGX

SEQ ID NO: 53434 - protein, 31 aa, Artificial Sequence
  Cyclic GFR-binding peptide
  MOD_RES (2), (3): Xaa is C or S
PXXVSQDLEPLPIVYYIGKTPKIEQLSNMIV

SEQ ID NO: 53435 - protein, 31 aa, Artificial Sequence
  Cyclic GFR-binding peptide
  MOD_RES (3), (4): Xaa is C or S
KAXXVPTELEPLPMVYYDEYDKVVEQLSNEM

SEQ ID NO: 53436 - protein, 31 aa, Artificial Sequence
  Cyclic GFR-binding peptide
  MOD_RES (5), (6): Xaa is C or S
SASPXXVSQDLEPLPIVYYIGKTPKIEQLSN

SEQ ID NO: 53437 - protein, 28 aa, Artificial Sequence
  Cyclic GFR-binding peptide
TRLNAISILYFDSANNVVLKKYRDMVVE

SEQ ID NO: 53438 - protein, 28 aa, Artificial Sequence
  Cyclic GFR-binding peptide
SQDLEPLPIVYYIGKTPKIEQLSNMIVK

SEQ ID NO: 53439 - protein, 33 aa, Artificial Sequence
  Cyclic GFR-binding peptide
  MOD_RES (6), (7): Xaa is C or S
TVPKPXXAPTQLEPLPVVYYDDSSNVIEQLSNN

SEQ ID NO: 53440 - protein, 29 aa, Artificial Sequence
  Cyclic GFR-binding peptide
TELSPISMLFIDENEKVVYKQYEDMVVEG

SEQ ID NO: 53441 - protein, 33 aa, Artificial Sequence; identical to SEQ ID NO: 11949
  Cyclic GFR-binding peptide
  MOD_RES (1), (2), (33): Xaa is C or S

SEQ ID NO: 53442 - protein, 25 aa, Artificial Sequence
  Cyclic GFR-binding peptide
VPTELSPISMLFIDENEKVVYKQYE

SEQ ID NO: 53443 - protein, 26 aa, Artificial Sequence
  Cyclic GFR-binding peptide
  MOD_RES (1), (1): Xaa is C or S
XVPTELEPLPMVYYDENEKVVEQLSN

SEQ ID NO: 53444 - protein, 30 aa, Artificial Sequence
  Cyclic GFR-binding peptide
  MOD_RES (30), (30): Xaa is C or S
TQLSPISVLFIDDSSNVIYKQYENMVVRAX

SEQ ID NO: 53445 - protein, 34 aa, Artificial Sequence
  Cyclic GFR-binding peptide
  MOD_RES (6), (7): Xaa is C or S
TVPKPXXAPTQLSPISVLFIDDSSNVIYKQYENM

SEQ ID NO: 53446 - protein, 27 aa, Artificial Sequence
  Cyclic GFR-binding peptide
SQDLSPISILFIIGKTPKIYKQYEMIV

SEQ ID NO: 53447 - protein, 28 aa, Artificial Sequence
  Cyclic GFR-binding peptide
  MOD_RES (1), (1): Xaa is C or S
XVPTELEPLPMVYYDEYDKVVEQLSNEM

SEQ ID NO: 53448 - protein, 26 aa, Artificial Sequence
  Cyclic GFR-binding peptide
TELEPLTMLYYDEYDKVVEQLSNEMV

SEQ ID NO: 53449 - protein, 32 aa, Artificial Sequence
  Cyclic GFR-binding peptide
  MOD_RES (3), (4): Xaa is C or S
SPXXVPQDLEPLPIVYYVGRTPKVEQLSNMVV

SEQ ID NO: 53450 - protein, 29 aa, Artificial Sequence
  Cyclic GFR-binding peptide
  MOD_RES (27), (29): Xaa is C or S
LEPLPIVYYIGKTPKIEQLSNMIVKSXKX

SEQ ID NO: 53451 - protein, 36 aa, Artificial Sequence; identical to SEQ ID NO: 11957
  Cyclic GFR-binding peptide
  MOD_RES (5), (6): Xaa is C or S

SEQ ID NO: 53452 - protein, 35 aa, Artificial Sequence
  Cyclic GFR-binding peptide
  MOD_RES (5), (6): Xaa is C or S
VPKPXXAPTQLEPLPVVYYDDSSNVIEQLSNNMVV

SEQ ID NO: 53453 - protein, 22 aa, Artificial Sequence
  Cyclic GFR-binding peptide
EPLPIVYYDSANNVVEQLSNDM

SEQ ID NO: 53454 - protein, 34 aa, Artificial Sequence; identical to SEQ ID NO: 11958
  Cyclic GFR-binding peptide
  MOD_RES (32), (34): Xaa is C or S

SEQ ID NO: 53455 - protein, 30 aa, Artificial Sequence
  Cyclic GFR-binding peptide
  MOD_RES (1), (1): Xaa is C or S
XVPTELEPLTMLYYDEYDKVVEQLSNEMVV

SEQ ID NO: 53456 - protein, 34 aa, Artificial Sequence
  Cyclic GFR-binding peptide
  MOD_RES (7), (7): Xaa is C or S
HVTKPTXAPTKLEPLPVVYYDDSSNVIEQLSNNM

SEQ ID NO: 53457 - protein, 26 aa, Artificial Sequence
  Cyclic GFR-binding peptide
  MOD_RES (1), (1): Xaa is C or S
XVPTRLEPLTILYYDSANNVVEQLSN

SEQ ID NO: 53458 - protein, 32 aa, Artificial Sequence; identical to SEQ ID NO: 11962
  Cyclic GFR-binding peptide
  MOD_RES (1), (2): Xaa is C or S

SEQ ID NO: 53459 - protein, 26 aa, Artificial Sequence
  Cyclic GFR-binding peptide
ELEPLTMLYYDENEKVVEQLSNDMVV

SEQ ID NO: 53460 - protein, 30 aa, Artificial Sequence
  Cyclic GFR-binding peptide
  MOD_RES (30), (30): Xaa is C or S
TRLEPLTILYYDSANNVVEQLSNDMVVESX

SEQ ID NO: 53461 - protein, 32 aa, Artificial Sequence
  Cyclic GFR-binding peptide
  MOD_RES (5), (6): Xaa is C or S
TPPTXXVPTRLEPLTILYYDSANNVVEQLSND

SEQ ID NO: 53462 - protein, 29 aa, Artificial Sequence
  Cyclic GFR-binding peptide
  MOD_RES (29), (29): Xaa is C or S
ELSPISMLFIDEYDKVVYKQYEEMVVEGX

SEQ ID NO: 53463 - protein, 33 aa, Artificial Sequence
  Cyclic GFR-binding peptide
  MOD_RES (4), (4): Xaa is C or S
KPTXAPTKLEPLPVVYYDDSSNVIEQLSNNMVV

SEQ ID NO: 53464 - protein, 32 aa, Artificial Sequence
  Cyclic GFR-binding peptide
  MOD_RES (3), (4): Xaa is C or S
KAXXVPTELSPISMLFIDEYDKVVYKQYEEMV

SEQ ID NO: 53465 - protein, 28 aa, Artificial Sequence
  Cyclic GFR-binding peptide
  MOD_RES (28), (28): Xaa is C or S
LSPISMLFIDENEKVVYKQYEDMVVEGX

SEQ ID NO: 53466 - protein, 37 aa, Artificial Sequence; identical to SEQ ID NO: 11964
  Cyclic GFR-binding peptide
  MOD_RES (3), (4), (36): Xaa is C or S

SEQ ID NO: 53467 - protein, 20 aa, Artificial Sequence
  Cyclic GFR-binding peptide
EPLPIVYYVGRTPKVEQLSN

SEQ ID NO: 53468 - protein, 30 aa, Artificial Sequence
  Cyclic GFR-binding peptide
  MOD_RES (2), (3): Xaa is C or S
PXXVPQALSPISILFIVGRKPKVYKQYEMI

SEQ ID NO: 53469 - protein, 40 aa, Artificial Sequence; identical to SEQ ID NO: 11965
  Cyclic GFR-binding peptide
  MOD_RES (6), (7), (39): Xaa is C or S

SEQ ID NO: 53470 - protein, 29 aa, Artificial Sequence
  Cyclic GFR-binding peptide
PQALSPISILFIVGRKPKVYKQYEMIVRS

SEQ ID NO: 53471 - protein, 22 aa, Artificial Sequence
  Cyclic GFR-binding peptide
LSPISVLFIDDSSNVIYKQYEN

SEQ ID NO: 53472 - protein, 21 aa, Artificial Sequence
  Cyclic GFR-binding peptide
EPLPIVYYVGRTPKVEQLSNM

SEQ ID NO: 53473 - protein, 28 aa, Artificial Sequence
  Cyclic GFR-binding peptide
  MOD_RES (1), (1): Xaa is C or S
XVPTRLSAISILYLDSANNVVLKNYQDM

SEQ ID NO: 53474 - protein, 36 aa, Artificial Sequence; identical to SEQ ID NO: 11966
  Cyclic GFR-binding peptide
  MOD_RES (4), (5), (36): Xaa is C or S

SEQ ID NO: 53475 - protein, 24 aa, Artificial Sequence
  Cyclic GFR-binding peptide
PQALEPLTILYYVGRKPKVEQLSN

SEQ ID NO: 53476 - protein, 34 aa, Artificial Sequence
  Cyclic GFR-binding peptide
  MOD_RES (31), (33): Xaa is C or S
PTKLEPLTVLYYDDSSNVIEQLSNNMVVRSXGXH

SEQ ID NO: 53477 - protein, 33 aa, Artificial Sequence
  Cyclic GFR-binding peptide
  MOD_RES (6), (7): Xaa is C or S
STPPTXXVPTRLEPLPIVYYDSANNVVEQLSND

SEQ ID NO: 53478 - protein, 33 aa, Artificial Sequence; identical to SEQ ID NO: 11969
  Cyclic GFR-binding peptide
  MOD_RES (1), (2): Xaa is C or S

SEQ ID NO: 53479 - protein, 33 aa, Artificial Sequence; identical to SEQ ID NO: 11970
  Cyclic GFR-binding peptide
  MOD_RES (1), (2): Xaa is C or S

SEQ ID NO: 53480 - protein, 31 aa, Artificial Sequence
  Cyclic GFR-binding peptide
  MOD_RES (30), (30): Xaa is C or S
TQLEPLPVVYYDDSSNVIEQLSNNMVVRAXG

SEQ ID NO: 53481 - protein, 22 aa, Artificial Sequence
  Cyclic GFR-binding peptide
ALEPLTILYYVGRKPKVEQLSN

SEQ ID NO: 53482 - protein, 29 aa, Artificial Sequence
  Cyclic GFR-binding peptide
PTELEPLPMVYYDENEKVVEQLSNDMVVE

SEQ ID NO: 53483 - protein, 28 aa, Artificial Sequence
  Cyclic GFR-binding peptide
  MOD_RES (1), (1): Xaa is C or S
XVPQDLSPISILFIVGRTPKVYKQYEMV

SEQ ID NO: 53484 - protein, 31 aa, Artificial Sequence
  Cyclic GFR-binding peptide
  MOD_RES (4), (5): Xaa is C or S
PKAXXVPTELSPISMLFIDENEKVVYKQYED

SEQ ID NO: 53485 - protein, 37 aa, Artificial Sequence; identical to SEQ ID NO: 11973
  Cyclic GFR-binding peptide
  MOD_RES (5), (6): Xaa is C or S

SEQ ID NO: 53486 - protein, 39 aa, Artificial Sequence; identical to SEQ ID NO: 11975
  Cyclic GFR-binding peptide
  MOD_RES (4), (5), (37), (39): Xaa is C or S

SEQ ID NO: 53487 - protein, 32 aa, Artificial Sequence
  Cyclic GFR-binding peptide
  MOD_RES (2), (3): Xaa is C or S
PXXVPQDLSPISILFIVGRTPKVYKQYEMVVK

SEQ ID NO: 53488 - protein, 33 aa, Artificial Sequence; identical to SEQ ID NO: 11977
  Cyclic GFR-binding peptide
  MOD_RES (32), (32): Xaa is C or S

SEQ ID NO: 53489 - protein, 35 aa, Artificial Sequence
  Cyclic GFR-binding peptide
  MOD_RES (6), (7): Xaa is C or S
TVPKPXXAPTQLEPLTVLYYDDSSNVIEQLSNNMV

SEQ ID NO: 53490 - protein, 25 aa, Artificial Sequence
  Cyclic GFR-binding peptide
LEPLPIVYYIGKTPKIEQLSNMIVK

SEQ ID NO: 53491 - protein, 29 aa, Artificial Sequence
  Cyclic GFR-binding peptide
PTRLEPLTILYYDSANNVVEQLSNDMVVE

SEQ ID NO: 53492 - protein, 22 aa, Artificial Sequence
  Cyclic GFR-binding peptide
LSPISILFIIGKTPKIYKQYEM

SEQ ID NO: 53493 - protein, 31 aa, Artificial Sequence
  Cyclic GFR-binding peptide
  MOD_RES (31), (31): Xaa is C or S
PTELEPLTMLYYDENEKVVEQLSNDMVVEGX

SEQ ID NO: 53494 - protein, 34 aa, Artificial Sequence
  Cyclic GFR-binding peptide
  MOD_RES (31), (33): Xaa is C or S
PTRLNAISILYFDSANNVVLKKYRDMVVESXGXR

SEQ ID NO: 53495 - protein, 34 aa, Artificial Sequence
  Cyclic GFR-binding peptide
  MOD_RES (4), (5): Xaa is C or S
PPTXXVPTRLSAISILYLDSANNVVLKNYQDMVV

SEQ ID NO: 53496 - protein, 34 aa, Artificial Sequence; identical to SEQ ID NO: 11980
  Cyclic GFR-binding peptide
  MOD_RES (3), (4): Xaa is C or S

SEQ ID NO: 53497 - protein, 25 aa, Artificial Sequence
  Cyclic GFR-binding peptide
ELEPLTMLYYDENEKVVEQLSNDMV

SEQ ID NO: 53498 - protein, 42 aa, Artificial Sequence; identical to SEQ ID NO: 11981
  Cyclic GFR-binding peptide
  MOD_RES (6), (7), (39), (41): Xaa is C or S

SEQ ID NO: 53499 - protein, 39 aa, Artificial Sequence; identical to SEQ ID NO: 11983
  Cyclic GFR-binding peptide
  MOD_RES (3), (4), (36), (38): Xaa is C or S

SEQ ID NO: 53500 - protein, 34 aa, Artificial Sequence
  Cyclic GFR-binding peptide
  MOD_RES (5), (6): Xaa is C or S
IPKAXXVPTELEPLPMVYYDENEKVVEQLSNDMV

SEQ ID NO: 53501 - protein, 23 aa, Artificial Sequence
  Cyclic GFR-binding peptide
TRLEPLTILYYDSANNVVEQLSN

SEQ ID NO: 53502 - protein, 32 aa, Artificial Sequence
  Cyclic GFR-binding peptide
  MOD_RES (5), (6): Xaa is C or S
IPKAXXVPTELEPLTMLYYDENEKVVEQLSND

SEQ ID NO: 53503 - protein, 38 aa, Artificial Sequence; identical to SEQ ID NO: 11984
  Cyclic GFR-binding peptide
  MOD_RES (5), (6), (37): Xaa is C or S

SEQ ID NO: 53504 - protein, 38 aa, Artificial Sequence; identical to SEQ ID NO: 11985
  Cyclic GFR-binding peptide
  MOD_RES (3), (4), (36), (38): Xaa is C or S

SEQ ID NO: 53505 - protein, 31 aa, Artificial Sequence
  Cyclic GFR-binding peptide
  MOD_RES (31), (31): Xaa is C or S
PTKLSPISVLFIDDSSNVIYKQYENMVVRSX

SEQ ID NO: 53506 - protein, 23 aa, Artificial Sequence
  Cyclic GFR-binding peptide
SPISILFIVGRTPKVYKQYEMVV

SEQ ID NO: 53507 - protein, 35 aa, Artificial Sequence; identical to SEQ ID NO: 11987
  Cyclic GFR-binding peptide
  MOD_RES (3), (4): Xaa is C or S

SEQ ID NO: 53508 - protein, 25 aa, Artificial Sequence
  Cyclic GFR-binding peptide
PTELSPISMLFIDENEKVVYKQYED

SEQ ID NO: 53509 - protein, 35 aa, Artificial Sequence; identical to SEQ ID NO: 11992
  Cyclic GFR-binding peptide
  MOD_RES (1), (2), (34): Xaa is C or S

SEQ ID NO: 53510 - protein, 35 aa, Artificial Sequence; identical to SEQ ID NO: 11993
  Cyclic GFR-binding peptide
  MOD_RES (4), (5): Xaa is C or S

SEQ ID NO: 53511 - protein, 34 aa, Artificial Sequence
  Cyclic GFR-binding peptide
  MOD_RES (6), (6): Xaa is C or S
VTKPTXAPTKLSPISVLFIDDSSNVIYKQYENMV

SEQ ID NO: 53512 - protein, 37 aa, Artificial Sequence; identical to SEQ ID NO: 11995
  Cyclic GFR-binding peptide
  MOD_RES (3), (4), (35), (37): Xaa is C or S

SEQ ID NO: 53513 - protein, 36 aa, Artificial Sequence
  Cyclic GFR-binding peptide
  MOD_RES (6), (7): Xaa is C or S
TVPKPXXAPTQLEPLTVLYYDDSSNVIEQLSNNMVV

SEQ ID NO: 53514 - protein, 26 aa, Artificial Sequence
  Cyclic GFR-binding peptide
  MOD_RES (26), (26): Xaa is C or S
SPISILFIIGKTPKIYKQYEMIVKSX

SEQ ID NO: 53515 - protein, 29 aa, Artificial Sequence
  Cyclic GFR-binding peptide
SPISILFIDSANNVVYKQYEAAAAAAAAA

SEQ ID NO: 53516 - protein, 24 aa, Artificial Sequence
  Cyclic GFR-binding peptide
LEPLTMLYYDENEKVVEQLSNDMV

SEQ ID NO: 53517 - protein, 34 aa, Artificial Sequence; identical to SEQ ID NO: 11996
  Cyclic GFR-binding peptide
  MOD_RES (32), (34): Xaa is C or S

SEQ ID NO: 53518 - protein, 30 aa, Artificial Sequence
  Cyclic GFR-binding peptide
  MOD_RES (3), (4): Xaa is C or S
KAXXVPTELEPLTMLYYDEYDKVVEQLSNE

SEQ ID NO: 53519 - protein, 28 aa, Artificial Sequence
  Cyclic GFR-binding peptide
  MOD_RES (1), (1): Xaa is C or S
XVPTRLNAISILYFDSANNVVLKKYRDM

SEQ ID NO: 53520 - protein, 29 aa, Artificial Sequence
  Cyclic GFR-binding peptide
  MOD_RES (1), (2): Xaa is C or S
XXVPTELEPLTMLYYDENEKVVEQLSNDM

SEQ ID NO: 53521 - protein, 27 aa, Artificial Sequence
  Cyclic GFR-binding peptide
  MOD_RES (26), (26): Xaa is C or S
SPISILFIVGRTPKVYKQYEMVVKSXK

SEQ ID NO: 53522 - protein, 39 aa, Artificial Sequence; identical to SEQ ID NO: 11999
  Cyclic GFR-binding peptide
  MOD_RES (4), (5), (37), (39): Xaa is C or S

SEQ ID NO: 53523 - protein, 21 aa, Artificial Sequence
  Cyclic GFR-binding peptide
LSPISMLFIDENEKVVYKQYE

SEQ ID NO: 53524 - protein, 34 aa, Artificial Sequence
  Cyclic GFR-binding peptide
  MOD_RES (5), (6): Xaa is C or S
TPPTXXVPTRLEPLPIVYYDSANNVVEQLSNDMV

SEQ ID NO: 53525 - protein, 31 aa, Artificial Sequence
  Cyclic GFR-binding peptide
  MOD_RES (4), (4): Xaa is C or S
KPTXAPTKLEPLPVVYYDDSSNVIEQLSNNM

SEQ ID NO: 53526 - protein, 29 aa, Artificial Sequence
  Cyclic GFR-binding peptide
  MOD_RES (29), (29): Xaa is C or S
QDLSPISILFIIGKTPKIYKQYEMIVKSX

SEQ ID NO: 53527 - protein, 23 aa, Artificial Sequence
  Cyclic GFR-binding peptide
TQLEPLTVLYYDDSSNVIEQLSN

SEQ ID NO: 53528 - protein, 40 aa, Artificial Sequence; identical to SEQ ID NO: 12001
  Cyclic GFR-binding peptide
  MOD_RES (5), (37), (39): Xaa is C or S

SEQ ID NO: 53529 - protein, 29 aa, Artificial Sequence
  Cyclic GFR-binding peptide
  MOD_RES (27), (29): Xaa is C or S
EPLPIVYYDSANNVVEQLSNDMVVESXGX

SEQ ID NO: 53530 - protein, 32 aa, Artificial Sequence
  Cyclic GFR-binding peptide
  MOD_RES (3), (4): Xaa is C or S
KPXXAPTQLEPLPVVYYDDSSNVIEQLSNNMV

SEQ ID NO: 53531 - protein, 29 aa, Artificial Sequence
  Cyclic GFR-binding peptide
  MOD_RES (28), (28): Xaa is C or S
LEPLPIVYYDSANNVVEQLSNDMVVESXG

SEQ ID NO: 53532 - protein, 26 aa, Artificial Sequence
  Cyclic GFR-binding peptide
  MOD_RES (1), (1): Xaa is C or S
XVSQDLSPISILFIIGKTPKIYKQYE

SEQ ID NO: 53533 - protein, 35 aa, Artificial Sequence; identical to SEQ ID NO: 12003
  Cyclic GFR-binding peptide
  MOD_RES (3), (4): Xaa is C or S

SEQ ID NO: 53534 - protein, 27 aa, Artificial Sequence
  Cyclic GFR-binding peptide
  MOD_RES (1), (2): Xaa is C or S
XXVSQDLSPISILFIIGKTPKIYKQYE

SEQ ID NO: 53535 - protein, 31 aa, Artificial Sequence
  Cyclic GFR-binding peptide
  MOD_RES (30), (30): Xaa is C or S
TRLEPLTILYYDSANNVVEQLSNDMVVESXG

SEQ ID NO: 53536 - protein, 26 aa, Artificial Sequence
  Cyclic GFR-binding peptide
PTRLEPLTILYYDSANNVVEQLSNDM

SEQ ID NO: 53537 - protein, 39 aa, Artificial Sequence; identical to SEQ ID NO: 12004
  Cyclic GFR-binding peptide
  MOD_RES (4), (5), (37), (39): Xaa is C or S

SEQ ID NO: 53538 - protein, 30 aa, Artificial Sequence
  Cyclic GFR-binding peptide
  MOD_RES (28), (30): Xaa is C or S
LEPLPIVYYDSANNVVEQLSNDMVVESXGX

SEQ ID NO: 53539 - protein, 39 aa, Artificial Sequence; identical to SEQ ID NO: 12005
  Cyclic GFR-binding peptide
  MOD_RES (5), (6), (38): Xaa is C or S

SEQ ID NO: 53540 - protein, 33 aa, Artificial Sequence
  Cyclic GFR-binding peptide
  MOD_RES (3), (4): Xaa is C or S
KAXXVPTELEPLPMVYYDEYDKVVEQLSNEMVV

SEQ ID NO: 53541 - protein, 35 aa, Artificial Sequence
  Cyclic GFR-binding peptide
  MOD_RES (5), (6): Xaa is C or S
VPKPXXAPTKLEPLPVVYYDDSSNVIEQLSNNMVV

SEQ ID NO: 53542 - protein, 33 aa, Artificial Sequence
  Cyclic GFR-binding peptide
  MOD_RES (5), (6): Xaa is C or S
SASPXXVPQDLSPISILFIVGRTPKVYKQYEMV

SEQ ID NO: 53543 - protein, 32 aa, Artificial Sequence
  Cyclic GFR-binding peptide
  MOD_RES (6), (7): Xaa is C or S
YVPKPXXAPTKLSPISVLFIDDSSNVIYKQYE

SEQ ID NO: 53544 - protein, 27 aa, Artificial Sequence
  Cyclic GFR-binding peptide
LEPLPMVYYDEYDKVVEQLSNEMVVEG

SEQ ID NO: 53545 - protein, 37 aa, Artificial Sequence; identical to SEQ ID NO: 12008
  Cyclic GFR-binding peptide
  MOD_RES (5), (6), (37): Xaa is C or S

SEQ ID NO: 53546 - protein, 21 aa, Artificial Sequence
  Cyclic GFR-binding peptide
LEPLPMVYYDEYDKVVEQLSN

SEQ ID NO: 53547 - protein, 21 aa, Artificial Sequence
  Cyclic GFR-binding peptide
LEPLTILYYDSANNVVEQLSN

SEQ ID NO: 53548 - protein, 27 aa, Artificial Sequence
  Cyclic GFR-binding peptide
TQLEPLTVLYYDDSSNVIEQLSNNMVV

SEQ ID NO: 53549 - protein, 41 aa, Artificial Sequence; identical to SEQ ID NO: 12010
  Cyclic GFR-binding peptide
  MOD_RES (7), (39), (41): Xaa is C or S

SEQ ID NO: 53550 - protein, 27 aa, Artificial Sequence
  Cyclic GFR-binding peptide
  MOD_RES (27), (27): Xaa is C or S
LEPLPIVYYIGKTPKIEQLSNMIVKSX

SEQ ID NO: 53551 - protein, 35 aa, Artificial Sequence; identical to SEQ ID NO: 12011
  Cyclic GFR-binding peptide
  MOD_RES (4), (5): Xaa is C or S

SEQ ID NO: 53552 - protein, 29 aa, Artificial Sequence
  Cyclic GFR-binding peptide
  MOD_RES (3), (4): Xaa is C or S
KPXXAPTQLEPLTVLYYDDSSNVIEQLSN

SEQ ID NO: 53553 - protein, 26 aa, Artificial Sequence
  Cyclic GFR-binding peptide
VPQDLEPLPIVYYVGRTPKVEQLSNM

SEQ ID NO: 53554 - protein, 38 aa, Artificial Sequence; identical to SEQ ID NO: 12013
  Cyclic GFR-binding peptide
  MOD_RES (4), (5), (37): Xaa is C or S

SEQ ID NO: 53555 - protein, 30 aa, Artificial Sequence; identical to SEQ ID NO: 12014
  Cyclic GFR-binding peptide

SEQ ID NO: 53556 - protein, 31 aa, Artificial Sequence
  Cyclic GFR-binding peptide
  MOD_RES (3), (4): Xaa is C or S
KPXXAPTQLSPISVLFIDDSSNVIYKQYENM

SEQ ID NO: 53557 - protein, 29 aa, Artificial Sequence
  Cyclic GFR-binding peptide
  MOD_RES (4), (4): Xaa is C or S
KPTXAPTKLEPLPVVYYDDSSNVIEQLSN

SEQ ID NO: 53558 - protein, 28 aa, Artificial Sequence
  Cyclic GFR-binding peptide
PTELEPLTMLYYDEYDKVVEQLSNEMVV

SEQ ID NO: 53559 - protein, 24 aa, Artificial Sequence
  Cyclic GFR-binding peptide
DLSPISILFIVGRTPKVYKQYEMV

SEQ ID NO: 53560 - protein, 21 aa, Artificial Sequence
  Cyclic GFR-binding peptide
LSPISILFIVGRKPKVYKQYE

SEQ ID NO: 53561 - protein, 35 aa, Artificial Sequence; identical to SEQ ID NO: 12017
  Cyclic GFR-binding peptide
  MOD_RES (1), (2), (34): Xaa is C or S

SEQ ID NO: 53562 - protein, 26 aa, Artificial Sequence
  Cyclic GFR-binding peptide
  MOD_RES (1), (1): Xaa is C or S
XAPTQLSPISVLFIDDSSNVIYKQYE

SEQ ID NO: 53563 - protein, 37 aa, Artificial Sequence; identical to SEQ ID NO: 12020
  Cyclic GFR-binding peptide
  MOD_RES (5), (6): Xaa is C or S

SEQ ID NO: 53564 - protein, 30 aa, Artificial Sequence
  Cyclic GFR-binding peptide
  MOD_RES (1), (1): Xaa is C or S
XVPTRLNAISILYFDSANNVVLKKYRDMVV

SEQ ID NO: 53565 - protein, 23 aa, Artificial Sequence
  Cyclic GFR-binding peptide
QDLEPLPIVYYIGKTPKIEQLSN

SEQ ID NO: 53566 - protein, 30 aa, Artificial Sequence
  Cyclic GFR-binding peptide
  MOD_RES (1), (2): Xaa is C or S
XXVPTELEPLTMLYYDENEKVVEQLSNDMV

SEQ ID NO: 53567 - protein, 24 aa, Artificial Sequence
  Cyclic GFR-binding peptide
TELSPISMLFIDENEKVVYKQYED

SEQ ID NO: 53568 - protein, 27 aa, Artificial Sequence
  Cyclic GFR-binding peptide
  MOD_RES (1), (1): Xaa is C or S
XVPQALEPLTILYYVGRKPKVEQLSNM

SEQ ID NO: 53569 - protein, 31 aa, Artificial Sequence; identical to SEQ ID NO: 12022
  Cyclic GFR-binding peptide
  MOD_RES (1), (1): Xaa is C or S

SEQ ID NO: 53570 - protein, 29 aa, Artificial Sequence
  Cyclic GFR-binding peptide
APTKLSPISVLFIDDSSNVIYKQYENMVV

SEQ ID NO: 53571 - protein, 34 aa, Artificial Sequence
  Cyclic GFR-binding peptide
  MOD_RES (31), (33): Xaa is C or S
PTELEPLTMLYYDEYDKVVEQLSNEMVVEGXGXR

SEQ ID NO: 53572 - protein, 26 aa, Artificial Sequence
  Cyclic GFR-binding peptide
LEPLTILYYDSANNVVEQLSNDMVVE

SEQ ID NO: 53573 - protein, 24 aa, Artificial Sequence
  Cyclic GFR-binding peptide
TRLEPLPIVYYDSANNVVEQLSND

SEQ ID NO: 53574 - protein, 27 aa, Artificial Sequence
  Cyclic GFR-binding peptide
VPTRLSAISILYLDSANNVVLKNYQDM

SEQ ID NO: 53575 - protein, 34 aa, Artificial Sequence; identical to SEQ ID NO: 12025
  Cyclic GFR-binding peptide
  MOD_RES (2), (3), (34): Xaa is C or S

SEQ ID NO: 53576 - protein, 26 aa, Artificial Sequence
  Cyclic GFR-binding peptide
PTELEPLTMLYYDENEKVVEQLSNDM

SEQ ID NO: 53577 - protein, 32 aa, Artificial Sequence
  Cyclic GFR-binding peptide
  MOD_RES (3), (4): Xaa is C or S
PTXXVPTRLEPLTILYYDSANNVVEQLSNDMV

SEQ ID NO: 53578 - protein, 31 aa, Artificial Sequence
  Cyclic GFR-binding peptide
  MOD_RES (4), (5): Xaa is C or S
PKAXXVPTELEPLTMLYYDENEKVVEQLSND

SEQ ID NO: 53579 - protein, 32 aa, Artificial Sequence; identical to SEQ ID NO: 12027
  Cyclic GFR-binding peptide
  MOD_RES (1), (1): Xaa is C or S

SEQ ID NO: 53580 - protein, 27 aa, Artificial Sequence
  Cyclic GFR-binding peptide
VPQDLSPISILFIVGRTPKVYKQYEMV

SEQ ID NO: 53581 - protein, 35 aa, Artificial Sequence; identical to SEQ ID NO: 12028
  Cyclic GFR-binding peptide
  MOD_RES (3), (4): Xaa is C or S

SEQ ID NO: 53582 - protein, 33 aa, Artificial Sequence
  Cyclic GFR-binding peptide
  MOD_RES (31), (33): Xaa is C or S
PTRLEPLPIVYYDSANNVVEQLSNDMVVESXGX

SEQ ID NO: 53583 - protein, 32 aa, Artificial Sequence
  Cyclic GFR-binding peptide
  MOD_RES (29), (31): Xaa is C or S
QDLSPISILFIVGRTPKVYKQYEMVVKSXKXS

SEQ ID NO: 53584 - protein, 39 aa, Artificial Sequence; identical to SEQ ID NO: 12029
  Cyclic GFR-binding peptide
  MOD_RES (4), (36), (38): Xaa is C or S

SEQ ID NO: 53585 - protein, 29 aa, Artificial Sequence
  Cyclic GFR-binding peptide
PTQLEPLTVLYYDDSSNVIEQLSNNMVVR

SEQ ID NO: 53586 - protein, 35 aa, Artificial Sequence
  Cyclic GFR-binding peptide
  MOD_RES (6), (7): Xaa is C or S
SIPKAXXVPTELSPISMLFIDEYDKVVYKQYEEMV

SEQ ID NO: 53587 - protein, 34 aa, Artificial Sequence; identical to SEQ ID NO: 12031
  Cyclic GFR-binding peptide
  MOD_RES (31), (33): Xaa is C or S

SEQ ID NO: 53588 - protein, 25 aa, Artificial Sequence
  Cyclic GFR-binding peptide
PTRLEPLPIVYYDSANNVVEQLSND

SEQ ID NO: 53589 - protein, 25 aa, Artificial Sequence
  Cyclic GFR-binding peptide
PTRLSAISILYLDSANNVVLKNYQD

SEQ ID NO: 53590 - protein, 32 aa, Artificial Sequence
  Cyclic GFR-binding peptide
  MOD_RES (4), (5): Xaa is C or S
PKPXXAPTKLEPLTVLYYDDSSNVIEQLSNNM

SEQ ID NO: 53591 - protein, 29 aa, Artificial Sequence
  Cyclic GFR-binding peptide
  MOD_RES (29), (29): Xaa is C or S
KLEPLPVVYYDDSSNVIEQLSNNMVVRSX

SEQ ID NO: 53592 - protein, 33 aa, Artificial Sequence
  Cyclic GFR-binding peptide
  MOD_RES (3), (4): Xaa is C or S
PTXXVPTRLEPLPIVYYDSANNVVEQLSNDMVV

SEQ ID NO: 53593 - protein, 20 aa, Artificial Sequence
  Cyclic GFR-binding peptide
EPLPMVYYDEYDKVVEQLSN

SEQ ID NO: 53594 - protein, 38 aa, Artificial Sequence; identical to SEQ ID NO: 12033
  Cyclic GFR-binding peptide
  MOD_RES (5), (6), (38): Xaa is C or S

SEQ ID NO: 53595 - protein, 29 aa, Artificial Sequence
  Cyclic GFR-binding peptide
  MOD_RES (1), (2): Xaa is C or S
XXVPQALSPISILFIVGRKPKVYKQYEMI

SEQ ID NO: 53596 - protein, 23 aa, Artificial Sequence
  Cyclic GFR-binding peptide
LEPLTMLYYDENEKVVEQLSNDM

SEQ ID NO: 53597 - protein, 40 aa, Artificial Sequence; identical to SEQ ID NO: 12034
  Cyclic GFR-binding peptide
  MOD_RES (4), (5), (37), (39): Xaa is C or S

SEQ ID NO: 53598 - protein, 33 aa, Artificial Sequence; identical to SEQ ID NO: 12035
  Cyclic GFR-binding peptide
  MOD_RES (1), (2): Xaa is C or S

SEQ ID NO: 53599 - protein, 38 aa, Artificial Sequence; identical to SEQ ID NO: 12036
  Cyclic GFR-binding peptide
  MOD_RES (6), (38): Xaa is C or S

SEQ ID NO: 53600 - protein, 25 aa, Artificial Sequence
  Cyclic GFR-binding peptide
TKLEPLPVVYYDDSSNVIEQLSNNM

SEQ ID NO: 53601 - protein, 38 aa, Artificial Sequence; identical to SEQ ID NO: 12037
  Cyclic GFR-binding peptide
  MOD_RES (3), (4), (36), (38): Xaa is C or S

SEQ ID NO: 53602 - protein, 34 aa, Artificial Sequence
  Cyclic GFR-binding peptide
  MOD_RES (4), (5): Xaa is C or S
ASPXXVPQDLEPLPIVYYVGRTPKVEQLSNMVVK

SEQ ID NO: 53603 - protein, 33 aa, Artificial Sequence
  Cyclic GFR-binding peptide
  MOD_RES (4), (5): Xaa is C or S
ASPXXVSQDLSPISILFIIGKTPKIYKQYEMIV

SEQ ID NO: 53604 - protein, 30 aa, Artificial Sequence
  Cyclic GFR-binding peptide
  MOD_RES (4), (5): Xaa is C or S
ASPXXVSQDLEPLPIVYYIGKTPKIEQLSN

SEQ ID NO: 53605 - protein, 39 aa, Artificial Sequence; identical to SEQ ID NO: 12043
  Cyclic GFR-binding peptide
  MOD_RES (6), (38): Xaa is C or S

SEQ ID NO: 53606 - protein, 27 aa, Artificial Sequence
  Cyclic GFR-binding peptide
LEPLTILYYDSANNVVEQLSNDMVVES

SEQ ID NO: 53607 - protein, 22 aa, Artificial Sequence
  Cyclic GFR-binding peptide
LSPISMLFIDENEKVVYKQYED

SEQ ID NO: 53608 - protein, 27 aa, Artificial Sequence
  Cyclic GFR-binding peptide
  MOD_RES (26), (26): Xaa is C or S
SPISILFIIGKTPKIYKQYEMIVKSXK

SEQ ID NO: 53609 - protein, 29 aa, Artificial Sequence
  Cyclic GFR-binding peptide
  MOD_RES (2), (3): Xaa is C or S
PXXVPQALEPLTILYYVGRKPKVEQLSNM

SEQ ID NO: 53610 - protein, 29 aa, Artificial Sequence
  Cyclic GFR-binding peptide
EPLPVVYYDDSSNVIEQLSNAAAAAAAAA

SEQ ID NO: 53611 - protein, 33 aa, Artificial Sequence; identical to SEQ ID NO: 12044
  Cyclic GFR-binding peptide
  MOD_RES (3), (3): Xaa is C or S

SEQ ID NO: 53612 - protein, 28 aa, Artificial Sequence
  Cyclic GFR-binding peptide
TKLSPISVLFIDDSSNVIYKQYENMVVR

SEQ ID NO: 53613 - protein, 36 aa, Artificial Sequence; identical to SEQ ID NO: 12045
  Cyclic GFR-binding peptide
  MOD_RES (3), (4), (36): Xaa is C or S

SEQ ID NO: 53614 - protein, 24 aa, Artificial Sequence
  Cyclic GFR-binding peptide
LEPLPIVYYIGKTPKIEQLSNMIV

SEQ ID NO: 53615 - protein, 32 aa, Artificial Sequence
  Cyclic GFR-binding peptide
  MOD_RES (6), (7): Xaa is C or S
TVPKPXXAPTQLSPISVLFIDDSSNVIYKQYE

SEQ ID NO: 53616 - protein, 25 aa, Artificial Sequence
  Cyclic GFR-binding peptide
PTELEPLTMLYYDENEKVVEQLSND

SEQ ID NO: 53617 - protein, 39 aa, Artificial Sequence; identical to SEQ ID NO: 12049
  Cyclic GFR-binding peptide
  MOD_RES (5), (6), (37), (39): Xaa is C or S

SEQ ID NO: 53618 - protein, 34 aa, Artificial Sequence; identical to SEQ ID NO: 12050
  Cyclic GFR-binding peptide
  MOD_RES (1), (2), (34): Xaa is C or S

SEQ ID NO: 53619 - protein, 31 aa, Artificial Sequence
  Cyclic GFR-binding peptide
  MOD_RES (3), (4): Xaa is C or S
KPXXAPTKLEPLTVLYYDDSSNVIEQLSNNM

SEQ ID NO: 53620 - protein, 21 aa, Artificial Sequence
  Cyclic GFR-binding peptide
LEPLTVLYYDDSSNVIEQLSN

SEQ ID NO: 53621 - protein, 31 aa, Artificial Sequence
  Cyclic GFR-binding peptide
  MOD_RES (5), (6): Xaa is C or S
SASPXXVPQDLSPISILFIVGRTPKVYKQYE

SEQ ID NO: 53622 - protein, 30 aa, Artificial Sequence
  Cyclic GFR-binding peptide
PTELEPLTMLYYDEYDKVVEQLSNEMVVEG

SEQ ID NO: 53623 - protein, 28 aa, Artificial Sequence
  Cyclic GFR-binding peptide
ELEPLTMLYYDEYDKVVEQLSNEMVVEG

SEQ ID NO: 53624 - protein, 27 aa, Artificial Sequence
  Cyclic GFR-binding peptide
PTKLEPLTVLYYDDSSNVIEQLSNNMV

SEQ ID NO: 53625 - protein, 28 aa, Artificial Sequence
  Cyclic GFR-binding peptide
  MOD_RES (1), (2): Xaa is C or S
XXVPQALEPLTILYYVGRKPKVEQLSNM

SEQ ID NO: 53626 - protein, 32 aa, Artificial Sequence
  Cyclic GFR-binding peptide
  MOD_RES (2), (3): Xaa is C or S
AXXVPTELEPLTMLYYDEYDKVVEQLSNEMVV

SEQ ID NO: 53627 - protein, 31 aa, Artificial Sequence
  Cyclic GFR-binding peptide
  MOD_RES (30), (30): Xaa is C or S
TRLSAISILYLDSANNVVLKNYQDMVVESXG

SEQ ID NO: 53628 - protein, 31 aa, Artificial Sequence
  Cyclic GFR-binding peptide
  MOD_RES (31), (31): Xaa is C or S
PTRLEPLTILYYDSANNVVEQLSNDMVVESX

SEQ ID NO: 53629 - protein, 39 aa, Artificial Sequence; identical to SEQ ID NO: 12059
  Cyclic GFR-binding peptide
  MOD_RES (4), (5), (37), (39): Xaa is C or S

SEQ ID NO: 53630 - protein, 28 aa, Artificial Sequence
  Cyclic GFR-binding peptide
TELEPLTMLYYDEYDKVVEQLSNEMVVE

SEQ ID NO: 53631 - protein, 29 aa, Artificial Sequence
  Cyclic GFR-binding peptide
EPLPMVYYDEYDKVVEQLSNAAAAAAAAA

SEQ ID NO: 53632 - protein, 25 aa, Artificial Sequence
  Cyclic GFR-binding peptide
VPTELEPLPMVYYDEYDKVVEQLSN

SEQ ID NO: 53633 - protein, 28 aa, Artificial Sequence
  Cyclic GFR-binding peptide
  MOD_RES (26), (28): Xaa is C or S
EPLPIVYYVGRTPKVEQLSNMVVKSXKX

SEQ ID NO: 53634 - protein, 23 aa, Artificial Sequence
  Cyclic GFR-binding peptide
ELEPLPMVYYDEYDKVVEQLSNE

SEQ ID NO: 53635 - protein, 27 aa, Artificial Sequence
  Cyclic GFR-binding peptide
PTELSPISMLFIDENEKVVYKQYEDMV

SEQ ID NO: 53636 - protein, 34 aa, Artificial Sequence; identical to SEQ ID NO: 12062
  Cyclic GFR-binding peptide
  MOD_RES (2), (3): Xaa is C or S

SEQ ID NO: 53637 - protein, 23 aa, Artificial Sequence
  Cyclic GFR-binding peptide
EPLPVVYYDDSSNVIEQLSNNMV

SEQ ID NO: 53638 - protein, 33 aa, Artificial Sequence
  Cyclic GFR-binding peptide
  MOD_RES (4), (5): Xaa is C or S
PKPXXAPTKLEPLTVLYYDDSSNVIEQLSNNMV

SEQ ID NO: 53639 - protein, 34 aa, Artificial Sequence; identical to SEQ ID NO: 12064
  Cyclic GFR-binding peptide
  MOD_RES (3), (4): Xaa is C or S

SEQ ID NO: 53640 - protein, 30 aa, Artificial Sequence
  Cyclic GFR-binding peptide
PTRLSAISILYLDSANNVVLKNYQDMVVES

SEQ ID NO: 53641 - protein, 29 aa, Artificial Sequence
  Cyclic GFR-binding peptide
  MOD_RES (27), (29): Xaa is C or S
LEPLTILYYVGRKPKVEQLSNMIVRSXKX

SEQ ID NO: 53642 - protein, 25 aa, Artificial Sequence
  Cyclic GFR-binding peptide
SPISILFIVGRKPKVYKQYEMIVRS

SEQ ID NO: 53643 - protein, 29 aa, Artificial Sequence
  Cyclic GFR-binding peptide
VPTELEPLTMLYYDEYDKVVEQLSNEMVV

SEQ ID NO: 53644 - protein, 31 aa, Artificial Sequence; identical to SEQ ID NO: 12065
  Cyclic GFR-binding peptide
  MOD_RES (1), (1): Xaa is C or S

SEQ ID NO: 53645 - protein, 33 aa, Artificial Sequence; identical to SEQ ID NO: 12066
  Cyclic GFR-binding peptide
  MOD_RES (1), (2): Xaa is C or S

SEQ ID NO: 53646 - protein, 34 aa, Artificial Sequence; identical to SEQ ID NO: 12067
  Cyclic GFR-binding peptide
  MOD_RES (32), (34): Xaa is C or S

SEQ ID NO: 53647 - protein, 27 aa, Artificial Sequence
  Cyclic GFR-binding peptide
  MOD_RES (1), (2): Xaa is C or S
XXVPTELEPLPMVYYDENEKVVEQLSN

SEQ ID NO: 53648 - protein, 38 aa, Artificial Sequence; identical to SEQ ID NO: 12068
  Cyclic GFR-binding peptide
  MOD_RES (3), (4), (36), (38): Xaa is C or S

SEQ ID NO: 53649 - protein, 34 aa, Artificial Sequence; identical to SEQ ID NO: 12071
  Cyclic GFR-binding peptide
  MOD_RES (2), (3): Xaa is C or S

SEQ ID NO: 53650 - protein, 40 aa, Artificial Sequence; identical to SEQ ID NO: 12072
  Cyclic GFR-binding peptide
  MOD_RES (4), (5), (37), (39): Xaa is C or S

SEQ ID NO: 53651 - protein, 32 aa, Artificial Sequence
  Cyclic GFR-binding peptide
  MOD_RES (5), (6): Xaa is C or S
VPKPXXAPTKLEPLPVVYYDDSSNVIEQLSNN

SEQ ID NO: 53652 - protein, 33 aa, Artificial Sequence
  Cyclic GFR-binding peptide
  MOD_RES (4), (5): Xaa is C or S
AAPXXVPQALEPLTILYYVGRKPKVEQLSNMIV

SEQ ID NO: 53653 - protein, 28 aa, Artificial Sequence
  Cyclic GFR-binding peptide
  MOD_RES (2), (3): Xaa is C or S
AXXVPTELEPLPMVYYDENEKVVEQLSN

SEQ ID NO: 53654 - protein, 26 aa, Artificial Sequence
  Cyclic GFR-binding peptide
TRLEPLTILYYDSANNVVEQLSNDMV

SEQ ID NO: 53655 - protein, 31 aa, Artificial Sequence
  Cyclic GFR-binding peptide
  MOD_RES (5), (6): Xaa is C or S
VPKPXXAPTQLEPLPVVYYDDSSNVIEQLSN

SEQ ID NO: 53656 - protein, 26 aa, Artificial Sequence
  Cyclic GFR-binding peptide
LEPLTMLYYDENEKVVEQLSNDMVVE

SEQ ID NO: 53657 - protein, 37 aa, Artificial Sequence; identical to SEQ ID NO: 12076
  Cyclic GFR-binding peptide
  MOD_RES (3), (4), (35), (37): Xaa is C or S

SEQ ID NO: 53658 - protein, 38 aa, Artificial Sequence; identical to SEQ ID NO: 12075
  Cyclic GFR-binding peptide
  MOD_RES (4), (5), (37): Xaa is C or S

SEQ ID NO: 53659 - protein, 28 aa, Artificial Sequence
  Cyclic GFR-binding peptide
PTRLSAISILYLDSANNVVLKNYQDMVV

SEQ ID NO: 53660 - protein, 28 aa, Artificial Sequence
  Cyclic GFR-binding peptide
  MOD_RES (27), (27): Xaa is C or S
SAISILYLDSANNVVLKNYQDMVVESXG

SEQ ID NO: 53661 - protein, 34 aa, Artificial Sequence; identical to SEQ ID NO: 12077
  Cyclic GFR-binding peptide
  MOD_RES (1), (2), (33): Xaa is C or S

SEQ ID NO: 53662 - protein, 36 aa, Artificial Sequence
  Cyclic GFR-binding peptide
  MOD_RES (7), (7): Xaa is C or S
HVTKPTXAPTKLSPISVLFIDDSSNVIYKQYENMVV

SEQ ID NO: 53663 - protein, 29 aa, Artificial Sequence
  Cyclic GFR-binding peptide
TKLSPISVLFIDDSSNVIYKQYENMVVRS

SEQ ID NO: 53664 - protein, 39 aa, Artificial Sequence; identical to SEQ ID NO: 12078
  Cyclic GFR-binding peptide
  MOD_RES (3), (4), (36), (38): Xaa is C or S

SEQ ID NO: 53665 - protein, 26 aa, Artificial Sequence
  Cyclic GFR-binding peptide
ELEPLTMLYYDEYDKVVEQLSNEMVV

SEQ ID NO: 53666 - protein, 35 aa, Artificial Sequence; identical to SEQ ID NO: 12081
  Cyclic GFR-binding peptide
  MOD_RES (3), (4), (35): Xaa is C or S

SEQ ID NO: 53667 - protein, 30 aa, Artificial Sequence
  Cyclic GFR-binding peptide
  MOD_RES (4), (5): Xaa is C or S
PKAXXVPTELSPISMLFIDEYDKVVYKQYE

SEQ ID NO: 53668 - protein, 30 aa, Artificial Sequence
  Cyclic GFR-binding peptide
  MOD_RES (1), (2): Xaa is C or S
XXVPTELEPLTMLYYDEYDKVVEQLSNEMV

SEQ ID NO: 53669 - protein, 30 aa, Artificial Sequence
  Cyclic GFR-binding peptide
  MOD_RES (30), (30): Xaa is C or S
PQDLEPLPIVYYVGRTPKVEQLSNMVVKSX

SEQ ID NO: 53670 - protein, 24 aa, Artificial Sequence
  Cyclic GFR-binding peptide
PTRLNAISILYFDSANNVVLKKYR

SEQ ID NO: 53671 - protein, 34 aa, Artificial Sequence; identical to SEQ ID NO: 12085
  Cyclic GFR-binding peptide
  MOD_RES (1), (33): Xaa is C or S

SEQ ID NO: 53672 - protein, 35 aa, Artificial Sequence; identical to SEQ ID NO: 12086
  Cyclic GFR-binding peptide
  MOD_RES (4), (5): Xaa is C or S

SEQ ID NO: 53673 - protein, 36 aa, Artificial Sequence; identical to SEQ ID NO: 12087
  Cyclic GFR-binding peptide
  MOD_RES (1), (2), (34), (36): Xaa is C or S

SEQ ID NO: 53674 - protein, 32 aa, Artificial Sequence
  Cyclic GFR-binding peptide
  MOD_RES (6), (7): Xaa is C or S
SIPKAXXVPTELEPLTMLYYDEYDKVVEQLSN

SEQ ID NO: 53675 - protein, 29 aa, Artificial Sequence
  Cyclic GFR-binding peptide
  MOD_RES (3), (4): Xaa is C or S
KPXXAPTKLSPISVLFIDDSSNVIYKQYE

SEQ ID NO: 53676 - protein, 38 aa, Artificial Sequence; identical to SEQ ID NO: 12090
  Cyclic GFR-binding peptide
  MOD_RES (2), (3), (35), (37): Xaa is C or S

SEQ ID NO: 53677 - protein, 33 aa, Artificial Sequence; identical to SEQ ID NO: 12092
  Cyclic GFR-binding peptide
  MOD_RES (1), (2), (33): Xaa is C or S

SEQ ID NO: 53678 - protein, 27 aa, Artificial Sequence
  Cyclic GFR-binding peptide
QLEPLTVLYYDDSSNVIEQLSNNMVVR

SEQ ID NO: 53679 - protein, 31 aa, Artificial Sequence
  Cyclic GFR-binding peptide
  MOD_RES (31), (31): Xaa is C or S
PTRLEPLPIVYYDSANNVVEQLSNDMVVESX

SEQ ID NO: 53680 - protein, 27 aa, Artificial Sequence
  Cyclic GFR-binding peptide
  MOD_RES (1), (1): Xaa is C or S
XVPQALSPISILFIVGRKPKVYKQYEM

SEQ ID NO: 53681 - protein, 30 aa, Artificial Sequence
  Cyclic GFR-binding peptide
  MOD_RES (1), (1): Xaa is C or S
XVSQDLEPLPIVYYIGKTPKIEQLSNMIVK

SEQ ID NO: 53682 - protein, 26 aa, Artificial Sequence
  Cyclic GFR-binding peptide
EPLTVLYYDDSSNVIEQLSNNMVVRA

SEQ ID NO: 53683 - protein, 36 aa, Artificial Sequence
  Cyclic GFR-binding peptide
  MOD_RES (6), (7): Xaa is C or S
SIPKAXXVPTELEPLTMLYYDEYDKVVEQLSNEMVV

SEQ ID NO: 53684 - protein, 28 aa, Artificial Sequence
  Cyclic GFR-binding peptide
  MOD_RES (27), (27): Xaa is C or S
EPLTILYYDSANNVVEQLSNDMVVESXG

SEQ ID NO: 53685 - protein, 35 aa, Artificial Sequence; identical to SEQ ID NO: 12099
  Cyclic GFR-binding peptide
  MOD_RES (2), (34): Xaa is C or S

SEQ ID NO: 53686 - protein, 25 aa, Artificial Sequence
  Cyclic GFR-binding peptide
TQLEPLPVVYYDDSSNVIEQLSNNM

SEQ ID NO: 53687 - protein, 30 aa, Artificial Sequence
  Cyclic GFR-binding peptide
  MOD_RES (5), (5): Xaa is C or S
TKPTXAPTKLEPLTVLYYDDSSNVIEQLSN

SEQ ID NO: 53688 - protein, 33 aa, Artificial Sequence
  Cyclic GFR-binding peptide
  MOD_RES (3), (4): Xaa is C or S
KPXXAPTKLSPISVLFIDDSSNVIYKQYENMVV

SEQ ID NO: 53689 - protein, 25 aa, Artificial Sequence
  Cyclic GFR-binding peptide
EPLPVVYYDDSSNVIEQLSNNMVVR

SEQ ID NO: 53690 - protein, 27 aa, Artificial Sequence
  Cyclic GFR-binding peptide
ALEPLTILYYVGRKPKVEQLSNMIVRS

SEQ ID NO: 53691 - protein, 23 aa, Artificial Sequence
  Cyclic GFR-binding peptide
ELSPISMLFIDEYDKVVYKQYEE

SEQ ID NO: 53692 - protein, 35 aa, Artificial Sequence; identical to SEQ ID NO: 12102
  Cyclic GFR-binding peptide
  MOD_RES (3), (4): Xaa is C or S

SEQ ID NO: 53693 - protein, 40 aa, Artificial Sequence; identical to SEQ ID NO: 12104
  Cyclic GFR-binding peptide
  MOD_RES (5), (6), (37), (39): Xaa is C or S

SEQ ID NO: 53694 - protein, 27 aa, Artificial Sequence
  Cyclic GFR-binding peptide
  MOD_RES (27), (27): Xaa is C or S
EPLPIVYYDSANNVVEQLSNDMVVESX

SEQ ID NO: 53695 - protein, 28 aa, Artificial Sequence
  Cyclic GFR-binding peptide
  MOD_RES (1), (1): Xaa is C or S
XVPTELEPLTMLYYDENEKVVEQLSNDM

SEQ ID NO: 53696 - protein, 33 aa, Artificial Sequence
  Cyclic GFR-binding peptide
  MOD_RES (5), (6): Xaa is C or S
SASPXXVSQDLSPISILFIIGKTPKIYKQYEMI

SEQ ID NO: 53697 - protein, 23 aa, Artificial Sequence
  Cyclic GFR-binding peptide
LSPISILFIIGKTPKIYKQYEMI

SEQ ID NO: 53698 - protein, 30 aa, Artificial Sequence
  Cyclic GFR-binding peptide
  MOD_RES (3), (4): Xaa is C or S
KPXXAPTKLEPLTVLYYDDSSNVIEQLSNN

SEQ ID NO: 53699 - protein, 33 aa, Artificial Sequence
  Cyclic GFR-binding peptide
  MOD_RES (4), (5): Xaa is C or S
PKAXXVPTELEPLTMLYYDENEKVVEQLSNDMV

SEQ ID NO: 53700 - protein, 33 aa, Artificial Sequence
  Cyclic GFR-binding peptide
  MOD_RES (6), (7): Xaa is C or S
STPPTXXVPTRLEPLTILYYDSANNVVEQLSND

SEQ ID NO: 53701 - protein, 38 aa, Artificial Sequence; identical to SEQ ID NO: 12108
  Cyclic GFR-binding peptide
  MOD_RES (4), (5), (37): Xaa is C or S

SEQ ID NO: 53702 - protein, 33 aa, Artificial Sequence; identical to SEQ ID NO: 12110
  Cyclic GFR-binding peptide
  MOD_RES (1), (33): Xaa is C or S

SEQ ID NO: 53703 - protein, 29 aa, Artificial Sequence
  Cyclic GFR-binding peptide
TELEPLPMVYYDENEKVVEQLSNDMVVEG

SEQ ID NO: 53704 - protein, 26 aa, Artificial Sequence
  Cyclic GFR-binding peptide
  MOD_RES (1), (1): Xaa is C or S
XVPTRLSAISILYLDSANNVVLKNYQ

SEQ ID NO: 53705 - protein, 30 aa, Artificial Sequence
  Cyclic GFR-binding peptide
  MOD_RES (3), (3): Xaa is C or S
PTXAPTKLEPLPVVYYDDSSNVIEQLSNNM

SEQ ID NO: 53706 - protein, 32 aa, Artificial Sequence
  Cyclic GFR-binding peptide
  MOD_RES (5), (6): Xaa is C or S
SAAPXXVPQALEPLTILYYVGRKPKVEQLSNM

SEQ ID NO: 53707 - protein, 33 aa, Artificial Sequence
  Cyclic GFR-binding peptide
  MOD_RES (3), (4): Xaa is C or S
APXXVPQALSPISILFIVGRKPKVYKQYEMIVR

SEQ ID NO: 53708 - protein, 31 aa, Artificial Sequence
  Cyclic GFR-binding peptide
  MOD_RES (3), (4): Xaa is C or S
KPXXAPTKLSPISVLFIDDSSNVIYKQYENM

SEQ ID NO: 53709 - protein, 25 aa, Artificial Sequence
  Cyclic GFR-binding peptide
EPLTMLYYDEYDKVVEQLSNEMVVE

SEQ ID NO: 53710 - protein, 27 aa, Artificial Sequence
  Cyclic GFR-binding peptide
LSPISMLFIDEYDKVVYKQYEEMVVEG

SEQ ID NO: 53711 - protein, 41 aa, Artificial Sequence; identical to SEQ ID NO: 12113
  Cyclic GFR-binding peptide
  MOD_RES (5), (6), (38), (40): Xaa is C or S

SEQ ID NO: 53712 - protein, 25 aa, Artificial Sequence
  Cyclic GFR-binding peptide
RLEPLTILYYDSANNVVEQLSNDMV

SEQ ID NO: 53713 - protein, 35 aa, Artificial Sequence
  Cyclic GFR-binding peptide
  MOD_RES (5), (6): Xaa is C or S
SAAPXXVPQALEPLTILYYVGRKPKVEQLSNMIVR

SEQ ID NO: 53714 - protein, 39 aa, Artificial Sequence; identical to SEQ ID NO: 12116
  Cyclic GFR-binding peptide
  MOD_RES (5), (6), (38): Xaa is C or S

SEQ ID NO: 53715 - protein, 26 aa, Artificial Sequence
  Cyclic GFR-binding peptide
EPLTVLYYDDSSNVIEQLSNNMVVRS

SEQ ID NO: 53716 - protein, 29 aa, Artificial Sequence
  Cyclic GFR-binding peptide
  MOD_RES (1), (1): Xaa is C or S
XAPTQLSPISVLFIDDSSNVIYKQYENMV

SEQ ID NO: 53717 - protein, 34 aa, Artificial Sequence
  Cyclic GFR-binding peptide
  MOD_RES (5), (6): Xaa is C or S
IPKAXXVPTELEPLPMVYYDEYDKVVEQLSNEMV

SEQ ID NO: 53718 - protein, 24 aa, Artificial Sequence
  Cyclic GFR-binding peptide
PTRLSAISILYLDSANNVVLKNYQ

SEQ ID NO: 53719 - protein, 33 aa, Artificial Sequence
  Cyclic GFR-binding peptide
  MOD_RES (30), (32): Xaa is C or S
SQDLSPISILFIIGKTPKIYKQYEMIVKSXKXS

SEQ ID NO: 53720 - protein, 32 aa, Artificial Sequence; identical to SEQ ID NO: 12117
  Cyclic GFR-binding peptide
  MOD_RES (32), (32): Xaa is C or S

SEQ ID NO: 53721 - protein, 21 aa, Artificial Sequence
  Cyclic GFR-binding peptide
EPLPIVYYDSANNVVEQLSND

SEQ ID NO: 53722 - protein, 28 aa, Artificial Sequence
  Cyclic GFR-binding peptide
RLSAISILYLDSANNVVLKNYQDMVVES

SEQ ID NO: 53723 - protein, 31 aa, Artificial Sequence
  Cyclic GFR-binding peptide
  MOD_RES (5), (6): Xaa is C or S
IPKAXXVPTELEPLTMLYYDENEKVVEQLSN

SEQ ID NO: 53724 - protein, 30 aa, Artificial Sequence
  Cyclic GFR-binding peptide
  MOD_RES (3), (4): Xaa is C or S
PTXXVPTRLEPLTILYYDSANNVVEQLSND

SEQ ID NO: 53725 - protein, 25 aa, Artificial Sequence
  Cyclic GFR-binding peptide
APTQLEPLTVLYYDDSSNVIEQLSN

SEQ ID NO: 53726 - protein, 25 aa, Artificial Sequence
  Cyclic GFR-binding peptide
ELEPLTMLYYDEYDKVVEQLSNEMV

SEQ ID NO: 53727 - protein, 33 aa, Artificial Sequence
  Cyclic GFR-binding peptide
  MOD_RES (7), (7): Xaa is C or S
HVTKPTXAPTKLEPLPVVYYDDSSNVIEQLSNN

SEQ ID NO: 53728 - protein, 27 aa, Artificial Sequence
  Cyclic GFR-binding peptide
  MOD_RES (27), (27): Xaa is C or S
EPLTILYYDSANNVVEQLSNDMVVESX

SEQ ID NO: 53729 - protein, 34 aa, Artificial Sequence; identical to SEQ ID NO: 12122
  Cyclic GFR-binding peptide
  MOD_RES (2), (3): Xaa is C or S

SEQ ID NO: 53730 - protein, 37 aa, Artificial Sequence; identical to SEQ ID NO: 12123
  Cyclic GFR-binding peptide
  MOD_RES (4), (5), (37): Xaa is C or S

SEQ ID NO: 53731 - protein, 29 aa, Artificial Sequence
  Cyclic GFR-binding peptide
  MOD_RES (2), (3): Xaa is C or S
AXXVPTELSPISMLFIDEYDKVVYKQYEE

SEQ ID NO: 53732 - protein, 23 aa, Artificial Sequence
  Cyclic GFR-binding peptide
LSPISMLFIDENEKVVYKQYEDM

SEQ ID NO: 53733 - protein, 35 aa, Artificial Sequence
  Cyclic GFR-binding peptide
  MOD_RES (6), (7): Xaa is C or S
ASAAPXXVPQALSPISILFIVGRKPKVYKQYEMIV

SEQ ID NO: 53734 - protein, 30 aa, Artificial Sequence
  Cyclic GFR-binding peptide
  MOD_RES (3), (4): Xaa is C or S
KPXXAPTKLEPLPVVYYDDSSNVIEQLSNN

SEQ ID NO: 53735 - protein, 27 aa, Artificial Sequence
  Cyclic GFR-binding peptide
  MOD_RES (1), (2): Xaa is C or S
XXVPTRLNAISILYFDSANNVVLKKYR

SEQ ID NO: 53736 - protein, 30 aa, Artificial Sequence
  Cyclic GFR-binding peptide
  MOD_RES (2), (3): Xaa is C or S
PXXAPTKLEPLPVVYYDDSSNVIEQLSNNM

SEQ ID NO: 53737 - protein, 31 aa, Artificial Sequence; identical to SEQ ID NO: 12130
  Cyclic GFR-binding peptide

SEQ ID NO: 53738 - protein, 25 aa, Artificial Sequence
  Cyclic GFR-binding peptide
QLEPLTVLYYDDSSNVIEQLSNNMV

SEQ ID NO: 53739 - protein, 40 aa, Artificial Sequence; identical to SEQ ID NO: 12131
  Cyclic GFR-binding peptide
  MOD_RES (6), (7), (39): Xaa is C or S

SEQ ID NO: 53740 - protein, 29 aa, Artificial Sequence
  Cyclic GFR-binding peptide
  MOD_RES (2), (3): Xaa is C or S
AXXVPTELEPLTMLYYDEYDKVVEQLSNE

SEQ ID NO: 53741 - protein, 35 aa, Artificial Sequence; identical to SEQ ID NO: 12133
  Cyclic GFR-binding peptide
  MOD_RES (32), (34): Xaa is C or S

SEQ ID NO: 53742 - protein, 40 aa, Artificial Sequence; identical to SEQ ID NO: 12134
  Cyclic GFR-binding peptide
  MOD_RES (6), (7), (38), (40): Xaa is C or S

SEQ ID NO: 53743 - protein, 32 aa, Artificial Sequence
  Cyclic GFR-binding peptide
  MOD_RES (5), (6): Xaa is C or S
VPKPXXAPTKLEPLTVLYYDDSSNVIEQLSNN

SEQ ID NO: 53744 - protein, 33 aa, Artificial Sequence; identical to SEQ ID NO: 12135
  Cyclic GFR-binding peptide
  MOD_RES (1), (32): Xaa is C or S

SEQ ID NO: 53745 - protein, 31 aa, Artificial Sequence
  Cyclic GFR-binding peptide
  MOD_RES (3), (4): Xaa is C or S
KPXXAPTQLEPLTVLYYDDSSNVIEQLSNNM

SEQ ID NO: 53746 - protein, 26 aa, Artificial Sequence
  Cyclic GFR-binding peptide
  MOD_RES (1), (1): Xaa is C or S
XVPTRLNAISILYFDSANNVVLKKYR

SEQ ID NO: 53747 - protein, 32 aa, Artificial Sequence; identical to SEQ ID NO: 12136
  Cyclic GFR-binding peptide
  MOD_RES (1), (1): Xaa is C or S

SEQ ID NO: 53748 - protein, 29 aa, Artificial Sequence
  Cyclic GFR-binding peptide
  MOD_RES (1), (1): Xaa is C or S
XVSQDLSPISILFIIGKTPKIYKQYEMIV

SEQ ID NO: 53749 - protein, 30 aa, Artificial Sequence
  Cyclic GFR-binding peptide
  MOD_RES (1), (1): Xaa is C or S
XAPTKLSPISVLFIDDSSNVIYKQYENMVV

SEQ ID NO: 53750 - protein, 34 aa, Artificial Sequence; identical to SEQ ID NO: 12137
  Cyclic GFR-binding peptide
  MOD_RES (2), (3), (34): Xaa is C or S

SEQ ID NO: 53751 - protein, 26 aa, Artificial Sequence
  Cyclic GFR-binding peptide
PQDLSPISILFIVGRTPKVYKQYEMV

SEQ ID NO: 53752 - protein, 29 aa, Artificial Sequence
  Cyclic GFR-binding peptide
  MOD_RES (1), (2): Xaa is C or S
XXVPTELEPLPMVYYDEYDKVVEQLSNEM

SEQ ID NO: 53753 - protein, 30 aa, Artificial Sequence
  Cyclic GFR-binding peptide
  MOD_RES (28), (30): Xaa is C or S
ALSPISILFIVGRKPKVYKQYEMIVRSXKX

SEQ ID NO: 53754 - protein, 37 aa, Artificial Sequence; identical to SEQ ID NO: 12138
  Cyclic GFR-binding peptide
  MOD_RES (6), (7): Xaa is C or S

SEQ ID NO: 53755 - protein, 24 aa, Artificial Sequence
  Cyclic GFR-binding peptide
SPISILFIIGKTPKIYKQYEMIVK

SEQ ID NO: 53756 - protein, 37 aa, Artificial Sequence; identical to SEQ ID NO: 12139
  Cyclic GFR-binding peptide
  MOD_RES (5), (6): Xaa is C or S

SEQ ID NO: 53757 - protein, 26 aa, Artificial Sequence
  Cyclic GFR-binding peptide
ALSPISILFIVGRKPKVYKQYEMIVR

SEQ ID NO: 53758 - protein, 23 aa, Artificial Sequence
  Cyclic GFR-binding peptide
QALSPISILFIVGRKPKVYKQYE

SEQ ID NO: 53759 - protein, 31 aa, Artificial Sequence; identical to SEQ ID NO: 12143
  Cyclic GFR-binding peptide

SEQ ID NO: 53760 - protein, 32 aa, Artificial Sequence; identical to SEQ ID NO: 12142
  Cyclic GFR-binding peptide
  MOD_RES (1), (1): Xaa is C or S

SEQ ID NO: 53761 - protein, 29 aa, Artificial Sequence
  Cyclic GFR-binding peptide
  MOD_RES (27), (29): Xaa is C or S
EPLTVLYYDDSSNVIEQLSNNMVVRAXGX

SEQ ID NO: 53762 - protein, 30 aa, Artificial Sequence
  Cyclic GFR-binding peptide
  MOD_RES (2), (2): Xaa is C or S
TXAPTKLEPLPVVYYDDSSNVIEQLSNNMV

SEQ ID NO: 53763 - protein, 29 aa, Artificial Sequence
  Cyclic GFR-binding peptide
  MOD_RES (3), (4): Xaa is C or S
APXXVPQALEPLTILYYVGRKPKVEQLSN

SEQ ID NO: 53764 - protein, 38 aa, Artificial Sequence; identical to SEQ ID NO: 12146
  Cyclic GFR-binding peptide
  MOD_RES (4), (5), (37): Xaa is C or S

SEQ ID NO: 53765 - protein, 37 aa, Artificial Sequence; identical to SEQ ID NO: 12147
  Cyclic GFR-binding peptide
  MOD_RES (2), (3), (35), (37): Xaa is C or S

SEQ ID NO: 53766 - protein, 37 aa, Artificial Sequence; identical to SEQ ID NO: 12149
  Cyclic GFR-binding peptide
  MOD_RES (4), (5), (36): Xaa is C or S

SEQ ID NO: 53767 - protein, 20 aa, Artificial Sequence
  Cyclic GFR-binding peptide
EPLTVLYYDDSSNVIEQLSN

SEQ ID NO: 53768 - protein, 23 aa, Artificial Sequence
  Cyclic GFR-binding peptide
ELEPLTMLYYDEYDKVVEQLSNE

SEQ ID NO: 53769 - protein, 33 aa, Artificial Sequence
  Cyclic GFR-binding peptide
  MOD_RES (7), (7): Xaa is C or S
HVTKPTXAPTKLSPISVLFIDDSSNVIYKQYEN

SEQ ID NO: 53770 - protein, 24 aa, Artificial Sequence
  Cyclic GFR-binding peptide
SPISILFIVGRTPKVYKQYEMVVK

SEQ ID NO: 53771 - protein, 21 aa, Artificial Sequence
  Cyclic GFR-binding peptide
EPLTILYYDSANNVVEQLSND

SEQ ID NO: 53772 - protein, 34 aa, Artificial Sequence
  Cyclic GFR-binding peptide
  MOD_RES (6), (7): Xaa is C or S
YVPKPXXAPTKLSPISVLFIDDSSNVIYKQYENM

SEQ ID NO: 53773 - protein, 34 aa, Artificial Sequence; identical to SEQ ID NO: 12154
  Cyclic GFR-binding peptide
  MOD_RES (2), (3): Xaa is C or S

SEQ ID NO: 53774 - protein, 29 aa, Artificial Sequence
  Cyclic GFR-binding peptide
VSQDLEPLPIVYYIGKTPKIEQLSNMIVK

SEQ ID NO: 53775 - protein, 29 aa, Artificial Sequence
  Cyclic GFR-binding peptide
  MOD_RES (1), (2): Xaa is C or S
XXVPTRLSAISILYLDSANNVVLKNYQDM

SEQ ID NO: 53776 - protein, 30 aa, Artificial Sequence
  Cyclic GFR-binding peptide
  MOD_RES (29), (29): Xaa is C or S
QALSPISILFIVGRKPKVYKQYEMIVRSXK

SEQ ID NO: 53777 - protein, 31 aa, Artificial Sequence
  Cyclic GFR-binding peptide
  MOD_RES (3), (4): Xaa is C or S
KAXXVPTELEPLTMLYYDENEKVVEQLSNDM

SEQ ID NO: 53778 - protein, 38 aa, Artificial Sequence; identical to SEQ ID NO: 12157
  Cyclic GFR-binding peptide
  MOD_RES (2), (3), (35), (37): Xaa is C or S

SEQ ID NO: 53779 - protein, 37 aa, Artificial Sequence; identical to SEQ ID NO: 12158
  Cyclic GFR-binding peptide
  MOD_RES (4), (5), (36): Xaa is C or S

SEQ ID NO: 53780 - protein, 39 aa, Artificial Sequence; identical to SEQ ID NO: 12159
  Cyclic GFR-binding peptide
  MOD_RES (4), (36), (38): Xaa is C or S

SEQ ID NO: 53781 - protein, 27 aa, Artificial Sequence
  Cyclic GFR-binding peptide
ELEPLPMVYYDENEKVVEQLSNDMVVE

SEQ ID NO: 53782 - protein, 31 aa, Artificial Sequence
  Cyclic GFR-binding peptide
  MOD_RES (4), (5): Xaa is C or S
ASPXXVSQDLSPISILFIIGKTPKIYKQYEM

SEQ ID NO: 53783 - protein, 30 aa, Artificial Sequence
  Cyclic GFR-binding peptide
  MOD_RES (4), (5): Xaa is C or S
ASPXXVPQDLSPISILFIVGRTPKVYKQYE

SEQ ID NO: 53784 - protein, 36 aa, Artificial Sequence; identical to SEQ ID NO: 12162
  Cyclic GFR-binding peptide
  MOD_RES (1), (2), (33), (35): Xaa is C or S

SEQ ID NO: 53785 - protein, 41 aa, Artificial Sequence; identical to SEQ ID NO: 12163
  Cyclic GFR-binding peptide
  MOD_RES (6), (38), (40): Xaa is C or S

SEQ ID NO: 53786 - protein, 28 aa, Artificial Sequence
  Cyclic GFR-binding peptide
  MOD_RES (2), (3): Xaa is C or S
PXXVPQDLSPISILFIVGRTPKVYKQYE

SEQ ID NO: 53787 - protein, 36 aa, Artificial Sequence; identical to SEQ ID NO: 12165
  Cyclic GFR-binding peptide
  MOD_RES (4), (5): Xaa is C or S

SEQ ID NO: 53788 - protein, 33 aa, Artificial Sequence; identical to SEQ ID NO: 12167
  Cyclic GFR-binding peptide
  MOD_RES (32), (32): Xaa is C or S

SEQ ID NO: 53789 - protein, 34 aa, Artificial Sequence
  Cyclic GFR-binding peptide
  MOD_RES (5), (5): Xaa is C or S
TKPTXAPTKLSPISVLFIDDSSNVIYKQYENMVV

SEQ ID NO: 53790 - protein, 29 aa, Artificial Sequence
  Cyclic GFR-binding peptide
  MOD_RES (27), (29): Xaa is C or S
SPISVLFIDDSSNVIYKQYENMVVRAXGX

SEQ ID NO: 53791 - protein, 23 aa, Artificial Sequence
  Cyclic GFR-binding peptide
RLNAISILYFDSANNVVLKKYRD

SEQ ID NO: 53792 - protein, 28 aa, Artificial Sequence
  Cyclic GFR-binding peptide
PTELEPLTMLYYDENEKVVEQLSNDMVV

SEQ ID NO: 53793 - protein, 31 aa, Artificial Sequence
  Cyclic GFR-binding peptide
  MOD_RES (29), (31): Xaa is C or S
RLNAISILYFDSANNVVLKKYRDMVVESXGX

SEQ ID NO: 53794 - protein, 33 aa, Artificial Sequence
  Cyclic GFR-binding peptide
  MOD_RES (5), (5): Xaa is C or S
TKPTXAPTKLEPLPVVYYDDSSNVIEQLSNNMV

SEQ ID NO: 53795 - protein, 32 aa, Artificial Sequence
  Cyclic GFR-binding peptide
  MOD_RES (5), (6): Xaa is C or S
SAAPXXVPQALSPISILFIVGRKPKVYKQYEM

SEQ ID NO: 53796 - protein, 27 aa, Artificial Sequence
  Cyclic GFR-binding peptide
VPTELEPLTMLYYDENEKVVEQLSNDM

SEQ ID NO: 53797 - protein, 32 aa, Artificial Sequence
  Cyclic GFR-binding peptide
  MOD_RES (31), (31): Xaa is C or S
PTELEPLPMVYYDENEKVVEQLSNDMVVEGXG

SEQ ID NO: 53798 - protein, 36 aa, Artificial Sequence; identical to SEQ ID NO: 12169
  Cyclic GFR-binding peptide
  MOD_RES (1), (2), (34), (36): Xaa is C or S

SEQ ID NO: 53799 - protein, 34 aa, Artificial Sequence; identical to SEQ ID NO: 12170
  Cyclic GFR-binding peptide
  MOD_RES (1), (33): Xaa is C or S

SEQ ID NO: 53800 - protein, 24 aa, Artificial Sequence
  Cyclic GFR-binding peptide
PTELEPLPMVYYDENEKVVEQLSN

SEQ ID NO: 53801 - protein, 26 aa, Artificial Sequence
  Cyclic GFR-binding peptide
LEPLPIVYYIGKTPKIEQLSNMIVKS

SEQ ID NO: 53802 - protein, 28 aa, Artificial Sequence
  Cyclic GFR-binding peptide
  MOD_RES (1), (2): Xaa is C or S
XXVPQALSPISILFIVGRKPKVYKQYEM

SEQ ID NO: 53803 - protein, 30 aa, Artificial Sequence
  Cyclic GFR-binding peptide
  MOD_RES (2), (3): Xaa is C or S
TXXVPTRLEPLPIVYYDSANNVVEQLSNDM

SEQ ID NO: 53804 - protein, 33 aa, Artificial Sequence
  Cyclic GFR-binding peptide
  MOD_RES (4), (5): Xaa is C or S
PPTXXVPTRLSAISILYLDSANNVVLKNYQDMV

SEQ ID NO: 53805 - protein, 32 aa, Artificial Sequence; identical to SEQ ID NO: 12179
  Cyclic GFR-binding peptide
  MOD_RES (1), (2): Xaa is C or S

SEQ ID NO: 53806 - protein, 35 aa, Artificial Sequence; identical to SEQ ID NO: 12181
  Cyclic GFR-binding peptide
  MOD_RES (1), (33), (35): Xaa is C or S

SEQ ID NO: 53807 - protein, 30 aa, Artificial Sequence
  Cyclic GFR-binding peptide
  MOD_RES (2), (3): Xaa is C or S
PXXVPQALEPLTILYYVGRKPKVEQLSNMI

SEQ ID NO: 53808 - protein, 22 aa, Artificial Sequence
  Cyclic GFR-binding peptide
EPLTMLYYDEYDKVVEQLSNEM

SEQ ID NO: 53809 - protein, 32 aa, Artificial Sequence
  Cyclic GFR-binding peptide
  MOD_RES (6), (7): Xaa is C or S
STPPTXXVPTRLEPLPIVYYDSANNVVEQLSN

SEQ ID NO: 53810 - protein, 27 aa, Artificial Sequence
  Cyclic GFR-binding peptide
  MOD_RES (1), (2): Xaa is C or S
XXVPQALEPLTILYYVGRKPKVEQLSN

SEQ ID NO: 53811 - protein, 30 aa, Artificial Sequence
  Cyclic GFR-binding peptide
  MOD_RES (3), (4): Xaa is C or S
KPXXAPTKLSPISVLFIDDSSNVIYKQYEN

SEQ ID NO: 53812 - protein, 29 aa, Artificial Sequence
  Cyclic GFR-binding peptide
  MOD_RES (29), (29): Xaa is C or S
KLEPLTVLYYDDSSNVIEQLSNNMVVRSX

SEQ ID NO: 53813 - protein, 35 aa, Artificial Sequence
  Cyclic GFR-binding peptide
  MOD_RES (5), (6): Xaa is C or S
IPKAXXVPTELEPLPMVYYDENEKVVEQLSNDMVV

SEQ ID NO: 53814 - protein, 28 aa, Artificial Sequence
  Cyclic GFR-binding peptide
  MOD_RES (28), (28): Xaa is C or S
LEPLPVVYYDDSSNVIEQLSNNMVVRAX

SEQ ID NO: 53815 - protein, 31 aa, Artificial Sequence; identical to SEQ ID NO: 12184
  Cyclic GFR-binding peptide
  MOD_RES (1), (1): Xaa is C or S

SEQ ID NO: 53816 - protein, 24 aa, Artificial Sequence
  Cyclic GFR-binding peptide
SPISVLFIDDSSNVIYKQYENMVV

SEQ ID NO: 53817 - protein, 35 aa, Artificial Sequence; identical to SEQ ID NO: 12186
  Cyclic GFR-binding peptide
  MOD_RES (2), (34): Xaa is C or S

SEQ ID NO: 53818 - protein, 26 aa, Artificial Sequence
  Cyclic GFR-binding peptide
SQDLSPISILFIIGKTPKIYKQYEMI

SEQ ID NO: 53819 - protein, 30 aa, Artificial Sequence
  Cyclic GFR-binding peptide
  MOD_RES (27), (29): Xaa is C or S
EPLPIVYYDSANNVVEQLSNDMVVESXGXR

SEQ ID NO: 53820 - protein, 24 aa, Artificial Sequence
  Cyclic GFR-binding peptide
TQLEPLTVLYYDDSSNVIEQLSNN

SEQ ID NO: 53821 - protein, 25 aa, Artificial Sequence
  Cyclic GFR-binding peptide
ELSPISMLFIDENEKVVYKQYEDMV

SEQ ID NO: 53822 - protein, 34 aa, Artificial Sequence; identical to SEQ ID NO: 12194
  Cyclic GFR-binding peptide
  MOD_RES (2), (3), (34): Xaa is C or S

SEQ ID NO: 53823 - protein, 28 aa, Artificial Sequence
  Cyclic GFR-binding peptide
  MOD_RES (1), (1): Xaa is C or S
XAPTQLSPISVLFIDDSSNVIYKQYENM

SEQ ID NO: 53824 - protein, 31 aa, Artificial Sequence
  Cyclic GFR-binding peptide
  MOD_RES (4), (5): Xaa is C or S
PKAXXVPTELEPLTMLYYDEYDKVVEQLSNE

SEQ ID NO: 53825 - protein, 29 aa, Artificial Sequence
  Cyclic GFR-binding peptide
  MOD_RES (29), (29): Xaa is C or S
ELEPLPMVYYDENEKVVEQLSNDMVVEGX

SEQ ID NO: 53826 - protein, 39 aa, Artificial Sequence; identical to SEQ ID NO: 12196
  Cyclic GFR-binding peptide
  MOD_RES (6), (7), (38): Xaa is C or S

SEQ ID NO: 53827 - protein, 27 aa, Artificial Sequence
  Cyclic GFR-binding peptide
LEPLTMLYYDENEKVVEQLSNDMVVEG

SEQ ID NO: 53828 - protein, 36 aa, Artificial Sequence; identical to SEQ ID NO: 12197
  Cyclic GFR-binding peptide
  MOD_RES (6), (6): Xaa is C or S

SEQ ID NO: 53829 - protein, 32 aa, Artificial Sequence
  Cyclic GFR-binding peptide
  MOD_RES (5), (6): Xaa is C or S
VPKPXXAPTQLEPLPVVYYDDSSNVIEQLSNN

SEQ ID NO: 53830 - protein, 26 aa, Artificial Sequence
  Cyclic GFR-binding peptide
  MOD_RES (1), (1): Xaa is C or S
XVPTELEPLTMLYYDEYDKVVEQLSN

SEQ ID NO: 53831 - protein, 28 aa, Artificial Sequence
  Cyclic GFR-binding peptide
  MOD_RES (27), (27): Xaa is C or S
SPISMLFIDEYDKVVYKQYEEMVVEGXG

SEQ ID NO: 53832 - protein, 29 aa, Artificial Sequence
  Cyclic GFR-binding peptide
  MOD_RES (28), (28): Xaa is C or S
LSPISMLFIDEYDKVVYKQYEEMVVEGXG

SEQ ID NO: 53833 - protein, 35 aa, Artificial Sequence
  Cyclic GFR-binding peptide
  MOD_RES (6), (7): Xaa is C or S
ASASPXXVSQDLEPLPIVYYIGKTPKIEQLSNMIV

SEQ ID NO: 53834 - protein, 27 aa, Artificial Sequence
  Cyclic GFR-binding peptide
TRLNAISILYFDSANNVVLKKYRDMVV

SEQ ID NO: 53835 - protein, 34 aa, Artificial Sequence
  Cyclic GFR-binding peptide
  MOD_RES (6), (7): Xaa is C or S
YVPKPXXAPTKLEPLPVVYYDDSSNVIEQLSNNM

SEQ ID NO: 53836 - protein, 35 aa, Artificial Sequence; identical to SEQ ID NO: 12199
  Cyclic GFR-binding peptide
  MOD_RES (1), (33), (35): Xaa is C or S

SEQ ID NO: 53837 - protein, 34 aa, Artificial Sequence; identical to SEQ ID NO: 12200
  Cyclic GFR-binding peptide
  MOD_RES (2), (3): Xaa is C or S

SEQ ID NO: 53838 - protein, 33 aa, Artificial Sequence; identical to SEQ ID NO: 12201
  Cyclic GFR-binding peptide
  MOD_RES (2), (3): Xaa is C or S

SEQ ID NO: 53839 - protein, 34 aa, Artificial Sequence; identical to SEQ ID NO: 12202
  Cyclic GFR-binding peptide
  MOD_RES (2), (3), (34): Xaa is C or S

SEQ ID NO: 53840 - protein, 30 aa, Artificial Sequence
  Cyclic GFR-binding peptide
  MOD_RES (28), (30): Xaa is C or S
LSPISVLFIDDSSNVIYKQYENMVVRSXGX

SEQ ID NO: 53841 - protein, 29 aa, Artificial Sequence
  Cyclic GFR-binding peptide
  MOD_RES (3), (4): Xaa is C or S
KAXXVPTELSPISMLFIDEYDKVVYKQYE

SEQ ID NO: 53842 - protein, 35 aa, Artificial Sequence
  Cyclic GFR-binding peptide
  MOD_RES (6), (7): Xaa is C or S
ASASPXXVSQDLSPISILFIIGKTPKIYKQYEMIV

SEQ ID NO: 53843 - protein, 32 aa, Artificial Sequence
  Cyclic GFR-binding peptide
  MOD_RES (3), (4): Xaa is C or S
PTXXVPTRLNAISILYFDSANNVVLKKYRDMV

SEQ ID NO: 53844 - protein, 32 aa, Artificial Sequence; identical to SEQ ID NO: 12204
  Cyclic GFR-binding peptide
  MOD_RES (32), (32): Xaa is C or S

SEQ ID NO: 53845 - protein, 27 aa, Artificial Sequence
  Cyclic GFR-binding peptide
QALEPLTILYYVGRKPKVEQLSNMIVR

SEQ ID NO: 53846 - protein, 32 aa, Artificial Sequence
  Cyclic GFR-binding peptide
  MOD_RES (5), (6): Xaa is C or S
TPPTXXVPTRLNAISILYFDSANNVVLKKYRD

SEQ ID NO: 53847 - protein, 39 aa, Artificial Sequence; identical to SEQ ID NO: 12205
  Cyclic GFR-binding peptide
  MOD_RES (3), (4), (36), (38): Xaa is C or S

SEQ ID NO: 53848 - protein, 38 aa, Artificial Sequence; identical to SEQ ID NO: 12206
  Cyclic GFR-binding peptide
  MOD_RES (4), (5), (37): Xaa is C or S

SEQ ID NO: 53849 - protein, 36 aa, Artificial Sequence; identical to SEQ ID NO: 12209
  Cyclic GFR-binding peptide
  MOD_RES (2), (3), (34), (36): Xaa is C or S

SEQ ID NO: 53850 - protein, 37 aa, Artificial Sequence; identical to SEQ ID NO: 12211
  Cyclic GFR-binding peptide
  MOD_RES (6), (6): Xaa is C or S

SEQ ID NO: 53851 - protein, 31 aa, Artificial Sequence
  Cyclic GFR-binding peptide
  MOD_RES (5), (6): Xaa is C or S
IPKAXXVPTELSPISMLFIDEYDKVVYKQYE

SEQ ID NO: 53852 - protein, 36 aa, Artificial Sequence; identical to SEQ ID NO: 12212
  Cyclic GFR-binding peptide
  MOD_RES (1), (2), (34), (36): Xaa is C or S

SEQ ID NO: 53853 - protein, 33 aa, Artificial Sequence; identical to SEQ ID NO: 12213
  Cyclic GFR-binding peptide
  MOD_RES (1), (33): Xaa is C or S

SEQ ID NO: 53854 - protein, 23 aa, Artificial Sequence
  Cyclic GFR-binding peptide
QDLSPISILFIVGRTPKVYKQYE

SEQ ID NO: 53855 - protein, 29 aa, Artificial Sequence
  Cyclic GFR-binding peptide
  MOD_RES (27), (29): Xaa is C or S
EPLTMLYYDEYDKVVEQLSNEMVVEGXGX

SEQ ID NO: 53856 - protein, 32 aa, Artificial Sequence
  Cyclic GFR-binding peptide
  MOD_RES (2), (3): Xaa is C or S
TXXVPTRLNAISILYFDSANNVVLKKYRDMVV

SEQ ID NO: 53857 - protein, 35 aa, Artificial Sequence; identical to SEQ ID NO: 12215
  Cyclic GFR-binding peptide
  MOD_RES (2), (3), (35): Xaa is C or S

SEQ ID NO: 53858 - protein, 33 aa, Artificial Sequence
  Cyclic GFR-binding peptide
  MOD_RES (3), (4): Xaa is C or S
KPXXAPTKLEPLPVVYYDDSSNVIEQLSNNMVV

SEQ ID NO: 53859 - protein, 22 aa, Artificial Sequence
  Cyclic GFR-binding peptide
LEPLPIVYYIGKTPKIEQLSNM

SEQ ID NO: 53860 - protein, 40 aa, Artificial Sequence; identical to SEQ ID NO: 12218
  Cyclic GFR-binding peptide
  MOD_RES (4), (5), (37), (39): Xaa is C or S

SEQ ID NO: 53861 - protein, 27 aa, Artificial Sequence
  Cyclic GFR-binding peptide
  MOD_RES (1), (1): Xaa is C or S
XVPQDLEPLPIVYYVGRTPKVEQLSNM

SEQ ID NO: 53862 - protein, 26 aa, Artificial Sequence
  Cyclic GFR-binding peptide
KLSPISVLFIDDSSNVIYKQYENMVV

SEQ ID NO: 53863 - protein, 36 aa, Artificial Sequence; identical to SEQ ID NO: 12220
  Cyclic GFR-binding peptide
  MOD_RES (1), (2), (34), (36): Xaa is C or S

SEQ ID NO: 53864 - protein, 28 aa, Artificial Sequence
  Cyclic GFR-binding peptide
  MOD_RES (27), (27): Xaa is C or S
EPLPVVYYDDSSNVIEQLSNNMVVRAXG

SEQ ID NO: 53865 - protein, 23 aa, Artificial Sequence
  Cyclic GFR-binding peptide
LEPLTILYYDSANNVVEQLSNDM

SEQ ID NO: 53866 - protein, 22 aa, Artificial Sequence
  Cyclic GFR-binding peptide
LNAISILYFDSANNVVLKKYRD

SEQ ID NO: 53867 - protein, 36 aa, Artificial Sequence
  Cyclic GFR-binding peptide
  MOD_RES (6), (7): Xaa is C or S
YVPKPXXAPTKLSPISVLFIDDSSNVIYKQYENMVV

SEQ ID NO: 53868 - protein, 24 aa, Artificial Sequence
  Cyclic GFR-binding peptide
SPISILFIVGRKPKVYKQYEMIVR

SEQ ID NO: 53869 - protein, 27 aa, Artificial Sequence
  Cyclic GFR-binding peptide
ELEPLTMLYYDEYDKVVEQLSNEMVVE

SEQ ID NO: 53870 - protein, 38 aa, Artificial Sequence; identical to SEQ ID NO: 12222
  Cyclic GFR-binding peptide
  MOD_RES (4), (5), (37): Xaa is C or S

SEQ ID NO: 53871 - protein, 39 aa, Artificial Sequence; identical to SEQ ID NO: 12223
  Cyclic GFR-binding peptide
  MOD_RES (6), (7), (38): Xaa is C or S

SEQ ID NO: 53872 - protein, 28 aa, Artificial Sequence
  Cyclic GFR-binding peptide
QDLEPLPIVYYVGRTPKVEQLSNMVVKS

SEQ ID NO: 53873 - protein, 24 aa, Artificial Sequence
  Cyclic GFR-binding peptide
RLEPLPIVYYDSANNVVEQLSNDM

SEQ ID NO: 53874 - protein, 25 aa, Artificial Sequence
  Cyclic GFR-binding peptide
PQALEPLTILYYVGRKPKVEQLSNM

SEQ ID NO: 53875 - protein, 30 aa, Artificial Sequence
  Cyclic GFR-binding peptide
  MOD_RES (1), (1): Xaa is C or S
XAPTQLEPLTVLYYDDSSNVIEQLSNNMVV

SEQ ID NO: 53876 - protein, 36 aa, Artificial Sequence; identical to SEQ ID NO: 12225
  Cyclic GFR-binding peptide
  MOD_RES (3), (4), (35): Xaa is C or S

SEQ ID NO: 53877 - protein, 36 aa, Artificial Sequence; identical to SEQ ID NO: 12226
  Cyclic GFR-binding peptide
  MOD_RES (3), (4), (36): Xaa is C or S

SEQ ID NO: 53878 - protein, 25 aa, Artificial Sequence
  Cyclic GFR-binding peptide
QDLSPISILFIIGKTPKIYKQYEMI

SEQ ID NO: 53879 - protein, 31 aa, Artificial Sequence; identical to SEQ ID NO: 12227
  Cyclic GFR-binding peptide
  MOD_RES (1), (1): Xaa is C or S

SEQ ID NO: 53880 - protein, 36 aa, Artificial Sequence; identical to SEQ ID NO: 12228
  Cyclic GFR-binding peptide
  MOD_RES (3), (4), (35): Xaa is C or S

SEQ ID NO: 53881 - protein, 26 aa, Artificial Sequence
  Cyclic GFR-binding peptide
ELSPISMLFIDENEKVVYKQYEDMVV

SEQ ID NO: 53882 - protein, 40 aa, Artificial Sequence; identical to SEQ ID NO: 12229
  Cyclic GFR-binding peptide
  MOD_RES (4), (5), (37), (39): Xaa is C or S

SEQ ID NO: 53883 - protein, 31 aa, Artificial Sequence
  Cyclic GFR-binding peptide
  MOD_RES (31), (31): Xaa is C or S
PTELEPLPMVYYDENEKVVEQLSNDMVVEGX

SEQ ID NO: 53884 - protein, 29 aa, Artificial Sequence
  Cyclic GFR-binding peptide
  MOD_RES (2), (3): Xaa is C or S
TXXVPTRLNAISILYFDSANNVVLKKYRD

SEQ ID NO: 53885 - protein, 35 aa, Artificial Sequence; identical to SEQ ID NO: 12232
  Cyclic GFR-binding peptide
  MOD_RES (1), (33), (35): Xaa is C or S

SEQ ID NO: 53886 - protein, 35 aa, Artificial Sequence; identical to SEQ ID NO: 12234
  Cyclic GFR-binding peptide
  MOD_RES (1), (2), (34): Xaa is C or S

SEQ ID NO: 53887 - protein, 37 aa, Artificial Sequence; identical to SEQ ID NO: 12233
  Cyclic GFR-binding peptide
  MOD_RES (3), (4), (36): Xaa is C or S

SEQ ID NO: 53888 - protein, 24 aa, Artificial Sequence
  Cyclic GFR-binding peptide
ELSPISMLFIDEYDKVVYKQYEEM

SEQ ID NO: 53889 - protein, 42 aa, Artificial Sequence; identical to SEQ ID NO: 12235
  Cyclic GFR-binding peptide
  MOD_RES (6), (7), (39), (41): Xaa is C or S

SEQ ID NO: 53890 - protein, 40 aa, Artificial Sequence; identical to SEQ ID NO: 12237
  Cyclic GFR-binding peptide
  MOD_RES (5), (6), (37), (39): Xaa is C or S

SEQ ID NO: 53891 - protein, 39 aa, Artificial Sequence; identical to SEQ ID NO: 12240
  Cyclic GFR-binding peptide
  MOD_RES (3), (4), (36), (38): Xaa is C or S

SEQ ID NO: 53892 - protein, 32 aa, Artificial Sequence
  Cyclic GFR-binding peptide
  MOD_RES (5), (5): Xaa is C or S
TKPTXAPTKLEPLPVVYYDDSSNVIEQLSNNM

SEQ ID NO: 53893 - protein, 28 aa, Artificial Sequence
  Cyclic GFR-binding peptide
VSQDLSPISILFIIGKTPKIYKQYEMIV

SEQ ID NO: 53894 - protein, 33 aa, Artificial Sequence
  Cyclic GFR-binding peptide
  MOD_RES (30), (32): Xaa is C or S
TRLEPLTILYYDSANNVVEQLSNDMVVESXGXR

SEQ ID NO: 53895 - protein, 28 aa, Artificial Sequence
  Cyclic GFR-binding peptide
  MOD_RES (2), (3): Xaa is C or S
AXXVPTELEPLPMVYYDEYDKVVEQLSN

SEQ ID NO: 53896 - protein, 32 aa, Artificial Sequence
  Cyclic GFR-binding peptide
  MOD_RES (2), (3): Xaa is C or S
AXXVPTELEPLTMLYYDENEKVVEQLSNDMVV

SEQ ID NO: 53897 - protein, 24 aa, Artificial Sequence
  Cyclic GFR-binding peptide
LSPISMLFIDENEKVVYKQYEDMV

SEQ ID NO: 53898 - protein, 39 aa, Artificial Sequence; identical to SEQ ID NO: 12245
  Cyclic GFR-binding peptide
  MOD_RES (5), (6), (38): Xaa is C or S

SEQ ID NO: 53899 - protein, 36 aa, Artificial Sequence; identical to SEQ ID NO: 12247
  Cyclic GFR-binding peptide
  MOD_RES (1), (2), (34), (36): Xaa is C or S

SEQ ID NO: 53900 - protein, 32 aa, Artificial Sequence
  Cyclic GFR-binding peptide
  MOD_RES (5), (6): Xaa is C or S
SASPXXVSQDLSPISILFIIGKTPKIYKQYEM

SEQ ID NO: 53901 - protein, 33 aa, Artificial Sequence
  Cyclic GFR-binding peptide
  MOD_RES (4), (5): Xaa is C or S
PKAXXVPTELEPLTMLYYDEYDKVVEQLSNEMV

SEQ ID NO: 53902 - protein, 28 aa, Artificial Sequence
  Cyclic GFR-binding peptide
VPTELEPLPMVYYDEYDKVVEQLSNEMV

SEQ ID NO: 53903 - protein, 28 aa, Artificial Sequence
  Cyclic GFR-binding peptide
  MOD_RES (2), (3): Xaa is C or S
PXXVPQALSPISILFIVGRKPKVYKQYE

SEQ ID NO: 53904 - protein, 26 aa, Artificial Sequence
  Cyclic GFR-binding peptide
LSPISVLFIDDSSNVIYKQYENMVVR

SEQ ID NO: 53905 - protein, 35 aa, Artificial Sequence
  Cyclic GFR-binding peptide
  MOD_RES (6), (7): Xaa is C or S
KIPKAXXVPTELSPISMLFIDENEKVVYKQYEDMV

SEQ ID NO: 53906 - protein, 36 aa, Artificial Sequence; identical to SEQ ID NO: 12252
  Cyclic GFR-binding peptide
  MOD_RES (3), (4), (35): Xaa is C or S

SEQ ID NO: 53907 - protein, 29 aa, Artificial Sequence
  Cyclic GFR-binding peptide
  MOD_RES (2), (3): Xaa is C or S
AXXVPTELSPISMLFIDENEKVVYKQYED

SEQ ID NO: 53908 - protein, 30 aa, Artificial Sequence
  Cyclic GFR-binding peptide
  MOD_RES (2), (3): Xaa is C or S
PXXVSQDLEPLPIVYYIGKTPKIEQLSNMI

SEQ ID NO: 53909 - protein, 34 aa, Artificial Sequence
  Cyclic GFR-binding peptide
  MOD_RES (6), (6): Xaa is C or S
VTKPTXAPTKLEPLTVLYYDDSSNVIEQLSNNMV

SEQ ID NO: 53910 - protein, 27 aa, Artificial Sequence
  Cyclic GFR-binding peptide
PQDLSPISILFIVGRTPKVYKQYEMVV

SEQ ID NO: 53911 - protein, 32 aa, Artificial Sequence
  Cyclic GFR-binding peptide
  MOD_RES (3), (4): Xaa is C or S
SPXXVSQDLSPISILFIIGKTPKIYKQYEMIV

SEQ ID NO: 53912 - protein, 33 aa, Artificial Sequence; identical to SEQ ID NO: 12254
  Cyclic GFR-binding peptide
  MOD_RES (32), (32): Xaa is C or S

SEQ ID NO: 53913 - protein, 24 aa, Artificial Sequence
  Cyclic GFR-binding peptide
EPLTMLYYDEYDKVVEQLSNEMVV

SEQ ID NO: 53914 - protein, 28 aa, Artificial Sequence
  Cyclic GFR-binding peptide
  MOD_RES (28), (28): Xaa is C or S
LEPLTILYYDSANNVVEQLSNDMVVESX

SEQ ID NO: 53915 - protein, 26 aa, Artificial Sequence
  Cyclic GFR-binding peptide
PTELSPISMLFIDENEKVVYKQYEDM

SEQ ID NO: 53916 - protein, 27 aa, Artificial Sequence
  Cyclic GFR-binding peptide
VPTELSPISMLFIDENEKVVYKQYEDM

SEQ ID NO: 53917 - protein, 30 aa, Artificial Sequence
  Cyclic GFR-binding peptide
  MOD_RES (4), (5): Xaa is C or S
PKPXXAPTKLEPLPVVYYDDSSNVIEQLSN

SEQ ID NO: 53918 - protein, 31 aa, Artificial Sequence
  Cyclic GFR-binding peptide
  MOD_RES (30), (30): Xaa is C or S
TKLEPLPVVYYDDSSNVIEQLSNNMVVRSXG

SEQ ID NO: 53919 - protein, 33 aa, Artificial Sequence
  Cyclic GFR-binding peptide
  MOD_RES (4), (5): Xaa is C or S
PKAXXVPTELSPISMLFIDENEKVVYKQYEDMV

SEQ ID NO: 53920 - protein, 37 aa, Artificial Sequence; identical to SEQ ID NO: 12258
  Cyclic GFR-binding peptide
  MOD_RES (3), (4), (36): Xaa is C or S

SEQ ID NO: 53921 - protein, 31 aa, Artificial Sequence
  Cyclic GFR-binding peptide
  MOD_RES (30), (30): Xaa is C or S
TELEPLPMVYYDEYDKVVEQLSNEMVVEGXG

SEQ ID NO: 53922 - protein, 27 aa, Artificial Sequence
  Cyclic GFR-binding peptide
PTELEPLTMLYYDEYDKVVEQLSNEMV

SEQ ID NO: 53923 - protein, 29 aa, Artificial Sequence
  Cyclic GFR-binding peptide
  MOD_RES (3), (4): Xaa is C or S
PTXXVPTRLSAISILYLDSANNVVLKNYQ

SEQ ID NO: 53924 - protein, 26 aa, Artificial Sequence
  Cyclic GFR-binding peptide
  MOD_RES (1), (1): Xaa is C or S
XVPTELSPISMLFIDENEKVVYKQYE

SEQ ID NO: 53925 - protein, 23 aa, Artificial Sequence
  Cyclic GFR-binding peptide
LEPLTILYYVGRKPKVEQLSNMI

SEQ ID NO: 53926 - protein, 25 aa, Artificial Sequence
  Cyclic GFR-binding peptide
SPISVLFIDDSSNVIYKQYENMVVR

SEQ ID NO: 53927 - protein, 32 aa, Artificial Sequence; identical to SEQ ID NO: 12264
  Cyclic GFR-binding peptide
  MOD_RES (1), (2): Xaa is C or S

SEQ ID NO: 53928 - protein, 36 aa, Artificial Sequence; identical to SEQ ID NO: 12265
  Cyclic GFR-binding peptide
  MOD_RES (2), (3), (35): Xaa is C or S

SEQ ID NO: 53929 - protein, 34 aa, Artificial Sequence; identical to SEQ ID NO: 12267
  Cyclic GFR-binding peptide
  MOD_RES (32), (34): Xaa is C or S

SEQ ID NO: 53930 - protein, 37 aa, Artificial Sequence; identical to SEQ ID NO: 12269
  Cyclic GFR-binding peptide
  MOD_RES (6), (7): Xaa is C or S

SEQ ID NO: 53931 - protein, 28 aa, Artificial Sequence
  Cyclic GFR-binding peptide
RLEPLTILYYDSANNVVEQLSNDMVVES

SEQ ID NO: 53932 - protein, 33 aa, Artificial Sequence; identical to SEQ ID NO: 12271
  Cyclic GFR-binding peptide
  MOD_RES (2), (3): Xaa is C or S

SEQ ID NO: 53933 - protein, 34 aa, Artificial Sequence
  Cyclic GFR-binding peptide
  MOD_RES (4), (5): Xaa is C or S
ASPXXVSQDLSPISILFIIGKTPKIYKQYEMIVK

SEQ ID NO: 53934 - protein, 28 aa, Artificial Sequence
  Cyclic GFR-binding peptide
VSQDLEPLPIVYYIGKTPKIEQLSNMIV

SEQ ID NO: 53935 - protein, 26 aa, Artificial Sequence
  Cyclic GFR-binding peptide
LSPISMLFIDENEKVVYKQYEDMVVE

SEQ ID NO: 53936 - protein, 38 aa, Artificial Sequence; identical to SEQ ID NO: 12273
  Cyclic GFR-binding peptide
  MOD_RES (3), (4), (35), (37): Xaa is C or S

SEQ ID NO: 53937 - protein, 31 aa, Artificial Sequence
  Cyclic GFR-binding peptide
  MOD_RES (5), (6): Xaa is C or S
VPKPXXAPTKLEPLPVVYYDDSSNVIEQLSN

SEQ ID NO: 53938 - protein, 28 aa, Artificial Sequence
  Cyclic GFR-binding peptide
  MOD_RES (1), (1): Xaa is C or S
XVPQALSPISILFIVGRKPKVYKQYEMI

SEQ ID NO: 53939 - protein, 35 aa, Artificial Sequence
  Cyclic GFR-binding peptide
  MOD_RES (5), (6): Xaa is C or S
VPKPXXAPTQLEPLTVLYYDDSSNVIEQLSNNMVV

SEQ ID NO: 53940 - protein, 34 aa, Artificial Sequence; identical to SEQ ID NO: 12277
  Cyclic GFR-binding peptide
  MOD_RES (3), (4): Xaa is C or S

SEQ ID NO: 53941 - protein, 23 aa, Artificial Sequence
  Cyclic GFR-binding peptide
EPLTVLYYDDSSNVIEQLSNNMV

SEQ ID NO: 53942 - protein, 26 aa, Artificial Sequence
  Cyclic GFR-binding peptide
PTRLNAISILYFDSANNVVLKKYRDM

SEQ ID NO: 53943 - protein, 36 aa, Artificial Sequence
  Cyclic GFR-binding peptide
  MOD_RES (6), (7): Xaa is C or S
TVPKPXXAPTQLSPISVLFIDDSSNVIYKQYENMVV

SEQ ID NO: 53944 - protein, 36 aa, Artificial Sequence; identical to SEQ ID NO: 12280
  Cyclic GFR-binding peptide
  MOD_RES (5), (6): Xaa is C or S

SEQ ID NO: 53945 - protein, 28 aa, Artificial Sequence
  Cyclic GFR-binding peptide
  MOD_RES (1), (1): Xaa is C or S
XVPTRLEPLTILYYDSANNVVEQLSNDM

SEQ ID NO: 53946 - protein, 37 aa, Artificial Sequence; identical to SEQ ID NO: 12281
  Cyclic GFR-binding peptide
  MOD_RES (3), (4), (36): Xaa is C or S

SEQ ID NO: 53947 - protein, 33 aa, Artificial Sequence
  Cyclic GFR-binding peptide
  MOD_RES (5), (6): Xaa is C or S
TPPTXXVPTRLSAISILYLDSANNVVLKNYQDM

SEQ ID NO: 53948 - protein, 34 aa, Artificial Sequence; identical to SEQ ID NO: 12283
  Cyclic GFR-binding peptide
  MOD_RES (32), (34): Xaa is C or S

SEQ ID NO: 53949 - protein, 27 aa, Artificial Sequence
  Cyclic GFR-binding peptide
DLSPISILFIIGKTPKIYKQYEMIVKS

SEQ ID NO: 53950 - protein, 35 aa, Artificial Sequence; identical to SEQ ID NO: 12287
  Cyclic GFR-binding peptide
  MOD_RES (5), (5): Xaa is C or S

SEQ ID NO: 53951 - protein, 30 aa, Artificial Sequence; identical to SEQ ID NO: 1085
  Cyclic GFR-binding peptide

SEQ ID NO: 53952 - protein, 35 aa, Artificial Sequence; identical to SEQ ID NO: 12288
  Cyclic GFR-binding peptide
  MOD_RES (32), (34): Xaa is C or S

SEQ ID NO: 53953 - protein, 33 aa, Artificial Sequence
  Cyclic GFR-binding peptide
  MOD_RES (5), (5): Xaa is C or S
TKPTXAPTKLEPLTVLYYDDSSNVIEQLSNNMV

SEQ ID NO: 53954 - protein, 30 aa, Artificial Sequence
  Cyclic GFR-binding peptide
  MOD_RES (4), (5): Xaa is C or S
PPTXXVPTRLEPLPIVYYDSANNVVEQLSN

SEQ ID NO: 53955 - protein, 31 aa, Artificial Sequence
  Cyclic GFR-binding peptide
  MOD_RES (28), (30): Xaa is C or S
LSPISMLFIDENEKVVYKQYEDMVVEGXGXR

SEQ ID NO: 53956 - protein, 32 aa, Artificial Sequence
  Cyclic GFR-binding peptide
  MOD_RES (4), (5): Xaa is C or S
PPTXXVPTRLEPLTILYYDSANNVVEQLSNDM

SEQ ID NO: 53957 - protein, 39 aa, Artificial Sequence; identical to SEQ ID NO: 12296
  Cyclic GFR-binding peptide
  MOD_RES (6), (7), (38): Xaa is C or S

SEQ ID NO: 53958 - protein, 28 aa, Artificial Sequence
  Cyclic GFR-binding peptide
VPQALEPLTILYYVGRKPKVEQLSNMIV

SEQ ID NO: 53959 - protein, 37 aa, Artificial Sequence; identical to SEQ ID NO: 12297
  Cyclic GFR-binding peptide
  MOD_RES (4), (5), (36): Xaa is C or S

SEQ ID NO: 53960 - protein, 25 aa, Artificial Sequence
  Cyclic GFR-binding peptide
TQLEPLTVLYYDDSSNVIEQLSNNM

SEQ ID NO: 53961 - protein, 29 aa, Artificial Sequence
  Cyclic GFR-binding peptide
  MOD_RES (3), (4): Xaa is C or S
SPXXVSQDLEPLPIVYYIGKTPKIEQLSN

SEQ ID NO: 53962 - protein, 24 aa, Artificial Sequence
  Cyclic GFR-binding peptide
RLSAISILYLDSANNVVLKNYQDM

SEQ ID NO: 53963 - protein, 35 aa, Artificial Sequence; identical to SEQ ID NO: 12302
  Cyclic GFR-binding peptide
  MOD_RES (3), (4): Xaa is C or S

SEQ ID NO: 53964 - protein, 36 aa, Artificial Sequence
  Cyclic GFR-binding peptide
  MOD_RES (7), (7): Xaa is C or S
HVTKPTXAPTKLEPLPVVYYDDSSNVIEQLSNNMVV

SEQ ID NO: 53965 - protein, 33 aa, Artificial Sequence
  Cyclic GFR-binding peptide
  MOD_RES (30), (32): Xaa is C or S
TELSPISMLFIDEYDKVVYKQYEEMVVEGXGXR

SEQ ID NO: 53966 - protein, 28 aa, Artificial Sequence
  Cyclic GFR-binding peptide
  MOD_RES (1), (2): Xaa is C or S
XXVPTRLSAISILYLDSANNVVLKNYQD

SEQ ID NO: 53967 - protein, 36 aa, Artificial Sequence; identical to SEQ ID NO: 12303
  Cyclic GFR-binding peptide
  MOD_RES (5), (6): Xaa is C or S

SEQ ID NO: 53968 - protein, 36 aa, Artificial Sequence
  Cyclic GFR-binding peptide
  MOD_RES (6), (7): Xaa is C or S
SIPKAXXVPTELSPISMLFIDEYDKVVYKQYEEMVV

SEQ ID NO: 53969 - protein, 34 aa, Artificial Sequence
  Cyclic GFR-binding peptide
  MOD_RES (31), (33): Xaa is C or S
PTKLSPISVLFIDDSSNVIYKQYENMVVRSXGXH

SEQ ID NO: 53970 - protein, 33 aa, Artificial Sequence
  Cyclic GFR-binding peptide
  MOD_RES (6), (6): Xaa is C or S
VTKPTXAPTKLSPISVLFIDDSSNVIYKQYENM

SEQ ID NO: 53971 - protein, 38 aa, Artificial Sequence; identical to SEQ ID NO: 12304
  Cyclic GFR-binding peptide
  MOD_RES (6), (7): Xaa is C or S

SEQ ID NO: 53972 - protein, 25 aa, Artificial Sequence
  Cyclic GFR-binding peptide
LEPLTMLYYDEYDKVVEQLSNEMVV

SEQ ID NO: 53973 - protein, 41 aa, Artificial Sequence; identical to SEQ ID NO: 12305
  Cyclic GFR-binding peptide
  MOD_RES (6), (7), (38), (40): Xaa is C or S

SEQ ID NO: 53974 - protein, 28 aa, Artificial Sequence
  Cyclic GFR-binding peptide
VPTRLEPLTILYYDSANNVVEQLSNDMV

SEQ ID NO: 53975 - protein, 22 aa, Artificial Sequence
  Cyclic GFR-binding peptide
QLEPLPVVYYDDSSNVIEQLSN

SEQ ID NO: 53976 - protein, 32 aa, Artificial Sequence; identical to SEQ ID NO: 12307
  Cyclic GFR-binding peptide
  MOD_RES (32), (32): Xaa is C or S

SEQ ID NO: 53977 - protein, 32 aa, Artificial Sequence; identical to SEQ ID NO: 12308
  Cyclic GFR-binding peptide
  MOD_RES (1), (1): Xaa is C or S

SEQ ID NO: 53978 - protein, 29 aa, Artificial Sequence
  Cyclic GFR-binding peptide
PTQLEPLPVVYYDDSSNVIEQLSNNMVVR

SEQ ID NO: 53979 - protein, 39 aa, Artificial Sequence; identical to SEQ ID NO: 12310
  Cyclic GFR-binding peptide
  MOD_RES (3), (4), (36), (38): Xaa is C or S

SEQ ID NO: 53980 - protein, 31 aa, Artificial Sequence
  Cyclic GFR-binding peptide
  MOD_RES (3), (3): Xaa is C or S
PTXAPTKLEPLTVLYYDDSSNVIEQLSNNMV

SEQ ID NO: 53981 - protein, 24 aa, Artificial Sequence
  Cyclic GFR-binding peptide
LEPLPMVYYDENEKVVEQLSNDMV

SEQ ID NO: 53982 - protein, 25 aa, Artificial Sequence
  Cyclic GFR-binding peptide
VPTRLEPLTILYYDSANNVVEQLSN

SEQ ID NO: 53983 - protein, 32 aa, Artificial Sequence
  Cyclic GFR-binding peptide
  MOD_RES (2), (3): Xaa is C or S
TXXVPTRLEPLPIVYYDSANNVVEQLSNDMVV

SEQ ID NO: 53984 - protein, 38 aa, Artificial Sequence; identical to SEQ ID NO: 12311
  Cyclic GFR-binding peptide
  MOD_RES (2), (3), (35), (37): Xaa is C or S

SEQ ID NO: 53985 - protein, 40 aa, Artificial Sequence; identical to SEQ ID NO: 12312
  Cyclic GFR-binding peptide
  MOD_RES (4), (5), (37), (39): Xaa is C or S

SEQ ID NO: 53986 - protein, 29 aa, Artificial Sequence
  Cyclic GFR-binding peptide
SPISMLFIDENEKVVYKQYEAAAAAAAAA

SEQ ID NO: 53987 - protein, 36 aa, Artificial Sequence
  Cyclic GFR-binding peptide
  MOD_RES (6), (7): Xaa is C or S
STPPTXXVPTRLEPLPIVYYDSANNVVEQLSNDMVV

SEQ ID NO: 53988 - protein, 34 aa, Artificial Sequence; identical to SEQ ID NO: 12315
  Cyclic GFR-binding peptide
  MOD_RES (32), (34): Xaa is C or S

SEQ ID NO: 53989 - protein, 34 aa, Artificial Sequence; identical to SEQ ID NO: 12316
  Cyclic GFR-binding peptide
  MOD_RES (2), (3), (34): Xaa is C or S

SEQ ID NO: 53990 - protein, 36 aa, Artificial Sequence; identical to SEQ ID NO: 12317
  Cyclic GFR-binding peptide
  MOD_RES (2), (3), (34), (36): Xaa is C or S

SEQ ID NO: 53991 - protein, 42 aa, Artificial Sequence; identical to SEQ ID NO: 12318
  Cyclic GFR-binding peptide
  MOD_RES (6), (7), (39), (41): Xaa is C or S

SEQ ID NO: 53992 - protein, 27 aa, Artificial Sequence
  Cyclic GFR-binding peptide
  MOD_RES (1), (1): Xaa is C or S
XVPTELEPLTMLYYDEYDKVVEQLSNE

SEQ ID NO: 53993 - protein, 33 aa, Artificial Sequence
  Cyclic GFR-binding peptide
  MOD_RES (30), (32): Xaa is C or S
TRLEPLPIVYYDSANNVVEQLSNDMVVESXGXR

SEQ ID NO: 53994 - protein, 37 aa, Artificial Sequence; identical to SEQ ID NO: 12321
  Cyclic GFR-binding peptide
  MOD_RES (7), (7): Xaa is C or S

SEQ ID NO: 53995 - protein, 20 aa, Artificial Sequence
  Cyclic GFR-binding peptide
EPLPVVYYDDSSNVIEQLSN

SEQ ID NO: 53996 - protein, 38 aa, Artificial Sequence; identical to SEQ ID NO: 12322
  Cyclic GFR-binding peptide
  MOD_RES (2), (3), (35), (37): Xaa is C or S

SEQ ID NO: 53997 - protein, 29 aa, Artificial Sequence
  Cyclic GFR-binding peptide
  MOD_RES (1), (1): Xaa is C or S
XAPTQLEPLPVVYYDDSSNVIEQLSNNMV

SEQ ID NO: 53998 - protein, 23 aa, Artificial Sequence
  Cyclic GFR-binding peptide
DLSPISILFIVGRTPKVYKQYEM

SEQ ID NO: 53999 - protein, 38 aa, Artificial Sequence; identical to SEQ ID NO: 12323
  Cyclic GFR-binding peptide
  MOD_RES (6), (7): Xaa is C or S

SEQ ID NO: 54000 - protein, 27 aa, Artificial Sequence
  Cyclic GFR-binding peptide
  MOD_RES (2), (2): Xaa is C or S
TXAPTKLEPLPVVYYDDSSNVIEQLSN

SEQ ID NO: 54001 - protein, 31 aa, Artificial Sequence; identical to SEQ ID NO: 12324
  Cyclic GFR-binding peptide

SEQ ID NO: 54002 - protein, 32 aa, Artificial Sequence
  Cyclic GFR-binding peptide
  MOD_RES (6), (7): Xaa is C or S
YVPKPXXAPTKLEPLTVLYYDDSSNVIEQLSN

SEQ ID NO: 54003 - protein, 32 aa, Artificial Sequence
  Cyclic GFR-binding peptide
  MOD_RES (2), (3): Xaa is C or S
PXXAPTQLSPISVLFIDDSSNVIYKQYENMVV

SEQ ID NO: 54004 - protein, 20 aa, Artificial Sequence
  Cyclic GFR-binding peptide
EPLTILYYDSANNVVEQLSN

SEQ ID NO: 54005 - protein, 36 aa, Artificial Sequence; identical to SEQ ID NO: 12326
  Cyclic GFR-binding peptide
  MOD_RES (3), (4), (36): Xaa is C or S

SEQ ID NO: 54006 - protein, 25 aa, Artificial Sequence
  Cyclic GFR-binding peptide
ALEPLTILYYVGRKPKVEQLSNMIV

SEQ ID NO: 54007 - protein, 30 aa, Artificial Sequence
  Cyclic GFR-binding peptide
  MOD_RES (4), (5): Xaa is C or S
PKAXXVPTELEPLTMLYYDENEKVVEQLSN

SEQ ID NO: 54008 - protein, 36 aa, Artificial Sequence; identical to SEQ ID NO: 12330
  Cyclic GFR-binding peptide
  MOD_RES (2), (34), (36): Xaa is C or S

SEQ ID NO: 54009 - protein, 24 aa, Artificial Sequence
  Cyclic GFR-binding peptide
KLEPLPVVYYDDSSNVIEQLSNNM

SEQ ID NO: 54010 - protein, 33 aa, Artificial Sequence
  Cyclic GFR-binding peptide
  MOD_RES (4), (5): Xaa is C or S
PKAXXVPTELEPLPMVYYDENEKVVEQLSNDMV

SEQ ID NO: 54011 - protein, 29 aa, Artificial Sequence
  Cyclic GFR-binding peptide
  MOD_RES (28), (28): Xaa is C or S
LEPLPVVYYDDSSNVIEQLSNNMVVRAXG

SEQ ID NO: 54012 - protein, 23 aa, Artificial Sequence
  Cyclic GFR-binding peptide
DLEPLPIVYYIGKTPKIEQLSNM

SEQ ID NO: 54013 - protein, 33 aa, Artificial Sequence
  Cyclic GFR-binding peptide
  MOD_RES (5), (6): Xaa is C or S
TPPTXXVPTRLEPLPIVYYDSANNVVEQLSNDM

SEQ ID NO: 54014 - protein, 32 aa, Artificial Sequence
  Cyclic GFR-binding peptide
  MOD_RES (31), (31): Xaa is C or S
PTRLEPLTILYYDSANNVVEQLSNDMVVESXG

SEQ ID NO: 54015 - protein, 32 aa, Artificial Sequence
  Cyclic GFR-binding peptide
  MOD_RES (3), (4): Xaa is C or S
SPXXVSQDLEPLPIVYYIGKTPKIEQLSNMIV

SEQ ID NO: 54016 - protein, 32 aa, Artificial Sequence
  Cyclic GFR-binding peptide
  MOD_RES (29), (31): Xaa is C or S
QLSPISVLFIDDSSNVIYKQYENMVVRAXGXH

SEQ ID NO: 54017 - protein, 37 aa, Artificial Sequence; identical to SEQ ID NO: 12332
  Cyclic GFR-binding peptide
  MOD_RES (1), (2), (34), (36): Xaa is C or S

SEQ ID NO: 54018 - protein, 31 aa, Artificial Sequence; identical to SEQ ID NO: 12333
  Cyclic GFR-binding peptide
  MOD_RES (1), (1): Xaa is C or S

SEQ ID NO: 54019 - protein, 37 aa, Artificial Sequence; identical to SEQ ID NO: 12334
  Cyclic GFR-binding peptide
  MOD_RES (2), (3), (34), (36): Xaa is C or S

SEQ ID NO: 54020 - protein, 24 aa, Artificial Sequence
  Cyclic GFR-binding peptide
LEPLPIVYYVGRTPKVEQLSNMVV

SEQ ID NO: 54021 - protein, 27 aa, Artificial Sequence
  Cyclic GFR-binding peptide
VPTELEPLPMVYYDEYDKVVEQLSNEM

SEQ ID NO: 54022 - protein, 37 aa, Artificial Sequence; identical to SEQ ID NO: 12335
  Cyclic GFR-binding peptide
  MOD_RES (3), (4), (36): Xaa is C or S

SEQ ID NO: 54023 - protein, 31 aa, Artificial Sequence
  Cyclic GFR-binding peptide
  MOD_RES (1), (2): Xaa is C or S
XXVPTRLSAISILYLDSANNVVLKNYQDMVV

SEQ ID NO: 54024 - protein, 30 aa, Artificial Sequence; identical to SEQ ID NO: 12336
  Cyclic GFR-binding peptide

SEQ ID NO: 54025 - protein, 36 aa, Artificial Sequence; identical to SEQ ID NO: 12337
  Cyclic GFR-binding peptide
  MOD_RES (1), (2), (34), (36): Xaa is C or S

SEQ ID NO: 54026 - protein, 32 aa, Artificial Sequence
  Cyclic GFR-binding peptide
  MOD_RES (5), (6): Xaa is C or S
SASPXXVPQDLEPLPIVYYVGRTPKVEQLSNM

SEQ ID NO: 54027 - protein, 37 aa, Artificial Sequence; identical to SEQ ID NO: 12339
  Cyclic GFR-binding peptide
  MOD_RES (3), (4), (36): Xaa is C or S

SEQ ID NO: 54028 - protein, 38 aa, Artificial Sequence; identical to SEQ ID NO: 12342
  Cyclic GFR-binding peptide
  MOD_RES (6), (7), (38): Xaa is C or S

SEQ ID NO: 54029 - protein, 26 aa, Artificial Sequence
  Cyclic GFR-binding peptide
TELEPLTMLYYDENEKVVEQLSNDMV

SEQ ID NO: 54030 - protein, 28 aa, Artificial Sequence
  Cyclic GFR-binding peptide
  MOD_RES (3), (3): Xaa is C or S
PTXAPTKLEPLPVVYYDDSSNVIEQLSN

SEQ ID NO: 54031 - protein, 32 aa, Artificial Sequence
  Cyclic GFR-binding peptide
  MOD_RES (3), (4): Xaa is C or S
KPXXAPTKLSPISVLFIDDSSNVIYKQYENMV

SEQ ID NO: 54032 - protein, 29 aa, Artificial Sequence
  Cyclic GFR-binding peptide
  MOD_RES (26), (28): Xaa is C or S
EPLTILYYVGRKPKVEQLSNMIVRSXKXS

SEQ ID NO: 54033 - protein, 32 aa, Artificial Sequence
  Cyclic GFR-binding peptide
  MOD_RES (4), (4): Xaa is C or S
KPTXAPTKLSPISVLFIDDSSNVIYKQYENMV

SEQ ID NO: 54034 - protein, 30 aa, Artificial Sequence
  Cyclic GFR-binding peptide
  MOD_RES (2), (3): Xaa is C or S
PXXAPTQLEPLPVVYYDDSSNVIEQLSNNM

SEQ ID NO: 54035 - protein, 31 aa, Artificial Sequence; identical to SEQ ID NO: 12344
  Cyclic GFR-binding peptide
  MOD_RES (1), (1): Xaa is C or S

SEQ ID NO: 54036 - protein, 38 aa, Artificial Sequence; identical to SEQ ID NO: 12345
  Cyclic GFR-binding peptide
  MOD_RES (6), (7): Xaa is C or S

SEQ ID NO: 54037 - protein, 31 aa, Artificial Sequence
  Cyclic GFR-binding peptide
  MOD_RES (29), (31): Xaa is C or S
QALSPISILFIVGRKPKVYKQYEMIVRSXKX

SEQ ID NO: 54038 - protein, 27 aa, Artificial Sequence
  Cyclic GFR-binding peptide
  MOD_RES (1), (2): Xaa is C or S
XXAPTKLEPLPVVYYDDSSNVIEQLSN

SEQ ID NO: 54039 - protein, 36 aa, Artificial Sequence; identical to SEQ ID NO: 12347
  Cyclic GFR-binding peptide
  MOD_RES (3), (4), (36): Xaa is C or S

SEQ ID NO: 54040 - protein, 25 aa, Artificial Sequence
  Cyclic GFR-binding peptide
LSPISILFIVGRKPKVYKQYEMIVR

SEQ ID NO: 54041 - protein, 30 aa, Artificial Sequence
  Cyclic GFR-binding peptide
  MOD_RES (29), (29): Xaa is C or S
ELEPLTMLYYDEYDKVVEQLSNEMVVEGXG

SEQ ID NO: 54042 - protein, 28 aa, Artificial Sequence
  Cyclic GFR-binding peptide
  MOD_RES (2), (3): Xaa is C or S
TXXVPTRLEPLTILYYDSANNVVEQLSN

SEQ ID NO: 54043 - protein, 35 aa, Artificial Sequence
  Cyclic GFR-binding peptide
  MOD_RES (5), (6): Xaa is C or S
IPKAXXVPTELEPLPMVYYDEYDKVVEQLSNEMVV

SEQ ID NO: 54044 - protein, 26 aa, Artificial Sequence
  Cyclic GFR-binding peptide
  MOD_RES (1), (1): Xaa is C or S
XAPTQLEPLTVLYYDDSSNVIEQLSN

SEQ ID NO: 54045 - protein, 24 aa, Artificial Sequence
  Cyclic GFR-binding peptide
LSPISILFIVGRTPKVYKQYEMVV

SEQ ID NO: 54046 - protein, 34 aa, Artificial Sequence
  Cyclic GFR-binding peptide
  MOD_RES (6), (7): Xaa is C or S
STPPTXXVPTRLEPLTILYYDSANNVVEQLSNDM

SEQ ID NO: 54047 - protein, 31 aa, Artificial Sequence
  Cyclic GFR-binding peptide
  MOD_RES (30), (30): Xaa is C or S
TELSPISMLFIDENEKVVYKQYEDMVVEGXG

SEQ ID NO: 54048 - protein, 35 aa, Artificial Sequence; identical to SEQ ID NO: 12352
  Cyclic GFR-binding peptide
  MOD_RES (2), (3), (34): Xaa is C or S

SEQ ID NO: 54049 - protein, 38 aa, Artificial Sequence; identical to SEQ ID NO: 12351
  Cyclic GFR-binding peptide
  MOD_RES (3), (4), (36), (38): Xaa is C or S

SEQ ID NO: 54050 - protein, 33 aa, Artificial Sequence
  Cyclic GFR-binding peptide
  MOD_RES (3), (4): Xaa is C or S
KPXXAPTQLEPLTVLYYDDSSNVIEQLSNNMVV

SEQ ID NO: 54051 - protein, 36 aa, Artificial Sequence; identical to SEQ ID NO: 12353
  Cyclic GFR-binding peptide
  MOD_RES (1), (33), (35): Xaa is C or S

SEQ ID NO: 54052 - protein, 27 aa, Artificial Sequence
  Cyclic GFR-binding peptide
TRLEPLPIVYYDSANNVVEQLSNDMVV

SEQ ID NO: 54053 - protein, 35 aa, Artificial Sequence; identical to SEQ ID NO: 12354
  Cyclic GFR-binding peptide
  MOD_RES (2), (3), (35): Xaa is C or S

SEQ ID NO: 54054 - protein, 27 aa, Artificial Sequence
  Cyclic GFR-binding peptide
  MOD_RES (1), (1): Xaa is C or S
XVPTELSPISMLFIDENEKVVYKQYED

SEQ ID NO: 54055 - protein, 33 aa, Artificial Sequence
  Cyclic GFR-binding peptide
  MOD_RES (4), (4): Xaa is C or S
KPTXAPTKLSPISVLFIDDSSNVIYKQYENMVV

SEQ ID NO: 54056 - protein, 33 aa, Artificial Sequence; identical to SEQ ID NO: 12359
  Cyclic GFR-binding peptide
  MOD_RES (1), (2): Xaa is C or S

SEQ ID NO: 54057 - protein, 30 aa, Artificial Sequence
  Cyclic GFR-binding peptide
  MOD_RES (1), (1): Xaa is C or S
XVPTELSPISMLFIDENEKVVYKQYEDMVV

SEQ ID NO: 54058 - protein, 23 aa, Artificial Sequence
  Cyclic GFR-binding peptide
EPLTILYYDSANNVVEQLSNDMV

SEQ ID NO: 54059 - protein, 30 aa, Artificial Sequence
  Cyclic GFR-binding peptide
  MOD_RES (28), (30): Xaa is C or S
DLSPISILFIVGRTPKVYKQYEMVVKSXKX

SEQ ID NO: 54060 - protein, 31 aa, Artificial Sequence
  Cyclic GFR-binding peptide
  MOD_RES (4), (4): Xaa is C or S
KPTXAPTKLSPISVLFIDDSSNVIYKQYENM

SEQ ID NO: 54061 - protein, 31 aa, Artificial Sequence
  Cyclic GFR-binding peptide
  MOD_RES (2), (3): Xaa is C or S
TXXVPTRLEPLPIVYYDSANNVVEQLSNDMV

SEQ ID NO: 54062 - protein, 36 aa, Artificial Sequence; identical to SEQ ID NO: 12363
  Cyclic GFR-binding peptide
  MOD_RES (3), (4), (35): Xaa is C or S

SEQ ID NO: 54063 - protein, 36 aa, Artificial Sequence; identical to SEQ ID NO: 12364
  Cyclic GFR-binding peptide
  MOD_RES (4), (5): Xaa is C or S

SEQ ID NO: 54064 - protein, 29 aa, Artificial Sequence
  Cyclic GFR-binding peptide
  MOD_RES (2), (3): Xaa is C or S
PXXVSQDLEPLPIVYYIGKTPKIEQLSNM

SEQ ID NO: 54065 - protein, 27 aa, Artificial Sequence
  Cyclic GFR-binding peptide
LEPLTMLYYDEYDKVVEQLSNEMVVEG

SEQ ID NO: 54066 - protein, 41 aa, Artificial Sequence; identical to SEQ ID NO: 12367
  Cyclic GFR-binding peptide
  MOD_RES (6), (7), (38), (40): Xaa is C or S

SEQ ID NO: 54067 - protein, 29 aa, Artificial Sequence
  Cyclic GFR-binding peptide
  MOD_RES (3), (4): Xaa is C or S
SPXXVPQDLEPLPIVYYVGRTPKVEQLSN

SEQ ID NO: 54068 - protein, 34 aa, Artificial Sequence; identical to SEQ ID NO: 12370
  Cyclic GFR-binding peptide
  MOD_RES (1), (2), (34): Xaa is C or S

SEQ ID NO: 54069 - protein, 41 aa, Artificial Sequence; identical to SEQ ID NO: 12371
  Cyclic GFR-binding peptide
  MOD_RES (5), (6), (38), (40): Xaa is C or S

SEQ ID NO: 54070 - protein, 23 aa, Artificial Sequence
  Cyclic GFR-binding peptide
LEPLPMVYYDEYDKVVEQLSNEM

SEQ ID NO: 54071 - protein, 33 aa, Artificial Sequence
  Cyclic GFR-binding peptide
  MOD_RES (31), (33): Xaa is C or S
PTELEPLPMVYYDENEKVVEQLSNDMVVEGXGX

SEQ ID NO: 54072 - protein, 29 aa, Artificial Sequence
  Cyclic GFR-binding peptide
  MOD_RES (1), (2): Xaa is C or S
XXVPQALEPLTILYYVGRKPKVEQLSNMI

SEQ ID NO: 54073 - protein, 37 aa, Artificial Sequence; identical to SEQ ID NO: 12373
  Cyclic GFR-binding peptide
  MOD_RES (1), (2), (34), (36): Xaa is C or S

SEQ ID NO: 54074 - protein, 29 aa, Artificial Sequence
  Cyclic GFR-binding peptide
TRLNAISILYFDSANNVVLKKYRDMVVES

SEQ ID NO: 54075 - protein, 36 aa, Artificial Sequence; identical to SEQ ID NO: 12374
  Cyclic GFR-binding peptide
  MOD_RES (4), (5): Xaa is C or S

SEQ ID NO: 54076 - protein, 30 aa, Artificial Sequence
  Cyclic GFR-binding peptide
  MOD_RES (2), (3): Xaa is C or S
PXXVPQDLEPLPIVYYVGRTPKVEQLSNMV

SEQ ID NO: 54077 - protein, 29 aa, Artificial Sequence
  Cyclic GFR-binding peptide
TKLEPLTVLYYDDSSNVIEQLSNNMVVRS

SEQ ID NO: 54078 - protein, 38 aa, Artificial Sequence; identical to SEQ ID NO: 12377
  Cyclic GFR-binding peptide
  MOD_RES (6), (7): Xaa is C or S

SEQ ID NO: 54079 - protein, 35 aa, Artificial Sequence
  Cyclic GFR-binding peptide
  MOD_RES (5), (6): Xaa is C or S
SASPXXVPQDLSPISILFIVGRTPKVYKQYEMVVK

SEQ ID NO: 54080 - protein, 32 aa, Artificial Sequence; identical to SEQ ID NO: 12378
  Cyclic GFR-binding peptide
  MOD_RES (1), (1): Xaa is C or S

SEQ ID NO: 54081 - protein, 29 aa, Artificial Sequence
  Cyclic GFR-binding peptide
TELSPISMLFIDEYDKVVYKQYEEMVVEG

SEQ ID NO: 54082 - protein, 26 aa, Artificial Sequence
  Cyclic GFR-binding peptide
PTELEPLPMVYYDEYDKVVEQLSNEM

SEQ ID NO: 54083 - protein, 38 aa, Artificial Sequence; identical to SEQ ID NO: 12380
  Cyclic GFR-binding peptide
  MOD_RES (3), (35), (37): Xaa is C or S

SEQ ID NO: 54084 - protein, 27 aa, Artificial Sequence
  Cyclic GFR-binding peptide
PTELEPLPMVYYDENEKVVEQLSNDMV

SEQ ID NO: 54085 - protein, 36 aa, Artificial Sequence; identical to SEQ ID NO: 12384
  Cyclic GFR-binding peptide
  MOD_RES (5), (6): Xaa is C or S

SEQ ID NO: 54086 - protein, 29 aa, Artificial Sequence
  Cyclic GFR-binding peptide
TQLEPLPVVYYDDSSNVIEQLSNNMVVRA

SEQ ID NO: 54087 - protein, 21 aa, Artificial Sequence
  Cyclic GFR-binding peptide
EPLTMLYYDEYDKVVEQLSNE

SEQ ID NO: 54088 - protein, 28 aa, Artificial Sequence
  Cyclic GFR-binding peptide
  MOD_RES (27), (27): Xaa is C or S
SPISVLFIDDSSNVIYKQYENMVVRAXG

SEQ ID NO: 54089 - protein, 26 aa, Artificial Sequence
  Cyclic GFR-binding peptide
PTQLSPISVLFIDDSSNVIYKQYENM

SEQ ID NO: 54090 - protein, 29 aa, Artificial Sequence
  Cyclic GFR-binding peptide
  MOD_RES (29), (29): Xaa is C or S
RLEPLTILYYDSANNVVEQLSNDMVVESX

SEQ ID NO: 54091 - protein, 40 aa, Artificial Sequence; identical to SEQ ID NO: 12387
  Cyclic GFR-binding peptide
  MOD_RES (6), (7), (38), (40): Xaa is C or S

SEQ ID NO: 54092 - protein, 34 aa, Artificial Sequence
  Cyclic GFR-binding peptide
  MOD_RES (5), (6): Xaa is C or S
SASPXXVPQDLEPLPIVYYVGRTPKVEQLSNMVV

SEQ ID NO: 54093 - protein, 31 aa, Artificial Sequence; identical to SEQ ID NO: 12388
  Cyclic GFR-binding peptide

SEQ ID NO: 54094 - protein, 26 aa, Artificial Sequence
  Cyclic GFR-binding peptide
NAISILYFDSANNVVLKKYRDMVVES

SEQ ID NO: 54095 - protein, 33 aa, Artificial Sequence; identical to SEQ ID NO: 12389
  Cyclic GFR-binding peptide
  MOD_RES (1), (32): Xaa is C or S

SEQ ID NO: 54096 - protein, 30 aa, Artificial Sequence
  Cyclic GFR-binding peptide
  MOD_RES (2), (3): Xaa is C or S
TXXVPTRLEPLTILYYDSANNVVEQLSNDM

SEQ ID NO: 54097 - protein, 36 aa, Artificial Sequence; identical to SEQ ID NO: 12391
  Cyclic GFR-binding peptide
  MOD_RES (2), (34), (36): Xaa is C or S

SEQ ID NO: 54098 - protein, 33 aa, Artificial Sequence
  Cyclic GFR-binding peptide
  MOD_RES (30), (32): Xaa is C or S
PQALSPISILFIVGRKPKVYKQYEMIVRSXKXS

SEQ ID NO: 54099 - protein, 38 aa, Artificial Sequence; identical to SEQ ID NO: 12393
  Cyclic GFR-binding peptide
  MOD_RES (3), (4), (36), (38): Xaa is C or S

SEQ ID NO: 54100 - protein, 26 aa, Artificial Sequence
  Cyclic GFR-binding peptide
  MOD_RES (26), (26): Xaa is C or S
SPISILFIVGRKPKVYKQYEMIVRSX

SEQ ID NO: 54101 - protein, 32 aa, Artificial Sequence; identical to SEQ ID NO: 12394
  Cyclic GFR-binding peptide
  MOD_RES (1), (2): Xaa is C or S

SEQ ID NO: 54102 - protein, 29 aa, Artificial Sequence
  Cyclic GFR-binding peptide
  MOD_RES (1), (2): Xaa is C or S
XXAPTQLSPISVLFIDDSSNVIYKQYENM

SEQ ID NO: 54103 - protein, 24 aa, Artificial Sequence
  Cyclic GFR-binding peptide
PTKLEPLPVVYYDDSSNVIEQLSN

SEQ ID NO: 54104 - protein, 26 aa, Artificial Sequence
  Cyclic GFR-binding peptide
VPTELEPLPMVYYDENEKVVEQLSND

SEQ ID NO: 54105 - protein, 28 aa, Artificial Sequence
  Cyclic GFR-binding peptide
  MOD_RES (28), (28): Xaa is C or S
DLSPISILFIIGKTPKIYKQYEMIVKSX

SEQ ID NO: 54106 - protein, 28 aa, Artificial Sequence
  Cyclic GFR-binding peptide
  MOD_RES (1), (1): Xaa is C or S
XVSQDLSPISILFIIGKTPKIYKQYEMI

SEQ ID NO: 54107 - protein, 38 aa, Artificial Sequence; identical to SEQ ID NO: 12395
  Cyclic GFR-binding peptide
  MOD_RES (3), (4), (35), (37): Xaa is C or S

SEQ ID NO: 54108 - protein, 38 aa, Artificial Sequence; identical to SEQ ID NO: 12396
  Cyclic GFR-binding peptide
  MOD_RES (6), (7): Xaa is C or S

SEQ ID NO: 54109 - protein, 35 aa, Artificial Sequence; identical to SEQ ID NO: 12397
  Cyclic GFR-binding peptide
  MOD_RES (2), (3), (34): Xaa is C or S

SEQ ID NO: 54110 - protein, 22 aa, Artificial Sequence
  Cyclic GFR-binding peptide
EPLPMVYYDENEKVVEQLSNDM

SEQ ID NO: 54111 - protein, 30 aa, Artificial Sequence
  Cyclic GFR-binding peptide
  MOD_RES (29), (29): Xaa is C or S
KLEPLTVLYYDDSSNVIEQLSNNMVVRSXG

SEQ ID NO: 54112 - protein, 27 aa, Artificial Sequence
  Cyclic GFR-binding peptide
  MOD_RES (1), (1): Xaa is C or S
XAPTQLEPLTVLYYDDSSNVIEQLSNN

SEQ ID NO: 54113 - protein, 34 aa, Artificial Sequence
  Cyclic GFR-binding peptide
  MOD_RES (7), (7): Xaa is C or S
HVTKPTXAPTKLSPISVLFIDDSSNVIYKQYENM

SEQ ID NO: 54114 - protein, 37 aa, Artificial Sequence; identical to SEQ ID NO: 12398
  Cyclic GFR-binding peptide
  MOD_RES (6), (6): Xaa is C or S

SEQ ID NO: 54115 - protein, 35 aa, Artificial Sequence; identical to SEQ ID NO: 12399
  Cyclic GFR-binding peptide
  MOD_RES (4), (5): Xaa is C or S

SEQ ID NO: 54116 - protein, 34 aa, Artificial Sequence
  Cyclic GFR-binding peptide
  MOD_RES (6), (7): Xaa is C or S
KIPKAXXVPTELSPISMLFIDENEKVVYKQYEDM

SEQ ID NO: 54117 - protein, 41 aa, Artificial Sequence; identical to SEQ ID NO: 12400
  Cyclic GFR-binding peptide
  MOD_RES (5), (6), (38), (40): Xaa is C or S

SEQ ID NO: 54118 - protein, 28 aa, Artificial Sequence
  Cyclic GFR-binding peptide
  MOD_RES (26), (28): Xaa is C or S
EPLPIVYYIGKTPKIEQLSNMIVKSXKX

SEQ ID NO: 54119 - protein, 22 aa, Artificial Sequence
  Cyclic GFR-binding peptide
SPISILFIVGRKPKVYKQYEMI

SEQ ID NO: 54120 - protein, 33 aa, Artificial Sequence
  Cyclic GFR-binding peptide
  MOD_RES (31), (33): Xaa is C or S
PTELEPLTMLYYDEYDKVVEQLSNEMVVEGXGX

SEQ ID NO: 54121 - protein, 28 aa, Artificial Sequence
  Cyclic GFR-binding peptide
  MOD_RES (26), (28): Xaa is C or S
SPISILFIIGKTPKIYKQYEMIVKSXKX

SEQ ID NO: 54122 - protein, 28 aa, Artificial Sequence
  Cyclic GFR-binding peptide
  MOD_RES (27), (27): Xaa is C or S
EPLPMVYYDEYDKVVEQLSNEMVVEGXG

SEQ ID NO: 54123 - protein, 40 aa, Artificial Sequence; identical to SEQ ID NO: 12402
  Cyclic GFR-binding peptide
  MOD_RES (6), (7), (39): Xaa is C or S

SEQ ID NO: 54124 - protein, 27 aa, Artificial Sequence
  Cyclic GFR-binding peptide
QDLEPLPIVYYVGRTPKVEQLSNMVVK

SEQ ID NO: 54125 - protein, 28 aa, Artificial Sequence
  Cyclic GFR-binding peptide
  MOD_RES (1), (1): Xaa is C or S
XVPQDLEPLPIVYYVGRTPKVEQLSNMV

SEQ ID NO: 54126 - protein, 40 aa, Artificial Sequence; identical to SEQ ID NO: 12405
  Cyclic GFR-binding peptide
  MOD_RES (6), (7), (39): Xaa is C or S

SEQ ID NO: 54127 - protein, 28 aa, Artificial Sequence
  Cyclic GFR-binding peptide
PTKLSPISVLFIDDSSNVIYKQYENMVV

SEQ ID NO: 54128 - protein, 33 aa, Artificial Sequence; identical to SEQ ID NO: 12406
  Cyclic GFR-binding peptide
  MOD_RES (1), (2): Xaa is C or S

SEQ ID NO: 54129 - protein, 31 aa, Artificial Sequence
  Cyclic GFR-binding peptide
  MOD_RES (3), (4): Xaa is C or S
KPXXAPTKLEPLPVVYYDDSSNVIEQLSNNM

SEQ ID NO: 54130 - protein, 28 aa, Artificial Sequence
  Cyclic GFR-binding peptide
  MOD_RES (1), (2): Xaa is C or S
XXAPTQLSPISVLFIDDSSNVIYKQYEN

SEQ ID NO: 54131 - protein, 33 aa, Artificial Sequence
  Cyclic GFR-binding peptide
  MOD_RES (3), (4): Xaa is C or S
SPXXVPQDLSPISILFIVGRTPKVYKQYEMVVK

SEQ ID NO: 54132 - protein, 24 aa, Artificial Sequence
  Cyclic GFR-binding peptide
LEPLTMLYYDEYDKVVEQLSNEMV

SEQ ID NO: 54133 - protein, 39 aa, Artificial Sequence; identical to SEQ ID NO: 12409
  Cyclic GFR-binding peptide
  MOD_RES (6), (7), (38): Xaa is C or S

SEQ ID NO: 54134 - protein, 21 aa, Artificial Sequence
  Cyclic GFR-binding peptide
SAISILYLDSANNVVLKNYQD

SEQ ID NO: 54135 - protein, 31 aa, Artificial Sequence
  Cyclic GFR-binding peptide
  MOD_RES (5), (6): Xaa is C or S
SASPXXVSQDLSPISILFIIGKTPKIYKQYE

SEQ ID NO: 54136 - protein, 28 aa, Artificial Sequence
  Cyclic GFR-binding peptide
PTQLEPLPVVYYDDSSNVIEQLSNNMVV

SEQ ID NO: 54137 - protein, 35 aa, Artificial Sequence; identical to SEQ ID NO: 12414
  Cyclic GFR-binding peptide
  MOD_RES (3), (4): Xaa is C or S

SEQ ID NO: 54138 - protein, 29 aa, Artificial Sequence
  Cyclic GFR-binding peptide
  MOD_RES (2), (2): Xaa is C or S
TXAPTKLEPLPVVYYDDSSNVIEQLSNNM

SEQ ID NO: 54139 - protein, 25 aa, Artificial Sequence
  Cyclic GFR-binding peptide
LEPLPIVYYVGRTPKVEQLSNMVVK

SEQ ID NO: 54140 - protein, 30 aa, Artificial Sequence
  Cyclic GFR-binding peptide
  MOD_RES (3), (4): Xaa is C or S
PTXXVPTRLSAISILYLDSANNVVLKNYQD

SEQ ID NO: 54141 - protein, 27 aa, Artificial Sequence
  Cyclic GFR-binding peptide
VPTRLNAISILYFDSANNVVLKKYRDM

SEQ ID NO: 54142 - protein, 36 aa, Artificial Sequence; identical to SEQ ID NO: 12416
  Cyclic GFR-binding peptide
  MOD_RES (1), (33), (35): Xaa is C or S

SEQ ID NO: 54143 - protein, 29 aa, Artificial Sequence
  Cyclic GFR-binding peptide
APTQLEPLTVLYYDDSSNVIEQLSNNMVV

SEQ ID NO: 54144 - protein, 37 aa, Artificial Sequence; identical to SEQ ID NO: 12417
  Cyclic GFR-binding peptide
  MOD_RES (2), (3), (35), (37): Xaa is C or S

SEQ ID NO: 54145 - protein, 29 aa, Artificial Sequence
  Cyclic GFR-binding peptide
PQDLEPLPIVYYVGRTPKVEQLSNMVVKS

SEQ ID NO: 54146 - protein, 34 aa, Artificial Sequence
  Cyclic GFR-binding peptide
  MOD_RES (4), (5): Xaa is C or S
PKAXXVPTELSPISMLFIDENEKVVYKQYEDMVV

SEQ ID NO: 54147 - protein, 32 aa, Artificial Sequence
  Cyclic GFR-binding peptide
  MOD_RES (4), (5): Xaa is C or S
PKAXXVPTELEPLTMLYYDEYDKVVEQLSNEM

SEQ ID NO: 54148 - protein, 35 aa, Artificial Sequence; identical to SEQ ID NO: 12419
  Cyclic GFR-binding peptide
  MOD_RES (4), (4): Xaa is C or S

SEQ ID NO: 54149 - protein, 36 aa, Artificial Sequence; identical to SEQ ID NO: 12421
  Cyclic GFR-binding peptide
  MOD_RES (1), (33), (35): Xaa is C or S

SEQ ID NO: 54150 - protein, 30 aa, Artificial Sequence
  Cyclic GFR-binding peptide
  MOD_RES (29), (29): Xaa is C or S
QLEPLPVVYYDDSSNVIEQLSNNMVVRAXG

SEQ ID NO: 54151 - protein, 31 aa, Artificial Sequence
  Cyclic GFR-binding peptide
  MOD_RES (3), (4): Xaa is C or S
KAXXVPTELSPISMLFIDENEKVVYKQYEDM

SEQ ID NO: 54152 - protein, 30 aa, Artificial Sequence
  Cyclic GFR-binding peptide
  MOD_RES (3), (4): Xaa is C or S
KPXXAPTQLSPISVLFIDDSSNVIYKQYEN

SEQ ID NO: 54153 - protein, 34 aa, Artificial Sequence
  Cyclic GFR-binding peptide
  MOD_RES (4), (5): Xaa is C or S
AAPXXVPQALEPLTILYYVGRKPKVEQLSNMIVR

SEQ ID NO: 54154 - protein, 34 aa, Artificial Sequence
  Cyclic GFR-binding peptide
  MOD_RES (5), (6): Xaa is C or S
TPPTXXVPTRLNAISILYFDSANNVVLKKYRDMV

SEQ ID NO: 54155 - protein, 29 aa, Artificial Sequence
  Cyclic GFR-binding peptide
  MOD_RES (1), (2): Xaa is C or S
XXVPQDLSPISILFIVGRTPKVYKQYEMV

SEQ ID NO: 54156 - protein, 23 aa, Artificial Sequence
  Cyclic GFR-binding peptide
NAISILYFDSANNVVLKKYRDMV

SEQ ID NO: 54157 - protein, 32 aa, Artificial Sequence
  Cyclic GFR-binding peptide
  MOD_RES (3), (4): Xaa is C or S
APXXVPQALEPLTILYYVGRKPKVEQLSNMIV

SEQ ID NO: 54158 - protein, 31 aa, Artificial Sequence
  Cyclic GFR-binding peptide
  MOD_RES (6), (6): Xaa is C or S
VTKPTXAPTKLEPLPVVYYDDSSNVIEQLSN

SEQ ID NO: 54159 - protein, 25 aa, Artificial Sequence
  Cyclic GFR-binding peptide
KLEPLPVVYYDDSSNVIEQLSNNMV

SEQ ID NO: 54160 - protein, 30 aa, Artificial Sequence
  Cyclic GFR-binding peptide
  MOD_RES (28), (30): Xaa is C or S
DLEPLPIVYYVGRTPKVEQLSNMVVKSXKX

SEQ ID NO: 54161 - protein, 36 aa, Artificial Sequence; identical to SEQ ID NO: 12425
  Cyclic GFR-binding peptide
  MOD_RES (3), (35): Xaa is C or S

SEQ ID NO: 54162 - protein, 39 aa, Artificial Sequence; identical to SEQ ID NO: 12426
  Cyclic GFR-binding peptide
  MOD_RES (5), (37), (39): Xaa is C or S

SEQ ID NO: 54163 - protein, 34 aa, Artificial Sequence; identical to SEQ ID NO: 12427
  Cyclic GFR-binding peptide
  MOD_RES (3), (4): Xaa is C or S

SEQ ID NO: 54164 - protein, 24 aa, Artificial Sequence
  Cyclic GFR-binding peptide
ELEPLTMLYYDEYDKVVEQLSNEM

SEQ ID NO: 54165 - protein, 30 aa, Artificial Sequence
  Cyclic GFR-binding peptide
  MOD_RES (4), (5): Xaa is C or S
PPTXXVPTRLNAISILYFDSANNVVLKKYR

SEQ ID NO: 54166 - protein, 36 aa, Artificial Sequence
  Cyclic GFR-binding peptide
  MOD_RES (6), (7): Xaa is C or S
STPPTXXVPTRLNAISILYFDSANNVVLKKYRDMVV

SEQ ID NO: 54167 - protein, 32 aa, Artificial Sequence
  Cyclic GFR-binding peptide
  MOD_RES (5), (6): Xaa is C or S
VPKPXXAPTQLSPISVLFIDDSSNVIYKQYEN

SEQ ID NO: 54168 - protein, 29 aa, Artificial Sequence
  Cyclic GFR-binding peptide
  MOD_RES (3), (4): Xaa is C or S
KAXXVPTELSPISMLFIDENEKVVYKQYE

SEQ ID NO: 54169 - protein, 29 aa, Artificial Sequence
  Cyclic GFR-binding peptide
  MOD_RES (27), (29): Xaa is C or S
LSPISILFIIGKTPKIYKQYEMIVKSXKX

SEQ ID NO: 54170 - protein, 33 aa, Artificial Sequence; identical to SEQ ID NO: 12431
  Cyclic GFR-binding peptide
  MOD_RES (1), (2), (33): Xaa is C or S

SEQ ID NO: 54171 - protein, 33 aa, Artificial Sequence; identical to SEQ ID NO: 12432
  Cyclic GFR-binding peptide
  MOD_RES (2), (3): Xaa is C or S

SEQ ID NO: 54172 - protein, 26 aa, Artificial Sequence
  Cyclic GFR-binding peptide
VPTELSPISMLFIDENEKVVYKQYED

SEQ ID NO: 54173 - protein, 28 aa, Artificial Sequence
  Cyclic GFR-binding peptide
  MOD_RES (2), (3): Xaa is C or S
PXXAPTKLEPLTVLYYDDSSNVIEQLSN

SEQ ID NO: 54174 - protein, 29 aa, Artificial Sequence
  Cyclic GFR-binding peptide
VPTELSPISMLFIDENEKVVYKQYEDMVV

SEQ ID NO: 54175 - protein, 30 aa, Artificial Sequence
  Cyclic GFR-binding peptide
  MOD_RES (1), (2): Xaa is C or S
XXVPTELEPLPMVYYDENEKVVEQLSNDMV

SEQ ID NO: 54176 - protein, 40 aa, Artificial Sequence; identical to SEQ ID NO: 12433
  Cyclic GFR-binding peptide
  MOD_RES (6), (38), (40): Xaa is C or S

SEQ ID NO: 54177 - protein, 38 aa, Artificial Sequence; identical to SEQ ID NO: 12434
  Cyclic GFR-binding peptide
  MOD_RES (5), (6), (38): Xaa is C or S

SEQ ID NO: 54178 - protein, 35 aa, Artificial Sequence
  Cyclic GFR-binding peptide
  MOD_RES (6), (7): Xaa is C or S
KIPKAXXVPTELEPLPMVYYDENEKVVEQLSNDMV

SEQ ID NO: 54179 - protein, 28 aa, Artificial Sequence
  Cyclic GFR-binding peptide
VPTELSPISMLFIDEYDKVVYKQYEEMV

SEQ ID NO: 54180 - protein, 29 aa, Artificial Sequence
  Cyclic GFR-binding peptide
  MOD_RES (1), (2): Xaa is C or S
XXVSQDLSPISILFIIGKTPKIYKQYEMI

SEQ ID NO: 54181 - protein, 36 aa, Artificial Sequence; identical to SEQ ID NO: 12436
  Cyclic GFR-binding peptide
  MOD_RES (4), (5): Xaa is C or S

SEQ ID NO: 54182 - protein, 31 aa, Artificial Sequence
  Cyclic GFR-binding peptide
  MOD_RES (2), (2): Xaa is C or S
TXAPTKLEPLTVLYYDDSSNVIEQLSNNMVV

SEQ ID NO: 54183 - protein, 25 aa, Artificial Sequence
  Cyclic GFR-binding peptide
LEPLTILYYDSANNVVEQLSNDMVV

SEQ ID NO: 54184 - protein, 30 aa, Artificial Sequence
  Cyclic GFR-binding peptide
  MOD_RES (28), (30): Xaa is C or S
LSPISVLFIDDSSNVIYKQYENMVVRAXGX

SEQ ID NO: 54185 - protein, 27 aa, Artificial Sequence
  Cyclic GFR-binding peptide
  MOD_RES (27), (27): Xaa is C or S
EPLTMLYYDEYDKVVEQLSNEMVVEGX

SEQ ID NO: 54186 - protein, 38 aa, Artificial Sequence; identical to SEQ ID NO: 12439
  Cyclic GFR-binding peptide
  MOD_RES (4), (5), (37): Xaa is C or S

SEQ ID NO: 54187 - protein, 22 aa, Artificial Sequence
  Cyclic GFR-binding peptide
EPLPVVYYDDSSNVIEQLSNNM

SEQ ID NO: 54188 - protein, 41 aa, Artificial Sequence; identical to SEQ ID NO: 12440
  Cyclic GFR-binding peptide
  MOD_RES (6), (7), (38), (40): Xaa is C or S

SEQ ID NO: 54189 - protein, 34 aa, Artificial Sequence
  Cyclic GFR-binding peptide
  MOD_RES (6), (7): Xaa is C or S
TVPKPXXAPTQLEPLPVVYYDDSSNVIEQLSNNM

SEQ ID NO: 54190 - protein, 33 aa, Artificial Sequence; identical to SEQ ID NO: 12441
  Cyclic GFR-binding peptide
  MOD_RES (1), (32): Xaa is C or S

SEQ ID NO: 54191 - protein, 31 aa, Artificial Sequence
  Cyclic GFR-binding peptide
  MOD_RES (4), (5): Xaa is C or S
PPTXXVPTRLEPLPIVYYDSANNVVEQLSND

SEQ ID NO: 54192 - protein, 30 aa, Artificial Sequence
  Cyclic GFR-binding peptide
  MOD_RES (27), (29): Xaa is C or S
EPLTILYYDSANNVVEQLSNDMVVESXGXR

SEQ ID NO: 54193 - protein, 30 aa, Artificial Sequence; identical to SEQ ID NO: 12443
  Cyclic GFR-binding peptide

SEQ ID NO: 54194 - protein, 39 aa, Artificial Sequence; identical to SEQ ID NO: 12444
  Cyclic GFR-binding peptide
  MOD_RES (5), (6), (37), (39): Xaa is C or S

SEQ ID NO: 54195 - protein, 41 aa, Artificial Sequence; identical to SEQ ID NO: 12446
  Cyclic GFR-binding peptide
  MOD_RES (5), (6), (38), (40): Xaa is C or S

SEQ ID NO: 54196 - protein, 34 aa, Artificial Sequence
  Cyclic GFR-binding peptide
  MOD_RES (5), (6): Xaa is C or S
VPKPXXAPTKLEPLTVLYYDDSSNVIEQLSNNMV

SEQ ID NO: 54197 - protein, 33 aa, Artificial Sequence
  Cyclic GFR-binding peptide
  MOD_RES (31), (33): Xaa is C or S
PTELSPISMLFIDENEKVVYKQYEDMVVEGXGX

SEQ ID NO: 54198 - protein, 32 aa, Artificial Sequence
  Cyclic GFR-binding peptide
  MOD_RES (5), (6): Xaa is C or S
SASPXXVPQDLSPISILFIVGRTPKVYKQYEM

SEQ ID NO: 54199 - protein, 36 aa, Artificial Sequence; identical to SEQ ID NO: 12450
  Cyclic GFR-binding peptide
  MOD_RES (1), (2), (34), (36): Xaa is C or S

SEQ ID NO: 54200 - protein, 36 aa, Artificial Sequence; identical to SEQ ID NO: 12451
  Cyclic GFR-binding peptide
  MOD_RES (5), (6): Xaa is C or S

SEQ ID NO: 54201 - protein, 28 aa, Artificial Sequence
  Cyclic GFR-binding peptide
  MOD_RES (1), (2): Xaa is C or S
XXAPTQLEPLPVVYYDDSSNVIEQLSNN

SEQ ID NO: 54202 - protein, 28 aa, Artificial Sequence
  Cyclic GFR-binding peptide
  MOD_RES (2), (3): Xaa is C or S
PXXAPTKLSPISVLFIDDSSNVIYKQYE

SEQ ID NO: 54203 - protein, 32 aa, Artificial Sequence
  Cyclic GFR-binding peptide
  MOD_RES (30), (32): Xaa is C or S
TELEPLTMLYYDENEKVVEQLSNDMVVEGXGX

SEQ ID NO: 54204 - protein, 27 aa, Artificial Sequence
  Cyclic GFR-binding peptide
DLEPLPIVYYVGRTPKVEQLSNMVVKS

SEQ ID NO: 54205 - protein, 23 aa, Artificial Sequence
  Cyclic GFR-binding peptide
SAISILYLDSANNVVLKNYQDMV

SEQ ID NO: 54206 - protein, 36 aa, Artificial Sequence; identical to SEQ ID NO: 12452
  Cyclic GFR-binding peptide
  MOD_RES (5), (6): Xaa is C or S

SEQ ID NO: 54207 - protein, 34 aa, Artificial Sequence; identical to SEQ ID NO: 12454
  Cyclic GFR-binding peptide
  MOD_RES (1), (33): Xaa is C or S

SEQ ID NO: 54208 - protein, 31 aa, Artificial Sequence
  Cyclic GFR-binding peptide
  MOD_RES (31), (31): Xaa is C or S
PTKLEPLPVVYYDDSSNVIEQLSNNMVVRSX

SEQ ID NO: 54209 - protein, 34 aa, Artificial Sequence; identical to SEQ ID NO: 12455
  Cyclic GFR-binding peptide
  MOD_RES (1), (33): Xaa is C or S

SEQ ID NO: 54210 - protein, 36 aa, Artificial Sequence; identical to SEQ ID NO: 12456
  Cyclic GFR-binding peptide
  MOD_RES (4), (5), (36): Xaa is C or S

SEQ ID NO: 54211 - protein, 32 aa, Artificial Sequence
  Cyclic GFR-binding peptide
  MOD_RES (5), (6): Xaa is C or S
IPKAXXVPTELEPLTMLYYDEYDKVVEQLSNE

SEQ ID NO: 54212 - protein, 20 aa, Artificial Sequence
  Cyclic GFR-binding peptide
SPISILFIVGRTPKVYKQYE

SEQ ID NO: 54213 - protein, 35 aa, Artificial Sequence; identical to SEQ ID NO: 12459
  Cyclic GFR-binding peptide
  MOD_RES (1), (32), (34): Xaa is C or S

SEQ ID NO: 54214 - protein, 27 aa, Artificial Sequence
  Cyclic GFR-binding peptide
  MOD_RES (1), (1): Xaa is C or S
XVPQDLSPISILFIVGRTPKVYKQYEM

SEQ ID NO: 54215 - protein, 29 aa, Artificial Sequence
  Cyclic GFR-binding peptide
  MOD_RES (1), (1): Xaa is C or S
XAPTKLEPLTVLYYDDSSNVIEQLSNNMV

SEQ ID NO: 54216 - protein, 27 aa, Artificial Sequence
  Cyclic GFR-binding peptide
  MOD_RES (27), (27): Xaa is C or S
EPLTVLYYDDSSNVIEQLSNNMVVRSX

SEQ ID NO: 54217 - protein, 34 aa, Artificial Sequence; identical to SEQ ID NO: 12461
  Cyclic GFR-binding peptide
  MOD_RES (3), (4): Xaa is C or S

SEQ ID NO: 54218 - protein, 31 aa, Artificial Sequence
  Cyclic GFR-binding peptide
  MOD_RES (1), (2): Xaa is C or S
XXAPTKLEPLTVLYYDDSSNVIEQLSNNMVV

SEQ ID NO: 54219 - protein, 39 aa, Artificial Sequence; identical to SEQ ID NO: 12465
  Cyclic GFR-binding peptide
  MOD_RES (5), (6), (38): Xaa is C or S

SEQ ID NO: 54220 - protein, 33 aa, Artificial Sequence
  Cyclic GFR-binding peptide
  MOD_RES (6), (7): Xaa is C or S
KIPKAXXVPTELEPLTMLYYDENEKVVEQLSND

SEQ ID NO: 54221 - protein, 25 aa, Artificial Sequence
  Cyclic GFR-binding peptide
PTQLEPLTVLYYDDSSNVIEQLSNN

SEQ ID NO: 54222 - protein, 35 aa, Artificial Sequence; identical to SEQ ID NO: 12466
  Cyclic GFR-binding peptide
  MOD_RES (1), (2), (34): Xaa is C or S

SEQ ID NO: 54223 - protein, 34 aa, Artificial Sequence; identical to SEQ ID NO: 12468
  Cyclic GFR-binding peptide
  MOD_RES (1), (2), (33): Xaa is C or S

SEQ ID NO: 54224 - protein, 26 aa, Artificial Sequence
  Cyclic GFR-binding peptide
LSPISMLFIDEYDKVVYKQYEEMVVE

SEQ ID NO: 54225 - protein, 28 aa, Artificial Sequence
  Cyclic GFR-binding peptide
  MOD_RES (27), (27): Xaa is C or S
LSPISILFIIGKTPKIYKQYEMIVKSXK

SEQ ID NO: 54226 - protein, 21 aa, Artificial Sequence
  Cyclic GFR-binding peptide
SPISVLFIDDSSNVIYKQYEN

SEQ ID NO: 54227 - protein, 26 aa, Artificial Sequence
  Cyclic GFR-binding peptide
DLSPISILFIVGRTPKVYKQYEMVVK

SEQ ID NO: 54228 - protein, 35 aa, Artificial Sequence
  Cyclic GFR-binding peptide
  MOD_RES (5), (6): Xaa is C or S
IPKAXXVPTELEPLTMLYYDEYDKVVEQLSNEMVV

SEQ ID NO: 54229 - protein, 31 aa, Artificial Sequence
  Cyclic GFR-binding peptide
  MOD_RES (1), (2): Xaa is C or S
XXVPTELEPLPMVYYDENEKVVEQLSNDMVV

SEQ ID NO: 54230 - protein, 28 aa, Artificial Sequence
  Cyclic GFR-binding peptide
APTQLEPLTVLYYDDSSNVIEQLSNNMV

SEQ ID NO: 54231 - protein, 34 aa, Artificial Sequence; identical to SEQ ID NO: 12470
  Cyclic GFR-binding peptide
  MOD_RES (3), (4): Xaa is C or S

SEQ ID NO: 54232 - protein, 29 aa, Artificial Sequence
  Cyclic GFR-binding peptide
  MOD_RES (29), (29): Xaa is C or S
ELEPLPMVYYDEYDKVVEQLSNEMVVEGX

SEQ ID NO: 54233 - protein, 33 aa, Artificial Sequence; identical to SEQ ID NO: 12471
  Cyclic GFR-binding peptide
  MOD_RES (1), (2): Xaa is C or S

SEQ ID NO: 54234 - protein, 27 aa, Artificial Sequence
  Cyclic GFR-binding peptide
  MOD_RES (27), (27): Xaa is C or S
LEPLPIVYYVGRTPKVEQLSNMVVKSX

SEQ ID NO: 54235 - protein, 22 aa, Artificial Sequence
  Cyclic GFR-binding peptide
KLSPISVLFIDDSSNVIYKQYE

SEQ ID NO: 54236 - protein, 32 aa, Artificial Sequence
  Cyclic GFR-binding peptide
  MOD_RES (2), (3): Xaa is C or S
TXXVPTRLEPLTILYYDSANNVVEQLSNDMVV

SEQ ID NO: 54237 - protein, 25 aa, Artificial Sequence
  Cyclic GFR-binding peptide
ELEPLPMVYYDENEKVVEQLSNDMV

SEQ ID NO: 54238 - protein, 27 aa, Artificial Sequence
  Cyclic GFR-binding peptide
PQDLEPLPIVYYVGRTPKVEQLSNMVV

SEQ ID NO: 54239 - protein, 30 aa, Artificial Sequence
  Cyclic GFR-binding peptide
  MOD_RES (29), (29): Xaa is C or S
QLSPISVLFIDDSSNVIYKQYENMVVRAXG

SEQ ID NO: 54240 - protein, 30 aa, Artificial Sequence
  Cyclic GFR-binding peptide
  MOD_RES (4), (5): Xaa is C or S
PKAXXVPTELSPISMLFIDENEKVVYKQYE

SEQ ID NO: 54241 - protein, 33 aa, Artificial Sequence; identical to SEQ ID NO: 12474
  Cyclic GFR-binding peptide
  MOD_RES (1), (32): Xaa is C or S

SEQ ID NO: 54242 - protein, 31 aa, Artificial Sequence
  Cyclic GFR-binding peptide
  MOD_RES (30), (30): Xaa is C or S
TELSPISMLFIDEYDKVVYKQYEEMVVEGXG

SEQ ID NO: 54243 - protein, 32 aa, Artificial Sequence
  Cyclic GFR-binding peptide
  MOD_RES (4), (5): Xaa is C or S
PKPXXAPTQLEPLPVVYYDDSSNVIEQLSNNM

SEQ ID NO: 54244 - protein, 38 aa, Artificial Sequence; identical to SEQ ID NO: 12476
  Cyclic GFR-binding peptide
  MOD_RES (3), (35), (37): Xaa is C or S

SEQ ID NO: 54245 - protein, 35 aa, Artificial Sequence; identical to SEQ ID NO: 12477
  Cyclic GFR-binding peptide
  MOD_RES (4), (4): Xaa is C or S

SEQ ID NO: 54246 - protein, 24 aa, Artificial Sequence
  Cyclic GFR-binding peptide
QLEPLTVLYYDDSSNVIEQLSNNM

SEQ ID NO: 54247 - protein, 35 aa, Artificial Sequence; identical to SEQ ID NO: 12478
  Cyclic GFR-binding peptide
  MOD_RES (1), (33), (35): Xaa is C or S

SEQ ID NO: 54248 - protein, 38 aa, Artificial Sequence; identical to SEQ ID NO: 12479
  Cyclic GFR-binding peptide
  MOD_RES (5), (6), (37): Xaa is C or S

SEQ ID NO: 54249 - protein, 29 aa, Artificial Sequence
  Cyclic GFR-binding peptide
  MOD_RES (1), (2): Xaa is C or S
XXVPQDLEPLPIVYYVGRTPKVEQLSNMV

SEQ ID NO: 54250 - protein, 23 aa, Artificial Sequence
  Cyclic GFR-binding peptide
LEPLTVLYYDDSSNVIEQLSNNM

SEQ ID NO: 54251 - protein, 30 aa, Artificial Sequence
  Cyclic GFR-binding peptide
  MOD_RES (27), (29): Xaa is C or S
EPLPMVYYDENEKVVEQLSNDMVVEGXGXR

SEQ ID NO: 54252 - protein, 31 aa, Artificial Sequence
  Cyclic GFR-binding peptide
  MOD_RES (1), (2): Xaa is C or S
XXAPTKLEPLPVVYYDDSSNVIEQLSNNMVV

SEQ ID NO: 54253 - protein, 31 aa, Artificial Sequence
  Cyclic GFR-binding peptide
  MOD_RES (30), (30): Xaa is C or S
TKLSPISVLFIDDSSNVIYKQYENMVVRSXG

SEQ ID NO: 54254 - protein, 22 aa, Artificial Sequence
  Cyclic GFR-binding peptide
LEPLTILYYDSANNVVEQLSND

SEQ ID NO: 54255 - protein, 37 aa, Artificial Sequence; identical to SEQ ID NO: 12482
  Cyclic GFR-binding peptide
  MOD_RES (2), (3), (35), (37): Xaa is C or S

SEQ ID NO: 54256 - protein, 30 aa, Artificial Sequence
  Cyclic GFR-binding peptide
  MOD_RES (1), (2): Xaa is C or S
XXVPQALSPISILFIVGRKPKVYKQYEMIV

SEQ ID NO: 54257 - protein, 28 aa, Artificial Sequence
  Cyclic GFR-binding peptide
QDLSPISILFIIGKTPKIYKQYEMIVKS

SEQ ID NO: 54258 - protein, 33 aa, Artificial Sequence
  Cyclic GFR-binding peptide
  MOD_RES (6), (7): Xaa is C or S
KIPKAXXVPTELEPLPMVYYDENEKVVEQLSND

SEQ ID NO: 54259 - protein, 37 aa, Artificial Sequence; identical to SEQ ID NO: 12488
  Cyclic GFR-binding peptide
  MOD_RES (5), (6), (37): Xaa is C or S

SEQ ID NO: 54260 - protein, 27 aa, Artificial Sequence
  Cyclic GFR-binding peptide
  MOD_RES (27), (27): Xaa is C or S
NAISILYFDSANNVVLKKYRDMVVESX

SEQ ID NO: 54261 - protein, 37 aa, Artificial Sequence; identical to SEQ ID NO: 12489
  Cyclic GFR-binding peptide
  MOD_RES (6), (7): Xaa is C or S

SEQ ID NO: 54262 - protein, 38 aa, Artificial Sequence; identical to SEQ ID NO: 12491
  Cyclic GFR-binding peptide
  MOD_RES (3), (4), (36), (38): Xaa is C or S

SEQ ID NO: 54263 - protein, 22 aa, Artificial Sequence
  Cyclic GFR-binding peptide
LEPLPIVYYVGRTPKVEQLSNM

SEQ ID NO: 54264 - protein, 33 aa, Artificial Sequence
  Cyclic GFR-binding peptide
  MOD_RES (5), (6): Xaa is C or S
VPKPXXAPTKLEPLTVLYYDDSSNVIEQLSNNM

SEQ ID NO: 54265 - protein, 31 aa, Artificial Sequence
  Cyclic GFR-binding peptide
  MOD_RES (31), (31): Xaa is C or S
PTELEPLPMVYYDEYDKVVEQLSNEMVVEGX

SEQ ID NO: 54266 - protein, 28 aa, Artificial Sequence
  Cyclic GFR-binding peptide
  MOD_RES (1), (1): Xaa is C or S
XAPTQLEPLTVLYYDDSSNVIEQLSNNM

SEQ ID NO: 54267 - protein, 32 aa, Artificial Sequence
  Cyclic GFR-binding peptide
  MOD_RES (2), (3): Xaa is C or S
PXXVPQALEPLTILYYVGRKPKVEQLSNMIVR

SEQ ID NO: 54268 - protein, 36 aa, Artificial Sequence; identical to SEQ ID NO: 12495
  Cyclic GFR-binding peptide
  MOD_RES (4), (5): Xaa is C or S

SEQ ID NO: 54269 - protein, 32 aa, Artificial Sequence
  Cyclic GFR-binding peptide
  MOD_RES (7), (7): Xaa is C or S
HVTKPTXAPTKLEPLPVVYYDDSSNVIEQLSN

SEQ ID NO: 54270 - protein, 30 aa, Artificial Sequence
  Cyclic GFR-binding peptide
  MOD_RES (27), (29): Xaa is C or S
SPISMLFIDEYDKVVYKQYEEMVVEGXGXR

SEQ ID NO: 54271 - protein, 36 aa, Artificial Sequence; identical to SEQ ID NO: 12497
  Cyclic GFR-binding peptide
  MOD_RES (3), (4), (36): Xaa is C or S

SEQ ID NO: 54272 - protein, 25 aa, Artificial Sequence
  Cyclic GFR-binding peptide
TRLEPLPIVYYDSANNVVEQLSNDM

SEQ ID NO: 54273 - protein, 38 aa, Artificial Sequence; identical to SEQ ID NO: 12499
  Cyclic GFR-binding peptide
  MOD_RES (5), (6), (38): Xaa is C or S

SEQ ID NO: 54274 - protein, 31 aa, Artificial Sequence
  Cyclic GFR-binding peptide
  MOD_RES (28), (30): Xaa is C or S
LSAISILYLDSANNVVLKNYQDMVVESXGXR

SEQ ID NO: 54275 - protein, 22 aa, Artificial Sequence
  Cyclic GFR-binding peptide
DLSPISILFIVGRTPKVYKQYE

SEQ ID NO: 54276 - protein, 23 aa, Artificial Sequence
  Cyclic GFR-binding peptide
DLSPISILFIIGKTPKIYKQYEM

SEQ ID NO: 54277 - protein, 32 aa, Artificial Sequence; identical to SEQ ID NO: 12505
  Cyclic GFR-binding peptide
  MOD_RES (32), (32): Xaa is C or S

SEQ ID NO: 54278 - protein, 32 aa, Artificial Sequence
  Cyclic GFR-binding peptide
  MOD_RES (30), (32): Xaa is C or S
TQLEPLPVVYYDDSSNVIEQLSNNMVVRAXGX

SEQ ID NO: 54279 - protein, 33 aa, Artificial Sequence; identical to SEQ ID NO: 12508
  Cyclic GFR-binding peptide
  MOD_RES (2), (3): Xaa is C or S

SEQ ID NO: 54280 - protein, 24 aa, Artificial Sequence
  Cyclic GFR-binding peptide
QDLSPISILFIIGKTPKIYKQYEM

SEQ ID NO: 54281 - protein, 32 aa, Artificial Sequence
  Cyclic GFR-binding peptide
  MOD_RES (6), (7): Xaa is C or S
ASAAPXXVPQALSPISILFIVGRKPKVYKQYE

SEQ ID NO: 54282 - protein, 25 aa, Artificial Sequence
  Cyclic GFR-binding peptide
LEPLPMVYYDEYDKVVEQLSNEMVV

SEQ ID NO: 54283 - protein, 29 aa, Artificial Sequence
  Cyclic GFR-binding peptide
  MOD_RES (1), (1): Xaa is C or S
XVPQALSPISILFIVGRKPKVYKQYEMIV

SEQ ID NO: 54284 - protein, 25 aa, Artificial Sequence
  Cyclic GFR-binding peptide
TELSPISMLFIDEYDKVVYKQYEEM

SEQ ID NO: 54285 - protein, 39 aa, Artificial Sequence; identical to SEQ ID NO: 12509
  Cyclic GFR-binding peptide
  MOD_RES (3), (4), (36), (38): Xaa is C or S

SEQ ID NO: 54286 - protein, 34 aa, Artificial Sequence; identical to SEQ ID NO: 12510
  Cyclic GFR-binding peptide
  MOD_RES (3), (4): Xaa is C or S

SEQ ID NO: 54287 - protein, 36 aa, Artificial Sequence; identical to SEQ ID NO: 12511
  Cyclic GFR-binding peptide
  MOD_RES (3), (4), (36): Xaa is C or S

SEQ ID NO: 54288 - protein, 35 aa, Artificial Sequence; identical to SEQ ID NO: 12512
  Cyclic GFR-binding peptide
  MOD_RES (32), (34): Xaa is C or S

SEQ ID NO: 54289 - protein, 32 aa, Artificial Sequence; identical to SEQ ID NO: 12513
  Cyclic GFR-binding peptide
  MOD_RES (1), (2): Xaa is C or S

SEQ ID NO: 54290 - protein, 31 aa, Artificial Sequence
  Cyclic GFR-binding peptide
  MOD_RES (3), (4): Xaa is C or S
KAXXVPTELEPLPMVYYDENEKVVEQLSNDM

SEQ ID NO: 54291 - protein, 35 aa, Artificial Sequence
  Cyclic GFR-binding peptide
  MOD_RES (6), (7): Xaa is C or S
YVPKPXXAPTKLEPLPVVYYDDSSNVIEQLSNNMV

SEQ ID NO: 54292 - protein, 34 aa, Artificial Sequence; identical to SEQ ID NO: 12514
  Cyclic GFR-binding peptide
  MOD_RES (1), (2), (34): Xaa is C or S

SEQ ID NO: 54293 - protein, 30 aa, Artificial Sequence
  Cyclic GFR-binding peptide
  MOD_RES (27), (29): Xaa is C or S
NAISILYFDSANNVVLKKYRDMVVESXGXR

SEQ ID NO: 54294 - protein, 31 aa, Artificial Sequence; identical to SEQ ID NO: 12515
  Cyclic GFR-binding peptide
  MOD_RES (1), (1): Xaa is C or S

SEQ ID NO: 54295 - protein, 28 aa, Artificial Sequence
  Cyclic GFR-binding peptide
RLEPLPIVYYDSANNVVEQLSNDMVVES

SEQ ID NO: 54296 - protein, 34 aa, Artificial Sequence; identical to SEQ ID NO: 12516
  Cyclic GFR-binding peptide
  MOD_RES (4), (4): Xaa is C or S

SEQ ID NO: 54297 - protein, 35 aa, Artificial Sequence
  Cyclic GFR-binding peptide
  MOD_RES (6), (7): Xaa is C or S
STPPTXXVPTRLEPLTILYYDSANNVVEQLSNDMV

SEQ ID NO: 54298 - protein, 35 aa, Artificial Sequence; identical to SEQ ID NO: 12517
  Cyclic GFR-binding peptide
  MOD_RES (2), (3), (35): Xaa is C or S

SEQ ID NO: 54299 - protein, 39 aa, Artificial Sequence; identical to SEQ ID NO: 12519
  Cyclic GFR-binding peptide
  MOD_RES (4), (5), (37), (39): Xaa is C or S

SEQ ID NO: 54300 - protein, 32 aa, Artificial Sequence
  Cyclic GFR-binding peptide
  MOD_RES (2), (3): Xaa is C or S
PXXAPTQLEPLPVVYYDDSSNVIEQLSNNMVV

SEQ ID NO: 54301 - protein, 32 aa, Artificial Sequence
  Cyclic GFR-binding peptide
  MOD_RES (5), (6): Xaa is C or S
IPKAXXVPTELEPLPMVYYDEYDKVVEQLSNE

SEQ ID NO: 54302 - protein, 28 aa, Artificial Sequence
  Cyclic GFR-binding peptide
  MOD_RES (28), (28): Xaa is C or S
LSAISILYLDSANNVVLKNYQDMVVESX

SEQ ID NO: 54303 - protein, 34 aa, Artificial Sequence
  Cyclic GFR-binding peptide
  MOD_RES (4), (5): Xaa is C or S
PKAXXVPTELEPLPMVYYDENEKVVEQLSNDMVV

SEQ ID NO: 54304 - protein, 26 aa, Artificial Sequence
  Cyclic GFR-binding peptide
QLEPLTVLYYDDSSNVIEQLSNNMVV

SEQ ID NO: 54305 - protein, 29 aa, Artificial Sequence
  Cyclic GFR-binding peptide
  MOD_RES (1), (1): Xaa is C or S
XVPTELEPLTMLYYDENEKVVEQLSNDMV

SEQ ID NO: 54306 - protein, 37 aa, Artificial Sequence; identical to SEQ ID NO: 12524
  Cyclic GFR-binding peptide
  MOD_RES (1), (2), (34), (36): Xaa is C or S

SEQ ID NO: 54307 - protein, 31 aa, Artificial Sequence
  Cyclic GFR-binding peptide
  MOD_RES (5), (6): Xaa is C or S
TPPTXXVPTRLEPLPIVYYDSANNVVEQLSN

SEQ ID NO: 54308 - protein, 37 aa, Artificial Sequence; identical to SEQ ID NO: 12525
  Cyclic GFR-binding peptide
  MOD_RES (3), (4), (36): Xaa is C or S

SEQ ID NO: 54309 - protein, 36 aa, Artificial Sequence; identical to SEQ ID NO: 12526
  Cyclic GFR-binding peptide
  MOD_RES (4), (5), (36): Xaa is C or S

SEQ ID NO: 54310 - protein, 29 aa, Artificial Sequence
  Cyclic GFR-binding peptide
  MOD_RES (2), (3): Xaa is C or S
PXXAPTQLEPLTVLYYDDSSNVIEQLSNN

SEQ ID NO: 54311 - protein, 31 aa, Artificial Sequence
  Cyclic GFR-binding peptide
  MOD_RES (29), (31): Xaa is C or S
QALEPLTILYYVGRKPKVEQLSNMIVRSXKX

SEQ ID NO: 54312 - protein, 28 aa, Artificial Sequence
  Cyclic GFR-binding peptide
  MOD_RES (1), (1): Xaa is C or S
XVSQDLEPLPIVYYIGKTPKIEQLSNMI

SEQ ID NO: 54313 - protein, 31 aa, Artificial Sequence
  Cyclic GFR-binding peptide
  MOD_RES (1), (2): Xaa is C or S
XXVPTELSPISMLFIDENEKVVYKQYEDMVV

SEQ ID NO: 54314 - protein, 36 aa, Artificial Sequence; identical to SEQ ID NO: 12529
  Cyclic GFR-binding peptide
  MOD_RES (4), (5): Xaa is C or S

SEQ ID NO: 54315 - protein, 34 aa, Artificial Sequence
  Cyclic GFR-binding peptide
  MOD_RES (5), (5): Xaa is C or S
TKPTXAPTKLEPLTVLYYDDSSNVIEQLSNNMVV

SEQ ID NO: 54316 - protein, 30 aa, Artificial Sequence
  Cyclic GFR-binding peptide
  MOD_RES (1), (2): Xaa is C or S
XXAPTKLEPLPVVYYDDSSNVIEQLSNNMV

SEQ ID NO: 54317 - protein, 34 aa, Artificial Sequence; identical to SEQ ID NO: 12530
  Cyclic GFR-binding peptide
  MOD_RES (3), (4): Xaa is C or S

SEQ ID NO: 54318 - protein, 20 aa, Artificial Sequence
  Cyclic GFR-binding peptide
EPLTMLYYDENEKVVEQLSN

SEQ ID NO: 54319 - protein, 34 aa, Artificial Sequence; identical to SEQ ID NO: 12532
  Cyclic GFR-binding peptide
  MOD_RES (3), (4): Xaa is C or S

SEQ ID NO: 54320 - protein, 32 aa, Artificial Sequence
  Cyclic GFR-binding peptide
  MOD_RES (29), (31): Xaa is C or S
QLEPLPVVYYDDSSNVIEQLSNNMVVRAXGXH

SEQ ID NO: 54321 - protein, 33 aa, Artificial Sequence; identical to SEQ ID NO: 12534
  Cyclic GFR-binding peptide
  MOD_RES (1), (33): Xaa is C or S

SEQ ID NO: 54322 - protein, 36 aa, Artificial Sequence; identical to SEQ ID NO: 12535
  Cyclic GFR-binding peptide
  MOD_RES (3), (4), (36): Xaa is C or S

SEQ ID NO: 54323 - protein, 34 aa, Artificial Sequence; identical to SEQ ID NO: 12536
  Cyclic GFR-binding peptide
  MOD_RES (3), (4): Xaa is C or S

SEQ ID NO: 54324 - protein, 36 aa, Artificial Sequence; identical to SEQ ID NO: 12537
  Cyclic GFR-binding peptide
  MOD_RES (5), (6): Xaa is C or S

SEQ ID NO: 54325 - protein, 28 aa, Artificial Sequence
  Cyclic GFR-binding peptide
  MOD_RES (1), (2): Xaa is C or S
XXAPTKLEPLPVVYYDDSSNVIEQLSNN

SEQ ID NO: 54326 - protein, 36 aa, Artificial Sequence; identical to SEQ ID NO: 12539
  Cyclic GFR-binding peptide
  MOD_RES (2), (3), (35): Xaa is C or S

SEQ ID NO: 54327 - protein, 39 aa, Artificial Sequence; identical to SEQ ID NO: 12543
  Cyclic GFR-binding peptide
  MOD_RES (6), (7), (39): Xaa is C or S

SEQ ID NO: 54328 - protein, 41 aa, Artificial Sequence; identical to SEQ ID NO: 12545
  Cyclic GFR-binding peptide
  MOD_RES (6), (7), (38), (40): Xaa is C or S

SEQ ID NO: 54329 - protein, 39 aa, Artificial Sequence; identical to SEQ ID NO: 12546
  Cyclic GFR-binding peptide
  MOD_RES (4), (5), (36), (38): Xaa is C or S

SEQ ID NO: 54330 - protein, 39 aa, Artificial Sequence; identical to SEQ ID NO: 12547
  Cyclic GFR-binding peptide
  MOD_RES (6), (7), (39): Xaa is C or S

SEQ ID NO: 54331 - protein, 24 aa, Artificial Sequence
  Cyclic GFR-binding peptide
LSPISILFIIGKTPKIYKQYEMIV

SEQ ID NO: 54332 - protein, 23 aa, Artificial Sequence
  Cyclic GFR-binding peptide
LSPISILFIVGRKPKVYKQYEMI

SEQ ID NO: 54333 - protein, 31 aa, Artificial Sequence
  Cyclic GFR-binding peptide
  MOD_RES (4), (5): Xaa is C or S
ASPXXVPQDLSPISILFIVGRTPKVYKQYEM

SEQ ID NO: 54334 - protein, 37 aa, Artificial Sequence; identical to SEQ ID NO: 12549
  Cyclic GFR-binding peptide
  MOD_RES (3), (4), (36): Xaa is C or S

SEQ ID NO: 54335 - protein, 37 aa, Artificial Sequence; identical to SEQ ID NO: 12550
  Cyclic GFR-binding peptide
  MOD_RES (6), (7): Xaa is C or S

SEQ ID NO: 54336 - protein, 31 aa, Artificial Sequence
  Cyclic GFR-binding peptide
  MOD_RES (3), (4): Xaa is C or S
PTXXVPTRLNAISILYFDSANNVVLKKYRDM

SEQ ID NO: 54337 - protein, 32 aa, Artificial Sequence; identical to SEQ ID NO: 12552
  Cyclic GFR-binding peptide
  MOD_RES (1), (1): Xaa is C or S

SEQ ID NO: 54338 - protein, 39 aa, Artificial Sequence; identical to SEQ ID NO: 12553
  Cyclic GFR-binding peptide
  MOD_RES (4), (5), (37), (39): Xaa is C or S

SEQ ID NO: 54339 - protein, 22 aa, Artificial Sequence
  Cyclic GFR-binding peptide
LSPISILFIVGRKPKVYKQYEM

SEQ ID NO: 54340 - protein, 36 aa, Artificial Sequence
  Cyclic GFR-binding peptide
  MOD_RES (6), (7): Xaa is C or S
ASASPXXVSQDLEPLPIVYYIGKTPKIEQLSNMIVK

SEQ ID NO: 54341 - protein, 26 aa, Artificial Sequence
  Cyclic GFR-binding peptide
TKLEPLTVLYYDDSSNVIEQLSNNMV

SEQ ID NO: 54342 - protein, 42 aa, Artificial Sequence; identical to SEQ ID NO: 12555
  Cyclic GFR-binding peptide
  MOD_RES (6), (7), (39), (41): Xaa is C or S

SEQ ID NO: 54343 - protein, 32 aa, Artificial Sequence; identical to SEQ ID NO: 12557
  Cyclic GFR-binding peptide
  MOD_RES (32), (32): Xaa is C or S

SEQ ID NO: 54344 - protein, 38 aa, Artificial Sequence; identical to SEQ ID NO: 12558
  Cyclic GFR-binding peptide
  MOD_RES (2), (3), (35), (37): Xaa is C or S

SEQ ID NO: 54345 - protein, 28 aa, Artificial Sequence
  Cyclic GFR-binding peptide
QLSPISVLFIDDSSNVIYKQYENMVVRA

SEQ ID NO: 54346 - protein, 30 aa, Artificial Sequence
  Cyclic GFR-binding peptide
  MOD_RES (4), (5): Xaa is C or S
PKAXXVPTELEPLTMLYYDEYDKVVEQLSN

SEQ ID NO: 54347 - protein, 35 aa, Artificial Sequence; identical to SEQ ID NO: 12563
  Cyclic GFR-binding peptide
  MOD_RES (1), (2), (34): Xaa is C or S

SEQ ID NO: 54348 - protein, 26 aa, Artificial Sequence
  Cyclic GFR-binding peptide
SPISVLFIDDSSNVIYKQYENMVVRS

SEQ ID NO: 54349 - protein, 33 aa, Artificial Sequence; identical to SEQ ID NO: 12565
  Cyclic GFR-binding peptide
  MOD_RES (2), (2): Xaa is C or S

SEQ ID NO: 54350 - protein, 39 aa, Artificial Sequence; identical to SEQ ID NO: 12566
  Cyclic GFR-binding peptide
  MOD_RES (6), (7), (38): Xaa is C or S

SEQ ID NO: 54351 - protein, 31 aa, Artificial Sequence
  Cyclic GFR-binding peptide
  MOD_RES (5), (6): Xaa is C or S
IPKAXXVPTELEPLTMLYYDEYDKVVEQLSN

SEQ ID NO: 54352 - protein, 28 aa, Artificial Sequence
  Cyclic GFR-binding peptide
TELSPISMLFIDEYDKVVYKQYEEMVVE

SEQ ID NO: 54353 - protein, 34 aa, Artificial Sequence; identical to SEQ ID NO: 12567
  Cyclic GFR-binding peptide
  MOD_RES (31), (33): Xaa is C or S

SEQ ID NO: 54354 - protein, 29 aa, Artificial Sequence
  Cyclic GFR-binding peptide
  MOD_RES (29), (29): Xaa is C or S
RLSAISILYLDSANNVVLKNYQDMVVESX

SEQ ID NO: 54355 - protein, 39 aa, Artificial Sequence; identical to SEQ ID NO: 12568
  Cyclic GFR-binding peptide
  MOD_RES (3), (4), (36), (38): Xaa is C or S

SEQ ID NO: 54356 - protein, 24 aa, Artificial Sequence
  Cyclic GFR-binding peptide
PQDLSPISILFIVGRTPKVYKQYE

SEQ ID NO: 54357 - protein, 30 aa, Artificial Sequence
  Cyclic GFR-binding peptide
  MOD_RES (1), (1): Xaa is C or S
XAPTQLEPLPVVYYDDSSNVIEQLSNNMVV

SEQ ID NO: 54358 - protein, 36 aa, Artificial Sequence; identical to SEQ ID NO: 12570
  Cyclic GFR-binding peptide
  MOD_RES (2), (3), (34), (36): Xaa is C or S

SEQ ID NO: 54359 - protein, 36 aa, Artificial Sequence
  Cyclic GFR-binding peptide
  MOD_RES (6), (7): Xaa is C or S
ASAAPXXVPQALEPLTILYYVGRKPKVEQLSNMIVR

SEQ ID NO: 54360 - protein, 31 aa, Artificial Sequence
  Cyclic GFR-binding peptide
  MOD_RES (29), (31): Xaa is C or S
ELEPLPMVYYDEYDKVVEQLSNEMVVEGXGX

SEQ ID NO: 54361 - protein, 28 aa, Artificial Sequence
  Cyclic GFR-binding peptide
  MOD_RES (2), (3): Xaa is C or S
PXXAPTQLSPISVLFIDDSSNVIYKQYE

SEQ ID NO: 54362 - protein, 27 aa, Artificial Sequence
  Cyclic GFR-binding peptide
PTKLSPISVLFIDDSSNVIYKQYENMV

SEQ ID NO: 54363 - protein, 38 aa, Artificial Sequence; identical to SEQ ID NO: 12572
  Cyclic GFR-binding peptide
  MOD_RES (5), (6), (38): Xaa is C or S

SEQ ID NO: 54364 - protein, 37 aa, Artificial Sequence; identical to SEQ ID NO: 12574
  Cyclic GFR-binding peptide
  MOD_RES (4), (5), (37): Xaa is C or S

SEQ ID NO: 54365 - protein, 35 aa, Artificial Sequence; identical to SEQ ID NO: 12575
  Cyclic GFR-binding peptide
  MOD_RES (3), (4), (35): Xaa is C or S

SEQ ID NO: 54366 - protein, 35 aa, Artificial Sequence; identical to SEQ ID NO: 12576
  Cyclic GFR-binding peptide
  MOD_RES (4), (5): Xaa is C or S

SEQ ID NO: 54367 - protein, 32 aa, Artificial Sequence; identical to SEQ ID NO: 12577
  Cyclic GFR-binding peptide
  MOD_RES (1), (32): Xaa is C or S

SEQ ID NO: 54368 - protein, 34 aa, Artificial Sequence
  Cyclic GFR-binding peptide
  MOD_RES (4), (5): Xaa is C or S
ASPXXVSQDLEPLPIVYYIGKTPKIEQLSNMIVK

SEQ ID NO: 54369 - protein, 30 aa, Artificial Sequence
  Cyclic GFR-binding peptide
  MOD_RES (1), (2): Xaa is C or S
XXVPQDLEPLPIVYYVGRTPKVEQLSNMVV

SEQ ID NO: 54370 - protein, 36 aa, Artificial Sequence; identical to SEQ ID NO: 12578
  Cyclic GFR-binding peptide
  MOD_RES (2), (3), (34), (36): Xaa is C or S

SEQ ID NO: 54371 - protein, 23 aa, Artificial Sequence
  Cyclic GFR-binding peptide
KLSPISVLFIDDSSNVIYKQYEN

SEQ ID NO: 54372 - protein, 31 aa, Artificial Sequence; identical to SEQ ID NO: 12579
  Cyclic GFR-binding peptide
  MOD_RES (31), (31): Xaa is C or S

SEQ ID NO: 54373 - protein, 37 aa, Artificial Sequence; identical to SEQ ID NO: 12580
  Cyclic GFR-binding peptide
  MOD_RES (2), (3), (35), (37): Xaa is C or S

SEQ ID NO: 54374 - protein, 31 aa, Artificial Sequence
  Cyclic GFR-binding peptide
  MOD_RES (31), (31): Xaa is C or S
PTQLEPLPVVYYDDSSNVIEQLSNNMVVRAX

SEQ ID NO: 54375 - protein, 40 aa, Artificial Sequence; identical to SEQ ID NO: 12581
  Cyclic GFR-binding peptide
  MOD_RES (4), (5), (37), (39): Xaa is C or S

SEQ ID NO: 54376 - protein, 26 aa, Artificial Sequence
  Cyclic GFR-binding peptide
SPISVLFIDDSSNVIYKQYENMVVRA

SEQ ID NO: 54377 - protein, 33 aa, Artificial Sequence
  Cyclic GFR-binding peptide
  MOD_RES (31), (33): Xaa is C or S
PTQLSPISVLFIDDSSNVIYKQYENMVVRAXGX

SEQ ID NO: 54378 - protein, 41 aa, Artificial Sequence; identical to SEQ ID NO: 12582
  Cyclic GFR-binding peptide
  MOD_RES (5), (6), (38), (40): Xaa is C or S

SEQ ID NO: 54379 - protein, 32 aa, Artificial Sequence
  Cyclic GFR-binding peptide
  MOD_RES (2), (3): Xaa is C or S
AXXVPTELSPISMLFIDEYDKVVYKQYEEMVV

SEQ ID NO: 54380 - protein, 29 aa, Artificial Sequence
  Cyclic GFR-binding peptide
  MOD_RES (29), (29): Xaa is C or S
KLSPISVLFIDDSSNVIYKQYENMVVRSX

SEQ ID NO: 54381 - protein, 30 aa, Artificial Sequence
  Cyclic GFR-binding peptide
  MOD_RES (1), (2): Xaa is C or S
XXVPTRLEPLPIVYYDSANNVVEQLSNDMV

SEQ ID NO: 54382 - protein, 35 aa, Artificial Sequence; identical to SEQ ID NO: 12585
  Cyclic GFR-binding peptide
  MOD_RES (3), (4): Xaa is C or S

SEQ ID NO: 54383 - protein, 21 aa, Artificial Sequence
  Cyclic GFR-binding peptide
EPLPMVYYDEYDKVVEQLSNE

SEQ ID NO: 54384 - protein, 28 aa, Artificial Sequence
  Cyclic GFR-binding peptide
  MOD_RES (1), (1): Xaa is C or S
XVPQALEPLTILYYVGRKPKVEQLSNMI

SEQ ID NO: 54385 - protein, 40 aa, Artificial Sequence; identical to SEQ ID NO: 12587
  Cyclic GFR-binding peptide
  MOD_RES (4), (5), (37), (39): Xaa is C or S

SEQ ID NO: 54386 - protein, 38 aa, Artificial Sequence; identical to SEQ ID NO: 12588
  Cyclic GFR-binding peptide
  MOD_RES (2), (3), (35), (37): Xaa is C or S

SEQ ID NO: 54387 - protein, 29 aa, Artificial Sequence
  Cyclic GFR-binding peptide
  MOD_RES (3), (4): Xaa is C or S
KAXXVPTELEPLTMLYYDEYDKVVEQLSN

SEQ ID NO: 54388 - protein, 36 aa, Artificial Sequence; identical to SEQ ID NO: 12592
  Cyclic GFR-binding peptide
  MOD_RES (3), (4), (36): Xaa is C or S

SEQ ID NO: 54389 - protein, 34 aa, Artificial Sequence
  Cyclic GFR-binding peptide
  MOD_RES (6), (7): Xaa is C or S
SIPKAXXVPTELEPLPMVYYDEYDKVVEQLSNEM

SEQ ID NO: 54390 - protein, 40 aa, Artificial Sequence; identical to SEQ ID NO: 12594
  Cyclic GFR-binding peptide
  MOD_RES (4), (5), (37), (39): Xaa is C or S

SEQ ID NO: 54391 - protein, 35 aa, Artificial Sequence; identical to SEQ ID NO: 12595
  Cyclic GFR-binding peptide
  MOD_RES (1), (2), (34): Xaa is C or S

SEQ ID NO: 54392 - protein, 29 aa, Artificial Sequence
  Cyclic GFR-binding peptide
  MOD_RES (28), (28): Xaa is C or S
LEPLTILYYDSANNVVEQLSNDMVVESXG

SEQ ID NO: 54393 - protein, 25 aa, Artificial Sequence
  Cyclic GFR-binding peptide
SPISMLFIDEYDKVVYKQYEEMVVE

SEQ ID NO: 54394 - protein, 39 aa, Artificial Sequence; identical to SEQ ID NO: 12596
  Cyclic GFR-binding peptide
  MOD_RES (4), (5), (37), (39): Xaa is C or S

SEQ ID NO: 54395 - protein, 28 aa, Artificial Sequence
  Cyclic GFR-binding peptide
  MOD_RES (1), (1): Xaa is C or S
XVPTELEPLPMVYYDENEKVVEQLSNDM

SEQ ID NO: 54396 - protein, 32 aa, Artificial Sequence
  Cyclic GFR-binding peptide
  MOD_RES (30), (32): Xaa is C or S
TKLEPLPVVYYDDSSNVIEQLSNNMVVRSXGX

SEQ ID NO: 54397 - protein, 37 aa, Artificial Sequence; identical to SEQ ID NO: 12598
  Cyclic GFR-binding peptide
  MOD_RES (5), (6): Xaa is C or S

SEQ ID NO: 54398 - protein, 29 aa, Artificial Sequence
  Cyclic GFR-binding peptide
  MOD_RES (1), (2): Xaa is C or S
XXVPTRLEPLTILYYDSANNVVEQLSNDM

SEQ ID NO: 54399 - protein, 28 aa, Artificial Sequence
  Cyclic GFR-binding peptide
PTQLSPISVLFIDDSSNVIYKQYENMVV

SEQ ID NO: 54400 - protein, 25 aa, Artificial Sequence
  Cyclic GFR-binding peptide
DLSPISILFIIGKTPKIYKQYEMIV

SEQ ID NO: 54401 - protein, 27 aa, Artificial Sequence
  Cyclic GFR-binding peptide
APTKLEPLPVVYYDDSSNVIEQLSNNM

SEQ ID NO: 54402 - protein, 29 aa, Artificial Sequence
  Cyclic GFR-binding peptide
  MOD_RES (28), (28): Xaa is C or S
LSPISVLFIDDSSNVIYKQYENMVVRAXG

SEQ ID NO: 54403 - protein, 32 aa, Artificial Sequence; identical to SEQ ID NO: 12603
  Cyclic GFR-binding peptide
  MOD_RES (1), (2): Xaa is C or S

SEQ ID NO: 54404 - protein, 32 aa, Artificial Sequence; identical to SEQ ID NO: 12604
  Cyclic GFR-binding peptide
  MOD_RES (31), (31): Xaa is C or S

SEQ ID NO: 54405 - protein, 36 aa, Artificial Sequence; identical to SEQ ID NO: 12605
  Cyclic GFR-binding peptide
  MOD_RES (2), (3), (34), (36): Xaa is C or S

SEQ ID NO: 54406 - protein, 29 aa, Artificial Sequence
  Cyclic GFR-binding peptide
  MOD_RES (26), (28): Xaa is C or S
SPISILFIIGKTPKIYKQYEMIVKSXKXS

SEQ ID NO: 54407 - protein, 39 aa, Artificial Sequence; identical to SEQ ID NO: 12607
  Cyclic GFR-binding peptide
  MOD_RES (6), (7), (39): Xaa is C or S
